United States Patent Application Publication US 2005/0255487 A1 - sequence listing, part 83

SEQ ID NO: 2281378 - RNA, 19 nt, Homo sapiens
  misc_RNA (1)...(19): siRNA sense strand
cauacuaccaggaaaauua

SEQ ID NO: 2281379 - RNA, 19 nt, Homo sapiens
  misc_RNA (1)...(19): siRNA sense strand
cguuucagcuccaaaguca

SEQ ID NO: 2281380 - RNA, 19 nt, Homo sapiens
  misc_RNA (1)...(19): siRNA sense strand
cgaaaagccaauaaaucua

SEQ ID NO: 2281381 - RNA, 19 nt, Homo sapiens
  misc_RNA (1)...(19): siRNA sense strand
gaaaauaauaugucagcca

SEQ ID NO: 2281382 - RNA, 19 nt, Homo sapiens
  misc_RNA (1)...(19): siRNA sense strand
caucgagcccauuaugaaa

SEQ ID NO: 2281383 - RNA, 19 nt, Homo sapiens
  misc_RNA (1)...(19): siRNA sense strand
ccuuaauaugucacaguuu

SEQ ID NO: 2281384 - RNA, 19 nt, Homo sapiens
  misc_RNA (1)...(19): siRNA sense strand
ccauuggucugcaggacau

SEQ ID NO: 2281385 - RNA, 19 nt, Homo sapiens
  misc_RNA (1)...(19): siRNA sense strand
ucuccuagauccaguguca

SEQ ID NO: 2281386 - RNA, 19 nt, Homo sapiens
  misc_RNA (1)...(19): siRNA sense strand
ggacaaugugaacugaaaa

SEQ ID NO: 2281387 - RNA, 19 nt, Homo sapiens
  misc_RNA (1)...(19): siRNA sense strand
gcuccaucccacaaacaua

SEQ ID NO: 2281388 - RNA, 19 nt, Homo sapiens
  misc_RNA (1)...(19): siRNA sense strand
acauaugcauccaugguga

SEQ ID NO: 2281389 - RNA, 19 nt, Homo sapiens
  misc_RNA (1)...(19): siRNA sense strand
gugcccaaguauucaaauu

SEQ ID NO: 2281390 - RNA, 19 nt, Homo sapiens
  misc_RNA (1)...(19): siRNA sense strand
acagaagauacguggcuca

SEQ ID NO: 2281391 - RNA, 19 nt, Homo sapiens
  misc_RNA (1)...(19): siRNA sense strand
aguacuguguagagacuga

SEQ ID NO: 2281392 - RNA, 19 nt, Homo sapiens
  misc_RNA (1)...(19): siRNA sense strand
ccucucaaaacaaggaaaa

SEQ ID NO: 2281393 - RNA, 19 nt, Homo sapiens
  misc_RNA (1)...(19): siRNA sense strand
gaaagauucauguggugau

SEQ ID NO: 2281394 - RNA, 19 nt, Homo sapiens
  misc_RNA (1)...(19): siRNA sense strand
gcaucaacaguauggacuu

SEQ ID NO: 2281395 - RNA, 19 nt, Homo sapiens
  misc_RNA (1)...(19): siRNA sense strand
acuccgcaauucagauaua

SEQ ID NO: 2281396 - RNA, 19 nt, Homo sapiens
  misc_RNA (1)...(19): siRNA sense strand
aagcaagaacacagagaag

SEQ ID NO: 2281397 - RNA, 19 nt, Homo sapiens
  misc_RNA (1)...(19): siRNA sense strand
gaugcaucuucuugugaau

SEQ ID NO: 2281398 - RNA, 19 nt, Homo sapiens
  misc_RNA (1)...(19): siRNA sense strand
ggagaagaaacuuggcauc

SEQ ID NO: 2281399 - RNA, 19 nt, Homo sapiens
  misc_RNA (1)...(19): siRNA sense strand
acugauauuggcagaaaga

SEQ ID NO: 2281400 - RNA, 19 nt, Homo sapiens
  misc_RNA (1)...(19): siRNA sense strand
acugaaaauagaagugcaa

SEQ ID NO: 2281401 - RNA, 19 nt, Homo sapiens
  misc_RNA (1)...(19): siRNA sense strand
aauagaagugcaaccuaaa

SEQ ID NO: 2281402 - RNA, 19 nt, Homo sapiens
  misc_RNA (1)...(19): siRNA sense strand
cuccugggcuauaacgaaa

SEQ ID NO: 2281403 - RNA, 19 nt, Homo sapiens
  misc_RNA (1)...(19): siRNA sense strand
ugccauacuaccaggaaaa

SEQ ID NO: 2281404 - RNA, 19 nt, Homo sapiens
  misc_RNA (1)...(19): siRNA sense strand
aauuagaugcacaugaaga

SEQ ID NO: 2281405 - RNA, 19 nt, Homo sapiens
  misc_RNA (1)...(19): siRNA sense strand
caguauugauugugcaggu

SEQ ID NO: 2281406 - RNA, 19 nt, Homo sapiens
  misc_RNA (1)...(19): siRNA sense strand
ccgcaauucagauauagaa

SEQ ID NO: 2281407 - RNA, 19 nt, Homo sapiens
  misc_RNA (1)...(19): siRNA sense strand
uagaguacgacuuguguuu

SEQ ID NO: 2281408 - RNA, 19 nt, Homo sapiens
  misc_RNA (1)...(19): siRNA sense strand
ugauauuggcagaaagaau

SEQ ID NO: 2281409 - RNA, 19 nt, Homo sapiens
  misc_RNA (1)...(19): siRNA sense strand
agaugagaguguuaguaaa

SEQ ID NO: 2281410 - RNA, 19 nt, Homo sapiens
  misc_RNA (1)...(19): siRNA sense strand
acaaauguuuauugggaca

SEQ ID NO: 2281411 - RNA, 19 nt, Homo sapiens
  misc_RNA (1)...(19): siRNA sense strand
agguagaagggaagauaau

SEQ ID NO: 2281412 - RNA, 19 nt, Homo sapiens
  misc_RNA (1)...(19): siRNA sense strand
cugcagaucuugagccaga

SEQ ID NO: 2281413 - RNA, 19 nt, Homo sapiens
  misc_RNA (1)...(19): siRNA sense strand
uugugaagcuccugggcua

SEQ ID NO: 2281414 - RNA, 19 nt, Homo sapiens
  misc_RNA (1)...(19): siRNA sense strand
cugcaagccaagagauaau

SEQ ID NO: 2281415 - RNA, 19 nt, Homo sapiens
  misc_RNA (1)...(19): siRNA sense strand
gcucagacccagaggccuu

SEQ ID NO: 2281416 - RNA, 19 nt, Homo sapiens
  misc_RNA (1)...(19): siRNA sense strand
agugggagguagaagggaa

SEQ ID NO: 2281417 - RNA, 19 nt, Homo sapiens
  misc_RNA (1)...(19): siRNA sense strand
gcauuaaaccugaaccaga

SEQ ID NO: 2281418 - RNA, 19 nt, Homo sapiens
  misc_RNA (1)...(19): siRNA sense strand
gaaugaagcugcagcccga

SEQ ID NO: 2281419 - RNA, 19 nt, Homo sapiens
  misc_RNA (1)...(19): siRNA sense strand
gggaagugugacagaagau

SEQ ID NO: 2281420 - RNA, 19 nt, Homo sapiens
  misc_RNA (1)...(19): siRNA sense strand
guagaagggaagauaauca

SEQ ID NO: 2281421 - RNA, 19 nt, Homo sapiens
  misc_RNA (1)...(19): siRNA sense strand
ggaagauaaucagggaaaa

SEQ ID NO: 2281422 - RNA, 19 nt, Homo sapiens
  misc_RNA (1)...(19): siRNA sense strand
uguagagaugagaguguua

SEQ ID NO: 2281423 - RNA, 19 nt, Homo sapiens
  misc_RNA (1)...(19): siRNA sense strand
cuacaaauguuuauuggga

SEQ ID NO: 2281424 - RNA, 19 nt, Homo sapiens
  misc_RNA (1)...(19): siRNA sense strand
ugcaauggcaagaggaaaa

SEQ ID NO: 2281425 - RNA, 19 nt, Homo sapiens
  misc_RNA (1)...(19): siRNA sense strand
cugccauacuaccaggaaa

SEQ ID NO: 2281426 - RNA, 19 nt, Homo sapiens
  misc_RNA (1)...(19): siRNA sense strand
agaaacugauauuggcaga

SEQ ID NO: 2281427 - RNA, 19 nt, Homo sapiens
  misc_RNA (1)...(19): siRNA sense strand
agaacacagagaagagauu

SEQ ID NO: 2281428 - RNA, 19 nt, Homo sapiens
  misc_RNA (1)...(19): siRNA sense strand
uguaaauggaggucaugaa

SEQ ID NO: 2281429 - RNA, 19 nt, Homo sapiens
  misc_RNA (1)...(19): siRNA sense strand
cagauauagaacuucgaaa

SEQ ID NO: 2281430 - RNA, 19 nt, Homo sapiens
  misc_RNA (1)...(19): siRNA sense strand
gguugugacuggaucuaau

SEQ ID NO: 2281431 - RNA, 19 nt, Homo sapiens
  misc_RNA (1)...(19): siRNA sense strand
cgaaaaggagaaacugaua

SEQ ID NO: 2281432 - RNA, 19 nt, Homo sapiens
  misc_RNA (1)...(19): siRNA sense strand
auugagaaguacaguauca

SEQ ID NO: 2281433 - RNA, 19 nt, Homo sapiens
  misc_RNA (1)...(19): siRNA sense strand
gagaaguacaguaucaaca

SEQ ID NO: 2281434 - RNA, 19 nt, Homo sapiens
  misc_RNA (1)...(19): siRNA sense strand
ucacauuguccuugaaguu

SEQ ID NO: 2281435 - RNA, 19 nt, Homo sapiens
  misc_RNA (1)...(19): siRNA sense strand
gagcauuaaaccugaacca

SEQ ID NO: 2281436 - RNA, 19 nt, Homo sapiens
  misc_RNA (1)...(19): siRNA sense strand
acgacgagcucgacuucaa

SEQ ID NO: 2281437 - RNA, 19 nt, Homo sapiens
  misc_RNA (1)...(19): siRNA sense strand
ccuugaaguuccuccauau

SEQ ID NO: 2281438 - RNA, 19 nt, Homo sapiens
  misc_RNA (1)...(19): siRNA sense strand
uggaaaggccuucuagaga

SEQ ID NO: 2281439 - RNA, 19 nt, Homo sapiens
  misc_RNA (1)...(19): siRNA sense strand
cauacuaccaggaaaauua

SEQ ID NO: 2281440 - RNA, 19 nt, Homo sapiens
  misc_RNA (1)...(19): siRNA sense strand
cguuucagcuccaaaguca

SEQ ID NO: 2281441 - RNA, 19 nt, Homo sapiens
  misc_RNA (1)...(19): siRNA sense strand
cgaaaagccaauaaaucua

SEQ ID NO: 2281442 - RNA, 19 nt, Homo sapiens
  misc_RNA (1)...(19): siRNA sense strand
gaaaauaauaugucagcca

SEQ ID NO: 2281443 - RNA, 19 nt, Homo sapiens
  misc_RNA (1)...(19): siRNA sense strand
caucgagcccauuaugaaa

SEQ ID NO: 2281444 - RNA, 19 nt, Homo sapiens
  misc_RNA (1)...(19): siRNA sense strand
ccuuaauaugucacaguuu

SEQ ID NO: 2281445 - RNA, 19 nt, Homo sapiens
  misc_RNA (1)...(19): siRNA sense strand
ccauuggucugcaggacau

SEQ ID NO: 2281446 - RNA, 19 nt, Homo sapiens
  misc_RNA (1)...(19): siRNA sense strand
ucuccuagauccaguguca

SEQ ID NO: 2281447 - RNA, 19 nt, Homo sapiens
  misc_RNA (1)...(19): siRNA sense strand
ggacaaugugaacugaaaa

SEQ ID NO: 2281448 - RNA, 19 nt, Homo sapiens
  misc_RNA (1)...(19): siRNA sense strand
gcuccaucccacaaacaua

SEQ ID NO: 2281449 - RNA, 19 nt, Homo sapiens
  misc_RNA (1)...(19): siRNA sense strand
acauaugcauccaugguga

SEQ ID NO: 2281450 - RNA, 19 nt, Homo sapiens
  misc_RNA (1)...(19): siRNA sense strand
gugcccaaguauucaaauu

SEQ ID NO: 2281451 - RNA, 19 nt, Homo sapiens
  misc_RNA (1)...(19): siRNA sense strand
acagaagauacguggcuca

SEQ ID NO: 2281452 - RNA, 19 nt, Homo sapiens
  misc_RNA (1)...(19): siRNA sense strand
aguacuguguagagacuga

SEQ ID NO: 2281453 - RNA, 19 nt, Homo sapiens
  misc_RNA (1)...(19): siRNA sense strand
ccucucaaaacaaggaaaa

SEQ ID NO: 2281454 - RNA, 19 nt, Homo sapiens
  misc_RNA (1)...(19): siRNA sense strand
gaaagauucauguggugau

SEQ ID NO: 2281455 - RNA, 19 nt, Homo sapiens
  misc_RNA (1)...(19): siRNA sense strand
gcaucaacaguauggacuu

SEQ ID NO: 2281456 - RNA, 19 nt, Homo sapiens
  misc_RNA (1)...(19): siRNA sense strand
acuccgcaauucagauaua

SEQ ID NO: 2281457 - RNA, 19 nt, Homo sapiens
  misc_RNA (1)...(19): siRNA sense strand
aagcaagaacacagagaag

SEQ ID NO: 2281458 - RNA, 19 nt, Homo sapiens
  misc_RNA (1)...(19): siRNA sense strand
gaugcaucuucuugugaau

SEQ ID NO: 2281459 - RNA, 19 nt, Homo sapiens
  misc_RNA (1)...(19): siRNA sense strand
ggagaagaaacuuggcauc

SEQ ID NO: 2281460 - RNA, 19 nt, Homo sapiens
  misc_RNA (1)...(19): siRNA sense strand
acugauauuggcagaaaga

SEQ ID NO: 2281461 - RNA, 19 nt, Homo sapiens
  misc_RNA (1)...(19): siRNA sense strand
acugaaaauagaagugcaa

SEQ ID NO: 2281462 - RNA, 19 nt, Homo sapiens
  misc_RNA (1)...(19): siRNA sense strand
aauagaagugcaaccuaaa

SEQ ID NO: 2281463 - RNA, 19 nt, Homo sapiens
  misc_RNA (1)...(19): siRNA sense strand
cuccugggcuauaacgaaa

SEQ ID NO: 2281464 - RNA, 19 nt, Homo sapiens
  misc_RNA (1)...(19): siRNA sense strand
ugccauacuaccaggaaaa

SEQ ID NO: 2281465 - RNA, 19 nt, Homo sapiens
  misc_RNA (1)...(19): siRNA sense strand
aauuagaugcacaugaaga

SEQ ID NO: 2281466 - RNA, 19 nt, Homo sapiens
  misc_RNA (1)...(19): siRNA sense strand
caguauugauugugcaggu

SEQ ID NO: 2281467 - RNA, 19 nt, Homo sapiens
  misc_RNA (1)...(19): siRNA sense strand
ccgcaauucagauauagaa

SEQ ID NO: 2281468 - RNA, 19 nt, Homo sapiens
  misc_RNA (1)...(19): siRNA sense strand
uagaguacgacuuguguuu

SEQ ID NO: 2281469 - RNA, 19 nt, Homo sapiens
  misc_RNA (1)...(19): siRNA sense strand
ugauauuggcagaaagaau

SEQ ID NO: 2281470 - RNA, 19 nt, Homo sapiens
  misc_RNA (1)...(19): siRNA sense strand
agaugagaguguuaguaaa

SEQ ID NO: 2281471 - RNA, 19 nt, Homo sapiens
  misc_RNA (1)...(19): siRNA sense strand
acaaauguuuauugggaca

SEQ ID NO: 2281472 - RNA, 19 nt, Homo sapiens
  misc_RNA (1)...(19): siRNA sense strand
agguagaagggaagauaau

SEQ ID NO: 2281473 - RNA, 19 nt, Homo sapiens
  misc_RNA (1)...(19): siRNA sense strand
cugcagaucuugagccaga

SEQ ID NO: 2281474 - RNA, 19 nt, Homo sapiens
  misc_RNA (1)...(19): siRNA sense strand
uugugaagcuccugggcua

SEQ ID NO: 2281475 - RNA, 19 nt, Homo sapiens
  misc_RNA (1)...(19): siRNA sense strand
cugcaagccaagagauaau

SEQ ID NO: 2281476 - RNA, 19 nt, Homo sapiens
  misc_RNA (1)...(19): siRNA sense strand
gcucagacccagaggccuu

SEQ ID NO: 2281477 - RNA, 19 nt, Homo sapiens
  misc_RNA (1)...(19): siRNA sense strand
agugggagguagaagggaa

SEQ ID NO: 2281478 - RNA, 19 nt, Homo sapiens
  misc_RNA (1)...(19): siRNA sense strand
gcauuaaaccugaaccaga

SEQ ID NO: 2281479 - RNA, 19 nt, Homo sapiens
  misc_RNA (1)...(19): siRNA sense strand
gaaugaagcugcagcccga

SEQ ID NO: 2281480 - RNA, 19 nt, Homo sapiens
  misc_RNA (1)...(19): siRNA sense strand
gggaagugugacagaagau

SEQ ID NO: 2281481 - RNA, 19 nt, Homo sapiens
  misc_RNA (1)...(19): siRNA sense strand
guagaagggaagauaauca

SEQ ID NO: 2281482 - RNA, 19 nt, Homo sapiens
  misc_RNA (1)...(19): siRNA sense strand
ggaagauaaucagggaaaa

SEQ ID NO: 2281483 - RNA, 19 nt, Homo sapiens
  misc_RNA (1)...(19): siRNA sense strand
uguagagaugagaguguua

SEQ ID NO: 2281484 - RNA, 19 nt, Homo sapiens
  misc_RNA (1)...(19): siRNA sense strand
cuacaaauguuuauuggga

SEQ ID NO: 2281485 - RNA, 19 nt, Homo sapiens
  misc_RNA (1)...(19): siRNA sense strand
ugcaauggcaagaggaaaa

SEQ ID NO: 2281486 - RNA, 19 nt, Homo sapiens
  misc_RNA (1)...(19): siRNA sense strand
cugccauacuaccaggaaa

SEQ ID NO: 2281487 - RNA, 19 nt, Homo sapiens
  misc_RNA (1)...(19): siRNA sense strand
agaaacugauauuggcaga

SEQ ID NO: 2281488 - RNA, 19 nt, Homo sapiens
  misc_RNA (1)...(19): siRNA sense strand
agaacacagagaagagauu

SEQ ID NO: 2281489 - RNA, 19 nt, Homo sapiens
  misc_RNA (1)...(19): siRNA sense strand
uguaaauggaggucaugaa

SEQ ID NO: 2281490 - RNA, 19 nt, Homo sapiens
  misc_RNA (1)...(19): siRNA sense strand
cagauauagaacuucgaaa

SEQ ID NO: 2281491 - RNA, 19 nt, Homo sapiens
  misc_RNA (1)...(19): siRNA sense strand
gguugugacuggaucuaau

SEQ ID NO: 2281492 - RNA, 19 nt, Homo sapiens
  misc_RNA (1)...(19): siRNA sense strand
cgaaaaggagaaacugaua

SEQ ID NO: 2281493 - RNA, 19 nt, Homo sapiens
  misc_RNA (1)...(19): siRNA sense strand
auugagaaguacaguauca

SEQ ID NO: 2281494 - RNA, 19 nt, Homo sapiens
  misc_RNA (1)...(19): siRNA sense strand
gagaaguacaguaucaaca

SEQ ID NO: 2281495 - RNA, 19 nt, Homo sapiens
  misc_RNA (1)...(19): siRNA sense strand
ucacauuguccuugaaguu

SEQ ID NO: 2281496 - RNA, 19 nt, Homo sapiens
  misc_RNA (1)...(19): siRNA sense strand
gagcauuaaaccugaacca

SEQ ID NO: 2281497 - RNA, 19 nt, Homo sapiens
  misc_RNA (1)...(19): siRNA sense strand
acgacgagcucgacuucaa

SEQ ID NO: 2281498 - RNA, 19 nt, Homo sapiens
  misc_RNA (1)...(19): siRNA sense strand
ccuugaaguuccuccauau

SEQ ID NO: 2281499 - RNA, 19 nt, Homo sapiens
  misc_RNA (1)...(19): siRNA sense strand
uggaaaggccuucuagaga

SEQ ID NO: 2281500 - RNA, 19 nt, Homo sapiens
  misc_RNA (1)...(19): siRNA sense strand
cauacuaccaggaaaauua

SEQ ID NO: 2281501 - RNA, 19 nt, Homo sapiens
  misc_RNA (1)...(19): siRNA sense strand
cguuucagcuccaaaguca

SEQ ID NO: 2281502 - RNA, 19 nt, Homo sapiens
  misc_RNA (1)...(19): siRNA sense strand
cgaaaagccaauaaaucua

SEQ ID NO: 2281503 - RNA, 19 nt, Homo sapiens
  misc_RNA (1)...(19): siRNA sense strand
gaaaauaauaugucagcca

SEQ ID NO: 2281504 - RNA, 19 nt, Homo sapiens
  misc_RNA (1)...(19): siRNA sense strand
caucgagcccauuaugaaa

SEQ ID NO: 2281505 - RNA, 19 nt, Homo sapiens
  misc_RNA (1)...(19): siRNA sense strand
ccuuaauaugucacaguuu

SEQ ID NO: 2281506 - RNA, 19 nt, Homo sapiens
  misc_RNA (1)...(19): siRNA sense strand
ccauuggucugcaggacau

SEQ ID NO: 2281507 - RNA, 19 nt, Homo sapiens
  misc_RNA (1)...(19): siRNA sense strand
ucuccuagauccaguguca

SEQ ID NO: 2281508 - RNA, 19 nt, Homo sapiens
  misc_RNA (1)...(19): siRNA sense strand
ggacaaugugaacugaaaa

SEQ ID NO: 2281509 - RNA, 19 nt, Homo sapiens
  misc_RNA (1)...(19): siRNA sense strand
gcuccaucccacaaacaua

SEQ ID NO: 2281510 - RNA, 19 nt, Homo sapiens
  misc_RNA (1)...(19): siRNA sense strand
acauaugcauccaugguga

SEQ ID NO: 2281511 - RNA, 19 nt, Homo sapiens
  misc_RNA (1)...(19): siRNA sense strand
gugcccaaguauucaaauu

SEQ ID NO: 2281512 - RNA, 19 nt, Homo sapiens
  misc_RNA (1)...(19): siRNA sense strand
acagaagauacguggcuca

SEQ ID NO: 2281513 - RNA, 19 nt, Homo sapiens
  misc_RNA (1)...(19): siRNA sense strand
aguacuguguagagacuga

SEQ ID NO: 2281514 - RNA, 19 nt, Homo sapiens
  misc_RNA (1)...(19): siRNA sense strand
ccucucaaaacaaggaaaa

SEQ ID NO: 2281515 - RNA, 19 nt, Homo sapiens
  misc_RNA (1)...(19): siRNA sense strand
gaaagauucauguggugau

SEQ ID NO: 2281516 - RNA, 19 nt, Homo sapiens
  misc_RNA (1)...(19): siRNA sense strand
gcaucaacaguauggacuu

SEQ ID NO: 2281517 - RNA, 19 nt, Homo sapiens
  misc_RNA (1)...(19): siRNA sense strand
acuccgcaauucagauaua

SEQ ID NO: 2281518 - RNA, 19 nt, Homo sapiens
  misc_RNA (1)...(19): siRNA sense strand
aagcaagaacacagagaag

SEQ ID NO: 2281519 - RNA, 19 nt, Homo sapiens
  misc_RNA (1)...(19): siRNA sense strand
gaugcaucuucuugugaau

SEQ ID NO: 2281520 - RNA, 19 nt, Homo sapiens
  misc_RNA (1)...(19): siRNA sense strand
ggagaagaaacuuggcauc

SEQ ID NO: 2281521 - RNA, 19 nt, Homo sapiens
  misc_RNA (1)...(19): siRNA sense strand
acugauauuggcagaaaga

SEQ ID NO: 2281522 - RNA, 19 nt, Homo sapiens
  misc_RNA (1)...(19): siRNA sense strand
acugaaaauagaagugcaa

SEQ ID NO: 2281523 - RNA, 19 nt, Homo sapiens
  misc_RNA (1)...(19): siRNA sense strand
aauagaagugcaaccuaaa

SEQ ID NO: 2281524 - RNA, 19 nt, Homo sapiens
  misc_RNA (1)...(19): siRNA sense strand
cuccugggcuauaacgaaa

SEQ ID NO: 2281525 - RNA, 19 nt, Homo sapiens
  misc_RNA (1)...(19): siRNA sense strand
ugccauacuaccaggaaaa

SEQ ID NO: 2281526 - RNA, 19 nt, Homo sapiens
  misc_RNA (1)...(19): siRNA sense strand
aauuagaugcacaugaaga

SEQ ID NO: 2281527 - RNA, 19 nt, Homo sapiens
  misc_RNA (1)...(19): siRNA sense strand
caguauugauugugcaggu

SEQ ID NO: 2281528 - RNA, 19 nt, Homo sapiens
  misc_RNA (1)...(19): siRNA sense strand
ccgcaauucagauauagaa

SEQ ID NO: 2281529 - RNA, 19 nt, Homo sapiens
  misc_RNA (1)...(19): siRNA sense strand
uagaguacgacuuguguuu

SEQ ID NO: 2281530 - RNA, 19 nt, Homo sapiens
  misc_RNA (1)...(19): siRNA sense strand
gggaaggagcgguggaagu

SEQ ID NO: 2281531 - RNA, 19 nt, Homo sapiens
  misc_RNA (1)...(19): siRNA sense strand
aggcagaaguugaugagga

SEQ ID NO: 2281532 - RNA, 19 nt, Homo sapiens
  misc_RNA (1)...(19): siRNA sense strand
cgauaaugcgaggaagaua

SEQ ID NO: 2281533 - RNA, 19 nt, Homo sapiens
  misc_RNA (1)...(19): siRNA sense strand
accaaggaggagaggguaa

SEQ ID NO: 2281534 - RNA, 19 nt, Homo sapiens
  misc_RNA (1)...(19): siRNA sense strand
gggaguaggagcaggagga

SEQ ID NO: 2281535 - RNA, 19 nt, Homo sapiens
  misc_RNA (1)...(19): siRNA sense strand
gcucagagaccacgggcuu

SEQ ID NO: 2281536 - RNA, 19 nt, Homo sapiens
  misc_RNA (1)...(19): siRNA sense strand
cugcaugccuggauggaca

SEQ ID NO: 2281537 - RNA, 19 nt, Homo sapiens
  misc_RNA (1)...(19): siRNA sense strand
uguaaggaccagaaagaca

SEQ ID NO: 2281538 - RNA, 19 nt, Homo sapiens
  misc_RNA (1)...(19): siRNA sense strand
ggguaaggaaggaucguga

SEQ ID NO: 2281539 - RNA, 19 nt, Homo sapiens
  misc_RNA (1)...(19): siRNA sense strand
ggccagagugugaggcaga

SEQ ID NO: 2281540 - RNA, 19 nt, Homo sapiens
  misc_RNA (1)...(19): siRNA sense strand
ccagcugaugccagagaaa

SEQ ID NO: 2281541 - RNA, 19 nt, Homo sapiens
  misc_RNA (1)...(19): siRNA sense strand
aggguaggacucuggguaa

SEQ ID NO: 2281542 - RNA, 19 nt, Homo sapiens
  misc_RNA (1)...(19): siRNA sense strand
gcccauaaaccaaggagga

SEQ ID NO: 2281543 - RNA, 19 nt, Homo sapiens
  misc_RNA (1)...(19): siRNA sense strand
agccaaaggcagaaguuga

SEQ ID NO: 2281544 - RNA, 19 nt, Homo sapiens
  misc_RNA (1)...(19): siRNA sense strand
ccauaaaccaaggaggaga

SEQ ID NO: 2281545 - RNA, 19 nt, Homo sapiens
  misc_RNA (1)...(19): siRNA sense strand
ggacaagggaccugccagu

SEQ ID NO: 2281546 - RNA, 19 nt, Homo sapiens
  misc_RNA (1)...(19): siRNA sense strand
ccaugugaguccaggccuu

SEQ ID NO: 2281547 - RNA, 19 nt, Homo sapiens
  misc_RNA (1)...(19): siRNA sense strand
gggcugcugccgugaacaa

SEQ ID NO: 2281548 - RNA, 19 nt, Homo sapiens
  misc_RNA (1)...(19): siRNA sense strand
agaacugauugcagcccaa

SEQ ID NO: 2281549 - RNA, 19 nt, Homo sapiens
  misc_RNA (1)...(19): siRNA sense strand
cgguggaagaccugguuga

SEQ ID NO: 2281550 - RNA, 19 nt, Homo sapiens
  misc_RNA (1)...(19): siRNA sense strand
gggcagaaguggagauggg

SEQ ID NO: 2281551 - RNA, 19 nt, Homo sapiens
  misc_RNA (1)...(19): siRNA sense strand
aaaccaaggaggagagggu

SEQ ID NO: 2281552 - RNA, 19 nt, Homo sapiens
  misc_RNA (1)...(19): siRNA sense strand
accagaaagacaaggccaa

SEQ ID NO: 2281553 - RNA, 19 nt, Homo sapiens
  misc_RNA (1)...(19): siRNA sense strand
ugcgauaaugcgaggaaga

SEQ ID NO: 2281554 - RNA, 19 nt, Homo sapiens
  misc_RNA (1)...(19): siRNA sense strand
gucaaacagagguggauga

SEQ ID NO: 2281555 - RNA, 19 nt, Homo sapiens
  misc_RNA (1)...(19): siRNA sense strand
cagcauuggucucaaggca

SEQ ID NO: 2281556 - RNA, 19 nt, Homo sapiens
  misc_RNA (1)...(19): siRNA sense strand
ggugagagaugccaggcca

SEQ ID NO: 2281557 - RNA, 19 nt, Homo sapiens
  misc_RNA (1)...(19): siRNA sense strand
gugagagaugccaggccaa

SEQ ID NO: 2281558 - RNA, 19 nt, Homo sapiens
  misc_RNA (1)...(19): siRNA sense strand
ggacaggugagcagugcca

SEQ ID NO: 2281559 - RNA, 19 nt, Homo sapiens
  misc_RNA (1)...(19): siRNA sense strand
agcugaugccagagaaaga

SEQ ID NO: 2281560 - RNA, 19 nt, Homo sapiens
  misc_RNA (1)...(19): siRNA sense strand
aaacagagguggaugagug

SEQ ID NO: 2281561 - RNA, 19 nt, Homo sapiens
  misc_RNA (1)...(19): siRNA sense strand
uggaugagugccugaguga

SEQ ID NO: 2281562 - RNA, 19 nt, Homo sapiens
  misc_RNA (1)...(19): siRNA sense strand
gaucgugauggcagggaca

SEQ ID NO: 2281563 - RNA, 19 nt, Homo sapiens
  misc_RNA (1)...(19): siRNA sense strand
gggccaugccugugaacgu

SEQ ID NO: 2281564 - RNA, 19 nt, Homo sapiens
  misc_RNA (1)...(19): siRNA sense strand
ggcccaacccugcgauaau

SEQ ID NO: 2281565 - RNA, 19 nt, Homo sapiens
  misc_RNA (1)...(19): siRNA sense strand
aagauguggaugaguguga

SEQ ID NO: 2281566 - RNA, 19 nt, Homo sapiens
  misc_RNA (1)...(19): siRNA sense strand
cacugaagccaaaggcaga

SEQ ID NO: 2281567 - RNA, 19 nt, Homo sapiens
  misc_RNA (1)...(19): siRNA sense strand
aagaaaugcccauaaacca

SEQ ID NO: 2281568 - RNA, 19 nt, Homo sapiens
  misc_RNA (1)...(19): siRNA sense strand
gugagggagacguggacga

SEQ ID NO: 2281569 - RNA, 19 nt, Homo sapiens
  misc_RNA (1)...(19): siRNA sense strand
gauaaagaugcccaggaca

SEQ ID NO: 2281570 - RNA, 19 nt, Homo sapiens
  misc_RNA (1)...(19): siRNA sense strand
cgaagauguggaugagugu

SEQ ID NO: 2281571 - RNA, 19 nt, Homo sapiens
  misc_RNA (1)...(19): siRNA sense strand
cccaagucccugugaacau

SEQ ID NO: 2281572 - RNA, 19 nt, Homo sapiens
  misc_RNA (1)...(19): siRNA sense strand
cccgaugugaggaggauau

SEQ ID NO: 2281573 - RNA, 19 nt, Homo sapiens
  misc_RNA (1)...(19): siRNA sense strand
caaaggaacucgaugcuug

SEQ ID NO: 2281574 - RNA, 19 nt, Homo sapiens
  misc_RNA (1)...(19): siRNA sense strand
agacggugcuguuccgcua

SEQ ID NO: 2281575 - RNA, 19 nt, Homo sapiens
  misc_RNA (1)...(19): siRNA sense strand
cggaauaagcagaaggcau

SEQ ID NO: 2281576 - RNA, 19 nt, Homo sapiens
  misc_RNA (1)...(19): siRNA sense strand
aagcagaggaggaggagga

SEQ ID NO: 2281577 - RNA, 19 nt, Homo sapiens
  misc_RNA (1)...(19): siRNA sense strand
ggaauaagcagaaggcauc

SEQ ID NO: 2281578 - RNA, 19 nt, Homo sapiens
  misc_RNA (1)...(19): siRNA sense strand
guccaaggccagacggcaa

SEQ ID NO: 2281579 - RNA, 19 nt, Homo sapiens
  misc_RNA (1)...(19): siRNA sense strand
acuacaagcugcuggggaa

SEQ ID NO: 2281580 - RNA, 19 nt, Homo sapiens
  misc_RNA (1)...(19): siRNA sense strand
ggaaagucuacaaagguca

SEQ ID NO: 2281581 - RNA, 19 nt, Homo sapiens
  misc_RNA (1)...(19): siRNA sense strand
cagugagcaaugugagcaa

SEQ ID NO: 2281582 - RNA, 19 nt, Homo sapiens
  misc_RNA (1)...(19): siRNA sense strand
ccuaacgugcgguggcuaa

SEQ ID NO: 2281583 - RNA, 19 nt, Homo sapiens
  misc_RNA (1)...(19): siRNA sense strand
gguccaacgcacagcccaa

SEQ ID NO: 2281584 - RNA, 19 nt, Homo sapiens
  misc_RNA (1)...(19): siRNA sense strand
aggaugugguggagaugau

SEQ ID NO: 2281585 - RNA, 19 nt, Homo sapiens
  misc_RNA (1)...(19): siRNA sense strand
ucauggaggagcugggaga

SEQ ID NO: 2281586 - RNA, 19 nt, Homo sapiens
  misc_RNA (1)...(19): siRNA sense strand
ggccaaacucaaagagauc

SEQ ID NO: 2281587 - RNA, 19 nt, Homo sapiens
  misc_RNA (1)...(19): siRNA sense strand
cggugagguucauggagga

SEQ ID NO: 2281588 - RNA, 19 nt, Homo sapiens
  misc_RNA (1)...(19): siRNA sense strand
gauuacagaggaacggcaa

SEQ ID NO: 2281589 - RNA, 19 nt, Homo sapiens
  misc_RNA (1)...(19): siRNA sense strand
aggccaucauguacggcaa

SEQ ID NO: 2281590 - RNA, 19 nt, Homo sapiens
  misc_RNA (1)...(19): siRNA sense strand
aggaagcagaggaggagga

SEQ ID NO: 2281591 - RNA, 19 nt, Homo sapiens
  misc_RNA (1)...(19): siRNA sense strand
aaucauaacuuucaggaug

SEQ ID NO: 2281592 - RNA, 19 nt, Homo sapiens
  misc_RNA (1)...(19): siRNA sense strand
gagaggaccgguuugggaa

SEQ ID NO: 2281593 - RNA, 19 nt, Homo sapiens
  misc_RNA (1)...(19): siRNA sense strand
ccagccaagacauggaaau

SEQ ID NO: 2281594 - RNA, 19 nt, Homo sapiens
  misc_RNA (1)...(19): siRNA sense strand
gggaaagucuacaaagguc

SEQ ID NO: 2281595 - RNA, 19 nt, Homo sapiens
  misc_RNA (1)...(19): siRNA sense strand
agaggaccgguuugggaaa

SEQ ID NO: 2281596 - RNA, 19 nt, Homo sapiens
  misc_RNA (1)...(19): siRNA sense strand
cagcagaacauguggccaa

SEQ ID NO: 2281597 - RNA, 19 nt, Homo sapiens
  misc_RNA (1)...(19): siRNA sense strand
uagagaaaugugugugaaa

SEQ ID NO: 2281598 - RNA, 19 nt, Homo sapiens
  misc_RNA (1)...(19): siRNA sense strand
aggaagaauaaaacggaaa

SEQ ID NO: 2281599 - RNA, 19 nt, Homo sapiens
  misc_RNA (1)...(19): siRNA sense strand
aagcaaaagcccagaauga

SEQ ID NO: 2281600 - RNA, 19 nt, Homo sapiens
  misc_RNA (1)...(19): siRNA sense strand
ccuggaaugagaagaaauu

SEQ ID NO: 2281601 - RNA, 19 nt, Homo sapiens
  misc_RNA (1)...(19): siRNA sense strand
agagaaaaccagagagacu

SEQ ID NO: 2281602 - RNA, 19 nt, Homo sapiens
  misc_RNA (1)...(19): siRNA sense strand
gugaccaagaagagaaaga

SEQ ID NO: 2281603 - RNA, 19 nt, Homo sapiens
  misc_RNA (1)...(19): siRNA sense strand
gcagaagcuaacaggccaa

SEQ ID NO: 2281604 - RNA, 19 nt, Homo sapiens
  misc_RNA (1)...(19): siRNA sense strand
gagaagaaauucaggccac

SEQ ID NO: 2281605 - RNA, 19 nt, Homo sapiens
  misc_RNA (1)...(19): siRNA sense strand
ccagagaaaaccagagaga

SEQ ID NO: 2281606 - RNA, 19 nt, Homo sapiens
  misc_RNA (1)...(19): siRNA sense strand
aagaagagucucaagccua

SEQ ID NO: 2281607 - RNA, 19 nt, Homo sapiens
  misc_RNA (1)...(19): siRNA sense strand
gaguaagagugcagagagc

SEQ ID NO: 2281608 - RNA, 19 nt, Homo sapiens
  misc_RNA (1)...(19): siRNA sense strand
gaggaugacaagaaggcuu

SEQ ID NO: 2281609 - RNA, 19 nt, Homo sapiens
  misc_RNA (1)...(19): siRNA sense strand
gaucaggacuggaggaagc

SEQ ID NO: 2281610 - RNA, 19 nt, Homo sapiens
  misc_RNA (1)...(19): siRNA sense strand
aagcaaacuccuugaccau

SEQ ID NO: 2281611 - RNA, 19 nt, Homo sapiens
  misc_RNA (1)...(19): siRNA sense strand
acauuaaugcggagaccau

SEQ ID NO: 2281612 - RNA, 19 nt, Homo sapiens
  misc_RNA (1)...(19): siRNA sense strand
ccacaaggcugaagaccag

SEQ ID NO: 2281613 - RNA, 19 nt, Homo sapiens
  misc_RNA (1)...(19): siRNA sense strand
aggaauuccaagacaucua

SEQ ID NO: 2281614 - RNA, 19 nt, Homo sapiens
  misc_RNA (1)...(19): siRNA sense strand
caucauacaucacggccau

SEQ ID NO: 2281615 - RNA, 19 nt, Homo sapiens
  misc_RNA (1)...(19): siRNA sense strand
ccucagaacuauuugcgga

SEQ ID NO: 2281616 - RNA, 19 nt, Homo sapiens
  misc_RNA (1)...(19): siRNA sense strand
gaccaagaagagaaagaga

SEQ ID NO: 2281617 - RNA, 19 nt, Homo sapiens
  misc_RNA (1)...(19): siRNA sense strand
gugccaaagaagagucuca

SEQ ID NO: 2281618 - RNA, 19 nt, Homo sapiens
  misc_RNA (1)...(19): siRNA sense strand
ggaugugcuuccagcccua

SEQ ID NO: 2281619 - RNA, 19 nt, Homo sapiens
  misc_RNA (1)...(19): siRNA sense strand
ccaccaugucagagaccau

SEQ ID NO: 2281620 - RNA, 19 nt, Homo sapiens
  misc_RNA (1)...(19): siRNA sense strand
acacaauggaccugccaga

SEQ ID NO: 2281621 - RNA, 19 nt, Homo sapiens
  misc_RNA (1)...(19): siRNA sense strand
ggaugcaaaagaagcaaaa

SEQ ID NO: 2281622 - RNA, 19 nt, Homo sapiens
  misc_RNA (1)...(19): siRNA sense strand
gcuucgguuucuagguaau

SEQ ID NO: 2281623 - RNA, 19 nt, Homo sapiens
  misc_RNA (1)...(19): siRNA sense strand
uauccuggaaugagaagaa

SEQ ID NO: 2281624 - RNA, 19 nt, Homo sapiens
  misc_RNA (1)...(19): siRNA sense strand
acauuagagaggagagaac

SEQ ID NO: 2281625 - RNA, 19 nt, Homo sapiens
  misc_RNA (1)...(19): siRNA sense strand
ggacagagaucuucagugg

SEQ ID NO: 2281626 - RNA, 19 nt, Homo sapiens
  misc_RNA (1)...(19): siRNA sense strand
agacauuagagaggagaga

SEQ ID NO: 2281627 - RNA, 19 nt, Homo sapiens
  misc_RNA (1)...(19): siRNA sense strand
aggaaauauucugguauga

SEQ ID NO: 2281628 - RNA, 19 nt, Homo sapiens
  misc_RNA (1)...(19): siRNA sense strand
aagugaccaagaagagaaa

SEQ ID NO: 2281629 - RNA, 19 nt, Homo sapiens
  misc_RNA (1)...(19): siRNA sense strand
ccucagaugucccagcaga

SEQ ID NO: 2281630 - RNA, 19 nt, Homo sapiens
  misc_RNA (1)...(19): siRNA sense strand
ccguccugcuuguggauga

SEQ ID NO: 2281631 - RNA, 19 nt, Homo sapiens
  misc_RNA (1)...(19): siRNA sense strand
uaguaaaagugaccaagaa

SEQ ID NO: 2281632 - RNA, 19 nt, Homo sapiens
  misc_RNA (1)...(19): siRNA sense strand
cagccaaccaugcggcaga

SEQ ID NO: 2281633 - RNA, 19 nt, Homo sapiens
  misc_RNA (1)...(19): siRNA sense strand
uugaguuguucgaagauga

SEQ ID NO: 2281634 - RNA, 19 nt, Homo sapiens
  misc_RNA (1)...(19): siRNA sense strand
agacacucuuugugaaacu

SEQ ID NO: 2281635 - RNA, 19 nt, Homo sapiens
  misc_RNA (1)...(19): siRNA sense strand
gaauggagggacugccgua

SEQ ID NO: 2281636 - RNA, 19 nt, Homo sapiens
  misc_RNA (1)...(19): siRNA sense strand
gugaagaagccgugcgucu

SEQ ID NO: 2281637 - RNA, 19 nt, Homo sapiens
  misc_RNA (1)...(19): siRNA sense strand
acaacgacgucaagaggca

SEQ ID NO: 2281638 - RNA, 19 nt, Homo sapiens
  misc_RNA (1)...(19): siRNA sense strand
ccucugaagacaugggcca

SEQ ID NO: 2281639 - RNA, 19 nt, Homo sapiens
  misc_RNA (1)...(19): siRNA sense strand
ucaagaagauccauggugu

SEQ ID NO: 2281640 - RNA, 19 nt, Homo sapiens
  misc_RNA (1)...(19): siRNA sense strand
gagcagagaccauggcuuc

SEQ ID NO: 2281641 - RNA, 19 nt, Homo sapiens
  misc_RNA (1)...(19): siRNA sense strand
ugggagaagagcaguacaa

SEQ ID NO: 2281642 - RNA, 19 nt, Homo sapiens
  misc_RNA (1)...(19): siRNA sense strand
gggaauguaaagaagcgua

SEQ ID NO: 2281643 - RNA, 19 nt, Homo sapiens
  misc_RNA (1)...(19): siRNA sense strand
auuugaagccucaggaaca

SEQ ID NO: 2281644 - RNA, 19 nt, Homo sapiens
  misc_RNA (1)...(19): siRNA sense strand
gaacaacuacucaggccua

SEQ ID NO: 2281645 - RNA, 19 nt, Homo sapiens
  misc_RNA (1)...(19): siRNA sense strand
uggccugggcuguggguuu

SEQ ID NO: 2281646 - RNA, 19 nt, Homo sapiens
  misc_RNA (1)...(19): siRNA sense strand
acuucaggauucugggaga

SEQ ID NO: 2281647 - RNA, 19 nt, Homo sapiens
  misc_RNA (1)...(19): siRNA sense strand
gccauguaccaguggaaaa

SEQ ID NO: 2281648 - RNA, 19 nt, Homo sapiens
  misc_RNA (1)...(19): siRNA sense strand
gagccugaccagaggaaag

SEQ ID NO: 2281649 - RNA, 19 nt, Homo sapiens
  misc_RNA (1)...(19): siRNA sense strand
ugggagaagagcaguacaa

SEQ ID NO: 2281650 - RNA, 19 nt, Homo sapiens
  misc_RNA (1)...(19): siRNA sense strand
gggaauguaaagaagcgua

SEQ ID NO: 2281651 - RNA, 19 nt, Homo sapiens
  misc_RNA (1)...(19): siRNA sense strand
auuugaagccucaggaaca

SEQ ID NO: 2281652 - RNA, 19 nt, Homo sapiens
  misc_RNA (1)...(19): siRNA sense strand
gaacaacuacucaggccua

SEQ ID NO: 2281653 - RNA, 19 nt, Homo sapiens
  misc_RNA (1)...(19): siRNA sense strand
uggccugggcuguggguuu

SEQ ID NO: 2281654 - RNA, 19 nt, Homo sapiens
  misc_RNA (1)...(19): siRNA sense strand
acuucaggauucugggaga

SEQ ID NO: 2281655 - RNA, 19 nt, Homo sapiens
  misc_RNA (1)...(19): siRNA sense strand
gccauguaccaguggaaaa

SEQ ID NO: 2281656 - RNA, 19 nt, Homo sapiens
  misc_RNA (1)...(19): siRNA sense strand
gagccugaccagaggaaag

SEQ ID NO: 2281657 - RNA, 19 nt, Homo sapiens
  misc_RNA (1)...(19): siRNA sense strand
ugggagaagagcaguacaa

SEQ ID NO: 2281658 - RNA, 19 nt, Homo sapiens
  misc_RNA (1)...(19): siRNA sense strand
gggaauguaaagaagcgua

SEQ ID NO: 2281659 - RNA, 19 nt, Homo sapiens
  misc_RNA (1)...(19): siRNA sense strand
auuugaagccucaggaaca

SEQ ID NO: 2281660 - RNA, 19 nt, Homo sapiens
  misc_RNA (1)...(19): siRNA sense strand
gaacaacuacucaggccua

SEQ ID NO: 2281661 - RNA, 19 nt, Homo sapiens
  misc_RNA (1)...(19): siRNA sense strand
uggccugggcuguggguuu

SEQ ID NO: 2281662 - RNA, 19 nt, Homo sapiens
  misc_RNA (1)...(19): siRNA sense strand
acuucaggauucugggaga

SEQ ID NO: 2281663 - RNA, 19 nt, Homo sapiens
  misc_RNA (1)...(19): siRNA sense strand
gccauguaccaguggaaaa

SEQ ID NO: 2281664 - RNA, 19 nt, Homo sapiens
  misc_RNA (1)...(19): siRNA sense strand
gagccugaccagaggaaag

SEQ ID NO: 2281665 - RNA, 19 nt, Homo sapiens
  misc_RNA (1)...(19): siRNA sense strand
uagaaaugggcaaggucaa

SEQ ID NO: 2281666 - RNA, 19 nt, Homo sapiens
  misc_RNA (1)...(19): siRNA sense strand
ccuucauagaaaugggcaa

SEQ ID NO: 2281667 - RNA, 19 nt, Homo sapiens
  misc_RNA (1)...(19): siRNA sense strand
aucuuaugcuucaggcaaa

SEQ ID NO: 2281668 - RNA, 19 nt, Homo sapiens
  misc_RNA (1)...(19): siRNA sense strand
caucuuaugcuucaggcaa

SEQ ID NO: 2281669 - RNA, 19 nt, Homo sapiens
  misc_RNA (1)...(19): siRNA sense strand
caggagacucuguuaauca

SEQ ID NO: 2281670 - RNA, 19 nt, Homo sapiens
  misc_RNA (1)...(19): siRNA sense strand
augaugaacuacuggaaua

SEQ ID NO: 2281671 - RNA, 19 nt, Homo sapiens
  misc_RNA (1)...(19): siRNA sense strand
ccauauaggauuugaaagu

SEQ ID NO: 2281672 - RNA, 19 nt, Homo sapiens
  misc_RNA (1)...(19): siRNA sense strand
ucacagagcuccaaggaca

SEQ ID NO: 2281673 - RNA, 19 nt, Homo sapiens
  misc_RNA (1)...(19): siRNA sense strand
gaagaaagaaauuggcaga

SEQ ID NO: 2281674 - RNA, 19 nt, Homo sapiens
  misc_RNA (1)...(19): siRNA sense strand
ugccgaaagaagagaauaa

SEQ ID NO: 2281675 - RNA, 19 nt, Homo sapiens
  misc_RNA (1)...(19): siRNA sense strand
aguacauggcagaagaaua

SEQ ID NO: 2281676 - RNA, 19 nt, Homo sapiens
  misc_RNA (1)...(19): siRNA sense strand
ugaccauacuagugaaaca

SEQ ID NO: 2281677 - RNA, 19 nt, Homo sapiens
  misc_RNA (1)...(19): siRNA sense strand
agaugagaucaguggcaaa

SEQ ID NO: 2281678 - RNA, 19 nt, Homo sapiens
  misc_RNA (1)...(19): siRNA sense strand
augaaaaggccuugaggaa

SEQ ID NO: 2281679 - RNA, 19 nt, Homo sapiens
  misc_RNA (1)...(19): siRNA sense strand
gaauaaaaggaguggacau

SEQ ID NO: 2281680 - RNA, 19 nt, Homo sapiens
  misc_RNA (1)...(19): siRNA sense strand
augcuaaucugaugggcaa

SEQ ID NO: 2281681 - RNA, 19 nt, Homo sapiens
  misc_RNA (1)...(19): siRNA sense strand
agagaaaaggagagaauuu

SEQ ID NO: 2281682 - RNA, 19 nt, Homo sapiens
  misc_RNA (1)...(19): siRNA sense strand
aggagguacugaagaaaga

SEQ ID NO: 2281683 - RNA, 19 nt, Homo sapiens
  misc_RNA (1)...(19): siRNA sense strand
ugauaggaccauugaaaga

SEQ ID NO: 2281684 - RNA, 19 nt, Homo sapiens
  misc_RNA (1)...(19): siRNA sense strand
uauuacagagggugggaaa

SEQ ID NO: 2281685 - RNA, 19 nt, Homo sapiens
  misc_RNA (1)...(19): siRNA sense strand
ucuuaacacucaucagaaa

SEQ ID NO: 2281686 - RNA, 19 nt, Homo sapiens
  misc_RNA (1)...(19): siRNA sense strand
cagguaaagccuugaauga

SEQ ID NO: 2281687 - RNA, 19 nt, Homo sapiens
  misc_RNA (1)...(19): siRNA sense strand
ccauuaggaaacaguauaa

SEQ ID NO: 2281688 - RNA, 19 nt, Homo sapiens
  misc_RNA (1)...(19): siRNA sense strand
gagcagaaacuuaucaaaa

SEQ ID NO: 2281689 - RNA, 19 nt, Homo sapiens
  misc_RNA (1)...(19): siRNA sense strand
agaaauuggcagacuagaa

SEQ ID NO: 2281690 - RNA, 19 nt, Homo sapiens
  misc_RNA (1)...(19): siRNA sense strand
acacacagcaacaacgaaa

SEQ ID NO: 2281691 - RNA, 19 nt, Homo sapiens
  misc_RNA (1)...(19): siRNA sense strand
gggaagccccauaggaaaa

SEQ ID NO: 2281692 - RNA, 19 nt, Homo sapiens
  misc_RNA (1)...(19): siRNA sense strand
acaaauuacagaugcagua

SEQ ID NO: 2281693 - RNA, 19 nt, Homo sapiens
  misc_RNA (1)...(19): siRNA sense strand
auucuuaggucaugcacaa

SEQ ID NO: 2281694 - RNA, 19 nt, Homo sapiens
  misc_RNA (1)...(19): siRNA sense strand
ucuugaaccugcuggaaau

SEQ ID NO: 2281695 - RNA, 19 nt, Homo sapiens
  misc_RNA (1)...(19): siRNA sense strand
gcugaugauuccagauuca

SEQ ID NO: 2281696 - RNA, 19 nt, Homo sapiens
  misc_RNA (1)...(19): siRNA sense strand
caaacaaauuacagaugca

SEQ ID NO: 2281697 - RNA, 19 nt, Homo sapiens
  misc_RNA (1)...(19): siRNA sense strand
gcaugacauuacagaguga

SEQ ID NO: 2281698 - RNA, 19 nt, Homo sapiens
  misc_RNA (1)...(19): siRNA sense strand
ucugaagagaauagaagua

SEQ ID NO: 2281699 - RNA, 19 nt, Homo sapiens
  misc_RNA (1)...(19): siRNA sense strand
ugagaguccuuuagugcaa

SEQ ID NO: 2281700 - RNA, 19 nt, Homo sapiens
  misc_RNA (1)...(19): siRNA sense strand
acugauaggaccauugaaa

SEQ ID NO: 2281701 - RNA, 19 nt, Homo sapiens
  misc_RNA (1)...(19): siRNA sense strand
gauccaaauccuaaugaau

SEQ ID NO: 2281702 - RNA, 19 nt, Homo sapiens
  misc_RNA (1)...(19): siRNA sense strand
ccacuuaaaggcagauuau

SEQ ID NO: 2281703 - RNA, 19 nt, Homo sapiens
  misc_RNA (1)...(19): siRNA sense strand
acuuaaaggcagauuauga

SEQ ID NO: 2281704 - RNA, 19 nt, Homo sapiens
  misc_RNA (1)...(19): siRNA sense strand
agccauaagcccugccaaa

SEQ ID NO: 2281705 - RNA, 19 nt, Homo sapiens
  misc_RNA (1)...(19): siRNA sense strand
cgagagugaaauugaugaa

SEQ ID NO: 2281706 - RNA, 19 nt, Homo sapiens
  misc_RNA (1)...(19): siRNA sense strand
caacccggaaugugggaaa

SEQ ID NO: 2281707 - RNA, 19 nt, Homo sapiens
  misc_RNA (1)...(19): siRNA sense strand
ucagagaaaaggagagaau

SEQ ID NO: 2281708 - RNA, 19 nt, Homo sapiens
  misc_RNA (1)...(19): siRNA sense strand
gguacugaagaaagaaauu

SEQ ID NO: 2281709 - RNA, 19 nt, Homo sapiens
  misc_RNA (1)...(19): siRNA sense strand
ccauucagcuaguggaagu

SEQ ID NO: 2281710 - RNA, 19 nt, Homo sapiens
  misc_RNA (1)...(19): siRNA sense strand
cagcaaaaggcuugauaga

SEQ ID NO: 2281711 - RNA, 19 nt, Homo sapiens
  misc_RNA (1)...(19): siRNA sense strand
gaaaaggccuugaggaacu

SEQ ID NO: 2281712 - RNA, 19 nt, Homo sapiens
  misc_RNA (1)...(19): siRNA sense strand
gcacaaaugaccagcuacu

SEQ ID NO: 2281713 - RNA, 19 nt, Homo sapiens
  misc_RNA (1)...(19): siRNA sense strand
ggaauaucucccacagcua

SEQ ID NO: 2281714 - RNA, 19 nt, Homo sapiens
  misc_RNA (1)...(19): siRNA sense strand
aaagaaugcuccuggggaa

SEQ ID NO: 2281715 - RNA, 19 nt, Homo sapiens
  misc_RNA (1)...(19): siRNA sense strand
uugaauaacuugauccaca

SEQ ID NO: 2281716 - RNA, 19 nt, Homo sapiens
  misc_RNA (1)...(19): siRNA sense strand
ccgaaagaagagaauaaaa

SEQ ID NO: 2281717 - RNA, 19 nt, Homo sapiens
  misc_RNA (1)...(19): siRNA sense strand
ccuacuacucucugaagaa

SEQ ID NO: 2281718 - RNA, 19 nt, Homo sapiens
  misc_RNA (1)...(19): siRNA sense strand
aguaugaacaccaagaauu

SEQ ID NO: 2281719 - RNA, 19 nt, Homo sapiens
  misc_RNA (1)...(19): siRNA sense strand
uauugaaaacccaggaaaa

SEQ ID NO: 2281720 - RNA, 19 nt, Homo sapiens
  misc_RNA (1)...(19): siRNA sense strand
uuaucaaaguucagagacu

SEQ ID NO: 2281721 - RNA, 19 nt, Homo sapiens
  misc_RNA (1)...(19): siRNA sense strand
ugggaaaguacauggcaga

SEQ ID NO: 2281722 - RNA, 19 nt, Homo sapiens
  misc_RNA (1)...(19): siRNA sense strand
caggaaaacguguauaaua

SEQ ID NO: 2281723 - RNA, 19 nt, Homo sapiens
  misc_RNA (1)...(19): siRNA sense strand
agaaauucguaaaguggca

SEQ ID NO: 2281724 - RNA, 19 nt, Homo sapiens
  misc_RNA (1)...(19): siRNA sense strand
cgucuuuacuggcugcuaa

SEQ ID NO: 2281725 - RNA, 19 nt, Homo sapiens
  misc_RNA (1)...(19): siRNA sense strand
ugcuuauugugaagaguaa

SEQ ID NO: 2281726 - RNA, 19 nt, Homo sapiens
  misc_RNA (1)...(19): siRNA sense strand
guagggaagcuccaggaaa

SEQ ID NO: 2281727 - RNA, 19 nt, Homo sapiens
  misc_RNA (1)...(19): siRNA sense strand
cugaagagaauagaaguaa

SEQ ID NO: 2281728 - RNA, 19 nt, Homo sapiens
  misc_RNA (1)...(19): siRNA sense strand
guaaaguggcaguucaaca

SEQ ID NO: 2281729 - RNA, 19 nt, Homo sapiens
  misc_RNA (1)...(19): siRNA sense strand
ccucaaagcagcaauacga

SEQ ID NO: 2281730 - RNA, 19 nt, Homo sapiens
  misc_RNA (1)...(19): siRNA sense strand
ucguaaaguggcaguucaa

SEQ ID NO: 2281731 - RNA, 19 nt, Homo sapiens
  misc_RNA (1)...(19): siRNA sense strand
acgaaaagcaguaugaaca

SEQ ID NO: 2281732 - RNA, 19 nt, Homo sapiens
  misc_RNA (1)...(19): siRNA sense strand
uuauucaagugauggacaa

SEQ ID NO: 2281733 - RNA, 19 nt, Homo sapiens
  misc_RNA (1)...(19): siRNA sense strand
uaauaaucuucguccacaa

SEQ ID NO: 2281734 - RNA, 19 nt, Homo sapiens
  misc_RNA (1)...(19): siRNA sense strand
acaagaagccuaaggugca

SEQ ID NO: 2281735 - RNA, 19 nt, Homo sapiens
  misc_RNA (1)...(19): siRNA sense strand
ggacaaugcugguacguac

SEQ ID NO: 2281736 - RNA, 19 nt, Homo sapiens
  misc_RNA (1)...(19): siRNA sense strand
gcuggaagccuguggcaga

SEQ ID NO: 2281737 - RNA, 19 nt, Homo sapiens
  misc_RNA (1)...(19): siRNA sense strand
cugaugaggaugaggacuu

SEQ ID NO: 2281738 - RNA, 19 nt, Homo sapiens
  misc_RNA (1)...(19): siRNA sense strand
acauagaagagaagggugu

SEQ ID NO: 2281739 - RNA, 19 nt, Homo sapiens
  misc_RNA (1)...(19): siRNA sense strand
accgaaaguccgugaagaa

SEQ ID NO: 2281740 - RNA, 19 nt, Homo sapiens
  misc_RNA (1)...(19): siRNA sense strand
gcaucguggaaguggaaaa

SEQ ID NO: 2281741 - RNA, 19 nt, Homo sapiens
  misc_RNA (1)...(19): siRNA sense strand
gagagaaagaugaggagcu

SEQ ID NO: 2281742 - RNA, 19 nt, Homo sapiens
  misc_RNA (1)...(19): siRNA sense strand
acaaggaguaugugggcuu

SEQ ID NO: 2281743 - RNA, 19 nt, Homo sapiens
  misc_RNA (1)...(19): siRNA sense strand
cugagaagcuuauccgaga

SEQ ID NO: 2281744 - RNA, 19 nt, Homo sapiens
  misc_RNA (1)...(19): siRNA sense strand
cagaauacauugaucagca

SEQ ID NO: 2281745 - RNA, 19 nt, Homo sapiens
  misc_RNA (1)...(19): siRNA sense strand
gcaaaauccgggaggagau

SEQ ID NO: 2281746 - RNA, 19 nt, Homo sapiens
  misc_RNA (1)...(19): siRNA sense strand
acuucaaauugcaggacca

SEQ ID NO: 2281747 - RNA, 19 nt, Homo sapiens
  misc_RNA (1)...(19): siRNA sense strand
gaggcuaagaccugggcau

SEQ ID NO: 2281748 - RNA, 19 nt, Homo sapiens
  misc_RNA (1)...(19): siRNA sense strand
agggacagauccagaaacu

SEQ ID NO: 2281749 - RNA, 19 nt, Homo sapiens
  misc_RNA (1)...(19): siRNA sense strand
aacagaugaaggagaacua

SEQ ID NO: 2281750 - RNA, 19 nt, Homo sapiens
  misc_RNA (1)...(19): siRNA sense strand
gagaguggccugaaccgaa

SEQ ID NO: 2281751 - RNA, 19 nt, Homo sapiens
  misc_RNA (1)...(19): siRNA sense strand
uggcagaauacauugauca

SEQ ID NO: 2281752 - RNA, 19 nt, Homo sapiens
  misc_RNA (1)...(19): siRNA sense strand
augauggagaacugagcaa

SEQ ID NO: 2281753 - RNA, 19 nt, Homo sapiens
  misc_RNA (1)...(19): siRNA sense strand
ugaaggaacggaaucgcaa

SEQ ID NO: 2281754 - RNA, 19 nt, Homo sapiens
  misc_RNA (1)...(19): siRNA sense strand
cgggagacacauuaugaga

SEQ ID NO: 2281755 - RNA, 19 nt, Homo sapiens
  misc_RNA (1)...(19): siRNA sense strand
gcuggaagccuguggcaga

SEQ ID NO: 2281756 - RNA, 19 nt, Homo sapiens
  misc_RNA (1)...(19): siRNA sense strand
acauagaagagaagggugu

SEQ ID NO: 2281757 - RNA, 19 nt, Homo sapiens
  misc_RNA (1)...(19): siRNA sense strand
accgaaaguccgugaagaa

SEQ ID NO: 2281758 - RNA, 19 nt, Homo sapiens
  misc_RNA (1)...(19): siRNA sense strand
acaaggaguaugugggcuu

SEQ ID NO: 2281759 - RNA, 19 nt, Homo sapiens
  misc_RNA (1)...(19): siRNA sense strand
cagaauacauugaucagca

SEQ ID NO: 2281760 - RNA, 19 nt, Homo sapiens
  misc_RNA (1)...(19): siRNA sense strand
gaggcuaagaccugggcau

SEQ ID NO: 2281761 - RNA, 19 nt, Homo sapiens
  misc_RNA (1)...(19): siRNA sense strand
gagaguggccugaaccgaa

SEQ ID NO: 2281762 - RNA, 19 nt, Homo sapiens
  misc_RNA (1)...(19): siRNA sense strand
uggcagaauacauugauca

SEQ ID NO: 2281763 - RNA, 19 nt, Homo sapiens
  misc_RNA (1)...(19): siRNA sense strand
augauggagaacugagcaa

SEQ ID NO: 2281764 - RNA, 19 nt, Homo sapiens
  misc_RNA (1)...(19): siRNA sense strand
ggacaaugcugguacguac

SEQ ID NO: 2281765 - RNA, 19 nt, Homo sapiens
  misc_RNA (1)...(19): siRNA sense strand
gcuggaagccuguggcaga

SEQ ID NO: 2281766 - RNA, 19 nt, Homo sapiens
  misc_RNA (1)...(19): siRNA sense strand
cugaugaggaugaggacuu

SEQ ID NO: 2281767 - RNA, 19 nt, Homo sapiens
  misc_RNA (1)...(19): siRNA sense strand
acauagaagagaagggugu

SEQ ID NO: 2281768 - RNA, 19 nt, Homo sapiens
  misc_RNA (1)...(19): siRNA sense strand
accgaaaguccgugaagaa

SEQ ID NO: 2281769 - RNA, 19 nt, Homo sapiens
  misc_RNA (1)...(19): siRNA sense strand
gcaucguggaaguggaaaa

SEQ ID NO: 2281770 - RNA, 19 nt, Homo sapiens
  misc_RNA (1)...(19): siRNA sense strand
gagagaaagaugaggagcu

SEQ ID NO: 2281771 - RNA, 19 nt, Homo sapiens
  misc_RNA (1)...(19): siRNA sense strand
acaaggaguaugugggcuu

SEQ ID NO: 2281772 - RNA, 19 nt, Homo sapiens
  misc_RNA (1)...(19): siRNA sense strand
cugagaagcuuauccgaga

SEQ ID NO: 2281773 - RNA, 19 nt, Homo sapiens
  misc_RNA (1)...(19): siRNA sense strand
cagaauacauugaucagca

SEQ ID NO: 2281774 - RNA, 19 nt, Homo sapiens
  misc_RNA (1)...(19): siRNA sense strand
gcaaaauccgggaggagau

SEQ ID NO: 2281775 - RNA, 19 nt, Homo sapiens
  misc_RNA (1)...(19): siRNA sense strand
acuucaaauugcaggacca

SEQ ID NO: 2281776 - RNA, 19 nt, Homo sapiens
  misc_RNA (1)...(19): siRNA sense strand
gaggcuaagaccugggcau

SEQ ID NO: 2281777 - RNA, 19 nt, Homo sapiens
  misc_RNA (1)...(19): siRNA sense strand
agggacagauccagaaacu

SEQ ID NO: 2281778 - RNA, 19 nt, Homo sapiens
  misc_RNA (1)...(19): siRNA sense strand
aacagaugaaggagaacua

SEQ ID NO: 2281779 - RNA, 19 nt, Homo sapiens
  misc_RNA (1)...(19): siRNA sense strand
gagaguggccugaaccgaa

SEQ ID NO: 2281780 - RNA, 19 nt, Homo sapiens
  misc_RNA (1)...(19): siRNA sense strand
uggcagaauacauugauca

SEQ ID NO: 2281781 - RNA, 19 nt, Homo sapiens
  misc_RNA (1)...(19): siRNA sense strand
augauggagaacugagcaa

SEQ ID NO: 2281782 - RNA, 19 nt, Homo sapiens
  misc_RNA (1)...(19): siRNA sense strand
ugaaggaacggaaucgcaa

SEQ ID NO: 2281783 - RNA, 19 nt, Homo sapiens
  misc_RNA (1)...(19): siRNA sense strand
cgggagacacauuaugaga

SEQ ID NO: 2281784 - RNA, 19 nt, Homo sapiens
  misc_RNA (1)...(19): siRNA sense strand
gaggcuaagaccugggcau

SEQ ID NO: 2281785 - RNA, 19 nt, Homo sapiens
  misc_RNA (1)...(19): siRNA sense strand
augauggagaacugagcaa

SEQ ID NO: 2281786 - RNA, 19 nt, Homo sapiens
  misc_RNA (1)...(19): siRNA sense strand
uuguagagcugcugggaga

SEQ ID NO: 2281787 - RNA, 19 nt, Homo sapiens
  misc_RNA (1)...(19): siRNA sense strand
uggaaaaggaaaagugauu

SEQ ID NO: 2281788 - RNA, 19 nt, Homo sapiens
  misc_RNA (1)...(19): siRNA sense strand
caaccaauguauuugccaa

SEQ ID NO: 2281789 - RNA, 19 nt, Homo sapiens
  misc_RNA (1)...(19): siRNA sense strand
gauuggagauggugccaca

SEQ ID NO: 2281790 - RNA, 19 nt, Homo sapiens
  misc_RNA (1)...(19): siRNA sense strand
uaggaguauuguagagcau

SEQ ID NO: 2281791 - RNA, 19 nt, Homo sapiens
  misc_RNA (1)...(19): siRNA sense strand
agcugaaucugguggaaaa

SEQ ID NO: 2281792 - RNA, 19 nt, Homo sapiens
  misc_RNA (1)...(19): siRNA sense strand
gaggaaaugugaucaggca

SEQ ID NO: 2281793 - RNA, 19 nt, Homo sapiens
  misc_RNA (1)...(19): siRNA sense strand
ucaucagagaagaaggaau

SEQ ID NO: 2281794 - RNA, 19 nt, Homo sapiens
  misc_RNA (1)...(19): siRNA sense strand
gagacucauagcagagcaa

SEQ ID NO: 2281795 - RNA, 19 nt, Homo sapiens
  misc_RNA (1)...(19): siRNA sense strand
aggaaaugugaucaggcaa

SEQ ID NO: 2281796 - RNA, 19 nt, Homo sapiens
  misc_RNA (1)...(19): siRNA sense strand
gaaaugacacggcgagcca

SEQ ID NO: 2281797 - RNA, 19 nt, Homo sapiens
  misc_RNA (1)...(19): siRNA sense strand
ggaaaugugaucaggcaac

SEQ ID NO: 2281798 - RNA, 19 nt, Homo sapiens
  misc_RNA (1)...(19): siRNA sense strand
cagcugaaucugguggaaa

SEQ ID NO: 2281799 - RNA, 19 nt, Homo sapiens
  misc_RNA (1)...(19): siRNA sense strand
aaucgaugagcuagccaaa

SEQ ID NO: 2281800 - RNA, 19 nt, Homo sapiens
  misc_RNA (1)...(19): siRNA sense strand
cggugaauaugcagguuuu

SEQ ID NO: 2281801 - RNA, 19 nt, Homo sapiens
  misc_RNA (1)...(19): siRNA sense strand
ggacaaagccagugacccu

SEQ ID NO: 2281802 - RNA, 19 nt, Homo sapiens
  misc_RNA (1)...(19): siRNA sense strand
cagagaagcuccugcagca

SEQ ID NO: 2281803 - RNA, 19 nt, Homo sapiens
  misc_RNA (1)...(19): siRNA sense strand
acaucauccuggagagcau

SEQ ID NO: 2281804 - RNA, 19 nt, Homo sapiens
  misc_RNA (1)...(19): siRNA sense strand
ccucagaauuccaggagcu

SEQ ID NO: 2281805 - RNA, 19 nt, Homo sapiens
  misc_RNA (1)...(19): siRNA sense strand
aaggaagaguugaguggga

SEQ ID NO: 2281806 - RNA, 19 nt, Homo sapiens
  misc_RNA (1)...(19): siRNA sense strand
gcugucacucucagggaaa

SEQ ID NO: 2281807 - RNA, 19 nt, Homo sapiens
  misc_RNA (1)...(19): siRNA sense strand
ccacagagacaucaaggga

SEQ ID NO: 2281808 - RNA, 19 nt, Homo sapiens
  misc_RNA (1)...(19): siRNA sense strand
accaagaauccuaagaaga

SEQ ID NO: 2281809 - RNA, 19 nt, Homo sapiens
  misc_RNA (1)...(19): siRNA sense strand
acccagaggcgcacagcaa

SEQ ID NO: 2281810 - RNA, 19 nt, Homo sapiens
  misc_RNA (1)...(19): siRNA sense strand
cgugaagauagucaagcua

SEQ ID NO: 2281811 - RNA, 19 nt, Homo sapiens
  misc_RNA (1)...(19): siRNA sense strand
ccaggagaucacagaugaa

SEQ ID NO: 2281812 - RNA, 19 nt, Homo sapiens
  misc_RNA (1)...(19): siRNA sense strand
aaacaaggaucuuccgagu

SEQ ID NO: 2281813 - RNA, 19 nt, Homo sapiens
  misc_RNA (1)...(19): siRNA sense strand
ucaaacuggcccugaccaa

SEQ ID NO: 2281814 - RNA, 19 nt, Homo sapiens
  misc_RNA (1)...(19): siRNA sense strand
ggcucuacugcgugaacaa

SEQ ID NO: 2281815 - RNA, 19 nt, Homo sapiens
  misc_RNA (1)...(19): siRNA sense strand
gggaggauccugagagguc

SEQ ID NO: 2281816 - RNA, 19 nt, Homo sapiens
  misc_RNA (1)...(19): siRNA sense strand
cgcuggugcuggaugggaa

SEQ ID NO: 2281817 - RNA, 19 nt, Homo sapiens
  misc_RNA (1)...(19): siRNA sense strand
uggagaagacgguggaaaa

SEQ ID NO: 2281818 - RNA, 19 nt, Homo sapiens
  misc_RNA (1)...(19): siRNA sense strand
acgugaaggugcucggcaa

SEQ ID NO: 2281819 - RNA, 19 nt, Homo sapiens
  misc_RNA (1)...(19): siRNA sense strand
aggaggaagaugaggcuga

SEQ ID NO: 2281820 - RNA, 19 nt, Homo sapiens
  misc_RNA (1)...(19): siRNA sense strand
cuuucugccucaaggaauu

SEQ ID NO: 2281821 - RNA, 19 nt, Homo sapiens
  misc_RNA (1)...(19): siRNA sense strand
cugaagugacgcugggcau

SEQ ID NO: 2281822 - RNA, 19 nt, Homo sapiens
  misc_RNA (1)...(19): siRNA sense strand
cuggagaagacgguggaaa

SEQ ID NO: 2281823 - RNA, 19 nt, Homo sapiens
  misc_RNA (1)...(19): siRNA sense strand
gcagcuaccacgaggagga

SEQ ID NO: 2281824 - RNA, 19 nt, Homo sapiens
  misc_RNA (1)...(19): siRNA sense strand
gggacgagcucuaccugga

SEQ ID NO: 2281825 - RNA, 19 nt, Homo sapiens
  misc_RNA (1)...(19): siRNA sense strand
cgaaggagaugguugguca

SEQ ID NO: 2281826 - RNA, 19 nt, Homo sapiens
  misc_RNA (1)...(19): siRNA sense strand
uggaaaaggccaagguuga

SEQ ID NO: 2281827 - RNA, 19 nt, Homo sapiens
  misc_RNA (1)...(19): siRNA sense strand
guauauaggagauggcuac

SEQ ID NO: 2281828 - RNA, 19 nt, Homo sapiens
  misc_RNA (1)...(19): siRNA sense strand
uguauauaggagauggcua

SEQ ID NO: 2281829 - RNA, 19 nt, Homo sapiens
  misc_RNA (1)...(19): siRNA sense strand
gagcaggaacugugagcac

SEQ ID NO: 2281830 - RNA, 19 nt, Homo sapiens
  misc_RNA (1)...(19): siRNA sense strand
gagcaacagugcagaggug

SEQ ID NO: 2281831 - RNA, 19 nt, Homo sapiens
  misc_RNA (1)...(19): siRNA sense strand
uggaagauguggugggagg

SEQ ID NO: 2281832 - RNA, 19 nt, Homo sapiens
  misc_RNA (1)...(19): siRNA sense strand
gcccaaaccuggagaccug

SEQ ID NO: 2281833 - RNA, 19 nt, Homo sapiens
  misc_RNA (1)...(19): siRNA sense strand
acacaaagagccuggauaa

SEQ ID NO: 2281834 - RNA, 19 nt, Homo sapiens
  misc_RNA (1)...(19): siRNA sense strand
augaaaacuuugagggcua

SEQ ID NO: 2281835 - RNA, 19 nt, Homo sapiens
  misc_RNA (1)...(19): siRNA sense strand
cagaauggaaccugggaga

SEQ ID NO: 2281836 - RNA, 19 nt, Homo sapiens
  misc_RNA (1)...(19): siRNA sense strand
gggacaagcuguaccugga

SEQ ID NO: 2281837 - RNA, 19 nt, Homo sapiens
  misc_RNA (1)...(19): siRNA sense strand
acaagggaccagaauggaa

SEQ ID NO: 2281838 - RNA, 19 nt, Homo sapiens
  misc_RNA (1)...(19): siRNA sense strand
cuguuggaguagaguuuga

SEQ ID NO: 2281839 - RNA, 19 nt, Homo sapiens
  misc_RNA (1)...(19): siRNA sense strand
gugaagaccuggagcgacu

SEQ ID NO: 2281840 - RNA, 19 nt, Homo sapiens
  misc_RNA (1)...(19): siRNA sense strand
ggauguaaaggauggaaaa

SEQ ID NO: 2281841 - RNA, 19 nt, Homo sapiens
  misc_RNA (1)...(19): siRNA sense strand
aggauguaaaggauggaaa

SEQ ID NO: 2281842 - RNA, 19 nt, Homo sapiens
  misc_RNA (1)...(19): siRNA sense strand
aggaugagguggaacgugu

SEQ ID NO: 2281843 - RNA, 19 nt, Homo sapiens
  misc_RNA (1)...(19): siRNA sense strand
ucacugaggaugaggugga

SEQ ID NO: 2281844 - RNA, 19 nt, Homo sapiens
  misc_RNA (1)...(19): siRNA sense strand
cagccagguccuagccaau

SEQ ID NO: 2281845 - RNA, 19 nt, Homo sapiens
  misc_RNA (1)...(19): siRNA sense strand
uagccaauggucuggacaa

SEQ ID NO: 2281846 - RNA, 19 nt, Homo sapiens
  misc_RNA (1)...(19): siRNA sense strand
gagaagaacuggaaggcca

SEQ ID NO: 2281847 - RNA, 19 nt, Homo sapiens
  misc_RNA (1)...(19): siRNA sense strand
agaagaaaggaaagaccaa

SEQ ID NO: 2281848 - RNA, 19 nt, Homo sapiens
  misc_RNA (1)...(19): siRNA sense strand
caguggagaagaaaggaaa

SEQ ID NO: 2281849 - RNA, 19 nt, Homo sapiens
  misc_RNA (1)...(19): siRNA sense strand
ggaaagcucuggaagccaa

SEQ ID NO: 2281850 - RNA, 19 nt, Homo sapiens
  misc_RNA (1)...(19): siRNA sense strand
agagaaaccuaaugggaag

SEQ ID NO: 2281851 - RNA, 19 nt, Homo sapiens
  misc_RNA (1)...(19): siRNA sense strand
aagagaaaccuaaugggaa

SEQ ID NO: 2281852 - RNA, 19 nt, Homo sapiens
  misc_RNA (1)...(19): siRNA sense strand
agaagagcguggaggagga

SEQ ID NO: 2281853 - RNA, 19 nt, Homo sapiens
  misc_RNA (1)...(19): siRNA sense strand
cagcuggaagagaaggaaa

SEQ ID NO: 2281854 - RNA, 19 nt, Homo sapiens
  misc_RNA (1)...(19): siRNA sense strand
cggcugucgccaagagcaa

SEQ ID NO: 2281855 - RNA, 19 nt, Homo sapiens
  misc_RNA (1)...(19): siRNA sense strand
gcgcaaggagauggcgaaa

SEQ ID NO: 2281856 - RNA, 19 nt, Homo sapiens
  misc_RNA (1)...(19): siRNA sense strand
cagaaagucgagaagaaaa

SEQ ID NO: 2281857 - RNA, 19 nt, Homo sapiens
  misc_RNA (1)...(19): siRNA sense strand
aggagaaaacaguggagaa

SEQ ID NO: 2281858 - RNA, 19 nt, Homo sapiens
  misc_RNA (1)...(19): siRNA sense strand
uacaagaagaauuggagaa

SEQ ID NO: 2281859 - RNA, 19 nt, Homo sapiens
  misc_RNA (1)...(19): siRNA sense strand
agucagaggcugugcggca

SEQ ID NO: 2281860 - RNA, 19 nt, Homo sapiens
  misc_RNA (1)...(19): siRNA sense strand
caacagaauuacaccgagu

SEQ ID NO: 2281861 - RNA, 19 nt, Homo sapiens
  misc_RNA (1)...(19): siRNA sense strand
gagcagacacagcggcaga

SEQ ID NO: 2281862 - RNA, 19 nt, Homo sapiens
  misc_RNA (1)...(19): siRNA sense strand
cugcaggaacagcuggaaa

SEQ ID NO: 2281863 - RNA, 19 nt, Homo sapiens
  misc_RNA (1)...(19): siRNA sense strand
aagaugagcagcagcggaa

SEQ ID NO: 2281864 - RNA, 19 nt, Homo sapiens
  misc_RNA (1)...(19): siRNA sense strand
cugaaggagagacuagaaa

SEQ ID NO: 2281865 - RNA, 19 nt, Homo sapiens
  misc_RNA (1)...(19): siRNA sense strand
agauuguagagaagcuaaa

SEQ ID NO: 2281866 - RNA, 19 nt, Homo sapiens
  misc_RNA (1)...(19): siRNA sense strand
agagcgaagcccagaaaca

SEQ ID NO: 2281867 - RNA, 19 nt, Homo sapiens
  misc_RNA (1)...(19): siRNA sense strand
gagaagaaaggaaagacca

SEQ ID NO: 2281868 - RNA, 19 nt, Homo sapiens
  misc_RNA (1)...(19): siRNA sense strand
aggaggaaucggagaagca

SEQ ID NO: 2281869 - RNA, 19 nt, Homo sapiens
  misc_RNA (1)...(19): siRNA sense strand
ggcagaagcucauggccga

SEQ ID NO: 2281870 - RNA, 19 nt, Homo sapiens
  misc_RNA (1)...(19): siRNA sense strand
ugagugaaaugaagagcca

SEQ ID NO: 2281871 - RNA, 19 nt, Homo sapiens
  misc_RNA (1)...(19): siRNA sense strand
augaagaagcccuagccaa

SEQ ID NO: 2281872 - RNA, 19 nt, Homo sapiens
  misc_RNA (1)...(19): siRNA sense strand
aagaaaggaaagaccaaga

SEQ ID NO: 2281873 - RNA, 19 nt, Homo sapiens
  misc_RNA (1)...(19): siRNA sense strand
cuccagaagucccggguca

SEQ ID NO: 2281874 - RNA, 19 nt, Homo sapiens
  misc_RNA (1)...(19): siRNA sense strand
aggcagagcuggaaaagca

SEQ ID NO: 2281875 - RNA, 19 nt, Homo sapiens
  misc_RNA (1)...(19): siRNA sense strand
gcggaggugcgcagcaaau

SEQ ID NO: 2281876 - RNA, 19 nt, Homo sapiens
  misc_RNA (1)...(19): siRNA sense strand
gugaagaagcugcaggaac

SEQ ID NO: 2281877 - RNA, 19 nt, Homo sapiens
  misc_RNA (1)...(19): siRNA sense strand
uagagaagcuaaaaggaga

SEQ ID NO: 2281878 - RNA, 19 nt, Homo sapiens
  misc_RNA (1)...(19): siRNA sense strand
aggaaacgucauaugaaga

SEQ ID NO: 2281879 - RNA, 19 nt, Homo sapiens
  misc_RNA (1)...(19): siRNA sense strand
ucaaggagcuggaguccca

SEQ ID NO: 2281880 - RNA, 19 nt, Homo sapiens
  misc_RNA (1)...(19): siRNA sense strand
aaaggaaagaccaagaaaa

SEQ ID NO: 2281881 - RNA, 19 nt, Homo sapiens
  misc_RNA (1)...(19): siRNA sense strand
gaagagaaaccuaauggga

SEQ ID NO: 2281882 - RNA, 19 nt, Homo sapiens
  misc_RNA (1)...(19): siRNA sense strand
cggggaggccaaagugaaa

SEQ ID NO: 2281883 - RNA, 19 nt, Homo sapiens
  misc_RNA (1)...(19): siRNA sense strand
uggagaagucagaggcugu

SEQ ID NO: 2281884 - RNA, 19 nt, Homo sapiens
  misc_RNA (1)...(19): siRNA sense strand
acaaggagauggcagcaga

SEQ ID NO: 2281885 - RNA, 19 nt, Homo sapiens
  misc_RNA (1)...(19): siRNA sense strand
ccgucgagcagcagaaagu

SEQ ID NO: 2281886 - RNA, 19 nt, Homo sapiens
  misc_RNA (1)...(19): siRNA sense strand
ggacagaagccauccugga

SEQ ID NO: 2281887 - RNA, 19 nt, Homo sapiens
  misc_RNA (1)...(19): siRNA sense strand
ccacgagacugcaggagcu

SEQ ID NO: 2281888 - RNA, 19 nt, Homo sapiens
  misc_RNA (1)...(19): siRNA sense strand
gagcagcuggcaagggaga

SEQ ID NO: 2281889 - RNA, 19 nt, Homo sapiens
  misc_RNA (1)...(19): siRNA sense strand
ugauugaggcgcagaccau

SEQ ID NO: 2281890 - RNA, 19 nt, Homo sapiens
  misc_RNA (1)...(19): siRNA sense strand
agguggagagcaagcagaa

SEQ ID NO: 2281891 - RNA, 19 nt, Homo sapiens
  misc_RNA (1)...(19): siRNA sense strand
gcccagaaacagagcgaug

SEQ ID NO: 2281892 - RNA, 19 nt, Homo sapiens
  misc_RNA (1)...(19): siRNA sense strand
ugaagaagcccuagccaac

SEQ ID NO: 2281893 - RNA, 19 nt, Homo sapiens
  misc_RNA (1)...(19): siRNA sense strand
cuggcaagggagaaggaca

SEQ ID NO: 2281894 - RNA, 19 nt, Homo sapiens
  misc_RNA (1)...(19): siRNA sense strand
guggagaagaaaggaaaga

SEQ ID NO: 2281895 - RNA, 19 nt, Homo sapiens
  misc_RNA (1)...(19): siRNA sense strand
guucggaccaggugaggga

SEQ ID NO: 2281896 - RNA, 19 nt, Homo sapiens
  misc_RNA (1)...(19): siRNA sense strand
ccucacagcugaaggagag

SEQ ID NO: 2281897 - RNA, 19 nt, Homo sapiens
  misc_RNA (1)...(19): siRNA sense strand
agaacaagaggaagggaga

SEQ ID NO: 2281898 - RNA, 19 nt, Homo sapiens
  misc_RNA (1)...(19): siRNA sense strand
aagaaaaggcagagaaguu

SEQ ID NO: 2281899 - RNA, 19 nt, Homo sapiens
  misc_RNA (1)...(19): siRNA sense strand
aggacgaagaugaagacua

SEQ ID NO: 2281900 - RNA, 19 nt, Homo sapiens
  misc_RNA (1)...(19): siRNA sense strand
gcauugacccagagaggga

SEQ ID NO: 2281901 - RNA, 19 nt, Homo sapiens
  misc_RNA (1)...(19): siRNA sense strand
aacaagaggaagggagaaa

SEQ ID NO: 2281902 - RNA, 19 nt, Homo sapiens
  misc_RNA (1)...(19): siRNA sense strand
gcacgagagaagaggucga

SEQ ID NO: 2281903 - RNA, 19 nt, Homo sapiens
  misc_RNA (1)...(19): siRNA sense strand
agaaggaacggcagcgaca

SEQ ID NO: 2281904 - RNA, 19 nt, Homo sapiens
  misc_RNA (1)...(19): siRNA sense strand
gggagaaauagcugcuuca

SEQ ID NO: 2281905 - RNA, 19 nt, Homo sapiens
  misc_RNA (1)...(19): siRNA sense strand
aagcacgucaagaaagaaa

SEQ ID NO: 2281906 - RNA, 19 nt, Homo sapiens
  misc_RNA (1)...(19): siRNA sense strand
ugcuauuggaggagcuuua

SEQ ID NO: 2281907 - RNA, 19 nt, Homo sapiens
  misc_RNA (1)...(19): siRNA sense strand
acccagagagggacacaaa

SEQ ID NO: 2281908 - RNA, 19 nt, Homo sapiens
  misc_RNA (1)...(19): siRNA sense strand
uggugaguuucuagauuau

SEQ ID NO: 2281909 - RNA, 19 nt, Homo sapiens
  misc_RNA (1)...(19): siRNA sense strand
agaaagaaaaggcagagaa

SEQ ID NO: 2281910 - RNA, 19 nt, Homo sapiens
  misc_RNA (1)...(19): siRNA sense strand
cgagagucuugcugaggca

SEQ ID NO: 2281911 - RNA, 19 nt, Homo sapiens
  misc_RNA (1)...(19): siRNA sense strand
ccuggaagucuuuagcaau

SEQ ID NO: 2281912 - RNA, 19 nt, Homo sapiens
  misc_RNA (1)...(19): siRNA sense strand
guccagaagaacuagaaaa

SEQ ID NO: 2281913 - RNA, 19 nt, Homo sapiens
  misc_RNA (1)...(19): siRNA sense strand
uggauuacuaugagaccaa

SEQ ID NO: 2281914 - RNA, 19 nt, Homo sapiens
  misc_RNA (1)...(19): siRNA sense strand
aggacuauaucaaggacau

SEQ ID NO: 2281915 - RNA, 19 nt, Homo sapiens
  misc_RNA (1)...(19): siRNA sense strand
ccuacaagaucccgcguca

SEQ ID NO: 2281916 - RNA, 19 nt, Homo sapiens
  misc_RNA (1)...(19): siRNA sense strand
uggauuacuaugagaccaa

SEQ ID NO: 2281917 - RNA, 19 nt, Homo sapiens
  misc_RNA (1)...(19): siRNA sense strand
aggacuauaucaaggacau

SEQ ID NO: 2281918 - RNA, 19 nt, Homo sapiens
  misc_RNA (1)...(19): siRNA sense strand
ccuacaagaucccgcguca

SEQ ID NO: 2281919 - RNA, 19 nt, Homo sapiens
  misc_RNA (1)...(19): siRNA sense strand
uggauuacuaugagaccaa

SEQ ID NO: 2281920 - RNA, 19 nt, Homo sapiens
  misc_RNA (1)...(19): siRNA sense strand
aggacuauaucaaggacau

SEQ ID NO: 2281921 - RNA, 19 nt, Homo sapiens
  misc_RNA (1)...(19): siRNA sense strand
ccuacaagaucccgcguca

SEQ ID NO: 2281922 - RNA, 19 nt, Homo sapiens
  misc_RNA (1)...(19): siRNA sense strand
augcagagacagaguuaau

SEQ ID NO: 2281923 - RNA, 19 nt, Homo sapiens
  misc_RNA (1)...(19): siRNA sense strand
cauaaaugaugcagagaca

SEQ ID NO: 2281924 - RNA, 19 nt, Homo sapiens
  misc_RNA (1)...(19): siRNA sense strand
augcagagacagaguuaau

SEQ ID NO: 2281925 - RNA, 19 nt, Homo sapiens
  misc_RNA (1)...(19): siRNA sense strand
uaaaugaugcagagacaga

SEQ ID NO: 2281926 - RNA, 19 nt, Homo sapiens
  misc_RNA (1)...(19): siRNA sense strand
augcagagacagaguuaau

SEQ ID NO: 2281927 - RNA, 19 nt, Homo sapiens
  misc_RNA (1)...(19): siRNA sense strand
ggauugaugaguacgauua

SEQ ID NO: 2281928 - RNA, 19 nt, Homo sapiens
  misc_RNA (1)...(19): siRNA sense strand
ggaaggucacucuggaaua

SEQ ID NO: 2281929 - RNA, 19 nt, Homo sapiens
  misc_RNA (1)...(19): siRNA sense strand
cauuaacagucaaggcgaa

SEQ ID NO: 2281930 - RNA, 19 nt, Homo sapiens
  misc_RNA (1)...(19): siRNA sense strand
aggcuguggcccugagaaa

SEQ ID NO: 2281931 - RNA, 19 nt, Homo sapiens
  misc_RNA (1)...(19): siRNA sense strand
cgauaugauaccagcuauu

SEQ ID NO: 2281932 - RNA, 19 nt, Homo sapiens
  misc_RNA (1)...(19): siRNA sense strand
ucagcaagcucuauggaga

SEQ ID NO: 2281933 - RNA, 19 nt, Homo sapiens
  misc_RNA (1)...(19): siRNA sense strand
ccgagaaggaagaggcugu

SEQ ID NO: 2281934 - RNA, 19 nt, Homo sapiens
  misc_RNA (1)...(19): siRNA sense strand
gcauaagagcaaagaacac

SEQ ID NO: 2281935 - RNA, 19 nt, Homo sapiens
  misc_RNA (1)...(19): siRNA sense strand
aagcauaagaacaucggaa

SEQ ID NO: 2281936 - RNA, 19 nt, Homo sapiens
  misc_RNA (1)...(19): siRNA sense strand
gcauaagaacaucggaacu

SEQ ID NO: 2281937 - RNA, 19 nt, Homo sapiens
  misc_RNA (1)...(19): siRNA sense strand
caguaguggaucaugaauu

SEQ ID NO: 2281938 - RNA, 19 nt, Homo sapiens
  misc_RNA (1)...(19): siRNA sense strand
ugauggaagcauaagaaca

SEQ ID NO: 2281939 - RNA, 19 nt, Homo sapiens
  misc_RNA (1)...(19): siRNA sense strand
ggaaggaugucguggagag

SEQ ID NO: 2281940 - RNA, 19 nt, Homo sapiens
  misc_RNA (1)...(19): siRNA sense strand
cugagaaagaucacgucua

SEQ ID NO: 2281941 - RNA, 19 nt, Homo sapiens
  misc_RNA (1)...(19): siRNA sense strand
gcagaacugaagaugggaa

SEQ ID NO: 2281942 - RNA, 19 nt, Homo sapiens
  misc_RNA (1)...(19): siRNA sense strand
aggaugucguggagaggga

SEQ ID NO: 2281943 - RNA, 19 nt, Homo sapiens
  misc_RNA (1)...(19): siRNA sense strand
gggaaggucacucuggaau

SEQ ID NO: 2281944 - RNA, 19 nt, Homo sapiens
  misc_RNA (1)...(19): siRNA sense strand
agaagaagcccuuugagga

SEQ ID NO: 2281945 - RNA, 19 nt, Homo sapiens
  misc_RNA (1)...(19): siRNA sense strand
aggaagaggcuguggcccu

SEQ ID NO: 2281946 - RNA, 19 nt, Homo sapiens
  misc_RNA (1)...(19): siRNA sense strand
ucgcauaagagcaaagaac

SEQ ID NO: 2281947 - RNA, 19 nt, Homo sapiens
  misc_RNA (1)...(19): siRNA sense strand
uugccaggaccuagaguuu

SEQ ID NO: 2281948 - RNA, 19 nt, Homo sapiens
  misc_RNA (1)...(19): siRNA sense strand
cauauauggugcugguugu

SEQ ID NO: 2281949 - RNA, 19 nt, Homo sapiens
  misc_RNA (1)...(19): siRNA sense strand
ggacguuggcacugggaag

SEQ ID NO: 2281950 - RNA, 19 nt, Homo sapiens
  misc_RNA (1)...(19): siRNA sense strand
acugaagaugggaagauuu

SEQ ID NO: 2281951 - RNA, 19 nt, Homo sapiens
  misc_RNA (1)...(19): siRNA sense strand
ggaaaaucagcaagcucua

SEQ ID NO: 2281952 - RNA, 19 nt, Homo sapiens
  misc_RNA (1)...(19): siRNA sense strand
ucguggagagggaggcauu

SEQ ID NO: 2281953 - RNA, 19 nt, Homo sapiens
  misc_RNA (1)...(19): siRNA sense strand
ccaccuaccuccagagcag

SEQ ID NO: 2281954 - RNA, 19 nt, Homo sapiens
  misc_RNA (1)...(19): siRNA sense strand
ccgaaaauuuagaggaaaa

SEQ ID NO: 2281955 - RNA, 19 nt, Homo sapiens
  misc_RNA (1)...(19): siRNA sense strand
guguaguuguugaggagaa

SEQ ID NO: 2281956 - RNA, 19 nt, Homo sapiens
  misc_RNA (1)...(19): siRNA sense strand
agagaagaagagaaagaaa

SEQ ID NO: 2281957 - RNA, 19 nt, Homo sapiens
  misc_RNA (1)...(19): siRNA sense strand
aggaagaauacaagcgauu

SEQ ID NO: 2281958 - RNA, 19 nt, Homo sapiens
  misc_RNA (1)...(19): siRNA sense strand
ccuuccaaacagagagaaa

SEQ ID NO: 2281959 - RNA, 19 nt, Homo sapiens
  misc_RNA (1)...(19): siRNA sense strand
cugaagaggaggcgcgaau

SEQ ID NO: 2281960 - RNA, 19 nt, Homo sapiens
  misc_RNA (1)...(19): siRNA sense strand
ugaugaagaagaugggaau

SEQ ID NO: 2281961 - RNA, 19 nt, Homo sapiens
  misc_RNA (1)...(19): siRNA sense strand
aagcaaagauccaccgaga

SEQ ID NO: 2281962 - RNA, 19 nt, Homo sapiens
  misc_RNA (1)...(19): siRNA sense strand
ccgauaggccuucgagcaa

SEQ ID NO: 2281963 - RNA, 19 nt, Homo sapiens
  misc_RNA (1)...(19): siRNA sense strand
agaucaugcugaaggccaa

SEQ ID NO: 2281964 - RNA, 19 nt, Homo sapiens
  misc_RNA (1)...(19): siRNA sense strand
accgagagaagaagagaaa

SEQ ID NO: 2281965 - RNA, 19 nt, Homo sapiens
  misc_RNA (1)...(19): siRNA sense strand
ggccgaaaauuuagaggaa

SEQ ID NO: 2281966 - RNA, 19 nt, Homo sapiens
  misc_RNA (1)...(19): siRNA sense strand
caaucaaggccaaagaaaa

SEQ ID NO: 2281967 - RNA, 19 nt, Homo sapiens
  misc_RNA (1)...(19): siRNA sense strand
cgacagauaugauggacgu

SEQ ID NO: 2281968 - RNA, 19 nt, Homo sapiens
  misc_RNA (1)...(19): siRNA sense strand
ccugagagacggagggaag

SEQ ID NO: 2281969 - RNA, 19 nt, Homo sapiens
  misc_RNA (1)...(19): siRNA sense strand
aaucaaggccaaagaaaau

SEQ ID NO: 2281970 - RNA, 19 nt, Homo sapiens
  misc_RNA (1)...(19): siRNA sense strand
gagcaaaagcaaagaucca

SEQ ID NO: 2281971 - RNA, 19 nt, Homo sapiens
  misc_RNA (1)...(19): siRNA sense strand
ggccaaagucagagcgaug

SEQ ID NO: 2281972 - RNA, 19 nt, Homo sapiens
  misc_RNA (1)...(19): siRNA sense strand
cuauaaguucauccagaaa

SEQ ID NO: 2281973 - RNA, 19 nt, Homo sapiens
  misc_RNA (1)...(19): siRNA sense strand
ggggagucucucaggaaaa

SEQ ID NO: 2281974 - RNA, 19 nt, Homo sapiens
  misc_RNA (1)...(19): siRNA sense strand
augaugaagaagaugggaa

SEQ ID NO: 2281975 - RNA, 19 nt, Homo sapiens
  misc_RNA (1)...(19): siRNA sense strand
caaagcaagcaaagcaaaa

SEQ ID NO: 2281976 - RNA, 19 nt, Homo sapiens
  misc_RNA (1)...(19): siRNA sense strand
agaaagcaaagaaggccaa

SEQ ID NO: 2281977 - RNA, 19 nt, Homo sapiens
  misc_RNA (1)...(19): siRNA sense strand
aguuugagaucaugcugaa

SEQ ID NO: 2281978 - RNA, 19 nt, Homo sapiens
  misc_RNA (1)...(19): siRNA sense strand
augaagaugaugaugauga

SEQ ID NO: 2281979 - RNA, 19 nt, Homo sapiens
  misc_RNA (1)...(19): siRNA sense strand
augaugaugaagaaagcaa

SEQ ID NO: 2281980 - RNA, 19 nt, Homo sapiens
  misc_RNA (1)...(19): siRNA sense strand
ugacaaugaagaugaugau

SEQ ID NO: 2281981 - RNA, 19 nt, Homo sapiens
  misc_RNA (1)...(19): siRNA sense strand
cacgagaagaagaagaaga

SEQ ID NO: 2281982 - RNA, 19 nt, Homo sapiens
  misc_RNA (1)...(19): siRNA sense strand
gaacagagauuaucagcug

SEQ ID NO: 2281983 - RNA, 19 nt, Homo sapiens
  misc_RNA (1)...(19): siRNA sense strand
cgccaaacccgagaggaaa

SEQ ID NO: 2281984 - RNA, 19 nt, Homo sapiens
  misc_RNA (1)...(19): siRNA sense strand
gguaguggacccagaucau

SEQ ID NO: 2281985 - RNA, 19 nt, Homo sapiens
  misc_RNA (1)...(19): siRNA sense strand
ugaugaugaagaaagcaaa

SEQ ID NO: 2281986 - RNA, 19 nt, Homo sapiens
  misc_RNA (1)...(19): siRNA sense strand
ucauccaaguccaggucua

SEQ ID NO: 2281987 - RNA, 19 nt, Homo sapiens
  misc_RNA (1)...(19): siRNA sense strand
cccacgagaagaagaagaa

SEQ ID NO: 2281988 - RNA, 19 nt, Homo sapiens
  misc_RNA (1)...(19): siRNA sense strand
uccagaaagccaugaaaga

SEQ ID NO: 2281989 - RNA, 19 nt, Homo sapiens
  misc_RNA (1)...(19): siRNA sense strand
agcagaacguaaaaggaaa

SEQ ID NO: 2281990 - RNA, 19 nt, Homo sapiens
  misc_RNA (1)...(19): siRNA sense strand
gcagaggaugggagcuaca

SEQ ID NO: 2281991 - RNA, 19 nt, Homo sapiens
  misc_RNA (1)...(19): siRNA sense strand
gcuuugcaaucaaggccaa

SEQ ID NO: 2281992 - RNA, 19 nt, Homo sapiens
  misc_RNA (1)...(19): siRNA sense strand
ggucuagaucacacucaaa

SEQ ID NO: 2281993 - RNA, 19 nt, Homo sapiens
  misc_RNA (1)...(19): siRNA sense strand
gaggaagaauacaagcgau

SEQ ID NO: 2281994 - RNA, 19 nt, Homo sapiens
  misc_RNA (1)...(19): siRNA sense strand
cugacaaugaagaugauga

SEQ ID NO: 2281995 - RNA, 19 nt, Homo sapiens
  misc_RNA (1)...(19): siRNA sense strand
gccaaacccgagaggaaaa

SEQ ID NO: 2281996 - RNA, 19 nt, Homo sapiens
  misc_RNA (1)...(19): siRNA sense strand
agauccucaucgacagaua

SEQ ID NO: 2281997 - RNA, 19 nt, Homo sapiens
  misc_RNA (1)...(19): siRNA sense strand
ucuaaggagucaaaagaga

SEQ ID NO: 2281998 - RNA, 19 nt, Homo sapiens
  misc_RNA (1)...(19): siRNA sense strand
aagaagaagaagaggcggu

SEQ ID NO: 2281999 - RNA, 19 nt, Homo sapiens
  misc_RNA (1)...(19): siRNA sense strand
aagaugaugaugaugaaga

SEQ ID NO: 2282000 - RNA, 19 nt, Homo sapiens
  misc_RNA (1)...(19): siRNA sense strand
cggaagcagaagcugggaa

SEQ ID NO: 2282001 - RNA, 19 nt, Homo sapiens
  misc_RNA (1)...(19): siRNA sense strand
caaaagagaaacagcuuca

SEQ ID NO: 2282002 - RNA, 19 nt, Homo sapiens
  misc_RNA (1)...(19): siRNA sense strand
aagcagaacguaaaaggaa

SEQ ID NO: 2282003 - RNA, 19 nt, Homo sapiens
  misc_RNA (1)...(19): siRNA sense strand
agauccaccgagagaagaa

SEQ ID NO: 2282004 - RNA, 19 nt, Homo sapiens
  misc_RNA (1)...(19): siRNA sense strand
aggaagaauacaagcgauu

SEQ ID NO: 2282005 - RNA, 19 nt, Homo sapiens
  misc_RNA (1)...(19): siRNA sense strand
cugaagaggaggcgcgaau

SEQ ID NO: 2282006 - RNA, 19 nt, Homo sapiens
  misc_RNA (1)...(19): siRNA sense strand
cgacagauaugauggacgu

SEQ ID NO: 2282007 - RNA, 19 nt, Homo sapiens
  misc_RNA (1)...(19): siRNA sense strand
gaacagagauuaucagcug

SEQ ID NO: 2282008 - RNA, 19 nt, Homo sapiens
  misc_RNA (1)...(19): siRNA sense strand
cgccaaacccgagaggaaa

SEQ ID NO: 2282009 - RNA, 19 nt, Homo sapiens
  misc_RNA (1)...(19): siRNA sense strand
gccaaacccgagaggaaaa

SEQ ID NO: 2282010 - RNA, 19 nt, Homo sapiens
  misc_RNA (1)...(19): siRNA sense strand
gaggaagaauacaagcgau

SEQ ID NO: 2282011 - RNA, 19 nt, Homo sapiens
  misc_RNA (1)...(19): siRNA sense strand
agauccucaucgacagaua

SEQ ID NO: 2282012 - RNA, 19 nt, Homo sapiens
  misc_RNA (1)...(19): siRNA sense strand
uguaaauguggcaggaaua

SEQ ID NO: 2282013 - RNA, 19 nt, Homo sapiens
  misc_RNA (1)...(19): siRNA sense strand
ucggaagaaaggagauaaa

SEQ ID NO: 2282014 - RNA, 19 nt, Homo sapiens
  misc_RNA (1)...(19): siRNA sense strand
cgugauugugacagaaaua

SEQ ID NO: 2282015 - RNA, 19 nt, Homo sapiens
  misc_RNA (1)...(19): siRNA sense strand
cuguaaauguggcaggaau

SEQ ID NO: 2282016 - RNA, 19 nt, Homo sapiens
  misc_RNA (1)...(19): siRNA sense strand
auugggaagacuagggaua

SEQ ID NO: 2282017 - RNA, 19 nt, Homo sapiens
  misc_RNA (1)...(19): siRNA sense strand
gagcauucaccuuaggcua

SEQ ID NO: 2282018 - RNA, 19 nt, Homo sapiens
  misc_RNA (1)...(19): siRNA sense strand
ugacagaaauaguagguuc

SEQ ID NO: 2282019 - RNA, 19 nt, Homo sapiens
  misc_RNA (1)...(19): siRNA sense strand
ugcuaagugcaaugggaaa

SEQ ID NO: 2282020 - RNA, 19 nt, Homo sapiens
  misc_RNA (1)...(19): siRNA sense strand
gcuaagugcaaugggaaau

SEQ ID NO: 2282021 - RNA, 19 nt, Homo sapiens
  misc_RNA (1)...(19): siRNA sense strand
agacaguggaugauguaga

SEQ ID NO: 2282022 - RNA, 19 nt, Homo sapiens
  misc_RNA (1)...(19): siRNA sense strand
ucaucaaauuacucagaga

SEQ ID NO: 2282023 - RNA, 19 nt, Homo sapiens
  misc_RNA (1)...(19): siRNA sense strand
ggaauagcaugguugagga

SEQ ID NO: 2282024 - RNA, 19 nt, Homo sapiens
  misc_RNA (1)...(19): siRNA sense strand
gguucgaaacaaaggagga

SEQ ID NO: 2282025 - RNA, 19 nt, Homo sapiens
  misc_RNA (1)...(19): siRNA sense strand
acucggaagaaaggagaua

SEQ ID NO: 2282026 - RNA, 19 nt, Homo sapiens
  misc_RNA (1)...(19): siRNA sense strand
aagaaaggagauaaagcau

SEQ ID NO: 2282027 - RNA, 19 nt, Homo sapiens
  misc_RNA (1)...(19): siRNA sense strand
ccaaaugaggaaaugcaca

SEQ ID NO: 2282028 - RNA, 19 nt, Homo sapiens
  misc_RNA (1)...(19): siRNA sense strand
cccaacaacauuacgaaau

SEQ ID NO: 2282029 - RNA, 19 nt, Homo sapiens
  misc_RNA (1)...(19): siRNA sense strand
aaauaguagguucgaaaca

SEQ ID NO: 2282030 - RNA, 19 nt, Homo sapiens
  misc_RNA (1)...(19): siRNA sense strand
agguauggcaggaucguca

SEQ ID NO: 2282031 - RNA, 19 nt, Homo sapiens
  misc_RNA (1)...(19): siRNA sense strand
ugccugaaaccaaggguau

SEQ ID NO: 2282032 - RNA, 19 nt, Homo sapiens
  misc_RNA (1)...(19): siRNA sense strand
caguggaugauguagaaaa

SEQ ID NO: 2282033 - RNA, 19 nt, Homo sapiens
  misc_RNA (1)...(19): siRNA sense strand
gcgugaagacugaggugga

SEQ ID NO: 2282034 - RNA, 19 nt, Homo sapiens
  misc_RNA (1)...(19): siRNA sense strand
agacugagguggaggacac

SEQ ID NO: 2282035 - RNA, 19 nt, Homo sapiens
  misc_RNA (1)...(19): siRNA sense strand
cgacgcuggccgagaucua

SEQ ID NO: 2282036 - RNA, 19 nt, Homo sapiens
  misc_RNA (1)...(19): siRNA sense strand
ugagaaggccaguggguac

SEQ ID NO: 2282037 - RNA, 19 nt, Homo sapiens
  misc_RNA (1)...(19): siRNA sense strand
uggugggcacugaggcaaa

SEQ ID NO: 2282038 - RNA, 19 nt, Homo sapiens
  misc_RNA (1)...(19): siRNA sense strand
agaaacucaagcaggagaa

SEQ ID NO: 2282039 - RNA, 19 nt, Homo sapiens
  misc_RNA (1)...(19): siRNA sense strand
gcauugagagugaagacca

SEQ ID NO: 2282040 - RNA, 19 nt, Homo sapiens
  misc_RNA (1)...(19): siRNA sense strand
guaucaaggaagagucagu

SEQ ID NO: 2282041 - RNA, 19 nt, Homo sapiens
  misc_RNA (1)...(19): siRNA sense strand
cuacauucgcuuucugcaa

SEQ ID NO: 2282042 - RNA, 19 nt, Homo sapiens
  misc_RNA (1)...(19): siRNA sense strand
cugaaugugcagaggagaa

SEQ ID NO: 2282043 - RNA, 19 nt, Homo sapiens
  misc_RNA (1)...(19): siRNA sense strand
cuauagaguccuuggugaa

SEQ ID NO: 2282044 - RNA, 19 nt, Homo sapiens
  misc_RNA (1)...(19): siRNA sense strand
cugcaacaacagacgguaa

SEQ ID NO: 2282045 - RNA, 19 nt, Homo sapiens
  misc_RNA (1)...(19): siRNA sense strand
aggagaacauggugcugaa

SEQ ID NO: 2282046 - RNA, 19 nt, Homo sapiens
  misc_RNA (1)...(19): siRNA sense strand
uggcaaaucaaaagaacaa

SEQ ID NO: 2282047 - RNA, 19 nt, Homo sapiens
  misc_RNA (1)...(19): siRNA sense strand
uggugaaaccucaggccaa

SEQ ID NO: 2282048 - RNA, 19 nt, Homo sapiens
  misc_RNA (1)...(19): siRNA sense strand
cggacagcgcucuggcaaa

SEQ ID NO: 2282049 - RNA, 19 nt, Homo sapiens
  misc_RNA (1)...(19): siRNA sense strand
ugaggaaggccauugauua

SEQ ID NO: 2282050 - RNA, 19 nt, Homo sapiens
  misc_RNA (1)...(19): siRNA sense strand
gcuauagaguccuugguga

SEQ ID NO: 2282051 - RNA, 19 nt, Homo sapiens
  misc_RNA (1)...(19): siRNA sense strand
ccaagaagaaggcuggaga

SEQ ID NO: 2282052 - RNA, 19 nt, Homo sapiens
  misc_RNA (1)...(19): siRNA sense strand
ucaguaaucaagugggaga

SEQ ID NO: 2282053 - RNA, 19 nt, Homo sapiens
  misc_RNA (1)...(19): siRNA sense strand
ucuaaagggcaucgaccua

SEQ ID NO: 2282054 - RNA, 19 nt, Homo sapiens
  misc_RNA (1)...(19): siRNA sense strand
accugaagaucgaggacuu

SEQ ID NO: 2282055 - RNA, 19 nt, Homo sapiens
  misc_RNA (1)...(19): siRNA sense strand
aggucaaagaugagccaga

SEQ ID NO: 2282056 - RNA, 19 nt, Homo sapiens
  misc_RNA (1)...(19): siRNA sense strand
uggaugaugcaaaggucaa

SEQ ID NO: 2282057 - RNA, 19 nt, Homo sapiens
  misc_RNA (1)...(19): siRNA sense strand
uuaccaaaguggaacgcau

SEQ ID NO: 2282058 - RNA, 19 nt, Homo sapiens
  misc_RNA (1)...(19): siRNA sense strand
agucuggcguucugaggaa

SEQ ID NO: 2282059 - RNA, 19 nt, Homo sapiens
  misc_RNA (1)...(19): siRNA sense strand
cggacaacccauaauauca

SEQ ID NO: 2282060 - RNA, 19 nt, Homo sapiens
  misc_RNA (1)...(19): siRNA sense strand
uaggcagucugguggacaa

SEQ ID NO: 2282061 - RNA, 19 nt, Homo sapiens
  misc_RNA (1)...(19): siRNA sense strand
ugggagacaucgacgagau

SEQ ID NO: 2282062 - RNA, 19 nt, Homo sapiens
  misc_RNA (1)...(19): siRNA sense strand
aggcaggcuuugaagacga

SEQ ID NO: 2282063 - RNA, 19 nt, Homo sapiens
  misc_RNA (1)...(19): siRNA sense strand
gggcaucgaccuaggcagu

SEQ ID NO: 2282064 - RNA, 19 nt, Homo sapiens
  misc_RNA (1)...(19): siRNA sense strand
cucuauuggaugaugcaaa

SEQ ID NO: 2282065 - RNA, 19 nt, Homo sapiens
  misc_RNA (1)...(19): siRNA sense strand
ggaaacaggcagaucugga

SEQ ID NO: 2282066 - RNA, 19 nt, Homo sapiens
  misc_RNA (1)...(19): siRNA sense strand
ugucaguaaucaaguggga

SEQ ID NO: 2282067 - RNA, 19 nt, Homo sapiens
  misc_RNA (1)...(19): siRNA sense strand
auaaacugcgccaggagaa

SEQ ID NO: 2282068 - RNA, 19 nt, Homo sapiens
  misc_RNA (1)...(19): siRNA sense strand
cugcaaucacuguggccau

SEQ ID NO: 2282069 - RNA, 19 nt, Homo sapiens
  misc_RNA (1)...(19): siRNA sense strand
ccuucagccucaaguccaa

SEQ ID NO: 2282070 - RNA, 19 nt, Homo sapiens
  misc_RNA (1)...(19): siRNA sense strand
gaggaaggccauugauuac

SEQ ID NO: 2282071 - RNA, 19 nt, Homo sapiens
  misc_RNA (1)...(19): siRNA sense strand
ugguaaauggugugauugu

SEQ ID NO: 2282072 - RNA, 19 nt, Homo sapiens
  misc_RNA (1)...(19): siRNA sense strand
cagaucaucaagacagauu

SEQ ID NO: 2282073 - RNA, 19 nt, Homo sapiens
  misc_RNA (1)...(19): siRNA sense strand
ucaaauacuugcagcaggu

SEQ ID NO: 2282074 - RNA, 19 nt, Homo sapiens
  misc_RNA (1)...(19): siRNA sense strand
aggacuacguggagaucaa

SEQ ID NO: 2282075 - RNA, 19 nt, Homo sapiens
  misc_RNA (1)...(19): siRNA sense strand
acgagaaagugaauggcuu

SEQ ID NO: 2282076 - RNA, 19 nt, Homo sapiens
  misc_RNA (1)...(19): siRNA sense strand
acgucaagaagguggaaaa

SEQ ID NO: 2282077 - RNA, 19 nt, Homo sapiens
  misc_RNA (1)...(19): siRNA sense strand
guacagaggacccaggaca

SEQ ID NO: 2282078 - RNA, 19 nt, Homo sapiens
  misc_RNA (1)...(19): siRNA sense strand
cgaaaagccagcagugcaa

SEQ ID NO: 2282079 - RNA, 19 nt, Homo sapiens
  misc_RNA (1)...(19): siRNA sense strand
guguggagcugaugcgcuu

SEQ ID NO: 2282080 - RNA, 19 nt, Homo sapiens
  misc_RNA (1)...(19): siRNA sense strand
ccaaggacuacguggagau

SEQ ID NO: 2282081 - RNA, 19 nt, Homo sapiens
  misc_RNA (1)...(19): siRNA sense strand
ggaacauugaggugcccaa

SEQ ID NO: 2282082 - RNA, 19 nt, Homo sapiens
  misc_RNA (1)...(19): siRNA sense strand
gcaugaugugcgugggcuu

SEQ ID NO: 2282083 - RNA, 19 nt, Homo sapiens
  misc_RNA (1)...(19): siRNA sense strand
gaucaguccuacaccgaca

SEQ ID NO: 2282084 - RNA, 19 nt, Homo sapiens
  misc_RNA (1)...(19): siRNA sense strand
ggacuggaucaaagagaac

SEQ ID NO: 2282085 - RNA, 19 nt, Homo sapiens
  misc_RNA (1)...(19): siRNA sense strand
uggaggaaggcguggaguu

SEQ ID NO: 2282086 - RNA, 19 nt, Homo sapiens
  misc_RNA (1)...(19): siRNA sense strand
cagucaacaacgucaagaa

SEQ ID NO: 2282087 - RNA, 19 nt, Homo sapiens
  misc_RNA (1)...(19): siRNA sense strand
aggugaaggacgcgcugaa

SEQ ID NO: 2282088 - RNA, 19 nt, Homo sapiens
  misc_RNA (1)...(19): siRNA sense strand
ccacugaguuuguaagccu

SEQ ID NO: 2282089 - RNA, 19 nt, Homo sapiens
  misc_RNA (1)...(19): siRNA sense strand
uuguaagccuggccagcaa

SEQ ID NO: 2282090 - RNA, 19 nt, Homo sapiens
  misc_RNA (1)...(19): siRNA sense strand
agugaauggcuuggaggaa

SEQ ID NO: 2282091 - RNA, 19 nt, Homo sapiens
  misc_RNA (1)...(19): siRNA sense strand
caaagagaacacuggggua

SEQ ID NO: 2282092 - RNA, 19 nt, Homo sapiens
  misc_RNA (1)...(19): siRNA sense strand
ccaacaagaagguggccaa

SEQ ID NO: 2282093 - RNA, 19 nt, Homo sapiens
  misc_RNA (1)...(19): siRNA sense strand
acagcaauuuaauggcaaa

SEQ ID NO: 2282094 - RNA, 19 nt, Homo sapiens
  misc_RNA (1)...(19): siRNA sense strand
aggaguuagucaaggacau

SEQ ID NO: 2282095 - RNA, 19 nt, Homo sapiens
  misc_RNA (1)...(19): siRNA sense strand
gaggugaauggaagagaau

SEQ ID NO: 2282096 - RNA, 19 nt, Homo sapiens
  misc_RNA (1)...(19): siRNA sense strand
cguugaggauccugcagaa

SEQ ID NO: 2282097 - RNA, 19 nt, Homo sapiens
  misc_RNA (1)...(19): siRNA sense strand
cugccaaagcguugaggau

SEQ ID NO: 2282098 - RNA, 19 nt, Homo sapiens
  misc_RNA (1)...(19): siRNA sense strand
agaagguggccaagcgcaa

SEQ ID NO: 2282099 - RNA, 19 nt, Homo sapiens
  misc_RNA (1)...(19): siRNA sense strand
cacucaagucagaggagaa

SEQ ID NO: 2282100 - RNA, 19 nt, Homo sapiens
  misc_RNA (1)...(19): siRNA sense strand
uuuccagaguccagggauu

SEQ ID NO: 2282101 - RNA, 19 nt, Homo sapiens
  misc_RNA (1)...(19): siRNA sense strand
cuaguaauaaagaggauga

SEQ ID NO: 2282102 - RNA, 19 nt, Homo sapiens
  misc_RNA (1)...(19): siRNA sense strand
ggggauggaagaaaaguaa

SEQ ID NO: 2282103 - RNA, 19 nt, Homo sapiens
  misc_RNA (1)...(19): siRNA sense strand
gagaauccgaagaagaaaa

SEQ ID NO: 2282104 - RNA, 19 nt, Homo sapiens
  misc_RNA (1)...(19): siRNA sense strand
gacuaguaauaaagaggau

SEQ ID NO: 2282105 - RNA, 19 nt, Homo sapiens
  misc_RNA (1)...(19): siRNA sense strand
aaacaaaacccauagucaa

SEQ ID NO: 2282106 - RNA, 19 nt, Homo sapiens
  misc_RNA (1)...(19): siRNA sense strand
aggagaagacacccauaaa

SEQ ID NO: 2282107 - RNA, 19 nt, Homo sapiens
  misc_RNA (1)...(19): siRNA sense strand
gcgcaaugcagccgagaac

SEQ ID NO: 2282108 - RNA, 19 nt, Homo sapiens
  misc_RNA (1)...(19): siRNA sense strand
ccaccaaacccgcacucaa

SEQ ID NO: 2282109 - RNA, 19 nt, Homo sapiens
  misc_RNA (1)...(19): siRNA sense strand
cacgagacccucugagcaa

SEQ ID NO: 2282110 - RNA, 19 nt, Homo sapiens
  misc_RNA (1)...(19): siRNA sense strand
agcaagaagauuucaaaga

SEQ ID NO: 2282111 - RNA, 19 nt, Homo sapiens
  misc_RNA (1)...(19): siRNA sense strand
gcccagauccagcaggcaa

SEQ ID NO: 2282112 - RNA, 19 nt, Homo sapiens
  misc_RNA (1)...(19): siRNA sense strand
aguuugugaugcaggugaa

SEQ ID NO: 2282113 - RNA, 19 nt, Homo sapiens
  misc_RNA (1)...(19): siRNA sense strand
agacaagacaggcugcgaa

SEQ ID NO: 2282114 - RNA, 19 nt, Homo sapiens
  misc_RNA (1)...(19): siRNA sense strand
guuugagauugcacuuaaa

SEQ ID NO: 2282115 - RNA, 19 nt, Homo sapiens
  misc_RNA (1)...(19): siRNA sense strand
cgcccaggcuguaggaguu

SEQ ID NO: 2282116 - RNA, 19 nt, Homo sapiens
  misc_RNA (1)...(19): siRNA sense strand
aggagaaggagccagagua

SEQ ID NO: 2282117 - RNA, 19 nt, Homo sapiens
  misc_RNA (1)...(19): siRNA sense strand
agaacaugcuggagauccu

SEQ ID NO: 2282118 - RNA, 19 nt, Homo sapiens
  misc_RNA (1)...(19): siRNA sense strand
ggugaagggaaaagcaaga

SEQ ID NO: 2282119 - RNA, 19 nt, Homo sapiens
  misc_RNA (1)...(19): siRNA sense strand
caaaguacagagaugccaa

SEQ ID NO: 2282120 - RNA, 19 nt, Homo sapiens
  misc_RNA (1)...(19): siRNA sense strand
caacaugagaggaggugcu

SEQ ID NO: 2282121 - RNA, 19 nt, Homo sapiens
  misc_RNA (1)...(19): siRNA sense strand
ggacagcaauuuaauggca

SEQ ID NO: 2282122 - RNA, 19 nt, Homo sapiens
  misc_RNA (1)...(19): siRNA sense strand
cauaaagaaaccaggggau

SEQ ID NO: 2282123 - RNA, 19 nt, Homo sapiens
  misc_RNA (1)...(19): siRNA sense strand
cccagauccagcaggcaaa

SEQ ID NO: 2282124 - RNA, 19 nt, Homo sapiens
  misc_RNA (1)...(19): siRNA sense strand
ccaacaagaagguggccaa

SEQ ID NO: 2282125 - RNA, 19 nt, Homo sapiens
  misc_RNA (1)...(19): siRNA sense strand
acagcaauuuaauggcaaa

SEQ ID NO: 2282126 - RNA, 19 nt, Homo sapiens
  misc_RNA (1)...(19): siRNA sense strand
aggaguuagucaaggacau

SEQ ID NO: 2282127 - RNA, 19 nt, Homo sapiens
  misc_RNA (1)...(19): siRNA sense strand
gaggugaauggaagagaau

SEQ ID NO: 2282128 - RNA, 19 nt, Homo sapiens
  misc_RNA (1)...(19): siRNA sense strand
cguugaggauccugcagaa

SEQ ID NO: 2282129 - RNA, 19 nt, Homo sapiens
  misc_RNA (1)...(19): siRNA sense strand
cugccaaagcguugaggau

SEQ ID NO: 2282130 - RNA, 19 nt, Homo sapiens
  misc_RNA (1)...(19): siRNA sense strand
agaagguggccaagcgcaa

SEQ ID NO: 2282131 - RNA, 19 nt, Homo sapiens
  misc_RNA (1)...(19): siRNA sense strand
cacucaagucagaggagaa

SEQ ID NO: 2282132 - RNA, 19 nt, Homo sapiens
  misc_RNA (1)...(19): siRNA sense strand
uuuccagaguccagggauu

SEQ ID NO: 2282133 - RNA, 19 nt, Homo sapiens
  misc_RNA (1)...(19): siRNA sense strand
cuaguaauaaagaggauga

SEQ ID NO: 2282134 - RNA, 19 nt, Homo sapiens
  misc_RNA (1)...(19): siRNA sense strand
ggggauggaagaaaaguaa

SEQ ID NO: 2282135 - RNA, 19 nt, Homo sapiens
  misc_RNA (1)...(19): siRNA sense strand
gagaauccgaagaagaaaa

SEQ ID NO: 2282136 - RNA, 19 nt, Homo sapiens
  misc_RNA (1)...(19): siRNA sense strand
gacuaguaauaaagaggau

SEQ ID NO: 2282137 - RNA, 19 nt, Homo sapiens
  misc_RNA (1)...(19): siRNA sense strand
aaacaaaacccauagucaa

SEQ ID NO: 2282138 - RNA, 19 nt, Homo sapiens
  misc_RNA (1)...(19): siRNA sense strand
aggagaagacacccauaaa

SEQ ID NO: 2282139 - RNA, 19 nt, Homo sapiens
  misc_RNA (1)...(19): siRNA sense strand
gcgcaaugcagccgagaac

SEQ ID NO: 2282140 - RNA, 19 nt, Homo sapiens
  misc_RNA (1)...(19): siRNA sense strand
ccaccaaacccgcacucaa

SEQ ID NO: 2282141 - RNA, 19 nt, Homo sapiens
  misc_RNA (1)...(19): siRNA sense strand
cacgagacccucugagcaa

SEQ ID NO: 2282142 - RNA, 19 nt, Homo sapiens
  misc_RNA (1)...(19): siRNA sense strand
agcaagaagauuucaaaga

SEQ ID NO: 2282143 - RNA, 19 nt, Homo sapiens
  misc_RNA (1)...(19): siRNA sense strand
gcccagauccagcaggcaa

SEQ ID NO: 2282144 - RNA, 19 nt, Homo sapiens
  misc_RNA (1)...(19): siRNA sense strand
aguuugugaugcaggugaa

SEQ ID NO: 2282145 - RNA, 19 nt, Homo sapiens
  misc_RNA (1)...(19): siRNA sense strand
agacaagacaggcugcgaa

SEQ ID NO: 2282146 - RNA, 19 nt, Homo sapiens
  misc_RNA (1)...(19): siRNA sense strand
guuugagauugcacuuaaa

SEQ ID NO: 2282147 - RNA, 19 nt, Homo sapiens
  misc_RNA (1)...(19): siRNA sense strand
cgcccaggcuguaggaguu

SEQ ID NO: 2282148 - RNA, 19 nt, Homo sapiens
  misc_RNA (1)...(19): siRNA sense strand
aggagaaggagccagagua

SEQ ID NO: 2282149 - RNA, 19 nt, Homo sapiens
  misc_RNA (1)...(19): siRNA sense strand
agaacaugcuggagauccu

SEQ ID NO: 2282150 - RNA, 19 nt, Homo sapiens
  misc_RNA (1)...(19): siRNA sense strand
ggugaagggaaaagcaaga

SEQ ID NO: 2282151 - RNA, 19 nt, Homo sapiens
  misc_RNA (1)...(19): siRNA sense strand
caaaguacagagaugccaa

SEQ ID NO: 2282152 - RNA, 19 nt, Homo sapiens
  misc_RNA (1)...(19): siRNA sense strand
caacaugagaggaggugcu

SEQ ID NO: 2282153 - RNA, 19 nt, Homo sapiens
  misc_RNA (1)...(19): siRNA sense strand
ggacagcaauuuaauggca

SEQ ID NO: 2282154 - RNA, 19 nt, Homo sapiens
  misc_RNA (1)...(19): siRNA sense strand
cauaaagaaaccaggggau

SEQ ID NO: 2282155 - RNA, 19 nt, Homo sapiens
  misc_RNA (1)...(19): siRNA sense strand
cccagauccagcaggcaaa

SEQ ID NO: 2282156 - RNA, 19 nt, Homo sapiens
  misc_RNA (1)...(19): siRNA sense strand
ccaacaagaagguggccaa

SEQ ID NO: 2282157 - RNA, 19 nt, Homo sapiens
  misc_RNA (1)...(19): siRNA sense strand
gugcaugaaacuuggaaaa

SEQ ID NO: 2282158 - RNA, 19 nt, Homo sapiens
  misc_RNA (1)...(19): siRNA sense strand
acagcaauuuaauggcaaa

SEQ ID NO: 2282159 - RNA, 19 nt, Homo sapiens
  misc_RNA (1)...(19): siRNA sense strand
aggaguuagucaaggacau

SEQ ID NO: 2282160 - RNA, 19 nt, Homo sapiens
  misc_RNA (1)...(19): siRNA sense strand
gaggugaauggaagagaau

SEQ ID NO: 2282161 - RNA, 19 nt, Homo sapiens
  misc_RNA (1)...(19): siRNA sense strand
cguugaggauccugcagaa

SEQ ID NO: 2282162 - RNA, 19 nt, Homo sapiens
  misc_RNA (1)...(19): siRNA sense strand
cugccaaagcguugaggau

SEQ ID NO: 2282163 - RNA, 19 nt, Homo sapiens
  misc_RNA (1)...(19): siRNA sense strand
agaagguggccaagcgcaa

SEQ ID NO: 2282164 - RNA, 19 nt, Homo sapiens
  misc_RNA (1)...(19): siRNA sense strand
cacucaagucagaggagaa

SEQ ID NO: 2282165 - RNA, 19 nt, Homo sapiens
  misc_RNA (1)...(19): siRNA sense strand
uuuccagaguccagggauu

SEQ ID NO: 2282166 - RNA, 19 nt, Homo sapiens
  misc_RNA (1)...(19): siRNA sense strand
cuaguaauaaagaggauga

SEQ ID NO: 2282167 - RNA, 19 nt, Homo sapiens
  misc_RNA (1)...(19): siRNA sense strand
ggggauggaagaaaaguaa

SEQ ID NO: 2282168 - RNA, 19 nt, Homo sapiens
  misc_RNA (1)...(19): siRNA sense strand
gagaauccgaagaagaaaa

SEQ ID NO: 2282169 - RNA, 19 nt, Homo sapiens
  misc_RNA (1)...(19): siRNA sense strand
gacuaguaauaaagaggau

SEQ ID NO: 2282170 - RNA, 19 nt, Homo sapiens
  misc_RNA (1)...(19): siRNA sense strand
aaacaaaacccauagucaa

SEQ ID NO: 2282171 - RNA, 19 nt, Homo sapiens
  misc_RNA (1)...(19): siRNA sense strand
aggagaagacacccauaaa

SEQ ID NO: 2282172 - RNA, 19 nt, Homo sapiens
  misc_RNA (1)...(19): siRNA sense strand
gcgcaaugcagccgagaac

SEQ ID NO: 2282173 - RNA, 19 nt, Homo sapiens
  misc_RNA (1)...(19): siRNA sense strand
ccaccaaacccgcacucaa

SEQ ID NO: 2282174 - RNA, 19 nt, Homo sapiens
  misc_RNA (1)...(19): siRNA sense strand
cacgagacccucugagcaa

SEQ ID NO: 2282175 - RNA, 19 nt, Homo sapiens
  misc_RNA (1)...(19): siRNA sense strand
agcaagaagauuucaaaga

SEQ ID NO: 2282176 - RNA, 19 nt, Homo sapiens
  misc_RNA (1)...(19): siRNA sense strand
gcccagauccagcaggcaa

SEQ ID NO: 2282177 - RNA, 19 nt, Homo sapiens
  misc_RNA (1)...(19): siRNA sense strand
aguuugugaugcaggugaa

SEQ ID NO: 2282178 - RNA, 19 nt, Homo sapiens
  misc_RNA (1)...(19): siRNA sense strand
agacaagacaggcugcgaa

SEQ ID NO: 2282179 - RNA, 19 nt, Homo sapiens
  misc_RNA (1)...(19): siRNA sense strand
guuugagauugcacuuaaa

SEQ ID NO: 2282180 - RNA, 19 nt, Homo sapiens
  misc_RNA (1)...(19): siRNA sense strand
cgcccaggcuguaggaguu

SEQ ID NO: 2282181 - RNA, 19 nt, Homo sapiens
  misc_RNA (1)...(19): siRNA sense strand
aggagaaggagccagagua

SEQ ID NO: 2282182 - RNA, 19 nt, Homo sapiens
  misc_RNA (1)...(19): siRNA sense strand
agaacaugcuggagauccu

SEQ ID NO: 2282183 - RNA, 19 nt, Homo sapiens
  misc_RNA (1)...(19): siRNA sense strand
ggugaagggaaaagcaaga

SEQ ID NO: 2282184 - RNA, 19 nt, Homo sapiens
  misc_RNA (1)...(19): siRNA sense strand
caaaguacagagaugccaa

SEQ ID NO: 2282185 - RNA, 19 nt, Homo sapiens
  misc_RNA (1)...(19): siRNA sense strand
caacaugagaggaggugcu

SEQ ID NO: 2282186 - RNA, 19 nt, Homo sapiens
  misc_RNA (1)...(19): siRNA sense strand
ggacagcaauuuaauggca

SEQ ID NO: 2282187 - RNA, 19 nt, Homo sapiens
  misc_RNA (1)...(19): siRNA sense strand
cuguagaacuaaaugcacu

SEQ ID NO: 2282188 - RNA, 19 nt, Homo sapiens
  misc_RNA (1)...(19): siRNA sense strand
cauaaagaaaccaggggau

SEQ ID NO: 2282189 - RNA, 19 nt, Homo sapiens
  misc_RNA (1)...(19): siRNA sense strand
cccagauccagcaggcaaa

SEQ ID NO: 2282190 - RNA, 19 nt, Homo sapiens
  misc_RNA (1)...(19): siRNA sense strand
ccaacaagaagguggccaa

SEQ ID NO: 2282191 - RNA, 19 nt, Homo sapiens
  misc_RNA (1)...(19): siRNA sense strand
acagcaauuuaauggcaaa

SEQ ID NO: 2282192 - RNA, 19 nt, Homo sapiens
  misc_RNA (1)...(19): siRNA sense strand
aggaguuagucaaggacau

SEQ ID NO: 2282193 - RNA, 19 nt, Homo sapiens
  misc_RNA (1)...(19): siRNA sense strand
gaggugaauggaagagaau

SEQ ID NO: 2282194 - RNA, 19 nt, Homo sapiens
  misc_RNA (1)...(19): siRNA sense strand
cguugaggauccugcagaa

SEQ ID NO: 2282195 - RNA, 19 nt, Homo sapiens
  misc_RNA (1)...(19): siRNA sense strand
cugccaaagcguugaggau

SEQ ID NO: 2282196 - RNA, 19 nt, Homo sapiens
  misc_RNA (1)...(19): siRNA sense strand
agaagguggccaagcgcaa

SEQ ID NO: 2282197 - RNA, 19 nt, Homo sapiens
  misc_RNA (1)...(19): siRNA sense strand
cacucaagucagaggagaa

SEQ ID NO: 2282198 - RNA, 19 nt, Homo sapiens
  misc_RNA (1)...(19): siRNA sense strand
uuuccagaguccagggauu

SEQ ID NO: 2282199 - RNA, 19 nt, Homo sapiens
  misc_RNA (1)...(19): siRNA sense strand
cuaguaauaaagaggauga

SEQ ID NO: 2282200 - RNA, 19 nt, Homo sapiens
  misc_RNA (1)...(19): siRNA sense strand
ggggauggaagaaaaguaa

SEQ ID NO: 2282201 - RNA, 19 nt, Homo sapiens
  misc_RNA (1)...(19): siRNA sense strand
gagaauccgaagaagaaaa

SEQ ID NO: 2282202 - RNA, 19 nt, Homo sapiens
  misc_RNA (1)...(19): siRNA sense strand
gacuaguaauaaagaggau

SEQ ID NO: 2282203 - RNA, 19 nt, Homo sapiens
  misc_RNA (1)...(19): siRNA sense strand
aaacaaaacccauagucaa

SEQ ID NO: 2282204 - RNA, 19 nt, Homo sapiens
  misc_RNA (1)...(19): siRNA sense strand
aggagaagacacccauaaa

SEQ ID NO: 2282205 - RNA, 19 nt, Homo sapiens
  misc_RNA (1)...(19): siRNA sense strand
gcgcaaugcagccgagaac

SEQ ID NO: 2282206 - RNA, 19 nt, Homo sapiens
  misc_RNA (1)...(19): siRNA sense strand
ccaccaaacccgcacucaa

SEQ ID NO: 2282207 - RNA, 19 nt, Homo sapiens
  misc_RNA (1)...(19): siRNA sense strand
cacgagacccucugagcaa

SEQ ID NO: 2282208 - RNA, 19 nt, Homo sapiens
  misc_RNA (1)...(19): siRNA sense strand
agcaagaagauuucaaaga

SEQ ID NO: 2282209 - RNA, 19 nt, Homo sapiens
  misc_RNA (1)...(19): siRNA sense strand
gcccagauccagcaggcaa

SEQ ID NO: 2282210 - RNA, 19 nt, Homo sapiens
  misc_RNA (1)...(19): siRNA sense strand
aguuugugaugcaggugaa

SEQ ID NO: 2282211 - RNA, 19 nt, Homo sapiens
  misc_RNA (1)...(19): siRNA sense strand
agacaagacaggcugcgaa

SEQ ID NO: 2282212 - RNA, 19 nt, Homo sapiens
  misc_RNA (1)...(19): siRNA sense strand
guuugagauugcacuuaaa

SEQ ID NO: 2282213 - RNA, 19 nt, Homo sapiens
  misc_RNA (1)...(19): siRNA sense strand
cgcccaggcuguaggaguu

SEQ ID NO: 2282214 - RNA, 19 nt, Homo sapiens
  misc_RNA (1)...(19): siRNA sense strand
aggagaaggagccagagua

SEQ ID NO: 2282215 - RNA, 19 nt, Homo sapiens
  misc_RNA (1)...(19): siRNA sense strand
agaacaugcuggagauccu

SEQ ID NO: 2282216 - RNA, 19 nt, Homo sapiens
  misc_RNA (1)...(19): siRNA sense strand
ggugaagggaaaagcaaga

SEQ ID NO: 2282217 - RNA, 19 nt, Homo sapiens
  misc_RNA (1)...(19): siRNA sense strand
caaaguacagagaugccaa

SEQ ID NO: 2282218 - RNA, 19 nt, Homo sapiens
  misc_RNA (1)...(19): siRNA sense strand
caacaugagaggaggugcu

SEQ ID NO: 2282219 - RNA, 19 nt, Homo sapiens
  misc_RNA (1)...(19): siRNA sense strand
ggacagcaauuuaauggca

SEQ ID NO: 2282220 - RNA, 19 nt, Homo sapiens
  misc_RNA (1)...(19): siRNA sense strand
cauaaagaaaccaggggau

SEQ ID NO: 2282221 - RNA, 19 nt, Homo sapiens
  misc_RNA (1)...(19): siRNA sense strand
cccagauccagcaggcaaa

SEQ ID NO: 2282222 - RNA, 19 nt, Homo sapiens
  misc_RNA (1)...(19): siRNA sense strand
ggaccaaugaagaaggaua

SEQ ID NO: 2282223 - RNA, 19 nt, Homo sapiens
  misc_RNA (1)...(19): siRNA sense strand
cuagaaugauagaggaauu

SEQ ID NO: 2282224 - RNA, 19 nt, Homo sapiens
  misc_RNA (1)...(19): siRNA sense strand
cagaagaugcuguggacua

SEQ ID NO: 2282225 - RNA, 19 nt, Homo sapiens
  misc_RNA (1)...(19): siRNA sense strand
aggagaagaugaugaggaa

SEQ ID NO: 2282226 - RNA, 19 nt, Homo sapiens
  misc_RNA (1)...(19): siRNA sense strand
cuacaaaagaugaggaauu

SEQ ID NO: 2282227 - RNA, 19 nt, Homo sapiens
  misc_RNA (1)...(19): siRNA sense strand
ggauauuuguacugcuaaa

SEQ ID NO: 2282228 - RNA, 19 nt, Homo sapiens
  misc_RNA (1)...(19): siRNA sense strand
gcggaggauucaagagcaa

SEQ ID NO: 2282229 - RNA, 19 nt, Homo sapiens
  misc_RNA (1)...(19): siRNA sense strand
gggaggaacaggagcggaa

SEQ ID NO: 2282230 - RNA, 19 nt, Homo sapiens
  misc_RNA (1)...(19): siRNA sense strand
gagaagaagcccaagaaaa

SEQ ID NO: 2282231 - RNA, 19 nt, Homo sapiens
  misc_RNA (1)...(19): siRNA sense strand
ucgaauucucuuagggaaa

SEQ ID NO: 2282232 - RNA, 19 nt, Homo sapiens
  misc_RNA (1)...(19): siRNA sense strand
cuucauaagaugccagaaa

SEQ ID NO: 2282233 - RNA, 19 nt, Homo sapiens
  misc_RNA (1)...(19): siRNA sense strand
ucaaagagaaagaagacaa

SEQ ID NO: 2282234 - RNA, 19 nt, Homo sapiens
  misc_RNA (1)...(19): siRNA sense strand
cggagaaagaggaagaaga

SEQ ID NO: 2282235 - RNA, 19 nt, Homo sapiens
  misc_RNA (1)...(19): siRNA sense strand
cagaagaacaggaggagga

SEQ ID NO: 2282236 - RNA, 19 nt, Homo sapiens
  misc_RNA (1)...(19): siRNA sense strand
cagaauauagugaggaaaa

SEQ ID NO: 2282237 - RNA, 19 nt, Homo sapiens
  misc_RNA (1)...(19): siRNA sense strand
gguuaggaguacagaagau

SEQ ID NO: 2282238 - RNA, 19 nt, Homo sapiens
  misc_RNA (1)...(19): siRNA sense strand
gaccaaugaagaaggauaa

SEQ ID NO: 2282239 - RNA, 19 nt, Homo sapiens
  misc_RNA (1)...(19): siRNA sense strand
caaagagaaagaagacaaa

SEQ ID NO: 2282240 - RNA, 19 nt, Homo sapiens
  misc_RNA (1)...(19): siRNA sense strand
cuacaaacacuccgcgaaa

SEQ ID NO: 2282241 - RNA, 19 nt, Homo sapiens
  misc_RNA (1)...(19): siRNA sense strand
aggaagaagaugaggagga

SEQ ID NO: 2282242 - RNA, 19 nt, Homo sapiens
  misc_RNA (1)...(19): siRNA sense strand
gcucggagaaagaggaaga

SEQ ID NO: 2282243 - RNA, 19 nt, Homo sapiens
  misc_RNA (1)...(19): siRNA sense strand
uuaggaaacuugaggaaaa

SEQ ID NO: 2282244 - RNA, 19 nt, Homo sapiens
  misc_RNA (1)...(19): siRNA sense strand
acaaugaggaucugguaua

SEQ ID NO: 2282245 - RNA, 19 nt, Homo sapiens
  misc_RNA (1)...(19): siRNA sense strand
acuuugaagaaaugggaaa

SEQ ID NO: 2282246 - RNA, 19 nt, Homo sapiens
  misc_RNA (1)...(19): siRNA sense strand
gauagaggaauuuaggaaa

SEQ ID NO: 2282247 - RNA, 19 nt, Homo sapiens
  misc_RNA (1)...(19): siRNA sense strand
ggccaagaugagagaacaa

SEQ ID NO: 2282248 - RNA, 19 nt, Homo sapiens
  misc_RNA (1)...(19): siRNA sense strand
gauacgaauggaagauaua

SEQ ID NO: 2282249 - RNA, 19 nt, Homo sapiens
  misc_RNA (1)...(19): siRNA sense strand
gggaaagaacauugagaac

SEQ ID NO: 2282250 - RNA, 19 nt, Homo sapiens
  misc_RNA (1)...(19): siRNA sense strand
cuuaagaggaaccaggaaa

SEQ ID NO: 2282251 - RNA, 19 nt, Homo sapiens
  misc_RNA (1)...(19): siRNA sense strand
aggaaaaggagaagcuuaa

SEQ ID NO: 2282252 - RNA, 19 nt, Homo sapiens
  misc_RNA (1)...(19): siRNA sense strand
agauagugacuuugaagaa

SEQ ID NO: 2282253 - RNA, 19 nt, Homo sapiens
  misc_RNA (1)...(19): siRNA sense strand
ugaugaagaaggagacaau

SEQ ID NO: 2282254 - RNA, 19 nt, Homo sapiens
  misc_RNA (1)...(19): siRNA sense strand
ugaagauggcaguggguuu

SEQ ID NO: 2282255 - RNA, 19 nt, Homo sapiens
  misc_RNA (1)...(19): siRNA sense strand
agaagaagcccaagaaaau

SEQ ID NO: 2282256 - RNA, 19 nt, Homo sapiens
  misc_RNA (1)...(19): siRNA sense strand
caaagguuguaaaggacua

SEQ ID NO: 2282257 - RNA, 19 nt, Homo sapiens
  misc_RNA (1)...(19): siRNA sense strand
augcaaagguuguaaagga

SEQ ID NO: 2282258 - RNA, 19 nt, Homo sapiens
  misc_RNA (1)...(19): siRNA sense strand
ugauagaggaauuuaggaa

SEQ ID NO: 2282259 - RNA, 19 nt, Homo sapiens
  misc_RNA (1)...(19): siRNA sense strand
gcaucaagagcguuacaaa

SEQ ID NO: 2282260 - RNA, 19 nt, Homo sapiens
  misc_RNA (1)...(19): siRNA sense strand
ggaagaguucagagagcau

SEQ ID NO: 2282261 - RNA, 19 nt, Homo sapiens
  misc_RNA (1)...(19): siRNA sense strand
agacauugacugaguauga

SEQ ID NO: 2282262 - RNA, 19 nt, Homo sapiens
  misc_RNA (1)...(19): siRNA sense strand
ugucagaggacgaggagga

SEQ ID NO: 2282263 - RNA, 19 nt, Homo sapiens
  misc_RNA (1)...(19): siRNA sense strand
uaucagaggaggaagaaga

SEQ ID NO: 2282264 - RNA, 19 nt, Homo sapiens
  misc_RNA (1)...(19): siRNA sense strand
uuucaagaugagagcaaua

SEQ ID NO: 2282265 - RNA, 19 nt, Homo sapiens
  misc_RNA (1)...(19): siRNA sense strand
ugugaagauuccaaacaaa

SEQ ID NO: 2282266 - RNA, 19 nt, Homo sapiens
  misc_RNA (1)...(19): siRNA sense strand
caacauugucacccagaaa

SEQ ID NO: 2282267 - RNA, 19 nt, Homo sapiens
  misc_RNA (1)...(19): siRNA sense strand
gggaauuaguggauauuuu

SEQ ID NO: 2282268 - RNA, 19 nt, Homo sapiens
  misc_RNA (1)...(19): siRNA sense strand
aggaggaggaguuggaaaa

SEQ ID NO: 2282269 - RNA, 19 nt, Homo sapiens
  misc_RNA (1)...(19): siRNA sense strand
cggaugagguucgcagaaa

SEQ ID NO: 2282270 - RNA, 19 nt, Homo sapiens
  misc_RNA (1)...(19): siRNA sense strand
ugagagaacaagagaggca

SEQ ID NO: 2282271 - RNA, 19 nt, Homo sapiens
  misc_RNA (1)...(19): siRNA sense strand
ugacagaagaacaggagga

SEQ ID NO: 2282272 - RNA, 19 nt, Homo sapiens
  misc_RNA (1)...(19): siRNA sense strand
ccagauuauuacaaaguga

SEQ ID NO: 2282273 - RNA, 19 nt, Homo sapiens
  misc_RNA (1)...(19): siRNA sense strand
gggagagcuuucuggauga

SEQ ID NO: 2282274 - RNA, 19 nt, Homo sapiens
  misc_RNA (1)...(19): siRNA sense strand
ggacauggaaaaugaagaa

SEQ ID NO: 2282275 - RNA, 19 nt, Homo sapiens
  misc_RNA (1)...(19): siRNA sense strand
aaugaugaaggguggguua

SEQ ID NO: 2282276 - RNA, 19 nt, Homo sapiens
  misc_RNA (1)...(19): siRNA sense strand
aacaugaaccugugauaaa

SEQ ID NO: 2282277 - RNA, 19 nt, Homo sapiens
  misc_RNA (1)...(19): siRNA sense strand
ggacaauaucauuugggau

SEQ ID NO: 2282278 - RNA, 19 nt, Homo sapiens
  misc_RNA (1)...(19): siRNA sense strand
aaggagaguaagaaggaau

SEQ ID NO: 2282279 - RNA, 19 nt, Homo sapiens
  misc_RNA (1)...(19): siRNA sense strand
aagaagaaaaugaggaaga

SEQ ID NO: 2282280 - RNA, 19 nt, Homo sapiens
  misc_RNA (1)...(19): siRNA sense strand
ucuuugaccuacagaacaa

SEQ ID NO: 2282281 - RNA, 19 nt, Homo sapiens
  misc_RNA (1)...(19): siRNA sense strand
ugaagaaggauaaggacca

SEQ ID NO: 2282282 - RNA, 19 nt, Homo sapiens
  misc_RNA (1)...(19): siRNA sense strand
agaacaugaaccugugaua

SEQ ID NO: 2282283 - RNA, 19 nt, Homo sapiens
  misc_RNA (1)...(19): siRNA sense strand
ucuccaaugaugaguauua

SEQ ID NO: 2282284 - RNA, 19 nt, Homo sapiens
  misc_RNA (1)...(19): siRNA sense strand
guauaauggaccugagagu

SEQ ID NO: 2282285 - RNA, 19 nt, Homo sapiens
  misc_RNA (1)...(19): siRNA sense strand
ccuccugauuuguaugaua

SEQ ID NO: 2282286 - RNA, 19 nt, Homo sapiens
  misc_RNA (1)...(19): siRNA sense strand
uggaauaagacccaaacaa

SEQ ID NO: 2282287 - RNA, 19 nt, Homo sapiens
  misc_RNA (1)...(19): siRNA sense strand
cagaggaggaagaagauga

SEQ ID NO: 2282288 - RNA, 19 nt, Homo sapiens
  misc_RNA (1)...(19): siRNA sense strand
gcacugaucuucuggcuga

SEQ ID NO: 2282289 - RNA, 19 nt, Homo sapiens
  misc_RNA (1)...(19): siRNA sense strand
gaacaagagaggcaagcuu

SEQ ID NO: 2282290 - RNA, 19 nt, Homo sapiens
  misc_RNA (1)...(19): siRNA sense strand
ggaccaaugaagaaggaua

SEQ ID NO: 2282291 - RNA, 19 nt, Homo sapiens
  misc_RNA (1)...(19): siRNA sense strand
cuagaaugauagaggaauu

SEQ ID NO: 2282292 - RNA, 19 nt, Homo sapiens
  misc_RNA (1)...(19): siRNA sense strand
cagaagaugcuguggacua

SEQ ID NO: 2282293 - RNA, 19 nt, Homo sapiens
  misc_RNA (1)...(19): siRNA sense strand
aggagaagaugaugaggaa

SEQ ID NO: 2282294 - RNA, 19 nt, Homo sapiens
  misc_RNA (1)...(19): siRNA sense strand
cuacaaaagaugaggaauu

SEQ ID NO: 2282295 - RNA, 19 nt, Homo sapiens
  misc_RNA (1)...(19): siRNA sense strand
ggauauuuguacugcuaaa

SEQ ID NO: 2282296 - RNA, 19 nt, Homo sapiens
  misc_RNA (1)...(19): siRNA sense strand
gcggaggauucaagagcaa

SEQ ID NO: 2282297 - RNA, 19 nt, Homo sapiens
  misc_RNA (1)...(19): siRNA sense strand
gggaggaacaggagcggaa

SEQ ID NO: 2282298 - RNA, 19 nt, Homo sapiens
  misc_RNA (1)...(19): siRNA sense strand
gagaagaagcccaagaaaa

SEQ ID NO: 2282299 - RNA, 19 nt, Homo sapiens
  misc_RNA (1)...(19): siRNA sense strand
ucgaauucucuuagggaaa

SEQ ID NO: 2282300 - RNA, 19 nt, Homo sapiens
  misc_RNA (1)...(19): siRNA sense strand
cuucauaagaugccagaaa

SEQ ID NO: 2282301 - RNA, 19 nt, Homo sapiens
  misc_RNA (1)...(19): siRNA sense strand
ucaaagagaaagaagacaa

SEQ ID NO: 2282302 - RNA, 19 nt, Homo sapiens
  misc_RNA (1)...(19): siRNA sense strand
cggagaaagaggaagaaga

SEQ ID NO: 2282303 - RNA, 19 nt, Homo sapiens
  misc_RNA (1)...(19): siRNA sense strand
cagaagaacaggaggagga

SEQ ID NO: 2282304 - RNA, 19 nt, Homo sapiens
  misc_RNA (1)...(19): siRNA sense strand
cagaauauagugaggaaaa

SEQ ID NO: 2282305 - RNA, 19 nt, Homo sapiens
  misc_RNA (1)...(19): siRNA sense strand
gguuaggaguacagaagau

SEQ ID NO: 2282306 - RNA, 19 nt, Homo sapiens
  misc_RNA (1)...(19): siRNA sense strand
gaccaaugaagaaggauaa

SEQ ID NO: 2282307 - RNA, 19 nt, Homo sapiens
  misc_RNA (1)...(19): siRNA sense strand
caaagagaaagaagacaaa

SEQ ID NO: 2282308 - RNA, 19 nt, Homo sapiens
  misc_RNA (1)...(19): siRNA sense strand
cuacaaacacuccgcgaaa

SEQ ID NO: 2282309 - RNA, 19 nt, Homo sapiens
  misc_RNA (1)...(19): siRNA sense strand
aggaagaagaugaggagga

SEQ ID NO: 2282310 - RNA, 19 nt, Homo sapiens
  misc_RNA (1)...(19): siRNA sense strand
gcucggagaaagaggaaga

SEQ ID NO: 2282311 - RNA, 19 nt, Homo sapiens
  misc_RNA (1)...(19): siRNA sense strand
uuaggaaacuugaggaaaa

SEQ ID NO: 2282312 - RNA, 19 nt, Homo sapiens
  misc_RNA (1)...(19): siRNA sense strand
acaaugaggaucugguaua

SEQ ID NO: 2282313 - RNA, 19 nt, Homo sapiens
  misc_RNA (1)...(19): siRNA sense strand
acuuugaagaaaugggaaa

SEQ ID NO: 2282314 - RNA, 19 nt, Homo sapiens
  misc_RNA (1)...(19): siRNA sense strand
gauagaggaauuuaggaaa

SEQ ID NO: 2282315 - RNA, 19 nt, Homo sapiens
  misc_RNA (1)...(19): siRNA sense strand
ggccaagaugagagaacaa

SEQ ID NO: 2282316 - RNA, 19 nt, Homo sapiens
  misc_RNA (1)...(19): siRNA sense strand
gauacgaauggaagauaua

SEQ ID NO: 2282317 - RNA, 19 nt, Homo sapiens
  misc_RNA (1)...(19): siRNA sense strand
gggaaagaacauugagaac

SEQ ID NO: 2282318 - RNA, 19 nt, Homo sapiens
  misc_RNA (1)...(19): siRNA sense strand
cuuaagaggaaccaggaaa

SEQ ID NO: 2282319 - RNA, 19 nt, Homo sapiens
  misc_RNA (1)...(19): siRNA sense strand
aggaaaaggagaagcuuaa

SEQ ID NO: 2282320 - RNA, 19 nt, Homo sapiens
  misc_RNA (1)...(19): siRNA sense strand
agauagugacuuugaagaa

SEQ ID NO: 2282321 - RNA, 19 nt, Homo sapiens
  misc_RNA (1)...(19): siRNA sense strand
ugaugaagaaggagacaau

SEQ ID NO: 2282322 - RNA, 19 nt, Homo sapiens
  misc_RNA (1)...(19): siRNA sense strand
ugaagauggcaguggguuu

SEQ ID NO: 2282323 - RNA, 19 nt, Homo sapiens
  misc_RNA (1)...(19): siRNA sense strand
agaagaagcccaagaaaau

SEQ ID NO: 2282324 - RNA, 19 nt, Homo sapiens
  misc_RNA (1)...(19): siRNA sense strand
caaagguuguaaaggacua

SEQ ID NO: 2282325 - RNA, 19 nt, Homo sapiens
  misc_RNA (1)...(19): siRNA sense strand
augcaaagguuguaaagga

SEQ ID NO: 2282326 - RNA, 19 nt, Homo sapiens
  misc_RNA (1)...(19): siRNA sense strand
ugauagaggaauuuaggaa

SEQ ID NO: 2282327 - RNA, 19 nt, Homo sapiens
  misc_RNA (1)...(19): siRNA sense strand
gcaucaagagcguuacaaa

SEQ ID NO: 2282328 - RNA, 19 nt, Homo sapiens
  misc_RNA (1)...(19): siRNA sense strand
ggaagaguucagagagcau

SEQ ID NO: 2282329 - RNA, 19 nt, Homo sapiens
  misc_RNA (1)...(19): siRNA sense strand
agacauugacugaguauga

SEQ ID NO: 2282330 - RNA, 19 nt, Homo sapiens
  misc_RNA (1)...(19): siRNA sense strand
ugucagaggacgaggagga

SEQ ID NO: 2282331 - RNA, 19 nt, Homo sapiens
  misc_RNA (1)...(19): siRNA sense strand
uaucagaggaggaagaaga

SEQ ID NO: 2282332 - RNA, 19 nt, Homo sapiens
  misc_RNA (1)...(19): siRNA sense strand
uuucaagaugagagcaaua

SEQ ID NO: 2282333 - RNA, 19 nt, Homo sapiens
  misc_RNA (1)...(19): siRNA sense strand
ugugaagauuccaaacaaa

SEQ ID NO: 2282334 - RNA, 19 nt, Homo sapiens
  misc_RNA (1)...(19): siRNA sense strand
caacauugucacccagaaa

SEQ ID NO: 2282335 - RNA, 19 nt, Homo sapiens
  misc_RNA (1)...(19): siRNA sense strand
gggaauuaguggauauuuu

SEQ ID NO: 2282336 - RNA, 19 nt, Homo sapiens
  misc_RNA (1)...(19): siRNA sense strand
aggaggaggaguuggaaaa

SEQ ID NO: 2282337 - RNA, 19 nt, Homo sapiens
  misc_RNA (1)...(19): siRNA sense strand
cggaugagguucgcagaaa

SEQ ID NO: 2282338 - RNA, 19 nt, Homo sapiens
  misc_RNA (1)...(19): siRNA sense strand
ugagagaacaagagaggca

SEQ ID NO: 2282339 - RNA, 19 nt, Homo sapiens
  misc_RNA (1)...(19): siRNA sense strand
ugacagaagaacaggagga

SEQ ID NO: 2282340 - RNA, 19 nt, Homo sapiens
  misc_RNA (1)...(19): siRNA sense strand
ccagauuauuacaaaguga

SEQ ID NO: 2282341 - RNA, 19 nt, Homo sapiens
  misc_RNA (1)...(19): siRNA sense strand
gggagagcuuucuggauga

SEQ ID NO: 2282342 - RNA, 19 nt, Homo sapiens
  misc_RNA (1)...(19): siRNA sense strand
ggacauggaaaaugaagaa

SEQ ID NO: 2282343 - RNA, 19 nt, Homo sapiens
  misc_RNA (1)...(19): siRNA sense strand
aaugaugaaggguggguua

SEQ ID NO: 2282344 - RNA, 19 nt, Homo sapiens
  misc_RNA (1)...(19): siRNA sense strand
aacaugaaccugugauaaa

SEQ ID NO: 2282345 - RNA, 19 nt, Homo sapiens
  misc_RNA (1)...(19): siRNA sense strand
ggacaauaucauuugggau

SEQ ID NO: 2282346 - RNA, 19 nt, Homo sapiens
  misc_RNA (1)...(19): siRNA sense strand
aaggagaguaagaaggaau

SEQ ID NO: 2282347 - RNA, 19 nt, Homo sapiens
  misc_RNA (1)...(19): siRNA sense strand
aagaagaaaaugaggaaga

SEQ ID NO: 2282348 - RNA, 19 nt, Homo sapiens
  misc_RNA (1)...(19): siRNA sense strand
ucuuugaccuacagaacaa

SEQ ID NO: 2282349 - RNA, 19 nt, Homo sapiens
  misc_RNA (1)...(19): siRNA sense strand
ugaagaaggauaaggacca

SEQ ID NO: 2282350 - RNA, 19 nt, Homo sapiens
  misc_RNA (1)...(19): siRNA sense strand
agaacaugaaccugugaua

SEQ ID NO: 2282351 - RNA, 19 nt, Homo sapiens
  misc_RNA (1)...(19): siRNA sense strand
ucuccaaugaugaguauua

SEQ ID NO: 2282352 - RNA, 19 nt, Homo sapiens
  misc_RNA (1)...(19): siRNA sense strand
guauaauggaccugagagu

SEQ ID NO: 2282353 - RNA, 19 nt, Homo sapiens
  misc_RNA (1)...(19): siRNA sense strand
ccuccugauuuguaugaua

SEQ ID NO: 2282354 - RNA, 19 nt, Homo sapiens
  misc_RNA (1)...(19): siRNA sense strand
uggaauaagacccaaacaa

SEQ ID NO: 2282355 - RNA, 19 nt, Homo sapiens
  misc_RNA (1)...(19): siRNA sense strand
cagaggaggaagaagauga

SEQ ID NO: 2282356 - RNA, 19 nt, Homo sapiens
  misc_RNA (1)...(19): siRNA sense strand
gcacugaucuucuggcuga

SEQ ID NO: 2282357 - RNA, 19 nt, Homo sapiens
  misc_RNA (1)...(19): siRNA sense strand
gaacaagagaggcaagcuu

SEQ ID NO: 2282358 - RNA, 19 nt, Homo sapiens
  misc_RNA (1)...(19): siRNA sense strand
ggcaaaacaacaagaagaa

SEQ ID NO: 2282359 - RNA, 19 nt, Homo sapiens
  misc_RNA (1)...(19): siRNA sense strand
uggugaagcgguuggucaa

SEQ ID NO: 2282360 - RNA, 19 nt, Homo sapiens
  misc_RNA (1)...(19): siRNA sense strand
aggcaaaacaacaagaaga

SEQ ID NO: 2282361 - RNA, 19 nt, Homo sapiens
  misc_RNA (1)...(19): siRNA sense strand
cuuggaagaagcugaggaa

SEQ ID NO: 2282362 - RNA, 19 nt, Homo sapiens
  misc_RNA (1)...(19): siRNA sense strand
gccaaaggcuuccgggaga

SEQ ID NO: 2282363 - RNA, 19 nt, Homo sapiens
  misc_RNA (1)...(19): siRNA sense strand
cgggagaacggcagaaacu

SEQ ID NO: 2282364 - RNA, 19 nt, Homo sapiens
  misc_RNA (1)...(19): siRNA sense strand
gccaaaggcuuccgggaga

SEQ ID NO: 2282365 - RNA, 19 nt, Homo sapiens
  misc_RNA (1)...(19): siRNA sense strand
cgggagaacggcagaaacu

SEQ ID NO: 2282366 - RNA, 19 nt, Homo sapiens
  misc_RNA (1)...(19): siRNA sense strand
ggaaagaccugaaagagca

SEQ ID NO: 2282367 - RNA, 19 nt, Homo sapiens
  misc_RNA (1)...(19): siRNA sense strand
gauuacaagaugaagaaga

SEQ ID NO: 2282368 - RNA, 19 nt, Homo sapiens
  misc_RNA (1)...(19): siRNA sense strand
ccauucaggcagaggguga

SEQ ID NO: 2282369 - RNA, 19 nt, Homo sapiens
  misc_RNA (1)...(19): siRNA sense strand
acaagaugaagaagagaga

SEQ ID NO: 2282370 - RNA, 19 nt, Homo sapiens
  misc_RNA (1)...(19): siRNA sense strand
ucuacagaaucaugaggaa

SEQ ID NO: 2282371 - RNA, 19 nt, Homo sapiens
  misc_RNA (1)...(19): siRNA sense strand
ugauacagugaaacagaaa

SEQ ID NO: 2282372 - RNA, 19 nt, Homo sapiens
  misc_RNA (1)...(19): siRNA sense strand
ggagccaguccuacggaaa

SEQ ID NO: 2282373 - RNA, 19 nt, Homo sapiens
  misc_RNA (1)...(19): siRNA sense strand
aauuaaacacagugccaau

SEQ ID NO: 2282374 - RNA, 19 nt, Homo sapiens
  misc_RNA (1)...(19): siRNA sense strand
agccuagaacagaaagaaa

SEQ ID NO: 2282375 - RNA, 19 nt, Homo sapiens
  misc_RNA (1)...(19): siRNA sense strand
agcaguugauacagugaaa

SEQ ID NO: 2282376 - RNA, 19 nt, Homo sapiens
  misc_RNA (1)...(19): siRNA sense strand
gcuagaaaacaaugaucaa

SEQ ID NO: 2282377 - RNA, 19 nt, Homo sapiens
  misc_RNA (1)...(19): siRNA sense strand
uagauaaagaggucaucaa

SEQ ID NO: 2282378 - RNA, 19 nt, Homo sapiens
  misc_RNA (1)...(19): siRNA sense strand
caguugauacagugaaaca

SEQ ID NO: 2282379 - RNA, 19 nt, Homo sapiens
  misc_RNA (1)...(19): siRNA sense strand
agaagaggaaacuaacaaa

SEQ ID NO: 2282380 - RNA, 19 nt, Homo sapiens
  misc_RNA (1)...(19): siRNA sense strand
guacuugcuauaauggaaa

SEQ ID NO: 2282381 - RNA, 19 nt, Homo sapiens
  misc_RNA (1)...(19): siRNA sense strand
cccuauacuuuguggucau

SEQ ID NO: 2282382 - RNA, 19 nt, Homo sapiens
  misc_RNA (1)...(19): siRNA sense strand
acagauuacaagaugaaga

SEQ ID NO: 2282383 - RNA, 19 nt, Homo sapiens
  misc_RNA (1)...(19): siRNA sense strand
cuguagauaaagaggucau

SEQ ID NO: 2282384 - RNA, 19 nt, Homo sapiens
  misc_RNA (1)...(19): siRNA sense strand
gugacagauuacaagauga

SEQ ID NO: 2282385 - RNA, 19 nt, Homo sapiens
  misc_RNA (1)...(19): siRNA sense strand
aacaauugugcgaagauua

SEQ ID NO: 2282386 - RNA, 19 nt, Homo sapiens
  misc_RNA (1)...(19): siRNA sense strand
agaacauuauggagaccuu

SEQ ID NO: 2282387 - RNA, 19 nt, Homo sapiens
  misc_RNA (1)...(19): siRNA sense strand
ccugagagaauuaaacaca

SEQ ID NO: 2282388 - RNA, 19 nt, Homo sapiens
  misc_RNA (1)...(19): siRNA sense strand
cugucaguuucgaaaggaa

SEQ ID NO: 2282389 - RNA, 19 nt, Homo sapiens
  misc_RNA (1)...(19): siRNA sense strand
guccugaagcugagcaaga

SEQ ID NO: 2282390 - RNA, 19 nt, Homo sapiens
  misc_RNA (1)...(19): siRNA sense strand
cuggaggguacuugcuaua

SEQ ID NO: 2282391 - RNA, 19 nt, Homo sapiens
  misc_RNA (1)...(19): siRNA sense strand
gaacauugcaucuggcugu

SEQ ID NO: 2282392 - RNA, 19 nt, Homo sapiens
  misc_RNA (1)...(19): siRNA sense strand
agaauuaaacacagugcca

SEQ ID NO: 2282393 - RNA, 19 nt, Homo sapiens
  misc_RNA (1)...(19): siRNA sense strand
acacaagagccuagaacag

SEQ ID NO: 2282394 - RNA, 19 nt, Homo sapiens
  misc_RNA (1)...(19): siRNA sense strand
gcaaaagagaaguccucaa

SEQ ID NO: 2282395 - RNA, 19 nt, Homo sapiens
  misc_RNA (1)...(19): siRNA sense strand
cggaaagaccugaaagagc

SEQ ID NO: 2282396 - RNA, 19 nt, Homo sapiens
  misc_RNA (1)...(19): siRNA sense strand
ccuagaacagaaagaaagu

SEQ ID NO: 2282397 - RNA, 19 nt, Homo sapiens
  misc_RNA (1)...(19): siRNA sense strand
uuaaacugcuggaggguac

SEQ ID NO: 2282398 - RNA, 19 nt, Homo sapiens
  misc_RNA (1)...(19): siRNA sense strand
ugaaagagcauuugagugc

SEQ ID NO: 2282399 - RNA, 19 nt, Homo sapiens
  misc_RNA (1)...(19): siRNA sense strand
gagcauaccugaaugggga

SEQ ID NO: 2282400 - RNA, 19 nt, Homo sapiens
  misc_RNA (1)...(19): siRNA sense strand
agacaauuguugcaaaaga

SEQ ID NO: 2282401 - RNA, 19 nt, Homo sapiens
  misc_RNA (1)...(19): siRNA sense strand
aaagagcauuugagugcau

SEQ ID NO: 2282402 - RNA, 19 nt, Homo sapiens
  misc_RNA (1)...(19): siRNA sense strand
aaauuugaccugagaccuu

SEQ ID NO: 2282403 - RNA, 19 nt, Homo sapiens
  misc_RNA (1)...(19): siRNA sense strand
aaaauuacccugcuagaaa

SEQ ID NO: 2282404 - RNA, 19 nt, Homo sapiens
  misc_RNA (1)...(19): siRNA sense strand
aagaggaaacuaacaaaca

SEQ ID NO: 2282405 - RNA, 19 nt, Homo sapiens
  misc_RNA (1)...(19): siRNA sense strand
ggaaagaccugaaagagca

SEQ ID NO: 2282406 - RNA, 19 nt, Homo sapiens
  misc_RNA (1)...(19): siRNA sense strand
gauuacaagaugaagaaga

SEQ ID NO: 2282407 - RNA, 19 nt, Homo sapiens
  misc_RNA (1)...(19): siRNA sense strand
ccauucaggcagaggguga

SEQ ID NO: 2282408 - RNA, 19 nt, Homo sapiens
  misc_RNA (1)...(19): siRNA sense strand
acaagaugaagaagagaga

SEQ ID NO: 2282409 - RNA, 19 nt, Homo sapiens
  misc_RNA (1)...(19): siRNA sense strand
ucuacagaaucaugaggaa

SEQ ID NO: 2282410 - RNA, 19 nt, Homo sapiens
  misc_RNA (1)...(19): siRNA sense strand
ugauacagugaaacagaaa

SEQ ID NO: 2282411 - RNA, 19 nt, Homo sapiens
  misc_RNA (1)...(19): siRNA sense strand
ggagccaguccuacggaaa

SEQ ID NO: 2282412 - RNA, 19 nt, Homo sapiens
  misc_RNA (1)...(19): siRNA sense strand
aauuaaacacagugccaau

SEQ ID NO: 2282413 - RNA, 19 nt, Homo sapiens
  misc_RNA (1)...(19): siRNA sense strand
agccuagaacagaaagaaa

SEQ ID NO: 2282414 - RNA, 19 nt, Homo sapiens
  misc_RNA (1)...(19): siRNA sense strand
agcaguugauacagugaaa

SEQ ID NO: 2282415 - RNA, 19 nt, Homo sapiens
  misc_RNA (1)...(19): siRNA sense strand
gcuagaaaacaaugaucaa

SEQ ID NO: 2282416 - RNA, 19 nt, Homo sapiens
  misc_RNA (1)...(19): siRNA sense strand
uagauaaagaggucaucaa

SEQ ID NO: 2282417 - RNA, 19 nt, Homo sapiens
  misc_RNA (1)...(19): siRNA sense strand
caguugauacagugaaaca

SEQ ID NO: 2282418 - RNA, 19 nt, Homo sapiens
  misc_RNA (1)...(19): siRNA sense strand
agaagaggaaacuaacaaa

SEQ ID NO: 2282419 - RNA, 19 nt, Homo sapiens
  misc_RNA (1)...(19): siRNA sense strand
guacuugcuauaauggaaa

SEQ ID NO: 2282420 - RNA, 19 nt, Homo sapiens
  misc_RNA (1)...(19): siRNA sense strand
cccuauacuuuguggucau

SEQ ID NO: 2282421 - RNA, 19 nt, Homo sapiens
  misc_RNA (1)...(19): siRNA sense strand
acagauuacaagaugaaga

SEQ ID NO: 2282422 - RNA, 19 nt, Homo sapiens
  misc_RNA (1)...(19): siRNA sense strand
cuguagauaaagaggucau

SEQ ID NO: 2282423 - RNA, 19 nt, Homo sapiens
  misc_RNA (1)...(19): siRNA sense strand
gugacagauuacaagauga

SEQ ID NO: 2282424 - RNA, 19 nt, Homo sapiens
  misc_RNA (1)...(19): siRNA sense strand
aacaauugugcgaagauua

SEQ ID NO: 2282425 - RNA, 19 nt, Homo sapiens
  misc_RNA (1)...(19): siRNA sense strand
agaacauuauggagaccuu

SEQ ID NO: 2282426 - RNA, 19 nt, Homo sapiens
  misc_RNA (1)...(19): siRNA sense strand
ccugagagaauuaaacaca

SEQ ID NO: 2282427 - RNA, 19 nt, Homo sapiens
  misc_RNA (1)...(19): siRNA sense strand
cugucaguuucgaaaggaa

SEQ ID NO: 2282428 - RNA, 19 nt, Homo sapiens
  misc_RNA (1)...(19): siRNA sense strand
guccugaagcugagcaaga

SEQ ID NO: 2282429 - RNA, 19 nt, Homo sapiens
  misc_RNA (1)...(19): siRNA sense strand
cuggaggguacuugcuaua

SEQ ID NO: 2282430 - RNA, 19 nt, Homo sapiens
  misc_RNA (1)...(19): siRNA sense strand
gaacauugcaucuggcugu

SEQ ID NO: 2282431 - RNA, 19 nt, Homo sapiens
  misc_RNA (1)...(19): siRNA sense strand
agaauuaaacacagugcca

SEQ ID NO: 2282432 - RNA, 19 nt, Homo sapiens
  misc_RNA (1)...(19): siRNA sense strand
acacaagagccuagaacag

SEQ ID NO: 2282433 - RNA, 19 nt, Homo sapiens
  misc_RNA (1)...(19): siRNA sense strand
gcaaaagagaaguccucaa

SEQ ID NO: 2282434 - RNA, 19 nt, Homo sapiens
  misc_RNA (1)...(19): siRNA sense strand
cggaaagaccugaaagagc

SEQ ID NO: 2282435 - RNA, 19 nt, Homo sapiens
  misc_RNA (1)...(19): siRNA sense strand
ccuagaacagaaagaaagu

SEQ ID NO: 2282436 - RNA, 19 nt, Homo sapiens
  misc_RNA (1)...(19): siRNA sense strand
uuaaacugcuggaggguac

SEQ ID NO: 2282437 - RNA, 19 nt, Homo sapiens
  misc_RNA (1)...(19): siRNA sense strand
ugaaagagcauuugagugc

SEQ ID NO: 2282438 - RNA, 19 nt, Homo sapiens
  misc_RNA (1)...(19): siRNA sense strand
gagcauaccugaaugggga

SEQ ID NO: 2282439 - RNA, 19 nt, Homo sapiens
  misc_RNA (1)...(19): siRNA sense strand
agacaauuguugcaaaaga

SEQ ID NO: 2282440 - RNA, 19 nt, Homo sapiens
  misc_RNA (1)...(19): siRNA sense strand
aaagagcauuugagugcau

SEQ ID NO: 2282441 - RNA, 19 nt, Homo sapiens
  misc_RNA (1)...(19): siRNA sense strand
aaauuugaccugagaccuu

SEQ ID NO: 2282442 - RNA, 19 nt, Homo sapiens
  misc_RNA (1)...(19): siRNA sense strand
aaaauuacccugcuagaaa

SEQ ID NO: 2282443 - RNA, 19 nt, Homo sapiens
  misc_RNA (1)...(19): siRNA sense strand
aagaggaaacuaacaaaca

SEQ ID NO: 2282444 - RNA, 19 nt, Homo sapiens
  misc_RNA (1)...(19): siRNA sense strand
augaaaagaugcagaggaa

SEQ ID NO: 2282445 - RNA, 19 nt, Homo sapiens
  misc_RNA (1)...(19): siRNA sense strand
augaaauacugcuggaaaa

SEQ ID NO: 2282446 - RNA, 19 nt, Homo sapiens
  misc_RNA (1)...(19): siRNA sense strand
ccacacaaugcaaggagaa

SEQ ID NO: 2282447 - RNA, 19 nt, Homo sapiens
  misc_RNA (1)...(19): siRNA sense strand
aggacaaaguugcugaaau

SEQ ID NO: 2282448 - RNA, 19 nt, Homo sapiens
  misc_RNA (1)...(19): siRNA sense strand
cuggaagcccuaagacaaa

SEQ ID NO: 2282449 - RNA, 19 nt, Homo sapiens
  misc_RNA (1)...(19): siRNA sense strand
cuggaaagcaaguaugaau

SEQ ID NO: 2282450 - RNA, 19 nt, Homo sapiens
  misc_RNA (1)...(19): siRNA sense strand
agagauaauggaugccaaa

SEQ ID NO: 2282451 - RNA, 19 nt, Homo sapiens
  misc_RNA (1)...(19): siRNA sense strand
acacaaugcaaggagaaua

SEQ ID NO: 2282452 - RNA, 19 nt, Homo sapiens
  misc_RNA (1)...(19): siRNA sense strand
caauaagggaugcagguca

SEQ ID NO: 2282453 - RNA, 19 nt, Homo sapiens
  misc_RNA (1)...(19): siRNA sense strand
acaagauggaacugagaca

SEQ ID NO: 2282454 - RNA, 19 nt, Homo sapiens
  misc_RNA (1)...(19): siRNA sense strand
acugagacaucuugaggau

SEQ ID NO: 2282455 - RNA, 19 nt, Homo sapiens
  misc_RNA (1)...(19): siRNA sense strand
ugaagcaccuguaaggcaa

SEQ ID NO: 2282456 - RNA, 19 nt, Homo sapiens
  misc_RNA (1)...(19): siRNA sense strand
auaaagagauccaugacca

SEQ ID NO: 2282457 - RNA, 19 nt, Homo sapiens
  misc_RNA (1)...(19): siRNA sense strand
ucuggaagcccuaagacaa

SEQ ID NO: 2282458 - RNA, 19 nt, Homo sapiens
  misc_RNA (1)...(19): siRNA sense strand
aagagauaauggaugccaa

SEQ ID NO: 2282459 - RNA, 19 nt, Homo sapiens
  misc_RNA (1)...(19): siRNA sense strand
gaaggauuguccaaggaga

SEQ ID NO: 2282460 - RNA, 19 nt, Homo sapiens
  misc_RNA (1)...(19): siRNA sense strand
gcauuugaagauaaagaga

SEQ ID NO: 2282461 - RNA, 19 nt, Homo sapiens
  misc_RNA (1)...(19): siRNA sense strand
uggcauuugaagauaaaga

SEQ ID NO: 2282462 - RNA, 19 nt, Homo sapiens
  misc_RNA (1)...(19): siRNA sense strand
cuugauggcauuacgagaa

SEQ ID NO: 2282463 - RNA, 19 nt, Homo sapiens
  misc_RNA (1)...(19): siRNA sense strand
cagaacuguccuuuggcaa

SEQ ID NO: 2282464 - RNA, 19 nt, Homo sapiens
  misc_RNA (1)...(19): siRNA sense strand
ccuguagcgcuguaacaaa

SEQ ID NO: 2282465 - RNA, 19 nt, Homo sapiens
  misc_RNA (1)...(19): siRNA sense strand
aggagaaaccuguugugau

SEQ ID NO: 2282466 - RNA, 19 nt, Homo sapiens
  misc_RNA (1)...(19): siRNA sense strand
aaugucaagaagaggagaa

SEQ ID NO: 2282467 - RNA, 19 nt, Homo sapiens
  misc_RNA (1)...(19): siRNA sense strand
gcuugauggcauuacgaga

SEQ ID NO: 2282468 - RNA, 19 nt, Homo sapiens
  misc_RNA (1)...(19): siRNA sense strand
augucaagaagaggagaaa

SEQ ID NO: 2282469 - RNA, 19 nt, Homo sapiens
  misc_RNA (1)...(19): siRNA sense strand
augaaaagaugcagaggaa

SEQ ID NO: 2282470 - RNA, 19 nt, Homo sapiens
  misc_RNA (1)...(19): siRNA sense strand
augaaauacugcuggaaaa

SEQ ID NO: 2282471 - RNA, 19 nt, Homo sapiens
  misc_RNA (1)...(19): siRNA sense strand
ccacacaaugcaaggagaa

SEQ ID NO: 2282472 - RNA, 19 nt, Homo sapiens
  misc_RNA (1)...(19): siRNA sense strand
aggacaaaguugcugaaau

SEQ ID NO: 2282473 - RNA, 19 nt, Homo sapiens
  misc_RNA (1)...(19): siRNA sense strand
cuggaagcccuaagacaaa

SEQ ID NO: 2282474 - RNA, 19 nt, Homo sapiens
  misc_RNA (1)...(19): siRNA sense strand
cuggaaagcaaguaugaau

SEQ ID NO: 2282475 - RNA, 19 nt, Homo sapiens
  misc_RNA (1)...(19): siRNA sense strand
agagauaauggaugccaaa

SEQ ID NO: 2282476 - RNA, 19 nt, Homo sapiens
  misc_RNA (1)...(19): siRNA sense strand
acacaaugcaaggagaaua

SEQ ID NO: 2282477 - RNA, 19 nt, Homo sapiens
  misc_RNA (1)...(19): siRNA sense strand
caauaagggaugcagguca

SEQ ID NO: 2282478 - RNA, 19 nt, Homo sapiens
  misc_RNA (1)...(19): siRNA sense strand
acaagauggaacugagaca

SEQ ID NO: 2282479 - RNA, 19 nt, Homo sapiens
  misc_RNA (1)...(19): siRNA sense strand
acugagacaucuugaggau

SEQ ID NO: 2282480 - RNA, 19 nt, Homo sapiens
  misc_RNA (1)...(19): siRNA sense strand
ugaagcaccuguaaggcaa

SEQ ID NO: 2282481 - RNA, 19 nt, Homo sapiens
  misc_RNA (1)...(19): siRNA sense strand
auaaagagauccaugacca

SEQ ID NO: 2282482 - RNA, 19 nt, Homo sapiens
  misc_RNA (1)...(19): siRNA sense strand
ucuggaagcccuaagacaa

SEQ ID NO: 2282483 - RNA, 19 nt, Homo sapiens
  misc_RNA (1)...(19): siRNA sense strand
aagagauaauggaugccaa

SEQ ID NO: 2282484 - RNA, 19 nt, Homo sapiens
  misc_RNA (1)...(19): siRNA sense strand
gaaggauuguccaaggaga

SEQ ID NO: 2282485 - RNA, 19 nt, Homo sapiens
  misc_RNA (1)...(19): siRNA sense strand
gcauuugaagauaaagaga

SEQ ID NO: 2282486 - RNA, 19 nt, Homo sapiens
  misc_RNA (1)...(19): siRNA sense strand
uggcauuugaagauaaaga

SEQ ID NO: 2282487 - RNA, 19 nt, Homo sapiens
  misc_RNA (1)...(19): siRNA sense strand
cuugauggcauuacgagaa

SEQ ID NO: 2282488 - RNA, 19 nt, Homo sapiens
  misc_RNA (1)...(19): siRNA sense strand
cagaacuguccuuuggcaa

SEQ ID NO: 2282489 - RNA, 19 nt, Homo sapiens
  misc_RNA (1)...(19): siRNA sense strand
ccuguagcgcuguaacaaa

SEQ ID NO: 2282490 - RNA, 19 nt, Homo sapiens
  misc_RNA (1)...(19): siRNA sense strand
aggagaaaccuguugugau

SEQ ID NO: 2282491 - RNA, 19 nt, Homo sapiens
  misc_RNA (1)...(19): siRNA sense strand
aaugucaagaagaggagaa

SEQ ID NO: 2282492 - RNA, 19 nt, Homo sapiens
  misc_RNA (1)...(19): siRNA sense strand
gcuugauggcauuacgaga

SEQ ID NO: 2282493 - RNA, 19 nt, Homo sapiens
  misc_RNA (1)...(19): siRNA sense strand
augucaagaagaggagaaa

SEQ ID NO: 2282494 - RNA, 19 nt, Homo sapiens
  misc_RNA (1)...(19): siRNA sense strand
cgugaagaaaguagaggaa

SEQ ID NO: 2282495 - RNA, 19 nt, Homo sapiens
  misc_RNA (1)...(19): siRNA sense strand
guguauuuggaaacagaaa

SEQ ID NO: 2282496 - RNA, 19 nt, Homo sapiens
  misc_RNA (1)...(19): siRNA sense strand
gauugaaauaugacgugaa

SEQ ID NO: 2282497 - RNA, 19 nt, Homo sapiens
  misc_RNA (1)...(19): siRNA sense strand
ucguggagcugcagggcuu

SEQ ID NO: 2282498 - RNA, 19 nt, Homo sapiens
  misc_RNA (1)...(19): siRNA sense strand
aggacauccgagaggaaau

SEQ ID NO: 2282499 - RNA, 19 nt, Homo sapiens
  misc_RNA (1)...(19): siRNA sense strand
gguuuguguugcagcgcuu

SEQ ID NO: 2282500 - RNA, 19 nt, Homo sapiens
  misc_RNA (1)...(19): siRNA sense strand
gcauugagccagaucggga

SEQ ID NO: 2282501 - RNA, 19 nt, Homo sapiens
  misc_RNA (1)...(19): siRNA sense strand
uccgagaggaaaucagaaa

SEQ ID NO: 2282502 - RNA, 19 nt, Homo sapiens
  misc_RNA (1)...(19): siRNA sense strand
ggagauaaucagggaguaa

SEQ ID NO: 2282503 - RNA, 19 nt, Homo sapiens
  misc_RNA (1)...(19): siRNA sense strand
guucagaagcagaagacaa

SEQ ID NO: 2282504 - RNA, 19 nt, Homo sapiens
  misc_RNA (1)...(19): siRNA sense strand
ggacauuauagaagaugaa

SEQ ID NO: 2282505 - RNA, 19 nt, Homo sapiens
  misc_RNA (1)...(19): siRNA sense strand
ggguggaacuaaagaggau

SEQ ID NO: 2282506 - RNA, 19 nt, Homo sapiens
  misc_RNA (1)...(19): siRNA sense strand
gugaagagucccuggguga

SEQ ID NO: 2282507 - RNA, 19 nt, Homo sapiens
  misc_RNA (1)...(19): siRNA sense strand
ggauuggauuagaugcaaa

SEQ ID NO: 2282508 - RNA, 19 nt, Homo sapiens
  misc_RNA (1)...(19): siRNA sense strand
cgaaggagucccagugcaa

SEQ ID NO: 2282509 - RNA, 19 nt, Homo sapiens
  misc_RNA (1)...(19): siRNA sense strand
acucaaagucucugauauu

SEQ ID NO: 2282510 - RNA, 19 nt, Homo sapiens
  misc_RNA (1)...(19): siRNA sense strand
gguucagccuccagggauu

SEQ ID NO: 2282511 - RNA, 19 nt, Homo sapiens
  misc_RNA (1)...(19): siRNA sense strand
acaaaauguuacuggcaaa

SEQ ID NO: 2282512 - RNA, 19 nt, Homo sapiens
  misc_RNA (1)...(19): siRNA sense strand
uggaaaugccuuuggugua

SEQ ID NO: 2282513 - RNA, 19 nt, Homo sapiens
  misc_RNA (1)...(19): siRNA sense strand
ccucaauucugaugaacau

SEQ ID NO: 2282514 - RNA, 19 nt, Homo sapiens
  misc_RNA (1)...(19): siRNA sense strand
gaggcaagucauugaggaa

SEQ ID NO: 2282515 - RNA, 19 nt, Homo sapiens
  misc_RNA (1)...(19): siRNA sense strand
ccggaaaaguuauggauga

SEQ ID NO: 2282516 - RNA, 19 nt, Homo sapiens
  misc_RNA (1)...(19): siRNA sense strand
aaucuaaggaggaagcuaa

SEQ ID NO: 2282517 - RNA, 19 nt, Homo sapiens
  misc_RNA (1)...(19): siRNA sense strand
gcugagaacagaaaggaga

SEQ ID NO: 2282518 - RNA, 19 nt, Homo sapiens
  misc_RNA (1)...(19): siRNA sense strand
aggaaaagguucagaagca

SEQ ID NO: 2282519 - RNA, 19 nt, Homo sapiens
  misc_RNA (1)...(19): siRNA sense strand
cugcaaagauuuauaccau

SEQ ID NO: 2282520 - RNA, 19 nt, Homo sapiens
  misc_RNA (1)...(19): siRNA sense strand
ccacaugaagagcgaguau

SEQ ID NO: 2282521 - RNA, 19 nt, Homo sapiens
  misc_RNA (1)...(19): siRNA sense strand
uauuaaagagggacagcua

SEQ ID NO: 2282522 - RNA, 19 nt, Homo sapiens
  misc_RNA (1)...(19): siRNA sense strand
acagaaacugacagagauu

SEQ ID NO: 2282523 - RNA, 19 nt, Homo sapiens
  misc_RNA (1)...(19): siRNA sense strand
uuacagaaacugacagaga

SEQ ID NO: 2282524 - RNA, 19 nt, Homo sapiens
  misc_RNA (1)...(19): siRNA sense strand
gugcucaauaccagaauaa

SEQ ID NO: 2282525 - RNA, 19 nt, Homo sapiens
  misc_RNA (1)...(19): siRNA sense strand
ggacagagccuuugagagc

SEQ ID NO: 2282526 - RNA, 19 nt, Homo sapiens
  misc_RNA (1)...(19): siRNA sense strand
agaaaagacguaugacaaa

SEQ ID NO: 2282527 - RNA, 19 nt, Homo sapiens
  misc_RNA (1)...(19): siRNA sense strand
cagaaaucgauaagcucaa

SEQ ID NO: 2282528 - RNA, 19 nt, Homo sapiens
  misc_RNA (1)...(19): siRNA sense strand
uaaagaaagcagugaggca

SEQ ID NO: 2282529 - RNA, 19 nt, Homo sapiens
  misc_RNA (1)...(19): siRNA sense strand
ccuuggaacccgggaguua

SEQ ID NO: 2282530 - RNA, 19 nt, Homo sapiens
  misc_RNA (1)...(19): siRNA sense strand
gauaagcagaagugugauu

SEQ ID NO: 2282531 - RNA, 19 nt, Homo sapiens
  misc_RNA (1)...(19): siRNA sense strand
gugaaacuguaaaggacuu

SEQ ID NO: 2282532 - RNA, 19 nt, Homo sapiens
  misc_RNA (1)...(19): siRNA sense strand
cacuauauuuggugacgaa

SEQ ID NO: 2282533 - RNA, 19 nt, Homo sapiens
  misc_RNA (1)...(19): siRNA sense strand
cgacaaaacauguggcagu

SEQ ID NO: 2282534 - RNA, 19 nt, Homo sapiens
  misc_RNA (1)...(19): siRNA sense strand
augugaaggcgcuguauaa

SEQ ID NO: 2282535 - RNA, 19 nt, Homo sapiens
  misc_RNA (1)...(19): siRNA sense strand
acagaaaggagauggagga

SEQ ID NO: 2282536 - RNA, 19 nt, Homo sapiens
  misc_RNA (1)...(19): siRNA sense strand
cagcacagaaacagaugaa

SEQ ID NO: 2282537 - RNA, 19 nt, Homo sapiens
  misc_RNA (1)...(19): siRNA sense strand
cguacaagaauuuagaaca

SEQ ID NO: 2282538 - RNA, 19 nt, Homo sapiens
  misc_RNA (1)...(19): siRNA sense strand
ucgaauagugccaaaguuu

SEQ ID NO: 2282539 - RNA, 19 nt, Homo sapiens
  misc_RNA (1)...(19): siRNA sense strand
uucuaagaguggagauaau

SEQ ID NO: 2282540 - RNA, 19 nt, Homo sapiens
  misc_RNA (1)...(19): siRNA sense strand
gccuuuggguacaggaaau

SEQ ID NO: 2282541 - RNA, 19 nt, Homo sapiens
  misc_RNA (1)...(19): siRNA sense strand
cagagaucguacaagaauu

SEQ ID NO: 2282542 - RNA, 19 nt, Homo sapiens
  misc_RNA (1)...(19): siRNA sense strand
augacaaaaccuuggaaaa

SEQ ID NO: 2282543 - RNA, 19 nt, Homo sapiens
  misc_RNA (1)...(19): siRNA sense strand
guucaguccuaaacgagaa

SEQ ID NO: 2282544 - RNA, 19 nt, Homo sapiens
  misc_RNA (1)...(19): siRNA sense strand
gggaguuauuacagagauc

SEQ ID NO: 2282545 - RNA, 19 nt, Homo sapiens
  misc_RNA (1)...(19): siRNA sense strand
guaaauguucaguccuaaa

SEQ ID NO: 2282546 - RNA, 19 nt, Homo sapiens
  misc_RNA (1)...(19): siRNA sense strand
ucauugaggaagccggaaa

SEQ ID NO: 2282547 - RNA, 19 nt, Homo sapiens
  misc_RNA (1)...(19): siRNA sense strand
augcaggagccgaacuaaa

SEQ ID NO: 2282548 - RNA, 19 nt, Homo sapiens
  misc_RNA (1)...(19): siRNA sense strand
uagaaaagacguaugacaa

SEQ ID NO: 2282549 - RNA, 19 nt, Homo sapiens
  misc_RNA (1)...(19): siRNA sense strand
gcucccaugcccugaauaa

SEQ ID NO: 2282550 - RNA, 19 nt, Homo sapiens
  misc_RNA (1)...(19): siRNA sense strand
uuaaagagggacagcuauu

SEQ ID NO: 2282551 - RNA, 19 nt, Homo sapiens
  misc_RNA (1)...(19): siRNA sense strand
cgaaagugggucaugugaa

SEQ ID NO: 2282552 - RNA, 19 nt, Homo sapiens
  misc_RNA (1)...(19): siRNA sense strand
ugacaaaaccuuggaaaau

SEQ ID NO: 2282553 - RNA, 19 nt, Homo sapiens
  misc_RNA (1)...(19): siRNA sense strand
aagaagaugcuguggaauc

SEQ ID NO: 2282554 - RNA, 19 nt, Homo sapiens
  misc_RNA (1)...(19): siRNA sense strand
aggaggaagcuaaagauga

SEQ ID NO: 2282555 - RNA, 19 nt, Homo sapiens
  misc_RNA (1)...(19): siRNA sense strand
uuacuuugggauuggauua

SEQ ID NO: 2282556 - RNA, 19 nt, Homo sapiens
  misc_RNA (1)...(19): siRNA sense strand
gaauuuagaacaaaggguu

SEQ ID NO: 2282557 - RNA, 19 nt, Homo sapiens
  misc_RNA (1)...(19): siRNA sense strand
cgaauagcccagugccgua

SEQ ID NO: 2282558 - RNA, 19 nt, Homo sapiens
  misc_RNA (1)...(19): siRNA sense strand
ggagauaaucagggaguaa

SEQ ID NO: 2282559 - RNA, 19 nt, Homo sapiens
  misc_RNA (1)...(19): siRNA sense strand
guucagaagcagaagacaa

SEQ ID NO: 2282560 - RNA, 19 nt, Homo sapiens
  misc_RNA (1)...(19): siRNA sense strand
ggacauuauagaagaugaa

SEQ ID NO: 2282561 - RNA, 19 nt, Homo sapiens
  misc_RNA (1)...(19): siRNA sense strand
ggguggaacuaaagaggau

SEQ ID NO: 2282562 - RNA, 19 nt, Homo sapiens
  misc_RNA (1)...(19): siRNA sense strand
gugaagagucccuggguga

SEQ ID NO: 2282563 - RNA, 19 nt, Homo sapiens
  misc_RNA (1)...(19): siRNA sense strand
ggauuggauuagaugcaaa

SEQ ID NO: 2282564 - RNA, 19 nt, Homo sapiens
  misc_RNA (1)...(19): siRNA sense strand
cgaaggagucccagugcaa

SEQ ID NO: 2282565 - RNA, 19 nt, Homo sapiens
  misc_RNA (1)...(19): siRNA sense strand
acucaaagucucugauauu

SEQ ID NO: 2282566 - RNA, 19 nt, Homo sapiens
  misc_RNA (1)...(19): siRNA sense strand
gguucagccuccagggauu

SEQ ID NO: 2282567 - RNA, 19 nt, Homo sapiens
  misc_RNA (1)...(19): siRNA sense strand
acaaaauguuacuggcaaa

SEQ ID NO: 2282568 - RNA, 19 nt, Homo sapiens
  misc_RNA (1)...(19): siRNA sense strand
uggaaaugccuuuggugua

SEQ ID NO: 2282569 - RNA, 19 nt, Homo sapiens
  misc_RNA (1)...(19): siRNA sense strand
ccucaauucugaugaacau

SEQ ID NO: 2282570 - RNA, 19 nt, Homo sapiens
  misc_RNA (1)...(19): siRNA sense strand
gaggcaagucauugaggaa

SEQ ID NO: 2282571 - RNA, 19 nt, Homo sapiens
  misc_RNA (1)...(19): siRNA sense strand
ccggaaaaguuauggauga

SEQ ID NO: 2282572 - RNA, 19 nt, Homo sapiens
  misc_RNA (1)...(19): siRNA sense strand
aaucuaaggaggaagcuaa

SEQ ID NO: 2282573 - RNA, 19 nt, Homo sapiens
  misc_RNA (1)...(19): siRNA sense strand
gcugagaacagaaaggaga

SEQ ID NO: 2282574 - RNA, 19 nt, Homo sapiens
  misc_RNA (1)...(19): siRNA sense strand
aggaaaagguucagaagca

SEQ ID NO: 2282575 - RNA, 19 nt, Homo sapiens
  misc_RNA (1)...(19): siRNA sense strand
cugcaaagauuuauaccau

SEQ ID NO: 2282576 - RNA, 19 nt, Homo sapiens
  misc_RNA (1)...(19): siRNA sense strand
ccacaugaagagcgaguau

SEQ ID NO: 2282577 - RNA, 19 nt, Homo sapiens
  misc_RNA (1)...(19): siRNA sense strand
uauuaaagagggacagcua

SEQ ID NO: 2282578 - RNA, 19 nt, Homo sapiens
  misc_RNA (1)...(19): siRNA sense strand
acagaaacugacagagauu

SEQ ID NO: 2282579 - RNA, 19 nt, Homo sapiens
  misc_RNA (1)...(19): siRNA sense strand
ccagggaauuaaagagcuu

SEQ ID NO: 2282580 - RNA, 19 nt, Homo sapiens
  misc_RNA (1)...(19): siRNA sense strand
uuacagaaacugacagaga

SEQ ID NO: 2282581 - RNA, 19 nt, Homo sapiens
  misc_RNA (1)...(19): siRNA sense strand
gugcucaauaccagaauaa

SEQ ID NO: 2282582 - RNA, 19 nt, Homo sapiens
  misc_RNA (1)...(19): siRNA sense strand
ggacagagccuuugagagc

SEQ ID NO: 2282583 - RNA, 19 nt, Homo sapiens
  misc_RNA (1)...(19): siRNA sense strand
agaaaagacguaugacaaa

SEQ ID NO: 2282584 - RNA, 19 nt, Homo sapiens
  misc_RNA (1)...(19): siRNA sense strand
cagaaaucgauaagcucaa

SEQ ID NO: 2282585 - RNA, 19 nt, Homo sapiens
  misc_RNA (1)...(19): siRNA sense strand
uaaagaaagcagugaggca

SEQ ID NO: 2282586 - RNA, 19 nt, Homo sapiens
  misc_RNA (1)...(19): siRNA sense strand
ccuuggaacccgggaguua

SEQ ID NO: 2282587 - RNA, 19 nt, Homo sapiens
  misc_RNA (1)...(19): siRNA sense strand
gauaagcagaagugugauu

SEQ ID NO: 2282588 - RNA, 19 nt, Homo sapiens
  misc_RNA (1)...(19): siRNA sense strand
gugaaacuguaaaggacuu

SEQ ID NO: 2282589 - RNA, 19 nt, Homo sapiens
  misc_RNA (1)...(19): siRNA sense strand
cacuauauuuggugacgaa

SEQ ID NO: 2282590 - RNA, 19 nt, Homo sapiens
  misc_RNA (1)...(19): siRNA sense strand
cgacaaaacauguggcagu

SEQ ID NO: 2282591 - RNA, 19 nt, Homo sapiens
  misc_RNA (1)...(19): siRNA sense strand
augugaaggcgcuguauaa

SEQ ID NO: 2282592 - RNA, 19 nt, Homo sapiens
  misc_RNA (1)...(19): siRNA sense strand
acagaaaggagauggagga

SEQ ID NO: 2282593 - RNA, 19 nt, Homo sapiens
  misc_RNA (1)...(19): siRNA sense strand
cagcacagaaacagaugaa

SEQ ID NO: 2282594 - RNA, 19 nt, Homo sapiens
  misc_RNA (1)...(19): siRNA sense strand
cguacaagaauuuagaaca

SEQ ID NO: 2282595 - RNA, 19 nt, Homo sapiens
  misc_RNA (1)...(19): siRNA sense strand
ucgaauagugccaaaguuu

SEQ ID NO: 2282596 - RNA, 19 nt, Homo sapiens
  misc_RNA (1)...(19): siRNA sense strand
uucuaagaguggagauaau

SEQ ID NO: 2282597 - RNA, 19 nt, Homo sapiens
  misc_RNA (1)...(19): siRNA sense strand
gccuuuggguacaggaaau

SEQ ID NO: 2282598 - RNA, 19 nt, Homo sapiens
  misc_RNA (1)...(19): siRNA sense strand
cagagaucguacaagaauu

SEQ ID NO: 2282599 - RNA, 19 nt, Homo sapiens
  misc_RNA (1)...(19): siRNA sense strand
augacaaaaccuuggaaaa

SEQ ID NO: 2282600 - RNA, 19 nt, Homo sapiens
  misc_RNA (1)...(19): siRNA sense strand
guucaguccuaaacgagaa

SEQ ID NO: 2282601 - RNA, 19 nt, Homo sapiens
  misc_RNA (1)...(19): siRNA sense strand
gggaguuauuacagagauc

SEQ ID NO: 2282602 - RNA, 19 nt, Homo sapiens
  misc_RNA (1)...(19): siRNA sense strand
guaaauguucaguccuaaa

SEQ ID NO: 2282603 - RNA, 19 nt, Homo sapiens
  misc_RNA (1)...(19): siRNA sense strand
ucauugaggaagccggaaa

SEQ ID NO: 2282604 - RNA, 19 nt, Homo sapiens
  misc_RNA (1)...(19): siRNA sense strand
augcaggagccgaacuaaa

SEQ ID NO: 2282605 - RNA, 19 nt, Homo sapiens
  misc_RNA (1)...(19): siRNA sense strand
uagaaaagacguaugacaa

SEQ ID NO: 2282606 - RNA, 19 nt, Homo sapiens
  misc_RNA (1)...(19): siRNA sense strand
gcucccaugcccugaauaa

SEQ ID NO: 2282607 - RNA, 19 nt, Homo sapiens
  misc_RNA (1)...(19): siRNA sense strand
uuaaagagggacagcuauu

SEQ ID NO: 2282608 - RNA, 19 nt, Homo sapiens
  misc_RNA (1)...(19): siRNA sense strand
cgaaagugggucaugugaa

SEQ ID NO: 2282609 - RNA, 19 nt, Homo sapiens
  misc_RNA (1)...(19): siRNA sense strand
ugacaaaaccuuggaaaau

SEQ ID NO: 2282610 - RNA, 19 nt, Homo sapiens
  misc_RNA (1)...(19): siRNA sense strand
aagaagaugcuguggaauc

SEQ ID NO: 2282611 - RNA, 19 nt, Homo sapiens
  misc_RNA (1)...(19): siRNA sense strand
aggaggaagcuaaagauga

SEQ ID NO: 2282612 - RNA, 19 nt, Homo sapiens
  misc_RNA (1)...(19): siRNA sense strand
uuacuuugggauuggauua

SEQ ID NO: 2282613 - RNA, 19 nt, Homo sapiens
  misc_RNA (1)...(19): siRNA sense strand
gaauuuagaacaaaggguu

SEQ ID NO: 2282614 - RNA, 19 nt, Homo sapiens
  misc_RNA (1)...(19): siRNA sense strand
gggagaaagugcugcgcua

SEQ ID NO: 2282615 - RNA, 19 nt, Homo sapiens
  misc_RNA (1)...(19): siRNA sense strand
gagacaagguauaugagca

SEQ ID NO: 2282616 - RNA, 19 nt, Homo sapiens
  misc_RNA (1)...(19): siRNA sense strand
ucuauguggcccugggaua

SEQ ID NO: 2282617 - RNA, 19 nt, Homo sapiens
  misc_RNA (1)...(19): siRNA sense strand
aguuauauaugcaggugga

SEQ ID NO: 2282618 - RNA, 19 nt, Homo sapiens
  misc_RNA (1)...(19): siRNA sense strand
ugcgaaaggugcuggacca

SEQ ID NO: 2282619 - RNA, 19 nt, Homo sapiens
  misc_RNA (1)...(19): siRNA sense strand
uauaugagcagcuggccaa

SEQ ID NO: 2282620 - RNA, 19 nt, Homo sapiens
  misc_RNA (1)...(19): siRNA sense strand
gggagaaagugcugcgcua

SEQ ID NO: 2282621 - RNA, 19 nt, Homo sapiens
  misc_RNA (1)...(19): siRNA sense strand
gagacaagguauaugagca

SEQ ID NO: 2282622 - RNA, 19 nt, Homo sapiens
  misc_RNA (1)...(19): siRNA sense strand
ucuauguggcccugggaua

SEQ ID NO: 2282623 - RNA, 19 nt, Homo sapiens
  misc_RNA (1)...(19): siRNA sense strand
aguuauauaugcaggugga

SEQ ID NO: 2282624 - RNA, 19 nt, Homo sapiens
  misc_RNA (1)...(19): siRNA sense strand
ugcgaaaggugcuggacca

SEQ ID NO: 2282625 - RNA, 19 nt, Homo sapiens
  misc_RNA (1)...(19): siRNA sense strand
uauaugagcagcuggccaa

SEQ ID NO: 2282626 - RNA, 19 nt, Homo sapiens
  misc_RNA (1)...(19): siRNA sense strand
ccacagaagcugaagagga

SEQ ID NO: 2282627 - RNA, 19 nt, Homo sapiens
  misc_RNA (1)...(19): siRNA sense strand
ggaaaugcgucaaaggaug

SEQ ID NO: 2282628 - RNA, 19 nt, Homo sapiens
  misc_RNA (1)...(19): siRNA sense strand
aagcaaugcauguagguca

SEQ ID NO: 2282629 - RNA, 19 nt, Homo sapiens
  misc_RNA (1)...(19): siRNA sense strand
aauaaaccgaauagagaga

SEQ ID NO: 2282630 - RNA, 19 nt, Homo sapiens
  misc_RNA (1)...(19): siRNA sense strand
acgagaaguaucuguggaa

SEQ ID NO: 2282631 - RNA, 19 nt, Homo sapiens
  misc_RNA (1)...(19): siRNA sense strand
agagagagccaccggccaa

SEQ ID NO: 2282632 - RNA, 19 nt, Homo sapiens
  misc_RNA (1)...(19): siRNA sense strand
caguaaagauguugguguc

SEQ ID NO: 2282633 - RNA, 19 nt, Homo sapiens
  misc_RNA (1)...(19): siRNA sense strand
gugcaaaaggcauagacua

SEQ ID NO: 2282634 - RNA, 19 nt, Homo sapiens
  misc_RNA (1)...(19): siRNA sense strand
acagacaagcagugcaaaa

SEQ ID NO: 2282635 - RNA, 19 nt, Homo sapiens
  misc_RNA (1)...(19): siRNA sense strand
gggaggauuacaaggcuga

SEQ ID NO: 2282636 - RNA, 19 nt, Homo sapiens
  misc_RNA (1)...(19): siRNA sense strand
gcaguaaagauguuggugu

SEQ ID NO: 2282637 - RNA, 19 nt, Homo sapiens
  misc_RNA (1)...(19): siRNA sense strand
aagcagugcaaaaggcaua

SEQ ID NO: 2282638 - RNA, 19 nt, Homo sapiens
  misc_RNA (1)...(19): siRNA sense strand
ggaccaggccuauggcgau

SEQ ID NO: 2282639 - RNA, 19 nt, Homo sapiens
  misc_RNA (1)...(19): siRNA sense strand
cgguuuggaaguaguaaaa

SEQ ID NO: 2282640 - RNA, 19 nt, Homo sapiens
  misc_RNA (1)...(19): siRNA sense strand
agaucaaaaccaaggucaa

SEQ ID NO: 2282641 - RNA, 19 nt, Homo sapiens
  misc_RNA (1)...(19): siRNA sense strand
guugagaaugccaaggaca

SEQ ID NO: 2282642 - RNA, 19 nt, Homo sapiens
  misc_RNA (1)...(19): siRNA sense strand
uugagaaugccaaggacau

SEQ ID NO: 2282643 - RNA, 19 nt, Homo sapiens
  misc_RNA (1)...(19): siRNA sense strand
aaggcauagacuacgauaa

SEQ ID NO: 2282644 - RNA, 19 nt, Homo sapiens
  misc_RNA (1)...(19): siRNA sense strand
gcaagcagcuggagggucu

SEQ ID NO: 2282645 - RNA, 19 nt, Homo sapiens
  misc_RNA (1)...(19): siRNA sense strand
ccaauaaacugaugcgucu

SEQ ID NO: 2282646 - RNA, 19 nt, Homo sapiens
  misc_RNA (1)...(19): siRNA sense strand
aaacaggaucccaagccaa

SEQ ID NO: 2282647 - RNA, 19 nt, Homo sapiens
  misc_RNA (1)...(19): siRNA sense strand
cuggaaaugaaguguaagu

SEQ ID NO: 2282648 - RNA, 19 nt, Homo sapiens
  misc_RNA (1)...(19): siRNA sense strand
cacaagacaggcagugcaa

SEQ ID NO: 2282649 - RNA, 19 nt, Homo sapiens
  misc_RNA (1)...(19): siRNA sense strand
cucaauuagccaagauaaa

SEQ ID NO: 2282650 - RNA, 19 nt, Homo sapiens
  misc_RNA (1)...(19): siRNA sense strand
cuggaaagaaagaucaaca

SEQ ID NO: 2282651 - RNA, 19 nt, Homo sapiens
  misc_RNA (1)...(19): siRNA sense strand
cagucaacaugauggacga

SEQ ID NO: 2282652 - RNA, 19 nt, Homo sapiens
  misc_RNA (1)...(19): siRNA sense strand
aucaacaagaugacggaua

SEQ ID NO: 2282653 - RNA, 19 nt, Homo sapiens
  misc_RNA (1)...(19): siRNA sense strand
agcaggugguguuggaauu

SEQ ID NO: 2282654 - RNA, 19 nt, Homo sapiens
  misc_RNA (1)...(19): siRNA sense strand
agaugagagcggagaucca

SEQ ID NO: 2282655 - RNA, 19 nt, Homo sapiens
  misc_RNA (1)...(19): siRNA sense strand
cggagauccaggacaugaa

SEQ ID NO: 2282656 - RNA, 19 nt, Homo sapiens
  misc_RNA (1)...(19): siRNA sense strand
agaaggacgcggagcagga

SEQ ID NO: 2282657 - RNA, 19 nt, Homo sapiens
  misc_RNA (1)...(19): siRNA sense strand
acgcggagcaggagucaca

SEQ ID NO: 2282658 - RNA, 19 nt, Homo sapiens
  misc_RNA (1)...(19): siRNA sense strand
gggccacaccugaggaaaa

SEQ ID NO: 2282659 - RNA, 19 nt, Homo sapiens
  misc_RNA (1)...(19): siRNA sense strand
cuggaccuguggagggaaa

SEQ ID NO: 2282660 - RNA, 19 nt, Homo sapiens
  misc_RNA (1)...(19): siRNA sense strand
aggaucaggcccaggauau

SEQ ID NO: 2282661 - RNA, 19 nt, Homo sapiens
  misc_RNA (1)...(19): siRNA sense strand
ccagcggagccuagagaga

SEQ ID NO: 2282662 - RNA, 19 nt, Homo sapiens
  misc_RNA (1)...(19): siRNA sense strand
cuguguugguccaggugua

SEQ ID NO: 2282663 - RNA, 19 nt, Homo sapiens
  misc_RNA (1)...(19): siRNA sense strand
cagaaaaggaaccaaggaa

SEQ ID NO: 2282664 - RNA, 19 nt, Homo sapiens
  misc_RNA (1)...(19): siRNA sense strand
ucacagaggaucaggccca

SEQ ID NO: 2282665 - RNA, 19 nt, Homo sapiens
  misc_RNA (1)...(19): siRNA sense strand
ccuugaagaauuucggaca

SEQ ID NO: 2282666 - RNA, 19 nt, Homo sapiens
  misc_RNA (1)...(19): siRNA sense strand
cuugaagaauuucggacau

SEQ ID NO: 2282667 - RNA, 19 nt, Homo sapiens
  misc_RNA (1)...(19): siRNA sense strand
ugugggaagaugccagaaa

SEQ ID NO: 2282668 - RNA, 19 nt, Homo sapiens
  misc_RNA (1)...(19): siRNA sense strand
uucauuauccugagggcaa

SEQ ID NO: 2282669 - RNA, 19 nt, Homo sapiens
  misc_RNA (1)...(19): siRNA sense strand
ggaaauccacagagagcac

SEQ ID NO: 2282670 - RNA, 19 nt, Homo sapiens
  misc_RNA (1)...(19): siRNA sense strand
aggaggaggaugaggguaa

SEQ ID NO: 2282671 - RNA, 19 nt, Homo sapiens
  misc_RNA (1)...(19): siRNA sense strand
gcacugagaaugaggccua

SEQ ID NO: 2282672 - RNA, 19 nt, Homo sapiens
  misc_RNA (1)...(19): siRNA sense strand
agaacaaggagaagcgcaa

SEQ ID NO: 2282673 - RNA, 19 nt, Homo sapiens
  misc_RNA (1)...(19): siRNA sense strand
aaacauaagaacaaggaga

SEQ ID NO: 2282674 - RNA, 19 nt, Homo sapiens
  misc_RNA (1)...(19): siRNA sense strand
caggcaaacauaagaacaa

SEQ ID NO: 2282675 - RNA, 19 nt, Homo sapiens
  misc_RNA (1)...(19): siRNA sense strand
agucguacuuugagaguca

SEQ ID NO: 2282676 - RNA, 19 nt, Homo sapiens
  misc_RNA (1)...(19): siRNA sense strand
aaggaugggcagacagaua

SEQ ID NO: 2282677 - RNA, 19 nt, Homo sapiens
  misc_RNA (1)...(19): siRNA sense strand
aagaugaggaggaggauga

SEQ ID NO: 2282678 - RNA, 19 nt, Homo sapiens
  misc_RNA (1)...(19): siRNA sense strand
acauggacgaggaggacua

SEQ ID NO: 2282679 - RNA, 19 nt, Homo sapiens
  misc_RNA (1)...(19): siRNA sense strand
caguggaagaacagcuaaa

SEQ ID NO: 2282680 - RNA, 19 nt, Homo sapiens
  misc_RNA (1)...(19): siRNA sense strand
gcagcaaggugcaaggcga

SEQ ID NO: 2282681 - RNA, 19 nt, Homo sapiens
  misc_RNA (1)...(19): siRNA sense strand
aggaugaagaugaggagga

SEQ ID NO: 2282682 - RNA, 19 nt, Homo sapiens
  misc_RNA (1)...(19): siRNA sense strand
ggguggacuuugaugugaa

SEQ ID NO: 2282683 - RNA, 19 nt, Homo sapiens
  misc_RNA (1)...(19): siRNA sense strand
cagaggagcuggacgagga

SEQ ID NO: 2282684 - RNA, 19 nt, Homo sapiens
  misc_RNA (1)...(19): siRNA sense strand
gugaagacuuucugccaca

SEQ ID NO: 2282685 - RNA, 19 nt, Homo sapiens
  misc_RNA (1)...(19): siRNA sense strand
cugcagaggagcuggacga

SEQ ID NO: 2282686 - RNA, 19 nt, Homo sapiens
  misc_RNA (1)...(19): siRNA sense strand
guuucuugguauaccguaa

SEQ ID NO: 2282687 - RNA, 19 nt, Homo sapiens
  misc_RNA (1)...(19): siRNA sense strand
cggaagacagaggguguaa

SEQ ID NO: 2282688 - RNA, 19 nt, Homo sapiens
  misc_RNA (1)...(19): siRNA sense strand
gagaaagucaagaaggcca

SEQ ID NO: 2282689 - RNA, 19 nt, Homo sapiens
  misc_RNA (1)...(19): siRNA sense strand
aaguauaacgccaaggaca

SEQ ID NO: 2282690 - RNA, 19 nt, Homo sapiens
  misc_RNA (1)...(19): siRNA sense strand
agaaagucaagaaggccaa

SEQ ID NO: 2282691 - RNA, 19 nt, Homo sapiens
  misc_RNA (1)...(19): siRNA sense strand
gcagacagauagugcggca

SEQ ID NO: 2282692 - RNA, 19 nt, Homo sapiens
  misc_RNA (1)...(19): siRNA sense strand
agaaagagaugacggcacu

SEQ ID NO: 2282693 - RNA, 19 nt, Homo sapiens
  misc_RNA (1)...(19): siRNA sense strand
gcgagggugaggaggauga

SEQ ID NO: 2282694 - RNA, 19 nt, Homo sapiens
  misc_RNA (1)...(19): siRNA sense strand
gcaugguggagguggacuu

SEQ ID NO: 2282695 - RNA, 19 nt, Homo sapiens
  misc_RNA (1)...(19): siRNA sense strand
auaauaaaggcgacccuaa

SEQ ID NO: 2282696 - RNA, 19 nt, Homo sapiens
  misc_RNA (1)...(19): siRNA sense strand
aacauaagaacaaggagaa

SEQ ID NO: 2282697 - RNA, 19 nt, Homo sapiens
  misc_RNA (1)...(19): siRNA sense strand
augaagaugaggaggagga

SEQ ID NO: 2282698 - RNA, 19 nt, Homo sapiens
  misc_RNA (1)...(19): siRNA sense strand
augaaugagcgucggaaga

SEQ ID NO: 2282699 - RNA, 19 nt, Homo sapiens
  misc_RNA (1)...(19): siRNA sense strand
uggacgaggaaguagagua

SEQ ID NO: 2282700 - RNA, 19 nt, Homo sapiens
  misc_RNA (1)...(19): siRNA sense strand
augaagaaggcacggaaga

SEQ ID NO: 2282701 - RNA, 19 nt, Homo sapiens
  misc_RNA (1)...(19): siRNA sense strand
ucagaggaacugugaccaa

SEQ ID NO: 2282702 - RNA, 19 nt, Homo sapiens
  misc_RNA (1)...(19): siRNA sense strand
cugcaaucucagaggaacu

SEQ ID NO: 2282703 - RNA, 19 nt, Homo sapiens
  misc_RNA (1)...(19): siRNA sense strand
aagagaaggacacaggcaa

SEQ ID NO: 2282704 - RNA, 19 nt, Homo sapiens
  misc_RNA (1)...(19): siRNA sense strand
ugaagaugcagccgaggaa

SEQ ID NO: 2282705 - RNA, 19 nt, Homo sapiens
  misc_RNA (1)...(19): siRNA sense strand
acaugaagauggagccugu

SEQ ID NO: 2282706 - RNA, 19 nt, Homo sapiens
  misc_RNA (1)...(19): siRNA sense strand
caagaguuacagugguauu

SEQ ID NO: 2282707 - RNA, 19 nt, Homo sapiens
  misc_RNA (1)...(19): siRNA sense strand
aagaugaucaagaaagaga

SEQ ID NO: 2282708 - RNA, 19 nt, Homo sapiens
  misc_RNA (1)...(19): siRNA sense strand
uuacagugguauugaguac

SEQ ID NO: 2282709 - RNA, 19 nt, Homo sapiens
  misc_RNA (1)...(19): siRNA sense strand
ccugagaauggcagcaaca

SEQ ID NO: 2282710 - RNA, 19 nt, Homo sapiens
  misc_RNA (1)...(19): siRNA sense strand
gcaaugauggugagugcca

SEQ ID NO: 2282711 - RNA, 19 nt, Homo sapiens
  misc_RNA (1)...(19): siRNA sense strand
gguaagggcuggagcucag

SEQ ID NO: 2282712 - RNA, 19 nt, Homo sapiens
  misc_RNA (1)...(19): siRNA sense strand
agugauaaguccacagaag

SEQ ID NO: 2282713 - RNA, 19 nt, Homo sapiens
  misc_RNA (1)...(19): siRNA sense strand
ugucagaggaugaggacuc

SEQ ID NO: 2282714 - RNA, 19 nt, Homo sapiens
  misc_RNA (1)...(19): siRNA sense strand
caaggagaacacugagaca

SEQ ID NO: 2282715 - RNA, 19 nt, Homo sapiens
  misc_RNA (1)...(19): siRNA sense strand
cggucuuccuagagccuau

SEQ ID NO: 2282716 - RNA, 19 nt, Homo sapiens
  misc_RNA (1)...(19): siRNA sense strand
ggauguggugucagaggau

SEQ ID NO: 2282717 - RNA, 19 nt, Homo sapiens
  misc_RNA (1)...(19): siRNA sense strand
aggaaguagaguaugacau

SEQ ID NO: 2282718 - RNA, 19 nt, Homo sapiens
  misc_RNA (1)...(19): siRNA sense strand
cgugcaaagaugaucaaga

SEQ ID NO: 2282719 - RNA, 19 nt, Homo sapiens
  misc_RNA (1)...(19): siRNA sense strand
cguaaugacugcagccuuc

SEQ ID NO: 2282720 - RNA, 19 nt, Homo sapiens
  misc_RNA (1)...(19): siRNA sense strand
agauggagccugugcggga

SEQ ID NO: 2282721 - RNA, 19 nt, Homo sapiens
  misc_RNA (1)...(19): siRNA sense strand
cggaagauccuggcagaga

SEQ ID NO: 2282722 - RNA, 19 nt, Homo sapiens
  misc_RNA (1)...(19): siRNA sense strand
cuaaugcgcuaguggacga

SEQ ID NO: 2282723 - RNA, 19 nt, Homo sapiens
  misc_RNA (1)...(19): siRNA sense strand
aagaugcagccgaggaaga

SEQ ID NO: 2282724 - RNA, 19 nt, Homo sapiens
  misc_RNA (1)...(19): siRNA sense strand
acgaagugaaugccagcaa

SEQ ID NO: 2282725 - RNA, 19 nt, Homo sapiens
  misc_RNA (1)...(19): siRNA sense strand
agcagugagaccagcgaua

SEQ ID NO: 2282726 - RNA, 19 nt, Homo sapiens
  misc_RNA (1)...(19): siRNA sense strand
cagcagauugccauggaga

SEQ ID NO: 2282727 - RNA, 19 nt, Homo sapiens
  misc_RNA (1)...(19): siRNA sense strand
agacagauagugcggcaga

SEQ ID NO: 2282728 - RNA, 19 nt, Homo sapiens
  misc_RNA (1)...(19): siRNA sense strand
cugcaaugauggugagugc

SEQ ID NO: 2282729 - RNA, 19 nt, Homo sapiens
  misc_RNA (1)...(19): siRNA sense strand
agggugaggaggaugaaga

SEQ ID NO: 2282730 - RNA, 19 nt, Homo sapiens
  misc_RNA (1)...(19): siRNA sense strand
gggacgaagucaaggagga

SEQ ID NO: 2282731 - RNA, 19 nt, Homo sapiens
  misc_RNA (1)...(19): siRNA sense strand
cugcagagauaaugcggga

SEQ ID NO: 2282732 - RNA, 19 nt, Homo sapiens
  misc_RNA (1)...(19): siRNA sense strand
gugaaacagcagaggagca

SEQ ID NO: 2282733 - RNA, 19 nt, Homo sapiens
  misc_RNA (1)...(19): siRNA sense strand
acgaccaggugaagaucaa

SEQ ID NO: 2282734 - RNA, 19 nt, Homo sapiens
  misc_RNA (1)...(19): siRNA sense strand
acgcagugaccgacgacua

SEQ ID NO: 2282735 - RNA, 19 nt, Homo sapiens
  misc_RNA (1)...(19): siRNA sense strand
aggcuuucacugagagaga

SEQ ID NO: 2282736 - RNA, 19 nt, Homo sapiens
  misc_RNA (1)...(19): siRNA sense strand
gagugcugcaggaggacaa

SEQ ID NO: 2282737 - RNA, 19 nt, Homo sapiens
  misc_RNA (1)...(19): siRNA sense strand
acgaagucaaggaggagau

SEQ ID NO: 2282738 - RNA, 19 nt, Homo sapiens
  misc_RNA (1)...(19): siRNA sense strand
agaaguacgcagugaccga

SEQ ID NO: 2282739 - RNA, 19 nt, Homo sapiens
  misc_RNA (1)...(19): siRNA sense strand
aaucgaugguagugccaca

SEQ ID NO: 2282740 - RNA, 19 nt, Homo sapiens
  misc_RNA (1)...(19): siRNA sense strand
ggacagaagugugcccuga

SEQ ID NO: 2282741 - RNA, 19 nt, Homo sapiens
  misc_RNA (1)...(19): siRNA sense strand
gguccagagaaguaugaca

SEQ ID NO: 2282742 - RNA, 19 nt, Homo sapiens
  misc_RNA (1)...(19): siRNA sense strand
agagauaaugcgggauauu

SEQ ID NO: 2282743 - RNA, 19 nt, Homo sapiens
  misc_RNA (1)...(19): siRNA sense strand
uagacuacgaccaggugaa

SEQ ID NO: 2282744 - RNA, 19 nt, Homo sapiens
  misc_RNA (1)...(19): siRNA sense strand
gcaagacgaugcaggguga

SEQ ID NO: 2282745 - RNA, 19 nt, Homo sapiens
  misc_RNA (1)...(19): siRNA sense strand
aggcagaagaaguggagga

SEQ ID NO: 2282746 - RNA, 19 nt, Homo sapiens
  misc_RNA (1)...(19): siRNA sense strand
ccucaguggugcagggugu

SEQ ID NO: 2282747 - RNA, 19 nt, Homo sapiens
  misc_RNA (1)...(19): siRNA sense strand
cagagguucaggagagcua

SEQ ID NO: 2282748 - RNA, 19 nt, Homo sapiens
  misc_RNA (1)...(19): siRNA sense strand
cauucaagauucuggcaca

SEQ ID NO: 2282749 - RNA, 19 nt, Homo sapiens
  misc_RNA (1)...(19): siRNA sense strand
gggaggaggaucagcgguu

SEQ ID NO: 2282750 - RNA, 19 nt, Homo sapiens
  misc_RNA (1)...(19): siRNA sense strand
aguaugugcgggagaguuu

SEQ ID NO: 2282751 - RNA, 19 nt, Homo sapiens
  misc_RNA (1)...(19): siRNA sense strand
ccauggaggcagaagaagu

SEQ ID NO: 2282752 - RNA, 19 nt, Homo sapiens
  misc_RNA (1)...(19): siRNA sense strand
ugauaagaagcuucaggaa

SEQ ID NO: 2282753 - RNA, 19 nt, Homo sapiens
  misc_RNA (1)...(19): siRNA sense strand
gaagaguaugugcgggaga

SEQ ID NO: 2282754 - RNA, 19 nt, Homo sapiens
  misc_RNA (1)...(19): siRNA sense strand
guguggaacccguggucau

SEQ ID NO: 2282755 - RNA, 19 nt, Homo sapiens
  misc_RNA (1)...(19): siRNA sense strand
uagaagaguaugugcggga

SEQ ID NO: 2282756 - RNA, 19 nt, Homo sapiens
  misc_RNA (1)...(19): siRNA sense strand
caacagcagaagaggccau

SEQ ID NO: 2282757 - RNA, 19 nt, Homo sapiens
  misc_RNA (1)...(19): siRNA sense strand
cuccaagagcaguuuaaua

SEQ ID NO: 2282758 - RNA, 19 nt, Homo sapiens
  misc_RNA (1)...(19): siRNA sense strand
aggugguacuggagcacau

SEQ ID NO: 2282759 - RNA, 19 nt, Homo sapiens
  misc_RNA (1)...(19): siRNA sense strand
aguucagggagcagaaaga

SEQ ID NO: 2282760 - RNA, 19 nt, Homo sapiens
  misc_RNA (1)...(19): siRNA sense strand
gaguucugcaagaugauaa

SEQ ID NO: 2282761 - RNA, 19 nt, Homo sapiens
  misc_RNA (1)...(19): siRNA sense strand
cagaagaaguggaggagcg

SEQ ID NO: 2282762 - RNA, 19 nt, Homo sapiens
  misc_RNA (1)...(19): siRNA sense strand
cggaguaugucgaggugcu

SEQ ID NO: 2282763 - RNA, 19 nt, Homo sapiens
  misc_RNA (1)...(19): siRNA sense strand
gguugcuggaguuguguaa

SEQ ID NO: 2282764 - RNA, 19 nt, Homo sapiens
  misc_RNA (1)...(19): siRNA sense strand
cugaggagccaauggaagu

SEQ ID NO: 2282765 - RNA, 19 nt, Homo sapiens
  misc_RNA (1)...(19): siRNA sense strand
ccuauuauccagcaggaca

SEQ ID NO: 2282766 - RNA, 19 nt, Homo sapiens
  misc_RNA (1)...(19): siRNA sense strand
ccgaauucgucguaugucu

SEQ ID NO: 2282767 - RNA, 19 nt, Homo sapiens
  misc_RNA (1)...(19): siRNA sense strand
caauggaaguucagggagc

SEQ ID NO: 2282768 - RNA, 19 nt, Homo sapiens
  misc_RNA (1)...(19): siRNA sense strand
guucaugaccggaaugcca

SEQ ID NO: 2282769 - RNA, 19 nt, Homo sapiens
  misc_RNA (1)...(19): siRNA sense strand
gccaagagacgcaagacga

SEQ ID NO: 2282770 - RNA, 19 nt, Homo sapiens
  misc_RNA (1)...(19): siRNA sense strand
gcaagacgaugcaggguga

SEQ ID NO: 2282771 - RNA, 19 nt, Homo sapiens
  misc_RNA (1)...(19): siRNA sense strand
aggcagaagaaguggagga

SEQ ID NO: 2282772 - RNA, 19 nt, Homo sapiens
  misc_RNA (1)...(19): siRNA sense strand
ccucaguggugcagggugu

SEQ ID NO: 2282773 - RNA, 19 nt, Homo sapiens
  misc_RNA (1)...(19): siRNA sense strand
cagagguucaggagagcua

SEQ ID NO: 2282774 - RNA, 19 nt, Homo sapiens
  misc_RNA (1)...(19): siRNA sense strand
cauucaagauucuggcaca

SEQ ID NO: 2282775 - RNA, 19 nt, Homo sapiens
  misc_RNA (1)...(19): siRNA sense strand
gggaggaggaucagcgguu

SEQ ID NO: 2282776 - RNA, 19 nt, Homo sapiens
  misc_RNA (1)...(19): siRNA sense strand
aguaugugcgggagaguuu

SEQ ID NO: 2282777 - RNA, 19 nt, Homo sapiens
  misc_RNA (1)...(19): siRNA sense strand
ccauggaggcagaagaagu

SEQ ID NO: 2282778 - RNA, 19 nt, Homo sapiens
  misc_RNA (1)...(19): siRNA sense strand
ugauaagaagcuucaggaa

SEQ ID NO: 2282779 - RNA, 19 nt, Homo sapiens
  misc_RNA (1)...(19): siRNA sense strand
gaagaguaugugcgggaga

SEQ ID NO: 2282780 - RNA, 19 nt, Homo sapiens
  misc_RNA (1)...(19): siRNA sense strand
guguggaacccguggucau

SEQ ID NO: 2282781 - RNA, 19 nt, Homo sapiens
  misc_RNA (1)...(19): siRNA sense strand
uagaagaguaugugcggga

SEQ ID NO: 2282782 - RNA, 19 nt, Homo sapiens
  misc_RNA (1)...(19): siRNA sense strand
caacagcagaagaggccau

SEQ ID NO: 2282783 - RNA, 19 nt, Homo sapiens
  misc_RNA (1)...(19): siRNA sense strand
cuccaagagcaguuuaaua

SEQ ID NO: 2282784 - RNA, 19 nt, Homo sapiens
  misc_RNA (1)...(19): siRNA sense strand
aggugguacuggagcacau

SEQ ID NO: 2282785 - RNA, 19 nt, Homo sapiens
  misc_RNA (1)...(19): siRNA sense strand
aguucagggagcagaaaga

SEQ ID NO: 2282786 - RNA, 19 nt, Homo sapiens
  misc_RNA (1)...(19): siRNA sense strand
gaguucugcaagaugauaa

SEQ ID NO: 2282787 - RNA, 19 nt, Homo sapiens
  misc_RNA (1)...(19): siRNA sense strand
cagaagaaguggaggagcg

SEQ ID NO: 2282788 - RNA, 19 nt, Homo sapiens
  misc_RNA (1)...(19): siRNA sense strand
cggaguaugucgaggugcu

SEQ ID NO: 2282789 - RNA, 19 nt, Homo sapiens
  misc_RNA (1)...(19): siRNA sense strand
gguugcuggaguuguguaa

SEQ ID NO: 2282790 - RNA, 19 nt, Homo sapiens
  misc_RNA (1)...(19): siRNA sense strand
cugaggagccaauggaagu

SEQ ID NO: 2282791 - RNA, 19 nt, Homo sapiens
  misc_RNA (1)...(19): siRNA sense strand
ccuauuauccagcaggaca

SEQ ID NO: 2282792 - RNA, 19 nt, Homo sapiens
  misc_RNA (1)...(19): siRNA sense strand
ccgaauucgucguaugucu

SEQ ID NO: 2282793 - RNA, 19 nt, Homo sapiens
  misc_RNA (1)...(19): siRNA sense strand
caauggaaguucagggagc

SEQ ID NO: 2282794 - RNA, 19 nt, Homo sapiens
  misc_RNA (1)...(19): siRNA sense strand
guucaugaccggaaugcca

SEQ ID NO: 2282795 - RNA, 19 nt, Homo sapiens
  misc_RNA (1)...(19): siRNA sense strand
gccaagagacgcaagacga

SEQ ID NO: 2282796 - RNA, 19 nt, Homo sapiens
  misc_RNA (1)...(19): siRNA sense strand
gcaagacgaugcaggguga

SEQ ID NO: 2282797 - RNA, 19 nt, Homo sapiens
  misc_RNA (1)...(19): siRNA sense strand
aggcagaagaaguggagga

SEQ ID NO: 2282798 - RNA, 19 nt, Homo sapiens
  misc_RNA (1)...(19): siRNA sense strand
ccucaguggugcagggugu

SEQ ID NO: 2282799 - RNA, 19 nt, Homo sapiens
  misc_RNA (1)...(19): siRNA sense strand
cagagguucaggagagcua

SEQ ID NO: 2282800 - RNA, 19 nt, Homo sapiens
  misc_RNA (1)...(19): siRNA sense strand
cauucaagauucuggcaca

SEQ ID NO: 2282801 - RNA, 19 nt, Homo sapiens
  misc_RNA (1)...(19): siRNA sense strand
gggaggaggaucagcgguu

SEQ ID NO: 2282802 - RNA, 19 nt, Homo sapiens
  misc_RNA (1)...(19): siRNA sense strand
aguaugugcgggagaguuu

SEQ ID NO: 2282803 - RNA, 19 nt, Homo sapiens
  misc_RNA (1)...(19): siRNA sense strand
ccauggaggcagaagaagu

SEQ ID NO: 2282804 - RNA, 19 nt, Homo sapiens
  misc_RNA (1)...(19): siRNA sense strand
ugauaagaagcuucaggaa

SEQ ID NO: 2282805 - RNA, 19 nt, Homo sapiens
  misc_RNA (1)...(19): siRNA sense strand
gaagaguaugugcgggaga

SEQ ID NO: 2282806 - RNA, 19 nt, Homo sapiens
  misc_RNA (1)...(19): siRNA sense strand
guguggaacccguggucau

SEQ ID NO: 2282807 - RNA, 19 nt, Homo sapiens
  misc_RNA (1)...(19): siRNA sense strand
uagaagaguaugugcggga

SEQ ID NO: 2282808 - RNA, 19 nt, Homo sapiens
  misc_RNA (1)...(19): siRNA sense strand
caacagcagaagaggccau

SEQ ID NO: 2282809 - RNA, 19 nt, Homo sapiens
  misc_RNA (1)...(19): siRNA sense strand
cuccaagagcaguuuaaua

SEQ ID NO: 2282810 - RNA, 19 nt, Homo sapiens
  misc_RNA (1)...(19): siRNA sense strand
aggugguacuggagcacau

SEQ ID NO: 2282811 - RNA, 19 nt, Homo sapiens
  misc_RNA (1)...(19): siRNA sense strand
aguucagggagcagaaaga

SEQ ID NO: 2282812 - RNA, 19 nt, Homo sapiens
  misc_RNA (1)...(19): siRNA sense strand
gaguucugcaagaugauaa

SEQ ID NO: 2282813 - RNA, 19 nt, Homo sapiens
  misc_RNA (1)...(19): siRNA sense strand
cagaagaaguggaggagcg

SEQ ID NO: 2282814 - RNA, 19 nt, Homo sapiens
  misc_RNA (1)...(19): siRNA sense strand
cggaguaugucgaggugcu

SEQ ID NO: 2282815 - RNA, 19 nt, Homo sapiens
  misc_RNA (1)...(19): siRNA sense strand
gguugcuggaguuguguaa

SEQ ID NO: 2282816 - RNA, 19 nt, Homo sapiens
  misc_RNA (1)...(19): siRNA sense strand
cugaggagccaauggaagu

SEQ ID NO: 2282817 - RNA, 19 nt, Homo sapiens
  misc_RNA (1)...(19): siRNA sense strand
ccuauuauccagcaggaca

SEQ ID NO: 2282818 - RNA, 19 nt, Homo sapiens
  misc_RNA (1)...(19): siRNA sense strand
ccgaauucgucguaugucu

SEQ ID NO: 2282819 - RNA, 19 nt, Homo sapiens
  misc_RNA (1)...(19): siRNA sense strand
caauggaaguucagggagc

SEQ ID NO: 2282820 - RNA, 19 nt, Homo sapiens
  misc_RNA (1)...(19): siRNA sense strand
guucaugaccggaaugcca

SEQ ID NO: 2282821 - RNA, 19 nt, Homo sapiens
  misc_RNA (1)...(19): siRNA sense strand
gccaagagacgcaagacga

SEQ ID NO: 2282822 - RNA, 19 nt, Homo sapiens
  misc_RNA (1)...(19): siRNA sense strand
ccgacgacauggagccgaa

SEQ ID NO: 2282823 - RNA, 19 nt, Homo sapiens
  misc_RNA (1)...(19): siRNA sense strand
aaacauagguaccaggucu

SEQ ID NO: 2282824 - RNA, 19 nt, Homo sapiens
  misc_RNA (1)...(19): siRNA sense strand
uggcagaaacggaacggaa

SEQ ID NO: 2282825 - RNA, 19 nt, Homo sapiens
  misc_RNA (1)...(19): siRNA sense strand
ccacguacgcagggagcaa

SEQ ID NO: 2282826 - RNA, 19 nt, Homo sapiens
  misc_RNA (1)...(19): siRNA sense strand
gggaaggagaucagaccca

SEQ ID NO: 2282827 - RNA, 19 nt, Homo sapiens
  misc_RNA (1)...(19): siRNA sense strand
gcaaauacgcggagcugcu

SEQ ID NO: 2282828 - RNA, 19 nt, Homo sapiens
  misc_RNA (1)...(19): siRNA sense strand
gcagggagcaagagugcca

SEQ ID NO: 2282829 - RNA, 19 nt, Homo sapiens
  misc_RNA (1)...(19): siRNA sense strand
ccuuagagauggagcaaga

SEQ ID NO: 2282830 - RNA, 19 nt, Homo sapiens
  misc_RNA (1)...(19): siRNA sense strand
acaaaugacaaauggguua

SEQ ID NO: 2282831 - RNA, 19 nt, Homo sapiens
  misc_RNA (1)...(19): siRNA sense strand
guggagauggugagagaaa

SEQ ID NO: 2282832 - RNA, 19 nt, Homo sapiens
  misc_RNA (1)...(19): siRNA sense strand
gagagaaaucgcugguaua

SEQ ID NO: 2282833 - RNA, 19 nt, Homo sapiens
  misc_RNA (1)...(19): siRNA sense strand
gagcacagcaagagagaga

SEQ ID NO: 2282834 - RNA, 19 nt, Homo sapiens
  misc_RNA (1)...(19): siRNA sense strand
gggucgugauucagaguaa

SEQ ID NO: 2282835 - RNA, 19 nt, Homo sapiens
  misc_RNA (1)...(19): siRNA sense strand
gggaugagaagcaggacaa

SEQ ID NO: 2282836 - RNA, 19 nt, Homo sapiens
  misc_RNA (1)...(19): siRNA sense strand
ccaaaggaaugguggagau

SEQ ID NO: 2282837 - RNA, 19 nt, Homo sapiens
  misc_RNA (1)...(19): siRNA sense strand
cagaauggauacagcagaa

SEQ ID NO: 2282838 - RNA, 19 nt, Homo sapiens
  misc_RNA (1)...(19): siRNA sense strand
ugacaaagacaguguuaau

SEQ ID NO: 2282839 - RNA, 19 nt, Homo sapiens
  misc_RNA (1)...(19): siRNA sense strand
ccucaaugcucuuaaaaua

SEQ ID NO: 2282840 - RNA, 19 nt, Homo sapiens
  misc_RNA (1)...(19): siRNA sense strand
cugcaguaauucagaggaa

SEQ ID NO: 2282841 - RNA, 19 nt, Homo sapiens
  misc_RNA (1)...(19): siRNA sense strand
aggcacagguagugaugua

SEQ ID NO: 2282842 - RNA, 19 nt, Homo sapiens
  misc_RNA (1)...(19): siRNA sense strand
cuauacaacuaaagcgauu

SEQ ID NO: 2282843 - RNA, 19 nt, Homo sapiens
  misc_RNA (1)...(19): siRNA sense strand
uauuaaaccauuugggcaa

SEQ ID NO: 2282844 - RNA, 19 nt, Homo sapiens
  misc_RNA (1)...(19): siRNA sense strand
acgaauggcagaauggaua

SEQ ID NO: 2282845 - RNA, 19 nt, Homo sapiens
  misc_RNA (1)...(19): siRNA sense strand
gguggauaguuuagaugaa

SEQ ID NO: 2282846 - RNA, 19 nt, Homo sapiens
  misc_RNA (1)...(19): siRNA sense strand
auguaaacccagagaguca

SEQ ID NO: 2282847 - RNA, 19 nt, Homo sapiens
  misc_RNA (1)...(19): siRNA sense strand
ucacauagugcuaggauga

SEQ ID NO: 2282848 - RNA, 19 nt, Homo sapiens
  misc_RNA (1)...(19): siRNA sense strand
aagcaaagaaugaagccaa

SEQ ID NO: 2282849 - RNA, 19 nt, Homo sapiens
  misc_RNA (1)...(19): siRNA sense strand
aggaaaacuaguagcaaaa

SEQ ID NO: 2282850 - RNA, 19 nt, Homo sapiens
  misc_RNA (1)...(19): siRNA sense strand
agccaaacuuacacagaua

SEQ ID NO: 2282851 - RNA, 19 nt, Homo sapiens
  misc_RNA (1)...(19): siRNA sense strand
ugguggagauggugagaga

SEQ ID NO: 2282852 - RNA, 19 nt, Homo sapiens
  misc_RNA (1)...(19): siRNA sense strand
uaugagaaauggagagcuu

SEQ ID NO: 2282853 - RNA, 19 nt, Homo sapiens
  misc_RNA (1)...(19): siRNA sense strand
acguacaauucaugcauaa

SEQ ID NO: 2282854 - RNA, 19 nt, Homo sapiens
  misc_RNA (1)...(19): siRNA sense strand
cuguuugccuggagugaua

SEQ ID NO: 2282855 - RNA, 19 nt, Homo sapiens
  misc_RNA (1)...(19): siRNA sense strand
gaauuagggaugauguuaa

SEQ ID NO: 2282856 - RNA, 19 nt, Homo sapiens
  misc_RNA (1)...(19): siRNA sense strand
cuacaggauuucacacaaa

SEQ ID NO: 2282857 - RNA, 19 nt, Homo sapiens
  misc_RNA (1)...(19): siRNA sense strand
uuaugaaggcagugaagaa

SEQ ID NO: 2282858 - RNA, 19 nt, Homo sapiens
  misc_RNA (1)...(19): siRNA sense strand
cuuagaugcucuuaguaaa

SEQ ID NO: 2282859 - RNA, 19 nt, Homo sapiens
  misc_RNA (1)...(19): siRNA sense strand
guagauucuuugacugaaa

SEQ ID NO: 2282860 - RNA, 19 nt, Homo sapiens
  misc_RNA (1)...(19): siRNA sense strand
ggaugauguauuuggauau

SEQ ID NO: 2282861 - RNA, 19 nt, Homo sapiens
  misc_RNA (1)...(19): siRNA sense strand
ccucuuuacuacaggauuu

SEQ ID NO: 2282862 - RNA, 19 nt, Homo sapiens
  misc_RNA (1)...(19): siRNA sense strand
gaauuuagcuucaaggguu

SEQ ID NO: 2282863 - RNA, 19 nt, Homo sapiens
  misc_RNA (1)...(19): siRNA sense strand
auggaaagcaugagacuau

SEQ ID NO: 2282864 - RNA, 19 nt, Homo sapiens
  misc_RNA (1)...(19): siRNA sense strand
cagaaaaggugguggaaug

SEQ ID NO: 2282865 - RNA, 19 nt, Homo sapiens
  misc_RNA (1)...(19): siRNA sense strand
agcaaagaaugaagccaaa

SEQ ID NO: 2282866 - RNA, 19 nt, Homo sapiens
  misc_RNA (1)...(19): siRNA sense strand
ccuuagaugcucuuaguaa

SEQ ID NO: 2282867 - RNA, 19 nt, Homo sapiens
  misc_RNA (1)...(19): siRNA sense strand
gaacaggagaaacggguau

SEQ ID NO: 2282868 - RNA, 19 nt, Homo sapiens
  misc_RNA (1)...(19): siRNA sense strand
gggcaauggagaucuuaaa

SEQ ID NO: 2282869 - RNA, 19 nt, Homo sapiens
  misc_RNA (1)...(19): siRNA sense strand
cuuaaauccucauugcaaa

SEQ ID NO: 2282870 - RNA, 19 nt, Homo sapiens
  misc_RNA (1)...(19): siRNA sense strand
aaggaaaacuaguagcaaa

SEQ ID NO: 2282871 - RNA, 19 nt, Homo sapiens
  misc_RNA (1)...(19): siRNA sense strand
cggacaaaugcgaguaaaa

SEQ ID NO: 2282872 - RNA, 19 nt, Homo sapiens
  misc_RNA (1)...(19): siRNA sense strand
ccgaaugcagauauggaaa

SEQ ID NO: 2282873 - RNA, 19 nt, Homo sapiens
  misc_RNA (1)...(19): siRNA sense strand
auucauugguggauaguuu

SEQ ID NO: 2282874 - RNA, 19 nt, Homo sapiens
  misc_RNA (1)...(19): siRNA sense strand
cauaaugcacugaaaggaa

SEQ ID NO: 2282875 - RNA, 19 nt, Homo sapiens
  misc_RNA (1)...(19): siRNA sense strand
cuugaaaagugguggccua

SEQ ID NO: 2282876 - RNA, 19 nt, Homo sapiens
  misc_RNA (1)...(19): siRNA sense strand
cugaugaggcuucaagaua

SEQ ID NO: 2282877 - RNA, 19 nt, Homo sapiens
  misc_RNA (1)...(19): siRNA sense strand
acagcaagagagagagcua

SEQ ID NO: 2282878 - RNA, 19 nt, Homo sapiens
  misc_RNA (1)...(19): siRNA sense strand
guggagaguacaugggaga

SEQ ID NO: 2282879 - RNA, 19 nt, Homo sapiens
  misc_RNA (1)...(19): siRNA sense strand
caauagaccaagaugauga

SEQ ID NO: 2282880 - RNA, 19 nt, Homo sapiens
  misc_RNA (1)...(19): siRNA sense strand
accaaauccugcagggcaa

SEQ ID NO: 2282881 - RNA, 19 nt, Homo sapiens
  misc_RNA (1)...(19): siRNA sense strand
agcaagagagagagcuaaa

SEQ ID NO: 2282882 - RNA, 19 nt, Homo sapiens
  misc_RNA (1)...(19): siRNA sense strand
gaggaaucucaaacaaaua

SEQ ID NO: 2282883 - RNA, 19 nt, Homo sapiens
  misc_RNA (1)...(19): siRNA sense strand
gcucguacacaguggucaa

SEQ ID NO: 2282884 - RNA, 19 nt, Homo sapiens
  misc_RNA (1)...(19): siRNA sense strand
ucaaauaauugcagcccuu

SEQ ID NO: 2282885 - RNA, 19 nt, Homo sapiens
  misc_RNA (1)...(19): siRNA sense strand
gguuauucccgcacugaaa

SEQ ID NO: 2282886 - RNA, 19 nt, Homo sapiens
  misc_RNA (1)...(19): siRNA sense strand
ccaaguuacccaugaucaa

SEQ ID NO: 2282887 - RNA, 19 nt, Homo sapiens
  misc_RNA (1)...(19): siRNA sense strand
ugaagauaaaccagcauua

SEQ ID NO: 2282888 - RNA, 19 nt, Homo sapiens
  misc_RNA (1)...(19): siRNA sense strand
uggaaacaguucaggcuuu

SEQ ID NO: 2282889 - RNA, 19 nt, Homo sapiens
  misc_RNA (1)...(19): siRNA sense strand
agggaaacaugaagccauu

SEQ ID NO: 2282890 - RNA, 19 nt, Homo sapiens
  misc_RNA (1)...(19): siRNA sense strand
uaucaugaggaaagaacaa

SEQ ID NO: 2282891 - RNA, 19 nt, Homo sapiens
  misc_RNA (1)...(19): siRNA sense strand
guuaaaagaacaggagaaa

SEQ ID NO: 2282892 - RNA, 19 nt, Homo sapiens
  misc_RNA (1)...(19): siRNA sense strand
gguaugaugcauuguguau

SEQ ID NO: 2282893 - RNA, 19 nt, Homo sapiens
  misc_RNA (1)...(19): siRNA sense strand
cuuacaggaucuugauaau

SEQ ID NO: 2282894 - RNA, 19 nt, Homo sapiens
  misc_RNA (1)...(19): siRNA sense strand
gagaaguguuugaucacau

SEQ ID NO: 2282895 - RNA, 19 nt, Homo sapiens
  misc_RNA (1)...(19): siRNA sense strand
ccuuagagauggagcaaga

SEQ ID NO: 2282896 - RNA, 19 nt, Homo sapiens
  misc_RNA (1)...(19): siRNA sense strand
acaaaugacaaauggguua

SEQ ID NO: 2282897 - RNA, 19 nt, Homo sapiens
  misc_RNA (1)...(19): siRNA sense strand
guggagauggugagagaaa

SEQ ID NO: 2282898 - RNA, 19 nt, Homo sapiens
  misc_RNA (1)...(19): siRNA sense strand
gagagaaaucgcugguaua

SEQ ID NO: 2282899 - RNA, 19 nt, Homo sapiens
  misc_RNA (1)...(19): siRNA sense strand
gagcacagcaagagagaga

SEQ ID NO: 2282900 - RNA, 19 nt, Homo sapiens
  misc_RNA (1)...(19): siRNA sense strand
gggucgugauucagaguaa

SEQ ID NO: 2282901 - RNA, 19 nt, Homo sapiens
  misc_RNA (1)...(19): siRNA sense strand
gggaugagaagcaggacaa

SEQ ID NO: 2282902 - RNA, 19 nt, Homo sapiens
  misc_RNA (1)...(19): siRNA sense strand
ccaaaggaaugguggagau

SEQ ID NO: 2282903 - RNA, 19 nt, Homo sapiens
  misc_RNA (1)...(19): siRNA sense strand
cagaauggauacagcagaa

SEQ ID NO: 2282904 - RNA, 19 nt, Homo sapiens
  misc_RNA (1)...(19): siRNA sense strand
ugacaaagacaguguuaau

SEQ ID NO: 2282905 - RNA, 19 nt, Homo sapiens
  misc_RNA (1)...(19): siRNA sense strand
ccucaaugcucuuaaaaua

SEQ ID NO: 2282906 - RNA, 19 nt, Homo sapiens
  misc_RNA (1)...(19): siRNA sense strand
cugcaguaauucagaggaa

SEQ ID NO: 2282907 - RNA, 19 nt, Homo sapiens
  misc_RNA (1)...(19): siRNA sense strand
aggcacagguagugaugua

SEQ ID NO: 2282908 - RNA, 19 nt, Homo sapiens
  misc_RNA (1)...(19): siRNA sense strand
cuauacaacuaaagcgauu

SEQ ID NO: 2282909 - RNA, 19 nt, Homo sapiens
  misc_RNA (1)...(19): siRNA sense strand
uauuaaaccauuugggcaa

SEQ ID NO: 2282910 - RNA, 19 nt, Homo sapiens
  misc_RNA (1)...(19): siRNA sense strand
acgaauggcagaauggaua

SEQ ID NO: 2282911 - RNA, 19 nt, Homo sapiens
  misc_RNA (1)...(19): siRNA sense strand
gguggauaguuuagaugaa

SEQ ID NO: 2282912 - RNA, 19 nt, Homo sapiens
  misc_RNA (1)...(19): siRNA sense strand
auguaaacccagagaguca

SEQ ID NO: 2282913 - RNA, 19 nt, Homo sapiens
  misc_RNA (1)...(19): siRNA sense strand
ucacauagugcuaggauga

SEQ ID NO: 2282914 - RNA, 19 nt, Homo sapiens
  misc_RNA (1)...(19): siRNA sense strand
aagcaaagaaugaagccaa

SEQ ID NO: 2282915 - RNA, 19 nt, Homo sapiens
  misc_RNA (1)...(19): siRNA sense strand
aggaaaacuaguagcaaaa

SEQ ID NO: 2282916 - RNA, 19 nt, Homo sapiens
  misc_RNA (1)...(19): siRNA sense strand
agccaaacuuacacagaua

SEQ ID NO: 2282917 - RNA, 19 nt, Homo sapiens
  misc_RNA (1)...(19): siRNA sense strand
ugguggagauggugagaga

SEQ ID NO: 2282918 - RNA, 19 nt, Homo sapiens
  misc_RNA (1)...(19): siRNA sense strand
uaugagaaauggagagcuu

SEQ ID NO: 2282919 - RNA, 19 nt, Homo sapiens
  misc_RNA (1)...(19): siRNA sense strand
acguacaauucaugcauaa

SEQ ID NO: 2282920 - RNA, 19 nt, Homo sapiens
  misc_RNA (1)...(19): siRNA sense strand
cuguuugccuggagugaua

SEQ ID NO: 2282921 - RNA, 19 nt, Homo sapiens
  misc_RNA (1)...(19): siRNA sense strand
gaauuagggaugauguuaa

SEQ ID NO: 2282922 - RNA, 19 nt, Homo sapiens
  misc_RNA (1)...(19): siRNA sense strand
cuacaggauuucacacaaa

SEQ ID NO: 2282923 - RNA, 19 nt, Homo sapiens
  misc_RNA (1)...(19): siRNA sense strand
uuaugaaggcagugaagaa

SEQ ID NO: 2282924 - RNA, 19 nt, Homo sapiens
  misc_RNA (1)...(19): siRNA sense strand
cuuagaugcucuuaguaaa

SEQ ID NO: 2282925 - RNA, 19 nt, Homo sapiens
  misc_RNA (1)...(19): siRNA sense strand
guagauucuuugacugaaa

SEQ ID NO: 2282926 - RNA, 19 nt, Homo sapiens
  misc_RNA (1)...(19): siRNA sense strand
ggaugauguauuuggauau

SEQ ID NO: 2282927 - RNA, 19 nt, Homo sapiens
  misc_RNA (1)...(19): siRNA sense strand
ccucuuuacuacaggauuu

SEQ ID NO: 2282928 - RNA, 19 nt, Homo sapiens
  misc_RNA (1)...(19): siRNA sense strand
gaauuuagcuucaaggguu

SEQ ID NO: 2282929 - RNA, 19 nt, Homo sapiens
  misc_RNA (1)...(19): siRNA sense strand
auggaaagcaugagacuau

SEQ ID NO: 2282930 - RNA, 19 nt, Homo sapiens
  misc_RNA (1)...(19): siRNA sense strand
cagaaaaggugguggaaug

SEQ ID NO: 2282931 - RNA, 19 nt, Homo sapiens
  misc_RNA (1)...(19): siRNA sense strand
agcaaagaaugaagccaaa

SEQ ID NO: 2282932 - RNA, 19 nt, Homo sapiens
  misc_RNA (1)...(19): siRNA sense strand
ccuuagaugcucuuaguaa

SEQ ID NO: 2282933 - RNA, 19 nt, Homo sapiens
  misc_RNA (1)...(19): siRNA sense strand
gaacaggagaaacggguau

SEQ ID NO: 2282934 - RNA, 19 nt, Homo sapiens
  misc_RNA (1)...(19): siRNA sense strand
gggcaauggagaucuuaaa

SEQ ID NO: 2282935 - RNA, 19 nt, Homo sapiens
  misc_RNA (1)...(19): siRNA sense strand
cuuaaauccucauugcaaa

SEQ ID NO: 2282936 - RNA, 19 nt, Homo sapiens
  misc_RNA (1)...(19): siRNA sense strand
aaggaaaacuaguagcaaa

SEQ ID NO: 2282937 - RNA, 19 nt, Homo sapiens
  misc_RNA (1)...(19): siRNA sense strand
cggacaaaugcgaguaaaa

SEQ ID NO: 2282938 - RNA, 19 nt, Homo sapiens
  misc_RNA (1)...(19): siRNA sense strand
ccgaaugcagauauggaaa

SEQ ID NO: 2282939 - RNA, 19 nt, Homo sapiens
  misc_RNA (1)...(19): siRNA sense strand
auucauugguggauaguuu

SEQ ID NO: 2282940 - RNA, 19 nt, Homo sapiens
  misc_RNA (1)...(19): siRNA sense strand
cauaaugcacugaaaggaa

SEQ ID NO: 2282941 - RNA, 19 nt, Homo sapiens
  misc_RNA (1)...(19): siRNA sense strand
cuugaaaagugguggccua

SEQ ID NO: 2282942 - RNA, 19 nt, Homo sapiens
  misc_RNA (1)...(19): siRNA sense strand
cugaugaggcuucaagaua

SEQ ID NO: 2282943 - RNA, 19 nt, Homo sapiens
  misc_RNA (1)...(19): siRNA sense strand
acagcaagagagagagcua

SEQ ID NO: 2282944 - RNA, 19 nt, Homo sapiens
  misc_RNA (1)...(19): siRNA sense strand
guggagaguacaugggaga

SEQ ID NO: 2282945 - RNA, 19 nt, Homo sapiens
  misc_RNA (1)...(19): siRNA sense strand
caauagaccaagaugauga

SEQ ID NO: 2282946 - RNA, 19 nt, Homo sapiens
  misc_RNA (1)...(19): siRNA sense strand
accaaauccugcagggcaa

SEQ ID NO: 2282947 - RNA, 19 nt, Homo sapiens
  misc_RNA (1)...(19): siRNA sense strand
agcaagagagagagcuaaa

SEQ ID NO: 2282948 - RNA, 19 nt, Homo sapiens
  misc_RNA (1)...(19): siRNA sense strand
gaggaaucucaaacaaaua

SEQ ID NO: 2282949 - RNA, 19 nt, Homo sapiens
  misc_RNA (1)...(19): siRNA sense strand
gcucguacacaguggucaa

SEQ ID NO: 2282950 - RNA, 19 nt, Homo sapiens
  misc_RNA (1)...(19): siRNA sense strand
ucaaauaauugcagcccuu

SEQ ID NO: 2282951 - RNA, 19 nt, Homo sapiens
  misc_RNA (1)...(19): siRNA sense strand
gguuauucccgcacugaaa

SEQ ID NO: 2282952 - RNA, 19 nt, Homo sapiens
  misc_RNA (1)...(19): siRNA sense strand
ccaaguuacccaugaucaa

SEQ ID NO: 2282953 - RNA, 19 nt, Homo sapiens
  misc_RNA (1)...(19): siRNA sense strand
ugaagauaaaccagcauua

SEQ ID NO: 2282954 - RNA, 19 nt, Homo sapiens
  misc_RNA (1)...(19): siRNA sense strand
uggaaacaguucaggcuuu

SEQ ID NO: 2282955 - RNA, 19 nt, Homo sapiens
  misc_RNA (1)...(19): siRNA sense strand
agggaaacaugaagccauu

SEQ ID NO: 2282956 - RNA, 19 nt, Homo sapiens
  misc_RNA (1)...(19): siRNA sense strand
uaucaugaggaaagaacaa

SEQ ID NO: 2282957 - RNA, 19 nt, Homo sapiens
  misc_RNA (1)...(19): siRNA sense strand
guuaaaagaacaggagaaa

SEQ ID NO: 2282958 - RNA, 19 nt, Homo sapiens
  misc_RNA (1)...(19): siRNA sense strand
gguaugaugcauuguguau

SEQ ID NO: 2282959 - RNA, 19 nt, Homo sapiens
  misc_RNA (1)...(19): siRNA sense strand
cuuacaggaucuugauaau

SEQ ID NO: 2282960 - RNA, 19 nt, Homo sapiens
  misc_RNA (1)...(19): siRNA sense strand
gagaaguguuugaucacau

SEQ ID NO: 2282961 - RNA, 19 nt, Homo sapiens
  misc_RNA (1)...(19): siRNA sense strand
ggguagaaacguugagaau

SEQ ID NO: 2282962 - RNA, 19 nt, Homo sapiens
  misc_RNA (1)...(19): siRNA sense strand
uggcuaaggauaaggauaa

SEQ ID NO: 2282963 - RNA, 19 nt, Homo sapiens
  misc_RNA (1)...(19): siRNA sense strand
uggaacagguggaggccua

SEQ ID NO: 2282964 - RNA, 19 nt, Homo sapiens
  misc_RNA (1)...(19): siRNA sense strand
agaaggagaaggaggguau

SEQ ID NO: 2282965 - RNA, 19 nt, Homo sapiens
  misc_RNA (1)...(19): siRNA sense strand
agccauaauucgugagaca

SEQ ID NO: 2282966 - RNA, 19 nt, Homo sapiens
  misc_RNA (1)...(19): siRNA sense strand
cguuugacaaugagguaaa

SEQ ID NO: 2282967 - RNA, 19 nt, Homo sapiens
  misc_RNA (1)...(19): siRNA sense strand
guaucuuggcggaguguaa

SEQ ID NO: 2282968 - RNA, 19 nt, Homo sapiens
  misc_RNA (1)...(19): siRNA sense strand
caucaagggagucggacaa

SEQ ID NO: 2282969 - RNA, 19 nt, Homo sapiens
  misc_RNA (1)...(19): siRNA sense strand
cugcuagccuggugggaau

SEQ ID NO: 2282970 - RNA, 19 nt, Homo sapiens
  misc_RNA (1)...(19): siRNA sense strand
gcaaaguggaggugggaac

SEQ ID NO: 2282971 - RNA, 19 nt, Homo sapiens
  misc_RNA (1)...(19): siRNA sense strand
cagcagagcauuuggagga

SEQ ID NO: 2282972 - RNA, 19 nt, Homo sapiens
  misc_RNA (1)...(19): siRNA sense strand
gccaacagcuacaggccaa

SEQ ID NO: 2282973 - RNA, 19 nt, Homo sapiens
  misc_RNA (1)...(19): siRNA sense strand
caugcaacuucgaaagaau

SEQ ID NO: 2282974 - RNA, 19 nt, Homo sapiens
  misc_RNA (1)...(19): siRNA sense strand
ucacggaggcugagcgaga

SEQ ID NO: 2282975 - RNA, 19 nt, Homo sapiens
  misc_RNA (1)...(19): siRNA sense strand
ccauaauucgugagacaga

SEQ ID NO: 2282976 - RNA, 19 nt, Homo sapiens
  misc_RNA (1)...(19): siRNA sense strand
gggccgagaagaagaacau

SEQ ID NO: 2282977 - RNA, 19 nt, Homo sapiens
  misc_RNA (1)...(19): siRNA sense strand
ggugagcagcauugaggaa

SEQ ID NO: 2282978 - RNA, 19 nt, Homo sapiens
  misc_RNA (1)...(19): siRNA sense strand
uagcaguagcugugcacaa

SEQ ID NO: 2282979 - RNA, 19 nt, Homo sapiens
  misc_RNA (1)...(19): siRNA sense strand
uaaaugaacuggaggccca

SEQ ID NO: 2282980 - RNA, 19 nt, Homo sapiens
  misc_RNA (1)...(19): siRNA sense strand
agacgugacaguugaauau

SEQ ID NO: 2282981 - RNA, 19 nt, Homo sapiens
  misc_RNA (1)...(19): siRNA sense strand
gagaaagcagaccgugaaa

SEQ ID NO: 2282982 - RNA, 19 nt, Homo sapiens
  misc_RNA (1)...(19): siRNA sense strand
cuagagugaaauugaacua

SEQ ID NO: 2282983 - RNA, 19 nt, Homo sapiens
  misc_RNA (1)...(19): siRNA sense strand
gagcuaaagaaguuacaga

SEQ ID NO: 2282984 - RNA, 19 nt, Homo sapiens
  misc_RNA (1)...(19): siRNA sense strand
agaagcauccagagcuaaa

SEQ ID NO: 2282985 - RNA, 19 nt, Homo sapiens
  misc_RNA (1)...(19): siRNA sense strand
cguccaaaggcuaaaugaa

SEQ ID NO: 2282986 - RNA, 19 nt, Homo sapiens
  misc_RNA (1)...(19): siRNA sense strand
aggaggacauugagaagca

SEQ ID NO: 2282987 - RNA, 19 nt, Homo sapiens
  misc_RNA (1)...(19): siRNA sense strand
agaauuuggcaguggcuuu

SEQ ID NO: 2282988 - RNA, 19 nt, Homo sapiens
  misc_RNA (1)...(19): siRNA sense strand
aggagaaagcagaccguga

SEQ ID NO: 2282989 - RNA, 19 nt, Homo sapiens
  misc_RNA (1)...(19): siRNA sense strand
agaacauggcuccaggaaa

SEQ ID NO: 2282990 - RNA, 19 nt, Homo sapiens
  misc_RNA (1)...(19): siRNA sense strand
cuucaaaguucagcagcua

SEQ ID NO: 2282991 - RNA, 19 nt, Homo sapiens
  misc_RNA (1)...(19): siRNA sense strand
ucaggugggccgagaagaa

SEQ ID NO: 2282992 - RNA, 19 nt, Homo sapiens
  misc_RNA (1)...(19): siRNA sense strand
aguacaguuugcagaguuu

SEQ ID NO: 2282993 - RNA, 19 nt, Homo sapiens
  misc_RNA (1)...(19): siRNA sense strand
aggcugagcgagaggcuuu

SEQ ID NO: 2282994 - RNA, 19 nt, Homo sapiens
  misc_RNA (1)...(19): siRNA sense strand
gcuaugaagccaucugcaa

SEQ ID NO: 2282995 - RNA, 19 nt, Homo sapiens
  misc_RNA (1)...(19): siRNA sense strand
cggugaaggaugagcaaag

SEQ ID NO: 2282996 - RNA, 19 nt, Homo sapiens
  misc_RNA (1)...(19): siRNA sense strand
ggugggaaugggacacaaa

SEQ ID NO: 2282997 - RNA, 19 nt, Homo sapiens
  misc_RNA (1)...(19): siRNA sense strand
ccgagaagaagaacauuau

SEQ ID NO: 2282998 - RNA, 19 nt, Homo sapiens
  misc_RNA (1)...(19): siRNA sense strand
agaacauuaucaggagaaa

SEQ ID NO: 2282999 - RNA, 19 nt, Homo sapiens
  misc_RNA (1)...(19): siRNA sense strand
ccacuacccaccaggcaaa

SEQ ID NO: 2283000 - RNA, 19 nt, Homo sapiens
  misc_RNA (1)...(19): siRNA sense strand
ugagcagcauugaggaaga

SEQ ID NO: 2283001 - RNA, 19 nt, Homo sapiens
  misc_RNA (1)...(19): siRNA sense strand
ccacauuggaagccauaau

SEQ ID NO: 2283002 - RNA, 19 nt, Homo sapiens
  misc_RNA (1)...(19): siRNA sense strand
ggguuguaccagugugaca

SEQ ID NO: 2283003 - RNA, 19 nt, Homo sapiens
  misc_RNA (1)...(19): siRNA sense strand
cagagaaggcaguggcaac

SEQ ID NO: 2283004 - RNA, 19 nt, Homo sapiens
  misc_RNA (1)...(19): siRNA sense strand
acacaaggauucaggcucu

SEQ ID NO: 2283005 - RNA, 19 nt, Homo sapiens
  misc_RNA (1)...(19): siRNA sense strand
cagaggaggacauugagaa

SEQ ID NO: 2283006 - RNA, 19 nt, Homo sapiens
  misc_RNA (1)...(19): siRNA sense strand
cagaacuuguagagaagga

SEQ ID NO: 2283007 - RNA, 19 nt, Homo sapiens
  misc_RNA (1)...(19): siRNA sense strand
caaccaugcaacuucgaaa

SEQ ID NO: 2283008 - RNA, 19 nt, Homo sapiens
  misc_RNA (1)...(19): siRNA sense strand
cgcaauggcuagaugaagu

SEQ ID NO: 2283009 - RNA, 19 nt, Homo sapiens
  misc_RNA (1)...(19): siRNA sense strand
gauugaggaagguggcuau

SEQ ID NO: 2283010 - RNA, 19 nt, Homo sapiens
  misc_RNA (1)...(19): siRNA sense strand
cugcauaaacugaagauuc

SEQ ID NO: 2283011 - RNA, 19 nt, Homo sapiens
  misc_RNA (1)...(19): siRNA sense strand
ggccacgccuagagacaau

SEQ ID NO: 2283012 - RNA, 19 nt, Homo sapiens
  misc_RNA (1)...(19): siRNA sense strand
uaagauugugauugaggaa

SEQ ID NO: 2283013 - RNA, 19 nt, Homo sapiens
  misc_RNA (1)...(19): siRNA sense strand
cuguuacggugaaggauga

SEQ ID NO: 2283014 - RNA, 19 nt, Homo sapiens
  misc_RNA (1)...(19): siRNA sense strand
caacaggagcuucagucaa

SEQ ID NO: 2283015 - RNA, 19 nt, Homo sapiens
  misc_RNA (1)...(19): siRNA sense strand
gaagaacauuaucaggaga

SEQ ID NO: 2283016 - RNA, 19 nt, Homo sapiens
  misc_RNA (1)...(19): siRNA sense strand
auugcaaaauucugggaaa

SEQ ID NO: 2283017 - RNA, 19 nt, Homo sapiens
  misc_RNA (1)...(19): siRNA sense strand
ucauuaugguucaggagga

SEQ ID NO: 2283018 - RNA, 19 nt, Homo sapiens
  misc_RNA (1)...(19): siRNA sense strand
gcucugugauuguggccuu

SEQ ID NO: 2283019 - RNA, 19 nt, Homo sapiens
  misc_RNA (1)...(19): siRNA sense strand
aagaacauuaucaggagaa

SEQ ID NO: 2283020 - RNA, 19 nt, Homo sapiens
  misc_RNA (1)...(19): siRNA sense strand
cuuuaaugccuuugcuaca

SEQ ID NO: 2283021 - RNA, 19 nt, Homo sapiens
  misc_RNA (1)...(19): siRNA sense strand
aggauaaggauaagacugu

SEQ ID NO: 2283022 - RNA, 19 nt, Homo sapiens
  misc_RNA (1)...(19): siRNA sense strand
acaccugagcuguuugaua

SEQ ID NO: 2283023 - RNA, 19 nt, Homo sapiens
  misc_RNA (1)...(19): siRNA sense strand
cagcaagagagaaggguaa

SEQ ID NO: 2283024 - RNA, 19 nt, Homo sapiens
  misc_RNA (1)...(19): siRNA sense strand
acaaaugacaaguggguaa

SEQ ID NO: 2283025 - RNA, 19 nt, Homo sapiens
  misc_RNA (1)...(19): siRNA sense strand
uuuaagaaguggagaacua

SEQ ID NO: 2283026 - RNA, 19 nt, Homo sapiens
  misc_RNA (1)...(19): siRNA sense strand
aggcacagguagugauuua

SEQ ID NO: 2283027 - RNA, 19 nt, Homo sapiens
  misc_RNA (1)...(19): siRNA sense strand
gcaauaagcuggaggugga

SEQ ID NO: 2283028 - RNA, 19 nt, Homo sapiens
  misc_RNA (1)...(19): siRNA sense strand
ccaaauacagauauggaaa

SEQ ID NO: 2283029 - RNA, 19 nt, Homo sapiens
  misc_RNA (1)...(19): siRNA sense strand
ggcaaagaaugaagccaaa

SEQ ID NO: 2283030 - RNA, 19 nt, Homo sapiens
  misc_RNA (1)...(19): siRNA sense strand
aauuagggcuauacagaaa

SEQ ID NO: 2283031 - RNA, 19 nt, Homo sapiens
  misc_RNA (1)...(19): siRNA sense strand
guauuuaagaaguggagaa

SEQ ID NO: 2283032 - RNA, 19 nt, Homo sapiens
  misc_RNA (1)...(19): siRNA sense strand
ggacaagaugagacuauaa

SEQ ID NO: 2283033 - RNA, 19 nt, Homo sapiens
  misc_RNA (1)...(19): siRNA sense strand
cagcauuaauugugcaaga

SEQ ID NO: 2283034 - RNA, 19 nt, Homo sapiens
  misc_RNA (1)...(19): siRNA sense strand
ggguaaauauucaggugau

SEQ ID NO: 2283035 - RNA, 19 nt, Homo sapiens
  misc_RNA (1)...(19): siRNA sense strand
aggcaaagaaugaagccaa

SEQ ID NO: 2283036 - RNA, 19 nt, Homo sapiens
  misc_RNA (1)...(19): siRNA sense strand
cagaauggauacagcaaaa

SEQ ID NO: 2283037 - RNA, 19 nt, Homo sapiens
  misc_RNA (1)...(19): siRNA sense strand
cuugaaaagugguggcuua

SEQ ID NO: 2283038 - RNA, 19 nt, Homo sapiens
  misc_RNA (1)...(19): siRNA sense strand
ccaaguuacucaugaucaa

SEQ ID NO: 2283039 - RNA, 19 nt, Homo sapiens
  misc_RNA (1)...(19): siRNA sense strand
guauaauauugguguccua

SEQ ID NO: 2283040 - RNA, 19 nt, Homo sapiens
  misc_RNA (1)...(19): siRNA sense strand
gcuauugaucuuaguguaa

SEQ ID NO: 2283041 - RNA, 19 nt, Homo sapiens
  misc_RNA (1)...(19): siRNA sense strand
cucaaaaggauuagggaua

SEQ ID NO: 2283042 - RNA, 19 nt, Homo sapiens
  misc_RNA (1)...(19): siRNA sense strand
ggaaauaucuaaugaggcu

SEQ ID NO: 2283043 - RNA, 19 nt, Homo sapiens
  misc_RNA (1)...(19): siRNA sense strand
gguggauaguuuagaugaa

SEQ ID NO: 2283044 - RNA, 19 nt, Homo sapiens
  misc_RNA (1)...(19): siRNA sense strand
uggcaaaccuggaugacau

SEQ ID NO: 2283045 - RNA, 19 nt, Homo sapiens
  misc_RNA (1)...(19): siRNA sense strand
acagaaagcuaauuggaca

SEQ ID NO: 2283046 - RNA, 19 nt, Homo sapiens
  misc_RNA (1)...(19): siRNA sense strand
cagaaagcuaauuggacaa

SEQ ID NO: 2283047 - RNA, 19 nt, Homo sapiens
  misc_RNA (1)...(19): siRNA sense strand
ucacauagugcuaggauga

SEQ ID NO: 2283048 - RNA, 19 nt, Homo sapiens
  misc_RNA (1)...(19): siRNA sense strand
gcaaaguuggcuugggauu

SEQ ID NO: 2283049 - RNA, 19 nt, Homo sapiens
  misc_RNA (1)...(19): siRNA sense strand
gcugauagauucugaaaau

SEQ ID NO: 2283050 - RNA, 19 nt, Homo sapiens
  misc_RNA (1)...(19): siRNA sense strand
ugguaaagaugaucagaca

SEQ ID NO: 2283051 - RNA, 19 nt, Homo sapiens
  misc_RNA (1)...(19): siRNA sense strand
cgacagaagagguggugga

SEQ ID NO: 2283052 - RNA, 19 nt, Homo sapiens
  misc_RNA (1)...(19): siRNA sense strand
agccaaacuuacacaaaua

SEQ ID NO: 2283053 - RNA, 19 nt, Homo sapiens
  misc_RNA (1)...(19): siRNA sense strand
uggaaagggauaauguaaa

SEQ ID NO: 2283054 - RNA, 19 nt, Homo sapiens
  misc_RNA (1)...(19): siRNA sense strand
gaagaugaugagaugauaa

SEQ ID NO: 2283055 - RNA, 19 nt, Homo sapiens
  misc_RNA (1)...(19): siRNA sense strand
ugugauaacuugagcuuga

SEQ ID NO: 2283056 - RNA, 19 nt, Homo sapiens
  misc_RNA (1)...(19): siRNA sense strand
guaaagaugaucagacaga

SEQ ID NO: 2283057 - RNA, 19 nt, Homo sapiens
  misc_RNA (1)...(19): siRNA sense strand
agauagaacagcuguagaa

SEQ ID NO: 2283058 - RNA, 19 nt, Homo sapiens
  misc_RNA (1)...(19): siRNA sense strand
cuggaaagggauaauguaa

SEQ ID NO: 2283059 - RNA, 19 nt, Homo sapiens
  misc_RNA (1)...(19): siRNA sense strand
cuauguacccagaggauuu

SEQ ID NO: 2283060 - RNA, 19 nt, Homo sapiens
  misc_RNA (1)...(19): siRNA sense strand
ccuauaugauggaugauuu

SEQ ID NO: 2283061 - RNA, 19 nt, Homo sapiens
  misc_RNA (1)...(19): siRNA sense strand
aguacaaagcaaugaaaca

SEQ ID NO: 2283062 - RNA, 19 nt, Homo sapiens
  misc_RNA (1)...(19): siRNA sense strand
ucaaauaauugcagcucuu

SEQ ID NO: 2283063 - RNA, 19 nt, Homo sapiens
  misc_RNA (1)...(19): siRNA sense strand
uguagaaaagcuagagaaa

SEQ ID NO: 2283064 - RNA, 19 nt, Homo sapiens
  misc_RNA (1)...(19): siRNA sense strand
gggcagcacaggcaggaaa

SEQ ID NO: 2283065 - RNA, 19 nt, Homo sapiens
  misc_RNA (1)...(19): siRNA sense strand
gcugucaauugucgagaaa

SEQ ID NO: 2283066 - RNA, 19 nt, Homo sapiens
  misc_RNA (1)...(19): siRNA sense strand
uagcccaaaugaagaaaua

SEQ ID NO: 2283067 - RNA, 19 nt, Homo sapiens
  misc_RNA (1)...(19): siRNA sense strand
acaugaugccuuagaguuu

SEQ ID NO: 2283068 - RNA, 19 nt, Homo sapiens
  misc_RNA (1)...(19): siRNA sense strand
caguaaagcgccugcuaau

SEQ ID NO: 2283069 - RNA, 19 nt, Homo sapiens
  misc_RNA (1)...(19): siRNA sense strand
agaaagagcagucugacaa

SEQ ID NO: 2283070 - RNA, 19 nt, Homo sapiens
  misc_RNA (1)...(19): siRNA sense strand
ggauaugauagaugaagau

SEQ ID NO: 2283071 - RNA, 19 nt, Homo sapiens
  misc_RNA (1)...(19): siRNA sense strand
ggaacaagggcaaggugau

SEQ ID NO: 2283072 - RNA, 19 nt, Homo sapiens
  misc_RNA (1)...(19): siRNA sense strand
cugaauuaggcaaguuaua

SEQ ID NO: 2283073 - RNA, 19 nt, Homo sapiens
  misc_RNA (1)...(19): siRNA sense strand
agaagauaggaaagaguau

SEQ ID NO: 2283074 - RNA, 19 nt, Homo sapiens
  misc_RNA (1)...(19): siRNA sense strand
caacuuugaauguggauau

SEQ ID NO: 2283075 - RNA, 19 nt, Homo sapiens
  misc_RNA (1)...(19): siRNA sense strand
guggagaguacaugggaga

SEQ ID NO: 2283076 - RNA, 19 nt, Homo sapiens
  misc_RNA (1)...(19): siRNA sense strand
gccugaagcagaagaaauu

SEQ ID NO: 2283077 - RNA, 19 nt, Homo sapiens
  misc_RNA (1)...(19): siRNA sense strand
agagaugggcuguucgaua

SEQ ID NO: 2283078 - RNA, 19 nt, Homo sapiens
  misc_RNA (1)...(19): siRNA sense strand
cgagcauaucagugcauaa

SEQ ID NO: 2283079 - RNA, 19 nt, Homo sapiens
  misc_RNA (1)...(19): siRNA sense strand
cagcacaucacuugaacaa

SEQ ID NO: 2283080 - RNA, 19 nt, Homo sapiens
  misc_RNA (1)...(19): siRNA sense strand
uucaagaauuucaggacaa

SEQ ID NO: 2283081 - RNA, 19 nt, Homo sapiens
  misc_RNA (1)...(19): siRNA sense strand
gguaaauauucaggugauu

SEQ ID NO: 2283082 - RNA, 19 nt, Homo sapiens
  misc_RNA (1)...(19): siRNA sense strand
uguucgagcuguagcagaa

SEQ ID NO: 2283083 - RNA, 19 nt, Homo sapiens
  misc_RNA (1)...(19): siRNA sense strand
uggaaacaguucaggcuuu

SEQ ID NO: 2283084 - RNA, 19 nt, Homo sapiens
  misc_RNA (1)...(19): siRNA sense strand
caaaauggaugaugaugaa

SEQ ID NO: 2283085 - RNA, 19 nt, Homo sapiens
  misc_RNA (1)...(19): siRNA sense strand
gaaagaucacauagugcua

SEQ ID NO: 2283086 - RNA, 19 nt, Homo sapiens
  misc_RNA (1)...(19): siRNA sense strand
uuaugaaggcaaugaagaa

SEQ ID NO: 2283087 - RNA, 19 nt, Homo sapiens
  misc_RNA (1)...(19): siRNA sense strand
gagcacagcaagagagaag

SEQ ID NO: 2283088 - RNA, 19 nt, Homo sapiens
  misc_RNA (1)...(19): siRNA sense strand
cagacagaucacugguaua

SEQ ID NO: 2283089 - RNA, 19 nt, Homo sapiens
  misc_RNA (1)...(19): siRNA sense strand
agauguaacagaaugcaaa

SEQ ID NO: 2283090 - RNA, 19 nt, Homo sapiens
  misc_RNA (1)...(19): siRNA sense strand
agagcuaacuauugcaaga

SEQ ID NO: 2283091 - RNA, 19 nt, Homo sapiens
  misc_RNA (1)...(19): siRNA sense strand
cauaaugcacuuaaaggaa

SEQ ID NO: 2283092 - RNA, 19 nt, Homo sapiens
  misc_RNA (1)...(19): siRNA sense strand
aaugaggcuucaagauaua

SEQ ID NO: 2283093 - RNA, 19 nt, Homo sapiens
  misc_RNA (1)...(19): siRNA sense strand
gcuuguacacaguggucaa

SEQ ID NO: 2283094 - RNA, 19 nt, Homo sapiens
  misc_RNA (1)...(19): siRNA sense strand
gagaaguauuugaucacau

SEQ ID NO: 2283095 - RNA, 19 nt, Homo sapiens
  misc_RNA (1)...(19): siRNA sense strand
ggaauggcuaggagaugaa

SEQ ID NO: 2283096 - RNA, 19 nt, Homo sapiens
  misc_RNA (1)...(19): siRNA sense strand
agaugaacuugaaagaaga

SEQ ID NO: 2283097 - RNA, 19 nt, Homo sapiens
  misc_RNA (1)...(19): siRNA sense strand
gaacuuuccuggagaggga

SEQ ID NO: 2283098 - RNA, 19 nt, Homo sapiens
  misc_RNA (1)...(19): siRNA sense strand
cagcaguguagauggaauu

SEQ ID NO: 2283099 - RNA, 19 nt, Homo sapiens
  misc_RNA (1)...(19): siRNA sense strand
agucggugauggaggaaaa

SEQ ID NO: 2283100 - RNA, 19 nt, Homo sapiens
  misc_RNA (1)...(19): siRNA sense strand
ggaggaugcugaaggcuca

SEQ ID NO: 2283101 - RNA, 19 nt, Homo sapiens
  misc_RNA (1)...(19): siRNA sense strand
caaagaaacuggcaggugu

SEQ ID NO: 2283102 - RNA, 19 nt, Homo sapiens
  misc_RNA (1)...(19): siRNA sense strand
agaccaaggaggagaucga

SEQ ID NO: 2283103 - RNA, 19 nt, Homo sapiens
  misc_RNA (1)...(19): siRNA sense strand
gggagaaaugcguggauac

SEQ ID NO: 2283104 - RNA, 19 nt, Homo sapiens
  misc_RNA (1)...(19): siRNA sense strand
ucgugugggcaguaagaaa

SEQ ID NO: 2283105 - RNA, 19 nt, Homo sapiens
  misc_RNA (1)...(19): siRNA sense strand
ugggcaaaguggagcggau

SEQ ID NO: 2283106 - RNA, 19 nt, Homo sapiens
  misc_RNA (1)...(19): siRNA sense strand
aggaggagaucgaggcgga

SEQ ID NO: 2283107 - RNA, 19 nt, Homo sapiens
  misc_RNA (1)...(19): siRNA sense strand
aggaagacccgcagacgau

SEQ ID NO: 2283108 - RNA, 19 nt, Homo sapiens
  misc_RNA (1)...(19): siRNA sense strand
cugauauauaccucgaaua

SEQ ID NO: 2283109 - RNA, 19 nt, Homo sapiens
  misc_RNA (1)...(19): siRNA sense strand
ccaccuugaaugaagaaga

SEQ ID NO: 2283110 - RNA, 19 nt, Homo sapiens
  misc_RNA (1)...(19): siRNA sense strand
ugcaauggauucaggcaga

SEQ ID NO: 2283111 - RNA, 19 nt, Homo sapiens
  misc_RNA (1)...(19): siRNA sense strand
cgacgaagcauguccacca

SEQ ID NO: 2283112 - RNA, 19 nt, Homo sapiens
  misc_RNA (1)...(19): siRNA sense strand
ccuuauugggcgaucaaga

SEQ ID NO: 2283113 - RNA, 19 nt, Homo sapiens
  misc_RNA (1)...(19): siRNA sense strand
acagcaguguagauggaau

SEQ ID NO: 2283114 - RNA, 19 nt, Homo sapiens
  misc_RNA (1)...(19): siRNA sense strand
ggagacaggucgcaggaug

SEQ ID NO: 2283115 - RNA, 19 nt, Homo sapiens
  misc_RNA (1)...(19): siRNA sense strand
aggagaucugggaggauga

SEQ ID NO: 2283116 - RNA, 19 nt, Homo sapiens
  misc_RNA (1)...(19): siRNA sense strand
gagacaggucgcaggaugu

SEQ ID NO: 2283117 - RNA, 19 nt, Homo sapiens
  misc_RNA (1)...(19): siRNA sense strand
gggugcaaguggaggagau

SEQ ID NO: 2283118 - RNA, 19 nt, Homo sapiens
  misc_RNA (1)...(19): siRNA sense strand
gggucaucauggagcguau

SEQ ID NO: 2283119 - RNA, 19 nt, Homo sapiens
  misc_RNA (1)...(19): siRNA sense strand
ccaucaacgucuuggcuga

SEQ ID NO: 2283120 - RNA, 19 nt, Homo sapiens
  misc_RNA (1)...(19): siRNA sense strand
gagguagagaagaggaaga

SEQ ID NO: 2283121 - RNA, 19 nt, Homo sapiens
  misc_RNA (1)...(19): siRNA sense strand
aggaugacgaggaggauga

SEQ ID NO: 2283122 - RNA, 19 nt, Homo sapiens
  misc_RNA (1)...(19): siRNA sense strand
ugucagugcugcagcccaa

SEQ ID NO: 2283123 - RNA, 19 nt, Homo sapiens
  misc_RNA (1)...(19): siRNA sense strand
aggaugacuaugaggauga

SEQ ID NO: 2283124 - RNA, 19 nt, Homo sapiens
  misc_RNA (1)...(19): siRNA sense strand
aggagguagagaagaggaa

SEQ ID NO: 2283125 - RNA, 19 nt, Homo sapiens
  misc_RNA (1)...(19): siRNA sense strand
aggaaggcaugcuggccaa

SEQ ID NO: 2283126 - RNA, 19 nt, Homo sapiens
  misc_RNA (1)...(19): siRNA sense strand
cgguucugcugaugggcaa

SEQ ID NO: 2283127 - RNA, 19 nt, Homo sapiens
  misc_RNA (1)...(19): siRNA sense strand
ccaaggagcugcuggcacu

SEQ ID NO: 2283128 - RNA, 19 nt, Homo sapiens
  misc_RNA (1)...(19): siRNA sense strand
gauaagaguaacacagcca

SEQ ID NO: 2283129 - RNA, 19 nt, Homo sapiens
  misc_RNA (1)...(19): siRNA sense strand
agguauaaggggaagggaa

SEQ ID NO: 2283130 - RNA, 19 nt, Homo sapiens
  misc_RNA (1)...(19): siRNA sense strand
ccuacaaggccaagcgcca

SEQ ID NO: 2283131 - RNA, 19 nt, Homo sapiens
  misc_RNA (1)...(19): siRNA sense strand
ugaaguguguggaggcuga

SEQ ID NO: 2283132 - RNA, 19 nt, Homo sapiens
  misc_RNA (1)...(19): siRNA sense strand
aggaggaugacgugcagaa

SEQ ID NO: 2283133 - RNA, 19 nt, Homo sapiens
  misc_RNA (1)...(19): siRNA sense strand
uggccaaccuaguggagca

SEQ ID NO: 2283134 - RNA, 19 nt, Homo sapiens
  misc_RNA (1)...(19): siRNA sense strand
cugcaugugcugaagguga

SEQ ID NO: 2283135 - RNA, 19 nt, Homo sapiens
  misc_RNA (1)...(19): siRNA sense strand
ccagcagcccaguggagaa

SEQ ID NO: 2283136 - RNA, 19 nt, Homo sapiens
  misc_RNA (1)...(19): siRNA sense strand
ugcaaguggaggagaucua

SEQ ID NO: 2283137 - RNA, 19 nt, Homo sapiens
  misc_RNA (1)...(19): siRNA sense strand
ccaugcaggaggaagaaga

SEQ ID NO: 2283138 - RNA, 19 nt, Homo sapiens
  misc_RNA (1)...(19): siRNA sense strand
agaaggaggucguggaagc

SEQ ID NO: 2283139 - RNA, 19 nt, Homo sapiens
  misc_RNA (1)...(19): siRNA sense strand
aguccaagucagccagcaa

SEQ ID NO: 2283140 - RNA, 19 nt, Homo sapiens
  misc_RNA (1)...(19): siRNA sense strand
gcuucaaccugauggcagu

SEQ ID NO: 2283141 - RNA, 19 nt, Homo sapiens
  misc_RNA (1)...(19): siRNA sense strand
ccuugaguggggagaaaua

SEQ ID NO: 2283142 - RNA, 19 nt, Homo sapiens
  misc_RNA (1)...(19): siRNA sense strand
agguagagaagaggaagaa

SEQ ID NO: 2283143 - RNA, 19 nt, Homo sapiens
  misc_RNA (1)...(19): siRNA sense strand
aaggauaugcgauuggcaa

SEQ ID NO: 2283144 - RNA, 19 nt, Homo sapiens
  misc_RNA (1)...(19): siRNA sense strand
gggagaaauacucacccaa

SEQ ID NO: 2283145 - RNA, 19 nt, Homo sapiens
  misc_RNA (1)...(19): siRNA sense strand
gagaagacggggaugguga

SEQ ID NO: 2283146 - RNA, 19 nt, Homo sapiens
  misc_RNA (1)...(19): siRNA sense strand
cccugagagcaaaggauau

SEQ ID NO: 2283147 - RNA, 19 nt, Homo sapiens
  misc_RNA (1)...(19): siRNA sense strand
gcagcugauaagaguaaca

SEQ ID NO: 2283148 - RNA, 19 nt, Homo sapiens
  misc_RNA (1)...(19): siRNA sense strand
aggacuucaccaaggguuu

SEQ ID NO: 2283149 - RNA, 19 nt, Homo sapiens
  misc_RNA (1)...(19): siRNA sense strand
gguauaaggggaagggaac

SEQ ID NO: 2283150 - RNA, 19 nt, Homo sapiens
  misc_RNA (1)...(19): siRNA sense strand
uuaugaagcucgugggcau

SEQ ID NO: 2283151 - RNA, 19 nt, Homo sapiens
  misc_RNA (1)...(19): siRNA sense strand
ggaugaagcugguguccca

SEQ ID NO: 2283152 - RNA, 19 nt, Homo sapiens
  misc_RNA (1)...(19): siRNA sense strand
gcuaucugcugaagcgcaa

SEQ ID NO: 2283153 - RNA, 19 nt, Homo sapiens
  misc_RNA (1)...(19): siRNA sense strand
acugggacauggugggcaa

SEQ ID NO: 2283154 - RNA, 19 nt, Homo sapiens
  misc_RNA (1)...(19): siRNA sense strand
gaggauucuaacauggaua

SEQ ID NO: 2283155 - RNA, 19 nt, Homo sapiens
  misc_RNA (1)...(19): siRNA sense strand
gggaugaagugcuggagcu

SEQ ID NO: 2283156 - RNA, 19 nt, Homo sapiens
  misc_RNA (1)...(19): siRNA sense strand
agugcaagaaugugaauga

SEQ ID NO: 2283157 - RNA, 19 nt, Homo sapiens
  misc_RNA (1)...(19): siRNA sense strand
uagugaaaguggacgacga

SEQ ID NO: 2283158 - RNA, 19 nt, Homo sapiens
  misc_RNA (1)...(19): siRNA sense strand
ggauacaacucuggaggca

SEQ ID NO: 2283159 - RNA, 19 nt, Homo sapiens
  misc_RNA (1)...(19): siRNA sense strand
agaaugugaaugagcucaa

SEQ ID NO: 2283160 - RNA, 19 nt, Homo sapiens
  misc_RNA (1)...(19): siRNA sense strand
gagaagaaguacauggagc

SEQ ID NO: 2283161 - RNA, 19 nt, Homo sapiens
  misc_RNA (1)...(19): siRNA sense strand
agaaguacauggagcugga

SEQ ID NO: 2283162 - RNA, 19 nt, Homo sapiens
  misc_RNA (1)...(19): siRNA sense strand
cgagaaggcuaucugcuga

SEQ ID NO: 2283163 - RNA, 19 nt, Homo sapiens
  misc_RNA (1)...(19): siRNA sense strand
ggcugaaauuacuggagga

SEQ ID NO: 2283164 - RNA, 19 nt, Homo sapiens
  misc_RNA (1)...(19): siRNA sense strand
acgacgacaucaucggcaa

SEQ ID NO: 2283165 - RNA, 19 nt, Homo sapiens
  misc_RNA (1)...(19): siRNA sense strand
ccaaagacccuccagcaga

SEQ ID NO: 2283166 - RNA, 19 nt, Homo sapiens
  misc_RNA (1)...(19): siRNA sense strand
gaggagcagaugcgggaga

SEQ ID NO: 2283167 - RNA, 19 nt, Homo sapiens
  misc_RNA (1)...(19): siRNA sense strand
gcaagaaugugaaugagcu

SEQ ID NO: 2283168 - RNA, 19 nt, Homo sapiens
  misc_RNA (1)...(19): siRNA sense strand
ucuuauaccaugaaggaua

SEQ ID NO: 2283169 - RNA, 19 nt, Homo sapiens
  misc_RNA (1)...(19): siRNA sense strand
ggguggaagacuuagauaa

SEQ ID NO: 2283170 - RNA, 19 nt, Homo sapiens
  misc_RNA (1)...(19): siRNA sense strand
cuuaauggcuugugcccaa

SEQ ID NO: 2283171 - RNA, 19 nt, Homo sapiens
  misc_RNA (1)...(19): siRNA sense strand
ggggauuaacuuugagaaa

SEQ ID NO: 2283172 - RNA, 19 nt, Homo sapiens
  misc_RNA (1)...(19): siRNA sense strand
gagcaaguacagcgagcaa

SEQ ID NO: 2283173 - RNA, 19 nt, Homo sapiens
  misc_RNA (1)...(19): siRNA sense strand
ggaaguggaucaaggggaa

SEQ ID NO: 2283174 - RNA, 19 nt, Homo sapiens
  misc_RNA (1)...(19): siRNA sense strand
ggucauuucuacuggacau

SEQ ID NO: 2283175 - RNA, 19 nt, Homo sapiens
  misc_RNA (1)...(19): siRNA sense strand
ucucgagauucuagaggaa

SEQ ID NO: 2283176 - RNA, 19 nt, Homo sapiens
  misc_RNA (1)...(19): siRNA sense strand
gagaaauuaucauggggaa

SEQ ID NO: 2283177 - RNA, 19 nt, Homo sapiens
  misc_RNA (1)...(19): siRNA sense strand
agacuuagauaaacgguca

SEQ ID NO: 2283178 - RNA, 19 nt, Homo sapiens
  misc_RNA (1)...(19): siRNA sense strand
ggaugaagcugauaggaug

SEQ ID NO: 2283179 - RNA, 19 nt, Homo sapiens
  misc_RNA (1)...(19): siRNA sense strand
ugauauaccaguagaggca

SEQ ID NO: 2283180 - RNA, 19 nt, Homo sapiens
  misc_RNA (1)...(19): siRNA sense strand
aguacuuaguguuggauga

SEQ ID NO: 2283181 - RNA, 19 nt, Homo sapiens
  misc_RNA (1)...(19): siRNA sense strand
gugccuucuugguuggaaa

SEQ ID NO: 2283182 - RNA, 19 nt, Homo sapiens
  misc_RNA (1)...(19): siRNA sense strand
cagcagaggauuuggugga

SEQ ID NO: 2283183 - RNA, 19 nt, Homo sapiens
  misc_RNA (1)...(19): siRNA sense strand
gcgauauugacaugggaga

SEQ ID NO: 2283184 - RNA, 19 nt, Homo sapiens
  misc_RNA (1)...(19): siRNA sense strand
ucuaugaggaagccagaaa

SEQ ID NO: 2283185 - RNA, 19 nt, Homo sapiens
  misc_RNA (1)...(19): siRNA sense strand
ucguauaguugaacaagau

SEQ ID NO: 2283186 - RNA, 19 nt, Homo sapiens
  misc_RNA (1)...(19): siRNA sense strand
cuuugaaggcugugaagga

SEQ ID NO: 2283187 - RNA, 19 nt, Homo sapiens
  misc_RNA (1)...(19): siRNA sense strand
ggauaugggauuugaaccu

SEQ ID NO: 2283188 - RNA, 19 nt, Homo sapiens
  misc_RNA (1)...(19): siRNA sense strand
cgauauugacaugggagaa

SEQ ID NO: 2283189 - RNA, 19 nt, Homo sapiens
  misc_RNA (1)...(19): siRNA sense strand
ugagaacaucacacagaaa

SEQ ID NO: 2283190 - RNA, 19 nt, Homo sapiens
  misc_RNA (1)...(19): siRNA sense strand
cuuaaggaacagagaagca

SEQ ID NO: 2283191 - RNA, 19 nt, Homo sapiens
  misc_RNA (1)...(19): siRNA sense strand
caacaagagaauuggcugu

SEQ ID NO: 2283192 - RNA, 19 nt, Homo sapiens
  misc_RNA (1)...(19): siRNA sense strand
acagagagaucgagaggag

SEQ ID NO: 2283193 - RNA, 19 nt, Homo sapiens
  misc_RNA (1)...(19): siRNA sense strand
ucuacaauagugauggaua

SEQ ID NO: 2283194 - RNA, 19 nt, Homo sapiens
  misc_RNA (1)...(19): siRNA sense strand
ggagugacuaugaugguau

SEQ ID NO: 2283195 - RNA, 19 nt, Homo sapiens
  misc_RNA (1)...(19): siRNA sense strand
ggaggaaacacggggauua

SEQ ID NO: 2283196 - RNA, 19 nt, Homo sapiens
  misc_RNA (1)...(19): siRNA sense strand
ggugcaacagggagugauu

SEQ ID NO: 2283197 - RNA, 19 nt, Homo sapiens
  misc_RNA (1)...(19): siRNA sense strand
gagcagauucccuggagga

SEQ ID NO: 2283198 - RNA, 19 nt, Homo sapiens
  misc_RNA (1)...(19): siRNA sense strand
aguugaagaugauugguca

SEQ ID NO: 2283199 - RNA, 19 nt, Homo sapiens
  misc_RNA (1)...(19): siRNA sense strand
uugaaggcugugaaggaaa

SEQ ID NO: 2283200 - RNA, 19 nt, Homo sapiens
  misc_RNA (1)...(19): siRNA sense strand
uguacagaucuaugaggaa

SEQ ID NO: 2283201 - RNA, 19 nt, Homo sapiens
  misc_RNA (1)...(19): siRNA sense strand
cuaguggauaugauggaaa

SEQ ID NO: 2283202 - RNA, 19 nt, Homo sapiens
  misc_RNA (1)...(19): siRNA sense strand
ggacauagucguuggugug

SEQ ID NO: 2283203 - RNA, 19 nt, Homo sapiens
  misc_RNA (1)...(19): siRNA sense strand
ggaugcuggauaugggauu

SEQ ID NO: 2283204 - RNA, 19 nt, Homo sapiens
  misc_RNA (1)...(19): siRNA sense strand
caaacaggaucugggaaaa

SEQ ID NO: 2283205 - RNA, 19 nt, Homo sapiens
  misc_RNA (1)...(19): siRNA sense strand
uacagaugguccaggagaa

SEQ ID NO: 2283206 - RNA, 19 nt, Homo sapiens
  misc_RNA (1)...(19): siRNA sense strand
uggaugaagcugauaggau

SEQ ID NO: 2283207 - RNA, 19 nt, Homo sapiens
  misc_RNA (1)...(19): siRNA sense strand
ggucacagagagaucgaga

SEQ ID NO: 2283208 - RNA, 19 nt, Homo sapiens
  misc_RNA (1)...(19): siRNA sense strand
aaacagaguggaggagcaa

SEQ ID NO: 2283209 - RNA, 19 nt, Homo sapiens
  misc_RNA (1)...(19): siRNA sense strand
uaguguuuguggagaccaa

SEQ ID NO: 2283210 - RNA, 19 nt, Homo sapiens
  misc_RNA (1)...(19): siRNA sense strand
guacuaguauucauggaga

SEQ ID NO: 2283211 - RNA, 19 nt, Homo sapiens
  misc_RNA (1)...(19): siRNA sense strand
ggacgaucuaaaaguaaua

SEQ ID NO: 2283212 - RNA, 19 nt, Homo sapiens
  misc_RNA (1)...(19): siRNA sense strand
uggauauggaggaaauuau

SEQ ID NO: 2283213 - RNA, 19 nt, Homo sapiens
  misc_RNA (1)...(19): siRNA sense strand
cagugaacguggaagugga

SEQ ID NO: 2283214 - RNA, 19 nt, Homo sapiens
  misc_RNA (1)...(19): siRNA sense strand
ugaacguggaaguggauca

SEQ ID NO: 2283215 - RNA, 19 nt, Homo sapiens
  misc_RNA (1)...(19): siRNA sense strand
accaugauguuuagugcua

SEQ ID NO: 2283216 - RNA, 19 nt, Homo sapiens
  misc_RNA (1)...(19): siRNA sense strand
uaauagauucaguggagga

SEQ ID NO: 2283217 - RNA, 19 nt, Homo sapiens
  misc_RNA (1)...(19): siRNA sense strand
gguuggaaaauauggcuua

SEQ ID NO: 2283218 - RNA, 19 nt, Homo sapiens
  misc_RNA (1)...(19): siRNA sense strand
aguaauagauucaguggag

SEQ ID NO: 2283219 - RNA, 19 nt, Homo sapiens
  misc_RNA (1)...(19): siRNA sense strand
agugauggauauggaggaa

SEQ ID NO: 2283220 - RNA, 19 nt, Homo sapiens
  misc_RNA (1)...(19): siRNA sense strand
caggagggagagagagaca

SEQ ID NO: 2283221 - RNA, 19 nt, Homo sapiens
  misc_RNA (1)...(19): siRNA sense strand
ugcaggagggagagagaga

SEQ ID NO: 2283222 - RNA, 19 nt, Homo sapiens
  misc_RNA (1)...(19): siRNA sense strand
ccugcaggagggagagaga

SEQ ID NO: 2283223 - RNA, 19 nt, Homo sapiens
  misc_RNA (1)...(19): siRNA sense strand
ugaagacagaagagggaaa

SEQ ID NO: 2283224 - RNA, 19 nt, Homo sapiens
  misc_RNA (1)...(19): siRNA sense strand
gcuaugggcaugaggguca

SEQ ID NO: 2283225 - RNA, 19 nt, Homo sapiens
  misc_RNA (1)...(19): siRNA sense strand
acccauauuuggaggacau

SEQ ID NO: 2283226 - RNA, 19 nt, Homo sapiens
  misc_RNA (1)...(19): siRNA sense strand
gagguguugcugagugaaa

SEQ ID NO: 2283227 - RNA, 19 nt, Homo sapiens
  misc_RNA (1)...(19): siRNA sense strand
gcuucuaccagguuugaaa

SEQ ID NO: 2283228 - RNA, 19 nt, Homo sapiens
  misc_RNA (1)...(19): siRNA sense strand
agcacaagcaagaauaaua

SEQ ID NO: 2283229 - RNA, 19 nt, Homo sapiens
  misc_RNA (1)...(19): siRNA sense strand
uggcauuaaugaaucggaa

SEQ ID NO: 2283230 - RNA, 19 nt, Homo sapiens
  misc_RNA (1)...(19): siRNA sense strand
ucaaagaaaaugacaggaa

SEQ ID NO: 2283231 - RNA, 19 nt, Homo sapiens
  misc_RNA (1)...(19): siRNA sense strand
cugagguguugcugaguga

SEQ ID NO: 2283232 - RNA, 19 nt, Homo sapiens
  misc_RNA (1)...(19): siRNA sense strand
cagcuugggcuaugggcau

SEQ ID NO: 2283233 - RNA, 19 nt, Homo sapiens
  misc_RNA (1)...(19): siRNA sense strand
ggagguuguaugagaagga

SEQ ID NO: 2283234 - RNA, 19 nt, Homo sapiens
  misc_RNA (1)...(19): siRNA sense strand
uggcaaauauuggggacaa

SEQ ID NO: 2283235 - RNA, 19 nt, Homo sapiens
  misc_RNA (1)...(19): siRNA sense strand
ggaugaauguuuugccaca

SEQ ID NO: 2283236 - RNA, 19 nt, Homo sapiens
  misc_RNA (1)...(19): siRNA sense strand
caaaugaaguguacgcucu

SEQ ID NO: 2283237 - RNA, 19 nt, Homo sapiens
  misc_RNA (1)...(19): siRNA sense strand
gcucacaggaguugcagga

SEQ ID NO: 2283238 - RNA, 19 nt, Homo sapiens
  misc_RNA (1)...(19): siRNA sense strand
aggaguugcaggaaauuau

SEQ ID NO: 2283239 - RNA, 19 nt, Homo sapiens
  misc_RNA (1)...(19): siRNA sense strand
cuguuaccuuggugaaaga

SEQ ID NO: 2283240 - RNA, 19 nt, Homo sapiens
  misc_RNA (1)...(19): siRNA sense strand
gcuacaaaaugucugagaa

SEQ ID NO: 2283241 - RNA, 19 nt, Homo sapiens
  misc_RNA (1)...(19): siRNA sense strand
acaagaacauagugcgcua

SEQ ID NO: 2283242 - RNA, 19 nt, Homo sapiens
  misc_RNA (1)...(19): siRNA sense strand
cgugagagcuucagcauga

SEQ ID NO: 2283243 - RNA, 19 nt, Homo sapiens
  misc_RNA (1)...(19): siRNA sense strand
gauuaugaguacacggaga

SEQ ID NO: 2283244 - RNA, 19 nt, Homo sapiens
  misc_RNA (1)...(19): siRNA sense strand
ccgcaguauuggagcagga

SEQ ID NO: 2283245 - RNA, 19 nt, Homo sapiens
  misc_RNA (1)...(19): siRNA sense strand
ggaaggaacgggaguacca

SEQ ID NO: 2283246 - RNA, 19 nt, Homo sapiens
  misc_RNA (1)...(19): siRNA sense strand
gaccggagguggagaagga

SEQ ID NO: 2283247 - RNA, 19 nt, Homo sapiens
  misc_RNA (1)...(19): siRNA sense strand
ccauguuucagguggguau

SEQ ID NO: 2283248 - RNA, 19 nt, Homo sapiens
  misc_RNA (1)...(19): siRNA sense strand
cugcaaagcucgagguucg

SEQ ID NO: 2283249 - RNA, 19 nt, Homo sapiens
  misc_RNA (1)...(19): siRNA sense strand
ggacauaaaaggggacaau

SEQ ID NO: 2283250 - RNA, 19 nt, Homo sapiens
  misc_RNA (1)...(19): siRNA sense strand
uccaaaugcuguugaacca

SEQ ID NO: 2283251 - RNA, 19 nt, Homo sapiens
  misc_RNA (1)...(19): siRNA sense strand
ggccguaucuacaaggaca

SEQ ID NO: 2283252 - RNA, 19 nt, Homo sapiens
  misc_RNA (1)...(19): siRNA sense strand
acugaucggcugcgcgaaa

SEQ ID NO: 2283253 - RNA, 19 nt, Homo sapiens
  misc_RNA (1)...(19): siRNA sense strand
ugguacagcuugagggcuc

SEQ ID NO: 2283254 - RNA, 19 nt, Homo sapiens
  misc_RNA (1)...(19): siRNA sense strand
caaaugcuguugaaccaua

SEQ ID NO: 2283255 - RNA, 19 nt, Homo sapiens
  misc_RNA (1)...(19): siRNA sense strand
auuacugggauguggguuu

SEQ ID NO: 2283256 - RNA, 19 nt, Homo sapiens
  misc_RNA (1)...(19): siRNA sense strand
gcacagugacccugagccu

SEQ ID NO: 2283257 - RNA, 19 nt, Homo sapiens
  misc_RNA (1)...(19): siRNA sense strand
gugcaggacuacucggcca

SEQ ID NO: 2283258 - RNA, 19 nt, Homo sapiens
  misc_RNA (1)...(19): siRNA sense strand
cggaugugguggugcugga

SEQ ID NO: 2283259 - RNA, 19 nt, Homo sapiens
  misc_RNA (1)...(19): siRNA sense strand
gcaacaagauacagggaac

SEQ ID NO: 2283260 - RNA, 19 nt, Homo sapiens
  misc_RNA (1)...(19): siRNA sense strand
ugguggauguagauggaaa

SEQ ID NO: 2283261 - RNA, 19 nt, Homo sapiens
  misc_RNA (1)...(19): siRNA sense strand
auucaaagacugucagcaa

SEQ ID NO: 2283262 - RNA, 19 nt, Homo sapiens
  misc_RNA (1)...(19): siRNA sense strand
augcaguuauggugugaaa

SEQ ID NO: 2283263 - RNA, 19 nt, Homo sapiens
  misc_RNA (1)...(19): siRNA sense strand
auaagaaaggguuuggaaa

SEQ ID NO: 2283264 - RNA, 19 nt, Homo sapiens
  misc_RNA (1)...(19): siRNA sense strand
cacagaugguaaagaggaa

SEQ ID NO: 2283265 - RNA, 19 nt, Homo sapiens
  misc_RNA (1)...(19): siRNA sense strand
guaacgagauucagaggga

SEQ ID NO: 2283266 - RNA, 19 nt, Homo sapiens
  misc_RNA (1)...(19): siRNA sense strand
acaaagaauaacagggcca

SEQ ID NO: 2283267 - RNA, 19 nt, Homo sapiens
  misc_RNA (1)...(19): siRNA sense strand
agguuaucccagagauuua

SEQ ID NO: 2283268 - RNA, 19 nt, Homo sapiens
  misc_RNA (1)...(19): siRNA sense strand
agauggaaacauugugaau

SEQ ID NO: 2283269 - RNA, 19 nt, Homo sapiens
  misc_RNA (1)...(19): siRNA sense strand
uuggaaacauugacggaga

SEQ ID NO: 2283270 - RNA, 19 nt, Homo sapiens
  misc_RNA (1)...(19): siRNA sense strand
augguaaagaggaagcaaa

SEQ ID NO: 2283271 - RNA, 19 nt, Homo sapiens
  misc_RNA (1)...(19): siRNA sense strand
uggcauaaugguaaacaau

SEQ ID NO: 2283272 - RNA, 19 nt, Homo sapiens
  misc_RNA (1)...(19): siRNA sense strand
cacacuggacagagauaaa

SEQ ID NO: 2283273 - RNA, 19 nt, Homo sapiens
  misc_RNA (1)...(19): siRNA sense strand
gaaauguugaagauggcaa

SEQ ID NO: 2283274 - RNA, 19 nt, Homo sapiens
  misc_RNA (1)...(19): siRNA sense strand
ccagguuaucccagagauu

SEQ ID NO: 2283275 - RNA, 19 nt, Homo sapiens
  misc_RNA (1)...(19): siRNA sense strand
cuggacagagauaaagaua

SEQ ID NO: 2283276 - RNA, 19 nt, Homo sapiens
  misc_RNA (1)...(19): siRNA sense strand
aagauauguaugcaggaaa

SEQ ID NO: 2283277 - RNA, 19 nt, Homo sapiens
  misc_RNA (1)...(19): siRNA sense strand
agauagauguucugcaacu

SEQ ID NO: 2283278 - RNA, 19 nt, Homo sapiens
  misc_RNA (1)...(19): siRNA sense strand
guggcauaaugguaaacaa

SEQ ID NO: 2283279 - RNA, 19 nt, Homo sapiens
  misc_RNA (1)...(19): siRNA sense strand
gcauucggucagugggauu

SEQ ID NO: 2283280 - RNA, 19 nt, Homo sapiens
  misc_RNA (1)...(19): siRNA sense strand
agaagacuggagugauaaa

SEQ ID NO: 2283281 - RNA, 19 nt, Homo sapiens
  misc_RNA (1)...(19): siRNA sense strand
ugggaacuuaccagggaaa

SEQ ID NO: 2283282 - RNA, 19 nt, Homo sapiens
  misc_RNA (1)...(19): siRNA sense strand
cuaaauggaguaugguaca

SEQ ID NO: 2283283 - RNA, 19 nt, Homo sapiens
  misc_RNA (1)...(19): siRNA sense strand
gggcaagaugcaaguacca

SEQ ID NO: 2283284 - RNA, 19 nt, Homo sapiens
  misc_RNA (1)...(19): siRNA sense strand
ccugaaagugaauucuaua

SEQ ID NO: 2283285 - RNA, 19 nt, Homo sapiens
  misc_RNA (1)...(19): siRNA sense strand
gaagcaaagaaaugugcau

SEQ ID NO: 2283286 - RNA, 19 nt, Homo sapiens
  misc_RNA (1)...(19): siRNA sense strand
cuucagaaauugggaaaau

SEQ ID NO: 2283287 - RNA, 19 nt, Homo sapiens
  misc_RNA (1)...(19): siRNA sense strand
cgaauacagaggcggguca

SEQ ID NO: 2283288 - RNA, 19 nt, Homo sapiens
  misc_RNA (1)...(19): siRNA sense strand
agauauguaugcaggaaac

SEQ ID NO: 2283289 - RNA, 19 nt, Homo sapiens
  misc_RNA (1)...(19): siRNA sense strand
cugagaaaggaaagccgua

SEQ ID NO: 2283290 - RNA, 19 nt, Homo sapiens
  misc_RNA (1)...(19): siRNA sense strand
gguaccugaacaaagaaua

SEQ ID NO: 2283291 - RNA, 19 nt, Homo sapiens
  misc_RNA (1)...(19): siRNA sense strand
ccuaaauggaguaugguac

SEQ ID NO: 2283292 - RNA, 19 nt, Homo sapiens
  misc_RNA (1)...(19): siRNA sense strand
cucaaugucaccacagaaa

SEQ ID NO: 2283293 - RNA, 19 nt, Homo sapiens
  misc_RNA (1)...(19): siRNA sense strand
ccacagaugguaaagagga

SEQ ID NO: 2283294 - RNA, 19 nt, Homo sapiens
  misc_RNA (1)...(19): siRNA sense strand
aagcaaagaaaugugcaua

SEQ ID NO: 2283295 - RNA, 19 nt, Homo sapiens
  misc_RNA (1)...(19): siRNA sense strand
acauugcagagguggacaa

SEQ ID NO: 2283296 - RNA, 19 nt, Homo sapiens
  misc_RNA (1)...(19): siRNA sense strand
aauuagaagacuggaguga

SEQ ID NO: 2283297 - RNA, 19 nt, Homo sapiens
  misc_RNA (1)...(19): siRNA sense strand
uugaaaaccugaaggaugu

SEQ ID NO: 2283298 - RNA, 19 nt, Homo sapiens
  misc_RNA (1)...(19): siRNA sense strand
aagaacagugcuugaggau

SEQ ID NO: 2283299 - RNA, 19 nt, Homo sapiens
  misc_RNA (1)...(19): siRNA sense strand
uggacagagauaaagauau

SEQ ID NO: 2283300 - RNA, 19 nt, Homo sapiens
  misc_RNA (1)...(19): siRNA sense strand
ccuuaagagcaguucagau

SEQ ID NO: 2283301 - RNA, 19 nt, Homo sapiens
  misc_RNA (1)...(19): siRNA sense strand
ccaucgugcuggugggcaa

SEQ ID NO: 2283302 - RNA, 19 nt, Homo sapiens
  misc_RNA (1)...(19): siRNA sense strand
uggaagagcugaaggccuu

SEQ ID NO: 2283303 - RNA, 19 nt, Homo sapiens
  misc_RNA (1)...(19): siRNA sense strand
gcaagaguggcgacggcaa

SEQ ID NO: 2283304 - RNA, 19 nt, Homo sapiens
  misc_RNA (1)...(19): siRNA sense strand
cugcugaauuacaagaaaa

SEQ ID NO: 2283305 - RNA, 19 nt, Homo sapiens
  misc_RNA (1)...(19): siRNA sense strand
agccaagaccgaugugaau

SEQ ID NO: 2283306 - RNA, 19 nt, Homo sapiens
  misc_RNA (1)...(19): siRNA sense strand
ucagucaccaagaaggaaa

SEQ ID NO: 2283307 - RNA, 19 nt, Homo sapiens
  misc_RNA (1)...(19): siRNA sense strand
caggaagaucagagauuac

SEQ ID NO: 2283308 - RNA, 19 nt, Homo sapiens
  misc_RNA (1)...(19): siRNA sense strand
aggaacagaagcugcugaa

SEQ ID NO: 2283309 - RNA, 19 nt, Homo sapiens
  misc_RNA (1)...(19): siRNA sense strand
aaaaugggaaugugagaaa

SEQ ID NO: 2283310 - RNA, 19 nt, Homo sapiens
  misc_RNA (1)...(19): siRNA sense strand
ccagcauacaaaugagauu

SEQ ID NO: 2283311 - RNA, 19 nt, Homo sapiens
  misc_RNA (1)...(19): siRNA sense strand
aggccaaggagacaggaaa

SEQ ID NO: 2283312 - RNA, 19 nt, Homo sapiens
  misc_RNA (1)...(19): siRNA sense strand
agaaaggggcugcgacaaa

SEQ ID NO: 2283313 - RNA, 19 nt, Homo sapiens
  misc_RNA (1)...(19): siRNA sense strand
gagacaggaaagaggaagu

SEQ ID NO: 2283314 - RNA, 19 nt, Homo sapiens
  misc_RNA (1)...(19): siRNA sense strand
ggcccgaagaagaagacua

SEQ ID NO: 2283315 - RNA, 19 nt, Homo sapiens
  misc_RNA (1)...(19): siRNA sense strand
ccgaagaagaagacuacca

SEQ ID NO: 2283316 - RNA, 19 nt, Homo sapiens
  misc_RNA (1)...(19): siRNA sense strand
aguccaaagccgagagccu

SEQ ID NO: 2283317 - RNA, 19 nt, Homo sapiens
  misc_RNA (1)...(19): siRNA sense strand
agcaguucguggagggaga

SEQ ID NO: 2283318 - RNA, 19 nt, Homo sapiens
  misc_RNA (1)...(19): siRNA sense strand
agggagacgcgggaagaaa

SEQ ID NO: 2283319 - RNA, 19 nt, Homo sapiens
  misc_RNA (1)...(19): siRNA sense strand
gaagaaaggggcugcgaca

SEQ ID NO: 2283320 - RNA, 19 nt, Homo sapiens
  misc_RNA (1)...(19): siRNA sense strand
aggagacaggaaagaggaa

SEQ ID NO: 2283321 - RNA, 19 nt, Homo sapiens
  misc_RNA (1)...(19): siRNA sense strand
gggagaagcaguucgugga

SEQ ID NO: 2283322 - RNA, 19 nt, Homo sapiens
  misc_RNA (1)...(19): siRNA sense strand
ccgagaagggagaagcagu

SEQ ID NO: 2283323 - RNA, 19 nt, Homo sapiens
  misc_RNA (1)...(19): siRNA sense strand
agcaagaacguuaggagaa

SEQ ID NO: 2283324 - RNA, 19 nt, Homo sapiens
  misc_RNA (1)...(19): siRNA sense strand
agucaauggcccugcgauu

SEQ ID NO: 2283325 - RNA, 19 nt, Homo sapiens
  misc_RNA (1)...(19): siRNA sense strand
agaacaagacucagauaca

SEQ ID NO: 2283326 - RNA, 19 nt, Homo sapiens
  misc_RNA (1)...(19): siRNA sense strand
cagcaagaacguuaggaga

SEQ ID NO: 2283327 - RNA, 19 nt, Homo sapiens
  misc_RNA (1)...(19): siRNA sense strand
acauuguagugaagaaaga

SEQ ID NO: 2283328 - RNA, 19 nt, Homo sapiens
  misc_RNA (1)...(19): siRNA sense strand
accauaaggcuaacagaaa

SEQ ID NO: 2283329 - RNA, 19 nt, Homo sapiens
  misc_RNA (1)...(19): siRNA sense strand
gguggaaagguuaugacaa

SEQ ID NO: 2283330 - RNA, 19 nt, Homo sapiens
  misc_RNA (1)...(19): siRNA sense strand
aguuugagguugaagcuau

SEQ ID NO: 2283331 - RNA, 19 nt, Homo sapiens
  misc_RNA (1)...(19): siRNA sense strand
aagagugaaaggugggcaa

SEQ ID NO: 2283332 - RNA, 19 nt, Homo sapiens
  misc_RNA (1)...(19): siRNA sense strand
gcuaucaacuagaucgaca

SEQ ID NO: 2283333 - RNA, 19 nt, Homo sapiens
  misc_RNA (1)...(19): siRNA sense strand
gcacuucaccauaaggcua

SEQ ID NO: 2283334 - RNA, 19 nt, Homo sapiens
  misc_RNA (1)...(19): siRNA sense strand
ugacaaaagacaggauaaa

SEQ ID NO: 2283335 - RNA, 19 nt, Homo sapiens
  misc_RNA (1)...(19): siRNA sense strand
gggacaacagacaugcaua

SEQ ID NO: 2283336 - RNA, 19 nt, Homo sapiens
  misc_RNA (1)...(19): siRNA sense strand
gugaaaggugggcaaagaa

SEQ ID NO: 2283337 - RNA, 19 nt, Homo sapiens
  misc_RNA (1)...(19): siRNA sense strand
agacauuguagugaagaaa

SEQ ID NO: 2283338 - RNA, 19 nt, Homo sapiens
  misc_RNA (1)...(19): siRNA sense strand
guuugagguugaagcuauu

SEQ ID NO: 2283339 - RNA, 19 nt, Homo sapiens
  misc_RNA (1)...(19): siRNA sense strand
ggccaaugagagagagugu

SEQ ID NO: 2283340 - RNA, 19 nt, Homo sapiens
  misc_RNA (1)...(19): siRNA sense strand
gacacaaagaauauggaga

SEQ ID NO: 2283341 - RNA, 19 nt, Homo sapiens
  misc_RNA (1)...(19): siRNA sense strand
guuaugacaaacaggauga

SEQ ID NO: 2283342 - RNA, 19 nt, Homo sapiens
  misc_RNA (1)...(19): siRNA sense strand
ccaucaagaacuuugugaa

SEQ ID NO: 2283343 - RNA, 19 nt, Homo sapiens
  misc_RNA (1)...(19): siRNA sense strand
ugugaggugcugaggaaga

SEQ ID NO: 2283344 - RNA, 19 nt, Homo sapiens
  misc_RNA (1)...(19): siRNA sense strand
uucagaaacuugagaaacu

SEQ ID NO: 2283345 - RNA, 19 nt, Homo sapiens
  misc_RNA (1)...(19): siRNA sense strand
aauaacagaaacacagcaa

SEQ ID NO: 2283346 - RNA, 19 nt, Homo sapiens
  misc_RNA (1)...(19): siRNA sense strand
gauaaacaccacaggucca

SEQ ID NO: 2283347 - RNA, 19 nt, Homo sapiens
  misc_RNA (1)...(19): siRNA sense strand
ucaaggugacagaagggaa

SEQ ID NO: 2283348 - RNA, 19 nt, Homo sapiens
  misc_RNA (1)...(19): siRNA sense strand
ugguauuaauagacccauu

SEQ ID NO: 2283349 - RNA, 19 nt, Homo sapiens
  misc_RNA (1)...(19): siRNA sense strand
gccaaugggacaacagaca

SEQ ID NO: 2283350 - RNA, 19 nt, Homo sapiens
  misc_RNA (1)...(19): siRNA sense strand
gguacuuugugaagcacuu

SEQ ID NO: 2283351 - RNA, 19 nt, Homo sapiens
  misc_RNA (1)...(19): siRNA sense strand
uugugaagcacuuaaggaa

SEQ ID NO: 2283352 - RNA, 19 nt, Homo sapiens
  misc_RNA (1)...(19): siRNA sense strand
uguuaauugcugggcgaaa

SEQ ID NO: 2283353 - RNA, 19 nt, Homo sapiens
  misc_RNA (1)...(19): siRNA sense strand
auauuaaguuggaguugga

SEQ ID NO: 2283354 - RNA, 19 nt, Homo sapiens
  misc_RNA (1)...(19): siRNA sense strand
ugugaagcacuuaaggaau

SEQ ID NO: 2283355 - RNA, 19 nt, Homo sapiens
  misc_RNA (1)...(19): siRNA sense strand
guucagugcagcuggaagu

SEQ ID NO: 2283356 - RNA, 19 nt, Homo sapiens
  misc_RNA (1)...(19): siRNA sense strand
aacaaugccagaagaagaa

SEQ ID NO: 2283357 - RNA, 19 nt, Homo sapiens
  misc_RNA (1)...(19): siRNA sense strand
caggaugacacuugggaac

SEQ ID NO: 2283358 - RNA, 19 nt, Homo sapiens
  misc_RNA (1)...(19): siRNA sense strand
auacagaacaagacucaga

SEQ ID NO: 2283359 - RNA, 19 nt, Homo sapiens
  misc_RNA (1)...(19): siRNA sense strand
gauucaaauuaaggagcuu

SEQ ID NO: 2283360 - RNA, 19 nt, Homo sapiens
  misc_RNA (1)...(19): siRNA sense strand
ugcagaacagacuggaaua

SEQ ID NO: 2283361 - RNA, 19 nt, Homo sapiens
  misc_RNA (1)...(19): siRNA sense strand
uuaaguuggaguuggaaca

SEQ ID NO: 2283362 - RNA, 19 nt, Homo sapiens
  misc_RNA (1)...(19): siRNA sense strand
gaucuggagcucagcccaa

SEQ ID NO: 2283363 - RNA, 19 nt, Homo sapiens
  misc_RNA (1)...(19): siRNA sense strand
cucaguuccaagagugaaa

SEQ ID NO: 2283364 - RNA, 19 nt, Homo sapiens
  misc_RNA (1)...(19): siRNA sense strand
agcaagaacguuaggagaa

SEQ ID NO: 2283365 - RNA, 19 nt, Homo sapiens
  misc_RNA (1)...(19): siRNA sense strand
agucaauggcccugcgauu

SEQ ID NO: 2283366 - RNA, 19 nt, Homo sapiens
  misc_RNA (1)...(19): siRNA sense strand
agaacaagacucagauaca

SEQ ID NO: 2283367 - RNA, 19 nt, Homo sapiens
  misc_RNA (1)...(19): siRNA sense strand
cagcaagaacguuaggaga

SEQ ID NO: 2283368 - RNA, 19 nt, Homo sapiens
  misc_RNA (1)...(19): siRNA sense strand
acauuguagugaagaaaga

SEQ ID NO: 2283369 - RNA, 19 nt, Homo sapiens
  misc_RNA (1)...(19): siRNA sense strand
accauaaggcuaacagaaa

SEQ ID NO: 2283370 - RNA, 19 nt, Homo sapiens
  misc_RNA (1)...(19): siRNA sense strand
gguggaaagguuaugacaa

SEQ ID NO: 2283371 - RNA, 19 nt, Homo sapiens
  misc_RNA (1)...(19): siRNA sense strand
aguuugagguugaagcuau

SEQ ID NO: 2283372 - RNA, 19 nt, Homo sapiens
  misc_RNA (1)...(19): siRNA sense strand
aagagugaaaggugggcaa

SEQ ID NO: 2283373 - RNA, 19 nt, Homo sapiens
  misc_RNA (1)...(19): siRNA sense strand
gcuaucaacuagaucgaca

SEQ ID NO: 2283374 - RNA, 19 nt, Homo sapiens
  misc_RNA (1)...(19): siRNA sense strand
gcacuucaccauaaggcua

SEQ ID NO: 2283375 - RNA, 19 nt, Homo sapiens
  misc_RNA (1)...(19): siRNA sense strand
ugacaaaagacaggauaaa

SEQ ID NO: 2283376 - RNA, 19 nt, Homo sapiens
  misc_RNA (1)...(19): siRNA sense strand
gggacaacagacaugcaua

SEQ ID NO: 2283377 - RNA, 19 nt, Homo sapiens
  misc_RNA (1)...(19): siRNA sense strand
gugaaaggugggcaaagaa

SEQ ID NO: 2283378 - RNA, 19 nt, Homo sapiens
  misc_RNA (1)...(19): siRNA sense strand
agacauuguagugaagaaa

SEQ ID NO: 2283379 - RNA, 19 nt, Homo sapiens
  misc_RNA (1)...(19): siRNA sense strand
guuugagguugaagcuauu

SEQ ID NO: 2283380 - RNA, 19 nt, Homo sapiens
  misc_RNA (1)...(19): siRNA sense strand
ggccaaugagagagagugu

SEQ ID NO: 2283381 - RNA, 19 nt, Homo sapiens
  misc_RNA (1)...(19): siRNA sense strand
gacacaaagaauauggaga

SEQ ID NO: 2283382 - RNA, 19 nt, Homo sapiens
  misc_RNA (1)...(19): siRNA sense strand
guuaugacaaacaggauga

SEQ ID NO: 2283383 - RNA, 19 nt, Homo sapiens
  misc_RNA (1)...(19): siRNA sense strand
ccaucaagaacuuugugaa

SEQ ID NO: 2283384 - RNA, 19 nt, Homo sapiens
  misc_RNA (1)...(19): siRNA sense strand
ugugaggugcugaggaaga

SEQ ID NO: 2283385 - RNA, 19 nt, Homo sapiens
  misc_RNA (1)...(19): siRNA sense strand
uucagaaacuugagaaacu

SEQ ID NO: 2283386 - RNA, 19 nt, Homo sapiens
  misc_RNA (1)...(19): siRNA sense strand
aauaacagaaacacagcaa

SEQ ID NO: 2283387 - RNA, 19 nt, Homo sapiens
  misc_RNA (1)...(19): siRNA sense strand
gauaaacaccacaggucca

SEQ ID NO: 2283388 - RNA, 19 nt, Homo sapiens
  misc_RNA (1)...(19): siRNA sense strand
ucaaggugacagaagggaa

SEQ ID NO: 2283389 - RNA, 19 nt, Homo sapiens
  misc_RNA (1)...(19): siRNA sense strand
ugguauuaauagacccauu

SEQ ID NO: 2283390 - RNA, 19 nt, Homo sapiens
  misc_RNA (1)...(19): siRNA sense strand
gccaaugggacaacagaca

SEQ ID NO: 2283391 - RNA, 19 nt, Homo sapiens
  misc_RNA (1)...(19): siRNA sense strand
gguacuuugugaagcacuu

SEQ ID NO: 2283392 - RNA, 19 nt, Homo sapiens
  misc_RNA (1)...(19): siRNA sense strand
uugugaagcacuuaaggaa

SEQ ID NO: 2283393 - RNA, 19 nt, Homo sapiens
  misc_RNA (1)...(19): siRNA sense strand
uguuaauugcugggcgaaa

SEQ ID NO: 2283394 - RNA, 19 nt, Homo sapiens
  misc_RNA (1)...(19): siRNA sense strand
auauuaaguuggaguugga

SEQ ID NO: 2283395 - RNA, 19 nt, Homo sapiens
  misc_RNA (1)...(19): siRNA sense strand
ugugaagcacuuaaggaau

SEQ ID NO: 2283396 - RNA, 19 nt, Homo sapiens
  misc_RNA (1)...(19): siRNA sense strand
guucagugcagcuggaagu

SEQ ID NO: 2283397 - RNA, 19 nt, Homo sapiens
  misc_RNA (1)...(19): siRNA sense strand
aacaaugccagaagaagaa

SEQ ID NO: 2283398 - RNA, 19 nt, Homo sapiens
  misc_RNA (1)...(19): siRNA sense strand
caggaugacacuugggaac

SEQ ID NO: 2283399 - RNA, 19 nt, Homo sapiens
  misc_RNA (1)...(19): siRNA sense strand
auacagaacaagacucaga

SEQ ID NO: 2283400 - RNA, 19 nt, Homo sapiens
  misc_RNA (1)...(19): siRNA sense strand
gauucaaauuaaggagcuu

SEQ ID NO: 2283401 - RNA, 19 nt, Homo sapiens
  misc_RNA (1)...(19): siRNA sense strand
ugcagaacagacuggaaua

SEQ ID NO: 2283402 - RNA, 19 nt, Homo sapiens
  misc_RNA (1)...(19): siRNA sense strand
uuaaguuggaguuggaaca

SEQ ID NO: 2283403 - RNA, 19 nt, Homo sapiens
  misc_RNA (1)...(19): siRNA sense strand
gaucuggagcucagcccaa

SEQ ID NO: 2283404 - RNA, 19 nt, Homo sapiens
  misc_RNA (1)...(19): siRNA sense strand
cucaguuccaagagugaaa

SEQ ID NO: 2283405 - RNA, 19 nt, Homo sapiens
  misc_RNA (1)...(19): siRNA sense strand
gaauaaagguaaaggaggu

SEQ ID NO: 2283406 - RNA, 19 nt, Homo sapiens
  misc_RNA (1)...(19): siRNA sense strand
augccauaucagagggaaa

SEQ ID NO: 2283407 - RNA, 19 nt, Homo sapiens
  misc_RNA (1)...(19): siRNA sense strand
agaggauggacaagaguau

SEQ ID NO: 2283408 - RNA, 19 nt, Homo sapiens
  misc_RNA (1)...(19): siRNA sense strand
cgauauuggagaugaugau

SEQ ID NO: 2283409 - RNA, 19 nt, Homo sapiens
  misc_RNA (1)...(19): siRNA sense strand
cauuauauugguuggucua

SEQ ID NO: 2283410 - RNA, 19 nt, Homo sapiens
  misc_RNA (1)...(19): siRNA sense strand
uguuuaaagaggauggaca

SEQ ID NO: 2283411 - RNA, 19 nt, Homo sapiens
  misc_RNA (1)...(19): siRNA sense strand
cuggagaugaugaugaaau

SEQ ID NO: 2283412 - RNA, 19 nt, Homo sapiens
  misc_RNA (1)...(19): siRNA sense strand
aagaguaugcucagguaau

SEQ ID NO: 2283413 - RNA, 19 nt, Homo sapiens
  misc_RNA (1)...(19): siRNA sense strand
aaucaaugaaacagacaca

SEQ ID NO: 2283414 - RNA, 19 nt, Homo sapiens
  misc_RNA (1)...(19): siRNA sense strand
ugaugaagacauugaugau

SEQ ID NO: 2283415 - RNA, 19 nt, Homo sapiens
  misc_RNA (1)...(19): siRNA sense strand
uggauaaauacaucagaca

SEQ ID NO: 2283416 - RNA, 19 nt, Homo sapiens
  misc_RNA (1)...(19): siRNA sense strand
ggaaauggacgauuggaag

SEQ ID NO: 2283417 - RNA, 19 nt, Homo sapiens
  misc_RNA (1)...(19): siRNA sense strand
uggcgagcuuccagaacau

SEQ ID NO: 2283418 - RNA, 19 nt, Homo sapiens
  misc_RNA (1)...(19): siRNA sense strand
gcuuccagaacaugcuaaa

SEQ ID NO: 2283419 - RNA, 19 nt, Homo sapiens
  misc_RNA (1)...(19): siRNA sense strand
gggaagaaguggaacguuc

SEQ ID NO: 2283420 - RNA, 19 nt, Homo sapiens
  misc_RNA (1)...(19): siRNA sense strand
gggaagaaguggaacguuc

SEQ ID NO: 2283421 - RNA, 19 nt, Homo sapiens
  misc_RNA (1)...(19): siRNA sense strand
ggauugaagcagucgcuga

SEQ ID NO: 2283422 - RNA, 19 nt, Homo sapiens
  misc_RNA (1)...(19): siRNA sense strand
ggucauugggagugagcag

SEQ ID NO: 2283423 - RNA, 19 nt, Homo sapiens
  misc_RNA (1)...(19): siRNA sense strand
ggacauggacucaggcacu

SEQ ID NO: 2283424 - RNA, 19 nt, Homo sapiens
  misc_RNA (1)...(19): siRNA sense strand
agguuuaagauucgggaca

SEQ ID NO: 2283425 - RNA, 19 nt, Homo sapiens
  misc_RNA (1)...(19): siRNA sense strand
uggaguucacagugggaga

SEQ ID NO: 2283426 - RNA, 19 nt, Homo sapiens
  misc_RNA (1)...(19): siRNA sense strand
ggacauggacucaggcacu

SEQ ID NO: 2283427 - RNA, 19 nt, Homo sapiens
  misc_RNA (1)...(19): siRNA sense strand
agguuuaagauucgggaca

SEQ ID NO: 2283428 - RNA, 19 nt, Homo sapiens
  misc_RNA (1)...(19): siRNA sense strand
uggaguucacagugggaga

SEQ ID NO: 2283429 - RNA, 19 nt, Homo sapiens
  misc_RNA (1)...(19): siRNA sense strand
cuucaggcagggagggaaa

SEQ ID NO: 2283430 - RNA, 19 nt, Homo sapiens
  misc_RNA (1)...(19): siRNA sense strand
augagaugauugugaccaa

SEQ ID NO: 2283431 - RNA, 19 nt, Homo sapiens
  misc_RNA (1)...(19): siRNA sense strand
uggcagagauucaaggaag

SEQ ID NO: 2283432 - RNA, 19 nt, Homo sapiens
  misc_RNA (1)...(19): siRNA sense strand
uguugaauucucugcauaa

SEQ ID NO: 2283433 - RNA, 19 nt, Homo sapiens
  misc_RNA (1)...(19): siRNA sense strand
ccuaucagaaugaggagau

SEQ ID NO: 2283434 - RNA, 19 nt, Homo sapiens
  misc_RNA (1)...(19): siRNA sense strand
gagugugcacagcaggaaa

SEQ ID NO: 2283435 - RNA, 19 nt, Homo sapiens
  misc_RNA (1)...(19): siRNA sense strand
caagaauggcagacggaug

SEQ ID NO: 2283436 - RNA, 19 nt, Homo sapiens
  misc_RNA (1)...(19): siRNA sense strand
ccagaggucuccagccaca

SEQ ID NO: 2283437 - RNA, 19 nt, Homo sapiens
  misc_RNA (1)...(19): siRNA sense strand
gagaaguagauguggucaa

SEQ ID NO: 2283438 - RNA, 19 nt, Homo sapiens
  misc_RNA (1)...(19): siRNA sense strand
agaucaaaugagagacaaa

SEQ ID NO: 2283439 - RNA, 19 nt, Homo sapiens
  misc_RNA (1)...(19): siRNA sense strand
aaagaauggagguggagaa

SEQ ID NO: 2283440 - RNA, 19 nt, Homo sapiens
  misc_RNA (1)...(19): siRNA sense strand
augaagaaauuguggagga

SEQ ID NO: 2283441 - RNA, 19 nt, Homo sapiens
  misc_RNA (1)...(19): siRNA sense strand
ugacaggaauggaaggcau

SEQ ID NO: 2283442 - RNA, 19 nt, Homo sapiens
  misc_RNA (1)...(19): siRNA sense strand
ccugaaacaaagaugaaau

SEQ ID NO: 2283443 - RNA, 19 nt, Homo sapiens
  misc_RNA (1)...(19): siRNA sense strand
ggcaaagaauggaggugga

SEQ ID NO: 2283444 - RNA, 19 nt, Homo sapiens
  misc_RNA (1)...(19): siRNA sense strand
cugauaaagaugacacaca

SEQ ID NO: 2283445 - RNA, 19 nt, Homo sapiens
  misc_RNA (1)...(19): siRNA sense strand
agguggaccgcguggacua

SEQ ID NO: 2283446 - RNA, 19 nt, Homo sapiens
  misc_RNA (1)...(19): siRNA sense strand
cggccaagccaguuccauu

SEQ ID NO: 2283447 - RNA, 19 nt, Homo sapiens
  misc_RNA (1)...(19): siRNA sense strand
agcuaaagaaggagaucca

SEQ ID NO: 2283448 - RNA, 19 nt, Homo sapiens
  misc_RNA (1)...(19): siRNA sense strand
gcguggacuaugacagaca

SEQ ID NO: 2283449 - RNA, 19 nt, Homo sapiens
  misc_RNA (1)...(19): siRNA sense strand
agauuggaguggcugacaa

SEQ ID NO: 2283450 - RNA, 19 nt, Homo sapiens
  misc_RNA (1)...(19): siRNA sense strand
agggacuaauugaugaaau

SEQ ID NO: 2283451 - RNA, 19 nt, Homo sapiens
  misc_RNA (1)...(19): siRNA sense strand
gagacaaacuagagcugag

SEQ ID NO: 2283452 - RNA, 19 nt, Homo sapiens
  misc_RNA (1)...(19): siRNA sense strand
ucagauauuuucaggaaca

SEQ ID NO: 2283453 - RNA, 19 nt, Homo sapiens
  misc_RNA (1)...(19): siRNA sense strand
gcuucugacaggaauggaa

SEQ ID NO: 2283454 - RNA, 19 nt, Homo sapiens
  misc_RNA (1)...(19): siRNA sense strand
gggaaauagaagaggaaau

SEQ ID NO: 2283455 - RNA, 19 nt, Homo sapiens
  misc_RNA (1)...(19): siRNA sense strand
gggaaggauuucacggaca

SEQ ID NO: 2283456 - RNA, 19 nt, Homo sapiens
  misc_RNA (1)...(19): siRNA sense strand
ggagaaucgaggagcucaa

SEQ ID NO: 2283457 - RNA, 19 nt, Homo sapiens
  misc_RNA (1)...(19): siRNA sense strand
ccgagaaacuaaagcacca

SEQ ID NO: 2283458 - RNA, 19 nt, Homo sapiens
  misc_RNA (1)...(19): siRNA sense strand
aggccaaaguggugugcuu

SEQ ID NO: 2283459 - RNA, 19 nt, Homo sapiens
  misc_RNA (1)...(19): siRNA sense strand
ccaucgucaucgaggacua

SEQ ID NO: 2283460 - RNA, 19 nt, Homo sapiens
  misc_RNA (1)...(19): siRNA sense strand
ggcagauaaaggagagauu

SEQ ID NO: 2283461 - RNA, 19 nt, Homo sapiens
  misc_RNA (1)...(19): siRNA sense strand
cgacgaagcugacgcggau

SEQ ID NO: 2283462 - RNA, 19 nt, Homo sapiens
  misc_RNA (1)...(19): siRNA sense strand
uggacauauuggaagaaau

SEQ ID NO: 2283463 - RNA, 19 nt, Homo sapiens
  misc_RNA (1)...(19): siRNA sense strand
augggaacguggaggccaa

SEQ ID NO: 2283464 - RNA, 19 nt, Homo sapiens
  misc_RNA (1)...(19): siRNA sense strand
aagccaaauccgaaccaaa

SEQ ID NO: 2283465 - RNA, 19 nt, Homo sapiens
  misc_RNA (1)...(19): siRNA sense strand
gaagaaauaugguggcuug

SEQ ID NO: 2283466 - RNA, 19 nt, Homo sapiens
  misc_RNA (1)...(19): siRNA sense strand
ucgaggaagcccuggaaaa

SEQ ID NO: 2283467 - RNA, 19 nt, Homo sapiens
  misc_RNA (1)...(19): siRNA sense strand
uguuggacauauuggaaga

SEQ ID NO: 2283468 - RNA, 19 nt, Homo sapiens
  misc_RNA (1)...(19): siRNA sense strand
gggacgagauggaggagug

SEQ ID NO: 2283469 - RNA, 19 nt, Homo sapiens
  misc_RNA (1)...(19): siRNA sense strand
aggagagauucgaguagga

SEQ ID NO: 2283470 - RNA, 19 nt, Homo sapiens
  misc_RNA (1)...(19): siRNA sense strand
aguccuaccuggagcggga

SEQ ID NO: 2283471 - RNA, 19 nt, Homo sapiens
  misc_RNA (1)...(19): siRNA sense strand
agagcaaguuaaagcaagu

SEQ ID NO: 2283472 - RNA, 19 nt, Homo sapiens
  misc_RNA (1)...(19): siRNA sense strand
uaaaagaaggcgaggagga

SEQ ID NO: 2283473 - RNA, 19 nt, Homo sapiens
  misc_RNA (1)...(19): siRNA sense strand
ccaucaaggccgagugcac

SEQ ID NO: 2283474 - RNA, 19 nt, Homo sapiens
  misc_RNA (1)...(19): siRNA sense strand
ugaagcaggcgguacgcaa

SEQ ID NO: 2283475 - RNA, 19 nt, Homo sapiens
  misc_RNA (1)...(19): siRNA sense strand
gggcauggcaagagggcua

SEQ ID NO: 2283476 - RNA, 19 nt, Homo sapiens
  misc_RNA (1)...(19): siRNA sense strand
gugaaaagccagaaggaua

SEQ ID NO: 2283477 - RNA, 19 nt, Homo sapiens
  misc_RNA (1)...(19): siRNA sense strand
caagaaagaugaagagcga

SEQ ID NO: 2283478 - RNA, 19 nt, Homo sapiens
  misc_RNA (1)...(19): siRNA sense strand
ccaaggaagaugagaguga

SEQ ID NO: 2283479 - RNA, 19 nt, Homo sapiens
  misc_RNA (1)...(19): siRNA sense strand
gaugaagagcgaagggaau

SEQ ID NO: 2283480 - RNA, 19 nt, Homo sapiens
  misc_RNA (1)...(19): siRNA sense strand
augcagaguucuagcaaau

SEQ ID NO: 2283481 - RNA, 19 nt, Homo sapiens
  misc_RNA (1)...(19): siRNA sense strand
guuaaggcugagagagaua

SEQ ID NO: 2283482 - RNA, 19 nt, Homo sapiens
  misc_RNA (1)...(19): siRNA sense strand
agauaaagacacuaggaau

SEQ ID NO: 2283483 - RNA, 19 nt, Homo sapiens
  misc_RNA (1)...(19): siRNA sense strand
ccucaaguaaggaguguua

SEQ ID NO: 2283484 - RNA, 19 nt, Homo sapiens
  misc_RNA (1)...(19): siRNA sense strand
cagcaugaaaccagggaau

SEQ ID NO: 2283485 - RNA, 19 nt, Homo sapiens
  misc_RNA (1)...(19): siRNA sense strand
uugaaauguuggugggaca

SEQ ID NO: 2283486 - RNA, 19 nt, Homo sapiens
  misc_RNA (1)...(19): siRNA sense strand
ccauuaggaaauagagcaa

SEQ ID NO: 2283487 - RNA, 19 nt, Homo sapiens
  misc_RNA (1)...(19): siRNA sense strand
auguuaaggcugagagaga

SEQ ID NO: 2283488 - RNA, 19 nt, Homo sapiens
  misc_RNA (1)...(19): siRNA sense strand
acacaggcucagagauuaa

SEQ ID NO: 2283489 - RNA, 19 nt, Homo sapiens
  misc_RNA (1)...(19): siRNA sense strand
ggcaaauguuacaagaaau

SEQ ID NO: 2283490 - RNA, 19 nt, Homo sapiens
  misc_RNA (1)...(19): siRNA sense strand
agucagaaauccacccaaa

SEQ ID NO: 2283491 - RNA, 19 nt, Homo sapiens
  misc_RNA (1)...(19): siRNA sense strand
ccgcaaacagagcuggaaa

SEQ ID NO: 2283492 - RNA, 19 nt, Homo sapiens
  misc_RNA (1)...(19): siRNA sense strand
agucuaugauggugccaaa

SEQ ID NO: 2283493 - RNA, 19 nt, Homo sapiens
  misc_RNA (1)...(19): siRNA sense strand
gggauaaagaaaagaaaca

SEQ ID NO: 2283494 - RNA, 19 nt, Homo sapiens
  misc_RNA (1)...(19): siRNA sense strand
aaggaagaugagagugaaa

SEQ ID NO: 2283495 - RNA, 19 nt, Homo sapiens
  misc_RNA (1)...(19): siRNA sense strand
aaguauagaagcagcaauu

SEQ ID NO: 2283496 - RNA, 19 nt, Homo sapiens
  misc_RNA (1)...(19): siRNA sense strand
ggagcaacauguagaaaau

SEQ ID NO: 2283497 - RNA, 19 nt, Homo sapiens
  misc_RNA (1)...(19): siRNA sense strand
ccgaagaucgcuuaggcaa

SEQ ID NO: 2283498 - RNA, 19 nt, Homo sapiens
  misc_RNA (1)...(19): siRNA sense strand
acaaauucuucucggagua

SEQ ID NO: 2283499 - RNA, 19 nt, Homo sapiens
  misc_RNA (1)...(19): siRNA sense strand
agaugaagagcgaagggaa

SEQ ID NO: 2283500 - RNA, 19 nt, Homo sapiens
  misc_RNA (1)...(19): siRNA sense strand
ggugauaugaugagccuau

SEQ ID NO: 2283501 - RNA, 19 nt, Homo sapiens
  misc_RNA (1)...(19): siRNA sense strand
cggcaagauagcauggauu

SEQ ID NO: 2283502 - RNA, 19 nt, Homo sapiens
  misc_RNA (1)...(19): siRNA sense strand
acaaacaccauuagaaaca

SEQ ID NO: 2283503 - RNA, 19 nt, Homo sapiens
  misc_RNA (1)...(19): siRNA sense strand
gagugaugauaacgaggaa

SEQ ID NO: 2283504 - RNA, 19 nt, Homo sapiens
  misc_RNA (1)...(19): siRNA sense strand
gugaugauaacgaggaaga

SEQ ID NO: 2283505 - RNA, 19 nt, Homo sapiens
  misc_RNA (1)...(19): siRNA sense strand
gaugauaacgaggaagaaa

SEQ ID NO: 2283506 - RNA, 19 nt, Homo sapiens
  misc_RNA (1)...(19): siRNA sense strand
uggaaagcauccugaacau

SEQ ID NO: 2283507 - RNA, 19 nt, Homo sapiens
  misc_RNA (1)...(19): siRNA sense strand
cauacgagucaaucaguaa

SEQ ID NO: 2283508 - RNA, 19 nt, Homo sapiens
  misc_RNA (1)...(19): siRNA sense strand
gaaaaguaugcguguauua

SEQ ID NO: 2283509 - RNA, 19 nt, Homo sapiens
  misc_RNA (1)...(19): siRNA sense strand
agucuauguuugugaagau

SEQ ID NO: 2283510 - RNA, 19 nt, Homo sapiens
  misc_RNA (1)...(19): siRNA sense strand
gaauaggagcauuugguga

SEQ ID NO: 2283511 - RNA, 19 nt, Homo sapiens
  misc_RNA (1)...(19): siRNA sense strand
aaucaaggacagagaggca

SEQ ID NO: 2283512 - RNA, 19 nt, Homo sapiens
  misc_RNA (1)...(19): siRNA sense strand
cccaggaucaaaugagaaa

SEQ ID NO: 2283513 - RNA, 19 nt, Homo sapiens
  misc_RNA (1)...(19): siRNA sense strand
aggcaagaauggugcugau

SEQ ID NO: 2283514 - RNA, 19 nt, Homo sapiens
  misc_RNA (1)...(19): siRNA sense strand
cggaugaagaugaucaaaa

SEQ ID NO: 2283515 - RNA, 19 nt, Homo sapiens
  misc_RNA (1)...(19): siRNA sense strand
cuggauuugaugaggauau

SEQ ID NO: 2283516 - RNA, 19 nt, Homo sapiens
  misc_RNA (1)...(19): siRNA sense strand
guauagaagcagcaauuga

SEQ ID NO: 2283517 - RNA, 19 nt, Homo sapiens
  misc_RNA (1)...(19): siRNA sense strand
cagaaugguacuggacaaa

SEQ ID NO: 2283518 - RNA, 19 nt, Homo sapiens
  misc_RNA (1)...(19): siRNA sense strand
gaaacauggaauacguaau

SEQ ID NO: 2283519 - RNA, 19 nt, Homo sapiens
  misc_RNA (1)...(19): siRNA sense strand
ugauggugccaaacagaaa

SEQ ID NO: 2283520 - RNA, 19 nt, Homo sapiens
  misc_RNA (1)...(19): siRNA sense strand
guuacaagaaauucgggaa

SEQ ID NO: 2283521 - RNA, 19 nt, Homo sapiens
  misc_RNA (1)...(19): siRNA sense strand
agaaagaugaagagcgaag

SEQ ID NO: 2283522 - RNA, 19 nt, Homo sapiens
  misc_RNA (1)...(19): siRNA sense strand
caggaucaaaugagaaaga

SEQ ID NO: 2283523 - RNA, 19 nt, Homo sapiens
  misc_RNA (1)...(19): siRNA sense strand
acuaggaauaggagcauuu

SEQ ID NO: 2283524 - RNA, 19 nt, Homo sapiens
  misc_RNA (1)...(19): siRNA sense strand
ugaaaucccuacauggcaa

SEQ ID NO: 2283525 - RNA, 19 nt, Homo sapiens
  misc_RNA (1)...(19): siRNA sense strand
gugaaaaguaugcguguau

SEQ ID NO: 2283526 - RNA, 19 nt, Homo sapiens
  misc_RNA (1)...(19): siRNA sense strand
gcaaagaggaucagccaag

SEQ ID NO: 2283527 - RNA, 19 nt, Homo sapiens
  misc_RNA (1)...(19): siRNA sense strand
gccagaaggauauagacaa

SEQ ID NO: 2283528 - RNA, 19 nt, Homo sapiens
  misc_RNA (1)...(19): siRNA sense strand
aauaggagcauuuggugaa

SEQ ID NO: 2283529 - RNA, 19 nt, Homo sapiens
  misc_RNA (1)...(19): siRNA sense strand
guggaguguugguguuauu

SEQ ID NO: 2283530 - RNA, 19 nt, Homo sapiens
  misc_RNA (1)...(19): siRNA sense strand
gcgaucuaguauauguuua

SEQ ID NO: 2283531 - RNA, 19 nt, Homo sapiens
  misc_RNA (1)...(19): siRNA sense strand
auaaagccuugcaggaaau

SEQ ID NO: 2283532 - RNA, 19 nt, Homo sapiens
  misc_RNA (1)...(19): siRNA sense strand
agagagauauccuggcuga

SEQ ID NO: 2283533 - RNA, 19 nt, Homo sapiens
  misc_RNA (1)...(19): siRNA sense strand
ccacaaaugcuucaagacu

SEQ ID NO: 2283534 - RNA, 19 nt, Homo sapiens
  misc_RNA (1)...(19): siRNA sense strand
uggcugaagcugacaauga

SEQ ID NO: 2283535 - RNA, 19 nt, Homo sapiens
  misc_RNA (1)...(19): siRNA sense strand
caugaauccuccuaaucaa

SEQ ID NO: 2283536 - RNA, 19 nt, Homo sapiens
  misc_RNA (1)...(19): siRNA sense strand
aaugaugcggguuggauua

SEQ ID NO: 2283537 - RNA, 19 nt, Homo sapiens
  misc_RNA (1)...(19): siRNA sense strand
acuaaggcuuuguaugcaa

SEQ ID NO: 2283538 - RNA, 19 nt, Homo sapiens
  misc_RNA (1)...(19): siRNA sense strand
ugaaaagccagaaggauau

SEQ ID NO: 2283539 - RNA, 19 nt, Homo sapiens
  misc_RNA (1)...(19): siRNA sense strand
cauuccaagauaaggacaa

SEQ ID NO: 2283540 - RNA, 19 nt, Homo sapiens
  misc_RNA (1)...(19): siRNA sense strand
augauaacgaggaagaaaa

SEQ ID NO: 2283541 - RNA, 19 nt, Homo sapiens
  misc_RNA (1)...(19): siRNA sense strand
uauaauuauccgaagccua

SEQ ID NO: 2283542 - RNA, 19 nt, Homo sapiens
  misc_RNA (1)...(19): siRNA sense strand
cagaaagugaaguggcauu

SEQ ID NO: 2283543 - RNA, 19 nt, Homo sapiens
  misc_RNA (1)...(19): siRNA sense strand
ccgaauggaaccagugaca

SEQ ID NO: 2283544 - RNA, 19 nt, Homo sapiens
  misc_RNA (1)...(19): siRNA sense strand
cccaugaggaaauuggaaa

SEQ ID NO: 2283545 - RNA, 19 nt, Homo sapiens
  misc_RNA (1)...(19): siRNA sense strand
uggcaaauggggugaugaa

SEQ ID NO: 2283546 - RNA, 19 nt, Homo sapiens
  misc_RNA (1)...(19): siRNA sense strand
cagugacagcccuggguau

SEQ ID NO: 2283547 - RNA, 19 nt, Homo sapiens
  misc_RNA (1)...(19): siRNA sense strand
aaauucaggaggagcucaa

SEQ ID NO: 2283548 - RNA, 19 nt, Homo sapiens
  misc_RNA (1)...(19): siRNA sense strand
guauccaggucgagguucu

SEQ ID NO: 2283549 - RNA, 19 nt, Homo sapiens
  misc_RNA (1)...(19): siRNA sense strand
cagaaagugaaguggcauu

SEQ ID NO: 2283550 - RNA, 19 nt, Homo sapiens
  misc_RNA (1)...(19): siRNA sense strand
ccgaauggaaccagugaca

SEQ ID NO: 2283551 - RNA, 19 nt, Homo sapiens
  misc_RNA (1)...(19): siRNA sense strand
cccaugaggaaauuggaaa

SEQ ID NO: 2283552 - RNA, 19 nt, Homo sapiens
  misc_RNA (1)...(19): siRNA sense strand
uggcaaauggggugaugaa

SEQ ID NO: 2283553 - RNA, 19 nt, Homo sapiens
  misc_RNA (1)...(19): siRNA sense strand
cagugacagcccuggguau

SEQ ID NO: 2283554 - RNA, 19 nt, Homo sapiens
  misc_RNA (1)...(19): siRNA sense strand
aaauucaggaggagcucaa

SEQ ID NO: 2283555 - RNA, 19 nt, Homo sapiens
  misc_RNA (1)...(19): siRNA sense strand
guauccaggucgagguucu

SEQ ID NO: 2283556 - RNA, 19 nt, Homo sapiens
  misc_RNA (1)...(19): siRNA sense strand
ggguuaaggugaugcccaa

SEQ ID NO: 2283557 - RNA, 19 nt, Homo sapiens
  misc_RNA (1)...(19): siRNA sense strand
ggguaaaugcagagcuaca

SEQ ID NO: 2283558 - RNA, 19 nt, Homo sapiens
  misc_RNA (1)...(19): siRNA sense strand
gagaaaggaaauaugggaa

SEQ ID NO: 2283559 - RNA, 19 nt, Homo sapiens
  misc_RNA (1)...(19): siRNA sense strand
ucucaaugaaguagccaaa

SEQ ID NO: 2283560 - RNA, 19 nt, Homo sapiens
  misc_RNA (1)...(19): siRNA sense strand
acaaaguggucguggggau

SEQ ID NO: 2283561 - RNA, 19 nt, Homo sapiens
  misc_RNA (1)...(19): siRNA sense strand
agucaauguucuggaguga

SEQ ID NO: 2283562 - RNA, 19 nt, Homo sapiens
  misc_RNA (1)...(19): siRNA sense strand
uggaagauuggcuggagaa

SEQ ID NO: 2283563 - RNA, 19 nt, Homo sapiens
  misc_RNA (1)...(19): siRNA sense strand
guggaagauuggcuggaga

SEQ ID NO: 2283564 - RNA, 19 nt, Homo sapiens
  misc_RNA (1)...(19): siRNA sense strand
cggcaggaagguagaaacu

SEQ ID NO: 2283565 - RNA, 19 nt, Homo sapiens
  misc_RNA (1)...(19): siRNA sense strand
ccgaucagagagugagaca

SEQ ID NO: 2283566 - RNA, 19 nt, Homo sapiens
  misc_RNA (1)...(19): siRNA sense strand
cgagaaaggaaauauggga

SEQ ID NO: 2283567 - RNA, 19 nt, Homo sapiens
  misc_RNA (1)...(19): siRNA sense strand
agguagaaacugaccacau

SEQ ID NO: 2283568 - RNA, 19 nt, Homo sapiens
  misc_RNA (1)...(19): siRNA sense strand
ccacagagcagucaggaac

SEQ ID NO: 2283569 - RNA, 19 nt, Homo sapiens
  misc_RNA (1)...(19): siRNA sense strand
agacagaguccgaggccuc

SEQ ID NO: 2283570 - RNA, 19 nt, Homo sapiens
  misc_RNA (1)...(19): siRNA sense strand
aggaaauaugggaaagauc

SEQ ID NO: 2283571 - RNA, 19 nt, Homo sapiens
  misc_RNA (1)...(19): siRNA sense strand
gcugaaagacggcaggaag

SEQ ID NO: 2283572 - RNA, 19 nt, Homo sapiens
  misc_RNA (1)...(19): siRNA sense strand
ggguuaaggugaugcccaa

SEQ ID NO: 2283573 - RNA, 19 nt, Homo sapiens
  misc_RNA (1)...(19): siRNA sense strand
ggguaaaugcagagcuaca

SEQ ID NO: 2283574 - RNA, 19 nt, Homo sapiens
  misc_RNA (1)...(19): siRNA sense strand
gagaaaggaaauaugggaa

SEQ ID NO: 2283575 - RNA, 19 nt, Homo sapiens
  misc_RNA (1)...(19): siRNA sense strand
ucucaaugaaguagccaaa

SEQ ID NO: 2283576 - RNA, 19 nt, Homo sapiens
  misc_RNA (1)...(19): siRNA sense strand
acaaaguggucguggggau

SEQ ID NO: 2283577 - RNA, 19 nt, Homo sapiens
  misc_RNA (1)...(19): siRNA sense strand
agucaauguucuggaguga

SEQ ID NO: 2283578 - RNA, 19 nt, Homo sapiens
  misc_RNA (1)...(19): siRNA sense strand
uggaagauuggcuggagaa

SEQ ID NO: 2283579 - RNA, 19 nt, Homo sapiens
  misc_RNA (1)...(19): siRNA sense strand
guggaagauuggcuggaga

SEQ ID NO: 2283580 - RNA, 19 nt, Homo sapiens
  misc_RNA (1)...(19): siRNA sense strand
cggcaggaagguagaaacu

SEQ ID NO: 2283581 - RNA, 19 nt, Homo sapiens
  misc_RNA (1)...(19): siRNA sense strand
ccgaucagagagugagaca

SEQ ID NO: 2283582 - RNA, 19 nt, Homo sapiens
  misc_RNA (1)...(19): siRNA sense strand
cgagaaaggaaauauggga

SEQ ID NO: 2283583 - RNA, 19 nt, Homo sapiens
  misc_RNA (1)...(19): siRNA sense strand
agguagaaacugaccacau

SEQ ID NO: 2283584 - RNA, 19 nt, Homo sapiens
  misc_RNA (1)...(19): siRNA sense strand
ccacagagcagucaggaac

SEQ ID NO: 2283585 - RNA, 19 nt, Homo sapiens
  misc_RNA (1)...(19): siRNA sense strand
agacagaguccgaggccuc

SEQ ID NO: 2283586 - RNA, 19 nt, Homo sapiens
  misc_RNA (1)...(19): siRNA sense strand
aggaaauaugggaaagauc

SEQ ID NO: 2283587 - RNA, 19 nt, Homo sapiens
  misc_RNA (1)...(19): siRNA sense strand
gcugaaagacggcaggaag

SEQ ID NO: 2283588 - RNA, 19 nt, Homo sapiens
  misc_RNA (1)...(19): siRNA sense strand
ggguuaaggugaugcccaa

SEQ ID NO: 2283589 - RNA, 19 nt, Homo sapiens
  misc_RNA (1)...(19): siRNA sense strand
ggguaaaugcagagcuaca

SEQ ID NO: 2283590 - RNA, 19 nt, Homo sapiens
  misc_RNA (1)...(19): siRNA sense strand
gagaaaggaaauaugggaa

SEQ ID NO: 2283591 - RNA, 19 nt, Homo sapiens
  misc_RNA (1)...(19): siRNA sense strand
ucucaaugaaguagccaaa

SEQ ID NO: 2283592 - RNA, 19 nt, Homo sapiens
  misc_RNA (1)...(19): siRNA sense strand
acaaaguggucguggggau

SEQ ID NO: 2283593 - RNA, 19 nt, Homo sapiens
  misc_RNA (1)...(19): siRNA sense strand
agucaauguucuggaguga

SEQ ID NO: 2283594 - RNA, 19 nt, Homo sapiens
  misc_RNA (1)...(19): siRNA sense strand
uggaagauuggcuggagaa

SEQ ID NO: 2283595 - RNA, 19 nt, Homo sapiens
  misc_RNA (1)...(19): siRNA sense strand
guggaagauuggcuggaga

SEQ ID NO: 2283596 - RNA, 19 nt, Homo sapiens
  misc_RNA (1)...(19): siRNA sense strand
cggcaggaagguagaaacu

SEQ ID NO: 2283597 - RNA, 19 nt, Homo sapiens
  misc_RNA (1)...(19): siRNA sense strand
ccgaucagagagugagaca

SEQ ID NO: 2283598 - RNA, 19 nt, Homo sapiens
  misc_RNA (1)...(19): siRNA sense strand
cgagaaaggaaauauggga

SEQ ID NO: 2283599 - RNA, 19 nt, Homo sapiens
  misc_RNA (1)...(19): siRNA sense strand
agguagaaacugaccacau

SEQ ID NO: 2283600 - RNA, 19 nt, Homo sapiens
  misc_RNA (1)...(19): siRNA sense strand
ccacagagcagucaggaac

SEQ ID NO: 2283601 - RNA, 19 nt, Homo sapiens
  misc_RNA (1)...(19): siRNA sense strand
agacagaguccgaggccuc

SEQ ID NO: 2283602 - RNA, 19 nt, Homo sapiens
  misc_RNA (1)...(19): siRNA sense strand
aggaaauaugggaaagauc

SEQ ID NO: 2283603 - RNA, 19 nt, Homo sapiens
  misc_RNA (1)...(19): siRNA sense strand
gcugaaagacggcaggaag

SEQ ID NO: 2283604 - RNA, 19 nt, Homo sapiens
  misc_RNA (1)...(19): siRNA sense strand
aggaaguagcagaggagaa

SEQ ID NO: 2283605 - RNA, 19 nt, Homo sapiens
  misc_RNA (1)...(19): siRNA sense strand
uggucaagguggagaagca

SEQ ID NO: 2283606 - RNA, 19 nt, Homo sapiens
  misc_RNA (1)...(19): siRNA sense strand
ucaaguuccugguggccaa

SEQ ID NO: 2283607 - RNA, 19 nt, Homo sapiens
  misc_RNA (1)...(19): siRNA sense strand
aggacgucauugagcagua

SEQ ID NO: 2283608 - RNA, 19 nt, Homo sapiens
  misc_RNA (1)...(19): siRNA sense strand
gcguggucaagguggagaa

SEQ ID NO: 2283609 - RNA, 19 nt, Homo sapiens
  misc_RNA (1)...(19): siRNA sense strand
cagaggaaguagcagagga

SEQ ID NO: 2283610 - RNA, 19 nt, Homo sapiens
  misc_RNA (1)...(19): siRNA sense strand
ucuuggaauucgugaugau

SEQ ID NO: 2283611 - RNA, 19 nt, Homo sapiens
  misc_RNA (1)...(19): siRNA sense strand
gcucaguggucuacgcgca

SEQ ID NO: 2283612 - RNA, 19 nt, Homo sapiens
  misc_RNA (1)...(19): siRNA sense strand
gggacgauuacauugacaa

SEQ ID NO: 2283613 - RNA, 19 nt, Homo sapiens
  misc_RNA (1)...(19): siRNA sense strand
gcgcauagcaaggagcuga

SEQ ID NO: 2283614 - RNA, 19 nt, Homo sapiens
  misc_RNA (1)...(19): siRNA sense strand
aaaaggaaauucaaggaga

SEQ ID NO: 2283615 - RNA, 19 nt, Homo sapiens
  misc_RNA (1)...(19): siRNA sense strand
aggaaguagcagaggagaa

SEQ ID NO: 2283616 - RNA, 19 nt, Homo sapiens
  misc_RNA (1)...(19): siRNA sense strand
uggucaagguggagaagca

SEQ ID NO: 2283617 - RNA, 19 nt, Homo sapiens
  misc_RNA (1)...(19): siRNA sense strand
ucaaguuccugguggccaa

SEQ ID NO: 2283618 - RNA, 19 nt, Homo sapiens
  misc_RNA (1)...(19): siRNA sense strand
aggacgucauugagcagua

SEQ ID NO: 2283619 - RNA, 19 nt, Homo sapiens
  misc_RNA (1)...(19): siRNA sense strand
gcguggucaagguggagaa

SEQ ID NO: 2283620 - RNA, 19 nt, Homo sapiens
  misc_RNA (1)...(19): siRNA sense strand
cagaggaaguagcagagga

SEQ ID NO: 2283621 - RNA, 19 nt, Homo sapiens
  misc_RNA (1)...(19): siRNA sense strand
ucuuggaauucgugaugau

SEQ ID NO: 2283622 - RNA, 19 nt, Homo sapiens
  misc_RNA (1)...(19): siRNA sense strand
gcucaguggucuacgcgca

SEQ ID NO: 2283623 - RNA, 19 nt, Homo sapiens
  misc_RNA (1)...(19): siRNA sense strand
gggacgauuacauugacaa

SEQ ID NO: 2283624 - RNA, 19 nt, Homo sapiens
  misc_RNA (1)...(19): siRNA sense strand
gcgcauagcaaggagcuga

SEQ ID NO: 2283625 - RNA, 19 nt, Homo sapiens
  misc_RNA (1)...(19): siRNA sense strand
aaaaggaaauucaaggaga

SEQ ID NO: 2283626 - RNA, 19 nt, Homo sapiens
  misc_RNA (1)...(19): siRNA sense strand
cuuagauggaagagauaua

SEQ ID NO: 2283627 - RNA, 19 nt, Homo sapiens
  misc_RNA (1)...(19): siRNA sense strand
gguucuaggacaaggaaaa

SEQ ID NO: 2283628 - RNA, 19 nt, Homo sapiens
  misc_RNA (1)...(19): siRNA sense strand
ccaugaaggaagagaaucu

SEQ ID NO: 2283629 - RNA, 19 nt, Homo sapiens
  misc_RNA (1)...(19): siRNA sense strand
gcuucaauuaguugggauu

SEQ ID NO: 2283630 - RNA, 19 nt, Homo sapiens
  misc_RNA (1)...(19): siRNA sense strand
gcgaacuguuuuagaagaa

SEQ ID NO: 2283631 - RNA, 19 nt, Homo sapiens
  misc_RNA (1)...(19): siRNA sense strand
uggccaagaauguggugaa

SEQ ID NO: 2283632 - RNA, 19 nt, Homo sapiens
  misc_RNA (1)...(19): siRNA sense strand
cuuccaaguaugaggagau

SEQ ID NO: 2283633 - RNA, 19 nt, Homo sapiens
  misc_RNA (1)...(19): siRNA sense strand
aaaccaguacagauggaaa

SEQ ID NO: 2283634 - RNA, 19 nt, Homo sapiens
  misc_RNA (1)...(19): siRNA sense strand
acucaaaagccgucaaaga

SEQ ID NO: 2283635 - RNA, 19 nt, Homo sapiens
  misc_RNA (1)...(19): siRNA sense strand
aaauagaguuacaaccaga

SEQ ID NO: 2283636 - RNA, 19 nt, Homo sapiens
  misc_RNA (1)...(19): siRNA sense strand
agauauaaauggacgcaug

SEQ ID NO: 2283637 - RNA, 19 nt, Homo sapiens
  misc_RNA (1)...(19): siRNA sense strand
cuucuuaaggcgagcauca

SEQ ID NO: 2283638 - RNA, 19 nt, Homo sapiens
  misc_RNA (1)...(19): siRNA sense strand
cagcaguauuacacaggau

SEQ ID NO: 2283639 - RNA, 19 nt, Homo sapiens
  misc_RNA (1)...(19): siRNA sense strand
agcacaaguagcuaagaaa

SEQ ID NO: 2283640 - RNA, 19 nt, Homo sapiens
  misc_RNA (1)...(19): siRNA sense strand
gauaacgaagauugggaga

SEQ ID NO: 2283641 - RNA, 19 nt, Homo sapiens
  misc_RNA (1)...(19): siRNA sense strand
cuaagaaagcucagaacac

SEQ ID NO: 2283642 - RNA, 19 nt, Homo sapiens
  misc_RNA (1)...(19): siRNA sense strand
ugucaacaaacaacugaaa

SEQ ID NO: 2283643 - RNA, 19 nt, Homo sapiens
  misc_RNA (1)...(19): siRNA sense strand
ggacaaggaaaauggaacu

SEQ ID NO: 2283644 - RNA, 19 nt, Homo sapiens
  misc_RNA (1)...(19): siRNA sense strand
agagaaugaaguauuggaa

SEQ ID NO: 2283645 - RNA, 19 nt, Homo sapiens
  misc_RNA (1)...(19): siRNA sense strand
gcaugaucccucagcugaa

SEQ ID NO: 2283646 - RNA, 19 nt, Homo sapiens
  misc_RNA (1)...(19): siRNA sense strand
cuccaugaaggaagagaau

SEQ ID NO: 2283647 - RNA, 19 nt, Homo sapiens
  misc_RNA (1)...(19): siRNA sense strand
uggaagucaugcagcacau

SEQ ID NO: 2283648 - RNA, 19 nt, Homo sapiens
  misc_RNA (1)...(19): siRNA sense strand
agugacuacguuaaggaua

SEQ ID NO: 2283649 - RNA, 19 nt, Homo sapiens
  misc_RNA (1)...(19): siRNA sense strand
ccgagaaauggaaacucua

SEQ ID NO: 2283650 - RNA, 19 nt, Homo sapiens
  misc_RNA (1)...(19): siRNA sense strand
cacaggauacacagagaau

SEQ ID NO: 2283651 - RNA, 19 nt, Homo sapiens
  misc_RNA (1)...(19): siRNA sense strand
gcaaaaucgaggacauuga

SEQ ID NO: 2283652 - RNA, 19 nt, Homo sapiens
  misc_RNA (1)...(19): siRNA sense strand
ccuccauugaagugguuaa

SEQ ID NO: 2283653 - RNA, 19 nt, Homo sapiens
  misc_RNA (1)...(19): siRNA sense strand
cugaagacuuuuaagaaga

SEQ ID NO: 2283654 - RNA, 19 nt, Homo sapiens
  misc_RNA (1)...(19): siRNA sense strand
ccucagguuuggaguggga

SEQ ID NO: 2283655 - RNA, 19 nt, Homo sapiens
  misc_RNA (1)...(19): siRNA sense strand
uuuagagguaugugaagua

SEQ ID NO: 2283656 - RNA, 19 nt, Homo sapiens
  misc_RNA (1)...(19): siRNA sense strand
auacacacuucauagggaa

SEQ ID NO: 2283657 - RNA, 19 nt, Homo sapiens
  misc_RNA (1)...(19): siRNA sense strand
guuuggagugggacaguau

SEQ ID NO: 2283658 - RNA, 19 nt, Homo sapiens
  misc_RNA (1)...(19): siRNA sense strand
ucaaaagaagucuggcuaa

SEQ ID NO: 2283659 - RNA, 19 nt, Homo sapiens
  misc_RNA (1)...(19): siRNA sense strand
ccuccauugaagugguuaa

SEQ ID NO: 2283660 - RNA, 19 nt, Homo sapiens
  misc_RNA (1)...(19): siRNA sense strand
gccaagaagaggaaaacua

SEQ ID NO: 2283661 - RNA, 19 nt, Homo sapiens
  misc_RNA (1)...(19): siRNA sense strand
cugaagacuuuuaagaaga

SEQ ID NO: 2283662 - RNA, 19 nt, Homo sapiens
  misc_RNA (1)...(19): siRNA sense strand
acgaaguagccguuuacaa

SEQ ID NO: 2283663 - RNA, 19 nt, Homo sapiens
  misc_RNA (1)...(19): siRNA sense strand
cccagauaauccaggccaa

SEQ ID NO: 2283664 - RNA, 19 nt, Homo sapiens
  misc_RNA (1)...(19): siRNA sense strand
ccucagguuuggaguggga

SEQ ID NO: 2283665 - RNA, 19 nt, Homo sapiens
  misc_RNA (1)...(19): siRNA sense strand
cagcccagccagacggaau

SEQ ID NO: 2283666 - RNA, 19 nt, Homo sapiens
  misc_RNA (1)...(19): siRNA sense strand
agauaauccaggccaagaa

SEQ ID NO: 2283667 - RNA, 19 nt, Homo sapiens
  misc_RNA (1)...(19): siRNA sense strand
uuuagagguaugugaagua

SEQ ID NO: 2283668 - RNA, 19 nt, Homo sapiens
  misc_RNA (1)...(19): siRNA sense strand
auacacacuucauagggaa

SEQ ID NO: 2283669 - RNA, 19 nt, Homo sapiens
  misc_RNA (1)...(19): siRNA sense strand
guuuggagugggacaguau

SEQ ID NO: 2283670 - RNA, 19 nt, Homo sapiens
  misc_RNA (1)...(19): siRNA sense strand
caggccaagaagaggaaaa

SEQ ID NO: 2283671 - RNA, 19 nt, Homo sapiens
  misc_RNA (1)...(19): siRNA sense strand
ucaaaagaagucuggcuaa

SEQ ID NO: 2283672 - RNA, 19 nt, Homo sapiens
  misc_RNA (1)...(19): siRNA sense strand
ccuccauugaagugguuaa

SEQ ID NO: 2283673 - RNA, 19 nt, Homo sapiens
  misc_RNA (1)...(19): siRNA sense strand
gccaagaagaggaaaacua

SEQ ID NO: 2283674 - RNA, 19 nt, Homo sapiens
  misc_RNA (1)...(19): siRNA sense strand
cugaagacuuuuaagaaga

SEQ ID NO: 2283675 - RNA, 19 nt, Homo sapiens
  misc_RNA (1)...(19): siRNA sense strand
acgaaguagccguuuacaa

SEQ ID NO: 2283676 - RNA, 19 nt, Homo sapiens
  misc_RNA (1)...(19): siRNA sense strand
cccagauaauccaggccaa

SEQ ID NO: 2283677 - RNA, 19 nt, Homo sapiens
  misc_RNA (1)...(19): siRNA sense strand
ccucagguuuggaguggga

SEQ ID NO: 2283678 - RNA, 19 nt, Homo sapiens
  misc_RNA (1)...(19): siRNA sense strand
cagcccagccagacggaau

SEQ ID NO: 2283679 - RNA, 19 nt, Homo sapiens
  misc_RNA (1)...(19): siRNA sense strand
agauaauccaggccaagaa

SEQ ID NO: 2283680 - RNA, 19 nt, Homo sapiens
  misc_RNA (1)...(19): siRNA sense strand
uuuagagguaugugaagua

SEQ ID NO: 2283681 - RNA, 19 nt, Homo sapiens
  misc_RNA (1)...(19): siRNA sense strand
auacacacuucauagggaa

SEQ ID NO: 2283682 - RNA, 19 nt, Homo sapiens
  misc_RNA (1)...(19): siRNA sense strand
guuuggagugggacaguau

SEQ ID NO: 2283683 - RNA, 19 nt, Homo sapiens
  misc_RNA (1)...(19): siRNA sense strand
caggccaagaagaggaaaa

SEQ ID NO: 2283684 - RNA, 19 nt, Homo sapiens
  misc_RNA (1)...(19): siRNA sense strand
ucaaaagaagucuggcuaa

SEQ ID NO: 2283685 - RNA, 19 nt, Homo sapiens
  misc_RNA (1)...(19): siRNA sense strand
aggaguuggaggaggaauu

SEQ ID NO: 2283686 - RNA, 19 nt, Homo sapiens
  misc_RNA (1)...(19): siRNA sense strand
uggaggaguuggaggagga

SEQ ID NO: 2283687 - RNA, 19 nt, Homo sapiens
  misc_RNA (1)...(19): siRNA sense strand
agacaaacucagaagagca

SEQ ID NO: 2283688 - RNA, 19 nt, Homo sapiens
  misc_RNA (1)...(19): siRNA sense strand
uauacgagcugguggcaca

SEQ ID NO: 2283689 - RNA, 19 nt, Homo sapiens
  misc_RNA (1)...(19): siRNA sense strand
aagcagagguugaugccga

SEQ ID NO: 2283690 - RNA, 19 nt, Homo sapiens
  misc_RNA (1)...(19): siRNA sense strand
agacugugucggagcggaa

SEQ ID NO: 2283691 - RNA, 19 nt, Homo sapiens
  misc_RNA (1)...(19): siRNA sense strand
ccaugaagcagcuggagga

SEQ ID NO: 2283692 - RNA, 19 nt, Homo sapiens
  misc_RNA (1)...(19): siRNA sense strand
agaagaaauugguccacga

SEQ ID NO: 2283693 - RNA, 19 nt, Homo sapiens
  misc_RNA (1)...(19): siRNA sense strand
cgagaagccaggugcuaca

SEQ ID NO: 2283694 - RNA, 19 nt, Homo sapiens
  misc_RNA (1)...(19): siRNA sense strand
gcccacagaacgggagaaa

SEQ ID NO: 2283695 - RNA, 19 nt, Homo sapiens
  misc_RNA (1)...(19): siRNA sense strand
ccuuggaggagcugcagaa

SEQ ID NO: 2283696 - RNA, 19 nt, Homo sapiens
  misc_RNA (1)...(19): siRNA sense strand
ugacuaaggacaaggcagu

SEQ ID NO: 2283697 - RNA, 19 nt, Homo sapiens
  misc_RNA (1)...(19): siRNA sense strand
ccaagcggcucaugggcau

SEQ ID NO: 2283698 - RNA, 19 nt, Homo sapiens
  misc_RNA (1)...(19): siRNA sense strand
gugcaaagccagcagguag

SEQ ID NO: 2283699 - RNA, 19 nt, Homo sapiens
  misc_RNA (1)...(19): siRNA sense strand
uggacaucaccaagaagaa

SEQ ID NO: 2283700 - RNA, 19 nt, Homo sapiens
  misc_RNA (1)...(19): siRNA sense strand
caaacucagaagagcaaaa

SEQ ID NO: 2283701 - RNA, 19 nt, Homo sapiens
  misc_RNA (1)...(19): siRNA sense strand
aggaaauccaggagaaccu

SEQ ID NO: 2283702 - RNA, 19 nt, Homo sapiens
  misc_RNA (1)...(19): siRNA sense strand
aggacaaggcaguggaggu

SEQ ID NO: 2283703 - RNA, 19 nt, Homo sapiens
  misc_RNA (1)...(19): siRNA sense strand
ggaugaggauuuugagaac

SEQ ID NO: 2283704 - RNA, 19 nt, Homo sapiens
  misc_RNA (1)...(19): siRNA sense strand
aggaguuggaggaggaauu

SEQ ID NO: 2283705 - RNA, 19 nt, Homo sapiens
  misc_RNA (1)...(19): siRNA sense strand
uggaggaguuggaggagga

SEQ ID NO: 2283706 - RNA, 19 nt, Homo sapiens
  misc_RNA (1)...(19): siRNA sense strand
agacaaacucagaagagca

SEQ ID NO: 2283707 - RNA, 19 nt, Homo sapiens
  misc_RNA (1)...(19): siRNA sense strand
uauacgagcugguggcaca

SEQ ID NO: 2283708 - RNA, 19 nt, Homo sapiens
  misc_RNA (1)...(19): siRNA sense strand
aagcagagguugaugccga

SEQ ID NO: 2283709 - RNA, 19 nt, Homo sapiens
  misc_RNA (1)...(19): siRNA sense strand
agacugugucggagcggaa

SEQ ID NO: 2283710 - RNA, 19 nt, Homo sapiens
  misc_RNA (1)...(19): siRNA sense strand
ccaugaagcagcuggagga

SEQ ID NO: 2283711 - RNA, 19 nt, Homo sapiens
  misc_RNA (1)...(19): siRNA sense strand
agaagaaauugguccacga

SEQ ID NO: 2283712 - RNA, 19 nt, Homo sapiens
  misc_RNA (1)...(19): siRNA sense strand
cgagaagccaggugcuaca

SEQ ID NO: 2283713 - RNA, 19 nt, Homo sapiens
  misc_RNA (1)...(19): siRNA sense strand
gcccacagaacgggagaaa

SEQ ID NO: 2283714 - RNA, 19 nt, Homo sapiens
  misc_RNA (1)...(19): siRNA sense strand
ccuuggaggagcugcagaa

SEQ ID NO: 2283715 - RNA, 19 nt, Homo sapiens
  misc_RNA (1)...(19): siRNA sense strand
ugacuaaggacaaggcagu

SEQ ID NO: 2283716 - RNA, 19 nt, Homo sapiens
  misc_RNA (1)...(19): siRNA sense strand
ccaagcggcucaugggcau

SEQ ID NO: 2283717 - RNA, 19 nt, Homo sapiens
  misc_RNA (1)...(19): siRNA sense strand
gugcaaagccagcagguag

SEQ ID NO: 2283718 - RNA, 19 nt, Homo sapiens
  misc_RNA (1)...(19): siRNA sense strand
uggacaucaccaagaagaa

SEQ ID NO: 2283719 - RNA, 19 nt, Homo sapiens
  misc_RNA (1)...(19): siRNA sense strand
caaacucagaagagcaaaa

SEQ ID NO: 2283720 - RNA, 19 nt, Homo sapiens
  misc_RNA (1)...(19): siRNA sense strand
aggaaauccaggagaaccu

SEQ ID NO: 2283721 - RNA, 19 nt, Homo sapiens
  misc_RNA (1)...(19): siRNA sense strand
aggacaaggcaguggaggu

SEQ ID NO: 2283722 - RNA, 19 nt, Homo sapiens
  misc_RNA (1)...(19): siRNA sense strand
ggaugaggauuuugagaac

SEQ ID NO: 2283723 - RNA, 19 nt, Homo sapiens
  misc_RNA (1)...(19): siRNA sense strand
aggaguuggaggaggaauu

SEQ ID NO: 2283724 - RNA, 19 nt, Homo sapiens
  misc_RNA (1)...(19): siRNA sense strand
uggaggaguuggaggagga

SEQ ID NO: 2283725 - RNA, 19 nt, Homo sapiens
  misc_RNA (1)...(19): siRNA sense strand
agacaaacucagaagagca

SEQ ID NO: 2283726 - RNA, 19 nt, Homo sapiens
  misc_RNA (1)...(19): siRNA sense strand
uauacgagcugguggcaca

SEQ ID NO: 2283727 - RNA, 19 nt, Homo sapiens
  misc_RNA (1)...(19): siRNA sense strand
aagcagagguugaugccga

SEQ ID NO: 2283728 - RNA, 19 nt, Homo sapiens
  misc_RNA (1)...(19): siRNA sense strand
agacugugucggagcggaa

SEQ ID NO: 2283729 - RNA, 19 nt, Homo sapiens
  misc_RNA (1)...(19): siRNA sense strand
ccaugaagcagcuggagga

SEQ ID NO: 2283730 - RNA, 19 nt, Homo sapiens
  misc_RNA (1)...(19): siRNA sense strand
agaagaaauugguccacga

SEQ ID NO: 2283731 - RNA, 19 nt, Homo sapiens
  misc_RNA (1)...(19): siRNA sense strand
cgagaagccaggugcuaca

SEQ ID NO: 2283732 - RNA, 19 nt, Homo sapiens
  misc_RNA (1)...(19): siRNA sense strand
gcccacagaacgggagaaa

SEQ ID NO: 2283733 - RNA, 19 nt, Homo sapiens
  misc_RNA (1)...(19): siRNA sense strand
ccuuggaggagcugcagaa

SEQ ID NO: 2283734 - RNA, 19 nt, Homo sapiens
  misc_RNA (1)...(19): siRNA sense strand
ugacuaaggacaaggcagu

SEQ ID NO: 2283735 - RNA, 19 nt, Homo sapiens
  misc_RNA (1)...(19): siRNA sense strand
ccaagcggcucaugggcau

SEQ ID NO: 2283736 - RNA, 19 nt, Homo sapiens
  misc_RNA (1)...(19): siRNA sense strand
gugcaaagccagcagguag

SEQ ID NO: 2283737 - RNA, 19 nt, Homo sapiens
  misc_RNA (1)...(19): siRNA sense strand
uggacaucaccaagaagaa

SEQ ID NO: 2283738 - RNA, 19 nt, Homo sapiens
  misc_RNA (1)...(19): siRNA sense strand
caaacucagaagagcaaaa

SEQ ID NO: 2283739 - RNA, 19 nt, Homo sapiens
  misc_RNA (1)...(19): siRNA sense strand
aggaaauccaggagaaccu

SEQ ID NO: 2283740 - RNA, 19 nt, Homo sapiens
  misc_RNA (1)...(19): siRNA sense strand
aggacaaggcaguggaggu

SEQ ID NO: 2283741 - RNA, 19 nt, Homo sapiens
  misc_RNA (1)...(19): siRNA sense strand
ggaugaggauuuugagaac

SEQ ID NO: 2283742 - RNA, 19 nt, Homo sapiens
  misc_RNA (1)...(19): siRNA sense strand
cugaauugcauuauggaaa

SEQ ID NO: 2283743 - RNA, 19 nt, Homo sapiens
  misc_RNA (1)...(19): siRNA sense strand
agagaggagagaagagaau

SEQ ID NO: 2283744 - RNA, 19 nt, Homo sapiens
  misc_RNA (1)...(19): siRNA sense strand
uauggaaaugguagagaaa

SEQ ID NO: 2283745 - RNA, 19 nt, Homo sapiens
  misc_RNA (1)...(19): siRNA sense strand
uggucuaaauggaggcuau

SEQ ID NO: 2283746 - RNA, 19 nt, Homo sapiens
  misc_RNA (1)...(19): siRNA sense strand
ggagcaaaccauagcggau

SEQ ID NO: 2283747 - RNA, 19 nt, Homo sapiens
  misc_RNA (1)...(19): siRNA sense strand
cuguggaagugaagauaca

SEQ ID NO: 2283748 - RNA, 19 nt, Homo sapiens
  misc_RNA (1)...(19): siRNA sense strand
caagaggaguccacggaga

SEQ ID NO: 2283749 - RNA, 19 nt, Homo sapiens
  misc_RNA (1)...(19): siRNA sense strand
ucgcugaggcagagcagaa

SEQ ID NO: 2283750 - RNA, 19 nt, Homo sapiens
  misc_RNA (1)...(19): siRNA sense strand
agugauugcaacagagaga

SEQ ID NO: 2283751 - RNA, 19 nt, Homo sapiens
  misc_RNA (1)...(19): siRNA sense strand
uggaaaugguagagaaaac

SEQ ID NO: 2283752 - RNA, 19 nt, Homo sapiens
  misc_RNA (1)...(19): siRNA sense strand
acggagaacugcuggaacu

SEQ ID NO: 2283753 - RNA, 19 nt, Homo sapiens
  misc_RNA (1)...(19): siRNA sense strand
ccuccugccaagagaguau

SEQ ID NO: 2283754 - RNA, 19 nt, Homo sapiens
  misc_RNA (1)...(19): siRNA sense strand
cguuugacagaaagggaau

SEQ ID NO: 2283755 - RNA, 19 nt, Homo sapiens
  misc_RNA (1)...(19): siRNA sense strand
gugcagauucucucagcaa

SEQ ID NO: 2283756 - RNA, 19 nt, Homo sapiens
  misc_RNA (1)...(19): siRNA sense strand
ugaaagaaauacagguccu

SEQ ID NO: 2283757 - RNA, 19 nt, Homo sapiens
  misc_RNA (1)...(19): siRNA sense strand
cagagaggagagaagagaa

SEQ ID NO: 2283758 - RNA, 19 nt, Homo sapiens
  misc_RNA (1)...(19): siRNA sense strand
cuggaauaagcuugaaaga

SEQ ID NO: 2283759 - RNA, 19 nt, Homo sapiens
  misc_RNA (1)...(19): siRNA sense strand
aagaggaguccacggagaa

SEQ ID NO: 2283760 - RNA, 19 nt, Homo sapiens
  misc_RNA (1)...(19): siRNA sense strand
gagaaaacaaggcgcucua

SEQ ID NO: 2283761 - RNA, 19 nt, Homo sapiens
  misc_RNA (1)...(19): siRNA sense strand
aaaccauagcggaugucaa

SEQ ID NO: 2283762 - RNA, 19 nt, Homo sapiens
  misc_RNA (1)...(19): siRNA sense strand
ucuaaauggaggcuaucaa

SEQ ID NO: 2283763 - RNA, 19 nt, Homo sapiens
  misc_RNA (1)...(19): siRNA sense strand
gcugaauugcauuauggaa

SEQ ID NO: 2283764 - RNA, 19 nt, Homo sapiens
  misc_RNA (1)...(19): siRNA sense strand
caacagcaggccagguaca

SEQ ID NO: 2283765 - RNA, 19 nt, Homo sapiens
  misc_RNA (1)...(19): siRNA sense strand
aacacagagcugaggaaaa

SEQ ID NO: 2283766 - RNA, 19 nt, Homo sapiens
  misc_RNA (1)...(19): siRNA sense strand
cugaauugcauuauggaaa

SEQ ID NO: 2283767 - RNA, 19 nt, Homo sapiens
  misc_RNA (1)...(19): siRNA sense strand
agagaggagagaagagaau

SEQ ID NO: 2283768 - RNA, 19 nt, Homo sapiens
  misc_RNA (1)...(19): siRNA sense strand
uauggaaaugguagagaaa

SEQ ID NO: 2283769 - RNA, 19 nt, Homo sapiens
  misc_RNA (1)...(19): siRNA sense strand
uggucuaaauggaggcuau

SEQ ID NO: 2283770 - RNA, 19 nt, Homo sapiens
  misc_RNA (1)...(19): siRNA sense strand
ggagcaaaccauagcggau

SEQ ID NO: 2283771 - RNA, 19 nt, Homo sapiens
  misc_RNA (1)...(19): siRNA sense strand
cuguggaagugaagauaca

SEQ ID NO: 2283772 - RNA, 19 nt, Homo sapiens
  misc_RNA (1)...(19): siRNA sense strand
caagaggaguccacggaga

SEQ ID NO: 2283773 - RNA, 19 nt, Homo sapiens
  misc_RNA (1)...(19): siRNA sense strand
ucgcugaggcagagcagaa

SEQ ID NO: 2283774 - RNA, 19 nt, Homo sapiens
  misc_RNA (1)...(19): siRNA sense strand
agugauugcaacagagaga

SEQ ID NO: 2283775 - RNA, 19 nt, Homo sapiens
  misc_RNA (1)...(19): siRNA sense strand
uggaaaugguagagaaaac

SEQ ID NO: 2283776 - RNA, 19 nt, Homo sapiens
  misc_RNA (1)...(19): siRNA sense strand
acggagaacugcuggaacu

SEQ ID NO: 2283777 - RNA, 19 nt, Homo sapiens
  misc_RNA (1)...(19): siRNA sense strand
ccuccugccaagagaguau

SEQ ID NO: 2283778 - RNA, 19 nt, Homo sapiens
  misc_RNA (1)...(19): siRNA sense strand
cguuugacagaaagggaau

SEQ ID NO: 2283779 - RNA, 19 nt, Homo sapiens
  misc_RNA (1)...(19): siRNA sense strand
gugcagauucucucagcaa

SEQ ID NO: 2283780 - RNA, 19 nt, Homo sapiens
  misc_RNA (1)...(19): siRNA sense strand
cagagaggagagaagagaa

SEQ ID NO: 2283781 - RNA, 19 nt, Homo sapiens
  misc_RNA (1)...(19): siRNA sense strand
aagaggaguccacggagaa

SEQ ID NO: 2283782 - RNA, 19 nt, Homo sapiens
  misc_RNA (1)...(19): siRNA sense strand
gagaaaacaaggcgcucua

SEQ ID NO: 2283783 - RNA, 19 nt, Homo sapiens
  misc_RNA (1)...(19): siRNA sense strand
aaaccauagcggaugucaa

SEQ ID NO: 2283784 - RNA, 19 nt, Homo sapiens
  misc_RNA (1)...(19): siRNA sense strand
ucuaaauggaggcuaucaa

SEQ ID NO: 2283785 - RNA, 19 nt, Homo sapiens
  misc_RNA (1)...(19): siRNA sense strand
gcugaauugcauuauggaa

SEQ ID NO: 2283786 - RNA, 19 nt, Homo sapiens
  misc_RNA (1)...(19): siRNA sense strand
caacagcaggccagguaca

SEQ ID NO: 2283787 - RNA, 19 nt, Homo sapiens
  misc_RNA (1)...(19): siRNA sense strand
aacacagagcugaggaaaa

SEQ ID NO: 2283788 - RNA, 19 nt, Homo sapiens
  misc_RNA (1)...(19): siRNA sense strand
cggcccaacaggaagcaaa

SEQ ID NO: 2283789 - RNA, 19 nt, Homo sapiens
  misc_RNA (1)...(19): siRNA sense strand
aaacaguaucuuagcccaa

SEQ ID NO: 2283790 - RNA, 19 nt, Homo sapiens
  misc_RNA (1)...(19): siRNA sense strand
gaagcaaagcacagggaag

SEQ ID NO: 2283791 - RNA, 19 nt, Homo sapiens
  misc_RNA (1)...(19): siRNA sense strand
caacaaacagaaaagacaa

SEQ ID NO: 2283792 - RNA, 19 nt, Homo sapiens
  misc_RNA (1)...(19): siRNA sense strand
guaacuuagcacuuguaaa

SEQ ID NO: 2283793 - RNA, 19 nt, Homo sapiens
  misc_RNA (1)...(19): siRNA sense strand
ccaacaaacagaaaagaca

SEQ ID NO: 2283794 - RNA, 19 nt, Homo sapiens
  misc_RNA (1)...(19): siRNA sense strand
gaaaagacaacaacaguga

SEQ ID NO: 2283795 - RNA, 19 nt, Homo sapiens
  misc_RNA (1)...(19): siRNA sense strand
gaagaaaaguaauggacuc

SEQ ID NO: 2283796 - RNA, 19 nt, Homo sapiens
  misc_RNA (1)...(19): siRNA sense strand
ccgcagaucagcagcguca

SEQ ID NO: 2283797 - RNA, 19 nt, Homo sapiens
  misc_RNA (1)...(19): siRNA sense strand
aggacaacccacugaacga

SEQ ID NO: 2283798 - RNA, 19 nt, Homo sapiens
  misc_RNA (1)...(19): siRNA sense strand
ccgcagaucagcagcguca

SEQ ID NO: 2283799 - RNA, 19 nt, Homo sapiens
  misc_RNA (1)...(19): siRNA sense strand
aggacaacccacugaacga

SEQ ID NO: 2283800 - RNA, 19 nt, Homo sapiens
  misc_RNA (1)...(19): siRNA sense strand
ccgcagaucagcagcguca

SEQ ID NO: 2283801 - RNA, 19 nt, Homo sapiens
  misc_RNA (1)...(19): siRNA sense strand
aggacaacccacugaacga

SEQ ID NO: 2283802 - RNA, 19 nt, Homo sapiens
  misc_RNA (1)...(19): siRNA sense strand
cuucaaggugguagaggaa

SEQ ID NO: 2283803 - RNA, 19 nt, Homo sapiens
  misc_RNA (1)...(19): siRNA sense strand
ccucaagagcugccggaga

SEQ ID NO: 2283804 - RNA, 19 nt, Homo sapiens
  misc_RNA (1)...(19): siRNA sense strand
uggacuuagacaaggaauu

SEQ ID NO: 2283805 - RNA, 19 nt, Homo sapiens
  misc_RNA (1)...(19): siRNA sense strand
ucaaggugcuaguggcuga

SEQ ID NO: 2283806 - RNA, 19 nt, Homo sapiens
  misc_RNA (1)...(19): siRNA sense strand
gcuuugagacagggaagaa

SEQ ID NO: 2283807 - RNA, 19 nt, Homo sapiens
  misc_RNA (1)...(19): siRNA sense strand
uggacauggacuuagacaa

SEQ ID NO: 2283808 - RNA, 19 nt, Homo sapiens
  misc_RNA (1)...(19): siRNA sense strand
cacuacucaucgagaggua

SEQ ID NO: 2283809 - RNA, 19 nt, Homo sapiens
  misc_RNA (1)...(19): siRNA sense strand
ucuucaaggugguagagga

SEQ ID NO: 2283810 - RNA, 19 nt, Homo sapiens
  misc_RNA (1)...(19): siRNA sense strand
cuucaaggugguagaggaa

SEQ ID NO: 2283811 - RNA, 19 nt, Homo sapiens
  misc_RNA (1)...(19): siRNA sense strand
ccucaagagcugccggaga

SEQ ID NO: 2283812 - RNA, 19 nt, Homo sapiens
  misc_RNA (1)...(19): siRNA sense strand
uggacuuagacaaggaauu

SEQ ID NO: 2283813 - RNA, 19 nt, Homo sapiens
  misc_RNA (1)...(19): siRNA sense strand
ucaaggugcuaguggcuga

SEQ ID NO: 2283814 - RNA, 19 nt, Homo sapiens
  misc_RNA (1)...(19): siRNA sense strand
gcuuugagacagggaagaa

SEQ ID NO: 2283815 - RNA, 19 nt, Homo sapiens
  misc_RNA (1)...(19): siRNA sense strand
uggacauggacuuagacaa

SEQ ID NO: 2283816 - RNA, 19 nt, Homo sapiens
  misc_RNA (1)...(19): siRNA sense strand
cacuacucaucgagaggua

SEQ ID NO: 2283817 - RNA, 19 nt, Homo sapiens
  misc_RNA (1)...(19): siRNA sense strand
ucuucaaggugguagagga

SEQ ID NO: 2283818 - RNA, 19 nt, Homo sapiens
  misc_RNA (1)...(19): siRNA sense strand
cggaaagugaugaggagga

SEQ ID NO: 2283819 - RNA, 19 nt, Homo sapiens
  misc_RNA (1)...(19): siRNA sense strand
agaagagggcuguggucau

SEQ ID NO: 2283820 - RNA, 19 nt, Homo sapiens
  misc_RNA (1)...(19): siRNA sense strand
cggaaacggaagccagaga

SEQ ID NO: 2283821 - RNA, 19 nt, Homo sapiens
  misc_RNA (1)...(19): siRNA sense strand
cggaagaagaagagaacaa

SEQ ID NO: 2283822 - RNA, 19 nt, Homo sapiens
  misc_RNA (1)...(19): siRNA sense strand
cgucagaacuauaagguca

SEQ ID NO: 2283823 - RNA, 19 nt, Homo sapiens
  misc_RNA (1)...(19): siRNA sense strand
agacggacuccaaggguaa

SEQ ID NO: 2283824 - RNA, 19 nt, Homo sapiens
  misc_RNA (1)...(19): siRNA sense strand
gaggagaagcugaggaacu

SEQ ID NO: 2283825 - RNA, 19 nt, Homo sapiens
  misc_RNA (1)...(19): siRNA sense strand
ggguaagacaccucaagaa

SEQ ID NO: 2283826 - RNA, 19 nt, Homo sapiens
  misc_RNA (1)...(19): siRNA sense strand
gcacaaugcccuggggaaa

SEQ ID NO: 2283827 - RNA, 19 nt, Homo sapiens
  misc_RNA (1)...(19): siRNA sense strand
cuuccgaguuauuggauau

SEQ ID NO: 2283828 - RNA, 19 nt, Homo sapiens
  misc_RNA (1)...(19): siRNA sense strand
aaauguaagcaguguggua

SEQ ID NO: 2283829 - RNA, 19 nt, Homo sapiens
  misc_RNA (1)...(19): siRNA sense strand
ucaaggucaccaagagaaa

SEQ ID NO: 2283830 - RNA, 19 nt, Homo sapiens
  misc_RNA (1)...(19): siRNA sense strand
ggaucauuaaggugaagaa

SEQ ID NO: 2283831 - RNA, 19 nt, Homo sapiens
  misc_RNA (1)...(19): siRNA sense strand
aagaaaagccaguaaaaga

SEQ ID NO: 2283832 - RNA, 19 nt, Homo sapiens
  misc_RNA (1)...(19): siRNA sense strand
acggggagauugugaaaua

SEQ ID NO: 2283833 - RNA, 19 nt, Homo sapiens
  misc_RNA (1)...(19): siRNA sense strand
ggauggaacaggaaaacaa

SEQ ID NO: 2283834 - RNA, 19 nt, Homo sapiens
  misc_RNA (1)...(19): siRNA sense strand
ccaugaauccagagaagca

SEQ ID NO: 2283835 - RNA, 19 nt, Homo sapiens
  misc_RNA (1)...(19): siRNA sense strand
gcuugaauuguauaggaaa

SEQ ID NO: 2283836 - RNA, 19 nt, Homo sapiens
  misc_RNA (1)...(19): siRNA sense strand
ccacuaugacaaggagaaa

SEQ ID NO: 2283837 - RNA, 19 nt, Homo sapiens
  misc_RNA (1)...(19): siRNA sense strand
cagauaugguggugucaca

SEQ ID NO: 2283838 - RNA, 19 nt, Homo sapiens
  misc_RNA (1)...(19): siRNA sense strand
uggaggagaagcugaggaa

SEQ ID NO: 2283839 - RNA, 19 nt, Homo sapiens
  misc_RNA (1)...(19): siRNA sense strand
cuuccacaguaaagagauu

SEQ ID NO: 2283840 - RNA, 19 nt, Homo sapiens
  misc_RNA (1)...(19): siRNA sense strand
guacagaagagcaagagga

SEQ ID NO: 2283841 - RNA, 19 nt, Homo sapiens
  misc_RNA (1)...(19): siRNA sense strand
gcauugagcagcuagaaaa

SEQ ID NO: 2283842 - RNA, 19 nt, Homo sapiens
  misc_RNA (1)...(19): siRNA sense strand
gagaaaauuuuguacguca

SEQ ID NO: 2283843 - RNA, 19 nt, Homo sapiens
  misc_RNA (1)...(19): siRNA sense strand
guaccugaauccacggcaa

SEQ ID NO: 2283844 - RNA, 19 nt, Homo sapiens
  misc_RNA (1)...(19): siRNA sense strand
acaugguacagaagagcaa

SEQ ID NO: 2283845 - RNA, 19 nt, Homo sapiens
  misc_RNA (1)...(19): siRNA sense strand
agaaggaggcucaagguca

SEQ ID NO: 2283846 - RNA, 19 nt, Homo sapiens
  misc_RNA (1)...(19): siRNA sense strand
aaucggaagaagaagagaa

SEQ ID NO: 2283847 - RNA, 19 nt, Homo sapiens
  misc_RNA (1)...(19): siRNA sense strand
cagugaaacgggugagacu

SEQ ID NO: 2283848 - RNA, 19 nt, Homo sapiens
  misc_RNA (1)...(19): siRNA sense strand
acuuuggacuggagugaga

SEQ ID NO: 2283849 - RNA, 19 nt, Homo sapiens
  misc_RNA (1)...(19): siRNA sense strand
ugggacaguuguacagcua

SEQ ID NO: 2283850 - RNA, 19 nt, Homo sapiens
  misc_RNA (1)...(19): siRNA sense strand
ucaaaucggaagaagaaga

SEQ ID NO: 2283851 - RNA, 19 nt, Homo sapiens
  misc_RNA (1)...(19): siRNA sense strand
gagggauggaacaggaaaa

SEQ ID NO: 2283852 - RNA, 19 nt, Homo sapiens
  misc_RNA (1)...(19): siRNA sense strand
aggccaacaugguacagaa

SEQ ID NO: 2283853 - RNA, 19 nt, Homo sapiens
  misc_RNA (1)...(19): siRNA sense strand
gcucaaggucaccaagaga

SEQ ID NO: 2283854 - RNA, 19 nt, Homo sapiens
  misc_RNA (1)...(19): siRNA sense strand
guaaaagagggauggaaca

SEQ ID NO: 2283855 - RNA, 19 nt, Homo sapiens
  misc_RNA (1)...(19): siRNA sense strand
cgcuugaauuguauaggaa

SEQ ID NO: 2283856 - RNA, 19 nt, Homo sapiens
  misc_RNA (1)...(19): siRNA sense strand
gcaucuggcuccugcacau

SEQ ID NO: 2283857 - RNA, 19 nt, Homo sapiens
  misc_RNA (1)...(19): siRNA sense strand
gagugagaaugccgugaau

SEQ ID NO: 2283858 - RNA, 19 nt, Homo sapiens
  misc_RNA (1)...(19): siRNA sense strand
gccagaaggagaaggacga

SEQ ID NO: 2283859 - RNA, 19 nt, Homo sapiens
  misc_RNA (1)...(19): siRNA sense strand
cagaagaacuugaagaugg

SEQ ID NO: 2283860 - RNA, 19 nt, Homo sapiens
  misc_RNA (1)...(19): siRNA sense strand
cgucugaggauccggguga

SEQ ID NO: 2283861 - RNA, 19 nt, Homo sapiens
  misc_RNA (1)...(19): siRNA sense strand
cuauaaggucauuggccau

SEQ ID NO: 2283862 - RNA, 19 nt, Homo sapiens
  misc_RNA (1)...(19): siRNA sense strand
ugguaagggcuuccagcaa

SEQ ID NO: 2283863 - RNA, 19 nt, Homo sapiens
  misc_RNA (1)...(19): siRNA sense strand
uugaagauggcguauguaa

SEQ ID NO: 2283864 - RNA, 19 nt, Homo sapiens
  misc_RNA (1)...(19): siRNA sense strand
uggauauggcagacaguga

SEQ ID NO: 2283865 - RNA, 19 nt, Homo sapiens
  misc_RNA (1)...(19): siRNA sense strand
ccuagaaagccgucagaac

SEQ ID NO: 2283866 - RNA, 19 nt, Homo sapiens
  misc_RNA (1)...(19): siRNA sense strand
gaucauuaaggugaagaaa

SEQ ID NO: 2283867 - RNA, 19 nt, Homo sapiens
  misc_RNA (1)...(19): siRNA sense strand
guauaggaaaguaccaaau

SEQ ID NO: 2283868 - RNA, 19 nt, Homo sapiens
  misc_RNA (1)...(19): siRNA sense strand
aguuauuggauauggcaga

SEQ ID NO: 2283869 - RNA, 19 nt, Homo sapiens
  misc_RNA (1)...(19): siRNA sense strand
acuauaaggucauuggcca

SEQ ID NO: 2283870 - RNA, 19 nt, Homo sapiens
  misc_RNA (1)...(19): siRNA sense strand
ugaaauauauccuugacca

SEQ ID NO: 2283871 - RNA, 19 nt, Homo sapiens
  misc_RNA (1)...(19): siRNA sense strand
gauauggcagacagugaaa

SEQ ID NO: 2283872 - RNA, 19 nt, Homo sapiens
  misc_RNA (1)...(19): siRNA sense strand
guaagggcuuccagcaaaa

SEQ ID NO: 2283873 - RNA, 19 nt, Homo sapiens
  misc_RNA (1)...(19): siRNA sense strand
aggcaguaauagcugguga

SEQ ID NO: 2283874 - RNA, 19 nt, Homo sapiens
  misc_RNA (1)...(19): siRNA sense strand
gaacuuaacuuuccggaag

SEQ ID NO: 2283875 - RNA, 19 nt, Homo sapiens
  misc_RNA (1)...(19): siRNA sense strand
aagagcaagaggagaacau

SEQ ID NO: 2283876 - RNA, 19 nt, Homo sapiens
  misc_RNA (1)...(19): siRNA sense strand
ggggagauugugaaauaua

SEQ ID NO: 2283877 - RNA, 19 nt, Homo sapiens
  misc_RNA (1)...(19): siRNA sense strand
aagacggacuccaagggua

SEQ ID NO: 2283878 - RNA, 19 nt, Homo sapiens
  misc_RNA (1)...(19): siRNA sense strand
caacagucguuuucgaaau

SEQ ID NO: 2283879 - RNA, 19 nt, Homo sapiens
  misc_RNA (1)...(19): siRNA sense strand
ccgcccacuuggaucauua

SEQ ID NO: 2283880 - RNA, 19 nt, Homo sapiens
  misc_RNA (1)...(19): siRNA sense strand
ccagagaagcaaauccaga

SEQ ID NO: 2283881 - RNA, 19 nt, Homo sapiens
  misc_RNA (1)...(19): siRNA sense strand
ccccaaagauucaggaacu

SEQ ID NO: 2283882 - RNA, 19 nt, Homo sapiens
  misc_RNA (1)...(19): siRNA sense strand
cugaccuggugguggaaca

SEQ ID NO: 2283883 - RNA, 19 nt, Homo sapiens
  misc_RNA (1)...(19): siRNA sense strand
accuguggcuggagaccaa

SEQ ID NO: 2283884 - RNA, 19 nt, Homo sapiens
  misc_RNA (1)...(19): siRNA sense strand
ugaagaaaccucagaacuc

SEQ ID NO: 2283885 - RNA, 19 nt, Homo sapiens
  misc_RNA (1)...(19): siRNA sense strand
ggagagagcacaagcggaa

SEQ ID NO: 2283886 - RNA, 19 nt, Homo sapiens
  misc_RNA (1)...(19): siRNA sense strand
cugauggagaagagggaaa

SEQ ID NO: 2283887 - RNA, 19 nt, Homo sapiens
  misc_RNA (1)...(19): siRNA sense strand
ccaucaagaaagugagaga

SEQ ID NO: 2283888 - RNA, 19 nt, Homo sapiens
  misc_RNA (1)...(19): siRNA sense strand
gaucaaaagugaaggaacu

SEQ ID NO: 2283889 - RNA, 19 nt, Homo sapiens
  misc_RNA (1)...(19): siRNA sense strand
gaguaaaccucgaaaccga

SEQ ID NO: 2283890 - RNA, 19 nt, Homo sapiens
  misc_RNA (1)...(19): siRNA sense strand
gcaccaagcucaaucccaa

SEQ ID NO: 2283891 - RNA, 19 nt, Homo sapiens
  misc_RNA (1)...(19): siRNA sense strand
auggagagaagaagugaaa

SEQ ID NO: 2283892 - RNA, 19 nt, Homo sapiens
  misc_RNA (1)...(19): siRNA sense strand
gcaacacgguggacggaga

SEQ ID NO: 2283893 - RNA, 19 nt, Homo sapiens
  misc_RNA (1)...(19): siRNA sense strand
cugagaaaacggaagaaaa

SEQ ID NO: 2283894 - RNA, 19 nt, Homo sapiens
  misc_RNA (1)...(19): siRNA sense strand
agagauucccauugacaua

SEQ ID NO: 2283895 - RNA, 19 nt, Homo sapiens
  misc_RNA (1)...(19): siRNA sense strand
gagcggucuucuugggcaa

SEQ ID NO: 2283896 - RNA, 19 nt, Homo sapiens
  misc_RNA (1)...(19): siRNA sense strand
caguauggguccuuagaca

SEQ ID NO: 2283897 - RNA, 19 nt, Homo sapiens
  misc_RNA (1)...(19): siRNA sense strand
cgccagaggugauacggaa

SEQ ID NO: 2283898 - RNA, 19 nt, Homo sapiens
  misc_RNA (1)...(19): siRNA sense strand
gugaacacuaugagcggaa

SEQ ID NO: 2283899 - RNA, 19 nt, Homo sapiens
  misc_RNA (1)...(19): siRNA sense strand
ugagaaaacggaagaaaau

SEQ ID NO: 2283900 - RNA, 19 nt, Homo sapiens
  misc_RNA (1)...(19): siRNA sense strand
gaugguacgaacagagcua

SEQ ID NO: 2283901 - RNA, 19 nt, Homo sapiens
  misc_RNA (1)...(19): siRNA sense strand
uaaggaacucagugacaaa

SEQ ID NO: 2283902 - RNA, 19 nt, Homo sapiens
  misc_RNA (1)...(19): siRNA sense strand
ggcugaauggagagaagaa

SEQ ID NO: 2283903 - RNA, 19 nt, Homo sapiens
  misc_RNA (1)...(19): siRNA sense strand
gugagcaagcaguggaaaa

SEQ ID NO: 2283904 - RNA, 19 nt, Homo sapiens
  misc_RNA (1)...(19): siRNA sense strand
aguagauagugaaguugaa

SEQ ID NO: 2283905 - RNA, 19 nt, Homo sapiens
  misc_RNA (1)...(19): siRNA sense strand
ccuuuagcucugagaauuu

SEQ ID NO: 2283906 - RNA, 19 nt, Homo sapiens
  misc_RNA (1)...(19): siRNA sense strand
uagaaaugcgggagaagga

SEQ ID NO: 2283907 - RNA, 19 nt, Homo sapiens
  misc_RNA (1)...(19): siRNA sense strand
ccaucaugcugcagcuaga

SEQ ID NO: 2283908 - RNA, 19 nt, Homo sapiens
  misc_RNA (1)...(19): siRNA sense strand
caguggcagugguggguuu

SEQ ID NO: 2283909 - RNA, 19 nt, Homo sapiens
  misc_RNA (1)...(19): siRNA sense strand
gagaacagaaugagacgga

SEQ ID NO: 2283910 - RNA, 19 nt, Homo sapiens
  misc_RNA (1)...(19): siRNA sense strand
uugcaaguggaaugaauua

SEQ ID NO: 2283911 - RNA, 19 nt, Homo sapiens
  misc_RNA (1)...(19): siRNA sense strand
gcggaacugaagacauaaa

SEQ ID NO: 2283912 - RNA, 19 nt, Homo sapiens
  misc_RNA (1)...(19): siRNA sense strand
agaaagugagagaacagaa

SEQ ID NO: 2283913 - RNA, 19 nt, Homo sapiens
  misc_RNA (1)...(19): siRNA sense strand
cagagaagcuagacgaccu

SEQ ID NO: 2283914 - RNA, 19 nt, Homo sapiens
  misc_RNA (1)...(19): siRNA sense strand
ccaagcugcucgaggacca

SEQ ID NO: 2283915 - RNA, 19 nt, Homo sapiens
  misc_RNA (1)...(19): siRNA sense strand
cgggagaaggagcucauua

SEQ ID NO: 2283916 - RNA, 19 nt, Homo sapiens
  misc_RNA (1)...(19): siRNA sense strand
gcaaccaugcucagagaca

SEQ ID NO: 2283917 - RNA, 19 nt, Homo sapiens
  misc_RNA (1)...(19): siRNA sense strand
gggaaauaccagugaccac

SEQ ID NO: 2283918 - RNA, 19 nt, Homo sapiens
  misc_RNA (1)...(19): siRNA sense strand
aggaauugcaaguggaaug

SEQ ID NO: 2283919 - RNA, 19 nt, Homo sapiens
  misc_RNA (1)...(19): siRNA sense strand
cagcuagaaaugcgggaga

SEQ ID NO: 2283920 - RNA, 19 nt, Homo sapiens
  misc_RNA (1)...(19): siRNA sense strand
caucuaaggaacucaguga

SEQ ID NO: 2283921 - RNA, 19 nt, Homo sapiens
  misc_RNA (1)...(19): siRNA sense strand
cggcagacacucaugcauu

SEQ ID NO: 2283922 - RNA, 19 nt, Homo sapiens
  misc_RNA (1)...(19): siRNA sense strand
cggccagacuuguugagau

SEQ ID NO: 2283923 - RNA, 19 nt, Homo sapiens
  misc_RNA (1)...(19): siRNA sense strand
cagcaagagccgauaucga

SEQ ID NO: 2283924 - RNA, 19 nt, Homo sapiens
  misc_RNA (1)...(19): siRNA sense strand
agacauugccucugcagau

SEQ ID NO: 2283925 - RNA, 19 nt, Homo sapiens
  misc_RNA (1)...(19): siRNA sense strand
caagaaagugagagaacag

SEQ ID NO: 2283926 - RNA, 19 nt, Homo sapiens
  misc_RNA (1)...(19): siRNA sense strand
cgaacagagcuaaucgaga

SEQ ID NO: 2283927 - RNA, 19 nt, Homo sapiens
  misc_RNA (1)...(19): siRNA sense strand
ggacuauuuggaugcuuaa

SEQ ID NO: 2283928 - RNA, 19 nt, Homo sapiens
  misc_RNA (1)...(19): siRNA sense strand
gggaagugccauuugagga

SEQ ID NO: 2283929 - RNA, 19 nt, Homo sapiens
  misc_RNA (1)...(19): siRNA sense strand
auacugugcccauggacaa

SEQ ID NO: 2283930 - RNA, 19 nt, Homo sapiens
  misc_RNA (1)...(19): siRNA sense strand
cuucaauggacuacaagau

SEQ ID NO: 2283931 - RNA, 19 nt, Homo sapiens
  misc_RNA (1)...(19): siRNA sense strand
cauaauccucucuuggaaa

SEQ ID NO: 2283932 - RNA, 19 nt, Homo sapiens
  misc_RNA (1)...(19): siRNA sense strand
gaacagagcuaaucgagag

SEQ ID NO: 2283933 - RNA, 19 nt, Homo sapiens
  misc_RNA (1)...(19): siRNA sense strand
agacugguccacaggaauu

SEQ ID NO: 2283934 - RNA, 19 nt, Homo sapiens
  misc_RNA (1)...(19): siRNA sense strand
ggaacguggcuaugagaac

SEQ ID NO: 2283935 - RNA, 19 nt, Homo sapiens
  misc_RNA (1)...(19): siRNA sense strand
acaguguugacgagcguaa

SEQ ID NO: 2283936 - RNA, 19 nt, Homo sapiens
  misc_RNA (1)...(19): siRNA sense strand
agagguggccaucaagaaa

SEQ ID NO: 2283937 - RNA, 19 nt, Homo sapiens
  misc_RNA (1)...(19): siRNA sense strand
gugagagaacagaaugaga

SEQ ID NO: 2283938 - RNA, 19 nt, Homo sapiens
  misc_RNA (1)...(19): siRNA sense strand
aguugaauuuccacgaaga

SEQ ID NO: 2283939 - RNA, 19 nt, Homo sapiens
  misc_RNA (1)...(19): siRNA sense strand
ucgaggaccagcaggaaaa

SEQ ID NO: 2283940 - RNA, 19 nt, Homo sapiens
  misc_RNA (1)...(19): siRNA sense strand
augaaacagacguggcaga

SEQ ID NO: 2283941 - RNA, 19 nt, Homo sapiens
  misc_RNA (1)...(19): siRNA sense strand
gugcaggccagaacaguau

SEQ ID NO: 2283942 - RNA, 19 nt, Homo sapiens
  misc_RNA (1)...(19): siRNA sense strand
cagaagaggaagaagggga

SEQ ID NO: 2283943 - RNA, 19 nt, Homo sapiens
  misc_RNA (1)...(19): siRNA sense strand
ugaugaguuagcugauaaa

SEQ ID NO: 2283944 - RNA, 19 nt, Homo sapiens
  misc_RNA (1)...(19): siRNA sense strand
gggaacacgaugaaucaga

SEQ ID NO: 2283945 - RNA, 19 nt, Homo sapiens
  misc_RNA (1)...(19): siRNA sense strand
aagugagagaacagaauga

SEQ ID NO: 2283946 - RNA, 19 nt, Homo sapiens
  misc_RNA (1)...(19): siRNA sense strand
ucuaaggaacucagugaca

SEQ ID NO: 2283947 - RNA, 19 nt, Homo sapiens
  misc_RNA (1)...(19): siRNA sense strand
ucccaaugccauggagaaa

SEQ ID NO: 2283948 - RNA, 19 nt, Homo sapiens
  misc_RNA (1)...(19): siRNA sense strand
aggcagccauagugacuuu

SEQ ID NO: 2283949 - RNA, 19 nt, Homo sapiens
  misc_RNA (1)...(19): siRNA sense strand
agaagaggaagaaggggaa

SEQ ID NO: 2283950 - RNA, 19 nt, Homo sapiens
  misc_RNA (1)...(19): siRNA sense strand
gcugagagguuaugggcca

SEQ ID NO: 2283951 - RNA, 19 nt, Homo sapiens
  misc_RNA (1)...(19): siRNA sense strand
agguggaugugcagggaga

SEQ ID NO: 2283952 - RNA, 19 nt, Homo sapiens
  misc_RNA (1)...(19): siRNA sense strand
gcccagagcagaaggcuga

SEQ ID NO: 2283953 - RNA, 19 nt, Homo sapiens
  misc_RNA (1)...(19): siRNA sense strand
cugagacacaacagagcaa

SEQ ID NO: 2283954 - RNA, 19 nt, Homo sapiens
  misc_RNA (1)...(19): siRNA sense strand
gggauguggccgagcucuu

SEQ ID NO: 2283955 - RNA, 19 nt, Homo sapiens
  misc_RNA (1)...(19): siRNA sense strand
ggaauuucauccagacgga

SEQ ID NO: 2283956 - RNA, 19 nt, Homo sapiens
  misc_RNA (1)...(19): siRNA sense strand
gugcauuaacagagaagaa

SEQ ID NO: 2283957 - RNA, 19 nt, Homo sapiens
  misc_RNA (1)...(19): siRNA sense strand
cugaagaaagcaagaacaa

SEQ ID NO: 2283958 - RNA, 19 nt, Homo sapiens
  misc_RNA (1)...(19): siRNA sense strand
cggugaauuuacagacuua

SEQ ID NO: 2283959 - RNA, 19 nt, Homo sapiens
  misc_RNA (1)...(19): siRNA sense strand
acuaaagagacuuggaauu

SEQ ID NO: 2283960 - RNA, 19 nt, Homo sapiens
  misc_RNA (1)...(19): siRNA sense strand
cccuaaaggaaaugagauu

SEQ ID NO: 2283961 - RNA, 19 nt, Homo sapiens
  misc_RNA (1)...(19): siRNA sense strand
agcaagaaguacagugaau

SEQ ID NO: 2283962 - RNA, 19 nt, Homo sapiens
  misc_RNA (1)...(19): siRNA sense strand
uggacgaugaagagaauua

SEQ ID NO: 2283963 - RNA, 19 nt, Homo sapiens
  misc_RNA (1)...(19): siRNA sense strand
ccaacaaauagcagcaaau

SEQ ID NO: 2283964 - RNA, 19 nt, Homo sapiens
  misc_RNA (1)...(19): siRNA sense strand
ccaaaugcgggcacagaaa

SEQ ID NO: 2283965 - RNA, 19 nt, Homo sapiens
  misc_RNA (1)...(19): siRNA sense strand
uggaggagaucaaggguga

SEQ ID NO: 2283966 - RNA, 19 nt, Homo sapiens
  misc_RNA (1)...(19): siRNA sense strand
auaacaaacuggaaguaca

SEQ ID NO: 2283967 - RNA, 19 nt, Homo sapiens
  misc_RNA (1)...(19): siRNA sense strand
cauuaacagagaagaagua

SEQ ID NO: 2283968 - RNA, 19 nt, Homo sapiens
  misc_RNA (1)...(19): siRNA sense strand
ugauagaaagccagccuaa

SEQ ID NO: 2283969 - RNA, 19 nt, Homo sapiens
  misc_RNA (1)...(19): siRNA sense strand
uggcagaagcugauuguau

SEQ ID NO: 2283970 - RNA, 19 nt, Homo sapiens
  misc_RNA (1)...(19): siRNA sense strand
caaauauggacgaugaaga

SEQ ID NO: 2283971 - RNA, 19 nt, Homo sapiens
  misc_RNA (1)...(19): siRNA sense strand
gguuauauuccuuaugcaa

SEQ ID NO: 2283972 - RNA, 19 nt, Homo sapiens
  misc_RNA (1)...(19): siRNA sense strand
gugaagaaauuaauggaac

SEQ ID NO: 2283973 - RNA, 19 nt, Homo sapiens
  misc_RNA (1)...(19): siRNA sense strand
ugacagaaguuuuggcaca

SEQ ID NO: 2283974 - RNA, 19 nt, Homo sapiens
  misc_RNA (1)...(19): siRNA sense strand
cuucaggagacuugggaca

SEQ ID NO: 2283975 - RNA, 19 nt, Homo sapiens
  misc_RNA (1)...(19): siRNA sense strand
uuggagaacuacacagcaa

SEQ ID NO: 2283976 - RNA, 19 nt, Homo sapiens
  misc_RNA (1)...(19): siRNA sense strand
cuucaugcugugauagaaa

SEQ ID NO: 2283977 - RNA, 19 nt, Homo sapiens
  misc_RNA (1)...(19): siRNA sense strand
ugaaaaugcccuaaaggaa

SEQ ID NO: 2283978 - RNA, 19 nt, Homo sapiens
  misc_RNA (1)...(19): siRNA sense strand
caauacagaaacagaacau

SEQ ID NO: 2283979 - RNA, 19 nt, Homo sapiens
  misc_RNA (1)...(19): siRNA sense strand
uggaagaggcacagaaaug

SEQ ID NO: 2283980 - RNA, 19 nt, Homo sapiens
  misc_RNA (1)...(19): siRNA sense strand
uuaaagcagcaguuggaaa

SEQ ID NO: 2283981 - RNA, 19 nt, Homo sapiens
  misc_RNA (1)...(19): siRNA sense strand
aaucuaaugaccucagaaa

SEQ ID NO: 2283982 - RNA, 19 nt, Homo sapiens
  misc_RNA (1)...(19): siRNA sense strand
cagcaauuucugaggucau

SEQ ID NO: 2283983 - RNA, 19 nt, Homo sapiens
  misc_RNA (1)...(19): siRNA sense strand
ccacugaagaauuugaaaa

SEQ ID NO: 2283984 - RNA, 19 nt, Homo sapiens
  misc_RNA (1)...(19): siRNA sense strand
ucacaauacagaaacagaa

SEQ ID NO: 2283985 - RNA, 19 nt, Homo sapiens
  misc_RNA (1)...(19): siRNA sense strand
ugauuacccagguggauaa

SEQ ID NO: 2283986 - RNA, 19 nt, Homo sapiens
  misc_RNA (1)...(19): siRNA sense strand
ggagcucacaauacagaaa

SEQ ID NO: 2283987 - RNA, 19 nt, Homo sapiens
  misc_RNA (1)...(19): siRNA sense strand
acuagaagugcuccagaaa

SEQ ID NO: 2283988 - RNA, 19 nt, Homo sapiens
  misc_RNA (1)...(19): siRNA sense strand
ugaugaauuuagagccuga

SEQ ID NO: 2283989 - RNA, 19 nt, Homo sapiens
  misc_RNA (1)...(19): siRNA sense strand
gaagaguggcagaagcuga

SEQ ID NO: 2283990 - RNA, 19 nt, Homo sapiens
  misc_RNA (1)...(19): siRNA sense strand
ccaacauaucacaaggaga

SEQ ID NO: 2283991 - RNA, 19 nt, Homo sapiens
  misc_RNA (1)...(19): siRNA sense strand
gaacacagaaagaagagca

SEQ ID NO: 2283992 - RNA, 19 nt, Homo sapiens
  misc_RNA (1)...(19): siRNA sense strand
acacugaacaaucgcacaa

SEQ ID NO: 2283993 - RNA, 19 nt, Homo sapiens
  misc_RNA (1)...(19): siRNA sense strand
accacgaagugaugaauuu

SEQ ID NO: 2283994 - RNA, 19 nt, Homo sapiens
  misc_RNA (1)...(19): siRNA sense strand
ugaucaaugugcuguucaa

SEQ ID NO: 2283995 - RNA, 19 nt, Homo sapiens
  misc_RNA (1)...(19): siRNA sense strand
agacuuuacuagaggcaac

SEQ ID NO: 2283996 - RNA, 19 nt, Homo sapiens
  misc_RNA (1)...(19): siRNA sense strand
uuucugaggucauuggcaa

SEQ ID NO: 2283997 - RNA, 19 nt, Homo sapiens
  misc_RNA (1)...(19): siRNA sense strand
cuggaaguacagaaaguau

SEQ ID NO: 2283998 - RNA, 19 nt, Homo sapiens
  misc_RNA (1)...(19): siRNA sense strand
gagucugugaagaaauuaa

SEQ ID NO: 2283999 - RNA, 19 nt, Homo sapiens
  misc_RNA (1)...(19): siRNA sense strand
ugcaauaugauuagcaaga

SEQ ID NO: 2284000 - RNA, 19 nt, Homo sapiens
  misc_RNA (1)...(19): siRNA sense strand
acucaguuguccuaaguuu

SEQ ID NO: 2284001 - RNA, 19 nt, Homo sapiens
  misc_RNA (1)...(19): siRNA sense strand
uggcugagaugcuuggaga

SEQ ID NO: 2284002 - RNA, 19 nt, Homo sapiens
  misc_RNA (1)...(19): siRNA sense strand
aagaaagcaagaacaagaa

SEQ ID NO: 2284003 - RNA, 19 nt, Homo sapiens
  misc_RNA (1)...(19): siRNA sense strand
acagagaagaaguauguca

SEQ ID NO: 2284004 - RNA, 19 nt, Homo sapiens
  misc_RNA (1)...(19): siRNA sense strand
gagaagaguggcagaagcu

SEQ ID NO: 2284005 - RNA, 19 nt, Homo sapiens
  misc_RNA (1)...(19): siRNA sense strand
guucuguccucuuggcauu

SEQ ID NO: 2284006 - RNA, 19 nt, Homo sapiens
  misc_RNA (1)...(19): siRNA sense strand
gcaguuggaaagagacuca

SEQ ID NO: 2284007 - RNA, 19 nt, Homo sapiens
  misc_RNA (1)...(19): siRNA sense strand
gcauuaacagagaagaagu

SEQ ID NO: 2284008 - RNA, 19 nt, Homo sapiens
  misc_RNA (1)...(19): siRNA sense strand
cugaacaaucgcacaaaga

SEQ ID NO: 2284009 - RNA, 19 nt, Homo sapiens
  misc_RNA (1)...(19): siRNA sense strand
augauuagcaagaaguaca

SEQ ID NO: 2284010 - RNA, 19 nt, Homo sapiens
  misc_RNA (1)...(19): siRNA sense strand
cugaagauggugauagguu

SEQ ID NO: 2284011 - RNA, 19 nt, Homo sapiens
  misc_RNA (1)...(19): siRNA sense strand
agaaaguaacagugagaua

SEQ ID NO: 2284012 - RNA, 19 nt, Homo sapiens
  misc_RNA (1)...(19): siRNA sense strand
caguaaagcauuuggucaa

SEQ ID NO: 2284013 - RNA, 19 nt, Homo sapiens
  misc_RNA (1)...(19): siRNA sense strand
cuacaagagaguuggcaaa

SEQ ID NO: 2284014 - RNA, 19 nt, Homo sapiens
  misc_RNA (1)...(19): siRNA sense strand
ggaaagaacuuaaagagca

SEQ ID NO: 2284015 - RNA, 19 nt, Homo sapiens
  misc_RNA (1)...(19): siRNA sense strand
aggaaauaccuguggaaca

SEQ ID NO: 2284016 - RNA, 19 nt, Homo sapiens
  misc_RNA (1)...(19): siRNA sense strand
uggcaaaucaaguaagcaa

SEQ ID NO: 2284017 - RNA, 19 nt, Homo sapiens
  misc_RNA (1)...(19): siRNA sense strand
ccugaaagguuuuagaaau

SEQ ID NO: 2284018 - RNA, 19 nt, Homo sapiens
  misc_RNA (1)...(19): siRNA sense strand
cagaaauacaggagaaaug

SEQ ID NO: 2284019 - RNA, 19 nt, Homo sapiens
  misc_RNA (1)...(19): siRNA sense strand
gugagauagagcaggaaau

SEQ ID NO: 2284020 - RNA, 19 nt, Homo sapiens
  misc_RNA (1)...(19): siRNA sense strand
gcucaauugaaaugccaaa

SEQ ID NO: 2284021 - RNA, 19 nt, Homo sapiens
  misc_RNA (1)...(19): siRNA sense strand
uaguacaaguggagcaaaa

SEQ ID NO: 2284022 - RNA, 19 nt, Homo sapiens
  misc_RNA (1)...(19): siRNA sense strand
cggcaauaacuguggagca

SEQ ID NO: 2284023 - RNA, 19 nt, Homo sapiens
  misc_RNA (1)...(19): siRNA sense strand
gggaacugcaagacaggaa

SEQ ID NO: 2284024 - RNA, 19 nt, Homo sapiens
  misc_RNA (1)...(19): siRNA sense strand
ugaucaaguggaagagauu

SEQ ID NO: 2284025 - RNA, 19 nt, Homo sapiens
  misc_RNA (1)...(19): siRNA sense strand
guucaaacgaauagguguu

SEQ ID NO: 2284026 - RNA, 19 nt, Homo sapiens
  misc_RNA (1)...(19): siRNA sense strand
agaagcugauagaggagaa

SEQ ID NO: 2284027 - RNA, 19 nt, Homo sapiens
  misc_RNA (1)...(19): siRNA sense strand
cuauacaagcaaagacauu

SEQ ID NO: 2284028 - RNA, 19 nt, Homo sapiens
  misc_RNA (1)...(19): siRNA sense strand
ggacuuaauugcacaggca

SEQ ID NO: 2284029 - RNA, 19 nt, Homo sapiens
  misc_RNA (1)...(19): siRNA sense strand
acgcaugaggaaugggauu

SEQ ID NO: 2284030 - RNA, 19 nt, Homo sapiens
  misc_RNA (1)...(19): siRNA sense strand
gcuccuaagcccaagaaga

SEQ ID NO: 2284031 - RNA, 19 nt, Homo sapiens
  misc_RNA (1)...(19): siRNA sense strand
ugagaaacuucauggggaa

SEQ ID NO: 2284032 - RNA, 19 nt, Homo sapiens
  misc_RNA (1)...(19): siRNA sense strand
agcaaagacuucagugaca

SEQ ID NO: 2284033 - RNA, 19 nt, Homo sapiens
  misc_RNA (1)...(19): siRNA sense strand
ccgaguauauaguggucau

SEQ ID NO: 2284034 - RNA, 19 nt, Homo sapiens
  misc_RNA (1)...(19): siRNA sense strand
aguauauaguggucaucaa

SEQ ID NO: 2284035 - RNA, 19 nt, Homo sapiens
  misc_RNA (1)...(19): siRNA sense strand
aaggaaaugaauggagaaa

SEQ ID NO: 2284036 - RNA, 19 nt, Homo sapiens
  misc_RNA (1)...(19): siRNA sense strand
ggccagaagcggaguuuca

SEQ ID NO: 2284037 - RNA, 19 nt, Homo sapiens
  misc_RNA (1)...(19): siRNA sense strand
ccuacaagagaguuggcaa

SEQ ID NO: 2284038 - RNA, 19 nt, Homo sapiens
  misc_RNA (1)...(19): siRNA sense strand
ggcaaaucaaguaagcaaa

SEQ ID NO: 2284039 - RNA, 19 nt, Homo sapiens
  misc_RNA (1)...(19): siRNA sense strand
ccaagaaauacaugaaauc

SEQ ID NO: 2284040 - RNA, 19 nt, Homo sapiens
  misc_RNA (1)...(19): siRNA sense strand
agauguuggauaugggauu

SEQ ID NO: 2284041 - RNA, 19 nt, Homo sapiens
  misc_RNA (1)...(19): siRNA sense strand
ggauaugggauuugcugau

SEQ ID NO: 2284042 - RNA, 19 nt, Homo sapiens
  misc_RNA (1)...(19): siRNA sense strand
agaaagaagcccaggagcu

SEQ ID NO: 2284043 - RNA, 19 nt, Homo sapiens
  misc_RNA (1)...(19): siRNA sense strand
gaaagaacuuaaagagcag

SEQ ID NO: 2284044 - RNA, 19 nt, Homo sapiens
  misc_RNA (1)...(19): siRNA sense strand
uuaaagagcagcugggcga

SEQ ID NO: 2284045 - RNA, 19 nt, Homo sapiens
  misc_RNA (1)...(19): siRNA sense strand
cugccagugaagaaaguaa

SEQ ID NO: 2284046 - RNA, 19 nt, Homo sapiens
  misc_RNA (1)...(19): siRNA sense strand
uggaccagauguuggauau

SEQ ID NO: 2284047 - RNA, 19 nt, Homo sapiens
  misc_RNA (1)...(19): siRNA sense strand
cgcaucaguaacagaaaua

SEQ ID NO: 2284048 - RNA, 19 nt, Homo sapiens
  misc_RNA (1)...(19): siRNA sense strand
cugagaagcugauagagga

SEQ ID NO: 2284049 - RNA, 19 nt, Homo sapiens
  misc_RNA (1)...(19): siRNA sense strand
ccgcaucaguaacagaaau

SEQ ID NO: 2284050 - RNA, 19 nt, Homo sapiens
  misc_RNA (1)...(19): siRNA sense strand
caucaguaacagaaauaca

SEQ ID NO: 2284051 - RNA, 19 nt, Homo sapiens
  misc_RNA (1)...(19): siRNA sense strand
aauuugaacgcaugaggaa

SEQ ID NO: 2284052 - RNA, 19 nt, Homo sapiens
  misc_RNA (1)...(19): siRNA sense strand
ucucaaaggccgaggagug

SEQ ID NO: 2284053 - RNA, 19 nt, Homo sapiens
  misc_RNA (1)...(19): siRNA sense strand
aaaggaaaugaauggagaa

SEQ ID NO: 2284054 - RNA, 19 nt, Homo sapiens
  misc_RNA (1)...(19): siRNA sense strand
aagcaaagacauuccauca

SEQ ID NO: 2284055 - RNA, 19 nt, Homo sapiens
  misc_RNA (1)...(19): siRNA sense strand
ggaaggacuuaauugcaca

SEQ ID NO: 2284056 - RNA, 19 nt, Homo sapiens
  misc_RNA (1)...(19): siRNA sense strand
cuacauaugaacaggugga

SEQ ID NO: 2284057 - RNA, 19 nt, Homo sapiens
  misc_RNA (1)...(19): siRNA sense strand
ccaaacugaagaauggauu

SEQ ID NO: 2284058 - RNA, 19 nt, Homo sapiens
  misc_RNA (1)...(19): siRNA sense strand
uggaugaaguggaccagau

SEQ ID NO: 2284059 - RNA, 19 nt, Homo sapiens
  misc_RNA (1)...(19): siRNA sense strand
ugaagcugccagugaagaa

SEQ ID NO: 2284060 - RNA, 19 nt, Homo sapiens
  misc_RNA (1)...(19): siRNA sense strand
cugaucaaguggaagagau

SEQ ID NO: 2284061 - RNA, 19 nt, Homo sapiens
  misc_RNA (1)...(19): siRNA sense strand
guggcauacaagaaagauu

SEQ ID NO: 2284062 - RNA, 19 nt, Homo sapiens
  misc_RNA (1)...(19): siRNA sense strand
ggguguuugcuuugaugua

SEQ ID NO: 2284063 - RNA, 19 nt, Homo sapiens
  misc_RNA (1)...(19): siRNA sense strand
caaacugaagaauggauuu

SEQ ID NO: 2284064 - RNA, 19 nt, Homo sapiens
  misc_RNA (1)...(19): siRNA sense strand
acagugagauagagcagga

SEQ ID NO: 2284065 - RNA, 19 nt, Homo sapiens
  misc_RNA (1)...(19): siRNA sense strand
agugagauagagcaggaaa

SEQ ID NO: 2284066 - RNA, 19 nt, Homo sapiens
  misc_RNA (1)...(19): siRNA sense strand
ggguauuuaauguugccaa

SEQ ID NO: 2284067 - RNA, 19 nt, Homo sapiens
  misc_RNA (1)...(19): siRNA sense strand
gucccagaauucagcuaua

SEQ ID NO: 2284068 - RNA, 19 nt, Homo sapiens
  misc_RNA (1)...(19): siRNA sense strand
aagaaauagaugcuccuaa

SEQ ID NO: 2284069 - RNA, 19 nt, Homo sapiens
  misc_RNA (1)...(19): siRNA sense strand
cugaaagguuuuagaaaug

SEQ ID NO: 2284070 - RNA, 19 nt, Homo sapiens
  misc_RNA (1)...(19): siRNA sense strand
aggcagagcuggaaggacg

SEQ ID NO: 2284071 - RNA, 19 nt, Homo sapiens
  misc_RNA (1)...(19): siRNA sense strand
auguagacgaggaggacua

SEQ ID NO: 2284072 - RNA, 19 nt, Homo sapiens
  misc_RNA (1)...(19): siRNA sense strand
ugguaaauguagacgagga

SEQ ID NO: 2284073 - RNA, 19 nt, Homo sapiens
  misc_RNA (1)...(19): siRNA sense strand
ggccagaagagcaugguga

SEQ ID NO: 2284074 - RNA, 19 nt, Homo sapiens
  misc_RNA (1)...(19): siRNA sense strand
ccgaaauggacgugacuuc

SEQ ID NO: 2284075 - RNA, 19 nt, Homo sapiens
  misc_RNA (1)...(19): siRNA sense strand
cugaauacugccagcauga

SEQ ID NO: 2284076 - RNA, 19 nt, Homo sapiens
  misc_RNA (1)...(19): siRNA sense strand
acaaguaucuggaggagac

SEQ ID NO: 2284077 - RNA, 19 nt, Homo sapiens
  misc_RNA (1)...(19): siRNA sense strand
auguagacgaggaggacua

SEQ ID NO: 2284078 - RNA, 19 nt, Homo sapiens
  misc_RNA (1)...(19): siRNA sense strand
ugguaaauguagacgagga

SEQ ID NO: 2284079 - RNA, 19 nt, Homo sapiens
  misc_RNA (1)...(19): siRNA sense strand
ggccagaagagcaugguga

SEQ ID NO: 2284080 - RNA, 19 nt, Homo sapiens
  misc_RNA (1)...(19): siRNA sense strand
ccgaaauggacgugacuuc

SEQ ID NO: 2284081 - RNA, 19 nt, Homo sapiens
  misc_RNA (1)...(19): siRNA sense strand
cugaauacugccagcauga

SEQ ID NO: 2284082 - RNA, 19 nt, Homo sapiens
  misc_RNA (1)...(19): siRNA sense strand
acaaguaucuggaggagac

SEQ ID NO: 2284083 - RNA, 19 nt, Homo sapiens
  misc_RNA (1)...(19): siRNA sense strand
cagaaaucauggaggccua

SEQ ID NO: 2284084 - RNA, 19 nt, Homo sapiens
  misc_RNA (1)...(19): siRNA sense strand
gagcaaagguuggaggaga

SEQ ID NO: 2284085 - RNA, 19 nt, Homo sapiens
  misc_RNA (1)...(19): siRNA sense strand
ugaaagaacccuagggaac

SEQ ID NO: 2284086 - RNA, 19 nt, Homo sapiens
  misc_RNA (1)...(19): siRNA sense strand
gcaagaagcaacaagccaa

SEQ ID NO: 2284087 - RNA, 19 nt, Homo sapiens
  misc_RNA (1)...(19): siRNA sense strand
agcaaagguuggaggagau

SEQ ID NO: 2284088 - RNA, 19 nt, Homo sapiens
  misc_RNA (1)...(19): siRNA sense strand
cugaaagaacccuagggaa

SEQ ID NO: 2284089 - RNA, 19 nt, Homo sapiens
  misc_RNA (1)...(19): siRNA sense strand
gagcgagguuuaagccgaa

SEQ ID NO: 2284090 - RNA, 19 nt, Homo sapiens
  misc_RNA (1)...(19): siRNA sense strand
gguuuaagccgaaagcaca

SEQ ID NO: 2284091 - RNA, 19 nt, Homo sapiens
  misc_RNA (1)...(19): siRNA sense strand
gugaacaagcggagcacca

SEQ ID NO: 2284092 - RNA, 19 nt, Homo sapiens
  misc_RNA (1)...(19): siRNA sense strand
gggccuccaucaagggcua

SEQ ID NO: 2284093 - RNA, 19 nt, Homo sapiens
  misc_RNA (1)...(19): siRNA sense strand
aaguguacgcagcaggaaa

SEQ ID NO: 2284094 - RNA, 19 nt, Homo sapiens
  misc_RNA (1)...(19): siRNA sense strand
ccagauacuugcagggccu

SEQ ID NO: 2284095 - RNA, 19 nt, Homo sapiens
  misc_RNA (1)...(19): siRNA sense strand
aaagguuggaggagaucaa

SEQ ID NO: 2284096 - RNA, 19 nt, Homo sapiens
  misc_RNA (1)...(19): siRNA sense strand
agaugagacagcagaggau

SEQ ID NO: 2284097 - RNA, 19 nt, Homo sapiens
  misc_RNA (1)...(19): siRNA sense strand
uagcaaguaugaugggcga

SEQ ID NO: 2284098 - RNA, 19 nt, Homo sapiens
  misc_RNA (1)...(19): siRNA sense strand
agagggagaagguggagau

SEQ ID NO: 2284099 - RNA, 19 nt, Homo sapiens
  misc_RNA (1)...(19): siRNA sense strand
cgcuacaggugcugagcca

SEQ ID NO: 2284100 - RNA, 19 nt, Homo sapiens
  misc_RNA (1)...(19): siRNA sense strand
cgagcgagguuuaagccga

SEQ ID NO: 2284101 - RNA, 19 nt, Homo sapiens
  misc_RNA (1)...(19): siRNA sense strand
aagccaaagucauggaccu

SEQ ID NO: 2284102 - RNA, 19 nt, Homo sapiens
  misc_RNA (1)...(19): siRNA sense strand
ggaucaucuucguggaaau

SEQ ID NO: 2284103 - RNA, 19 nt, Homo sapiens
  misc_RNA (1)...(19): siRNA sense strand
acuauguuauccagggaaa

SEQ ID NO: 2284104 - RNA, 19 nt, Homo sapiens
  misc_RNA (1)...(19): siRNA sense strand
cggucuacguuaagaacuu

SEQ ID NO: 2284105 - RNA, 19 nt, Homo sapiens
  misc_RNA (1)...(19): siRNA sense strand
acgaaguaucaguaguaaa

SEQ ID NO: 2284106 - RNA, 19 nt, Homo sapiens
  misc_RNA (1)...(19): siRNA sense strand
agaagaaacacaagggauc

SEQ ID NO: 2284107 - RNA, 19 nt, Homo sapiens
  misc_RNA (1)...(19): siRNA sense strand
ccaaagaacauuuagccuu

SEQ ID NO: 2284108 - RNA, 19 nt, Homo sapiens
  misc_RNA (1)...(19): siRNA sense strand
ccagggaaaauguggguua

SEQ ID NO: 2284109 - RNA, 19 nt, Homo sapiens
  misc_RNA (1)...(19): siRNA sense strand
aagaagaaacacaagggau

SEQ ID NO: 2284110 - RNA, 19 nt, Homo sapiens
  misc_RNA (1)...(19): siRNA sense strand
gaaauugguagaagaggga

SEQ ID NO: 2284111 - RNA, 19 nt, Homo sapiens
  misc_RNA (1)...(19): siRNA sense strand
agaagagggaguacccaaa

SEQ ID NO: 2284112 - RNA, 19 nt, Homo sapiens
  misc_RNA (1)...(19): siRNA sense strand
uguccaaucugggaggaaa

SEQ ID NO: 2284113 - RNA, 19 nt, Homo sapiens
  misc_RNA (1)...(19): siRNA sense strand
uggaaaugcaaaaggaaca

SEQ ID NO: 2284114 - RNA, 19 nt, Homo sapiens
  misc_RNA (1)...(19): siRNA sense strand
uuuacgugcuucaggguau

SEQ ID NO: 2284115 - RNA, 19 nt, Homo sapiens
  misc_RNA (1)...(19): siRNA sense strand
ugggaauaccgaugacaga

SEQ ID NO: 2284116 - RNA, 19 nt, Homo sapiens
  misc_RNA (1)...(19): siRNA sense strand
ggaccguuugcuugggaau

SEQ ID NO: 2284117 - RNA, 19 nt, Homo sapiens
  misc_RNA (1)...(19): siRNA sense strand
uagaagagggaguacccaa

SEQ ID NO: 2284118 - RNA, 19 nt, Homo sapiens
  misc_RNA (1)...(19): siRNA sense strand
aagccaugcccuacagauu

SEQ ID NO: 2284119 - RNA, 19 nt, Homo sapiens
  misc_RNA (1)...(19): siRNA sense strand
cuccuaaaguagaacauca

SEQ ID NO: 2284120 - RNA, 19 nt, Homo sapiens
  misc_RNA (1)...(19): siRNA sense strand
ugcaaagguuagugaucca

SEQ ID NO: 2284121 - RNA, 19 nt, Homo sapiens
  misc_RNA (1)...(19): siRNA sense strand
agggaguacccaaagaaca

SEQ ID NO: 2284122 - RNA, 19 nt, Homo sapiens
  misc_RNA (1)...(19): siRNA sense strand
gcuguugagcuuugcaaaa

SEQ ID NO: 2284123 - RNA, 19 nt, Homo sapiens
  misc_RNA (1)...(19): siRNA sense strand
gagcagauguggaggcuga

SEQ ID NO: 2284124 - RNA, 19 nt, Homo sapiens
  misc_RNA (1)...(19): siRNA sense strand
gcgagguggaggaggagaa

SEQ ID NO: 2284125 - RNA, 19 nt, Homo sapiens
  misc_RNA (1)...(19): siRNA sense strand
ccgugaaccugcugcgcaa

SEQ ID NO: 2284126 - RNA, 19 nt, Homo sapiens
  misc_RNA (1)...(19): siRNA sense strand
cugccaaccuggagagagu

SEQ ID NO: 2284127 - RNA, 19 nt, Homo sapiens
  misc_RNA (1)...(19): siRNA sense strand
cuggauaagcugcggaaga

SEQ ID NO: 2284128 - RNA, 19 nt, Homo sapiens
  misc_RNA (1)...(19): siRNA sense strand
aggaagaguuucagcagga

SEQ ID NO: 2284129 - RNA, 19 nt, Homo sapiens
  misc_RNA (1)...(19): siRNA sense strand
uggagaaaugcgagacaau

SEQ ID NO: 2284130 - RNA, 19 nt, Homo sapiens
  misc_RNA (1)...(19): siRNA sense strand
cuuggaaaccuguggaaaa

SEQ ID NO: 2284131 - RNA, 19 nt, Homo sapiens
  misc_RNA (1)...(19): siRNA sense strand
agagggagcucaugggcau

SEQ ID NO: 2284132 - RNA, 19 nt, Homo sapiens
  misc_RNA (1)...(19): siRNA sense strand
ggagcuucgaagauggaaa

SEQ ID NO: 2284133 - RNA, 19 nt, Homo sapiens
  misc_RNA (1)...(19): siRNA sense strand
guggagaaccagagugacu

SEQ ID NO: 2284134 - RNA, 19 nt, Homo sapiens
  misc_RNA (1)...(19): siRNA sense strand
ccgcagagagggagcucau

SEQ ID NO: 2284135 - RNA, 19 nt, Homo sapiens
  misc_RNA (1)...(19): siRNA sense strand
gccaacaccaagaaagcaa

SEQ ID NO: 2284136 - RNA, 19 nt, Homo sapiens
  misc_RNA (1)...(19): siRNA sense strand
ccaacaagcaauaccgcau

SEQ ID NO: 2284137 - RNA, 19 nt, Homo sapiens
  misc_RNA (1)...(19): siRNA sense strand
cccaagaagcuccggguga

SEQ ID NO: 2284138 - RNA, 19 nt, Homo sapiens
  misc_RNA (1)...(19): siRNA sense strand
cguucgagacacugcgcua

SEQ ID NO: 2284139 - RNA, 19 nt, Homo sapiens
  misc_RNA (1)...(19): siRNA sense strand
agaugaaaugggagcagau

SEQ ID NO: 2284140 - RNA, 19 nt, Homo sapiens
  misc_RNA (1)...(19): siRNA sense strand
gugacugguaccuuggaaa

SEQ ID NO: 2284141 - RNA, 19 nt, Homo sapiens
  misc_RNA (1)...(19): siRNA sense strand
agacaauccacguugcuau

SEQ ID NO: 2284142 - RNA, 19 nt, Homo sapiens
  misc_RNA (1)...(19): siRNA sense strand
uccuguuacuucuggauaa

SEQ ID NO: 2284143 - RNA, 19 nt, Homo sapiens
  misc_RNA (1)...(19): siRNA sense strand
ugucugagcuggacgagga

SEQ ID NO: 2284144 - RNA, 19 nt, Homo sapiens
  misc_RNA (1)...(19): siRNA sense strand
gcuaugaguuccggcgaga

SEQ ID NO: 2284145 - RNA, 19 nt, Homo sapiens
  misc_RNA (1)...(19): siRNA sense strand
ucucaaaacccucaaggaa

SEQ ID NO: 2284146 - RNA, 19 nt, Homo sapiens
  misc_RNA (1)...(19): siRNA sense strand
agcuggaugugcaggagua

SEQ ID NO: 2284147 - RNA, 19 nt, Homo sapiens
  misc_RNA (1)...(19): siRNA sense strand
gagcagauguggaggcuga

SEQ ID NO: 2284148 - RNA, 19 nt, Homo sapiens
  misc_RNA (1)...(19): siRNA sense strand
gcgagguggaggaggagaa

SEQ ID NO: 2284149 - RNA, 19 nt, Homo sapiens
  misc_RNA (1)...(19): siRNA sense strand
ccgugaaccugcugcgcaa

SEQ ID NO: 2284150 - RNA, 19 nt, Homo sapiens
  misc_RNA (1)...(19): siRNA sense strand
cugccaaccuggagagagu

SEQ ID NO: 2284151 - RNA, 19 nt, Homo sapiens
  misc_RNA (1)...(19): siRNA sense strand
cuggauaagcugcggaaga

SEQ ID NO: 2284152 - RNA, 19 nt, Homo sapiens
  misc_RNA (1)...(19): siRNA sense strand
aggaagaguuucagcagga

SEQ ID NO: 2284153 - RNA, 19 nt, Homo sapiens
  misc_RNA (1)...(19): siRNA sense strand
uggagaaaugcgagacaau

SEQ ID NO: 2284154 - RNA, 19 nt, Homo sapiens
  misc_RNA (1)...(19): siRNA sense strand
cuuggaaaccuguggaaaa

SEQ ID NO: 2284155 - RNA, 19 nt, Homo sapiens
  misc_RNA (1)...(19): siRNA sense strand
agagggagcucaugggcau

SEQ ID NO: 2284156 - RNA, 19 nt, Homo sapiens
  misc_RNA (1)...(19): siRNA sense strand
ggagcuucgaagauggaaa

SEQ ID NO: 2284157 - RNA, 19 nt, Homo sapiens
  misc_RNA (1)...(19): siRNA sense strand
guggagaaccagagugacu

SEQ ID NO: 2284158 - RNA, 19 nt, Homo sapiens
  misc_RNA (1)...(19): siRNA sense strand
ccgcagagagggagcucau

SEQ ID NO: 2284159 - RNA, 19 nt, Homo sapiens
  misc_RNA (1)...(19): siRNA sense strand
gccaacaccaagaaagcaa

SEQ ID NO: 2284160 - RNA, 19 nt, Homo sapiens
  misc_RNA (1)...(19): siRNA sense strand
ccaacaagcaauaccgcau

SEQ ID NO: 2284161 - RNA, 19 nt, Homo sapiens
  misc_RNA (1)...(19): siRNA sense strand
cccaagaagcuccggguga

SEQ ID NO: 2284162 - RNA, 19 nt, Homo sapiens
  misc_RNA (1)...(19): siRNA sense strand
cguucgagacacugcgcua

SEQ ID NO: 2284163 - RNA, 19 nt, Homo sapiens
  misc_RNA (1)...(19): siRNA sense strand
agaugaaaugggagcagau

SEQ ID NO: 2284164 - RNA, 19 nt, Homo sapiens
  misc_RNA (1)...(19): siRNA sense strand
gugacugguaccuuggaaa

SEQ ID NO: 2284165 - RNA, 19 nt, Homo sapiens
  misc_RNA (1)...(19): siRNA sense strand
agacaauccacguugcuau

SEQ ID NO: 2284166 - RNA, 19 nt, Homo sapiens
  misc_RNA (1)...(19): siRNA sense strand
uccuguuacuucuggauaa

SEQ ID NO: 2284167 - RNA, 19 nt, Homo sapiens
  misc_RNA (1)...(19): siRNA sense strand
ugucugagcuggacgagga

SEQ ID NO: 2284168 - RNA, 19 nt, Homo sapiens
  misc_RNA (1)...(19): siRNA sense strand
gcuaugaguuccggcgaga

SEQ ID NO: 2284169 - RNA, 19 nt, Homo sapiens
  misc_RNA (1)...(19): siRNA sense strand
ucucaaaacccucaaggaa

SEQ ID NO: 2284170 - RNA, 19 nt, Homo sapiens
  misc_RNA (1)...(19): siRNA sense strand
agcuggaugugcaggagua

SEQ ID NO: 2284171 - RNA, 19 nt, Homo sapiens
  misc_RNA (1)...(19): siRNA sense strand
auggaaauguggaggcaaa

SEQ ID NO: 2284172 - RNA, 19 nt, Homo sapiens
  misc_RNA (1)...(19): siRNA sense strand
agacagauaucuugagcca

SEQ ID NO: 2284173 - RNA, 19 nt, Homo sapiens
  misc_RNA (1)...(19): siRNA sense strand
ucaaagaucugguggccca

SEQ ID NO: 2284174 - RNA, 19 nt, Homo sapiens
  misc_RNA (1)...(19): siRNA sense strand
gcaaacugaaacaggucua

SEQ ID NO: 2284175 - RNA, 19 nt, Homo sapiens
  misc_RNA (1)...(19): siRNA sense strand
cuggcuaagaacagacaaa

SEQ ID NO: 2284176 - RNA, 19 nt, Homo sapiens
  misc_RNA (1)...(19): siRNA sense strand
cagggaguuugaagaggaa

SEQ ID NO: 2284177 - RNA, 19 nt, Homo sapiens
  misc_RNA (1)...(19): siRNA sense strand
cgguauauucagcagaaaa

SEQ ID NO: 2284178 - RNA, 19 nt, Homo sapiens
  misc_RNA (1)...(19): siRNA sense strand
acauguaccgggugggaga

SEQ ID NO: 2284179 - RNA, 19 nt, Homo sapiens
  misc_RNA (1)...(19): siRNA sense strand
gccucuggcuucagggauu

SEQ ID NO: 2284180 - RNA, 19 nt, Homo sapiens
  misc_RNA (1)...(19): siRNA sense strand
ccacaaagcugacccgucu

SEQ ID NO: 2284181 - RNA, 19 nt, Homo sapiens
  misc_RNA (1)...(19): siRNA sense strand
gauaguaaugccagggagu

SEQ ID NO: 2284182 - RNA, 19 nt, Homo sapiens
  misc_RNA (1)...(19): siRNA sense strand
acagauaucuugagccagu

SEQ ID NO: 2284183 - RNA, 19 nt, Homo sapiens
  misc_RNA (1)...(19): siRNA sense strand
ccuaguagagggagaaucu

SEQ ID NO: 2284184 - RNA, 19 nt, Homo sapiens
  misc_RNA (1)...(19): siRNA sense strand
ccagggaguuugaagagga

SEQ ID NO: 2284185 - RNA, 19 nt, Homo sapiens
  misc_RNA (1)...(19): siRNA sense strand
cagaaaagguugaaagcug

SEQ ID NO: 2284186 - RNA, 19 nt, Homo sapiens
  misc_RNA (1)...(19): siRNA sense strand
uguuggaucuacuggaaga

SEQ ID NO: 2284187 - RNA, 19 nt, Homo sapiens
  misc_RNA (1)...(19): siRNA sense strand
caagacugcaaauggaaau

SEQ ID NO: 2284188 - RNA, 19 nt, Homo sapiens
  misc_RNA (1)...(19): siRNA sense strand
cccuagagaaguaugggaa

SEQ ID NO: 2284189 - RNA, 19 nt, Homo sapiens
  misc_RNA (1)...(19): siRNA sense strand
gcucacagccagcagccaa

SEQ ID NO: 2284190 - RNA, 19 nt, Homo sapiens
  misc_RNA (1)...(19): siRNA sense strand
cagccaagcgucagaaacu

SEQ ID NO: 2284191 - RNA, 19 nt, Homo sapiens
  misc_RNA (1)...(19): siRNA sense strand
gcucaacaagacugcaaau

SEQ ID NO: 2284192 - RNA, 19 nt, Homo sapiens
  misc_RNA (1)...(19): siRNA sense strand
uaguaaugccagggaguuu

SEQ ID NO: 2284193 - RNA, 19 nt, Homo sapiens
  misc_RNA (1)...(19): siRNA sense strand
gagaaguaugggaaggacu

SEQ ID NO: 2284194 - RNA, 19 nt, Homo sapiens
  misc_RNA (1)...(19): siRNA sense strand
uuaccugguuagacggauu

SEQ ID NO: 2284195 - RNA, 19 nt, Homo sapiens
  misc_RNA (1)...(19): siRNA sense strand
gagcucaacaagacugcaa

SEQ ID NO: 2284196 - RNA, 19 nt, Homo sapiens
  misc_RNA (1)...(19): siRNA sense strand
agagggagaaucugauaau

SEQ ID NO: 2284197 - RNA, 19 nt, Homo sapiens
  misc_RNA (1)...(19): siRNA sense strand
cagcagaagauggagauga

SEQ ID NO: 2284198 - RNA, 19 nt, Homo sapiens
  misc_RNA (1)...(19): siRNA sense strand
acaagacugcaaauggaaa

SEQ ID NO: 2284199 - RNA, 19 nt, Homo sapiens
  misc_RNA (1)...(19): siRNA sense strand
gggaguuugaagaggaauc

SEQ ID NO: 2284200 - RNA, 19 nt, Homo sapiens
  misc_RNA (1)...(19): siRNA sense strand
auccagaccugaagcucaa

SEQ ID NO: 2284201 - RNA, 19 nt, Homo sapiens
  misc_RNA (1)...(19): siRNA sense strand
uguuaugugcaaugaccua

SEQ ID NO: 2284202 - RNA, 19 nt, Homo sapiens
  misc_RNA (1)...(19): siRNA sense strand
aagaagaaccacuggacua

SEQ ID NO: 2284203 - RNA, 19 nt, Homo sapiens
  misc_RNA (1)...(19): siRNA sense strand
uaaucaaggaagcgggaaa

SEQ ID NO: 2284204 - RNA, 19 nt, Homo sapiens
  misc_RNA (1)...(19): siRNA sense strand
ucgaggaggccgagaguau

SEQ ID NO: 2284205 - RNA, 19 nt, Homo sapiens
  misc_RNA (1)...(19): siRNA sense strand
gagcuauagaacugauuaa

SEQ ID NO: 2284206 - RNA, 19 nt, Homo sapiens
  misc_RNA (1)...(19): siRNA sense strand
aggaaagacagccagaaua

SEQ ID NO: 2284207 - RNA, 19 nt, Homo sapiens
  misc_RNA (1)...(19): siRNA sense strand
ccagccagucagugggaaa

SEQ ID NO: 2284208 - RNA, 19 nt, Homo sapiens
  misc_RNA (1)...(19): siRNA sense strand
cuucugaguugaaaggcaa

SEQ ID NO: 2284209 - RNA, 19 nt, Homo sapiens
  misc_RNA (1)...(19): siRNA sense strand
ugagcaagggugagagaga

SEQ ID NO: 2284210 - RNA, 19 nt, Homo sapiens
  misc_RNA (1)...(19): siRNA sense strand
aaagaggagccaagggauu

SEQ ID NO: 2284211 - RNA, 19 nt, Homo sapiens
  misc_RNA (1)...(19): siRNA sense strand
gcauaguccacgcggagaa

SEQ ID NO: 2284212 - RNA, 19 nt, Homo sapiens
  misc_RNA (1)...(19): siRNA sense strand
ggagcuggacagugaacua

SEQ ID NO: 2284213 - RNA, 19 nt, Homo sapiens
  misc_RNA (1)...(19): siRNA sense strand
gggcaagagaccuaugauu

SEQ ID NO: 2284214 - RNA, 19 nt, Homo sapiens
  misc_RNA (1)...(19): siRNA sense strand
gagaaaagagacuggauuu

SEQ ID NO: 2284215 - RNA, 19 nt, Homo sapiens
  misc_RNA (1)...(19): siRNA sense strand
cggagaaugaggaggagga

SEQ ID NO: 2284216 - RNA, 19 nt, Homo sapiens
  misc_RNA (1)...(19): siRNA sense strand
acccaggagacaaggaaua

SEQ ID NO: 2284217 - RNA, 19 nt, Homo sapiens
  misc_RNA (1)...(19): siRNA sense strand
uggaagagugugaagauga

SEQ ID NO: 2284218 - RNA, 19 nt, Homo sapiens
  misc_RNA (1)...(19): siRNA sense strand
aggaauaccaccaaaccaa

SEQ ID NO: 2284219 - RNA, 19 nt, Homo sapiens
  misc_RNA (1)...(19): siRNA sense strand
ucuccaagaaacagcauua

SEQ ID NO: 2284220 - RNA, 19 nt, Homo sapiens
  misc_RNA (1)...(19): siRNA sense strand
agagagagagagaaaucaa

SEQ ID NO: 2284221 - RNA, 19 nt, Homo sapiens
  misc_RNA (1)...(19): siRNA sense strand
ugaccaaugcagagaagau

SEQ ID NO: 2284222 - RNA, 19 nt, Homo sapiens
  misc_RNA (1)...(19): siRNA sense strand
aggaaacuauuaugggaca

SEQ ID NO: 2284223 - RNA, 19 nt, Homo sapiens
  misc_RNA (1)...(19): siRNA sense strand
ugaacaaggaccugcgaca

SEQ ID NO: 2284224 - RNA, 19 nt, Homo sapiens
  misc_RNA (1)...(19): siRNA sense strand
gggauaaccuuuaccgcca

SEQ ID NO: 2284225 - RNA, 19 nt, Homo sapiens
  misc_RNA (1)...(19): siRNA sense strand
uuggauggcaagauggaaa

SEQ ID NO: 2284226 - RNA, 19 nt, Homo sapiens
  misc_RNA (1)...(19): siRNA sense strand
ugaaugggcaagagaccua

SEQ ID NO: 2284227 - RNA, 19 nt, Homo sapiens
  misc_RNA (1)...(19): siRNA sense strand
ggaaagaggagccaaggga

SEQ ID NO: 2284228 - RNA, 19 nt, Homo sapiens
  misc_RNA (1)...(19): siRNA sense strand
guggaugggacgccaguaa

SEQ ID NO: 2284229 - RNA, 19 nt, Homo sapiens
  misc_RNA (1)...(19): siRNA sense strand
gaccauaacacgaaaacaa

SEQ ID NO: 2284230 - RNA, 19 nt, Homo sapiens
  misc_RNA (1)...(19): siRNA sense strand
aagaauggacagaagauca

SEQ ID NO: 2284231 - RNA, 19 nt, Homo sapiens
  misc_RNA (1)...(19): siRNA sense strand
ucaaagggccaaugggcuu

SEQ ID NO: 2284232 - RNA, 19 nt, Homo sapiens
  misc_RNA (1)...(19): siRNA sense strand
ggaaagugaucacgacgga

SEQ ID NO: 2284233 - RNA, 19 nt, Homo sapiens
  misc_RNA (1)...(19): siRNA sense strand
aaggaaagacagccagaau

SEQ ID NO: 2284234 - RNA, 19 nt, Homo sapiens
  misc_RNA (1)...(19): siRNA sense strand
cgggauugagcaaggguga

SEQ ID NO: 2284235 - RNA, 19 nt, Homo sapiens
  misc_RNA (1)...(19): siRNA sense strand
aagcaacacaggagcaaga

SEQ ID NO: 2284236 - RNA, 19 nt, Homo sapiens
  misc_RNA (1)...(19): siRNA sense strand
agacaaggaggaaggcuga

SEQ ID NO: 2284237 - RNA, 19 nt, Homo sapiens
  misc_RNA (1)...(19): siRNA sense strand
gccuaaacaagcagcagaa

SEQ ID NO: 2284238 - RNA, 19 nt, Homo sapiens
  misc_RNA (1)...(19): siRNA sense strand
ugaagaugaugaaggggua

SEQ ID NO: 2284239 - RNA, 19 nt, Homo sapiens
  misc_RNA (1)...(19): siRNA sense strand
ccaccaaaccaaagcagga

SEQ ID NO: 2284240 - RNA, 19 nt, Homo sapiens
  misc_RNA (1)...(19): siRNA sense strand
cuucaaggccgucagacaa

SEQ ID NO: 2284241 - RNA, 19 nt, Homo sapiens
  misc_RNA (1)...(19): siRNA sense strand
ugaauuaaucuguguggau

SEQ ID NO: 2284242 - RNA, 19 nt, Homo sapiens
  misc_RNA (1)...(19): siRNA sense strand
cggcucaguaccagaauau

SEQ ID NO: 2284243 - RNA, 19 nt, Homo sapiens
  misc_RNA (1)...(19): siRNA sense strand
ggucaaacuaugaaaacau

SEQ ID NO: 2284244 - RNA, 19 nt, Homo sapiens
  misc_RNA (1)...(19): siRNA sense strand
agggugagagagagagaga

SEQ ID NO: 2284245 - RNA, 19 nt, Homo sapiens
  misc_RNA (1)...(19): siRNA sense strand
ucacaaaauaggucggauu

SEQ ID NO: 2284246 - RNA, 19 nt, Homo sapiens
  misc_RNA (1)...(19): siRNA sense strand
aguauaacauggaccucua

SEQ ID NO: 2284247 - RNA, 19 nt, Homo sapiens
  misc_RNA (1)...(19): siRNA sense strand
gcacacucuccaagaaaca

SEQ ID NO: 2284248 - RNA, 19 nt, Homo sapiens
  misc_RNA (1)...(19): siRNA sense strand
cgguagccauuuuggauaa

SEQ ID NO: 2284249 - RNA, 19 nt, Homo sapiens
  misc_RNA (1)...(19): siRNA sense strand
aauuauugugaaugggcaa

SEQ ID NO: 2284250 - RNA, 19 nt, Homo sapiens
  misc_RNA (1)...(19): siRNA sense strand
caggcaaagucaauggcau

SEQ ID NO: 2284251 - RNA, 19 nt, Homo sapiens
  misc_RNA (1)...(19): siRNA sense strand
uggaaaugaaccaggggaa

SEQ ID NO: 2284252 - RNA, 19 nt, Homo sapiens
  misc_RNA (1)...(19): siRNA sense strand
agaagaauggacagaagau

SEQ ID NO: 2284253 - RNA, 19 nt, Homo sapiens
  misc_RNA (1)...(19): siRNA sense strand
ucucauaguggaaguuaau

SEQ ID NO: 2284254 - RNA, 19 nt, Homo sapiens
  misc_RNA (1)...(19): siRNA sense strand
ccacuggaaaggaaagaca

SEQ ID NO: 2284255 - RNA, 19 nt, Homo sapiens
  misc_RNA (1)...(19): siRNA sense strand
agccgauucuggugaacaa

SEQ ID NO: 2284256 - RNA, 19 nt, Homo sapiens
  misc_RNA (1)...(19): siRNA sense strand
agcagaagccacuggaaga

SEQ ID NO: 2284257 - RNA, 19 nt, Homo sapiens
  misc_RNA (1)...(19): siRNA sense strand
gcaaccacuggaaaggaaa

SEQ ID NO: 2284258 - RNA, 19 nt, Homo sapiens
  misc_RNA (1)...(19): siRNA sense strand
cagaauauggugggucaaa

SEQ ID NO: 2284259 - RNA, 19 nt, Homo sapiens
  misc_RNA (1)...(19): siRNA sense strand
gaaggaaacuauuauggga

SEQ ID NO: 2284260 - RNA, 19 nt, Homo sapiens
  misc_RNA (1)...(19): siRNA sense strand
ccuacaaugauaugcaaaa

SEQ ID NO: 2284261 - RNA, 19 nt, Homo sapiens
  misc_RNA (1)...(19): siRNA sense strand
gggagauggccuauacuga

SEQ ID NO: 2284262 - RNA, 19 nt, Homo sapiens
  misc_RNA (1)...(19): siRNA sense strand
cacacaaagcugcggaaaa

SEQ ID NO: 2284263 - RNA, 19 nt, Homo sapiens
  misc_RNA (1)...(19): siRNA sense strand
ggaaacaggggaugugauu

SEQ ID NO: 2284264 - RNA, 19 nt, Homo sapiens
  misc_RNA (1)...(19): siRNA sense strand
gaagacaaagggaggaaca

SEQ ID NO: 2284265 - RNA, 19 nt, Homo sapiens
  misc_RNA (1)...(19): siRNA sense strand
gcgaagacaaagggaggaa

SEQ ID NO: 2284266 - RNA, 19 nt, Homo sapiens
  misc_RNA (1)...(19): siRNA sense strand
uggacacaguggaggacuu

SEQ ID NO: 2284267 - RNA, 19 nt, Homo sapiens
  misc_RNA (1)...(19): siRNA sense strand
gcguggacacaguggagga

SEQ ID NO: 2284268 - RNA, 19 nt, Homo sapiens
  misc_RNA (1)...(19): siRNA sense strand
ccuauggauggcuggcuaa

SEQ ID NO: 2284269 - RNA, 19 nt, Homo sapiens
  misc_RNA (1)...(19): siRNA sense strand
ccuccuaagcacaaagaaa

SEQ ID NO: 2284270 - RNA, 19 nt, Homo sapiens
  misc_RNA (1)...(19): siRNA sense strand
acuuugagguagugagaga

SEQ ID NO: 2284271 - RNA, 19 nt, Homo sapiens
  misc_RNA (1)...(19): siRNA sense strand
auguugaaugggaggaaua

SEQ ID NO: 2284272 - RNA, 19 nt, Homo sapiens
  misc_RNA (1)...(19): siRNA sense strand
ccaaaugucuucauagcca

SEQ ID NO: 2284273 - RNA, 19 nt, Homo sapiens
  misc_RNA (1)...(19): siRNA sense strand
aggucaagaagaagcgaga

SEQ ID NO: 2284274 - RNA, 19 nt, Homo sapiens
  misc_RNA (1)...(19): siRNA sense strand
cuauaaagagcaaugcaga

SEQ ID NO: 2284275 - RNA, 19 nt, Homo sapiens
  misc_RNA (1)...(19): siRNA sense strand
cccaaagguagaugauaau

SEQ ID NO: 2284276 - RNA, 19 nt, Homo sapiens
  misc_RNA (1)...(19): siRNA sense strand
cugcauuacuugugggcuc

SEQ ID NO: 2284277 - RNA, 19 nt, Homo sapiens
  misc_RNA (1)...(19): siRNA sense strand
gguccagggugcaagcuga

SEQ ID NO: 2284278 - RNA, 19 nt, Homo sapiens
  misc_RNA (1)...(19): siRNA sense strand
acaacugauugaaugggua

SEQ ID NO: 2284279 - RNA, 19 nt, Homo sapiens
  misc_RNA (1)...(19): siRNA sense strand
acacauuacaccuaaccaa

SEQ ID NO: 2284280 - RNA, 19 nt, Homo sapiens
  misc_RNA (1)...(19): siRNA sense strand
ccagagacugugagcacuu

SEQ ID NO: 2284281 - RNA, 19 nt, Homo sapiens
  misc_RNA (1)...(19): siRNA sense strand
ggaaauaucacuuugaggu

SEQ ID NO: 2284282 - RNA, 19 nt, Homo sapiens
  misc_RNA (1)...(19): siRNA sense strand
aacuauguuuacagggaau

SEQ ID NO: 2284283 - RNA, 19 nt, Homo sapiens
  misc_RNA (1)...(19): siRNA sense strand
gaggaauagcauggaguca

SEQ ID NO: 2284284 - RNA, 19 nt, Homo sapiens
  misc_RNA (1)...(19): siRNA sense strand
uggucaaguggcaggguca

SEQ ID NO: 2284285 - RNA, 19 nt, Homo sapiens
  misc_RNA (1)...(19): siRNA sense strand
caagaagaagcgagagccu

SEQ ID NO: 2284286 - RNA, 19 nt, Homo sapiens
  misc_RNA (1)...(19): siRNA sense strand
ggcagggucaugagggaga

SEQ ID NO: 2284287 - RNA, 19 nt, Homo sapiens
  misc_RNA (1)...(19): siRNA sense strand
ugagguagugagagacaca

SEQ ID NO: 2284288 - RNA, 19 nt, Homo sapiens
  misc_RNA (1)...(19): siRNA sense strand
ggaauccaccagcgggcua

SEQ ID NO: 2284289 - RNA, 19 nt, Homo sapiens
  misc_RNA (1)...(19): siRNA sense strand
gcagaagggugcagaggca

SEQ ID NO: 2284290 - RNA, 19 nt, Homo sapiens
  misc_RNA (1)...(19): siRNA sense strand
cuacuuaaggagaaagcaa

SEQ ID NO: 2284291 - RNA, 19 nt, Homo sapiens
  misc_RNA (1)...(19): siRNA sense strand
aggaggaacaggagacgaa

SEQ ID NO: 2284292 - RNA, 19 nt, Homo sapiens
  misc_RNA (1)...(19): siRNA sense strand
cuuugagggaagagaagaa

SEQ ID NO: 2284293 - RNA, 19 nt, Homo sapiens
  misc_RNA (1)...(19): siRNA sense strand
gugaaagggaagggaguau

SEQ ID NO: 2284294 - RNA, 19 nt, Homo sapiens
  misc_RNA (1)...(19): siRNA sense strand
agaacugaaacaagagcua

SEQ ID NO: 2284295 - RNA, 19 nt, Homo sapiens
  misc_RNA (1)...(19): siRNA sense strand
aaaagaaaggagagaagaa

SEQ ID NO: 2284296 - RNA, 19 nt, Homo sapiens
  misc_RNA (1)...(19): siRNA sense strand
gcgaaagagaaaauugaaa

SEQ ID NO: 2284297 - RNA, 19 nt, Homo sapiens
  misc_RNA (1)...(19): siRNA sense strand
gaacaggagacgaaaagaa

SEQ ID NO: 2284298 - RNA, 19 nt, Homo sapiens
  misc_RNA (1)...(19): siRNA sense strand
agaaauagccccaaggaca

SEQ ID NO: 2284299 - RNA, 19 nt, Homo sapiens
  misc_RNA (1)...(19): siRNA sense strand
agacgaaaagaaagcgaaa

SEQ ID NO: 2284300 - RNA, 19 nt, Homo sapiens
  misc_RNA (1)...(19): siRNA sense strand
acgaaaagaaagcgaaaga

SEQ ID NO: 2284301 - RNA, 19 nt, Homo sapiens
  misc_RNA (1)...(19): siRNA sense strand
acagauaaaaggaggaaca

SEQ ID NO: 2284302 - RNA, 19 nt, Homo sapiens
  misc_RNA (1)...(19): siRNA sense strand
ccucuugaacagaugcaaa

SEQ ID NO: 2284303 - RNA, 19 nt, Homo sapiens
  misc_RNA (1)...(19): siRNA sense strand
gaguauuaucucaagcaau

SEQ ID NO: 2284304 - RNA, 19 nt, Homo sapiens
  misc_RNA (1)...(19): siRNA sense strand
aagaaguagaugucggaga

SEQ ID NO: 2284305 - RNA, 19 nt, Homo sapiens
  misc_RNA (1)...(19): siRNA sense strand
ggagagaagaaggagaaaa

SEQ ID NO: 2284306 - RNA, 19 nt, Homo sapiens
  misc_RNA (1)...(19): siRNA sense strand
acuuaaggagaaagcaauu

SEQ ID NO: 2284307 - RNA, 19 nt, Homo sapiens
  misc_RNA (1)...(19): siRNA sense strand
agaaagcgaaagagaaaau

SEQ ID NO: 2284308 - RNA, 19 nt, Homo sapiens
  misc_RNA (1)...(19): siRNA sense strand
ugcuaguucaccagagaaa

SEQ ID NO: 2284309 - RNA, 19 nt, Homo sapiens
  misc_RNA (1)...(19): siRNA sense strand
uugaauaucuuaagcagca

SEQ ID NO: 2284310 - RNA, 19 nt, Homo sapiens
  misc_RNA (1)...(19): siRNA sense strand
aggugaaagggaagggagu

SEQ ID NO: 2284311 - RNA, 19 nt, Homo sapiens
  misc_RNA (1)...(19): siRNA sense strand
caggcaacuuugagggaag

SEQ ID NO: 2284312 - RNA, 19 nt, Homo sapiens
  misc_RNA (1)...(19): siRNA sense strand
gauaaaaggaggaacagga

SEQ ID NO: 2284313 - RNA, 19 nt, Homo sapiens
  misc_RNA (1)...(19): siRNA sense strand
gggagcagauccagccuga

SEQ ID NO: 2284314 - RNA, 19 nt, Homo sapiens
  misc_RNA (1)...(19): siRNA sense strand
ggaagaaguagaugucgga

SEQ ID NO: 2284315 - RNA, 19 nt, Homo sapiens
  misc_RNA (1)...(19): siRNA sense strand
agcugaauccuaagaagaa

SEQ ID NO: 2284316 - RNA, 19 nt, Homo sapiens
  misc_RNA (1)...(19): siRNA sense strand
agaagaagauuugggagca

SEQ ID NO: 2284317 - RNA, 19 nt, Homo sapiens
  misc_RNA (1)...(19): siRNA sense strand
gagugaagcaaauaccauu

SEQ ID NO: 2284318 - RNA, 19 nt, Homo sapiens
  misc_RNA (1)...(19): siRNA sense strand
agaagggugcagaggcaga

SEQ ID NO: 2284319 - RNA, 19 nt, Homo sapiens
  misc_RNA (1)...(19): siRNA sense strand
aaaggagagaagaaggaga

SEQ ID NO: 2284320 - RNA, 19 nt, Homo sapiens
  misc_RNA (1)...(19): siRNA sense strand
gggugcagaggcagaucaa

SEQ ID NO: 2284321 - RNA, 19 nt, Homo sapiens
  misc_RNA (1)...(19): siRNA sense strand
gaggaacaggagacgaaaa

SEQ ID NO: 2284322 - RNA, 19 nt, Homo sapiens
  misc_RNA (1)...(19): siRNA sense strand
cuuuguauguggaagaagu

SEQ ID NO: 2284323 - RNA, 19 nt, Homo sapiens
  misc_RNA (1)...(19): siRNA sense strand
augcaaaaucggaugguga

SEQ ID NO: 2284324 - RNA, 19 nt, Homo sapiens
  misc_RNA (1)...(19): siRNA sense strand
ugaaaagaaaggagagaag

SEQ ID NO: 2284325 - RNA, 19 nt, Homo sapiens
  misc_RNA (1)...(19): siRNA sense strand
ucaauaaacccaagggcaa

SEQ ID NO: 2284326 - RNA, 19 nt, Homo sapiens
  misc_RNA (1)...(19): siRNA sense strand
ccaaauauauggaccgcau

SEQ ID NO: 2284327 - RNA, 19 nt, Homo sapiens
  misc_RNA (1)...(19): siRNA sense strand
uggcuaagcuggugggacu

SEQ ID NO: 2284328 - RNA, 19 nt, Homo sapiens
  misc_RNA (1)...(19): siRNA sense strand
ggaccaguggagagggcaa

SEQ ID NO: 2284329 - RNA, 19 nt, Homo sapiens
  misc_RNA (1)...(19): siRNA sense strand
uggccaaggugguggacga

SEQ ID NO: 2284330 - RNA, 19 nt, Homo sapiens
  misc_RNA (1)...(19): siRNA sense strand
cggguggguuuguggaaga

SEQ ID NO: 2284331 - RNA, 19 nt, Homo sapiens
  misc_RNA (1)...(19): siRNA sense strand
aggagagaguggagggaug

SEQ ID NO: 2284332 - RNA, 19 nt, Homo sapiens
  misc_RNA (1)...(19): siRNA sense strand
ggaugaaaguuaugaggug

SEQ ID NO: 2284333 - RNA, 19 nt, Homo sapiens
  misc_RNA (1)...(19): siRNA sense strand
augcagaagccuggauuaa

SEQ ID NO: 2284334 - RNA, 19 nt, Homo sapiens
  misc_RNA (1)...(19): siRNA sense strand
gccucaugcuagacaacaa

SEQ ID NO: 2284335 - RNA, 19 nt, Homo sapiens
  misc_RNA (1)...(19): siRNA sense strand
gaugaaaguuaugagguga

SEQ ID NO: 2284336 - RNA, 19 nt, Homo sapiens
  misc_RNA (1)...(19): siRNA sense strand
uauacgugcugguggucaa

SEQ ID NO: 2284337 - RNA, 19 nt, Homo sapiens
  misc_RNA (1)...(19): siRNA sense strand
cggcagcgagcgaguaaau

SEQ ID NO: 2284338 - RNA, 19 nt, Homo sapiens
  misc_RNA (1)...(19): siRNA sense strand
aagaagaauguuggugaaa

SEQ ID NO: 2284339 - RNA, 19 nt, Homo sapiens
  misc_RNA (1)...(19): siRNA sense strand
ggaacaacggccuggagga

SEQ ID NO: 2284340 - RNA, 19 nt, Homo sapiens
  misc_RNA (1)...(19): siRNA sense strand
ggcaggugcuggaggaacu

SEQ ID NO: 2284341 - RNA, 19 nt, Homo sapiens
  misc_RNA (1)...(19): siRNA sense strand
ggaccaaccuagcugggca

SEQ ID NO: 2284342 - RNA, 19 nt, Homo sapiens
  misc_RNA (1)...(19): siRNA sense strand
gaggaggggacaaggagaa

SEQ ID NO: 2284343 - RNA, 19 nt, Homo sapiens
  misc_RNA (1)...(19): siRNA sense strand
acuauggcguuucggacaa

SEQ ID NO: 2284344 - RNA, 19 nt, Homo sapiens
  misc_RNA (1)...(19): siRNA sense strand
ucaccuuguggcuggauaa

SEQ ID NO: 2284345 - RNA, 19 nt, Homo sapiens
  misc_RNA (1)...(19): siRNA sense strand
aaggaguggcagagaucau

SEQ ID NO: 2284346 - RNA, 19 nt, Homo sapiens
  misc_RNA (1)...(19): siRNA sense strand
cugaagaccgcgaggcugu

SEQ ID NO: 2284347 - RNA, 19 nt, Homo sapiens
  misc_RNA (1)...(19): siRNA sense strand
uggagcugcuggagaagau

SEQ ID NO: 2284348 - RNA, 19 nt, Homo sapiens
  misc_RNA (1)...(19): siRNA sense strand
uggaggagcucgugcugca

SEQ ID NO: 2284349 - RNA, 19 nt, Homo sapiens
  misc_RNA (1)...(19): siRNA sense strand
caagaacggcagcgagcga

SEQ ID NO: 2284350 - RNA, 19 nt, Homo sapiens
  misc_RNA (1)...(19): siRNA sense strand
ggucagaaguaucagagga

SEQ ID NO: 2284351 - RNA, 19 nt, Homo sapiens
  misc_RNA (1)...(19): siRNA sense strand
cagaaguaucagaggaagu

SEQ ID NO: 2284352 - RNA, 19 nt, Homo sapiens
  misc_RNA (1)...(19): siRNA sense strand
ggagaacucuuuagccgaa

SEQ ID NO: 2284353 - RNA, 19 nt, Homo sapiens
  misc_RNA (1)...(19): siRNA sense strand
gucagaaguaucagaggaa

SEQ ID NO: 2284354 - RNA, 19 nt, Homo sapiens
  misc_RNA (1)...(19): siRNA sense strand
aggcauucacagaaagaga

SEQ ID NO: 2284355 - RNA, 19 nt, Homo sapiens
  misc_RNA (1)...(19): siRNA sense strand
ugaagaugcucauucggaa

SEQ ID NO: 2284356 - RNA, 19 nt, Homo sapiens
  misc_RNA (1)...(19): siRNA sense strand
caacauugcccaucgggau

SEQ ID NO: 2284357 - RNA, 19 nt, Homo sapiens
  misc_RNA (1)...(19): siRNA sense strand
agaaagagaagcauccgaa

SEQ ID NO: 2284358 - RNA, 19 nt, Homo sapiens
  misc_RNA (1)...(19): siRNA sense strand
aggagaaauucgcccucaa

SEQ ID NO: 2284359 - RNA, 19 nt, Homo sapiens
  misc_RNA (1)...(19): siRNA sense strand
augucaagccugagaaucu

SEQ ID NO: 2284360 - RNA, 19 nt, Homo sapiens
  misc_RNA (1)...(19): siRNA sense strand
aguccggccugcagaucaa

SEQ ID NO: 2284361 - RNA, 19 nt, Homo sapiens
  misc_RNA (1)...(19): siRNA sense strand
auguuuggacgguggagaa

SEQ ID NO: 2284362 - RNA, 19 nt, Homo sapiens
  misc_RNA (1)...(19): siRNA sense strand
gguccagagaaguaugaca

SEQ ID NO: 2284363 - RNA, 19 nt, Homo sapiens
  misc_RNA (1)...(19): siRNA sense strand
gggaggaagugccugcuga

SEQ ID NO: 2284364 - RNA, 19 nt, Homo sapiens
  misc_RNA (1)...(19): siRNA sense strand
ggucagaaguaucagagga

SEQ ID NO: 2284365 - RNA, 19 nt, Homo sapiens
  misc_RNA (1)...(19): siRNA sense strand
cagaaguaucagaggaagu

SEQ ID NO: 2284366 - RNA, 19 nt, Homo sapiens
  misc_RNA (1)...(19): siRNA sense strand
ggagaacucuuuagccgaa

SEQ ID NO: 2284367 - RNA, 19 nt, Homo sapiens
  misc_RNA (1)...(19): siRNA sense strand
gucagaaguaucagaggaa

SEQ ID NO: 2284368 - RNA, 19 nt, Homo sapiens
  misc_RNA (1)...(19): siRNA sense strand
aggcauucacagaaagaga

SEQ ID NO: 2284369 - RNA, 19 nt, Homo sapiens
  misc_RNA (1)...(19): siRNA sense strand
gcugaagaggcggaagaaa

SEQ ID NO: 2284370 - RNA, 19 nt, Homo sapiens
  misc_RNA (1)...(19): siRNA sense strand
cugcugaagaggcggaaga

SEQ ID NO: 2284371 - RNA, 19 nt, Homo sapiens
  misc_RNA (1)...(19): siRNA sense strand
ugaagaugcucauucggaa

SEQ ID NO: 2284372 - RNA, 19 nt, Homo sapiens
  misc_RNA (1)...(19): siRNA sense strand
caacauugcccaucgggau

SEQ ID NO: 2284373 - RNA, 19 nt, Homo sapiens
  misc_RNA (1)...(19): siRNA sense strand
agaaagagaagcauccgaa

SEQ ID NO: 2284374 - RNA, 19 nt, Homo sapiens
  misc_RNA (1)...(19): siRNA sense strand
aggagaaauucgcccucaa

SEQ ID NO: 2284375 - RNA, 19 nt, Homo sapiens
  misc_RNA (1)...(19): siRNA sense strand
augucaagccugagaaucu

SEQ ID NO: 2284376 - RNA, 19 nt, Homo sapiens
  misc_RNA (1)...(19): siRNA sense strand
auguuuggacgguggagaa

SEQ ID NO: 2284377 - RNA, 19 nt, Homo sapiens
  misc_RNA (1)...(19): siRNA sense strand
aguccggccugcagaucaa

SEQ ID NO: 2284378 - RNA, 19 nt, Homo sapiens
  misc_RNA (1)...(19): siRNA sense strand
gguccagagaaguaugaca

SEQ ID NO: 2284379 - RNA, 19 nt, Homo sapiens
  misc_RNA (1)...(19): siRNA sense strand
gcguugacuacgagcagau

SEQ ID NO: 2284380 - RNA, 19 nt, Homo sapiens
  misc_RNA (1)...(19): siRNA sense strand
gggaggaagugccugcuga

SEQ ID NO: 2284381 - RNA, 19 nt, Homo sapiens
  misc_RNA (1)...(19): siRNA sense strand
aggagaaggacgaguggau

SEQ ID NO: 2284382 - RNA, 19 nt, Homo sapiens
  misc_RNA (1)...(19): siRNA sense strand
ccggagaggcccagaaaau

SEQ ID NO: 2284383 - RNA, 19 nt, Homo sapiens
  misc_RNA (1)...(19): siRNA sense strand
gggaaugaccugacccaca

SEQ ID NO: 2284384 - RNA, 19 nt, Homo sapiens
  misc_RNA (1)...(19): siRNA sense strand
gggagagggaagaacugaa

SEQ ID NO: 2284385 - RNA, 19 nt, Homo sapiens
  misc_RNA (1)...(19): siRNA sense strand
agaacacacccgaggagau

SEQ ID NO: 2284386 - RNA, 19 nt, Homo sapiens
  misc_RNA (1)...(19): siRNA sense strand
ucaagaagaagcaggagca

SEQ ID NO: 2284387 - RNA, 19 nt, Homo sapiens
  misc_RNA (1)...(19): siRNA sense strand
cggaaccggaagauggcaa

SEQ ID NO: 2284388 - RNA, 19 nt, Homo sapiens
  misc_RNA (1)...(19): siRNA sense strand
aggagaaggacgaguggau

SEQ ID NO: 2284389 - RNA, 19 nt, Homo sapiens
  misc_RNA (1)...(19): siRNA sense strand
ccggagaggcccagaaaau

SEQ ID NO: 2284390 - RNA, 19 nt, Homo sapiens
  misc_RNA (1)...(19): siRNA sense strand
gggaaugaccugacccaca

SEQ ID NO: 2284391 - RNA, 19 nt, Homo sapiens
  misc_RNA (1)...(19): siRNA sense strand
gggagagggaagaacugaa

SEQ ID NO: 2284392 - RNA, 19 nt, Homo sapiens
  misc_RNA (1)...(19): siRNA sense strand
agaacacacccgaggagau

SEQ ID NO: 2284393 - RNA, 19 nt, Homo sapiens
  misc_RNA (1)...(19): siRNA sense strand
ucaagaagaagcaggagca

SEQ ID NO: 2284394 - RNA, 19 nt, Homo sapiens
  misc_RNA (1)...(19): siRNA sense strand
cggaaccggaagauggcaa

SEQ ID NO: 2284395 - RNA, 19 nt, Homo sapiens
  misc_RNA (1)...(19): siRNA sense strand
cuuuagagaaucugaguau

SEQ ID NO: 2284396 - RNA, 19 nt, Homo sapiens
  misc_RNA (1)...(19): siRNA sense strand
aggagaaggaggaguggau

SEQ ID NO: 2284397 - RNA, 19 nt, Homo sapiens
  misc_RNA (1)...(19): siRNA sense strand
aggguaaagacuuggaaga

SEQ ID NO: 2284398 - RNA, 19 nt, Homo sapiens
  misc_RNA (1)...(19): siRNA sense strand
ggaacaaacagguagccau

SEQ ID NO: 2284399 - RNA, 19 nt, Homo sapiens
  misc_RNA (1)...(19): siRNA sense strand
guucuuauauaaaggcgaa

SEQ ID NO: 2284400 - RNA, 19 nt, Homo sapiens
  misc_RNA (1)...(19): siRNA sense strand
aggcguuugcccagcgaua

SEQ ID NO: 2284401 - RNA, 19 nt, Homo sapiens
  misc_RNA (1)...(19): siRNA sense strand
ccugcaagaccgaggcuga

SEQ ID NO: 2284402 - RNA, 19 nt, Homo sapiens
  misc_RNA (1)...(19): siRNA sense strand
ccugggauccacagaggaa

SEQ ID NO: 2284403 - RNA, 19 nt, Homo sapiens
  misc_RNA (1)...(19): siRNA sense strand
auauaaaggcgaagggcuc

SEQ ID NO: 2284404 - RNA, 19 nt, Homo sapiens
  misc_RNA (1)...(19): siRNA sense strand
guaaagacuuggaagagac

SEQ ID NO: 2284405 - RNA, 19 nt, Homo sapiens
  misc_RNA (1)...(19): siRNA sense strand
gaaucugaguauccgggaa

SEQ ID NO: 2284406 - RNA, 19 nt, Homo sapiens
  misc_RNA (1)...(19): siRNA sense strand
cugaagaacacuugugaag

SEQ ID NO: 2284407 - RNA, 19 nt, Homo sapiens
  misc_RNA (1)...(19): siRNA sense strand
cccagaagacgacgggaau

SEQ ID NO: 2284408 - RNA, 19 nt, Homo sapiens
  misc_RNA (1)...(19): siRNA sense strand
aggaguggauuaagugcau

SEQ ID NO: 2284409 - RNA, 19 nt, Homo sapiens
  misc_RNA (1)...(19): siRNA sense strand
gaacaaacagguagccaug

SEQ ID NO: 2284410 - RNA, 19 nt, Homo sapiens
  misc_RNA (1)...(19): siRNA sense strand
cccagaagaucgaccggau

SEQ ID NO: 2284411 - RNA, 19 nt, Homo sapiens
  misc_RNA (1)...(19): siRNA sense strand
guggagagguucauugcca

SEQ ID NO: 2284412 - RNA, 19 nt, Homo sapiens
  misc_RNA (1)...(19): siRNA sense strand
cuuuagagaaucugaguau

SEQ ID NO: 2284413 - RNA, 19 nt, Homo sapiens
  misc_RNA (1)...(19): siRNA sense strand
aggagaaggaggaguggau

SEQ ID NO: 2284414 - RNA, 19 nt, Homo sapiens
  misc_RNA (1)...(19): siRNA sense strand
aggguaaagacuuggaaga

SEQ ID NO: 2284415 - RNA, 19 nt, Homo sapiens
  misc_RNA (1)...(19): siRNA sense strand
ggaacaaacagguagccau

SEQ ID NO: 2284416 - RNA, 19 nt, Homo sapiens
  misc_RNA (1)...(19): siRNA sense strand
guucuuauauaaaggcgaa

SEQ ID NO: 2284417 - RNA, 19 nt, Homo sapiens
  misc_RNA (1)...(19): siRNA sense strand
aggcguuugcccagcgaua

SEQ ID NO: 2284418 - RNA, 19 nt, Homo sapiens
  misc_RNA (1)...(19): siRNA sense strand
ccugcaagaccgaggcuga

SEQ ID NO: 2284419 - RNA, 19 nt, Homo sapiens
  misc_RNA (1)...(19): siRNA sense strand
ccugggauccacagaggaa

SEQ ID NO: 2284420 - RNA, 19 nt, Homo sapiens
  misc_RNA (1)...(19): siRNA sense strand
auauaaaggcgaagggcuc

SEQ ID NO: 2284421 - RNA, 19 nt, Homo sapiens
  misc_RNA (1)...(19): siRNA sense strand
guaaagacuuggaagagac

SEQ ID NO: 2284422 - RNA, 19 nt, Homo sapiens
  misc_RNA (1)...(19): siRNA sense strand
gaaucugaguauccgggaa

SEQ ID NO: 2284423 - RNA, 19 nt, Homo sapiens
  misc_RNA (1)...(19): siRNA sense strand
cugaagaacacuugugaag

SEQ ID NO: 2284424 - RNA, 19 nt, Homo sapiens
  misc_RNA (1)...(19): siRNA sense strand
cccagaagacgacgggaau

SEQ ID NO: 2284425 - RNA, 19 nt, Homo sapiens
  misc_RNA (1)...(19): siRNA sense strand
aggaguggauuaagugcau

SEQ ID NO: 2284426 - RNA, 19 nt, Homo sapiens
  misc_RNA (1)...(19): siRNA sense strand
gaacaaacagguagccaug

SEQ ID NO: 2284427 - RNA, 19 nt, Homo sapiens
  misc_RNA (1)...(19): siRNA sense strand
cccagaagaucgaccggau

SEQ ID NO: 2284428 - RNA, 19 nt, Homo sapiens
  misc_RNA (1)...(19): siRNA sense strand
guggagagguucauugcca

SEQ ID NO: 2284429 - RNA, 19 nt, Homo sapiens
  misc_RNA (1)...(19): siRNA sense strand
ugaaacucuccgagggaaa

SEQ ID NO: 2284430 - RNA, 19 nt, Homo sapiens
  misc_RNA (1)...(19): siRNA sense strand
uguuggugccauugagaaa

SEQ ID NO: 2284431 - RNA, 19 nt, Homo sapiens
  misc_RNA (1)...(19): siRNA sense strand
caccaaaagcucaggacaa

SEQ ID NO: 2284432 - RNA, 19 nt, Homo sapiens
  misc_RNA (1)...(19): siRNA sense strand
ggaagaauuuauuauggga

SEQ ID NO: 2284433 - RNA, 19 nt, Homo sapiens
  misc_RNA (1)...(19): siRNA sense strand
aaaucaguacuaagagcaa

SEQ ID NO: 2284434 - RNA, 19 nt, Homo sapiens
  misc_RNA (1)...(19): siRNA sense strand
aguaucaacaucagaucaa

SEQ ID NO: 2284435 - RNA, 19 nt, Homo sapiens
  misc_RNA (1)...(19): siRNA sense strand
ccauugagaaacugaaacu

SEQ ID NO: 2284436 - RNA, 19 nt, Homo sapiens
  misc_RNA (1)...(19): siRNA sense strand
aggacaaagcaacaauaau

SEQ ID NO: 2284437 - RNA, 19 nt, Homo sapiens
  misc_RNA (1)...(19): siRNA sense strand
accaaaagcucaggacaaa

SEQ ID NO: 2284438 - RNA, 19 nt, Homo sapiens
  misc_RNA (1)...(19): siRNA sense strand
ugaaacucuccgagggaaa

SEQ ID NO: 2284439 - RNA, 19 nt, Homo sapiens
  misc_RNA (1)...(19): siRNA sense strand
uguuggugccauugagaaa

SEQ ID NO: 2284440 - RNA, 19 nt, Homo sapiens
  misc_RNA (1)...(19): siRNA sense strand
caccaaaagcucaggacaa

SEQ ID NO: 2284441 - RNA, 19 nt, Homo sapiens
  misc_RNA (1)...(19): siRNA sense strand
ggaagaauuuauuauggga

SEQ ID NO: 2284442 - RNA, 19 nt, Homo sapiens
  misc_RNA (1)...(19): siRNA sense strand
aaaucaguacuaagagcaa

SEQ ID NO: 2284443 - RNA, 19 nt, Homo sapiens
  misc_RNA (1)...(19): siRNA sense strand
aguaucaacaucagaucaa

SEQ ID NO: 2284444 - RNA, 19 nt, Homo sapiens
  misc_RNA (1)...(19): siRNA sense strand
ccauugagaaacugaaacu

SEQ ID NO: 2284445 - RNA, 19 nt, Homo sapiens
  misc_RNA (1)...(19): siRNA sense strand
aggacaaagcaacaauaau

SEQ ID NO: 2284446 - RNA, 19 nt, Homo sapiens
  misc_RNA (1)...(19): siRNA sense strand
accaaaagcucaggacaaa

SEQ ID NO: 2284447 - RNA, 19 nt, Homo sapiens
  misc_RNA (1)...(19): siRNA sense strand
cuguaaaugaggacgauaa

SEQ ID NO: 2284448 - RNA, 19 nt, Homo sapiens
  misc_RNA (1)...(19): siRNA sense strand
ggcuaauaaugcuggcaaa

SEQ ID NO: 2284449 - RNA, 19 nt, Homo sapiens
  misc_RNA (1)...(19): siRNA sense strand
ggauaaggaaacaggagau

SEQ ID NO: 2284450 - RNA, 19 nt, Homo sapiens
  misc_RNA (1)...(19): siRNA sense strand
gaaccaaugccaagcgcaa

SEQ ID NO: 2284451 - RNA, 19 nt, Homo sapiens
  misc_RNA (1)...(19): siRNA sense strand
uggagaagucugugaauga

SEQ ID NO: 2284452 - RNA, 19 nt, Homo sapiens
  misc_RNA (1)...(19): siRNA sense strand
ggaaacaggagaugggcga

SEQ ID NO: 2284453 - RNA, 19 nt, Homo sapiens
  misc_RNA (1)...(19): siRNA sense strand
cgauuacaagguagaaaua

SEQ ID NO: 2284454 - RNA, 19 nt, Homo sapiens
  misc_RNA (1)...(19): siRNA sense strand
cgacaaggugaaugcacaa

SEQ ID NO: 2284455 - RNA, 19 nt, Homo sapiens
  misc_RNA (1)...(19): siRNA sense strand
ggaccuacugccaaggaaa

SEQ ID NO: 2284456 - RNA, 19 nt, Homo sapiens
  misc_RNA (1)...(19): siRNA sense strand
ccaaccugcauuagggaua

SEQ ID NO: 2284457 - RNA, 19 nt, Homo sapiens
  misc_RNA (1)...(19): siRNA sense strand
guggaaaggaaaauagaaa

SEQ ID NO: 2284458 - RNA, 19 nt, Homo sapiens
  misc_RNA (1)...(19): siRNA sense strand
ucaacagguucuugggaga

SEQ ID NO: 2284459 - RNA, 19 nt, Homo sapiens
  misc_RNA (1)...(19): siRNA sense strand
cagaguuaguguuugcaaa

SEQ ID NO: 2284460 - RNA, 19 nt, Homo sapiens
  misc_RNA (1)...(19): siRNA sense strand
cccaagaaccuguuaguau

SEQ ID NO: 2284461 - RNA, 19 nt, Homo sapiens
  misc_RNA (1)...(19): siRNA sense strand
ggugaaguuucguguugaa

SEQ ID NO: 2284462 - RNA, 19 nt, Homo sapiens
  misc_RNA (1)...(19): siRNA sense strand
gggaaacagaccagaacca

SEQ ID NO: 2284463 - RNA, 19 nt, Homo sapiens
  misc_RNA (1)...(19): siRNA sense strand
aggaaaacauucaggacuu

SEQ ID NO: 2284464 - RNA, 19 nt, Homo sapiens
  misc_RNA (1)...(19): siRNA sense strand
gagugcaaguggaagguga

SEQ ID NO: 2284465 - RNA, 19 nt, Homo sapiens
  misc_RNA (1)...(19): siRNA sense strand
ccuacgauaagcagugaaa

SEQ ID NO: 2284466 - RNA, 19 nt, Homo sapiens
  misc_RNA (1)...(19): siRNA sense strand
cguuaauagccuucaccaa

SEQ ID NO: 2284467 - RNA, 19 nt, Homo sapiens
  misc_RNA (1)...(19): siRNA sense strand
ucgaagaaggucuguaaau

SEQ ID NO: 2284468 - RNA, 19 nt, Homo sapiens
  misc_RNA (1)...(19): siRNA sense strand
ugaccaagcaacacagcua

SEQ ID NO: 2284469 - RNA, 19 nt, Homo sapiens
  misc_RNA (1)...(19): siRNA sense strand
uagaaagagccaugaagau

SEQ ID NO: 2284470 - RNA, 19 nt, Homo sapiens
  misc_RNA (1)...(19): siRNA sense strand
ccgauuacaagguagaaau

SEQ ID NO: 2284471 - RNA, 19 nt, Homo sapiens
  misc_RNA (1)...(19): siRNA sense strand
ggaggagauaugauggauu

SEQ ID NO: 2284472 - RNA, 19 nt, Homo sapiens
  misc_RNA (1)...(19): siRNA sense strand
gcuaugugugauacaaaua

SEQ ID NO: 2284473 - RNA, 19 nt, Homo sapiens
  misc_RNA (1)...(19): siRNA sense strand
ccucaaugaugcacacaca

SEQ ID NO: 2284474 - RNA, 19 nt, Homo sapiens
  misc_RNA (1)...(19): siRNA sense strand
accaaacgcuucagcuaaa

SEQ ID NO: 2284475 - RNA, 19 nt, Homo sapiens
  misc_RNA (1)...(19): siRNA sense strand
gggccuacucggagcuuau

SEQ ID NO: 2284476 - RNA, 19 nt, Homo sapiens
  misc_RNA (1)...(19): siRNA sense strand
gcuuguaaccacagaucuu

SEQ ID NO: 2284477 - RNA, 19 nt, Homo sapiens
  misc_RNA (1)...(19): siRNA sense strand
guuucguguugaaggagaa

SEQ ID NO: 2284478 - RNA, 19 nt, Homo sapiens
  misc_RNA (1)...(19): siRNA sense strand
cagugcagcuggagaacca

SEQ ID NO: 2284479 - RNA, 19 nt, Homo sapiens
  misc_RNA (1)...(19): siRNA sense strand
ccaaauuaguagaaagagc

SEQ ID NO: 2284480 - RNA, 19 nt, Homo sapiens
  misc_RNA (1)...(19): siRNA sense strand
cgauaagcagugaaacauu

SEQ ID NO: 2284481 - RNA, 19 nt, Homo sapiens
  misc_RNA (1)...(19): siRNA sense strand
agacuggccuucaggaaca

SEQ ID NO: 2284482 - RNA, 19 nt, Homo sapiens
  misc_RNA (1)...(19): siRNA sense strand
acacacagucuccaggaaa

SEQ ID NO: 2284483 - RNA, 19 nt, Homo sapiens
  misc_RNA (1)...(19): siRNA sense strand
ggacuaaagacguuccuga

SEQ ID NO: 2284484 - RNA, 19 nt, Homo sapiens
  misc_RNA (1)...(19): siRNA sense strand
cugaagagguuugcagaga

SEQ ID NO: 2284485 - RNA, 19 nt, Homo sapiens
  misc_RNA (1)...(19): siRNA sense strand
gcuuuagugaaaugggcua

SEQ ID NO: 2284486 - RNA, 19 nt, Homo sapiens
  misc_RNA (1)...(19): siRNA sense strand
gggcuaauaaugcuggcaa

SEQ ID NO: 2284487 - RNA, 19 nt, Homo sapiens
  misc_RNA (1)...(19): siRNA sense strand
gaaacagaccagaaccaau

SEQ ID NO: 2284488 - RNA, 19 nt, Homo sapiens
  misc_RNA (1)...(19): siRNA sense strand
ccaguagaauccaagaaaa

SEQ ID NO: 2284489 - RNA, 19 nt, Homo sapiens
  misc_RNA (1)...(19): siRNA sense strand
cuaguugaggauaaggaaa

SEQ ID NO: 2284490 - RNA, 19 nt, Homo sapiens
  misc_RNA (1)...(19): siRNA sense strand
gagcuuugguucauagcau

SEQ ID NO: 2284491 - RNA, 19 nt, Homo sapiens
  misc_RNA (1)...(19): siRNA sense strand
cuguuuaucacuucaguua

SEQ ID NO: 2284492 - RNA, 19 nt, Homo sapiens
  misc_RNA (1)...(19): siRNA sense strand
gguagaaaggugguugaaa

SEQ ID NO: 2284493 - RNA, 19 nt, Homo sapiens
  misc_RNA (1)...(19): siRNA sense strand
guucgugauuuaauggcua

SEQ ID NO: 2284494 - RNA, 19 nt, Homo sapiens
  misc_RNA (1)...(19): siRNA sense strand
acgacaaggugaaugcaca

SEQ ID NO: 2284495 - RNA, 19 nt, Homo sapiens
  misc_RNA (1)...(19): siRNA sense strand
cuccaagccuuuacagauu

SEQ ID NO: 2284496 - RNA, 19 nt, Homo sapiens
  misc_RNA (1)...(19): siRNA sense strand
uccaagaacugaaggccau

SEQ ID NO: 2284497 - RNA, 19 nt, Homo sapiens
  misc_RNA (1)...(19): siRNA sense strand
ggucuguaaaugaggacga

SEQ ID NO: 2284498 - RNA, 19 nt, Homo sapiens
  misc_RNA (1)...(19): siRNA sense strand
ugagagauuccuuggauca

SEQ ID NO: 2284499 - RNA, 19 nt, Homo sapiens
  misc_RNA (1)...(19): siRNA sense strand
agaucuuccuccucaguua

SEQ ID NO: 2284500 - RNA, 19 nt, Homo sapiens
  misc_RNA (1)...(19): siRNA sense strand
gcaucuguucacaaaguua

SEQ ID NO: 2284501 - RNA, 19 nt, Homo sapiens
  misc_RNA (1)...(19): siRNA sense strand
uacgauaagcagugaaaca

SEQ ID NO: 2284502 - RNA, 19 nt, Homo sapiens
  misc_RNA (1)...(19): siRNA sense strand
augaguguguguuggaauu

SEQ ID NO: 2284503 - RNA, 19 nt, Homo sapiens
  misc_RNA (1)...(19): siRNA sense strand
acgcaugccuggaauguca

SEQ ID NO: 2284504 - RNA, 19 nt, Homo sapiens
  misc_RNA (1)...(19): siRNA sense strand
aacaagaguugcaggacca

SEQ ID NO: 2284505 - RNA, 19 nt, Homo sapiens
  misc_RNA (1)...(19): siRNA sense strand
gagucgagguguuguggca

SEQ ID NO: 2284506 - RNA, 19 nt, Homo sapiens
  misc_RNA (1)...(19): siRNA sense strand
ucucaaacaaugccaacaa

SEQ ID NO: 2284507 - RNA, 19 nt, Homo sapiens
  misc_RNA (1)...(19): siRNA sense strand
gaugaauccaccacgacaa

SEQ ID NO: 2284508 - RNA, 19 nt, Homo sapiens
  misc_RNA (1)...(19): siRNA sense strand
cguucgauuauuagcuuua

SEQ ID NO: 2284509 - RNA, 19 nt, Homo sapiens
  misc_RNA (1)...(19): siRNA sense strand
aggauaaggaaacaggaga

SEQ ID NO: 2284510 - RNA, 19 nt, Homo sapiens
  misc_RNA (1)...(19): siRNA sense strand
cuuaaugacuggaauagca

SEQ ID NO: 2284511 - RNA, 19 nt, Homo sapiens
  misc_RNA (1)...(19): siRNA sense strand
cucagaaguucguguuuau

SEQ ID NO: 2284512 - RNA, 19 nt, Homo sapiens
  misc_RNA (1)...(19): siRNA sense strand
ccacguuucuggagggcaa

SEQ ID NO: 2284513 - RNA, 19 nt, Homo sapiens
  misc_RNA (1)...(19): siRNA sense strand
gcgccauugugguggaaaa

SEQ ID NO: 2284514 - RNA, 19 nt, Homo sapiens
  misc_RNA (1)...(19): siRNA sense strand
ccaucauccuguuggccau

SEQ ID NO: 2284515 - RNA, 19 nt, Homo sapiens
  misc_RNA (1)...(19): siRNA sense strand
accaaggagacgcuggaaa

SEQ ID NO: 2284516 - RNA, 19 nt, Homo sapiens
  misc_RNA (1)...(19): siRNA sense strand
agaaagagguagaagguca

SEQ ID NO: 2284517 - RNA, 19 nt, Homo sapiens
  misc_RNA (1)...(19): siRNA sense strand
gguagaaggucaaggagca

SEQ ID NO: 2284518 - RNA, 19 nt, Homo sapiens
  misc_RNA (1)...(19): siRNA sense strand
agguaauccaggugacuaa

SEQ ID NO: 2284519 - RNA, 19 nt, Homo sapiens
  misc_RNA (1)...(19): siRNA sense strand
augaagaagacauggauau

SEQ ID NO: 2284520 - RNA, 19 nt, Homo sapiens
  misc_RNA (1)...(19): siRNA sense strand
guaaagaaauagaggaagc

SEQ ID NO: 2284521 - RNA, 19 nt, Homo sapiens
  misc_RNA (1)...(19): siRNA sense strand
cgaagaagcaggaguggca

SEQ ID NO: 2284522 - RNA, 19 nt, Homo sapiens
  misc_RNA (1)...(19): siRNA sense strand
caaagaaagaaguagggau

SEQ ID NO: 2284523 - RNA, 19 nt, Homo sapiens
  misc_RNA (1)...(19): siRNA sense strand
ccagauaagaaagaagaaa

SEQ ID NO: 2284524 - RNA, 19 nt, Homo sapiens
  misc_RNA (1)...(19): siRNA sense strand
ggaaagaaaaucagagagu

SEQ ID NO: 2284525 - RNA, 19 nt, Homo sapiens
  misc_RNA (1)...(19): siRNA sense strand
gggguaugacagugagaaa

SEQ ID NO: 2284526 - RNA, 19 nt, Homo sapiens
  misc_RNA (1)...(19): siRNA sense strand
aaagaaaaucagagaguga

SEQ ID NO: 2284527 - RNA, 19 nt, Homo sapiens
  misc_RNA (1)...(19): siRNA sense strand
aggaauguucuguggaaaa

SEQ ID NO: 2284528 - RNA, 19 nt, Homo sapiens
  misc_RNA (1)...(19): siRNA sense strand
agcaagaagaagaagagua

SEQ ID NO: 2284529 - RNA, 19 nt, Homo sapiens
  misc_RNA (1)...(19): siRNA sense strand
cguucuaggaggaggagga

SEQ ID NO: 2284530 - RNA, 19 nt, Homo sapiens
  misc_RNA (1)...(19): siRNA sense strand
agagagacgacgacgaaga

SEQ ID NO: 2284531 - RNA, 19 nt, Homo sapiens
  misc_RNA (1)...(19): siRNA sense strand
aaagaaagaaguagggaug

SEQ ID NO: 2284532 - RNA, 19 nt, Homo sapiens
  misc_RNA (1)...(19): siRNA sense strand
aaagaagagaagaaaccaa

SEQ ID NO: 2284533 - RNA, 19 nt, Homo sapiens
  misc_RNA (1)...(19): siRNA sense strand
aagaaguagggaugaaaga

SEQ ID NO: 2284534 - RNA, 19 nt, Homo sapiens
  misc_RNA (1)...(19): siRNA sense strand
cuuugauagucguaccaua

SEQ ID NO: 2284535 - RNA, 19 nt, Homo sapiens
  misc_RNA (1)...(19): siRNA sense strand
aagaagaagaagaguaaag

SEQ ID NO: 2284536 - RNA, 19 nt, Homo sapiens
  misc_RNA (1)...(19): siRNA sense strand
augaagaggaacaggggua

SEQ ID NO: 2284537 - RNA, 19 nt, Homo sapiens
  misc_RNA (1)...(19): siRNA sense strand
aagugcaagcagagagaga

SEQ ID NO: 2284538 - RNA, 19 nt, Homo sapiens
  misc_RNA (1)...(19): siRNA sense strand
ggaaaaggaccgggaaaga

SEQ ID NO: 2284539 - RNA, 19 nt, Homo sapiens
  misc_RNA (1)...(19): siRNA sense strand
gggauuaugaugaagagga

SEQ ID NO: 2284540 - RNA, 19 nt, Homo sapiens
  misc_RNA (1)...(19): siRNA sense strand
gcuuaugaguacuguugau

SEQ ID NO: 2284541 - RNA, 19 nt, Homo sapiens
  misc_RNA (1)...(19): siRNA sense strand
gucaagaagcagaucgaga

SEQ ID NO: 2284542 - RNA, 19 nt, Homo sapiens
  misc_RNA (1)...(19): siRNA sense strand
cgaucaacaagcaagaaga

SEQ ID NO: 2284543 - RNA, 19 nt, Homo sapiens
  misc_RNA (1)...(19): siRNA sense strand
aaggaaaaggaccgggaaa

SEQ ID NO: 2284544 - RNA, 19 nt, Homo sapiens
  misc_RNA (1)...(19): siRNA sense strand
auuaugaugaagaggaaca

SEQ ID NO: 2284545 - RNA, 19 nt, Homo sapiens
  misc_RNA (1)...(19): siRNA sense strand
ggaaaagggaacuggugau

SEQ ID NO: 2284546 - RNA, 19 nt, Homo sapiens
  misc_RNA (1)...(19): siRNA sense strand
agcccaaggcggagaagau

SEQ ID NO: 2284547 - RNA, 19 nt, Homo sapiens
  misc_RNA (1)...(19): siRNA sense strand
aaaaggaccgggaaagaaa

SEQ ID NO: 2284548 - RNA, 19 nt, Homo sapiens
  misc_RNA (1)...(19): siRNA sense strand
guuccaugauccagacuca

SEQ ID NO: 2284549 - RNA, 19 nt, Homo sapiens
  misc_RNA (1)...(19): siRNA sense strand
agaagugcaagcagagaga

SEQ ID NO: 2284550 - RNA, 19 nt, Homo sapiens
  misc_RNA (1)...(19): siRNA sense strand
acaagcaagaagaagaaga

SEQ ID NO: 2284551 - RNA, 19 nt, Homo sapiens
  misc_RNA (1)...(19): siRNA sense strand
aagacauggauaugaguga

SEQ ID NO: 2284552 - RNA, 19 nt, Homo sapiens
  misc_RNA (1)...(19): siRNA sense strand
agagaaagagguagaaggu

SEQ ID NO: 2284553 - RNA, 19 nt, Homo sapiens
  misc_RNA (1)...(19): siRNA sense strand
aaggaauguucuguggaaa

SEQ ID NO: 2284554 - RNA, 19 nt, Homo sapiens
  misc_RNA (1)...(19): siRNA sense strand
cggucaagaagcagaucga

SEQ ID NO: 2284555 - RNA, 19 nt, Homo sapiens
  misc_RNA (1)...(19): siRNA sense strand
agucguaccauaugcagaa

SEQ ID NO: 2284556 - RNA, 19 nt, Homo sapiens
  misc_RNA (1)...(19): siRNA sense strand
aggucaaggagcacaucaa

SEQ ID NO: 2284557 - RNA, 19 nt, Homo sapiens
  misc_RNA (1)...(19): siRNA sense strand
agaagaaaccaauagaaac

SEQ ID NO: 2284558 - RNA, 19 nt, Homo sapiens
  misc_RNA (1)...(19): siRNA sense strand
ccauaugcagaaggaguua

SEQ ID NO: 2284559 - RNA, 19 nt, Homo sapiens
  misc_RNA (1)...(19): siRNA sense strand
cauucuaagucuaggaguc

SEQ ID NO: 2284560 - RNA, 19 nt, Homo sapiens
  misc_RNA (1)...(19): siRNA sense strand
aaaaggagaagaagaaaga

SEQ ID NO: 2284561 - RNA, 19 nt, Homo sapiens
  misc_RNA (1)...(19): siRNA sense strand
cggucacauucuaagucua

SEQ ID NO: 2284562 - RNA, 19 nt, Homo sapiens
  misc_RNA (1)...(19): siRNA sense strand
cgggaaagaaaaucagaga

SEQ ID NO: 2284563 - RNA, 19 nt, Homo sapiens
  misc_RNA (1)...(19): siRNA sense strand
cgaagacacuuuccggcaa

SEQ ID NO: 2284564 - RNA, 19 nt, Homo sapiens
  misc_RNA (1)...(19): siRNA sense strand
ccaauuuccugguggugga

SEQ ID NO: 2284565 - RNA, 19 nt, Homo sapiens
  misc_RNA (1)...(19): siRNA sense strand
ccaucaaugagaucgaaga

SEQ ID NO: 2284566 - RNA, 19 nt, Homo sapiens
  misc_RNA (1)...(19): siRNA sense strand
gguccauacaggagagaaa

SEQ ID NO: 2284567 - RNA, 19 nt, Homo sapiens
  misc_RNA (1)...(19): siRNA sense strand
ggguaaugaaugugaagaa

SEQ ID NO: 2284568 - RNA, 19 nt, Homo sapiens
  misc_RNA (1)...(19): siRNA sense strand
gguccacacaggagagaaa

SEQ ID NO: 2284569 - RNA, 19 nt, Homo sapiens
  misc_RNA (1)...(19): siRNA sense strand
aguucacacuggagagaaa

SEQ ID NO: 2284570 - RNA, 19 nt, Homo sapiens
  misc_RNA (1)...(19): siRNA sense strand
ccgaauucuuggaguaaaa

SEQ ID NO: 2284571 - RNA, 19 nt, Homo sapiens
  misc_RNA (1)...(19): siRNA sense strand
aguccacaccggagagaaa

SEQ ID NO: 2284572 - RNA, 19 nt, Homo sapiens
  misc_RNA (1)...(19): siRNA sense strand
aguccacaccggagagaaa

SEQ ID NO: 2284573 - RNA, 19 nt, Homo sapiens
  misc_RNA (1)...(19): siRNA sense strand
cagaauuaucagagaaguu

SEQ ID NO: 2284574 - RNA, 19 nt, Homo sapiens
  misc_RNA (1)...(19): siRNA sense strand
uggcaaaucaagagacaca

SEQ ID NO: 2284575 - RNA, 19 nt, Homo sapiens
  misc_RNA (1)...(19): siRNA sense strand
cagagaaguuguaagcaga

SEQ ID NO: 2284576 - RNA, 19 nt, Homo sapiens
  misc_RNA (1)...(19): siRNA sense strand
ggucaaaucuucaagucca

SEQ ID NO: 2284577 - RNA, 19 nt, Homo sapiens
  misc_RNA (1)...(19): siRNA sense strand
gaggaaugugggaaagaau

SEQ ID NO: 2284578 - RNA, 19 nt, Homo sapiens
  misc_RNA (1)...(19): siRNA sense strand
gugucaugaaugugguaaa

SEQ ID NO: 2284579 - RNA, 19 nt, Homo sapiens
  misc_RNA (1)...(19): siRNA sense strand
augcaacgugugugggaaa

SEQ ID NO: 2284580 - RNA, 19 nt, Homo sapiens
  misc_RNA (1)...(19): siRNA sense strand
augugaggaaugugggaaa

SEQ ID NO: 2284581 - RNA, 19 nt, Homo sapiens
  misc_RNA (1)...(19): siRNA sense strand
aaguguucguacugggaaa

SEQ ID NO: 2284582 - RNA, 19 nt, Homo sapiens
  misc_RNA (1)...(19): siRNA sense strand
ggaaagaagucuccagcgu

SEQ ID NO: 2284583 - RNA, 19 nt, Homo sapiens
  misc_RNA (1)...(19): siRNA sense strand
ccucaaguuuccagagcca

SEQ ID NO: 2284584 - RNA, 19 nt, Homo sapiens
  misc_RNA (1)...(19): siRNA sense strand
cggagagaaaccauauaaa

SEQ ID NO: 2284585 - RNA, 19 nt, Homo sapiens
  misc_RNA (1)...(19): siRNA sense strand
agaggaagcuguaccgaga

SEQ ID NO: 2284586 - RNA, 19 nt, Homo sapiens
  misc_RNA (1)...(19): siRNA sense strand
agugauugugguaaagaua

SEQ ID NO: 2284587 - RNA, 19 nt, Homo sapiens
  misc_RNA (1)...(19): siRNA sense strand
gagugugguaagagcuuua

SEQ ID NO: 2284588 - RNA, 19 nt, Homo sapiens
  misc_RNA (1)...(19): siRNA sense strand
uauucacacaggagagaaa

SEQ ID NO: 2284589 - RNA, 19 nt, Homo sapiens
  misc_RNA (1)...(19): siRNA sense strand
ccauauaaauguggggauu

SEQ ID NO: 2284590 - RNA, 19 nt, Homo sapiens
  misc_RNA (1)...(19): siRNA sense strand
ugcuuuaguuugagcuuua

SEQ ID NO: 2284591 - RNA, 19 nt, Homo sapiens
  misc_RNA (1)...(19): siRNA sense strand
guucauacuuucaagcaca

SEQ ID NO: 2284592 - RNA, 19 nt, Homo sapiens
  misc_RNA (1)...(19): siRNA sense strand
augugaugcuggagaacuu

SEQ ID NO: 2284593 - RNA, 19 nt, Homo sapiens
  misc_RNA (1)...(19): siRNA sense strand
gcuggcaaaucaagagaca

SEQ ID NO: 2284594 - RNA, 19 nt, Homo sapiens
  misc_RNA (1)...(19): siRNA sense strand
caguuauagcucagguauu

SEQ ID NO: 2284595 - RNA, 19 nt, Homo sapiens
  misc_RNA (1)...(19): siRNA sense strand
gcucaaaucuucauaccca

SEQ ID NO: 2284596 - RNA, 19 nt, Homo sapiens
  misc_RNA (1)...(19): siRNA sense strand
ucaagugggagcaggagaa

SEQ ID NO: 2284597 - RNA, 19 nt, Homo sapiens
  misc_RNA (1)...(19): siRNA sense strand
cgcuuuaguuguagcucaa

SEQ ID NO: 2284598 - RNA, 19 nt, Homo sapiens
  misc_RNA (1)...(19): siRNA sense strand
ucuucaaguccaucagaua

SEQ ID NO: 2284599 - RNA, 19 nt, Homo sapiens
  misc_RNA (1)...(19): siRNA sense strand
gagugugguaagugcuuua

SEQ ID NO: 2284600 - RNA, 19 nt, Homo sapiens
  misc_RNA (1)...(19): siRNA sense strand
aagcagacucagaugaaaa

SEQ ID NO: 2284601 - RNA, 19 nt, Homo sapiens
  misc_RNA (1)...(19): siRNA sense strand
cuucaaguccaucagauaa

SEQ ID NO: 2284602 - RNA, 19 nt, Homo sapiens
  misc_RNA (1)...(19): siRNA sense strand
ccuucaagcccaucagaga

SEQ ID NO: 2284603 - RNA, 19 nt, Homo sapiens
  misc_RNA (1)...(19): siRNA sense strand
gucaagacuccacgauaaa

SEQ ID NO: 2284604 - RNA, 19 nt, Homo sapiens
  misc_RNA (1)...(19): siRNA sense strand
aagaaaagcuuuggaugaa

SEQ ID NO: 2284605 - RNA, 19 nt, Homo sapiens
  misc_RNA (1)...(19): siRNA sense strand
gguuucagucagagcucaa

SEQ ID NO: 2284606 - RNA, 19 nt, Homo sapiens
  misc_RNA (1)...(19): siRNA sense strand
augagaaggacaccaguua

SEQ ID NO: 2284607 - RNA, 19 nt, Homo sapiens
  misc_RNA (1)...(19): siRNA sense strand
aaucaaaaugagauggcaa

SEQ ID NO: 2284608 - RNA, 19 nt, Homo sapiens
  misc_RNA (1)...(19): siRNA sense strand
gguaagcccuucagccaga

SEQ ID NO: 2284609 - RNA, 19 nt, Homo sapiens
  misc_RNA (1)...(19): siRNA sense strand
gagguaagcauucaggaga

SEQ ID NO: 2284610 - RNA, 19 nt, Homo sapiens
  misc_RNA (1)...(19): siRNA sense strand
aacagguacacuugggaaa

SEQ ID NO: 2284611 - RNA, 19 nt, Homo sapiens
  misc_RNA (1)...(19): siRNA sense strand
gaaagaauucaguuggagu

SEQ ID NO: 2284612 - RNA, 19 nt, Homo sapiens
  misc_RNA (1)...(19): siRNA sense strand
uggagagaaaccauauaaa

SEQ ID NO: 2284613 - RNA, 19 nt, Homo sapiens
  misc_RNA (1)...(19): siRNA sense strand
gguaagcauucaggagaca

SEQ ID NO: 2284614 - RNA, 19 nt, Homo sapiens
  misc_RNA (1)...(19): siRNA sense strand
cugaaugagacacagaauu

SEQ ID NO: 2284615 - RNA, 19 nt, Homo sapiens
  misc_RNA (1)...(19): siRNA sense strand
cuucaaaucuucaagccca

SEQ ID NO: 2284616 - RNA, 19 nt, Homo sapiens
  misc_RNA (1)...(19): siRNA sense strand
acgugcagcaggaggaaua

SEQ ID NO: 2284617 - RNA, 19 nt, Homo sapiens
  misc_RNA (1)...(19): siRNA sense strand
ugucagagcugcuugguga

SEQ ID NO: 2284618 - RNA, 19 nt, Homo sapiens
  misc_RNA (1)...(19): siRNA sense strand
cuaccuguguggagggaca

SEQ ID NO: 2284619 - RNA, 19 nt, Homo sapiens
  misc_RNA (1)...(19): siRNA sense strand
agaccguggagcagaagaa

SEQ ID NO: 2284620 - RNA, 19 nt, Homo sapiens
  misc_RNA (1)...(19): siRNA sense strand
uggcugagagggugcgcua

SEQ ID NO: 2284621 - RNA, 19 nt, Homo sapiens
  misc_RNA (1)...(19): siRNA sense strand
ccugagaacuucaccacga

SEQ ID NO: 2284622 - RNA, 19 nt, Homo sapiens
  misc_RNA (1)...(19): siRNA sense strand
acuaugagaccguggagca

SEQ ID NO: 2284623 - RNA, 19 nt, Homo sapiens
  misc_RNA (1)...(19): siRNA sense strand
gcccuggaugagcgagaaa

SEQ ID NO: 2284624 - RNA, 19 nt, Homo sapiens
  misc_RNA (1)...(19): siRNA sense strand
augagaccguggagcagaa

SEQ ID NO: 2284625 - RNA, 19 nt, Homo sapiens
  misc_RNA (1)...(19): siRNA sense strand
acgugcagcaggaggaaua

SEQ ID NO: 2284626 - RNA, 19 nt, Homo sapiens
  misc_RNA (1)...(19): siRNA sense strand
ugucagagcugcuugguga

SEQ ID NO: 2284627 - RNA, 19 nt, Homo sapiens
  misc_RNA (1)...(19): siRNA sense strand
cuaccuguguggagggaca

SEQ ID NO: 2284628 - RNA, 19 nt, Homo sapiens
  misc_RNA (1)...(19): siRNA sense strand
agaccguggagcagaagaa

SEQ ID NO: 2284629 - RNA, 19 nt, Homo sapiens
  misc_RNA (1)...(19): siRNA sense strand
uggcugagagggugcgcua

SEQ ID NO: 2284630 - RNA, 19 nt, Homo sapiens
  misc_RNA (1)...(19): siRNA sense strand
ccugagaacuucaccacga

SEQ ID NO: 2284631 - RNA, 19 nt, Homo sapiens
  misc_RNA (1)...(19): siRNA sense strand
acuaugagaccguggagca

SEQ ID NO: 2284632 - RNA, 19 nt, Homo sapiens
  misc_RNA (1)...(19): siRNA sense strand
gcccuggaugagcgagaaa

SEQ ID NO: 2284633 - RNA, 19 nt, Homo sapiens
  misc_RNA (1)...(19): siRNA sense strand
augagaccguggagcagaa

SEQ ID NO: 2284634 - RNA, 19 nt, Homo sapiens
  misc_RNA (1)...(19): siRNA sense strand
acgugcagcaggaggaaua

SEQ ID NO: 2284635 - RNA, 19 nt, Homo sapiens
  misc_RNA (1)...(19): siRNA sense strand
ugucagagcugcuugguga

SEQ ID NO: 2284636 - RNA, 19 nt, Homo sapiens
  misc_RNA (1)...(19): siRNA sense strand
cuaccuguguggagggaca

SEQ ID NO: 2284637 - RNA, 19 nt, Homo sapiens
  misc_RNA (1)...(19): siRNA sense strand
agaccguggagcagaagaa

SEQ ID NO: 2284638 - RNA, 19 nt, Homo sapiens
  misc_RNA (1)...(19): siRNA sense strand
uggcugagagggugcgcua

SEQ ID NO: 2284639 - RNA, 19 nt, Homo sapiens
  misc_RNA (1)...(19): siRNA sense strand
ccugagaacuucaccacga

SEQ ID NO: 2284640 - RNA, 19 nt, Homo sapiens
  misc_RNA (1)...(19): siRNA sense strand
acuaugagaccguggagca

SEQ ID NO: 2284641 - RNA, 19 nt, Homo sapiens
  misc_RNA (1)...(19): siRNA sense strand
gcccuggaugagcgagaaa

SEQ ID NO: 2284642 - RNA, 19 nt, Homo sapiens
  misc_RNA (1)...(19): siRNA sense strand
augagaccguggagcagaa

SEQ ID NO: 2284643 - RNA, 19 nt, Homo sapiens
  misc_RNA (1)...(19): siRNA sense strand
aggaaaaggaaaauggaaa

SEQ ID NO: 2284644 - RNA, 19 nt, Homo sapiens
  misc_RNA (1)...(19): siRNA sense strand
cuguagaauuaaauggcua

SEQ ID NO: 2284645 - RNA, 19 nt, Homo sapiens
  misc_RNA (1)...(19): siRNA sense strand
acacaaauaaagaaggaca

SEQ ID NO: 2284646 - RNA, 19 nt, Homo sapiens
  misc_RNA (1)...(19): siRNA sense strand
gagaaguggacuaugggaa

SEQ ID NO: 2284647 - RNA, 19 nt, Homo sapiens
  misc_RNA (1)...(19): siRNA sense strand
cgacgaaaggaaaaggaaa

SEQ ID NO: 2284648 - RNA, 19 nt, Homo sapiens
  misc_RNA (1)...(19): siRNA sense strand
gacgaaaggaaaaggaaaa

SEQ ID NO: 2284649 - RNA, 19 nt, Homo sapiens
  misc_RNA (1)...(19): siRNA sense strand
ccaugauaaggaagauuaa

SEQ ID NO: 2284650 - RNA, 19 nt, Homo sapiens
  misc_RNA (1)...(19): siRNA sense strand
uggugaacccaaauggaaa

SEQ ID NO: 2284651 - RNA, 19 nt, Homo sapiens
  misc_RNA (1)...(19): siRNA sense strand
uggacaaagcaguggagau

SEQ ID NO: 2284652 - RNA, 19 nt, Homo sapiens
  misc_RNA (1)...(19): siRNA sense strand
ccuuugacgcugugacaau

SEQ ID NO: 2284653 - RNA, 19 nt, Homo sapiens
  misc_RNA (1)...(19): siRNA sense strand
cuggauaacaagaggauuc

SEQ ID NO: 2284654 - RNA, 19 nt, Homo sapiens
  misc_RNA (1)...(19): siRNA sense strand
acucaggagaagcggauau

SEQ ID NO: 2284655 - RNA, 19 nt, Homo sapiens
  misc_RNA (1)...(19): siRNA sense strand
ggagauacacauuucgaca

SEQ ID NO: 2284656 - RNA, 19 nt, Homo sapiens
  misc_RNA (1)...(19): siRNA sense strand
ggaagauuaaggagcuaca

SEQ ID NO: 2284657 - RNA, 19 nt, Homo sapiens
  misc_RNA (1)...(19): siRNA sense strand
gcaaauagaugcugcuguc

SEQ ID NO: 2284658 - RNA, 19 nt, Homo sapiens
  misc_RNA (1)...(19): siRNA sense strand
gagaaggccugggaggaga

SEQ ID NO: 2284659 - RNA, 19 nt, Homo sapiens
  misc_RNA (1)...(19): siRNA sense strand
ggugaacccaaauggaaaa

SEQ ID NO: 2284660 - RNA, 19 nt, Homo sapiens
  misc_RNA (1)...(19): siRNA sense strand
aggccugggaggagauaca

SEQ ID NO: 2284661 - RNA, 19 nt, Homo sapiens
  misc_RNA (1)...(19): siRNA sense strand
acagcuacgacgaaaggaa

SEQ ID NO: 2284662 - RNA, 19 nt, Homo sapiens
  misc_RNA (1)...(19): siRNA sense strand
gagaugguugcaagaggaa

SEQ ID NO: 2284663 - RNA, 19 nt, Homo sapiens
  misc_RNA (1)...(19): siRNA sense strand
aguaugacacagagaagga

SEQ ID NO: 2284664 - RNA, 19 nt, Homo sapiens
  misc_RNA (1)...(19): siRNA sense strand
aaggaagauuaaggagcua

SEQ ID NO: 2284665 - RNA, 19 nt, Homo sapiens
  misc_RNA (1)...(19): siRNA sense strand
aagaugaugugaaagggau

SEQ ID NO: 2284666 - RNA, 19 nt, Homo sapiens
  misc_RNA (1)...(19): siRNA sense strand
gugaaagggauccaggcau

SEQ ID NO: 2284667 - RNA, 19 nt, Homo sapiens
  misc_RNA (1)...(19): siRNA sense strand
gaguaaauggccaaaucga

SEQ ID NO: 2284668 - RNA, 19 nt, Homo sapiens
  misc_RNA (1)...(19): siRNA sense strand
cagagaauacagagggcaa

SEQ ID NO: 2284669 - RNA, 19 nt, Homo sapiens
  misc_RNA (1)...(19): siRNA sense strand
cuguagauaacgagggaga

SEQ ID NO: 2284670 - RNA, 19 nt, Homo sapiens
  misc_RNA (1)...(19): siRNA sense strand
aagggaagaaggaggaaaa

SEQ ID NO: 2284671 - RNA, 19 nt, Homo sapiens
  misc_RNA (1)...(19): siRNA sense strand
aagaaagaaccuggagcaa

SEQ ID NO: 2284672 - RNA, 19 nt, Homo sapiens
  misc_RNA (1)...(19): siRNA sense strand
gcagaggugcuaaagggaa

SEQ ID NO: 2284673 - RNA, 19 nt, Homo sapiens
  misc_RNA (1)...(19): siRNA sense strand
cuaaagggaagaaggagga

SEQ ID NO: 2284674 - RNA, 19 nt, Homo sapiens
  misc_RNA (1)...(19): siRNA sense strand
cagaggugcuaaagggaag

SEQ ID NO: 2284675 - RNA, 19 nt, Homo sapiens
  misc_RNA (1)...(19): siRNA sense strand
agagaauacagagggcaaa

SEQ ID NO: 2284676 - RNA, 19 nt, Homo sapiens
  misc_RNA (1)...(19): siRNA sense strand
uaagaaagaaccuggagca

SEQ ID NO: 2284677 - RNA, 19 nt, Homo sapiens
  misc_RNA (1)...(19): siRNA sense strand
ugccagauugucagcgaaa

SEQ ID NO: 2284678 - RNA, 19 nt, Homo sapiens
  misc_RNA (1)...(19): siRNA sense strand
gcaaagauuagcagaggug

SEQ ID NO: 2284679 - RNA, 19 nt, Homo sapiens
  misc_RNA (1)...(19): siRNA sense strand
cagagaauacagagggcaa

SEQ ID NO: 2284680 - RNA, 19 nt, Homo sapiens
  misc_RNA (1)...(19): siRNA sense strand
aagggaagaaggaggaaaa

SEQ ID NO: 2284681 - RNA, 19 nt, Homo sapiens
  misc_RNA (1)...(19): siRNA sense strand
aagaaagaaccuggagcaa

SEQ ID NO: 2284682 - RNA, 19 nt, Homo sapiens
  misc_RNA (1)...(19): siRNA sense strand
gcagaggugcuaaagggaa

SEQ ID NO: 2284683 - RNA, 19 nt, Homo sapiens
  misc_RNA (1)...(19): siRNA sense strand
cuaaagggaagaaggagga

SEQ ID NO: 2284684 - RNA, 19 nt, Homo sapiens
  misc_RNA (1)...(19): siRNA sense strand
cagaggugcuaaagggaag

SEQ ID NO: 2284685 - RNA, 19 nt, Homo sapiens
  misc_RNA (1)...(19): siRNA sense strand
agagaauacagagggcaaa

SEQ ID NO: 2284686 - RNA, 19 nt, Homo sapiens
  misc_RNA (1)...(19): siRNA sense strand
uaagaaagaaccuggagca

SEQ ID NO: 2284687 - RNA, 19 nt, Homo sapiens
  misc_RNA (1)...(19): siRNA sense strand
ugccagauugucagcgaaa

SEQ ID NO: 2284688 - RNA, 19 nt, Homo sapiens
  misc_RNA (1)...(19): siRNA sense strand
gcaaagauuagcagaggug

SEQ ID NO: 2284689 - RNA, 19 nt, Homo sapiens
  misc_RNA (1)...(19): siRNA sense strand
gaacagugauggugggcaa

SEQ ID NO: 2284690 - RNA, 19 nt, Homo sapiens
  misc_RNA (1)...(19): siRNA sense strand
aggcagacacugagggaaa

SEQ ID NO: 2284691 - RNA, 19 nt, Homo sapiens
  misc_RNA (1)...(19): siRNA sense strand
gaggagaguuucagggcaa

SEQ ID NO: 2284692 - RNA, 19 nt, Homo sapiens
  misc_RNA (1)...(19): siRNA sense strand
agaccaaguuuaagggcaa

SEQ ID NO: 2284693 - RNA, 19 nt, Homo sapiens
  misc_RNA (1)...(19): siRNA sense strand
ccauuaagcuugugcguca

SEQ ID NO: 2284694 - RNA, 19 nt, Homo sapiens
  misc_RNA (1)...(19): siRNA sense strand
agaugaaaccucaaggaaa

SEQ ID NO: 2284695 - RNA, 19 nt, Homo sapiens
  misc_RNA (1)...(19): siRNA sense strand
ggacagugaaagugaguca

SEQ ID NO: 2284696 - RNA, 19 nt, Homo sapiens
  misc_RNA (1)...(19): siRNA sense strand
agaauacagcacagagaaa

SEQ ID NO: 2284697 - RNA, 19 nt, Homo sapiens
  misc_RNA (1)...(19): siRNA sense strand
aagauuaccaccugagaaa

SEQ ID NO: 2284698 - RNA, 19 nt, Homo sapiens
  misc_RNA (1)...(19): siRNA sense strand
cagcauuggcccagaugua

SEQ ID NO: 2284699 - RNA, 19 nt, Homo sapiens
  misc_RNA (1)...(19): siRNA sense strand
guccauagcaagacagaau

SEQ ID NO: 2284700 - RNA, 19 nt, Homo sapiens
  misc_RNA (1)...(19): siRNA sense strand
cauuggaagcugugucaaa

SEQ ID NO: 2284701 - RNA, 19 nt, Homo sapiens
  misc_RNA (1)...(19): siRNA sense strand
gaugaguucuggagggcau

SEQ ID NO: 2284702 - RNA, 19 nt, Homo sapiens
  misc_RNA (1)...(19): siRNA sense strand
cagaaggcucucaaaguaa

SEQ ID NO: 2284703 - RNA, 19 nt, Homo sapiens
  misc_RNA (1)...(19): siRNA sense strand
caguaaaucagaagguuca

SEQ ID NO: 2284704 - RNA, 19 nt, Homo sapiens
  misc_RNA (1)...(19): siRNA sense strand
cauuaaagccaaagugacu

SEQ ID NO: 2284705 - RNA, 19 nt, Homo sapiens
  misc_RNA (1)...(19): siRNA sense strand
uugaacagccagagccaaa

SEQ ID NO: 2284706 - RNA, 19 nt, Homo sapiens
  misc_RNA (1)...(19): siRNA sense strand
ucuccaauccuuagaacaa

SEQ ID NO: 2284707 - RNA, 19 nt, Homo sapiens
  misc_RNA (1)...(19): siRNA sense strand
guucaaagauguaugucca

SEQ ID NO: 2284708 - RNA, 19 nt, Homo sapiens
  misc_RNA (1)...(19): siRNA sense strand
cagagaaacauaagaagca

SEQ ID NO: 2284709 - RNA, 19 nt, Homo sapiens
  misc_RNA (1)...(19): siRNA sense strand
ucauggaaguguuggcuau

SEQ ID NO: 2284710 - RNA, 19 nt, Homo sapiens
  misc_RNA (1)...(19): siRNA sense strand
ccugugacgaugagggcua

SEQ ID NO: 2284711 - RNA, 19 nt, Homo sapiens
  misc_RNA (1)...(19): siRNA sense strand
cagcaaugacugaucguuu

SEQ ID NO: 2284712 - RNA, 19 nt, Homo sapiens
  misc_RNA (1)...(19): siRNA sense strand
gagaaaagugauaaagaca

SEQ ID NO: 2284713 - RNA, 19 nt, Homo sapiens
  misc_RNA (1)...(19): siRNA sense strand
agugacaauugaaggaaca

SEQ ID NO: 2284714 - RNA, 19 nt, Homo sapiens
  misc_RNA (1)...(19): siRNA sense strand
ggaggaaagcugaaaccau

SEQ ID NO: 2284715 - RNA, 19 nt, Homo sapiens
  misc_RNA (1)...(19): siRNA sense strand
gagugaaaccauuaagcuu

SEQ ID NO: 2284716 - RNA, 19 nt, Homo sapiens
  misc_RNA (1)...(19): siRNA sense strand
auuauguacuggaaagcaa

SEQ ID NO: 2284717 - RNA, 19 nt, Homo sapiens
  misc_RNA (1)...(19): siRNA sense strand
cagagaaaucuuaucagaa

SEQ ID NO: 2284718 - RNA, 19 nt, Homo sapiens
  misc_RNA (1)...(19): siRNA sense strand
ccagaauacagcacagaga

SEQ ID NO: 2284719 - RNA, 19 nt, Homo sapiens
  misc_RNA (1)...(19): siRNA sense strand
gggauaaugaugauuucaa

SEQ ID NO: 2284720 - RNA, 19 nt, Homo sapiens
  misc_RNA (1)...(19): siRNA sense strand
cugcagaucuuauggagca

SEQ ID NO: 2284721 - RNA, 19 nt, Homo sapiens
  misc_RNA (1)...(19): siRNA sense strand
gggaagaugaaaagcagua

SEQ ID NO: 2284722 - RNA, 19 nt, Homo sapiens
  misc_RNA (1)...(19): siRNA sense strand
ggaucuagccaguccaaaa

SEQ ID NO: 2284723 - RNA, 19 nt, Homo sapiens
  misc_RNA (1)...(19): siRNA sense strand
agacaaagauagggaccga

SEQ ID NO: 2284724 - RNA, 19 nt, Homo sapiens
  misc_RNA (1)...(19): siRNA sense strand
uggggaaaguaguggagaa

SEQ ID NO: 2284725 - RNA, 19 nt, Homo sapiens
  misc_RNA (1)...(19): siRNA sense strand
caguugaagacauggugaa

SEQ ID NO: 2284726 - RNA, 19 nt, Homo sapiens
  misc_RNA (1)...(19): siRNA sense strand
ggaaaaucucccagcagaa

SEQ ID NO: 2284727 - RNA, 19 nt, Homo sapiens
  misc_RNA (1)...(19): siRNA sense strand
aauaugagcaugagcauca

SEQ ID NO: 2284728 - RNA, 19 nt, Homo sapiens
  misc_RNA (1)...(19): siRNA sense strand
gggaaagaaaagacucaaa

SEQ ID NO: 2284729 - RNA, 19 nt, Homo sapiens
  misc_RNA (1)...(19): siRNA sense strand
guuaaguagcaguauguau

SEQ ID NO: 2284730 - RNA, 19 nt, Homo sapiens
  misc_RNA (1)...(19): siRNA sense strand
agaaacauaagaagcacaa

SEQ ID NO: 2284731 - RNA, 19 nt, Homo sapiens
  misc_RNA (1)...(19): siRNA sense strand
aggacagcuuugugaugua

SEQ ID NO: 2284732 - RNA, 19 nt, Homo sapiens
  misc_RNA (1)...(19): siRNA sense strand
gcaccaagaugaaaccuca

SEQ ID NO: 2284733 - RNA, 19 nt, Homo sapiens
  misc_RNA (1)...(19): siRNA sense strand
gcgugagaaaagugauaaa

SEQ ID NO: 2284734 - RNA, 19 nt, Homo sapiens
  misc_RNA (1)...(19): siRNA sense strand
uguuacaucacgucagaua

SEQ ID NO: 2284735 - RNA, 19 nt, Homo sapiens
  misc_RNA (1)...(19): siRNA sense strand
caugaaugcaucagugaca

SEQ ID NO: 2284736 - RNA, 19 nt, Homo sapiens
  misc_RNA (1)...(19): siRNA sense strand
guuuaagggcaauaaccaa

SEQ ID NO: 2284737 - RNA, 19 nt, Homo sapiens
  misc_RNA (1)...(19): siRNA sense strand
gggaaaccgaggagucaga

SEQ ID NO: 2284738 - RNA, 19 nt, Homo sapiens
  misc_RNA (1)...(19): siRNA sense strand
gaugaaaagcaguaaauca

SEQ ID NO: 2284739 - RNA, 19 nt, Homo sapiens
  misc_RNA (1)...(19): siRNA sense strand
ugggaguucuaaaggaaaa

SEQ ID NO: 2284740 - RNA, 19 nt, Homo sapiens
  misc_RNA (1)...(19): siRNA sense strand
cagagacaguugaagacau

SEQ ID NO: 2284741 - RNA, 19 nt, Homo sapiens
  misc_RNA (1)...(19): siRNA sense strand
guuuggagacauugcagaa

SEQ ID NO: 2284742 - RNA, 19 nt, Homo sapiens
  misc_RNA (1)...(19): siRNA sense strand
gagcaacaagaccaagaaa

SEQ ID NO: 2284743 - RNA, 19 nt, Homo sapiens
  misc_RNA (1)...(19): siRNA sense strand
gcuccaagccaguguagca

SEQ ID NO: 2284744 - RNA, 19 nt, Homo sapiens
  misc_RNA (1)...(19): siRNA sense strand
caugucaggaggagaguuu

SEQ ID NO: 2284745 - RNA, 19 nt, Homo sapiens
  misc_RNA (1)...(19): siRNA sense strand
ggaaaguaguggagaaggg

SEQ ID NO: 2284746 - RNA, 19 nt, Homo sapiens
  misc_RNA (1)...(19): siRNA sense strand
uggcaauuauguacuggaa

SEQ ID NO: 2284747 - RNA, 19 nt, Homo sapiens
  misc_RNA (1)...(19): siRNA sense strand
aaccaaagcaccagacuga

SEQ ID NO: 2284748 - RNA, 19 nt, Homo sapiens
  misc_RNA (1)...(19): siRNA sense strand
gagaaacauaagaagcaca

SEQ ID NO: 2284749 - RNA, 19 nt, Homo sapiens
  misc_RNA (1)...(19): siRNA sense strand
uugcagagacaguugaaga

SEQ ID NO: 2284750 - RNA, 19 nt, Homo sapiens
  misc_RNA (1)...(19): siRNA sense strand
cugagaaaccaaagcacca

SEQ ID NO: 2284751 - RNA, 19 nt, Homo sapiens
  misc_RNA (1)...(19): siRNA sense strand
gaaaccgaggagucagaaa

SEQ ID NO: 2284752 - RNA, 19 nt, Homo sapiens
  misc_RNA (1)...(19): siRNA sense strand
ggauuuagauauugagcca

SEQ ID NO: 2284753 - RNA, 19 nt, Homo sapiens
  misc_RNA (1)...(19): siRNA sense strand
cagauuaucccgaaggcaa

SEQ ID NO: 2284754 - RNA, 19 nt, Homo sapiens
  misc_RNA (1)...(19): siRNA sense strand
cagagggagacuuaggaaa

SEQ ID NO: 2284755 - RNA, 19 nt, Homo sapiens
  misc_RNA (1)...(19): siRNA sense strand
cuguaaaccucaugccaga

SEQ ID NO: 2284756 - RNA, 19 nt, Homo sapiens
  misc_RNA (1)...(19): siRNA sense strand
uaaccagaccagagggaga

SEQ ID NO: 2284757 - RNA, 19 nt, Homo sapiens
  misc_RNA (1)...(19): siRNA sense strand
agagggagacuuaggaaaa

SEQ ID NO: 2284758 - RNA, 19 nt, Homo sapiens
  misc_RNA (1)...(19): siRNA sense strand
ccguaaucgccaugaacau

SEQ ID NO: 2284759 - RNA, 19 nt, Homo sapiens
  misc_RNA (1)...(19): siRNA sense strand
ggucauaugaucaggcugu

SEQ ID NO: 2284760 - RNA, 19 nt, Homo sapiens
  misc_RNA (1)...(19): siRNA sense strand
cuauuacggauguggagaa

SEQ ID NO: 2284761 - RNA, 19 nt, Homo sapiens
  misc_RNA (1)...(19): siRNA sense strand
guugagagaaaaugugaaa

SEQ ID NO: 2284762 - RNA, 19 nt, Homo sapiens
  misc_RNA (1)...(19): siRNA sense strand
aggcaauaauucaagugau

SEQ ID NO: 2284763 - RNA, 19 nt, Homo sapiens
  misc_RNA (1)...(19): siRNA sense strand
ucuccaaggauuuagauau

SEQ ID NO: 2284764 - RNA, 19 nt, Homo sapiens
  misc_RNA (1)...(19): siRNA sense strand
agauuaucccgaaggcaau

SEQ ID NO: 2284765 - RNA, 19 nt, Homo sapiens
  misc_RNA (1)...(19): siRNA sense strand
ccaaaagacuguaaaccca

SEQ ID NO: 2284766 - RNA, 19 nt, Homo sapiens
  misc_RNA (1)...(19): siRNA sense strand
cuguaaacccagauggaag

SEQ ID NO: 2284767 - RNA, 19 nt, Homo sapiens
  misc_RNA (1)...(19): siRNA sense strand
aggcggaugaugcggguuu

SEQ ID NO: 2284768 - RNA, 19 nt, Homo sapiens
  misc_RNA (1)...(19): siRNA sense strand
ccuaaugccuucuggggau

SEQ ID NO: 2284769 - RNA, 19 nt, Homo sapiens
  misc_RNA (1)...(19): siRNA sense strand
ccauagaggugaaguccag

SEQ ID NO: 2284770 - RNA, 19 nt, Homo sapiens
  misc_RNA (1)...(19): siRNA sense strand
gggauggggaggagaagau

SEQ ID NO: 2284771 - RNA, 19 nt, Homo sapiens
  misc_RNA (1)...(19): siRNA sense strand
ccgaaugcuccgagaacca

SEQ ID NO: 2284772 - RNA, 19 nt, Homo sapiens
  misc_RNA (1)...(19): siRNA sense strand
auggagaagugaaggcuga

SEQ ID NO: 2284773 - RNA, 19 nt, Homo sapiens
  misc_RNA (1)...(19): siRNA sense strand
aguugaaggauuugcaaaa

SEQ ID NO: 2284774 - RNA, 19 nt, Homo sapiens
  misc_RNA (1)...(19): siRNA sense strand
cuggacaacaaaugggaau

SEQ ID NO: 2284775 - RNA, 19 nt, Homo sapiens
  misc_RNA (1)...(19): siRNA sense strand
ggaaauacuggguccgcuu

SEQ ID NO: 2284776 - RNA, 19 nt, Homo sapiens
  misc_RNA (1)...(19): siRNA sense strand
gagaauggguggauguccu

SEQ ID NO: 2284777 - RNA, 19 nt, Homo sapiens
  misc_RNA (1)...(19): siRNA sense strand
gaacacagggugcuggaca

SEQ ID NO: 2284778 - RNA, 19 nt, Homo sapiens
  misc_RNA (1)...(19): siRNA sense strand
aacacagggugcuggacaa

SEQ ID NO: 2284779 - RNA, 19 nt, Homo sapiens
  misc_RNA (1)...(19): siRNA sense strand
uggacaacaaaugggaaua

SEQ ID NO: 2284780 - RNA, 19 nt, Homo sapiens
  misc_RNA (1)...(19): siRNA sense strand
agugaagagagcucaggaa

SEQ ID NO: 2284781 - RNA, 19 nt, Homo sapiens
  misc_RNA (1)...(19): siRNA sense strand
ccaagaagcucucggaagg

SEQ ID NO: 2284782 - RNA, 19 nt, Homo sapiens
  misc_RNA (1)...(19): siRNA sense strand
gggaugucaccauggccaa

SEQ ID NO: 2284783 - RNA, 19 nt, Homo sapiens
  misc_RNA (1)...(19): siRNA sense strand
ggagauucuggaagagagu

SEQ ID NO: 2284784 - RNA, 19 nt, Homo sapiens
  misc_RNA (1)...(19): siRNA sense strand
gggccuucccugugcuauu

SEQ ID NO: 2284785 - RNA, 19 nt, Homo sapiens
  misc_RNA (1)...(19): siRNA sense strand
agauucuggaagagaguga

SEQ ID NO: 2284786 - RNA, 19 nt, Homo sapiens
  misc_RNA (1)...(19): siRNA sense strand
aggaaauauugguggaaga

SEQ ID NO: 2284787 - RNA, 19 nt, Homo sapiens
  misc_RNA (1)...(19): siRNA sense strand
gccaaguugaagaggaaau

SEQ ID NO: 2284788 - RNA, 19 nt, Homo sapiens
  misc_RNA (1)...(19): siRNA sense strand
ugguggaagaauugcaaga

SEQ ID NO: 2284789 - RNA, 19 nt, Homo sapiens
  misc_RNA (1)...(19): siRNA sense strand
aagaggaaauauuggugga

SEQ ID NO: 2284790 - RNA, 19 nt, Homo sapiens
  misc_RNA (1)...(19): siRNA sense strand
augaggugguggacauaau

SEQ ID NO: 2284791 - RNA, 19 nt, Homo sapiens
  misc_RNA (1)...(19): siRNA sense strand
guggacaagguucuggaaa

SEQ ID NO: 2284792 - RNA, 19 nt, Homo sapiens
  misc_RNA (1)...(19): siRNA sense strand
agacagaaauugaggagca

SEQ ID NO: 2284793 - RNA, 19 nt, Homo sapiens
  misc_RNA (1)...(19): siRNA sense strand
cagaaauugaggagcaaga

SEQ ID NO: 2284794 - RNA, 19 nt, Homo sapiens
  misc_RNA (1)...(19): siRNA sense strand
gcacagagaagauggugga

SEQ ID NO: 2284795 - RNA, 19 nt, Homo sapiens
  misc_RNA (1)...(19): siRNA sense strand
ugacaaccaaaguggacaa

SEQ ID NO: 2284796 - RNA, 19 nt, Homo sapiens
  misc_RNA (1)...(19): siRNA sense strand
agaaagaaaaguucgacaa

SEQ ID NO: 2284797 - RNA, 19 nt, Homo sapiens
  misc_RNA (1)...(19): siRNA sense strand
aguaaagaacaggaagcaa

SEQ ID NO: 2284798 - RNA, 19 nt, Homo sapiens
  misc_RNA (1)...(19): siRNA sense strand
gauuugaagaucagccaga

SEQ ID NO: 2284799 - RNA, 19 nt, Homo sapiens
  misc_RNA (1)...(19): siRNA sense strand
uuugaagaucagccagaaa

SEQ ID NO: 2284800 - RNA, 19 nt, Homo sapiens
  misc_RNA (1)...(19): siRNA sense strand
cggacaggcagcaguacuu

SEQ ID NO: 2284801 - RNA, 19 nt, Homo sapiens
  misc_RNA (1)...(19): siRNA sense strand
acagauugaaagaagcuau

SEQ ID NO: 2284802 - RNA, 19 nt, Homo sapiens
  misc_RNA (1)...(19): siRNA sense strand
aggcagaagaaguuacaaa

SEQ ID NO: 2284803 - RNA, 19 nt, Homo sapiens
  misc_RNA (1)...(19): siRNA sense strand
ccaaaagcugauagagaaa

SEQ ID NO: 2284804 - RNA, 19 nt, Homo sapiens
  misc_RNA (1)...(19): siRNA sense strand
ggagauuauccauggguga

SEQ ID NO: 2284805 - RNA, 19 nt, Homo sapiens
  misc_RNA (1)...(19): siRNA sense strand
gagccguauacaaggaaua

SEQ ID NO: 2284806 - RNA, 19 nt, Homo sapiens
  misc_RNA (1)...(19): siRNA sense strand
ucgcuuuacuccaggaaau

SEQ ID NO: 2284807 - RNA, 19 nt, Homo sapiens
  misc_RNA (1)...(19): siRNA sense strand
gugacuaucccgagagcau

SEQ ID NO: 2284808 - RNA, 19 nt, Homo sapiens
  misc_RNA (1)...(19): siRNA sense strand
gugaccaagaagaggaaau

SEQ ID NO: 2284809 - RNA, 19 nt, Homo sapiens
  misc_RNA (1)...(19): siRNA sense strand
uggcugaaccaaagaaaca

SEQ ID NO: 2284810 - RNA, 19 nt, Homo sapiens
  misc_RNA (1)...(19): siRNA sense strand
ccguauuuauugaugguga

SEQ ID NO: 2284811 - RNA, 19 nt, Homo sapiens
  misc_RNA (1)...(19): siRNA sense strand
cagaucaguuugagcccaa

SEQ ID NO: 2284812 - RNA, 19 nt, Homo sapiens
  misc_RNA (1)...(19): siRNA sense strand
accuagaagugcaagaaau

SEQ ID NO: 2284813 - RNA, 19 nt, Homo sapiens
  misc_RNA (1)...(19): siRNA sense strand
ccaagagagaugaugccaa

SEQ ID NO: 2284814 - RNA, 19 nt, Homo sapiens
  misc_RNA (1)...(19): siRNA sense strand
gcucagaaugggaaaauau

SEQ ID NO: 2284815 - RNA, 19 nt, Homo sapiens
  misc_RNA (1)...(19): siRNA sense strand
gugcaagaaaugaccgaca

SEQ ID NO: 2284816 - RNA, 19 nt, Homo sapiens
  misc_RNA (1)...(19): siRNA sense strand
cugcauggccagcgagcuu

SEQ ID NO: 2284817 - RNA, 19 nt, Homo sapiens
  misc_RNA (1)...(19): siRNA sense strand
augaaugagccguauacaa

SEQ ID NO: 2284818 - RNA, 19 nt, Homo sapiens
  misc_RNA (1)...(19): siRNA sense strand
ggguguauuauaugcagaa

SEQ ID NO: 2284819 - RNA, 19 nt, Homo sapiens
  misc_RNA (1)...(19): siRNA sense strand
gcacagagguuacagcauc

SEQ ID NO: 2284820 - RNA, 19 nt, Homo sapiens
  misc_RNA (1)...(19): siRNA sense strand
uggcuuggcauguguacaa

SEQ ID NO: 2284821 - RNA, 19 nt, Homo sapiens
  misc_RNA (1)...(19): siRNA sense strand
gguaccugguggcgcacaa

SEQ ID NO: 2284822 - RNA, 19 nt, Homo sapiens
  misc_RNA (1)...(19): siRNA sense strand
guaaccagucccaggugaa

SEQ ID NO: 2284823 - RNA, 19 nt, Homo sapiens
  misc_RNA (1)...(19): siRNA sense strand
ccaaaagcugauagagaaa

SEQ ID NO: 2284824 - RNA, 19 nt, Homo sapiens
  misc_RNA (1)...(19): siRNA sense strand
gugacuaucccgagagcau

SEQ ID NO: 2284825 - RNA, 19 nt, Homo sapiens
  misc_RNA (1)...(19): siRNA sense strand
ccguauuuauugaugguga

SEQ ID NO: 2284826 - RNA, 19 nt, Homo sapiens
  misc_RNA (1)...(19): siRNA sense strand
ccaagagagaugaugccaa

SEQ ID NO: 2284827 - RNA, 19 nt, Homo sapiens
  misc_RNA (1)...(19): siRNA sense strand
gcacagagguuacagcauc

SEQ ID NO: 2284828 - RNA, 19 nt, Homo sapiens
  misc_RNA (1)...(19): siRNA sense strand
gguaccugguggcgcacaa

SEQ ID NO: 2284829 - RNA, 19 nt, Homo sapiens
  misc_RNA (1)...(19): siRNA sense strand
uggugagaagggugagaaa

SEQ ID NO: 2284830 - RNA, 19 nt, Homo sapiens
  misc_RNA (1)...(19): siRNA sense strand
cagcauucagugugggauu

SEQ ID NO: 2284831 - RNA, 19 nt, Homo sapiens
  misc_RNA (1)...(19): siRNA sense strand
ggaaaggagaaccuggaga

SEQ ID NO: 2284832 - RNA, 19 nt, Homo sapiens
  misc_RNA (1)...(19): siRNA sense strand
cugguaaauuccacugcaa

SEQ ID NO: 2284833 - RNA, 19 nt, Homo sapiens
  misc_RNA (1)...(19): siRNA sense strand
gggugagaaaggagaucca

SEQ ID NO: 2284834 - RNA, 19 nt, Homo sapiens
  misc_RNA (1)...(19): siRNA sense strand
guaauggacucuaugcuga

SEQ ID NO: 2284835 - RNA, 19 nt, Homo sapiens
  misc_RNA (1)...(19): siRNA sense strand
ccaaggcaggaaaggagaa

SEQ ID NO: 2284836 - RNA, 19 nt, Homo sapiens
  misc_RNA (1)...(19): siRNA sense strand
aggaaaauaauguggacca

SEQ ID NO: 2284837 - RNA, 19 nt, Homo sapiens
  misc_RNA (1)...(19): siRNA sense strand
gggaagaggaggaggagga

SEQ ID NO: 2284838 - RNA, 19 nt, Homo sapiens
  misc_RNA (1)...(19): siRNA sense strand
gagaagagggugaggagga

SEQ ID NO: 2284839 - RNA, 19 nt, Homo sapiens
  misc_RNA (1)...(19): siRNA sense strand
ucucaaaggaucagaccaa

SEQ ID NO: 2284840 - RNA, 19 nt, Homo sapiens
  misc_RNA (1)...(19): siRNA sense strand
aggaggaggaggagggaga

SEQ ID NO: 2284841 - RNA, 19 nt, Homo sapiens
  misc_RNA (1)...(19): siRNA sense strand
cgagagaagcggagggaag

SEQ ID NO: 2284842 - RNA, 19 nt, Homo sapiens
  misc_RNA (1)...(19): siRNA sense strand
gggccauuguagaggauca

SEQ ID NO: 2284843 - RNA, 19 nt, Homo sapiens
  misc_RNA (1)...(19): siRNA sense strand
aggaaauugcagagcagaa

SEQ ID NO: 2284844 - RNA, 19 nt, Homo sapiens
  misc_RNA (1)...(19): siRNA sense strand
gcgccaagaucaaggccau

SEQ ID NO: 2284845 - RNA, 19 nt, Homo sapiens
  misc_RNA (1)...(19): siRNA sense strand
aggaugaagaugagauaca

SEQ ID NO: 2284846 - RNA, 19 nt, Homo sapiens
  misc_RNA (1)...(19): siRNA sense strand
agaaagagaaauccagcaa

SEQ ID NO: 2284847 - RNA, 19 nt, Homo sapiens
  misc_RNA (1)...(19): siRNA sense strand
agacugugaugguggccaa

SEQ ID NO: 2284848 - RNA, 19 nt, Homo sapiens
  misc_RNA (1)...(19): siRNA sense strand
cagucucagccgugggaua

SEQ ID NO: 2284849 - RNA, 19 nt, Homo sapiens
  misc_RNA (1)...(19): siRNA sense strand
gcgcacaaggggagagauu

SEQ ID NO: 2284850 - RNA, 19 nt, Homo sapiens
  misc_RNA (1)...(19): siRNA sense strand
gagggaaggugguggcagu

SEQ ID NO: 2284851 - RNA, 19 nt, Homo sapiens
  misc_RNA (1)...(19): siRNA sense strand
aggaggaagaggcgagaga

SEQ ID NO: 2284852 - RNA, 19 nt, Homo sapiens
  misc_RNA (1)...(19): siRNA sense strand
cagugaaggcugagaucca

SEQ ID NO: 2284853 - RNA, 19 nt, Homo sapiens
  misc_RNA (1)...(19): siRNA sense strand
augacaaagugguggaugu

SEQ ID NO: 2284854 - RNA, 19 nt, Homo sapiens
  misc_RNA (1)...(19): siRNA sense strand
caggaguguaugugaaaga

SEQ ID NO: 2284855 - RNA, 19 nt, Homo sapiens
  misc_RNA (1)...(19): siRNA sense strand
aauaagaaauccaaggcca

SEQ ID NO: 2284856 - RNA, 19 nt, Homo sapiens
  misc_RNA (1)...(19): siRNA sense strand
aagaacaaaccaaggguca

SEQ ID NO: 2284857 - RNA, 19 nt, Homo sapiens
  misc_RNA (1)...(19): siRNA sense strand
cuuggaacuuaaagagaca

SEQ ID NO: 2284858 - RNA, 19 nt, Homo sapiens
  misc_RNA (1)...(19): siRNA sense strand
guugaaaagcucagaguca

SEQ ID NO: 2284859 - RNA, 19 nt, Homo sapiens
  misc_RNA (1)...(19): siRNA sense strand
aggagggagaagaggguga

SEQ ID NO: 2284860 - RNA, 19 nt, Homo sapiens
  misc_RNA (1)...(19): siRNA sense strand
agguggacaucaagaccaa

SEQ ID NO: 2284861 - RNA, 19 nt, Homo sapiens
  misc_RNA (1)...(19): siRNA sense strand
gaggaagaggcgagagaag

SEQ ID NO: 2284862 - RNA, 19 nt, Homo sapiens
  misc_RNA (1)...(19): siRNA sense strand
gcuugguugcagaggagaa

SEQ ID NO: 2284863 - RNA, 19 nt, Homo sapiens
  misc_RNA (1)...(19): siRNA sense strand
guugcuuguuggaggaaaa

SEQ ID NO: 2284864 - RNA, 19 nt, Homo sapiens
  misc_RNA (1)...(19): siRNA sense strand
ggagcagaaacgacaggaa

SEQ ID NO: 2284865 - RNA, 19 nt, Homo sapiens
  misc_RNA (1)...(19): siRNA sense strand
gaugauuacuggcgggaac

SEQ ID NO: 2284866 - RNA, 19 nt, Homo sapiens
  misc_RNA (1)...(19): siRNA sense strand
cugcugaaggagaaagaga

SEQ ID NO: 2284867 - RNA, 19 nt, Homo sapiens
  misc_RNA (1)...(19): siRNA sense strand
agcagaaacgacaggaaau

SEQ ID NO: 2284868 - RNA, 19 nt, Homo sapiens
  misc_RNA (1)...(19): siRNA sense strand
uggaacuuaaagagacaua

SEQ ID NO: 2284869 - RNA, 19 nt, Homo sapiens
  misc_RNA (1)...(19): siRNA sense strand
ccauugagccagcacgcaa

SEQ ID NO: 2284870 - RNA, 19 nt, Homo sapiens
  misc_RNA (1)...(19): siRNA sense strand
aagcacugcaaauaagaaa

SEQ ID NO: 2284871 - RNA, 19 nt, Homo sapiens
  misc_RNA (1)...(19): siRNA sense strand
ggcaggugucugugaagaa

SEQ ID NO: 2284872 - RNA, 19 nt, Homo sapiens
  misc_RNA (1)...(19): siRNA sense strand
augaaaugcccaagaccuu

SEQ ID NO: 2284873 - RNA, 19 nt, Homo sapiens
  misc_RNA (1)...(19): siRNA sense strand
acaaagugguggaugugga

SEQ ID NO: 2284874 - RNA, 19 nt, Homo sapiens
  misc_RNA (1)...(19): siRNA sense strand
gccaagagcuagagcagac

SEQ ID NO: 2284875 - RNA, 19 nt, Homo sapiens
  misc_RNA (1)...(19): siRNA sense strand
ccuacaccauggaaggaau

SEQ ID NO: 2284876 - RNA, 19 nt, Homo sapiens
  misc_RNA (1)...(19): siRNA sense strand
cggcaaaagcacucacauu

SEQ ID NO: 2284877 - RNA, 19 nt, Homo sapiens
  misc_RNA (1)...(19): siRNA sense strand
gaggaagaucauuggaaac

SEQ ID NO: 2284878 - RNA, 19 nt, Homo sapiens
  misc_RNA (1)...(19): siRNA sense strand
ccuaaaaguggaaggaagu

SEQ ID NO: 2284879 - RNA, 19 nt, Homo sapiens
  misc_RNA (1)...(19): siRNA sense strand
caggaggagauccgagauu

SEQ ID NO: 2284880 - RNA, 19 nt, Homo sapiens
  misc_RNA (1)...(19): siRNA sense strand
caagaauguccaugaugau

SEQ ID NO: 2284881 - RNA, 19 nt, Homo sapiens
  misc_RNA (1)...(19): siRNA sense strand
cguccagaggcccgauaua

SEQ ID NO: 2284882 - RNA, 19 nt, Homo sapiens
  misc_RNA (1)...(19): siRNA sense strand
acaaacugggacaggaaaa

SEQ ID NO: 2284883 - RNA, 19 nt, Homo sapiens
  misc_RNA (1)...(19): siRNA sense strand
accaagagugugaaggaga

SEQ ID NO: 2284884 - RNA, 19 nt, Homo sapiens
  misc_RNA (1)...(19): siRNA sense strand
ugugaaggagauagagcau

SEQ ID NO: 2284885 - RNA, 19 nt, Homo sapiens
  misc_RNA (1)...(19): siRNA sense strand
agaacaaaccaagggucaa

SEQ ID NO: 2284886 - RNA, 19 nt, Homo sapiens
  misc_RNA (1)...(19): siRNA sense strand
ucuccaagcuucaggcagu

SEQ ID NO: 2284887 - RNA, 19 nt, Homo sapiens
  misc_RNA (1)...(19): siRNA sense strand
ucaaaggaucagaccaaaa

SEQ ID NO: 2284888 - RNA, 19 nt, Homo sapiens
  misc_RNA (1)...(19): siRNA sense strand
caaagagaggccugacaca

SEQ ID NO: 2284889 - RNA, 19 nt, Homo sapiens
  misc_RNA (1)...(19): siRNA sense strand
aagaugagauacaggugga

SEQ ID NO: 2284890 - RNA, 19 nt, Homo sapiens
  misc_RNA (1)...(19): siRNA sense strand
gaucaaggccauggagagu

SEQ ID NO: 2284891 - RNA, 19 nt, Homo sapiens
  misc_RNA (1)...(19): siRNA sense strand
ggggcugguuccaaaguaa

SEQ ID NO: 2284892 - RNA, 19 nt, Homo sapiens
  misc_RNA (1)...(19): siRNA sense strand
caagagugugaaggagaua

SEQ ID NO: 2284893 - RNA, 19 nt, Homo sapiens
  misc_RNA (1)...(19): siRNA sense strand
gauuaaaagaagcuaccaa

SEQ ID NO: 2284894 - RNA, 19 nt, Homo sapiens
  misc_RNA (1)...(19): siRNA sense strand
cugcucuaguggacggcaa

SEQ ID NO: 2284895 - RNA, 19 nt, Homo sapiens
  misc_RNA (1)...(19): siRNA sense strand
gggagaagagggugaggag

SEQ ID NO: 2284896 - RNA, 19 nt, Homo sapiens
  misc_RNA (1)...(19): siRNA sense strand
uggcgggaacagcaagaaa

SEQ ID NO: 2284897 - RNA, 19 nt, Homo sapiens
  misc_RNA (1)...(19): siRNA sense strand
ccaugaccuccaagaagaa

SEQ ID NO: 2284898 - RNA, 19 nt, Homo sapiens
  misc_RNA (1)...(19): siRNA sense strand
agaaccagcagaugaugaa

SEQ ID NO: 2284899 - RNA, 19 nt, Homo sapiens
  misc_RNA (1)...(19): siRNA sense strand
aagaaauagaggaaagcaa

SEQ ID NO: 2284900 - RNA, 19 nt, Homo sapiens
  misc_RNA (1)...(19): siRNA sense strand
aagcaaaauuaggggaaaa

SEQ ID NO: 2284901 - RNA, 19 nt, Homo sapiens
  misc_RNA (1)...(19): siRNA sense strand
cauuagugaaagugaagaa

SEQ ID NO: 2284902 - RNA, 19 nt, Homo sapiens
  misc_RNA (1)...(19): siRNA sense strand
cuucacaauuaaaggauga

SEQ ID NO: 2284903 - RNA, 19 nt, Homo sapiens
  misc_RNA (1)...(19): siRNA sense strand
auuuaugaacagagaggaa

SEQ ID NO: 2284904 - RNA, 19 nt, Homo sapiens
  misc_RNA (1)...(19): siRNA sense strand
auacauggacagaaaggaa

SEQ ID NO: 2284905 - RNA, 19 nt, Homo sapiens
  misc_RNA (1)...(19): siRNA sense strand
aggcaucacugcagagcau

SEQ ID NO: 2284906 - RNA, 19 nt, Homo sapiens
  misc_RNA (1)...(19): siRNA sense strand
uugaagugggagagaagaa

SEQ ID NO: 2284907 - RNA, 19 nt, Homo sapiens
  misc_RNA (1)...(19): siRNA sense strand
cacagaagggaguggacua

SEQ ID NO: 2284908 - RNA, 19 nt, Homo sapiens
  misc_RNA (1)...(19): siRNA sense strand
caugcauaacugugauaaa

SEQ ID NO: 2284909 - RNA, 19 nt, Homo sapiens
  misc_RNA (1)...(19): siRNA sense strand
cugcagagcaugugggaag

SEQ ID NO: 2284910 - RNA, 19 nt, Homo sapiens
  misc_RNA (1)...(19): siRNA sense strand
aaacagacaaacugaucaa

SEQ ID NO: 2284911 - RNA, 19 nt, Homo sapiens
  misc_RNA (1)...(19): siRNA sense strand
gguuaugaacaugaagaaa

SEQ ID NO: 2284912 - RNA, 19 nt, Homo sapiens
  misc_RNA (1)...(19): siRNA sense strand
ggacaugacuaauuggaag

SEQ ID NO: 2284913 - RNA, 19 nt, Homo sapiens
  misc_RNA (1)...(19): siRNA sense strand
acuaauuggaaguugacua

SEQ ID NO: 2284914 - RNA, 19 nt, Homo sapiens
  misc_RNA (1)...(19): siRNA sense strand
gagagaagaaauguggaaa

SEQ ID NO: 2284915 - RNA, 19 nt, Homo sapiens
  misc_RNA (1)...(19): siRNA sense strand
aguuagggcugaugaaaau

SEQ ID NO: 2284916 - RNA, 19 nt, Homo sapiens
  misc_RNA (1)...(19): siRNA sense strand
ccuuaauaugacagagcau

SEQ ID NO: 2284917 - RNA, 19 nt, Homo sapiens
  misc_RNA (1)...(19): siRNA sense strand
gauuacaaguuuaacgguu

SEQ ID NO: 2284918 - RNA, 19 nt, Homo sapiens
  misc_RNA (1)...(19): siRNA sense strand
agacacaccagcagcaaau

SEQ ID NO: 2284919 - RNA, 19 nt, Homo sapiens
  misc_RNA (1)...(19): siRNA sense strand
ccugcaaacaguggaaaua

SEQ ID NO: 2284920 - RNA, 19 nt, Homo sapiens
  misc_RNA (1)...(19): siRNA sense strand
agucagaaugcuacucaaa

SEQ ID NO: 2284921 - RNA, 19 nt, Homo sapiens
  misc_RNA (1)...(19): siRNA sense strand
uuaugaacagagaggaaau

SEQ ID NO: 2284922 - RNA, 19 nt, Homo sapiens
  misc_RNA (1)...(19): siRNA sense strand
cugaugaaaaugaagguua

SEQ ID NO: 2284923 - RNA, 19 nt, Homo sapiens
  misc_RNA (1)...(19): siRNA sense strand
ggucuagauuuaaaaggaa

SEQ ID NO: 2284924 - RNA, 19 nt, Homo sapiens
  misc_RNA (1)...(19): siRNA sense strand
agaaaggaagcuagagugu

SEQ ID NO: 2284925 - RNA, 19 nt, Homo sapiens
  misc_RNA (1)...(19): siRNA sense strand
agguuaugaacaugaagaa

SEQ ID NO: 2284926 - RNA, 19 nt, Homo sapiens
  misc_RNA (1)...(19): siRNA sense strand
uugcauuagugaaagugaa

SEQ ID NO: 2284927 - RNA, 19 nt, Homo sapiens
  misc_RNA (1)...(19): siRNA sense strand
gugaaagugaagaauguga

SEQ ID NO: 2284928 - RNA, 19 nt, Homo sapiens
  misc_RNA (1)...(19): siRNA sense strand
ggacauuacaaaacgauuu

SEQ ID NO: 2284929 - RNA, 19 nt, Homo sapiens
  misc_RNA (1)...(19): siRNA sense strand
aauuaaaggaugacggaag

SEQ ID NO: 2284930 - RNA, 19 nt, Homo sapiens
  misc_RNA (1)...(19): siRNA sense strand
aaaggaugacggaaguaua

SEQ ID NO: 2284931 - RNA, 19 nt, Homo sapiens
  misc_RNA (1)...(19): siRNA sense strand
uugcagaagaccaguuaau

SEQ ID NO: 2284932 - RNA, 19 nt, Homo sapiens
  misc_RNA (1)...(19): siRNA sense strand
gccaaguaaacgaagaaaa

SEQ ID NO: 2284933 - RNA, 19 nt, Homo sapiens
  misc_RNA (1)...(19): siRNA sense strand
augcaggucuagauuuaaa

SEQ ID NO: 2284934 - RNA, 19 nt, Homo sapiens
  misc_RNA (1)...(19): siRNA sense strand
cugcaaacaguggaaauaa

SEQ ID NO: 2284935 - RNA, 19 nt, Homo sapiens
  misc_RNA (1)...(19): siRNA sense strand
agagaagaaauguggaaac

SEQ ID NO: 2284936 - RNA, 19 nt, Homo sapiens
  misc_RNA (1)...(19): siRNA sense strand
agauucaguaacagaagaa

SEQ ID NO: 2284937 - RNA, 19 nt, Homo sapiens
  misc_RNA (1)...(19): siRNA sense strand
ugcaaacaguggaaauaau

SEQ ID NO: 2284938 - RNA, 19 nt, Homo sapiens
  misc_RNA (1)...(19): siRNA sense strand
gaaagcaaaauuaggggaa

SEQ ID NO: 2284939 - RNA, 19 nt, Homo sapiens
  misc_RNA (1)...(19): siRNA sense strand
augacuaauuggaaguuga

SEQ ID NO: 2284940 - RNA, 19 nt, Homo sapiens
  misc_RNA (1)...(19): siRNA sense strand
ugagaugaaugauagccaa

SEQ ID NO: 2284941 - RNA, 19 nt, Homo sapiens
  misc_RNA (1)...(19): siRNA sense strand
cgaagaaaaggaaaaguuu

SEQ ID NO: 2284942 - RNA, 19 nt, Homo sapiens
  misc_RNA (1)...(19): siRNA sense strand
uggauguccugcuguuaaa

SEQ ID NO: 2284943 - RNA, 19 nt, Homo sapiens
  misc_RNA (1)...(19): siRNA sense strand
ccacaugagugaggggauu

SEQ ID NO: 2284944 - RNA, 19 nt, Homo sapiens
  misc_RNA (1)...(19): siRNA sense strand
gggaaaacucagcaaccaa

SEQ ID NO: 2284945 - RNA, 19 nt, Homo sapiens
  misc_RNA (1)...(19): siRNA sense strand
uagaaaguuaugaggcuga

SEQ ID NO: 2284946 - RNA, 19 nt, Homo sapiens
  misc_RNA (1)...(19): siRNA sense strand
uaggacagaucuagggagu

SEQ ID NO: 2284947 - RNA, 19 nt, Homo sapiens
  misc_RNA (1)...(19): siRNA sense strand
augaaugauagccaaguaa

SEQ ID NO: 2284948 - RNA, 19 nt, Homo sapiens
  misc_RNA (1)...(19): siRNA sense strand
cuaucuaaugguugugauu

SEQ ID NO: 2284949 - RNA, 19 nt, Homo sapiens
  misc_RNA (1)...(19): siRNA sense strand
gaaauagaggaaagcaagu

SEQ ID NO: 2284950 - RNA, 19 nt, Homo sapiens
  misc_RNA (1)...(19): siRNA sense strand
aaucucaggacaugacuaa

SEQ ID NO: 2284951 - RNA, 19 nt, Homo sapiens
  misc_RNA (1)...(19): siRNA sense strand
aagaagauucaguaacaga

SEQ ID NO: 2284952 - RNA, 19 nt, Homo sapiens
  misc_RNA (1)...(19): siRNA sense strand
aaaugugaagccagguuua

SEQ ID NO: 2284953 - RNA, 19 nt, Homo sapiens
  misc_RNA (1)...(19): siRNA sense strand
auuaaaggaugacggaagu

SEQ ID NO: 2284954 - RNA, 19 nt, Homo sapiens
  misc_RNA (1)...(19): siRNA sense strand
guuaugaacaugaagaaac

SEQ ID NO: 2284955 - RNA, 19 nt, Homo sapiens
  misc_RNA (1)...(19): siRNA sense strand
gugcuguugaagugggaga

SEQ ID NO: 2284956 - RNA, 19 nt, Homo sapiens
  misc_RNA (1)...(19): siRNA sense strand
aaguuagggcugaugaaaa

SEQ ID NO: 2284957 - RNA, 19 nt, Homo sapiens
  misc_RNA (1)...(19): siRNA sense strand
acucuuggcacuacagaau

SEQ ID NO: 2284958 - RNA, 19 nt, Homo sapiens
  misc_RNA (1)...(19): siRNA sense strand
uagccaaguaaacgaagaa

SEQ ID NO: 2284959 - RNA, 19 nt, Homo sapiens
  misc_RNA (1)...(19): siRNA sense strand
gaggacaguguguuggauu

SEQ ID NO: 2284960 - RNA, 19 nt, Homo sapiens
  misc_RNA (1)...(19): siRNA sense strand
ccacagaggaagaggauca

SEQ ID NO: 2284961 - RNA, 19 nt, Homo sapiens
  misc_RNA (1)...(19): siRNA sense strand
aagaaauagaggaaagcaa

SEQ ID NO: 2284962 - RNA, 19 nt, Homo sapiens
  misc_RNA (1)...(19): siRNA sense strand
aagcaaaauuaggggaaaa

SEQ ID NO: 2284963 - RNA, 19 nt, Homo sapiens
  misc_RNA (1)...(19): siRNA sense strand
cauuagugaaagugaagaa

SEQ ID NO: 2284964 - RNA, 19 nt, Homo sapiens
  misc_RNA (1)...(19): siRNA sense strand
uuggauacaaaguggaaua

SEQ ID NO: 2284965 - RNA, 19 nt, Homo sapiens
  misc_RNA (1)...(19): siRNA sense strand
cuucacaauuaaaggauga

SEQ ID NO: 2284966 - RNA, 19 nt, Homo sapiens
  misc_RNA (1)...(19): siRNA sense strand
auuuaugaacagagaggaa

SEQ ID NO: 2284967 - RNA, 19 nt, Homo sapiens
  misc_RNA (1)...(19): siRNA sense strand
auacauggacagaaaggaa

SEQ ID NO: 2284968 - RNA, 19 nt, Homo sapiens
  misc_RNA (1)...(19): siRNA sense strand
aggcaucacugcagagcau

SEQ ID NO: 2284969 - RNA, 19 nt, Homo sapiens
  misc_RNA (1)...(19): siRNA sense strand
uugaagugggagagaagaa

SEQ ID NO: 2284970 - RNA, 19 nt, Homo sapiens
  misc_RNA (1)...(19): siRNA sense strand
cacagaagggaguggacua

SEQ ID NO: 2284971 - RNA, 19 nt, Homo sapiens
  misc_RNA (1)...(19): siRNA sense strand
caugcauaacugugauaaa

SEQ ID NO: 2284972 - RNA, 19 nt, Homo sapiens
  misc_RNA (1)...(19): siRNA sense strand
cugcagagcaugugggaag

SEQ ID NO: 2284973 - RNA, 19 nt, Homo sapiens
  misc_RNA (1)...(19): siRNA sense strand
aaacagacaaacugaucaa

SEQ ID NO: 2284974 - RNA, 19 nt, Homo sapiens
  misc_RNA (1)...(19): siRNA sense strand
gguuaugaacaugaagaaa

SEQ ID NO: 2284975 - RNA, 19 nt, Homo sapiens
  misc_RNA (1)...(19): siRNA sense strand
ggacaugacuaauuggaag

SEQ ID NO: 2284976 - RNA, 19 nt, Homo sapiens
  misc_RNA (1)...(19): siRNA sense strand
acuaauuggaaguugacua

SEQ ID NO: 2284977 - RNA, 19 nt, Homo sapiens
  misc_RNA (1)...(19): siRNA sense strand
gagagaagaaauguggaaa

SEQ ID NO: 2284978 - RNA, 19 nt, Homo sapiens
  misc_RNA (1)...(19): siRNA sense strand
acaagguguuagaugaauu

SEQ ID NO: 2284979 - RNA, 19 nt, Homo sapiens
  misc_RNA (1)...(19): siRNA sense strand
aguuagggcugaugaaaau

SEQ ID NO: 2284980 - RNA, 19 nt, Homo sapiens
  misc_RNA (1)...(19): siRNA sense strand
ccuuaauaugacagagcau

SEQ ID NO: 2284981 - RNA, 19 nt, Homo sapiens
  misc_RNA (1)...(19): siRNA sense strand
gauuacaaguuuaacgguu

SEQ ID NO: 2284982 - RNA, 19 nt, Homo sapiens
  misc_RNA (1)...(19): siRNA sense strand
agacacaccagcagcaaau

SEQ ID NO: 2284983 - RNA, 19 nt, Homo sapiens
  misc_RNA (1)...(19): siRNA sense strand
ccugcaaacaguggaaaua

SEQ ID NO: 2284984 - RNA, 19 nt, Homo sapiens
  misc_RNA (1)...(19): siRNA sense strand
agucagaaugcuacucaaa

SEQ ID NO: 2284985 - RNA, 19 nt, Homo sapiens
  misc_RNA (1)...(19): siRNA sense strand
uuaugaacagagaggaaau

SEQ ID NO: 2284986 - RNA, 19 nt, Homo sapiens
  misc_RNA (1)...(19): siRNA sense strand
cugaugaaaaugaagguua

SEQ ID NO: 2284987 - RNA, 19 nt, Homo sapiens
  misc_RNA (1)...(19): siRNA sense strand
ggucuagauuuaaaaggaa

SEQ ID NO: 2284988 - RNA, 19 nt, Homo sapiens
  misc_RNA (1)...(19): siRNA sense strand
agaaaggaagcuagagugu

SEQ ID NO: 2284989 - RNA, 19 nt, Homo sapiens
  misc_RNA (1)...(19): siRNA sense strand
agguuaugaacaugaagaa

SEQ ID NO: 2284990 - RNA, 19 nt, Homo sapiens
  misc_RNA (1)...(19): siRNA sense strand
uugcauuagugaaagugaa

SEQ ID NO: 2284991 - RNA, 19 nt, Homo sapiens
  misc_RNA (1)...(19): siRNA sense strand
gugaaagugaagaauguga

SEQ ID NO: 2284992 - RNA, 19 nt, Homo sapiens
  misc_RNA (1)...(19): siRNA sense strand
uugcagaagaccaguuaau

SEQ ID NO: 2284993 - RNA, 19 nt, Homo sapiens
  misc_RNA (1)...(19): siRNA sense strand
ggacauuacaaaacgauuu

SEQ ID NO: 2284994 - RNA, 19 nt, Homo sapiens
  misc_RNA (1)...(19): siRNA sense strand
aauuaaaggaugacggaag

SEQ ID NO: 2284995 - RNA, 19 nt, Homo sapiens
  misc_RNA (1)...(19): siRNA sense strand
aaaggaugacggaaguaua

SEQ ID NO: 2284996 - RNA, 19 nt, Homo sapiens
  misc_RNA (1)...(19): siRNA sense strand
agaauuacuuccaagcaga

SEQ ID NO: 2284997 - RNA, 19 nt, Homo sapiens
  misc_RNA (1)...(19): siRNA sense strand
gccaaguaaacgaagaaaa

SEQ ID NO: 2284998 - RNA, 19 nt, Homo sapiens
  misc_RNA (1)...(19): siRNA sense strand
augcaggucuagauuuaaa

SEQ ID NO: 2284999 - RNA, 19 nt, Homo sapiens
  misc_RNA (1)...(19): siRNA sense strand
cugcaaacaguggaaauaa

SEQ ID NO: 2285000 - RNA, 19 nt, Homo sapiens
  misc_RNA (1)...(19): siRNA sense strand
agagaagaaauguggaaac

SEQ ID NO: 2285001 - RNA, 19 nt, Homo sapiens
  misc_RNA (1)...(19): siRNA sense strand
agauucaguaacagaagaa

SEQ ID NO: 2285002 - RNA, 19 nt, Homo sapiens
  misc_RNA (1)...(19): siRNA sense strand
ugcaaacaguggaaauaau

SEQ ID NO: 2285003 - RNA, 19 nt, Homo sapiens
  misc_RNA (1)...(19): siRNA sense strand
gaaagcaaaauuaggggaa

SEQ ID NO: 2285004 - RNA, 19 nt, Homo sapiens
  misc_RNA (1)...(19): siRNA sense strand
augacuaauuggaaguuga

SEQ ID NO: 2285005 - RNA, 19 nt, Homo sapiens
  misc_RNA (1)...(19): siRNA sense strand
ugagaugaaugauagccaa

SEQ ID NO: 2285006 - RNA, 19 nt, Homo sapiens
  misc_RNA (1)...(19): siRNA sense strand
cgaagaaaaggaaaaguuu

SEQ ID NO: 2285007 - RNA, 19 nt, Homo sapiens
  misc_RNA (1)...(19): siRNA sense strand
uggauguccugcuguuaaa

SEQ ID NO: 2285008 - RNA, 19 nt, Homo sapiens
  misc_RNA (1)...(19): siRNA sense strand
ccacaugagugaggggauu

SEQ ID NO: 2285009 - RNA, 19 nt, Homo sapiens
  misc_RNA (1)...(19): siRNA sense strand
gggaaaacucagcaaccaa

SEQ ID NO: 2285010 - RNA, 19 nt, Homo sapiens
  misc_RNA (1)...(19): siRNA sense strand
uagaaaguuaugaggcuga

SEQ ID NO: 2285011 - RNA, 19 nt, Homo sapiens
  misc_RNA (1)...(19): siRNA sense strand
ugaacaaaacgaagaugaa

SEQ ID NO: 2285012 - RNA, 19 nt, Homo sapiens
  misc_RNA (1)...(19): siRNA sense strand
uaggacagaucuagggagu

SEQ ID NO: 2285013 - RNA, 19 nt, Homo sapiens
  misc_RNA (1)...(19): siRNA sense strand
augaaugauagccaaguaa

SEQ ID NO: 2285014 - RNA, 19 nt, Homo sapiens
  misc_RNA (1)...(19): siRNA sense strand
cuaucuaaugguugugauu

SEQ ID NO: 2285015 - RNA, 19 nt, Homo sapiens
  misc_RNA (1)...(19): siRNA sense strand
gaaauagaggaaagcaagu

SEQ ID NO: 2285016 - RNA, 19 nt, Homo sapiens
  misc_RNA (1)...(19): siRNA sense strand
aaucucaggacaugacuaa

SEQ ID NO: 2285017 - RNA, 19 nt, Homo sapiens
  misc_RNA (1)...(19): siRNA sense strand
ccacagaggaagaggauca

SEQ ID NO: 2285018 - RNA, 19 nt, Homo sapiens
  misc_RNA (1)...(19): siRNA sense strand
aagaaauagaggaaagcaa

SEQ ID NO: 2285019 - RNA, 19 nt, Homo sapiens
  misc_RNA (1)...(19): siRNA sense strand
aagcaaaauuaggggaaaa

SEQ ID NO: 2285020 - RNA, 19 nt, Homo sapiens
  misc_RNA (1)...(19): siRNA sense strand
cauuagugaaagugaagaa

SEQ ID NO: 2285021 - RNA, 19 nt, Homo sapiens
  misc_RNA (1)...(19): siRNA sense strand
uuggauacaaaguggaaua

SEQ ID NO: 2285022 - RNA, 19 nt, Homo sapiens
  misc_RNA (1)...(19): siRNA sense strand
cuucacaauuaaaggauga

SEQ ID NO: 2285023 - RNA, 19 nt, Homo sapiens
  misc_RNA (1)...(19): siRNA sense strand
auuuaugaacagagaggaa

SEQ ID NO: 2285024 - RNA, 19 nt, Homo sapiens
  misc_RNA (1)...(19): siRNA sense strand
auacauggacagaaaggaa

SEQ ID NO: 2285025 - RNA, 19 nt, Homo sapiens
  misc_RNA (1)...(19): siRNA sense strand
aggcaucacugcagagcau

SEQ ID NO: 2285026 - RNA, 19 nt, Homo sapiens
  misc_RNA (1)...(19): siRNA sense strand
uugaagugggagagaagaa

SEQ ID NO: 2285027 - RNA, 19 nt, Homo sapiens
  misc_RNA (1)...(19): siRNA sense strand
cacagaagggaguggacua

SEQ ID NO: 2285028 - RNA, 19 nt, Homo sapiens
  misc_RNA (1)...(19): siRNA sense strand
caugcauaacugugauaaa

SEQ ID NO: 2285029 - RNA, 19 nt, Homo sapiens
  misc_RNA (1)...(19): siRNA sense strand
cugcagagcaugugggaag

SEQ ID NO: 2285030 - RNA, 19 nt, Homo sapiens
  misc_RNA (1)...(19): siRNA sense strand
aaacagacaaacugaucaa

SEQ ID NO: 2285031 - RNA, 19 nt, Homo sapiens
  misc_RNA (1)...(19): siRNA sense strand
gguuaugaacaugaagaaa

SEQ ID NO: 2285032 - RNA, 19 nt, Homo sapiens
  misc_RNA (1)...(19): siRNA sense strand
ggacaugacuaauuggaag

SEQ ID NO: 2285033 - RNA, 19 nt, Homo sapiens
  misc_RNA (1)...(19): siRNA sense strand
acuaauuggaaguugacua

SEQ ID NO: 2285034 - RNA, 19 nt, Homo sapiens
  misc_RNA (1)...(19): siRNA sense strand
gagagaagaaauguggaaa

SEQ ID NO: 2285035 - RNA, 19 nt, Homo sapiens
  misc_RNA (1)...(19): siRNA sense strand
acaagguguuagaugaauu

SEQ ID NO: 2285036 - RNA, 19 nt, Homo sapiens
  misc_RNA (1)...(19): siRNA sense strand
aguuagggcugaugaaaau

SEQ ID NO: 2285037 - RNA, 19 nt, Homo sapiens
  misc_RNA (1)...(19): siRNA sense strand
ccuuaauaugacagagcau

SEQ ID NO: 2285038 - RNA, 19 nt, Homo sapiens
  misc_RNA (1)...(19): siRNA sense strand
gauuacaaguuuaacgguu

SEQ ID NO: 2285039 - RNA, 19 nt, Homo sapiens
  misc_RNA (1)...(19): siRNA sense strand
agacacaccagcagcaaau

SEQ ID NO: 2285040 - RNA, 19 nt, Homo sapiens
  misc_RNA (1)...(19): siRNA sense strand
ccugcaaacaguggaaaua

SEQ ID NO: 2285041 - RNA, 19 nt, Homo sapiens
  misc_RNA (1)...(19): siRNA sense strand
agucagaaugcuacucaaa

SEQ ID NO: 2285042 - RNA, 19 nt, Homo sapiens
  misc_RNA (1)...(19): siRNA sense strand
uuaugaacagagaggaaau

SEQ ID NO: 2285043 - RNA, 19 nt, Homo sapiens
  misc_RNA (1)...(19): siRNA sense strand
cugaugaaaaugaagguua

SEQ ID NO: 2285044 - RNA, 19 nt, Homo sapiens
  misc_RNA (1)...(19): siRNA sense strand
ggucuagauuuaaaaggaa

SEQ ID NO: 2285045 - RNA, 19 nt, Homo sapiens
  misc_RNA (1)...(19): siRNA sense strand
agaaaggaagcuagagugu

SEQ ID NO: 2285046 - RNA, 19 nt, Homo sapiens
  misc_RNA (1)...(19): siRNA sense strand
agguuaugaacaugaagaa

SEQ ID NO: 2285047 - RNA, 19 nt, Homo sapiens
  misc_RNA (1)...(19): siRNA sense strand
uugcauuagugaaagugaa

SEQ ID NO: 2285048 - RNA, 19 nt, Homo sapiens
  misc_RNA (1)...(19): siRNA sense strand
gugaaagugaagaauguga

SEQ ID NO: 2285049 - RNA, 19 nt, Homo sapiens
  misc_RNA (1)...(19): siRNA sense strand
uugcagaagaccaguuaau

SEQ ID NO: 2285050 - RNA, 19 nt, Homo sapiens
  misc_RNA (1)...(19): siRNA sense strand
ggacauuacaaaacgauuu

SEQ ID NO: 2285051 - RNA, 19 nt, Homo sapiens
  misc_RNA (1)...(19): siRNA sense strand
aauuaaaggaugacggaag

SEQ ID NO: 2285052 - RNA, 19 nt, Homo sapiens
  misc_RNA (1)...(19): siRNA sense strand
aaaggaugacggaaguaua

SEQ ID NO: 2285053 - RNA, 19 nt, Homo sapiens
  misc_RNA (1)...(19): siRNA sense strand
agaauuacuuccaagcaga

SEQ ID NO: 2285054 - RNA, 19 nt, Homo sapiens
  misc_RNA (1)...(19): siRNA sense strand
gccaaguaaacgaagaaaa

SEQ ID NO: 2285055 - RNA, 19 nt, Homo sapiens
  misc_RNA (1)...(19): siRNA sense strand
augcaggucuagauuuaaa

SEQ ID NO: 2285056 - RNA, 19 nt, Homo sapiens
  misc_RNA (1)...(19): siRNA sense strand
cugcaaacaguggaaauaa

SEQ ID NO: 2285057 - RNA, 19 nt, Homo sapiens
  misc_RNA (1)...(19): siRNA sense strand
agagaagaaauguggaaac

SEQ ID NO: 2285058 - RNA, 19 nt, Homo sapiens
  misc_RNA (1)...(19): siRNA sense strand
agauucaguaacagaagaa

SEQ ID NO: 2285059 - RNA, 19 nt, Homo sapiens
  misc_RNA (1)...(19): siRNA sense strand
ugcaaacaguggaaauaau

SEQ ID NO: 2285060 - RNA, 19 nt, Homo sapiens
  misc_RNA (1)...(19): siRNA sense strand
gaaagcaaaauuaggggaa

SEQ ID NO: 2285061 - RNA, 19 nt, Homo sapiens
  misc_RNA (1)...(19): siRNA sense strand
augacuaauuggaaguuga

SEQ ID NO: 2285062 - RNA, 19 nt, Homo sapiens
  misc_RNA (1)...(19): siRNA sense strand
ugagaugaaugauagccaa

SEQ ID NO: 2285063 - RNA, 19 nt, Homo sapiens
  misc_RNA (1)...(19): siRNA sense strand
cgaagaaaaggaaaaguuu

SEQ ID NO: 2285064 - RNA, 19 nt, Homo sapiens
  misc_RNA (1)...(19): siRNA sense strand
uggauguccugcuguuaaa

SEQ ID NO: 2285065 - RNA, 19 nt, Homo sapiens
  misc_RNA (1)...(19): siRNA sense strand
ccacaugagugaggggauu

SEQ ID NO: 2285066 - RNA, 19 nt, Homo sapiens
  misc_RNA (1)...(19): siRNA sense strand
gggaaaacucagcaaccaa

SEQ ID NO: 2285067 - RNA, 19 nt, Homo sapiens
  misc_RNA (1)...(19): siRNA sense strand
uagaaaguuaugaggcuga

SEQ ID NO: 2285068 - RNA, 19 nt, Homo sapiens
  misc_RNA (1)...(19): siRNA sense strand
ugaacaaaacgaagaugaa

SEQ ID NO: 2285069 - RNA, 19 nt, Homo sapiens
  misc_RNA (1)...(19): siRNA sense strand
uaggacagaucuagggagu

SEQ ID NO: 2285070 - RNA, 19 nt, Homo sapiens
  misc_RNA (1)...(19): siRNA sense strand
augaaugauagccaaguaa

SEQ ID NO: 2285071 - RNA, 19 nt, Homo sapiens
  misc_RNA (1)...(19): siRNA sense strand
cuaucuaaugguugugauu

SEQ ID NO: 2285072 - RNA, 19 nt, Homo sapiens
  misc_RNA (1)...(19): siRNA sense strand
gaaauagaggaaagcaagu

SEQ ID NO: 2285073 - RNA, 19 nt, Homo sapiens
  misc_RNA (1)...(19): siRNA sense strand
aaucucaggacaugacuaa

SEQ ID NO: 2285074 - RNA, 19 nt, Homo sapiens
  misc_RNA (1)...(19): siRNA sense strand
cuuuaaaugaacugggaau

SEQ ID NO: 2285075 - RNA, 19 nt, Homo sapiens
  misc_RNA (1)...(19): siRNA sense strand
agauauagaugccugggaa

SEQ ID NO: 2285076 - RNA, 19 nt, Homo sapiens
  misc_RNA (1)...(19): siRNA sense strand
gauauagaugccugggaau

SEQ ID NO: 2285077 - RNA, 19 nt, Homo sapiens
  misc_RNA (1)...(19): siRNA sense strand
gggaauugcguaaagggau

SEQ ID NO: 2285078 - RNA, 19 nt, Homo sapiens
  misc_RNA (1)...(19): siRNA sense strand
ggguaacauacuucaacaa

SEQ ID NO: 2285079 - RNA, 19 nt, Homo sapiens
  misc_RNA (1)...(19): siRNA sense strand
guuugaugcucgcugggua

SEQ ID NO: 2285080 - RNA, 19 nt, Homo sapiens
  misc_RNA (1)...(19): siRNA sense strand
aguucgaauccuagagguu

SEQ ID NO: 2285081 - RNA, 19 nt, Homo sapiens
  misc_RNA (1)...(19): siRNA sense strand
augccugggaauugcguaa

SEQ ID NO: 2285082 - RNA, 19 nt, Homo sapiens
  misc_RNA (1)...(19): siRNA sense strand
gcgggcaugcagacgguua

SEQ ID NO: 2285083 - RNA, 19 nt, Homo sapiens
  misc_RNA (1)...(19): siRNA sense strand
guaaagggauaaacacacu

SEQ ID NO: 2285084 - RNA, 19 nt, Homo sapiens
  misc_RNA (1)...(19): siRNA sense strand
cgggcaugcagacgguuaa

SEQ ID NO: 2285085 - RNA, 19 nt, Homo sapiens
  misc_RNA (1)...(19): siRNA sense strand
ggccagugaucgagcgcua

SEQ ID NO: 2285086 - RNA, 19 nt, Homo sapiens
  misc_RNA (1)...(19): siRNA sense strand
gcucauaccauguggacga

SEQ ID NO: 2285087 - RNA, 19 nt, Homo sapiens
  misc_RNA (1)...(19): siRNA sense strand
ugcauauacaccagggaaa

SEQ ID NO: 2285088 - RNA, 19 nt, Homo sapiens
  misc_RNA (1)...(19): siRNA sense strand
ccauaauaauuggcgggaa

SEQ ID NO: 2285089 - RNA, 19 nt, Homo sapiens
  misc_RNA (1)...(19): siRNA sense strand
acaucgccauagugggaaa

SEQ ID NO: 2285090 - RNA, 19 nt, Homo sapiens
  misc_RNA (1)...(19): siRNA sense strand
gcauauacaccagggaaaa

SEQ ID NO: 2285091 - RNA, 19 nt, Homo sapiens
  misc_RNA (1)...(19): siRNA sense strand
cagcagaagugauccggga

SEQ ID NO: 2285092 - RNA, 19 nt, Homo sapiens
  misc_RNA (1)...(19): siRNA sense strand
gggaaaugugagacugguu

SEQ ID NO: 2285093 - RNA, 19 nt, Homo sapiens
  misc_RNA (1)...(19): siRNA sense strand
uaaguuuaauguugggaca

SEQ ID NO: 2285094 - RNA, 19 nt, Homo sapiens
  misc_RNA (1)...(19): siRNA sense strand
ccagcgaugaugaggacau

SEQ ID NO: 2285095 - RNA, 19 nt, Homo sapiens
  misc_RNA (1)...(19): siRNA sense strand
ggacaguucuucaggcuug

SEQ ID NO: 2285096 - RNA, 19 nt, Homo sapiens
  misc_RNA (1)...(19): siRNA sense strand
cggguauggucguugggau

SEQ ID NO: 2285097 - RNA, 19 nt, Homo sapiens
  misc_RNA (1)...(19): siRNA sense strand
caacaucgccauaguggga

SEQ ID NO: 2285098 - RNA, 19 nt, Homo sapiens
  misc_RNA (1)...(19): siRNA sense strand
uugaagaauccaaugcaau

SEQ ID NO: 2285099 - RNA, 19 nt, Homo sapiens
  misc_RNA (1)...(19): siRNA sense strand
cugcauauacaccagggaa

SEQ ID NO: 2285100 - RNA, 19 nt, Homo sapiens
  misc_RNA (1)...(19): siRNA sense strand
ucacaaucuucaauagcca

SEQ ID NO: 2285101 - RNA, 19 nt, Homo sapiens
  misc_RNA (1)...(19): siRNA sense strand
ccaauggggcuguuguaaa

SEQ ID NO: 2285102 - RNA, 19 nt, Homo sapiens
  misc_RNA (1)...(19): siRNA sense strand
ggccagugaucgagcgcua

SEQ ID NO: 2285103 - RNA, 19 nt, Homo sapiens
  misc_RNA (1)...(19): siRNA sense strand
gcucauaccauguggacga

SEQ ID NO: 2285104 - RNA, 19 nt, Homo sapiens
  misc_RNA (1)...(19): siRNA sense strand
ugcauauacaccagggaaa

SEQ ID NO: 2285105 - RNA, 19 nt, Homo sapiens
  misc_RNA (1)...(19): siRNA sense strand
ccauaauaauuggcgggaa

SEQ ID NO: 2285106 - RNA, 19 nt, Homo sapiens
  misc_RNA (1)...(19): siRNA sense strand
acaucgccauagugggaaa

SEQ ID NO: 2285107 - RNA, 19 nt, Homo sapiens
  misc_RNA (1)...(19): siRNA sense strand
gcauauacaccagggaaaa

SEQ ID NO: 2285108 - RNA, 19 nt, Homo sapiens
  misc_RNA (1)...(19): siRNA sense strand
cagcagaagugauccggga

SEQ ID NO: 2285109 - RNA, 19 nt, Homo sapiens
  misc_RNA (1)...(19): siRNA sense strand
gggaaaugugagacugguu

SEQ ID NO: 2285110 - RNA, 19 nt, Homo sapiens
  misc_RNA (1)...(19): siRNA sense strand
uaaguuuaauguugggaca

SEQ ID NO: 2285111 - RNA, 19 nt, Homo sapiens
  misc_RNA (1)...(19): siRNA sense strand
ccagcgaugaugaggacau

SEQ ID NO: 2285112 - RNA, 19 nt, Homo sapiens
  misc_RNA (1)...(19): siRNA sense strand
ggacaguucuucaggcuug

SEQ ID NO: 2285113 - RNA, 19 nt, Homo sapiens
  misc_RNA (1)...(19): siRNA sense strand
cggguauggucguugggau

SEQ ID NO: 2285114 - RNA, 19 nt, Homo sapiens
  misc_RNA (1)...(19): siRNA sense strand
caacaucgccauaguggga

SEQ ID NO: 2285115 - RNA, 19 nt, Homo sapiens
  misc_RNA (1)...(19): siRNA sense strand
uugaagaauccaaugcaau

SEQ ID NO: 2285116 - RNA, 19 nt, Homo sapiens
  misc_RNA (1)...(19): siRNA sense strand
cugcauauacaccagggaa

SEQ ID NO: 2285117 - RNA, 19 nt, Homo sapiens
  misc_RNA (1)...(19): siRNA sense strand
ucacaaucuucaauagcca

SEQ ID NO: 2285118 - RNA, 19 nt, Homo sapiens
  misc_RNA (1)...(19): siRNA sense strand
ccaauggggcuguuguaaa

SEQ ID NO: 2285119 - RNA, 19 nt, Homo sapiens
  misc_RNA (1)...(19): siRNA sense strand
agaaggaggaaguggacaa

SEQ ID NO: 2285120 - RNA, 19 nt, Homo sapiens
  misc_RNA (1)...(19): siRNA sense strand
ccaaagagcuggaguccga

SEQ ID NO: 2285121 - RNA, 19 nt, Homo sapiens
  misc_RNA (1)...(19): siRNA sense strand
cugccaaagaggagaagaa

SEQ ID NO: 2285122 - RNA, 19 nt, Homo sapiens
  misc_RNA (1)...(19): siRNA sense strand
aggagaagaagaagaagaa

SEQ ID NO: 2285123 - RNA, 19 nt, Homo sapiens
  misc_RNA (1)...(19): siRNA sense strand
aggaggagaaggagaagaa

SEQ ID NO: 2285124 - RNA, 19 nt, Homo sapiens
  misc_RNA (1)...(19): siRNA sense strand
gaggagaagaagaagaaaa

SEQ ID NO: 2285125 - RNA, 19 nt, Homo sapiens
  misc_RNA (1)...(19): siRNA sense strand
cugaggaggagaaggagaa

SEQ ID NO: 2285126 - RNA, 19 nt, Homo sapiens
  misc_RNA (1)...(19): siRNA sense strand
ccaagauugaugagcuuaa

SEQ ID NO: 2285127 - RNA, 19 nt, Homo sapiens
  misc_RNA (1)...(19): siRNA sense strand
ggagagugaagguggccaa

SEQ ID NO: 2285128 - RNA, 19 nt, Homo sapiens
  misc_RNA (1)...(19): siRNA sense strand
aguuugagcucacgggcaa

SEQ ID NO: 2285129 - RNA, 19 nt, Homo sapiens
  misc_RNA (1)...(19): siRNA sense strand
ggggagaaguccagugaca

SEQ ID NO: 2285130 - RNA, 19 nt, Homo sapiens
  misc_RNA (1)...(19): siRNA sense strand
gcaugagggagcuggaaaa

SEQ ID NO: 2285131 - RNA, 19 nt, Homo sapiens
  misc_RNA (1)...(19): siRNA sense strand
aaggagaagaagaagaaga

SEQ ID NO: 2285132 - RNA, 19 nt, Homo sapiens
  misc_RNA (1)...(19): siRNA sense strand
acgagaacggucagaggaa

SEQ ID NO: 2285133 - RNA, 19 nt, Homo sapiens
  misc_RNA (1)...(19): siRNA sense strand
ccaagaucgaccuggagaa

SEQ ID NO: 2285134 - RNA, 19 nt, Homo sapiens
  misc_RNA (1)...(19): siRNA sense strand
cagaggaggaggagccaga

SEQ ID NO: 2285135 - RNA, 19 nt, Homo sapiens
  misc_RNA (1)...(19): siRNA sense strand
aagaagaagaagaagggca

SEQ ID NO: 2285136 - RNA, 19 nt, Homo sapiens
  misc_RNA (1)...(19): siRNA sense strand
gccaaagaggagaagaaga

SEQ ID NO: 2285137 - RNA, 19 nt, Homo sapiens
  misc_RNA (1)...(19): siRNA sense strand
ggaauugacuuggaggaga

SEQ ID NO: 2285138 - RNA, 19 nt, Homo sapiens
  misc_RNA (1)...(19): siRNA sense strand
acacagaugagguggucuu

SEQ ID NO: 2285139 - RNA, 19 nt, Homo sapiens
  misc_RNA (1)...(19): siRNA sense strand
gcucuauggugaagcucau

SEQ ID NO: 2285140 - RNA, 19 nt, Homo sapiens
  misc_RNA (1)...(19): siRNA sense strand
ggaugaugagcaacaacaa

SEQ ID NO: 2285141 - RNA, 19 nt, Homo sapiens
  misc_RNA (1)...(19): siRNA sense strand
cugacaaggaccagggcca

SEQ ID NO: 2285142 - RNA, 19 nt, Homo sapiens
  misc_RNA (1)...(19): siRNA sense strand
gcugaggaggagaaggaga

SEQ ID NO: 2285143 - RNA, 19 nt, Homo sapiens
  misc_RNA (1)...(19): siRNA sense strand
cugcugacaucaacggcaa

SEQ ID NO: 2285144 - RNA, 19 nt, Homo sapiens
  misc_RNA (1)...(19): siRNA sense strand
uggcugaggaggagaagga

SEQ ID NO: 2285145 - RNA, 19 nt, Homo sapiens
  misc_RNA (1)...(19): siRNA sense strand
aggacaagcaggacacaga

SEQ ID NO: 2285146 - RNA, 19 nt, Homo sapiens
  misc_RNA (1)...(19): siRNA sense strand
uggaggagaaggaggaagu

SEQ ID NO: 2285147 - RNA, 19 nt, Homo sapiens
  misc_RNA (1)...(19): siRNA sense strand
aaagaggagaagaagaaga

SEQ ID NO: 2285148 - RNA, 19 nt, Homo sapiens
  misc_RNA (1)...(19): siRNA sense strand
ugacagcagaggaggcaga

SEQ ID NO: 2285149 - RNA, 19 nt, Homo sapiens
  misc_RNA (1)...(19): siRNA sense strand
gcgccaaggucaagacgcu

SEQ ID NO: 2285150 - RNA, 19 nt, Homo sapiens
  misc_RNA (1)...(19): siRNA sense strand
ccgagaagaagaaacccaa

SEQ ID NO: 2285151 - RNA, 19 nt, Homo sapiens
  misc_RNA (1)...(19): siRNA sense strand
gcuggacagugcaggccaa

SEQ ID NO: 2285152 - RNA, 19 nt, Homo sapiens
  misc_RNA (1)...(19): siRNA sense strand
ccaucauugucauugaaau

SEQ ID NO: 2285153 - RNA, 19 nt, Homo sapiens
  misc_RNA (1)...(19): siRNA sense strand
caucauugucauugaaauc

SEQ ID NO: 2285154 - RNA, 19 nt, Homo sapiens
  misc_RNA (1)...(19): siRNA sense strand
acccaagauugaugagcuu

SEQ ID NO: 2285155 - RNA, 19 nt, Homo sapiens
  misc_RNA (1)...(19): siRNA sense strand
acaacaagcgugucgccua

SEQ ID NO: 2285156 - RNA, 19 nt, Homo sapiens
  misc_RNA (1)...(19): siRNA sense strand
agggccagcaggaggacaa

SEQ ID NO: 2285157 - RNA, 19 nt, Homo sapiens
  misc_RNA (1)...(19): siRNA sense strand
ucaaugaagggcaaggaga

SEQ ID NO: 2285158 - RNA, 19 nt, Homo sapiens
  misc_RNA (1)...(19): siRNA sense strand
gggcugccaaagaggagaa

SEQ ID NO: 2285159 - RNA, 19 nt, Homo sapiens
  misc_RNA (1)...(19): siRNA sense strand
cggcuaggcaagacugaca

SEQ ID NO: 2285160 - RNA, 19 nt, Homo sapiens
  misc_RNA (1)...(19): siRNA sense strand
agacgaggccgcugcucaa

SEQ ID NO: 2285161 - RNA, 19 nt, Homo sapiens
  misc_RNA (1)...(19): siRNA sense strand
gcgacaaggagaacuacau

SEQ ID NO: 2285162 - RNA, 19 nt, Homo sapiens
  misc_RNA (1)...(19): siRNA sense strand
gcaaagacggcaaagugga

SEQ ID NO: 2285163 - RNA, 19 nt, Homo sapiens
  misc_RNA (1)...(19): siRNA sense strand
aagcugaggcugugccaga

SEQ ID NO: 2285164 - RNA, 19 nt, Homo sapiens
  misc_RNA (1)...(19): siRNA sense strand
ucgaguacuaccagaucua

SEQ ID NO: 2285165 - RNA, 19 nt, Homo sapiens
  misc_RNA (1)...(19): siRNA sense strand
aggagaaggaggaagugga

SEQ ID NO: 2285166 - RNA, 19 nt, Homo sapiens
  misc_RNA (1)...(19): siRNA sense strand
agaagaagaagaagggcac

SEQ ID NO: 2285167 - RNA, 19 nt, Homo sapiens
  misc_RNA (1)...(19): siRNA sense strand
cggagaaguccuacccuga

SEQ ID NO: 2285168 - RNA, 19 nt, Homo sapiens
  misc_RNA (1)...(19): siRNA sense strand
auugaugagcuuaagguau

SEQ ID NO: 2285169 - RNA, 19 nt, Homo sapiens
  misc_RNA (1)...(19): siRNA sense strand
aagcagugcaccauggaga

SEQ ID NO: 2285170 - RNA, 19 nt, Homo sapiens
  misc_RNA (1)...(19): siRNA sense strand
cgggacaagcugaggcugu

SEQ ID NO: 2285171 - RNA, 19 nt, Homo sapiens
  misc_RNA (1)...(19): siRNA sense strand
aggacugcgccaaggucaa

SEQ ID NO: 2285172 - RNA, 19 nt, Homo sapiens
  misc_RNA (1)...(19): siRNA sense strand
uggauguggcugaggagga

SEQ ID NO: 2285173 - RNA, 19 nt, Homo sapiens
  misc_RNA (1)...(19): siRNA sense strand
agaaggaggaaguggacaa

SEQ ID NO: 2285174 - RNA, 19 nt, Homo sapiens
  misc_RNA (1)...(19): siRNA sense strand
ccaaagagcuggaguccga

SEQ ID NO: 2285175 - RNA, 19 nt, Homo sapiens
  misc_RNA (1)...(19): siRNA sense strand
cugccaaagaggagaagaa

SEQ ID NO: 2285176 - RNA, 19 nt, Homo sapiens
  misc_RNA (1)...(19): siRNA sense strand
aggagaagaagaagaagaa

SEQ ID NO: 2285177 - RNA, 19 nt, Homo sapiens
  misc_RNA (1)...(19): siRNA sense strand
aggaggagaaggagaagaa

SEQ ID NO: 2285178 - RNA, 19 nt, Homo sapiens
  misc_RNA (1)...(19): siRNA sense strand
gaggagaagaagaagaaaa

SEQ ID NO: 2285179 - RNA, 19 nt, Homo sapiens
  misc_RNA (1)...(19): siRNA sense strand
cugaggaggagaaggagaa

SEQ ID NO: 2285180 - RNA, 19 nt, Homo sapiens
  misc_RNA (1)...(19): siRNA sense strand
ccaagauugaugagcuuaa

SEQ ID NO: 2285181 - RNA, 19 nt, Homo sapiens
  misc_RNA (1)...(19): siRNA sense strand
ggagagugaagguggccaa

SEQ ID NO: 2285182 - RNA, 19 nt, Homo sapiens
  misc_RNA (1)...(19): siRNA sense strand
gaagaaggccugaacgaca

SEQ ID NO: 2285183 - RNA, 19 nt, Homo sapiens
  misc_RNA (1)...(19): siRNA sense strand
aguuugagcucacgggcaa

SEQ ID NO: 2285184 - RNA, 19 nt, Homo sapiens
  misc_RNA (1)...(19): siRNA sense strand
ggggagaaguccagugaca

SEQ ID NO: 2285185 - RNA, 19 nt, Homo sapiens
  misc_RNA (1)...(19): siRNA sense strand
gcaugagggagcuggaaaa

SEQ ID NO: 2285186 - RNA, 19 nt, Homo sapiens
  misc_RNA (1)...(19): siRNA sense strand
aaggagaagaagaagaaga

SEQ ID NO: 2285187 - RNA, 19 nt, Homo sapiens
  misc_RNA (1)...(19): siRNA sense strand
acgagaacggucagaggaa

SEQ ID NO: 2285188 - RNA, 19 nt, Homo sapiens
  misc_RNA (1)...(19): siRNA sense strand
acauacaggagaugaucaa

SEQ ID NO: 2285189 - RNA, 19 nt, Homo sapiens
  misc_RNA (1)...(19): siRNA sense strand
ccaagaucgaccuggagaa

SEQ ID NO: 2285190 - RNA, 19 nt, Homo sapiens
  misc_RNA (1)...(19): siRNA sense strand
cagaggaggaggagccaga

SEQ ID NO: 2285191 - RNA, 19 nt, Homo sapiens
  misc_RNA (1)...(19): siRNA sense strand
aagaagaagaagaagggca

SEQ ID NO: 2285192 - RNA, 19 nt, Homo sapiens
  misc_RNA (1)...(19): siRNA sense strand
gccaaagaggagaagaaga

SEQ ID NO: 2285193 - RNA, 19 nt, Homo sapiens
  misc_RNA (1)...(19): siRNA sense strand
ggaauugacuuggaggaga

SEQ ID NO: 2285194 - RNA, 19 nt, Homo sapiens
  misc_RNA (1)...(19): siRNA sense strand
acacagaugagguggucuu

SEQ ID NO: 2285195 - RNA, 19 nt, Homo sapiens
  misc_RNA (1)...(19): siRNA sense strand
gcucuauggugaagcucau

SEQ ID NO: 2285196 - RNA, 19 nt, Homo sapiens
  misc_RNA (1)...(19): siRNA sense strand
ggaugaugagcaacaacaa

SEQ ID NO: 2285197 - RNA, 19 nt, Homo sapiens
  misc_RNA (1)...(19): siRNA sense strand
cugacaaggaccagggcca

SEQ ID NO: 2285198 - RNA, 19 nt, Homo sapiens
  misc_RNA (1)...(19): siRNA sense strand
gcugaggaggagaaggaga

SEQ ID NO: 2285199 - RNA, 19 nt, Homo sapiens
  misc_RNA (1)...(19): siRNA sense strand
cugcugacaucaacggcaa

SEQ ID NO: 2285200 - RNA, 19 nt, Homo sapiens
  misc_RNA (1)...(19): siRNA sense strand
uggcugaggaggagaagga

SEQ ID NO: 2285201 - RNA, 19 nt, Homo sapiens
  misc_RNA (1)...(19): siRNA sense strand
aggacaagcaggacacaga

SEQ ID NO: 2285202 - RNA, 19 nt, Homo sapiens
  misc_RNA (1)...(19): siRNA sense strand
uggaggagaaggaggaagu

SEQ ID NO: 2285203 - RNA, 19 nt, Homo sapiens
  misc_RNA (1)...(19): siRNA sense strand
aaagaggagaagaagaaga

SEQ ID NO: 2285204 - RNA, 19 nt, Homo sapiens
  misc_RNA (1)...(19): siRNA sense strand
ugacagcagaggaggcaga

SEQ ID NO: 2285205 - RNA, 19 nt, Homo sapiens
  misc_RNA (1)...(19): siRNA sense strand
gcgccaaggucaagacgcu

SEQ ID NO: 2285206 - RNA, 19 nt, Homo sapiens
  misc_RNA (1)...(19): siRNA sense strand
ccgagaagaagaaacccaa

SEQ ID NO: 2285207 - RNA, 19 nt, Homo sapiens
  misc_RNA (1)...(19): siRNA sense strand
gcuggacagugcaggccaa

SEQ ID NO: 2285208 - RNA, 19 nt, Homo sapiens
  misc_RNA (1)...(19): siRNA sense strand
ccaucauugucauugaaau

SEQ ID NO: 2285209 - RNA, 19 nt, Homo sapiens
  misc_RNA (1)...(19): siRNA sense strand
caucauugucauugaaauc

SEQ ID NO: 2285210 - RNA, 19 nt, Homo sapiens
  misc_RNA (1)...(19): siRNA sense strand
acccaagauugaugagcuu

SEQ ID NO: 2285211 - RNA, 19 nt, Homo sapiens
  misc_RNA (1)...(19): siRNA sense strand
acaacaagcgugucgccua

SEQ ID NO: 2285212 - RNA, 19 nt, Homo sapiens
  misc_RNA (1)...(19): siRNA sense strand
agggccagcaggaggacaa

SEQ ID NO: 2285213 - RNA, 19 nt, Homo sapiens
  misc_RNA (1)...(19): siRNA sense strand
ucaaugaagggcaaggaga

SEQ ID NO: 2285214 - RNA, 19 nt, Homo sapiens
  misc_RNA (1)...(19): siRNA sense strand
gggcugccaaagaggagaa

SEQ ID NO: 2285215 - RNA, 19 nt, Homo sapiens
  misc_RNA (1)...(19): siRNA sense strand
cggcuaggcaagacugaca

SEQ ID NO: 2285216 - RNA, 19 nt, Homo sapiens
  misc_RNA (1)...(19): siRNA sense strand
agacgaggccgcugcucaa

SEQ ID NO: 2285217 - RNA, 19 nt, Homo sapiens
  misc_RNA (1)...(19): siRNA sense strand
gcgacaaggagaacuacau

SEQ ID NO: 2285218 - RNA, 19 nt, Homo sapiens
  misc_RNA (1)...(19): siRNA sense strand
gcaaagacggcaaagugga

SEQ ID NO: 2285219 - RNA, 19 nt, Homo sapiens
  misc_RNA (1)...(19): siRNA sense strand
aagcugaggcugugccaga

SEQ ID NO: 2285220 - RNA, 19 nt, Homo sapiens
  misc_RNA (1)...(19): siRNA sense strand
ucgaguacuaccagaucua

SEQ ID NO: 2285221 - RNA, 19 nt, Homo sapiens
  misc_RNA (1)...(19): siRNA sense strand
aggagaaggaggaagugga

SEQ ID NO: 2285222 - RNA, 19 nt, Homo sapiens
  misc_RNA (1)...(19): siRNA sense strand
agaagaagaagaagggcac

SEQ ID NO: 2285223 - RNA, 19 nt, Homo sapiens
  misc_RNA (1)...(19): siRNA sense strand
auugaugagcuuaagguau

SEQ ID NO: 2285224 - RNA, 19 nt, Homo sapiens
  misc_RNA (1)...(19): siRNA sense strand
cggagaaguccuacccuga

SEQ ID NO: 2285225 - RNA, 19 nt, Homo sapiens
  misc_RNA (1)...(19): siRNA sense strand
aagcagugcaccauggaga

SEQ ID NO: 2285226 - RNA, 19 nt, Homo sapiens
  misc_RNA (1)...(19): siRNA sense strand
cgggacaagcugaggcugu

SEQ ID NO: 2285227 - RNA, 19 nt, Homo sapiens
  misc_RNA (1)...(19): siRNA sense strand
aggacugcgccaaggucaa

SEQ ID NO: 2285228 - RNA, 19 nt, Homo sapiens
  misc_RNA (1)...(19): siRNA sense strand
acgacauacaggagaugau

SEQ ID NO: 2285229 - RNA, 19 nt, Homo sapiens
  misc_RNA (1)...(19): siRNA sense strand
uggauguggcugaggagga

SEQ ID NO: 2285230 - RNA, 19 nt, Homo sapiens
  misc_RNA (1)...(19): siRNA sense strand
agaaggaggaaguggacaa

SEQ ID NO: 2285231 - RNA, 19 nt, Homo sapiens
  misc_RNA (1)...(19): siRNA sense strand
ccaaagagcuggaguccga

SEQ ID NO: 2285232 - RNA, 19 nt, Homo sapiens
  misc_RNA (1)...(19): siRNA sense strand
cugccaaagaggagaagaa

SEQ ID NO: 2285233 - RNA, 19 nt, Homo sapiens
  misc_RNA (1)...(19): siRNA sense strand
aggagaagaagaagaagaa

SEQ ID NO: 2285234 - RNA, 19 nt, Homo sapiens
  misc_RNA (1)...(19): siRNA sense strand
aggaggagaaggagaagaa

SEQ ID NO: 2285235 - RNA, 19 nt, Homo sapiens
  misc_RNA (1)...(19): siRNA sense strand
gaggagaagaagaagaaaa

SEQ ID NO: 2285236 - RNA, 19 nt, Homo sapiens
  misc_RNA (1)...(19): siRNA sense strand
cugaggaggagaaggagaa

SEQ ID NO: 2285237 - RNA, 19 nt, Homo sapiens
  misc_RNA (1)...(19): siRNA sense strand
ccaagauugaugagcuuaa

SEQ ID NO: 2285238 - RNA, 19 nt, Homo sapiens
  misc_RNA (1)...(19): siRNA sense strand
ggagagugaagguggccaa

SEQ ID NO: 2285239 - RNA, 19 nt, Homo sapiens
  misc_RNA (1)...(19): siRNA sense strand
gaagaaggccugaacgaca

SEQ ID NO: 2285240 - RNA, 19 nt, Homo sapiens
  misc_RNA (1)...(19): siRNA sense strand
aguuugagcucacgggcaa

SEQ ID NO: 2285241 - RNA, 19 nt, Homo sapiens
  misc_RNA (1)...(19): siRNA sense strand
ggggagaaguccagugaca

SEQ ID NO: 2285242 - RNA, 19 nt, Homo sapiens
  misc_RNA (1)...(19): siRNA sense strand
gcaugagggagcuggaaaa

SEQ ID NO: 2285243 - RNA, 19 nt, Homo sapiens
  misc_RNA (1)...(19): siRNA sense strand
aaggagaagaagaagaaga

SEQ ID NO: 2285244 - RNA, 19 nt, Homo sapiens
  misc_RNA (1)...(19): siRNA sense strand
acgagaacggucagaggaa

SEQ ID NO: 2285245 - RNA, 19 nt, Homo sapiens
  misc_RNA (1)...(19): siRNA sense strand
acauacaggagaugaucaa

SEQ ID NO: 2285246 - RNA, 19 nt, Homo sapiens
  misc_RNA (1)...(19): siRNA sense strand
ccaagaucgaccuggagaa

SEQ ID NO: 2285247 - RNA, 19 nt, Homo sapiens
  misc_RNA (1)...(19): siRNA sense strand
cagaggaggaggagccaga

SEQ ID NO: 2285248 - RNA, 19 nt, Homo sapiens
  misc_RNA (1)...(19): siRNA sense strand
aagaagaagaagaagggca

SEQ ID NO: 2285249 - RNA, 19 nt, Homo sapiens
  misc_RNA (1)...(19): siRNA sense strand
gccaaagaggagaagaaga

SEQ ID NO: 2285250 - RNA, 19 nt, Homo sapiens
  misc_RNA (1)...(19): siRNA sense strand
ggaauugacuuggaggaga

SEQ ID NO: 2285251 - RNA, 19 nt, Homo sapiens
  misc_RNA (1)...(19): siRNA sense strand
acacagaugagguggucuu

SEQ ID NO: 2285252 - RNA, 19 nt, Homo sapiens
  misc_RNA (1)...(19): siRNA sense strand
gcucuauggugaagcucau

SEQ ID NO: 2285253 - RNA, 19 nt, Homo sapiens
  misc_RNA (1)...(19): siRNA sense strand
ggaugaugagcaacaacaa

SEQ ID NO: 2285254 - RNA, 19 nt, Homo sapiens
  misc_RNA (1)...(19): siRNA sense strand
cugacaaggaccagggcca

SEQ ID NO: 2285255 - RNA, 19 nt, Homo sapiens
  misc_RNA (1)...(19): siRNA sense strand
gcugaggaggagaaggaga

SEQ ID NO: 2285256 - RNA, 19 nt, Homo sapiens
  misc_RNA (1)...(19): siRNA sense strand
cugcugacaucaacggcaa

SEQ ID NO: 2285257 - RNA, 19 nt, Homo sapiens
  misc_RNA (1)...(19): siRNA sense strand
uggcugaggaggagaagga

SEQ ID NO: 2285258 - RNA, 19 nt, Homo sapiens
  misc_RNA (1)...(19): siRNA sense strand
aggacaagcaggacacaga

SEQ ID NO: 2285259 - RNA, 19 nt, Homo sapiens
  misc_RNA (1)...(19): siRNA sense strand
uggaggagaaggaggaagu

SEQ ID NO: 2285260 - RNA, 19 nt, Homo sapiens
  misc_RNA (1)...(19): siRNA sense strand
aaagaggagaagaagaaga

SEQ ID NO: 2285261 - RNA, 19 nt, Homo sapiens
  misc_RNA (1)...(19): siRNA sense strand
ugacagcagaggaggcaga

SEQ ID NO: 2285262 - RNA, 19 nt, Homo sapiens
  misc_RNA (1)...(19): siRNA sense strand
gcgccaaggucaagacgcu

SEQ ID NO: 2285263 - RNA, 19 nt, Homo sapiens
  misc_RNA (1)...(19): siRNA sense strand
ccgagaagaagaaacccaa

SEQ ID NO: 2285264 - RNA, 19 nt, Homo sapiens
  misc_RNA (1)...(19): siRNA sense strand
gcuggacagugcaggccaa

SEQ ID NO: 2285265 - RNA, 19 nt, Homo sapiens
  misc_RNA (1)...(19): siRNA sense strand
ccaucauugucauugaaau

SEQ ID NO: 2285266 - RNA, 19 nt, Homo sapiens
  misc_RNA (1)...(19): siRNA sense strand
caucauugucauugaaauc

SEQ ID NO: 2285267 - RNA, 19 nt, Homo sapiens
  misc_RNA (1)...(19): siRNA sense strand
acccaagauugaugagcuu

SEQ ID NO: 2285268 - RNA, 19 nt, Homo sapiens
  misc_RNA (1)...(19): siRNA sense strand
acaacaagcgugucgccua

SEQ ID NO: 2285269 - RNA, 19 nt, Homo sapiens
  misc_RNA (1)...(19): siRNA sense strand
agggccagcaggaggacaa

SEQ ID NO: 2285270 - RNA, 19 nt, Homo sapiens
  misc_RNA (1)...(19): siRNA sense strand
ucaaugaagggcaaggaga

SEQ ID NO: 2285271 - RNA, 19 nt, Homo sapiens
  misc_RNA (1)...(19): siRNA sense strand
gggcugccaaagaggagaa

SEQ ID NO: 2285272 - RNA, 19 nt, Homo sapiens
  misc_RNA (1)...(19): siRNA sense strand
cggcuaggcaagacugaca

SEQ ID NO: 2285273 - RNA, 19 nt, Homo sapiens
  misc_RNA (1)...(19): siRNA sense strand
agacgaggccgcugcucaa

SEQ ID NO: 2285274 - RNA, 19 nt, Homo sapiens
  misc_RNA (1)...(19): siRNA sense strand
gcgacaaggagaacuacau

SEQ ID NO: 2285275 - RNA, 19 nt, Homo sapiens
  misc_RNA (1)...(19): siRNA sense strand
gcaaagacggcaaagugga

SEQ ID NO: 2285276 - RNA, 19 nt, Homo sapiens
  misc_RNA (1)...(19): siRNA sense strand
aagcugaggcugugccaga

SEQ ID NO: 2285277 - RNA, 19 nt, Homo sapiens
  misc_RNA (1)...(19): siRNA sense strand
ucgaguacuaccagaucua

SEQ ID NO: 2285278 - RNA, 19 nt, Homo sapiens
  misc_RNA (1)...(19): siRNA sense strand
aggagaaggaggaagugga

SEQ ID NO: 2285279 - RNA, 19 nt, Homo sapiens
  misc_RNA (1)...(19): siRNA sense strand
agaagaagaagaagggcac

SEQ ID NO: 2285280 - RNA, 19 nt, Homo sapiens
  misc_RNA (1)...(19): siRNA sense strand
auugaugagcuuaagguau

SEQ ID NO: 2285281 - RNA, 19 nt, Homo sapiens
  misc_RNA (1)...(19): siRNA sense strand
cggagaaguccuacccuga

SEQ ID NO: 2285282 - RNA, 19 nt, Homo sapiens
  misc_RNA (1)...(19): siRNA sense strand
aagcagugcaccauggaga

SEQ ID NO: 2285283 - RNA, 19 nt, Homo sapiens
  misc_RNA (1)...(19): siRNA sense strand
cgggacaagcugaggcugu

SEQ ID NO: 2285284 - RNA, 19 nt, Homo sapiens
  misc_RNA (1)...(19): siRNA sense strand
aggacugcgccaaggucaa

SEQ ID NO: 2285285 - RNA, 19 nt, Homo sapiens
  misc_RNA (1)...(19): siRNA sense strand
acgacauacaggagaugau

SEQ ID NO: 2285286 - RNA, 19 nt, Homo sapiens
  misc_RNA (1)...(19): siRNA sense strand
uggauguggcugaggagga

SEQ ID NO: 2285287 - RNA, 19 nt, Homo sapiens
  misc_RNA (1)...(19): siRNA sense strand
agaaggaggaaguggacaa

SEQ ID NO: 2285288 - RNA, 19 nt, Homo sapiens
  misc_RNA (1)...(19): siRNA sense strand
ccaaagagcuggaguccga

SEQ ID NO: 2285289 - RNA, 19 nt, Homo sapiens
  misc_RNA (1)...(19): siRNA sense strand
cugccaaagaggagaagaa

SEQ ID NO: 2285290 - RNA, 19 nt, Homo sapiens
  misc_RNA (1)...(19): siRNA sense strand
aggagaagaagaagaagaa

SEQ ID NO: 2285291 - RNA, 19 nt, Homo sapiens
  misc_RNA (1)...(19): siRNA sense strand
aggaggagaaggagaagaa

SEQ ID NO: 2285292 - RNA, 19 nt, Homo sapiens
  misc_RNA (1)...(19): siRNA sense strand
gaggagaagaagaagaaaa

SEQ ID NO: 2285293 - RNA, 19 nt, Homo sapiens
  misc_RNA (1)...(19): siRNA sense strand
cugaggaggagaaggagaa

SEQ ID NO: 2285294 - RNA, 19 nt, Homo sapiens
  misc_RNA (1)...(19): siRNA sense strand
ccaagauugaugagcuuaa

SEQ ID NO: 2285295 - RNA, 19 nt, Homo sapiens
  misc_RNA (1)...(19): siRNA sense strand
ggagagugaagguggccaa

SEQ ID NO: 2285296 - RNA, 19 nt, Homo sapiens
  misc_RNA (1)...(19): siRNA sense strand
aguuugagcucacgggcaa

SEQ ID NO: 2285297 - RNA, 19 nt, Homo sapiens
  misc_RNA (1)...(19): siRNA sense strand
ggggagaaguccagugaca

SEQ ID NO: 2285298 - RNA, 19 nt, Homo sapiens
  misc_RNA (1)...(19): siRNA sense strand
gcaugagggagcuggaaaa

SEQ ID NO: 2285299 - RNA, 19 nt, Homo sapiens
  misc_RNA (1)...(19): siRNA sense strand
aaggagaagaagaagaaga

SEQ ID NO: 2285300 - RNA, 19 nt, Homo sapiens
  misc_RNA (1)...(19): siRNA sense strand
acgagaacggucagaggaa

SEQ ID NO: 2285301 - RNA, 19 nt, Homo sapiens
  misc_RNA (1)...(19): siRNA sense strand
ccaagaucgaccuggagaa

SEQ ID NO: 2285302 - RNA, 19 nt, Homo sapiens
  misc_RNA (1)...(19): siRNA sense strand
cagaggaggaggagccaga

SEQ ID NO: 2285303 - RNA, 19 nt, Homo sapiens
  misc_RNA (1)...(19): siRNA sense strand
aagaagaagaagaagggca

SEQ ID NO: 2285304 - RNA, 19 nt, Homo sapiens
  misc_RNA (1)...(19): siRNA sense strand
gccaaagaggagaagaaga

SEQ ID NO: 2285305 - RNA, 19 nt, Homo sapiens
  misc_RNA (1)...(19): siRNA sense strand
ggaauugacuuggaggaga

SEQ ID NO: 2285306 - RNA, 19 nt, Homo sapiens
  misc_RNA (1)...(19): siRNA sense strand
acacagaugagguggucuu

SEQ ID NO: 2285307 - RNA, 19 nt, Homo sapiens
  misc_RNA (1)...(19): siRNA sense strand
gcucuauggugaagcucau

SEQ ID NO: 2285308 - RNA, 19 nt, Homo sapiens
  misc_RNA (1)...(19): siRNA sense strand
ggaugaugagcaacaacaa

SEQ ID NO: 2285309 - RNA, 19 nt, Homo sapiens
  misc_RNA (1)...(19): siRNA sense strand
cugacaaggaccagggcca

SEQ ID NO: 2285310 - RNA, 19 nt, Homo sapiens
  misc_RNA (1)...(19): siRNA sense strand
gcugaggaggagaaggaga

SEQ ID NO: 2285311 - RNA, 19 nt, Homo sapiens
  misc_RNA (1)...(19): siRNA sense strand
cugcugacaucaacggcaa

SEQ ID NO: 2285312 - RNA, 19 nt, Homo sapiens
  misc_RNA (1)...(19): siRNA sense strand
uggcugaggaggagaagga

SEQ ID NO: 2285313 - RNA, 19 nt, Homo sapiens
  misc_RNA (1)...(19): siRNA sense strand
aggacaagcaggacacaga

SEQ ID NO: 2285314 - RNA, 19 nt, Homo sapiens
  misc_RNA (1)...(19): siRNA sense strand
uggaggagaaggaggaagu

SEQ ID NO: 2285315 - RNA, 19 nt, Homo sapiens
  misc_RNA (1)...(19): siRNA sense strand
aaagaggagaagaagaaga

SEQ ID NO: 2285316 - RNA, 19 nt, Homo sapiens
  misc_RNA (1)...(19): siRNA sense strand
ugacagcagaggaggcaga

SEQ ID NO: 2285317 - RNA, 19 nt, Homo sapiens
  misc_RNA (1)...(19): siRNA sense strand
gcgccaaggucaagacgcu

SEQ ID NO: 2285318 - RNA, 19 nt, Homo sapiens
  misc_RNA (1)...(19): siRNA sense strand
ccgagaagaagaaacccaa

SEQ ID NO: 2285319 - RNA, 19 nt, Homo sapiens
  misc_RNA (1)...(19): siRNA sense strand
gcuggacagugcaggccaa

SEQ ID NO: 2285320 - RNA, 19 nt, Homo sapiens
  misc_RNA (1)...(19): siRNA sense strand
ccaucauugucauugaaau

SEQ ID NO: 2285321 - RNA, 19 nt, Homo sapiens
  misc_RNA (1)...(19): siRNA sense strand
caucauugucauugaaauc

SEQ ID NO: 2285322 - RNA, 19 nt, Homo sapiens
  misc_RNA (1)...(19): siRNA sense strand
acccaagauugaugagcuu

SEQ ID NO: 2285323 - RNA, 19 nt, Homo sapiens
  misc_RNA (1)...(19): siRNA sense strand
acaacaagcgugucgccua

SEQ ID NO: 2285324 - RNA, 19 nt, Homo sapiens
  misc_RNA (1)...(19): siRNA sense strand
agggccagcaggaggacaa

SEQ ID NO: 2285325 - RNA, 19 nt, Homo sapiens
  misc_RNA (1)...(19): siRNA sense strand
ucaaugaagggcaaggaga

SEQ ID NO: 2285326 - RNA, 19 nt, Homo sapiens
  misc_RNA (1)...(19): siRNA sense strand
gggcugccaaagaggagaa

SEQ ID NO: 2285327 - RNA, 19 nt, Homo sapiens
  misc_RNA (1)...(19): siRNA sense strand
cggcuaggcaagacugaca

SEQ ID NO: 2285328 - RNA, 19 nt, Homo sapiens
  misc_RNA (1)...(19): siRNA sense strand
agacgaggccgcugcucaa

SEQ ID NO: 2285329 - RNA, 19 nt, Homo sapiens
  misc_RNA (1)...(19): siRNA sense strand
gcgacaaggagaacuacau

SEQ ID NO: 2285330 - RNA, 19 nt, Homo sapiens
  misc_RNA (1)...(19): siRNA sense strand
gcaaagacggcaaagugga

SEQ ID NO: 2285331 - RNA, 19 nt, Homo sapiens
  misc_RNA (1)...(19): siRNA sense strand
aagcugaggcugugccaga

SEQ ID NO: 2285332 - RNA, 19 nt, Homo sapiens
  misc_RNA (1)...(19): siRNA sense strand
ucgaguacuaccagaucua

SEQ ID NO: 2285333 - RNA, 19 nt, Homo sapiens
  misc_RNA (1)...(19): siRNA sense strand
aggagaaggaggaagugga

SEQ ID NO: 2285334 - RNA, 19 nt, Homo sapiens
  misc_RNA (1)...(19): siRNA sense strand
agaagaagaagaagggcac

SEQ ID NO: 2285335 - RNA, 19 nt, Homo sapiens
  misc_RNA (1)...(19): siRNA sense strand
cggagaaguccuacccuga

SEQ ID NO: 2285336 - RNA, 19 nt, Homo sapiens
  misc_RNA (1)...(19): siRNA sense strand
auugaugagcuuaagguau

SEQ ID NO: 2285337 - RNA, 19 nt, Homo sapiens
  misc_RNA (1)...(19): siRNA sense strand
aagcagugcaccauggaga

SEQ ID NO: 2285338 - RNA, 19 nt, Homo sapiens
  misc_RNA (1)...(19): siRNA sense strand
cgguacaaguggcucauca

SEQ ID NO: 2285339 - RNA, 19 nt, Homo sapiens
  misc_RNA (1)...(19): siRNA sense strand
cgggacaagcugaggcugu

SEQ ID NO: 2285340 - RNA, 19 nt, Homo sapiens
  misc_RNA (1)...(19): siRNA sense strand
aggacugcgccaaggucaa

SEQ ID NO: 2285341 - RNA, 19 nt, Homo sapiens
  misc_RNA (1)...(19): siRNA sense strand
uggauguggcugaggagga

SEQ ID NO: 2285342 - RNA, 19 nt, Homo sapiens
  misc_RNA (1)...(19): siRNA sense strand
agauaaggaauaaggucaa

SEQ ID NO: 2285343 - RNA, 19 nt, Homo sapiens
  misc_RNA (1)...(19): siRNA sense strand
ggaaggugaaggaggccaa

SEQ ID NO: 2285344 - RNA, 19 nt, Homo sapiens
  misc_RNA (1)...(19): siRNA sense strand
cuucaaaucugcuggacga

SEQ ID NO: 2285345 - RNA, 19 nt, Homo sapiens
  misc_RNA (1)...(19): siRNA sense strand
cagauaaggaauaagguca

SEQ ID NO: 2285346 - RNA, 19 nt, Homo sapiens
  misc_RNA (1)...(19): siRNA sense strand
aggaauaaggucaaggaca

SEQ ID NO: 2285347 - RNA, 19 nt, Homo sapiens
  misc_RNA (1)...(19): siRNA sense strand
cugagugguuaguggguga

SEQ ID NO: 2285348 - RNA, 19 nt, Homo sapiens
  misc_RNA (1)...(19): siRNA sense strand
ccucaaugacacagacaca

SEQ ID NO: 2285349 - RNA, 19 nt, Homo sapiens
  misc_RNA (1)...(19): siRNA sense strand
ugaugaaagggaaggugaa

SEQ ID NO: 2285350 - RNA, 19 nt, Homo sapiens
  misc_RNA (1)...(19): siRNA sense strand
guuucuggugggugggaua

SEQ ID NO: 2285351 - RNA, 19 nt, Homo sapiens
  misc_RNA (1)...(19): siRNA sense strand
cagcagauugggaggaagu

SEQ ID NO: 2285352 - RNA, 19 nt, Homo sapiens
  misc_RNA (1)...(19): siRNA sense strand
gcaugagguagcaggacau

SEQ ID NO: 2285353 - RNA, 19 nt, Homo sapiens
  misc_RNA (1)...(19): siRNA sense strand
gagcugaaauccaugacga

SEQ ID NO: 2285354 - RNA, 19 nt, Homo sapiens
  misc_RNA (1)...(19): siRNA sense strand
ggcugaugaugaaagggaa

SEQ ID NO: 2285355 - RNA, 19 nt, Homo sapiens
  misc_RNA (1)...(19): siRNA sense strand
acaugaagacuaaggaaac

SEQ ID NO: 2285356 - RNA, 19 nt, Homo sapiens
  misc_RNA (1)...(19): siRNA sense strand
auggagacgaagaaggaca

SEQ ID NO: 2285357 - RNA, 19 nt, Homo sapiens
  misc_RNA (1)...(19): siRNA sense strand
cgaagaaggacacugcaca

SEQ ID NO: 2285358 - RNA, 19 nt, Homo sapiens
  misc_RNA (1)...(19): siRNA sense strand
caucuucggcuuugggaca

SEQ ID NO: 2285359 - RNA, 19 nt, Homo sapiens
  misc_RNA (1)...(19): siRNA sense strand
ccgcgguggcugaugauga

SEQ ID NO: 2285360 - RNA, 19 nt, Homo sapiens
  misc_RNA (1)...(19): siRNA sense strand
agaaggaaacagaggccaa

SEQ ID NO: 2285361 - RNA, 19 nt, Homo sapiens
  misc_RNA (1)...(19): siRNA sense strand
aaacagaggccaagggaag

SEQ ID NO: 2285362 - RNA, 19 nt, Homo sapiens
  misc_RNA (1)...(19): siRNA sense strand
cggaagcaccugaaggaca

SEQ ID NO: 2285363 - RNA, 19 nt, Homo sapiens
  misc_RNA (1)...(19): siRNA sense strand
gaaacagaggccaagggaa

SEQ ID NO: 2285364 - RNA, 19 nt, Homo sapiens
  misc_RNA (1)...(19): siRNA sense strand
ggcugaaauaggugacuuu

SEQ ID NO: 2285365 - RNA, 19 nt, Homo sapiens
  misc_RNA (1)...(19): siRNA sense strand
ugugauaugggcugggaau

SEQ ID NO: 2285366 - RNA, 19 nt, Homo sapiens
  misc_RNA (1)...(19): siRNA sense strand
ggaggauggacgaggcgau

SEQ ID NO: 2285367 - RNA, 19 nt, Homo sapiens
  misc_RNA (1)...(19): siRNA sense strand
gugauaugggcugggaaua

SEQ ID NO: 2285368 - RNA, 19 nt, Homo sapiens
  misc_RNA (1)...(19): siRNA sense strand
gugcagaggacgaacagga

SEQ ID NO: 2285369 - RNA, 19 nt, Homo sapiens
  misc_RNA (1)...(19): siRNA sense strand
gguuugaagaugaggagcu

SEQ ID NO: 2285370 - RNA, 19 nt, Homo sapiens
  misc_RNA (1)...(19): siRNA sense strand
gaaugagagugcagaggac

SEQ ID NO: 2285371 - RNA, 19 nt, Homo sapiens
  misc_RNA (1)...(19): siRNA sense strand
ugaccgaguuccagcgcaa

SEQ ID NO: 2285372 - RNA, 19 nt, Homo sapiens
  misc_RNA (1)...(19): siRNA sense strand
ucgagagcgccaagaagaa

SEQ ID NO: 2285373 - RNA, 19 nt, Homo sapiens
  misc_RNA (1)...(19): siRNA sense strand
cguucaaccucaaguucau

SEQ ID NO: 2285374 - RNA, 19 nt, Homo sapiens
  misc_RNA (1)...(19): siRNA sense strand
cuacaggaguucauggacu

SEQ ID NO: 2285375 - RNA, 19 nt, Homo sapiens
  misc_RNA (1)...(19): siRNA sense strand
acuacgagaagaaguacua

SEQ ID NO: 2285376 - RNA, 19 nt, Homo sapiens
  misc_RNA (1)...(19): siRNA sense strand
cccacuacgagaagaagua

SEQ ID NO: 2285377 - RNA, 19 nt, Homo sapiens
  misc_RNA (1)...(19): siRNA sense strand
cgucuuugcauauguguga

SEQ ID NO: 2285378 - RNA, 19 nt, Homo sapiens
  misc_RNA (1)...(19): siRNA sense strand
acguagaagaugaugacaa

SEQ ID NO: 2285379 - RNA, 19 nt, Homo sapiens
  misc_RNA (1)...(19): siRNA sense strand
gagugaaccuggaagggau

SEQ ID NO: 2285380 - RNA, 19 nt, Homo sapiens
  misc_RNA (1)...(19): siRNA sense strand
ugguauaggagauggcaau

SEQ ID NO: 2285381 - RNA, 19 nt, Homo sapiens
  misc_RNA (1)...(19): siRNA sense strand
guucauaagaaguugagau

SEQ ID NO: 2285382 - RNA, 19 nt, Homo sapiens
  misc_RNA (1)...(19): siRNA sense strand
acuucagguuugagaccaa

SEQ ID NO: 2285383 - RNA, 19 nt, Homo sapiens
  misc_RNA (1)...(19): siRNA sense strand
ugcaauugaaccagauaaa

SEQ ID NO: 2285384 - RNA, 19 nt, Homo sapiens
  misc_RNA (1)...(19): siRNA sense strand
gugugaagaagaugguaga

SEQ ID NO: 2285385 - RNA, 19 nt, Homo sapiens
  misc_RNA (1)...(19): siRNA sense strand
ccagaaaauugguagaagu

SEQ ID NO: 2285386 - RNA, 19 nt, Homo sapiens
  misc_RNA (1)...(19): siRNA sense strand
gugcaauugaaccagauaa

SEQ ID NO: 2285387 - RNA, 19 nt, Homo sapiens
  misc_RNA (1)...(19): siRNA sense strand
agacuugagugaugccgaa

SEQ ID NO: 2285388 - RNA, 19 nt, Homo sapiens
  misc_RNA (1)...(19): siRNA sense strand
acaaugaggaggagacgga

SEQ ID NO: 2285389 - RNA, 19 nt, Homo sapiens
  misc_RNA (1)...(19): siRNA sense strand
cugauucccaggagauuaa

SEQ ID NO: 2285390 - RNA, 19 nt, Homo sapiens
  misc_RNA (1)...(19): siRNA sense strand
ggauagacggggacaauga

SEQ ID NO: 2285391 - RNA, 19 nt, Homo sapiens
  misc_RNA (1)...(19): siRNA sense strand
cuggcuaaaucgaaaggau

SEQ ID NO: 2285392 - RNA, 19 nt, Homo sapiens
  misc_RNA (1)...(19): siRNA sense strand
ugagaauuacguagaagau

SEQ ID NO: 2285393 - RNA, 19 nt, Homo sapiens
  misc_RNA (1)...(19): siRNA sense strand
gcccauagccacaugcaga

SEQ ID NO: 2285394 - RNA, 19 nt, Homo sapiens
  misc_RNA (1)...(19): siRNA sense strand
guuacaaagacuucagguu

SEQ ID NO: 2285395 - RNA, 19 nt, Homo sapiens
  misc_RNA (1)...(19): siRNA sense strand
gggacaaugaggaggagac

SEQ ID NO: 2285396 - RNA, 19 nt, Homo sapiens
  misc_RNA (1)...(19): siRNA sense strand
cgaagugcucaaggaguua

SEQ ID NO: 2285397 - RNA, 19 nt, Homo sapiens
  misc_RNA (1)...(19): siRNA sense strand
auucuuugccacaggguuu

SEQ ID NO: 2285398 - RNA, 19 nt, Homo sapiens
  misc_RNA (1)...(19): siRNA sense strand
augacuuuacagagaacaa

SEQ ID NO: 2285399 - RNA, 19 nt, Homo sapiens
  misc_RNA (1)...(19): siRNA sense strand
ugauggaugaagaggaagu

SEQ ID NO: 2285400 - RNA, 19 nt, Homo sapiens
  misc_RNA (1)...(19): siRNA sense strand
uaagaaguugagaucgaaa

SEQ ID NO: 2285401 - RNA, 19 nt, Homo sapiens
  misc_RNA (1)...(19): siRNA sense strand
ccgagagaucacuagaaga

SEQ ID NO: 2285402 - RNA, 19 nt, Homo sapiens
  misc_RNA (1)...(19): siRNA sense strand
aucgaaaggauuugaugua

SEQ ID NO: 2285403 - RNA, 19 nt, Homo sapiens
  misc_RNA (1)...(19): siRNA sense strand
ugacugagaugcaggccaa

SEQ ID NO: 2285404 - RNA, 19 nt, Homo sapiens
  misc_RNA (1)...(19): siRNA sense strand
cagugaagcccaagagcca

SEQ ID NO: 2285405 - RNA, 19 nt, Homo sapiens
  misc_RNA (1)...(19): siRNA sense strand
gcccaagagccaaaggaau

SEQ ID NO: 2285406 - RNA, 19 nt, Homo sapiens
  misc_RNA (1)...(19): siRNA sense strand
ccaauauccaggagcucaa

SEQ ID NO: 2285407 - RNA, 19 nt, Homo sapiens
  misc_RNA (1)...(19): siRNA sense strand
gcaagaagcacuuaccaga

SEQ ID NO: 2285408 - RNA, 19 nt, Homo sapiens
  misc_RNA (1)...(19): siRNA sense strand
gagaaggacaagaagccau

SEQ ID NO: 2285409 - RNA, 19 nt, Homo sapiens
  misc_RNA (1)...(19): siRNA sense strand
cagcauuccagaaaggaga

SEQ ID NO: 2285410 - RNA, 19 nt, Homo sapiens
  misc_RNA (1)...(19): siRNA sense strand
auuccagaaaggagacuaa

SEQ ID NO: 2285411 - RNA, 19 nt, Homo sapiens
  misc_RNA (1)...(19): siRNA sense strand
gguacaaguuccauccuga

SEQ ID NO: 2285412 - RNA, 19 nt, Homo sapiens
  misc_RNA (1)...(19): siRNA sense strand
gcuuucaugagaaggacaa

SEQ ID NO: 2285413 - RNA, 19 nt, Homo sapiens
  misc_RNA (1)...(19): siRNA sense strand
acacaguugucgaagggca

SEQ ID NO: 2285414 - RNA, 19 nt, Homo sapiens
  misc_RNA (1)...(19): siRNA sense strand
gcccaguguuggaaaacua

SEQ ID NO: 2285415 - RNA, 19 nt, Homo sapiens
  misc_RNA (1)...(19): siRNA sense strand
gcaaagaagagauuggcuc

SEQ ID NO: 2285416 - RNA, 19 nt, Homo sapiens
  misc_RNA (1)...(19): siRNA sense strand
acuaagaaugagaguaaga

SEQ ID NO: 2285417 - RNA, 19 nt, Homo sapiens
  misc_RNA (1)...(19): siRNA sense strand
agaaauaacaauggagcau

SEQ ID NO: 2285418 - RNA, 19 nt, Homo sapiens
  misc_RNA (1)...(19): siRNA sense strand
agaugguaguggugugaga

SEQ ID NO: 2285419 - RNA, 19 nt, Homo sapiens
  misc_RNA (1)...(19): siRNA sense strand
aggacaggucagaauaaua

SEQ ID NO: 2285420 - RNA, 19 nt, Homo sapiens
  misc_RNA (1)...(19): siRNA sense strand
aguguauacucgagugaca

SEQ ID NO: 2285421 - RNA, 19 nt, Homo sapiens
  misc_RNA (1)...(19): siRNA sense strand
ggguagugauccuggcagu

SEQ ID NO: 2285422 - RNA, 19 nt, Homo sapiens
  misc_RNA (1)...(19): siRNA sense strand
gaguggaagaauugaaucu

SEQ ID NO: 2285423 - RNA, 19 nt, Homo sapiens
  misc_RNA (1)...(19): siRNA sense strand
gagaauccuuggaggcacu

SEQ ID NO: 2285424 - RNA, 19 nt, Homo sapiens
  misc_RNA (1)...(19): siRNA sense strand
guuaaauucaccagcuaca

SEQ ID NO: 2285425 - RNA, 19 nt, Homo sapiens
  misc_RNA (1)...(19): siRNA sense strand
ccacauaguuauaauggag

SEQ ID NO: 2285426 - RNA, 19 nt, Homo sapiens
  misc_RNA (1)...(19): siRNA sense strand
cggauaagccaggagugua

SEQ ID NO: 2285427 - RNA, 19 nt, Homo sapiens
  misc_RNA (1)...(19): siRNA sense strand
uagaaauaacaauggagca

SEQ ID NO: 2285428 - RNA, 19 nt, Homo sapiens
  misc_RNA (1)...(19): siRNA sense strand
gcugaauaacucuggaaac

SEQ ID NO: 2285429 - RNA, 19 nt, Homo sapiens
  misc_RNA (1)...(19): siRNA sense strand
gcaagaugguaguggugug

SEQ ID NO: 2285430 - RNA, 19 nt, Homo sapiens
  misc_RNA (1)...(19): siRNA sense strand
gcaucaaugaaaagcagaa

SEQ ID NO: 2285431 - RNA, 19 nt, Homo sapiens
  misc_RNA (1)...(19): siRNA sense strand
acagagagacccaggcaca

SEQ ID NO: 2285432 - RNA, 19 nt, Homo sapiens
  misc_RNA (1)...(19): siRNA sense strand
guggagguguucauggaga

SEQ ID NO: 2285433 - RNA, 19 nt, Homo sapiens
  misc_RNA (1)...(19): siRNA sense strand
uggagugcguggagguguu

SEQ ID NO: 2285434 - RNA, 19 nt, Homo sapiens
  misc_RNA (1)...(19): siRNA sense strand
acagagagacccaggcaca

SEQ ID NO: 2285435 - RNA, 19 nt, Homo sapiens
  misc_RNA (1)...(19): siRNA sense strand
guggagguguucauggaga

SEQ ID NO: 2285436 - RNA, 19 nt, Homo sapiens
  misc_RNA (1)...(19): siRNA sense strand
uggagugcguggagguguu

SEQ ID NO: 2285437 - RNA, 19 nt, Homo sapiens
  misc_RNA (1)...(19): siRNA sense strand
ccaacuauguucugggcaa

SEQ ID NO: 2285438 - RNA, 19 nt, Homo sapiens
  misc_RNA (1)...(19): siRNA sense strand
gggacuacugugugcgaaa

SEQ ID NO: 2285439 - RNA, 19 nt, Homo sapiens
  misc_RNA (1)...(19): siRNA sense strand
cagcaaauguccaggccga

SEQ ID NO: 2285440 - RNA, 19 nt, Homo sapiens
  misc_RNA (1)...(19): siRNA sense strand
cauugagcuucuaggaaau

SEQ ID NO: 2285441 - RNA, 19 nt, Homo sapiens
  misc_RNA (1)...(19): siRNA sense strand
ccaccucaccagagaacaa

SEQ ID NO: 2285442 - RNA, 19 nt, Homo sapiens
  misc_RNA (1)...(19): siRNA sense strand
agaaauauuaugugcacga

SEQ ID NO: 2285443 - RNA, 19 nt, Homo sapiens
  misc_RNA (1)...(19): siRNA sense strand
ccuugaaauaggagcacau

SEQ ID NO: 2285444 - RNA, 19 nt, Homo sapiens
  misc_RNA (1)...(19): siRNA sense strand
cccuuaagguucaugaaaa

SEQ ID NO: 2285445 - RNA, 19 nt, Homo sapiens
  misc_RNA (1)...(19): siRNA sense strand
cagaaaaguuagccaagau

SEQ ID NO: 2285446 - RNA, 19 nt, Homo sapiens
  misc_RNA (1)...(19): siRNA sense strand
ggacuaaacuacagccgcu

SEQ ID NO: 2285447 - RNA, 19 nt, Homo sapiens
  misc_RNA (1)...(19): siRNA sense strand
ggagaaauauuaugugcac

SEQ ID NO: 2285448 - RNA, 19 nt, Homo sapiens
  misc_RNA (1)...(19): siRNA sense strand
gagaacaauuggacagccu

SEQ ID NO: 2285449 - RNA, 19 nt, Homo sapiens
  misc_RNA (1)...(19): siRNA sense strand
ggaccuugaaauaggagca

SEQ ID NO: 2285450 - RNA, 19 nt, Homo sapiens
  misc_RNA (1)...(19): siRNA sense strand
uagagaaagcauuuagcau

SEQ ID NO: 2285451 - RNA, 19 nt, Homo sapiens
  misc_RNA (1)...(19): siRNA sense strand
gguccugaacuuacgaaaa

SEQ ID NO: 2285452 - RNA, 19 nt, Homo sapiens
  misc_RNA (1)...(19): siRNA sense strand
uggacauacucuuggaaag

SEQ ID NO: 2285453 - RNA, 19 nt, Homo sapiens
  misc_RNA (1)...(19): siRNA sense strand
gcaucagucaguugcaaaa

SEQ ID NO: 2285454 - RNA, 19 nt, Homo sapiens
  misc_RNA (1)...(19): siRNA sense strand
uguucugggcaauguauua

SEQ ID NO: 2285455 - RNA, 19 nt, Homo sapiens
  misc_RNA (1)...(19): siRNA sense strand
ccuaaugccguuuggaacu

SEQ ID NO: 2285456 - RNA, 19 nt, Homo sapiens
  misc_RNA (1)...(19): siRNA sense strand
cgugagagcaagcggaaaa

SEQ ID NO: 2285457 - RNA, 19 nt, Homo sapiens
  misc_RNA (1)...(19): siRNA sense strand
ugauggacgugcuggccaa

SEQ ID NO: 2285458 - RNA, 19 nt, Homo sapiens
  misc_RNA (1)...(19): siRNA sense strand
gagaagaggauuaaaggac

SEQ ID NO: 2285459 - RNA, 19 nt, Homo sapiens
  misc_RNA (1)...(19): siRNA sense strand
ggagacgcacugagagcau

SEQ ID NO: 2285460 - RNA, 19 nt, Homo sapiens
  misc_RNA (1)...(19): siRNA sense strand
cggaguugcgcgagugcau

SEQ ID NO: 2285461 - RNA, 19 nt, Homo sapiens
  misc_RNA (1)...(19): siRNA sense strand
gaucaagacucugcgccua

SEQ ID NO: 2285462 - RNA, 19 nt, Homo sapiens
  misc_RNA (1)...(19): siRNA sense strand
aagaaggagcggagacgca

SEQ ID NO: 2285463 - RNA, 19 nt, Homo sapiens
  misc_RNA (1)...(19): siRNA sense strand
cggaaaggcucaggaccca

SEQ ID NO: 2285464 - RNA, 19 nt, Homo sapiens
  misc_RNA (1)...(19): siRNA sense strand
gcgacgagaacgaggacga

SEQ ID NO: 2285465 - RNA, 19 nt, Homo sapiens
  misc_RNA (1)...(19): siRNA sense strand
gcuacugcguggugagcga

SEQ ID NO: 2285466 - RNA, 19 nt, Homo sapiens
  misc_RNA (1)...(19): siRNA sense strand
gcaagaaguucgaagugac

SEQ ID NO: 2285467 - RNA, 19 nt, Homo sapiens
  misc_RNA (1)...(19): siRNA sense strand
gcaagugcaagaaggccua

SEQ ID NO: 2285468 - RNA, 19 nt, Homo sapiens
  misc_RNA (1)...(19): siRNA sense strand
acaucaucuccguguauaa

SEQ ID NO: 2285469 - RNA, 19 nt, Homo sapiens
  misc_RNA (1)...(19): siRNA sense strand
agaaguucgaagugaccua

SEQ ID NO: 2285470 - RNA, 19 nt, Homo sapiens
  misc_RNA (1)...(19): siRNA sense strand
gcaaguuccagcagcguga

SEQ ID NO: 2285471 - RNA, 19 nt, Homo sapiens
  misc_RNA (1)...(19): siRNA sense strand
aguaccugcugcugggcaa

SEQ ID NO: 2285472 - RNA, 19 nt, Homo sapiens
  misc_RNA (1)...(19): siRNA sense strand
gagaagaagggcaagugca

SEQ ID NO: 2285473 - RNA, 19 nt, Homo sapiens
  misc_RNA (1)...(19): siRNA sense strand
cugcaaccgcugcgccaaa

SEQ ID NO: 2285474 - RNA, 19 nt, Homo sapiens
  misc_RNA (1)...(19): siRNA sense strand
uggcaaaaccugcaaccaa

SEQ ID NO: 2285475 - RNA, 19 nt, Homo sapiens
  misc_RNA (1)...(19): siRNA sense strand
cacuaaauccagagguaau

SEQ ID NO: 2285476 - RNA, 19 nt, Homo sapiens
  misc_RNA (1)...(19): siRNA sense strand
cguuucagcgugaggcaaa

SEQ ID NO: 2285477 - RNA, 19 nt, Homo sapiens
  misc_RNA (1)...(19): siRNA sense strand
gaugacaggaaaagagaaa

SEQ ID NO: 2285478 - RNA, 19 nt, Homo sapiens
  misc_RNA (1)...(19): siRNA sense strand
caagauaaugggaggagca

SEQ ID NO: 2285479 - RNA, 19 nt, Homo sapiens
  misc_RNA (1)...(19): siRNA sense strand
aggaaaagagaaagcacua

SEQ ID NO: 2285480 - RNA, 19 nt, Homo sapiens
  misc_RNA (1)...(19): siRNA sense strand
acaugaagauggagcugga

SEQ ID NO: 2285481 - RNA, 19 nt, Homo sapiens
  misc_RNA (1)...(19): siRNA sense strand
auuaacagccaaugggaca

SEQ ID NO: 2285482 - RNA, 19 nt, Homo sapiens
  misc_RNA (1)...(19): siRNA sense strand
cuaaaauggcagaagcuau

SEQ ID NO: 2285483 - RNA, 19 nt, Homo sapiens
  misc_RNA (1)...(19): siRNA sense strand
aggaagugaugguucgcau

SEQ ID NO: 2285484 - RNA, 19 nt, Homo sapiens
  misc_RNA (1)...(19): siRNA sense strand
gugcaauccaguugugcuu

SEQ ID NO: 2285485 - RNA, 19 nt, Homo sapiens
  misc_RNA (1)...(19): siRNA sense strand
gggagugugaggugcugaa

SEQ ID NO: 2285486 - RNA, 19 nt, Homo sapiens
  misc_RNA (1)...(19): siRNA sense strand
ggaaauuuauugacgacag

SEQ ID NO: 2285487 - RNA, 19 nt, Homo sapiens
  misc_RNA (1)...(19): siRNA sense strand
ccauuauuguagcagucaa

SEQ ID NO: 2285488 - RNA, 19 nt, Homo sapiens
  misc_RNA (1)...(19): siRNA sense strand
cgauugcguuucagcguga

SEQ ID NO: 2285489 - RNA, 19 nt, Homo sapiens
  misc_RNA (1)...(19): siRNA sense strand
ugagagaaguccagagugc

SEQ ID NO: 2285490 - RNA, 19 nt, Homo sapiens
  misc_RNA (1)...(19): siRNA sense strand
uugacaagcgauugcguuu

SEQ ID NO: 2285491 - RNA, 19 nt, Homo sapiens
  misc_RNA (1)...(19): siRNA sense strand
cacuaaauccagagguaau

SEQ ID NO: 2285492 - RNA, 19 nt, Homo sapiens
  misc_RNA (1)...(19): siRNA sense strand
cguuucagcgugaggcaaa

SEQ ID NO: 2285493 - RNA, 19 nt, Homo sapiens
  misc_RNA (1)...(19): siRNA sense strand
gaugacaggaaaagagaaa

SEQ ID NO: 2285494 - RNA, 19 nt, Homo sapiens
  misc_RNA (1)...(19): siRNA sense strand
caagauaaugggaggagca

SEQ ID NO: 2285495 - RNA, 19 nt, Homo sapiens
  misc_RNA (1)...(19): siRNA sense strand
aggaaaagagaaagcacua

SEQ ID NO: 2285496 - RNA, 19 nt, Homo sapiens
  misc_RNA (1)...(19): siRNA sense strand
acaugaagauggagcugga

SEQ ID NO: 2285497 - RNA, 19 nt, Homo sapiens
  misc_RNA (1)...(19): siRNA sense strand
auuaacagccaaugggaca

SEQ ID NO: 2285498 - RNA, 19 nt, Homo sapiens
  misc_RNA (1)...(19): siRNA sense strand
cuaaaauggcagaagcuau

SEQ ID NO: 2285499 - RNA, 19 nt, Homo sapiens
  misc_RNA (1)...(19): siRNA sense strand
aggaagugaugguucgcau

SEQ ID NO: 2285500 - RNA, 19 nt, Homo sapiens
  misc_RNA (1)...(19): siRNA sense strand
gugcaauccaguugugcuu

SEQ ID NO: 2285501 - RNA, 19 nt, Homo sapiens
  misc_RNA (1)...(19): siRNA sense strand
gggagugugaggugcugaa

SEQ ID NO: 2285502 - RNA, 19 nt, Homo sapiens
  misc_RNA (1)...(19): siRNA sense strand
ggaaauuuauugacgacag

SEQ ID NO: 2285503 - RNA, 19 nt, Homo sapiens
  misc_RNA (1)...(19): siRNA sense strand
ccauuauuguagcagucaa

SEQ ID NO: 2285504 - RNA, 19 nt, Homo sapiens
  misc_RNA (1)...(19): siRNA sense strand
cgauugcguuucagcguga

SEQ ID NO: 2285505 - RNA, 19 nt, Homo sapiens
  misc_RNA (1)...(19): siRNA sense strand
ugagagaaguccagagugc

SEQ ID NO: 2285506 - RNA, 19 nt, Homo sapiens
  misc_RNA (1)...(19): siRNA sense strand
uugacaagcgauugcguuu

SEQ ID NO: 2285507 - RNA, 19 nt, Homo sapiens
  misc_RNA (1)...(19): siRNA sense strand
cacuaaauccagagguaau

SEQ ID NO: 2285508 - RNA, 19 nt, Homo sapiens
  misc_RNA (1)...(19): siRNA sense strand
cguuucagcgugaggcaaa

SEQ ID NO: 2285509 - RNA, 19 nt, Homo sapiens
  misc_RNA (1)...(19): siRNA sense strand
gaugacaggaaaagagaaa

SEQ ID NO: 2285510 - RNA, 19 nt, Homo sapiens
  misc_RNA (1)...(19): siRNA sense strand
caagauaaugggaggagca

SEQ ID NO: 2285511 - RNA, 19 nt, Homo sapiens
  misc_RNA (1)...(19): siRNA sense strand
aggaaaagagaaagcacua

SEQ ID NO: 2285512 - RNA, 19 nt, Homo sapiens
  misc_RNA (1)...(19): siRNA sense strand
acaugaagauggagcugga

SEQ ID NO: 2285513 - RNA, 19 nt, Homo sapiens
  misc_RNA (1)...(19): siRNA sense strand
auuaacagccaaugggaca

SEQ ID NO: 2285514 - RNA, 19 nt, Homo sapiens
  misc_RNA (1)...(19): siRNA sense strand
cuaaaauggcagaagcuau

SEQ ID NO: 2285515 - RNA, 19 nt, Homo sapiens
  misc_RNA (1)...(19): siRNA sense strand
aggaagugaugguucgcau

SEQ ID NO: 2285516 - RNA, 19 nt, Homo sapiens
  misc_RNA (1)...(19): siRNA sense strand
gugcaauccaguugugcuu

SEQ ID NO: 2285517 - RNA, 19 nt, Homo sapiens
  misc_RNA (1)...(19): siRNA sense strand
gggagugugaggugcugaa

SEQ ID NO: 2285518 - RNA, 19 nt, Homo sapiens
  misc_RNA (1)...(19): siRNA sense strand
ggaaauuuauugacgacag

SEQ ID NO: 2285519 - RNA, 19 nt, Homo sapiens
  misc_RNA (1)...(19): siRNA sense strand
ccauuauuguagcagucaa

SEQ ID NO: 2285520 - RNA, 19 nt, Homo sapiens
  misc_RNA (1)...(19): siRNA sense strand
cgauugcguuucagcguga

SEQ ID NO: 2285521 - RNA, 19 nt, Homo sapiens
  misc_RNA (1)...(19): siRNA sense strand
ugagagaaguccagagugc

SEQ ID NO: 2285522 - RNA, 19 nt, Homo sapiens
  misc_RNA (1)...(19): siRNA sense strand
uugacaagcgauugcguuu

SEQ ID NO: 2285523 - RNA, 19 nt, Homo sapiens
  misc_RNA (1)...(19): siRNA sense strand
acuuaaggaaugacagaaa

SEQ ID NO: 2285524 - RNA, 19 nt, Homo sapiens
  misc_RNA (1)...(19): siRNA sense strand
agcaagaacguuaggagaa

SEQ ID NO: 2285525 - RNA, 19 nt, Homo sapiens
  misc_RNA (1)...(19): siRNA sense strand
cagcaagaacguuaggaga

SEQ ID NO: 2285526 - RNA, 19 nt, Homo sapiens
  misc_RNA (1)...(19): siRNA sense strand
acauuguagugaagaaaga

SEQ ID NO: 2285527 - RNA, 19 nt, Homo sapiens
  misc_RNA (1)...(19): siRNA sense strand
accauaaggcuaacagaaa

SEQ ID NO: 2285528 - RNA, 19 nt, Homo sapiens
  misc_RNA (1)...(19): siRNA sense strand
cagaaagugccaucacaua

SEQ ID NO: 2285529 - RNA, 19 nt, Homo sapiens
  misc_RNA (1)...(19): siRNA sense strand
gguggaaagguuaugacaa

SEQ ID NO: 2285530 - RNA, 19 nt, Homo sapiens
  misc_RNA (1)...(19): siRNA sense strand
aguuugagguugaagcuau

SEQ ID NO: 2285531 - RNA, 19 nt, Homo sapiens
  misc_RNA (1)...(19): siRNA sense strand
aagagugaaaggugggcaa

SEQ ID NO: 2285532 - RNA, 19 nt, Homo sapiens
  misc_RNA (1)...(19): siRNA sense strand
caucacauacagagacauu

SEQ ID NO: 2285533 - RNA, 19 nt, Homo sapiens
  misc_RNA (1)...(19): siRNA sense strand
gcuaucaacuagaucgaca

SEQ ID NO: 2285534 - RNA, 19 nt, Homo sapiens
  misc_RNA (1)...(19): siRNA sense strand
gcacuucaccauaaggcua

SEQ ID NO: 2285535 - RNA, 19 nt, Homo sapiens
  misc_RNA (1)...(19): siRNA sense strand
ugacaaaagacaggauaaa

SEQ ID NO: 2285536 - RNA, 19 nt, Homo sapiens
  misc_RNA (1)...(19): siRNA sense strand
gggacaacagacaugcaua

SEQ ID NO: 2285537 - RNA, 19 nt, Homo sapiens
  misc_RNA (1)...(19): siRNA sense strand
gugaaaggugggcaaagaa

SEQ ID NO: 2285538 - RNA, 19 nt, Homo sapiens
  misc_RNA (1)...(19): siRNA sense strand
agacauuguagugaagaaa

SEQ ID NO: 2285539 - RNA, 19 nt, Homo sapiens
  misc_RNA (1)...(19): siRNA sense strand
guuugagguugaagcuauu

SEQ ID NO: 2285540 - RNA, 19 nt, Homo sapiens
  misc_RNA (1)...(19): siRNA sense strand
ggccaaugagagagagugu

SEQ ID NO: 2285541 - RNA, 19 nt, Homo sapiens
  misc_RNA (1)...(19): siRNA sense strand
gacacaaagaauauggaga

SEQ ID NO: 2285542 - RNA, 19 nt, Homo sapiens
  misc_RNA (1)...(19): siRNA sense strand
guuaugacaaacaggauga

SEQ ID NO: 2285543 - RNA, 19 nt, Homo sapiens
  misc_RNA (1)...(19): siRNA sense strand
ccaucaagaacuuugugaa

SEQ ID NO: 2285544 - RNA, 19 nt, Homo sapiens
  misc_RNA (1)...(19): siRNA sense strand
ugugaggugcugaggaaga

SEQ ID NO: 2285545 - RNA, 19 nt, Homo sapiens
  misc_RNA (1)...(19): siRNA sense strand
uucagaaacuugagaaacu

SEQ ID NO: 2285546 - RNA, 19 nt, Homo sapiens
  misc_RNA (1)...(19): siRNA sense strand
gauaaacaccacaggucca

SEQ ID NO: 2285547 - RNA, 19 nt, Homo sapiens
  misc_RNA (1)...(19): siRNA sense strand
ucaaggugacagaagggaa

SEQ ID NO: 2285548 - RNA, 19 nt, Homo sapiens
  misc_RNA (1)...(19): siRNA sense strand
agaacaagacucagaugca

SEQ ID NO: 2285549 - RNA, 19 nt, Homo sapiens
  misc_RNA (1)...(19): siRNA sense strand
ugguauuaauagacccauu

SEQ ID NO: 2285550 - RNA, 19 nt, Homo sapiens
  misc_RNA (1)...(19): siRNA sense strand
gccaaugggacaacagaca

SEQ ID NO: 2285551 - RNA, 19 nt, Homo sapiens
  misc_RNA (1)...(19): siRNA sense strand
uguuaauugcugggcgaaa

SEQ ID NO: 2285552 - RNA, 19 nt, Homo sapiens
  misc_RNA (1)...(19): siRNA sense strand
auauuaaguuggaguugga

SEQ ID NO: 2285553 - RNA, 19 nt, Homo sapiens
  misc_RNA (1)...(19): siRNA sense strand
guucagugcagcuggaagu

SEQ ID NO: 2285554 - RNA, 19 nt, Homo sapiens
  misc_RNA (1)...(19): siRNA sense strand
aacaaugccagaagaagaa

SEQ ID NO: 2285555 - RNA, 19 nt, Homo sapiens
  misc_RNA (1)...(19): siRNA sense strand
caggaugacacuugggaac

SEQ ID NO: 2285556 - RNA, 19 nt, Homo sapiens
  misc_RNA (1)...(19): siRNA sense strand
auacagaacaagacucaga

SEQ ID NO: 2285557 - RNA, 19 nt, Homo sapiens
  misc_RNA (1)...(19): siRNA sense strand
gauucaaauuaaggagcuu

SEQ ID NO: 2285558 - RNA, 19 nt, Homo sapiens
  misc_RNA (1)...(19): siRNA sense strand
ugcagaacagacuggaaua

SEQ ID NO: 2285559 - RNA, 19 nt, Homo sapiens
  misc_RNA (1)...(19): siRNA sense strand
uuaaggaaugacagaaaca

SEQ ID NO: 2285560 - RNA, 19 nt, Homo sapiens
  misc_RNA (1)...(19): siRNA sense strand
uuaaguuggaguuggaaca

SEQ ID NO: 2285561 - RNA, 19 nt, Homo sapiens
  misc_RNA (1)...(19): siRNA sense strand
gaucuggagcucagcccaa

SEQ ID NO: 2285562 - RNA, 19 nt, Homo sapiens
  misc_RNA (1)...(19): siRNA sense strand
cucaguuccaagagugaaa

SEQ ID NO: 2285563 - RNA, 19 nt, Homo sapiens
  misc_RNA (1)...(19): siRNA sense strand
aguaugaguuugaggucca

SEQ ID NO: 2285564 - RNA, 19 nt, Homo sapiens
  misc_RNA (1)...(19): siRNA sense strand
ggaaguggcugcuagacca

SEQ ID NO: 2285565 - RNA, 19 nt, Homo sapiens
  misc_RNA (1)...(19): siRNA sense strand
ugauggugauggucggcua

SEQ ID NO: 2285566 - RNA, 19 nt, Homo sapiens
  misc_RNA (1)...(19): siRNA sense strand
ugguggugguccugaguga

SEQ ID NO: 2285567 - RNA, 19 nt, Homo sapiens
  misc_RNA (1)...(19): siRNA sense strand
ugcgaaaggcugagugcau

SEQ ID NO: 2285568 - RNA, 19 nt, Homo sapiens
  misc_RNA (1)...(19): siRNA sense strand
ggguguucauggagcgagu

SEQ ID NO: 2285569 - RNA, 19 nt, Homo sapiens
  misc_RNA (1)...(19): siRNA sense strand
ucucagaggaagaggaggu

SEQ ID NO: 2285570 - RNA, 19 nt, Homo sapiens
  misc_RNA (1)...(19): siRNA sense strand
gcgacaagccacaggagcu

SEQ ID NO: 2285571 - RNA, 19 nt, Homo sapiens
  misc_RNA (1)...(19): siRNA sense strand
ucaaguacauccugggcca

SEQ ID NO: 2285572 - RNA, 19 nt, Homo sapiens
  misc_RNA (1)...(19): siRNA sense strand
cgacagacuacaugcagca

SEQ ID NO: 2285573 - RNA, 19 nt, Homo sapiens
  misc_RNA (1)...(19): siRNA sense strand
caggaugaggacagugaga

SEQ ID NO: 2285574 - RNA, 19 nt, Homo sapiens
  misc_RNA (1)...(19): siRNA sense strand
cggccaucggcgagcaaaa

SEQ ID NO: 2285575 - RNA, 19 nt, Homo sapiens
  misc_RNA (1)...(19): siRNA sense strand
aggaagaggagguggugcu

SEQ ID NO: 2285576 - RNA, 19 nt, Homo sapiens
  misc_RNA (1)...(19): siRNA sense strand
cagcauacaggguguucau

SEQ ID NO: 2285577 - RNA, 19 nt, Homo sapiens
  misc_RNA (1)...(19): siRNA sense strand
gagauggagggcagcgaca

SEQ ID NO: 2285578 - RNA, 19 nt, Homo sapiens
  misc_RNA (1)...(19): siRNA sense strand
ccagcaaagccaaggugca

SEQ ID NO: 2285579 - RNA, 19 nt, Homo sapiens
  misc_RNA (1)...(19): siRNA sense strand
gggugcagacgcuguggaa

SEQ ID NO: 2285580 - RNA, 19 nt, Homo sapiens
  misc_RNA (1)...(19): siRNA sense strand
ucgaaaaccaguugagaaa

SEQ ID NO: 2285581 - RNA, 19 nt, Homo sapiens
  misc_RNA (1)...(19): siRNA sense strand
ggugagaagaagaagaaga

SEQ ID NO: 2285582 - RNA, 19 nt, Homo sapiens
  misc_RNA (1)...(19): siRNA sense strand
gaagaagacuuuaaagcca

SEQ ID NO: 2285583 - RNA, 19 nt, Homo sapiens
  misc_RNA (1)...(19): siRNA sense strand
cgauauggauuuacggcuu

SEQ ID NO: 2285584 - RNA, 19 nt, Homo sapiens
  misc_RNA (1)...(19): siRNA sense strand
ccuucuacaaagagacaaa

SEQ ID NO: 2285585 - RNA, 19 nt, Homo sapiens
  misc_RNA (1)...(19): siRNA sense strand
gauugaagccaaaggcaga

SEQ ID NO: 2285586 - RNA, 19 nt, Homo sapiens
  misc_RNA (1)...(19): siRNA sense strand
uguuaggauugaagccaaa

SEQ ID NO: 2285587 - RNA, 19 nt, Homo sapiens
  misc_RNA (1)...(19): siRNA sense strand
cucaggaggccuugggaua

SEQ ID NO: 2285588 - RNA, 19 nt, Homo sapiens
  misc_RNA (1)...(19): siRNA sense strand
ggaagaaucacguggccuu

SEQ ID NO: 2285589 - RNA, 19 nt, Homo sapiens
  misc_RNA (1)...(19): siRNA sense strand
cuuuaaagccacagagauc

SEQ ID NO: 2285590 - RNA, 19 nt, Homo sapiens
  misc_RNA (1)...(19): siRNA sense strand
cauuaaacagagaagaaga

SEQ ID NO: 2285591 - RNA, 19 nt, Homo sapiens
  misc_RNA (1)...(19): siRNA sense strand
cccuuaugaugguggcuua

SEQ ID NO: 2285592 - RNA, 19 nt, Homo sapiens
  misc_RNA (1)...(19): siRNA sense strand
aagaguuaggucuggauaa

SEQ ID NO: 2285593 - RNA, 19 nt, Homo sapiens
  misc_RNA (1)...(19): siRNA sense strand
gaacggauuaacaggguca

SEQ ID NO: 2285594 - RNA, 19 nt, Homo sapiens
  misc_RNA (1)...(19): siRNA sense strand
cuuauuggccucaggaaga

SEQ ID NO: 2285595 - RNA, 19 nt, Homo sapiens
  misc_RNA (1)...(19): siRNA sense strand
ucacagucuucaaggagau

SEQ ID NO: 2285596 - RNA, 19 nt, Homo sapiens
  misc_RNA (1)...(19): siRNA sense strand
aaaccaguugagaaagaaa

SEQ ID NO: 2285597 - RNA, 19 nt, Homo sapiens
  misc_RNA (1)...(19): siRNA sense strand
agacucaagcacagcaaau

SEQ ID NO: 2285598 - RNA, 19 nt, Homo sapiens
  misc_RNA (1)...(19): siRNA sense strand
agacaaaagcugaauuaca

SEQ ID NO: 2285599 - RNA, 19 nt, Homo sapiens
  misc_RNA (1)...(19): siRNA sense strand
uuucaggucuguuggucaa

SEQ ID NO: 2285600 - RNA, 19 nt, Homo sapiens
  misc_RNA (1)...(19): siRNA sense strand
aggauaagccacucauaga

SEQ ID NO: 2285601 - RNA, 19 nt, Homo sapiens
  misc_RNA (1)...(19): siRNA sense strand
cguggaacucuuuguggua

SEQ ID NO: 2285602 - RNA, 19 nt, Homo sapiens
  misc_RNA (1)...(19): siRNA sense strand
acucaaugcaacaggaaac

SEQ ID NO: 2285603 - RNA, 19 nt, Homo sapiens
  misc_RNA (1)...(19): siRNA sense strand
gagccuuccaagcaggaua

SEQ ID NO: 2285604 - RNA, 19 nt, Homo sapiens
  misc_RNA (1)...(19): siRNA sense strand
ccucuauagcucagaucau

SEQ ID NO: 2285605 - RNA, 19 nt, Homo sapiens
  misc_RNA (1)...(19): siRNA sense strand
cagacuucuucuuggacau

SEQ ID NO: 2285606 - RNA, 19 nt, Homo sapiens
  misc_RNA (1)...(19): siRNA sense strand
ggggugagaagaagaagaa

SEQ ID NO: 2285607 - RNA, 19 nt, Homo sapiens
  misc_RNA (1)...(19): siRNA sense strand
caugaauacaucagcggau

SEQ ID NO: 2285608 - RNA, 19 nt, Homo sapiens
  misc_RNA (1)...(19): siRNA sense strand
auguuaggauugaagccaa

SEQ ID NO: 2285609 - RNA, 19 nt, Homo sapiens
  misc_RNA (1)...(19): siRNA sense strand
gaguaaaacugaagagugg

SEQ ID NO: 2285610 - RNA, 19 nt, Homo sapiens
  misc_RNA (1)...(19): siRNA sense strand
uaucaaugggaucaugaaa

SEQ ID NO: 2285611 - RNA, 19 nt, Homo sapiens
  misc_RNA (1)...(19): siRNA sense strand
gauaaauggagcaccgcga

SEQ ID NO: 2285612 - RNA, 19 nt, Homo sapiens
  misc_RNA (1)...(19): siRNA sense strand
acuuugaaucagcugguua

SEQ ID NO: 2285613 - RNA, 19 nt, Homo sapiens
  misc_RNA (1)...(19): siRNA sense strand
aggauguuaccaaguauua

SEQ ID NO: 2285614 - RNA, 19 nt, Homo sapiens
  misc_RNA (1)...(19): siRNA sense strand
caaugcaacaggaaacaau

SEQ ID NO: 2285615 - RNA, 19 nt, Homo sapiens
  misc_RNA (1)...(19): siRNA sense strand
agagacaaaagcugaauua

SEQ ID NO: 2285616 - RNA, 19 nt, Homo sapiens
  misc_RNA (1)...(19): siRNA sense strand
uggaacucuuugugguaga

SEQ ID NO: 2285617 - RNA, 19 nt, Homo sapiens
  misc_RNA (1)...(19): siRNA sense strand
auuuauuacccaugaggau

SEQ ID NO: 2285618 - RNA, 19 nt, Homo sapiens
  misc_RNA (1)...(19): siRNA sense strand
aagaagaagaucacagucu

SEQ ID NO: 2285619 - RNA, 19 nt, Homo sapiens
  misc_RNA (1)...(19): siRNA sense strand
gcaacaacuaugacgaauc

SEQ ID NO: 2285620 - RNA, 19 nt, Homo sapiens
  misc_RNA (1)...(19): siRNA sense strand
ucuucaaggagaucagcua

SEQ ID NO: 2285621 - RNA, 19 nt, Homo sapiens
  misc_RNA (1)...(19): siRNA sense strand
ggucaaucucacaaccauu

SEQ ID NO: 2285622 - RNA, 19 nt, Homo sapiens
  misc_RNA (1)...(19): siRNA sense strand
ggaaggagcugucacgcaa

SEQ ID NO: 2285623 - RNA, 19 nt, Homo sapiens
  misc_RNA (1)...(19): siRNA sense strand
uggacaagcaggaggccaa

SEQ ID NO: 2285624 - RNA, 19 nt, Homo sapiens
  misc_RNA (1)...(19): siRNA sense strand
ccaaagaggcacuugagga

SEQ ID NO: 2285625 - RNA, 19 nt, Homo sapiens
  misc_RNA (1)...(19): siRNA sense strand
ggaaacacgacuugggaag

SEQ ID NO: 2285626 - RNA, 19 nt, Homo sapiens
  misc_RNA (1)...(19): siRNA sense strand
gucaggacacacaggguaa

SEQ ID NO: 2285627 - RNA, 19 nt, Homo sapiens
  misc_RNA (1)...(19): siRNA sense strand
cgguuaacuuggacgggca

SEQ ID NO: 2285628 - RNA, 19 nt, Homo sapiens
  misc_RNA (1)...(19): siRNA sense strand
ccuggauggcagugggcau

SEQ ID NO: 2285629 - RNA, 19 nt, Homo sapiens
  misc_RNA (1)...(19): siRNA sense strand
cagcagagcuuguaugcac

SEQ ID NO: 2285630 - RNA, 19 nt, Homo sapiens
  misc_RNA (1)...(19): siRNA sense strand
ccaagaagcugcugcggag

SEQ ID NO: 2285631 - RNA, 19 nt, Homo sapiens
  misc_RNA (1)...(19): siRNA sense strand
caacgggaucagugggagu

SEQ ID NO: 2285632 - RNA, 19 nt, Homo sapiens
  misc_RNA (1)...(19): siRNA sense strand
gcgucaagccuguccgguu

SEQ ID NO: 2285633 - RNA, 19 nt, Homo sapiens
  misc_RNA (1)...(19): siRNA sense strand
guaaagggauauaacgaga

SEQ ID NO: 2285634 - RNA, 19 nt, Homo sapiens
  misc_RNA (1)...(19): siRNA sense strand
gugugaaccuggaggccuu

SEQ ID NO: 2285635 - RNA, 19 nt, Homo sapiens
  misc_RNA (1)...(19): siRNA sense strand
ugagcaaucugguaggcaa

SEQ ID NO: 2285636 - RNA, 19 nt, Homo sapiens
  misc_RNA (1)...(19): siRNA sense strand
gauaaaugucagugugaac

SEQ ID NO: 2285637 - RNA, 19 nt, Homo sapiens
  misc_RNA (1)...(19): siRNA sense strand
cugguuaagaaguuacaua

SEQ ID NO: 2285638 - RNA, 19 nt, Homo sapiens
  misc_RNA (1)...(19): siRNA sense strand
agggauauaacgagaaugu

SEQ ID NO: 2285639 - RNA, 19 nt, Homo sapiens
  misc_RNA (1)...(19): siRNA sense strand
caagcauauaaguggucaa

SEQ ID NO: 2285640 - RNA, 19 nt, Homo sapiens
  misc_RNA (1)...(19): siRNA sense strand
ccgcuaaucagaugggagu

SEQ ID NO: 2285641 - RNA, 19 nt, Homo sapiens
  misc_RNA (1)...(19): siRNA sense strand
gcgggaaguuucugcagga

SEQ ID NO: 2285642 - RNA, 19 nt, Homo sapiens
  misc_RNA (1)...(19): siRNA sense strand
ucaaugagcuggaacgucu

SEQ ID NO: 2285643 - RNA, 19 nt, Homo sapiens
  misc_RNA (1)...(19): siRNA sense strand
uaguaaagggauauaacga

SEQ ID NO: 2285644 - RNA, 19 nt, Homo sapiens
  misc_RNA (1)...(19): siRNA sense strand
aaggaugggaugcggaaca

SEQ ID NO: 2285645 - RNA, 19 nt, Homo sapiens
  misc_RNA (1)...(19): siRNA sense strand
ccagaaggugacagaccau

SEQ ID NO: 2285646 - RNA, 19 nt, Homo sapiens
  misc_RNA (1)...(19): siRNA sense strand
ggaagaagcuguugccgga

SEQ ID NO: 2285647 - RNA, 19 nt, Homo sapiens
  misc_RNA (1)...(19): siRNA sense strand
uccugaaggccaagggaau

SEQ ID NO: 2285648 - RNA, 19 nt, Homo sapiens
  misc_RNA (1)...(19): siRNA sense strand
cuggaagcaaugaaguuaa

SEQ ID NO: 2285649 - RNA, 19 nt, Homo sapiens
  misc_RNA (1)...(19): siRNA sense strand
gccaaaauaaagaagacua

SEQ ID NO: 2285650 - RNA, 19 nt, Homo sapiens
  misc_RNA (1)...(19): siRNA sense strand
gucuaguccugaaggccaa

SEQ ID NO: 2285651 - RNA, 19 nt, Homo sapiens
  misc_RNA (1)...(19): siRNA sense strand
acuaauaagaagacgaccu

SEQ ID NO: 2285652 - RNA, 19 nt, Homo sapiens
  misc_RNA (1)...(19): siRNA sense strand
gagaguaaauacaaggaga

SEQ ID NO: 2285653 - RNA, 19 nt, Homo sapiens
  misc_RNA (1)...(19): siRNA sense strand
aagcaauacaaaucgguaa

SEQ ID NO: 2285654 - RNA, 19 nt, Homo sapiens
  misc_RNA (1)...(19): siRNA sense strand
gugguuucuuagagguaaa

SEQ ID NO: 2285655 - RNA, 19 nt, Homo sapiens
  misc_RNA (1)...(19): siRNA sense strand
agaaacagaugguggccca

SEQ ID NO: 2285656 - RNA, 19 nt, Homo sapiens
  misc_RNA (1)...(19): siRNA sense strand
gcuacaguggcuacagaaa

SEQ ID NO: 2285657 - RNA, 19 nt, Homo sapiens
  misc_RNA (1)...(19): siRNA sense strand
ccuuggaacaauugugaau

SEQ ID NO: 2285658 - RNA, 19 nt, Homo sapiens
  misc_RNA (1)...(19): siRNA sense strand
aggaggagaaggagaaagu

SEQ ID NO: 2285659 - RNA, 19 nt, Homo sapiens
  misc_RNA (1)...(19): siRNA sense strand
ugaaauguaaggaaggaga

SEQ ID NO: 2285660 - RNA, 19 nt, Homo sapiens
  misc_RNA (1)...(19): siRNA sense strand
cugcagugaugaagaccau

SEQ ID NO: 2285661 - RNA, 19 nt, Homo sapiens
  misc_RNA (1)...(19): siRNA sense strand
caagaaggcaagcaggaga

SEQ ID NO: 2285662 - RNA, 19 nt, Homo sapiens
  misc_RNA (1)...(19): siRNA sense strand
agaguaaauacaaggagau

SEQ ID NO: 2285663 - RNA, 19 nt, Homo sapiens
  misc_RNA (1)...(19): siRNA sense strand
ggugaaaccccgaagauca

SEQ ID NO: 2285664 - RNA, 19 nt, Homo sapiens
  misc_RNA (1)...(19): siRNA sense strand
aggagaaggagaaaguuga

SEQ ID NO: 2285665 - RNA, 19 nt, Homo sapiens
  misc_RNA (1)...(19): siRNA sense strand
cacaaugaaauguaaggaa

SEQ ID NO: 2285666 - RNA, 19 nt, Homo sapiens
  misc_RNA (1)...(19): siRNA sense strand
gagaaaguugauaagcaau

SEQ ID NO: 2285667 - RNA, 19 nt, Homo sapiens
  misc_RNA (1)...(19): siRNA sense strand
aaauguaaggaaggagaua

SEQ ID NO: 2285668 - RNA, 19 nt, Homo sapiens
  misc_RNA (1)...(19): siRNA sense strand
acaaugaaauguaaggaag

SEQ ID NO: 2285669 - RNA, 19 nt, Homo sapiens
  misc_RNA (1)...(19): siRNA sense strand
aaaugaugucgcaaagcaa

SEQ ID NO: 2285670 - RNA, 19 nt, Homo sapiens
  misc_RNA (1)...(19): siRNA sense strand
uuagaaacgaggacacaau

SEQ ID NO: 2285671 - RNA, 19 nt, Homo sapiens
  misc_RNA (1)...(19): siRNA sense strand
ugaaaugaguccugcugca

SEQ ID NO: 2285672 - RNA, 19 nt, Homo sapiens
  misc_RNA (1)...(19): siRNA sense strand
guuaugguacugaaagcaa

SEQ ID NO: 2285673 - RNA, 19 nt, Homo sapiens
  misc_RNA (1)...(19): siRNA sense strand
gaaucugaccaaaagguua

SEQ ID NO: 2285674 - RNA, 19 nt, Homo sapiens
  misc_RNA (1)...(19): siRNA sense strand
cagugguuucuuagaggua

SEQ ID NO: 2285675 - RNA, 19 nt, Homo sapiens
  misc_RNA (1)...(19): siRNA sense strand
gguuagaaacgaggacaca

SEQ ID NO: 2285676 - RNA, 19 nt, Homo sapiens
  misc_RNA (1)...(19): siRNA sense strand
uaaagguuauuaaggccaa

SEQ ID NO: 2285677 - RNA, 19 nt, Homo sapiens
  misc_RNA (1)...(19): siRNA sense strand
cgaguuuaauauugccaca

SEQ ID NO: 2285678 - RNA, 19 nt, Homo sapiens
  misc_RNA (1)...(19): siRNA sense strand
ggagagaacaagaagaaaa

SEQ ID NO: 2285679 - RNA, 19 nt, Homo sapiens
  misc_RNA (1)...(19): siRNA sense strand
gagcaauggugaaacggaa

SEQ ID NO: 2285680 - RNA, 19 nt, Homo sapiens
  misc_RNA (1)...(19): siRNA sense strand
ugguggaagugguuggaaa

SEQ ID NO: 2285681 - RNA, 19 nt, Homo sapiens
  misc_RNA (1)...(19): siRNA sense strand
auccagaaguugagaagaa

SEQ ID NO: 2285682 - RNA, 19 nt, Homo sapiens
  misc_RNA (1)...(19): siRNA sense strand
guacagugggagugaggaa

SEQ ID NO: 2285683 - RNA, 19 nt, Homo sapiens
  misc_RNA (1)...(19): siRNA sense strand
aggaagaagaggaggaagu

SEQ ID NO: 2285684 - RNA, 19 nt, Homo sapiens
  misc_RNA (1)...(19): siRNA sense strand
ggaaaggcucaguggucaa

SEQ ID NO: 2285685 - RNA, 19 nt, Homo sapiens
  misc_RNA (1)...(19): siRNA sense strand
agaagagaggcgagaaaga

SEQ ID NO: 2285686 - RNA, 19 nt, Homo sapiens
  misc_RNA (1)...(19): siRNA sense strand
ccgaagacgauuucaacaa

SEQ ID NO: 2285687 - RNA, 19 nt, Homo sapiens
  misc_RNA (1)...(19): siRNA sense strand
aggaugaagaggaagaaau

SEQ ID NO: 2285688 - RNA, 19 nt, Homo sapiens
  misc_RNA (1)...(19): siRNA sense strand
augaagaggaagaaaucaa

SEQ ID NO: 2285689 - RNA, 19 nt, Homo sapiens
  misc_RNA (1)...(19): siRNA sense strand
gcaaagaagaagaggagag

SEQ ID NO: 2285690 - RNA, 19 nt, Homo sapiens
  misc_RNA (1)...(19): siRNA sense strand
ccucaagccugcuggcgaa

SEQ ID NO: 2285691 - RNA, 19 nt, Homo sapiens
  misc_RNA (1)...(19): siRNA sense strand
cugagaaugcagaggugaa

SEQ ID NO: 2285692 - RNA, 19 nt, Homo sapiens
  misc_RNA (1)...(19): siRNA sense strand
ggaagaauauaaaaggcaa

SEQ ID NO: 2285693 - RNA, 19 nt, Homo sapiens
  misc_RNA (1)...(19): siRNA sense strand
gcgaaggagagaacaagaa

SEQ ID NO: 2285694 - RNA, 19 nt, Homo sapiens
  misc_RNA (1)...(19): siRNA sense strand
aaggagagaacaagaagaa

SEQ ID NO: 2285695 - RNA, 19 nt, Homo sapiens
  misc_RNA (1)...(19): siRNA sense strand
gguggaagugguuggaaau

SEQ ID NO: 2285696 - RNA, 19 nt, Homo sapiens
  misc_RNA (1)...(19): siRNA sense strand
agaggagaguugaaagaga

SEQ ID NO: 2285697 - RNA, 19 nt, Homo sapiens
  misc_RNA (1)...(19): siRNA sense strand
ccaugaugauguagaaagu

SEQ ID NO: 2285698 - RNA, 19 nt, Homo sapiens
  misc_RNA (1)...(19): siRNA sense strand
ucacagaaacauugcaaca

SEQ ID NO: 2285699 - RNA, 19 nt, Homo sapiens
  misc_RNA (1)...(19): siRNA sense strand
uugaaagagaacaggagua

SEQ ID NO: 2285700 - RNA, 19 nt, Homo sapiens
  misc_RNA (1)...(19): siRNA sense strand
gcuaguggguacagagagu

SEQ ID NO: 2285701 - RNA, 19 nt, Homo sapiens
  misc_RNA (1)...(19): siRNA sense strand
ggugacaauaucuggcaaa

SEQ ID NO: 2285702 - RNA, 19 nt, Homo sapiens
  misc_RNA (1)...(19): siRNA sense strand
agaaauacguucauaggca

SEQ ID NO: 2285703 - RNA, 19 nt, Homo sapiens
  misc_RNA (1)...(19): siRNA sense strand
caggaaaggagcaagccaa

SEQ ID NO: 2285704 - RNA, 19 nt, Homo sapiens
  misc_RNA (1)...(19): siRNA sense strand
gggagagaguggagaagcu

SEQ ID NO: 2285705 - RNA, 19 nt, Homo sapiens
  misc_RNA (1)...(19): siRNA sense strand
ccuggaaaaugcagugaaa

SEQ ID NO: 2285706 - RNA, 19 nt, Homo sapiens
  misc_RNA (1)...(19): siRNA sense strand
uuggagaauugguacauaa

SEQ ID NO: 2285707 - RNA, 19 nt, Homo sapiens
  misc_RNA (1)...(19): siRNA sense strand
uuauaagggaucagccaaa

SEQ ID NO: 2285708 - RNA, 19 nt, Homo sapiens
  misc_RNA (1)...(19): siRNA sense strand
augaaaggcaaguuagaau

SEQ ID NO: 2285709 - RNA, 19 nt, Homo sapiens
  misc_RNA (1)...(19): siRNA sense strand
gaguaugaguacaguggga

SEQ ID NO: 2285710 - RNA, 19 nt, Homo sapiens
  misc_RNA (1)...(19): siRNA sense strand
cugaggaugaagaggaaga

SEQ ID NO: 2285711 - RNA, 19 nt, Homo sapiens
  misc_RNA (1)...(19): siRNA sense strand
aggugaaacuuguugacuu

SEQ ID NO: 2285712 - RNA, 19 nt, Homo sapiens
  misc_RNA (1)...(19): siRNA sense strand
gugaggaagaagaggagga

SEQ ID NO: 2285713 - RNA, 19 nt, Homo sapiens
  misc_RNA (1)...(19): siRNA sense strand
acagcgaaggagagaacaa

SEQ ID NO: 2285714 - RNA, 19 nt, Homo sapiens
  misc_RNA (1)...(19): siRNA sense strand
caccaaagccauaucacaa

SEQ ID NO: 2285715 - RNA, 19 nt, Homo sapiens
  misc_RNA (1)...(19): siRNA sense strand
cuuuaagucauuuggagaa

SEQ ID NO: 2285716 - RNA, 19 nt, Homo sapiens
  misc_RNA (1)...(19): siRNA sense strand
aaguuagaauccagcuuaa

SEQ ID NO: 2285717 - RNA, 19 nt, Homo sapiens
  misc_RNA (1)...(19): siRNA sense strand
cgacggaugaggaggacga

SEQ ID NO: 2285718 - RNA, 19 nt, Homo sapiens
  misc_RNA (1)...(19): siRNA sense strand
gugaagaacaccaaaggga

SEQ ID NO: 2285719 - RNA, 19 nt, Homo sapiens
  misc_RNA (1)...(19): siRNA sense strand
ugaagaacaccaaagggaa

SEQ ID NO: 2285720 - RNA, 19 nt, Homo sapiens
  misc_RNA (1)...(19): siRNA sense strand
gcgcaaagaagaagaggag

SEQ ID NO: 2285721 - RNA, 19 nt, Homo sapiens
  misc_RNA (1)...(19): siRNA sense strand
uggacguacuugagggcuu

SEQ ID NO: 2285722 - RNA, 19 nt, Homo sapiens
  misc_RNA (1)...(19): siRNA sense strand
gaauuugagcaauggugaa

SEQ ID NO: 2285723 - RNA, 19 nt, Homo sapiens
  misc_RNA (1)...(19): siRNA sense strand
agagaaggccauagagauc

SEQ ID NO: 2285724 - RNA, 19 nt, Homo sapiens
  misc_RNA (1)...(19): siRNA sense strand
agaaaucaaacuggagaua

SEQ ID NO: 2285725 - RNA, 19 nt, Homo sapiens
  misc_RNA (1)...(19): siRNA sense strand
aaagaggagaguugaaaga

SEQ ID NO: 2285726 - RNA, 19 nt, Homo sapiens
  misc_RNA (1)...(19): siRNA sense strand
ugaaagagaacaggaguau

SEQ ID NO: 2285727 - RNA, 19 nt, Homo sapiens
  misc_RNA (1)...(19): siRNA sense strand
ugaaacggaaucugugaaa

SEQ ID NO: 2285728 - RNA, 19 nt, Homo sapiens
  misc_RNA (1)...(19): siRNA sense strand
uagaggaguuggagagaag

SEQ ID NO: 2285729 - RNA, 19 nt, Homo sapiens
  misc_RNA (1)...(19): siRNA sense strand
ggagacgggcagaagaaga

SEQ ID NO: 2285730 - RNA, 19 nt, Homo sapiens
  misc_RNA (1)...(19): siRNA sense strand
gaagaaaagaggagaguug

SEQ ID NO: 2285731 - RNA, 19 nt, Homo sapiens
  misc_RNA (1)...(19): siRNA sense strand
cacugaggaugaagaggaa

SEQ ID NO: 2285732 - RNA, 19 nt, Homo sapiens
  misc_RNA (1)...(19): siRNA sense strand
guauaucaggcgacagcua

SEQ ID NO: 2285733 - RNA, 19 nt, Homo sapiens
  misc_RNA (1)...(19): siRNA sense strand
cagaaguggccaagggaag

SEQ ID NO: 2285734 - RNA, 19 nt, Homo sapiens
  misc_RNA (1)...(19): siRNA sense strand
gcacaaaagggcucaaaga

SEQ ID NO: 2285735 - RNA, 19 nt, Homo sapiens
  misc_RNA (1)...(19): siRNA sense strand
agaacagaggcgacggcua

SEQ ID NO: 2285736 - RNA, 19 nt, Homo sapiens
  misc_RNA (1)...(19): siRNA sense strand
ggacgacggaugaggagga

SEQ ID NO: 2285737 - RNA, 19 nt, Homo sapiens
  misc_RNA (1)...(19): siRNA sense strand
augaugauguagaaaguga

SEQ ID NO: 2285738 - RNA, 19 nt, Homo sapiens
  misc_RNA (1)...(19): siRNA sense strand
ggagagaacaagaagaaaa

SEQ ID NO: 2285739 - RNA, 19 nt, Homo sapiens
  misc_RNA (1)...(19): siRNA sense strand
gagcaauggugaaacggaa

SEQ ID NO: 2285740 - RNA, 19 nt, Homo sapiens
  misc_RNA (1)...(19): siRNA sense strand
ugguggaagugguuggaaa

SEQ ID NO: 2285741 - RNA, 19 nt, Homo sapiens
  misc_RNA (1)...(19): siRNA sense strand
auccagaaguugagaagaa

SEQ ID NO: 2285742 - RNA, 19 nt, Homo sapiens
  misc_RNA (1)...(19): siRNA sense strand
guacagugggagugaggaa

SEQ ID NO: 2285743 - RNA, 19 nt, Homo sapiens
  misc_RNA (1)...(19): siRNA sense strand
aggaagaagaggaggaagu

SEQ ID NO: 2285744 - RNA, 19 nt, Homo sapiens
  misc_RNA (1)...(19): siRNA sense strand
ggaaaggcucaguggucaa

SEQ ID NO: 2285745 - RNA, 19 nt, Homo sapiens
  misc_RNA (1)...(19): siRNA sense strand
agaagagaggcgagaaaga

SEQ ID NO: 2285746 - RNA, 19 nt, Homo sapiens
  misc_RNA (1)...(19): siRNA sense strand
ccgaagacgauuucaacaa

SEQ ID NO: 2285747 - RNA, 19 nt, Homo sapiens
  misc_RNA (1)...(19): siRNA sense strand
aggaugaagaggaagaaau

SEQ ID NO: 2285748 - RNA, 19 nt, Homo sapiens
  misc_RNA (1)...(19): siRNA sense strand
augaagaggaagaaaucaa

SEQ ID NO: 2285749 - RNA, 19 nt, Homo sapiens
  misc_RNA (1)...(19): siRNA sense strand
gcaaagaagaagaggagag

SEQ ID NO: 2285750 - RNA, 19 nt, Homo sapiens
  misc_RNA (1)...(19): siRNA sense strand
ccucaagccugcuggcgaa

SEQ ID NO: 2285751 - RNA, 19 nt, Homo sapiens
  misc_RNA (1)...(19): siRNA sense strand
cugagaaugcagaggugaa

SEQ ID NO: 2285752 - RNA, 19 nt, Homo sapiens
  misc_RNA (1)...(19): siRNA sense strand
ggaagaauauaaaaggcaa

SEQ ID NO: 2285753 - RNA, 19 nt, Homo sapiens
  misc_RNA (1)...(19): siRNA sense strand
gcgaaggagagaacaagaa

SEQ ID NO: 2285754 - RNA, 19 nt, Homo sapiens
  misc_RNA (1)...(19): siRNA sense strand
aaggagagaacaagaagaa

SEQ ID NO: 2285755 - RNA, 19 nt, Homo sapiens
  misc_RNA (1)...(19): siRNA sense strand
gguggaagugguuggaaau

SEQ ID NO: 2285756 - RNA, 19 nt, Homo sapiens
  misc_RNA (1)...(19): siRNA sense strand
agaggagaguugaaagaga

SEQ ID NO: 2285757 - RNA, 19 nt, Homo sapiens
  misc_RNA (1)...(19): siRNA sense strand
ccaugaugauguagaaagu

SEQ ID NO: 2285758 - RNA, 19 nt, Homo sapiens
  misc_RNA (1)...(19): siRNA sense strand
ucacagaaacauugcaaca

SEQ ID NO: 2285759 - RNA, 19 nt, Homo sapiens
  misc_RNA (1)...(19): siRNA sense strand
uugaaagagaacaggagua

SEQ ID NO: 2285760 - RNA, 19 nt, Homo sapiens
  misc_RNA (1)...(19): siRNA sense strand
gcuaguggguacagagagu

SEQ ID NO: 2285761 - RNA, 19 nt, Homo sapiens
  misc_RNA (1)...(19): siRNA sense strand
ggugacaauaucuggcaaa

SEQ ID NO: 2285762 - RNA, 19 nt, Homo sapiens
  misc_RNA (1)...(19): siRNA sense strand
agaaauacguucauaggca

SEQ ID NO: 2285763 - RNA, 19 nt, Homo sapiens
  misc_RNA (1)...(19): siRNA sense strand
caggaaaggagcaagccaa

SEQ ID NO: 2285764 - RNA, 19 nt, Homo sapiens
  misc_RNA (1)...(19): siRNA sense strand
gggagagaguggagaagcu

SEQ ID NO: 2285765 - RNA, 19 nt, Homo sapiens
  misc_RNA (1)...(19): siRNA sense strand
ccuggaaaaugcagugaaa

SEQ ID NO: 2285766 - RNA, 19 nt, Homo sapiens
  misc_RNA (1)...(19): siRNA sense strand
uuggagaauugguacauaa

SEQ ID NO: 2285767 - RNA, 19 nt, Homo sapiens
  misc_RNA (1)...(19): siRNA sense strand
uuauaagggaucagccaaa

SEQ ID NO: 2285768 - RNA, 19 nt, Homo sapiens
  misc_RNA (1)...(19): siRNA sense strand
augaaaggcaaguuagaau

SEQ ID NO: 2285769 - RNA, 19 nt, Homo sapiens
  misc_RNA (1)...(19): siRNA sense strand
gaguaugaguacaguggga

SEQ ID NO: 2285770 - RNA, 19 nt, Homo sapiens
  misc_RNA (1)...(19): siRNA sense strand
cugaggaugaagaggaaga

SEQ ID NO: 2285771 - RNA, 19 nt, Homo sapiens
  misc_RNA (1)...(19): siRNA sense strand
aggugaaacuuguugacuu

SEQ ID NO: 2285772 - RNA, 19 nt, Homo sapiens
  misc_RNA (1)...(19): siRNA sense strand
gugaggaagaagaggagga

SEQ ID NO: 2285773 - RNA, 19 nt, Homo sapiens
  misc_RNA (1)...(19): siRNA sense strand
acagcgaaggagagaacaa

SEQ ID NO: 2285774 - RNA, 19 nt, Homo sapiens
  misc_RNA (1)...(19): siRNA sense strand
caccaaagccauaucacaa

SEQ ID NO: 2285775 - RNA, 19 nt, Homo sapiens
  misc_RNA (1)...(19): siRNA sense strand
cuuuaagucauuuggagaa

SEQ ID NO: 2285776 - RNA, 19 nt, Homo sapiens
  misc_RNA (1)...(19): siRNA sense strand
aaguuagaauccagcuuaa

SEQ ID NO: 2285777 - RNA, 19 nt, Homo sapiens
  misc_RNA (1)...(19): siRNA sense strand
cgacggaugaggaggacga

SEQ ID NO: 2285778 - RNA, 19 nt, Homo sapiens
  misc_RNA (1)...(19): siRNA sense strand
gugaagaacaccaaaggga

SEQ ID NO: 2285779 - RNA, 19 nt, Homo sapiens
  misc_RNA (1)...(19): siRNA sense strand
ugaagaacaccaaagggaa

SEQ ID NO: 2285780 - RNA, 19 nt, Homo sapiens
  misc_RNA (1)...(19): siRNA sense strand
gcgcaaagaagaagaggag

SEQ ID NO: 2285781 - RNA, 19 nt, Homo sapiens
  misc_RNA (1)...(19): siRNA sense strand
uggacguacuugagggcuu

SEQ ID NO: 2285782 - RNA, 19 nt, Homo sapiens
  misc_RNA (1)...(19): siRNA sense strand
gaauuugagcaauggugaa

SEQ ID NO: 2285783 - RNA, 19 nt, Homo sapiens
  misc_RNA (1)...(19): siRNA sense strand
agagaaggccauagagauc

SEQ ID NO: 2285784 - RNA, 19 nt, Homo sapiens
  misc_RNA (1)...(19): siRNA sense strand
agaaaucaaacuggagaua

SEQ ID NO: 2285785 - RNA, 19 nt, Homo sapiens
  misc_RNA (1)...(19): siRNA sense strand
aaagaggagaguugaaaga

SEQ ID NO: 2285786 - RNA, 19 nt, Homo sapiens
  misc_RNA (1)...(19): siRNA sense strand
ugaaagagaacaggaguau

SEQ ID NO: 2285787 - RNA, 19 nt, Homo sapiens
  misc_RNA (1)...(19): siRNA sense strand
ugaaacggaaucugugaaa

SEQ ID NO: 2285788 - RNA, 19 nt, Homo sapiens
  misc_RNA (1)...(19): siRNA sense strand
uagaggaguuggagagaag

SEQ ID NO: 2285789 - RNA, 19 nt, Homo sapiens
  misc_RNA (1)...(19): siRNA sense strand
ggagacgggcagaagaaga

SEQ ID NO: 2285790 - RNA, 19 nt, Homo sapiens
  misc_RNA (1)...(19): siRNA sense strand
gaagaaaagaggagaguug

SEQ ID NO: 2285791 - RNA, 19 nt, Homo sapiens
  misc_RNA (1)...(19): siRNA sense strand
cacugaggaugaagaggaa

SEQ ID NO: 2285792 - RNA, 19 nt, Homo sapiens
  misc_RNA (1)...(19): siRNA sense strand
guauaucaggcgacagcua

SEQ ID NO: 2285793 - RNA, 19 nt, Homo sapiens
  misc_RNA (1)...(19): siRNA sense strand
cagaaguggccaagggaag

SEQ ID NO: 2285794 - RNA, 19 nt, Homo sapiens
  misc_RNA (1)...(19): siRNA sense strand
gcacaaaagggcucaaaga

SEQ ID NO: 2285795 - RNA, 19 nt, Homo sapiens
  misc_RNA (1)...(19): siRNA sense strand
agaacagaggcgacggcua

SEQ ID NO: 2285796 - RNA, 19 nt, Homo sapiens
  misc_RNA (1)...(19): siRNA sense strand
ggacgacggaugaggagga

SEQ ID NO: 2285797 - RNA, 19 nt, Homo sapiens
  misc_RNA (1)...(19): siRNA sense strand
augaugauguagaaaguga

SEQ ID NO: 2285798 - RNA, 19 nt, Homo sapiens
  misc_RNA (1)...(19): siRNA sense strand
ggagagaacaagaagaaaa

SEQ ID NO: 2285799 - RNA, 19 nt, Homo sapiens
  misc_RNA (1)...(19): siRNA sense strand
gagcaauggugaaacggaa

SEQ ID NO: 2285800 - RNA, 19 nt, Homo sapiens
  misc_RNA (1)...(19): siRNA sense strand
ugguggaagugguuggaaa

SEQ ID NO: 2285801 - RNA, 19 nt, Homo sapiens
  misc_RNA (1)...(19): siRNA sense strand
auccagaaguugagaagaa

SEQ ID NO: 2285802 - RNA, 19 nt, Homo sapiens
  misc_RNA (1)...(19): siRNA sense strand
guacagugggagugaggaa

SEQ ID NO: 2285803 - RNA, 19 nt, Homo sapiens
  misc_RNA (1)...(19): siRNA sense strand
aggaagaagaggaggaagu

SEQ ID NO: 2285804 - RNA, 19 nt, Homo sapiens
  misc_RNA (1)...(19): siRNA sense strand
ggaaaggcucaguggucaa

SEQ ID NO: 2285805 - RNA, 19 nt, Homo sapiens
  misc_RNA (1)...(19): siRNA sense strand
agaagagaggcgagaaaga

SEQ ID NO: 2285806 - RNA, 19 nt, Homo sapiens
  misc_RNA (1)...(19): siRNA sense strand
ccgaagacgauuucaacaa

SEQ ID NO: 2285807 - RNA, 19 nt, Homo sapiens
  misc_RNA (1)...(19): siRNA sense strand
aggaugaagaggaagaaau

SEQ ID NO: 2285808 - RNA, 19 nt, Homo sapiens
  misc_RNA (1)...(19): siRNA sense strand
augaagaggaagaaaucaa

SEQ ID NO: 2285809 - RNA, 19 nt, Homo sapiens
  misc_RNA (1)...(19): siRNA sense strand
gcaaagaagaagaggagag

SEQ ID NO: 2285810 - RNA, 19 nt, Homo sapiens
  misc_RNA (1)...(19): siRNA sense strand
ccucaagccugcuggcgaa

SEQ ID NO: 2285811 - RNA, 19 nt, Homo sapiens
  misc_RNA (1)...(19): siRNA sense strand
cugagaaugcagaggugaa

SEQ ID NO: 2285812 - RNA, 19 nt, Homo sapiens
  misc_RNA (1)...(19): siRNA sense strand
ggaagaauauaaaaggcaa

SEQ ID NO: 2285813 - RNA, 19 nt, Homo sapiens
  misc_RNA (1)...(19): siRNA sense strand
gcgaaggagagaacaagaa

SEQ ID NO: 2285814 - RNA, 19 nt, Homo sapiens
  misc_RNA (1)...(19): siRNA sense strand
aaggagagaacaagaagaa

SEQ ID NO: 2285815 - RNA, 19 nt, Homo sapiens
  misc_RNA (1)...(19): siRNA sense strand
gguggaagugguuggaaau

SEQ ID NO: 2285816 - RNA, 19 nt, Homo sapiens
  misc_RNA (1)...(19): siRNA sense strand
agaggagaguugaaagaga

SEQ ID NO: 2285817 - RNA, 19 nt, Homo sapiens
  misc_RNA (1)...(19): siRNA sense strand
ccaugaugauguagaaagu

SEQ ID NO: 2285818 - RNA, 19 nt, Homo sapiens
  misc_RNA (1)...(19): siRNA sense strand
ucacagaaacauugcaaca

SEQ ID NO: 2285819 - RNA, 19 nt, Homo sapiens
  misc_RNA (1)...(19): siRNA sense strand
uugaaagagaacaggagua

SEQ ID NO: 2285820 - RNA, 19 nt, Homo sapiens
  misc_RNA (1)...(19): siRNA sense strand
gcuaguggguacagagagu

SEQ ID NO: 2285821 - RNA, 19 nt, Homo sapiens
  misc_RNA (1)...(19): siRNA sense strand
ggugacaauaucuggcaaa

SEQ ID NO: 2285822 - RNA, 19 nt, Homo sapiens
  misc_RNA (1)...(19): siRNA sense strand
agaaauacguucauaggca

SEQ ID NO: 2285823 - RNA, 19 nt, Homo sapiens
  misc_RNA (1)...(19): siRNA sense strand
caggaaaggagcaagccaa

SEQ ID NO: 2285824 - RNA, 19 nt, Homo sapiens
  misc_RNA (1)...(19): siRNA sense strand
gggagagaguggagaagcu

SEQ ID NO: 2285825 - RNA, 19 nt, Homo sapiens
  misc_RNA (1)...(19): siRNA sense strand
ccuggaaaaugcagugaaa

SEQ ID NO: 2285826 - RNA, 19 nt, Homo sapiens
  misc_RNA (1)...(19): siRNA sense strand
uuggagaauugguacauaa

SEQ ID NO: 2285827 - RNA, 19 nt, Homo sapiens
  misc_RNA (1)...(19): siRNA sense strand
uuauaagggaucagccaaa

SEQ ID NO: 2285828 - RNA, 19 nt, Homo sapiens
  misc_RNA (1)...(19): siRNA sense strand
augaaaggcaaguuagaau

SEQ ID NO: 2285829 - RNA, 19 nt, Homo sapiens
  misc_RNA (1)...(19): siRNA sense strand
gaguaugaguacaguggga

SEQ ID NO: 2285830 - RNA, 19 nt, Homo sapiens
  misc_RNA (1)...(19): siRNA sense strand
cugaggaugaagaggaaga

SEQ ID NO: 2285831 - RNA, 19 nt, Homo sapiens
  misc_RNA (1)...(19): siRNA sense strand
aggugaaacuuguugacuu

SEQ ID NO: 2285832 - RNA, 19 nt, Homo sapiens
  misc_RNA (1)...(19): siRNA sense strand
gugaggaagaagaggagga

SEQ ID NO: 2285833 - RNA, 19 nt, Homo sapiens
  misc_RNA (1)...(19): siRNA sense strand
acagcgaaggagagaacaa

SEQ ID NO: 2285834 - RNA, 19 nt, Homo sapiens
  misc_RNA (1)...(19): siRNA sense strand
caccaaagccauaucacaa

SEQ ID NO: 2285835 - RNA, 19 nt, Homo sapiens
  misc_RNA (1)...(19): siRNA sense strand
cuuuaagucauuuggagaa

SEQ ID NO: 2285836 - RNA, 19 nt, Homo sapiens
  misc_RNA (1)...(19): siRNA sense strand
aaguuagaauccagcuuaa

SEQ ID NO: 2285837 - RNA, 19 nt, Homo sapiens
  misc_RNA (1)...(19): siRNA sense strand
cgacggaugaggaggacga

SEQ ID NO: 2285838 - RNA, 19 nt, Homo sapiens
  misc_RNA (1)...(19): siRNA sense strand
gugaagaacaccaaaggga

SEQ ID NO: 2285839 - RNA, 19 nt, Homo sapiens
  misc_RNA (1)...(19): siRNA sense strand
ugaagaacaccaaagggaa

SEQ ID NO: 2285840 - RNA, 19 nt, Homo sapiens
  misc_RNA (1)...(19): siRNA sense strand
gcgcaaagaagaagaggag

SEQ ID NO: 2285841 - RNA, 19 nt, Homo sapiens
  misc_RNA (1)...(19): siRNA sense strand
uggacguacuugagggcuu

SEQ ID NO: 2285842 - RNA, 19 nt, Homo sapiens
  misc_RNA (1)...(19): siRNA sense strand
gaauuugagcaauggugaa

SEQ ID NO: 2285843 - RNA, 19 nt, Homo sapiens
  misc_RNA (1)...(19): siRNA sense strand
agagaaggccauagagauc

SEQ ID NO: 2285844 - RNA, 19 nt, Homo sapiens
  misc_RNA (1)...(19): siRNA sense strand
agaaaucaaacuggagaua

SEQ ID NO: 2285845 - RNA, 19 nt, Homo sapiens
  misc_RNA (1)...(19): siRNA sense strand
aaagaggagaguugaaaga

SEQ ID NO: 2285846 - RNA, 19 nt, Homo sapiens
  misc_RNA (1)...(19): siRNA sense strand
ugaaagagaacaggaguau

SEQ ID NO: 2285847 - RNA, 19 nt, Homo sapiens
  misc_RNA (1)...(19): siRNA sense strand
ugaaacggaaucugugaaa

SEQ ID NO: 2285848 - RNA, 19 nt, Homo sapiens
  misc_RNA (1)...(19): siRNA sense strand
uagaggaguuggagagaag

SEQ ID NO: 2285849 - RNA, 19 nt, Homo sapiens
  misc_RNA (1)...(19): siRNA sense strand
ggagacgggcagaagaaga

SEQ ID NO: 2285850 - RNA, 19 nt, Homo sapiens
  misc_RNA (1)...(19): siRNA sense strand
gaagaaaagaggagaguug

SEQ ID NO: 2285851 - RNA, 19 nt, Homo sapiens
  misc_RNA (1)...(19): siRNA sense strand
cacugaggaugaagaggaa

SEQ ID NO: 2285852 - RNA, 19 nt, Homo sapiens
  misc_RNA (1)...(19): siRNA sense strand
guauaucaggcgacagcua

SEQ ID NO: 2285853 - RNA, 19 nt, Homo sapiens
  misc_RNA (1)...(19): siRNA sense strand
cagaaguggccaagggaag

SEQ ID NO: 2285854 - RNA, 19 nt, Homo sapiens
  misc_RNA (1)...(19): siRNA sense strand
gcacaaaagggcucaaaga

SEQ ID NO: 2285855 - RNA, 19 nt, Homo sapiens
  misc_RNA (1)...(19): siRNA sense strand
agaacagaggcgacggcua

SEQ ID NO: 2285856 - RNA, 19 nt, Homo sapiens
  misc_RNA (1)...(19): siRNA sense strand
ggacgacggaugaggagga

SEQ ID NO: 2285857 - RNA, 19 nt, Homo sapiens
  misc_RNA (1)...(19): siRNA sense strand
augaugauguagaaaguga

SEQ ID NO: 2285858 - RNA, 19 nt, Homo sapiens
  misc_RNA (1)...(19): siRNA sense strand
agaugaaauugaagggaau

SEQ ID NO: 2285859 - RNA, 19 nt, Homo sapiens
  misc_RNA (1)...(19): siRNA sense strand
gggaaggagaagauauuaa

SEQ ID NO: 2285860 - RNA, 19 nt, Homo sapiens
  misc_RNA (1)...(19): siRNA sense strand
agucaaagacaguggagau

SEQ ID NO: 2285861 - RNA, 19 nt, Homo sapiens
  misc_RNA (1)...(19): siRNA sense strand
aauuaaauccagugagaga

SEQ ID NO: 2285862 - RNA, 19 nt, Homo sapiens
  misc_RNA (1)...(19): siRNA sense strand
ggaauaugugauuaggaaa

SEQ ID NO: 2285863 - RNA, 19 nt, Homo sapiens
  misc_RNA (1)...(19): siRNA sense strand
ugucaagaucugaggaaga

SEQ ID NO: 2285864 - RNA, 19 nt, Homo sapiens
  misc_RNA (1)...(19): siRNA sense strand
gguuauaaagagaggaugu

SEQ ID NO: 2285865 - RNA, 19 nt, Homo sapiens
  misc_RNA (1)...(19): siRNA sense strand
uagaugaaauugaagggaa

SEQ ID NO: 2285866 - RNA, 19 nt, Homo sapiens
  misc_RNA (1)...(19): siRNA sense strand
gcuuuaucuaucagggaaa

SEQ ID NO: 2285867 - RNA, 19 nt, Homo sapiens
  misc_RNA (1)...(19): siRNA sense strand
uggaacaauucauggaaaa

SEQ ID NO: 2285868 - RNA, 19 nt, Homo sapiens
  misc_RNA (1)...(19): siRNA sense strand
caggauauucugaaagcaa

SEQ ID NO: 2285869 - RNA, 19 nt, Homo sapiens
  misc_RNA (1)...(19): siRNA sense strand
ucuuaaaggagucuaguaa

SEQ ID NO: 2285870 - RNA, 19 nt, Homo sapiens
  misc_RNA (1)...(19): siRNA sense strand
ccuaaaacgaugaagaaau

SEQ ID NO: 2285871 - RNA, 19 nt, Homo sapiens
  misc_RNA (1)...(19): siRNA sense strand
cgucacacgaguugaagaa

SEQ ID NO: 2285872 - RNA, 19 nt, Homo sapiens
  misc_RNA (1)...(19): siRNA sense strand
uuacaucuuuacugggaaa

SEQ ID NO: 2285873 - RNA, 19 nt, Homo sapiens
  misc_RNA (1)...(19): siRNA sense strand
uuaaagugaucgaagccua

SEQ ID NO: 2285874 - RNA, 19 nt, Homo sapiens
  misc_RNA (1)...(19): siRNA sense strand
aaccaucggaggaggaaua

SEQ ID NO: 2285875 - RNA, 19 nt, Homo sapiens
  misc_RNA (1)...(19): siRNA sense strand
caguggagaugacggaaaa

SEQ ID NO: 2285876 - RNA, 19 nt, Homo sapiens
  misc_RNA (1)...(19): siRNA sense strand
gaaggaggcuggugggaag

SEQ ID NO: 2285877 - RNA, 19 nt, Homo sapiens
  misc_RNA (1)...(19): siRNA sense strand
cuuaaaggagucuaguaaa

SEQ ID NO: 2285878 - RNA, 19 nt, Homo sapiens
  misc_RNA (1)...(19): siRNA sense strand
cauaaaaggaagacugaga

SEQ ID NO: 2285879 - RNA, 19 nt, Homo sapiens
  misc_RNA (1)...(19): siRNA sense strand
gagaacugaagcaggaaaa

SEQ ID NO: 2285880 - RNA, 19 nt, Homo sapiens
  misc_RNA (1)...(19): siRNA sense strand
ucaagaagggaccuagaaa

SEQ ID NO: 2285881 - RNA, 19 nt, Homo sapiens
  misc_RNA (1)...(19): siRNA sense strand
guaacaacaaccaggacuu

SEQ ID NO: 2285882 - RNA, 19 nt, Homo sapiens
  misc_RNA (1)...(19): siRNA sense strand
ccuggaagaagaacugaaa

SEQ ID NO: 2285883 - RNA, 19 nt, Homo sapiens
  misc_RNA (1)...(19): siRNA sense strand
agaaagaccauguggacgu

SEQ ID NO: 2285884 - RNA, 19 nt, Homo sapiens
  misc_RNA (1)...(19): siRNA sense strand
acaguggagaugacggaaa

SEQ ID NO: 2285885 - RNA, 19 nt, Homo sapiens
  misc_RNA (1)...(19): siRNA sense strand
aguaauuauguccgugaaa

SEQ ID NO: 2285886 - RNA, 19 nt, Homo sapiens
  misc_RNA (1)...(19): siRNA sense strand
caagaagggaccuagaaaa

SEQ ID NO: 2285887 - RNA, 19 nt, Homo sapiens
  misc_RNA (1)...(19): siRNA sense strand
uggaagaagaacugaaauc

SEQ ID NO: 2285888 - RNA, 19 nt, Homo sapiens
  misc_RNA (1)...(19): siRNA sense strand
agcaaugccuggaagaaga

SEQ ID NO: 2285889 - RNA, 19 nt, Homo sapiens
  misc_RNA (1)...(19): siRNA sense strand
gagaaaacagcuggaguua

SEQ ID NO: 2285890 - RNA, 19 nt, Homo sapiens
  misc_RNA (1)...(19): siRNA sense strand
ggugacuagauuagaugaa

SEQ ID NO: 2285891 - RNA, 19 nt, Homo sapiens
  misc_RNA (1)...(19): siRNA sense strand
uggaagaggaugcucaaau

SEQ ID NO: 2285892 - RNA, 19 nt, Homo sapiens
  misc_RNA (1)...(19): siRNA sense strand
uggaaauauuugauccuga

SEQ ID NO: 2285893 - RNA, 19 nt, Homo sapiens
  misc_RNA (1)...(19): siRNA sense strand
aguaaaagcccuaaaacga

SEQ ID NO: 2285894 - RNA, 19 nt, Homo sapiens
  misc_RNA (1)...(19): siRNA sense strand
ucaacaaggccauggcuca

SEQ ID NO: 2285895 - RNA, 19 nt, Homo sapiens
  misc_RNA (1)...(19): siRNA sense strand
caacagaagaucagcuauc

SEQ ID NO: 2285896 - RNA, 19 nt, Homo sapiens
  misc_RNA (1)...(19): siRNA sense strand
uuggaacaauucauggaaa

SEQ ID NO: 2285897 - RNA, 19 nt, Homo sapiens
  misc_RNA (1)...(19): siRNA sense strand
cuguaaaugugcucacuca

SEQ ID NO: 2285898 - RNA, 19 nt, Homo sapiens
  misc_RNA (1)...(19): siRNA sense strand
augggaaggagaagauauu

SEQ ID NO: 2285899 - RNA, 19 nt, Homo sapiens
  misc_RNA (1)...(19): siRNA sense strand
caacaaggccauggcucaa

SEQ ID NO: 2285900 - RNA, 19 nt, Homo sapiens
  misc_RNA (1)...(19): siRNA sense strand
ggucaauuucuccaaggua

SEQ ID NO: 2285901 - RNA, 19 nt, Homo sapiens
  misc_RNA (1)...(19): siRNA sense strand
cuaauacuucucagacaaa

SEQ ID NO: 2285902 - RNA, 19 nt, Homo sapiens
  misc_RNA (1)...(19): siRNA sense strand
aggaaugguuggagcagcu

SEQ ID NO: 2285903 - RNA, 19 nt, Homo sapiens
  misc_RNA (1)...(19): siRNA sense strand
ugaaggacgaggucagaga

SEQ ID NO: 2285904 - RNA, 19 nt, Homo sapiens
  misc_RNA (1)...(19): siRNA sense strand
agacaaacccacagggagc

SEQ ID NO: 2285905 - RNA, 19 nt, Homo sapiens
  misc_RNA (1)...(19): siRNA sense strand
ccaauaacaaucugaguac

SEQ ID NO: 2285906 - RNA, 19 nt, Homo sapiens
  misc_RNA (1)...(19): siRNA sense strand
aggauauucugaaagcaau

SEQ ID NO: 2285907 - RNA, 19 nt, Homo sapiens
  misc_RNA (1)...(19): siRNA sense strand
agcaaacagaugaguguau

SEQ ID NO: 2285908 - RNA, 19 nt, Homo sapiens
  misc_RNA (1)...(19): siRNA sense strand
agauucaacuuuaagcaga

SEQ ID NO: 2285909 - RNA, 19 nt, Homo sapiens
  misc_RNA (1)...(19): siRNA sense strand
aaucuauguaucuggcuua

SEQ ID NO: 2285910 - RNA, 19 nt, Homo sapiens
  misc_RNA (1)...(19): siRNA sense strand
acaacaaaccucagcaaac

SEQ ID NO: 2285911 - RNA, 19 nt, Homo sapiens
  misc_RNA (1)...(19): siRNA sense strand
aagaucugaggaagagaaa

SEQ ID NO: 2285912 - RNA, 19 nt, Homo sapiens
  misc_RNA (1)...(19): siRNA sense strand
caugggaaggagaagauau

SEQ ID NO: 2285913 - RNA, 19 nt, Homo sapiens
  misc_RNA (1)...(19): siRNA sense strand
agagaacugaagcaggaaa

SEQ ID NO: 2285914 - RNA, 19 nt, Homo sapiens
  misc_RNA (1)...(19): siRNA sense strand
gaauaauuauguagggcua

SEQ ID NO: 2285915 - RNA, 19 nt, Homo sapiens
  misc_RNA (1)...(19): siRNA sense strand
caguaauuagugugagaaa

SEQ ID NO: 2285916 - RNA, 19 nt, Homo sapiens
  misc_RNA (1)...(19): siRNA sense strand
uggaagaggaacugaagaa

SEQ ID NO: 2285917 - RNA, 19 nt, Homo sapiens
  misc_RNA (1)...(19): siRNA sense strand
gaccaguacaucagagaaa

SEQ ID NO: 2285918 - RNA, 19 nt, Homo sapiens
  misc_RNA (1)...(19): siRNA sense strand
augaagaggauguggaaga

SEQ ID NO: 2285919 - RNA, 19 nt, Homo sapiens
  misc_RNA (1)...(19): siRNA sense strand
uggaagaaacugagcaaaa

SEQ ID NO: 2285920 - RNA, 19 nt, Homo sapiens
  misc_RNA (1)...(19): siRNA sense strand
gaaaaggaugaaagggaaa

SEQ ID NO: 2285921 - RNA, 19 nt, Homo sapiens
  misc_RNA (1)...(19): siRNA sense strand
ggcuaauggcuguggaaga

SEQ ID NO: 2285922 - RNA, 19 nt, Homo sapiens
  misc_RNA (1)...(19): siRNA sense strand
ggaucuugguagaggggaa

SEQ ID NO: 2285923 - RNA, 19 nt, Homo sapiens
  misc_RNA (1)...(19): siRNA sense strand
agaccaaagcagacaauau

SEQ ID NO: 2285924 - RNA, 19 nt, Homo sapiens
  misc_RNA (1)...(19): siRNA sense strand
caccaaauccauugaggaa

SEQ ID NO: 2285925 - RNA, 19 nt, Homo sapiens
  misc_RNA (1)...(19): siRNA sense strand
aaagauagccagaugaaaa

SEQ ID NO: 2285926 - RNA, 19 nt, Homo sapiens
  misc_RNA (1)...(19): siRNA sense strand
ggaucguuguggagagcau

SEQ ID NO: 2285927 - RNA, 19 nt, Homo sapiens
  misc_RNA (1)...(19): siRNA sense strand
cagcuacuucagagggaaa

SEQ ID NO: 2285928 - RNA, 19 nt, Homo sapiens
  misc_RNA (1)...(19): siRNA sense strand
gagacaaguggauggaaaa

SEQ ID NO: 2285929 - RNA, 19 nt, Homo sapiens
  misc_RNA (1)...(19): siRNA sense strand
gccaguaauuagugugaga

SEQ ID NO: 2285930 - RNA, 19 nt, Homo sapiens
  misc_RNA (1)...(19): siRNA sense strand
guuaggugcccgagccaaa

SEQ ID NO: 2285931 - RNA, 19 nt, Homo sapiens
  misc_RNA (1)...(19): siRNA sense strand
aagcaagacaucagcgaga

SEQ ID NO: 2285932 - RNA, 19 nt, Homo sapiens
  misc_RNA (1)...(19): siRNA sense strand
uugguaacaaagaggaaua

SEQ ID NO: 2285933 - RNA, 19 nt, Homo sapiens
  misc_RNA (1)...(19): siRNA sense strand
ugaaaaggaugaaagggaa

SEQ ID NO: 2285934 - RNA, 19 nt, Homo sapiens
  misc_RNA (1)...(19): siRNA sense strand
gagaaguaugaacaagaaa

SEQ ID NO: 2285935 - RNA, 19 nt, Homo sapiens
  misc_RNA (1)...(19): siRNA sense strand
ugagaaauaaagaggaguu

SEQ ID NO: 2285936 - RNA, 19 nt, Homo sapiens
  misc_RNA (1)...(19): siRNA sense strand
aagcaguuauugaugcaaa

SEQ ID NO: 2285937 - RNA, 19 nt, Homo sapiens
  misc_RNA (1)...(19): siRNA sense strand
gaugcaaagcagaaaauaa

SEQ ID NO: 2285938 - RNA, 19 nt, Homo sapiens
  misc_RNA (1)...(19): siRNA sense strand
uuuacaaggauguggaaaa

SEQ ID NO: 2285939 - RNA, 19 nt, Homo sapiens
  misc_RNA (1)...(19): siRNA sense strand
aaacauuauugcugguuca

SEQ ID NO: 2285940 - RNA, 19 nt, Homo sapiens
  misc_RNA (1)...(19): siRNA sense strand
aggacaacacagacagcua

SEQ ID NO: 2285941 - RNA, 19 nt, Homo sapiens
  misc_RNA (1)...(19): siRNA sense strand
ccuucaaaguaccaggauu

SEQ ID NO: 2285942 - RNA, 19 nt, Homo sapiens
  misc_RNA (1)...(19): siRNA sense strand
cagaauuugucaccagcaa

SEQ ID NO: 2285943 - RNA, 19 nt, Homo sapiens
  misc_RNA (1)...(19): siRNA sense strand
ggaaccuguaucagugaaa

SEQ ID NO: 2285944 - RNA, 19 nt, Homo sapiens
  misc_RNA (1)...(19): siRNA sense strand
ggaccuucuauucggauua

SEQ ID NO: 2285945 - RNA, 19 nt, Homo sapiens
  misc_RNA (1)...(19): siRNA sense strand
guaacaaagaggaauacau

SEQ ID NO: 2285946 - RNA, 19 nt, Homo sapiens
  misc_RNA (1)...(19): siRNA sense strand
guaugaagaggauguggaa

SEQ ID NO: 2285947 - RNA, 19 nt, Homo sapiens
  misc_RNA (1)...(19): siRNA sense strand
uggccgaaccugugcagaa

SEQ ID NO: 2285948 - RNA, 19 nt, Homo sapiens
  misc_RNA (1)...(19): siRNA sense strand
cuucaaaguaccaggauuc

SEQ ID NO: 2285949 - RNA, 19 nt, Homo sapiens
  misc_RNA (1)...(19): siRNA sense strand
aggaaagacaggaggaccu

SEQ ID NO: 2285950 - RNA, 19 nt, Homo sapiens
  misc_RNA (1)...(19): siRNA sense strand
uguaugaguccgaugagaa

SEQ ID NO: 2285951 - RNA, 19 nt, Homo sapiens
  misc_RNA (1)...(19): siRNA sense strand
cugagaaguaugaacaaga

SEQ ID NO: 2285952 - RNA, 19 nt, Homo sapiens
  misc_RNA (1)...(19): siRNA sense strand
cagcaauagcagcauggaa

SEQ ID NO: 2285953 - RNA, 19 nt, Homo sapiens
  misc_RNA (1)...(19): siRNA sense strand
uguggaagaaacugagcaa

SEQ ID NO: 2285954 - RNA, 19 nt, Homo sapiens
  misc_RNA (1)...(19): siRNA sense strand
accucaaguuggugggaca

SEQ ID NO: 2285955 - RNA, 19 nt, Homo sapiens
  misc_RNA (1)...(19): siRNA sense strand
ccuaauggucggagcgucu

SEQ ID NO: 2285956 - RNA, 19 nt, Homo sapiens
  misc_RNA (1)...(19): siRNA sense strand
ccuauacgcuugaccggaa

SEQ ID NO: 2285957 - RNA, 19 nt, Homo sapiens
  misc_RNA (1)...(19): siRNA sense strand
ggaccaaaagccagucaaa

SEQ ID NO: 2285958 - RNA, 19 nt, Homo sapiens
  misc_RNA (1)...(19): siRNA sense strand
ucuucaaaguacuggcaga

SEQ ID NO: 2285959 - RNA, 19 nt, Homo sapiens
  misc_RNA (1)...(19): siRNA sense strand
ccucauuauuucuccguuu

SEQ ID NO: 2285960 - RNA, 19 nt, Homo sapiens
  misc_RNA (1)...(19): siRNA sense strand
cccaagugaaggagcggua

SEQ ID NO: 2285961 - RNA, 19 nt, Homo sapiens
  misc_RNA (1)...(19): siRNA sense strand
cuauggagcaauacaaaga

SEQ ID NO: 2285962 - RNA, 19 nt, Homo sapiens
  misc_RNA (1)...(19): siRNA sense strand
ugaucugggccgagagcuu

SEQ ID NO: 2285963 - RNA, 19 nt, Homo sapiens
  misc_RNA (1)...(19): siRNA sense strand
cugaaaaggaugaaaggga

SEQ ID NO: 2285964 - RNA, 19 nt, Homo sapiens
  misc_RNA (1)...(19): siRNA sense strand
gcucguacaaccagcaaga

SEQ ID NO: 2285965 - RNA, 19 nt, Homo sapiens
  misc_RNA (1)...(19): siRNA sense strand
cugacagugauuugcauaa

SEQ ID NO: 2285966 - RNA, 19 nt, Homo sapiens
  misc_RNA (1)...(19): siRNA sense strand
aucaaacagcugcgggaaa

SEQ ID NO: 2285967 - RNA, 19 nt, Homo sapiens
  misc_RNA (1)...(19): siRNA sense strand
cgaagacagcaggaagaaa

SEQ ID NO: 2285968 - RNA, 19 nt, Homo sapiens
  misc_RNA (1)...(19): siRNA sense strand
guuccagaagccaaaguaa

SEQ ID NO: 2285969 - RNA, 19 nt, Homo sapiens
  misc_RNA (1)...(19): siRNA sense strand
ugaaagaaguguuugcauc

SEQ ID NO: 2285970 - RNA, 19 nt, Homo sapiens
  misc_RNA (1)...(19): siRNA sense strand
gcaucaaacagcugcggga

SEQ ID NO: 2285971 - RNA, 19 nt, Homo sapiens
  misc_RNA (1)...(19): siRNA sense strand
ucccaaaguuagagcaauc

SEQ ID NO: 2285972 - RNA, 19 nt, Homo sapiens
  misc_RNA (1)...(19): siRNA sense strand
aguuagagcaauccagaga

SEQ ID NO: 2285973 - RNA, 19 nt, Homo sapiens
  misc_RNA (1)...(19): siRNA sense strand
ugagcaaaaucuagaugaa

SEQ ID NO: 2285974 - RNA, 19 nt, Homo sapiens
  misc_RNA (1)...(19): siRNA sense strand
gucuugaucuucagagaga

SEQ ID NO: 2285975 - RNA, 19 nt, Homo sapiens
  misc_RNA (1)...(19): siRNA sense strand
guucccaaaguuagagcaa

SEQ ID NO: 2285976 - RNA, 19 nt, Homo sapiens
  misc_RNA (1)...(19): siRNA sense strand
gcacauucuucaaaguacu

SEQ ID NO: 2285977 - RNA, 19 nt, Homo sapiens
  misc_RNA (1)...(19): siRNA sense strand
uaauugaugcacaggaaaa

SEQ ID NO: 2285978 - RNA, 19 nt, Homo sapiens
  misc_RNA (1)...(19): siRNA sense strand
guacaaccagcaagaccaa

SEQ ID NO: 2285979 - RNA, 19 nt, Homo sapiens
  misc_RNA (1)...(19): siRNA sense strand
caaaggaaagacaggagga

SEQ ID NO: 2285980 - RNA, 19 nt, Homo sapiens
  misc_RNA (1)...(19): siRNA sense strand
ccugaaccguggcaagcaa

SEQ ID NO: 2285981 - RNA, 19 nt, Homo sapiens
  misc_RNA (1)...(19): siRNA sense strand
gaauaauuauguagggcua

SEQ ID NO: 2285982 - RNA, 19 nt, Homo sapiens
  misc_RNA (1)...(19): siRNA sense strand
caguaauuagugugagaaa

SEQ ID NO: 2285983 - RNA, 19 nt, Homo sapiens
  misc_RNA (1)...(19): siRNA sense strand
uggaagaggaacugaagaa

SEQ ID NO: 2285984 - RNA, 19 nt, Homo sapiens
  misc_RNA (1)...(19): siRNA sense strand
gaccaguacaucagagaaa

SEQ ID NO: 2285985 - RNA, 19 nt, Homo sapiens
  misc_RNA (1)...(19): siRNA sense strand
augaagaggauguggaaga

SEQ ID NO: 2285986 - RNA, 19 nt, Homo sapiens
  misc_RNA (1)...(19): siRNA sense strand
uggaagaaacugagcaaaa

SEQ ID NO: 2285987 - RNA, 19 nt, Homo sapiens
  misc_RNA (1)...(19): siRNA sense strand
gaaaaggaugaaagggaaa

SEQ ID NO: 2285988 - RNA, 19 nt, Homo sapiens
  misc_RNA (1)...(19): siRNA sense strand
ggcuaauggcuguggaaga

SEQ ID NO: 2285989 - RNA, 19 nt, Homo sapiens
  misc_RNA (1)...(19): siRNA sense strand
ggaucuugguagaggggaa

SEQ ID NO: 2285990 - RNA, 19 nt, Homo sapiens
  misc_RNA (1)...(19): siRNA sense strand
agaccaaagcagacaauau

SEQ ID NO: 2285991 - RNA, 19 nt, Homo sapiens
  misc_RNA (1)...(19): siRNA sense strand
caccaaauccauugaggaa

SEQ ID NO: 2285992 - RNA, 19 nt, Homo sapiens
  misc_RNA (1)...(19): siRNA sense strand
aaagauagccagaugaaaa

SEQ ID NO: 2285993 - RNA, 19 nt, Homo sapiens
  misc_RNA (1)...(19): siRNA sense strand
ggaucguuguggagagcau

SEQ ID NO: 2285994 - RNA, 19 nt, Homo sapiens
  misc_RNA (1)...(19): siRNA sense strand
cagcuacuucagagggaaa

SEQ ID NO: 2285995 - RNA, 19 nt, Homo sapiens
  misc_RNA (1)...(19): siRNA sense strand
gagacaaguggauggaaaa

SEQ ID NO: 2285996 - RNA, 19 nt, Homo sapiens
  misc_RNA (1)...(19): siRNA sense strand
gccaguaauuagugugaga

SEQ ID NO: 2285997 - RNA, 19 nt, Homo sapiens
  misc_RNA (1)...(19): siRNA sense strand
guuaggugcccgagccaaa

SEQ ID NO: 2285998 - RNA, 19 nt, Homo sapiens
  misc_RNA (1)...(19): siRNA sense strand
aagcaagacaucagcgaga

SEQ ID NO: 2285999 - RNA, 19 nt, Homo sapiens
  misc_RNA (1)...(19): siRNA sense strand
uugguaacaaagaggaaua

SEQ ID NO: 2286000 - RNA, 19 nt, Homo sapiens
  misc_RNA (1)...(19): siRNA sense strand
ugaaaaggaugaaagggaa

SEQ ID NO: 2286001 - RNA, 19 nt, Homo sapiens
  misc_RNA (1)...(19): siRNA sense strand
gagaaguaugaacaagaaa

SEQ ID NO: 2286002 - RNA, 19 nt, Homo sapiens
  misc_RNA (1)...(19): siRNA sense strand
ugagaaauaaagaggaguu

SEQ ID NO: 2286003 - RNA, 19 nt, Homo sapiens
  misc_RNA (1)...(19): siRNA sense strand
aagcaguuauugaugcaaa

SEQ ID NO: 2286004 - RNA, 19 nt, Homo sapiens
  misc_RNA (1)...(19): siRNA sense strand
gaugcaaagcagaaaauaa

SEQ ID NO: 2286005 - RNA, 19 nt, Homo sapiens
  misc_RNA (1)...(19): siRNA sense strand
uuuacaaggauguggaaaa

SEQ ID NO: 2286006 - RNA, 19 nt, Homo sapiens
  misc_RNA (1)...(19): siRNA sense strand
aaacauuauugcugguuca

SEQ ID NO: 2286007 - RNA, 19 nt, Homo sapiens
  misc_RNA (1)...(19): siRNA sense strand
aggacaacacagacagcua

SEQ ID NO: 2286008 - RNA, 19 nt, Homo sapiens
  misc_RNA (1)...(19): siRNA sense strand
ccuucaaaguaccaggauu

SEQ ID NO: 2286009 - RNA, 19 nt, Homo sapiens
  misc_RNA (1)...(19): siRNA sense strand
cagaauuugucaccagcaa

SEQ ID NO: 2286010 - RNA, 19 nt, Homo sapiens
  misc_RNA (1)...(19): siRNA sense strand
ggaaccuguaucagugaaa

SEQ ID NO: 2286011 - RNA, 19 nt, Homo sapiens
  misc_RNA (1)...(19): siRNA sense strand
ggaccuucuauucggauua

SEQ ID NO: 2286012 - RNA, 19 nt, Homo sapiens
  misc_RNA (1)...(19): siRNA sense strand
guaacaaagaggaauacau

SEQ ID NO: 2286013 - RNA, 19 nt, Homo sapiens
  misc_RNA (1)...(19): siRNA sense strand
guaugaagaggauguggaa

SEQ ID NO: 2286014 - RNA, 19 nt, Homo sapiens
  misc_RNA (1)...(19): siRNA sense strand
uggccgaaccugugcagaa

SEQ ID NO: 2286015 - RNA, 19 nt, Homo sapiens
  misc_RNA (1)...(19): siRNA sense strand
cuucaaaguaccaggauuc

SEQ ID NO: 2286016 - RNA, 19 nt, Homo sapiens
  misc_RNA (1)...(19): siRNA sense strand
aggaaagacaggaggaccu

SEQ ID NO: 2286017 - RNA, 19 nt, Homo sapiens
  misc_RNA (1)...(19): siRNA sense strand
uguaugaguccgaugagaa

SEQ ID NO: 2286018 - RNA, 19 nt, Homo sapiens
  misc_RNA (1)...(19): siRNA sense strand
cugagaaguaugaacaaga

SEQ ID NO: 2286019 - RNA, 19 nt, Homo sapiens
  misc_RNA (1)...(19): siRNA sense strand
cagcaauagcagcauggaa

SEQ ID NO: 2286020 - RNA, 19 nt, Homo sapiens
  misc_RNA (1)...(19): siRNA sense strand
uguggaagaaacugagcaa

SEQ ID NO: 2286021 - RNA, 19 nt, Homo sapiens
  misc_RNA (1)...(19): siRNA sense strand
accucaaguuggugggaca

SEQ ID NO: 2286022 - RNA, 19 nt, Homo sapiens
  misc_RNA (1)...(19): siRNA sense strand
ccuaauggucggagcgucu

SEQ ID NO: 2286023 - RNA, 19 nt, Homo sapiens
  misc_RNA (1)...(19): siRNA sense strand
ccuauacgcuugaccggaa

SEQ ID NO: 2286024 - RNA, 19 nt, Homo sapiens
  misc_RNA (1)...(19): siRNA sense strand
ggaccaaaagccagucaaa

SEQ ID NO: 2286025 - RNA, 19 nt, Homo sapiens
  misc_RNA (1)...(19): siRNA sense strand
ucuucaaaguacuggcaga

SEQ ID NO: 2286026 - RNA, 19 nt, Homo sapiens
  misc_RNA (1)...(19): siRNA sense strand
ccucauuauuucuccguuu

SEQ ID NO: 2286027 - RNA, 19 nt, Homo sapiens
  misc_RNA (1)...(19): siRNA sense strand
cccaagugaaggagcggua

SEQ ID NO: 2286028 - RNA, 19 nt, Homo sapiens
  misc_RNA (1)...(19): siRNA sense strand
cuauggagcaauacaaaga

SEQ ID NO: 2286029 - RNA, 19 nt, Homo sapiens
  misc_RNA (1)...(19): siRNA sense strand
ugaucugggccgagagcuu

SEQ ID NO: 2286030 - RNA, 19 nt, Homo sapiens
  misc_RNA (1)...(19): siRNA sense strand
cugaaaaggaugaaaggga

SEQ ID NO: 2286031 - RNA, 19 nt, Homo sapiens
  misc_RNA (1)...(19): siRNA sense strand
gcucguacaaccagcaaga

SEQ ID NO: 2286032 - RNA, 19 nt, Homo sapiens
  misc_RNA (1)...(19): siRNA sense strand
cugacagugauuugcauaa

SEQ ID NO: 2286033 - RNA, 19 nt, Homo sapiens
  misc_RNA (1)...(19): siRNA sense strand
aucaaacagcugcgggaaa

SEQ ID NO: 2286034 - RNA, 19 nt, Homo sapiens
  misc_RNA (1)...(19): siRNA sense strand
cgaagacagcaggaagaaa

SEQ ID NO: 2286035 - RNA, 19 nt, Homo sapiens
  misc_RNA (1)...(19): siRNA sense strand
guuccagaagccaaaguaa

SEQ ID NO: 2286036 - RNA, 19 nt, Homo sapiens
  misc_RNA (1)...(19): siRNA sense strand
ugaaagaaguguuugcauc

SEQ ID NO: 2286037 - RNA, 19 nt, Homo sapiens
  misc_RNA (1)...(19): siRNA sense strand
gcaucaaacagcugcggga

SEQ ID NO: 2286038 - RNA, 19 nt, Homo sapiens
  misc_RNA (1)...(19): siRNA sense strand
ucccaaaguuagagcaauc

SEQ ID NO: 2286039 - RNA, 19 nt, Homo sapiens
  misc_RNA (1)...(19): siRNA sense strand
aguuagagcaauccagaga

SEQ ID NO: 2286040 - RNA, 19 nt, Homo sapiens
  misc_RNA (1)...(19): siRNA sense strand
ugagcaaaaucuagaugaa

SEQ ID NO: 2286041 - RNA, 19 nt, Homo sapiens
  misc_RNA (1)...(19): siRNA sense strand
gucuugaucuucagagaga

SEQ ID NO: 2286042 - RNA, 19 nt, Homo sapiens
  misc_RNA (1)...(19): siRNA sense strand
guucccaaaguuagagcaa

SEQ ID NO: 2286043 - RNA, 19 nt, Homo sapiens
  misc_RNA (1)...(19): siRNA sense strand
gcacauucuucaaaguacu

SEQ ID NO: 2286044 - RNA, 19 nt, Homo sapiens
  misc_RNA (1)...(19): siRNA sense strand
uaauugaugcacaggaaaa

SEQ ID NO: 2286045 - RNA, 19 nt, Homo sapiens
  misc_RNA (1)...(19): siRNA sense strand
guacaaccagcaagaccaa

SEQ ID NO: 2286046 - RNA, 19 nt, Homo sapiens
  misc_RNA (1)...(19): siRNA sense strand
caaaggaaagacaggagga

SEQ ID NO: 2286047 - RNA, 19 nt, Homo sapiens
  misc_RNA (1)...(19): siRNA sense strand
ccugaaccguggcaagcaa

SEQ ID NO: 2286048 - RNA, 19 nt, Homo sapiens
  misc_RNA (1)...(19): siRNA sense strand
ccaaaagauguguggguau

SEQ ID NO: 2286049 - RNA, 19 nt, Homo sapiens
  misc_RNA (1)...(19): siRNA sense strand
gguuggaggucgugagcug

SEQ ID NO: 2286050 - RNA, 19 nt, Homo sapiens
  misc_RNA (1)...(19): siRNA sense strand
ggauggagaaagaagagga

SEQ ID NO: 2286051 - RNA, 19 nt, Homo sapiens
  misc_RNA (1)...(19): siRNA sense strand
ccgcugggucugggagaaa

SEQ ID NO: 2286052 - RNA, 19 nt, Homo sapiens
  misc_RNA (1)...(19): siRNA sense strand
aguuacaccuccagagcca

SEQ ID NO: 2286053 - RNA, 19 nt, Homo sapiens
  misc_RNA (1)...(19): siRNA sense strand
uggaaguggaggagaugga

SEQ ID NO: 2286054 - RNA, 19 nt, Homo sapiens
  misc_RNA (1)...(19): siRNA sense strand
gcaugaaugugaguggcaa

SEQ ID NO: 2286055 - RNA, 19 nt, Homo sapiens
  misc_RNA (1)...(19): siRNA sense strand
gaguuggacccuugggcga

SEQ ID NO: 2286056 - RNA, 19 nt, Homo sapiens
  misc_RNA (1)...(19): siRNA sense strand
gaaauuaauuggagaggug

SEQ ID NO: 2286057 - RNA, 19 nt, Homo sapiens
  misc_RNA (1)...(19): siRNA sense strand
ucaggaugaugcugggcaa

SEQ ID NO: 2286058 - RNA, 19 nt, Homo sapiens
  misc_RNA (1)...(19): siRNA sense strand
aagcgagagaaaaggaaaa

SEQ ID NO: 2286059 - RNA, 19 nt, Homo sapiens
  misc_RNA (1)...(19): siRNA sense strand
cuuaauggaaauggcgaua

SEQ ID NO: 2286060 - RNA, 19 nt, Homo sapiens
  misc_RNA (1)...(19): siRNA sense strand
ccuuaauggaaauggcgau

SEQ ID NO: 2286061 - RNA, 19 nt, Homo sapiens
  misc_RNA (1)...(19): siRNA sense strand
gaaauuaauuggagaggug

SEQ ID NO: 2286062 - RNA, 19 nt, Homo sapiens
  misc_RNA (1)...(19): siRNA sense strand
ucaggaugaugcugggcaa

SEQ ID NO: 2286063 - RNA, 19 nt, Homo sapiens
  misc_RNA (1)...(19): siRNA sense strand
cuuaauggaaauggcgaua

SEQ ID NO: 2286064 - RNA, 19 nt, Homo sapiens
  misc_RNA (1)...(19): siRNA sense strand
ccuuaauggaaauggcgau

SEQ ID NO: 2286065 - RNA, 19 nt, Homo sapiens
  misc_RNA (1)...(19): siRNA sense strand
gaaauuaauuggagaggug

SEQ ID NO: 2286066 - RNA, 19 nt, Homo sapiens
  misc_RNA (1)...(19): siRNA sense strand
ucaggaugaugcugggcaa

SEQ ID NO: 2286067 - RNA, 19 nt, Homo sapiens
  misc_RNA (1)...(19): siRNA sense strand
aagcgagagaaaaggaaaa

SEQ ID NO: 2286068 - RNA, 19 nt, Homo sapiens
  misc_RNA (1)...(19): siRNA sense strand
cuuaauggaaauggcgaua

SEQ ID NO: 2286069 - RNA, 19 nt, Homo sapiens
  misc_RNA (1)...(19): siRNA sense strand
ccuuaauggaaauggcgau

SEQ ID NO: 2286070 - RNA, 19 nt, Homo sapiens
  misc_RNA (1)...(19): siRNA sense strand
uggaaaaguuggagauuua

SEQ ID NO: 2286071 - RNA, 19 nt, Homo sapiens
  misc_RNA (1)...(19): siRNA sense strand
acaucagacuacagaguua

SEQ ID NO: 2286072 - RNA, 19 nt, Homo sapiens
  misc_RNA (1)...(19): siRNA sense strand
ucagaaacccagaggagaa

SEQ ID NO: 2286073 - RNA, 19 nt, Homo sapiens
  misc_RNA (1)...(19): siRNA sense strand
ggaaggagcugcagaggca

SEQ ID NO: 2286074 - RNA, 19 nt, Homo sapiens
  misc_RNA (1)...(19): siRNA sense strand
caggagaagcucugacaaa

SEQ ID NO: 2286075 - RNA, 19 nt, Homo sapiens
  misc_RNA (1)...(19): siRNA sense strand
ggcaaaugguugaucuaaa

SEQ ID NO: 2286076 - RNA, 19 nt, Homo sapiens
  misc_RNA (1)...(19): siRNA sense strand
cugagaaacaacugcaaua

SEQ ID NO: 2286077 - RNA, 19 nt, Homo sapiens
  misc_RNA (1)...(19): siRNA sense strand
ccucagagcaaaagauaaa

SEQ ID NO: 2286078 - RNA, 19 nt, Homo sapiens
  misc_RNA (1)...(19): siRNA sense strand
gcuuagaugacaaggaaga

SEQ ID NO: 2286079 - RNA, 19 nt, Homo sapiens
  misc_RNA (1)...(19): siRNA sense strand
cuucaaagguaucagaaaa

SEQ ID NO: 2286080 - RNA, 19 nt, Homo sapiens
  misc_RNA (1)...(19): siRNA sense strand
caaugaauacugagaaaca

SEQ ID NO: 2286081 - RNA, 19 nt, Homo sapiens
  misc_RNA (1)...(19): siRNA sense strand
aaaggauggcuaagagaua

SEQ ID NO: 2286082 - RNA, 19 nt, Homo sapiens
  misc_RNA (1)...(19): siRNA sense strand
caaagguggaugugaggaa

SEQ ID NO: 2286083 - RNA, 19 nt, Homo sapiens
  misc_RNA (1)...(19): siRNA sense strand
agaaugaucugaaaggcaa

SEQ ID NO: 2286084 - RNA, 19 nt, Homo sapiens
  misc_RNA (1)...(19): siRNA sense strand
augaagggcaguaaagaua

SEQ ID NO: 2286085 - RNA, 19 nt, Homo sapiens
  misc_RNA (1)...(19): siRNA sense strand
aggaagaguuugcugauau

SEQ ID NO: 2286086 - RNA, 19 nt, Homo sapiens
  misc_RNA (1)...(19): siRNA sense strand
aaacgaaccaucagagauu

SEQ ID NO: 2286087 - RNA, 19 nt, Homo sapiens
  misc_RNA (1)...(19): siRNA sense strand
uaacaaagcuucugccuca

SEQ ID NO: 2286088 - RNA, 19 nt, Homo sapiens
  misc_RNA (1)...(19): siRNA sense strand
uguaaagcacuuauggaua

SEQ ID NO: 2286089 - RNA, 19 nt, Homo sapiens
  misc_RNA (1)...(19): siRNA sense strand
aggagaaaguguuggagca

SEQ ID NO: 2286090 - RNA, 19 nt, Homo sapiens
  misc_RNA (1)...(19): siRNA sense strand
cuugaagcuuggagagaca

SEQ ID NO: 2286091 - RNA, 19 nt, Homo sapiens
  misc_RNA (1)...(19): siRNA sense strand
gauauaaguagcagugaga

SEQ ID NO: 2286092 - RNA, 19 nt, Homo sapiens
  misc_RNA (1)...(19): siRNA sense strand
agguugaagcuuugaagaa

SEQ ID NO: 2286093 - RNA, 19 nt, Homo sapiens
  misc_RNA (1)...(19): siRNA sense strand
cuacaaaagaagaugggaa

SEQ ID NO: 2286094 - RNA, 19 nt, Homo sapiens
  misc_RNA (1)...(19): siRNA sense strand
aaacagucacaaagcgaaa

SEQ ID NO: 2286095 - RNA, 19 nt, Homo sapiens
  misc_RNA (1)...(19): siRNA sense strand
cuucaaagcaguucccaaa

SEQ ID NO: 2286096 - RNA, 19 nt, Homo sapiens
  misc_RNA (1)...(19): siRNA sense strand
aagcaggacugaaggacau

SEQ ID NO: 2286097 - RNA, 19 nt, Homo sapiens
  misc_RNA (1)...(19): siRNA sense strand
gcagcaagcgaaaggaaga

SEQ ID NO: 2286098 - RNA, 19 nt, Homo sapiens
  misc_RNA (1)...(19): siRNA sense strand
gggaaaggaaucugagacu

SEQ ID NO: 2286099 - RNA, 19 nt, Homo sapiens
  misc_RNA (1)...(19): siRNA sense strand
ggauuugcucagugggcua

SEQ ID NO: 2286100 - RNA, 19 nt, Homo sapiens
  misc_RNA (1)...(19): siRNA sense strand
cuguuugggagaagaauua

SEQ ID NO: 2286101 - RNA, 19 nt, Homo sapiens
  misc_RNA (1)...(19): siRNA sense strand
cgaagagcaaccaggcuua

SEQ ID NO: 2286102 - RNA, 19 nt, Homo sapiens
  misc_RNA (1)...(19): siRNA sense strand
gaauauugaugacugggaa

SEQ ID NO: 2286103 - RNA, 19 nt, Homo sapiens
  misc_RNA (1)...(19): siRNA sense strand
gggaaugggaaccuugaaa

SEQ ID NO: 2286104 - RNA, 19 nt, Homo sapiens
  misc_RNA (1)...(19): siRNA sense strand
gguauggcucugaugaaua

SEQ ID NO: 2286105 - RNA, 19 nt, Homo sapiens
  misc_RNA (1)...(19): siRNA sense strand
gcuuauugcaucucacaaa

SEQ ID NO: 2286106 - RNA, 19 nt, Homo sapiens
  misc_RNA (1)...(19): siRNA sense strand
ccaucaaagccgagauacu

SEQ ID NO: 2286107 - RNA, 19 nt, Homo sapiens
  misc_RNA (1)...(19): siRNA sense strand
ggaaagaggcaaaugguug

SEQ ID NO: 2286108 - RNA, 19 nt, Homo sapiens
  misc_RNA (1)...(19): siRNA sense strand
acaccaacuucuugagcuu

SEQ ID NO: 2286109 - RNA, 19 nt, Homo sapiens
  misc_RNA (1)...(19): siRNA sense strand
aggcagugagaguggaauu

SEQ ID NO: 2286110 - RNA, 19 nt, Homo sapiens
  misc_RNA (1)...(19): siRNA sense strand
gcaaaucagccaacagaca

SEQ ID NO: 2286111 - RNA, 19 nt, Homo sapiens
  misc_RNA (1)...(19): siRNA sense strand
ccuuguaaucagagaaguu

SEQ ID NO: 2286112 - RNA, 19 nt, Homo sapiens
  misc_RNA (1)...(19): siRNA sense strand
gcggaugauugcaagucaa

SEQ ID NO: 2286113 - RNA, 19 nt, Homo sapiens
  misc_RNA (1)...(19): siRNA sense strand
ucaaagaacugaaaggaug

SEQ ID NO: 2286114 - RNA, 19 nt, Homo sapiens
  misc_RNA (1)...(19): siRNA sense strand
cgacaaagguggaugugag

SEQ ID NO: 2286115 - RNA, 19 nt, Homo sapiens
  misc_RNA (1)...(19): siRNA sense strand
agccaaaucuaaaguucaa

SEQ ID NO: 2286116 - RNA, 19 nt, Homo sapiens
  misc_RNA (1)...(19): siRNA sense strand
aagcucaucuagugacaua

SEQ ID NO: 2286117 - RNA, 19 nt, Homo sapiens
  misc_RNA (1)...(19): siRNA sense strand
cagaaacugaugcaagaua

SEQ ID NO: 2286118 - RNA, 19 nt, Homo sapiens
  misc_RNA (1)...(19): siRNA sense strand
gagagaagauccaggacac

SEQ ID NO: 2286119 - RNA, 19 nt, Homo sapiens
  misc_RNA (1)...(19): siRNA sense strand
gagcaaaagauaaaacgaa

SEQ ID NO: 2286120 - RNA, 19 nt, Homo sapiens
  misc_RNA (1)...(19): siRNA sense strand
aggaagauauugaaugcuu

SEQ ID NO: 2286121 - RNA, 19 nt, Homo sapiens
  misc_RNA (1)...(19): siRNA sense strand
cagagaaguuggaaugcca

SEQ ID NO: 2286122 - RNA, 19 nt, Homo sapiens
  misc_RNA (1)...(19): siRNA sense strand
aguugaauguagacaguca

SEQ ID NO: 2286123 - RNA, 19 nt, Homo sapiens
  misc_RNA (1)...(19): siRNA sense strand
aaggaaggaacaaugaaua

SEQ ID NO: 2286124 - RNA, 19 nt, Homo sapiens
  misc_RNA (1)...(19): siRNA sense strand
cuucuaaaccuucaugaaa

SEQ ID NO: 2286125 - RNA, 19 nt, Homo sapiens
  misc_RNA (1)...(19): siRNA sense strand
cugaucauguugagcaaau

SEQ ID NO: 2286126 - RNA, 19 nt, Homo sapiens
  misc_RNA (1)...(19): siRNA sense strand
uuaaaugaagccauggaaa

SEQ ID NO: 2286127 - RNA, 19 nt, Homo sapiens
  misc_RNA (1)...(19): siRNA sense strand
uaucaggagcucugggauu

SEQ ID NO: 2286128 - RNA, 19 nt, Homo sapiens
  misc_RNA (1)...(19): siRNA sense strand
ccaaaugaucuccuugaaa

SEQ ID NO: 2286129 - RNA, 19 nt, Homo sapiens
  misc_RNA (1)...(19): siRNA sense strand
ggagagaagauccaggaca

SEQ ID NO: 2286130 - RNA, 19 nt, Homo sapiens
  misc_RNA (1)...(19): siRNA sense strand
cuacagaguuacaaccaga

SEQ ID NO: 2286131 - RNA, 19 nt, Homo sapiens
  misc_RNA (1)...(19): siRNA sense strand
gaucaguggcauugggaua

SEQ ID NO: 2286132 - RNA, 19 nt, Homo sapiens
  misc_RNA (1)...(19): siRNA sense strand
ugggauaacauaagagaaa

SEQ ID NO: 2286133 - RNA, 19 nt, Homo sapiens
  misc_RNA (1)...(19): siRNA sense strand
ggagauuaccuuacggaaa

SEQ ID NO: 2286134 - RNA, 19 nt, Homo sapiens
  misc_RNA (1)...(19): siRNA sense strand
cagaaagaacugaaugaaa

SEQ ID NO: 2286135 - RNA, 19 nt, Homo sapiens
  misc_RNA (1)...(19): siRNA sense strand
ccaaugaaggagaaaguaa

SEQ ID NO: 2286136 - RNA, 19 nt, Homo sapiens
  misc_RNA (1)...(19): siRNA sense strand
caguaaagacagugacauu

SEQ ID NO: 2286137 - RNA, 19 nt, Homo sapiens
  misc_RNA (1)...(19): siRNA sense strand
ccaaagaggaacuggaaca

SEQ ID NO: 2286138 - RNA, 19 nt, Homo sapiens
  misc_RNA (1)...(19): siRNA sense strand
aagaagaagcugaacauaa

SEQ ID NO: 2286139 - RNA, 19 nt, Homo sapiens
  misc_RNA (1)...(19): siRNA sense strand
ccaucaacguggagagcuu

SEQ ID NO: 2286140 - RNA, 19 nt, Homo sapiens
  misc_RNA (1)...(19): siRNA sense strand
gagcagcagaaguggguua

SEQ ID NO: 2286141 - RNA, 19 nt, Homo sapiens
  misc_RNA (1)...(19): siRNA sense strand
ggagaaaagagaaggagaa

SEQ ID NO: 2286142 - RNA, 19 nt, Homo sapiens
  misc_RNA (1)...(19): siRNA sense strand
cgaaaguagaacuggagaa

SEQ ID NO: 2286143 - RNA, 19 nt, Homo sapiens
  misc_RNA (1)...(19): siRNA sense strand
cgaaacaacacuaagaaau

SEQ ID NO: 2286144 - RNA, 19 nt, Homo sapiens
  misc_RNA (1)...(19): siRNA sense strand
aagagaaggagaauagaaa

SEQ ID NO: 2286145 - RNA, 19 nt, Homo sapiens
  misc_RNA (1)...(19): siRNA sense strand
ugacagugaacaagauaaa

SEQ ID NO: 2286146 - RNA, 19 nt, Homo sapiens
  misc_RNA (1)...(19): siRNA sense strand
agaugaaggcagaagacua

SEQ ID NO: 2286147 - RNA, 19 nt, Homo sapiens
  misc_RNA (1)...(19): siRNA sense strand
ggaagaaaucagacagcau

SEQ ID NO: 2286148 - RNA, 19 nt, Homo sapiens
  misc_RNA (1)...(19): siRNA sense strand
caaugaagauacagcaaaa

SEQ ID NO: 2286149 - RNA, 19 nt, Homo sapiens
  misc_RNA (1)...(19): siRNA sense strand
cuacagaagagcagcagaa

SEQ ID NO: 2286150 - RNA, 19 nt, Homo sapiens
  misc_RNA (1)...(19): siRNA sense strand
caguauaggcaguggacca

SEQ ID NO: 2286151 - RNA, 19 nt, Homo sapiens
  misc_RNA (1)...(19): siRNA sense strand
gaugcaagccaaagaggaa

SEQ ID NO: 2286152 - RNA, 19 nt, Homo sapiens
  misc_RNA (1)...(19): siRNA sense strand
cagcaaaggagcuagaaga

SEQ ID NO: 2286153 - RNA, 19 nt, Homo sapiens
  misc_RNA (1)...(19): siRNA sense strand
gagccuagaacaagaagaa

SEQ ID NO: 2286154 - RNA, 19 nt, Homo sapiens
  misc_RNA (1)...(19): siRNA sense strand
aaucagaagccaugaaaga

SEQ ID NO: 2286155 - RNA, 19 nt, Homo sapiens
  misc_RNA (1)...(19): siRNA sense strand
aaacaggaacuuacggaaa

SEQ ID NO: 2286156 - RNA, 19 nt, Homo sapiens
  misc_RNA (1)...(19): siRNA sense strand
caaucuugcaaaugagaaa

SEQ ID NO: 2286157 - RNA, 19 nt, Homo sapiens
  misc_RNA (1)...(19): siRNA sense strand
ugacauugaagaugacaaa

SEQ ID NO: 2286158 - RNA, 19 nt, Homo sapiens
  misc_RNA (1)...(19): siRNA sense strand
gcaaugagaugcaagccaa

SEQ ID NO: 2286159 - RNA, 19 nt, Homo sapiens
  misc_RNA (1)...(19): siRNA sense strand
gggaagaaagagauauuau

SEQ ID NO: 2286160 - RNA, 19 nt, Homo sapiens
  misc_RNA (1)...(19): siRNA sense strand
agacaguuagaaagagaaa

SEQ ID NO: 2286161 - RNA, 19 nt, Homo sapiens
  misc_RNA (1)...(19): siRNA sense strand
cggcaaagaaucuguuauu

SEQ ID NO: 2286162 - RNA, 19 nt, Homo sapiens
  misc_RNA (1)...(19): siRNA sense strand
ucagaagccaugaaagaaa

SEQ ID NO: 2286163 - RNA, 19 nt, Homo sapiens
  misc_RNA (1)...(19): siRNA sense strand
aagaauugcagcagaagaa

SEQ ID NO: 2286164 - RNA, 19 nt, Homo sapiens
  misc_RNA (1)...(19): siRNA sense strand
augcagaauaucagaggaa

SEQ ID NO: 2286165 - RNA, 19 nt, Homo sapiens
  misc_RNA (1)...(19): siRNA sense strand
agguagaauauguggccua

SEQ ID NO: 2286166 - RNA, 19 nt, Homo sapiens
  misc_RNA (1)...(19): siRNA sense strand
ggagaaaguaagaaggaac

SEQ ID NO: 2286167 - RNA, 19 nt, Homo sapiens
  misc_RNA (1)...(19): siRNA sense strand
gagaaaguaagaaggaaca

SEQ ID NO: 2286168 - RNA, 19 nt, Homo sapiens
  misc_RNA (1)...(19): siRNA sense strand
gcuuaaagaagaaugugaa

SEQ ID NO: 2286169 - RNA, 19 nt, Homo sapiens
  misc_RNA (1)...(19): siRNA sense strand
caaaggagcuagaagagga

SEQ ID NO: 2286170 - RNA, 19 nt, Homo sapiens
  misc_RNA (1)...(19): siRNA sense strand
gguaaagaauugcagcaga

SEQ ID NO: 2286171 - RNA, 19 nt, Homo sapiens
  misc_RNA (1)...(19): siRNA sense strand
cccugaagaugcagaaauu

SEQ ID NO: 2286172 - RNA, 19 nt, Homo sapiens
  misc_RNA (1)...(19): siRNA sense strand
ugaaucaacuccagagaca

SEQ ID NO: 2286173 - RNA, 19 nt, Homo sapiens
  misc_RNA (1)...(19): siRNA sense strand
gaucaugaaucgaaaagaa

SEQ ID NO: 2286174 - RNA, 19 nt, Homo sapiens
  misc_RNA (1)...(19): siRNA sense strand
acaaauagcugaagagagc

SEQ ID NO: 2286175 - RNA, 19 nt, Homo sapiens
  misc_RNA (1)...(19): siRNA sense strand
ggagguacgacuugggaga

SEQ ID NO: 2286176 - RNA, 19 nt, Homo sapiens
  misc_RNA (1)...(19): siRNA sense strand
aaucugaacgugagaaauu

SEQ ID NO: 2286177 - RNA, 19 nt, Homo sapiens
  misc_RNA (1)...(19): siRNA sense strand
agaugacauuggacaguaa

SEQ ID NO: 2286178 - RNA, 19 nt, Homo sapiens
  misc_RNA (1)...(19): siRNA sense strand
ggauucacuuguaggaaca

SEQ ID NO: 2286179 - RNA, 19 nt, Homo sapiens
  misc_RNA (1)...(19): siRNA sense strand
acucagaagcgcugccuua

SEQ ID NO: 2286180 - RNA, 19 nt, Homo sapiens
  misc_RNA (1)...(19): siRNA sense strand
gcuauuaacagaaagaaca

SEQ ID NO: 2286181 - RNA, 19 nt, Homo sapiens
  misc_RNA (1)...(19): siRNA sense strand
cagcaaaaccagucuauua

SEQ ID NO: 2286182 - RNA, 19 nt, Homo sapiens
  misc_RNA (1)...(19): siRNA sense strand
guuaauacucgccuagaaa

SEQ ID NO: 2286183 - RNA, 19 nt, Homo sapiens
  misc_RNA (1)...(19): siRNA sense strand
uggccuagaagaagauuua

SEQ ID NO: 2286184 - RNA, 19 nt, Homo sapiens
  misc_RNA (1)...(19): siRNA sense strand
ugaaugaaaugcaggcaca

SEQ ID NO: 2286185 - RNA, 19 nt, Homo sapiens
  misc_RNA (1)...(19): siRNA sense strand
aggcaucgcagaagguuua

SEQ ID NO: 2286186 - RNA, 19 nt, Homo sapiens
  misc_RNA (1)...(19): siRNA sense strand
uguacaugguaauggagua

SEQ ID NO: 2286187 - RNA, 19 nt, Homo sapiens
  misc_RNA (1)...(19): siRNA sense strand
guaggaacauauagcaaaa

SEQ ID NO: 2286188 - RNA, 19 nt, Homo sapiens
  misc_RNA (1)...(19): siRNA sense strand
aagaaauuuggauggguua

SEQ ID NO: 2286189 - RNA, 19 nt, Homo sapiens
  misc_RNA (1)...(19): siRNA sense strand
cagcagaagaaacaggaau

SEQ ID NO: 2286190 - RNA, 19 nt, Homo sapiens
  misc_RNA (1)...(19): siRNA sense strand
acgaaacaacacuaagaaa

SEQ ID NO: 2286191 - RNA, 19 nt, Homo sapiens
  misc_RNA (1)...(19): siRNA sense strand
agguacgacuugggagaaa

SEQ ID NO: 2286192 - RNA, 19 nt, Homo sapiens
  misc_RNA (1)...(19): siRNA sense strand
ggagaaaugggguggaaga

SEQ ID NO: 2286193 - RNA, 19 nt, Homo sapiens
  misc_RNA (1)...(19): siRNA sense strand
gcagaauaucagaggaaag

SEQ ID NO: 2286194 - RNA, 19 nt, Homo sapiens
  misc_RNA (1)...(19): siRNA sense strand
ugauacagcaguuggaaca

SEQ ID NO: 2286195 - RNA, 19 nt, Homo sapiens
  misc_RNA (1)...(19): siRNA sense strand
gugcaguauuuuggggaaa

SEQ ID NO: 2286196 - RNA, 19 nt, Homo sapiens
  misc_RNA (1)...(19): siRNA sense strand
acuacagggaugugcagua

SEQ ID NO: 2286197 - RNA, 19 nt, Homo sapiens
  misc_RNA (1)...(19): siRNA sense strand
gggaaauugggcugggaac

SEQ ID NO: 2286198 - RNA, 19 nt, Homo sapiens
  misc_RNA (1)...(19): siRNA sense strand
uggauguacugguggagca

SEQ ID NO: 2286199 - RNA, 19 nt, Homo sapiens
  misc_RNA (1)...(19): siRNA sense strand
ugaagagccugauggagga

SEQ ID NO: 2286200 - RNA, 19 nt, Homo sapiens
  misc_RNA (1)...(19): siRNA sense strand
cgauggauguacuggugga

SEQ ID NO: 2286201 - RNA, 19 nt, Homo sapiens
  misc_RNA (1)...(19): siRNA sense strand
gagagguuguguuuggcaa

SEQ ID NO: 2286202 - RNA, 19 nt, Homo sapiens
  misc_RNA (1)...(19): siRNA sense strand
ucauugaagaggaaggcuu

SEQ ID NO: 2286203 - RNA, 19 nt, Homo sapiens
  misc_RNA (1)...(19): siRNA sense strand
gcauuauccccuuuggaaa

SEQ ID NO: 2286204 - RNA, 19 nt, Homo sapiens
  misc_RNA (1)...(19): siRNA sense strand
caaaagugaagaugagcau

SEQ ID NO: 2286205 - RNA, 19 nt, Homo sapiens
  misc_RNA (1)...(19): siRNA sense strand
acauagaagugaauggcau

SEQ ID NO: 2286206 - RNA, 19 nt, Homo sapiens
  misc_RNA (1)...(19): siRNA sense strand
cugugaaugugcugcgcaa

SEQ ID NO: 2286207 - RNA, 19 nt, Homo sapiens
  misc_RNA (1)...(19): siRNA sense strand
cuacaaucaaggagagacu

SEQ ID NO: 2286208 - RNA, 19 nt, Homo sapiens
  misc_RNA (1)...(19): siRNA sense strand
gaguaaguggccacagcaa

SEQ ID NO: 2286209 - RNA, 19 nt, Homo sapiens
  misc_RNA (1)...(19): siRNA sense strand
gcacaggccaagaaagcca

SEQ ID NO: 2286210 - RNA, 19 nt, Homo sapiens
  misc_RNA (1)...(19): siRNA sense strand
acagcaaagaaguggcaca

SEQ ID NO: 2286211 - RNA, 19 nt, Homo sapiens
  misc_RNA (1)...(19): siRNA sense strand
auuauugacaacagggauu

SEQ ID NO: 2286212 - RNA, 19 nt, Homo sapiens
  misc_RNA (1)...(19): siRNA sense strand
caaugaagugggagaaaga

SEQ ID NO: 2286213 - RNA, 19 nt, Homo sapiens
  misc_RNA (1)...(19): siRNA sense strand
ggaccagagcagaagggaa

SEQ ID NO: 2286214 - RNA, 19 nt, Homo sapiens
  misc_RNA (1)...(19): siRNA sense strand
cuuauuagaacgucagaaa

SEQ ID NO: 2286215 - RNA, 19 nt, Homo sapiens
  misc_RNA (1)...(19): siRNA sense strand
ggagaaagaaugugagcgu

SEQ ID NO: 2286216 - RNA, 19 nt, Homo sapiens
  misc_RNA (1)...(19): siRNA sense strand
cuuuaacaguauaggguca

SEQ ID NO: 2286217 - RNA, 19 nt, Homo sapiens
  misc_RNA (1)...(19): siRNA sense strand
gcaaagcagaagagguuga

SEQ ID NO: 2286218 - RNA, 19 nt, Homo sapiens
  misc_RNA (1)...(19): siRNA sense strand
agcuggagaugcagaauaa

SEQ ID NO: 2286219 - RNA, 19 nt, Homo sapiens
  misc_RNA (1)...(19): siRNA sense strand
cuaaacuaauuaaggguga

SEQ ID NO: 2286220 - RNA, 19 nt, Homo sapiens
  misc_RNA (1)...(19): siRNA sense strand
ucuuugauguuguggcuaa

SEQ ID NO: 2286221 - RNA, 19 nt, Homo sapiens
  misc_RNA (1)...(19): siRNA sense strand
gcuggaagugaaagaacua

SEQ ID NO: 2286222 - RNA, 19 nt, Homo sapiens
  misc_RNA (1)...(19): siRNA sense strand
gcugaagauuaugaagaaa

SEQ ID NO: 2286223 - RNA, 19 nt, Homo sapiens
  misc_RNA (1)...(19): siRNA sense strand
aaauagaacgacuggaaaa

SEQ ID NO: 2286224 - RNA, 19 nt, Homo sapiens
  misc_RNA (1)...(19): siRNA sense strand
agucaugagauuugcggaa

SEQ ID NO: 2286225 - RNA, 19 nt, Homo sapiens
  misc_RNA (1)...(19): siRNA sense strand
cugaaacaacugaaggcua

SEQ ID NO: 2286226 - RNA, 19 nt, Homo sapiens
  misc_RNA (1)...(19): siRNA sense strand
acgcacaacccaagcgcaa

SEQ ID NO: 2286227 - RNA, 19 nt, Homo sapiens
  misc_RNA (1)...(19): siRNA sense strand
acgacaaugaagugggaga

SEQ ID NO: 2286228 - RNA, 19 nt, Homo sapiens
  misc_RNA (1)...(19): siRNA sense strand
agaagagguugaugaagau

SEQ ID NO: 2286229 - RNA, 19 nt, Homo sapiens
  misc_RNA (1)...(19): siRNA sense strand
cgacaaugaagugggagaa

SEQ ID NO: 2286230 - RNA, 19 nt, Homo sapiens
  misc_RNA (1)...(19): siRNA sense strand
cgugaagauaagaaccaua

SEQ ID NO: 2286231 - RNA, 19 nt, Homo sapiens
  misc_RNA (1)...(19): siRNA sense strand
aagcagaagagguugauga

SEQ ID NO: 2286232 - RNA, 19 nt, Homo sapiens
  misc_RNA (1)...(19): siRNA sense strand
caggacagaaauuggaaau

SEQ ID NO: 2286233 - RNA, 19 nt, Homo sapiens
  misc_RNA (1)...(19): siRNA sense strand
uggcuaaucccuuggucaa

SEQ ID NO: 2286234 - RNA, 19 nt, Homo sapiens
  misc_RNA (1)...(19): siRNA sense strand
cuaaugacgcuaagaacau

SEQ ID NO: 2286235 - RNA, 19 nt, Homo sapiens
  misc_RNA (1)...(19): siRNA sense strand
gugugagguugaugccuua

SEQ ID NO: 2286236 - RNA, 19 nt, Homo sapiens
  misc_RNA (1)...(19): siRNA sense strand
agacagauggguagaucau

SEQ ID NO: 2286237 - RNA, 19 nt, Homo sapiens
  misc_RNA (1)...(19): siRNA sense strand
agaucuugcuggaagugaa

SEQ ID NO: 2286238 - RNA, 19 nt, Homo sapiens
  misc_RNA (1)...(19): siRNA sense strand
ugauugaagccuuagagaa

SEQ ID NO: 2286239 - RNA, 19 nt, Homo sapiens
  misc_RNA (1)...(19): siRNA sense strand
cuacuaucuaugaggaaga

SEQ ID NO: 2286240 - RNA, 19 nt, Homo sapiens
  misc_RNA (1)...(19): siRNA sense strand
augaagugggagaaagaau

SEQ ID NO: 2286241 - RNA, 19 nt, Homo sapiens
  misc_RNA (1)...(19): siRNA sense strand
aaagagaagcuaugcccaa

SEQ ID NO: 2286242 - RNA, 19 nt, Homo sapiens
  misc_RNA (1)...(19): siRNA sense strand
gcgaaauuuuggauaucaa

SEQ ID NO: 2286243 - RNA, 19 nt, Homo sapiens
  misc_RNA (1)...(19): siRNA sense strand
accagaaacuucagcgaca

SEQ ID NO: 2286244 - RNA, 19 nt, Homo sapiens
  misc_RNA (1)...(19): siRNA sense strand
acauauggugugacgggaa

SEQ ID NO: 2286245 - RNA, 19 nt, Homo sapiens
  misc_RNA (1)...(19): siRNA sense strand
gagacuauaaggagacuca

SEQ ID NO: 2286246 - RNA, 19 nt, Homo sapiens
  misc_RNA (1)...(19): siRNA sense strand
aaaccacaugcaagggaaa

SEQ ID NO: 2286247 - RNA, 19 nt, Homo sapiens
  misc_RNA (1)...(19): siRNA sense strand
gacaaugaagugggagaaa

SEQ ID NO: 2286248 - RNA, 19 nt, Homo sapiens
  misc_RNA (1)...(19): siRNA sense strand
agaaagaaugugagcguag

SEQ ID NO: 2286249 - RNA, 19 nt, Homo sapiens
  misc_RNA (1)...(19): siRNA sense strand
caaggcaauaugugguuua

SEQ ID NO: 2286250 - RNA, 19 nt, Homo sapiens
  misc_RNA (1)...(19): siRNA sense strand
gcaacaggaacuugaaacu

SEQ ID NO: 2286251 - RNA, 19 nt, Homo sapiens
  misc_RNA (1)...(19): siRNA sense strand
cagcuggagaugcagaaua

SEQ ID NO: 2286252 - RNA, 19 nt, Homo sapiens
  misc_RNA (1)...(19): siRNA sense strand
cugaauggaccgauguaga

SEQ ID NO: 2286253 - RNA, 19 nt, Homo sapiens
  misc_RNA (1)...(19): siRNA sense strand
ugaccucauucauggcaaa

SEQ ID NO: 2286254 - RNA, 19 nt, Homo sapiens
  misc_RNA (1)...(19): siRNA sense strand
acaaugucuuacaggaaaa

SEQ ID NO: 2286255 - RNA, 19 nt, Homo sapiens
  misc_RNA (1)...(19): siRNA sense strand
gaucuugcuggaagugaaa

SEQ ID NO: 2286256 - RNA, 19 nt, Homo sapiens
  misc_RNA (1)...(19): siRNA sense strand
gaccagagcagaagggaac

SEQ ID NO: 2286257 - RNA, 19 nt, Homo sapiens
  misc_RNA (1)...(19): siRNA sense strand
acuaaugacgcuaagaaca

SEQ ID NO: 2286258 - RNA, 19 nt, Homo sapiens
  misc_RNA (1)...(19): siRNA sense strand
aggcugaagauuaugaaga

SEQ ID NO: 2286259 - RNA, 19 nt, Homo sapiens
  misc_RNA (1)...(19): siRNA sense strand
agaaguugaaguagcaaga

SEQ ID NO: 2286260 - RNA, 19 nt, Homo sapiens
  misc_RNA (1)...(19): siRNA sense strand
ugaucaagaguguugcaua

SEQ ID NO: 2286261 - RNA, 19 nt, Homo sapiens
  misc_RNA (1)...(19): siRNA sense strand
uagcaaacgacaaguagau

SEQ ID NO: 2286262 - RNA, 19 nt, Homo sapiens
  misc_RNA (1)...(19): siRNA sense strand
gaaccaaauguauggaacu

SEQ ID NO: 2286263 - RNA, 19 nt, Homo sapiens
  misc_RNA (1)...(19): siRNA sense strand
caaugaagugggagaaaga

SEQ ID NO: 2286264 - RNA, 19 nt, Homo sapiens
  misc_RNA (1)...(19): siRNA sense strand
ggaccagagcagaagggaa

SEQ ID NO: 2286265 - RNA, 19 nt, Homo sapiens
  misc_RNA (1)...(19): siRNA sense strand
cuuauuagaacgucagaaa

SEQ ID NO: 2286266 - RNA, 19 nt, Homo sapiens
  misc_RNA (1)...(19): siRNA sense strand
ggagaaagaaugugagcgu

SEQ ID NO: 2286267 - RNA, 19 nt, Homo sapiens
  misc_RNA (1)...(19): siRNA sense strand
cuuuaacaguauaggguca

SEQ ID NO: 2286268 - RNA, 19 nt, Homo sapiens
  misc_RNA (1)...(19): siRNA sense strand
gcaaagcagaagagguuga

SEQ ID NO: 2286269 - RNA, 19 nt, Homo sapiens
  misc_RNA (1)...(19): siRNA sense strand
agcuggagaugcagaauaa

SEQ ID NO: 2286270 - RNA, 19 nt, Homo sapiens
  misc_RNA (1)...(19): siRNA sense strand
cuaaacuaauuaaggguga

SEQ ID NO: 2286271 - RNA, 19 nt, Homo sapiens
  misc_RNA (1)...(19): siRNA sense strand
ucuuugauguuguggcuaa

SEQ ID NO: 2286272 - RNA, 19 nt, Homo sapiens
  misc_RNA (1)...(19): siRNA sense strand
gcuggaagugaaagaacua

SEQ ID NO: 2286273 - RNA, 19 nt, Homo sapiens
  misc_RNA (1)...(19): siRNA sense strand
gcugaagauuaugaagaaa

SEQ ID NO: 2286274 - RNA, 19 nt, Homo sapiens
  misc_RNA (1)...(19): siRNA sense strand
aaauagaacgacuggaaaa

SEQ ID NO: 2286275 - RNA, 19 nt, Homo sapiens
  misc_RNA (1)...(19): siRNA sense strand
agucaugagauuugcggaa

SEQ ID NO: 2286276 - RNA, 19 nt, Homo sapiens
  misc_RNA (1)...(19): siRNA sense strand
cugaaacaacugaaggcua

SEQ ID NO: 2286277 - RNA, 19 nt, Homo sapiens
  misc_RNA (1)...(19): siRNA sense strand
acgcacaacccaagcgcaa

SEQ ID NO: 2286278 - RNA, 19 nt, Homo sapiens
  misc_RNA (1)...(19): siRNA sense strand
acgacaaugaagugggaga

SEQ ID NO: 2286279 - RNA, 19 nt, Homo sapiens
  misc_RNA (1)...(19): siRNA sense strand
agaagagguugaugaagau

SEQ ID NO: 2286280 - RNA, 19 nt, Homo sapiens
  misc_RNA (1)...(19): siRNA sense strand
cgacaaugaagugggagaa

SEQ ID NO: 2286281 - RNA, 19 nt, Homo sapiens
  misc_RNA (1)...(19): siRNA sense strand
cgugaagauaagaaccaua

SEQ ID NO: 2286282 - RNA, 19 nt, Homo sapiens
  misc_RNA (1)...(19): siRNA sense strand
aagcagaagagguugauga

SEQ ID NO: 2286283 - RNA, 19 nt, Homo sapiens
  misc_RNA (1)...(19): siRNA sense strand
caggacagaaauuggaaau

SEQ ID NO: 2286284 - RNA, 19 nt, Homo sapiens
  misc_RNA (1)...(19): siRNA sense strand
uggcuaaucccuuggucaa

SEQ ID NO: 2286285 - RNA, 19 nt, Homo sapiens
  misc_RNA (1)...(19): siRNA sense strand
cuaaugacgcuaagaacau

SEQ ID NO: 2286286 - RNA, 19 nt, Homo sapiens
  misc_RNA (1)...(19): siRNA sense strand
gugugagguugaugccuua

SEQ ID NO: 2286287 - RNA, 19 nt, Homo sapiens
  misc_RNA (1)...(19): siRNA sense strand
agacagauggguagaucau

SEQ ID NO: 2286288 - RNA, 19 nt, Homo sapiens
  misc_RNA (1)...(19): siRNA sense strand
agaucuugcuggaagugaa

SEQ ID NO: 2286289 - RNA, 19 nt, Homo sapiens
  misc_RNA (1)...(19): siRNA sense strand
ugauugaagccuuagagaa

SEQ ID NO: 2286290 - RNA, 19 nt, Homo sapiens
  misc_RNA (1)...(19): siRNA sense strand
cuacuaucuaugaggaaga

SEQ ID NO: 2286291 - RNA, 19 nt, Homo sapiens
  misc_RNA (1)...(19): siRNA sense strand
augaagugggagaaagaau

SEQ ID NO: 2286292 - RNA, 19 nt, Homo sapiens
  misc_RNA (1)...(19): siRNA sense strand
aaagagaagcuaugcccaa

SEQ ID NO: 2286293 - RNA, 19 nt, Homo sapiens
  misc_RNA (1)...(19): siRNA sense strand
gcgaaauuuuggauaucaa

SEQ ID NO: 2286294 - RNA, 19 nt, Homo sapiens
  misc_RNA (1)...(19): siRNA sense strand
accagaaacuucagcgaca

SEQ ID NO: 2286295 - RNA, 19 nt, Homo sapiens
  misc_RNA (1)...(19): siRNA sense strand
acauauggugugacgggaa

SEQ ID NO: 2286296 - RNA, 19 nt, Homo sapiens
  misc_RNA (1)...(19): siRNA sense strand
gagacuauaaggagacuca

SEQ ID NO: 2286297 - RNA, 19 nt, Homo sapiens
  misc_RNA (1)...(19): siRNA sense strand
aaaccacaugcaagggaaa

SEQ ID NO: 2286298 - RNA, 19 nt, Homo sapiens
  misc_RNA (1)...(19): siRNA sense strand
gacaaugaagugggagaaa

SEQ ID NO: 2286299 - RNA, 19 nt, Homo sapiens
  misc_RNA (1)...(19): siRNA sense strand
agaaagaaugugagcguag

SEQ ID NO: 2286300 - RNA, 19 nt, Homo sapiens
  misc_RNA (1)...(19): siRNA sense strand
caaggcaauaugugguuua

SEQ ID NO: 2286301 - RNA, 19 nt, Homo sapiens
  misc_RNA (1)...(19): siRNA sense strand
gcaacaggaacuugaaacu

SEQ ID NO: 2286302 - RNA, 19 nt, Homo sapiens
  misc_RNA (1)...(19): siRNA sense strand
cagcuggagaugcagaaua

SEQ ID NO: 2286303 - RNA, 19 nt, Homo sapiens
  misc_RNA (1)...(19): siRNA sense strand
cugaauggaccgauguaga

SEQ ID NO: 2286304 - RNA, 19 nt, Homo sapiens
  misc_RNA (1)...(19): siRNA sense strand
ugaccucauucauggcaaa

SEQ ID NO: 2286305 - RNA, 19 nt, Homo sapiens
  misc_RNA (1)...(19): siRNA sense strand
acaaugucuuacaggaaaa

SEQ ID NO: 2286306 - RNA, 19 nt, Homo sapiens
  misc_RNA (1)...(19): siRNA sense strand
gaucuugcuggaagugaaa

SEQ ID NO: 2286307 - RNA, 19 nt, Homo sapiens
  misc_RNA (1)...(19): siRNA sense strand
gaccagagcagaagggaac

SEQ ID NO: 2286308 - RNA, 19 nt, Homo sapiens
  misc_RNA (1)...(19): siRNA sense strand
acuaaugacgcuaagaaca

SEQ ID NO: 2286309 - RNA, 19 nt, Homo sapiens
  misc_RNA (1)...(19): siRNA sense strand
aggcugaagauuaugaaga

SEQ ID NO: 2286310 - RNA, 19 nt, Homo sapiens
  misc_RNA (1)...(19): siRNA sense strand
agaaguugaaguagcaaga

SEQ ID NO: 2286311 - RNA, 19 nt, Homo sapiens
  misc_RNA (1)...(19): siRNA sense strand
ugaucaagaguguugcaua

SEQ ID NO: 2286312 - RNA, 19 nt, Homo sapiens
  misc_RNA (1)...(19): siRNA sense strand
uagcaaacgacaaguagau

SEQ ID NO: 2286313 - RNA, 19 nt, Homo sapiens
  misc_RNA (1)...(19): siRNA sense strand
gaaccaaauguauggaacu

SEQ ID NO: 2286314 - RNA, 19 nt, Homo sapiens
  misc_RNA (1)...(19): siRNA sense strand
cugaaaggcagaaggaaaa

SEQ ID NO: 2286315 - RNA, 19 nt, Homo sapiens
  misc_RNA (1)...(19): siRNA sense strand
ccaaaucagaagaaagcaa

SEQ ID NO: 2286316 - RNA, 19 nt, Homo sapiens
  misc_RNA (1)...(19): siRNA sense strand
gugaaucaaaugugagcaa

SEQ ID NO: 2286317 - RNA, 19 nt, Homo sapiens
  misc_RNA (1)...(19): siRNA sense strand
aagaaagaaagcagccaaa

SEQ ID NO: 2286318 - RNA, 19 nt, Homo sapiens
  misc_RNA (1)...(19): siRNA sense strand
ccaaagcacugaagcccaa

SEQ ID NO: 2286319 - RNA, 19 nt, Homo sapiens
  misc_RNA (1)...(19): siRNA sense strand
gaagaaagaaagcagccaa

SEQ ID NO: 2286320 - RNA, 19 nt, Homo sapiens
  misc_RNA (1)...(19): siRNA sense strand
ggaucuaagugaaggcauc

SEQ ID NO: 2286321 - RNA, 19 nt, Homo sapiens
  misc_RNA (1)...(19): siRNA sense strand
ugagaagagaucagcagaa

SEQ ID NO: 2286322 - RNA, 19 nt, Homo sapiens
  misc_RNA (1)...(19): siRNA sense strand
agagauuguagcugaagaa

SEQ ID NO: 2286323 - RNA, 19 nt, Homo sapiens
  misc_RNA (1)...(19): siRNA sense strand
ugauaaugguuuugaggau

SEQ ID NO: 2286324 - RNA, 19 nt, Homo sapiens
  misc_RNA (1)...(19): siRNA sense strand
cucuaauccuugaagaaau

SEQ ID NO: 2286325 - RNA, 19 nt, Homo sapiens
  misc_RNA (1)...(19): siRNA sense strand
ggugaugaggucugugaau

SEQ ID NO: 2286326 - RNA, 19 nt, Homo sapiens
  misc_RNA (1)...(19): siRNA sense strand
gcugaagaaacuaagccaa

SEQ ID NO: 2286327 - RNA, 19 nt, Homo sapiens
  misc_RNA (1)...(19): siRNA sense strand
aggaagaagcugaaauuuu

SEQ ID NO: 2286328 - RNA, 19 nt, Homo sapiens
  misc_RNA (1)...(19): siRNA sense strand
gaucaggcaacaaaggcua

SEQ ID NO: 2286329 - RNA, 19 nt, Homo sapiens
  misc_RNA (1)...(19): siRNA sense strand
cagaagaaagcaaaagaau

SEQ ID NO: 2286330 - RNA, 19 nt, Homo sapiens
  misc_RNA (1)...(19): siRNA sense strand
caauaaaugcugaggaugc

SEQ ID NO: 2286331 - RNA, 19 nt, Homo sapiens
  misc_RNA (1)...(19): siRNA sense strand
aaggcaaaaucuagacuua

SEQ ID NO: 2286332 - RNA, 19 nt, Homo sapiens
  misc_RNA (1)...(19): siRNA sense strand
cuucagaaacagaccauca

SEQ ID NO: 2286333 - RNA, 19 nt, Homo sapiens
  misc_RNA (1)...(19): siRNA sense strand
aguaacaguacccuagaaa

SEQ ID NO: 2286334 - RNA, 19 nt, Homo sapiens
  misc_RNA (1)...(19): siRNA sense strand
acuuaagauucccugcaua

SEQ ID NO: 2286335 - RNA, 19 nt, Homo sapiens
  misc_RNA (1)...(19): siRNA sense strand
gaaagauggugaugagguc

SEQ ID NO: 2286336 - RNA, 19 nt, Homo sapiens
  misc_RNA (1)...(19): siRNA sense strand
uggaaaagacuaugaaagu

SEQ ID NO: 2286337 - RNA, 19 nt, Homo sapiens
  misc_RNA (1)...(19): siRNA sense strand
gggcauucugcuauucaaa

SEQ ID NO: 2286338 - RNA, 19 nt, Homo sapiens
  misc_RNA (1)...(19): siRNA sense strand
augcuuugcuucaagagaa

SEQ ID NO: 2286339 - RNA, 19 nt, Homo sapiens
  misc_RNA (1)...(19): siRNA sense strand
ggaaagauggugaugaggu

SEQ ID NO: 2286340 - RNA, 19 nt, Homo sapiens
  misc_RNA (1)...(19): siRNA sense strand
ugaagaaauugaaacgauc

SEQ ID NO: 2286341 - RNA, 19 nt, Homo sapiens
  misc_RNA (1)...(19): siRNA sense strand
cagugaauuugauguuaca

SEQ ID NO: 2286342 - RNA, 19 nt, Homo sapiens
  misc_RNA (1)...(19): siRNA sense strand
uagaaaacaaggaugagaa

SEQ ID NO: 2286343 - RNA, 19 nt, Homo sapiens
  misc_RNA (1)...(19): siRNA sense strand
aaaugugagcaauagcaua

SEQ ID NO: 2286344 - RNA, 19 nt, Homo sapiens
  misc_RNA (1)...(19): siRNA sense strand
acucuaauccuugaagaaa

SEQ ID NO: 2286345 - RNA, 19 nt, Homo sapiens
  misc_RNA (1)...(19): siRNA sense strand
cugcaauuccagaucaaca

SEQ ID NO: 2286346 - RNA, 19 nt, Homo sapiens
  misc_RNA (1)...(19): siRNA sense strand
aguuuaagauggaaggaaa

SEQ ID NO: 2286347 - RNA, 19 nt, Homo sapiens
  misc_RNA (1)...(19): siRNA sense strand
gaauagaaucaguggagaa

SEQ ID NO: 2286348 - RNA, 19 nt, Homo sapiens
  misc_RNA (1)...(19): siRNA sense strand
agaacaagcuacagagaca

SEQ ID NO: 2286349 - RNA, 19 nt, Homo sapiens
  misc_RNA (1)...(19): siRNA sense strand
gagaaaagaagaagaacaa

SEQ ID NO: 2286350 - RNA, 19 nt, Homo sapiens
  misc_RNA (1)...(19): siRNA sense strand
uguaguuauuggaggauua

SEQ ID NO: 2286351 - RNA, 19 nt, Homo sapiens
  misc_RNA (1)...(19): siRNA sense strand
agaaagaaucuguagagaa

SEQ ID NO: 2286352 - RNA, 19 nt, Homo sapiens
  misc_RNA (1)...(19): siRNA sense strand
ucacaaugccuuagccaaa

SEQ ID NO: 2286353 - RNA, 19 nt, Homo sapiens
  misc_RNA (1)...(19): siRNA sense strand
cagcaagguuaaacagcua

SEQ ID NO: 2286354 - RNA, 19 nt, Homo sapiens
  misc_RNA (1)...(19): siRNA sense strand
gcagaaaggaauggugaaa

SEQ ID NO: 2286355 - RNA, 19 nt, Homo sapiens
  misc_RNA (1)...(19): siRNA sense strand
ugagaaauguaaugcgaau

SEQ ID NO: 2286356 - RNA, 19 nt, Homo sapiens
  misc_RNA (1)...(19): siRNA sense strand
gaguaaacagaaagggaca

SEQ ID NO: 2286357 - RNA, 19 nt, Homo sapiens
  misc_RNA (1)...(19): siRNA sense strand
uugcagaguuagaagaauu

SEQ ID NO: 2286358 - RNA, 19 nt, Homo sapiens
  misc_RNA (1)...(19): siRNA sense strand
aggaaaugcagaagaauca

SEQ ID NO: 2286359 - RNA, 19 nt, Homo sapiens
  misc_RNA (1)...(19): siRNA sense strand
auaacaacccggagagauu

SEQ ID NO: 2286360 - RNA, 19 nt, Homo sapiens
  misc_RNA (1)...(19): siRNA sense strand
uagaaucaguggagaaaca

SEQ ID NO: 2286361 - RNA, 19 nt, Homo sapiens
  misc_RNA (1)...(19): siRNA sense strand
ugaaggaguacuugacaaa

SEQ ID NO: 2286362 - RNA, 19 nt, Homo sapiens
  misc_RNA (1)...(19): siRNA sense strand
acaacaaaucugugaauga

SEQ ID NO: 2286363 - RNA, 19 nt, Homo sapiens
  misc_RNA (1)...(19): siRNA sense strand
caaagaaggcaguggaugu

SEQ ID NO: 2286364 - RNA, 19 nt, Homo sapiens
  misc_RNA (1)...(19): siRNA sense strand
caauagaugcuuaugacaa

SEQ ID NO: 2286365 - RNA, 19 nt, Homo sapiens
  misc_RNA (1)...(19): siRNA sense strand
ugguauaucugcacagcaa

SEQ ID NO: 2286366 - RNA, 19 nt, Homo sapiens
  misc_RNA (1)...(19): siRNA sense strand
uggaauaauuggaguaaac

SEQ ID NO: 2286367 - RNA, 19 nt, Homo sapiens
  misc_RNA (1)...(19): siRNA sense strand
ugagaauggcuguacguaa

SEQ ID NO: 2286368 - RNA, 19 nt, Homo sapiens
  misc_RNA (1)...(19): siRNA sense strand
aggcaacaaucgcuggaaa

SEQ ID NO: 2286369 - RNA, 19 nt, Homo sapiens
  misc_RNA (1)...(19): siRNA sense strand
guuuaagauggaaggaaau

SEQ ID NO: 2286370 - RNA, 19 nt, Homo sapiens
  misc_RNA (1)...(19): siRNA sense strand
guuggaaaguauugugaga

SEQ ID NO: 2286371 - RNA, 19 nt, Homo sapiens
  misc_RNA (1)...(19): siRNA sense strand
guucugaagaugucauaaa

SEQ ID NO: 2286372 - RNA, 19 nt, Homo sapiens
  misc_RNA (1)...(19): siRNA sense strand
gcaaugcagaucagugaaa

SEQ ID NO: 2286373 - RNA, 19 nt, Homo sapiens
  misc_RNA (1)...(19): siRNA sense strand
uguacaugcagaugaauua

SEQ ID NO: 2286374 - RNA, 19 nt, Homo sapiens
  misc_RNA (1)...(19): siRNA sense strand
gcuaaugcaccaaagggaa

SEQ ID NO: 2286375 - RNA, 19 nt, Homo sapiens
  misc_RNA (1)...(19): siRNA sense strand
guacagaaggugaauccaa

SEQ ID NO: 2286376 - RNA, 19 nt, Homo sapiens
  misc_RNA (1)...(19): siRNA sense strand
aguccuauguggagacaga

SEQ ID NO: 2286377 - RNA, 19 nt, Homo sapiens
  misc_RNA (1)...(19): siRNA sense strand
gaguauggaaggagagucu

SEQ ID NO: 2286378 - RNA, 19 nt, Homo sapiens
  misc_RNA (1)...(19): siRNA sense strand
ccauaauuaccaugaugaa

SEQ ID NO: 2286379 - RNA, 19 nt, Homo sapiens
  misc_RNA (1)...(19): siRNA sense strand
gaaacugcauggaggcaca

SEQ ID NO: 2286380 - RNA, 19 nt, Homo sapiens
  misc_RNA (1)...(19): siRNA sense strand
ggauaaauuagaugcuuca

SEQ ID NO: 2286381 - RNA, 19 nt, Homo sapiens
  misc_RNA (1)...(19): siRNA sense strand
ugucaauacuucagcaguu

SEQ ID NO: 2286382 - RNA, 19 nt, Homo sapiens
  misc_RNA (1)...(19): siRNA sense strand
cguaagaaggcucgagagu

SEQ ID NO: 2286383 - RNA, 19 nt, Homo sapiens
  misc_RNA (1)...(19): siRNA sense strand
caggagaauugcugcuuau

SEQ ID NO: 2286384 - RNA, 19 nt, Homo sapiens
  misc_RNA (1)...(19): siRNA sense strand
auauuaaccgccuggauaa

SEQ ID NO: 2286385 - RNA, 19 nt, Homo sapiens
  misc_RNA (1)...(19): siRNA sense strand
ggaucgggcauaugaguuu

SEQ ID NO: 2286386 - RNA, 19 nt, Homo sapiens
  misc_RNA (1)...(19): siRNA sense strand
ugauauucgcacuggcuaa

SEQ ID NO: 2286387 - RNA, 19 nt, Homo sapiens
  misc_RNA (1)...(19): siRNA sense strand
cugauuuggcucugagaau

SEQ ID NO: 2286388 - RNA, 19 nt, Homo sapiens
  misc_RNA (1)...(19): siRNA sense strand
cagaugaauuagaagaacu

SEQ ID NO: 2286389 - RNA, 19 nt, Homo sapiens
  misc_RNA (1)...(19): siRNA sense strand
gauggaaggaaaugcagaa

SEQ ID NO: 2286390 - RNA, 19 nt, Homo sapiens
  misc_RNA (1)...(19): siRNA sense strand
cuaucaggaucguggcuau

SEQ ID NO: 2286391 - RNA, 19 nt, Homo sapiens
  misc_RNA (1)...(19): siRNA sense strand
ugggaaaacucuucagauu

SEQ ID NO: 2286392 - RNA, 19 nt, Homo sapiens
  misc_RNA (1)...(19): siRNA sense strand
cuugaugcucugaagaaua

SEQ ID NO: 2286393 - RNA, 19 nt, Homo sapiens
  misc_RNA (1)...(19): siRNA sense strand
agauauauguacagaaggu

SEQ ID NO: 2286394 - RNA, 19 nt, Homo sapiens
  misc_RNA (1)...(19): siRNA sense strand
cuauggagucugacaaauu

SEQ ID NO: 2286395 - RNA, 19 nt, Homo sapiens
  misc_RNA (1)...(19): siRNA sense strand
guucuggucuagagugaau

SEQ ID NO: 2286396 - RNA, 19 nt, Homo sapiens
  misc_RNA (1)...(19): siRNA sense strand
agaagaagaacaagcuaca

SEQ ID NO: 2286397 - RNA, 19 nt, Homo sapiens
  misc_RNA (1)...(19): siRNA sense strand
guacagaugcaaaacaaaa

SEQ ID NO: 2286398 - RNA, 19 nt, Homo sapiens
  misc_RNA (1)...(19): siRNA sense strand
ccucuaugaucuugagacu

SEQ ID NO: 2286399 - RNA, 19 nt, Homo sapiens
  misc_RNA (1)...(19): siRNA sense strand
uggaaaguauugugagaag

SEQ ID NO: 2286400 - RNA, 19 nt, Homo sapiens
  misc_RNA (1)...(19): siRNA sense strand
ggaaaguauugugagaaga

SEQ ID NO: 2286401 - RNA, 19 nt, Homo sapiens
  misc_RNA (1)...(19): siRNA sense strand
aggucuuaauugagcauau

SEQ ID NO: 2286402 - RNA, 19 nt, Homo sapiens
  misc_RNA (1)...(19): siRNA sense strand
auuagaugcuucagaauca

SEQ ID NO: 2286403 - RNA, 19 nt, Homo sapiens
  misc_RNA (1)...(19): siRNA sense strand
ggagaaaugguuaaaagaa

SEQ ID NO: 2286404 - RNA, 19 nt, Homo sapiens
  misc_RNA (1)...(19): siRNA sense strand
gcugagaaauguaaugcga

SEQ ID NO: 2286405 - RNA, 19 nt, Homo sapiens
  misc_RNA (1)...(19): siRNA sense strand
ggaaagugucucagcccau

SEQ ID NO: 2286406 - RNA, 19 nt, Homo sapiens
  misc_RNA (1)...(19): siRNA sense strand
auacgaauccuuagagcuu

SEQ ID NO: 2286407 - RNA, 19 nt, Homo sapiens
  misc_RNA (1)...(19): siRNA sense strand
ugggcaaaucaaagaagua

SEQ ID NO: 2286408 - RNA, 19 nt, Homo sapiens
  misc_RNA (1)...(19): siRNA sense strand
augaaggaguacuugacaa

SEQ ID NO: 2286409 - RNA, 19 nt, Homo sapiens
  misc_RNA (1)...(19): siRNA sense strand
cagaagaaucaacguuauu

SEQ ID NO: 2286410 - RNA, 19 nt, Homo sapiens
  misc_RNA (1)...(19): siRNA sense strand
uggcagagugagagacaaa

SEQ ID NO: 2286411 - RNA, 19 nt, Homo sapiens
  misc_RNA (1)...(19): siRNA sense strand
gguuuauucucgagccaau

SEQ ID NO: 2286412 - RNA, 19 nt, Homo sapiens
  misc_RNA (1)...(19): siRNA sense strand
gauuggaaagaacgggaaa

SEQ ID NO: 2286413 - RNA, 19 nt, Homo sapiens
  misc_RNA (1)...(19): siRNA sense strand
ggauaaaucugguguggug

SEQ ID NO: 2286414 - RNA, 19 nt, Homo sapiens
  misc_RNA (1)...(19): siRNA sense strand
ggugauaaugacaagaaga

SEQ ID NO: 2286415 - RNA, 19 nt, Homo sapiens
  misc_RNA (1)...(19): siRNA sense strand
agaagagagaggagcccaa

SEQ ID NO: 2286416 - RNA, 19 nt, Homo sapiens
  misc_RNA (1)...(19): siRNA sense strand
gagaggaccugaugggacu

SEQ ID NO: 2286417 - RNA, 19 nt, Homo sapiens
  misc_RNA (1)...(19): siRNA sense strand
uuggcaaagugauuggaaa

SEQ ID NO: 2286418 - RNA, 19 nt, Homo sapiens
  misc_RNA (1)...(19): siRNA sense strand
cagagaauggccuggaaga

SEQ ID NO: 2286419 - RNA, 19 nt, Homo sapiens
  misc_RNA (1)...(19): siRNA sense strand
gggaaagugauccaggaga

SEQ ID NO: 2286420 - RNA, 19 nt, Homo sapiens
  misc_RNA (1)...(19): siRNA sense strand
ggguucgaguggaagguga

SEQ ID NO: 2286421 - RNA, 19 nt, Homo sapiens
  misc_RNA (1)...(19): siRNA sense strand
gggcccaacaugacagaga

SEQ ID NO: 2286422 - RNA, 19 nt, Homo sapiens
  misc_RNA (1)...(19): siRNA sense strand
ggugaagagaccugcacuu

SEQ ID NO: 2286423 - RNA, 19 nt, Homo sapiens
  misc_RNA (1)...(19): siRNA sense strand
uggcaaagugauuggaaag

SEQ ID NO: 2286424 - RNA, 19 nt, Homo sapiens
  misc_RNA (1)...(19): siRNA sense strand
gcuacaaauugaugagcag

SEQ ID NO: 2286425 - RNA, 19 nt, Homo sapiens
  misc_RNA (1)...(19): siRNA sense strand
cggcccacuucgagauaca

SEQ ID NO: 2286426 - RNA, 19 nt, Homo sapiens
  misc_RNA (1)...(19): siRNA sense strand
gaugaagacaggaccguca

SEQ ID NO: 2286427 - RNA, 19 nt, Homo sapiens
  misc_RNA (1)...(19): siRNA sense strand
cggaugaugaagggagauu

SEQ ID NO: 2286428 - RNA, 19 nt, Homo sapiens
  misc_RNA (1)...(19): siRNA sense strand
augaaaacguccauaaaga

SEQ ID NO: 2286429 - RNA, 19 nt, Homo sapiens
  misc_RNA (1)...(19): siRNA sense strand
gggacuggcaauugggacu

SEQ ID NO: 2286430 - RNA, 19 nt, Homo sapiens
  misc_RNA (1)...(19): siRNA sense strand
ccgccguaaccgugguaau

SEQ ID NO: 2286431 - RNA, 19 nt, Homo sapiens
  misc_RNA (1)...(19): siRNA sense strand
uuucaggacagaaggguga

SEQ ID NO: 2286432 - RNA, 19 nt, Homo sapiens
  misc_RNA (1)...(19): siRNA sense strand
ccaaugaaaacguccauaa

SEQ ID NO: 2286433 - RNA, 19 nt, Homo sapiens
  misc_RNA (1)...(19): siRNA sense strand
gcccaacaugacagagaau

SEQ ID NO: 2286434 - RNA, 19 nt, Homo sapiens
  misc_RNA (1)...(19): siRNA sense strand
ucgaguggaaggugauaau

SEQ ID NO: 2286435 - RNA, 19 nt, Homo sapiens
  misc_RNA (1)...(19): siRNA sense strand
cgucauggauggaggccug

SEQ ID NO: 2286436 - RNA, 19 nt, Homo sapiens
  misc_RNA (1)...(19): siRNA sense strand
caacuggcagagugagaga

SEQ ID NO: 2286437 - RNA, 19 nt, Homo sapiens
  misc_RNA (1)...(19): siRNA sense strand
uggaaggugauaaugacaa

SEQ ID NO: 2286438 - RNA, 19 nt, Homo sapiens
  misc_RNA (1)...(19): siRNA sense strand
ccgccauugaguuggguga

SEQ ID NO: 2286439 - RNA, 19 nt, Homo sapiens
  misc_RNA (1)...(19): siRNA sense strand
agaugaaucaagaccucaa

SEQ ID NO: 2286440 - RNA, 19 nt, Homo sapiens
  misc_RNA (1)...(19): siRNA sense strand
cagaagaagcccugggagu

SEQ ID NO: 2286441 - RNA, 19 nt, Homo sapiens
  misc_RNA (1)...(19): siRNA sense strand
ccaaguccauccugggcua

SEQ ID NO: 2286442 - RNA, 19 nt, Homo sapiens
  misc_RNA (1)...(19): siRNA sense strand
ggaacaugcuggacuccca

SEQ ID NO: 2286443 - RNA, 19 nt, Homo sapiens
  misc_RNA (1)...(19): siRNA sense strand
aggcaagaagacugacaaa

SEQ ID NO: 2286444 - RNA, 19 nt, Homo sapiens
  misc_RNA (1)...(19): siRNA sense strand
uagacaacuuugaaggcaa

SEQ ID NO: 2286445 - RNA, 19 nt, Homo sapiens
  misc_RNA (1)...(19): siRNA sense strand
cggugauacacgagcagaa

SEQ ID NO: 2286446 - RNA, 19 nt, Homo sapiens
  misc_RNA (1)...(19): siRNA sense strand
ccugaugaucgaagaguau

SEQ ID NO: 2286447 - RNA, 19 nt, Homo sapiens
  misc_RNA (1)...(19): siRNA sense strand
ccaaagagcugcuggcccu

SEQ ID NO: 2286448 - RNA, 19 nt, Homo sapiens
  misc_RNA (1)...(19): siRNA sense strand
ccaugaaggcgcugagaac

SEQ ID NO: 2286449 - RNA, 19 nt, Homo sapiens
  misc_RNA (1)...(19): siRNA sense strand
ccagcaaccuugaagcaga

SEQ ID NO: 2286450 - RNA, 19 nt, Homo sapiens
  misc_RNA (1)...(19): siRNA sense strand
uggcagcagacaagggcaa

SEQ ID NO: 2286451 - RNA, 19 nt, Homo sapiens
  misc_RNA (1)...(19): siRNA sense strand
ccugaaaacaaaccagaaa

SEQ ID NO: 2286452 - RNA, 19 nt, Homo sapiens
  misc_RNA (1)...(19): siRNA sense strand
caauucaagugauccgcaa

SEQ ID NO: 2286453 - RNA, 19 nt, Homo sapiens
  misc_RNA (1)...(19): siRNA sense strand
agaagguagaggugaaagu

SEQ ID NO: 2286454 - RNA, 19 nt, Homo sapiens
  misc_RNA (1)...(19): siRNA sense strand
uggagcaggcuguagacaa

SEQ ID NO: 2286455 - RNA, 19 nt, Homo sapiens
  misc_RNA (1)...(19): siRNA sense strand
ugaugaucgaagaguauuu

SEQ ID NO: 2286456 - RNA, 19 nt, Homo sapiens
  misc_RNA (1)...(19): siRNA sense strand
aggaagaacuagaaagaaa

SEQ ID NO: 2286457 - RNA, 19 nt, Homo sapiens
  misc_RNA (1)...(19): siRNA sense strand
agaauuagaucgucgggaa

SEQ ID NO: 2286458 - RNA, 19 nt, Homo sapiens
  misc_RNA (1)...(19): siRNA sense strand
ccaggaagaacuagaaaga

SEQ ID NO: 2286459 - RNA, 19 nt, Homo sapiens
  misc_RNA (1)...(19): siRNA sense strand
ggaagaacuagaaagaaaa

SEQ ID NO: 2286460 - RNA, 19 nt, Homo sapiens
  misc_RNA (1)...(19): siRNA sense strand
cagaaugcuuucaagggua

SEQ ID NO: 2286461 - RNA, 19 nt, Homo sapiens
  misc_RNA (1)...(19): siRNA sense strand
cagucaacaugguagaaaa

SEQ ID NO: 2286462 - RNA, 19 nt, Homo sapiens
  misc_RNA (1)...(19): siRNA sense strand
gggaacgagaaaugcaaaa

SEQ ID NO: 2286463 - RNA, 19 nt, Homo sapiens
  misc_RNA (1)...(19): siRNA sense strand
ccaaaagacaguaaagcuu

SEQ ID NO: 2286464 - RNA, 19 nt, Homo sapiens
  misc_RNA (1)...(19): siRNA sense strand
ugaaaccaacagaggaaca

SEQ ID NO: 2286465 - RNA, 19 nt, Homo sapiens
  misc_RNA (1)...(19): siRNA sense strand
agaauuagaucgucgggaa

SEQ ID NO: 2286466 - RNA, 19 nt, Homo sapiens
  misc_RNA (1)...(19): siRNA sense strand
cagucaacaugguagaaaa

SEQ ID NO: 2286467 - RNA, 19 nt, Homo sapiens
  misc_RNA (1)...(19): siRNA sense strand
gggaacgagaaaugcaaaa

SEQ ID NO: 2286468 - RNA, 19 nt, Homo sapiens
  misc_RNA (1)...(19): siRNA sense strand
ccaaaagacaguaaagcuu

SEQ ID NO: 2286469 - RNA, 19 nt, Homo sapiens
  misc_RNA (1)...(19): siRNA sense strand
ugaaaccaacagaggaaca

SEQ ID NO: 2286470 - RNA, 19 nt, Homo sapiens
  misc_RNA (1)...(19): siRNA sense strand
gggagaaucuuaugggauc

SEQ ID NO: 2286471 - RNA, 19 nt, Homo sapiens
  misc_RNA (1)...(19): siRNA sense strand
gcaauacgggaaagggaga

SEQ ID NO: 2286472 - RNA, 19 nt, Homo sapiens
  misc_RNA (1)...(19): siRNA sense strand
cugauagaagagacaauaa

SEQ ID NO: 2286473 - RNA, 19 nt, Homo sapiens
  misc_RNA (1)...(19): siRNA sense strand
cuuuauggcaauacgggaa

SEQ ID NO: 2286474 - RNA, 19 nt, Homo sapiens
  misc_RNA (1)...(19): siRNA sense strand
aguuacagucauagcagua

SEQ ID NO: 2286475 - RNA, 19 nt, Homo sapiens
  misc_RNA (1)...(19): siRNA sense strand
aaaugaacacuuuggccaa

SEQ ID NO: 2286476 - RNA, 19 nt, Homo sapiens
  misc_RNA (1)...(19): siRNA sense strand
uuacagcggcauagagaca

SEQ ID NO: 2286477 - RNA, 19 nt, Homo sapiens
  misc_RNA (1)...(19): siRNA sense strand
guaaacagccugauccaga

SEQ ID NO: 2286478 - RNA, 19 nt, Homo sapiens
  misc_RNA (1)...(19): siRNA sense strand
ccauaaaaccaaagcaaac

SEQ ID NO: 2286479 - RNA, 19 nt, Homo sapiens
  misc_RNA (1)...(19): siRNA sense strand
ggcgauugagauugaacaa

SEQ ID NO: 2286480 - RNA, 19 nt, Homo sapiens
  misc_RNA (1)...(19): siRNA sense strand
cauacauuacagcggcaua

SEQ ID NO: 2286481 - RNA, 19 nt, Homo sapiens
  misc_RNA (1)...(19): siRNA sense strand
uggcaauacgggaaaggga

SEQ ID NO: 2286482 - RNA, 19 nt, Homo sapiens
  misc_RNA (1)...(19): siRNA sense strand
uagcaguacccgagaugga

SEQ ID NO: 2286483 - RNA, 19 nt, Homo sapiens
  misc_RNA (1)...(19): siRNA sense strand
agggagaaucuuaugggau

SEQ ID NO: 2286484 - RNA, 19 nt, Homo sapiens
  misc_RNA (1)...(19): siRNA sense strand
ggaucaguacgaaaagaua

SEQ ID NO: 2286485 - RNA, 19 nt, Homo sapiens
  misc_RNA (1)...(19): siRNA sense strand
auggaagacgcgacaggua

SEQ ID NO: 2286486 - RNA, 19 nt, Homo sapiens
  misc_RNA (1)...(19): siRNA sense strand
uuuaaauggaucaagccaa

SEQ ID NO: 2286487 - RNA, 19 nt, Homo sapiens
  misc_RNA (1)...(19): siRNA sense strand
augacuucacagagaggaa

SEQ ID NO: 2286488 - RNA, 19 nt, Homo sapiens
  misc_RNA (1)...(19): siRNA sense strand
cgagauggaagacgcgaca

SEQ ID NO: 2286489 - RNA, 19 nt, Homo sapiens
  misc_RNA (1)...(19): siRNA sense strand
uguuaaaacuggaggaaaa

SEQ ID NO: 2286490 - RNA, 19 nt, Homo sapiens
  misc_RNA (1)...(19): siRNA sense strand
cuguagauacugaaggaaa

SEQ ID NO: 2286491 - RNA, 19 nt, Homo sapiens
  misc_RNA (1)...(19): siRNA sense strand
agggagaagagaaguguaa

SEQ ID NO: 2286492 - RNA, 19 nt, Homo sapiens
  misc_RNA (1)...(19): siRNA sense strand
uguagauacugaaggaaaa

SEQ ID NO: 2286493 - RNA, 19 nt, Homo sapiens
  misc_RNA (1)...(19): siRNA sense strand
ugucugagauccagggaga

SEQ ID NO: 2286494 - RNA, 19 nt, Homo sapiens
  misc_RNA (1)...(19): siRNA sense strand
ggagaagagcagugaucga

SEQ ID NO: 2286495 - RNA, 19 nt, Homo sapiens
  misc_RNA (1)...(19): siRNA sense strand
cggacagaaaucagaaauu

SEQ ID NO: 2286496 - RNA, 19 nt, Homo sapiens
  misc_RNA (1)...(19): siRNA sense strand
gagcagugaucgaggugca

SEQ ID NO: 2286497 - RNA, 19 nt, Homo sapiens
  misc_RNA (1)...(19): siRNA sense strand
ggaaacaagcugugaggcu

SEQ ID NO: 2286498 - RNA, 19 nt, Homo sapiens
  misc_RNA (1)...(19): siRNA sense strand
guguagaacagcaaguuau

SEQ ID NO: 2286499 - RNA, 19 nt, Homo sapiens
  misc_RNA (1)...(19): siRNA sense strand
auuaguaggcuucaggaaa

SEQ ID NO: 2286500 - RNA, 19 nt, Homo sapiens
  misc_RNA (1)...(19): siRNA sense strand
gugcggugcaagagauaau

SEQ ID NO: 2286501 - RNA, 19 nt, Homo sapiens
  misc_RNA (1)...(19): siRNA sense strand
gugcaaacucugaucacau

SEQ ID NO: 2286502 - RNA, 19 nt, Homo sapiens
  misc_RNA (1)...(19): siRNA sense strand
agguaguagaagauaucaa

SEQ ID NO: 2286503 - RNA, 19 nt, Homo sapiens
  misc_RNA (1)...(19): siRNA sense strand
gaagagaaguguaaggcug

SEQ ID NO: 2286504 - RNA, 19 nt, Homo sapiens
  misc_RNA (1)...(19): siRNA sense strand
cugugaggcuugcgcagaa

SEQ ID NO: 2286505 - RNA, 19 nt, Homo sapiens
  misc_RNA (1)...(19): siRNA sense strand
ccauaaagccgucuggaac

SEQ ID NO: 2286506 - RNA, 19 nt, Homo sapiens
  misc_RNA (1)...(19): siRNA sense strand
aguuggagcagaaugcaaa

SEQ ID NO: 2286507 - RNA, 19 nt, Homo sapiens
  misc_RNA (1)...(19): siRNA sense strand
ugaugugugaggugaacaa

SEQ ID NO: 2286508 - RNA, 19 nt, Homo sapiens
  misc_RNA (1)...(19): siRNA sense strand
gaguuggagcagaaugcaa

SEQ ID NO: 2286509 - RNA, 19 nt, Homo sapiens
  misc_RNA (1)...(19): siRNA sense strand
gaaacuugucugagaucca

SEQ ID NO: 2286510 - RNA, 19 nt, Homo sapiens
  misc_RNA (1)...(19): siRNA sense strand
cuguugauccgcagggaga

SEQ ID NO: 2286511 - RNA, 19 nt, Homo sapiens
  misc_RNA (1)...(19): siRNA sense strand
aagcauuugaccugagaca

SEQ ID NO: 2286512 - RNA, 19 nt, Homo sapiens
  misc_RNA (1)...(19): siRNA sense strand
cgaccugaaaucugaugaa

SEQ ID NO: 2286513 - RNA, 19 nt, Homo sapiens
  misc_RNA (1)...(19): siRNA sense strand
ugaaggaaaaggagauauu

SEQ ID NO: 2286514 - RNA, 19 nt, Homo sapiens
  misc_RNA (1)...(19): siRNA sense strand
cuggagaggauucuaacaa

SEQ ID NO: 2286515 - RNA, 19 nt, Homo sapiens
  misc_RNA (1)...(19): siRNA sense strand
ggauaugggaaaccaacau

SEQ ID NO: 2286516 - RNA, 19 nt, Homo sapiens
  misc_RNA (1)...(19): siRNA sense strand
aaaagguccucaagagaau

SEQ ID NO: 2286517 - RNA, 19 nt, Homo sapiens
  misc_RNA (1)...(19): siRNA sense strand
ggacaguuggaugagguaa

SEQ ID NO: 2286518 - RNA, 19 nt, Homo sapiens
  misc_RNA (1)...(19): siRNA sense strand
cccauaaagccgucuggaa

SEQ ID NO: 2286519 - RNA, 19 nt, Homo sapiens
  misc_RNA (1)...(19): siRNA sense strand
aguguaaggcugccaggaa

SEQ ID NO: 2286520 - RNA, 19 nt, Homo sapiens
  misc_RNA (1)...(19): siRNA sense strand
gagggagguaguagaagau

SEQ ID NO: 2286521 - RNA, 19 nt, Homo sapiens
  misc_RNA (1)...(19): siRNA sense strand
aauggaggcaacugcguaa

SEQ ID NO: 2286522 - RNA, 19 nt, Homo sapiens
  misc_RNA (1)...(19): siRNA sense strand
caagaagaugcgugggcuu

SEQ ID NO: 2286523 - RNA, 19 nt, Homo sapiens
  misc_RNA (1)...(19): siRNA sense strand
gguuauacucagaccaguu

SEQ ID NO: 2286524 - RNA, 19 nt, Homo sapiens
  misc_RNA (1)...(19): siRNA sense strand
gaccagaauugcaaggcca

SEQ ID NO: 2286525 - RNA, 19 nt, Homo sapiens
  misc_RNA (1)...(19): siRNA sense strand
ccaccauauccuagcuaca

SEQ ID NO: 2286526 - RNA, 19 nt, Homo sapiens
  misc_RNA (1)...(19): siRNA sense strand
agaucaaaguagcagucuu

SEQ ID NO: 2286527 - RNA, 19 nt, Homo sapiens
  misc_RNA (1)...(19): siRNA sense strand
ggggcagguuccaggauau

SEQ ID NO: 2286528 - RNA, 19 nt, Homo sapiens
  misc_RNA (1)...(19): siRNA sense strand
caaucagaucaaagcauga

SEQ ID NO: 2286529 - RNA, 19 nt, Homo sapiens
  misc_RNA (1)...(19): siRNA sense strand
uugaacaagaaguagaaga

SEQ ID NO: 2286530 - RNA, 19 nt, Homo sapiens
  misc_RNA (1)...(19): siRNA sense strand
gaggaagccaccaggagca

SEQ ID NO: 2286531 - RNA, 19 nt, Homo sapiens
  misc_RNA (1)...(19): siRNA sense strand
cuguacggcaggccagaaa

SEQ ID NO: 2286532 - RNA, 19 nt, Homo sapiens
  misc_RNA (1)...(19): siRNA sense strand
cuguugagcaagagaaaga

SEQ ID NO: 2286533 - RNA, 19 nt, Homo sapiens
  misc_RNA (1)...(19): siRNA sense strand
caucaagcuauuagagcau

SEQ ID NO: 2286534 - RNA, 19 nt, Homo sapiens
  misc_RNA (1)...(19): siRNA sense strand
ccaucaagcuauuagagca

SEQ ID NO: 2286535 - RNA, 19 nt, Homo sapiens
  misc_RNA (1)...(19): siRNA sense strand
cguugaagugucaguagaa

SEQ ID NO: 2286536 - RNA, 19 nt, Homo sapiens
  misc_RNA (1)...(19): siRNA sense strand
acggagaaagagaagaauu

SEQ ID NO: 2286537 - RNA, 19 nt, Homo sapiens
  misc_RNA (1)...(19): siRNA sense strand
gggaagaacucucaccguu

SEQ ID NO: 2286538 - RNA, 19 nt, Homo sapiens
  misc_RNA (1)...(19): siRNA sense strand
cuugaagaucagaagaaaa

SEQ ID NO: 2286539 - RNA, 19 nt, Homo sapiens
  misc_RNA (1)...(19): siRNA sense strand
guugagcaagagaaagaaa

SEQ ID NO: 2286540 - RNA, 19 nt, Homo sapiens
  misc_RNA (1)...(19): siRNA sense strand
aguaauuggcugugcucuu

SEQ ID NO: 2286541 - RNA, 19 nt, Homo sapiens
  misc_RNA (1)...(19): siRNA sense strand
agaucaacgcuaaagccaa

SEQ ID NO: 2286542 - RNA, 19 nt, Homo sapiens
  misc_RNA (1)...(19): siRNA sense strand
agccaggacaugaggcaga

SEQ ID NO: 2286543 - RNA, 19 nt, Homo sapiens
  misc_RNA (1)...(19): siRNA sense strand
gaucaacgcuaaagccaac

SEQ ID NO: 2286544 - RNA, 19 nt, Homo sapiens
  misc_RNA (1)...(19): siRNA sense strand
cggacuuaaugcagagaca

SEQ ID NO: 2286545 - RNA, 19 nt, Homo sapiens
  misc_RNA (1)...(19): siRNA sense strand
ccaacaagaacauaggcaa

SEQ ID NO: 2286546 - RNA, 19 nt, Homo sapiens
  misc_RNA (1)...(19): siRNA sense strand
auaaguacauggaggccaa

SEQ ID NO: 2286547 - RNA, 19 nt, Homo sapiens
  misc_RNA (1)...(19): siRNA sense strand
uugcugaggucuagggaca

SEQ ID NO: 2286548 - RNA, 19 nt, Homo sapiens
  misc_RNA (1)...(19): siRNA sense strand
acgugaaggagguggccaa

SEQ ID NO: 2286549 - RNA, 19 nt, Homo sapiens
  misc_RNA (1)...(19): siRNA sense strand
ccgaaauccaggaggccca

SEQ ID NO: 2286550 - RNA, 19 nt, Homo sapiens
  misc_RNA (1)...(19): siRNA sense strand
caacaagaacauaggcaag

SEQ ID NO: 2286551 - RNA, 19 nt, Homo sapiens
  misc_RNA (1)...(19): siRNA sense strand
gaaucuacccagugaccga

SEQ ID NO: 2286552 - RNA, 19 nt, Homo sapiens
  misc_RNA (1)...(19): siRNA sense strand
cuggagacuaugugcuaau

SEQ ID NO: 2286553 - RNA, 19 nt, Homo sapiens
  misc_RNA (1)...(19): siRNA sense strand
cggacuuaaugcagagaca

SEQ ID NO: 2286554 - RNA, 19 nt, Homo sapiens
  misc_RNA (1)...(19): siRNA sense strand
ccaacaagaacauaggcaa

SEQ ID NO: 2286555 - RNA, 19 nt, Homo sapiens
  misc_RNA (1)...(19): siRNA sense strand
auaaguacauggaggccaa

SEQ ID NO: 2286556 - RNA, 19 nt, Homo sapiens
  misc_RNA (1)...(19): siRNA sense strand
uugcugaggucuagggaca

SEQ ID NO: 2286557 - RNA, 19 nt, Homo sapiens
  misc_RNA (1)...(19): siRNA sense strand
acgugaaggagguggccaa

SEQ ID NO: 2286558 - RNA, 19 nt, Homo sapiens
  misc_RNA (1)...(19): siRNA sense strand
ccgaaauccaggaggccca

SEQ ID NO: 2286559 - RNA, 19 nt, Homo sapiens
  misc_RNA (1)...(19): siRNA sense strand
caacaagaacauaggcaag

SEQ ID NO: 2286560 - RNA, 19 nt, Homo sapiens
  misc_RNA (1)...(19): siRNA sense strand
gaaucuacccagugaccga

SEQ ID NO: 2286561 - RNA, 19 nt, Homo sapiens
  misc_RNA (1)...(19): siRNA sense strand
cuggagacuaugugcuaau

SEQ ID NO: 2286562 - RNA, 19 nt, Homo sapiens
  misc_RNA (1)...(19): siRNA sense strand
agucacaccugaagagcca

SEQ ID NO: 2286563 - RNA, 19 nt, Homo sapiens
  misc_RNA (1)...(19): siRNA sense strand
acacauugccacaggccau

SEQ ID NO: 2286564 - RNA, 19 nt, Homo sapiens
  misc_RNA (1)...(19): siRNA sense strand
ggauggaacuugaugaguc

SEQ ID NO: 2286565 - RNA, 19 nt, Homo sapiens
  misc_RNA (1)...(19): siRNA sense strand
gcauuggauucaaaggcua

SEQ ID NO: 2286566 - RNA, 19 nt, Homo sapiens
  misc_RNA (1)...(19): siRNA sense strand
aguguuacaacgaggagaa

SEQ ID NO: 2286567 - RNA, 19 nt, Homo sapiens
  misc_RNA (1)...(19): siRNA sense strand
cauuggauucaaaggcuaa

SEQ ID NO: 2286568 - RNA, 19 nt, Homo sapiens
  misc_RNA (1)...(19): siRNA sense strand
guuacaacgaggagaagca

SEQ ID NO: 2286569 - RNA, 19 nt, Homo sapiens
  misc_RNA (1)...(19): siRNA sense strand
agaggaucaugguggccaa

SEQ ID NO: 2286570 - RNA, 19 nt, Homo sapiens
  misc_RNA (1)...(19): siRNA sense strand
augcgaaguacuugaacau

SEQ ID NO: 2286571 - RNA, 19 nt, Homo sapiens
  misc_RNA (1)...(19): siRNA sense strand
cgaugcaggaggacgaaca

SEQ ID NO: 2286572 - RNA, 19 nt, Homo sapiens
  misc_RNA (1)...(19): siRNA sense strand
aguaucagagucaggcuaa

SEQ ID NO: 2286573 - RNA, 19 nt, Homo sapiens
  misc_RNA (1)...(19): siRNA sense strand
aaggaaaguuggaagccau

SEQ ID NO: 2286574 - RNA, 19 nt, Homo sapiens
  misc_RNA (1)...(19): siRNA sense strand
gggaagaagaaguccacca

SEQ ID NO: 2286575 - RNA, 19 nt, Homo sapiens
  misc_RNA (1)...(19): siRNA sense strand
ggcaaugcagcgagagaca

SEQ ID NO: 2286576 - RNA, 19 nt, Homo sapiens
  misc_RNA (1)...(19): siRNA sense strand
cugccaaguuugugaucca

SEQ ID NO: 2286577 - RNA, 19 nt, Homo sapiens
  misc_RNA (1)...(19): siRNA sense strand
gcaaggaguuuguggaagc

SEQ ID NO: 2286578 - RNA, 19 nt, Homo sapiens
  misc_RNA (1)...(19): siRNA sense strand
gggugaagucaguaaggca

SEQ ID NO: 2286579 - RNA, 19 nt, Homo sapiens
  misc_RNA (1)...(19): siRNA sense strand
gaagaaagguggcaaggag

SEQ ID NO: 2286580 - RNA, 19 nt, Homo sapiens
  misc_RNA (1)...(19): siRNA sense strand
ggagaagaaagguggcaag

SEQ ID NO: 2286581 - RNA, 19 nt, Homo sapiens
  misc_RNA (1)...(19): siRNA sense strand
cagcgagaguauaggcauc

SEQ ID NO: 2286582 - RNA, 19 nt, Homo sapiens
  misc_RNA (1)...(19): siRNA sense strand
aggaaauggccaagcugga

SEQ ID NO: 2286583 - RNA, 19 nt, Homo sapiens
  misc_RNA (1)...(19): siRNA sense strand
cagacaagugugaagaacu

SEQ ID NO: 2286584 - RNA, 19 nt, Homo sapiens
  misc_RNA (1)...(19): siRNA sense strand
ggccaaugaugaagagcug

SEQ ID NO: 2286585 - RNA, 19 nt, Homo sapiens
  misc_RNA (1)...(19): siRNA sense strand
gcugaugauaagaagcuga

SEQ ID NO: 2286586 - RNA, 19 nt, Homo sapiens
  misc_RNA (1)...(19): siRNA sense strand
aaggaaaguuggaagccau

SEQ ID NO: 2286587 - RNA, 19 nt, Homo sapiens
  misc_RNA (1)...(19): siRNA sense strand
gggaagaagaaguccacca

SEQ ID NO: 2286588 - RNA, 19 nt, Homo sapiens
  misc_RNA (1)...(19): siRNA sense strand
ggcaaugcagcgagagaca

SEQ ID NO: 2286589 - RNA, 19 nt, Homo sapiens
  misc_RNA (1)...(19): siRNA sense strand
cugccaaguuugugaucca

SEQ ID NO: 2286590 - RNA, 19 nt, Homo sapiens
  misc_RNA (1)...(19): siRNA sense strand
gcaaggaguuuguggaagc

SEQ ID NO: 2286591 - RNA, 19 nt, Homo sapiens
  misc_RNA (1)...(19): siRNA sense strand
gggugaagucaguaaggca

SEQ ID NO: 2286592 - RNA, 19 nt, Homo sapiens
  misc_RNA (1)...(19): siRNA sense strand
gaagaaagguggcaaggag

SEQ ID NO: 2286593 - RNA, 19 nt, Homo sapiens
  misc_RNA (1)...(19): siRNA sense strand
ggagaagaaagguggcaag

SEQ ID NO: 2286594 - RNA, 19 nt, Homo sapiens
  misc_RNA (1)...(19): siRNA sense strand
cagcgagaguauaggcauc

SEQ ID NO: 2286595 - RNA, 19 nt, Homo sapiens
  misc_RNA (1)...(19): siRNA sense strand
aggaaauggccaagcugga

SEQ ID NO: 2286596 - RNA, 19 nt, Homo sapiens
  misc_RNA (1)...(19): siRNA sense strand
cagacaagugugaagaacu

SEQ ID NO: 2286597 - RNA, 19 nt, Homo sapiens
  misc_RNA (1)...(19): siRNA sense strand
ggccaaugaugaagagcug

SEQ ID NO: 2286598 - RNA, 19 nt, Homo sapiens
  misc_RNA (1)...(19): siRNA sense strand
gcugaugauaagaagcuga

SEQ ID NO: 2286599 - RNA, 19 nt, Homo sapiens
  misc_RNA (1)...(19): siRNA sense strand
aaggaaaguuggaagccau

SEQ ID NO: 2286600 - RNA, 19 nt, Homo sapiens
  misc_RNA (1)...(19): siRNA sense strand
gggaagaagaaguccacca

SEQ ID NO: 2286601 - RNA, 19 nt, Homo sapiens
  misc_RNA (1)...(19): siRNA sense strand
ggcaaugcagcgagagaca

SEQ ID NO: 2286602 - RNA, 19 nt, Homo sapiens
  misc_RNA (1)...(19): siRNA sense strand
cugccaaguuugugaucca

SEQ ID NO: 2286603 - RNA, 19 nt, Homo sapiens
  misc_RNA (1)...(19): siRNA sense strand
gcaaggaguuuguggaagc

SEQ ID NO: 2286604 - RNA, 19 nt, Homo sapiens
  misc_RNA (1)...(19): siRNA sense strand
gggugaagucaguaaggca

SEQ ID NO: 2286605 - RNA, 19 nt, Homo sapiens
  misc_RNA (1)...(19): siRNA sense strand
gaagaaagguggcaaggag

SEQ ID NO: 2286606 - RNA, 19 nt, Homo sapiens
  misc_RNA (1)...(19): siRNA sense strand
ggagaagaaagguggcaag

SEQ ID NO: 2286607 - RNA, 19 nt, Homo sapiens
  misc_RNA (1)...(19): siRNA sense strand
cagcgagaguauaggcauc

SEQ ID NO: 2286608 - RNA, 19 nt, Homo sapiens
  misc_RNA (1)...(19): siRNA sense strand
aggaaauggccaagcugga

SEQ ID NO: 2286609 - RNA, 19 nt, Homo sapiens
  misc_RNA (1)...(19): siRNA sense strand
cagacaagugugaagaacu

SEQ ID NO: 2286610 - RNA, 19 nt, Homo sapiens
  misc_RNA (1)...(19): siRNA sense strand
ggccaaugaugaagagcug

SEQ ID NO: 2286611 - RNA, 19 nt, Homo sapiens
  misc_RNA (1)...(19): siRNA sense strand
gcugaugauaagaagcuga

SEQ ID NO: 2286612 - RNA, 19 nt, Homo sapiens
  misc_RNA (1)...(19): siRNA sense strand
gucaagagcucauggccaa

SEQ ID NO: 2286613 - RNA, 19 nt, Homo sapiens
  misc_RNA (1)...(19): siRNA sense strand
gcggguuguccuugagaaa

SEQ ID NO: 2286614 - RNA, 19 nt, Homo sapiens
  misc_RNA (1)...(19): siRNA sense strand
acaaggacaucgaggcaca

SEQ ID NO: 2286615 - RNA, 19 nt, Homo sapiens
  misc_RNA (1)...(19): siRNA sense strand
ggaaggaaauggagggacc

SEQ ID NO: 2286616 - RNA, 19 nt, Homo sapiens
  misc_RNA (1)...(19): siRNA sense strand
gaacaaggacaucgaggca

SEQ ID NO: 2286617 - RNA, 19 nt, Homo sapiens
  misc_RNA (1)...(19): siRNA sense strand
uggacgagagagugggcua

SEQ ID NO: 2286618 - RNA, 19 nt, Homo sapiens
  misc_RNA (1)...(19): siRNA sense strand
ggucaagagcucauggcca

SEQ ID NO: 2286619 - RNA, 19 nt, Homo sapiens
  misc_RNA (1)...(19): siRNA sense strand
ugagaaacccuuuggccau

SEQ ID NO: 2286620 - RNA, 19 nt, Homo sapiens
  misc_RNA (1)...(19): siRNA sense strand
gaccagaaccgcaaggcuu

SEQ ID NO: 2286621 - RNA, 19 nt, Homo sapiens
  misc_RNA (1)...(19): siRNA sense strand
cccuggaggagcugagaau

SEQ ID NO: 2286622 - RNA, 19 nt, Homo sapiens
  misc_RNA (1)...(19): siRNA sense strand
gcgacguccuccagaacca

SEQ ID NO: 2286623 - RNA, 19 nt, Homo sapiens
  misc_RNA (1)...(19): siRNA sense strand
ucucagcccugguggccaa

SEQ ID NO: 2286624 - RNA, 19 nt, Homo sapiens
  misc_RNA (1)...(19): siRNA sense strand
ccagcuucuaugaggagua

SEQ ID NO: 2286625 - RNA, 19 nt, Homo sapiens
  misc_RNA (1)...(19): siRNA sense strand
ugaaagagaccguggaugc

SEQ ID NO: 2286626 - RNA, 19 nt, Homo sapiens
  misc_RNA (1)...(19): siRNA sense strand
cuggcaaagccuuggacga

SEQ ID NO: 2286627 - RNA, 19 nt, Homo sapiens
  misc_RNA (1)...(19): siRNA sense strand
ugacaaggacaaagcgaaa

SEQ ID NO: 2286628 - RNA, 19 nt, Homo sapiens
  misc_RNA (1)...(19): siRNA sense strand
gcaauaugggaaaggcaaa

SEQ ID NO: 2286629 - RNA, 19 nt, Homo sapiens
  misc_RNA (1)...(19): siRNA sense strand
ccuuaguaaugaagaguuu

SEQ ID NO: 2286630 - RNA, 19 nt, Homo sapiens
  misc_RNA (1)...(19): siRNA sense strand
cgaaaagaguaucuagaaa

SEQ ID NO: 2286631 - RNA, 19 nt, Homo sapiens
  misc_RNA (1)...(19): siRNA sense strand
ugaaagacgacgagaacuu

SEQ ID NO: 2286632 - RNA, 19 nt, Homo sapiens
  misc_RNA (1)...(19): siRNA sense strand
aagaagaugacaaggacaa

SEQ ID NO: 2286633 - RNA, 19 nt, Homo sapiens
  misc_RNA (1)...(19): siRNA sense strand
cuuaaugcaauaugggaaa

SEQ ID NO: 2286634 - RNA, 19 nt, Homo sapiens
  misc_RNA (1)...(19): siRNA sense strand
ugaaagaccaauuggaaca

SEQ ID NO: 2286635 - RNA, 19 nt, Homo sapiens
  misc_RNA (1)...(19): siRNA sense strand
ccucaguucaucaaggaaa

SEQ ID NO: 2286636 - RNA, 19 nt, Homo sapiens
  misc_RNA (1)...(19): siRNA sense strand
cuguauaacacuaugguga

SEQ ID NO: 2286637 - RNA, 19 nt, Homo sapiens
  misc_RNA (1)...(19): siRNA sense strand
aagccaagauucuggguca

SEQ ID NO: 2286638 - RNA, 19 nt, Homo sapiens
  misc_RNA (1)...(19): siRNA sense strand
ccuacuaaccagauucaaa

SEQ ID NO: 2286639 - RNA, 19 nt, Homo sapiens
  misc_RNA (1)...(19): siRNA sense strand
guacuaugcuuaugggcca

SEQ ID NO: 2286640 - RNA, 19 nt, Homo sapiens
  misc_RNA (1)...(19): siRNA sense strand
auuauagguuccugacuaa

SEQ ID NO: 2286641 - RNA, 19 nt, Homo sapiens
  misc_RNA (1)...(19): siRNA sense strand
cagucagaugcuagugaaa

SEQ ID NO: 2286642 - RNA, 19 nt, Homo sapiens
  misc_RNA (1)...(19): siRNA sense strand
cuauaaauaugcaaggcca

SEQ ID NO: 2286643 - RNA, 19 nt, Homo sapiens
  misc_RNA (1)...(19): siRNA sense strand
acuuaaugcaauaugggaa

SEQ ID NO: 2286644 - RNA, 19 nt, Homo sapiens
  misc_RNA (1)...(19): siRNA sense strand
gugcaaagaaggucaucau

SEQ ID NO: 2286645 - RNA, 19 nt, Homo sapiens
  misc_RNA (1)...(19): siRNA sense strand
ggcugaaagacgacgagaa

SEQ ID NO: 2286646 - RNA, 19 nt, Homo sapiens
  misc_RNA (1)...(19): siRNA sense strand
acgcaugauagaagcaaau

SEQ ID NO: 2286647 - RNA, 19 nt, Homo sapiens
  misc_RNA (1)...(19): siRNA sense strand
cuggaaagugauucauuaa

SEQ ID NO: 2286648 - RNA, 19 nt, Homo sapiens
  misc_RNA (1)...(19): siRNA sense strand
uggaagaagaugacaagga

SEQ ID NO: 2286649 - RNA, 19 nt, Homo sapiens
  misc_RNA (1)...(19): siRNA sense strand
ugguaaugcuagaaagaug

SEQ ID NO: 2286650 - RNA, 19 nt, Homo sapiens
  misc_RNA (1)...(19): siRNA sense strand
acucaggacaggcagauaa

SEQ ID NO: 2286651 - RNA, 19 nt, Homo sapiens
  misc_RNA (1)...(19): siRNA sense strand
uugaagaacccaaugaaga

SEQ ID NO: 2286652 - RNA, 19 nt, Homo sapiens
  misc_RNA (1)...(19): siRNA sense strand
auucaaggccagaguuuau

SEQ ID NO: 2286653 - RNA, 19 nt, Homo sapiens
  misc_RNA (1)...(19): siRNA sense strand
ccugguaaugcuagaaaga

SEQ ID NO: 2286654 - RNA, 19 nt, Homo sapiens
  misc_RNA (1)...(19): siRNA sense strand
agcaaauauucaucggcaa

SEQ ID NO: 2286655 - RNA, 19 nt, Homo sapiens
  misc_RNA (1)...(19): siRNA sense strand
ucacaugcugcgaggaaca

SEQ ID NO: 2286656 - RNA, 19 nt, Homo sapiens
  misc_RNA (1)...(19): siRNA sense strand
gcgaggaacaauagaccca

SEQ ID NO: 2286657 - RNA, 19 nt, Homo sapiens
  misc_RNA (1)...(19): siRNA sense strand
acacaaugguuuugaagga

SEQ ID NO: 2286658 - RNA, 19 nt, Homo sapiens
  misc_RNA (1)...(19): siRNA sense strand
ugguggaagaagaugacaa

SEQ ID NO: 2286659 - RNA, 19 nt, Homo sapiens
  misc_RNA (1)...(19): siRNA sense strand
uauaaauaugcaaggccaa

SEQ ID NO: 2286660 - RNA, 19 nt, Homo sapiens
  misc_RNA (1)...(19): siRNA sense strand
aguaaguuaugcagaaguu

SEQ ID NO: 2286661 - RNA, 19 nt, Homo sapiens
  misc_RNA (1)...(19): siRNA sense strand
gggucagauaaucguauaa

SEQ ID NO: 2286662 - RNA, 19 nt, Homo sapiens
  misc_RNA (1)...(19): siRNA sense strand
ugauacaacaacagacuuu

SEQ ID NO: 2286663 - RNA, 19 nt, Homo sapiens
  misc_RNA (1)...(19): siRNA sense strand
gaagaagaugacaaggaca

SEQ ID NO: 2286664 - RNA, 19 nt, Homo sapiens
  misc_RNA (1)...(19): siRNA sense strand
gcugaaagacgacgagaac

SEQ ID NO: 2286665 - RNA, 19 nt, Homo sapiens
  misc_RNA (1)...(19): siRNA sense strand
gcaugauagaagcaaauau

SEQ ID NO: 2286666 - RNA, 19 nt, Homo sapiens
  misc_RNA (1)...(19): siRNA sense strand
ccaucuaguaugccacaaa

SEQ ID NO: 2286667 - RNA, 19 nt, Homo sapiens
  misc_RNA (1)...(19): siRNA sense strand
guauaaacacagucagucu

SEQ ID NO: 2286668 - RNA, 19 nt, Homo sapiens
  misc_RNA (1)...(19): siRNA sense strand
uugauggguugguggaaga

SEQ ID NO: 2286669 - RNA, 19 nt, Homo sapiens
  misc_RNA (1)...(19): siRNA sense strand
aggaagcauuggaaagguu

SEQ ID NO: 2286670 - RNA, 19 nt, Homo sapiens
  misc_RNA (1)...(19): siRNA sense strand
ucucggaguucaagaaaau

SEQ ID NO: 2286671 - RNA, 19 nt, Homo sapiens
  misc_RNA (1)...(19): siRNA sense strand
ccaugcaacaucugaaaga

SEQ ID NO: 2286672 - RNA, 19 nt, Homo sapiens
  misc_RNA (1)...(19): siRNA sense strand
ucuuguggaucaaaguaua

SEQ ID NO: 2286673 - RNA, 19 nt, Homo sapiens
  misc_RNA (1)...(19): siRNA sense strand
ugucacaugcugcgaggaa

SEQ ID NO: 2286674 - RNA, 19 nt, Homo sapiens
  misc_RNA (1)...(19): siRNA sense strand
agaaguuagggcugaaaga

SEQ ID NO: 2286675 - RNA, 19 nt, Homo sapiens
  misc_RNA (1)...(19): siRNA sense strand
gguugguggaagaagauga

SEQ ID NO: 2286676 - RNA, 19 nt, Homo sapiens
  misc_RNA (1)...(19): siRNA sense strand
aguuagggcugaaagacga

SEQ ID NO: 2286677 - RNA, 19 nt, Homo sapiens
  misc_RNA (1)...(19): siRNA sense strand
caucuaacauccagcaacu

SEQ ID NO: 2286678 - RNA, 19 nt, Homo sapiens
  misc_RNA (1)...(19): siRNA sense strand
cagagaugacaguaguauu

SEQ ID NO: 2286679 - RNA, 19 nt, Homo sapiens
  misc_RNA (1)...(19): siRNA sense strand
acaacagacuuuacagagu

SEQ ID NO: 2286680 - RNA, 19 nt, Homo sapiens
  misc_RNA (1)...(19): siRNA sense strand
gcaacaucugaaagaccaa

SEQ ID NO: 2286681 - RNA, 19 nt, Homo sapiens
  misc_RNA (1)...(19): siRNA sense strand
acgacgagaacuuggcauu

SEQ ID NO: 2286682 - RNA, 19 nt, Homo sapiens
  misc_RNA (1)...(19): siRNA sense strand
gggcacagucagcaaacau

SEQ ID NO: 2286683 - RNA, 19 nt, Homo sapiens
  misc_RNA (1)...(19): siRNA sense strand
aggccagaguuuauuguuu

SEQ ID NO: 2286684 - RNA, 19 nt, Homo sapiens
  misc_RNA (1)...(19): siRNA sense strand
ucugaaagaccaauuggaa

SEQ ID NO: 2286685 - RNA, 19 nt, Homo sapiens
  misc_RNA (1)...(19): siRNA sense strand
ccaauuggaacaacggaca

SEQ ID NO: 2286686 - RNA, 19 nt, Homo sapiens
  misc_RNA (1)...(19): siRNA sense strand
aggacaggcagauaagauu

SEQ ID NO: 2286687 - RNA, 19 nt, Homo sapiens
  misc_RNA (1)...(19): siRNA sense strand
accguaagcuguaguaaaa

SEQ ID NO: 2286688 - RNA, 19 nt, Homo sapiens
  misc_RNA (1)...(19): siRNA sense strand
ugacaaaagccaagauucu

SEQ ID NO: 2286689 - RNA, 19 nt, Homo sapiens
  misc_RNA (1)...(19): siRNA sense strand
augagaagauggugcaaag

SEQ ID NO: 2286690 - RNA, 19 nt, Homo sapiens
  misc_RNA (1)...(19): siRNA sense strand
agaagauggugcaaagaag

SEQ ID NO: 2286691 - RNA, 19 nt, Homo sapiens
  misc_RNA (1)...(19): siRNA sense strand
uuuaguagucaguccauaa

SEQ ID NO: 2286692 - RNA, 19 nt, Homo sapiens
  misc_RNA (1)...(19): siRNA sense strand
ggaaagagaugcaaggaca

SEQ ID NO: 2286693 - RNA, 19 nt, Homo sapiens
  misc_RNA (1)...(19): siRNA sense strand
uaauaaacauggaggaguu

SEQ ID NO: 2286694 - RNA, 19 nt, Homo sapiens
  misc_RNA (1)...(19): siRNA sense strand
ccaugaagaacguagcaaa

SEQ ID NO: 2286695 - RNA, 19 nt, Homo sapiens
  misc_RNA (1)...(19): siRNA sense strand
agaagaaguuggaugggau

SEQ ID NO: 2286696 - RNA, 19 nt, Homo sapiens
  misc_RNA (1)...(19): siRNA sense strand
agacaagagcccugugaga

SEQ ID NO: 2286697 - RNA, 19 nt, Homo sapiens
  misc_RNA (1)...(19): siRNA sense strand
ggaugaugugauugaagaa

SEQ ID NO: 2286698 - RNA, 19 nt, Homo sapiens
  misc_RNA (1)...(19): siRNA sense strand
cggaagcgaaguagagaca

SEQ ID NO: 2286699 - RNA, 19 nt, Homo sapiens
  misc_RNA (1)...(19): siRNA sense strand
acaagagcccugugagaga

SEQ ID NO: 2286700 - RNA, 19 nt, Homo sapiens
  misc_RNA (1)...(19): siRNA sense strand
ugaacgaaagagaagcaaa

SEQ ID NO: 2286701 - RNA, 19 nt, Homo sapiens
  misc_RNA (1)...(19): siRNA sense strand
caugaagaacguagcaaaa

SEQ ID NO: 2286702 - RNA, 19 nt, Homo sapiens
  misc_RNA (1)...(19): siRNA sense strand
acugaugcuucgagugcua

SEQ ID NO: 2286703 - RNA, 19 nt, Homo sapiens
  misc_RNA (1)...(19): siRNA sense strand
agucaugaacgaaagagaa

SEQ ID NO: 2286704 - RNA, 19 nt, Homo sapiens
  misc_RNA (1)...(19): siRNA sense strand
cugaugauggacagugaaa

SEQ ID NO: 2286705 - RNA, 19 nt, Homo sapiens
  misc_RNA (1)...(19): siRNA sense strand
agauaugcuucgugggauc

SEQ ID NO: 2286706 - RNA, 19 nt, Homo sapiens
  misc_RNA (1)...(19): siRNA sense strand
cccucaaacagaagaagaa

SEQ ID NO: 2286707 - RNA, 19 nt, Homo sapiens
  misc_RNA (1)...(19): siRNA sense strand
gguuccaaguagacgauga

SEQ ID NO: 2286708 - RNA, 19 nt, Homo sapiens
  misc_RNA (1)...(19): siRNA sense strand
gcucauuacacuucaacau

SEQ ID NO: 2286709 - RNA, 19 nt, Homo sapiens
  misc_RNA (1)...(19): siRNA sense strand
aguaaggaacggaagcgaa

SEQ ID NO: 2286710 - RNA, 19 nt, Homo sapiens
  misc_RNA (1)...(19): siRNA sense strand
cgucuucaguuaauggcaa

SEQ ID NO: 2286711 - RNA, 19 nt, Homo sapiens
  misc_RNA (1)...(19): siRNA sense strand
guucgagaugugaggauga

SEQ ID NO: 2286712 - RNA, 19 nt, Homo sapiens
  misc_RNA (1)...(19): siRNA sense strand
cagaagaagaaguuggaug

SEQ ID NO: 2286713 - RNA, 19 nt, Homo sapiens
  misc_RNA (1)...(19): siRNA sense strand
uggaauugauuugggaaca

SEQ ID NO: 2286714 - RNA, 19 nt, Homo sapiens
  misc_RNA (1)...(19): siRNA sense strand
uggaggaguuauucauauu

SEQ ID NO: 2286715 - RNA, 19 nt, Homo sapiens
  misc_RNA (1)...(19): siRNA sense strand
gagaacaaguugagcagug

SEQ ID NO: 2286716 - RNA, 19 nt, Homo sapiens
  misc_RNA (1)...(19): siRNA sense strand
ugacagaaauucaagacgu

SEQ ID NO: 2286717 - RNA, 19 nt, Homo sapiens
  misc_RNA (1)...(19): siRNA sense strand
cgacguucccgaagcaaaa

SEQ ID NO: 2286718 - RNA, 19 nt, Homo sapiens
  misc_RNA (1)...(19): siRNA sense strand
ccugauucuaugacagcaa

SEQ ID NO: 2286719 - RNA, 19 nt, Homo sapiens
  misc_RNA (1)...(19): siRNA sense strand
gcaaaaguaaggaacggaa

SEQ ID NO: 2286720 - RNA, 19 nt, Homo sapiens
  misc_RNA (1)...(19): siRNA sense strand
gcggcaagaauucgaccaa

SEQ ID NO: 2286721 - RNA, 19 nt, Homo sapiens
  misc_RNA (1)...(19): siRNA sense strand
aggaaagguucgagaugug

SEQ ID NO: 2286722 - RNA, 19 nt, Homo sapiens
  misc_RNA (1)...(19): siRNA sense strand
ugaacuagcaggaagacca

SEQ ID NO: 2286723 - RNA, 19 nt, Homo sapiens
  misc_RNA (1)...(19): siRNA sense strand
agauuaaggaugaugugau

SEQ ID NO: 2286724 - RNA, 19 nt, Homo sapiens
  misc_RNA (1)...(19): siRNA sense strand
uaaacauggaggaguuauu

SEQ ID NO: 2286725 - RNA, 19 nt, Homo sapiens
  misc_RNA (1)...(19): siRNA sense strand
acuggaaaggacuggaauu

SEQ ID NO: 2286726 - RNA, 19 nt, Homo sapiens
  misc_RNA (1)...(19): siRNA sense strand
caaauuaagcagacgacgu

SEQ ID NO: 2286727 - RNA, 19 nt, Homo sapiens
  misc_RNA (1)...(19): siRNA sense strand
gugaugaacuggaaaggac

SEQ ID NO: 2286728 - RNA, 19 nt, Homo sapiens
  misc_RNA (1)...(19): siRNA sense strand
gaugagaacaaguugagca

SEQ ID NO: 2286729 - RNA, 19 nt, Homo sapiens
  misc_RNA (1)...(19): siRNA sense strand
caaaaguccauucagaaaa

SEQ ID NO: 2286730 - RNA, 19 nt, Homo sapiens
  misc_RNA (1)...(19): siRNA sense strand
agcaggaagaccaaugaaa

SEQ ID NO: 2286731 - RNA, 19 nt, Homo sapiens
  misc_RNA (1)...(19): siRNA sense strand
ggaacggaagcgaaguaga

SEQ ID NO: 2286732 - RNA, 19 nt, Homo sapiens
  misc_RNA (1)...(19): siRNA sense strand
agaaagcgaaguagaagca

SEQ ID NO: 2286733 - RNA, 19 nt, Homo sapiens
  misc_RNA (1)...(19): siRNA sense strand
ggaaagagaugcaaggaca

SEQ ID NO: 2286734 - RNA, 19 nt, Homo sapiens
  misc_RNA (1)...(19): siRNA sense strand
uaauaaacauggaggaguu

SEQ ID NO: 2286735 - RNA, 19 nt, Homo sapiens
  misc_RNA (1)...(19): siRNA sense strand
ccaugaagaacguagcaaa

SEQ ID NO: 2286736 - RNA, 19 nt, Homo sapiens
  misc_RNA (1)...(19): siRNA sense strand
agaagaaguuggaugggau

SEQ ID NO: 2286737 - RNA, 19 nt, Homo sapiens
  misc_RNA (1)...(19): siRNA sense strand
agacaagagcccugugaga

SEQ ID NO: 2286738 - RNA, 19 nt, Homo sapiens
  misc_RNA (1)...(19): siRNA sense strand
ggaugaugugauugaagaa

SEQ ID NO: 2286739 - RNA, 19 nt, Homo sapiens
  misc_RNA (1)...(19): siRNA sense strand
cggaagcgaaguagagaca

SEQ ID NO: 2286740 - RNA, 19 nt, Homo sapiens
  misc_RNA (1)...(19): siRNA sense strand
acaagagcccugugagaga

SEQ ID NO: 2286741 - RNA, 19 nt, Homo sapiens
  misc_RNA (1)...(19): siRNA sense strand
ugaacgaaagagaagcaaa

SEQ ID NO: 2286742 - RNA, 19 nt, Homo sapiens
  misc_RNA (1)...(19): siRNA sense strand
caugaagaacguagcaaaa

SEQ ID NO: 2286743 - RNA, 19 nt, Homo sapiens
  misc_RNA (1)...(19): siRNA sense strand
acugaugcuucgagugcua

SEQ ID NO: 2286744 - RNA, 19 nt, Homo sapiens
  misc_RNA (1)...(19): siRNA sense strand
agucaugaacgaaagagaa

SEQ ID NO: 2286745 - RNA, 19 nt, Homo sapiens
  misc_RNA (1)...(19): siRNA sense strand
cugaugauggacagugaaa

SEQ ID NO: 2286746 - RNA, 19 nt, Homo sapiens
  misc_RNA (1)...(19): siRNA sense strand
agauaugcuucgugggauc

SEQ ID NO: 2286747 - RNA, 19 nt, Homo sapiens
  misc_RNA (1)...(19): siRNA sense strand
cccucaaacagaagaagaa

SEQ ID NO: 2286748 - RNA, 19 nt, Homo sapiens
  misc_RNA (1)...(19): siRNA sense strand
gguuccaaguagacgauga

SEQ ID NO: 2286749 - RNA, 19 nt, Homo sapiens
  misc_RNA (1)...(19): siRNA sense strand
gcucauuacacuucaacau

SEQ ID NO: 2286750 - RNA, 19 nt, Homo sapiens
  misc_RNA (1)...(19): siRNA sense strand
aguaaggaacggaagcgaa

SEQ ID NO: 2286751 - RNA, 19 nt, Homo sapiens
  misc_RNA (1)...(19): siRNA sense strand
cgucuucaguuaauggcaa

SEQ ID NO: 2286752 - RNA, 19 nt, Homo sapiens
  misc_RNA (1)...(19): siRNA sense strand
guucgagaugugaggauga

SEQ ID NO: 2286753 - RNA, 19 nt, Homo sapiens
  misc_RNA (1)...(19): siRNA sense strand
cagaagaagaaguuggaug

SEQ ID NO: 2286754 - RNA, 19 nt, Homo sapiens
  misc_RNA (1)...(19): siRNA sense strand
uggaauugauuugggaaca

SEQ ID NO: 2286755 - RNA, 19 nt, Homo sapiens
  misc_RNA (1)...(19): siRNA sense strand
uggaggaguuauucauauu

SEQ ID NO: 2286756 - RNA, 19 nt, Homo sapiens
  misc_RNA (1)...(19): siRNA sense strand
gagaacaaguugagcagug

SEQ ID NO: 2286757 - RNA, 19 nt, Homo sapiens
  misc_RNA (1)...(19): siRNA sense strand
ugacagaaauucaagacgu

SEQ ID NO: 2286758 - RNA, 19 nt, Homo sapiens
  misc_RNA (1)...(19): siRNA sense strand
cgacguucccgaagcaaaa

SEQ ID NO: 2286759 - RNA, 19 nt, Homo sapiens
  misc_RNA (1)...(19): siRNA sense strand
ccugauucuaugacagcaa

SEQ ID NO: 2286760 - RNA, 19 nt, Homo sapiens
  misc_RNA (1)...(19): siRNA sense strand
gcaaaaguaaggaacggaa

SEQ ID NO: 2286761 - RNA, 19 nt, Homo sapiens
  misc_RNA (1)...(19): siRNA sense strand
gcggcaagaauucgaccaa

SEQ ID NO: 2286762 - RNA, 19 nt, Homo sapiens
  misc_RNA (1)...(19): siRNA sense strand
aggaaagguucgagaugug

SEQ ID NO: 2286763 - RNA, 19 nt, Homo sapiens
  misc_RNA (1)...(19): siRNA sense strand
ugaacuagcaggaagacca

SEQ ID NO: 2286764 - RNA, 19 nt, Homo sapiens
  misc_RNA (1)...(19): siRNA sense strand
agauuaaggaugaugugau

SEQ ID NO: 2286765 - RNA, 19 nt, Homo sapiens
  misc_RNA (1)...(19): siRNA sense strand
uaaacauggaggaguuauu

SEQ ID NO: 2286766 - RNA, 19 nt, Homo sapiens
  misc_RNA (1)...(19): siRNA sense strand
acuggaaaggacuggaauu

SEQ ID NO: 2286767 - RNA, 19 nt, Homo sapiens
  misc_RNA (1)...(19): siRNA sense strand
caaauuaagcagacgacgu

SEQ ID NO: 2286768 - RNA, 19 nt, Homo sapiens
  misc_RNA (1)...(19): siRNA sense strand
gugaugaacuggaaaggac

SEQ ID NO: 2286769 - RNA, 19 nt, Homo sapiens
  misc_RNA (1)...(19): siRNA sense strand
gaugagaacaaguugagca

SEQ ID NO: 2286770 - RNA, 19 nt, Homo sapiens
  misc_RNA (1)...(19): siRNA sense strand
caaaaguccauucagaaaa

SEQ ID NO: 2286771 - RNA, 19 nt, Homo sapiens
  misc_RNA (1)...(19): siRNA sense strand
agcaggaagaccaaugaaa

SEQ ID NO: 2286772 - RNA, 19 nt, Homo sapiens
  misc_RNA (1)...(19): siRNA sense strand
ggaacggaagcgaaguaga

SEQ ID NO: 2286773 - RNA, 19 nt, Homo sapiens
  misc_RNA (1)...(19): siRNA sense strand
agaaagcgaaguagaagca

SEQ ID NO: 2286774 - RNA, 19 nt, Homo sapiens
  misc_RNA (1)...(19): siRNA sense strand
uaauaaacauggaggaguu

SEQ ID NO: 2286775 - RNA, 19 nt, Homo sapiens
  misc_RNA (1)...(19): siRNA sense strand
agaagaaguuggaugggau

SEQ ID NO: 2286776 - RNA, 19 nt, Homo sapiens
  misc_RNA (1)...(19): siRNA sense strand
ggaugaugugauugaagaa

SEQ ID NO: 2286777 - RNA, 19 nt, Homo sapiens
  misc_RNA (1)...(19): siRNA sense strand
acugaugcuucgagugcua

SEQ ID NO: 2286778 - RNA, 19 nt, Homo sapiens
  misc_RNA (1)...(19): siRNA sense strand
cugaugauggacagugaaa

SEQ ID NO: 2286779 - RNA, 19 nt, Homo sapiens
  misc_RNA (1)...(19): siRNA sense strand
agauaugcuucgugggauc

SEQ ID NO: 2286780 - RNA, 19 nt, Homo sapiens
  misc_RNA (1)...(19): siRNA sense strand
cccucaaacagaagaagaa

SEQ ID NO: 2286781 - RNA, 19 nt, Homo sapiens
  misc_RNA (1)...(19): siRNA sense strand
gguuccaaguagacgauga

SEQ ID NO: 2286782 - RNA, 19 nt, Homo sapiens
  misc_RNA (1)...(19): siRNA sense strand
gcucauuacacuucaacau

SEQ ID NO: 2286783 - RNA, 19 nt, Homo sapiens
  misc_RNA (1)...(19): siRNA sense strand
cgucuucaguuaauggcaa

SEQ ID NO: 2286784 - RNA, 19 nt, Homo sapiens
  misc_RNA (1)...(19): siRNA sense strand
guucgagaugugaggauga

SEQ ID NO: 2286785 - RNA, 19 nt, Homo sapiens
  misc_RNA (1)...(19): siRNA sense strand
cagaagaagaaguuggaug

SEQ ID NO: 2286786 - RNA, 19 nt, Homo sapiens
  misc_RNA (1)...(19): siRNA sense strand
uggaauugauuugggaaca

SEQ ID NO: 2286787 - RNA, 19 nt, Homo sapiens
  misc_RNA (1)...(19): siRNA sense strand
uggaggaguuauucauauu

SEQ ID NO: 2286788 - RNA, 19 nt, Homo sapiens
  misc_RNA (1)...(19): siRNA sense strand
ugacagaaauucaagacgu

SEQ ID NO: 2286789 - RNA, 19 nt, Homo sapiens
  misc_RNA (1)...(19): siRNA sense strand
ccugauucuaugacagcaa

SEQ ID NO: 2286790 - RNA, 19 nt, Homo sapiens
  misc_RNA (1)...(19): siRNA sense strand
gcggcaagaauucgaccaa

SEQ ID NO: 2286791 - RNA, 19 nt, Homo sapiens
  misc_RNA (1)...(19): siRNA sense strand
ugaacuagcaggaagacca

SEQ ID NO: 2286792 - RNA, 19 nt, Homo sapiens
  misc_RNA (1)...(19): siRNA sense strand
aggaaagguucgagaugug

SEQ ID NO: 2286793 - RNA, 19 nt, Homo sapiens
  misc_RNA (1)...(19): siRNA sense strand
agauuaaggaugaugugau

SEQ ID NO: 2286794 - RNA, 19 nt, Homo sapiens
  misc_RNA (1)...(19): siRNA sense strand
uaaacauggaggaguuauu

SEQ ID NO: 2286795 - RNA, 19 nt, Homo sapiens
  misc_RNA (1)...(19): siRNA sense strand
acuggaaaggacuggaauu

SEQ ID NO: 2286796 - RNA, 19 nt, Homo sapiens
  misc_RNA (1)...(19): siRNA sense strand
gugaugaacuggaaaggac

SEQ ID NO: 2286797 - RNA, 19 nt, Homo sapiens
  misc_RNA (1)...(19): siRNA sense strand
agcaggaagaccaaugaaa

SEQ ID NO: 2286798 - RNA, 19 nt, Homo sapiens
  misc_RNA (1)...(19): siRNA sense strand
uaauaaacauggaggaguu

SEQ ID NO: 2286799 - RNA, 19 nt, Homo sapiens
  misc_RNA (1)...(19): siRNA sense strand
agaagaaguuggaugggau

SEQ ID NO: 2286800 - RNA, 19 nt, Homo sapiens
  misc_RNA (1)...(19): siRNA sense strand
ggaugaugugauugaagaa

SEQ ID NO: 2286801 - RNA, 19 nt, Homo sapiens
  misc_RNA (1)...(19): siRNA sense strand
acugaugcuucgagugcua

SEQ ID NO: 2286802 - RNA, 19 nt, Homo sapiens
  misc_RNA (1)...(19): siRNA sense strand
cugaugauggacagugaaa

SEQ ID NO: 2286803 - RNA, 19 nt, Homo sapiens
  misc_RNA (1)...(19): siRNA sense strand
agauaugcuucgugggauc

SEQ ID NO: 2286804 - RNA, 19 nt, Homo sapiens
  misc_RNA (1)...(19): siRNA sense strand
cccucaaacagaagaagaa

SEQ ID NO: 2286805 - RNA, 19 nt, Homo sapiens
  misc_RNA (1)...(19): siRNA sense strand
gguuccaaguagacgauga

SEQ ID NO: 2286806 - RNA, 19 nt, Homo sapiens
  misc_RNA (1)...(19): siRNA sense strand
gcucauuacacuucaacau

SEQ ID NO: 2286807 - RNA, 19 nt, Homo sapiens
  misc_RNA (1)...(19): siRNA sense strand
cgucuucaguuaauggcaa

SEQ ID NO: 2286808 - RNA, 19 nt, Homo sapiens
  misc_RNA (1)...(19): siRNA sense strand
guucgagaugugaggauga

SEQ ID NO: 2286809 - RNA, 19 nt, Homo sapiens
  misc_RNA (1)...(19): siRNA sense strand
cagaagaagaaguuggaug

SEQ ID NO: 2286810 - RNA, 19 nt, Homo sapiens
  misc_RNA (1)...(19): siRNA sense strand
uggaauugauuugggaaca

SEQ ID NO: 2286811 - RNA, 19 nt, Homo sapiens
  misc_RNA (1)...(19): siRNA sense strand
uggaggaguuauucauauu

SEQ ID NO: 2286812 - RNA, 19 nt, Homo sapiens
  misc_RNA (1)...(19): siRNA sense strand
ugacagaaauucaagacgu

SEQ ID NO: 2286813 - RNA, 19 nt, Homo sapiens
  misc_RNA (1)...(19): siRNA sense strand
ccugauucuaugacagcaa

SEQ ID NO: 2286814 - RNA, 19 nt, Homo sapiens
  misc_RNA (1)...(19): siRNA sense strand
gcggcaagaauucgaccaa

SEQ ID NO: 2286815 - RNA, 19 nt, Homo sapiens
  misc_RNA (1)...(19): siRNA sense strand
ugaacuagcaggaagacca

SEQ ID NO: 2286816 - RNA, 19 nt, Homo sapiens
  misc_RNA (1)...(19): siRNA sense strand
aggaaagguucgagaugug

SEQ ID NO: 2286817 - RNA, 19 nt, Homo sapiens
  misc_RNA (1)...(19): siRNA sense strand
agauuaaggaugaugugau

SEQ ID NO: 2286818 - RNA, 19 nt, Homo sapiens
  misc_RNA (1)...(19): siRNA sense strand
uaaacauggaggaguuauu

SEQ ID NO: 2286819 - RNA, 19 nt, Homo sapiens
  misc_RNA (1)...(19): siRNA sense strand
acuggaaaggacuggaauu

SEQ ID NO: 2286820 - RNA, 19 nt, Homo sapiens
  misc_RNA (1)...(19): siRNA sense strand
gugaugaacuggaaaggac

SEQ ID NO: 2286821 - RNA, 19 nt, Homo sapiens
  misc_RNA (1)...(19): siRNA sense strand
agcaggaagaccaaugaaa

SEQ ID NO: 2286822 - RNA, 19 nt, Homo sapiens
  misc_RNA (1)...(19): siRNA sense strand
uaauaaacauggaggaguu

SEQ ID NO: 2286823 - RNA, 19 nt, Homo sapiens
  misc_RNA (1)...(19): siRNA sense strand
agaagaaguuggaugggau

SEQ ID NO: 2286824 - RNA, 19 nt, Homo sapiens
  misc_RNA (1)...(19): siRNA sense strand
ggaugaugugauugaagaa

SEQ ID NO: 2286825 - RNA, 19 nt, Homo sapiens
  misc_RNA (1)...(19): siRNA sense strand
acugaugcuucgagugcua

SEQ ID NO: 2286826 - RNA, 19 nt, Homo sapiens
  misc_RNA (1)...(19): siRNA sense strand
cugaugauggacagugaaa

SEQ ID NO: 2286827 - RNA, 19 nt, Homo sapiens
  misc_RNA (1)...(19): siRNA sense strand
agauaugcuucgugggauc

SEQ ID NO: 2286828 - RNA, 19 nt, Homo sapiens
  misc_RNA (1)...(19): siRNA sense strand
cccucaaacagaagaagaa

SEQ ID NO: 2286829 - RNA, 19 nt, Homo sapiens
  misc_RNA (1)...(19): siRNA sense strand
gguuccaaguagacgauga

SEQ ID NO: 2286830 - RNA, 19 nt, Homo sapiens
  misc_RNA (1)...(19): siRNA sense strand
gcucauuacacuucaacau

SEQ ID NO: 2286831 - RNA, 19 nt, Homo sapiens
  misc_RNA (1)...(19): siRNA sense strand
cgucuucaguuaauggcaa

SEQ ID NO: 2286832 - RNA, 19 nt, Homo sapiens
  misc_RNA (1)...(19): siRNA sense strand
guucgagaugugaggauga

SEQ ID NO: 2286833 - RNA, 19 nt, Homo sapiens
  misc_RNA (1)...(19): siRNA sense strand
cagaagaagaaguuggaug

SEQ ID NO: 2286834 - RNA, 19 nt, Homo sapiens
  misc_RNA (1)...(19): siRNA sense strand
uggaauugauuugggaaca

SEQ ID NO: 2286835 - RNA, 19 nt, Homo sapiens
  misc_RNA (1)...(19): siRNA sense strand
uggaggaguuauucauauu

SEQ ID NO: 2286836 - RNA, 19 nt, Homo sapiens
  misc_RNA (1)...(19): siRNA sense strand
ugacagaaauucaagacgu

SEQ ID NO: 2286837 - RNA, 19 nt, Homo sapiens
  misc_RNA (1)...(19): siRNA sense strand
ccugauucuaugacagcaa

SEQ ID NO: 2286838 - RNA, 19 nt, Homo sapiens
  misc_RNA (1)...(19): siRNA sense strand
gcggcaagaauucgaccaa

SEQ ID NO: 2286839 - RNA, 19 nt, Homo sapiens
  misc_RNA (1)...(19): siRNA sense strand
ugaacuagcaggaagacca

SEQ ID NO: 2286840 - RNA, 19 nt, Homo sapiens
  misc_RNA (1)...(19): siRNA sense strand
aggaaagguucgagaugug

SEQ ID NO: 2286841 - RNA, 19 nt, Homo sapiens
  misc_RNA (1)...(19): siRNA sense strand
agauuaaggaugaugugau

SEQ ID NO: 2286842 - RNA, 19 nt, Homo sapiens
  misc_RNA (1)...(19): siRNA sense strand
uaaacauggaggaguuauu

SEQ ID NO: 2286843 - RNA, 19 nt, Homo sapiens
  misc_RNA (1)...(19): siRNA sense strand
acuggaaaggacuggaauu

SEQ ID NO: 2286844 - RNA, 19 nt, Homo sapiens
  misc_RNA (1)...(19): siRNA sense strand
gugaugaacuggaaaggac

SEQ ID NO: 2286845 - RNA, 19 nt, Homo sapiens
  misc_RNA (1)...(19): siRNA sense strand
agcaggaagaccaaugaaa

SEQ ID NO: 2286846 - RNA, 19 nt, Homo sapiens
  misc_RNA (1)...(19): siRNA sense strand
gaggaaucgaucaaggaaa

SEQ ID NO: 2286847 - RNA, 19 nt, Homo sapiens
  misc_RNA (1)...(19): siRNA sense strand
gcaaggaauuugaugccau

SEQ ID NO: 2286848 - RNA, 19 nt, Homo sapiens
  misc_RNA (1)...(19): siRNA sense strand
ugcuagaaguccugaaaca

SEQ ID NO: 2286849 - RNA, 19 nt, Homo sapiens
  misc_RNA (1)...(19): siRNA sense strand
acacuaaagaauggaacaa

SEQ ID NO: 2286850 - RNA, 19 nt, Homo sapiens
  misc_RNA (1)...(19): siRNA sense strand
aagugaaaaucgugaugaa

SEQ ID NO: 2286851 - RNA, 19 nt, Homo sapiens
  misc_RNA (1)...(19): siRNA sense strand
uugaagugggcaaggaauu

SEQ ID NO: 2286852 - RNA, 19 nt, Homo sapiens
  misc_RNA (1)...(19): siRNA sense strand
aaauaagagaacugagcca

SEQ ID NO: 2286853 - RNA, 19 nt, Homo sapiens
  misc_RNA (1)...(19): siRNA sense strand
gugaugaaguugaagcugu

SEQ ID NO: 2286854 - RNA, 19 nt, Homo sapiens
  misc_RNA (1)...(19): siRNA sense strand
ggggcuggauggugagauu

SEQ ID NO: 2286855 - RNA, 19 nt, Homo sapiens
  misc_RNA (1)...(19): siRNA sense strand
agguuuaugugggcggaaa

SEQ ID NO: 2286856 - RNA, 19 nt, Homo sapiens
  misc_RNA (1)...(19): siRNA sense strand
agugaagcccauagugaca

SEQ ID NO: 2286857 - RNA, 19 nt, Homo sapiens
  misc_RNA (1)...(19): siRNA sense strand
cgugagcgacagcggcaaa

SEQ ID NO: 2286858 - RNA, 19 nt, Homo sapiens
  misc_RNA (1)...(19): siRNA sense strand
gagccauauaagugaaaau

SEQ ID NO: 2286859 - RNA, 19 nt, Homo sapiens
  misc_RNA (1)...(19): siRNA sense strand
cuaggagaugaucgaaaua

SEQ ID NO: 2286860 - RNA, 19 nt, Homo sapiens
  misc_RNA (1)...(19): siRNA sense strand
gcgcacaucuuccgaggga

SEQ ID NO: 2286861 - RNA, 19 nt, Homo sapiens
  misc_RNA (1)...(19): siRNA sense strand
uggugagauuggaaacuuu

SEQ ID NO: 2286862 - RNA, 19 nt, Homo sapiens
  misc_RNA (1)...(19): siRNA sense strand
ccgacauuacagauaaauu

SEQ ID NO: 2286863 - RNA, 19 nt, Homo sapiens
  misc_RNA (1)...(19): siRNA sense strand
cuaaagaauggaacaacca

SEQ ID NO: 2286864 - RNA, 19 nt, Homo sapiens
  misc_RNA (1)...(19): siRNA sense strand
cugcagaagaacugaacgu

SEQ ID NO: 2286865 - RNA, 19 nt, Homo sapiens
  misc_RNA (1)...(19): siRNA sense strand
uugcacauucagagccaua

SEQ ID NO: 2286866 - RNA, 19 nt, Homo sapiens
  misc_RNA (1)...(19): siRNA sense strand
uugacaaauaagacaguga

SEQ ID NO: 2286867 - RNA, 19 nt, Homo sapiens
  misc_RNA (1)...(19): siRNA sense strand
uggacuaugccaagaucua

SEQ ID NO: 2286868 - RNA, 19 nt, Homo sapiens
  misc_RNA (1)...(19): siRNA sense strand
uggacuaugccaagaucua

SEQ ID NO: 2286869 - RNA, 19 nt, Homo sapiens
  misc_RNA (1)...(19): siRNA sense strand
auguggagauaaaggacaa

SEQ ID NO: 2286870 - RNA, 19 nt, Homo sapiens
  misc_RNA (1)...(19): siRNA sense strand
aaacauaugaccaggcaga

SEQ ID NO: 2286871 - RNA, 19 nt, Homo sapiens
  misc_RNA (1)...(19): siRNA sense strand
acauaaaggaaaugguaac

SEQ ID NO: 2286872 - RNA, 19 nt, Homo sapiens
  misc_RNA (1)...(19): siRNA sense strand
caccaaacaaagagcuuau

SEQ ID NO: 2286873 - RNA, 19 nt, Homo sapiens
  misc_RNA (1)...(19): siRNA sense strand
ccauuguguuuaugcaaaa

SEQ ID NO: 2286874 - RNA, 19 nt, Homo sapiens
  misc_RNA (1)...(19): siRNA sense strand
agguaaaguauuuguccau

SEQ ID NO: 2286875 - RNA, 19 nt, Homo sapiens
  misc_RNA (1)...(19): siRNA sense strand
ggggaguauuugaugagua

SEQ ID NO: 2286876 - RNA, 19 nt, Homo sapiens
  misc_RNA (1)...(19): siRNA sense strand
uggagauaaaggacaauau

SEQ ID NO: 2286877 - RNA, 19 nt, Homo sapiens
  misc_RNA (1)...(19): siRNA sense strand
ucccaaaacaagaaacaua

SEQ ID NO: 2286878 - RNA, 19 nt, Homo sapiens
  misc_RNA (1)...(19): siRNA sense strand
cacugguaacuuugaauaa

SEQ ID NO: 2286879 - RNA, 19 nt, Homo sapiens
  misc_RNA (1)...(19): siRNA sense strand
auaugauggcauugugauu

SEQ ID NO: 2286880 - RNA, 19 nt, Homo sapiens
  misc_RNA (1)...(19): siRNA sense strand
gagguaaaguauuugucca

SEQ ID NO: 2286881 - RNA, 19 nt, Homo sapiens
  misc_RNA (1)...(19): siRNA sense strand
gcaagauaucauagagaaa

SEQ ID NO: 2286882 - RNA, 19 nt, Homo sapiens
  misc_RNA (1)...(19): siRNA sense strand
gcuuaguuguggagagaau

SEQ ID NO: 2286883 - RNA, 19 nt, Homo sapiens
  misc_RNA (1)...(19): siRNA sense strand
cuauaaacauggagaacca

SEQ ID NO: 2286884 - RNA, 19 nt, Homo sapiens
  misc_RNA (1)...(19): siRNA sense strand
agccaaagauguaggaaaa

SEQ ID NO: 2286885 - RNA, 19 nt, Homo sapiens
  misc_RNA (1)...(19): siRNA sense strand
gcaauuuguucuaaggcaa

SEQ ID NO: 2286886 - RNA, 19 nt, Homo sapiens
  misc_RNA (1)...(19): siRNA sense strand
acuuagaccuguagaucaa

SEQ ID NO: 2286887 - RNA, 19 nt, Homo sapiens
  misc_RNA (1)...(19): siRNA sense strand
agaaagaauguuaagggaa

SEQ ID NO: 2286888 - RNA, 19 nt, Homo sapiens
  misc_RNA (1)...(19): siRNA sense strand
ucuuacggcugcagagaaa

SEQ ID NO: 2286889 - RNA, 19 nt, Homo sapiens
  misc_RNA (1)...(19): siRNA sense strand
uagccaaagauguaggaaa

SEQ ID NO: 2286890 - RNA, 19 nt, Homo sapiens
  misc_RNA (1)...(19): siRNA sense strand
cacaauugacagugauaua

SEQ ID NO: 2286891 - RNA, 19 nt, Homo sapiens
  misc_RNA (1)...(19): siRNA sense strand
aguauagacaagugagauu

SEQ ID NO: 2286892 - RNA, 19 nt, Homo sapiens
  misc_RNA (1)...(19): siRNA sense strand
auccaaauaugcugaguaa

SEQ ID NO: 2286893 - RNA, 19 nt, Homo sapiens
  misc_RNA (1)...(19): siRNA sense strand
caggaggaccauuaggaaa

SEQ ID NO: 2286894 - RNA, 19 nt, Homo sapiens
  misc_RNA (1)...(19): siRNA sense strand
cuaaaggguuugcaggaau

SEQ ID NO: 2286895 - RNA, 19 nt, Homo sapiens
  misc_RNA (1)...(19): siRNA sense strand
aggagauggagaagagauu

SEQ ID NO: 2286896 - RNA, 19 nt, Homo sapiens
  misc_RNA (1)...(19): siRNA sense strand
gaguaaugugggaggagau

SEQ ID NO: 2286897 - RNA, 19 nt, Homo sapiens
  misc_RNA (1)...(19): siRNA sense strand
aggaggaccauuaggaaau

SEQ ID NO: 2286898 - RNA, 19 nt, Homo sapiens
  misc_RNA (1)...(19): siRNA sense strand
cgauagaugaauugaaagu

SEQ ID NO: 2286899 - RNA, 19 nt, Homo sapiens
  misc_RNA (1)...(19): siRNA sense strand
uagagaaagaauugaguga

SEQ ID NO: 2286900 - RNA, 19 nt, Homo sapiens
  misc_RNA (1)...(19): siRNA sense strand
gugauauauucauguggaa

SEQ ID NO: 2286901 - RNA, 19 nt, Homo sapiens
  misc_RNA (1)...(19): siRNA sense strand
auauacacgaucugagaaa

SEQ ID NO: 2286902 - RNA, 19 nt, Homo sapiens
  misc_RNA (1)...(19): siRNA sense strand
ggauccaacuucagauaca

SEQ ID NO: 2286903 - RNA, 19 nt, Homo sapiens
  misc_RNA (1)...(19): siRNA sense strand
ggcucuggcuuuauggaaa

SEQ ID NO: 2286904 - RNA, 19 nt, Homo sapiens
  misc_RNA (1)...(19): siRNA sense strand
gaaacuucuuugugaacau

SEQ ID NO: 2286905 - RNA, 19 nt, Homo sapiens
  misc_RNA (1)...(19): siRNA sense strand
gcugaagcagggugguuua

SEQ ID NO: 2286906 - RNA, 19 nt, Homo sapiens
  misc_RNA (1)...(19): siRNA sense strand
cgguauuacgagaagaaca

SEQ ID NO: 2286907 - RNA, 19 nt, Homo sapiens
  misc_RNA (1)...(19): siRNA sense strand
uggagaagagauugaaaga

SEQ ID NO: 2286908 - RNA, 19 nt, Homo sapiens
  misc_RNA (1)...(19): siRNA sense strand
uccaaauacuacugcuaaa

SEQ ID NO: 2286909 - RNA, 19 nt, Homo sapiens
  misc_RNA (1)...(19): siRNA sense strand
acauggagaaccagaagaa

SEQ ID NO: 2286910 - RNA, 19 nt, Homo sapiens
  misc_RNA (1)...(19): siRNA sense strand
gugaagcacagaugagauu

SEQ ID NO: 2286911 - RNA, 19 nt, Homo sapiens
  misc_RNA (1)...(19): siRNA sense strand
aacaggaacugcagaggaa

SEQ ID NO: 2286912 - RNA, 19 nt, Homo sapiens
  misc_RNA (1)...(19): siRNA sense strand
uggccaaaguugaucaaaa

SEQ ID NO: 2286913 - RNA, 19 nt, Homo sapiens
  misc_RNA (1)...(19): siRNA sense strand
ggacaagauggacaaggaa

SEQ ID NO: 2286914 - RNA, 19 nt, Homo sapiens
  misc_RNA (1)...(19): siRNA sense strand
ucauaaacuuagaccugua

SEQ ID NO: 2286915 - RNA, 19 nt, Homo sapiens
  misc_RNA (1)...(19): siRNA sense strand
cagugugugcucugggaaa

SEQ ID NO: 2286916 - RNA, 19 nt, Homo sapiens
  misc_RNA (1)...(19): siRNA sense strand
aaauaugaguugugugacu

SEQ ID NO: 2286917 - RNA, 19 nt, Homo sapiens
  misc_RNA (1)...(19): siRNA sense strand
caguaaugcugcucgugua

SEQ ID NO: 2286918 - RNA, 19 nt, Homo sapiens
  misc_RNA (1)...(19): siRNA sense strand
ugguuuagccaaagaugua

SEQ ID NO: 2286919 - RNA, 19 nt, Homo sapiens
  misc_RNA (1)...(19): siRNA sense strand
gagauggagaagagauuga

SEQ ID NO: 2286920 - RNA, 19 nt, Homo sapiens
  misc_RNA (1)...(19): siRNA sense strand
agggaaucauuaaaggaau

SEQ ID NO: 2286921 - RNA, 19 nt, Homo sapiens
  misc_RNA (1)...(19): siRNA sense strand
acugauaauggcagaauuu

SEQ ID NO: 2286922 - RNA, 19 nt, Homo sapiens
  misc_RNA (1)...(19): siRNA sense strand
agaaccagaagaagacaua

SEQ ID NO: 2286923 - RNA, 19 nt, Homo sapiens
  misc_RNA (1)...(19): siRNA sense strand
auggagaaccagaagaaga

SEQ ID NO: 2286924 - RNA, 19 nt, Homo sapiens
  misc_RNA (1)...(19): siRNA sense strand
cguaauacagacaaugaau

SEQ ID NO: 2286925 - RNA, 19 nt, Homo sapiens
  misc_RNA (1)...(19): siRNA sense strand
guuuauaugaaguagccua

SEQ ID NO: 2286926 - RNA, 19 nt, Homo sapiens
  misc_RNA (1)...(19): siRNA sense strand
cuuuagguaugguggugaa

SEQ ID NO: 2286927 - RNA, 19 nt, Homo sapiens
  misc_RNA (1)...(19): siRNA sense strand
aagaaagaauguuaaggga

SEQ ID NO: 2286928 - RNA, 19 nt, Homo sapiens
  misc_RNA (1)...(19): siRNA sense strand
gcugaguaaugaagaagca

SEQ ID NO: 2286929 - RNA, 19 nt, Homo sapiens
  misc_RNA (1)...(19): siRNA sense strand
cuauauuggugcagacacu

SEQ ID NO: 2286930 - RNA, 19 nt, Homo sapiens
  misc_RNA (1)...(19): siRNA sense strand
guaaugaagaagcaggaca

SEQ ID NO: 2286931 - RNA, 19 nt, Homo sapiens
  misc_RNA (1)...(19): siRNA sense strand
agaacagaaguuucaguaa

SEQ ID NO: 2286932 - RNA, 19 nt, Homo sapiens
  misc_RNA (1)...(19): siRNA sense strand
cagaaaaugaggauaauga

SEQ ID NO: 2286933 - RNA, 19 nt, Homo sapiens
  misc_RNA (1)...(19): siRNA sense strand
ggauagaaugcaugcucuu

SEQ ID NO: 2286934 - RNA, 19 nt, Homo sapiens
  misc_RNA (1)...(19): siRNA sense strand
gcuucguaauacagacaau

SEQ ID NO: 2286935 - RNA, 19 nt, Homo sapiens
  misc_RNA (1)...(19): siRNA sense strand
ggaaaggauggcuguuuau

SEQ ID NO: 2286936 - RNA, 19 nt, Homo sapiens
  misc_RNA (1)...(19): siRNA sense strand
cuacaagaacuaaaggguu

SEQ ID NO: 2286937 - RNA, 19 nt, Homo sapiens
  misc_RNA (1)...(19): siRNA sense strand
ccauuaggaaauccaaaua

SEQ ID NO: 2286938 - RNA, 19 nt, Homo sapiens
  misc_RNA (1)...(19): siRNA sense strand
ccaagaaagauuaaacagu

SEQ ID NO: 2286939 - RNA, 19 nt, Homo sapiens
  misc_RNA (1)...(19): siRNA sense strand
ugaagaagcaggacaucau

SEQ ID NO: 2286940 - RNA, 19 nt, Homo sapiens
  misc_RNA (1)...(19): siRNA sense strand
aagucgaccuugcagauaa

SEQ ID NO: 2286941 - RNA, 19 nt, Homo sapiens
  misc_RNA (1)...(19): siRNA sense strand
auucugagcugauggacau

SEQ ID NO: 2286942 - RNA, 19 nt, Homo sapiens
  misc_RNA (1)...(19): siRNA sense strand
gggaauuugcugacccauu

SEQ ID NO: 2286943 - RNA, 19 nt, Homo sapiens
  misc_RNA (1)...(19): siRNA sense strand
gauuguucuccuuggcaaa

SEQ ID NO: 2286944 - RNA, 19 nt, Homo sapiens
  misc_RNA (1)...(19): siRNA sense strand
cagcuaugcuaauuugcaa

SEQ ID NO: 2286945 - RNA, 19 nt, Homo sapiens
  misc_RNA (1)...(19): siRNA sense strand
ggaaaauaaaccacucaaa

SEQ ID NO: 2286946 - RNA, 19 nt, Homo sapiens
  misc_RNA (1)...(19): siRNA sense strand
aagaguggcaacagagaga

SEQ ID NO: 2286947 - RNA, 19 nt, Homo sapiens
  misc_RNA (1)...(19): siRNA sense strand
uaaugaagaagcaggacau

SEQ ID NO: 2286948 - RNA, 19 nt, Homo sapiens
  misc_RNA (1)...(19): siRNA sense strand
agccauucuuagugccaaa

SEQ ID NO: 2286949 - RNA, 19 nt, Homo sapiens
  misc_RNA (1)...(19): siRNA sense strand
gcaagauaucauagagaaa

SEQ ID NO: 2286950 - RNA, 19 nt, Homo sapiens
  misc_RNA (1)...(19): siRNA sense strand
gcuuaguuguggagagaau

SEQ ID NO: 2286951 - RNA, 19 nt, Homo sapiens
  misc_RNA (1)...(19): siRNA sense strand
cuauaaacauggagaacca

SEQ ID NO: 2286952 - RNA, 19 nt, Homo sapiens
  misc_RNA (1)...(19): siRNA sense strand
agccaaagauguaggaaaa

SEQ ID NO: 2286953 - RNA, 19 nt, Homo sapiens
  misc_RNA (1)...(19): siRNA sense strand
gcaauuuguucuaaggcaa

SEQ ID NO: 2286954 - RNA, 19 nt, Homo sapiens
  misc_RNA (1)...(19): siRNA sense strand
acuuagaccuguagaucaa

SEQ ID NO: 2286955 - RNA, 19 nt, Homo sapiens
  misc_RNA (1)...(19): siRNA sense strand
agaaagaauguuaagggaa

SEQ ID NO: 2286956 - RNA, 19 nt, Homo sapiens
  misc_RNA (1)...(19): siRNA sense strand
ucuuacggcugcagagaaa

SEQ ID NO: 2286957 - RNA, 19 nt, Homo sapiens
  misc_RNA (1)...(19): siRNA sense strand
uagccaaagauguaggaaa

SEQ ID NO: 2286958 - RNA, 19 nt, Homo sapiens
  misc_RNA (1)...(19): siRNA sense strand
cacaauugacagugauaua

SEQ ID NO: 2286959 - RNA, 19 nt, Homo sapiens
  misc_RNA (1)...(19): siRNA sense strand
aguauagacaagugagauu

SEQ ID NO: 2286960 - RNA, 19 nt, Homo sapiens
  misc_RNA (1)...(19): siRNA sense strand
auccaaauaugcugaguaa

SEQ ID NO: 2286961 - RNA, 19 nt, Homo sapiens
  misc_RNA (1)...(19): siRNA sense strand
caggaggaccauuaggaaa

SEQ ID NO: 2286962 - RNA, 19 nt, Homo sapiens
  misc_RNA (1)...(19): siRNA sense strand
cuaaaggguuugcaggaau

SEQ ID NO: 2286963 - RNA, 19 nt, Homo sapiens
  misc_RNA (1)...(19): siRNA sense strand
aggagauggagaagagauu

SEQ ID NO: 2286964 - RNA, 19 nt, Homo sapiens
  misc_RNA (1)...(19): siRNA sense strand
gaguaaugugggaggagau

SEQ ID NO: 2286965 - RNA, 19 nt, Homo sapiens
  misc_RNA (1)...(19): siRNA sense strand
aggaggaccauuaggaaau

SEQ ID NO: 2286966 - RNA, 19 nt, Homo sapiens
  misc_RNA (1)...(19): siRNA sense strand
cgauagaugaauugaaagu

SEQ ID NO: 2286967 - RNA, 19 nt, Homo sapiens
  misc_RNA (1)...(19): siRNA sense strand
uagagaaagaauugaguga

SEQ ID NO: 2286968 - RNA, 19 nt, Homo sapiens
  misc_RNA (1)...(19): siRNA sense strand
gugauauauucauguggaa

SEQ ID NO: 2286969 - RNA, 19 nt, Homo sapiens
  misc_RNA (1)...(19): siRNA sense strand
auauacacgaucugagaaa

SEQ ID NO: 2286970 - RNA, 19 nt, Homo sapiens
  misc_RNA (1)...(19): siRNA sense strand
ggauccaacuucagauaca

SEQ ID NO: 2286971 - RNA, 19 nt, Homo sapiens
  misc_RNA (1)...(19): siRNA sense strand
ggcucuggcuuuauggaaa

SEQ ID NO: 2286972 - RNA, 19 nt, Homo sapiens
  misc_RNA (1)...(19): siRNA sense strand
gaaacuucuuugugaacau

SEQ ID NO: 2286973 - RNA, 19 nt, Homo sapiens
  misc_RNA (1)...(19): siRNA sense strand
gcugaagcagggugguuua

SEQ ID NO: 2286974 - RNA, 19 nt, Homo sapiens
  misc_RNA (1)...(19): siRNA sense strand
cgguauuacgagaagaaca

SEQ ID NO: 2286975 - RNA, 19 nt, Homo sapiens
  misc_RNA (1)...(19): siRNA sense strand
uggagaagagauugaaaga

SEQ ID NO: 2286976 - RNA, 19 nt, Homo sapiens
  misc_RNA (1)...(19): siRNA sense strand
uccaaauacuacugcuaaa

SEQ ID NO: 2286977 - RNA, 19 nt, Homo sapiens
  misc_RNA (1)...(19): siRNA sense strand
acauggagaaccagaagaa

SEQ ID NO: 2286978 - RNA, 19 nt, Homo sapiens
  misc_RNA (1)...(19): siRNA sense strand
gugaagcacagaugagauu

SEQ ID NO: 2286979 - RNA, 19 nt, Homo sapiens
  misc_RNA (1)...(19): siRNA sense strand
aacaggaacugcagaggaa

SEQ ID NO: 2286980 - RNA, 19 nt, Homo sapiens
  misc_RNA (1)...(19): siRNA sense strand
uggccaaaguugaucaaaa

SEQ ID NO: 2286981 - RNA, 19 nt, Homo sapiens
  misc_RNA (1)...(19): siRNA sense strand
ggacaagauggacaaggaa

SEQ ID NO: 2286982 - RNA, 19 nt, Homo sapiens
  misc_RNA (1)...(19): siRNA sense strand
ucauaaacuuagaccugua

SEQ ID NO: 2286983 - RNA, 19 nt, Homo sapiens
  misc_RNA (1)...(19): siRNA sense strand
cagugugugcucugggaaa

SEQ ID NO: 2286984 - RNA, 19 nt, Homo sapiens
  misc_RNA (1)...(19): siRNA sense strand
aaauaugaguugugugacu

SEQ ID NO: 2286985 - RNA, 19 nt, Homo sapiens
  misc_RNA (1)...(19): siRNA sense strand
caguaaugcugcucgugua

SEQ ID NO: 2286986 - RNA, 19 nt, Homo sapiens
  misc_RNA (1)...(19): siRNA sense strand
ugguuuagccaaagaugua

SEQ ID NO: 2286987 - RNA, 19 nt, Homo sapiens
  misc_RNA (1)...(19): siRNA sense strand
gagauggagaagagauuga

SEQ ID NO: 2286988 - RNA, 19 nt, Homo sapiens
  misc_RNA (1)...(19): siRNA sense strand
agggaaucauuaaaggaau

SEQ ID NO: 2286989 - RNA, 19 nt, Homo sapiens
  misc_RNA (1)...(19): siRNA sense strand
acugauaauggcagaauuu

SEQ ID NO: 2286990 - RNA, 19 nt, Homo sapiens
  misc_RNA (1)...(19): siRNA sense strand
agaaccagaagaagacaua

SEQ ID NO: 2286991 - RNA, 19 nt, Homo sapiens
  misc_RNA (1)...(19): siRNA sense strand
auggagaaccagaagaaga

SEQ ID NO: 2286992 - RNA, 19 nt, Homo sapiens
  misc_RNA (1)...(19): siRNA sense strand
cguaauacagacaaugaau

SEQ ID NO: 2286993 - RNA, 19 nt, Homo sapiens
  misc_RNA (1)...(19): siRNA sense strand
guuuauaugaaguagccua

SEQ ID NO: 2286994 - RNA, 19 nt, Homo sapiens
  misc_RNA (1)...(19): siRNA sense strand
cuuuagguaugguggugaa

SEQ ID NO: 2286995 - RNA, 19 nt, Homo sapiens
  misc_RNA (1)...(19): siRNA sense strand
aagaaagaauguuaaggga

SEQ ID NO: 2286996 - RNA, 19 nt, Homo sapiens
  misc_RNA (1)...(19): siRNA sense strand
gcugaguaaugaagaagca

SEQ ID NO: 2286997 - RNA, 19 nt, Homo sapiens
  misc_RNA (1)...(19): siRNA sense strand
cuauauuggugcagacacu

SEQ ID NO: 2286998 - RNA, 19 nt, Homo sapiens
  misc_RNA (1)...(19): siRNA sense strand
guaaugaagaagcaggaca

SEQ ID NO: 2286999 - RNA, 19 nt, Homo sapiens
  misc_RNA (1)...(19): siRNA sense strand
agaacagaaguuucaguaa

SEQ ID NO: 2287000 - RNA, 19 nt, Homo sapiens
  misc_RNA (1)...(19): siRNA sense strand
cagaaaaugaggauaauga

SEQ ID NO: 2287001 - RNA, 19 nt, Homo sapiens
  misc_RNA (1)...(19): siRNA sense strand
ggauagaaugcaugcucuu

SEQ ID NO: 2287002 - RNA, 19 nt, Homo sapiens
  misc_RNA (1)...(19): siRNA sense strand
gcuucguaauacagacaau

SEQ ID NO: 2287003 - RNA, 19 nt, Homo sapiens
  misc_RNA (1)...(19): siRNA sense strand
ggaaaggauggcuguuuau

SEQ ID NO: 2287004 - RNA, 19 nt, Homo sapiens
  misc_RNA (1)...(19): siRNA sense strand
cuacaagaacuaaaggguu

SEQ ID NO: 2287005 - RNA, 19 nt, Homo sapiens
  misc_RNA (1)...(19): siRNA sense strand
ccauuaggaaauccaaaua

SEQ ID NO: 2287006 - RNA, 19 nt, Homo sapiens
  misc_RNA (1)...(19): siRNA sense strand
ccaagaaagauuaaacagu

SEQ ID NO: 2287007 - RNA, 19 nt, Homo sapiens
  misc_RNA (1)...(19): siRNA sense strand
ugaagaagcaggacaucau

SEQ ID NO: 2287008 - RNA, 19 nt, Homo sapiens
  misc_RNA (1)...(19): siRNA sense strand
aagucgaccuugcagauaa

SEQ ID NO: 2287009 - RNA, 19 nt, Homo sapiens
  misc_RNA (1)...(19): siRNA sense strand
auucugagcugauggacau

SEQ ID NO: 2287010 - RNA, 19 nt, Homo sapiens
  misc_RNA (1)...(19): siRNA sense strand
gggaauuugcugacccauu

SEQ ID NO: 2287011 - RNA, 19 nt, Homo sapiens
  misc_RNA (1)...(19): siRNA sense strand
gauuguucuccuuggcaaa

SEQ ID NO: 2287012 - RNA, 19 nt, Homo sapiens
  misc_RNA (1)...(19): siRNA sense strand
cagcuaugcuaauuugcaa

SEQ ID NO: 2287013 - RNA, 19 nt, Homo sapiens
  misc_RNA (1)...(19): siRNA sense strand
ggaaaauaaaccacucaaa

SEQ ID NO: 2287014 - RNA, 19 nt, Homo sapiens
  misc_RNA (1)...(19): siRNA sense strand
aagaguggcaacagagaga

SEQ ID NO: 2287015 - RNA, 19 nt, Homo sapiens
  misc_RNA (1)...(19): siRNA sense strand
uaaugaagaagcaggacau

SEQ ID NO: 2287016 - RNA, 19 nt, Homo sapiens
  misc_RNA (1)...(19): siRNA sense strand
uggugaaacaggaagacaa

SEQ ID NO: 2287017 - RNA, 19 nt, Homo sapiens
  misc_RNA (1)...(19): siRNA sense strand
cugaagagcgucuaagcaa

SEQ ID NO: 2287018 - RNA, 19 nt, Homo sapiens
  misc_RNA (1)...(19): siRNA sense strand
gggcagaagagucagcaau

SEQ ID NO: 2287019 - RNA, 19 nt, Homo sapiens
  misc_RNA (1)...(19): siRNA sense strand
agaacagagaugacaggaa

SEQ ID NO: 2287020 - RNA, 19 nt, Homo sapiens
  misc_RNA (1)...(19): siRNA sense strand
caggaagacaagauggaga

SEQ ID NO: 2287021 - RNA, 19 nt, Homo sapiens
  misc_RNA (1)...(19): siRNA sense strand
ccaaagaguguguggccca

SEQ ID NO: 2287022 - RNA, 19 nt, Homo sapiens
  misc_RNA (1)...(19): siRNA sense strand
ccuuucagguggagaacga

SEQ ID NO: 2287023 - RNA, 19 nt, Homo sapiens
  misc_RNA (1)...(19): siRNA sense strand
ugucauaugcacaaggaga

SEQ ID NO: 2287024 - RNA, 19 nt, Homo sapiens
  misc_RNA (1)...(19): siRNA sense strand
gaacagagaugacaggaag

SEQ ID NO: 2287025 - RNA, 19 nt, Homo sapiens
  misc_RNA (1)...(19): siRNA sense strand
cuguggaguucaagcauga

SEQ ID NO: 2287026 - RNA, 19 nt, Homo sapiens
  misc_RNA (1)...(19): siRNA sense strand
agggaaacagagacaguau

SEQ ID NO: 2287027 - RNA, 19 nt, Homo sapiens
  misc_RNA (1)...(19): siRNA sense strand
ccagggaaacugaagaaca

SEQ ID NO: 2287028 - RNA, 19 nt, Homo sapiens
  misc_RNA (1)...(19): siRNA sense strand
aggaagacaagauggagau

SEQ ID NO: 2287029 - RNA, 19 nt, Homo sapiens
  misc_RNA (1)...(19): siRNA sense strand
gagcuuucuacaugagcaa

SEQ ID NO: 2287030 - RNA, 19 nt, Homo sapiens
  misc_RNA (1)...(19): siRNA sense strand
cuacaauggcccaguacca

SEQ ID NO: 2287031 - RNA, 19 nt, Homo sapiens
  misc_RNA (1)...(19): siRNA sense strand
agaugaugguugugucuga

SEQ ID NO: 2287032 - RNA, 19 nt, Homo sapiens
  misc_RNA (1)...(19): siRNA sense strand
uggaugugacugagaccaa

SEQ ID NO: 2287033 - RNA, 19 nt, Homo sapiens
  misc_RNA (1)...(19): siRNA sense strand
cgucuaagcaauggggaua

SEQ ID NO: 2287034 - RNA, 19 nt, Homo sapiens
  misc_RNA (1)...(19): siRNA sense strand
uagauuacugcaagaacaa

SEQ ID NO: 2287035 - RNA, 19 nt, Homo sapiens
  misc_RNA (1)...(19): siRNA sense strand
ucaauacagacaaggagaa

SEQ ID NO: 2287036 - RNA, 19 nt, Homo sapiens
  misc_RNA (1)...(19): siRNA sense strand
ugaaacaggaagacaagau

SEQ ID NO: 2287037 - RNA, 19 nt, Homo sapiens
  misc_RNA (1)...(19): siRNA sense strand
uuugcagacacaagggaaa

SEQ ID NO: 2287038 - RNA, 19 nt, Homo sapiens
  misc_RNA (1)...(19): siRNA sense strand
ggucaacgucaaugagucu

SEQ ID NO: 2287039 - RNA, 19 nt, Homo sapiens
  misc_RNA (1)...(19): siRNA sense strand
cacaagggaaacagagaca

SEQ ID NO: 2287040 - RNA, 19 nt, Homo sapiens
  misc_RNA (1)...(19): siRNA sense strand
ccuccauggaugugacuga

SEQ ID NO: 2287041 - RNA, 19 nt, Homo sapiens
  misc_RNA (1)...(19): siRNA sense strand
cagaaugggccaagcucca

SEQ ID NO: 2287042 - RNA, 19 nt, Homo sapiens
  misc_RNA (1)...(19): siRNA sense strand
gcuccuauccucagggcca

SEQ ID NO: 2287043 - RNA, 19 nt, Homo sapiens
  misc_RNA (1)...(19): siRNA sense strand
ccaccaacaucgcuggcuu

SEQ ID NO: 2287044 - RNA, 19 nt, Homo sapiens
  misc_RNA (1)...(19): siRNA sense strand
cagacaaggagaagacucu

SEQ ID NO: 2287045 - RNA, 19 nt, Homo sapiens
  misc_RNA (1)...(19): siRNA sense strand
agaacgaccaggagcgguu

SEQ ID NO: 2287046 - RNA, 19 nt, Homo sapiens
  misc_RNA (1)...(19): siRNA sense strand
ccaguuuggccaaggagau

SEQ ID NO: 2287047 - RNA, 19 nt, Homo sapiens
  misc_RNA (1)...(19): siRNA sense strand
agagaugacaggaagcuga

SEQ ID NO: 2287048 - RNA, 19 nt, Homo sapiens
  misc_RNA (1)...(19): siRNA sense strand
caagaagguucgaggccuc

SEQ ID NO: 2287049 - RNA, 19 nt, Homo sapiens
  misc_RNA (1)...(19): siRNA sense strand
gccaaggagauguacagaa

SEQ ID NO: 2287050 - RNA, 19 nt, Homo sapiens
  misc_RNA (1)...(19): siRNA sense strand
guccagcuauggugggcaa

SEQ ID NO: 2287051 - RNA, 19 nt, Homo sapiens
  misc_RNA (1)...(19): siRNA sense strand
ccacuguagauuacugcaa

SEQ ID NO: 2287052 - RNA, 19 nt, Homo sapiens
  misc_RNA (1)...(19): siRNA sense strand
ucaccagcuuauuggauca

SEQ ID NO: 2287053 - RNA, 19 nt, Homo sapiens
  misc_RNA (1)...(19): siRNA sense strand
cugugaaggcuguucguga

SEQ ID NO: 2287054 - RNA, 19 nt, Homo sapiens
  misc_RNA (1)...(19): siRNA sense strand
aagacaagauggagaugcu

SEQ ID NO: 2287055 - RNA, 19 nt, Homo sapiens
  misc_RNA (1)...(19): siRNA sense strand
ccuuuaucuucaugauuga

SEQ ID NO: 2287056 - RNA, 19 nt, Homo sapiens
  misc_RNA (1)...(19): siRNA sense strand
ccguggugaaacaggaaga

SEQ ID NO: 2287057 - RNA, 19 nt, Homo sapiens
  misc_RNA (1)...(19): siRNA sense strand
caagggaaacagagacagu

SEQ ID NO: 2287058 - RNA, 19 nt, Homo sapiens
  misc_RNA (1)...(19): siRNA sense strand
gagcaucuuauguggacuu

SEQ ID NO: 2287059 - RNA, 19 nt, Homo sapiens
  misc_RNA (1)...(19): siRNA sense strand
uggugaaacaggaagacaa

SEQ ID NO: 2287060 - RNA, 19 nt, Homo sapiens
  misc_RNA (1)...(19): siRNA sense strand
cugaagagcgucuaagcaa

SEQ ID NO: 2287061 - RNA, 19 nt, Homo sapiens
  misc_RNA (1)...(19): siRNA sense strand
gggcagaagagucagcaau

SEQ ID NO: 2287062 - RNA, 19 nt, Homo sapiens
  misc_RNA (1)...(19): siRNA sense strand
agaacagagaugacaggaa

SEQ ID NO: 2287063 - RNA, 19 nt, Homo sapiens
  misc_RNA (1)...(19): siRNA sense strand
caggaagacaagauggaga

SEQ ID NO: 2287064 - RNA, 19 nt, Homo sapiens
  misc_RNA (1)...(19): siRNA sense strand
ccaaagaguguguggccca

SEQ ID NO: 2287065 - RNA, 19 nt, Homo sapiens
  misc_RNA (1)...(19): siRNA sense strand
ccuuucagguggagaacga

SEQ ID NO: 2287066 - RNA, 19 nt, Homo sapiens
  misc_RNA (1)...(19): siRNA sense strand
ugucauaugcacaaggaga

SEQ ID NO: 2287067 - RNA, 19 nt, Homo sapiens
  misc_RNA (1)...(19): siRNA sense strand
gaacagagaugacaggaag

SEQ ID NO: 2287068 - RNA, 19 nt, Homo sapiens
  misc_RNA (1)...(19): siRNA sense strand
cuguggaguucaagcauga

SEQ ID NO: 2287069 - RNA, 19 nt, Homo sapiens
  misc_RNA (1)...(19): siRNA sense strand
agggaaacagagacaguau

SEQ ID NO: 2287070 - RNA, 19 nt, Homo sapiens
  misc_RNA (1)...(19): siRNA sense strand
ccagggaaacugaagaaca

SEQ ID NO: 2287071 - RNA, 19 nt, Homo sapiens
  misc_RNA (1)...(19): siRNA sense strand
aggaagacaagauggagau

SEQ ID NO: 2287072 - RNA, 19 nt, Homo sapiens
  misc_RNA (1)...(19): siRNA sense strand
gagcuuucuacaugagcaa

SEQ ID NO: 2287073 - RNA, 19 nt, Homo sapiens
  misc_RNA (1)...(19): siRNA sense strand
cuacaauggcccaguacca

SEQ ID NO: 2287074 - RNA, 19 nt, Homo sapiens
  misc_RNA (1)...(19): siRNA sense strand
agaugaugguugugucuga

SEQ ID NO: 2287075 - RNA, 19 nt, Homo sapiens
  misc_RNA (1)...(19): siRNA sense strand
uggaugugacugagaccaa

SEQ ID NO: 2287076 - RNA, 19 nt, Homo sapiens
  misc_RNA (1)...(19): siRNA sense strand
cgucuaagcaauggggaua

SEQ ID NO: 2287077 - RNA, 19 nt, Homo sapiens
  misc_RNA (1)...(19): siRNA sense strand
uagauuacugcaagaacaa

SEQ ID NO: 2287078 - RNA, 19 nt, Homo sapiens
  misc_RNA (1)...(19): siRNA sense strand
ucaauacagacaaggagaa

SEQ ID NO: 2287079 - RNA, 19 nt, Homo sapiens
  misc_RNA (1)...(19): siRNA sense strand
ugaaacaggaagacaagau

SEQ ID NO: 2287080 - RNA, 19 nt, Homo sapiens
  misc_RNA (1)...(19): siRNA sense strand
uuugcagacacaagggaaa

SEQ ID NO: 2287081 - RNA, 19 nt, Homo sapiens
  misc_RNA (1)...(19): siRNA sense strand
ggucaacgucaaugagucu

SEQ ID NO: 2287082 - RNA, 19 nt, Homo sapiens
  misc_RNA (1)...(19): siRNA sense strand
cacaagggaaacagagaca

SEQ ID NO: 2287083 - RNA, 19 nt, Homo sapiens
  misc_RNA (1)...(19): siRNA sense strand
ccuccauggaugugacuga

SEQ ID NO: 2287084 - RNA, 19 nt, Homo sapiens
  misc_RNA (1)...(19): siRNA sense strand
cagaaugggccaagcucca

SEQ ID NO: 2287085 - RNA, 19 nt, Homo sapiens
  misc_RNA (1)...(19): siRNA sense strand
gcuccuauccucagggcca

SEQ ID NO: 2287086 - RNA, 19 nt, Homo sapiens
  misc_RNA (1)...(19): siRNA sense strand
ccaccaacaucgcuggcuu

SEQ ID NO: 2287087 - RNA, 19 nt, Homo sapiens
  misc_RNA (1)...(19): siRNA sense strand
cagacaaggagaagacucu

SEQ ID NO: 2287088 - RNA, 19 nt, Homo sapiens
  misc_RNA (1)...(19): siRNA sense strand
agaacgaccaggagcgguu

SEQ ID NO: 2287089 - RNA, 19 nt, Homo sapiens
  misc_RNA (1)...(19): siRNA sense strand
ccaguuuggccaaggagau

SEQ ID NO: 2287090 - RNA, 19 nt, Homo sapiens
  misc_RNA (1)...(19): siRNA sense strand
agagaugacaggaagcuga

SEQ ID NO: 2287091 - RNA, 19 nt, Homo sapiens
  misc_RNA (1)...(19): siRNA sense strand
caagaagguucgaggccuc

SEQ ID NO: 2287092 - RNA, 19 nt, Homo sapiens
  misc_RNA (1)...(19): siRNA sense strand
gccaaggagauguacagaa

SEQ ID NO: 2287093 - RNA, 19 nt, Homo sapiens
  misc_RNA (1)...(19): siRNA sense strand
guccagcuauggugggcaa

SEQ ID NO: 2287094 - RNA, 19 nt, Homo sapiens
  misc_RNA (1)...(19): siRNA sense strand
ccacuguagauuacugcaa

SEQ ID NO: 2287095 - RNA, 19 nt, Homo sapiens
  misc_RNA (1)...(19): siRNA sense strand
ucaccagcuuauuggauca

SEQ ID NO: 2287096 - RNA, 19 nt, Homo sapiens
  misc_RNA (1)...(19): siRNA sense strand
cugugaaggcuguucguga

SEQ ID NO: 2287097 - RNA, 19 nt, Homo sapiens
  misc_RNA (1)...(19): siRNA sense strand
aagacaagauggagaugcu

SEQ ID NO: 2287098 - RNA, 19 nt, Homo sapiens
  misc_RNA (1)...(19): siRNA sense strand
ccuuuaucuucaugauuga

SEQ ID NO: 2287099 - RNA, 19 nt, Homo sapiens
  misc_RNA (1)...(19): siRNA sense strand
ccguggugaaacaggaaga

SEQ ID NO: 2287100 - RNA, 19 nt, Homo sapiens
  misc_RNA (1)...(19): siRNA sense strand
caagggaaacagagacagu

SEQ ID NO: 2287101 - RNA, 19 nt, Homo sapiens
  misc_RNA (1)...(19): siRNA sense strand
gagcaucuuauguggacuu

SEQ ID NO: 2287102 - RNA, 19 nt, Homo sapiens
  misc_RNA (1)...(19): siRNA sense strand
ggaagggccaauugggcaa

SEQ ID NO: 2287103 - RNA, 19 nt, Homo sapiens
  misc_RNA (1)...(19): siRNA sense strand
gaguuuaaaucuaagggau

SEQ ID NO: 2287104 - RNA, 19 nt, Homo sapiens
  misc_RNA (1)...(19): siRNA sense strand
cugaagaauuacugcgagu

SEQ ID NO: 2287105 - RNA, 19 nt, Homo sapiens
  misc_RNA (1)...(19): siRNA sense strand
ccgugaaguacgaggagga

SEQ ID NO: 2287106 - RNA, 19 nt, Homo sapiens
  misc_RNA (1)...(19): siRNA sense strand
ugaaguacgaggaggacga

SEQ ID NO: 2287107 - RNA, 19 nt, Homo sapiens
  misc_RNA (1)...(19): siRNA sense strand
ccgcaugaucccaguugaa

SEQ ID NO: 2287108 - RNA, 19 nt, Homo sapiens
  misc_RNA (1)...(19): siRNA sense strand
aagaaagauuccaacccaa

SEQ ID NO: 2287109 - RNA, 19 nt, Homo sapiens
  misc_RNA (1)...(19): siRNA sense strand
gcaugaucccaguugaaau

SEQ ID NO: 2287110 - RNA, 19 nt, Homo sapiens
  misc_RNA (1)...(19): siRNA sense strand
cgaaagacacuaaugagca

SEQ ID NO: 2287111 - RNA, 19 nt, Homo sapiens
  misc_RNA (1)...(19): siRNA sense strand
aaguaauaauccggaagaa

SEQ ID NO: 2287112 - RNA, 19 nt, Homo sapiens
  misc_RNA (1)...(19): siRNA sense strand
ugguagaaauccagaagcu

SEQ ID NO: 2287113 - RNA, 19 nt, Homo sapiens
  misc_RNA (1)...(19): siRNA sense strand
cugcuuuaguagggagauu

SEQ ID NO: 2287114 - RNA, 19 nt, Homo sapiens
  misc_RNA (1)...(19): siRNA sense strand
caaggaagcaggugguacu

SEQ ID NO: 2287115 - RNA, 19 nt, Homo sapiens
  misc_RNA (1)...(19): siRNA sense strand
agggagaagaggccgagaa

SEQ ID NO: 2287116 - RNA, 19 nt, Homo sapiens
  misc_RNA (1)...(19): siRNA sense strand
gggaagggccaauugggca

SEQ ID NO: 2287117 - RNA, 19 nt, Homo sapiens
  misc_RNA (1)...(19): siRNA sense strand
agaaagauuccaacccaau

SEQ ID NO: 2287118 - RNA, 19 nt, Homo sapiens
  misc_RNA (1)...(19): siRNA sense strand
gagaaagaacacugcucca

SEQ ID NO: 2287119 - RNA, 19 nt, Homo sapiens
  misc_RNA (1)...(19): siRNA sense strand
acugcaagggccaggucaa

SEQ ID NO: 2287120 - RNA, 19 nt, Homo sapiens
  misc_RNA (1)...(19): siRNA sense strand
cacacaaaugcuauguaua

SEQ ID NO: 2287121 - RNA, 19 nt, Homo sapiens
  misc_RNA (1)...(19): siRNA sense strand
ggaaagagguuaaaggaga

SEQ ID NO: 2287122 - RNA, 19 nt, Homo sapiens
  misc_RNA (1)...(19): siRNA sense strand
ggguagaagagcagaggau

SEQ ID NO: 2287123 - RNA, 19 nt, Homo sapiens
  misc_RNA (1)...(19): siRNA sense strand
ccuuaugacauguuggaaa

SEQ ID NO: 2287124 - RNA, 19 nt, Homo sapiens
  misc_RNA (1)...(19): siRNA sense strand
ggcaaaggguagaagagca

SEQ ID NO: 2287125 - RNA, 19 nt, Homo sapiens
  misc_RNA (1)...(19): siRNA sense strand
guuggaaagcaucaggaaa

SEQ ID NO: 2287126 - RNA, 19 nt, Homo sapiens
  misc_RNA (1)...(19): siRNA sense strand
aggaaauguacaagacuga

SEQ ID NO: 2287127 - RNA, 19 nt, Homo sapiens
  misc_RNA (1)...(19): siRNA sense strand
ggcaaggggacgcgagaua

SEQ ID NO: 2287128 - RNA, 19 nt, Homo sapiens
  misc_RNA (1)...(19): siRNA sense strand
uuaaaggagaccuggaaaa

SEQ ID NO: 2287129 - RNA, 19 nt, Homo sapiens
  misc_RNA (1)...(19): siRNA sense strand
ucaagagaaaguacggcaa

SEQ ID NO: 2287130 - RNA, 19 nt, Homo sapiens
  misc_RNA (1)...(19): siRNA sense strand
acagagucuacaaggaaau

SEQ ID NO: 2287131 - RNA, 19 nt, Homo sapiens
  misc_RNA (1)...(19): siRNA sense strand
gaaagagguuaaaggagac

SEQ ID NO: 2287132 - RNA, 19 nt, Homo sapiens
  misc_RNA (1)...(19): siRNA sense strand
caggaaauuaacagagucu

SEQ ID NO: 2287133 - RNA, 19 nt, Homo sapiens
  misc_RNA (1)...(19): siRNA sense strand
ugaccaagaugcucgggau

SEQ ID NO: 2287134 - RNA, 19 nt, Homo sapiens
  misc_RNA (1)...(19): siRNA sense strand
gcaaaggguagaagagcag

SEQ ID NO: 2287135 - RNA, 19 nt, Homo sapiens
  misc_RNA (1)...(19): siRNA sense strand
gauagguacaagaguuaca

SEQ ID NO: 2287136 - RNA, 19 nt, Homo sapiens
  misc_RNA (1)...(19): siRNA sense strand
ccaucaagaccaaaggugu

SEQ ID NO: 2287137 - RNA, 19 nt, Homo sapiens
  misc_RNA (1)...(19): siRNA sense strand
aaccaggagcugcaggaaa

SEQ ID NO: 2287138 - RNA, 19 nt, Homo sapiens
  misc_RNA (1)...(19): siRNA sense strand
augacauguuggaaagcau

SEQ ID NO: 2287139 - RNA, 19 nt, Homo sapiens
  misc_RNA (1)...(19): siRNA sense strand
aggucugaauucaagagaa

SEQ ID NO: 2287140 - RNA, 19 nt, Homo sapiens
  misc_RNA (1)...(19): siRNA sense strand
gaaccaaccaggagcugca

SEQ ID NO: 2287141 - RNA, 19 nt, Homo sapiens
  misc_RNA (1)...(19): siRNA sense strand
auacuaacuuugaugcuga

SEQ ID NO: 2287142 - RNA, 19 nt, Homo sapiens
  misc_RNA (1)...(19): siRNA sense strand
augcacagagacaggauau

SEQ ID NO: 2287143 - RNA, 19 nt, Homo sapiens
  misc_RNA (1)...(19): siRNA sense strand
gaaaguauuugauagguac

SEQ ID NO: 2287144 - RNA, 19 nt, Homo sapiens
  misc_RNA (1)...(19): siRNA sense strand
ggaccaaauaugagaccga

SEQ ID NO: 2287145 - RNA, 19 nt, Homo sapiens
  misc_RNA (1)...(19): siRNA sense strand
cagaagauccugugcagca

SEQ ID NO: 2287146 - RNA, 19 nt, Homo sapiens
  misc_RNA (1)...(19): siRNA sense strand
ucagaugacuucaggacca

SEQ ID NO: 2287147 - RNA, 19 nt, Homo sapiens
  misc_RNA (1)...(19): siRNA sense strand
ggcuggagugugagaucaa

SEQ ID NO: 2287148 - RNA, 19 nt, Homo sapiens
  misc_RNA (1)...(19): siRNA sense strand
ccgcagggaaguggagcaa

SEQ ID NO: 2287149 - RNA, 19 nt, Homo sapiens
  misc_RNA (1)...(19): siRNA sense strand
gagcugagacgcacgguca

SEQ ID NO: 2287150 - RNA, 19 nt, Homo sapiens
  misc_RNA (1)...(19): siRNA sense strand
cggugugggccuugcaaca

SEQ ID NO: 2287151 - RNA, 19 nt, Homo sapiens
  misc_RNA (1)...(19): siRNA sense strand
cggucaaugcccuggagau

SEQ ID NO: 2287152 - RNA, 19 nt, Homo sapiens
  misc_RNA (1)...(19): siRNA sense strand
gugcagagacugaucacca

SEQ ID NO: 2287153 - RNA, 19 nt, Homo sapiens
  misc_RNA (1)...(19): siRNA sense strand
gugcagcaagucugagaau

SEQ ID NO: 2287154 - RNA, 19 nt, Homo sapiens
  misc_RNA (1)...(19): siRNA sense strand
agaucgagcugcaggccca

SEQ ID NO: 2287155 - RNA, 19 nt, Homo sapiens
  misc_RNA (1)...(19): siRNA sense strand
ccuaccaggcggagaucau

SEQ ID NO: 2287156 - RNA, 19 nt, Homo sapiens
  misc_RNA (1)...(19): siRNA sense strand
aguccuacuucaagaccau

SEQ ID NO: 2287157 - RNA, 19 nt, Homo sapiens
  misc_RNA (1)...(19): siRNA sense strand
ugguggagucggacaucaa

SEQ ID NO: 2287158 - RNA, 19 nt, Homo sapiens
  misc_RNA (1)...(19): siRNA sense strand
ugaaaggcaugaaggauga

SEQ ID NO: 2287159 - RNA, 19 nt, Homo sapiens
  misc_RNA (1)...(19): siRNA sense strand
aggaugacaaggaggaaga

SEQ ID NO: 2287160 - RNA, 19 nt, Homo sapiens
  misc_RNA (1)...(19): siRNA sense strand
agaauuuggaggagaagau

SEQ ID NO: 2287161 - RNA, 19 nt, Homo sapiens
  misc_RNA (1)...(19): siRNA sense strand
acaaggaggaagaggagga

SEQ ID NO: 2287162 - RNA, 19 nt, Homo sapiens
  misc_RNA (1)...(19): siRNA sense strand
acauuguauuugaggacuu

SEQ ID NO: 2287163 - RNA, 19 nt, Homo sapiens
  misc_RNA (1)...(19): siRNA sense strand
gcggagaauuuggaggaga

SEQ ID NO: 2287164 - RNA, 19 nt, Homo sapiens
  misc_RNA (1)...(19): siRNA sense strand
agaagauccacaagcggaa

SEQ ID NO: 2287165 - RNA, 19 nt, Homo sapiens
  misc_RNA (1)...(19): siRNA sense strand
aggaagaggaggaugguac

SEQ ID NO: 2287166 - RNA, 19 nt, Homo sapiens
  misc_RNA (1)...(19): siRNA sense strand
gcgcggagaauuuggagga

SEQ ID NO: 2287167 - RNA, 19 nt, Homo sapiens
  misc_RNA (1)...(19): siRNA sense strand
acgggaagcucaagcacga

SEQ ID NO: 2287168 - RNA, 19 nt, Homo sapiens
  misc_RNA (1)...(19): siRNA sense strand
cugaaaggcaugaaggaug

SEQ ID NO: 2287169 - RNA, 19 nt, Homo sapiens
  misc_RNA (1)...(19): siRNA sense strand
cucaaagagcggagagucu

SEQ ID NO: 2287170 - RNA, 19 nt, Homo sapiens
  misc_RNA (1)...(19): siRNA sense strand
agacggugaagaagaucaa

SEQ ID NO: 2287171 - RNA, 19 nt, Homo sapiens
  misc_RNA (1)...(19): siRNA sense strand
cgccagagacugaaaggca

SEQ ID NO: 2287172 - RNA, 19 nt, Homo sapiens
  misc_RNA (1)...(19): siRNA sense strand
aggcuugcgguguggacua

SEQ ID NO: 2287173 - RNA, 19 nt, Homo sapiens
  misc_RNA (1)...(19): siRNA sense strand
gggaaggugccaaccguga

SEQ ID NO: 2287174 - RNA, 19 nt, Homo sapiens
  misc_RNA (1)...(19): siRNA sense strand
ggagaacccaucagcguca

SEQ ID NO: 2287175 - RNA, 19 nt, Homo sapiens
  misc_RNA (1)...(19): siRNA sense strand
gccagagacugaaaggcau

SEQ ID NO: 2287176 - RNA, 19 nt, Homo sapiens
  misc_RNA (1)...(19): siRNA sense strand
cgacauuguauuugaggac

SEQ ID NO: 2287177 - RNA, 19 nt, Homo sapiens
  misc_RNA (1)...(19): siRNA sense strand
acuaugaagucaaagccuu

SEQ ID NO: 2287178 - RNA, 19 nt, Homo sapiens
  misc_RNA (1)...(19): siRNA sense strand
ucaccgucuaccugggaaa

SEQ ID NO: 2287179 - RNA, 19 nt, Homo sapiens
  misc_RNA (1)...(19): siRNA sense strand
cuggauaaggagaucuauu

SEQ ID NO: 2287180 - RNA, 19 nt, Homo sapiens
  misc_RNA (1)...(19): siRNA sense strand
ugaaaggcaugaaggauga

SEQ ID NO: 2287181 - RNA, 19 nt, Homo sapiens
  misc_RNA (1)...(19): siRNA sense strand
aggaugacaaggaggaaga

SEQ ID NO: 2287182 - RNA, 19 nt, Homo sapiens
  misc_RNA (1)...(19): siRNA sense strand
agaauuuggaggagaagau

SEQ ID NO: 2287183 - RNA, 19 nt, Homo sapiens
  misc_RNA (1)...(19): siRNA sense strand
acaaggaggaagaggagga

SEQ ID NO: 2287184 - RNA, 19 nt, Homo sapiens
  misc_RNA (1)...(19): siRNA sense strand
acauuguauuugaggacuu

SEQ ID NO: 2287185 - RNA, 19 nt, Homo sapiens
  misc_RNA (1)...(19): siRNA sense strand
gcggagaauuuggaggaga

SEQ ID NO: 2287186 - RNA, 19 nt, Homo sapiens
  misc_RNA (1)...(19): siRNA sense strand
agaagauccacaagcggaa

SEQ ID NO: 2287187 - RNA, 19 nt, Homo sapiens
  misc_RNA (1)...(19): siRNA sense strand
aggaagaggaggaugguac

SEQ ID NO: 2287188 - RNA, 19 nt, Homo sapiens
  misc_RNA (1)...(19): siRNA sense strand
gcgcggagaauuuggagga

SEQ ID NO: 2287189 - RNA, 19 nt, Homo sapiens
  misc_RNA (1)...(19): siRNA sense strand
acgggaagcucaagcacga

SEQ ID NO: 2287190 - RNA, 19 nt, Homo sapiens
  misc_RNA (1)...(19): siRNA sense strand
cugaaaggcaugaaggaug

SEQ ID NO: 2287191 - RNA, 19 nt, Homo sapiens
  misc_RNA (1)...(19): siRNA sense strand
cucaaagagcggagagucu

SEQ ID NO: 2287192 - RNA, 19 nt, Homo sapiens
  misc_RNA (1)...(19): siRNA sense strand
agacggugaagaagaucaa

SEQ ID NO: 2287193 - RNA, 19 nt, Homo sapiens
  misc_RNA (1)...(19): siRNA sense strand
cgccagagacugaaaggca

SEQ ID NO: 2287194 - RNA, 19 nt, Homo sapiens
  misc_RNA (1)...(19): siRNA sense strand
aggcuugcgguguggacua

SEQ ID NO: 2287195 - RNA, 19 nt, Homo sapiens
  misc_RNA (1)...(19): siRNA sense strand
gggaaggugccaaccguga

SEQ ID NO: 2287196 - RNA, 19 nt, Homo sapiens
  misc_RNA (1)...(19): siRNA sense strand
ggagaacccaucagcguca

SEQ ID NO: 2287197 - RNA, 19 nt, Homo sapiens
  misc_RNA (1)...(19): siRNA sense strand
gccagagacugaaaggcau

SEQ ID NO: 2287198 - RNA, 19 nt, Homo sapiens
  misc_RNA (1)...(19): siRNA sense strand
cgacauuguauuugaggac

SEQ ID NO: 2287199 - RNA, 19 nt, Homo sapiens
  misc_RNA (1)...(19): siRNA sense strand
acuaugaagucaaagccuu

SEQ ID NO: 2287200 - RNA, 19 nt, Homo sapiens
  misc_RNA (1)...(19): siRNA sense strand
ucaccgucuaccugggaaa

SEQ ID NO: 2287201 - RNA, 19 nt, Homo sapiens
  misc_RNA (1)...(19): siRNA sense strand
cuggauaaggagaucuauu

SEQ ID NO: 2287202 - RNA, 19 nt, Homo sapiens
  misc_RNA (1)...(19): siRNA sense strand
ccugaauaaaagaggaaaa

SEQ ID NO: 2287203 - RNA, 19 nt, Homo sapiens
  misc_RNA (1)...(19): siRNA sense strand
agaucuacccggauggcaa

SEQ ID NO: 2287204 - RNA, 19 nt, Homo sapiens
  misc_RNA (1)...(19): siRNA sense strand
cagagcagcaguagcgcua

SEQ ID NO: 2287205 - RNA, 19 nt, Homo sapiens
  misc_RNA (1)...(19): siRNA sense strand
cuauaauaccuaugccuca

SEQ ID NO: 2287206 - RNA, 19 nt, Homo sapiens
  misc_RNA (1)...(19): siRNA sense strand
agaucuacccggauggcaa

SEQ ID NO: 2287207 - RNA, 19 nt, Homo sapiens
  misc_RNA (1)...(19): siRNA sense strand
cagagcagcaguagcgcua

SEQ ID NO: 2287208 - RNA, 19 nt, Homo sapiens
  misc_RNA (1)...(19): siRNA sense strand
aagaagaucuccuugcaga

SEQ ID NO: 2287209 - RNA, 19 nt, Homo sapiens
  misc_RNA (1)...(19): siRNA sense strand
ccaaacugggcaaggagau

SEQ ID NO: 2287210 - RNA, 19 nt, Homo sapiens
  misc_RNA (1)...(19): siRNA sense strand
aggagaaguggguccagaa

SEQ ID NO: 2287211 - RNA, 19 nt, Homo sapiens
  misc_RNA (1)...(19): siRNA sense strand
cuaaaugccucauggccaa

SEQ ID NO: 2287212 - RNA, 19 nt, Homo sapiens
  misc_RNA (1)...(19): siRNA sense strand
gaacaagugccgagagccu

SEQ ID NO: 2287213 - RNA, 19 nt, Homo sapiens
  misc_RNA (1)...(19): siRNA sense strand
ccuaaaugccucauggcca

SEQ ID NO: 2287214 - RNA, 19 nt, Homo sapiens
  misc_RNA (1)...(19): siRNA sense strand
agauacgccuggagggcaa

SEQ ID NO: 2287215 - RNA, 19 nt, Homo sapiens
  misc_RNA (1)...(19): siRNA sense strand
auccaaucguccugggaaa

SEQ ID NO: 2287216 - RNA, 19 nt, Homo sapiens
  misc_RNA (1)...(19): siRNA sense strand
acacauucugcaaggcuaa

SEQ ID NO: 2287217 - RNA, 19 nt, Homo sapiens
  misc_RNA (1)...(19): siRNA sense strand
cugugaagaaguugacauu

SEQ ID NO: 2287218 - RNA, 19 nt, Homo sapiens
  misc_RNA (1)...(19): siRNA sense strand
agauauagaagaugguacu

SEQ ID NO: 2287219 - RNA, 19 nt, Homo sapiens
  misc_RNA (1)...(19): siRNA sense strand
aagauuaccgauaggguca

SEQ ID NO: 2287220 - RNA, 19 nt, Homo sapiens
  misc_RNA (1)...(19): siRNA sense strand
agccaagauuaugaggaua

SEQ ID NO: 2287221 - RNA, 19 nt, Homo sapiens
  misc_RNA (1)...(19): siRNA sense strand
ccaagaaagaaaaugauga

SEQ ID NO: 2287222 - RNA, 19 nt, Homo sapiens
  misc_RNA (1)...(19): siRNA sense strand
agauacgccuggagggcaa

SEQ ID NO: 2287223 - RNA, 19 nt, Homo sapiens
  misc_RNA (1)...(19): siRNA sense strand
auccaaucguccugggaaa

SEQ ID NO: 2287224 - RNA, 19 nt, Homo sapiens
  misc_RNA (1)...(19): siRNA sense strand
acacauucugcaaggcuaa

SEQ ID NO: 2287225 - RNA, 19 nt, Homo sapiens
  misc_RNA (1)...(19): siRNA sense strand
cugugaagaaguugacauu

SEQ ID NO: 2287226 - RNA, 19 nt, Homo sapiens
  misc_RNA (1)...(19): siRNA sense strand
agauauagaagaugguacu

SEQ ID NO: 2287227 - RNA, 19 nt, Homo sapiens
  misc_RNA (1)...(19): siRNA sense strand
aagauuaccgauaggguca

SEQ ID NO: 2287228 - RNA, 19 nt, Homo sapiens
  misc_RNA (1)...(19): siRNA sense strand
agccaagauuaugaggaua

SEQ ID NO: 2287229 - RNA, 19 nt, Homo sapiens
  misc_RNA (1)...(19): siRNA sense strand
ccaagaaagaaaaugauga

SEQ ID NO: 2287230 - RNA, 19 nt, Homo sapiens
  misc_RNA (1)...(19): siRNA sense strand
agauacgccuggagggcaa

SEQ ID NO: 2287231 - RNA, 19 nt, Homo sapiens
  misc_RNA (1)...(19): siRNA sense strand
auccaaucguccugggaaa

SEQ ID NO: 2287232 - RNA, 19 nt, Homo sapiens
  misc_RNA (1)...(19): siRNA sense strand
acacauucugcaaggcuaa

SEQ ID NO: 2287233 - RNA, 19 nt, Homo sapiens
  misc_RNA (1)...(19): siRNA sense strand
cugugaagaaguugacauu

SEQ ID NO: 2287234 - RNA, 19 nt, Homo sapiens
  misc_RNA (1)...(19): siRNA sense strand
agauauagaagaugguacu

SEQ ID NO: 2287235 - RNA, 19 nt, Homo sapiens
  misc_RNA (1)...(19): siRNA sense strand
aagauuaccgauaggguca

SEQ ID NO: 2287236 - RNA, 19 nt, Homo sapiens
  misc_RNA (1)...(19): siRNA sense strand
agccaagauuaugaggaua

SEQ ID NO: 2287237 - RNA, 19 nt, Homo sapiens
  misc_RNA (1)...(19): siRNA sense strand
ccaagaaagaaaaugauga

SEQ ID NO: 2287238 - RNA, 19 nt, Homo sapiens
  misc_RNA (1)...(19): siRNA sense strand
agguauacuaugcgaagaa

SEQ ID NO: 2287239 - RNA, 19 nt, Homo sapiens
  misc_RNA (1)...(19): siRNA sense strand
uguacgaccuccugcgcaa

SEQ ID NO: 2287240 - RNA, 19 nt, Homo sapiens
  misc_RNA (1)...(19): siRNA sense strand
cuacgaaggacgaaagaac

SEQ ID NO: 2287241 - RNA, 19 nt, Homo sapiens
  misc_RNA (1)...(19): siRNA sense strand
uggugaaagccuaugauca

SEQ ID NO: 2287242 - RNA, 19 nt, Homo sapiens
  misc_RNA (1)...(19): siRNA sense strand
cccaggagcuuguggccau

SEQ ID NO: 2287243 - RNA, 19 nt, Homo sapiens
  misc_RNA (1)...(19): siRNA sense strand
cagcuuggccagaggaucu

SEQ ID NO: 2287244 - RNA, 19 nt, Homo sapiens
  misc_RNA (1)...(19): siRNA sense strand
acggagaugaaguacuaua

SEQ ID NO: 2287245 - RNA, 19 nt, Homo sapiens
  misc_RNA (1)...(19): siRNA sense strand
uuguggaggugcugggcau

SEQ ID NO: 2287246 - RNA, 19 nt, Homo sapiens
  misc_RNA (1)...(19): siRNA sense strand
agguauacuaugcgaagaa

SEQ ID NO: 2287247 - RNA, 19 nt, Homo sapiens
  misc_RNA (1)...(19): siRNA sense strand
uguacgaccuccugcgcaa

SEQ ID NO: 2287248 - RNA, 19 nt, Homo sapiens
  misc_RNA (1)...(19): siRNA sense strand
cuacgaaggacgaaagaac

SEQ ID NO: 2287249 - RNA, 19 nt, Homo sapiens
  misc_RNA (1)...(19): siRNA sense strand
uggugaaagccuaugauca

SEQ ID NO: 2287250 - RNA, 19 nt, Homo sapiens
  misc_RNA (1)...(19): siRNA sense strand
cccaggagcuuguggccau

SEQ ID NO: 2287251 - RNA, 19 nt, Homo sapiens
  misc_RNA (1)...(19): siRNA sense strand
cagcuuggccagaggaucu

SEQ ID NO: 2287252 - RNA, 19 nt, Homo sapiens
  misc_RNA (1)...(19): siRNA sense strand
acggagaugaaguacuaua

SEQ ID NO: 2287253 - RNA, 19 nt, Homo sapiens
  misc_RNA (1)...(19): siRNA sense strand
uuguggaggugcugggcau

SEQ ID NO: 2287254 - RNA, 19 nt, Homo sapiens
  misc_RNA (1)...(19): siRNA sense strand
agguauacuaugcgaagaa

SEQ ID NO: 2287255 - RNA, 19 nt, Homo sapiens
  misc_RNA (1)...(19): siRNA sense strand
uguacgaccuccugcgcaa

SEQ ID NO: 2287256 - RNA, 19 nt, Homo sapiens
  misc_RNA (1)...(19): siRNA sense strand
cuacgaaggacgaaagaac

SEQ ID NO: 2287257 - RNA, 19 nt, Homo sapiens
  misc_RNA (1)...(19): siRNA sense strand
uggugaaagccuaugauca

SEQ ID NO: 2287258 - RNA, 19 nt, Homo sapiens
  misc_RNA (1)...(19): siRNA sense strand
cccaggagcuuguggccau

SEQ ID NO: 2287259 - RNA, 19 nt, Homo sapiens
  misc_RNA (1)...(19): siRNA sense strand
cagcuuggccagaggaucu

SEQ ID NO: 2287260 - RNA, 19 nt, Homo sapiens
  misc_RNA (1)...(19): siRNA sense strand
acggagaugaaguacuaua

SEQ ID NO: 2287261 - RNA, 19 nt, Homo sapiens
  misc_RNA (1)...(19): siRNA sense strand
uuguggaggugcugggcau

SEQ ID NO: 2287262 - RNA, 19 nt, Homo sapiens
  misc_RNA (1)...(19): siRNA sense strand
cuugaggcuucgagggaaa

SEQ ID NO: 2287263 - RNA, 19 nt, Homo sapiens
  misc_RNA (1)...(19): siRNA sense strand
ggaaagucagcgagcguga

SEQ ID NO: 2287264 - RNA, 19 nt, Homo sapiens
  misc_RNA (1)...(19): siRNA sense strand
auaagaggccagaaggcua

SEQ ID NO: 2287265 - RNA, 19 nt, Homo sapiens
  misc_RNA (1)...(19): siRNA sense strand
acagaaacaccaagcguga

SEQ ID NO: 2287266 - RNA, 19 nt, Homo sapiens
  misc_RNA (1)...(19): siRNA sense strand
cagcagcagcaaagggaca

SEQ ID NO: 2287267 - RNA, 19 nt, Homo sapiens
  misc_RNA (1)...(19): siRNA sense strand
ccggaagauccaagcaaca

SEQ ID NO: 2287268 - RNA, 19 nt, Homo sapiens
  misc_RNA (1)...(19): siRNA sense strand
aggauuaaccuauggaacu

SEQ ID NO: 2287269 - RNA, 19 nt, Homo sapiens
  misc_RNA (1)...(19): siRNA sense strand
cuauauauauuccaggaca

SEQ ID NO: 2287270 - RNA, 19 nt, Homo sapiens
  misc_RNA (1)...(19): siRNA sense strand
cagccaacauggaggagcu

SEQ ID NO: 2287271 - RNA, 19 nt, Homo sapiens
  misc_RNA (1)...(19): siRNA sense strand
cgagagcaggagaguaaaa

SEQ ID NO: 2287272 - RNA, 19 nt, Homo sapiens
  misc_RNA (1)...(19): siRNA sense strand
guggaaagucagcgagcgu

SEQ ID NO: 2287273 - RNA, 19 nt, Homo sapiens
  misc_RNA (1)...(19): siRNA sense strand
ugacauuaucucuacggua

SEQ ID NO: 2287274 - RNA, 19 nt, Homo sapiens
  misc_RNA (1)...(19): siRNA sense strand
ccgcugaugaccugaggau

SEQ ID NO: 2287275 - RNA, 19 nt, Homo sapiens
  misc_RNA (1)...(19): siRNA sense strand
gcuuggcauccuucagaaa

SEQ ID NO: 2287276 - RNA, 19 nt, Homo sapiens
  misc_RNA (1)...(19): siRNA sense strand
cuugaggcuucgagggaaa

SEQ ID NO: 2287277 - RNA, 19 nt, Homo sapiens
  misc_RNA (1)...(19): siRNA sense strand
gggagaauuacuagcgaca

SEQ ID NO: 2287278 - RNA, 19 nt, Homo sapiens
  misc_RNA (1)...(19): siRNA sense strand
ggaaagucagcgagcguga

SEQ ID NO: 2287279 - RNA, 19 nt, Homo sapiens
  misc_RNA (1)...(19): siRNA sense strand
auaagaggccagaaggcua

SEQ ID NO: 2287280 - RNA, 19 nt, Homo sapiens
  misc_RNA (1)...(19): siRNA sense strand
acagaaacaccaagcguga

SEQ ID NO: 2287281 - RNA, 19 nt, Homo sapiens
  misc_RNA (1)...(19): siRNA sense strand
cagcagcagcaaagggaca

SEQ ID NO: 2287282 - RNA, 19 nt, Homo sapiens
  misc_RNA (1)...(19): siRNA sense strand
ccggaagauccaagcaaca

SEQ ID NO: 2287283 - RNA, 19 nt, Homo sapiens
  misc_RNA (1)...(19): siRNA sense strand
aggauuaaccuauggaacu

SEQ ID NO: 2287284 - RNA, 19 nt, Homo sapiens
  misc_RNA (1)...(19): siRNA sense strand
cuauauauauuccaggaca

SEQ ID NO: 2287285 - RNA, 19 nt, Homo sapiens
  misc_RNA (1)...(19): siRNA sense strand
cagccaacauggaggagcu

SEQ ID NO: 2287286 - RNA, 19 nt, Homo sapiens
  misc_RNA (1)...(19): siRNA sense strand
cgagagcaggagaguaaaa

SEQ ID NO: 2287287 - RNA, 19 nt, Homo sapiens
  misc_RNA (1)...(19): siRNA sense strand
guggaaagucagcgagcgu

SEQ ID NO: 2287288 - RNA, 19 nt, Homo sapiens
  misc_RNA (1)...(19): siRNA sense strand
ugacauuaucucuacggua

SEQ ID NO: 2287289 - RNA, 19 nt, Homo sapiens
  misc_RNA (1)...(19): siRNA sense strand
ccgcugaugaccugaggau

SEQ ID NO: 2287290 - RNA, 19 nt, Homo sapiens
  misc_RNA (1)...(19): siRNA sense strand
gcuuggcauccuucagaaa

SEQ ID NO: 2287291 - RNA, 19 nt, Homo sapiens
  misc_RNA (1)...(19): siRNA sense strand
cuugaggcuucgagggaaa

SEQ ID NO: 2287292 - RNA, 19 nt, Homo sapiens
  misc_RNA (1)...(19): siRNA sense strand
gggagaauuacuagcgaca

SEQ ID NO: 2287293 - RNA, 19 nt, Homo sapiens
  misc_RNA (1)...(19): siRNA sense strand
ggaaagucagcgagcguga

SEQ ID NO: 2287294 - RNA, 19 nt, Homo sapiens
  misc_RNA (1)...(19): siRNA sense strand
auaagaggccagaaggcua

SEQ ID NO: 2287295 - RNA, 19 nt, Homo sapiens
  misc_RNA (1)...(19): siRNA sense strand
acagaaacaccaagcguga

SEQ ID NO: 2287296 - RNA, 19 nt, Homo sapiens
  misc_RNA (1)...(19): siRNA sense strand
cagcagcagcaaagggaca

SEQ ID NO: 2287297 - RNA, 19 nt, Homo sapiens
  misc_RNA (1)...(19): siRNA sense strand
ccggaagauccaagcaaca

SEQ ID NO: 2287298 - RNA, 19 nt, Homo sapiens
  misc_RNA (1)...(19): siRNA sense strand
aggauuaaccuauggaacu

SEQ ID NO: 2287299 - RNA, 19 nt, Homo sapiens
  misc_RNA (1)...(19): siRNA sense strand
cuauauauauuccaggaca

SEQ ID NO: 2287300 - RNA, 19 nt, Homo sapiens
  misc_RNA (1)...(19): siRNA sense strand
cagccaacauggaggagcu

SEQ ID NO: 2287301 - RNA, 19 nt, Homo sapiens
  misc_RNA (1)...(19): siRNA sense strand
cgagagcaggagaguaaaa

SEQ ID NO: 2287302 - RNA, 19 nt, Homo sapiens
  misc_RNA (1)...(19): siRNA sense strand
guggaaagucagcgagcgu

SEQ ID NO: 2287303 - RNA, 19 nt, Homo sapiens
  misc_RNA (1)...(19): siRNA sense strand
ugacauuaucucuacggua

SEQ ID NO: 2287304 - RNA, 19 nt, Homo sapiens
  misc_RNA (1)...(19): siRNA sense strand
ccgcugaugaccugaggau

SEQ ID NO: 2287305 - RNA, 19 nt, Homo sapiens
  misc_RNA (1)...(19): siRNA sense strand
gcuuggcauccuucagaaa

SEQ ID NO: 2287306 - RNA, 19 nt, Homo sapiens
  misc_RNA (1)...(19): siRNA sense strand
cuugaggcuucgagggaaa

SEQ ID NO: 2287307 - RNA, 19 nt, Homo sapiens
  misc_RNA (1)...(19): siRNA sense strand
gggagaauuacuagcgaca

SEQ ID NO: 2287308 - RNA, 19 nt, Homo sapiens
  misc_RNA (1)...(19): siRNA sense strand
ggaaagucagcgagcguga

SEQ ID NO: 2287309 - RNA, 19 nt, Homo sapiens
  misc_RNA (1)...(19): siRNA sense strand
auaagaggccagaaggcua

SEQ ID NO: 2287310 - RNA, 19 nt, Homo sapiens
  misc_RNA (1)...(19): siRNA sense strand
acagaaacaccaagcguga

SEQ ID NO: 2287311 - RNA, 19 nt, Homo sapiens
  misc_RNA (1)...(19): siRNA sense strand
cagcagcagcaaagggaca

SEQ ID NO: 2287312 - RNA, 19 nt, Homo sapiens
  misc_RNA (1)...(19): siRNA sense strand
ccggaagauccaagcaaca

SEQ ID NO: 2287313 - RNA, 19 nt, Homo sapiens
  misc_RNA (1)...(19): siRNA sense strand
aggauuaaccuauggaacu

SEQ ID NO: 2287314 - RNA, 19 nt, Homo sapiens
  misc_RNA (1)...(19): siRNA sense strand
cuauauauauuccaggaca

SEQ ID NO: 2287315 - RNA, 19 nt, Homo sapiens
  misc_RNA (1)...(19): siRNA sense strand
cagccaacauggaggagcu

SEQ ID NO: 2287316 - RNA, 19 nt, Homo sapiens
  misc_RNA (1)...(19): siRNA sense strand
cgagagcaggagaguaaaa

SEQ ID NO: 2287317 - RNA, 19 nt, Homo sapiens
  misc_RNA (1)...(19): siRNA sense strand
guggaaagucagcgagcgu

SEQ ID NO: 2287318 - RNA, 19 nt, Homo sapiens
  misc_RNA (1)...(19): siRNA sense strand
ugacauuaucucuacggua

SEQ ID NO: 2287319 - RNA, 19 nt, Homo sapiens
  misc_RNA (1)...(19): siRNA sense strand
ccgcugaugaccugaggau

SEQ ID NO: 2287320 - RNA, 19 nt, Homo sapiens
  misc_RNA (1)...(19): siRNA sense strand
gcuuggcauccuucagaaa

SEQ ID NO: 2287321 - RNA, 19 nt, Homo sapiens
  misc_RNA (1)...(19): siRNA sense strand
cuugaggcuucgagggaaa

SEQ ID NO: 2287322 - RNA, 19 nt, Homo sapiens
  misc_RNA (1)...(19): siRNA sense strand
gggagaauuacuagcgaca

SEQ ID NO: 2287323 - RNA, 19 nt, Homo sapiens
  misc_RNA (1)...(19): siRNA sense strand
ggaaagucagcgagcguga

SEQ ID NO: 2287324 - RNA, 19 nt, Homo sapiens
  misc_RNA (1)...(19): siRNA sense strand
auaagaggccagaaggcua

SEQ ID NO: 2287325 - RNA, 19 nt, Homo sapiens
  misc_RNA (1)...(19): siRNA sense strand
acagaaacaccaagcguga

SEQ ID NO: 2287326 - RNA, 19 nt, Homo sapiens
  misc_RNA (1)...(19): siRNA sense strand
cagcagcagcaaagggaca

SEQ ID NO: 2287327 - RNA, 19 nt, Homo sapiens
  misc_RNA (1)...(19): siRNA sense strand
ccggaagauccaagcaaca

SEQ ID NO: 2287328 - RNA, 19 nt, Homo sapiens
  misc_RNA (1)...(19): siRNA sense strand
aggauuaaccuauggaacu

SEQ ID NO: 2287329 - RNA, 19 nt, Homo sapiens
  misc_RNA (1)...(19): siRNA sense strand
cuauauauauuccaggaca

SEQ ID NO: 2287330 - RNA, 19 nt, Homo sapiens
  misc_RNA (1)...(19): siRNA sense strand
cagccaacauggaggagcu

SEQ ID NO: 2287331 - RNA, 19 nt, Homo sapiens
  misc_RNA (1)...(19): siRNA sense strand
cgagagcaggagaguaaaa

SEQ ID NO: 2287332 - RNA, 19 nt, Homo sapiens
  misc_RNA (1)...(19): siRNA sense strand
guggaaagucagcgagcgu

SEQ ID NO: 2287333 - RNA, 19 nt, Homo sapiens
  misc_RNA (1)...(19): siRNA sense strand
ugacauuaucucuacggua

SEQ ID NO: 2287334 - RNA, 19 nt, Homo sapiens
  misc_RNA (1)...(19): siRNA sense strand
ccgcugaugaccugaggau

SEQ ID NO: 2287335 - RNA, 19 nt, Homo sapiens
  misc_RNA (1)...(19): siRNA sense strand
gcuuggcauccuucagaaa

SEQ ID NO: 2287336 - RNA, 19 nt, Homo sapiens
  misc_RNA (1)...(19): siRNA sense strand
cuugaggcuucgagggaaa

SEQ ID NO: 2287337 - RNA, 19 nt, Homo sapiens
  misc_RNA (1)...(19): siRNA sense strand
gggagaauuacuagcgaca

SEQ ID NO: 2287338 - RNA, 19 nt, Homo sapiens
  misc_RNA (1)...(19): siRNA sense strand
ggaaagucagcgagcguga

SEQ ID NO: 2287339 - RNA, 19 nt, Homo sapiens
  misc_RNA (1)...(19): siRNA sense strand
auaagaggccagaaggcua

SEQ ID NO: 2287340 - RNA, 19 nt, Homo sapiens
  misc_RNA (1)...(19): siRNA sense strand
acagaaacaccaagcguga

SEQ ID NO: 2287341 - RNA, 19 nt, Homo sapiens
  misc_RNA (1)...(19): siRNA sense strand
cagcagcagcaaagggaca

SEQ ID NO: 2287342 - RNA, 19 nt, Homo sapiens
  misc_RNA (1)...(19): siRNA sense strand
ccggaagauccaagcaaca

SEQ ID NO: 2287343 - RNA, 19 nt, Homo sapiens
  misc_RNA (1)...(19): siRNA sense strand
aggauuaaccuauggaacu

SEQ ID NO: 2287344 - RNA, 19 nt, Homo sapiens
  misc_RNA (1)...(19): siRNA sense strand
cuauauauauuccaggaca

SEQ ID NO: 2287345 - RNA, 19 nt, Homo sapiens
  misc_RNA (1)...(19): siRNA sense strand
cagccaacauggaggagcu

SEQ ID NO: 2287346 - RNA, 19 nt, Homo sapiens
  misc_RNA (1)...(19): siRNA sense strand
cgagagcaggagaguaaaa

SEQ ID NO: 2287347 - RNA, 19 nt, Homo sapiens
  misc_RNA (1)...(19): siRNA sense strand
guggaaagucagcgagcgu

SEQ ID NO: 2287348 - RNA, 19 nt, Homo sapiens
  misc_RNA (1)...(19): siRNA sense strand
ugacauuaucucuacggua

SEQ ID NO: 2287349 - RNA, 19 nt, Homo sapiens
  misc_RNA (1)...(19): siRNA sense strand
ccgcugaugaccugaggau

SEQ ID NO: 2287350 - RNA, 19 nt, Homo sapiens
  misc_RNA (1)...(19): siRNA sense strand
gcuuggcauccuucagaaa

SEQ ID NO: 2287351 - RNA, 19 nt, Homo sapiens
  misc_RNA (1)...(19): siRNA sense strand
uggcagaaaugaagaggga

SEQ ID NO: 2287352 - RNA, 19 nt, Homo sapiens
  misc_RNA (1)...(19): siRNA sense strand
gcagaaaugaagagggaag

SEQ ID NO: 2287353 - RNA, 19 nt, Homo sapiens
  misc_RNA (1)...(19): siRNA sense strand
augaagaagaugagcccaa

SEQ ID NO: 2287354 - RNA, 19 nt, Homo sapiens
  misc_RNA (1)...(19): siRNA sense strand
gcuucuaugagguggacua

SEQ ID NO: 2287355 - RNA, 19 nt, Homo sapiens
  misc_RNA (1)...(19): siRNA sense strand
aguuugaaguuguggucau

SEQ ID NO: 2287356 - RNA, 19 nt, Homo sapiens
  misc_RNA (1)...(19): siRNA sense strand
aggcagggcuggaugcaga

SEQ ID NO: 2287357 - RNA, 19 nt, Homo sapiens
  misc_RNA (1)...(19): siRNA sense strand
ccgaaacaaccauugggua

SEQ ID NO: 2287358 - RNA, 19 nt, Homo sapiens
  misc_RNA (1)...(19): siRNA sense strand
ggucauucuagaagggaug

SEQ ID NO: 2287359 - RNA, 19 nt, Homo sapiens
  misc_RNA (1)...(19): siRNA sense strand
cuacauggauacagaggug

SEQ ID NO: 2287360 - RNA, 19 nt, Homo sapiens
  misc_RNA (1)...(19): siRNA sense strand
gugaagagguggaacagga

SEQ ID NO: 2287361 - RNA, 19 nt, Homo sapiens
  misc_RNA (1)...(19): siRNA sense strand
ugacaguucuccauggcaa

SEQ ID NO: 2287362 - RNA, 19 nt, Homo sapiens
  misc_RNA (1)...(19): siRNA sense strand
agguggaacaggagaagau

SEQ ID NO: 2287363 - RNA, 19 nt, Homo sapiens
  misc_RNA (1)...(19): siRNA sense strand
acggugaagagguggaaca

SEQ ID NO: 2287364 - RNA, 19 nt, Homo sapiens
  misc_RNA (1)...(19): siRNA sense strand
gcaucuacuggcugagaca

SEQ ID NO: 2287365 - RNA, 19 nt, Homo sapiens
  misc_RNA (1)...(19): siRNA sense strand
aagagguggaacaggagaa

SEQ ID NO: 2287366 - RNA, 19 nt, Homo sapiens
  misc_RNA (1)...(19): siRNA sense strand
cuaaaaucucccucaguaa

SEQ ID NO: 2287367 - RNA, 19 nt, Homo sapiens
  misc_RNA (1)...(19): siRNA sense strand
gugaagagguggaacagga

SEQ ID NO: 2287368 - RNA, 19 nt, Homo sapiens
  misc_RNA (1)...(19): siRNA sense strand
ugacaguucuccauggcaa

SEQ ID NO: 2287369 - RNA, 19 nt, Homo sapiens
  misc_RNA (1)...(19): siRNA sense strand
agguggaacaggagaagau

SEQ ID NO: 2287370 - RNA, 19 nt, Homo sapiens
  misc_RNA (1)...(19): siRNA sense strand
acggugaagagguggaaca

SEQ ID NO: 2287371 - RNA, 19 nt, Homo sapiens
  misc_RNA (1)...(19): siRNA sense strand
gcaucuacuggcugagaca

SEQ ID NO: 2287372 - RNA, 19 nt, Homo sapiens
  misc_RNA (1)...(19): siRNA sense strand
aagagguggaacaggagaa

SEQ ID NO: 2287373 - RNA, 19 nt, Homo sapiens
  misc_RNA (1)...(19): siRNA sense strand
cuaaaaucucccucaguaa

SEQ ID NO: 2287374 - RNA, 19 nt, Homo sapiens
  misc_RNA (1)...(19): siRNA sense strand
gugaagagguggaacagga

SEQ ID NO: 2287375 - RNA, 19 nt, Homo sapiens
  misc_RNA (1)...(19): siRNA sense strand
ugacaguucuccauggcaa

SEQ ID NO: 2287376 - RNA, 19 nt, Homo sapiens
  misc_RNA (1)...(19): siRNA sense strand
agguggaacaggagaagau

SEQ ID NO: 2287377 - RNA, 19 nt, Homo sapiens
  misc_RNA (1)...(19): siRNA sense strand
acggugaagagguggaaca

SEQ ID NO: 2287378 - RNA, 19 nt, Homo sapiens
  misc_RNA (1)...(19): siRNA sense strand
gcaucuacuggcugagaca

SEQ ID NO: 2287379 - RNA, 19 nt, Homo sapiens
  misc_RNA (1)...(19): siRNA sense strand
aagagguggaacaggagaa

SEQ ID NO: 2287380 - RNA, 19 nt, Homo sapiens
  misc_RNA (1)...(19): siRNA sense strand
cuaaaaucucccucaguaa

SEQ ID NO: 2287381 - RNA, 19 nt, Homo sapiens
  misc_RNA (1)...(19): siRNA sense strand
gugaagagguggaacagga

SEQ ID NO: 2287382 - RNA, 19 nt, Homo sapiens
  misc_RNA (1)...(19): siRNA sense strand
ugacaguucuccauggcaa

SEQ ID NO: 2287383 - RNA, 19 nt, Homo sapiens
  misc_RNA (1)...(19): siRNA sense strand
agguggaacaggagaagau

SEQ ID NO: 2287384 - RNA, 19 nt, Homo sapiens
  misc_RNA (1)...(19): siRNA sense strand
acggugaagagguggaaca

SEQ ID NO: 2287385 - RNA, 19 nt, Homo sapiens
  misc_RNA (1)...(19): siRNA sense strand
gcaucuacuggcugagaca

SEQ ID NO: 2287386 - RNA, 19 nt, Homo sapiens
  misc_RNA (1)...(19): siRNA sense strand
aagagguggaacaggagaa

SEQ ID NO: 2287387 - RNA, 19 nt, Homo sapiens
  misc_RNA (1)...(19): siRNA sense strand
cuaaaaucucccucaguaa

SEQ ID NO: 2287388 - RNA, 19 nt, Homo sapiens
  misc_RNA (1)...(19): siRNA sense strand
gugaagagguggaacagga

SEQ ID NO: 2287389 - RNA, 19 nt, Homo sapiens
  misc_RNA (1)...(19): siRNA sense strand
ugacaguucuccauggcaa

SEQ ID NO: 2287390 - RNA, 19 nt, Homo sapiens
  misc_RNA (1)...(19): siRNA sense strand
agguggaacaggagaagau

SEQ ID NO: 2287391 - RNA, 19 nt, Homo sapiens
  misc_RNA (1)...(19): siRNA sense strand
acggugaagagguggaaca

SEQ ID NO: 2287392 - RNA, 19 nt, Homo sapiens
  misc_RNA (1)...(19): siRNA sense strand
gcaucuacuggcugagaca

SEQ ID NO: 2287393 - RNA, 19 nt, Homo sapiens
  misc_RNA (1)...(19): siRNA sense strand
aagagguggaacaggagaa

SEQ ID NO: 2287394 - RNA, 19 nt, Homo sapiens
  misc_RNA (1)...(19): siRNA sense strand
cuaaaaucucccucaguaa

SEQ ID NO: 2287395 - RNA, 19 nt, Homo sapiens
  misc_RNA (1)...(19): siRNA sense strand
gugaagagguggaacagga

SEQ ID NO: 2287396 - RNA, 19 nt, Homo sapiens
  misc_RNA (1)...(19): siRNA sense strand
ugacaguucuccauggcaa

SEQ ID NO: 2287397 - RNA, 19 nt, Homo sapiens
  misc_RNA (1)...(19): siRNA sense strand
agguggaacaggagaagau

SEQ ID NO: 2287398 - RNA, 19 nt, Homo sapiens
  misc_RNA (1)...(19): siRNA sense strand
acggugaagagguggaaca

SEQ ID NO: 2287399 - RNA, 19 nt, Homo sapiens
  misc_RNA (1)...(19): siRNA sense strand
gcaucuacuggcugagaca

SEQ ID NO: 2287400 - RNA, 19 nt, Homo sapiens
  misc_RNA (1)...(19): siRNA sense strand
aagagguggaacaggagaa

SEQ ID NO: 2287401 - RNA, 19 nt, Homo sapiens
  misc_RNA (1)...(19): siRNA sense strand
cuaaaaucucccucaguaa

SEQ ID NO: 2287402 - RNA, 19 nt, Homo sapiens
  misc_RNA (1)...(19): siRNA sense strand
cauaagaggcagaaggcaa

SEQ ID NO: 2287403 - RNA, 19 nt, Homo sapiens
  misc_RNA (1)...(19): siRNA sense strand
gcaaagaucucaugggcuu

SEQ ID NO: 2287404 - RNA, 19 nt, Homo sapiens
  misc_RNA (1)...(19): siRNA sense strand
gagacuugauggaggagaa

SEQ ID NO: 2287405 - RNA, 19 nt, Homo sapiens
  misc_RNA (1)...(19): siRNA sense strand
guacaugaaaucagggaau

SEQ ID NO: 2287406 - RNA, 19 nt, Homo sapiens
  misc_RNA (1)...(19): siRNA sense strand
ggacauucaagaugggcua

SEQ ID NO: 2287407 - RNA, 19 nt, Homo sapiens
  misc_RNA (1)...(19): siRNA sense strand
gugaaaugcuggucaacau

SEQ ID NO: 2287408 - RNA, 19 nt, Homo sapiens
  misc_RNA (1)...(19): siRNA sense strand
acacaaauaccaaaggcaa

SEQ ID NO: 2287409 - RNA, 19 nt, Homo sapiens
  misc_RNA (1)...(19): siRNA sense strand
gcacagugggauuggaaga

SEQ ID NO: 2287410 - RNA, 19 nt, Homo sapiens
  misc_RNA (1)...(19): siRNA sense strand
gggacuacagggagaagaa

SEQ ID NO: 2287411 - RNA, 19 nt, Homo sapiens
  misc_RNA (1)...(19): siRNA sense strand
ccgcugaguacguggaauu

SEQ ID NO: 2287412 - RNA, 19 nt, Homo sapiens
  misc_RNA (1)...(19): siRNA sense strand
acguggaauuugaggugaa

SEQ ID NO: 2287413 - RNA, 19 nt, Homo sapiens
  misc_RNA (1)...(19): siRNA sense strand
ccucagugguacaggcaca

SEQ ID NO: 2287414 - RNA, 19 nt, Homo sapiens
  misc_RNA (1)...(19): siRNA sense strand
gcuauguaguagagcccua

SEQ ID NO: 2287415 - RNA, 19 nt, Homo sapiens
  misc_RNA (1)...(19): siRNA sense strand
ugagagaagaaauggaaga

SEQ ID NO: 2287416 - RNA, 19 nt, Homo sapiens
  misc_RNA (1)...(19): siRNA sense strand
gguuuaggucagugggaca

SEQ ID NO: 2287417 - RNA, 19 nt, Homo sapiens
  misc_RNA (1)...(19): siRNA sense strand
uagaauaugccaugaaaca

SEQ ID NO: 2287418 - RNA, 19 nt, Homo sapiens
  misc_RNA (1)...(19): siRNA sense strand
gaggaaauggguugaugaa

SEQ ID NO: 2287419 - RNA, 19 nt, Homo sapiens
  misc_RNA (1)...(19): siRNA sense strand
gaaucaaucaucagcgcua

SEQ ID NO: 2287420 - RNA, 19 nt, Homo sapiens
  misc_RNA (1)...(19): siRNA sense strand
cagcaacggacaugaguuu

SEQ ID NO: 2287421 - RNA, 19 nt, Homo sapiens
  misc_RNA (1)...(19): siRNA sense strand
ugaacugaaugaagaucaa

SEQ ID NO: 2287422 - RNA, 19 nt, Homo sapiens
  misc_RNA (1)...(19): siRNA sense strand
uggcugaauucauggaaca

SEQ ID NO: 2287423 - RNA, 19 nt, Homo sapiens
  misc_RNA (1)...(19): siRNA sense strand
ccaugaaacacuuuggaga

SEQ ID NO: 2287424 - RNA, 19 nt, Homo sapiens
  misc_RNA (1)...(19): siRNA sense strand
gcagagacuugauggagga

SEQ ID NO: 2287425 - RNA, 19 nt, Homo sapiens
  misc_RNA (1)...(19): siRNA sense strand
acuugauggaggagaaauu

SEQ ID NO: 2287426 - RNA, 19 nt, Homo sapiens
  misc_RNA (1)...(19): siRNA sense strand
caagaguggugcaggaagu

SEQ ID NO: 2287427 - RNA, 19 nt, Homo sapiens
  misc_RNA (1)...(19): siRNA sense strand
aggaguggaaggugggaau

SEQ ID NO: 2287428 - RNA, 19 nt, Homo sapiens
  misc_RNA (1)...(19): siRNA sense strand
ugauggaggugcugcgaga

SEQ ID NO: 2287429 - RNA, 19 nt, Homo sapiens
  misc_RNA (1)...(19): siRNA sense strand
gcccuaaauaagaaagcua

SEQ ID NO: 2287430 - RNA, 19 nt, Homo sapiens
  misc_RNA (1)...(19): siRNA sense strand
gaauaaaguucuggugcga

SEQ ID NO: 2287431 - RNA, 19 nt, Homo sapiens
  misc_RNA (1)...(19): siRNA sense strand
gaagaaggucacugaggau

SEQ ID NO: 2287432 - RNA, 19 nt, Homo sapiens
  misc_RNA (1)...(19): siRNA sense strand
cccaacaucucuucggaaa

SEQ ID NO: 2287433 - RNA, 19 nt, Homo sapiens
  misc_RNA (1)...(19): siRNA sense strand
agggagagcgucugagaga

SEQ ID NO: 2287434 - RNA, 19 nt, Homo sapiens
  misc_RNA (1)...(19): siRNA sense strand
gcuuugaauuugaaggcca

SEQ ID NO: 2287435 - RNA, 19 nt, Homo sapiens
  misc_RNA (1)...(19): siRNA sense strand
cggagaacuugcaggccuu

SEQ ID NO: 2287436 - RNA, 19 nt, Homo sapiens
  misc_RNA (1)...(19): siRNA sense strand
auaaaguucuggugcgaca

SEQ ID NO: 2287437 - RNA, 19 nt, Homo sapiens
  misc_RNA (1)...(19): siRNA sense strand
cugaggaccagcagcauaa

SEQ ID NO: 2287438 - RNA, 19 nt, Homo sapiens
  misc_RNA (1)...(19): siRNA sense strand
uuacaggccuggauggcaa

SEQ ID NO: 2287439 - RNA, 19 nt, Homo sapiens
  misc_RNA (1)...(19): siRNA sense strand
auuaacaggguucgagaua

SEQ ID NO: 2287440 - RNA, 19 nt, Homo sapiens
  misc_RNA (1)...(19): siRNA sense strand
uggccaaagagaagggcau

SEQ ID NO: 2287441 - RNA, 19 nt, Homo sapiens
  misc_RNA (1)...(19): siRNA sense strand
gagagaagaaauggaagaa

SEQ ID NO: 2287442 - RNA, 19 nt, Homo sapiens
  misc_RNA (1)...(19): siRNA sense strand
ggaaaugaggaaauggguu

SEQ ID NO: 2287443 - RNA, 19 nt, Homo sapiens
  misc_RNA (1)...(19): siRNA sense strand
cuagugaaaugcuggucaa

SEQ ID NO: 2287444 - RNA, 19 nt, Homo sapiens
  misc_RNA (1)...(19): siRNA sense strand
gugccgagcauaugccaaa

SEQ ID NO: 2287445 - RNA, 19 nt, Homo sapiens
  misc_RNA (1)...(19): siRNA sense strand
gcgaugagaagaagaaacu

SEQ ID NO: 2287446 - RNA, 19 nt, Homo sapiens
  misc_RNA (1)...(19): siRNA sense strand
aagaagcagagaagggauu

SEQ ID NO: 2287447 - RNA, 19 nt, Homo sapiens
  misc_RNA (1)...(19): siRNA sense strand
acuacagggagaagaagaa

SEQ ID NO: 2287448 - RNA, 19 nt, Homo sapiens
  misc_RNA (1)...(19): siRNA sense strand
uugcugaacuggaggcuga

SEQ ID NO: 2287449 - RNA, 19 nt, Homo sapiens
  misc_RNA (1)...(19): siRNA sense strand
gugucaagaaggagaagga

SEQ ID NO: 2287450 - RNA, 19 nt, Homo sapiens
  misc_RNA (1)...(19): siRNA sense strand
ugacggagucccuggauuu

SEQ ID NO: 2287451 - RNA, 19 nt, Homo sapiens
  misc_RNA (1)...(19): siRNA sense strand
augaagaucaacaggauga

SEQ ID NO: 2287452 - RNA, 19 nt, Homo sapiens
  misc_RNA (1)...(19): siRNA sense strand
ucuuaaacuuggcugaauu

SEQ ID NO: 2287453 - RNA, 19 nt, Homo sapiens
  misc_RNA (1)...(19): siRNA sense strand
agaagaagaaacugcguca

SEQ ID NO: 2287454 - RNA, 19 nt, Homo sapiens
  misc_RNA (1)...(19): siRNA sense strand
gagauuuaauggaggccca

SEQ ID NO: 2287455 - RNA, 19 nt, Homo sapiens
  misc_RNA (1)...(19): siRNA sense strand
cagcgugagccgaaggaga

SEQ ID NO: 2287456 - RNA, 19 nt, Homo sapiens
  misc_RNA (1)...(19): siRNA sense strand
cugugaggucugaguuuaa

SEQ ID NO: 2287457 - RNA, 19 nt, Homo sapiens
  misc_RNA (1)...(19): siRNA sense strand
gcauuguucugcuggguga

SEQ ID NO: 2287458 - RNA, 19 nt, Homo sapiens
  misc_RNA (1)...(19): siRNA sense strand
guagaggacuggcagaaaa

SEQ ID NO: 2287459 - RNA, 19 nt, Homo sapiens
  misc_RNA (1)...(19): siRNA sense strand
gcccaagaguggugcagga

SEQ ID NO: 2287460 - RNA, 19 nt, Homo sapiens
  misc_RNA (1)...(19): siRNA sense strand
ccgucagauuccacagcua

SEQ ID NO: 2287461 - RNA, 19 nt, Homo sapiens
  misc_RNA (1)...(19): siRNA sense strand
cagugcaagugguggcaga

SEQ ID NO: 2287462 - RNA, 19 nt, Homo sapiens
  misc_RNA (1)...(19): siRNA sense strand
ggagaauuggcacagguua

SEQ ID NO: 2287463 - RNA, 19 nt, Homo sapiens
  misc_RNA (1)...(19): siRNA sense strand
ggcaacaaccuccaggaua

SEQ ID NO: 2287464 - RNA, 19 nt, Homo sapiens
  misc_RNA (1)...(19): siRNA sense strand
gaaaggaacgugaaaggca

SEQ ID NO: 2287465 - RNA, 19 nt, Homo sapiens
  misc_RNA (1)...(19): siRNA sense strand
cauccuuagagcugcaaua

SEQ ID NO: 2287466 - RNA, 19 nt, Homo sapiens
  misc_RNA (1)...(19): siRNA sense strand
agagaagaaauggaagaaa

SEQ ID NO: 2287467 - RNA, 19 nt, Homo sapiens
  misc_RNA (1)...(19): siRNA sense strand
ugacagaguuggagcacag

SEQ ID NO: 2287468 - RNA, 19 nt, Homo sapiens
  misc_RNA (1)...(19): siRNA sense strand
gcaaauugugguagcucuu

SEQ ID NO: 2287469 - RNA, 19 nt, Homo sapiens
  misc_RNA (1)...(19): siRNA sense strand
cggaggaagcagugggaug

SEQ ID NO: 2287470 - RNA, 19 nt, Homo sapiens
  misc_RNA (1)...(19): siRNA sense strand
gcgcaaagaccgcaggaag

SEQ ID NO: 2287471 - RNA, 19 nt, Homo sapiens
  misc_RNA (1)...(19): siRNA sense strand
ggaagaagggccaggaggu

SEQ ID NO: 2287472 - RNA, 19 nt, Homo sapiens
  misc_RNA (1)...(19): siRNA sense strand
auggauaaucucaccgaaa

SEQ ID NO: 2287473 - RNA, 19 nt, Homo sapiens
  misc_RNA (1)...(19): siRNA sense strand
ggcuggaaugaauggauaa

SEQ ID NO: 2287474 - RNA, 19 nt, Homo sapiens
  misc_RNA (1)...(19): siRNA sense strand
ugggaugagccgagggugu

SEQ ID NO: 2287475 - RNA, 19 nt, Homo sapiens
  misc_RNA (1)...(19): siRNA sense strand
ccaugcaagacucggaaau

SEQ ID NO: 2287476 - RNA, 19 nt, Homo sapiens
  misc_RNA (1)...(19): siRNA sense strand
gaaaugauccuuacggcca

SEQ ID NO: 2287477 - RNA, 19 nt, Homo sapiens
  misc_RNA (1)...(19): siRNA sense strand
gcgagaauaucgagggcua

SEQ ID NO: 2287478 - RNA, 19 nt, Homo sapiens
  misc_RNA (1)...(19): siRNA sense strand
cggaauauuuacuggaaga

SEQ ID NO: 2287479 - RNA, 19 nt, Homo sapiens
  misc_RNA (1)...(19): siRNA sense strand
caucaagagaauaggaaau

SEQ ID NO: 2287480 - RNA, 19 nt, Homo sapiens
  misc_RNA (1)...(19): siRNA sense strand
gguucaaacaagaugauaa

SEQ ID NO: 2287481 - RNA, 19 nt, Homo sapiens
  misc_RNA (1)...(19): siRNA sense strand
ccuagaaagcagaguggaa

SEQ ID NO: 2287482 - RNA, 19 nt, Homo sapiens
  misc_RNA (1)...(19): siRNA sense strand
gcaaagacagagaggugaa

SEQ ID NO: 2287483 - RNA, 19 nt, Homo sapiens
  misc_RNA (1)...(19): siRNA sense strand
auucagaacaugagaagaa

SEQ ID NO: 2287484 - RNA, 19 nt, Homo sapiens
  misc_RNA (1)...(19): siRNA sense strand
gcuaaauacuggggagaaa

SEQ ID NO: 2287485 - RNA, 19 nt, Homo sapiens
  misc_RNA (1)...(19): siRNA sense strand
aggcauugauguaagacaa

SEQ ID NO: 2287486 - RNA, 19 nt, Homo sapiens
  misc_RNA (1)...(19): siRNA sense strand
ugauguaagacaagagcua

SEQ ID NO: 2287487 - RNA, 19 nt, Homo sapiens
  misc_RNA (1)...(19): siRNA sense strand
ccauagaggacaugacaga

SEQ ID NO: 2287488 - RNA, 19 nt, Homo sapiens
  misc_RNA (1)...(19): siRNA sense strand
cgauaaacucagaccagaa

SEQ ID NO: 2287489 - RNA, 19 nt, Homo sapiens
  misc_RNA (1)...(19): siRNA sense strand
ccaucaagagaauaggaaa

SEQ ID NO: 2287490 - RNA, 19 nt, Homo sapiens
  misc_RNA (1)...(19): siRNA sense strand
acgucgagcuaauggcaua

SEQ ID NO: 2287491 - RNA, 19 nt, Homo sapiens
  misc_RNA (1)...(19): siRNA sense strand
cagcagagcuagcaggcuu

SEQ ID NO: 2287492 - RNA, 19 nt, Homo sapiens
  misc_RNA (1)...(19): siRNA sense strand
ccaaggagacauaagguau

SEQ ID NO: 2287493 - RNA, 19 nt, Homo sapiens
  misc_RNA (1)...(19): siRNA sense strand
ccugaagacaagcgagaau

SEQ ID NO: 2287494 - RNA, 19 nt, Homo sapiens
  misc_RNA (1)...(19): siRNA sense strand
aggauacagucaugagcaa

SEQ ID NO: 2287495 - RNA, 19 nt, Homo sapiens
  misc_RNA (1)...(19): siRNA sense strand
ccuuugagauugaugaaaa

SEQ ID NO: 2287496 - RNA, 19 nt, Homo sapiens
  misc_RNA (1)...(19): siRNA sense strand
aagucaaagggcuggguua

SEQ ID NO: 2287497 - RNA, 19 nt, Homo sapiens
  misc_RNA (1)...(19): siRNA sense strand
gugaaagguuacaaugaca

SEQ ID NO: 2287498 - RNA, 19 nt, Homo sapiens
  misc_RNA (1)...(19): siRNA sense strand
agucaaagggcuggguuaa

SEQ ID NO: 2287499 - RNA, 19 nt, Homo sapiens
  misc_RNA (1)...(19): siRNA sense strand
gggacagguaacaaauaua

SEQ ID NO: 2287500 - RNA, 19 nt, Homo sapiens
  misc_RNA (1)...(19): siRNA sense strand
agaauuuagaccugacuua

SEQ ID NO: 2287501 - RNA, 19 nt, Homo sapiens
  misc_RNA (1)...(19): siRNA sense strand
uuguuuaucagcagagaaa

SEQ ID NO: 2287502 - RNA, 19 nt, Homo sapiens
  misc_RNA (1)...(19): siRNA sense strand
augagaagaaugugaugaa

SEQ ID NO: 2287503 - RNA, 19 nt, Homo sapiens
  misc_RNA (1)...(19): siRNA sense strand
cuuuacuaguggagagcau

SEQ ID NO: 2287504 - RNA, 19 nt, Homo sapiens
  misc_RNA (1)...(19): siRNA sense strand
acaagaagcuauaccggau

SEQ ID NO: 2287505 - RNA, 19 nt, Homo sapiens
  misc_RNA (1)...(19): siRNA sense strand
uaacuguggcaucgagaua

SEQ ID NO: 2287506 - RNA, 19 nt, Homo sapiens
  misc_RNA (1)...(19): siRNA sense strand
augcaaagcaccucagaga

SEQ ID NO: 2287507 - RNA, 19 nt, Homo sapiens
  misc_RNA (1)...(19): siRNA sense strand
uccaaauauugcuggcuua

SEQ ID NO: 2287508 - RNA, 19 nt, Homo sapiens
  misc_RNA (1)...(19): siRNA sense strand
ggaacaaagaaauacccua

SEQ ID NO: 2287509 - RNA, 19 nt, Homo sapiens
  misc_RNA (1)...(19): siRNA sense strand
aggaaauguuggcaguaga

SEQ ID NO: 2287510 - RNA, 19 nt, Homo sapiens
  misc_RNA (1)...(19): siRNA sense strand
gaccaaaccaagaaggcau

SEQ ID NO: 2287511 - RNA, 19 nt, Homo sapiens
  misc_RNA (1)...(19): siRNA sense strand
gguauggaacccaguacaa

SEQ ID NO: 2287512 - RNA, 19 nt, Homo sapiens
  misc_RNA (1)...(19): siRNA sense strand
cuucaguaaauuugggaca

SEQ ID NO: 2287513 - RNA, 19 nt, Homo sapiens
  misc_RNA (1)...(19): siRNA sense strand
aguacaaacaagaagcuau

SEQ ID NO: 2287514 - RNA, 19 nt, Homo sapiens
  misc_RNA (1)...(19): siRNA sense strand
caucaaauucuacaaggaa

SEQ ID NO: 2287515 - RNA, 19 nt, Homo sapiens
  misc_RNA (1)...(19): siRNA sense strand
aagacaagagcuacugaaa

SEQ ID NO: 2287516 - RNA, 19 nt, Homo sapiens
  misc_RNA (1)...(19): siRNA sense strand
agacaagagcuacugaaau

SEQ ID NO: 2287517 - RNA, 19 nt, Homo sapiens
  misc_RNA (1)...(19): siRNA sense strand
caaagaagcuaucugcuga

SEQ ID NO: 2287518 - RNA, 19 nt, Homo sapiens
  misc_RNA (1)...(19): siRNA sense strand
ccaaggaagauaucaucaa

SEQ ID NO: 2287519 - RNA, 19 nt, Homo sapiens
  misc_RNA (1)...(19): siRNA sense strand
acuguggcaucgagauaua

SEQ ID NO: 2287520 - RNA, 19 nt, Homo sapiens
  misc_RNA (1)...(19): siRNA sense strand
guaaauuugggacagguaa

SEQ ID NO: 2287521 - RNA, 19 nt, Homo sapiens
  misc_RNA (1)...(19): siRNA sense strand
gaacuuaagucaaagggcu

SEQ ID NO: 2287522 - RNA, 19 nt, Homo sapiens
  misc_RNA (1)...(19): siRNA sense strand
uaaaagaagcucuggauga

SEQ ID NO: 2287523 - RNA, 19 nt, Homo sapiens
  misc_RNA (1)...(19): siRNA sense strand
cauucaggcauuagcaauu

SEQ ID NO: 2287524 - RNA, 19 nt, Homo sapiens
  misc_RNA (1)...(19): siRNA sense strand
ugaaaguugcaaagacaga

SEQ ID NO: 2287525 - RNA, 19 nt, Homo sapiens
  misc_RNA (1)...(19): siRNA sense strand
cagugaaagguuacaauga

SEQ ID NO: 2287526 - RNA, 19 nt, Homo sapiens
  misc_RNA (1)...(19): siRNA sense strand
ugaagacaagcgagaauau

SEQ ID NO: 2287527 - RNA, 19 nt, Homo sapiens
  misc_RNA (1)...(19): siRNA sense strand
cauuaggaauuaugcagau

SEQ ID NO: 2287528 - RNA, 19 nt, Homo sapiens
  misc_RNA (1)...(19): siRNA sense strand
acaaggaaauguuggcagu

SEQ ID NO: 2287529 - RNA, 19 nt, Homo sapiens
  misc_RNA (1)...(19): siRNA sense strand
ggauaagucaucagcagca

SEQ ID NO: 2287530 - RNA, 19 nt, Homo sapiens
  misc_RNA (1)...(19): siRNA sense strand
aguaaauuugggacaggua

SEQ ID NO: 2287531 - RNA, 19 nt, Homo sapiens
  misc_RNA (1)...(19): siRNA sense strand
guucgaugaaaguugcaaa

SEQ ID NO: 2287532 - RNA, 19 nt, Homo sapiens
  misc_RNA (1)...(19): siRNA sense strand
cugaaguggccuggacuaa

SEQ ID NO: 2287533 - RNA, 19 nt, Homo sapiens
  misc_RNA (1)...(19): siRNA sense strand
agacaaaccaaagaagcua

SEQ ID NO: 2287534 - RNA, 19 nt, Homo sapiens
  misc_RNA (1)...(19): siRNA sense strand
ccaaauauugcuggcuuaa

SEQ ID NO: 2287535 - RNA, 19 nt, Homo sapiens
  misc_RNA (1)...(19): siRNA sense strand
caaaucaaauccuggucau

SEQ ID NO: 2287536 - RNA, 19 nt, Homo sapiens
  misc_RNA (1)...(19): siRNA sense strand
gcagaaggaaggagcccga

SEQ ID NO: 2287537 - RNA, 19 nt, Homo sapiens
  misc_RNA (1)...(19): siRNA sense strand
gguucgguauagagaaguu

SEQ ID NO: 2287538 - RNA, 19 nt, Homo sapiens
  misc_RNA (1)...(19): siRNA sense strand
agauauacuaccaaacaga

SEQ ID NO: 2287539 - RNA, 19 nt, Homo sapiens
  misc_RNA (1)...(19): siRNA sense strand
gaugaaugaugccuggaga

SEQ ID NO: 2287540 - RNA, 19 nt, Homo sapiens
  misc_RNA (1)...(19): siRNA sense strand
aaaucaucucccagcaaua

SEQ ID NO: 2287541 - RNA, 19 nt, Homo sapiens
  misc_RNA (1)...(19): siRNA sense strand
ccuaaaggcaagaagaaaa

SEQ ID NO: 2287542 - RNA, 19 nt, Homo sapiens
  misc_RNA (1)...(19): siRNA sense strand
cccuaggagcugaggauaa

SEQ ID NO: 2287543 - RNA, 19 nt, Homo sapiens
  misc_RNA (1)...(19): siRNA sense strand
guggaagaacccagagcaa

SEQ ID NO: 2287544 - RNA, 19 nt, Homo sapiens
  misc_RNA (1)...(19): siRNA sense strand
ccaaugagccugaggagga

SEQ ID NO: 2287545 - RNA, 19 nt, Homo sapiens
  misc_RNA (1)...(19): siRNA sense strand
gauuaaaggcagugaggcu

SEQ ID NO: 2287546 - RNA, 19 nt, Homo sapiens
  misc_RNA (1)...(19): siRNA sense strand
ugauggaugaagugacaaa

SEQ ID NO: 2287547 - RNA, 19 nt, Homo sapiens
  misc_RNA (1)...(19): siRNA sense strand
guacagcaacagagaccaa

SEQ ID NO: 2287548 - RNA, 19 nt, Homo sapiens
  misc_RNA (1)...(19): siRNA sense strand
gagaaaggaaugugcucau

SEQ ID NO: 2287549 - RNA, 19 nt, Homo sapiens
  misc_RNA (1)...(19): siRNA sense strand
auuuagugguccaaggcaa

SEQ ID NO: 2287550 - RNA, 19 nt, Homo sapiens
  misc_RNA (1)...(19): siRNA sense strand
guguaaagucugccgauca

SEQ ID NO: 2287551 - RNA, 19 nt, Homo sapiens
  misc_RNA (1)...(19): siRNA sense strand
cugucaugcuucagccuua

SEQ ID NO: 2287552 - RNA, 19 nt, Homo sapiens
  misc_RNA (1)...(19): siRNA sense strand
ccgagaacugaaagcacaa

SEQ ID NO: 2287553 - RNA, 19 nt, Homo sapiens
  misc_RNA (1)...(19): siRNA sense strand
ccuuacaugcccacgguua

SEQ ID NO: 2287554 - RNA, 19 nt, Homo sapiens
  misc_RNA (1)...(19): siRNA sense strand
cacaaaaggcagacaagaa

SEQ ID NO: 2287555 - RNA, 19 nt, Homo sapiens
  misc_RNA (1)...(19): siRNA sense strand
ugaacuaugaggaugggaa

SEQ ID NO: 2287556 - RNA, 19 nt, Homo sapiens
  misc_RNA (1)...(19): siRNA sense strand
aaggaaacauuguccgaga

SEQ ID NO: 2287557 - RNA, 19 nt, Homo sapiens
  misc_RNA (1)...(19): siRNA sense strand
cccuaaaggcaagaagaaa

SEQ ID NO: 2287558 - RNA, 19 nt, Homo sapiens
  misc_RNA (1)...(19): siRNA sense strand
cugcagagacuguacugaa

SEQ ID NO: 2287559 - RNA, 19 nt, Homo sapiens
  misc_RNA (1)...(19): siRNA sense strand
ggacagaugaguaugguac

SEQ ID NO: 2287560 - RNA, 19 nt, Homo sapiens
  misc_RNA (1)...(19): siRNA sense strand
agaccaaggcucuggagga

SEQ ID NO: 2287561 - RNA, 19 nt, Homo sapiens
  misc_RNA (1)...(19): siRNA sense strand
cggaccugcugcugaagaa

SEQ ID NO: 2287562 - RNA, 19 nt, Homo sapiens
  misc_RNA (1)...(19): siRNA sense strand
cugggauguuugugucuaa

SEQ ID NO: 2287563 - RNA, 19 nt, Homo sapiens
  misc_RNA (1)...(19): siRNA sense strand
cagccaagccacagcagau

SEQ ID NO: 2287564 - RNA, 19 nt, Homo sapiens
  misc_RNA (1)...(19): siRNA sense strand
uggaaugggaagcgacaga

SEQ ID NO: 2287565 - RNA, 19 nt, Homo sapiens
  misc_RNA (1)...(19): siRNA sense strand
cuuaagaagccucagugua

SEQ ID NO: 2287566 - RNA, 19 nt, Homo sapiens
  misc_RNA (1)...(19): siRNA sense strand
cagugaggcugacaggcaa

SEQ ID NO: 2287567 - RNA, 19 nt, Homo sapiens
  misc_RNA (1)...(19): siRNA sense strand
ugaguaugguacagcaaca

SEQ ID NO: 2287568 - RNA, 19 nt, Homo sapiens
  misc_RNA (1)...(19): siRNA sense strand
cugcggagguggcgaaacu

SEQ ID NO: 2287569 - RNA, 19 nt, Homo sapiens
  misc_RNA (1)...(19): siRNA sense strand
agggaagggcugucaccaa

SEQ ID NO: 2287570 - RNA, 19 nt, Homo sapiens
  misc_RNA (1)...(19): siRNA sense strand
ggaugaagugacaaaacaa

SEQ ID NO: 2287571 - RNA, 19 nt, Homo sapiens
  misc_RNA (1)...(19): siRNA sense strand
ugggagaagggccuagaaa

SEQ ID NO: 2287572 - RNA, 19 nt, Homo sapiens
  misc_RNA (1)...(19): siRNA sense strand
gugugggacagaugaguau

SEQ ID NO: 2287573 - RNA, 19 nt, Homo sapiens
  misc_RNA (1)...(19): siRNA sense strand
cugcauaacccgagaccuc

SEQ ID NO: 2287574 - RNA, 19 nt, Homo sapiens
  misc_RNA (1)...(19): siRNA sense strand
aggaaacauuguccgagaa

SEQ ID NO: 2287575 - RNA, 19 nt, Homo sapiens
  misc_RNA (1)...(19): siRNA sense strand
gaugaguaugguacagcaa

SEQ ID NO: 2287576 - RNA, 19 nt, Homo sapiens
  misc_RNA (1)...(19): siRNA sense strand
uguaucaguucauggccaa

SEQ ID NO: 2287577 - RNA, 19 nt, Homo sapiens
  misc_RNA (1)...(19): siRNA sense strand
gauugaaaguuuaaggcag

SEQ ID NO: 2287578 - RNA, 19 nt, Homo sapiens
  misc_RNA (1)...(19): siRNA sense strand
gcgcaguauccucaccaua

SEQ ID NO: 2287579 - RNA, 19 nt, Homo sapiens
  misc_RNA (1)...(19): siRNA sense strand
gcagugaggcugacaggca

SEQ ID NO: 2287580 - RNA, 19 nt, Homo sapiens
  misc_RNA (1)...(19): siRNA sense strand
gcuguuacugcuugggaga

SEQ ID NO: 2287581 - RNA, 19 nt, Homo sapiens
  misc_RNA (1)...(19): siRNA sense strand
caucauugguugugugcuc

SEQ ID NO: 2287582 - RNA, 19 nt, Homo sapiens
  misc_RNA (1)...(19): siRNA sense strand
ccaaaaucacccaggacau

SEQ ID NO: 2287583 - RNA, 19 nt, Homo sapiens
  misc_RNA (1)...(19): siRNA sense strand
gaucaugcccuguggugca

SEQ ID NO: 2287584 - RNA, 19 nt, Homo sapiens
  misc_RNA (1)...(19): siRNA sense strand
aguucauggccaaagacaa

SEQ ID NO: 2287585 - RNA, 19 nt, Homo sapiens
  misc_RNA (1)...(19): siRNA sense strand
acuaugaggaugggaaauu

SEQ ID NO: 2287586 - RNA, 19 nt, Homo sapiens
  misc_RNA (1)...(19): siRNA sense strand
gagcccuggaagcggauua

SEQ ID NO: 2287587 - RNA, 19 nt, Homo sapiens
  misc_RNA (1)...(19): siRNA sense strand
uggaaaaugaccagauuga

SEQ ID NO: 2287588 - RNA, 19 nt, Homo sapiens
  misc_RNA (1)...(19): siRNA sense strand
cuggcuuggcagugaauau

SEQ ID NO: 2287589 - RNA, 19 nt, Homo sapiens
  misc_RNA (1)...(19): siRNA sense strand
ccucuaucugugugggaca

SEQ ID NO: 2287590 - RNA, 19 nt, Homo sapiens
  misc_RNA (1)...(19): siRNA sense strand
gcgacaaguaccacaucau

SEQ ID NO: 2287591 - RNA, 19 nt, Homo sapiens
  misc_RNA (1)...(19): siRNA sense strand
ggagcugaggauaacuaua

SEQ ID NO: 2287592 - RNA, 19 nt, Homo sapiens
  misc_RNA (1)...(19): siRNA sense strand
gggcugagaucaaggccaa

SEQ ID NO: 2287593 - RNA, 19 nt, Homo sapiens
  misc_RNA (1)...(19): siRNA sense strand
ggacugaggaggagacgga

SEQ ID NO: 2287594 - RNA, 19 nt, Homo sapiens
  misc_RNA (1)...(19): siRNA sense strand
gguucuggcgggugaggaa

SEQ ID NO: 2287595 - RNA, 19 nt, Homo sapiens
  misc_RNA (1)...(19): siRNA sense strand
ggagacaagcauugggugu

SEQ ID NO: 2287596 - RNA, 19 nt, Homo sapiens
  misc_RNA (1)...(19): siRNA sense strand
aggcaaagcugaugcagac

SEQ ID NO: 2287597 - RNA, 19 nt, Homo sapiens
  misc_RNA (1)...(19): siRNA sense strand
ggccaauguucgaaggaag

SEQ ID NO: 2287598 - RNA, 19 nt, Homo sapiens
  misc_RNA (1)...(19): siRNA sense strand
aggaggagacggaggugau

SEQ ID NO: 2287599 - RNA, 19 nt, Homo sapiens
  misc_RNA (1)...(19): siRNA sense strand
acgagaggaaggauggcaa

SEQ ID NO: 2287600 - RNA, 19 nt, Homo sapiens
  misc_RNA (1)...(19): siRNA sense strand
cuucaaaggagacaagcau

SEQ ID NO: 2287601 - RNA, 19 nt, Homo sapiens
  misc_RNA (1)...(19): siRNA sense strand
ggaaacaaguacuaccguu

SEQ ID NO: 2287602 - RNA, 19 nt, Homo sapiens
  misc_RNA (1)...(19): siRNA sense strand
ucauugagguggacgagga

SEQ ID NO: 2287603 - RNA, 19 nt, Homo sapiens
  misc_RNA (1)...(19): siRNA sense strand
ucuggaugcccaauggaaa

SEQ ID NO: 2287604 - RNA, 19 nt, Homo sapiens
  misc_RNA (1)...(19): siRNA sense strand
cauacgaggccauucgcaa

SEQ ID NO: 2287605 - RNA, 19 nt, Homo sapiens
  misc_RNA (1)...(19): siRNA sense strand
gcgaguaccccaagaacau

SEQ ID NO: 2287606 - RNA, 19 nt, Homo sapiens
  misc_RNA (1)...(19): siRNA sense strand
caggcaaagcugaugcaga

SEQ ID NO: 2287607 - RNA, 19 nt, Homo sapiens
  misc_RNA (1)...(19): siRNA sense strand
gcgaggugcccuaugccua

SEQ ID NO: 2287608 - RNA, 19 nt, Homo sapiens
  misc_RNA (1)...(19): siRNA sense strand
ccaacaucugugacgggaa

SEQ ID NO: 2287609 - RNA, 19 nt, Homo sapiens
  misc_RNA (1)...(19): siRNA sense strand
cugcaaagucucugggaau

SEQ ID NO: 2287610 - RNA, 19 nt, Homo sapiens
  misc_RNA (1)...(19): siRNA sense strand
cggaauaaccagaagucau

SEQ ID NO: 2287611 - RNA, 19 nt, Homo sapiens
  misc_RNA (1)...(19): siRNA sense strand
gugcaagauuuauuggcaa

SEQ ID NO: 2287612 - RNA, 19 nt, Homo sapiens
  misc_RNA (1)...(19): siRNA sense strand
gugccagcccagugaguaa

SEQ ID NO: 2287613 - RNA, 19 nt, Homo sapiens
  misc_RNA (1)...(19): siRNA sense strand
ccuugaaagacuauaacaa

SEQ ID NO: 2287614 - RNA, 19 nt, Homo sapiens
  misc_RNA (1)...(19): siRNA sense strand
ccucagaaccagcgauuca

SEQ ID NO: 2287615 - RNA, 19 nt, Homo sapiens
  misc_RNA (1)...(19): siRNA sense strand
ucaaaggauuccaaggaga

SEQ ID NO: 2287616 - RNA, 19 nt, Homo sapiens
  misc_RNA (1)...(19): siRNA sense strand
cagaugaguaugaagaaga

SEQ ID NO: 2287617 - RNA, 19 nt, Homo sapiens
  misc_RNA (1)...(19): siRNA sense strand
aguaugaagaagauggauu

SEQ ID NO: 2287618 - RNA, 19 nt, Homo sapiens
  misc_RNA (1)...(19): siRNA sense strand
gcauauaaacccaagagca

SEQ ID NO: 2287619 - RNA, 19 nt, Homo sapiens
  misc_RNA (1)...(19): siRNA sense strand
ugaagaugggacugugaaa

SEQ ID NO: 2287620 - RNA, 19 nt, Homo sapiens
  misc_RNA (1)...(19): siRNA sense strand
cuugaugaaccaaugaaua

SEQ ID NO: 2287621 - RNA, 19 nt, Homo sapiens
  misc_RNA (1)...(19): siRNA sense strand
aggaacaaccugugugcau

SEQ ID NO: 2287622 - RNA, 19 nt, Homo sapiens
  misc_RNA (1)...(19): siRNA sense strand
gugagugugccuuuggaaa

SEQ ID NO: 2287623 - RNA, 19 nt, Homo sapiens
  misc_RNA (1)...(19): siRNA sense strand
caacaaacggcaaggaggu

SEQ ID NO: 2287624 - RNA, 19 nt, Homo sapiens
  misc_RNA (1)...(19): siRNA sense strand
gcaaggggaaauagaaaau

SEQ ID NO: 2287625 - RNA, 19 nt, Homo sapiens
  misc_RNA (1)...(19): siRNA sense strand
ccgucuauauggagucuuu

SEQ ID NO: 2287626 - RNA, 19 nt, Homo sapiens
  misc_RNA (1)...(19): siRNA sense strand
uauuuuaaucggagagcaa

SEQ ID NO: 2287627 - RNA, 19 nt, Homo sapiens
  misc_RNA (1)...(19): siRNA sense strand
cgccaauaccucagaacca

SEQ ID NO: 2287628 - RNA, 19 nt, Homo sapiens
  misc_RNA (1)...(19): siRNA sense strand
agaugaguaugaagaagau

SEQ ID NO: 2287629 - RNA, 19 nt, Homo sapiens
  misc_RNA (1)...(19): siRNA sense strand
aggaagugauugagauggu

SEQ ID NO: 2287630 - RNA, 19 nt, Homo sapiens
  misc_RNA (1)...(19): siRNA sense strand
uuauggaagaauuggguga

SEQ ID NO: 2287631 - RNA, 19 nt, Homo sapiens
  misc_RNA (1)...(19): siRNA sense strand
guaaccaggaagugauuga

SEQ ID NO: 2287632 - RNA, 19 nt, Homo sapiens
  misc_RNA (1)...(19): siRNA sense strand
gcacaugcaaggggaaaua

SEQ ID NO: 2287633 - RNA, 19 nt, Homo sapiens
  misc_RNA (1)...(19): siRNA sense strand
agaccuugaaagacuauaa

SEQ ID NO: 2287634 - RNA, 19 nt, Homo sapiens
  misc_RNA (1)...(19): siRNA sense strand
ugucaaacagaguacauuu

SEQ ID NO: 2287635 - RNA, 19 nt, Homo sapiens
  misc_RNA (1)...(19): siRNA sense strand
acgccaauauucauggaca

SEQ ID NO: 2287636 - RNA, 19 nt, Homo sapiens
  misc_RNA (1)...(19): siRNA sense strand
acugcaaagucucugggaa

SEQ ID NO: 2287637 - RNA, 19 nt, Homo sapiens
  misc_RNA (1)...(19): siRNA sense strand
augcaaggggaaauagaaa

SEQ ID NO: 2287638 - RNA, 19 nt, Homo sapiens
  misc_RNA (1)...(19): siRNA sense strand
gggguugucuugugggaga

SEQ ID NO: 2287639 - RNA, 19 nt, Homo sapiens
  misc_RNA (1)...(19): siRNA sense strand
ccgaugaagaggagggaac

SEQ ID NO: 2287640 - RNA, 19 nt, Homo sapiens
  misc_RNA (1)...(19): siRNA sense strand
gcagaaaguccaaaggaac

SEQ ID NO: 2287641 - RNA, 19 nt, Homo sapiens
  misc_RNA (1)...(19): siRNA sense strand
agaagaugccggugcaagu

SEQ ID NO: 2287642 - RNA, 19 nt, Homo sapiens
  misc_RNA (1)...(19): siRNA sense strand
ucaccauggccaaggcaga

SEQ ID NO: 2287643 - RNA, 19 nt, Homo sapiens
  misc_RNA (1)...(19): siRNA sense strand
ccgaugaagaggagggaac

SEQ ID NO: 2287644 - RNA, 19 nt, Homo sapiens
  misc_RNA (1)...(19): siRNA sense strand
gcagaaaguccaaaggaac

SEQ ID NO: 2287645 - RNA, 19 nt, Homo sapiens
  misc_RNA (1)...(19): siRNA sense strand
agaagaugccggugcaagu

SEQ ID NO: 2287646 - RNA, 19 nt, Homo sapiens
  misc_RNA (1)...(19): siRNA sense strand
ucaccauggccaaggcaga

SEQ ID NO: 2287647 - RNA, 19 nt, Homo sapiens
  misc_RNA (1)...(19): siRNA sense strand
gggaaugaagagaguguaa

SEQ ID NO: 2287648 - RNA, 19 nt, Homo sapiens
  misc_RNA (1)...(19): siRNA sense strand
caggaauaaagaugggaaa

SEQ ID NO: 2287649 - RNA, 19 nt, Homo sapiens
  misc_RNA (1)...(19): siRNA sense strand
ugaagagagcugagaguau

SEQ ID NO: 2287650 - RNA, 19 nt, Homo sapiens
  misc_RNA (1)...(19): siRNA sense strand
gagcaaucaacaagaagaa

SEQ ID NO: 2287651 - RNA, 19 nt, Homo sapiens
  misc_RNA (1)...(19): siRNA sense strand
cagaagaugacaagcacaa

SEQ ID NO: 2287652 - RNA, 19 nt, Homo sapiens
  misc_RNA (1)...(19): siRNA sense strand
ucuuggagauggucagaaa

SEQ ID NO: 2287653 - RNA, 19 nt, Homo sapiens
  misc_RNA (1)...(19): siRNA sense strand
caggauauaaagugagaga

SEQ ID NO: 2287654 - RNA, 19 nt, Homo sapiens
  misc_RNA (1)...(19): siRNA sense strand
gguuggcauuggagggcaa

SEQ ID NO: 2287655 - RNA, 19 nt, Homo sapiens
  misc_RNA (1)...(19): siRNA sense strand
agauuugagggcugggaaa

SEQ ID NO: 2287656 - RNA, 19 nt, Homo sapiens
  misc_RNA (1)...(19): siRNA sense strand
agaaacucgugaagaaaga

SEQ ID NO: 2287657 - RNA, 19 nt, Homo sapiens
  misc_RNA (1)...(19): siRNA sense strand
aagaaagaaccuuccguaa

SEQ ID NO: 2287658 - RNA, 19 nt, Homo sapiens
  misc_RNA (1)...(19): siRNA sense strand
cuggauggugacaggaaua

SEQ ID NO: 2287659 - RNA, 19 nt, Homo sapiens
  misc_RNA (1)...(19): siRNA sense strand
gcagaagauuugagggcug

SEQ ID NO: 2287660 - RNA, 19 nt, Homo sapiens
  misc_RNA (1)...(19): siRNA sense strand
uagaagaaucggagccaga

SEQ ID NO: 2287661 - RNA, 19 nt, Homo sapiens
  misc_RNA (1)...(19): siRNA sense strand
gugucaauggcuagaagaa

SEQ ID NO: 2287662 - RNA, 19 nt, Homo sapiens
  misc_RNA (1)...(19): siRNA sense strand
aaucggagccagaguguau

SEQ ID NO: 2287663 - RNA, 19 nt, Homo sapiens
  misc_RNA (1)...(19): siRNA sense strand
ggaauaaagaugggaaaau

SEQ ID NO: 2287664 - RNA, 19 nt, Homo sapiens
  misc_RNA (1)...(19): siRNA sense strand
ccaaguaugcagugucaau

SEQ ID NO: 2287665 - RNA, 19 nt, Homo sapiens
  misc_RNA (1)...(19): siRNA sense strand
cggauucauuugugacuau

SEQ ID NO: 2287666 - RNA, 19 nt, Homo sapiens
  misc_RNA (1)...(19): siRNA sense strand
agccagagaaccaggauau

SEQ ID NO: 2287667 - RNA, 19 nt, Homo sapiens
  misc_RNA (1)...(19): siRNA sense strand
ggagauggucagaaagcca

SEQ ID NO: 2287668 - RNA, 19 nt, Homo sapiens
  misc_RNA (1)...(19): siRNA sense strand
augaaagagcaaucaacaa

SEQ ID NO: 2287669 - RNA, 19 nt, Homo sapiens
  misc_RNA (1)...(19): siRNA sense strand
caaagaugagcuugaugaa

SEQ ID NO: 2287670 - RNA, 19 nt, Homo sapiens
  misc_RNA (1)...(19): siRNA sense strand
ggaauugugcuuuguaaaa

SEQ ID NO: 2287671 - RNA, 19 nt, Homo sapiens
  misc_RNA (1)...(19): siRNA sense strand
cugaaugaugggaaccaaa

SEQ ID NO: 2287672 - RNA, 19 nt, Homo sapiens
  misc_RNA (1)...(19): siRNA sense strand
ugaacagaacguugaguga

SEQ ID NO: 2287673 - RNA, 19 nt, Homo sapiens
  misc_RNA (1)...(19): siRNA sense strand
cuguauaaacuaugaccuu

SEQ ID NO: 2287674 - RNA, 19 nt, Homo sapiens
  misc_RNA (1)...(19): siRNA sense strand
uggaauugugcuuuguaaa

SEQ ID NO: 2287675 - RNA, 19 nt, Homo sapiens
  misc_RNA (1)...(19): siRNA sense strand
acuccgagauggugagacu

SEQ ID NO: 2287676 - RNA, 19 nt, Homo sapiens
  misc_RNA (1)...(19): siRNA sense strand
ccuucaucauucaggaaaa

SEQ ID NO: 2287677 - RNA, 19 nt, Homo sapiens
  misc_RNA (1)...(19): siRNA sense strand
ugugaacauuggugcagaa

SEQ ID NO: 2287678 - RNA, 19 nt, Homo sapiens
  misc_RNA (1)...(19): siRNA sense strand
cagcgaaggaacacagcau

SEQ ID NO: 2287679 - RNA, 19 nt, Homo sapiens
  misc_RNA (1)...(19): siRNA sense strand
gcacuaacuaagccagaga

SEQ ID NO: 2287680 - RNA, 19 nt, Homo sapiens
  misc_RNA (1)...(19): siRNA sense strand
guuuggcaguuguggauuu

SEQ ID NO: 2287681 - RNA, 19 nt, Homo sapiens
  misc_RNA (1)...(19): siRNA sense strand
caaagcaaucaacaggaaa

SEQ ID NO: 2287682 - RNA, 19 nt, Homo sapiens
  misc_RNA (1)...(19): siRNA sense strand
agauaaauuagguugcaga

SEQ ID NO: 2287683 - RNA, 19 nt, Homo sapiens
  misc_RNA (1)...(19): siRNA sense strand
ucaacaggaaagaagguau

SEQ ID NO: 2287684 - RNA, 19 nt, Homo sapiens
  misc_RNA (1)...(19): siRNA sense strand
ugugaagaguggcaaucua

SEQ ID NO: 2287685 - RNA, 19 nt, Homo sapiens
  misc_RNA (1)...(19): siRNA sense strand
aggaauaaagaugggaaaa

SEQ ID NO: 2287686 - RNA, 19 nt, Homo sapiens
  misc_RNA (1)...(19): siRNA sense strand
guugacuggaguaagguua

SEQ ID NO: 2287687 - RNA, 19 nt, Homo sapiens
  misc_RNA (1)...(19): siRNA sense strand
gcuggauggugacaggaau

SEQ ID NO: 2287688 - RNA, 19 nt, Homo sapiens
  misc_RNA (1)...(19): siRNA sense strand
uguucaaagcuguugguga

SEQ ID NO: 2287689 - RNA, 19 nt, Homo sapiens
  misc_RNA (1)...(19): siRNA sense strand
guucgcugacauugaauua

SEQ ID NO: 2287690 - RNA, 19 nt, Homo sapiens
  misc_RNA (1)...(19): siRNA sense strand
cccucaauguccuggaaga

SEQ ID NO: 2287691 - RNA, 19 nt, Homo sapiens
  misc_RNA (1)...(19): siRNA sense strand
auucagaguuuuaaggaca

SEQ ID NO: 2287692 - RNA, 19 nt, Homo sapiens
  misc_RNA (1)...(19): siRNA sense strand
gguugcagacaguuuguua

SEQ ID NO: 2287693 - RNA, 19 nt, Homo sapiens
  misc_RNA (1)...(19): siRNA sense strand
cguugagugaagcuggaaa

SEQ ID NO: 2287694 - RNA, 19 nt, Homo sapiens
  misc_RNA (1)...(19): siRNA sense strand
aaguaaagcccaagauggu

SEQ ID NO: 2287695 - RNA, 19 nt, Homo sapiens
  misc_RNA (1)...(19): siRNA sense strand
caaucaacaagaagaaacu

SEQ ID NO: 2287696 - RNA, 19 nt, Homo sapiens
  misc_RNA (1)...(19): siRNA sense strand
cccugaagaccuuguggaa

SEQ ID NO: 2287697 - RNA, 19 nt, Homo sapiens
  misc_RNA (1)...(19): siRNA sense strand
uuguggaaguaaagcccaa

SEQ ID NO: 2287698 - RNA, 19 nt, Homo sapiens
  misc_RNA (1)...(19): siRNA sense strand
cuucagaguuguccagcga

SEQ ID NO: 2287699 - RNA, 19 nt, Homo sapiens
  misc_RNA (1)...(19): siRNA sense strand
cugcaagaugcccugguaa

SEQ ID NO: 2287700 - RNA, 19 nt, Homo sapiens
  misc_RNA (1)...(19): siRNA sense strand
uggugagacuuuggaggaa

SEQ ID NO: 2287701 - RNA, 19 nt, Homo sapiens
  misc_RNA (1)...(19): siRNA sense strand
gcuuagaugggcaaacuuu

SEQ ID NO: 2287702 - RNA, 19 nt, Homo sapiens
  misc_RNA (1)...(19): siRNA sense strand
guugagugaagcuggaaaa

SEQ ID NO: 2287703 - RNA, 19 nt, Homo sapiens
  misc_RNA (1)...(19): siRNA sense strand
acaggaauaaagaugggaa

SEQ ID NO: 2287704 - RNA, 19 nt, Homo sapiens
  misc_RNA (1)...(19): siRNA sense strand
gaaagaagguauuugugcu

SEQ ID NO: 2287705 - RNA, 19 nt, Homo sapiens
  misc_RNA (1)...(19): siRNA sense strand
caaucaaaucgcaccaaaa

SEQ ID NO: 2287706 - RNA, 19 nt, Homo sapiens
  misc_RNA (1)...(19): siRNA sense strand
gaaauaaaaucuagggauc

SEQ ID NO: 2287707 - RNA, 19 nt, Homo sapiens
  misc_RNA (1)...(19): siRNA sense strand
ccuccaaagcagcaaccaa

SEQ ID NO: 2287708 - RNA, 19 nt, Homo sapiens
  misc_RNA (1)...(19): siRNA sense strand
augcagagaauguggauac

SEQ ID NO: 2287709 - RNA, 19 nt, Homo sapiens
  misc_RNA (1)...(19): siRNA sense strand
aggaaagacaacagacaaa

SEQ ID NO: 2287710 - RNA, 19 nt, Homo sapiens
  misc_RNA (1)...(19): siRNA sense strand
aaugaugggagaagauaaa

SEQ ID NO: 2287711 - RNA, 19 nt, Homo sapiens
  misc_RNA (1)...(19): siRNA sense strand
gugaaggaugcaaggguuu

SEQ ID NO: 2287712 - RNA, 19 nt, Homo sapiens
  misc_RNA (1)...(19): siRNA sense strand
gcaggagaucacagaguau

SEQ ID NO: 2287713 - RNA, 19 nt, Homo sapiens
  misc_RNA (1)...(19): siRNA sense strand
aggagaagcuguuggcgga

SEQ ID NO: 2287714 - RNA, 19 nt, Homo sapiens
  misc_RNA (1)...(19): siRNA sense strand
ccucacagcuguuugccaa

SEQ ID NO: 2287715 - RNA, 19 nt, Homo sapiens
  misc_RNA (1)...(19): siRNA sense strand
uaaugaugggagaagauaa

SEQ ID NO: 2287716 - RNA, 19 nt, Homo sapiens
  misc_RNA (1)...(19): siRNA sense strand
ccacaggccgagaaggaga

SEQ ID NO: 2287717 - RNA, 19 nt, Homo sapiens
  misc_RNA (1)...(19): siRNA sense strand
cuuaaugaugggagaagau

SEQ ID NO: 2287718 - RNA, 19 nt, Homo sapiens
  misc_RNA (1)...(19): siRNA sense strand
aagaagacggagacagaca

SEQ ID NO: 2287719 - RNA, 19 nt, Homo sapiens
  misc_RNA (1)...(19): siRNA sense strand
ucgugucuguggagauaaa

SEQ ID NO: 2287720 - RNA, 19 nt, Homo sapiens
  misc_RNA (1)...(19): siRNA sense strand
aguucaaugcacuggaauu

SEQ ID NO: 2287721 - RNA, 19 nt, Homo sapiens
  misc_RNA (1)...(19): siRNA sense strand
ccgagaaggagaagcuguu

SEQ ID NO: 2287722 - RNA, 19 nt, Homo sapiens
  misc_RNA (1)...(19): siRNA sense strand
uggaauuagaugacagcga

SEQ ID NO: 2287723 - RNA, 19 nt, Homo sapiens
  misc_RNA (1)...(19): siRNA sense strand
agggcgaucuugacaggaa

SEQ ID NO: 2287724 - RNA, 19 nt, Homo sapiens
  misc_RNA (1)...(19): siRNA sense strand
ccuuaaugaugggagaaga

SEQ ID NO: 2287725 - RNA, 19 nt, Homo sapiens
  misc_RNA (1)...(19): siRNA sense strand
aaagcaaaggcgagggcga

SEQ ID NO: 2287726 - RNA, 19 nt, Homo sapiens
  misc_RNA (1)...(19): siRNA sense strand
uucuaaagagccugcgaaa

SEQ ID NO: 2287727 - RNA, 19 nt, Homo sapiens
  misc_RNA (1)...(19): siRNA sense strand
acaggaaagacaacagaca

SEQ ID NO: 2287728 - RNA, 19 nt, Homo sapiens
  misc_RNA (1)...(19): siRNA sense strand
gggccaaggcuucaugaca

SEQ ID NO: 2287729 - RNA, 19 nt, Homo sapiens
  misc_RNA (1)...(19): siRNA sense strand
gugacuuuauggagcccaa

SEQ ID NO: 2287730 - RNA, 19 nt, Homo sapiens
  misc_RNA (1)...(19): siRNA sense strand
gugaucaagaagacggaga

SEQ ID NO: 2287731 - RNA, 19 nt, Homo sapiens
  misc_RNA (1)...(19): siRNA sense strand
agagcaaagagguggccau

SEQ ID NO: 2287732 - RNA, 19 nt, Homo sapiens
  misc_RNA (1)...(19): siRNA sense strand
cuucaugacaagggaguuu

SEQ ID NO: 2287733 - RNA, 19 nt, Homo sapiens
  misc_RNA (1)...(19): siRNA sense strand
caggagaucuacaaggacu

SEQ ID NO: 2287734 - RNA, 19 nt, Homo sapiens
  misc_RNA (1)...(19): siRNA sense strand
ccaagcugcuccagaaaau

SEQ ID NO: 2287735 - RNA, 19 nt, Homo sapiens
  misc_RNA (1)...(19): siRNA sense strand
gggaguuucuaaagagccu

SEQ ID NO: 2287736 - RNA, 19 nt, Homo sapiens
  misc_RNA (1)...(19): siRNA sense strand
ugugaaggaugcaaggguu

SEQ ID NO: 2287737 - RNA, 19 nt, Homo sapiens
  misc_RNA (1)...(19): siRNA sense strand
auuccuuaaugaugggaga

SEQ ID NO: 2287738 - RNA, 19 nt, Homo sapiens
  misc_RNA (1)...(19): siRNA sense strand
aggaaagacaacagacaaa

SEQ ID NO: 2287739 - RNA, 19 nt, Homo sapiens
  misc_RNA (1)...(19): siRNA sense strand
aaugaugggagaagauaaa

SEQ ID NO: 2287740 - RNA, 19 nt, Homo sapiens
  misc_RNA (1)...(19): siRNA sense strand
gugaaggaugcaaggguuu

SEQ ID NO: 2287741 - RNA, 19 nt, Homo sapiens
  misc_RNA (1)...(19): siRNA sense strand
gcaggagaucacagaguau

SEQ ID NO: 2287742 - RNA, 19 nt, Homo sapiens
  misc_RNA (1)...(19): siRNA sense strand
aggagaagcuguuggcgga

SEQ ID NO: 2287743 - RNA, 19 nt, Homo sapiens
  misc_RNA (1)...(19): siRNA sense strand
ccucacagcuguuugccaa

SEQ ID NO: 2287744 - RNA, 19 nt, Homo sapiens
  misc_RNA (1)...(19): siRNA sense strand
uaaugaugggagaagauaa

SEQ ID NO: 2287745 - RNA, 19 nt, Homo sapiens
  misc_RNA (1)...(19): siRNA sense strand
ccacaggccgagaaggaga

SEQ ID NO: 2287746 - RNA, 19 nt, Homo sapiens
  misc_RNA (1)...(19): siRNA sense strand
cuuaaugaugggagaagau

SEQ ID NO: 2287747 - RNA, 19 nt, Homo sapiens
  misc_RNA (1)...(19): siRNA sense strand
aagaagacggagacagaca

SEQ ID NO: 2287748 - RNA, 19 nt, Homo sapiens
  misc_RNA (1)...(19): siRNA sense strand
ucgugucuguggagauaaa

SEQ ID NO: 2287749 - RNA, 19 nt, Homo sapiens
  misc_RNA (1)...(19): siRNA sense strand
aguucaaugcacuggaauu

SEQ ID NO: 2287750 - RNA, 19 nt, Homo sapiens
  misc_RNA (1)...(19): siRNA sense strand
ccgagaaggagaagcuguu

SEQ ID NO: 2287751 - RNA, 19 nt, Homo sapiens
  misc_RNA (1)...(19): siRNA sense strand
uggaauuagaugacagcga

SEQ ID NO: 2287752 - RNA, 19 nt, Homo sapiens
  misc_RNA (1)...(19): siRNA sense strand
agggcgaucuugacaggaa

SEQ ID NO: 2287753 - RNA, 19 nt, Homo sapiens
  misc_RNA (1)...(19): siRNA sense strand
ccuuaaugaugggagaaga

SEQ ID NO: 2287754 - RNA, 19 nt, Homo sapiens
  misc_RNA (1)...(19): siRNA sense strand
aaagcaaaggcgagggcga

SEQ ID NO: 2287755 - RNA, 19 nt, Homo sapiens
  misc_RNA (1)...(19): siRNA sense strand
uucuaaagagccugcgaaa

SEQ ID NO: 2287756 - RNA, 19 nt, Homo sapiens
  misc_RNA (1)...(19): siRNA sense strand
acaggaaagacaacagaca

SEQ ID NO: 2287757 - RNA, 19 nt, Homo sapiens
  misc_RNA (1)...(19): siRNA sense strand
gggccaaggcuucaugaca

SEQ ID NO: 2287758 - RNA, 19 nt, Homo sapiens
  misc_RNA (1)...(19): siRNA sense strand
gugacuuuauggagcccaa

SEQ ID NO: 2287759 - RNA, 19 nt, Homo sapiens
  misc_RNA (1)...(19): siRNA sense strand
gugaucaagaagacggaga

SEQ ID NO: 2287760 - RNA, 19 nt, Homo sapiens
  misc_RNA (1)...(19): siRNA sense strand
agagcaaagagguggccau

SEQ ID NO: 2287761 - RNA, 19 nt, Homo sapiens
  misc_RNA (1)...(19): siRNA sense strand
cuucaugacaagggaguuu

SEQ ID NO: 2287762 - RNA, 19 nt, Homo sapiens
  misc_RNA (1)...(19): siRNA sense strand
caggagaucuacaaggacu

SEQ ID NO: 2287763 - RNA, 19 nt, Homo sapiens
  misc_RNA (1)...(19): siRNA sense strand
ccaagcugcuccagaaaau

SEQ ID NO: 2287764 - RNA, 19 nt, Homo sapiens
  misc_RNA (1)...(19): siRNA sense strand
gggaguuucuaaagagccu

SEQ ID NO: 2287765 - RNA, 19 nt, Homo sapiens
  misc_RNA (1)...(19): siRNA sense strand
ugugaaggaugcaaggguu

SEQ ID NO: 2287766 - RNA, 19 nt, Homo sapiens
  misc_RNA (1)...(19): siRNA sense strand
auuccuuaaugaugggaga

SEQ ID NO: 2287767 - RNA, 19 nt, Homo sapiens
  misc_RNA (1)...(19): siRNA sense strand
aggaaagacaacagacaaa

SEQ ID NO: 2287768 - RNA, 19 nt, Homo sapiens
  misc_RNA (1)...(19): siRNA sense strand
aaugaugggagaagauaaa

SEQ ID NO: 2287769 - RNA, 19 nt, Homo sapiens
  misc_RNA (1)...(19): siRNA sense strand
gugaaggaugcaaggguuu

SEQ ID NO: 2287770 - RNA, 19 nt, Homo sapiens
  misc_RNA (1)...(19): siRNA sense strand
gcaggagaucacagaguau

SEQ ID NO: 2287771 - RNA, 19 nt, Homo sapiens
  misc_RNA (1)...(19): siRNA sense strand
aggagaagcuguuggcgga

SEQ ID NO: 2287772 - RNA, 19 nt, Homo sapiens
  misc_RNA (1)...(19): siRNA sense strand
ccucacagcuguuugccaa

SEQ ID NO: 2287773 - RNA, 19 nt, Homo sapiens
  misc_RNA (1)...(19): siRNA sense strand
uaaugaugggagaagauaa

SEQ ID NO: 2287774 - RNA, 19 nt, Homo sapiens
  misc_RNA (1)...(19): siRNA sense strand
ccacaggccgagaaggaga

SEQ ID NO: 2287775 - RNA, 19 nt, Homo sapiens
  misc_RNA (1)...(19): siRNA sense strand
cuuaaugaugggagaagau

SEQ ID NO: 2287776 - RNA, 19 nt, Homo sapiens
  misc_RNA (1)...(19): siRNA sense strand
aagaagacggagacagaca

SEQ ID NO: 2287777 - RNA, 19 nt, Homo sapiens
  misc_RNA (1)...(19): siRNA sense strand
ucgugucuguggagauaaa

SEQ ID NO: 2287778 - RNA, 19 nt, Homo sapiens
  misc_RNA (1)...(19): siRNA sense strand
aguucaaugcacuggaauu

SEQ ID NO: 2287779 - RNA, 19 nt, Homo sapiens
  misc_RNA (1)...(19): siRNA sense strand
ccgagaaggagaagcuguu

SEQ ID NO: 2287780 - RNA, 19 nt, Homo sapiens
  misc_RNA (1)...(19): siRNA sense strand
uggaauuagaugacagcga

SEQ ID NO: 2287781 - RNA, 19 nt, Homo sapiens
  misc_RNA (1)...(19): siRNA sense strand
agggcgaucuugacaggaa

SEQ ID NO: 2287782 - RNA, 19 nt, Homo sapiens
  misc_RNA (1)...(19): siRNA sense strand
ccuuaaugaugggagaaga

SEQ ID NO: 2287783 - RNA, 19 nt, Homo sapiens
  misc_RNA (1)...(19): siRNA sense strand
aaagcaaaggcgagggcga

SEQ ID NO: 2287784 - RNA, 19 nt, Homo sapiens
  misc_RNA (1)...(19): siRNA sense strand
uucuaaagagccugcgaaa

SEQ ID NO: 2287785 - RNA, 19 nt, Homo sapiens
  misc_RNA (1)...(19): siRNA sense strand
acaggaaagacaacagaca

SEQ ID NO: 2287786 - RNA, 19 nt, Homo sapiens
  misc_RNA (1)...(19): siRNA sense strand
gggccaaggcuucaugaca

SEQ ID NO: 2287787 - RNA, 19 nt, Homo sapiens
  misc_RNA (1)...(19): siRNA sense strand
gugacuuuauggagcccaa

SEQ ID NO: 2287788 - RNA, 19 nt, Homo sapiens
  misc_RNA (1)...(19): siRNA sense strand
gugaucaagaagacggaga

SEQ ID NO: 2287789 - RNA, 19 nt, Homo sapiens
  misc_RNA (1)...(19): siRNA sense strand
agagcaaagagguggccau

SEQ ID NO: 2287790 - RNA, 19 nt, Homo sapiens
  misc_RNA (1)...(19): siRNA sense strand
cuucaugacaagggaguuu

SEQ ID NO: 2287791 - RNA, 19 nt, Homo sapiens
  misc_RNA (1)...(19): siRNA sense strand
caggagaucuacaaggacu

SEQ ID NO: 2287792 - RNA, 19 nt, Homo sapiens
  misc_RNA (1)...(19): siRNA sense strand
ccaagcugcuccagaaaau

SEQ ID NO: 2287793 - RNA, 19 nt, Homo sapiens
  misc_RNA (1)...(19): siRNA sense strand
gggaguuucuaaagagccu

SEQ ID NO: 2287794 - RNA, 19 nt, Homo sapiens
  misc_RNA (1)...(19): siRNA sense strand
ugugaaggaugcaaggguu

SEQ ID NO: 2287795 - RNA, 19 nt, Homo sapiens
  misc_RNA (1)...(19): siRNA sense strand
auuccuuaaugaugggaga

SEQ ID NO: 2287796 - RNA, 19 nt, Homo sapiens
  misc_RNA (1)...(19): siRNA sense strand
aggaaagacaacagacaaa

SEQ ID NO: 2287797 - RNA, 19 nt, Homo sapiens
  misc_RNA (1)...(19): siRNA sense strand
aaugaugggagaagauaaa

SEQ ID NO: 2287798 - RNA, 19 nt, Homo sapiens
  misc_RNA (1)...(19): siRNA sense strand
gugaaggaugcaaggguuu

SEQ ID NO: 2287799 - RNA, 19 nt, Homo sapiens
  misc_RNA (1)...(19): siRNA sense strand
gcaggagaucacagaguau

SEQ ID NO: 2287800 - RNA, 19 nt, Homo sapiens
  misc_RNA (1)...(19): siRNA sense strand
aggagaagcuguuggcgga

SEQ ID NO: 2287801 - RNA, 19 nt, Homo sapiens
  misc_RNA (1)...(19): siRNA sense strand
ccucacagcuguuugccaa

SEQ ID NO: 2287802 - RNA, 19 nt, Homo sapiens
  misc_RNA (1)...(19): siRNA sense strand
uaaugaugggagaagauaa

SEQ ID NO: 2287803 - RNA, 19 nt, Homo sapiens
  misc_RNA (1)...(19): siRNA sense strand
ccacaggccgagaaggaga

SEQ ID NO: 2287804 - RNA, 19 nt, Homo sapiens
  misc_RNA (1)...(19): siRNA sense strand
cuuaaugaugggagaagau

SEQ ID NO: 2287805 - RNA, 19 nt, Homo sapiens
  misc_RNA (1)...(19): siRNA sense strand
aagaagacggagacagaca

SEQ ID NO: 2287806 - RNA, 19 nt, Homo sapiens
  misc_RNA (1)...(19): siRNA sense strand
ucgugucuguggagauaaa

SEQ ID NO: 2287807 - RNA, 19 nt, Homo sapiens
  misc_RNA (1)...(19): siRNA sense strand
aguucaaugcacuggaauu

SEQ ID NO: 2287808 - RNA, 19 nt, Homo sapiens
  misc_RNA (1)...(19): siRNA sense strand
ccgagaaggagaagcuguu

SEQ ID NO: 2287809 - RNA, 19 nt, Homo sapiens
  misc_RNA (1)...(19): siRNA sense strand
uggaauuagaugacagcga

SEQ ID NO: 2287810 - RNA, 19 nt, Homo sapiens
  misc_RNA (1)...(19): siRNA sense strand
agggcgaucuugacaggaa

SEQ ID NO: 2287811 - RNA, 19 nt, Homo sapiens
  misc_RNA (1)...(19): siRNA sense strand
ccuuaaugaugggagaaga

SEQ ID NO: 2287812 - RNA, 19 nt, Homo sapiens
  misc_RNA (1)...(19): siRNA sense strand
aaagcaaaggcgagggcga

SEQ ID NO: 2287813 - RNA, 19 nt, Homo sapiens
  misc_RNA (1)...(19): siRNA sense strand
uucuaaagagccugcgaaa

SEQ ID NO: 2287814 - RNA, 19 nt, Homo sapiens
  misc_RNA (1)...(19): siRNA sense strand
acaggaaagacaacagaca

SEQ ID NO: 2287815 - RNA, 19 nt, Homo sapiens
  misc_RNA (1)...(19): siRNA sense strand
gggccaaggcuucaugaca

SEQ ID NO: 2287816 - RNA, 19 nt, Homo sapiens
  misc_RNA (1)...(19): siRNA sense strand
gugacuuuauggagcccaa

SEQ ID NO: 2287817 - RNA, 19 nt, Homo sapiens
  misc_RNA (1)...(19): siRNA sense strand
gugaucaagaagacggaga

SEQ ID NO: 2287818 - RNA, 19 nt, Homo sapiens
  misc_RNA (1)...(19): siRNA sense strand
agagcaaagagguggccau

SEQ ID NO: 2287819 - RNA, 19 nt, Homo sapiens
  misc_RNA (1)...(19): siRNA sense strand
cuucaugacaagggaguuu

SEQ ID NO: 2287820 - RNA, 19 nt, Homo sapiens
  misc_RNA (1)...(19): siRNA sense strand
caggagaucuacaaggacu

SEQ ID NO: 2287821 - RNA, 19 nt, Homo sapiens
  misc_RNA (1)...(19): siRNA sense strand
ccaagcugcuccagaaaau

SEQ ID NO: 2287822 - RNA, 19 nt, Homo sapiens
  misc_RNA (1)...(19): siRNA sense strand
gggaguuucuaaagagccu

SEQ ID NO: 2287823 - RNA, 19 nt, Homo sapiens
  misc_RNA (1)...(19): siRNA sense strand
ugugaaggaugcaaggguu

SEQ ID NO: 2287824 - RNA, 19 nt, Homo sapiens
  misc_RNA (1)...(19): siRNA sense strand
auuccuuaaugaugggaga

SEQ ID NO: 2287825 - RNA, 19 nt, Homo sapiens
  misc_RNA (1)...(19): siRNA sense strand
agauaaaggaagaggagaa

SEQ ID NO: 2287826 - RNA, 19 nt, Homo sapiens
  misc_RNA (1)...(19): siRNA sense strand
gaagaggagaagaggguca

SEQ ID NO: 2287827 - RNA, 19 nt, Homo sapiens
  misc_RNA (1)...(19): siRNA sense strand
caacaucucucaaggccaa

SEQ ID NO: 2287828 - RNA, 19 nt, Homo sapiens
  misc_RNA (1)...(19): siRNA sense strand
cacuggaugaugugagaaa

SEQ ID NO: 2287829 - RNA, 19 nt, Homo sapiens
  misc_RNA (1)...(19): siRNA sense strand
acagaaagguggagcagcu

SEQ ID NO: 2287830 - RNA, 19 nt, Homo sapiens
  misc_RNA (1)...(19): siRNA sense strand
ggcacaauaacguggagaa

SEQ ID NO: 2287831 - RNA, 19 nt, Homo sapiens
  misc_RNA (1)...(19): siRNA sense strand
gcaucaaaacugcgaggaa

SEQ ID NO: 2287832 - RNA, 19 nt, Homo sapiens
  misc_RNA (1)...(19): siRNA sense strand
cgucgagagcacuggauga

SEQ ID NO: 2287833 - RNA, 19 nt, Homo sapiens
  misc_RNA (1)...(19): siRNA sense strand
agaagaagagugagaucca

SEQ ID NO: 2287834 - RNA, 19 nt, Homo sapiens
  misc_RNA (1)...(19): siRNA sense strand
aggaagaggagaagagggu

SEQ ID NO: 2287835 - RNA, 19 nt, Homo sapiens
  misc_RNA (1)...(19): siRNA sense strand
cuggaugaugugagaaaca

SEQ ID NO: 2287836 - RNA, 19 nt, Homo sapiens
  misc_RNA (1)...(19): siRNA sense strand
ggaagauaaaggaagagga

SEQ ID NO: 2287837 - RNA, 19 nt, Homo sapiens
  misc_RNA (1)...(19): siRNA sense strand
ccaaagaggaaaagaaauc

SEQ ID NO: 2287838 - RNA, 19 nt, Homo sapiens
  misc_RNA (1)...(19): siRNA sense strand
gggagguggagcugcagaa

SEQ ID NO: 2287839 - RNA, 19 nt, Homo sapiens
  misc_RNA (1)...(19): siRNA sense strand
gaacugaaccacaagcuga

SEQ ID NO: 2287840 - RNA, 19 nt, Homo sapiens
  misc_RNA (1)...(19): siRNA sense strand
acaauaacguggagaaaac

SEQ ID NO: 2287841 - RNA, 19 nt, Homo sapiens
  misc_RNA (1)...(19): siRNA sense strand
gugaagacgugcuuggugu

SEQ ID NO: 2287842 - RNA, 19 nt, Homo sapiens
  misc_RNA (1)...(19): siRNA sense strand
ccucgacaaggaagauaaa

SEQ ID NO: 2287843 - RNA, 19 nt, Homo sapiens
  misc_RNA (1)...(19): siRNA sense strand
gagauugaacagagccuga

SEQ ID NO: 2287844 - RNA, 19 nt, Homo sapiens
  misc_RNA (1)...(19): siRNA sense strand
gaacaacuucuguggggua

SEQ ID NO: 2287845 - RNA, 19 nt, Homo sapiens
  misc_RNA (1)...(19): siRNA sense strand
cagcaggaugugcggauga

SEQ ID NO: 2287846 - RNA, 19 nt, Homo sapiens
  misc_RNA (1)...(19): siRNA sense strand
aggugacccuggagagcau

SEQ ID NO: 2287847 - RNA, 19 nt, Homo sapiens
  misc_RNA (1)...(19): siRNA sense strand
caaacagaaagguggagca

SEQ ID NO: 2287848 - RNA, 19 nt, Homo sapiens
  misc_RNA (1)...(19): siRNA sense strand
ccaagagggaugaguucga

SEQ ID NO: 2287849 - RNA, 19 nt, Homo sapiens
  misc_RNA (1)...(19): siRNA sense strand
cuccaaagaggaaaagaaa

SEQ ID NO: 2287850 - RNA, 19 nt, Homo sapiens
  misc_RNA (1)...(19): siRNA sense strand
cacaaucggcugcgggaau

SEQ ID NO: 2287851 - RNA, 19 nt, Homo sapiens
  misc_RNA (1)...(19): siRNA sense strand
aacaagaauacacggaaau

SEQ ID NO: 2287852 - RNA, 19 nt, Homo sapiens
  misc_RNA (1)...(19): siRNA sense strand
gagaagagggucaacagca

SEQ ID NO: 2287853 - RNA, 19 nt, Homo sapiens
  misc_RNA (1)...(19): siRNA sense strand
gggucgugccugaaugaga

SEQ ID NO: 2287854 - RNA, 19 nt, Homo sapiens
  misc_RNA (1)...(19): siRNA sense strand
acacggaaaugaaggcucu

SEQ ID NO: 2287855 - RNA, 19 nt, Homo sapiens
  misc_RNA (1)...(19): siRNA sense strand
aggaaaagaaauccaagaa

SEQ ID NO: 2287856 - RNA, 19 nt, Homo sapiens
  misc_RNA (1)...(19): siRNA sense strand
ugacaaagcuucagggaca

SEQ ID NO: 2287857 - RNA, 19 nt, Homo sapiens
  misc_RNA (1)...(19): siRNA sense strand
ugguaaaugugcaggaauu

SEQ ID NO: 2287858 - RNA, 19 nt, Homo sapiens
  misc_RNA (1)...(19): siRNA sense strand
cagaaaucacccaggauaa

SEQ ID NO: 2287859 - RNA, 19 nt, Homo sapiens
  misc_RNA (1)...(19): siRNA sense strand
auacaaaccaaguggaaau

SEQ ID NO: 2287860 - RNA, 19 nt, Homo sapiens
  misc_RNA (1)...(19): siRNA sense strand
caacagaggaagaggcuga

SEQ ID NO: 2287861 - RNA, 19 nt, Homo sapiens
  misc_RNA (1)...(19): siRNA sense strand
cgcuaaagaaggugagaau

SEQ ID NO: 2287862 - RNA, 19 nt, Homo sapiens
  misc_RNA (1)...(19): siRNA sense strand
ugaggaagccagagaacaa

SEQ ID NO: 2287863 - RNA, 19 nt, Homo sapiens
  misc_RNA (1)...(19): siRNA sense strand
gaucagauuaauugggaau

SEQ ID NO: 2287864 - RNA, 19 nt, Homo sapiens
  misc_RNA (1)...(19): siRNA sense strand
caacuuuacuugagggcuu

SEQ ID NO: 2287865 - RNA, 19 nt, Homo sapiens
  misc_RNA (1)...(19): siRNA sense strand
gcccaaaguaccagccaaa

SEQ ID NO: 2287866 - RNA, 19 nt, Homo sapiens
  misc_RNA (1)...(19): siRNA sense strand
cauuagaaggagagcgaca

SEQ ID NO: 2287867 - RNA, 19 nt, Homo sapiens
  misc_RNA (1)...(19): siRNA sense strand
agaaaagcacccagagaua

SEQ ID NO: 2287868 - RNA, 19 nt, Homo sapiens
  misc_RNA (1)...(19): siRNA sense strand
cuaaagaaggugagaaucu

SEQ ID NO: 2287869 - RNA, 19 nt, Homo sapiens
  misc_RNA (1)...(19): siRNA sense strand
ccucaaugguacagaaauc

SEQ ID NO: 2287870 - RNA, 19 nt, Homo sapiens
  misc_RNA (1)...(19): siRNA sense strand
aaauaaacccggagaugau

SEQ ID NO: 2287871 - RNA, 19 nt, Homo sapiens
  misc_RNA (1)...(19): siRNA sense strand
cagagauauuugugaacuu

SEQ ID NO: 2287872 - RNA, 19 nt, Homo sapiens
  misc_RNA (1)...(19): siRNA sense strand
gguuuugggucuaguaaua

SEQ ID NO: 2287873 - RNA, 19 nt, Homo sapiens
  misc_RNA (1)...(19): siRNA sense strand
ggucagcagcucaggguuu

SEQ ID NO: 2287874 - RNA, 19 nt, Homo sapiens
  misc_RNA (1)...(19): siRNA sense strand
aggaguuggaagaguuaaa

SEQ ID NO: 2287875 - RNA, 19 nt, Homo sapiens
  misc_RNA (1)...(19): siRNA sense strand
ucgacaaagugaucagauu

SEQ ID NO: 2287876 - RNA, 19 nt, Homo sapiens
  misc_RNA (1)...(19): siRNA sense strand
gggaaaucaucaaccaaca

SEQ ID NO: 2287877 - RNA, 19 nt, Homo sapiens
  misc_RNA (1)...(19): siRNA sense strand
gaggcaaaguguucggaga

SEQ ID NO: 2287878 - RNA, 19 nt, Homo sapiens
  misc_RNA (1)...(19): siRNA sense strand
ccauagaaucucacaccaa

SEQ ID NO: 2287879 - RNA, 19 nt, Homo sapiens
  misc_RNA (1)...(19): siRNA sense strand
guaaagaugacgaggcagu

SEQ ID NO: 2287880 - RNA, 19 nt, Homo sapiens
  misc_RNA (1)...(19): siRNA sense strand
aaaugaggcuaaacagcaa

SEQ ID NO: 2287881 - RNA, 19 nt, Homo sapiens
  misc_RNA (1)...(19): siRNA sense strand
gggaguugucguagacuau

SEQ ID NO: 2287882 - RNA, 19 nt, Homo sapiens
  misc_RNA (1)...(19): siRNA sense strand
cuguaaagaugacgaggca

SEQ ID NO: 2287883 - RNA, 19 nt, Homo sapiens
  misc_RNA (1)...(19): siRNA sense strand
cggagaugaucccaacaaa

SEQ ID NO: 2287884 - RNA, 19 nt, Homo sapiens
  misc_RNA (1)...(19): siRNA sense strand
caugauguccagugaauau

SEQ ID NO: 2287885 - RNA, 19 nt, Homo sapiens
  misc_RNA (1)...(19): siRNA sense strand
cuacaaaaccaaccaauaa

SEQ ID NO: 2287886 - RNA, 19 nt, Homo sapiens
  misc_RNA (1)...(19): siRNA sense strand
ggauucuagucgagcugaa

SEQ ID NO: 2287887 - RNA, 19 nt, Homo sapiens
  misc_RNA (1)...(19): siRNA sense strand
cuauacaaaccaaguggaa

SEQ ID NO: 2287888 - RNA, 19 nt, Homo sapiens
  misc_RNA (1)...(19): siRNA sense strand
caucaaaacaccagagcga

SEQ ID NO: 2287889 - RNA, 19 nt, Homo sapiens
  misc_RNA (1)...(19): siRNA sense strand
gagcgggagaugaaggauu

SEQ ID NO: 2287890 - RNA, 19 nt, Homo sapiens
  misc_RNA (1)...(19): siRNA sense strand
ucaucaaccaacagaggaa

SEQ ID NO: 2287891 - RNA, 19 nt, Homo sapiens
  misc_RNA (1)...(19): siRNA sense strand
cuguaaacacuuugacuga

SEQ ID NO: 2287892 - RNA, 19 nt, Homo sapiens
  misc_RNA (1)...(19): siRNA sense strand
uggcuuuaauuuugggaua

SEQ ID NO: 2287893 - RNA, 19 nt, Homo sapiens
  misc_RNA (1)...(19): siRNA sense strand
ggguuaagucucucaucaa

SEQ ID NO: 2287894 - RNA, 19 nt, Homo sapiens
  misc_RNA (1)...(19): siRNA sense strand
ggagauauaaguagccuga

SEQ ID NO: 2287895 - RNA, 19 nt, Homo sapiens
  misc_RNA (1)...(19): siRNA sense strand
gggaucagcaucuggaaca

SEQ ID NO: 2287896 - RNA, 19 nt, Homo sapiens
  misc_RNA (1)...(19): siRNA sense strand
cggagagacagcaucauua

SEQ ID NO: 2287897 - RNA, 19 nt, Homo sapiens
  misc_RNA (1)...(19): siRNA sense strand
acggaaacagugaaaguau

SEQ ID NO: 2287898 - RNA, 19 nt, Homo sapiens
  misc_RNA (1)...(19): siRNA sense strand
caauaaggcuucauccaca

SEQ ID NO: 2287899 - RNA, 19 nt, Homo sapiens
  misc_RNA (1)...(19): siRNA sense strand
uugauaaaguccaaggcuu

SEQ ID NO: 2287900 - RNA, 19 nt, Homo sapiens
  misc_RNA (1)...(19): siRNA sense strand
acaccaaauccuugcccaa

SEQ ID NO: 2287901 - RNA, 19 nt, Homo sapiens
  misc_RNA (1)...(19): siRNA sense strand
guggaaagauucagauccu

SEQ ID NO: 2287902 - RNA, 19 nt, Homo sapiens
  misc_RNA (1)...(19): siRNA sense strand
ggagaugaucccaacaaaa

SEQ ID NO: 2287903 - RNA, 19 nt, Homo sapiens
  misc_RNA (1)...(19): siRNA sense strand
auuaugaagacuuggauga

SEQ ID NO: 2287904 - RNA, 19 nt, Homo sapiens
  misc_RNA (1)...(19): siRNA sense strand
gcagaaacccacuggcacu

SEQ ID NO: 2287905 - RNA, 19 nt, Homo sapiens
  misc_RNA (1)...(19): siRNA sense strand
cuugcuaguuccuaugaaa

SEQ ID NO: 2287906 - RNA, 19 nt, Homo sapiens
  misc_RNA (1)...(19): siRNA sense strand
ggaucagcaucuggaacaa

SEQ ID NO: 2287907 - RNA, 19 nt, Homo sapiens
  misc_RNA (1)...(19): siRNA sense strand
agugaaaguaugugcaacu

SEQ ID NO: 2287908 - RNA, 19 nt, Homo sapiens
  misc_RNA (1)...(19): siRNA sense strand
gcagcugcacggagagaca

SEQ ID NO: 2287909 - RNA, 19 nt, Homo sapiens
  misc_RNA (1)...(19): siRNA sense strand
ugggaguugucguagacua

SEQ ID NO: 2287910 - RNA, 19 nt, Homo sapiens
  misc_RNA (1)...(19): siRNA sense strand
aaucaaaauccugggguua

SEQ ID NO: 2287911 - RNA, 19 nt, Homo sapiens
  misc_RNA (1)...(19): siRNA sense strand
agaugaagaugcugcgaac

SEQ ID NO: 2287912 - RNA, 19 nt, Homo sapiens
  misc_RNA (1)...(19): siRNA sense strand
auaaguagccugaaaacaa

SEQ ID NO: 2287913 - RNA, 19 nt, Homo sapiens
  misc_RNA (1)...(19): siRNA sense strand
ugugaaauuugcuguccaa

SEQ ID NO: 2287914 - RNA, 19 nt, Homo sapiens
  misc_RNA (1)...(19): siRNA sense strand
cuggaaagccugugcaaug

SEQ ID NO: 2287915 - RNA, 19 nt, Homo sapiens
  misc_RNA (1)...(19): siRNA sense strand
gcagcagacugguagcaca

SEQ ID NO: 2287916 - RNA, 19 nt, Homo sapiens
  misc_RNA (1)...(19): siRNA sense strand
gcacaggaggguucagcuu

SEQ ID NO: 2287917 - RNA, 19 nt, Homo sapiens
  misc_RNA (1)...(19): siRNA sense strand
gcacuucugaggagaugaa

SEQ ID NO: 2287918 - RNA, 19 nt, Homo sapiens
  misc_RNA (1)...(19): siRNA sense strand
cgugaaacauggugcaccu

SEQ ID NO: 2287919 - RNA, 19 nt, Homo sapiens
  misc_RNA (1)...(19): siRNA sense strand
guggaauagucuuuggcca

SEQ ID NO: 2287920 - RNA, 19 nt, Homo sapiens
  misc_RNA (1)...(19): siRNA sense strand
acaaauauggucuggucuu

SEQ ID NO: 2287921 - RNA, 19 nt, Homo sapiens
  misc_RNA (1)...(19): siRNA sense strand
ccaugggaguugucguaga

SEQ ID NO: 2287922 - RNA, 19 nt, Homo sapiens
  misc_RNA (1)...(19): siRNA sense strand
gcaucuggaacaaaagaaa

SEQ ID NO: 2287923 - RNA, 19 nt, Homo sapiens
  misc_RNA (1)...(19): siRNA sense strand
caucaguuuuggugggaca

SEQ ID NO: 2287924 - RNA, 19 nt, Homo sapiens
  misc_RNA (1)...(19): siRNA sense strand
gcgcuaaagaaggugagaa

SEQ ID NO: 2287925 - RNA, 19 nt, Homo sapiens
  misc_RNA (1)...(19): siRNA sense strand
aauaauacauacuggggua

SEQ ID NO: 2287926 - RNA, 19 nt, Homo sapiens
  misc_RNA (1)...(19): siRNA sense strand
uguuugagccacuuggaaa

SEQ ID NO: 2287927 - RNA, 19 nt, Homo sapiens
  misc_RNA (1)...(19): siRNA sense strand
ccaaaauguaggagggacu

SEQ ID NO: 2287928 - RNA, 19 nt, Homo sapiens
  misc_RNA (1)...(19): siRNA sense strand
acaccauagacuugauauu

SEQ ID NO: 2287929 - RNA, 19 nt, Homo sapiens
  misc_RNA (1)...(19): siRNA sense strand
gugaauaaggugucugacu

SEQ ID NO: 2287930 - RNA, 19 nt, Homo sapiens
  misc_RNA (1)...(19): siRNA sense strand
aaauaugccuuuaagccau

SEQ ID NO: 2287931 - RNA, 19 nt, Homo sapiens
  misc_RNA (1)...(19): siRNA sense strand
guuugagccacuuggaaaa

SEQ ID NO: 2287932 - RNA, 19 nt, Homo sapiens
  misc_RNA (1)...(19): siRNA sense strand
gcucagagaucauccugga

SEQ ID NO: 2287933 - RNA, 19 nt, Homo sapiens
  misc_RNA (1)...(19): siRNA sense strand
cagaauacaagaagcgcaa

SEQ ID NO: 2287934 - RNA, 19 nt, Homo sapiens
  misc_RNA (1)...(19): siRNA sense strand
ggaauuaaauguucaggca

SEQ ID NO: 2287935 - RNA, 19 nt, Homo sapiens
  misc_RNA (1)...(19): siRNA sense strand
guaauuuaucaguggaaca

SEQ ID NO: 2287936 - RNA, 19 nt, Homo sapiens
  misc_RNA (1)...(19): siRNA sense strand
ugacaagauucauugguga

SEQ ID NO: 2287937 - RNA, 19 nt, Homo sapiens
  misc_RNA (1)...(19): siRNA sense strand
cggaauuaugacaacauua

SEQ ID NO: 2287938 - RNA, 19 nt, Homo sapiens
  misc_RNA (1)...(19): siRNA sense strand
gaauacaagaagcgcaaaa

SEQ ID NO: 2287939 - RNA, 19 nt, Homo sapiens
  misc_RNA (1)...(19): siRNA sense strand
gaagcaaaaggaugggaaa

SEQ ID NO: 2287940 - RNA, 19 nt, Homo sapiens
  misc_RNA (1)...(19): siRNA sense strand
ugacaacauuacaggcaca

SEQ ID NO: 2287941 - RNA, 19 nt, Homo sapiens
  misc_RNA (1)...(19): siRNA sense strand
agucagaacaccucagaca

SEQ ID NO: 2287942 - RNA, 19 nt, Homo sapiens
  misc_RNA (1)...(19): siRNA sense strand
acugaaauggcuaguggaa

SEQ ID NO: 2287943 - RNA, 19 nt, Homo sapiens
  misc_RNA (1)...(19): siRNA sense strand
cuguaaacugaaauggcua

SEQ ID NO: 2287944 - RNA, 19 nt, Homo sapiens
  misc_RNA (1)...(19): siRNA sense strand
ggaugcagagaaagccaaa

SEQ ID NO: 2287945 - RNA, 19 nt, Homo sapiens
  misc_RNA (1)...(19): siRNA sense strand
gccuauagucauugaaacu

SEQ ID NO: 2287946 - RNA, 19 nt, Homo sapiens
  misc_RNA (1)...(19): siRNA sense strand
gaaucagaaagaagcaaaa

SEQ ID NO: 2287947 - RNA, 19 nt, Homo sapiens
  misc_RNA (1)...(19): siRNA sense strand
uaucaguggaacaaagcaa

SEQ ID NO: 2287948 - RNA, 19 nt, Homo sapiens
  misc_RNA (1)...(19): siRNA sense strand
uuuacaaauggaacggaaa

SEQ ID NO: 2287949 - RNA, 19 nt, Homo sapiens
  misc_RNA (1)...(19): siRNA sense strand
agaaaccagcgaagccaaa

SEQ ID NO: 2287950 - RNA, 19 nt, Homo sapiens
  misc_RNA (1)...(19): siRNA sense strand
cuguaauuuaucaguggaa

SEQ ID NO: 2287951 - RNA, 19 nt, Homo sapiens
  misc_RNA (1)...(19): siRNA sense strand
gcgagacaguuuugcaaau

SEQ ID NO: 2287952 - RNA, 19 nt, Homo sapiens
  misc_RNA (1)...(19): siRNA sense strand
agaaauagucagaacaccu

SEQ ID NO: 2287953 - RNA, 19 nt, Homo sapiens
  misc_RNA (1)...(19): siRNA sense strand
augcagagaaagccaaauu

SEQ ID NO: 2287954 - RNA, 19 nt, Homo sapiens
  misc_RNA (1)...(19): siRNA sense strand
guguacauuugcuugacaa

SEQ ID NO: 2287955 - RNA, 19 nt, Homo sapiens
  misc_RNA (1)...(19): siRNA sense strand
ccugaaaagaauugcuuau

SEQ ID NO: 2287956 - RNA, 19 nt, Homo sapiens
  misc_RNA (1)...(19): siRNA sense strand
ucauugaaacucagcucua

SEQ ID NO: 2287957 - RNA, 19 nt, Homo sapiens
  misc_RNA (1)...(19): siRNA sense strand
auuccaaagucaugaaaug

SEQ ID NO: 2287958 - RNA, 19 nt, Homo sapiens
  misc_RNA (1)...(19): siRNA sense strand
ccuuuacucaaguguauaa

SEQ ID NO: 2287959 - RNA, 19 nt, Homo sapiens
  misc_RNA (1)...(19): siRNA sense strand
uguccauuaauaagcguaa

SEQ ID NO: 2287960 - RNA, 19 nt, Homo sapiens
  misc_RNA (1)...(19): siRNA sense strand
gcucagacucagaggaaga

SEQ ID NO: 2287961 - RNA, 19 nt, Homo sapiens
  misc_RNA (1)...(19): siRNA sense strand
uuagagagcuugagcgcua

SEQ ID NO: 2287962 - RNA, 19 nt, Homo sapiens
  misc_RNA (1)...(19): siRNA sense strand
auucagaggaggaggaaga

SEQ ID NO: 2287963 - RNA, 19 nt, Homo sapiens
  misc_RNA (1)...(19): siRNA sense strand
aggaggaagaagagaguga

SEQ ID NO: 2287964 - RNA, 19 nt, Homo sapiens
  misc_RNA (1)...(19): siRNA sense strand
gggaaagacaaaggaggaa

SEQ ID NO: 2287965 - RNA, 19 nt, Homo sapiens
  misc_RNA (1)...(19): siRNA sense strand
gcguaaagcggaaagcaga

SEQ ID NO: 2287966 - RNA, 19 nt, Homo sapiens
  misc_RNA (1)...(19): siRNA sense strand
caagaaagcaaguggcagu

SEQ ID NO: 2287967 - RNA, 19 nt, Homo sapiens
  misc_RNA (1)...(19): siRNA sense strand
agaagaaacggaaggcaga

SEQ ID NO: 2287968 - RNA, 19 nt, Homo sapiens
  misc_RNA (1)...(19): siRNA sense strand
acaccagagcucuaagaaa

SEQ ID NO: 2287969 - RNA, 19 nt, Homo sapiens
  misc_RNA (1)...(19): siRNA sense strand
ugaugaaggcucuguggaa

SEQ ID NO: 2287970 - RNA, 19 nt, Homo sapiens
  misc_RNA (1)...(19): siRNA sense strand
aagaaguccaagaaagcaa

SEQ ID NO: 2287971 - RNA, 19 nt, Homo sapiens
  misc_RNA (1)...(19): siRNA sense strand
aggaacuggcuuuggagaa

SEQ ID NO: 2287972 - RNA, 19 nt, Homo sapiens
  misc_RNA (1)...(19): siRNA sense strand
aggacgaggaggaagaaga

SEQ ID NO: 2287973 - RNA, 19 nt, Homo sapiens
  misc_RNA (1)...(19): siRNA sense strand
ugggaaagacaaaggagga

SEQ ID NO: 2287974 - RNA, 19 nt, Homo sapiens
  misc_RNA (1)...(19): siRNA sense strand
ggaaaguagcagugagagc

SEQ ID NO: 2287975 - RNA, 19 nt, Homo sapiens
  misc_RNA (1)...(19): siRNA sense strand
cccagaagagauugagauu

SEQ ID NO: 2287976 - RNA, 19 nt, Homo sapiens
  misc_RNA (1)...(19): siRNA sense strand
gggaaaaggauucgaaaac

SEQ ID NO: 2287977 - RNA, 19 nt, Homo sapiens
  misc_RNA (1)...(19): siRNA sense strand
cugaggaagaggaggagga

SEQ ID NO: 2287978 - RNA, 19 nt, Homo sapiens
  misc_RNA (1)...(19): siRNA sense strand
agaugaaccacuagaacca

SEQ ID NO: 2287979 - RNA, 19 nt, Homo sapiens
  misc_RNA (1)...(19): siRNA sense strand
agggaaaaggauucgaaaa

SEQ ID NO: 2287980 - RNA, 19 nt, Homo sapiens
  misc_RNA (1)...(19): siRNA sense strand
auucaaacccagaagagau

SEQ ID NO: 2287981 - RNA, 19 nt, Homo sapiens
  misc_RNA (1)...(19): siRNA sense strand
agagaagcaucgaggccga

SEQ ID NO: 2287982 - RNA, 19 nt, Homo sapiens
  misc_RNA (1)...(19): siRNA sense strand
cuucagaguguaugcaaga

SEQ ID NO: 2287983 - RNA, 19 nt, Homo sapiens
  misc_RNA (1)...(19): siRNA sense strand
cccuaugcguagagagagu

SEQ ID NO: 2287984 - RNA, 19 nt, Homo sapiens
  misc_RNA (1)...(19): siRNA sense strand
ggaagggaaugcaggguug

SEQ ID NO: 2287985 - RNA, 19 nt, Homo sapiens
  misc_RNA (1)...(19): siRNA sense strand
agcagcagcaccagggaaa

SEQ ID NO: 2287986 - RNA, 19 nt, Homo sapiens
  misc_RNA (1)...(19): siRNA sense strand
uggcacaaacgcuggaaaa

SEQ ID NO: 2287987 - RNA, 19 nt, Homo sapiens
  misc_RNA (1)...(19): siRNA sense strand
ggaagauggagaaccguga

SEQ ID NO: 2287988 - RNA, 19 nt, Homo sapiens
  misc_RNA (1)...(19): siRNA sense strand
agaagagagugaaagcuca

SEQ ID NO: 2287989 - RNA, 19 nt, Homo sapiens
  misc_RNA (1)...(19): siRNA sense strand
auuaagaggagacuugaaa

SEQ ID NO: 2287990 - RNA, 19 nt, Homo sapiens
  misc_RNA (1)...(19): siRNA sense strand
caaccuaagaaguccaaga

SEQ ID NO: 2287991 - RNA, 19 nt, Homo sapiens
  misc_RNA (1)...(19): siRNA sense strand
cguaaagcggaaagcagau

SEQ ID NO: 2287992 - RNA, 19 nt, Homo sapiens
  misc_RNA (1)...(19): siRNA sense strand
gggcaguacaugaacaacu

SEQ ID NO: 2287993 - RNA, 19 nt, Homo sapiens
  misc_RNA (1)...(19): siRNA sense strand
cuaagaagcaugcugccua

SEQ ID NO: 2287994 - RNA, 19 nt, Homo sapiens
  misc_RNA (1)...(19): siRNA sense strand
aagcucagacucagaggaa

SEQ ID NO: 2287995 - RNA, 19 nt, Homo sapiens
  misc_RNA (1)...(19): siRNA sense strand
gggaagggaaugcaggguu

SEQ ID NO: 2287996 - RNA, 19 nt, Homo sapiens
  misc_RNA (1)...(19): siRNA sense strand
guuaugauucagaggagga

SEQ ID NO: 2287997 - RNA, 19 nt, Homo sapiens
  misc_RNA (1)...(19): siRNA sense strand
gggaauuagaaaagcgguu

SEQ ID NO: 2287998 - RNA, 19 nt, Homo sapiens
  misc_RNA (1)...(19): siRNA sense strand
caaacugggucuaccggau

SEQ ID NO: 2287999 - RNA, 19 nt, Homo sapiens
  misc_RNA (1)...(19): siRNA sense strand
agauauuccuacagaaggu

SEQ ID NO: 2288000 - RNA, 19 nt, Homo sapiens
  misc_RNA (1)...(19): siRNA sense strand
ccaacugcuauaaguacaa

SEQ ID NO: 2288001 - RNA, 19 nt, Homo sapiens
  misc_RNA (1)...(19): siRNA sense strand
cuucagaguccuccaguga

SEQ ID NO: 2288002 - RNA, 19 nt, Homo sapiens
  misc_RNA (1)...(19): siRNA sense strand
cgaggaggaagaagagagu

SEQ ID NO: 2288003 - RNA, 19 nt, Homo sapiens
  misc_RNA (1)...(19): siRNA sense strand
gaggaagagagcaggccca

SEQ ID NO: 2288004 - RNA, 19 nt, Homo sapiens
  misc_RNA (1)...(19): siRNA sense strand
ccaugaguuacgaugagaa

SEQ ID NO: 2288005 - RNA, 19 nt, Homo sapiens
  misc_RNA (1)...(19): siRNA sense strand
gaugagaagcggcagcuga

SEQ ID NO: 2288006 - RNA, 19 nt, Homo sapiens
  misc_RNA (1)...(19): siRNA sense strand
caggauaucugaaggggua

SEQ ID NO: 2288007 - RNA, 19 nt, Homo sapiens
  misc_RNA (1)...(19): siRNA sense strand
acggaagggucgcggcuuu

SEQ ID NO: 2288008 - RNA, 19 nt, Homo sapiens
  misc_RNA (1)...(19): siRNA sense strand
cgcggaugcgugaggauua

SEQ ID NO: 2288009 - RNA, 19 nt, Homo sapiens
  misc_RNA (1)...(19): siRNA sense strand
ccaccgaagaagacauaca

SEQ ID NO: 2288010 - RNA, 19 nt, Homo sapiens
  misc_RNA (1)...(19): siRNA sense strand
gcgaagaaacggaaggguc

SEQ ID NO: 2288011 - RNA, 19 nt, Homo sapiens
  misc_RNA (1)...(19): siRNA sense strand
aagacauacacgacaaauu

SEQ ID NO: 2288012 - RNA, 19 nt, Homo sapiens
  misc_RNA (1)...(19): siRNA sense strand
ccgaagaagacauacacga

SEQ ID NO: 2288013 - RNA, 19 nt, Homo sapiens
  misc_RNA (1)...(19): siRNA sense strand
gccaggauuugaugggaca

SEQ ID NO: 2288014 - RNA, 19 nt, Homo sapiens
  misc_RNA (1)...(19): siRNA sense strand
ccgaagacgcagcagaagu

SEQ ID NO: 2288015 - RNA, 19 nt, Homo sapiens
  misc_RNA (1)...(19): siRNA sense strand
agaagacauacacgacaaa

SEQ ID NO: 2288016 - RNA, 19 nt, Homo sapiens
  misc_RNA (1)...(19): siRNA sense strand
gggguauacucuaguugaa

SEQ ID NO: 2288017 - RNA, 19 nt, Homo sapiens
  misc_RNA (1)...(19): siRNA sense strand
uugaaauguuggagagaca

SEQ ID NO: 2288018 - RNA, 19 nt, Homo sapiens
  misc_RNA (1)...(19): siRNA sense strand
aggaaaggccugaggaugu

SEQ ID NO: 2288019 - RNA, 19 nt, Homo sapiens
  misc_RNA (1)...(19): siRNA sense strand
ccagauggugcuagaggaa

SEQ ID NO: 2288020 - RNA, 19 nt, Homo sapiens
  misc_RNA (1)...(19): siRNA sense strand
ccacuaaguuucaaggcca

SEQ ID NO: 2288021 - RNA, 19 nt, Homo sapiens
  misc_RNA (1)...(19): siRNA sense strand
guucagaagcggagagccu

SEQ ID NO: 2288022 - RNA, 19 nt, Homo sapiens
  misc_RNA (1)...(19): siRNA sense strand
aggagaacaugcuggugaa

SEQ ID NO: 2288023 - RNA, 19 nt, Homo sapiens
  misc_RNA (1)...(19): siRNA sense strand
acuccuaaggccaaagaaa

SEQ ID NO: 2288024 - RNA, 19 nt, Homo sapiens
  misc_RNA (1)...(19): siRNA sense strand
agauggugcuagaggaagu

SEQ ID NO: 2288025 - RNA, 19 nt, Homo sapiens
  misc_RNA (1)...(19): siRNA sense strand
ggaccugcuuugugagcca

SEQ ID NO: 2288026 - RNA, 19 nt, Homo sapiens
  misc_RNA (1)...(19): siRNA sense strand
agaaaggaccagagaaccu

SEQ ID NO: 2288027 - RNA, 19 nt, Homo sapiens
  misc_RNA (1)...(19): siRNA sense strand
acagcaagguggaaaggga

SEQ ID NO: 2288028 - RNA, 19 nt, Homo sapiens
  misc_RNA (1)...(19): siRNA sense strand
ccuccuacucuguggauga

SEQ ID NO: 2288029 - RNA, 19 nt, Homo sapiens
  misc_RNA (1)...(19): siRNA sense strand
gcuuuuaagauguggaaca

SEQ ID NO: 2288030 - RNA, 19 nt, Homo sapiens
  misc_RNA (1)...(19): siRNA sense strand
gagaacuacauugggauaa

SEQ ID NO: 2288031 - RNA, 19 nt, Homo sapiens
  misc_RNA (1)...(19): siRNA sense strand
ggauaaaugugaagaaggc

SEQ ID NO: 2288032 - RNA, 19 nt, Homo sapiens
  misc_RNA (1)...(19): siRNA sense strand
ucaugagcuuggacagcaa

SEQ ID NO: 2288033 - RNA, 19 nt, Homo sapiens
  misc_RNA (1)...(19): siRNA sense strand
agaacaugcuggugaacgu

SEQ ID NO: 2288034 - RNA, 19 nt, Homo sapiens
  misc_RNA (1)...(19): siRNA sense strand
ggagagagagagauggugu

SEQ ID NO: 2288035 - RNA, 19 nt, Homo sapiens
  misc_RNA (1)...(19): siRNA sense strand
agagauacauguugccuca

SEQ ID NO: 2288036 - RNA, 19 nt, Homo sapiens
  misc_RNA (1)...(19): siRNA sense strand
ccaguuuaugagaugguaa

SEQ ID NO: 2288037 - RNA, 19 nt, Homo sapiens
  misc_RNA (1)...(19): siRNA sense strand
cgauggugguggaaggugu

SEQ ID NO: 2288038 - RNA, 19 nt, Homo sapiens
  misc_RNA (1)...(19): siRNA sense strand
caguuuaugagaugguaau

SEQ ID NO: 2288039 - RNA, 19 nt, Homo sapiens
  misc_RNA (1)...(19): siRNA sense strand
gccagguggagguuagaaa

SEQ ID NO: 2288040 - RNA, 19 nt, Homo sapiens
  misc_RNA (1)...(19): siRNA sense strand
agacagugcggaugcaaga

SEQ ID NO: 2288041 - RNA, 19 nt, Homo sapiens
  misc_RNA (1)...(19): siRNA sense strand
gggcagaaagccacaaacu

SEQ ID NO: 2288042 - RNA, 19 nt, Homo sapiens
  misc_RNA (1)...(19): siRNA sense strand
ccucggacaccaagcagaa

SEQ ID NO: 2288043 - RNA, 19 nt, Homo sapiens
  misc_RNA (1)...(19): siRNA sense strand
ugcaagagcaccuggccaa

SEQ ID NO: 2288044 - RNA, 19 nt, Homo sapiens
  misc_RNA (1)...(19): siRNA sense strand
gccacugguucuaggcauu

SEQ ID NO: 2288045 - RNA, 19 nt, Homo sapiens
  misc_RNA (1)...(19): siRNA sense strand
ccuauguuccagaagacaa

SEQ ID NO: 2288046 - RNA, 19 nt, Homo sapiens
  misc_RNA (1)...(19): siRNA sense strand
cagcgaguugcuacggaaa

SEQ ID NO: 2288047 - RNA, 19 nt, Homo sapiens
  misc_RNA (1)...(19): siRNA sense strand
uggagagcucacagacuua

SEQ ID NO: 2288048 - RNA, 19 nt, Homo sapiens
  misc_RNA (1)...(19): siRNA sense strand
caggagaacaugcugguga

SEQ ID NO: 2288049 - RNA, 19 nt, Homo sapiens
  misc_RNA (1)...(19): siRNA sense strand
ugguaauugcgcugcagaa

SEQ ID NO: 2288050 - RNA, 19 nt, Homo sapiens
  misc_RNA (1)...(19): siRNA sense strand
uccuggaaaucgaggugaa

SEQ ID NO: 2288051 - RNA, 19 nt, Homo sapiens
  misc_RNA (1)...(19): siRNA sense strand
augugauuguccuggaaau

SEQ ID NO: 2288052 - RNA, 19 nt, Homo sapiens
  misc_RNA (1)...(19): siRNA sense strand
ccacaaacuccauccagau

SEQ ID NO: 2288053 - RNA, 19 nt, Homo sapiens
  misc_RNA (1)...(19): siRNA sense strand
ugcuaaagacagugcggau

SEQ ID NO: 2288054 - RNA, 19 nt, Homo sapiens
  misc_RNA (1)...(19): siRNA sense strand
gcagcgagaaugagcgcca

SEQ ID NO: 2288055 - RNA, 19 nt, Homo sapiens
  misc_RNA (1)...(19): siRNA sense strand
cggcuggaugaguuugaaa

SEQ ID NO: 2288056 - RNA, 19 nt, Homo sapiens
  misc_RNA (1)...(19): siRNA sense strand
gaguuugaaauguuggaga

SEQ ID NO: 2288057 - RNA, 19 nt, Homo sapiens
  misc_RNA (1)...(19): siRNA sense strand
auaaaugugaagaaggcuu

SEQ ID NO: 2288058 - RNA, 19 nt, Homo sapiens
  misc_RNA (1)...(19): siRNA sense strand
agauguggaacaacagcaa

SEQ ID NO: 2288059 - RNA, 19 nt, Homo sapiens
  misc_RNA (1)...(19): siRNA sense strand
agcgagagcagcuggauuu

SEQ ID NO: 2288060 - RNA, 19 nt, Homo sapiens
  misc_RNA (1)...(19): siRNA sense strand
cagucauccugcaggcaca

SEQ ID NO: 2288061 - RNA, 19 nt, Homo sapiens
  misc_RNA (1)...(19): siRNA sense strand
gagagagagagaugguguu

SEQ ID NO: 2288062 - RNA, 19 nt, Homo sapiens
  misc_RNA (1)...(19): siRNA sense strand
gggagaacuacauugggau

SEQ ID NO: 2288063 - RNA, 19 nt, Homo sapiens
  misc_RNA (1)...(19): siRNA sense strand
gggagugcaggguggacau

SEQ ID NO: 2288064 - RNA, 19 nt, Homo sapiens
  misc_RNA (1)...(19): siRNA sense strand
gcucuggggugcugaguga

SEQ ID NO: 2288065 - RNA, 19 nt, Homo sapiens
  misc_RNA (1)...(19): siRNA sense strand
agacagccucagcggacaa

SEQ ID NO: 2288066 - RNA, 19 nt, Homo sapiens
  misc_RNA (1)...(19): siRNA sense strand
uugaaauguuggagagaca

SEQ ID NO: 2288067 - RNA, 19 nt, Homo sapiens
  misc_RNA (1)...(19): siRNA sense strand
ccacuaaguuucaaggcca

SEQ ID NO: 2288068 - RNA, 19 nt, Homo sapiens
  misc_RNA (1)...(19): siRNA sense strand
acuccuaaggccaaagaaa

SEQ ID NO: 2288069 - RNA, 19 nt, Homo sapiens
  misc_RNA (1)...(19): siRNA sense strand
agaaaggaccagagaaccu

SEQ ID NO: 2288070 - RNA, 19 nt, Homo sapiens
  misc_RNA (1)...(19): siRNA sense strand
ccaguuuaugagaugguaa

SEQ ID NO: 2288071 - RNA, 19 nt, Homo sapiens
  misc_RNA (1)...(19): siRNA sense strand
caguuuaugagaugguaau

SEQ ID NO: 2288072 - RNA, 19 nt, Homo sapiens
  misc_RNA (1)...(19): siRNA sense strand
cagcgaguugcuacggaaa

SEQ ID NO: 2288073 - RNA, 19 nt, Homo sapiens
  misc_RNA (1)...(19): siRNA sense strand
ugguaauugcgcugcagaa

SEQ ID NO: 2288074 - RNA, 19 nt, Homo sapiens
  misc_RNA (1)...(19): siRNA sense strand
gcagcgagaaugagcgcca

SEQ ID NO: 2288075 - RNA, 19 nt, Homo sapiens
  misc_RNA (1)...(19): siRNA sense strand
cggcuggaugaguuugaaa

SEQ ID NO: 2288076 - RNA, 19 nt, Homo sapiens
  misc_RNA (1)...(19): siRNA sense strand
gaguuugaaauguuggaga

SEQ ID NO: 2288077 - RNA, 19 nt, Homo sapiens
  misc_RNA (1)...(19): siRNA sense strand
uugaaauguuggagagaca

SEQ ID NO: 2288078 - RNA, 19 nt, Homo sapiens
  misc_RNA (1)...(19): siRNA sense strand
ccacuaaguuucaaggcca

SEQ ID NO: 2288079 - RNA, 19 nt, Homo sapiens
  misc_RNA (1)...(19): siRNA sense strand
acuccuaaggccaaagaaa

SEQ ID NO: 2288080 - RNA, 19 nt, Homo sapiens
  misc_RNA (1)...(19): siRNA sense strand
agaaaggaccagagaaccu

SEQ ID NO: 2288081 - RNA, 19 nt, Homo sapiens
  misc_RNA (1)...(19): siRNA sense strand
ccaguuuaugagaugguaa

SEQ ID NO: 2288082 - RNA, 19 nt, Homo sapiens
  misc_RNA (1)...(19): siRNA sense strand
caguuuaugagaugguaau

SEQ ID NO: 2288083 - RNA, 19 nt, Homo sapiens
  misc_RNA (1)...(19): siRNA sense strand
cagcgaguugcuacggaaa

SEQ ID NO: 2288084 - RNA, 19 nt, Homo sapiens
  misc_RNA (1)...(19): siRNA sense strand
uggagagcucacagacuua

SEQ ID NO: 2288085 - RNA, 19 nt, Homo sapiens
  misc_RNA (1)...(19): siRNA sense strand
ugguaauugcgcugcagaa

SEQ ID NO: 2288086 - RNA, 19 nt, Homo sapiens
  misc_RNA (1)...(19): siRNA sense strand
gcagcgagaaugagcgcca

SEQ ID NO: 2288087 - RNA, 19 nt, Homo sapiens
  misc_RNA (1)...(19): siRNA sense strand
cggcuggaugaguuugaaa

SEQ ID NO: 2288088 - RNA, 19 nt, Homo sapiens
  misc_RNA (1)...(19): siRNA sense strand
gaguuugaaauguuggaga

SEQ ID NO: 2288089 - RNA, 19 nt, Homo sapiens
  misc_RNA (1)...(19): siRNA sense strand
uugaaauguuggagagaca

SEQ ID NO: 2288090 - RNA, 19 nt, Homo sapiens
  misc_RNA (1)...(19): siRNA sense strand
aggaaaggccugaggaugu

SEQ ID NO: 2288091 - RNA, 19 nt, Homo sapiens
  misc_RNA (1)...(19): siRNA sense strand
ccagauggugcuagaggaa

SEQ ID NO: 2288092 - RNA, 19 nt, Homo sapiens
  misc_RNA (1)...(19): siRNA sense strand
ccacaauggucucagccua

SEQ ID NO: 2288093 - RNA, 19 nt, Homo sapiens
  misc_RNA (1)...(19): siRNA sense strand
ccacuaaguuucaaggcca

SEQ ID NO: 2288094 - RNA, 19 nt, Homo sapiens
  misc_RNA (1)...(19): siRNA sense strand
guucagaagcggagagccu

SEQ ID NO: 2288095 - RNA, 19 nt, Homo sapiens
  misc_RNA (1)...(19): siRNA sense strand
aggagaacaugcuggugaa

SEQ ID NO: 2288096 - RNA, 19 nt, Homo sapiens
  misc_RNA (1)...(19): siRNA sense strand
acuccuaaggccaaagaaa

SEQ ID NO: 2288097 - RNA, 19 nt, Homo sapiens
  misc_RNA (1)...(19): siRNA sense strand
agauggugcuagaggaagu

SEQ ID NO: 2288098 - RNA, 19 nt, Homo sapiens
  misc_RNA (1)...(19): siRNA sense strand
ggaccugcuuugugagcca

SEQ ID NO: 2288099 - RNA, 19 nt, Homo sapiens
  misc_RNA (1)...(19): siRNA sense strand
agaaaggaccagagaaccu

SEQ ID NO: 2288100 - RNA, 19 nt, Homo sapiens
  misc_RNA (1)...(19): siRNA sense strand
acagcaagguggaaaggga

SEQ ID NO: 2288101 - RNA, 19 nt, Homo sapiens
  misc_RNA (1)...(19): siRNA sense strand
ccuccuacucuguggauga

SEQ ID NO: 2288102 - RNA, 19 nt, Homo sapiens
  misc_RNA (1)...(19): siRNA sense strand
gcuuuuaagauguggaaca

SEQ ID NO: 2288103 - RNA, 19 nt, Homo sapiens
  misc_RNA (1)...(19): siRNA sense strand
gagaacuacauugggauaa

SEQ ID NO: 2288104 - RNA, 19 nt, Homo sapiens
  misc_RNA (1)...(19): siRNA sense strand
ggauaaaugugaagaaggc

SEQ ID NO: 2288105 - RNA, 19 nt, Homo sapiens
  misc_RNA (1)...(19): siRNA sense strand
ucaugagcuuggacagcaa

SEQ ID NO: 2288106 - RNA, 19 nt, Homo sapiens
  misc_RNA (1)...(19): siRNA sense strand
agaacaugcuggugaacgu

SEQ ID NO: 2288107 - RNA, 19 nt, Homo sapiens
  misc_RNA (1)...(19): siRNA sense strand
ggagagagagagauggugu

SEQ ID NO: 2288108 - RNA, 19 nt, Homo sapiens
  misc_RNA (1)...(19): siRNA sense strand
agagauacauguugccuca

SEQ ID NO: 2288109 - RNA, 19 nt, Homo sapiens
  misc_RNA (1)...(19): siRNA sense strand
ccaguuuaugagaugguaa

SEQ ID NO: 2288110 - RNA, 19 nt, Homo sapiens
  misc_RNA (1)...(19): siRNA sense strand
cgauggugguggaaggugu

SEQ ID NO: 2288111 - RNA, 19 nt, Homo sapiens
  misc_RNA (1)...(19): siRNA sense strand
caguuuaugagaugguaau

SEQ ID NO: 2288112 - RNA, 19 nt, Homo sapiens
  misc_RNA (1)...(19): siRNA sense strand
gccagguggagguuagaaa

SEQ ID NO: 2288113 - RNA, 19 nt, Homo sapiens
  misc_RNA (1)...(19): siRNA sense strand
agacagugcggaugcaaga

SEQ ID NO: 2288114 - RNA, 19 nt, Homo sapiens
  misc_RNA (1)...(19): siRNA sense strand
ugauuuguccucagagcua

SEQ ID NO: 2288115 - RNA, 19 nt, Homo sapiens
  misc_RNA (1)...(19): siRNA sense strand
gggcagaaagccacaaacu

SEQ ID NO: 2288116 - RNA, 19 nt, Homo sapiens
  misc_RNA (1)...(19): siRNA sense strand
ccucggacaccaagcagaa

SEQ ID NO: 2288117 - RNA, 19 nt, Homo sapiens
  misc_RNA (1)...(19): siRNA sense strand
ugcaagagcaccuggccaa

SEQ ID NO: 2288118 - RNA, 19 nt, Homo sapiens
  misc_RNA (1)...(19): siRNA sense strand
gccacugguucuaggcauu

SEQ ID NO: 2288119 - RNA, 19 nt, Homo sapiens
  misc_RNA (1)...(19): siRNA sense strand
ccuauguuccagaagacaa

SEQ ID NO: 2288120 - RNA, 19 nt, Homo sapiens
  misc_RNA (1)...(19): siRNA sense strand
cagcgaguugcuacggaaa

SEQ ID NO: 2288121 - RNA, 19 nt, Homo sapiens
  misc_RNA (1)...(19): siRNA sense strand
uggagagcucacagacuua

SEQ ID NO: 2288122 - RNA, 19 nt, Homo sapiens
  misc_RNA (1)...(19): siRNA sense strand
caggagaacaugcugguga

SEQ ID NO: 2288123 - RNA, 19 nt, Homo sapiens
  misc_RNA (1)...(19): siRNA sense strand
ugguaauugcgcugcagaa

SEQ ID NO: 2288124 - RNA, 19 nt, Homo sapiens
  misc_RNA (1)...(19): siRNA sense strand
uccuggaaaucgaggugaa

SEQ ID NO: 2288125 - RNA, 19 nt, Homo sapiens
  misc_RNA (1)...(19): siRNA sense strand
augugauuguccuggaaau

SEQ ID NO: 2288126 - RNA, 19 nt, Homo sapiens
  misc_RNA (1)...(19): siRNA sense strand
ccacaaacuccauccagau

SEQ ID NO: 2288127 - RNA, 19 nt, Homo sapiens
  misc_RNA (1)...(19): siRNA sense strand
ugcuaaagacagugcggau

SEQ ID NO: 2288128 - RNA, 19 nt, Homo sapiens
  misc_RNA (1)...(19): siRNA sense strand
gcagcgagaaugagcgcca

SEQ ID NO: 2288129 - RNA, 19 nt, Homo sapiens
  misc_RNA (1)...(19): siRNA sense strand
cggcuggaugaguuugaaa

SEQ ID NO: 2288130 - RNA, 19 nt, Homo sapiens
  misc_RNA (1)...(19): siRNA sense strand
gaguuugaaauguuggaga

SEQ ID NO: 2288131 - RNA, 19 nt, Homo sapiens
  misc_RNA (1)...(19): siRNA sense strand
auaaaugugaagaaggcuu

SEQ ID NO: 2288132 - RNA, 19 nt, Homo sapiens
  misc_RNA (1)...(19): siRNA sense strand
agauguggaacaacagcaa

SEQ ID NO: 2288133 - RNA, 19 nt, Homo sapiens
  misc_RNA (1)...(19): siRNA sense strand
agcgagagcagcuggauuu

SEQ ID NO: 2288134 - RNA, 19 nt, Homo sapiens
  misc_RNA (1)...(19): siRNA sense strand
cagucauccugcaggcaca

SEQ ID NO: 2288135 - RNA, 19 nt, Homo sapiens
  misc_RNA (1)...(19): siRNA sense strand
gagagagagagaugguguu

SEQ ID NO: 2288136 - RNA, 19 nt, Homo sapiens
  misc_RNA (1)...(19): siRNA sense strand
gggagaacuacauugggau

SEQ ID NO: 2288137 - RNA, 19 nt, Homo sapiens
  misc_RNA (1)...(19): siRNA sense strand
uugaaauguuggagagaca

SEQ ID NO: 2288138 - RNA, 19 nt, Homo sapiens
  misc_RNA (1)...(19): siRNA sense strand
ccacuaaguuucaaggcca

SEQ ID NO: 2288139 - RNA, 19 nt, Homo sapiens
  misc_RNA (1)...(19): siRNA sense strand
acuccuaaggccaaagaaa

SEQ ID NO: 2288140 - RNA, 19 nt, Homo sapiens
  misc_RNA (1)...(19): siRNA sense strand
agaaaggaccagagaaccu

SEQ ID NO: 2288141 - RNA, 19 nt, Homo sapiens
  misc_RNA (1)...(19): siRNA sense strand
ccaguuuaugagaugguaa

SEQ ID NO: 2288142 - RNA, 19 nt, Homo sapiens
  misc_RNA (1)...(19): siRNA sense strand
caguuuaugagaugguaau

SEQ ID NO: 2288143 - RNA, 19 nt, Homo sapiens
  misc_RNA (1)...(19): siRNA sense strand
cagcgaguugcuacggaaa

SEQ ID NO: 2288144 - RNA, 19 nt, Homo sapiens
  misc_RNA (1)...(19): siRNA sense strand
uggagagcucacagacuua

SEQ ID NO: 2288145 - RNA, 19 nt, Homo sapiens
  misc_RNA (1)...(19): siRNA sense strand
ugguaauugcgcugcagaa

SEQ ID NO: 2288146 - RNA, 19 nt, Homo sapiens
  misc_RNA (1)...(19): siRNA sense strand
gcagcgagaaugagcgcca

SEQ ID NO: 2288147 - RNA, 19 nt, Homo sapiens
  misc_RNA (1)...(19): siRNA sense strand
cggcuggaugaguuugaaa

SEQ ID NO: 2288148 - RNA, 19 nt, Homo sapiens
  misc_RNA (1)...(19): siRNA sense strand
gaguuugaaauguuggaga

SEQ ID NO: 2288149 - RNA, 19 nt, Homo sapiens
  misc_RNA (1)...(19): siRNA sense strand
ggaaugaauuuguugcaga

SEQ ID NO: 2288150 - RNA, 19 nt, Homo sapiens
  misc_RNA (1)...(19): siRNA sense strand
ccuacuacguccagcgcua

SEQ ID NO: 2288151 - RNA, 19 nt, Homo sapiens
  misc_RNA (1)...(19): siRNA sense strand
acgcagaaggccugggcua

SEQ ID NO: 2288152 - RNA, 19 nt, Homo sapiens
  misc_RNA (1)...(19): siRNA sense strand
gagcacuaauugaaggaca

SEQ ID NO: 2288153 - RNA, 19 nt, Homo sapiens
  misc_RNA (1)...(19): siRNA sense strand
acucacauacagagagaau

SEQ ID NO: 2288154 - RNA, 19 nt, Homo sapiens
  misc_RNA (1)...(19): siRNA sense strand
agcacuaauugaaggacaa

SEQ ID NO: 2288155 - RNA, 19 nt, Homo sapiens
  misc_RNA (1)...(19): siRNA sense strand
gaugcaaagugguggccuu

SEQ ID NO: 2288156 - RNA, 19 nt, Homo sapiens
  misc_RNA (1)...(19): siRNA sense strand
ccaaacucgagcagagaau

SEQ ID NO: 2288157 - RNA, 19 nt, Homo sapiens
  misc_RNA (1)...(19): siRNA sense strand
ugaaauuauuggacgucau

SEQ ID NO: 2288158 - RNA, 19 nt, Homo sapiens
  misc_RNA (1)...(19): siRNA sense strand
agguaaagguuguugcugu

SEQ ID NO: 2288159 - RNA, 19 nt, Homo sapiens
  misc_RNA (1)...(19): siRNA sense strand
cauuuagaggagaagcuua

SEQ ID NO: 2288160 - RNA, 19 nt, Homo sapiens
  misc_RNA (1)...(19): siRNA sense strand
cgguugacucccagcacua

SEQ ID NO: 2288161 - RNA, 19 nt, Homo sapiens
  misc_RNA (1)...(19): siRNA sense strand
cgucauagguuuaacacag

SEQ ID NO: 2288162 - RNA, 19 nt, Homo sapiens
  misc_RNA (1)...(19): siRNA sense strand
ccaagaggauucacgcaga

SEQ ID NO: 2288163 - RNA, 19 nt, Homo sapiens
  misc_RNA (1)...(19): siRNA sense strand
aaggacaauucauggccaa

SEQ ID NO: 2288164 - RNA, 19 nt, Homo sapiens
  misc_RNA (1)...(19): siRNA sense strand
aggcaugagacuggaggaa

SEQ ID NO: 2288165 - RNA, 19 nt, Homo sapiens
  misc_RNA (1)...(19): siRNA sense strand
gcaugagacuggaggaagg

SEQ ID NO: 2288166 - RNA, 19 nt, Homo sapiens
  misc_RNA (1)...(19): siRNA sense strand
uuggagaagaugaaggcuu

SEQ ID NO: 2288167 - RNA, 19 nt, Homo sapiens
  misc_RNA (1)...(19): siRNA sense strand
uggucuugcagguggaaca

SEQ ID NO: 2288168 - RNA, 19 nt, Homo sapiens
  misc_RNA (1)...(19): siRNA sense strand
acggauaaaccuugagaaa

SEQ ID NO: 2288169 - RNA, 19 nt, Homo sapiens
  misc_RNA (1)...(19): siRNA sense strand
agaaagugaggaagggaaa

SEQ ID NO: 2288170 - RNA, 19 nt, Homo sapiens
  misc_RNA (1)...(19): siRNA sense strand
ugaugaagaaagugaggaa

SEQ ID NO: 2288171 - RNA, 19 nt, Homo sapiens
  misc_RNA (1)...(19): siRNA sense strand
cccgaaauaaagugagaaa

SEQ ID NO: 2288172 - RNA, 19 nt, Homo sapiens
  misc_RNA (1)...(19): siRNA sense strand
uccagaaagcaaagaauaa

SEQ ID NO: 2288173 - RNA, 19 nt, Homo sapiens
  misc_RNA (1)...(19): siRNA sense strand
cagcagaacuauuaaggca

SEQ ID NO: 2288174 - RNA, 19 nt, Homo sapiens
  misc_RNA (1)...(19): siRNA sense strand
aggagaaaguggcaaucaa

SEQ ID NO: 2288175 - RNA, 19 nt, Homo sapiens
  misc_RNA (1)...(19): siRNA sense strand
ugguaaacugauaggauuu

SEQ ID NO: 2288176 - RNA, 19 nt, Homo sapiens
  misc_RNA (1)...(19): siRNA sense strand
aagaaagugaggaagggaa

SEQ ID NO: 2288177 - RNA, 19 nt, Homo sapiens
  misc_RNA (1)...(19): siRNA sense strand
uaguaauaguggcagcuaa

SEQ ID NO: 2288178 - RNA, 19 nt, Homo sapiens
  misc_RNA (1)...(19): siRNA sense strand
aguaauaguggcagcuaau

SEQ ID NO: 2288179 - RNA, 19 nt, Homo sapiens
  misc_RNA (1)...(19): siRNA sense strand
gcagauugcuacacagcca

SEQ ID NO: 2288180 - RNA, 19 nt, Homo sapiens
  misc_RNA (1)...(19): siRNA sense strand
gaaagaaauucaagccaug

SEQ ID NO: 2288181 - RNA, 19 nt, Homo sapiens
  misc_RNA (1)...(19): siRNA sense strand
caagaaaccaagaucccaa

SEQ ID NO: 2288182 - RNA, 19 nt, Homo sapiens
  misc_RNA (1)...(19): siRNA sense strand
gagaaguacuggaagggcu

SEQ ID NO: 2288183 - RNA, 19 nt, Homo sapiens
  misc_RNA (1)...(19): siRNA sense strand
ggauuuaguaauaguggca

SEQ ID NO: 2288184 - RNA, 19 nt, Homo sapiens
  misc_RNA (1)...(19): siRNA sense strand
gcugcuaaguggagguucu

SEQ ID NO: 2288185 - RNA, 19 nt, Homo sapiens
  misc_RNA (1)...(19): siRNA sense strand
gagaugugaaagcuggaaa

SEQ ID NO: 2288186 - RNA, 19 nt, Homo sapiens
  misc_RNA (1)...(19): siRNA sense strand
cggauaaaccuugagaaau

SEQ ID NO: 2288187 - RNA, 19 nt, Homo sapiens
  misc_RNA (1)...(19): siRNA sense strand
aaguggaguccuagaugaa

SEQ ID NO: 2288188 - RNA, 19 nt, Homo sapiens
  misc_RNA (1)...(19): siRNA sense strand
aguacagauugcagacuuu

SEQ ID NO: 2288189 - RNA, 19 nt, Homo sapiens
  misc_RNA (1)...(19): siRNA sense strand
ggcaaaaggggaacacaaa

SEQ ID NO: 2288190 - RNA, 19 nt, Homo sapiens
  misc_RNA (1)...(19): siRNA sense strand
gaaacauucuucuuggaga

SEQ ID NO: 2288191 - RNA, 19 nt, Homo sapiens
  misc_RNA (1)...(19): siRNA sense strand
gcagaacuauuaaggcaca

SEQ ID NO: 2288192 - RNA, 19 nt, Homo sapiens
  misc_RNA (1)...(19): siRNA sense strand
uggcaaaaggggaacacaa

SEQ ID NO: 2288193 - RNA, 19 nt, Homo sapiens
  misc_RNA (1)...(19): siRNA sense strand
gagauacagcagagggugu

SEQ ID NO: 2288194 - RNA, 19 nt, Homo sapiens
  misc_RNA (1)...(19): siRNA sense strand
guggcaaucaaacggauaa

SEQ ID NO: 2288195 - RNA, 19 nt, Homo sapiens
  misc_RNA (1)...(19): siRNA sense strand
ggcuggaauaucugcauaa

SEQ ID NO: 2288196 - RNA, 19 nt, Homo sapiens
  misc_RNA (1)...(19): siRNA sense strand
uuuggaaacugguguucaa

SEQ ID NO: 2288197 - RNA, 19 nt, Homo sapiens
  misc_RNA (1)...(19): siRNA sense strand
accaacagcagcagaacua

SEQ ID NO: 2288198 - RNA, 19 nt, Homo sapiens
  misc_RNA (1)...(19): siRNA sense strand
ccgagugaaagaaucaaua

SEQ ID NO: 2288199 - RNA, 19 nt, Homo sapiens
  misc_RNA (1)...(19): siRNA sense strand
gcaaaaggggaacacaaaa

SEQ ID NO: 2288200 - RNA, 19 nt, Homo sapiens
  misc_RNA (1)...(19): siRNA sense strand
agcaacugguggugauauu

SEQ ID NO: 2288201 - RNA, 19 nt, Homo sapiens
  misc_RNA (1)...(19): siRNA sense strand
uaucaaauucugagcucuu

SEQ ID NO: 2288202 - RNA, 19 nt, Homo sapiens
  misc_RNA (1)...(19): siRNA sense strand
caacugauccuguggguac

SEQ ID NO: 2288203 - RNA, 19 nt, Homo sapiens
  misc_RNA (1)...(19): siRNA sense strand
auucaagccaugagucaau

SEQ ID NO: 2288204 - RNA, 19 nt, Homo sapiens
  misc_RNA (1)...(19): siRNA sense strand
gguguucaagauaaagaaa

SEQ ID NO: 2288205 - RNA, 19 nt, Homo sapiens
  misc_RNA (1)...(19): siRNA sense strand
aacugguguucaagauaaa

SEQ ID NO: 2288206 - RNA, 19 nt, Homo sapiens
  misc_RNA (1)...(19): siRNA sense strand
acggaagggauuuaguaau

SEQ ID NO: 2288207 - RNA, 19 nt, Homo sapiens
  misc_RNA (1)...(19): siRNA sense strand
ugcagaaaauuguggaaga

SEQ ID NO: 2288208 - RNA, 19 nt, Homo sapiens
  misc_RNA (1)...(19): siRNA sense strand
uuccagaaagcaaagaaua

SEQ ID NO: 2288209 - RNA, 19 nt, Homo sapiens
  misc_RNA (1)...(19): siRNA sense strand
augaugaaguaguuggaau

SEQ ID NO: 2288210 - RNA, 19 nt, Homo sapiens
  misc_RNA (1)...(19): siRNA sense strand
ggguaacaacagaagaaaa

SEQ ID NO: 2288211 - RNA, 19 nt, Homo sapiens
  misc_RNA (1)...(19): siRNA sense strand
gcugaaagcuguuuggaag

SEQ ID NO: 2288212 - RNA, 19 nt, Homo sapiens
  misc_RNA (1)...(19): siRNA sense strand
acaucauagaggagccaaa

SEQ ID NO: 2288213 - RNA, 19 nt, Homo sapiens
  misc_RNA (1)...(19): siRNA sense strand
uguuagaguacaugagcau

SEQ ID NO: 2288214 - RNA, 19 nt, Homo sapiens
  misc_RNA (1)...(19): siRNA sense strand
cuggguaacaacagaagaa

SEQ ID NO: 2288215 - RNA, 19 nt, Homo sapiens
  misc_RNA (1)...(19): siRNA sense strand
cugaaagcuguuuggaaga

SEQ ID NO: 2288216 - RNA, 19 nt, Homo sapiens
  misc_RNA (1)...(19): siRNA sense strand
gaaugaugaaguuuggaau

SEQ ID NO: 2288217 - RNA, 19 nt, Homo sapiens
  misc_RNA (1)...(19): siRNA sense strand
acaacuacuaccacauaaa

SEQ ID NO: 2288218 - RNA, 19 nt, Homo sapiens
  misc_RNA (1)...(19): siRNA sense strand
ggaaaguucauguugcuga

SEQ ID NO: 2288219 - RNA, 19 nt, Homo sapiens
  misc_RNA (1)...(19): siRNA sense strand
aguuaaagcuugugcucug

SEQ ID NO: 2288220 - RNA, 19 nt, Homo sapiens
  misc_RNA (1)...(19): siRNA sense strand
gcugauaauggauggagca

SEQ ID NO: 2288221 - RNA, 19 nt, Homo sapiens
  misc_RNA (1)...(19): siRNA sense strand
uuuauuuccuguugggaga

SEQ ID NO: 2288222 - RNA, 19 nt, Homo sapiens
  misc_RNA (1)...(19): siRNA sense strand
gaagauaagcagugccuug

SEQ ID NO: 2288223 - RNA, 19 nt, Homo sapiens
  misc_RNA (1)...(19): siRNA sense strand
uggccugggaguagauauu

SEQ ID NO: 2288224 - RNA, 19 nt, Homo sapiens
  misc_RNA (1)...(19): siRNA sense strand
augaugaaccagcuguaaa

SEQ ID NO: 2288225 - RNA, 19 nt, Homo sapiens
  misc_RNA (1)...(19): siRNA sense strand
guuccacagaugaagaaau

SEQ ID NO: 2288226 - RNA, 19 nt, Homo sapiens
  misc_RNA (1)...(19): siRNA sense strand
ugaugaaccagcuguaaaa

SEQ ID NO: 2288227 - RNA, 19 nt, Homo sapiens
  misc_RNA (1)...(19): siRNA sense strand
augaugaaguaguuggaau

SEQ ID NO: 2288228 - RNA, 19 nt, Homo sapiens
  misc_RNA (1)...(19): siRNA sense strand
acaucauagaggagccaaa

SEQ ID NO: 2288229 - RNA, 19 nt, Homo sapiens
  misc_RNA (1)...(19): siRNA sense strand
uguuagaguacaugagcau

SEQ ID NO: 2288230 - RNA, 19 nt, Homo sapiens
  misc_RNA (1)...(19): siRNA sense strand
aguuaaagcuugugcucug

SEQ ID NO: 2288231 - RNA, 19 nt, Homo sapiens
  misc_RNA (1)...(19): siRNA sense strand
gcugauaauggauggagca

SEQ ID NO: 2288232 - RNA, 19 nt, Homo sapiens
  misc_RNA (1)...(19): siRNA sense strand
uuuauuuccuguugggaga

SEQ ID NO: 2288233 - RNA, 19 nt, Homo sapiens
  misc_RNA (1)...(19): siRNA sense strand
gaagauaagcagugccuug

SEQ ID NO: 2288234 - RNA, 19 nt, Homo sapiens
  misc_RNA (1)...(19): siRNA sense strand
guuccacagaugaagaaau

SEQ ID NO: 2288235 - RNA, 19 nt, Homo sapiens
  misc_RNA (1)...(19): siRNA sense strand
augaugaaguaguuggaau

SEQ ID NO: 2288236 - RNA, 19 nt, Homo sapiens
  misc_RNA (1)...(19): siRNA sense strand
acaucauagaggagccaaa

SEQ ID NO: 2288237 - RNA, 19 nt, Homo sapiens
  misc_RNA (1)...(19): siRNA sense strand
uguuagaguacaugagcau

SEQ ID NO: 2288238 - RNA, 19 nt, Homo sapiens
  misc_RNA (1)...(19): siRNA sense strand
aguuaaagcuugugcucug

SEQ ID NO: 2288239 - RNA, 19 nt, Homo sapiens
  misc_RNA (1)...(19): siRNA sense strand
gcugauaauggauggagca

SEQ ID NO: 2288240 - RNA, 19 nt, Homo sapiens
  misc_RNA (1)...(19): siRNA sense strand
uuuauuuccuguugggaga

SEQ ID NO: 2288241 - RNA, 19 nt, Homo sapiens
  misc_RNA (1)...(19): siRNA sense strand
gaagauaagcagugccuug

SEQ ID NO: 2288242 - RNA, 19 nt, Homo sapiens
  misc_RNA (1)...(19): siRNA sense strand
guuccacagaugaagaaau

SEQ ID NO: 2288243 - RNA, 19 nt, Homo sapiens
  misc_RNA (1)...(19): siRNA sense strand
cgcugaaggaugagggcaa

SEQ ID NO: 2288244 - RNA, 19 nt, Homo sapiens
  misc_RNA (1)...(19): siRNA sense strand
gcaagcuccuagaggccaa

SEQ ID NO: 2288245 - RNA, 19 nt, Homo sapiens
  misc_RNA (1)...(19): siRNA sense strand
cugaagacaguaagaggau

SEQ ID NO: 2288246 - RNA, 19 nt, Homo sapiens
  misc_RNA (1)...(19): siRNA sense strand
ccggagaugugucugggaa

SEQ ID NO: 2288247 - RNA, 19 nt, Homo sapiens
  misc_RNA (1)...(19): siRNA sense strand
ugggaagaucaaagacauu

SEQ ID NO: 2288248 - RNA, 19 nt, Homo sapiens
  misc_RNA (1)...(19): siRNA sense strand
acggcuacucggagaacaa

SEQ ID NO: 2288249 - RNA, 19 nt, Homo sapiens
  misc_RNA (1)...(19): siRNA sense strand
gcugggaagaucaaagaca

SEQ ID NO: 2288250 - RNA, 19 nt, Homo sapiens
  misc_RNA (1)...(19): siRNA sense strand
cggcauucuuugagggacc

SEQ ID NO: 2288251 - RNA, 19 nt, Homo sapiens
  misc_RNA (1)...(19): siRNA sense strand
gggcgagauuacaggacac

SEQ ID NO: 2288252 - RNA, 19 nt, Homo sapiens
  misc_RNA (1)...(19): siRNA sense strand
cgcugaaggaugagggcaa

SEQ ID NO: 2288253 - RNA, 19 nt, Homo sapiens
  misc_RNA (1)...(19): siRNA sense strand
gcaagcuccuagaggccaa

SEQ ID NO: 2288254 - RNA, 19 nt, Homo sapiens
  misc_RNA (1)...(19): siRNA sense strand
cugaagacaguaagaggau

SEQ ID NO: 2288255 - RNA, 19 nt, Homo sapiens
  misc_RNA (1)...(19): siRNA sense strand
ccggagaugugucugggaa

SEQ ID NO: 2288256 - RNA, 19 nt, Homo sapiens
  misc_RNA (1)...(19): siRNA sense strand
ugggaagaucaaagacauu

SEQ ID NO: 2288257 - RNA, 19 nt, Homo sapiens
  misc_RNA (1)...(19): siRNA sense strand
acggcuacucggagaacaa

SEQ ID NO: 2288258 - RNA, 19 nt, Homo sapiens
  misc_RNA (1)...(19): siRNA sense strand
gcugggaagaucaaagaca

SEQ ID NO: 2288259 - RNA, 19 nt, Homo sapiens
  misc_RNA (1)...(19): siRNA sense strand
cggcauucuuugagggacc

SEQ ID NO: 2288260 - RNA, 19 nt, Homo sapiens
  misc_RNA (1)...(19): siRNA sense strand
gggcgagauuacaggacac

SEQ ID NO: 2288261 - RNA, 19 nt, Homo sapiens
  misc_RNA (1)...(19): siRNA sense strand
agaaagagaugcagaggga

SEQ ID NO: 2288262 - RNA, 19 nt, Homo sapiens
  misc_RNA (1)...(19): siRNA sense strand
agacagaacuggagcgacu

SEQ ID NO: 2288263 - RNA, 19 nt, Homo sapiens
  misc_RNA (1)...(19): siRNA sense strand
uggcaggaauguacggaaa

SEQ ID NO: 2288264 - RNA, 19 nt, Homo sapiens
  misc_RNA (1)...(19): siRNA sense strand
cgaccaaccauauggcaaa

SEQ ID NO: 2288265 - RNA, 19 nt, Homo sapiens
  misc_RNA (1)...(19): siRNA sense strand
gguggaaaucagaaaggaa

SEQ ID NO: 2288266 - RNA, 19 nt, Homo sapiens
  misc_RNA (1)...(19): siRNA sense strand
ccaaagauccaaagagacu

SEQ ID NO: 2288267 - RNA, 19 nt, Homo sapiens
  misc_RNA (1)...(19): siRNA sense strand
ggaucaaagugaagguaac

SEQ ID NO: 2288268 - RNA, 19 nt, Homo sapiens
  misc_RNA (1)...(19): siRNA sense strand
ggauauggaggcacagcaa

SEQ ID NO: 2288269 - RNA, 19 nt, Homo sapiens
  misc_RNA (1)...(19): siRNA sense strand
agaucgagacgaagaaauu

SEQ ID NO: 2288270 - RNA, 19 nt, Homo sapiens
  misc_RNA (1)...(19): siRNA sense strand
ccagcaacauauauagcaa

SEQ ID NO: 2288271 - RNA, 19 nt, Homo sapiens
  misc_RNA (1)...(19): siRNA sense strand
aagcagaauuaaagaucga

SEQ ID NO: 2288272 - RNA, 19 nt, Homo sapiens
  misc_RNA (1)...(19): siRNA sense strand
accuaaugaugauggcaaa

SEQ ID NO: 2288273 - RNA, 19 nt, Homo sapiens
  misc_RNA (1)...(19): siRNA sense strand
uuacacuggccgaaagaaa

SEQ ID NO: 2288274 - RNA, 19 nt, Homo sapiens
  misc_RNA (1)...(19): siRNA sense strand
ugacaauggugaaggcacu

SEQ ID NO: 2288275 - RNA, 19 nt, Homo sapiens
  misc_RNA (1)...(19): siRNA sense strand
gaaaguaggaucucggaca

SEQ ID NO: 2288276 - RNA, 19 nt, Homo sapiens
  misc_RNA (1)...(19): siRNA sense strand
agaacuucggcaugagaaa

SEQ ID NO: 2288277 - RNA, 19 nt, Homo sapiens
  misc_RNA (1)...(19): siRNA sense strand
auaaacagaugcagagcga

SEQ ID NO: 2288278 - RNA, 19 nt, Homo sapiens
  misc_RNA (1)...(19): siRNA sense strand
aguuaaugaagcagaauca

SEQ ID NO: 2288279 - RNA, 19 nt, Homo sapiens
  misc_RNA (1)...(19): siRNA sense strand
uuaaacaaagcaagagcaa

SEQ ID NO: 2288280 - RNA, 19 nt, Homo sapiens
  misc_RNA (1)...(19): siRNA sense strand
gaugagaagaagaggguug

SEQ ID NO: 2288281 - RNA, 19 nt, Homo sapiens
  misc_RNA (1)...(19): siRNA sense strand
aggaaucagcuuaccaaua

SEQ ID NO: 2288282 - RNA, 19 nt, Homo sapiens
  misc_RNA (1)...(19): siRNA sense strand
ccucuaagcaggaauuaau

SEQ ID NO: 2288283 - RNA, 19 nt, Homo sapiens
  misc_RNA (1)...(19): siRNA sense strand
ggaggguggaaaucagaaa

SEQ ID NO: 2288284 - RNA, 19 nt, Homo sapiens
  misc_RNA (1)...(19): siRNA sense strand
aaacagaugcagagcgagu

SEQ ID NO: 2288285 - RNA, 19 nt, Homo sapiens
  misc_RNA (1)...(19): siRNA sense strand
uggaaaggcagaagaucuu

SEQ ID NO: 2288286 - RNA, 19 nt, Homo sapiens
  misc_RNA (1)...(19): siRNA sense strand
agcaagagcaagaguugaa

SEQ ID NO: 2288287 - RNA, 19 nt, Homo sapiens
  misc_RNA (1)...(19): siRNA sense strand
aggaucaaagugaagguaa

SEQ ID NO: 2288288 - RNA, 19 nt, Homo sapiens
  misc_RNA (1)...(19): siRNA sense strand
acgucagaauuuagcagaa

SEQ ID NO: 2288289 - RNA, 19 nt, Homo sapiens
  misc_RNA (1)...(19): siRNA sense strand
cagcaagagaacaguuaca

SEQ ID NO: 2288290 - RNA, 19 nt, Homo sapiens
  misc_RNA (1)...(19): siRNA sense strand
agaagaggguugaugaacu

SEQ ID NO: 2288291 - RNA, 19 nt, Homo sapiens
  misc_RNA (1)...(19): siRNA sense strand
gggaggaaauacagaagcu

SEQ ID NO: 2288292 - RNA, 19 nt, Homo sapiens
  misc_RNA (1)...(19): siRNA sense strand
gaggaaauacagaagcuga

SEQ ID NO: 2288293 - RNA, 19 nt, Homo sapiens
  misc_RNA (1)...(19): siRNA sense strand
aagcagaaucagcaagaga

SEQ ID NO: 2288294 - RNA, 19 nt, Homo sapiens
  misc_RNA (1)...(19): siRNA sense strand
agaauuuagcagaagcaau

SEQ ID NO: 2288295 - RNA, 19 nt, Homo sapiens
  misc_RNA (1)...(19): siRNA sense strand
ccacuauauagaagaagau

SEQ ID NO: 2288296 - RNA, 19 nt, Homo sapiens
  misc_RNA (1)...(19): siRNA sense strand
auaucagacuggaccuaaa

SEQ ID NO: 2288297 - RNA, 19 nt, Homo sapiens
  misc_RNA (1)...(19): siRNA sense strand
uggaaaucagaaaggaaaa

SEQ ID NO: 2288298 - RNA, 19 nt, Homo sapiens
  misc_RNA (1)...(19): siRNA sense strand
gccuuaauaaaguggaaau

SEQ ID NO: 2288299 - RNA, 19 nt, Homo sapiens
  misc_RNA (1)...(19): siRNA sense strand
cuggaaaggcagaagaucu

SEQ ID NO: 2288300 - RNA, 19 nt, Homo sapiens
  misc_RNA (1)...(19): siRNA sense strand
cagcaacauauauagcaaa

SEQ ID NO: 2288301 - RNA, 19 nt, Homo sapiens
  misc_RNA (1)...(19): siRNA sense strand
uggcacugcaaaugugaaa

SEQ ID NO: 2288302 - RNA, 19 nt, Homo sapiens
  misc_RNA (1)...(19): siRNA sense strand
ugauuaacagcuugaaaga

SEQ ID NO: 2288303 - RNA, 19 nt, Homo sapiens
  misc_RNA (1)...(19): siRNA sense strand
agaugcagagggaggaaau

SEQ ID NO: 2288304 - RNA, 19 nt, Homo sapiens
  misc_RNA (1)...(19): siRNA sense strand
cugaagagagagcaggaga

SEQ ID NO: 2288305 - RNA, 19 nt, Homo sapiens
  misc_RNA (1)...(19): siRNA sense strand
cacgaauaaugcaggauca

SEQ ID NO: 2288306 - RNA, 19 nt, Homo sapiens
  misc_RNA (1)...(19): siRNA sense strand
agagagcaggagagcuaua

SEQ ID NO: 2288307 - RNA, 19 nt, Homo sapiens
  misc_RNA (1)...(19): siRNA sense strand
acgccuuaauaaaguggaa

SEQ ID NO: 2288308 - RNA, 19 nt, Homo sapiens
  misc_RNA (1)...(19): siRNA sense strand
aggaaauacagaagcugau

SEQ ID NO: 2288309 - RNA, 19 nt, Homo sapiens
  misc_RNA (1)...(19): siRNA sense strand
aggcacagcaaguuaauga

SEQ ID NO: 2288310 - RNA, 19 nt, Homo sapiens
  misc_RNA (1)...(19): siRNA sense strand
cauccaaacaagaacuaga

SEQ ID NO: 2288311 - RNA, 19 nt, Homo sapiens
  misc_RNA (1)...(19): siRNA sense strand
guuccacuauauagaagaa

SEQ ID NO: 2288312 - RNA, 19 nt, Homo sapiens
  misc_RNA (1)...(19): siRNA sense strand
uuaaagaucgagacgaaga

SEQ ID NO: 2288313 - RNA, 19 nt, Homo sapiens
  misc_RNA (1)...(19): siRNA sense strand
aaacagaccaugcuggaga

SEQ ID NO: 2288314 - RNA, 19 nt, Homo sapiens
  misc_RNA (1)...(19): siRNA sense strand
aaguaguaguaaugggucu

SEQ ID NO: 2288315 - RNA, 19 nt, Homo sapiens
  misc_RNA (1)...(19): siRNA sense strand
aggaaaaugugucaucaaa

SEQ ID NO: 2288316 - RNA, 19 nt, Homo sapiens
  misc_RNA (1)...(19): siRNA sense strand
agagacucaagaagaauua

SEQ ID NO: 2288317 - RNA, 19 nt, Homo sapiens
  misc_RNA (1)...(19): siRNA sense strand
gcucucaguaggaaagaca

SEQ ID NO: 2288318 - RNA, 19 nt, Homo sapiens
  misc_RNA (1)...(19): siRNA sense strand
cagaaaugcaccacgacca

SEQ ID NO: 2288319 - RNA, 19 nt, Homo sapiens
  misc_RNA (1)...(19): siRNA sense strand
ccaaagugccugagcgagu

SEQ ID NO: 2288320 - RNA, 19 nt, Homo sapiens
  misc_RNA (1)...(19): siRNA sense strand
uccaaaaggucgagagguu

SEQ ID NO: 2288321 - RNA, 19 nt, Homo sapiens
  misc_RNA (1)...(19): siRNA sense strand
gggaggagcauuacagcca

SEQ ID NO: 2288322 - RNA, 19 nt, Homo sapiens
  misc_RNA (1)...(19): siRNA sense strand
gcccaaagugccugagcga

SEQ ID NO: 2288323 - RNA, 19 nt, Homo sapiens
  misc_RNA (1)...(19): siRNA sense strand
ucuacaaccacaugcagaa

SEQ ID NO: 2288324 - RNA, 19 nt, Homo sapiens
  misc_RNA (1)...(19): siRNA sense strand
ggaaggaaguggaggucgu

SEQ ID NO: 2288325 - RNA, 19 nt, Homo sapiens
  misc_RNA (1)...(19): siRNA sense strand
ccauugaaacggaggcuga

SEQ ID NO: 2288326 - RNA, 19 nt, Homo sapiens
  misc_RNA (1)...(19): siRNA sense strand
guuugaugucacagggcaa

SEQ ID NO: 2288327 - RNA, 19 nt, Homo sapiens
  misc_RNA (1)...(19): siRNA sense strand
ggcagaagauccuggacca

SEQ ID NO: 2288328 - RNA, 19 nt, Homo sapiens
  misc_RNA (1)...(19): siRNA sense strand
cagcccggauugagggaga

SEQ ID NO: 2288329 - RNA, 19 nt, Homo sapiens
  misc_RNA (1)...(19): siRNA sense strand
uagacgagaacgagggcau

SEQ ID NO: 2288330 - RNA, 19 nt, Homo sapiens
  misc_RNA (1)...(19): siRNA sense strand
ggguggaggagcugcugaa

SEQ ID NO: 2288331 - RNA, 19 nt, Homo sapiens
  misc_RNA (1)...(19): siRNA sense strand
ccaucgaaacggcggauca

SEQ ID NO: 2288332 - RNA, 19 nt, Homo sapiens
  misc_RNA (1)...(19): siRNA sense strand
agucagaagccgagaaagc

SEQ ID NO: 2288333 - RNA, 19 nt, Homo sapiens
  misc_RNA (1)...(19): siRNA sense strand
gacgaaguccugugggaga

SEQ ID NO: 2288334 - RNA, 19 nt, Homo sapiens
  misc_RNA (1)...(19): siRNA sense strand
aguucaagcagaugacaga

SEQ ID NO: 2288335 - RNA, 19 nt, Homo sapiens
  misc_RNA (1)...(19): siRNA sense strand
ccuacauccggcaggacaa

SEQ ID NO: 2288336 - RNA, 19 nt, Homo sapiens
  misc_RNA (1)...(19): siRNA sense strand
aggauaaagauggagacaa

SEQ ID NO: 2288337 - RNA, 19 nt, Homo sapiens
  misc_RNA (1)...(19): siRNA sense strand
acaaggugguggcaggaga

SEQ ID NO: 2288338 - RNA, 19 nt, Homo sapiens
  misc_RNA (1)...(19): siRNA sense strand
cugccaaaguggagguggu

SEQ ID NO: 2288339 - RNA, 19 nt, Homo sapiens
  misc_RNA (1)...(19): siRNA sense strand
aggcugagcuccagagggu

SEQ ID NO: 2288340 - RNA, 19 nt, Homo sapiens
  misc_RNA (1)...(19): siRNA sense strand
ggugaugccugcaaagcca

SEQ ID NO: 2288341 - RNA, 19 nt, Homo sapiens
  misc_RNA (1)...(19): siRNA sense strand
gaggauaaagauggagaca

SEQ ID NO: 2288342 - RNA, 19 nt, Homo sapiens
  misc_RNA (1)...(19): siRNA sense strand
gggaggaugaggagaaggu

SEQ ID NO: 2288343 - RNA, 19 nt, Homo sapiens
  misc_RNA (1)...(19): siRNA sense strand
gcaccuacaugcugaccca

SEQ ID NO: 2288344 - RNA, 19 nt, Homo sapiens
  misc_RNA (1)...(19): siRNA sense strand
acgaaguccugugggagaa

SEQ ID NO: 2288345 - RNA, 19 nt, Homo sapiens
  misc_RNA (1)...(19): siRNA sense strand
ugccagacuuuguagguga

SEQ ID NO: 2288346 - RNA, 19 nt, Homo sapiens
  misc_RNA (1)...(19): siRNA sense strand
ccagaagguccgagagcug

SEQ ID NO: 2288347 - RNA, 19 nt, Homo sapiens
  misc_RNA (1)...(19): siRNA sense strand
uggaggucguggagaucau

SEQ ID NO: 2288348 - RNA, 19 nt, Homo sapiens
  misc_RNA (1)...(19): siRNA sense strand
ggagagggugacaggggaa

SEQ ID NO: 2288349 - RNA, 19 nt, Homo sapiens
  misc_RNA (1)...(19): siRNA sense strand
uggagcuggaggugagcaa

SEQ ID NO: 2288350 - RNA, 19 nt, Homo sapiens
  misc_RNA (1)...(19): siRNA sense strand
gagacaaggugguggcagg

SEQ ID NO: 2288351 - RNA, 19 nt, Homo sapiens
  misc_RNA (1)...(19): siRNA sense strand
cggcuugagcggcagaaga

SEQ ID NO: 2288352 - RNA, 19 nt, Homo sapiens
  misc_RNA (1)...(19): siRNA sense strand
ggaaggaaguggaggucgu

SEQ ID NO: 2288353 - RNA, 19 nt, Homo sapiens
  misc_RNA (1)...(19): siRNA sense strand
ccauugaaacggaggcuga

SEQ ID NO: 2288354 - RNA, 19 nt, Homo sapiens
  misc_RNA (1)...(19): siRNA sense strand
guuugaugucacagggcaa

SEQ ID NO: 2288355 - RNA, 19 nt, Homo sapiens
  misc_RNA (1)...(19): siRNA sense strand
ggcagaagauccuggacca

SEQ ID NO: 2288356 - RNA, 19 nt, Homo sapiens
  misc_RNA (1)...(19): siRNA sense strand
cagcccggauugagggaga

SEQ ID NO: 2288357 - RNA, 19 nt, Homo sapiens
  misc_RNA (1)...(19): siRNA sense strand
uagacgagaacgagggcau

SEQ ID NO: 2288358 - RNA, 19 nt, Homo sapiens
  misc_RNA (1)...(19): siRNA sense strand
ggguggaggagcugcugaa

SEQ ID NO: 2288359 - RNA, 19 nt, Homo sapiens
  misc_RNA (1)...(19): siRNA sense strand
ccaucgaaacggcggauca

SEQ ID NO: 2288360 - RNA, 19 nt, Homo sapiens
  misc_RNA (1)...(19): siRNA sense strand
agucagaagccgagaaagc

SEQ ID NO: 2288361 - RNA, 19 nt, Homo sapiens
  misc_RNA (1)...(19): siRNA sense strand
gacgaaguccugugggaga

SEQ ID NO: 2288362 - RNA, 19 nt, Homo sapiens
  misc_RNA (1)...(19): siRNA sense strand
aguucaagcagaugacaga

SEQ ID NO: 2288363 - RNA, 19 nt, Homo sapiens
  misc_RNA (1)...(19): siRNA sense strand
ccuacauccggcaggacaa

SEQ ID NO: 2288364 - RNA, 19 nt, Homo sapiens
  misc_RNA (1)...(19): siRNA sense strand
aggauaaagauggagacaa

SEQ ID NO: 2288365 - RNA, 19 nt, Homo sapiens
  misc_RNA (1)...(19): siRNA sense strand
acaaggugguggcaggaga

SEQ ID NO: 2288366 - RNA, 19 nt, Homo sapiens
  misc_RNA (1)...(19): siRNA sense strand
cugccaaaguggagguggu

SEQ ID NO: 2288367 - RNA, 19 nt, Homo sapiens
  misc_RNA (1)...(19): siRNA sense strand
aggcugagcuccagagggu

SEQ ID NO: 2288368 - RNA, 19 nt, Homo sapiens
  misc_RNA (1)...(19): siRNA sense strand
ggugaugccugcaaagcca

SEQ ID NO: 2288369 - RNA, 19 nt, Homo sapiens
  misc_RNA (1)...(19): siRNA sense strand
gaggauaaagauggagaca

SEQ ID NO: 2288370 - RNA, 19 nt, Homo sapiens
  misc_RNA (1)...(19): siRNA sense strand
gggaggaugaggagaaggu

SEQ ID NO: 2288371 - RNA, 19 nt, Homo sapiens
  misc_RNA (1)...(19): siRNA sense strand
gcaccuacaugcugaccca

SEQ ID NO: 2288372 - RNA, 19 nt, Homo sapiens
  misc_RNA (1)...(19): siRNA sense strand
acgaaguccugugggagaa

SEQ ID NO: 2288373 - RNA, 19 nt, Homo sapiens
  misc_RNA (1)...(19): siRNA sense strand
ugccagacuuuguagguga

SEQ ID NO: 2288374 - RNA, 19 nt, Homo sapiens
  misc_RNA (1)...(19): siRNA sense strand
ccagaagguccgagagcug

SEQ ID NO: 2288375 - RNA, 19 nt, Homo sapiens
  misc_RNA (1)...(19): siRNA sense strand
uggaggucguggagaucau

SEQ ID NO: 2288376 - RNA, 19 nt, Homo sapiens
  misc_RNA (1)...(19): siRNA sense strand
ggagagggugacaggggaa

SEQ ID NO: 2288377 - RNA, 19 nt, Homo sapiens
  misc_RNA (1)...(19): siRNA sense strand
uggagcuggaggugagcaa

SEQ ID NO: 2288378 - RNA, 19 nt, Homo sapiens
  misc_RNA (1)...(19): siRNA sense strand
gagacaaggugguggcagg

SEQ ID NO: 2288379 - RNA, 19 nt, Homo sapiens
  misc_RNA (1)...(19): siRNA sense strand
cggcuugagcggcagaaga

SEQ ID NO: 2288380 - RNA, 19 nt, Homo sapiens
  misc_RNA (1)...(19): siRNA sense strand
cggacaaaauagagaacaa

SEQ ID NO: 2288381 - RNA, 19 nt, Homo sapiens
  misc_RNA (1)...(19): siRNA sense strand
cugcagaaauccugaaaga

SEQ ID NO: 2288382 - RNA, 19 nt, Homo sapiens
  misc_RNA (1)...(19): siRNA sense strand
cuuaggauuuggagauaaa

SEQ ID NO: 2288383 - RNA, 19 nt, Homo sapiens
  misc_RNA (1)...(19): siRNA sense strand
aggaaguguucuagauauu

SEQ ID NO: 2288384 - RNA, 19 nt, Homo sapiens
  misc_RNA (1)...(19): siRNA sense strand
caagaugagacgagaaaga

SEQ ID NO: 2288385 - RNA, 19 nt, Homo sapiens
  misc_RNA (1)...(19): siRNA sense strand
cggaaagugcugagacuau

SEQ ID NO: 2288386 - RNA, 19 nt, Homo sapiens
  misc_RNA (1)...(19): siRNA sense strand
agucaguaauacagaagaa

SEQ ID NO: 2288387 - RNA, 19 nt, Homo sapiens
  misc_RNA (1)...(19): siRNA sense strand
uaauauuacugaugggaga

SEQ ID NO: 2288388 - RNA, 19 nt, Homo sapiens
  misc_RNA (1)...(19): siRNA sense strand
ggcaagaugagacgagaaa

SEQ ID NO: 2288389 - RNA, 19 nt, Homo sapiens
  misc_RNA (1)...(19): siRNA sense strand
cuaauaaugcagaagacaa

SEQ ID NO: 2288390 - RNA, 19 nt, Homo sapiens
  misc_RNA (1)...(19): siRNA sense strand
cagaagagaaacagcaaga

SEQ ID NO: 2288391 - RNA, 19 nt, Homo sapiens
  misc_RNA (1)...(19): siRNA sense strand
gugauaggcacuugggauu

SEQ ID NO: 2288392 - RNA, 19 nt, Homo sapiens
  misc_RNA (1)...(19): siRNA sense strand
ggaagaaaagaaagaggaa

SEQ ID NO: 2288393 - RNA, 19 nt, Homo sapiens
  misc_RNA (1)...(19): siRNA sense strand
agaaagaggaacugcccaa

SEQ ID NO: 2288394 - RNA, 19 nt, Homo sapiens
  misc_RNA (1)...(19): siRNA sense strand
cuacaaagauacuucaaca

SEQ ID NO: 2288395 - RNA, 19 nt, Homo sapiens
  misc_RNA (1)...(19): siRNA sense strand
cagucuaaacuacgaaaua

SEQ ID NO: 2288396 - RNA, 19 nt, Homo sapiens
  misc_RNA (1)...(19): siRNA sense strand
gcuguuagacgcaggaaau

SEQ ID NO: 2288397 - RNA, 19 nt, Homo sapiens
  misc_RNA (1)...(19): siRNA sense strand
caggguggcuacaaagaua

SEQ ID NO: 2288398 - RNA, 19 nt, Homo sapiens
  misc_RNA (1)...(19): siRNA sense strand
gagaagaugucaagcccuu

SEQ ID NO: 2288399 - RNA, 19 nt, Homo sapiens
  misc_RNA (1)...(19): siRNA sense strand
cugacaaugaagagccaaa

SEQ ID NO: 2288400 - RNA, 19 nt, Homo sapiens
  misc_RNA (1)...(19): siRNA sense strand
gggaauucuucaauccuua

SEQ ID NO: 2288401 - RNA, 19 nt, Homo sapiens
  misc_RNA (1)...(19): siRNA sense strand
ggugaauucaggaagacua

SEQ ID NO: 2288402 - RNA, 19 nt, Homo sapiens
  misc_RNA (1)...(19): siRNA sense strand
auagauaacaagugcagua

SEQ ID NO: 2288403 - RNA, 19 nt, Homo sapiens
  misc_RNA (1)...(19): siRNA sense strand
gcaccaguuagaagacaaa

SEQ ID NO: 2288404 - RNA, 19 nt, Homo sapiens
  misc_RNA (1)...(19): siRNA sense strand
ucaagaaacccgagggaag

SEQ ID NO: 2288405 - RNA, 19 nt, Homo sapiens
  misc_RNA (1)...(19): siRNA sense strand
ucuugauaggagugggaua

SEQ ID NO: 2288406 - RNA, 19 nt, Homo sapiens
  misc_RNA (1)...(19): siRNA sense strand
gugaauucaggaagacuaa

SEQ ID NO: 2288407 - RNA, 19 nt, Homo sapiens
  misc_RNA (1)...(19): siRNA sense strand
acccagagauacugcuaaa

SEQ ID NO: 2288408 - RNA, 19 nt, Homo sapiens
  misc_RNA (1)...(19): siRNA sense strand
aaauagagaacaacgagaa

SEQ ID NO: 2288409 - RNA, 19 nt, Homo sapiens
  misc_RNA (1)...(19): siRNA sense strand
uuauacaagaccagcaaua

SEQ ID NO: 2288410 - RNA, 19 nt, Homo sapiens
  misc_RNA (1)...(19): siRNA sense strand
cuucaagagcuucugauaa

SEQ ID NO: 2288411 - RNA, 19 nt, Homo sapiens
  misc_RNA (1)...(19): siRNA sense strand
gcagaaauccugaaagaag

SEQ ID NO: 2288412 - RNA, 19 nt, Homo sapiens
  misc_RNA (1)...(19): siRNA sense strand
ucuucaaaguccacauuua

SEQ ID NO: 2288413 - RNA, 19 nt, Homo sapiens
  misc_RNA (1)...(19): siRNA sense strand
gcauuuggcucuggaacaa

SEQ ID NO: 2288414 - RNA, 19 nt, Homo sapiens
  misc_RNA (1)...(19): siRNA sense strand
acaaaugaaagcuaagcaa

SEQ ID NO: 2288415 - RNA, 19 nt, Homo sapiens
  misc_RNA (1)...(19): siRNA sense strand
augaagagccaaaguguca

SEQ ID NO: 2288416 - RNA, 19 nt, Homo sapiens
  misc_RNA (1)...(19): siRNA sense strand
aauagagaacaacgagaaa

SEQ ID NO: 2288417 - RNA, 19 nt, Homo sapiens
  misc_RNA (1)...(19): siRNA sense strand
cuucaaauuuggugucuca

SEQ ID NO: 2288418 - RNA, 19 nt, Homo sapiens
  misc_RNA (1)...(19): siRNA sense strand
cuuugggaauucagagcaa

SEQ ID NO: 2288419 - RNA, 19 nt, Homo sapiens
  misc_RNA (1)...(19): siRNA sense strand
cguaaaaucuacugaggca

SEQ ID NO: 2288420 - RNA, 19 nt, Homo sapiens
  misc_RNA (1)...(19): siRNA sense strand
gggacaggcuuuggagaca

SEQ ID NO: 2288421 - RNA, 19 nt, Homo sapiens
  misc_RNA (1)...(19): siRNA sense strand
auguguagccugugaaaca

SEQ ID NO: 2288422 - RNA, 19 nt, Homo sapiens
  misc_RNA (1)...(19): siRNA sense strand
ggacagaagagaaacagca

SEQ ID NO: 2288423 - RNA, 19 nt, Homo sapiens
  misc_RNA (1)...(19): siRNA sense strand
gaaggaaguguucuagaua

SEQ ID NO: 2288424 - RNA, 19 nt, Homo sapiens
  misc_RNA (1)...(19): siRNA sense strand
aaauaugacacccggacaa

SEQ ID NO: 2288425 - RNA, 19 nt, Homo sapiens
  misc_RNA (1)...(19): siRNA sense strand
ccaaauaaaaguggcaaaa

SEQ ID NO: 2288426 - RNA, 19 nt, Homo sapiens
  misc_RNA (1)...(19): siRNA sense strand
ccuuaggauuuggagauaa

SEQ ID NO: 2288427 - RNA, 19 nt, Homo sapiens
  misc_RNA (1)...(19): siRNA sense strand
ugggaaggacagaagagaa

SEQ ID NO: 2288428 - RNA, 19 nt, Homo sapiens
  misc_RNA (1)...(19): siRNA sense strand
acaaaguuacagacaacaa

SEQ ID NO: 2288429 - RNA, 19 nt, Homo sapiens
  misc_RNA (1)...(19): siRNA sense strand
aaauugucacccagagaua

SEQ ID NO: 2288430 - RNA, 19 nt, Homo sapiens
  misc_RNA (1)...(19): siRNA sense strand
gcacaaaaucuggguuuaa

SEQ ID NO: 2288431 - RNA, 19 nt, Homo sapiens
  misc_RNA (1)...(19): siRNA sense strand
cuauaaaccccaugaguga

SEQ ID NO: 2288432 - RNA, 19 nt, Homo sapiens
  misc_RNA (1)...(19): siRNA sense strand
ggaacaacuccuaauucua

SEQ ID NO: 2288433 - RNA, 19 nt, Homo sapiens
  misc_RNA (1)...(19): siRNA sense strand
caacaaaugcauagccugu

SEQ ID NO: 2288434 - RNA, 19 nt, Homo sapiens
  misc_RNA (1)...(19): siRNA sense strand
gaaggacagaagagaaaca

SEQ ID NO: 2288435 - RNA, 19 nt, Homo sapiens
  misc_RNA (1)...(19): siRNA sense strand
gcaaaccaaagaugagaau

SEQ ID NO: 2288436 - RNA, 19 nt, Homo sapiens
  misc_RNA (1)...(19): siRNA sense strand
aaaccaaagaugagaauuc

SEQ ID NO: 2288437 - RNA, 19 nt, Homo sapiens
  misc_RNA (1)...(19): siRNA sense strand
uggcaagaugagacgagaa

SEQ ID NO: 2288438 - RNA, 19 nt, Homo sapiens
  misc_RNA (1)...(19): siRNA sense strand
cgucucaagcauuaacaaa

SEQ ID NO: 2288439 - RNA, 19 nt, Homo sapiens
  misc_RNA (1)...(19): siRNA sense strand
aagaaaagaaagaggaacu

SEQ ID NO: 2288440 - RNA, 19 nt, Homo sapiens
  misc_RNA (1)...(19): siRNA sense strand
uuuaacaagcacuggaaau

SEQ ID NO: 2288441 - RNA, 19 nt, Homo sapiens
  misc_RNA (1)...(19): siRNA sense strand
guaagacaucagaagcuaa

SEQ ID NO: 2288442 - RNA, 19 nt, Homo sapiens
  misc_RNA (1)...(19): siRNA sense strand
gaugagacgagaaagaaca

SEQ ID NO: 2288443 - RNA, 19 nt, Homo sapiens
  misc_RNA (1)...(19): siRNA sense strand
auagaaaccaagagugcuu

SEQ ID NO: 2288444 - RNA, 19 nt, Homo sapiens
  misc_RNA (1)...(19): siRNA sense strand
cagaaaauaaagaggacca

SEQ ID NO: 2288445 - RNA, 19 nt, Homo sapiens
  misc_RNA (1)...(19): siRNA sense strand
agaagacaaaugaaagcua

SEQ ID NO: 2288446 - RNA, 19 nt, Homo sapiens
  misc_RNA (1)...(19): siRNA sense strand
uggaguaggugguggaggu

SEQ ID NO: 2288447 - RNA, 19 nt, Homo sapiens
  misc_RNA (1)...(19): siRNA sense strand
ccugaaagaaggaaguguu

SEQ ID NO: 2288448 - RNA, 19 nt, Homo sapiens
  misc_RNA (1)...(19): siRNA sense strand
ugagaaaccaggaaguuca

SEQ ID NO: 2288449 - RNA, 19 nt, Homo sapiens
  misc_RNA (1)...(19): siRNA sense strand
uggacuuucuucugguuua

SEQ ID NO: 2288450 - RNA, 19 nt, Homo sapiens
  misc_RNA (1)...(19): siRNA sense strand
gagaacaagagcagcuuca

SEQ ID NO: 2288451 - RNA, 19 nt, Homo sapiens
  misc_RNA (1)...(19): siRNA sense strand
ggcaccaguuagaagacaa

SEQ ID NO: 2288452 - RNA, 19 nt, Homo sapiens
  misc_RNA (1)...(19): siRNA sense strand
ccuccuguucagagacuua

SEQ ID NO: 2288453 - RNA, 19 nt, Homo sapiens
  misc_RNA (1)...(19): siRNA sense strand
cucuggaggaggaggaaau

SEQ ID NO: 2288454 - RNA, 19 nt, Homo sapiens
  misc_RNA (1)...(19): siRNA sense strand
cugcaacagcugugggaau

SEQ ID NO: 2288455 - RNA, 19 nt, Homo sapiens
  misc_RNA (1)...(19): siRNA sense strand
gggcaauguccgugcugau

SEQ ID NO: 2288456 - RNA, 19 nt, Homo sapiens
  misc_RNA (1)...(19): siRNA sense strand
ucuucagaauggaggauga

SEQ ID NO: 2288457 - RNA, 19 nt, Homo sapiens
  misc_RNA (1)...(19): siRNA sense strand
ugauuauugaugagggaga

SEQ ID NO: 2288458 - RNA, 19 nt, Homo sapiens
  misc_RNA (1)...(19): siRNA sense strand
aggcgguacucaagggcau

SEQ ID NO: 2288459 - RNA, 19 nt, Homo sapiens
  misc_RNA (1)...(19): siRNA sense strand
ccugauuauugaugaggga

SEQ ID NO: 2288460 - RNA, 19 nt, Homo sapiens
  misc_RNA (1)...(19): siRNA sense strand
cuuacaaacaacugcaaca

SEQ ID NO: 2288461 - RNA, 19 nt, Homo sapiens
  misc_RNA (1)...(19): siRNA sense strand
uauccaagaucacagggaa

SEQ ID NO: 2288462 - RNA, 19 nt, Homo sapiens
  misc_RNA (1)...(19): siRNA sense strand
cagcugaaggugugggaug

SEQ ID NO: 2288463 - RNA, 19 nt, Homo sapiens
  misc_RNA (1)...(19): siRNA sense strand
gcuucaggcuggagggcau

SEQ ID NO: 2288464 - RNA, 19 nt, Homo sapiens
  misc_RNA (1)...(19): siRNA sense strand
ggagggaacucacaggcau

SEQ ID NO: 2288465 - RNA, 19 nt, Homo sapiens
  misc_RNA (1)...(19): siRNA sense strand
gcagaugggcugaagguug

SEQ ID NO: 2288466 - RNA, 19 nt, Homo sapiens
  misc_RNA (1)...(19): siRNA sense strand
guuggaaggaccagcgcaa

SEQ ID NO: 2288467 - RNA, 19 nt, Homo sapiens
  misc_RNA (1)...(19): siRNA sense strand
gcauacaaguacccggaca

SEQ ID NO: 2288468 - RNA, 19 nt, Homo sapiens
  misc_RNA (1)...(19): siRNA sense strand
cggccaugucugagaacga

SEQ ID NO: 2288469 - RNA, 19 nt, Homo sapiens
  misc_RNA (1)...(19): siRNA sense strand
guguaaaagaagucaaaca

SEQ ID NO: 2288470 - RNA, 19 nt, Homo sapiens
  misc_RNA (1)...(19): siRNA sense strand
gcaaguuguggguuggcua

SEQ ID NO: 2288471 - RNA, 19 nt, Homo sapiens
  misc_RNA (1)...(19): siRNA sense strand
ggggagaacuacugggaug

SEQ ID NO: 2288472 - RNA, 19 nt, Homo sapiens
  misc_RNA (1)...(19): siRNA sense strand
gccgagagcugcuacgaga

SEQ ID NO: 2288473 - RNA, 19 nt, Homo sapiens
  misc_RNA (1)...(19): siRNA sense strand
ggaaggaggcuguggaucc

SEQ ID NO: 2288474 - RNA, 19 nt, Homo sapiens
  misc_RNA (1)...(19): siRNA sense strand
cauacaaguacccggacau

SEQ ID NO: 2288475 - RNA, 19 nt, Homo sapiens
  misc_RNA (1)...(19): siRNA sense strand
cagcgcaaguuguggguug

SEQ ID NO: 2288476 - RNA, 19 nt, Homo sapiens
  misc_RNA (1)...(19): siRNA sense strand
aggaugaggaccaggacua

SEQ ID NO: 2288477 - RNA, 19 nt, Homo sapiens
  misc_RNA (1)...(19): siRNA sense strand
gaacagaagcccugcgcca

SEQ ID NO: 2288478 - RNA, 19 nt, Homo sapiens
  misc_RNA (1)...(19): siRNA sense strand
gggacgacguugaagccau

SEQ ID NO: 2288479 - RNA, 19 nt, Homo sapiens
  misc_RNA (1)...(19): siRNA sense strand
aggacuacaucguggacca

SEQ ID NO: 2288480 - RNA, 19 nt, Homo sapiens
  misc_RNA (1)...(19): siRNA sense strand
gggcugagaaggagaggcu

SEQ ID NO: 2288481 - RNA, 19 nt, Homo sapiens
  misc_RNA (1)...(19): siRNA sense strand
uggagaagcuggugcaggu

SEQ ID NO: 2288482 - RNA, 19 nt, Homo sapiens
  misc_RNA (1)...(19): siRNA sense strand
gggagaagcagcagcgcaa

SEQ ID NO: 2288483 - RNA, 19 nt, Homo sapiens
  misc_RNA (1)...(19): siRNA sense strand
cuucgaaguggcugagaaa

SEQ ID NO: 2288484 - RNA, 19 nt, Homo sapiens
  misc_RNA (1)...(19): siRNA sense strand
ccaucaacgagguggagaa

SEQ ID NO: 2288485 - RNA, 19 nt, Homo sapiens
  misc_RNA (1)...(19): siRNA sense strand
gcagagaaguuccggcaga

SEQ ID NO: 2288486 - RNA, 19 nt, Homo sapiens
  misc_RNA (1)...(19): siRNA sense strand
ccaagaugcuggaugcaga

SEQ ID NO: 2288487 - RNA, 19 nt, Homo sapiens
  misc_RNA (1)...(19): siRNA sense strand
agaggaucgcugagagcaa

SEQ ID NO: 2288488 - RNA, 19 nt, Homo sapiens
  misc_RNA (1)...(19): siRNA sense strand
uggaagagaccucggccaa

SEQ ID NO: 2288489 - RNA, 19 nt, Homo sapiens
  misc_RNA (1)...(19): siRNA sense strand
acacauagucgcagggaag

SEQ ID NO: 2288490 - RNA, 19 nt, Homo sapiens
  misc_RNA (1)...(19): siRNA sense strand
gcaaagaugacccugggaa

SEQ ID NO: 2288491 - RNA, 19 nt, Homo sapiens
  misc_RNA (1)...(19): siRNA sense strand
agaagcagcuggaggccau

SEQ ID NO: 2288492 - RNA, 19 nt, Homo sapiens
  misc_RNA (1)...(19): siRNA sense strand
aagagauuguggacggcaa

SEQ ID NO: 2288493 - RNA, 19 nt, Homo sapiens
  misc_RNA (1)...(19): siRNA sense strand
gggagaaggugcagcagcu

SEQ ID NO: 2288494 - RNA, 19 nt, Homo sapiens
  misc_RNA (1)...(19): siRNA sense strand
gagaagugccagcuggaga

SEQ ID NO: 2288495 - RNA, 19 nt, Homo sapiens
  misc_RNA (1)...(19): siRNA sense strand
agugccagcuggagaucaa

SEQ ID NO: 2288496 - RNA, 19 nt, Homo sapiens
  misc_RNA (1)...(19): siRNA sense strand
ccuucgaaguggcugagaa

SEQ ID NO: 2288497 - RNA, 19 nt, Homo sapiens
  misc_RNA (1)...(19): siRNA sense strand
aguaugacaagcugaggaa

SEQ ID NO: 2288498 - RNA, 19 nt, Homo sapiens
  misc_RNA (1)...(19): siRNA sense strand
cgcaagaccuucacggcau

SEQ ID NO: 2288499 - RNA, 19 nt, Homo sapiens
  misc_RNA (1)...(19): siRNA sense strand
agggugaggccgaguucaa

SEQ ID NO: 2288500 - RNA, 19 nt, Homo sapiens
  misc_RNA (1)...(19): siRNA sense strand
agaacauugaugaggacuu

SEQ ID NO: 2288501 - RNA, 19 nt, Homo sapiens
  misc_RNA (1)...(19): siRNA sense strand
cugucaaccaagagaacga

SEQ ID NO: 2288502 - RNA, 19 nt, Homo sapiens
  misc_RNA (1)...(19): siRNA sense strand
aggacaucuccguggaaga

SEQ ID NO: 2288503 - RNA, 19 nt, Homo sapiens
  misc_RNA (1)...(19): siRNA sense strand
ccacacuaucggacaucaa

SEQ ID NO: 2288504 - RNA, 19 nt, Homo sapiens
  misc_RNA (1)...(19): siRNA sense strand
ucgaggagauugagggccu

SEQ ID NO: 2288505 - RNA, 19 nt, Homo sapiens
  misc_RNA (1)...(19): siRNA sense strand
ccuucaaccacuucgacaa

SEQ ID NO: 2288506 - RNA, 19 nt, Homo sapiens
  misc_RNA (1)...(19): siRNA sense strand
agaacgaccggcaggguga

SEQ ID NO: 2288507 - RNA, 19 nt, Homo sapiens
  misc_RNA (1)...(19): siRNA sense strand
ccuuguauggcgagagcga

SEQ ID NO: 2288508 - RNA, 19 nt, Homo sapiens
  misc_RNA (1)...(19): siRNA sense strand
gggcagaagagauugugga

SEQ ID NO: 2288509 - RNA, 19 nt, Homo sapiens
  misc_RNA (1)...(19): siRNA sense strand
ugggcuacgacguggagaa

SEQ ID NO: 2288510 - RNA, 19 nt, Homo sapiens
  misc_RNA (1)...(19): siRNA sense strand
agagcaagcagcaguccaa

SEQ ID NO: 2288511 - RNA, 19 nt, Homo sapiens
  misc_RNA (1)...(19): siRNA sense strand
gacacauagucgcagggaa

SEQ ID NO: 2288512 - RNA, 19 nt, Homo sapiens
  misc_RNA (1)...(19): siRNA sense strand
cagaagagauuguggacgg

SEQ ID NO: 2288513 - RNA, 19 nt, Homo sapiens
  misc_RNA (1)...(19): siRNA sense strand
augcagaggacaucgugaa

SEQ ID NO: 2288514 - RNA, 19 nt, Homo sapiens
  misc_RNA (1)...(19): siRNA sense strand
gcaucagccaggagcagau

SEQ ID NO: 2288515 - RNA, 19 nt, Homo sapiens
  misc_RNA (1)...(19): siRNA sense strand
ucgagaacauugaugagga

SEQ ID NO: 2288516 - RNA, 19 nt, Homo sapiens
  misc_RNA (1)...(19): siRNA sense strand
gcugagaaauaccucgaca

SEQ ID NO: 2288517 - RNA, 19 nt, Homo sapiens
  misc_RNA (1)...(19): siRNA sense strand
aggccuggacugacgggaa

SEQ ID NO: 2288518 - RNA, 19 nt, Homo sapiens
  misc_RNA (1)...(19): siRNA sense strand
aaucaaaaugugugggaaa

SEQ ID NO: 2288519 - RNA, 19 nt, Homo sapiens
  misc_RNA (1)...(19): siRNA sense strand
augaagacauggagaaaau

SEQ ID NO: 2288520 - RNA, 19 nt, Homo sapiens
  misc_RNA (1)...(19): siRNA sense strand
ggacggcaauggauacaua

SEQ ID NO: 2288521 - RNA, 19 nt, Homo sapiens
  misc_RNA (1)...(19): siRNA sense strand
cugaaggaucugugcgaga

SEQ ID NO: 2288522 - RNA, 19 nt, Homo sapiens
  misc_RNA (1)...(19): siRNA sense strand
aagaagaacauaauggcuu

SEQ ID NO: 2288523 - RNA, 19 nt, Homo sapiens
  misc_RNA (1)...(19): siRNA sense strand
caguaugggcaaagagaug

SEQ ID NO: 2288524 - RNA, 19 nt, Homo sapiens
  misc_RNA (1)...(19): siRNA sense strand
acaacauacaagaagaaca

SEQ ID NO: 2288525 - RNA, 19 nt, Homo sapiens
  misc_RNA (1)...(19): siRNA sense strand
uguaugaucaggacggcaa

SEQ ID NO: 2288526 - RNA, 19 nt, Homo sapiens
  misc_RNA (1)...(19): siRNA sense strand
ucauagaaacugaggagcu

SEQ ID NO: 2288527 - RNA, 19 nt, Homo sapiens
  misc_RNA (1)...(19): siRNA sense strand
ggagggaagcuguaccgaa

SEQ ID NO: 2288528 - RNA, 19 nt, Homo sapiens
  misc_RNA (1)...(19): siRNA sense strand
aguuaucaccugaaaugaa

SEQ ID NO: 2288529 - RNA, 19 nt, Homo sapiens
  misc_RNA (1)...(19): siRNA sense strand
agacuguugaugacacaaa

SEQ ID NO: 2288530 - RNA, 19 nt, Homo sapiens
  misc_RNA (1)...(19): siRNA sense strand
guggaucaguaugggcaaa

SEQ ID NO: 2288531 - RNA, 19 nt, Homo sapiens
  misc_RNA (1)...(19): siRNA sense strand
cgcgaaagaaggcuggauu

SEQ ID NO: 2288532 - RNA, 19 nt, Homo sapiens
  misc_RNA (1)...(19): siRNA sense strand
gagggaagcuguaccgaac

SEQ ID NO: 2288533 - RNA, 19 nt, Homo sapiens
  misc_RNA (1)...(19): siRNA sense strand
gaauuguagaguuggcuca

SEQ ID NO: 2288534 - RNA, 19 nt, Homo sapiens
  misc_RNA (1)...(19): siRNA sense strand
gcgagaagaauaaacagga

SEQ ID NO: 2288535 - RNA, 19 nt, Homo sapiens
  misc_RNA (1)...(19): siRNA sense strand
agaagaauaaacaggaucu

SEQ ID NO: 2288536 - RNA, 19 nt, Homo sapiens
  misc_RNA (1)...(19): siRNA sense strand
ugagaaagcuggaggugga

SEQ ID NO: 2288537 - RNA, 19 nt, Homo sapiens
  misc_RNA (1)...(19): siRNA sense strand
ugguagaggacauggaaaa

SEQ ID NO: 2288538 - RNA, 19 nt, Homo sapiens
  misc_RNA (1)...(19): siRNA sense strand
gaucaaaggcugcugggau

SEQ ID NO: 2288539 - RNA, 19 nt, Homo sapiens
  misc_RNA (1)...(19): siRNA sense strand
ucauaaagaaggcuggaga

SEQ ID NO: 2288540 - RNA, 19 nt, Homo sapiens
  misc_RNA (1)...(19): siRNA sense strand
agaaguacgcugaacgaga

SEQ ID NO: 2288541 - RNA, 19 nt, Homo sapiens
  misc_RNA (1)...(19): siRNA sense strand
agguggugggaaaggauua

SEQ ID NO: 2288542 - RNA, 19 nt, Homo sapiens
  misc_RNA (1)...(19): siRNA sense strand
gaugaaacugugagugacu

SEQ ID NO: 2288543 - RNA, 19 nt, Homo sapiens
  misc_RNA (1)...(19): siRNA sense strand
cugaaaauugccagagaca

SEQ ID NO: 2288544 - RNA, 19 nt, Homo sapiens
  misc_RNA (1)...(19): siRNA sense strand
caaagaagaucaaaggcug

SEQ ID NO: 2288545 - RNA, 19 nt, Homo sapiens
  misc_RNA (1)...(19): siRNA sense strand
acgagaucuacuuuggaaa

SEQ ID NO: 2288546 - RNA, 19 nt, Homo sapiens
  misc_RNA (1)...(19): siRNA sense strand
agcuggagguggaagccaa

SEQ ID NO: 2288547 - RNA, 19 nt, Homo sapiens
  misc_RNA (1)...(19): siRNA sense strand
uuaccagacagauggagaa

SEQ ID NO: 2288548 - RNA, 19 nt, Homo sapiens
  misc_RNA (1)...(19): siRNA sense strand
aaacagaaggacagggaga

SEQ ID NO: 2288549 - RNA, 19 nt, Homo sapiens
  misc_RNA (1)...(19): siRNA sense strand
cggccagaugggaggauua

SEQ ID NO: 2288550 - RNA, 19 nt, Homo sapiens
  misc_RNA (1)...(19): siRNA sense strand
ccacuaucaaagaggacua

SEQ ID NO: 2288551 - RNA, 19 nt, Homo sapiens
  misc_RNA (1)...(19): siRNA sense strand
cugaagccauagaggacaa

SEQ ID NO: 2288552 - RNA, 19 nt, Homo sapiens
  misc_RNA (1)...(19): siRNA sense strand
aggaguggacagugacaaa

SEQ ID NO: 2288553 - RNA, 19 nt, Homo sapiens
  misc_RNA (1)...(19): siRNA sense strand
agaccaggauagaggagau

SEQ ID NO: 2288554 - RNA, 19 nt, Homo sapiens
  misc_RNA (1)...(19): siRNA sense strand
cgacgaaggugguggagag

SEQ ID NO: 2288555 - RNA, 19 nt, Homo sapiens
  misc_RNA (1)...(19): siRNA sense strand
accaaagguuaaaggaaaa

SEQ ID NO: 2288556 - RNA, 19 nt, Homo sapiens
  misc_RNA (1)...(19): siRNA sense strand
acauaugggaacagugcua

SEQ ID NO: 2288557 - RNA, 19 nt, Homo sapiens
  misc_RNA (1)...(19): siRNA sense strand
ccaagaggcuggacaggga

SEQ ID NO: 2288558 - RNA, 19 nt, Homo sapiens
  misc_RNA (1)...(19): siRNA sense strand
gagaaaacagggagcagua

SEQ ID NO: 2288559 - RNA, 19 nt, Homo sapiens
  misc_RNA (1)...(19): siRNA sense strand
gguauuaucaagacagcuu

SEQ ID NO: 2288560 - RNA, 19 nt, Homo sapiens
  misc_RNA (1)...(19): siRNA sense strand
aagcaaaggcagaucaguu

SEQ ID NO: 2288561 - RNA, 19 nt, Homo sapiens
  misc_RNA (1)...(19): siRNA sense strand
caucaaugacaaugaacca

SEQ ID NO: 2288562 - RNA, 19 nt, Homo sapiens
  misc_RNA (1)...(19): siRNA sense strand
gggaaucuuaacucggaaa

SEQ ID NO: 2288563 - RNA, 19 nt, Homo sapiens
  misc_RNA (1)...(19): siRNA sense strand
agcuauaaacagaaggaca

SEQ ID NO: 2288564 - RNA, 19 nt, Homo sapiens
  misc_RNA (1)...(19): siRNA sense strand
cgaaacuucuugaccgaga

SEQ ID NO: 2288565 - RNA, 19 nt, Homo sapiens
  misc_RNA (1)...(19): siRNA sense strand
ugauucaagccaaggauau

SEQ ID NO: 2288566 - RNA, 19 nt, Homo sapiens
  misc_RNA (1)...(19): siRNA sense strand
cccuggagcucucuggaaa

SEQ ID NO: 2288567 - RNA, 19 nt, Homo sapiens
  misc_RNA (1)...(19): siRNA sense strand
cgguuagaauuguggugga

SEQ ID NO: 2288568 - RNA, 19 nt, Homo sapiens
  misc_RNA (1)...(19): siRNA sense strand
agugauagcaacagagauc

SEQ ID NO: 2288569 - RNA, 19 nt, Homo sapiens
  misc_RNA (1)...(19): siRNA sense strand
cgguacauuuguuguccaa

SEQ ID NO: 2288570 - RNA, 19 nt, Homo sapiens
  misc_RNA (1)...(19): siRNA sense strand
cuacaguauucuacaggga

SEQ ID NO: 2288571 - RNA, 19 nt, Homo sapiens
  misc_RNA (1)...(19): siRNA sense strand
gcucagauaaacaccacaa

SEQ ID NO: 2288572 - RNA, 19 nt, Homo sapiens
  misc_RNA (1)...(19): siRNA sense strand
cgucacagcccaagaucca

SEQ ID NO: 2288573 - RNA, 19 nt, Homo sapiens
  misc_RNA (1)...(19): siRNA sense strand
gcucaagcuauaaacagaa

SEQ ID NO: 2288574 - RNA, 19 nt, Homo sapiens
  misc_RNA (1)...(19): siRNA sense strand
agagaagaugcucagauaa

SEQ ID NO: 2288575 - RNA, 19 nt, Homo sapiens
  misc_RNA (1)...(19): siRNA sense strand
cgaaggugguggagaggag

SEQ ID NO: 2288576 - RNA, 19 nt, Homo sapiens
  misc_RNA (1)...(19): siRNA sense strand
agucugaauucaucaucaa

SEQ ID NO: 2288577 - RNA, 19 nt, Homo sapiens
  misc_RNA (1)...(19): siRNA sense strand
acaguauucuacagggaca

SEQ ID NO: 2288578 - RNA, 19 nt, Homo sapiens
  misc_RNA (1)...(19): siRNA sense strand
cugcuauggcacaacauua

SEQ ID NO: 2288579 - RNA, 19 nt, Homo sapiens
  misc_RNA (1)...(19): siRNA sense strand
acaaauaagagaagaugcu

SEQ ID NO: 2288580 - RNA, 19 nt, Homo sapiens
  misc_RNA (1)...(19): siRNA sense strand
gcuauaaacagaaggacag

SEQ ID NO: 2288581 - RNA, 19 nt, Homo sapiens
  misc_RNA (1)...(19): siRNA sense strand
auucaagacaacaaagaca

SEQ ID NO: 2288582 - RNA, 19 nt, Homo sapiens
  misc_RNA (1)...(19): siRNA sense strand
ucaaagcagcacugggaca

SEQ ID NO: 2288583 - RNA, 19 nt, Homo sapiens
  misc_RNA (1)...(19): siRNA sense strand
auggaggaguggacaguga

SEQ ID NO: 2288584 - RNA, 19 nt, Homo sapiens
  misc_RNA (1)...(19): siRNA sense strand
uggcacaacauuacaguga

SEQ ID NO: 2288585 - RNA, 19 nt, Homo sapiens
  misc_RNA (1)...(19): siRNA sense strand
aagccauagaggacaacaa

SEQ ID NO: 2288586 - RNA, 19 nt, Homo sapiens
  misc_RNA (1)...(19): siRNA sense strand
aggagauggagcaggagau

SEQ ID NO: 2288587 - RNA, 19 nt, Homo sapiens
  misc_RNA (1)...(19): siRNA sense strand
aaauaagagaagaugcuca

SEQ ID NO: 2288588 - RNA, 19 nt, Homo sapiens
  misc_RNA (1)...(19): siRNA sense strand
aagcaaaguagucgaguac

SEQ ID NO: 2288589 - RNA, 19 nt, Homo sapiens
  misc_RNA (1)...(19): siRNA sense strand
auuaucaguaugugggcaa

SEQ ID NO: 2288590 - RNA, 19 nt, Homo sapiens
  misc_RNA (1)...(19): siRNA sense strand
ugaaaacacaggcgacaua

SEQ ID NO: 2288591 - RNA, 19 nt, Homo sapiens
  misc_RNA (1)...(19): siRNA sense strand
gauccaacauaugggaaca

SEQ ID NO: 2288592 - RNA, 19 nt, Homo sapiens
  misc_RNA (1)...(19): siRNA sense strand
accaauuggcagaaucaaa

SEQ ID NO: 2288593 - RNA, 19 nt, Homo sapiens
  misc_RNA (1)...(19): siRNA sense strand
cugaaauugaguacagcau

SEQ ID NO: 2288594 - RNA, 19 nt, Homo sapiens
  misc_RNA (1)...(19): siRNA sense strand
agggauuauaacugucaaa

SEQ ID NO: 2288595 - RNA, 19 nt, Homo sapiens
  misc_RNA (1)...(19): siRNA sense strand
cauuacagugauagcaaca

SEQ ID NO: 2288596 - RNA, 19 nt, Homo sapiens
  misc_RNA (1)...(19): siRNA sense strand
guucaaagcagcacuggga

SEQ ID NO: 2288597 - RNA, 19 nt, Homo sapiens
  misc_RNA (1)...(19): siRNA sense strand
ccacggaugcagaucaaga

SEQ ID NO: 2288598 - RNA, 19 nt, Homo sapiens
  misc_RNA (1)...(19): siRNA sense strand
uuacauccuucgagcucaa

SEQ ID NO: 2288599 - RNA, 19 nt, Homo sapiens
  misc_RNA (1)...(19): siRNA sense strand
ggaaacccaggaagggauu

SEQ ID NO: 2288600 - RNA, 19 nt, Homo sapiens
  misc_RNA (1)...(19): siRNA sense strand
uuagaauugugguggagga

SEQ ID NO: 2288601 - RNA, 19 nt, Homo sapiens
  misc_RNA (1)...(19): siRNA sense strand
cgacacacagauauggaca

SEQ ID NO: 2288602 - RNA, 19 nt, Homo sapiens
  misc_RNA (1)...(19): siRNA sense strand
aggagauggaucacuuaaa

SEQ ID NO: 2288603 - RNA, 19 nt, Homo sapiens
  misc_RNA (1)...(19): siRNA sense strand
auaugggaacagugcuaaa

SEQ ID NO: 2288604 - RNA, 19 nt, Homo sapiens
  misc_RNA (1)...(19): siRNA sense strand
ugaaucagaaacagguauu

SEQ ID NO: 2288605 - RNA, 19 nt, Homo sapiens
  misc_RNA (1)...(19): siRNA sense strand
ggaccaccaccgugaacau

SEQ ID NO: 2288606 - RNA, 19 nt, Homo sapiens
  misc_RNA (1)...(19): siRNA sense strand
ugguggaggauguagauga

SEQ ID NO: 2288607 - RNA, 19 nt, Homo sapiens
  misc_RNA (1)...(19): siRNA sense strand
agauuguaguuguggauca

SEQ ID NO: 2288608 - RNA, 19 nt, Homo sapiens
  misc_RNA (1)...(19): siRNA sense strand
guucagaucaagucggaca

SEQ ID NO: 2288609 - RNA, 19 nt, Homo sapiens
  misc_RNA (1)...(19): siRNA sense strand
uugugaaggcccuggacua

SEQ ID NO: 2288610 - RNA, 19 nt, Homo sapiens
  misc_RNA (1)...(19): siRNA sense strand
cgacaaguucacagggaag

SEQ ID NO: 2288611 - RNA, 19 nt, Homo sapiens
  misc_RNA (1)...(19): siRNA sense strand
ucgacaaguucacagggaa

SEQ ID NO: 2288612 - RNA, 19 nt, Homo sapiens
  misc_RNA (1)...(19): siRNA sense strand
ucuaugacuacgaggguga

SEQ ID NO: 2288613 - RNA, 19 nt, Homo sapiens
  misc_RNA (1)...(19): siRNA sense strand
cuucaggcuaagagcguuu

SEQ ID NO: 2288614 - RNA, 19 nt, Homo sapiens
  misc_RNA (1)...(19): siRNA sense strand
uggcagacauguaugggca

SEQ ID NO: 2288615 - RNA, 19 nt, Homo sapiens
  misc_RNA (1)...(19): siRNA sense strand
cugcagaggcucagcuacu

SEQ ID NO: 2288616 - RNA, 19 nt, Homo sapiens
  misc_RNA (1)...(19): siRNA sense strand
ucagcuacuccaaggacua

SEQ ID NO: 2288617 - RNA, 19 nt, Homo sapiens
  misc_RNA (1)...(19): siRNA sense strand
ccgagaaccacaagcgucu

SEQ ID NO: 2288618 - RNA, 19 nt, Homo sapiens
  misc_RNA (1)...(19): siRNA sense strand
cgaucagcguauccgagaa

SEQ ID NO: 2288619 - RNA, 19 nt, Homo sapiens
  misc_RNA (1)...(19): siRNA sense strand
ucgacgagcucacaggaga

SEQ ID NO: 2288620 - RNA, 19 nt, Homo sapiens
  misc_RNA (1)...(19): siRNA sense strand
cagagaagccagagaacau

SEQ ID NO: 2288621 - RNA, 19 nt, Homo sapiens
  misc_RNA (1)...(19): siRNA sense strand
cucaaguaccggagggaua

SEQ ID NO: 2288622 - RNA, 19 nt, Homo sapiens
  misc_RNA (1)...(19): siRNA sense strand
ugguucagcuguugggaaa

SEQ ID NO: 2288623 - RNA, 19 nt, Homo sapiens
  misc_RNA (1)...(19): siRNA sense strand
ccaaacacauugaagguga

SEQ ID NO: 2288624 - RNA, 19 nt, Homo sapiens
  misc_RNA (1)...(19): siRNA sense strand
gcuauauguuccugaguca

SEQ ID NO: 2288625 - RNA, 19 nt, Homo sapiens
  misc_RNA (1)...(19): siRNA sense strand
cagcauucuccaaggacaa

SEQ ID NO: 2288626 - RNA, 19 nt, Homo sapiens
  misc_RNA (1)...(19): siRNA sense strand
cugacaaggcggaggagau

SEQ ID NO: 2288627 - RNA, 19 nt, Homo sapiens
  misc_RNA (1)...(19): siRNA sense strand
aaacaaaccucuugagccu

SEQ ID NO: 2288628 - RNA, 19 nt, Homo sapiens
  misc_RNA (1)...(19): siRNA sense strand
ugggcaaguuggagggcuu

SEQ ID NO: 2288629 - RNA, 19 nt, Homo sapiens
  misc_RNA (1)...(19): siRNA sense strand
cuacuaugcugaagaucau

SEQ ID NO: 2288630 - RNA, 19 nt, Homo sapiens
  misc_RNA (1)...(19): siRNA sense strand
gcggagaggaagacacaga

SEQ ID NO: 2288631 - RNA, 19 nt, Homo sapiens
  misc_RNA (1)...(19): siRNA sense strand
cguagucauucaagccaaa

SEQ ID NO: 2288632 - RNA, 19 nt, Homo sapiens
  misc_RNA (1)...(19): siRNA sense strand
gccacugaacuaugagaaa

SEQ ID NO: 2288633 - RNA, 19 nt, Homo sapiens
  misc_RNA (1)...(19): siRNA sense strand
ucauggaagucuacgaaaa

SEQ ID NO: 2288634 - RNA, 19 nt, Homo sapiens
  misc_RNA (1)...(19): siRNA sense strand
uagcugaacucuauggaga

SEQ ID NO: 2288635 - RNA, 19 nt, Homo sapiens
  misc_RNA (1)...(19): siRNA sense strand
aggaagacacagaggccuu

SEQ ID NO: 2288636 - RNA, 19 nt, Homo sapiens
  misc_RNA (1)...(19): siRNA sense strand
acacagaggccuuugacau

SEQ ID NO: 2288637 - RNA, 19 nt, Homo sapiens
  misc_RNA (1)...(19): siRNA sense strand
gcaaagacuggcagaagca

SEQ ID NO: 2288638 - RNA, 19 nt, Homo sapiens
  misc_RNA (1)...(19): siRNA sense strand
gaucauuucagaagaggau

SEQ ID NO: 2288639 - RNA, 19 nt, Homo sapiens
  misc_RNA (1)...(19): siRNA sense strand
cauugaaggugaaaccgaa

SEQ ID NO: 2288640 - RNA, 19 nt, Homo sapiens
  misc_RNA (1)...(19): siRNA sense strand
gcuacuaugcugaagauca

SEQ ID NO: 2288641 - RNA, 19 nt, Homo sapiens
  misc_RNA (1)...(19): siRNA sense strand
cauaaauggugauggcaug

SEQ ID NO: 2288642 - RNA, 19 nt, Homo sapiens
  misc_RNA (1)...(19): siRNA sense strand
agaagaaacuccaugguac

SEQ ID NO: 2288643 - RNA, 19 nt, Homo sapiens
  misc_RNA (1)...(19): siRNA sense strand
cauagaaggagcaaauaca

SEQ ID NO: 2288644 - RNA, 19 nt, Homo sapiens
  misc_RNA (1)...(19): siRNA sense strand
cagaagaggauguacggga

SEQ ID NO: 2288645 - RNA, 19 nt, Homo sapiens
  misc_RNA (1)...(19): siRNA sense strand
gguuugugcaugcgagaga

SEQ ID NO: 2288646 - RNA, 19 nt, Homo sapiens
  misc_RNA (1)...(19): siRNA sense strand
guucaucaucaaagugcaa

SEQ ID NO: 2288647 - RNA, 19 nt, Homo sapiens
  misc_RNA (1)...(19): siRNA sense strand
ucauaaauggugauggcau

SEQ ID NO: 2288648 - RNA, 19 nt, Homo sapiens
  misc_RNA (1)...(19): siRNA sense strand
ggugauggcaugggaauau

SEQ ID NO: 2288649 - RNA, 19 nt, Homo sapiens
  misc_RNA (1)...(19): siRNA sense strand
cuguucaggauguguauua

SEQ ID NO: 2288650 - RNA, 19 nt, Homo sapiens
  misc_RNA (1)...(19): siRNA sense strand
uggcagaagcagaccuaga

SEQ ID NO: 2288651 - RNA, 19 nt, Homo sapiens
  misc_RNA (1)...(19): siRNA sense strand
ccaaagacauggcugggca

SEQ ID NO: 2288652 - RNA, 19 nt, Homo sapiens
  misc_RNA (1)...(19): siRNA sense strand
acuacaauguugaagacga

SEQ ID NO: 2288653 - RNA, 19 nt, Homo sapiens
  misc_RNA (1)...(19): siRNA sense strand
uggaaagcauagauguuca

SEQ ID NO: 2288654 - RNA, 19 nt, Homo sapiens
  misc_RNA (1)...(19): siRNA sense strand
ggauguagaugaaccacca

SEQ ID NO: 2288655 - RNA, 19 nt, Homo sapiens
  misc_RNA (1)...(19): siRNA sense strand
ccuggaaagcauagauguu

SEQ ID NO: 2288656 - RNA, 19 nt, Homo sapiens
  misc_RNA (1)...(19): siRNA sense strand
gccuagacagagagcagaa

SEQ ID NO: 2288657 - RNA, 19 nt, Homo sapiens
  misc_RNA (1)...(19): siRNA sense strand
auguugaagacgacagauu

SEQ ID NO: 2288658 - RNA, 19 nt, Homo sapiens
  misc_RNA (1)...(19): siRNA sense strand
uggagagggugcugggacu

SEQ ID NO: 2288659 - RNA, 19 nt, Homo sapiens
  misc_RNA (1)...(19): siRNA sense strand
ccguagucauucaagccaa

SEQ ID NO: 2288660 - RNA, 19 nt, Homo sapiens
  misc_RNA (1)...(19): siRNA sense strand
cgaacuugccagggaauau

SEQ ID NO: 2288661 - RNA, 19 nt, Homo sapiens
  misc_RNA (1)...(19): siRNA sense strand
cugaaggacaaugaagaua

SEQ ID NO: 2288662 - RNA, 19 nt, Homo sapiens
  misc_RNA (1)...(19): siRNA sense strand
guguauuaucugcccauua

SEQ ID NO: 2288663 - RNA, 19 nt, Homo sapiens
  misc_RNA (1)...(19): siRNA sense strand
ggcaaaugaugcugacacu

SEQ ID NO: 2288664 - RNA, 19 nt, Homo sapiens
  misc_RNA (1)...(19): siRNA sense strand
ccacugaacuaugagaaaa

SEQ ID NO: 2288665 - RNA, 19 nt, Homo sapiens
  misc_RNA (1)...(19): siRNA sense strand
cuacaaagguucucgacag

SEQ ID NO: 2288666 - RNA, 19 nt, Homo sapiens
  misc_RNA (1)...(19): siRNA sense strand
acaucacagccuugaggaa

SEQ ID NO: 2288667 - RNA, 19 nt, Homo sapiens
  misc_RNA (1)...(19): siRNA sense strand
caaagacauggcugggcaa

SEQ ID NO: 2288668 - RNA, 19 nt, Homo sapiens
  misc_RNA (1)...(19): siRNA sense strand
gacaaagagaccagagaag

SEQ ID NO: 2288669 - RNA, 19 nt, Homo sapiens
  misc_RNA (1)...(19): siRNA sense strand
acugggaccauuaggacua

SEQ ID NO: 2288670 - RNA, 19 nt, Homo sapiens
  misc_RNA (1)...(19): siRNA sense strand
ugacaaggcggaggagauu

SEQ ID NO: 2288671 - RNA, 19 nt, Homo sapiens
  misc_RNA (1)...(19): siRNA sense strand
ggguauggaaucaguucuu

SEQ ID NO: 2288672 - RNA, 19 nt, Homo sapiens
  misc_RNA (1)...(19): siRNA sense strand
ggugcugggacuauauuua

SEQ ID NO: 2288673 - RNA, 19 nt, Homo sapiens
  misc_RNA (1)...(19): siRNA sense strand
acagagagcagaagaccca

SEQ ID NO: 2288674 - RNA, 19 nt, Homo sapiens
  misc_RNA (1)...(19): siRNA sense strand
auugauagacguacaaaca

SEQ ID NO: 2288675 - RNA, 19 nt, Homo sapiens
  misc_RNA (1)...(19): siRNA sense strand
gcacaaacguccuggggaa

SEQ ID NO: 2288676 - RNA, 19 nt, Homo sapiens
  misc_RNA (1)...(19): siRNA sense strand
aggaaaacguggaugauua

SEQ ID NO: 2288677 - RNA, 19 nt, Homo sapiens
  misc_RNA (1)...(19): siRNA sense strand
gauccaaagaagagaauga

SEQ ID NO: 2288678 - RNA, 19 nt, Homo sapiens
  misc_RNA (1)...(19): siRNA sense strand
cugaaagagauuaggaaca

SEQ ID NO: 2288679 - RNA, 19 nt, Homo sapiens
  misc_RNA (1)...(19): siRNA sense strand
gcaaaguacaacaccaaua

SEQ ID NO: 2288680 - RNA, 19 nt, Homo sapiens
  misc_RNA (1)...(19): siRNA sense strand
acuacgaauuugaggauga

SEQ ID NO: 2288681 - RNA, 19 nt, Homo sapiens
  misc_RNA (1)...(19): siRNA sense strand
aaaucaaccuggauggcaa

SEQ ID NO: 2288682 - RNA, 19 nt, Homo sapiens
  misc_RNA (1)...(19): siRNA sense strand
acgaauuugaggaugaaua

SEQ ID NO: 2288683 - RNA, 19 nt, Homo sapiens
  misc_RNA (1)...(19): siRNA sense strand
caucaagaaccgagaagga

SEQ ID NO: 2288684 - RNA, 19 nt, Homo sapiens
  misc_RNA (1)...(19): siRNA sense strand
cggaaagacggcagaagau

SEQ ID NO: 2288685 - RNA, 19 nt, Homo sapiens
  misc_RNA (1)...(19): siRNA sense strand
ggucaaaggacaugaaggu

SEQ ID NO: 2288686 - RNA, 19 nt, Homo sapiens
  misc_RNA (1)...(19): siRNA sense strand
ccgccaaauucaucaagaa

SEQ ID NO: 2288687 - RNA, 19 nt, Homo sapiens
  misc_RNA (1)...(19): siRNA sense strand
gcuauuacucuguggccaa

SEQ ID NO: 2288688 - RNA, 19 nt, Homo sapiens
  misc_RNA (1)...(19): siRNA sense strand
caguaauaccagugcccua

SEQ ID NO: 2288689 - RNA, 19 nt, Homo sapiens
  misc_RNA (1)...(19): siRNA sense strand
gcaaaugaucccacgucaa

SEQ ID NO: 2288690 - RNA, 19 nt, Homo sapiens
  misc_RNA (1)...(19): siRNA sense strand
agaaauacgaagccagauu

SEQ ID NO: 2288691 - RNA, 19 nt, Homo sapiens
  misc_RNA (1)...(19): siRNA sense strand
aggacgaggugauggugua

SEQ ID NO: 2288692 - RNA, 19 nt, Homo sapiens
  misc_RNA (1)...(19): siRNA sense strand
cagcaguaaacauggagaa

SEQ ID NO: 2288693 - RNA, 19 nt, Homo sapiens
  misc_RNA (1)...(19): siRNA sense strand
uggaucaagccuaaagaua

SEQ ID NO: 2288694 - RNA, 19 nt, Homo sapiens
  misc_RNA (1)...(19): siRNA sense strand
cgccaaauucaucaagaaa

SEQ ID NO: 2288695 - RNA, 19 nt, Homo sapiens
  misc_RNA (1)...(19): siRNA sense strand
aagcaagaaacguuagcaa

SEQ ID NO: 2288696 - RNA, 19 nt, Homo sapiens
  misc_RNA (1)...(19): siRNA sense strand
uggcaaaguacaacaccaa

SEQ ID NO: 2288697 - RNA, 19 nt, Homo sapiens
  misc_RNA (1)...(19): siRNA sense strand
ggagacacuaagcaagaaa

SEQ ID NO: 2288698 - RNA, 19 nt, Homo sapiens
  misc_RNA (1)...(19): siRNA sense strand
caucaugcaaagugaaaca

SEQ ID NO: 2288699 - RNA, 19 nt, Homo sapiens
  misc_RNA (1)...(19): siRNA sense strand
gcaucgugcccguggaaca

SEQ ID NO: 2288700 - RNA, 19 nt, Homo sapiens
  misc_RNA (1)...(19): siRNA sense strand
gggcugaugaggaggacga

SEQ ID NO: 2288701 - RNA, 19 nt, Homo sapiens
  misc_RNA (1)...(19): siRNA sense strand
acacagaaccugcagccaa

SEQ ID NO: 2288702 - RNA, 19 nt, Homo sapiens
  misc_RNA (1)...(19): siRNA sense strand
aaggaaagcuucagcagca

SEQ ID NO: 2288703 - RNA, 19 nt, Homo sapiens
  misc_RNA (1)...(19): siRNA sense strand
cuaugaaccucuuggucuu

SEQ ID NO: 2288704 - RNA, 19 nt, Homo sapiens
  misc_RNA (1)...(19): siRNA sense strand
ccuugaaauuucucaguga

SEQ ID NO: 2288705 - RNA, 19 nt, Homo sapiens
  misc_RNA (1)...(19): siRNA sense strand
agcaagaaacguuagcaaa

SEQ ID NO: 2288706 - RNA, 19 nt, Homo sapiens
  misc_RNA (1)...(19): siRNA sense strand
aggcagauauguggaguau

SEQ ID NO: 2288707 - RNA, 19 nt, Homo sapiens
  misc_RNA (1)...(19): siRNA sense strand
uagaaaagcaucagcagua

SEQ ID NO: 2288708 - RNA, 19 nt, Homo sapiens
  misc_RNA (1)...(19): siRNA sense strand
gcuucugggucaaaggaca

SEQ ID NO: 2288709 - RNA, 19 nt, Homo sapiens
  misc_RNA (1)...(19): siRNA sense strand
gcuacaccguggaggacau

SEQ ID NO: 2288710 - RNA, 19 nt, Homo sapiens
  misc_RNA (1)...(19): siRNA sense strand
caagaaauacgaagccaga

SEQ ID NO: 2288711 - RNA, 19 nt, Homo sapiens
  misc_RNA (1)...(19): siRNA sense strand
ucaagaaccgagaaggaga

SEQ ID NO: 2288712 - RNA, 19 nt, Homo sapiens
  misc_RNA (1)...(19): siRNA sense strand
agccaagaauuaagcucaa

SEQ ID NO: 2288713 - RNA, 19 nt, Homo sapiens
  misc_RNA (1)...(19): siRNA sense strand
aguuugcgguugugaagaa

SEQ ID NO: 2288714 - RNA, 19 nt, Homo sapiens
  misc_RNA (1)...(19): siRNA sense strand
ucccugaccucguggcaaa

SEQ ID NO: 2288715 - RNA, 19 nt, Homo sapiens
  misc_RNA (1)...(19): siRNA sense strand
ggaaacaauccguucgcuu

SEQ ID NO: 2288716 - RNA, 19 nt, Homo sapiens
  misc_RNA (1)...(19): siRNA sense strand
ccgcagaccuuuugcugaa

SEQ ID NO: 2288717 - RNA, 19 nt, Homo sapiens
  misc_RNA (1)...(19): siRNA sense strand
gaggcagauauguggagua

SEQ ID NO: 2288718 - RNA, 19 nt, Homo sapiens
  misc_RNA (1)...(19): siRNA sense strand
caggacaaaggaagaagaa

SEQ ID NO: 2288719 - RNA, 19 nt, Homo sapiens
  misc_RNA (1)...(19): siRNA sense strand
acggaaagacggcagaaga

SEQ ID NO: 2288720 - RNA, 19 nt, Homo sapiens
  misc_RNA (1)...(19): siRNA sense strand
caaaguacaacaccaauaa

SEQ ID NO: 2288721 - RNA, 19 nt, Homo sapiens
  misc_RNA (1)...(19): siRNA sense strand
cuucuuagcugaaaaggaa

SEQ ID NO: 2288722 - RNA, 19 nt, Homo sapiens
  misc_RNA (1)...(19): siRNA sense strand
ccaccaaggccaucgacau

SEQ ID NO: 2288723 - RNA, 19 nt, Homo sapiens
  misc_RNA (1)...(19): siRNA sense strand
caaagauuauccaggucau

SEQ ID NO: 2288724 - RNA, 19 nt, Homo sapiens
  misc_RNA (1)...(19): siRNA sense strand
ccaaagggaugcuggaggu

SEQ ID NO: 2288725 - RNA, 19 nt, Homo sapiens
  misc_RNA (1)...(19): siRNA sense strand
acgaggucuaugagaacaa

SEQ ID NO: 2288726 - RNA, 19 nt, Homo sapiens
  misc_RNA (1)...(19): siRNA sense strand
uggcauguaaagauggcaa

SEQ ID NO: 2288727 - RNA, 19 nt, Homo sapiens
  misc_RNA (1)...(19): siRNA sense strand
ugugggaguucucuggaaa

SEQ ID NO: 2288728 - RNA, 19 nt, Homo sapiens
  misc_RNA (1)...(19): siRNA sense strand
gcacgaggucuaugagaac

SEQ ID NO: 2288729 - RNA, 19 nt, Homo sapiens
  misc_RNA (1)...(19): siRNA sense strand
gaucauugacuuuggguug

SEQ ID NO: 2288730 - RNA, 19 nt, Homo sapiens
  misc_RNA (1)...(19): siRNA sense strand
ccacucgggauccgggaaa

SEQ ID NO: 2288731 - RNA, 19 nt, Homo sapiens
  misc_RNA (1)...(19): siRNA sense strand
acacuaagcaagaaacguu

SEQ ID NO: 2288732 - RNA, 19 nt, Homo sapiens
  misc_RNA (1)...(19): siRNA sense strand
cugaagaggaagcaacuga

SEQ ID NO: 2288733 - RNA, 19 nt, Homo sapiens
  misc_RNA (1)...(19): siRNA sense strand
ggaaaauggaguagauaua

SEQ ID NO: 2288734 - RNA, 19 nt, Homo sapiens
  misc_RNA (1)...(19): siRNA sense strand
ugauaauuauggagaggaa

SEQ ID NO: 2288735 - RNA, 19 nt, Homo sapiens
  misc_RNA (1)...(19): siRNA sense strand
agaaacaggaaguggcaaa

SEQ ID NO: 2288736 - RNA, 19 nt, Homo sapiens
  misc_RNA (1)...(19): siRNA sense strand
aggauuaaugaaagggaaa

SEQ ID NO: 2288737 - RNA, 19 nt, Homo sapiens
  misc_RNA (1)...(19): siRNA sense strand
gggcaaucaaggaacauaa

SEQ ID NO: 2288738 - RNA, 19 nt, Homo sapiens
  misc_RNA (1)...(19): siRNA sense strand
ugguggaacaggaaagaaa

SEQ ID NO: 2288739 - RNA, 19 nt, Homo sapiens
  misc_RNA (1)...(19): siRNA sense strand
agauauaguuguagguacu

SEQ ID NO: 2288740 - RNA, 19 nt, Homo sapiens
  misc_RNA (1)...(19): siRNA sense strand
acuuauggcugcagaaaca

SEQ ID NO: 2288741 - RNA, 19 nt, Homo sapiens
  misc_RNA (1)...(19): siRNA sense strand
aggaggaggaccugauaaa

SEQ ID NO: 2288742 - RNA, 19 nt, Homo sapiens
  misc_RNA (1)...(19): siRNA sense strand
agaaaggagauguaagauu

SEQ ID NO: 2288743 - RNA, 19 nt, Homo sapiens
  misc_RNA (1)...(19): siRNA sense strand
ccucaugagagaaagcaaa

SEQ ID NO: 2288744 - RNA, 19 nt, Homo sapiens
  misc_RNA (1)...(19): siRNA sense strand
uggaugaauuugaugggaa

SEQ ID NO: 2288745 - RNA, 19 nt, Homo sapiens
  misc_RNA (1)...(19): siRNA sense strand
aagcagagaaguaaaggaa

SEQ ID NO: 2288746 - RNA, 19 nt, Homo sapiens
  misc_RNA (1)...(19): siRNA sense strand
guaaagaaacuguccgaga

SEQ ID NO: 2288747 - RNA, 19 nt, Homo sapiens
  misc_RNA (1)...(19): siRNA sense strand
cagaguaggaagagcugaa

SEQ ID NO: 2288748 - RNA, 19 nt, Homo sapiens
  misc_RNA (1)...(19): siRNA sense strand
cgggaagacuagaugacuu

SEQ ID NO: 2288749 - RNA, 19 nt, Homo sapiens
  misc_RNA (1)...(19): siRNA sense strand
agguugagccggauauaaa

SEQ ID NO: 2288750 - RNA, 19 nt, Homo sapiens
  misc_RNA (1)...(19): siRNA sense strand
cuauaaaggccauguggau

SEQ ID NO: 2288751 - RNA, 19 nt, Homo sapiens
  misc_RNA (1)...(19): siRNA sense strand
caucaagcaguuuaagaaa

SEQ ID NO: 2288752 - RNA, 19 nt, Homo sapiens
  misc_RNA (1)...(19): siRNA sense strand
ggguguaaugccugagauu

SEQ ID NO: 2288753 - RNA, 19 nt, Homo sapiens
  misc_RNA (1)...(19): siRNA sense strand
uugucaaagcagagaagua

SEQ ID NO: 2288754 - RNA, 19 nt, Homo sapiens
  misc_RNA (1)...(19): siRNA sense strand
gaucuuaggaggaggugau

SEQ ID NO: 2288755 - RNA, 19 nt, Homo sapiens
  misc_RNA (1)...(19): siRNA sense strand
agaccaacaggaaggcaaa

SEQ ID NO: 2288756 - RNA, 19 nt, Homo sapiens
  misc_RNA (1)...(19): siRNA sense strand
aggaagagcugaaaggaug

SEQ ID NO: 2288757 - RNA, 19 nt, Homo sapiens
  misc_RNA (1)...(19): siRNA sense strand
ucugauaauuggagguguu

SEQ ID NO: 2288758 - RNA, 19 nt, Homo sapiens
  misc_RNA (1)...(19): siRNA sense strand
cuuaggaggaggugaugua

SEQ ID NO: 2288759 - RNA, 19 nt, Homo sapiens
  misc_RNA (1)...(19): siRNA sense strand
auaaaggccauguggauau

SEQ ID NO: 2288760 - RNA, 19 nt, Homo sapiens
  misc_RNA (1)...(19): siRNA sense strand
caaggaagauggaggcugu

SEQ ID NO: 2288761 - RNA, 19 nt, Homo sapiens
  misc_RNA (1)...(19): siRNA sense strand
ucugaaagaccaacaggaa

SEQ ID NO: 2288762 - RNA, 19 nt, Homo sapiens
  misc_RNA (1)...(19): siRNA sense strand
uggauauagauaagggaca

SEQ ID NO: 2288763 - RNA, 19 nt, Homo sapiens
  misc_RNA (1)...(19): siRNA sense strand
cugaugauguacaugcaaa

SEQ ID NO: 2288764 - RNA, 19 nt, Homo sapiens
  misc_RNA (1)...(19): siRNA sense strand
cgguguuccuuauguuaua

SEQ ID NO: 2288765 - RNA, 19 nt, Homo sapiens
  misc_RNA (1)...(19): siRNA sense strand
ggaaaguuaccuacgguca

SEQ ID NO: 2288766 - RNA, 19 nt, Homo sapiens
  misc_RNA (1)...(19): siRNA sense strand
ugaacaaauggcagaugaa

SEQ ID NO: 2288767 - RNA, 19 nt, Homo sapiens
  misc_RNA (1)...(19): siRNA sense strand
aaggauuaaugaaagggaa

SEQ ID NO: 2288768 - RNA, 19 nt, Homo sapiens
  misc_RNA (1)...(19): siRNA sense strand
caacugauauccaggcuga

SEQ ID NO: 2288769 - RNA, 19 nt, Homo sapiens
  misc_RNA (1)...(19): siRNA sense strand
aggaggaggugauguacuu

SEQ ID NO: 2288770 - RNA, 19 nt, Homo sapiens
  misc_RNA (1)...(19): siRNA sense strand
agaaacuguccgagaagau

SEQ ID NO: 2288771 - RNA, 19 nt, Homo sapiens
  misc_RNA (1)...(19): siRNA sense strand
ccacauuagaacugaugau

SEQ ID NO: 2288772 - RNA, 19 nt, Homo sapiens
  misc_RNA (1)...(19): siRNA sense strand
acaucaagcaguuuaagaa

SEQ ID NO: 2288773 - RNA, 19 nt, Homo sapiens
  misc_RNA (1)...(19): siRNA sense strand
aauuaaaacuggugcuuca

SEQ ID NO: 2288774 - RNA, 19 nt, Homo sapiens
  misc_RNA (1)...(19): siRNA sense strand
agcaaaacuuggaaagauu

SEQ ID NO: 2288775 - RNA, 19 nt, Homo sapiens
  misc_RNA (1)...(19): siRNA sense strand
cauaagauggaucaagcaa

SEQ ID NO: 2288776 - RNA, 19 nt, Homo sapiens
  misc_RNA (1)...(19): siRNA sense strand
gcaugauaccauuggaugu

SEQ ID NO: 2288777 - RNA, 19 nt, Homo sapiens
  misc_RNA (1)...(19): siRNA sense strand
ugggaaaggcuuggaaaga

SEQ ID NO: 2288778 - RNA, 19 nt, Homo sapiens
  misc_RNA (1)...(19): siRNA sense strand
gauuaaugaaagggaaaca

SEQ ID NO: 2288779 - RNA, 19 nt, Homo sapiens
  misc_RNA (1)...(19): siRNA sense strand
gcuucuuucucaagguuau

SEQ ID NO: 2288780 - RNA, 19 nt, Homo sapiens
  misc_RNA (1)...(19): siRNA sense strand
gugcugaacaaauggcaga

SEQ ID NO: 2288781 - RNA, 19 nt, Homo sapiens
  misc_RNA (1)...(19): siRNA sense strand
acaacaaggaggaggaccu

SEQ ID NO: 2288782 - RNA, 19 nt, Homo sapiens
  misc_RNA (1)...(19): siRNA sense strand
uaaagguaccaguggauga

SEQ ID NO: 2288783 - RNA, 19 nt, Homo sapiens
  misc_RNA (1)...(19): siRNA sense strand
ugaagaaugcugaacugaa

SEQ ID NO: 2288784 - RNA, 19 nt, Homo sapiens
  misc_RNA (1)...(19): siRNA sense strand
agauagaagaacaccugaa

SEQ ID NO: 2288785 - RNA, 19 nt, Homo sapiens
  misc_RNA (1)...(19): siRNA sense strand
acaucgaauuggcagagua

SEQ ID NO: 2288786 - RNA, 19 nt, Homo sapiens
  misc_RNA (1)...(19): siRNA sense strand
ucgaauuggcagaguagga

SEQ ID NO: 2288787 - RNA, 19 nt, Homo sapiens
  misc_RNA (1)...(19): siRNA sense strand
guauguagcagccguggaa

SEQ ID NO: 2288788 - RNA, 19 nt, Homo sapiens
  misc_RNA (1)...(19): siRNA sense strand
gucaaagcagagaaguaaa

SEQ ID NO: 2288789 - RNA, 19 nt, Homo sapiens
  misc_RNA (1)...(19): siRNA sense strand
ggaugguuacauugucaaa

SEQ ID NO: 2288790 - RNA, 19 nt, Homo sapiens
  misc_RNA (1)...(19): siRNA sense strand
cuuuauacaacaaggagga

SEQ ID NO: 2288791 - RNA, 19 nt, Homo sapiens
  misc_RNA (1)...(19): siRNA sense strand
gguacaacgagaugcaguu

SEQ ID NO: 2288792 - RNA, 19 nt, Homo sapiens
  misc_RNA (1)...(19): siRNA sense strand
uauaaaggccauguggaua

SEQ ID NO: 2288793 - RNA, 19 nt, Homo sapiens
  misc_RNA (1)...(19): siRNA sense strand
ccguaaugcugccaagaaa

SEQ ID NO: 2288794 - RNA, 19 nt, Homo sapiens
  misc_RNA (1)...(19): siRNA sense strand
gcaugaaggauguggauca

SEQ ID NO: 2288795 - RNA, 19 nt, Homo sapiens
  misc_RNA (1)...(19): siRNA sense strand
uugaauugguugaggaaga

SEQ ID NO: 2288796 - RNA, 19 nt, Homo sapiens
  misc_RNA (1)...(19): siRNA sense strand
acaaauauggagagcggaa

SEQ ID NO: 2288797 - RNA, 19 nt, Homo sapiens
  misc_RNA (1)...(19): siRNA sense strand
cagagaagugggagaucaa

SEQ ID NO: 2288798 - RNA, 19 nt, Homo sapiens
  misc_RNA (1)...(19): siRNA sense strand
gggacaggacaaagaagaa

SEQ ID NO: 2288799 - RNA, 19 nt, Homo sapiens
  misc_RNA (1)...(19): siRNA sense strand
guguacaacuccuggaaga

SEQ ID NO: 2288800 - RNA, 19 nt, Homo sapiens
  misc_RNA (1)...(19): siRNA sense strand
gggaaggccuggugcacau

SEQ ID NO: 2288801 - RNA, 19 nt, Homo sapiens
  misc_RNA (1)...(19): siRNA sense strand
uagcugaugucgugagcaa

SEQ ID NO: 2288802 - RNA, 19 nt, Homo sapiens
  misc_RNA (1)...(19): siRNA sense strand
aagaagaagcggagucgaa

SEQ ID NO: 2288803 - RNA, 19 nt, Homo sapiens
  misc_RNA (1)...(19): siRNA sense strand
ggaucaagagacuggagaa

SEQ ID NO: 2288804 - RNA, 19 nt, Homo sapiens
  misc_RNA (1)...(19): siRNA sense strand
aggaauaaagugaagucua

SEQ ID NO: 2288805 - RNA, 19 nt, Homo sapiens
  misc_RNA (1)...(19): siRNA sense strand
cgagaucgagacagagaua

SEQ ID NO: 2288806 - RNA, 19 nt, Homo sapiens
  misc_RNA (1)...(19): siRNA sense strand
cgggagaggaauaaaguga

SEQ ID NO: 2288807 - RNA, 19 nt, Homo sapiens
  misc_RNA (1)...(19): siRNA sense strand
ccggaaauccagagaacca

SEQ ID NO: 2288808 - RNA, 19 nt, Homo sapiens
  misc_RNA (1)...(19): siRNA sense strand
aagaaaagcugaaggaacu

SEQ ID NO: 2288809 - RNA, 19 nt, Homo sapiens
  misc_RNA (1)...(19): siRNA sense strand
ggauguggaucaagagacu

SEQ ID NO: 2288810 - RNA, 19 nt, Homo sapiens
  misc_RNA (1)...(19): siRNA sense strand
agcaaaggccagaggguca

SEQ ID NO: 2288811 - RNA, 19 nt, Homo sapiens
  misc_RNA (1)...(19): siRNA sense strand
agaugaggaccuugagauu

SEQ ID NO: 2288812 - RNA, 19 nt, Homo sapiens
  misc_RNA (1)...(19): siRNA sense strand
gggaaguguuacagguugu

SEQ ID NO: 2288813 - RNA, 19 nt, Homo sapiens
  misc_RNA (1)...(19): siRNA sense strand
ccagagggucaaagucaaa

SEQ ID NO: 2288814 - RNA, 19 nt, Homo sapiens
  misc_RNA (1)...(19): siRNA sense strand
ggacaaauauggagagcgg

SEQ ID NO: 2288815 - RNA, 19 nt, Homo sapiens
  misc_RNA (1)...(19): siRNA sense strand
agacagagauagggaacga

SEQ ID NO: 2288816 - RNA, 19 nt, Homo sapiens
  misc_RNA (1)...(19): siRNA sense strand
gauugaauugguugaggaa

SEQ ID NO: 2288817 - RNA, 19 nt, Homo sapiens
  misc_RNA (1)...(19): siRNA sense strand
ccaaauuccaccagacuga

SEQ ID NO: 2288818 - RNA, 19 nt, Homo sapiens
  misc_RNA (1)...(19): siRNA sense strand
gguggaugaugaagaagau

SEQ ID NO: 2288819 - RNA, 19 nt, Homo sapiens
  misc_RNA (1)...(19): siRNA sense strand
ucuacaaacugaaggagca

SEQ ID NO: 2288820 - RNA, 19 nt, Homo sapiens
  misc_RNA (1)...(19): siRNA sense strand
ggugcagaauuuacggauu

SEQ ID NO: 2288821 - RNA, 19 nt, Homo sapiens
  misc_RNA (1)...(19): siRNA sense strand
acagagauagggaacgaaa

SEQ ID NO: 2288822 - RNA, 19 nt, Homo sapiens
  misc_RNA (1)...(19): siRNA sense strand
augaggaccuugagauuga

SEQ ID NO: 2288823 - RNA, 19 nt, Homo sapiens
  misc_RNA (1)...(19): siRNA sense strand
cagcuaugucgguggccaa

SEQ ID NO: 2288824 - RNA, 19 nt, Homo sapiens
  misc_RNA (1)...(19): siRNA sense strand
accugauguuccagaguua

SEQ ID NO: 2288825 - RNA, 19 nt, Homo sapiens
  misc_RNA (1)...(19): siRNA sense strand
gagaacaggcccagggaag

SEQ ID NO: 2288826 - RNA, 19 nt, Homo sapiens
  misc_RNA (1)...(19): siRNA sense strand
ccacaguccgagugcagaa

SEQ ID NO: 2288827 - RNA, 19 nt, Homo sapiens
  misc_RNA (1)...(19): siRNA sense strand
guggaaauacuguacacaa

SEQ ID NO: 2288828 - RNA, 19 nt, Homo sapiens
  misc_RNA (1)...(19): siRNA sense strand
uucuauaggcccaaggaua

SEQ ID NO: 2288829 - RNA, 19 nt, Homo sapiens
  misc_RNA (1)...(19): siRNA sense strand
ccaaggaauacaugcguga

SEQ ID NO: 2288830 - RNA, 19 nt, Homo sapiens
  misc_RNA (1)...(19): siRNA sense strand
ugugaaaguugcuguggau

SEQ ID NO: 2288831 - RNA, 19 nt, Homo sapiens
  misc_RNA (1)...(19): siRNA sense strand
cuguggauguccugaaaga

SEQ ID NO: 2288832 - RNA, 19 nt, Homo sapiens
  misc_RNA (1)...(19): siRNA sense strand
ccaaagaagaauuuccaga

SEQ ID NO: 2288833 - RNA, 19 nt, Homo sapiens
  misc_RNA (1)...(19): siRNA sense strand
caggagaagcaaagagaug

SEQ ID NO: 2288834 - RNA, 19 nt, Homo sapiens
  misc_RNA (1)...(19): siRNA sense strand
agacuuugaugaagagacu

SEQ ID NO: 2288835 - RNA, 19 nt, Homo sapiens
  misc_RNA (1)...(19): siRNA sense strand
cggcaggacaugaagcuga

SEQ ID NO: 2288836 - RNA, 19 nt, Homo sapiens
  misc_RNA (1)...(19): siRNA sense strand
cagagaaccaacuuagcaa

SEQ ID NO: 2288837 - RNA, 19 nt, Homo sapiens
  misc_RNA (1)...(19): siRNA sense strand
gcaagcagauguuaggcau

SEQ ID NO: 2288838 - RNA, 19 nt, Homo sapiens
  misc_RNA (1)...(19): siRNA sense strand
ggagaagaucuaaacccaa

SEQ ID NO: 2288839 - RNA, 19 nt, Homo sapiens
  misc_RNA (1)...(19): siRNA sense strand
acaaagccucuuacggaaa

SEQ ID NO: 2288840 - RNA, 19 nt, Homo sapiens
  misc_RNA (1)...(19): siRNA sense strand
acaaacugaaggagcaauu

SEQ ID NO: 2288841 - RNA, 19 nt, Homo sapiens
  misc_RNA (1)...(19): siRNA sense strand
acccaggauucgugaaaca

SEQ ID NO: 2288842 - RNA, 19 nt, Homo sapiens
  misc_RNA (1)...(19): siRNA sense strand
gagccaaugcuaugcaaaa

SEQ ID NO: 2288843 - RNA, 19 nt, Homo sapiens
  misc_RNA (1)...(19): siRNA sense strand
cuaaggaagcggugggaag

SEQ ID NO: 2288844 - RNA, 19 nt, Homo sapiens
  misc_RNA (1)...(19): siRNA sense strand
ccuguaugaaagaaugaaa

SEQ ID NO: 2288845 - RNA, 19 nt, Homo sapiens
  misc_RNA (1)...(19): siRNA sense strand
gugaggaaaugcugaccau

SEQ ID NO: 2288846 - RNA, 19 nt, Homo sapiens
  misc_RNA (1)...(19): siRNA sense strand
caagcagauguuaggcaua

SEQ ID NO: 2288847 - RNA, 19 nt, Homo sapiens
  misc_RNA (1)...(19): siRNA sense strand
acaaagaagaagaagcgga

SEQ ID NO: 2288848 - RNA, 19 nt, Homo sapiens
  misc_RNA (1)...(19): siRNA sense strand
gggagaggaauaaagugaa

SEQ ID NO: 2288849 - RNA, 19 nt, Homo sapiens
  misc_RNA (1)...(19): siRNA sense strand
agauaucgguccaggagca

SEQ ID NO: 2288850 - RNA, 19 nt, Homo sapiens
  misc_RNA (1)...(19): siRNA sense strand
cugaaacacuuguaggcaa

SEQ ID NO: 2288851 - RNA, 19 nt, Homo sapiens
  misc_RNA (1)...(19): siRNA sense strand
acucaaaggcuguauacaa

SEQ ID NO: 2288852 - RNA, 19 nt, Homo sapiens
  misc_RNA (1)...(19): siRNA sense strand
aguguagaaugaaggauaa

SEQ ID NO: 2288853 - RNA, 19 nt, Homo sapiens
  misc_RNA (1)...(19): siRNA sense strand
uugcgaugcuugucagaaa

SEQ ID NO: 2288854 - RNA, 19 nt, Homo sapiens
  misc_RNA (1)...(19): siRNA sense strand
aagaaguaacggaagcaaa

SEQ ID NO: 2288855 - RNA, 19 nt, Homo sapiens
  misc_RNA (1)...(19): siRNA sense strand
acgggaacaacaagagaua

SEQ ID NO: 2288856 - RNA, 19 nt, Homo sapiens
  misc_RNA (1)...(19): siRNA sense strand
ccggaacuucagugggaaa

SEQ ID NO: 2288857 - RNA, 19 nt, Homo sapiens
  misc_RNA (1)...(19): siRNA sense strand
agaaguaacggaagcaaau

SEQ ID NO: 2288858 - RNA, 19 nt, Homo sapiens
  misc_RNA (1)...(19): siRNA sense strand
uaauaauggaagugcgaga

SEQ ID NO: 2288859 - RNA, 19 nt, Homo sapiens
  misc_RNA (1)...(19): siRNA sense strand
uggugaaggcuuaagguau

SEQ ID NO: 2288860 - RNA, 19 nt, Homo sapiens
  misc_RNA (1)...(19): siRNA sense strand
gcuuaagguaucagaaguu

SEQ ID NO: 2288861 - RNA, 19 nt, Homo sapiens
  misc_RNA (1)...(19): siRNA sense strand
guacugucagcaagagaaa

SEQ ID NO: 2288862 - RNA, 19 nt, Homo sapiens
  misc_RNA (1)...(19): siRNA sense strand
uguuacagaaguagaagaa

SEQ ID NO: 2288863 - RNA, 19 nt, Homo sapiens
  misc_RNA (1)...(19): siRNA sense strand
agguacaggaucaggauuu

SEQ ID NO: 2288864 - RNA, 19 nt, Homo sapiens
  misc_RNA (1)...(19): siRNA sense strand
gagaaagacacuggggaua

SEQ ID NO: 2288865 - RNA, 19 nt, Homo sapiens
  misc_RNA (1)...(19): siRNA sense strand
uagaagaaaaggaugguaa

SEQ ID NO: 2288866 - RNA, 19 nt, Homo sapiens
  misc_RNA (1)...(19): siRNA sense strand
caacaacugcagauggcua

SEQ ID NO: 2288867 - RNA, 19 nt, Homo sapiens
  misc_RNA (1)...(19): siRNA sense strand
gcagggagauacuggcaga

SEQ ID NO: 2288868 - RNA, 19 nt, Homo sapiens
  misc_RNA (1)...(19): siRNA sense strand
gcaaagugaaucuggagga

SEQ ID NO: 2288869 - RNA, 19 nt, Homo sapiens
  misc_RNA (1)...(19): siRNA sense strand
uggcuaugcaccagaauau

SEQ ID NO: 2288870 - RNA, 19 nt, Homo sapiens
  misc_RNA (1)...(19): siRNA sense strand
ucuccauacucgucugaaa

SEQ ID NO: 2288871 - RNA, 19 nt, Homo sapiens
  misc_RNA (1)...(19): siRNA sense strand
aaacuggaacauagaagaa

SEQ ID NO: 2288872 - RNA, 19 nt, Homo sapiens
  misc_RNA (1)...(19): siRNA sense strand
acaagagacguuagaccaa

SEQ ID NO: 2288873 - RNA, 19 nt, Homo sapiens
  misc_RNA (1)...(19): siRNA sense strand
gagacauaccaaagacaca

SEQ ID NO: 2288874 - RNA, 19 nt, Homo sapiens
  misc_RNA (1)...(19): siRNA sense strand
agaagaaaaggaugguaaa

SEQ ID NO: 2288875 - RNA, 19 nt, Homo sapiens
  misc_RNA (1)...(19): siRNA sense strand
guuaauaauggaagugcga

SEQ ID NO: 2288876 - RNA, 19 nt, Homo sapiens
  misc_RNA (1)...(19): siRNA sense strand
cagaauugacguggagauu

SEQ ID NO: 2288877 - RNA, 19 nt, Homo sapiens
  misc_RNA (1)...(19): siRNA sense strand
ccuacaaugugcacuacaa

SEQ ID NO: 2288878 - RNA, 19 nt, Homo sapiens
  misc_RNA (1)...(19): siRNA sense strand
ucugaaaccuguagaucca

SEQ ID NO: 2288879 - RNA, 19 nt, Homo sapiens
  misc_RNA (1)...(19): siRNA sense strand
acaacaaaucccagaucau

SEQ ID NO: 2288880 - RNA, 19 nt, Homo sapiens
  misc_RNA (1)...(19): siRNA sense strand
uggauaauucugccaguaa

SEQ ID NO: 2288881 - RNA, 19 nt, Homo sapiens
  misc_RNA (1)...(19): siRNA sense strand
uggagaagaaguaacggaa

SEQ ID NO: 2288882 - RNA, 19 nt, Homo sapiens
  misc_RNA (1)...(19): siRNA sense strand
auccaguggugaaggcuua

SEQ ID NO: 2288883 - RNA, 19 nt, Homo sapiens
  misc_RNA (1)...(19): siRNA sense strand
cauaauuagcacagaucca

SEQ ID NO: 2288884 - RNA, 19 nt, Homo sapiens
  misc_RNA (1)...(19): siRNA sense strand
aguuaggggaugaagauaa

SEQ ID NO: 2288885 - RNA, 19 nt, Homo sapiens
  misc_RNA (1)...(19): siRNA sense strand
auguuaacagugagaguau

SEQ ID NO: 2288886 - RNA, 19 nt, Homo sapiens
  misc_RNA (1)...(19): siRNA sense strand
cuaagagaacagucaagaa

SEQ ID NO: 2288887 - RNA, 19 nt, Homo sapiens
  misc_RNA (1)...(19): siRNA sense strand
ccucaagcgcagcaagaga

SEQ ID NO: 2288888 - RNA, 19 nt, Homo sapiens
  misc_RNA (1)...(19): siRNA sense strand
cagcuucauugauggagaa

SEQ ID NO: 2288889 - RNA, 19 nt, Homo sapiens
  misc_RNA (1)...(19): siRNA sense strand
gucagaauaaugaggauuu

SEQ ID NO: 2288890 - RNA, 19 nt, Homo sapiens
  misc_RNA (1)...(19): siRNA sense strand
agucaaucgccaaguuauu

SEQ ID NO: 2288891 - RNA, 19 nt, Homo sapiens
  misc_RNA (1)...(19): siRNA sense strand
guguagaaugaaggauaaa

SEQ ID NO: 2288892 - RNA, 19 nt, Homo sapiens
  misc_RNA (1)...(19): siRNA sense strand
gcacaauucucuaaagcag

SEQ ID NO: 2288893 - RNA, 19 nt, Homo sapiens
  misc_RNA (1)...(19): siRNA sense strand
acuggaacauagaagaaaa

SEQ ID NO: 2288894 - RNA, 19 nt, Homo sapiens
  misc_RNA (1)...(19): siRNA sense strand
gagaagaaguaacggaagc

SEQ ID NO: 2288895 - RNA, 19 nt, Homo sapiens
  misc_RNA (1)...(19): siRNA sense strand
cuucauugauggagaacuc

SEQ ID NO: 2288896 - RNA, 19 nt, Homo sapiens
  misc_RNA (1)...(19): siRNA sense strand
guuauauggcuaugcaaca

SEQ ID NO: 2288897 - RNA, 19 nt, Homo sapiens
  misc_RNA (1)...(19): siRNA sense strand
ggucaaaggaggcuacacu

SEQ ID NO: 2288898 - RNA, 19 nt, Homo sapiens
  misc_RNA (1)...(19): siRNA sense strand
cuucauaauuagcacagau

SEQ ID NO: 2288899 - RNA, 19 nt, Homo sapiens
  misc_RNA (1)...(19): siRNA sense strand
gaagaaaaggaugguaaaa

SEQ ID NO: 2288900 - RNA, 19 nt, Homo sapiens
  misc_RNA (1)...(19): siRNA sense strand
ccuuucagauggucagaga

SEQ ID NO: 2288901 - RNA, 19 nt, Homo sapiens
  misc_RNA (1)...(19): siRNA sense strand
agacauggguggucagccu

SEQ ID NO: 2288902 - RNA, 19 nt, Homo sapiens
  misc_RNA (1)...(19): siRNA sense strand
acagaauugacguggagau

SEQ ID NO: 2288903 - RNA, 19 nt, Homo sapiens
  misc_RNA (1)...(19): siRNA sense strand
gauaauucugccaguaaaa

SEQ ID NO: 2288904 - RNA, 19 nt, Homo sapiens
  misc_RNA (1)...(19): siRNA sense strand
agaaaaggaugguaaaacu

SEQ ID NO: 2288905 - RNA, 19 nt, Homo sapiens
  misc_RNA (1)...(19): siRNA sense strand
ggauaaaaguacaagagac

SEQ ID NO: 2288906 - RNA, 19 nt, Homo sapiens
  misc_RNA (1)...(19): siRNA sense strand
cauacucgucugaaauaua

SEQ ID NO: 2288907 - RNA, 19 nt, Homo sapiens
  misc_RNA (1)...(19): siRNA sense strand
uggucagccuuucgguuua

SEQ ID NO: 2288908 - RNA, 19 nt, Homo sapiens
  misc_RNA (1)...(19): siRNA sense strand
cuaagaagagacauaccaa

SEQ ID NO: 2288909 - RNA, 19 nt, Homo sapiens
  misc_RNA (1)...(19): siRNA sense strand
ccaaagacacagcccucaa

SEQ ID NO: 2288910 - RNA, 19 nt, Homo sapiens
  misc_RNA (1)...(19): siRNA sense strand
ugugauacuuaccaguuaa

SEQ ID NO: 2288911 - RNA, 19 nt, Homo sapiens
  misc_RNA (1)...(19): siRNA sense strand
auacuuggaagaugggcua

SEQ ID NO: 2288912 - RNA, 19 nt, Homo sapiens
  misc_RNA (1)...(19): siRNA sense strand
uaagaagagacauaccaaa

SEQ ID NO: 2288913 - RNA, 19 nt, Homo sapiens
  misc_RNA (1)...(19): siRNA sense strand
agaacuccuuggauacaaa

SEQ ID NO: 2288914 - RNA, 19 nt, Homo sapiens
  misc_RNA (1)...(19): siRNA sense strand
cugaaacacuuguaggcaa

SEQ ID NO: 2288915 - RNA, 19 nt, Homo sapiens
  misc_RNA (1)...(19): siRNA sense strand
acucaaaggcuguauacaa

SEQ ID NO: 2288916 - RNA, 19 nt, Homo sapiens
  misc_RNA (1)...(19): siRNA sense strand
aguguagaaugaaggauaa

SEQ ID NO: 2288917 - RNA, 19 nt, Homo sapiens
  misc_RNA (1)...(19): siRNA sense strand
uugcgaugcuugucagaaa

SEQ ID NO: 2288918 - RNA, 19 nt, Homo sapiens
  misc_RNA (1)...(19): siRNA sense strand
aagaaguaacggaagcaaa

SEQ ID NO: 2288919 - RNA, 19 nt, Homo sapiens
  misc_RNA (1)...(19): siRNA sense strand
acgggaacaacaagagaua

SEQ ID NO: 2288920 - RNA, 19 nt, Homo sapiens
  misc_RNA (1)...(19): siRNA sense strand
ccggaacuucagugggaaa

SEQ ID NO: 2288921 - RNA, 19 nt, Homo sapiens
  misc_RNA (1)...(19): siRNA sense strand
agaaguaacggaagcaaau

SEQ ID NO: 2288922 - RNA, 19 nt, Homo sapiens
  misc_RNA (1)...(19): siRNA sense strand
uaauaauggaagugcgaga

SEQ ID NO: 2288923 - RNA, 19 nt, Homo sapiens
  misc_RNA (1)...(19): siRNA sense strand
uggugaaggcuuaagguau

SEQ ID NO: 2288924 - RNA, 19 nt, Homo sapiens
  misc_RNA (1)...(19): siRNA sense strand
gcuuaagguaucagaaguu

SEQ ID NO: 2288925 - RNA, 19 nt, Homo sapiens
  misc_RNA (1)...(19): siRNA sense strand
guacugucagcaagagaaa

SEQ ID NO: 2288926 - RNA, 19 nt, Homo sapiens
  misc_RNA (1)...(19): siRNA sense strand
uguuacagaaguagaagaa

SEQ ID NO: 2288927 - RNA, 19 nt, Homo sapiens
  misc_RNA (1)...(19): siRNA sense strand
agguacaggaucaggauuu

SEQ ID NO: 2288928 - RNA, 19 nt, Homo sapiens
  misc_RNA (1)...(19): siRNA sense strand
gagaaagacacuggggaua

SEQ ID NO: 2288929 - RNA, 19 nt, Homo sapiens
  misc_RNA (1)...(19): siRNA sense strand
uagaagaaaaggaugguaa

SEQ ID NO: 2288930 - RNA, 19 nt, Homo sapiens
  misc_RNA (1)...(19): siRNA sense strand
caacaacugcagauggcua

SEQ ID NO: 2288931 - RNA, 19 nt, Homo sapiens
  misc_RNA (1)...(19): siRNA sense strand
gcagggagauacuggcaga

SEQ ID NO: 2288932 - RNA, 19 nt, Homo sapiens
  misc_RNA (1)...(19): siRNA sense strand
gcaaagugaaucuggagga

SEQ ID NO: 2288933 - RNA, 19 nt, Homo sapiens
  misc_RNA (1)...(19): siRNA sense strand
uggcuaugcaccagaauau

SEQ ID NO: 2288934 - RNA, 19 nt, Homo sapiens
  misc_RNA (1)...(19): siRNA sense strand
ucuccauacucgucugaaa

SEQ ID NO: 2288935 - RNA, 19 nt, Homo sapiens
  misc_RNA (1)...(19): siRNA sense strand
aaacuggaacauagaagaa

SEQ ID NO: 2288936 - RNA, 19 nt, Homo sapiens
  misc_RNA (1)...(19): siRNA sense strand
acaagagacguuagaccaa

SEQ ID NO: 2288937 - RNA, 19 nt, Homo sapiens
  misc_RNA (1)...(19): siRNA sense strand
ggacauuagcaaagacaug

SEQ ID NO: 2288938 - RNA, 19 nt, Homo sapiens
  misc_RNA (1)...(19): siRNA sense strand
gagacauaccaaagacaca

SEQ ID NO: 2288939 - RNA, 19 nt, Homo sapiens
  misc_RNA (1)...(19): siRNA sense strand
agaagaaaaggaugguaaa

SEQ ID NO: 2288940 - RNA, 19 nt, Homo sapiens
  misc_RNA (1)...(19): siRNA sense strand
guuaauaauggaagugcga

SEQ ID NO: 2288941 - RNA, 19 nt, Homo sapiens
  misc_RNA (1)...(19): siRNA sense strand
cagaauugacguggagauu

SEQ ID NO: 2288942 - RNA, 19 nt, Homo sapiens
  misc_RNA (1)...(19): siRNA sense strand
ccuacaaugugcacuacaa

SEQ ID NO: 2288943 - RNA, 19 nt, Homo sapiens
  misc_RNA (1)...(19): siRNA sense strand
ucugaaaccuguagaucca

SEQ ID NO: 2288944 - RNA, 19 nt, Homo sapiens
  misc_RNA (1)...(19): siRNA sense strand
acaacaaaucccagaucau

SEQ ID NO: 2288945 - RNA, 19 nt, Homo sapiens
  misc_RNA (1)...(19): siRNA sense strand
uggauaauucugccaguaa

SEQ ID NO: 2288946 - RNA, 19 nt, Homo sapiens
  misc_RNA (1)...(19): siRNA sense strand
uggagaagaaguaacggaa

SEQ ID NO: 2288947 - RNA, 19 nt, Homo sapiens
  misc_RNA (1)...(19): siRNA sense strand
ggacaagaugaggagcaua

SEQ ID NO: 2288948 - RNA, 19 nt, Homo sapiens
  misc_RNA (1)...(19): siRNA sense strand
auccaguggugaaggcuua

SEQ ID NO: 2288949 - RNA, 19 nt, Homo sapiens
  misc_RNA (1)...(19): siRNA sense strand
aagaagagggacuggaguu

SEQ ID NO: 2288950 - RNA, 19 nt, Homo sapiens
  misc_RNA (1)...(19): siRNA sense strand
cauaauuagcacagaucca

SEQ ID NO: 2288951 - RNA, 19 nt, Homo sapiens
  misc_RNA (1)...(19): siRNA sense strand
aguuaggggaugaagauaa

SEQ ID NO: 2288952 - RNA, 19 nt, Homo sapiens
  misc_RNA (1)...(19): siRNA sense strand
auguuaacagugagaguau

SEQ ID NO: 2288953 - RNA, 19 nt, Homo sapiens
  misc_RNA (1)...(19): siRNA sense strand
cuaagagaacagucaagaa

SEQ ID NO: 2288954 - RNA, 19 nt, Homo sapiens
  misc_RNA (1)...(19): siRNA sense strand
ccucaagcgcagcaagaga

SEQ ID NO: 2288955 - RNA, 19 nt, Homo sapiens
  misc_RNA (1)...(19): siRNA sense strand
cagcuucauugauggagaa

SEQ ID NO: 2288956 - RNA, 19 nt, Homo sapiens
  misc_RNA (1)...(19): siRNA sense strand
gucagaauaaugaggauuu

SEQ ID NO: 2288957 - RNA, 19 nt, Homo sapiens
  misc_RNA (1)...(19): siRNA sense strand
ggcaggaagaagagggacu

SEQ ID NO: 2288958 - RNA, 19 nt, Homo sapiens
  misc_RNA (1)...(19): siRNA sense strand
agucaaucgccaaguuauu

SEQ ID NO: 2288959 - RNA, 19 nt, Homo sapiens
  misc_RNA (1)...(19): siRNA sense strand
guguagaaugaaggauaaa

SEQ ID NO: 2288960 - RNA, 19 nt, Homo sapiens
  misc_RNA (1)...(19): siRNA sense strand
gcacaauucucuaaagcag

SEQ ID NO: 2288961 - RNA, 19 nt, Homo sapiens
  misc_RNA (1)...(19): siRNA sense strand
acuggaacauagaagaaaa

SEQ ID NO: 2288962 - RNA, 19 nt, Homo sapiens
  misc_RNA (1)...(19): siRNA sense strand
gagaagaaguaacggaagc

SEQ ID NO: 2288963 - RNA, 19 nt, Homo sapiens
  misc_RNA (1)...(19): siRNA sense strand
cuucauugauggagaacuc

SEQ ID NO: 2288964 - RNA, 19 nt, Homo sapiens
  misc_RNA (1)...(19): siRNA sense strand
guuauauggcuaugcaaca

SEQ ID NO: 2288965 - RNA, 19 nt, Homo sapiens
  misc_RNA (1)...(19): siRNA sense strand
ggucaaaggaggcuacacu

SEQ ID NO: 2288966 - RNA, 19 nt, Homo sapiens
  misc_RNA (1)...(19): siRNA sense strand
cuucauaauuagcacagau

SEQ ID NO: 2288967 - RNA, 19 nt, Homo sapiens
  misc_RNA (1)...(19): siRNA sense strand
gaagaaaaggaugguaaaa

SEQ ID NO: 2288968 - RNA, 19 nt, Homo sapiens
  misc_RNA (1)...(19): siRNA sense strand
ccuuucagauggucagaga

SEQ ID NO: 2288969 - RNA, 19 nt, Homo sapiens
  misc_RNA (1)...(19): siRNA sense strand
agacauggguggucagccu

SEQ ID NO: 2288970 - RNA, 19 nt, Homo sapiens
  misc_RNA (1)...(19): siRNA sense strand
acagaauugacguggagau

SEQ ID NO: 2288971 - RNA, 19 nt, Homo sapiens
  misc_RNA (1)...(19): siRNA sense strand
gauaauucugccaguaaaa

SEQ ID NO: 2288972 - RNA, 19 nt, Homo sapiens
  misc_RNA (1)...(19): siRNA sense strand
agaaaaggaugguaaaacu

SEQ ID NO: 2288973 - RNA, 19 nt, Homo sapiens
  misc_RNA (1)...(19): siRNA sense strand
ggauaaaaguacaagagac

SEQ ID NO: 2288974 - RNA, 19 nt, Homo sapiens
  misc_RNA (1)...(19): siRNA sense strand
uggcauaagguauaagaaa

SEQ ID NO: 2288975 - RNA, 19 nt, Homo sapiens
  misc_RNA (1)...(19): siRNA sense strand
acugcuaacuggagagcua

SEQ ID NO: 2288976 - RNA, 19 nt, Homo sapiens
  misc_RNA (1)...(19): siRNA sense strand
aagaaguagcaguggcaua

SEQ ID NO: 2288977 - RNA, 19 nt, Homo sapiens
  misc_RNA (1)...(19): siRNA sense strand
aacaaagguccuaaagaaa

SEQ ID NO: 2288978 - RNA, 19 nt, Homo sapiens
  misc_RNA (1)...(19): siRNA sense strand
auguagaagaucaggauga

SEQ ID NO: 2288979 - RNA, 19 nt, Homo sapiens
  misc_RNA (1)...(19): siRNA sense strand
gaggaguacaacuuggaaa

SEQ ID NO: 2288980 - RNA, 19 nt, Homo sapiens
  misc_RNA (1)...(19): siRNA sense strand
ugguagaguuaaccugaaa

SEQ ID NO: 2288981 - RNA, 19 nt, Homo sapiens
  misc_RNA (1)...(19): siRNA sense strand
uugcaauauuguugggcau

SEQ ID NO: 2288982 - RNA, 19 nt, Homo sapiens
  misc_RNA (1)...(19): siRNA sense strand
cuguuaauguagaagauca

SEQ ID NO: 2288983 - RNA, 19 nt, Homo sapiens
  misc_RNA (1)...(19): siRNA sense strand
gguucagucuauacaacaa

SEQ ID NO: 2288984 - RNA, 19 nt, Homo sapiens
  misc_RNA (1)...(19): siRNA sense strand
cuguagaucgugagcagua

SEQ ID NO: 2288985 - RNA, 19 nt, Homo sapiens
  misc_RNA (1)...(19): siRNA sense strand
cgaaauggugaaaggagga

SEQ ID NO: 2288986 - RNA, 19 nt, Homo sapiens
  misc_RNA (1)...(19): siRNA sense strand
auacaguugauguggaaau

SEQ ID NO: 2288987 - RNA, 19 nt, Homo sapiens
  misc_RNA (1)...(19): siRNA sense strand
acaacaagcaauggauaua

SEQ ID NO: 2288988 - RNA, 19 nt, Homo sapiens
  misc_RNA (1)...(19): siRNA sense strand
ccgagaaacuuguugguag

SEQ ID NO: 2288989 - RNA, 19 nt, Homo sapiens
  misc_RNA (1)...(19): siRNA sense strand
caacaacuccagaugggua

SEQ ID NO: 2288990 - RNA, 19 nt, Homo sapiens
  misc_RNA (1)...(19): siRNA sense strand
gggcacuacugugggacaa

SEQ ID NO: 2288991 - RNA, 19 nt, Homo sapiens
  misc_RNA (1)...(19): siRNA sense strand
acgaguuacuguugaggau

SEQ ID NO: 2288992 - RNA, 19 nt, Homo sapiens
  misc_RNA (1)...(19): siRNA sense strand
auagagaggcagagaccau

SEQ ID NO: 2288993 - RNA, 19 nt, Homo sapiens
  misc_RNA (1)...(19): siRNA sense strand
agugugugcuacugacaaa

SEQ ID NO: 2288994 - RNA, 19 nt, Homo sapiens
  misc_RNA (1)...(19): siRNA sense strand
guaaaugaccacuugccaa

SEQ ID NO: 2288995 - RNA, 19 nt, Homo sapiens
  misc_RNA (1)...(19): siRNA sense strand
cugacaaagaugagccuga

SEQ ID NO: 2288996 - RNA, 19 nt, Homo sapiens
  misc_RNA (1)...(19): siRNA sense strand
uagcaguggcauaagguau

SEQ ID NO: 2288997 - RNA, 19 nt, Homo sapiens
  misc_RNA (1)...(19): siRNA sense strand
gauccaacaggguggguca

SEQ ID NO: 2288998 - RNA, 19 nt, Homo sapiens
  misc_RNA (1)...(19): siRNA sense strand
gaccaaggagggagaacau

SEQ ID NO: 2288999 - RNA, 19 nt, Homo sapiens
  misc_RNA (1)...(19): siRNA sense strand
aauuguaacagaugccaaa

SEQ ID NO: 2289000 - RNA, 19 nt, Homo sapiens
  misc_RNA (1)...(19): siRNA sense strand
ggaugagggcccugagugu

SEQ ID NO: 2289001 - RNA, 19 nt, Homo sapiens
  misc_RNA (1)...(19): siRNA sense strand
gggcaaugaaaauggcaau

SEQ ID NO: 2289002 - RNA, 19 nt, Homo sapiens
  misc_RNA (1)...(19): siRNA sense strand
cggagauuguugcgguuga

SEQ ID NO: 2289003 - RNA, 19 nt, Homo sapiens
  misc_RNA (1)...(19): siRNA sense strand
auguggagacugaaagcaa

SEQ ID NO: 2289004 - RNA, 19 nt, Homo sapiens
  misc_RNA (1)...(19): siRNA sense strand
ccuccaaacuagaugccga

SEQ ID NO: 2289005 - RNA, 19 nt, Homo sapiens
  misc_RNA (1)...(19): siRNA sense strand
guacagagaauguggagac

SEQ ID NO: 2289006 - RNA, 19 nt, Homo sapiens
  misc_RNA (1)...(19): siRNA sense strand
ggaagaaaauacaguugau

SEQ ID NO: 2289007 - RNA, 19 nt, Homo sapiens
  misc_RNA (1)...(19): siRNA sense strand
ugaccaagaaccucggaau

SEQ ID NO: 2289008 - RNA, 19 nt, Homo sapiens
  misc_RNA (1)...(19): siRNA sense strand
cuguugaggauaaggacuu

SEQ ID NO: 2289009 - RNA, 19 nt, Homo sapiens
  misc_RNA (1)...(19): siRNA sense strand
acaaagguccuaaagaaaa

SEQ ID NO: 2289010 - RNA, 19 nt, Homo sapiens
  misc_RNA (1)...(19): siRNA sense strand
augagggcccugaguguaa

SEQ ID NO: 2289011 - RNA, 19 nt, Homo sapiens
  misc_RNA (1)...(19): siRNA sense strand
agaguuaaccugaaagagu

SEQ ID NO: 2289012 - RNA, 19 nt, Homo sapiens
  misc_RNA (1)...(19): siRNA sense strand
uauuuuauguggagagaga

SEQ ID NO: 2289013 - RNA, 19 nt, Homo sapiens
  misc_RNA (1)...(19): siRNA sense strand
gaucgugagcaguaugaau

SEQ ID NO: 2289014 - RNA, 19 nt, Homo sapiens
  misc_RNA (1)...(19): siRNA sense strand
uggguauacuccagaacuu

SEQ ID NO: 2289015 - RNA, 19 nt, Homo sapiens
  misc_RNA (1)...(19): siRNA sense strand
agcaauggauauaaagcau

SEQ ID NO: 2289016 - RNA, 19 nt, Homo sapiens
  misc_RNA (1)...(19): siRNA sense strand
uauaacagugagagauaga

SEQ ID NO: 2289017 - RNA, 19 nt, Homo sapiens
  misc_RNA (1)...(19): siRNA sense strand
uggcgguggaggaguacaa

SEQ ID NO: 2289018 - RNA, 19 nt, Homo sapiens
  misc_RNA (1)...(19): siRNA sense strand
uggagaugacaaaguguau

SEQ ID NO: 2289019 - RNA, 19 nt, Homo sapiens
  misc_RNA (1)...(19): siRNA sense strand
acacugagaaccaagaaaa

SEQ ID NO: 2289020 - RNA, 19 nt, Homo sapiens
  misc_RNA (1)...(19): siRNA sense strand
acaaguaccaguugaaaau

SEQ ID NO: 2289021 - RNA, 19 nt, Homo sapiens
  misc_RNA (1)...(19): siRNA sense strand
aagaaaagcaacagaugau

SEQ ID NO: 2289022 - RNA, 19 nt, Homo sapiens
  misc_RNA (1)...(19): siRNA sense strand
agcaguggcauaagguaua

SEQ ID NO: 2289023 - RNA, 19 nt, Homo sapiens
  misc_RNA (1)...(19): siRNA sense strand
ucuuaauauuugccaguga

SEQ ID NO: 2289024 - RNA, 19 nt, Homo sapiens
  misc_RNA (1)...(19): siRNA sense strand
uggagagagacacuggaaa

SEQ ID NO: 2289025 - RNA, 19 nt, Homo sapiens
  misc_RNA (1)...(19): siRNA sense strand
caguugauguggaaaucuu

SEQ ID NO: 2289026 - RNA, 19 nt, Homo sapiens
  misc_RNA (1)...(19): siRNA sense strand
guggagacugaaagcaauu

SEQ ID NO: 2289027 - RNA, 19 nt, Homo sapiens
  misc_RNA (1)...(19): siRNA sense strand
cgguggaggaguacaacuu

SEQ ID NO: 2289028 - RNA, 19 nt, Homo sapiens
  misc_RNA (1)...(19): siRNA sense strand
gugcuuuacagcugcaaau

SEQ ID NO: 2289029 - RNA, 19 nt, Homo sapiens
  misc_RNA (1)...(19): siRNA sense strand
gacaaguaccaguugaaaa

SEQ ID NO: 2289030 - RNA, 19 nt, Homo sapiens
  misc_RNA (1)...(19): siRNA sense strand
caugaaagaaaaugcagaa

SEQ ID NO: 2289031 - RNA, 19 nt, Homo sapiens
  misc_RNA (1)...(19): siRNA sense strand
ccagaaacaagaaguagca

SEQ ID NO: 2289032 - RNA, 19 nt, Homo sapiens
  misc_RNA (1)...(19): siRNA sense strand
uggcauaagguauaagaaa

SEQ ID NO: 2289033 - RNA, 19 nt, Homo sapiens
  misc_RNA (1)...(19): siRNA sense strand
acugcuaacuggagagcua

SEQ ID NO: 2289034 - RNA, 19 nt, Homo sapiens
  misc_RNA (1)...(19): siRNA sense strand
aagaaguagcaguggcaua

SEQ ID NO: 2289035 - RNA, 19 nt, Homo sapiens
  misc_RNA (1)...(19): siRNA sense strand
cagugaacgacaagaagaa

SEQ ID NO: 2289036 - RNA, 19 nt, Homo sapiens
  misc_RNA (1)...(19): siRNA sense strand
aacaaagguccuaaagaaa

SEQ ID NO: 2289037 - RNA, 19 nt, Homo sapiens
  misc_RNA (1)...(19): siRNA sense strand
auguagaagaucaggauga

SEQ ID NO: 2289038 - RNA, 19 nt, Homo sapiens
  misc_RNA (1)...(19): siRNA sense strand
gaggaguacaacuuggaaa

SEQ ID NO: 2289039 - RNA, 19 nt, Homo sapiens
  misc_RNA (1)...(19): siRNA sense strand
ugguagaguuaaccugaaa

SEQ ID NO: 2289040 - RNA, 19 nt, Homo sapiens
  misc_RNA (1)...(19): siRNA sense strand
uugcaauauuguugggcau

SEQ ID NO: 2289041 - RNA, 19 nt, Homo sapiens
  misc_RNA (1)...(19): siRNA sense strand
agaagaugggcuugaauuu

SEQ ID NO: 2289042 - RNA, 19 nt, Homo sapiens
  misc_RNA (1)...(19): siRNA sense strand
cuguuaauguagaagauca

SEQ ID NO: 2289043 - RNA, 19 nt, Homo sapiens
  misc_RNA (1)...(19): siRNA sense strand
gguucagucuauacaacaa

SEQ ID NO: 2289044 - RNA, 19 nt, Homo sapiens
  misc_RNA (1)...(19): siRNA sense strand
acaagaagaagaugggcuu

SEQ ID NO: 2289045 - RNA, 19 nt, Homo sapiens
  misc_RNA (1)...(19): siRNA sense strand
cuguagaucgugagcagua

SEQ ID NO: 2289046 - RNA, 19 nt, Homo sapiens
  misc_RNA (1)...(19): siRNA sense strand
cgaaauggugaaaggagga

SEQ ID NO: 2289047 - RNA, 19 nt, Homo sapiens
  misc_RNA (1)...(19): siRNA sense strand
auacaguugauguggaaau

SEQ ID NO: 2289048 - RNA, 19 nt, Homo sapiens
  misc_RNA (1)...(19): siRNA sense strand
acaacaagcaauggauaua

SEQ ID NO: 2289049 - RNA, 19 nt, Homo sapiens
  misc_RNA (1)...(19): siRNA sense strand
ccgagaaacuuguugguag

SEQ ID NO: 2289050 - RNA, 19 nt, Homo sapiens
  misc_RNA (1)...(19): siRNA sense strand
caacaacuccagaugggua

SEQ ID NO: 2289051 - RNA, 19 nt, Homo sapiens
  misc_RNA (1)...(19): siRNA sense strand
gggcacuacugugggacaa

SEQ ID NO: 2289052 - RNA, 19 nt, Homo sapiens
  misc_RNA (1)...(19): siRNA sense strand
acgaguuacuguugaggau

SEQ ID NO: 2289053 - RNA, 19 nt, Homo sapiens
  misc_RNA (1)...(19): siRNA sense strand
auagagaggcagagaccau

SEQ ID NO: 2289054 - RNA, 19 nt, Homo sapiens
  misc_RNA (1)...(19): siRNA sense strand
agugugugcuacugacaaa

SEQ ID NO: 2289055 - RNA, 19 nt, Homo sapiens
  misc_RNA (1)...(19): siRNA sense strand
guaaaugaccacuugccaa

SEQ ID NO: 2289056 - RNA, 19 nt, Homo sapiens
  misc_RNA (1)...(19): siRNA sense strand
cugacaaagaugagccuga

SEQ ID NO: 2289057 - RNA, 19 nt, Homo sapiens
  misc_RNA (1)...(19): siRNA sense strand
uagcaguggcauaagguau

SEQ ID NO: 2289058 - RNA, 19 nt, Homo sapiens
  misc_RNA (1)...(19): siRNA sense strand
gauccaacaggguggguca

SEQ ID NO: 2289059 - RNA, 19 nt, Homo sapiens
  misc_RNA (1)...(19): siRNA sense strand
gaccaaggagggagaacau

SEQ ID NO: 2289060 - RNA, 19 nt, Homo sapiens
  misc_RNA (1)...(19): siRNA sense strand
aauuguaacagaugccaaa

SEQ ID NO: 2289061 - RNA, 19 nt, Homo sapiens
  misc_RNA (1)...(19): siRNA sense strand
ggaugagggcccugagugu

SEQ ID NO: 2289062 - RNA, 19 nt, Homo sapiens
  misc_RNA (1)...(19): siRNA sense strand
gggcaaugaaaauggcaau

SEQ ID NO: 2289063 - RNA, 19 nt, Homo sapiens
  misc_RNA (1)...(19): siRNA sense strand
cggagauuguugcgguuga

SEQ ID NO: 2289064 - RNA, 19 nt, Homo sapiens
  misc_RNA (1)...(19): siRNA sense strand
auguggagacugaaagcaa

SEQ ID NO: 2289065 - RNA, 19 nt, Homo sapiens
  misc_RNA (1)...(19): siRNA sense strand
ccuccaaacuagaugccga

SEQ ID NO: 2289066 - RNA, 19 nt, Homo sapiens
  misc_RNA (1)...(19): siRNA sense strand
guacagagaauguggagac

SEQ ID NO: 2289067 - RNA, 19 nt, Homo sapiens
  misc_RNA (1)...(19): siRNA sense strand
gugaacgacaagaagaaga

SEQ ID NO: 2289068 - RNA, 19 nt, Homo sapiens
  misc_RNA (1)...(19): siRNA sense strand
ggaagaaaauacaguugau

SEQ ID NO: 2289069 - RNA, 19 nt, Homo sapiens
  misc_RNA (1)...(19): siRNA sense strand
ugaccaagaaccucggaau

SEQ ID NO: 2289070 - RNA, 19 nt, Homo sapiens
  misc_RNA (1)...(19): siRNA sense strand
cuguugaggauaaggacuu

SEQ ID NO: 2289071 - RNA, 19 nt, Homo sapiens
  misc_RNA (1)...(19): siRNA sense strand
acaaagguccuaaagaaaa

SEQ ID NO: 2289072 - RNA, 19 nt, Homo sapiens
  misc_RNA (1)...(19): siRNA sense strand
augagggcccugaguguaa

SEQ ID NO: 2289073 - RNA, 19 nt, Homo sapiens
  misc_RNA (1)...(19): siRNA sense strand
agaguuaaccugaaagagu

SEQ ID NO: 2289074 - RNA, 19 nt, Homo sapiens
  misc_RNA (1)...(19): siRNA sense strand
auuuaggacacuagcagaa

SEQ ID NO: 2289075 - RNA, 19 nt, Homo sapiens
  misc_RNA (1)...(19): siRNA sense strand
uauuuuauguggagagaga

SEQ ID NO: 2289076 - RNA, 19 nt, Homo sapiens
  misc_RNA (1)...(19): siRNA sense strand
gaucgugagcaguaugaau

SEQ ID NO: 2289077 - RNA, 19 nt, Homo sapiens
  misc_RNA (1)...(19): siRNA sense strand
uggguauacuccagaacuu

SEQ ID NO: 2289078 - RNA, 19 nt, Homo sapiens
  misc_RNA (1)...(19): siRNA sense strand
agcaauggauauaaagcau

SEQ ID NO: 2289079 - RNA, 19 nt, Homo sapiens
  misc_RNA (1)...(19): siRNA sense strand
uauaacagugagagauaga

SEQ ID NO: 2289080 - RNA, 19 nt, Homo sapiens
  misc_RNA (1)...(19): siRNA sense strand
uggcgguggaggaguacaa

SEQ ID NO: 2289081 - RNA, 19 nt, Homo sapiens
  misc_RNA (1)...(19): siRNA sense strand
uggagaugacaaaguguau

SEQ ID NO: 2289082 - RNA, 19 nt, Homo sapiens
  misc_RNA (1)...(19): siRNA sense strand
caagcaugcccaagacuau

SEQ ID NO: 2289083 - RNA, 19 nt, Homo sapiens
  misc_RNA (1)...(19): siRNA sense strand
acacugagaaccaagaaaa

SEQ ID NO: 2289084 - RNA, 19 nt, Homo sapiens
  misc_RNA (1)...(19): siRNA sense strand
acaaguaccaguugaaaau

SEQ ID NO: 2289085 - RNA, 19 nt, Homo sapiens
  misc_RNA (1)...(19): siRNA sense strand
aagaaaagcaacagaugau

SEQ ID NO: 2289086 - RNA, 19 nt, Homo sapiens
  misc_RNA (1)...(19): siRNA sense strand
agcaguggcauaagguaua

SEQ ID NO: 2289087 - RNA, 19 nt, Homo sapiens
  misc_RNA (1)...(19): siRNA sense strand
ucuuaauauuugccaguga

SEQ ID NO: 2289088 - RNA, 19 nt, Homo sapiens
  misc_RNA (1)...(19): siRNA sense strand
aggaagaggaagaggagga

SEQ ID NO: 2289089 - RNA, 19 nt, Homo sapiens
  misc_RNA (1)...(19): siRNA sense strand
aggaagaggaggaggaauc

SEQ ID NO: 2289090 - RNA, 19 nt, Homo sapiens
  misc_RNA (1)...(19): siRNA sense strand
acuuggaaggaaagggaua

SEQ ID NO: 2289091 - RNA, 19 nt, Homo sapiens
  misc_RNA (1)...(19): siRNA sense strand
aaggaaagggauaaagcaa

SEQ ID NO: 2289092 - RNA, 19 nt, Homo sapiens
  misc_RNA (1)...(19): siRNA sense strand
ccuauuaaucucagcaaaa

SEQ ID NO: 2289093 - RNA, 19 nt, Homo sapiens
  misc_RNA (1)...(19): siRNA sense strand
caguaaugccuucagggaa

SEQ ID NO: 2289094 - RNA, 19 nt, Homo sapiens
  misc_RNA (1)...(19): siRNA sense strand
augaagaugcauuccgaaa

SEQ ID NO: 2289095 - RNA, 19 nt, Homo sapiens
  misc_RNA (1)...(19): siRNA sense strand
aguaaugccuucagggaac

SEQ ID NO: 2289096 - RNA, 19 nt, Homo sapiens
  misc_RNA (1)...(19): siRNA sense strand
gccucaacuucgagagcuu

SEQ ID NO: 2289097 - RNA, 19 nt, Homo sapiens
  misc_RNA (1)...(19): siRNA sense strand
acauucgauuggauggaaa

SEQ ID NO: 2289098 - RNA, 19 nt, Homo sapiens
  misc_RNA (1)...(19): siRNA sense strand
aagaggaagaggaggagga

SEQ ID NO: 2289099 - RNA, 19 nt, Homo sapiens
  misc_RNA (1)...(19): siRNA sense strand
aggcccaggaagaggaaga

SEQ ID NO: 2289100 - RNA, 19 nt, Homo sapiens
  misc_RNA (1)...(19): siRNA sense strand
cagcaaaacuccacaagca

SEQ ID NO: 2289101 - RNA, 19 nt, Homo sapiens
  misc_RNA (1)...(19): siRNA sense strand
uggaaaugcacgaagauac

SEQ ID NO: 2289102 - RNA, 19 nt, Homo sapiens
  misc_RNA (1)...(19): siRNA sense strand
gaaucuacucccaggcuga

SEQ ID NO: 2289103 - RNA, 19 nt, Homo sapiens
  misc_RNA (1)...(19): siRNA sense strand
agggauaaagcaagaagca

SEQ ID NO: 2289104 - RNA, 19 nt, Homo sapiens
  misc_RNA (1)...(19): siRNA sense strand
cccuauuaaucucagcaaa

SEQ ID NO: 2289105 - RNA, 19 nt, Homo sapiens
  misc_RNA (1)...(19): siRNA sense strand
cuggauaauuuguacaacu

SEQ ID NO: 2289106 - RNA, 19 nt, Homo sapiens
  misc_RNA (1)...(19): siRNA sense strand
cuuggaaggaaagggauaa

SEQ ID NO: 2289107 - RNA, 19 nt, Homo sapiens
  misc_RNA (1)...(19): siRNA sense strand
cugauaacaacuuggacca

SEQ ID NO: 2289108 - RNA, 19 nt, Homo sapiens
  misc_RNA (1)...(19): siRNA sense strand
cuggaaaugcacgaagaua

SEQ ID NO: 2289109 - RNA, 19 nt, Homo sapiens
  misc_RNA (1)...(19): siRNA sense strand
gggauaaagcaagaagcau

SEQ ID NO: 2289110 - RNA, 19 nt, Homo sapiens
  misc_RNA (1)...(19): siRNA sense strand
gcaaaacuccacaagcaua

SEQ ID NO: 2289111 - RNA, 19 nt, Homo sapiens
  misc_RNA (1)...(19): siRNA sense strand
ugucaaagcaggaggcuga

SEQ ID NO: 2289112 - RNA, 19 nt, Homo sapiens
  misc_RNA (1)...(19): siRNA sense strand
cugcaacuccucagggaaa

SEQ ID NO: 2289113 - RNA, 19 nt, Homo sapiens
  misc_RNA (1)...(19): siRNA sense strand
auguaaaggguauaagaga

SEQ ID NO: 2289114 - RNA, 19 nt, Homo sapiens
  misc_RNA (1)...(19): siRNA sense strand
caggaggcugaaaggauua

SEQ ID NO: 2289115 - RNA, 19 nt, Homo sapiens
  misc_RNA (1)...(19): siRNA sense strand
guguaggauaacugcgcua

SEQ ID NO: 2289116 - RNA, 19 nt, Homo sapiens
  misc_RNA (1)...(19): siRNA sense strand
gggaaaugacugugaccuc

SEQ ID NO: 2289117 - RNA, 19 nt, Homo sapiens
  misc_RNA (1)...(19): siRNA sense strand
ccuacuaugcaaugggcuu

SEQ ID NO: 2289118 - RNA, 19 nt, Homo sapiens
  misc_RNA (1)...(19): siRNA sense strand
gugaaaugacagaaacgca

SEQ ID NO: 2289119 - RNA, 19 nt, Homo sapiens
  misc_RNA (1)...(19): siRNA sense strand
ccaagucuucaaauggaaa

SEQ ID NO: 2289120 - RNA, 19 nt, Homo sapiens
  misc_RNA (1)...(19): siRNA sense strand
cugagaaaucugguguaaa

SEQ ID NO: 2289121 - RNA, 19 nt, Homo sapiens
  misc_RNA (1)...(19): siRNA sense strand
gggagauggaggugugcaa

SEQ ID NO: 2289122 - RNA, 19 nt, Homo sapiens
  misc_RNA (1)...(19): siRNA sense strand
gggaagagauccaggacuc

SEQ ID NO: 2289123 - RNA, 19 nt, Homo sapiens
  misc_RNA (1)...(19): siRNA sense strand
cgcuaguggcggagaggua

SEQ ID NO: 2289124 - RNA, 19 nt, Homo sapiens
  misc_RNA (1)...(19): siRNA sense strand
gcaaggugcuggacgcgaa

SEQ ID NO: 2289125 - RNA, 19 nt, Homo sapiens
  misc_RNA (1)...(19): siRNA sense strand
agugauugagacugagaaa

SEQ ID NO: 2289126 - RNA, 19 nt, Homo sapiens
  misc_RNA (1)...(19): siRNA sense strand
cagaacucuuccagggcaa

SEQ ID NO: 2289127 - RNA, 19 nt, Homo sapiens
  misc_RNA (1)...(19): siRNA sense strand
ccauagagacuuaaaggca

SEQ ID NO: 2289128 - RNA, 19 nt, Homo sapiens
  misc_RNA (1)...(19): siRNA sense strand
agaccauuggcaaggguaa

SEQ ID NO: 2289129 - RNA, 19 nt, Homo sapiens
  misc_RNA (1)...(19): siRNA sense strand
caugaaagaucgauggaug

SEQ ID NO: 2289130 - RNA, 19 nt, Homo sapiens
  misc_RNA (1)...(19): siRNA sense strand
gcgagcugcaugagaagua

SEQ ID NO: 2289131 - RNA, 19 nt, Homo sapiens
  misc_RNA (1)...(19): siRNA sense strand
augaaagaucgauggauga

SEQ ID NO: 2289132 - RNA, 19 nt, Homo sapiens
  misc_RNA (1)...(19): siRNA sense strand
gcggaaagccagcagcaca

SEQ ID NO: 2289133 - RNA, 19 nt, Homo sapiens
  misc_RNA (1)...(19): siRNA sense strand
ccuaucugcuccugggcua

SEQ ID NO: 2289134 - RNA, 19 nt, Homo sapiens
  misc_RNA (1)...(19): siRNA sense strand
agagauacaacgaggugau

SEQ ID NO: 2289135 - RNA, 19 nt, Homo sapiens
  misc_RNA (1)...(19): siRNA sense strand
aagaauuucgggaggccaa

SEQ ID NO: 2289136 - RNA, 19 nt, Homo sapiens
  misc_RNA (1)...(19): siRNA sense strand
ccaacgagaugaugcggga

SEQ ID NO: 2289137 - RNA, 19 nt, Homo sapiens
  misc_RNA (1)...(19): siRNA sense strand
auagagacuuaaaggcaga

SEQ ID NO: 2289138 - RNA, 19 nt, Homo sapiens
  misc_RNA (1)...(19): siRNA sense strand
agagcgagcugcaugagaa

SEQ ID NO: 2289139 - RNA, 19 nt, Homo sapiens
  misc_RNA (1)...(19): siRNA sense strand
acacauccugacugggaaa

SEQ ID NO: 2289140 - RNA, 19 nt, Homo sapiens
  misc_RNA (1)...(19): siRNA sense strand
cgacaaagaaaaggaagaa

SEQ ID NO: 2289141 - RNA, 19 nt, Homo sapiens
  misc_RNA (1)...(19): siRNA sense strand
ccuuaaucccagcaagaga

SEQ ID NO: 2289142 - RNA, 19 nt, Homo sapiens
  misc_RNA (1)...(19): siRNA sense strand
gaguaacaacgcagaaaau

SEQ ID NO: 2289143 - RNA, 19 nt, Homo sapiens
  misc_RNA (1)...(19): siRNA sense strand
gcaaagaccgaguggagac

SEQ ID NO: 2289144 - RNA, 19 nt, Homo sapiens
  misc_RNA (1)...(19): siRNA sense strand
ggacagaaccucaaggagc

SEQ ID NO: 2289145 - RNA, 19 nt, Homo sapiens
  misc_RNA (1)...(19): siRNA sense strand
cuuuagagcaaaucaugaa

SEQ ID NO: 2289146 - RNA, 19 nt, Homo sapiens
  misc_RNA (1)...(19): siRNA sense strand
gguuauacacgggaagaga

SEQ ID NO: 2289147 - RNA, 19 nt, Homo sapiens
  misc_RNA (1)...(19): siRNA sense strand
uugauuaccuaguggcuca

SEQ ID NO: 2289148 - RNA, 19 nt, Homo sapiens
  misc_RNA (1)...(19): siRNA sense strand
gcgaaguaagaauaaugaa

SEQ ID NO: 2289149 - RNA, 19 nt, Homo sapiens
  misc_RNA (1)...(19): siRNA sense strand
acgacaaagaaaaggaaga

SEQ ID NO: 2289150 - RNA, 19 nt, Homo sapiens
  misc_RNA (1)...(19): siRNA sense strand
cuggagaggaagaagacca

SEQ ID NO: 2289151 - RNA, 19 nt, Homo sapiens
  misc_RNA (1)...(19): siRNA sense strand
ccucaagaccauuggcaag

SEQ ID NO: 2289152 - RNA, 19 nt, Homo sapiens
  misc_RNA (1)...(19): siRNA sense strand
gcggcaacgacaaagaaaa

SEQ ID NO: 2289153 - RNA, 19 nt, Homo sapiens
  misc_RNA (1)...(19): siRNA sense strand
ccuccagccuccagaaacu

SEQ ID NO: 2289154 - RNA, 19 nt, Homo sapiens
  misc_RNA (1)...(19): siRNA sense strand
gagucagggcggaaagcca

SEQ ID NO: 2289155 - RNA, 19 nt, Homo sapiens
  misc_RNA (1)...(19): siRNA sense strand
aggugaaguuggcccgaca

SEQ ID NO: 2289156 - RNA, 19 nt, Homo sapiens
  misc_RNA (1)...(19): siRNA sense strand
aagagguagcugugaagau

SEQ ID NO: 2289157 - RNA, 19 nt, Homo sapiens
  misc_RNA (1)...(19): siRNA sense strand
aagcaaagaccgaguggag

SEQ ID NO: 2289158 - RNA, 19 nt, Homo sapiens
  misc_RNA (1)...(19): siRNA sense strand
gggagauggaggugugcaa

SEQ ID NO: 2289159 - RNA, 19 nt, Homo sapiens
  misc_RNA (1)...(19): siRNA sense strand
gggaagagauccaggacuc

SEQ ID NO: 2289160 - RNA, 19 nt, Homo sapiens
  misc_RNA (1)...(19): siRNA sense strand
cgcuaguggcggagaggua

SEQ ID NO: 2289161 - RNA, 19 nt, Homo sapiens
  misc_RNA (1)...(19): siRNA sense strand
gcaaggugcuggacgcgaa

SEQ ID NO: 2289162 - RNA, 19 nt, Homo sapiens
  misc_RNA (1)...(19): siRNA sense strand
agugauugagacugagaaa

SEQ ID NO: 2289163 - RNA, 19 nt, Homo sapiens
  misc_RNA (1)...(19): siRNA sense strand
cagaacucuuccagggcaa

SEQ ID NO: 2289164 - RNA, 19 nt, Homo sapiens
  misc_RNA (1)...(19): siRNA sense strand
ccauagagacuuaaaggca

SEQ ID NO: 2289165 - RNA, 19 nt, Homo sapiens
  misc_RNA (1)...(19): siRNA sense strand
agaccauuggcaaggguaa

SEQ ID NO: 2289166 - RNA, 19 nt, Homo sapiens
  misc_RNA (1)...(19): siRNA sense strand
caugaaagaucgauggaug

SEQ ID NO: 2289167 - RNA, 19 nt, Homo sapiens
  misc_RNA (1)...(19): siRNA sense strand
gcgagcugcaugagaagua

SEQ ID NO: 2289168 - RNA, 19 nt, Homo sapiens
  misc_RNA (1)...(19): siRNA sense strand
augaaagaucgauggauga

SEQ ID NO: 2289169 - RNA, 19 nt, Homo sapiens
  misc_RNA (1)...(19): siRNA sense strand
gcggaaagccagcagcaca

SEQ ID NO: 2289170 - RNA, 19 nt, Homo sapiens
  misc_RNA (1)...(19): siRNA sense strand
ccuaucugcuccugggcua

SEQ ID NO: 2289171 - RNA, 19 nt, Homo sapiens
  misc_RNA (1)...(19): siRNA sense strand
agagauacaacgaggugau

SEQ ID NO: 2289172 - RNA, 19 nt, Homo sapiens
  misc_RNA (1)...(19): siRNA sense strand
aagaauuucgggaggccaa

SEQ ID NO: 2289173 - RNA, 19 nt, Homo sapiens
  misc_RNA (1)...(19): siRNA sense strand
ccaacgagaugaugcggga

SEQ ID NO: 2289174 - RNA, 19 nt, Homo sapiens
  misc_RNA (1)...(19): siRNA sense strand
auagagacuuaaaggcaga

SEQ ID NO: 2289175 - RNA, 19 nt, Homo sapiens
  misc_RNA (1)...(19): siRNA sense strand
agagcgagcugcaugagaa

SEQ ID NO: 2289176 - RNA, 19 nt, Homo sapiens
  misc_RNA (1)...(19): siRNA sense strand
acacauccugacugggaaa

SEQ ID NO: 2289177 - RNA, 19 nt, Homo sapiens
  misc_RNA (1)...(19): siRNA sense strand
cgacaaagaaaaggaagaa

SEQ ID NO: 2289178 - RNA, 19 nt, Homo sapiens
  misc_RNA (1)...(19): siRNA sense strand
ccuuaaucccagcaagaga

SEQ ID NO: 2289179 - RNA, 19 nt, Homo sapiens
  misc_RNA (1)...(19): siRNA sense strand
gaguaacaacgcagaaaau

SEQ ID NO: 2289180 - RNA, 19 nt, Homo sapiens
  misc_RNA (1)...(19): siRNA sense strand
gcaaagaccgaguggagac

SEQ ID NO: 2289181 - RNA, 19 nt, Homo sapiens
  misc_RNA (1)...(19): siRNA sense strand
ggacagaaccucaaggagc

SEQ ID NO: 2289182 - RNA, 19 nt, Homo sapiens
  misc_RNA (1)...(19): siRNA sense strand
cuuuagagcaaaucaugaa

SEQ ID NO: 2289183 - RNA, 19 nt, Homo sapiens
  misc_RNA (1)...(19): siRNA sense strand
gguuauacacgggaagaga

SEQ ID NO: 2289184 - RNA, 19 nt, Homo sapiens
  misc_RNA (1)...(19): siRNA sense strand
uugauuaccuaguggcuca

SEQ ID NO: 2289185 - RNA, 19 nt, Homo sapiens
  misc_RNA (1)...(19): siRNA sense strand
gcgaaguaagaauaaugaa

SEQ ID NO: 2289186 - RNA, 19 nt, Homo sapiens
  misc_RNA (1)...(19): siRNA sense strand
acgacaaagaaaaggaaga

SEQ ID NO: 2289187 - RNA, 19 nt, Homo sapiens
  misc_RNA (1)...(19): siRNA sense strand
cuggagaggaagaagacca

SEQ ID NO: 2289188 - RNA, 19 nt, Homo sapiens
  misc_RNA (1)...(19): siRNA sense strand
ccucaagaccauuggcaag

SEQ ID NO: 2289189 - RNA, 19 nt, Homo sapiens
  misc_RNA (1)...(19): siRNA sense strand
gcggcaacgacaaagaaaa

SEQ ID NO: 2289190 - RNA, 19 nt, Homo sapiens
  misc_RNA (1)...(19): siRNA sense strand
ccuccagccuccagaaacu

SEQ ID NO: 2289191 - RNA, 19 nt, Homo sapiens
  misc_RNA (1)...(19): siRNA sense strand
gagucagggcggaaagcca

SEQ ID NO: 2289192 - RNA, 19 nt, Homo sapiens
  misc_RNA (1)...(19): siRNA sense strand
aggugaaguuggcccgaca

SEQ ID NO: 2289193 - RNA, 19 nt, Homo sapiens
  misc_RNA (1)...(19): siRNA sense strand
aagagguagcugugaagau

SEQ ID NO: 2289194 - RNA, 19 nt, Homo sapiens
  misc_RNA (1)...(19): siRNA sense strand
aagcaaagaccgaguggag

SEQ ID NO: 2289195 - RNA, 19 nt, Homo sapiens
  misc_RNA (1)...(19): siRNA sense strand
gggaagugauggagaggag

SEQ ID NO: 2289196 - RNA, 19 nt, Homo sapiens
  misc_RNA (1)...(19): siRNA sense strand
gagaagaacuccuggaagc

SEQ ID NO: 2289197 - RNA, 19 nt, Homo sapiens
  misc_RNA (1)...(19): siRNA sense strand
ugaucuacaaccagacaaa

SEQ ID NO: 2289198 - RNA, 19 nt, Homo sapiens
  misc_RNA (1)...(19): siRNA sense strand
augaucuacaagugggaaa

SEQ ID NO: 2289199 - RNA, 19 nt, Homo sapiens
  misc_RNA (1)...(19): siRNA sense strand
ugggagcagaguuggcaaa

SEQ ID NO: 2289200 - RNA, 19 nt, Homo sapiens
  misc_RNA (1)...(19): siRNA sense strand
cuauccuagacauggaaua

SEQ ID NO: 2289201 - RNA, 19 nt, Homo sapiens
  misc_RNA (1)...(19): siRNA sense strand
augucuaccgccuggauaa

SEQ ID NO: 2289202 - RNA, 19 nt, Homo sapiens
  misc_RNA (1)...(19): siRNA sense strand
uggaauacaccauugacau

SEQ ID NO: 2289203 - RNA, 19 nt, Homo sapiens
  misc_RNA (1)...(19): siRNA sense strand
gggaagugauggagaggag

SEQ ID NO: 2289204 - RNA, 19 nt, Homo sapiens
  misc_RNA (1)...(19): siRNA sense strand
gagaagaacuccuggaagc

SEQ ID NO: 2289205 - RNA, 19 nt, Homo sapiens
  misc_RNA (1)...(19): siRNA sense strand
ugaucuacaaccagacaaa

SEQ ID NO: 2289206 - RNA, 19 nt, Homo sapiens
  misc_RNA (1)...(19): siRNA sense strand
augaucuacaagugggaaa

SEQ ID NO: 2289207 - RNA, 19 nt, Homo sapiens
  misc_RNA (1)...(19): siRNA sense strand
augucuaccgccuggauaa

SEQ ID NO: 2289208 - RNA, 19 nt, Homo sapiens
  misc_RNA (1)...(19): siRNA sense strand
gggaagugauggagaggag

SEQ ID NO: 2289209 - RNA, 19 nt, Homo sapiens
  misc_RNA (1)...(19): siRNA sense strand
gagaagaacuccuggaagc

SEQ ID NO: 2289210 - RNA, 19 nt, Homo sapiens
  misc_RNA (1)...(19): siRNA sense strand
ugaucuacaaccagacaaa

SEQ ID NO: 2289211 - RNA, 19 nt, Homo sapiens
  misc_RNA (1)...(19): siRNA sense strand
augaucuacaagugggaaa

SEQ ID NO: 2289212 - RNA, 19 nt, Homo sapiens
  misc_RNA (1)...(19): siRNA sense strand
augucuaccgccuggauaa

SEQ ID NO: 2289213 - RNA, 19 nt, Homo sapiens
  misc_RNA (1)...(19): siRNA sense strand
gggaagugauggagaggag

SEQ ID NO: 2289214 - RNA, 19 nt, Homo sapiens
  misc_RNA (1)...(19): siRNA sense strand
gagaagaacuccuggaagc

SEQ ID NO: 2289215 - RNA, 19 nt, Homo sapiens
  misc_RNA (1)...(19): siRNA sense strand
ugaucuacaaccagacaaa

SEQ ID NO: 2289216 - RNA, 19 nt, Homo sapiens
  misc_RNA (1)...(19): siRNA sense strand
augaucuacaagugggaaa

SEQ ID NO: 2289217 - RNA, 19 nt, Homo sapiens
  misc_RNA (1)...(19): siRNA sense strand
augucuaccgccuggauaa

SEQ ID NO: 2289218 - RNA, 19 nt, Homo sapiens
  misc_RNA (1)...(19): siRNA sense strand
caacagaaauauugggaga

SEQ ID NO: 2289219 - RNA, 19 nt, Homo sapiens
  misc_RNA (1)...(19): siRNA sense strand
aagaaaacgaacugggaaa

SEQ ID NO: 2289220 - RNA, 19 nt, Homo sapiens
  misc_RNA (1)...(19): siRNA sense strand
ggaaagaugaugcaagcga

SEQ ID NO: 2289221 - RNA, 19 nt, Homo sapiens
  misc_RNA (1)...(19): siRNA sense strand
uauuaaagccacagggaag

SEQ ID NO: 2289222 - RNA, 19 nt, Homo sapiens
  misc_RNA (1)...(19): siRNA sense strand
agauaaaaccagagcagga

SEQ ID NO: 2289223 - RNA, 19 nt, Homo sapiens
  misc_RNA (1)...(19): siRNA sense strand
gauacuuggcugacgguga

SEQ ID NO: 2289224 - RNA, 19 nt, Homo sapiens
  misc_RNA (1)...(19): siRNA sense strand
agggaagaaggaagaugaa

SEQ ID NO: 2289225 - RNA, 19 nt, Homo sapiens
  misc_RNA (1)...(19): siRNA sense strand
acgcggaccuggaugccaa

SEQ ID NO: 2289226 - RNA, 19 nt, Homo sapiens
  misc_RNA (1)...(19): siRNA sense strand
aagcaaauggagaaguuca

SEQ ID NO: 2289227 - RNA, 19 nt, Homo sapiens
  misc_RNA (1)...(19): siRNA sense strand
caggaagguacaaacacaa

SEQ ID NO: 2289228 - RNA, 19 nt, Homo sapiens
  misc_RNA (1)...(19): siRNA sense strand
uugacaaauugaagaugga

SEQ ID NO: 2289229 - RNA, 19 nt, Homo sapiens
  misc_RNA (1)...(19): siRNA sense strand
caacagaaauauugggaga

SEQ ID NO: 2289230 - RNA, 19 nt, Homo sapiens
  misc_RNA (1)...(19): siRNA sense strand
aagaaaacgaacugggaaa

SEQ ID NO: 2289231 - RNA, 19 nt, Homo sapiens
  misc_RNA (1)...(19): siRNA sense strand
ccacuauggcccugggaga

SEQ ID NO: 2289232 - RNA, 19 nt, Homo sapiens
  misc_RNA (1)...(19): siRNA sense strand
uccugaugcuguugggaaa

SEQ ID NO: 2289233 - RNA, 19 nt, Homo sapiens
  misc_RNA (1)...(19): siRNA sense strand
ggaaagaugaugcaagcga

SEQ ID NO: 2289234 - RNA, 19 nt, Homo sapiens
  misc_RNA (1)...(19): siRNA sense strand
uauuaaagccacagggaag

SEQ ID NO: 2289235 - RNA, 19 nt, Homo sapiens
  misc_RNA (1)...(19): siRNA sense strand
agauaaaaccagagcagga

SEQ ID NO: 2289236 - RNA, 19 nt, Homo sapiens
  misc_RNA (1)...(19): siRNA sense strand
gauacuuggcugacgguga

SEQ ID NO: 2289237 - RNA, 19 nt, Homo sapiens
  misc_RNA (1)...(19): siRNA sense strand
agggaagaaggaagaugaa

SEQ ID NO: 2289238 - RNA, 19 nt, Homo sapiens
  misc_RNA (1)...(19): siRNA sense strand
acgcggaccuggaugccaa

SEQ ID NO: 2289239 - RNA, 19 nt, Homo sapiens
  misc_RNA (1)...(19): siRNA sense strand
aagcaaauggagaaguuca

SEQ ID NO: 2289240 - RNA, 19 nt, Homo sapiens
  misc_RNA (1)...(19): siRNA sense strand
caggaagguacaaacacaa

SEQ ID NO: 2289241 - RNA, 19 nt, Homo sapiens
  misc_RNA (1)...(19): siRNA sense strand
ugggaaaaccgauaaagaa

SEQ ID NO: 2289242 - RNA, 19 nt, Homo sapiens
  misc_RNA (1)...(19): siRNA sense strand
uugacaaauugaagaugga

SEQ ID NO: 2289243 - RNA, 19 nt, Homo sapiens
  misc_RNA (1)...(19): siRNA sense strand
gggaaaaccgauaaagaac

SEQ ID NO: 2289244 - RNA, 19 nt, Homo sapiens
  misc_RNA (1)...(19): siRNA sense strand
caacagaaauauugggaga

SEQ ID NO: 2289245 - RNA, 19 nt, Homo sapiens
  misc_RNA (1)...(19): siRNA sense strand
uauuaaagccacagggaag

SEQ ID NO: 2289246 - RNA, 19 nt, Homo sapiens
  misc_RNA (1)...(19): siRNA sense strand
agggaagaaggaagaugaa

SEQ ID NO: 2289247 - RNA, 19 nt, Homo sapiens
  misc_RNA (1)...(19): siRNA sense strand
acgcggaccuggaugccaa

SEQ ID NO: 2289248 - RNA, 19 nt, Homo sapiens
  misc_RNA (1)...(19): siRNA sense strand
acauaaagaaagugagaca

SEQ ID NO: 2289249 - RNA, 19 nt, Homo sapiens
  misc_RNA (1)...(19): siRNA sense strand
cugcaguggaggagauaaa

SEQ ID NO: 2289250 - RNA, 19 nt, Homo sapiens
  misc_RNA (1)...(19): siRNA sense strand
ugacagaaauggagggaac

SEQ ID NO: 2289251 - RNA, 19 nt, Homo sapiens
  misc_RNA (1)...(19): siRNA sense strand
uggauaaagcacacagaaa

SEQ ID NO: 2289252 - RNA, 19 nt, Homo sapiens
  misc_RNA (1)...(19): siRNA sense strand
auauauugguggagaacga

SEQ ID NO: 2289253 - RNA, 19 nt, Homo sapiens
  misc_RNA (1)...(19): siRNA sense strand
agagggaaacauaaagaaa

SEQ ID NO: 2289254 - RNA, 19 nt, Homo sapiens
  misc_RNA (1)...(19): siRNA sense strand
aggcguacgaagagaagua

SEQ ID NO: 2289255 - RNA, 19 nt, Homo sapiens
  misc_RNA (1)...(19): siRNA sense strand
acauaaaacuucugcagua

SEQ ID NO: 2289256 - RNA, 19 nt, Homo sapiens
  misc_RNA (1)...(19): siRNA sense strand
cauacauugagaagaguaa

SEQ ID NO: 2289257 - RNA, 19 nt, Homo sapiens
  misc_RNA (1)...(19): siRNA sense strand
uugacaaggaagcgaauaa

SEQ ID NO: 2289258 - RNA, 19 nt, Homo sapiens
  misc_RNA (1)...(19): siRNA sense strand
gggagguggucgcuguaaa

SEQ ID NO: 2289259 - RNA, 19 nt, Homo sapiens
  misc_RNA (1)...(19): siRNA sense strand
agggaaacauaaagaaagu

SEQ ID NO: 2289260 - RNA, 19 nt, Homo sapiens
  misc_RNA (1)...(19): siRNA sense strand
ucagagaagaagacaggaa

SEQ ID NO: 2289261 - RNA, 19 nt, Homo sapiens
  misc_RNA (1)...(19): siRNA sense strand
cugaagagcaccuaagaga

SEQ ID NO: 2289262 - RNA, 19 nt, Homo sapiens
  misc_RNA (1)...(19): siRNA sense strand
guggaucaaauaagggaua

SEQ ID NO: 2289263 - RNA, 19 nt, Homo sapiens
  misc_RNA (1)...(19): siRNA sense strand
cgagaaauauauuggugga

SEQ ID NO: 2289264 - RNA, 19 nt, Homo sapiens
  misc_RNA (1)...(19): siRNA sense strand
caacagagccuaucggcau

SEQ ID NO: 2289265 - RNA, 19 nt, Homo sapiens
  misc_RNA (1)...(19): siRNA sense strand
aaaugaaagccgaguugua

SEQ ID NO: 2289266 - RNA, 19 nt, Homo sapiens
  misc_RNA (1)...(19): siRNA sense strand
agacaggaagacaggaaau

SEQ ID NO: 2289267 - RNA, 19 nt, Homo sapiens
  misc_RNA (1)...(19): siRNA sense strand
uaaugaaagccuuggccaa

SEQ ID NO: 2289268 - RNA, 19 nt, Homo sapiens
  misc_RNA (1)...(19): siRNA sense strand
aguacaagggagugugcua

SEQ ID NO: 2289269 - RNA, 19 nt, Homo sapiens
  misc_RNA (1)...(19): siRNA sense strand
ucgcagauuuauucagcaa

SEQ ID NO: 2289270 - RNA, 19 nt, Homo sapiens
  misc_RNA (1)...(19): siRNA sense strand
gcauaguacugaagagcac

SEQ ID NO: 2289271 - RNA, 19 nt, Homo sapiens
  misc_RNA (1)...(19): siRNA sense strand
gagaauagccaaagaaaac

SEQ ID NO: 2289272 - RNA, 19 nt, Homo sapiens
  misc_RNA (1)...(19): siRNA sense strand
ccaaaauguauucgagcaa

SEQ ID NO: 2289273 - RNA, 19 nt, Homo sapiens
  misc_RNA (1)...(19): siRNA sense strand
gguggaauucaguggucaa

SEQ ID NO: 2289274 - RNA, 19 nt, Homo sapiens
  misc_RNA (1)...(19): siRNA sense strand
ccccaaagccaaaagauaa

SEQ ID NO: 2289275 - RNA, 19 nt, Homo sapiens
  misc_RNA (1)...(19): siRNA sense strand
gggaucuggcaacgagaaa

SEQ ID NO: 2289276 - RNA, 19 nt, Homo sapiens
  misc_RNA (1)...(19): siRNA sense strand
guacaaccucagugggaca

SEQ ID NO: 2289277 - RNA, 19 nt, Homo sapiens
  misc_RNA (1)...(19): siRNA sense strand
ugggaauguaugugccaaa

SEQ ID NO: 2289278 - RNA, 19 nt, Homo sapiens
  misc_RNA (1)...(19): siRNA sense strand
ucucagauaugcaagggua

SEQ ID NO: 2289279 - RNA, 19 nt, Homo sapiens
  misc_RNA (1)...(19): siRNA sense strand
aauuggagauuuuggguua

SEQ ID NO: 2289280 - RNA, 19 nt, Homo sapiens
  misc_RNA (1)...(19): siRNA sense strand
aaucacugacagagagcaa

SEQ ID NO: 2289281 - RNA, 19 nt, Homo sapiens
  misc_RNA (1)...(19): siRNA sense strand
aauuguuaccagauggaaa

SEQ ID NO: 2289282 - RNA, 19 nt, Homo sapiens
  misc_RNA (1)...(19): siRNA sense strand
cuguauugcugcuucuaaa

SEQ ID NO: 2289283 - RNA, 19 nt, Homo sapiens
  misc_RNA (1)...(19): siRNA sense strand
ggaaauugaacuuagcuca

SEQ ID NO: 2289284 - RNA, 19 nt, Homo sapiens
  misc_RNA (1)...(19): siRNA sense strand
cagaaugcuggaacaauaa

SEQ ID NO: 2289285 - RNA, 19 nt, Homo sapiens
  misc_RNA (1)...(19): siRNA sense strand
gucaagagggaaacauaaa

SEQ ID NO: 2289286 - RNA, 19 nt, Homo sapiens
  misc_RNA (1)...(19): siRNA sense strand
ggcccaauuucgauggauu

SEQ ID NO: 2289287 - RNA, 19 nt, Homo sapiens
  misc_RNA (1)...(19): siRNA sense strand
augagaaugaagaguacaa

SEQ ID NO: 2289288 - RNA, 19 nt, Homo sapiens
  misc_RNA (1)...(19): siRNA sense strand
agagaagaagacaggaaga

SEQ ID NO: 2289289 - RNA, 19 nt, Homo sapiens
  misc_RNA (1)...(19): siRNA sense strand
uaaccaaagucuugccaca

SEQ ID NO: 2289290 - RNA, 19 nt, Homo sapiens
  misc_RNA (1)...(19): siRNA sense strand
ccagaaucacugacagaga

SEQ ID NO: 2289291 - RNA, 19 nt, Homo sapiens
  misc_RNA (1)...(19): siRNA sense strand
gauaaagcacacagaaacu

SEQ ID NO: 2289292 - RNA, 19 nt, Homo sapiens
  misc_RNA (1)...(19): siRNA sense strand
ugagaauagccaaagaaaa

SEQ ID NO: 2289293 - RNA, 19 nt, Homo sapiens
  misc_RNA (1)...(19): siRNA sense strand
ucaguggucaagagggaaa

SEQ ID NO: 2289294 - RNA, 19 nt, Homo sapiens
  misc_RNA (1)...(19): siRNA sense strand
uggucaagagggaaacaua

SEQ ID NO: 2289295 - RNA, 19 nt, Homo sapiens
  misc_RNA (1)...(19): siRNA sense strand
ccaacauuacagaggccua

SEQ ID NO: 2289296 - RNA, 19 nt, Homo sapiens
  misc_RNA (1)...(19): siRNA sense strand
ggaaaucugcaguggagga

SEQ ID NO: 2289297 - RNA, 19 nt, Homo sapiens
  misc_RNA (1)...(19): siRNA sense strand
augcaaggguauggaguau

SEQ ID NO: 2289298 - RNA, 19 nt, Homo sapiens
  misc_RNA (1)...(19): siRNA sense strand
ggauaacauggcuggauga

SEQ ID NO: 2289299 - RNA, 19 nt, Homo sapiens
  misc_RNA (1)...(19): siRNA sense strand
gaugagucaaccaggcaua

SEQ ID NO: 2289300 - RNA, 19 nt, Homo sapiens
  misc_RNA (1)...(19): siRNA sense strand
gcaacagacaaauggaguu

SEQ ID NO: 2289301 - RNA, 19 nt, Homo sapiens
  misc_RNA (1)...(19): siRNA sense strand
gaaccagauuucaggccuu

SEQ ID NO: 2289302 - RNA, 19 nt, Homo sapiens
  misc_RNA (1)...(19): siRNA sense strand
cuauauaucagaaugguga

SEQ ID NO: 2289303 - RNA, 19 nt, Homo sapiens
  misc_RNA (1)...(19): siRNA sense strand
ccugaaaucccuacagcau

SEQ ID NO: 2289304 - RNA, 19 nt, Homo sapiens
  misc_RNA (1)...(19): siRNA sense strand
aguaaaagaaccuggugaa

SEQ ID NO: 2289305 - RNA, 19 nt, Homo sapiens
  misc_RNA (1)...(19): siRNA sense strand
gggauggcaguguuagaua

SEQ ID NO: 2289306 - RNA, 19 nt, Homo sapiens
  misc_RNA (1)...(19): siRNA sense strand
auucaguggucaagaggga

SEQ ID NO: 2289307 - RNA, 19 nt, Homo sapiens
  misc_RNA (1)...(19): siRNA sense strand
acuuagugauccuggcauu

SEQ ID NO: 2289308 - RNA, 19 nt, Homo sapiens
  misc_RNA (1)...(19): siRNA sense strand
agaaauauauugguggaga

SEQ ID NO: 2289309 - RNA, 19 nt, Homo sapiens
  misc_RNA (1)...(19): siRNA sense strand
uggaauaucucgaggugcu

SEQ ID NO: 2289310 - RNA, 19 nt, Homo sapiens
  misc_RNA (1)...(19): siRNA sense strand
uaugaugagaauagccaaa

SEQ ID NO: 2289311 - RNA, 19 nt, Homo sapiens
  misc_RNA (1)...(19): siRNA sense strand
gccaauucuaugaagcaaa

SEQ ID NO: 2289312 - RNA, 19 nt, Homo sapiens
  misc_RNA (1)...(19): siRNA sense strand
augcaaagccacugccaga

SEQ ID NO: 2289313 - RNA, 19 nt, Homo sapiens
  misc_RNA (1)...(19): siRNA sense strand
agacagagggagaggaaca

SEQ ID NO: 2289314 - RNA, 19 nt, Homo sapiens
  misc_RNA (1)...(19): siRNA sense strand
ggagaagaagcgauggaga

SEQ ID NO: 2289315 - RNA, 19 nt, Homo sapiens
  misc_RNA (1)...(19): siRNA sense strand
ggggaaagauaguggguuc

SEQ ID NO: 2289316 - RNA, 19 nt, Homo sapiens
  misc_RNA (1)...(19): siRNA sense strand
ccuaugacccagaggcaga

SEQ ID NO: 2289317 - RNA, 19 nt, Homo sapiens
  misc_RNA (1)...(19): siRNA sense strand
gcuacaucaaggaggaaga

SEQ ID NO: 2289318 - RNA, 19 nt, Homo sapiens
  misc_RNA (1)...(19): siRNA sense strand
uugaauucuuggugagguu

SEQ ID NO: 2289319 - RNA, 19 nt, Homo sapiens
  misc_RNA (1)...(19): siRNA sense strand
aaagccagcaugagagaau

SEQ ID NO: 2289320 - RNA, 19 nt, Homo sapiens
  misc_RNA (1)...(19): siRNA sense strand
ugaggacuuuagagaggaa

SEQ ID NO: 2289321 - RNA, 19 nt, Homo sapiens
  misc_RNA (1)...(19): siRNA sense strand
ccaugacaacuguaggcua

SEQ ID NO: 2289322 - RNA, 19 nt, Homo sapiens
  misc_RNA (1)...(19): siRNA sense strand
ugcgauugcagguguguua

SEQ ID NO: 2289323 - RNA, 19 nt, Homo sapiens
  misc_RNA (1)...(19): siRNA sense strand
ccaaagaaacgaaugaggu

SEQ ID NO: 2289324 - RNA, 19 nt, Homo sapiens
  misc_RNA (1)...(19): siRNA sense strand
ucauugacauuguggccau

SEQ ID NO: 2289325 - RNA, 19 nt, Homo sapiens
  misc_RNA (1)...(19): siRNA sense strand
ccaaggacgugcugggcuu

SEQ ID NO: 2289326 - RNA, 19 nt, Homo sapiens
  misc_RNA (1)...(19): siRNA sense strand
ucuacuacgccgagaggau

SEQ ID NO: 2289327 - RNA, 19 nt, Homo sapiens
  misc_RNA (1)...(19): siRNA sense strand
ccaugacgacccugggcua

SEQ ID NO: 2289328 - RNA, 19 nt, Homo sapiens
  misc_RNA (1)...(19): siRNA sense strand
gcgaggacgagcuggagau

SEQ ID NO: 2289329 - RNA, 19 nt, Homo sapiens
  misc_RNA (1)...(19): siRNA sense strand
agaaauuaacagagcaggu

SEQ ID NO: 2289330 - RNA, 19 nt, Homo sapiens
  misc_RNA (1)...(19): siRNA sense strand
agaucgagaacguucgcaa

SEQ ID NO: 2289331 - RNA, 19 nt, Homo sapiens
  misc_RNA (1)...(19): siRNA sense strand
ucauugacuuuguggccau

SEQ ID NO: 2289332 - RNA, 19 nt, Homo sapiens
  misc_RNA (1)...(19): siRNA sense strand
ccaaagacgugcugggcuu

SEQ ID NO: 2289333 - RNA, 19 nt, Homo sapiens
  misc_RNA (1)...(19): siRNA sense strand
gcaacaagacggugaccca

SEQ ID NO: 2289334 - RNA, 19 nt, Homo sapiens
  misc_RNA (1)...(19): siRNA sense strand
aagaagaagaacaaacaca

SEQ ID NO: 2289335 - RNA, 19 nt, Homo sapiens
  misc_RNA (1)...(19): siRNA sense strand
uggaaacccaugagggcuu

SEQ ID NO: 2289336 - RNA, 19 nt, Homo sapiens
  misc_RNA (1)...(19): siRNA sense strand
acguggagguggagacgga

SEQ ID NO: 2289337 - RNA, 19 nt, Homo sapiens
  misc_RNA (1)...(19): siRNA sense strand
ccaugacgacccugggcua

SEQ ID NO: 2289338 - RNA, 19 nt, Homo sapiens
  misc_RNA (1)...(19): siRNA sense strand
ugcccaagaagaagaacaa

SEQ ID NO: 2289339 - RNA, 19 nt, Homo sapiens
  misc_RNA (1)...(19): siRNA sense strand
aggguaugaucgagaggaa

SEQ ID NO: 2289340 - RNA, 19 nt, Homo sapiens
  misc_RNA (1)...(19): siRNA sense strand
ccuuuaauaucgaccgcaa

SEQ ID NO: 2289341 - RNA, 19 nt, Homo sapiens
  misc_RNA (1)...(19): siRNA sense strand
ccgcuaggguaguggccuu

SEQ ID NO: 2289342 - RNA, 19 nt, Homo sapiens
  misc_RNA (1)...(19): siRNA sense strand
ugaaggaggagauggccaa

SEQ ID NO: 2289343 - RNA, 19 nt, Homo sapiens
  misc_RNA (1)...(19): siRNA sense strand
aaacaugucugaaggagga

SEQ ID NO: 2289344 - RNA, 19 nt, Homo sapiens
  misc_RNA (1)...(19): siRNA sense strand
ggguaugaucgagaggaaa

SEQ ID NO: 2289345 - RNA, 19 nt, Homo sapiens
  misc_RNA (1)...(19): siRNA sense strand
agguagagacagagcccau

SEQ ID NO: 2289346 - RNA, 19 nt, Homo sapiens
  misc_RNA (1)...(19): siRNA sense strand
aggagauggccaagggcga

SEQ ID NO: 2289347 - RNA, 19 nt, Homo sapiens
  misc_RNA (1)...(19): siRNA sense strand
ccaugacgacacugggcua

SEQ ID NO: 2289348 - RNA, 19 nt, Homo sapiens
  misc_RNA (1)...(19): siRNA sense strand
gaagaggguaugaucgaga

SEQ ID NO: 2289349 - RNA, 19 nt, Homo sapiens
  misc_RNA (1)...(19): siRNA sense strand
ugaccuacaucgagggcgu

SEQ ID NO: 2289350 - RNA, 19 nt, Homo sapiens
  misc_RNA (1)...(19): siRNA sense strand
cgacacugggcuacggaga

SEQ ID NO: 2289351 - RNA, 19 nt, Homo sapiens
  misc_RNA (1)...(19): siRNA sense strand
gguaaugaccacaccgacu

SEQ ID NO: 2289352 - RNA, 19 nt, Homo sapiens
  misc_RNA (1)...(19): siRNA sense strand
uggaguuccuggugcgcau

SEQ ID NO: 2289353 - RNA, 19 nt, Homo sapiens
  misc_RNA (1)...(19): siRNA sense strand
cccaagacguggucaggca

SEQ ID NO: 2289354 - RNA, 19 nt, Homo sapiens
  misc_RNA (1)...(19): siRNA sense strand
aggguaugaucgagaggaa

SEQ ID NO: 2289355 - RNA, 19 nt, Homo sapiens
  misc_RNA (1)...(19): siRNA sense strand
ccuuuaauaucgaccgcaa

SEQ ID NO: 2289356 - RNA, 19 nt, Homo sapiens
  misc_RNA (1)...(19): siRNA sense strand
ccgcuaggguaguggccuu

SEQ ID NO: 2289357 - RNA, 19 nt, Homo sapiens
  misc_RNA (1)...(19): siRNA sense strand
ugaaggaggagauggccaa

SEQ ID NO: 2289358 - RNA, 19 nt, Homo sapiens
  misc_RNA (1)...(19): siRNA sense strand
aaacaugucugaaggagga

SEQ ID NO: 2289359 - RNA, 19 nt, Homo sapiens
  misc_RNA (1)...(19): siRNA sense strand
ggguaugaucgagaggaaa

SEQ ID NO: 2289360 - RNA, 19 nt, Homo sapiens
  misc_RNA (1)...(19): siRNA sense strand
agguagagacagagcccau

SEQ ID NO: 2289361 - RNA, 19 nt, Homo sapiens
  misc_RNA (1)...(19): siRNA sense strand
aggagauggccaagggcga

SEQ ID NO: 2289362 - RNA, 19 nt, Homo sapiens
  misc_RNA (1)...(19): siRNA sense strand
ccaugacgacacugggcua

SEQ ID NO: 2289363 - RNA, 19 nt, Homo sapiens
  misc_RNA (1)...(19): siRNA sense strand
gaagaggguaugaucgaga

SEQ ID NO: 2289364 - RNA, 19 nt, Homo sapiens
  misc_RNA (1)...(19): siRNA sense strand
ugaccuacaucgagggcgu

SEQ ID NO: 2289365 - RNA, 19 nt, Homo sapiens
  misc_RNA (1)...(19): siRNA sense strand
cgacacugggcuacggaga

SEQ ID NO: 2289366 - RNA, 19 nt, Homo sapiens
  misc_RNA (1)...(19): siRNA sense strand
gguaaugaccacaccgacu

SEQ ID NO: 2289367 - RNA, 19 nt, Homo sapiens
  misc_RNA (1)...(19): siRNA sense strand
uggaguuccuggugcgcau

SEQ ID NO: 2289368 - RNA, 19 nt, Homo sapiens
  misc_RNA (1)...(19): siRNA sense strand
cccaagacguggucaggca

SEQ ID NO: 2289369 - RNA, 19 nt, Homo sapiens
  misc_RNA (1)...(19): siRNA sense strand
gcaacaagucgcagcgcua

SEQ ID NO: 2289370 - RNA, 19 nt, Homo sapiens
  misc_RNA (1)...(19): siRNA sense strand
aagaggagauggaggagga

SEQ ID NO: 2289371 - RNA, 19 nt, Homo sapiens
  misc_RNA (1)...(19): siRNA sense strand
aggaagaggagauggagga

SEQ ID NO: 2289372 - RNA, 19 nt, Homo sapiens
  misc_RNA (1)...(19): siRNA sense strand
cuguggucuucgaggagaa

SEQ ID NO: 2289373 - RNA, 19 nt, Homo sapiens
  misc_RNA (1)...(19): siRNA sense strand
ucauguggcgcgugggcaa

SEQ ID NO: 2289374 - RNA, 19 nt, Homo sapiens
  misc_RNA (1)...(19): siRNA sense strand
acuuugagaucguggucau

SEQ ID NO: 2289375 - RNA, 19 nt, Homo sapiens
  misc_RNA (1)...(19): siRNA sense strand
gccaggaggaagaggagau

SEQ ID NO: 2289376 - RNA, 19 nt, Homo sapiens
  misc_RNA (1)...(19): siRNA sense strand
uggucauccuggagggcau

SEQ ID NO: 2289377 - RNA, 19 nt, Homo sapiens
  misc_RNA (1)...(19): siRNA sense strand
cgucaagaagaacggccaa

SEQ ID NO: 2289378 - RNA, 19 nt, Homo sapiens
  misc_RNA (1)...(19): siRNA sense strand
aggaggaagaggagaugga

SEQ ID NO: 2289379 - RNA, 19 nt, Homo sapiens
  misc_RNA (1)...(19): siRNA sense strand
aggaggagcuggagucgga

SEQ ID NO: 2289380 - RNA, 19 nt, Homo sapiens
  misc_RNA (1)...(19): siRNA sense strand
cugcaggagaguaagauca

SEQ ID NO: 2289381 - RNA, 19 nt, Homo sapiens
  misc_RNA (1)...(19): siRNA sense strand
ccuuaugagccaggaggaa

SEQ ID NO: 2289382 - RNA, 19 nt, Homo sapiens
  misc_RNA (1)...(19): siRNA sense strand
cggaggacuuugagaucgu

SEQ ID NO: 2289383 - RNA, 19 nt, Homo sapiens
  misc_RNA (1)...(19): siRNA sense strand
uuaugagccaggaggaaga

SEQ ID NO: 2289384 - RNA, 19 nt, Homo sapiens
  misc_RNA (1)...(19): siRNA sense strand
gcaacaagucgcagcgcua

SEQ ID NO: 2289385 - RNA, 19 nt, Homo sapiens
  misc_RNA (1)...(19): siRNA sense strand
aagaggagauggaggagga

SEQ ID NO: 2289386 - RNA, 19 nt, Homo sapiens
  misc_RNA (1)...(19): siRNA sense strand
aggaagaggagauggagga

SEQ ID NO: 2289387 - RNA, 19 nt, Homo sapiens
  misc_RNA (1)...(19): siRNA sense strand
cuguggucuucgaggagaa

SEQ ID NO: 2289388 - RNA, 19 nt, Homo sapiens
  misc_RNA (1)...(19): siRNA sense strand
ucauguggcgcgugggcaa

SEQ ID NO: 2289389 - RNA, 19 nt, Homo sapiens
  misc_RNA (1)...(19): siRNA sense strand
acuuugagaucguggucau

SEQ ID NO: 2289390 - RNA, 19 nt, Homo sapiens
  misc_RNA (1)...(19): siRNA sense strand
gccaggaggaagaggagau

SEQ ID NO: 2289391 - RNA, 19 nt, Homo sapiens
  misc_RNA (1)...(19): siRNA sense strand
uggucauccuggagggcau

SEQ ID NO: 2289392 - RNA, 19 nt, Homo sapiens
  misc_RNA (1)...(19): siRNA sense strand
cgucaagaagaacggccaa

SEQ ID NO: 2289393 - RNA, 19 nt, Homo sapiens
  misc_RNA (1)...(19): siRNA sense strand
aggaggaagaggagaugga

SEQ ID NO: 2289394 - RNA, 19 nt, Homo sapiens
  misc_RNA (1)...(19): siRNA sense strand
aggaggagcuggagucgga

SEQ ID NO: 2289395 - RNA, 19 nt, Homo sapiens
  misc_RNA (1)...(19): siRNA sense strand
cugcaggagaguaagauca

SEQ ID NO: 2289396 - RNA, 19 nt, Homo sapiens
  misc_RNA (1)...(19): siRNA sense strand
ccuuaugagccaggaggaa

SEQ ID NO: 2289397 - RNA, 19 nt, Homo sapiens
  misc_RNA (1)...(19): siRNA sense strand
cggaggacuuugagaucgu

SEQ ID NO: 2289398 - RNA, 19 nt, Homo sapiens
  misc_RNA (1)...(19): siRNA sense strand
uuaugagccaggaggaaga

SEQ ID NO: 2289399 - RNA, 19 nt, Homo sapiens
  misc_RNA (1)...(19): siRNA sense strand
augagaagguggaggagga

SEQ ID NO: 2289400 - RNA, 19 nt, Homo sapiens
  misc_RNA (1)...(19): siRNA sense strand
gcaacgugcagcagggcaa

SEQ ID NO: 2289401 - RNA, 19 nt, Homo sapiens
  misc_RNA (1)...(19): siRNA sense strand
ucguuauccucgagggcau

SEQ ID NO: 2289402 - RNA, 19 nt, Homo sapiens
  misc_RNA (1)...(19): siRNA sense strand
ucaacaaccucaacggcuu

SEQ ID NO: 2289403 - RNA, 19 nt, Homo sapiens
  misc_RNA (1)...(19): siRNA sense strand
gagagugaguccaaggugu

SEQ ID NO: 2289404 - RNA, 19 nt, Homo sapiens
  misc_RNA (1)...(19): siRNA sense strand
uggaugagaagguggagga

SEQ ID NO: 2289405 - RNA, 19 nt, Homo sapiens
  misc_RNA (1)...(19): siRNA sense strand
cugucauaaucgugagaaa

SEQ ID NO: 2289406 - RNA, 19 nt, Homo sapiens
  misc_RNA (1)...(19): siRNA sense strand
agccagaggccuugggaaa

SEQ ID NO: 2289407 - RNA, 19 nt, Homo sapiens
  misc_RNA (1)...(19): siRNA sense strand
ugucaagaaugcugggaga

SEQ ID NO: 2289408 - RNA, 19 nt, Homo sapiens
  misc_RNA (1)...(19): siRNA sense strand
ugagaaagccagaggccuu

SEQ ID NO: 2289409 - RNA, 19 nt, Homo sapiens
  misc_RNA (1)...(19): siRNA sense strand
uggugaacgcuaugggcaa

SEQ ID NO: 2289410 - RNA, 19 nt, Homo sapiens
  misc_RNA (1)...(19): siRNA sense strand
aauaaggccuggugcguga

SEQ ID NO: 2289411 - RNA, 19 nt, Homo sapiens
  misc_RNA (1)...(19): siRNA sense strand
ccauuggagcugaagaaaa

SEQ ID NO: 2289412 - RNA, 19 nt, Homo sapiens
  misc_RNA (1)...(19): siRNA sense strand
agaaacuagcugagaccuu

SEQ ID NO: 2289413 - RNA, 19 nt, Homo sapiens
  misc_RNA (1)...(19): siRNA sense strand
guuugaaggaagaaaguac

SEQ ID NO: 2289414 - RNA, 19 nt, Homo sapiens
  misc_RNA (1)...(19): siRNA sense strand
ucuaugaguuugaaggaag

SEQ ID NO: 2289415 - RNA, 19 nt, Homo sapiens
  misc_RNA (1)...(19): siRNA sense strand
ucaagaaugcugggagaca

SEQ ID NO: 2289416 - RNA, 19 nt, Homo sapiens
  misc_RNA (1)...(19): siRNA sense strand
uuguggaguuugacaugaa

SEQ ID NO: 2289417 - RNA, 19 nt, Homo sapiens
  misc_RNA (1)...(19): siRNA sense strand
aggaauaccuguaccgcua

SEQ ID NO: 2289418 - RNA, 19 nt, Homo sapiens
  misc_RNA (1)...(19): siRNA sense strand
agguggaccaagugggcua

SEQ ID NO: 2289419 - RNA, 19 nt, Homo sapiens
  misc_RNA (1)...(19): siRNA sense strand
ggcagcuggcagaggaaua

SEQ ID NO: 2289420 - RNA, 19 nt, Homo sapiens
  misc_RNA (1)...(19): siRNA sense strand
ccucgaacuuugacagcga

SEQ ID NO: 2289421 - RNA, 19 nt, Homo sapiens
  misc_RNA (1)...(19): siRNA sense strand
ccuucacuuuccuggguaa

SEQ ID NO: 2289422 - RNA, 19 nt, Homo sapiens
  misc_RNA (1)...(19): siRNA sense strand
aguuguggucccugggcaa

SEQ ID NO: 2289423 - RNA, 19 nt, Homo sapiens
  misc_RNA (1)...(19): siRNA sense strand
ccuggagaccugagaacca

SEQ ID NO: 2289424 - RNA, 19 nt, Homo sapiens
  misc_RNA (1)...(19): siRNA sense strand
gggcuuagaucauuccuca

SEQ ID NO: 2289425 - RNA, 19 nt, Homo sapiens
  misc_RNA (1)...(19): siRNA sense strand
gaugggaaguacuggcgau

SEQ ID NO: 2289426 - RNA, 19 nt, Homo sapiens
  misc_RNA (1)...(19): siRNA sense strand
aguugaaccagguggacca

SEQ ID NO: 2289427 - RNA, 19 nt, Homo sapiens
  misc_RNA (1)...(19): siRNA sense strand
aggacgacgugaauggcau

SEQ ID NO: 2289428 - RNA, 19 nt, Homo sapiens
  misc_RNA (1)...(19): siRNA sense strand
ggcuaugguuaaagcggaa

SEQ ID NO: 2289429 - RNA, 19 nt, Homo sapiens
  misc_RNA (1)...(19): siRNA sense strand
gaucaguggaaauggccaa

SEQ ID NO: 2289430 - RNA, 19 nt, Homo sapiens
  misc_RNA (1)...(19): siRNA sense strand
ucuugauguucuugaggaa

SEQ ID NO: 2289431 - RNA, 19 nt, Homo sapiens
  misc_RNA (1)...(19): siRNA sense strand
ugggauuggcugugugcaa

SEQ ID NO: 2289432 - RNA, 19 nt, Homo sapiens
  misc_RNA (1)...(19): siRNA sense strand
gaacagauuacaaaugaga

SEQ ID NO: 2289433 - RNA, 19 nt, Homo sapiens
  misc_RNA (1)...(19): siRNA sense strand
caaaugagaagcuggcuau

SEQ ID NO: 2289434 - RNA, 19 nt, Homo sapiens
  misc_RNA (1)...(19): siRNA sense strand
acaaaugagaagcuggcua

SEQ ID NO: 2289435 - RNA, 19 nt, Homo sapiens
  misc_RNA (1)...(19): siRNA sense strand
gaagaagaccacuggccuu

SEQ ID NO: 2289436 - RNA, 19 nt, Homo sapiens
  misc_RNA (1)...(19): siRNA sense strand
cagaacagauuacaaauga

SEQ ID NO: 2289437 - RNA, 19 nt, Homo sapiens
  misc_RNA (1)...(19): siRNA sense strand
gagaagcuggcuaugguua

SEQ ID NO: 2289438 - RNA, 19 nt, Homo sapiens
  misc_RNA (1)...(19): siRNA sense strand
ggaagagccuccugccgau

SEQ ID NO: 2289439 - RNA, 19 nt, Homo sapiens
  misc_RNA (1)...(19): siRNA sense strand
gucaauuagaagaggugau

SEQ ID NO: 2289440 - RNA, 19 nt, Homo sapiens
  misc_RNA (1)...(19): siRNA sense strand
gacagaagcuccaggguga

SEQ ID NO: 2289441 - RNA, 19 nt, Homo sapiens
  misc_RNA (1)...(19): siRNA sense strand
cugcugaagaggaggaaga

SEQ ID NO: 2289442 - RNA, 19 nt, Homo sapiens
  misc_RNA (1)...(19): siRNA sense strand
ggaauaaagaauaaggaug

SEQ ID NO: 2289443 - RNA, 19 nt, Homo sapiens
  misc_RNA (1)...(19): siRNA sense strand
agggugagcuggaggacga

SEQ ID NO: 2289444 - RNA, 19 nt, Homo sapiens
  misc_RNA (1)...(19): siRNA sense strand
gaauaaagaauaaggaugg

SEQ ID NO: 2289445 - RNA, 19 nt, Homo sapiens
  misc_RNA (1)...(19): siRNA sense strand
aggaggaagagcugcguga

SEQ ID NO: 2289446 - RNA, 19 nt, Homo sapiens
  misc_RNA (1)...(19): siRNA sense strand
cgauguagaugcugggcag

SEQ ID NO: 2289447 - RNA, 19 nt, Homo sapiens
  misc_RNA (1)...(19): siRNA sense strand
gcagcgagaagcagaggga

SEQ ID NO: 2289448 - RNA, 19 nt, Homo sapiens
  misc_RNA (1)...(19): siRNA sense strand
gggccaaggaggaagagcu

SEQ ID NO: 2289449 - RNA, 19 nt, Homo sapiens
  misc_RNA (1)...(19): siRNA sense strand
cuccagaggugaaaggcua

SEQ ID NO: 2289450 - RNA, 19 nt, Homo sapiens
  misc_RNA (1)...(19): siRNA sense strand
agggaauuguccugagaga

SEQ ID NO: 2289451 - RNA, 19 nt, Homo sapiens
  misc_RNA (1)...(19): siRNA sense strand
aggaaauacgagagaguac

SEQ ID NO: 2289452 - RNA, 19 nt, Homo sapiens
  misc_RNA (1)...(19): siRNA sense strand
gugaaaggcuauugggcag

SEQ ID NO: 2289453 - RNA, 19 nt, Homo sapiens
  misc_RNA (1)...(19): siRNA sense strand
ggugaaaggcuauugggca

SEQ ID NO: 2289454 - RNA, 19 nt, Homo sapiens
  misc_RNA (1)...(19): siRNA sense strand
augcaagaucaaggaaaua

SEQ ID NO: 2289455 - RNA, 19 nt, Homo sapiens
  misc_RNA (1)...(19): siRNA sense strand
ugcuaugaucauugacaaa

SEQ ID NO: 2289456 - RNA, 19 nt, Homo sapiens
  misc_RNA (1)...(19): siRNA sense strand
gggaauuguccugagagaa

SEQ ID NO: 2289457 - RNA, 19 nt, Homo sapiens
  misc_RNA (1)...(19): siRNA sense strand
agaucaaggaaauacgaga

SEQ ID NO: 2289458 - RNA, 19 nt, Homo sapiens
  misc_RNA (1)...(19): siRNA sense strand
caguuaagaagaugcgcga

SEQ ID NO: 2289459 - RNA, 19 nt, Homo sapiens
  misc_RNA (1)...(19): siRNA sense strand
uggaaaggaaguuggcagu

SEQ ID NO: 2289460 - RNA, 19 nt, Homo sapiens
  misc_RNA (1)...(19): siRNA sense strand
ucaacaucucagaagggaa

SEQ ID NO: 2289461 - RNA, 19 nt, Homo sapiens
  misc_RNA (1)...(19): siRNA sense strand
cuccagaggugaaaggcua

SEQ ID NO: 2289462 - RNA, 19 nt, Homo sapiens
  misc_RNA (1)...(19): siRNA sense strand
agggaauuguccugagaga

SEQ ID NO: 2289463 - RNA, 19 nt, Homo sapiens
  misc_RNA (1)...(19): siRNA sense strand
aggaaauacgagagaguac

SEQ ID NO: 2289464 - RNA, 19 nt, Homo sapiens
  misc_RNA (1)...(19): siRNA sense strand
gugaaaggcuauugggcag

SEQ ID NO: 2289465 - RNA, 19 nt, Homo sapiens
  misc_RNA (1)...(19): siRNA sense strand
ggugaaaggcuauugggca

SEQ ID NO: 2289466 - RNA, 19 nt, Homo sapiens
  misc_RNA (1)...(19): siRNA sense strand
augcaagaucaaggaaaua

SEQ ID NO: 2289467 - RNA, 19 nt, Homo sapiens
  misc_RNA (1)...(19): siRNA sense strand
ugcuaugaucauugacaaa

SEQ ID NO: 2289468 - RNA, 19 nt, Homo sapiens
  misc_RNA (1)...(19): siRNA sense strand
gggaauuguccugagagaa

SEQ ID NO: 2289469 - RNA, 19 nt, Homo sapiens
  misc_RNA (1)...(19): siRNA sense strand
agaucaaggaaauacgaga

SEQ ID NO: 2289470 - RNA, 19 nt, Homo sapiens
  misc_RNA (1)...(19): siRNA sense strand
caguuaagaagaugcgcga

SEQ ID NO: 2289471 - RNA, 19 nt, Homo sapiens
  misc_RNA (1)...(19): siRNA sense strand
uggaaaggaaguuggcagu

SEQ ID NO: 2289472 - RNA, 19 nt, Homo sapiens
  misc_RNA (1)...(19): siRNA sense strand
ucaacaucucagaagggaa

SEQ ID NO: 2289473 - RNA, 19 nt, Homo sapiens
  misc_RNA (1)...(19): siRNA sense strand
gcucagggugacagagaga

SEQ ID NO: 2289474 - RNA, 19 nt, Homo sapiens
  misc_RNA (1)...(19): siRNA sense strand
ccaacacaucggagagcuu

SEQ ID NO: 2289475 - RNA, 19 nt, Homo sapiens
  misc_RNA (1)...(19): siRNA sense strand
ccagcaaccagacggacaa

SEQ ID NO: 2289476 - RNA, 19 nt, Homo sapiens
  misc_RNA (1)...(19): siRNA sense strand
cuguguucucuguggacua

SEQ ID NO: 2289477 - RNA, 19 nt, Homo sapiens
  misc_RNA (1)...(19): siRNA sense strand
ucaaaauacaugagagcua

SEQ ID NO: 2289478 - RNA, 19 nt, Homo sapiens
  misc_RNA (1)...(19): siRNA sense strand
aauaacagcaacagugaaa

SEQ ID NO: 2289479 - RNA, 19 nt, Homo sapiens
  misc_RNA (1)...(19): siRNA sense strand
augcagaggaggugucaaa

SEQ ID NO: 2289480 - RNA, 19 nt, Homo sapiens
  misc_RNA (1)...(19): siRNA sense strand
ggauggauuuagagcugaa

SEQ ID NO: 2289481 - RNA, 19 nt, Homo sapiens
  misc_RNA (1)...(19): siRNA sense strand
acagaaagaaauggaguaa

SEQ ID NO: 2289482 - RNA, 19 nt, Homo sapiens
  misc_RNA (1)...(19): siRNA sense strand
agucagugccagaguaauu

SEQ ID NO: 2289483 - RNA, 19 nt, Homo sapiens
  misc_RNA (1)...(19): siRNA sense strand
cuauaagaguguuugccaa

SEQ ID NO: 2289484 - RNA, 19 nt, Homo sapiens
  misc_RNA (1)...(19): siRNA sense strand
agcaauagaacaucagaua

SEQ ID NO: 2289485 - RNA, 19 nt, Homo sapiens
  misc_RNA (1)...(19): siRNA sense strand
ccuuacagguaguagauca

SEQ ID NO: 2289486 - RNA, 19 nt, Homo sapiens
  misc_RNA (1)...(19): siRNA sense strand
auguaaagaccgaggugau

SEQ ID NO: 2289487 - RNA, 19 nt, Homo sapiens
  misc_RNA (1)...(19): siRNA sense strand
caagaagaaauaacagcaa

SEQ ID NO: 2289488 - RNA, 19 nt, Homo sapiens
  misc_RNA (1)...(19): siRNA sense strand
agaagaaauaacagcaaca

SEQ ID NO: 2289489 - RNA, 19 nt, Homo sapiens
  misc_RNA (1)...(19): siRNA sense strand
cagcaauguaucaagguuu

SEQ ID NO: 2289490 - RNA, 19 nt, Homo sapiens
  misc_RNA (1)...(19): siRNA sense strand
gguccgugauguagaacuu

SEQ ID NO: 2289491 - RNA, 19 nt, Homo sapiens
  misc_RNA (1)...(19): siRNA sense strand
acugaaaacauguggaauu

SEQ ID NO: 2289492 - RNA, 19 nt, Homo sapiens
  misc_RNA (1)...(19): siRNA sense strand
ccauuugaagagaggauuu

SEQ ID NO: 2289493 - RNA, 19 nt, Homo sapiens
  misc_RNA (1)...(19): siRNA sense strand
ugucaguggauuuggaaaa

SEQ ID NO: 2289494 - RNA, 19 nt, Homo sapiens
  misc_RNA (1)...(19): siRNA sense strand
gaagaaagauuuacagcuc

SEQ ID NO: 2289495 - RNA, 19 nt, Homo sapiens
  misc_RNA (1)...(19): siRNA sense strand
auggaauggaccagacuua

SEQ ID NO: 2289496 - RNA, 19 nt, Homo sapiens
  misc_RNA (1)...(19): siRNA sense strand
cacagaaagaaauggagua

SEQ ID NO: 2289497 - RNA, 19 nt, Homo sapiens
  misc_RNA (1)...(19): siRNA sense strand
gcuguuaggaguaaaucaa

SEQ ID NO: 2289498 - RNA, 19 nt, Homo sapiens
  misc_RNA (1)...(19): siRNA sense strand
caauaaauuucguugugga

SEQ ID NO: 2289499 - RNA, 19 nt, Homo sapiens
  misc_RNA (1)...(19): siRNA sense strand
ccagucagugccagaguaa

SEQ ID NO: 2289500 - RNA, 19 nt, Homo sapiens
  misc_RNA (1)...(19): siRNA sense strand
ggccugaagcagcggaauu

SEQ ID NO: 2289501 - RNA, 19 nt, Homo sapiens
  misc_RNA (1)...(19): siRNA sense strand
gcugaaagacccagguuuu

SEQ ID NO: 2289502 - RNA, 19 nt, Homo sapiens
  misc_RNA (1)...(19): siRNA sense strand
acagcaacagugaaaguaa

SEQ ID NO: 2289503 - RNA, 19 nt, Homo sapiens
  misc_RNA (1)...(19): siRNA sense strand
cagaaagaaauggaguaaa

SEQ ID NO: 2289504 - RNA, 19 nt, Homo sapiens
  misc_RNA (1)...(19): siRNA sense strand
gaguguuugccaaggagaa

SEQ ID NO: 2289505 - RNA, 19 nt, Homo sapiens
  misc_RNA (1)...(19): siRNA sense strand
ccgaaaaccugaucagcau

SEQ ID NO: 2289506 - RNA, 19 nt, Homo sapiens
  misc_RNA (1)...(19): siRNA sense strand
ggccuaggguacugcagaa

SEQ ID NO: 2289507 - RNA, 19 nt, Homo sapiens
  misc_RNA (1)...(19): siRNA sense strand
aagagaagacugaaguuga

SEQ ID NO: 2289508 - RNA, 19 nt, Homo sapiens
  misc_RNA (1)...(19): siRNA sense strand
ggaaauuguuagaaaccuc

SEQ ID NO: 2289509 - RNA, 19 nt, Homo sapiens
  misc_RNA (1)...(19): siRNA sense strand
aagugaaucagaugcuaaa

SEQ ID NO: 2289510 - RNA, 19 nt, Homo sapiens
  misc_RNA (1)...(19): siRNA sense strand
gguuaguggaccaauauuu

SEQ ID NO: 2289511 - RNA, 19 nt, Homo sapiens
  misc_RNA (1)...(19): siRNA sense strand
uggauuuagagcugaauau

SEQ ID NO: 2289512 - RNA, 19 nt, Homo sapiens
  misc_RNA (1)...(19): siRNA sense strand
ccacagaaagaaauggagu

SEQ ID NO: 2289513 - RNA, 19 nt, Homo sapiens
  misc_RNA (1)...(19): siRNA sense strand
ggugcugaccaguuguaaa

SEQ ID NO: 2289514 - RNA, 19 nt, Homo sapiens
  misc_RNA (1)...(19): siRNA sense strand
aggauaaagugcagccugu

SEQ ID NO: 2289515 - RNA, 19 nt, Homo sapiens
  misc_RNA (1)...(19): siRNA sense strand
gggcaaccaauguggcuga

SEQ ID NO: 2289516 - RNA, 19 nt, Homo sapiens
  misc_RNA (1)...(19): siRNA sense strand
agguaaaccagaagcucuu

SEQ ID NO: 2289517 - RNA, 19 nt, Homo sapiens
  misc_RNA (1)...(19): siRNA sense strand
cauuuagaggacuggagaa

SEQ ID NO: 2289518 - RNA, 19 nt, Homo sapiens
  misc_RNA (1)...(19): siRNA sense strand
ugggauacuuuaaugccaa

SEQ ID NO: 2289519 - RNA, 19 nt, Homo sapiens
  misc_RNA (1)...(19): siRNA sense strand
ugccaaagcgacugcacua

SEQ ID NO: 2289520 - RNA, 19 nt, Homo sapiens
  misc_RNA (1)...(19): siRNA sense strand
augccaagaacgucagaau

SEQ ID NO: 2289521 - RNA, 19 nt, Homo sapiens
  misc_RNA (1)...(19): siRNA sense strand
aacaaugaguuuaggagca

SEQ ID NO: 2289522 - RNA, 19 nt, Homo sapiens
  misc_RNA (1)...(19): siRNA sense strand
cuauuuagcagacaagaau

SEQ ID NO: 2289523 - RNA, 19 nt, Homo sapiens
  misc_RNA (1)...(19): siRNA sense strand
cuaccaacguggagagcug

SEQ ID NO: 2289524 - RNA, 19 nt, Homo sapiens
  misc_RNA (1)...(19): siRNA sense strand
agagcuguccugaagguaa

SEQ ID NO: 2289525 - RNA, 19 nt, Homo sapiens
  misc_RNA (1)...(19): siRNA sense strand
ccuucuauuuagcagacaa

SEQ ID NO: 2289526 - RNA, 19 nt, Homo sapiens
  misc_RNA (1)...(19): siRNA sense strand
ucuauuuagcagacaagaa

SEQ ID NO: 2289527 - RNA, 19 nt, Homo sapiens
  misc_RNA (1)...(19): siRNA sense strand
gguugaagaaagauuuaca

SEQ ID NO: 2289528 - RNA, 19 nt, Homo sapiens
  misc_RNA (1)...(19): siRNA sense strand
ggaccugcccaaagcugaa

SEQ ID NO: 2289529 - RNA, 19 nt, Homo sapiens
  misc_RNA (1)...(19): siRNA sense strand
gggacuacuuccacagugu

SEQ ID NO: 2289530 - RNA, 19 nt, Homo sapiens
  misc_RNA (1)...(19): siRNA sense strand
ggacccaguuuuaaagaga

SEQ ID NO: 2289531 - RNA, 19 nt, Homo sapiens
  misc_RNA (1)...(19): siRNA sense strand
guggaaucaacucgaauau

SEQ ID NO: 2289532 - RNA, 19 nt, Homo sapiens
  misc_RNA (1)...(19): siRNA sense strand
cagaugacuguuugcagaa

SEQ ID NO: 2289533 - RNA, 19 nt, Homo sapiens
  misc_RNA (1)...(19): siRNA sense strand
ccggaucagaaguggcuau

SEQ ID NO: 2289534 - RNA, 19 nt, Homo sapiens
  misc_RNA (1)...(19): siRNA sense strand
ggaauacaugacugauuau

SEQ ID NO: 2289535 - RNA, 19 nt, Homo sapiens
  misc_RNA (1)...(19): siRNA sense strand
ggccagaaauguucgguga

SEQ ID NO: 2289536 - RNA, 19 nt, Homo sapiens
  misc_RNA (1)...(19): siRNA sense strand
gggcaaagaagguguccac

SEQ ID NO: 2289537 - RNA, 19 nt, Homo sapiens
  misc_RNA (1)...(19): siRNA sense strand
agauacuggagaaggauaa

SEQ ID NO: 2289538 - RNA, 19 nt, Homo sapiens
  misc_RNA (1)...(19): siRNA sense strand
gcgugguguccguggagaa

SEQ ID NO: 2289539 - RNA, 19 nt, Homo sapiens
  misc_RNA (1)...(19): siRNA sense strand
cggugaugacgguggugua

SEQ ID NO: 2289540 - RNA, 19 nt, Homo sapiens
  misc_RNA (1)...(19): siRNA sense strand
agaauguggcaguggagau

SEQ ID NO: 2289541 - RNA, 19 nt, Homo sapiens
  misc_RNA (1)...(19): siRNA sense strand
gguggaauucagagcauca

SEQ ID NO: 2289542 - RNA, 19 nt, Homo sapiens
  misc_RNA (1)...(19): siRNA sense strand
ucgaaaggugucuggaaca

SEQ ID NO: 2289543 - RNA, 19 nt, Homo sapiens
  misc_RNA (1)...(19): siRNA sense strand
gcuguauggagguggcgaa

SEQ ID NO: 2289544 - RNA, 19 nt, Homo sapiens
  misc_RNA (1)...(19): siRNA sense strand
ccuccaagcugcucaggga

SEQ ID NO: 2289545 - RNA, 19 nt, Homo sapiens
  misc_RNA (1)...(19): siRNA sense strand
guggugaagcagacgguga

SEQ ID NO: 2289546 - RNA, 19 nt, Homo sapiens
  misc_RNA (1)...(19): siRNA sense strand
gguugaaggcgaagcugca

SEQ ID NO: 2289547 - RNA, 19 nt, Homo sapiens
  misc_RNA (1)...(19): siRNA sense strand
ggcugaagcugcaggcacu

SEQ ID NO: 2289548 - RNA, 19 nt, Homo sapiens
  misc_RNA (1)...(19): siRNA sense strand
ccuucgaggcgguggaugu

SEQ ID NO: 2289549 - RNA, 19 nt, Homo sapiens
  misc_RNA (1)...(19): siRNA sense strand
ccaccaagcugaugcgcac

SEQ ID NO: 2289550 - RNA, 19 nt, Homo sapiens
  misc_RNA (1)...(19): siRNA sense strand
caagcaaauaggaggugga

SEQ ID NO: 2289551 - RNA, 19 nt, Homo sapiens
  misc_RNA (1)...(19): siRNA sense strand
cugcgggaccaaugggaga

SEQ ID NO: 2289552 - RNA, 19 nt, Homo sapiens
  misc_RNA (1)...(19): siRNA sense strand
ggucaagcaaauaggaggu

SEQ ID NO: 2289553 - RNA, 19 nt, Homo sapiens
  misc_RNA (1)...(19): siRNA sense strand
aggaggugauggaugacau

SEQ ID NO: 2289554 - RNA, 19 nt, Homo sapiens
  misc_RNA (1)...(19): siRNA sense strand
ugccaagcaaggaggucaa

SEQ ID NO: 2289555 - RNA, 19 nt, Homo sapiens
  misc_RNA (1)...(19): siRNA sense strand
auuaaugaguggugggaaa

SEQ ID NO: 2289556 - RNA, 19 nt, Homo sapiens
  misc_RNA (1)...(19): siRNA sense strand
cugaaagcuuagugggaaa

SEQ ID NO: 2289557 - RNA, 19 nt, Homo sapiens
  misc_RNA (1)...(19): siRNA sense strand
cagaagaauuugagagcca

SEQ ID NO: 2289558 - RNA, 19 nt, Homo sapiens
  misc_RNA (1)...(19): siRNA sense strand
cagcaaugauauuuggaaa

SEQ ID NO: 2289559 - RNA, 19 nt, Homo sapiens
  misc_RNA (1)...(19): siRNA sense strand
gcaaaggaugcgaaggaaa

SEQ ID NO: 2289560 - RNA, 19 nt, Homo sapiens
  misc_RNA (1)...(19): siRNA sense strand
cuucaauggcccugggaaa

SEQ ID NO: 2289561 - RNA, 19 nt, Homo sapiens
  misc_RNA (1)...(19): siRNA sense strand
cauucaagguggagucaua

SEQ ID NO: 2289562 - RNA, 19 nt, Homo sapiens
  misc_RNA (1)...(19): siRNA sense strand
agaagauauucaagagcaa

SEQ ID NO: 2289563 - RNA, 19 nt, Homo sapiens
  misc_RNA (1)...(19): siRNA sense strand
ccagauaggcggagagagu

SEQ ID NO: 2289564 - RNA, 19 nt, Homo sapiens
  misc_RNA (1)...(19): siRNA sense strand
gagaagaaacugagaagca

SEQ ID NO: 2289565 - RNA, 19 nt, Homo sapiens
  misc_RNA (1)...(19): siRNA sense strand
caacagaagacgaagguca

SEQ ID NO: 2289566 - RNA, 19 nt, Homo sapiens
  misc_RNA (1)...(19): siRNA sense strand
uaucaugagcccagaauaa

SEQ ID NO: 2289567 - RNA, 19 nt, Homo sapiens
  misc_RNA (1)...(19): siRNA sense strand
gggauauacugcugcacaa

SEQ ID NO: 2289568 - RNA, 19 nt, Homo sapiens
  misc_RNA (1)...(19): siRNA sense strand
ucaaagauggagagaggaa

SEQ ID NO: 2289569 - RNA, 19 nt, Homo sapiens
  misc_RNA (1)...(19): siRNA sense strand
aaaugaaguuggugagcau

SEQ ID NO: 2289570 - RNA, 19 nt, Homo sapiens
  misc_RNA (1)...(19): siRNA sense strand
gagacugggaugugguaaa

SEQ ID NO: 2289571 - RNA, 19 nt, Homo sapiens
  misc_RNA (1)...(19): siRNA sense strand
agacaugggcaauagauaa

SEQ ID NO: 2289572 - RNA, 19 nt, Homo sapiens
  misc_RNA (1)...(19): siRNA sense strand
gaagaaacugagaagcaaa

SEQ ID NO: 2289573 - RNA, 19 nt, Homo sapiens
  misc_RNA (1)...(19): siRNA sense strand
aggauucgcuggagacaaa

SEQ ID NO: 2289574 - RNA, 19 nt, Homo sapiens
  misc_RNA (1)...(19): siRNA sense strand
gauucuuauuggaggaaau

SEQ ID NO: 2289575 - RNA, 19 nt, Homo sapiens
  misc_RNA (1)...(19): siRNA sense strand
gaagaauggacaagaauca

SEQ ID NO: 2289576 - RNA, 19 nt, Homo sapiens
  misc_RNA (1)...(19): siRNA sense strand
ggauguaaggugucugaaa

SEQ ID NO: 2289577 - RNA, 19 nt, Homo sapiens
  misc_RNA (1)...(19): siRNA sense strand
ggagauugcuuaagggaac

SEQ ID NO: 2289578 - RNA, 19 nt, Homo sapiens
  misc_RNA (1)...(19): siRNA sense strand
uggaacaggucaugaucaa

SEQ ID NO: 2289579 - RNA, 19 nt, Homo sapiens
  misc_RNA (1)...(19): siRNA sense strand
aagaauaccaugugacaau

SEQ ID NO: 2289580 - RNA, 19 nt, Homo sapiens
  misc_RNA (1)...(19): siRNA sense strand
auacauagugacagcauua

SEQ ID NO: 2289581 - RNA, 19 nt, Homo sapiens
  misc_RNA (1)...(19): siRNA sense strand
ggauucagcuagagaaaau

SEQ ID NO: 2289582 - RNA, 19 nt, Homo sapiens
  misc_RNA (1)...(19): siRNA sense strand
acacaguggaggagaguca

SEQ ID NO: 2289583 - RNA, 19 nt, Homo sapiens
  misc_RNA (1)...(19): siRNA sense strand
gcucaagacgagugggcuu

SEQ ID NO: 2289584 - RNA, 19 nt, Homo sapiens
  misc_RNA (1)...(19): siRNA sense strand
gcuaaugaaggaaugguua

SEQ ID NO: 2289585 - RNA, 19 nt, Homo sapiens
  misc_RNA (1)...(19): siRNA sense strand
ggguuguagucgauuauua

SEQ ID NO: 2289586 - RNA, 19 nt, Homo sapiens
  misc_RNA (1)...(19): siRNA sense strand
caagagucaccgaggcaaa

SEQ ID NO: 2289587 - RNA, 19 nt, Homo sapiens
  misc_RNA (1)...(19): siRNA sense strand
aggaaacuccagagaacua

SEQ ID NO: 2289588 - RNA, 19 nt, Homo sapiens
  misc_RNA (1)...(19): siRNA sense strand
aagcaaaacuucaggcauu

SEQ ID NO: 2289589 - RNA, 19 nt, Homo sapiens
  misc_RNA (1)...(19): siRNA sense strand
gcuuauuucaagagaucua

SEQ ID NO: 2289590 - RNA, 19 nt, Homo sapiens
  misc_RNA (1)...(19): siRNA sense strand
cuuggaaacaugugggcaa

SEQ ID NO: 2289591 - RNA, 19 nt, Homo sapiens
  misc_RNA (1)...(19): siRNA sense strand
ccucugugguacaagauaa

SEQ ID NO: 2289592 - RNA, 19 nt, Homo sapiens
  misc_RNA (1)...(19): siRNA sense strand
ccaacuaaaggguggaaaa

SEQ ID NO: 2289593 - RNA, 19 nt, Homo sapiens
  misc_RNA (1)...(19): siRNA sense strand
cuaaugaaggaaugguuaa

SEQ ID NO: 2289594 - RNA, 19 nt, Homo sapiens
  misc_RNA (1)...(19): siRNA sense strand
gggaaauccgguaagguuu

SEQ ID NO: 2289595 - RNA, 19 nt, Homo sapiens
  misc_RNA (1)...(19): siRNA sense strand
agauggauuaccagaaaua

SEQ ID NO: 2289596 - RNA, 19 nt, Homo sapiens
  misc_RNA (1)...(19): siRNA sense strand
gggcaauugauaauguuua

SEQ ID NO: 2289597 - RNA, 19 nt, Homo sapiens
  misc_RNA (1)...(19): siRNA sense strand
gugcaguggccaugggaga

SEQ ID NO: 2289598 - RNA, 19 nt, Homo sapiens
  misc_RNA (1)...(19): siRNA sense strand
gcugaaauacauagugaca

SEQ ID NO: 2289599 - RNA, 19 nt, Homo sapiens
  misc_RNA (1)...(19): siRNA sense strand
ggguggaaccgaauaacaa

SEQ ID NO: 2289600 - RNA, 19 nt, Homo sapiens
  misc_RNA (1)...(19): siRNA sense strand
caacaugugcagugggcau

SEQ ID NO: 2289601 - RNA, 19 nt, Homo sapiens
  misc_RNA (1)...(19): siRNA sense strand
aggcaaaggaugcgaagga

SEQ ID NO: 2289602 - RNA, 19 nt, Homo sapiens
  misc_RNA (1)...(19): siRNA sense strand
accaagaacuagaaaugaa

SEQ ID NO: 2289603 - RNA, 19 nt, Homo sapiens
  misc_RNA (1)...(19): siRNA sense strand
gacugugaacggagggaaa

SEQ ID NO: 2289604 - RNA, 19 nt, Homo sapiens
  misc_RNA (1)...(19): siRNA sense strand
gcgcaucgguagugagaac

SEQ ID NO: 2289605 - RNA, 19 nt, Homo sapiens
  misc_RNA (1)...(19): siRNA sense strand
ccacaauggaacaggucau

SEQ ID NO: 2289606 - RNA, 19 nt, Homo sapiens
  misc_RNA (1)...(19): siRNA sense strand
gugcucaggacgagggauu

SEQ ID NO: 2289607 - RNA, 19 nt, Homo sapiens
  misc_RNA (1)...(19): siRNA sense strand
caauggaaccaaauguaua

SEQ ID NO: 2289608 - RNA, 19 nt, Homo sapiens
  misc_RNA (1)...(19): siRNA sense strand
ggucaugaucaaugggcuu

SEQ ID NO: 2289609 - RNA, 19 nt, Homo sapiens
  misc_RNA (1)...(19): siRNA sense strand
cagaauaaucuccguagaa

SEQ ID NO: 2289610 - RNA, 19 nt, Homo sapiens
  misc_RNA (1)...(19): siRNA sense strand
uuggaaauguucagccaua

SEQ ID NO: 2289611 - RNA, 19 nt, Homo sapiens
  misc_RNA (1)...(19): siRNA sense strand
cuggauucagcuagagaaa

SEQ ID NO: 2289612 - RNA, 19 nt, Homo sapiens
  misc_RNA (1)...(19): siRNA sense strand
ucguguaggugaaguguau

SEQ ID NO: 2289613 - RNA, 19 nt, Homo sapiens
  misc_RNA (1)...(19): siRNA sense strand
gggcuauugaugagauuau

SEQ ID NO: 2289614 - RNA, 19 nt, Homo sapiens
  misc_RNA (1)...(19): siRNA sense strand
cuucauuaucgauggaaau

SEQ ID NO: 2289615 - RNA, 19 nt, Homo sapiens
  misc_RNA (1)...(19): siRNA sense strand
gagcaauggucagaagaau

SEQ ID NO: 2289616 - RNA, 19 nt, Homo sapiens
  misc_RNA (1)...(19): siRNA sense strand
aaagauggagagaggaaau

SEQ ID NO: 2289617 - RNA, 19 nt, Homo sapiens
  misc_RNA (1)...(19): siRNA sense strand
cagaauuggaagcggauca

SEQ ID NO: 2289618 - RNA, 19 nt, Homo sapiens
  misc_RNA (1)...(19): siRNA sense strand
gauccagaagggagaagaa

SEQ ID NO: 2289619 - RNA, 19 nt, Homo sapiens
  misc_RNA (1)...(19): siRNA sense strand
gaauguaacaacugugaga

SEQ ID NO: 2289620 - RNA, 19 nt, Homo sapiens
  misc_RNA (1)...(19): siRNA sense strand
uguaaggacagcaggauuu

SEQ ID NO: 2289621 - RNA, 19 nt, Homo sapiens
  misc_RNA (1)...(19): siRNA sense strand
uaucagaaguacucagaca

SEQ ID NO: 2289622 - RNA, 19 nt, Homo sapiens
  misc_RNA (1)...(19): siRNA sense strand
ucagauggauucaggccaa

SEQ ID NO: 2289623 - RNA, 19 nt, Homo sapiens
  misc_RNA (1)...(19): siRNA sense strand
cccuaaugcuguaaggaca

SEQ ID NO: 2289624 - RNA, 19 nt, Homo sapiens
  misc_RNA (1)...(19): siRNA sense strand
gagaagcaaagcugggcaa

SEQ ID NO: 2289625 - RNA, 19 nt, Homo sapiens
  misc_RNA (1)...(19): siRNA sense strand
ccacagaagauauucaaga

SEQ ID NO: 2289626 - RNA, 19 nt, Homo sapiens
  misc_RNA (1)...(19): siRNA sense strand
ccuggaaauucucaugaaa

SEQ ID NO: 2289627 - RNA, 19 nt, Homo sapiens
  misc_RNA (1)...(19): siRNA sense strand
agagaagauguaugggcua

SEQ ID NO: 2289628 - RNA, 19 nt, Homo sapiens
  misc_RNA (1)...(19): siRNA sense strand
gaggagagucauagugcuu

SEQ ID NO: 2289629 - RNA, 19 nt, Homo sapiens
  misc_RNA (1)...(19): siRNA sense strand
cagacaugggcaauagaua

SEQ ID NO: 2289630 - RNA, 19 nt, Homo sapiens
  misc_RNA (1)...(19): siRNA sense strand
gcuuaagggaacagugcau

SEQ ID NO: 2289631 - RNA, 19 nt, Homo sapiens
  misc_RNA (1)...(19): siRNA sense strand
gugaagaaaucaaaccuga

SEQ ID NO: 2289632 - RNA, 19 nt, Homo sapiens
  misc_RNA (1)...(19): siRNA sense strand
agaaaucaaaccugacuua

SEQ ID NO: 2289633 - RNA, 19 nt, Homo sapiens
  misc_RNA (1)...(19): siRNA sense strand
agaagaaacugagaagcaa

SEQ ID NO: 2289634 - RNA, 19 nt, Homo sapiens
  misc_RNA (1)...(19): siRNA sense strand
gaauguggaacgauagaau

SEQ ID NO: 2289635 - RNA, 19 nt, Homo sapiens
  misc_RNA (1)...(19): siRNA sense strand
ccgagaagcagaagcagau

SEQ ID NO: 2289636 - RNA, 19 nt, Homo sapiens
  misc_RNA (1)...(19): siRNA sense strand
gauaugugcuacaguucaa

SEQ ID NO: 2289637 - RNA, 19 nt, Homo sapiens
  misc_RNA (1)...(19): siRNA sense strand
auuaaugaguggugggaaa

SEQ ID NO: 2289638 - RNA, 19 nt, Homo sapiens
  misc_RNA (1)...(19): siRNA sense strand
cugaaagcuuagugggaaa

SEQ ID NO: 2289639 - RNA, 19 nt, Homo sapiens
  misc_RNA (1)...(19): siRNA sense strand
cagaagaauuugagagcca

SEQ ID NO: 2289640 - RNA, 19 nt, Homo sapiens
  misc_RNA (1)...(19): siRNA sense strand
cagcaaugauauuuggaaa

SEQ ID NO: 2289641 - RNA, 19 nt, Homo sapiens
  misc_RNA (1)...(19): siRNA sense strand
gcaaaggaugcgaaggaaa

SEQ ID NO: 2289642 - RNA, 19 nt, Homo sapiens
  misc_RNA (1)...(19): siRNA sense strand
cuucaauggcccugggaaa

SEQ ID NO: 2289643 - RNA, 19 nt, Homo sapiens
  misc_RNA (1)...(19): siRNA sense strand
cauucaagguggagucaua

SEQ ID NO: 2289644 - RNA, 19 nt, Homo sapiens
  misc_RNA (1)...(19): siRNA sense strand
agaagauauucaagagcaa

SEQ ID NO: 2289645 - RNA, 19 nt, Homo sapiens
  misc_RNA (1)...(19): siRNA sense strand
ccagauaggcggagagagu

SEQ ID NO: 2289646 - RNA, 19 nt, Homo sapiens
  misc_RNA (1)...(19): siRNA sense strand
gagaagaaacugagaagca

SEQ ID NO: 2289647 - RNA, 19 nt, Homo sapiens
  misc_RNA (1)...(19): siRNA sense strand
caacagaagacgaagguca

SEQ ID NO: 2289648 - RNA, 19 nt, Homo sapiens
  misc_RNA (1)...(19): siRNA sense strand
uaucaugagcccagaauaa

SEQ ID NO: 2289649 - RNA, 19 nt, Homo sapiens
  misc_RNA (1)...(19): siRNA sense strand
gggauauacugcugcacaa

SEQ ID NO: 2289650 - RNA, 19 nt, Homo sapiens
  misc_RNA (1)...(19): siRNA sense strand
ucaaagauggagagaggaa

SEQ ID NO: 2289651 - RNA, 19 nt, Homo sapiens
  misc_RNA (1)...(19): siRNA sense strand
aaaugaaguuggugagcau

SEQ ID NO: 2289652 - RNA, 19 nt, Homo sapiens
  misc_RNA (1)...(19): siRNA sense strand
gagacugggaugugguaaa

SEQ ID NO: 2289653 - RNA, 19 nt, Homo sapiens
  misc_RNA (1)...(19): siRNA sense strand
agacaugggcaauagauaa

SEQ ID NO: 2289654 - RNA, 19 nt, Homo sapiens
  misc_RNA (1)...(19): siRNA sense strand
gaagaaacugagaagcaaa

SEQ ID NO: 2289655 - RNA, 19 nt, Homo sapiens
  misc_RNA (1)...(19): siRNA sense strand
aggauucgcuggagacaaa

SEQ ID NO: 2289656 - RNA, 19 nt, Homo sapiens
  misc_RNA (1)...(19): siRNA sense strand
gauucuuauuggaggaaau

SEQ ID NO: 2289657 - RNA, 19 nt, Homo sapiens
  misc_RNA (1)...(19): siRNA sense strand
gaagaauggacaagaauca

SEQ ID NO: 2289658 - RNA, 19 nt, Homo sapiens
  misc_RNA (1)...(19): siRNA sense strand
ggauguaaggugucugaaa

SEQ ID NO: 2289659 - RNA, 19 nt, Homo sapiens
  misc_RNA (1)...(19): siRNA sense strand
ggagauugcuuaagggaac

SEQ ID NO: 2289660 - RNA, 19 nt, Homo sapiens
  misc_RNA (1)...(19): siRNA sense strand
uggaacaggucaugaucaa

SEQ ID NO: 2289661 - RNA, 19 nt, Homo sapiens
  misc_RNA (1)...(19): siRNA sense strand
aagaauaccaugugacaau

SEQ ID NO: 2289662 - RNA, 19 nt, Homo sapiens
  misc_RNA (1)...(19): siRNA sense strand
auacauagugacagcauua

SEQ ID NO: 2289663 - RNA, 19 nt, Homo sapiens
  misc_RNA (1)...(19): siRNA sense strand
ggauucagcuagagaaaau

SEQ ID NO: 2289664 - RNA, 19 nt, Homo sapiens
  misc_RNA (1)...(19): siRNA sense strand
acacaguggaggagaguca

SEQ ID NO: 2289665 - RNA, 19 nt, Homo sapiens
  misc_RNA (1)...(19): siRNA sense strand
gcucaagacgagugggcuu

SEQ ID NO: 2289666 - RNA, 19 nt, Homo sapiens
  misc_RNA (1)...(19): siRNA sense strand
gcuaaugaaggaaugguua

SEQ ID NO: 2289667 - RNA, 19 nt, Homo sapiens
  misc_RNA (1)...(19): siRNA sense strand
ggguuguagucgauuauua

SEQ ID NO: 2289668 - RNA, 19 nt, Homo sapiens
  misc_RNA (1)...(19): siRNA sense strand
caagagucaccgaggcaaa

SEQ ID NO: 2289669 - RNA, 19 nt, Homo sapiens
  misc_RNA (1)...(19): siRNA sense strand
aggaaacuccagagaacua

SEQ ID NO: 2289670 - RNA, 19 nt, Homo sapiens
  misc_RNA (1)...(19): siRNA sense strand
aagcaaaacuucaggcauu

SEQ ID NO: 2289671 - RNA, 19 nt, Homo sapiens
  misc_RNA (1)...(19): siRNA sense strand
gcuuauuucaagagaucua

SEQ ID NO: 2289672 - RNA, 19 nt, Homo sapiens
  misc_RNA (1)...(19): siRNA sense strand
cuuggaaacaugugggcaa

SEQ ID NO: 2289673 - RNA, 19 nt, Homo sapiens
  misc_RNA (1)...(19): siRNA sense strand
ccucugugguacaagauaa

SEQ ID NO: 2289674 - RNA, 19 nt, Homo sapiens
  misc_RNA (1)...(19): siRNA sense strand
ccaacuaaaggguggaaaa

SEQ ID NO: 2289675 - RNA, 19 nt, Homo sapiens
  misc_RNA (1)...(19): siRNA sense strand
cuaaugaaggaaugguuaa

SEQ ID NO: 2289676 - RNA, 19 nt, Homo sapiens
  misc_RNA (1)...(19): siRNA sense strand
gggaaauccgguaagguuu

SEQ ID NO: 2289677 - RNA, 19 nt, Homo sapiens
  misc_RNA (1)...(19): siRNA sense strand
agauggauuaccagaaaua

SEQ ID NO: 2289678 - RNA, 19 nt, Homo sapiens
  misc_RNA (1)...(19): siRNA sense strand
gggcaauugauaauguuua

SEQ ID NO: 2289679 - RNA, 19 nt, Homo sapiens
  misc_RNA (1)...(19): siRNA sense strand
gugcaguggccaugggaga

SEQ ID NO: 2289680 - RNA, 19 nt, Homo sapiens
  misc_RNA (1)...(19): siRNA sense strand
gcugaaauacauagugaca

SEQ ID NO: 2289681 - RNA, 19 nt, Homo sapiens
  misc_RNA (1)...(19): siRNA sense strand
ggguggaaccgaauaacaa

SEQ ID NO: 2289682 - RNA, 19 nt, Homo sapiens
  misc_RNA (1)...(19): siRNA sense strand
caacaugugcagugggcau

SEQ ID NO: 2289683 - RNA, 19 nt, Homo sapiens
  misc_RNA (1)...(19): siRNA sense strand
aggcaaaggaugcgaagga

SEQ ID NO: 2289684 - RNA, 19 nt, Homo sapiens
  misc_RNA (1)...(19): siRNA sense strand
accaagaacuagaaaugaa

SEQ ID NO: 2289685 - RNA, 19 nt, Homo sapiens
  misc_RNA (1)...(19): siRNA sense strand
gacugugaacggagggaaa

SEQ ID NO: 2289686 - RNA, 19 nt, Homo sapiens
  misc_RNA (1)...(19): siRNA sense strand
gcgcaucgguagugagaac

SEQ ID NO: 2289687 - RNA, 19 nt, Homo sapiens
  misc_RNA (1)...(19): siRNA sense strand
ccacaauggaacaggucau

SEQ ID NO: 2289688 - RNA, 19 nt, Homo sapiens
  misc_RNA (1)...(19): siRNA sense strand
gugcucaggacgagggauu

SEQ ID NO: 2289689 - RNA, 19 nt, Homo sapiens
  misc_RNA (1)...(19): siRNA sense strand
caauggaaccaaauguaua

SEQ ID NO: 2289690 - RNA, 19 nt, Homo sapiens
  misc_RNA (1)...(19): siRNA sense strand
ggucaugaucaaugggcuu

SEQ ID NO: 2289691 - RNA, 19 nt, Homo sapiens
  misc_RNA (1)...(19): siRNA sense strand
cagaauaaucuccguagaa

SEQ ID NO: 2289692 - RNA, 19 nt, Homo sapiens
  misc_RNA (1)...(19): siRNA sense strand
uuggaaauguucagccaua

SEQ ID NO: 2289693 - RNA, 19 nt, Homo sapiens
  misc_RNA (1)...(19): siRNA sense strand
cuggauucagcuagagaaa

SEQ ID NO: 2289694 - RNA, 19 nt, Homo sapiens
  misc_RNA (1)...(19): siRNA sense strand
ucguguaggugaaguguau

SEQ ID NO: 2289695 - RNA, 19 nt, Homo sapiens
  misc_RNA (1)...(19): siRNA sense strand
gggcuauugaugagauuau

SEQ ID NO: 2289696 - RNA, 19 nt, Homo sapiens
  misc_RNA (1)...(19): siRNA sense strand
cuucauuaucgauggaaau

SEQ ID NO: 2289697 - RNA, 19 nt, Homo sapiens
  misc_RNA (1)...(19): siRNA sense strand
gagcaauggucagaagaau

SEQ ID NO: 2289698 - RNA, 19 nt, Homo sapiens
  misc_RNA (1)...(19): siRNA sense strand
aaagauggagagaggaaau

SEQ ID NO: 2289699 - RNA, 19 nt, Homo sapiens
  misc_RNA (1)...(19): siRNA sense strand
cagaauuggaagcggauca

SEQ ID NO: 2289700 - RNA, 19 nt, Homo sapiens
  misc_RNA (1)...(19): siRNA sense strand
gauccagaagggagaagaa

SEQ ID NO: 2289701 - RNA, 19 nt, Homo sapiens
  misc_RNA (1)...(19): siRNA sense strand
gaauguaacaacugugaga

SEQ ID NO: 2289702 - RNA, 19 nt, Homo sapiens
  misc_RNA (1)...(19): siRNA sense strand
uguaaggacagcaggauuu

SEQ ID NO: 2289703 - RNA, 19 nt, Homo sapiens
  misc_RNA (1)...(19): siRNA sense strand
uaucagaaguacucagaca

SEQ ID NO: 2289704 - RNA, 19 nt, Homo sapiens
  misc_RNA (1)...(19): siRNA sense strand
ucagauggauucaggccaa

SEQ ID NO: 2289705 - RNA, 19 nt, Homo sapiens
  misc_RNA (1)...(19): siRNA sense strand
cccuaaugcuguaaggaca

SEQ ID NO: 2289706 - RNA, 19 nt, Homo sapiens
  misc_RNA (1)...(19): siRNA sense strand
gagaagcaaagcugggcaa

SEQ ID NO: 2289707 - RNA, 19 nt, Homo sapiens
  misc_RNA (1)...(19): siRNA sense strand
ccacagaagauauucaaga

SEQ ID NO: 2289708 - RNA, 19 nt, Homo sapiens
  misc_RNA (1)...(19): siRNA sense strand
ccuggaaauucucaugaaa

SEQ ID NO: 2289709 - RNA, 19 nt, Homo sapiens
  misc_RNA (1)...(19): siRNA sense strand
agagaagauguaugggcua

SEQ ID NO: 2289710 - RNA, 19 nt, Homo sapiens
  misc_RNA (1)...(19): siRNA sense strand
gaggagagucauagugcuu

SEQ ID NO: 2289711 - RNA, 19 nt, Homo sapiens
  misc_RNA (1)...(19): siRNA sense strand
cagacaugggcaauagaua

SEQ ID NO: 2289712 - RNA, 19 nt, Homo sapiens
  misc_RNA (1)...(19): siRNA sense strand
gcuuaagggaacagugcau

SEQ ID NO: 2289713 - RNA, 19 nt, Homo sapiens
  misc_RNA (1)...(19): siRNA sense strand
gugaagaaaucaaaccuga

SEQ ID NO: 2289714 - RNA, 19 nt, Homo sapiens
  misc_RNA (1)...(19): siRNA sense strand
agaaaucaaaccugacuua

SEQ ID NO: 2289715 - RNA, 19 nt, Homo sapiens
  misc_RNA (1)...(19): siRNA sense strand
agaagaaacugagaagcaa

SEQ ID NO: 2289716 - RNA, 19 nt, Homo sapiens
  misc_RNA (1)...(19): siRNA sense strand
gaauguggaacgauagaau

SEQ ID NO: 2289717 - RNA, 19 nt, Homo sapiens
  misc_RNA (1)...(19): siRNA sense strand
ccgagaagcagaagcagau

SEQ ID NO: 2289718 - RNA, 19 nt, Homo sapiens
  misc_RNA (1)...(19): siRNA sense strand
gauaugugcuacaguucaa

SEQ ID NO: 2289719 - RNA, 19 nt, Homo sapiens
  misc_RNA (1)...(19): siRNA sense strand
uugcauugguggagagaau

SEQ ID NO: 2289720 - RNA, 19 nt, Homo sapiens
  misc_RNA (1)...(19): siRNA sense strand
aacgagaaccauagggaaa

SEQ ID NO: 2289721 - RNA, 19 nt, Homo sapiens
  misc_RNA (1)...(19): siRNA sense strand
gcuuaugagaauaggacau

SEQ ID NO: 2289722 - RNA, 19 nt, Homo sapiens
  misc_RNA (1)...(19): siRNA sense strand
uugcagaaaucuuugggaa

SEQ ID NO: 2289723 - RNA, 19 nt, Homo sapiens
  misc_RNA (1)...(19): siRNA sense strand
agaaggaguaauugaccaa

SEQ ID NO: 2289724 - RNA, 19 nt, Homo sapiens
  misc_RNA (1)...(19): siRNA sense strand
cugcuuaacgagaaccaua

SEQ ID NO: 2289725 - RNA, 19 nt, Homo sapiens
  misc_RNA (1)...(19): siRNA sense strand
auccaauguugaaggaaaa

SEQ ID NO: 2289726 - RNA, 19 nt, Homo sapiens
  misc_RNA (1)...(19): siRNA sense strand
agagcugacuggugaggau

SEQ ID NO: 2289727 - RNA, 19 nt, Homo sapiens
  misc_RNA (1)...(19): siRNA sense strand
gauuggaagaauuguugaa

SEQ ID NO: 2289728 - RNA, 19 nt, Homo sapiens
  misc_RNA (1)...(19): siRNA sense strand
ugagagagcugacugguga

SEQ ID NO: 2289729 - RNA, 19 nt, Homo sapiens
  misc_RNA (1)...(19): siRNA sense strand
aagaauaucacuaacccaa

SEQ ID NO: 2289730 - RNA, 19 nt, Homo sapiens
  misc_RNA (1)...(19): siRNA sense strand
ugucauggauaguccucaa

SEQ ID NO: 2289731 - RNA, 19 nt, Homo sapiens
  misc_RNA (1)...(19): siRNA sense strand
agacaauugcagaaaucuu

SEQ ID NO: 2289732 - RNA, 19 nt, Homo sapiens
  misc_RNA (1)...(19): siRNA sense strand
aaggaguaauugaccaaau

SEQ ID NO: 2289733 - RNA, 19 nt, Homo sapiens
  misc_RNA (1)...(19): siRNA sense strand
uaauauaauuguuggggca

SEQ ID NO: 2289734 - RNA, 19 nt, Homo sapiens
  misc_RNA (1)...(19): siRNA sense strand
ggucuguggagcaugacaa

SEQ ID NO: 2289735 - RNA, 19 nt, Homo sapiens
  misc_RNA (1)...(19): siRNA sense strand
ugagagagguagcgaggcu

SEQ ID NO: 2289736 - RNA, 19 nt, Homo sapiens
  misc_RNA (1)...(19): siRNA sense strand
uaugagaauaggacaucaa

SEQ ID NO: 2289737 - RNA, 19 nt, Homo sapiens
  misc_RNA (1)...(19): siRNA sense strand
cugucaagaauaucacuaa

SEQ ID NO: 2289738 - RNA, 19 nt, Homo sapiens
  misc_RNA (1)...(19): siRNA sense strand
ugccaggauucgugaaguu

SEQ ID NO: 2289739 - RNA, 19 nt, Homo sapiens
  misc_RNA (1)...(19): siRNA sense strand
guuuaacaguccagguuuu

SEQ ID NO: 2289740 - RNA, 19 nt, Homo sapiens
  misc_RNA (1)...(19): siRNA sense strand
aggagaagcuggagggaga

SEQ ID NO: 2289741 - RNA, 19 nt, Homo sapiens
  misc_RNA (1)...(19): siRNA sense strand
cagaggaaguggagagcga

SEQ ID NO: 2289742 - RNA, 19 nt, Homo sapiens
  misc_RNA (1)...(19): siRNA sense strand
ucucagauguggcuggcua

SEQ ID NO: 2289743 - RNA, 19 nt, Homo sapiens
  misc_RNA (1)...(19): siRNA sense strand
uaaagaucuccgagggaca

SEQ ID NO: 2289744 - RNA, 19 nt, Homo sapiens
  misc_RNA (1)...(19): siRNA sense strand
ccuucuuggucaucacaaa

SEQ ID NO: 2289745 - RNA, 19 nt, Homo sapiens
  misc_RNA (1)...(19): siRNA sense strand
gguucaagcacaugcagau

SEQ ID NO: 2289746 - RNA, 19 nt, Homo sapiens
  misc_RNA (1)...(19): siRNA sense strand
acucuguggaggaggaaga

SEQ ID NO: 2289747 - RNA, 19 nt, Homo sapiens
  misc_RNA (1)...(19): siRNA sense strand
gugcagaugcugacggacu

SEQ ID NO: 2289748 - RNA, 19 nt, Homo sapiens
  misc_RNA (1)...(19): siRNA sense strand
agaugggagcugaugagaa

SEQ ID NO: 2289749 - RNA, 19 nt, Homo sapiens
  misc_RNA (1)...(19): siRNA sense strand
ccuaaagaucuccgaggga

SEQ ID NO: 2289750 - RNA, 19 nt, Homo sapiens
  misc_RNA (1)...(19): siRNA sense strand
gaaacucuguggaggagga

SEQ ID NO: 2289751 - RNA, 19 nt, Homo sapiens
  misc_RNA (1)...(19): siRNA sense strand
cugccgaugaugagaggau

SEQ ID NO: 2289752 - RNA, 19 nt, Homo sapiens
  misc_RNA (1)...(19): siRNA sense strand
ugacagaggaaguggagag

SEQ ID NO: 2289753 - RNA, 19 nt, Homo sapiens
  misc_RNA (1)...(19): siRNA sense strand
ucugaaacucuguggagga

SEQ ID NO: 2289754 - RNA, 19 nt, Homo sapiens
  misc_RNA (1)...(19): siRNA sense strand
gagcugggcauguggagca

SEQ ID NO: 2289755 - RNA, 19 nt, Homo sapiens
  misc_RNA (1)...(19): siRNA sense strand
aggagaagcuggagggaga

SEQ ID NO: 2289756 - RNA, 19 nt, Homo sapiens
  misc_RNA (1)...(19): siRNA sense strand
cagaggaaguggagagcga

SEQ ID NO: 2289757 - RNA, 19 nt, Homo sapiens
  misc_RNA (1)...(19): siRNA sense strand
ucucagauguggcuggcua

SEQ ID NO: 2289758 - RNA, 19 nt, Homo sapiens
  misc_RNA (1)...(19): siRNA sense strand
uaaagaucuccgagggaca

SEQ ID NO: 2289759 - RNA, 19 nt, Homo sapiens
  misc_RNA (1)...(19): siRNA sense strand
ccuucuuggucaucacaaa

SEQ ID NO: 2289760 - RNA, 19 nt, Homo sapiens
  misc_RNA (1)...(19): siRNA sense strand
gguucaagcacaugcagau

SEQ ID NO: 2289761 - RNA, 19 nt, Homo sapiens
  misc_RNA (1)...(19): siRNA sense strand
acucuguggaggaggaaga

SEQ ID NO: 2289762 - RNA, 19 nt, Homo sapiens
  misc_RNA (1)...(19): siRNA sense strand
gugcagaugcugacggacu

SEQ ID NO: 2289763 - RNA, 19 nt, Homo sapiens
  misc_RNA (1)...(19): siRNA sense strand
agaugggagcugaugagaa

SEQ ID NO: 2289764 - RNA, 19 nt, Homo sapiens
  misc_RNA (1)...(19): siRNA sense strand
ccuaaagaucuccgaggga

SEQ ID NO: 2289765 - RNA, 19 nt, Homo sapiens
  misc_RNA (1)...(19): siRNA sense strand
gaaacucuguggaggagga

SEQ ID NO: 2289766 - RNA, 19 nt, Homo sapiens
  misc_RNA (1)...(19): siRNA sense strand
cugccgaugaugagaggau

SEQ ID NO: 2289767 - RNA, 19 nt, Homo sapiens
  misc_RNA (1)...(19): siRNA sense strand
ugacagaggaaguggagag

SEQ ID NO: 2289768 - RNA, 19 nt, Homo sapiens
  misc_RNA (1)...(19): siRNA sense strand
ucugaaacucuguggagga

SEQ ID NO: 2289769 - RNA, 19 nt, Homo sapiens
  misc_RNA (1)...(19): siRNA sense strand
gagcugggcauguggagca

SEQ ID NO: 2289770 - RNA, 19 nt, Homo sapiens
  misc_RNA (1)...(19): siRNA sense strand
aggagaagcuggagggaga

SEQ ID NO: 2289771 - RNA, 19 nt, Homo sapiens
  misc_RNA (1)...(19): siRNA sense strand
cagaggaaguggagagcga

SEQ ID NO: 2289772 - RNA, 19 nt, Homo sapiens
  misc_RNA (1)...(19): siRNA sense strand
ucucagauguggcuggcua

SEQ ID NO: 2289773 - RNA, 19 nt, Homo sapiens
  misc_RNA (1)...(19): siRNA sense strand
uaaagaucuccgagggaca

SEQ ID NO: 2289774 - RNA, 19 nt, Homo sapiens
  misc_RNA (1)...(19): siRNA sense strand
gguucaagcacaugcagau

SEQ ID NO: 2289775 - RNA, 19 nt, Homo sapiens
  misc_RNA (1)...(19): siRNA sense strand
acucuguggaggaggaaga

SEQ ID NO: 2289776 - RNA, 19 nt, Homo sapiens
  misc_RNA (1)...(19): siRNA sense strand
gugcagaugcugacggacu

SEQ ID NO: 2289777 - RNA, 19 nt, Homo sapiens
  misc_RNA (1)...(19): siRNA sense strand
agaugggagcugaugagaa

SEQ ID NO: 2289778 - RNA, 19 nt, Homo sapiens
  misc_RNA (1)...(19): siRNA sense strand
ccuaaagaucuccgaggga

SEQ ID NO: 2289779 - RNA, 19 nt, Homo sapiens
  misc_RNA (1)...(19): siRNA sense strand
gaaacucuguggaggagga

SEQ ID NO: 2289780 - RNA, 19 nt, Homo sapiens
  misc_RNA (1)...(19): siRNA sense strand
cugccgaugaugagaggau

SEQ ID NO: 2289781 - RNA, 19 nt, Homo sapiens
  misc_RNA (1)...(19): siRNA sense strand
ugacagaggaaguggagag

SEQ ID NO: 2289782 - RNA, 19 nt, Homo sapiens
  misc_RNA (1)...(19): siRNA sense strand
ucugaaacucuguggagga

SEQ ID NO: 2289783 - RNA, 19 nt, Homo sapiens
  misc_RNA (1)...(19): siRNA sense strand
gagcugggcauguggagca

SEQ ID NO: 2289784 - RNA, 19 nt, Homo sapiens
  misc_RNA (1)...(19): siRNA sense strand
aggagaagcuggagggaga

SEQ ID NO: 2289785 - RNA, 19 nt, Homo sapiens
  misc_RNA (1)...(19): siRNA sense strand
cagaggaaguggagagcga

SEQ ID NO: 2289786 - RNA, 19 nt, Homo sapiens
  misc_RNA (1)...(19): siRNA sense strand
ucucagauguggcuggcua

SEQ ID NO: 2289787 - RNA, 19 nt, Homo sapiens
  misc_RNA (1)...(19): siRNA sense strand
uaaagaucuccgagggaca

SEQ ID NO: 2289788 - RNA, 19 nt, Homo sapiens
  misc_RNA (1)...(19): siRNA sense strand
ccuucuuggucaucacaaa

SEQ ID NO: 2289789 - RNA, 19 nt, Homo sapiens
  misc_RNA (1)...(19): siRNA sense strand
gguucaagcacaugcagau

SEQ ID NO: 2289790 - RNA, 19 nt, Homo sapiens
  misc_RNA (1)...(19): siRNA sense strand
gugcagaugcugacggacu

SEQ ID NO: 2289791 - RNA, 19 nt, Homo sapiens
  misc_RNA (1)...(19): siRNA sense strand
ccuaaagaucuccgaggga

SEQ ID NO: 2289792 - RNA, 19 nt, Homo sapiens
  misc_RNA (1)...(19): siRNA sense strand
cugccgaugaugagaggau

SEQ ID NO: 2289793 - RNA, 19 nt, Homo sapiens
  misc_RNA (1)...(19): siRNA sense strand
ugacagaggaaguggagag

SEQ ID NO: 2289794 - RNA, 19 nt, Homo sapiens
  misc_RNA (1)...(19): siRNA sense strand
gagcugggcauguggagca

SEQ ID NO: 2289795 - RNA, 19 nt, Homo sapiens
  misc_RNA (1)...(19): siRNA sense strand
aggagaagcuggagggaga

SEQ ID NO: 2289796 - RNA, 19 nt, Homo sapiens
  misc_RNA (1)...(19): siRNA sense strand
ucucagauguggcuggcua

SEQ ID NO: 2289797 - RNA, 19 nt, Homo sapiens
  misc_RNA (1)...(19): siRNA sense strand
uaaagaucuccgagggaca

SEQ ID NO: 2289798 - RNA, 19 nt, Homo sapiens
  misc_RNA (1)...(19): siRNA sense strand
ccuucuuggucaucacaaa

SEQ ID NO: 2289799 - RNA, 19 nt, Homo sapiens
  misc_RNA (1)...(19): siRNA sense strand
gguucaagcacaugcagau

SEQ ID NO: 2289800 - RNA, 19 nt, Homo sapiens
  misc_RNA (1)...(19): siRNA sense strand
gugcagaugcugacggacu

SEQ ID NO: 2289801 - RNA, 19 nt, Homo sapiens
  misc_RNA (1)...(19): siRNA sense strand
ccuaaagaucuccgaggga

SEQ ID NO: 2289802 - RNA, 19 nt, Homo sapiens
  misc_RNA (1)...(19): siRNA sense strand
gagcugggcauguggagca

SEQ ID NO: 2289803 - RNA, 19 nt, Homo sapiens
  misc_RNA (1)...(19): siRNA sense strand
cugagaaggaggaagcaaa

SEQ ID NO: 2289804 - RNA, 19 nt, Homo sapiens
  misc_RNA (1)...(19): siRNA sense strand
aggcaaugcgcaagggcaa

SEQ ID NO: 2289805 - RNA, 19 nt, Homo sapiens
  misc_RNA (1)...(19): siRNA sense strand
cggcaaaggauguggugga

SEQ ID NO: 2289806 - RNA, 19 nt, Homo sapiens
  misc_RNA (1)...(19): siRNA sense strand
cagacagccaucagggaaa

SEQ ID NO: 2289807 - RNA, 19 nt, Homo sapiens
  misc_RNA (1)...(19): siRNA sense strand
ugacaaagcuaccgggauc

SEQ ID NO: 2289808 - RNA, 19 nt, Homo sapiens
  misc_RNA (1)...(19): siRNA sense strand
ggacugacuucaaggagga

SEQ ID NO: 2289809 - RNA, 19 nt, Homo sapiens
  misc_RNA (1)...(19): siRNA sense strand
gagagaagccaaaggccuu

SEQ ID NO: 2289810 - RNA, 19 nt, Homo sapiens
  misc_RNA (1)...(19): siRNA sense strand
gagaggagcucaaaggcca

SEQ ID NO: 2289811 - RNA, 19 nt, Homo sapiens
  misc_RNA (1)...(19): siRNA sense strand
gcucuguggcccuggcaaa

SEQ ID NO: 2289812 - RNA, 19 nt, Homo sapiens
  misc_RNA (1)...(19): siRNA sense strand
cgccagaacccaauggaau

SEQ ID NO: 2289813 - RNA, 19 nt, Homo sapiens
  misc_RNA (1)...(19): siRNA sense strand
guuugagcgucuuggauau

SEQ ID NO: 2289814 - RNA, 19 nt, Homo sapiens
  misc_RNA (1)...(19): siRNA sense strand
ggagauuacuggugggcag

SEQ ID NO: 2289815 - RNA, 19 nt, Homo sapiens
  misc_RNA (1)...(19): siRNA sense strand
agaaguucaagguggcaaa

SEQ ID NO: 2289816 - RNA, 19 nt, Homo sapiens
  misc_RNA (1)...(19): siRNA sense strand
ugaagugggcagauggcaa

SEQ ID NO: 2289817 - RNA, 19 nt, Homo sapiens
  misc_RNA (1)...(19): siRNA sense strand
ucaagaaugaaguggacau

SEQ ID NO: 2289818 - RNA, 19 nt, Homo sapiens
  misc_RNA (1)...(19): siRNA sense strand
gggaauguggcgugggugu

SEQ ID NO: 2289819 - RNA, 19 nt, Homo sapiens
  misc_RNA (1)...(19): siRNA sense strand
uggcaaaacccuucgacaa

SEQ ID NO: 2289820 - RNA, 19 nt, Homo sapiens
  misc_RNA (1)...(19): siRNA sense strand
gcaaaguucuucacggcca

SEQ ID NO: 2289821 - RNA, 19 nt, Homo sapiens
  misc_RNA (1)...(19): siRNA sense strand
aguuugagcgucuuggaua

SEQ ID NO: 2289822 - RNA, 19 nt, Homo sapiens
  misc_RNA (1)...(19): siRNA sense strand
uggugauggaggauggcaa

SEQ ID NO: 2289823 - RNA, 19 nt, Homo sapiens
  misc_RNA (1)...(19): siRNA sense strand
ggagagaagccaaaggccu

SEQ ID NO: 2289824 - RNA, 19 nt, Homo sapiens
  misc_RNA (1)...(19): siRNA sense strand
cugucacacugaaggaaga

SEQ ID NO: 2289825 - RNA, 19 nt, Homo sapiens
  misc_RNA (1)...(19): siRNA sense strand
ccaucgacacuguggacuu

SEQ ID NO: 2289826 - RNA, 19 nt, Homo sapiens
  misc_RNA (1)...(19): siRNA sense strand
cuacaagaccccaggcuau

SEQ ID NO: 2289827 - RNA, 19 nt, Homo sapiens
  misc_RNA (1)...(19): siRNA sense strand
ucuuugaggcaaugcgcaa

SEQ ID NO: 2289828 - RNA, 19 nt, Homo sapiens
  misc_RNA (1)...(19): siRNA sense strand
gagaagaaguucaaggugg

SEQ ID NO: 2289829 - RNA, 19 nt, Homo sapiens
  misc_RNA (1)...(19): siRNA sense strand
acuucaaggaggagccaga

SEQ ID NO: 2289830 - RNA, 19 nt, Homo sapiens
  misc_RNA (1)...(19): siRNA sense strand
gaucaagaaugaaguggac

SEQ ID NO: 2289831 - RNA, 19 nt, Homo sapiens
  misc_RNA (1)...(19): siRNA sense strand
ccagacagccaucagggaa

SEQ ID NO: 2289832 - RNA, 19 nt, Homo sapiens
  misc_RNA (1)...(19): siRNA sense strand
gguggagaauggcgagacu

SEQ ID NO: 2289833 - RNA, 19 nt, Homo sapiens
  misc_RNA (1)...(19): siRNA sense strand
cuguggaggcugcuauuaa

SEQ ID NO: 2289834 - RNA, 19 nt, Homo sapiens
  misc_RNA (1)...(19): siRNA sense strand
cagugguuguguagagagu

SEQ ID NO: 2289835 - RNA, 19 nt, Homo sapiens
  misc_RNA (1)...(19): siRNA sense strand
ucuccuuccuuguaagcua

SEQ ID NO: 2289836 - RNA, 19 nt, Homo sapiens
  misc_RNA (1)...(19): siRNA sense strand
cugaugagaccaaaggcuu

SEQ ID NO: 2289837 - RNA, 19 nt, Homo sapiens
  misc_RNA (1)...(19): siRNA sense strand
gaaagaagcuauagagagg

SEQ ID NO: 2289838 - RNA, 19 nt, Homo sapiens
  misc_RNA (1)...(19): siRNA sense strand
aggagaagauagaagcuga

SEQ ID NO: 2289839 - RNA, 19 nt, Homo sapiens
  misc_RNA (1)...(19): siRNA sense strand
ugcuaaaggagaagauaga

SEQ ID NO: 2289840 - RNA, 19 nt, Homo sapiens
  misc_RNA (1)...(19): siRNA sense strand
gagacgaugcugacggaga

SEQ ID NO: 2289841 - RNA, 19 nt, Homo sapiens
  misc_RNA (1)...(19): siRNA sense strand
ccacggaagcagcaggaga

SEQ ID NO: 2289842 - RNA, 19 nt, Homo sapiens
  misc_RNA (1)...(19): siRNA sense strand
agacggugaaggugcuaaa

SEQ ID NO: 2289843 - RNA, 19 nt, Homo sapiens
  misc_RNA (1)...(19): siRNA sense strand
gaguaugagacgaugcuga

SEQ ID NO: 2289844 - RNA, 19 nt, Homo sapiens
  misc_RNA (1)...(19): siRNA sense strand
gugaaggugcuaaaggaga

SEQ ID NO: 2289845 - RNA, 19 nt, Homo sapiens
  misc_RNA (1)...(19): siRNA sense strand
agaagaacuuuguggucgu

SEQ ID NO: 2289846 - RNA, 19 nt, Homo sapiens
  misc_RNA (1)...(19): siRNA sense strand
agaagauagaagcugagaa

SEQ ID NO: 2289847 - RNA, 19 nt, Homo sapiens
  misc_RNA (1)...(19): siRNA sense strand
ccccguggcuggacagaaa

SEQ ID NO: 2289848 - RNA, 19 nt, Homo sapiens
  misc_RNA (1)...(19): siRNA sense strand
aggugacgccgcaggagaa

SEQ ID NO: 2289849 - RNA, 19 nt, Homo sapiens
  misc_RNA (1)...(19): siRNA sense strand
cuaaaggagaagauagaag

SEQ ID NO: 2289850 - RNA, 19 nt, Homo sapiens
  misc_RNA (1)...(19): siRNA sense strand
aggagaaagaagcuauaga

SEQ ID NO: 2289851 - RNA, 19 nt, Homo sapiens
  misc_RNA (1)...(19): siRNA sense strand
ggacaaaaucugcuggaaa

SEQ ID NO: 2289852 - RNA, 19 nt, Homo sapiens
  misc_RNA (1)...(19): siRNA sense strand
agguaaagcuggacaaaau

SEQ ID NO: 2289853 - RNA, 19 nt, Homo sapiens
  misc_RNA (1)...(19): siRNA sense strand
aggugaagauggauggaau

SEQ ID NO: 2289854 - RNA, 19 nt, Homo sapiens
  misc_RNA (1)...(19): siRNA sense strand
cuagagaugugcaggaaaa

SEQ ID NO: 2289855 - RNA, 19 nt, Homo sapiens
  misc_RNA (1)...(19): siRNA sense strand
ggucgaaagagcagcaaaa

SEQ ID NO: 2289856 - RNA, 19 nt, Homo sapiens
  misc_RNA (1)...(19): siRNA sense strand
cgaaaugcagauucagaaa

SEQ ID NO: 2289857 - RNA, 19 nt, Homo sapiens
  misc_RNA (1)...(19): siRNA sense strand
gcaaaauaccuucagaaaa

SEQ ID NO: 2289858 - RNA, 19 nt, Homo sapiens
  misc_RNA (1)...(19): siRNA sense strand
aguagaggccauuaagaaa

SEQ ID NO: 2289859 - RNA, 19 nt, Homo sapiens
  misc_RNA (1)...(19): siRNA sense strand
aagaaaugcaggaguugaa

SEQ ID NO: 2289860 - RNA, 19 nt, Homo sapiens
  misc_RNA (1)...(19): siRNA sense strand
ucuuagaaaugaaaggaca

SEQ ID NO: 2289861 - RNA, 19 nt, Homo sapiens
  misc_RNA (1)...(19): siRNA sense strand
agucagucaccuaaggaua

SEQ ID NO: 2289862 - RNA, 19 nt, Homo sapiens
  misc_RNA (1)...(19): siRNA sense strand
aggccgauguggagcggua

SEQ ID NO: 2289863 - RNA, 19 nt, Homo sapiens
  misc_RNA (1)...(19): siRNA sense strand
caggaaggcagaagacauu

SEQ ID NO: 2289864 - RNA, 19 nt, Homo sapiens
  misc_RNA (1)...(19): siRNA sense strand
acuaaauagcaguaaguca

SEQ ID NO: 2289865 - RNA, 19 nt, Homo sapiens
  misc_RNA (1)...(19): siRNA sense strand
acuagaauacauagggaga

SEQ ID NO: 2289866 - RNA, 19 nt, Homo sapiens
  misc_RNA (1)...(19): siRNA sense strand
agggagaaguguucauuau

SEQ ID NO: 2289867 - RNA, 19 nt, Homo sapiens
  misc_RNA (1)...(19): siRNA sense strand
gccaacaaguagaggccau

SEQ ID NO: 2289868 - RNA, 19 nt, Homo sapiens
  misc_RNA (1)...(19): siRNA sense strand
gcaaaauacugggucgaaa

SEQ ID NO: 2289869 - RNA, 19 nt, Homo sapiens
  misc_RNA (1)...(19): siRNA sense strand
ccaugaaaccucaaggcuu

SEQ ID NO: 2289870 - RNA, 19 nt, Homo sapiens
  misc_RNA (1)...(19): siRNA sense strand
ggaugcaguaaauggaaau

SEQ ID NO: 2289871 - RNA, 19 nt, Homo sapiens
  misc_RNA (1)...(19): siRNA sense strand
aaguagaggccauuaagaa

SEQ ID NO: 2289872 - RNA, 19 nt, Homo sapiens
  misc_RNA (1)...(19): siRNA sense strand
aggcagaagacauugaaaa

SEQ ID NO: 2289873 - RNA, 19 nt, Homo sapiens
  misc_RNA (1)...(19): siRNA sense strand
acaagaagaaugcagaaau

SEQ ID NO: 2289874 - RNA, 19 nt, Homo sapiens
  misc_RNA (1)...(19): siRNA sense strand
cuuaagucguggcaagcaa

SEQ ID NO: 2289875 - RNA, 19 nt, Homo sapiens
  misc_RNA (1)...(19): siRNA sense strand
ggcaaaauaccuucagaaa

SEQ ID NO: 2289876 - RNA, 19 nt, Homo sapiens
  misc_RNA (1)...(19): siRNA sense strand
cauucaggcaucagaaauu

SEQ ID NO: 2289877 - RNA, 19 nt, Homo sapiens
  misc_RNA (1)...(19): siRNA sense strand
gcuguauuaugaagcuaaa

SEQ ID NO: 2289878 - RNA, 19 nt, Homo sapiens
  misc_RNA (1)...(19): siRNA sense strand
cagacuuacugcuggccua

SEQ ID NO: 2289879 - RNA, 19 nt, Homo sapiens
  misc_RNA (1)...(19): siRNA sense strand
uagcgaugauauuggaaaa

SEQ ID NO: 2289880 - RNA, 19 nt, Homo sapiens
  misc_RNA (1)...(19): siRNA sense strand
acucggugccugauggaua

SEQ ID NO: 2289881 - RNA, 19 nt, Homo sapiens
  misc_RNA (1)...(19): siRNA sense strand
ugauaaaagugacuggcaa

SEQ ID NO: 2289882 - RNA, 19 nt, Homo sapiens
  misc_RNA (1)...(19): siRNA sense strand
gugcaggaaaauagagaau

SEQ ID NO: 2289883 - RNA, 19 nt, Homo sapiens
  misc_RNA (1)...(19): siRNA sense strand
uugccauuguugaagauaa

SEQ ID NO: 2289884 - RNA, 19 nt, Homo sapiens
  misc_RNA (1)...(19): siRNA sense strand
uggaugcaguaaauggaaa

SEQ ID NO: 2289885 - RNA, 19 nt, Homo sapiens
  misc_RNA (1)...(19): siRNA sense strand
uguacaagaaccagagcuu

SEQ ID NO: 2289886 - RNA, 19 nt, Homo sapiens
  misc_RNA (1)...(19): siRNA sense strand
ugccauuguugaagauaau

SEQ ID NO: 2289887 - RNA, 19 nt, Homo sapiens
  misc_RNA (1)...(19): siRNA sense strand
cgaaagagcagcaaaacuu

SEQ ID NO: 2289888 - RNA, 19 nt, Homo sapiens
  misc_RNA (1)...(19): siRNA sense strand
gaacaguauuccugaaccu

SEQ ID NO: 2289889 - RNA, 19 nt, Homo sapiens
  misc_RNA (1)...(19): siRNA sense strand
uggaaaugaugaacuguca

SEQ ID NO: 2289890 - RNA, 19 nt, Homo sapiens
  misc_RNA (1)...(19): siRNA sense strand
gggucagcaugguaauaau

SEQ ID NO: 2289891 - RNA, 19 nt, Homo sapiens
  misc_RNA (1)...(19): siRNA sense strand
gcaugguaauaauguucaa

SEQ ID NO: 2289892 - RNA, 19 nt, Homo sapiens
  misc_RNA (1)...(19): siRNA sense strand
uuccaagaccaaagauuaa

SEQ ID NO: 2289893 - RNA, 19 nt, Homo sapiens
  misc_RNA (1)...(19): siRNA sense strand
guucauuauuggaagaaag

SEQ ID NO: 2289894 - RNA, 19 nt, Homo sapiens
  misc_RNA (1)...(19): siRNA sense strand
cugaagaacaagaagaaug

SEQ ID NO: 2289895 - RNA, 19 nt, Homo sapiens
  misc_RNA (1)...(19): siRNA sense strand
cugacaaagaccagggacu

SEQ ID NO: 2289896 - RNA, 19 nt, Homo sapiens
  misc_RNA (1)...(19): siRNA sense strand
cuuagaaaugaaaggacau

SEQ ID NO: 2289897 - RNA, 19 nt, Homo sapiens
  misc_RNA (1)...(19): siRNA sense strand
agaagguaaagcuggacaa

SEQ ID NO: 2289898 - RNA, 19 nt, Homo sapiens
  misc_RNA (1)...(19): siRNA sense strand
acaggaaggcagaagacau

SEQ ID NO: 2289899 - RNA, 19 nt, Homo sapiens
  misc_RNA (1)...(19): siRNA sense strand
guuacugauggaagagcaa

SEQ ID NO: 2289900 - RNA, 19 nt, Homo sapiens
  misc_RNA (1)...(19): siRNA sense strand
ggcagaagacauugaaaau

SEQ ID NO: 2289901 - RNA, 19 nt, Homo sapiens
  misc_RNA (1)...(19): siRNA sense strand
aagagaagguaaagcugga

SEQ ID NO: 2289902 - RNA, 19 nt, Homo sapiens
  misc_RNA (1)...(19): siRNA sense strand
auacgauguuggugcuauu

SEQ ID NO: 2289903 - RNA, 19 nt, Homo sapiens
  misc_RNA (1)...(19): siRNA sense strand
agauuauagaugacgguga

SEQ ID NO: 2289904 - RNA, 19 nt, Homo sapiens
  misc_RNA (1)...(19): siRNA sense strand
ucuagauugugaaggugaa

SEQ ID NO: 2289905 - RNA, 19 nt, Homo sapiens
  misc_RNA (1)...(19): siRNA sense strand
acuaaaagauugaaggaug

SEQ ID NO: 2289906 - RNA, 19 nt, Homo sapiens
  misc_RNA (1)...(19): siRNA sense strand
guguuuggagucugauaaa

SEQ ID NO: 2289907 - RNA, 19 nt, Homo sapiens
  misc_RNA (1)...(19): siRNA sense strand
uaauaauguucaauggcga

SEQ ID NO: 2289908 - RNA, 19 nt, Homo sapiens
  misc_RNA (1)...(19): siRNA sense strand
ggacaaaaucugcuggaaa

SEQ ID NO: 2289909 - RNA, 19 nt, Homo sapiens
  misc_RNA (1)...(19): siRNA sense strand
agguaaagcuggacaaaau

SEQ ID NO: 2289910 - RNA, 19 nt, Homo sapiens
  misc_RNA (1)...(19): siRNA sense strand
aggugaagauggauggaau

SEQ ID NO: 2289911 - RNA, 19 nt, Homo sapiens
  misc_RNA (1)...(19): siRNA sense strand
cuagagaugugcaggaaaa

SEQ ID NO: 2289912 - RNA, 19 nt, Homo sapiens
  misc_RNA (1)...(19): siRNA sense strand
ggucgaaagagcagcaaaa

SEQ ID NO: 2289913 - RNA, 19 nt, Homo sapiens
  misc_RNA (1)...(19): siRNA sense strand
cgaaaugcagauucagaaa

SEQ ID NO: 2289914 - RNA, 19 nt, Homo sapiens
  misc_RNA (1)...(19): siRNA sense strand
gcaaaauaccuucagaaaa

SEQ ID NO: 2289915 - RNA, 19 nt, Homo sapiens
  misc_RNA (1)...(19): siRNA sense strand
aguagaggccauuaagaaa

SEQ ID NO: 2289916 - RNA, 19 nt, Homo sapiens
  misc_RNA (1)...(19): siRNA sense strand
aagaaaugcaggaguugaa

SEQ ID NO: 2289917 - RNA, 19 nt, Homo sapiens
  misc_RNA (1)...(19): siRNA sense strand
ucuuagaaaugaaaggaca

SEQ ID NO: 2289918 - RNA, 19 nt, Homo sapiens
  misc_RNA (1)...(19): siRNA sense strand
agucagucaccuaaggaua

SEQ ID NO: 2289919 - RNA, 19 nt, Homo sapiens
  misc_RNA (1)...(19): siRNA sense strand
aggccgauguggagcggua

SEQ ID NO: 2289920 - RNA, 19 nt, Homo sapiens
  misc_RNA (1)...(19): siRNA sense strand
caggaaggcagaagacauu

SEQ ID NO: 2289921 - RNA, 19 nt, Homo sapiens
  misc_RNA (1)...(19): siRNA sense strand
acuaaauagcaguaaguca

SEQ ID NO: 2289922 - RNA, 19 nt, Homo sapiens
  misc_RNA (1)...(19): siRNA sense strand
acuagaauacauagggaga

SEQ ID NO: 2289923 - RNA, 19 nt, Homo sapiens
  misc_RNA (1)...(19): siRNA sense strand
agggagaaguguucauuau

SEQ ID NO: 2289924 - RNA, 19 nt, Homo sapiens
  misc_RNA (1)...(19): siRNA sense strand
gccaacaaguagaggccau

SEQ ID NO: 2289925 - RNA, 19 nt, Homo sapiens
  misc_RNA (1)...(19): siRNA sense strand
gcaaaauacugggucgaaa

SEQ ID NO: 2289926 - RNA, 19 nt, Homo sapiens
  misc_RNA (1)...(19): siRNA sense strand
ccaugaaaccucaaggcuu

SEQ ID NO: 2289927 - RNA, 19 nt, Homo sapiens
  misc_RNA (1)...(19): siRNA sense strand
ggaugcaguaaauggaaau

SEQ ID NO: 2289928 - RNA, 19 nt, Homo sapiens
  misc_RNA (1)...(19): siRNA sense strand
aaguagaggccauuaagaa

SEQ ID NO: 2289929 - RNA, 19 nt, Homo sapiens
  misc_RNA (1)...(19): siRNA sense strand
aggcagaagacauugaaaa

SEQ ID NO: 2289930 - RNA, 19 nt, Homo sapiens
  misc_RNA (1)...(19): siRNA sense strand
acaagaagaaugcagaaau

SEQ ID NO: 2289931 - RNA, 19 nt, Homo sapiens
  misc_RNA (1)...(19): siRNA sense strand
cuuaagucguggcaagcaa

SEQ ID NO: 2289932 - RNA, 19 nt, Homo sapiens
  misc_RNA (1)...(19): siRNA sense strand
ggcaaaauaccuucagaaa

SEQ ID NO: 2289933 - RNA, 19 nt, Homo sapiens
  misc_RNA (1)...(19): siRNA sense strand
cauucaggcaucagaaauu

SEQ ID NO: 2289934 - RNA, 19 nt, Homo sapiens
  misc_RNA (1)...(19): siRNA sense strand
gcuguauuaugaagcuaaa

SEQ ID NO: 2289935 - RNA, 19 nt, Homo sapiens
  misc_RNA (1)...(19): siRNA sense strand
cagacuuacugcuggccua

SEQ ID NO: 2289936 - RNA, 19 nt, Homo sapiens
  misc_RNA (1)...(19): siRNA sense strand
uagcgaugauauuggaaaa

SEQ ID NO: 2289937 - RNA, 19 nt, Homo sapiens
  misc_RNA (1)...(19): siRNA sense strand
acucggugccugauggaua

SEQ ID NO: 2289938 - RNA, 19 nt, Homo sapiens
  misc_RNA (1)...(19): siRNA sense strand
ugauaaaagugacuggcaa

SEQ ID NO: 2289939 - RNA, 19 nt, Homo sapiens
  misc_RNA (1)...(19): siRNA sense strand
gugcaggaaaauagagaau

SEQ ID NO: 2289940 - RNA, 19 nt, Homo sapiens
  misc_RNA (1)...(19): siRNA sense strand
uugccauuguugaagauaa

SEQ ID NO: 2289941 - RNA, 19 nt, Homo sapiens
  misc_RNA (1)...(19): siRNA sense strand
uggaugcaguaaauggaaa

SEQ ID NO: 2289942 - RNA, 19 nt, Homo sapiens
  misc_RNA (1)...(19): siRNA sense strand
uguacaagaaccagagcuu

SEQ ID NO: 2289943 - RNA, 19 nt, Homo sapiens
  misc_RNA (1)...(19): siRNA sense strand
ugccauuguugaagauaau

SEQ ID NO: 2289944 - RNA, 19 nt, Homo sapiens
  misc_RNA (1)...(19): siRNA sense strand
cgaaagagcagcaaaacuu

SEQ ID NO: 2289945 - RNA, 19 nt, Homo sapiens
  misc_RNA (1)...(19): siRNA sense strand
gaacaguauuccugaaccu

SEQ ID NO: 2289946 - RNA, 19 nt, Homo sapiens
  misc_RNA (1)...(19): siRNA sense strand
uggaaaugaugaacuguca

SEQ ID NO: 2289947 - RNA, 19 nt, Homo sapiens
  misc_RNA (1)...(19): siRNA sense strand
gggucagcaugguaauaau

SEQ ID NO: 2289948 - RNA, 19 nt, Homo sapiens
  misc_RNA (1)...(19): siRNA sense strand
gcaugguaauaauguucaa

SEQ ID NO: 2289949 - RNA, 19 nt, Homo sapiens
  misc_RNA (1)...(19): siRNA sense strand
uuccaagaccaaagauuaa

SEQ ID NO: 2289950 - RNA, 19 nt, Homo sapiens
  misc_RNA (1)...(19): siRNA sense strand
guucauuauuggaagaaag

SEQ ID NO: 2289951 - RNA, 19 nt, Homo sapiens
  misc_RNA (1)...(19): siRNA sense strand
cugaagaacaagaagaaug

SEQ ID NO: 2289952 - RNA, 19 nt, Homo sapiens
  misc_RNA (1)...(19): siRNA sense strand
cugacaaagaccagggacu

SEQ ID NO: 2289953 - RNA, 19 nt, Homo sapiens
  misc_RNA (1)...(19): siRNA sense strand
cuuagaaaugaaaggacau

SEQ ID NO: 2289954 - RNA, 19 nt, Homo sapiens
  misc_RNA (1)...(19): siRNA sense strand
agaagguaaagcuggacaa

SEQ ID NO: 2289955 - RNA, 19 nt, Homo sapiens
  misc_RNA (1)...(19): siRNA sense strand
acaggaaggcagaagacau

SEQ ID NO: 2289956 - RNA, 19 nt, Homo sapiens
  misc_RNA (1)...(19): siRNA sense strand
guuacugauggaagagcaa

SEQ ID NO: 2289957 - RNA, 19 nt, Homo sapiens
  misc_RNA (1)...(19): siRNA sense strand
ggcagaagacauugaaaau

SEQ ID NO: 2289958 - RNA, 19 nt, Homo sapiens
  misc_RNA (1)...(19): siRNA sense strand
aagagaagguaaagcugga

SEQ ID NO: 2289959 - RNA, 19 nt, Homo sapiens
  misc_RNA (1)...(19): siRNA sense strand
auacgauguuggugcuauu

SEQ ID NO: 2289960 - RNA, 19 nt, Homo sapiens
  misc_RNA (1)...(19): siRNA sense strand
agauuauagaugacgguga

SEQ ID NO: 2289961 - RNA, 19 nt, Homo sapiens
  misc_RNA (1)...(19): siRNA sense strand
ucuagauugugaaggugaa

SEQ ID NO: 2289962 - RNA, 19 nt, Homo sapiens
  misc_RNA (1)...(19): siRNA sense strand
acuaaaagauugaaggaug

SEQ ID NO: 2289963 - RNA, 19 nt, Homo sapiens
  misc_RNA (1)...(19): siRNA sense strand
guguuuggagucugauaaa

SEQ ID NO: 2289964 - RNA, 19 nt, Homo sapiens
  misc_RNA (1)...(19): siRNA sense strand
uaauaauguucaauggcga

SEQ ID NO: 2289965 - RNA, 19 nt, Homo sapiens
  misc_RNA (1)...(19): siRNA sense strand
ucgagaaggcccugcgcua

SEQ ID NO: 2289966 - RNA, 19 nt, Homo sapiens
  misc_RNA (1)...(19): siRNA sense strand
aguccauaggcgagaagaa

SEQ ID NO: 2289967 - RNA, 19 nt, Homo sapiens
  misc_RNA (1)...(19): siRNA sense strand
gcuucuaugcccaggucaa

SEQ ID NO: 2289968 - RNA, 19 nt, Homo sapiens
  misc_RNA (1)...(19): siRNA sense strand
aggucaaggacuacgagaa

SEQ ID NO: 2289969 - RNA, 19 nt, Homo sapiens
  misc_RNA (1)...(19): siRNA sense strand
augcccaggucaaggacua

SEQ ID NO: 2289970 - RNA, 19 nt, Homo sapiens
  misc_RNA (1)...(19): siRNA sense strand
gcauugcagguguggacaa

SEQ ID NO: 2289971 - RNA, 19 nt, Homo sapiens
  misc_RNA (1)...(19): siRNA sense strand
gagaagagcucggaccuca

SEQ ID NO: 2289972 - RNA, 19 nt, Homo sapiens
  misc_RNA (1)...(19): siRNA sense strand
cugcacugucugagcgaga

SEQ ID NO: 2289973 - RNA, 19 nt, Homo sapiens
  misc_RNA (1)...(19): siRNA sense strand
gcaacgagaagcugugcga

SEQ ID NO: 2289974 - RNA, 19 nt, Homo sapiens
  misc_RNA (1)...(19): siRNA sense strand
ucgagaaggcccugcgcua

SEQ ID NO: 2289975 - RNA, 19 nt, Homo sapiens
  misc_RNA (1)...(19): siRNA sense strand
aguccauaggcgagaagaa

SEQ ID NO: 2289976 - RNA, 19 nt, Homo sapiens
  misc_RNA (1)...(19): siRNA sense strand
gcuucuaugcccaggucaa

SEQ ID NO: 2289977 - RNA, 19 nt, Homo sapiens
  misc_RNA (1)...(19): siRNA sense strand
aggucaaggacuacgagaa

SEQ ID NO: 2289978 - RNA, 19 nt, Homo sapiens
  misc_RNA (1)...(19): siRNA sense strand
augcccaggucaaggacua

SEQ ID NO: 2289979 - RNA, 19 nt, Homo sapiens
  misc_RNA (1)...(19): siRNA sense strand
gcauugcagguguggacaa

SEQ ID NO: 2289980 - RNA, 19 nt, Homo sapiens
  misc_RNA (1)...(19): siRNA sense strand
gagaagagcucggaccuca

SEQ ID NO: 2289981 - RNA, 19 nt, Homo sapiens
  misc_RNA (1)...(19): siRNA sense strand
cugcacugucugagcgaga

SEQ ID NO: 2289982 - RNA, 19 nt, Homo sapiens
  misc_RNA (1)...(19): siRNA sense strand
gcaacgagaagcugugcga

SEQ ID NO: 2289983 - RNA, 19 nt, Homo sapiens
  misc_RNA (1)...(19): siRNA sense strand
caaaagaagaagagagaaa

SEQ ID NO: 2289984 - RNA, 19 nt, Homo sapiens
  misc_RNA (1)...(19): siRNA sense strand
cgaagaagagagagauaaa

SEQ ID NO: 2289985 - RNA, 19 nt, Homo sapiens
  misc_RNA (1)...(19): siRNA sense strand
agaagaagagagaaagaaa

SEQ ID NO: 2289986 - RNA, 19 nt, Homo sapiens
  misc_RNA (1)...(19): siRNA sense strand
ugccagaagaagaggaaua

SEQ ID NO: 2289987 - RNA, 19 nt, Homo sapiens
  misc_RNA (1)...(19): siRNA sense strand
guaacgaagaagagagaga

SEQ ID NO: 2289988 - RNA, 19 nt, Homo sapiens
  misc_RNA (1)...(19): siRNA sense strand
ggaggaaaccagagauaca

SEQ ID NO: 2289989 - RNA, 19 nt, Homo sapiens
  misc_RNA (1)...(19): siRNA sense strand
ccgcuaaaguggaagcuau

SEQ ID NO: 2289990 - RNA, 19 nt, Homo sapiens
  misc_RNA (1)...(19): siRNA sense strand
uggaggaggugaugagaga

SEQ ID NO: 2289991 - RNA, 19 nt, Homo sapiens
  misc_RNA (1)...(19): siRNA sense strand
ucaaagaacgggagcaaaa

SEQ ID NO: 2289992 - RNA, 19 nt, Homo sapiens
  misc_RNA (1)...(19): siRNA sense strand
ccgcauagaagaaguaaaa

SEQ ID NO: 2289993 - RNA, 19 nt, Homo sapiens
  misc_RNA (1)...(19): siRNA sense strand
gguaagcagcauugaagaa

SEQ ID NO: 2289994 - RNA, 19 nt, Homo sapiens
  misc_RNA (1)...(19): siRNA sense strand
cuggcaagcuaaagaagua

SEQ ID NO: 2289995 - RNA, 19 nt, Homo sapiens
  misc_RNA (1)...(19): siRNA sense strand
gugaaagagagcacugaaa

SEQ ID NO: 2289996 - RNA, 19 nt, Homo sapiens
  misc_RNA (1)...(19): siRNA sense strand
ccaaggaguuaaagaaaau

SEQ ID NO: 2289997 - RNA, 19 nt, Homo sapiens
  misc_RNA (1)...(19): siRNA sense strand
cggaaacggaagcuagaaa

SEQ ID NO: 2289998 - RNA, 19 nt, Homo sapiens
  misc_RNA (1)...(19): siRNA sense strand
ggagaugugaguagaaaca

SEQ ID NO: 2289999 - RNA, 19 nt, Homo sapiens
  misc_RNA (1)...(19): siRNA sense strand
ggggaaacaaugaagauaa

SEQ ID NO: 2290000 - RNA, 19 nt, Homo sapiens
  misc_RNA (1)...(19): siRNA sense strand
agaagauguuauuguggaa

SEQ ID NO: 2290001 - RNA, 19 nt, Homo sapiens
  misc_RNA (1)...(19): siRNA sense strand
uggaagaauugaaggccuu

SEQ ID NO: 2290002 - RNA, 19 nt, Homo sapiens
  misc_RNA (1)...(19): siRNA sense strand
aaacagaaguccaaggagu

SEQ ID NO: 2290003 - RNA, 19 nt, Homo sapiens
  misc_RNA (1)...(19): siRNA sense strand
ggcaaugaccagagugaga

SEQ ID NO: 2290004 - RNA, 19 nt, Homo sapiens
  misc_RNA (1)...(19): siRNA sense strand
ucccugugguagagagaaa

SEQ ID NO: 2290005 - RNA, 19 nt, Homo sapiens
  misc_RNA (1)...(19): siRNA sense strand
ugaagacauucgagagaca

SEQ ID NO: 2290006 - RNA, 19 nt, Homo sapiens
  misc_RNA (1)...(19): siRNA sense strand
cuucagagcuuuggagaga

SEQ ID NO: 2290007 - RNA, 19 nt, Homo sapiens
  misc_RNA (1)...(19): siRNA sense strand
gguuuaugcuacaguguga

SEQ ID NO: 2290008 - RNA, 19 nt, Homo sapiens
  misc_RNA (1)...(19): siRNA sense strand
cuaugaugaugaagaaaca

SEQ ID NO: 2290009 - RNA, 19 nt, Homo sapiens
  misc_RNA (1)...(19): siRNA sense strand
aaggaugggcggagaaaga

SEQ ID NO: 2290010 - RNA, 19 nt, Homo sapiens
  misc_RNA (1)...(19): siRNA sense strand
gcgaguuuguugugacauu

SEQ ID NO: 2290011 - RNA, 19 nt, Homo sapiens
  misc_RNA (1)...(19): siRNA sense strand
aggaaggauuggaggaaac

SEQ ID NO: 2290012 - RNA, 19 nt, Homo sapiens
  misc_RNA (1)...(19): siRNA sense strand
ugacagcauggaagagaaa

SEQ ID NO: 2290013 - RNA, 19 nt, Homo sapiens
  misc_RNA (1)...(19): siRNA sense strand
ugaaugaagccaagaacau

SEQ ID NO: 2290014 - RNA, 19 nt, Homo sapiens
  misc_RNA (1)...(19): siRNA sense strand
ugacaaugguggaccgcau

SEQ ID NO: 2290015 - RNA, 19 nt, Homo sapiens
  misc_RNA (1)...(19): siRNA sense strand
gaaacuagcaaaagaagaa

SEQ ID NO: 2290016 - RNA, 19 nt, Homo sapiens
  misc_RNA (1)...(19): siRNA sense strand
gaagaagagagaaagaaaa

SEQ ID NO: 2290017 - RNA, 19 nt, Homo sapiens
  misc_RNA (1)...(19): siRNA sense strand
ggaugaacauucugccgaa

SEQ ID NO: 2290018 - RNA, 19 nt, Homo sapiens
  misc_RNA (1)...(19): siRNA sense strand
uugauugaauugcgaguaa

SEQ ID NO: 2290019 - RNA, 19 nt, Homo sapiens
  misc_RNA (1)...(19): siRNA sense strand
uaggaaauacccagagaau

SEQ ID NO: 2290020 - RNA, 19 nt, Homo sapiens
  misc_RNA (1)...(19): siRNA sense strand
ugaaagaagccuuacaaaa

SEQ ID NO: 2290021 - RNA, 19 nt, Homo sapiens
  misc_RNA (1)...(19): siRNA sense strand
gcuagaaaagguagagcaa

SEQ ID NO: 2290022 - RNA, 19 nt, Homo sapiens
  misc_RNA (1)...(19): siRNA sense strand
ugggauaucugccaggaaa

SEQ ID NO: 2290023 - RNA, 19 nt, Homo sapiens
  misc_RNA (1)...(19): siRNA sense strand
gguuggaauuugaauaaca

SEQ ID NO: 2290024 - RNA, 19 nt, Homo sapiens
  misc_RNA (1)...(19): siRNA sense strand
gcuggaagaugcugaggau

SEQ ID NO: 2290025 - RNA, 19 nt, Homo sapiens
  misc_RNA (1)...(19): siRNA sense strand
aaagaagaagagagaaaga

SEQ ID NO: 2290026 - RNA, 19 nt, Homo sapiens
  misc_RNA (1)...(19): siRNA sense strand
gcucgagaauggaccgcua

SEQ ID NO: 2290027 - RNA, 19 nt, Homo sapiens
  misc_RNA (1)...(19): siRNA sense strand
aaagagaagaaauggucua

SEQ ID NO: 2290028 - RNA, 19 nt, Homo sapiens
  misc_RNA (1)...(19): siRNA sense strand
uguauaugggaguggcaaa

SEQ ID NO: 2290029 - RNA, 19 nt, Homo sapiens
  misc_RNA (1)...(19): siRNA sense strand
gaugaagacauucgagaga

SEQ ID NO: 2290030 - RNA, 19 nt, Homo sapiens
  misc_RNA (1)...(19): siRNA sense strand
agaagaaacacgauuaaga

SEQ ID NO: 2290031 - RNA, 19 nt, Homo sapiens
  misc_RNA (1)...(19): siRNA sense strand
ggucagucguguuacagaa

SEQ ID NO: 2290032 - RNA, 19 nt, Homo sapiens
  misc_RNA (1)...(19): siRNA sense strand
aagcagaaacacagacaga

SEQ ID NO: 2290033 - RNA, 19 nt, Homo sapiens
  misc_RNA (1)...(19): siRNA sense strand
guccaaggaguuaaagaaa

SEQ ID NO: 2290034 - RNA, 19 nt, Homo sapiens
  misc_RNA (1)...(19): siRNA sense strand
gcauugaagaagauguuau

SEQ ID NO: 2290035 - RNA, 19 nt, Homo sapiens
  misc_RNA (1)...(19): siRNA sense strand
ggcccaggcuagagacuau

SEQ ID NO: 2290036 - RNA, 19 nt, Homo sapiens
  misc_RNA (1)...(19): siRNA sense strand
gagccaggcacaaggauga

SEQ ID NO: 2290037 - RNA, 19 nt, Homo sapiens
  misc_RNA (1)...(19): siRNA sense strand
cuuuggaugucaugaagaa

SEQ ID NO: 2290038 - RNA, 19 nt, Homo sapiens
  misc_RNA (1)...(19): siRNA sense strand
ggaggaaggauuggaggaa

SEQ ID NO: 2290039 - RNA, 19 nt, Homo sapiens
  misc_RNA (1)...(19): siRNA sense strand
aaacaauggacuaugauga

SEQ ID NO: 2290040 - RNA, 19 nt, Homo sapiens
  misc_RNA (1)...(19): siRNA sense strand
uagaaaagguagagcaacu

SEQ ID NO: 2290041 - RNA, 19 nt, Homo sapiens
  misc_RNA (1)...(19): siRNA sense strand
gauuggauuucuuggauca

SEQ ID NO: 2290042 - RNA, 19 nt, Homo sapiens
  misc_RNA (1)...(19): siRNA sense strand
ggucagacgcauuuaacau

SEQ ID NO: 2290043 - RNA, 19 nt, Homo sapiens
  misc_RNA (1)...(19): siRNA sense strand
gagaagaaacggaaacgga

SEQ ID NO: 2290044 - RNA, 19 nt, Homo sapiens
  misc_RNA (1)...(19): siRNA sense strand
ccaagaaacuagcaaaaga

SEQ ID NO: 2290045 - RNA, 19 nt, Homo sapiens
  misc_RNA (1)...(19): siRNA sense strand
aacgaagaagagagagaua

SEQ ID NO: 2290046 - RNA, 19 nt, Homo sapiens
  misc_RNA (1)...(19): siRNA sense strand
aagaagaaguguuugaacu

SEQ ID NO: 2290047 - RNA, 19 nt, Homo sapiens
  misc_RNA (1)...(19): siRNA sense strand
uggcaaguuuagaaagcau

SEQ ID NO: 2290048 - RNA, 19 nt, Homo sapiens
  misc_RNA (1)...(19): siRNA sense strand
ggccaagaaacuagcaaaa

SEQ ID NO: 2290049 - RNA, 19 nt, Homo sapiens
  misc_RNA (1)...(19): siRNA sense strand
guauaaacugugcaaagaa

SEQ ID NO: 2290050 - RNA, 19 nt, Homo sapiens
  misc_RNA (1)...(19): siRNA sense strand
cuuccaaacuccagauguu

SEQ ID NO: 2290051 - RNA, 19 nt, Homo sapiens
  misc_RNA (1)...(19): siRNA sense strand
agaagaaacggaaacggaa

SEQ ID NO: 2290052 - RNA, 19 nt, Homo sapiens
  misc_RNA (1)...(19): siRNA sense strand
aguccaaggaguuaaagaa

SEQ ID NO: 2290053 - RNA, 19 nt, Homo sapiens
  misc_RNA (1)...(19): siRNA sense strand
guuuaugauggcagagaaa

SEQ ID NO: 2290054 - RNA, 19 nt, Homo sapiens
  misc_RNA (1)...(19): siRNA sense strand
cugcagaagaugaggaagu

SEQ ID NO: 2290055 - RNA, 19 nt, Homo sapiens
  misc_RNA (1)...(19): siRNA sense strand
gggcuaguucagagaagaa

SEQ ID NO: 2290056 - RNA, 19 nt, Homo sapiens
  misc_RNA (1)...(19): siRNA sense strand
uggaagagauggagagccu

SEQ ID NO: 2290057 - RNA, 19 nt, Homo sapiens
  misc_RNA (1)...(19): siRNA sense strand
gggagaagagcauuggcaa

SEQ ID NO: 2290058 - RNA, 19 nt, Homo sapiens
  misc_RNA (1)...(19): siRNA sense strand
gugaugaagagcuggaaga

SEQ ID NO: 2290059 - RNA, 19 nt, Homo sapiens
  misc_RNA (1)...(19): siRNA sense strand
uagaagacccagaagaaaa

SEQ ID NO: 2290060 - RNA, 19 nt, Homo sapiens
  misc_RNA (1)...(19): siRNA sense strand
aaggaucagcgaaggguaa

SEQ ID NO: 2290061 - RNA, 19 nt, Homo sapiens
  misc_RNA (1)...(19): siRNA sense strand
guucagagaagaagaggca

SEQ ID NO: 2290062 - RNA, 19 nt, Homo sapiens
  misc_RNA (1)...(19): siRNA sense strand
ccaugggacgagaggagaa

SEQ ID NO: 2290063 - RNA, 19 nt, Homo sapiens
  misc_RNA (1)...(19): siRNA sense strand
auauagaacuucaaggagu

SEQ ID NO: 2290064 - RNA, 19 nt, Homo sapiens
  misc_RNA (1)...(19): siRNA sense strand
cuguaaugauggccgaauu

SEQ ID NO: 2290065 - RNA, 19 nt, Homo sapiens
  misc_RNA (1)...(19): siRNA sense strand
gaauacgaagaaagggaau

SEQ ID NO: 2290066 - RNA, 19 nt, Homo sapiens
  misc_RNA (1)...(19): siRNA sense strand
acuucaaagaauuggauga

SEQ ID NO: 2290067 - RNA, 19 nt, Homo sapiens
  misc_RNA (1)...(19): siRNA sense strand
aagcaauaccacagccauu

SEQ ID NO: 2290068 - RNA, 19 nt, Homo sapiens
  misc_RNA (1)...(19): siRNA sense strand
cuaaaggaucaaaagguaa

SEQ ID NO: 2290069 - RNA, 19 nt, Homo sapiens
  misc_RNA (1)...(19): siRNA sense strand
ggguaaagugcaggcggaa

SEQ ID NO: 2290070 - RNA, 19 nt, Homo sapiens
  misc_RNA (1)...(19): siRNA sense strand
cugauaacauagugucaca

SEQ ID NO: 2290071 - RNA, 19 nt, Homo sapiens
  misc_RNA (1)...(19): siRNA sense strand
cgggaaacgcaaaaggcaa

SEQ ID NO: 2290072 - RNA, 19 nt, Homo sapiens
  misc_RNA (1)...(19): siRNA sense strand
ggagaagagcauuggcaac

SEQ ID NO: 2290073 - RNA, 19 nt, Homo sapiens
  misc_RNA (1)...(19): siRNA sense strand
aggaguaccaaaugaugaa

SEQ ID NO: 2290074 - RNA, 19 nt, Homo sapiens
  misc_RNA (1)...(19): siRNA sense strand
guaaagugcaggcggaacu

SEQ ID NO: 2290075 - RNA, 19 nt, Homo sapiens
  misc_RNA (1)...(19): siRNA sense strand
caauugaguuugcccggaa

SEQ ID NO: 2290076 - RNA, 19 nt, Homo sapiens
  misc_RNA (1)...(19): siRNA sense strand
uagaauacgaagaaaggga

SEQ ID NO: 2290077 - RNA, 19 nt, Homo sapiens
  misc_RNA (1)...(19): siRNA sense strand
caaaagguaaagagaaaga

SEQ ID NO: 2290078 - RNA, 19 nt, Homo sapiens
  misc_RNA (1)...(19): siRNA sense strand
cagagugacaacuggaaca

SEQ ID NO: 2290079 - RNA, 19 nt, Homo sapiens
  misc_RNA (1)...(19): siRNA sense strand
gaagagauggagagccuga

SEQ ID NO: 2290080 - RNA, 19 nt, Homo sapiens
  misc_RNA (1)...(19): siRNA sense strand
gggaauacaucguggcagg

SEQ ID NO: 2290081 - RNA, 19 nt, Homo sapiens
  misc_RNA (1)...(19): siRNA sense strand
ggcugaugcugcagaagau

SEQ ID NO: 2290082 - RNA, 19 nt, Homo sapiens
  misc_RNA (1)...(19): siRNA sense strand
ucagagaagaagaggcagu

SEQ ID NO: 2290083 - RNA, 19 nt, Homo sapiens
  misc_RNA (1)...(19): siRNA sense strand
aagaagaaacccaaaacaa

SEQ ID NO: 2290084 - RNA, 19 nt, Homo sapiens
  misc_RNA (1)...(19): siRNA sense strand
auggcaaauccaagaagaa

SEQ ID NO: 2290085 - RNA, 19 nt, Homo sapiens
  misc_RNA (1)...(19): siRNA sense strand
aagaugaggaaguggaugu

SEQ ID NO: 2290086 - RNA, 19 nt, Homo sapiens
  misc_RNA (1)...(19): siRNA sense strand
cuucuguagcagugaugaa

SEQ ID NO: 2290087 - RNA, 19 nt, Homo sapiens
  misc_RNA (1)...(19): siRNA sense strand
agguagaagacccagaaga

SEQ ID NO: 2290088 - RNA, 19 nt, Homo sapiens
  misc_RNA (1)...(19): siRNA sense strand
aguuuaugauggcagagaa

SEQ ID NO: 2290089 - RNA, 19 nt, Homo sapiens
  misc_RNA (1)...(19): siRNA sense strand
aagauaagagugagccuga

SEQ ID NO: 2290090 - RNA, 19 nt, Homo sapiens
  misc_RNA (1)...(19): siRNA sense strand
cagaagaugaggaagugga

SEQ ID NO: 2290091 - RNA, 19 nt, Homo sapiens
  misc_RNA (1)...(19): siRNA sense strand
ggaucaaaagguaaagaga

SEQ ID NO: 2290092 - RNA, 19 nt, Homo sapiens
  misc_RNA (1)...(19): siRNA sense strand
aggguaaagugcaggcgga

SEQ ID NO: 2290093 - RNA, 19 nt, Homo sapiens
  misc_RNA (1)...(19): siRNA sense strand
cagaggaagcugauggaac

SEQ ID NO: 2290094 - RNA, 19 nt, Homo sapiens
  misc_RNA (1)...(19): siRNA sense strand
ccuaagaagaaacccaaaa

SEQ ID NO: 2290095 - RNA, 19 nt, Homo sapiens
  misc_RNA (1)...(19): siRNA sense strand
ccauuaagucaauugaguu

SEQ ID NO: 2290096 - RNA, 19 nt, Homo sapiens
  misc_RNA (1)...(19): siRNA sense strand
acuucaaggaguaccaaau

SEQ ID NO: 2290097 - RNA, 19 nt, Homo sapiens
  misc_RNA (1)...(19): siRNA sense strand
ccaccuaagaagaaaccca

SEQ ID NO: 2290098 - RNA, 19 nt, Homo sapiens
  misc_RNA (1)...(19): siRNA sense strand
gggaggaagugacuggcua

SEQ ID NO: 2290099 - RNA, 19 nt, Homo sapiens
  misc_RNA (1)...(19): siRNA sense strand
uccaagaagcagagggaca

SEQ ID NO: 2290100 - RNA, 19 nt, Homo sapiens
  misc_RNA (1)...(19): siRNA sense strand
aggaaguccaugugggaga

SEQ ID NO: 2290101 - RNA, 19 nt, Homo sapiens
  misc_RNA (1)...(19): siRNA sense strand
cugcaagacucaucgccaa

SEQ ID NO: 2290102 - RNA, 19 nt, Homo sapiens
  misc_RNA (1)...(19): siRNA sense strand
ugacagagauagagcaccu

SEQ ID NO: 2290103 - RNA, 19 nt, Homo sapiens
  misc_RNA (1)...(19): siRNA sense strand
gcuccaagagaaaaggaaa

SEQ ID NO: 2290104 - RNA, 19 nt, Homo sapiens
  misc_RNA (1)...(19): siRNA sense strand
gccagggcuccaagagaaa

SEQ ID NO: 2290105 - RNA, 19 nt, Homo sapiens
  misc_RNA (1)...(19): siRNA sense strand
ggacaagucgucugggauc

SEQ ID NO: 2290106 - RNA, 19 nt, Homo sapiens
  misc_RNA (1)...(19): siRNA sense strand
agagaaaaggaaaguagaa

SEQ ID NO: 2290107 - RNA, 19 nt, Homo sapiens
  misc_RNA (1)...(19): siRNA sense strand
ugcaaguccuacagggaga

SEQ ID NO: 2290108 - RNA, 19 nt, Homo sapiens
  misc_RNA (1)...(19): siRNA sense strand
ggaaaguagaacagcugca

SEQ ID NO: 2290109 - RNA, 19 nt, Homo sapiens
  misc_RNA (1)...(19): siRNA sense strand
agaaaaggaaaguagaaca

SEQ ID NO: 2290110 - RNA, 19 nt, Homo sapiens
  misc_RNA (1)...(19): siRNA sense strand
gggccuacaaugcugacaa

SEQ ID NO: 2290111 - RNA, 19 nt, Homo sapiens
  misc_RNA (1)...(19): siRNA sense strand
aagcaggagcaauggaagu

SEQ ID NO: 2290112 - RNA, 19 nt, Homo sapiens
  misc_RNA (1)...(19): siRNA sense strand
aggcaaauacgguggcaug

SEQ ID NO: 2290113 - RNA, 19 nt, Homo sapiens
  misc_RNA (1)...(19): siRNA sense strand
caucaaugcccaucggcca

SEQ ID NO: 2290114 - RNA, 19 nt, Homo sapiens
  misc_RNA (1)...(19): siRNA sense strand
gggacaagucgucugggau

SEQ ID NO: 2290115 - RNA, 19 nt, Homo sapiens
  misc_RNA (1)...(19): siRNA sense strand
uguccaagaagcagaggga

SEQ ID NO: 2290116 - RNA, 19 nt, Homo sapiens
  misc_RNA (1)...(19): siRNA sense strand
gggucauuacgcugagaaa

SEQ ID NO: 2290117 - RNA, 19 nt, Homo sapiens
  misc_RNA (1)...(19): siRNA sense strand
ugcaagagguggcgggaca

SEQ ID NO: 2290118 - RNA, 19 nt, Homo sapiens
  misc_RNA (1)...(19): siRNA sense strand
aggacuggcacaagagcaa

SEQ ID NO: 2290119 - RNA, 19 nt, Homo sapiens
  misc_RNA (1)...(19): siRNA sense strand
agguggaggcggugacaau

SEQ ID NO: 2290120 - RNA, 19 nt, Homo sapiens
  misc_RNA (1)...(19): siRNA sense strand
aagaaguacugcaagguca

SEQ ID NO: 2290121 - RNA, 19 nt, Homo sapiens
  misc_RNA (1)...(19): siRNA sense strand
agaugaaacugcugcccuu

SEQ ID NO: 2290122 - RNA, 19 nt, Homo sapiens
  misc_RNA (1)...(19): siRNA sense strand
aagcaucuggagaaggaaa

SEQ ID NO: 2290123 - RNA, 19 nt, Homo sapiens
  misc_RNA (1)...(19): siRNA sense strand
gagaaggaaacgccggaga

SEQ ID NO: 2290124 - RNA, 19 nt, Homo sapiens
  misc_RNA (1)...(19): siRNA sense strand
cccauaagggccugcgcaa

SEQ ID NO: 2290125 - RNA, 19 nt, Homo sapiens
  misc_RNA (1)...(19): siRNA sense strand
ggucacaagccgcuggcau

SEQ ID NO: 2290126 - RNA, 19 nt, Homo sapiens
  misc_RNA (1)...(19): siRNA sense strand
ccaaacgggaggaggugga

SEQ ID NO: 2290127 - RNA, 19 nt, Homo sapiens
  misc_RNA (1)...(19): siRNA sense strand
uggcacaagagcaagaaga

SEQ ID NO: 2290128 - RNA, 19 nt, Homo sapiens
  misc_RNA (1)...(19): siRNA sense strand
gguaccaagaagcggguca

SEQ ID NO: 2290129 - RNA, 19 nt, Homo sapiens
  misc_RNA (1)...(19): siRNA sense strand
caaaagaagcaucuggaga

SEQ ID NO: 2290130 - RNA, 19 nt, Homo sapiens
  misc_RNA (1)...(19): siRNA sense strand
ucgccaagccguggagaau

SEQ ID NO: 2290131 - RNA, 19 nt, Homo sapiens
  misc_RNA (1)...(19): siRNA sense strand
gcacaaggacacaagggaa

SEQ ID NO: 2290132 - RNA, 19 nt, Homo sapiens
  misc_RNA (1)...(19): siRNA sense strand
acuaggagggagaaggaaa

SEQ ID NO: 2290133 - RNA, 19 nt, Homo sapiens
  misc_RNA (1)...(19): siRNA sense strand
ccacaugaacccagcaaaa

SEQ ID NO: 2290134 - RNA, 19 nt, Homo sapiens
  misc_RNA (1)...(19): siRNA sense strand
cauuaauggggcugggaaa

SEQ ID NO: 2290135 - RNA, 19 nt, Homo sapiens
  misc_RNA (1)...(19): siRNA sense strand
cggcagaccacgacgagau

SEQ ID NO: 2290136 - RNA, 19 nt, Homo sapiens
  misc_RNA (1)...(19): siRNA sense strand
caguuugauccuagcuaaa

SEQ ID NO: 2290137 - RNA, 19 nt, Homo sapiens
  misc_RNA (1)...(19): siRNA sense strand
ugaagugcgucuuggccaa

SEQ ID NO: 2290138 - RNA, 19 nt, Homo sapiens
  misc_RNA (1)...(19): siRNA sense strand
ccacaggauccaugggcga

SEQ ID NO: 2290139 - RNA, 19 nt, Homo sapiens
  misc_RNA (1)...(19): siRNA sense strand
cggaaacagcauuuaugaa

SEQ ID NO: 2290140 - RNA, 19 nt, Homo sapiens
  misc_RNA (1)...(19): siRNA sense strand
ggaugaagauagugugguc

SEQ ID NO: 2290141 - RNA, 19 nt, Homo sapiens
  misc_RNA (1)...(19): siRNA sense strand
ucggauaaguagucccaau

SEQ ID NO: 2290142 - RNA, 19 nt, Homo sapiens
  misc_RNA (1)...(19): siRNA sense strand
ccaccaaguacuacagguu

SEQ ID NO: 2290143 - RNA, 19 nt, Homo sapiens
  misc_RNA (1)...(19): siRNA sense strand
agagaacagauuacagcua

SEQ ID NO: 2290144 - RNA, 19 nt, Homo sapiens
  misc_RNA (1)...(19): siRNA sense strand
cagaaagcagagaagccua

SEQ ID NO: 2290145 - RNA, 19 nt, Homo sapiens
  misc_RNA (1)...(19): siRNA sense strand
acagcgaaaccauuagaaa

SEQ ID NO: 2290146 - RNA, 19 nt, Homo sapiens
  misc_RNA (1)...(19): siRNA sense strand
gggagaaggaaaacaguga

SEQ ID NO: 2290147 - RNA, 19 nt, Homo sapiens
  misc_RNA (1)...(19): siRNA sense strand
cuaggagggagaaggaaaa

SEQ ID NO: 2290148 - RNA, 19 nt, Homo sapiens
  misc_RNA (1)...(19): siRNA sense strand
ucaaaguagcccacaugaa

SEQ ID NO: 2290149 - RNA, 19 nt, Homo sapiens
  misc_RNA (1)...(19): siRNA sense strand
uuaaagaagaagagaacag

SEQ ID NO: 2290150 - RNA, 19 nt, Homo sapiens
  misc_RNA (1)...(19): siRNA sense strand
acagauuacagcuaaggaa

SEQ ID NO: 2290151 - RNA, 19 nt, Homo sapiens
  misc_RNA (1)...(19): siRNA sense strand
gagaaggaaaacagugaau

SEQ ID NO: 2290152 - RNA, 19 nt, Homo sapiens
  misc_RNA (1)...(19): siRNA sense strand
ccaugacugacaacagaaa

SEQ ID NO: 2290153 - RNA, 19 nt, Homo sapiens
  misc_RNA (1)...(19): siRNA sense strand
ggaagucccuugaccgaca

SEQ ID NO: 2290154 - RNA, 19 nt, Homo sapiens
  misc_RNA (1)...(19): siRNA sense strand
gauccaugggcgaggucau

SEQ ID NO: 2290155 - RNA, 19 nt, Homo sapiens
  misc_RNA (1)...(19): siRNA sense strand
ucacacagaaagaucggaa

SEQ ID NO: 2290156 - RNA, 19 nt, Homo sapiens
  misc_RNA (1)...(19): siRNA sense strand
cggauaaguagucccaauu

SEQ ID NO: 2290157 - RNA, 19 nt, Homo sapiens
  misc_RNA (1)...(19): siRNA sense strand
gcacuuauaugacagcgaa

SEQ ID NO: 2290158 - RNA, 19 nt, Homo sapiens
  misc_RNA (1)...(19): siRNA sense strand
guaucaaaguagcccacau

SEQ ID NO: 2290159 - RNA, 19 nt, Homo sapiens
  misc_RNA (1)...(19): siRNA sense strand
gguacgaaccucaggaccu

SEQ ID NO: 2290160 - RNA, 19 nt, Homo sapiens
  misc_RNA (1)...(19): siRNA sense strand
cagcgaaaccauuagaaac

SEQ ID NO: 2290161 - RNA, 19 nt, Homo sapiens
  misc_RNA (1)...(19): siRNA sense strand
cuguaauggcucacacuuu

SEQ ID NO: 2290162 - RNA, 19 nt, Homo sapiens
  misc_RNA (1)...(19): siRNA sense strand
gggcgaggucauugggaug

SEQ ID NO: 2290163 - RNA, 19 nt, Homo sapiens
  misc_RNA (1)...(19): siRNA sense strand
agaaagcagagaagccuau

SEQ ID NO: 2290164 - RNA, 19 nt, Homo sapiens
  misc_RNA (1)...(19): siRNA sense strand
uccagcagagagagggaaa

SEQ ID NO: 2290165 - RNA, 19 nt, Homo sapiens
  misc_RNA (1)...(19): siRNA sense strand
ggaaauuagugaaacccaa

SEQ ID NO: 2290166 - RNA, 19 nt, Homo sapiens
  misc_RNA (1)...(19): siRNA sense strand
gccaagaccaggagggaga

SEQ ID NO: 2290167 - RNA, 19 nt, Homo sapiens
  misc_RNA (1)...(19): siRNA sense strand
ugaaaugugucuuggcgaa

SEQ ID NO: 2290168 - RNA, 19 nt, Homo sapiens
  misc_RNA (1)...(19): siRNA sense strand
agguggagcucacgggcaa

SEQ ID NO: 2290169 - RNA, 19 nt, Homo sapiens
  misc_RNA (1)...(19): siRNA sense strand
ccaggagggagaaggaaaa

SEQ ID NO: 2290170 - RNA, 19 nt, Homo sapiens
  misc_RNA (1)...(19): siRNA sense strand
accaggagggagaaggaaa

SEQ ID NO: 2290171 - RNA, 19 nt, Homo sapiens
  misc_RNA (1)...(19): siRNA sense strand
uccaagaguaugagauaga

SEQ ID NO: 2290172 - RNA, 19 nt, Homo sapiens
  misc_RNA (1)...(19): siRNA sense strand
ccaccugcuccaagaguau

SEQ ID NO: 2290173 - RNA, 19 nt, Homo sapiens
  misc_RNA (1)...(19): siRNA sense strand
gugccaucaccgagaucaa

SEQ ID NO: 2290174 - RNA, 19 nt, Homo sapiens
  misc_RNA (1)...(19): siRNA sense strand
aguccaagaaugcggccaa

SEQ ID NO: 2290175 - RNA, 19 nt, Homo sapiens
  misc_RNA (1)...(19): siRNA sense strand
aguaugagauagagagguc

SEQ ID NO: 2290176 - RNA, 19 nt, Homo sapiens
  misc_RNA (1)...(19): siRNA sense strand
cucacaagaaacuaggaaa

SEQ ID NO: 2290177 - RNA, 19 nt, Homo sapiens
  misc_RNA (1)...(19): siRNA sense strand
cucggaaacuggagagcca

SEQ ID NO: 2290178 - RNA, 19 nt, Homo sapiens
  misc_RNA (1)...(19): siRNA sense strand
gcgaacacugcuaggcaca

SEQ ID NO: 2290179 - RNA, 19 nt, Homo sapiens
  misc_RNA (1)...(19): siRNA sense strand
caagaguaugagauagaga

SEQ ID NO: 2290180 - RNA, 19 nt, Homo sapiens
  misc_RNA (1)...(19): siRNA sense strand
agauugaauacaaggaacu

SEQ ID NO: 2290181 - RNA, 19 nt, Homo sapiens
  misc_RNA (1)...(19): siRNA sense strand
aauaccaagaugaagacaa

SEQ ID NO: 2290182 - RNA, 19 nt, Homo sapiens
  misc_RNA (1)...(19): siRNA sense strand
gagauugaauacaaggaac

SEQ ID NO: 2290183 - RNA, 19 nt, Homo sapiens
  misc_RNA (1)...(19): siRNA sense strand
ggaaauuagugaaacccaa

SEQ ID NO: 2290184 - RNA, 19 nt, Homo sapiens
  misc_RNA (1)...(19): siRNA sense strand
gccaagaccaggagggaga

SEQ ID NO: 2290185 - RNA, 19 nt, Homo sapiens
  misc_RNA (1)...(19): siRNA sense strand
ugaaaugugucuuggcgaa

SEQ ID NO: 2290186 - RNA, 19 nt, Homo sapiens
  misc_RNA (1)...(19): siRNA sense strand
agguggagcucacgggcaa

SEQ ID NO: 2290187 - RNA, 19 nt, Homo sapiens
  misc_RNA (1)...(19): siRNA sense strand
ccaggagggagaaggaaaa

SEQ ID NO: 2290188 - RNA, 19 nt, Homo sapiens
  misc_RNA (1)...(19): siRNA sense strand
accaggagggagaaggaaa

SEQ ID NO: 2290189 - RNA, 19 nt, Homo sapiens
  misc_RNA (1)...(19): siRNA sense strand
uccaagaguaugagauaga

SEQ ID NO: 2290190 - RNA, 19 nt, Homo sapiens
  misc_RNA (1)...(19): siRNA sense strand
ccaccugcuccaagaguau

SEQ ID NO: 2290191 - RNA, 19 nt, Homo sapiens
  misc_RNA (1)...(19): siRNA sense strand
gugccaucaccgagaucaa

SEQ ID NO: 2290192 - RNA, 19 nt, Homo sapiens
  misc_RNA (1)...(19): siRNA sense strand
aguccaagaaugcggccaa

SEQ ID NO: 2290193 - RNA, 19 nt, Homo sapiens
  misc_RNA (1)...(19): siRNA sense strand
aguaugagauagagagguc

SEQ ID NO: 2290194 - RNA, 19 nt, Homo sapiens
  misc_RNA (1)...(19): siRNA sense strand
cucacaagaaacuaggaaa

SEQ ID NO: 2290195 - RNA, 19 nt, Homo sapiens
  misc_RNA (1)...(19): siRNA sense strand
cucggaaacuggagagcca

SEQ ID NO: 2290196 - RNA, 19 nt, Homo sapiens
  misc_RNA (1)...(19): siRNA sense strand
gcgaacacugcuaggcaca

SEQ ID NO: 2290197 - RNA, 19 nt, Homo sapiens
  misc_RNA (1)...(19): siRNA sense strand
caagaguaugagauagaga

SEQ ID NO: 2290198 - RNA, 19 nt, Homo sapiens
  misc_RNA (1)...(19): siRNA sense strand
agauugaauacaaggaacu

SEQ ID NO: 2290199 - RNA, 19 nt, Homo sapiens
  misc_RNA (1)...(19): siRNA sense strand
aauaccaagaugaagacaa

SEQ ID NO: 2290200 - RNA, 19 nt, Homo sapiens
  misc_RNA (1)...(19): siRNA sense strand
gagauugaauacaaggaac

SEQ ID NO: 2290201 - RNA, 19 nt, Homo sapiens
  misc_RNA (1)...(19): siRNA sense strand
cugcaaacaucgagggcaa

SEQ ID NO: 2290202 - RNA, 19 nt, Homo sapiens
  misc_RNA (1)...(19): siRNA sense strand
cugagaacuucaugggcaa

SEQ ID NO: 2290203 - RNA, 19 nt, Homo sapiens
  misc_RNA (1)...(19): siRNA sense strand
cgugaggaauggaggcaca

SEQ ID NO: 2290204 - RNA, 19 nt, Homo sapiens
  misc_RNA (1)...(19): siRNA sense strand
aguguguggcagagaauaa

SEQ ID NO: 2290205 - RNA, 19 nt, Homo sapiens
  misc_RNA (1)...(19): siRNA sense strand
gcgucagcuuugaggauga

SEQ ID NO: 2290206 - RNA, 19 nt, Homo sapiens
  misc_RNA (1)...(19): siRNA sense strand
ccucaagugccgacaucaa

SEQ ID NO: 2290207 - RNA, 19 nt, Homo sapiens
  misc_RNA (1)...(19): siRNA sense strand
gcacaagcaugauggugga

SEQ ID NO: 2290208 - RNA, 19 nt, Homo sapiens
  misc_RNA (1)...(19): siRNA sense strand
agaacuaaugugaaggaga

SEQ ID NO: 2290209 - RNA, 19 nt, Homo sapiens
  misc_RNA (1)...(19): siRNA sense strand
gggaguaccagaacggaga

SEQ ID NO: 2290210 - RNA, 19 nt, Homo sapiens
  misc_RNA (1)...(19): siRNA sense strand
cgguggaagaugaauggua

SEQ ID NO: 2290211 - RNA, 19 nt, Homo sapiens
  misc_RNA (1)...(19): siRNA sense strand
cuggaaagcuggggacaaa

SEQ ID NO: 2290212 - RNA, 19 nt, Homo sapiens
  misc_RNA (1)...(19): siRNA sense strand
gcugagaacuucaugggca

SEQ ID NO: 2290213 - RNA, 19 nt, Homo sapiens
  misc_RNA (1)...(19): siRNA sense strand
gaacuaaugugaaggagac

SEQ ID NO: 2290214 - RNA, 19 nt, Homo sapiens
  misc_RNA (1)...(19): siRNA sense strand
gcagagaauaagcacggua

SEQ ID NO: 2290215 - RNA, 19 nt, Homo sapiens
  misc_RNA (1)...(19): siRNA sense strand
ugauaagccuggagggcac

SEQ ID NO: 2290216 - RNA, 19 nt, Homo sapiens
  misc_RNA (1)...(19): siRNA sense strand
cuaccaaggugugggccaa

SEQ ID NO: 2290217 - RNA, 19 nt, Homo sapiens
  misc_RNA (1)...(19): siRNA sense strand
gcaucaucgugcaggcuca

SEQ ID NO: 2290218 - RNA, 19 nt, Homo sapiens
  misc_RNA (1)...(19): siRNA sense strand
gaggugugguggugaggga

SEQ ID NO: 2290219 - RNA, 19 nt, Homo sapiens
  misc_RNA (1)...(19): siRNA sense strand
aguacuuugucuacagcaa

SEQ ID NO: 2290220 - RNA, 19 nt, Homo sapiens
  misc_RNA (1)...(19): siRNA sense strand
gacuaugaguuccggguca

SEQ ID NO: 2290221 - RNA, 19 nt, Homo sapiens
  misc_RNA (1)...(19): siRNA sense strand
agcucuagucuuagcauua

SEQ ID NO: 2290222 - RNA, 19 nt, Homo sapiens
  misc_RNA (1)...(19): siRNA sense strand
gggcaaagccaacagcacu

SEQ ID NO: 2290223 - RNA, 19 nt, Homo sapiens
  misc_RNA (1)...(19): siRNA sense strand
aaguccacaucgugaggaa

SEQ ID NO: 2290224 - RNA, 19 nt, Homo sapiens
  misc_RNA (1)...(19): siRNA sense strand
gcuuugaggaugagggcac

SEQ ID NO: 2290225 - RNA, 19 nt, Homo sapiens
  misc_RNA (1)...(19): siRNA sense strand
caacagcagcagagugacu

SEQ ID NO: 2290226 - RNA, 19 nt, Homo sapiens
  misc_RNA (1)...(19): siRNA sense strand
ccgacaucaacuuggguga

SEQ ID NO: 2290227 - RNA, 19 nt, Homo sapiens
  misc_RNA (1)...(19): siRNA sense strand
gguggaagaugaaugguac

SEQ ID NO: 2290228 - RNA, 19 nt, Homo sapiens
  misc_RNA (1)...(19): siRNA sense strand
ccaguguguggcagagaau

SEQ ID NO: 2290229 - RNA, 19 nt, Homo sapiens
  misc_RNA (1)...(19): siRNA sense strand
ggagcaaaggcacggagau

SEQ ID NO: 2290230 - RNA, 19 nt, Homo sapiens
  misc_RNA (1)...(19): siRNA sense strand
guaccgagaugaagcugga

SEQ ID NO: 2290231 - RNA, 19 nt, Homo sapiens
  misc_RNA (1)...(19): siRNA sense strand
uuggaaagagagagggaaa

SEQ ID NO: 2290232 - RNA, 19 nt, Homo sapiens
  misc_RNA (1)...(19): siRNA sense strand
agaacaacaacuagaagaa

SEQ ID NO: 2290233 - RNA, 19 nt, Homo sapiens
  misc_RNA (1)...(19): siRNA sense strand
cuacaaaagaaauggggaa

SEQ ID NO: 2290234 - RNA, 19 nt, Homo sapiens
  misc_RNA (1)...(19): siRNA sense strand
ggaaagagagagaagagga

SEQ ID NO: 2290235 - RNA, 19 nt, Homo sapiens
  misc_RNA (1)...(19): siRNA sense strand
gggaggaggaagucgggua

SEQ ID NO: 2290236 - RNA, 19 nt, Homo sapiens
  misc_RNA (1)...(19): siRNA sense strand
gagagaaaguuaaaggaac

SEQ ID NO: 2290237 - RNA, 19 nt, Homo sapiens
  misc_RNA (1)...(19): siRNA sense strand
gggaaagauuacaugagga

SEQ ID NO: 2290238 - RNA, 19 nt, Homo sapiens
  misc_RNA (1)...(19): siRNA sense strand
aguuaaaggaacaauggaa

SEQ ID NO: 2290239 - RNA, 19 nt, Homo sapiens
  misc_RNA (1)...(19): siRNA sense strand
cugaagaaggagaaacgaa

SEQ ID NO: 2290240 - RNA, 19 nt, Homo sapiens
  misc_RNA (1)...(19): siRNA sense strand
ucucacaggaggaggaaga

SEQ ID NO: 2290241 - RNA, 19 nt, Homo sapiens
  misc_RNA (1)...(19): siRNA sense strand
agagagaagaggaggagca

SEQ ID NO: 2290242 - RNA, 19 nt, Homo sapiens
  misc_RNA (1)...(19): siRNA sense strand
aagaggaagcugugcagaa

SEQ ID NO: 2290243 - RNA, 19 nt, Homo sapiens
  misc_RNA (1)...(19): siRNA sense strand
uugcagauuuggagacaga

SEQ ID NO: 2290244 - RNA, 19 nt, Homo sapiens
  misc_RNA (1)...(19): siRNA sense strand
gagcagaaacaacaggaga

SEQ ID NO: 2290245 - RNA, 19 nt, Homo sapiens
  misc_RNA (1)...(19): siRNA sense strand
aauaguaccacauggcaaa

SEQ ID NO: 2290246 - RNA, 19 nt, Homo sapiens
  misc_RNA (1)...(19): siRNA sense strand
gagcagugcaggagggaug

SEQ ID NO: 2290247 - RNA, 19 nt, Homo sapiens
  misc_RNA (1)...(19): siRNA sense strand
aagaggaggagcagaaaca

SEQ ID NO: 2290248 - RNA, 19 nt, Homo sapiens
  misc_RNA (1)...(19): siRNA sense strand
ccagugacccgguggaaaa

SEQ ID NO: 2290249 - RNA, 19 nt, Homo sapiens
  misc_RNA (1)...(19): siRNA sense strand
aggaagaaaccuaccaaca

SEQ ID NO: 2290250 - RNA, 19 nt, Homo sapiens
  misc_RNA (1)...(19): siRNA sense strand
agcagaaacaacaggagaa

SEQ ID NO: 2290251 - RNA, 19 nt, Homo sapiens
  misc_RNA (1)...(19): siRNA sense strand
ccagagaaaccaagccaca

SEQ ID NO: 2290252 - RNA, 19 nt, Homo sapiens
  misc_RNA (1)...(19): siRNA sense strand
caacaaugaauucugggaa

SEQ ID NO: 2290253 - RNA, 19 nt, Homo sapiens
  misc_RNA (1)...(19): siRNA sense strand
acaucaaagagucgggaga

SEQ ID NO: 2290254 - RNA, 19 nt, Homo sapiens
  misc_RNA (1)...(19): siRNA sense strand
aaauaguaccacauggcaa

SEQ ID NO: 2290255 - RNA, 19 nt, Homo sapiens
  misc_RNA (1)...(19): siRNA sense strand
uggaguacagcgaggaaga

SEQ ID NO: 2290256 - RNA, 19 nt, Homo sapiens
  misc_RNA (1)...(19): siRNA sense strand
guuuaacggacgaugguau

SEQ ID NO: 2290257 - RNA, 19 nt, Homo sapiens
  misc_RNA (1)...(19): siRNA sense strand
gcacaauucaccaagcaga

SEQ ID NO: 2290258 - RNA, 19 nt, Homo sapiens
  misc_RNA (1)...(19): siRNA sense strand
ccgagaggagggagaagau

SEQ ID NO: 2290259 - RNA, 19 nt, Homo sapiens
  misc_RNA (1)...(19): siRNA sense strand
uaaagaaggaaaaggaaga

SEQ ID NO: 2290260 - RNA, 19 nt, Homo sapiens
  misc_RNA (1)...(19): siRNA sense strand
gaguacagcgaggaagaaa

SEQ ID NO: 2290261 - RNA, 19 nt, Homo sapiens
  misc_RNA (1)...(19): siRNA sense strand
acaauguccaagaggaaaa

SEQ ID NO: 2290262 - RNA, 19 nt, Homo sapiens
  misc_RNA (1)...(19): siRNA sense strand
cccguggauuucagaguaa

SEQ ID NO: 2290263 - RNA, 19 nt, Homo sapiens
  misc_RNA (1)...(19): siRNA sense strand
auuucagaguaauggagaa

SEQ ID NO: 2290264 - RNA, 19 nt, Homo sapiens
  misc_RNA (1)...(19): siRNA sense strand
ggaauggagcagugcagga

SEQ ID NO: 2290265 - RNA, 19 nt, Homo sapiens
  misc_RNA (1)...(19): siRNA sense strand
aagaaggagaaacgaaaga

SEQ ID NO: 2290266 - RNA, 19 nt, Homo sapiens
  misc_RNA (1)...(19): siRNA sense strand
ugggaagcuaauagagaca

SEQ ID NO: 2290267 - RNA, 19 nt, Homo sapiens
  misc_RNA (1)...(19): siRNA sense strand
ggacacuuuuauugaagaa

SEQ ID NO: 2290268 - RNA, 19 nt, Homo sapiens
  misc_RNA (1)...(19): siRNA sense strand
gugcaggagggaugacuau

SEQ ID NO: 2290269 - RNA, 19 nt, Homo sapiens
  misc_RNA (1)...(19): siRNA sense strand
auggggaauccgagagaaa

SEQ ID NO: 2290270 - RNA, 19 nt, Homo sapiens
  misc_RNA (1)...(19): siRNA sense strand
agaagcuauuggaaagaga

SEQ ID NO: 2290271 - RNA, 19 nt, Homo sapiens
  misc_RNA (1)...(19): siRNA sense strand
cgacagcugcaaugugaau

SEQ ID NO: 2290272 - RNA, 19 nt, Homo sapiens
  misc_RNA (1)...(19): siRNA sense strand
aggaggaagaggacacuuu

SEQ ID NO: 2290273 - RNA, 19 nt, Homo sapiens
  misc_RNA (1)...(19): siRNA sense strand
gagaaaguuaaaggaacaa

SEQ ID NO: 2290274 - RNA, 19 nt, Homo sapiens
  misc_RNA (1)...(19): siRNA sense strand
cagaggaaagagagagaag

SEQ ID NO: 2290275 - RNA, 19 nt, Homo sapiens
  misc_RNA (1)...(19): siRNA sense strand
auggagaaggaucgagcua

SEQ ID NO: 2290276 - RNA, 19 nt, Homo sapiens
  misc_RNA (1)...(19): siRNA sense strand
agcagaggaaagagagaga

SEQ ID NO: 2290277 - RNA, 19 nt, Homo sapiens
  misc_RNA (1)...(19): siRNA sense strand
gaggaaagagagagaagag

SEQ ID NO: 2290278 - RNA, 19 nt, Homo sapiens
  misc_RNA (1)...(19): siRNA sense strand
aagagagagaagaggagga

SEQ ID NO: 2290279 - RNA, 19 nt, Homo sapiens
  misc_RNA (1)...(19): siRNA sense strand
ggagggagaagaugggcca

SEQ ID NO: 2290280 - RNA, 19 nt, Homo sapiens
  misc_RNA (1)...(19): siRNA sense strand
aggaagcugugcagaagau

SEQ ID NO: 2290281 - RNA, 19 nt, Homo sapiens
  misc_RNA (1)...(19): siRNA sense strand
ggaaagauuacaugaggag

SEQ ID NO: 2290282 - RNA, 19 nt, Homo sapiens
  misc_RNA (1)...(19): siRNA sense strand
gcaacugugaagagaguaa

SEQ ID NO: 2290283 - RNA, 19 nt, Homo sapiens
  misc_RNA (1)...(19): siRNA sense strand
aggaauuuguugugagaga

SEQ ID NO: 2290284 - RNA, 19 nt, Homo sapiens
  misc_RNA (1)...(19): siRNA sense strand
agaaauuagugaaggagau

SEQ ID NO: 2290285 - RNA, 19 nt, Homo sapiens
  misc_RNA (1)...(19): siRNA sense strand
acaagaaagaaauggcaaa

SEQ ID NO: 2290286 - RNA, 19 nt, Homo sapiens
  misc_RNA (1)...(19): siRNA sense strand
gagguauauucaagagcaa

SEQ ID NO: 2290287 - RNA, 19 nt, Homo sapiens
  misc_RNA (1)...(19): siRNA sense strand
agaugaagauacuggaaca

SEQ ID NO: 2290288 - RNA, 19 nt, Homo sapiens
  misc_RNA (1)...(19): siRNA sense strand
uucaagaaauaguggacaa

SEQ ID NO: 2290289 - RNA, 19 nt, Homo sapiens
  misc_RNA (1)...(19): siRNA sense strand
gguauauucaagagcaaau

SEQ ID NO: 2290290 - RNA, 19 nt, Homo sapiens
  misc_RNA (1)...(19): siRNA sense strand
aggagaugaaguagaggua

SEQ ID NO: 2290291 - RNA, 19 nt, Homo sapiens
  misc_RNA (1)...(19): siRNA sense strand
cggaagaggcagaggucgu

SEQ ID NO: 2290292 - RNA, 19 nt, Homo sapiens
  misc_RNA (1)...(19): siRNA sense strand
gggccuggcaauaggaaca

SEQ ID NO: 2290293 - RNA, 19 nt, Homo sapiens
  misc_RNA (1)...(19): siRNA sense strand
caggagaagaaaagauuaa

SEQ ID NO: 2290294 - RNA, 19 nt, Homo sapiens
  misc_RNA (1)...(19): siRNA sense strand
aaguagaacagcuaagaau

SEQ ID NO: 2290295 - RNA, 19 nt, Homo sapiens
  misc_RNA (1)...(19): siRNA sense strand
uagugaaggagaugaagua

SEQ ID NO: 2290296 - RNA, 19 nt, Homo sapiens
  misc_RNA (1)...(19): siRNA sense strand
aggaagaggcagaaguguu

SEQ ID NO: 2290297 - RNA, 19 nt, Homo sapiens
  misc_RNA (1)...(19): siRNA sense strand
gugaaggagaugaaguaga

SEQ ID NO: 2290298 - RNA, 19 nt, Homo sapiens
  misc_RNA (1)...(19): siRNA sense strand
aagaaauaguggacaaauc

SEQ ID NO: 2290299 - RNA, 19 nt, Homo sapiens
  misc_RNA (1)...(19): siRNA sense strand
gggcuuucuacaagggauu

SEQ ID NO: 2290300 - RNA, 19 nt, Homo sapiens
  misc_RNA (1)...(19): siRNA sense strand
agaugugauugaagagcau

SEQ ID NO: 2290301 - RNA, 19 nt, Homo sapiens
  misc_RNA (1)...(19): siRNA sense strand
gcuuauguccagaaaugaa

SEQ ID NO: 2290302 - RNA, 19 nt, Homo sapiens
  misc_RNA (1)...(19): siRNA sense strand
gcuaagaauggaacgccua

SEQ ID NO: 2290303 - RNA, 19 nt, Homo sapiens
  misc_RNA (1)...(19): siRNA sense strand
uggcaaaagaugugauuga

SEQ ID NO: 2290304 - RNA, 19 nt, Homo sapiens
  misc_RNA (1)...(19): siRNA sense strand
aauuagugaaggagaugaa

SEQ ID NO: 2290305 - RNA, 19 nt, Homo sapiens
  misc_RNA (1)...(19): siRNA sense strand
gagaagauuuaaugggccu

SEQ ID NO: 2290306 - RNA, 19 nt, Homo sapiens
  misc_RNA (1)...(19): siRNA sense strand
cagauugguucuaggucuu

SEQ ID NO: 2290307 - RNA, 19 nt, Homo sapiens
  misc_RNA (1)...(19): siRNA sense strand
gcucaaagauccagacagc

SEQ ID NO: 2290308 - RNA, 19 nt, Homo sapiens
  misc_RNA (1)...(19): siRNA sense strand
gauuauauuucuagagcug

SEQ ID NO: 2290309 - RNA, 19 nt, Homo sapiens
  misc_RNA (1)...(19): siRNA sense strand
gagagaggcgugugcuaau

SEQ ID NO: 2290310 - RNA, 19 nt, Homo sapiens
  misc_RNA (1)...(19): siRNA sense strand
ggcaaaguuauucaagaaa

SEQ ID NO: 2290311 - RNA, 19 nt, Homo sapiens
  misc_RNA (1)...(19): siRNA sense strand
uggugugguucgagugaga

SEQ ID NO: 2290312 - RNA, 19 nt, Homo sapiens
  misc_RNA (1)...(19): siRNA sense strand
cagaaacaacacagcuaau

SEQ ID NO: 2290313 - RNA, 19 nt, Homo sapiens
  misc_RNA (1)...(19): siRNA sense strand
uguugugagagaagauuua

SEQ ID NO: 2290314 - RNA, 19 nt, Homo sapiens
  misc_RNA (1)...(19): siRNA sense strand
cgaugacauuucuaagcua

SEQ ID NO: 2290315 - RNA, 19 nt, Homo sapiens
  misc_RNA (1)...(19): siRNA sense strand
ucaagaaauaguggacaaa

SEQ ID NO: 2290316 - RNA, 19 nt, Homo sapiens
  misc_RNA (1)...(19): siRNA sense strand
cuuuaaaugcacaguggau

SEQ ID NO: 2290317 - RNA, 19 nt, Homo sapiens
  misc_RNA (1)...(19): siRNA sense strand
gccuacagauugaugaaca

SEQ ID NO: 2290318 - RNA, 19 nt, Homo sapiens
  misc_RNA (1)...(19): siRNA sense strand
aagaaauuagugaaggaga

SEQ ID NO: 2290319 - RNA, 19 nt, Homo sapiens
  misc_RNA (1)...(19): siRNA sense strand
cgccauugagcuagaugaa

SEQ ID NO: 2290320 - RNA, 19 nt, Homo sapiens
  misc_RNA (1)...(19): siRNA sense strand
aaaggaaguagaacagcua

SEQ ID NO: 2290321 - RNA, 19 nt, Homo sapiens
  misc_RNA (1)...(19): siRNA sense strand
aagcaacugugaagagagu

SEQ ID NO: 2290322 - RNA, 19 nt, Homo sapiens
  misc_RNA (1)...(19): siRNA sense strand
gggauuuaucaaagauguu

SEQ ID NO: 2290323 - RNA, 19 nt, Homo sapiens
  misc_RNA (1)...(19): siRNA sense strand
ggucauuggcaggagaaga

SEQ ID NO: 2290324 - RNA, 19 nt, Homo sapiens
  misc_RNA (1)...(19): siRNA sense strand
cccaggaggaagaggcaga

SEQ ID NO: 2290325 - RNA, 19 nt, Homo sapiens
  misc_RNA (1)...(19): siRNA sense strand
ucuuggaauuuguggagga

SEQ ID NO: 2290326 - RNA, 19 nt, Homo sapiens
  misc_RNA (1)...(19): siRNA sense strand
aagggaaacuuuggcuaaa

SEQ ID NO: 2290327 - RNA, 19 nt, Homo sapiens
  misc_RNA (1)...(19): siRNA sense strand
caagaaagaaauggcaaaa

SEQ ID NO: 2290328 - RNA, 19 nt, Homo sapiens
  misc_RNA (1)...(19): siRNA sense strand
cuaaaguucggaugaugaa

SEQ ID NO: 2290329 - RNA, 19 nt, Homo sapiens
  misc_RNA (1)...(19): siRNA sense strand
cagaaucuacggagagagu

SEQ ID NO: 2290330 - RNA, 19 nt, Homo sapiens
  misc_RNA (1)...(19): siRNA sense strand
aaagacgagcugagugauu

SEQ ID NO: 2290331 - RNA, 19 nt, Homo sapiens
  misc_RNA (1)...(19): siRNA sense strand
aguuaaugaaaaugggcua

SEQ ID NO: 2290332 - RNA, 19 nt, Homo sapiens
  misc_RNA (1)...(19): siRNA sense strand
ucggaugaugaaaggagaa

SEQ ID NO: 2290333 - RNA, 19 nt, Homo sapiens
  misc_RNA (1)...(19): siRNA sense strand
aguaacauccagcaagcua

SEQ ID NO: 2290334 - RNA, 19 nt, Homo sapiens
  misc_RNA (1)...(19): siRNA sense strand
acuaaagaaagcauuggaa

SEQ ID NO: 2290335 - RNA, 19 nt, Homo sapiens
  misc_RNA (1)...(19): siRNA sense strand
cgacaggagaagaaagaaa

SEQ ID NO: 2290336 - RNA, 19 nt, Homo sapiens
  misc_RNA (1)...(19): siRNA sense strand
cugaaaaugaguuggaaaa

SEQ ID NO: 2290337 - RNA, 19 nt, Homo sapiens
  misc_RNA (1)...(19): siRNA sense strand
agaacaacaacuagaagaa

SEQ ID NO: 2290338 - RNA, 19 nt, Homo sapiens
  misc_RNA (1)...(19): siRNA sense strand
agaaacgacaggagaagaa

SEQ ID NO: 2290339 - RNA, 19 nt, Homo sapiens
  misc_RNA (1)...(19): siRNA sense strand
ccgaaaggagggagaggau

SEQ ID NO: 2290340 - RNA, 19 nt, Homo sapiens
  misc_RNA (1)...(19): siRNA sense strand
cuacaaaagaaauggggaa

SEQ ID NO: 2290341 - RNA, 19 nt, Homo sapiens
  misc_RNA (1)...(19): siRNA sense strand
uuggaaagagagaggcaaa

SEQ ID NO: 2290342 - RNA, 19 nt, Homo sapiens
  misc_RNA (1)...(19): siRNA sense strand
ggaaagagagagaagagga

SEQ ID NO: 2290343 - RNA, 19 nt, Homo sapiens
  misc_RNA (1)...(19): siRNA sense strand
gagagaaaguuaaaggaac

SEQ ID NO: 2290344 - RNA, 19 nt, Homo sapiens
  misc_RNA (1)...(19): siRNA sense strand
ggggaauccgagaggaaaa

SEQ ID NO: 2290345 - RNA, 19 nt, Homo sapiens
  misc_RNA (1)...(19): siRNA sense strand
uugcagauuuggagauaga

SEQ ID NO: 2290346 - RNA, 19 nt, Homo sapiens
  misc_RNA (1)...(19): siRNA sense strand
guuaaaggaacaaugggaa

SEQ ID NO: 2290347 - RNA, 19 nt, Homo sapiens
  misc_RNA (1)...(19): siRNA sense strand
agagagaagaggaggagca

SEQ ID NO: 2290348 - RNA, 19 nt, Homo sapiens
  misc_RNA (1)...(19): siRNA sense strand
cugaagaaggagaaacgaa

SEQ ID NO: 2290349 - RNA, 19 nt, Homo sapiens
  misc_RNA (1)...(19): siRNA sense strand
gcacaauucacgaagcaga

SEQ ID NO: 2290350 - RNA, 19 nt, Homo sapiens
  misc_RNA (1)...(19): siRNA sense strand
agaaggaggaagaggagga

SEQ ID NO: 2290351 - RNA, 19 nt, Homo sapiens
  misc_RNA (1)...(19): siRNA sense strand
gcugaaaaugaguuggaaa

SEQ ID NO: 2290352 - RNA, 19 nt, Homo sapiens
  misc_RNA (1)...(19): siRNA sense strand
ucucacagaaggaggaaga

SEQ ID NO: 2290353 - RNA, 19 nt, Homo sapiens
  misc_RNA (1)...(19): siRNA sense strand
gagcagaaacgacaggaga

SEQ ID NO: 2290354 - RNA, 19 nt, Homo sapiens
  misc_RNA (1)...(19): siRNA sense strand
gagcagugcaggagggaug

SEQ ID NO: 2290355 - RNA, 19 nt, Homo sapiens
  misc_RNA (1)...(19): siRNA sense strand
aagaggaagcuuugcagaa

SEQ ID NO: 2290356 - RNA, 19 nt, Homo sapiens
  misc_RNA (1)...(19): siRNA sense strand
aggaagaaaccuaccaaca

SEQ ID NO: 2290357 - RNA, 19 nt, Homo sapiens
  misc_RNA (1)...(19): siRNA sense strand
cgacagcugcagugugaau

SEQ ID NO: 2290358 - RNA, 19 nt, Homo sapiens
  misc_RNA (1)...(19): siRNA sense strand
caacaaugaauucugggaa

SEQ ID NO: 2290359 - RNA, 19 nt, Homo sapiens
  misc_RNA (1)...(19): siRNA sense strand
acaucaaagagucgggaga

SEQ ID NO: 2290360 - RNA, 19 nt, Homo sapiens
  misc_RNA (1)...(19): siRNA sense strand
uggaguacagcgaggaaga

SEQ ID NO: 2290361 - RNA, 19 nt, Homo sapiens
  misc_RNA (1)...(19): siRNA sense strand
uaagagagcagaaggcaca

SEQ ID NO: 2290362 - RNA, 19 nt, Homo sapiens
  misc_RNA (1)...(19): siRNA sense strand
aagagagaggcaaagauua

SEQ ID NO: 2290363 - RNA, 19 nt, Homo sapiens
  misc_RNA (1)...(19): siRNA sense strand
acgaagcagaggaagaaau

SEQ ID NO: 2290364 - RNA, 19 nt, Homo sapiens
  misc_RNA (1)...(19): siRNA sense strand
uaaagaaggaaaaggaaga

SEQ ID NO: 2290365 - RNA, 19 nt, Homo sapiens
  misc_RNA (1)...(19): siRNA sense strand
gaguacagcgaggaagaaa

SEQ ID NO: 2290366 - RNA, 19 nt, Homo sapiens
  misc_RNA (1)...(19): siRNA sense strand
cccguggauuucagaguaa

SEQ ID NO: 2290367 - RNA, 19 nt, Homo sapiens
  misc_RNA (1)...(19): siRNA sense strand
auuucagaguaauggagaa

SEQ ID NO: 2290368 - RNA, 19 nt, Homo sapiens
  misc_RNA (1)...(19): siRNA sense strand
agcagaaacgacaggagaa

SEQ ID NO: 2290369 - RNA, 19 nt, Homo sapiens
  misc_RNA (1)...(19): siRNA sense strand
ggaauggagcagugcagga

SEQ ID NO: 2290370 - RNA, 19 nt, Homo sapiens
  misc_RNA (1)...(19): siRNA sense strand
aggaacaaugggaagaaca

SEQ ID NO: 2290371 - RNA, 19 nt, Homo sapiens
  misc_RNA (1)...(19): siRNA sense strand
aagaaggagaaacgaaaga

SEQ ID NO: 2290372 - RNA, 19 nt, Homo sapiens
  misc_RNA (1)...(19): siRNA sense strand
ugggaagcuaauagagaca

SEQ ID NO: 2290373 - RNA, 19 nt, Homo sapiens
  misc_RNA (1)...(19): siRNA sense strand
ggacacuuuuauugaagaa

SEQ ID NO: 2290374 - RNA, 19 nt, Homo sapiens
  misc_RNA (1)...(19): siRNA sense strand
gugcaggagggaugacuau

SEQ ID NO: 2290375 - RNA, 19 nt, Homo sapiens
  misc_RNA (1)...(19): siRNA sense strand
agaagcuauuggaaagaga

SEQ ID NO: 2290376 - RNA, 19 nt, Homo sapiens
  misc_RNA (1)...(19): siRNA sense strand
aggagugguugcuaagaga

SEQ ID NO: 2290377 - RNA, 19 nt, Homo sapiens
  misc_RNA (1)...(19): siRNA sense strand
gagaaaguuaaaggaacaa

SEQ ID NO: 2290378 - RNA, 19 nt, Homo sapiens
  misc_RNA (1)...(19): siRNA sense strand
cagaggaaagagagagaag

SEQ ID NO: 2290379 - RNA, 19 nt, Homo sapiens
  misc_RNA (1)...(19): siRNA sense strand
auggagaaggaucgagcua

SEQ ID NO: 2290380 - RNA, 19 nt, Homo sapiens
  misc_RNA (1)...(19): siRNA sense strand
agagagaggcaaagauuac

SEQ ID NO: 2290381 - RNA, 19 nt, Homo sapiens
  misc_RNA (1)...(19): siRNA sense strand
agcagaggaaagagagaga

SEQ ID NO: 2290382 - RNA, 19 nt, Homo sapiens
  misc_RNA (1)...(19): siRNA sense strand
gaggaaagagagagaagag

SEQ ID NO: 2290383 - RNA, 19 nt, Homo sapiens
  misc_RNA (1)...(19): siRNA sense strand
aagagagagaagaggagga

SEQ ID NO: 2290384 - RNA, 19 nt, Homo sapiens
  misc_RNA (1)...(19): siRNA sense strand
cggcaagaagaacaagaga

SEQ ID NO: 2290385 - RNA, 19 nt, Homo sapiens
  misc_RNA (1)...(19): siRNA sense strand
aaugguaccacauggcaaa

SEQ ID NO: 2290386 - RNA, 19 nt, Homo sapiens
  misc_RNA (1)...(19): siRNA sense strand
auguauauguucaguacca

SEQ ID NO: 2290387 - RNA, 19 nt, Homo sapiens
  misc_RNA (1)...(19): siRNA sense strand
agacacuggugguggcaga

SEQ ID NO: 2290388 - RNA, 19 nt, Homo sapiens
  misc_RNA (1)...(19): siRNA sense strand
ggacaauggcuaugggcac

SEQ ID NO: 2290389 - RNA, 19 nt, Homo sapiens
  misc_RNA (1)...(19): siRNA sense strand
gggcagucagcuugcgcua

SEQ ID NO: 2290390 - RNA, 19 nt, Homo sapiens
  misc_RNA (1)...(19): siRNA sense strand
uacuagagcuggagcagga

SEQ ID NO: 2290391 - RNA, 19 nt, Homo sapiens
  misc_RNA (1)...(19): siRNA sense strand
gcaaggacuaugaugcuga

SEQ ID NO: 2290392 - RNA, 19 nt, Homo sapiens
  misc_RNA (1)...(19): siRNA sense strand
ccgcagggcuauucagcua

SEQ ID NO: 2290393 - RNA, 19 nt, Homo sapiens
  misc_RNA (1)...(19): siRNA sense strand
cgagaagccuacuuugaaa

SEQ ID NO: 2290394 - RNA, 19 nt, Homo sapiens
  misc_RNA (1)...(19): siRNA sense strand
acuaagucgccaagaaauu

SEQ ID NO: 2290395 - RNA, 19 nt, Homo sapiens
  misc_RNA (1)...(19): siRNA sense strand
ggaagagacgagaagccua

SEQ ID NO: 2290396 - RNA, 19 nt, Homo sapiens
  misc_RNA (1)...(19): siRNA sense strand
aagaaauugacauggaaga

SEQ ID NO: 2290397 - RNA, 19 nt, Homo sapiens
  misc_RNA (1)...(19): siRNA sense strand
agguaguuccagaaacaua

SEQ ID NO: 2290398 - RNA, 19 nt, Homo sapiens
  misc_RNA (1)...(19): siRNA sense strand
gcagaucuccgcagggcua

SEQ ID NO: 2290399 - RNA, 19 nt, Homo sapiens
  misc_RNA (1)...(19): siRNA sense strand
gcucaggaauguuagacga

SEQ ID NO: 2290400 - RNA, 19 nt, Homo sapiens
  misc_RNA (1)...(19): siRNA sense strand
ccaucuuccacgagaaaca

SEQ ID NO: 2290401 - RNA, 19 nt, Homo sapiens
  misc_RNA (1)...(19): siRNA sense strand
ccagaguaucagaggcuca

SEQ ID NO: 2290402 - RNA, 19 nt, Homo sapiens
  misc_RNA (1)...(19): siRNA sense strand
uggaagaugaggaagcaga

SEQ ID NO: 2290403 - RNA, 19 nt, Homo sapiens
  misc_RNA (1)...(19): siRNA sense strand
cuugaaaguuugggguuua

SEQ ID NO: 2290404 - RNA, 19 nt, Homo sapiens
  misc_RNA (1)...(19): siRNA sense strand
agagcaaagaguccauaaa

SEQ ID NO: 2290405 - RNA, 19 nt, Homo sapiens
  misc_RNA (1)...(19): siRNA sense strand
uagacgaagaugaggagga

SEQ ID NO: 2290406 - RNA, 19 nt, Homo sapiens
  misc_RNA (1)...(19): siRNA sense strand
cguuaagggugaucugcca

SEQ ID NO: 2290407 - RNA, 19 nt, Homo sapiens
  misc_RNA (1)...(19): siRNA sense strand
gggcuauucagcuaaguau

SEQ ID NO: 2290408 - RNA, 19 nt, Homo sapiens
  misc_RNA (1)...(19): siRNA sense strand
ugggagugaucuaggugau

SEQ ID NO: 2290409 - RNA, 19 nt, Homo sapiens
  misc_RNA (1)...(19): siRNA sense strand
agaagcaaaugauggcuca

SEQ ID NO: 2290410 - RNA, 19 nt, Homo sapiens
  misc_RNA (1)...(19): siRNA sense strand
gcuaaguaugcaagguagu

SEQ ID NO: 2290411 - RNA, 19 nt, Homo sapiens
  misc_RNA (1)...(19): siRNA sense strand
gguuauaagcaaugccuug

SEQ ID NO: 2290412 - RNA, 19 nt, Homo sapiens
  misc_RNA (1)...(19): siRNA sense strand
ucucaagauaugacacaga

SEQ ID NO: 2290413 - RNA, 19 nt, Homo sapiens
  misc_RNA (1)...(19): siRNA sense strand
ccgcagggcuauucagcua

SEQ ID NO: 2290414 - RNA, 19 nt, Homo sapiens
  misc_RNA (1)...(19): siRNA sense strand
cgagaagccuacuuugaaa

SEQ ID NO: 2290415 - RNA, 19 nt, Homo sapiens
  misc_RNA (1)...(19): siRNA sense strand
acuaagucgccaagaaauu

SEQ ID NO: 2290416 - RNA, 19 nt, Homo sapiens
  misc_RNA (1)...(19): siRNA sense strand
ggaagagacgagaagccua

SEQ ID NO: 2290417 - RNA, 19 nt, Homo sapiens
  misc_RNA (1)...(19): siRNA sense strand
aagaaauugacauggaaga

SEQ ID NO: 2290418 - RNA, 19 nt, Homo sapiens
  misc_RNA (1)...(19): siRNA sense strand
agguaguuccagaaacaua

SEQ ID NO: 2290419 - RNA, 19 nt, Homo sapiens
  misc_RNA (1)...(19): siRNA sense strand
gcagaucuccgcagggcua

SEQ ID NO: 2290420 - RNA, 19 nt, Homo sapiens
  misc_RNA (1)...(19): siRNA sense strand
gcucaggaauguuagacga

SEQ ID NO: 2290421 - RNA, 19 nt, Homo sapiens
  misc_RNA (1)...(19): siRNA sense strand
ccaucuuccacgagaaaca

SEQ ID NO: 2290422 - RNA, 19 nt, Homo sapiens
  misc_RNA (1)...(19): siRNA sense strand
ccagaguaucagaggcuca

SEQ ID NO: 2290423 - RNA, 19 nt, Homo sapiens
  misc_RNA (1)...(19): siRNA sense strand
uggaagaugaggaagcaga

SEQ ID NO: 2290424 - RNA, 19 nt, Homo sapiens
  misc_RNA (1)...(19): siRNA sense strand
cuugaaaguuugggguuua

SEQ ID NO: 2290425 - RNA, 19 nt, Homo sapiens
  misc_RNA (1)...(19): siRNA sense strand
agagcaaagaguccauaaa

SEQ ID NO: 2290426 - RNA, 19 nt, Homo sapiens
  misc_RNA (1)...(19): siRNA sense strand
uagacgaagaugaggagga

SEQ ID NO: 2290427 - RNA, 19 nt, Homo sapiens
  misc_RNA (1)...(19): siRNA sense strand
cguuaagggugaucugcca

SEQ ID NO: 2290428 - RNA, 19 nt, Homo sapiens
  misc_RNA (1)...(19): siRNA sense strand
gggcuauucagcuaaguau

SEQ ID NO: 2290429 - RNA, 19 nt, Homo sapiens
  misc_RNA (1)...(19): siRNA sense strand
ugggagugaucuaggugau

SEQ ID NO: 2290430 - RNA, 19 nt, Homo sapiens
  misc_RNA (1)...(19): siRNA sense strand
agaagcaaaugauggcuca

SEQ ID NO: 2290431 - RNA, 19 nt, Homo sapiens
  misc_RNA (1)...(19): siRNA sense strand
gcuaaguaugcaagguagu

SEQ ID NO: 2290432 - RNA, 19 nt, Homo sapiens
  misc_RNA (1)...(19): siRNA sense strand
gguuauaagcaaugccuug

SEQ ID NO: 2290433 - RNA, 19 nt, Homo sapiens
  misc_RNA (1)...(19): siRNA sense strand
ucucaagauaugacacaga

SEQ ID NO: 2290434 - RNA, 19 nt, Homo sapiens
  misc_RNA (1)...(19): siRNA sense strand
gggucaaggaggaggucaa

SEQ ID NO: 2290435 - RNA, 19 nt, Homo sapiens
  misc_RNA (1)...(19): siRNA sense strand
acgaauugccugugaggaa

SEQ ID NO: 2290436 - RNA, 19 nt, Homo sapiens
  misc_RNA (1)...(19): siRNA sense strand
aggagaagccagaagccaa

SEQ ID NO: 2290437 - RNA, 19 nt, Homo sapiens
  misc_RNA (1)...(19): siRNA sense strand
uggaauuugucaagagcuu

SEQ ID NO: 2290438 - RNA, 19 nt, Homo sapiens
  misc_RNA (1)...(19): siRNA sense strand
aagcagaugcagagauuca

SEQ ID NO: 2290439 - RNA, 19 nt, Homo sapiens
  misc_RNA (1)...(19): siRNA sense strand
gcaaagaaguccgaggcau

SEQ ID NO: 2290440 - RNA, 19 nt, Homo sapiens
  misc_RNA (1)...(19): siRNA sense strand
acgccaaguguguggaauu

SEQ ID NO: 2290441 - RNA, 19 nt, Homo sapiens
  misc_RNA (1)...(19): siRNA sense strand
auucugaagaggagggaga

SEQ ID NO: 2290442 - RNA, 19 nt, Homo sapiens
  misc_RNA (1)...(19): siRNA sense strand
gcgaugaggacgaagacga

SEQ ID NO: 2290443 - RNA, 19 nt, Homo sapiens
  misc_RNA (1)...(19): siRNA sense strand
caaagaaguccgaggcauc

SEQ ID NO: 2290444 - RNA, 19 nt, Homo sapiens
  misc_RNA (1)...(19): siRNA sense strand
acccagaggagaagaaaga

SEQ ID NO: 2290445 - RNA, 19 nt, Homo sapiens
  misc_RNA (1)...(19): siRNA sense strand
ccagauaacaugucggagu

SEQ ID NO: 2290446 - RNA, 19 nt, Homo sapiens
  misc_RNA (1)...(19): siRNA sense strand
ccaaggaggagaagccaga

SEQ ID NO: 2290447 - RNA, 19 nt, Homo sapiens
  misc_RNA (1)...(19): siRNA sense strand
ccaaaggggucaaggagga

SEQ ID NO: 2290448 - RNA, 19 nt, Homo sapiens
  misc_RNA (1)...(19): siRNA sense strand
gagucaaaacagaggauga

SEQ ID NO: 2290449 - RNA, 19 nt, Homo sapiens
  misc_RNA (1)...(19): siRNA sense strand
cgacggggauguuggaaau

SEQ ID NO: 2290450 - RNA, 19 nt, Homo sapiens
  misc_RNA (1)...(19): siRNA sense strand
cuggcaaaggcaaguauua

SEQ ID NO: 2290451 - RNA, 19 nt, Homo sapiens
  misc_RNA (1)...(19): siRNA sense strand
ucaaaacagaggaugaaaa

SEQ ID NO: 2290452 - RNA, 19 nt, Homo sapiens
  misc_RNA (1)...(19): siRNA sense strand
aagccaaugcugaggagau

SEQ ID NO: 2290453 - RNA, 19 nt, Homo sapiens
  misc_RNA (1)...(19): siRNA sense strand
ggagaagaucaaacagcga

SEQ ID NO: 2290454 - RNA, 19 nt, Homo sapiens
  misc_RNA (1)...(19): siRNA sense strand
ccgaagaggagaaaaccaa

SEQ ID NO: 2290455 - RNA, 19 nt, Homo sapiens
  misc_RNA (1)...(19): siRNA sense strand
uguggcaagugcugugaaa

SEQ ID NO: 2290456 - RNA, 19 nt, Homo sapiens
  misc_RNA (1)...(19): siRNA sense strand
uggcaagugcugugaaacu

SEQ ID NO: 2290457 - RNA, 19 nt, Homo sapiens
  misc_RNA (1)...(19): siRNA sense strand
acgaaugaguaccuggaga

SEQ ID NO: 2290458 - RNA, 19 nt, Homo sapiens
  misc_RNA (1)...(19): siRNA sense strand
gugcuggacauaugagaca

SEQ ID NO: 2290459 - RNA, 19 nt, Homo sapiens
  misc_RNA (1)...(19): siRNA sense strand
gagaaagacccagaggaga

SEQ ID NO: 2290460 - RNA, 19 nt, Homo sapiens
  misc_RNA (1)...(19): siRNA sense strand
acucauaauuugcugcuca

SEQ ID NO: 2290461 - RNA, 19 nt, Homo sapiens
  misc_RNA (1)...(19): siRNA sense strand
ggauaucggggcuggcaaa

SEQ ID NO: 2290462 - RNA, 19 nt, Homo sapiens
  misc_RNA (1)...(19): siRNA sense strand
gaagaaagaagucaccgaa

SEQ ID NO: 2290463 - RNA, 19 nt, Homo sapiens
  misc_RNA (1)...(19): siRNA sense strand
ggucuuacaguguggcuca

SEQ ID NO: 2290464 - RNA, 19 nt, Homo sapiens
  misc_RNA (1)...(19): siRNA sense strand
ggaaauuacuauuauggac

SEQ ID NO: 2290465 - RNA, 19 nt, Homo sapiens
  misc_RNA (1)...(19): siRNA sense strand
agaaaaccaaggaggagaa

SEQ ID NO: 2290466 - RNA, 19 nt, Homo sapiens
  misc_RNA (1)...(19): siRNA sense strand
augcugaggagaugaccaa

SEQ ID NO: 2290467 - RNA, 19 nt, Homo sapiens
  misc_RNA (1)...(19): siRNA sense strand
gagacgggauugaugacga

SEQ ID NO: 2290468 - RNA, 19 nt, Homo sapiens
  misc_RNA (1)...(19): siRNA sense strand
agagaaagacccagaggag

SEQ ID NO: 2290469 - RNA, 19 nt, Homo sapiens
  misc_RNA (1)...(19): siRNA sense strand
agaagaaagaagucaccga

SEQ ID NO: 2290470 - RNA, 19 nt, Homo sapiens
  misc_RNA (1)...(19): siRNA sense strand
gcacagagcaggagcagga

SEQ ID NO: 2290471 - RNA, 19 nt, Homo sapiens
  misc_RNA (1)...(19): siRNA sense strand
gggugaucgucuuggacaa

SEQ ID NO: 2290472 - RNA, 19 nt, Homo sapiens
  misc_RNA (1)...(19): siRNA sense strand
gcucagagguucauggacu

SEQ ID NO: 2290473 - RNA, 19 nt, Homo sapiens
  misc_RNA (1)...(19): siRNA sense strand
caugaagagcaaagacaau

SEQ ID NO: 2290474 - RNA, 19 nt, Homo sapiens
  misc_RNA (1)...(19): siRNA sense strand
gaggagaccuggaagcuga

SEQ ID NO: 2290475 - RNA, 19 nt, Homo sapiens
  misc_RNA (1)...(19): siRNA sense strand
cgucuuggacaaaggagaa

SEQ ID NO: 2290476 - RNA, 19 nt, Homo sapiens
  misc_RNA (1)...(19): siRNA sense strand
agcugaaggugcugaagaa

SEQ ID NO: 2290477 - RNA, 19 nt, Homo sapiens
  misc_RNA (1)...(19): siRNA sense strand
gggacuacaugaaggccau

SEQ ID NO: 2290478 - RNA, 19 nt, Homo sapiens
  misc_RNA (1)...(19): siRNA sense strand
aggacaaggugcuggccau

SEQ ID NO: 2290479 - RNA, 19 nt, Homo sapiens
  misc_RNA (1)...(19): siRNA sense strand
gaagcaaagcaaauggaga

SEQ ID NO: 2290480 - RNA, 19 nt, Homo sapiens
  misc_RNA (1)...(19): siRNA sense strand
guaaagaacuggaagaagg

SEQ ID NO: 2290481 - RNA, 19 nt, Homo sapiens
  misc_RNA (1)...(19): siRNA sense strand
ugcagaaagcugaggccaa

SEQ ID NO: 2290482 - RNA, 19 nt, Homo sapiens
  misc_RNA (1)...(19): siRNA sense strand
ggaagcugauggaggcuga

SEQ ID NO: 2290483 - RNA, 19 nt, Homo sapiens
  misc_RNA (1)...(19): siRNA sense strand
ugguaaagaacuggaagaa

SEQ ID NO: 2290484 - RNA, 19 nt, Homo sapiens
  misc_RNA (1)...(19): siRNA sense strand
cggaacaagucgugccugu

SEQ ID NO: 2290485 - RNA, 19 nt, Homo sapiens
  misc_RNA (1)...(19): siRNA sense strand
gagaauggcaugcugguga

SEQ ID NO: 2290486 - RNA, 19 nt, Homo sapiens
  misc_RNA (1)...(19): siRNA sense strand
acgagaaccagaaggccua

SEQ ID NO: 2290487 - RNA, 19 nt, Homo sapiens
  misc_RNA (1)...(19): siRNA sense strand
ggaacuacugccugcgcua

SEQ ID NO: 2290488 - RNA, 19 nt, Homo sapiens
  misc_RNA (1)...(19): siRNA sense strand
acaugaagagcaaagacaa

SEQ ID NO: 2290489 - RNA, 19 nt, Homo sapiens
  misc_RNA (1)...(19): siRNA sense strand
gagcaaagacaaucggauc

SEQ ID NO: 2290490 - RNA, 19 nt, Homo sapiens
  misc_RNA (1)...(19): siRNA sense strand
agggaaggaagcaaagcaa

SEQ ID NO: 2290491 - RNA, 19 nt, Homo sapiens
  misc_RNA (1)...(19): siRNA sense strand
ggcuggagugugugggcaa

SEQ ID NO: 2290492 - RNA, 19 nt, Homo sapiens
  misc_RNA (1)...(19): siRNA sense strand
gggcauuucacaagggauc

SEQ ID NO: 2290493 - RNA, 19 nt, Homo sapiens
  misc_RNA (1)...(19): siRNA sense strand
agaccaugaaugugcagaa

SEQ ID NO: 2290494 - RNA, 19 nt, Homo sapiens
  misc_RNA (1)...(19): siRNA sense strand
aagaacuggaagaaggaau

SEQ ID NO: 2290495 - RNA, 19 nt, Homo sapiens
  misc_RNA (1)...(19): siRNA sense strand
acgaaauucucaaugggau

SEQ ID NO: 2290496 - RNA, 19 nt, Homo sapiens
  misc_RNA (1)...(19): siRNA sense strand
uggacaaaguggaggggca

SEQ ID NO: 2290497 - RNA, 19 nt, Homo sapiens
  misc_RNA (1)...(19): siRNA sense strand
gcggugaucuccaggcaca

SEQ ID NO: 2290498 - RNA, 19 nt, Homo sapiens
  misc_RNA (1)...(19): siRNA sense strand
ucaccaauucagccagaaa

SEQ ID NO: 2290499 - RNA, 19 nt, Homo sapiens
  misc_RNA (1)...(19): siRNA sense strand
cgaaauucucaaugggauc

SEQ ID NO: 2290500 - RNA, 19 nt, Homo sapiens
  misc_RNA (1)...(19): siRNA sense strand
ccacaacagcaccgcagaa

SEQ ID NO: 2290501 - RNA, 19 nt, Homo sapiens
  misc_RNA (1)...(19): siRNA sense strand
uggcccacaugaagagcaa

SEQ ID NO: 2290502 - RNA, 19 nt, Homo sapiens
  misc_RNA (1)...(19): siRNA sense strand
ucgaggagcaggagcgcuu

SEQ ID NO: 2290503 - RNA, 19 nt, Homo sapiens
  misc_RNA (1)...(19): siRNA sense strand
ccuacuuccucaugagcuu

SEQ ID NO: 2290504 - RNA, 19 nt, Homo sapiens
  misc_RNA (1)...(19): siRNA sense strand
cgucaugaguggcggcaag

SEQ ID NO: 2290505 - RNA, 19 nt, Homo sapiens
  misc_RNA (1)...(19): siRNA sense strand
agcaggaugcagaggagaa

SEQ ID NO: 2290506 - RNA, 19 nt, Homo sapiens
  misc_RNA (1)...(19): siRNA sense strand
guccagggaaggaagcaaa

SEQ ID NO: 2290507 - RNA, 19 nt, Homo sapiens
  misc_RNA (1)...(19): siRNA sense strand
caaugggaucaaagugcua

SEQ ID NO: 2290508 - RNA, 19 nt, Homo sapiens
  misc_RNA (1)...(19): siRNA sense strand
aagcugaggccaagaagga

SEQ ID NO: 2290509 - RNA, 19 nt, Homo sapiens
  misc_RNA (1)...(19): siRNA sense strand
gcuucauccaccagaguga

SEQ ID NO: 2290510 - RNA, 19 nt, Homo sapiens
  misc_RNA (1)...(19): siRNA sense strand
ugaagguggacgagaacca

SEQ ID NO: 2290511 - RNA, 19 nt, Homo sapiens
  misc_RNA (1)...(19): siRNA sense strand
guggagaggcucaaggagu

SEQ ID NO: 2290512 - RNA, 19 nt, Homo sapiens
  misc_RNA (1)...(19): siRNA sense strand
ccaagaaggaggagaccug

SEQ ID NO: 2290513 - RNA, 19 nt, Homo sapiens
  misc_RNA (1)...(19): siRNA sense strand
cucaaggaguauucagaga

SEQ ID NO: 2290514 - RNA, 19 nt, Homo sapiens
  misc_RNA (1)...(19): siRNA sense strand
uggaagaaggaaugcgcca

SEQ ID NO: 2290515 - RNA, 19 nt, Homo sapiens
  misc_RNA (1)...(19): siRNA sense strand
ggaagaaggaaugcgccaa

SEQ ID NO: 2290516 - RNA, 19 nt, Homo sapiens
  misc_RNA (1)...(19): siRNA sense strand
aaggaaugcgccaagacua

SEQ ID NO: 2290517 - RNA, 19 nt, Homo sapiens
  misc_RNA (1)...(19): siRNA sense strand
ggaagcagccggugaaggu

SEQ ID NO: 2290518 - RNA, 19 nt, Homo sapiens
  misc_RNA (1)...(19): siRNA sense strand
aggucaagcuuuccgugua

SEQ ID NO: 2290519 - RNA, 19 nt, Homo sapiens
  misc_RNA (1)...(19): siRNA sense strand
caaaauuaugacagccuua

SEQ ID NO: 2290520 - RNA, 19 nt, Homo sapiens
  misc_RNA (1)...(19): siRNA sense strand
gagcuggcauucaaggaca

SEQ ID NO: 2290521 - RNA, 19 nt, Homo sapiens
  misc_RNA (1)...(19): siRNA sense strand
cugccgaaggagagaucau

SEQ ID NO: 2290522 - RNA, 19 nt, Homo sapiens
  misc_RNA (1)...(19): siRNA sense strand
gcacagagcaggagcagga

SEQ ID NO: 2290523 - RNA, 19 nt, Homo sapiens
  misc_RNA (1)...(19): siRNA sense strand
gggugaucgucuuggacaa

SEQ ID NO: 2290524 - RNA, 19 nt, Homo sapiens
  misc_RNA (1)...(19): siRNA sense strand
gcucagagguucauggacu

SEQ ID NO: 2290525 - RNA, 19 nt, Homo sapiens
  misc_RNA (1)...(19): siRNA sense strand
caugaagagcaaagacaau

SEQ ID NO: 2290526 - RNA, 19 nt, Homo sapiens
  misc_RNA (1)...(19): siRNA sense strand
gaggagaccuggaagcuga

SEQ ID NO: 2290527 - RNA, 19 nt, Homo sapiens
  misc_RNA (1)...(19): siRNA sense strand
cgucuuggacaaaggagaa

SEQ ID NO: 2290528 - RNA, 19 nt, Homo sapiens
  misc_RNA (1)...(19): siRNA sense strand
agcugaaggugcugaagaa

SEQ ID NO: 2290529 - RNA, 19 nt, Homo sapiens
  misc_RNA (1)...(19): siRNA sense strand
gggacuacaugaaggccau

SEQ ID NO: 2290530 - RNA, 19 nt, Homo sapiens
  misc_RNA (1)...(19): siRNA sense strand
aggacaaggugcuggccau

SEQ ID NO: 2290531 - RNA, 19 nt, Homo sapiens
  misc_RNA (1)...(19): siRNA sense strand
gaagcaaagcaaauggaga

SEQ ID NO: 2290532 - RNA, 19 nt, Homo sapiens
  misc_RNA (1)...(19): siRNA sense strand
guaaagaacuggaagaagg

SEQ ID NO: 2290533 - RNA, 19 nt, Homo sapiens
  misc_RNA (1)...(19): siRNA sense strand
ugcagaaagcugaggccaa

SEQ ID NO: 2290534 - RNA, 19 nt, Homo sapiens
  misc_RNA (1)...(19): siRNA sense strand
ggaagcugauggaggcuga

SEQ ID NO: 2290535 - RNA, 19 nt, Homo sapiens
  misc_RNA (1)...(19): siRNA sense strand
ugguaaagaacuggaagaa

SEQ ID NO: 2290536 - RNA, 19 nt, Homo sapiens
  misc_RNA (1)...(19): siRNA sense strand
cggaacaagucgugccugu

SEQ ID NO: 2290537 - RNA, 19 nt, Homo sapiens
  misc_RNA (1)...(19): siRNA sense strand
gagaauggcaugcugguga

SEQ ID NO: 2290538 - RNA, 19 nt, Homo sapiens
  misc_RNA (1)...(19): siRNA sense strand
acgagaaccagaaggccua

SEQ ID NO: 2290539 - RNA, 19 nt, Homo sapiens
  misc_RNA (1)...(19): siRNA sense strand
ggaacuacugccugcgcua

SEQ ID NO: 2290540 - RNA, 19 nt, Homo sapiens
  misc_RNA (1)...(19): siRNA sense strand
acaugaagagcaaagacaa

SEQ ID NO: 2290541 - RNA, 19 nt, Homo sapiens
  misc_RNA (1)...(19): siRNA sense strand
gagcaaagacaaucggauc

SEQ ID NO: 2290542 - RNA, 19 nt, Homo sapiens
  misc_RNA (1)...(19): siRNA sense strand
agggaaggaagcaaagcaa

SEQ ID NO: 2290543 - RNA, 19 nt, Homo sapiens
  misc_RNA (1)...(19): siRNA sense strand
ggcuggagugugugggcaa

SEQ ID NO: 2290544 - RNA, 19 nt, Homo sapiens
  misc_RNA (1)...(19): siRNA sense strand
gggcauuucacaagggauc

SEQ ID NO: 2290545 - RNA, 19 nt, Homo sapiens
  misc_RNA (1)...(19): siRNA sense strand
agaccaugaaugugcagaa

SEQ ID NO: 2290546 - RNA, 19 nt, Homo sapiens
  misc_RNA (1)...(19): siRNA sense strand
aagaacuggaagaaggaau

SEQ ID NO: 2290547 - RNA, 19 nt, Homo sapiens
  misc_RNA (1)...(19): siRNA sense strand
acgaaauucucaaugggau

SEQ ID NO: 2290548 - RNA, 19 nt, Homo sapiens
  misc_RNA (1)...(19): siRNA sense strand
uggacaaaguggaggggca

SEQ ID NO: 2290549 - RNA, 19 nt, Homo sapiens
  misc_RNA (1)...(19): siRNA sense strand
gcggugaucuccaggcaca

SEQ ID NO: 2290550 - RNA, 19 nt, Homo sapiens
  misc_RNA (1)...(19): siRNA sense strand
ucaccaauucagccagaaa

SEQ ID NO: 2290551 - RNA, 19 nt, Homo sapiens
  misc_RNA (1)...(19): siRNA sense strand
cgaaauucucaaugggauc

SEQ ID NO: 2290552 - RNA, 19 nt, Homo sapiens
  misc_RNA (1)...(19): siRNA sense strand
ccacaacagcaccgcagaa

SEQ ID NO: 2290553 - RNA, 19 nt, Homo sapiens
  misc_RNA (1)...(19): siRNA sense strand
uggcccacaugaagagcaa

SEQ ID NO: 2290554 - RNA, 19 nt, Homo sapiens
  misc_RNA (1)...(19): siRNA sense strand
ucgaggagcaggagcgcuu

SEQ ID NO: 2290555 - RNA, 19 nt, Homo sapiens
  misc_RNA (1)...(19): siRNA sense strand
ccuacuuccucaugagcuu

SEQ ID NO: 2290556 - RNA, 19 nt, Homo sapiens
  misc_RNA (1)...(19): siRNA sense strand
cgucaugaguggcggcaag

SEQ ID NO: 2290557 - RNA, 19 nt, Homo sapiens
  misc_RNA (1)...(19): siRNA sense strand
agcaggaugcagaggagaa

SEQ ID NO: 2290558 - RNA, 19 nt, Homo sapiens
  misc_RNA (1)...(19): siRNA sense strand
guccagggaaggaagcaaa

SEQ ID NO: 2290559 - RNA, 19 nt, Homo sapiens
  misc_RNA (1)...(19): siRNA sense strand
caaugggaucaaagugcua

SEQ ID NO: 2290560 - RNA, 19 nt, Homo sapiens
  misc_RNA (1)...(19): siRNA sense strand
aagcugaggccaagaagga

SEQ ID NO: 2290561 - RNA, 19 nt, Homo sapiens
  misc_RNA (1)...(19): siRNA sense strand
gcuucauccaccagaguga

SEQ ID NO: 2290562 - RNA, 19 nt, Homo sapiens
  misc_RNA (1)...(19): siRNA sense strand
ugaagguggacgagaacca

SEQ ID NO: 2290563 - RNA, 19 nt, Homo sapiens
  misc_RNA (1)...(19): siRNA sense strand
guggagaggcucaaggagu

SEQ ID NO: 2290564 - RNA, 19 nt, Homo sapiens
  misc_RNA (1)...(19): siRNA sense strand
ccaagaaggaggagaccug

SEQ ID NO: 2290565 - RNA, 19 nt, Homo sapiens
  misc_RNA (1)...(19): siRNA sense strand
cucaaggaguauucagaga

SEQ ID NO: 2290566 - RNA, 19 nt, Homo sapiens
  misc_RNA (1)...(19): siRNA sense strand
uggaagaaggaaugcgcca

SEQ ID NO: 2290567 - RNA, 19 nt, Homo sapiens
  misc_RNA (1)...(19): siRNA sense strand
ggaagaaggaaugcgccaa

SEQ ID NO: 2290568 - RNA, 19 nt, Homo sapiens
  misc_RNA (1)...(19): siRNA sense strand
aaggaaugcgccaagacua

SEQ ID NO: 2290569 - RNA, 19 nt, Homo sapiens
  misc_RNA (1)...(19): siRNA sense strand
ggaagcagccggugaaggu

SEQ ID NO: 2290570 - RNA, 19 nt, Homo sapiens
  misc_RNA (1)...(19): siRNA sense strand
aggucaagcuuuccgugua

SEQ ID NO: 2290571 - RNA, 19 nt, Homo sapiens
  misc_RNA (1)...(19): siRNA sense strand
caaaauuaugacagccuua

SEQ ID NO: 2290572 - RNA, 19 nt, Homo sapiens
  misc_RNA (1)...(19): siRNA sense strand
gagcuggcauucaaggaca

SEQ ID NO: 2290573 - RNA, 19 nt, Homo sapiens
  misc_RNA (1)...(19): siRNA sense strand
cugccgaaggagagaucau

SEQ ID NO: 2290574 - RNA, 19 nt, Homo sapiens
  misc_RNA (1)...(19): siRNA sense strand
gcacagagcaggagcagga

SEQ ID NO: 2290575 - RNA, 19 nt, Homo sapiens
  misc_RNA (1)...(19): siRNA sense strand
gggugaucgucuuggacaa

SEQ ID NO: 2290576 - RNA, 19 nt, Homo sapiens
  misc_RNA (1)...(19): siRNA sense strand
gcucagagguucauggacu

SEQ ID NO: 2290577 - RNA, 19 nt, Homo sapiens
  misc_RNA (1)...(19): siRNA sense strand
caugaagagcaaagacaau

SEQ ID NO: 2290578 - RNA, 19 nt, Homo sapiens
  misc_RNA (1)...(19): siRNA sense strand
gaggagaccuggaagcuga

SEQ ID NO: 2290579 - RNA, 19 nt, Homo sapiens
  misc_RNA (1)...(19): siRNA sense strand
cgucuuggacaaaggagaa

SEQ ID NO: 2290580 - RNA, 19 nt, Homo sapiens
  misc_RNA (1)...(19): siRNA sense strand
agcugaaggugcugaagaa

SEQ ID NO: 2290581 - RNA, 19 nt, Homo sapiens
  misc_RNA (1)...(19): siRNA sense strand
gggacuacaugaaggccau

SEQ ID NO: 2290582 - RNA, 19 nt, Homo sapiens
  misc_RNA (1)...(19): siRNA sense strand
aggacaaggugcuggccau

SEQ ID NO: 2290583 - RNA, 19 nt, Homo sapiens
  misc_RNA (1)...(19): siRNA sense strand
gaagcaaagcaaauggaga

SEQ ID NO: 2290584 - RNA, 19 nt, Homo sapiens
  misc_RNA (1)...(19): siRNA sense strand
guaaagaacuggaagaagg

SEQ ID NO: 2290585 - RNA, 19 nt, Homo sapiens
  misc_RNA (1)...(19): siRNA sense strand
ugcagaaagcugaggccaa

SEQ ID NO: 2290586 - RNA, 19 nt, Homo sapiens
  misc_RNA (1)...(19): siRNA sense strand
ggaagcugauggaggcuga

SEQ ID NO: 2290587 - RNA, 19 nt, Homo sapiens
  misc_RNA (1)...(19): siRNA sense strand
ugguaaagaacuggaagaa

SEQ ID NO: 2290588 - RNA, 19 nt, Homo sapiens
  misc_RNA (1)...(19): siRNA sense strand
cggaacaagucgugccugu

SEQ ID NO: 2290589 - RNA, 19 nt, Homo sapiens
  misc_RNA (1)...(19): siRNA sense strand
gagaauggcaugcugguga

SEQ ID NO: 2290590 - RNA, 19 nt, Homo sapiens
  misc_RNA (1)...(19): siRNA sense strand
acgagaaccagaaggccua

SEQ ID NO: 2290591 - RNA, 19 nt, Homo sapiens
  misc_RNA (1)...(19): siRNA sense strand
ggaacuacugccugcgcua

SEQ ID NO: 2290592 - RNA, 19 nt, Homo sapiens
  misc_RNA (1)...(19): siRNA sense strand
acaugaagagcaaagacaa

SEQ ID NO: 2290593 - RNA, 19 nt, Homo sapiens
  misc_RNA (1)...(19): siRNA sense strand
gagcaaagacaaucggauc

SEQ ID NO: 2290594 - RNA, 19 nt, Homo sapiens
  misc_RNA (1)...(19): siRNA sense strand
agggaaggaagcaaagcaa

SEQ ID NO: 2290595 - RNA, 19 nt, Homo sapiens
  misc_RNA (1)...(19): siRNA sense strand
ggcuggagugugugggcaa

SEQ ID NO: 2290596 - RNA, 19 nt, Homo sapiens
  misc_RNA (1)...(19): siRNA sense strand
gggcauuucacaagggauc

SEQ ID NO: 2290597 - RNA, 19 nt, Homo sapiens
  misc_RNA (1)...(19): siRNA sense strand
agaccaugaaugugcagaa

SEQ ID NO: 2290598 - RNA, 19 nt, Homo sapiens
  misc_RNA (1)...(19): siRNA sense strand
aagaacuggaagaaggaau

SEQ ID NO: 2290599 - RNA, 19 nt, Homo sapiens
  misc_RNA (1)...(19): siRNA sense strand
acgaaauucucaaugggau

SEQ ID NO: 2290600 - RNA, 19 nt, Homo sapiens
  misc_RNA (1)...(19): siRNA sense strand
uggacaaaguggaggggca

SEQ ID NO: 2290601 - RNA, 19 nt, Homo sapiens
  misc_RNA (1)...(19): siRNA sense strand
gcggugaucuccaggcaca

SEQ ID NO: 2290602 - RNA, 19 nt, Homo sapiens
  misc_RNA (1)...(19): siRNA sense strand
ucaccaauucagccagaaa

SEQ ID NO: 2290603 - RNA, 19 nt, Homo sapiens
  misc_RNA (1)...(19): siRNA sense strand
cgaaauucucaaugggauc

SEQ ID NO: 2290604 - RNA, 19 nt, Homo sapiens
  misc_RNA (1)...(19): siRNA sense strand
ccacaacagcaccgcagaa

SEQ ID NO: 2290605 - RNA, 19 nt, Homo sapiens
  misc_RNA (1)...(19): siRNA sense strand
uggcccacaugaagagcaa

SEQ ID NO: 2290606 - RNA, 19 nt, Homo sapiens
  misc_RNA (1)...(19): siRNA sense strand
ucgaggagcaggagcgcuu

SEQ ID NO: 2290607 - RNA, 19 nt, Homo sapiens
  misc_RNA (1)...(19): siRNA sense strand
ccuacuuccucaugagcuu

SEQ ID NO: 2290608 - RNA, 19 nt, Homo sapiens
  misc_RNA (1)...(19): siRNA sense strand
cgucaugaguggcggcaag

SEQ ID NO: 2290609 - RNA, 19 nt, Homo sapiens
  misc_RNA (1)...(19): siRNA sense strand
agcaggaugcagaggagaa

SEQ ID NO: 2290610 - RNA, 19 nt, Homo sapiens
  misc_RNA (1)...(19): siRNA sense strand
guccagggaaggaagcaaa

SEQ ID NO: 2290611 - RNA, 19 nt, Homo sapiens
  misc_RNA (1)...(19): siRNA sense strand
caaugggaucaaagugcua

SEQ ID NO: 2290612 - RNA, 19 nt, Homo sapiens
  misc_RNA (1)...(19): siRNA sense strand
aagcugaggccaagaagga

SEQ ID NO: 2290613 - RNA, 19 nt, Homo sapiens
  misc_RNA (1)...(19): siRNA sense strand
gcuucauccaccagaguga

SEQ ID NO: 2290614 - RNA, 19 nt, Homo sapiens
  misc_RNA (1)...(19): siRNA sense strand
ugaagguggacgagaacca

SEQ ID NO: 2290615 - RNA, 19 nt, Homo sapiens
  misc_RNA (1)...(19): siRNA sense strand
guggagaggcucaaggagu

SEQ ID NO: 2290616 - RNA, 19 nt, Homo sapiens
  misc_RNA (1)...(19): siRNA sense strand
ccaagaaggaggagaccug

SEQ ID NO: 2290617 - RNA, 19 nt, Homo sapiens
  misc_RNA (1)...(19): siRNA sense strand
cucaaggaguauucagaga

SEQ ID NO: 2290618 - RNA, 19 nt, Homo sapiens
  misc_RNA (1)...(19): siRNA sense strand
uggaagaaggaaugcgcca

SEQ ID NO: 2290619 - RNA, 19 nt, Homo sapiens
  misc_RNA (1)...(19): siRNA sense strand
ggaagaaggaaugcgccaa

SEQ ID NO: 2290620 - RNA, 19 nt, Homo sapiens
  misc_RNA (1)...(19): siRNA sense strand
aaggaaugcgccaagacua

SEQ ID NO: 2290621 - RNA, 19 nt, Homo sapiens
  misc_RNA (1)...(19): siRNA sense strand
ggaagcagccggugaaggu

SEQ ID NO: 2290622 - RNA, 19 nt, Homo sapiens
  misc_RNA (1)...(19): siRNA sense strand
aggucaagcuuuccgugua

SEQ ID NO: 2290623 - RNA, 19 nt, Homo sapiens
  misc_RNA (1)...(19): siRNA sense strand
caaaauuaugacagccuua

SEQ ID NO: 2290624 - RNA, 19 nt, Homo sapiens
  misc_RNA (1)...(19): siRNA sense strand
gagcuggcauucaaggaca

SEQ ID NO: 2290625 - RNA, 19 nt, Homo sapiens
  misc_RNA (1)...(19): siRNA sense strand
cugccgaaggagagaucau

SEQ ID NO: 2290626 - RNA, 19 nt, Homo sapiens
  misc_RNA (1)...(19): siRNA sense strand
gcacagagcaggagcagga

SEQ ID NO: 2290627 - RNA, 19 nt, Homo sapiens
  misc_RNA (1)...(19): siRNA sense strand
gggugaucgucuuggacaa

SEQ ID NO: 2290628 - RNA, 19 nt, Homo sapiens
  misc_RNA (1)...(19): siRNA sense strand
gcucagagguucauggacu

SEQ ID NO: 2290629 - RNA, 19 nt, Homo sapiens
  misc_RNA (1)...(19): siRNA sense strand
caugaagagcaaagacaau

SEQ ID NO: 2290630 - RNA, 19 nt, Homo sapiens
  misc_RNA (1)...(19): siRNA sense strand
gaggagaccuggaagcuga

SEQ ID NO: 2290631 - RNA, 19 nt, Homo sapiens
  misc_RNA (1)...(19): siRNA sense strand
cgucuuggacaaaggagaa

SEQ ID NO: 2290632 - RNA, 19 nt, Homo sapiens
  misc_RNA (1)...(19): siRNA sense strand
agcugaaggugcugaagaa

SEQ ID NO: 2290633 - RNA, 19 nt, Homo sapiens
  misc_RNA (1)...(19): siRNA sense strand
gggacuacaugaaggccau

SEQ ID NO: 2290634 - RNA, 19 nt, Homo sapiens
  misc_RNA (1)...(19): siRNA sense strand
aggacaaggugcuggccau

SEQ ID NO: 2290635 - RNA, 19 nt, Homo sapiens
  misc_RNA (1)...(19): siRNA sense strand
gaagcaaagcaaauggaga

SEQ ID NO: 2290636 - RNA, 19 nt, Homo sapiens
  misc_RNA (1)...(19): siRNA sense strand
guaaagaacuggaagaagg

SEQ ID NO: 2290637 - RNA, 19 nt, Homo sapiens
  misc_RNA (1)...(19): siRNA sense strand
ugcagaaagcugaggccaa

SEQ ID NO: 2290638 - RNA, 19 nt, Homo sapiens
  misc_RNA (1)...(19): siRNA sense strand
ggaagcugauggaggcuga

SEQ ID NO: 2290639 - RNA, 19 nt, Homo sapiens
  misc_RNA (1)...(19): siRNA sense strand
ugguaaagaacuggaagaa

SEQ ID NO: 2290640 - RNA, 19 nt, Homo sapiens
  misc_RNA (1)...(19): siRNA sense strand
cggaacaagucgugccugu

SEQ ID NO: 2290641 - RNA, 19 nt, Homo sapiens
  misc_RNA (1)...(19): siRNA sense strand
gagaauggcaugcugguga

SEQ ID NO: 2290642 - RNA, 19 nt, Homo sapiens
  misc_RNA (1)...(19): siRNA sense strand
acgagaaccagaaggccua

SEQ ID NO: 2290643 - RNA, 19 nt, Homo sapiens
  misc_RNA (1)...(19): siRNA sense strand
ggaacuacugccugcgcua

SEQ ID NO: 2290644 - RNA, 19 nt, Homo sapiens
  misc_RNA (1)...(19): siRNA sense strand
acaugaagagcaaagacaa

SEQ ID NO: 2290645 - RNA, 19 nt, Homo sapiens
  misc_RNA (1)...(19): siRNA sense strand
gagcaaagacaaucggauc

SEQ ID NO: 2290646 - RNA, 19 nt, Homo sapiens
  misc_RNA (1)...(19): siRNA sense strand
agggaaggaagcaaagcaa

SEQ ID NO: 2290647 - RNA, 19 nt, Homo sapiens
  misc_RNA (1)...(19): siRNA sense strand
ggcuggagugugugggcaa

SEQ ID NO: 2290648 - RNA, 19 nt, Homo sapiens
  misc_RNA (1)...(19): siRNA sense strand
gggcauuucacaagggauc

SEQ ID NO: 2290649 - RNA, 19 nt, Homo sapiens
  misc_RNA (1)...(19): siRNA sense strand
agaccaugaaugugcagaa

SEQ ID NO: 2290650 - RNA, 19 nt, Homo sapiens
  misc_RNA (1)...(19): siRNA sense strand
aagaacuggaagaaggaau

SEQ ID NO: 2290651 - RNA, 19 nt, Homo sapiens
  misc_RNA (1)...(19): siRNA sense strand
acgaaauucucaaugggau

SEQ ID NO: 2290652 - RNA, 19 nt, Homo sapiens
  misc_RNA (1)...(19): siRNA sense strand
uggacaaaguggaggggca

SEQ ID NO: 2290653 - RNA, 19 nt, Homo sapiens
  misc_RNA (1)...(19): siRNA sense strand
gcggugaucuccaggcaca

SEQ ID NO: 2290654 - RNA, 19 nt, Homo sapiens
  misc_RNA (1)...(19): siRNA sense strand
ucaccaauucagccagaaa

SEQ ID NO: 2290655 - RNA, 19 nt, Homo sapiens
  misc_RNA (1)...(19): siRNA sense strand
cgaaauucucaaugggauc

SEQ ID NO: 2290656 - RNA, 19 nt, Homo sapiens
  misc_RNA (1)...(19): siRNA sense strand
ccacaacagcaccgcagaa

SEQ ID NO: 2290657 - RNA, 19 nt, Homo sapiens
  misc_RNA (1)...(19): siRNA sense strand
uggcccacaugaagagcaa

SEQ ID NO: 2290658 - RNA, 19 nt, Homo sapiens
  misc_RNA (1)...(19): siRNA sense strand
ucgaggagcaggagcgcuu

SEQ ID NO: 2290659 - RNA, 19 nt, Homo sapiens
  misc_RNA (1)...(19): siRNA sense strand
ccuacuuccucaugagcuu

SEQ ID NO: 2290660 - RNA, 19 nt, Homo sapiens
  misc_RNA (1)...(19): siRNA sense strand
cgucaugaguggcggcaag

SEQ ID NO: 2290661 - RNA, 19 nt, Homo sapiens
  misc_RNA (1)...(19): siRNA sense strand
agcaggaugcagaggagaa

SEQ ID NO: 2290662 - RNA, 19 nt, Homo sapiens
  misc_RNA (1)...(19): siRNA sense strand
guccagggaaggaagcaaa

SEQ ID NO: 2290663 - RNA, 19 nt, Homo sapiens
  misc_RNA (1)...(19): siRNA sense strand
caaugggaucaaagugcua

SEQ ID NO: 2290664 - RNA, 19 nt, Homo sapiens
  misc_RNA (1)...(19): siRNA sense strand
aagcugaggccaagaagga

SEQ ID NO: 2290665 - RNA, 19 nt, Homo sapiens
  misc_RNA (1)...(19): siRNA sense strand
gcuucauccaccagaguga

SEQ ID NO: 2290666 - RNA, 19 nt, Homo sapiens
  misc_RNA (1)...(19): siRNA sense strand
ugaagguggacgagaacca

SEQ ID NO: 2290667 - RNA, 19 nt, Homo sapiens
  misc_RNA (1)...(19): siRNA sense strand
guggagaggcucaaggagu

SEQ ID NO: 2290668 - RNA, 19 nt, Homo sapiens
  misc_RNA (1)...(19): siRNA sense strand
ccaagaaggaggagaccug

SEQ ID NO: 2290669 - RNA, 19 nt, Homo sapiens
  misc_RNA (1)...(19): siRNA sense strand
cucaaggaguauucagaga

SEQ ID NO: 2290670 - RNA, 19 nt, Homo sapiens
  misc_RNA (1)...(19): siRNA sense strand
uggaagaaggaaugcgcca

SEQ ID NO: 2290671 - RNA, 19 nt, Homo sapiens
  misc_RNA (1)...(19): siRNA sense strand
ggaagaaggaaugcgccaa

SEQ ID NO: 2290672 - RNA, 19 nt, Homo sapiens
  misc_RNA (1)...(19): siRNA sense strand
aaggaaugcgccaagacua

SEQ ID NO: 2290673 - RNA, 19 nt, Homo sapiens
  misc_RNA (1)...(19): siRNA sense strand
ggaagcagccggugaaggu

SEQ ID NO: 2290674 - RNA, 19 nt, Homo sapiens
  misc_RNA (1)...(19): siRNA sense strand
aggucaagcuuuccgugua

SEQ ID NO: 2290675 - RNA, 19 nt, Homo sapiens
  misc_RNA (1)...(19): siRNA sense strand
caaaauuaugacagccuua

SEQ ID NO: 2290676 - RNA, 19 nt, Homo sapiens
  misc_RNA (1)...(19): siRNA sense strand
gagcuggcauucaaggaca

SEQ ID NO: 2290677 - RNA, 19 nt, Homo sapiens
  misc_RNA (1)...(19): siRNA sense strand
cugccgaaggagagaucau

SEQ ID NO: 2290678 - RNA, 19 nt, Homo sapiens
  misc_RNA (1)...(19): siRNA sense strand
gcacagagcaggagcagga

SEQ ID NO: 2290679 - RNA, 19 nt, Homo sapiens
  misc_RNA (1)...(19): siRNA sense strand
gggugaucgucuuggacaa

SEQ ID NO: 2290680 - RNA, 19 nt, Homo sapiens
  misc_RNA (1)...(19): siRNA sense strand
gcucagagguucauggacu

SEQ ID NO: 2290681 - RNA, 19 nt, Homo sapiens
  misc_RNA (1)...(19): siRNA sense strand
caugaagagcaaagacaau

SEQ ID NO: 2290682 - RNA, 19 nt, Homo sapiens
  misc_RNA (1)...(19): siRNA sense strand
gaggagaccuggaagcuga

SEQ ID NO: 2290683 - RNA, 19 nt, Homo sapiens
  misc_RNA (1)...(19): siRNA sense strand
cgucuuggacaaaggagaa

SEQ ID NO: 2290684 - RNA, 19 nt, Homo sapiens
  misc_RNA (1)...(19): siRNA sense strand
agcugaaggugcugaagaa

SEQ ID NO: 2290685 - RNA, 19 nt, Homo sapiens
  misc_RNA (1)...(19): siRNA sense strand
gggacuacaugaaggccau

SEQ ID NO: 2290686 - RNA, 19 nt, Homo sapiens
  misc_RNA (1)...(19): siRNA sense strand
aggacaaggugcuggccau

SEQ ID NO: 2290687 - RNA, 19 nt, Homo sapiens
  misc_RNA (1)...(19): siRNA sense strand
gaagcaaagcaaauggaga

SEQ ID NO: 2290688 - RNA, 19 nt, Homo sapiens
  misc_RNA (1)...(19): siRNA sense strand
guaaagaacuggaagaagg

SEQ ID NO: 2290689 - RNA, 19 nt, Homo sapiens
  misc_RNA (1)...(19): siRNA sense strand
ugcagaaagcugaggccaa

SEQ ID NO: 2290690 - RNA, 19 nt, Homo sapiens
  misc_RNA (1)...(19): siRNA sense strand
ggaagcugauggaggcuga

SEQ ID NO: 2290691 - RNA, 19 nt, Homo sapiens
  misc_RNA (1)...(19): siRNA sense strand
ugguaaagaacuggaagaa

SEQ ID NO: 2290692 - RNA, 19 nt, Homo sapiens
  misc_RNA (1)...(19): siRNA sense strand
cggaacaagucgugccugu

SEQ ID NO: 2290693 - RNA, 19 nt, Homo sapiens
  misc_RNA (1)...(19): siRNA sense strand
gagaauggcaugcugguga

SEQ ID NO: 2290694 - RNA, 19 nt, Homo sapiens
  misc_RNA (1)...(19): siRNA sense strand
acgagaaccagaaggccua

SEQ ID NO: 2290695 - RNA, 19 nt, Homo sapiens
  misc_RNA (1)...(19): siRNA sense strand
ggaacuacugccugcgcua

SEQ ID NO: 2290696 - RNA, 19 nt, Homo sapiens
  misc_RNA (1)...(19): siRNA sense strand
acaugaagagcaaagacaa

SEQ ID NO: 2290697 - RNA, 19 nt, Homo sapiens
  misc_RNA (1)...(19): siRNA sense strand
gagcaaagacaaucggauc

SEQ ID NO: 2290698 - RNA, 19 nt, Homo sapiens
  misc_RNA (1)...(19): siRNA sense strand
agggaaggaagcaaagcaa

SEQ ID NO: 2290699 - RNA, 19 nt, Homo sapiens
  misc_RNA (1)...(19): siRNA sense strand
ggcuggagugugugggcaa

SEQ ID NO: 2290700 - RNA, 19 nt, Homo sapiens
  misc_RNA (1)...(19): siRNA sense strand
gggcauuucacaagggauc

SEQ ID NO: 2290701 - RNA, 19 nt, Homo sapiens
  misc_RNA (1)...(19): siRNA sense strand
agaccaugaaugugcagaa

SEQ ID NO: 2290702 - RNA, 19 nt, Homo sapiens
  misc_RNA (1)...(19): siRNA sense strand
aagaacuggaagaaggaau

SEQ ID NO: 2290703 - RNA, 19 nt, Homo sapiens
  misc_RNA (1)...(19): siRNA sense strand
acgaaauucucaaugggau

SEQ ID NO: 2290704 - RNA, 19 nt, Homo sapiens
  misc_RNA (1)...(19): siRNA sense strand
uggacaaaguggaggggca

SEQ ID NO: 2290705 - RNA, 19 nt, Homo sapiens
  misc_RNA (1)...(19): siRNA sense strand
gcggugaucuccaggcaca

SEQ ID NO: 2290706 - RNA, 19 nt, Homo sapiens
  misc_RNA (1)...(19): siRNA sense strand
ucaccaauucagccagaaa

SEQ ID NO: 2290707 - RNA, 19 nt, Homo sapiens
  misc_RNA (1)...(19): siRNA sense strand
cgaaauucucaaugggauc

SEQ ID NO: 2290708 - RNA, 19 nt, Homo sapiens
  misc_RNA (1)...(19): siRNA sense strand
ccacaacagcaccgcagaa

SEQ ID NO: 2290709 - RNA, 19 nt, Homo sapiens
  misc_RNA (1)...(19): siRNA sense strand
uggcccacaugaagagcaa

SEQ ID NO: 2290710 - RNA, 19 nt, Homo sapiens
  misc_RNA (1)...(19): siRNA sense strand
ucgaggagcaggagcgcuu

SEQ ID NO: 2290711 - RNA, 19 nt, Homo sapiens
  misc_RNA (1)...(19): siRNA sense strand
ccuacuuccucaugagcuu

SEQ ID NO: 2290712 - RNA, 19 nt, Homo sapiens
  misc_RNA (1)...(19): siRNA sense strand
cgucaugaguggcggcaag

SEQ ID NO: 2290713 - RNA, 19 nt, Homo sapiens
  misc_RNA (1)...(19): siRNA sense strand
agcaggaugcagaggagaa

SEQ ID NO: 2290714 - RNA, 19 nt, Homo sapiens
  misc_RNA (1)...(19): siRNA sense strand
guccagggaaggaagcaaa

SEQ ID NO: 2290715 - RNA, 19 nt, Homo sapiens
  misc_RNA (1)...(19): siRNA sense strand
caaugggaucaaagugcua

SEQ ID NO: 2290716 - RNA, 19 nt, Homo sapiens
  misc_RNA (1)...(19): siRNA sense strand
aagcugaggccaagaagga

SEQ ID NO: 2290717 - RNA, 19 nt, Homo sapiens
  misc_RNA (1)...(19): siRNA sense strand
gcuucauccaccagaguga

SEQ ID NO: 2290718 - RNA, 19 nt, Homo sapiens
  misc_RNA (1)...(19): siRNA sense strand
ugaagguggacgagaacca

SEQ ID NO: 2290719 - RNA, 19 nt, Homo sapiens
  misc_RNA (1)...(19): siRNA sense strand
guggagaggcucaaggagu

SEQ ID NO: 2290720 - RNA, 19 nt, Homo sapiens
  misc_RNA (1)...(19): siRNA sense strand
ccaagaaggaggagaccug

SEQ ID NO: 2290721 - RNA, 19 nt, Homo sapiens
  misc_RNA (1)...(19): siRNA sense strand
cucaaggaguauucagaga

SEQ ID NO: 2290722 - RNA, 19 nt, Homo sapiens
  misc_RNA (1)...(19): siRNA sense strand
uggaagaaggaaugcgcca

SEQ ID NO: 2290723 - RNA, 19 nt, Homo sapiens
  misc_RNA (1)...(19): siRNA sense strand
ggaagaaggaaugcgccaa

SEQ ID NO: 2290724 - RNA, 19 nt, Homo sapiens
  misc_RNA (1)...(19): siRNA sense strand
aaggaaugcgccaagacua

SEQ ID NO: 2290725 - RNA, 19 nt, Homo sapiens
  misc_RNA (1)...(19): siRNA sense strand
ggaagcagccggugaaggu

SEQ ID NO: 2290726 - RNA, 19 nt, Homo sapiens
  misc_RNA (1)...(19): siRNA sense strand
aggucaagcuuuccgugua

SEQ ID NO: 2290727 - RNA, 19 nt, Homo sapiens
  misc_RNA (1)...(19): siRNA sense strand
caaaauuaugacagccuua

SEQ ID NO: 2290728 - RNA, 19 nt, Homo sapiens
  misc_RNA (1)...(19): siRNA sense strand
gagcuggcauucaaggaca

SEQ ID NO: 2290729 - RNA, 19 nt, Homo sapiens
  misc_RNA (1)...(19): siRNA sense strand
cugccgaaggagagaucau

SEQ ID NO: 2290730 - RNA, 19 nt, Homo sapiens
  misc_RNA (1)...(19): siRNA sense strand
gcacagagcaggagcagga

SEQ ID NO: 2290731 - RNA, 19 nt, Homo sapiens
  misc_RNA (1)...(19): siRNA sense strand
gggugaucgucuuggacaa

SEQ ID NO: 2290732 - RNA, 19 nt, Homo sapiens
  misc_RNA (1)...(19): siRNA sense strand
gcucagagguucauggacu

SEQ ID NO: 2290733 - RNA, 19 nt, Homo sapiens
  misc_RNA (1)...(19): siRNA sense strand
caugaagagcaaagacaau

SEQ ID NO: 2290734 - RNA, 19 nt, Homo sapiens
  misc_RNA (1)...(19): siRNA sense strand
gaggagaccuggaagcuga

SEQ ID NO: 2290735 - RNA, 19 nt, Homo sapiens
  misc_RNA (1)...(19): siRNA sense strand
cgucuuggacaaaggagaa

SEQ ID NO: 2290736 - RNA, 19 nt, Homo sapiens
  misc_RNA (1)...(19): siRNA sense strand
agcugaaggugcugaagaa

SEQ ID NO: 2290737 - RNA, 19 nt, Homo sapiens
  misc_RNA (1)...(19): siRNA sense strand
gggacuacaugaaggccau

SEQ ID NO: 2290738 - RNA, 19 nt, Homo sapiens
  misc_RNA (1)...(19): siRNA sense strand
aggacaaggugcuggccau

SEQ ID NO: 2290739 - RNA, 19 nt, Homo sapiens
  misc_RNA (1)...(19): siRNA sense strand
gaagcaaagcaaauggaga

SEQ ID NO: 2290740 - RNA, 19 nt, Homo sapiens
  misc_RNA (1)...(19): siRNA sense strand
guaaagaacuggaagaagg

SEQ ID NO: 2290741 - RNA, 19 nt, Homo sapiens
  misc_RNA (1)...(19): siRNA sense strand
ugcagaaagcugaggccaa

SEQ ID NO: 2290742 - RNA, 19 nt, Homo sapiens
  misc_RNA (1)...(19): siRNA sense strand
ggaagcugauggaggcuga

SEQ ID NO: 2290743 - RNA, 19 nt, Homo sapiens
  misc_RNA (1)...(19): siRNA sense strand
ugguaaagaacuggaagaa

SEQ ID NO: 2290744 - RNA, 19 nt, Homo sapiens
  misc_RNA (1)...(19): siRNA sense strand
cggaacaagucgugccugu

SEQ ID NO: 2290745 - RNA, 19 nt, Homo sapiens
  misc_RNA (1)...(19): siRNA sense strand
gagaauggcaugcugguga

SEQ ID NO: 2290746 - RNA, 19 nt, Homo sapiens
  misc_RNA (1)...(19): siRNA sense strand
acgagaaccagaaggccua

SEQ ID NO: 2290747 - RNA, 19 nt, Homo sapiens
  misc_RNA (1)...(19): siRNA sense strand
ggaacuacugccugcgcua

SEQ ID NO: 2290748 - RNA, 19 nt, Homo sapiens
  misc_RNA (1)...(19): siRNA sense strand
acaugaagagcaaagacaa

SEQ ID NO: 2290749 - RNA, 19 nt, Homo sapiens
  misc_RNA (1)...(19): siRNA sense strand
gagcaaagacaaucggauc

SEQ ID NO: 2290750 - RNA, 19 nt, Homo sapiens
  misc_RNA (1)...(19): siRNA sense strand
agggaaggaagcaaagcaa

SEQ ID NO: 2290751 - RNA, 19 nt, Homo sapiens
  misc_RNA (1)...(19): siRNA sense strand
ggcuggagugugugggcaa

SEQ ID NO: 2290752 - RNA, 19 nt, Homo sapiens
  misc_RNA (1)...(19): siRNA sense strand
gggcauuucacaagggauc

SEQ ID NO: 2290753 - RNA, 19 nt, Homo sapiens
  misc_RNA (1)...(19): siRNA sense strand
agaccaugaaugugcagaa

SEQ ID NO: 2290754 - RNA, 19 nt, Homo sapiens
  misc_RNA (1)...(19): siRNA sense strand
aagaacuggaagaaggaau

SEQ ID NO: 2290755 - RNA, 19 nt, Homo sapiens
  misc_RNA (1)...(19): siRNA sense strand
acgaaauucucaaugggau

SEQ ID NO: 2290756 - RNA, 19 nt, Homo sapiens
  misc_RNA (1)...(19): siRNA sense strand
uggacaaaguggaggggca

SEQ ID NO: 2290757 - RNA, 19 nt, Homo sapiens
  misc_RNA (1)...(19): siRNA sense strand
gcggugaucuccaggcaca

SEQ ID NO: 2290758 - RNA, 19 nt, Homo sapiens
  misc_RNA (1)...(19): siRNA sense strand
ucaccaauucagccagaaa

SEQ ID NO: 2290759 - RNA, 19 nt, Homo sapiens
  misc_RNA (1)...(19): siRNA sense strand
cgaaauucucaaugggauc

SEQ ID NO: 2290760 - RNA, 19 nt, Homo sapiens
  misc_RNA (1)...(19): siRNA sense strand
ccacaacagcaccgcagaa

SEQ ID NO: 2290761 - RNA, 19 nt, Homo sapiens
  misc_RNA (1)...(19): siRNA sense strand
uggcccacaugaagagcaa

SEQ ID NO: 2290762 - RNA, 19 nt, Homo sapiens
  misc_RNA (1)...(19): siRNA sense strand
ucgaggagcaggagcgcuu

SEQ ID NO: 2290763 - RNA, 19 nt, Homo sapiens
  misc_RNA (1)...(19): siRNA sense strand
ccuacuuccucaugagcuu

SEQ ID NO: 2290764 - RNA, 19 nt, Homo sapiens
  misc_RNA (1)...(19): siRNA sense strand
cgucaugaguggcggcaag

SEQ ID NO: 2290765 - RNA, 19 nt, Homo sapiens
  misc_RNA (1)...(19): siRNA sense strand
agcaggaugcagaggagaa

SEQ ID NO: 2290766 - RNA, 19 nt, Homo sapiens
  misc_RNA (1)...(19): siRNA sense strand
guccagggaaggaagcaaa

SEQ ID NO: 2290767 - RNA, 19 nt, Homo sapiens
  misc_RNA (1)...(19): siRNA sense strand
caaugggaucaaagugcua

SEQ ID NO: 2290768 - RNA, 19 nt, Homo sapiens
  misc_RNA (1)...(19): siRNA sense strand
aagcugaggccaagaagga

SEQ ID NO: 2290769 - RNA, 19 nt, Homo sapiens
  misc_RNA (1)...(19): siRNA sense strand
gcuucauccaccagaguga

SEQ ID NO: 2290770 - RNA, 19 nt, Homo sapiens
  misc_RNA (1)...(19): siRNA sense strand
ugaagguggacgagaacca

SEQ ID NO: 2290771 - RNA, 19 nt, Homo sapiens
  misc_RNA (1)...(19): siRNA sense strand
guggagaggcucaaggagu

SEQ ID NO: 2290772 - RNA, 19 nt, Homo sapiens
  misc_RNA (1)...(19): siRNA sense strand
ccaagaaggaggagaccug

SEQ ID NO: 2290773 - RNA, 19 nt, Homo sapiens
  misc_RNA (1)...(19): siRNA sense strand
cucaaggaguauucagaga

SEQ ID NO: 2290774 - RNA, 19 nt, Homo sapiens
  misc_RNA (1)...(19): siRNA sense strand
uggaagaaggaaugcgcca

SEQ ID NO: 2290775 - RNA, 19 nt, Homo sapiens
  misc_RNA (1)...(19): siRNA sense strand
ggaagaaggaaugcgccaa

SEQ ID NO: 2290776 - RNA, 19 nt, Homo sapiens
  misc_RNA (1)...(19): siRNA sense strand
aaggaaugcgccaagacua

SEQ ID NO: 2290777 - RNA, 19 nt, Homo sapiens
  misc_RNA (1)...(19): siRNA sense strand
ggaagcagccggugaaggu

SEQ ID NO: 2290778 - RNA, 19 nt, Homo sapiens
  misc_RNA (1)...(19): siRNA sense strand
aggucaagcuuuccgugua

SEQ ID NO: 2290779 - RNA, 19 nt, Homo sapiens
  misc_RNA (1)...(19): siRNA sense strand
caaaauuaugacagccuua

SEQ ID NO: 2290780 - RNA, 19 nt, Homo sapiens
  misc_RNA (1)...(19): siRNA sense strand
gagcuggcauucaaggaca

SEQ ID NO: 2290781 - RNA, 19 nt, Homo sapiens
  misc_RNA (1)...(19): siRNA sense strand
cugccgaaggagagaucau

SEQ ID NO: 2290782 - RNA, 19 nt, Homo sapiens
  misc_RNA (1)...(19): siRNA sense strand
gcacagagcaggagcagga

SEQ ID NO: 2290783 - RNA, 19 nt, Homo sapiens
  misc_RNA (1)...(19): siRNA sense strand
gggugaucgucuuggacaa

SEQ ID NO: 2290784 - RNA, 19 nt, Homo sapiens
  misc_RNA (1)...(19): siRNA sense strand
gcucagagguucauggacu

SEQ ID NO: 2290785 - RNA, 19 nt, Homo sapiens
  misc_RNA (1)...(19): siRNA sense strand
caugaagagcaaagacaau

SEQ ID NO: 2290786 - RNA, 19 nt, Homo sapiens
  misc_RNA (1)...(19): siRNA sense strand
gaggagaccuggaagcuga

SEQ ID NO: 2290787 - RNA, 19 nt, Homo sapiens
  misc_RNA (1)...(19): siRNA sense strand
cgucuuggacaaaggagaa

SEQ ID NO: 2290788 - RNA, 19 nt, Homo sapiens
  misc_RNA (1)...(19): siRNA sense strand
agcugaaggugcugaagaa

SEQ ID NO: 2290789 - RNA, 19 nt, Homo sapiens
  misc_RNA (1)...(19): siRNA sense strand
gggacuacaugaaggccau

SEQ ID NO: 2290790 - RNA, 19 nt, Homo sapiens
  misc_RNA (1)...(19): siRNA sense strand
aggacaaggugcuggccau

SEQ ID NO: 2290791 - RNA, 19 nt, Homo sapiens
  misc_RNA (1)...(19): siRNA sense strand
gaagcaaagcaaauggaga

SEQ ID NO: 2290792 - RNA, 19 nt, Homo sapiens
  misc_RNA (1)...(19): siRNA sense strand
guaaagaacuggaagaagg

SEQ ID NO: 2290793 - RNA, 19 nt, Homo sapiens
  misc_RNA (1)...(19): siRNA sense strand
ugcagaaagcugaggccaa

SEQ ID NO: 2290794 - RNA, 19 nt, Homo sapiens
  misc_RNA (1)...(19): siRNA sense strand
ggaagcugauggaggcuga

SEQ ID NO: 2290795 - RNA, 19 nt, Homo sapiens
  misc_RNA (1)...(19): siRNA sense strand
ugguaaagaacuggaagaa

SEQ ID NO: 2290796 - RNA, 19 nt, Homo sapiens
  misc_RNA (1)...(19): siRNA sense strand
cggaacaagucgugccugu

SEQ ID NO: 2290797 - RNA, 19 nt, Homo sapiens
  misc_RNA (1)...(19): siRNA sense strand
gagaauggcaugcugguga

SEQ ID NO: 2290798 - RNA, 19 nt, Homo sapiens
  misc_RNA (1)...(19): siRNA sense strand
acgagaaccagaaggccua

SEQ ID NO: 2290799 - RNA, 19 nt, Homo sapiens
  misc_RNA (1)...(19): siRNA sense strand
ggaacuacugccugcgcua

SEQ ID NO: 2290800 - RNA, 19 nt, Homo sapiens
  misc_RNA (1)...(19): siRNA sense strand
acaugaagagcaaagacaa

SEQ ID NO: 2290801 - RNA, 19 nt, Homo sapiens
  misc_RNA (1)...(19): siRNA sense strand
gagcaaagacaaucggauc

SEQ ID NO: 2290802 - RNA, 19 nt, Homo sapiens
  misc_RNA (1)...(19): siRNA sense strand
agggaaggaagcaaagcaa

SEQ ID NO: 2290803 - RNA, 19 nt, Homo sapiens
  misc_RNA (1)...(19): siRNA sense strand
ggcuggagugugugggcaa

SEQ ID NO: 2290804 - RNA, 19 nt, Homo sapiens
  misc_RNA (1)...(19): siRNA sense strand
gggcauuucacaagggauc

SEQ ID NO: 2290805 - RNA, 19 nt, Homo sapiens
  misc_RNA (1)...(19): siRNA sense strand
agaccaugaaugugcagaa

SEQ ID NO: 2290806 - RNA, 19 nt, Homo sapiens
  misc_RNA (1)...(19): siRNA sense strand
aagaacuggaagaaggaau

SEQ ID NO: 2290807 - RNA, 19 nt, Homo sapiens
  misc_RNA (1)...(19): siRNA sense strand
acgaaauucucaaugggau

SEQ ID NO: 2290808 - RNA, 19 nt, Homo sapiens
  misc_RNA (1)...(19): siRNA sense strand
uggacaaaguggaggggca

SEQ ID NO: 2290809 - RNA, 19 nt, Homo sapiens
  misc_RNA (1)...(19): siRNA sense strand
gcggugaucuccaggcaca

SEQ ID NO: 2290810 - RNA, 19 nt, Homo sapiens
  misc_RNA (1)...(19): siRNA sense strand
ucaccaauucagccagaaa

SEQ ID NO: 2290811 - RNA, 19 nt, Homo sapiens
  misc_RNA (1)...(19): siRNA sense strand
cgaaauucucaaugggauc

SEQ ID NO: 2290812 - RNA, 19 nt, Homo sapiens
  misc_RNA (1)...(19): siRNA sense strand
ccacaacagcaccgcagaa

SEQ ID NO: 2290813 - RNA, 19 nt, Homo sapiens
  misc_RNA (1)...(19): siRNA sense strand
uggcccacaugaagagcaa

SEQ ID NO: 2290814 - RNA, 19 nt, Homo sapiens
  misc_RNA (1)...(19): siRNA sense strand
ucgaggagcaggagcgcuu

SEQ ID NO: 2290815 - RNA, 19 nt, Homo sapiens
  misc_RNA (1)...(19): siRNA sense strand
ccuacuuccucaugagcuu

SEQ ID NO: 2290816 - RNA, 19 nt, Homo sapiens
  misc_RNA (1)...(19): siRNA sense strand
cgucaugaguggcggcaag

SEQ ID NO: 2290817 - RNA, 19 nt, Homo sapiens
  misc_RNA (1)...(19): siRNA sense strand
agcaggaugcagaggagaa

SEQ ID NO: 2290818 - RNA, 19 nt, Homo sapiens
  misc_RNA (1)...(19): siRNA sense strand
guccagggaaggaagcaaa

SEQ ID NO: 2290819 - RNA, 19 nt, Homo sapiens
  misc_RNA (1)...(19): siRNA sense strand
caaugggaucaaagugcua

SEQ ID NO: 2290820 - RNA, 19 nt, Homo sapiens
  misc_RNA (1)...(19): siRNA sense strand
aagcugaggccaagaagga

SEQ ID NO: 2290821 - RNA, 19 nt, Homo sapiens
  misc_RNA (1)...(19): siRNA sense strand
gcuucauccaccagaguga

SEQ ID NO: 2290822 - RNA, 19 nt, Homo sapiens
  misc_RNA (1)...(19): siRNA sense strand
ugaagguggacgagaacca

SEQ ID NO: 2290823 - RNA, 19 nt, Homo sapiens
  misc_RNA (1)...(19): siRNA sense strand
guggagaggcucaaggagu

SEQ ID NO: 2290824 - RNA, 19 nt, Homo sapiens
  misc_RNA (1)...(19): siRNA sense strand
ccaagaaggaggagaccug

SEQ ID NO: 2290825 - RNA, 19 nt, Homo sapiens
  misc_RNA (1)...(19): siRNA sense strand
cucaaggaguauucagaga

SEQ ID NO: 2290826 - RNA, 19 nt, Homo sapiens
  misc_RNA (1)...(19): siRNA sense strand
uggaagaaggaaugcgcca

SEQ ID NO: 2290827 - RNA, 19 nt, Homo sapiens
  misc_RNA (1)...(19): siRNA sense strand
ggaagaaggaaugcgccaa

SEQ ID NO: 2290828 - RNA, 19 nt, Homo sapiens
  misc_RNA (1)...(19): siRNA sense strand
aaggaaugcgccaagacua

SEQ ID NO: 2290829 - RNA, 19 nt, Homo sapiens
  misc_RNA (1)...(19): siRNA sense strand
ggaagcagccggugaaggu

SEQ ID NO: 2290830 - RNA, 19 nt, Homo sapiens
  misc_RNA (1)...(19): siRNA sense strand
aggucaagcuuuccgugua

SEQ ID NO: 2290831 - RNA, 19 nt, Homo sapiens
  misc_RNA (1)...(19): siRNA sense strand
caaaauuaugacagccuua

SEQ ID NO: 2290832 - RNA, 19 nt, Homo sapiens
  misc_RNA (1)...(19): siRNA sense strand
gagcuggcauucaaggaca

SEQ ID NO: 2290833 - RNA, 19 nt, Homo sapiens
  misc_RNA (1)...(19): siRNA sense strand
cugccgaaggagagaucau

SEQ ID NO: 2290834 - RNA, 19 nt, Homo sapiens
  misc_RNA (1)...(19): siRNA sense strand
cggaaggcugcaagaggaa

SEQ ID NO: 2290835 - RNA, 19 nt, Homo sapiens
  misc_RNA (1)...(19): siRNA sense strand
gcucagccgcagagugcaa

SEQ ID NO: 2290836 - RNA, 19 nt, Homo sapiens
  misc_RNA (1)...(19): siRNA sense strand
gcaagcagucgcagcggaa

SEQ ID NO: 2290837 - RNA, 19 nt, Homo sapiens
  misc_RNA (1)...(19): siRNA sense strand
gcggaaggcugcaagagga

SEQ ID NO: 2290838 - RNA, 19 nt, Homo sapiens
  misc_RNA (1)...(19): siRNA sense strand
ggaacucacuugaugggau

SEQ ID NO: 2290839 - RNA, 19 nt, Homo sapiens
  misc_RNA (1)...(19): siRNA sense strand
acacagaagaagacggaaa

SEQ ID NO: 2290840 - RNA, 19 nt, Homo sapiens
  misc_RNA (1)...(19): siRNA sense strand
cggaagaaccaaagcgcaa

SEQ ID NO: 2290841 - RNA, 19 nt, Homo sapiens
  misc_RNA (1)...(19): siRNA sense strand
agaggaaggagaagagaaa

SEQ ID NO: 2290842 - RNA, 19 nt, Homo sapiens
  misc_RNA (1)...(19): siRNA sense strand
cgaccuggaaggagagaaa

SEQ ID NO: 2290843 - RNA, 19 nt, Homo sapiens
  misc_RNA (1)...(19): siRNA sense strand
cugaagaauugguugaaau

SEQ ID NO: 2290844 - RNA, 19 nt, Homo sapiens
  misc_RNA (1)...(19): siRNA sense strand
gaaagaaacagaaagggaa

SEQ ID NO: 2290845 - RNA, 19 nt, Homo sapiens
  misc_RNA (1)...(19): siRNA sense strand
uagaauugcaggaaggaaa

SEQ ID NO: 2290846 - RNA, 19 nt, Homo sapiens
  misc_RNA (1)...(19): siRNA sense strand
ggaaagaaacagaaaggga

SEQ ID NO: 2290847 - RNA, 19 nt, Homo sapiens
  misc_RNA (1)...(19): siRNA sense strand
aaagaaacagaaagggaaa

SEQ ID NO: 2290848 - RNA, 19 nt, Homo sapiens
  misc_RNA (1)...(19): siRNA sense strand
ccgaaggcguugugaguga

SEQ ID NO: 2290849 - RNA, 19 nt, Homo sapiens
  misc_RNA (1)...(19): siRNA sense strand
ggaaaaggucuuaggagaa

SEQ ID NO: 2290850 - RNA, 19 nt, Homo sapiens
  misc_RNA (1)...(19): siRNA sense strand
gcacagaagcagaggcagu

SEQ ID NO: 2290851 - RNA, 19 nt, Homo sapiens
  misc_RNA (1)...(19): siRNA sense strand
ggaggaaugcaaagaggaa

SEQ ID NO: 2290852 - RNA, 19 nt, Homo sapiens
  misc_RNA (1)...(19): siRNA sense strand
ggagaagagaaacaagaaa

SEQ ID NO: 2290853 - RNA, 19 nt, Homo sapiens
  misc_RNA (1)...(19): siRNA sense strand
cagaaguguuugaugagaa

SEQ ID NO: 2290854 - RNA, 19 nt, Homo sapiens
  misc_RNA (1)...(19): siRNA sense strand
agaaguguuugaugagaaa

SEQ ID NO: 2290855 - RNA, 19 nt, Homo sapiens
  misc_RNA (1)...(19): siRNA sense strand
gcugaagagaccacagaaa

SEQ ID NO: 2290856 - RNA, 19 nt, Homo sapiens
  misc_RNA (1)...(19): siRNA sense strand
aagacgagauuguggaaau

SEQ ID NO: 2290857 - RNA, 19 nt, Homo sapiens
  misc_RNA (1)...(19): siRNA sense strand
cugaaaugcaagaagaaau

SEQ ID NO: 2290858 - RNA, 19 nt, Homo sapiens
  misc_RNA (1)...(19): siRNA sense strand
aguaauugcagaagaagaa

SEQ ID NO: 2290859 - RNA, 19 nt, Homo sapiens
  misc_RNA (1)...(19): siRNA sense strand
ccacugagucccaggcuaa

SEQ ID NO: 2290860 - RNA, 19 nt, Homo sapiens
  misc_RNA (1)...(19): siRNA sense strand
aggaaggagaagagaaaca

SEQ ID NO: 2290861 - RNA, 19 nt, Homo sapiens
  misc_RNA (1)...(19): siRNA sense strand
gguauuggaaagagaagua

SEQ ID NO: 2290862 - RNA, 19 nt, Homo sapiens
  misc_RNA (1)...(19): siRNA sense strand
ggcuaaugauauuggauuu

SEQ ID NO: 2290863 - RNA, 19 nt, Homo sapiens
  misc_RNA (1)...(19): siRNA sense strand
gaaugaaggugcagggaag

SEQ ID NO: 2290864 - RNA, 19 nt, Homo sapiens
  misc_RNA (1)...(19): siRNA sense strand
cagaaacaagagagagaau

SEQ ID NO: 2290865 - RNA, 19 nt, Homo sapiens
  misc_RNA (1)...(19): siRNA sense strand
aggaaaaggucuuaggaga

SEQ ID NO: 2290866 - RNA, 19 nt, Homo sapiens
  misc_RNA (1)...(19): siRNA sense strand
gagaagagaaacaagaaaa

SEQ ID NO: 2290867 - RNA, 19 nt, Homo sapiens
  misc_RNA (1)...(19): siRNA sense strand
ggaagaaacagcagggucu

SEQ ID NO: 2290868 - RNA, 19 nt, Homo sapiens
  misc_RNA (1)...(19): siRNA sense strand
aggaggaguuacagaaaca

SEQ ID NO: 2290869 - RNA, 19 nt, Homo sapiens
  misc_RNA (1)...(19): siRNA sense strand
augcaaagaggaaggagaa

SEQ ID NO: 2290870 - RNA, 19 nt, Homo sapiens
  misc_RNA (1)...(19): siRNA sense strand
acucugaagaugugagcaa

SEQ ID NO: 2290871 - RNA, 19 nt, Homo sapiens
  misc_RNA (1)...(19): siRNA sense strand
aagaagagguuguggccga

SEQ ID NO: 2290872 - RNA, 19 nt, Homo sapiens
  misc_RNA (1)...(19): siRNA sense strand
gggagaaaauggaggcaca

SEQ ID NO: 2290873 - RNA, 19 nt, Homo sapiens
  misc_RNA (1)...(19): siRNA sense strand
aagagaagcuugagcacga

SEQ ID NO: 2290874 - RNA, 19 nt, Homo sapiens
  misc_RNA (1)...(19): siRNA sense strand
gaaaaggccagaugggaaa

SEQ ID NO: 2290875 - RNA, 19 nt, Homo sapiens
  misc_RNA (1)...(19): siRNA sense strand
ccgaaauaaucgaacagau

SEQ ID NO: 2290876 - RNA, 19 nt, Homo sapiens
  misc_RNA (1)...(19): siRNA sense strand
ugucaucacaggagagaau

SEQ ID NO: 2290877 - RNA, 19 nt, Homo sapiens
  misc_RNA (1)...(19): siRNA sense strand
aagaagaugagcuggacaa

SEQ ID NO: 2290878 - RNA, 19 nt, Homo sapiens
  misc_RNA (1)...(19): siRNA sense strand
aggagauggugauggaaca

SEQ ID NO: 2290879 - RNA, 19 nt, Homo sapiens
  misc_RNA (1)...(19): siRNA sense strand
aggaagaaacuaaagaaca

SEQ ID NO: 2290880 - RNA, 19 nt, Homo sapiens
  misc_RNA (1)...(19): siRNA sense strand
ccaaagaaagcgaacccaa

SEQ ID NO: 2290881 - RNA, 19 nt, Homo sapiens
  misc_RNA (1)...(19): siRNA sense strand
aggugaagggacagaagaa

SEQ ID NO: 2290882 - RNA, 19 nt, Homo sapiens
  misc_RNA (1)...(19): siRNA sense strand
ugaaagggagcguggaaga

SEQ ID NO: 2290883 - RNA, 19 nt, Homo sapiens
  misc_RNA (1)...(19): siRNA sense strand
acucuagagcauacagaua

SEQ ID NO: 2290884 - RNA, 19 nt, Homo sapiens
  misc_RNA (1)...(19): siRNA sense strand
gcaaagaggaaggagaaga

SEQ ID NO: 2290885 - RNA, 19 nt, Homo sapiens
  misc_RNA (1)...(19): siRNA sense strand
cugaggagcccgaggagau

SEQ ID NO: 2290886 - RNA, 19 nt, Homo sapiens
  misc_RNA (1)...(19): siRNA sense strand
cggaaagugauaaagaaga

SEQ ID NO: 2290887 - RNA, 19 nt, Homo sapiens
  misc_RNA (1)...(19): siRNA sense strand
ucuagagcauacagauaaa

SEQ ID NO: 2290888 - RNA, 19 nt, Homo sapiens
  misc_RNA (1)...(19): siRNA sense strand
ggucaaagugaguguagca

SEQ ID NO: 2290889 - RNA, 19 nt, Homo sapiens
  misc_RNA (1)...(19): siRNA sense strand
gaguguagcaauugaggau

SEQ ID NO: 2290890 - RNA, 19 nt, Homo sapiens
  misc_RNA (1)...(19): siRNA sense strand
cagaaagaauagagaaguc

SEQ ID NO: 2290891 - RNA, 19 nt, Homo sapiens
  misc_RNA (1)...(19): siRNA sense strand
cuggugaagcucaaagaaa

SEQ ID NO: 2290892 - RNA, 19 nt, Homo sapiens
  misc_RNA (1)...(19): siRNA sense strand
ggguaaaaucacaggagau

SEQ ID NO: 2290893 - RNA, 19 nt, Homo sapiens
  misc_RNA (1)...(19): siRNA sense strand
gacaggaaacggagaaaga

SEQ ID NO: 2290894 - RNA, 19 nt, Homo sapiens
  misc_RNA (1)...(19): siRNA sense strand
accaauuacuucagccaaa

SEQ ID NO: 2290895 - RNA, 19 nt, Homo sapiens
  misc_RNA (1)...(19): siRNA sense strand
aagcaauuuagaagagcua

SEQ ID NO: 2290896 - RNA, 19 nt, Homo sapiens
  misc_RNA (1)...(19): siRNA sense strand
ccacaggagccggcagaaa

SEQ ID NO: 2290897 - RNA, 19 nt, Homo sapiens
  misc_RNA (1)...(19): siRNA sense strand
ggaaaagugcacagugaau

SEQ ID NO: 2290898 - RNA, 19 nt, Homo sapiens
  misc_RNA (1)...(19): siRNA sense strand
gcaaaagagacuccgauaa

SEQ ID NO: 2290899 - RNA, 19 nt, Homo sapiens
  misc_RNA (1)...(19): siRNA sense strand
ggagcguggaagagccaaa

SEQ ID NO: 2290900 - RNA, 19 nt, Homo sapiens
  misc_RNA (1)...(19): siRNA sense strand
agaaaaggccagaugggaa

SEQ ID NO: 2290901 - RNA, 19 nt, Homo sapiens
  misc_RNA (1)...(19): siRNA sense strand
cagaaagaccagaagagca

SEQ ID NO: 2290902 - RNA, 19 nt, Homo sapiens
  misc_RNA (1)...(19): siRNA sense strand
cggauguaguguugaaagu

SEQ ID NO: 2290903 - RNA, 19 nt, Homo sapiens
  misc_RNA (1)...(19): siRNA sense strand
cuuguuagcagaaagaaua

SEQ ID NO: 2290904 - RNA, 19 nt, Homo sapiens
  misc_RNA (1)...(19): siRNA sense strand
acacagaagaagacggaaa

SEQ ID NO: 2290905 - RNA, 19 nt, Homo sapiens
  misc_RNA (1)...(19): siRNA sense strand
cggaagaaccaaagcgcaa

SEQ ID NO: 2290906 - RNA, 19 nt, Homo sapiens
  misc_RNA (1)...(19): siRNA sense strand
agaggaaggagaagagaaa

SEQ ID NO: 2290907 - RNA, 19 nt, Homo sapiens
  misc_RNA (1)...(19): siRNA sense strand
cgaccuggaaggagagaaa

SEQ ID NO: 2290908 - RNA, 19 nt, Homo sapiens
  misc_RNA (1)...(19): siRNA sense strand
gaaagaaacagaaagggaa

SEQ ID NO: 2290909 - RNA, 19 nt, Homo sapiens
  misc_RNA (1)...(19): siRNA sense strand
uagaauugcaggaaggaaa

SEQ ID NO: 2290910 - RNA, 19 nt, Homo sapiens
  misc_RNA (1)...(19): siRNA sense strand
ggaaagaaacagaaaggga

SEQ ID NO: 2290911 - RNA, 19 nt, Homo sapiens
  misc_RNA (1)...(19): siRNA sense strand
aaagaaacagaaagggaaa

SEQ ID NO: 2290912 - RNA, 19 nt, Homo sapiens
  misc_RNA (1)...(19): siRNA sense strand
ccgaaggcguugugaguga

SEQ ID NO: 2290913 - RNA, 19 nt, Homo sapiens
  misc_RNA (1)...(19): siRNA sense strand
ggaaaaggucuuaggagaa

SEQ ID NO: 2290914 - RNA, 19 nt, Homo sapiens
  misc_RNA (1)...(19): siRNA sense strand
gcacagaagcagaggcagu

SEQ ID NO: 2290915 - RNA, 19 nt, Homo sapiens
  misc_RNA (1)...(19): siRNA sense strand
ggaggaaugcaaagaggaa

SEQ ID NO: 2290916 - RNA, 19 nt, Homo sapiens
  misc_RNA (1)...(19): siRNA sense strand
ggagaagagaaacaagaaa

SEQ ID NO: 2290917 - RNA, 19 nt, Homo sapiens
  misc_RNA (1)...(19): siRNA sense strand
cagaaguguuugaugagaa

SEQ ID NO: 2290918 - RNA, 19 nt, Homo sapiens
  misc_RNA (1)...(19): siRNA sense strand
agaaguguuugaugagaaa

SEQ ID NO: 2290919 - RNA, 19 nt, Homo sapiens
  misc_RNA (1)...(19): siRNA sense strand
gcugaagagaccacagaaa

SEQ ID NO: 2290920 - RNA, 19 nt, Homo sapiens
  misc_RNA (1)...(19): siRNA sense strand
aagacgagauuguggaaau

SEQ ID NO: 2290921 - RNA, 19 nt, Homo sapiens
  misc_RNA (1)...(19): siRNA sense strand
cugaaaugcaagaagaaau

SEQ ID NO: 2290922 - RNA, 19 nt, Homo sapiens
  misc_RNA (1)...(19): siRNA sense strand
aguaauugcagaagaagaa

SEQ ID NO: 2290923 - RNA, 19 nt, Homo sapiens
  misc_RNA (1)...(19): siRNA sense strand
ccacugagucccaggcuaa

SEQ ID NO: 2290924 - RNA, 19 nt, Homo sapiens
  misc_RNA (1)...(19): siRNA sense strand
aggaaggagaagagaaaca

SEQ ID NO: 2290925 - RNA, 19 nt, Homo sapiens
  misc_RNA (1)...(19): siRNA sense strand
gguauuggaaagagaagua

SEQ ID NO: 2290926 - RNA, 19 nt, Homo sapiens
  misc_RNA (1)...(19): siRNA sense strand
ggcuaaugauauuggauuu

SEQ ID NO: 2290927 - RNA, 19 nt, Homo sapiens
  misc_RNA (1)...(19): siRNA sense strand
gaaugaaggugcagggaag

SEQ ID NO: 2290928 - RNA, 19 nt, Homo sapiens
  misc_RNA (1)...(19): siRNA sense strand
cagaaacaagagagagaau

SEQ ID NO: 2290929 - RNA, 19 nt, Homo sapiens
  misc_RNA (1)...(19): siRNA sense strand
aggaaaaggucuuaggaga

SEQ ID NO: 2290930 - RNA, 19 nt, Homo sapiens
  misc_RNA (1)...(19): siRNA sense strand
gagaagagaaacaagaaaa

SEQ ID NO: 2290931 - RNA, 19 nt, Homo sapiens
  misc_RNA (1)...(19): siRNA sense strand
ggaagaaacagcagggucu

SEQ ID NO: 2290932 - RNA, 19 nt, Homo sapiens
  misc_RNA (1)...(19): siRNA sense strand
aggaggaguuacagaaaca

SEQ ID NO: 2290933 - RNA, 19 nt, Homo sapiens
  misc_RNA (1)...(19): siRNA sense strand
augcaaagaggaaggagaa

SEQ ID NO: 2290934 - RNA, 19 nt, Homo sapiens
  misc_RNA (1)...(19): siRNA sense strand
aagaagagguuguggccga

SEQ ID NO: 2290935 - RNA, 19 nt, Homo sapiens
  misc_RNA (1)...(19): siRNA sense strand
gggagaaaauggaggcaca

SEQ ID NO: 2290936 - RNA, 19 nt, Homo sapiens
  misc_RNA (1)...(19): siRNA sense strand
aagagaagcuugagcacga

SEQ ID NO: 2290937 - RNA, 19 nt, Homo sapiens
  misc_RNA (1)...(19): siRNA sense strand
gaaaaggccagaugggaaa

SEQ ID NO: 2290938 - RNA, 19 nt, Homo sapiens
  misc_RNA (1)...(19): siRNA sense strand
ccgaaauaaucgaacagau

SEQ ID NO: 2290939 - RNA, 19 nt, Homo sapiens
  misc_RNA (1)...(19): siRNA sense strand
ugucaucacaggagagaau

SEQ ID NO: 2290940 - RNA, 19 nt, Homo sapiens
  misc_RNA (1)...(19): siRNA sense strand
aagaagaugagcuggacaa

SEQ ID NO: 2290941 - RNA, 19 nt, Homo sapiens
  misc_RNA (1)...(19): siRNA sense strand
aggagauggugauggaaca

SEQ ID NO: 2290942 - RNA, 19 nt, Homo sapiens
  misc_RNA (1)...(19): siRNA sense strand
aggaagaaacuaaagaaca

SEQ ID NO: 2290943 - RNA, 19 nt, Homo sapiens
  misc_RNA (1)...(19): siRNA sense strand
ccaaagaaagcgaacccaa

SEQ ID NO: 2290944 - RNA, 19 nt, Homo sapiens
  misc_RNA (1)...(19): siRNA sense strand
aggugaagggacagaagaa

SEQ ID NO: 2290945 - RNA, 19 nt, Homo sapiens
  misc_RNA (1)...(19): siRNA sense strand
ugaaagggagcguggaaga

SEQ ID NO: 2290946 - RNA, 19 nt, Homo sapiens
  misc_RNA (1)...(19): siRNA sense strand
acucuagagcauacagaua

SEQ ID NO: 2290947 - RNA, 19 nt, Homo sapiens
  misc_RNA (1)...(19): siRNA sense strand
gcaaagaggaaggagaaga

SEQ ID NO: 2290948 - RNA, 19 nt, Homo sapiens
  misc_RNA (1)...(19): siRNA sense strand
cugaggagcccgaggagau

SEQ ID NO: 2290949 - RNA, 19 nt, Homo sapiens
  misc_RNA (1)...(19): siRNA sense strand
cggaaagugauaaagaaga

SEQ ID NO: 2290950 - RNA, 19 nt, Homo sapiens
  misc_RNA (1)...(19): siRNA sense strand
ucuagagcauacagauaaa

SEQ ID NO: 2290951 - RNA, 19 nt, Homo sapiens
  misc_RNA (1)...(19): siRNA sense strand
ggucaaagugaguguagca

SEQ ID NO: 2290952 - RNA, 19 nt, Homo sapiens
  misc_RNA (1)...(19): siRNA sense strand
gaguguagcaauugaggau

SEQ ID NO: 2290953 - RNA, 19 nt, Homo sapiens
  misc_RNA (1)...(19): siRNA sense strand
cagaaagaauagagaaguc

SEQ ID NO: 2290954 - RNA, 19 nt, Homo sapiens
  misc_RNA (1)...(19): siRNA sense strand
cuggugaagcucaaagaaa

SEQ ID NO: 2290955 - RNA, 19 nt, Homo sapiens
  misc_RNA (1)...(19): siRNA sense strand
ggguaaaaucacaggagau

SEQ ID NO: 2290956 - RNA, 19 nt, Homo sapiens
  misc_RNA (1)...(19): siRNA sense strand
gacaggaaacggagaaaga

SEQ ID NO: 2290957 - RNA, 19 nt, Homo sapiens
  misc_RNA (1)...(19): siRNA sense strand
accaauuacuucagccaaa

SEQ ID NO: 2290958 - RNA, 19 nt, Homo sapiens
  misc_RNA (1)...(19): siRNA sense strand
aagcaauuuagaagagcua

SEQ ID NO: 2290959 - RNA, 19 nt, Homo sapiens
  misc_RNA (1)...(19): siRNA sense strand
ccacaggagccggcagaaa

SEQ ID NO: 2290960 - RNA, 19 nt, Homo sapiens
  misc_RNA (1)...(19): siRNA sense strand
ggaaaagugcacagugaau

SEQ ID NO: 2290961 - RNA, 19 nt, Homo sapiens
  misc_RNA (1)...(19): siRNA sense strand
ggagcguggaagagccaaa

SEQ ID NO: 2290962 - RNA, 19 nt, Homo sapiens
  misc_RNA (1)...(19): siRNA sense strand
agaaaaggccagaugggaa

SEQ ID NO: 2290963 - RNA, 19 nt, Homo sapiens
  misc_RNA (1)...(19): siRNA sense strand
cagaaagaccagaagagca

SEQ ID NO: 2290964 - RNA, 19 nt, Homo sapiens
  misc_RNA (1)...(19): siRNA sense strand
cggauguaguguugaaagu

SEQ ID NO: 2290965 - RNA, 19 nt, Homo sapiens
  misc_RNA (1)...(19): siRNA sense strand
cuuguuagcagaaagaaua

SEQ ID NO: 2290966 - RNA, 19 nt, Homo sapiens
  misc_RNA (1)...(19): siRNA sense strand
cagagcagcccgagcagaa

SEQ ID NO: 2290967 - RNA, 19 nt, Homo sapiens
  misc_RNA (1)...(19): siRNA sense strand
guucaagucgaaagggaga

SEQ ID NO: 2290968 - RNA, 19 nt, Homo sapiens
  misc_RNA (1)...(19): siRNA sense strand
guuuaaguuuguuggcuuu

SEQ ID NO: 2290969 - RNA, 19 nt, Homo sapiens
  misc_RNA (1)...(19): siRNA sense strand
aagagaaguaauugcagaa

SEQ ID NO: 2290970 - RNA, 19 nt, Homo sapiens
  misc_RNA (1)...(19): siRNA sense strand
aggaggaagaggaaggaaa

SEQ ID NO: 2290971 - RNA, 19 nt, Homo sapiens
  misc_RNA (1)...(19): siRNA sense strand
guucagaagaggaggagga

SEQ ID NO: 2290972 - RNA, 19 nt, Homo sapiens
  misc_RNA (1)...(19): siRNA sense strand
gcuacaaaagagaaggaaa

SEQ ID NO: 2290973 - RNA, 19 nt, Homo sapiens
  misc_RNA (1)...(19): siRNA sense strand
agagaaggaaagugaugaa

SEQ ID NO: 2290974 - RNA, 19 nt, Homo sapiens
  misc_RNA (1)...(19): siRNA sense strand
augaagaagaagaggagga

SEQ ID NO: 2290975 - RNA, 19 nt, Homo sapiens
  misc_RNA (1)...(19): siRNA sense strand
aggaaagugaugaagaaga

SEQ ID NO: 2290976 - RNA, 19 nt, Homo sapiens
  misc_RNA (1)...(19): siRNA sense strand
agaagaaggggaagaagaa

SEQ ID NO: 2290977 - RNA, 19 nt, Homo sapiens
  misc_RNA (1)...(19): siRNA sense strand
aagaagaggaggaagagga

SEQ ID NO: 2290978 - RNA, 19 nt, Homo sapiens
  misc_RNA (1)...(19): siRNA sense strand
augaagaugaguacagcua

SEQ ID NO: 2290979 - RNA, 19 nt, Homo sapiens
  misc_RNA (1)...(19): siRNA sense strand
augaagacucugaggcuga

SEQ ID NO: 2290980 - RNA, 19 nt, Homo sapiens
  misc_RNA (1)...(19): siRNA sense strand
acgaagaaagcgaagcaga

SEQ ID NO: 2290981 - RNA, 19 nt, Homo sapiens
  misc_RNA (1)...(19): siRNA sense strand
augaagaaucgaaugaaga

SEQ ID NO: 2290982 - RNA, 19 nt, Homo sapiens
  misc_RNA (1)...(19): siRNA sense strand
caaaugaaggagaaaacaa

SEQ ID NO: 2290983 - RNA, 19 nt, Homo sapiens
  misc_RNA (1)...(19): siRNA sense strand
aggagaaaacaaugaagaa

SEQ ID NO: 2290984 - RNA, 19 nt, Homo sapiens
  misc_RNA (1)...(19): siRNA sense strand
ccaacagcacagaggcaga

SEQ ID NO: 2290985 - RNA, 19 nt, Homo sapiens
  misc_RNA (1)...(19): siRNA sense strand
gaacaaggcauaaacggca

SEQ ID NO: 2290986 - RNA, 19 nt, Homo sapiens
  misc_RNA (1)...(19): siRNA sense strand
acuuuaaaggacaaggcua

SEQ ID NO: 2290987 - RNA, 19 nt, Homo sapiens
  misc_RNA (1)...(19): siRNA sense strand
cuacaaaagagaaggaaag

SEQ ID NO: 2290988 - RNA, 19 nt, Homo sapiens
  misc_RNA (1)...(19): siRNA sense strand
caauggagaagaaggggaa

SEQ ID NO: 2290989 - RNA, 19 nt, Homo sapiens
  misc_RNA (1)...(19): siRNA sense strand
cuuuaaaggacaaggcuac

SEQ ID NO: 2290990 - RNA, 19 nt, Homo sapiens
  misc_RNA (1)...(19): siRNA sense strand
gugaugaagaagaagagga

SEQ ID NO: 2290991 - RNA, 19 nt, Homo sapiens
  misc_RNA (1)...(19): siRNA sense strand
acucugaggcugagaauac

SEQ ID NO: 2290992 - RNA, 19 nt, Homo sapiens
  misc_RNA (1)...(19): siRNA sense strand
ccaagaaggcuggggauau

SEQ ID NO: 2290993 - RNA, 19 nt, Homo sapiens
  misc_RNA (1)...(19): siRNA sense strand
gagucaaaauagaggauuc

SEQ ID NO: 2290994 - RNA, 19 nt, Homo sapiens
  misc_RNA (1)...(19): siRNA sense strand
aaucgaaugaagaugaaga

SEQ ID NO: 2290995 - RNA, 19 nt, Homo sapiens
  misc_RNA (1)...(19): siRNA sense strand
aggaagaggaaggaaauga

SEQ ID NO: 2290996 - RNA, 19 nt, Homo sapiens
  misc_RNA (1)...(19): siRNA sense strand
ggagaaaacaaugaagaau

SEQ ID NO: 2290997 - RNA, 19 nt, Homo sapiens
  misc_RNA (1)...(19): siRNA sense strand
guucagggcaguagugacu

SEQ ID NO: 2290998 - RNA, 19 nt, Homo sapiens
  misc_RNA (1)...(19): siRNA sense strand
aggaggaggaagaagagga

SEQ ID NO: 2290999 - RNA, 19 nt, Homo sapiens
  misc_RNA (1)...(19): siRNA sense strand
ggaaaugaaaacgaagaaa

SEQ ID NO: 2291000 - RNA, 19 nt, Homo sapiens
  misc_RNA (1)...(19): siRNA sense strand
acgacaauggauaugaaau

SEQ ID NO: 2291001 - RNA, 19 nt, Homo sapiens
  misc_RNA (1)...(19): siRNA sense strand
ccauugugacugaggaaga

SEQ ID NO: 2291002 - RNA, 19 nt, Homo sapiens
  misc_RNA (1)...(19): siRNA sense strand
ccgagagcuggaugagaaa

SEQ ID NO: 2291003 - RNA, 19 nt, Homo sapiens
  misc_RNA (1)...(19): siRNA sense strand
guaucaucccggaggagua

SEQ ID NO: 2291004 - RNA, 19 nt, Homo sapiens
  misc_RNA (1)...(19): siRNA sense strand
gaggaugaugacagaggaa

SEQ ID NO: 2291005 - RNA, 19 nt, Homo sapiens
  misc_RNA (1)...(19): siRNA sense strand
gaaaaguggaauggagaaa

SEQ ID NO: 2291006 - RNA, 19 nt, Homo sapiens
  misc_RNA (1)...(19): siRNA sense strand
ggguuuggagggaggauga

SEQ ID NO: 2291007 - RNA, 19 nt, Homo sapiens
  misc_RNA (1)...(19): siRNA sense strand
gguugaaacuacuggcauc

SEQ ID NO: 2291008 - RNA, 19 nt, Homo sapiens
  misc_RNA (1)...(19): siRNA sense strand
ggaugaugacagaggaaug

SEQ ID NO: 2291009 - RNA, 19 nt, Homo sapiens
  misc_RNA (1)...(19): siRNA sense strand
gagaaaaguggaauggaga

SEQ ID NO: 2291010 - RNA, 19 nt, Homo sapiens
  misc_RNA (1)...(19): siRNA sense strand
gugggugaccugaggaaaa

SEQ ID NO: 2291011 - RNA, 19 nt, Homo sapiens
  misc_RNA (1)...(19): siRNA sense strand
guugauaacccaaucgaga

SEQ ID NO: 2291012 - RNA, 19 nt, Homo sapiens
  misc_RNA (1)...(19): siRNA sense strand
cuguaugacaucucagcaa

SEQ ID NO: 2291013 - RNA, 19 nt, Homo sapiens
  misc_RNA (1)...(19): siRNA sense strand
ccuacauugcugaggagau

SEQ ID NO: 2291014 - RNA, 19 nt, Homo sapiens
  misc_RNA (1)...(19): siRNA sense strand
aaucaaaacacaucggaau

SEQ ID NO: 2291015 - RNA, 19 nt, Homo sapiens
  misc_RNA (1)...(19): siRNA sense strand
uggacauuccuguugauaa

SEQ ID NO: 2291016 - RNA, 19 nt, Homo sapiens
  misc_RNA (1)...(19): siRNA sense strand
ugacugaggaagaaggagu

SEQ ID NO: 2291017 - RNA, 19 nt, Homo sapiens
  misc_RNA (1)...(19): siRNA sense strand
agaaacaauuccaugagga

SEQ ID NO: 2291018 - RNA, 19 nt, Homo sapiens
  misc_RNA (1)...(19): siRNA sense strand
aggaacaauucuauccgaa

SEQ ID NO: 2291019 - RNA, 19 nt, Homo sapiens
  misc_RNA (1)...(19): siRNA sense strand
cgcaacuccaugagaagaa

SEQ ID NO: 2291020 - RNA, 19 nt, Homo sapiens
  misc_RNA (1)...(19): siRNA sense strand
aggaaugcccuuuggccau

SEQ ID NO: 2291021 - RNA, 19 nt, Homo sapiens
  misc_RNA (1)...(19): siRNA sense strand
aggaagaaggaguguauuc

SEQ ID NO: 2291022 - RNA, 19 nt, Homo sapiens
  misc_RNA (1)...(19): siRNA sense strand
aacccaaucgagagcaaua

SEQ ID NO: 2291023 - RNA, 19 nt, Homo sapiens
  misc_RNA (1)...(19): siRNA sense strand
agaaaaguggaauggagaa

SEQ ID NO: 2291024 - RNA, 19 nt, Homo sapiens
  misc_RNA (1)...(19): siRNA sense strand
aauucuauccgaaggaaca

SEQ ID NO: 2291025 - RNA, 19 nt, Homo sapiens
  misc_RNA (1)...(19): siRNA sense strand
gaggaaugcccuuuggcca

SEQ ID NO: 2291026 - RNA, 19 nt, Homo sapiens
  misc_RNA (1)...(19): siRNA sense strand
gagugggugaccugaggaa

SEQ ID NO: 2291027 - RNA, 19 nt, Homo sapiens
  misc_RNA (1)...(19): siRNA sense strand
cauccagguggucaagaaa

SEQ ID NO: 2291028 - RNA, 19 nt, Homo sapiens
  misc_RNA (1)...(19): siRNA sense strand
cagcaacugaccuggccaa

SEQ ID NO: 2291029 - RNA, 19 nt, Homo sapiens
  misc_RNA (1)...(19): siRNA sense strand
gggaagaagugcaccgucu

SEQ ID NO: 2291030 - RNA, 19 nt, Homo sapiens
  misc_RNA (1)...(19): siRNA sense strand
acgugaugguggacgggaa

SEQ ID NO: 2291031 - RNA, 19 nt, Homo sapiens
  misc_RNA (1)...(19): siRNA sense strand
cgugaugguggacgggaaa

SEQ ID NO: 2291032 - RNA, 19 nt, Homo sapiens
  misc_RNA (1)...(19): siRNA sense strand
gggaagacaugcuugcuga

SEQ ID NO: 2291033 - RNA, 19 nt, Homo sapiens
  misc_RNA (1)...(19): siRNA sense strand
ugaaauaccuggagugcuc

SEQ ID NO: 2291034 - RNA, 19 nt, Homo sapiens
  misc_RNA (1)...(19): siRNA sense strand
cgagaauguucgugccaag

SEQ ID NO: 2291035 - RNA, 19 nt, Homo sapiens
  misc_RNA (1)...(19): siRNA sense strand
uggaaaaggagcuggggaa

SEQ ID NO: 2291036 - RNA, 19 nt, Homo sapiens
  misc_RNA (1)...(19): siRNA sense strand
uggaagaaauacagccuga

SEQ ID NO: 2291037 - RNA, 19 nt, Homo sapiens
  misc_RNA (1)...(19): siRNA sense strand
ucucagacgaaguggaaaa

SEQ ID NO: 2291038 - RNA, 19 nt, Homo sapiens
  misc_RNA (1)...(19): siRNA sense strand
ggaauggugugaagcccaa

SEQ ID NO: 2291039 - RNA, 19 nt, Homo sapiens
  misc_RNA (1)...(19): siRNA sense strand
ggaaaaggagcuggggaaa

SEQ ID NO: 2291040 - RNA, 19 nt, Homo sapiens
  misc_RNA (1)...(19): siRNA sense strand
ccaucaacaaacuggagaa

SEQ ID NO: 2291041 - RNA, 19 nt, Homo sapiens
  misc_RNA (1)...(19): siRNA sense strand
cagucaugaaagagaucaa

SEQ ID NO: 2291042 - RNA, 19 nt, Homo sapiens
  misc_RNA (1)...(19): siRNA sense strand
caggagagcugcagagcac

SEQ ID NO: 2291043 - RNA, 19 nt, Homo sapiens
  misc_RNA (1)...(19): siRNA sense strand
cggugaaggaaaucaguga

SEQ ID NO: 2291044 - RNA, 19 nt, Homo sapiens
  misc_RNA (1)...(19): siRNA sense strand
gugaaggaaaucagugaca

SEQ ID NO: 2291045 - RNA, 19 nt, Homo sapiens
  misc_RNA (1)...(19): siRNA sense strand
cagggaaggcuggaggaaa

SEQ ID NO: 2291046 - RNA, 19 nt, Homo sapiens
  misc_RNA (1)...(19): siRNA sense strand
ccauccagcaaaugaggaa

SEQ ID NO: 2291047 - RNA, 19 nt, Homo sapiens
  misc_RNA (1)...(19): siRNA sense strand
gcugcagagcacagagaca

SEQ ID NO: 2291048 - RNA, 19 nt, Homo sapiens
  misc_RNA (1)...(19): siRNA sense strand
acucagaucucgucagcca

SEQ ID NO: 2291049 - RNA, 19 nt, Homo sapiens
  misc_RNA (1)...(19): siRNA sense strand
guguaugagcugcuagaga

SEQ ID NO: 2291050 - RNA, 19 nt, Homo sapiens
  misc_RNA (1)...(19): siRNA sense strand
uguacgagggcguguggaa

SEQ ID NO: 2291051 - RNA, 19 nt, Homo sapiens
  misc_RNA (1)...(19): siRNA sense strand
gaggaagagggccgagaca

SEQ ID NO: 2291052 - RNA, 19 nt, Homo sapiens
  misc_RNA (1)...(19): siRNA sense strand
gcauguuggcaguggaauc

SEQ ID NO: 2291053 - RNA, 19 nt, Homo sapiens
  misc_RNA (1)...(19): siRNA sense strand
aucaagaagaagaagaaga

SEQ ID NO: 2291054 - RNA, 19 nt, Homo sapiens
  misc_RNA (1)...(19): siRNA sense strand
cagucaacagucuggagaa

SEQ ID NO: 2291055 - RNA, 19 nt, Homo sapiens
  misc_RNA (1)...(19): siRNA sense strand
gcuccgggucuuaggcuau

SEQ ID NO: 2291056 - RNA, 19 nt, Homo sapiens
  misc_RNA (1)...(19): siRNA sense strand
ucaugaaagagaucaaaca

SEQ ID NO: 2291057 - RNA, 19 nt, Homo sapiens
  misc_RNA (1)...(19): siRNA sense strand
gcagcuucuuggugcguga

SEQ ID NO: 2291058 - RNA, 19 nt, Homo sapiens
  misc_RNA (1)...(19): siRNA sense strand
gggaauggugugaagccca

SEQ ID NO: 2291059 - RNA, 19 nt, Homo sapiens
  misc_RNA (1)...(19): siRNA sense strand
agggcguguggaagaaaua

SEQ ID NO: 2291060 - RNA, 19 nt, Homo sapiens
  misc_RNA (1)...(19): siRNA sense strand
uggaaaaggagcuggggaa

SEQ ID NO: 2291061 - RNA, 19 nt, Homo sapiens
  misc_RNA (1)...(19): siRNA sense strand
uggaagaaauacagccuga

SEQ ID NO: 2291062 - RNA, 19 nt, Homo sapiens
  misc_RNA (1)...(19): siRNA sense strand
ucucagacgaaguggaaaa

SEQ ID NO: 2291063 - RNA, 19 nt, Homo sapiens
  misc_RNA (1)...(19): siRNA sense strand
ggaauggugugaagcccaa

SEQ ID NO: 2291064 - RNA, 19 nt, Homo sapiens
  misc_RNA (1)...(19): siRNA sense strand
ggaaaaggagcuggggaaa

SEQ ID NO: 2291065 - RNA, 19 nt, Homo sapiens
  misc_RNA (1)...(19): siRNA sense strand
ccaucaacaaacuggagaa

SEQ ID NO: 2291066 - RNA, 19 nt, Homo sapiens
  misc_RNA (1)...(19): siRNA sense strand
cagucaugaaagagaucaa

SEQ ID NO: 2291067 - RNA, 19 nt, Homo sapiens
  misc_RNA (1)...(19): siRNA sense strand
caggagagcugcagagcac

SEQ ID NO: 2291068 - RNA, 19 nt, Homo sapiens
  misc_RNA (1)...(19): siRNA sense strand
cggugaaggaaaucaguga

SEQ ID NO: 2291069 - RNA, 19 nt, Homo sapiens
  misc_RNA (1)...(19): siRNA sense strand
gugaaggaaaucagugaca

SEQ ID NO: 2291070 - RNA, 19 nt, Homo sapiens
  misc_RNA (1)...(19): siRNA sense strand
cagggaaggcuggaggaaa

SEQ ID NO: 2291071 - RNA, 19 nt, Homo sapiens
  misc_RNA (1)...(19): siRNA sense strand
ccauccagcaaaugaggaa

SEQ ID NO: 2291072 - RNA, 19 nt, Homo sapiens
  misc_RNA (1)...(19): siRNA sense strand
gcugcagagcacagagaca

SEQ ID NO: 2291073 - RNA, 19 nt, Homo sapiens
  misc_RNA (1)...(19): siRNA sense strand
acucagaucucgucagcca

SEQ ID NO: 2291074 - RNA, 19 nt, Homo sapiens
  misc_RNA (1)...(19): siRNA sense strand
guguaugagcugcuagaga

SEQ ID NO: 2291075 - RNA, 19 nt, Homo sapiens
  misc_RNA (1)...(19): siRNA sense strand
uguacgagggcguguggaa

SEQ ID NO: 2291076 - RNA, 19 nt, Homo sapiens
  misc_RNA (1)...(19): siRNA sense strand
gaggaagagggccgagaca

SEQ ID NO: 2291077 - RNA, 19 nt, Homo sapiens
  misc_RNA (1)...(19): siRNA sense strand
gcauguuggcaguggaauc

SEQ ID NO: 2291078 - RNA, 19 nt, Homo sapiens
  misc_RNA (1)...(19): siRNA sense strand
aucaagaagaagaagaaga

SEQ ID NO: 2291079 - RNA, 19 nt, Homo sapiens
  misc_RNA (1)...(19): siRNA sense strand
cagucaacagucuggagaa

SEQ ID NO: 2291080 - RNA, 19 nt, Homo sapiens
  misc_RNA (1)...(19): siRNA sense strand
gcuccgggucuuaggcuau

SEQ ID NO: 2291081 - RNA, 19 nt, Homo sapiens
  misc_RNA (1)...(19): siRNA sense strand
ucaugaaagagaucaaaca

SEQ ID NO: 2291082 - RNA, 19 nt, Homo sapiens
  misc_RNA (1)...(19): siRNA sense strand
gcagcuucuuggugcguga

SEQ ID NO: 2291083 - RNA, 19 nt, Homo sapiens
  misc_RNA (1)...(19): siRNA sense strand
gggaauggugugaagccca

SEQ ID NO: 2291084 - RNA, 19 nt, Homo sapiens
  misc_RNA (1)...(19): siRNA sense strand
agggcguguggaagaaaua

SEQ ID NO: 2291085 - RNA, 19 nt, Homo sapiens
  misc_RNA (1)...(19): siRNA sense strand
cugcaguaaugaaggaaau

SEQ ID NO: 2291086 - RNA, 19 nt, Homo sapiens
  misc_RNA (1)...(19): siRNA sense strand
uggaguacuuagagaagaa

SEQ ID NO: 2291087 - RNA, 19 nt, Homo sapiens
  misc_RNA (1)...(19): siRNA sense strand
ccucgaaagcaaagagaca

SEQ ID NO: 2291088 - RNA, 19 nt, Homo sapiens
  misc_RNA (1)...(19): siRNA sense strand
ugucauguguacaggaaau

SEQ ID NO: 2291089 - RNA, 19 nt, Homo sapiens
  misc_RNA (1)...(19): siRNA sense strand
guaacugccuagugggaga

SEQ ID NO: 2291090 - RNA, 19 nt, Homo sapiens
  misc_RNA (1)...(19): siRNA sense strand
gggguauuguugugggaaa

SEQ ID NO: 2291091 - RNA, 19 nt, Homo sapiens
  misc_RNA (1)...(19): siRNA sense strand
gagcaggauaggauggcaa

SEQ ID NO: 2291092 - RNA, 19 nt, Homo sapiens
  misc_RNA (1)...(19): siRNA sense strand
ggguauuguugugggaaau

SEQ ID NO: 2291093 - RNA, 19 nt, Homo sapiens
  misc_RNA (1)...(19): siRNA sense strand
caguaaugaaggaaaucaa

SEQ ID NO: 2291094 - RNA, 19 nt, Homo sapiens
  misc_RNA (1)...(19): siRNA sense strand
gcacagacucucaggggaa

SEQ ID NO: 2291095 - RNA, 19 nt, Homo sapiens
  misc_RNA (1)...(19): siRNA sense strand
ccucaaacucgcaacaaau

SEQ ID NO: 2291096 - RNA, 19 nt, Homo sapiens
  misc_RNA (1)...(19): siRNA sense strand
gcaaagaggcccugcugga

SEQ ID NO: 2291097 - RNA, 19 nt, Homo sapiens
  misc_RNA (1)...(19): siRNA sense strand
acgcagugcagcugaguau

SEQ ID NO: 2291098 - RNA, 19 nt, Homo sapiens
  misc_RNA (1)...(19): siRNA sense strand
agguggagaacaaggagaa

SEQ ID NO: 2291099 - RNA, 19 nt, Homo sapiens
  misc_RNA (1)...(19): siRNA sense strand
cacuaaaggugaaaagcua

SEQ ID NO: 2291100 - RNA, 19 nt, Homo sapiens
  misc_RNA (1)...(19): siRNA sense strand
ccaagcagggagagaccaa

SEQ ID NO: 2291101 - RNA, 19 nt, Homo sapiens
  misc_RNA (1)...(19): siRNA sense strand
ccaaggguaaagagaagaa

SEQ ID NO: 2291102 - RNA, 19 nt, Homo sapiens
  misc_RNA (1)...(19): siRNA sense strand
uggagaacaaggagaacau

SEQ ID NO: 2291103 - RNA, 19 nt, Homo sapiens
  misc_RNA (1)...(19): siRNA sense strand
uccgagaggcugugagcaa

SEQ ID NO: 2291104 - RNA, 19 nt, Homo sapiens
  misc_RNA (1)...(19): siRNA sense strand
gaucaauaccacugcagau

SEQ ID NO: 2291105 - RNA, 19 nt, Homo sapiens
  misc_RNA (1)...(19): siRNA sense strand
uggcagagcuuguacacca

SEQ ID NO: 2291106 - RNA, 19 nt, Homo sapiens
  misc_RNA (1)...(19): siRNA sense strand
cggucaguauggagagguu

SEQ ID NO: 2291107 - RNA, 19 nt, Homo sapiens
  misc_RNA (1)...(19): siRNA sense strand
aguacuuagagaagaagaa

SEQ ID NO: 2291108 - RNA, 19 nt, Homo sapiens
  misc_RNA (1)...(19): siRNA sense strand
cugcagauggcaaggugua

SEQ ID NO: 2291109 - RNA, 19 nt, Homo sapiens
  misc_RNA (1)...(19): siRNA sense strand
ugaaaacauugaaggaaga

SEQ ID NO: 2291110 - RNA, 19 nt, Homo sapiens
  misc_RNA (1)...(19): siRNA sense strand
caauggaguacuuagagaa

SEQ ID NO: 2291111 - RNA, 19 nt, Homo sapiens
  misc_RNA (1)...(19): siRNA sense strand
cccucaaacucgcaacaaa

SEQ ID NO: 2291112 - RNA, 19 nt, Homo sapiens
  misc_RNA (1)...(19): siRNA sense strand
ccauagagaucuugcagcu

SEQ ID NO: 2291113 - RNA, 19 nt, Homo sapiens
  misc_RNA (1)...(19): siRNA sense strand
uggcacagcagguacuaaa

SEQ ID NO: 2291114 - RNA, 19 nt, Homo sapiens
  misc_RNA (1)...(19): siRNA sense strand
gcugcaguaaugaaggaaa

SEQ ID NO: 2291115 - RNA, 19 nt, Homo sapiens
  misc_RNA (1)...(19): siRNA sense strand
cccuaagguuuaugaacuu

SEQ ID NO: 2291116 - RNA, 19 nt, Homo sapiens
  misc_RNA (1)...(19): siRNA sense strand
cugaagagguagcugagga

SEQ ID NO: 2291117 - RNA, 19 nt, Homo sapiens
  misc_RNA (1)...(19): siRNA sense strand
gcagcuuccuggugcgaga

SEQ ID NO: 2291118 - RNA, 19 nt, Homo sapiens
  misc_RNA (1)...(19): siRNA sense strand
uggaacagccugagggaug

SEQ ID NO: 2291119 - RNA, 19 nt, Homo sapiens
  misc_RNA (1)...(19): siRNA sense strand
ucacggaaccugugcccaa

SEQ ID NO: 2291120 - RNA, 19 nt, Homo sapiens
  misc_RNA (1)...(19): siRNA sense strand
gauauuaccaugaagcaca

SEQ ID NO: 2291121 - RNA, 19 nt, Homo sapiens
  misc_RNA (1)...(19): siRNA sense strand
cgucugggcuuuuggggua

SEQ ID NO: 2291122 - RNA, 19 nt, Homo sapiens
  misc_RNA (1)...(19): siRNA sense strand
ggagcuuugcacagaggaa

SEQ ID NO: 2291123 - RNA, 19 nt, Homo sapiens
  misc_RNA (1)...(19): siRNA sense strand
aaacacaggaaggaggaaa

SEQ ID NO: 2291124 - RNA, 19 nt, Homo sapiens
  misc_RNA (1)...(19): siRNA sense strand
gucaguauggagagguuua

SEQ ID NO: 2291125 - RNA, 19 nt, Homo sapiens
  misc_RNA (1)...(19): siRNA sense strand
cagaagagaauguggacag

SEQ ID NO: 2291126 - RNA, 19 nt, Homo sapiens
  misc_RNA (1)...(19): siRNA sense strand
cuggauuaccuccgagaau

SEQ ID NO: 2291127 - RNA, 19 nt, Homo sapiens
  misc_RNA (1)...(19): siRNA sense strand
aggucaaacucuacaucuu

SEQ ID NO: 2291128 - RNA, 19 nt, Homo sapiens
  misc_RNA (1)...(19): siRNA sense strand
gugaaaacauugaaggaag

SEQ ID NO: 2291129 - RNA, 19 nt, Homo sapiens
  misc_RNA (1)...(19): siRNA sense strand
ccuauuaaguggacagcac

SEQ ID NO: 2291130 - RNA, 19 nt, Homo sapiens
  misc_RNA (1)...(19): siRNA sense strand
acaagaugccacagaaaau

SEQ ID NO: 2291131 - RNA, 19 nt, Homo sapiens
  misc_RNA (1)...(19): siRNA sense strand
gagaagaggugacugcagu

SEQ ID NO: 2291132 - RNA, 19 nt, Homo sapiens
  misc_RNA (1)...(19): siRNA sense strand
gagaauguggacagggcca

SEQ ID NO: 2291133 - RNA, 19 nt, Homo sapiens
  misc_RNA (1)...(19): siRNA sense strand
gcucauuggcacagacucu

SEQ ID NO: 2291134 - RNA, 19 nt, Homo sapiens
  misc_RNA (1)...(19): siRNA sense strand
ggugcgagaaagugagagu

SEQ ID NO: 2291135 - RNA, 19 nt, Homo sapiens
  misc_RNA (1)...(19): siRNA sense strand
auacaugccauacgggaau

SEQ ID NO: 2291136 - RNA, 19 nt, Homo sapiens
  misc_RNA (1)...(19): siRNA sense strand
cagugaacagccuggaaaa

SEQ ID NO: 2291137 - RNA, 19 nt, Homo sapiens
  misc_RNA (1)...(19): siRNA sense strand
cugcaguaaugaaggaaau

SEQ ID NO: 2291138 - RNA, 19 nt, Homo sapiens
  misc_RNA (1)...(19): siRNA sense strand
uggaguacuuagagaagaa

SEQ ID NO: 2291139 - RNA, 19 nt, Homo sapiens
  misc_RNA (1)...(19): siRNA sense strand
ccucgaaagcaaagagaca

SEQ ID NO: 2291140 - RNA, 19 nt, Homo sapiens
  misc_RNA (1)...(19): siRNA sense strand
ugucauguguacaggaaau

SEQ ID NO: 2291141 - RNA, 19 nt, Homo sapiens
  misc_RNA (1)...(19): siRNA sense strand
guaacugccuagugggaga

SEQ ID NO: 2291142 - RNA, 19 nt, Homo sapiens
  misc_RNA (1)...(19): siRNA sense strand
gggguauuguugugggaaa

SEQ ID NO: 2291143 - RNA, 19 nt, Homo sapiens
  misc_RNA (1)...(19): siRNA sense strand
gagcaggauaggauggcaa

SEQ ID NO: 2291144 - RNA, 19 nt, Homo sapiens
  misc_RNA (1)...(19): siRNA sense strand
ggguauuguugugggaaau

SEQ ID NO: 2291145 - RNA, 19 nt, Homo sapiens
  misc_RNA (1)...(19): siRNA sense strand
caguaaugaaggaaaucaa

SEQ ID NO: 2291146 - RNA, 19 nt, Homo sapiens
  misc_RNA (1)...(19): siRNA sense strand
gcacagacucucaggggaa

SEQ ID NO: 2291147 - RNA, 19 nt, Homo sapiens
  misc_RNA (1)...(19): siRNA sense strand
ccucaaacucgcaacaaau

SEQ ID NO: 2291148 - RNA, 19 nt, Homo sapiens
  misc_RNA (1)...(19): siRNA sense strand
gcaaagaggcccugcugga

SEQ ID NO: 2291149 - RNA, 19 nt, Homo sapiens
  misc_RNA (1)...(19): siRNA sense strand
acgcagugcagcugaguau

SEQ ID NO: 2291150 - RNA, 19 nt, Homo sapiens
  misc_RNA (1)...(19): siRNA sense strand
agguggagaacaaggagaa

SEQ ID NO: 2291151 - RNA, 19 nt, Homo sapiens
  misc_RNA (1)...(19): siRNA sense strand
cacuaaaggugaaaagcua

SEQ ID NO: 2291152 - RNA, 19 nt, Homo sapiens
  misc_RNA (1)...(19): siRNA sense strand
ccaagcagggagagaccaa

SEQ ID NO: 2291153 - RNA, 19 nt, Homo sapiens
  misc_RNA (1)...(19): siRNA sense strand
ccaaggguaaagagaagaa

SEQ ID NO: 2291154 - RNA, 19 nt, Homo sapiens
  misc_RNA (1)...(19): siRNA sense strand
uggagaacaaggagaacau

SEQ ID NO: 2291155 - RNA, 19 nt, Homo sapiens
  misc_RNA (1)...(19): siRNA sense strand
uccgagaggcugugagcaa

SEQ ID NO: 2291156 - RNA, 19 nt, Homo sapiens
  misc_RNA (1)...(19): siRNA sense strand
gaucaauaccacugcagau

SEQ ID NO: 2291157 - RNA, 19 nt, Homo sapiens
  misc_RNA (1)...(19): siRNA sense strand
uggcagagcuuguacacca

SEQ ID NO: 2291158 - RNA, 19 nt, Homo sapiens
  misc_RNA (1)...(19): siRNA sense strand
cggucaguauggagagguu

SEQ ID NO: 2291159 - RNA, 19 nt, Homo sapiens
  misc_RNA (1)...(19): siRNA sense strand
aguacuuagagaagaagaa

SEQ ID NO: 2291160 - RNA, 19 nt, Homo sapiens
  misc_RNA (1)...(19): siRNA sense strand
cugcagauggcaaggugua

SEQ ID NO: 2291161 - RNA, 19 nt, Homo sapiens
  misc_RNA (1)...(19): siRNA sense strand
ugaaaacauugaaggaaga

SEQ ID NO: 2291162 - RNA, 19 nt, Homo sapiens
  misc_RNA (1)...(19): siRNA sense strand
caauggaguacuuagagaa

SEQ ID NO: 2291163 - RNA, 19 nt, Homo sapiens
  misc_RNA (1)...(19): siRNA sense strand
cccucaaacucgcaacaaa

SEQ ID NO: 2291164 - RNA, 19 nt, Homo sapiens
  misc_RNA (1)...(19): siRNA sense strand
ccauagagaucuugcagcu

SEQ ID NO: 2291165 - RNA, 19 nt, Homo sapiens
  misc_RNA (1)...(19): siRNA sense strand
uggcacagcagguacuaaa

SEQ ID NO: 2291166 - RNA, 19 nt, Homo sapiens
  misc_RNA (1)...(19): siRNA sense strand
gcugcaguaaugaaggaaa

SEQ ID NO: 2291167 - RNA, 19 nt, Homo sapiens
  misc_RNA (1)...(19): siRNA sense strand
cccuaagguuuaugaacuu

SEQ ID NO: 2291168 - RNA, 19 nt, Homo sapiens
  misc_RNA (1)...(19): siRNA sense strand
cugaagagguagcugagga

SEQ ID NO: 2291169 - RNA, 19 nt, Homo sapiens
  misc_RNA (1)...(19): siRNA sense strand
gcagcuuccuggugcgaga

SEQ ID NO: 2291170 - RNA, 19 nt, Homo sapiens
  misc_RNA (1)...(19): siRNA sense strand
uggaacagccugagggaug

SEQ ID NO: 2291171 - RNA, 19 nt, Homo sapiens
  misc_RNA (1)...(19): siRNA sense strand
ucacggaaccugugcccaa

SEQ ID NO: 2291172 - RNA, 19 nt, Homo sapiens
  misc_RNA (1)...(19): siRNA sense strand
gauauuaccaugaagcaca

SEQ ID NO: 2291173 - RNA, 19 nt, Homo sapiens
  misc_RNA (1)...(19): siRNA sense strand
cgucugggcuuuuggggua

SEQ ID NO: 2291174 - RNA, 19 nt, Homo sapiens
  misc_RNA (1)...(19): siRNA sense strand
ggagcuuugcacagaggaa

SEQ ID NO: 2291175 - RNA, 19 nt, Homo sapiens
  misc_RNA (1)...(19): siRNA sense strand
aaacacaggaaggaggaaa

SEQ ID NO: 2291176 - RNA, 19 nt, Homo sapiens
  misc_RNA (1)...(19): siRNA sense strand
gucaguauggagagguuua

SEQ ID NO: 2291177 - RNA, 19 nt, Homo sapiens
  misc_RNA (1)...(19): siRNA sense strand
cagaagagaauguggacag

SEQ ID NO: 2291178 - RNA, 19 nt, Homo sapiens
  misc_RNA (1)...(19): siRNA sense strand
cuggauuaccuccgagaau

SEQ ID NO: 2291179 - RNA, 19 nt, Homo sapiens
  misc_RNA (1)...(19): siRNA sense strand
aggucaaacucuacaucuu

SEQ ID NO: 2291180 - RNA, 19 nt, Homo sapiens
  misc_RNA (1)...(19): siRNA sense strand
gugaaaacauugaaggaag

SEQ ID NO: 2291181 - RNA, 19 nt, Homo sapiens
  misc_RNA (1)...(19): siRNA sense strand
ccuauuaaguggacagcac

SEQ ID NO: 2291182 - RNA, 19 nt, Homo sapiens
  misc_RNA (1)...(19): siRNA sense strand
acaagaugccacagaaaau

SEQ ID NO: 2291183 - RNA, 19 nt, Homo sapiens
  misc_RNA (1)...(19): siRNA sense strand
gagaagaggugacugcagu

SEQ ID NO: 2291184 - RNA, 19 nt, Homo sapiens
  misc_RNA (1)...(19): siRNA sense strand
gagaauguggacagggcca

SEQ ID NO: 2291185 - RNA, 19 nt, Homo sapiens
  misc_RNA (1)...(19): siRNA sense strand
gcucauuggcacagacucu

SEQ ID NO: 2291186 - RNA, 19 nt, Homo sapiens
  misc_RNA (1)...(19): siRNA sense strand
ggugcgagaaagugagagu

SEQ ID NO: 2291187 - RNA, 19 nt, Homo sapiens
  misc_RNA (1)...(19): siRNA sense strand
auacaugccauacgggaau

SEQ ID NO: 2291188 - RNA, 19 nt, Homo sapiens
  misc_RNA (1)...(19): siRNA sense strand
cagugaacagccuggaaaa

SEQ ID NO: 2291189 - RNA, 19 nt, Homo sapiens
  misc_RNA (1)...(19): siRNA sense strand
gcaaggaccuguaugccaa

SEQ ID NO: 2291190 - RNA, 19 nt, Homo sapiens
  misc_RNA (1)...(19): siRNA sense strand
gcccagagcaagagaggca

SEQ ID NO: 2291191 - RNA, 19 nt, Homo sapiens
  misc_RNA (1)...(19): siRNA sense strand
agggaguuaugguggguau

SEQ ID NO: 2291192 - RNA, 19 nt, Homo sapiens
  misc_RNA (1)...(19): siRNA sense strand
agaucauguuugagaccuu

SEQ ID NO: 2291193 - RNA, 19 nt, Homo sapiens
  misc_RNA (1)...(19): siRNA sense strand
gagaagaucuggcaccaca

SEQ ID NO: 2291194 - RNA, 19 nt, Homo sapiens
  misc_RNA (1)...(19): siRNA sense strand
aggccaaccgggagaagau

SEQ ID NO: 2291195 - RNA, 19 nt, Homo sapiens
  misc_RNA (1)...(19): siRNA sense strand
ugaacugccugauggccaa

SEQ ID NO: 2291196 - RNA, 19 nt, Homo sapiens
  misc_RNA (1)...(19): siRNA sense strand
cgggagaagaugacucaga

SEQ ID NO: 2291197 - RNA, 19 nt, Homo sapiens
  misc_RNA (1)...(19): siRNA sense strand
acaacuuacaauagcauca

SEQ ID NO: 2291198 - RNA, 19 nt, Homo sapiens
  misc_RNA (1)...(19): siRNA sense strand
gcuacauguuccuggguga

SEQ ID NO: 2291199 - RNA, 19 nt, Homo sapiens
  misc_RNA (1)...(19): siRNA sense strand
aaguacaggcagaggauga

SEQ ID NO: 2291200 - RNA, 19 nt, Homo sapiens
  misc_RNA (1)...(19): siRNA sense strand
agaagaugccccugggaaa

SEQ ID NO: 2291201 - RNA, 19 nt, Homo sapiens
  misc_RNA (1)...(19): siRNA sense strand
aggcagaggaugaggccca

SEQ ID NO: 2291202 - RNA, 19 nt, Homo sapiens
  misc_RNA (1)...(19): siRNA sense strand
aggagaagacgguggagga

SEQ ID NO: 2291203 - RNA, 19 nt, Homo sapiens
  misc_RNA (1)...(19): siRNA sense strand
gggaaagcugagcaagcaa

SEQ ID NO: 2291204 - RNA, 19 nt, Homo sapiens
  misc_RNA (1)...(19): siRNA sense strand
ccacauucucccagagcga

SEQ ID NO: 2291205 - RNA, 19 nt, Homo sapiens
  misc_RNA (1)...(19): siRNA sense strand
cccaggaagcuguggugaa

SEQ ID NO: 2291206 - RNA, 19 nt, Homo sapiens
  misc_RNA (1)...(19): siRNA sense strand
cgggaaaagaccaagaaca

SEQ ID NO: 2291207 - RNA, 19 nt, Homo sapiens
  misc_RNA (1)...(19): siRNA sense strand
ugagaagaaauuucgggaa

SEQ ID NO: 2291208 - RNA, 19 nt, Homo sapiens
  misc_RNA (1)...(19): siRNA sense strand
ccaacaucgagaacaacaa

SEQ ID NO: 2291209 - RNA, 19 nt, Homo sapiens
  misc_RNA (1)...(19): siRNA sense strand
uuaucgaaguacaggcaga

SEQ ID NO: 2291210 - RNA, 19 nt, Homo sapiens
  misc_RNA (1)...(19): siRNA sense strand
acacugaguuggagcugga

SEQ ID NO: 2291211 - RNA, 19 nt, Homo sapiens
  misc_RNA (1)...(19): siRNA sense strand
aguuggagcuggauggcca

SEQ ID NO: 2291212 - RNA, 19 nt, Homo sapiens
  misc_RNA (1)...(19): siRNA sense strand
cugcaggccaagaaggaca

SEQ ID NO: 2291213 - RNA, 19 nt, Homo sapiens
  misc_RNA (1)...(19): siRNA sense strand
cugaguacaaggugauaca

SEQ ID NO: 2291214 - RNA, 19 nt, Homo sapiens
  misc_RNA (1)...(19): siRNA sense strand
ggacccagguguaugagga

SEQ ID NO: 2291215 - RNA, 19 nt, Homo sapiens
  misc_RNA (1)...(19): siRNA sense strand
aggacuuugagaagaaauu

SEQ ID NO: 2291216 - RNA, 19 nt, Homo sapiens
  misc_RNA (1)...(19): siRNA sense strand
gccaaagccuggaggagcu

SEQ ID NO: 2291217 - RNA, 19 nt, Homo sapiens
  misc_RNA (1)...(19): siRNA sense strand
cuggauauguuauuggcau

SEQ ID NO: 2291218 - RNA, 19 nt, Homo sapiens
  misc_RNA (1)...(19): siRNA sense strand
acaucgagaacaacaacaa

SEQ ID NO: 2291219 - RNA, 19 nt, Homo sapiens
  misc_RNA (1)...(19): siRNA sense strand
aggcaggaagggaggagga

SEQ ID NO: 2291220 - RNA, 19 nt, Homo sapiens
  misc_RNA (1)...(19): siRNA sense strand
cuggagcaccugaguacaa

SEQ ID NO: 2291221 - RNA, 19 nt, Homo sapiens
  misc_RNA (1)...(19): siRNA sense strand
cccagguguaugaggacua

SEQ ID NO: 2291222 - RNA, 19 nt, Homo sapiens
  misc_RNA (1)...(19): siRNA sense strand
cuggaaaguaaaccaagaa

SEQ ID NO: 2291223 - RNA, 19 nt, Homo sapiens
  misc_RNA (1)...(19): siRNA sense strand
ucaucuaccaggagagcca

SEQ ID NO: 2291224 - RNA, 19 nt, Homo sapiens
  misc_RNA (1)...(19): siRNA sense strand
agaagacgguggaggaggu

SEQ ID NO: 2291225 - RNA, 19 nt, Homo sapiens
  misc_RNA (1)...(19): siRNA sense strand
aggaugaagaggaaacaaa

SEQ ID NO: 2291226 - RNA, 19 nt, Homo sapiens
  misc_RNA (1)...(19): siRNA sense strand
aggauugcuucaagguaaa

SEQ ID NO: 2291227 - RNA, 19 nt, Homo sapiens
  misc_RNA (1)...(19): siRNA sense strand
ccaggaaggucaugggcca

SEQ ID NO: 2291228 - RNA, 19 nt, Homo sapiens
  misc_RNA (1)...(19): siRNA sense strand
gggcaaagcuccuguggac

SEQ ID NO: 2291229 - RNA, 19 nt, Homo sapiens
  misc_RNA (1)...(19): siRNA sense strand
uguuugaaguggagaagga

SEQ ID NO: 2291230 - RNA, 19 nt, Homo sapiens
  misc_RNA (1)...(19): siRNA sense strand
aagacaagcaagaugguau

SEQ ID NO: 2291231 - RNA, 19 nt, Homo sapiens
  misc_RNA (1)...(19): siRNA sense strand
gccuguggcuggaggaaaa

SEQ ID NO: 2291232 - RNA, 19 nt, Homo sapiens
  misc_RNA (1)...(19): siRNA sense strand
augaacuacuagaggccaa

SEQ ID NO: 2291233 - RNA, 19 nt, Homo sapiens
  misc_RNA (1)...(19): siRNA sense strand
aagaugaugcccagaggaa

SEQ ID NO: 2291234 - RNA, 19 nt, Homo sapiens
  misc_RNA (1)...(19): siRNA sense strand
ccuugaagccagagucaca

SEQ ID NO: 2291235 - RNA, 19 nt, Homo sapiens
  misc_RNA (1)...(19): siRNA sense strand
aggacaggacagaagacaa

SEQ ID NO: 2291236 - RNA, 19 nt, Homo sapiens
  misc_RNA (1)...(19): siRNA sense strand
gugaaggaaaugaugucua

SEQ ID NO: 2291237 - RNA, 19 nt, Homo sapiens
  misc_RNA (1)...(19): siRNA sense strand
ggaugaagaggaaacaaaa

SEQ ID NO: 2291238 - RNA, 19 nt, Homo sapiens
  misc_RNA (1)...(19): siRNA sense strand
ugaugauggaaaugaagua

SEQ ID NO: 2291239 - RNA, 19 nt, Homo sapiens
  misc_RNA (1)...(19): siRNA sense strand
aggucaguguaaugaacua

SEQ ID NO: 2291240 - RNA, 19 nt, Homo sapiens
  misc_RNA (1)...(19): siRNA sense strand
ugacaguggcacaaaucaa

SEQ ID NO: 2291241 - RNA, 19 nt, Homo sapiens
  misc_RNA (1)...(19): siRNA sense strand
uggaccaacacuauagaaa

SEQ ID NO: 2291242 - RNA, 19 nt, Homo sapiens
  misc_RNA (1)...(19): siRNA sense strand
gggugggaaucuugagcca

SEQ ID NO: 2291243 - RNA, 19 nt, Homo sapiens
  misc_RNA (1)...(19): siRNA sense strand
ugaguaacugggugggaau

SEQ ID NO: 2291244 - RNA, 19 nt, Homo sapiens
  misc_RNA (1)...(19): siRNA sense strand
uacuagaggcuuugggaga

SEQ ID NO: 2291245 - RNA, 19 nt, Homo sapiens
  misc_RNA (1)...(19): siRNA sense strand
agguuacauguuugggaaa

SEQ ID NO: 2291246 - RNA, 19 nt, Homo sapiens
  misc_RNA (1)...(19): siRNA sense strand
gguuauacccucaacuaca

SEQ ID NO: 2291247 - RNA, 19 nt, Homo sapiens
  misc_RNA (1)...(19): siRNA sense strand
uguguauugugaaggaaau

SEQ ID NO: 2291248 - RNA, 19 nt, Homo sapiens
  misc_RNA (1)...(19): siRNA sense strand
gcuaauaaggacaggacag

SEQ ID NO: 2291249 - RNA, 19 nt, Homo sapiens
  misc_RNA (1)...(19): siRNA sense strand
ggaaaagcuaauaaggaca

SEQ ID NO: 2291250 - RNA, 19 nt, Homo sapiens
  misc_RNA (1)...(19): siRNA sense strand
cuauuaagcuggugaaaac

SEQ ID NO: 2291251 - RNA, 19 nt, Homo sapiens
  misc_RNA (1)...(19): siRNA sense strand
ccuaaagaauacaggacug

SEQ ID NO: 2291252 - RNA, 19 nt, Homo sapiens
  misc_RNA (1)...(19): siRNA sense strand
cccuugaccaugaaaguua

SEQ ID NO: 2291253 - RNA, 19 nt, Homo sapiens
  misc_RNA (1)...(19): siRNA sense strand
gaugaugcccagaggaacu

SEQ ID NO: 2291254 - RNA, 19 nt, Homo sapiens
  misc_RNA (1)...(19): siRNA sense strand
agcaagugacacaggaauu

SEQ ID NO: 2291255 - RNA, 19 nt, Homo sapiens
  misc_RNA (1)...(19): siRNA sense strand
auguguauugugaaggaaa

SEQ ID NO: 2291256 - RNA, 19 nt, Homo sapiens
  misc_RNA (1)...(19): siRNA sense strand
gcuacaaagcccagaacac

SEQ ID NO: 2291257 - RNA, 19 nt, Homo sapiens
  misc_RNA (1)...(19): siRNA sense strand
cagguuacauguuugggaa

SEQ ID NO: 2291258 - RNA, 19 nt, Homo sapiens
  misc_RNA (1)...(19): siRNA sense strand
cucaacaaggccaaggaaa

SEQ ID NO: 2291259 - RNA, 19 nt, Homo sapiens
  misc_RNA (1)...(19): siRNA sense strand
ugagaaggugccuggaaaa

SEQ ID NO: 2291260 - RNA, 19 nt, Homo sapiens
  misc_RNA (1)...(19): siRNA sense strand
ccauggaagaaaugaugau

SEQ ID NO: 2291261 - RNA, 19 nt, Homo sapiens
  misc_RNA (1)...(19): siRNA sense strand
gaaugggaguacagugcca

SEQ ID NO: 2291262 - RNA, 19 nt, Homo sapiens
  misc_RNA (1)...(19): siRNA sense strand
cagcaagugacacaggaau

SEQ ID NO: 2291263 - RNA, 19 nt, Homo sapiens
  misc_RNA (1)...(19): siRNA sense strand
cauuaggaccagcaaguga

SEQ ID NO: 2291264 - RNA, 19 nt, Homo sapiens
  misc_RNA (1)...(19): siRNA sense strand
guucaggccauggaagaaa

SEQ ID NO: 2291265 - RNA, 19 nt, Homo sapiens
  misc_RNA (1)...(19): siRNA sense strand
ugguaugccaggaagguca

SEQ ID NO: 2291266 - RNA, 19 nt, Homo sapiens
  misc_RNA (1)...(19): siRNA sense strand
cacaaaucaaggcagguua

SEQ ID NO: 2291267 - RNA, 19 nt, Homo sapiens
  misc_RNA (1)...(19): siRNA sense strand
ccagcaagugacacaggaa

SEQ ID NO: 2291268 - RNA, 19 nt, Homo sapiens
  misc_RNA (1)...(19): siRNA sense strand
cagaauaaaaggagggaaa

SEQ ID NO: 2291269 - RNA, 19 nt, Homo sapiens
  misc_RNA (1)...(19): siRNA sense strand
cagcaagaaguaacggaaa

SEQ ID NO: 2291270 - RNA, 19 nt, Homo sapiens
  misc_RNA (1)...(19): siRNA sense strand
gcauaggauuauuggacga

SEQ ID NO: 2291271 - RNA, 19 nt, Homo sapiens
  misc_RNA (1)...(19): siRNA sense strand
aguuuaugguugcaggaaa

SEQ ID NO: 2291272 - RNA, 19 nt, Homo sapiens
  misc_RNA (1)...(19): siRNA sense strand
uuagauaagaagaggauca

SEQ ID NO: 2291273 - RNA, 19 nt, Homo sapiens
  misc_RNA (1)...(19): siRNA sense strand
gauuauuggacgaggagga

SEQ ID NO: 2291274 - RNA, 19 nt, Homo sapiens
  misc_RNA (1)...(19): siRNA sense strand
aaugaaacaaggagaaaca

SEQ ID NO: 2291275 - RNA, 19 nt, Homo sapiens
  misc_RNA (1)...(19): siRNA sense strand
agccauacauagaagaaau

SEQ ID NO: 2291276 - RNA, 19 nt, Homo sapiens
  misc_RNA (1)...(19): siRNA sense strand
caguaaaugcagacacaga

SEQ ID NO: 2291277 - RNA, 19 nt, Homo sapiens
  misc_RNA (1)...(19): siRNA sense strand
aaauagacuugaauggaga

SEQ ID NO: 2291278 - RNA, 19 nt, Homo sapiens
  misc_RNA (1)...(19): siRNA sense strand
caaaaugaaacaaggagaa

SEQ ID NO: 2291279 - RNA, 19 nt, Homo sapiens
  misc_RNA (1)...(19): siRNA sense strand
agaggauaccaaagggauu

SEQ ID NO: 2291280 - RNA, 19 nt, Homo sapiens
  misc_RNA (1)...(19): siRNA sense strand
cggcaaaauuuacugacaa

SEQ ID NO: 2291281 - RNA, 19 nt, Homo sapiens
  misc_RNA (1)...(19): siRNA sense strand
uggccauggagaagagcaa

SEQ ID NO: 2291282 - RNA, 19 nt, Homo sapiens
  misc_RNA (1)...(19): siRNA sense strand
ggccaggaagagagcuaaa

SEQ ID NO: 2291283 - RNA, 19 nt, Homo sapiens
  misc_RNA (1)...(19): siRNA sense strand
gaggccaggaagagagcua

SEQ ID NO: 2291284 - RNA, 19 nt, Homo sapiens
  misc_RNA (1)...(19): siRNA sense strand
caacauaaaaccaaagaca

SEQ ID NO: 2291285 - RNA, 19 nt, Homo sapiens
  misc_RNA (1)...(19): siRNA sense strand
gcagcaagaaguaacggaa

SEQ ID NO: 2291286 - RNA, 19 nt, Homo sapiens
  misc_RNA (1)...(19): siRNA sense strand
aaaugcagacacagauaaa

SEQ ID NO: 2291287 - RNA, 19 nt, Homo sapiens
  misc_RNA (1)...(19): siRNA sense strand
gaguuugugcaguggaaga

SEQ ID NO: 2291288 - RNA, 19 nt, Homo sapiens
  misc_RNA (1)...(19): siRNA sense strand
aguaccuugcagagagaaa

SEQ ID NO: 2291289 - RNA, 19 nt, Homo sapiens
  misc_RNA (1)...(19): siRNA sense strand
ugcagagagaaaugaaaua

SEQ ID NO: 2291290 - RNA, 19 nt, Homo sapiens
  misc_RNA (1)...(19): siRNA sense strand
guuuaugguugcaggaaag

SEQ ID NO: 2291291 - RNA, 19 nt, Homo sapiens
  misc_RNA (1)...(19): siRNA sense strand
gcaagaaguaacggaaaca

SEQ ID NO: 2291292 - RNA, 19 nt, Homo sapiens
  misc_RNA (1)...(19): siRNA sense strand
ggcaaaauuuacugacaau

SEQ ID NO: 2291293 - RNA, 19 nt, Homo sapiens
  misc_RNA (1)...(19): siRNA sense strand
gguuuguugucuacagaga

SEQ ID NO: 2291294 - RNA, 19 nt, Homo sapiens
  misc_RNA (1)...(19): siRNA sense strand
gugcaguggaagaaagagu

SEQ ID NO: 2291295 - RNA, 19 nt, Homo sapiens
  misc_RNA (1)...(19): siRNA sense strand
cugaaaucauucugggucu

SEQ ID NO: 2291296 - RNA, 19 nt, Homo sapiens
  misc_RNA (1)...(19): siRNA sense strand
ggaugaacauggacacgca

SEQ ID NO: 2291297 - RNA, 19 nt, Homo sapiens
  misc_RNA (1)...(19): siRNA sense strand
gaauaaaaggagggaaaca

SEQ ID NO: 2291298 - RNA, 19 nt, Homo sapiens
  misc_RNA (1)...(19): siRNA sense strand
uaccaaagggauuaagcua

SEQ ID NO: 2291299 - RNA, 19 nt, Homo sapiens
  misc_RNA (1)...(19): siRNA sense strand
ugaauggagaggagaggga

SEQ ID NO: 2291300 - RNA, 19 nt, Homo sapiens
  misc_RNA (1)...(19): siRNA sense strand
agaaauuugugaaagccuu

SEQ ID NO: 2291301 - RNA, 19 nt, Homo sapiens
  misc_RNA (1)...(19): siRNA sense strand
cugagaaggagaugcgguu

SEQ ID NO: 2291302 - RNA, 19 nt, Homo sapiens
  misc_RNA (1)...(19): siRNA sense strand
aguggaagaaagaguugaa

SEQ ID NO: 2291303 - RNA, 19 nt, Homo sapiens
  misc_RNA (1)...(19): siRNA sense strand
ucucaaagcaagcuguaga

SEQ ID NO: 2291304 - RNA, 19 nt, Homo sapiens
  misc_RNA (1)...(19): siRNA sense strand
agcaugaaauugaccgaau

SEQ ID NO: 2291305 - RNA, 19 nt, Homo sapiens
  misc_RNA (1)...(19): siRNA sense strand
ugacaauggaacagauucu

SEQ ID NO: 2291306 - RNA, 19 nt, Homo sapiens
  misc_RNA (1)...(19): siRNA sense strand
agcaguaaaugcagacaca

SEQ ID NO: 2291307 - RNA, 19 nt, Homo sapiens
  misc_RNA (1)...(19): siRNA sense strand
accaaagacaagcaugaaa

SEQ ID NO: 2291308 - RNA, 19 nt, Homo sapiens
  misc_RNA (1)...(19): siRNA sense strand
aggugaaguuuuaugaaga

SEQ ID NO: 2291309 - RNA, 19 nt, Homo sapiens
  misc_RNA (1)...(19): siRNA sense strand
guucagugugcauaggauu

SEQ ID NO: 2291310 - RNA, 19 nt, Homo sapiens
  misc_RNA (1)...(19): siRNA sense strand
gaagaggaucaaaaugaaa

SEQ ID NO: 2291311 - RNA, 19 nt, Homo sapiens
  misc_RNA (1)...(19): siRNA sense strand
uugcagagagaaaugaaau

SEQ ID NO: 2291312 - RNA, 19 nt, Homo sapiens
  misc_RNA (1)...(19): siRNA sense strand
ccuacaucaugaaggaacu

SEQ ID NO: 2291313 - RNA, 19 nt, Homo sapiens
  misc_RNA (1)...(19): siRNA sense strand
ugacaaguucacuagauuu

SEQ ID NO: 2291314 - RNA, 19 nt, Homo sapiens
  misc_RNA (1)...(19): siRNA sense strand
gcaaauauucucuuggaug

SEQ ID NO: 2291315 - RNA, 19 nt, Homo sapiens
  misc_RNA (1)...(19): siRNA sense strand
gcucacaggaaguaaaaga

SEQ ID NO: 2291316 - RNA, 19 nt, Homo sapiens
  misc_RNA (1)...(19): siRNA sense strand
aauggagaggagagggaga

SEQ ID NO: 2291317 - RNA, 19 nt, Homo sapiens
  misc_RNA (1)...(19): siRNA sense strand
cuuccauaccccagauaaa

SEQ ID NO: 2291318 - RNA, 19 nt, Homo sapiens
  misc_RNA (1)...(19): siRNA sense strand
aaagaagccucaugcgagu

SEQ ID NO: 2291319 - RNA, 19 nt, Homo sapiens
  misc_RNA (1)...(19): siRNA sense strand
agggcuugcuucagcgaga

SEQ ID NO: 2291320 - RNA, 19 nt, Homo sapiens
  misc_RNA (1)...(19): siRNA sense strand
ugaugaagaggauaccaaa

SEQ ID NO: 2291321 - RNA, 19 nt, Homo sapiens
  misc_RNA (1)...(19): siRNA sense strand
cggagaagaacguggugua

SEQ ID NO: 2291322 - RNA, 19 nt, Homo sapiens
  misc_RNA (1)...(19): siRNA sense strand
aggaagucaucguggccaa

SEQ ID NO: 2291323 - RNA, 19 nt, Homo sapiens
  misc_RNA (1)...(19): siRNA sense strand
ucaagaagcaggaggagga

SEQ ID NO: 2291324 - RNA, 19 nt, Homo sapiens
  misc_RNA (1)...(19): siRNA sense strand
accugaagcugcugggcaa

SEQ ID NO: 2291325 - RNA, 19 nt, Homo sapiens
  misc_RNA (1)...(19): siRNA sense strand
gagcgggaggaguggacaa

SEQ ID NO: 2291326 - RNA, 19 nt, Homo sapiens
  misc_RNA (1)...(19): siRNA sense strand
cuucuauggcgcugagauu

SEQ ID NO: 2291327 - RNA, 19 nt, Homo sapiens
  misc_RNA (1)...(19): siRNA sense strand
ccaaggagaucaugcagca

SEQ ID NO: 2291328 - RNA, 19 nt, Homo sapiens
  misc_RNA (1)...(19): siRNA sense strand
cugaagagauggagguguc

SEQ ID NO: 2291329 - RNA, 19 nt, Homo sapiens
  misc_RNA (1)...(19): siRNA sense strand
ccgaggacgccaaggagau

SEQ ID NO: 2291330 - RNA, 19 nt, Homo sapiens
  misc_RNA (1)...(19): siRNA sense strand
aggaggaggagauggacuu

SEQ ID NO: 2291331 - RNA, 19 nt, Homo sapiens
  misc_RNA (1)...(19): siRNA sense strand
aggaggaggaggagaugga

SEQ ID NO: 2291332 - RNA, 19 nt, Homo sapiens
  misc_RNA (1)...(19): siRNA sense strand
agaagcaggaggaggagga

SEQ ID NO: 2291333 - RNA, 19 nt, Homo sapiens
  misc_RNA (1)...(19): siRNA sense strand
gcaagggcacuuucggcaa

SEQ ID NO: 2291334 - RNA, 19 nt, Homo sapiens
  misc_RNA (1)...(19): siRNA sense strand
agcaggaggaggaggagau

SEQ ID NO: 2291335 - RNA, 19 nt, Homo sapiens
  misc_RNA (1)...(19): siRNA sense strand
cugaaguacucuuuccaga

SEQ ID NO: 2291336 - RNA, 19 nt, Homo sapiens
  misc_RNA (1)...(19): siRNA sense strand
cagaggaagcacauagaaa

SEQ ID NO: 2291337 - RNA, 19 nt, Homo sapiens
  misc_RNA (1)...(19): siRNA sense strand
uggcaagcguuuaaagcaa

SEQ ID NO: 2291338 - RNA, 19 nt, Homo sapiens
  misc_RNA (1)...(19): siRNA sense strand
gcuacuagaacuucggaaa

SEQ ID NO: 2291339 - RNA, 19 nt, Homo sapiens
  misc_RNA (1)...(19): siRNA sense strand
ggaugauaugcaugauaaa

SEQ ID NO: 2291340 - RNA, 19 nt, Homo sapiens
  misc_RNA (1)...(19): siRNA sense strand
ucaaaguagaagaaggaau

SEQ ID NO: 2291341 - RNA, 19 nt, Homo sapiens
  misc_RNA (1)...(19): siRNA sense strand
ucugaaagccauagcaaga

SEQ ID NO: 2291342 - RNA, 19 nt, Homo sapiens
  misc_RNA (1)...(19): siRNA sense strand
uagccaauguagaagaaau

SEQ ID NO: 2291343 - RNA, 19 nt, Homo sapiens
  misc_RNA (1)...(19): siRNA sense strand
cagaaaaguuacaaagcuu

SEQ ID NO: 2291344 - RNA, 19 nt, Homo sapiens
  misc_RNA (1)...(19): siRNA sense strand
gguaugugcacucgagaau

SEQ ID NO: 2291345 - RNA, 19 nt, Homo sapiens
  misc_RNA (1)...(19): siRNA sense strand
cgugaaaagcauuguggaa

SEQ ID NO: 2291346 - RNA, 19 nt, Homo sapiens
  misc_RNA (1)...(19): siRNA sense strand
gugaaauggaccagaucga

SEQ ID NO: 2291347 - RNA, 19 nt, Homo sapiens
  misc_RNA (1)...(19): siRNA sense strand
gguguaugccacugcuaaa

SEQ ID NO: 2291348 - RNA, 19 nt, Homo sapiens
  misc_RNA (1)...(19): siRNA sense strand
ugacauugagugaagaaaa

SEQ ID NO: 2291349 - RNA, 19 nt, Homo sapiens
  misc_RNA (1)...(19): siRNA sense strand
gcugcagagaacacagaaa

SEQ ID NO: 2291350 - RNA, 19 nt, Homo sapiens
  misc_RNA (1)...(19): siRNA sense strand
agccaauguagaagaaauu

SEQ ID NO: 2291351 - RNA, 19 nt, Homo sapiens
  misc_RNA (1)...(19): siRNA sense strand
gggucuuugaugaaguaaa

SEQ ID NO: 2291352 - RNA, 19 nt, Homo sapiens
  misc_RNA (1)...(19): siRNA sense strand
caaacugguggcagaggaa

SEQ ID NO: 2291353 - RNA, 19 nt, Homo sapiens
  misc_RNA (1)...(19): siRNA sense strand
ugcagagaacacagaaaua

SEQ ID NO: 2291354 - RNA, 19 nt, Homo sapiens
  misc_RNA (1)...(19): siRNA sense strand
gacuaauuaugguggcuau

SEQ ID NO: 2291355 - RNA, 19 nt, Homo sapiens
  misc_RNA (1)...(19): siRNA sense strand
gugaaaagcauuguggaaa

SEQ ID NO: 2291356 - RNA, 19 nt, Homo sapiens
  misc_RNA (1)...(19): siRNA sense strand
agaauggagcuaagguaga

SEQ ID NO: 2291357 - RNA, 19 nt, Homo sapiens
  misc_RNA (1)...(19): siRNA sense strand
aagagaaggaggaugggau

SEQ ID NO: 2291358 - RNA, 19 nt, Homo sapiens
  misc_RNA (1)...(19): siRNA sense strand
uggaaauaccacacacauu

SEQ ID NO: 2291359 - RNA, 19 nt, Homo sapiens
  misc_RNA (1)...(19): siRNA sense strand
cugcagagaacacagaaau

SEQ ID NO: 2291360 - RNA, 19 nt, Homo sapiens
  misc_RNA (1)...(19): siRNA sense strand
caagaaucugaaagccaua

SEQ ID NO: 2291361 - RNA, 19 nt, Homo sapiens
  misc_RNA (1)...(19): siRNA sense strand
uauuacaguuugaugguga

SEQ ID NO: 2291362 - RNA, 19 nt, Homo sapiens
  misc_RNA (1)...(19): siRNA sense strand
ccaaaaugcagcagagacu

SEQ ID NO: 2291363 - RNA, 19 nt, Homo sapiens
  misc_RNA (1)...(19): siRNA sense strand
gguagaaaugaaacaacuu

SEQ ID NO: 2291364 - RNA, 19 nt, Homo sapiens
  misc_RNA (1)...(19): siRNA sense strand
guuacaaagcuuuagcaga

SEQ ID NO: 2291365 - RNA, 19 nt, Homo sapiens
  misc_RNA (1)...(19): siRNA sense strand
ugaugucgaaggaaagaua

SEQ ID NO: 2291366 - RNA, 19 nt, Homo sapiens
  misc_RNA (1)...(19): siRNA sense strand
augcagauuucuucaaaca

SEQ ID NO: 2291367 - RNA, 19 nt, Homo sapiens
  misc_RNA (1)...(19): siRNA sense strand
uuggcaaacugguggcaga

SEQ ID NO: 2291368 - RNA, 19 nt, Homo sapiens
  misc_RNA (1)...(19): siRNA sense strand
agaggaagcacauagaaaa

SEQ ID NO: 2291369 - RNA, 19 nt, Homo sapiens
  misc_RNA (1)...(19): siRNA sense strand
acagaggacauaagguaga

SEQ ID NO: 2291370 - RNA, 19 nt, Homo sapiens
  misc_RNA (1)...(19): siRNA sense strand
gguacaucaugauagaaca

SEQ ID NO: 2291371 - RNA, 19 nt, Homo sapiens
  misc_RNA (1)...(19): siRNA sense strand
auauaugucucuuggaagu

SEQ ID NO: 2291372 - RNA, 19 nt, Homo sapiens
  misc_RNA (1)...(19): siRNA sense strand
agguagaaaugaaacaacu

SEQ ID NO: 2291373 - RNA, 19 nt, Homo sapiens
  misc_RNA (1)...(19): siRNA sense strand
cauaauuacaccagcagga

SEQ ID NO: 2291374 - RNA, 19 nt, Homo sapiens
  misc_RNA (1)...(19): siRNA sense strand
caaacagcuacuagaacuu

SEQ ID NO: 2291375 - RNA, 19 nt, Homo sapiens
  misc_RNA (1)...(19): siRNA sense strand
gaauuauagccaauguaga

SEQ ID NO: 2291376 - RNA, 19 nt, Homo sapiens
  misc_RNA (1)...(19): siRNA sense strand
aauuacaccagcaggagaa

SEQ ID NO: 2291377 - RNA, 19 nt, Homo sapiens
  misc_RNA (1)...(19): siRNA sense strand
accgagaccauuugugaaa

SEQ ID NO: 2291378 - RNA, 19 nt, Homo sapiens
  misc_RNA (1)...(19): siRNA sense strand
cuacuagaacuucggaaaa

SEQ ID NO: 2291379 - RNA, 19 nt, Homo sapiens
  misc_RNA (1)...(19): siRNA sense strand
cauacaaagaggucacuga

SEQ ID NO: 2291380 - RNA, 19 nt, Homo sapiens
  misc_RNA (1)...(19): siRNA sense strand
aguagaagaaggaaugcau

SEQ ID NO: 2291381 - RNA, 19 nt, Homo sapiens
  misc_RNA (1)...(19): siRNA sense strand
ggaacguauccuacacaau

SEQ ID NO: 2291382 - RNA, 19 nt, Homo sapiens
  misc_RNA (1)...(19): siRNA sense strand
aguucaaagagaaggagga

SEQ ID NO: 2291383 - RNA, 19 nt, Homo sapiens
  misc_RNA (1)...(19): siRNA sense strand
caauaagguaccuggaaug

SEQ ID NO: 2291384 - RNA, 19 nt, Homo sapiens
  misc_RNA (1)...(19): siRNA sense strand
guggaugauaugcaugaua

SEQ ID NO: 2291385 - RNA, 19 nt, Homo sapiens
  misc_RNA (1)...(19): siRNA sense strand
agaccuucucuuuggaaau

SEQ ID NO: 2291386 - RNA, 19 nt, Homo sapiens
  misc_RNA (1)...(19): siRNA sense strand
cuucaaacagcuacuagaa

SEQ ID NO: 2291387 - RNA, 19 nt, Homo sapiens
  misc_RNA (1)...(19): siRNA sense strand
cuucgucaacagugcaaua

SEQ ID NO: 2291388 - RNA, 19 nt, Homo sapiens
  misc_RNA (1)...(19): siRNA sense strand
cgguaugugcacucgagaa

SEQ ID NO: 2291389 - RNA, 19 nt, Homo sapiens
  misc_RNA (1)...(19): siRNA sense strand
cucgagaauuauagccaau

SEQ ID NO: 2291390 - RNA, 19 nt, Homo sapiens
  misc_RNA (1)...(19): siRNA sense strand
cuauaaaccaccuccucaa

SEQ ID NO: 2291391 - RNA, 19 nt, Homo sapiens
  misc_RNA (1)...(19): siRNA sense strand
agcagcugaucgagugaaa

SEQ ID NO: 2291392 - RNA, 19 nt, Homo sapiens
  misc_RNA (1)...(19): siRNA sense strand
agguuggcgcuuugaacaa

SEQ ID NO: 2291393 - RNA, 19 nt, Homo sapiens
  misc_RNA (1)...(19): siRNA sense strand
gcaaacugguggcagagga

SEQ ID NO: 2291394 - RNA, 19 nt, Homo sapiens
  misc_RNA (1)...(19): siRNA sense strand
uguagaagaaauugccuuu

SEQ ID NO: 2291395 - RNA, 19 nt, Homo sapiens
  misc_RNA (1)...(19): siRNA sense strand
cuuugcagauggugaggau

SEQ ID NO: 2291396 - RNA, 19 nt, Homo sapiens
  misc_RNA (1)...(19): siRNA sense strand
gugguggcuuccaggcuaa

SEQ ID NO: 2291397 - RNA, 19 nt, Homo sapiens
  misc_RNA (1)...(19): siRNA sense strand
agauauuucaggcugcaaa

SEQ ID NO: 2291398 - RNA, 19 nt, Homo sapiens
  misc_RNA (1)...(19): siRNA sense strand
gcuuugaacaauuggauac

SEQ ID NO: 2291399 - RNA, 19 nt, Homo sapiens
  misc_RNA (1)...(19): siRNA sense strand
cuggacaggaagagaauua

SEQ ID NO: 2291400 - RNA, 19 nt, Homo sapiens
  misc_RNA (1)...(19): siRNA sense strand
aaagaauguaugaggagaa

SEQ ID NO: 2291401 - RNA, 19 nt, Homo sapiens
  misc_RNA (1)...(19): siRNA sense strand
gagaagugcuggaagcuca

SEQ ID NO: 2291402 - RNA, 19 nt, Homo sapiens
  misc_RNA (1)...(19): siRNA sense strand
gggaaaagaaagaauguau

SEQ ID NO: 2291403 - RNA, 19 nt, Homo sapiens
  misc_RNA (1)...(19): siRNA sense strand
uggacaagguggugcgguu

SEQ ID NO: 2291404 - RNA, 19 nt, Homo sapiens
  misc_RNA (1)...(19): siRNA sense strand
uggcagaacuaaaaggaau

SEQ ID NO: 2291405 - RNA, 19 nt, Homo sapiens
  misc_RNA (1)...(19): siRNA sense strand
ccacaugcuggcagaacua

SEQ ID NO: 2291406 - RNA, 19 nt, Homo sapiens
  misc_RNA (1)...(19): siRNA sense strand
cgucugggucagugggcua

SEQ ID NO: 2291407 - RNA, 19 nt, Homo sapiens
  misc_RNA (1)...(19): siRNA sense strand
ucaaagugacccaggaaca

SEQ ID NO: 2291408 - RNA, 19 nt, Homo sapiens
  misc_RNA (1)...(19): siRNA sense strand
auggagaauuugaugaaga

SEQ ID NO: 2291409 - RNA, 19 nt, Homo sapiens
  misc_RNA (1)...(19): siRNA sense strand
gggagcaaugugaggguga

SEQ ID NO: 2291410 - RNA, 19 nt, Homo sapiens
  misc_RNA (1)...(19): siRNA sense strand
gaaucaacucugaacggaa

SEQ ID NO: 2291411 - RNA, 19 nt, Homo sapiens
  misc_RNA (1)...(19): siRNA sense strand
agucagaaaaugaggauga

SEQ ID NO: 2291412 - RNA, 19 nt, Homo sapiens
  misc_RNA (1)...(19): siRNA sense strand
ggacgguggacaagaagau

SEQ ID NO: 2291413 - RNA, 19 nt, Homo sapiens
  misc_RNA (1)...(19): siRNA sense strand
ugucaagauaugaggggaa

SEQ ID NO: 2291414 - RNA, 19 nt, Homo sapiens
  misc_RNA (1)...(19): siRNA sense strand
cgaugugaaauuaaaggua

SEQ ID NO: 2291415 - RNA, 19 nt, Homo sapiens
  misc_RNA (1)...(19): siRNA sense strand
auuaguagguccagagugu

SEQ ID NO: 2291416 - RNA, 19 nt, Homo sapiens
  misc_RNA (1)...(19): siRNA sense strand
gaaagaauguaugaggaga

SEQ ID NO: 2291417 - RNA, 19 nt, Homo sapiens
  misc_RNA (1)...(19): siRNA sense strand
guuugauccuagagggagu

SEQ ID NO: 2291418 - RNA, 19 nt, Homo sapiens
  misc_RNA (1)...(19): siRNA sense strand
aagaaagaauguaugagga

SEQ ID NO: 2291419 - RNA, 19 nt, Homo sapiens
  misc_RNA (1)...(19): siRNA sense strand
guucugggcuggaggccau

SEQ ID NO: 2291420 - RNA, 19 nt, Homo sapiens
  misc_RNA (1)...(19): siRNA sense strand
aguuauaucuuccggcuga

SEQ ID NO: 2291421 - RNA, 19 nt, Homo sapiens
  misc_RNA (1)...(19): siRNA sense strand
gaggcaaggagcagaggga

SEQ ID NO: 2291422 - RNA, 19 nt, Homo sapiens
  misc_RNA (1)...(19): siRNA sense strand
caggaagagaauuaaccaa

SEQ ID NO: 2291423 - RNA, 19 nt, Homo sapiens
  misc_RNA (1)...(19): siRNA sense strand
gauugauagcuguacguau

SEQ ID NO: 2291424 - RNA, 19 nt, Homo sapiens
  misc_RNA (1)...(19): siRNA sense strand
gggagacacauuucggauu

SEQ ID NO: 2291425 - RNA, 19 nt, Homo sapiens
  misc_RNA (1)...(19): siRNA sense strand
ugacguaugacgaagugaa

SEQ ID NO: 2291426 - RNA, 19 nt, Homo sapiens
  misc_RNA (1)...(19): siRNA sense strand
ugaugaugaugaugaacga

SEQ ID NO: 2291427 - RNA, 19 nt, Homo sapiens
  misc_RNA (1)...(19): siRNA sense strand
cuaccaggacauccagaaa

SEQ ID NO: 2291428 - RNA, 19 nt, Homo sapiens
  misc_RNA (1)...(19): siRNA sense strand
ggcaggaaucagaagguca

SEQ ID NO: 2291429 - RNA, 19 nt, Homo sapiens
  misc_RNA (1)...(19): siRNA sense strand
acguaugaagcaauguaua

SEQ ID NO: 2291430 - RNA, 19 nt, Homo sapiens
  misc_RNA (1)...(19): siRNA sense strand
gacguaugacgaagugaaa

SEQ ID NO: 2291431 - RNA, 19 nt, Homo sapiens
  misc_RNA (1)...(19): siRNA sense strand
cgccgaacucucucagaua

SEQ ID NO: 2291432 - RNA, 19 nt, Homo sapiens
  misc_RNA (1)...(19): siRNA sense strand
ucggauuacuaaagcagau

SEQ ID NO: 2291433 - RNA, 19 nt, Homo sapiens
  misc_RNA (1)...(19): siRNA sense strand
aagaauguaugaggagaau

SEQ ID NO: 2291434 - RNA, 19 nt, Homo sapiens
  misc_RNA (1)...(19): siRNA sense strand
cugcggaauuuuggagaaa

SEQ ID NO: 2291435 - RNA, 19 nt, Homo sapiens
  misc_RNA (1)...(19): siRNA sense strand
aagcuggcgcuaaagaaua

SEQ ID NO: 2291436 - RNA, 19 nt, Homo sapiens
  misc_RNA (1)...(19): siRNA sense strand
gauugauggcuucagggaa

SEQ ID NO: 2291437 - RNA, 19 nt, Homo sapiens
  misc_RNA (1)...(19): siRNA sense strand
uggucauugcccagaacaa

SEQ ID NO: 2291438 - RNA, 19 nt, Homo sapiens
  misc_RNA (1)...(19): siRNA sense strand
auggagacacuuggagaaa

SEQ ID NO: 2291439 - RNA, 19 nt, Homo sapiens
  misc_RNA (1)...(19): siRNA sense strand
ggagaauuugaugaagaaa

SEQ ID NO: 2291440 - RNA, 19 nt, Homo sapiens
  misc_RNA (1)...(19): siRNA sense strand
gggaacauucuccagacaa

SEQ ID NO: 2291441 - RNA, 19 nt, Homo sapiens
  misc_RNA (1)...(19): siRNA sense strand
ggucccgaggagucagaaa

SEQ ID NO: 2291442 - RNA, 19 nt, Homo sapiens
  misc_RNA (1)...(19): siRNA sense strand
gcccagaacaacaucgaga

SEQ ID NO: 2291443 - RNA, 19 nt, Homo sapiens
  misc_RNA (1)...(19): siRNA sense strand
ccguuugauccuagaggga

SEQ ID NO: 2291444 - RNA, 19 nt, Homo sapiens
  misc_RNA (1)...(19): siRNA sense strand
aaaaugaggaugaugggua

SEQ ID NO: 2291445 - RNA, 19 nt, Homo sapiens
  misc_RNA (1)...(19): siRNA sense strand
ucaaggagcuggagcgcgu

SEQ ID NO: 2291446 - RNA, 19 nt, Homo sapiens
  misc_RNA (1)...(19): siRNA sense strand
ccuacaaguucuucccaga

SEQ ID NO: 2291447 - RNA, 19 nt, Homo sapiens
  misc_RNA (1)...(19): siRNA sense strand
aagugaaggaguugggaga

SEQ ID NO: 2291448 - RNA, 19 nt, Homo sapiens
  misc_RNA (1)...(19): siRNA sense strand
ccacagaagcgacggggaa

SEQ ID NO: 2291449 - RNA, 19 nt, Homo sapiens
  misc_RNA (1)...(19): siRNA sense strand
cggugaaagugcgggaaca

SEQ ID NO: 2291450 - RNA, 19 nt, Homo sapiens
  misc_RNA (1)...(19): siRNA sense strand
gcagaagcagagacggcua

SEQ ID NO: 2291451 - RNA, 19 nt, Homo sapiens
  misc_RNA (1)...(19): siRNA sense strand
cagcgaugauggcgcaaaa

SEQ ID NO: 2291452 - RNA, 19 nt, Homo sapiens
  misc_RNA (1)...(19): siRNA sense strand
agccagugcaggaggaaaa

SEQ ID NO: 2291453 - RNA, 19 nt, Homo sapiens
  misc_RNA (1)...(19): siRNA sense strand
ccuccagccuccugcaaaa

SEQ ID NO: 2291454 - RNA, 19 nt, Homo sapiens
  misc_RNA (1)...(19): siRNA sense strand
aagagugggcugaagugaa

SEQ ID NO: 2291455 - RNA, 19 nt, Homo sapiens
  misc_RNA (1)...(19): siRNA sense strand
caggaggaaaacagcaaaa

SEQ ID NO: 2291456 - RNA, 19 nt, Homo sapiens
  misc_RNA (1)...(19): siRNA sense strand
ggacauuguagaaguggca

SEQ ID NO: 2291457 - RNA, 19 nt, Homo sapiens
  misc_RNA (1)...(19): siRNA sense strand
ccaauaucacaucgggcaa

SEQ ID NO: 2291458 - RNA, 19 nt, Homo sapiens
  misc_RNA (1)...(19): siRNA sense strand
ggcaagauccggagccaga

SEQ ID NO: 2291459 - RNA, 19 nt, Homo sapiens
  misc_RNA (1)...(19): siRNA sense strand
ucaagcagcugaugcggaa

SEQ ID NO: 2291460 - RNA, 19 nt, Homo sapiens
  misc_RNA (1)...(19): siRNA sense strand
cugugaaccaggacaagaa

SEQ ID NO: 2291461 - RNA, 19 nt, Homo sapiens
  misc_RNA (1)...(19): siRNA sense strand
uggacuacaacgaggccaa

SEQ ID NO: 2291462 - RNA, 19 nt, Homo sapiens
  misc_RNA (1)...(19): siRNA sense strand
uggaacaguuugaggaccu

SEQ ID NO: 2291463 - RNA, 19 nt, Homo sapiens
  misc_RNA (1)...(19): siRNA sense strand
cugcaguccuuuaacgaga

SEQ ID NO: 2291464 - RNA, 19 nt, Homo sapiens
  misc_RNA (1)...(19): siRNA sense strand
acaacgaggccaagggugu

SEQ ID NO: 2291465 - RNA, 19 nt, Homo sapiens
  misc_RNA (1)...(19): siRNA sense strand
gggacaaagugccugcuga

SEQ ID NO: 2291466 - RNA, 19 nt, Homo sapiens
  misc_RNA (1)...(19): siRNA sense strand
ugaaggaguaugagccuga

SEQ ID NO: 2291467 - RNA, 19 nt, Homo sapiens
  misc_RNA (1)...(19): siRNA sense strand
ggaaggaggacauggagcu

SEQ ID NO: 2291468 - RNA, 19 nt, Homo sapiens
  misc_RNA (1)...(19): siRNA sense strand
ugaagugcuccgaagacaa

SEQ ID NO: 2291469 - RNA, 19 nt, Homo sapiens
  misc_RNA (1)...(19): siRNA sense strand
cggcagagauggugcuguc

SEQ ID NO: 2291470 - RNA, 19 nt, Homo sapiens
  misc_RNA (1)...(19): siRNA sense strand
acuucuaccagcugaggaa

SEQ ID NO: 2291471 - RNA, 19 nt, Homo sapiens
  misc_RNA (1)...(19): siRNA sense strand
acacagaggccaucccaga

SEQ ID NO: 2291472 - RNA, 19 nt, Homo sapiens
  misc_RNA (1)...(19): siRNA sense strand
ccugaagaaagcagagauc

SEQ ID NO: 2291473 - RNA, 19 nt, Homo sapiens
  misc_RNA (1)...(19): siRNA sense strand
ggacauuguagaaguggca

SEQ ID NO: 2291474 - RNA, 19 nt, Homo sapiens
  misc_RNA (1)...(19): siRNA sense strand
ccaauaucacaucgggcaa

SEQ ID NO: 2291475 - RNA, 19 nt, Homo sapiens
  misc_RNA (1)...(19): siRNA sense strand
ggcaagauccggagccaga

SEQ ID NO: 2291476 - RNA, 19 nt, Homo sapiens
  misc_RNA (1)...(19): siRNA sense strand
ucaagcagcugaugcggaa

SEQ ID NO: 2291477 - RNA, 19 nt, Homo sapiens
  misc_RNA (1)...(19): siRNA sense strand
cugugaaccaggacaagaa

SEQ ID NO: 2291478 - RNA, 19 nt, Homo sapiens
  misc_RNA (1)...(19): siRNA sense strand
uggacuacaacgaggccaa

SEQ ID NO: 2291479 - RNA, 19 nt, Homo sapiens
  misc_RNA (1)...(19): siRNA sense strand
uggaacaguuugaggaccu

SEQ ID NO: 2291480 - RNA, 19 nt, Homo sapiens
  misc_RNA (1)...(19): siRNA sense strand
cugcaguccuuuaacgaga

SEQ ID NO: 2291481 - RNA, 19 nt, Homo sapiens
  misc_RNA (1)...(19): siRNA sense strand
acaacgaggccaagggugu

SEQ ID NO: 2291482 - RNA, 19 nt, Homo sapiens
  misc_RNA (1)...(19): siRNA sense strand
gggacaaagugccugcuga

SEQ ID NO: 2291483 - RNA, 19 nt, Homo sapiens
  misc_RNA (1)...(19): siRNA sense strand
ugaaggaguaugagccuga

SEQ ID NO: 2291484 - RNA, 19 nt, Homo sapiens
  misc_RNA (1)...(19): siRNA sense strand
ggaaggaggacauggagcu

SEQ ID NO: 2291485 - RNA, 19 nt, Homo sapiens
  misc_RNA (1)...(19): siRNA sense strand
ugaagugcuccgaagacaa

SEQ ID NO: 2291486 - RNA, 19 nt, Homo sapiens
  misc_RNA (1)...(19): siRNA sense strand
cggcagagauggugcuguc

SEQ ID NO: 2291487 - RNA, 19 nt, Homo sapiens
  misc_RNA (1)...(19): siRNA sense strand
acuucuaccagcugaggaa

SEQ ID NO: 2291488 - RNA, 19 nt, Homo sapiens
  misc_RNA (1)...(19): siRNA sense strand
acacagaggccaucccaga

SEQ ID NO: 2291489 - RNA, 19 nt, Homo sapiens
  misc_RNA (1)...(19): siRNA sense strand
ccugaagaaagcagagauc

SEQ ID NO: 2291490 - RNA, 19 nt, Homo sapiens
  misc_RNA (1)...(19): siRNA sense strand
ggacauuguagaaguggca

SEQ ID NO: 2291491 - RNA, 19 nt, Homo sapiens
  misc_RNA (1)...(19): siRNA sense strand
ccaauaucacaucgggcaa

SEQ ID NO: 2291492 - RNA, 19 nt, Homo sapiens
  misc_RNA (1)...(19): siRNA sense strand
ggcaagauccggagccaga

SEQ ID NO: 2291493 - RNA, 19 nt, Homo sapiens
  misc_RNA (1)...(19): siRNA sense strand
ucaagcagcugaugcggaa

SEQ ID NO: 2291494 - RNA, 19 nt, Homo sapiens
  misc_RNA (1)...(19): siRNA sense strand
cugugaaccaggacaagaa

SEQ ID NO: 2291495 - RNA, 19 nt, Homo sapiens
  misc_RNA (1)...(19): siRNA sense strand
uggacuacaacgaggccaa

SEQ ID NO: 2291496 - RNA, 19 nt, Homo sapiens
  misc_RNA (1)...(19): siRNA sense strand
uggaacaguuugaggaccu

SEQ ID NO: 2291497 - RNA, 19 nt, Homo sapiens
  misc_RNA (1)...(19): siRNA sense strand
cugcaguccuuuaacgaga

SEQ ID NO: 2291498 - RNA, 19 nt, Homo sapiens
  misc_RNA (1)...(19): siRNA sense strand
acaacgaggccaagggugu

SEQ ID NO: 2291499 - RNA, 19 nt, Homo sapiens
  misc_RNA (1)...(19): siRNA sense strand
gggacaaagugccugcuga

SEQ ID NO: 2291500 - RNA, 19 nt, Homo sapiens
  misc_RNA (1)...(19): siRNA sense strand
ugaaggaguaugagccuga

SEQ ID NO: 2291501 - RNA, 19 nt, Homo sapiens
  misc_RNA (1)...(19): siRNA sense strand
ggaaggaggacauggagcu

SEQ ID NO: 2291502 - RNA, 19 nt, Homo sapiens
  misc_RNA (1)...(19): siRNA sense strand
ugaagugcuccgaagacaa

SEQ ID NO: 2291503 - RNA, 19 nt, Homo sapiens
  misc_RNA (1)...(19): siRNA sense strand
cggcagagauggugcuguc

SEQ ID NO: 2291504 - RNA, 19 nt, Homo sapiens
  misc_RNA (1)...(19): siRNA sense strand
acuucuaccagcugaggaa

SEQ ID NO: 2291505 - RNA, 19 nt, Homo sapiens
  misc_RNA (1)...(19): siRNA sense strand
acacagaggccaucccaga

SEQ ID NO: 2291506 - RNA, 19 nt, Homo sapiens
  misc_RNA (1)...(19): siRNA sense strand
ccugaagaaagcagagauc

SEQ ID NO: 2291507 - RNA, 19 nt, Homo sapiens
  misc_RNA (1)...(19): siRNA sense strand
ggacauuguagaaguggca

SEQ ID NO: 2291508 - RNA, 19 nt, Homo sapiens
  misc_RNA (1)...(19): siRNA sense strand
ccaauaucacaucgggcaa

SEQ ID NO: 2291509 - RNA, 19 nt, Homo sapiens
  misc_RNA (1)...(19): siRNA sense strand
ggcaagauccggagccaga

SEQ ID NO: 2291510 - RNA, 19 nt, Homo sapiens
  misc_RNA (1)...(19): siRNA sense strand
ucaagcagcugaugcggaa

SEQ ID NO: 2291511 - RNA, 19 nt, Homo sapiens
  misc_RNA (1)...(19): siRNA sense strand
cugugaaccaggacaagaa

SEQ ID NO: 2291512 - RNA, 19 nt, Homo sapiens
  misc_RNA (1)...(19): siRNA sense strand
uggacuacaacgaggccaa

SEQ ID NO: 2291513 - RNA, 19 nt, Homo sapiens
  misc_RNA (1)...(19): siRNA sense strand
uggaacaguuugaggaccu

SEQ ID NO: 2291514 - RNA, 19 nt, Homo sapiens
  misc_RNA (1)...(19): siRNA sense strand
cugcaguccuuuaacgaga

SEQ ID NO: 2291515 - RNA, 19 nt, Homo sapiens
  misc_RNA (1)...(19): siRNA sense strand
acaacgaggccaagggugu

SEQ ID NO: 2291516 - RNA, 19 nt, Homo sapiens
  misc_RNA (1)...(19): siRNA sense strand
gggacaaagugccugcuga

SEQ ID NO: 2291517 - RNA, 19 nt, Homo sapiens
  misc_RNA (1)...(19): siRNA sense strand
ugaaggaguaugagccuga

SEQ ID NO: 2291518 - RNA, 19 nt, Homo sapiens
  misc_RNA (1)...(19): siRNA sense strand
ggaaggaggacauggagcu

SEQ ID NO: 2291519 - RNA, 19 nt, Homo sapiens
  misc_RNA (1)...(19): siRNA sense strand
ugaagugcuccgaagacaa

SEQ ID NO: 2291520 - RNA, 19 nt, Homo sapiens
  misc_RNA (1)...(19): siRNA sense strand
cggcagagauggugcuguc

SEQ ID NO: 2291521 - RNA, 19 nt, Homo sapiens
  misc_RNA (1)...(19): siRNA sense strand
acuucuaccagcugaggaa

SEQ ID NO: 2291522 - RNA, 19 nt, Homo sapiens
  misc_RNA (1)...(19): siRNA sense strand
acacagaggccaucccaga

SEQ ID NO: 2291523 - RNA, 19 nt, Homo sapiens
  misc_RNA (1)...(19): siRNA sense strand
ccugaagaaagcagagauc

SEQ ID NO: 2291524 - RNA, 19 nt, Homo sapiens
  misc_RNA (1)...(19): siRNA sense strand
cagaagugagcgcugggaa

SEQ ID NO: 2291525 - RNA, 19 nt, Homo sapiens
  misc_RNA (1)...(19): siRNA sense strand
ggacauuguagaaguggca

SEQ ID NO: 2291526 - RNA, 19 nt, Homo sapiens
  misc_RNA (1)...(19): siRNA sense strand
ccaauaucacaucgggcaa

SEQ ID NO: 2291527 - RNA, 19 nt, Homo sapiens
  misc_RNA (1)...(19): siRNA sense strand
ggcaagauccggagccaga

SEQ ID NO: 2291528 - RNA, 19 nt, Homo sapiens
  misc_RNA (1)...(19): siRNA sense strand
ucaagcagcugaugcggaa

SEQ ID NO: 2291529 - RNA, 19 nt, Homo sapiens
  misc_RNA (1)...(19): siRNA sense strand
cugugaaccaggacaagaa

SEQ ID NO: 2291530 - RNA, 19 nt, Homo sapiens
  misc_RNA (1)...(19): siRNA sense strand
uggacuacaacgaggccaa

SEQ ID NO: 2291531 - RNA, 19 nt, Homo sapiens
  misc_RNA (1)...(19): siRNA sense strand
uggaacaguuugaggaccu

SEQ ID NO: 2291532 - RNA, 19 nt, Homo sapiens
  misc_RNA (1)...(19): siRNA sense strand
cugcaguccuuuaacgaga

SEQ ID NO: 2291533 - RNA, 19 nt, Homo sapiens
  misc_RNA (1)...(19): siRNA sense strand
acaacgaggccaagggugu

SEQ ID NO: 2291534 - RNA, 19 nt, Homo sapiens
  misc_RNA (1)...(19): siRNA sense strand
gggacaaagugccugcuga

SEQ ID NO: 2291535 - RNA, 19 nt, Homo sapiens
  misc_RNA (1)...(19): siRNA sense strand
ugaaggaguaugagccuga

SEQ ID NO: 2291536 - RNA, 19 nt, Homo sapiens
  misc_RNA (1)...(19): siRNA sense strand
ggaaggaggacauggagcu

SEQ ID NO: 2291537 - RNA, 19 nt, Homo sapiens
  misc_RNA (1)...(19): siRNA sense strand
ugaagugcuccgaagacaa

SEQ ID NO: 2291538 - RNA, 19 nt, Homo sapiens
  misc_RNA (1)...(19): siRNA sense strand
cggcagagauggugcuguc

SEQ ID NO: 2291539 - RNA, 19 nt, Homo sapiens
  misc_RNA (1)...(19): siRNA sense strand
acuucuaccagcugaggaa

SEQ ID NO: 2291540 - RNA, 19 nt, Homo sapiens
  misc_RNA (1)...(19): siRNA sense strand
acacagaggccaucccaga

SEQ ID NO: 2291541 - RNA, 19 nt, Homo sapiens
  misc_RNA (1)...(19): siRNA sense strand
ccugaagaaagcagagauc

SEQ ID NO: 2291542 - RNA, 19 nt, Homo sapiens
  misc_RNA (1)...(19): siRNA sense strand
ggacauuguagaaguggca

SEQ ID NO: 2291543 - RNA, 19 nt, Homo sapiens
  misc_RNA (1)...(19): siRNA sense strand
ccaauaucacaucgggcaa

SEQ ID NO: 2291544 - RNA, 19 nt, Homo sapiens
  misc_RNA (1)...(19): siRNA sense strand
ggcaagauccggagccaga

SEQ ID NO: 2291545 - RNA, 19 nt, Homo sapiens
  misc_RNA (1)...(19): siRNA sense strand
ucaagcagcugaugcggaa

SEQ ID NO: 2291546 - RNA, 19 nt, Homo sapiens
  misc_RNA (1)...(19): siRNA sense strand
cugugaaccaggacaagaa

SEQ ID NO: 2291547 - RNA, 19 nt, Homo sapiens
  misc_RNA (1)...(19): siRNA sense strand
uggacuacaacgaggccaa

SEQ ID NO: 2291548 - RNA, 19 nt, Homo sapiens
  misc_RNA (1)...(19): siRNA sense strand
uggaacaguuugaggaccu

SEQ ID NO: 2291549 - RNA, 19 nt, Homo sapiens
  misc_RNA (1)...(19): siRNA sense strand
cugcaguccuuuaacgaga

SEQ ID NO: 2291550 - RNA, 19 nt, Homo sapiens
  misc_RNA (1)...(19): siRNA sense strand
acaacgaggccaagggugu

SEQ ID NO: 2291551 - RNA, 19 nt, Homo sapiens
  misc_RNA (1)...(19): siRNA sense strand
gggacaaagugccugcuga

SEQ ID NO: 2291552 - RNA, 19 nt, Homo sapiens
  misc_RNA (1)...(19): siRNA sense strand
ugaaggaguaugagccuga

SEQ ID NO: 2291553 - RNA, 19 nt, Homo sapiens
  misc_RNA (1)...(19): siRNA sense strand
ggaaggaggacauggagcu

SEQ ID NO: 2291554 - RNA, 19 nt, Homo sapiens
  misc_RNA (1)...(19): siRNA sense strand
ugaagugcuccgaagacaa

SEQ ID NO: 2291555 - RNA, 19 nt, Homo sapiens
  misc_RNA (1)...(19): siRNA sense strand
cggcagagauggugcuguc

SEQ ID NO: 2291556 - RNA, 19 nt, Homo sapiens
  misc_RNA (1)...(19): siRNA sense strand
acuucuaccagcugaggaa

SEQ ID NO: 2291557 - RNA, 19 nt, Homo sapiens
  misc_RNA (1)...(19): siRNA sense strand
acacagaggccaucccaga

SEQ ID NO: 2291558 - RNA, 19 nt, Homo sapiens
  misc_RNA (1)...(19): siRNA sense strand
ccugaagaaagcagagauc

SEQ ID NO: 2291559 - RNA, 19 nt, Homo sapiens
  misc_RNA (1)...(19): siRNA sense strand
ggacauuguagaaguggca

SEQ ID NO: 2291560 - RNA, 19 nt, Homo sapiens
  misc_RNA (1)...(19): siRNA sense strand
ccaauaucacaucgggcaa

SEQ ID NO: 2291561 - RNA, 19 nt, Homo sapiens
  misc_RNA (1)...(19): siRNA sense strand
ggcaagauccggagccaga

SEQ ID NO: 2291562 - RNA, 19 nt, Homo sapiens
  misc_RNA (1)...(19): siRNA sense strand
ucaagcagcugaugcggaa

SEQ ID NO: 2291563 - RNA, 19 nt, Homo sapiens
  misc_RNA (1)...(19): siRNA sense strand
cugugaaccaggacaagaa

SEQ ID NO: 2291564 - RNA, 19 nt, Homo sapiens
  misc_RNA (1)...(19): siRNA sense strand
uggacuacaacgaggccaa

SEQ ID NO: 2291565 - RNA, 19 nt, Homo sapiens
  misc_RNA (1)...(19): siRNA sense strand
uggaacaguuugaggaccu

SEQ ID NO: 2291566 - RNA, 19 nt, Homo sapiens
  misc_RNA (1)...(19): siRNA sense strand
cugcaguccuuuaacgaga

SEQ ID NO: 2291567 - RNA, 19 nt, Homo sapiens
  misc_RNA (1)...(19): siRNA sense strand
acaacgaggccaagggugu

SEQ ID NO: 2291568 - RNA, 19 nt, Homo sapiens
  misc_RNA (1)...(19): siRNA sense strand
gggacaaagugccugcuga

SEQ ID NO: 2291569 - RNA, 19 nt, Homo sapiens
  misc_RNA (1)...(19): siRNA sense strand
ugaaggaguaugagccuga

SEQ ID NO: 2291570 - RNA, 19 nt, Homo sapiens
  misc_RNA (1)...(19): siRNA sense strand
ggaaggaggacauggagcu

SEQ ID NO: 2291571 - RNA, 19 nt, Homo sapiens
  misc_RNA (1)...(19): siRNA sense strand
ugaagugcuccgaagacaa

SEQ ID NO: 2291572 - RNA, 19 nt, Homo sapiens
  misc_RNA (1)...(19): siRNA sense strand
cggcagagauggugcuguc

SEQ ID NO: 2291573 - RNA, 19 nt, Homo sapiens
  misc_RNA (1)...(19): siRNA sense strand
acuucuaccagcugaggaa

SEQ ID NO: 2291574 - RNA, 19 nt, Homo sapiens
  misc_RNA (1)...(19): siRNA sense strand
acacagaggccaucccaga

SEQ ID NO: 2291575 - RNA, 19 nt, Homo sapiens
  misc_RNA (1)...(19): siRNA sense strand
ccugaagaaagcagagauc

SEQ ID NO: 2291576 - RNA, 19 nt, Homo sapiens
  misc_RNA (1)...(19): siRNA sense strand
gugcagaugaggacggaga

SEQ ID NO: 2291577 - RNA, 19 nt, Homo sapiens
  misc_RNA (1)...(19): siRNA sense strand
guggaaaacaacagccuua

SEQ ID NO: 2291578 - RNA, 19 nt, Homo sapiens
  misc_RNA (1)...(19): siRNA sense strand
gcgcaaauguacuccggca

SEQ ID NO: 2291579 - RNA, 19 nt, Homo sapiens
  misc_RNA (1)...(19): siRNA sense strand
acaucgacgcaguggacau

SEQ ID NO: 2291580 - RNA, 19 nt, Homo sapiens
  misc_RNA (1)...(19): siRNA sense strand
cagugaacaccgagugcca

SEQ ID NO: 2291581 - RNA, 19 nt, Homo sapiens
  misc_RNA (1)...(19): siRNA sense strand
ccaacgugaacgcgcaaau

SEQ ID NO: 2291582 - RNA, 19 nt, Homo sapiens
  misc_RNA (1)...(19): siRNA sense strand
cagaccaaaccgaggacua

SEQ ID NO: 2291583 - RNA, 19 nt, Homo sapiens
  misc_RNA (1)...(19): siRNA sense strand
auggaggaguucauggaaa

SEQ ID NO: 2291584 - RNA, 19 nt, Homo sapiens
  misc_RNA (1)...(19): siRNA sense strand
ccaacuaguuagagccacu

SEQ ID NO: 2291585 - RNA, 19 nt, Homo sapiens
  misc_RNA (1)...(19): siRNA sense strand
uccuuaugauugaggcaaa

SEQ ID NO: 2291586 - RNA, 19 nt, Homo sapiens
  misc_RNA (1)...(19): siRNA sense strand
cuuggaaagagauggauau

SEQ ID NO: 2291587 - RNA, 19 nt, Homo sapiens
  misc_RNA (1)...(19): siRNA sense strand
gggcauucacugcgguaca

SEQ ID NO: 2291588 - RNA, 19 nt, Homo sapiens
  misc_RNA (1)...(19): siRNA sense strand
auauacagauccugggcuu

SEQ ID NO: 2291589 - RNA, 19 nt, Homo sapiens
  misc_RNA (1)...(19): siRNA sense strand
ucacagagguaccuggcau

SEQ ID NO: 2291590 - RNA, 19 nt, Homo sapiens
  misc_RNA (1)...(19): siRNA sense strand
cguauaaguauguuccaau

SEQ ID NO: 2291591 - RNA, 19 nt, Homo sapiens
  misc_RNA (1)...(19): siRNA sense strand
uggaauaacaagggacaca

SEQ ID NO: 2291592 - RNA, 19 nt, Homo sapiens
  misc_RNA (1)...(19): siRNA sense strand
ccuuaugauugaggcaaau

SEQ ID NO: 2291593 - RNA, 19 nt, Homo sapiens
  misc_RNA (1)...(19): siRNA sense strand
gaguucauggaaagggaau

SEQ ID NO: 2291594 - RNA, 19 nt, Homo sapiens
  misc_RNA (1)...(19): siRNA sense strand
gauugaggcaaaugggagu

SEQ ID NO: 2291595 - RNA, 19 nt, Homo sapiens
  misc_RNA (1)...(19): siRNA sense strand
agauuaagacaaagggcaa

SEQ ID NO: 2291596 - RNA, 19 nt, Homo sapiens
  misc_RNA (1)...(19): siRNA sense strand
augcauuggacaagauuaa

SEQ ID NO: 2291597 - RNA, 19 nt, Homo sapiens
  misc_RNA (1)...(19): siRNA sense strand
gauacuuaugauaggucaa

SEQ ID NO: 2291598 - RNA, 19 nt, Homo sapiens
  misc_RNA (1)...(19): siRNA sense strand
uaugauaggucaaugcuga

SEQ ID NO: 2291599 - RNA, 19 nt, Homo sapiens
  misc_RNA (1)...(19): siRNA sense strand
cggaggacgaugagaggau

SEQ ID NO: 2291600 - RNA, 19 nt, Homo sapiens
  misc_RNA (1)...(19): siRNA sense strand
cugaaaggcagauggggaa

SEQ ID NO: 2291601 - RNA, 19 nt, Homo sapiens
  misc_RNA (1)...(19): siRNA sense strand
gagaggauccacaugguga

SEQ ID NO: 2291602 - RNA, 19 nt, Homo sapiens
  misc_RNA (1)...(19): siRNA sense strand
uggaaugccaagaaguaca

SEQ ID NO: 2291603 - RNA, 19 nt, Homo sapiens
  misc_RNA (1)...(19): siRNA sense strand
cuauaugagcaguggaaga

SEQ ID NO: 2291604 - RNA, 19 nt, Homo sapiens
  misc_RNA (1)...(19): siRNA sense strand
gagagaaaagagauggcaa

SEQ ID NO: 2291605 - RNA, 19 nt, Homo sapiens
  misc_RNA (1)...(19): siRNA sense strand
gcagggaacuuuuggcaga

SEQ ID NO: 2291606 - RNA, 19 nt, Homo sapiens
  misc_RNA (1)...(19): siRNA sense strand
guguuguacagcagaaaga

SEQ ID NO: 2291607 - RNA, 19 nt, Homo sapiens
  misc_RNA (1)...(19): siRNA sense strand
cuguugaaggagcgccaaa

SEQ ID NO: 2291608 - RNA, 19 nt, Homo sapiens
  misc_RNA (1)...(19): siRNA sense strand
acaacaaguuauugccacu

SEQ ID NO: 2291609 - RNA, 19 nt, Homo sapiens
  misc_RNA (1)...(19): siRNA sense strand
ggaagaauuucgaugagag

SEQ ID NO: 2291610 - RNA, 19 nt, Homo sapiens
  misc_RNA (1)...(19): siRNA sense strand
cagaacggaucuuugccua

SEQ ID NO: 2291611 - RNA, 19 nt, Homo sapiens
  misc_RNA (1)...(19): siRNA sense strand
agacaaaugccuagggaga

SEQ ID NO: 2291612 - RNA, 19 nt, Homo sapiens
  misc_RNA (1)...(19): siRNA sense strand
gcaaaguggugucuggcuu

SEQ ID NO: 2291613 - RNA, 19 nt, Homo sapiens
  misc_RNA (1)...(19): siRNA sense strand
ccuagggagagcugugaaa

SEQ ID NO: 2291614 - RNA, 19 nt, Homo sapiens
  misc_RNA (1)...(19): siRNA sense strand
acaacaagaccaaggccau

SEQ ID NO: 2291615 - RNA, 19 nt, Homo sapiens
  misc_RNA (1)...(19): siRNA sense strand
ugcaagaagcugaggagca

SEQ ID NO: 2291616 - RNA, 19 nt, Homo sapiens
  misc_RNA (1)...(19): siRNA sense strand
gcccuaaaggugaggacga

SEQ ID NO: 2291617 - RNA, 19 nt, Homo sapiens
  misc_RNA (1)...(19): siRNA sense strand
ccuacuaucugcuggacca

SEQ ID NO: 2291618 - RNA, 19 nt, Homo sapiens
  misc_RNA (1)...(19): siRNA sense strand
guguaugcccuaaagguga

SEQ ID NO: 2291619 - RNA, 19 nt, Homo sapiens
  misc_RNA (1)...(19): siRNA sense strand
ccaucagguuggugcucau

SEQ ID NO: 2291620 - RNA, 19 nt, Homo sapiens
  misc_RNA (1)...(19): siRNA sense strand
auguauaccucuugaaccu

SEQ ID NO: 2291621 - RNA, 19 nt, Homo sapiens
  misc_RNA (1)...(19): siRNA sense strand
ucagaaaaguugcagccaa

SEQ ID NO: 2291622 - RNA, 19 nt, Homo sapiens
  misc_RNA (1)...(19): siRNA sense strand
ggauguagcauaagccaac

SEQ ID NO: 2291623 - RNA, 19 nt, Homo sapiens
  misc_RNA (1)...(19): siRNA sense strand
cgggaaugggaaagacaga

SEQ ID NO: 2291624 - RNA, 19 nt, Homo sapiens
  misc_RNA (1)...(19): siRNA sense strand
aagagaagggaaauggcaa

SEQ ID NO: 2291625 - RNA, 19 nt, Homo sapiens
  misc_RNA (1)...(19): siRNA sense strand
aucgagaagaacaggauaa

SEQ ID NO: 2291626 - RNA, 19 nt, Homo sapiens
  misc_RNA (1)...(19): siRNA sense strand
gcaagaugcgggagcagca

SEQ ID NO: 2291627 - RNA, 19 nt, Homo sapiens
  misc_RNA (1)...(19): siRNA sense strand
cgcuuggagcaguuagaaa

SEQ ID NO: 2291628 - RNA, 19 nt, Homo sapiens
  misc_RNA (1)...(19): siRNA sense strand
gggagcagcagaaggagca

SEQ ID NO: 2291629 - RNA, 19 nt, Homo sapiens
  misc_RNA (1)...(19): siRNA sense strand
ucggaaacgacaucgagaa

SEQ ID NO: 2291630 - RNA, 19 nt, Homo sapiens
  misc_RNA (1)...(19): siRNA sense strand
gggaaauggcaagggagca

SEQ ID NO: 2291631 - RNA, 19 nt, Homo sapiens
  misc_RNA (1)...(19): siRNA sense strand
cgggaaugggaaagacaga

SEQ ID NO: 2291632 - RNA, 19 nt, Homo sapiens
  misc_RNA (1)...(19): siRNA sense strand
aagagaagggaaauggcaa

SEQ ID NO: 2291633 - RNA, 19 nt, Homo sapiens
  misc_RNA (1)...(19): siRNA sense strand
aucgagaagaacaggauaa

SEQ ID NO: 2291634 - RNA, 19 nt, Homo sapiens
  misc_RNA (1)...(19): siRNA sense strand
gcaagaugcgggagcagca

SEQ ID NO: 2291635 - RNA, 19 nt, Homo sapiens
  misc_RNA (1)...(19): siRNA sense strand
cgcuuggagcaguuagaaa

SEQ ID NO: 2291636 - RNA, 19 nt, Homo sapiens
  misc_RNA (1)...(19): siRNA sense strand
gggagcagcagaaggagca

SEQ ID NO: 2291637 - RNA, 19 nt, Homo sapiens
  misc_RNA (1)...(19): siRNA sense strand
ucggaaacgacaucgagaa

SEQ ID NO: 2291638 - RNA, 19 nt, Homo sapiens
  misc_RNA (1)...(19): siRNA sense strand
gggaaauggcaagggagca

SEQ ID NO: 2291639 - RNA, 19 nt, Homo sapiens
  misc_RNA (1)...(19): siRNA sense strand
cgggaaugggaaagacaga

SEQ ID NO: 2291640 - RNA, 19 nt, Homo sapiens
  misc_RNA (1)...(19): siRNA sense strand
aagagaagggaaauggcaa

SEQ ID NO: 2291641 - RNA, 19 nt, Homo sapiens
  misc_RNA (1)...(19): siRNA sense strand
aucgagaagaacaggauaa

SEQ ID NO: 2291642 - RNA, 19 nt, Homo sapiens
  misc_RNA (1)...(19): siRNA sense strand
gcaagaugcgggagcagca

SEQ ID NO: 2291643 - RNA, 19 nt, Homo sapiens
  misc_RNA (1)...(19): siRNA sense strand
cgcuuggagcaguuagaaa

SEQ ID NO: 2291644 - RNA, 19 nt, Homo sapiens
  misc_RNA (1)...(19): siRNA sense strand
gggagcagcagaaggagca

SEQ ID NO: 2291645 - RNA, 19 nt, Homo sapiens
  misc_RNA (1)...(19): siRNA sense strand
ucggaaacgacaucgagaa

SEQ ID NO: 2291646 - RNA, 19 nt, Homo sapiens
  misc_RNA (1)...(19): siRNA sense strand
gggaaauggcaagggagca

SEQ ID NO: 2291647 - RNA, 19 nt, Homo sapiens
  misc_RNA (1)...(19): siRNA sense strand
cgggaaugggaaagacaga

SEQ ID NO: 2291648 - RNA, 19 nt, Homo sapiens
  misc_RNA (1)...(19): siRNA sense strand
aagagaagggaaauggcaa

SEQ ID NO: 2291649 - RNA, 19 nt, Homo sapiens
  misc_RNA (1)...(19): siRNA sense strand
aucgagaagaacaggauaa

SEQ ID NO: 2291650 - RNA, 19 nt, Homo sapiens
  misc_RNA (1)...(19): siRNA sense strand
gcaagaugcgggagcagca

SEQ ID NO: 2291651 - RNA, 19 nt, Homo sapiens
  misc_RNA (1)...(19): siRNA sense strand
cgcuuggagcaguuagaaa

SEQ ID NO: 2291652 - RNA, 19 nt, Homo sapiens
  misc_RNA (1)...(19): siRNA sense strand
gggagcagcagaaggagca

SEQ ID NO: 2291653 - RNA, 19 nt, Homo sapiens
  misc_RNA (1)...(19): siRNA sense strand
ucggaaacgacaucgagaa

SEQ ID NO: 2291654 - RNA, 19 nt, Homo sapiens
  misc_RNA (1)...(19): siRNA sense strand
gggaaauggcaagggagca

SEQ ID NO: 2291655 - RNA, 19 nt, Homo sapiens
  misc_RNA (1)...(19): siRNA sense strand
aagagaagggaaauggcaa

SEQ ID NO: 2291656 - RNA, 19 nt, Homo sapiens
  misc_RNA (1)...(19): siRNA sense strand
gcaagaugcgggagcagca

SEQ ID NO: 2291657 - RNA, 19 nt, Homo sapiens
  misc_RNA (1)...(19): siRNA sense strand
cgcuuggagcaguuagaaa

SEQ ID NO: 2291658 - RNA, 19 nt, Homo sapiens
  misc_RNA (1)...(19): siRNA sense strand
gggagcagcagaaggagca

SEQ ID NO: 2291659 - RNA, 19 nt, Homo sapiens
  misc_RNA (1)...(19): siRNA sense strand
gggaaauggcaagggagca

SEQ ID NO: 2291660 - RNA, 19 nt, Homo sapiens
  misc_RNA (1)...(19): siRNA sense strand
cgggaaugggaaagacaga

SEQ ID NO: 2291661 - RNA, 19 nt, Homo sapiens
  misc_RNA (1)...(19): siRNA sense strand
aagagaagggaaauggcaa

SEQ ID NO: 2291662 - RNA, 19 nt, Homo sapiens
  misc_RNA (1)...(19): siRNA sense strand
aucgagaagaacaggauaa

SEQ ID NO: 2291663 - RNA, 19 nt, Homo sapiens
  misc_RNA (1)...(19): siRNA sense strand
gcaagaugcgggagcagca

SEQ ID NO: 2291664 - RNA, 19 nt, Homo sapiens
  misc_RNA (1)...(19): siRNA sense strand
cgcuuggagcaguuagaaa

SEQ ID NO: 2291665 - RNA, 19 nt, Homo sapiens
  misc_RNA (1)...(19): siRNA sense strand
gggagcagcagaaggagca

SEQ ID NO: 2291666 - RNA, 19 nt, Homo sapiens
  misc_RNA (1)...(19): siRNA sense strand
ucggaaacgacaucgagaa

SEQ ID NO: 2291667 - RNA, 19 nt, Homo sapiens
  misc_RNA (1)...(19): siRNA sense strand
gggaaauggcaagggagca

SEQ ID NO: 2291668 - RNA, 19 nt, Homo sapiens
  misc_RNA (1)...(19): siRNA sense strand
cgggaaugggaaagacaga

SEQ ID NO: 2291669 - RNA, 19 nt, Homo sapiens
  misc_RNA (1)...(19): siRNA sense strand
aagagaagggaaauggcaa

SEQ ID NO: 2291670 - RNA, 19 nt, Homo sapiens
  misc_RNA (1)...(19): siRNA sense strand
aucgagaagaacaggauaa

SEQ ID NO: 2291671 - RNA, 19 nt, Homo sapiens
  misc_RNA (1)...(19): siRNA sense strand
gcaagaugcgggagcagca

SEQ ID NO: 2291672 - RNA, 19 nt, Homo sapiens
  misc_RNA (1)...(19): siRNA sense strand
cgcuuggagcaguuagaaa

SEQ ID NO: 2291673 - RNA, 19 nt, Homo sapiens
  misc_RNA (1)...(19): siRNA sense strand
gggagcagcagaaggagca

SEQ ID NO: 2291674 - RNA, 19 nt, Homo sapiens
  misc_RNA (1)...(19): siRNA sense strand
ucggaaacgacaucgagaa

SEQ ID NO: 2291675 - RNA, 19 nt, Homo sapiens
  misc_RNA (1)...(19): siRNA sense strand
gggaaauggcaagggagca

SEQ ID NO: 2291676 - RNA, 19 nt, Homo sapiens
  misc_RNA (1)...(19): siRNA sense strand
cuucaugaguuucgggaca

SEQ ID NO: 2291677 - RNA, 19 nt, Homo sapiens
  misc_RNA (1)...(19): siRNA sense strand
cagaagaacuaaagagcug

SEQ ID NO: 2291678 - RNA, 19 nt, Homo sapiens
  misc_RNA (1)...(19): siRNA sense strand
cuauggaggacuugggaga

SEQ ID NO: 2291679 - RNA, 19 nt, Homo sapiens
  misc_RNA (1)...(19): siRNA sense strand
gggacaaauuagcugcaca

SEQ ID NO: 2291680 - RNA, 19 nt, Homo sapiens
  misc_RNA (1)...(19): siRNA sense strand
ccauagacagccugcgaga

SEQ ID NO: 2291681 - RNA, 19 nt, Homo sapiens
  misc_RNA (1)...(19): siRNA sense strand
uguuagaagaaauguccaa

SEQ ID NO: 2291682 - RNA, 19 nt, Homo sapiens
  misc_RNA (1)...(19): siRNA sense strand
gugaaauaauggaagagcu

SEQ ID NO: 2291683 - RNA, 19 nt, Homo sapiens
  misc_RNA (1)...(19): siRNA sense strand
cuaccagcaauguggaauu

SEQ ID NO: 2291684 - RNA, 19 nt, Homo sapiens
  misc_RNA (1)...(19): siRNA sense strand
cugcgagaccuaagaggau

SEQ ID NO: 2291685 - RNA, 19 nt, Homo sapiens
  misc_RNA (1)...(19): siRNA sense strand
cugugguauacaagacaua

SEQ ID NO: 2291686 - RNA, 19 nt, Homo sapiens
  misc_RNA (1)...(19): siRNA sense strand
aaucgcagauggagggacu

SEQ ID NO: 2291687 - RNA, 19 nt, Homo sapiens
  misc_RNA (1)...(19): siRNA sense strand
acaacaucgccgugcgcaa

SEQ ID NO: 2291688 - RNA, 19 nt, Homo sapiens
  misc_RNA (1)...(19): siRNA sense strand
cggcugagaacgagaagcu

SEQ ID NO: 2291689 - RNA, 19 nt, Homo sapiens
  misc_RNA (1)...(19): siRNA sense strand
augaggaagcugaggagaa

SEQ ID NO: 2291690 - RNA, 19 nt, Homo sapiens
  misc_RNA (1)...(19): siRNA sense strand
aggugaagacggagcauga

SEQ ID NO: 2291691 - RNA, 19 nt, Homo sapiens
  misc_RNA (1)...(19): siRNA sense strand
aagaagccugagagagaaa

SEQ ID NO: 2291692 - RNA, 19 nt, Homo sapiens
  misc_RNA (1)...(19): siRNA sense strand
ggacagugcccuucagcca

SEQ ID NO: 2291693 - RNA, 19 nt, Homo sapiens
  misc_RNA (1)...(19): siRNA sense strand
cgauagauggaaugaaaau

SEQ ID NO: 2291694 - RNA, 19 nt, Homo sapiens
  misc_RNA (1)...(19): siRNA sense strand
cgggaagaagccaagaaau

SEQ ID NO: 2291695 - RNA, 19 nt, Homo sapiens
  misc_RNA (1)...(19): siRNA sense strand
caugaaguacauugggaga

SEQ ID NO: 2291696 - RNA, 19 nt, Homo sapiens
  misc_RNA (1)...(19): siRNA sense strand
uggugaugcugguggagga

SEQ ID NO: 2291697 - RNA, 19 nt, Homo sapiens
  misc_RNA (1)...(19): siRNA sense strand
cuggaagaagccugagaga

SEQ ID NO: 2291698 - RNA, 19 nt, Homo sapiens
  misc_RNA (1)...(19): siRNA sense strand
uggaggagugccagugcaa

SEQ ID NO: 2291699 - RNA, 19 nt, Homo sapiens
  misc_RNA (1)...(19): siRNA sense strand
aaggaaucaaagagagcuu

SEQ ID NO: 2291700 - RNA, 19 nt, Homo sapiens
  misc_RNA (1)...(19): siRNA sense strand
gaaaucuccucuucgggaa

SEQ ID NO: 2291701 - RNA, 19 nt, Homo sapiens
  misc_RNA (1)...(19): siRNA sense strand
agugcaaggugaagacgga

SEQ ID NO: 2291702 - RNA, 19 nt, Homo sapiens
  misc_RNA (1)...(19): siRNA sense strand
ccauccagggacucagaua

SEQ ID NO: 2291703 - RNA, 19 nt, Homo sapiens
  misc_RNA (1)...(19): siRNA sense strand
cagaaagagcaaaaggaaa

SEQ ID NO: 2291704 - RNA, 19 nt, Homo sapiens
  misc_RNA (1)...(19): siRNA sense strand
cggcaaaggggcagaaaga

SEQ ID NO: 2291705 - RNA, 19 nt, Homo sapiens
  misc_RNA (1)...(19): siRNA sense strand
caagagaaauggagcccuu

SEQ ID NO: 2291706 - RNA, 19 nt, Homo sapiens
  misc_RNA (1)...(19): siRNA sense strand
ccaaggaggaucacaacua

SEQ ID NO: 2291707 - RNA, 19 nt, Homo sapiens
  misc_RNA (1)...(19): siRNA sense strand
gggccauggaagaugaaga

SEQ ID NO: 2291708 - RNA, 19 nt, Homo sapiens
  misc_RNA (1)...(19): siRNA sense strand
ucuccaagauccugacauu

SEQ ID NO: 2291709 - RNA, 19 nt, Homo sapiens
  misc_RNA (1)...(19): siRNA sense strand
guuuuaagaaaguggacaa

SEQ ID NO: 2291710 - RNA, 19 nt, Homo sapiens
  misc_RNA (1)...(19): siRNA sense strand
cccaguaagaagccagaaa

SEQ ID NO: 2291711 - RNA, 19 nt, Homo sapiens
  misc_RNA (1)...(19): siRNA sense strand
augaugaggagaugaaaga

SEQ ID NO: 2291712 - RNA, 19 nt, Homo sapiens
  misc_RNA (1)...(19): siRNA sense strand
aagaugaagagcugaccaa

SEQ ID NO: 2291713 - RNA, 19 nt, Homo sapiens
  misc_RNA (1)...(19): siRNA sense strand
gggaaagggucguuguggu

SEQ ID NO: 2291714 - RNA, 19 nt, Homo sapiens
  misc_RNA (1)...(19): siRNA sense strand
gagcaaaaggaaaccacaa

SEQ ID NO: 2291715 - RNA, 19 nt, Homo sapiens
  misc_RNA (1)...(19): siRNA sense strand
guaagaagccagaaagcuc

SEQ ID NO: 2291716 - RNA, 19 nt, Homo sapiens
  misc_RNA (1)...(19): siRNA sense strand
agaaagagcaaaaggaaac

SEQ ID NO: 2291717 - RNA, 19 nt, Homo sapiens
  misc_RNA (1)...(19): siRNA sense strand
gcgacacggaagaggacga

SEQ ID NO: 2291718 - RNA, 19 nt, Homo sapiens
  misc_RNA (1)...(19): siRNA sense strand
ggagaugaaagaagcggca

SEQ ID NO: 2291719 - RNA, 19 nt, Homo sapiens
  misc_RNA (1)...(19): siRNA sense strand
aagaaaguggacaaagaga

SEQ ID NO: 2291720 - RNA, 19 nt, Homo sapiens
  misc_RNA (1)...(19): siRNA sense strand
cgauggaccugaagggaga

SEQ ID NO: 2291721 - RNA, 19 nt, Homo sapiens
  misc_RNA (1)...(19): siRNA sense strand
gcagaaaggaccuguggga

SEQ ID NO: 2291722 - RNA, 19 nt, Homo sapiens
  misc_RNA (1)...(19): siRNA sense strand
gggauaauggagugggcca

SEQ ID NO: 2291723 - RNA, 19 nt, Homo sapiens
  misc_RNA (1)...(19): siRNA sense strand
gaguagacggugugggagu

SEQ ID NO: 2291724 - RNA, 19 nt, Homo sapiens
  misc_RNA (1)...(19): siRNA sense strand
caacugggcccaaggguga

SEQ ID NO: 2291725 - RNA, 19 nt, Homo sapiens
  misc_RNA (1)...(19): siRNA sense strand
auaccuacgaugaguacaa

SEQ ID NO: 2291726 - RNA, 19 nt, Homo sapiens
  misc_RNA (1)...(19): siRNA sense strand
augaguacaagaagggcua

SEQ ID NO: 2291727 - RNA, 19 nt, Homo sapiens
  misc_RNA (1)...(19): siRNA sense strand
uggaaaaccaggugcccaa

SEQ ID NO: 2291728 - RNA, 19 nt, Homo sapiens
  misc_RNA (1)...(19): siRNA sense strand
acucaaagaaagugaucca

SEQ ID NO: 2291729 - RNA, 19 nt, Homo sapiens
  misc_RNA (1)...(19): siRNA sense strand
gcacaagauauaaagacga

SEQ ID NO: 2291730 - RNA, 19 nt, Homo sapiens
  misc_RNA (1)...(19): siRNA sense strand
ggaugagagagcugauaga

SEQ ID NO: 2291731 - RNA, 19 nt, Homo sapiens
  misc_RNA (1)...(19): siRNA sense strand
uggagaaacuggagagcug

SEQ ID NO: 2291732 - RNA, 19 nt, Homo sapiens
  misc_RNA (1)...(19): siRNA sense strand
gguugucaucagucagaua

SEQ ID NO: 2291733 - RNA, 19 nt, Homo sapiens
  misc_RNA (1)...(19): siRNA sense strand
ccaaaauggacguuaccaa

SEQ ID NO: 2291734 - RNA, 19 nt, Homo sapiens
  misc_RNA (1)...(19): siRNA sense strand
uggaagugacaauaaagaa

SEQ ID NO: 2291735 - RNA, 19 nt, Homo sapiens
  misc_RNA (1)...(19): siRNA sense strand
gaaagguauacuuggcaca

SEQ ID NO: 2291736 - RNA, 19 nt, Homo sapiens
  misc_RNA (1)...(19): siRNA sense strand
agaacaucgcagagcugua

SEQ ID NO: 2291737 - RNA, 19 nt, Homo sapiens
  misc_RNA (1)...(19): siRNA sense strand
gcuguggaccaaugagaga

SEQ ID NO: 2291738 - RNA, 19 nt, Homo sapiens
  misc_RNA (1)...(19): siRNA sense strand
uggacaacgaccacaggaa

SEQ ID NO: 2291739 - RNA, 19 nt, Homo sapiens
  misc_RNA (1)...(19): siRNA sense strand
guaggaaggagcuggaacu

SEQ ID NO: 2291740 - RNA, 19 nt, Homo sapiens
  misc_RNA (1)...(19): siRNA sense strand
gauucuucgugcacaggaa

SEQ ID NO: 2291741 - RNA, 19 nt, Homo sapiens
  misc_RNA (1)...(19): siRNA sense strand
caggaagcaccgaggaauc

SEQ ID NO: 2291742 - RNA, 19 nt, Homo sapiens
  misc_RNA (1)...(19): siRNA sense strand
gugacaauaaagaagagau

SEQ ID NO: 2291743 - RNA, 19 nt, Homo sapiens
  misc_RNA (1)...(19): siRNA sense strand
caaaggaggccacggagga

SEQ ID NO: 2291744 - RNA, 19 nt, Homo sapiens
  misc_RNA (1)...(19): siRNA sense strand
ccacaauagccacgugaac

SEQ ID NO: 2291745 - RNA, 19 nt, Homo sapiens
  misc_RNA (1)...(19): siRNA sense strand
gggacaagccugaagagca

SEQ ID NO: 2291746 - RNA, 19 nt, Homo sapiens
  misc_RNA (1)...(19): siRNA sense strand
ggacaagccugaagagcag

SEQ ID NO: 2291747 - RNA, 19 nt, Homo sapiens
  misc_RNA (1)...(19): siRNA sense strand
cggaggacagcgaaggcaa

SEQ ID NO: 2291748 - RNA, 19 nt, Homo sapiens
  misc_RNA (1)...(19): siRNA sense strand
augggaaugaugaggaaga

SEQ ID NO: 2291749 - RNA, 19 nt, Homo sapiens
  misc_RNA (1)...(19): siRNA sense strand
ccugaagagcaguggugga

SEQ ID NO: 2291750 - RNA, 19 nt, Homo sapiens
  misc_RNA (1)...(19): siRNA sense strand
ucagagaacucgcgcgucu

SEQ ID NO: 2291751 - RNA, 19 nt, Homo sapiens
  misc_RNA (1)...(19): siRNA sense strand
acuacaacguugauagaac

SEQ ID NO: 2291752 - RNA, 19 nt, Homo sapiens
  misc_RNA (1)...(19): siRNA sense strand
gggacaagccugaagagca

SEQ ID NO: 2291753 - RNA, 19 nt, Homo sapiens
  misc_RNA (1)...(19): siRNA sense strand
ggacaagccugaagagcag

SEQ ID NO: 2291754 - RNA, 19 nt, Homo sapiens
  misc_RNA (1)...(19): siRNA sense strand
cggaggacagcgaaggcaa

SEQ ID NO: 2291755 - RNA, 19 nt, Homo sapiens
  misc_RNA (1)...(19): siRNA sense strand
augggaaugaugaggaaga

SEQ ID NO: 2291756 - RNA, 19 nt, Homo sapiens
  misc_RNA (1)...(19): siRNA sense strand
ccugaagagcaguggugga

SEQ ID NO: 2291757 - RNA, 19 nt, Homo sapiens
  misc_RNA (1)...(19): siRNA sense strand
ucagagaacucgcgcgucu

SEQ ID NO: 2291758 - RNA, 19 nt, Homo sapiens
  misc_RNA (1)...(19): siRNA sense strand
acuacaacguugauagaac

SEQ ID NO: 2291759 - RNA, 19 nt, Homo sapiens
  misc_RNA (1)...(19): siRNA sense strand
ggaugaauauaaauggcca

SEQ ID NO: 2291760 - RNA, 19 nt, Homo sapiens
  misc_RNA (1)...(19): siRNA sense strand
gguuggugacaucgugaaa

SEQ ID NO: 2291761 - RNA, 19 nt, Homo sapiens
  misc_RNA (1)...(19): siRNA sense strand
cucaaaacccagaugaaaa

SEQ ID NO: 2291762 - RNA, 19 nt, Homo sapiens
  misc_RNA (1)...(19): siRNA sense strand
auaaauggccagugggaag

SEQ ID NO: 2291763 - RNA, 19 nt, Homo sapiens
  misc_RNA (1)...(19): siRNA sense strand
ugauaauagagaagccuga

SEQ ID NO: 2291764 - RNA, 19 nt, Homo sapiens
  misc_RNA (1)...(19): siRNA sense strand
uggcauuagagguugguga

SEQ ID NO: 2291765 - RNA, 19 nt, Homo sapiens
  misc_RNA (1)...(19): siRNA sense strand
gcagaagauaaccuggaau

SEQ ID NO: 2291766 - RNA, 19 nt, Homo sapiens
  misc_RNA (1)...(19): siRNA sense strand
gcucaaccucagaccacaa

SEQ ID NO: 2291767 - RNA, 19 nt, Homo sapiens
  misc_RNA (1)...(19): siRNA sense strand
aauagagaagccugaagaa

SEQ ID NO: 2291768 - RNA, 19 nt, Homo sapiens
  misc_RNA (1)...(19): siRNA sense strand
ccugaagaacaguggugga

SEQ ID NO: 2291769 - RNA, 19 nt, Homo sapiens
  misc_RNA (1)...(19): siRNA sense strand
gcgaaagcaauccagaaaa

SEQ ID NO: 2291770 - RNA, 19 nt, Homo sapiens
  misc_RNA (1)...(19): siRNA sense strand
ccagcaaggauguggguuc

SEQ ID NO: 2291771 - RNA, 19 nt, Homo sapiens
  misc_RNA (1)...(19): siRNA sense strand
caaugacagccgugugaca

SEQ ID NO: 2291772 - RNA, 19 nt, Homo sapiens
  misc_RNA (1)...(19): siRNA sense strand
gcucggucaagguggaaaa

SEQ ID NO: 2291773 - RNA, 19 nt, Homo sapiens
  misc_RNA (1)...(19): siRNA sense strand
aguauguguuggagcggga

SEQ ID NO: 2291774 - RNA, 19 nt, Homo sapiens
  misc_RNA (1)...(19): siRNA sense strand
ccagcaaggauguggguuc

SEQ ID NO: 2291775 - RNA, 19 nt, Homo sapiens
  misc_RNA (1)...(19): siRNA sense strand
caaugacagccgugugaca

SEQ ID NO: 2291776 - RNA, 19 nt, Homo sapiens
  misc_RNA (1)...(19): siRNA sense strand
gcucggucaagguggaaaa

SEQ ID NO: 2291777 - RNA, 19 nt, Homo sapiens
  misc_RNA (1)...(19): siRNA sense strand
aguauguguuggagcggga

SEQ ID NO: 2291778 - RNA, 19 nt, Homo sapiens
  misc_RNA (1)...(19): siRNA sense strand
ccagcaaggauguggguuc

SEQ ID NO: 2291779 - RNA, 19 nt, Homo sapiens
  misc_RNA (1)...(19): siRNA sense strand
caaugacagccgugugaca

SEQ ID NO: 2291780 - RNA, 19 nt, Homo sapiens
  misc_RNA (1)...(19): siRNA sense strand
gcucggucaagguggaaaa

SEQ ID NO: 2291781 - RNA, 19 nt, Homo sapiens
  misc_RNA (1)...(19): siRNA sense strand
aguauguguuggagcggga

SEQ ID NO: 2291782 - RNA, 19 nt, Homo sapiens
  misc_RNA (1)...(19): siRNA sense strand
ugucagagcucacagacga

SEQ ID NO: 2291783 - RNA, 19 nt, Homo sapiens
  misc_RNA (1)...(19): siRNA sense strand
agaaugaagaucuacgaca

SEQ ID NO: 2291784 - RNA, 19 nt, Homo sapiens
  misc_RNA (1)...(19): siRNA sense strand
gaaugaagaucuacgacag

SEQ ID NO: 2291785 - RNA, 19 nt, Homo sapiens
  misc_RNA (1)...(19): siRNA sense strand
ccagcaacgugcagggcaa

SEQ ID NO: 2291786 - RNA, 19 nt, Homo sapiens
  misc_RNA (1)...(19): siRNA sense strand
gggcaauggcagcguggaa

SEQ ID NO: 2291787 - RNA, 19 nt, Homo sapiens
  misc_RNA (1)...(19): siRNA sense strand
cugcagagcuggugcggau

SEQ ID NO: 2291788 - RNA, 19 nt, Homo sapiens
  misc_RNA (1)...(19): siRNA sense strand
gcagugagcuggaggagga

SEQ ID NO: 2291789 - RNA, 19 nt, Homo sapiens
  misc_RNA (1)...(19): siRNA sense strand
gaaggaaggcugaggccau

SEQ ID NO: 2291790 - RNA, 19 nt, Homo sapiens
  misc_RNA (1)...(19): siRNA sense strand
acuacauugucaagggcaa

SEQ ID NO: 2291791 - RNA, 19 nt, Homo sapiens
  misc_RNA (1)...(19): siRNA sense strand
aagucaugguggaggccua

SEQ ID NO: 2291792 - RNA, 19 nt, Homo sapiens
  misc_RNA (1)...(19): siRNA sense strand
aguauaagcagaagcccaa

SEQ ID NO: 2291793 - RNA, 19 nt, Homo sapiens
  misc_RNA (1)...(19): siRNA sense strand
cugaaagugcagaaaguca

SEQ ID NO: 2291794 - RNA, 19 nt, Homo sapiens
  misc_RNA (1)...(19): siRNA sense strand
uguacaaguauaagcagaa

SEQ ID NO: 2291795 - RNA, 19 nt, Homo sapiens
  misc_RNA (1)...(19): siRNA sense strand
cugcuauuguacaaguaua

SEQ ID NO: 2291796 - RNA, 19 nt, Homo sapiens
  misc_RNA (1)...(19): siRNA sense strand
ucgagagcuaugagggcaa

SEQ ID NO: 2291797 - RNA, 19 nt, Homo sapiens
  misc_RNA (1)...(19): siRNA sense strand
ccaaguucauucagagcca

SEQ ID NO: 2291798 - RNA, 19 nt, Homo sapiens
  misc_RNA (1)...(19): siRNA sense strand
gguaagcgucauauggaca

SEQ ID NO: 2291799 - RNA, 19 nt, Homo sapiens
  misc_RNA (1)...(19): siRNA sense strand
ccaauggucauguggccaa

SEQ ID NO: 2291800 - RNA, 19 nt, Homo sapiens
  misc_RNA (1)...(19): siRNA sense strand
ugaagguggcugugaagau

SEQ ID NO: 2291801 - RNA, 19 nt, Homo sapiens
  misc_RNA (1)...(19): siRNA sense strand
gugaagaugcugaagucca

SEQ ID NO: 2291802 - RNA, 19 nt, Homo sapiens
  misc_RNA (1)...(19): siRNA sense strand
cugagcaagaccuggacaa

SEQ ID NO: 2291803 - RNA, 19 nt, Homo sapiens
  misc_RNA (1)...(19): siRNA sense strand
gagcuggagccuuugggaa

SEQ ID NO: 2291804 - RNA, 19 nt, Homo sapiens
  misc_RNA (1)...(19): siRNA sense strand
gcauccuggugaacagcaa

SEQ ID NO: 2291805 - RNA, 19 nt, Homo sapiens
  misc_RNA (1)...(19): siRNA sense strand
aaguauaagcagaagccca

SEQ ID NO: 2291806 - RNA, 19 nt, Homo sapiens
  misc_RNA (1)...(19): siRNA sense strand
acuccuuccuggccagaaa

SEQ ID NO: 2291807 - RNA, 19 nt, Homo sapiens
  misc_RNA (1)...(19): siRNA sense strand
gcgucgacuauaagaacau

SEQ ID NO: 2291808 - RNA, 19 nt, Homo sapiens
  misc_RNA (1)...(19): siRNA sense strand
ucauauggacauucaucaa

SEQ ID NO: 2291809 - RNA, 19 nt, Homo sapiens
  misc_RNA (1)...(19): siRNA sense strand
ccaaagaauauauacagca

SEQ ID NO: 2291810 - RNA, 19 nt, Homo sapiens
  misc_RNA (1)...(19): siRNA sense strand
augaaugacuccaacuaca

SEQ ID NO: 2291811 - RNA, 19 nt, Homo sapiens
  misc_RNA (1)...(19): siRNA sense strand
gugaaggauggauaccaaa

SEQ ID NO: 2291812 - RNA, 19 nt, Homo sapiens
  misc_RNA (1)...(19): siRNA sense strand
caagaaaacuccaagcuga

SEQ ID NO: 2291813 - RNA, 19 nt, Homo sapiens
  misc_RNA (1)...(19): siRNA sense strand
acuccaagcugaaaaggaa

SEQ ID NO: 2291814 - RNA, 19 nt, Homo sapiens
  misc_RNA (1)...(19): siRNA sense strand
ccaugcaagaauacaacaa

SEQ ID NO: 2291815 - RNA, 19 nt, Homo sapiens
  misc_RNA (1)...(19): siRNA sense strand
aauacaacaaagagagcga

SEQ ID NO: 2291816 - RNA, 19 nt, Homo sapiens
  misc_RNA (1)...(19): siRNA sense strand
caacaaagagagcgaggac

SEQ ID NO: 2291817 - RNA, 19 nt, Homo sapiens
  misc_RNA (1)...(19): siRNA sense strand
cagggaagacucugggcau

SEQ ID NO: 2291818 - RNA, 19 nt, Homo sapiens
  misc_RNA (1)...(19): siRNA sense strand
uugcaugggacgaaagcuu

SEQ ID NO: 2291819 - RNA, 19 nt, Homo sapiens
  misc_RNA (1)...(19): siRNA sense strand
agggaagacucugggcauu

SEQ ID NO: 2291820 - RNA, 19 nt, Homo sapiens
  misc_RNA (1)...(19): siRNA sense strand
guuacagagggaaggccaa

SEQ ID NO: 2291821 - RNA, 19 nt, Homo sapiens
  misc_RNA (1)...(19): siRNA sense strand
ggacaaaggugaaggagga

SEQ ID NO: 2291822 - RNA, 19 nt, Homo sapiens
  misc_RNA (1)...(19): siRNA sense strand
ggaucaagaagguggagaa

SEQ ID NO: 2291823 - RNA, 19 nt, Homo sapiens
  misc_RNA (1)...(19): siRNA sense strand
ugacaaaggaacuggaaga

SEQ ID NO: 2291824 - RNA, 19 nt, Homo sapiens
  misc_RNA (1)...(19): siRNA sense strand
gguccaagcuuguggcuga

SEQ ID NO: 2291825 - RNA, 19 nt, Homo sapiens
  misc_RNA (1)...(19): siRNA sense strand
auuaagaaggagaaggaaa

SEQ ID NO: 2291826 - RNA, 19 nt, Homo sapiens
  misc_RNA (1)...(19): siRNA sense strand
aggucaggcuugcgggaua

SEQ ID NO: 2291827 - RNA, 19 nt, Homo sapiens
  misc_RNA (1)...(19): siRNA sense strand
cagcaaccuuugagggaga

SEQ ID NO: 2291828 - RNA, 19 nt, Homo sapiens
  misc_RNA (1)...(19): siRNA sense strand
ggacaugaaugaaaggguu

SEQ ID NO: 2291829 - RNA, 19 nt, Homo sapiens
  misc_RNA (1)...(19): siRNA sense strand
uggaagaugccaagaaaga

SEQ ID NO: 2291830 - RNA, 19 nt, Homo sapiens
  misc_RNA (1)...(19): siRNA sense strand
aguuaaagguguuggauuc

SEQ ID NO: 2291831 - RNA, 19 nt, Homo sapiens
  misc_RNA (1)...(19): siRNA sense strand
cugcagagcuggaaaagaa

SEQ ID NO: 2291832 - RNA, 19 nt, Homo sapiens
  misc_RNA (1)...(19): siRNA sense strand
gcggcaaaucuaagaaauu

SEQ ID NO: 2291833 - RNA, 19 nt, Homo sapiens
  misc_RNA (1)...(19): siRNA sense strand
aggagaaggcagagaagga

SEQ ID NO: 2291834 - RNA, 19 nt, Homo sapiens
  misc_RNA (1)...(19): siRNA sense strand
cagaaagagcugagaugga

SEQ ID NO: 2291835 - RNA, 19 nt, Homo sapiens
  misc_RNA (1)...(19): siRNA sense strand
gcuacaauucagcgagcaa

SEQ ID NO: 2291836 - RNA, 19 nt, Homo sapiens
  misc_RNA (1)...(19): siRNA sense strand
gaaaagaugaggcgagcaa

SEQ ID NO: 2291837 - RNA, 19 nt, Homo sapiens
  misc_RNA (1)...(19): siRNA sense strand
uuaagaaggagaaggaaaa

SEQ ID NO: 2291838 - RNA, 19 nt, Homo sapiens
  misc_RNA (1)...(19): siRNA sense strand
agaccauguuggagacaga

SEQ ID NO: 2291839 - RNA, 19 nt, Homo sapiens
  misc_RNA (1)...(19): siRNA sense strand
gaguuaaagguguuggauu

SEQ ID NO: 2291840 - RNA, 19 nt, Homo sapiens
  misc_RNA (1)...(19): siRNA sense strand
auucaaaggcagagccaca

SEQ ID NO: 2291841 - RNA, 19 nt, Homo sapiens
  misc_RNA (1)...(19): siRNA sense strand
gcagcagaagagagagcaa

SEQ ID NO: 2291842 - RNA, 19 nt, Homo sapiens
  misc_RNA (1)...(19): siRNA sense strand
uuaccuugcuuguuggaaa

SEQ ID NO: 2291843 - RNA, 19 nt, Homo sapiens
  misc_RNA (1)...(19): siRNA sense strand
ccucaguacuauaaguuga

SEQ ID NO: 2291844 - RNA, 19 nt, Homo sapiens
  misc_RNA (1)...(19): siRNA sense strand
cagaaaugcuggugcuuuu

SEQ ID NO: 2291845 - RNA, 19 nt, Homo sapiens
  misc_RNA (1)...(19): siRNA sense strand
ggcaugagccagaaggaga

SEQ ID NO: 2291846 - RNA, 19 nt, Homo sapiens
  misc_RNA (1)...(19): siRNA sense strand
agaagagacugcugggagu

SEQ ID NO: 2291847 - RNA, 19 nt, Homo sapiens
  misc_RNA (1)...(19): siRNA sense strand
uggagaaaucugaagccaa

SEQ ID NO: 2291848 - RNA, 19 nt, Homo sapiens
  misc_RNA (1)...(19): siRNA sense strand
cugaaaacuugcaaaagaa

SEQ ID NO: 2291849 - RNA, 19 nt, Homo sapiens
  misc_RNA (1)...(19): siRNA sense strand
ggcuagagaagcagcagaa

SEQ ID NO: 2291850 - RNA, 19 nt, Homo sapiens
  misc_RNA (1)...(19): siRNA sense strand
agaagcagcagaagagaga

SEQ ID NO: 2291851 - RNA, 19 nt, Homo sapiens
  misc_RNA (1)...(19): siRNA sense strand
guccaagaacagugagaca

SEQ ID NO: 2291852 - RNA, 19 nt, Homo sapiens
  misc_RNA (1)...(19): siRNA sense strand
augcacaggaacaguauaa

SEQ ID NO: 2291853 - RNA, 19 nt, Homo sapiens
  misc_RNA (1)...(19): siRNA sense strand
caggacugcuucuggacaa

SEQ ID NO: 2291854 - RNA, 19 nt, Homo sapiens
  misc_RNA (1)...(19): siRNA sense strand
uuuaccagcaugagaauua

SEQ ID NO: 2291855 - RNA, 19 nt, Homo sapiens
  misc_RNA (1)...(19): siRNA sense strand
agaccaagaccaagaagga

SEQ ID NO: 2291856 - RNA, 19 nt, Homo sapiens
  misc_RNA (1)...(19): siRNA sense strand
cugaacugaaggaugaaua

SEQ ID NO: 2291857 - RNA, 19 nt, Homo sapiens
  misc_RNA (1)...(19): siRNA sense strand
acaugaaugcagagggcga

SEQ ID NO: 2291858 - RNA, 19 nt, Homo sapiens
  misc_RNA (1)...(19): siRNA sense strand
ugaagauaugagagugcaa

SEQ ID NO: 2291859 - RNA, 19 nt, Homo sapiens
  misc_RNA (1)...(19): siRNA sense strand
cuucacaauuuucggaaua

SEQ ID NO: 2291860 - RNA, 19 nt, Homo sapiens
  misc_RNA (1)...(19): siRNA sense strand
cagcacagucauugcaaga

SEQ ID NO: 2291861 - RNA, 19 nt, Homo sapiens
  misc_RNA (1)...(19): siRNA sense strand
cugccaagguguccaagaa

SEQ ID NO: 2291862 - RNA, 19 nt, Homo sapiens
  misc_RNA (1)...(19): siRNA sense strand
ugaaggaugcacaggaaca

SEQ ID NO: 2291863 - RNA, 19 nt, Homo sapiens
  misc_RNA (1)...(19): siRNA sense strand
agccagaggacaugaauga

SEQ ID NO: 2291864 - RNA, 19 nt, Homo sapiens
  misc_RNA (1)...(19): siRNA sense strand
ugagaauuaagaaggagaa

SEQ ID NO: 2291865 - RNA, 19 nt, Homo sapiens
  misc_RNA (1)...(19): siRNA sense strand
cuagagaagcagcagaaga

SEQ ID NO: 2291866 - RNA, 19 nt, Homo sapiens
  misc_RNA (1)...(19): siRNA sense strand
ucuuaaacacagugaagga

SEQ ID NO: 2291867 - RNA, 19 nt, Homo sapiens
  misc_RNA (1)...(19): siRNA sense strand
ggacccgggacaagaagaa

SEQ ID NO: 2291868 - RNA, 19 nt, Homo sapiens
  misc_RNA (1)...(19): siRNA sense strand
ccacagagaaacaggaccu

SEQ ID NO: 2291869 - RNA, 19 nt, Homo sapiens
  misc_RNA (1)...(19): siRNA sense strand
ucagcgagcaaguggagaa

SEQ ID NO: 2291870 - RNA, 19 nt, Homo sapiens
  misc_RNA (1)...(19): siRNA sense strand
acugaagguuggaugccua

SEQ ID NO: 2291871 - RNA, 19 nt, Homo sapiens
  misc_RNA (1)...(19): siRNA sense strand
gcuacagguggaaaugaaa

SEQ ID NO: 2291872 - RNA, 19 nt, Homo sapiens
  misc_RNA (1)...(19): siRNA sense strand
uucaagaucuucagggaga

SEQ ID NO: 2291873 - RNA, 19 nt, Homo sapiens
  misc_RNA (1)...(19): siRNA sense strand
gaucagaagaugacguugu

SEQ ID NO: 2291874 - RNA, 19 nt, Homo sapiens
  misc_RNA (1)...(19): siRNA sense strand
aaagaugaggcgagcaaaa

SEQ ID NO: 2291875 - RNA, 19 nt, Homo sapiens
  misc_RNA (1)...(19): siRNA sense strand
gggagaaggacaucaucau

SEQ ID NO: 2291876 - RNA, 19 nt, Homo sapiens
  misc_RNA (1)...(19): siRNA sense strand
gcuucaagaucuucaggga

SEQ ID NO: 2291877 - RNA, 19 nt, Homo sapiens
  misc_RNA (1)...(19): siRNA sense strand
auaugagagugcaacuaaa

SEQ ID NO: 2291878 - RNA, 19 nt, Homo sapiens
  misc_RNA (1)...(19): siRNA sense strand
agaccaagaaggaucaaga

SEQ ID NO: 2291879 - RNA, 19 nt, Homo sapiens
  misc_RNA (1)...(19): siRNA sense strand
ggguauaucagaugagaaa

SEQ ID NO: 2291880 - RNA, 19 nt, Homo sapiens
  misc_RNA (1)...(19): siRNA sense strand
gagaagaccaggagggcaa

SEQ ID NO: 2291881 - RNA, 19 nt, Homo sapiens
  misc_RNA (1)...(19): siRNA sense strand
acgauaaguuuguggaaaa

SEQ ID NO: 2291882 - RNA, 19 nt, Homo sapiens
  misc_RNA (1)...(19): siRNA sense strand
uggaaaagcuucuggacaa

SEQ ID NO: 2291883 - RNA, 19 nt, Homo sapiens
  misc_RNA (1)...(19): siRNA sense strand
aagcaaaguuucagcucaa

SEQ ID NO: 2291884 - RNA, 19 nt, Homo sapiens
  misc_RNA (1)...(19): siRNA sense strand
cuuuguaagaucagagaua

SEQ ID NO: 2291885 - RNA, 19 nt, Homo sapiens
  misc_RNA (1)...(19): siRNA sense strand
acgaauuagcagagcuuaa

SEQ ID NO: 2291886 - RNA, 19 nt, Homo sapiens
  misc_RNA (1)...(19): siRNA sense strand
agaaagaaauaacagggaa

SEQ ID NO: 2291887 - RNA, 19 nt, Homo sapiens
  misc_RNA (1)...(19): siRNA sense strand
aguugaagaaagugaacaa

SEQ ID NO: 2291888 - RNA, 19 nt, Homo sapiens
  misc_RNA (1)...(19): siRNA sense strand
acaaaggauucuaggagau

SEQ ID NO: 2291889 - RNA, 19 nt, Homo sapiens
  misc_RNA (1)...(19): siRNA sense strand
cgcagaagcauuagaagaa

SEQ ID NO: 2291890 - RNA, 19 nt, Homo sapiens
  misc_RNA (1)...(19): siRNA sense strand
aguuagaacgccagaagaa

SEQ ID NO: 2291891 - RNA, 19 nt, Homo sapiens
  misc_RNA (1)...(19): siRNA sense strand
auauaaacaaagaggguga

SEQ ID NO: 2291892 - RNA, 19 nt, Homo sapiens
  misc_RNA (1)...(19): siRNA sense strand
ccuaaaauuuccugaagaa

SEQ ID NO: 2291893 - RNA, 19 nt, Homo sapiens
  misc_RNA (1)...(19): siRNA sense strand
cuacaaagaagaaagugaa

SEQ ID NO: 2291894 - RNA, 19 nt, Homo sapiens
  misc_RNA (1)...(19): siRNA sense strand
acguuauucuggagguuaa

SEQ ID NO: 2291895 - RNA, 19 nt, Homo sapiens
  misc_RNA (1)...(19): siRNA sense strand
cagaaauggaugauaugaa

SEQ ID NO: 2291896 - RNA, 19 nt, Homo sapiens
  misc_RNA (1)...(19): siRNA sense strand
cuaugagaaucuuggagaa

SEQ ID NO: 2291897 - RNA, 19 nt, Homo sapiens
  misc_RNA (1)...(19): siRNA sense strand
ccuacaaagaagaaaguga

SEQ ID NO: 2291898 - RNA, 19 nt, Homo sapiens
  misc_RNA (1)...(19): siRNA sense strand
gaacugaagaaaagugaaa

SEQ ID NO: 2291899 - RNA, 19 nt, Homo sapiens
  misc_RNA (1)...(19): siRNA sense strand
cucaaauucucaagagcaa

SEQ ID NO: 2291900 - RNA, 19 nt, Homo sapiens
  misc_RNA (1)...(19): siRNA sense strand
caaugaagaggaaacgaaa

SEQ ID NO: 2291901 - RNA, 19 nt, Homo sapiens
  misc_RNA (1)...(19): siRNA sense strand
ccaaugaagaggaaacgaa

SEQ ID NO: 2291902 - RNA, 19 nt, Homo sapiens
  misc_RNA (1)...(19): siRNA sense strand
caauaagagaagagaaaug

SEQ ID NO: 2291903 - RNA, 19 nt, Homo sapiens
  misc_RNA (1)...(19): siRNA sense strand
cgaaaguugaagaaaguga

SEQ ID NO: 2291904 - RNA, 19 nt, Homo sapiens
  misc_RNA (1)...(19): siRNA sense strand
aagugaaagaacugagaau

SEQ ID NO: 2291905 - RNA, 19 nt, Homo sapiens
  misc_RNA (1)...(19): siRNA sense strand
agaagaaagugaaagaacu

SEQ ID NO: 2291906 - RNA, 19 nt, Homo sapiens
  misc_RNA (1)...(19): siRNA sense strand
augaagacaugcugaguga

SEQ ID NO: 2291907 - RNA, 19 nt, Homo sapiens
  misc_RNA (1)...(19): siRNA sense strand
gauucuaggagaugaaaga

SEQ ID NO: 2291908 - RNA, 19 nt, Homo sapiens
  misc_RNA (1)...(19): siRNA sense strand
gaaagaaauaacagggaac

SEQ ID NO: 2291909 - RNA, 19 nt, Homo sapiens
  misc_RNA (1)...(19): siRNA sense strand
uauaauaugcugaaggaca

SEQ ID NO: 2291910 - RNA, 19 nt, Homo sapiens
  misc_RNA (1)...(19): siRNA sense strand
auucacagcucgacaggaa

SEQ ID NO: 2291911 - RNA, 19 nt, Homo sapiens
  misc_RNA (1)...(19): siRNA sense strand
acgcagaagcauuagaaga

SEQ ID NO: 2291912 - RNA, 19 nt, Homo sapiens
  misc_RNA (1)...(19): siRNA sense strand
agagaagagaaauggaaga

SEQ ID NO: 2291913 - RNA, 19 nt, Homo sapiens
  misc_RNA (1)...(19): siRNA sense strand
cagaagcauuagaagaaaa

SEQ ID NO: 2291914 - RNA, 19 nt, Homo sapiens
  misc_RNA (1)...(19): siRNA sense strand
gaugaagcucuaugagaau

SEQ ID NO: 2291915 - RNA, 19 nt, Homo sapiens
  misc_RNA (1)...(19): siRNA sense strand
ggaacgugacaucaagaaa

SEQ ID NO: 2291916 - RNA, 19 nt, Homo sapiens
  misc_RNA (1)...(19): siRNA sense strand
cagaaaaucaacacgauaa

SEQ ID NO: 2291917 - RNA, 19 nt, Homo sapiens
  misc_RNA (1)...(19): siRNA sense strand
ggacacugcugcugaaaau

SEQ ID NO: 2291918 - RNA, 19 nt, Homo sapiens
  misc_RNA (1)...(19): siRNA sense strand
gagacuggugugauggaua

SEQ ID NO: 2291919 - RNA, 19 nt, Homo sapiens
  misc_RNA (1)...(19): siRNA sense strand
ugugaugagcucugugaaa

SEQ ID NO: 2291920 - RNA, 19 nt, Homo sapiens
  misc_RNA (1)...(19): siRNA sense strand
uuggaagcagugagagaaa

SEQ ID NO: 2291921 - RNA, 19 nt, Homo sapiens
  misc_RNA (1)...(19): siRNA sense strand
uguggaagguuuagaaaau

SEQ ID NO: 2291922 - RNA, 19 nt, Homo sapiens
  misc_RNA (1)...(19): siRNA sense strand
gagaaagcugaacaagaaa

SEQ ID NO: 2291923 - RNA, 19 nt, Homo sapiens
  misc_RNA (1)...(19): siRNA sense strand
gagaaauggaagagaagac

SEQ ID NO: 2291924 - RNA, 19 nt, Homo sapiens
  misc_RNA (1)...(19): siRNA sense strand
aagagaaagcugaacaaga

SEQ ID NO: 2291925 - RNA, 19 nt, Homo sapiens
  misc_RNA (1)...(19): siRNA sense strand
ggaaaagcuucuggacaaa

SEQ ID NO: 2291926 - RNA, 19 nt, Homo sapiens
  misc_RNA (1)...(19): siRNA sense strand
caccaauuguggaagguuu

SEQ ID NO: 2291927 - RNA, 19 nt, Homo sapiens
  misc_RNA (1)...(19): siRNA sense strand
aggcgaaaguugaagaaag

SEQ ID NO: 2291928 - RNA, 19 nt, Homo sapiens
  misc_RNA (1)...(19): siRNA sense strand
caucaauggaacaacaaau

SEQ ID NO: 2291929 - RNA, 19 nt, Homo sapiens
  misc_RNA (1)...(19): siRNA sense strand
aagcagaaauccagcaacu

SEQ ID NO: 2291930 - RNA, 19 nt, Homo sapiens
  misc_RNA (1)...(19): siRNA sense strand
agucaaagaagacaaguuu

SEQ ID NO: 2291931 - RNA, 19 nt, Homo sapiens
  misc_RNA (1)...(19): siRNA sense strand
cagaagauacucaacgaau

SEQ ID NO: 2291932 - RNA, 19 nt, Homo sapiens
  misc_RNA (1)...(19): siRNA sense strand
gugaagaacugaagaaaag

SEQ ID NO: 2291933 - RNA, 19 nt, Homo sapiens
  misc_RNA (1)...(19): siRNA sense strand
ccaugaaggucuuggacuc

SEQ ID NO: 2291934 - RNA, 19 nt, Homo sapiens
  misc_RNA (1)...(19): siRNA sense strand
uggcagaugaugugcguga

SEQ ID NO: 2291935 - RNA, 19 nt, Homo sapiens
  misc_RNA (1)...(19): siRNA sense strand
aagagaaucaauuggucaa

SEQ ID NO: 2291936 - RNA, 19 nt, Homo sapiens
  misc_RNA (1)...(19): siRNA sense strand
caacgaauuagcagagcuu

SEQ ID NO: 2291937 - RNA, 19 nt, Homo sapiens
  misc_RNA (1)...(19): siRNA sense strand
acaacaugaugaagcucua

SEQ ID NO: 2291938 - RNA, 19 nt, Homo sapiens
  misc_RNA (1)...(19): siRNA sense strand
cgucgaaagcggauuccaa

SEQ ID NO: 2291939 - RNA, 19 nt, Homo sapiens
  misc_RNA (1)...(19): siRNA sense strand
gagaaugaugagcuugaua

SEQ ID NO: 2291940 - RNA, 19 nt, Homo sapiens
  misc_RNA (1)...(19): siRNA sense strand
ggguauaucagaugagaaa

SEQ ID NO: 2291941 - RNA, 19 nt, Homo sapiens
  misc_RNA (1)...(19): siRNA sense strand
gagaagaccaggagggcaa

SEQ ID NO: 2291942 - RNA, 19 nt, Homo sapiens
  misc_RNA (1)...(19): siRNA sense strand
acgauaaguuuguggaaaa

SEQ ID NO: 2291943 - RNA, 19 nt, Homo sapiens
  misc_RNA (1)...(19): siRNA sense strand
uggaaaagcuucuggacaa

SEQ ID NO: 2291944 - RNA, 19 nt, Homo sapiens
  misc_RNA (1)...(19): siRNA sense strand
aagcaaaguuucagcucaa

SEQ ID NO: 2291945 - RNA, 19 nt, Homo sapiens
  misc_RNA (1)...(19): siRNA sense strand
cuuuguaagaucagagaua

SEQ ID NO: 2291946 - RNA, 19 nt, Homo sapiens
  misc_RNA (1)...(19): siRNA sense strand
acgaauuagcagagcuuaa

SEQ ID NO: 2291947 - RNA, 19 nt, Homo sapiens
  misc_RNA (1)...(19): siRNA sense strand
agaaagaaauaacagggaa

SEQ ID NO: 2291948 - RNA, 19 nt, Homo sapiens
  misc_RNA (1)...(19): siRNA sense strand
aguugaagaaagugaacaa

SEQ ID NO: 2291949 - RNA, 19 nt, Homo sapiens
  misc_RNA (1)...(19): siRNA sense strand
acaaaggauucuaggagau

SEQ ID NO: 2291950 - RNA, 19 nt, Homo sapiens
  misc_RNA (1)...(19): siRNA sense strand
cgcagaagcauuagaagaa

SEQ ID NO: 2291951 - RNA, 19 nt, Homo sapiens
  misc_RNA (1)...(19): siRNA sense strand
aguuagaacgccagaagaa

SEQ ID NO: 2291952 - RNA, 19 nt, Homo sapiens
  misc_RNA (1)...(19): siRNA sense strand
auauaaacaaagaggguga

SEQ ID NO: 2291953 - RNA, 19 nt, Homo sapiens
  misc_RNA (1)...(19): siRNA sense strand
ccuaaaauuuccugaagaa

SEQ ID NO: 2291954 - RNA, 19 nt, Homo sapiens
  misc_RNA (1)...(19): siRNA sense strand
cuacaaagaagaaagugaa

SEQ ID NO: 2291955 - RNA, 19 nt, Homo sapiens
  misc_RNA (1)...(19): siRNA sense strand
acguuauucuggagguuaa

SEQ ID NO: 2291956 - RNA, 19 nt, Homo sapiens
  misc_RNA (1)...(19): siRNA sense strand
cagaaauggaugauaugaa

SEQ ID NO: 2291957 - RNA, 19 nt, Homo sapiens
  misc_RNA (1)...(19): siRNA sense strand
cuaugagaaucuuggagaa

SEQ ID NO: 2291958 - RNA, 19 nt, Homo sapiens
  misc_RNA (1)...(19): siRNA sense strand
ccuacaaagaagaaaguga

SEQ ID NO: 2291959 - RNA, 19 nt, Homo sapiens
  misc_RNA (1)...(19): siRNA sense strand
gaacugaagaaaagugaaa

SEQ ID NO: 2291960 - RNA, 19 nt, Homo sapiens
  misc_RNA (1)...(19): siRNA sense strand
cucaaauucucaagagcaa

SEQ ID NO: 2291961 - RNA, 19 nt, Homo sapiens
  misc_RNA (1)...(19): siRNA sense strand
caaugaagaggaaacgaaa

SEQ ID NO: 2291962 - RNA, 19 nt, Homo sapiens
  misc_RNA (1)...(19): siRNA sense strand
ccaaugaagaggaaacgaa

SEQ ID NO: 2291963 - RNA, 19 nt, Homo sapiens
  misc_RNA (1)...(19): siRNA sense strand
caauaagagaagagaaaug

SEQ ID NO: 2291964 - RNA, 19 nt, Homo sapiens
  misc_RNA (1)...(19): siRNA sense strand
cgaaaguugaagaaaguga

SEQ ID NO: 2291965 - RNA, 19 nt, Homo sapiens
  misc_RNA (1)...(19): siRNA sense strand
aagugaaagaacugagaau

SEQ ID NO: 2291966 - RNA, 19 nt, Homo sapiens
  misc_RNA (1)...(19): siRNA sense strand
agaagaaagugaaagaacu

SEQ ID NO: 2291967 - RNA, 19 nt, Homo sapiens
  misc_RNA (1)...(19): siRNA sense strand
augaagacaugcugaguga

SEQ ID NO: 2291968 - RNA, 19 nt, Homo sapiens
  misc_RNA (1)...(19): siRNA sense strand
gauucuaggagaugaaaga

SEQ ID NO: 2291969 - RNA, 19 nt, Homo sapiens
  misc_RNA (1)...(19): siRNA sense strand
gaaagaaauaacagggaac

SEQ ID NO: 2291970 - RNA, 19 nt, Homo sapiens
  misc_RNA (1)...(19): siRNA sense strand
uauaauaugcugaaggaca

SEQ ID NO: 2291971 - RNA, 19 nt, Homo sapiens
  misc_RNA (1)...(19): siRNA sense strand
auucacagcucgacaggaa

SEQ ID NO: 2291972 - RNA, 19 nt, Homo sapiens
  misc_RNA (1)...(19): siRNA sense strand
acgcagaagcauuagaaga

SEQ ID NO: 2291973 - RNA, 19 nt, Homo sapiens
  misc_RNA (1)...(19): siRNA sense strand
agagaagagaaauggaaga

SEQ ID NO: 2291974 - RNA, 19 nt, Homo sapiens
  misc_RNA (1)...(19): siRNA sense strand
cagaagcauuagaagaaaa

SEQ ID NO: 2291975 - RNA, 19 nt, Homo sapiens
  misc_RNA (1)...(19): siRNA sense strand
gaugaagcucuaugagaau

SEQ ID NO: 2291976 - RNA, 19 nt, Homo sapiens
  misc_RNA (1)...(19): siRNA sense strand
ggaacgugacaucaagaaa

SEQ ID NO: 2291977 - RNA, 19 nt, Homo sapiens
  misc_RNA (1)...(19): siRNA sense strand
cagaaaaucaacacgauaa

SEQ ID NO: 2291978 - RNA, 19 nt, Homo sapiens
  misc_RNA (1)...(19): siRNA sense strand
ggacacugcugcugaaaau

SEQ ID NO: 2291979 - RNA, 19 nt, Homo sapiens
  misc_RNA (1)...(19): siRNA sense strand
gagacuggugugauggaua

SEQ ID NO: 2291980 - RNA, 19 nt, Homo sapiens
  misc_RNA (1)...(19): siRNA sense strand
ugugaugagcucugugaaa

SEQ ID NO: 2291981 - RNA, 19 nt, Homo sapiens
  misc_RNA (1)...(19): siRNA sense strand
uuggaagcagugagagaaa

SEQ ID NO: 2291982 - RNA, 19 nt, Homo sapiens
  misc_RNA (1)...(19): siRNA sense strand
uguggaagguuuagaaaau

SEQ ID NO: 2291983 - RNA, 19 nt, Homo sapiens
  misc_RNA (1)...(19): siRNA sense strand
gagaaagcugaacaagaaa

SEQ ID NO: 2291984 - RNA, 19 nt, Homo sapiens
  misc_RNA (1)...(19): siRNA sense strand
gagaaauggaagagaagac

SEQ ID NO: 2291985 - RNA, 19 nt, Homo sapiens
  misc_RNA (1)...(19): siRNA sense strand
aagagaaagcugaacaaga

SEQ ID NO: 2291986 - RNA, 19 nt, Homo sapiens
  misc_RNA (1)...(19): siRNA sense strand
ggaaaagcuucuggacaaa

SEQ ID NO: 2291987 - RNA, 19 nt, Homo sapiens
  misc_RNA (1)...(19): siRNA sense strand
caccaauuguggaagguuu

SEQ ID NO: 2291988 - RNA, 19 nt, Homo sapiens
  misc_RNA (1)...(19): siRNA sense strand
aggcgaaaguugaagaaag

SEQ ID NO: 2291989 - RNA, 19 nt, Homo sapiens
  misc_RNA (1)...(19): siRNA sense strand
caucaauggaacaacaaau

SEQ ID NO: 2291990 - RNA, 19 nt, Homo sapiens
  misc_RNA (1)...(19): siRNA sense strand
aagcagaaauccagcaacu

SEQ ID NO: 2291991 - RNA, 19 nt, Homo sapiens
  misc_RNA (1)...(19): siRNA sense strand
agucaaagaagacaaguuu

SEQ ID NO: 2291992 - RNA, 19 nt, Homo sapiens
  misc_RNA (1)...(19): siRNA sense strand
cagaagauacucaacgaau

SEQ ID NO: 2291993 - RNA, 19 nt, Homo sapiens
  misc_RNA (1)...(19): siRNA sense strand
gugaagaacugaagaaaag

SEQ ID NO: 2291994 - RNA, 19 nt, Homo sapiens
  misc_RNA (1)...(19): siRNA sense strand
ccaugaaggucuuggacuc

SEQ ID NO: 2291995 - RNA, 19 nt, Homo sapiens
  misc_RNA (1)...(19): siRNA sense strand
uggcagaugaugugcguga

SEQ ID NO: 2291996 - RNA, 19 nt, Homo sapiens
  misc_RNA (1)...(19): siRNA sense strand
aagagaaucaauuggucaa

SEQ ID NO: 2291997 - RNA, 19 nt, Homo sapiens
  misc_RNA (1)...(19): siRNA sense strand
caacgaauuagcagagcuu

SEQ ID NO: 2291998 - RNA, 19 nt, Homo sapiens
  misc_RNA (1)...(19): siRNA sense strand
acaacaugaugaagcucua

SEQ ID NO: 2291999 - RNA, 19 nt, Homo sapiens
  misc_RNA (1)...(19): siRNA sense strand
cgucgaaagcggauuccaa

SEQ ID NO: 2292000 - RNA, 19 nt, Homo sapiens
  misc_RNA (1)...(19): siRNA sense strand
gagaaugaugagcuugaua

SEQ ID NO: 2292001 - RNA, 19 nt, Homo sapiens
  misc_RNA (1)...(19): siRNA sense strand
gcacagaaccugaguggac

SEQ ID NO: 2292002 - RNA, 19 nt, Homo sapiens
  misc_RNA (1)...(19): siRNA sense strand
aggaggagccggaagcaga

SEQ ID NO: 2292003 - RNA, 19 nt, Homo sapiens
  misc_RNA (1)...(19): siRNA sense strand
cggaagcagaggugcgcau

SEQ ID NO: 2292004 - RNA, 19 nt, Homo sapiens
  misc_RNA (1)...(19): siRNA sense strand
cccuauggccagacgguga

SEQ ID NO: 2292005 - RNA, 19 nt, Homo sapiens
  misc_RNA (1)...(19): siRNA sense strand
agcccaagaagguccgaaa

SEQ ID NO: 2292006 - RNA, 19 nt, Homo sapiens
  misc_RNA (1)...(19): siRNA sense strand
ugagaauggugaauggcaa

SEQ ID NO: 2292007 - RNA, 19 nt, Homo sapiens
  misc_RNA (1)...(19): siRNA sense strand
cagagaaagaagugaccga

SEQ ID NO: 2292008 - RNA, 19 nt, Homo sapiens
  misc_RNA (1)...(19): siRNA sense strand
accaaagaaaguucguaaa

SEQ ID NO: 2292009 - RNA, 19 nt, Homo sapiens
  misc_RNA (1)...(19): siRNA sense strand
ccaaaugggaggaggagga

SEQ ID NO: 2292010 - RNA, 19 nt, Homo sapiens
  misc_RNA (1)...(19): siRNA sense strand
ucaaauaacucguugccuu

SEQ ID NO: 2292011 - RNA, 19 nt, Homo sapiens
  misc_RNA (1)...(19): siRNA sense strand
aggaggaggaggaggacga

SEQ ID NO: 2292012 - RNA, 19 nt, Homo sapiens
  misc_RNA (1)...(19): siRNA sense strand
gggaggaugaggaggagga

SEQ ID NO: 2292013 - RNA, 19 nt, Homo sapiens
  misc_RNA (1)...(19): siRNA sense strand
aggaugaggaggaggagga

SEQ ID NO: 2292014 - RNA, 19 nt, Homo sapiens
  misc_RNA (1)...(19): siRNA sense strand
aggaugaggaggaggagga

SEQ ID NO: 2292015 - RNA, 19 nt, Homo sapiens
  misc_RNA (1)...(19): siRNA sense strand
agaucaagaaagaggagga

SEQ ID NO: 2292016 - RNA, 19 nt, Homo sapiens
  misc_RNA (1)...(19): siRNA sense strand
aggaggaggaggaggagga

SEQ ID NO: 2292017 - RNA, 19 nt, Homo sapiens
  misc_RNA (1)...(19): siRNA sense strand
aggaggauuacgaggauga

SEQ ID NO: 2292018 - RNA, 19 nt, Homo sapiens
  misc_RNA (1)...(19): siRNA sense strand
cgguggagaucaacggcau

SEQ ID NO: 2292019 - RNA, 19 nt, Homo sapiens
  misc_RNA (1)...(19): siRNA sense strand
acaagaagcuguggcguga

SEQ ID NO: 2292020 - RNA, 19 nt, Homo sapiens
  misc_RNA (1)...(19): siRNA sense strand
aggcagccauagacagcaa

SEQ ID NO: 2292021 - RNA, 19 nt, Homo sapiens
  misc_RNA (1)...(19): siRNA sense strand
aggagcacuuugaggacau

SEQ ID NO: 2292022 - RNA, 19 nt, Homo sapiens
  misc_RNA (1)...(19): siRNA sense strand
gcagagaagggccaggaga

SEQ ID NO: 2292023 - RNA, 19 nt, Homo sapiens
  misc_RNA (1)...(19): siRNA sense strand
cagcagaacuuccuggcca

SEQ ID NO: 2292024 - RNA, 19 nt, Homo sapiens
  misc_RNA (1)...(19): siRNA sense strand
acgaggacaugaagcccaa

SEQ ID NO: 2292025 - RNA, 19 nt, Homo sapiens
  misc_RNA (1)...(19): siRNA sense strand
ggccaggagaggagcacuu

SEQ ID NO: 2292026 - RNA, 19 nt, Homo sapiens
  misc_RNA (1)...(19): siRNA sense strand
augaggaggaggaggagga

SEQ ID NO: 2292027 - RNA, 19 nt, Homo sapiens
  misc_RNA (1)...(19): siRNA sense strand
augaggaggaggaggagga

SEQ ID NO: 2292028 - RNA, 19 nt, Homo sapiens
  misc_RNA (1)...(19): siRNA sense strand
ucaagaaagaggaggacuc

SEQ ID NO: 2292029 - RNA, 19 nt, Homo sapiens
  misc_RNA (1)...(19): siRNA sense strand
cuacaggccgugauggaga

SEQ ID NO: 2292030 - RNA, 19 nt, Homo sapiens
  misc_RNA (1)...(19): siRNA sense strand
gggagaagcuggagucugc

SEQ ID NO: 2292031 - RNA, 19 nt, Homo sapiens
  misc_RNA (1)...(19): siRNA sense strand
aggaggaggagauggagga

SEQ ID NO: 2292032 - RNA, 19 nt, Homo sapiens
  misc_RNA (1)...(19): siRNA sense strand
cuggaacagcugcgggaga

SEQ ID NO: 2292033 - RNA, 19 nt, Homo sapiens
  misc_RNA (1)...(19): siRNA sense strand
aaugggaggaggaggagau

SEQ ID NO: 2292034 - RNA, 19 nt, Homo sapiens
  misc_RNA (1)...(19): siRNA sense strand
caugcagaagcgagggaca

SEQ ID NO: 2292035 - RNA, 19 nt, Homo sapiens
  misc_RNA (1)...(19): siRNA sense strand
ccaacguccuugagggcau

SEQ ID NO: 2292036 - RNA, 19 nt, Homo sapiens
  misc_RNA (1)...(19): siRNA sense strand
gagcagaugguuaugguga

SEQ ID NO: 2292037 - RNA, 19 nt, Homo sapiens
  misc_RNA (1)...(19): siRNA sense strand
agaugguuauggugaucaa

SEQ ID NO: 2292038 - RNA, 19 nt, Homo sapiens
  misc_RNA (1)...(19): siRNA sense strand
cugaugaauaucuguacua

SEQ ID NO: 2292039 - RNA, 19 nt, Homo sapiens
  misc_RNA (1)...(19): siRNA sense strand
gaggaggagaacagggcca

SEQ ID NO: 2292040 - RNA, 19 nt, Homo sapiens
  misc_RNA (1)...(19): siRNA sense strand
gcauccagcucauugccaa

SEQ ID NO: 2292041 - RNA, 19 nt, Homo sapiens
  misc_RNA (1)...(19): siRNA sense strand
ccgaggugcugaaggugca

SEQ ID NO: 2292042 - RNA, 19 nt, Homo sapiens
  misc_RNA (1)...(19): siRNA sense strand
cgacccaagcagaaguaaa

SEQ ID NO: 2292043 - RNA, 19 nt, Homo sapiens
  misc_RNA (1)...(19): siRNA sense strand
gcuucaucgucuuggagaa

SEQ ID NO: 2292044 - RNA, 19 nt, Homo sapiens
  misc_RNA (1)...(19): siRNA sense strand
agaaguaaaucaagcagca

SEQ ID NO: 2292045 - RNA, 19 nt, Homo sapiens
  misc_RNA (1)...(19): siRNA sense strand
aagaagacguucagccugu

SEQ ID NO: 2292046 - RNA, 19 nt, Homo sapiens
  misc_RNA (1)...(19): siRNA sense strand
gcucagugguucaucgugu

SEQ ID NO: 2292047 - RNA, 19 nt, Homo sapiens
  misc_RNA (1)...(19): siRNA sense strand
aagcagaagaaguggccaa

SEQ ID NO: 2292048 - RNA, 19 nt, Homo sapiens
  misc_RNA (1)...(19): siRNA sense strand
ugaucagguuugugaccaa

SEQ ID NO: 2292049 - RNA, 19 nt, Homo sapiens
  misc_RNA (1)...(19): siRNA sense strand
ggaucagaaacaugagcau

SEQ ID NO: 2292050 - RNA, 19 nt, Homo sapiens
  misc_RNA (1)...(19): siRNA sense strand
ggacagagcugcuucucca

SEQ ID NO: 2292051 - RNA, 19 nt, Homo sapiens
  misc_RNA (1)...(19): siRNA sense strand
ccauuaauucccugcagaa

SEQ ID NO: 2292052 - RNA, 19 nt, Homo sapiens
  misc_RNA (1)...(19): siRNA sense strand
ccaucaagacggagaagcu

SEQ ID NO: 2292053 - RNA, 19 nt, Homo sapiens
  misc_RNA (1)...(19): siRNA sense strand
ucaagaaggugaucgggca

SEQ ID NO: 2292054 - RNA, 19 nt, Homo sapiens
  misc_RNA (1)...(19): siRNA sense strand
aucagaaacaugagcauuu

SEQ ID NO: 2292055 - RNA, 19 nt, Homo sapiens
  misc_RNA (1)...(19): siRNA sense strand
guggagaucagccgggaga

SEQ ID NO: 2292056 - RNA, 19 nt, Homo sapiens
  misc_RNA (1)...(19): siRNA sense strand
cugcgauacuauuaugaca

SEQ ID NO: 2292057 - RNA, 19 nt, Homo sapiens
  misc_RNA (1)...(19): siRNA sense strand
ccacacugcuuaauggcca

SEQ ID NO: 2292058 - RNA, 19 nt, Homo sapiens
  misc_RNA (1)...(19): siRNA sense strand
ggaggaagcuggaggagca

SEQ ID NO: 2292059 - RNA, 19 nt, Homo sapiens
  misc_RNA (1)...(19): siRNA sense strand
auacacaagcugagggaga

SEQ ID NO: 2292060 - RNA, 19 nt, Homo sapiens
  misc_RNA (1)...(19): siRNA sense strand
caucagacccuuaaggaga

SEQ ID NO: 2292061 - RNA, 19 nt, Homo sapiens
  misc_RNA (1)...(19): siRNA sense strand
gugaaugaugugagugaga

SEQ ID NO: 2292062 - RNA, 19 nt, Homo sapiens
  misc_RNA (1)...(19): siRNA sense strand
aggaagaggccaggaggaa

SEQ ID NO: 2292063 - RNA, 19 nt, Homo sapiens
  misc_RNA (1)...(19): siRNA sense strand
agaaagagcaggaggacag

SEQ ID NO: 2292064 - RNA, 19 nt, Homo sapiens
  misc_RNA (1)...(19): siRNA sense strand
gcuucgacuaccagggcaa

SEQ ID NO: 2292065 - RNA, 19 nt, Homo sapiens
  misc_RNA (1)...(19): siRNA sense strand
aggagaaagagcaggagga

SEQ ID NO: 2292066 - RNA, 19 nt, Homo sapiens
  misc_RNA (1)...(19): siRNA sense strand
agacuaugugaaaggguuu

SEQ ID NO: 2292067 - RNA, 19 nt, Homo sapiens
  misc_RNA (1)...(19): siRNA sense strand
acgaugaguacgagaacga

SEQ ID NO: 2292068 - RNA, 19 nt, Homo sapiens
  misc_RNA (1)...(19): siRNA sense strand
cggagaagcacgaguccca

SEQ ID NO: 2292069 - RNA, 19 nt, Homo sapiens
  misc_RNA (1)...(19): siRNA sense strand
gagaaagagcaggaggaca

SEQ ID NO: 2292070 - RNA, 19 nt, Homo sapiens
  misc_RNA (1)...(19): siRNA sense strand
guguggaacaagaccgaau

SEQ ID NO: 2292071 - RNA, 19 nt, Homo sapiens
  misc_RNA (1)...(19): siRNA sense strand
ugugaaaggguuuggagga

SEQ ID NO: 2292072 - RNA, 19 nt, Homo sapiens
  misc_RNA (1)...(19): siRNA sense strand
acaagagcgcggugggcuu

SEQ ID NO: 2292073 - RNA, 19 nt, Homo sapiens
  misc_RNA (1)...(19): siRNA sense strand
ggaacuugaaacaggacca

SEQ ID NO: 2292074 - RNA, 19 nt, Homo sapiens
  misc_RNA (1)...(19): siRNA sense strand
gcuuugaauaccaggggaa

SEQ ID NO: 2292075 - RNA, 19 nt, Homo sapiens
  misc_RNA (1)...(19): siRNA sense strand
cgccguuggcuuugaguau

SEQ ID NO: 2292076 - RNA, 19 nt, Homo sapiens
  misc_RNA (1)...(19): siRNA sense strand
cuaaggagaaagagcagga

SEQ ID NO: 2292077 - RNA, 19 nt, Homo sapiens
  misc_RNA (1)...(19): siRNA sense strand
uugugaaugaugugaguga

SEQ ID NO: 2292078 - RNA, 19 nt, Homo sapiens
  misc_RNA (1)...(19): siRNA sense strand
agggcaagacggagaagca

SEQ ID NO: 2292079 - RNA, 19 nt, Homo sapiens
  misc_RNA (1)...(19): siRNA sense strand
acuugaaacaggaccaaaa

SEQ ID NO: 2292080 - RNA, 19 nt, Homo sapiens
  misc_RNA (1)...(19): siRNA sense strand
acgaauaucagucgaaacu

SEQ ID NO: 2292081 - RNA, 19 nt, Homo sapiens
  misc_RNA (1)...(19): siRNA sense strand
ccuacgaugaguacgagaa

SEQ ID NO: 2292082 - RNA, 19 nt, Homo sapiens
  misc_RNA (1)...(19): siRNA sense strand
aagacuacuccaaaggauu

SEQ ID NO: 2292083 - RNA, 19 nt, Homo sapiens
  misc_RNA (1)...(19): siRNA sense strand
caggaagaggccaggagga

SEQ ID NO: 2292084 - RNA, 19 nt, Homo sapiens
  misc_RNA (1)...(19): siRNA sense strand
ccguuggcuuugaguauca

SEQ ID NO: 2292085 - RNA, 19 nt, Homo sapiens
  misc_RNA (1)...(19): siRNA sense strand
cccagaaagacuaugugaa

SEQ ID NO: 2292086 - RNA, 19 nt, Homo sapiens
  misc_RNA (1)...(19): siRNA sense strand
ggaggaagcuggaggagca

SEQ ID NO: 2292087 - RNA, 19 nt, Homo sapiens
  misc_RNA (1)...(19): siRNA sense strand
auacacaagcugagggaga

SEQ ID NO: 2292088 - RNA, 19 nt, Homo sapiens
  misc_RNA (1)...(19): siRNA sense strand
caucagacccuuaaggaga

SEQ ID NO: 2292089 - RNA, 19 nt, Homo sapiens
  misc_RNA (1)...(19): siRNA sense strand
gugaaugaugugagugaga

SEQ ID NO: 2292090 - RNA, 19 nt, Homo sapiens
  misc_RNA (1)...(19): siRNA sense strand
aggaagaggccaggaggaa

SEQ ID NO: 2292091 - RNA, 19 nt, Homo sapiens
  misc_RNA (1)...(19): siRNA sense strand
agaaagagcaggaggacag

SEQ ID NO: 2292092 - RNA, 19 nt, Homo sapiens
  misc_RNA (1)...(19): siRNA sense strand
gcuucgacuaccagggcaa

SEQ ID NO: 2292093 - RNA, 19 nt, Homo sapiens
  misc_RNA (1)...(19): siRNA sense strand
aggagaaagagcaggagga

SEQ ID NO: 2292094 - RNA, 19 nt, Homo sapiens
  misc_RNA (1)...(19): siRNA sense strand
agacuaugugaaaggguuu

SEQ ID NO: 2292095 - RNA, 19 nt, Homo sapiens
  misc_RNA (1)...(19): siRNA sense strand
acgaugaguacgagaacga

SEQ ID NO: 2292096 - RNA, 19 nt, Homo sapiens
  misc_RNA (1)...(19): siRNA sense strand
cggagaagcacgaguccca

SEQ ID NO: 2292097 - RNA, 19 nt, Homo sapiens
  misc_RNA (1)...(19): siRNA sense strand
gagaaagagcaggaggaca

SEQ ID NO: 2292098 - RNA, 19 nt, Homo sapiens
  misc_RNA (1)...(19): siRNA sense strand
guguggaacaagaccgaau

SEQ ID NO: 2292099 - RNA, 19 nt, Homo sapiens
  misc_RNA (1)...(19): siRNA sense strand
ugugaaaggguuuggagga

SEQ ID NO: 2292100 - RNA, 19 nt, Homo sapiens
  misc_RNA (1)...(19): siRNA sense strand
acaagagcgcggugggcuu

SEQ ID NO: 2292101 - RNA, 19 nt, Homo sapiens
  misc_RNA (1)...(19): siRNA sense strand
ggaacuugaaacaggacca

SEQ ID NO: 2292102 - RNA, 19 nt, Homo sapiens
  misc_RNA (1)...(19): siRNA sense strand
gcuuugaauaccaggggaa

SEQ ID NO: 2292103 - RNA, 19 nt, Homo sapiens
  misc_RNA (1)...(19): siRNA sense strand
cgccguuggcuuugaguau

SEQ ID NO: 2292104 - RNA, 19 nt, Homo sapiens
  misc_RNA (1)...(19): siRNA sense strand
cuaaggagaaagagcagga

SEQ ID NO: 2292105 - RNA, 19 nt, Homo sapiens
  misc_RNA (1)...(19): siRNA sense strand
uugugaaugaugugaguga

SEQ ID NO: 2292106 - RNA, 19 nt, Homo sapiens
  misc_RNA (1)...(19): siRNA sense strand
agggcaagacggagaagca

SEQ ID NO: 2292107 - RNA, 19 nt, Homo sapiens
  misc_RNA (1)...(19): siRNA sense strand
acuugaaacaggaccaaaa

SEQ ID NO: 2292108 - RNA, 19 nt, Homo sapiens
  misc_RNA (1)...(19): siRNA sense strand
acgaauaucagucgaaacu

SEQ ID NO: 2292109 - RNA, 19 nt, Homo sapiens
  misc_RNA (1)...(19): siRNA sense strand
ccuacgaugaguacgagaa

SEQ ID NO: 2292110 - RNA, 19 nt, Homo sapiens
  misc_RNA (1)...(19): siRNA sense strand
aagacuacuccaaaggauu

SEQ ID NO: 2292111 - RNA, 19 nt, Homo sapiens
  misc_RNA (1)...(19): siRNA sense strand
caggaagaggccaggagga

SEQ ID NO: 2292112 - RNA, 19 nt, Homo sapiens
  misc_RNA (1)...(19): siRNA sense strand
ccguuggcuuugaguauca

SEQ ID NO: 2292113 - RNA, 19 nt, Homo sapiens
  misc_RNA (1)...(19): siRNA sense strand
cccagaaagacuaugugaa

SEQ ID NO: 2292114 - RNA, 19 nt, Homo sapiens
  misc_RNA (1)...(19): siRNA sense strand
aaugcaaaccacagaugaa

SEQ ID NO: 2292115 - RNA, 19 nt, Homo sapiens
  misc_RNA (1)...(19): siRNA sense strand
acuauuacaacaagaggau

SEQ ID NO: 2292116 - RNA, 19 nt, Homo sapiens
  misc_RNA (1)...(19): siRNA sense strand
gaacaagagaacugggcaa

SEQ ID NO: 2292117 - RNA, 19 nt, Homo sapiens
  misc_RNA (1)...(19): siRNA sense strand
uggaaugguuugaugggaa

SEQ ID NO: 2292118 - RNA, 19 nt, Homo sapiens
  misc_RNA (1)...(19): siRNA sense strand
gcagaacaccuaugggcaa

SEQ ID NO: 2292119 - RNA, 19 nt, Homo sapiens
  misc_RNA (1)...(19): siRNA sense strand
gggaggaagaagaggagga

SEQ ID NO: 2292120 - RNA, 19 nt, Homo sapiens
  misc_RNA (1)...(19): siRNA sense strand
aggaagaagaggaggacgu

SEQ ID NO: 2292121 - RNA, 19 nt, Homo sapiens
  misc_RNA (1)...(19): siRNA sense strand
uggacaaggaaacaggaaa

SEQ ID NO: 2292122 - RNA, 19 nt, Homo sapiens
  misc_RNA (1)...(19): siRNA sense strand
caggaaagcccaaaggcga

SEQ ID NO: 2292123 - RNA, 19 nt, Homo sapiens
  misc_RNA (1)...(19): siRNA sense strand
cuguagauccagaugaaga

SEQ ID NO: 2292124 - RNA, 19 nt, Homo sapiens
  misc_RNA (1)...(19): siRNA sense strand
gcccaaaggcgaugccaca

SEQ ID NO: 2292125 - RNA, 19 nt, Homo sapiens
  misc_RNA (1)...(19): siRNA sense strand
cgucaggagcgcagagauc

SEQ ID NO: 2292126 - RNA, 19 nt, Homo sapiens
  misc_RNA (1)...(19): siRNA sense strand
ccuggagaacagagugcaa

SEQ ID NO: 2292127 - RNA, 19 nt, Homo sapiens
  misc_RNA (1)...(19): siRNA sense strand
uggccgugguggagacaga

SEQ ID NO: 2292128 - RNA, 19 nt, Homo sapiens
  misc_RNA (1)...(19): siRNA sense strand
acguggaggaccuggaaaa

SEQ ID NO: 2292129 - RNA, 19 nt, Homo sapiens
  misc_RNA (1)...(19): siRNA sense strand
gcacagaccacccaggcau

SEQ ID NO: 2292130 - RNA, 19 nt, Homo sapiens
  misc_RNA (1)...(19): siRNA sense strand
aguuaugaucagagcaguu

SEQ ID NO: 2292131 - RNA, 19 nt, Homo sapiens
  misc_RNA (1)...(19): siRNA sense strand
aagaggaggacguggagga

SEQ ID NO: 2292132 - RNA, 19 nt, Homo sapiens
  misc_RNA (1)...(19): siRNA sense strand
aggaaagcccaaaggcgau

SEQ ID NO: 2292133 - RNA, 19 nt, Homo sapiens
  misc_RNA (1)...(19): siRNA sense strand
aggaggacguggaggaccu

SEQ ID NO: 2292134 - RNA, 19 nt, Homo sapiens
  misc_RNA (1)...(19): siRNA sense strand
ccucauggaucgugguggu

SEQ ID NO: 2292135 - RNA, 19 nt, Homo sapiens
  misc_RNA (1)...(19): siRNA sense strand
gcuauggaaccuauggaca

SEQ ID NO: 2292136 - RNA, 19 nt, Homo sapiens
  misc_RNA (1)...(19): siRNA sense strand
caauauagccaacagagca

SEQ ID NO: 2292137 - RNA, 19 nt, Homo sapiens
  misc_RNA (1)...(19): siRNA sense strand
aggccguggaggagauaga

SEQ ID NO: 2292138 - RNA, 19 nt, Homo sapiens
  misc_RNA (1)...(19): siRNA sense strand
aagaagaggaggacgugga

SEQ ID NO: 2292139 - RNA, 19 nt, Homo sapiens
  misc_RNA (1)...(19): siRNA sense strand
aggaaacaggaaagcccaa

SEQ ID NO: 2292140 - RNA, 19 nt, Homo sapiens
  misc_RNA (1)...(19): siRNA sense strand
acggauuacaguaccuaua

SEQ ID NO: 2292141 - RNA, 19 nt, Homo sapiens
  misc_RNA (1)...(19): siRNA sense strand
gcaacaaagcuauggaacc

SEQ ID NO: 2292142 - RNA, 19 nt, Homo sapiens
  misc_RNA (1)...(19): siRNA sense strand
gaacaagagaacugggcaa

SEQ ID NO: 2292143 - RNA, 19 nt, Homo sapiens
  misc_RNA (1)...(19): siRNA sense strand
uggaaugguuugaugggaa

SEQ ID NO: 2292144 - RNA, 19 nt, Homo sapiens
  misc_RNA (1)...(19): siRNA sense strand
gcagaacaccuaugggcaa

SEQ ID NO: 2292145 - RNA, 19 nt, Homo sapiens
  misc_RNA (1)...(19): siRNA sense strand
gggaggaagaagaggagga

SEQ ID NO: 2292146 - RNA, 19 nt, Homo sapiens
  misc_RNA (1)...(19): siRNA sense strand
aggaagaagaggaggacgu

SEQ ID NO: 2292147 - RNA, 19 nt, Homo sapiens
  misc_RNA (1)...(19): siRNA sense strand
uggacaaggaaacaggaaa

SEQ ID NO: 2292148 - RNA, 19 nt, Homo sapiens
  misc_RNA (1)...(19): siRNA sense strand
caggaaagcccaaaggcga

SEQ ID NO: 2292149 - RNA, 19 nt, Homo sapiens
  misc_RNA (1)...(19): siRNA sense strand
cuguagauccagaugaaga

SEQ ID NO: 2292150 - RNA, 19 nt, Homo sapiens
  misc_RNA (1)...(19): siRNA sense strand
gcccaaaggcgaugccaca

SEQ ID NO: 2292151 - RNA, 19 nt, Homo sapiens
  misc_RNA (1)...(19): siRNA sense strand
cgucaggagcgcagagauc

SEQ ID NO: 2292152 - RNA, 19 nt, Homo sapiens
  misc_RNA (1)...(19): siRNA sense strand
ccuggagaacagagugcaa

SEQ ID NO: 2292153 - RNA, 19 nt, Homo sapiens
  misc_RNA (1)...(19): siRNA sense strand
uggccgugguggagacaga

SEQ ID NO: 2292154 - RNA, 19 nt, Homo sapiens
  misc_RNA (1)...(19): siRNA sense strand
acguggaggaccuggaaaa

SEQ ID NO: 2292155 - RNA, 19 nt, Homo sapiens
  misc_RNA (1)...(19): siRNA sense strand
gcacagaccacccaggcau

SEQ ID NO: 2292156 - RNA, 19 nt, Homo sapiens
  misc_RNA (1)...(19): siRNA sense strand
aguuaugaucagagcaguu

SEQ ID NO: 2292157 - RNA, 19 nt, Homo sapiens
  misc_RNA (1)...(19): siRNA sense strand
aagaggaggacguggagga

SEQ ID NO: 2292158 - RNA, 19 nt, Homo sapiens
  misc_RNA (1)...(19): siRNA sense strand
aggaaagcccaaaggcgau

SEQ ID NO: 2292159 - RNA, 19 nt, Homo sapiens
  misc_RNA (1)...(19): siRNA sense strand
aggaggacguggaggaccu

SEQ ID NO: 2292160 - RNA, 19 nt, Homo sapiens
  misc_RNA (1)...(19): siRNA sense strand
ccucauggaucgugguggu

SEQ ID NO: 2292161 - RNA, 19 nt, Homo sapiens
  misc_RNA (1)...(19): siRNA sense strand
gcuauggaaccuauggaca

SEQ ID NO: 2292162 - RNA, 19 nt, Homo sapiens
  misc_RNA (1)...(19): siRNA sense strand
caauauagccaacagagca

SEQ ID NO: 2292163 - RNA, 19 nt, Homo sapiens
  misc_RNA (1)...(19): siRNA sense strand
aggccguggaggagauaga

SEQ ID NO: 2292164 - RNA, 19 nt, Homo sapiens
  misc_RNA (1)...(19): siRNA sense strand
aagaagaggaggacgugga

SEQ ID NO: 2292165 - RNA, 19 nt, Homo sapiens
  misc_RNA (1)...(19): siRNA sense strand
aggaaacaggaaagcccaa

SEQ ID NO: 2292166 - RNA, 19 nt, Homo sapiens
  misc_RNA (1)...(19): siRNA sense strand
acggauuacaguaccuaua

SEQ ID NO: 2292167 - RNA, 19 nt, Homo sapiens
  misc_RNA (1)...(19): siRNA sense strand
gcaacaaagcuauggaacc

SEQ ID NO: 2292168 - RNA, 19 nt, Homo sapiens
  misc_RNA (1)...(19): siRNA sense strand
ggacaaggacaaagggaaa

SEQ ID NO: 2292169 - RNA, 19 nt, Homo sapiens
  misc_RNA (1)...(19): siRNA sense strand
gggccaaagacaagggaaa

SEQ ID NO: 2292170 - RNA, 19 nt, Homo sapiens
  misc_RNA (1)...(19): siRNA sense strand
ccaaauacgaagugaauau

SEQ ID NO: 2292171 - RNA, 19 nt, Homo sapiens
  misc_RNA (1)...(19): siRNA sense strand
gguugaagccacagauaaa

SEQ ID NO: 2292172 - RNA, 19 nt, Homo sapiens
  misc_RNA (1)...(19): siRNA sense strand
agggagagguggaggauau

SEQ ID NO: 2292173 - RNA, 19 nt, Homo sapiens
  misc_RNA (1)...(19): siRNA sense strand
caaaauaggugaagagaca

SEQ ID NO: 2292174 - RNA, 19 nt, Homo sapiens
  misc_RNA (1)...(19): siRNA sense strand
agaagaagcaaguguauaa

SEQ ID NO: 2292175 - RNA, 19 nt, Homo sapiens
  misc_RNA (1)...(19): siRNA sense strand
uggaaaugaacaugggaaa

SEQ ID NO: 2292176 - RNA, 19 nt, Homo sapiens
  misc_RNA (1)...(19): siRNA sense strand
cagaaugaauggaagguau

SEQ ID NO: 2292177 - RNA, 19 nt, Homo sapiens
  misc_RNA (1)...(19): siRNA sense strand
cggaagaauucguugguga

SEQ ID NO: 2292178 - RNA, 19 nt, Homo sapiens
  misc_RNA (1)...(19): siRNA sense strand
gugaaagaaagcaaagaaa

SEQ ID NO: 2292179 - RNA, 19 nt, Homo sapiens
  misc_RNA (1)...(19): siRNA sense strand
cguugaaacuauacagaau

SEQ ID NO: 2292180 - RNA, 19 nt, Homo sapiens
  misc_RNA (1)...(19): siRNA sense strand
ggucaugguacgagaucaa

SEQ ID NO: 2292181 - RNA, 19 nt, Homo sapiens
  misc_RNA (1)...(19): siRNA sense strand
gguucaagcuucugauaau

SEQ ID NO: 2292182 - RNA, 19 nt, Homo sapiens
  misc_RNA (1)...(19): siRNA sense strand
cgucuaugaccuugggaua

SEQ ID NO: 2292183 - RNA, 19 nt, Homo sapiens
  misc_RNA (1)...(19): siRNA sense strand
ccgugaaacaacagacaaa

SEQ ID NO: 2292184 - RNA, 19 nt, Homo sapiens
  misc_RNA (1)...(19): siRNA sense strand
gaaacagcuacgugaaaua

SEQ ID NO: 2292185 - RNA, 19 nt, Homo sapiens
  misc_RNA (1)...(19): siRNA sense strand
gaaaggugucagagugaua

SEQ ID NO: 2292186 - RNA, 19 nt, Homo sapiens
  misc_RNA (1)...(19): siRNA sense strand
ugacugacauugaggaaau

SEQ ID NO: 2292187 - RNA, 19 nt, Homo sapiens
  misc_RNA (1)...(19): siRNA sense strand
acuacaggcuaaagauaaa

SEQ ID NO: 2292188 - RNA, 19 nt, Homo sapiens
  misc_RNA (1)...(19): siRNA sense strand
ggaaaaggggacagugaaa

SEQ ID NO: 2292189 - RNA, 19 nt, Homo sapiens
  misc_RNA (1)...(19): siRNA sense strand
caucaaaguaauagacaca

SEQ ID NO: 2292190 - RNA, 19 nt, Homo sapiens
  misc_RNA (1)...(19): siRNA sense strand
aggugaagguggcagauaa

SEQ ID NO: 2292191 - RNA, 19 nt, Homo sapiens
  misc_RNA (1)...(19): siRNA sense strand
gaaacuucgauguggauaa

SEQ ID NO: 2292192 - RNA, 19 nt, Homo sapiens
  misc_RNA (1)...(19): siRNA sense strand
gugaaacaacagacaaaua

SEQ ID NO: 2292193 - RNA, 19 nt, Homo sapiens
  misc_RNA (1)...(19): siRNA sense strand
ggauaaacucaguggagca

SEQ ID NO: 2292194 - RNA, 19 nt, Homo sapiens
  misc_RNA (1)...(19): siRNA sense strand
uagaagugauagaggaaca

SEQ ID NO: 2292195 - RNA, 19 nt, Homo sapiens
  misc_RNA (1)...(19): siRNA sense strand
cugaagagaucaacagaca

SEQ ID NO: 2292196 - RNA, 19 nt, Homo sapiens
  misc_RNA (1)...(19): siRNA sense strand
ggguaauugaggagagcau

SEQ ID NO: 2292197 - RNA, 19 nt, Homo sapiens
  misc_RNA (1)...(19): siRNA sense strand
acaaauacacccugaauau

SEQ ID NO: 2292198 - RNA, 19 nt, Homo sapiens
  misc_RNA (1)...(19): siRNA sense strand
agacagagacaguggcaga

SEQ ID NO: 2292199 - RNA, 19 nt, Homo sapiens
  misc_RNA (1)...(19): siRNA sense strand
gcauauaagcugagcauac

SEQ ID NO: 2292200 - RNA, 19 nt, Homo sapiens
  misc_RNA (1)...(19): siRNA sense strand
aauaaauugugaagggaca

SEQ ID NO: 2292201 - RNA, 19 nt, Homo sapiens
  misc_RNA (1)...(19): siRNA sense strand
caauuaaggcaguugacaa

SEQ ID NO: 2292202 - RNA, 19 nt, Homo sapiens
  misc_RNA (1)...(19): siRNA sense strand
caucagugguguaugaaau

SEQ ID NO: 2292203 - RNA, 19 nt, Homo sapiens
  misc_RNA (1)...(19): siRNA sense strand
agcgauaguugaagugaaa

SEQ ID NO: 2292204 - RNA, 19 nt, Homo sapiens
  misc_RNA (1)...(19): siRNA sense strand
caucagaacuggacaggga

SEQ ID NO: 2292205 - RNA, 19 nt, Homo sapiens
  misc_RNA (1)...(19): siRNA sense strand
agacagagcgggagacuga

SEQ ID NO: 2292206 - RNA, 19 nt, Homo sapiens
  misc_RNA (1)...(19): siRNA sense strand
ggaagguauaugugaagaa

SEQ ID NO: 2292207 - RNA, 19 nt, Homo sapiens
  misc_RNA (1)...(19): siRNA sense strand
ugaaaguucuggaugcaaa

SEQ ID NO: 2292208 - RNA, 19 nt, Homo sapiens
  misc_RNA (1)...(19): siRNA sense strand
gagaaaggugucagaguga

SEQ ID NO: 2292209 - RNA, 19 nt, Homo sapiens
  misc_RNA (1)...(19): siRNA sense strand
uaagaugauuagucggaaa

SEQ ID NO: 2292210 - RNA, 19 nt, Homo sapiens
  misc_RNA (1)...(19): siRNA sense strand
auagagaagugaaggauca

SEQ ID NO: 2292211 - RNA, 19 nt, Homo sapiens
  misc_RNA (1)...(19): siRNA sense strand
ggcuaaagauaaaggaacu

SEQ ID NO: 2292212 - RNA, 19 nt, Homo sapiens
  misc_RNA (1)...(19): siRNA sense strand
cagcaagagucaugaucau

SEQ ID NO: 2292213 - RNA, 19 nt, Homo sapiens
  misc_RNA (1)...(19): siRNA sense strand
gagacaauuaccagauuaa

SEQ ID NO: 2292214 - RNA, 19 nt, Homo sapiens
  misc_RNA (1)...(19): siRNA sense strand
caaacuaaauccagacaca

SEQ ID NO: 2292215 - RNA, 19 nt, Homo sapiens
  misc_RNA (1)...(19): siRNA sense strand
ggugauaacagcagugaca

SEQ ID NO: 2292216 - RNA, 19 nt, Homo sapiens
  misc_RNA (1)...(19): siRNA sense strand
cgacugguauucagguaaa

SEQ ID NO: 2292217 - RNA, 19 nt, Homo sapiens
  misc_RNA (1)...(19): siRNA sense strand
cugcaaaaguucuacaaaa

SEQ ID NO: 2292218 - RNA, 19 nt, Homo sapiens
  misc_RNA (1)...(19): siRNA sense strand
agaaugaauggaagguaua

SEQ ID NO: 2292219 - RNA, 19 nt, Homo sapiens
  misc_RNA (1)...(19): siRNA sense strand
uugcaaggauuguggucaa

SEQ ID NO: 2292220 - RNA, 19 nt, Homo sapiens
  misc_RNA (1)...(19): siRNA sense strand
cagcaaacccagaagcuau

SEQ ID NO: 2292221 - RNA, 19 nt, Homo sapiens
  misc_RNA (1)...(19): siRNA sense strand
ugugaaaguccgagaggau

SEQ ID NO: 2292222 - RNA, 19 nt, Homo sapiens
  misc_RNA (1)...(19): siRNA sense strand
aguuggacuuugagaagaa

SEQ ID NO: 2292223 - RNA, 19 nt, Homo sapiens
  misc_RNA (1)...(19): siRNA sense strand
cugaaguauuuguggacau

SEQ ID NO: 2292224 - RNA, 19 nt, Homo sapiens
  misc_RNA (1)...(19): siRNA sense strand
ugacagugcaacagggauu

SEQ ID NO: 2292225 - RNA, 19 nt, Homo sapiens
  misc_RNA (1)...(19): siRNA sense strand
gggaacaaggcauggaaga

SEQ ID NO: 2292226 - RNA, 19 nt, Homo sapiens
  misc_RNA (1)...(19): siRNA sense strand
gggaaaagccagaccgaga

SEQ ID NO: 2292227 - RNA, 19 nt, Homo sapiens
  misc_RNA (1)...(19): siRNA sense strand
ccagaaagcaauagggaug

SEQ ID NO: 2292228 - RNA, 19 nt, Homo sapiens
  misc_RNA (1)...(19): siRNA sense strand
aaucauuggaguuaggaua

SEQ ID NO: 2292229 - RNA, 19 nt, Homo sapiens
  misc_RNA (1)...(19): siRNA sense strand
ggaacaaggcauggaagaa

SEQ ID NO: 2292230 - RNA, 19 nt, Homo sapiens
  misc_RNA (1)...(19): siRNA sense strand
aguaaggaguauaaaguca

SEQ ID NO: 2292231 - RNA, 19 nt, Homo sapiens
  misc_RNA (1)...(19): siRNA sense strand
gugaagacaaggagguaca

SEQ ID NO: 2292232 - RNA, 19 nt, Homo sapiens
  misc_RNA (1)...(19): siRNA sense strand
ggacauucuuguuggaacu

SEQ ID NO: 2292233 - RNA, 19 nt, Homo sapiens
  misc_RNA (1)...(19): siRNA sense strand
uguagaagugauagaggaa

SEQ ID NO: 2292234 - RNA, 19 nt, Homo sapiens
  misc_RNA (1)...(19): siRNA sense strand
gguaguaacagaugaggau

SEQ ID NO: 2292235 - RNA, 19 nt, Homo sapiens
  misc_RNA (1)...(19): siRNA sense strand
ccaucaagaggaaggagaa

SEQ ID NO: 2292236 - RNA, 19 nt, Homo sapiens
  misc_RNA (1)...(19): siRNA sense strand
cuguaagaauggcggaaca

SEQ ID NO: 2292237 - RNA, 19 nt, Homo sapiens
  misc_RNA (1)...(19): siRNA sense strand
caaggaagcuagaccgaga

SEQ ID NO: 2292238 - RNA, 19 nt, Homo sapiens
  misc_RNA (1)...(19): siRNA sense strand
augcagaacagaagucaaa

SEQ ID NO: 2292239 - RNA, 19 nt, Homo sapiens
  misc_RNA (1)...(19): siRNA sense strand
cgaucacugucaugaauaa

SEQ ID NO: 2292240 - RNA, 19 nt, Homo sapiens
  misc_RNA (1)...(19): siRNA sense strand
aaaugagagaggacagaua

SEQ ID NO: 2292241 - RNA, 19 nt, Homo sapiens
  misc_RNA (1)...(19): siRNA sense strand
ggaaaugaacaugggaaau

SEQ ID NO: 2292242 - RNA, 19 nt, Homo sapiens
  misc_RNA (1)...(19): siRNA sense strand
gggaaauucagcauagauu

SEQ ID NO: 2292243 - RNA, 19 nt, Homo sapiens
  misc_RNA (1)...(19): siRNA sense strand
ugguaaacuugcaguguga

SEQ ID NO: 2292244 - RNA, 19 nt, Homo sapiens
  misc_RNA (1)...(19): siRNA sense strand
agaacaacuuaguaggaua

SEQ ID NO: 2292245 - RNA, 19 nt, Homo sapiens
  misc_RNA (1)...(19): siRNA sense strand
aggaauuacuagagcaaaa

SEQ ID NO: 2292246 - RNA, 19 nt, Homo sapiens
  misc_RNA (1)...(19): siRNA sense strand
ccaugaugauuaaggacaa

SEQ ID NO: 2292247 - RNA, 19 nt, Homo sapiens
  misc_RNA (1)...(19): siRNA sense strand
acucaaacaguuagugaaa

SEQ ID NO: 2292248 - RNA, 19 nt, Homo sapiens
  misc_RNA (1)...(19): siRNA sense strand
cagaauuggagaaguuaaa

SEQ ID NO: 2292249 - RNA, 19 nt, Homo sapiens
  misc_RNA (1)...(19): siRNA sense strand
ugggagaauuacugggcaa

SEQ ID NO: 2292250 - RNA, 19 nt, Homo sapiens
  misc_RNA (1)...(19): siRNA sense strand
augaugaaguguugggauu

SEQ ID NO: 2292251 - RNA, 19 nt, Homo sapiens
  misc_RNA (1)...(19): siRNA sense strand
agauagaggcagagaugau

SEQ ID NO: 2292252 - RNA, 19 nt, Homo sapiens
  misc_RNA (1)...(19): siRNA sense strand
gggaaauuuuggugaagua

SEQ ID NO: 2292253 - RNA, 19 nt, Homo sapiens
  misc_RNA (1)...(19): siRNA sense strand
agagaagagaauugaagaa

SEQ ID NO: 2292254 - RNA, 19 nt, Homo sapiens
  misc_RNA (1)...(19): siRNA sense strand
gaaggaauuacuagagcaa

SEQ ID NO: 2292255 - RNA, 19 nt, Homo sapiens
  misc_RNA (1)...(19): siRNA sense strand
ucagcaagcaagagagcaa

SEQ ID NO: 2292256 - RNA, 19 nt, Homo sapiens
  misc_RNA (1)...(19): siRNA sense strand
ccucaggaauugaaaauaa

SEQ ID NO: 2292257 - RNA, 19 nt, Homo sapiens
  misc_RNA (1)...(19): siRNA sense strand
gcggaagaacuuaugcaaa

SEQ ID NO: 2292258 - RNA, 19 nt, Homo sapiens
  misc_RNA (1)...(19): siRNA sense strand
gugagaagccuuuggcaga

SEQ ID NO: 2292259 - RNA, 19 nt, Homo sapiens
  misc_RNA (1)...(19): siRNA sense strand
agaggaugguggaguguau

SEQ ID NO: 2292260 - RNA, 19 nt, Homo sapiens
  misc_RNA (1)...(19): siRNA sense strand
gcaaguagaaagaggauac

SEQ ID NO: 2292261 - RNA, 19 nt, Homo sapiens
  misc_RNA (1)...(19): siRNA sense strand
aggacaagcagcaggugaa

SEQ ID NO: 2292262 - RNA, 19 nt, Homo sapiens
  misc_RNA (1)...(19): siRNA sense strand
ccaaggaacgauacgacaa

SEQ ID NO: 2292263 - RNA, 19 nt, Homo sapiens
  misc_RNA (1)...(19): siRNA sense strand
gaauagaagcucaagaacu

SEQ ID NO: 2292264 - RNA, 19 nt, Homo sapiens
  misc_RNA (1)...(19): siRNA sense strand
cagaaaguuugcaaguaau

SEQ ID NO: 2292265 - RNA, 19 nt, Homo sapiens
  misc_RNA (1)...(19): siRNA sense strand
cagaacaacggcugcuaaa

SEQ ID NO: 2292266 - RNA, 19 nt, Homo sapiens
  misc_RNA (1)...(19): siRNA sense strand
cugcuaaagaacaagaaau

SEQ ID NO: 2292267 - RNA, 19 nt, Homo sapiens
  misc_RNA (1)...(19): siRNA sense strand
acaagcagcaggugaagaa

SEQ ID NO: 2292268 - RNA, 19 nt, Homo sapiens
  misc_RNA (1)...(19): siRNA sense strand
ggaaauagugaauguccau

SEQ ID NO: 2292269 - RNA, 19 nt, Homo sapiens
  misc_RNA (1)...(19): siRNA sense strand
gugaauguccauaaagaga

SEQ ID NO: 2292270 - RNA, 19 nt, Homo sapiens
  misc_RNA (1)...(19): siRNA sense strand
uggaguuagagaagagaau

SEQ ID NO: 2292271 - RNA, 19 nt, Homo sapiens
  misc_RNA (1)...(19): siRNA sense strand
ugugagaagaagucugaua

SEQ ID NO: 2292272 - RNA, 19 nt, Homo sapiens
  misc_RNA (1)...(19): siRNA sense strand
uggcagaacaggacuggua

SEQ ID NO: 2292273 - RNA, 19 nt, Homo sapiens
  misc_RNA (1)...(19): siRNA sense strand
cugccaaagagaaauauaa

SEQ ID NO: 2292274 - RNA, 19 nt, Homo sapiens
  misc_RNA (1)...(19): siRNA sense strand
agacacaugcagaggacuu

SEQ ID NO: 2292275 - RNA, 19 nt, Homo sapiens
  misc_RNA (1)...(19): siRNA sense strand
aaaugcagcuauagacaau

SEQ ID NO: 2292276 - RNA, 19 nt, Homo sapiens
  misc_RNA (1)...(19): siRNA sense strand
gaaacugccugguagguga

SEQ ID NO: 2292277 - RNA, 19 nt, Homo sapiens
  misc_RNA (1)...(19): siRNA sense strand
cacaugaagcaguguuaaa

SEQ ID NO: 2292278 - RNA, 19 nt, Homo sapiens
  misc_RNA (1)...(19): siRNA sense strand
ugagaaggaagaaggauga

SEQ ID NO: 2292279 - RNA, 19 nt, Homo sapiens
  misc_RNA (1)...(19): siRNA sense strand
gggagauacaguucagaga

SEQ ID NO: 2292280 - RNA, 19 nt, Homo sapiens
  misc_RNA (1)...(19): siRNA sense strand
aauuacugggcaagggaaa

SEQ ID NO: 2292281 - RNA, 19 nt, Homo sapiens
  misc_RNA (1)...(19): siRNA sense strand
gauacaguucagagaguga

SEQ ID NO: 2292282 - RNA, 19 nt, Homo sapiens
  misc_RNA (1)...(19): siRNA sense strand
cuuaauuaugggagauaca

SEQ ID NO: 2292283 - RNA, 19 nt, Homo sapiens
  misc_RNA (1)...(19): siRNA sense strand
uggaaugacaaaucagcaa

SEQ ID NO: 2292284 - RNA, 19 nt, Homo sapiens
  misc_RNA (1)...(19): siRNA sense strand
caaggaacgauacgacaaa

SEQ ID NO: 2292285 - RNA, 19 nt, Homo sapiens
  misc_RNA (1)...(19): siRNA sense strand
cuguauauucugauggaca

SEQ ID NO: 2292286 - RNA, 19 nt, Homo sapiens
  misc_RNA (1)...(19): siRNA sense strand
agacugggaauuacgguua

SEQ ID NO: 2292287 - RNA, 19 nt, Homo sapiens
  misc_RNA (1)...(19): siRNA sense strand
gaauacagccagauaacca

SEQ ID NO: 2292288 - RNA, 19 nt, Homo sapiens
  misc_RNA (1)...(19): siRNA sense strand
ggaauaacuuaacagcaga

SEQ ID NO: 2292289 - RNA, 19 nt, Homo sapiens
  misc_RNA (1)...(19): siRNA sense strand
ggaaagaaaggagaggcua

SEQ ID NO: 2292290 - RNA, 19 nt, Homo sapiens
  misc_RNA (1)...(19): siRNA sense strand
aauuuauggcccugagaau

SEQ ID NO: 2292291 - RNA, 19 nt, Homo sapiens
  misc_RNA (1)...(19): siRNA sense strand
ugaugaauacagccagaua

SEQ ID NO: 2292292 - RNA, 19 nt, Homo sapiens
  misc_RNA (1)...(19): siRNA sense strand
ugagaugcacugaagcaaa

SEQ ID NO: 2292293 - RNA, 19 nt, Homo sapiens
  misc_RNA (1)...(19): siRNA sense strand
caauaugaucaucccaaua

SEQ ID NO: 2292294 - RNA, 19 nt, Homo sapiens
  misc_RNA (1)...(19): siRNA sense strand
acaaaagaugcaagaagaa

SEQ ID NO: 2292295 - RNA, 19 nt, Homo sapiens
  misc_RNA (1)...(19): siRNA sense strand
cugaaacuugugagaagaa

SEQ ID NO: 2292296 - RNA, 19 nt, Homo sapiens
  misc_RNA (1)...(19): siRNA sense strand
gcaagagagcaaguagaaa

SEQ ID NO: 2292297 - RNA, 19 nt, Homo sapiens
  misc_RNA (1)...(19): siRNA sense strand
gagcaaguagaaagaggau

SEQ ID NO: 2292298 - RNA, 19 nt, Homo sapiens
  misc_RNA (1)...(19): siRNA sense strand
guaggauaaugaagacaca

SEQ ID NO: 2292299 - RNA, 19 nt, Homo sapiens
  misc_RNA (1)...(19): siRNA sense strand
guugaaaacguuagcggaa

SEQ ID NO: 2292300 - RNA, 19 nt, Homo sapiens
  misc_RNA (1)...(19): siRNA sense strand
acagaauuggagaaguuaa

SEQ ID NO: 2292301 - RNA, 19 nt, Homo sapiens
  misc_RNA (1)...(19): siRNA sense strand
gcgaguuuguggagcggau

SEQ ID NO: 2292302 - RNA, 19 nt, Homo sapiens
  misc_RNA (1)...(19): siRNA sense strand
cuacaguauuuuggagaua

SEQ ID NO: 2292303 - RNA, 19 nt, Homo sapiens
  misc_RNA (1)...(19): siRNA sense strand
gguaccuggccaugaacaa

SEQ ID NO: 2292304 - RNA, 19 nt, Homo sapiens
  misc_RNA (1)...(19): siRNA sense strand
ggauccacgagcugggcua

SEQ ID NO: 2292305 - RNA, 19 nt, Homo sapiens
  misc_RNA (1)...(19): siRNA sense strand
agaacagcgccuacaguau

SEQ ID NO: 2292306 - RNA, 19 nt, Homo sapiens
  misc_RNA (1)...(19): siRNA sense strand
gcuucagcguggagaacau

SEQ ID NO: 2292307 - RNA, 19 nt, Homo sapiens
  misc_RNA (1)...(19): siRNA sense strand
ccgagaagaagguggugau

SEQ ID NO: 2292308 - RNA, 19 nt, Homo sapiens
  misc_RNA (1)...(19): siRNA sense strand
cgccuaaggaccuggugaa

SEQ ID NO: 2292309 - RNA, 19 nt, Homo sapiens
  misc_RNA (1)...(19): siRNA sense strand
uguccaaggagaaggagga

SEQ ID NO: 2292310 - RNA, 19 nt, Homo sapiens
  misc_RNA (1)...(19): siRNA sense strand
agguggugaucaagagcga

SEQ ID NO: 2292311 - RNA, 19 nt, Homo sapiens
  misc_RNA (1)...(19): siRNA sense strand
cugcugaaggagaaggaaa

SEQ ID NO: 2292312 - RNA, 19 nt, Homo sapiens
  misc_RNA (1)...(19): siRNA sense strand
gcauggagcugaagaccga

SEQ ID NO: 2292313 - RNA, 19 nt, Homo sapiens
  misc_RNA (1)...(19): siRNA sense strand
aaggagaauccgaagggaa

SEQ ID NO: 2292314 - RNA, 19 nt, Homo sapiens
  misc_RNA (1)...(19): siRNA sense strand
gaagaagagaaaaggagaa

SEQ ID NO: 2292315 - RNA, 19 nt, Homo sapiens
  misc_RNA (1)...(19): siRNA sense strand
cuccagaagaagaagagaa

SEQ ID NO: 2292316 - RNA, 19 nt, Homo sapiens
  misc_RNA (1)...(19): siRNA sense strand
auccgaagggaaaggaaua

SEQ ID NO: 2292317 - RNA, 19 nt, Homo sapiens
  misc_RNA (1)...(19): siRNA sense strand
cagaagaagaagagaaaag

SEQ ID NO: 2292318 - RNA, 19 nt, Homo sapiens
  misc_RNA (1)...(19): siRNA sense strand
ucaaugacccugagcccaa

SEQ ID NO: 2292319 - RNA, 19 nt, Homo sapiens
  misc_RNA (1)...(19): siRNA sense strand
gagaaaaggagaauccgaa

SEQ ID NO: 2292320 - RNA, 19 nt, Homo sapiens
  misc_RNA (1)...(19): siRNA sense strand
ugcugaaggagaaggaaaa

SEQ ID NO: 2292321 - RNA, 19 nt, Homo sapiens
  misc_RNA (1)...(19): siRNA sense strand
cugucaacgcgcaggacuu

SEQ ID NO: 2292322 - RNA, 19 nt, Homo sapiens
  misc_RNA (1)...(19): siRNA sense strand
gggaggaagaggaggagga

SEQ ID NO: 2292323 - RNA, 19 nt, Homo sapiens
  misc_RNA (1)...(19): siRNA sense strand
aggaagaggaggaggacag

SEQ ID NO: 2292324 - RNA, 19 nt, Homo sapiens
  misc_RNA (1)...(19): siRNA sense strand
agcuagugcucucuggaaa

SEQ ID NO: 2292325 - RNA, 19 nt, Homo sapiens
  misc_RNA (1)...(19): siRNA sense strand
ggagggaggaggaagagga

SEQ ID NO: 2292326 - RNA, 19 nt, Homo sapiens
  misc_RNA (1)...(19): siRNA sense strand
gggaggaggaagaggaagc

SEQ ID NO: 2292327 - RNA, 19 nt, Homo sapiens
  misc_RNA (1)...(19): siRNA sense strand
aagaggaggaggacagcuu

SEQ ID NO: 2292328 - RNA, 19 nt, Homo sapiens
  misc_RNA (1)...(19): siRNA sense strand
gggaggaagaggaggagga

SEQ ID NO: 2292329 - RNA, 19 nt, Homo sapiens
  misc_RNA (1)...(19): siRNA sense strand
aggaagaggaggaggacag

SEQ ID NO: 2292330 - RNA, 19 nt, Homo sapiens
  misc_RNA (1)...(19): siRNA sense strand
agcuagugcucucuggaaa

SEQ ID NO: 2292331 - RNA, 19 nt, Homo sapiens
  misc_RNA (1)...(19): siRNA sense strand
ggagggaggaggaagagga

SEQ ID NO: 2292332 - RNA, 19 nt, Homo sapiens
  misc_RNA (1)...(19): siRNA sense strand
gggaggaggaagaggaagc

SEQ ID NO: 2292333 - RNA, 19 nt, Homo sapiens
  misc_RNA (1)...(19): siRNA sense strand
aagaggaggaggacagcuu

SEQ ID NO: 2292334 - RNA, 19 nt, Homo sapiens
  misc_RNA (1)...(19): siRNA sense strand
aggaagagaaggaggcaga

SEQ ID NO: 2292335 - RNA, 19 nt, Homo sapiens
  misc_RNA (1)...(19): siRNA sense strand
uggacuggauugagggcaa

SEQ ID NO: 2292336 - RNA, 19 nt, Homo sapiens
  misc_RNA (1)...(19): siRNA sense strand
aggacagagacgagaguga

SEQ ID NO: 2292337 - RNA, 19 nt, Homo sapiens
  misc_RNA (1)...(19): siRNA sense strand
cuaauuaugcaaaggguga

SEQ ID NO: 2292338 - RNA, 19 nt, Homo sapiens
  misc_RNA (1)...(19): siRNA sense strand
ggggaguggcagagaguau

SEQ ID NO: 2292339 - RNA, 19 nt, Homo sapiens
  misc_RNA (1)...(19): siRNA sense strand
gagcccugguggaggaaga

SEQ ID NO: 2292340 - RNA, 19 nt, Homo sapiens
  misc_RNA (1)...(19): siRNA sense strand
agaaagggccaaagaccau

SEQ ID NO: 2292341 - RNA, 19 nt, Homo sapiens
  misc_RNA (1)...(19): siRNA sense strand
auguauagaacaccagaaa

SEQ ID NO: 2292342 - RNA, 19 nt, Homo sapiens
  misc_RNA (1)...(19): siRNA sense strand
gcgugugacauucaagaaa

SEQ ID NO: 2292343 - RNA, 19 nt, Homo sapiens
  misc_RNA (1)...(19): siRNA sense strand
ccaaugaagaggaaaagaa

SEQ ID NO: 2292344 - RNA, 19 nt, Homo sapiens
  misc_RNA (1)...(19): siRNA sense strand
ggaaaagaggagucagaca

SEQ ID NO: 2292345 - RNA, 19 nt, Homo sapiens
  misc_RNA (1)...(19): siRNA sense strand
uauccaaugaagaggaaaa

SEQ ID NO: 2292346 - RNA, 19 nt, Homo sapiens
  misc_RNA (1)...(19): siRNA sense strand
cugcagcgucuauaggaaa

SEQ ID NO: 2292347 - RNA, 19 nt, Homo sapiens
  misc_RNA (1)...(19): siRNA sense strand
ucgaauagucaaugggaag

SEQ ID NO: 2292348 - RNA, 19 nt, Homo sapiens
  misc_RNA (1)...(19): siRNA sense strand
gaggaaaagaacagagcca

SEQ ID NO: 2292349 - RNA, 19 nt, Homo sapiens
  misc_RNA (1)...(19): siRNA sense strand
ggacuuuaagauugaagau

SEQ ID NO: 2292350 - RNA, 19 nt, Homo sapiens
  misc_RNA (1)...(19): siRNA sense strand
ccuccaggucugacaagaa

SEQ ID NO: 2292351 - RNA, 19 nt, Homo sapiens
  misc_RNA (1)...(19): siRNA sense strand
gcucaaaagccaaaagucu

SEQ ID NO: 2292352 - RNA, 19 nt, Homo sapiens
  misc_RNA (1)...(19): siRNA sense strand
gugacaugguggcggagga

SEQ ID NO: 2292353 - RNA, 19 nt, Homo sapiens
  misc_RNA (1)...(19): siRNA sense strand
ccaggagagcccagcaaga

SEQ ID NO: 2292354 - RNA, 19 nt, Homo sapiens
  misc_RNA (1)...(19): siRNA sense strand
ggccaaagaccauugcaga

SEQ ID NO: 2292355 - RNA, 19 nt, Homo sapiens
  misc_RNA (1)...(19): siRNA sense strand
cauuaagcugugugacuuu

SEQ ID NO: 2292356 - RNA, 19 nt, Homo sapiens
  misc_RNA (1)...(19): siRNA sense strand
uuuugaggauggagcgaaa

SEQ ID NO: 2292357 - RNA, 19 nt, Homo sapiens
  misc_RNA (1)...(19): siRNA sense strand
gcgucacggugcaaggaga

SEQ ID NO: 2292358 - RNA, 19 nt, Homo sapiens
  misc_RNA (1)...(19): siRNA sense strand
aagaaagggccaaagacca

SEQ ID NO: 2292359 - RNA, 19 nt, Homo sapiens
  misc_RNA (1)...(19): siRNA sense strand
uggacuggcaggaagagaa

SEQ ID NO: 2292360 - RNA, 19 nt, Homo sapiens
  misc_RNA (1)...(19): siRNA sense strand
gagugaggugucagaugaa

SEQ ID NO: 2292361 - RNA, 19 nt, Homo sapiens
  misc_RNA (1)...(19): siRNA sense strand
cgacaagaugcgggacuuu

SEQ ID NO: 2292362 - RNA, 19 nt, Homo sapiens
  misc_RNA (1)...(19): siRNA sense strand
cgugugacauucaagaaaa

SEQ ID NO: 2292363 - RNA, 19 nt, Homo sapiens
  misc_RNA (1)...(19): siRNA sense strand
cugagaacgacuuugaaga

SEQ ID NO: 2292364 - RNA, 19 nt, Homo sapiens
  misc_RNA (1)...(19): siRNA sense strand
cguacgagcagcacgccaa

SEQ ID NO: 2292365 - RNA, 19 nt, Homo sapiens
  misc_RNA (1)...(19): siRNA sense strand
guaaagggcagcuggugga

SEQ ID NO: 2292366 - RNA, 19 nt, Homo sapiens
  misc_RNA (1)...(19): siRNA sense strand
ggagcagaauggaggcuac

SEQ ID NO: 2292367 - RNA, 19 nt, Homo sapiens
  misc_RNA (1)...(19): siRNA sense strand
ccguguacauguucagcau

SEQ ID NO: 2292368 - RNA, 19 nt, Homo sapiens
  misc_RNA (1)...(19): siRNA sense strand
cgggaggagcagcaagaca

SEQ ID NO: 2292369 - RNA, 19 nt, Homo sapiens
  misc_RNA (1)...(19): siRNA sense strand
ccauugcagagaugaggaa

SEQ ID NO: 2292370 - RNA, 19 nt, Homo sapiens
  misc_RNA (1)...(19): siRNA sense strand
acaccaauguauagaacac

SEQ ID NO: 2292371 - RNA, 19 nt, Homo sapiens
  misc_RNA (1)...(19): siRNA sense strand
gaaacuucgaauagucaau

SEQ ID NO: 2292372 - RNA, 19 nt, Homo sapiens
  misc_RNA (1)...(19): siRNA sense strand
cagcagaagguguggaguc

SEQ ID NO: 2292373 - RNA, 19 nt, Homo sapiens
  misc_RNA (1)...(19): siRNA sense strand
agagaaggaggcagagacu

SEQ ID NO: 2292374 - RNA, 19 nt, Homo sapiens
  misc_RNA (1)...(19): siRNA sense strand
agagacuggugcagaaaau

SEQ ID NO: 2292375 - RNA, 19 nt, Homo sapiens
  misc_RNA (1)...(19): siRNA sense strand
agaacgacuuugaagaucu

SEQ ID NO: 2292376 - RNA, 19 nt, Homo sapiens
  misc_RNA (1)...(19): siRNA sense strand
gaagauaccgagugggaga

SEQ ID NO: 2292377 - RNA, 19 nt, Homo sapiens
  misc_RNA (1)...(19): siRNA sense strand
caggagaaauucaaggaga

SEQ ID NO: 2292378 - RNA, 19 nt, Homo sapiens
  misc_RNA (1)...(19): siRNA sense strand
agaaauucaaggagagcau

SEQ ID NO: 2292379 - RNA, 19 nt, Homo sapiens
  misc_RNA (1)...(19): siRNA sense strand
uauaaggcuaagaaggaaa

SEQ ID NO: 2292380 - RNA, 19 nt, Homo sapiens
  misc_RNA (1)...(19): siRNA sense strand
gcagaaacuuuuauggaga

SEQ ID NO: 2292381 - RNA, 19 nt, Homo sapiens
  misc_RNA (1)...(19): siRNA sense strand
gcagaaacuaugcaggaga

SEQ ID NO: 2292382 - RNA, 19 nt, Homo sapiens
  misc_RNA (1)...(19): siRNA sense strand
uaaccaaucuauuagggaa

SEQ ID NO: 2292383 - RNA, 19 nt, Homo sapiens
  misc_RNA (1)...(19): siRNA sense strand
ugaaagaagaucuggccuu

SEQ ID NO: 2292384 - RNA, 19 nt, Homo sapiens
  misc_RNA (1)...(19): siRNA sense strand
ggaaggagauuacagcaga

SEQ ID NO: 2292385 - RNA, 19 nt, Homo sapiens
  misc_RNA (1)...(19): siRNA sense strand
gguuugauaaagcuggaaa

SEQ ID NO: 2292386 - RNA, 19 nt, Homo sapiens
  misc_RNA (1)...(19): siRNA sense strand
gugggaggaggcugggaaa

SEQ ID NO: 2292387 - RNA, 19 nt, Homo sapiens
  misc_RNA (1)...(19): siRNA sense strand
aggaagauaccgaguggga

SEQ ID NO: 2292388 - RNA, 19 nt, Homo sapiens
  misc_RNA (1)...(19): siRNA sense strand
uuauggagaaguuggacaa

SEQ ID NO: 2292389 - RNA, 19 nt, Homo sapiens
  misc_RNA (1)...(19): siRNA sense strand
ggaaacuuuugcaggguau

SEQ ID NO: 2292390 - RNA, 19 nt, Homo sapiens
  misc_RNA (1)...(19): siRNA sense strand
augcaucaguauagccaau

SEQ ID NO: 2292391 - RNA, 19 nt, Homo sapiens
  misc_RNA (1)...(19): siRNA sense strand
gccagagacaauacagcaa

SEQ ID NO: 2292392 - RNA, 19 nt, Homo sapiens
  misc_RNA (1)...(19): siRNA sense strand
uauuugaaucggaagguuu

SEQ ID NO: 2292393 - RNA, 19 nt, Homo sapiens
  misc_RNA (1)...(19): siRNA sense strand
aggagaaauucaaggagag

SEQ ID NO: 2292394 - RNA, 19 nt, Homo sapiens
  misc_RNA (1)...(19): siRNA sense strand
cugucaacuugcagaaacu

SEQ ID NO: 2292395 - RNA, 19 nt, Homo sapiens
  misc_RNA (1)...(19): siRNA sense strand
ccacaaagaaucuaccguu

SEQ ID NO: 2292396 - RNA, 19 nt, Homo sapiens
  misc_RNA (1)...(19): siRNA sense strand
guuugauaaagcuggaaaa

SEQ ID NO: 2292397 - RNA, 19 nt, Homo sapiens
  misc_RNA (1)...(19): siRNA sense strand
aucaaagucuucuggaaaa

SEQ ID NO: 2292398 - RNA, 19 nt, Homo sapiens
  misc_RNA (1)...(19): siRNA sense strand
gggaggaggcugggaaacu

SEQ ID NO: 2292399 - RNA, 19 nt, Homo sapiens
  misc_RNA (1)...(19): siRNA sense strand
gaagauaccgagugggaga

SEQ ID NO: 2292400 - RNA, 19 nt, Homo sapiens
  misc_RNA (1)...(19): siRNA sense strand
caggagaaauucaaggaga

SEQ ID NO: 2292401 - RNA, 19 nt, Homo sapiens
  misc_RNA (1)...(19): siRNA sense strand
agaaauucaaggagagcau

SEQ ID NO: 2292402 - RNA, 19 nt, Homo sapiens
  misc_RNA (1)...(19): siRNA sense strand
uauaaggcuaagaaggaaa

SEQ ID NO: 2292403 - RNA, 19 nt, Homo sapiens
  misc_RNA (1)...(19): siRNA sense strand
gcagaaacuuuuauggaga

SEQ ID NO: 2292404 - RNA, 19 nt, Homo sapiens
  misc_RNA (1)...(19): siRNA sense strand
gcagaaacuaugcaggaga

SEQ ID NO: 2292405 - RNA, 19 nt, Homo sapiens
  misc_RNA (1)...(19): siRNA sense strand
uaaccaaucuauuagggaa

SEQ ID NO: 2292406 - RNA, 19 nt, Homo sapiens
  misc_RNA (1)...(19): siRNA sense strand
ugaaagaagaucuggccuu

SEQ ID NO: 2292407 - RNA, 19 nt, Homo sapiens
  misc_RNA (1)...(19): siRNA sense strand
ggaaggagauuacagcaga

SEQ ID NO: 2292408 - RNA, 19 nt, Homo sapiens
  misc_RNA (1)...(19): siRNA sense strand
gguuugauaaagcuggaaa

SEQ ID NO: 2292409 - RNA, 19 nt, Homo sapiens
  misc_RNA (1)...(19): siRNA sense strand
gugggaggaggcugggaaa

SEQ ID NO: 2292410 - RNA, 19 nt, Homo sapiens
  misc_RNA (1)...(19): siRNA sense strand
aggaagauaccgaguggga

SEQ ID NO: 2292411 - RNA, 19 nt, Homo sapiens
  misc_RNA (1)...(19): siRNA sense strand
uuauggagaaguuggacaa

SEQ ID NO: 2292412 - RNA, 19 nt, Homo sapiens
  misc_RNA (1)...(19): siRNA sense strand
ggaaacuuuugcaggguau

SEQ ID NO: 2292413 - RNA, 19 nt, Homo sapiens
  misc_RNA (1)...(19): siRNA sense strand
augcaucaguauagccaau

SEQ ID NO: 2292414 - RNA, 19 nt, Homo sapiens
  misc_RNA (1)...(19): siRNA sense strand
gccagagacaauacagcaa

SEQ ID NO: 2292415 - RNA, 19 nt, Homo sapiens
  misc_RNA (1)...(19): siRNA sense strand
uauuugaaucggaagguuu

SEQ ID NO: 2292416 - RNA, 19 nt, Homo sapiens
  misc_RNA (1)...(19): siRNA sense strand
aggagaaauucaaggagag

SEQ ID NO: 2292417 - RNA, 19 nt, Homo sapiens
  misc_RNA (1)...(19): siRNA sense strand
cugucaacuugcagaaacu

SEQ ID NO: 2292418 - RNA, 19 nt, Homo sapiens
  misc_RNA (1)...(19): siRNA sense strand
ccacaaagaaucuaccguu

SEQ ID NO: 2292419 - RNA, 19 nt, Homo sapiens
  misc_RNA (1)...(19): siRNA sense strand
guuugauaaagcuggaaaa

SEQ ID NO: 2292420 - RNA, 19 nt, Homo sapiens
  misc_RNA (1)...(19): siRNA sense strand
aucaaagucuucuggaaaa

SEQ ID NO: 2292421 - RNA, 19 nt, Homo sapiens
  misc_RNA (1)...(19): siRNA sense strand
gggaggaggcugggaaacu

SEQ ID NO: 2292422 - RNA, 19 nt, Homo sapiens
  misc_RNA (1)...(19): siRNA sense strand
augaauacuacgucgauga

SEQ ID NO: 2292423 - RNA, 19 nt, Homo sapiens
  misc_RNA (1)...(19): siRNA sense strand
ggucaagguaacagacaca

SEQ ID NO: 2292424 - RNA, 19 nt, Homo sapiens
  misc_RNA (1)...(19): siRNA sense strand
aaaugagaacagugagcaa

SEQ ID NO: 2292425 - RNA, 19 nt, Homo sapiens
  misc_RNA (1)...(19): siRNA sense strand
cuuuggaagaugacgauua

SEQ ID NO: 2292426 - RNA, 19 nt, Homo sapiens
  misc_RNA (1)...(19): siRNA sense strand
ccuaaaagauauaaggcca

SEQ ID NO: 2292427 - RNA, 19 nt, Homo sapiens
  misc_RNA (1)...(19): siRNA sense strand
aguaugauguccagaggga

SEQ ID NO: 2292428 - RNA, 19 nt, Homo sapiens
  misc_RNA (1)...(19): siRNA sense strand
cuaaaagauauaaggccaa

SEQ ID NO: 2292429 - RNA, 19 nt, Homo sapiens
  misc_RNA (1)...(19): siRNA sense strand
gcugauuguugcuggucca

SEQ ID NO: 2292430 - RNA, 19 nt, Homo sapiens
  misc_RNA (1)...(19): siRNA sense strand
augagaacagugagcaaaa

SEQ ID NO: 2292431 - RNA, 19 nt, Homo sapiens
  misc_RNA (1)...(19): siRNA sense strand
cauauagaugagagagaca

SEQ ID NO: 2292432 - RNA, 19 nt, Homo sapiens
  misc_RNA (1)...(19): siRNA sense strand
acaccaugguacagaacau

SEQ ID NO: 2292433 - RNA, 19 nt, Homo sapiens
  misc_RNA (1)...(19): siRNA sense strand
ccaaagucuucuagcagga

SEQ ID NO: 2292434 - RNA, 19 nt, Homo sapiens
  misc_RNA (1)...(19): siRNA sense strand
cugccuauccugugggaga

SEQ ID NO: 2292435 - RNA, 19 nt, Homo sapiens
  misc_RNA (1)...(19): siRNA sense strand
agcauauagaugagagaga

SEQ ID NO: 2292436 - RNA, 19 nt, Homo sapiens
  misc_RNA (1)...(19): siRNA sense strand
gagaagaggcugcugagga

SEQ ID NO: 2292437 - RNA, 19 nt, Homo sapiens
  misc_RNA (1)...(19): siRNA sense strand
cugucaaaugugugugcaa

SEQ ID NO: 2292438 - RNA, 19 nt, Homo sapiens
  misc_RNA (1)...(19): siRNA sense strand
agucagucuugcuguacaa

SEQ ID NO: 2292439 - RNA, 19 nt, Homo sapiens
  misc_RNA (1)...(19): siRNA sense strand
gcagcauauagaugagaga

SEQ ID NO: 2292440 - RNA, 19 nt, Homo sapiens
  misc_RNA (1)...(19): siRNA sense strand
ugaaagaccagcuggagca

SEQ ID NO: 2292441 - RNA, 19 nt, Homo sapiens
  misc_RNA (1)...(19): siRNA sense strand
uagcaggacucucggcaga

SEQ ID NO: 2292442 - RNA, 19 nt, Homo sapiens
  misc_RNA (1)...(19): siRNA sense strand
gcaugaaagaccagcugga

SEQ ID NO: 2292443 - RNA, 19 nt, Homo sapiens
  misc_RNA (1)...(19): siRNA sense strand
aguucuaucuguugggcga

SEQ ID NO: 2292444 - RNA, 19 nt, Homo sapiens
  misc_RNA (1)...(19): siRNA sense strand
cgaagauaugauagcuaca

SEQ ID NO: 2292445 - RNA, 19 nt, Homo sapiens
  misc_RNA (1)...(19): siRNA sense strand
acuccagagcuuugcacua

SEQ ID NO: 2292446 - RNA, 19 nt, Homo sapiens
  misc_RNA (1)...(19): siRNA sense strand
gugugcaaucuaaugauaa

SEQ ID NO: 2292447 - RNA, 19 nt, Homo sapiens
  misc_RNA (1)...(19): siRNA sense strand
gcugaggaugggagaucuu

SEQ ID NO: 2292448 - RNA, 19 nt, Homo sapiens
  misc_RNA (1)...(19): siRNA sense strand
gggacagcaaggagaagaa

SEQ ID NO: 2292449 - RNA, 19 nt, Homo sapiens
  misc_RNA (1)...(19): siRNA sense strand
agaaaaggaaggagagcau

SEQ ID NO: 2292450 - RNA, 19 nt, Homo sapiens
  misc_RNA (1)...(19): siRNA sense strand
ggggcaagaucguggccaa

SEQ ID NO: 2292451 - RNA, 19 nt, Homo sapiens
  misc_RNA (1)...(19): siRNA sense strand
gggcaagaucguggccaaa

SEQ ID NO: 2292452 - RNA, 19 nt, Homo sapiens
  misc_RNA (1)...(19): siRNA sense strand
ccauaauuuugguuggcaa

SEQ ID NO: 2292453 - RNA, 19 nt, Homo sapiens
  misc_RNA (1)...(19): siRNA sense strand
acugcgaggugcugggaga

SEQ ID NO: 2292454 - RNA, 19 nt, Homo sapiens
  misc_RNA (1)...(19): siRNA sense strand
ccugaugguugauggggaa

SEQ ID NO: 2292455 - RNA, 19 nt, Homo sapiens
  misc_RNA (1)...(19): siRNA sense strand
agaagauacauaugaacga

SEQ ID NO: 2292456 - RNA, 19 nt, Homo sapiens
  misc_RNA (1)...(19): siRNA sense strand
cuccuggauaugugggaaa

SEQ ID NO: 2292457 - RNA, 19 nt, Homo sapiens
  misc_RNA (1)...(19): siRNA sense strand
aggagcuguuugagggcau

SEQ ID NO: 2292458 - RNA, 19 nt, Homo sapiens
  misc_RNA (1)...(19): siRNA sense strand
acaacaagaauauggccuu

SEQ ID NO: 2292459 - RNA, 19 nt, Homo sapiens
  misc_RNA (1)...(19): siRNA sense strand
gggacagcaaggagaagaa

SEQ ID NO: 2292460 - RNA, 19 nt, Homo sapiens
  misc_RNA (1)...(19): siRNA sense strand
agaaaaggaaggagagcau

SEQ ID NO: 2292461 - RNA, 19 nt, Homo sapiens
  misc_RNA (1)...(19): siRNA sense strand
ggggcaagaucguggccaa

SEQ ID NO: 2292462 - RNA, 19 nt, Homo sapiens
  misc_RNA (1)...(19): siRNA sense strand
gggcaagaucguggccaaa

SEQ ID NO: 2292463 - RNA, 19 nt, Homo sapiens
  misc_RNA (1)...(19): siRNA sense strand
ccauaauuuugguuggcaa

SEQ ID NO: 2292464 - RNA, 19 nt, Homo sapiens
  misc_RNA (1)...(19): siRNA sense strand
acugcgaggugcugggaga

SEQ ID NO: 2292465 - RNA, 19 nt, Homo sapiens
  misc_RNA (1)...(19): siRNA sense strand
ccugaugguugauggggaa

SEQ ID NO: 2292466 - RNA, 19 nt, Homo sapiens
  misc_RNA (1)...(19): siRNA sense strand
agaagauacauaugaacga

SEQ ID NO: 2292467 - RNA, 19 nt, Homo sapiens
  misc_RNA (1)...(19): siRNA sense strand
cuccuggauaugugggaaa

SEQ ID NO: 2292468 - RNA, 19 nt, Homo sapiens
  misc_RNA (1)...(19): siRNA sense strand
aggagcuguuugagggcau

SEQ ID NO: 2292469 - RNA, 19 nt, Homo sapiens
  misc_RNA (1)...(19): siRNA sense strand
acaacaagaauauggccuu

SEQ ID NO: 2292470 - RNA, 19 nt, Homo sapiens
  misc_RNA (1)...(19): siRNA sense strand
acaaugaagugaaccgcaa

SEQ ID NO: 2292471 - RNA, 19 nt, Homo sapiens
  misc_RNA (1)...(19): siRNA sense strand
ccagaacagcagcaagaca

SEQ ID NO: 2292472 - RNA, 19 nt, Homo sapiens
  misc_RNA (1)...(19): siRNA sense strand
gaaaugaucugcuggagga

SEQ ID NO: 2292473 - RNA, 19 nt, Homo sapiens
  misc_RNA (1)...(19): siRNA sense strand
aauccaaugugucgggcaa

SEQ ID NO: 2292474 - RNA, 19 nt, Homo sapiens
  misc_RNA (1)...(19): siRNA sense strand
aauucaagccuuuggcaau

SEQ ID NO: 2292475 - RNA, 19 nt, Homo sapiens
  misc_RNA (1)...(19): siRNA sense strand
gcuccuaugaagagaggga

SEQ ID NO: 2292476 - RNA, 19 nt, Homo sapiens
  misc_RNA (1)...(19): siRNA sense strand
ccugcaaccucgacgacau

SEQ ID NO: 2292477 - RNA, 19 nt, Homo sapiens
  misc_RNA (1)...(19): siRNA sense strand
caauucaagccuuuggcaa

SEQ ID NO: 2292478 - RNA, 19 nt, Homo sapiens
  misc_RNA (1)...(19): siRNA sense strand
cuguauuuccaaugguaau

SEQ ID NO: 2292479 - RNA, 19 nt, Homo sapiens
  misc_RNA (1)...(19): siRNA sense strand
cgugaaagccagugaucag

SEQ ID NO: 2292480 - RNA, 19 nt, Homo sapiens
  misc_RNA (1)...(19): siRNA sense strand
uggugugacugcagcaaca

SEQ ID NO: 2292481 - RNA, 19 nt, Homo sapiens
  misc_RNA (1)...(19): siRNA sense strand
gaagagagggagaagccca

SEQ ID NO: 2292482 - RNA, 19 nt, Homo sapiens
  misc_RNA (1)...(19): siRNA sense strand
augaagaaggagaagaacu

SEQ ID NO: 2292483 - RNA, 19 nt, Homo sapiens
  misc_RNA (1)...(19): siRNA sense strand
gguaugaagaaggagaaga

SEQ ID NO: 2292484 - RNA, 19 nt, Homo sapiens
  misc_RNA (1)...(19): siRNA sense strand
ccuaugaagagagggagaa

SEQ ID NO: 2292485 - RNA, 19 nt, Homo sapiens
  misc_RNA (1)...(19): siRNA sense strand
gaaaugaucugcuggagga

SEQ ID NO: 2292486 - RNA, 19 nt, Homo sapiens
  misc_RNA (1)...(19): siRNA sense strand
aauccaaugugucgggcaa

SEQ ID NO: 2292487 - RNA, 19 nt, Homo sapiens
  misc_RNA (1)...(19): siRNA sense strand
aauucaagccuuuggcaau

SEQ ID NO: 2292488 - RNA, 19 nt, Homo sapiens
  misc_RNA (1)...(19): siRNA sense strand
gcuccuaugaagagaggga

SEQ ID NO: 2292489 - RNA, 19 nt, Homo sapiens
  misc_RNA (1)...(19): siRNA sense strand
ccugcaaccucgacgacau

SEQ ID NO: 2292490 - RNA, 19 nt, Homo sapiens
  misc_RNA (1)...(19): siRNA sense strand
caauucaagccuuuggcaa

SEQ ID NO: 2292491 - RNA, 19 nt, Homo sapiens
  misc_RNA (1)...(19): siRNA sense strand
cuguauuuccaaugguaau

SEQ ID NO: 2292492 - RNA, 19 nt, Homo sapiens
  misc_RNA (1)...(19): siRNA sense strand
cgugaaagccagugaucag

SEQ ID NO: 2292493 - RNA, 19 nt, Homo sapiens
  misc_RNA (1)...(19): siRNA sense strand
uggugugacugcagcaaca

SEQ ID NO: 2292494 - RNA, 19 nt, Homo sapiens
  misc_RNA (1)...(19): siRNA sense strand
gaagagagggagaagccca

SEQ ID NO: 2292495 - RNA, 19 nt, Homo sapiens
  misc_RNA (1)...(19): siRNA sense strand
augaagaaggagaagaacu

SEQ ID NO: 2292496 - RNA, 19 nt, Homo sapiens
  misc_RNA (1)...(19): siRNA sense strand
gguaugaagaaggagaaga

SEQ ID NO: 2292497 - RNA, 19 nt, Homo sapiens
  misc_RNA (1)...(19): siRNA sense strand
ccuaugaagagagggagaa

SEQ ID NO: 2292498 - RNA, 19 nt, Homo sapiens
  misc_RNA (1)...(19): siRNA sense strand
ccaacauggcugugggcaa

SEQ ID NO: 2292499 - RNA, 19 nt, Homo sapiens
  misc_RNA (1)...(19): siRNA sense strand
ggaaggaguucgugugcca

SEQ ID NO: 2292500 - RNA, 19 nt, Homo sapiens
  misc_RNA (1)...(19): siRNA sense strand
acuugaacauuauggacaa

SEQ ID NO: 2292501 - RNA, 19 nt, Homo sapiens
  misc_RNA (1)...(19): siRNA sense strand
agagagaggagaagcguga

SEQ ID NO: 2292502 - RNA, 19 nt, Homo sapiens
  misc_RNA (1)...(19): siRNA sense strand
ucucaaagugggaggcaca

SEQ ID NO: 2292503 - RNA, 19 nt, Homo sapiens
  misc_RNA (1)...(19): siRNA sense strand
uggacaugcugguuggcaa

SEQ ID NO: 2292504 - RNA, 19 nt, Homo sapiens
  misc_RNA (1)...(19): siRNA sense strand
cagcaaugccagugaccga

SEQ ID NO: 2292505 - RNA, 19 nt, Homo sapiens
  misc_RNA (1)...(19): siRNA sense strand
aguacaugcuggugguuca

SEQ ID NO: 2292506 - RNA, 19 nt, Homo sapiens
  misc_RNA (1)...(19): siRNA sense strand
acauuauggacaagugcaa

SEQ ID NO: 2292507 - RNA, 19 nt, Homo sapiens
  misc_RNA (1)...(19): siRNA sense strand
aggagaagcgugagccuga

SEQ ID NO: 2292508 - RNA, 19 nt, Homo sapiens
  misc_RNA (1)...(19): siRNA sense strand
gcuagaguccagagguuca

SEQ ID NO: 2292509 - RNA, 19 nt, Homo sapiens
  misc_RNA (1)...(19): siRNA sense strand
caguggagcccaagaggga

SEQ ID NO: 2292510 - RNA, 19 nt, Homo sapiens
  misc_RNA (1)...(19): siRNA sense strand
cagacagugguguggaaau

SEQ ID NO: 2292511 - RNA, 19 nt, Homo sapiens
  misc_RNA (1)...(19): siRNA sense strand
ccuucaaagcccaguacau

SEQ ID NO: 2292512 - RNA, 19 nt, Homo sapiens
  misc_RNA (1)...(19): siRNA sense strand
aagauaugcuucagccaga

SEQ ID NO: 2292513 - RNA, 19 nt, Homo sapiens
  misc_RNA (1)...(19): siRNA sense strand
ccugaaucuguguaugaaa

SEQ ID NO: 2292514 - RNA, 19 nt, Homo sapiens
  misc_RNA (1)...(19): siRNA sense strand
ggaggaaagcagacugacu

SEQ ID NO: 2292515 - RNA, 19 nt, Homo sapiens
  misc_RNA (1)...(19): siRNA sense strand
guguggaaaugacuggcaa

SEQ ID NO: 2292516 - RNA, 19 nt, Homo sapiens
  misc_RNA (1)...(19): siRNA sense strand
ugcuaaagcuccagugaac

SEQ ID NO: 2292517 - RNA, 19 nt, Homo sapiens
  misc_RNA (1)...(19): siRNA sense strand
guucacaugcgcagacaca

SEQ ID NO: 2292518 - RNA, 19 nt, Homo sapiens
  misc_RNA (1)...(19): siRNA sense strand
aggaagaucuggacaggga

SEQ ID NO: 2292519 - RNA, 19 nt, Homo sapiens
  misc_RNA (1)...(19): siRNA sense strand
ucaccaagaagcagcgcaa

SEQ ID NO: 2292520 - RNA, 19 nt, Homo sapiens
  misc_RNA (1)...(19): siRNA sense strand
ccgccuagcaucagcgaga

SEQ ID NO: 2292521 - RNA, 19 nt, Homo sapiens
  misc_RNA (1)...(19): siRNA sense strand
acuguaagcaggaggcuga

SEQ ID NO: 2292522 - RNA, 19 nt, Homo sapiens
  misc_RNA (1)...(19): siRNA sense strand
ccaucaagaccgagagcuc

SEQ ID NO: 2292523 - RNA, 19 nt, Homo sapiens
  misc_RNA (1)...(19): siRNA sense strand
aguacaugcugguggugca

SEQ ID NO: 2292524 - RNA, 19 nt, Homo sapiens
  misc_RNA (1)...(19): siRNA sense strand
acaucaacaacgagcacau

SEQ ID NO: 2292525 - RNA, 19 nt, Homo sapiens
  misc_RNA (1)...(19): siRNA sense strand
cagguguaucccacggaaa

SEQ ID NO: 2292526 - RNA, 19 nt, Homo sapiens
  misc_RNA (1)...(19): siRNA sense strand
aggaagaucuggacaggga

SEQ ID NO: 2292527 - RNA, 19 nt, Homo sapiens
  misc_RNA (1)...(19): siRNA sense strand
ucaccaagaagcagcgcaa

SEQ ID NO: 2292528 - RNA, 19 nt, Homo sapiens
  misc_RNA (1)...(19): siRNA sense strand
ccgccuagcaucagcgaga

SEQ ID NO: 2292529 - RNA, 19 nt, Homo sapiens
  misc_RNA (1)...(19): siRNA sense strand
acuguaagcaggaggcuga

SEQ ID NO: 2292530 - RNA, 19 nt, Homo sapiens
  misc_RNA (1)...(19): siRNA sense strand
ccaucaagaccgagagcuc

SEQ ID NO: 2292531 - RNA, 19 nt, Homo sapiens
  misc_RNA (1)...(19): siRNA sense strand
aguacaugcugguggugca

SEQ ID NO: 2292532 - RNA, 19 nt, Homo sapiens
  misc_RNA (1)...(19): siRNA sense strand
acaucaacaacgagcacau

SEQ ID NO: 2292533 - RNA, 19 nt, Homo sapiens
  misc_RNA (1)...(19): siRNA sense strand
cagguguaucccacggaaa

SEQ ID NO: 2292534 - RNA, 19 nt, Homo sapiens
  misc_RNA (1)...(19): siRNA sense strand
aggaagaucuggacaggga

SEQ ID NO: 2292535 - RNA, 19 nt, Homo sapiens
  misc_RNA (1)...(19): siRNA sense strand
ucaccaagaagcagcgcaa

SEQ ID NO: 2292536 - RNA, 19 nt, Homo sapiens
  misc_RNA (1)...(19): siRNA sense strand
ccgccuagcaucagcgaga

SEQ ID NO: 2292537 - RNA, 19 nt, Homo sapiens
  misc_RNA (1)...(19): siRNA sense strand
acuguaagcaggaggcuga

SEQ ID NO: 2292538 - RNA, 19 nt, Homo sapiens
  misc_RNA (1)...(19): siRNA sense strand
ccaucaagaccgagagcuc

SEQ ID NO: 2292539 - RNA, 19 nt, Homo sapiens
  misc_RNA (1)...(19): siRNA sense strand
aguacaugcugguggugca

SEQ ID NO: 2292540 - RNA, 19 nt, Homo sapiens
  misc_RNA (1)...(19): siRNA sense strand
acaucaacaacgagcacau

SEQ ID NO: 2292541 - RNA, 19 nt, Homo sapiens
  misc_RNA (1)...(19): siRNA sense strand
cagguguaucccacggaaa

SEQ ID NO: 2292542 - RNA, 19 nt, Homo sapiens
  misc_RNA (1)...(19): siRNA sense strand
aggaagaucuggacaggga

SEQ ID NO: 2292543 - RNA, 19 nt, Homo sapiens
  misc_RNA (1)...(19): siRNA sense strand
ucaccaagaagcagcgcaa

SEQ ID NO: 2292544 - RNA, 19 nt, Homo sapiens
  misc_RNA (1)...(19): siRNA sense strand
ccgccuagcaucagcgaga

SEQ ID NO: 2292545 - RNA, 19 nt, Homo sapiens
  misc_RNA (1)...(19): siRNA sense strand
acuguaagcaggaggcuga

SEQ ID NO: 2292546 - RNA, 19 nt, Homo sapiens
  misc_RNA (1)...(19): siRNA sense strand
ccaucaagaccgagagcuc

SEQ ID NO: 2292547 - RNA, 19 nt, Homo sapiens
  misc_RNA (1)...(19): siRNA sense strand
aguacaugcugguggugca

SEQ ID NO: 2292548 - RNA, 19 nt, Homo sapiens
  misc_RNA (1)...(19): siRNA sense strand
acaucaacaacgagcacau

SEQ ID NO: 2292549 - RNA, 19 nt, Homo sapiens
  misc_RNA (1)...(19): siRNA sense strand
cagguguaucccacggaaa

SEQ ID NO: 2292550 - RNA, 19 nt, Homo sapiens
  misc_RNA (1)...(19): siRNA sense strand
ggcagagauccgagagaaa

SEQ ID NO: 2292551 - RNA, 19 nt, Homo sapiens
  misc_RNA (1)...(19): siRNA sense strand
ggaauuacauaaagagcca

SEQ ID NO: 2292552 - RNA, 19 nt, Homo sapiens
  misc_RNA (1)...(19): siRNA sense strand
ggaaagagcaccaucguca

SEQ ID NO: 2292553 - RNA, 19 nt, Homo sapiens
  misc_RNA (1)...(19): siRNA sense strand
cugcagaauaccagcuuaa

SEQ ID NO: 2292554 - RNA, 19 nt, Homo sapiens
  misc_RNA (1)...(19): siRNA sense strand
cgaaaagaugucaaagaaa

SEQ ID NO: 2292555 - RNA, 19 nt, Homo sapiens
  misc_RNA (1)...(19): siRNA sense strand
aggacaaagaacuggccaa

SEQ ID NO: 2292556 - RNA, 19 nt, Homo sapiens
  misc_RNA (1)...(19): siRNA sense strand
gguccaaggagcuagaaaa

SEQ ID NO: 2292557 - RNA, 19 nt, Homo sapiens
  misc_RNA (1)...(19): siRNA sense strand
uggaagaugacgaagugaa

SEQ ID NO: 2292558 - RNA, 19 nt, Homo sapiens
  misc_RNA (1)...(19): siRNA sense strand
cagagauccgagagaaaga

SEQ ID NO: 2292559 - RNA, 19 nt, Homo sapiens
  misc_RNA (1)...(19): siRNA sense strand
ugaaccaauuagaacgaau

SEQ ID NO: 2292560 - RNA, 19 nt, Homo sapiens
  misc_RNA (1)...(19): siRNA sense strand
uuccagaguaugaugguaa

SEQ ID NO: 2292561 - RNA, 19 nt, Homo sapiens
  misc_RNA (1)...(19): siRNA sense strand
aaaagaagcugcaggagga

SEQ ID NO: 2292562 - RNA, 19 nt, Homo sapiens
  misc_RNA (1)...(19): siRNA sense strand
uggcuauucaccagaagaa

SEQ ID NO: 2292563 - RNA, 19 nt, Homo sapiens
  misc_RNA (1)...(19): siRNA sense strand
ggcuaucaucuauggaaau

SEQ ID NO: 2292564 - RNA, 19 nt, Homo sapiens
  misc_RNA (1)...(19): siRNA sense strand
ucgucaaacagaugaagau

SEQ ID NO: 2292565 - RNA, 19 nt, Homo sapiens
  misc_RNA (1)...(19): siRNA sense strand
aguucaaggcuaucaucua

SEQ ID NO: 2292566 - RNA, 19 nt, Homo sapiens
  misc_RNA (1)...(19): siRNA sense strand
cgucagauuggaagagaaa

SEQ ID NO: 2292567 - RNA, 19 nt, Homo sapiens
  misc_RNA (1)...(19): siRNA sense strand
ggaaaggaaauuuggccaa

SEQ ID NO: 2292568 - RNA, 19 nt, Homo sapiens
  misc_RNA (1)...(19): siRNA sense strand
ccuaagaacagcuggaaca

SEQ ID NO: 2292569 - RNA, 19 nt, Homo sapiens
  misc_RNA (1)...(19): siRNA sense strand
ggguagacaaugauggcaa

SEQ ID NO: 2292570 - RNA, 19 nt, Homo sapiens
  misc_RNA (1)...(19): siRNA sense strand
gcaaagagaugguucgagu

SEQ ID NO: 2292571 - RNA, 19 nt, Homo sapiens
  misc_RNA (1)...(19): siRNA sense strand
ucagauuggaagagaaaca

SEQ ID NO: 2292572 - RNA, 19 nt, Homo sapiens
  misc_RNA (1)...(19): siRNA sense strand
cagccaagaacaaagacua

SEQ ID NO: 2292573 - RNA, 19 nt, Homo sapiens
  misc_RNA (1)...(19): siRNA sense strand
acaaagacuacaugagcau

SEQ ID NO: 2292574 - RNA, 19 nt, Homo sapiens
  misc_RNA (1)...(19): siRNA sense strand
agauauauggggauggaaa

SEQ ID NO: 2292575 - RNA, 19 nt, Homo sapiens
  misc_RNA (1)...(19): siRNA sense strand
ccguguaaauccucgggaa

SEQ ID NO: 2292576 - RNA, 19 nt, Homo sapiens
  misc_RNA (1)...(19): siRNA sense strand
aaggaaagggacuggaaaa

SEQ ID NO: 2292577 - RNA, 19 nt, Homo sapiens
  misc_RNA (1)...(19): siRNA sense strand
gggaaggaauugugcugca

SEQ ID NO: 2292578 - RNA, 19 nt, Homo sapiens
  misc_RNA (1)...(19): siRNA sense strand
accuaugaagagaggauua

SEQ ID NO: 2292579 - RNA, 19 nt, Homo sapiens
  misc_RNA (1)...(19): siRNA sense strand
acgucagauuggaagagaa

SEQ ID NO: 2292580 - RNA, 19 nt, Homo sapiens
  misc_RNA (1)...(19): siRNA sense strand
gcaccuucaguuugguaaa

SEQ ID NO: 2292581 - RNA, 19 nt, Homo sapiens
  misc_RNA (1)...(19): siRNA sense strand
agggugaaauaguuaagaa

SEQ ID NO: 2292582 - RNA, 19 nt, Homo sapiens
  misc_RNA (1)...(19): siRNA sense strand
aaaccuaugaagagaggau

SEQ ID NO: 2292583 - RNA, 19 nt, Homo sapiens
  misc_RNA (1)...(19): siRNA sense strand
agauuacauuguugcacua

SEQ ID NO: 2292584 - RNA, 19 nt, Homo sapiens
  misc_RNA (1)...(19): siRNA sense strand
ccauauucuugaaacucua

SEQ ID NO: 2292585 - RNA, 19 nt, Homo sapiens
  misc_RNA (1)...(19): siRNA sense strand
ucacauugaagguggggaa

SEQ ID NO: 2292586 - RNA, 19 nt, Homo sapiens
  misc_RNA (1)...(19): siRNA sense strand
guucaaagauauaugggga

SEQ ID NO: 2292587 - RNA, 19 nt, Homo sapiens
  misc_RNA (1)...(19): siRNA sense strand
agaauggaaauaaccgaaa

SEQ ID NO: 2292588 - RNA, 19 nt, Homo sapiens
  misc_RNA (1)...(19): siRNA sense strand
aagcauacgccucuggaau

SEQ ID NO: 2292589 - RNA, 19 nt, Homo sapiens
  misc_RNA (1)...(19): siRNA sense strand
cuucaagagccacugcaaa

SEQ ID NO: 2292590 - RNA, 19 nt, Homo sapiens
  misc_RNA (1)...(19): siRNA sense strand
ccuaugaagagaggauuaa

SEQ ID NO: 2292591 - RNA, 19 nt, Homo sapiens
  misc_RNA (1)...(19): siRNA sense strand
cuguguggguagacaauga

SEQ ID NO: 2292592 - RNA, 19 nt, Homo sapiens
  misc_RNA (1)...(19): siRNA sense strand
ccugggaacacgucagauu

SEQ ID NO: 2292593 - RNA, 19 nt, Homo sapiens
  misc_RNA (1)...(19): siRNA sense strand
cggaaaggaaauuuggcca

SEQ ID NO: 2292594 - RNA, 19 nt, Homo sapiens
  misc_RNA (1)...(19): siRNA sense strand
ucgaaugauugaacaagau

SEQ ID NO: 2292595 - RNA, 19 nt, Homo sapiens
  misc_RNA (1)...(19): siRNA sense strand
ggcuaggugaugauguaaa

SEQ ID NO: 2292596 - RNA, 19 nt, Homo sapiens
  misc_RNA (1)...(19): siRNA sense strand
aguuggagcuuuuggaaca

SEQ ID NO: 2292597 - RNA, 19 nt, Homo sapiens
  misc_RNA (1)...(19): siRNA sense strand
ugaccauauucuugaaacu

SEQ ID NO: 2292598 - RNA, 19 nt, Homo sapiens
  misc_RNA (1)...(19): siRNA sense strand
augaagggugaaauaguua

SEQ ID NO: 2292599 - RNA, 19 nt, Homo sapiens
  misc_RNA (1)...(19): siRNA sense strand
ggaagaagggcauugagca

SEQ ID NO: 2292600 - RNA, 19 nt, Homo sapiens
  misc_RNA (1)...(19): siRNA sense strand
ucgagaaguuggagcuuuu

SEQ ID NO: 2292601 - RNA, 19 nt, Homo sapiens
  misc_RNA (1)...(19): siRNA sense strand
ccuacagauguguguggaa

SEQ ID NO: 2292602 - RNA, 19 nt, Homo sapiens
  misc_RNA (1)...(19): siRNA sense strand
ggugaaauaguuaagaagu

SEQ ID NO: 2292603 - RNA, 19 nt, Homo sapiens
  misc_RNA (1)...(19): siRNA sense strand
ugacauuaacaccaggcua

SEQ ID NO: 2292604 - RNA, 19 nt, Homo sapiens
  misc_RNA (1)...(19): siRNA sense strand
caguuaaacacgucccauu

SEQ ID NO: 2292605 - RNA, 19 nt, Homo sapiens
  misc_RNA (1)...(19): siRNA sense strand
ggaacacgucagauuggaa

SEQ ID NO: 2292606 - RNA, 19 nt, Homo sapiens
  misc_RNA (1)...(19): siRNA sense strand
gggaguaggcauuuccaca

SEQ ID NO: 2292607 - RNA, 19 nt, Homo sapiens
  misc_RNA (1)...(19): siRNA sense strand
cgaucauguuuggcauuaa

SEQ ID NO: 2292608 - RNA, 19 nt, Homo sapiens
  misc_RNA (1)...(19): siRNA sense strand
ugauugaacaagaugacuu

SEQ ID NO: 2292609 - RNA, 19 nt, Homo sapiens
  misc_RNA (1)...(19): siRNA sense strand
cagacaugccauaacaaaa

SEQ ID NO: 2292610 - RNA, 19 nt, Homo sapiens
  misc_RNA (1)...(19): siRNA sense strand
gcauugagcaucaucccaa

SEQ ID NO: 2292611 - RNA, 19 nt, Homo sapiens
  misc_RNA (1)...(19): siRNA sense strand
ccaagaacaaagacuacau

SEQ ID NO: 2292612 - RNA, 19 nt, Homo sapiens
  misc_RNA (1)...(19): siRNA sense strand
gggugaaauaguuaagaag

SEQ ID NO: 2292613 - RNA, 19 nt, Homo sapiens
  misc_RNA (1)...(19): siRNA sense strand
cagccaugguggagucagu

SEQ ID NO: 2292614 - RNA, 19 nt, Homo sapiens
  misc_RNA (1)...(19): siRNA sense strand
gauauauggggauggaaau

SEQ ID NO: 2292615 - RNA, 19 nt, Homo sapiens
  misc_RNA (1)...(19): siRNA sense strand
agguggagcagcugaagaa

SEQ ID NO: 2292616 - RNA, 19 nt, Homo sapiens
  misc_RNA (1)...(19): siRNA sense strand
uguugaagauggaggugga

SEQ ID NO: 2292617 - RNA, 19 nt, Homo sapiens
  misc_RNA (1)...(19): siRNA sense strand
ggaaaggaaaucaaggagu

SEQ ID NO: 2292618 - RNA, 19 nt, Homo sapiens
  misc_RNA (1)...(19): siRNA sense strand
aggaguacguggaggccca

SEQ ID NO: 2292619 - RNA, 19 nt, Homo sapiens
  misc_RNA (1)...(19): siRNA sense strand
ugaagauggagguggagca

SEQ ID NO: 2292620 - RNA, 19 nt, Homo sapiens
  misc_RNA (1)...(19): siRNA sense strand
aaggcaucccugaggacaa

SEQ ID NO: 2292621 - RNA, 19 nt, Homo sapiens
  misc_RNA (1)...(19): siRNA sense strand
agauggagguggagcagcu

SEQ ID NO: 2292622 - RNA, 19 nt, Homo sapiens
  misc_RNA (1)...(19): siRNA sense strand
uccaaagcgggaaaggaaa

SEQ ID NO: 2292623 - RNA, 19 nt, Homo sapiens
  misc_RNA (1)...(19): siRNA sense strand
acuaaugagccaagaggaa

SEQ ID NO: 2292624 - RNA, 19 nt, Homo sapiens
  misc_RNA (1)...(19): siRNA sense strand
aggaggaggaagaggaaga

SEQ ID NO: 2292625 - RNA, 19 nt, Homo sapiens
  misc_RNA (1)...(19): siRNA sense strand
acgaggaggaggaggaaga

SEQ ID NO: 2292626 - RNA, 19 nt, Homo sapiens
  misc_RNA (1)...(19): siRNA sense strand
aggacaaacgggagcggaa

SEQ ID NO: 2292627 - RNA, 19 nt, Homo sapiens
  misc_RNA (1)...(19): siRNA sense strand
ccugugaggaggagggaga

SEQ ID NO: 2292628 - RNA, 19 nt, Homo sapiens
  misc_RNA (1)...(19): siRNA sense strand
gggaggagguagagaggag

SEQ ID NO: 2292629 - RNA, 19 nt, Homo sapiens
  misc_RNA (1)...(19): siRNA sense strand
gguagagaggagaaagaga

SEQ ID NO: 2292630 - RNA, 19 nt, Homo sapiens
  misc_RNA (1)...(19): siRNA sense strand
cagaaaggcaccugggagu

SEQ ID NO: 2292631 - RNA, 19 nt, Homo sapiens
  misc_RNA (1)...(19): siRNA sense strand
ggagaagauugcucgggau

SEQ ID NO: 2292632 - RNA, 19 nt, Homo sapiens
  misc_RNA (1)...(19): siRNA sense strand
gggaggaggaggaagagga

SEQ ID NO: 2292633 - RNA, 19 nt, Homo sapiens
  misc_RNA (1)...(19): siRNA sense strand
cagcaguccugguggagca

SEQ ID NO: 2292634 - RNA, 19 nt, Homo sapiens
  misc_RNA (1)...(19): siRNA sense strand
aggaggaggaagaggagga

SEQ ID NO: 2292635 - RNA, 19 nt, Homo sapiens
  misc_RNA (1)...(19): siRNA sense strand
gugacgaggaggaggagga

SEQ ID NO: 2292636 - RNA, 19 nt, Homo sapiens
  misc_RNA (1)...(19): siRNA sense strand
agaagaagcaguugcagga

SEQ ID NO: 2292637 - RNA, 19 nt, Homo sapiens
  misc_RNA (1)...(19): siRNA sense strand
ggaagaagccauucagcgu

SEQ ID NO: 2292638 - RNA, 19 nt, Homo sapiens
  misc_RNA (1)...(19): siRNA sense strand
aggaggagggagaggagga

SEQ ID NO: 2292639 - RNA, 19 nt, Homo sapiens
  misc_RNA (1)...(19): siRNA sense strand
cagcaggugacgaggagga

SEQ ID NO: 2292640 - RNA, 19 nt, Homo sapiens
  misc_RNA (1)...(19): siRNA sense strand
augcggaugaggagggaga

SEQ ID NO: 2292641 - RNA, 19 nt, Homo sapiens
  misc_RNA (1)...(19): siRNA sense strand
gggagaagauugcucggga

SEQ ID NO: 2292642 - RNA, 19 nt, Homo sapiens
  misc_RNA (1)...(19): siRNA sense strand
cgagaggaacagaccgaca

SEQ ID NO: 2292643 - RNA, 19 nt, Homo sapiens
  misc_RNA (1)...(19): siRNA sense strand
cggaaagucgugagugucu

SEQ ID NO: 2292644 - RNA, 19 nt, Homo sapiens
  misc_RNA (1)...(19): siRNA sense strand
ccuacacugcugugggcua

SEQ ID NO: 2292645 - RNA, 19 nt, Homo sapiens
  misc_RNA (1)...(19): siRNA sense strand
ccgacauccaguugugaau

SEQ ID NO: 2292646 - RNA, 19 nt, Homo sapiens
  misc_RNA (1)...(19): siRNA sense strand
aggagcaacuaaugagcca

SEQ ID NO: 2292647 - RNA, 19 nt, Homo sapiens
  misc_RNA (1)...(19): siRNA sense strand
gcccaacccaagagcgcua

SEQ ID NO: 2292648 - RNA, 19 nt, Homo sapiens
  misc_RNA (1)...(19): siRNA sense strand
gagaggagaaagagagcag

SEQ ID NO: 2292649 - RNA, 19 nt, Homo sapiens
  misc_RNA (1)...(19): siRNA sense strand
aagcagaagaagaagcagu

SEQ ID NO: 2292650 - RNA, 19 nt, Homo sapiens
  misc_RNA (1)...(19): siRNA sense strand
acagcagggaggagguaga

SEQ ID NO: 2292651 - RNA, 19 nt, Homo sapiens
  misc_RNA (1)...(19): siRNA sense strand
aagaagcaguugcaggaca

SEQ ID NO: 2292652 - RNA, 19 nt, Homo sapiens
  misc_RNA (1)...(19): siRNA sense strand
aggaggaggaggaagagga

SEQ ID NO: 2292653 - RNA, 19 nt, Homo sapiens
  misc_RNA (1)...(19): siRNA sense strand
aggagguagagaggagaaa

SEQ ID NO: 2292654 - RNA, 19 nt, Homo sapiens
  misc_RNA (1)...(19): siRNA sense strand
uugagcagcuggcgggaga

SEQ ID NO: 2292655 - RNA, 19 nt, Homo sapiens
  misc_RNA (1)...(19): siRNA sense strand
acuaugaccuucagagcca

SEQ ID NO: 2292656 - RNA, 19 nt, Homo sapiens
  misc_RNA (1)...(19): siRNA sense strand
aggccaaacagcagcuaga

SEQ ID NO: 2292657 - RNA, 19 nt, Homo sapiens
  misc_RNA (1)...(19): siRNA sense strand
gcuuguugccuguguggau

SEQ ID NO: 2292658 - RNA, 19 nt, Homo sapiens
  misc_RNA (1)...(19): siRNA sense strand
agaugaagacggugaccaa

SEQ ID NO: 2292659 - RNA, 19 nt, Homo sapiens
  misc_RNA (1)...(19): siRNA sense strand
acacguugguccugggcuu

SEQ ID NO: 2292660 - RNA, 19 nt, Homo sapiens
  misc_RNA (1)...(19): siRNA sense strand
ccaacgucucucaggacaa

SEQ ID NO: 2292661 - RNA, 19 nt, Homo sapiens
  misc_RNA (1)...(19): siRNA sense strand
cccaagaugaagacgguga

SEQ ID NO: 2292662 - RNA, 19 nt, Homo sapiens
  misc_RNA (1)...(19): siRNA sense strand
acgccuuucuagaugacaa

SEQ ID NO: 2292663 - RNA, 19 nt, Homo sapiens
  misc_RNA (1)...(19): siRNA sense strand
ccgucaacaucgcggagca

SEQ ID NO: 2292664 - RNA, 19 nt, Homo sapiens
  misc_RNA (1)...(19): siRNA sense strand
gggcaaaagagcagaauga

SEQ ID NO: 2292665 - RNA, 19 nt, Homo sapiens
  misc_RNA (1)...(19): siRNA sense strand
cguaaagauuccagagaag

SEQ ID NO: 2292666 - RNA, 19 nt, Homo sapiens
  misc_RNA (1)...(19): siRNA sense strand
gaaauuauguccaggcuga

SEQ ID NO: 2292667 - RNA, 19 nt, Homo sapiens
  misc_RNA (1)...(19): siRNA sense strand
ggagaugcuuccaggguca

SEQ ID NO: 2292668 - RNA, 19 nt, Homo sapiens
  misc_RNA (1)...(19): siRNA sense strand
gcaaggugcuggaggccau

SEQ ID NO: 2292669 - RNA, 19 nt, Homo sapiens
  misc_RNA (1)...(19): siRNA sense strand
gcgugaacucagaagacaa

SEQ ID NO: 2292670 - RNA, 19 nt, Homo sapiens
  misc_RNA (1)...(19): siRNA sense strand
cagacuacaucgacgggaa

SEQ ID NO: 2292671 - RNA, 19 nt, Homo sapiens
  misc_RNA (1)...(19): siRNA sense strand
ggaacauaacaaggagaaa

SEQ ID NO: 2292672 - RNA, 19 nt, Homo sapiens
  misc_RNA (1)...(19): siRNA sense strand
acucagaagacaaggagau

SEQ ID NO: 2292673 - RNA, 19 nt, Homo sapiens
  misc_RNA (1)...(19): siRNA sense strand
cugucgaauuuguggguga

SEQ ID NO: 2292674 - RNA, 19 nt, Homo sapiens
  misc_RNA (1)...(19): siRNA sense strand
cggaggaggaaguggacga

SEQ ID NO: 2292675 - RNA, 19 nt, Homo sapiens
  misc_RNA (1)...(19): siRNA sense strand
cgccaucaaagaagggaaa

SEQ ID NO: 2292676 - RNA, 19 nt, Homo sapiens
  misc_RNA (1)...(19): siRNA sense strand
ucaugaagcacuugcggaa

SEQ ID NO: 2292677 - RNA, 19 nt, Homo sapiens
  misc_RNA (1)...(19): siRNA sense strand
aggagaaagagaaggaagu

SEQ ID NO: 2292678 - RNA, 19 nt, Homo sapiens
  misc_RNA (1)...(19): siRNA sense strand
cgcucaagcaggaggguga

SEQ ID NO: 2292679 - RNA, 19 nt, Homo sapiens
  misc_RNA (1)...(19): siRNA sense strand
ugcaguugcuggaggacua

SEQ ID NO: 2292680 - RNA, 19 nt, Homo sapiens
  misc_RNA (1)...(19): siRNA sense strand
gguccaugcuacugagacu

SEQ ID NO: 2292681 - RNA, 19 nt, Homo sapiens
  misc_RNA (1)...(19): siRNA sense strand
acaaacacaugcuggccua

SEQ ID NO: 2292682 - RNA, 19 nt, Homo sapiens
  misc_RNA (1)...(19): siRNA sense strand
ugguacgggugguggauga

SEQ ID NO: 2292683 - RNA, 19 nt, Homo sapiens
  misc_RNA (1)...(19): siRNA sense strand
cggaagaacauccuggaca

SEQ ID NO: 2292684 - RNA, 19 nt, Homo sapiens
  misc_RNA (1)...(19): siRNA sense strand
acaagguggaccagaagaa

SEQ ID NO: 2292685 - RNA, 19 nt, Homo sapiens
  misc_RNA (1)...(19): siRNA sense strand
aggaacauaacaaggagaa

SEQ ID NO: 2292686 - RNA, 19 nt, Homo sapiens
  misc_RNA (1)...(19): siRNA sense strand
augaauuccuccagcaaga

SEQ ID NO: 2292687 - RNA, 19 nt, Homo sapiens
  misc_RNA (1)...(19): siRNA sense strand
acaucuaccagcagaagaa

SEQ ID NO: 2292688 - RNA, 19 nt, Homo sapiens
  misc_RNA (1)...(19): siRNA sense strand
gauuucuaccagagggcua

SEQ ID NO: 2292689 - RNA, 19 nt, Homo sapiens
  misc_RNA (1)...(19): siRNA sense strand
gauaagaagguacuggaga

SEQ ID NO: 2292690 - RNA, 19 nt, Homo sapiens
  misc_RNA (1)...(19): siRNA sense strand
aagagcagaaugaggagaa

SEQ ID NO: 2292691 - RNA, 19 nt, Homo sapiens
  misc_RNA (1)...(19): siRNA sense strand
cuuucacagccaugagaua

SEQ ID NO: 2292692 - RNA, 19 nt, Homo sapiens
  misc_RNA (1)...(19): siRNA sense strand
agacuacaucgacgggaaa

SEQ ID NO: 2292693 - RNA, 19 nt, Homo sapiens
  misc_RNA (1)...(19): siRNA sense strand
ggucucaaaggcagaagaa

SEQ ID NO: 2292694 - RNA, 19 nt, Homo sapiens
  misc_RNA (1)...(19): siRNA sense strand
ccugacagaccgcgaggua

SEQ ID NO: 2292695 - RNA, 19 nt, Homo sapiens
  misc_RNA (1)...(19): siRNA sense strand
gaagacaaggagaugguga

SEQ ID NO: 2292696 - RNA, 19 nt, Homo sapiens
  misc_RNA (1)...(19): siRNA sense strand
uggaggagaaagagaagga

SEQ ID NO: 2292697 - RNA, 19 nt, Homo sapiens
  misc_RNA (1)...(19): siRNA sense strand
cagcaagccugauggccca

SEQ ID NO: 2292698 - RNA, 19 nt, Homo sapiens
  misc_RNA (1)...(19): siRNA sense strand
ucauggagguauacggcuu

SEQ ID NO: 2292699 - RNA, 19 nt, Homo sapiens
  misc_RNA (1)...(19): siRNA sense strand
agaagcugcaguacagaua

SEQ ID NO: 2292700 - RNA, 19 nt, Homo sapiens
  misc_RNA (1)...(19): siRNA sense strand
gguccauaaucauguuaca

SEQ ID NO: 2292701 - RNA, 19 nt, Homo sapiens
  misc_RNA (1)...(19): siRNA sense strand
ccaguuugccuguuggaau

SEQ ID NO: 2292702 - RNA, 19 nt, Homo sapiens
  misc_RNA (1)...(19): siRNA sense strand
ccagggcagcagacagaua

SEQ ID NO: 2292703 - RNA, 19 nt, Homo sapiens
  misc_RNA (1)...(19): siRNA sense strand
ccuucguucaccugggaaa

SEQ ID NO: 2292704 - RNA, 19 nt, Homo sapiens
  misc_RNA (1)...(19): siRNA sense strand
aauagagauuccugagguu

SEQ ID NO: 2292705 - RNA, 19 nt, Homo sapiens
  misc_RNA (1)...(19): siRNA sense strand
ucuaccagcagaagaacaa

SEQ ID NO: 2292706 - RNA, 19 nt, Homo sapiens
  misc_RNA (1)...(19): siRNA sense strand
aaaauuaaacccaggaaca

SEQ ID NO: 2292707 - RNA, 19 nt, Homo sapiens
  misc_RNA (1)...(19): siRNA sense strand
aauuaaacccaggaacaua

SEQ ID NO: 2292708 - RNA, 19 nt, Homo sapiens
  misc_RNA (1)...(19): siRNA sense strand
ccuuggaucuggagcagca

SEQ ID NO: 2292709 - RNA, 19 nt, Homo sapiens
  misc_RNA (1)...(19): siRNA sense strand
ucaucaagaagcugcagua

SEQ ID NO: 2292710 - RNA, 19 nt, Homo sapiens
  misc_RNA (1)...(19): siRNA sense strand
ucaacauccucgacagcau

SEQ ID NO: 2292711 - RNA, 19 nt, Homo sapiens
  misc_RNA (1)...(19): siRNA sense strand
auuaaacccaggaacauaa

SEQ ID NO: 2292712 - RNA, 19 nt, Homo sapiens
  misc_RNA (1)...(19): siRNA sense strand
cauaaucauguuacaggaa

SEQ ID NO: 2292713 - RNA, 19 nt, Homo sapiens
  misc_RNA (1)...(19): siRNA sense strand
ggcuggaggagaaagagaa

SEQ ID NO: 2292714 - RNA, 19 nt, Homo sapiens
  misc_RNA (1)...(19): siRNA sense strand
caacugagcuccucccaga

SEQ ID NO: 2292715 - RNA, 19 nt, Homo sapiens
  misc_RNA (1)...(19): siRNA sense strand
guauacggcuucagcgacu

SEQ ID NO: 2292716 - RNA, 19 nt, Homo sapiens
  misc_RNA (1)...(19): siRNA sense strand
cggcugggaaagacggaca

SEQ ID NO: 2292717 - RNA, 19 nt, Homo sapiens
  misc_RNA (1)...(19): siRNA sense strand
gggaacugucucugaaaau

SEQ ID NO: 2292718 - RNA, 19 nt, Homo sapiens
  misc_RNA (1)...(19): siRNA sense strand
ugaacaaagaggcaacaga

SEQ ID NO: 2292719 - RNA, 19 nt, Homo sapiens
  misc_RNA (1)...(19): siRNA sense strand
cagaagacaaggagauggu

SEQ ID NO: 2292720 - RNA, 19 nt, Homo sapiens
  misc_RNA (1)...(19): siRNA sense strand
ugaggaggcccuaugggaa

SEQ ID NO: 2292721 - RNA, 19 nt, Homo sapiens
  misc_RNA (1)...(19): siRNA sense strand
gggcaaaagagcagaauga

SEQ ID NO: 2292722 - RNA, 19 nt, Homo sapiens
  misc_RNA (1)...(19): siRNA sense strand
cguaaagauuccagagaag

SEQ ID NO: 2292723 - RNA, 19 nt, Homo sapiens
  misc_RNA (1)...(19): siRNA sense strand
gaaauuauguccaggcuga

SEQ ID NO: 2292724 - RNA, 19 nt, Homo sapiens
  misc_RNA (1)...(19): siRNA sense strand
ggagaugcuuccaggguca

SEQ ID NO: 2292725 - RNA, 19 nt, Homo sapiens
  misc_RNA (1)...(19): siRNA sense strand
gcaaggugcuggaggccau

SEQ ID NO: 2292726 - RNA, 19 nt, Homo sapiens
  misc_RNA (1)...(19): siRNA sense strand
gcgugaacucagaagacaa

SEQ ID NO: 2292727 - RNA, 19 nt, Homo sapiens
  misc_RNA (1)...(19): siRNA sense strand
cagacuacaucgacgggaa

SEQ ID NO: 2292728 - RNA, 19 nt, Homo sapiens
  misc_RNA (1)...(19): siRNA sense strand
ggaacauaacaaggagaaa

SEQ ID NO: 2292729 - RNA, 19 nt, Homo sapiens
  misc_RNA (1)...(19): siRNA sense strand
acucagaagacaaggagau

SEQ ID NO: 2292730 - RNA, 19 nt, Homo sapiens
  misc_RNA (1)...(19): siRNA sense strand
cugucgaauuuguggguga

SEQ ID NO: 2292731 - RNA, 19 nt, Homo sapiens
  misc_RNA (1)...(19): siRNA sense strand
cggaggaggaaguggacga

SEQ ID NO: 2292732 - RNA, 19 nt, Homo sapiens
  misc_RNA (1)...(19): siRNA sense strand
cgccaucaaagaagggaaa

SEQ ID NO: 2292733 - RNA, 19 nt, Homo sapiens
  misc_RNA (1)...(19): siRNA sense strand
ucaugaagcacuugcggaa

SEQ ID NO: 2292734 - RNA, 19 nt, Homo sapiens
  misc_RNA (1)...(19): siRNA sense strand
aggagaaagagaaggaagu

SEQ ID NO: 2292735 - RNA, 19 nt, Homo sapiens
  misc_RNA (1)...(19): siRNA sense strand
cgcucaagcaggaggguga

SEQ ID NO: 2292736 - RNA, 19 nt, Homo sapiens
  misc_RNA (1)...(19): siRNA sense strand
ugcaguugcuggaggacua

SEQ ID NO: 2292737 - RNA, 19 nt, Homo sapiens
  misc_RNA (1)...(19): siRNA sense strand
gguccaugcuacugagacu

SEQ ID NO: 2292738 - RNA, 19 nt, Homo sapiens
  misc_RNA (1)...(19): siRNA sense strand
acaaacacaugcuggccua

SEQ ID NO: 2292739 - RNA, 19 nt, Homo sapiens
  misc_RNA (1)...(19): siRNA sense strand
ugguacgggugguggauga

SEQ ID NO: 2292740 - RNA, 19 nt, Homo sapiens
  misc_RNA (1)...(19): siRNA sense strand
cggaagaacauccuggaca

SEQ ID NO: 2292741 - RNA, 19 nt, Homo sapiens
  misc_RNA (1)...(19): siRNA sense strand
acaagguggaccagaagaa

SEQ ID NO: 2292742 - RNA, 19 nt, Homo sapiens
  misc_RNA (1)...(19): siRNA sense strand
aggaacauaacaaggagaa

SEQ ID NO: 2292743 - RNA, 19 nt, Homo sapiens
  misc_RNA (1)...(19): siRNA sense strand
augaauuccuccagcaaga

SEQ ID NO: 2292744 - RNA, 19 nt, Homo sapiens
  misc_RNA (1)...(19): siRNA sense strand
acaucuaccagcagaagaa

SEQ ID NO: 2292745 - RNA, 19 nt, Homo sapiens
  misc_RNA (1)...(19): siRNA sense strand
gauuucuaccagagggcua

SEQ ID NO: 2292746 - RNA, 19 nt, Homo sapiens
  misc_RNA (1)...(19): siRNA sense strand
gauaagaagguacuggaga

SEQ ID NO: 2292747 - RNA, 19 nt, Homo sapiens
  misc_RNA (1)...(19): siRNA sense strand
aagagcagaaugaggagaa

SEQ ID NO: 2292748 - RNA, 19 nt, Homo sapiens
  misc_RNA (1)...(19): siRNA sense strand
cuuucacagccaugagaua

SEQ ID NO: 2292749 - RNA, 19 nt, Homo sapiens
  misc_RNA (1)...(19): siRNA sense strand
agacuacaucgacgggaaa

SEQ ID NO: 2292750 - RNA, 19 nt, Homo sapiens
  misc_RNA (1)...(19): siRNA sense strand
ggucucaaaggcagaagaa

SEQ ID NO: 2292751 - RNA, 19 nt, Homo sapiens
  misc_RNA (1)...(19): siRNA sense strand
ccugacagaccgcgaggua

SEQ ID NO: 2292752 - RNA, 19 nt, Homo sapiens
  misc_RNA (1)...(19): siRNA sense strand
gaagacaaggagaugguga

SEQ ID NO: 2292753 - RNA, 19 nt, Homo sapiens
  misc_RNA (1)...(19): siRNA sense strand
uggaggagaaagagaagga

SEQ ID NO: 2292754 - RNA, 19 nt, Homo sapiens
  misc_RNA (1)...(19): siRNA sense strand
cagcaagccugauggccca

SEQ ID NO: 2292755 - RNA, 19 nt, Homo sapiens
  misc_RNA (1)...(19): siRNA sense strand
ucauggagguauacggcuu

SEQ ID NO: 2292756 - RNA, 19 nt, Homo sapiens
  misc_RNA (1)...(19): siRNA sense strand
agaagcugcaguacagaua

SEQ ID NO: 2292757 - RNA, 19 nt, Homo sapiens
  misc_RNA (1)...(19): siRNA sense strand
gguccauaaucauguuaca

SEQ ID NO: 2292758 - RNA, 19 nt, Homo sapiens
  misc_RNA (1)...(19): siRNA sense strand
ccaguuugccuguuggaau

SEQ ID NO: 2292759 - RNA, 19 nt, Homo sapiens
  misc_RNA (1)...(19): siRNA sense strand
ccagggcagcagacagaua

SEQ ID NO: 2292760 - RNA, 19 nt, Homo sapiens
  misc_RNA (1)...(19): siRNA sense strand
ccuucguucaccugggaaa

SEQ ID NO: 2292761 - RNA, 19 nt, Homo sapiens
  misc_RNA (1)...(19): siRNA sense strand
aauagagauuccugagguu

SEQ ID NO: 2292762 - RNA, 19 nt, Homo sapiens
  misc_RNA (1)...(19): siRNA sense strand
ucuaccagcagaagaacaa

SEQ ID NO: 2292763 - RNA, 19 nt, Homo sapiens
  misc_RNA (1)...(19): siRNA sense strand
aaaauuaaacccaggaaca

SEQ ID NO: 2292764 - RNA, 19 nt, Homo sapiens
  misc_RNA (1)...(19): siRNA sense strand
aauuaaacccaggaacaua

SEQ ID NO: 2292765 - RNA, 19 nt, Homo sapiens
  misc_RNA (1)...(19): siRNA sense strand
ccuuggaucuggagcagca

SEQ ID NO: 2292766 - RNA, 19 nt, Homo sapiens
  misc_RNA (1)...(19): siRNA sense strand
ucaucaagaagcugcagua

SEQ ID NO: 2292767 - RNA, 19 nt, Homo sapiens
  misc_RNA (1)...(19): siRNA sense strand
ucaacauccucgacagcau

SEQ ID NO: 2292768 - RNA, 19 nt, Homo sapiens
  misc_RNA (1)...(19): siRNA sense strand
auuaaacccaggaacauaa

SEQ ID NO: 2292769 - RNA, 19 nt, Homo sapiens
  misc_RNA (1)...(19): siRNA sense strand
cauaaucauguuacaggaa

SEQ ID NO: 2292770 - RNA, 19 nt, Homo sapiens
  misc_RNA (1)...(19): siRNA sense strand
ggcuggaggagaaagagaa

SEQ ID NO: 2292771 - RNA, 19 nt, Homo sapiens
  misc_RNA (1)...(19): siRNA sense strand
caacugagcuccucccaga

SEQ ID NO: 2292772 - RNA, 19 nt, Homo sapiens
  misc_RNA (1)...(19): siRNA sense strand
guauacggcuucagcgacu

SEQ ID NO: 2292773 - RNA, 19 nt, Homo sapiens
  misc_RNA (1)...(19): siRNA sense strand
cggcugggaaagacggaca

SEQ ID NO: 2292774 - RNA, 19 nt, Homo sapiens
  misc_RNA (1)...(19): siRNA sense strand
gggaacugucucugaaaau

SEQ ID NO: 2292775 - RNA, 19 nt, Homo sapiens
  misc_RNA (1)...(19): siRNA sense strand
ugaacaaagaggcaacaga

SEQ ID NO: 2292776 - RNA, 19 nt, Homo sapiens
  misc_RNA (1)...(19): siRNA sense strand
cagaagacaaggagauggu

SEQ ID NO: 2292777 - RNA, 19 nt, Homo sapiens
  misc_RNA (1)...(19): siRNA sense strand
ugaggaggcccuaugggaa

SEQ ID NO: 2292778 - RNA, 19 nt, Homo sapiens
  misc_RNA (1)...(19): siRNA sense strand
gcuucagcuggacgggaaa

SEQ ID NO: 2292779 - RNA, 19 nt, Homo sapiens
  misc_RNA (1)...(19): siRNA sense strand
caggcuacgacguggagaa

SEQ ID NO: 2292780 - RNA, 19 nt, Homo sapiens
  misc_RNA (1)...(19): siRNA sense strand
ccaagaaagcggcacccaa

SEQ ID NO: 2292781 - RNA, 19 nt, Homo sapiens
  misc_RNA (1)...(19): siRNA sense strand
acgacguggagaagaacaa

SEQ ID NO: 2292782 - RNA, 19 nt, Homo sapiens
  misc_RNA (1)...(19): siRNA sense strand
gagaagaacaacagccgca

SEQ ID NO: 2292783 - RNA, 19 nt, Homo sapiens
  misc_RNA (1)...(19): siRNA sense strand
agcuaaaagcccugcuaaa

SEQ ID NO: 2292784 - RNA, 19 nt, Homo sapiens
  misc_RNA (1)...(19): siRNA sense strand
cugcuaaagcuaaggcugu

SEQ ID NO: 2292785 - RNA, 19 nt, Homo sapiens
  misc_RNA (1)...(19): siRNA sense strand
ccaaaacuguaaagcccaa

SEQ ID NO: 2292786 - RNA, 19 nt, Homo sapiens
  misc_RNA (1)...(19): siRNA sense strand
ggaccaagaaaguggccaa

SEQ ID NO: 2292787 - RNA, 19 nt, Homo sapiens
  misc_RNA (1)...(19): siRNA sense strand
cgaagguuacaaaggcaaa

SEQ ID NO: 2292788 - RNA, 19 nt, Homo sapiens
  misc_RNA (1)...(19): siRNA sense strand
gcgaagaaggcaggcgcaa

SEQ ID NO: 2292789 - RNA, 19 nt, Homo sapiens
  misc_RNA (1)...(19): siRNA sense strand
ccgaagaaaagcaucaaaa

SEQ ID NO: 2292790 - RNA, 19 nt, Homo sapiens
  misc_RNA (1)...(19): siRNA sense strand
ccgaagguuacaaaggcaa

SEQ ID NO: 2292791 - RNA, 19 nt, Homo sapiens
  misc_RNA (1)...(19): siRNA sense strand
aaggcaaacccaaggccaa

SEQ ID NO: 2292792 - RNA, 19 nt, Homo sapiens
  misc_RNA (1)...(19): siRNA sense strand
aggcaaacccaaggccaaa

SEQ ID NO: 2292793 - RNA, 19 nt, Homo sapiens
  misc_RNA (1)...(19): siRNA sense strand
caaagaaggcagcuccgaa

SEQ ID NO: 2292794 - RNA, 19 nt, Homo sapiens
  misc_RNA (1)...(19): siRNA sense strand
ccgugaguucauagagaua

SEQ ID NO: 2292795 - RNA, 19 nt, Homo sapiens
  misc_RNA (1)...(19): siRNA sense strand
ggaugugcugaguggaaua

SEQ ID NO: 2292796 - RNA, 19 nt, Homo sapiens
  misc_RNA (1)...(19): siRNA sense strand
cauuaagaggaaaguagua

SEQ ID NO: 2292797 - RNA, 19 nt, Homo sapiens
  misc_RNA (1)...(19): siRNA sense strand
aaguuugggugcaggaaca

SEQ ID NO: 2292798 - RNA, 19 nt, Homo sapiens
  misc_RNA (1)...(19): siRNA sense strand
agugauuccuugacagaca

SEQ ID NO: 2292799 - RNA, 19 nt, Homo sapiens
  misc_RNA (1)...(19): siRNA sense strand
ccucagacaccuugcuaga

SEQ ID NO: 2292800 - RNA, 19 nt, Homo sapiens
  misc_RNA (1)...(19): siRNA sense strand
aguccuugauagagagcga

SEQ ID NO: 2292801 - RNA, 19 nt, Homo sapiens
  misc_RNA (1)...(19): siRNA sense strand
augaaaagguggacgaguu

SEQ ID NO: 2292802 - RNA, 19 nt, Homo sapiens
  misc_RNA (1)...(19): siRNA sense strand
ugagagaaguggacccuga

SEQ ID NO: 2292803 - RNA, 19 nt, Homo sapiens
  misc_RNA (1)...(19): siRNA sense strand
cuuauacacuggaugaaaa

SEQ ID NO: 2292804 - RNA, 19 nt, Homo sapiens
  misc_RNA (1)...(19): siRNA sense strand
ugggaugugcugaguggaa

SEQ ID NO: 2292805 - RNA, 19 nt, Homo sapiens
  misc_RNA (1)...(19): siRNA sense strand
gauucgacugccacagaaa

SEQ ID NO: 2292806 - RNA, 19 nt, Homo sapiens
  misc_RNA (1)...(19): siRNA sense strand
ugauagagagcgagcccuu

SEQ ID NO: 2292807 - RNA, 19 nt, Homo sapiens
  misc_RNA (1)...(19): siRNA sense strand
ccagauuguuccaagucuu

SEQ ID NO: 2292808 - RNA, 19 nt, Homo sapiens
  misc_RNA (1)...(19): siRNA sense strand
ggaacauuaccuagaguac

SEQ ID NO: 2292809 - RNA, 19 nt, Homo sapiens
  misc_RNA (1)...(19): siRNA sense strand
ccuccacuuuauugaguau

SEQ ID NO: 2292810 - RNA, 19 nt, Homo sapiens
  misc_RNA (1)...(19): siRNA sense strand
ccuccacuuuauugaguau

SEQ ID NO: 2292811 - RNA, 19 nt, Homo sapiens
  misc_RNA (1)...(19): siRNA sense strand
ugaaagauguggaagagag

SEQ ID NO: 2292812 - RNA, 19 nt, Homo sapiens
  misc_RNA (1)...(19): siRNA sense strand
caaagaaggcggcagccaa

SEQ ID NO: 2292813 - RNA, 19 nt, Homo sapiens
  misc_RNA (1)...(19): siRNA sense strand
ccaaagcaguuaaacccaa

SEQ ID NO: 2292814 - RNA, 19 nt, Homo sapiens
  misc_RNA (1)...(19): siRNA sense strand
gagaagaacaacagccgca

SEQ ID NO: 2292815 - RNA, 19 nt, Homo sapiens
  misc_RNA (1)...(19): siRNA sense strand
gcgaaagcagccaagccaa

SEQ ID NO: 2292816 - RNA, 19 nt, Homo sapiens
  misc_RNA (1)...(19): siRNA sense strand
cuggcuaugacguggagaa

SEQ ID NO: 2292817 - RNA, 19 nt, Homo sapiens
  misc_RNA (1)...(19): siRNA sense strand
ccccaaagaaggcgaagaa

SEQ ID NO: 2292818 - RNA, 19 nt, Homo sapiens
  misc_RNA (1)...(19): siRNA sense strand
augacguggagaagaacaa

SEQ ID NO: 2292819 - RNA, 19 nt, Homo sapiens
  misc_RNA (1)...(19): siRNA sense strand
ccaaagaaggcgaagaagc

SEQ ID NO: 2292820 - RNA, 19 nt, Homo sapiens
  misc_RNA (1)...(19): siRNA sense strand
acgacguggagaagaauaa

SEQ ID NO: 2292821 - RNA, 19 nt, Homo sapiens
  misc_RNA (1)...(19): siRNA sense strand
ccggcuaagaagaaggcaa

SEQ ID NO: 2292822 - RNA, 19 nt, Homo sapiens
  misc_RNA (1)...(19): siRNA sense strand
ccaagaaggcggcugccaa

SEQ ID NO: 2292823 - RNA, 19 nt, Homo sapiens
  misc_RNA (1)...(19): siRNA sense strand
guggcuacgacguggagaa

SEQ ID NO: 2292824 - RNA, 19 nt, Homo sapiens
  misc_RNA (1)...(19): siRNA sense strand
aagccaagcccaaagccaa

SEQ ID NO: 2292825 - RNA, 19 nt, Homo sapiens
  misc_RNA (1)...(19): siRNA sense strand
gagaagaauaacagccgca

SEQ ID NO: 2292826 - RNA, 19 nt, Homo sapiens
  misc_RNA (1)...(19): siRNA sense strand
ccaaggcaguuaagccgaa

SEQ ID NO: 2292827 - RNA, 19 nt, Homo sapiens
  misc_RNA (1)...(19): siRNA sense strand
cggcuaagaagaaggcaac

SEQ ID NO: 2292828 - RNA, 19 nt, Homo sapiens
  misc_RNA (1)...(19): siRNA sense strand
ccaaagccgcuaagcccaa

SEQ ID NO: 2292829 - RNA, 19 nt, Homo sapiens
  misc_RNA (1)...(19): siRNA sense strand
cuaaagcugcaaaggccaa

SEQ ID NO: 2292830 - RNA, 19 nt, Homo sapiens
  misc_RNA (1)...(19): siRNA sense strand
gcgaagagcccuaagaagg

SEQ ID NO: 2292831 - RNA, 19 nt, Homo sapiens
  misc_RNA (1)...(19): siRNA sense strand
gcuuagugaacaagggaau

SEQ ID NO: 2292832 - RNA, 19 nt, Homo sapiens
  misc_RNA (1)...(19): siRNA sense strand
gccaagaagccgagagcga

SEQ ID NO: 2292833 - RNA, 19 nt, Homo sapiens
  misc_RNA (1)...(19): siRNA sense strand
gcuaaaggagccaagggua

SEQ ID NO: 2292834 - RNA, 19 nt, Homo sapiens
  misc_RNA (1)...(19): siRNA sense strand
acgacguagagaagaauaa

SEQ ID NO: 2292835 - RNA, 19 nt, Homo sapiens
  misc_RNA (1)...(19): siRNA sense strand
ccucaagagcuuagugaac

SEQ ID NO: 2292836 - RNA, 19 nt, Homo sapiens
  misc_RNA (1)...(19): siRNA sense strand
caagaagccgagagcgaca

SEQ ID NO: 2292837 - RNA, 19 nt, Homo sapiens
  misc_RNA (1)...(19): siRNA sense strand
aggguaagcaacagcagaa

SEQ ID NO: 2292838 - RNA, 19 nt, Homo sapiens
  misc_RNA (1)...(19): siRNA sense strand
cuaccagaagcaaggcuaa

SEQ ID NO: 2292839 - RNA, 19 nt, Homo sapiens
  misc_RNA (1)...(19): siRNA sense strand
ccagugaaggcaagggcuu

SEQ ID NO: 2292840 - RNA, 19 nt, Homo sapiens
  misc_RNA (1)...(19): siRNA sense strand
ggagaaaggcuaaaggagc

SEQ ID NO: 2292841 - RNA, 19 nt, Homo sapiens
  misc_RNA (1)...(19): siRNA sense strand
ccuaaaucuaccagaagca

SEQ ID NO: 2292842 - RNA, 19 nt, Homo sapiens
  misc_RNA (1)...(19): siRNA sense strand
gagaagaauaacagccgca

SEQ ID NO: 2292843 - RNA, 19 nt, Homo sapiens
  misc_RNA (1)...(19): siRNA sense strand
ugucuuugguugcgcucaa

SEQ ID NO: 2292844 - RNA, 19 nt, Homo sapiens
  misc_RNA (1)...(19): siRNA sense strand
cuguuaggagcgggagaaa

SEQ ID NO: 2292845 - RNA, 19 nt, Homo sapiens
  misc_RNA (1)...(19): siRNA sense strand
ugaagaagccucaucgcua

SEQ ID NO: 2292846 - RNA, 19 nt, Homo sapiens
  misc_RNA (1)...(19): siRNA sense strand
acgaaagccgccaggaaaa

SEQ ID NO: 2292847 - RNA, 19 nt, Homo sapiens
  misc_RNA (1)...(19): siRNA sense strand
ccggauacggggagagaga

SEQ ID NO: 2292848 - RNA, 19 nt, Homo sapiens
  misc_RNA (1)...(19): siRNA sense strand
aagcguaccuggugggucu

SEQ ID NO: 2292849 - RNA, 19 nt, Homo sapiens
  misc_RNA (1)...(19): siRNA sense strand
cagagguuggugagggaga

SEQ ID NO: 2292850 - RNA, 19 nt, Homo sapiens
  misc_RNA (1)...(19): siRNA sense strand
cguggcgcuucgagagauu

SEQ ID NO: 2292851 - RNA, 19 nt, Homo sapiens
  misc_RNA (1)...(19): siRNA sense strand
ccaucaugcccaaagacau

SEQ ID NO: 2292852 - RNA, 19 nt, Homo sapiens
  misc_RNA (1)...(19): siRNA sense strand
gggagaagacggugcagca

SEQ ID NO: 2292853 - RNA, 19 nt, Homo sapiens
  misc_RNA (1)...(19): siRNA sense strand
uuuguuacuucgugagcaa

SEQ ID NO: 2292854 - RNA, 19 nt, Homo sapiens
  misc_RNA (1)...(19): siRNA sense strand
gggaaugagaaacugguca

SEQ ID NO: 2292855 - RNA, 19 nt, Homo sapiens
  misc_RNA (1)...(19): siRNA sense strand
augaagggacugcggauga

SEQ ID NO: 2292856 - RNA, 19 nt, Homo sapiens
  misc_RNA (1)...(19): siRNA sense strand
cgagaaagcacggggugaa

SEQ ID NO: 2292857 - RNA, 19 nt, Homo sapiens
  misc_RNA (1)...(19): siRNA sense strand
aaagaggagaagaggaaga

SEQ ID NO: 2292858 - RNA, 19 nt, Homo sapiens
  misc_RNA (1)...(19): siRNA sense strand
ccgacgugaaagaggagaa

SEQ ID NO: 2292859 - RNA, 19 nt, Homo sapiens
  misc_RNA (1)...(19): siRNA sense strand
gcugcagccacgaggagaa

SEQ ID NO: 2292860 - RNA, 19 nt, Homo sapiens
  misc_RNA (1)...(19): siRNA sense strand
gugaaagaggagaagagga

SEQ ID NO: 2292861 - RNA, 19 nt, Homo sapiens
  misc_RNA (1)...(19): siRNA sense strand
ucauggaccugcuggccaa

SEQ ID NO: 2292862 - RNA, 19 nt, Homo sapiens
  misc_RNA (1)...(19): siRNA sense strand
uggccaaggacgaccagaa

SEQ ID NO: 2292863 - RNA, 19 nt, Homo sapiens
  misc_RNA (1)...(19): siRNA sense strand
aggagaagaggaagaagga

SEQ ID NO: 2292864 - RNA, 19 nt, Homo sapiens
  misc_RNA (1)...(19): siRNA sense strand
gagaagaggaagaaggagc

SEQ ID NO: 2292865 - RNA, 19 nt, Homo sapiens
  misc_RNA (1)...(19): siRNA sense strand
ccgaacugcgcgagugcau

SEQ ID NO: 2292866 - RNA, 19 nt, Homo sapiens
  misc_RNA (1)...(19): siRNA sense strand
agucaugggcagagacaaa

SEQ ID NO: 2292867 - RNA, 19 nt, Homo sapiens
  misc_RNA (1)...(19): siRNA sense strand
gagaauaauuggaaccaca

SEQ ID NO: 2292868 - RNA, 19 nt, Homo sapiens
  misc_RNA (1)...(19): siRNA sense strand
aucaagaauuuaugggcaa

SEQ ID NO: 2292869 - RNA, 19 nt, Homo sapiens
  misc_RNA (1)...(19): siRNA sense strand
gaugagucacauaaagaaa

SEQ ID NO: 2292870 - RNA, 19 nt, Homo sapiens
  misc_RNA (1)...(19): siRNA sense strand
cccauaaaguugaacaaaa

SEQ ID NO: 2292871 - RNA, 19 nt, Homo sapiens
  misc_RNA (1)...(19): siRNA sense strand
gcggaagaagggacaacaa

SEQ ID NO: 2292872 - RNA, 19 nt, Homo sapiens
  misc_RNA (1)...(19): siRNA sense strand
guaagauauuggauggcuu

SEQ ID NO: 2292873 - RNA, 19 nt, Homo sapiens
  misc_RNA (1)...(19): siRNA sense strand
cugcuuauauuguuggcua

SEQ ID NO: 2292874 - RNA, 19 nt, Homo sapiens
  misc_RNA (1)...(19): siRNA sense strand
agaacaacuuccacgaaaa

SEQ ID NO: 2292875 - RNA, 19 nt, Homo sapiens
  misc_RNA (1)...(19): siRNA sense strand
acauaaagaaagcucgcaa

SEQ ID NO: 2292876 - RNA, 19 nt, Homo sapiens
  misc_RNA (1)...(19): siRNA sense strand
ggguguguucagugcauua

SEQ ID NO: 2292877 - RNA, 19 nt, Homo sapiens
  misc_RNA (1)...(19): siRNA sense strand
ugcaugaguuuguggaaga

SEQ ID NO: 2292878 - RNA, 19 nt, Homo sapiens
  misc_RNA (1)...(19): siRNA sense strand
cagcagacccguuggagca

SEQ ID NO: 2292879 - RNA, 19 nt, Homo sapiens
  misc_RNA (1)...(19): siRNA sense strand
cggugagacagaugaguca

SEQ ID NO: 2292880 - RNA, 19 nt, Homo sapiens
  misc_RNA (1)...(19): siRNA sense strand
cagcugccuuagaggaaau

SEQ ID NO: 2292881 - RNA, 19 nt, Homo sapiens
  misc_RNA (1)...(19): siRNA sense strand
cggaagaagggacaacaau

SEQ ID NO: 2292882 - RNA, 19 nt, Homo sapiens
  misc_RNA (1)...(19): siRNA sense strand
uguacagguuugugauuca

SEQ ID NO: 2292883 - RNA, 19 nt, Homo sapiens
  misc_RNA (1)...(19): siRNA sense strand
ggaaauaucgucauggucu

SEQ ID NO: 2292884 - RNA, 19 nt, Homo sapiens
  misc_RNA (1)...(19): siRNA sense strand
gaacaaaacaguugcccuu

SEQ ID NO: 2292885 - RNA, 19 nt, Homo sapiens
  misc_RNA (1)...(19): siRNA sense strand
ccauaaaguugaacaaaac

SEQ ID NO: 2292886 - RNA, 19 nt, Homo sapiens
  misc_RNA (1)...(19): siRNA sense strand
gagacagaugagucacaua

SEQ ID NO: 2292887 - RNA, 19 nt, Homo sapiens
  misc_RNA (1)...(19): siRNA sense strand
aaucaagaauuuaugggca

SEQ ID NO: 2292888 - RNA, 19 nt, Homo sapiens
  misc_RNA (1)...(19): siRNA sense strand
ggguaaaauuuggaacauu

SEQ ID NO: 2292889 - RNA, 19 nt, Homo sapiens
  misc_RNA (1)...(19): siRNA sense strand
cgccaagauguuugcaauu

SEQ ID NO: 2292890 - RNA, 19 nt, Homo sapiens
  misc_RNA (1)...(19): siRNA sense strand
cuuaaggaaauguuugcaa

SEQ ID NO: 2292891 - RNA, 19 nt, Homo sapiens
  misc_RNA (1)...(19): siRNA sense strand
cuuauaucuggaagaacaa

SEQ ID NO: 2292892 - RNA, 19 nt, Homo sapiens
  misc_RNA (1)...(19): siRNA sense strand
auaaagaaagcucgcaaca

SEQ ID NO: 2292893 - RNA, 19 nt, Homo sapiens
  misc_RNA (1)...(19): siRNA sense strand
ugggacgaaguguggauua

SEQ ID NO: 2292894 - RNA, 19 nt, Homo sapiens
  misc_RNA (1)...(19): siRNA sense strand
cugggaauguacagaaacu

SEQ ID NO: 2292895 - RNA, 19 nt, Homo sapiens
  misc_RNA (1)...(19): siRNA sense strand
ccaguaucaguuugguuua

SEQ ID NO: 2292896 - RNA, 19 nt, Homo sapiens
  misc_RNA (1)...(19): siRNA sense strand
uggacaaguuccugagcca

SEQ ID NO: 2292897 - RNA, 19 nt, Homo sapiens
  misc_RNA (1)...(19): siRNA sense strand
ugaccaagacugagaggac

SEQ ID NO: 2292898 - RNA, 19 nt, Homo sapiens
  misc_RNA (1)...(19): siRNA sense strand
ccugaaagaucaaugggca

SEQ ID NO: 2292899 - RNA, 19 nt, Homo sapiens
  misc_RNA (1)...(19): siRNA sense strand
aggaggugcugaagagcga

SEQ ID NO: 2292900 - RNA, 19 nt, Homo sapiens
  misc_RNA (1)...(19): siRNA sense strand
agaaauagcaggaccucca

SEQ ID NO: 2292901 - RNA, 19 nt, Homo sapiens
  misc_RNA (1)...(19): siRNA sense strand
gggcuauuuguuuggauau

SEQ ID NO: 2292902 - RNA, 19 nt, Homo sapiens
  misc_RNA (1)...(19): siRNA sense strand
ggauauccugaaagaucaa

SEQ ID NO: 2292903 - RNA, 19 nt, Homo sapiens
  misc_RNA (1)...(19): siRNA sense strand
agagcgaggagacgagcaa

SEQ ID NO: 2292904 - RNA, 19 nt, Homo sapiens
  misc_RNA (1)...(19): siRNA sense strand
augcaguaauaguggccuu

SEQ ID NO: 2292905 - RNA, 19 nt, Homo sapiens
  misc_RNA (1)...(19): siRNA sense strand
uacagaauuaagaggagaa

SEQ ID NO: 2292906 - RNA, 19 nt, Homo sapiens
  misc_RNA (1)...(19): siRNA sense strand
acagaauuaagaggagaaa

SEQ ID NO: 2292907 - RNA, 19 nt, Homo sapiens
  misc_RNA (1)...(19): siRNA sense strand
cagcgaaucaagcgggagu

SEQ ID NO: 2292908 - RNA, 19 nt, Homo sapiens
  misc_RNA (1)...(19): siRNA sense strand
ucaaggagcuggaggagga

SEQ ID NO: 2292909 - RNA, 19 nt, Homo sapiens
  misc_RNA (1)...(19): siRNA sense strand
agaaacagucaguggccaa

SEQ ID NO: 2292910 - RNA, 19 nt, Homo sapiens
  misc_RNA (1)...(19): siRNA sense strand
agaucauggucaaggccaa

SEQ ID NO: 2292911 - RNA, 19 nt, Homo sapiens
  misc_RNA (1)...(19): siRNA sense strand
gcgaauacuucaaggagcu

SEQ ID NO: 2292912 - RNA, 19 nt, Homo sapiens
  misc_RNA (1)...(19): siRNA sense strand
gaacaaaucaguagagcug

SEQ ID NO: 2292913 - RNA, 19 nt, Homo sapiens
  misc_RNA (1)...(19): siRNA sense strand
gaggagagcauccgggaca

SEQ ID NO: 2292914 - RNA, 19 nt, Homo sapiens
  misc_RNA (1)...(19): siRNA sense strand
cugucaaccugcuggucaa

SEQ ID NO: 2292915 - RNA, 19 nt, Homo sapiens
  misc_RNA (1)...(19): siRNA sense strand
uggaaaaggaagaggugga

SEQ ID NO: 2292916 - RNA, 19 nt, Homo sapiens
  misc_RNA (1)...(19): siRNA sense strand
acaaaucaguagagcugga

SEQ ID NO: 2292917 - RNA, 19 nt, Homo sapiens
  misc_RNA (1)...(19): siRNA sense strand
acguuaagggcaagccauu

SEQ ID NO: 2292918 - RNA, 19 nt, Homo sapiens
  misc_RNA (1)...(19): siRNA sense strand
ucuucauucuggacguuaa

SEQ ID NO: 2292919 - RNA, 19 nt, Homo sapiens
  misc_RNA (1)...(19): siRNA sense strand
ugguacagcgggaggagga

SEQ ID NO: 2292920 - RNA, 19 nt, Homo sapiens
  misc_RNA (1)...(19): siRNA sense strand
aggacgaguuugagcacaa

SEQ ID NO: 2292921 - RNA, 19 nt, Homo sapiens
  misc_RNA (1)...(19): siRNA sense strand
aggaggagaucgagcgcau

SEQ ID NO: 2292922 - RNA, 19 nt, Homo sapiens
  misc_RNA (1)...(19): siRNA sense strand
aguuugagcacaagaggaa

SEQ ID NO: 2292923 - RNA, 19 nt, Homo sapiens
  misc_RNA (1)...(19): siRNA sense strand
aguacaaagcggaggacga

SEQ ID NO: 2292924 - RNA, 19 nt, Homo sapiens
  misc_RNA (1)...(19): siRNA sense strand
ggaaggagcuggagcaggu

SEQ ID NO: 2292925 - RNA, 19 nt, Homo sapiens
  misc_RNA (1)...(19): siRNA sense strand
acggcaagguggagaucau

SEQ ID NO: 2292926 - RNA, 19 nt, Homo sapiens
  misc_RNA (1)...(19): siRNA sense strand
gggccaugacgaaagacaa

SEQ ID NO: 2292927 - RNA, 19 nt, Homo sapiens
  misc_RNA (1)...(19): siRNA sense strand
ucgccaacgaccagggcaa

SEQ ID NO: 2292928 - RNA, 19 nt, Homo sapiens
  misc_RNA (1)...(19): siRNA sense strand
gagacaagcccaaggugca

SEQ ID NO: 2292929 - RNA, 19 nt, Homo sapiens
  misc_RNA (1)...(19): siRNA sense strand
uggacaaggcccagauuca

SEQ ID NO: 2292930 - RNA, 19 nt, Homo sapiens
  misc_RNA (1)...(19): siRNA sense strand
gcgagagggugucagccaa

SEQ ID NO: 2292931 - RNA, 19 nt, Homo sapiens
  misc_RNA (1)...(19): siRNA sense strand
ccgagaacgugcaggaccu

SEQ ID NO: 2292932 - RNA, 19 nt, Homo sapiens
  misc_RNA (1)...(19): siRNA sense strand
agcuggagcagguguguaa

SEQ ID NO: 2292933 - RNA, 19 nt, Homo sapiens
  misc_RNA (1)...(19): siRNA sense strand
agagaaaacacaagaagga

SEQ ID NO: 2292934 - RNA, 19 nt, Homo sapiens
  misc_RNA (1)...(19): siRNA sense strand
ugagcaaggaggagaucga

SEQ ID NO: 2292935 - RNA, 19 nt, Homo sapiens
  misc_RNA (1)...(19): siRNA sense strand
uggagaaggcucugcgcga

SEQ ID NO: 2292936 - RNA, 19 nt, Homo sapiens
  misc_RNA (1)...(19): siRNA sense strand
ccaugacgaaagacaacaa

SEQ ID NO: 2292937 - RNA, 19 nt, Homo sapiens
  misc_RNA (1)...(19): siRNA sense strand
cggacaagagcaccggcaa

SEQ ID NO: 2292938 - RNA, 19 nt, Homo sapiens
  misc_RNA (1)...(19): siRNA sense strand
caagggagggucuggguca

SEQ ID NO: 2292939 - RNA, 19 nt, Homo sapiens
  misc_RNA (1)...(19): siRNA sense strand
agguggagaucaucgccaa

SEQ ID NO: 2292940 - RNA, 19 nt, Homo sapiens
  misc_RNA (1)...(19): siRNA sense strand
agaaaacacaagaaggaca

SEQ ID NO: 2292941 - RNA, 19 nt, Homo sapiens
  misc_RNA (1)...(19): siRNA sense strand
ggacaagagcaccggcaag

SEQ ID NO: 2292942 - RNA, 19 nt, Homo sapiens
  misc_RNA (1)...(19): siRNA sense strand
acaagaaggacaucagcca

SEQ ID NO: 2292943 - RNA, 19 nt, Homo sapiens
  misc_RNA (1)...(19): siRNA sense strand
aagaaggacaucagccaga

SEQ ID NO: 2292944 - RNA, 19 nt, Homo sapiens
  misc_RNA (1)...(19): siRNA sense strand
aggacaucagccagaacaa

SEQ ID NO: 2292945 - RNA, 19 nt, Homo sapiens
  misc_RNA (1)...(19): siRNA sense strand
gugaagaggaagagggcuu

SEQ ID NO: 2292946 - RNA, 19 nt, Homo sapiens
  misc_RNA (1)...(19): siRNA sense strand
gggaauaaauguagccacu

SEQ ID NO: 2292947 - RNA, 19 nt, Homo sapiens
  misc_RNA (1)...(19): siRNA sense strand
cggccaucggagaggaaua

SEQ ID NO: 2292948 - RNA, 19 nt, Homo sapiens
  misc_RNA (1)...(19): siRNA sense strand
ccaccaaagcccuggcaga

SEQ ID NO: 2292949 - RNA, 19 nt, Homo sapiens
  misc_RNA (1)...(19): siRNA sense strand
gcaucagcuuacagugcaa

SEQ ID NO: 2292950 - RNA, 19 nt, Homo sapiens
  misc_RNA (1)...(19): siRNA sense strand
auaauaauucucugggcaa

SEQ ID NO: 2292951 - RNA, 19 nt, Homo sapiens
  misc_RNA (1)...(19): siRNA sense strand
ccaucagugaagaggaaga

SEQ ID NO: 2292952 - RNA, 19 nt, Homo sapiens
  misc_RNA (1)...(19): siRNA sense strand
gggugaaguuccugggcuc

SEQ ID NO: 2292953 - RNA, 19 nt, Homo sapiens
  misc_RNA (1)...(19): siRNA sense strand
acuacagugacgagaguga

SEQ ID NO: 2292954 - RNA, 19 nt, Homo sapiens
  misc_RNA (1)...(19): siRNA sense strand
agauaggcgucaaggccga

SEQ ID NO: 2292955 - RNA, 19 nt, Homo sapiens
  misc_RNA (1)...(19): siRNA sense strand
caacaaguacuuuggguuc

SEQ ID NO: 2292956 - RNA, 19 nt, Homo sapiens
  misc_RNA (1)...(19): siRNA sense strand
aggacgacgaggaggacga

SEQ ID NO: 2292957 - RNA, 19 nt, Homo sapiens
  misc_RNA (1)...(19): siRNA sense strand
aagacgaacuugagcugga

SEQ ID NO: 2292958 - RNA, 19 nt, Homo sapiens
  misc_RNA (1)...(19): siRNA sense strand
aauaauaauucucugggca

SEQ ID NO: 2292959 - RNA, 19 nt, Homo sapiens
  misc_RNA (1)...(19): siRNA sense strand
aggcugaagacuacuggua

SEQ ID NO: 2292960 - RNA, 19 nt, Homo sapiens
  misc_RNA (1)...(19): siRNA sense strand
acuacugguacgaggccua

SEQ ID NO: 2292961 - RNA, 19 nt, Homo sapiens
  misc_RNA (1)...(19): siRNA sense strand
gaagauaucuaccuggagu

SEQ ID NO: 2292962 - RNA, 19 nt, Homo sapiens
  misc_RNA (1)...(19): siRNA sense strand
ccauaguggaaguuuacaa

SEQ ID NO: 2292963 - RNA, 19 nt, Homo sapiens
  misc_RNA (1)...(19): siRNA sense strand
agccaaggauggacggaca

SEQ ID NO: 2292964 - RNA, 19 nt, Homo sapiens
  misc_RNA (1)...(19): siRNA sense strand
ggacagagguugcgcugcu

SEQ ID NO: 2292965 - RNA, 19 nt, Homo sapiens
  misc_RNA (1)...(19): siRNA sense strand
ggaaagagcuauaccaugc

SEQ ID NO: 2292966 - RNA, 19 nt, Homo sapiens
  misc_RNA (1)...(19): siRNA sense strand
ccucgaaacugauggagcu

SEQ ID NO: 2292967 - RNA, 19 nt, Homo sapiens
  misc_RNA (1)...(19): siRNA sense strand
ccucaggguuuauggucca

SEQ ID NO: 2292968 - RNA, 19 nt, Homo sapiens
  misc_RNA (1)...(19): siRNA sense strand
gcguauggacagacgggca

SEQ ID NO: 2292969 - RNA, 19 nt, Homo sapiens
  misc_RNA (1)...(19): siRNA sense strand
guguuauggcguauggaca

SEQ ID NO: 2292970 - RNA, 19 nt, Homo sapiens
  misc_RNA (1)...(19): siRNA sense strand
gcccaaagguugaagucuc

SEQ ID NO: 2292971 - RNA, 19 nt, Homo sapiens
  misc_RNA (1)...(19): siRNA sense strand
caggucagcuucagcguga

SEQ ID NO: 2292972 - RNA, 19 nt, Homo sapiens
  misc_RNA (1)...(19): siRNA sense strand
augcgaaguuacuggugau

SEQ ID NO: 2292973 - RNA, 19 nt, Homo sapiens
  misc_RNA (1)...(19): siRNA sense strand
cgggcagcggaaagagcua

SEQ ID NO: 2292974 - RNA, 19 nt, Homo sapiens
  misc_RNA (1)...(19): siRNA sense strand
ccauaguggaaguuuacaa

SEQ ID NO: 2292975 - RNA, 19 nt, Homo sapiens
  misc_RNA (1)...(19): siRNA sense strand
agccaaggauggacggaca

SEQ ID NO: 2292976 - RNA, 19 nt, Homo sapiens
  misc_RNA (1)...(19): siRNA sense strand
ggacagagguugcgcugcu

SEQ ID NO: 2292977 - RNA, 19 nt, Homo sapiens
  misc_RNA (1)...(19): siRNA sense strand
ggaaagagcuauaccaugc

SEQ ID NO: 2292978 - RNA, 19 nt, Homo sapiens
  misc_RNA (1)...(19): siRNA sense strand
ccucgaaacugauggagcu

SEQ ID NO: 2292979 - RNA, 19 nt, Homo sapiens
  misc_RNA (1)...(19): siRNA sense strand
ccucaggguuuauggucca

SEQ ID NO: 2292980 - RNA, 19 nt, Homo sapiens
  misc_RNA (1)...(19): siRNA sense strand
gcguauggacagacgggca

SEQ ID NO: 2292981 - RNA, 19 nt, Homo sapiens
  misc_RNA (1)...(19): siRNA sense strand
guguuauggcguauggaca

SEQ ID NO: 2292982 - RNA, 19 nt, Homo sapiens
  misc_RNA (1)...(19): siRNA sense strand
gcccaaagguugaagucuc

SEQ ID NO: 2292983 - RNA, 19 nt, Homo sapiens
  misc_RNA (1)...(19): siRNA sense strand
caggucagcuucagcguga

SEQ ID NO: 2292984 - RNA, 19 nt, Homo sapiens
  misc_RNA (1)...(19): siRNA sense strand
augcgaaguuacuggugau

SEQ ID NO: 2292985 - RNA, 19 nt, Homo sapiens
  misc_RNA (1)...(19): siRNA sense strand
cgggcagcggaaagagcua

SEQ ID NO: 2292986 - RNA, 19 nt, Homo sapiens
  misc_RNA (1)...(19): siRNA sense strand
gggaagaggcugaggccaa

SEQ ID NO: 2292987 - RNA, 19 nt, Homo sapiens
  misc_RNA (1)...(19): siRNA sense strand
gugcaaagacggaggacca

SEQ ID NO: 2292988 - RNA, 19 nt, Homo sapiens
  misc_RNA (1)...(19): siRNA sense strand
gggcugaguuugagcggau

SEQ ID NO: 2292989 - RNA, 19 nt, Homo sapiens
  misc_RNA (1)...(19): siRNA sense strand
gaaggaaccuagagcccaa

SEQ ID NO: 2292990 - RNA, 19 nt, Homo sapiens
  misc_RNA (1)...(19): siRNA sense strand
gaaccacaccagaggccua

SEQ ID NO: 2292991 - RNA, 19 nt, Homo sapiens
  misc_RNA (1)...(19): siRNA sense strand
gauaaaguccaacggccaa

SEQ ID NO: 2292992 - RNA, 19 nt, Homo sapiens
  misc_RNA (1)...(19): siRNA sense strand
ugauaaaguccaacggcca

SEQ ID NO: 2292993 - RNA, 19 nt, Homo sapiens
  misc_RNA (1)...(19): siRNA sense strand
ggaacuauccauacagcga

SEQ ID NO: 2292994 - RNA, 19 nt, Homo sapiens
  misc_RNA (1)...(19): siRNA sense strand
agcuaggcuucaaaggaaa

SEQ ID NO: 2292995 - RNA, 19 nt, Homo sapiens
  misc_RNA (1)...(19): siRNA sense strand
ugacucuggcggaggacaa

SEQ ID NO: 2292996 - RNA, 19 nt, Homo sapiens
  misc_RNA (1)...(19): siRNA sense strand
cugcuucacaagaggaauu

SEQ ID NO: 2292997 - RNA, 19 nt, Homo sapiens
  misc_RNA (1)...(19): siRNA sense strand
cagcauugagacaaagaca

SEQ ID NO: 2292998 - RNA, 19 nt, Homo sapiens
  misc_RNA (1)...(19): siRNA sense strand
cagaaucagaugugggauc

SEQ ID NO: 2292999 - RNA, 19 nt, Homo sapiens
  misc_RNA (1)...(19): siRNA sense strand
cugagggacuugagccuga

SEQ ID NO: 2293000 - RNA, 19 nt, Homo sapiens
  misc_RNA (1)...(19): siRNA sense strand
gaaugguggcccagggagu

SEQ ID NO: 2293001 - RNA, 19 nt, Homo sapiens
  misc_RNA (1)...(19): siRNA sense strand
gacuugagccugaggggaa

SEQ ID NO: 2293002 - RNA, 19 nt, Homo sapiens
  misc_RNA (1)...(19): siRNA sense strand
ccagaaagcccucggcaug

SEQ ID NO: 2293003 - RNA, 19 nt, Homo sapiens
  misc_RNA (1)...(19): siRNA sense strand
cuuauuaccaccugaggau

SEQ ID NO: 2293004 - RNA, 19 nt, Homo sapiens
  misc_RNA (1)...(19): siRNA sense strand
gggaccugggcuaggaaaa

SEQ ID NO: 2293005 - RNA, 19 nt, Homo sapiens
  misc_RNA (1)...(19): siRNA sense strand
aagauuuggugcaggaaaa

SEQ ID NO: 2293006 - RNA, 19 nt, Homo sapiens
  misc_RNA (1)...(19): siRNA sense strand
cgaagaacaggaagggcca

SEQ ID NO: 2293007 - RNA, 19 nt, Homo sapiens
  misc_RNA (1)...(19): siRNA sense strand
acaaucagaucgugcccaa

SEQ ID NO: 2293008 - RNA, 19 nt, Homo sapiens
  misc_RNA (1)...(19): siRNA sense strand
aggaaaacuaccuggagua

SEQ ID NO: 2293009 - RNA, 19 nt, Homo sapiens
  misc_RNA (1)...(19): siRNA sense strand
ugauaaucguccuggccau

SEQ ID NO: 2293010 - RNA, 19 nt, Homo sapiens
  misc_RNA (1)...(19): siRNA sense strand
ccgaugagggcuccagcaa

SEQ ID NO: 2293011 - RNA, 19 nt, Homo sapiens
  misc_RNA (1)...(19): siRNA sense strand
cgucugaggacuuaaagaa

SEQ ID NO: 2293012 - RNA, 19 nt, Homo sapiens
  misc_RNA (1)...(19): siRNA sense strand
gcaucaugaggcagagauu

SEQ ID NO: 2293013 - RNA, 19 nt, Homo sapiens
  misc_RNA (1)...(19): siRNA sense strand
aucaugaggcagagauuaa

SEQ ID NO: 2293014 - RNA, 19 nt, Homo sapiens
  misc_RNA (1)...(19): siRNA sense strand
acuacaaggagcugggcuu

SEQ ID NO: 2293015 - RNA, 19 nt, Homo sapiens
  misc_RNA (1)...(19): siRNA sense strand
ccgugaaguaccuggaguu

SEQ ID NO: 2293016 - RNA, 19 nt, Homo sapiens
  misc_RNA (1)...(19): siRNA sense strand
cugaggacuuaaagaagca

SEQ ID NO: 2293017 - RNA, 19 nt, Homo sapiens
  misc_RNA (1)...(19): siRNA sense strand
gagcuguuccggaaggaca

SEQ ID NO: 2293018 - RNA, 19 nt, Homo sapiens
  misc_RNA (1)...(19): siRNA sense strand
gggaauggcaguuggugcu

SEQ ID NO: 2293019 - RNA, 19 nt, Homo sapiens
  misc_RNA (1)...(19): siRNA sense strand
cgucugaggacuuaaagaa

SEQ ID NO: 2293020 - RNA, 19 nt, Homo sapiens
  misc_RNA (1)...(19): siRNA sense strand
gcaucaugaggcagagauu

SEQ ID NO: 2293021 - RNA, 19 nt, Homo sapiens
  misc_RNA (1)...(19): siRNA sense strand
aucaugaggcagagauuaa

SEQ ID NO: 2293022 - RNA, 19 nt, Homo sapiens
  misc_RNA (1)...(19): siRNA sense strand
acuacaaggagcugggcuu

SEQ ID NO: 2293023 - RNA, 19 nt, Homo sapiens
  misc_RNA (1)...(19): siRNA sense strand
ccgugaaguaccuggaguu

SEQ ID NO: 2293024 - RNA, 19 nt, Homo sapiens
  misc_RNA (1)...(19): siRNA sense strand
cugaggacuuaaagaagca

SEQ ID NO: 2293025 - RNA, 19 nt, Homo sapiens
  misc_RNA (1)...(19): siRNA sense strand
gagcuguuccggaaggaca

SEQ ID NO: 2293026 - RNA, 19 nt, Homo sapiens
  misc_RNA (1)...(19): siRNA sense strand
gggaauggcaguuggugcu

SEQ ID NO: 2293027 - RNA, 19 nt, Homo sapiens
  misc_RNA (1)...(19): siRNA sense strand
cgucugaggacuuaaagaa

SEQ ID NO: 2293028 - RNA, 19 nt, Homo sapiens
  misc_RNA (1)...(19): siRNA sense strand
gcaucaugaggcagagauu

SEQ ID NO: 2293029 - RNA, 19 nt, Homo sapiens
  misc_RNA (1)...(19): siRNA sense strand
aucaugaggcagagauuaa

SEQ ID NO: 2293030 - RNA, 19 nt, Homo sapiens
  misc_RNA (1)...(19): siRNA sense strand
acuacaaggagcugggcuu

SEQ ID NO: 2293031 - RNA, 19 nt, Homo sapiens
  misc_RNA (1)...(19): siRNA sense strand
ccgugaaguaccuggaguu

SEQ ID NO: 2293032 - RNA, 19 nt, Homo sapiens
  misc_RNA (1)...(19): siRNA sense strand
cugaggacuuaaagaagca

SEQ ID NO: 2293033 - RNA, 19 nt, Homo sapiens
  misc_RNA (1)...(19): siRNA sense strand
gagcuguuccggaaggaca

SEQ ID NO: 2293034 - RNA, 19 nt, Homo sapiens
  misc_RNA (1)...(19): siRNA sense strand
gggaauggcaguuggugcu

SEQ ID NO: 2293035 - RNA, 19 nt, Homo sapiens
  misc_RNA (1)...(19): siRNA sense strand
ggaaucaaguucauggaga

SEQ ID NO: 2293036 - RNA, 19 nt, Homo sapiens
  misc_RNA (1)...(19): siRNA sense strand
cagagauaucaaagcaaaa

SEQ ID NO: 2293037 - RNA, 19 nt, Homo sapiens
  misc_RNA (1)...(19): siRNA sense strand
gugaaugacaagagacaag

SEQ ID NO: 2293038 - RNA, 19 nt, Homo sapiens
  misc_RNA (1)...(19): siRNA sense strand
cagcagaagaggagcagcu

SEQ ID NO: 2293039 - RNA, 19 nt, Homo sapiens
  misc_RNA (1)...(19): siRNA sense strand
augugaaugacaagagaca

SEQ ID NO: 2293040 - RNA, 19 nt, Homo sapiens
  misc_RNA (1)...(19): siRNA sense strand
gaaucaaguucauggagac

SEQ ID NO: 2293041 - RNA, 19 nt, Homo sapiens
  misc_RNA (1)...(19): siRNA sense strand
cugcagacgucgaaaagau

SEQ ID NO: 2293042 - RNA, 19 nt, Homo sapiens
  misc_RNA (1)...(19): siRNA sense strand
agaccagcgcgaaggccaa

SEQ ID NO: 2293043 - RNA, 19 nt, Homo sapiens
  misc_RNA (1)...(19): siRNA sense strand
caggaacgguuucggacga

SEQ ID NO: 2293044 - RNA, 19 nt, Homo sapiens
  misc_RNA (1)...(19): siRNA sense strand
ccacauuucaagcggacaa

SEQ ID NO: 2293045 - RNA, 19 nt, Homo sapiens
  misc_RNA (1)...(19): siRNA sense strand
cugugaagccagaggagau

SEQ ID NO: 2293046 - RNA, 19 nt, Homo sapiens
  misc_RNA (1)...(19): siRNA sense strand
uggacuggucugagcuaua

SEQ ID NO: 2293047 - RNA, 19 nt, Homo sapiens
  misc_RNA (1)...(19): siRNA sense strand
ggauaagaaagaaaagaga

SEQ ID NO: 2293048 - RNA, 19 nt, Homo sapiens
  misc_RNA (1)...(19): siRNA sense strand
acaaagcacaaguggcgaa

SEQ ID NO: 2293049 - RNA, 19 nt, Homo sapiens
  misc_RNA (1)...(19): siRNA sense strand
ccacauuucaagcggacaa

SEQ ID NO: 2293050 - RNA, 19 nt, Homo sapiens
  misc_RNA (1)...(19): siRNA sense strand
cugugaagccagaggagau

SEQ ID NO: 2293051 - RNA, 19 nt, Homo sapiens
  misc_RNA (1)...(19): siRNA sense strand
uggacuggucugagcuaua

SEQ ID NO: 2293052 - RNA, 19 nt, Homo sapiens
  misc_RNA (1)...(19): siRNA sense strand
ggauaagaaagaaaagaga

SEQ ID NO: 2293053 - RNA, 19 nt, Homo sapiens
  misc_RNA (1)...(19): siRNA sense strand
acaaagcacaaguggcgaa

SEQ ID NO: 2293054 - RNA, 19 nt, Homo sapiens
  misc_RNA (1)...(19): siRNA sense strand
ggauaauagcuuugagcaa

SEQ ID NO: 2293055 - RNA, 19 nt, Homo sapiens
  misc_RNA (1)...(19): siRNA sense strand
ggggaaaagaagaagguaa

SEQ ID NO: 2293056 - RNA, 19 nt, Homo sapiens
  misc_RNA (1)...(19): siRNA sense strand
guuccaggccagugggaua

SEQ ID NO: 2293057 - RNA, 19 nt, Homo sapiens
  misc_RNA (1)...(19): siRNA sense strand
gggaaaagaagaagguaau

SEQ ID NO: 2293058 - RNA, 19 nt, Homo sapiens
  misc_RNA (1)...(19): siRNA sense strand
agaagaagguaaugggagu

SEQ ID NO: 2293059 - RNA, 19 nt, Homo sapiens
  misc_RNA (1)...(19): siRNA sense strand
ccaagaagucccaggccaa

SEQ ID NO: 2293060 - RNA, 19 nt, Homo sapiens
  misc_RNA (1)...(19): siRNA sense strand
auauaagagagaaggcaua

SEQ ID NO: 2293061 - RNA, 19 nt, Homo sapiens
  misc_RNA (1)...(19): siRNA sense strand
guggaaggcccgaaagaau

SEQ ID NO: 2293062 - RNA, 19 nt, Homo sapiens
  misc_RNA (1)...(19): siRNA sense strand
cagaagaaguagagagagc

SEQ ID NO: 2293063 - RNA, 19 nt, Homo sapiens
  misc_RNA (1)...(19): siRNA sense strand
cagugagguucaaggagaa

SEQ ID NO: 2293064 - RNA, 19 nt, Homo sapiens
  misc_RNA (1)...(19): siRNA sense strand
gcauaaagcccaaugagca

SEQ ID NO: 2293065 - RNA, 19 nt, Homo sapiens
  misc_RNA (1)...(19): siRNA sense strand
gcucaaaggagaaaggaac

SEQ ID NO: 2293066 - RNA, 19 nt, Homo sapiens
  misc_RNA (1)...(19): siRNA sense strand
agguagagauccugaggga

SEQ ID NO: 2293067 - RNA, 19 nt, Homo sapiens
  misc_RNA (1)...(19): siRNA sense strand
agagcaugguacagaaauu

SEQ ID NO: 2293068 - RNA, 19 nt, Homo sapiens
  misc_RNA (1)...(19): siRNA sense strand
ggagauucgacaagugcua

SEQ ID NO: 2293069 - RNA, 19 nt, Homo sapiens
  misc_RNA (1)...(19): siRNA sense strand
ggaacguguugguggcuga

SEQ ID NO: 2293070 - RNA, 19 nt, Homo sapiens
  misc_RNA (1)...(19): siRNA sense strand
acuaccaacugaugcgaaa

SEQ ID NO: 2293071 - RNA, 19 nt, Homo sapiens
  misc_RNA (1)...(19): siRNA sense strand
caaaauugucauugggcua

SEQ ID NO: 2293072 - RNA, 19 nt, Homo sapiens
  misc_RNA (1)...(19): siRNA sense strand
uggaaacagccaaggaaaa

SEQ ID NO: 2293073 - RNA, 19 nt, Homo sapiens
  misc_RNA (1)...(19): siRNA sense strand
cauaaagcccaaugagcau

SEQ ID NO: 2293074 - RNA, 19 nt, Homo sapiens
  misc_RNA (1)...(19): siRNA sense strand
aaacuaucugcuugagaaa

SEQ ID NO: 2293075 - RNA, 19 nt, Homo sapiens
  misc_RNA (1)...(19): siRNA sense strand
gcuuugugcucgaggacca

SEQ ID NO: 2293076 - RNA, 19 nt, Homo sapiens
  misc_RNA (1)...(19): siRNA sense strand
aagaggaauauaagagaga

SEQ ID NO: 2293077 - RNA, 19 nt, Homo sapiens
  misc_RNA (1)...(19): siRNA sense strand
aagaaaugcuaugggaaga

SEQ ID NO: 2293078 - RNA, 19 nt, Homo sapiens
  misc_RNA (1)...(19): siRNA sense strand
ccuuguuuccugagggcaa

SEQ ID NO: 2293079 - RNA, 19 nt, Homo sapiens
  misc_RNA (1)...(19): siRNA sense strand
cgaaagagucagauccuca

SEQ ID NO: 2293080 - RNA, 19 nt, Homo sapiens
  misc_RNA (1)...(19): siRNA sense strand
uguuauugauccaggcuuu

SEQ ID NO: 2293081 - RNA, 19 nt, Homo sapiens
  misc_RNA (1)...(19): siRNA sense strand
ccgggaagguguugagaag

SEQ ID NO: 2293082 - RNA, 19 nt, Homo sapiens
  misc_RNA (1)...(19): siRNA sense strand
gggaaaggagagcagguga

SEQ ID NO: 2293083 - RNA, 19 nt, Homo sapiens
  misc_RNA (1)...(19): siRNA sense strand
ggccagaguucauugccaa

SEQ ID NO: 2293084 - RNA, 19 nt, Homo sapiens
  misc_RNA (1)...(19): siRNA sense strand
gggaaacaugcaaaagaaa

SEQ ID NO: 2293085 - RNA, 19 nt, Homo sapiens
  misc_RNA (1)...(19): siRNA sense strand
ugaagcagcucaaaggaga

SEQ ID NO: 2293086 - RNA, 19 nt, Homo sapiens
  misc_RNA (1)...(19): siRNA sense strand
gaggaauauaagagagaag

SEQ ID NO: 2293087 - RNA, 19 nt, Homo sapiens
  misc_RNA (1)...(19): siRNA sense strand
guucauugccaaauaucaa

SEQ ID NO: 2293088 - RNA, 19 nt, Homo sapiens
  misc_RNA (1)...(19): siRNA sense strand
auaucuacgcauuggcaaa

SEQ ID NO: 2293089 - RNA, 19 nt, Homo sapiens
  misc_RNA (1)...(19): siRNA sense strand
auggaaacagccaaggaaa

SEQ ID NO: 2293090 - RNA, 19 nt, Homo sapiens
  misc_RNA (1)...(19): siRNA sense strand
uggccauccucaugaagaa

SEQ ID NO: 2293091 - RNA, 19 nt, Homo sapiens
  misc_RNA (1)...(19): siRNA sense strand
ugaaagaagagcaagagga

SEQ ID NO: 2293092 - RNA, 19 nt, Homo sapiens
  misc_RNA (1)...(19): siRNA sense strand
uggcaaauguggcguacca

SEQ ID NO: 2293093 - RNA, 19 nt, Homo sapiens
  misc_RNA (1)...(19): siRNA sense strand
ucagugagguucaaggaga

SEQ ID NO: 2293094 - RNA, 19 nt, Homo sapiens
  misc_RNA (1)...(19): siRNA sense strand
gauuagugaagcagcucaa

SEQ ID NO: 2293095 - RNA, 19 nt, Homo sapiens
  misc_RNA (1)...(19): siRNA sense strand
cuugaauucagaagaagua

SEQ ID NO: 2293096 - RNA, 19 nt, Homo sapiens
  misc_RNA (1)...(19): siRNA sense strand
cccugaaagaagagcaaga

SEQ ID NO: 2293097 - RNA, 19 nt, Homo sapiens
  misc_RNA (1)...(19): siRNA sense strand
cuucagaccugguggcaac

SEQ ID NO: 2293098 - RNA, 19 nt, Homo sapiens
  misc_RNA (1)...(19): siRNA sense strand
acauugggcugcaagggaa

SEQ ID NO: 2293099 - RNA, 19 nt, Homo sapiens
  misc_RNA (1)...(19): siRNA sense strand
cccugaagcuugagcggga

SEQ ID NO: 2293100 - RNA, 19 nt, Homo sapiens
  misc_RNA (1)...(19): siRNA sense strand
gggagagguguucgggaga

SEQ ID NO: 2293101 - RNA, 19 nt, Homo sapiens
  misc_RNA (1)...(19): siRNA sense strand
ggguggaaggcccgaaaga

SEQ ID NO: 2293102 - RNA, 19 nt, Homo sapiens
  misc_RNA (1)...(19): siRNA sense strand
ggaaacaugcaaaagaaau

SEQ ID NO: 2293103 - RNA, 19 nt, Homo sapiens
  misc_RNA (1)...(19): siRNA sense strand
cagcaagcuacgcuacaaa

SEQ ID NO: 2293104 - RNA, 19 nt, Homo sapiens
  misc_RNA (1)...(19): siRNA sense strand
uggaaggcccgaaagaauu

SEQ ID NO: 2293105 - RNA, 19 nt, Homo sapiens
  misc_RNA (1)...(19): siRNA sense strand
gaagcagcucaaaggagaa

SEQ ID NO: 2293106 - RNA, 19 nt, Homo sapiens
  misc_RNA (1)...(19): siRNA sense strand
aauauaagagagaaggcau

SEQ ID NO: 2293107 - RNA, 19 nt, Homo sapiens
  misc_RNA (1)...(19): siRNA sense strand
ccacacucauacagaagau

SEQ ID NO: 2293108 - RNA, 19 nt, Homo sapiens
  misc_RNA (1)...(19): siRNA sense strand
cgaagcagguagagauccu

SEQ ID NO: 2293109 - RNA, 19 nt, Homo sapiens
  misc_RNA (1)...(19): siRNA sense strand
cgaaucaaugagagcauca

SEQ ID NO: 2293110 - RNA, 19 nt, Homo sapiens
  misc_RNA (1)...(19): siRNA sense strand
aagagcaagaggaauauaa

SEQ ID NO: 2293111 - RNA, 19 nt, Homo sapiens
  misc_RNA (1)...(19): siRNA sense strand
ucgcaaauauuuccgguca

SEQ ID NO: 2293112 - RNA, 19 nt, Homo sapiens
  misc_RNA (1)...(19): siRNA sense strand
cgggcaaggugacauacaa

SEQ ID NO: 2293113 - RNA, 19 nt, Homo sapiens
  misc_RNA (1)...(19): siRNA sense strand
cgagaguggaucagggaag

SEQ ID NO: 2293114 - RNA, 19 nt, Homo sapiens
  misc_RNA (1)...(19): siRNA sense strand
cuggaaagaaguaaagaaa

SEQ ID NO: 2293115 - RNA, 19 nt, Homo sapiens
  misc_RNA (1)...(19): siRNA sense strand
augauggguuugagaguaa

SEQ ID NO: 2293116 - RNA, 19 nt, Homo sapiens
  misc_RNA (1)...(19): siRNA sense strand
uugaagaaggagugggaau

SEQ ID NO: 2293117 - RNA, 19 nt, Homo sapiens
  misc_RNA (1)...(19): siRNA sense strand
uuggaaaacugaugaguaa

SEQ ID NO: 2293118 - RNA, 19 nt, Homo sapiens
  misc_RNA (1)...(19): siRNA sense strand
uggaauugcuucaggcaga

SEQ ID NO: 2293119 - RNA, 19 nt, Homo sapiens
  misc_RNA (1)...(19): siRNA sense strand
ggauauaaugaugcagaaa

SEQ ID NO: 2293120 - RNA, 19 nt, Homo sapiens
  misc_RNA (1)...(19): siRNA sense strand
guggaagaaauuuggacua

SEQ ID NO: 2293121 - RNA, 19 nt, Homo sapiens
  misc_RNA (1)...(19): siRNA sense strand
gagaaugaugaaugaccaa

SEQ ID NO: 2293122 - RNA, 19 nt, Homo sapiens
  misc_RNA (1)...(19): siRNA sense strand
agagaggaaauguguuaaa

SEQ ID NO: 2293123 - RNA, 19 nt, Homo sapiens
  misc_RNA (1)...(19): siRNA sense strand
ggcuggagaccuagaagaa

SEQ ID NO: 2293124 - RNA, 19 nt, Homo sapiens
  misc_RNA (1)...(19): siRNA sense strand
gcuuauaucaacucggauu

SEQ ID NO: 2293125 - RNA, 19 nt, Homo sapiens
  misc_RNA (1)...(19): siRNA sense strand
ccuggaaagaaguaaagaa

SEQ ID NO: 2293126 - RNA, 19 nt, Homo sapiens
  misc_RNA (1)...(19): siRNA sense strand
gggaagauuguuauugcaa

SEQ ID NO: 2293127 - RNA, 19 nt, Homo sapiens
  misc_RNA (1)...(19): siRNA sense strand
uagaaagagagaugggcau

SEQ ID NO: 2293128 - RNA, 19 nt, Homo sapiens
  misc_RNA (1)...(19): siRNA sense strand
gggcugaggagaaugucaa

SEQ ID NO: 2293129 - RNA, 19 nt, Homo sapiens
  misc_RNA (1)...(19): siRNA sense strand
uggauauaaugaugcagaa

SEQ ID NO: 2293130 - RNA, 19 nt, Homo sapiens
  misc_RNA (1)...(19): siRNA sense strand
gauaagaguuggaagggag

SEQ ID NO: 2293131 - RNA, 19 nt, Homo sapiens
  misc_RNA (1)...(19): siRNA sense strand
gguuagaaugcauguuuau

SEQ ID NO: 2293132 - RNA, 19 nt, Homo sapiens
  misc_RNA (1)...(19): siRNA sense strand
ugaacaugaaacugagauu

SEQ ID NO: 2293133 - RNA, 19 nt, Homo sapiens
  misc_RNA (1)...(19): siRNA sense strand
caggaagguuagaaugcau

SEQ ID NO: 2293134 - RNA, 19 nt, Homo sapiens
  misc_RNA (1)...(19): siRNA sense strand
ccaaugagacaaaugccaa

SEQ ID NO: 2293135 - RNA, 19 nt, Homo sapiens
  misc_RNA (1)...(19): siRNA sense strand
gauucuuucaggaagguua

SEQ ID NO: 2293136 - RNA, 19 nt, Homo sapiens
  misc_RNA (1)...(19): siRNA sense strand
agguuagaaugcauguuua

SEQ ID NO: 2293137 - RNA, 19 nt, Homo sapiens
  misc_RNA (1)...(19): siRNA sense strand
ccgaaaugaaagcugaaaa

SEQ ID NO: 2293138 - RNA, 19 nt, Homo sapiens
  misc_RNA (1)...(19): siRNA sense strand
cuccugagguacagccaua

SEQ ID NO: 2293139 - RNA, 19 nt, Homo sapiens
  misc_RNA (1)...(19): siRNA sense strand
auuaacagaccauggagua

SEQ ID NO: 2293140 - RNA, 19 nt, Homo sapiens
  misc_RNA (1)...(19): siRNA sense strand
gaauggugcuggugaccca

SEQ ID NO: 2293141 - RNA, 19 nt, Homo sapiens
  misc_RNA (1)...(19): siRNA sense strand
aaggcaugccagagggaga

SEQ ID NO: 2293142 - RNA, 19 nt, Homo sapiens
  misc_RNA (1)...(19): siRNA sense strand
uagcaggagccauaggaau

SEQ ID NO: 2293143 - RNA, 19 nt, Homo sapiens
  misc_RNA (1)...(19): siRNA sense strand
cuggagaccuagaagaacu

SEQ ID NO: 2293144 - RNA, 19 nt, Homo sapiens
  misc_RNA (1)...(19): siRNA sense strand
aggaauugcuccaccagau

SEQ ID NO: 2293145 - RNA, 19 nt, Homo sapiens
  misc_RNA (1)...(19): siRNA sense strand
cuucagaggaaauaaaguu

SEQ ID NO: 2293146 - RNA, 19 nt, Homo sapiens
  misc_RNA (1)...(19): siRNA sense strand
uggccuggaaagaaguaaa

SEQ ID NO: 2293147 - RNA, 19 nt, Homo sapiens
  misc_RNA (1)...(19): siRNA sense strand
caucaaaguauacggugga

SEQ ID NO: 2293148 - RNA, 19 nt, Homo sapiens
  misc_RNA (1)...(19): siRNA sense strand
uggaugaacaugaaacuga

SEQ ID NO: 2293149 - RNA, 19 nt, Homo sapiens
  misc_RNA (1)...(19): siRNA sense strand
cuggguauuuggagcuauu

SEQ ID NO: 2293150 - RNA, 19 nt, Homo sapiens
  misc_RNA (1)...(19): siRNA sense strand
cugggaugcagaagaauuu

SEQ ID NO: 2293151 - RNA, 19 nt, Homo sapiens
  misc_RNA (1)...(19): siRNA sense strand
cuauauaucgauuguggau

SEQ ID NO: 2293152 - RNA, 19 nt, Homo sapiens
  misc_RNA (1)...(19): siRNA sense strand
acaacaaauaugcuggaga

SEQ ID NO: 2293153 - RNA, 19 nt, Homo sapiens
  misc_RNA (1)...(19): siRNA sense strand
uggcaggaacagaacaaaa

SEQ ID NO: 2293154 - RNA, 19 nt, Homo sapiens
  misc_RNA (1)...(19): siRNA sense strand
cuagaaagagagaugggca

SEQ ID NO: 2293155 - RNA, 19 nt, Homo sapiens
  misc_RNA (1)...(19): siRNA sense strand
acagauaaguacagcagcu

SEQ ID NO: 2293156 - RNA, 19 nt, Homo sapiens
  misc_RNA (1)...(19): siRNA sense strand
ucaaaguauacgguggaaa

SEQ ID NO: 2293157 - RNA, 19 nt, Homo sapiens
  misc_RNA (1)...(19): siRNA sense strand
uguacugggaagauuguua

SEQ ID NO: 2293158 - RNA, 19 nt, Homo sapiens
  misc_RNA (1)...(19): siRNA sense strand
acugcagcccagagaggaa

SEQ ID NO: 2293159 - RNA, 19 nt, Homo sapiens
  misc_RNA (1)...(19): siRNA sense strand
gagcccuuaaugugaguua

SEQ ID NO: 2293160 - RNA, 19 nt, Homo sapiens
  misc_RNA (1)...(19): siRNA sense strand
agaguaaaucacuguauga

SEQ ID NO: 2293161 - RNA, 19 nt, Homo sapiens
  misc_RNA (1)...(19): siRNA sense strand
augaaagcugguuggaaaa

SEQ ID NO: 2293162 - RNA, 19 nt, Homo sapiens
  misc_RNA (1)...(19): siRNA sense strand
uauucaagacuaugcagaa

SEQ ID NO: 2293163 - RNA, 19 nt, Homo sapiens
  misc_RNA (1)...(19): siRNA sense strand
cgauuguggaugaacauga

SEQ ID NO: 2293164 - RNA, 19 nt, Homo sapiens
  misc_RNA (1)...(19): siRNA sense strand
cggugaaauugauggaaau

SEQ ID NO: 2293165 - RNA, 19 nt, Homo sapiens
  misc_RNA (1)...(19): siRNA sense strand
aggaaaagacaguaagaaa

SEQ ID NO: 2293166 - RNA, 19 nt, Homo sapiens
  misc_RNA (1)...(19): siRNA sense strand
gggccaaaccuaaggguga

SEQ ID NO: 2293167 - RNA, 19 nt, Homo sapiens
  misc_RNA (1)...(19): siRNA sense strand
gaaagaaggaaauggccaa

SEQ ID NO: 2293168 - RNA, 19 nt, Homo sapiens
  misc_RNA (1)...(19): siRNA sense strand
ucaggaaguauuugagaaa

SEQ ID NO: 2293169 - RNA, 19 nt, Homo sapiens
  misc_RNA (1)...(19): siRNA sense strand
ggaaaacgaaagaaggaaa

SEQ ID NO: 2293170 - RNA, 19 nt, Homo sapiens
  misc_RNA (1)...(19): siRNA sense strand
gugaugaagaggaggauga

SEQ ID NO: 2293171 - RNA, 19 nt, Homo sapiens
  misc_RNA (1)...(19): siRNA sense strand
aggaagaagaggaggagga

SEQ ID NO: 2293172 - RNA, 19 nt, Homo sapiens
  misc_RNA (1)...(19): siRNA sense strand
acgaagaugaugaggauga

SEQ ID NO: 2293173 - RNA, 19 nt, Homo sapiens
  misc_RNA (1)...(19): siRNA sense strand
agagaaaccaaaaggaaaa

SEQ ID NO: 2293174 - RNA, 19 nt, Homo sapiens
  misc_RNA (1)...(19): siRNA sense strand
ugggaaaaguaaagggauu

SEQ ID NO: 2293175 - RNA, 19 nt, Homo sapiens
  misc_RNA (1)...(19): siRNA sense strand
acggugaaauugauggaaa

SEQ ID NO: 2293176 - RNA, 19 nt, Homo sapiens
  misc_RNA (1)...(19): siRNA sense strand
agaagcugaugcagagaaa

SEQ ID NO: 2293177 - RNA, 19 nt, Homo sapiens
  misc_RNA (1)...(19): siRNA sense strand
cuacagugcaacagaagaa

SEQ ID NO: 2293178 - RNA, 19 nt, Homo sapiens
  misc_RNA (1)...(19): siRNA sense strand
ugucagaagaugaagaaga

SEQ ID NO: 2293179 - RNA, 19 nt, Homo sapiens
  misc_RNA (1)...(19): siRNA sense strand
aggacgagguggugguaga

SEQ ID NO: 2293180 - RNA, 19 nt, Homo sapiens
  misc_RNA (1)...(19): siRNA sense strand
agagaaaaccuuugaagaa

SEQ ID NO: 2293181 - RNA, 19 nt, Homo sapiens
  misc_RNA (1)...(19): siRNA sense strand
cagaagaugaagaagauga

SEQ ID NO: 2293182 - RNA, 19 nt, Homo sapiens
  misc_RNA (1)...(19): siRNA sense strand
agaugauagcaguggagaa

SEQ ID NO: 2293183 - RNA, 19 nt, Homo sapiens
  misc_RNA (1)...(19): siRNA sense strand
agacagaagcugaugcaga

SEQ ID NO: 2293184 - RNA, 19 nt, Homo sapiens
  misc_RNA (1)...(19): siRNA sense strand
aggacgaggaugaggauga

SEQ ID NO: 2293185 - RNA, 19 nt, Homo sapiens
  misc_RNA (1)...(19): siRNA sense strand
agguagaagaagauaguga

SEQ ID NO: 2293186 - RNA, 19 nt, Homo sapiens
  misc_RNA (1)...(19): siRNA sense strand
aagaugaagaagaggauga

SEQ ID NO: 2293187 - RNA, 19 nt, Homo sapiens
  misc_RNA (1)...(19): siRNA sense strand
aggaaaugucagaagauga

SEQ ID NO: 2293188 - RNA, 19 nt, Homo sapiens
  misc_RNA (1)...(19): siRNA sense strand
agauagugaagaugaggaa

SEQ ID NO: 2293189 - RNA, 19 nt, Homo sapiens
  misc_RNA (1)...(19): siRNA sense strand
augaugaggaggaggaaga

SEQ ID NO: 2293190 - RNA, 19 nt, Homo sapiens
  misc_RNA (1)...(19): siRNA sense strand
agagaaaggucaaaaucaa

SEQ ID NO: 2293191 - RNA, 19 nt, Homo sapiens
  misc_RNA (1)...(19): siRNA sense strand
caaaaggaaaagacaguaa

SEQ ID NO: 2293192 - RNA, 19 nt, Homo sapiens
  misc_RNA (1)...(19): siRNA sense strand
aggaugaagaugaagaaga

SEQ ID NO: 2293193 - RNA, 19 nt, Homo sapiens
  misc_RNA (1)...(19): siRNA sense strand
acgaugacgaugaggaaga

SEQ ID NO: 2293194 - RNA, 19 nt, Homo sapiens
  misc_RNA (1)...(19): siRNA sense strand
aggaaauggccaaacagaa

SEQ ID NO: 2293195 - RNA, 19 nt, Homo sapiens
  misc_RNA (1)...(19): siRNA sense strand
auagugaagaugaggaaau

SEQ ID NO: 2293196 - RNA, 19 nt, Homo sapiens
  misc_RNA (1)...(19): siRNA sense strand
augaugaggacgaggauga

SEQ ID NO: 2293197 - RNA, 19 nt, Homo sapiens
  misc_RNA (1)...(19): siRNA sense strand
ccacaaggaaagaagacga

SEQ ID NO: 2293198 - RNA, 19 nt, Homo sapiens
  misc_RNA (1)...(19): siRNA sense strand
acgaagaugaugaagauga

SEQ ID NO: 2293199 - RNA, 19 nt, Homo sapiens
  misc_RNA (1)...(19): siRNA sense strand
agacauuaaaggagucauu

SEQ ID NO: 2293200 - RNA, 19 nt, Homo sapiens
  misc_RNA (1)...(19): siRNA sense strand
ggugaaauugauggaaaua

SEQ ID NO: 2293201 - RNA, 19 nt, Homo sapiens
  misc_RNA (1)...(19): siRNA sense strand
augaagaggaggaugauga

SEQ ID NO: 2293202 - RNA, 19 nt, Homo sapiens
  misc_RNA (1)...(19): siRNA sense strand
gugaggaggaugaggagga

SEQ ID NO: 2293203 - RNA, 19 nt, Homo sapiens
  misc_RNA (1)...(19): siRNA sense strand
agaacguggcugaggauga

SEQ ID NO: 2293204 - RNA, 19 nt, Homo sapiens
  misc_RNA (1)...(19): siRNA sense strand
augaagaagaggaugauga

SEQ ID NO: 2293205 - RNA, 19 nt, Homo sapiens
  misc_RNA (1)...(19): siRNA sense strand
acaguaagaaagagcgaga

SEQ ID NO: 2293206 - RNA, 19 nt, Homo sapiens
  misc_RNA (1)...(19): siRNA sense strand
agaucagauuagucagcaa

SEQ ID NO: 2293207 - RNA, 19 nt, Homo sapiens
  misc_RNA (1)...(19): siRNA sense strand
cgaaagaaggaaauggcca

SEQ ID NO: 2293208 - RNA, 19 nt, Homo sapiens
  misc_RNA (1)...(19): siRNA sense strand
aggaggaugaggaggauga

SEQ ID NO: 2293209 - RNA, 19 nt, Homo sapiens
  misc_RNA (1)...(19): siRNA sense strand
cugcugaagaccuggagaa

SEQ ID NO: 2293210 - RNA, 19 nt, Homo sapiens
  misc_RNA (1)...(19): siRNA sense strand
aaguaaagggauugcuuau

SEQ ID NO: 2293211 - RNA, 19 nt, Homo sapiens
  misc_RNA (1)...(19): siRNA sense strand
gaagagacauuaaaggagu

SEQ ID NO: 2293212 - RNA, 19 nt, Homo sapiens
  misc_RNA (1)...(19): siRNA sense strand
ugacgaugacgaugaggaa

SEQ ID NO: 2293213 - RNA, 19 nt, Homo sapiens
  misc_RNA (1)...(19): siRNA sense strand
ggaugaggacgaugaggau

SEQ ID NO: 2293214 - RNA, 19 nt, Homo sapiens
  misc_RNA (1)...(19): siRNA sense strand
uagagaaaccaaaaggaaa

SEQ ID NO: 2293215 - RNA, 19 nt, Homo sapiens
  misc_RNA (1)...(19): siRNA sense strand
gguggaaagaauagcacuu

SEQ ID NO: 2293216 - RNA, 19 nt, Homo sapiens
  misc_RNA (1)...(19): siRNA sense strand
gagcgagaucaaagggcua

SEQ ID NO: 2293217 - RNA, 19 nt, Homo sapiens
  misc_RNA (1)...(19): siRNA sense strand
aggaaaaggaucugaacga

SEQ ID NO: 2293218 - RNA, 19 nt, Homo sapiens
  misc_RNA (1)...(19): siRNA sense strand
ccaucauuuccgagugcaa

SEQ ID NO: 2293219 - RNA, 19 nt, Homo sapiens
  misc_RNA (1)...(19): siRNA sense strand
gaaaaggaucugaacgaga

SEQ ID NO: 2293220 - RNA, 19 nt, Homo sapiens
  misc_RNA (1)...(19): siRNA sense strand
ucuuugaccccaaggaaaa

SEQ ID NO: 2293221 - RNA, 19 nt, Homo sapiens
  misc_RNA (1)...(19): siRNA sense strand
aggaagaccuggaggagga

SEQ ID NO: 2293222 - RNA, 19 nt, Homo sapiens
  misc_RNA (1)...(19): siRNA sense strand
aggaggaggacgaggaaga

SEQ ID NO: 2293223 - RNA, 19 nt, Homo sapiens
  misc_RNA (1)...(19): siRNA sense strand
agaaguugaacgugggcaa

SEQ ID NO: 2293224 - RNA, 19 nt, Homo sapiens
  misc_RNA (1)...(19): siRNA sense strand
gaaagugcguucaaggcua

SEQ ID NO: 2293225 - RNA, 19 nt, Homo sapiens
  misc_RNA (1)...(19): siRNA sense strand
ggacaguggugaugcccau

SEQ ID NO: 2293226 - RNA, 19 nt, Homo sapiens
  misc_RNA (1)...(19): siRNA sense strand
ccauuggagacguggagua

SEQ ID NO: 2293227 - RNA, 19 nt, Homo sapiens
  misc_RNA (1)...(19): siRNA sense strand
guguagagcugcagcccuu

SEQ ID NO: 2293228 - RNA, 19 nt, Homo sapiens
  misc_RNA (1)...(19): siRNA sense strand
ccacagagagugagagcac

SEQ ID NO: 2293229 - RNA, 19 nt, Homo sapiens
  misc_RNA (1)...(19): siRNA sense strand
ugaagagguugguggagga

SEQ ID NO: 2293230 - RNA, 19 nt, Homo sapiens
  misc_RNA (1)...(19): siRNA sense strand
gcauccagguuaaggacga

SEQ ID NO: 2293231 - RNA, 19 nt, Homo sapiens
  misc_RNA (1)...(19): siRNA sense strand
gggaaccauccuuggaaau

SEQ ID NO: 2293232 - RNA, 19 nt, Homo sapiens
  misc_RNA (1)...(19): siRNA sense strand
aaggagaagagcaaagaga

SEQ ID NO: 2293233 - RNA, 19 nt, Homo sapiens
  misc_RNA (1)...(19): siRNA sense strand
cugaggagacagaggagga

SEQ ID NO: 2293234 - RNA, 19 nt, Homo sapiens
  misc_RNA (1)...(19): siRNA sense strand
gagugagagcacacaggaa

SEQ ID NO: 2293235 - RNA, 19 nt, Homo sapiens
  misc_RNA (1)...(19): siRNA sense strand
ccaacgagucggaugggau

SEQ ID NO: 2293236 - RNA, 19 nt, Homo sapiens
  misc_RNA (1)...(19): siRNA sense strand
gugagagcacacaggaaga

SEQ ID NO: 2293237 - RNA, 19 nt, Homo sapiens
  misc_RNA (1)...(19): siRNA sense strand
cagaggagcccauggagca

SEQ ID NO: 2293238 - RNA, 19 nt, Homo sapiens
  misc_RNA (1)...(19): siRNA sense strand
cggagcagcaggaggucuu

SEQ ID NO: 2293239 - RNA, 19 nt, Homo sapiens
  misc_RNA (1)...(19): siRNA sense strand
gggacauucaccauggcaa

SEQ ID NO: 2293240 - RNA, 19 nt, Homo sapiens
  misc_RNA (1)...(19): siRNA sense strand
uugccagcacugagguaaa

SEQ ID NO: 2293241 - RNA, 19 nt, Homo sapiens
  misc_RNA (1)...(19): siRNA sense strand
cggaacaaggagaagagca

SEQ ID NO: 2293242 - RNA, 19 nt, Homo sapiens
  misc_RNA (1)...(19): siRNA sense strand
cagcaaaagcccaacauca

SEQ ID NO: 2293243 - RNA, 19 nt, Homo sapiens
  misc_RNA (1)...(19): siRNA sense strand
aggaggagcugacggagca

SEQ ID NO: 2293244 - RNA, 19 nt, Homo sapiens
  misc_RNA (1)...(19): siRNA sense strand
ggccaugacuugaccgcca

SEQ ID NO: 2293245 - RNA, 19 nt, Homo sapiens
  misc_RNA (1)...(19): siRNA sense strand
cagccaagcagcagcagga

SEQ ID NO: 2293246 - RNA, 19 nt, Homo sapiens
  misc_RNA (1)...(19): siRNA sense strand
cugcaggagagcucaagaa

SEQ ID NO: 2293247 - RNA, 19 nt, Homo sapiens
  misc_RNA (1)...(19): siRNA sense strand
agaagagagcuguugagau

SEQ ID NO: 2293248 - RNA, 19 nt, Homo sapiens
  misc_RNA (1)...(19): siRNA sense strand
uggagaagcagaagcagca

SEQ ID NO: 2293249 - RNA, 19 nt, Homo sapiens
  misc_RNA (1)...(19): siRNA sense strand
uuaaggacgaggagggcga

SEQ ID NO: 2293250 - RNA, 19 nt, Homo sapiens
  misc_RNA (1)...(19): siRNA sense strand
aggaagaccuggaggagga

SEQ ID NO: 2293251 - RNA, 19 nt, Homo sapiens
  misc_RNA (1)...(19): siRNA sense strand
aggaggaggacgaggaaga

SEQ ID NO: 2293252 - RNA, 19 nt, Homo sapiens
  misc_RNA (1)...(19): siRNA sense strand
agaaguugaacgugggcaa

SEQ ID NO: 2293253 - RNA, 19 nt, Homo sapiens
  misc_RNA (1)...(19): siRNA sense strand
gaaagugcguucaaggcua

SEQ ID NO: 2293254 - RNA, 19 nt, Homo sapiens
  misc_RNA (1)...(19): siRNA sense strand
ggacaguggugaugcccau

SEQ ID NO: 2293255 - RNA, 19 nt, Homo sapiens
  misc_RNA (1)...(19): siRNA sense strand
ccauuggagacguggagua

SEQ ID NO: 2293256 - RNA, 19 nt, Homo sapiens
  misc_RNA (1)...(19): siRNA sense strand
guguagagcugcagcccuu

SEQ ID NO: 2293257 - RNA, 19 nt, Homo sapiens
  misc_RNA (1)...(19): siRNA sense strand
ccacagagagugagagcac

SEQ ID NO: 2293258 - RNA, 19 nt, Homo sapiens
  misc_RNA (1)...(19): siRNA sense strand
ugaagagguugguggagga

SEQ ID NO: 2293259 - RNA, 19 nt, Homo sapiens
  misc_RNA (1)...(19): siRNA sense strand
gcauccagguuaaggacga

SEQ ID NO: 2293260 - RNA, 19 nt, Homo sapiens
  misc_RNA (1)...(19): siRNA sense strand
gggaaccauccuuggaaau

SEQ ID NO: 2293261 - RNA, 19 nt, Homo sapiens
  misc_RNA (1)...(19): siRNA sense strand
aaggagaagagcaaagaga

SEQ ID NO: 2293262 - RNA, 19 nt, Homo sapiens
  misc_RNA (1)...(19): siRNA sense strand
cugaggagacagaggagga

SEQ ID NO: 2293263 - RNA, 19 nt, Homo sapiens
  misc_RNA (1)...(19): siRNA sense strand
gagugagagcacacaggaa

SEQ ID NO: 2293264 - RNA, 19 nt, Homo sapiens
  misc_RNA (1)...(19): siRNA sense strand
ccaacgagucggaugggau

SEQ ID NO: 2293265 - RNA, 19 nt, Homo sapiens
  misc_RNA (1)...(19): siRNA sense strand
gugagagcacacaggaaga

SEQ ID NO: 2293266 - RNA, 19 nt, Homo sapiens
  misc_RNA (1)...(19): siRNA sense strand
cagaggagcccauggagca

SEQ ID NO: 2293267 - RNA, 19 nt, Homo sapiens
  misc_RNA (1)...(19): siRNA sense strand
cggagcagcaggaggucuu

SEQ ID NO: 2293268 - RNA, 19 nt, Homo sapiens
  misc_RNA (1)...(19): siRNA sense strand
gggacauucaccauggcaa

SEQ ID NO: 2293269 - RNA, 19 nt, Homo sapiens
  misc_RNA (1)...(19): siRNA sense strand
uugccagcacugagguaaa

SEQ ID NO: 2293270 - RNA, 19 nt, Homo sapiens
  misc_RNA (1)...(19): siRNA sense strand
cggaacaaggagaagagca

SEQ ID NO: 2293271 - RNA, 19 nt, Homo sapiens
  misc_RNA (1)...(19): siRNA sense strand
cagcaaaagcccaacauca

SEQ ID NO: 2293272 - RNA, 19 nt, Homo sapiens
  misc_RNA (1)...(19): siRNA sense strand
aggaggagcugacggagca

SEQ ID NO: 2293273 - RNA, 19 nt, Homo sapiens
  misc_RNA (1)...(19): siRNA sense strand
ggccaugacuugaccgcca

SEQ ID NO: 2293274 - RNA, 19 nt, Homo sapiens
  misc_RNA (1)...(19): siRNA sense strand
cagccaagcagcagcagga

SEQ ID NO: 2293275 - RNA, 19 nt, Homo sapiens
  misc_RNA (1)...(19): siRNA sense strand
cugcaggagagcucaagaa

SEQ ID NO: 2293276 - RNA, 19 nt, Homo sapiens
  misc_RNA (1)...(19): siRNA sense strand
agaagagagcuguugagau

SEQ ID NO: 2293277 - RNA, 19 nt, Homo sapiens
  misc_RNA (1)...(19): siRNA sense strand
uggagaagcagaagcagca

SEQ ID NO: 2293278 - RNA, 19 nt, Homo sapiens
  misc_RNA (1)...(19): siRNA sense strand
uuaaggacgaggagggcga

SEQ ID NO: 2293279 - RNA, 19 nt, Homo sapiens
  misc_RNA (1)...(19): siRNA sense strand
cuggaggaccugagcgaaa

SEQ ID NO: 2293280 - RNA, 19 nt, Homo sapiens
  misc_RNA (1)...(19): siRNA sense strand
auucagaagagaaggaaau

SEQ ID NO: 2293281 - RNA, 19 nt, Homo sapiens
  misc_RNA (1)...(19): siRNA sense strand
aggcuuugcuugaggaaca

SEQ ID NO: 2293282 - RNA, 19 nt, Homo sapiens
  misc_RNA (1)...(19): siRNA sense strand
ggcuacguuuggagagaaa

SEQ ID NO: 2293283 - RNA, 19 nt, Homo sapiens
  misc_RNA (1)...(19): siRNA sense strand
aagccaaauuagugcaaaa

SEQ ID NO: 2293284 - RNA, 19 nt, Homo sapiens
  misc_RNA (1)...(19): siRNA sense strand
gauucagaagagaaggaaa

SEQ ID NO: 2293285 - RNA, 19 nt, Homo sapiens
  misc_RNA (1)...(19): siRNA sense strand
aauaugaacuccuggccaa

SEQ ID NO: 2293286 - RNA, 19 nt, Homo sapiens
  misc_RNA (1)...(19): siRNA sense strand
agaaaaugauggagaaaac

SEQ ID NO: 2293287 - RNA, 19 nt, Homo sapiens
  misc_RNA (1)...(19): siRNA sense strand
aguagaaaaugauggagaa

SEQ ID NO: 2293288 - RNA, 19 nt, Homo sapiens
  misc_RNA (1)...(19): siRNA sense strand
cucaaagaguauuuagcaa

SEQ ID NO: 2293289 - RNA, 19 nt, Homo sapiens
  misc_RNA (1)...(19): siRNA sense strand
ccgaaacaacaguaggaga

SEQ ID NO: 2293290 - RNA, 19 nt, Homo sapiens
  misc_RNA (1)...(19): siRNA sense strand
cgacugaaauauuaccgaa

SEQ ID NO: 2293291 - RNA, 19 nt, Homo sapiens
  misc_RNA (1)...(19): siRNA sense strand
ugaaagagcuggaucugga

SEQ ID NO: 2293292 - RNA, 19 nt, Homo sapiens
  misc_RNA (1)...(19): siRNA sense strand
auagagaaguggagaggcu

SEQ ID NO: 2293293 - RNA, 19 nt, Homo sapiens
  misc_RNA (1)...(19): siRNA sense strand
uauaaaugaagaugcggaa

SEQ ID NO: 2293294 - RNA, 19 nt, Homo sapiens
  misc_RNA (1)...(19): siRNA sense strand
uugcuaaagacucggcaua

SEQ ID NO: 2293295 - RNA, 19 nt, Homo sapiens
  misc_RNA (1)...(19): siRNA sense strand
ccauacuauucaucagcaa

SEQ ID NO: 2293296 - RNA, 19 nt, Homo sapiens
  misc_RNA (1)...(19): siRNA sense strand
gaguagaaaaugauggaga

SEQ ID NO: 2293297 - RNA, 19 nt, Homo sapiens
  misc_RNA (1)...(19): siRNA sense strand
ccaacuaaagacauggauu

SEQ ID NO: 2293298 - RNA, 19 nt, Homo sapiens
  misc_RNA (1)...(19): siRNA sense strand
gggugccaguuaaaggaaa

SEQ ID NO: 2293299 - RNA, 19 nt, Homo sapiens
  misc_RNA (1)...(19): siRNA sense strand
ggugccaguuaaaggaaaa

SEQ ID NO: 2293300 - RNA, 19 nt, Homo sapiens
  misc_RNA (1)...(19): siRNA sense strand
ggguuugccaagaagagaa

SEQ ID NO: 2293301 - RNA, 19 nt, Homo sapiens
  misc_RNA (1)...(19): siRNA sense strand
ggaaauugugguuuggguu

SEQ ID NO: 2293302 - RNA, 19 nt, Homo sapiens
  misc_RNA (1)...(19): siRNA sense strand
guagaaaaugauggagaaa

SEQ ID NO: 2293303 - RNA, 19 nt, Homo sapiens
  misc_RNA (1)...(19): siRNA sense strand
ccgaauacucauugauaag

SEQ ID NO: 2293304 - RNA, 19 nt, Homo sapiens
  misc_RNA (1)...(19): siRNA sense strand
gaucgagauaauauggaga

SEQ ID NO: 2293305 - RNA, 19 nt, Homo sapiens
  misc_RNA (1)...(19): siRNA sense strand
uugaaaagugugaagcuaa

SEQ ID NO: 2293306 - RNA, 19 nt, Homo sapiens
  misc_RNA (1)...(19): siRNA sense strand
uuggaagaaacuugcuaaa

SEQ ID NO: 2293307 - RNA, 19 nt, Homo sapiens
  misc_RNA (1)...(19): siRNA sense strand
aagucaagagaaugaaaga

SEQ ID NO: 2293308 - RNA, 19 nt, Homo sapiens
  misc_RNA (1)...(19): siRNA sense strand
acauggauucagaagagaa

SEQ ID NO: 2293309 - RNA, 19 nt, Homo sapiens
  misc_RNA (1)...(19): siRNA sense strand
gagaguguuaagugugauu

SEQ ID NO: 2293310 - RNA, 19 nt, Homo sapiens
  misc_RNA (1)...(19): siRNA sense strand
aucagcaagucaagagaau

SEQ ID NO: 2293311 - RNA, 19 nt, Homo sapiens
  misc_RNA (1)...(19): siRNA sense strand
gcugcaagugaacuggaaa

SEQ ID NO: 2293312 - RNA, 19 nt, Homo sapiens
  misc_RNA (1)...(19): siRNA sense strand
caugaagacuuuaccacca

SEQ ID NO: 2293313 - RNA, 19 nt, Homo sapiens
  misc_RNA (1)...(19): siRNA sense strand
cggaaacuggcuaaaauua

SEQ ID NO: 2293314 - RNA, 19 nt, Homo sapiens
  misc_RNA (1)...(19): siRNA sense strand
cuuuggaaguguacggaaa

SEQ ID NO: 2293315 - RNA, 19 nt, Homo sapiens
  misc_RNA (1)...(19): siRNA sense strand
ggaaauuacaacagagacu

SEQ ID NO: 2293316 - RNA, 19 nt, Homo sapiens
  misc_RNA (1)...(19): siRNA sense strand
agaccagauggaugagaaa

SEQ ID NO: 2293317 - RNA, 19 nt, Homo sapiens
  misc_RNA (1)...(19): siRNA sense strand
ugucaagaggcuagguauu

SEQ ID NO: 2293318 - RNA, 19 nt, Homo sapiens
  misc_RNA (1)...(19): siRNA sense strand
augauguggaaguggauua

SEQ ID NO: 2293319 - RNA, 19 nt, Homo sapiens
  misc_RNA (1)...(19): siRNA sense strand
caacauagaacucgcggau

SEQ ID NO: 2293320 - RNA, 19 nt, Homo sapiens
  misc_RNA (1)...(19): siRNA sense strand
ggcucuagcuaguagucaa

SEQ ID NO: 2293321 - RNA, 19 nt, Homo sapiens
  misc_RNA (1)...(19): siRNA sense strand
ccuaaugcuugcagaugau

SEQ ID NO: 2293322 - RNA, 19 nt, Homo sapiens
  misc_RNA (1)...(19): siRNA sense strand
gcuauaaggaagaccagau

SEQ ID NO: 2293323 - RNA, 19 nt, Homo sapiens
  misc_RNA (1)...(19): siRNA sense strand
guguacggaaaguggaaau

SEQ ID NO: 2293324 - RNA, 19 nt, Homo sapiens
  misc_RNA (1)...(19): siRNA sense strand
cuuuagaaguggccauaca

SEQ ID NO: 2293325 - RNA, 19 nt, Homo sapiens
  misc_RNA (1)...(19): siRNA sense strand
aacuaaauguguauggaga

SEQ ID NO: 2293326 - RNA, 19 nt, Homo sapiens
  misc_RNA (1)...(19): siRNA sense strand
cgaggaucaagcagaacaa

SEQ ID NO: 2293327 - RNA, 19 nt, Homo sapiens
  misc_RNA (1)...(19): siRNA sense strand
guggaaauuacaacagaga

SEQ ID NO: 2293328 - RNA, 19 nt, Homo sapiens
  misc_RNA (1)...(19): siRNA sense strand
acuaauggaaccucugaaa

SEQ ID NO: 2293329 - RNA, 19 nt, Homo sapiens
  misc_RNA (1)...(19): siRNA sense strand
gagaugauguggaagugga

SEQ ID NO: 2293330 - RNA, 19 nt, Homo sapiens
  misc_RNA (1)...(19): siRNA sense strand
gaaagcagcuauaaggaag

SEQ ID NO: 2293331 - RNA, 19 nt, Homo sapiens
  misc_RNA (1)...(19): siRNA sense strand
cggaaaguggaaauuacaa

SEQ ID NO: 2293332 - RNA, 19 nt, Homo sapiens
  misc_RNA (1)...(19): siRNA sense strand
cagauggaugagaaacuaa

SEQ ID NO: 2293333 - RNA, 19 nt, Homo sapiens
  misc_RNA (1)...(19): siRNA sense strand
ggguauuaacugggaggau

SEQ ID NO: 2293334 - RNA, 19 nt, Homo sapiens
  misc_RNA (1)...(19): siRNA sense strand
ccuaguacuccucggucaa

SEQ ID NO: 2293335 - RNA, 19 nt, Homo sapiens
  misc_RNA (1)...(19): siRNA sense strand
ucuuauggauagauacaca

SEQ ID NO: 2293336 - RNA, 19 nt, Homo sapiens
  misc_RNA (1)...(19): siRNA sense strand
acuaaauguguauggagau

SEQ ID NO: 2293337 - RNA, 19 nt, Homo sapiens
  misc_RNA (1)...(19): siRNA sense strand
ugaacaaauguggcagaaa

SEQ ID NO: 2293338 - RNA, 19 nt, Homo sapiens
  misc_RNA (1)...(19): siRNA sense strand
uugcaacaggauucagaaa

SEQ ID NO: 2293339 - RNA, 19 nt, Homo sapiens
  misc_RNA (1)...(19): siRNA sense strand
aggaucaagcagaacaauu

SEQ ID NO: 2293340 - RNA, 19 nt, Homo sapiens
  misc_RNA (1)...(19): siRNA sense strand
gcagaaaagacgcuacaau

SEQ ID NO: 2293341 - RNA, 19 nt, Homo sapiens
  misc_RNA (1)...(19): siRNA sense strand
cuaguagucaagugggaga

SEQ ID NO: 2293342 - RNA, 19 nt, Homo sapiens
  misc_RNA (1)...(19): siRNA sense strand
uagucaagugggagaagau

SEQ ID NO: 2293343 - RNA, 19 nt, Homo sapiens
  misc_RNA (1)...(19): siRNA sense strand
aaaccgaagcugaaagacu

SEQ ID NO: 2293344 - RNA, 19 nt, Homo sapiens
  misc_RNA (1)...(19): siRNA sense strand
cauccauguaugaacgauu

SEQ ID NO: 2293345 - RNA, 19 nt, Homo sapiens
  misc_RNA (1)...(19): siRNA sense strand
cagaaaucauggaaagcag

SEQ ID NO: 2293346 - RNA, 19 nt, Homo sapiens
  misc_RNA (1)...(19): siRNA sense strand
caccagaaaccgaagcuga

SEQ ID NO: 2293347 - RNA, 19 nt, Homo sapiens
  misc_RNA (1)...(19): siRNA sense strand
uuaucgacauguugcaaau

SEQ ID NO: 2293348 - RNA, 19 nt, Homo sapiens
  misc_RNA (1)...(19): siRNA sense strand
gguggaaagcacagggcaa

SEQ ID NO: 2293349 - RNA, 19 nt, Homo sapiens
  misc_RNA (1)...(19): siRNA sense strand
ucacagaauaugagcaaau

SEQ ID NO: 2293350 - RNA, 19 nt, Homo sapiens
  misc_RNA (1)...(19): siRNA sense strand
gguccaaggaagaguguga

SEQ ID NO: 2293351 - RNA, 19 nt, Homo sapiens
  misc_RNA (1)...(19): siRNA sense strand
agaaacuagaagagggaau

SEQ ID NO: 2293352 - RNA, 19 nt, Homo sapiens
  misc_RNA (1)...(19): siRNA sense strand
agacagcauuauagagaga

SEQ ID NO: 2293353 - RNA, 19 nt, Homo sapiens
  misc_RNA (1)...(19): siRNA sense strand
gagcaaauuccaaagaaaa

SEQ ID NO: 2293354 - RNA, 19 nt, Homo sapiens
  misc_RNA (1)...(19): siRNA sense strand
guucacagaauaugagcaa

SEQ ID NO: 2293355 - RNA, 19 nt, Homo sapiens
  misc_RNA (1)...(19): siRNA sense strand
gaagaaacuagaagaggga

SEQ ID NO: 2293356 - RNA, 19 nt, Homo sapiens
  misc_RNA (1)...(19): siRNA sense strand
cccacaugcuuaagaacua

SEQ ID NO: 2293357 - RNA, 19 nt, Homo sapiens
  misc_RNA (1)...(19): siRNA sense strand
cauuauagagagagagaug

SEQ ID NO: 2293358 - RNA, 19 nt, Homo sapiens
  misc_RNA (1)...(19): siRNA sense strand
agcaagaggccacaagaua

SEQ ID NO: 2293359 - RNA, 19 nt, Homo sapiens
  misc_RNA (1)...(19): siRNA sense strand
gugaggaggaggaggagga

SEQ ID NO: 2293360 - RNA, 19 nt, Homo sapiens
  misc_RNA (1)...(19): siRNA sense strand
gaggaacagaauuggaaga

SEQ ID NO: 2293361 - RNA, 19 nt, Homo sapiens
  misc_RNA (1)...(19): siRNA sense strand
aguauuaccugcaagucaa

SEQ ID NO: 2293362 - RNA, 19 nt, Homo sapiens
  misc_RNA (1)...(19): siRNA sense strand
ccagaggaacccaaagaau

SEQ ID NO: 2293363 - RNA, 19 nt, Homo sapiens
  misc_RNA (1)...(19): siRNA sense strand
gggcaagaaaggacggugu

SEQ ID NO: 2293364 - RNA, 19 nt, Homo sapiens
  misc_RNA (1)...(19): siRNA sense strand
guacauuggaccaggugau

SEQ ID NO: 2293365 - RNA, 19 nt, Homo sapiens
  misc_RNA (1)...(19): siRNA sense strand
gcacagaagaggccgcuga

SEQ ID NO: 2293366 - RNA, 19 nt, Homo sapiens
  misc_RNA (1)...(19): siRNA sense strand
auauacagguggaaugaca

SEQ ID NO: 2293367 - RNA, 19 nt, Homo sapiens
  misc_RNA (1)...(19): siRNA sense strand
ggguggagcuggagaaacc

SEQ ID NO: 2293368 - RNA, 19 nt, Homo sapiens
  misc_RNA (1)...(19): siRNA sense strand
acagcauuauagagagaga

SEQ ID NO: 2293369 - RNA, 19 nt, Homo sapiens
  misc_RNA (1)...(19): siRNA sense strand
cgguguggcauuuacaaua

SEQ ID NO: 2293370 - RNA, 19 nt, Homo sapiens
  misc_RNA (1)...(19): siRNA sense strand
ucagagaguaugugcuauu

SEQ ID NO: 2293371 - RNA, 19 nt, Homo sapiens
  misc_RNA (1)...(19): siRNA sense strand
gguaauauacagguggaau

SEQ ID NO: 2293372 - RNA, 19 nt, Homo sapiens
  misc_RNA (1)...(19): siRNA sense strand
cagccgaauccgugaaguu

SEQ ID NO: 2293373 - RNA, 19 nt, Homo sapiens
  misc_RNA (1)...(19): siRNA sense strand
cgaguagagcugauaccaa

SEQ ID NO: 2293374 - RNA, 19 nt, Homo sapiens
  misc_RNA (1)...(19): siRNA sense strand
ggaggguggacgaaccaaa

SEQ ID NO: 2293375 - RNA, 19 nt, Homo sapiens
  misc_RNA (1)...(19): siRNA sense strand
gcuuggaacauaacgaaaa

SEQ ID NO: 2293376 - RNA, 19 nt, Homo sapiens
  misc_RNA (1)...(19): siRNA sense strand
ggaaucuagagaagcagaa

SEQ ID NO: 2293377 - RNA, 19 nt, Homo sapiens
  misc_RNA (1)...(19): siRNA sense strand
agacuaucgcucaguacaa

SEQ ID NO: 2293378 - RNA, 19 nt, Homo sapiens
  misc_RNA (1)...(19): siRNA sense strand
caguauuaccugcaaguca

SEQ ID NO: 2293379 - RNA, 19 nt, Homo sapiens
  misc_RNA (1)...(19): siRNA sense strand
gcgagagugaggaggagga

SEQ ID NO: 2293380 - RNA, 19 nt, Homo sapiens
  misc_RNA (1)...(19): siRNA sense strand
agagugaggaggaggagga

SEQ ID NO: 2293381 - RNA, 19 nt, Homo sapiens
  misc_RNA (1)...(19): siRNA sense strand
agggaaugguguucacaga

SEQ ID NO: 2293382 - RNA, 19 nt, Homo sapiens
  misc_RNA (1)...(19): siRNA sense strand
cugaagaaacaucuggaca

SEQ ID NO: 2293383 - RNA, 19 nt, Homo sapiens
  misc_RNA (1)...(19): siRNA sense strand
ggaccaggugauucggcua

SEQ ID NO: 2293384 - RNA, 19 nt, Homo sapiens
  misc_RNA (1)...(19): siRNA sense strand
uggauuuggcccuggaaga

SEQ ID NO: 2293385 - RNA, 19 nt, Homo sapiens
  misc_RNA (1)...(19): siRNA sense strand
aauuggaagacaagcggua

SEQ ID NO: 2293386 - RNA, 19 nt, Homo sapiens
  misc_RNA (1)...(19): siRNA sense strand
guaauauacagguggaaug

SEQ ID NO: 2293387 - RNA, 19 nt, Homo sapiens
  misc_RNA (1)...(19): siRNA sense strand
acucauaacaagucgacca

SEQ ID NO: 2293388 - RNA, 19 nt, Homo sapiens
  misc_RNA (1)...(19): siRNA sense strand
ucgaaaaugccaaguauau

SEQ ID NO: 2293389 - RNA, 19 nt, Homo sapiens
  misc_RNA (1)...(19): siRNA sense strand
caaccggagaugcgggaga

SEQ ID NO: 2293390 - RNA, 19 nt, Homo sapiens
  misc_RNA (1)...(19): siRNA sense strand
aggaagagugugagcaaug

SEQ ID NO: 2293391 - RNA, 19 nt, Homo sapiens
  misc_RNA (1)...(19): siRNA sense strand
cagccaaggccaucagcau

SEQ ID NO: 2293392 - RNA, 19 nt, Homo sapiens
  misc_RNA (1)...(19): siRNA sense strand
cgaccugacuagugugaag

SEQ ID NO: 2293393 - RNA, 19 nt, Homo sapiens
  misc_RNA (1)...(19): siRNA sense strand
uuauagagagagagaugau

SEQ ID NO: 2293394 - RNA, 19 nt, Homo sapiens
  misc_RNA (1)...(19): siRNA sense strand
ccaaaugugucauggcuuc

SEQ ID NO: 2293395 - RNA, 19 nt, Homo sapiens
  misc_RNA (1)...(19): siRNA sense strand
caagauuuccucagagagu

SEQ ID NO: 2293396 - RNA, 19 nt, Homo sapiens
  misc_RNA (1)...(19): siRNA sense strand
gugaggaacagaauuggaa

SEQ ID NO: 2293397 - RNA, 19 nt, Homo sapiens
  misc_RNA (1)...(19): siRNA sense strand
aggcuggagcugcgagaga

SEQ ID NO: 2293398 - RNA, 19 nt, Homo sapiens
  misc_RNA (1)...(19): siRNA sense strand
aagaaaggacgguguggca

SEQ ID NO: 2293399 - RNA, 19 nt, Homo sapiens
  misc_RNA (1)...(19): siRNA sense strand
uguucaugauccagacuau

SEQ ID NO: 2293400 - RNA, 19 nt, Homo sapiens
  misc_RNA (1)...(19): siRNA sense strand
caucaacaaagaagagacu

SEQ ID NO: 2293401 - RNA, 19 nt, Homo sapiens
  misc_RNA (1)...(19): siRNA sense strand
gagaaguggucgaugccaa

SEQ ID NO: 2293402 - RNA, 19 nt, Homo sapiens
  misc_RNA (1)...(19): siRNA sense strand
gcuucaaacaccaggagaa

SEQ ID NO: 2293403 - RNA, 19 nt, Homo sapiens
  misc_RNA (1)...(19): siRNA sense strand
uggacauaguuuagguauu

SEQ ID NO: 2293404 - RNA, 19 nt, Homo sapiens
  misc_RNA (1)...(19): siRNA sense strand
ggugaaugguacagauagu

SEQ ID NO: 2293405 - RNA, 19 nt, Homo sapiens
  misc_RNA (1)...(19): siRNA sense strand
ggaauuggauccugcgcau

SEQ ID NO: 2293406 - RNA, 19 nt, Homo sapiens
  misc_RNA (1)...(19): siRNA sense strand
cggagaucgagaaggagaa

SEQ ID NO: 2293407 - RNA, 19 nt, Homo sapiens
  misc_RNA (1)...(19): siRNA sense strand
aggcacagauagaucgauu

SEQ ID NO: 2293408 - RNA, 19 nt, Homo sapiens
  misc_RNA (1)...(19): siRNA sense strand
cuugaauguaccagaacua

SEQ ID NO: 2293409 - RNA, 19 nt, Homo sapiens
  misc_RNA (1)...(19): siRNA sense strand
agagaugguuacaugggaa

SEQ ID NO: 2293410 - RNA, 19 nt, Homo sapiens
  misc_RNA (1)...(19): siRNA sense strand
ccacaaucugccaaagcaa

SEQ ID NO: 2293411 - RNA, 19 nt, Homo sapiens
  misc_RNA (1)...(19): siRNA sense strand
agcaaugagugaacagcua

SEQ ID NO: 2293412 - RNA, 19 nt, Homo sapiens
  misc_RNA (1)...(19): siRNA sense strand
gaaccaaaauccaggcaca

SEQ ID NO: 2293413 - RNA, 19 nt, Homo sapiens
  misc_RNA (1)...(19): siRNA sense strand
ccgccaaauuuguauccua

SEQ ID NO: 2293414 - RNA, 19 nt, Homo sapiens
  misc_RNA (1)...(19): siRNA sense strand
gaagauugugacaccgaaa

SEQ ID NO: 2293415 - RNA, 19 nt, Homo sapiens
  misc_RNA (1)...(19): siRNA sense strand
gugcaauauuagaaaccca

SEQ ID NO: 2293416 - RNA, 19 nt, Homo sapiens
  misc_RNA (1)...(19): siRNA sense strand
ugaauguaccagaacuaaa

SEQ ID NO: 2293417 - RNA, 19 nt, Homo sapiens
  misc_RNA (1)...(19): siRNA sense strand
acgaaauggaagauuguga

SEQ ID NO: 2293418 - RNA, 19 nt, Homo sapiens
  misc_RNA (1)...(19): siRNA sense strand
uggacaaccuuauggacca

SEQ ID NO: 2293419 - RNA, 19 nt, Homo sapiens
  misc_RNA (1)...(19): siRNA sense strand
agaaauggugaaugguaca

SEQ ID NO: 2293420 - RNA, 19 nt, Homo sapiens
  misc_RNA (1)...(19): siRNA sense strand
cgagaaggagaauggcaga

SEQ ID NO: 2293421 - RNA, 19 nt, Homo sapiens
  misc_RNA (1)...(19): siRNA sense strand
gagugaacagcuaaggaga

SEQ ID NO: 2293422 - RNA, 19 nt, Homo sapiens
  misc_RNA (1)...(19): siRNA sense strand
acuacaaaggucauggcaa

SEQ ID NO: 2293423 - RNA, 19 nt, Homo sapiens
  misc_RNA (1)...(19): siRNA sense strand
gcucuaaacaugaccacga

SEQ ID NO: 2293424 - RNA, 19 nt, Homo sapiens
  misc_RNA (1)...(19): siRNA sense strand
agacuaccagguugggaua

SEQ ID NO: 2293425 - RNA, 19 nt, Homo sapiens
  misc_RNA (1)...(19): siRNA sense strand
ccaguuguguggaggaagu

SEQ ID NO: 2293426 - RNA, 19 nt, Homo sapiens
  misc_RNA (1)...(19): siRNA sense strand
ccauagaaagaaugaucca

SEQ ID NO: 2293427 - RNA, 19 nt, Homo sapiens
  misc_RNA (1)...(19): siRNA sense strand
gagaugguuacaugggaau

SEQ ID NO: 2293428 - RNA, 19 nt, Homo sapiens
  misc_RNA (1)...(19): siRNA sense strand
ccuggagcccgaaggacaa

SEQ ID NO: 2293429 - RNA, 19 nt, Homo sapiens
  misc_RNA (1)...(19): siRNA sense strand
cuaaacaugaccacgaaau

SEQ ID NO: 2293430 - RNA, 19 nt, Homo sapiens
  misc_RNA (1)...(19): siRNA sense strand
acacaacaguuauacccaa

SEQ ID NO: 2293431 - RNA, 19 nt, Homo sapiens
  misc_RNA (1)...(19): siRNA sense strand
acauggaaacagaucacua

SEQ ID NO: 2293432 - RNA, 19 nt, Homo sapiens
  misc_RNA (1)...(19): siRNA sense strand
uagaaauggugaaugguac

SEQ ID NO: 2293433 - RNA, 19 nt, Homo sapiens
  misc_RNA (1)...(19): siRNA sense strand
ccacgaaauggaagauugu

SEQ ID NO: 2293434 - RNA, 19 nt, Homo sapiens
  misc_RNA (1)...(19): siRNA sense strand
caguaagggaagagauggu

SEQ ID NO: 2293435 - RNA, 19 nt, Homo sapiens
  misc_RNA (1)...(19): siRNA sense strand
ggaugauggacauucguuu

SEQ ID NO: 2293436 - RNA, 19 nt, Homo sapiens
  misc_RNA (1)...(19): siRNA sense strand
gaaauugguauuagcagga

SEQ ID NO: 2293437 - RNA, 19 nt, Homo sapiens
  misc_RNA (1)...(19): siRNA sense strand
auagaaauggugaauggua

SEQ ID NO: 2293438 - RNA, 19 nt, Homo sapiens
  misc_RNA (1)...(19): siRNA sense strand
aaguuguaguaauggugua

SEQ ID NO: 2293439 - RNA, 19 nt, Homo sapiens
  misc_RNA (1)...(19): siRNA sense strand
augcgggaguggagaacca

SEQ ID NO: 2293440 - RNA, 19 nt, Homo sapiens
  misc_RNA (1)...(19): siRNA sense strand
ccgaaauggaaguugauuc

SEQ ID NO: 2293441 - RNA, 19 nt, Homo sapiens
  misc_RNA (1)...(19): siRNA sense strand
cauucagucuacuagcaua

SEQ ID NO: 2293442 - RNA, 19 nt, Homo sapiens
  misc_RNA (1)...(19): siRNA sense strand
uagcaggaagaaugggaga

SEQ ID NO: 2293443 - RNA, 19 nt, Homo sapiens
  misc_RNA (1)...(19): siRNA sense strand
acaauuuagcaucaggcaa

SEQ ID NO: 2293444 - RNA, 19 nt, Homo sapiens
  misc_RNA (1)...(19): siRNA sense strand
uggcaaaaccccaaaagau

SEQ ID NO: 2293445 - RNA, 19 nt, Homo sapiens
  misc_RNA (1)...(19): siRNA sense strand
aaggacaaguucagcuaca

SEQ ID NO: 2293446 - RNA, 19 nt, Homo sapiens
  misc_RNA (1)...(19): siRNA sense strand
gguuagaacaagagguaaa

SEQ ID NO: 2293447 - RNA, 19 nt, Homo sapiens
  misc_RNA (1)...(19): siRNA sense strand
caaccaagaaagagagaaa

SEQ ID NO: 2293448 - RNA, 19 nt, Homo sapiens
  misc_RNA (1)...(19): siRNA sense strand
gagaguugcaagagagaaa

SEQ ID NO: 2293449 - RNA, 19 nt, Homo sapiens
  misc_RNA (1)...(19): siRNA sense strand
cgauuuaaguagugacauu

SEQ ID NO: 2293450 - RNA, 19 nt, Homo sapiens
  misc_RNA (1)...(19): siRNA sense strand
agacaagagauuacagaua

SEQ ID NO: 2293451 - RNA, 19 nt, Homo sapiens
  misc_RNA (1)...(19): siRNA sense strand
ugaagaaggcagaggaaga

SEQ ID NO: 2293452 - RNA, 19 nt, Homo sapiens
  misc_RNA (1)...(19): siRNA sense strand
acgaaacaguauagaggaa

SEQ ID NO: 2293453 - RNA, 19 nt, Homo sapiens
  misc_RNA (1)...(19): siRNA sense strand
aggcaaagucuguggcaau

SEQ ID NO: 2293454 - RNA, 19 nt, Homo sapiens
  misc_RNA (1)...(19): siRNA sense strand
gguauuggacauagauaaa

SEQ ID NO: 2293455 - RNA, 19 nt, Homo sapiens
  misc_RNA (1)...(19): siRNA sense strand
ggauggaggaugaaguuaa

SEQ ID NO: 2293456 - RNA, 19 nt, Homo sapiens
  misc_RNA (1)...(19): siRNA sense strand
cagcaaagagagugauauu

SEQ ID NO: 2293457 - RNA, 19 nt, Homo sapiens
  misc_RNA (1)...(19): siRNA sense strand
aggcagaggaagaauauaa

SEQ ID NO: 2293458 - RNA, 19 nt, Homo sapiens
  misc_RNA (1)...(19): siRNA sense strand
uggaagaacagcugcauaa

SEQ ID NO: 2293459 - RNA, 19 nt, Homo sapiens
  misc_RNA (1)...(19): siRNA sense strand
gaaaaugagaagagaagaa

SEQ ID NO: 2293460 - RNA, 19 nt, Homo sapiens
  misc_RNA (1)...(19): siRNA sense strand
gggaaaucaaagaagaaau

SEQ ID NO: 2293461 - RNA, 19 nt, Homo sapiens
  misc_RNA (1)...(19): siRNA sense strand
agagagugauauugagcaa

SEQ ID NO: 2293462 - RNA, 19 nt, Homo sapiens
  misc_RNA (1)...(19): siRNA sense strand
acgaaaugcuuguagguga

SEQ ID NO: 2293463 - RNA, 19 nt, Homo sapiens
  misc_RNA (1)...(19): siRNA sense strand
ucuacauggugauggaaua

SEQ ID NO: 2293464 - RNA, 19 nt, Homo sapiens
  misc_RNA (1)...(19): siRNA sense strand
gcauagaauuaaugaguac

SEQ ID NO: 2293465 - RNA, 19 nt, Homo sapiens
  misc_RNA (1)...(19): siRNA sense strand
auaacaugcugcuggauaa

SEQ ID NO: 2293466 - RNA, 19 nt, Homo sapiens
  misc_RNA (1)...(19): siRNA sense strand
gguuauuauggaagagaau

SEQ ID NO: 2293467 - RNA, 19 nt, Homo sapiens
  misc_RNA (1)...(19): siRNA sense strand
agaagauaaaggagaggaa

SEQ ID NO: 2293468 - RNA, 19 nt, Homo sapiens
  misc_RNA (1)...(19): siRNA sense strand
ccuaaugauaacagaacua

SEQ ID NO: 2293469 - RNA, 19 nt, Homo sapiens
  misc_RNA (1)...(19): siRNA sense strand
aagaugaaauggagcagaa

SEQ ID NO: 2293470 - RNA, 19 nt, Homo sapiens
  misc_RNA (1)...(19): siRNA sense strand
guuggaagacuuaaagaaa

SEQ ID NO: 2293471 - RNA, 19 nt, Homo sapiens
  misc_RNA (1)...(19): siRNA sense strand
aagauaaaggagaggaaga

SEQ ID NO: 2293472 - RNA, 19 nt, Homo sapiens
  misc_RNA (1)...(19): siRNA sense strand
gcugaaagaagaaagagaa

SEQ ID NO: 2293473 - RNA, 19 nt, Homo sapiens
  misc_RNA (1)...(19): siRNA sense strand
aagagaagcucgagagaag

SEQ ID NO: 2293474 - RNA, 19 nt, Homo sapiens
  misc_RNA (1)...(19): siRNA sense strand
aagagagaaugaagagcua

SEQ ID NO: 2293475 - RNA, 19 nt, Homo sapiens
  misc_RNA (1)...(19): siRNA sense strand
cgaacaagauaaggagcaa

SEQ ID NO: 2293476 - RNA, 19 nt, Homo sapiens
  misc_RNA (1)...(19): siRNA sense strand
cugaugaaacugaugguaa

SEQ ID NO: 2293477 - RNA, 19 nt, Homo sapiens
  misc_RNA (1)...(19): siRNA sense strand
cuaugaagcuucucagcaa

SEQ ID NO: 2293478 - RNA, 19 nt, Homo sapiens
  misc_RNA (1)...(19): siRNA sense strand
aauuggaugaagagggaaa

SEQ ID NO: 2293479 - RNA, 19 nt, Homo sapiens
  misc_RNA (1)...(19): siRNA sense strand
gagggaaaucaaagaagaa

SEQ ID NO: 2293480 - RNA, 19 nt, Homo sapiens
  misc_RNA (1)...(19): siRNA sense strand
gagcugaaacugaagaaau

SEQ ID NO: 2293481 - RNA, 19 nt, Homo sapiens
  misc_RNA (1)...(19): siRNA sense strand
gagcagaagugcagaaccu

SEQ ID NO: 2293482 - RNA, 19 nt, Homo sapiens
  misc_RNA (1)...(19): siRNA sense strand
ggaugaagagggaaaucaa

SEQ ID NO: 2293483 - RNA, 19 nt, Homo sapiens
  misc_RNA (1)...(19): siRNA sense strand
aaagaaagucagucagaau

SEQ ID NO: 2293484 - RNA, 19 nt, Homo sapiens
  misc_RNA (1)...(19): siRNA sense strand
aagaaaagcugaacaggaa

SEQ ID NO: 2293485 - RNA, 19 nt, Homo sapiens
  misc_RNA (1)...(19): siRNA sense strand
cgaaaugcuuguaggugau

SEQ ID NO: 2293486 - RNA, 19 nt, Homo sapiens
  misc_RNA (1)...(19): siRNA sense strand
cgauauggcuggaagaaac

SEQ ID NO: 2293487 - RNA, 19 nt, Homo sapiens
  misc_RNA (1)...(19): siRNA sense strand
gaccagugggcuugggaaa

SEQ ID NO: 2293488 - RNA, 19 nt, Homo sapiens
  misc_RNA (1)...(19): siRNA sense strand
uggaagaagauaaaggaga

SEQ ID NO: 2293489 - RNA, 19 nt, Homo sapiens
  misc_RNA (1)...(19): siRNA sense strand
acaacaacgguuagaacaa

SEQ ID NO: 2293490 - RNA, 19 nt, Homo sapiens
  misc_RNA (1)...(19): siRNA sense strand
gcaaugugugagauggaaa

SEQ ID NO: 2293491 - RNA, 19 nt, Homo sapiens
  misc_RNA (1)...(19): siRNA sense strand
acgaagagacagaggucau

SEQ ID NO: 2293492 - RNA, 19 nt, Homo sapiens
  misc_RNA (1)...(19): siRNA sense strand
ugaagagcuaacagagaaa

SEQ ID NO: 2293493 - RNA, 19 nt, Homo sapiens
  misc_RNA (1)...(19): siRNA sense strand
aguaccaaauagaggaaau

SEQ ID NO: 2293494 - RNA, 19 nt, Homo sapiens
  misc_RNA (1)...(19): siRNA sense strand
agcugaaacugaagaaauu

SEQ ID NO: 2293495 - RNA, 19 nt, Homo sapiens
  misc_RNA (1)...(19): siRNA sense strand
gauuggaugcuuugguaua

SEQ ID NO: 2293496 - RNA, 19 nt, Homo sapiens
  misc_RNA (1)...(19): siRNA sense strand
uggagaaggaggaggagau

SEQ ID NO: 2293497 - RNA, 19 nt, Homo sapiens
  misc_RNA (1)...(19): siRNA sense strand
aaguggaaggagaaagaaa

SEQ ID NO: 2293498 - RNA, 19 nt, Homo sapiens
  misc_RNA (1)...(19): siRNA sense strand
guaacaucagcaagagaua

SEQ ID NO: 2293499 - RNA, 19 nt, Homo sapiens
  misc_RNA (1)...(19): siRNA sense strand
guucaauugguaaggcaua

SEQ ID NO: 2293500 - RNA, 19 nt, Homo sapiens
  misc_RNA (1)...(19): siRNA sense strand
agauaaaggagaggaagaa

SEQ ID NO: 2293501 - RNA, 19 nt, Homo sapiens
  misc_RNA (1)...(19): siRNA sense strand
ggugauugguagaggugca

SEQ ID NO: 2293502 - RNA, 19 nt, Homo sapiens
  misc_RNA (1)...(19): siRNA sense strand
ggagaaguucaauugguaa

SEQ ID NO: 2293503 - RNA, 19 nt, Homo sapiens
  misc_RNA (1)...(19): siRNA sense strand
guauagaggaaaugaagga

SEQ ID NO: 2293504 - RNA, 19 nt, Homo sapiens
  misc_RNA (1)...(19): siRNA sense strand
caucuaugguauuggacau

SEQ ID NO: 2293505 - RNA, 19 nt, Homo sapiens
  misc_RNA (1)...(19): siRNA sense strand
ccaagguggugaugguuau

SEQ ID NO: 2293506 - RNA, 19 nt, Homo sapiens
  misc_RNA (1)...(19): siRNA sense strand
ugacuuggaagaagauaaa

SEQ ID NO: 2293507 - RNA, 19 nt, Homo sapiens
  misc_RNA (1)...(19): siRNA sense strand
ggaagaagauaaaggagag

SEQ ID NO: 2293508 - RNA, 19 nt, Homo sapiens
  misc_RNA (1)...(19): siRNA sense strand
aggaagagucacacagaga

SEQ ID NO: 2293509 - RNA, 19 nt, Homo sapiens
  misc_RNA (1)...(19): siRNA sense strand
uagaagaaaucaaacgaca

SEQ ID NO: 2293510 - RNA, 19 nt, Homo sapiens
  misc_RNA (1)...(19): siRNA sense strand
gagaauucuaagucacaaa

SEQ ID NO: 2293511 - RNA, 19 nt, Homo sapiens
  misc_RNA (1)...(19): siRNA sense strand
agguaaaggaacuuaaaga

SEQ ID NO: 2293512 - RNA, 19 nt, Homo sapiens
  misc_RNA (1)...(19): siRNA sense strand
aggaggaggagaucaguaa

SEQ ID NO: 2293513 - RNA, 19 nt, Homo sapiens
  misc_RNA (1)...(19): siRNA sense strand
aggaugaaguuaagaaucu

SEQ ID NO: 2293514 - RNA, 19 nt, Homo sapiens
  misc_RNA (1)...(19): siRNA sense strand
guuaacaaauuggcagaaa

SEQ ID NO: 2293515 - RNA, 19 nt, Homo sapiens
  misc_RNA (1)...(19): siRNA sense strand
accaagaaagagagaaauu

SEQ ID NO: 2293516 - RNA, 19 nt, Homo sapiens
  misc_RNA (1)...(19): siRNA sense strand
ggguaaaagcagugaaagu

SEQ ID NO: 2293517 - RNA, 19 nt, Homo sapiens
  misc_RNA (1)...(19): siRNA sense strand
agugaaaguggcagauauu

SEQ ID NO: 2293518 - RNA, 19 nt, Homo sapiens
  misc_RNA (1)...(19): siRNA sense strand
gugugaagggcauggcuau

SEQ ID NO: 2293519 - RNA, 19 nt, Homo sapiens
  misc_RNA (1)...(19): siRNA sense strand
cuacaguuguucaaggcuu

SEQ ID NO: 2293520 - RNA, 19 nt, Homo sapiens
  misc_RNA (1)...(19): siRNA sense strand
uugcauaggcccuggggua

SEQ ID NO: 2293521 - RNA, 19 nt, Homo sapiens
  misc_RNA (1)...(19): siRNA sense strand
aagcagugaaaguggcaga

SEQ ID NO: 2293522 - RNA, 19 nt, Homo sapiens
  misc_RNA (1)...(19): siRNA sense strand
agugauuauuacccugaaa

SEQ ID NO: 2293523 - RNA, 19 nt, Homo sapiens
  misc_RNA (1)...(19): siRNA sense strand
gaacagagagccaggacca

SEQ ID NO: 2293524 - RNA, 19 nt, Homo sapiens
  misc_RNA (1)...(19): siRNA sense strand
cagugagcuuucagagaau

SEQ ID NO: 2293525 - RNA, 19 nt, Homo sapiens
  misc_RNA (1)...(19): siRNA sense strand
caguugacgcugaaagaau

SEQ ID NO: 2293526 - RNA, 19 nt, Homo sapiens
  misc_RNA (1)...(19): siRNA sense strand
acugaagaaagaaggauau

SEQ ID NO: 2293527 - RNA, 19 nt, Homo sapiens
  misc_RNA (1)...(19): siRNA sense strand
aacugaagaaagaaggaua

SEQ ID NO: 2293528 - RNA, 19 nt, Homo sapiens
  misc_RNA (1)...(19): siRNA sense strand
cgggaggaacagagagcca

SEQ ID NO: 2293529 - RNA, 19 nt, Homo sapiens
  misc_RNA (1)...(19): siRNA sense strand
agaauaagguuucagagca

SEQ ID NO: 2293530 - RNA, 19 nt, Homo sapiens
  misc_RNA (1)...(19): siRNA sense strand
uguaaauugcccacagauu

SEQ ID NO: 2293531 - RNA, 19 nt, Homo sapiens
  misc_RNA (1)...(19): siRNA sense strand
auguagaagaagccauuaa

SEQ ID NO: 2293532 - RNA, 19 nt, Homo sapiens
  misc_RNA (1)...(19): siRNA sense strand
accauaagcacaaggguca

SEQ ID NO: 2293533 - RNA, 19 nt, Homo sapiens
  misc_RNA (1)...(19): siRNA sense strand
gugaaaagaaauguggaaa

SEQ ID NO: 2293534 - RNA, 19 nt, Homo sapiens
  misc_RNA (1)...(19): siRNA sense strand
cgggcagaggagaacauaa

SEQ ID NO: 2293535 - RNA, 19 nt, Homo sapiens
  misc_RNA (1)...(19): siRNA sense strand
uguuaaucaucaaggaauc

SEQ ID NO: 2293536 - RNA, 19 nt, Homo sapiens
  misc_RNA (1)...(19): siRNA sense strand
accugacaguguaaagaaa

SEQ ID NO: 2293537 - RNA, 19 nt, Homo sapiens
  misc_RNA (1)...(19): siRNA sense strand
cugucgaaagagauguaua

SEQ ID NO: 2293538 - RNA, 19 nt, Homo sapiens
  misc_RNA (1)...(19): siRNA sense strand
aauuagaagaccugcgagu

SEQ ID NO: 2293539 - RNA, 19 nt, Homo sapiens
  misc_RNA (1)...(19): siRNA sense strand
agauaugccagcaagugaa

SEQ ID NO: 2293540 - RNA, 19 nt, Homo sapiens
  misc_RNA (1)...(19): siRNA sense strand
cuaagaaagugucgggcaa

SEQ ID NO: 2293541 - RNA, 19 nt, Homo sapiens
  misc_RNA (1)...(19): siRNA sense strand
ccgaagagcaggacgaaaa

SEQ ID NO: 2293542 - RNA, 19 nt, Homo sapiens
  misc_RNA (1)...(19): siRNA sense strand
augaagauauugugggaga

SEQ ID NO: 2293543 - RNA, 19 nt, Homo sapiens
  misc_RNA (1)...(19): siRNA sense strand
ggucagaaaggaagagcca

SEQ ID NO: 2293544 - RNA, 19 nt, Homo sapiens
  misc_RNA (1)...(19): siRNA sense strand
ccaccaagcagaugcgaga

SEQ ID NO: 2293545 - RNA, 19 nt, Homo sapiens
  misc_RNA (1)...(19): siRNA sense strand
agagaggaaagaagagauu

SEQ ID NO: 2293546 - RNA, 19 nt, Homo sapiens
  misc_RNA (1)...(19): siRNA sense strand
cuuacugccaagugggaaa

SEQ ID NO: 2293547 - RNA, 19 nt, Homo sapiens
  misc_RNA (1)...(19): siRNA sense strand
ugagaaugguacugagaac

SEQ ID NO: 2293548 - RNA, 19 nt, Homo sapiens
  misc_RNA (1)...(19): siRNA sense strand
aagacagggagcuaagaaa

SEQ ID NO: 2293549 - RNA, 19 nt, Homo sapiens
  misc_RNA (1)...(19): siRNA sense strand
cuaugaagauauuguggga

SEQ ID NO: 2293550 - RNA, 19 nt, Homo sapiens
  misc_RNA (1)...(19): siRNA sense strand
cuuaaagagccgaagagca

SEQ ID NO: 2293551 - RNA, 19 nt, Homo sapiens
  misc_RNA (1)...(19): siRNA sense strand
ccucaggacaggaaguaca

SEQ ID NO: 2293552 - RNA, 19 nt, Homo sapiens
  misc_RNA (1)...(19): siRNA sense strand
acucaaggcuggagcacgu

SEQ ID NO: 2293553 - RNA, 19 nt, Homo sapiens
  misc_RNA (1)...(19): siRNA sense strand
cauccaagacagggagcua

SEQ ID NO: 2293554 - RNA, 19 nt, Homo sapiens
  misc_RNA (1)...(19): siRNA sense strand
cagcauugaaacagcauca

SEQ ID NO: 2293555 - RNA, 19 nt, Homo sapiens
  misc_RNA (1)...(19): siRNA sense strand
aagaagaagccaucgcgaa

SEQ ID NO: 2293556 - RNA, 19 nt, Homo sapiens
  misc_RNA (1)...(19): siRNA sense strand
gagccgaagagcaggacga

SEQ ID NO: 2293557 - RNA, 19 nt, Homo sapiens
  misc_RNA (1)...(19): siRNA sense strand
agaaaaugccuaugaagau

SEQ ID NO: 2293558 - RNA, 19 nt, Homo sapiens
  misc_RNA (1)...(19): siRNA sense strand
gaaaacagugagagcgaga

SEQ ID NO: 2293559 - RNA, 19 nt, Homo sapiens
  misc_RNA (1)...(19): siRNA sense strand
gcuaagaaagugucgggca

SEQ ID NO: 2293560 - RNA, 19 nt, Homo sapiens
  misc_RNA (1)...(19): siRNA sense strand
uacaaugccaagagaggaa

SEQ ID NO: 2293561 - RNA, 19 nt, Homo sapiens
  misc_RNA (1)...(19): siRNA sense strand
gguucaaagcccacacaca

SEQ ID NO: 2293562 - RNA, 19 nt, Homo sapiens
  misc_RNA (1)...(19): siRNA sense strand
gcaaugagguguuagagcu

SEQ ID NO: 2293563 - RNA, 19 nt, Homo sapiens
  misc_RNA (1)...(19): siRNA sense strand
acuccgacgaugaauguaa

SEQ ID NO: 2293564 - RNA, 19 nt, Homo sapiens
  misc_RNA (1)...(19): siRNA sense strand
ggcuggagcacguggacuu

SEQ ID NO: 2293565 - RNA, 19 nt, Homo sapiens
  misc_RNA (1)...(19): siRNA sense strand
aaacagcaucacugagaga

SEQ ID NO: 2293566 - RNA, 19 nt, Homo sapiens
  misc_RNA (1)...(19): siRNA sense strand
aagaaaaugccuaugaaga

SEQ ID NO: 2293567 - RNA, 19 nt, Homo sapiens
  misc_RNA (1)...(19): siRNA sense strand
gaggaggcgcugaugguga

SEQ ID NO: 2293568 - RNA, 19 nt, Homo sapiens
  misc_RNA (1)...(19): siRNA sense strand
gagaagggagagagggccu

SEQ ID NO: 2293569 - RNA, 19 nt, Homo sapiens
  misc_RNA (1)...(19): siRNA sense strand
agugagagcgagagcgacu

SEQ ID NO: 2293570 - RNA, 19 nt, Homo sapiens
  misc_RNA (1)...(19): siRNA sense strand
gaagacagccucagcacca

SEQ ID NO: 2293571 - RNA, 19 nt, Homo sapiens
  misc_RNA (1)...(19): siRNA sense strand
uuaaagagccgaagagcag

SEQ ID NO: 2293572 - RNA, 19 nt, Homo sapiens
  misc_RNA (1)...(19): siRNA sense strand
ccaacaagaauuccagcau

SEQ ID NO: 2293573 - RNA, 19 nt, Homo sapiens
  misc_RNA (1)...(19): siRNA sense strand
ggagaucugcccaaggaga

SEQ ID NO: 2293574 - RNA, 19 nt, Homo sapiens
  misc_RNA (1)...(19): siRNA sense strand
cuaagaaagugucgggcaa

SEQ ID NO: 2293575 - RNA, 19 nt, Homo sapiens
  misc_RNA (1)...(19): siRNA sense strand
ccgaagagcaggacgaaaa

SEQ ID NO: 2293576 - RNA, 19 nt, Homo sapiens
  misc_RNA (1)...(19): siRNA sense strand
augaagauauugugggaga

SEQ ID NO: 2293577 - RNA, 19 nt, Homo sapiens
  misc_RNA (1)...(19): siRNA sense strand
ggucagaaaggaagagcca

SEQ ID NO: 2293578 - RNA, 19 nt, Homo sapiens
  misc_RNA (1)...(19): siRNA sense strand
ccaccaagcagaugcgaga

SEQ ID NO: 2293579 - RNA, 19 nt, Homo sapiens
  misc_RNA (1)...(19): siRNA sense strand
agagaggaaagaagagauu

SEQ ID NO: 2293580 - RNA, 19 nt, Homo sapiens
  misc_RNA (1)...(19): siRNA sense strand
cuuacugccaagugggaaa

SEQ ID NO: 2293581 - RNA, 19 nt, Homo sapiens
  misc_RNA (1)...(19): siRNA sense strand
ugagaaugguacugagaac

SEQ ID NO: 2293582 - RNA, 19 nt, Homo sapiens
  misc_RNA (1)...(19): siRNA sense strand
aagacagggagcuaagaaa

SEQ ID NO: 2293583 - RNA, 19 nt, Homo sapiens
  misc_RNA (1)...(19): siRNA sense strand
cuaugaagauauuguggga

SEQ ID NO: 2293584 - RNA, 19 nt, Homo sapiens
  misc_RNA (1)...(19): siRNA sense strand
cuuaaagagccgaagagca

SEQ ID NO: 2293585 - RNA, 19 nt, Homo sapiens
  misc_RNA (1)...(19): siRNA sense strand
ccucaggacaggaaguaca

SEQ ID NO: 2293586 - RNA, 19 nt, Homo sapiens
  misc_RNA (1)...(19): siRNA sense strand
acucaaggcuggagcacgu

SEQ ID NO: 2293587 - RNA, 19 nt, Homo sapiens
  misc_RNA (1)...(19): siRNA sense strand
cauccaagacagggagcua

SEQ ID NO: 2293588 - RNA, 19 nt, Homo sapiens
  misc_RNA (1)...(19): siRNA sense strand
cagcauugaaacagcauca

SEQ ID NO: 2293589 - RNA, 19 nt, Homo sapiens
  misc_RNA (1)...(19): siRNA sense strand
aagaagaagccaucgcgaa

SEQ ID NO: 2293590 - RNA, 19 nt, Homo sapiens
  misc_RNA (1)...(19): siRNA sense strand
gagccgaagagcaggacga

SEQ ID NO: 2293591 - RNA, 19 nt, Homo sapiens
  misc_RNA (1)...(19): siRNA sense strand
agaaaaugccuaugaagau

SEQ ID NO: 2293592 - RNA, 19 nt, Homo sapiens
  misc_RNA (1)...(19): siRNA sense strand
gaaaacagugagagcgaga

SEQ ID NO: 2293593 - RNA, 19 nt, Homo sapiens
  misc_RNA (1)...(19): siRNA sense strand
gcuaagaaagugucgggca

SEQ ID NO: 2293594 - RNA, 19 nt, Homo sapiens
  misc_RNA (1)...(19): siRNA sense strand
uacaaugccaagagaggaa

SEQ ID NO: 2293595 - RNA, 19 nt, Homo sapiens
  misc_RNA (1)...(19): siRNA sense strand
gguucaaagcccacacaca

SEQ ID NO: 2293596 - RNA, 19 nt, Homo sapiens
  misc_RNA (1)...(19): siRNA sense strand
gcaaugagguguuagagcu

SEQ ID NO: 2293597 - RNA, 19 nt, Homo sapiens
  misc_RNA (1)...(19): siRNA sense strand
acuccgacgaugaauguaa

SEQ ID NO: 2293598 - RNA, 19 nt, Homo sapiens
  misc_RNA (1)...(19): siRNA sense strand
ggcuggagcacguggacuu

SEQ ID NO: 2293599 - RNA, 19 nt, Homo sapiens
  misc_RNA (1)...(19): siRNA sense strand
aaacagcaucacugagaga

SEQ ID NO: 2293600 - RNA, 19 nt, Homo sapiens
  misc_RNA (1)...(19): siRNA sense strand
aagaaaaugccuaugaaga

SEQ ID NO: 2293601 - RNA, 19 nt, Homo sapiens
  misc_RNA (1)...(19): siRNA sense strand
gaggaggcgcugaugguga

SEQ ID NO: 2293602 - RNA, 19 nt, Homo sapiens
  misc_RNA (1)...(19): siRNA sense strand
gagaagggagagagggccu

SEQ ID NO: 2293603 - RNA, 19 nt, Homo sapiens
  misc_RNA (1)...(19): siRNA sense strand
agugagagcgagagcgacu

SEQ ID NO: 2293604 - RNA, 19 nt, Homo sapiens
  misc_RNA (1)...(19): siRNA sense strand
gaagacagccucagcacca

SEQ ID NO: 2293605 - RNA, 19 nt, Homo sapiens
  misc_RNA (1)...(19): siRNA sense strand
uuaaagagccgaagagcag

SEQ ID NO: 2293606 - RNA, 19 nt, Homo sapiens
  misc_RNA (1)...(19): siRNA sense strand
ccaacaagaauuccagcau

SEQ ID NO: 2293607 - RNA, 19 nt, Homo sapiens
  misc_RNA (1)...(19): siRNA sense strand
ggagaucugcccaaggaga

SEQ ID NO: 2293608 - RNA, 19 nt, Homo sapiens
  misc_RNA (1)...(19): siRNA sense strand
aggaauuggaacagaaaua

SEQ ID NO: 2293609 - RNA, 19 nt, Homo sapiens
  misc_RNA (1)...(19): siRNA sense strand
cagcauaacauaaggaaaa

SEQ ID NO: 2293610 - RNA, 19 nt, Homo sapiens
  misc_RNA (1)...(19): siRNA sense strand
gguuauguguauagagcau

SEQ ID NO: 2293611 - RNA, 19 nt, Homo sapiens
  misc_RNA (1)...(19): siRNA sense strand
acagagaacacgagaccaa

SEQ ID NO: 2293612 - RNA, 19 nt, Homo sapiens
  misc_RNA (1)...(19): siRNA sense strand
aagaugugaaugagagaaa

SEQ ID NO: 2293613 - RNA, 19 nt, Homo sapiens
  misc_RNA (1)...(19): siRNA sense strand
acacaaaagugaugaacau

SEQ ID NO: 2293614 - RNA, 19 nt, Homo sapiens
  misc_RNA (1)...(19): siRNA sense strand
ugaaauugcaagagcugaa

SEQ ID NO: 2293615 - RNA, 19 nt, Homo sapiens
  misc_RNA (1)...(19): siRNA sense strand
agacaaacagaaagagcuu

SEQ ID NO: 2293616 - RNA, 19 nt, Homo sapiens
  misc_RNA (1)...(19): siRNA sense strand
ugacaauaagagaaaggaa

SEQ ID NO: 2293617 - RNA, 19 nt, Homo sapiens
  misc_RNA (1)...(19): siRNA sense strand
cccuaaaggaacuggauau

SEQ ID NO: 2293618 - RNA, 19 nt, Homo sapiens
  misc_RNA (1)...(19): siRNA sense strand
uggaaaacgcccagagauu

SEQ ID NO: 2293619 - RNA, 19 nt, Homo sapiens
  misc_RNA (1)...(19): siRNA sense strand
cguuugugguggaaagaca

SEQ ID NO: 2293620 - RNA, 19 nt, Homo sapiens
  misc_RNA (1)...(19): siRNA sense strand
ccuaaaggaacuggauaua

SEQ ID NO: 2293621 - RNA, 19 nt, Homo sapiens
  misc_RNA (1)...(19): siRNA sense strand
uggcaaagagugaucagaa

SEQ ID NO: 2293622 - RNA, 19 nt, Homo sapiens
  misc_RNA (1)...(19): siRNA sense strand
uggaggaauuggaacagaa

SEQ ID NO: 2293623 - RNA, 19 nt, Homo sapiens
  misc_RNA (1)...(19): siRNA sense strand
ucugaaggaagaaaggaaa

SEQ ID NO: 2293624 - RNA, 19 nt, Homo sapiens
  misc_RNA (1)...(19): siRNA sense strand
ggaagauuuacaagaugaa

SEQ ID NO: 2293625 - RNA, 19 nt, Homo sapiens
  misc_RNA (1)...(19): siRNA sense strand
agagaaaggaaguaguuca

SEQ ID NO: 2293626 - RNA, 19 nt, Homo sapiens
  misc_RNA (1)...(19): siRNA sense strand
aguugagacuguuggugaa

SEQ ID NO: 2293627 - RNA, 19 nt, Homo sapiens
  misc_RNA (1)...(19): siRNA sense strand
augaacuaguggaguggaa

SEQ ID NO: 2293628 - RNA, 19 nt, Homo sapiens
  misc_RNA (1)...(19): siRNA sense strand
ggauuuaggaaguucaaca

SEQ ID NO: 2293629 - RNA, 19 nt, Homo sapiens
  misc_RNA (1)...(19): siRNA sense strand
uugcaagagcugaauuaua

SEQ ID NO: 2293630 - RNA, 19 nt, Homo sapiens
  misc_RNA (1)...(19): siRNA sense strand
acagcauaacauaaggaaa

SEQ ID NO: 2293631 - RNA, 19 nt, Homo sapiens
  misc_RNA (1)...(19): siRNA sense strand
aagcguaaucuucaggaua

SEQ ID NO: 2293632 - RNA, 19 nt, Homo sapiens
  misc_RNA (1)...(19): siRNA sense strand
cugaaggaagaaaggaaaa

SEQ ID NO: 2293633 - RNA, 19 nt, Homo sapiens
  misc_RNA (1)...(19): siRNA sense strand
cuugauggcccuaaaggaa

SEQ ID NO: 2293634 - RNA, 19 nt, Homo sapiens
  misc_RNA (1)...(19): siRNA sense strand
cccagaaugcccugauuaa

SEQ ID NO: 2293635 - RNA, 19 nt, Homo sapiens
  misc_RNA (1)...(19): siRNA sense strand
aguuggaggaauuggaaca

SEQ ID NO: 2293636 - RNA, 19 nt, Homo sapiens
  misc_RNA (1)...(19): siRNA sense strand
caauaagagaaaggaagua

SEQ ID NO: 2293637 - RNA, 19 nt, Homo sapiens
  misc_RNA (1)...(19): siRNA sense strand
gcugaaugucacugaacuu

SEQ ID NO: 2293638 - RNA, 19 nt, Homo sapiens
  misc_RNA (1)...(19): siRNA sense strand
gucugaaggaagaaaggaa

SEQ ID NO: 2293639 - RNA, 19 nt, Homo sapiens
  misc_RNA (1)...(19): siRNA sense strand
acaauaagagaaaggaagu

SEQ ID NO: 2293640 - RNA, 19 nt, Homo sapiens
  misc_RNA (1)...(19): siRNA sense strand
caucauucgcaauuacaaa

SEQ ID NO: 2293641 - RNA, 19 nt, Homo sapiens
  misc_RNA (1)...(19): siRNA sense strand
acaaacagaaagagcuuga

SEQ ID NO: 2293642 - RNA, 19 nt, Homo sapiens
  misc_RNA (1)...(19): siRNA sense strand
augugaaggacaagguuau

SEQ ID NO: 2293643 - RNA, 19 nt, Homo sapiens
  misc_RNA (1)...(19): siRNA sense strand
aggauaauuuucaggaaga

SEQ ID NO: 2293644 - RNA, 19 nt, Homo sapiens
  misc_RNA (1)...(19): siRNA sense strand
cuggcacagugguuagaaa

SEQ ID NO: 2293645 - RNA, 19 nt, Homo sapiens
  misc_RNA (1)...(19): siRNA sense strand
aggaaguaguucacaaaau

SEQ ID NO: 2293646 - RNA, 19 nt, Homo sapiens
  misc_RNA (1)...(19): siRNA sense strand
cagcaaggagcgagagcgu

SEQ ID NO: 2293647 - RNA, 19 nt, Homo sapiens
  misc_RNA (1)...(19): siRNA sense strand
aggaagcaccagagccaau

SEQ ID NO: 2293648 - RNA, 19 nt, Homo sapiens
  misc_RNA (1)...(19): siRNA sense strand
guguauagagcaugaaauc

SEQ ID NO: 2293649 - RNA, 19 nt, Homo sapiens
  misc_RNA (1)...(19): siRNA sense strand
aaaucaagagccuggaaga

SEQ ID NO: 2293650 - RNA, 19 nt, Homo sapiens
  misc_RNA (1)...(19): siRNA sense strand
gaacauguugggagagaag

SEQ ID NO: 2293651 - RNA, 19 nt, Homo sapiens
  misc_RNA (1)...(19): siRNA sense strand
gcguaaucuucaggauaau

SEQ ID NO: 2293652 - RNA, 19 nt, Homo sapiens
  misc_RNA (1)...(19): siRNA sense strand
gggaauauucagagcacag

SEQ ID NO: 2293653 - RNA, 19 nt, Homo sapiens
  misc_RNA (1)...(19): siRNA sense strand
agcugaacauguugggaga

SEQ ID NO: 2293654 - RNA, 19 nt, Homo sapiens
  misc_RNA (1)...(19): siRNA sense strand
cugaacauguugggagaga

SEQ ID NO: 2293655 - RNA, 19 nt, Homo sapiens
  misc_RNA (1)...(19): siRNA sense strand
ugcuugacaauaagagaaa

SEQ ID NO: 2293656 - RNA, 19 nt, Homo sapiens
  misc_RNA (1)...(19): siRNA sense strand
acaacaugcugguggcgga

SEQ ID NO: 2293657 - RNA, 19 nt, Homo sapiens
  misc_RNA (1)...(19): siRNA sense strand
aaaggaagcaccagagcca

SEQ ID NO: 2293658 - RNA, 19 nt, Homo sapiens
  misc_RNA (1)...(19): siRNA sense strand
acucaaaauuccuggagca

SEQ ID NO: 2293659 - RNA, 19 nt, Homo sapiens
  misc_RNA (1)...(19): siRNA sense strand
cuauaguugcggagagucu

SEQ ID NO: 2293660 - RNA, 19 nt, Homo sapiens
  misc_RNA (1)...(19): siRNA sense strand
cggagagucugcagcaagu

SEQ ID NO: 2293661 - RNA, 19 nt, Homo sapiens
  misc_RNA (1)...(19): siRNA sense strand
acagaaagagcuugacagu

SEQ ID NO: 2293662 - RNA, 19 nt, Homo sapiens
  misc_RNA (1)...(19): siRNA sense strand
gaauuggaacagaaauaca

SEQ ID NO: 2293663 - RNA, 19 nt, Homo sapiens
  misc_RNA (1)...(19): siRNA sense strand
uaaagaugugaaugagaga

SEQ ID NO: 2293664 - RNA, 19 nt, Homo sapiens
  misc_RNA (1)...(19): siRNA sense strand
caccagagccaauggaacu

SEQ ID NO: 2293665 - RNA, 19 nt, Homo sapiens
  misc_RNA (1)...(19): siRNA sense strand
gguacgaacuucagcagcu

SEQ ID NO: 2293666 - RNA, 19 nt, Homo sapiens
  misc_RNA (1)...(19): siRNA sense strand
gcuuggaucagcugcagaa

SEQ ID NO: 2293667 - RNA, 19 nt, Homo sapiens
  misc_RNA (1)...(19): siRNA sense strand
ggaccuuccugcugcgguu

SEQ ID NO: 2293668 - RNA, 19 nt, Homo sapiens
  misc_RNA (1)...(19): siRNA sense strand
ucacauggguggagcgguc

SEQ ID NO: 2293669 - RNA, 19 nt, Homo sapiens
  misc_RNA (1)...(19): siRNA sense strand
gcccuaaaggaacuggaua

SEQ ID NO: 2293670 - RNA, 19 nt, Homo sapiens
  misc_RNA (1)...(19): siRNA sense strand
aggaauuggaacagaaaua

SEQ ID NO: 2293671 - RNA, 19 nt, Homo sapiens
  misc_RNA (1)...(19): siRNA sense strand
cagcauaacauaaggaaaa

SEQ ID NO: 2293672 - RNA, 19 nt, Homo sapiens
  misc_RNA (1)...(19): siRNA sense strand
gguuauguguauagagcau

SEQ ID NO: 2293673 - RNA, 19 nt, Homo sapiens
  misc_RNA (1)...(19): siRNA sense strand
acagagaacacgagaccaa

SEQ ID NO: 2293674 - RNA, 19 nt, Homo sapiens
  misc_RNA (1)...(19): siRNA sense strand
aagaugugaaugagagaaa

SEQ ID NO: 2293675 - RNA, 19 nt, Homo sapiens
  misc_RNA (1)...(19): siRNA sense strand
acacaaaagugaugaacau

SEQ ID NO: 2293676 - RNA, 19 nt, Homo sapiens
  misc_RNA (1)...(19): siRNA sense strand
ugaaauugcaagagcugaa

SEQ ID NO: 2293677 - RNA, 19 nt, Homo sapiens
  misc_RNA (1)...(19): siRNA sense strand
agacaaacagaaagagcuu

SEQ ID NO: 2293678 - RNA, 19 nt, Homo sapiens
  misc_RNA (1)...(19): siRNA sense strand
ugacaauaagagaaaggaa

SEQ ID NO: 2293679 - RNA, 19 nt, Homo sapiens
  misc_RNA (1)...(19): siRNA sense strand
cccuaaaggaacuggauau

SEQ ID NO: 2293680 - RNA, 19 nt, Homo sapiens
  misc_RNA (1)...(19): siRNA sense strand
uggaaaacgcccagagauu

SEQ ID NO: 2293681 - RNA, 19 nt, Homo sapiens
  misc_RNA (1)...(19): siRNA sense strand
cguuugugguggaaagaca

SEQ ID NO: 2293682 - RNA, 19 nt, Homo sapiens
  misc_RNA (1)...(19): siRNA sense strand
ccuaaaggaacuggauaua

SEQ ID NO: 2293683 - RNA, 19 nt, Homo sapiens
  misc_RNA (1)...(19): siRNA sense strand
uggcaaagagugaucagaa

SEQ ID NO: 2293684 - RNA, 19 nt, Homo sapiens
  misc_RNA (1)...(19): siRNA sense strand
uggaggaauuggaacagaa

SEQ ID NO: 2293685 - RNA, 19 nt, Homo sapiens
  misc_RNA (1)...(19): siRNA sense strand
ucugaaggaagaaaggaaa

SEQ ID NO: 2293686 - RNA, 19 nt, Homo sapiens
  misc_RNA (1)...(19): siRNA sense strand
ggaagauuuacaagaugaa

SEQ ID NO: 2293687 - RNA, 19 nt, Homo sapiens
  misc_RNA (1)...(19): siRNA sense strand
agagaaaggaaguaguuca

SEQ ID NO: 2293688 - RNA, 19 nt, Homo sapiens
  misc_RNA (1)...(19): siRNA sense strand
aguugagacuguuggugaa

SEQ ID NO: 2293689 - RNA, 19 nt, Homo sapiens
  misc_RNA (1)...(19): siRNA sense strand
augaacuaguggaguggaa

SEQ ID NO: 2293690 - RNA, 19 nt, Homo sapiens
  misc_RNA (1)...(19): siRNA sense strand
ggauuuaggaaguucaaca

SEQ ID NO: 2293691 - RNA, 19 nt, Homo sapiens
  misc_RNA (1)...(19): siRNA sense strand
uugcaagagcugaauuaua

SEQ ID NO: 2293692 - RNA, 19 nt, Homo sapiens
  misc_RNA (1)...(19): siRNA sense strand
acagcauaacauaaggaaa

SEQ ID NO: 2293693 - RNA, 19 nt, Homo sapiens
  misc_RNA (1)...(19): siRNA sense strand
aagcguaaucuucaggaua

SEQ ID NO: 2293694 - RNA, 19 nt, Homo sapiens
  misc_RNA (1)...(19): siRNA sense strand
cugaaggaagaaaggaaaa

SEQ ID NO: 2293695 - RNA, 19 nt, Homo sapiens
  misc_RNA (1)...(19): siRNA sense strand
cuugauggcccuaaaggaa

SEQ ID NO: 2293696 - RNA, 19 nt, Homo sapiens
  misc_RNA (1)...(19): siRNA sense strand
cccagaaugcccugauuaa

SEQ ID NO: 2293697 - RNA, 19 nt, Homo sapiens
  misc_RNA (1)...(19): siRNA sense strand
aguuggaggaauuggaaca

SEQ ID NO: 2293698 - RNA, 19 nt, Homo sapiens
  misc_RNA (1)...(19): siRNA sense strand
caauaagagaaaggaagua

SEQ ID NO: 2293699 - RNA, 19 nt, Homo sapiens
  misc_RNA (1)...(19): siRNA sense strand
gcugaaugucacugaacuu

SEQ ID NO: 2293700 - RNA, 19 nt, Homo sapiens
  misc_RNA (1)...(19): siRNA sense strand
gucugaaggaagaaaggaa

SEQ ID NO: 2293701 - RNA, 19 nt, Homo sapiens
  misc_RNA (1)...(19): siRNA sense strand
acaauaagagaaaggaagu

SEQ ID NO: 2293702 - RNA, 19 nt, Homo sapiens
  misc_RNA (1)...(19): siRNA sense strand
caucauucgcaauuacaaa

SEQ ID NO: 2293703 - RNA, 19 nt, Homo sapiens
  misc_RNA (1)...(19): siRNA sense strand
acaaacagaaagagcuuga

SEQ ID NO: 2293704 - RNA, 19 nt, Homo sapiens
  misc_RNA (1)...(19): siRNA sense strand
augugaaggacaagguuau

SEQ ID NO: 2293705 - RNA, 19 nt, Homo sapiens
  misc_RNA (1)...(19): siRNA sense strand
aggauaauuuucaggaaga

SEQ ID NO: 2293706 - RNA, 19 nt, Homo sapiens
  misc_RNA (1)...(19): siRNA sense strand
cuggcacagugguuagaaa

SEQ ID NO: 2293707 - RNA, 19 nt, Homo sapiens
  misc_RNA (1)...(19): siRNA sense strand
aggaaguaguucacaaaau

SEQ ID NO: 2293708 - RNA, 19 nt, Homo sapiens
  misc_RNA (1)...(19): siRNA sense strand
cagcaaggagcgagagcgu

SEQ ID NO: 2293709 - RNA, 19 nt, Homo sapiens
  misc_RNA (1)...(19): siRNA sense strand
aggaagcaccagagccaau

SEQ ID NO: 2293710 - RNA, 19 nt, Homo sapiens
  misc_RNA (1)...(19): siRNA sense strand
guguauagagcaugaaauc

SEQ ID NO: 2293711 - RNA, 19 nt, Homo sapiens
  misc_RNA (1)...(19): siRNA sense strand
aaaucaagagccuggaaga

SEQ ID NO: 2293712 - RNA, 19 nt, Homo sapiens
  misc_RNA (1)...(19): siRNA sense strand
gaacauguugggagagaag

SEQ ID NO: 2293713 - RNA, 19 nt, Homo sapiens
  misc_RNA (1)...(19): siRNA sense strand
gcguaaucuucaggauaau

SEQ ID NO: 2293714 - RNA, 19 nt, Homo sapiens
  misc_RNA (1)...(19): siRNA sense strand
gggaauauucagagcacag

SEQ ID NO: 2293715 - RNA, 19 nt, Homo sapiens
  misc_RNA (1)...(19): siRNA sense strand
agcugaacauguugggaga

SEQ ID NO: 2293716 - RNA, 19 nt, Homo sapiens
  misc_RNA (1)...(19): siRNA sense strand
cugaacauguugggagaga

SEQ ID NO: 2293717 - RNA, 19 nt, Homo sapiens
  misc_RNA (1)...(19): siRNA sense strand
ugcuugacaauaagagaaa

SEQ ID NO: 2293718 - RNA, 19 nt, Homo sapiens
  misc_RNA (1)...(19): siRNA sense strand
acaacaugcugguggcgga

SEQ ID NO: 2293719 - RNA, 19 nt, Homo sapiens
  misc_RNA (1)...(19): siRNA sense strand
aaaggaagcaccagagcca

SEQ ID NO: 2293720 - RNA, 19 nt, Homo sapiens
  misc_RNA (1)...(19): siRNA sense strand
acucaaaauuccuggagca

SEQ ID NO: 2293721 - RNA, 19 nt, Homo sapiens
  misc_RNA (1)...(19): siRNA sense strand
cuauaguugcggagagucu

SEQ ID NO: 2293722 - RNA, 19 nt, Homo sapiens
  misc_RNA (1)...(19): siRNA sense strand
cggagagucugcagcaagu

SEQ ID NO: 2293723 - RNA, 19 nt, Homo sapiens
  misc_RNA (1)...(19): siRNA sense strand
acagaaagagcuugacagu

SEQ ID NO: 2293724 - RNA, 19 nt, Homo sapiens
  misc_RNA (1)...(19): siRNA sense strand
gaauuggaacagaaauaca

SEQ ID NO: 2293725 - RNA, 19 nt, Homo sapiens
  misc_RNA (1)...(19): siRNA sense strand
uaaagaugugaaugagaga

SEQ ID NO: 2293726 - RNA, 19 nt, Homo sapiens
  misc_RNA (1)...(19): siRNA sense strand
caccagagccaauggaacu

SEQ ID NO: 2293727 - RNA, 19 nt, Homo sapiens
  misc_RNA (1)...(19): siRNA sense strand
gguacgaacuucagcagcu

SEQ ID NO: 2293728 - RNA, 19 nt, Homo sapiens
  misc_RNA (1)...(19): siRNA sense strand
gcuuggaucagcugcagaa

SEQ ID NO: 2293729 - RNA, 19 nt, Homo sapiens
  misc_RNA (1)...(19): siRNA sense strand
ggaccuuccugcugcgguu

SEQ ID NO: 2293730 - RNA, 19 nt, Homo sapiens
  misc_RNA (1)...(19): siRNA sense strand
ucacauggguggagcgguc

SEQ ID NO: 2293731 - RNA, 19 nt, Homo sapiens
  misc_RNA (1)...(19): siRNA sense strand
gcccuaaaggaacuggaua

SEQ ID NO: 2293732 - RNA, 19 nt, Homo sapiens
  misc_RNA (1)...(19): siRNA sense strand
gauauaagauccaggccaa

SEQ ID NO: 2293733 - RNA, 19 nt, Homo sapiens
  misc_RNA (1)...(19): siRNA sense strand
gggcagaacuguaggacug

SEQ ID NO: 2293734 - RNA, 19 nt, Homo sapiens
  misc_RNA (1)...(19): siRNA sense strand
cggaaauucugccgggaca

SEQ ID NO: 2293735 - RNA, 19 nt, Homo sapiens
  misc_RNA (1)...(19): siRNA sense strand
caaaguuggaggaguggaa

SEQ ID NO: 2293736 - RNA, 19 nt, Homo sapiens
  misc_RNA (1)...(19): siRNA sense strand
ugaaggagcugaagggacu

SEQ ID NO: 2293737 - RNA, 19 nt, Homo sapiens
  misc_RNA (1)...(19): siRNA sense strand
ggagaaaggaggugcugga

SEQ ID NO: 2293738 - RNA, 19 nt, Homo sapiens
  misc_RNA (1)...(19): siRNA sense strand
ccaggaaggcaaugaguca

SEQ ID NO: 2293739 - RNA, 19 nt, Homo sapiens
  misc_RNA (1)...(19): siRNA sense strand
aggaaauaccugaaacaca

SEQ ID NO: 2293740 - RNA, 19 nt, Homo sapiens
  misc_RNA (1)...(19): siRNA sense strand
ugauggagaagcugguaaa

SEQ ID NO: 2293741 - RNA, 19 nt, Homo sapiens
  misc_RNA (1)...(19): siRNA sense strand
agaccaaagagcagaagau

SEQ ID NO: 2293742 - RNA, 19 nt, Homo sapiens
  misc_RNA (1)...(19): siRNA sense strand
acaccguggaugagguuua

SEQ ID NO: 2293743 - RNA, 19 nt, Homo sapiens
  misc_RNA (1)...(19): siRNA sense strand
cgaacaaggcugcugguga

SEQ ID NO: 2293744 - RNA, 19 nt, Homo sapiens
  misc_RNA (1)...(19): siRNA sense strand
gcuacuaccaggagaaagu

SEQ ID NO: 2293745 - RNA, 19 nt, Homo sapiens
  misc_RNA (1)...(19): siRNA sense strand
agugaugauuccaaggcua

SEQ ID NO: 2293746 - RNA, 19 nt, Homo sapiens
  misc_RNA (1)...(19): siRNA sense strand
uugaagaaaucaugccgaa

SEQ ID NO: 2293747 - RNA, 19 nt, Homo sapiens
  misc_RNA (1)...(19): siRNA sense strand
ugacagaggaacugcacau

SEQ ID NO: 2293748 - RNA, 19 nt, Homo sapiens
  misc_RNA (1)...(19): siRNA sense strand
gggcuaugauggagaagcu

SEQ ID NO: 2293749 - RNA, 19 nt, Homo sapiens
  misc_RNA (1)...(19): siRNA sense strand
aaacagugccagagccaga

SEQ ID NO: 2293750 - RNA, 19 nt, Homo sapiens
  misc_RNA (1)...(19): siRNA sense strand
cuguguaaagauugaagaa

SEQ ID NO: 2293751 - RNA, 19 nt, Homo sapiens
  misc_RNA (1)...(19): siRNA sense strand
auggaaaucuucagaaacu

SEQ ID NO: 2293752 - RNA, 19 nt, Homo sapiens
  misc_RNA (1)...(19): siRNA sense strand
acuuagagccacugcugaa

SEQ ID NO: 2293753 - RNA, 19 nt, Homo sapiens
  misc_RNA (1)...(19): siRNA sense strand
ggaaauaccugaaacacag

SEQ ID NO: 2293754 - RNA, 19 nt, Homo sapiens
  misc_RNA (1)...(19): siRNA sense strand
ggugcuacuaccaggagaa

SEQ ID NO: 2293755 - RNA, 19 nt, Homo sapiens
  misc_RNA (1)...(19): siRNA sense strand
gagccagcaacaugagauu

SEQ ID NO: 2293756 - RNA, 19 nt, Homo sapiens
  misc_RNA (1)...(19): siRNA sense strand
agaccaaggaccuguauca

SEQ ID NO: 2293757 - RNA, 19 nt, Homo sapiens
  misc_RNA (1)...(19): siRNA sense strand
cgauauaagauccaggcca

SEQ ID NO: 2293758 - RNA, 19 nt, Homo sapiens
  misc_RNA (1)...(19): siRNA sense strand
agcugagcaugcugagaaa

SEQ ID NO: 2293759 - RNA, 19 nt, Homo sapiens
  misc_RNA (1)...(19): siRNA sense strand
aggaugacccucugaccaa

SEQ ID NO: 2293760 - RNA, 19 nt, Homo sapiens
  misc_RNA (1)...(19): siRNA sense strand
caucaugggcuuugugagu

SEQ ID NO: 2293761 - RNA, 19 nt, Homo sapiens
  misc_RNA (1)...(19): siRNA sense strand
gaacaaggcugcuggugag

SEQ ID NO: 2293762 - RNA, 19 nt, Homo sapiens
  misc_RNA (1)...(19): siRNA sense strand
ccgagaaggggcagaguca

SEQ ID NO: 2293763 - RNA, 19 nt, Homo sapiens
  misc_RNA (1)...(19): siRNA sense strand
agugggaaaugcugcagaa

SEQ ID NO: 2293764 - RNA, 19 nt, Homo sapiens
  misc_RNA (1)...(19): siRNA sense strand
cugagcaugcugagaaaca

SEQ ID NO: 2293765 - RNA, 19 nt, Homo sapiens
  misc_RNA (1)...(19): siRNA sense strand
gaacuggacaaaaggagaa

SEQ ID NO: 2293766 - RNA, 19 nt, Homo sapiens
  misc_RNA (1)...(19): siRNA sense strand
guucaggugguucaggaaa

SEQ ID NO: 2293767 - RNA, 19 nt, Homo sapiens
  misc_RNA (1)...(19): siRNA sense strand
ucucaaugaacuggacaaa

SEQ ID NO: 2293768 - RNA, 19 nt, Homo sapiens
  misc_RNA (1)...(19): siRNA sense strand
uggaaggcccagcagcaaa

SEQ ID NO: 2293769 - RNA, 19 nt, Homo sapiens
  misc_RNA (1)...(19): siRNA sense strand
gucugaagcaggagcugaa

SEQ ID NO: 2293770 - RNA, 19 nt, Homo sapiens
  misc_RNA (1)...(19): siRNA sense strand
cccaauuggaacaaggaga

SEQ ID NO: 2293771 - RNA, 19 nt, Homo sapiens
  misc_RNA (1)...(19): siRNA sense strand
gggcagagucaggguuuga

SEQ ID NO: 2293772 - RNA, 19 nt, Homo sapiens
  misc_RNA (1)...(19): siRNA sense strand
cuucagaaacuguguaaag

SEQ ID NO: 2293773 - RNA, 19 nt, Homo sapiens
  misc_RNA (1)...(19): siRNA sense strand
gguaaaauccaucagccaa

SEQ ID NO: 2293774 - RNA, 19 nt, Homo sapiens
  misc_RNA (1)...(19): siRNA sense strand
gaaaggaggugcuggaugc

SEQ ID NO: 2293775 - RNA, 19 nt, Homo sapiens
  misc_RNA (1)...(19): siRNA sense strand
agucauuagagcuggaacu

SEQ ID NO: 2293776 - RNA, 19 nt, Homo sapiens
  misc_RNA (1)...(19): siRNA sense strand
acaaacagugccagagcca

SEQ ID NO: 2293777 - RNA, 19 nt, Homo sapiens
  misc_RNA (1)...(19): siRNA sense strand
cagaguugcuacagcgucu

SEQ ID NO: 2293778 - RNA, 19 nt, Homo sapiens
  misc_RNA (1)...(19): siRNA sense strand
gcaaauauuacgagcccaa

SEQ ID NO: 2293779 - RNA, 19 nt, Homo sapiens
  misc_RNA (1)...(19): siRNA sense strand
auggaagagucaagguuaa

SEQ ID NO: 2293780 - RNA, 19 nt, Homo sapiens
  misc_RNA (1)...(19): siRNA sense strand
gugcgaacccaaaggcaaa

SEQ ID NO: 2293781 - RNA, 19 nt, Homo sapiens
  misc_RNA (1)...(19): siRNA sense strand
gcccagaguacuuggaaau

SEQ ID NO: 2293782 - RNA, 19 nt, Homo sapiens
  misc_RNA (1)...(19): siRNA sense strand
ccauuggcaucgaggagaa

SEQ ID NO: 2293783 - RNA, 19 nt, Homo sapiens
  misc_RNA (1)...(19): siRNA sense strand
caguggaggugaauggcua

SEQ ID NO: 2293784 - RNA, 19 nt, Homo sapiens
  misc_RNA (1)...(19): siRNA sense strand
gcacgaucaauguggaauu

SEQ ID NO: 2293785 - RNA, 19 nt, Homo sapiens
  misc_RNA (1)...(19): siRNA sense strand
ccaccaaggacaucaggaa

SEQ ID NO: 2293786 - RNA, 19 nt, Homo sapiens
  misc_RNA (1)...(19): siRNA sense strand
guguggaggccaagaauga

SEQ ID NO: 2293787 - RNA, 19 nt, Homo sapiens
  misc_RNA (1)...(19): siRNA sense strand
caacaaaugcuaugccaca

SEQ ID NO: 2293788 - RNA, 19 nt, Homo sapiens
  misc_RNA (1)...(19): siRNA sense strand
ccgucuacuucuacauuaa

SEQ ID NO: 2293789 - RNA, 19 nt, Homo sapiens
  misc_RNA (1)...(19): siRNA sense strand
cuggaaauuuaucgaaaca

SEQ ID NO: 2293790 - RNA, 19 nt, Homo sapiens
  misc_RNA (1)...(19): siRNA sense strand
ggcaagagcugcagagccu

SEQ ID NO: 2293791 - RNA, 19 nt, Homo sapiens
  misc_RNA (1)...(19): siRNA sense strand
gguuaaugaccuagugacu

SEQ ID NO: 2293792 - RNA, 19 nt, Homo sapiens
  misc_RNA (1)...(19): siRNA sense strand
gcuacaaccacaagaaguu

SEQ ID NO: 2293793 - RNA, 19 nt, Homo sapiens
  misc_RNA (1)...(19): siRNA sense strand
ccaaacagccauuacgaga

SEQ ID NO: 2293794 - RNA, 19 nt, Homo sapiens
  misc_RNA (1)...(19): siRNA sense strand
caucauugaaggagggugu

SEQ ID NO: 2293795 - RNA, 19 nt, Homo sapiens
  misc_RNA (1)...(19): siRNA sense strand
cgacaguguuugcagacuu

SEQ ID NO: 2293796 - RNA, 19 nt, Homo sapiens
  misc_RNA (1)...(19): siRNA sense strand
aagccuaugcuaaguguaa

SEQ ID NO: 2293797 - RNA, 19 nt, Homo sapiens
  misc_RNA (1)...(19): siRNA sense strand
ggguuaagcagguggacgu

SEQ ID NO: 2293798 - RNA, 19 nt, Homo sapiens
  misc_RNA (1)...(19): siRNA sense strand
ggugaauggcuacaagauu

SEQ ID NO: 2293799 - RNA, 19 nt, Homo sapiens
  misc_RNA (1)...(19): siRNA sense strand
ggucaagauaggaggcauc

SEQ ID NO: 2293800 - RNA, 19 nt, Homo sapiens
  misc_RNA (1)...(19): siRNA sense strand
cugcaaggaugaugaguac

SEQ ID NO: 2293801 - RNA, 19 nt, Homo sapiens
  misc_RNA (1)...(19): siRNA sense strand
ggucaaggugaauggcaca

SEQ ID NO: 2293802 - RNA, 19 nt, Homo sapiens
  misc_RNA (1)...(19): siRNA sense strand
gggauuacgacgaaguuca

SEQ ID NO: 2293803 - RNA, 19 nt, Homo sapiens
  misc_RNA (1)...(19): siRNA sense strand
gagaucuauuacagagaga

SEQ ID NO: 2293804 - RNA, 19 nt, Homo sapiens
  misc_RNA (1)...(19): siRNA sense strand
agggaauuguggaaacauu

SEQ ID NO: 2293805 - RNA, 19 nt, Homo sapiens
  misc_RNA (1)...(19): siRNA sense strand
gugcagugcccgagcuuca

SEQ ID NO: 2293806 - RNA, 19 nt, Homo sapiens
  misc_RNA (1)...(19): siRNA sense strand
ucaaugugcuagugagcca

SEQ ID NO: 2293807 - RNA, 19 nt, Homo sapiens
  misc_RNA (1)...(19): siRNA sense strand
ccugcaaggaugaugagua

SEQ ID NO: 2293808 - RNA, 19 nt, Homo sapiens
  misc_RNA (1)...(19): siRNA sense strand
gugcuuaugagcuggauau

SEQ ID NO: 2293809 - RNA, 19 nt, Homo sapiens
  misc_RNA (1)...(19): siRNA sense strand
cgcccagaguacuuggaaa

SEQ ID NO: 2293810 - RNA, 19 nt, Homo sapiens
  misc_RNA (1)...(19): siRNA sense strand
uccagaagaugcaggguga

SEQ ID NO: 2293811 - RNA, 19 nt, Homo sapiens
  misc_RNA (1)...(19): siRNA sense strand
ggugauggcuacugccuga

SEQ ID NO: 2293812 - RNA, 19 nt, Homo sapiens
  misc_RNA (1)...(19): siRNA sense strand
guauaugacuggaagaccu

SEQ ID NO: 2293813 - RNA, 19 nt, Homo sapiens
  misc_RNA (1)...(19): siRNA sense strand
ccaaagggaauuguggaaa

SEQ ID NO: 2293814 - RNA, 19 nt, Homo sapiens
  misc_RNA (1)...(19): siRNA sense strand
cugucuaugucaauaacaa

SEQ ID NO: 2293815 - RNA, 19 nt, Homo sapiens
  misc_RNA (1)...(19): siRNA sense strand
gcuacguccucaacggcaa

SEQ ID NO: 2293816 - RNA, 19 nt, Homo sapiens
  misc_RNA (1)...(19): siRNA sense strand
uggacuggugugaggacaa

SEQ ID NO: 2293817 - RNA, 19 nt, Homo sapiens
  misc_RNA (1)...(19): siRNA sense strand
gaaauaacucacaugacau

SEQ ID NO: 2293818 - RNA, 19 nt, Homo sapiens
  misc_RNA (1)...(19): siRNA sense strand
agggagggcgugaggauca

SEQ ID NO: 2293819 - RNA, 19 nt, Homo sapiens
  misc_RNA (1)...(19): siRNA sense strand
ucaacaacaccaaagggaa

SEQ ID NO: 2293820 - RNA, 19 nt, Homo sapiens
  misc_RNA (1)...(19): siRNA sense strand
aggauuuaaugguggaaac

SEQ ID NO: 2293821 - RNA, 19 nt, Homo sapiens
  misc_RNA (1)...(19): siRNA sense strand
agcuggaaauuuaucgaaa

SEQ ID NO: 2293822 - RNA, 19 nt, Homo sapiens
  misc_RNA (1)...(19): siRNA sense strand
acauuaacgaagagcagau

SEQ ID NO: 2293823 - RNA, 19 nt, Homo sapiens
  misc_RNA (1)...(19): siRNA sense strand
gggaccuaacagaugauua

SEQ ID NO: 2293824 - RNA, 19 nt, Homo sapiens
  misc_RNA (1)...(19): siRNA sense strand
guugugaagccuaugcuaa

SEQ ID NO: 2293825 - RNA, 19 nt, Homo sapiens
  misc_RNA (1)...(19): siRNA sense strand
aaugauaagcuccgauauu

SEQ ID NO: 2293826 - RNA, 19 nt, Homo sapiens
  misc_RNA (1)...(19): siRNA sense strand
cagaaaaguacuccuguaa

SEQ ID NO: 2293827 - RNA, 19 nt, Homo sapiens
  misc_RNA (1)...(19): siRNA sense strand
cagauuucauuauggcauu

SEQ ID NO: 2293828 - RNA, 19 nt, Homo sapiens
  misc_RNA (1)...(19): siRNA sense strand
ucaccgacaugaagggcuu

SEQ ID NO: 2293829 - RNA, 19 nt, Homo sapiens
  misc_RNA (1)...(19): siRNA sense strand
gcaacgugauucagugcga

SEQ ID NO: 2293830 - RNA, 19 nt, Homo sapiens
  misc_RNA (1)...(19): siRNA sense strand
cagaugugcacaauggaau

SEQ ID NO: 2293831 - RNA, 19 nt, Homo sapiens
  misc_RNA (1)...(19): siRNA sense strand
ucuucaguguggaggccaa

SEQ ID NO: 2293832 - RNA, 19 nt, Homo sapiens
  misc_RNA (1)...(19): siRNA sense strand
aggaaguggaauugccuuu

SEQ ID NO: 2293833 - RNA, 19 nt, Homo sapiens
  misc_RNA (1)...(19): siRNA sense strand
gcugcuacuccgauggcaa

SEQ ID NO: 2293834 - RNA, 19 nt, Homo sapiens
  misc_RNA (1)...(19): siRNA sense strand
accaaagggaauuguggaa

SEQ ID NO: 2293835 - RNA, 19 nt, Homo sapiens
  misc_RNA (1)...(19): siRNA sense strand
ggaucgaaagcgccaacaa

SEQ ID NO: 2293836 - RNA, 19 nt, Homo sapiens
  misc_RNA (1)...(19): siRNA sense strand
gcaagaaugcggacgugga

SEQ ID NO: 2293837 - RNA, 19 nt, Homo sapiens
  misc_RNA (1)...(19): siRNA sense strand
cgagggaagccggugguaa

SEQ ID NO: 2293838 - RNA, 19 nt, Homo sapiens
  misc_RNA (1)...(19): siRNA sense strand
uggagaagcuggagagcga

SEQ ID NO: 2293839 - RNA, 19 nt, Homo sapiens
  misc_RNA (1)...(19): siRNA sense strand
gcacagaaccugaaggaag

SEQ ID NO: 2293840 - RNA, 19 nt, Homo sapiens
  misc_RNA (1)...(19): siRNA sense strand
cuacaagccccgagagaau

SEQ ID NO: 2293841 - RNA, 19 nt, Homo sapiens
  misc_RNA (1)...(19): siRNA sense strand
acggagacucaaagugaaa

SEQ ID NO: 2293842 - RNA, 19 nt, Homo sapiens
  misc_RNA (1)...(19): siRNA sense strand
augaauuggcacuggagaa

SEQ ID NO: 2293843 - RNA, 19 nt, Homo sapiens
  misc_RNA (1)...(19): siRNA sense strand
guuuacaggaugugcgaga

SEQ ID NO: 2293844 - RNA, 19 nt, Homo sapiens
  misc_RNA (1)...(19): siRNA sense strand
auaaggagauccagagcca

SEQ ID NO: 2293845 - RNA, 19 nt, Homo sapiens
  misc_RNA (1)...(19): siRNA sense strand
cuuccaaguaugugacgua

SEQ ID NO: 2293846 - RNA, 19 nt, Homo sapiens
  misc_RNA (1)...(19): siRNA sense strand
gcuacauggaccucacaaa

SEQ ID NO: 2293847 - RNA, 19 nt, Homo sapiens
  misc_RNA (1)...(19): siRNA sense strand
cugaauaaggagauccaga

SEQ ID NO: 2293848 - RNA, 19 nt, Homo sapiens
  misc_RNA (1)...(19): siRNA sense strand
cuggagagccuguccgaga

SEQ ID NO: 2293849 - RNA, 19 nt, Homo sapiens
  misc_RNA (1)...(19): siRNA sense strand
cuacgaaggaagcugaaca

SEQ ID NO: 2293850 - RNA, 19 nt, Homo sapiens
  misc_RNA (1)...(19): siRNA sense strand
caagagaggaguuggaccu

SEQ ID NO: 2293851 - RNA, 19 nt, Homo sapiens
  misc_RNA (1)...(19): siRNA sense strand
ccagaguaugcgacggaca

SEQ ID NO: 2293852 - RNA, 19 nt, Homo sapiens
  misc_RNA (1)...(19): siRNA sense strand
gugacguaguccugaacca

SEQ ID NO: 2293853 - RNA, 19 nt, Homo sapiens
  misc_RNA (1)...(19): siRNA sense strand
gggacagcgcaucgagaaa

SEQ ID NO: 2293854 - RNA, 19 nt, Homo sapiens
  misc_RNA (1)...(19): siRNA sense strand
agaagagaaucguggggaa

SEQ ID NO: 2293855 - RNA, 19 nt, Homo sapiens
  misc_RNA (1)...(19): siRNA sense strand
cggaagaagacccaggaga

SEQ ID NO: 2293856 - RNA, 19 nt, Homo sapiens
  misc_RNA (1)...(19): siRNA sense strand
aggagaaagaugaugacau

SEQ ID NO: 2293857 - RNA, 19 nt, Homo sapiens
  misc_RNA (1)...(19): siRNA sense strand
ggagauggugagugggaac

SEQ ID NO: 2293858 - RNA, 19 nt, Homo sapiens
  misc_RNA (1)...(19): siRNA sense strand
agugggaacgugaggguga

SEQ ID NO: 2293859 - RNA, 19 nt, Homo sapiens
  misc_RNA (1)...(19): siRNA sense strand
aggacuucguggagagugu

SEQ ID NO: 2293860 - RNA, 19 nt, Homo sapiens
  misc_RNA (1)...(19): siRNA sense strand
agagaaucguggggaauaa

SEQ ID NO: 2293861 - RNA, 19 nt, Homo sapiens
  misc_RNA (1)...(19): siRNA sense strand
ccauccugcccaagaacaa

SEQ ID NO: 2293862 - RNA, 19 nt, Homo sapiens
  misc_RNA (1)...(19): siRNA sense strand
ccagcgaagaauuugacaa

SEQ ID NO: 2293863 - RNA, 19 nt, Homo sapiens
  misc_RNA (1)...(19): siRNA sense strand
accaacggaaagagguaaa

SEQ ID NO: 2293864 - RNA, 19 nt, Homo sapiens
  misc_RNA (1)...(19): siRNA sense strand
cguggguaaugaugcggaa

SEQ ID NO: 2293865 - RNA, 19 nt, Homo sapiens
  misc_RNA (1)...(19): siRNA sense strand
uguucaacucagagacaca

SEQ ID NO: 2293866 - RNA, 19 nt, Homo sapiens
  misc_RNA (1)...(19): siRNA sense strand
agacaagagaauugaagaa

SEQ ID NO: 2293867 - RNA, 19 nt, Homo sapiens
  misc_RNA (1)...(19): siRNA sense strand
cggaaggcgacgagaucua

SEQ ID NO: 2293868 - RNA, 19 nt, Homo sapiens
  misc_RNA (1)...(19): siRNA sense strand
ugaacgaggucaagcgaga

SEQ ID NO: 2293869 - RNA, 19 nt, Homo sapiens
  misc_RNA (1)...(19): siRNA sense strand
guaccggaucacagagaaa

SEQ ID NO: 2293870 - RNA, 19 nt, Homo sapiens
  misc_RNA (1)...(19): siRNA sense strand
gaacagaacuggugggagg

SEQ ID NO: 2293871 - RNA, 19 nt, Homo sapiens
  misc_RNA (1)...(19): siRNA sense strand
ggaacuaugaagaaggaca

SEQ ID NO: 2293872 - RNA, 19 nt, Homo sapiens
  misc_RNA (1)...(19): siRNA sense strand
ucacgaaggcugaggcuga

SEQ ID NO: 2293873 - RNA, 19 nt, Homo sapiens
  misc_RNA (1)...(19): siRNA sense strand
ccaccgaggaggagagugu

SEQ ID NO: 2293874 - RNA, 19 nt, Homo sapiens
  misc_RNA (1)...(19): siRNA sense strand
aggcgauggagaaggagaa

SEQ ID NO: 2293875 - RNA, 19 nt, Homo sapiens
  misc_RNA (1)...(19): siRNA sense strand
gcccaagaugacagaguau

SEQ ID NO: 2293876 - RNA, 19 nt, Homo sapiens
  misc_RNA (1)...(19): siRNA sense strand
caggagaccgagacaacaa

SEQ ID NO: 2293877 - RNA, 19 nt, Homo sapiens
  misc_RNA (1)...(19): siRNA sense strand
aggcugaggcugaacagaa

SEQ ID NO: 2293878 - RNA, 19 nt, Homo sapiens
  misc_RNA (1)...(19): siRNA sense strand
cgcaggaggcgauggagaa

SEQ ID NO: 2293879 - RNA, 19 nt, Homo sapiens
  misc_RNA (1)...(19): siRNA sense strand
cggcagagggugaaggaug

SEQ ID NO: 2293880 - RNA, 19 nt, Homo sapiens
  misc_RNA (1)...(19): siRNA sense strand
cuuaagaacauuagaaccu

SEQ ID NO: 2293881 - RNA, 19 nt, Homo sapiens
  misc_RNA (1)...(19): siRNA sense strand
cagaaggacuguaccggau

SEQ ID NO: 2293882 - RNA, 19 nt, Homo sapiens
  misc_RNA (1)...(19): siRNA sense strand
acacgguggaggaggauga

SEQ ID NO: 2293883 - RNA, 19 nt, Homo sapiens
  misc_RNA (1)...(19): siRNA sense strand
uggugggagggcagaaaua

SEQ ID NO: 2293884 - RNA, 19 nt, Homo sapiens
  misc_RNA (1)...(19): siRNA sense strand
cagagagcauccuggccaa

SEQ ID NO: 2293885 - RNA, 19 nt, Homo sapiens
  misc_RNA (1)...(19): siRNA sense strand
acuacguggaggaagauua

SEQ ID NO: 2293886 - RNA, 19 nt, Homo sapiens
  misc_RNA (1)...(19): siRNA sense strand
gcgacgagaucuaugagga

SEQ ID NO: 2293887 - RNA, 19 nt, Homo sapiens
  misc_RNA (1)...(19): siRNA sense strand
cuucaagacaagagaauug

SEQ ID NO: 2293888 - RNA, 19 nt, Homo sapiens
  misc_RNA (1)...(19): siRNA sense strand
augacugcguggagaauga

SEQ ID NO: 2293889 - RNA, 19 nt, Homo sapiens
  misc_RNA (1)...(19): siRNA sense strand
uuguaaaccugcacagcuu

SEQ ID NO: 2293890 - RNA, 19 nt, Homo sapiens
  misc_RNA (1)...(19): siRNA sense strand
gggugaaggaugcagcaga

SEQ ID NO: 2293891 - RNA, 19 nt, Homo sapiens
  misc_RNA (1)...(19): siRNA sense strand
acgucgaggucaagcacau

SEQ ID NO: 2293892 - RNA, 19 nt, Homo sapiens
  misc_RNA (1)...(19): siRNA sense strand
ucuucgaugugcaggauuu

SEQ ID NO: 2293893 - RNA, 19 nt, Homo sapiens
  misc_RNA (1)...(19): siRNA sense strand
ccaagauggagguguuuca

SEQ ID NO: 2293894 - RNA, 19 nt, Homo sapiens
  misc_RNA (1)...(19): siRNA sense strand
uguaugacugcguggagaa

SEQ ID NO: 2293895 - RNA, 19 nt, Homo sapiens
  misc_RNA (1)...(19): siRNA sense strand
acgcaggaggcgauggaga

SEQ ID NO: 2293896 - RNA, 19 nt, Homo sapiens
  misc_RNA (1)...(19): siRNA sense strand
cgauggagaaggagaaccu

SEQ ID NO: 2293897 - RNA, 19 nt, Homo sapiens
  misc_RNA (1)...(19): siRNA sense strand
ggacuuucuuggugcggca

SEQ ID NO: 2293898 - RNA, 19 nt, Homo sapiens
  misc_RNA (1)...(19): siRNA sense strand
aggaugaggaccuguauga

SEQ ID NO: 2293899 - RNA, 19 nt, Homo sapiens
  misc_RNA (1)...(19): siRNA sense strand
cuaaaggagaugaaggaag

SEQ ID NO: 2293900 - RNA, 19 nt, Homo sapiens
  misc_RNA (1)...(19): siRNA sense strand
guaccuucuaucagggcua

SEQ ID NO: 2293901 - RNA, 19 nt, Homo sapiens
  misc_RNA (1)...(19): siRNA sense strand
gggugaagcccuaugucca

SEQ ID NO: 2293902 - RNA, 19 nt, Homo sapiens
  misc_RNA (1)...(19): siRNA sense strand
aaucaugacagcagaagga

SEQ ID NO: 2293903 - RNA, 19 nt, Homo sapiens
  misc_RNA (1)...(19): siRNA sense strand
cagaugaagcuggaggaau

SEQ ID NO: 2293904 - RNA, 19 nt, Homo sapiens
  misc_RNA (1)...(19): siRNA sense strand
gccaacaacgggagguuca

SEQ ID NO: 2293905 - RNA, 19 nt, Homo sapiens
  misc_RNA (1)...(19): siRNA sense strand
acaacgagacacugcgaca

SEQ ID NO: 2293906 - RNA, 19 nt, Homo sapiens
  misc_RNA (1)...(19): siRNA sense strand
gaauugaagaagaagugga

SEQ ID NO: 2293907 - RNA, 19 nt, Homo sapiens
  misc_RNA (1)...(19): siRNA sense strand
aagaagaaguggauggagc

SEQ ID NO: 2293908 - RNA, 19 nt, Homo sapiens
  misc_RNA (1)...(19): siRNA sense strand
agaagaaguggauggagca

SEQ ID NO: 2293909 - RNA, 19 nt, Homo sapiens
  misc_RNA (1)...(19): siRNA sense strand
acgacacgguggaggagga

SEQ ID NO: 2293910 - RNA, 19 nt, Homo sapiens
  misc_RNA (1)...(19): siRNA sense strand
ccauugagaaccuggacca

SEQ ID NO: 2293911 - RNA, 19 nt, Homo sapiens
  misc_RNA (1)...(19): siRNA sense strand
ccucaaggacuuuguaaac

SEQ ID NO: 2293912 - RNA, 19 nt, Homo sapiens
  misc_RNA (1)...(19): siRNA sense strand
gggaugacucuucaggaga

SEQ ID NO: 2293913 - RNA, 19 nt, Homo sapiens
  misc_RNA (1)...(19): siRNA sense strand
aggaggagaguguagguga

SEQ ID NO: 2293914 - RNA, 19 nt, Homo sapiens
  misc_RNA (1)...(19): siRNA sense strand
gcagaugaagcuggaggaa

SEQ ID NO: 2293915 - RNA, 19 nt, Homo sapiens
  misc_RNA (1)...(19): siRNA sense strand
cuaugaagaaggacaaacu

SEQ ID NO: 2293916 - RNA, 19 nt, Homo sapiens
  misc_RNA (1)...(19): siRNA sense strand
agugggaagcacaaaguau

SEQ ID NO: 2293917 - RNA, 19 nt, Homo sapiens
  misc_RNA (1)...(19): siRNA sense strand
gcaaguggcaguuccggaa

SEQ ID NO: 2293918 - RNA, 19 nt, Homo sapiens
  misc_RNA (1)...(19): siRNA sense strand
cggaaucgccgcuggaacu

SEQ ID NO: 2293919 - RNA, 19 nt, Homo sapiens
  misc_RNA (1)...(19): siRNA sense strand
cgucaauggaggagaaagu

SEQ ID NO: 2293920 - RNA, 19 nt, Homo sapiens
  misc_RNA (1)...(19): siRNA sense strand
cuugaaagaaauagaacca

SEQ ID NO: 2293921 - RNA, 19 nt, Homo sapiens
  misc_RNA (1)...(19): siRNA sense strand
cccagaaggaacaggaaaa

SEQ ID NO: 2293922 - RNA, 19 nt, Homo sapiens
  misc_RNA (1)...(19): siRNA sense strand
cccaaagcucugaagaaau

SEQ ID NO: 2293923 - RNA, 19 nt, Homo sapiens
  misc_RNA (1)...(19): siRNA sense strand
acacaaacuauaaugcaga

SEQ ID NO: 2293924 - RNA, 19 nt, Homo sapiens
  misc_RNA (1)...(19): siRNA sense strand
agaaagugggguugaauuu

SEQ ID NO: 2293925 - RNA, 19 nt, Homo sapiens
  misc_RNA (1)...(19): siRNA sense strand
cagaaaugcuuuaucaccu

SEQ ID NO: 2293926 - RNA, 19 nt, Homo sapiens
  misc_RNA (1)...(19): siRNA sense strand
ugacagaggccauggagga

SEQ ID NO: 2293927 - RNA, 19 nt, Homo sapiens
  misc_RNA (1)...(19): siRNA sense strand
ccaaacugaaaucgguaaa

SEQ ID NO: 2293928 - RNA, 19 nt, Homo sapiens
  misc_RNA (1)...(19): siRNA sense strand
gcacugacguuccaggaga

SEQ ID NO: 2293929 - RNA, 19 nt, Homo sapiens
  misc_RNA (1)...(19): siRNA sense strand
ggaccagacuugaagagac

SEQ ID NO: 2293930 - RNA, 19 nt, Homo sapiens
  misc_RNA (1)...(19): siRNA sense strand
ugaaaucgguaaaggaggu

SEQ ID NO: 2293931 - RNA, 19 nt, Homo sapiens
  misc_RNA (1)...(19): siRNA sense strand
acuugaagagacugaccaa

SEQ ID NO: 2293932 - RNA, 19 nt, Homo sapiens
  misc_RNA (1)...(19): siRNA sense strand
uggugagacugcuggcuga

SEQ ID NO: 2293933 - RNA, 19 nt, Homo sapiens
  misc_RNA (1)...(19): siRNA sense strand
gcaaaagaugcuugggaaa

SEQ ID NO: 2293934 - RNA, 19 nt, Homo sapiens
  misc_RNA (1)...(19): siRNA sense strand
ccgugaaguacuagaacaa

SEQ ID NO: 2293935 - RNA, 19 nt, Homo sapiens
  misc_RNA (1)...(19): siRNA sense strand
aguaagagagagugaaaca

SEQ ID NO: 2293936 - RNA, 19 nt, Homo sapiens
  misc_RNA (1)...(19): siRNA sense strand
uggaaaucaacgagguauu

SEQ ID NO: 2293937 - RNA, 19 nt, Homo sapiens
  misc_RNA (1)...(19): siRNA sense strand
uuaaggaaggagauggaaa

SEQ ID NO: 2293938 - RNA, 19 nt, Homo sapiens
  misc_RNA (1)...(19): siRNA sense strand
gaagcaagaucaaucgcua

SEQ ID NO: 2293939 - RNA, 19 nt, Homo sapiens
  misc_RNA (1)...(19): siRNA sense strand
ugcagaaauuggugaaaca

SEQ ID NO: 2293940 - RNA, 19 nt, Homo sapiens
  misc_RNA (1)...(19): siRNA sense strand
gacucaaggucuagcaaaa

SEQ ID NO: 2293941 - RNA, 19 nt, Homo sapiens
  misc_RNA (1)...(19): siRNA sense strand
uuaguaagagagagugaaa

SEQ ID NO: 2293942 - RNA, 19 nt, Homo sapiens
  misc_RNA (1)...(19): siRNA sense strand
uaucacaaccagagcacaa

SEQ ID NO: 2293943 - RNA, 19 nt, Homo sapiens
  misc_RNA (1)...(19): siRNA sense strand
ggaaggagauuggugggaa

SEQ ID NO: 2293944 - RNA, 19 nt, Homo sapiens
  misc_RNA (1)...(19): siRNA sense strand
cuaauauucuuguaggaga

SEQ ID NO: 2293945 - RNA, 19 nt, Homo sapiens
  misc_RNA (1)...(19): siRNA sense strand
gguuaaacuaggacaagga

SEQ ID NO: 2293946 - RNA, 19 nt, Homo sapiens
  misc_RNA (1)...(19): siRNA sense strand
ggaaaguauuugaagcuuc

SEQ ID NO: 2293947 - RNA, 19 nt, Homo sapiens
  misc_RNA (1)...(19): siRNA sense strand
gugaaguacuagaacaagu

SEQ ID NO: 2293948 - RNA, 19 nt, Homo sapiens
  misc_RNA (1)...(19): siRNA sense strand
cuacagagccacaguacca

SEQ ID NO: 2293949 - RNA, 19 nt, Homo sapiens
  misc_RNA (1)...(19): siRNA sense strand
cuuugcgacuagagguuaa

SEQ ID NO: 2293950 - RNA, 19 nt, Homo sapiens
  misc_RNA (1)...(19): siRNA sense strand
ggcgaaguguggaugggaa

SEQ ID NO: 2293951 - RNA, 19 nt, Homo sapiens
  misc_RNA (1)...(19): siRNA sense strand
uaacaauacggaaggagau

SEQ ID NO: 2293952 - RNA, 19 nt, Homo sapiens
  misc_RNA (1)...(19): siRNA sense strand
gugcaaaauagcagacuuu

SEQ ID NO: 2293953 - RNA, 19 nt, Homo sapiens
  misc_RNA (1)...(19): siRNA sense strand
gaacaaguggagcgaggau

SEQ ID NO: 2293954 - RNA, 19 nt, Homo sapiens
  misc_RNA (1)...(19): siRNA sense strand
caaugaauacacagcaaga

SEQ ID NO: 2293955 - RNA, 19 nt, Homo sapiens
  misc_RNA (1)...(19): siRNA sense strand
auuuaagaagggugaaaga

SEQ ID NO: 2293956 - RNA, 19 nt, Homo sapiens
  misc_RNA (1)...(19): siRNA sense strand
agagagagugaaacaacua

SEQ ID NO: 2293957 - RNA, 19 nt, Homo sapiens
  misc_RNA (1)...(19): siRNA sense strand
agagguuaaacuaggacaa

SEQ ID NO: 2293958 - RNA, 19 nt, Homo sapiens
  misc_RNA (1)...(19): siRNA sense strand
cugcaaacagaacuaguaa

SEQ ID NO: 2293959 - RNA, 19 nt, Homo sapiens
  misc_RNA (1)...(19): siRNA sense strand
cauuaaauacagaccugaa

SEQ ID NO: 2293960 - RNA, 19 nt, Homo sapiens
  misc_RNA (1)...(19): siRNA sense strand
ucauuuaagaagggugaaa

SEQ ID NO: 2293961 - RNA, 19 nt, Homo sapiens
  misc_RNA (1)...(19): siRNA sense strand
gaaggagauuggugggaag

SEQ ID NO: 2293962 - RNA, 19 nt, Homo sapiens
  misc_RNA (1)...(19): siRNA sense strand
cugugaaaccucagacuca

SEQ ID NO: 2293963 - RNA, 19 nt, Homo sapiens
  misc_RNA (1)...(19): siRNA sense strand
aguacaagugugagccauu

SEQ ID NO: 2293964 - RNA, 19 nt, Homo sapiens
  misc_RNA (1)...(19): siRNA sense strand
ccuggaaaucaacgaggua

SEQ ID NO: 2293965 - RNA, 19 nt, Homo sapiens
  misc_RNA (1)...(19): siRNA sense strand
caaugaugccagaagcuuu

SEQ ID NO: 2293966 - RNA, 19 nt, Homo sapiens
  misc_RNA (1)...(19): siRNA sense strand
augaaucuguguuggaaga

SEQ ID NO: 2293967 - RNA, 19 nt, Homo sapiens
  misc_RNA (1)...(19): siRNA sense strand
uuaugaagcuagaacuaca

SEQ ID NO: 2293968 - RNA, 19 nt, Homo sapiens
  misc_RNA (1)...(19): siRNA sense strand
gcugaugguuuaugccaca

SEQ ID NO: 2293969 - RNA, 19 nt, Homo sapiens
  misc_RNA (1)...(19): siRNA sense strand
guggaugggaacauggaau

SEQ ID NO: 2293970 - RNA, 19 nt, Homo sapiens
  misc_RNA (1)...(19): siRNA sense strand
cuauauucaccgagaucuu

SEQ ID NO: 2293971 - RNA, 19 nt, Homo sapiens
  misc_RNA (1)...(19): siRNA sense strand
uucaagaagcucagauaau

SEQ ID NO: 2293972 - RNA, 19 nt, Homo sapiens
  misc_RNA (1)...(19): siRNA sense strand
gugcaaaauuuccaaucaa

SEQ ID NO: 2293973 - RNA, 19 nt, Homo sapiens
  misc_RNA (1)...(19): siRNA sense strand
ugaugaaagaccaacauuu

SEQ ID NO: 2293974 - RNA, 19 nt, Homo sapiens
  misc_RNA (1)...(19): siRNA sense strand
cagcaagacaaggugcaaa

SEQ ID NO: 2293975 - RNA, 19 nt, Homo sapiens
  misc_RNA (1)...(19): siRNA sense strand
agaucaaucgcuacaggaa

SEQ ID NO: 2293976 - RNA, 19 nt, Homo sapiens
  misc_RNA (1)...(19): siRNA sense strand
gagcaauuauguagcgccu

SEQ ID NO: 2293977 - RNA, 19 nt, Homo sapiens
  misc_RNA (1)...(19): siRNA sense strand
ugagauaaggggugacaau

SEQ ID NO: 2293978 - RNA, 19 nt, Homo sapiens
  misc_RNA (1)...(19): siRNA sense strand
uuaacaauacggaaggaga

SEQ ID NO: 2293979 - RNA, 19 nt, Homo sapiens
  misc_RNA (1)...(19): siRNA sense strand
ucgugauugggaugagaua

SEQ ID NO: 2293980 - RNA, 19 nt, Homo sapiens
  misc_RNA (1)...(19): siRNA sense strand
aggaaagaaugguuauauc

SEQ ID NO: 2293981 - RNA, 19 nt, Homo sapiens
  misc_RNA (1)...(19): siRNA sense strand
gugaaacacuacacagaac

SEQ ID NO: 2293982 - RNA, 19 nt, Homo sapiens
  misc_RNA (1)...(19): siRNA sense strand
gaaaaucuugugugcaaaa

SEQ ID NO: 2293983 - RNA, 19 nt, Homo sapiens
  misc_RNA (1)...(19): siRNA sense strand
guaccagccaggagaaaau

SEQ ID NO: 2293984 - RNA, 19 nt, Homo sapiens
  misc_RNA (1)...(19): siRNA sense strand
augaauacacagcaagaca

SEQ ID NO: 2293985 - RNA, 19 nt, Homo sapiens
  misc_RNA (1)...(19): siRNA sense strand
cuucacugcuacagagcca

SEQ ID NO: 2293986 - RNA, 19 nt, Homo sapiens
  misc_RNA (1)...(19): siRNA sense strand
agagagugaaacaacuaaa

SEQ ID NO: 2293987 - RNA, 19 nt, Homo sapiens
  misc_RNA (1)...(19): siRNA sense strand
agaagaaaggagugaguau

SEQ ID NO: 2293988 - RNA, 19 nt, Homo sapiens
  misc_RNA (1)...(19): siRNA sense strand
agaaagucccaguggaaau

SEQ ID NO: 2293989 - RNA, 19 nt, Homo sapiens
  misc_RNA (1)...(19): siRNA sense strand
cccagaaaucagagggcaa

SEQ ID NO: 2293990 - RNA, 19 nt, Homo sapiens
  misc_RNA (1)...(19): siRNA sense strand
cuagcaaaggaaagaauaa

SEQ ID NO: 2293991 - RNA, 19 nt, Homo sapiens
  misc_RNA (1)...(19): siRNA sense strand
ggaacaaacaguagaacgu

SEQ ID NO: 2293992 - RNA, 19 nt, Homo sapiens
  misc_RNA (1)...(19): siRNA sense strand
cgacgaaaauggaaacaau

SEQ ID NO: 2293993 - RNA, 19 nt, Homo sapiens
  misc_RNA (1)...(19): siRNA sense strand
aguuauugggaaaggaaau

SEQ ID NO: 2293994 - RNA, 19 nt, Homo sapiens
  misc_RNA (1)...(19): siRNA sense strand
uguagaaagcguagagagu

SEQ ID NO: 2293995 - RNA, 19 nt, Homo sapiens
  misc_RNA (1)...(19): siRNA sense strand
ggaggaagacagaugccaa

SEQ ID NO: 2293996 - RNA, 19 nt, Homo sapiens
  misc_RNA (1)...(19): siRNA sense strand
ugaugauucuguagccaaa

SEQ ID NO: 2293997 - RNA, 19 nt, Homo sapiens
  misc_RNA (1)...(19): siRNA sense strand
aaguagaccaggauggcaa

SEQ ID NO: 2293998 - RNA, 19 nt, Homo sapiens
  misc_RNA (1)...(19): siRNA sense strand
gcaccugaugauuaagaaa

SEQ ID NO: 2293999 - RNA, 19 nt, Homo sapiens
  misc_RNA (1)...(19): siRNA sense strand
agacaaaauucacgacgaa

SEQ ID NO: 2294000 - RNA, 19 nt, Homo sapiens
  misc_RNA (1)...(19): siRNA sense strand
aaagaauaaggcagcauaa

SEQ ID NO: 2294001 - RNA, 19 nt, Homo sapiens
  misc_RNA (1)...(19): siRNA sense strand
acaaaauucacgacgaaaa

SEQ ID NO: 2294002 - RNA, 19 nt, Homo sapiens
  misc_RNA (1)...(19): siRNA sense strand
cugaguuguucuaaggauu

SEQ ID NO: 2294003 - RNA, 19 nt, Homo sapiens
  misc_RNA (1)...(19): siRNA sense strand
gaguauggacagcgcagaa

SEQ ID NO: 2294004 - RNA, 19 nt, Homo sapiens
  misc_RNA (1)...(19): siRNA sense strand
ccagaaagugguugaguac

SEQ ID NO: 2294005 - RNA, 19 nt, Homo sapiens
  misc_RNA (1)...(19): siRNA sense strand
cagacaaucuagacaaaau

SEQ ID NO: 2294006 - RNA, 19 nt, Homo sapiens
  misc_RNA (1)...(19): siRNA sense strand
acgcaaaagcccacaggaa

SEQ ID NO: 2294007 - RNA, 19 nt, Homo sapiens
  misc_RNA (1)...(19): siRNA sense strand
ccagaagaaaggagugagu

SEQ ID NO: 2294008 - RNA, 19 nt, Homo sapiens
  misc_RNA (1)...(19): siRNA sense strand
cgggcuagacccaaagcaa

SEQ ID NO: 2294009 - RNA, 19 nt, Homo sapiens
  misc_RNA (1)...(19): siRNA sense strand
agaguaaagacuuccuaaa

SEQ ID NO: 2294010 - RNA, 19 nt, Homo sapiens
  misc_RNA (1)...(19): siRNA sense strand
ggcuagacccaaagcaaaa

SEQ ID NO: 2294011 - RNA, 19 nt, Homo sapiens
  misc_RNA (1)...(19): siRNA sense strand
caguacugcugcccagaaa

SEQ ID NO: 2294012 - RNA, 19 nt, Homo sapiens
  misc_RNA (1)...(19): siRNA sense strand
uggagaacaaugaaaguga

SEQ ID NO: 2294013 - RNA, 19 nt, Homo sapiens
  misc_RNA (1)...(19): siRNA sense strand
ucucaaguggugaaguuaa

SEQ ID NO: 2294014 - RNA, 19 nt, Homo sapiens
  misc_RNA (1)...(19): siRNA sense strand
aagcaagccaggaguccaa

SEQ ID NO: 2294015 - RNA, 19 nt, Homo sapiens
  misc_RNA (1)...(19): siRNA sense strand
cucccaaggcccagaagaa

SEQ ID NO: 2294016 - RNA, 19 nt, Homo sapiens
  misc_RNA (1)...(19): siRNA sense strand
gggaaaggaaaucucagaa

SEQ ID NO: 2294017 - RNA, 19 nt, Homo sapiens
  misc_RNA (1)...(19): siRNA sense strand
ggaaagaauaaggcagcau

SEQ ID NO: 2294018 - RNA, 19 nt, Homo sapiens
  misc_RNA (1)...(19): siRNA sense strand
ugaaaagcaucuugaacau

SEQ ID NO: 2294019 - RNA, 19 nt, Homo sapiens
  misc_RNA (1)...(19): siRNA sense strand
cugcagacaaucuagacaa

SEQ ID NO: 2294020 - RNA, 19 nt, Homo sapiens
  misc_RNA (1)...(19): siRNA sense strand
aaacagaagccauugcaga

SEQ ID NO: 2294021 - RNA, 19 nt, Homo sapiens
  misc_RNA (1)...(19): siRNA sense strand
caguuauugggaaaggaaa

SEQ ID NO: 2294022 - RNA, 19 nt, Homo sapiens
  misc_RNA (1)...(19): siRNA sense strand
cgaaaaguugagaagacaa

SEQ ID NO: 2294023 - RNA, 19 nt, Homo sapiens
  misc_RNA (1)...(19): siRNA sense strand
uguuaaagaaggacagauc

SEQ ID NO: 2294024 - RNA, 19 nt, Homo sapiens
  misc_RNA (1)...(19): siRNA sense strand
gccuugaacugaauggaga

SEQ ID NO: 2294025 - RNA, 19 nt, Homo sapiens
  misc_RNA (1)...(19): siRNA sense strand
ccuugaacugaauggagaa

SEQ ID NO: 2294026 - RNA, 19 nt, Homo sapiens
  misc_RNA (1)...(19): siRNA sense strand
cagcagaauccaaaccaga

SEQ ID NO: 2294027 - RNA, 19 nt, Homo sapiens
  misc_RNA (1)...(19): siRNA sense strand
gugaaaagcaucuugaaca

SEQ ID NO: 2294028 - RNA, 19 nt, Homo sapiens
  misc_RNA (1)...(19): siRNA sense strand
ccacuggagaagagggaac

SEQ ID NO: 2294029 - RNA, 19 nt, Homo sapiens
  misc_RNA (1)...(19): siRNA sense strand
ugcagacaaucuagacaaa

SEQ ID NO: 2294030 - RNA, 19 nt, Homo sapiens
  misc_RNA (1)...(19): siRNA sense strand
gcaaaugucaccaugcaga

SEQ ID NO: 2294031 - RNA, 19 nt, Homo sapiens
  misc_RNA (1)...(19): siRNA sense strand
cagaaagucccaguggaaa

SEQ ID NO: 2294032 - RNA, 19 nt, Homo sapiens
  misc_RNA (1)...(19): siRNA sense strand
ccaguuauugggaaaggaa

SEQ ID NO: 2294033 - RNA, 19 nt, Homo sapiens
  misc_RNA (1)...(19): siRNA sense strand
gaucuaucauggagacacu

SEQ ID NO: 2294034 - RNA, 19 nt, Homo sapiens
  misc_RNA (1)...(19): siRNA sense strand
aacagaagccauugcagaa

SEQ ID NO: 2294035 - RNA, 19 nt, Homo sapiens
  misc_RNA (1)...(19): siRNA sense strand
caggaaucgcugaugugua

SEQ ID NO: 2294036 - RNA, 19 nt, Homo sapiens
  misc_RNA (1)...(19): siRNA sense strand
cuuauuacaaacacgcaaa

SEQ ID NO: 2294037 - RNA, 19 nt, Homo sapiens
  misc_RNA (1)...(19): siRNA sense strand
gaacaaugaaagugaugac

SEQ ID NO: 2294038 - RNA, 19 nt, Homo sapiens
  misc_RNA (1)...(19): siRNA sense strand
caauggccuuucuggcaaa

SEQ ID NO: 2294039 - RNA, 19 nt, Homo sapiens
  misc_RNA (1)...(19): siRNA sense strand
uggcaaagccugcucuaca

SEQ ID NO: 2294040 - RNA, 19 nt, Homo sapiens
  misc_RNA (1)...(19): siRNA sense strand
ucacguagccucacagcau

SEQ ID NO: 2294041 - RNA, 19 nt, Homo sapiens
  misc_RNA (1)...(19): siRNA sense strand
aguuaaccaagcagcuaaa

SEQ ID NO: 2294042 - RNA, 19 nt, Homo sapiens
  misc_RNA (1)...(19): siRNA sense strand
gcugauguguacaguaagu

SEQ ID NO: 2294043 - RNA, 19 nt, Homo sapiens
  misc_RNA (1)...(19): siRNA sense strand
uggaugaaguagaccagga

SEQ ID NO: 2294044 - RNA, 19 nt, Homo sapiens
  misc_RNA (1)...(19): siRNA sense strand
gaggcuuaucugaggccaa

SEQ ID NO: 2294045 - RNA, 19 nt, Homo sapiens
  misc_RNA (1)...(19): siRNA sense strand
caaaagucuucccggacaa

SEQ ID NO: 2294046 - RNA, 19 nt, Homo sapiens
  misc_RNA (1)...(19): siRNA sense strand
aggucaaggcccauggcaa

SEQ ID NO: 2294047 - RNA, 19 nt, Homo sapiens
  misc_RNA (1)...(19): siRNA sense strand
ggucaaggcccauggcaag

SEQ ID NO: 2294048 - RNA, 19 nt, Homo sapiens
  misc_RNA (1)...(19): siRNA sense strand
uggaagaggcuggagguga

SEQ ID NO: 2294049 - RNA, 19 nt, Homo sapiens
  misc_RNA (1)...(19): siRNA sense strand
ggagcaagaugaaugugga

SEQ ID NO: 2294050 - RNA, 19 nt, Homo sapiens
  misc_RNA (1)...(19): siRNA sense strand
gugacaagcugcaugugga

SEQ ID NO: 2294051 - RNA, 19 nt, Homo sapiens
  misc_RNA (1)...(19): siRNA sense strand
ccaaagagguauauaggca

SEQ ID NO: 2294052 - RNA, 19 nt, Homo sapiens
  misc_RNA (1)...(19): siRNA sense strand
gcaaauugauagaucccaa

SEQ ID NO: 2294053 - RNA, 19 nt, Homo sapiens
  misc_RNA (1)...(19): siRNA sense strand
gguucugggaagugugaaa

SEQ ID NO: 2294054 - RNA, 19 nt, Homo sapiens
  misc_RNA (1)...(19): siRNA sense strand
ugaucaaggauauggaaau

SEQ ID NO: 2294055 - RNA, 19 nt, Homo sapiens
  misc_RNA (1)...(19): siRNA sense strand
auggauauggacagggaua

SEQ ID NO: 2294056 - RNA, 19 nt, Homo sapiens
  misc_RNA (1)...(19): siRNA sense strand
aacacaaacuggauggcaa

SEQ ID NO: 2294057 - RNA, 19 nt, Homo sapiens
  misc_RNA (1)...(19): siRNA sense strand
ggaaccaaggauuuaauaa

SEQ ID NO: 2294058 - RNA, 19 nt, Homo sapiens
  misc_RNA (1)...(19): siRNA sense strand
ccaagaucaacgcgagcaa

SEQ ID NO: 2294059 - RNA, 19 nt, Homo sapiens
  misc_RNA (1)...(19): siRNA sense strand
ucaaauugguucugggaag

SEQ ID NO: 2294060 - RNA, 19 nt, Homo sapiens
  misc_RNA (1)...(19): siRNA sense strand
ggaaauuacaauagugccu

SEQ ID NO: 2294061 - RNA, 19 nt, Homo sapiens
  misc_RNA (1)...(19): siRNA sense strand
ggaacuauggauauggaca

SEQ ID NO: 2294062 - RNA, 19 nt, Homo sapiens
  misc_RNA (1)...(19): siRNA sense strand
aggaauucgcagagggauc

SEQ ID NO: 2294063 - RNA, 19 nt, Homo sapiens
  misc_RNA (1)...(19): siRNA sense strand
guuagaaagcagauaccau

SEQ ID NO: 2294064 - RNA, 19 nt, Homo sapiens
  misc_RNA (1)...(19): siRNA sense strand
ugccuaugguggugaucaa

SEQ ID NO: 2294065 - RNA, 19 nt, Homo sapiens
  misc_RNA (1)...(19): siRNA sense strand
ccgucacuauggaggauau

SEQ ID NO: 2294066 - RNA, 19 nt, Homo sapiens
  misc_RNA (1)...(19): siRNA sense strand
gaucaaaacuauaguggcu

SEQ ID NO: 2294067 - RNA, 19 nt, Homo sapiens
  misc_RNA (1)...(19): siRNA sense strand
auaugaacgaguacagcaa

SEQ ID NO: 2294068 - RNA, 19 nt, Homo sapiens
  misc_RNA (1)...(19): siRNA sense strand
caacagagcacuuauggca

SEQ ID NO: 2294069 - RNA, 19 nt, Homo sapiens
  misc_RNA (1)...(19): siRNA sense strand
ugaugaagagccaguaaaa

SEQ ID NO: 2294070 - RNA, 19 nt, Homo sapiens
  misc_RNA (1)...(19): siRNA sense strand
cuauggaggauaugaacga

SEQ ID NO: 2294071 - RNA, 19 nt, Homo sapiens
  misc_RNA (1)...(19): siRNA sense strand
cugaugaagagccaguaaa

SEQ ID NO: 2294072 - RNA, 19 nt, Homo sapiens
  misc_RNA (1)...(19): siRNA sense strand
agguauauaggcagcaaca

SEQ ID NO: 2294073 - RNA, 19 nt, Homo sapiens
  misc_RNA (1)...(19): siRNA sense strand
ugcacaacccaaagaggua

SEQ ID NO: 2294074 - RNA, 19 nt, Homo sapiens
  misc_RNA (1)...(19): siRNA sense strand
uggaagaggugcugcagcu

SEQ ID NO: 2294075 - RNA, 19 nt, Homo sapiens
  misc_RNA (1)...(19): siRNA sense strand
cuaugggaacuauggauau

SEQ ID NO: 2294076 - RNA, 19 nt, Homo sapiens
  misc_RNA (1)...(19): siRNA sense strand
augaucaaggauauggaaa

SEQ ID NO: 2294077 - RNA, 19 nt, Homo sapiens
  misc_RNA (1)...(19): siRNA sense strand
auauagaggaauucgcaga

SEQ ID NO: 2294078 - RNA, 19 nt, Homo sapiens
  misc_RNA (1)...(19): siRNA sense strand
ggaggcuugagcugggaua

SEQ ID NO: 2294079 - RNA, 19 nt, Homo sapiens
  misc_RNA (1)...(19): siRNA sense strand
cugggaagugugaaaucaa

SEQ ID NO: 2294080 - RNA, 19 nt, Homo sapiens
  misc_RNA (1)...(19): siRNA sense strand
gaaccaaggauuuaauaac

SEQ ID NO: 2294081 - RNA, 19 nt, Homo sapiens
  misc_RNA (1)...(19): siRNA sense strand
ccaaagagguauauaggca

SEQ ID NO: 2294082 - RNA, 19 nt, Homo sapiens
  misc_RNA (1)...(19): siRNA sense strand
gcaaauugauagaucccaa

SEQ ID NO: 2294083 - RNA, 19 nt, Homo sapiens
  misc_RNA (1)...(19): siRNA sense strand
gguucugggaagugugaaa

SEQ ID NO: 2294084 - RNA, 19 nt, Homo sapiens
  misc_RNA (1)...(19): siRNA sense strand
ugaucaaggauauggaaau

SEQ ID NO: 2294085 - RNA, 19 nt, Homo sapiens
  misc_RNA (1)...(19): siRNA sense strand
auggauauggacagggaua

SEQ ID NO: 2294086 - RNA, 19 nt, Homo sapiens
  misc_RNA (1)...(19): siRNA sense strand
aacacaaacuggauggcaa

SEQ ID NO: 2294087 - RNA, 19 nt, Homo sapiens
  misc_RNA (1)...(19): siRNA sense strand
ggaaccaaggauuuaauaa

SEQ ID NO: 2294088 - RNA, 19 nt, Homo sapiens
  misc_RNA (1)...(19): siRNA sense strand
ccaagaucaacgcgagcaa

SEQ ID NO: 2294089 - RNA, 19 nt, Homo sapiens
  misc_RNA (1)...(19): siRNA sense strand
ucaaauugguucugggaag

SEQ ID NO: 2294090 - RNA, 19 nt, Homo sapiens
  misc_RNA (1)...(19): siRNA sense strand
ggaaauuacaauagugccu

SEQ ID NO: 2294091 - RNA, 19 nt, Homo sapiens
  misc_RNA (1)...(19): siRNA sense strand
ggaacuauggauauggaca

SEQ ID NO: 2294092 - RNA, 19 nt, Homo sapiens
  misc_RNA (1)...(19): siRNA sense strand
aggaauucgcagagggauc

SEQ ID NO: 2294093 - RNA, 19 nt, Homo sapiens
  misc_RNA (1)...(19): siRNA sense strand
guuagaaagcagauaccau

SEQ ID NO: 2294094 - RNA, 19 nt, Homo sapiens
  misc_RNA (1)...(19): siRNA sense strand
ugccuaugguggugaucaa

SEQ ID NO: 2294095 - RNA, 19 nt, Homo sapiens
  misc_RNA (1)...(19): siRNA sense strand
ccgucacuauggaggauau

SEQ ID NO: 2294096 - RNA, 19 nt, Homo sapiens
  misc_RNA (1)...(19): siRNA sense strand
gaucaaaacuauaguggcu

SEQ ID NO: 2294097 - RNA, 19 nt, Homo sapiens
  misc_RNA (1)...(19): siRNA sense strand
auaugaacgaguacagcaa

SEQ ID NO: 2294098 - RNA, 19 nt, Homo sapiens
  misc_RNA (1)...(19): siRNA sense strand
caacagagcacuuauggca

SEQ ID NO: 2294099 - RNA, 19 nt, Homo sapiens
  misc_RNA (1)...(19): siRNA sense strand
ugaugaagagccaguaaaa

SEQ ID NO: 2294100 - RNA, 19 nt, Homo sapiens
  misc_RNA (1)...(19): siRNA sense strand
cuauggaggauaugaacga

SEQ ID NO: 2294101 - RNA, 19 nt, Homo sapiens
  misc_RNA (1)...(19): siRNA sense strand
cugaugaagagccaguaaa

SEQ ID NO: 2294102 - RNA, 19 nt, Homo sapiens
  misc_RNA (1)...(19): siRNA sense strand
agguauauaggcagcaaca

SEQ ID NO: 2294103 - RNA, 19 nt, Homo sapiens
  misc_RNA (1)...(19): siRNA sense strand
ugcacaacccaaagaggua

SEQ ID NO: 2294104 - RNA, 19 nt, Homo sapiens
  misc_RNA (1)...(19): siRNA sense strand
uggaagaggugcugcagcu

SEQ ID NO: 2294105 - RNA, 19 nt, Homo sapiens
  misc_RNA (1)...(19): siRNA sense strand
cuaugggaacuauggauau

SEQ ID NO: 2294106 - RNA, 19 nt, Homo sapiens
  misc_RNA (1)...(19): siRNA sense strand
augaucaaggauauggaaa

SEQ ID NO: 2294107 - RNA, 19 nt, Homo sapiens
  misc_RNA (1)...(19): siRNA sense strand
auauagaggaauucgcaga

SEQ ID NO: 2294108 - RNA, 19 nt, Homo sapiens
  misc_RNA (1)...(19): siRNA sense strand
ggaggcuugagcugggaua

SEQ ID NO: 2294109 - RNA, 19 nt, Homo sapiens
  misc_RNA (1)...(19): siRNA sense strand
cugggaagugugaaaucaa

SEQ ID NO: 2294110 - RNA, 19 nt, Homo sapiens
  misc_RNA (1)...(19): siRNA sense strand
gaaccaaggauuuaauaac

SEQ ID NO: 2294111 - RNA, 19 nt, Homo sapiens
  misc_RNA (1)...(19): siRNA sense strand
acuaaagaucgguggagaa

SEQ ID NO: 2294112 - RNA, 19 nt, Homo sapiens
  misc_RNA (1)...(19): siRNA sense strand
gggcuuugagagagggaga

SEQ ID NO: 2294113 - RNA, 19 nt, Homo sapiens
  misc_RNA (1)...(19): siRNA sense strand
caacuacacucuuuggaga

SEQ ID NO: 2294114 - RNA, 19 nt, Homo sapiens
  misc_RNA (1)...(19): siRNA sense strand
aggaaaacuaccuggagua

SEQ ID NO: 2294115 - RNA, 19 nt, Homo sapiens
  misc_RNA (1)...(19): siRNA sense strand
ugauaaucguccuggccau

SEQ ID NO: 2294116 - RNA, 19 nt, Homo sapiens
  misc_RNA (1)...(19): siRNA sense strand
acaaucaggucaugcccaa

SEQ ID NO: 2294117 - RNA, 19 nt, Homo sapiens
  misc_RNA (1)...(19): siRNA sense strand
augaacgggcuuugagaga

SEQ ID NO: 2294118 - RNA, 19 nt, Homo sapiens
  misc_RNA (1)...(19): siRNA sense strand
ccgaugagggcuccagcaa

SEQ ID NO: 2294119 - RNA, 19 nt, Homo sapiens
  misc_RNA (1)...(19): siRNA sense strand
aggcagaaaugcuggagag

SEQ ID NO: 2294120 - RNA, 19 nt, Homo sapiens
  misc_RNA (1)...(19): siRNA sense strand
ucagaaauugccaggacuu

SEQ ID NO: 2294121 - RNA, 19 nt, Homo sapiens
  misc_RNA (1)...(19): siRNA sense strand
cacuaaagaucgguggaga

SEQ ID NO: 2294122 - RNA, 19 nt, Homo sapiens
  misc_RNA (1)...(19): siRNA sense strand
acuaaagaucgguggagaa

SEQ ID NO: 2294123 - RNA, 19 nt, Homo sapiens
  misc_RNA (1)...(19): siRNA sense strand
gggcuuugagagagggaga

SEQ ID NO: 2294124 - RNA, 19 nt, Homo sapiens
  misc_RNA (1)...(19): siRNA sense strand
caacuacacucuuuggaga

SEQ ID NO: 2294125 - RNA, 19 nt, Homo sapiens
  misc_RNA (1)...(19): siRNA sense strand
aggaaaacuaccuggagua

SEQ ID NO: 2294126 - RNA, 19 nt, Homo sapiens
  misc_RNA (1)...(19): siRNA sense strand
ugauaaucguccuggccau

SEQ ID NO: 2294127 - RNA, 19 nt, Homo sapiens
  misc_RNA (1)...(19): siRNA sense strand
acaaucaggucaugcccaa

SEQ ID NO: 2294128 - RNA, 19 nt, Homo sapiens
  misc_RNA (1)...(19): siRNA sense strand
augaacgggcuuugagaga

SEQ ID NO: 2294129 - RNA, 19 nt, Homo sapiens
  misc_RNA (1)...(19): siRNA sense strand
ccgaugagggcuccagcaa

SEQ ID NO: 2294130 - RNA, 19 nt, Homo sapiens
  misc_RNA (1)...(19): siRNA sense strand
aggcagaaaugcuggagag

SEQ ID NO: 2294131 - RNA, 19 nt, Homo sapiens
  misc_RNA (1)...(19): siRNA sense strand
ucagaaauugccaggacuu

SEQ ID NO: 2294132 - RNA, 19 nt, Homo sapiens
  misc_RNA (1)...(19): siRNA sense strand
cacuaaagaucgguggaga

SEQ ID NO: 2294133 - RNA, 19 nt, Homo sapiens
  misc_RNA (1)...(19): siRNA sense strand
acuaaagaucgguggagaa

SEQ ID NO: 2294134 - RNA, 19 nt, Homo sapiens
  misc_RNA (1)...(19): siRNA sense strand
gggcuuugagagagggaga

SEQ ID NO: 2294135 - RNA, 19 nt, Homo sapiens
  misc_RNA (1)...(19): siRNA sense strand
caacuacacucuuuggaga

SEQ ID NO: 2294136 - RNA, 19 nt, Homo sapiens
  misc_RNA (1)...(19): siRNA sense strand
aggaaaacuaccuggagua

SEQ ID NO: 2294137 - RNA, 19 nt, Homo sapiens
  misc_RNA (1)...(19): siRNA sense strand
ugauaaucguccuggccau

SEQ ID NO: 2294138 - RNA, 19 nt, Homo sapiens
  misc_RNA (1)...(19): siRNA sense strand
acaaucaggucaugcccaa

SEQ ID NO: 2294139 - RNA, 19 nt, Homo sapiens
  misc_RNA (1)...(19): siRNA sense strand
augaacgggcuuugagaga

SEQ ID NO: 2294140 - RNA, 19 nt, Homo sapiens
  misc_RNA (1)...(19): siRNA sense strand
ccgaugagggcuccagcaa

SEQ ID NO: 2294141 - RNA, 19 nt, Homo sapiens
  misc_RNA (1)...(19): siRNA sense strand
aggcagaaaugcuggagag

SEQ ID NO: 2294142 - RNA, 19 nt, Homo sapiens
  misc_RNA (1)...(19): siRNA sense strand
ucagaaauugccaggacuu

SEQ ID NO: 2294143 - RNA, 19 nt, Homo sapiens
  misc_RNA (1)...(19): siRNA sense strand
cacuaaagaucgguggaga

SEQ ID NO: 2294144 - RNA, 19 nt, Homo sapiens
  misc_RNA (1)...(19): siRNA sense strand
gcaaagaucuggaggagca

SEQ ID NO: 2294145 - RNA, 19 nt, Homo sapiens
  misc_RNA (1)...(19): siRNA sense strand
accaauuacauguggaaua

SEQ ID NO: 2294146 - RNA, 19 nt, Homo sapiens
  misc_RNA (1)...(19): siRNA sense strand
ggaaaauguacaaguguca

SEQ ID NO: 2294147 - RNA, 19 nt, Homo sapiens
  misc_RNA (1)...(19): siRNA sense strand
aaggaaaggaggcuggcaa

SEQ ID NO: 2294148 - RNA, 19 nt, Homo sapiens
  misc_RNA (1)...(19): siRNA sense strand
auugauaaugaguggagaa

SEQ ID NO: 2294149 - RNA, 19 nt, Homo sapiens
  misc_RNA (1)...(19): siRNA sense strand
gaaagaaguuccaccacca

SEQ ID NO: 2294150 - RNA, 19 nt, Homo sapiens
  misc_RNA (1)...(19): siRNA sense strand
ggaaaaugugccugugaau

SEQ ID NO: 2294151 - RNA, 19 nt, Homo sapiens
  misc_RNA (1)...(19): siRNA sense strand
gagaaagacucaaugcaug

SEQ ID NO: 2294152 - RNA, 19 nt, Homo sapiens
  misc_RNA (1)...(19): siRNA sense strand
uugauaaugaguggagaaa

SEQ ID NO: 2294153 - RNA, 19 nt, Homo sapiens
  misc_RNA (1)...(19): siRNA sense strand
accgagaauuugaugaaaa

SEQ ID NO: 2294154 - RNA, 19 nt, Homo sapiens
  misc_RNA (1)...(19): siRNA sense strand
auguacaagugucagcuaa

SEQ ID NO: 2294155 - RNA, 19 nt, Homo sapiens
  misc_RNA (1)...(19): siRNA sense strand
auaacagagaacaggccaa

SEQ ID NO: 2294156 - RNA, 19 nt, Homo sapiens
  misc_RNA (1)...(19): siRNA sense strand
caagcaaagaucuggagga

SEQ ID NO: 2294157 - RNA, 19 nt, Homo sapiens
  misc_RNA (1)...(19): siRNA sense strand
augccaguguguauguaaa

SEQ ID NO: 2294158 - RNA, 19 nt, Homo sapiens
  misc_RNA (1)...(19): siRNA sense strand
aggacagaagagacuauaa

SEQ ID NO: 2294159 - RNA, 19 nt, Homo sapiens
  misc_RNA (1)...(19): siRNA sense strand
gcaacauaacagagaacag

SEQ ID NO: 2294160 - RNA, 19 nt, Homo sapiens
  misc_RNA (1)...(19): siRNA sense strand
accccuaaauccuggaaaa

SEQ ID NO: 2294161 - RNA, 19 nt, Homo sapiens
  misc_RNA (1)...(19): siRNA sense strand
ccgccuacauccugggaaa

SEQ ID NO: 2294162 - RNA, 19 nt, Homo sapiens
  misc_RNA (1)...(19): siRNA sense strand
cagaaugggaacuggacaa

SEQ ID NO: 2294163 - RNA, 19 nt, Homo sapiens
  misc_RNA (1)...(19): siRNA sense strand
aggcaauggcacugaggaa

SEQ ID NO: 2294164 - RNA, 19 nt, Homo sapiens
  misc_RNA (1)...(19): siRNA sense strand
gaagaugugaggcgggaaa

SEQ ID NO: 2294165 - RNA, 19 nt, Homo sapiens
  misc_RNA (1)...(19): siRNA sense strand
augagaagcuggagugaca

SEQ ID NO: 2294166 - RNA, 19 nt, Homo sapiens
  misc_RNA (1)...(19): siRNA sense strand
ccaaaagcuuaaagaacaa

SEQ ID NO: 2294167 - RNA, 19 nt, Homo sapiens
  misc_RNA (1)...(19): siRNA sense strand
cagguggaaugcagagaaa

SEQ ID NO: 2294168 - RNA, 19 nt, Homo sapiens
  misc_RNA (1)...(19): siRNA sense strand
cagagaaagaaguuggcaa

SEQ ID NO: 2294169 - RNA, 19 nt, Homo sapiens
  misc_RNA (1)...(19): siRNA sense strand
agaaagugaaagaaagcua

SEQ ID NO: 2294170 - RNA, 19 nt, Homo sapiens
  misc_RNA (1)...(19): siRNA sense strand
ccgacaauaagcugaauaa

SEQ ID NO: 2294171 - RNA, 19 nt, Homo sapiens
  misc_RNA (1)...(19): siRNA sense strand
ggucaagaaagauguggaa

SEQ ID NO: 2294172 - RNA, 19 nt, Homo sapiens
  misc_RNA (1)...(19): siRNA sense strand
cgggaaagacagagaauuc

SEQ ID NO: 2294173 - RNA, 19 nt, Homo sapiens
  misc_RNA (1)...(19): siRNA sense strand
cagaaagacaccagcauga

SEQ ID NO: 2294174 - RNA, 19 nt, Homo sapiens
  misc_RNA (1)...(19): siRNA sense strand
guuccaaccagaagagaau

SEQ ID NO: 2294175 - RNA, 19 nt, Homo sapiens
  misc_RNA (1)...(19): siRNA sense strand
gguggaagacauagggcau

SEQ ID NO: 2294176 - RNA, 19 nt, Homo sapiens
  misc_RNA (1)...(19): siRNA sense strand
aggaugagaaagugaaaga

SEQ ID NO: 2294177 - RNA, 19 nt, Homo sapiens
  misc_RNA (1)...(19): siRNA sense strand
ucuuagaaaucaaggaguu

SEQ ID NO: 2294178 - RNA, 19 nt, Homo sapiens
  misc_RNA (1)...(19): siRNA sense strand
acgaagauauauagaagga

SEQ ID NO: 2294179 - RNA, 19 nt, Homo sapiens
  misc_RNA (1)...(19): siRNA sense strand
cggcgguucuuguggaauu

SEQ ID NO: 2294180 - RNA, 19 nt, Homo sapiens
  misc_RNA (1)...(19): siRNA sense strand
aagauuuccugguggacaa

SEQ ID NO: 2294181 - RNA, 19 nt, Homo sapiens
  misc_RNA (1)...(19): siRNA sense strand
cuggaaacuuacacagcaa

SEQ ID NO: 2294182 - RNA, 19 nt, Homo sapiens
  misc_RNA (1)...(19): siRNA sense strand
aggaguugacgaagauaua

SEQ ID NO: 2294183 - RNA, 19 nt, Homo sapiens
  misc_RNA (1)...(19): siRNA sense strand
gaggagucccagagaaaga

SEQ ID NO: 2294184 - RNA, 19 nt, Homo sapiens
  misc_RNA (1)...(19): siRNA sense strand
gcaauggcacugaggaaga

SEQ ID NO: 2294185 - RNA, 19 nt, Homo sapiens
  misc_RNA (1)...(19): siRNA sense strand
cgaggaaagugaugagaag

SEQ ID NO: 2294186 - RNA, 19 nt, Homo sapiens
  misc_RNA (1)...(19): siRNA sense strand
ggaucaugggccuggacaa

SEQ ID NO: 2294187 - RNA, 19 nt, Homo sapiens
  misc_RNA (1)...(19): siRNA sense strand
cugaagaaccagcugggaa

SEQ ID NO: 2294188 - RNA, 19 nt, Homo sapiens
  misc_RNA (1)...(19): siRNA sense strand
gaguugacgaagauauaua

SEQ ID NO: 2294189 - RNA, 19 nt, Homo sapiens
  misc_RNA (1)...(19): siRNA sense strand
gcagcgaccaugagaguga

SEQ ID NO: 2294190 - RNA, 19 nt, Homo sapiens
  misc_RNA (1)...(19): siRNA sense strand
gccaaaagcuuaaagaaca

SEQ ID NO: 2294191 - RNA, 19 nt, Homo sapiens
  misc_RNA (1)...(19): siRNA sense strand
gugaaugaguuuagguaug

SEQ ID NO: 2294192 - RNA, 19 nt, Homo sapiens
  misc_RNA (1)...(19): siRNA sense strand
ucugaaugaugaagaugaa

SEQ ID NO: 2294193 - RNA, 19 nt, Homo sapiens
  misc_RNA (1)...(19): siRNA sense strand
gcuaauugccagacggagu

SEQ ID NO: 2294194 - RNA, 19 nt, Homo sapiens
  misc_RNA (1)...(19): siRNA sense strand
gcgacaaaaucaagaagau

SEQ ID NO: 2294195 - RNA, 19 nt, Homo sapiens
  misc_RNA (1)...(19): siRNA sense strand
gaagauauauagaaggaag

SEQ ID NO: 2294196 - RNA, 19 nt, Homo sapiens
  misc_RNA (1)...(19): siRNA sense strand
ucaacugguaugaggacaa

SEQ ID NO: 2294197 - RNA, 19 nt, Homo sapiens
  misc_RNA (1)...(19): siRNA sense strand
ugaaagagaccaugcggau

SEQ ID NO: 2294198 - RNA, 19 nt, Homo sapiens
  misc_RNA (1)...(19): siRNA sense strand
gcgaggaaagugaugagaa

SEQ ID NO: 2294199 - RNA, 19 nt, Homo sapiens
  misc_RNA (1)...(19): siRNA sense strand
gaacaagaucugggugaau

SEQ ID NO: 2294200 - RNA, 19 nt, Homo sapiens
  misc_RNA (1)...(19): siRNA sense strand
cuguauggguggucaauca

SEQ ID NO: 2294201 - RNA, 19 nt, Homo sapiens
  misc_RNA (1)...(19): siRNA sense strand
caucaagggcaucguguau

SEQ ID NO: 2294202 - RNA, 19 nt, Homo sapiens
  misc_RNA (1)...(19): siRNA sense strand
ugacaauccugcagugcuu

SEQ ID NO: 2294203 - RNA, 19 nt, Homo sapiens
  misc_RNA (1)...(19): siRNA sense strand
aggcggagauggagcagau

SEQ ID NO: 2294204 - RNA, 19 nt, Homo sapiens
  misc_RNA (1)...(19): siRNA sense strand
cccagaauccagagagaca

SEQ ID NO: 2294205 - RNA, 19 nt, Homo sapiens
  misc_RNA (1)...(19): siRNA sense strand
ggagaaucgcuuuguguca

SEQ ID NO: 2294206 - RNA, 19 nt, Homo sapiens
  misc_RNA (1)...(19): siRNA sense strand
gacaauguggagaggacaa

SEQ ID NO: 2294207 - RNA, 19 nt, Homo sapiens
  misc_RNA (1)...(19): siRNA sense strand
ggaacuggacaaugcagaa

SEQ ID NO: 2294208 - RNA, 19 nt, Homo sapiens
  misc_RNA (1)...(19): siRNA sense strand
ccauucagaaccugguaaa

SEQ ID NO: 2294209 - RNA, 19 nt, Homo sapiens
  misc_RNA (1)...(19): siRNA sense strand
ggauguacaacgaacagua

SEQ ID NO: 2294210 - RNA, 19 nt, Homo sapiens
  misc_RNA (1)...(19): siRNA sense strand
agacguaugugcagaucau

SEQ ID NO: 2294211 - RNA, 19 nt, Homo sapiens
  misc_RNA (1)...(19): siRNA sense strand
gggugaaugaguuuaggua

SEQ ID NO: 2294212 - RNA, 19 nt, Homo sapiens
  misc_RNA (1)...(19): siRNA sense strand
gaucaaaaucagaagagau

SEQ ID NO: 2294213 - RNA, 19 nt, Homo sapiens
  misc_RNA (1)...(19): siRNA sense strand
guguacaccuggagagaag

SEQ ID NO: 2294214 - RNA, 19 nt, Homo sapiens
  misc_RNA (1)...(19): siRNA sense strand
caagcaagcugaaaagcaa

SEQ ID NO: 2294215 - RNA, 19 nt, Homo sapiens
  misc_RNA (1)...(19): siRNA sense strand
aggucauggcugaggugaa

SEQ ID NO: 2294216 - RNA, 19 nt, Homo sapiens
  misc_RNA (1)...(19): siRNA sense strand
ucaagaaagauguggaauc

SEQ ID NO: 2294217 - RNA, 19 nt, Homo sapiens
  misc_RNA (1)...(19): siRNA sense strand
gggacuuggugggacgaaa

SEQ ID NO: 2294218 - RNA, 19 nt, Homo sapiens
  misc_RNA (1)...(19): siRNA sense strand
aguuaauggggcuggaaaa

SEQ ID NO: 2294219 - RNA, 19 nt, Homo sapiens
  misc_RNA (1)...(19): siRNA sense strand
gcacugaggaagaugcuga

SEQ ID NO: 2294220 - RNA, 19 nt, Homo sapiens
  misc_RNA (1)...(19): siRNA sense strand
cugaaaccuucuaugacaa

SEQ ID NO: 2294221 - RNA, 19 nt, Homo sapiens
  misc_RNA (1)...(19): siRNA sense strand
aagaacaagaucuggguga

SEQ ID NO: 2294222 - RNA, 19 nt, Homo sapiens
  misc_RNA (1)...(19): siRNA sense strand
agaacaagaucugggugaa

SEQ ID NO: 2294223 - RNA, 19 nt, Homo sapiens
  misc_RNA (1)...(19): siRNA sense strand
ggugaaugaguuuagguau

SEQ ID NO: 2294224 - RNA, 19 nt, Homo sapiens
  misc_RNA (1)...(19): siRNA sense strand
cuauaguggaggcaacaaa

SEQ ID NO: 2294225 - RNA, 19 nt, Homo sapiens
  misc_RNA (1)...(19): siRNA sense strand
ccuuugaggacaugcggua

SEQ ID NO: 2294226 - RNA, 19 nt, Homo sapiens
  misc_RNA (1)...(19): siRNA sense strand
uuucagaagaagacaaaca

SEQ ID NO: 2294227 - RNA, 19 nt, Homo sapiens
  misc_RNA (1)...(19): siRNA sense strand
ugaacaagcuagaacccau

SEQ ID NO: 2294228 - RNA, 19 nt, Homo sapiens
  misc_RNA (1)...(19): siRNA sense strand
ggaugaagguggcugucga

SEQ ID NO: 2294229 - RNA, 19 nt, Homo sapiens
  misc_RNA (1)...(19): siRNA sense strand
agacgacccuggaagaaau

SEQ ID NO: 2294230 - RNA, 19 nt, Homo sapiens
  misc_RNA (1)...(19): siRNA sense strand
gacccagaauccagagaga

SEQ ID NO: 2294231 - RNA, 19 nt, Homo sapiens
  misc_RNA (1)...(19): siRNA sense strand
ggauggcaaucauggucaa

SEQ ID NO: 2294232 - RNA, 19 nt, Homo sapiens
  misc_RNA (1)...(19): siRNA sense strand
ugucagaccuggagggcaa

SEQ ID NO: 2294233 - RNA, 19 nt, Homo sapiens
  misc_RNA (1)...(19): siRNA sense strand
caagaagagcagaggagca

SEQ ID NO: 2294234 - RNA, 19 nt, Homo sapiens
  misc_RNA (1)...(19): siRNA sense strand
ccucaguacagcuggaaga

SEQ ID NO: 2294235 - RNA, 19 nt, Homo sapiens
  misc_RNA (1)...(19): siRNA sense strand
ccagagagagggaggagga

SEQ ID NO: 2294236 - RNA, 19 nt, Homo sapiens
  misc_RNA (1)...(19): siRNA sense strand
gagagagggaggaggagga

SEQ ID NO: 2294237 - RNA, 19 nt, Homo sapiens
  misc_RNA (1)...(19): siRNA sense strand
acgacaacacugaagacaa

SEQ ID NO: 2294238 - RNA, 19 nt, Homo sapiens
  misc_RNA (1)...(19): siRNA sense strand
gcaucgagggagagaccau

SEQ ID NO: 2294239 - RNA, 19 nt, Homo sapiens
  misc_RNA (1)...(19): siRNA sense strand
agaccauaauugggaacaa

SEQ ID NO: 2294240 - RNA, 19 nt, Homo sapiens
  misc_RNA (1)...(19): siRNA sense strand
cuuuauaagaaucgcguca

SEQ ID NO: 2294241 - RNA, 19 nt, Homo sapiens
  misc_RNA (1)...(19): siRNA sense strand
acacugaagacaaggagga

SEQ ID NO: 2294242 - RNA, 19 nt, Homo sapiens
  misc_RNA (1)...(19): siRNA sense strand
gcuaagagaacuuuccaga

SEQ ID NO: 2294243 - RNA, 19 nt, Homo sapiens
  misc_RNA (1)...(19): siRNA sense strand
gggacuuauucaaugggau

SEQ ID NO: 2294244 - RNA, 19 nt, Homo sapiens
  misc_RNA (1)...(19): siRNA sense strand
ucgcagggaaagaguguca

SEQ ID NO: 2294245 - RNA, 19 nt, Homo sapiens
  misc_RNA (1)...(19): siRNA sense strand
gaggaugacuacaggcaag

SEQ ID NO: 2294246 - RNA, 19 nt, Homo sapiens
  misc_RNA (1)...(19): siRNA sense strand
caguacagcuggaagaggu

SEQ ID NO: 2294247 - RNA, 19 nt, Homo sapiens
  misc_RNA (1)...(19): siRNA sense strand
ggaggaugacuacaggcaa

SEQ ID NO: 2294248 - RNA, 19 nt, Homo sapiens
  misc_RNA (1)...(19): siRNA sense strand
auuacaacgccgagaguua

SEQ ID NO: 2294249 - RNA, 19 nt, Homo sapiens
  misc_RNA (1)...(19): siRNA sense strand
gaguggaagucgagcgcuu

SEQ ID NO: 2294250 - RNA, 19 nt, Homo sapiens
  misc_RNA (1)...(19): siRNA sense strand
gcggauggcucuagggacu

SEQ ID NO: 2294251 - RNA, 19 nt, Homo sapiens
  misc_RNA (1)...(19): siRNA sense strand
guuacgaaguggaacgcua

SEQ ID NO: 2294252 - RNA, 19 nt, Homo sapiens
  misc_RNA (1)...(19): siRNA sense strand
agacagaagugaaggaccu

SEQ ID NO: 2294253 - RNA, 19 nt, Homo sapiens
  misc_RNA (1)...(19): siRNA sense strand
cuaugaacacacaggagaa

SEQ ID NO: 2294254 - RNA, 19 nt, Homo sapiens
  misc_RNA (1)...(19): siRNA sense strand
ucaucaaauaucaggguuu

SEQ ID NO: 2294255 - RNA, 19 nt, Homo sapiens
  misc_RNA (1)...(19): siRNA sense strand
cagcagggacaggaagaaa

SEQ ID NO: 2294256 - RNA, 19 nt, Homo sapiens
  misc_RNA (1)...(19): siRNA sense strand
aagaggagacagaagugaa

SEQ ID NO: 2294257 - RNA, 19 nt, Homo sapiens
  misc_RNA (1)...(19): siRNA sense strand
gcuaugaacacacaggaga

SEQ ID NO: 2294258 - RNA, 19 nt, Homo sapiens
  misc_RNA (1)...(19): siRNA sense strand
uggaucaaguucaggcaca

SEQ ID NO: 2294259 - RNA, 19 nt, Homo sapiens
  misc_RNA (1)...(19): siRNA sense strand
caguggacucucugcuaaa

SEQ ID NO: 2294260 - RNA, 19 nt, Homo sapiens
  misc_RNA (1)...(19): siRNA sense strand
ccuauacauugcagguuca

SEQ ID NO: 2294261 - RNA, 19 nt, Homo sapiens
  misc_RNA (1)...(19): siRNA sense strand
gguuuggaguggaagucga

SEQ ID NO: 2294262 - RNA, 19 nt, Homo sapiens
  misc_RNA (1)...(19): siRNA sense strand
gcaacuacugcgaggccga

SEQ ID NO: 2294263 - RNA, 19 nt, Homo sapiens
  misc_RNA (1)...(19): siRNA sense strand
acaucuaaugagagggcca

SEQ ID NO: 2294264 - RNA, 19 nt, Homo sapiens
  misc_RNA (1)...(19): siRNA sense strand
cugaagacacuaagccuca

SEQ ID NO: 2294265 - RNA, 19 nt, Homo sapiens
  misc_RNA (1)...(19): siRNA sense strand
agaccaacuucauugacau

SEQ ID NO: 2294266 - RNA, 19 nt, Homo sapiens
  misc_RNA (1)...(19): siRNA sense strand
ugcugaaagaggagacaga

SEQ ID NO: 2294267 - RNA, 19 nt, Homo sapiens
  misc_RNA (1)...(19): siRNA sense strand
ccguauugaguuugagaac

SEQ ID NO: 2294268 - RNA, 19 nt, Homo sapiens
  misc_RNA (1)...(19): siRNA sense strand
agaacgugcacuucagcua

SEQ ID NO: 2294269 - RNA, 19 nt, Homo sapiens
  misc_RNA (1)...(19): siRNA sense strand
ggccaaagucugugccaac

SEQ ID NO: 2294270 - RNA, 19 nt, Homo sapiens
  misc_RNA (1)...(19): siRNA sense strand
cgaauagaugggcaggaca

SEQ ID NO: 2294271 - RNA, 19 nt, Homo sapiens
  misc_RNA (1)...(19): siRNA sense strand
acaccaucgccgacaauau

SEQ ID NO: 2294272 - RNA, 19 nt, Homo sapiens
  misc_RNA (1)...(19): siRNA sense strand
ggacggaaauccaggagag

SEQ ID NO: 2294273 - RNA, 19 nt, Homo sapiens
  misc_RNA (1)...(19): siRNA sense strand
cggaaauccaggagagcug

SEQ ID NO: 2294274 - RNA, 19 nt, Homo sapiens
  misc_RNA (1)...(19): siRNA sense strand
ggaaggaaggaacacgcaa

SEQ ID NO: 2294275 - RNA, 19 nt, Homo sapiens
  misc_RNA (1)...(19): siRNA sense strand
ccuuggaacugcagacacu

SEQ ID NO: 2294276 - RNA, 19 nt, Homo sapiens
  misc_RNA (1)...(19): siRNA sense strand
ggacacuauggacggaaau

SEQ ID NO: 2294277 - RNA, 19 nt, Homo sapiens
  misc_RNA (1)...(19): siRNA sense strand
cagauaaaacagagccaga

SEQ ID NO: 2294278 - RNA, 19 nt, Homo sapiens
  misc_RNA (1)...(19): siRNA sense strand
ggaacgacauggaacgcau

SEQ ID NO: 2294279 - RNA, 19 nt, Homo sapiens
  misc_RNA (1)...(19): siRNA sense strand
ugauuggagaggagaguga

SEQ ID NO: 2294280 - RNA, 19 nt, Homo sapiens
  misc_RNA (1)...(19): siRNA sense strand
ugagugaagugaagaaacu

SEQ ID NO: 2294281 - RNA, 19 nt, Homo sapiens
  misc_RNA (1)...(19): siRNA sense strand
gagaggagagugaaggcau

SEQ ID NO: 2294282 - RNA, 19 nt, Homo sapiens
  misc_RNA (1)...(19): siRNA sense strand
uuuaagaagaugugggucu

SEQ ID NO: 2294283 - RNA, 19 nt, Homo sapiens
  misc_RNA (1)...(19): siRNA sense strand
ggccagauuugauuggaga

SEQ ID NO: 2294284 - RNA, 19 nt, Homo sapiens
  misc_RNA (1)...(19): siRNA sense strand
aaaaggaauaugaggaaga

SEQ ID NO: 2294285 - RNA, 19 nt, Homo sapiens
  misc_RNA (1)...(19): siRNA sense strand
gucaaggauuggaacgaca

SEQ ID NO: 2294286 - RNA, 19 nt, Homo sapiens
  misc_RNA (1)...(19): siRNA sense strand
ugucaaggccauaaaagaa

SEQ ID NO: 2294287 - RNA, 19 nt, Homo sapiens
  misc_RNA (1)...(19): siRNA sense strand
ccaaaagaugugaagauca

SEQ ID NO: 2294288 - RNA, 19 nt, Homo sapiens
  misc_RNA (1)...(19): siRNA sense strand
cauggaacgcauuuggcaa

SEQ ID NO: 2294289 - RNA, 19 nt, Homo sapiens
  misc_RNA (1)...(19): siRNA sense strand
guacucagccuuuacgcua

SEQ ID NO: 2294290 - RNA, 19 nt, Homo sapiens
  misc_RNA (1)...(19): siRNA sense strand
ggaacgacauggaacgcau

SEQ ID NO: 2294291 - RNA, 19 nt, Homo sapiens
  misc_RNA (1)...(19): siRNA sense strand
gugcgagacuggaacgaca

SEQ ID NO: 2294292 - RNA, 19 nt, Homo sapiens
  misc_RNA (1)...(19): siRNA sense strand
ccgaguaagaaccgggaga

SEQ ID NO: 2294293 - RNA, 19 nt, Homo sapiens
  misc_RNA (1)...(19): siRNA sense strand
uuuaagaagaugugggugu

SEQ ID NO: 2294294 - RNA, 19 nt, Homo sapiens
  misc_RNA (1)...(19): siRNA sense strand
ccgaagcacaugcggguga

SEQ ID NO: 2294295 - RNA, 19 nt, Homo sapiens
  misc_RNA (1)...(19): siRNA sense strand
ccaucaacccacagaagga

SEQ ID NO: 2294296 - RNA, 19 nt, Homo sapiens
  misc_RNA (1)...(19): siRNA sense strand
ccaucaugcggguggacau

SEQ ID NO: 2294297 - RNA, 19 nt, Homo sapiens
  misc_RNA (1)...(19): siRNA sense strand
gaccaaaagcagaggagca

SEQ ID NO: 2294298 - RNA, 19 nt, Homo sapiens
  misc_RNA (1)...(19): siRNA sense strand
cccaaauacuguuucccaa

SEQ ID NO: 2294299 - RNA, 19 nt, Homo sapiens
  misc_RNA (1)...(19): siRNA sense strand
ccggacaaucaaagagcga

SEQ ID NO: 2294300 - RNA, 19 nt, Homo sapiens
  misc_RNA (1)...(19): siRNA sense strand
agaagauuguagagguaau

SEQ ID NO: 2294301 - RNA, 19 nt, Homo sapiens
  misc_RNA (1)...(19): siRNA sense strand
ggauaucaugaaagacaaa

SEQ ID NO: 2294302 - RNA, 19 nt, Homo sapiens
  misc_RNA (1)...(19): siRNA sense strand
guuaacuacccuauggaaa

SEQ ID NO: 2294303 - RNA, 19 nt, Homo sapiens
  misc_RNA (1)...(19): siRNA sense strand
ggaaggugguggugugcga

SEQ ID NO: 2294304 - RNA, 19 nt, Homo sapiens
  misc_RNA (1)...(19): siRNA sense strand
cggauaucaugaaagacaa

SEQ ID NO: 2294305 - RNA, 19 nt, Homo sapiens
  misc_RNA (1)...(19): siRNA sense strand
cacauuuggaccagagaaa

SEQ ID NO: 2294306 - RNA, 19 nt, Homo sapiens
  misc_RNA (1)...(19): siRNA sense strand
ggugaugaggcaagugaau

SEQ ID NO: 2294307 - RNA, 19 nt, Homo sapiens
  misc_RNA (1)...(19): siRNA sense strand
ucaugaaagacaaagacaa

SEQ ID NO: 2294308 - RNA, 19 nt, Homo sapiens
  misc_RNA (1)...(19): siRNA sense strand
agagaaacuuggugugacu

SEQ ID NO: 2294309 - RNA, 19 nt, Homo sapiens
  misc_RNA (1)...(19): siRNA sense strand
gguuggaacgagaacuuaa

SEQ ID NO: 2294310 - RNA, 19 nt, Homo sapiens
  misc_RNA (1)...(19): siRNA sense strand
auauugagcaagagcagaa

SEQ ID NO: 2294311 - RNA, 19 nt, Homo sapiens
  misc_RNA (1)...(19): siRNA sense strand
ggaaaauggcauaguacga

SEQ ID NO: 2294312 - RNA, 19 nt, Homo sapiens
  misc_RNA (1)...(19): siRNA sense strand
gggagagagauuugaagca

SEQ ID NO: 2294313 - RNA, 19 nt, Homo sapiens
  misc_RNA (1)...(19): siRNA sense strand
uguccgugugcuagagaaa

SEQ ID NO: 2294314 - RNA, 19 nt, Homo sapiens
  misc_RNA (1)...(19): siRNA sense strand
ggauauugcugggagggau

SEQ ID NO: 2294315 - RNA, 19 nt, Homo sapiens
  misc_RNA (1)...(19): siRNA sense strand
aggaguugguguugcugaa

SEQ ID NO: 2294316 - RNA, 19 nt, Homo sapiens
  misc_RNA (1)...(19): siRNA sense strand
gagagaagauuguagaggu

SEQ ID NO: 2294317 - RNA, 19 nt, Homo sapiens
  misc_RNA (1)...(19): siRNA sense strand
gacaagaguaccaagaaaa

SEQ ID NO: 2294318 - RNA, 19 nt, Homo sapiens
  misc_RNA (1)...(19): siRNA sense strand
guucgcaugauuaaagaaa

SEQ ID NO: 2294319 - RNA, 19 nt, Homo sapiens
  misc_RNA (1)...(19): siRNA sense strand
agaccuauuaucagaucaa

SEQ ID NO: 2294320 - RNA, 19 nt, Homo sapiens
  misc_RNA (1)...(19): siRNA sense strand
cgcagaaagcacaugguau

SEQ ID NO: 2294321 - RNA, 19 nt, Homo sapiens
  misc_RNA (1)...(19): siRNA sense strand
caugaaagacaaagacaac

SEQ ID NO: 2294322 - RNA, 19 nt, Homo sapiens
  misc_RNA (1)...(19): siRNA sense strand
caucacgguuggaacgaga

SEQ ID NO: 2294323 - RNA, 19 nt, Homo sapiens
  misc_RNA (1)...(19): siRNA sense strand
ugacugguguagugguaga

SEQ ID NO: 2294324 - RNA, 19 nt, Homo sapiens
  misc_RNA (1)...(19): siRNA sense strand
agagagauuugaagcacca

SEQ ID NO: 2294325 - RNA, 19 nt, Homo sapiens
  misc_RNA (1)...(19): siRNA sense strand
ggacuacacauuuggacca

SEQ ID NO: 2294326 - RNA, 19 nt, Homo sapiens
  misc_RNA (1)...(19): siRNA sense strand
ccuaugaacccaaccaaaa

SEQ ID NO: 2294327 - RNA, 19 nt, Homo sapiens
  misc_RNA (1)...(19): siRNA sense strand
acgagaacuuaaacagcuu

SEQ ID NO: 2294328 - RNA, 19 nt, Homo sapiens
  misc_RNA (1)...(19): siRNA sense strand
ccuuagaaaccacaguauu

SEQ ID NO: 2294329 - RNA, 19 nt, Homo sapiens
  misc_RNA (1)...(19): siRNA sense strand
uuaacuacccuauggaaaa

SEQ ID NO: 2294330 - RNA, 19 nt, Homo sapiens
  misc_RNA (1)...(19): siRNA sense strand
guuugugaaguguggauau

SEQ ID NO: 2294331 - RNA, 19 nt, Homo sapiens
  misc_RNA (1)...(19): siRNA sense strand
ugaagggugauguggaaaa

SEQ ID NO: 2294332 - RNA, 19 nt, Homo sapiens
  misc_RNA (1)...(19): siRNA sense strand
augaaacaccugugggacu

SEQ ID NO: 2294333 - RNA, 19 nt, Homo sapiens
  misc_RNA (1)...(19): siRNA sense strand
gcaggaaggugguggugug

SEQ ID NO: 2294334 - RNA, 19 nt, Homo sapiens
  misc_RNA (1)...(19): siRNA sense strand
cauuuggaccagagaaacu

SEQ ID NO: 2294335 - RNA, 19 nt, Homo sapiens
  misc_RNA (1)...(19): siRNA sense strand
gcugaaauuaagugaggaa

SEQ ID NO: 2294336 - RNA, 19 nt, Homo sapiens
  misc_RNA (1)...(19): siRNA sense strand
gggcagaaccugaagacca

SEQ ID NO: 2294337 - RNA, 19 nt, Homo sapiens
  misc_RNA (1)...(19): siRNA sense strand
gcuauuaaggagucagcaa

SEQ ID NO: 2294338 - RNA, 19 nt, Homo sapiens
  misc_RNA (1)...(19): siRNA sense strand
ggugguagauugaagccaa

SEQ ID NO: 2294339 - RNA, 19 nt, Homo sapiens
  misc_RNA (1)...(19): siRNA sense strand
aggcaguaaaggagcgcua

SEQ ID NO: 2294340 - RNA, 19 nt, Homo sapiens
  misc_RNA (1)...(19): siRNA sense strand
aggauaugcuggaaauaca

SEQ ID NO: 2294341 - RNA, 19 nt, Homo sapiens
  misc_RNA (1)...(19): siRNA sense strand
ccauugaauacuccagaaa

SEQ ID NO: 2294342 - RNA, 19 nt, Homo sapiens
  misc_RNA (1)...(19): siRNA sense strand
ccgccaugguauaguugaa

SEQ ID NO: 2294343 - RNA, 19 nt, Homo sapiens
  misc_RNA (1)...(19): siRNA sense strand
uggaaagguuuauggagca

SEQ ID NO: 2294344 - RNA, 19 nt, Homo sapiens
  misc_RNA (1)...(19): siRNA sense strand
gugguagauugaagccaaa

SEQ ID NO: 2294345 - RNA, 19 nt, Homo sapiens
  misc_RNA (1)...(19): siRNA sense strand
cuauuaaggagucagcaaa

SEQ ID NO: 2294346 - RNA, 19 nt, Homo sapiens
  misc_RNA (1)...(19): siRNA sense strand
agaaguuguagaugaagua

SEQ ID NO: 2294347 - RNA, 19 nt, Homo sapiens
  misc_RNA (1)...(19): siRNA sense strand
gugaugaagcaauagaaaa

SEQ ID NO: 2294348 - RNA, 19 nt, Homo sapiens
  misc_RNA (1)...(19): siRNA sense strand
agaaauuggaccuagcauu

SEQ ID NO: 2294349 - RNA, 19 nt, Homo sapiens
  misc_RNA (1)...(19): siRNA sense strand
cagaaguuguagaugaagu

SEQ ID NO: 2294350 - RNA, 19 nt, Homo sapiens
  misc_RNA (1)...(19): siRNA sense strand
cagaacaauccuuggaaac

SEQ ID NO: 2294351 - RNA, 19 nt, Homo sapiens
  misc_RNA (1)...(19): siRNA sense strand
ugaugaaagguguugauga

SEQ ID NO: 2294352 - RNA, 19 nt, Homo sapiens
  misc_RNA (1)...(19): siRNA sense strand
ggcugaaggguaugugauu

SEQ ID NO: 2294353 - RNA, 19 nt, Homo sapiens
  misc_RNA (1)...(19): siRNA sense strand
ggucaaaauggauuaaaca

SEQ ID NO: 2294354 - RNA, 19 nt, Homo sapiens
  misc_RNA (1)...(19): siRNA sense strand
caaugcuaucucaaagaaa

SEQ ID NO: 2294355 - RNA, 19 nt, Homo sapiens
  misc_RNA (1)...(19): siRNA sense strand
cucaaaggagggugaugaa

SEQ ID NO: 2294356 - RNA, 19 nt, Homo sapiens
  misc_RNA (1)...(19): siRNA sense strand
aguuugguuuggaggauca

SEQ ID NO: 2294357 - RNA, 19 nt, Homo sapiens
  misc_RNA (1)...(19): siRNA sense strand
ccagaaaacagggaauaua

SEQ ID NO: 2294358 - RNA, 19 nt, Homo sapiens
  misc_RNA (1)...(19): siRNA sense strand
agcaaaagugggugaucaa

SEQ ID NO: 2294359 - RNA, 19 nt, Homo sapiens
  misc_RNA (1)...(19): siRNA sense strand
agaccgagaaguaggaauc

SEQ ID NO: 2294360 - RNA, 19 nt, Homo sapiens
  misc_RNA (1)...(19): siRNA sense strand
cgucaggaauugauggaga

SEQ ID NO: 2294361 - RNA, 19 nt, Homo sapiens
  misc_RNA (1)...(19): siRNA sense strand
aggacgaggaugugaagaa

SEQ ID NO: 2294362 - RNA, 19 nt, Homo sapiens
  misc_RNA (1)...(19): siRNA sense strand
auuuaggaggugaggauaa

SEQ ID NO: 2294363 - RNA, 19 nt, Homo sapiens
  misc_RNA (1)...(19): siRNA sense strand
gcccaagaggagaggguuu

SEQ ID NO: 2294364 - RNA, 19 nt, Homo sapiens
  misc_RNA (1)...(19): siRNA sense strand
gaggagagaaggaggacga

SEQ ID NO: 2294365 - RNA, 19 nt, Homo sapiens
  misc_RNA (1)...(19): siRNA sense strand
agaaggaggacgaggacga

SEQ ID NO: 2294366 - RNA, 19 nt, Homo sapiens
  misc_RNA (1)...(19): siRNA sense strand
agggaaaagcaaaggagaa

SEQ ID NO: 2294367 - RNA, 19 nt, Homo sapiens
  misc_RNA (1)...(19): siRNA sense strand
ggugaggauaagaaagaga

SEQ ID NO: 2294368 - RNA, 19 nt, Homo sapiens
  misc_RNA (1)...(19): siRNA sense strand
aauucaagggugaggauga

SEQ ID NO: 2294369 - RNA, 19 nt, Homo sapiens
  misc_RNA (1)...(19): siRNA sense strand
gagagaaggaggacgagga

SEQ ID NO: 2294370 - RNA, 19 nt, Homo sapiens
  misc_RNA (1)...(19): siRNA sense strand
ggcaaagaggagagaagga

SEQ ID NO: 2294371 - RNA, 19 nt, Homo sapiens
  misc_RNA (1)...(19): siRNA sense strand
ggagaggguuugaccgcuu

SEQ ID NO: 2294372 - RNA, 19 nt, Homo sapiens
  misc_RNA (1)...(19): siRNA sense strand
acaaagagacccugcgguu

SEQ ID NO: 2294373 - RNA, 19 nt, Homo sapiens
  misc_RNA (1)...(19): siRNA sense strand
gaggcaaagaggagagaag

SEQ ID NO: 2294374 - RNA, 19 nt, Homo sapiens
  misc_RNA (1)...(19): siRNA sense strand
ccuggaacgagcugaacua

SEQ ID NO: 2294375 - RNA, 19 nt, Homo sapiens
  misc_RNA (1)...(19): siRNA sense strand
aggacgaggacgaggaugu

SEQ ID NO: 2294376 - RNA, 19 nt, Homo sapiens
  misc_RNA (1)...(19): siRNA sense strand
acgaggagccagacaccaa

SEQ ID NO: 2294377 - RNA, 19 nt, Homo sapiens
  misc_RNA (1)...(19): siRNA sense strand
aaauggaaggagaugacaa

SEQ ID NO: 2294378 - RNA, 19 nt, Homo sapiens
  misc_RNA (1)...(19): siRNA sense strand
ggguugacagugaaggaga

SEQ ID NO: 2294379 - RNA, 19 nt, Homo sapiens
  misc_RNA (1)...(19): siRNA sense strand
ggaacaaacugaugcagag

SEQ ID NO: 2294380 - RNA, 19 nt, Homo sapiens
  misc_RNA (1)...(19): siRNA sense strand
ugugaagaagagaagggaa

SEQ ID NO: 2294381 - RNA, 19 nt, Homo sapiens
  misc_RNA (1)...(19): siRNA sense strand
guuuugaacaacagacaua

SEQ ID NO: 2294382 - RNA, 19 nt, Homo sapiens
  misc_RNA (1)...(19): siRNA sense strand
uggagaaagaaaccgcaaa

SEQ ID NO: 2294383 - RNA, 19 nt, Homo sapiens
  misc_RNA (1)...(19): siRNA sense strand
ccgcggacgucuuagcaga

SEQ ID NO: 2294384 - RNA, 19 nt, Homo sapiens
  misc_RNA (1)...(19): siRNA sense strand
cagugaaugccgagaccca

SEQ ID NO: 2294385 - RNA, 19 nt, Homo sapiens
  misc_RNA (1)...(19): siRNA sense strand
aauggaaggagaugacaau

SEQ ID NO: 2294386 - RNA, 19 nt, Homo sapiens
  misc_RNA (1)...(19): siRNA sense strand
aggaggugaggauaagaaa

SEQ ID NO: 2294387 - RNA, 19 nt, Homo sapiens
  misc_RNA (1)...(19): siRNA sense strand
auagugaagaugcuggaaa

SEQ ID NO: 2294388 - RNA, 19 nt, Homo sapiens
  misc_RNA (1)...(19): siRNA sense strand
gacaauggcagcagaggca

SEQ ID NO: 2294389 - RNA, 19 nt, Homo sapiens
  misc_RNA (1)...(19): siRNA sense strand
agaaagugcccaaaccaga

SEQ ID NO: 2294390 - RNA, 19 nt, Homo sapiens
  misc_RNA (1)...(19): siRNA sense strand
gcuuugaugacgaagagau

SEQ ID NO: 2294391 - RNA, 19 nt, Homo sapiens
  misc_RNA (1)...(19): siRNA sense strand
ugagaagcggcgucaggaa

SEQ ID NO: 2294392 - RNA, 19 nt, Homo sapiens
  misc_RNA (1)...(19): siRNA sense strand
cagaaauggaaggagauga

SEQ ID NO: 2294393 - RNA, 19 nt, Homo sapiens
  misc_RNA (1)...(19): siRNA sense strand
uggaacaaacugaugcaga

SEQ ID NO: 2294394 - RNA, 19 nt, Homo sapiens
  misc_RNA (1)...(19): siRNA sense strand
cguggagacaggugggaaa

SEQ ID NO: 2294395 - RNA, 19 nt, Homo sapiens
  misc_RNA (1)...(19): siRNA sense strand
aggccugcacagagcguaa

SEQ ID NO: 2294396 - RNA, 19 nt, Homo sapiens
  misc_RNA (1)...(19): siRNA sense strand
gcagaugcccugaaggcca

SEQ ID NO: 2294397 - RNA, 19 nt, Homo sapiens
  misc_RNA (1)...(19): siRNA sense strand
cagaggagcuggaugccca

SEQ ID NO: 2294398 - RNA, 19 nt, Homo sapiens
  misc_RNA (1)...(19): siRNA sense strand
acgccuauaaugcgagaau

SEQ ID NO: 2294399 - RNA, 19 nt, Homo sapiens
  misc_RNA (1)...(19): siRNA sense strand
acgugcacuuugagcggaa

SEQ ID NO: 2294400 - RNA, 19 nt, Homo sapiens
  misc_RNA (1)...(19): siRNA sense strand
cagaggugccggcaggaau

SEQ ID NO: 2294401 - RNA, 19 nt, Homo sapiens
  misc_RNA (1)...(19): siRNA sense strand
aggccaugaagcaguacaa

SEQ ID NO: 2294402 - RNA, 19 nt, Homo sapiens
  misc_RNA (1)...(19): siRNA sense strand
acuccaggcacuaaggaaa

SEQ ID NO: 2294403 - RNA, 19 nt, Homo sapiens
  misc_RNA (1)...(19): siRNA sense strand
aagaagucaaggagaguga

SEQ ID NO: 2294404 - RNA, 19 nt, Homo sapiens
  misc_RNA (1)...(19): siRNA sense strand
guguaaaauacuagacaga

SEQ ID NO: 2294405 - RNA, 19 nt, Homo sapiens
  misc_RNA (1)...(19): siRNA sense strand
guuuacugaccuaggaaau

SEQ ID NO: 2294406 - RNA, 19 nt, Homo sapiens
  misc_RNA (1)...(19): siRNA sense strand
gcagaaacaagaauggcuu

SEQ ID NO: 2294407 - RNA, 19 nt, Homo sapiens
  misc_RNA (1)...(19): siRNA sense strand
guggaagaacauuuggauu

SEQ ID NO: 2294408 - RNA, 19 nt, Homo sapiens
  misc_RNA (1)...(19): siRNA sense strand
agucaaggagagugaaaau

SEQ ID NO: 2294409 - RNA, 19 nt, Homo sapiens
  misc_RNA (1)...(19): siRNA sense strand
cauggggaauacagagaaa

SEQ ID NO: 2294410 - RNA, 19 nt, Homo sapiens
  misc_RNA (1)...(19): siRNA sense strand
ugggaaaacacaagauuau

SEQ ID NO: 2294411 - RNA, 19 nt, Homo sapiens
  misc_RNA (1)...(19): siRNA sense strand
agauggaugaggaugaauu

SEQ ID NO: 2294412 - RNA, 19 nt, Homo sapiens
  misc_RNA (1)...(19): siRNA sense strand
cuaaaggacauggggaaua

SEQ ID NO: 2294413 - RNA, 19 nt, Homo sapiens
  misc_RNA (1)...(19): siRNA sense strand
aagauuauguuguuggguu

SEQ ID NO: 2294414 - RNA, 19 nt, Homo sapiens
  misc_RNA (1)...(19): siRNA sense strand
gguuuacugaccuaggaaa

SEQ ID NO: 2294415 - RNA, 19 nt, Homo sapiens
  misc_RNA (1)...(19): siRNA sense strand
ggaucagauggaugaggau

SEQ ID NO: 2294416 - RNA, 19 nt, Homo sapiens
  misc_RNA (1)...(19): siRNA sense strand
ccaccauuucagaaccaaa

SEQ ID NO: 2294417 - RNA, 19 nt, Homo sapiens
  misc_RNA (1)...(19): siRNA sense strand
caaacugguggaagaacau

SEQ ID NO: 2294418 - RNA, 19 nt, Homo sapiens
  misc_RNA (1)...(19): siRNA sense strand
cuauccgaggaaagaaaua

SEQ ID NO: 2294419 - RNA, 19 nt, Homo sapiens
  misc_RNA (1)...(19): siRNA sense strand
ggcacuaaggaaagcucaa

SEQ ID NO: 2294420 - RNA, 19 nt, Homo sapiens
  misc_RNA (1)...(19): siRNA sense strand
augaauaugacgagaacaa

SEQ ID NO: 2294421 - RNA, 19 nt, Homo sapiens
  misc_RNA (1)...(19): siRNA sense strand
cuaucaacaccaagaguca

SEQ ID NO: 2294422 - RNA, 19 nt, Homo sapiens
  misc_RNA (1)...(19): siRNA sense strand
uggaugaauaugacgagaa

SEQ ID NO: 2294423 - RNA, 19 nt, Homo sapiens
  misc_RNA (1)...(19): siRNA sense strand
aaacaugacagcugcccua

SEQ ID NO: 2294424 - RNA, 19 nt, Homo sapiens
  misc_RNA (1)...(19): siRNA sense strand
acuugcugcuggaggagua

SEQ ID NO: 2294425 - RNA, 19 nt, Homo sapiens
  misc_RNA (1)...(19): siRNA sense strand
caguucaaucucuggacaa

SEQ ID NO: 2294426 - RNA, 19 nt, Homo sapiens
  misc_RNA (1)...(19): siRNA sense strand
acaagaaugguguggaucu

SEQ ID NO: 2294427 - RNA, 19 nt, Homo sapiens
  misc_RNA (1)...(19): siRNA sense strand
cugcaaacaaacaggaaga

SEQ ID NO: 2294428 - RNA, 19 nt, Homo sapiens
  misc_RNA (1)...(19): siRNA sense strand
agccaaggugagaaagaaa

SEQ ID NO: 2294429 - RNA, 19 nt, Homo sapiens
  misc_RNA (1)...(19): siRNA sense strand
ucuauuacuucaaggccaa

SEQ ID NO: 2294430 - RNA, 19 nt, Homo sapiens
  misc_RNA (1)...(19): siRNA sense strand
augccaaaccugcaaacaa

SEQ ID NO: 2294431 - RNA, 19 nt, Homo sapiens
  misc_RNA (1)...(19): siRNA sense strand
acaaacaggaagaugaagu

SEQ ID NO: 2294432 - RNA, 19 nt, Homo sapiens
  misc_RNA (1)...(19): siRNA sense strand
gaaauguauacgcugggaa

SEQ ID NO: 2294433 - RNA, 19 nt, Homo sapiens
  misc_RNA (1)...(19): siRNA sense strand
gcacaguguuuaaggauga

SEQ ID NO: 2294434 - RNA, 19 nt, Homo sapiens
  misc_RNA (1)...(19): siRNA sense strand
gggcaaggaaggagagaac

SEQ ID NO: 2294435 - RNA, 19 nt, Homo sapiens
  misc_RNA (1)...(19): siRNA sense strand
acaaggaacuucaggcaca

SEQ ID NO: 2294436 - RNA, 19 nt, Homo sapiens
  misc_RNA (1)...(19): siRNA sense strand
cuggcauguugaagcgaaa

SEQ ID NO: 2294437 - RNA, 19 nt, Homo sapiens
  misc_RNA (1)...(19): siRNA sense strand
gaaacaaaccggaagcagu

SEQ ID NO: 2294438 - RNA, 19 nt, Homo sapiens
  misc_RNA (1)...(19): siRNA sense strand
cuugguaaauccagaauca

SEQ ID NO: 2294439 - RNA, 19 nt, Homo sapiens
  misc_RNA (1)...(19): siRNA sense strand
aaauccuaauggagacaaa

SEQ ID NO: 2294440 - RNA, 19 nt, Homo sapiens
  misc_RNA (1)...(19): siRNA sense strand
gcuauaugaccuugaaaau

SEQ ID NO: 2294441 - RNA, 19 nt, Homo sapiens
  misc_RNA (1)...(19): siRNA sense strand
acgggaguuucuugguaaa

SEQ ID NO: 2294442 - RNA, 19 nt, Homo sapiens
  misc_RNA (1)...(19): siRNA sense strand
ccucuggagcugaaagaca

SEQ ID NO: 2294443 - RNA, 19 nt, Homo sapiens
  misc_RNA (1)...(19): siRNA sense strand
aauuccaagaagagggcaa

SEQ ID NO: 2294444 - RNA, 19 nt, Homo sapiens
  misc_RNA (1)...(19): siRNA sense strand
uuucaaauccuaauggaga

SEQ ID NO: 2294445 - RNA, 19 nt, Homo sapiens
  misc_RNA (1)...(19): siRNA sense strand
aagcaguagaaguaacauu

SEQ ID NO: 2294446 - RNA, 19 nt, Homo sapiens
  misc_RNA (1)...(19): siRNA sense strand
guuuaaggaugacgacgau

SEQ ID NO: 2294447 - RNA, 19 nt, Homo sapiens
  misc_RNA (1)...(19): siRNA sense strand
cggaagcaguagaaguaac

SEQ ID NO: 2294448 - RNA, 19 nt, Homo sapiens
  misc_RNA (1)...(19): siRNA sense strand
gaaagguguucaugcagga

SEQ ID NO: 2294449 - RNA, 19 nt, Homo sapiens
  misc_RNA (1)...(19): siRNA sense strand
ugaaaacaaucacggggaa

SEQ ID NO: 2294450 - RNA, 19 nt, Homo sapiens
  misc_RNA (1)...(19): siRNA sense strand
ugaaauucuacaaggaacu

SEQ ID NO: 2294451 - RNA, 19 nt, Homo sapiens
  misc_RNA (1)...(19): siRNA sense strand
uguuuaaggaugacgacga

SEQ ID NO: 2294452 - RNA, 19 nt, Homo sapiens
  misc_RNA (1)...(19): siRNA sense strand
gcacaguguuuaaggauga

SEQ ID NO: 2294453 - RNA, 19 nt, Homo sapiens
  misc_RNA (1)...(19): siRNA sense strand
gggcaaggaaggagagaac

SEQ ID NO: 2294454 - RNA, 19 nt, Homo sapiens
  misc_RNA (1)...(19): siRNA sense strand
acaaggaacuucaggcaca

SEQ ID NO: 2294455 - RNA, 19 nt, Homo sapiens
  misc_RNA (1)...(19): siRNA sense strand
cuggcauguugaagcgaaa

SEQ ID NO: 2294456 - RNA, 19 nt, Homo sapiens
  misc_RNA (1)...(19): siRNA sense strand
gaaacaaaccggaagcagu

SEQ ID NO: 2294457 - RNA, 19 nt, Homo sapiens
  misc_RNA (1)...(19): siRNA sense strand
cuugguaaauccagaauca

SEQ ID NO: 2294458 - RNA, 19 nt, Homo sapiens
  misc_RNA (1)...(19): siRNA sense strand
aaauccuaauggagacaaa

SEQ ID NO: 2294459 - RNA, 19 nt, Homo sapiens
  misc_RNA (1)...(19): siRNA sense strand
gcuauaugaccuugaaaau

SEQ ID NO: 2294460 - RNA, 19 nt, Homo sapiens
  misc_RNA (1)...(19): siRNA sense strand
acgggaguuucuugguaaa

SEQ ID NO: 2294461 - RNA, 19 nt, Homo sapiens
  misc_RNA (1)...(19): siRNA sense strand
ccucuggagcugaaagaca

SEQ ID NO: 2294462 - RNA, 19 nt, Homo sapiens
  misc_RNA (1)...(19): siRNA sense strand
aauuccaagaagagggcaa

SEQ ID NO: 2294463 - RNA, 19 nt, Homo sapiens
  misc_RNA (1)...(19): siRNA sense strand
uuucaaauccuaauggaga

SEQ ID NO: 2294464 - RNA, 19 nt, Homo sapiens
  misc_RNA (1)...(19): siRNA sense strand
aagcaguagaaguaacauu

SEQ ID NO: 2294465 - RNA, 19 nt, Homo sapiens
  misc_RNA (1)...(19): siRNA sense strand
guuuaaggaugacgacgau

SEQ ID NO: 2294466 - RNA, 19 nt, Homo sapiens
  misc_RNA (1)...(19): siRNA sense strand
cggaagcaguagaaguaac

SEQ ID NO: 2294467 - RNA, 19 nt, Homo sapiens
  misc_RNA (1)...(19): siRNA sense strand
gaaagguguucaugcagga

SEQ ID NO: 2294468 - RNA, 19 nt, Homo sapiens
  misc_RNA (1)...(19): siRNA sense strand
ugaaaacaaucacggggaa

SEQ ID NO: 2294469 - RNA, 19 nt, Homo sapiens
  misc_RNA (1)...(19): siRNA sense strand
ugaaauucuacaaggaacu

SEQ ID NO: 2294470 - RNA, 19 nt, Homo sapiens
  misc_RNA (1)...(19): siRNA sense strand
uguuuaaggaugacgacga

SEQ ID NO: 2294471 - RNA, 19 nt, Homo sapiens
  misc_RNA (1)...(19): siRNA sense strand
ugaaaagagcggugccaaa

SEQ ID NO: 2294472 - RNA, 19 nt, Homo sapiens
  misc_RNA (1)...(19): siRNA sense strand
ccaaggugcacgagcucaa

SEQ ID NO: 2294473 - RNA, 19 nt, Homo sapiens
  misc_RNA (1)...(19): siRNA sense strand
gcacagaccgcaacgccua

SEQ ID NO: 2294474 - RNA, 19 nt, Homo sapiens
  misc_RNA (1)...(19): siRNA sense strand
ccaaauggaccaaggugca

SEQ ID NO: 2294475 - RNA, 19 nt, Homo sapiens
  misc_RNA (1)...(19): siRNA sense strand
ccaacaaccaugaggugca

SEQ ID NO: 2294476 - RNA, 19 nt, Homo sapiens
  misc_RNA (1)...(19): siRNA sense strand
acaucaaggagguggagga

SEQ ID NO: 2294477 - RNA, 19 nt, Homo sapiens
  misc_RNA (1)...(19): siRNA sense strand
cggcaugaguaucugggau

SEQ ID NO: 2294478 - RNA, 19 nt, Homo sapiens
  misc_RNA (1)...(19): siRNA sense strand
guuauuucgagcaggagaa

SEQ ID NO: 2294479 - RNA, 19 nt, Homo sapiens
  misc_RNA (1)...(19): siRNA sense strand
auuucgagcaggagaauga

SEQ ID NO: 2294480 - RNA, 19 nt, Homo sapiens
  misc_RNA (1)...(19): siRNA sense strand
ggaccaaggugcacgagcu

SEQ ID NO: 2294481 - RNA, 19 nt, Homo sapiens
  misc_RNA (1)...(19): siRNA sense strand
cugcacaagaacagcguca

SEQ ID NO: 2294482 - RNA, 19 nt, Homo sapiens
  misc_RNA (1)...(19): siRNA sense strand
gccuagacucgcugcacaa

SEQ ID NO: 2294483 - RNA, 19 nt, Homo sapiens
  misc_RNA (1)...(19): siRNA sense strand
caagaugcccuuuggggaa

SEQ ID NO: 2294484 - RNA, 19 nt, Homo sapiens
  misc_RNA (1)...(19): siRNA sense strand
aggauuuaacacugagaaa

SEQ ID NO: 2294485 - RNA, 19 nt, Homo sapiens
  misc_RNA (1)...(19): siRNA sense strand
aggagauggccuaaaggaa

SEQ ID NO: 2294486 - RNA, 19 nt, Homo sapiens
  misc_RNA (1)...(19): siRNA sense strand
aaggauggaagaagccaaa

SEQ ID NO: 2294487 - RNA, 19 nt, Homo sapiens
  misc_RNA (1)...(19): siRNA sense strand
cuguugaugucgaaaggau

SEQ ID NO: 2294488 - RNA, 19 nt, Homo sapiens
  misc_RNA (1)...(19): siRNA sense strand
ggagauggccuaaaggaag

SEQ ID NO: 2294489 - RNA, 19 nt, Homo sapiens
  misc_RNA (1)...(19): siRNA sense strand
ggauguagguggucaggag

SEQ ID NO: 2294490 - RNA, 19 nt, Homo sapiens
  misc_RNA (1)...(19): siRNA sense strand
ggauuuaacacugagaaaa

SEQ ID NO: 2294491 - RNA, 19 nt, Homo sapiens
  misc_RNA (1)...(19): siRNA sense strand
ggaaugggcugucagacca

SEQ ID NO: 2294492 - RNA, 19 nt, Homo sapiens
  misc_RNA (1)...(19): siRNA sense strand
acauuguuauucuggguuu

SEQ ID NO: 2294493 - RNA, 19 nt, Homo sapiens
  misc_RNA (1)...(19): siRNA sense strand
ggauaaaugaagauggaga

SEQ ID NO: 2294494 - RNA, 19 nt, Homo sapiens
  misc_RNA (1)...(19): siRNA sense strand
cugcaagaugggagggaau

SEQ ID NO: 2294495 - RNA, 19 nt, Homo sapiens
  misc_RNA (1)...(19): siRNA sense strand
uuaaggugucagagagaua

SEQ ID NO: 2294496 - RNA, 19 nt, Homo sapiens
  misc_RNA (1)...(19): siRNA sense strand
cggagaaggaggaucaaaa

SEQ ID NO: 2294497 - RNA, 19 nt, Homo sapiens
  misc_RNA (1)...(19): siRNA sense strand
uguacaaaggcgagacaau

SEQ ID NO: 2294498 - RNA, 19 nt, Homo sapiens
  misc_RNA (1)...(19): siRNA sense strand
augugaagcaguagauaau

SEQ ID NO: 2294499 - RNA, 19 nt, Homo sapiens
  misc_RNA (1)...(19): siRNA sense strand
gagaagaagaacuggcaac

SEQ ID NO: 2294500 - RNA, 19 nt, Homo sapiens
  misc_RNA (1)...(19): siRNA sense strand
caaaagaggugguggggac

SEQ ID NO: 2294501 - RNA, 19 nt, Homo sapiens
  misc_RNA (1)...(19): siRNA sense strand
ggaagagaagagagcgacu

SEQ ID NO: 2294502 - RNA, 19 nt, Homo sapiens
  misc_RNA (1)...(19): siRNA sense strand
augaagauggagaagaaga

SEQ ID NO: 2294503 - RNA, 19 nt, Homo sapiens
  misc_RNA (1)...(19): siRNA sense strand
auuuaaggugucagagaga

SEQ ID NO: 2294504 - RNA, 19 nt, Homo sapiens
  misc_RNA (1)...(19): siRNA sense strand
auggaagagaagagagcga

SEQ ID NO: 2294505 - RNA, 19 nt, Homo sapiens
  misc_RNA (1)...(19): siRNA sense strand
agaguuuggaugggagaaa

SEQ ID NO: 2294506 - RNA, 19 nt, Homo sapiens
  misc_RNA (1)...(19): siRNA sense strand
uuugaaggauugaaggcau

SEQ ID NO: 2294507 - RNA, 19 nt, Homo sapiens
  misc_RNA (1)...(19): siRNA sense strand
ggagaagaagaacuggcaa

SEQ ID NO: 2294508 - RNA, 19 nt, Homo sapiens
  misc_RNA (1)...(19): siRNA sense strand
auuucgaggaguagauaau

SEQ ID NO: 2294509 - RNA, 19 nt, Homo sapiens
  misc_RNA (1)...(19): siRNA sense strand
gugaaauuggaucaagaau

SEQ ID NO: 2294510 - RNA, 19 nt, Homo sapiens
  misc_RNA (1)...(19): siRNA sense strand
uugugaaauuggaucaaga

SEQ ID NO: 2294511 - RNA, 19 nt, Homo sapiens
  misc_RNA (1)...(19): siRNA sense strand
agucaagaagccuaccaaa

SEQ ID NO: 2294512 - RNA, 19 nt, Homo sapiens
  misc_RNA (1)...(19): siRNA sense strand
ccgcagaguguaccggaga

SEQ ID NO: 2294513 - RNA, 19 nt, Homo sapiens
  misc_RNA (1)...(19): siRNA sense strand
ggagaaugguccuaagcug

SEQ ID NO: 2294514 - RNA, 19 nt, Homo sapiens
  misc_RNA (1)...(19): siRNA sense strand
acugaaagucugagaagca

SEQ ID NO: 2294515 - RNA, 19 nt, Homo sapiens
  misc_RNA (1)...(19): siRNA sense strand
agguaaaacuaugggcaaa

SEQ ID NO: 2294516 - RNA, 19 nt, Homo sapiens
  misc_RNA (1)...(19): siRNA sense strand
ugaaagucugagaagcaaa

SEQ ID NO: 2294517 - RNA, 19 nt, Homo sapiens
  misc_RNA (1)...(19): siRNA sense strand
aacuggauuucuagguaaa

SEQ ID NO: 2294518 - RNA, 19 nt, Homo sapiens
  misc_RNA (1)...(19): siRNA sense strand
augacaagcagcagauuau

SEQ ID NO: 2294519 - RNA, 19 nt, Homo sapiens
  misc_RNA (1)...(19): siRNA sense strand
gcuucgaguccuagagaac

SEQ ID NO: 2294520 - RNA, 19 nt, Homo sapiens
  misc_RNA (1)...(19): siRNA sense strand
caaagguacugaaggccca

SEQ ID NO: 2294521 - RNA, 19 nt, Homo sapiens
  misc_RNA (1)...(19): siRNA sense strand
ccacagagcaacuggggca

SEQ ID NO: 2294522 - RNA, 19 nt, Homo sapiens
  misc_RNA (1)...(19): siRNA sense strand
uggaggaggacgaguacca

SEQ ID NO: 2294523 - RNA, 19 nt, Homo sapiens
  misc_RNA (1)...(19): siRNA sense strand
gcaucgagaucaacgccuu

SEQ ID NO: 2294524 - RNA, 19 nt, Homo sapiens
  misc_RNA (1)...(19): siRNA sense strand
ccuaagcgcuacaaggcca

SEQ ID NO: 2294525 - RNA, 19 nt, Homo sapiens
  misc_RNA (1)...(19): siRNA sense strand
ggauguacuuggugggcuu

SEQ ID NO: 2294526 - RNA, 19 nt, Homo sapiens
  misc_RNA (1)...(19): siRNA sense strand
augaaagcauauacagcaa

SEQ ID NO: 2294527 - RNA, 19 nt, Homo sapiens
  misc_RNA (1)...(19): siRNA sense strand
uugaaagauacuuggacua

SEQ ID NO: 2294528 - RNA, 19 nt, Homo sapiens
  misc_RNA (1)...(19): siRNA sense strand
agaagaacaaggcggugaa

SEQ ID NO: 2294529 - RNA, 19 nt, Homo sapiens
  misc_RNA (1)...(19): siRNA sense strand
guguuuuccuugagggcaa

SEQ ID NO: 2294530 - RNA, 19 nt, Homo sapiens
  misc_RNA (1)...(19): siRNA sense strand
cuuguuauacugagcgcaa

SEQ ID NO: 2294531 - RNA, 19 nt, Homo sapiens
  misc_RNA (1)...(19): siRNA sense strand
caaagaaggcaucaaggca

SEQ ID NO: 2294532 - RNA, 19 nt, Homo sapiens
  misc_RNA (1)...(19): siRNA sense strand
caguuuggcuacaugguca

SEQ ID NO: 2294533 - RNA, 19 nt, Homo sapiens
  misc_RNA (1)...(19): siRNA sense strand
aaagaaggcaucaaggcau

SEQ ID NO: 2294534 - RNA, 19 nt, Homo sapiens
  misc_RNA (1)...(19): siRNA sense strand
auugauagauaccuggcaa

SEQ ID NO: 2294535 - RNA, 19 nt, Homo sapiens
  misc_RNA (1)...(19): siRNA sense strand
cuacauggucaguggcugu

SEQ ID NO: 2294536 - RNA, 19 nt, Homo sapiens
  misc_RNA (1)...(19): siRNA sense strand
cuuacaacauagugcucuu

SEQ ID NO: 2294537 - RNA, 19 nt, Homo sapiens
  misc_RNA (1)...(19): siRNA sense strand
gcaccaaagaaggcaucaa

SEQ ID NO: 2294538 - RNA, 19 nt, Homo sapiens
  misc_RNA (1)...(19): siRNA sense strand
gggcuuuuacaguggcaua

SEQ ID NO: 2294539 - RNA, 19 nt, Homo sapiens
  misc_RNA (1)...(19): siRNA sense strand
ucuguauaccugagggaaa

SEQ ID NO: 2294540 - RNA, 19 nt, Homo sapiens
  misc_RNA (1)...(19): siRNA sense strand
acucagaaacaaagcaaau

SEQ ID NO: 2294541 - RNA, 19 nt, Homo sapiens
  misc_RNA (1)...(19): siRNA sense strand
cugcagaaauauuagccaa

SEQ ID NO: 2294542 - RNA, 19 nt, Homo sapiens
  misc_RNA (1)...(19): siRNA sense strand
auaacagacaagugcaaua

SEQ ID NO: 2294543 - RNA, 19 nt, Homo sapiens
  misc_RNA (1)...(19): siRNA sense strand
gggagaucaucgaggccau

SEQ ID NO: 2294544 - RNA, 19 nt, Homo sapiens
  misc_RNA (1)...(19): siRNA sense strand
ccuacagggaacucagaaa

SEQ ID NO: 2294545 - RNA, 19 nt, Homo sapiens
  misc_RNA (1)...(19): siRNA sense strand
uguugaaacgggagacauu

SEQ ID NO: 2294546 - RNA, 19 nt, Homo sapiens
  misc_RNA (1)...(19): siRNA sense strand
cagggaacucagaaacaaa

SEQ ID NO: 2294547 - RNA, 19 nt, Homo sapiens
  misc_RNA (1)...(19): siRNA sense strand
gaguguucacauugauaaa

SEQ ID NO: 2294548 - RNA, 19 nt, Homo sapiens
  misc_RNA (1)...(19): siRNA sense strand
cgagaagaaaauuguguua

SEQ ID NO: 2294549 - RNA, 19 nt, Homo sapiens
  misc_RNA (1)...(19): siRNA sense strand
gguauaaaguuccugcaga

SEQ ID NO: 2294550 - RNA, 19 nt, Homo sapiens
  misc_RNA (1)...(19): siRNA sense strand
ccauacaccuacagggaac

SEQ ID NO: 2294551 - RNA, 19 nt, Homo sapiens
  misc_RNA (1)...(19): siRNA sense strand
uguggaauggaaugggaaa

SEQ ID NO: 2294552 - RNA, 19 nt, Homo sapiens
  misc_RNA (1)...(19): siRNA sense strand
ucaccaauccagaggagau

SEQ ID NO: 2294553 - RNA, 19 nt, Homo sapiens
  misc_RNA (1)...(19): siRNA sense strand
gauuaauggaacagaugga

SEQ ID NO: 2294554 - RNA, 19 nt, Homo sapiens
  misc_RNA (1)...(19): siRNA sense strand
gcaauaugauuaauggaac

SEQ ID NO: 2294555 - RNA, 19 nt, Homo sapiens
  misc_RNA (1)...(19): siRNA sense strand
aggcuguagaccagaguau

SEQ ID NO: 2294556 - RNA, 19 nt, Homo sapiens
  misc_RNA (1)...(19): siRNA sense strand
ggaugagggaacagcggau

SEQ ID NO: 2294557 - RNA, 19 nt, Homo sapiens
  misc_RNA (1)...(19): siRNA sense strand
cagaguaucgagaagaaaa

SEQ ID NO: 2294558 - RNA, 19 nt, Homo sapiens
  misc_RNA (1)...(19): siRNA sense strand
aaggaaugguacugaggca

SEQ ID NO: 2294559 - RNA, 19 nt, Homo sapiens
  misc_RNA (1)...(19): siRNA sense strand
auuuggagauaauggaaca

SEQ ID NO: 2294560 - RNA, 19 nt, Homo sapiens
  misc_RNA (1)...(19): siRNA sense strand
uggagauaauggaacaaca

SEQ ID NO: 2294561 - RNA, 19 nt, Homo sapiens
  misc_RNA (1)...(19): siRNA sense strand
uggaagaaguggggccaua

SEQ ID NO: 2294562 - RNA, 19 nt, Homo sapiens
  misc_RNA (1)...(19): siRNA sense strand
ccagaaggcuguagaccag

SEQ ID NO: 2294563 - RNA, 19 nt, Homo sapiens
  misc_RNA (1)...(19): siRNA sense strand
guguauacucaguucuauu

SEQ ID NO: 2294564 - RNA, 19 nt, Homo sapiens
  misc_RNA (1)...(19): siRNA sense strand
cuaugagaguguacaggga

SEQ ID NO: 2294565 - RNA, 19 nt, Homo sapiens
  misc_RNA (1)...(19): siRNA sense strand
gugcacuuccucagggaga

SEQ ID NO: 2294566 - RNA, 19 nt, Homo sapiens
  misc_RNA (1)...(19): siRNA sense strand
agccaauacgucagacaau

SEQ ID NO: 2294567 - RNA, 19 nt, Homo sapiens
  misc_RNA (1)...(19): siRNA sense strand
ccuaaaacccauugugaaa

SEQ ID NO: 2294568 - RNA, 19 nt, Homo sapiens
  misc_RNA (1)...(19): siRNA sense strand
uguuaaagaaggaggacau

SEQ ID NO: 2294569 - RNA, 19 nt, Homo sapiens
  misc_RNA (1)...(19): siRNA sense strand
agaaguggguugaggacau

SEQ ID NO: 2294570 - RNA, 19 nt, Homo sapiens
  misc_RNA (1)...(19): siRNA sense strand
acaaagagcuccugggaag

SEQ ID NO: 2294571 - RNA, 19 nt, Homo sapiens
  misc_RNA (1)...(19): siRNA sense strand
gggaaggcacgaagaucaa

SEQ ID NO: 2294572 - RNA, 19 nt, Homo sapiens
  misc_RNA (1)...(19): siRNA sense strand
aggacaaaaucguggaauu

SEQ ID NO: 2294573 - RNA, 19 nt, Homo sapiens
  misc_RNA (1)...(19): siRNA sense strand
acaaaucacaccaggacaa

SEQ ID NO: 2294574 - RNA, 19 nt, Homo sapiens
  misc_RNA (1)...(19): siRNA sense strand
ccucugaguccgagaacau

SEQ ID NO: 2294575 - RNA, 19 nt, Homo sapiens
  misc_RNA (1)...(19): siRNA sense strand
agaaagacuacguguucaa

SEQ ID NO: 2294576 - RNA, 19 nt, Homo sapiens
  misc_RNA (1)...(19): siRNA sense strand
uuguuaaguuuguggugaa

SEQ ID NO: 2294577 - RNA, 19 nt, Homo sapiens
  misc_RNA (1)...(19): siRNA sense strand
ccacggaggaagaggagga

SEQ ID NO: 2294578 - RNA, 19 nt, Homo sapiens
  misc_RNA (1)...(19): siRNA sense strand
ccuuggaggcccuggagaa

SEQ ID NO: 2294579 - RNA, 19 nt, Homo sapiens
  misc_RNA (1)...(19): siRNA sense strand
ccauaaccacauuggacaa

SEQ ID NO: 2294580 - RNA, 19 nt, Homo sapiens
  misc_RNA (1)...(19): siRNA sense strand
gaaacagauuagaaggcca

SEQ ID NO: 2294581 - RNA, 19 nt, Homo sapiens
  misc_RNA (1)...(19): siRNA sense strand
uggacaaacaccagcagaa

SEQ ID NO: 2294582 - RNA, 19 nt, Homo sapiens
  misc_RNA (1)...(19): siRNA sense strand
aaacagauuagaaggccaa

SEQ ID NO: 2294583 - RNA, 19 nt, Homo sapiens
  misc_RNA (1)...(19): siRNA sense strand
ucacggagaugguggcaca

SEQ ID NO: 2294584 - RNA, 19 nt, Homo sapiens
  misc_RNA (1)...(19): siRNA sense strand
agagauugcccgucggcua

SEQ ID NO: 2294585 - RNA, 19 nt, Homo sapiens
  misc_RNA (1)...(19): siRNA sense strand
aagacgcacuagaggacaa

SEQ ID NO: 2294586 - RNA, 19 nt, Homo sapiens
  misc_RNA (1)...(19): siRNA sense strand
agaaagauuugauuggcau

SEQ ID NO: 2294587 - RNA, 19 nt, Homo sapiens
  misc_RNA (1)...(19): siRNA sense strand
cugcaaguccuucuggaaa

SEQ ID NO: 2294588 - RNA, 19 nt, Homo sapiens
  misc_RNA (1)...(19): siRNA sense strand
aagaggaggaggucguuaa

SEQ ID NO: 2294589 - RNA, 19 nt, Homo sapiens
  misc_RNA (1)...(19): siRNA sense strand
aggugcaguuugaaaggaa

SEQ ID NO: 2294590 - RNA, 19 nt, Homo sapiens
  misc_RNA (1)...(19): siRNA sense strand
cagccuuacauuuggagaa

SEQ ID NO: 2294591 - RNA, 19 nt, Homo sapiens
  misc_RNA (1)...(19): siRNA sense strand
cccaacaccuucaggaaaa

SEQ ID NO: 2294592 - RNA, 19 nt, Homo sapiens
  misc_RNA (1)...(19): siRNA sense strand
agggaaggcacgaagauca

SEQ ID NO: 2294593 - RNA, 19 nt, Homo sapiens
  misc_RNA (1)...(19): siRNA sense strand
aggaagaggaggaggucgu

SEQ ID NO: 2294594 - RNA, 19 nt, Homo sapiens
  misc_RNA (1)...(19): siRNA sense strand
cgggaauucuaguguuuca

SEQ ID NO: 2294595 - RNA, 19 nt, Homo sapiens
  misc_RNA (1)...(19): siRNA sense strand
aagaaggugcaguuugaaa

SEQ ID NO: 2294596 - RNA, 19 nt, Homo sapiens
  misc_RNA (1)...(19): siRNA sense strand
cgaugaucaagauggagaa

SEQ ID NO: 2294597 - RNA, 19 nt, Homo sapiens
  misc_RNA (1)...(19): siRNA sense strand
cggcuagagauguauggaa

SEQ ID NO: 2294598 - RNA, 19 nt, Homo sapiens
  misc_RNA (1)...(19): siRNA sense strand
ucguggaauuucaccauaa

SEQ ID NO: 2294599 - RNA, 19 nt, Homo sapiens
  misc_RNA (1)...(19): siRNA sense strand
cggaggaagaggaggaggu

SEQ ID NO: 2294600 - RNA, 19 nt, Homo sapiens
  misc_RNA (1)...(19): siRNA sense strand
uugaaaggaagcacagcaa

SEQ ID NO: 2294601 - RNA, 19 nt, Homo sapiens
  misc_RNA (1)...(19): siRNA sense strand
cacacaacuccaagaagaa

SEQ ID NO: 2294602 - RNA, 19 nt, Homo sapiens
  misc_RNA (1)...(19): siRNA sense strand
caggaaaacucguguccau

SEQ ID NO: 2294603 - RNA, 19 nt, Homo sapiens
  misc_RNA (1)...(19): siRNA sense strand
gagaacauccagaaagacu

SEQ ID NO: 2294604 - RNA, 19 nt, Homo sapiens
  misc_RNA (1)...(19): siRNA sense strand
uguuaaguuuguggugaaa

SEQ ID NO: 2294605 - RNA, 19 nt, Homo sapiens
  misc_RNA (1)...(19): siRNA sense strand
cagagagcacuuagcaaaa

SEQ ID NO: 2294606 - RNA, 19 nt, Homo sapiens
  misc_RNA (1)...(19): siRNA sense strand
guuaaagaaggaggacaua

SEQ ID NO: 2294607 - RNA, 19 nt, Homo sapiens
  misc_RNA (1)...(19): siRNA sense strand
aguuuaaaguccacgggca

SEQ ID NO: 2294608 - RNA, 19 nt, Homo sapiens
  misc_RNA (1)...(19): siRNA sense strand
ccucguggaaggugacuau

SEQ ID NO: 2294609 - RNA, 19 nt, Homo sapiens
  misc_RNA (1)...(19): siRNA sense strand
ucagagauuaccaaagaau

SEQ ID NO: 2294610 - RNA, 19 nt, Homo sapiens
  misc_RNA (1)...(19): siRNA sense strand
aagaaagauuugauuggca

SEQ ID NO: 2294611 - RNA, 19 nt, Homo sapiens
  misc_RNA (1)...(19): siRNA sense strand
agguugacguguaaugaca

SEQ ID NO: 2294612 - RNA, 19 nt, Homo sapiens
  misc_RNA (1)...(19): siRNA sense strand
acgaugaucaagauggaga

SEQ ID NO: 2294613 - RNA, 19 nt, Homo sapiens
  misc_RNA (1)...(19): siRNA sense strand
gcauguucuuccuguucaa

SEQ ID NO: 2294614 - RNA, 19 nt, Homo sapiens
  misc_RNA (1)...(19): siRNA sense strand
agaacauccagaaagacua

SEQ ID NO: 2294615 - RNA, 19 nt, Homo sapiens
  misc_RNA (1)...(19): siRNA sense strand
ucacuaagaucaaugccuu

SEQ ID NO: 2294616 - RNA, 19 nt, Homo sapiens
  misc_RNA (1)...(19): siRNA sense strand
aagaaggaggacauaagaa

SEQ ID NO: 2294617 - RNA, 19 nt, Homo sapiens
  misc_RNA (1)...(19): siRNA sense strand
cgaacauaucugaaggauc

SEQ ID NO: 2294618 - RNA, 19 nt, Homo sapiens
  misc_RNA (1)...(19): siRNA sense strand
gaaagauuugauuggcauu

SEQ ID NO: 2294619 - RNA, 19 nt, Homo sapiens
  misc_RNA (1)...(19): siRNA sense strand
ugacgauugaggagagcga

SEQ ID NO: 2294620 - RNA, 19 nt, Homo sapiens
  misc_RNA (1)...(19): siRNA sense strand
caacaaguccccugaugaa

SEQ ID NO: 2294621 - RNA, 19 nt, Homo sapiens
  misc_RNA (1)...(19): siRNA sense strand
accaggagucagaggauga

SEQ ID NO: 2294622 - RNA, 19 nt, Homo sapiens
  misc_RNA (1)...(19): siRNA sense strand
ccggaaaauucggggauca

SEQ ID NO: 2294623 - RNA, 19 nt, Homo sapiens
  misc_RNA (1)...(19): siRNA sense strand
ucgagaaaggagaagaaca

SEQ ID NO: 2294624 - RNA, 19 nt, Homo sapiens
  misc_RNA (1)...(19): siRNA sense strand
gagaagaacacuguggaca

SEQ ID NO: 2294625 - RNA, 19 nt, Homo sapiens
  misc_RNA (1)...(19): siRNA sense strand
caagaaaucagaugggaga

SEQ ID NO: 2294626 - RNA, 19 nt, Homo sapiens
  misc_RNA (1)...(19): siRNA sense strand
gggcagcaauuuugggcaa

SEQ ID NO: 2294627 - RNA, 19 nt, Homo sapiens
  misc_RNA (1)...(19): siRNA sense strand
ucagaugggagaagggaca

SEQ ID NO: 2294628 - RNA, 19 nt, Homo sapiens
  misc_RNA (1)...(19): siRNA sense strand
gggagaagggacaagcaga

SEQ ID NO: 2294629 - RNA, 19 nt, Homo sapiens
  misc_RNA (1)...(19): siRNA sense strand
gcagauaagcgcaagccca

SEQ ID NO: 2294630 - RNA, 19 nt, Homo sapiens
  misc_RNA (1)...(19): siRNA sense strand
cagauaagcgcaagcccau

SEQ ID NO: 2294631 - RNA, 19 nt, Homo sapiens
  misc_RNA (1)...(19): siRNA sense strand
ccagagaggggcagcaauu

SEQ ID NO: 2294632 - RNA, 19 nt, Homo sapiens
  misc_RNA (1)...(19): siRNA sense strand
gacaagcagauaagcgcaa

SEQ ID NO: 2294633 - RNA, 19 nt, Homo sapiens
  misc_RNA (1)...(19): siRNA sense strand
cagaacaggauguggaaaa

SEQ ID NO: 2294634 - RNA, 19 nt, Homo sapiens
  misc_RNA (1)...(19): siRNA sense strand
agaaagacaucaagggauc

SEQ ID NO: 2294635 - RNA, 19 nt, Homo sapiens
  misc_RNA (1)...(19): siRNA sense strand
gcaaggaauaugagcgcuu

SEQ ID NO: 2294636 - RNA, 19 nt, Homo sapiens
  misc_RNA (1)...(19): siRNA sense strand
aguuuaaccaggugauaau

SEQ ID NO: 2294637 - RNA, 19 nt, Homo sapiens
  misc_RNA (1)...(19): siRNA sense strand
cgucaaacucaaagacagu

SEQ ID NO: 2294638 - RNA, 19 nt, Homo sapiens
  misc_RNA (1)...(19): siRNA sense strand
gccuaaagaaugugaagca

SEQ ID NO: 2294639 - RNA, 19 nt, Homo sapiens
  misc_RNA (1)...(19): siRNA sense strand
gcaggaaguucaugcagga

SEQ ID NO: 2294640 - RNA, 19 nt, Homo sapiens
  misc_RNA (1)...(19): siRNA sense strand
aggaugaagaaguguugaa

SEQ ID NO: 2294641 - RNA, 19 nt, Homo sapiens
  misc_RNA (1)...(19): siRNA sense strand
ccacauacaucgagcagag

SEQ ID NO: 2294642 - RNA, 19 nt, Homo sapiens
  misc_RNA (1)...(19): siRNA sense strand
aagaaagacaucaagggau

SEQ ID NO: 2294643 - RNA, 19 nt, Homo sapiens
  misc_RNA (1)...(19): siRNA sense strand
gagaagaaccgcaagcucu

SEQ ID NO: 2294644 - RNA, 19 nt, Homo sapiens
  misc_RNA (1)...(19): siRNA sense strand
gcauggacguccugugcca

SEQ ID NO: 2294645 - RNA, 19 nt, Homo sapiens
  misc_RNA (1)...(19): siRNA sense strand
auuacgaugaagaggaaga

SEQ ID NO: 2294646 - RNA, 19 nt, Homo sapiens
  misc_RNA (1)...(19): siRNA sense strand
uggagguguuuguggacga

SEQ ID NO: 2294647 - RNA, 19 nt, Homo sapiens
  misc_RNA (1)...(19): siRNA sense strand
aguacuacgucaaacucaa

SEQ ID NO: 2294648 - RNA, 19 nt, Homo sapiens
  misc_RNA (1)...(19): siRNA sense strand
guuugaaguuaauguggca

SEQ ID NO: 2294649 - RNA, 19 nt, Homo sapiens
  misc_RNA (1)...(19): siRNA sense strand
aggaccgguuugaaguuaa

SEQ ID NO: 2294650 - RNA, 19 nt, Homo sapiens
  misc_RNA (1)...(19): siRNA sense strand
gugcggaauaggagcuuca

SEQ ID NO: 2294651 - RNA, 19 nt, Homo sapiens
  misc_RNA (1)...(19): siRNA sense strand
aggugauaaucuucgucaa

SEQ ID NO: 2294652 - RNA, 19 nt, Homo sapiens
  misc_RNA (1)...(19): siRNA sense strand
cuaaagaaugugaagcacu

SEQ ID NO: 2294653 - RNA, 19 nt, Homo sapiens
  misc_RNA (1)...(19): siRNA sense strand
uggcagaacuuccagagga

SEQ ID NO: 2294654 - RNA, 19 nt, Homo sapiens
  misc_RNA (1)...(19): siRNA sense strand
cugacgagaaugaugccaa

SEQ ID NO: 2294655 - RNA, 19 nt, Homo sapiens
  misc_RNA (1)...(19): siRNA sense strand
cagaacaggauguggaaaa

SEQ ID NO: 2294656 - RNA, 19 nt, Homo sapiens
  misc_RNA (1)...(19): siRNA sense strand
agaaagacaucaagggauc

SEQ ID NO: 2294657 - RNA, 19 nt, Homo sapiens
  misc_RNA (1)...(19): siRNA sense strand
gcaaggaauaugagcgcuu

SEQ ID NO: 2294658 - RNA, 19 nt, Homo sapiens
  misc_RNA (1)...(19): siRNA sense strand
gccuaaagaaugugaagca

SEQ ID NO: 2294659 - RNA, 19 nt, Homo sapiens
  misc_RNA (1)...(19): siRNA sense strand
gcaggaaguucaugcagga

SEQ ID NO: 2294660 - RNA, 19 nt, Homo sapiens
  misc_RNA (1)...(19): siRNA sense strand
aggaugaagaaguguugaa

SEQ ID NO: 2294661 - RNA, 19 nt, Homo sapiens
  misc_RNA (1)...(19): siRNA sense strand
aagaaagacaucaagggau

SEQ ID NO: 2294662 - RNA, 19 nt, Homo sapiens
  misc_RNA (1)...(19): siRNA sense strand
gcauggacguccugugcca

SEQ ID NO: 2294663 - RNA, 19 nt, Homo sapiens
  misc_RNA (1)...(19): siRNA sense strand
auuacgaugaagaggaaga

SEQ ID NO: 2294664 - RNA, 19 nt, Homo sapiens
  misc_RNA (1)...(19): siRNA sense strand
gugcggaauaggagcuuca

SEQ ID NO: 2294665 - RNA, 19 nt, Homo sapiens
  misc_RNA (1)...(19): siRNA sense strand
cuaaagaaugugaagcacu

SEQ ID NO: 2294666 - RNA, 19 nt, Homo sapiens
  misc_RNA (1)...(19): siRNA sense strand
gggcgauggaccagaagau

SEQ ID NO: 2294667 - RNA, 19 nt, Homo sapiens
  misc_RNA (1)...(19): siRNA sense strand
ccgaaaagagccuguacaa

SEQ ID NO: 2294668 - RNA, 19 nt, Homo sapiens
  misc_RNA (1)...(19): siRNA sense strand
cagcagagcacacuggaga

SEQ ID NO: 2294669 - RNA, 19 nt, Homo sapiens
  misc_RNA (1)...(19): siRNA sense strand
gcucauuccagcagcgcuu

SEQ ID NO: 2294670 - RNA, 19 nt, Homo sapiens
  misc_RNA (1)...(19): siRNA sense strand
agcugaugcugcagaugaa

SEQ ID NO: 2294671 - RNA, 19 nt, Homo sapiens
  misc_RNA (1)...(19): siRNA sense strand
gggauauccuggagguaaa

SEQ ID NO: 2294672 - RNA, 19 nt, Homo sapiens
  misc_RNA (1)...(19): siRNA sense strand
gggaaauaaguuuggaaua

SEQ ID NO: 2294673 - RNA, 19 nt, Homo sapiens
  misc_RNA (1)...(19): siRNA sense strand
gugaaacaacugagagaaa

SEQ ID NO: 2294674 - RNA, 19 nt, Homo sapiens
  misc_RNA (1)...(19): siRNA sense strand
cagaaggaguugagauaau

SEQ ID NO: 2294675 - RNA, 19 nt, Homo sapiens
  misc_RNA (1)...(19): siRNA sense strand
aauacaaagccuagaguua

SEQ ID NO: 2294676 - RNA, 19 nt, Homo sapiens
  misc_RNA (1)...(19): siRNA sense strand
acucauggaucuugguaaa

SEQ ID NO: 2294677 - RNA, 19 nt, Homo sapiens
  misc_RNA (1)...(19): siRNA sense strand
agguaugucuugagaaauu

SEQ ID NO: 2294678 - RNA, 19 nt, Homo sapiens
  misc_RNA (1)...(19): siRNA sense strand
gauuuaacuaucagggaaa

SEQ ID NO: 2294679 - RNA, 19 nt, Homo sapiens
  misc_RNA (1)...(19): siRNA sense strand
gaagaaaagccuuggcaaa

SEQ ID NO: 2294680 - RNA, 19 nt, Homo sapiens
  misc_RNA (1)...(19): siRNA sense strand
uggagaaacucuugaugaa

SEQ ID NO: 2294681 - RNA, 19 nt, Homo sapiens
  misc_RNA (1)...(19): siRNA sense strand
aagaagaacugcugaacau

SEQ ID NO: 2294682 - RNA, 19 nt, Homo sapiens
  misc_RNA (1)...(19): siRNA sense strand
gcagaaaugaagaugaauu

SEQ ID NO: 2294683 - RNA, 19 nt, Homo sapiens
  misc_RNA (1)...(19): siRNA sense strand
ccugauauccaaagcaaua

SEQ ID NO: 2294684 - RNA, 19 nt, Homo sapiens
  misc_RNA (1)...(19): siRNA sense strand
auauagaaguggaaaccaa

SEQ ID NO: 2294685 - RNA, 19 nt, Homo sapiens
  misc_RNA (1)...(19): siRNA sense strand
gggauuauauagagcugaa

SEQ ID NO: 2294686 - RNA, 19 nt, Homo sapiens
  misc_RNA (1)...(19): siRNA sense strand
gcauuaguguugauagcaa

SEQ ID NO: 2294687 - RNA, 19 nt, Homo sapiens
  misc_RNA (1)...(19): siRNA sense strand
aauagaaacugcauagcaa

SEQ ID NO: 2294688 - RNA, 19 nt, Homo sapiens
  misc_RNA (1)...(19): siRNA sense strand
cagaguaacagauggagaa

SEQ ID NO: 2294689 - RNA, 19 nt, Homo sapiens
  misc_RNA (1)...(19): siRNA sense strand
gcucaauggccaggaauaa

SEQ ID NO: 2294690 - RNA, 19 nt, Homo sapiens
  misc_RNA (1)...(19): siRNA sense strand
accagaaggaguugagaua

SEQ ID NO: 2294691 - RNA, 19 nt, Homo sapiens
  misc_RNA (1)...(19): siRNA sense strand
uggagaaagccgagacaga

SEQ ID NO: 2294692 - RNA, 19 nt, Homo sapiens
  misc_RNA (1)...(19): siRNA sense strand
aggaagaaauucaggaaac

SEQ ID NO: 2294693 - RNA, 19 nt, Homo sapiens
  misc_RNA (1)...(19): siRNA sense strand
ccaaaggaucagaagauuu

SEQ ID NO: 2294694 - RNA, 19 nt, Homo sapiens
  misc_RNA (1)...(19): siRNA sense strand
cuucagagcaauaguagua

SEQ ID NO: 2294695 - RNA, 19 nt, Homo sapiens
  misc_RNA (1)...(19): siRNA sense strand
caucaaacacaaagcauuu

SEQ ID NO: 2294696 - RNA, 19 nt, Homo sapiens
  misc_RNA (1)...(19): siRNA sense strand
guuacauccuccaaagaaa

SEQ ID NO: 2294697 - RNA, 19 nt, Homo sapiens
  misc_RNA (1)...(19): siRNA sense strand
gccuaaagucaucaagaaa

SEQ ID NO: 2294698 - RNA, 19 nt, Homo sapiens
  misc_RNA (1)...(19): siRNA sense strand
ccagauggaaguucagaaa

SEQ ID NO: 2294699 - RNA, 19 nt, Homo sapiens
  misc_RNA (1)...(19): siRNA sense strand
cagaaaugguuuauagcca

SEQ ID NO: 2294700 - RNA, 19 nt, Homo sapiens
  misc_RNA (1)...(19): siRNA sense strand
aagauggacuucagagcaa

SEQ ID NO: 2294701 - RNA, 19 nt, Homo sapiens
  misc_RNA (1)...(19): siRNA sense strand
gguaaaguucggagagcca

SEQ ID NO: 2294702 - RNA, 19 nt, Homo sapiens
  misc_RNA (1)...(19): siRNA sense strand
aagccaagguggagaaacu

SEQ ID NO: 2294703 - RNA, 19 nt, Homo sapiens
  misc_RNA (1)...(19): siRNA sense strand
aaauauaugccuagggcuu

SEQ ID NO: 2294704 - RNA, 19 nt, Homo sapiens
  misc_RNA (1)...(19): siRNA sense strand
guucaaugcaacaaggcaa

SEQ ID NO: 2294705 - RNA, 19 nt, Homo sapiens
  misc_RNA (1)...(19): siRNA sense strand
gauaaucccaggagcuaaa

SEQ ID NO: 2294706 - RNA, 19 nt, Homo sapiens
  misc_RNA (1)...(19): siRNA sense strand
cagagaugcaauugaggua

SEQ ID NO: 2294707 - RNA, 19 nt, Homo sapiens
  misc_RNA (1)...(19): siRNA sense strand
cagugauaaugaugaagaa

SEQ ID NO: 2294708 - RNA, 19 nt, Homo sapiens
  misc_RNA (1)...(19): siRNA sense strand
uagaagcagauuugggaua

SEQ ID NO: 2294709 - RNA, 19 nt, Homo sapiens
  misc_RNA (1)...(19): siRNA sense strand
aguaaugagaguacguuaa

SEQ ID NO: 2294710 - RNA, 19 nt, Homo sapiens
  misc_RNA (1)...(19): siRNA sense strand
cagaagaagaacugcugaa

SEQ ID NO: 2294711 - RNA, 19 nt, Homo sapiens
  misc_RNA (1)...(19): siRNA sense strand
agagaaaugcuuccaguaa

SEQ ID NO: 2294712 - RNA, 19 nt, Homo sapiens
  misc_RNA (1)...(19): siRNA sense strand
agaaaugguuuauagccaa

SEQ ID NO: 2294713 - RNA, 19 nt, Homo sapiens
  misc_RNA (1)...(19): siRNA sense strand
cauuauugcaccuuaguaa

SEQ ID NO: 2294714 - RNA, 19 nt, Homo sapiens
  misc_RNA (1)...(19): siRNA sense strand
ccucaaaauuauaucgcaa

SEQ ID NO: 2294715 - RNA, 19 nt, Homo sapiens
  misc_RNA (1)...(19): siRNA sense strand
uggugaagcaggaagaaau

SEQ ID NO: 2294716 - RNA, 19 nt, Homo sapiens
  misc_RNA (1)...(19): siRNA sense strand
cugcaaagauaaugugugu

SEQ ID NO: 2294717 - RNA, 19 nt, Homo sapiens
  misc_RNA (1)...(19): siRNA sense strand
cagaugagaaaguaagauu

SEQ ID NO: 2294718 - RNA, 19 nt, Homo sapiens
  misc_RNA (1)...(19): siRNA sense strand
caggaaaccuuuaucaaaa

SEQ ID NO: 2294719 - RNA, 19 nt, Homo sapiens
  misc_RNA (1)...(19): siRNA sense strand
agauuuaacuaucagggaa

SEQ ID NO: 2294720 - RNA, 19 nt, Homo sapiens
  misc_RNA (1)...(19): siRNA sense strand
cuguggagcugauggaaca

SEQ ID NO: 2294721 - RNA, 19 nt, Homo sapiens
  misc_RNA (1)...(19): siRNA sense strand
acacaaagcauuuaguuca

SEQ ID NO: 2294722 - RNA, 19 nt, Homo sapiens
  misc_RNA (1)...(19): siRNA sense strand
ggguagaugaugauauaga

SEQ ID NO: 2294723 - RNA, 19 nt, Homo sapiens
  misc_RNA (1)...(19): siRNA sense strand
aguugaugcugauggauau

SEQ ID NO: 2294724 - RNA, 19 nt, Homo sapiens
  misc_RNA (1)...(19): siRNA sense strand
uggcaagguacaagaccaa

SEQ ID NO: 2294725 - RNA, 19 nt, Homo sapiens
  misc_RNA (1)...(19): siRNA sense strand
agacagaagccaaggugga

SEQ ID NO: 2294726 - RNA, 19 nt, Homo sapiens
  misc_RNA (1)...(19): siRNA sense strand
ccucagagaagcaaucaaa

SEQ ID NO: 2294727 - RNA, 19 nt, Homo sapiens
  misc_RNA (1)...(19): siRNA sense strand
acuaauaucagguggcaga

SEQ ID NO: 2294728 - RNA, 19 nt, Homo sapiens
  misc_RNA (1)...(19): siRNA sense strand
ggagcuaaacauggaaaua

SEQ ID NO: 2294729 - RNA, 19 nt, Homo sapiens
  misc_RNA (1)...(19): siRNA sense strand
guaucaaacaaacuggaaa

SEQ ID NO: 2294730 - RNA, 19 nt, Homo sapiens
  misc_RNA (1)...(19): siRNA sense strand
ccaugauucuccuguuaaa

SEQ ID NO: 2294731 - RNA, 19 nt, Homo sapiens
  misc_RNA (1)...(19): siRNA sense strand
uuauauagucaguggcaga

SEQ ID NO: 2294732 - RNA, 19 nt, Homo sapiens
  misc_RNA (1)...(19): siRNA sense strand
guuagagacagaugaagaa

SEQ ID NO: 2294733 - RNA, 19 nt, Homo sapiens
  misc_RNA (1)...(19): siRNA sense strand
ucuugaugaauguggguua

SEQ ID NO: 2294734 - RNA, 19 nt, Homo sapiens
  misc_RNA (1)...(19): siRNA sense strand
gaggaugagagguggcgua

SEQ ID NO: 2294735 - RNA, 19 nt, Homo sapiens
  misc_RNA (1)...(19): siRNA sense strand
ucaaagaugccuaaaguca

SEQ ID NO: 2294736 - RNA, 19 nt, Homo sapiens
  misc_RNA (1)...(19): siRNA sense strand
caagaaucucagcaggaaa

SEQ ID NO: 2294737 - RNA, 19 nt, Homo sapiens
  misc_RNA (1)...(19): siRNA sense strand
gugaagaggcuuuggcagu

SEQ ID NO: 2294738 - RNA, 19 nt, Homo sapiens
  misc_RNA (1)...(19): siRNA sense strand
cguagaggucggaggagau

SEQ ID NO: 2294739 - RNA, 19 nt, Homo sapiens
  misc_RNA (1)...(19): siRNA sense strand
agaaaguuaugaugagcuu

SEQ ID NO: 2294740 - RNA, 19 nt, Homo sapiens
  misc_RNA (1)...(19): siRNA sense strand
gagcuuauguacaugggau

SEQ ID NO: 2294741 - RNA, 19 nt, Homo sapiens
  misc_RNA (1)...(19): siRNA sense strand
agcuuauguacaugggaua

SEQ ID NO: 2294742 - RNA, 19 nt, Homo sapiens
  misc_RNA (1)...(19): siRNA sense strand
uguuugaauaugucaggaa

SEQ ID NO: 2294743 - RNA, 19 nt, Homo sapiens
  misc_RNA (1)...(19): siRNA sense strand
ccaagagaggagcugagaa

SEQ ID NO: 2294744 - RNA, 19 nt, Homo sapiens
  misc_RNA (1)...(19): siRNA sense strand
aggaaaggcuggaccaccu

SEQ ID NO: 2294745 - RNA, 19 nt, Homo sapiens
  misc_RNA (1)...(19): siRNA sense strand
acaaauuugagcaguacau

SEQ ID NO: 2294746 - RNA, 19 nt, Homo sapiens
  misc_RNA (1)...(19): siRNA sense strand
gagcuuauguacaugggau

SEQ ID NO: 2294747 - RNA, 19 nt, Homo sapiens
  misc_RNA (1)...(19): siRNA sense strand
agcuuauguacaugggaua

SEQ ID NO: 2294748 - RNA, 19 nt, Homo sapiens
  misc_RNA (1)...(19): siRNA sense strand
uguuugaauaugucaggaa

SEQ ID NO: 2294749 - RNA, 19 nt, Homo sapiens
  misc_RNA (1)...(19): siRNA sense strand
ccaagagaggagcugagaa

SEQ ID NO: 2294750 - RNA, 19 nt, Homo sapiens
  misc_RNA (1)...(19): siRNA sense strand
aggaaaggcuggaccaccu

SEQ ID NO: 2294751 - RNA, 19 nt, Homo sapiens
  misc_RNA (1)...(19): siRNA sense strand
acaaauuugagcaguacau

SEQ ID NO: 2294752 - RNA, 19 nt, Homo sapiens
  misc_RNA (1)...(19): siRNA sense strand
gcuaauacagauauggcaa

SEQ ID NO: 2294753 - RNA, 19 nt, Homo sapiens
  misc_RNA (1)...(19): siRNA sense strand
cugaagaguuauuagcaga

SEQ ID NO: 2294754 - RNA, 19 nt, Homo sapiens
  misc_RNA (1)...(19): siRNA sense strand
gggaguaagcccugaacca

SEQ ID NO: 2294755 - RNA, 19 nt, Homo sapiens
  misc_RNA (1)...(19): siRNA sense strand
caagagagguagauccaga

SEQ ID NO: 2294756 - RNA, 19 nt, Homo sapiens
  misc_RNA (1)...(19): siRNA sense strand
cagucaaauuauugcugaa

SEQ ID NO: 2294757 - RNA, 19 nt, Homo sapiens
  misc_RNA (1)...(19): siRNA sense strand
gaggaacaaaggagaaaca

SEQ ID NO: 2294758 - RNA, 19 nt, Homo sapiens
  misc_RNA (1)...(19): siRNA sense strand
ucucauugucagaaagaau

SEQ ID NO: 2294759 - RNA, 19 nt, Homo sapiens
  misc_RNA (1)...(19): siRNA sense strand
ugguuaaucaugugaaaga

SEQ ID NO: 2294760 - RNA, 19 nt, Homo sapiens
  misc_RNA (1)...(19): siRNA sense strand
aacaacaagaagaguguaa

SEQ ID NO: 2294761 - RNA, 19 nt, Homo sapiens
  misc_RNA (1)...(19): siRNA sense strand
aggaaauaauaagggagua

SEQ ID NO: 2294762 - RNA, 19 nt, Homo sapiens
  misc_RNA (1)...(19): siRNA sense strand
uggagaugguguucaagaa

SEQ ID NO: 2294763 - RNA, 19 nt, Homo sapiens
  misc_RNA (1)...(19): siRNA sense strand
guucaugaggaaaugcaaa

SEQ ID NO: 2294764 - RNA, 19 nt, Homo sapiens
  misc_RNA (1)...(19): siRNA sense strand
uggcaauugaacuggcuua

SEQ ID NO: 2294765 - RNA, 19 nt, Homo sapiens
  misc_RNA (1)...(19): siRNA sense strand
acggaaaacaacaggagaa

SEQ ID NO: 2294766 - RNA, 19 nt, Homo sapiens
  misc_RNA (1)...(19): siRNA sense strand
caggaaauaauaagggagu

SEQ ID NO: 2294767 - RNA, 19 nt, Homo sapiens
  misc_RNA (1)...(19): siRNA sense strand
ugcugaugcuugugggcua

SEQ ID NO: 2294768 - RNA, 19 nt, Homo sapiens
  misc_RNA (1)...(19): siRNA sense strand
gaguaagcccugaaccaau

SEQ ID NO: 2294769 - RNA, 19 nt, Homo sapiens
  misc_RNA (1)...(19): siRNA sense strand
uaaacaagcuccaggacgu

SEQ ID NO: 2294770 - RNA, 19 nt, Homo sapiens
  misc_RNA (1)...(19): siRNA sense strand
ccaaggugccuguagguga

SEQ ID NO: 2294771 - RNA, 19 nt, Homo sapiens
  misc_RNA (1)...(19): siRNA sense strand
uuacaaggagccagucaaa

SEQ ID NO: 2294772 - RNA, 19 nt, Homo sapiens
  misc_RNA (1)...(19): siRNA sense strand
cacaagaagauaaacggaa

SEQ ID NO: 2294773 - RNA, 19 nt, Homo sapiens
  misc_RNA (1)...(19): siRNA sense strand
caagaagauaaacggaaaa

SEQ ID NO: 2294774 - RNA, 19 nt, Homo sapiens
  misc_RNA (1)...(19): siRNA sense strand
cugaaauccgggagacuca

SEQ ID NO: 2294775 - RNA, 19 nt, Homo sapiens
  misc_RNA (1)...(19): siRNA sense strand
cgcuaauuccugucauaaa

SEQ ID NO: 2294776 - RNA, 19 nt, Homo sapiens
  misc_RNA (1)...(19): siRNA sense strand
augcaucacaucagagauu

SEQ ID NO: 2294777 - RNA, 19 nt, Homo sapiens
  misc_RNA (1)...(19): siRNA sense strand
ucuaaauagcuacggugaa

SEQ ID NO: 2294778 - RNA, 19 nt, Homo sapiens
  misc_RNA (1)...(19): siRNA sense strand
auagaggaacaaaggagaa

SEQ ID NO: 2294779 - RNA, 19 nt, Homo sapiens
  misc_RNA (1)...(19): siRNA sense strand
gagaaacaggcuagccaga

SEQ ID NO: 2294780 - RNA, 19 nt, Homo sapiens
  misc_RNA (1)...(19): siRNA sense strand
aaacaacaggagaagaaaa

SEQ ID NO: 2294781 - RNA, 19 nt, Homo sapiens
  misc_RNA (1)...(19): siRNA sense strand
acuuggaauaauuggagua

SEQ ID NO: 2294782 - RNA, 19 nt, Homo sapiens
  misc_RNA (1)...(19): siRNA sense strand
uguucuagcugcucaguau

SEQ ID NO: 2294783 - RNA, 19 nt, Homo sapiens
  misc_RNA (1)...(19): siRNA sense strand
uagaggaacaaaggagaaa

SEQ ID NO: 2294784 - RNA, 19 nt, Homo sapiens
  misc_RNA (1)...(19): siRNA sense strand
accuaaggauauugagcuu

SEQ ID NO: 2294785 - RNA, 19 nt, Homo sapiens
  misc_RNA (1)...(19): siRNA sense strand
cuuagaaucuguugaucca

SEQ ID NO: 2294786 - RNA, 19 nt, Homo sapiens
  misc_RNA (1)...(19): siRNA sense strand
agaguuauuagcagaagaa

SEQ ID NO: 2294787 - RNA, 19 nt, Homo sapiens
  misc_RNA (1)...(19): siRNA sense strand
caacaagaagaguguaacu

SEQ ID NO: 2294788 - RNA, 19 nt, Homo sapiens
  misc_RNA (1)...(19): siRNA sense strand
uauugaaacuucggagcua

SEQ ID NO: 2294789 - RNA, 19 nt, Homo sapiens
  misc_RNA (1)...(19): siRNA sense strand
acuccaacuuauuaccaaa

SEQ ID NO: 2294790 - RNA, 19 nt, Homo sapiens
  misc_RNA (1)...(19): siRNA sense strand
acaaaggagaaacaggcua

SEQ ID NO: 2294791 - RNA, 19 nt, Homo sapiens
  misc_RNA (1)...(19): siRNA sense strand
gguuauugaacgacucauu

SEQ ID NO: 2294792 - RNA, 19 nt, Homo sapiens
  misc_RNA (1)...(19): siRNA sense strand
agagugagcuaguaggcca

SEQ ID NO: 2294793 - RNA, 19 nt, Homo sapiens
  misc_RNA (1)...(19): siRNA sense strand
caggaaagaagcagcugau

SEQ ID NO: 2294794 - RNA, 19 nt, Homo sapiens
  misc_RNA (1)...(19): siRNA sense strand
auuugacacuuguggauuu

SEQ ID NO: 2294795 - RNA, 19 nt, Homo sapiens
  misc_RNA (1)...(19): siRNA sense strand
caucagaggcacuuaaaau

SEQ ID NO: 2294796 - RNA, 19 nt, Homo sapiens
  misc_RNA (1)...(19): siRNA sense strand
cagucaaacuuggaauaau

SEQ ID NO: 2294797 - RNA, 19 nt, Homo sapiens
  misc_RNA (1)...(19): siRNA sense strand
aagaagaguguaacugauu

SEQ ID NO: 2294798 - RNA, 19 nt, Homo sapiens
  misc_RNA (1)...(19): siRNA sense strand
ggaacgcagagcagcggaa

SEQ ID NO: 2294799 - RNA, 19 nt, Homo sapiens
  misc_RNA (1)...(19): siRNA sense strand
ggguggaagcagaagaaug

SEQ ID NO: 2294800 - RNA, 19 nt, Homo sapiens
  misc_RNA (1)...(19): siRNA sense strand
gcuucaaaucagagagcuc

SEQ ID NO: 2294801 - RNA, 19 nt, Homo sapiens
  misc_RNA (1)...(19): siRNA sense strand
uccauaacuuaguggcaau

SEQ ID NO: 2294802 - RNA, 19 nt, Homo sapiens
  misc_RNA (1)...(19): siRNA sense strand
guuaaucaugugaaagaca

SEQ ID NO: 2294803 - RNA, 19 nt, Homo sapiens
  misc_RNA (1)...(19): siRNA sense strand
aagcagaagaaugggguaa

SEQ ID NO: 2294804 - RNA, 19 nt, Homo sapiens
  misc_RNA (1)...(19): siRNA sense strand
caucucuggccaauagaaa

SEQ ID NO: 2294805 - RNA, 19 nt, Homo sapiens
  misc_RNA (1)...(19): siRNA sense strand
gcuaauacagauauggcaa

SEQ ID NO: 2294806 - RNA, 19 nt, Homo sapiens
  misc_RNA (1)...(19): siRNA sense strand
cugaagaguuauuagcaga

SEQ ID NO: 2294807 - RNA, 19 nt, Homo sapiens
  misc_RNA (1)...(19): siRNA sense strand
gggaguaagcccugaacca

SEQ ID NO: 2294808 - RNA, 19 nt, Homo sapiens
  misc_RNA (1)...(19): siRNA sense strand
caagagagguagauccaga

SEQ ID NO: 2294809 - RNA, 19 nt, Homo sapiens
  misc_RNA (1)...(19): siRNA sense strand
cagucaaauuauugcugaa

SEQ ID NO: 2294810 - RNA, 19 nt, Homo sapiens
  misc_RNA (1)...(19): siRNA sense strand
gaggaacaaaggagaaaca

SEQ ID NO: 2294811 - RNA, 19 nt, Homo sapiens
  misc_RNA (1)...(19): siRNA sense strand
ucucauugucagaaagaau

SEQ ID NO: 2294812 - RNA, 19 nt, Homo sapiens
  misc_RNA (1)...(19): siRNA sense strand
ugguuaaucaugugaaaga

SEQ ID NO: 2294813 - RNA, 19 nt, Homo sapiens
  misc_RNA (1)...(19): siRNA sense strand
aacaacaagaagaguguaa

SEQ ID NO: 2294814 - RNA, 19 nt, Homo sapiens
  misc_RNA (1)...(19): siRNA sense strand
aggaaauaauaagggagua

SEQ ID NO: 2294815 - RNA, 19 nt, Homo sapiens
  misc_RNA (1)...(19): siRNA sense strand
uggagaugguguucaagaa

SEQ ID NO: 2294816 - RNA, 19 nt, Homo sapiens
  misc_RNA (1)...(19): siRNA sense strand
guucaugaggaaaugcaaa

SEQ ID NO: 2294817 - RNA, 19 nt, Homo sapiens
  misc_RNA (1)...(19): siRNA sense strand
uggcaauugaacuggcuua

SEQ ID NO: 2294818 - RNA, 19 nt, Homo sapiens
  misc_RNA (1)...(19): siRNA sense strand
acggaaaacaacaggagaa

SEQ ID NO: 2294819 - RNA, 19 nt, Homo sapiens
  misc_RNA (1)...(19): siRNA sense strand
caggaaauaauaagggagu

SEQ ID NO: 2294820 - RNA, 19 nt, Homo sapiens
  misc_RNA (1)...(19): siRNA sense strand
ugcugaugcuugugggcua

SEQ ID NO: 2294821 - RNA, 19 nt, Homo sapiens
  misc_RNA (1)...(19): siRNA sense strand
gaguaagcccugaaccaau

SEQ ID NO: 2294822 - RNA, 19 nt, Homo sapiens
  misc_RNA (1)...(19): siRNA sense strand
uaaacaagcuccaggacgu

SEQ ID NO: 2294823 - RNA, 19 nt, Homo sapiens
  misc_RNA (1)...(19): siRNA sense strand
ccaaggugccuguagguga

SEQ ID NO: 2294824 - RNA, 19 nt, Homo sapiens
  misc_RNA (1)...(19): siRNA sense strand
uuacaaggagccagucaaa

SEQ ID NO: 2294825 - RNA, 19 nt, Homo sapiens
  misc_RNA (1)...(19): siRNA sense strand
cacaagaagauaaacggaa

SEQ ID NO: 2294826 - RNA, 19 nt, Homo sapiens
  misc_RNA (1)...(19): siRNA sense strand
caagaagauaaacggaaaa

SEQ ID NO: 2294827 - RNA, 19 nt, Homo sapiens
  misc_RNA (1)...(19): siRNA sense strand
cugaaauccgggagacuca

SEQ ID NO: 2294828 - RNA, 19 nt, Homo sapiens
  misc_RNA (1)...(19): siRNA sense strand
cgcuaauuccugucauaaa

SEQ ID NO: 2294829 - RNA, 19 nt, Homo sapiens
  misc_RNA (1)...(19): siRNA sense strand
augcaucacaucagagauu

SEQ ID NO: 2294830 - RNA, 19 nt, Homo sapiens
  misc_RNA (1)...(19): siRNA sense strand
ucuaaauagcuacggugaa

SEQ ID NO: 2294831 - RNA, 19 nt, Homo sapiens
  misc_RNA (1)...(19): siRNA sense strand
auagaggaacaaaggagaa

SEQ ID NO: 2294832 - RNA, 19 nt, Homo sapiens
  misc_RNA (1)...(19): siRNA sense strand
gagaaacaggcuagccaga

SEQ ID NO: 2294833 - RNA, 19 nt, Homo sapiens
  misc_RNA (1)...(19): siRNA sense strand
aaacaacaggagaagaaaa

SEQ ID NO: 2294834 - RNA, 19 nt, Homo sapiens
  misc_RNA (1)...(19): siRNA sense strand
acuuggaauaauuggagua

SEQ ID NO: 2294835 - RNA, 19 nt, Homo sapiens
  misc_RNA (1)...(19): siRNA sense strand
uguucuagcugcucaguau

SEQ ID NO: 2294836 - RNA, 19 nt, Homo sapiens
  misc_RNA (1)...(19): siRNA sense strand
uagaggaacaaaggagaaa

SEQ ID NO: 2294837 - RNA, 19 nt, Homo sapiens
  misc_RNA (1)...(19): siRNA sense strand
accuaaggauauugagcuu

SEQ ID NO: 2294838 - RNA, 19 nt, Homo sapiens
  misc_RNA (1)...(19): siRNA sense strand
cuuagaaucuguugaucca

SEQ ID NO: 2294839 - RNA, 19 nt, Homo sapiens
  misc_RNA (1)...(19): siRNA sense strand
agaguuauuagcagaagaa

SEQ ID NO: 2294840 - RNA, 19 nt, Homo sapiens
  misc_RNA (1)...(19): siRNA sense strand
caacaagaagaguguaacu

SEQ ID NO: 2294841 - RNA, 19 nt, Homo sapiens
  misc_RNA (1)...(19): siRNA sense strand
uauugaaacuucggagcua

SEQ ID NO: 2294842 - RNA, 19 nt, Homo sapiens
  misc_RNA (1)...(19): siRNA sense strand
acuccaacuuauuaccaaa

SEQ ID NO: 2294843 - RNA, 19 nt, Homo sapiens
  misc_RNA (1)...(19): siRNA sense strand
acaaaggagaaacaggcua

SEQ ID NO: 2294844 - RNA, 19 nt, Homo sapiens
  misc_RNA (1)...(19): siRNA sense strand
gguuauugaacgacucauu

SEQ ID NO: 2294845 - RNA, 19 nt, Homo sapiens
  misc_RNA (1)...(19): siRNA sense strand
agagugagcuaguaggcca

SEQ ID NO: 2294846 - RNA, 19 nt, Homo sapiens
  misc_RNA (1)...(19): siRNA sense strand
caggaaagaagcagcugau

SEQ ID NO: 2294847 - RNA, 19 nt, Homo sapiens
  misc_RNA (1)...(19): siRNA sense strand
auuugacacuuguggauuu

SEQ ID NO: 2294848 - RNA, 19 nt, Homo sapiens
  misc_RNA (1)...(19): siRNA sense strand
caucagaggcacuuaaaau

SEQ ID NO: 2294849 - RNA, 19 nt, Homo sapiens
  misc_RNA (1)...(19): siRNA sense strand
cagucaaacuuggaauaau

SEQ ID NO: 2294850 - RNA, 19 nt, Homo sapiens
  misc_RNA (1)...(19): siRNA sense strand
aagaagaguguaacugauu

SEQ ID NO: 2294851 - RNA, 19 nt, Homo sapiens
  misc_RNA (1)...(19): siRNA sense strand
ggaacgcagagcagcggaa

SEQ ID NO: 2294852 - RNA, 19 nt, Homo sapiens
  misc_RNA (1)...(19): siRNA sense strand
ggguggaagcagaagaaug

SEQ ID NO: 2294853 - RNA, 19 nt, Homo sapiens
  misc_RNA (1)...(19): siRNA sense strand
gcuucaaaucagagagcuc

SEQ ID NO: 2294854 - RNA, 19 nt, Homo sapiens
  misc_RNA (1)...(19): siRNA sense strand
uccauaacuuaguggcaau

SEQ ID NO: 2294855 - RNA, 19 nt, Homo sapiens
  misc_RNA (1)...(19): siRNA sense strand
guuaaucaugugaaagaca

SEQ ID NO: 2294856 - RNA, 19 nt, Homo sapiens
  misc_RNA (1)...(19): siRNA sense strand
aagcagaagaaugggguaa

SEQ ID NO: 2294857 - RNA, 19 nt, Homo sapiens
  misc_RNA (1)...(19): siRNA sense strand
caucucuggccaauagaaa

SEQ ID NO: 2294858 - RNA, 19 nt, Homo sapiens
  misc_RNA (1)...(19): siRNA sense strand
gcuaauacagauauggcaa

SEQ ID NO: 2294859 - RNA, 19 nt, Homo sapiens
  misc_RNA (1)...(19): siRNA sense strand
cugaagaguuauuagcaga

SEQ ID NO: 2294860 - RNA, 19 nt, Homo sapiens
  misc_RNA (1)...(19): siRNA sense strand
gggaguaagcccugaacca

SEQ ID NO: 2294861 - RNA, 19 nt, Homo sapiens
  misc_RNA (1)...(19): siRNA sense strand
caagagagguagauccaga

SEQ ID NO: 2294862 - RNA, 19 nt, Homo sapiens
  misc_RNA (1)...(19): siRNA sense strand
cagucaaauuauugcugaa

SEQ ID NO: 2294863 - RNA, 19 nt, Homo sapiens
  misc_RNA (1)...(19): siRNA sense strand
gaggaacaaaggagaaaca

SEQ ID NO: 2294864 - RNA, 19 nt, Homo sapiens
  misc_RNA (1)...(19): siRNA sense strand
ucucauugucagaaagaau

SEQ ID NO: 2294865 - RNA, 19 nt, Homo sapiens
  misc_RNA (1)...(19): siRNA sense strand
ugguuaaucaugugaaaga

SEQ ID NO: 2294866 - RNA, 19 nt, Homo sapiens
  misc_RNA (1)...(19): siRNA sense strand
aacaacaagaagaguguaa

SEQ ID NO: 2294867 - RNA, 19 nt, Homo sapiens
  misc_RNA (1)...(19): siRNA sense strand
aggaaauaauaagggagua

SEQ ID NO: 2294868 - RNA, 19 nt, Homo sapiens
  misc_RNA (1)...(19): siRNA sense strand
uggagaugguguucaagaa

SEQ ID NO: 2294869 - RNA, 19 nt, Homo sapiens
  misc_RNA (1)...(19): siRNA sense strand
guucaugaggaaaugcaaa

SEQ ID NO: 2294870 - RNA, 19 nt, Homo sapiens
  misc_RNA (1)...(19): siRNA sense strand
uggcaauugaacuggcuua

SEQ ID NO: 2294871 - RNA, 19 nt, Homo sapiens
  misc_RNA (1)...(19): siRNA sense strand
acggaaaacaacaggagaa

SEQ ID NO: 2294872 - RNA, 19 nt, Homo sapiens
  misc_RNA (1)...(19): siRNA sense strand
caggaaauaauaagggagu

SEQ ID NO: 2294873 - RNA, 19 nt, Homo sapiens
  misc_RNA (1)...(19): siRNA sense strand
ugcugaugcuugugggcua

SEQ ID NO: 2294874 - RNA, 19 nt, Homo sapiens
  misc_RNA (1)...(19): siRNA sense strand
gaguaagcccugaaccaau

SEQ ID NO: 2294875 - RNA, 19 nt, Homo sapiens
  misc_RNA (1)...(19): siRNA sense strand
uaaacaagcuccaggacgu

SEQ ID NO: 2294876 - RNA, 19 nt, Homo sapiens
  misc_RNA (1)...(19): siRNA sense strand
ccaaggugccuguagguga

SEQ ID NO: 2294877 - RNA, 19 nt, Homo sapiens
  misc_RNA (1)...(19): siRNA sense strand
uuacaaggagccagucaaa

SEQ ID NO: 2294878 - RNA, 19 nt, Homo sapiens
  misc_RNA (1)...(19): siRNA sense strand
cacaagaagauaaacggaa

SEQ ID NO: 2294879 - RNA, 19 nt, Homo sapiens
  misc_RNA (1)...(19): siRNA sense strand
caagaagauaaacggaaaa

SEQ ID NO: 2294880 - RNA, 19 nt, Homo sapiens
  misc_RNA (1)...(19): siRNA sense strand
cugaaauccgggagacuca

SEQ ID NO: 2294881 - RNA, 19 nt, Homo sapiens
  misc_RNA (1)...(19): siRNA sense strand
cgcuaauuccugucauaaa

SEQ ID NO: 2294882 - RNA, 19 nt, Homo sapiens
  misc_RNA (1)...(19): siRNA sense strand
augcaucacaucagagauu

SEQ ID NO: 2294883 - RNA, 19 nt, Homo sapiens
  misc_RNA (1)...(19): siRNA sense strand
ucuaaauagcuacggugaa

SEQ ID NO: 2294884 - RNA, 19 nt, Homo sapiens
  misc_RNA (1)...(19): siRNA sense strand
auagaggaacaaaggagaa

SEQ ID NO: 2294885 - RNA, 19 nt, Homo sapiens
  misc_RNA (1)...(19): siRNA sense strand
gagaaacaggcuagccaga

SEQ ID NO: 2294886 - RNA, 19 nt, Homo sapiens
  misc_RNA (1)...(19): siRNA sense strand
aaacaacaggagaagaaaa

SEQ ID NO: 2294887 - RNA, 19 nt, Homo sapiens
  misc_RNA (1)...(19): siRNA sense strand
acuuggaauaauuggagua

SEQ ID NO: 2294888 - RNA, 19 nt, Homo sapiens
  misc_RNA (1)...(19): siRNA sense strand
uguucuagcugcucaguau

SEQ ID NO: 2294889 - RNA, 19 nt, Homo sapiens
  misc_RNA (1)...(19): siRNA sense strand
uagaggaacaaaggagaaa

SEQ ID NO: 2294890 - RNA, 19 nt, Homo sapiens
  misc_RNA (1)...(19): siRNA sense strand
accuaaggauauugagcuu

SEQ ID NO: 2294891 - RNA, 19 nt, Homo sapiens
  misc_RNA (1)...(19): siRNA sense strand
cuuagaaucuguugaucca

SEQ ID NO: 2294892 - RNA, 19 nt, Homo sapiens
  misc_RNA (1)...(19): siRNA sense strand
agaguuauuagcagaagaa

SEQ ID NO: 2294893 - RNA, 19 nt, Homo sapiens
  misc_RNA (1)...(19): siRNA sense strand
caacaagaagaguguaacu

SEQ ID NO: 2294894 - RNA, 19 nt, Homo sapiens
  misc_RNA (1)...(19): siRNA sense strand
uauugaaacuucggagcua

SEQ ID NO: 2294895 - RNA, 19 nt, Homo sapiens
  misc_RNA (1)...(19): siRNA sense strand
acuccaacuuauuaccaaa

SEQ ID NO: 2294896 - RNA, 19 nt, Homo sapiens
  misc_RNA (1)...(19): siRNA sense strand
acaaaggagaaacaggcua

SEQ ID NO: 2294897 - RNA, 19 nt, Homo sapiens
  misc_RNA (1)...(19): siRNA sense strand
gguuauugaacgacucauu

SEQ ID NO: 2294898 - RNA, 19 nt, Homo sapiens
  misc_RNA (1)...(19): siRNA sense strand
agagugagcuaguaggcca

SEQ ID NO: 2294899 - RNA, 19 nt, Homo sapiens
  misc_RNA (1)...(19): siRNA sense strand
caggaaagaagcagcugau

SEQ ID NO: 2294900 - RNA, 19 nt, Homo sapiens
  misc_RNA (1)...(19): siRNA sense strand
auuugacacuuguggauuu

SEQ ID NO: 2294901 - RNA, 19 nt, Homo sapiens
  misc_RNA (1)...(19): siRNA sense strand
caucagaggcacuuaaaau

SEQ ID NO: 2294902 - RNA, 19 nt, Homo sapiens
  misc_RNA (1)...(19): siRNA sense strand
cagucaaacuuggaauaau

SEQ ID NO: 2294903 - RNA, 19 nt, Homo sapiens
  misc_RNA (1)...(19): siRNA sense strand
aagaagaguguaacugauu

SEQ ID NO: 2294904 - RNA, 19 nt, Homo sapiens
  misc_RNA (1)...(19): siRNA sense strand
ggaacgcagagcagcggaa

SEQ ID NO: 2294905 - RNA, 19 nt, Homo sapiens
  misc_RNA (1)...(19): siRNA sense strand
ggguggaagcagaagaaug

SEQ ID NO: 2294906 - RNA, 19 nt, Homo sapiens
  misc_RNA (1)...(19): siRNA sense strand
gcuucaaaucagagagcuc

SEQ ID NO: 2294907 - RNA, 19 nt, Homo sapiens
  misc_RNA (1)...(19): siRNA sense strand
uccauaacuuaguggcaau

SEQ ID NO: 2294908 - RNA, 19 nt, Homo sapiens
  misc_RNA (1)...(19): siRNA sense strand
guuaaucaugugaaagaca

SEQ ID NO: 2294909 - RNA, 19 nt, Homo sapiens
  misc_RNA (1)...(19): siRNA sense strand
aagcagaagaaugggguaa

SEQ ID NO: 2294910 - RNA, 19 nt, Homo sapiens
  misc_RNA (1)...(19): siRNA sense strand
caucucuggccaauagaaa

SEQ ID NO: 2294911 - RNA, 19 nt, Homo sapiens
  misc_RNA (1)...(19): siRNA sense strand
acaaugaguacgagggcau

SEQ ID NO: 2294912 - RNA, 19 nt, Homo sapiens
  misc_RNA (1)...(19): siRNA sense strand
gauccagagggcagggaga

SEQ ID NO: 2294913 - RNA, 19 nt, Homo sapiens
  misc_RNA (1)...(19): siRNA sense strand
uaacagaacuggcagggca

SEQ ID NO: 2294914 - RNA, 19 nt, Homo sapiens
  misc_RNA (1)...(19): siRNA sense strand
ccugaagggcauggacaaa

SEQ ID NO: 2294915 - RNA, 19 nt, Homo sapiens
  misc_RNA (1)...(19): siRNA sense strand
caaccugaaacgagcguca

SEQ ID NO: 2294916 - RNA, 19 nt, Homo sapiens
  misc_RNA (1)...(19): siRNA sense strand
uggacaaagcucagggauc

SEQ ID NO: 2294917 - RNA, 19 nt, Homo sapiens
  misc_RNA (1)...(19): siRNA sense strand
guacuucuaugcugggcaa

SEQ ID NO: 2294918 - RNA, 19 nt, Homo sapiens
  misc_RNA (1)...(19): siRNA sense strand
uggccgaggaguaugacua

SEQ ID NO: 2294919 - RNA, 19 nt, Homo sapiens
  misc_RNA (1)...(19): siRNA sense strand
acaaugaguacgagggcau

SEQ ID NO: 2294920 - RNA, 19 nt, Homo sapiens
  misc_RNA (1)...(19): siRNA sense strand
gauccagagggcagggaga

SEQ ID NO: 2294921 - RNA, 19 nt, Homo sapiens
  misc_RNA (1)...(19): siRNA sense strand
uaacagaacuggcagggca

SEQ ID NO: 2294922 - RNA, 19 nt, Homo sapiens
  misc_RNA (1)...(19): siRNA sense strand
ccugaagggcauggacaaa

SEQ ID NO: 2294923 - RNA, 19 nt, Homo sapiens
  misc_RNA (1)...(19): siRNA sense strand
caaccugaaacgagcguca

SEQ ID NO: 2294924 - RNA, 19 nt, Homo sapiens
  misc_RNA (1)...(19): siRNA sense strand
uggacaaagcucagggauc

SEQ ID NO: 2294925 - RNA, 19 nt, Homo sapiens
  misc_RNA (1)...(19): siRNA sense strand
guacuucuaugcugggcaa

SEQ ID NO: 2294926 - RNA, 19 nt, Homo sapiens
  misc_RNA (1)...(19): siRNA sense strand
uggccgaggaguaugacua

SEQ ID NO: 2294927 - RNA, 19 nt, Homo sapiens
  misc_RNA (1)...(19): siRNA sense strand
accaaagauccgugagcaa

SEQ ID NO: 2294928 - RNA, 19 nt, Homo sapiens
  misc_RNA (1)...(19): siRNA sense strand
acgugaugaacgagaacaa

SEQ ID NO: 2294929 - RNA, 19 nt, Homo sapiens
  misc_RNA (1)...(19): siRNA sense strand
caagaaagcacuucagcca

SEQ ID NO: 2294930 - RNA, 19 nt, Homo sapiens
  misc_RNA (1)...(19): siRNA sense strand
ccgugagcaacgauaaaua

SEQ ID NO: 2294931 - RNA, 19 nt, Homo sapiens
  misc_RNA (1)...(19): siRNA sense strand
uggacggcgugguggagaa

SEQ ID NO: 2294932 - RNA, 19 nt, Homo sapiens
  misc_RNA (1)...(19): siRNA sense strand
cugugagacaugcaagaaa

SEQ ID NO: 2294933 - RNA, 19 nt, Homo sapiens
  misc_RNA (1)...(19): siRNA sense strand
agaagaacauugaccggga

SEQ ID NO: 2294934 - RNA, 19 nt, Homo sapiens
  misc_RNA (1)...(19): siRNA sense strand
acggcuacgucuacggcua

SEQ ID NO: 2294935 - RNA, 19 nt, Homo sapiens
  misc_RNA (1)...(19): siRNA sense strand
gagaggacguugagcggcu

SEQ ID NO: 2294936 - RNA, 19 nt, Homo sapiens
  misc_RNA (1)...(19): siRNA sense strand
gacuggacgcugugagaca

SEQ ID NO: 2294937 - RNA, 19 nt, Homo sapiens
  misc_RNA (1)...(19): siRNA sense strand
gaguuaugcuagaaggaga

SEQ ID NO: 2294938 - RNA, 19 nt, Homo sapiens
  misc_RNA (1)...(19): siRNA sense strand
aacaagaggaagagaggaa

SEQ ID NO: 2294939 - RNA, 19 nt, Homo sapiens
  misc_RNA (1)...(19): siRNA sense strand
aggagguggaggagaagaa

SEQ ID NO: 2294940 - RNA, 19 nt, Homo sapiens
  misc_RNA (1)...(19): siRNA sense strand
caagaggaagagaggaaaa

SEQ ID NO: 2294941 - RNA, 19 nt, Homo sapiens
  misc_RNA (1)...(19): siRNA sense strand
agagaggaaaagagaauua

SEQ ID NO: 2294942 - RNA, 19 nt, Homo sapiens
  misc_RNA (1)...(19): siRNA sense strand
cuuuggagaaauugaggaa

SEQ ID NO: 2294943 - RNA, 19 nt, Homo sapiens
  misc_RNA (1)...(19): siRNA sense strand
agaagaagcgggagcagga

SEQ ID NO: 2294944 - RNA, 19 nt, Homo sapiens
  misc_RNA (1)...(19): siRNA sense strand
uaugcuagaaggagaacaa

SEQ ID NO: 2294945 - RNA, 19 nt, Homo sapiens
  misc_RNA (1)...(19): siRNA sense strand
uuggagaaauugaggaaac

SEQ ID NO: 2294946 - RNA, 19 nt, Homo sapiens
  misc_RNA (1)...(19): siRNA sense strand
aguuaugcuagaaggagaa

SEQ ID NO: 2294947 - RNA, 19 nt, Homo sapiens
  misc_RNA (1)...(19): siRNA sense strand
gggugaagugugugcagga

SEQ ID NO: 2294948 - RNA, 19 nt, Homo sapiens
  misc_RNA (1)...(19): siRNA sense strand
cuaucugaagugaggaaaa

SEQ ID NO: 2294949 - RNA, 19 nt, Homo sapiens
  misc_RNA (1)...(19): siRNA sense strand
aauugaggaaacugaggaa

SEQ ID NO: 2294950 - RNA, 19 nt, Homo sapiens
  misc_RNA (1)...(19): siRNA sense strand
ccgaucaucccaaaggcaa

SEQ ID NO: 2294951 - RNA, 19 nt, Homo sapiens
  misc_RNA (1)...(19): siRNA sense strand
ggaagagaggaaaagagaa

SEQ ID NO: 2294952 - RNA, 19 nt, Homo sapiens
  misc_RNA (1)...(19): siRNA sense strand
gaggagaucuauaaggaca

SEQ ID NO: 2294953 - RNA, 19 nt, Homo sapiens
  misc_RNA (1)...(19): siRNA sense strand
uggccaaggcacagagaga

SEQ ID NO: 2294954 - RNA, 19 nt, Homo sapiens
  misc_RNA (1)...(19): siRNA sense strand
gcuacaagcuggagcgccu

SEQ ID NO: 2294955 - RNA, 19 nt, Homo sapiens
  misc_RNA (1)...(19): siRNA sense strand
cuauaaggacaggcagaaa

SEQ ID NO: 2294956 - RNA, 19 nt, Homo sapiens
  misc_RNA (1)...(19): siRNA sense strand
aggcugagcagauggccaa

SEQ ID NO: 2294957 - RNA, 19 nt, Homo sapiens
  misc_RNA (1)...(19): siRNA sense strand
uggagacguuagagggcca

SEQ ID NO: 2294958 - RNA, 19 nt, Homo sapiens
  misc_RNA (1)...(19): siRNA sense strand
aagcuaaagccaagcagga

SEQ ID NO: 2294959 - RNA, 19 nt, Homo sapiens
  misc_RNA (1)...(19): siRNA sense strand
gugagaucgagauggccaa

SEQ ID NO: 2294960 - RNA, 19 nt, Homo sapiens
  misc_RNA (1)...(19): siRNA sense strand
gcacagagagauuacgaac

SEQ ID NO: 2294961 - RNA, 19 nt, Homo sapiens
  misc_RNA (1)...(19): siRNA sense strand
uggcagugcaggagcagga

SEQ ID NO: 2294962 - RNA, 19 nt, Homo sapiens
  misc_RNA (1)...(19): siRNA sense strand
ucgagauggccaaggcaca

SEQ ID NO: 2294963 - RNA, 19 nt, Homo sapiens
  misc_RNA (1)...(19): siRNA sense strand
cugcagaagaggaagagaa

SEQ ID NO: 2294964 - RNA, 19 nt, Homo sapiens
  misc_RNA (1)...(19): siRNA sense strand
agaucaaccuccucggcuu

SEQ ID NO: 2294965 - RNA, 19 nt, Homo sapiens
  misc_RNA (1)...(19): siRNA sense strand
ccgcaaguccugugagcac

SEQ ID NO: 2294966 - RNA, 19 nt, Homo sapiens
  misc_RNA (1)...(19): siRNA sense strand
ccgugaggcuggugagcaa

SEQ ID NO: 2294967 - RNA, 19 nt, Homo sapiens
  misc_RNA (1)...(19): siRNA sense strand
cugaaauccaagaggaaaa

SEQ ID NO: 2294968 - RNA, 19 nt, Homo sapiens
  misc_RNA (1)...(19): siRNA sense strand
uggacaaaucagagcuuaa

SEQ ID NO: 2294969 - RNA, 19 nt, Homo sapiens
  misc_RNA (1)...(19): siRNA sense strand
cccgaagaauggugagaca

SEQ ID NO: 2294970 - RNA, 19 nt, Homo sapiens
  misc_RNA (1)...(19): siRNA sense strand
auggaaacgugguggaguu

SEQ ID NO: 2294971 - RNA, 19 nt, Homo sapiens
  misc_RNA (1)...(19): siRNA sense strand
ggaagaacauuuagaggag

SEQ ID NO: 2294972 - RNA, 19 nt, Homo sapiens
  misc_RNA (1)...(19): siRNA sense strand
aggaggagucugaagaaga

SEQ ID NO: 2294973 - RNA, 19 nt, Homo sapiens
  misc_RNA (1)...(19): siRNA sense strand
aagaagaaguagaggaacc

SEQ ID NO: 2294974 - RNA, 19 nt, Homo sapiens
  misc_RNA (1)...(19): siRNA sense strand
ggcgggaauuugugagaca

SEQ ID NO: 2294975 - RNA, 19 nt, Homo sapiens
  misc_RNA (1)...(19): siRNA sense strand
gauuggauucaaauggaaa

SEQ ID NO: 2294976 - RNA, 19 nt, Homo sapiens
  misc_RNA (1)...(19): siRNA sense strand
ugaaugucgaagagaagaa

SEQ ID NO: 2294977 - RNA, 19 nt, Homo sapiens
  misc_RNA (1)...(19): siRNA sense strand
ggauucaaauggaaagcca

SEQ ID NO: 2294978 - RNA, 19 nt, Homo sapiens
  misc_RNA (1)...(19): siRNA sense strand
agacaguacaggaagacuu

SEQ ID NO: 2294979 - RNA, 19 nt, Homo sapiens
  misc_RNA (1)...(19): siRNA sense strand
cugaagaagaaguagagga

SEQ ID NO: 2294980 - RNA, 19 nt, Homo sapiens
  misc_RNA (1)...(19): siRNA sense strand
aguagaggaaccugaagaa

SEQ ID NO: 2294981 - RNA, 19 nt, Homo sapiens
  misc_RNA (1)...(19): siRNA sense strand
uguuaaaguaccagcuuca

SEQ ID NO: 2294982 - RNA, 19 nt, Homo sapiens
  misc_RNA (1)...(19): siRNA sense strand
caguaaugacauggaagaa

SEQ ID NO: 2294983 - RNA, 19 nt, Homo sapiens
  misc_RNA (1)...(19): siRNA sense strand
ugaaccagaaccagaacaa

SEQ ID NO: 2294984 - RNA, 19 nt, Homo sapiens
  misc_RNA (1)...(19): siRNA sense strand
uggaagaacauuuagagga

SEQ ID NO: 2294985 - RNA, 19 nt, Homo sapiens
  misc_RNA (1)...(19): siRNA sense strand
gggaucaaagagugcgaga

SEQ ID NO: 2294986 - RNA, 19 nt, Homo sapiens
  misc_RNA (1)...(19): siRNA sense strand
ggugcagaaaccaggauuu

SEQ ID NO: 2294987 - RNA, 19 nt, Homo sapiens
  misc_RNA (1)...(19): siRNA sense strand
ggacagaaagaaauccaca

SEQ ID NO: 2294988 - RNA, 19 nt, Homo sapiens
  misc_RNA (1)...(19): siRNA sense strand
agucugaagaagaaguaga

SEQ ID NO: 2294989 - RNA, 19 nt, Homo sapiens
  misc_RNA (1)...(19): siRNA sense strand
cagucuacggacagaaaga

SEQ ID NO: 2294990 - RNA, 19 nt, Homo sapiens
  misc_RNA (1)...(19): siRNA sense strand
aggaaaagccugagccagu

SEQ ID NO: 2294991 - RNA, 19 nt, Homo sapiens
  misc_RNA (1)...(19): siRNA sense strand
gucuacggacagaaagaaa

SEQ ID NO: 2294992 - RNA, 19 nt, Homo sapiens
  misc_RNA (1)...(19): siRNA sense strand
agugcgagaacaacgaaua

SEQ ID NO: 2294993 - RNA, 19 nt, Homo sapiens
  misc_RNA (1)...(19): siRNA sense strand
gagaagaagacucgagcug

SEQ ID NO: 2294994 - RNA, 19 nt, Homo sapiens
  misc_RNA (1)...(19): siRNA sense strand
cagaugcagucuacggaca

SEQ ID NO: 2294995 - RNA, 19 nt, Homo sapiens
  misc_RNA (1)...(19): siRNA sense strand
ccugaagaaagacagcaaa

SEQ ID NO: 2294996 - RNA, 19 nt, Homo sapiens
  misc_RNA (1)...(19): siRNA sense strand
ggaucaaagagugcgagaa

SEQ ID NO: 2294997 - RNA, 19 nt, Homo sapiens
  misc_RNA (1)...(19): siRNA sense strand
aucugaaauccaagaggaa

SEQ ID NO: 2294998 - RNA, 19 nt, Homo sapiens
  misc_RNA (1)...(19): siRNA sense strand
ccgugaggcuggugagcaa

SEQ ID NO: 2294999 - RNA, 19 nt, Homo sapiens
  misc_RNA (1)...(19): siRNA sense strand
cugaaauccaagaggaaaa

SEQ ID NO: 2295000 - RNA, 19 nt, Homo sapiens
  misc_RNA (1)...(19): siRNA sense strand
uggacaaaucagagcuuaa

SEQ ID NO: 2295001 - RNA, 19 nt, Homo sapiens
  misc_RNA (1)...(19): siRNA sense strand
cccgaagaauggugagaca

SEQ ID NO: 2295002 - RNA, 19 nt, Homo sapiens
  misc_RNA (1)...(19): siRNA sense strand
auggaaacgugguggaguu

SEQ ID NO: 2295003 - RNA, 19 nt, Homo sapiens
  misc_RNA (1)...(19): siRNA sense strand
ggaagaacauuuagaggag

SEQ ID NO: 2295004 - RNA, 19 nt, Homo sapiens
  misc_RNA (1)...(19): siRNA sense strand
aggaggagucugaagaaga

SEQ ID NO: 2295005 - RNA, 19 nt, Homo sapiens
  misc_RNA (1)...(19): siRNA sense strand
aagaagaaguagaggaacc

SEQ ID NO: 2295006 - RNA, 19 nt, Homo sapiens
  misc_RNA (1)...(19): siRNA sense strand
ggcgggaauuugugagaca

SEQ ID NO: 2295007 - RNA, 19 nt, Homo sapiens
  misc_RNA (1)...(19): siRNA sense strand
gauuggauucaaauggaaa

SEQ ID NO: 2295008 - RNA, 19 nt, Homo sapiens
  misc_RNA (1)...(19): siRNA sense strand
ugaaugucgaagagaagaa

SEQ ID NO: 2295009 - RNA, 19 nt, Homo sapiens
  misc_RNA (1)...(19): siRNA sense strand
ggauucaaauggaaagcca

SEQ ID NO: 2295010 - RNA, 19 nt, Homo sapiens
  misc_RNA (1)...(19): siRNA sense strand
agacaguacaggaagacuu

SEQ ID NO: 2295011 - RNA, 19 nt, Homo sapiens
  misc_RNA (1)...(19): siRNA sense strand
cugaagaagaaguagagga

SEQ ID NO: 2295012 - RNA, 19 nt, Homo sapiens
  misc_RNA (1)...(19): siRNA sense strand
aguagaggaaccugaagaa

SEQ ID NO: 2295013 - RNA, 19 nt, Homo sapiens
  misc_RNA (1)...(19): siRNA sense strand
uguuaaaguaccagcuuca

SEQ ID NO: 2295014 - RNA, 19 nt, Homo sapiens
  misc_RNA (1)...(19): siRNA sense strand
caguaaugacauggaagaa

SEQ ID NO: 2295015 - RNA, 19 nt, Homo sapiens
  misc_RNA (1)...(19): siRNA sense strand
ugaaccagaaccagaacaa

SEQ ID NO: 2295016 - RNA, 19 nt, Homo sapiens
  misc_RNA (1)...(19): siRNA sense strand
uggaagaacauuuagagga

SEQ ID NO: 2295017 - RNA, 19 nt, Homo sapiens
  misc_RNA (1)...(19): siRNA sense strand
gggaucaaagagugcgaga

SEQ ID NO: 2295018 - RNA, 19 nt, Homo sapiens
  misc_RNA (1)...(19): siRNA sense strand
ggugcagaaaccaggauuu

SEQ ID NO: 2295019 - RNA, 19 nt, Homo sapiens
  misc_RNA (1)...(19): siRNA sense strand
ggacagaaagaaauccaca

SEQ ID NO: 2295020 - RNA, 19 nt, Homo sapiens
  misc_RNA (1)...(19): siRNA sense strand
agucugaagaagaaguaga

SEQ ID NO: 2295021 - RNA, 19 nt, Homo sapiens
  misc_RNA (1)...(19): siRNA sense strand
cagucuacggacagaaaga

SEQ ID NO: 2295022 - RNA, 19 nt, Homo sapiens
  misc_RNA (1)...(19): siRNA sense strand
aggaaaagccugagccagu

SEQ ID NO: 2295023 - RNA, 19 nt, Homo sapiens
  misc_RNA (1)...(19): siRNA sense strand
gucuacggacagaaagaaa

SEQ ID NO: 2295024 - RNA, 19 nt, Homo sapiens
  misc_RNA (1)...(19): siRNA sense strand
agugcgagaacaacgaaua

SEQ ID NO: 2295025 - RNA, 19 nt, Homo sapiens
  misc_RNA (1)...(19): siRNA sense strand
gagaagaagacucgagcug

SEQ ID NO: 2295026 - RNA, 19 nt, Homo sapiens
  misc_RNA (1)...(19): siRNA sense strand
cagaugcagucuacggaca

SEQ ID NO: 2295027 - RNA, 19 nt, Homo sapiens
  misc_RNA (1)...(19): siRNA sense strand
ccugaagaaagacagcaaa

SEQ ID NO: 2295028 - RNA, 19 nt, Homo sapiens
  misc_RNA (1)...(19): siRNA sense strand
ggaucaaagagugcgagaa

SEQ ID NO: 2295029 - RNA, 19 nt, Homo sapiens
  misc_RNA (1)...(19): siRNA sense strand
aucugaaauccaagaggaa

SEQ ID NO: 2295030 - RNA, 19 nt, Homo sapiens
  misc_RNA (1)...(19): siRNA sense strand
cgcaugaggcugagaagca

SEQ ID NO: 2295031 - RNA, 19 nt, Homo sapiens
  misc_RNA (1)...(19): siRNA sense strand
aguacagcgaggagaacau

SEQ ID NO: 2295032 - RNA, 19 nt, Homo sapiens
  misc_RNA (1)...(19): siRNA sense strand
cugcagaucuacacgcuca

SEQ ID NO: 2295033 - RNA, 19 nt, Homo sapiens
  misc_RNA (1)...(19): siRNA sense strand
gacgagaaggcgaggcuca

SEQ ID NO: 2295034 - RNA, 19 nt, Homo sapiens
  misc_RNA (1)...(19): siRNA sense strand
ggcucaucuacgaggacua

SEQ ID NO: 2295035 - RNA, 19 nt, Homo sapiens
  misc_RNA (1)...(19): siRNA sense strand
gcaacagcaucgaggccuu

SEQ ID NO: 2295036 - RNA, 19 nt, Homo sapiens
  misc_RNA (1)...(19): siRNA sense strand
cugcacaacaccaagacaa

SEQ ID NO: 2295037 - RNA, 19 nt, Homo sapiens
  misc_RNA (1)...(19): siRNA sense strand
acaagaaggucucgugcca

SEQ ID NO: 2295038 - RNA, 19 nt, Homo sapiens
  misc_RNA (1)...(19): siRNA sense strand
cggcagaaguuuaaccaac

SEQ ID NO: 2295039 - RNA, 19 nt, Homo sapiens
  misc_RNA (1)...(19): siRNA sense strand
ggauaaugagauagagcug

SEQ ID NO: 2295040 - RNA, 19 nt, Homo sapiens
  misc_RNA (1)...(19): siRNA sense strand
ugcacaacaccaagacaaa

SEQ ID NO: 2295041 - RNA, 19 nt, Homo sapiens
  misc_RNA (1)...(19): siRNA sense strand
uggcuugaccugcgggaga

SEQ ID NO: 2295042 - RNA, 19 nt, Homo sapiens
  misc_RNA (1)...(19): siRNA sense strand
ggcucaaccugcaggggaa

SEQ ID NO: 2295043 - RNA, 19 nt, Homo sapiens
  misc_RNA (1)...(19): siRNA sense strand
cugcgaaacaacagcuuca

SEQ ID NO: 2295044 - RNA, 19 nt, Homo sapiens
  misc_RNA (1)...(19): siRNA sense strand
ccuuggagguccuggcacu

SEQ ID NO: 2295045 - RNA, 19 nt, Homo sapiens
  misc_RNA (1)...(19): siRNA sense strand
gaaaagaagaacagaggaa

SEQ ID NO: 2295046 - RNA, 19 nt, Homo sapiens
  misc_RNA (1)...(19): siRNA sense strand
uguuaagggcaguggcaaa

SEQ ID NO: 2295047 - RNA, 19 nt, Homo sapiens
  misc_RNA (1)...(19): siRNA sense strand
gguuguagaagaaggagaa

SEQ ID NO: 2295048 - RNA, 19 nt, Homo sapiens
  misc_RNA (1)...(19): siRNA sense strand
auggaaacauuuagagaca

SEQ ID NO: 2295049 - RNA, 19 nt, Homo sapiens
  misc_RNA (1)...(19): siRNA sense strand
gggcaguggcaaagcgaga

SEQ ID NO: 2295050 - RNA, 19 nt, Homo sapiens
  misc_RNA (1)...(19): siRNA sense strand
gguauacagaagagaagua

SEQ ID NO: 2295051 - RNA, 19 nt, Homo sapiens
  misc_RNA (1)...(19): siRNA sense strand
ugggaaacaacuauagaaa

SEQ ID NO: 2295052 - RNA, 19 nt, Homo sapiens
  misc_RNA (1)...(19): siRNA sense strand
auacagaagagaaguagaa

SEQ ID NO: 2295053 - RNA, 19 nt, Homo sapiens
  misc_RNA (1)...(19): siRNA sense strand
cuuuaaaggggaagcgaua

SEQ ID NO: 2295054 - RNA, 19 nt, Homo sapiens
  misc_RNA (1)...(19): siRNA sense strand
ugguagaagaugaugaaga

SEQ ID NO: 2295055 - RNA, 19 nt, Homo sapiens
  misc_RNA (1)...(19): siRNA sense strand
cgacauggcucaauggugu

SEQ ID NO: 2295056 - RNA, 19 nt, Homo sapiens
  misc_RNA (1)...(19): siRNA sense strand
uggcagaagagacuggaua

SEQ ID NO: 2295057 - RNA, 19 nt, Homo sapiens
  misc_RNA (1)...(19): siRNA sense strand
caggaaauuagcagggaca

SEQ ID NO: 2295058 - RNA, 19 nt, Homo sapiens
  misc_RNA (1)...(19): siRNA sense strand
cggcaauaaagaaaaguua

SEQ ID NO: 2295059 - RNA, 19 nt, Homo sapiens
  misc_RNA (1)...(19): siRNA sense strand
ugaagaugaaacagaguau

SEQ ID NO: 2295060 - RNA, 19 nt, Homo sapiens
  misc_RNA (1)...(19): siRNA sense strand
uagaagaaggagaaaugaa

SEQ ID NO: 2295061 - RNA, 19 nt, Homo sapiens
  misc_RNA (1)...(19): siRNA sense strand
ggauaaggaaacugagaag

SEQ ID NO: 2295062 - RNA, 19 nt, Homo sapiens
  misc_RNA (1)...(19): siRNA sense strand
cagucugauuaaugaagaa

SEQ ID NO: 2295063 - RNA, 19 nt, Homo sapiens
  misc_RNA (1)...(19): siRNA sense strand
gcauaguaccaacggcaau

SEQ ID NO: 2295064 - RNA, 19 nt, Homo sapiens
  misc_RNA (1)...(19): siRNA sense strand
gggaaacaacuauagaaaa

SEQ ID NO: 2295065 - RNA, 19 nt, Homo sapiens
  misc_RNA (1)...(19): siRNA sense strand
ccgauguguccgugccaaa

SEQ ID NO: 2295066 - RNA, 19 nt, Homo sapiens
  misc_RNA (1)...(19): siRNA sense strand
aggaccagauuaugaagaa

SEQ ID NO: 2295067 - RNA, 19 nt, Homo sapiens
  misc_RNA (1)...(19): siRNA sense strand
augcaaugacagaacuuaa

SEQ ID NO: 2295068 - RNA, 19 nt, Homo sapiens
  misc_RNA (1)...(19): siRNA sense strand
gugcagaaccacaugacuu

SEQ ID NO: 2295069 - RNA, 19 nt, Homo sapiens
  misc_RNA (1)...(19): siRNA sense strand
acagaagagaaguagaaga

SEQ ID NO: 2295070 - RNA, 19 nt, Homo sapiens
  misc_RNA (1)...(19): siRNA sense strand
cagagggaaaccaggaaau

SEQ ID NO: 2295071 - RNA, 19 nt, Homo sapiens
  misc_RNA (1)...(19): siRNA sense strand
gauuaaugaagaagaguuc

SEQ ID NO: 2295072 - RNA, 19 nt, Homo sapiens
  misc_RNA (1)...(19): siRNA sense strand
gcacaagacugaaucugga

SEQ ID NO: 2295073 - RNA, 19 nt, Homo sapiens
  misc_RNA (1)...(19): siRNA sense strand
aaauagaagaacagucaca

SEQ ID NO: 2295074 - RNA, 19 nt, Homo sapiens
  misc_RNA (1)...(19): siRNA sense strand
ggaauuaaugguauagacu

SEQ ID NO: 2295075 - RNA, 19 nt, Homo sapiens
  misc_RNA (1)...(19): siRNA sense strand
guucgcaaugacugggaaa

SEQ ID NO: 2295076 - RNA, 19 nt, Homo sapiens
  misc_RNA (1)...(19): siRNA sense strand
ccagagggaaaccaggaaa

SEQ ID NO: 2295077 - RNA, 19 nt, Homo sapiens
  misc_RNA (1)...(19): siRNA sense strand
uguagaagaaggagaaaug

SEQ ID NO: 2295078 - RNA, 19 nt, Homo sapiens
  misc_RNA (1)...(19): siRNA sense strand
cuuuggaggaccagauuau

SEQ ID NO: 2295079 - RNA, 19 nt, Homo sapiens
  misc_RNA (1)...(19): siRNA sense strand
aguagaagaaaaugggauu

SEQ ID NO: 2295080 - RNA, 19 nt, Homo sapiens
  misc_RNA (1)...(19): siRNA sense strand
cugcaauuauuucuggaau

SEQ ID NO: 2295081 - RNA, 19 nt, Homo sapiens
  misc_RNA (1)...(19): siRNA sense strand
acugagaagaaaagaagaa

SEQ ID NO: 2295082 - RNA, 19 nt, Homo sapiens
  misc_RNA (1)...(19): siRNA sense strand
gguggaaacauuagcugau

SEQ ID NO: 2295083 - RNA, 19 nt, Homo sapiens
  misc_RNA (1)...(19): siRNA sense strand
ccaaaaggaauuaauggua

SEQ ID NO: 2295084 - RNA, 19 nt, Homo sapiens
  misc_RNA (1)...(19): siRNA sense strand
aaggaaacugagaagaaaa

SEQ ID NO: 2295085 - RNA, 19 nt, Homo sapiens
  misc_RNA (1)...(19): siRNA sense strand
cgcaaugacugggaaacaa

SEQ ID NO: 2295086 - RNA, 19 nt, Homo sapiens
  misc_RNA (1)...(19): siRNA sense strand
aagaacagaggaagcauau

SEQ ID NO: 2295087 - RNA, 19 nt, Homo sapiens
  misc_RNA (1)...(19): siRNA sense strand
gaaacugagaagaaaagaa

SEQ ID NO: 2295088 - RNA, 19 nt, Homo sapiens
  misc_RNA (1)...(19): siRNA sense strand
ggaauguugacguucgcaa

SEQ ID NO: 2295089 - RNA, 19 nt, Homo sapiens
  misc_RNA (1)...(19): siRNA sense strand
guggcaggaucguugggua

SEQ ID NO: 2295090 - RNA, 19 nt, Homo sapiens
  misc_RNA (1)...(19): siRNA sense strand
agaaaugaagguauacaga

SEQ ID NO: 2295091 - RNA, 19 nt, Homo sapiens
  misc_RNA (1)...(19): siRNA sense strand
accaacggcaauaaagaaa

SEQ ID NO: 2295092 - RNA, 19 nt, Homo sapiens
  misc_RNA (1)...(19): siRNA sense strand
gaaaagaagaacagaggaa

SEQ ID NO: 2295093 - RNA, 19 nt, Homo sapiens
  misc_RNA (1)...(19): siRNA sense strand
uguuaagggcaguggcaaa

SEQ ID NO: 2295094 - RNA, 19 nt, Homo sapiens
  misc_RNA (1)...(19): siRNA sense strand
gguuguagaagaaggagaa

SEQ ID NO: 2295095 - RNA, 19 nt, Homo sapiens
  misc_RNA (1)...(19): siRNA sense strand
auggaaacauuuagagaca

SEQ ID NO: 2295096 - RNA, 19 nt, Homo sapiens
  misc_RNA (1)...(19): siRNA sense strand
gggcaguggcaaagcgaga

SEQ ID NO: 2295097 - RNA, 19 nt, Homo sapiens
  misc_RNA (1)...(19): siRNA sense strand
gguauacagaagagaagua

SEQ ID NO: 2295098 - RNA, 19 nt, Homo sapiens
  misc_RNA (1)...(19): siRNA sense strand
ugggaaacaacuauagaaa

SEQ ID NO: 2295099 - RNA, 19 nt, Homo sapiens
  misc_RNA (1)...(19): siRNA sense strand
auacagaagagaaguagaa

SEQ ID NO: 2295100 - RNA, 19 nt, Homo sapiens
  misc_RNA (1)...(19): siRNA sense strand
cuuuaaaggggaagcgaua

SEQ ID NO: 2295101 - RNA, 19 nt, Homo sapiens
  misc_RNA (1)...(19): siRNA sense strand
ugguagaagaugaugaaga

SEQ ID NO: 2295102 - RNA, 19 nt, Homo sapiens
  misc_RNA (1)...(19): siRNA sense strand
cgacauggcucaauggugu

SEQ ID NO: 2295103 - RNA, 19 nt, Homo sapiens
  misc_RNA (1)...(19): siRNA sense strand
uggcagaagagacuggaua

SEQ ID NO: 2295104 - RNA, 19 nt, Homo sapiens
  misc_RNA (1)...(19): siRNA sense strand
caggaaauuagcagggaca

SEQ ID NO: 2295105 - RNA, 19 nt, Homo sapiens
  misc_RNA (1)...(19): siRNA sense strand
cggcaauaaagaaaaguua

SEQ ID NO: 2295106 - RNA, 19 nt, Homo sapiens
  misc_RNA (1)...(19): siRNA sense strand
ugaagaugaaacagaguau

SEQ ID NO: 2295107 - RNA, 19 nt, Homo sapiens
  misc_RNA (1)...(19): siRNA sense strand
uagaagaaggagaaaugaa

SEQ ID NO: 2295108 - RNA, 19 nt, Homo sapiens
  misc_RNA (1)...(19): siRNA sense strand
ggauaaggaaacugagaag

SEQ ID NO: 2295109 - RNA, 19 nt, Homo sapiens
  misc_RNA (1)...(19): siRNA sense strand
cagucugauuaaugaagaa

SEQ ID NO: 2295110 - RNA, 19 nt, Homo sapiens
  misc_RNA (1)...(19): siRNA sense strand
gcauaguaccaacggcaau

SEQ ID NO: 2295111 - RNA, 19 nt, Homo sapiens
  misc_RNA (1)...(19): siRNA sense strand
gggaaacaacuauagaaaa

SEQ ID NO: 2295112 - RNA, 19 nt, Homo sapiens
  misc_RNA (1)...(19): siRNA sense strand
ccgauguguccgugccaaa

SEQ ID NO: 2295113 - RNA, 19 nt, Homo sapiens
  misc_RNA (1)...(19): siRNA sense strand
aggaccagauuaugaagaa

SEQ ID NO: 2295114 - RNA, 19 nt, Homo sapiens
  misc_RNA (1)...(19): siRNA sense strand
augcaaugacagaacuuaa

SEQ ID NO: 2295115 - RNA, 19 nt, Homo sapiens
  misc_RNA (1)...(19): siRNA sense strand
gugcagaaccacaugacuu

SEQ ID NO: 2295116 - RNA, 19 nt, Homo sapiens
  misc_RNA (1)...(19): siRNA sense strand
acagaagagaaguagaaga

SEQ ID NO: 2295117 - RNA, 19 nt, Homo sapiens
  misc_RNA (1)...(19): siRNA sense strand
cagagggaaaccaggaaau

SEQ ID NO: 2295118 - RNA, 19 nt, Homo sapiens
  misc_RNA (1)...(19): siRNA sense strand
gauuaaugaagaagaguuc

SEQ ID NO: 2295119 - RNA, 19 nt, Homo sapiens
  misc_RNA (1)...(19): siRNA sense strand
gcacaagacugaaucugga

SEQ ID NO: 2295120 - RNA, 19 nt, Homo sapiens
  misc_RNA (1)...(19): siRNA sense strand
aaauagaagaacagucaca

SEQ ID NO: 2295121 - RNA, 19 nt, Homo sapiens
  misc_RNA (1)...(19): siRNA sense strand
ggaauuaaugguauagacu

SEQ ID NO: 2295122 - RNA, 19 nt, Homo sapiens
  misc_RNA (1)...(19): siRNA sense strand
guucgcaaugacugggaaa

SEQ ID NO: 2295123 - RNA, 19 nt, Homo sapiens
  misc_RNA (1)...(19): siRNA sense strand
ccagagggaaaccaggaaa

SEQ ID NO: 2295124 - RNA, 19 nt, Homo sapiens
  misc_RNA (1)...(19): siRNA sense strand
uguagaagaaggagaaaug

SEQ ID NO: 2295125 - RNA, 19 nt, Homo sapiens
  misc_RNA (1)...(19): siRNA sense strand
cuuuggaggaccagauuau

SEQ ID NO: 2295126 - RNA, 19 nt, Homo sapiens
  misc_RNA (1)...(19): siRNA sense strand
aguagaagaaaaugggauu

SEQ ID NO: 2295127 - RNA, 19 nt, Homo sapiens
  misc_RNA (1)...(19): siRNA sense strand
cugcaauuauuucuggaau

SEQ ID NO: 2295128 - RNA, 19 nt, Homo sapiens
  misc_RNA (1)...(19): siRNA sense strand
acugagaagaaaagaagaa

SEQ ID NO: 2295129 - RNA, 19 nt, Homo sapiens
  misc_RNA (1)...(19): siRNA sense strand
gguggaaacauuagcugau

SEQ ID NO: 2295130 - RNA, 19 nt, Homo sapiens
  misc_RNA (1)...(19): siRNA sense strand
ccaaaaggaauuaauggua

SEQ ID NO: 2295131 - RNA, 19 nt, Homo sapiens
  misc_RNA (1)...(19): siRNA sense strand
aaggaaacugagaagaaaa

SEQ ID NO: 2295132 - RNA, 19 nt, Homo sapiens
  misc_RNA (1)...(19): siRNA sense strand
cgcaaugacugggaaacaa

SEQ ID NO: 2295133 - RNA, 19 nt, Homo sapiens
  misc_RNA (1)...(19): siRNA sense strand
aagaacagaggaagcauau

SEQ ID NO: 2295134 - RNA, 19 nt, Homo sapiens
  misc_RNA (1)...(19): siRNA sense strand
gaaacugagaagaaaagaa

SEQ ID NO: 2295135 - RNA, 19 nt, Homo sapiens
  misc_RNA (1)...(19): siRNA sense strand
ggaauguugacguucgcaa

SEQ ID NO: 2295136 - RNA, 19 nt, Homo sapiens
  misc_RNA (1)...(19): siRNA sense strand
guggcaggaucguugggua

SEQ ID NO: 2295137 - RNA, 19 nt, Homo sapiens
  misc_RNA (1)...(19): siRNA sense strand
agaaaugaagguauacaga

SEQ ID NO: 2295138 - RNA, 19 nt, Homo sapiens
  misc_RNA (1)...(19): siRNA sense strand
accaacggcaauaaagaaa

SEQ ID NO: 2295139 - RNA, 19 nt, Homo sapiens
  misc_RNA (1)...(19): siRNA sense strand
augugaaucuggaggaaau

SEQ ID NO: 2295140 - RNA, 19 nt, Homo sapiens
  misc_RNA (1)...(19): siRNA sense strand
gaauauacaugcugcacca

SEQ ID NO: 2295141 - RNA, 19 nt, Homo sapiens
  misc_RNA (1)...(19): siRNA sense strand
augaagggcugcuuggcaa

SEQ ID NO: 2295142 - RNA, 19 nt, Homo sapiens
  misc_RNA (1)...(19): siRNA sense strand
cuggaaugugugagcaaau

SEQ ID NO: 2295143 - RNA, 19 nt, Homo sapiens
  misc_RNA (1)...(19): siRNA sense strand
aguuaagccaacaaagcaa

SEQ ID NO: 2295144 - RNA, 19 nt, Homo sapiens
  misc_RNA (1)...(19): siRNA sense strand
cguacggugccaagggauu

SEQ ID NO: 2295145 - RNA, 19 nt, Homo sapiens
  misc_RNA (1)...(19): siRNA sense strand
guggaagagacaagccauu

SEQ ID NO: 2295146 - RNA, 19 nt, Homo sapiens
  misc_RNA (1)...(19): siRNA sense strand
cagagaaguugcaaaccga

SEQ ID NO: 2295147 - RNA, 19 nt, Homo sapiens
  misc_RNA (1)...(19): siRNA sense strand
ucaauaaucccgaggugga

SEQ ID NO: 2295148 - RNA, 19 nt, Homo sapiens
  misc_RNA (1)...(19): siRNA sense strand
agugaagacuaccuggaau

SEQ ID NO: 2295149 - RNA, 19 nt, Homo sapiens
  misc_RNA (1)...(19): siRNA sense strand
ccauuaugaacaugcaaga

SEQ ID NO: 2295150 - RNA, 19 nt, Homo sapiens
  misc_RNA (1)...(19): siRNA sense strand
ugaugaauccaguggcuca

SEQ ID NO: 2295151 - RNA, 19 nt, Homo sapiens
  misc_RNA (1)...(19): siRNA sense strand
ccggcuggucacagacaua

SEQ ID NO: 2295152 - RNA, 19 nt, Homo sapiens
  misc_RNA (1)...(19): siRNA sense strand
agacaaguuaagccaacaa

SEQ ID NO: 2295153 - RNA, 19 nt, Homo sapiens
  misc_RNA (1)...(19): siRNA sense strand
gaagacaaguuaagccaac

SEQ ID NO: 2295154 - RNA, 19 nt, Homo sapiens
  misc_RNA (1)...(19): siRNA sense strand
uccaaaugcaggagacaaa

SEQ ID NO: 2295155 - RNA, 19 nt, Homo sapiens
  misc_RNA (1)...(19): siRNA sense strand
ucguguaguucgaggugaa

SEQ ID NO: 2295156 - RNA, 19 nt, Homo sapiens
  misc_RNA (1)...(19): siRNA sense strand
gugaguuauaugacagaua

SEQ ID NO: 2295157 - RNA, 19 nt, Homo sapiens
  misc_RNA (1)...(19): siRNA sense strand
agagcaaggucuucgggaa

SEQ ID NO: 2295158 - RNA, 19 nt, Homo sapiens
  misc_RNA (1)...(19): siRNA sense strand
uggcaaaguaauugaacca

SEQ ID NO: 2295159 - RNA, 19 nt, Homo sapiens
  misc_RNA (1)...(19): siRNA sense strand
agucgaaauggcagaagaa

SEQ ID NO: 2295160 - RNA, 19 nt, Homo sapiens
  misc_RNA (1)...(19): siRNA sense strand
cuguauaauggcaagacaa

SEQ ID NO: 2295161 - RNA, 19 nt, Homo sapiens
  misc_RNA (1)...(19): siRNA sense strand
ugaaacauggacagagaau

SEQ ID NO: 2295162 - RNA, 19 nt, Homo sapiens
  misc_RNA (1)...(19): siRNA sense strand
auggagaaggagagguaau

SEQ ID NO: 2295163 - RNA, 19 nt, Homo sapiens
  misc_RNA (1)...(19): siRNA sense strand
ugauagcacucgaggcuca

SEQ ID NO: 2295164 - RNA, 19 nt, Homo sapiens
  misc_RNA (1)...(19): siRNA sense strand
aguggaacccggagacauu

SEQ ID NO: 2295165 - RNA, 19 nt, Homo sapiens
  misc_RNA (1)...(19): siRNA sense strand
cugaagaaggcauacagaa

SEQ ID NO: 2295166 - RNA, 19 nt, Homo sapiens
  misc_RNA (1)...(19): siRNA sense strand
uagacaaaggcaugaaaca

SEQ ID NO: 2295167 - RNA, 19 nt, Homo sapiens
  misc_RNA (1)...(19): siRNA sense strand
ccuaacauaauuggagaaa

SEQ ID NO: 2295168 - RNA, 19 nt, Homo sapiens
  misc_RNA (1)...(19): siRNA sense strand
ugugaagggaagaagguga

SEQ ID NO: 2295169 - RNA, 19 nt, Homo sapiens
  misc_RNA (1)...(19): siRNA sense strand
augagguauuucagagaga

SEQ ID NO: 2295170 - RNA, 19 nt, Homo sapiens
  misc_RNA (1)...(19): siRNA sense strand
augauuugcacaugacaua

SEQ ID NO: 2295171 - RNA, 19 nt, Homo sapiens
  misc_RNA (1)...(19): siRNA sense strand
ccuugauggacgucagauu

SEQ ID NO: 2295172 - RNA, 19 nt, Homo sapiens
  misc_RNA (1)...(19): siRNA sense strand
ugauuguaauggagaagga

SEQ ID NO: 2295173 - RNA, 19 nt, Homo sapiens
  misc_RNA (1)...(19): siRNA sense strand
guccaaaaguguagugcuu

SEQ ID NO: 2295174 - RNA, 19 nt, Homo sapiens
  misc_RNA (1)...(19): siRNA sense strand
agacaaaggcaugaaacau

SEQ ID NO: 2295175 - RNA, 19 nt, Homo sapiens
  misc_RNA (1)...(19): siRNA sense strand
gaagaaagcagcagccauc

SEQ ID NO: 2295176 - RNA, 19 nt, Homo sapiens
  misc_RNA (1)...(19): siRNA sense strand
aguaauugaaccagggugu

SEQ ID NO: 2295177 - RNA, 19 nt, Homo sapiens
  misc_RNA (1)...(19): siRNA sense strand
aggacuuguugaagcucua

SEQ ID NO: 2295178 - RNA, 19 nt, Homo sapiens
  misc_RNA (1)...(19): siRNA sense strand
ccugaaaacaacuggauca

SEQ ID NO: 2295179 - RNA, 19 nt, Homo sapiens
  misc_RNA (1)...(19): siRNA sense strand
gugaagggaagaaggugau

SEQ ID NO: 2295180 - RNA, 19 nt, Homo sapiens
  misc_RNA (1)...(19): siRNA sense strand
gcuacaggagaaagaacau

SEQ ID NO: 2295181 - RNA, 19 nt, Homo sapiens
  misc_RNA (1)...(19): siRNA sense strand
caaucagaguagaagucga

SEQ ID NO: 2295182 - RNA, 19 nt, Homo sapiens
  misc_RNA (1)...(19): siRNA sense strand
uggcaagacaaccaaacua

SEQ ID NO: 2295183 - RNA, 19 nt, Homo sapiens
  misc_RNA (1)...(19): siRNA sense strand
aguucgaggugaagggaug

SEQ ID NO: 2295184 - RNA, 19 nt, Homo sapiens
  misc_RNA (1)...(19): siRNA sense strand
gcauacagaaaguuagcca

SEQ ID NO: 2295185 - RNA, 19 nt, Homo sapiens
  misc_RNA (1)...(19): siRNA sense strand
agaaaguuagccaaggaau

SEQ ID NO: 2295186 - RNA, 19 nt, Homo sapiens
  misc_RNA (1)...(19): siRNA sense strand
uggagaaacagaggaggua

SEQ ID NO: 2295187 - RNA, 19 nt, Homo sapiens
  misc_RNA (1)...(19): siRNA sense strand
ucagaguagaagucgaaau

SEQ ID NO: 2295188 - RNA, 19 nt, Homo sapiens
  misc_RNA (1)...(19): siRNA sense strand
uggccaaggcggaaagucu

SEQ ID NO: 2295189 - RNA, 19 nt, Homo sapiens
  misc_RNA (1)...(19): siRNA sense strand
uaaugauagcucugaugaa

SEQ ID NO: 2295190 - RNA, 19 nt, Homo sapiens
  misc_RNA (1)...(19): siRNA sense strand
cagagagaugggaaugauu

SEQ ID NO: 2295191 - RNA, 19 nt, Homo sapiens
  misc_RNA (1)...(19): siRNA sense strand
gggcaaucagaguagaagu

SEQ ID NO: 2295192 - RNA, 19 nt, Homo sapiens
  misc_RNA (1)...(19): siRNA sense strand
gggcucaggaacagggaga

SEQ ID NO: 2295193 - RNA, 19 nt, Homo sapiens
  misc_RNA (1)...(19): siRNA sense strand
gacaaagaguucugcgagu

SEQ ID NO: 2295194 - RNA, 19 nt, Homo sapiens
  misc_RNA (1)...(19): siRNA sense strand
ggccagaugaccugcaaaa

SEQ ID NO: 2295195 - RNA, 19 nt, Homo sapiens
  misc_RNA (1)...(19): siRNA sense strand
aggccuacgacgaggacca

SEQ ID NO: 2295196 - RNA, 19 nt, Homo sapiens
  misc_RNA (1)...(19): siRNA sense strand
guggaaggauuugggccua

SEQ ID NO: 2295197 - RNA, 19 nt, Homo sapiens
  misc_RNA (1)...(19): siRNA sense strand
cuggagaggagcagagaua

SEQ ID NO: 2295198 - RNA, 19 nt, Homo sapiens
  misc_RNA (1)...(19): siRNA sense strand
ggagaggagcagagauaca

SEQ ID NO: 2295199 - RNA, 19 nt, Homo sapiens
  misc_RNA (1)...(19): siRNA sense strand
gugauauggaggaagaaga

SEQ ID NO: 2295200 - RNA, 19 nt, Homo sapiens
  misc_RNA (1)...(19): siRNA sense strand
ggaagaagagcucaggaca

SEQ ID NO: 2295201 - RNA, 19 nt, Homo sapiens
  misc_RNA (1)...(19): siRNA sense strand
gcuucaucucugugggcua

SEQ ID NO: 2295202 - RNA, 19 nt, Homo sapiens
  misc_RNA (1)...(19): siRNA sense strand
gaguauugggaccgggaga

SEQ ID NO: 2295203 - RNA, 19 nt, Homo sapiens
  misc_RNA (1)...(19): siRNA sense strand
gcuacuacaaucagagcga

SEQ ID NO: 2295204 - RNA, 19 nt, Homo sapiens
  misc_RNA (1)...(19): siRNA sense strand
aaggcugaguggagcgaca

SEQ ID NO: 2295205 - RNA, 19 nt, Homo sapiens
  misc_RNA (1)...(19): siRNA sense strand
ggagcuacucuaaggcuga

SEQ ID NO: 2295206 - RNA, 19 nt, Homo sapiens
  misc_RNA (1)...(19): siRNA sense strand
acaaauaccuggagaaggg

SEQ ID NO: 2295207 - RNA, 19 nt, Homo sapiens
  misc_RNA (1)...(19): siRNA sense strand
cggaagguggagagggauu

SEQ ID NO: 2295208 - RNA, 19 nt, Homo sapiens
  misc_RNA (1)...(19): siRNA sense strand
aaucagaagaugaagucaa

SEQ ID NO: 2295209 - RNA, 19 nt, Homo sapiens
  misc_RNA (1)...(19): siRNA sense strand
gguccugauggcagaguaa

SEQ ID NO: 2295210 - RNA, 19 nt, Homo sapiens
  misc_RNA (1)...(19): siRNA sense strand
acagagaaacuaugggaca

SEQ ID NO: 2295211 - RNA, 19 nt, Homo sapiens
  misc_RNA (1)...(19): siRNA sense strand
cgaccaaguuuuacaggaa

SEQ ID NO: 2295212 - RNA, 19 nt, Homo sapiens
  misc_RNA (1)...(19): siRNA sense strand
agaaacacaaggaaagaau

SEQ ID NO: 2295213 - RNA, 19 nt, Homo sapiens
  misc_RNA (1)...(19): siRNA sense strand
uggcagaguaacuggugaa

SEQ ID NO: 2295214 - RNA, 19 nt, Homo sapiens
  misc_RNA (1)...(19): siRNA sense strand
uggcagaggagcuggcuuu

SEQ ID NO: 2295215 - RNA, 19 nt, Homo sapiens
  misc_RNA (1)...(19): siRNA sense strand
cugaaaaggcucuaaagaa

SEQ ID NO: 2295216 - RNA, 19 nt, Homo sapiens
  misc_RNA (1)...(19): siRNA sense strand
ccacgaaagcuuauggcca

SEQ ID NO: 2295217 - RNA, 19 nt, Homo sapiens
  misc_RNA (1)...(19): siRNA sense strand
ggaaauagcugaaaaggcu

SEQ ID NO: 2295218 - RNA, 19 nt, Homo sapiens
  misc_RNA (1)...(19): siRNA sense strand
guauaacagcauuggcaga

SEQ ID NO: 2295219 - RNA, 19 nt, Homo sapiens
  misc_RNA (1)...(19): siRNA sense strand
cacggaagguggagaggga

SEQ ID NO: 2295220 - RNA, 19 nt, Homo sapiens
  misc_RNA (1)...(19): siRNA sense strand
cacgaaagcuuauggccau

SEQ ID NO: 2295221 - RNA, 19 nt, Homo sapiens
  misc_RNA (1)...(19): siRNA sense strand
aaucgugccaaaugggaua

SEQ ID NO: 2295222 - RNA, 19 nt, Homo sapiens
  misc_RNA (1)...(19): siRNA sense strand
uggcuauaaugauggcuau

SEQ ID NO: 2295223 - RNA, 19 nt, Homo sapiens
  misc_RNA (1)...(19): siRNA sense strand
cagcauuggcagaggagcu

SEQ ID NO: 2295224 - RNA, 19 nt, Homo sapiens
  misc_RNA (1)...(19): siRNA sense strand
uggcuauggauuuggguca

SEQ ID NO: 2295225 - RNA, 19 nt, Homo sapiens
  misc_RNA (1)...(19): siRNA sense strand
acuugaaucagaagaugaa

SEQ ID NO: 2295226 - RNA, 19 nt, Homo sapiens
  misc_RNA (1)...(19): siRNA sense strand
gguagaggguauaacagca

SEQ ID NO: 2295227 - RNA, 19 nt, Homo sapiens
  misc_RNA (1)...(19): siRNA sense strand
gauuugggucagauagauu

SEQ ID NO: 2295228 - RNA, 19 nt, Homo sapiens
  misc_RNA (1)...(19): siRNA sense strand
gucaaaagacaaagcaaau

SEQ ID NO: 2295229 - RNA, 19 nt, Homo sapiens
  misc_RNA (1)...(19): siRNA sense strand
cagagaaggcagaccaagu

SEQ ID NO: 2295230 - RNA, 19 nt, Homo sapiens
  misc_RNA (1)...(19): siRNA sense strand
caguuugcuucacaggaaa

SEQ ID NO: 2295231 - RNA, 19 nt, Homo sapiens
  misc_RNA (1)...(19): siRNA sense strand
ggguauaacagcauuggca

SEQ ID NO: 2295232 - RNA, 19 nt, Homo sapiens
  misc_RNA (1)...(19): siRNA sense strand
cgaacacagauauguagaa

SEQ ID NO: 2295233 - RNA, 19 nt, Homo sapiens
  misc_RNA (1)...(19): siRNA sense strand
aguaacuggugaagcagau

SEQ ID NO: 2295234 - RNA, 19 nt, Homo sapiens
  misc_RNA (1)...(19): siRNA sense strand
ccaaaugaugggaggcaug

SEQ ID NO: 2295235 - RNA, 19 nt, Homo sapiens
  misc_RNA (1)...(19): siRNA sense strand
guugaaauggauugggugu

SEQ ID NO: 2295236 - RNA, 19 nt, Homo sapiens
  misc_RNA (1)...(19): siRNA sense strand
cuuuggauguagcaaggaa

SEQ ID NO: 2295237 - RNA, 19 nt, Homo sapiens
  misc_RNA (1)...(19): siRNA sense strand
gugccaaaugggauaacau

SEQ ID NO: 2295238 - RNA, 19 nt, Homo sapiens
  misc_RNA (1)...(19): siRNA sense strand
ucuaaagaaacacaaggaa

SEQ ID NO: 2295239 - RNA, 19 nt, Homo sapiens
  misc_RNA (1)...(19): siRNA sense strand
uuggaagagaccucaauua

SEQ ID NO: 2295240 - RNA, 19 nt, Homo sapiens
  misc_RNA (1)...(19): siRNA sense strand
ggauaacauugccggugga

SEQ ID NO: 2295241 - RNA, 19 nt, Homo sapiens
  misc_RNA (1)...(19): siRNA sense strand
cuauggaggcuaugaugau

SEQ ID NO: 2295242 - RNA, 19 nt, Homo sapiens
  misc_RNA (1)...(19): siRNA sense strand
gucagauagauuuggaaga

SEQ ID NO: 2295243 - RNA, 19 nt, Homo sapiens
  misc_RNA (1)...(19): siRNA sense strand
cagauagauuuggaagaga

SEQ ID NO: 2295244 - RNA, 19 nt, Homo sapiens
  misc_RNA (1)...(19): siRNA sense strand
cagagcagcaugaguggau

SEQ ID NO: 2295245 - RNA, 19 nt, Homo sapiens
  misc_RNA (1)...(19): siRNA sense strand
cggcagcagaggagaaaga

SEQ ID NO: 2295246 - RNA, 19 nt, Homo sapiens
  misc_RNA (1)...(19): siRNA sense strand
acaggagaaugaaggaaaa

SEQ ID NO: 2295247 - RNA, 19 nt, Homo sapiens
  misc_RNA (1)...(19): siRNA sense strand
cuacauuaacaaagagaag

SEQ ID NO: 2295248 - RNA, 19 nt, Homo sapiens
  misc_RNA (1)...(19): siRNA sense strand
cggccaacgucuaccacca

SEQ ID NO: 2295249 - RNA, 19 nt, Homo sapiens
  misc_RNA (1)...(19): siRNA sense strand
uggaaaugacagugaagca

SEQ ID NO: 2295250 - RNA, 19 nt, Homo sapiens
  misc_RNA (1)...(19): siRNA sense strand
agaaagucaucaaagccua

SEQ ID NO: 2295251 - RNA, 19 nt, Homo sapiens
  misc_RNA (1)...(19): siRNA sense strand
ggagaaaagacgaagagca

SEQ ID NO: 2295252 - RNA, 19 nt, Homo sapiens
  misc_RNA (1)...(19): siRNA sense strand
agaucaaugccaugaccua

SEQ ID NO: 2295253 - RNA, 19 nt, Homo sapiens
  misc_RNA (1)...(19): siRNA sense strand
aggcuggagaggcggcuaa

SEQ ID NO: 2295254 - RNA, 19 nt, Homo sapiens
  misc_RNA (1)...(19): siRNA sense strand
cagugaagcaccuccggaa

SEQ ID NO: 2295255 - RNA, 19 nt, Homo sapiens
  misc_RNA (1)...(19): siRNA sense strand
uggucaagccagagagaga

SEQ ID NO: 2295256 - RNA, 19 nt, Homo sapiens
  misc_RNA (1)...(19): siRNA sense strand
ccaaggaggugcugcccaa

SEQ ID NO: 2295257 - RNA, 19 nt, Homo sapiens
  misc_RNA (1)...(19): siRNA sense strand
cgacaguggcucagcacau

SEQ ID NO: 2295258 - RNA, 19 nt, Homo sapiens
  misc_RNA (1)...(19): siRNA sense strand
acuccaagcuccuggccau

SEQ ID NO: 2295259 - RNA, 19 nt, Homo sapiens
  misc_RNA (1)...(19): siRNA sense strand
ucaccaagcugcugacgga

SEQ ID NO: 2295260 - RNA, 19 nt, Homo sapiens
  misc_RNA (1)...(19): siRNA sense strand
cauguauggcuuccggaaa

SEQ ID NO: 2295261 - RNA, 19 nt, Homo sapiens
  misc_RNA (1)...(19): siRNA sense strand
cggacgugcagcugaugaa

SEQ ID NO: 2295262 - RNA, 19 nt, Homo sapiens
  misc_RNA (1)...(19): siRNA sense strand
gcugaacgacaguggcuca

SEQ ID NO: 2295263 - RNA, 19 nt, Homo sapiens
  misc_RNA (1)...(19): siRNA sense strand
caaucaacuggcagagaaa

SEQ ID NO: 2295264 - RNA, 19 nt, Homo sapiens
  misc_RNA (1)...(19): siRNA sense strand
ccuacaaaggggagaauaa

SEQ ID NO: 2295265 - RNA, 19 nt, Homo sapiens
  misc_RNA (1)...(19): siRNA sense strand
gggccaugacaaaggacaa

SEQ ID NO: 2295266 - RNA, 19 nt, Homo sapiens
  misc_RNA (1)...(19): siRNA sense strand
cgggaugccaagauggaua

SEQ ID NO: 2295267 - RNA, 19 nt, Homo sapiens
  misc_RNA (1)...(19): siRNA sense strand
aggaggagauugagcgcau

SEQ ID NO: 2295268 - RNA, 19 nt, Homo sapiens
  misc_RNA (1)...(19): siRNA sense strand
uugacuaaguugaaggaga

SEQ ID NO: 2295269 - RNA, 19 nt, Homo sapiens
  misc_RNA (1)...(19): siRNA sense strand
guucaagaggaaacacaaa

SEQ ID NO: 2295270 - RNA, 19 nt, Homo sapiens
  misc_RNA (1)...(19): siRNA sense strand
agauaaaggaggucaagga

SEQ ID NO: 2295271 - RNA, 19 nt, Homo sapiens
  misc_RNA (1)...(19): siRNA sense strand
gaugagguccagagggaga

SEQ ID NO: 2295272 - RNA, 19 nt, Homo sapiens
  misc_RNA (1)...(19): siRNA sense strand
aagaugagguccagaggga

SEQ ID NO: 2295273 - RNA, 19 nt, Homo sapiens
  misc_RNA (1)...(19): siRNA sense strand
acggcaagguggagaucau

SEQ ID NO: 2295274 - RNA, 19 nt, Homo sapiens
  misc_RNA (1)...(19): siRNA sense strand
gggacaagucugagaaggu

SEQ ID NO: 2295275 - RNA, 19 nt, Homo sapiens
  misc_RNA (1)...(19): siRNA sense strand
ccacaauugaagaaguaga

SEQ ID NO: 2295276 - RNA, 19 nt, Homo sapiens
  misc_RNA (1)...(19): siRNA sense strand
ucgccaacgaccagggcaa

SEQ ID NO: 2295277 - RNA, 19 nt, Homo sapiens
  misc_RNA (1)...(19): siRNA sense strand
cgucugaucggcaggaaau

SEQ ID NO: 2295278 - RNA, 19 nt, Homo sapiens
  misc_RNA (1)...(19): siRNA sense strand
ugagcaaggaggagauuga

SEQ ID NO: 2295279 - RNA, 19 nt, Homo sapiens
  misc_RNA (1)...(19): siRNA sense strand
ugaucuggguggaggcaca

SEQ ID NO: 2295280 - RNA, 19 nt, Homo sapiens
  misc_RNA (1)...(19): siRNA sense strand
uuucguggcuggaggucaa

SEQ ID NO: 2295281 - RNA, 19 nt, Homo sapiens
  misc_RNA (1)...(19): siRNA sense strand
ccuuagaauccuaugcuuu

SEQ ID NO: 2295282 - RNA, 19 nt, Homo sapiens
  misc_RNA (1)...(19): siRNA sense strand
gccaagauggauaaggcua

SEQ ID NO: 2295283 - RNA, 19 nt, Homo sapiens
  misc_RNA (1)...(19): siRNA sense strand
gauaugaaacuuuggccuu

SEQ ID NO: 2295284 - RNA, 19 nt, Homo sapiens
  misc_RNA (1)...(19): siRNA sense strand
gaguuugaucauaagagaa

SEQ ID NO: 2295285 - RNA, 19 nt, Homo sapiens
  misc_RNA (1)...(19): siRNA sense strand
uggcagagaaagaugaguu

SEQ ID NO: 2295286 - RNA, 19 nt, Homo sapiens
  misc_RNA (1)...(19): siRNA sense strand
gauuaaugaaggaggcaag

SEQ ID NO: 2295287 - RNA, 19 nt, Homo sapiens
  misc_RNA (1)...(19): siRNA sense strand
ugacuaaguugaaggagac

SEQ ID NO: 2295288 - RNA, 19 nt, Homo sapiens
  misc_RNA (1)...(19): siRNA sense strand
ggauaaaugcaacgagcuc

SEQ ID NO: 2295289 - RNA, 19 nt, Homo sapiens
  misc_RNA (1)...(19): siRNA sense strand
cgguuugaccugacuggaa

SEQ ID NO: 2295290 - RNA, 19 nt, Homo sapiens
  misc_RNA (1)...(19): siRNA sense strand
ugguauugacuaaguugaa

SEQ ID NO: 2295291 - RNA, 19 nt, Homo sapiens
  misc_RNA (1)...(19): siRNA sense strand
gggaaucgccauaggcauc

SEQ ID NO: 2295292 - RNA, 19 nt, Homo sapiens
  misc_RNA (1)...(19): siRNA sense strand
ggcuaaaauccaugacauu

SEQ ID NO: 2295293 - RNA, 19 nt, Homo sapiens
  misc_RNA (1)...(19): siRNA sense strand
gaauaaagcuuucuacccu

SEQ ID NO: 2295294 - RNA, 19 nt, Homo sapiens
  misc_RNA (1)...(19): siRNA sense strand
ccaugacaaaggacaacaa

SEQ ID NO: 2295295 - RNA, 19 nt, Homo sapiens
  misc_RNA (1)...(19): siRNA sense strand
ugacaaaggacaacaaccu

SEQ ID NO: 2295296 - RNA, 19 nt, Homo sapiens
  misc_RNA (1)...(19): siRNA sense strand
gccaagaaccagguagcaa

SEQ ID NO: 2295297 - RNA, 19 nt, Homo sapiens
  misc_RNA (1)...(19): siRNA sense strand
auaaaggaggucaaggaga

SEQ ID NO: 2295298 - RNA, 19 nt, Homo sapiens
  misc_RNA (1)...(19): siRNA sense strand
ggcgagagggccaugacaa

SEQ ID NO: 2295299 - RNA, 19 nt, Homo sapiens
  misc_RNA (1)...(19): siRNA sense strand
ggacaagagcaccggcaag

SEQ ID NO: 2295300 - RNA, 19 nt, Homo sapiens
  misc_RNA (1)...(19): siRNA sense strand
gcugagaaauauaaagcug

SEQ ID NO: 2295301 - RNA, 19 nt, Homo sapiens
  misc_RNA (1)...(19): siRNA sense strand
aagcugaagaugaggucca

SEQ ID NO: 2295302 - RNA, 19 nt, Homo sapiens
  misc_RNA (1)...(19): siRNA sense strand
agguggagaucaucgccaa

SEQ ID NO: 2295303 - RNA, 19 nt, Homo sapiens
  misc_RNA (1)...(19): siRNA sense strand
ugaucauaagagaaaggaa

SEQ ID NO: 2295304 - RNA, 19 nt, Homo sapiens
  misc_RNA (1)...(19): siRNA sense strand
aggacaucagccagaacaa

SEQ ID NO: 2295305 - RNA, 19 nt, Homo sapiens
  misc_RNA (1)...(19): siRNA sense strand
cuggaugcugagaaauaua

SEQ ID NO: 2295306 - RNA, 19 nt, Homo sapiens
  misc_RNA (1)...(19): siRNA sense strand
ugguauuggcccagaaauu

SEQ ID NO: 2295307 - RNA, 19 nt, Homo sapiens
  misc_RNA (1)...(19): siRNA sense strand
gagagaacacagaaggaga

SEQ ID NO: 2295308 - RNA, 19 nt, Homo sapiens
  misc_RNA (1)...(19): siRNA sense strand
aggagaauacaguggaauu

SEQ ID NO: 2295309 - RNA, 19 nt, Homo sapiens
  misc_RNA (1)...(19): siRNA sense strand
ugaauuuacugcugcgcaa

SEQ ID NO: 2295310 - RNA, 19 nt, Homo sapiens
  misc_RNA (1)...(19): siRNA sense strand
aguccauggauaagaacaa

SEQ ID NO: 2295311 - RNA, 19 nt, Homo sapiens
  misc_RNA (1)...(19): siRNA sense strand
cagacuucacagaggaaau

SEQ ID NO: 2295312 - RNA, 19 nt, Homo sapiens
  misc_RNA (1)...(19): siRNA sense strand
gguacaagauccuucccaa

SEQ ID NO: 2295313 - RNA, 19 nt, Homo sapiens
  misc_RNA (1)...(19): siRNA sense strand
auacaguggaauugagcau

SEQ ID NO: 2295314 - RNA, 19 nt, Homo sapiens
  misc_RNA (1)...(19): siRNA sense strand
ugccaaauuuguauggaga

SEQ ID NO: 2295315 - RNA, 19 nt, Homo sapiens
  misc_RNA (1)...(19): siRNA sense strand
auggagucgugcagaguau

SEQ ID NO: 2295316 - RNA, 19 nt, Homo sapiens
  misc_RNA (1)...(19): siRNA sense strand
gauaagaacaagaugggcu

SEQ ID NO: 2295317 - RNA, 19 nt, Homo sapiens
  misc_RNA (1)...(19): siRNA sense strand
caggcaaggacauggcgaa

SEQ ID NO: 2295318 - RNA, 19 nt, Homo sapiens
  misc_RNA (1)...(19): siRNA sense strand
cauuugaccuuuacgcgaa

SEQ ID NO: 2295319 - RNA, 19 nt, Homo sapiens
  misc_RNA (1)...(19): siRNA sense strand
gugcagaguaucaagcuca

SEQ ID NO: 2295320 - RNA, 19 nt, Homo sapiens
  misc_RNA (1)...(19): siRNA sense strand
aggagaugguauuggccca

SEQ ID NO: 2295321 - RNA, 19 nt, Homo sapiens
  misc_RNA (1)...(19): siRNA sense strand
cauucaaggaccuggagga

SEQ ID NO: 2295322 - RNA, 19 nt, Homo sapiens
  misc_RNA (1)...(19): siRNA sense strand
ccuggaggaaaguggauga

SEQ ID NO: 2295323 - RNA, 19 nt, Homo sapiens
  misc_RNA (1)...(19): siRNA sense strand
gcggaugucagaugggcuu

SEQ ID NO: 2295324 - RNA, 19 nt, Homo sapiens
  misc_RNA (1)...(19): siRNA sense strand
auaagaacaagaugggcuu

SEQ ID NO: 2295325 - RNA, 19 nt, Homo sapiens
  misc_RNA (1)...(19): siRNA sense strand
guaucaagcucaucaccga

SEQ ID NO: 2295326 - RNA, 19 nt, Homo sapiens
  misc_RNA (1)...(19): siRNA sense strand
aggcaaggacauggcgaau

SEQ ID NO: 2295327 - RNA, 19 nt, Homo sapiens
  misc_RNA (1)...(19): siRNA sense strand
gcucagacuucacagagga

SEQ ID NO: 2295328 - RNA, 19 nt, Homo sapiens
  misc_RNA (1)...(19): siRNA sense strand
gggccaggaaccagacaga

SEQ ID NO: 2295329 - RNA, 19 nt, Homo sapiens
  misc_RNA (1)...(19): siRNA sense strand
cgccauauccggaugcaga

SEQ ID NO: 2295330 - RNA, 19 nt, Homo sapiens
  misc_RNA (1)...(19): siRNA sense strand
gggccaggaaccagacaga

SEQ ID NO: 2295331 - RNA, 19 nt, Homo sapiens
  misc_RNA (1)...(19): siRNA sense strand
cgccauauccggaugcaga

SEQ ID NO: 2295332 - RNA, 19 nt, Homo sapiens
  misc_RNA (1)...(19): siRNA sense strand
agucaagggcacagagaga

SEQ ID NO: 2295333 - RNA, 19 nt, Homo sapiens
  misc_RNA (1)...(19): siRNA sense strand
gaacauauauuucuggaga

SEQ ID NO: 2295334 - RNA, 19 nt, Homo sapiens
  misc_RNA (1)...(19): siRNA sense strand
gaggagacuuccaaggaga

SEQ ID NO: 2295335 - RNA, 19 nt, Homo sapiens
  misc_RNA (1)...(19): siRNA sense strand
ggaauguggaauuugcuaa

SEQ ID NO: 2295336 - RNA, 19 nt, Homo sapiens
  misc_RNA (1)...(19): siRNA sense strand
aguaaauguacgaacaaca

SEQ ID NO: 2295337 - RNA, 19 nt, Homo sapiens
  misc_RNA (1)...(19): siRNA sense strand
gaggaagagucaagggcac

SEQ ID NO: 2295338 - RNA, 19 nt, Homo sapiens
  misc_RNA (1)...(19): siRNA sense strand
acagagagaugcaaagcga

SEQ ID NO: 2295339 - RNA, 19 nt, Homo sapiens
  misc_RNA (1)...(19): siRNA sense strand
cuucgaagagcuacagaau

SEQ ID NO: 2295340 - RNA, 19 nt, Homo sapiens
  misc_RNA (1)...(19): siRNA sense strand
gugaaaaggaaaauacgaa

SEQ ID NO: 2295341 - RNA, 19 nt, Homo sapiens
  misc_RNA (1)...(19): siRNA sense strand
acaugauggcaguuacuaa

SEQ ID NO: 2295342 - RNA, 19 nt, Homo sapiens
  misc_RNA (1)...(19): siRNA sense strand
cccauaucuuaguguuaaa

SEQ ID NO: 2295343 - RNA, 19 nt, Homo sapiens
  misc_RNA (1)...(19): siRNA sense strand
cuuaaaaguuuggaagcua

SEQ ID NO: 2295344 - RNA, 19 nt, Homo sapiens
  misc_RNA (1)...(19): siRNA sense strand
cauuauuaagggcaugaaa

SEQ ID NO: 2295345 - RNA, 19 nt, Homo sapiens
  misc_RNA (1)...(19): siRNA sense strand
ggacaaaagaggggaaacu

SEQ ID NO: 2295346 - RNA, 19 nt, Homo sapiens
  misc_RNA (1)...(19): siRNA sense strand
agauaugaaaguugccaga

SEQ ID NO: 2295347 - RNA, 19 nt, Homo sapiens
  misc_RNA (1)...(19): siRNA sense strand
gcuggugacuuguggccuu

SEQ ID NO: 2295348 - RNA, 19 nt, Homo sapiens
  misc_RNA (1)...(19): siRNA sense strand
acaguaaauguacgaacaa

SEQ ID NO: 2295349 - RNA, 19 nt, Homo sapiens
  misc_RNA (1)...(19): siRNA sense strand
gcagcaugaggaagaguca

SEQ ID NO: 2295350 - RNA, 19 nt, Homo sapiens
  misc_RNA (1)...(19): siRNA sense strand
gcaagaaagauaagcaguc

SEQ ID NO: 2295351 - RNA, 19 nt, Homo sapiens
  misc_RNA (1)...(19): siRNA sense strand
gaaaguugaauuaagcaca

SEQ ID NO: 2295352 - RNA, 19 nt, Homo sapiens
  misc_RNA (1)...(19): siRNA sense strand
agcuagaguucguucaaga

SEQ ID NO: 2295353 - RNA, 19 nt, Homo sapiens
  misc_RNA (1)...(19): siRNA sense strand
gcuccagcagcaugaggaa

SEQ ID NO: 2295354 - RNA, 19 nt, Homo sapiens
  misc_RNA (1)...(19): siRNA sense strand
agccacaguaaaugaacaa

SEQ ID NO: 2295355 - RNA, 19 nt, Homo sapiens
  misc_RNA (1)...(19): siRNA sense strand
uggaauaguuggaggaaaa

SEQ ID NO: 2295356 - RNA, 19 nt, Homo sapiens
  misc_RNA (1)...(19): siRNA sense strand
gggaaugaccagugagcaa

SEQ ID NO: 2295357 - RNA, 19 nt, Homo sapiens
  misc_RNA (1)...(19): siRNA sense strand
gcauauuuguggugggaau

SEQ ID NO: 2295358 - RNA, 19 nt, Homo sapiens
  misc_RNA (1)...(19): siRNA sense strand
auguugagcuugugagaaa

SEQ ID NO: 2295359 - RNA, 19 nt, Homo sapiens
  misc_RNA (1)...(19): siRNA sense strand
agaagaaggcgaaggagaa

SEQ ID NO: 2295360 - RNA, 19 nt, Homo sapiens
  misc_RNA (1)...(19): siRNA sense strand
gagaagaaggcgaaggaga

SEQ ID NO: 2295361 - RNA, 19 nt, Homo sapiens
  misc_RNA (1)...(19): siRNA sense strand
cugaaauccagaugggaaa

SEQ ID NO: 2295362 - RNA, 19 nt, Homo sapiens
  misc_RNA (1)...(19): siRNA sense strand
ggaucaaagauuaaaggaa

SEQ ID NO: 2295363 - RNA, 19 nt, Homo sapiens
  misc_RNA (1)...(19): siRNA sense strand
aaaugaaauugcaggagaa

SEQ ID NO: 2295364 - RNA, 19 nt, Homo sapiens
  misc_RNA (1)...(19): siRNA sense strand
augcugaguuacagaaaua

SEQ ID NO: 2295365 - RNA, 19 nt, Homo sapiens
  misc_RNA (1)...(19): siRNA sense strand
ccaugauguuguugaagua

SEQ ID NO: 2295366 - RNA, 19 nt, Homo sapiens
  misc_RNA (1)...(19): siRNA sense strand
uggacuagguuuuggaaua

SEQ ID NO: 2295367 - RNA, 19 nt, Homo sapiens
  misc_RNA (1)...(19): siRNA sense strand
gcugaaauccagaugggaa

SEQ ID NO: 2295368 - RNA, 19 nt, Homo sapiens
  misc_RNA (1)...(19): siRNA sense strand
ugucaauacugaagaagau

SEQ ID NO: 2295369 - RNA, 19 nt, Homo sapiens
  misc_RNA (1)...(19): siRNA sense strand
cuucaguucacaagagaua

SEQ ID NO: 2295370 - RNA, 19 nt, Homo sapiens
  misc_RNA (1)...(19): siRNA sense strand
gugaguuaccugagagaga

SEQ ID NO: 2295371 - RNA, 19 nt, Homo sapiens
  misc_RNA (1)...(19): siRNA sense strand
cagcauugugggaggaaaa

SEQ ID NO: 2295372 - RNA, 19 nt, Homo sapiens
  misc_RNA (1)...(19): siRNA sense strand
ucuaaggaacugugggaau

SEQ ID NO: 2295373 - RNA, 19 nt, Homo sapiens
  misc_RNA (1)...(19): siRNA sense strand
cugaaaaugugaugaaaga

SEQ ID NO: 2295374 - RNA, 19 nt, Homo sapiens
  misc_RNA (1)...(19): siRNA sense strand
gcgaagcaguugaggccau

SEQ ID NO: 2295375 - RNA, 19 nt, Homo sapiens
  misc_RNA (1)...(19): siRNA sense strand
ccggcaaauugaauauaua

SEQ ID NO: 2295376 - RNA, 19 nt, Homo sapiens
  misc_RNA (1)...(19): siRNA sense strand
accuauuaguagugaggaa

SEQ ID NO: 2295377 - RNA, 19 nt, Homo sapiens
  misc_RNA (1)...(19): siRNA sense strand
gggccauguugaagagguu

SEQ ID NO: 2295378 - RNA, 19 nt, Homo sapiens
  misc_RNA (1)...(19): siRNA sense strand
uugaagagguugagcucau

SEQ ID NO: 2295379 - RNA, 19 nt, Homo sapiens
  misc_RNA (1)...(19): siRNA sense strand
aaacuaauguggaugguga

SEQ ID NO: 2295380 - RNA, 19 nt, Homo sapiens
  misc_RNA (1)...(19): siRNA sense strand
gcaggaaauggaugaagaa

SEQ ID NO: 2295381 - RNA, 19 nt, Homo sapiens
  misc_RNA (1)...(19): siRNA sense strand
agaauggagaggagcuuaa

SEQ ID NO: 2295382 - RNA, 19 nt, Homo sapiens
  misc_RNA (1)...(19): siRNA sense strand
cuguggaucugcagaagaa

SEQ ID NO: 2295383 - RNA, 19 nt, Homo sapiens
  misc_RNA (1)...(19): siRNA sense strand
cgagaauuguugagauuuu

SEQ ID NO: 2295384 - RNA, 19 nt, Homo sapiens
  misc_RNA (1)...(19): siRNA sense strand
agaggagcuuaaagguaua

SEQ ID NO: 2295385 - RNA, 19 nt, Homo sapiens
  misc_RNA (1)...(19): siRNA sense strand
cagaaugagaaguuaucua

SEQ ID NO: 2295386 - RNA, 19 nt, Homo sapiens
  misc_RNA (1)...(19): siRNA sense strand
ggauggugaagaugaggaa

SEQ ID NO: 2295387 - RNA, 19 nt, Homo sapiens
  misc_RNA (1)...(19): siRNA sense strand
uugcugaagcuguggaaau

SEQ ID NO: 2295388 - RNA, 19 nt, Homo sapiens
  misc_RNA (1)...(19): siRNA sense strand
auggaugaagaaagagaaa

SEQ ID NO: 2295389 - RNA, 19 nt, Homo sapiens
  misc_RNA (1)...(19): siRNA sense strand
accgagaauuguugagauu

SEQ ID NO: 2295390 - RNA, 19 nt, Homo sapiens
  misc_RNA (1)...(19): siRNA sense strand
cacugauacaugugaguua

SEQ ID NO: 2295391 - RNA, 19 nt, Homo sapiens
  misc_RNA (1)...(19): siRNA sense strand
gguacuugaucgccugaaa

SEQ ID NO: 2295392 - RNA, 19 nt, Homo sapiens
  misc_RNA (1)...(19): siRNA sense strand
ugaaggaaacagucaacaa

SEQ ID NO: 2295393 - RNA, 19 nt, Homo sapiens
  misc_RNA (1)...(19): siRNA sense strand
ugagagagaagaaggcgaa

SEQ ID NO: 2295394 - RNA, 19 nt, Homo sapiens
  misc_RNA (1)...(19): siRNA sense strand
ucaagcaacugaaggguca

SEQ ID NO: 2295395 - RNA, 19 nt, Homo sapiens
  misc_RNA (1)...(19): siRNA sense strand
cuugaagauugguggcaca

SEQ ID NO: 2295396 - RNA, 19 nt, Homo sapiens
  misc_RNA (1)...(19): siRNA sense strand
gcucguugcuagagaucca

SEQ ID NO: 2295397 - RNA, 19 nt, Homo sapiens
  misc_RNA (1)...(19): siRNA sense strand
aggaaagguuuguuagugu

SEQ ID NO: 2295398 - RNA, 19 nt, Homo sapiens
  misc_RNA (1)...(19): siRNA sense strand
aagucaaaaucucggaaaa

SEQ ID NO: 2295399 - RNA, 19 nt, Homo sapiens
  misc_RNA (1)...(19): siRNA sense strand
aggggaagcuucagggauu

SEQ ID NO: 2295400 - RNA, 19 nt, Homo sapiens
  misc_RNA (1)...(19): siRNA sense strand
ugcagaugaugcugaguua

SEQ ID NO: 2295401 - RNA, 19 nt, Homo sapiens
  misc_RNA (1)...(19): siRNA sense strand
ccauauacccucagauugu

SEQ ID NO: 2295402 - RNA, 19 nt, Homo sapiens
  misc_RNA (1)...(19): siRNA sense strand
agauccagcuggugacauu

SEQ ID NO: 2295403 - RNA, 19 nt, Homo sapiens
  misc_RNA (1)...(19): siRNA sense strand
gauuuagagaugaaccaua

SEQ ID NO: 2295404 - RNA, 19 nt, Homo sapiens
  misc_RNA (1)...(19): siRNA sense strand
caucaaaggucaagcuggu

SEQ ID NO: 2295405 - RNA, 19 nt, Homo sapiens
  misc_RNA (1)...(19): siRNA sense strand
ugggcagagucuuggaauu

SEQ ID NO: 2295406 - RNA, 19 nt, Homo sapiens
  misc_RNA (1)...(19): siRNA sense strand
auggugaagaugaggaaau

SEQ ID NO: 2295407 - RNA, 19 nt, Homo sapiens
  misc_RNA (1)...(19): siRNA sense strand
ucgaagcacccaagggauu

SEQ ID NO: 2295408 - RNA, 19 nt, Homo sapiens
  misc_RNA (1)...(19): siRNA sense strand
aggcgaaggagaagaaacu

SEQ ID NO: 2295409 - RNA, 19 nt, Homo sapiens
  misc_RNA (1)...(19): siRNA sense strand
caagggacguucagggcuu

SEQ ID NO: 2295410 - RNA, 19 nt, Homo sapiens
  misc_RNA (1)...(19): siRNA sense strand
gaucaguauuguuggugga

SEQ ID NO: 2295411 - RNA, 19 nt, Homo sapiens
  misc_RNA (1)...(19): siRNA sense strand
cuuauaaagcucugacuga

SEQ ID NO: 2295412 - RNA, 19 nt, Homo sapiens
  misc_RNA (1)...(19): siRNA sense strand
agaagaugaugauggggaa

SEQ ID NO: 2295413 - RNA, 19 nt, Homo sapiens
  misc_RNA (1)...(19): siRNA sense strand
guggacaaacuguuauaaa

SEQ ID NO: 2295414 - RNA, 19 nt, Homo sapiens
  misc_RNA (1)...(19): siRNA sense strand
gaaacgaggaugcagucaa

SEQ ID NO: 2295415 - RNA, 19 nt, Homo sapiens
  misc_RNA (1)...(19): siRNA sense strand
ggaagauggcagcgucgaa

SEQ ID NO: 2295416 - RNA, 19 nt, Homo sapiens
  misc_RNA (1)...(19): siRNA sense strand
aggagaacuuggagauuuu

SEQ ID NO: 2295417 - RNA, 19 nt, Homo sapiens
  misc_RNA (1)...(19): siRNA sense strand
cagacagggaucaaagauu

SEQ ID NO: 2295418 - RNA, 19 nt, Homo sapiens
  misc_RNA (1)...(19): siRNA sense strand
ugacaacauacaagccuua

SEQ ID NO: 2295419 - RNA, 19 nt, Homo sapiens
  misc_RNA (1)...(19): siRNA sense strand
guucagaguuugucaucca

SEQ ID NO: 2295420 - RNA, 19 nt, Homo sapiens
  misc_RNA (1)...(19): siRNA sense strand
gauacaacucugccugaaa

SEQ ID NO: 2295421 - RNA, 19 nt, Homo sapiens
  misc_RNA (1)...(19): siRNA sense strand
gaggauuagcagaucgaga

SEQ ID NO: 2295422 - RNA, 19 nt, Homo sapiens
  misc_RNA (1)...(19): siRNA sense strand
uggaauaguuggaggaaaa

SEQ ID NO: 2295423 - RNA, 19 nt, Homo sapiens
  misc_RNA (1)...(19): siRNA sense strand
gggaaugaccagugagcaa

SEQ ID NO: 2295424 - RNA, 19 nt, Homo sapiens
  misc_RNA (1)...(19): siRNA sense strand
gcauauuuguggugggaau

SEQ ID NO: 2295425 - RNA, 19 nt, Homo sapiens
  misc_RNA (1)...(19): siRNA sense strand
auguugagcuugugagaaa

SEQ ID NO: 2295426 - RNA, 19 nt, Homo sapiens
  misc_RNA (1)...(19): siRNA sense strand
agaagaaggcgaaggagaa

SEQ ID NO: 2295427 - RNA, 19 nt, Homo sapiens
  misc_RNA (1)...(19): siRNA sense strand
gagaagaaggcgaaggaga

SEQ ID NO: 2295428 - RNA, 19 nt, Homo sapiens
  misc_RNA (1)...(19): siRNA sense strand
cugaaauccagaugggaaa

SEQ ID NO: 2295429 - RNA, 19 nt, Homo sapiens
  misc_RNA (1)...(19): siRNA sense strand
ggaucaaagauuaaaggaa

SEQ ID NO: 2295430 - RNA, 19 nt, Homo sapiens
  misc_RNA (1)...(19): siRNA sense strand
aaaugaaauugcaggagaa

SEQ ID NO: 2295431 - RNA, 19 nt, Homo sapiens
  misc_RNA (1)...(19): siRNA sense strand
augcugaguuacagaaaua

SEQ ID NO: 2295432 - RNA, 19 nt, Homo sapiens
  misc_RNA (1)...(19): siRNA sense strand
ccaugauguuguugaagua

SEQ ID NO: 2295433 - RNA, 19 nt, Homo sapiens
  misc_RNA (1)...(19): siRNA sense strand
uggacuagguuuuggaaua

SEQ ID NO: 2295434 - RNA, 19 nt, Homo sapiens
  misc_RNA (1)...(19): siRNA sense strand
gcugaaauccagaugggaa

SEQ ID NO: 2295435 - RNA, 19 nt, Homo sapiens
  misc_RNA (1)...(19): siRNA sense strand
ugucaauacugaagaagau

SEQ ID NO: 2295436 - RNA, 19 nt, Homo sapiens
  misc_RNA (1)...(19): siRNA sense strand
cuucaguucacaagagaua

SEQ ID NO: 2295437 - RNA, 19 nt, Homo sapiens
  misc_RNA (1)...(19): siRNA sense strand
gugaguuaccugagagaga

SEQ ID NO: 2295438 - RNA, 19 nt, Homo sapiens
  misc_RNA (1)...(19): siRNA sense strand
cagcauugugggaggaaaa

SEQ ID NO: 2295439 - RNA, 19 nt, Homo sapiens
  misc_RNA (1)...(19): siRNA sense strand
ucuaaggaacugugggaau

SEQ ID NO: 2295440 - RNA, 19 nt, Homo sapiens
  misc_RNA (1)...(19): siRNA sense strand
cugaaaaugugaugaaaga

SEQ ID NO: 2295441 - RNA, 19 nt, Homo sapiens
  misc_RNA (1)...(19): siRNA sense strand
gcgaagcaguugaggccau

SEQ ID NO: 2295442 - RNA, 19 nt, Homo sapiens
  misc_RNA (1)...(19): siRNA sense strand
ccggcaaauugaauauaua

SEQ ID NO: 2295443 - RNA, 19 nt, Homo sapiens
  misc_RNA (1)...(19): siRNA sense strand
accuauuaguagugaggaa

SEQ ID NO: 2295444 - RNA, 19 nt, Homo sapiens
  misc_RNA (1)...(19): siRNA sense strand
gggccauguugaagagguu

SEQ ID NO: 2295445 - RNA, 19 nt, Homo sapiens
  misc_RNA (1)...(19): siRNA sense strand
uugaagagguugagcucau

SEQ ID NO: 2295446 - RNA, 19 nt, Homo sapiens
  misc_RNA (1)...(19): siRNA sense strand
aaacuaauguggaugguga

SEQ ID NO: 2295447 - RNA, 19 nt, Homo sapiens
  misc_RNA (1)...(19): siRNA sense strand
gcaggaaauggaugaagaa

SEQ ID NO: 2295448 - RNA, 19 nt, Homo sapiens
  misc_RNA (1)...(19): siRNA sense strand
agaauggagaggagcuuaa

SEQ ID NO: 2295449 - RNA, 19 nt, Homo sapiens
  misc_RNA (1)...(19): siRNA sense strand
cuguggaucugcagaagaa

SEQ ID NO: 2295450 - RNA, 19 nt, Homo sapiens
  misc_RNA (1)...(19): siRNA sense strand
cgagaauuguugagauuuu

SEQ ID NO: 2295451 - RNA, 19 nt, Homo sapiens
  misc_RNA (1)...(19): siRNA sense strand
agaggagcuuaaagguaua

SEQ ID NO: 2295452 - RNA, 19 nt, Homo sapiens
  misc_RNA (1)...(19): siRNA sense strand
cagaaugagaaguuaucua

SEQ ID NO: 2295453 - RNA, 19 nt, Homo sapiens
  misc_RNA (1)...(19): siRNA sense strand
ggauggugaagaugaggaa

SEQ ID NO: 2295454 - RNA, 19 nt, Homo sapiens
  misc_RNA (1)...(19): siRNA sense strand
uugcugaagcuguggaaau

SEQ ID NO: 2295455 - RNA, 19 nt, Homo sapiens
  misc_RNA (1)...(19): siRNA sense strand
auggaugaagaaagagaaa

SEQ ID NO: 2295456 - RNA, 19 nt, Homo sapiens
  misc_RNA (1)...(19): siRNA sense strand
accgagaauuguugagauu

SEQ ID NO: 2295457 - RNA, 19 nt, Homo sapiens
  misc_RNA (1)...(19): siRNA sense strand
cacugauacaugugaguua

SEQ ID NO: 2295458 - RNA, 19 nt, Homo sapiens
  misc_RNA (1)...(19): siRNA sense strand
gguacuugaucgccugaaa

SEQ ID NO: 2295459 - RNA, 19 nt, Homo sapiens
  misc_RNA (1)...(19): siRNA sense strand
ugaaggaaacagucaacaa

SEQ ID NO: 2295460 - RNA, 19 nt, Homo sapiens
  misc_RNA (1)...(19): siRNA sense strand
ugagagagaagaaggcgaa

SEQ ID NO: 2295461 - RNA, 19 nt, Homo sapiens
  misc_RNA (1)...(19): siRNA sense strand
ucaagcaacugaaggguca

SEQ ID NO: 2295462 - RNA, 19 nt, Homo sapiens
  misc_RNA (1)...(19): siRNA sense strand
cuugaagauugguggcaca

SEQ ID NO: 2295463 - RNA, 19 nt, Homo sapiens
  misc_RNA (1)...(19): siRNA sense strand
gcucguugcuagagaucca

SEQ ID NO: 2295464 - RNA, 19 nt, Homo sapiens
  misc_RNA (1)...(19): siRNA sense strand
aggaaagguuuguuagugu

SEQ ID NO: 2295465 - RNA, 19 nt, Homo sapiens
  misc_RNA (1)...(19): siRNA sense strand
aagucaaaaucucggaaaa

SEQ ID NO: 2295466 - RNA, 19 nt, Homo sapiens
  misc_RNA (1)...(19): siRNA sense strand
aggggaagcuucagggauu

SEQ ID NO: 2295467 - RNA, 19 nt, Homo sapiens
  misc_RNA (1)...(19): siRNA sense strand
ugcagaugaugcugaguua

SEQ ID NO: 2295468 - RNA, 19 nt, Homo sapiens
  misc_RNA (1)...(19): siRNA sense strand
ccauauacccucagauugu

SEQ ID NO: 2295469 - RNA, 19 nt, Homo sapiens
  misc_RNA (1)...(19): siRNA sense strand
agauccagcuggugacauu

SEQ ID NO: 2295470 - RNA, 19 nt, Homo sapiens
  misc_RNA (1)...(19): siRNA sense strand
gauuuagagaugaaccaua

SEQ ID NO: 2295471 - RNA, 19 nt, Homo sapiens
  misc_RNA (1)...(19): siRNA sense strand
caucaaaggucaagcuggu

SEQ ID NO: 2295472 - RNA, 19 nt, Homo sapiens
  misc_RNA (1)...(19): siRNA sense strand
ugggcagagucuuggaauu

SEQ ID NO: 2295473 - RNA, 19 nt, Homo sapiens
  misc_RNA (1)...(19): siRNA sense strand
auggugaagaugaggaaau

SEQ ID NO: 2295474 - RNA, 19 nt, Homo sapiens
  misc_RNA (1)...(19): siRNA sense strand
ucgaagcacccaagggauu

SEQ ID NO: 2295475 - RNA, 19 nt, Homo sapiens
  misc_RNA (1)...(19): siRNA sense strand
aggcgaaggagaagaaacu

SEQ ID NO: 2295476 - RNA, 19 nt, Homo sapiens
  misc_RNA (1)...(19): siRNA sense strand
caagggacguucagggcuu

SEQ ID NO: 2295477 - RNA, 19 nt, Homo sapiens
  misc_RNA (1)...(19): siRNA sense strand
gaucaguauuguuggugga

SEQ ID NO: 2295478 - RNA, 19 nt, Homo sapiens
  misc_RNA (1)...(19): siRNA sense strand
cuuauaaagcucugacuga

SEQ ID NO: 2295479 - RNA, 19 nt, Homo sapiens
  misc_RNA (1)...(19): siRNA sense strand
agaagaugaugauggggaa

SEQ ID NO: 2295480 - RNA, 19 nt, Homo sapiens
  misc_RNA (1)...(19): siRNA sense strand
guggacaaacuguuauaaa

SEQ ID NO: 2295481 - RNA, 19 nt, Homo sapiens
  misc_RNA (1)...(19): siRNA sense strand
gaaacgaggaugcagucaa

SEQ ID NO: 2295482 - RNA, 19 nt, Homo sapiens
  misc_RNA (1)...(19): siRNA sense strand
ggaagauggcagcgucgaa

SEQ ID NO: 2295483 - RNA, 19 nt, Homo sapiens
  misc_RNA (1)...(19): siRNA sense strand
aggagaacuuggagauuuu

SEQ ID NO: 2295484 - RNA, 19 nt, Homo sapiens
  misc_RNA (1)...(19): siRNA sense strand
cagacagggaucaaagauu

SEQ ID NO: 2295485 - RNA, 19 nt, Homo sapiens
  misc_RNA (1)...(19): siRNA sense strand
ugacaacauacaagccuua

SEQ ID NO: 2295486 - RNA, 19 nt, Homo sapiens
  misc_RNA (1)...(19): siRNA sense strand
guucagaguuugucaucca

SEQ ID NO: 2295487 - RNA, 19 nt, Homo sapiens
  misc_RNA (1)...(19): siRNA sense strand
gauacaacucugccugaaa

SEQ ID NO: 2295488 - RNA, 19 nt, Homo sapiens
  misc_RNA (1)...(19): siRNA sense strand
gaggauuagcagaucgaga

SEQ ID NO: 2295489 - RNA, 19 nt, Homo sapiens
  misc_RNA (1)...(19): siRNA sense strand
uggaauaguuggaggaaaa

SEQ ID NO: 2295490 - RNA, 19 nt, Homo sapiens
  misc_RNA (1)...(19): siRNA sense strand
gggaaugaccagugagcaa

SEQ ID NO: 2295491 - RNA, 19 nt, Homo sapiens
  misc_RNA (1)...(19): siRNA sense strand
gcauauuuguggugggaau

SEQ ID NO: 2295492 - RNA, 19 nt, Homo sapiens
  misc_RNA (1)...(19): siRNA sense strand
auguugagcuugugagaaa

SEQ ID NO: 2295493 - RNA, 19 nt, Homo sapiens
  misc_RNA (1)...(19): siRNA sense strand
agaagaaggcgaaggagaa

SEQ ID NO: 2295494 - RNA, 19 nt, Homo sapiens
  misc_RNA (1)...(19): siRNA sense strand
gagaagaaggcgaaggaga

SEQ ID NO: 2295495 - RNA, 19 nt, Homo sapiens
  misc_RNA (1)...(19): siRNA sense strand
cugaaauccagaugggaaa

SEQ ID NO: 2295496 - RNA, 19 nt, Homo sapiens
  misc_RNA (1)...(19): siRNA sense strand
ggaucaaagauuaaaggaa

SEQ ID NO: 2295497 - RNA, 19 nt, Homo sapiens
  misc_RNA (1)...(19): siRNA sense strand
aaaugaaauugcaggagaa

SEQ ID NO: 2295498 - RNA, 19 nt, Homo sapiens
  misc_RNA (1)...(19): siRNA sense strand
augcugaguuacagaaaua

SEQ ID NO: 2295499 - RNA, 19 nt, Homo sapiens
  misc_RNA (1)...(19): siRNA sense strand
ccaugauguuguugaagua

SEQ ID NO: 2295500 - RNA, 19 nt, Homo sapiens
  misc_RNA (1)...(19): siRNA sense strand
uggacuagguuuuggaaua

SEQ ID NO: 2295501 - RNA, 19 nt, Homo sapiens
  misc_RNA (1)...(19): siRNA sense strand
gcugaaauccagaugggaa

SEQ ID NO: 2295502 - RNA, 19 nt, Homo sapiens
  misc_RNA (1)...(19): siRNA sense strand
ugucaauacugaagaagau

SEQ ID NO: 2295503 - RNA, 19 nt, Homo sapiens
  misc_RNA (1)...(19): siRNA sense strand
cuucaguucacaagagaua

SEQ ID NO: 2295504 - RNA, 19 nt, Homo sapiens
  misc_RNA (1)...(19): siRNA sense strand
gugaguuaccugagagaga

SEQ ID NO: 2295505 - RNA, 19 nt, Homo sapiens
  misc_RNA (1)...(19): siRNA sense strand
cagcauugugggaggaaaa

SEQ ID NO: 2295506 - RNA, 19 nt, Homo sapiens
  misc_RNA (1)...(19): siRNA sense strand
ucuaaggaacugugggaau

SEQ ID NO: 2295507 - RNA, 19 nt, Homo sapiens
  misc_RNA (1)...(19): siRNA sense strand
cugaaaaugugaugaaaga

SEQ ID NO: 2295508 - RNA, 19 nt, Homo sapiens
  misc_RNA (1)...(19): siRNA sense strand
gcgaagcaguugaggccau

SEQ ID NO: 2295509 - RNA, 19 nt, Homo sapiens
  misc_RNA (1)...(19): siRNA sense strand
ccggcaaauugaauauaua

SEQ ID NO: 2295510 - RNA, 19 nt, Homo sapiens
  misc_RNA (1)...(19): siRNA sense strand
accuauuaguagugaggaa

SEQ ID NO: 2295511 - RNA, 19 nt, Homo sapiens
  misc_RNA (1)...(19): siRNA sense strand
gggccauguugaagagguu

SEQ ID NO: 2295512 - RNA, 19 nt, Homo sapiens
  misc_RNA (1)...(19): siRNA sense strand
uugaagagguugagcucau

SEQ ID NO: 2295513 - RNA, 19 nt, Homo sapiens
  misc_RNA (1)...(19): siRNA sense strand
aaacuaauguggaugguga

SEQ ID NO: 2295514 - RNA, 19 nt, Homo sapiens
  misc_RNA (1)...(19): siRNA sense strand
gcaggaaauggaugaagaa

SEQ ID NO: 2295515 - RNA, 19 nt, Homo sapiens
  misc_RNA (1)...(19): siRNA sense strand
agaauggagaggagcuuaa

SEQ ID NO: 2295516 - RNA, 19 nt, Homo sapiens
  misc_RNA (1)...(19): siRNA sense strand
cuguggaucugcagaagaa

SEQ ID NO: 2295517 - RNA, 19 nt, Homo sapiens
  misc_RNA (1)...(19): siRNA sense strand
cgagaauuguugagauuuu

SEQ ID NO: 2295518 - RNA, 19 nt, Homo sapiens
  misc_RNA (1)...(19): siRNA sense strand
agaggagcuuaaagguaua

SEQ ID NO: 2295519 - RNA, 19 nt, Homo sapiens
  misc_RNA (1)...(19): siRNA sense strand
cagaaugagaaguuaucua

SEQ ID NO: 2295520 - RNA, 19 nt, Homo sapiens
  misc_RNA (1)...(19): siRNA sense strand
ggauggugaagaugaggaa

SEQ ID NO: 2295521 - RNA, 19 nt, Homo sapiens
  misc_RNA (1)...(19): siRNA sense strand
uugcugaagcuguggaaau

SEQ ID NO: 2295522 - RNA, 19 nt, Homo sapiens
  misc_RNA (1)...(19): siRNA sense strand
auggaugaagaaagagaaa

SEQ ID NO: 2295523 - RNA, 19 nt, Homo sapiens
  misc_RNA (1)...(19): siRNA sense strand
accgagaauuguugagauu

SEQ ID NO: 2295524 - RNA, 19 nt, Homo sapiens
  misc_RNA (1)...(19): siRNA sense strand
cacugauacaugugaguua

SEQ ID NO: 2295525 - RNA, 19 nt, Homo sapiens
  misc_RNA (1)...(19): siRNA sense strand
gguacuugaucgccugaaa

SEQ ID NO: 2295526 - RNA, 19 nt, Homo sapiens
  misc_RNA (1)...(19): siRNA sense strand
ugaaggaaacagucaacaa

SEQ ID NO: 2295527 - RNA, 19 nt, Homo sapiens
  misc_RNA (1)...(19): siRNA sense strand
ugagagagaagaaggcgaa

SEQ ID NO: 2295528 - RNA, 19 nt, Homo sapiens
  misc_RNA (1)...(19): siRNA sense strand
ucaagcaacugaaggguca

SEQ ID NO: 2295529 - RNA, 19 nt, Homo sapiens
  misc_RNA (1)...(19): siRNA sense strand
cuugaagauugguggcaca

SEQ ID NO: 2295530 - RNA, 19 nt, Homo sapiens
  misc_RNA (1)...(19): siRNA sense strand
gcucguugcuagagaucca

SEQ ID NO: 2295531 - RNA, 19 nt, Homo sapiens
  misc_RNA (1)...(19): siRNA sense strand
aggaaagguuuguuagugu

SEQ ID NO: 2295532 - RNA, 19 nt, Homo sapiens
  misc_RNA (1)...(19): siRNA sense strand
aagucaaaaucucggaaaa

SEQ ID NO: 2295533 - RNA, 19 nt, Homo sapiens
  misc_RNA (1)...(19): siRNA sense strand
aggggaagcuucagggauu

SEQ ID NO: 2295534 - RNA, 19 nt, Homo sapiens
  misc_RNA (1)...(19): siRNA sense strand
ugcagaugaugcugaguua

SEQ ID NO: 2295535 - RNA, 19 nt, Homo sapiens
  misc_RNA (1)...(19): siRNA sense strand
ccauauacccucagauugu

SEQ ID NO: 2295536 - RNA, 19 nt, Homo sapiens
  misc_RNA (1)...(19): siRNA sense strand
agauccagcuggugacauu

SEQ ID NO: 2295537 - RNA, 19 nt, Homo sapiens
  misc_RNA (1)...(19): siRNA sense strand
gauuuagagaugaaccaua

SEQ ID NO: 2295538 - RNA, 19 nt, Homo sapiens
  misc_RNA (1)...(19): siRNA sense strand
caucaaaggucaagcuggu

SEQ ID NO: 2295539 - RNA, 19 nt, Homo sapiens
  misc_RNA (1)...(19): siRNA sense strand
ugggcagagucuuggaauu

SEQ ID NO: 2295540 - RNA, 19 nt, Homo sapiens
  misc_RNA (1)...(19): siRNA sense strand
auggugaagaugaggaaau

SEQ ID NO: 2295541 - RNA, 19 nt, Homo sapiens
  misc_RNA (1)...(19): siRNA sense strand
ucgaagcacccaagggauu

SEQ ID NO: 2295542 - RNA, 19 nt, Homo sapiens
  misc_RNA (1)...(19): siRNA sense strand
aggcgaaggagaagaaacu

SEQ ID NO: 2295543 - RNA, 19 nt, Homo sapiens
  misc_RNA (1)...(19): siRNA sense strand
caagggacguucagggcuu

SEQ ID NO: 2295544 - RNA, 19 nt, Homo sapiens
  misc_RNA (1)...(19): siRNA sense strand
gaucaguauuguuggugga

SEQ ID NO: 2295545 - RNA, 19 nt, Homo sapiens
  misc_RNA (1)...(19): siRNA sense strand
cuuauaaagcucugacuga

SEQ ID NO: 2295546 - RNA, 19 nt, Homo sapiens
  misc_RNA (1)...(19): siRNA sense strand
agaagaugaugauggggaa

SEQ ID NO: 2295547 - RNA, 19 nt, Homo sapiens
  misc_RNA (1)...(19): siRNA sense strand
guggacaaacuguuauaaa

SEQ ID NO: 2295548 - RNA, 19 nt, Homo sapiens
  misc_RNA (1)...(19): siRNA sense strand
gaaacgaggaugcagucaa

SEQ ID NO: 2295549 - RNA, 19 nt, Homo sapiens
  misc_RNA (1)...(19): siRNA sense strand
ggaagauggcagcgucgaa

SEQ ID NO: 2295550 - RNA, 19 nt, Homo sapiens
  misc_RNA (1)...(19): siRNA sense strand
aggagaacuuggagauuuu

SEQ ID NO: 2295551 - RNA, 19 nt, Homo sapiens
  misc_RNA (1)...(19): siRNA sense strand
cagacagggaucaaagauu

SEQ ID NO: 2295552 - RNA, 19 nt, Homo sapiens
  misc_RNA (1)...(19): siRNA sense strand
ugacaacauacaagccuua

SEQ ID NO: 2295553 - RNA, 19 nt, Homo sapiens
  misc_RNA (1)...(19): siRNA sense strand
guucagaguuugucaucca

SEQ ID NO: 2295554 - RNA, 19 nt, Homo sapiens
  misc_RNA (1)...(19): siRNA sense strand
gauacaacucugccugaaa

SEQ ID NO: 2295555 - RNA, 19 nt, Homo sapiens
  misc_RNA (1)...(19): siRNA sense strand
gaggauuagcagaucgaga

SEQ ID NO: 2295556 - RNA, 19 nt, Homo sapiens
  misc_RNA (1)...(19): siRNA sense strand
uggaauaguuggaggaaaa

SEQ ID NO: 2295557 - RNA, 19 nt, Homo sapiens
  misc_RNA (1)...(19): siRNA sense strand
gggaaugaccagugagcaa

SEQ ID NO: 2295558 - RNA, 19 nt, Homo sapiens
  misc_RNA (1)...(19): siRNA sense strand
gcauauuuguggugggaau

SEQ ID NO: 2295559 - RNA, 19 nt, Homo sapiens
  misc_RNA (1)...(19): siRNA sense strand
auguugagcuugugagaaa

SEQ ID NO: 2295560 - RNA, 19 nt, Homo sapiens
  misc_RNA (1)...(19): siRNA sense strand
agaagaaggcgaaggagaa

SEQ ID NO: 2295561 - RNA, 19 nt, Homo sapiens
  misc_RNA (1)...(19): siRNA sense strand
gagaagaaggcgaaggaga

SEQ ID NO: 2295562 - RNA, 19 nt, Homo sapiens
  misc_RNA (1)...(19): siRNA sense strand
cugaaauccagaugggaaa

SEQ ID NO: 2295563 - RNA, 19 nt, Homo sapiens
  misc_RNA (1)...(19): siRNA sense strand
ggaucaaagauuaaaggaa

SEQ ID NO: 2295564 - RNA, 19 nt, Homo sapiens
  misc_RNA (1)...(19): siRNA sense strand
aaaugaaauugcaggagaa

SEQ ID NO: 2295565 - RNA, 19 nt, Homo sapiens
  misc_RNA (1)...(19): siRNA sense strand
augcugaguuacagaaaua

SEQ ID NO: 2295566 - RNA, 19 nt, Homo sapiens
  misc_RNA (1)...(19): siRNA sense strand
ccaugauguuguugaagua

SEQ ID NO: 2295567 - RNA, 19 nt, Homo sapiens
  misc_RNA (1)...(19): siRNA sense strand
uggacuagguuuuggaaua

SEQ ID NO: 2295568 - RNA, 19 nt, Homo sapiens
  misc_RNA (1)...(19): siRNA sense strand
gcugaaauccagaugggaa

SEQ ID NO: 2295569 - RNA, 19 nt, Homo sapiens
  misc_RNA (1)...(19): siRNA sense strand
ugucaauacugaagaagau

SEQ ID NO: 2295570 - RNA, 19 nt, Homo sapiens
  misc_RNA (1)...(19): siRNA sense strand
cuucaguucacaagagaua

SEQ ID NO: 2295571 - RNA, 19 nt, Homo sapiens
  misc_RNA (1)...(19): siRNA sense strand
gugaguuaccugagagaga

SEQ ID NO: 2295572 - RNA, 19 nt, Homo sapiens
  misc_RNA (1)...(19): siRNA sense strand
cagcauugugggaggaaaa

SEQ ID NO: 2295573 - RNA, 19 nt, Homo sapiens
  misc_RNA (1)...(19): siRNA sense strand
ucuaaggaacugugggaau

SEQ ID NO: 2295574 - RNA, 19 nt, Homo sapiens
  misc_RNA (1)...(19): siRNA sense strand
cugaaaaugugaugaaaga

SEQ ID NO: 2295575 - RNA, 19 nt, Homo sapiens
  misc_RNA (1)...(19): siRNA sense strand
gcgaagcaguugaggccau

SEQ ID NO: 2295576 - RNA, 19 nt, Homo sapiens
  misc_RNA (1)...(19): siRNA sense strand
ccggcaaauugaauauaua

SEQ ID NO: 2295577 - RNA, 19 nt, Homo sapiens
  misc_RNA (1)...(19): siRNA sense strand
accuauuaguagugaggaa

SEQ ID NO: 2295578 - RNA, 19 nt, Homo sapiens
  misc_RNA (1)...(19): siRNA sense strand
gggccauguugaagagguu

SEQ ID NO: 2295579 - RNA, 19 nt, Homo sapiens
  misc_RNA (1)...(19): siRNA sense strand
uugaagagguugagcucau

SEQ ID NO: 2295580 - RNA, 19 nt, Homo sapiens
  misc_RNA (1)...(19): siRNA sense strand
aaacuaauguggaugguga

SEQ ID NO: 2295581 - RNA, 19 nt, Homo sapiens
  misc_RNA (1)...(19): siRNA sense strand
gcaggaaauggaugaagaa

SEQ ID NO: 2295582 - RNA, 19 nt, Homo sapiens
  misc_RNA (1)...(19): siRNA sense strand
agaauggagaggagcuuaa

SEQ ID NO: 2295583 - RNA, 19 nt, Homo sapiens
  misc_RNA (1)...(19): siRNA sense strand
cuguggaucugcagaagaa

SEQ ID NO: 2295584 - RNA, 19 nt, Homo sapiens
  misc_RNA (1)...(19): siRNA sense strand
cgagaauuguugagauuuu

SEQ ID NO: 2295585 - RNA, 19 nt, Homo sapiens
  misc_RNA (1)...(19): siRNA sense strand
agaggagcuuaaagguaua

SEQ ID NO: 2295586 - RNA, 19 nt, Homo sapiens
  misc_RNA (1)...(19): siRNA sense strand
cagaaugagaaguuaucua

SEQ ID NO: 2295587 - RNA, 19 nt, Homo sapiens
  misc_RNA (1)...(19): siRNA sense strand
ggauggugaagaugaggaa

SEQ ID NO: 2295588 - RNA, 19 nt, Homo sapiens
  misc_RNA (1)...(19): siRNA sense strand
uugcugaagcuguggaaau

SEQ ID NO: 2295589 - RNA, 19 nt, Homo sapiens
  misc_RNA (1)...(19): siRNA sense strand
auggaugaagaaagagaaa

SEQ ID NO: 2295590 - RNA, 19 nt, Homo sapiens
  misc_RNA (1)...(19): siRNA sense strand
accgagaauuguugagauu

SEQ ID NO: 2295591 - RNA, 19 nt, Homo sapiens
  misc_RNA (1)...(19): siRNA sense strand
cacugauacaugugaguua

SEQ ID NO: 2295592 - RNA, 19 nt, Homo sapiens
  misc_RNA (1)...(19): siRNA sense strand
gguacuugaucgccugaaa

SEQ ID NO: 2295593 - RNA, 19 nt, Homo sapiens
  misc_RNA (1)...(19): siRNA sense strand
ugaaggaaacagucaacaa

SEQ ID NO: 2295594 - RNA, 19 nt, Homo sapiens
  misc_RNA (1)...(19): siRNA sense strand
ugagagagaagaaggcgaa

SEQ ID NO: 2295595 - RNA, 19 nt, Homo sapiens
  misc_RNA (1)...(19): siRNA sense strand
ucaagcaacugaaggguca

SEQ ID NO: 2295596 - RNA, 19 nt, Homo sapiens
  misc_RNA (1)...(19): siRNA sense strand
cuugaagauugguggcaca

SEQ ID NO: 2295597 - RNA, 19 nt, Homo sapiens
  misc_RNA (1)...(19): siRNA sense strand
gcucguugcuagagaucca

SEQ ID NO: 2295598 - RNA, 19 nt, Homo sapiens
  misc_RNA (1)...(19): siRNA sense strand
aggaaagguuuguuagugu

SEQ ID NO: 2295599 - RNA, 19 nt, Homo sapiens
  misc_RNA (1)...(19): siRNA sense strand
aagucaaaaucucggaaaa

SEQ ID NO: 2295600 - RNA, 19 nt, Homo sapiens
  misc_RNA (1)...(19): siRNA sense strand
aggggaagcuucagggauu

SEQ ID NO: 2295601 - RNA, 19 nt, Homo sapiens
  misc_RNA (1)...(19): siRNA sense strand
ugcagaugaugcugaguua

SEQ ID NO: 2295602 - RNA, 19 nt, Homo sapiens
  misc_RNA (1)...(19): siRNA sense strand
ccauauacccucagauugu

SEQ ID NO: 2295603 - RNA, 19 nt, Homo sapiens
  misc_RNA (1)...(19): siRNA sense strand
agauccagcuggugacauu

SEQ ID NO: 2295604 - RNA, 19 nt, Homo sapiens
  misc_RNA (1)...(19): siRNA sense strand
gauuuagagaugaaccaua

SEQ ID NO: 2295605 - RNA, 19 nt, Homo sapiens
  misc_RNA (1)...(19): siRNA sense strand
caucaaaggucaagcuggu

SEQ ID NO: 2295606 - RNA, 19 nt, Homo sapiens
  misc_RNA (1)...(19): siRNA sense strand
ugggcagagucuuggaauu

SEQ ID NO: 2295607 - RNA, 19 nt, Homo sapiens
  misc_RNA (1)...(19): siRNA sense strand
auggugaagaugaggaaau

SEQ ID NO: 2295608 - RNA, 19 nt, Homo sapiens
  misc_RNA (1)...(19): siRNA sense strand
ucgaagcacccaagggauu

SEQ ID NO: 2295609 - RNA, 19 nt, Homo sapiens
  misc_RNA (1)...(19): siRNA sense strand
aggcgaaggagaagaaacu

SEQ ID NO: 2295610 - RNA, 19 nt, Homo sapiens
  misc_RNA (1)...(19): siRNA sense strand
caagggacguucagggcuu

SEQ ID NO: 2295611 - RNA, 19 nt, Homo sapiens
  misc_RNA (1)...(19): siRNA sense strand
gaucaguauuguuggugga

SEQ ID NO: 2295612 - RNA, 19 nt, Homo sapiens
  misc_RNA (1)...(19): siRNA sense strand
cuuauaaagcucugacuga

SEQ ID NO: 2295613 - RNA, 19 nt, Homo sapiens
  misc_RNA (1)...(19): siRNA sense strand
agaagaugaugauggggaa

SEQ ID NO: 2295614 - RNA, 19 nt, Homo sapiens
  misc_RNA (1)...(19): siRNA sense strand
guggacaaacuguuauaaa

SEQ ID NO: 2295615 - RNA, 19 nt, Homo sapiens
  misc_RNA (1)...(19): siRNA sense strand
gaaacgaggaugcagucaa

SEQ ID NO: 2295616 - RNA, 19 nt, Homo sapiens
  misc_RNA (1)...(19): siRNA sense strand
ggaagauggcagcgucgaa

SEQ ID NO: 2295617 - RNA, 19 nt, Homo sapiens
  misc_RNA (1)...(19): siRNA sense strand
aggagaacuuggagauuuu

SEQ ID NO: 2295618 - RNA, 19 nt, Homo sapiens
  misc_RNA (1)...(19): siRNA sense strand
cagacagggaucaaagauu

SEQ ID NO: 2295619 - RNA, 19 nt, Homo sapiens
  misc_RNA (1)...(19): siRNA sense strand
ugacaacauacaagccuua

SEQ ID NO: 2295620 - RNA, 19 nt, Homo sapiens
  misc_RNA (1)...(19): siRNA sense strand
guucagaguuugucaucca

SEQ ID NO: 2295621 - RNA, 19 nt, Homo sapiens
  misc_RNA (1)...(19): siRNA sense strand
gauacaacucugccugaaa

SEQ ID NO: 2295622 - RNA, 19 nt, Homo sapiens
  misc_RNA (1)...(19): siRNA sense strand
gaggauuagcagaucgaga

SEQ ID NO: 2295623 - RNA, 19 nt, Homo sapiens
  misc_RNA (1)...(19): siRNA sense strand
ccuuggaacuggagagcca

SEQ ID NO: 2295624 - RNA, 19 nt, Homo sapiens
  misc_RNA (1)...(19): siRNA sense strand
ccucauugcuucuggccuu

SEQ ID NO: 2295625 - RNA, 19 nt, Homo sapiens
  misc_RNA (1)...(19): siRNA sense strand
ggaccuugaaagugagagu

SEQ ID NO: 2295626 - RNA, 19 nt, Homo sapiens
  misc_RNA (1)...(19): siRNA sense strand
agggaacaggaaugugaaa

SEQ ID NO: 2295627 - RNA, 19 nt, Homo sapiens
  misc_RNA (1)...(19): siRNA sense strand
ccacauaauaccaaccuca

SEQ ID NO: 2295628 - RNA, 19 nt, Homo sapiens
  misc_RNA (1)...(19): siRNA sense strand
caggaugugcugucgacaa

SEQ ID NO: 2295629 - RNA, 19 nt, Homo sapiens
  misc_RNA (1)...(19): siRNA sense strand
gugcugucgacaagaguuu

SEQ ID NO: 2295630 - RNA, 19 nt, Homo sapiens
  misc_RNA (1)...(19): siRNA sense strand
gggaacaggaaugugaaau

SEQ ID NO: 2295631 - RNA, 19 nt, Homo sapiens
  misc_RNA (1)...(19): siRNA sense strand
uggcaagacuauaaggaaa

SEQ ID NO: 2295632 - RNA, 19 nt, Homo sapiens
  misc_RNA (1)...(19): siRNA sense strand
ugccaaagauuguggaaau

SEQ ID NO: 2295633 - RNA, 19 nt, Homo sapiens
  misc_RNA (1)...(19): siRNA sense strand
gaacagagaaggaggagca

SEQ ID NO: 2295634 - RNA, 19 nt, Homo sapiens
  misc_RNA (1)...(19): siRNA sense strand
agaaggaggagcaaggaaa

SEQ ID NO: 2295635 - RNA, 19 nt, Homo sapiens
  misc_RNA (1)...(19): siRNA sense strand
gccuauaacaccaggacaa

SEQ ID NO: 2295636 - RNA, 19 nt, Homo sapiens
  misc_RNA (1)...(19): siRNA sense strand
cagcaagaaaggaggcauu

SEQ ID NO: 2295637 - RNA, 19 nt, Homo sapiens
  misc_RNA (1)...(19): siRNA sense strand
cagcuauaaccgaggaaau

SEQ ID NO: 2295638 - RNA, 19 nt, Homo sapiens
  misc_RNA (1)...(19): siRNA sense strand
gguuggaauuguacaguau

SEQ ID NO: 2295639 - RNA, 19 nt, Homo sapiens
  misc_RNA (1)...(19): siRNA sense strand
uggaauagacacagcaaga

SEQ ID NO: 2295640 - RNA, 19 nt, Homo sapiens
  misc_RNA (1)...(19): siRNA sense strand
cagcacaauucaugcacaa

SEQ ID NO: 2295641 - RNA, 19 nt, Homo sapiens
  misc_RNA (1)...(19): siRNA sense strand
cagaaguaaaggagaacau

SEQ ID NO: 2295642 - RNA, 19 nt, Homo sapiens
  misc_RNA (1)...(19): siRNA sense strand
gacuauaaggaaagaguau

SEQ ID NO: 2295643 - RNA, 19 nt, Homo sapiens
  misc_RNA (1)...(19): siRNA sense strand
ccuucuacauguuggacaa

SEQ ID NO: 2295644 - RNA, 19 nt, Homo sapiens
  misc_RNA (1)...(19): siRNA sense strand
ccauauggagggaaaggaa

SEQ ID NO: 2295645 - RNA, 19 nt, Homo sapiens
  misc_RNA (1)...(19): siRNA sense strand
cuggaacucaagagagaaa

SEQ ID NO: 2295646 - RNA, 19 nt, Homo sapiens
  misc_RNA (1)...(19): siRNA sense strand
cuacugaggacauuggaaa

SEQ ID NO: 2295647 - RNA, 19 nt, Homo sapiens
  misc_RNA (1)...(19): siRNA sense strand
augcagaaggcuagucaaa

SEQ ID NO: 2295648 - RNA, 19 nt, Homo sapiens
  misc_RNA (1)...(19): siRNA sense strand
gauuguggaaauaaggaaa

SEQ ID NO: 2295649 - RNA, 19 nt, Homo sapiens
  misc_RNA (1)...(19): siRNA sense strand
agaagaggagagaugguaa

SEQ ID NO: 2295650 - RNA, 19 nt, Homo sapiens
  misc_RNA (1)...(19): siRNA sense strand
gcucaguggagaacagauu

SEQ ID NO: 2295651 - RNA, 19 nt, Homo sapiens
  misc_RNA (1)...(19): siRNA sense strand
cauccuaucucauggaaaa

SEQ ID NO: 2295652 - RNA, 19 nt, Homo sapiens
  misc_RNA (1)...(19): siRNA sense strand
gagauguggccguaguuaa

SEQ ID NO: 2295653 - RNA, 19 nt, Homo sapiens
  misc_RNA (1)...(19): siRNA sense strand
ggacauuugcauuacacaa

SEQ ID NO: 2295654 - RNA, 19 nt, Homo sapiens
  misc_RNA (1)...(19): siRNA sense strand
cauccaagacugugaagau

SEQ ID NO: 2295655 - RNA, 19 nt, Homo sapiens
  misc_RNA (1)...(19): siRNA sense strand
agauguggccguaguuaaa

SEQ ID NO: 2295656 - RNA, 19 nt, Homo sapiens
  misc_RNA (1)...(19): siRNA sense strand
cuagauucacuaagacaaa

SEQ ID NO: 2295657 - RNA, 19 nt, Homo sapiens
  misc_RNA (1)...(19): siRNA sense strand
guuaaaacucugggagaaa

SEQ ID NO: 2295658 - RNA, 19 nt, Homo sapiens
  misc_RNA (1)...(19): siRNA sense strand
acaggauggaagauggaaa

SEQ ID NO: 2295659 - RNA, 19 nt, Homo sapiens
  misc_RNA (1)...(19): siRNA sense strand
ccugagaagaggagagaug

SEQ ID NO: 2295660 - RNA, 19 nt, Homo sapiens
  misc_RNA (1)...(19): siRNA sense strand
uuucaggaauugaggcuau

SEQ ID NO: 2295661 - RNA, 19 nt, Homo sapiens
  misc_RNA (1)...(19): siRNA sense strand
ucacauguaaaguuggaua

SEQ ID NO: 2295662 - RNA, 19 nt, Homo sapiens
  misc_RNA (1)...(19): siRNA sense strand
ccaaugucacagaaguaaa

SEQ ID NO: 2295663 - RNA, 19 nt, Homo sapiens
  misc_RNA (1)...(19): siRNA sense strand
cauauggagggaaaggaaa

SEQ ID NO: 2295664 - RNA, 19 nt, Homo sapiens
  misc_RNA (1)...(19): siRNA sense strand
aaggaaacaguaugcauaa

SEQ ID NO: 2295665 - RNA, 19 nt, Homo sapiens
  misc_RNA (1)...(19): siRNA sense strand
ggacauagucauagugcug

SEQ ID NO: 2295666 - RNA, 19 nt, Homo sapiens
  misc_RNA (1)...(19): siRNA sense strand
gagaaggaggagcaaggaa

SEQ ID NO: 2295667 - RNA, 19 nt, Homo sapiens
  misc_RNA (1)...(19): siRNA sense strand
aaggaaagaguaugcacaa

SEQ ID NO: 2295668 - RNA, 19 nt, Homo sapiens
  misc_RNA (1)...(19): siRNA sense strand
ggaauugaggcuauccaaa

SEQ ID NO: 2295669 - RNA, 19 nt, Homo sapiens
  misc_RNA (1)...(19): siRNA sense strand
guacaugggaacagagaag

SEQ ID NO: 2295670 - RNA, 19 nt, Homo sapiens
  misc_RNA (1)...(19): siRNA sense strand
acugccauauggagggaaa

SEQ ID NO: 2295671 - RNA, 19 nt, Homo sapiens
  misc_RNA (1)...(19): siRNA sense strand
ggaagacauguuuggauau

SEQ ID NO: 2295672 - RNA, 19 nt, Homo sapiens
  misc_RNA (1)...(19): siRNA sense strand
aguucaaccucaauaagua

SEQ ID NO: 2295673 - RNA, 19 nt, Homo sapiens
  misc_RNA (1)...(19): siRNA sense strand
cuauaaccgaggaaauuua

SEQ ID NO: 2295674 - RNA, 19 nt, Homo sapiens
  misc_RNA (1)...(19): siRNA sense strand
gccuaugauuggaauggaa

SEQ ID NO: 2295675 - RNA, 19 nt, Homo sapiens
  misc_RNA (1)...(19): siRNA sense strand
ggauuuaaauggugacggu

SEQ ID NO: 2295676 - RNA, 19 nt, Homo sapiens
  misc_RNA (1)...(19): siRNA sense strand
guuaaagugaccaugaauu

SEQ ID NO: 2295677 - RNA, 19 nt, Homo sapiens
  misc_RNA (1)...(19): siRNA sense strand
ggacaguguuacagcuuuu

SEQ ID NO: 2295678 - RNA, 19 nt, Homo sapiens
  misc_RNA (1)...(19): siRNA sense strand
aguauuuacccaugggaca

SEQ ID NO: 2295679 - RNA, 19 nt, Homo sapiens
  misc_RNA (1)...(19): siRNA sense strand
ugagaauaacguuggacuu

SEQ ID NO: 2295680 - RNA, 19 nt, Homo sapiens
  misc_RNA (1)...(19): siRNA sense strand
agacagucccugaaguuau

SEQ ID NO: 2295681 - RNA, 19 nt, Homo sapiens
  misc_RNA (1)...(19): siRNA sense strand
ccggauuguugcuguuaau

SEQ ID NO: 2295682 - RNA, 19 nt, Homo sapiens
  misc_RNA (1)...(19): siRNA sense strand
aauucaugcacaacagaaa

SEQ ID NO: 2295683 - RNA, 19 nt, Homo sapiens
  misc_RNA (1)...(19): siRNA sense strand
gguaagacacugaaauuuu

SEQ ID NO: 2295684 - RNA, 19 nt, Homo sapiens
  misc_RNA (1)...(19): siRNA sense strand
gagggaaaggaaacaguau

SEQ ID NO: 2295685 - RNA, 19 nt, Homo sapiens
  misc_RNA (1)...(19): siRNA sense strand
uguuaaaacucugggagaa

SEQ ID NO: 2295686 - RNA, 19 nt, Homo sapiens
  misc_RNA (1)...(19): siRNA sense strand
gaaaggaaacaguaugcau

SEQ ID NO: 2295687 - RNA, 19 nt, Homo sapiens
  misc_RNA (1)...(19): siRNA sense strand
gaaggaggagcaaggaaaa

SEQ ID NO: 2295688 - RNA, 19 nt, Homo sapiens
  misc_RNA (1)...(19): siRNA sense strand
cugcaauugcugcuguaaa

SEQ ID NO: 2295689 - RNA, 19 nt, Homo sapiens
  misc_RNA (1)...(19): siRNA sense strand
ccuagauucacuaagacaa

SEQ ID NO: 2295690 - RNA, 19 nt, Homo sapiens
  misc_RNA (1)...(19): siRNA sense strand
guaaaggagaacaugacau

SEQ ID NO: 2295691 - RNA, 19 nt, Homo sapiens
  misc_RNA (1)...(19): siRNA sense strand
uuccaaugccagagcuuaa

SEQ ID NO: 2295692 - RNA, 19 nt, Homo sapiens
  misc_RNA (1)...(19): siRNA sense strand
ccgaagacaagaaggagaa

SEQ ID NO: 2295693 - RNA, 19 nt, Homo sapiens
  misc_RNA (1)...(19): siRNA sense strand
ugucaugaagaaagagaua

SEQ ID NO: 2295694 - RNA, 19 nt, Homo sapiens
  misc_RNA (1)...(19): siRNA sense strand
gccugaaagcugagaagaa

SEQ ID NO: 2295695 - RNA, 19 nt, Homo sapiens
  misc_RNA (1)...(19): siRNA sense strand
uagcagagaaggaggccaa

SEQ ID NO: 2295696 - RNA, 19 nt, Homo sapiens
  misc_RNA (1)...(19): siRNA sense strand
agaaaguagcagagaagga

SEQ ID NO: 2295697 - RNA, 19 nt, Homo sapiens
  misc_RNA (1)...(19): siRNA sense strand
gaaacaagguaucgccaga

SEQ ID NO: 2295698 - RNA, 19 nt, Homo sapiens
  misc_RNA (1)...(19): siRNA sense strand
agacaaggaaacaagguau

SEQ ID NO: 2295699 - RNA, 19 nt, Homo sapiens
  misc_RNA (1)...(19): siRNA sense strand
cuuugaaacugaagaaacu

SEQ ID NO: 2295700 - RNA, 19 nt, Homo sapiens
  misc_RNA (1)...(19): siRNA sense strand
gggcaugggcauugaucga

SEQ ID NO: 2295701 - RNA, 19 nt, Homo sapiens
  misc_RNA (1)...(19): siRNA sense strand
uggaaaucacggagaagau

SEQ ID NO: 2295702 - RNA, 19 nt, Homo sapiens
  misc_RNA (1)...(19): siRNA sense strand
gggugaaguugcaagucau

SEQ ID NO: 2295703 - RNA, 19 nt, Homo sapiens
  misc_RNA (1)...(19): siRNA sense strand
agagauaugcaaugcguau

SEQ ID NO: 2295704 - RNA, 19 nt, Homo sapiens
  misc_RNA (1)...(19): siRNA sense strand
gaagaugguuucagggaug

SEQ ID NO: 2295705 - RNA, 19 nt, Homo sapiens
  misc_RNA (1)...(19): siRNA sense strand
gggcucaaagacaaggaaa

SEQ ID NO: 2295706 - RNA, 19 nt, Homo sapiens
  misc_RNA (1)...(19): siRNA sense strand
gcugggauuccuagagauu

SEQ ID NO: 2295707 - RNA, 19 nt, Homo sapiens
  misc_RNA (1)...(19): siRNA sense strand
gggauugauuugacgcaca

SEQ ID NO: 2295708 - RNA, 19 nt, Homo sapiens
  misc_RNA (1)...(19): siRNA sense strand
gcuaaauggcaccgcucua

SEQ ID NO: 2295709 - RNA, 19 nt, Homo sapiens
  misc_RNA (1)...(19): siRNA sense strand
ugggauuccuagagauuga

SEQ ID NO: 2295710 - RNA, 19 nt, Homo sapiens
  misc_RNA (1)...(19): siRNA sense strand
ugaaugacuuugugaggca

SEQ ID NO: 2295711 - RNA, 19 nt, Homo sapiens
  misc_RNA (1)...(19): siRNA sense strand
ucuuagaugagcugggauu

SEQ ID NO: 2295712 - RNA, 19 nt, Homo sapiens
  misc_RNA (1)...(19): siRNA sense strand
agguaggauccaugccaaa

SEQ ID NO: 2295713 - RNA, 19 nt, Homo sapiens
  misc_RNA (1)...(19): siRNA sense strand
aagacaagaaggagaaugu

SEQ ID NO: 2295714 - RNA, 19 nt, Homo sapiens
  misc_RNA (1)...(19): siRNA sense strand
cagagaaggaggccaaaca

SEQ ID NO: 2295715 - RNA, 19 nt, Homo sapiens
  misc_RNA (1)...(19): siRNA sense strand
ugguagaagagcuugagaa

SEQ ID NO: 2295716 - RNA, 19 nt, Homo sapiens
  misc_RNA (1)...(19): siRNA sense strand
ccacagauaaugagcccuu

SEQ ID NO: 2295717 - RNA, 19 nt, Homo sapiens
  misc_RNA (1)...(19): siRNA sense strand
aagagagcguggacccaaa

SEQ ID NO: 2295718 - RNA, 19 nt, Homo sapiens
  misc_RNA (1)...(19): siRNA sense strand
agacauaauuggaguucag

SEQ ID NO: 2295719 - RNA, 19 nt, Homo sapiens
  misc_RNA (1)...(19): siRNA sense strand
ucgcaaaauucuugaugau

SEQ ID NO: 2295720 - RNA, 19 nt, Homo sapiens
  misc_RNA (1)...(19): siRNA sense strand
ugagcaagaaugagcugaa

SEQ ID NO: 2295721 - RNA, 19 nt, Homo sapiens
  misc_RNA (1)...(19): siRNA sense strand
cugagaagaaaguagcaga

SEQ ID NO: 2295722 - RNA, 19 nt, Homo sapiens
  misc_RNA (1)...(19): siRNA sense strand
aguugcaagucauggccaa

SEQ ID NO: 2295723 - RNA, 19 nt, Homo sapiens
  misc_RNA (1)...(19): siRNA sense strand
gaugauaucuguguggcaa

SEQ ID NO: 2295724 - RNA, 19 nt, Homo sapiens
  misc_RNA (1)...(19): siRNA sense strand
aggccaaggcugcagguga

SEQ ID NO: 2295725 - RNA, 19 nt, Homo sapiens
  misc_RNA (1)...(19): siRNA sense strand
ugagaaacagcuaagccaa

SEQ ID NO: 2295726 - RNA, 19 nt, Homo sapiens
  misc_RNA (1)...(19): siRNA sense strand
cuacaaaauccgcagucaa

SEQ ID NO: 2295727 - RNA, 19 nt, Homo sapiens
  misc_RNA (1)...(19): siRNA sense strand
agaagaugguuucagggau

SEQ ID NO: 2295728 - RNA, 19 nt, Homo sapiens
  misc_RNA (1)...(19): siRNA sense strand
cccgaagacaagaaggaga

SEQ ID NO: 2295729 - RNA, 19 nt, Homo sapiens
  misc_RNA (1)...(19): siRNA sense strand
gugagaaacagcuaagcca

SEQ ID NO: 2295730 - RNA, 19 nt, Homo sapiens
  misc_RNA (1)...(19): siRNA sense strand
aagacaaggaaacaaggua

SEQ ID NO: 2295731 - RNA, 19 nt, Homo sapiens
  misc_RNA (1)...(19): siRNA sense strand
gagaagaugguuucaggga

SEQ ID NO: 2295732 - RNA, 19 nt, Homo sapiens
  misc_RNA (1)...(19): siRNA sense strand
cggccgaggugaaagugga

SEQ ID NO: 2295733 - RNA, 19 nt, Homo sapiens
  misc_RNA (1)...(19): siRNA sense strand
gugaucacccacagauaau

SEQ ID NO: 2295734 - RNA, 19 nt, Homo sapiens
  misc_RNA (1)...(19): siRNA sense strand
augauaucuguguggcaaa

SEQ ID NO: 2295735 - RNA, 19 nt, Homo sapiens
  misc_RNA (1)...(19): siRNA sense strand
uguuugucaugaagaaaga

SEQ ID NO: 2295736 - RNA, 19 nt, Homo sapiens
  misc_RNA (1)...(19): siRNA sense strand
agagcaaguaugagagcua

SEQ ID NO: 2295737 - RNA, 19 nt, Homo sapiens
  misc_RNA (1)...(19): siRNA sense strand
ccucacuggugcugggcaa

SEQ ID NO: 2295738 - RNA, 19 nt, Homo sapiens
  misc_RNA (1)...(19): siRNA sense strand
ggaccaugggcgacaucaa

SEQ ID NO: 2295739 - RNA, 19 nt, Homo sapiens
  misc_RNA (1)...(19): siRNA sense strand
uccagaacgccgaggacua

SEQ ID NO: 2295740 - RNA, 19 nt, Homo sapiens
  misc_RNA (1)...(19): siRNA sense strand
ccucuguggguguggauau

SEQ ID NO: 2295741 - RNA, 19 nt, Homo sapiens
  misc_RNA (1)...(19): siRNA sense strand
gcggccuggucaagagcaa

SEQ ID NO: 2295742 - RNA, 19 nt, Homo sapiens
  misc_RNA (1)...(19): siRNA sense strand
ggaaguugcaagagaucgu

SEQ ID NO: 2295743 - RNA, 19 nt, Homo sapiens
  misc_RNA (1)...(19): siRNA sense strand
acaucaagcucugggacau

SEQ ID NO: 2295744 - RNA, 19 nt, Homo sapiens
  misc_RNA (1)...(19): siRNA sense strand
gcagaugaccacaccguga

SEQ ID NO: 2295745 - RNA, 19 nt, Homo sapiens
  misc_RNA (1)...(19): siRNA sense strand
cugcauaagugccggcucu

SEQ ID NO: 2295746 - RNA, 19 nt, Homo sapiens
  misc_RNA (1)...(19): siRNA sense strand
gcaagagaucgucgcgcau

SEQ ID NO: 2295747 - RNA, 19 nt, Homo sapiens
  misc_RNA (1)...(19): siRNA sense strand
aggacuacaacgagaucuu

SEQ ID NO: 2295748 - RNA, 19 nt, Homo sapiens
  misc_RNA (1)...(19): siRNA sense strand
ggaaagaaauggagguugc

SEQ ID NO: 2295749 - RNA, 19 nt, Homo sapiens
  misc_RNA (1)...(19): siRNA sense strand
gaaggaaaccagcggguga

SEQ ID NO: 2295750 - RNA, 19 nt, Homo sapiens
  misc_RNA (1)...(19): siRNA sense strand
ccucaacaguguaggcuca

SEQ ID NO: 2295751 - RNA, 19 nt, Homo sapiens
  misc_RNA (1)...(19): siRNA sense strand
ucuuugacuccaugagaaa

SEQ ID NO: 2295752 - RNA, 19 nt, Homo sapiens
  misc_RNA (1)...(19): siRNA sense strand
cgguguugguuguggucau

SEQ ID NO: 2295753 - RNA, 19 nt, Homo sapiens
  misc_RNA (1)...(19): siRNA sense strand
ucacagagcuaguccagga

SEQ ID NO: 2295754 - RNA, 19 nt, Homo sapiens
  misc_RNA (1)...(19): siRNA sense strand
ggaagauccucaucagcga

SEQ ID NO: 2295755 - RNA, 19 nt, Homo sapiens
  misc_RNA (1)...(19): siRNA sense strand
cuccaugagaaaugaguau

SEQ ID NO: 2295756 - RNA, 19 nt, Homo sapiens
  misc_RNA (1)...(19): siRNA sense strand
cccaggagaaauugaaaga

SEQ ID NO: 2295757 - RNA, 19 nt, Homo sapiens
  misc_RNA (1)...(19): siRNA sense strand
ccaugacaacuguaggcua

SEQ ID NO: 2295758 - RNA, 19 nt, Homo sapiens
  misc_RNA (1)...(19): siRNA sense strand
agaaugaagaaaagcagaa

SEQ ID NO: 2295759 - RNA, 19 nt, Homo sapiens
  misc_RNA (1)...(19): siRNA sense strand
cugcagauccucgggcaaa

SEQ ID NO: 2295760 - RNA, 19 nt, Homo sapiens
  misc_RNA (1)...(19): siRNA sense strand
ccaccgggagacugagaau

SEQ ID NO: 2295761 - RNA, 19 nt, Homo sapiens
  misc_RNA (1)...(19): siRNA sense strand
ccugaaaguuccagcgcug

SEQ ID NO: 2295762 - RNA, 19 nt, Homo sapiens
  misc_RNA (1)...(19): siRNA sense strand
gcugcagauccucgggcaa

SEQ ID NO: 2295763 - RNA, 19 nt, Homo sapiens
  misc_RNA (1)...(19): siRNA sense strand
gagacugagaaugaagaaa

SEQ ID NO: 2295764 - RNA, 19 nt, Homo sapiens
  misc_RNA (1)...(19): siRNA sense strand
guagugaggccauggacca

SEQ ID NO: 2295765 - RNA, 19 nt, Homo sapiens
  misc_RNA (1)...(19): siRNA sense strand
uggaagagcugcugggcac

SEQ ID NO: 2295766 - RNA, 19 nt, Homo sapiens
  misc_RNA (1)...(19): siRNA sense strand
uggaagagcugcugggcac

SEQ ID NO: 2295767 - RNA, 19 nt, Homo sapiens
  misc_RNA (1)...(19): siRNA sense strand
uggaagagcugcugggcac

SEQ ID NO: 2295768 - RNA, 19 nt, Homo sapiens
  misc_RNA (1)...(19): siRNA sense strand
uggaagagcugcugggcac

SEQ ID NO: 2295769 - RNA, 19 nt, Homo sapiens
  misc_RNA (1)...(19): siRNA sense strand
uggaagagcugcugggcac

SEQ ID NO: 2295770 - RNA, 19 nt, Homo sapiens
  misc_RNA (1)...(19): siRNA sense strand
uggcgaaggcguuggacaa

SEQ ID NO: 2295771 - RNA, 19 nt, Homo sapiens
  misc_RNA (1)...(19): siRNA sense strand
gcaagcugcuggaggguga

SEQ ID NO: 2295772 - RNA, 19 nt, Homo sapiens
  misc_RNA (1)...(19): siRNA sense strand
gcaccaagacugugaggca

SEQ ID NO: 2295773 - RNA, 19 nt, Homo sapiens
  misc_RNA (1)...(19): siRNA sense strand
gcaucaucgcugaggucaa

SEQ ID NO: 2295774 - RNA, 19 nt, Homo sapiens
  misc_RNA (1)...(19): siRNA sense strand
ggugaggagugcaggcuga

SEQ ID NO: 2295775 - RNA, 19 nt, Homo sapiens
  misc_RNA (1)...(19): siRNA sense strand
acaagguucuggaaacaaa

SEQ ID NO: 2295776 - RNA, 19 nt, Homo sapiens
  misc_RNA (1)...(19): siRNA sense strand
aggagauugcugagaucaa

SEQ ID NO: 2295777 - RNA, 19 nt, Homo sapiens
  misc_RNA (1)...(19): siRNA sense strand
agguugaacugcaagccaa

SEQ ID NO: 2295778 - RNA, 19 nt, Homo sapiens
  misc_RNA (1)...(19): siRNA sense strand
agaacaagcuggaagggcu

SEQ ID NO: 2295779 - RNA, 19 nt, Homo sapiens
  misc_RNA (1)...(19): siRNA sense strand
agaucaagacccucaacaa

SEQ ID NO: 2295780 - RNA, 19 nt, Homo sapiens
  misc_RNA (1)...(19): siRNA sense strand
uggcaguggucuuggcguu

SEQ ID NO: 2295781 - RNA, 19 nt, Homo sapiens
  misc_RNA (1)...(19): siRNA sense strand
gcugaauggcgaaggcguu

SEQ ID NO: 2295782 - RNA, 19 nt, Homo sapiens
  misc_RNA (1)...(19): siRNA sense strand
gaacagaucaagacccuca

SEQ ID NO: 2295783 - RNA, 19 nt, Homo sapiens
  misc_RNA (1)...(19): siRNA sense strand
ggcagaaccuggagccguu

SEQ ID NO: 2295784 - RNA, 19 nt, Homo sapiens
  misc_RNA (1)...(19): siRNA sense strand
gucaagaagcagugcgcca

SEQ ID NO: 2295785 - RNA, 19 nt, Homo sapiens
  misc_RNA (1)...(19): siRNA sense strand
ugaacaagguugaacugca

SEQ ID NO: 2295786 - RNA, 19 nt, Homo sapiens
  misc_RNA (1)...(19): siRNA sense strand
ggucacagcaggcagacau

SEQ ID NO: 2295787 - RNA, 19 nt, Homo sapiens
  misc_RNA (1)...(19): siRNA sense strand
caacaagcgcacagcagca

SEQ ID NO: 2295788 - RNA, 19 nt, Homo sapiens
  misc_RNA (1)...(19): siRNA sense strand
ggguggugcauguggagga

SEQ ID NO: 2295789 - RNA, 19 nt, Homo sapiens
  misc_RNA (1)...(19): siRNA sense strand
ccuacaugaacaagguuga

SEQ ID NO: 2295790 - RNA, 19 nt, Homo sapiens
  misc_RNA (1)...(19): siRNA sense strand
aggaccugguggaggacuu

SEQ ID NO: 2295791 - RNA, 19 nt, Homo sapiens
  misc_RNA (1)...(19): siRNA sense strand
ucgcugaggucaaggccca

SEQ ID NO: 2295792 - RNA, 19 nt, Homo sapiens
  misc_RNA (1)...(19): siRNA sense strand
ccuccagcaggaagagcua

SEQ ID NO: 2295793 - RNA, 19 nt, Homo sapiens
  misc_RNA (1)...(19): siRNA sense strand
ugguggaggacuucaagaa

SEQ ID NO: 2295794 - RNA, 19 nt, Homo sapiens
  misc_RNA (1)...(19): siRNA sense strand
agaccaaguacgaggagcu

SEQ ID NO: 2295795 - RNA, 19 nt, Homo sapiens
  misc_RNA (1)...(19): siRNA sense strand
agaucgaccacgucaagaa

SEQ ID NO: 2295796 - RNA, 19 nt, Homo sapiens
  misc_RNA (1)...(19): siRNA sense strand
uggaagggcuggaggaugc

SEQ ID NO: 2295797 - RNA, 19 nt, Homo sapiens
  misc_RNA (1)...(19): siRNA sense strand
agccguuguucgagcagua

SEQ ID NO: 2295798 - RNA, 19 nt, Homo sapiens
  misc_RNA (1)...(19): siRNA sense strand
uggcgaaggcguuggacaa

SEQ ID NO: 2295799 - RNA, 19 nt, Homo sapiens
  misc_RNA (1)...(19): siRNA sense strand
gcaccaagacugugaggca

SEQ ID NO: 2295800 - RNA, 19 nt, Homo sapiens
  misc_RNA (1)...(19): siRNA sense strand
gcaucaucgcugaggucaa

SEQ ID NO: 2295801 - RNA, 19 nt, Homo sapiens
  misc_RNA (1)...(19): siRNA sense strand
agacaaaguacgaggagcu

SEQ ID NO: 2295802 - RNA, 19 nt, Homo sapiens
  misc_RNA (1)...(19): siRNA sense strand
ucaaggaugcuaagaacaa

SEQ ID NO: 2295803 - RNA, 19 nt, Homo sapiens
  misc_RNA (1)...(19): siRNA sense strand
aggagauugcugagaucaa

SEQ ID NO: 2295804 - RNA, 19 nt, Homo sapiens
  misc_RNA (1)...(19): siRNA sense strand
uccuagagcagcagaacaa

SEQ ID NO: 2295805 - RNA, 19 nt, Homo sapiens
  misc_RNA (1)...(19): siRNA sense strand
agguugaacugcaagccaa

SEQ ID NO: 2295806 - RNA, 19 nt, Homo sapiens
  misc_RNA (1)...(19): siRNA sense strand
aggaagagcuacaagcacu

SEQ ID NO: 2295807 - RNA, 19 nt, Homo sapiens
  misc_RNA (1)...(19): siRNA sense strand
agaacaagcuggaagggcu

SEQ ID NO: 2295808 - RNA, 19 nt, Homo sapiens
  misc_RNA (1)...(19): siRNA sense strand
agaucaagacccucaacaa

SEQ ID NO: 2295809 - RNA, 19 nt, Homo sapiens
  misc_RNA (1)...(19): siRNA sense strand
cggugucggcaguggcuua

SEQ ID NO: 2295810 - RNA, 19 nt, Homo sapiens
  misc_RNA (1)...(19): siRNA sense strand
uggacucggagcugagaaa

SEQ ID NO: 2295811 - RNA, 19 nt, Homo sapiens
  misc_RNA (1)...(19): siRNA sense strand
ccucaaggaugcuaagaac

SEQ ID NO: 2295812 - RNA, 19 nt, Homo sapiens
  misc_RNA (1)...(19): siRNA sense strand
uggcaguggucuuggcguu

SEQ ID NO: 2295813 - RNA, 19 nt, Homo sapiens
  misc_RNA (1)...(19): siRNA sense strand
gcugaauggcgaaggcguu

SEQ ID NO: 2295814 - RNA, 19 nt, Homo sapiens
  misc_RNA (1)...(19): siRNA sense strand
ggcagaaccuggagccguu

SEQ ID NO: 2295815 - RNA, 19 nt, Homo sapiens
  misc_RNA (1)...(19): siRNA sense strand
ugagaaacaugcaggaccu

SEQ ID NO: 2295816 - RNA, 19 nt, Homo sapiens
  misc_RNA (1)...(19): siRNA sense strand
ugaacaagguugaacugca

SEQ ID NO: 2295817 - RNA, 19 nt, Homo sapiens
  misc_RNA (1)...(19): siRNA sense strand
caacaagcgcacagcagca

SEQ ID NO: 2295818 - RNA, 19 nt, Homo sapiens
  misc_RNA (1)...(19): siRNA sense strand
gucaagaagcagugugcca

SEQ ID NO: 2295819 - RNA, 19 nt, Homo sapiens
  misc_RNA (1)...(19): siRNA sense strand
gcuaagaacaagcuggaag

SEQ ID NO: 2295820 - RNA, 19 nt, Homo sapiens
  misc_RNA (1)...(19): siRNA sense strand
ccuacaugaacaagguuga

SEQ ID NO: 2295821 - RNA, 19 nt, Homo sapiens
  misc_RNA (1)...(19): siRNA sense strand
ucgcugaggucaaggccca

SEQ ID NO: 2295822 - RNA, 19 nt, Homo sapiens
  misc_RNA (1)...(19): siRNA sense strand
ccuccagcaggaagagcua

SEQ ID NO: 2295823 - RNA, 19 nt, Homo sapiens
  misc_RNA (1)...(19): siRNA sense strand
acaagguucuggacaccaa

SEQ ID NO: 2295824 - RNA, 19 nt, Homo sapiens
  misc_RNA (1)...(19): siRNA sense strand
agaucgaccacgucaagaa

SEQ ID NO: 2295825 - RNA, 19 nt, Homo sapiens
  misc_RNA (1)...(19): siRNA sense strand
uggaagggcuggaggaugc

SEQ ID NO: 2295826 - RNA, 19 nt, Homo sapiens
  misc_RNA (1)...(19): siRNA sense strand
gagcagaucaagacccuca

SEQ ID NO: 2295827 - RNA, 19 nt, Homo sapiens
  misc_RNA (1)...(19): siRNA sense strand
agccguuguucgagcagua

SEQ ID NO: 2295828 - RNA, 19 nt, Homo sapiens
  misc_RNA (1)...(19): siRNA sense strand
uggaagaauuggagguauu

SEQ ID NO: 2295829 - RNA, 19 nt, Homo sapiens
  misc_RNA (1)...(19): siRNA sense strand
ccucaaugauggagaugaa

SEQ ID NO: 2295830 - RNA, 19 nt, Homo sapiens
  misc_RNA (1)...(19): siRNA sense strand
aggaaaacguugaggggaa

SEQ ID NO: 2295831 - RNA, 19 nt, Homo sapiens
  misc_RNA (1)...(19): siRNA sense strand
gagagaauucagugauaaa

SEQ ID NO: 2295832 - RNA, 19 nt, Homo sapiens
  misc_RNA (1)...(19): siRNA sense strand
gcuugaagguguugcagaa

SEQ ID NO: 2295833 - RNA, 19 nt, Homo sapiens
  misc_RNA (1)...(19): siRNA sense strand
ugaagauguuagaggagaa

SEQ ID NO: 2295834 - RNA, 19 nt, Homo sapiens
  misc_RNA (1)...(19): siRNA sense strand
gccuauaacaccaguaaua

SEQ ID NO: 2295835 - RNA, 19 nt, Homo sapiens
  misc_RNA (1)...(19): siRNA sense strand
ccuaaagguauaagagaca

SEQ ID NO: 2295836 - RNA, 19 nt, Homo sapiens
  misc_RNA (1)...(19): siRNA sense strand
caauauaacuccaagacga

SEQ ID NO: 2295837 - RNA, 19 nt, Homo sapiens
  misc_RNA (1)...(19): siRNA sense strand
agaacaauccuguggaaau

SEQ ID NO: 2295838 - RNA, 19 nt, Homo sapiens
  misc_RNA (1)...(19): siRNA sense strand
gcucauuguccaaggaaga

SEQ ID NO: 2295839 - RNA, 19 nt, Homo sapiens
  misc_RNA (1)...(19): siRNA sense strand
gcaucaagaaccuggaaau

SEQ ID NO: 2295840 - RNA, 19 nt, Homo sapiens
  misc_RNA (1)...(19): siRNA sense strand
gagagaaucuucaaggaga

SEQ ID NO: 2295841 - RNA, 19 nt, Homo sapiens
  misc_RNA (1)...(19): siRNA sense strand
aggcaaagaugcaggaaag

SEQ ID NO: 2295842 - RNA, 19 nt, Homo sapiens
  misc_RNA (1)...(19): siRNA sense strand
caaagaugcaggaaagcaa

SEQ ID NO: 2295843 - RNA, 19 nt, Homo sapiens
  misc_RNA (1)...(19): siRNA sense strand
gaacuauauugaaagggaa

SEQ ID NO: 2295844 - RNA, 19 nt, Homo sapiens
  misc_RNA (1)...(19): siRNA sense strand
ugagggaagcugaggcaaa

SEQ ID NO: 2295845 - RNA, 19 nt, Homo sapiens
  misc_RNA (1)...(19): siRNA sense strand
gcauaaauugcuugcagaa

SEQ ID NO: 2295846 - RNA, 19 nt, Homo sapiens
  misc_RNA (1)...(19): siRNA sense strand
gaauagggcaacugagaga

SEQ ID NO: 2295847 - RNA, 19 nt, Homo sapiens
  misc_RNA (1)...(19): siRNA sense strand
caucaaagguggucggauc

SEQ ID NO: 2295848 - RNA, 19 nt, Homo sapiens
  misc_RNA (1)...(19): siRNA sense strand
cuugauacuuagagcaauu

SEQ ID NO: 2295849 - RNA, 19 nt, Homo sapiens
  misc_RNA (1)...(19): siRNA sense strand
gguugaagccuuugaagau

SEQ ID NO: 2295850 - RNA, 19 nt, Homo sapiens
  misc_RNA (1)...(19): siRNA sense strand
gcacacaggcugagggucu

SEQ ID NO: 2295851 - RNA, 19 nt, Homo sapiens
  misc_RNA (1)...(19): siRNA sense strand
guugaaauuaccaggcaaa

SEQ ID NO: 2295852 - RNA, 19 nt, Homo sapiens
  misc_RNA (1)...(19): siRNA sense strand
gucaggaaucggagaauua

SEQ ID NO: 2295853 - RNA, 19 nt, Homo sapiens
  misc_RNA (1)...(19): siRNA sense strand
gcuacaaaguccagucaga

SEQ ID NO: 2295854 - RNA, 19 nt, Homo sapiens
  misc_RNA (1)...(19): siRNA sense strand
caauaaagccaaagacugu

SEQ ID NO: 2295855 - RNA, 19 nt, Homo sapiens
  misc_RNA (1)...(19): siRNA sense strand
ggaagguuauacaggagaa

SEQ ID NO: 2295856 - RNA, 19 nt, Homo sapiens
  misc_RNA (1)...(19): siRNA sense strand
aagucaaagacguggaaau

SEQ ID NO: 2295857 - RNA, 19 nt, Homo sapiens
  misc_RNA (1)...(19): siRNA sense strand
guaaaggaaaugagcucaa

SEQ ID NO: 2295858 - RNA, 19 nt, Homo sapiens
  misc_RNA (1)...(19): siRNA sense strand
gauuuauguggguggauua

SEQ ID NO: 2295859 - RNA, 19 nt, Homo sapiens
  misc_RNA (1)...(19): siRNA sense strand
acgucaucauuaagggaaa

SEQ ID NO: 2295860 - RNA, 19 nt, Homo sapiens
  misc_RNA (1)...(19): siRNA sense strand
ccacauuacgagagacaca

SEQ ID NO: 2295861 - RNA, 19 nt, Homo sapiens
  misc_RNA (1)...(19): siRNA sense strand
cggcaauacaugugaagca

SEQ ID NO: 2295862 - RNA, 19 nt, Homo sapiens
  misc_RNA (1)...(19): siRNA sense strand
caucaagaaccuggaaaua

SEQ ID NO: 2295863 - RNA, 19 nt, Homo sapiens
  misc_RNA (1)...(19): siRNA sense strand
gaacauacuuugacggaag

SEQ ID NO: 2295864 - RNA, 19 nt, Homo sapiens
  misc_RNA (1)...(19): siRNA sense strand
aauuggagguauugaaaga

SEQ ID NO: 2295865 - RNA, 19 nt, Homo sapiens
  misc_RNA (1)...(19): siRNA sense strand
gaggcaaagaugcaggaaa

SEQ ID NO: 2295866 - RNA, 19 nt, Homo sapiens
  misc_RNA (1)...(19): siRNA sense strand
agcaauuccuaaagguaua

SEQ ID NO: 2295867 - RNA, 19 nt, Homo sapiens
  misc_RNA (1)...(19): siRNA sense strand
gucaagaguuguaaggaga

SEQ ID NO: 2295868 - RNA, 19 nt, Homo sapiens
  misc_RNA (1)...(19): siRNA sense strand
ucagaaugggagagaauau

SEQ ID NO: 2295869 - RNA, 19 nt, Homo sapiens
  misc_RNA (1)...(19): siRNA sense strand
ugucacaaauucaggaaaa

SEQ ID NO: 2295870 - RNA, 19 nt, Homo sapiens
  misc_RNA (1)...(19): siRNA sense strand
cuacaauaccuuaacacua

SEQ ID NO: 2295871 - RNA, 19 nt, Homo sapiens
  misc_RNA (1)...(19): siRNA sense strand
gguacaucuuugcuagaaa

SEQ ID NO: 2295872 - RNA, 19 nt, Homo sapiens
  misc_RNA (1)...(19): siRNA sense strand
acucaaggcugcugaagau

SEQ ID NO: 2295873 - RNA, 19 nt, Homo sapiens
  misc_RNA (1)...(19): siRNA sense strand
gagacaggaacaagaagua

SEQ ID NO: 2295874 - RNA, 19 nt, Homo sapiens
  misc_RNA (1)...(19): siRNA sense strand
uagcaaugagagagaauuu

SEQ ID NO: 2295875 - RNA, 19 nt, Homo sapiens
  misc_RNA (1)...(19): siRNA sense strand
gcugcauguucaagaagaa

SEQ ID NO: 2295876 - RNA, 19 nt, Homo sapiens
  misc_RNA (1)...(19): siRNA sense strand
cggaggaacuggccagaga

SEQ ID NO: 2295877 - RNA, 19 nt, Homo sapiens
  misc_RNA (1)...(19): siRNA sense strand
gagcaauuccuaaagguau

SEQ ID NO: 2295878 - RNA, 19 nt, Homo sapiens
  misc_RNA (1)...(19): siRNA sense strand
ggaacuauauugaaaggga

SEQ ID NO: 2295879 - RNA, 19 nt, Homo sapiens
  misc_RNA (1)...(19): siRNA sense strand
cagagaauggagugagaca

SEQ ID NO: 2295880 - RNA, 19 nt, Homo sapiens
  misc_RNA (1)...(19): siRNA sense strand
ggauuacagcagagcagaa

SEQ ID NO: 2295881 - RNA, 19 nt, Homo sapiens
  misc_RNA (1)...(19): siRNA sense strand
ugaagguguugcagaagaa

SEQ ID NO: 2295882 - RNA, 19 nt, Homo sapiens
  misc_RNA (1)...(19): siRNA sense strand
caaacagauuucaagagaa

SEQ ID NO: 2295883 - RNA, 19 nt, Homo sapiens
  misc_RNA (1)...(19): siRNA sense strand
cugugaaugccaugugaaa

SEQ ID NO: 2295884 - RNA, 19 nt, Homo sapiens
  misc_RNA (1)...(19): siRNA sense strand
aagaaguagcaaugagaga

SEQ ID NO: 2295885 - RNA, 19 nt, Homo sapiens
  misc_RNA (1)...(19): siRNA sense strand
aaauuaagcuugaaggugu

SEQ ID NO: 2295886 - RNA, 19 nt, Homo sapiens
  misc_RNA (1)...(19): siRNA sense strand
gcauuggaacugagugaau

SEQ ID NO: 2295887 - RNA, 19 nt, Homo sapiens
  misc_RNA (1)...(19): siRNA sense strand
gaggcaacauugagguaca

SEQ ID NO: 2295888 - RNA, 19 nt, Homo sapiens
  misc_RNA (1)...(19): siRNA sense strand
acuugagcauggagagauu

SEQ ID NO: 2295889 - RNA, 19 nt, Homo sapiens
  misc_RNA (1)...(19): siRNA sense strand
uagagacgguagacaguaa

SEQ ID NO: 2295890 - RNA, 19 nt, Homo sapiens
  misc_RNA (1)...(19): siRNA sense strand
aggcacauucugauggaaa

SEQ ID NO: 2295891 - RNA, 19 nt, Homo sapiens
  misc_RNA (1)...(19): siRNA sense strand
ugcaaaaggaccugggaaa

SEQ ID NO: 2295892 - RNA, 19 nt, Homo sapiens
  misc_RNA (1)...(19): siRNA sense strand
gcaaaaggaccugggaaaa

SEQ ID NO: 2295893 - RNA, 19 nt, Homo sapiens
  misc_RNA (1)...(19): siRNA sense strand
agucaaagacguggaaauu

SEQ ID NO: 2295894 - RNA, 19 nt, Homo sapiens
  misc_RNA (1)...(19): siRNA sense strand
caggauaacagcugcauau

SEQ ID NO: 2295895 - RNA, 19 nt, Homo sapiens
  misc_RNA (1)...(19): siRNA sense strand
ccuuugacuuacucagaaa

SEQ ID NO: 2295896 - RNA, 19 nt, Homo sapiens
  misc_RNA (1)...(19): siRNA sense strand
ggaaauaagcugacugcgu

SEQ ID NO: 2295897 - RNA, 19 nt, Homo sapiens
  misc_RNA (1)...(19): siRNA sense strand
gugugaagaaugugaggau

SEQ ID NO: 2295898 - RNA, 19 nt, Homo sapiens
  misc_RNA (1)...(19): siRNA sense strand
uagaggaucaccaggauaa

SEQ ID NO: 2295899 - RNA, 19 nt, Homo sapiens
  misc_RNA (1)...(19): siRNA sense strand
ccgcugaguuccagagacu

SEQ ID NO: 2295900 - RNA, 19 nt, Homo sapiens
  misc_RNA (1)...(19): siRNA sense strand
caagagagauucagcgaga

SEQ ID NO: 2295901 - RNA, 19 nt, Homo sapiens
  misc_RNA (1)...(19): siRNA sense strand
uggaagaagcaaagaggau

SEQ ID NO: 2295902 - RNA, 19 nt, Homo sapiens
  misc_RNA (1)...(19): siRNA sense strand
gcugaugcacagagggcaa

SEQ ID NO: 2295903 - RNA, 19 nt, Homo sapiens
  misc_RNA (1)...(19): siRNA sense strand
uuuaugaaguugagagcau

SEQ ID NO: 2295904 - RNA, 19 nt, Homo sapiens
  misc_RNA (1)...(19): siRNA sense strand
cacaagaagcacugaguau

SEQ ID NO: 2295905 - RNA, 19 nt, Homo sapiens
  misc_RNA (1)...(19): siRNA sense strand
cuguaaaccaggugugaca

SEQ ID NO: 2295906 - RNA, 19 nt, Homo sapiens
  misc_RNA (1)...(19): siRNA sense strand
gggaaacuggaaagaagaa

SEQ ID NO: 2295907 - RNA, 19 nt, Homo sapiens
  misc_RNA (1)...(19): siRNA sense strand
ugagggaaguggaaggaga

SEQ ID NO: 2295908 - RNA, 19 nt, Homo sapiens
  misc_RNA (1)...(19): siRNA sense strand
acuuacacauucagguuaa

SEQ ID NO: 2295909 - RNA, 19 nt, Homo sapiens
  misc_RNA (1)...(19): siRNA sense strand
cuuugaguaucgaagguua

SEQ ID NO: 2295910 - RNA, 19 nt, Homo sapiens
  misc_RNA (1)...(19): siRNA sense strand
cagaaaagcagaagcugaa

SEQ ID NO: 2295911 - RNA, 19 nt, Homo sapiens
  misc_RNA (1)...(19): siRNA sense strand
gguuacaauccaagacaca

SEQ ID NO: 2295912 - RNA, 19 nt, Homo sapiens
  misc_RNA (1)...(19): siRNA sense strand
aagcagagcacaagaagca

SEQ ID NO: 2295913 - RNA, 19 nt, Homo sapiens
  misc_RNA (1)...(19): siRNA sense strand
ggccacaagauuagcagaa

SEQ ID NO: 2295914 - RNA, 19 nt, Homo sapiens
  misc_RNA (1)...(19): siRNA sense strand
ucuggaaggugcuggucua

SEQ ID NO: 2295915 - RNA, 19 nt, Homo sapiens
  misc_RNA (1)...(19): siRNA sense strand
guauauguccuguugggua

SEQ ID NO: 2295916 - RNA, 19 nt, Homo sapiens
  misc_RNA (1)...(19): siRNA sense strand
gaguaguaccugauacaga

SEQ ID NO: 2295917 - RNA, 19 nt, Homo sapiens
  misc_RNA (1)...(19): siRNA sense strand
ucacagacaaacugguaau

SEQ ID NO: 2295918 - RNA, 19 nt, Homo sapiens
  misc_RNA (1)...(19): siRNA sense strand
gagccuuggccauggaaaa

SEQ ID NO: 2295919 - RNA, 19 nt, Homo sapiens
  misc_RNA (1)...(19): siRNA sense strand
ccucaagaugacuguggaa

SEQ ID NO: 2295920 - RNA, 19 nt, Homo sapiens
  misc_RNA (1)...(19): siRNA sense strand
cgggaacuucacagacaaa

SEQ ID NO: 2295921 - RNA, 19 nt, Homo sapiens
  misc_RNA (1)...(19): siRNA sense strand
ggaaagaagaagcacagca

SEQ ID NO: 2295922 - RNA, 19 nt, Homo sapiens
  misc_RNA (1)...(19): siRNA sense strand
ggacaacagaaaagcagaa

SEQ ID NO: 2295923 - RNA, 19 nt, Homo sapiens
  misc_RNA (1)...(19): siRNA sense strand
ggugaggagccaagagaac

SEQ ID NO: 2295924 - RNA, 19 nt, Homo sapiens
  misc_RNA (1)...(19): siRNA sense strand
caagauuagcagaaagcca

SEQ ID NO: 2295925 - RNA, 19 nt, Homo sapiens
  misc_RNA (1)...(19): siRNA sense strand
aagcggaaauugaagcaga

SEQ ID NO: 2295926 - RNA, 19 nt, Homo sapiens
  misc_RNA (1)...(19): siRNA sense strand
guggaaggagagcuggaaa

SEQ ID NO: 2295927 - RNA, 19 nt, Homo sapiens
  misc_RNA (1)...(19): siRNA sense strand
aagcaaagaggaucaaaca

SEQ ID NO: 2295928 - RNA, 19 nt, Homo sapiens
  misc_RNA (1)...(19): siRNA sense strand
ggcauauggaugaguucaa

SEQ ID NO: 2295929 - RNA, 19 nt, Homo sapiens
  misc_RNA (1)...(19): siRNA sense strand
cgggauacucacaggcuca

SEQ ID NO: 2295930 - RNA, 19 nt, Homo sapiens
  misc_RNA (1)...(19): siRNA sense strand
gcucuuacagaauggaaaa

SEQ ID NO: 2295931 - RNA, 19 nt, Homo sapiens
  misc_RNA (1)...(19): siRNA sense strand
gggaagucugugauugcaa

SEQ ID NO: 2295932 - RNA, 19 nt, Homo sapiens
  misc_RNA (1)...(19): siRNA sense strand
auacagagcuggaaggcag

SEQ ID NO: 2295933 - RNA, 19 nt, Homo sapiens
  misc_RNA (1)...(19): siRNA sense strand
acguugagucagccaguaa

SEQ ID NO: 2295934 - RNA, 19 nt, Homo sapiens
  misc_RNA (1)...(19): siRNA sense strand
gaaucugggaaacuggaaa

SEQ ID NO: 2295935 - RNA, 19 nt, Homo sapiens
  misc_RNA (1)...(19): siRNA sense strand
ugagaugagggaaguggaa

SEQ ID NO: 2295936 - RNA, 19 nt, Homo sapiens
  misc_RNA (1)...(19): siRNA sense strand
ugcagcagcuucagagaau

SEQ ID NO: 2295937 - RNA, 19 nt, Homo sapiens
  misc_RNA (1)...(19): siRNA sense strand
cugggaaacuggaaagaag

SEQ ID NO: 2295938 - RNA, 19 nt, Homo sapiens
  misc_RNA (1)...(19): siRNA sense strand
caguacagauggugauuac

SEQ ID NO: 2295939 - RNA, 19 nt, Homo sapiens
  misc_RNA (1)...(19): siRNA sense strand
cgagcuacauauggagaau

SEQ ID NO: 2295940 - RNA, 19 nt, Homo sapiens
  misc_RNA (1)...(19): siRNA sense strand
gagaauacaguacugggua

SEQ ID NO: 2295941 - RNA, 19 nt, Homo sapiens
  misc_RNA (1)...(19): siRNA sense strand
uggaguaguaccugauaca

SEQ ID NO: 2295942 - RNA, 19 nt, Homo sapiens
  misc_RNA (1)...(19): siRNA sense strand
ggagcaacugacaagggaa

SEQ ID NO: 2295943 - RNA, 19 nt, Homo sapiens
  misc_RNA (1)...(19): siRNA sense strand
ccagaagguugauaccaga

SEQ ID NO: 2295944 - RNA, 19 nt, Homo sapiens
  misc_RNA (1)...(19): siRNA sense strand
agaaagccacguugaguca

SEQ ID NO: 2295945 - RNA, 19 nt, Homo sapiens
  misc_RNA (1)...(19): siRNA sense strand
gggaaguccaggcagugua

SEQ ID NO: 2295946 - RNA, 19 nt, Homo sapiens
  misc_RNA (1)...(19): siRNA sense strand
cgaauauggaugcaguaca

SEQ ID NO: 2295947 - RNA, 19 nt, Homo sapiens
  misc_RNA (1)...(19): siRNA sense strand
agacaaacugguaauggau

SEQ ID NO: 2295948 - RNA, 19 nt, Homo sapiens
  misc_RNA (1)...(19): siRNA sense strand
ggacagaggaggcagacac

SEQ ID NO: 2295949 - RNA, 19 nt, Homo sapiens
  misc_RNA (1)...(19): siRNA sense strand
gcacccaagaccagagacu

SEQ ID NO: 2295950 - RNA, 19 nt, Homo sapiens
  misc_RNA (1)...(19): siRNA sense strand
aaugagcauccaagcaaua

SEQ ID NO: 2295951 - RNA, 19 nt, Homo sapiens
  misc_RNA (1)...(19): siRNA sense strand
ggcagguguuugaagugua

SEQ ID NO: 2295952 - RNA, 19 nt, Homo sapiens
  misc_RNA (1)...(19): siRNA sense strand
gcugaagaagccaugaaga

SEQ ID NO: 2295953 - RNA, 19 nt, Homo sapiens
  misc_RNA (1)...(19): siRNA sense strand
ccagugagauugaacagga

SEQ ID NO: 2295954 - RNA, 19 nt, Homo sapiens
  misc_RNA (1)...(19): siRNA sense strand
uggaaaggaaggagcugga

SEQ ID NO: 2295955 - RNA, 19 nt, Homo sapiens
  misc_RNA (1)...(19): siRNA sense strand
agugauggcaccuguguuu

SEQ ID NO: 2295956 - RNA, 19 nt, Homo sapiens
  misc_RNA (1)...(19): siRNA sense strand
ggagccaagagaacagcua

SEQ ID NO: 2295957 - RNA, 19 nt, Homo sapiens
  misc_RNA (1)...(19): siRNA sense strand
uggaugaguucaagcguac

SEQ ID NO: 2295958 - RNA, 19 nt, Homo sapiens
  misc_RNA (1)...(19): siRNA sense strand
ggaaguggaaggagagcug

SEQ ID NO: 2295959 - RNA, 19 nt, Homo sapiens
  misc_RNA (1)...(19): siRNA sense strand
aaaggaaggagcuggaguu

SEQ ID NO: 2295960 - RNA, 19 nt, Homo sapiens
  misc_RNA (1)...(19): siRNA sense strand
caagagagauucagcgaga

SEQ ID NO: 2295961 - RNA, 19 nt, Homo sapiens
  misc_RNA (1)...(19): siRNA sense strand
uggaagaagcaaagaggau

SEQ ID NO: 2295962 - RNA, 19 nt, Homo sapiens
  misc_RNA (1)...(19): siRNA sense strand
gcugaugcacagagggcaa

SEQ ID NO: 2295963 - RNA, 19 nt, Homo sapiens
  misc_RNA (1)...(19): siRNA sense strand
uuuaugaaguugagagcau

SEQ ID NO: 2295964 - RNA, 19 nt, Homo sapiens
  misc_RNA (1)...(19): siRNA sense strand
cacaagaagcacugaguau

SEQ ID NO: 2295965 - RNA, 19 nt, Homo sapiens
  misc_RNA (1)...(19): siRNA sense strand
cuguaaaccaggugugaca

SEQ ID NO: 2295966 - RNA, 19 nt, Homo sapiens
  misc_RNA (1)...(19): siRNA sense strand
gggaaacuggaaagaagaa

SEQ ID NO: 2295967 - RNA, 19 nt, Homo sapiens
  misc_RNA (1)...(19): siRNA sense strand
ugagggaaguggaaggaga

SEQ ID NO: 2295968 - RNA, 19 nt, Homo sapiens
  misc_RNA (1)...(19): siRNA sense strand
acuuacacauucagguuaa

SEQ ID NO: 2295969 - RNA, 19 nt, Homo sapiens
  misc_RNA (1)...(19): siRNA sense strand
cuuugaguaucgaagguua

SEQ ID NO: 2295970 - RNA, 19 nt, Homo sapiens
  misc_RNA (1)...(19): siRNA sense strand
cagaaaagcagaagcugaa

SEQ ID NO: 2295971 - RNA, 19 nt, Homo sapiens
  misc_RNA (1)...(19): siRNA sense strand
gguuacaauccaagacaca

SEQ ID NO: 2295972 - RNA, 19 nt, Homo sapiens
  misc_RNA (1)...(19): siRNA sense strand
aagcagagcacaagaagca

SEQ ID NO: 2295973 - RNA, 19 nt, Homo sapiens
  misc_RNA (1)...(19): siRNA sense strand
ggccacaagauuagcagaa

SEQ ID NO: 2295974 - RNA, 19 nt, Homo sapiens
  misc_RNA (1)...(19): siRNA sense strand
ucuggaaggugcuggucua

SEQ ID NO: 2295975 - RNA, 19 nt, Homo sapiens
  misc_RNA (1)...(19): siRNA sense strand
guauauguccuguugggua

SEQ ID NO: 2295976 - RNA, 19 nt, Homo sapiens
  misc_RNA (1)...(19): siRNA sense strand
gaguaguaccugauacaga

SEQ ID NO: 2295977 - RNA, 19 nt, Homo sapiens
  misc_RNA (1)...(19): siRNA sense strand
ucacagacaaacugguaau

SEQ ID NO: 2295978 - RNA, 19 nt, Homo sapiens
  misc_RNA (1)...(19): siRNA sense strand
gagccuuggccauggaaaa

SEQ ID NO: 2295979 - RNA, 19 nt, Homo sapiens
  misc_RNA (1)...(19): siRNA sense strand
ccucaagaugacuguggaa

SEQ ID NO: 2295980 - RNA, 19 nt, Homo sapiens
  misc_RNA (1)...(19): siRNA sense strand
cgggaacuucacagacaaa

SEQ ID NO: 2295981 - RNA, 19 nt, Homo sapiens
  misc_RNA (1)...(19): siRNA sense strand
ggaaagaagaagcacagca

SEQ ID NO: 2295982 - RNA, 19 nt, Homo sapiens
  misc_RNA (1)...(19): siRNA sense strand
ggacaacagaaaagcagaa

SEQ ID NO: 2295983 - RNA, 19 nt, Homo sapiens
  misc_RNA (1)...(19): siRNA sense strand
ggugaggagccaagagaac

SEQ ID NO: 2295984 - RNA, 19 nt, Homo sapiens
  misc_RNA (1)...(19): siRNA sense strand
caagauuagcagaaagcca

SEQ ID NO: 2295985 - RNA, 19 nt, Homo sapiens
  misc_RNA (1)...(19): siRNA sense strand
aagcggaaauugaagcaga

SEQ ID NO: 2295986 - RNA, 19 nt, Homo sapiens
  misc_RNA (1)...(19): siRNA sense strand
guggaaggagagcuggaaa

SEQ ID NO: 2295987 - RNA, 19 nt, Homo sapiens
  misc_RNA (1)...(19): siRNA sense strand
aagcaaagaggaucaaaca

SEQ ID NO: 2295988 - RNA, 19 nt, Homo sapiens
  misc_RNA (1)...(19): siRNA sense strand
ggcauauggaugaguucaa

SEQ ID NO: 2295989 - RNA, 19 nt, Homo sapiens
  misc_RNA (1)...(19): siRNA sense strand
cgggauacucacaggcuca

SEQ ID NO: 2295990 - RNA, 19 nt, Homo sapiens
  misc_RNA (1)...(19): siRNA sense strand
gcucuuacagaauggaaaa

SEQ ID NO: 2295991 - RNA, 19 nt, Homo sapiens
  misc_RNA (1)...(19): siRNA sense strand
gggaagucugugauugcaa

SEQ ID NO: 2295992 - RNA, 19 nt, Homo sapiens
  misc_RNA (1)...(19): siRNA sense strand
auacagagcuggaaggcag

SEQ ID NO: 2295993 - RNA, 19 nt, Homo sapiens
  misc_RNA (1)...(19): siRNA sense strand
acguugagucagccaguaa

SEQ ID NO: 2295994 - RNA, 19 nt, Homo sapiens
  misc_RNA (1)...(19): siRNA sense strand
gaaucugggaaacuggaaa

SEQ ID NO: 2295995 - RNA, 19 nt, Homo sapiens
  misc_RNA (1)...(19): siRNA sense strand
ugagaugagggaaguggaa

SEQ ID NO: 2295996 - RNA, 19 nt, Homo sapiens
  misc_RNA (1)...(19): siRNA sense strand
ugcagcagcuucagagaau

SEQ ID NO: 2295997 - RNA, 19 nt, Homo sapiens
  misc_RNA (1)...(19): siRNA sense strand
cugggaaacuggaaagaag

SEQ ID NO: 2295998 - RNA, 19 nt, Homo sapiens
  misc_RNA (1)...(19): siRNA sense strand
caguacagauggugauuac

SEQ ID NO: 2295999 - RNA, 19 nt, Homo sapiens
  misc_RNA (1)...(19): siRNA sense strand
cgagcuacauauggagaau

SEQ ID NO: 2296000 - RNA, 19 nt, Homo sapiens
  misc_RNA (1)...(19): siRNA sense strand
gagaauacaguacugggua

SEQ ID NO: 2296001 - RNA, 19 nt, Homo sapiens
  misc_RNA (1)...(19): siRNA sense strand
uggaguaguaccugauaca

SEQ ID NO: 2296002 - RNA, 19 nt, Homo sapiens
  misc_RNA (1)...(19): siRNA sense strand
ggagcaacugacaagggaa

SEQ ID NO: 2296003 - RNA, 19 nt, Homo sapiens
  misc_RNA (1)...(19): siRNA sense strand
ccagaagguugauaccaga

SEQ ID NO: 2296004 - RNA, 19 nt, Homo sapiens
  misc_RNA (1)...(19): siRNA sense strand
agaaagccacguugaguca

SEQ ID NO: 2296005 - RNA, 19 nt, Homo sapiens
  misc_RNA (1)...(19): siRNA sense strand
gggaaguccaggcagugua

SEQ ID NO: 2296006 - RNA, 19 nt, Homo sapiens
  misc_RNA (1)...(19): siRNA sense strand
cgaauauggaugcaguaca

SEQ ID NO: 2296007 - RNA, 19 nt, Homo sapiens
  misc_RNA (1)...(19): siRNA sense strand
agacaaacugguaauggau

SEQ ID NO: 2296008 - RNA, 19 nt, Homo sapiens
  misc_RNA (1)...(19): siRNA sense strand
ggacagaggaggcagacac

SEQ ID NO: 2296009 - RNA, 19 nt, Homo sapiens
  misc_RNA (1)...(19): siRNA sense strand
gcacccaagaccagagacu

SEQ ID NO: 2296010 - RNA, 19 nt, Homo sapiens
  misc_RNA (1)...(19): siRNA sense strand
aaugagcauccaagcaaua

SEQ ID NO: 2296011 - RNA, 19 nt, Homo sapiens
  misc_RNA (1)...(19): siRNA sense strand
ggcagguguuugaagugua

SEQ ID NO: 2296012 - RNA, 19 nt, Homo sapiens
  misc_RNA (1)...(19): siRNA sense strand
gcugaagaagccaugaaga

SEQ ID NO: 2296013 - RNA, 19 nt, Homo sapiens
  misc_RNA (1)...(19): siRNA sense strand
ccagugagauugaacagga

SEQ ID NO: 2296014 - RNA, 19 nt, Homo sapiens
  misc_RNA (1)...(19): siRNA sense strand
uggaaaggaaggagcugga

SEQ ID NO: 2296015 - RNA, 19 nt, Homo sapiens
  misc_RNA (1)...(19): siRNA sense strand
agugauggcaccuguguuu

SEQ ID NO: 2296016 - RNA, 19 nt, Homo sapiens
  misc_RNA (1)...(19): siRNA sense strand
ggagccaagagaacagcua

SEQ ID NO: 2296017 - RNA, 19 nt, Homo sapiens
  misc_RNA (1)...(19): siRNA sense strand
uggaugaguucaagcguac

SEQ ID NO: 2296018 - RNA, 19 nt, Homo sapiens
  misc_RNA (1)...(19): siRNA sense strand
ggaaguggaaggagagcug

SEQ ID NO: 2296019 - RNA, 19 nt, Homo sapiens
  misc_RNA (1)...(19): siRNA sense strand
aaaggaaggagcuggaguu

SEQ ID NO: 2296020 - RNA, 19 nt, Homo sapiens
  misc_RNA (1)...(19): siRNA sense strand
ccuuugaagaagacgauua

SEQ ID NO: 2296021 - RNA, 19 nt, Homo sapiens
  misc_RNA (1)...(19): siRNA sense strand
cuucacacuaggaaagaaa

SEQ ID NO: 2296022 - RNA, 19 nt, Homo sapiens
  misc_RNA (1)...(19): siRNA sense strand
uaucagagccgaaggcaga

SEQ ID NO: 2296023 - RNA, 19 nt, Homo sapiens
  misc_RNA (1)...(19): siRNA sense strand
cugaagagacagaaagcca

SEQ ID NO: 2296024 - RNA, 19 nt, Homo sapiens
  misc_RNA (1)...(19): siRNA sense strand
guaaguuaagucaggaaau

SEQ ID NO: 2296025 - RNA, 19 nt, Homo sapiens
  misc_RNA (1)...(19): siRNA sense strand
cuauaaggacugugagaag

SEQ ID NO: 2296026 - RNA, 19 nt, Homo sapiens
  misc_RNA (1)...(19): siRNA sense strand
cagacagaagagagaauga

SEQ ID NO: 2296027 - RNA, 19 nt, Homo sapiens
  misc_RNA (1)...(19): siRNA sense strand
aguuaagucaggaaaucaa

SEQ ID NO: 2296028 - RNA, 19 nt, Homo sapiens
  misc_RNA (1)...(19): siRNA sense strand
aacuggacuccgagggaaa

SEQ ID NO: 2296029 - RNA, 19 nt, Homo sapiens
  misc_RNA (1)...(19): siRNA sense strand
acgaggaagcucugcagaa

SEQ ID NO: 2296030 - RNA, 19 nt, Homo sapiens
  misc_RNA (1)...(19): siRNA sense strand
caguaaguuaagucaggaa

SEQ ID NO: 2296031 - RNA, 19 nt, Homo sapiens
  misc_RNA (1)...(19): siRNA sense strand
aggaaaucaacaagaacga

SEQ ID NO: 2296032 - RNA, 19 nt, Homo sapiens
  misc_RNA (1)...(19): siRNA sense strand
ccgcggaggaagagaauuc

SEQ ID NO: 2296033 - RNA, 19 nt, Homo sapiens
  misc_RNA (1)...(19): siRNA sense strand
cagaaagccacgaagagga

SEQ ID NO: 2296034 - RNA, 19 nt, Homo sapiens
  misc_RNA (1)...(19): siRNA sense strand
ggaaagacaugaaaggagc

SEQ ID NO: 2296035 - RNA, 19 nt, Homo sapiens
  misc_RNA (1)...(19): siRNA sense strand
aguaaguuaagucaggaaa

SEQ ID NO: 2296036 - RNA, 19 nt, Homo sapiens
  misc_RNA (1)...(19): siRNA sense strand
ucagaaaguaacagcaguu

SEQ ID NO: 2296037 - RNA, 19 nt, Homo sapiens
  misc_RNA (1)...(19): siRNA sense strand
aggaaagaaaccaccauuu

SEQ ID NO: 2296038 - RNA, 19 nt, Homo sapiens
  misc_RNA (1)...(19): siRNA sense strand
cggaaagacaugaaaggag

SEQ ID NO: 2296039 - RNA, 19 nt, Homo sapiens
  misc_RNA (1)...(19): siRNA sense strand
ugguguuguacaaagauaa

SEQ ID NO: 2296040 - RNA, 19 nt, Homo sapiens
  misc_RNA (1)...(19): siRNA sense strand
gccgauucucaguaaguua

SEQ ID NO: 2296041 - RNA, 19 nt, Homo sapiens
  misc_RNA (1)...(19): siRNA sense strand
cguggaagaugacgcggau

SEQ ID NO: 2296042 - RNA, 19 nt, Homo sapiens
  misc_RNA (1)...(19): siRNA sense strand
aagacaaauugaagggaga

SEQ ID NO: 2296043 - RNA, 19 nt, Homo sapiens
  misc_RNA (1)...(19): siRNA sense strand
ugaucaaacucaaaggcua

SEQ ID NO: 2296044 - RNA, 19 nt, Homo sapiens
  misc_RNA (1)...(19): siRNA sense strand
cugauaaagauaaggaaca

SEQ ID NO: 2296045 - RNA, 19 nt, Homo sapiens
  misc_RNA (1)...(19): siRNA sense strand
gugcuuaugaggugaucaa

SEQ ID NO: 2296046 - RNA, 19 nt, Homo sapiens
  misc_RNA (1)...(19): siRNA sense strand
gcacccagauuuagggacu

SEQ ID NO: 2296047 - RNA, 19 nt, Homo sapiens
  misc_RNA (1)...(19): siRNA sense strand
ggcuacacauccugggcua

SEQ ID NO: 2296048 - RNA, 19 nt, Homo sapiens
  misc_RNA (1)...(19): siRNA sense strand
ccaccaugauuaagggucu

SEQ ID NO: 2296049 - RNA, 19 nt, Homo sapiens
  misc_RNA (1)...(19): siRNA sense strand
uaaugaaggacuuggcaga

SEQ ID NO: 2296050 - RNA, 19 nt, Homo sapiens
  misc_RNA (1)...(19): siRNA sense strand
caaagauugucucuggcaa

SEQ ID NO: 2296051 - RNA, 19 nt, Homo sapiens
  misc_RNA (1)...(19): siRNA sense strand
gaucaaacucaaaggcuac

SEQ ID NO: 2296052 - RNA, 19 nt, Homo sapiens
  misc_RNA (1)...(19): siRNA sense strand
gauuaagggucuuuacgga

SEQ ID NO: 2296053 - RNA, 19 nt, Homo sapiens
  misc_RNA (1)...(19): siRNA sense strand
cgucagcaagagggagaaa

SEQ ID NO: 2296054 - RNA, 19 nt, Homo sapiens
  misc_RNA (1)...(19): siRNA sense strand
agauaaggaacaguggaaa

SEQ ID NO: 2296055 - RNA, 19 nt, Homo sapiens
  misc_RNA (1)...(19): siRNA sense strand
gcuuauuguuucaaaucca

SEQ ID NO: 2296056 - RNA, 19 nt, Homo sapiens
  misc_RNA (1)...(19): siRNA sense strand
gcuuggaagauaagugguu

SEQ ID NO: 2296057 - RNA, 19 nt, Homo sapiens
  misc_RNA (1)...(19): siRNA sense strand
uugaagaagagugcagaua

SEQ ID NO: 2296058 - RNA, 19 nt, Homo sapiens
  misc_RNA (1)...(19): siRNA sense strand
aauugaagggagagaugau

SEQ ID NO: 2296059 - RNA, 19 nt, Homo sapiens
  misc_RNA (1)...(19): siRNA sense strand
gaaugaauguugcuggugu

SEQ ID NO: 2296060 - RNA, 19 nt, Homo sapiens
  misc_RNA (1)...(19): siRNA sense strand
gauuacaguuguugggguu

SEQ ID NO: 2296061 - RNA, 19 nt, Homo sapiens
  misc_RNA (1)...(19): siRNA sense strand
ccuuaguguuccuugcauu

SEQ ID NO: 2296062 - RNA, 19 nt, Homo sapiens
  misc_RNA (1)...(19): siRNA sense strand
aguggaaagagguucacaa

SEQ ID NO: 2296063 - RNA, 19 nt, Homo sapiens
  misc_RNA (1)...(19): siRNA sense strand
augaggagguggagggcuu

SEQ ID NO: 2296064 - RNA, 19 nt, Homo sapiens
  misc_RNA (1)...(19): siRNA sense strand
gcgugaaugugcagggcga

SEQ ID NO: 2296065 - RNA, 19 nt, Homo sapiens
  misc_RNA (1)...(19): siRNA sense strand
uggagggcuugguggagaa

SEQ ID NO: 2296066 - RNA, 19 nt, Homo sapiens
  misc_RNA (1)...(19): siRNA sense strand
ccuggaacuucgaggccuu

SEQ ID NO: 2296067 - RNA, 19 nt, Homo sapiens
  misc_RNA (1)...(19): siRNA sense strand
agggcuugguggagaagau

SEQ ID NO: 2296068 - RNA, 19 nt, Homo sapiens
  misc_RNA (1)...(19): siRNA sense strand
acugcaggcacgagagaga

SEQ ID NO: 2296069 - RNA, 19 nt, Homo sapiens
  misc_RNA (1)...(19): siRNA sense strand
gcaccauugccuacgaaaa

SEQ ID NO: 2296070 - RNA, 19 nt, Homo sapiens
  misc_RNA (1)...(19): siRNA sense strand
ccucacuggccgacugcaa

SEQ ID NO: 2296071 - RNA, 19 nt, Homo sapiens
  misc_RNA (1)...(19): siRNA sense strand
ccaugaguguggaugcuga

SEQ ID NO: 2296072 - RNA, 19 nt, Homo sapiens
  misc_RNA (1)...(19): siRNA sense strand
cuggagugccuuugugaca

SEQ ID NO: 2296073 - RNA, 19 nt, Homo sapiens
  misc_RNA (1)...(19): siRNA sense strand
acaucaucgacgagaauaa

SEQ ID NO: 2296074 - RNA, 19 nt, Homo sapiens
  misc_RNA (1)...(19): siRNA sense strand
ggagauuaccagagcgagu

SEQ ID NO: 2296075 - RNA, 19 nt, Homo sapiens
  misc_RNA (1)...(19): siRNA sense strand
gaauguaaaugcaaccuga

SEQ ID NO: 2296076 - RNA, 19 nt, Homo sapiens
  misc_RNA (1)...(19): siRNA sense strand
gcaacgagaaugacgacca

SEQ ID NO: 2296077 - RNA, 19 nt, Homo sapiens
  misc_RNA (1)...(19): siRNA sense strand
cggguagcaacgagaauga

SEQ ID NO: 2296078 - RNA, 19 nt, Homo sapiens
  misc_RNA (1)...(19): siRNA sense strand
uccaaggagcggaggauga

SEQ ID NO: 2296079 - RNA, 19 nt, Homo sapiens
  misc_RNA (1)...(19): siRNA sense strand
ucgucugcaaagaggauua

SEQ ID NO: 2296080 - RNA, 19 nt, Homo sapiens
  misc_RNA (1)...(19): siRNA sense strand
cggacaaggaagcggguag

SEQ ID NO: 2296081 - RNA, 19 nt, Homo sapiens
  misc_RNA (1)...(19): siRNA sense strand
acgagaaugacgaccagaa

SEQ ID NO: 2296082 - RNA, 19 nt, Homo sapiens
  misc_RNA (1)...(19): siRNA sense strand
ucuacaucaucgacgagaa

SEQ ID NO: 2296083 - RNA, 19 nt, Homo sapiens
  misc_RNA (1)...(19): siRNA sense strand
ucauaguggaagagaggaa

SEQ ID NO: 2296084 - RNA, 19 nt, Homo sapiens
  misc_RNA (1)...(19): siRNA sense strand
ugaaagaggucaaccggau

SEQ ID NO: 2296085 - RNA, 19 nt, Homo sapiens
  misc_RNA (1)...(19): siRNA sense strand
agacuguggugguggcaga

SEQ ID NO: 2296086 - RNA, 19 nt, Homo sapiens
  misc_RNA (1)...(19): siRNA sense strand
uguaugagcugcaagguga

SEQ ID NO: 2296087 - RNA, 19 nt, Homo sapiens
  misc_RNA (1)...(19): siRNA sense strand
cgggcaaagugauggucau

SEQ ID NO: 2296088 - RNA, 19 nt, Homo sapiens
  misc_RNA (1)...(19): siRNA sense strand
ccugagaugcugaacggaa

SEQ ID NO: 2296089 - RNA, 19 nt, Homo sapiens
  misc_RNA (1)...(19): siRNA sense strand
gaguggaggagguggagga

SEQ ID NO: 2296090 - RNA, 19 nt, Homo sapiens
  misc_RNA (1)...(19): siRNA sense strand
acuaugagaaggaugggaa

SEQ ID NO: 2296091 - RNA, 19 nt, Homo sapiens
  misc_RNA (1)...(19): siRNA sense strand
cacacaaagccacgggcaa

SEQ ID NO: 2296092 - RNA, 19 nt, Homo sapiens
  misc_RNA (1)...(19): siRNA sense strand
gcugcagacuggagccuga

SEQ ID NO: 2296093 - RNA, 19 nt, Homo sapiens
  misc_RNA (1)...(19): siRNA sense strand
gggcaggcuaucaagguga

SEQ ID NO: 2296094 - RNA, 19 nt, Homo sapiens
  misc_RNA (1)...(19): siRNA sense strand
ugcaagugaaagaggucaa

SEQ ID NO: 2296095 - RNA, 19 nt, Homo sapiens
  misc_RNA (1)...(19): siRNA sense strand
gugugcuguacaaggauaa

SEQ ID NO: 2296096 - RNA, 19 nt, Homo sapiens
  misc_RNA (1)...(19): siRNA sense strand
ucucgaaauuggaggacuc

SEQ ID NO: 2296097 - RNA, 19 nt, Homo sapiens
  misc_RNA (1)...(19): siRNA sense strand
ucauaguggaagagaggaa

SEQ ID NO: 2296098 - RNA, 19 nt, Homo sapiens
  misc_RNA (1)...(19): siRNA sense strand
ugaaagaggucaaccggau

SEQ ID NO: 2296099 - RNA, 19 nt, Homo sapiens
  misc_RNA (1)...(19): siRNA sense strand
agacuguggugguggcaga

SEQ ID NO: 2296100 - RNA, 19 nt, Homo sapiens
  misc_RNA (1)...(19): siRNA sense strand
uguaugagcugcaagguga

SEQ ID NO: 2296101 - RNA, 19 nt, Homo sapiens
  misc_RNA (1)...(19): siRNA sense strand
cgggcaaagugauggucau

SEQ ID NO: 2296102 - RNA, 19 nt, Homo sapiens
  misc_RNA (1)...(19): siRNA sense strand
ccugagaugcugaacggaa

SEQ ID NO: 2296103 - RNA, 19 nt, Homo sapiens
  misc_RNA (1)...(19): siRNA sense strand
gaguggaggagguggagga

SEQ ID NO: 2296104 - RNA, 19 nt, Homo sapiens
  misc_RNA (1)...(19): siRNA sense strand
acuaugagaaggaugggaa

SEQ ID NO: 2296105 - RNA, 19 nt, Homo sapiens
  misc_RNA (1)...(19): siRNA sense strand
cacacaaagccacgggcaa

SEQ ID NO: 2296106 - RNA, 19 nt, Homo sapiens
  misc_RNA (1)...(19): siRNA sense strand
gcugcagacuggagccuga

SEQ ID NO: 2296107 - RNA, 19 nt, Homo sapiens
  misc_RNA (1)...(19): siRNA sense strand
gggcaggcuaucaagguga

SEQ ID NO: 2296108 - RNA, 19 nt, Homo sapiens
  misc_RNA (1)...(19): siRNA sense strand
ugcaagugaaagaggucaa

SEQ ID NO: 2296109 - RNA, 19 nt, Homo sapiens
  misc_RNA (1)...(19): siRNA sense strand
gugugcuguacaaggauaa

SEQ ID NO: 2296110 - RNA, 19 nt, Homo sapiens
  misc_RNA (1)...(19): siRNA sense strand
ucucgaaauuggaggacuc

SEQ ID NO: 2296111 - RNA, 19 nt, Homo sapiens
  misc_RNA (1)...(19): siRNA sense strand
aggaaauauuugagagugu

SEQ ID NO: 2296112 - RNA, 19 nt, Homo sapiens
  misc_RNA (1)...(19): siRNA sense strand
auaacuuagugcagcgaaa

SEQ ID NO: 2296113 - RNA, 19 nt, Homo sapiens
  misc_RNA (1)...(19): siRNA sense strand
gggaaguugaggugacauu

SEQ ID NO: 2296114 - RNA, 19 nt, Homo sapiens
  misc_RNA (1)...(19): siRNA sense strand
aggaggaauuugagcacuu

SEQ ID NO: 2296115 - RNA, 19 nt, Homo sapiens
  misc_RNA (1)...(19): siRNA sense strand
gugccaaaguggaaaauau

SEQ ID NO: 2296116 - RNA, 19 nt, Homo sapiens
  misc_RNA (1)...(19): siRNA sense strand
caguguggacaaagacaaa

SEQ ID NO: 2296117 - RNA, 19 nt, Homo sapiens
  misc_RNA (1)...(19): siRNA sense strand
agaucaaauucgaguagca

SEQ ID NO: 2296118 - RNA, 19 nt, Homo sapiens
  misc_RNA (1)...(19): siRNA sense strand
gcgaaauaugccaucaaau

SEQ ID NO: 2296119 - RNA, 19 nt, Homo sapiens
  misc_RNA (1)...(19): siRNA sense strand
gacaagucuuugaaggaca

SEQ ID NO: 2296120 - RNA, 19 nt, Homo sapiens
  misc_RNA (1)...(19): siRNA sense strand
uaguaaagagggacauaga

SEQ ID NO: 2296121 - RNA, 19 nt, Homo sapiens
  misc_RNA (1)...(19): siRNA sense strand
cuugaugaacagagaagau

SEQ ID NO: 2296122 - RNA, 19 nt, Homo sapiens
  misc_RNA (1)...(19): siRNA sense strand
agaucgagagcuaagacaa

SEQ ID NO: 2296123 - RNA, 19 nt, Homo sapiens
  misc_RNA (1)...(19): siRNA sense strand
gauucugagacaaguaaau

SEQ ID NO: 2296124 - RNA, 19 nt, Homo sapiens
  misc_RNA (1)...(19): siRNA sense strand
aggaauuccagaagggcca

SEQ ID NO: 2296125 - RNA, 19 nt, Homo sapiens
  misc_RNA (1)...(19): siRNA sense strand
auuugagaguguaggagau

SEQ ID NO: 2296126 - RNA, 19 nt, Homo sapiens
  misc_RNA (1)...(19): siRNA sense strand
cugaaccggcaguuagaua

SEQ ID NO: 2296127 - RNA, 19 nt, Homo sapiens
  misc_RNA (1)...(19): siRNA sense strand
ugaugaacagagaagauau

SEQ ID NO: 2296128 - RNA, 19 nt, Homo sapiens
  misc_RNA (1)...(19): siRNA sense strand
agucuuugaaggacagaau

SEQ ID NO: 2296129 - RNA, 19 nt, Homo sapiens
  misc_RNA (1)...(19): siRNA sense strand
ggugacauuucgagugacu

SEQ ID NO: 2296130 - RNA, 19 nt, Homo sapiens
  misc_RNA (1)...(19): siRNA sense strand
cgagcaaagauuaccuauu

SEQ ID NO: 2296131 - RNA, 19 nt, Homo sapiens
  misc_RNA (1)...(19): siRNA sense strand
gcaugagauucugagacaa

SEQ ID NO: 2296132 - RNA, 19 nt, Homo sapiens
  misc_RNA (1)...(19): siRNA sense strand
cagcgaaauaugccaucaa

SEQ ID NO: 2296133 - RNA, 19 nt, Homo sapiens
  misc_RNA (1)...(19): siRNA sense strand
uggccuagcaauuugguau

SEQ ID NO: 2296134 - RNA, 19 nt, Homo sapiens
  misc_RNA (1)...(19): siRNA sense strand
caauaauggcuuuacacca

SEQ ID NO: 2296135 - RNA, 19 nt, Homo sapiens
  misc_RNA (1)...(19): siRNA sense strand
uauuccaaguucagaucaa

SEQ ID NO: 2296136 - RNA, 19 nt, Homo sapiens
  misc_RNA (1)...(19): siRNA sense strand
uguauaggucucagcaaga

SEQ ID NO: 2296137 - RNA, 19 nt, Homo sapiens
  misc_RNA (1)...(19): siRNA sense strand
caucaaaugaaaagccgaa

SEQ ID NO: 2296138 - RNA, 19 nt, Homo sapiens
  misc_RNA (1)...(19): siRNA sense strand
gggcaaggaugcagcagca

SEQ ID NO: 2296139 - RNA, 19 nt, Homo sapiens
  misc_RNA (1)...(19): siRNA sense strand
auaccaagaaggaggguga

SEQ ID NO: 2296140 - RNA, 19 nt, Homo sapiens
  misc_RNA (1)...(19): siRNA sense strand
ccguggaggagguggauga

SEQ ID NO: 2296141 - RNA, 19 nt, Homo sapiens
  misc_RNA (1)...(19): siRNA sense strand
agguggaugaggagggcaa

SEQ ID NO: 2296142 - RNA, 19 nt, Homo sapiens
  misc_RNA (1)...(19): siRNA sense strand
gagcaaagugcgugaggag

SEQ ID NO: 2296143 - RNA, 19 nt, Homo sapiens
  misc_RNA (1)...(19): siRNA sense strand
agguggagcaguauaagaa

SEQ ID NO: 2296144 - RNA, 19 nt, Homo sapiens
  misc_RNA (1)...(19): siRNA sense strand
gcaacaaguccaaugagga

SEQ ID NO: 2296145 - RNA, 19 nt, Homo sapiens
  misc_RNA (1)...(19): siRNA sense strand
uggaggagguggaugagga

SEQ ID NO: 2296146 - RNA, 19 nt, Homo sapiens
  misc_RNA (1)...(19): siRNA sense strand
ccaccaaaguucacccuga

SEQ ID NO: 2296147 - RNA, 19 nt, Homo sapiens
  misc_RNA (1)...(19): siRNA sense strand
ugaaggaccuggaggcucu

SEQ ID NO: 2296148 - RNA, 19 nt, Homo sapiens
  misc_RNA (1)...(19): siRNA sense strand
ugggaagcagcgugaguuu

SEQ ID NO: 2296149 - RNA, 19 nt, Homo sapiens
  misc_RNA (1)...(19): siRNA sense strand
agaccaugaaggaggaacu

SEQ ID NO: 2296150 - RNA, 19 nt, Homo sapiens
  misc_RNA (1)...(19): siRNA sense strand
gugaggaguuuaaggagcu

SEQ ID NO: 2296151 - RNA, 19 nt, Homo sapiens
  misc_RNA (1)...(19): siRNA sense strand
aguauaagaaggagcugga

SEQ ID NO: 2296152 - RNA, 19 nt, Homo sapiens
  misc_RNA (1)...(19): siRNA sense strand
uauaagaaggagcuggaga

SEQ ID NO: 2296153 - RNA, 19 nt, Homo sapiens
  misc_RNA (1)...(19): siRNA sense strand
gagaacaggcugcagacca

SEQ ID NO: 2296154 - RNA, 19 nt, Homo sapiens
  misc_RNA (1)...(19): siRNA sense strand
gggcaaggaugcagcagca

SEQ ID NO: 2296155 - RNA, 19 nt, Homo sapiens
  misc_RNA (1)...(19): siRNA sense strand
auaccaagaaggaggguga

SEQ ID NO: 2296156 - RNA, 19 nt, Homo sapiens
  misc_RNA (1)...(19): siRNA sense strand
ccguggaggagguggauga

SEQ ID NO: 2296157 - RNA, 19 nt, Homo sapiens
  misc_RNA (1)...(19): siRNA sense strand
agguggaugaggagggcaa

SEQ ID NO: 2296158 - RNA, 19 nt, Homo sapiens
  misc_RNA (1)...(19): siRNA sense strand
gagcaaagugcgugaggag

SEQ ID NO: 2296159 - RNA, 19 nt, Homo sapiens
  misc_RNA (1)...(19): siRNA sense strand
agguggagcaguauaagaa

SEQ ID NO: 2296160 - RNA, 19 nt, Homo sapiens
  misc_RNA (1)...(19): siRNA sense strand
gcaacaaguccaaugagga

SEQ ID NO: 2296161 - RNA, 19 nt, Homo sapiens
  misc_RNA (1)...(19): siRNA sense strand
uggaggagguggaugagga

SEQ ID NO: 2296162 - RNA, 19 nt, Homo sapiens
  misc_RNA (1)...(19): siRNA sense strand
ccaccaaaguucacccuga

SEQ ID NO: 2296163 - RNA, 19 nt, Homo sapiens
  misc_RNA (1)...(19): siRNA sense strand
ugaaggaccuggaggcucu

SEQ ID NO: 2296164 - RNA, 19 nt, Homo sapiens
  misc_RNA (1)...(19): siRNA sense strand
ugggaagcagcgugaguuu

SEQ ID NO: 2296165 - RNA, 19 nt, Homo sapiens
  misc_RNA (1)...(19): siRNA sense strand
agaccaugaaggaggaacu

SEQ ID NO: 2296166 - RNA, 19 nt, Homo sapiens
  misc_RNA (1)...(19): siRNA sense strand
gugaggaguuuaaggagcu

SEQ ID NO: 2296167 - RNA, 19 nt, Homo sapiens
  misc_RNA (1)...(19): siRNA sense strand
aguauaagaaggagcugga

SEQ ID NO: 2296168 - RNA, 19 nt, Homo sapiens
  misc_RNA (1)...(19): siRNA sense strand
uauaagaaggagcuggaga

SEQ ID NO: 2296169 - RNA, 19 nt, Homo sapiens
  misc_RNA (1)...(19): siRNA sense strand
gagaacaggcugcagacca

SEQ ID NO: 2296170 - RNA, 19 nt, Homo sapiens
  misc_RNA (1)...(19): siRNA sense strand
gggcaaggaugcagcagca

SEQ ID NO: 2296171 - RNA, 19 nt, Homo sapiens
  misc_RNA (1)...(19): siRNA sense strand
auaccaagaaggaggguga

SEQ ID NO: 2296172 - RNA, 19 nt, Homo sapiens
  misc_RNA (1)...(19): siRNA sense strand
ccguggaggagguggauga

SEQ ID NO: 2296173 - RNA, 19 nt, Homo sapiens
  misc_RNA (1)...(19): siRNA sense strand
agguggaugaggagggcaa

SEQ ID NO: 2296174 - RNA, 19 nt, Homo sapiens
  misc_RNA (1)...(19): siRNA sense strand
gagcaaagugcgugaggag

SEQ ID NO: 2296175 - RNA, 19 nt, Homo sapiens
  misc_RNA (1)...(19): siRNA sense strand
agguggagcaguauaagaa

SEQ ID NO: 2296176 - RNA, 19 nt, Homo sapiens
  misc_RNA (1)...(19): siRNA sense strand
gcaacaaguccaaugagga

SEQ ID NO: 2296177 - RNA, 19 nt, Homo sapiens
  misc_RNA (1)...(19): siRNA sense strand
uggaggagguggaugagga

SEQ ID NO: 2296178 - RNA, 19 nt, Homo sapiens
  misc_RNA (1)...(19): siRNA sense strand
ccaccaaaguucacccuga

SEQ ID NO: 2296179 - RNA, 19 nt, Homo sapiens
  misc_RNA (1)...(19): siRNA sense strand
ugaaggaccuggaggcucu

SEQ ID NO: 2296180 - RNA, 19 nt, Homo sapiens
  misc_RNA (1)...(19): siRNA sense strand
ugggaagcagcgugaguuu

SEQ ID NO: 2296181 - RNA, 19 nt, Homo sapiens
  misc_RNA (1)...(19): siRNA sense strand
agaccaugaaggaggaacu

SEQ ID NO: 2296182 - RNA, 19 nt, Homo sapiens
  misc_RNA (1)...(19): siRNA sense strand
gugaggaguuuaaggagcu

SEQ ID NO: 2296183 - RNA, 19 nt, Homo sapiens
  misc_RNA (1)...(19): siRNA sense strand
aguauaagaaggagcugga

SEQ ID NO: 2296184 - RNA, 19 nt, Homo sapiens
  misc_RNA (1)...(19): siRNA sense strand
uauaagaaggagcuggaga

SEQ ID NO: 2296185 - RNA, 19 nt, Homo sapiens
  misc_RNA (1)...(19): siRNA sense strand
gagaacaggcugcagacca

SEQ ID NO: 2296186 - RNA, 19 nt, Homo sapiens
  misc_RNA (1)...(19): siRNA sense strand
uguaugaagaggagauuaa

SEQ ID NO: 2296187 - RNA, 19 nt, Homo sapiens
  misc_RNA (1)...(19): siRNA sense strand
ugacagacaaagagagaga

SEQ ID NO: 2296188 - RNA, 19 nt, Homo sapiens
  misc_RNA (1)...(19): siRNA sense strand
agggaagaacugauggaaa

SEQ ID NO: 2296189 - RNA, 19 nt, Homo sapiens
  misc_RNA (1)...(19): siRNA sense strand
aauugauguugaugggaaa

SEQ ID NO: 2296190 - RNA, 19 nt, Homo sapiens
  misc_RNA (1)...(19): siRNA sense strand
cugaagaagaggaggagga

SEQ ID NO: 2296191 - RNA, 19 nt, Homo sapiens
  misc_RNA (1)...(19): siRNA sense strand
agacaaagagagagagaug

SEQ ID NO: 2296192 - RNA, 19 nt, Homo sapiens
  misc_RNA (1)...(19): siRNA sense strand
aagaagaggaggaggagga

SEQ ID NO: 2296193 - RNA, 19 nt, Homo sapiens
  misc_RNA (1)...(19): siRNA sense strand
uggagugguuguugaggaa

SEQ ID NO: 2296194 - RNA, 19 nt, Homo sapiens
  misc_RNA (1)...(19): siRNA sense strand
gagugguuguugaggaaga

SEQ ID NO: 2296195 - RNA, 19 nt, Homo sapiens
  misc_RNA (1)...(19): siRNA sense strand
gcauguaugaagaggagau

SEQ ID NO: 2296196 - RNA, 19 nt, Homo sapiens
  misc_RNA (1)...(19): siRNA sense strand
gaagagagguugaagcugu

SEQ ID NO: 2296197 - RNA, 19 nt, Homo sapiens
  misc_RNA (1)...(19): siRNA sense strand
gcugacagacaaagagaga

SEQ ID NO: 2296198 - RNA, 19 nt, Homo sapiens
  misc_RNA (1)...(19): siRNA sense strand
cggaaauaagggaucaaau

SEQ ID NO: 2296199 - RNA, 19 nt, Homo sapiens
  misc_RNA (1)...(19): siRNA sense strand
uggaaagccgcaugagaau

SEQ ID NO: 2296200 - RNA, 19 nt, Homo sapiens
  misc_RNA (1)...(19): siRNA sense strand
ccucaagauaugugcugaa

SEQ ID NO: 2296201 - RNA, 19 nt, Homo sapiens
  misc_RNA (1)...(19): siRNA sense strand
aaauugauguugaugggaa

SEQ ID NO: 2296202 - RNA, 19 nt, Homo sapiens
  misc_RNA (1)...(19): siRNA sense strand
gcaugagaauugagagccu

SEQ ID NO: 2296203 - RNA, 19 nt, Homo sapiens
  misc_RNA (1)...(19): siRNA sense strand
ggcgaagaugugaagguua

SEQ ID NO: 2296204 - RNA, 19 nt, Homo sapiens
  misc_RNA (1)...(19): siRNA sense strand
acguacaacuagaggaaag

SEQ ID NO: 2296205 - RNA, 19 nt, Homo sapiens
  misc_RNA (1)...(19): siRNA sense strand
caacuagaggaaagcggaa

SEQ ID NO: 2296206 - RNA, 19 nt, Homo sapiens
  misc_RNA (1)...(19): siRNA sense strand
uucaagaauuagaggacuu

SEQ ID NO: 2296207 - RNA, 19 nt, Homo sapiens
  misc_RNA (1)...(19): siRNA sense strand
acagacaaagagagagaga

SEQ ID NO: 2296208 - RNA, 19 nt, Homo sapiens
  misc_RNA (1)...(19): siRNA sense strand
cagaucaagcuucgagaau

SEQ ID NO: 2296209 - RNA, 19 nt, Homo sapiens
  misc_RNA (1)...(19): siRNA sense strand
auggaaagccgcaugagaa

SEQ ID NO: 2296210 - RNA, 19 nt, Homo sapiens
  misc_RNA (1)...(19): siRNA sense strand
ggaaacucuuagaaggcga

SEQ ID NO: 2296211 - RNA, 19 nt, Homo sapiens
  misc_RNA (1)...(19): siRNA sense strand
gaagaggagauuaacgaga

SEQ ID NO: 2296212 - RNA, 19 nt, Homo sapiens
  misc_RNA (1)...(19): siRNA sense strand
gagagagagauggcggaaa

SEQ ID NO: 2296213 - RNA, 19 nt, Homo sapiens
  misc_RNA (1)...(19): siRNA sense strand
gggagaggagguugcucaa

SEQ ID NO: 2296214 - RNA, 19 nt, Homo sapiens
  misc_RNA (1)...(19): siRNA sense strand
ucgcaugcugacagacaaa

SEQ ID NO: 2296215 - RNA, 19 nt, Homo sapiens
  misc_RNA (1)...(19): siRNA sense strand
augaauacuucuacuguca

SEQ ID NO: 2296216 - RNA, 19 nt, Homo sapiens
  misc_RNA (1)...(19): siRNA sense strand
aggccagacuguuacaauu

SEQ ID NO: 2296217 - RNA, 19 nt, Homo sapiens
  misc_RNA (1)...(19): siRNA sense strand
gcgaagaagagagguugaa

SEQ ID NO: 2296218 - RNA, 19 nt, Homo sapiens
  misc_RNA (1)...(19): siRNA sense strand
ccaaugggaggcugggaga

SEQ ID NO: 2296219 - RNA, 19 nt, Homo sapiens
  misc_RNA (1)...(19): siRNA sense strand
aggaagaagcagcuggagu

SEQ ID NO: 2296220 - RNA, 19 nt, Homo sapiens
  misc_RNA (1)...(19): siRNA sense strand
uccaauagaagcugugcaa

SEQ ID NO: 2296221 - RNA, 19 nt, Homo sapiens
  misc_RNA (1)...(19): siRNA sense strand
aaucguugucagagccuua

SEQ ID NO: 2296222 - RNA, 19 nt, Homo sapiens
  misc_RNA (1)...(19): siRNA sense strand
gcaagugcaaggcggaaca

SEQ ID NO: 2296223 - RNA, 19 nt, Homo sapiens
  misc_RNA (1)...(19): siRNA sense strand
ggaagaagcagcuggagug

SEQ ID NO: 2296224 - RNA, 19 nt, Homo sapiens
  misc_RNA (1)...(19): siRNA sense strand
gagagagauggcggaaaua

SEQ ID NO: 2296225 - RNA, 19 nt, Homo sapiens
  misc_RNA (1)...(19): siRNA sense strand
uguauaaggaggagcugga

SEQ ID NO: 2296226 - RNA, 19 nt, Homo sapiens
  misc_RNA (1)...(19): siRNA sense strand
uggaaauguuugcaucgaa

SEQ ID NO: 2296227 - RNA, 19 nt, Homo sapiens
  misc_RNA (1)...(19): siRNA sense strand
agagcaacaugaugcccaa

SEQ ID NO: 2296228 - RNA, 19 nt, Homo sapiens
  misc_RNA (1)...(19): siRNA sense strand
ugagaaugccagacuguca

SEQ ID NO: 2296229 - RNA, 19 nt, Homo sapiens
  misc_RNA (1)...(19): siRNA sense strand
ugucaacagugccagggaa

SEQ ID NO: 2296230 - RNA, 19 nt, Homo sapiens
  misc_RNA (1)...(19): siRNA sense strand
gggcaagugcaaggcggaa

SEQ ID NO: 2296231 - RNA, 19 nt, Homo sapiens
  misc_RNA (1)...(19): siRNA sense strand
cccaagugaggcuguauaa

SEQ ID NO: 2296232 - RNA, 19 nt, Homo sapiens
  misc_RNA (1)...(19): siRNA sense strand
agaaggaggagcugcgcga

SEQ ID NO: 2296233 - RNA, 19 nt, Homo sapiens
  misc_RNA (1)...(19): siRNA sense strand
aggacuugcuugcuaaaga

SEQ ID NO: 2296234 - RNA, 19 nt, Homo sapiens
  misc_RNA (1)...(19): siRNA sense strand
ggcgaagaagagagguuga

SEQ ID NO: 2296235 - RNA, 19 nt, Homo sapiens
  misc_RNA (1)...(19): siRNA sense strand
gagguugcucaaagaagua

SEQ ID NO: 2296236 - RNA, 19 nt, Homo sapiens
  misc_RNA (1)...(19): siRNA sense strand
ggacuaagaucaaugggau

SEQ ID NO: 2296237 - RNA, 19 nt, Homo sapiens
  misc_RNA (1)...(19): siRNA sense strand
gagaugacaaugcggguga

SEQ ID NO: 2296238 - RNA, 19 nt, Homo sapiens
  misc_RNA (1)...(19): siRNA sense strand
acgaguggacuaagaucaa

SEQ ID NO: 2296239 - RNA, 19 nt, Homo sapiens
  misc_RNA (1)...(19): siRNA sense strand
gugccuaugagaugacaau

SEQ ID NO: 2296240 - RNA, 19 nt, Homo sapiens
  misc_RNA (1)...(19): siRNA sense strand
ucaugagggcgcaaggcaa

SEQ ID NO: 2296241 - RNA, 19 nt, Homo sapiens
  misc_RNA (1)...(19): siRNA sense strand
auggacagcuauuggcaca

SEQ ID NO: 2296242 - RNA, 19 nt, Homo sapiens
  misc_RNA (1)...(19): siRNA sense strand
ugguaaagaugguggcaga

SEQ ID NO: 2296243 - RNA, 19 nt, Homo sapiens
  misc_RNA (1)...(19): siRNA sense strand
gcgaagugaaacugagaau

SEQ ID NO: 2296244 - RNA, 19 nt, Homo sapiens
  misc_RNA (1)...(19): siRNA sense strand
aggucaaggcggaagguuu

SEQ ID NO: 2296245 - RNA, 19 nt, Homo sapiens
  misc_RNA (1)...(19): siRNA sense strand
gcugguggcucaagcggua

SEQ ID NO: 2296246 - RNA, 19 nt, Homo sapiens
  misc_RNA (1)...(19): siRNA sense strand
agaucuguuucaaggcaaa

SEQ ID NO: 2296247 - RNA, 19 nt, Homo sapiens
  misc_RNA (1)...(19): siRNA sense strand
ccucaaaaccuuaagggau

SEQ ID NO: 2296248 - RNA, 19 nt, Homo sapiens
  misc_RNA (1)...(19): siRNA sense strand
ccgacguacugaaggaagu

SEQ ID NO: 2296249 - RNA, 19 nt, Homo sapiens
  misc_RNA (1)...(19): siRNA sense strand
aagcagagcucggcggaga

SEQ ID NO: 2296250 - RNA, 19 nt, Homo sapiens
  misc_RNA (1)...(19): siRNA sense strand
gcgacuggcaagagagauc

SEQ ID NO: 2296251 - RNA, 19 nt, Homo sapiens
  misc_RNA (1)...(19): siRNA sense strand
ugaaggaaguggaagugca

SEQ ID NO: 2296252 - RNA, 19 nt, Homo sapiens
  misc_RNA (1)...(19): siRNA sense strand
aggaaguggaagugcagga

SEQ ID NO: 2296253 - RNA, 19 nt, Homo sapiens
  misc_RNA (1)...(19): siRNA sense strand
uggcucaagcgguagacaa

SEQ ID NO: 2296254 - RNA, 19 nt, Homo sapiens
  misc_RNA (1)...(19): siRNA sense strand
cguacugaaggaaguggaa

SEQ ID NO: 2296255 - RNA, 19 nt, Homo sapiens
  misc_RNA (1)...(19): siRNA sense strand
gggcguugcaugagggaga

SEQ ID NO: 2296256 - RNA, 19 nt, Homo sapiens
  misc_RNA (1)...(19): siRNA sense strand
gaaauuaauggaaggaaca

SEQ ID NO: 2296257 - RNA, 19 nt, Homo sapiens
  misc_RNA (1)...(19): siRNA sense strand
guugaaaauggaagaguaa

SEQ ID NO: 2296258 - RNA, 19 nt, Homo sapiens
  misc_RNA (1)...(19): siRNA sense strand
gguugaaaauggaagagua

SEQ ID NO: 2296259 - RNA, 19 nt, Homo sapiens
  misc_RNA (1)...(19): siRNA sense strand
ggccguuguucgagagaga

SEQ ID NO: 2296260 - RNA, 19 nt, Homo sapiens
  misc_RNA (1)...(19): siRNA sense strand
agaaauuaauggaaggaac

SEQ ID NO: 2296261 - RNA, 19 nt, Homo sapiens
  misc_RNA (1)...(19): siRNA sense strand
agacaguuucaaagaggaa

SEQ ID NO: 2296262 - RNA, 19 nt, Homo sapiens
  misc_RNA (1)...(19): siRNA sense strand
agggagaaaugcaaauauu

SEQ ID NO: 2296263 - RNA, 19 nt, Homo sapiens
  misc_RNA (1)...(19): siRNA sense strand
cugacaaacuggagguaug

SEQ ID NO: 2296264 - RNA, 19 nt, Homo sapiens
  misc_RNA (1)...(19): siRNA sense strand
gaacaauuugauucagcaa

SEQ ID NO: 2296265 - RNA, 19 nt, Homo sapiens
  misc_RNA (1)...(19): siRNA sense strand
cccuguaggucccgcgaua

SEQ ID NO: 2296266 - RNA, 19 nt, Homo sapiens
  misc_RNA (1)...(19): siRNA sense strand
gcucugaugaagaaugcaa

SEQ ID NO: 2296267 - RNA, 19 nt, Homo sapiens
  misc_RNA (1)...(19): siRNA sense strand
gagagagaacugcaaguau

SEQ ID NO: 2296268 - RNA, 19 nt, Homo sapiens
  misc_RNA (1)...(19): siRNA sense strand
gaaggaacaauuugauuca

SEQ ID NO: 2296269 - RNA, 19 nt, Homo sapiens
  misc_RNA (1)...(19): siRNA sense strand
acaagugacaacaccguaa

SEQ ID NO: 2296270 - RNA, 19 nt, Homo sapiens
  misc_RNA (1)...(19): siRNA sense strand
ucaaagaggaacaugcuca

SEQ ID NO: 2296271 - RNA, 19 nt, Homo sapiens
  misc_RNA (1)...(19): siRNA sense strand
agagagaacugcaaguauc

SEQ ID NO: 2296272 - RNA, 19 nt, Homo sapiens
  misc_RNA (1)...(19): siRNA sense strand
ccccaaaaguugucagguu

SEQ ID NO: 2296273 - RNA, 19 nt, Homo sapiens
  misc_RNA (1)...(19): siRNA sense strand
gggcguugcaugagggaga

SEQ ID NO: 2296274 - RNA, 19 nt, Homo sapiens
  misc_RNA (1)...(19): siRNA sense strand
gaaauuaauggaaggaaca

SEQ ID NO: 2296275 - RNA, 19 nt, Homo sapiens
  misc_RNA (1)...(19): siRNA sense strand
guugaaaauggaagaguaa

SEQ ID NO: 2296276 - RNA, 19 nt, Homo sapiens
  misc_RNA (1)...(19): siRNA sense strand
gguugaaaauggaagagua

SEQ ID NO: 2296277 - RNA, 19 nt, Homo sapiens
  misc_RNA (1)...(19): siRNA sense strand
ggccguuguucgagagaga

SEQ ID NO: 2296278 - RNA, 19 nt, Homo sapiens
  misc_RNA (1)...(19): siRNA sense strand
agaaauuaauggaaggaac

SEQ ID NO: 2296279 - RNA, 19 nt, Homo sapiens
  misc_RNA (1)...(19): siRNA sense strand
agacaguuucaaagaggaa

SEQ ID NO: 2296280 - RNA, 19 nt, Homo sapiens
  misc_RNA (1)...(19): siRNA sense strand
agggagaaaugcaaauauu

SEQ ID NO: 2296281 - RNA, 19 nt, Homo sapiens
  misc_RNA (1)...(19): siRNA sense strand
cugacaaacuggagguaug

SEQ ID NO: 2296282 - RNA, 19 nt, Homo sapiens
  misc_RNA (1)...(19): siRNA sense strand
gaacaauuugauucagcaa

SEQ ID NO: 2296283 - RNA, 19 nt, Homo sapiens
  misc_RNA (1)...(19): siRNA sense strand
cccuguaggucccgcgaua

SEQ ID NO: 2296284 - RNA, 19 nt, Homo sapiens
  misc_RNA (1)...(19): siRNA sense strand
guucauuccaacaggguca

SEQ ID NO: 2296285 - RNA, 19 nt, Homo sapiens
  misc_RNA (1)...(19): siRNA sense strand
gcucugaugaagaaugcaa

SEQ ID NO: 2296286 - RNA, 19 nt, Homo sapiens
  misc_RNA (1)...(19): siRNA sense strand
gagagagaacugcaaguau

SEQ ID NO: 2296287 - RNA, 19 nt, Homo sapiens
  misc_RNA (1)...(19): siRNA sense strand
gaaggaacaauuugauuca

SEQ ID NO: 2296288 - RNA, 19 nt, Homo sapiens
  misc_RNA (1)...(19): siRNA sense strand
acaagugacaacaccguaa

SEQ ID NO: 2296289 - RNA, 19 nt, Homo sapiens
  misc_RNA (1)...(19): siRNA sense strand
agccacagccaaucagaua

SEQ ID NO: 2296290 - RNA, 19 nt, Homo sapiens
  misc_RNA (1)...(19): siRNA sense strand
ucaaagaggaacaugcuca

SEQ ID NO: 2296291 - RNA, 19 nt, Homo sapiens
  misc_RNA (1)...(19): siRNA sense strand
ccacagccaaucagauaau

SEQ ID NO: 2296292 - RNA, 19 nt, Homo sapiens
  misc_RNA (1)...(19): siRNA sense strand
agagagaacugcaaguauc

SEQ ID NO: 2296293 - RNA, 19 nt, Homo sapiens
  misc_RNA (1)...(19): siRNA sense strand
agcaacaacuccugcaaca

SEQ ID NO: 2296294 - RNA, 19 nt, Homo sapiens
  misc_RNA (1)...(19): siRNA sense strand
ccccaaaaguugucagguu

SEQ ID NO: 2296295 - RNA, 19 nt, Homo sapiens
  misc_RNA (1)...(19): siRNA sense strand
aagaagaguaagagcagca

SEQ ID NO: 2296296 - RNA, 19 nt, Homo sapiens
  misc_RNA (1)...(19): siRNA sense strand
agggcagcaagaagaguaa

SEQ ID NO: 2296297 - RNA, 19 nt, Homo sapiens
  misc_RNA (1)...(19): siRNA sense strand
gcaagaagaguaagagcag

SEQ ID NO: 2296298 - RNA, 19 nt, Homo sapiens
  misc_RNA (1)...(19): siRNA sense strand
uguaaauggaggaggaaau

SEQ ID NO: 2296299 - RNA, 19 nt, Homo sapiens
  misc_RNA (1)...(19): siRNA sense strand
gauuagaggaagaugauau

SEQ ID NO: 2296300 - RNA, 19 nt, Homo sapiens
  misc_RNA (1)...(19): siRNA sense strand
cuucaagauugguggcuuu

SEQ ID NO: 2296301 - RNA, 19 nt, Homo sapiens
  misc_RNA (1)...(19): siRNA sense strand
gggaagaaccggagcugga

SEQ ID NO: 2296302 - RNA, 19 nt, Homo sapiens
  misc_RNA (1)...(19): siRNA sense strand
gcuaaaugucacuguaaau

SEQ ID NO: 2296303 - RNA, 19 nt, Homo sapiens
  misc_RNA (1)...(19): siRNA sense strand
ggagauuagaggaagauga

SEQ ID NO: 2296304 - RNA, 19 nt, Homo sapiens
  misc_RNA (1)...(19): siRNA sense strand
cuggauggagauaggaaua

SEQ ID NO: 2296305 - RNA, 19 nt, Homo sapiens
  misc_RNA (1)...(19): siRNA sense strand
aggaagacugaaagaauau

SEQ ID NO: 2296306 - RNA, 19 nt, Homo sapiens
  misc_RNA (1)...(19): siRNA sense strand
gguuuuagauucaggaaga

SEQ ID NO: 2296307 - RNA, 19 nt, Homo sapiens
  misc_RNA (1)...(19): siRNA sense strand
uguccaaugaugugaacaa

SEQ ID NO: 2296308 - RNA, 19 nt, Homo sapiens
  misc_RNA (1)...(19): siRNA sense strand
ggauaaugaggaaagugaa

SEQ ID NO: 2296309 - RNA, 19 nt, Homo sapiens
  misc_RNA (1)...(19): siRNA sense strand
gggcauacaaagcagaaga

SEQ ID NO: 2296310 - RNA, 19 nt, Homo sapiens
  misc_RNA (1)...(19): siRNA sense strand
gucagaacccgaagguaaa

SEQ ID NO: 2296311 - RNA, 19 nt, Homo sapiens
  misc_RNA (1)...(19): siRNA sense strand
gagugauaaucuuugacaa

SEQ ID NO: 2296312 - RNA, 19 nt, Homo sapiens
  misc_RNA (1)...(19): siRNA sense strand
ccguguaccaggaggugaa

SEQ ID NO: 2296313 - RNA, 19 nt, Homo sapiens
  misc_RNA (1)...(19): siRNA sense strand
ucgacaaagugcugaaguu

SEQ ID NO: 2296314 - RNA, 19 nt, Homo sapiens
  misc_RNA (1)...(19): siRNA sense strand
ggauacugaauuagcagaa

SEQ ID NO: 2296315 - RNA, 19 nt, Homo sapiens
  misc_RNA (1)...(19): siRNA sense strand
gcacacagauugaacacca

SEQ ID NO: 2296316 - RNA, 19 nt, Homo sapiens
  misc_RNA (1)...(19): siRNA sense strand
aggauaaugaggaaaguga

SEQ ID NO: 2296317 - RNA, 19 nt, Homo sapiens
  misc_RNA (1)...(19): siRNA sense strand
aaagaagcaccuugggaau

SEQ ID NO: 2296318 - RNA, 19 nt, Homo sapiens
  misc_RNA (1)...(19): siRNA sense strand
ccaaaguaauccagcccau

SEQ ID NO: 2296319 - RNA, 19 nt, Homo sapiens
  misc_RNA (1)...(19): siRNA sense strand
uggcauagcaagaucucua

SEQ ID NO: 2296320 - RNA, 19 nt, Homo sapiens
  misc_RNA (1)...(19): siRNA sense strand
gagaggaguugcaaggguu

SEQ ID NO: 2296321 - RNA, 19 nt, Homo sapiens
  misc_RNA (1)...(19): siRNA sense strand
uaaugaggaaagugaacaa

SEQ ID NO: 2296322 - RNA, 19 nt, Homo sapiens
  misc_RNA (1)...(19): siRNA sense strand
caauuuuaguguuggacaa

SEQ ID NO: 2296323 - RNA, 19 nt, Homo sapiens
  misc_RNA (1)...(19): siRNA sense strand
ggaccaugaaugaaguuau

SEQ ID NO: 2296324 - RNA, 19 nt, Homo sapiens
  misc_RNA (1)...(19): siRNA sense strand
uuuacaagauggugcaaca

SEQ ID NO: 2296325 - RNA, 19 nt, Homo sapiens
  misc_RNA (1)...(19): siRNA sense strand
uaaacggagauuagaggaa

SEQ ID NO: 2296326 - RNA, 19 nt, Homo sapiens
  misc_RNA (1)...(19): siRNA sense strand
ggacaaagacaacuggugu

SEQ ID NO: 2296327 - RNA, 19 nt, Homo sapiens
  misc_RNA (1)...(19): siRNA sense strand
ucauaaaguguuacuggaa

SEQ ID NO: 2296328 - RNA, 19 nt, Homo sapiens
  misc_RNA (1)...(19): siRNA sense strand
gcauggaagaauugccuau

SEQ ID NO: 2296329 - RNA, 19 nt, Homo sapiens
  misc_RNA (1)...(19): siRNA sense strand
caaaauaaagagagccuau

SEQ ID NO: 2296330 - RNA, 19 nt, Homo sapiens
  misc_RNA (1)...(19): siRNA sense strand
gaagagaggugucaggaac

SEQ ID NO: 2296331 - RNA, 19 nt, Homo sapiens
  misc_RNA (1)...(19): siRNA sense strand
aggaaagugccaaaguaau

SEQ ID NO: 2296332 - RNA, 19 nt, Homo sapiens
  misc_RNA (1)...(19): siRNA sense strand
uuugcuacuugaugagaua

SEQ ID NO: 2296333 - RNA, 19 nt, Homo sapiens
  misc_RNA (1)...(19): siRNA sense strand
ggucccugauucuggcaaa

SEQ ID NO: 2296334 - RNA, 19 nt, Homo sapiens
  misc_RNA (1)...(19): siRNA sense strand
cuguaaauggaggaggaaa

SEQ ID NO: 2296335 - RNA, 19 nt, Homo sapiens
  misc_RNA (1)...(19): siRNA sense strand
agaagagaggugucaggaa

SEQ ID NO: 2296336 - RNA, 19 nt, Homo sapiens
  misc_RNA (1)...(19): siRNA sense strand
ggauuuacauucagaggcu

SEQ ID NO: 2296337 - RNA, 19 nt, Homo sapiens
  misc_RNA (1)...(19): siRNA sense strand
gcucacagcaccuuggaga

SEQ ID NO: 2296338 - RNA, 19 nt, Homo sapiens
  misc_RNA (1)...(19): siRNA sense strand
gccaagauacagagaaugu

SEQ ID NO: 2296339 - RNA, 19 nt, Homo sapiens
  misc_RNA (1)...(19): siRNA sense strand
aaauggaggaggaaaugua

SEQ ID NO: 2296340 - RNA, 19 nt, Homo sapiens
  misc_RNA (1)...(19): siRNA sense strand
ggccauaaacggagauuag

SEQ ID NO: 2296341 - RNA, 19 nt, Homo sapiens
  misc_RNA (1)...(19): siRNA sense strand
uggcuuucauacugggcaa

SEQ ID NO: 2296342 - RNA, 19 nt, Homo sapiens
  misc_RNA (1)...(19): siRNA sense strand
ggauaaggcaucagagacc

SEQ ID NO: 2296343 - RNA, 19 nt, Homo sapiens
  misc_RNA (1)...(19): siRNA sense strand
ggcagaaagcacggguaaa

SEQ ID NO: 2296344 - RNA, 19 nt, Homo sapiens
  misc_RNA (1)...(19): siRNA sense strand
uuacacuaucagaggagaa

SEQ ID NO: 2296345 - RNA, 19 nt, Homo sapiens
  misc_RNA (1)...(19): siRNA sense strand
acuggaacaaugaggaaaa

SEQ ID NO: 2296346 - RNA, 19 nt, Homo sapiens
  misc_RNA (1)...(19): siRNA sense strand
ccauggauucuguggcuuu

SEQ ID NO: 2296347 - RNA, 19 nt, Homo sapiens
  misc_RNA (1)...(19): siRNA sense strand
uugcaagagcaguguauca

SEQ ID NO: 2296348 - RNA, 19 nt, Homo sapiens
  misc_RNA (1)...(19): siRNA sense strand
cacuguaaauggaggagga

SEQ ID NO: 2296349 - RNA, 19 nt, Homo sapiens
  misc_RNA (1)...(19): siRNA sense strand
gguaaaauggauacugaau

SEQ ID NO: 2296350 - RNA, 19 nt, Homo sapiens
  misc_RNA (1)...(19): siRNA sense strand
ggucagcgugcauggaaga

SEQ ID NO: 2296351 - RNA, 19 nt, Homo sapiens
  misc_RNA (1)...(19): siRNA sense strand
uuggaaacgucaagagaug

SEQ ID NO: 2296352 - RNA, 19 nt, Homo sapiens
  misc_RNA (1)...(19): siRNA sense strand
agaaagggucauugaauac

SEQ ID NO: 2296353 - RNA, 19 nt, Homo sapiens
  misc_RNA (1)...(19): siRNA sense strand
cggcaaauguggauccaag

SEQ ID NO: 2296354 - RNA, 19 nt, Homo sapiens
  misc_RNA (1)...(19): siRNA sense strand
aauuugagaaagaaggaga

SEQ ID NO: 2296355 - RNA, 19 nt, Homo sapiens
  misc_RNA (1)...(19): siRNA sense strand
ccaggaacucccacacuaa

SEQ ID NO: 2296356 - RNA, 19 nt, Homo sapiens
  misc_RNA (1)...(19): siRNA sense strand
cccaugaaggagugauaau

SEQ ID NO: 2296357 - RNA, 19 nt, Homo sapiens
  misc_RNA (1)...(19): siRNA sense strand
ccacaugguuacaaacacu

SEQ ID NO: 2296358 - RNA, 19 nt, Homo sapiens
  misc_RNA (1)...(19): siRNA sense strand
gagcugagaaugacgcaca

SEQ ID NO: 2296359 - RNA, 19 nt, Homo sapiens
  misc_RNA (1)...(19): siRNA sense strand
aauugaggaaagugccaaa

SEQ ID NO: 2296360 - RNA, 19 nt, Homo sapiens
  misc_RNA (1)...(19): siRNA sense strand
ccucaaagcugcaagucag

SEQ ID NO: 2296361 - RNA, 19 nt, Homo sapiens
  misc_RNA (1)...(19): siRNA sense strand
ggcucaaucccuuguuuaa

SEQ ID NO: 2296362 - RNA, 19 nt, Homo sapiens
  misc_RNA (1)...(19): siRNA sense strand
ucacuggaacaaugaggaa

SEQ ID NO: 2296363 - RNA, 19 nt, Homo sapiens
  misc_RNA (1)...(19): siRNA sense strand
cagggcaauucucaggaaa

SEQ ID NO: 2296364 - RNA, 19 nt, Homo sapiens
  misc_RNA (1)...(19): siRNA sense strand
agaugagcccugaggacau

SEQ ID NO: 2296365 - RNA, 19 nt, Homo sapiens
  misc_RNA (1)...(19): siRNA sense strand
gcgagauagacgagagccu

SEQ ID NO: 2296366 - RNA, 19 nt, Homo sapiens
  misc_RNA (1)...(19): siRNA sense strand
uggccuuggcacagaagaa

SEQ ID NO: 2296367 - RNA, 19 nt, Homo sapiens
  misc_RNA (1)...(19): siRNA sense strand
cuggagacccugaaggcuu

SEQ ID NO: 2296368 - RNA, 19 nt, Homo sapiens
  misc_RNA (1)...(19): siRNA sense strand
gagauagacgagagccuca

SEQ ID NO: 2296369 - RNA, 19 nt, Homo sapiens
  misc_RNA (1)...(19): siRNA sense strand
auaaacuggaugagcucua

SEQ ID NO: 2296370 - RNA, 19 nt, Homo sapiens
  misc_RNA (1)...(19): siRNA sense strand
gcauaaacuggaugagcuc

SEQ ID NO: 2296371 - RNA, 19 nt, Homo sapiens
  misc_RNA (1)...(19): siRNA sense strand
uggaugagcucuacccaca

SEQ ID NO: 2296372 - RNA, 19 nt, Homo sapiens
  misc_RNA (1)...(19): siRNA sense strand
agaugagcccugaggacau

SEQ ID NO: 2296373 - RNA, 19 nt, Homo sapiens
  misc_RNA (1)...(19): siRNA sense strand
gcgagauagacgagagccu

SEQ ID NO: 2296374 - RNA, 19 nt, Homo sapiens
  misc_RNA (1)...(19): siRNA sense strand
uggccuuggcacagaagaa

SEQ ID NO: 2296375 - RNA, 19 nt, Homo sapiens
  misc_RNA (1)...(19): siRNA sense strand
cuggagacccugaaggcuu

SEQ ID NO: 2296376 - RNA, 19 nt, Homo sapiens
  misc_RNA (1)...(19): siRNA sense strand
gagauagacgagagccuca

SEQ ID NO: 2296377 - RNA, 19 nt, Homo sapiens
  misc_RNA (1)...(19): siRNA sense strand
auaaacuggaugagcucua

SEQ ID NO: 2296378 - RNA, 19 nt, Homo sapiens
  misc_RNA (1)...(19): siRNA sense strand
gcauaaacuggaugagcuc

SEQ ID NO: 2296379 - RNA, 19 nt, Homo sapiens
  misc_RNA (1)...(19): siRNA sense strand
uggaugagcucuacccaca

SEQ ID NO: 2296380 - RNA, 19 nt, Homo sapiens
  misc_RNA (1)...(19): siRNA sense strand
agauagaggcugaugacaa

SEQ ID NO: 2296381 - RNA, 19 nt, Homo sapiens
  misc_RNA (1)...(19): siRNA sense strand
aguccauaguagaugauaa

SEQ ID NO: 2296382 - RNA, 19 nt, Homo sapiens
  misc_RNA (1)...(19): siRNA sense strand
agacaagaaacgagagcga

SEQ ID NO: 2296383 - RNA, 19 nt, Homo sapiens
  misc_RNA (1)...(19): siRNA sense strand
gagaaggagaagcggagaa

SEQ ID NO: 2296384 - RNA, 19 nt, Homo sapiens
  misc_RNA (1)...(19): siRNA sense strand
cagaaugcaguuagugaaa

SEQ ID NO: 2296385 - RNA, 19 nt, Homo sapiens
  misc_RNA (1)...(19): siRNA sense strand
guccauaguagaugauaaa

SEQ ID NO: 2296386 - RNA, 19 nt, Homo sapiens
  misc_RNA (1)...(19): siRNA sense strand
gugaagaacaggaacguga

SEQ ID NO: 2296387 - RNA, 19 nt, Homo sapiens
  misc_RNA (1)...(19): siRNA sense strand
gggacuguuuggaaguaaa

SEQ ID NO: 2296388 - RNA, 19 nt, Homo sapiens
  misc_RNA (1)...(19): siRNA sense strand
caggaaaagaugaaugaaa

SEQ ID NO: 2296389 - RNA, 19 nt, Homo sapiens
  misc_RNA (1)...(19): siRNA sense strand
ucucugaaauggaggccua

SEQ ID NO: 2296390 - RNA, 19 nt, Homo sapiens
  misc_RNA (1)...(19): siRNA sense strand
ggaugauguaguacguaaa

SEQ ID NO: 2296391 - RNA, 19 nt, Homo sapiens
  misc_RNA (1)...(19): siRNA sense strand
cagggaaaaccaagagaaa

SEQ ID NO: 2296392 - RNA, 19 nt, Homo sapiens
  misc_RNA (1)...(19): siRNA sense strand
aaaacaaaggacagggaaa

SEQ ID NO: 2296393 - RNA, 19 nt, Homo sapiens
  misc_RNA (1)...(19): siRNA sense strand
cggaaacggaugaagauga

SEQ ID NO: 2296394 - RNA, 19 nt, Homo sapiens
  misc_RNA (1)...(19): siRNA sense strand
auucagaagaugauggauu

SEQ ID NO: 2296395 - RNA, 19 nt, Homo sapiens
  misc_RNA (1)...(19): siRNA sense strand
uagaagauuuagaggagga

SEQ ID NO: 2296396 - RNA, 19 nt, Homo sapiens
  misc_RNA (1)...(19): siRNA sense strand
augaugaggaggaggaaga

SEQ ID NO: 2296397 - RNA, 19 nt, Homo sapiens
  misc_RNA (1)...(19): siRNA sense strand
gugaugaagacauaacaaa

SEQ ID NO: 2296398 - RNA, 19 nt, Homo sapiens
  misc_RNA (1)...(19): siRNA sense strand
agaacuaaguauuucggaa

SEQ ID NO: 2296399 - RNA, 19 nt, Homo sapiens
  misc_RNA (1)...(19): siRNA sense strand
gcguuuaaccuuagaccau

SEQ ID NO: 2296400 - RNA, 19 nt, Homo sapiens
  misc_RNA (1)...(19): siRNA sense strand
gggaaaaccaagagaaaag

SEQ ID NO: 2296401 - RNA, 19 nt, Homo sapiens
  misc_RNA (1)...(19): siRNA sense strand
gaccaugagaagaguaaau

SEQ ID NO: 2296402 - RNA, 19 nt, Homo sapiens
  misc_RNA (1)...(19): siRNA sense strand
aauuggaacagcagagcaa

SEQ ID NO: 2296403 - RNA, 19 nt, Homo sapiens
  misc_RNA (1)...(19): siRNA sense strand
aagcagaagaacuaaguau

SEQ ID NO: 2296404 - RNA, 19 nt, Homo sapiens
  misc_RNA (1)...(19): siRNA sense strand
agaagaaaauccagaacau

SEQ ID NO: 2296405 - RNA, 19 nt, Homo sapiens
  misc_RNA (1)...(19): siRNA sense strand
uguagaucaagcagggaaa

SEQ ID NO: 2296406 - RNA, 19 nt, Homo sapiens
  misc_RNA (1)...(19): siRNA sense strand
cugaagaagaagcagaaga

SEQ ID NO: 2296407 - RNA, 19 nt, Homo sapiens
  misc_RNA (1)...(19): siRNA sense strand
aaacaguagcuucggagaa

SEQ ID NO: 2296408 - RNA, 19 nt, Homo sapiens
  misc_RNA (1)...(19): siRNA sense strand
aaacaaaggacagggaaaa

SEQ ID NO: 2296409 - RNA, 19 nt, Homo sapiens
  misc_RNA (1)...(19): siRNA sense strand
aagaagaagcagaagaacu

SEQ ID NO: 2296410 - RNA, 19 nt, Homo sapiens
  misc_RNA (1)...(19): siRNA sense strand
aaacgagagcgaaggaaaa

SEQ ID NO: 2296411 - RNA, 19 nt, Homo sapiens
  misc_RNA (1)...(19): siRNA sense strand
acaggaacgugaagaggau

SEQ ID NO: 2296412 - RNA, 19 nt, Homo sapiens
  misc_RNA (1)...(19): siRNA sense strand
ggguaaugaugauccugaa

SEQ ID NO: 2296413 - RNA, 19 nt, Homo sapiens
  misc_RNA (1)...(19): siRNA sense strand
auuuagaggaggaggaagu

SEQ ID NO: 2296414 - RNA, 19 nt, Homo sapiens
  misc_RNA (1)...(19): siRNA sense strand
aagaggaugcauaugaaua

SEQ ID NO: 2296415 - RNA, 19 nt, Homo sapiens
  misc_RNA (1)...(19): siRNA sense strand
ucacgauucaagagggauu

SEQ ID NO: 2296416 - RNA, 19 nt, Homo sapiens
  misc_RNA (1)...(19): siRNA sense strand
cgccuguaccagagauuaa

SEQ ID NO: 2296417 - RNA, 19 nt, Homo sapiens
  misc_RNA (1)...(19): siRNA sense strand
agaaggagaagcggagaaa

SEQ ID NO: 2296418 - RNA, 19 nt, Homo sapiens
  misc_RNA (1)...(19): siRNA sense strand
ugauguaguacguaaagaa

SEQ ID NO: 2296419 - RNA, 19 nt, Homo sapiens
  misc_RNA (1)...(19): siRNA sense strand
ccuagaagauuuagaggag

SEQ ID NO: 2296420 - RNA, 19 nt, Homo sapiens
  misc_RNA (1)...(19): siRNA sense strand
gguaaugaugauccugaaa

SEQ ID NO: 2296421 - RNA, 19 nt, Homo sapiens
  misc_RNA (1)...(19): siRNA sense strand
caucaaacucaaccagcaa

SEQ ID NO: 2296422 - RNA, 19 nt, Homo sapiens
  misc_RNA (1)...(19): siRNA sense strand
aggaugaagguaaagacaa

SEQ ID NO: 2296423 - RNA, 19 nt, Homo sapiens
  misc_RNA (1)...(19): siRNA sense strand
agguaaaaguuccagaaau

SEQ ID NO: 2296424 - RNA, 19 nt, Homo sapiens
  misc_RNA (1)...(19): siRNA sense strand
augaaauugcugaagaaga

SEQ ID NO: 2296425 - RNA, 19 nt, Homo sapiens
  misc_RNA (1)...(19): siRNA sense strand
cagcagagcaaggugcaaa

SEQ ID NO: 2296426 - RNA, 19 nt, Homo sapiens
  misc_RNA (1)...(19): siRNA sense strand
auggaggccuauuuagaaa

SEQ ID NO: 2296427 - RNA, 19 nt, Homo sapiens
  misc_RNA (1)...(19): siRNA sense strand
gggaagugacagcacagaa

SEQ ID NO: 2296428 - RNA, 19 nt, Homo sapiens
  misc_RNA (1)...(19): siRNA sense strand
aguuaaaacagcugaccaa

SEQ ID NO: 2296429 - RNA, 19 nt, Homo sapiens
  misc_RNA (1)...(19): siRNA sense strand
gagaaaaguccauaguaga

SEQ ID NO: 2296430 - RNA, 19 nt, Homo sapiens
  misc_RNA (1)...(19): siRNA sense strand
augaggaggaggaagauau

SEQ ID NO: 2296431 - RNA, 19 nt, Homo sapiens
  misc_RNA (1)...(19): siRNA sense strand
ggauucaaacaaagaagau

SEQ ID NO: 2296432 - RNA, 19 nt, Homo sapiens
  misc_RNA (1)...(19): siRNA sense strand
ccggauggcaccugugauu

SEQ ID NO: 2296433 - RNA, 19 nt, Homo sapiens
  misc_RNA (1)...(19): siRNA sense strand
ccagaggagaucaaggaga

SEQ ID NO: 2296434 - RNA, 19 nt, Homo sapiens
  misc_RNA (1)...(19): siRNA sense strand
guguagaucaagcagggaa

SEQ ID NO: 2296435 - RNA, 19 nt, Homo sapiens
  misc_RNA (1)...(19): siRNA sense strand
aagcagggaaauacagcaa

SEQ ID NO: 2296436 - RNA, 19 nt, Homo sapiens
  misc_RNA (1)...(19): siRNA sense strand
aaaucugaucugaggaaaa

SEQ ID NO: 2296437 - RNA, 19 nt, Homo sapiens
  misc_RNA (1)...(19): siRNA sense strand
ggauaagagaucaggcuug

SEQ ID NO: 2296438 - RNA, 19 nt, Homo sapiens
  misc_RNA (1)...(19): siRNA sense strand
gaugcaaagaaaacagaaa

SEQ ID NO: 2296439 - RNA, 19 nt, Homo sapiens
  misc_RNA (1)...(19): siRNA sense strand
gugaaauaccaguuggaaa

SEQ ID NO: 2296440 - RNA, 19 nt, Homo sapiens
  misc_RNA (1)...(19): siRNA sense strand
caacaaaggaagaggccga

SEQ ID NO: 2296441 - RNA, 19 nt, Homo sapiens
  misc_RNA (1)...(19): siRNA sense strand
guucaaugucuguggagaa

SEQ ID NO: 2296442 - RNA, 19 nt, Homo sapiens
  misc_RNA (1)...(19): siRNA sense strand
ggguagaagaucuuguaaa

SEQ ID NO: 2296443 - RNA, 19 nt, Homo sapiens
  misc_RNA (1)...(19): siRNA sense strand
ugaaauaccaguuggaaaa

SEQ ID NO: 2296444 - RNA, 19 nt, Homo sapiens
  misc_RNA (1)...(19): siRNA sense strand
aggaacaacuuuaagggua

SEQ ID NO: 2296445 - RNA, 19 nt, Homo sapiens
  misc_RNA (1)...(19): siRNA sense strand
cguauuaaagggaggaaga

SEQ ID NO: 2296446 - RNA, 19 nt, Homo sapiens
  misc_RNA (1)...(19): siRNA sense strand
aaacaggagaagagaucaa

SEQ ID NO: 2296447 - RNA, 19 nt, Homo sapiens
  misc_RNA (1)...(19): siRNA sense strand
ggacuauaguggagguuuu

SEQ ID NO: 2296448 - RNA, 19 nt, Homo sapiens
  misc_RNA (1)...(19): siRNA sense strand
agagaucaacuuugggaaa

SEQ ID NO: 2296449 - RNA, 19 nt, Homo sapiens
  misc_RNA (1)...(19): siRNA sense strand
cagaaagagggauggguga

SEQ ID NO: 2296450 - RNA, 19 nt, Homo sapiens
  misc_RNA (1)...(19): siRNA sense strand
gaucaaaggugguccagca

SEQ ID NO: 2296451 - RNA, 19 nt, Homo sapiens
  misc_RNA (1)...(19): siRNA sense strand
cauugaggaauuagugaaa

SEQ ID NO: 2296452 - RNA, 19 nt, Homo sapiens
  misc_RNA (1)...(19): siRNA sense strand
augaaaggcucuaucgaau

SEQ ID NO: 2296453 - RNA, 19 nt, Homo sapiens
  misc_RNA (1)...(19): siRNA sense strand
aggaagaugaauaugcaua

SEQ ID NO: 2296454 - RNA, 19 nt, Homo sapiens
  misc_RNA (1)...(19): siRNA sense strand
ggaacaacuuuaaggguag

SEQ ID NO: 2296455 - RNA, 19 nt, Homo sapiens
  misc_RNA (1)...(19): siRNA sense strand
uuucaggcauagagaacaa

SEQ ID NO: 2296456 - RNA, 19 nt, Homo sapiens
  misc_RNA (1)...(19): siRNA sense strand
cagaggugauugagguaga

SEQ ID NO: 2296457 - RNA, 19 nt, Homo sapiens
  misc_RNA (1)...(19): siRNA sense strand
gccucgaguuauuaagaaa

SEQ ID NO: 2296458 - RNA, 19 nt, Homo sapiens
  misc_RNA (1)...(19): siRNA sense strand
guuuaguauucauggcaau

SEQ ID NO: 2296459 - RNA, 19 nt, Homo sapiens
  misc_RNA (1)...(19): siRNA sense strand
gcauagagaacaaaaggaa

SEQ ID NO: 2296460 - RNA, 19 nt, Homo sapiens
  misc_RNA (1)...(19): siRNA sense strand
aggaagaggucgaagaggu

SEQ ID NO: 2296461 - RNA, 19 nt, Homo sapiens
  misc_RNA (1)...(19): siRNA sense strand
ugaaaaugcugaacgggaa

SEQ ID NO: 2296462 - RNA, 19 nt, Homo sapiens
  misc_RNA (1)...(19): siRNA sense strand
caucagaacaggaguaaac

SEQ ID NO: 2296463 - RNA, 19 nt, Homo sapiens
  misc_RNA (1)...(19): siRNA sense strand
ggugauugagguagaugaa

SEQ ID NO: 2296464 - RNA, 19 nt, Homo sapiens
  misc_RNA (1)...(19): siRNA sense strand
aggucgaagagguggaaga

SEQ ID NO: 2296465 - RNA, 19 nt, Homo sapiens
  misc_RNA (1)...(19): siRNA sense strand
cuaaugaagaagaugauga

SEQ ID NO: 2296466 - RNA, 19 nt, Homo sapiens
  misc_RNA (1)...(19): siRNA sense strand
auuaaagggaggaagauga

SEQ ID NO: 2296467 - RNA, 19 nt, Homo sapiens
  misc_RNA (1)...(19): siRNA sense strand
gcuaacagaaagagggaug

SEQ ID NO: 2296468 - RNA, 19 nt, Homo sapiens
  misc_RNA (1)...(19): siRNA sense strand
cuuuaaggguagaagaucu

SEQ ID NO: 2296469 - RNA, 19 nt, Homo sapiens
  misc_RNA (1)...(19): siRNA sense strand
ccgaggaagaggucgaaga

SEQ ID NO: 2296470 - RNA, 19 nt, Homo sapiens
  misc_RNA (1)...(19): siRNA sense strand
ugaacuaucaagauggcaa

SEQ ID NO: 2296471 - RNA, 19 nt, Homo sapiens
  misc_RNA (1)...(19): siRNA sense strand
caucuuggauuuauggaga

SEQ ID NO: 2296472 - RNA, 19 nt, Homo sapiens
  misc_RNA (1)...(19): siRNA sense strand
gcagcaaccaacaaaggaa

SEQ ID NO: 2296473 - RNA, 19 nt, Homo sapiens
  misc_RNA (1)...(19): siRNA sense strand
aauaagcccucaaggaaaa

SEQ ID NO: 2296474 - RNA, 19 nt, Homo sapiens
  misc_RNA (1)...(19): siRNA sense strand
gaaaauauuguauggguga

SEQ ID NO: 2296475 - RNA, 19 nt, Homo sapiens
  misc_RNA (1)...(19): siRNA sense strand
uuggauuuauggagaaaga

SEQ ID NO: 2296476 - RNA, 19 nt, Homo sapiens
  misc_RNA (1)...(19): siRNA sense strand
ccauugaggaauuagugaa

SEQ ID NO: 2296477 - RNA, 19 nt, Homo sapiens
  misc_RNA (1)...(19): siRNA sense strand
agaugaaucagauguggaa

SEQ ID NO: 2296478 - RNA, 19 nt, Homo sapiens
  misc_RNA (1)...(19): siRNA sense strand
augaaucagauguggaaga

SEQ ID NO: 2296479 - RNA, 19 nt, Homo sapiens
  misc_RNA (1)...(19): siRNA sense strand
uguugagaccaaaggaaga

SEQ ID NO: 2296480 - RNA, 19 nt, Homo sapiens
  misc_RNA (1)...(19): siRNA sense strand
aggauauuguucuagcuaa

SEQ ID NO: 2296481 - RNA, 19 nt, Homo sapiens
  misc_RNA (1)...(19): siRNA sense strand
caaaggaagaugagaacuc

SEQ ID NO: 2296482 - RNA, 19 nt, Homo sapiens
  misc_RNA (1)...(19): siRNA sense strand
agaaagagggaugggugaa

SEQ ID NO: 2296483 - RNA, 19 nt, Homo sapiens
  misc_RNA (1)...(19): siRNA sense strand
ccagagucaaguaucgaaa

SEQ ID NO: 2296484 - RNA, 19 nt, Homo sapiens
  misc_RNA (1)...(19): siRNA sense strand
uuuaaguugugcuggauuu

SEQ ID NO: 2296485 - RNA, 19 nt, Homo sapiens
  misc_RNA (1)...(19): siRNA sense strand
augaagaagaugaugaagu

SEQ ID NO: 2296486 - RNA, 19 nt, Homo sapiens
  misc_RNA (1)...(19): siRNA sense strand
ggagggucucaaagaggaa

SEQ ID NO: 2296487 - RNA, 19 nt, Homo sapiens
  misc_RNA (1)...(19): siRNA sense strand
cauagagaacaaaaggaaa

SEQ ID NO: 2296488 - RNA, 19 nt, Homo sapiens
  misc_RNA (1)...(19): siRNA sense strand
cuuuagugcugaugaccuu

SEQ ID NO: 2296489 - RNA, 19 nt, Homo sapiens
  misc_RNA (1)...(19): siRNA sense strand
aggaauuagugaaauacca

SEQ ID NO: 2296490 - RNA, 19 nt, Homo sapiens
  misc_RNA (1)...(19): siRNA sense strand
aguaaguuuccauggguga

SEQ ID NO: 2296491 - RNA, 19 nt, Homo sapiens
  misc_RNA (1)...(19): siRNA sense strand
uuaaagggaggaagaugaa

SEQ ID NO: 2296492 - RNA, 19 nt, Homo sapiens
  misc_RNA (1)...(19): siRNA sense strand
aguuugaaauucucaguga

SEQ ID NO: 2296493 - RNA, 19 nt, Homo sapiens
  misc_RNA (1)...(19): siRNA sense strand
aagcacaaagauugcgcua

SEQ ID NO: 2296494 - RNA, 19 nt, Homo sapiens
  misc_RNA (1)...(19): siRNA sense strand
gugaggaugaugaugauga

SEQ ID NO: 2296495 - RNA, 19 nt, Homo sapiens
  misc_RNA (1)...(19): siRNA sense strand
gugaaauaccaguuggaaa

SEQ ID NO: 2296496 - RNA, 19 nt, Homo sapiens
  misc_RNA (1)...(19): siRNA sense strand
caacaaaggaagaggccga

SEQ ID NO: 2296497 - RNA, 19 nt, Homo sapiens
  misc_RNA (1)...(19): siRNA sense strand
guucaaugucuguggagaa

SEQ ID NO: 2296498 - RNA, 19 nt, Homo sapiens
  misc_RNA (1)...(19): siRNA sense strand
ggguagaagaucuuguaaa

SEQ ID NO: 2296499 - RNA, 19 nt, Homo sapiens
  misc_RNA (1)...(19): siRNA sense strand
ugaaauaccaguuggaaaa

SEQ ID NO: 2296500 - RNA, 19 nt, Homo sapiens
  misc_RNA (1)...(19): siRNA sense strand
aggaacaacuuuaagggua

SEQ ID NO: 2296501 - RNA, 19 nt, Homo sapiens
  misc_RNA (1)...(19): siRNA sense strand
cguauuaaagggaggaaga

SEQ ID NO: 2296502 - RNA, 19 nt, Homo sapiens
  misc_RNA (1)...(19): siRNA sense strand
aaacaggagaagagaucaa

SEQ ID NO: 2296503 - RNA, 19 nt, Homo sapiens
  misc_RNA (1)...(19): siRNA sense strand
ggacuauaguggagguuuu

SEQ ID NO: 2296504 - RNA, 19 nt, Homo sapiens
  misc_RNA (1)...(19): siRNA sense strand
agagaucaacuuugggaaa

SEQ ID NO: 2296505 - RNA, 19 nt, Homo sapiens
  misc_RNA (1)...(19): siRNA sense strand
cagaaagagggauggguga

SEQ ID NO: 2296506 - RNA, 19 nt, Homo sapiens
  misc_RNA (1)...(19): siRNA sense strand
gaucaaaggugguccagca

SEQ ID NO: 2296507 - RNA, 19 nt, Homo sapiens
  misc_RNA (1)...(19): siRNA sense strand
cauugaggaauuagugaaa

SEQ ID NO: 2296508 - RNA, 19 nt, Homo sapiens
  misc_RNA (1)...(19): siRNA sense strand
augaaaggcucuaucgaau

SEQ ID NO: 2296509 - RNA, 19 nt, Homo sapiens
  misc_RNA (1)...(19): siRNA sense strand
aggaagaugaauaugcaua

SEQ ID NO: 2296510 - RNA, 19 nt, Homo sapiens
  misc_RNA (1)...(19): siRNA sense strand
ggaacaacuuuaaggguag

SEQ ID NO: 2296511 - RNA, 19 nt, Homo sapiens
  misc_RNA (1)...(19): siRNA sense strand
uuucaggcauagagaacaa

SEQ ID NO: 2296512 - RNA, 19 nt, Homo sapiens
  misc_RNA (1)...(19): siRNA sense strand
cagaggugauugagguaga

SEQ ID NO: 2296513 - RNA, 19 nt, Homo sapiens
  misc_RNA (1)...(19): siRNA sense strand
gccucgaguuauuaagaaa

SEQ ID NO: 2296514 - RNA, 19 nt, Homo sapiens
  misc_RNA (1)...(19): siRNA sense strand
guuuaguauucauggcaau

SEQ ID NO: 2296515 - RNA, 19 nt, Homo sapiens
  misc_RNA (1)...(19): siRNA sense strand
gcauagagaacaaaaggaa

SEQ ID NO: 2296516 - RNA, 19 nt, Homo sapiens
  misc_RNA (1)...(19): siRNA sense strand
aggaagaggucgaagaggu

SEQ ID NO: 2296517 - RNA, 19 nt, Homo sapiens
  misc_RNA (1)...(19): siRNA sense strand
ugaaaaugcugaacgggaa

SEQ ID NO: 2296518 - RNA, 19 nt, Homo sapiens
  misc_RNA (1)...(19): siRNA sense strand
caucagaacaggaguaaac

SEQ ID NO: 2296519 - RNA, 19 nt, Homo sapiens
  misc_RNA (1)...(19): siRNA sense strand
ggugauugagguagaugaa

SEQ ID NO: 2296520 - RNA, 19 nt, Homo sapiens
  misc_RNA (1)...(19): siRNA sense strand
aggucgaagagguggaaga

SEQ ID NO: 2296521 - RNA, 19 nt, Homo sapiens
  misc_RNA (1)...(19): siRNA sense strand
cuaaugaagaagaugauga

SEQ ID NO: 2296522 - RNA, 19 nt, Homo sapiens
  misc_RNA (1)...(19): siRNA sense strand
auuaaagggaggaagauga

SEQ ID NO: 2296523 - RNA, 19 nt, Homo sapiens
  misc_RNA (1)...(19): siRNA sense strand
gcuaacagaaagagggaug

SEQ ID NO: 2296524 - RNA, 19 nt, Homo sapiens
  misc_RNA (1)...(19): siRNA sense strand
cuuuaaggguagaagaucu

SEQ ID NO: 2296525 - RNA, 19 nt, Homo sapiens
  misc_RNA (1)...(19): siRNA sense strand
ccgaggaagaggucgaaga

SEQ ID NO: 2296526 - RNA, 19 nt, Homo sapiens
  misc_RNA (1)...(19): siRNA sense strand
ugaacuaucaagauggcaa

SEQ ID NO: 2296527 - RNA, 19 nt, Homo sapiens
  misc_RNA (1)...(19): siRNA sense strand
caucuuggauuuauggaga

SEQ ID NO: 2296528 - RNA, 19 nt, Homo sapiens
  misc_RNA (1)...(19): siRNA sense strand
gcagcaaccaacaaaggaa

SEQ ID NO: 2296529 - RNA, 19 nt, Homo sapiens
  misc_RNA (1)...(19): siRNA sense strand
aauaagcccucaaggaaaa

SEQ ID NO: 2296530 - RNA, 19 nt, Homo sapiens
  misc_RNA (1)...(19): siRNA sense strand
gaaaauauuguauggguga

SEQ ID NO: 2296531 - RNA, 19 nt, Homo sapiens
  misc_RNA (1)...(19): siRNA sense strand
uuggauuuauggagaaaga

SEQ ID NO: 2296532 - RNA, 19 nt, Homo sapiens
  misc_RNA (1)...(19): siRNA sense strand
ccauugaggaauuagugaa

SEQ ID NO: 2296533 - RNA, 19 nt, Homo sapiens
  misc_RNA (1)...(19): siRNA sense strand
agaugaaucagauguggaa

SEQ ID NO: 2296534 - RNA, 19 nt, Homo sapiens
  misc_RNA (1)...(19): siRNA sense strand
augaaucagauguggaaga

SEQ ID NO: 2296535 - RNA, 19 nt, Homo sapiens
  misc_RNA (1)...(19): siRNA sense strand
uguugagaccaaaggaaga

SEQ ID NO: 2296536 - RNA, 19 nt, Homo sapiens
  misc_RNA (1)...(19): siRNA sense strand
aggauauuguucuagcuaa

SEQ ID NO: 2296537 - RNA, 19 nt, Homo sapiens
  misc_RNA (1)...(19): siRNA sense strand
caaaggaagaugagaacuc

SEQ ID NO: 2296538 - RNA, 19 nt, Homo sapiens
  misc_RNA (1)...(19): siRNA sense strand
agaaagagggaugggugaa

SEQ ID NO: 2296539 - RNA, 19 nt, Homo sapiens
  misc_RNA (1)...(19): siRNA sense strand
ccagagucaaguaucgaaa

SEQ ID NO: 2296540 - RNA, 19 nt, Homo sapiens
  misc_RNA (1)...(19): siRNA sense strand
uuuaaguugugcuggauuu

SEQ ID NO: 2296541 - RNA, 19 nt, Homo sapiens
  misc_RNA (1)...(19): siRNA sense strand
augaagaagaugaugaagu

SEQ ID NO: 2296542 - RNA, 19 nt, Homo sapiens
  misc_RNA (1)...(19): siRNA sense strand
ggagggucucaaagaggaa

SEQ ID NO: 2296543 - RNA, 19 nt, Homo sapiens
  misc_RNA (1)...(19): siRNA sense strand
cauagagaacaaaaggaaa

SEQ ID NO: 2296544 - RNA, 19 nt, Homo sapiens
  misc_RNA (1)...(19): siRNA sense strand
cuuuagugcugaugaccuu

SEQ ID NO: 2296545 - RNA, 19 nt, Homo sapiens
  misc_RNA (1)...(19): siRNA sense strand
aggaauuagugaaauacca

SEQ ID NO: 2296546 - RNA, 19 nt, Homo sapiens
  misc_RNA (1)...(19): siRNA sense strand
aguaaguuuccauggguga

SEQ ID NO: 2296547 - RNA, 19 nt, Homo sapiens
  misc_RNA (1)...(19): siRNA sense strand
uuaaagggaggaagaugaa

SEQ ID NO: 2296548 - RNA, 19 nt, Homo sapiens
  misc_RNA (1)...(19): siRNA sense strand
aguuugaaauucucaguga

SEQ ID NO: 2296549 - RNA, 19 nt, Homo sapiens
  misc_RNA (1)...(19): siRNA sense strand
aagcacaaagauugcgcua

SEQ ID NO: 2296550 - RNA, 19 nt, Homo sapiens
  misc_RNA (1)...(19): siRNA sense strand
gugaggaugaugaugauga

SEQ ID NO: 2296551 - RNA, 19 nt, Homo sapiens
  misc_RNA (1)...(19): siRNA sense strand
aguuauagaaucagaggaa

SEQ ID NO: 2296552 - RNA, 19 nt, Homo sapiens
  misc_RNA (1)...(19): siRNA sense strand
cgucuuugacagugaauaa

SEQ ID NO: 2296553 - RNA, 19 nt, Homo sapiens
  misc_RNA (1)...(19): siRNA sense strand
agacaagacaacagaaaga

SEQ ID NO: 2296554 - RNA, 19 nt, Homo sapiens
  misc_RNA (1)...(19): siRNA sense strand
ccaaacaagaagaagacua

SEQ ID NO: 2296555 - RNA, 19 nt, Homo sapiens
  misc_RNA (1)...(19): siRNA sense strand
ccaccaaacaagaagaaga

SEQ ID NO: 2296556 - RNA, 19 nt, Homo sapiens
  misc_RNA (1)...(19): siRNA sense strand
aaguaaauccaaagaguga

SEQ ID NO: 2296557 - RNA, 19 nt, Homo sapiens
  misc_RNA (1)...(19): siRNA sense strand
ccacaaaagcccugaugaa

SEQ ID NO: 2296558 - RNA, 19 nt, Homo sapiens
  misc_RNA (1)...(19): siRNA sense strand
caagaagaacagaacuaaa

SEQ ID NO: 2296559 - RNA, 19 nt, Homo sapiens
  misc_RNA (1)...(19): siRNA sense strand
aggaaauaacagaagaaca

SEQ ID NO: 2296560 - RNA, 19 nt, Homo sapiens
  misc_RNA (1)...(19): siRNA sense strand
caagaagaagacuaagaaa

SEQ ID NO: 2296561 - RNA, 19 nt, Homo sapiens
  misc_RNA (1)...(19): siRNA sense strand
gagaauuacagaagaaacu

SEQ ID NO: 2296562 - RNA, 19 nt, Homo sapiens
  misc_RNA (1)...(19): siRNA sense strand
ggugcaacugugaaggaaa

SEQ ID NO: 2296563 - RNA, 19 nt, Homo sapiens
  misc_RNA (1)...(19): siRNA sense strand
gugcaacugugaaggaaaa

SEQ ID NO: 2296564 - RNA, 19 nt, Homo sapiens
  misc_RNA (1)...(19): siRNA sense strand
gauaacaagaagaacagaa

SEQ ID NO: 2296565 - RNA, 19 nt, Homo sapiens
  misc_RNA (1)...(19): siRNA sense strand
ggcuaaaccuacacccaaa

SEQ ID NO: 2296566 - RNA, 19 nt, Homo sapiens
  misc_RNA (1)...(19): siRNA sense strand
agaggaaauaacagaagaa

SEQ ID NO: 2296567 - RNA, 19 nt, Homo sapiens
  misc_RNA (1)...(19): siRNA sense strand
gcuacuaauucuaaagcga

SEQ ID NO: 2296568 - RNA, 19 nt, Homo sapiens
  misc_RNA (1)...(19): siRNA sense strand
aacaagaagaacagaacua

SEQ ID NO: 2296569 - RNA, 19 nt, Homo sapiens
  misc_RNA (1)...(19): siRNA sense strand
ucgcagaauuacugaaguu

SEQ ID NO: 2296570 - RNA, 19 nt, Homo sapiens
  misc_RNA (1)...(19): siRNA sense strand
ccaauauaugcaaugguaa

SEQ ID NO: 2296571 - RNA, 19 nt, Homo sapiens
  misc_RNA (1)...(19): siRNA sense strand
aguagaacagcaagagcaa

SEQ ID NO: 2296572 - RNA, 19 nt, Homo sapiens
  misc_RNA (1)...(19): siRNA sense strand
uagaacagcaagagcaauu

SEQ ID NO: 2296573 - RNA, 19 nt, Homo sapiens
  misc_RNA (1)...(19): siRNA sense strand
aaagacaagacaacagaaa

SEQ ID NO: 2296574 - RNA, 19 nt, Homo sapiens
  misc_RNA (1)...(19): siRNA sense strand
agguggugcugaaggagaa

SEQ ID NO: 2296575 - RNA, 19 nt, Homo sapiens
  misc_RNA (1)...(19): siRNA sense strand
cuacaacagcuaaagacaa

SEQ ID NO: 2296576 - RNA, 19 nt, Homo sapiens
  misc_RNA (1)...(19): siRNA sense strand
agagaaaacaucugcuaaa

SEQ ID NO: 2296577 - RNA, 19 nt, Homo sapiens
  misc_RNA (1)...(19): siRNA sense strand
acaaauaguggcagcgcuu

SEQ ID NO: 2296578 - RNA, 19 nt, Homo sapiens
  misc_RNA (1)...(19): siRNA sense strand
agaugaagcuggaagugga

SEQ ID NO: 2296579 - RNA, 19 nt, Homo sapiens
  misc_RNA (1)...(19): siRNA sense strand
ccaacuacaccuaaggaga

SEQ ID NO: 2296580 - RNA, 19 nt, Homo sapiens
  misc_RNA (1)...(19): siRNA sense strand
aaaccaaagacgacaccaa

SEQ ID NO: 2296581 - RNA, 19 nt, Homo sapiens
  misc_RNA (1)...(19): siRNA sense strand
ccaauaaaucccagaccca

SEQ ID NO: 2296582 - RNA, 19 nt, Homo sapiens
  misc_RNA (1)...(19): siRNA sense strand
agacuucaacugauggaaa

SEQ ID NO: 2296583 - RNA, 19 nt, Homo sapiens
  misc_RNA (1)...(19): siRNA sense strand
ucucaaaccaucaaaucaa

SEQ ID NO: 2296584 - RNA, 19 nt, Homo sapiens
  misc_RNA (1)...(19): siRNA sense strand
gacagugaauaaagagaca

SEQ ID NO: 2296585 - RNA, 19 nt, Homo sapiens
  misc_RNA (1)...(19): siRNA sense strand
cuccaaacuaguugaagua

SEQ ID NO: 2296586 - RNA, 19 nt, Homo sapiens
  misc_RNA (1)...(19): siRNA sense strand
uggaagaaggccugcucua

SEQ ID NO: 2296587 - RNA, 19 nt, Homo sapiens
  misc_RNA (1)...(19): siRNA sense strand
cagaaaaccugacggcuau

SEQ ID NO: 2296588 - RNA, 19 nt, Homo sapiens
  misc_RNA (1)...(19): siRNA sense strand
cagaagugcccuggaagaa

SEQ ID NO: 2296589 - RNA, 19 nt, Homo sapiens
  misc_RNA (1)...(19): siRNA sense strand
gugccuaguagaacagcaa

SEQ ID NO: 2296590 - RNA, 19 nt, Homo sapiens
  misc_RNA (1)...(19): siRNA sense strand
caauguaagaaguaugaca

SEQ ID NO: 2296591 - RNA, 19 nt, Homo sapiens
  misc_RNA (1)...(19): siRNA sense strand
agaugcagguggugcugaa

SEQ ID NO: 2296592 - RNA, 19 nt, Homo sapiens
  misc_RNA (1)...(19): siRNA sense strand
guuauagaaucagaggaaa

SEQ ID NO: 2296593 - RNA, 19 nt, Homo sapiens
  misc_RNA (1)...(19): siRNA sense strand
cugcagaacccacaccaaa

SEQ ID NO: 2296594 - RNA, 19 nt, Homo sapiens
  misc_RNA (1)...(19): siRNA sense strand
caccaaaagcucuugaaaa

SEQ ID NO: 2296595 - RNA, 19 nt, Homo sapiens
  misc_RNA (1)...(19): siRNA sense strand
acagcaacuacaacagaaa

SEQ ID NO: 2296596 - RNA, 19 nt, Homo sapiens
  misc_RNA (1)...(19): siRNA sense strand
ugaacaaaccugaagaaac

SEQ ID NO: 2296597 - RNA, 19 nt, Homo sapiens
  misc_RNA (1)...(19): siRNA sense strand
aacaaugccuagagugaga

SEQ ID NO: 2296598 - RNA, 19 nt, Homo sapiens
  misc_RNA (1)...(19): siRNA sense strand
gggaaggguauucuagaga

SEQ ID NO: 2296599 - RNA, 19 nt, Homo sapiens
  misc_RNA (1)...(19): siRNA sense strand
aaccaaacguucacccaaa

SEQ ID NO: 2296600 - RNA, 19 nt, Homo sapiens
  misc_RNA (1)...(19): siRNA sense strand
caagaauagcagaagccau

SEQ ID NO: 2296601 - RNA, 19 nt, Homo sapiens
  misc_RNA (1)...(19): siRNA sense strand
cccaagaucacaacagcaa

SEQ ID NO: 2296602 - RNA, 19 nt, Homo sapiens
  misc_RNA (1)...(19): siRNA sense strand
aagaaacagcuaaaccaaa

SEQ ID NO: 2296603 - RNA, 19 nt, Homo sapiens
  misc_RNA (1)...(19): siRNA sense strand
acagaagugcccuggaaga

SEQ ID NO: 2296604 - RNA, 19 nt, Homo sapiens
  misc_RNA (1)...(19): siRNA sense strand
gguuaggagacgucgcuuu

SEQ ID NO: 2296605 - RNA, 19 nt, Homo sapiens
  misc_RNA (1)...(19): siRNA sense strand
cuggaaguggauuggacaa

SEQ ID NO: 2296606 - RNA, 19 nt, Homo sapiens
  misc_RNA (1)...(19): siRNA sense strand
agaaagagacuuacguacu

SEQ ID NO: 2296607 - RNA, 19 nt, Homo sapiens
  misc_RNA (1)...(19): siRNA sense strand
aagaagaagacuaagaaag

SEQ ID NO: 2296608 - RNA, 19 nt, Homo sapiens
  misc_RNA (1)...(19): siRNA sense strand
agcugaaacuacaaccaaa

SEQ ID NO: 2296609 - RNA, 19 nt, Homo sapiens
  misc_RNA (1)...(19): siRNA sense strand
cagcuaaagacaagacaac

SEQ ID NO: 2296610 - RNA, 19 nt, Homo sapiens
  misc_RNA (1)...(19): siRNA sense strand
acuccaaacuaguugaagu

SEQ ID NO: 2296611 - RNA, 19 nt, Homo sapiens
  misc_RNA (1)...(19): siRNA sense strand
gcguuuuaccaaugauaua

SEQ ID NO: 2296612 - RNA, 19 nt, Homo sapiens
  misc_RNA (1)...(19): siRNA sense strand
uauaaaagaugcaggguac

SEQ ID NO: 2296613 - RNA, 19 nt, Homo sapiens
  misc_RNA (1)...(19): siRNA sense strand
cuguguuugcugaggauaa

SEQ ID NO: 2296614 - RNA, 19 nt, Homo sapiens
  misc_RNA (1)...(19): siRNA sense strand
augaagagacggagaucaa

SEQ ID NO: 2296615 - RNA, 19 nt, Homo sapiens
  misc_RNA (1)...(19): siRNA sense strand
agaucaaggaggagaguga

SEQ ID NO: 2296616 - RNA, 19 nt, Homo sapiens
  misc_RNA (1)...(19): siRNA sense strand
uggagaaggucacgggcaa

SEQ ID NO: 2296617 - RNA, 19 nt, Homo sapiens
  misc_RNA (1)...(19): siRNA sense strand
cggagaagaucaaggagga

SEQ ID NO: 2296618 - RNA, 19 nt, Homo sapiens
  misc_RNA (1)...(19): siRNA sense strand
aggacagcuuggagaaauu

SEQ ID NO: 2296619 - RNA, 19 nt, Homo sapiens
  misc_RNA (1)...(19): siRNA sense strand
ccaauaaccgcuauggcua

SEQ ID NO: 2296620 - RNA, 19 nt, Homo sapiens
  misc_RNA (1)...(19): siRNA sense strand
gggagaccacagagggcaa

SEQ ID NO: 2296621 - RNA, 19 nt, Homo sapiens
  misc_RNA (1)...(19): siRNA sense strand
ugauggagauggaggggaa

SEQ ID NO: 2296622 - RNA, 19 nt, Homo sapiens
  misc_RNA (1)...(19): siRNA sense strand
ccauagcaaaagagaauaa

SEQ ID NO: 2296623 - RNA, 19 nt, Homo sapiens
  misc_RNA (1)...(19): siRNA sense strand
gagaagagcucccuggcca

SEQ ID NO: 2296624 - RNA, 19 nt, Homo sapiens
  misc_RNA (1)...(19): siRNA sense strand
ccccauagcaaaagagaau

SEQ ID NO: 2296625 - RNA, 19 nt, Homo sapiens
  misc_RNA (1)...(19): siRNA sense strand
cagagaaguccgaugcuga

SEQ ID NO: 2296626 - RNA, 19 nt, Homo sapiens
  misc_RNA (1)...(19): siRNA sense strand
gauuuaaagaagucggguu

SEQ ID NO: 2296627 - RNA, 19 nt, Homo sapiens
  misc_RNA (1)...(19): siRNA sense strand
ugaucaaaaccaagcauua

SEQ ID NO: 2296628 - RNA, 19 nt, Homo sapiens
  misc_RNA (1)...(19): siRNA sense strand
gugaggacagcuuggagaa

SEQ ID NO: 2296629 - RNA, 19 nt, Homo sapiens
  misc_RNA (1)...(19): siRNA sense strand
gagaagagaaggaggaucc

SEQ ID NO: 2296630 - RNA, 19 nt, Homo sapiens
  misc_RNA (1)...(19): siRNA sense strand
cagagguggcccugaguga

SEQ ID NO: 2296631 - RNA, 19 nt, Homo sapiens
  misc_RNA (1)...(19): siRNA sense strand
aagaaaagaaagagccaga

SEQ ID NO: 2296632 - RNA, 19 nt, Homo sapiens
  misc_RNA (1)...(19): siRNA sense strand
aggucaacaucaagaagga

SEQ ID NO: 2296633 - RNA, 19 nt, Homo sapiens
  misc_RNA (1)...(19): siRNA sense strand
cagaauggcgccagcuaca

SEQ ID NO: 2296634 - RNA, 19 nt, Homo sapiens
  misc_RNA (1)...(19): siRNA sense strand
cggaggaagucagcggcaa

SEQ ID NO: 2296635 - RNA, 19 nt, Homo sapiens
  misc_RNA (1)...(19): siRNA sense strand
cgagcaagcacgcagucaa

SEQ ID NO: 2296636 - RNA, 19 nt, Homo sapiens
  misc_RNA (1)...(19): siRNA sense strand
gugaggaggaccuggacga

SEQ ID NO: 2296637 - RNA, 19 nt, Homo sapiens
  misc_RNA (1)...(19): siRNA sense strand
agaauaaagauuucccgaa

SEQ ID NO: 2296638 - RNA, 19 nt, Homo sapiens
  misc_RNA (1)...(19): siRNA sense strand
gagaagaucaaggaggaga

SEQ ID NO: 2296639 - RNA, 19 nt, Homo sapiens
  misc_RNA (1)...(19): siRNA sense strand
cuguacaagaucagcaaca

SEQ ID NO: 2296640 - RNA, 19 nt, Homo sapiens
  misc_RNA (1)...(19): siRNA sense strand
cauaagucauuuggagaca

SEQ ID NO: 2296641 - RNA, 19 nt, Homo sapiens
  misc_RNA (1)...(19): siRNA sense strand
cgugacgacaacagggaca

SEQ ID NO: 2296642 - RNA, 19 nt, Homo sapiens
  misc_RNA (1)...(19): siRNA sense strand
gcagcgaacccguacguca

SEQ ID NO: 2296643 - RNA, 19 nt, Homo sapiens
  misc_RNA (1)...(19): siRNA sense strand
gcgacgcggagaagaucaa

SEQ ID NO: 2296644 - RNA, 19 nt, Homo sapiens
  misc_RNA (1)...(19): siRNA sense strand
agauucaagaacagcagaa

SEQ ID NO: 2296645 - RNA, 19 nt, Homo sapiens
  misc_RNA (1)...(19): siRNA sense strand
uuucgaaaguccucaccaa

SEQ ID NO: 2296646 - RNA, 19 nt, Homo sapiens
  misc_RNA (1)...(19): siRNA sense strand
cagcaggaauggccgcaga

SEQ ID NO: 2296647 - RNA, 19 nt, Homo sapiens
  misc_RNA (1)...(19): siRNA sense strand
gugaaguaccaguugagga

SEQ ID NO: 2296648 - RNA, 19 nt, Homo sapiens
  misc_RNA (1)...(19): siRNA sense strand
cugccauuguggagaaguu

SEQ ID NO: 2296649 - RNA, 19 nt, Homo sapiens
  misc_RNA (1)...(19): siRNA sense strand
ucagcaugguugugggcca

SEQ ID NO: 2296650 - RNA, 19 nt, Homo sapiens
  misc_RNA (1)...(19): siRNA sense strand
agcuuaaggcggaugaaga

SEQ ID NO: 2296651 - RNA, 19 nt, Homo sapiens
  misc_RNA (1)...(19): siRNA sense strand
gagcagagacaguggcaca

SEQ ID NO: 2296652 - RNA, 19 nt, Homo sapiens
  misc_RNA (1)...(19): siRNA sense strand
cuacagcguuacuggguga

SEQ ID NO: 2296653 - RNA, 19 nt, Homo sapiens
  misc_RNA (1)...(19): siRNA sense strand
uggauuucuccgaguauaa

SEQ ID NO: 2296654 - RNA, 19 nt, Homo sapiens
  misc_RNA (1)...(19): siRNA sense strand
agagccagauuaaggguga

SEQ ID NO: 2296655 - RNA, 19 nt, Homo sapiens
  misc_RNA (1)...(19): siRNA sense strand
cgugguaucccgaagccua

SEQ ID NO: 2296656 - RNA, 19 nt, Homo sapiens
  misc_RNA (1)...(19): siRNA sense strand
aggcuguggcucagacgaa

SEQ ID NO: 2296657 - RNA, 19 nt, Homo sapiens
  misc_RNA (1)...(19): siRNA sense strand
ccaggauagaagauggaaa

SEQ ID NO: 2296658 - RNA, 19 nt, Homo sapiens
  misc_RNA (1)...(19): siRNA sense strand
cagagauugaugagaaaga

SEQ ID NO: 2296659 - RNA, 19 nt, Homo sapiens
  misc_RNA (1)...(19): siRNA sense strand
gcagaagacuugguggcaa

SEQ ID NO: 2296660 - RNA, 19 nt, Homo sapiens
  misc_RNA (1)...(19): siRNA sense strand
cuuaaacauccaugaccua

SEQ ID NO: 2296661 - RNA, 19 nt, Homo sapiens
  misc_RNA (1)...(19): siRNA sense strand
uggacauuauugagaaagu

SEQ ID NO: 2296662 - RNA, 19 nt, Homo sapiens
  misc_RNA (1)...(19): siRNA sense strand
guuggaugagugugaagaa

SEQ ID NO: 2296663 - RNA, 19 nt, Homo sapiens
  misc_RNA (1)...(19): siRNA sense strand
ccaggauagaagauggaaa

SEQ ID NO: 2296664 - RNA, 19 nt, Homo sapiens
  misc_RNA (1)...(19): siRNA sense strand
cagagauugaugagaaaga

SEQ ID NO: 2296665 - RNA, 19 nt, Homo sapiens
  misc_RNA (1)...(19): siRNA sense strand
gcagaagacuugguggcaa

SEQ ID NO: 2296666 - RNA, 19 nt, Homo sapiens
  misc_RNA (1)...(19): siRNA sense strand
cuuaaacauccaugaccua

SEQ ID NO: 2296667 - RNA, 19 nt, Homo sapiens
  misc_RNA (1)...(19): siRNA sense strand
uggacauuauugagaaagu

SEQ ID NO: 2296668 - RNA, 19 nt, Homo sapiens
  misc_RNA (1)...(19): siRNA sense strand
guuggaugagugugaagaa

SEQ ID NO: 2296669 - RNA, 19 nt, Homo sapiens
  misc_RNA (1)...(19): siRNA sense strand
cuucaaucuuccagcacaa

SEQ ID NO: 2296670 - RNA, 19 nt, Homo sapiens
  misc_RNA (1)...(19): siRNA sense strand
gagaugugucaguggucaa

SEQ ID NO: 2296671 - RNA, 19 nt, Homo sapiens
  misc_RNA (1)...(19): siRNA sense strand
cugugcaguuguuggaaau

SEQ ID NO: 2296672 - RNA, 19 nt, Homo sapiens
  misc_RNA (1)...(19): siRNA sense strand
uagcaagaacugaggagca

SEQ ID NO: 2296673 - RNA, 19 nt, Homo sapiens
  misc_RNA (1)...(19): siRNA sense strand
agacagugaauguggaaag

SEQ ID NO: 2296674 - RNA, 19 nt, Homo sapiens
  misc_RNA (1)...(19): siRNA sense strand
agacgcaacucaucggaga

SEQ ID NO: 2296675 - RNA, 19 nt, Homo sapiens
  misc_RNA (1)...(19): siRNA sense strand
ucuuagaugcagaacgaga

SEQ ID NO: 2296676 - RNA, 19 nt, Homo sapiens
  misc_RNA (1)...(19): siRNA sense strand
gugaauguggaaaggagau

SEQ ID NO: 2296677 - RNA, 19 nt, Homo sapiens
  misc_RNA (1)...(19): siRNA sense strand
auuaggaagagguggacga

SEQ ID NO: 2296678 - RNA, 19 nt, Homo sapiens
  misc_RNA (1)...(19): siRNA sense strand
cuucaaucuuccagcacaa

SEQ ID NO: 2296679 - RNA, 19 nt, Homo sapiens
  misc_RNA (1)...(19): siRNA sense strand
gagaugugucaguggucaa

SEQ ID NO: 2296680 - RNA, 19 nt, Homo sapiens
  misc_RNA (1)...(19): siRNA sense strand
cugugcaguuguuggaaau

SEQ ID NO: 2296681 - RNA, 19 nt, Homo sapiens
  misc_RNA (1)...(19): siRNA sense strand
uagcaagaacugaggagca

SEQ ID NO: 2296682 - RNA, 19 nt, Homo sapiens
  misc_RNA (1)...(19): siRNA sense strand
agacagugaauguggaaag

SEQ ID NO: 2296683 - RNA, 19 nt, Homo sapiens
  misc_RNA (1)...(19): siRNA sense strand
agacgcaacucaucggaga

SEQ ID NO: 2296684 - RNA, 19 nt, Homo sapiens
  misc_RNA (1)...(19): siRNA sense strand
ucuuagaugcagaacgaga

SEQ ID NO: 2296685 - RNA, 19 nt, Homo sapiens
  misc_RNA (1)...(19): siRNA sense strand
gugaauguggaaaggagau

SEQ ID NO: 2296686 - RNA, 19 nt, Homo sapiens
  misc_RNA (1)...(19): siRNA sense strand
auuaggaagagguggacga

SEQ ID NO: 2296687 - RNA, 19 nt, Homo sapiens
  misc_RNA (1)...(19): siRNA sense strand
agaagaaagacaaggucaa

SEQ ID NO: 2296688 - RNA, 19 nt, Homo sapiens
  misc_RNA (1)...(19): siRNA sense strand
gcaaagagggcaaggaggu

SEQ ID NO: 2296689 - RNA, 19 nt, Homo sapiens
  misc_RNA (1)...(19): siRNA sense strand
gccacaaagaagaaagaca

SEQ ID NO: 2296690 - RNA, 19 nt, Homo sapiens
  misc_RNA (1)...(19): siRNA sense strand
ucaagaaccugcugcccua

SEQ ID NO: 2296691 - RNA, 19 nt, Homo sapiens
  misc_RNA (1)...(19): siRNA sense strand
ugggcgacguggaggucaa

SEQ ID NO: 2296692 - RNA, 19 nt, Homo sapiens
  misc_RNA (1)...(19): siRNA sense strand
ccaaaugcgcagagcccau

SEQ ID NO: 2296693 - RNA, 19 nt, Homo sapiens
  misc_RNA (1)...(19): siRNA sense strand
gugagggcgucguggacau

SEQ ID NO: 2296694 - RNA, 19 nt, Homo sapiens
  misc_RNA (1)...(19): siRNA sense strand
ccgucagccugcagaccua

SEQ ID NO: 2296695 - RNA, 19 nt, Homo sapiens
  misc_RNA (1)...(19): siRNA sense strand
gcgcaaggagauugaguac

SEQ ID NO: 2296696 - RNA, 19 nt, Homo sapiens
  misc_RNA (1)...(19): siRNA sense strand
agugggagcaagugcgaau

SEQ ID NO: 2296697 - RNA, 19 nt, Homo sapiens
  misc_RNA (1)...(19): siRNA sense strand
ggcagugcuguguggaaua

SEQ ID NO: 2296698 - RNA, 19 nt, Homo sapiens
  misc_RNA (1)...(19): siRNA sense strand
ccgacuacauuaaugccaa

SEQ ID NO: 2296699 - RNA, 19 nt, Homo sapiens
  misc_RNA (1)...(19): siRNA sense strand
uggacauggcagaguguga

SEQ ID NO: 2296700 - RNA, 19 nt, Homo sapiens
  misc_RNA (1)...(19): siRNA sense strand
aagaagaaagacaagguca

SEQ ID NO: 2296701 - RNA, 19 nt, Homo sapiens
  misc_RNA (1)...(19): siRNA sense strand
cugagauggucuaugacuu

SEQ ID NO: 2296702 - RNA, 19 nt, Homo sapiens
  misc_RNA (1)...(19): siRNA sense strand
uuccagagccugagcgaga

SEQ ID NO: 2296703 - RNA, 19 nt, Homo sapiens
  misc_RNA (1)...(19): siRNA sense strand
ccaccuacaaggagaugau

SEQ ID NO: 2296704 - RNA, 19 nt, Homo sapiens
  misc_RNA (1)...(19): siRNA sense strand
gugugugaagacagagcaa

SEQ ID NO: 2296705 - RNA, 19 nt, Homo sapiens
  misc_RNA (1)...(19): siRNA sense strand
gucuaugacuucuggcgua

SEQ ID NO: 2296706 - RNA, 19 nt, Homo sapiens
  misc_RNA (1)...(19): siRNA sense strand
ccacugggcuacaacguga

SEQ ID NO: 2296707 - RNA, 19 nt, Homo sapiens
  misc_RNA (1)...(19): siRNA sense strand
aggugauuguggaggagga

SEQ ID NO: 2296708 - RNA, 19 nt, Homo sapiens
  misc_RNA (1)...(19): siRNA sense strand
cggaggacucagacaccua

SEQ ID NO: 2296709 - RNA, 19 nt, Homo sapiens
  misc_RNA (1)...(19): siRNA sense strand
cuuucuggcccaaugaaua

SEQ ID NO: 2296710 - RNA, 19 nt, Homo sapiens
  misc_RNA (1)...(19): siRNA sense strand
aagacaaggucaagggcag

SEQ ID NO: 2296711 - RNA, 19 nt, Homo sapiens
  misc_RNA (1)...(19): siRNA sense strand
acgauguggcccuggagua

SEQ ID NO: 2296712 - RNA, 19 nt, Homo sapiens
  misc_RNA (1)...(19): siRNA sense strand
uggcagagugugagggcgu

SEQ ID NO: 2296713 - RNA, 19 nt, Homo sapiens
  misc_RNA (1)...(19): siRNA sense strand
acuccaacaacuacauuaa

SEQ ID NO: 2296714 - RNA, 19 nt, Homo sapiens
  misc_RNA (1)...(19): siRNA sense strand
cgaggugggcagggugaaa

SEQ ID NO: 2296715 - RNA, 19 nt, Homo sapiens
  misc_RNA (1)...(19): siRNA sense strand
ccuccaucgucaugcucaa

SEQ ID NO: 2296716 - RNA, 19 nt, Homo sapiens
  misc_RNA (1)...(19): siRNA sense strand
cuaccagagcaucgaguca

SEQ ID NO: 2296717 - RNA, 19 nt, Homo sapiens
  misc_RNA (1)...(19): siRNA sense strand
agccugagcgagaaugaua

SEQ ID NO: 2296718 - RNA, 19 nt, Homo sapiens
  misc_RNA (1)...(19): siRNA sense strand
agauuaugcuggugaagac

SEQ ID NO: 2296719 - RNA, 19 nt, Homo sapiens
  misc_RNA (1)...(19): siRNA sense strand
agaagaaagacaaggucaa

SEQ ID NO: 2296720 - RNA, 19 nt, Homo sapiens
  misc_RNA (1)...(19): siRNA sense strand
gcaaagagggcaaggaggu

SEQ ID NO: 2296721 - RNA, 19 nt, Homo sapiens
  misc_RNA (1)...(19): siRNA sense strand
gccacaaagaagaaagaca

SEQ ID NO: 2296722 - RNA, 19 nt, Homo sapiens
  misc_RNA (1)...(19): siRNA sense strand
ucaagaaccugcugcccua

SEQ ID NO: 2296723 - RNA, 19 nt, Homo sapiens
  misc_RNA (1)...(19): siRNA sense strand
ugggcgacguggaggucaa

SEQ ID NO: 2296724 - RNA, 19 nt, Homo sapiens
  misc_RNA (1)...(19): siRNA sense strand
ccaaaugcgcagagcccau

SEQ ID NO: 2296725 - RNA, 19 nt, Homo sapiens
  misc_RNA (1)...(19): siRNA sense strand
gugagggcgucguggacau

SEQ ID NO: 2296726 - RNA, 19 nt, Homo sapiens
  misc_RNA (1)...(19): siRNA sense strand
ccgucagccugcagaccua

SEQ ID NO: 2296727 - RNA, 19 nt, Homo sapiens
  misc_RNA (1)...(19): siRNA sense strand
gcgcaaggagauugaguac

SEQ ID NO: 2296728 - RNA, 19 nt, Homo sapiens
  misc_RNA (1)...(19): siRNA sense strand
agugggagcaagugcgaau

SEQ ID NO: 2296729 - RNA, 19 nt, Homo sapiens
  misc_RNA (1)...(19): siRNA sense strand
ggcagugcuguguggaaua

SEQ ID NO: 2296730 - RNA, 19 nt, Homo sapiens
  misc_RNA (1)...(19): siRNA sense strand
ccgacuacauuaaugccaa

SEQ ID NO: 2296731 - RNA, 19 nt, Homo sapiens
  misc_RNA (1)...(19): siRNA sense strand
uggacauggcagaguguga

SEQ ID NO: 2296732 - RNA, 19 nt, Homo sapiens
  misc_RNA (1)...(19): siRNA sense strand
aagaagaaagacaagguca

SEQ ID NO: 2296733 - RNA, 19 nt, Homo sapiens
  misc_RNA (1)...(19): siRNA sense strand
cugagauggucuaugacuu

SEQ ID NO: 2296734 - RNA, 19 nt, Homo sapiens
  misc_RNA (1)...(19): siRNA sense strand
uuccagagccugagcgaga

SEQ ID NO: 2296735 - RNA, 19 nt, Homo sapiens
  misc_RNA (1)...(19): siRNA sense strand
ccaccuacaaggagaugau

SEQ ID NO: 2296736 - RNA, 19 nt, Homo sapiens
  misc_RNA (1)...(19): siRNA sense strand
gugugugaagacagagcaa

SEQ ID NO: 2296737 - RNA, 19 nt, Homo sapiens
  misc_RNA (1)...(19): siRNA sense strand
gucuaugacuucuggcgua

SEQ ID NO: 2296738 - RNA, 19 nt, Homo sapiens
  misc_RNA (1)...(19): siRNA sense strand
ccacugggcuacaacguga

SEQ ID NO: 2296739 - RNA, 19 nt, Homo sapiens
  misc_RNA (1)...(19): siRNA sense strand
aggugauuguggaggagga

SEQ ID NO: 2296740 - RNA, 19 nt, Homo sapiens
  misc_RNA (1)...(19): siRNA sense strand
cggaggacucagacaccua

SEQ ID NO: 2296741 - RNA, 19 nt, Homo sapiens
  misc_RNA (1)...(19): siRNA sense strand
cuuucuggcccaaugaaua

SEQ ID NO: 2296742 - RNA, 19 nt, Homo sapiens
  misc_RNA (1)...(19): siRNA sense strand
aagacaaggucaagggcag

SEQ ID NO: 2296743 - RNA, 19 nt, Homo sapiens
  misc_RNA (1)...(19): siRNA sense strand
acgauguggcccuggagua

SEQ ID NO: 2296744 - RNA, 19 nt, Homo sapiens
  misc_RNA (1)...(19): siRNA sense strand
uggcagagugugagggcgu

SEQ ID NO: 2296745 - RNA, 19 nt, Homo sapiens
  misc_RNA (1)...(19): siRNA sense strand
acuccaacaacuacauuaa

SEQ ID NO: 2296746 - RNA, 19 nt, Homo sapiens
  misc_RNA (1)...(19): siRNA sense strand
cgaggugggcagggugaaa

SEQ ID NO: 2296747 - RNA, 19 nt, Homo sapiens
  misc_RNA (1)...(19): siRNA sense strand
ccuccaucgucaugcucaa

SEQ ID NO: 2296748 - RNA, 19 nt, Homo sapiens
  misc_RNA (1)...(19): siRNA sense strand
cuaccagagcaucgaguca

SEQ ID NO: 2296749 - RNA, 19 nt, Homo sapiens
  misc_RNA (1)...(19): siRNA sense strand
agccugagcgagaaugaua

SEQ ID NO: 2296750 - RNA, 19 nt, Homo sapiens
  misc_RNA (1)...(19): siRNA sense strand
agauuaugcuggugaagac

SEQ ID NO: 2296751 - RNA, 19 nt, Homo sapiens
  misc_RNA (1)...(19): siRNA sense strand
agaagaaagacaaggucaa

SEQ ID NO: 2296752 - RNA, 19 nt, Homo sapiens
  misc_RNA (1)...(19): siRNA sense strand
gcaaagagggcaaggaggu

SEQ ID NO: 2296753 - RNA, 19 nt, Homo sapiens
  misc_RNA (1)...(19): siRNA sense strand
gccacaaagaagaaagaca

SEQ ID NO: 2296754 - RNA, 19 nt, Homo sapiens
  misc_RNA (1)...(19): siRNA sense strand
ucaagaaccugcugcccua

SEQ ID NO: 2296755 - RNA, 19 nt, Homo sapiens
  misc_RNA (1)...(19): siRNA sense strand
ugggcgacguggaggucaa

SEQ ID NO: 2296756 - RNA, 19 nt, Homo sapiens
  misc_RNA (1)...(19): siRNA sense strand
ccaaaugcgcagagcccau

SEQ ID NO: 2296757 - RNA, 19 nt, Homo sapiens
  misc_RNA (1)...(19): siRNA sense strand
gugagggcgucguggacau

SEQ ID NO: 2296758 - RNA, 19 nt, Homo sapiens
  misc_RNA (1)...(19): siRNA sense strand
ccgucagccugcagaccua

SEQ ID NO: 2296759 - RNA, 19 nt, Homo sapiens
  misc_RNA (1)...(19): siRNA sense strand
gcgcaaggagauugaguac

SEQ ID NO: 2296760 - RNA, 19 nt, Homo sapiens
  misc_RNA (1)...(19): siRNA sense strand
agugggagcaagugcgaau

SEQ ID NO: 2296761 - RNA, 19 nt, Homo sapiens
  misc_RNA (1)...(19): siRNA sense strand
ggcagugcuguguggaaua

SEQ ID NO: 2296762 - RNA, 19 nt, Homo sapiens
  misc_RNA (1)...(19): siRNA sense strand
ccgacuacauuaaugccaa

SEQ ID NO: 2296763 - RNA, 19 nt, Homo sapiens
  misc_RNA (1)...(19): siRNA sense strand
uggacauggcagaguguga

SEQ ID NO: 2296764 - RNA, 19 nt, Homo sapiens
  misc_RNA (1)...(19): siRNA sense strand
aagaagaaagacaagguca

SEQ ID NO: 2296765 - RNA, 19 nt, Homo sapiens
  misc_RNA (1)...(19): siRNA sense strand
cugagauggucuaugacuu

SEQ ID NO: 2296766 - RNA, 19 nt, Homo sapiens
  misc_RNA (1)...(19): siRNA sense strand
uuccagagccugagcgaga

SEQ ID NO: 2296767 - RNA, 19 nt, Homo sapiens
  misc_RNA (1)...(19): siRNA sense strand
ccaccuacaaggagaugau

SEQ ID NO: 2296768 - RNA, 19 nt, Homo sapiens
  misc_RNA (1)...(19): siRNA sense strand
gugugugaagacagagcaa

SEQ ID NO: 2296769 - RNA, 19 nt, Homo sapiens
  misc_RNA (1)...(19): siRNA sense strand
gucuaugacuucuggcgua

SEQ ID NO: 2296770 - RNA, 19 nt, Homo sapiens
  misc_RNA (1)...(19): siRNA sense strand
ccacugggcuacaacguga

SEQ ID NO: 2296771 - RNA, 19 nt, Homo sapiens
  misc_RNA (1)...(19): siRNA sense strand
aggugauuguggaggagga

SEQ ID NO: 2296772 - RNA, 19 nt, Homo sapiens
  misc_RNA (1)...(19): siRNA sense strand
cggaggacucagacaccua

SEQ ID NO: 2296773 - RNA, 19 nt, Homo sapiens
  misc_RNA (1)...(19): siRNA sense strand
cuuucuggcccaaugaaua

SEQ ID NO: 2296774 - RNA, 19 nt, Homo sapiens
  misc_RNA (1)...(19): siRNA sense strand
aagacaaggucaagggcag

SEQ ID NO: 2296775 - RNA, 19 nt, Homo sapiens
  misc_RNA (1)...(19): siRNA sense strand
acgauguggcccuggagua

SEQ ID NO: 2296776 - RNA, 19 nt, Homo sapiens
  misc_RNA (1)...(19): siRNA sense strand
uggcagagugugagggcgu

SEQ ID NO: 2296777 - RNA, 19 nt, Homo sapiens
  misc_RNA (1)...(19): siRNA sense strand
acuccaacaacuacauuaa

SEQ ID NO: 2296778 - RNA, 19 nt, Homo sapiens
  misc_RNA (1)...(19): siRNA sense strand
cgaggugggcagggugaaa

SEQ ID NO: 2296779 - RNA, 19 nt, Homo sapiens
  misc_RNA (1)...(19): siRNA sense strand
ccuccaucgucaugcucaa

SEQ ID NO: 2296780 - RNA, 19 nt, Homo sapiens
  misc_RNA (1)...(19): siRNA sense strand
cuaccagagcaucgaguca

SEQ ID NO: 2296781 - RNA, 19 nt, Homo sapiens
  misc_RNA (1)...(19): siRNA sense strand
agccugagcgagaaugaua

SEQ ID NO: 2296782 - RNA, 19 nt, Homo sapiens
  misc_RNA (1)...(19): siRNA sense strand
agauuaugcuggugaagac

SEQ ID NO: 2296783 - RNA, 19 nt, Homo sapiens
  misc_RNA (1)...(19): siRNA sense strand
acaaugaccuugagcgaca

SEQ ID NO: 2296784 - RNA, 19 nt, Homo sapiens
  misc_RNA (1)...(19): siRNA sense strand
agacaaugaccuugagcga

SEQ ID NO: 2296785 - RNA, 19 nt, Homo sapiens
  misc_RNA (1)...(19): siRNA sense strand
gcugaggaagccagagaca

SEQ ID NO: 2296786 - RNA, 19 nt, Homo sapiens
  misc_RNA (1)...(19): siRNA sense strand
caagagaagcagagggaga

SEQ ID NO: 2296787 - RNA, 19 nt, Homo sapiens
  misc_RNA (1)...(19): siRNA sense strand
ccuccuugacuguggacaa

SEQ ID NO: 2296788 - RNA, 19 nt, Homo sapiens
  misc_RNA (1)...(19): siRNA sense strand
ccuacaaggugugggccaa

SEQ ID NO: 2296789 - RNA, 19 nt, Homo sapiens
  misc_RNA (1)...(19): siRNA sense strand
ugucaguggccguggaguu

SEQ ID NO: 2296790 - RNA, 19 nt, Homo sapiens
  misc_RNA (1)...(19): siRNA sense strand
aggaagaaggggaagaaga

SEQ ID NO: 2296791 - RNA, 19 nt, Homo sapiens
  misc_RNA (1)...(19): siRNA sense strand
gcuacugcagggugaggaa

SEQ ID NO: 2296792 - RNA, 19 nt, Homo sapiens
  misc_RNA (1)...(19): siRNA sense strand
acuacggaguggaggagga

SEQ ID NO: 2296793 - RNA, 19 nt, Homo sapiens
  misc_RNA (1)...(19): siRNA sense strand
gggugaggaagaaggggaa

SEQ ID NO: 2296794 - RNA, 19 nt, Homo sapiens
  misc_RNA (1)...(19): siRNA sense strand
aguacuacauggaucucaa

SEQ ID NO: 2296795 - RNA, 19 nt, Homo sapiens
  misc_RNA (1)...(19): siRNA sense strand
agaagauucaagagaagca

SEQ ID NO: 2296796 - RNA, 19 nt, Homo sapiens
  misc_RNA (1)...(19): siRNA sense strand
acgugaagcagaacgccaa

SEQ ID NO: 2296797 - RNA, 19 nt, Homo sapiens
  misc_RNA (1)...(19): siRNA sense strand
uggccaagcucaucgacga

SEQ ID NO: 2296798 - RNA, 19 nt, Homo sapiens
  misc_RNA (1)...(19): siRNA sense strand
ucggaggagaugaagaaga

SEQ ID NO: 2296799 - RNA, 19 nt, Homo sapiens
  misc_RNA (1)...(19): siRNA sense strand
ggacaagcuaggaggcagu

SEQ ID NO: 2296800 - RNA, 19 nt, Homo sapiens
  misc_RNA (1)...(19): siRNA sense strand
ugacagagccggagcugca

SEQ ID NO: 2296801 - RNA, 19 nt, Homo sapiens
  misc_RNA (1)...(19): siRNA sense strand
uggaggagaugaagcgacu

SEQ ID NO: 2296802 - RNA, 19 nt, Homo sapiens
  misc_RNA (1)...(19): siRNA sense strand
ucaacagccgcgagcgcaa

SEQ ID NO: 2296803 - RNA, 19 nt, Homo sapiens
  misc_RNA (1)...(19): siRNA sense strand
gcuaggaggcaguggcuuc

SEQ ID NO: 2296804 - RNA, 19 nt, Homo sapiens
  misc_RNA (1)...(19): siRNA sense strand
gagaugaagcgacugguga

SEQ ID NO: 2296805 - RNA, 19 nt, Homo sapiens
  misc_RNA (1)...(19): siRNA sense strand
ugaagcgacuggugagcga

SEQ ID NO: 2296806 - RNA, 19 nt, Homo sapiens
  misc_RNA (1)...(19): siRNA sense strand
agguagacauggaggccgu

SEQ ID NO: 2296807 - RNA, 19 nt, Homo sapiens
  misc_RNA (1)...(19): siRNA sense strand
guaaagacagugaggccca

SEQ ID NO: 2296808 - RNA, 19 nt, Homo sapiens
  misc_RNA (1)...(19): siRNA sense strand
gaaaaggauuggugcgacu

SEQ ID NO: 2296809 - RNA, 19 nt, Homo sapiens
  misc_RNA (1)...(19): siRNA sense strand
gcaccgagauggaggccaa

SEQ ID NO: 2296810 - RNA, 19 nt, Homo sapiens
  misc_RNA (1)...(19): siRNA sense strand
ucgcagacaugaugggcaa

SEQ ID NO: 2296811 - RNA, 19 nt, Homo sapiens
  misc_RNA (1)...(19): siRNA sense strand
ucguguacuaugagaguuu

SEQ ID NO: 2296812 - RNA, 19 nt, Homo sapiens
  misc_RNA (1)...(19): siRNA sense strand
ccuaaagauccaacugaaa

SEQ ID NO: 2296813 - RNA, 19 nt, Homo sapiens
  misc_RNA (1)...(19): siRNA sense strand
ugguuguguuugaguguaa

SEQ ID NO: 2296814 - RNA, 19 nt, Homo sapiens
  misc_RNA (1)...(19): siRNA sense strand
uggugaaagcuaaggguga

SEQ ID NO: 2296815 - RNA, 19 nt, Homo sapiens
  misc_RNA (1)...(19): siRNA sense strand
uugucaagugggagaauaa

SEQ ID NO: 2296816 - RNA, 19 nt, Homo sapiens
  misc_RNA (1)...(19): siRNA sense strand
gcacagaagaaaauagaau

SEQ ID NO: 2296817 - RNA, 19 nt, Homo sapiens
  misc_RNA (1)...(19): siRNA sense strand
ucaauaagguucucgguga

SEQ ID NO: 2296818 - RNA, 19 nt, Homo sapiens
  misc_RNA (1)...(19): siRNA sense strand
cgggaugaacugucacaaa

SEQ ID NO: 2296819 - RNA, 19 nt, Homo sapiens
  misc_RNA (1)...(19): siRNA sense strand
gcuccaugcaccugaggaa

SEQ ID NO: 2296820 - RNA, 19 nt, Homo sapiens
  misc_RNA (1)...(19): siRNA sense strand
aggaacuggugaaagcuaa

SEQ ID NO: 2296821 - RNA, 19 nt, Homo sapiens
  misc_RNA (1)...(19): siRNA sense strand
agguauuggauaacagaau

SEQ ID NO: 2296822 - RNA, 19 nt, Homo sapiens
  misc_RNA (1)...(19): siRNA sense strand
aagcuaagggugaggaguu

SEQ ID NO: 2296823 - RNA, 19 nt, Homo sapiens
  misc_RNA (1)...(19): siRNA sense strand
gggaugagaucacagccua

SEQ ID NO: 2296824 - RNA, 19 nt, Homo sapiens
  misc_RNA (1)...(19): siRNA sense strand
gagugaucaaacaaggaua

SEQ ID NO: 2296825 - RNA, 19 nt, Homo sapiens
  misc_RNA (1)...(19): siRNA sense strand
ccaagaacuggaacaggaa

SEQ ID NO: 2296826 - RNA, 19 nt, Homo sapiens
  misc_RNA (1)...(19): siRNA sense strand
agcuaagggugaggaguua

SEQ ID NO: 2296827 - RNA, 19 nt, Homo sapiens
  misc_RNA (1)...(19): siRNA sense strand
cagaagagcuauccgagca

SEQ ID NO: 2296828 - RNA, 19 nt, Homo sapiens
  misc_RNA (1)...(19): siRNA sense strand
ccuucugugugauggacaa

SEQ ID NO: 2296829 - RNA, 19 nt, Homo sapiens
  misc_RNA (1)...(19): siRNA sense strand
aggaagacagcccaggaua

SEQ ID NO: 2296830 - RNA, 19 nt, Homo sapiens
  misc_RNA (1)...(19): siRNA sense strand
aagaacuggaacaggaaau

SEQ ID NO: 2296831 - RNA, 19 nt, Homo sapiens
  misc_RNA (1)...(19): siRNA sense strand
aucaaauaccagcaagaaa

SEQ ID NO: 2296832 - RNA, 19 nt, Homo sapiens
  misc_RNA (1)...(19): siRNA sense strand
gugaauugguccagcugca

SEQ ID NO: 2296833 - RNA, 19 nt, Homo sapiens
  misc_RNA (1)...(19): siRNA sense strand
cucaaauggagcaggguga

SEQ ID NO: 2296834 - RNA, 19 nt, Homo sapiens
  misc_RNA (1)...(19): siRNA sense strand
aaaucaaauaccagcaaga

SEQ ID NO: 2296835 - RNA, 19 nt, Homo sapiens
  misc_RNA (1)...(19): siRNA sense strand
gaguguaagaagcgagcca

SEQ ID NO: 2296836 - RNA, 19 nt, Homo sapiens
  misc_RNA (1)...(19): siRNA sense strand
caaucaugucuuagcucaa

SEQ ID NO: 2296837 - RNA, 19 nt, Homo sapiens
  misc_RNA (1)...(19): siRNA sense strand
ugacagacacuauggagga

SEQ ID NO: 2296838 - RNA, 19 nt, Homo sapiens
  misc_RNA (1)...(19): siRNA sense strand
gauacauuucucaggaaga

SEQ ID NO: 2296839 - RNA, 19 nt, Homo sapiens
  misc_RNA (1)...(19): siRNA sense strand
ggaugaacugucacaaaca

SEQ ID NO: 2296840 - RNA, 19 nt, Homo sapiens
  misc_RNA (1)...(19): siRNA sense strand
uguaaauagcugugugaag

SEQ ID NO: 2296841 - RNA, 19 nt, Homo sapiens
  misc_RNA (1)...(19): siRNA sense strand
ggaacauggugaggagagu

SEQ ID NO: 2296842 - RNA, 19 nt, Homo sapiens
  misc_RNA (1)...(19): siRNA sense strand
ccuccagaaacuacgacaa

SEQ ID NO: 2296843 - RNA, 19 nt, Homo sapiens
  misc_RNA (1)...(19): siRNA sense strand
cuggaacaggaaauaaaua

SEQ ID NO: 2296844 - RNA, 19 nt, Homo sapiens
  misc_RNA (1)...(19): siRNA sense strand
guaaagacugcgggaugaa

SEQ ID NO: 2296845 - RNA, 19 nt, Homo sapiens
  misc_RNA (1)...(19): siRNA sense strand
aacauggugaggagaguaa

SEQ ID NO: 2296846 - RNA, 19 nt, Homo sapiens
  misc_RNA (1)...(19): siRNA sense strand
uuuacuacacugaggauga

SEQ ID NO: 2296847 - RNA, 19 nt, Homo sapiens
  misc_RNA (1)...(19): siRNA sense strand
ccaaggaaccacagagcuc

SEQ ID NO: 2296848 - RNA, 19 nt, Homo sapiens
  misc_RNA (1)...(19): siRNA sense strand
gagaguaaggaucggacca

SEQ ID NO: 2296849 - RNA, 19 nt, Homo sapiens
  misc_RNA (1)...(19): siRNA sense strand
ucauaaaaucaaaggagga

SEQ ID NO: 2296850 - RNA, 19 nt, Homo sapiens
  misc_RNA (1)...(19): siRNA sense strand
aacuggaacaggaaauaaa

SEQ ID NO: 2296851 - RNA, 19 nt, Homo sapiens
  misc_RNA (1)...(19): siRNA sense strand
acacuauggaggaguuuca

SEQ ID NO: 2296852 - RNA, 19 nt, Homo sapiens
  misc_RNA (1)...(19): siRNA sense strand
auguaaagacugcgggaug

SEQ ID NO: 2296853 - RNA, 19 nt, Homo sapiens
  misc_RNA (1)...(19): siRNA sense strand
accaagaacuggaacagga

SEQ ID NO: 2296854 - RNA, 19 nt, Homo sapiens
  misc_RNA (1)...(19): siRNA sense strand
agaacuggaacaggaaaua

SEQ ID NO: 2296855 - RNA, 19 nt, Homo sapiens
  misc_RNA (1)...(19): siRNA sense strand
aaagaauucaccaggacuu

SEQ ID NO: 2296856 - RNA, 19 nt, Homo sapiens
  misc_RNA (1)...(19): siRNA sense strand
agugaucaaacaaggauau

SEQ ID NO: 2296857 - RNA, 19 nt, Homo sapiens
  misc_RNA (1)...(19): siRNA sense strand
aaguaaaauuggagaggaa

SEQ ID NO: 2296858 - RNA, 19 nt, Homo sapiens
  misc_RNA (1)...(19): siRNA sense strand
gagugaucaacgaggaaua

SEQ ID NO: 2296859 - RNA, 19 nt, Homo sapiens
  misc_RNA (1)...(19): siRNA sense strand
uggaagaacgagugaucaa

SEQ ID NO: 2296860 - RNA, 19 nt, Homo sapiens
  misc_RNA (1)...(19): siRNA sense strand
ggcaaauggcagagaacau

SEQ ID NO: 2296861 - RNA, 19 nt, Homo sapiens
  misc_RNA (1)...(19): siRNA sense strand
cgacagugagaaaggagaa

SEQ ID NO: 2296862 - RNA, 19 nt, Homo sapiens
  misc_RNA (1)...(19): siRNA sense strand
ccuugugggaucugagaaa

SEQ ID NO: 2296863 - RNA, 19 nt, Homo sapiens
  misc_RNA (1)...(19): siRNA sense strand
aaccagaccagaagggaaa

SEQ ID NO: 2296864 - RNA, 19 nt, Homo sapiens
  misc_RNA (1)...(19): siRNA sense strand
gaaggaaggcuaugggcuu

SEQ ID NO: 2296865 - RNA, 19 nt, Homo sapiens
  misc_RNA (1)...(19): siRNA sense strand
cggcaguaguagaagaugu

SEQ ID NO: 2296866 - RNA, 19 nt, Homo sapiens
  misc_RNA (1)...(19): siRNA sense strand
cagugagaaaggagaauuu

SEQ ID NO: 2296867 - RNA, 19 nt, Homo sapiens
  misc_RNA (1)...(19): siRNA sense strand
gaaaagugguagaugcgaa

SEQ ID NO: 2296868 - RNA, 19 nt, Homo sapiens
  misc_RNA (1)...(19): siRNA sense strand
agaucaaccaugaaggaga

SEQ ID NO: 2296869 - RNA, 19 nt, Homo sapiens
  misc_RNA (1)...(19): siRNA sense strand
agauguaaccagaccagaa

SEQ ID NO: 2296870 - RNA, 19 nt, Homo sapiens
  misc_RNA (1)...(19): siRNA sense strand
gcguggauccagaaggaca

SEQ ID NO: 2296871 - RNA, 19 nt, Homo sapiens
  misc_RNA (1)...(19): siRNA sense strand
ccacaggaucagcugacaa

SEQ ID NO: 2296872 - RNA, 19 nt, Homo sapiens
  misc_RNA (1)...(19): siRNA sense strand
ggaucugagaaaucugaaa

SEQ ID NO: 2296873 - RNA, 19 nt, Homo sapiens
  misc_RNA (1)...(19): siRNA sense strand
guuuauucaugguggucau

SEQ ID NO: 2296874 - RNA, 19 nt, Homo sapiens
  misc_RNA (1)...(19): siRNA sense strand
uaaccagaccagaagggaa

SEQ ID NO: 2296875 - RNA, 19 nt, Homo sapiens
  misc_RNA (1)...(19): siRNA sense strand
ugguucaguuaguggaaaa

SEQ ID NO: 2296876 - RNA, 19 nt, Homo sapiens
  misc_RNA (1)...(19): siRNA sense strand
guaaaauuggagaggaaca

SEQ ID NO: 2296877 - RNA, 19 nt, Homo sapiens
  misc_RNA (1)...(19): siRNA sense strand
aggagaauuuggagguuuu

SEQ ID NO: 2296878 - RNA, 19 nt, Homo sapiens
  misc_RNA (1)...(19): siRNA sense strand
uggucauacugccaagaua

SEQ ID NO: 2296879 - RNA, 19 nt, Homo sapiens
  misc_RNA (1)...(19): siRNA sense strand
agaccagaagggaaagauu

SEQ ID NO: 2296880 - RNA, 19 nt, Homo sapiens
  misc_RNA (1)...(19): siRNA sense strand
ucgacgacgcaguggaaga

SEQ ID NO: 2296881 - RNA, 19 nt, Homo sapiens
  misc_RNA (1)...(19): siRNA sense strand
cguggauccagaaggacaa

SEQ ID NO: 2296882 - RNA, 19 nt, Homo sapiens
  misc_RNA (1)...(19): siRNA sense strand
ccaugaaggagaaguaaac

SEQ ID NO: 2296883 - RNA, 19 nt, Homo sapiens
  misc_RNA (1)...(19): siRNA sense strand
ugaucaacgaggaauacaa

SEQ ID NO: 2296884 - RNA, 19 nt, Homo sapiens
  misc_RNA (1)...(19): siRNA sense strand
gguacugaucgcagacuga

SEQ ID NO: 2296885 - RNA, 19 nt, Homo sapiens
  misc_RNA (1)...(19): siRNA sense strand
cuguaucagaagacaauau

SEQ ID NO: 2296886 - RNA, 19 nt, Homo sapiens
  misc_RNA (1)...(19): siRNA sense strand
accaugaaggagaaguaaa

SEQ ID NO: 2296887 - RNA, 19 nt, Homo sapiens
  misc_RNA (1)...(19): siRNA sense strand
gucacauaaggaugaaaua

SEQ ID NO: 2296888 - RNA, 19 nt, Homo sapiens
  misc_RNA (1)...(19): siRNA sense strand
gaaaggagaauuuggaggu

SEQ ID NO: 2296889 - RNA, 19 nt, Homo sapiens
  misc_RNA (1)...(19): siRNA sense strand
agucacauaaggaugaaau

SEQ ID NO: 2296890 - RNA, 19 nt, Homo sapiens
  misc_RNA (1)...(19): siRNA sense strand
cauucuugccacaggauca

SEQ ID NO: 2296891 - RNA, 19 nt, Homo sapiens
  misc_RNA (1)...(19): siRNA sense strand
cugcagagggagaugaaga

SEQ ID NO: 2296892 - RNA, 19 nt, Homo sapiens
  misc_RNA (1)...(19): siRNA sense strand
aagaacuggaggagaagaa

SEQ ID NO: 2296893 - RNA, 19 nt, Homo sapiens
  misc_RNA (1)...(19): siRNA sense strand
uagcacaauuggagagcca

SEQ ID NO: 2296894 - RNA, 19 nt, Homo sapiens
  misc_RNA (1)...(19): siRNA sense strand
ccacacuggguuugggaga

SEQ ID NO: 2296895 - RNA, 19 nt, Homo sapiens
  misc_RNA (1)...(19): siRNA sense strand
aagaaugagaggccagcaa

SEQ ID NO: 2296896 - RNA, 19 nt, Homo sapiens
  misc_RNA (1)...(19): siRNA sense strand
aagagagagaggagauuca

SEQ ID NO: 2296897 - RNA, 19 nt, Homo sapiens
  misc_RNA (1)...(19): siRNA sense strand
uagaggaacagcagagcau

SEQ ID NO: 2296898 - RNA, 19 nt, Homo sapiens
  misc_RNA (1)...(19): siRNA sense strand
ccaagagacaacaggugau

SEQ ID NO: 2296899 - RNA, 19 nt, Homo sapiens
  misc_RNA (1)...(19): siRNA sense strand
aauaagaugugaaaccaga

SEQ ID NO: 2296900 - RNA, 19 nt, Homo sapiens
  misc_RNA (1)...(19): siRNA sense strand
ggccagaggauucgggacu

SEQ ID NO: 2296901 - RNA, 19 nt, Homo sapiens
  misc_RNA (1)...(19): siRNA sense strand
caagggagcuccugacgga

SEQ ID NO: 2296902 - RNA, 19 nt, Homo sapiens
  misc_RNA (1)...(19): siRNA sense strand
aaccagaaagugccggaaa

SEQ ID NO: 2296903 - RNA, 19 nt, Homo sapiens
  misc_RNA (1)...(19): siRNA sense strand
cugcagagggagaugaaga

SEQ ID NO: 2296904 - RNA, 19 nt, Homo sapiens
  misc_RNA (1)...(19): siRNA sense strand
aagaacuggaggagaagaa

SEQ ID NO: 2296905 - RNA, 19 nt, Homo sapiens
  misc_RNA (1)...(19): siRNA sense strand
uagcacaauuggagagcca

SEQ ID NO: 2296906 - RNA, 19 nt, Homo sapiens
  misc_RNA (1)...(19): siRNA sense strand
ccacacuggguuugggaga

SEQ ID NO: 2296907 - RNA, 19 nt, Homo sapiens
  misc_RNA (1)...(19): siRNA sense strand
aagaaugagaggccagcaa

SEQ ID NO: 2296908 - RNA, 19 nt, Homo sapiens
  misc_RNA (1)...(19): siRNA sense strand
aagagagagaggagauuca

SEQ ID NO: 2296909 - RNA, 19 nt, Homo sapiens
  misc_RNA (1)...(19): siRNA sense strand
uagaggaacagcagagcau

SEQ ID NO: 2296910 - RNA, 19 nt, Homo sapiens
  misc_RNA (1)...(19): siRNA sense strand
ccaagagacaacaggugau

SEQ ID NO: 2296911 - RNA, 19 nt, Homo sapiens
  misc_RNA (1)...(19): siRNA sense strand
aauaagaugugaaaccaga

SEQ ID NO: 2296912 - RNA, 19 nt, Homo sapiens
  misc_RNA (1)...(19): siRNA sense strand
ggccagaggauucgggacu

SEQ ID NO: 2296913 - RNA, 19 nt, Homo sapiens
  misc_RNA (1)...(19): siRNA sense strand
caagggagcuccugacgga

SEQ ID NO: 2296914 - RNA, 19 nt, Homo sapiens
  misc_RNA (1)...(19): siRNA sense strand
aaccagaaagugccggaaa

SEQ ID NO: 2296915 - RNA, 19 nt, Homo sapiens
  misc_RNA (1)...(19): siRNA sense strand
gugaagaguacaagaaaau

SEQ ID NO: 2296916 - RNA, 19 nt, Homo sapiens
  misc_RNA (1)...(19): siRNA sense strand
gggcugaaucacuggaaaa

SEQ ID NO: 2296917 - RNA, 19 nt, Homo sapiens
  misc_RNA (1)...(19): siRNA sense strand
gugcaaaagauaugaaaca

SEQ ID NO: 2296918 - RNA, 19 nt, Homo sapiens
  misc_RNA (1)...(19): siRNA sense strand
ugugaagaguacaagaaaa

SEQ ID NO: 2296919 - RNA, 19 nt, Homo sapiens
  misc_RNA (1)...(19): siRNA sense strand
agaaggacaaagugguuau

SEQ ID NO: 2296920 - RNA, 19 nt, Homo sapiens
  misc_RNA (1)...(19): siRNA sense strand
ggaacaugcuagagccuac

SEQ ID NO: 2296921 - RNA, 19 nt, Homo sapiens
  misc_RNA (1)...(19): siRNA sense strand
agauaugaaacaucggcua

SEQ ID NO: 2296922 - RNA, 19 nt, Homo sapiens
  misc_RNA (1)...(19): siRNA sense strand
cugugaagaguacaagaaa

SEQ ID NO: 2296923 - RNA, 19 nt, Homo sapiens
  misc_RNA (1)...(19): siRNA sense strand
aggcaaccaaagaggugaa

SEQ ID NO: 2296924 - RNA, 19 nt, Homo sapiens
  misc_RNA (1)...(19): siRNA sense strand
cccacaacaagaaggacaa

SEQ ID NO: 2296925 - RNA, 19 nt, Homo sapiens
  misc_RNA (1)...(19): siRNA sense strand
gaacacaauucuucccaca

SEQ ID NO: 2296926 - RNA, 19 nt, Homo sapiens
  misc_RNA (1)...(19): siRNA sense strand
gagugagccaagaggaagu

SEQ ID NO: 2296927 - RNA, 19 nt, Homo sapiens
  misc_RNA (1)...(19): siRNA sense strand
ggaucagcugugaagagua

SEQ ID NO: 2296928 - RNA, 19 nt, Homo sapiens
  misc_RNA (1)...(19): siRNA sense strand
gcaccagggaagagacaag

SEQ ID NO: 2296929 - RNA, 19 nt, Homo sapiens
  misc_RNA (1)...(19): siRNA sense strand
aaacuaagucccaaggcca

SEQ ID NO: 2296930 - RNA, 19 nt, Homo sapiens
  misc_RNA (1)...(19): siRNA sense strand
gggaagagacaagccggaa

SEQ ID NO: 2296931 - RNA, 19 nt, Homo sapiens
  misc_RNA (1)...(19): siRNA sense strand
gaaaggaugguuauaacua

SEQ ID NO: 2296932 - RNA, 19 nt, Homo sapiens
  misc_RNA (1)...(19): siRNA sense strand
gguuauaacuacacucucu

SEQ ID NO: 2296933 - RNA, 19 nt, Homo sapiens
  misc_RNA (1)...(19): siRNA sense strand
uggaaaggaugguuauaac

SEQ ID NO: 2296934 - RNA, 19 nt, Homo sapiens
  misc_RNA (1)...(19): siRNA sense strand
auacagaacuagcugccuu

SEQ ID NO: 2296935 - RNA, 19 nt, Homo sapiens
  misc_RNA (1)...(19): siRNA sense strand
gacaaaacuugaagagcau

SEQ ID NO: 2296936 - RNA, 19 nt, Homo sapiens
  misc_RNA (1)...(19): siRNA sense strand
ucucuaagggugagcugaa

SEQ ID NO: 2296937 - RNA, 19 nt, Homo sapiens
  misc_RNA (1)...(19): siRNA sense strand
aggucgacuuucaagaauu

SEQ ID NO: 2296938 - RNA, 19 nt, Homo sapiens
  misc_RNA (1)...(19): siRNA sense strand
gcguuacccaggaggaaau

SEQ ID NO: 2296939 - RNA, 19 nt, Homo sapiens
  misc_RNA (1)...(19): siRNA sense strand
aaauuaagaaggagccaga

SEQ ID NO: 2296940 - RNA, 19 nt, Homo sapiens
  misc_RNA (1)...(19): siRNA sense strand
uguuaaaagaccuggcuau

SEQ ID NO: 2296941 - RNA, 19 nt, Homo sapiens
  misc_RNA (1)...(19): siRNA sense strand
cuaucgaguuaaggagauu

SEQ ID NO: 2296942 - RNA, 19 nt, Homo sapiens
  misc_RNA (1)...(19): siRNA sense strand
acugacaagcuuaguaaaa

SEQ ID NO: 2296943 - RNA, 19 nt, Homo sapiens
  misc_RNA (1)...(19): siRNA sense strand
auuaagaaggagccagaga

SEQ ID NO: 2296944 - RNA, 19 nt, Homo sapiens
  misc_RNA (1)...(19): siRNA sense strand
ucaugaaagagaagagaaa

SEQ ID NO: 2296945 - RNA, 19 nt, Homo sapiens
  misc_RNA (1)...(19): siRNA sense strand
gaagagaaagcauaggaaa

SEQ ID NO: 2296946 - RNA, 19 nt, Homo sapiens
  misc_RNA (1)...(19): siRNA sense strand
agaaagcauaggaaagaaa

SEQ ID NO: 2296947 - RNA, 19 nt, Homo sapiens
  misc_RNA (1)...(19): siRNA sense strand
ccaaggauaucaugaaaga

SEQ ID NO: 2296948 - RNA, 19 nt, Homo sapiens
  misc_RNA (1)...(19): siRNA sense strand
cugcaggacaccaaggaua

SEQ ID NO: 2296949 - RNA, 19 nt, Homo sapiens
  misc_RNA (1)...(19): siRNA sense strand
cguaaggaagagugggaga

SEQ ID NO: 2296950 - RNA, 19 nt, Homo sapiens
  misc_RNA (1)...(19): siRNA sense strand
cuuacagggacgauggaaa

SEQ ID NO: 2296951 - RNA, 19 nt, Homo sapiens
  misc_RNA (1)...(19): siRNA sense strand
aaagagaagagaaagcaua

SEQ ID NO: 2296952 - RNA, 19 nt, Homo sapiens
  misc_RNA (1)...(19): siRNA sense strand
aaucaagacacguaaggaa

SEQ ID NO: 2296953 - RNA, 19 nt, Homo sapiens
  misc_RNA (1)...(19): siRNA sense strand
aggaagagugggagaaaau

SEQ ID NO: 2296954 - RNA, 19 nt, Homo sapiens
  misc_RNA (1)...(19): siRNA sense strand
gcauaggaaagaaaagaaa

SEQ ID NO: 2296955 - RNA, 19 nt, Homo sapiens
  misc_RNA (1)...(19): siRNA sense strand
gagaagaugcugcaggaca

SEQ ID NO: 2296956 - RNA, 19 nt, Homo sapiens
  misc_RNA (1)...(19): siRNA sense strand
ccaacaucacccuggcaaa

SEQ ID NO: 2296957 - RNA, 19 nt, Homo sapiens
  misc_RNA (1)...(19): siRNA sense strand
gaguaaauaugcagaggac

SEQ ID NO: 2296958 - RNA, 19 nt, Homo sapiens
  misc_RNA (1)...(19): siRNA sense strand
gaacaagagaagcgggaug

SEQ ID NO: 2296959 - RNA, 19 nt, Homo sapiens
  misc_RNA (1)...(19): siRNA sense strand
aaggauaucaugaaagaga

SEQ ID NO: 2296960 - RNA, 19 nt, Homo sapiens
  misc_RNA (1)...(19): siRNA sense strand
gggaacaagagaagcggga

SEQ ID NO: 2296961 - RNA, 19 nt, Homo sapiens
  misc_RNA (1)...(19): siRNA sense strand
gagaaagcauaggaaagaa

SEQ ID NO: 2296962 - RNA, 19 nt, Homo sapiens
  misc_RNA (1)...(19): siRNA sense strand
agagaaagcauaggaaaga

SEQ ID NO: 2296963 - RNA, 19 nt, Homo sapiens
  misc_RNA (1)...(19): siRNA sense strand
caccaaggauaucaugaaa

SEQ ID NO: 2296964 - RNA, 19 nt, Homo sapiens
  misc_RNA (1)...(19): siRNA sense strand
gaaagagaagagaaagcau

SEQ ID NO: 2296965 - RNA, 19 nt, Homo sapiens
  misc_RNA (1)...(19): siRNA sense strand
aagagaaagcauaggaaag

SEQ ID NO: 2296966 - RNA, 19 nt, Homo sapiens
  misc_RNA (1)...(19): siRNA sense strand
cugaauuugaugaggacga

SEQ ID NO: 2296967 - RNA, 19 nt, Homo sapiens
  misc_RNA (1)...(19): siRNA sense strand
aggauaucaugaaagagaa

SEQ ID NO: 2296968 - RNA, 19 nt, Homo sapiens
  misc_RNA (1)...(19): siRNA sense strand
aggagaagaugcugcagga

SEQ ID NO: 2296969 - RNA, 19 nt, Homo sapiens
  misc_RNA (1)...(19): siRNA sense strand
ggcaagaauuuguggaguc

SEQ ID NO: 2296970 - RNA, 19 nt, Homo sapiens
  misc_RNA (1)...(19): siRNA sense strand
auacaauaccugugauacu

SEQ ID NO: 2296971 - RNA, 19 nt, Homo sapiens
  misc_RNA (1)...(19): siRNA sense strand
cguaaaaucaagacacgua

SEQ ID NO: 2296972 - RNA, 19 nt, Homo sapiens
  misc_RNA (1)...(19): siRNA sense strand
guaaggaagagugggagaa

SEQ ID NO: 2296973 - RNA, 19 nt, Homo sapiens
  misc_RNA (1)...(19): siRNA sense strand
guggacaaccaaagaggau

SEQ ID NO: 2296974 - RNA, 19 nt, Homo sapiens
  misc_RNA (1)...(19): siRNA sense strand
auucaagaccagaagcuuu

SEQ ID NO: 2296975 - RNA, 19 nt, Homo sapiens
  misc_RNA (1)...(19): siRNA sense strand
uuacagggacgauggaaaa

SEQ ID NO: 2296976 - RNA, 19 nt, Homo sapiens
  misc_RNA (1)...(19): siRNA sense strand
agaagagaaagcauaggaa

SEQ ID NO: 2296977 - RNA, 19 nt, Homo sapiens
  misc_RNA (1)...(19): siRNA sense strand
uaaggaagagugggagaaa

SEQ ID NO: 2296978 - RNA, 19 nt, Homo sapiens
  misc_RNA (1)...(19): siRNA sense strand
agcgggauguugugggcaa

SEQ ID NO: 2296979 - RNA, 19 nt, Homo sapiens
  misc_RNA (1)...(19): siRNA sense strand
ucgaccgacuacagguuaa

SEQ ID NO: 2296980 - RNA, 19 nt, Homo sapiens
  misc_RNA (1)...(19): siRNA sense strand
acaccaaggauaucaugaa

SEQ ID NO: 2296981 - RNA, 19 nt, Homo sapiens
  misc_RNA (1)...(19): siRNA sense strand
agaagaugcugcaggacac

SEQ ID NO: 2296982 - RNA, 19 nt, Homo sapiens
  misc_RNA (1)...(19): siRNA sense strand
cuguaaagaaguugaguuc

SEQ ID NO: 2296983 - RNA, 19 nt, Homo sapiens
  misc_RNA (1)...(19): siRNA sense strand
cuguaaagaaguugaguuc

SEQ ID NO: 2296984 - RNA, 19 nt, Homo sapiens
  misc_RNA (1)...(19): siRNA sense strand
aggaaauuagcaagggaaa

SEQ ID NO: 2296985 - RNA, 19 nt, Homo sapiens
  misc_RNA (1)...(19): siRNA sense strand
gggaaagaggaaagaggau

SEQ ID NO: 2296986 - RNA, 19 nt, Homo sapiens
  misc_RNA (1)...(19): siRNA sense strand
uggaaaucaacgagaacuu

SEQ ID NO: 2296987 - RNA, 19 nt, Homo sapiens
  misc_RNA (1)...(19): siRNA sense strand
ugaagaaaacccaggaaau

SEQ ID NO: 2296988 - RNA, 19 nt, Homo sapiens
  misc_RNA (1)...(19): siRNA sense strand
caggaaauuagcaagggaa

SEQ ID NO: 2296989 - RNA, 19 nt, Homo sapiens
  misc_RNA (1)...(19): siRNA sense strand
aggaaagaggauagcuuga

SEQ ID NO: 2296990 - RNA, 19 nt, Homo sapiens
  misc_RNA (1)...(19): siRNA sense strand
agaggaaagaggauagcuu

SEQ ID NO: 2296991 - RNA, 19 nt, Homo sapiens
  misc_RNA (1)...(19): siRNA sense strand
uuagcaagggaaagaggaa

SEQ ID NO: 2296992 - RNA, 19 nt, Homo sapiens
  misc_RNA (1)...(19): siRNA sense strand
gaggauagcuugacugccu

SEQ ID NO: 2296993 - RNA, 19 nt, Homo sapiens
  misc_RNA (1)...(19): siRNA sense strand
ccaggaaauuagcaaggga

SEQ ID NO: 2296994 - RNA, 19 nt, Homo sapiens
  misc_RNA (1)...(19): siRNA sense strand
uagcaagggaaagaggaaa

SEQ ID NO: 2296995 - RNA, 19 nt, Homo sapiens
  misc_RNA (1)...(19): siRNA sense strand
aggaaauuagcaagggaaa

SEQ ID NO: 2296996 - RNA, 19 nt, Homo sapiens
  misc_RNA (1)...(19): siRNA sense strand
gggaaagaggaaagaggau

SEQ ID NO: 2296997 - RNA, 19 nt, Homo sapiens
  misc_RNA (1)...(19): siRNA sense strand
uggaaaucaacgagaacuu

SEQ ID NO: 2296998 - RNA, 19 nt, Homo sapiens
  misc_RNA (1)...(19): siRNA sense strand
ugaagaaaacccaggaaau

SEQ ID NO: 2296999 - RNA, 19 nt, Homo sapiens
  misc_RNA (1)...(19): siRNA sense strand
caggaaauuagcaagggaa

SEQ ID NO: 2297000 - RNA, 19 nt, Homo sapiens
  misc_RNA (1)...(19): siRNA sense strand
aggaaagaggauagcuuga

SEQ ID NO: 2297001 - RNA, 19 nt, Homo sapiens
  misc_RNA (1)...(19): siRNA sense strand
agaggaaagaggauagcuu

SEQ ID NO: 2297002 - RNA, 19 nt, Homo sapiens
  misc_RNA (1)...(19): siRNA sense strand
uuagcaagggaaagaggaa

SEQ ID NO: 2297003 - RNA, 19 nt, Homo sapiens
  misc_RNA (1)...(19): siRNA sense strand
gaggauagcuugacugccu

SEQ ID NO: 2297004 - RNA, 19 nt, Homo sapiens
  misc_RNA (1)...(19): siRNA sense strand
ccaggaaauuagcaaggga

SEQ ID NO: 2297005 - RNA, 19 nt, Homo sapiens
  misc_RNA (1)...(19): siRNA sense strand
uagcaagggaaagaggaaa

SEQ ID NO: 2297006 - RNA, 19 nt, Homo sapiens
  misc_RNA (1)...(19): siRNA sense strand
cugcagaaggacaggacaa

SEQ ID NO: 2297007 - RNA, 19 nt, Homo sapiens
  misc_RNA (1)...(19): siRNA sense strand
aagaaagaggagaagcaua

SEQ ID NO: 2297008 - RNA, 19 nt, Homo sapiens
  misc_RNA (1)...(19): siRNA sense strand
uagcaagacacaaggcaga

SEQ ID NO: 2297009 - RNA, 19 nt, Homo sapiens
  misc_RNA (1)...(19): siRNA sense strand
agacuuaaaaccagagaau

SEQ ID NO: 2297010 - RNA, 19 nt, Homo sapiens
  misc_RNA (1)...(19): siRNA sense strand
auauuaugucggagcggaa

SEQ ID NO: 2297011 - RNA, 19 nt, Homo sapiens
  misc_RNA (1)...(19): siRNA sense strand
ugaaauagccagugccuug

SEQ ID NO: 2297012 - RNA, 19 nt, Homo sapiens
  misc_RNA (1)...(19): siRNA sense strand
cuacauuaaugguggagag

SEQ ID NO: 2297013 - RNA, 19 nt, Homo sapiens
  misc_RNA (1)...(19): siRNA sense strand
aaaagaaagaggagaagca

SEQ ID NO: 2297014 - RNA, 19 nt, Homo sapiens
  misc_RNA (1)...(19): siRNA sense strand
uguugaagaaugugaagca

SEQ ID NO: 2297015 - RNA, 19 nt, Homo sapiens
  misc_RNA (1)...(19): siRNA sense strand
gacacaaggcagaagaagu

SEQ ID NO: 2297016 - RNA, 19 nt, Homo sapiens
  misc_RNA (1)...(19): siRNA sense strand
cagucaaaguuuuacagaa

SEQ ID NO: 2297017 - RNA, 19 nt, Homo sapiens
  misc_RNA (1)...(19): siRNA sense strand
agucaaaguuuuacagaag

SEQ ID NO: 2297018 - RNA, 19 nt, Homo sapiens
  misc_RNA (1)...(19): siRNA sense strand
ccgaagaggaagaaggcaa

SEQ ID NO: 2297019 - RNA, 19 nt, Homo sapiens
  misc_RNA (1)...(19): siRNA sense strand
cugcagaagacuagagaga

SEQ ID NO: 2297020 - RNA, 19 nt, Homo sapiens
  misc_RNA (1)...(19): siRNA sense strand
cgacauaggaaaagaguau

SEQ ID NO: 2297021 - RNA, 19 nt, Homo sapiens
  misc_RNA (1)...(19): siRNA sense strand
ggauaucgacauaggaaaa

SEQ ID NO: 2297022 - RNA, 19 nt, Homo sapiens
  misc_RNA (1)...(19): siRNA sense strand
cgaucaaaccuaaagagaa

SEQ ID NO: 2297023 - RNA, 19 nt, Homo sapiens
  misc_RNA (1)...(19): siRNA sense strand
agaaagagaaggugaggca

SEQ ID NO: 2297024 - RNA, 19 nt, Homo sapiens
  misc_RNA (1)...(19): siRNA sense strand
ggaucaguaaagaaggaaa

SEQ ID NO: 2297025 - RNA, 19 nt, Homo sapiens
  misc_RNA (1)...(19): siRNA sense strand
aggguaaacugguuggaau

SEQ ID NO: 2297026 - RNA, 19 nt, Homo sapiens
  misc_RNA (1)...(19): siRNA sense strand
agaagaagucacaagacaa

SEQ ID NO: 2297027 - RNA, 19 nt, Homo sapiens
  misc_RNA (1)...(19): siRNA sense strand
cugccagaauuaagaacaa

SEQ ID NO: 2297028 - RNA, 19 nt, Homo sapiens
  misc_RNA (1)...(19): siRNA sense strand
gaucaguaaagaaggaaaa

SEQ ID NO: 2297029 - RNA, 19 nt, Homo sapiens
  misc_RNA (1)...(19): siRNA sense strand
gugacagcaugaaggacaa

SEQ ID NO: 2297030 - RNA, 19 nt, Homo sapiens
  misc_RNA (1)...(19): siRNA sense strand
uauagaagugugagggaga

SEQ ID NO: 2297031 - RNA, 19 nt, Homo sapiens
  misc_RNA (1)...(19): siRNA sense strand
gauuccaaguucaggagaa

SEQ ID NO: 2297032 - RNA, 19 nt, Homo sapiens
  misc_RNA (1)...(19): siRNA sense strand
ccaacgaugggcagagaau

SEQ ID NO: 2297033 - RNA, 19 nt, Homo sapiens
  misc_RNA (1)...(19): siRNA sense strand
aggaagaaggcaagcacau

SEQ ID NO: 2297034 - RNA, 19 nt, Homo sapiens
  misc_RNA (1)...(19): siRNA sense strand
agauugauggagugagaau

SEQ ID NO: 2297035 - RNA, 19 nt, Homo sapiens
  misc_RNA (1)...(19): siRNA sense strand
aagagaaaucccuggguga

SEQ ID NO: 2297036 - RNA, 19 nt, Homo sapiens
  misc_RNA (1)...(19): siRNA sense strand
ggcaagaaagagaagguga

SEQ ID NO: 2297037 - RNA, 19 nt, Homo sapiens
  misc_RNA (1)...(19): siRNA sense strand
augaaagagggcuguauua

SEQ ID NO: 2297038 - RNA, 19 nt, Homo sapiens
  misc_RNA (1)...(19): siRNA sense strand
aaacaggaucaguaaagaa

SEQ ID NO: 2297039 - RNA, 19 nt, Homo sapiens
  misc_RNA (1)...(19): siRNA sense strand
agggacaggugguggaguu

SEQ ID NO: 2297040 - RNA, 19 nt, Homo sapiens
  misc_RNA (1)...(19): siRNA sense strand
caguaaagccagaggaagg

SEQ ID NO: 2297041 - RNA, 19 nt, Homo sapiens
  misc_RNA (1)...(19): siRNA sense strand
acaauaaagggcaggaguu

SEQ ID NO: 2297042 - RNA, 19 nt, Homo sapiens
  misc_RNA (1)...(19): siRNA sense strand
aggauaucgacauaggaaa

SEQ ID NO: 2297043 - RNA, 19 nt, Homo sapiens
  misc_RNA (1)...(19): siRNA sense strand
gcagagaauguuugaggca

SEQ ID NO: 2297044 - RNA, 19 nt, Homo sapiens
  misc_RNA (1)...(19): siRNA sense strand
cgaggaggagcgucggaua

SEQ ID NO: 2297045 - RNA, 19 nt, Homo sapiens
  misc_RNA (1)...(19): siRNA sense strand
acagcauauuucaggagaa

SEQ ID NO: 2297046 - RNA, 19 nt, Homo sapiens
  misc_RNA (1)...(19): siRNA sense strand
ggguaaacugguuggaauc

SEQ ID NO: 2297047 - RNA, 19 nt, Homo sapiens
  misc_RNA (1)...(19): siRNA sense strand
gauacaacucugugcugaa

SEQ ID NO: 2297048 - RNA, 19 nt, Homo sapiens
  misc_RNA (1)...(19): siRNA sense strand
ccauggacacagagacaga

SEQ ID NO: 2297049 - RNA, 19 nt, Homo sapiens
  misc_RNA (1)...(19): siRNA sense strand
gaggaggagcgucggauau

SEQ ID NO: 2297050 - RNA, 19 nt, Homo sapiens
  misc_RNA (1)...(19): siRNA sense strand
cagugugggaaguggaaaa

SEQ ID NO: 2297051 - RNA, 19 nt, Homo sapiens
  misc_RNA (1)...(19): siRNA sense strand
gcaucuacauccuggacga

SEQ ID NO: 2297052 - RNA, 19 nt, Homo sapiens
  misc_RNA (1)...(19): siRNA sense strand
ccaucuuaggcaugauuua

SEQ ID NO: 2297053 - RNA, 19 nt, Homo sapiens
  misc_RNA (1)...(19): siRNA sense strand
gcccagucccgaagaggaa

SEQ ID NO: 2297054 - RNA, 19 nt, Homo sapiens
  misc_RNA (1)...(19): siRNA sense strand
ugguugaguuacuggauca

SEQ ID NO: 2297055 - RNA, 19 nt, Homo sapiens
  misc_RNA (1)...(19): siRNA sense strand
cuaaagagaagauuggcau

SEQ ID NO: 2297056 - RNA, 19 nt, Homo sapiens
  misc_RNA (1)...(19): siRNA sense strand
ggauuauggugcuggccca

SEQ ID NO: 2297057 - RNA, 19 nt, Homo sapiens
  misc_RNA (1)...(19): siRNA sense strand
agacaaggguccuaaaaca

SEQ ID NO: 2297058 - RNA, 19 nt, Homo sapiens
  misc_RNA (1)...(19): siRNA sense strand
ccuaaaacaggaucaguaa

SEQ ID NO: 2297059 - RNA, 19 nt, Homo sapiens
  misc_RNA (1)...(19): siRNA sense strand
gguauagaagugugaggga

SEQ ID NO: 2297060 - RNA, 19 nt, Homo sapiens
  misc_RNA (1)...(19): siRNA sense strand
gcugaaugaaguugggcca

SEQ ID NO: 2297061 - RNA, 19 nt, Homo sapiens
  misc_RNA (1)...(19): siRNA sense strand
caugaggaacugaugaauu

SEQ ID NO: 2297062 - RNA, 19 nt, Homo sapiens
  misc_RNA (1)...(19): siRNA sense strand
agaauguauugcucagcua

SEQ ID NO: 2297063 - RNA, 19 nt, Homo sapiens
  misc_RNA (1)...(19): siRNA sense strand
caucauggcuugagugcuc

SEQ ID NO: 2297064 - RNA, 19 nt, Homo sapiens
  misc_RNA (1)...(19): siRNA sense strand
cggaugaacguguccagaa

SEQ ID NO: 2297065 - RNA, 19 nt, Homo sapiens
  misc_RNA (1)...(19): siRNA sense strand
ccucacaucaagauagaga

SEQ ID NO: 2297066 - RNA, 19 nt, Homo sapiens
  misc_RNA (1)...(19): siRNA sense strand
gugcauagcuagagcccug

SEQ ID NO: 2297067 - RNA, 19 nt, Homo sapiens
  misc_RNA (1)...(19): siRNA sense strand
aggaauaugaugaagaaag

SEQ ID NO: 2297068 - RNA, 19 nt, Homo sapiens
  misc_RNA (1)...(19): siRNA sense strand
ccugaaagccauucgagga

SEQ ID NO: 2297069 - RNA, 19 nt, Homo sapiens
  misc_RNA (1)...(19): siRNA sense strand
ccauccacgccuacaauaa

SEQ ID NO: 2297070 - RNA, 19 nt, Homo sapiens
  misc_RNA (1)...(19): siRNA sense strand
cgugaacugcagaagacua

SEQ ID NO: 2297071 - RNA, 19 nt, Homo sapiens
  misc_RNA (1)...(19): siRNA sense strand
guuuguuucuaauggaaga

SEQ ID NO: 2297072 - RNA, 19 nt, Homo sapiens
  misc_RNA (1)...(19): siRNA sense strand
ugggaaggaauaugaugaa

SEQ ID NO: 2297073 - RNA, 19 nt, Homo sapiens
  misc_RNA (1)...(19): siRNA sense strand
agugacagcaugaaggaca

SEQ ID NO: 2297074 - RNA, 19 nt, Homo sapiens
  misc_RNA (1)...(19): siRNA sense strand
aggacacacaugaaagaau

SEQ ID NO: 2297075 - RNA, 19 nt, Homo sapiens
  misc_RNA (1)...(19): siRNA sense strand
ccagaagaugaaugaaguu

SEQ ID NO: 2297076 - RNA, 19 nt, Homo sapiens
  misc_RNA (1)...(19): siRNA sense strand
gaggaguugucuuugucaa

SEQ ID NO: 2297077 - RNA, 19 nt, Homo sapiens
  misc_RNA (1)...(19): siRNA sense strand
aggagcugcuggaugacaa

SEQ ID NO: 2297078 - RNA, 19 nt, Homo sapiens
  misc_RNA (1)...(19): siRNA sense strand
gcugaagcgucuggacaau

SEQ ID NO: 2297079 - RNA, 19 nt, Homo sapiens
  misc_RNA (1)...(19): siRNA sense strand
aagagguucacaugauaaa

SEQ ID NO: 2297080 - RNA, 19 nt, Homo sapiens
  misc_RNA (1)...(19): siRNA sense strand
agcaguaaagccagaggaa

SEQ ID NO: 2297081 - RNA, 19 nt, Homo sapiens
  misc_RNA (1)...(19): siRNA sense strand
agggagagaaccagcacuu

SEQ ID NO: 2297082 - RNA, 19 nt, Homo sapiens
  misc_RNA (1)...(19): siRNA sense strand
gagcugaagcgucuggaca

SEQ ID NO: 2297083 - RNA, 19 nt, Homo sapiens
  misc_RNA (1)...(19): siRNA sense strand
aggcaagaguagugcgaac

SEQ ID NO: 2297084 - RNA, 19 nt, Homo sapiens
  misc_RNA (1)...(19): siRNA sense strand
agaccaagacgcugcucaa

SEQ ID NO: 2297085 - RNA, 19 nt, Homo sapiens
  misc_RNA (1)...(19): siRNA sense strand
gaacucaucaggugcgaga

SEQ ID NO: 2297086 - RNA, 19 nt, Homo sapiens
  misc_RNA (1)...(19): siRNA sense strand
cauucaucgacgaggccaa

SEQ ID NO: 2297087 - RNA, 19 nt, Homo sapiens
  misc_RNA (1)...(19): siRNA sense strand
guacagaccaggaccgugu

SEQ ID NO: 2297088 - RNA, 19 nt, Homo sapiens
  misc_RNA (1)...(19): siRNA sense strand
cggagcaguacgaggacaa

SEQ ID NO: 2297089 - RNA, 19 nt, Homo sapiens
  misc_RNA (1)...(19): siRNA sense strand
uuguguaugcugugugaaa

SEQ ID NO: 2297090 - RNA, 19 nt, Homo sapiens
  misc_RNA (1)...(19): siRNA sense strand
agcuuaagccacugagcaa

SEQ ID NO: 2297091 - RNA, 19 nt, Homo sapiens
  misc_RNA (1)...(19): siRNA sense strand
uggcauaauccgggugcaa

SEQ ID NO: 2297092 - RNA, 19 nt, Homo sapiens
  misc_RNA (1)...(19): siRNA sense strand
gcaaggaagauuugggccu

SEQ ID NO: 2297093 - RNA, 19 nt, Homo sapiens
  misc_RNA (1)...(19): siRNA sense strand
agaucagagccauccgaaa

SEQ ID NO: 2297094 - RNA, 19 nt, Homo sapiens
  misc_RNA (1)...(19): siRNA sense strand
ggguguuaugaccggguua

SEQ ID NO: 2297095 - RNA, 19 nt, Homo sapiens
  misc_RNA (1)...(19): siRNA sense strand
acagagacugcuaggauca

SEQ ID NO: 2297096 - RNA, 19 nt, Homo sapiens
  misc_RNA (1)...(19): siRNA sense strand
ccgaaacaccaaugaguac

SEQ ID NO: 2297097 - RNA, 19 nt, Homo sapiens
  misc_RNA (1)...(19): siRNA sense strand
agcacaaacacgagagacu

SEQ ID NO: 2297098 - RNA, 19 nt, Homo sapiens
  misc_RNA (1)...(19): siRNA sense strand
cgugauugacuaugggacu

SEQ ID NO: 2297099 - RNA, 19 nt, Homo sapiens
  misc_RNA (1)...(19): siRNA sense strand
gcaaugaggaagaagggaa

SEQ ID NO: 2297100 - RNA, 19 nt, Homo sapiens
  misc_RNA (1)...(19): siRNA sense strand
aaguaauggcaaagaguau

SEQ ID NO: 2297101 - RNA, 19 nt, Homo sapiens
  misc_RNA (1)...(19): siRNA sense strand
acaaagacauccaggagga

SEQ ID NO: 2297102 - RNA, 19 nt, Homo sapiens
  misc_RNA (1)...(19): siRNA sense strand
agaagggaacagugaagaa

SEQ ID NO: 2297103 - RNA, 19 nt, Homo sapiens
  misc_RNA (1)...(19): siRNA sense strand
aggaagaagggaacaguga

SEQ ID NO: 2297104 - RNA, 19 nt, Homo sapiens
  misc_RNA (1)...(19): siRNA sense strand
gaaauugaaguaauggcaa

SEQ ID NO: 2297105 - RNA, 19 nt, Homo sapiens
  misc_RNA (1)...(19): siRNA sense strand
uggcuuuggaccagaauau

SEQ ID NO: 2297106 - RNA, 19 nt, Homo sapiens
  misc_RNA (1)...(19): siRNA sense strand
ucuucucuuuggaggaaua

SEQ ID NO: 2297107 - RNA, 19 nt, Homo sapiens
  misc_RNA (1)...(19): siRNA sense strand
cuguauuaauuggucgaaa

SEQ ID NO: 2297108 - RNA, 19 nt, Homo sapiens
  misc_RNA (1)...(19): siRNA sense strand
agaaacuugggaaggcuaa

SEQ ID NO: 2297109 - RNA, 19 nt, Homo sapiens
  misc_RNA (1)...(19): siRNA sense strand
ucaugaaagaugcaaucaa

SEQ ID NO: 2297110 - RNA, 19 nt, Homo sapiens
  misc_RNA (1)...(19): siRNA sense strand
aguccuaagccgcagauuu

SEQ ID NO: 2297111 - RNA, 19 nt, Homo sapiens
  misc_RNA (1)...(19): siRNA sense strand
aggaagaagaggaggaaga

SEQ ID NO: 2297112 - RNA, 19 nt, Homo sapiens
  misc_RNA (1)...(19): siRNA sense strand
aggaagaugaggaugauaa

SEQ ID NO: 2297113 - RNA, 19 nt, Homo sapiens
  misc_RNA (1)...(19): siRNA sense strand
ugacauggccacagagaau

SEQ ID NO: 2297114 - RNA, 19 nt, Homo sapiens
  misc_RNA (1)...(19): siRNA sense strand
gggcagugguuuagcuaca

SEQ ID NO: 2297115 - RNA, 19 nt, Homo sapiens
  misc_RNA (1)...(19): siRNA sense strand
cuucagaaugguugauaua

SEQ ID NO: 2297116 - RNA, 19 nt, Homo sapiens
  misc_RNA (1)...(19): siRNA sense strand
cuauggagucagagaacua

SEQ ID NO: 2297117 - RNA, 19 nt, Homo sapiens
  misc_RNA (1)...(19): siRNA sense strand
acuaaaaugccauggaaaa

SEQ ID NO: 2297118 - RNA, 19 nt, Homo sapiens
  misc_RNA (1)...(19): siRNA sense strand
aggcaugaaaccagauuua

SEQ ID NO: 2297119 - RNA, 19 nt, Homo sapiens
  misc_RNA (1)...(19): siRNA sense strand
gugaaauagcagaaggcau

SEQ ID NO: 2297120 - RNA, 19 nt, Homo sapiens
  misc_RNA (1)...(19): siRNA sense strand
ggauauggaagcugaccaa

SEQ ID NO: 2297121 - RNA, 19 nt, Homo sapiens
  misc_RNA (1)...(19): siRNA sense strand
aggaggaagaugaggauga

SEQ ID NO: 2297122 - RNA, 19 nt, Homo sapiens
  misc_RNA (1)...(19): siRNA sense strand
cugggaagccuuagaaauu

SEQ ID NO: 2297123 - RNA, 19 nt, Homo sapiens
  misc_RNA (1)...(19): siRNA sense strand
gaaggaacuuugaaggaca

SEQ ID NO: 2297124 - RNA, 19 nt, Homo sapiens
  misc_RNA (1)...(19): siRNA sense strand
cuucaugaaugcagcaauu

SEQ ID NO: 2297125 - RNA, 19 nt, Homo sapiens
  misc_RNA (1)...(19): siRNA sense strand
guacagagcuuuugggcga

SEQ ID NO: 2297126 - RNA, 19 nt, Homo sapiens
  misc_RNA (1)...(19): siRNA sense strand
caaugagagcaguaacaaa

SEQ ID NO: 2297127 - RNA, 19 nt, Homo sapiens
  misc_RNA (1)...(19): siRNA sense strand
aaccaaagauguugagcuu

SEQ ID NO: 2297128 - RNA, 19 nt, Homo sapiens
  misc_RNA (1)...(19): siRNA sense strand
cugaagaccuccaggaucu

SEQ ID NO: 2297129 - RNA, 19 nt, Homo sapiens
  misc_RNA (1)...(19): siRNA sense strand
gcucaaaaguacaaauuca

SEQ ID NO: 2297130 - RNA, 19 nt, Homo sapiens
  misc_RNA (1)...(19): siRNA sense strand
ugaaagaugcauaugaaga

SEQ ID NO: 2297131 - RNA, 19 nt, Homo sapiens
  misc_RNA (1)...(19): siRNA sense strand
gcaaaaguguggaggaaac

SEQ ID NO: 2297132 - RNA, 19 nt, Homo sapiens
  misc_RNA (1)...(19): siRNA sense strand
ccaaguaggaugugggaag

SEQ ID NO: 2297133 - RNA, 19 nt, Homo sapiens
  misc_RNA (1)...(19): siRNA sense strand
acaucggaguacaguauaa

SEQ ID NO: 2297134 - RNA, 19 nt, Homo sapiens
  misc_RNA (1)...(19): siRNA sense strand
ccuauugaucugaaggcaa

SEQ ID NO: 2297135 - RNA, 19 nt, Homo sapiens
  misc_RNA (1)...(19): siRNA sense strand
gaaagauggaaguguccua

SEQ ID NO: 2297136 - RNA, 19 nt, Homo sapiens
  misc_RNA (1)...(19): siRNA sense strand
auuuagauccagagugcaa

SEQ ID NO: 2297137 - RNA, 19 nt, Homo sapiens
  misc_RNA (1)...(19): siRNA sense strand
gcaaccagaaguaggaaca

SEQ ID NO: 2297138 - RNA, 19 nt, Homo sapiens
  misc_RNA (1)...(19): siRNA sense strand
ugugcaugucugugaaaua

SEQ ID NO: 2297139 - RNA, 19 nt, Homo sapiens
  misc_RNA (1)...(19): siRNA sense strand
cugcaaaaguguggaggaa

SEQ ID NO: 2297140 - RNA, 19 nt, Homo sapiens
  misc_RNA (1)...(19): siRNA sense strand
gugcagugaagaaggugaa

SEQ ID NO: 2297141 - RNA, 19 nt, Homo sapiens
  misc_RNA (1)...(19): siRNA sense strand
caaaguuggcagaggcuca

SEQ ID NO: 2297142 - RNA, 19 nt, Homo sapiens
  misc_RNA (1)...(19): siRNA sense strand
aaacuacuuuagagaggaa

SEQ ID NO: 2297143 - RNA, 19 nt, Homo sapiens
  misc_RNA (1)...(19): siRNA sense strand
gggcauauguggucgcacu

SEQ ID NO: 2297144 - RNA, 19 nt, Homo sapiens
  misc_RNA (1)...(19): siRNA sense strand
uggaaguguccuaagagaa

SEQ ID NO: 2297145 - RNA, 19 nt, Homo sapiens
  misc_RNA (1)...(19): siRNA sense strand
cuguaugcacuuacgauaa

SEQ ID NO: 2297146 - RNA, 19 nt, Homo sapiens
  misc_RNA (1)...(19): siRNA sense strand
ggucaaaucucuaccugga

SEQ ID NO: 2297147 - RNA, 19 nt, Homo sapiens
  misc_RNA (1)...(19): siRNA sense strand
agaugcauaugaagaacaa

SEQ ID NO: 2297148 - RNA, 19 nt, Homo sapiens
  misc_RNA (1)...(19): siRNA sense strand
ccauagagacuggcauuaa

SEQ ID NO: 2297149 - RNA, 19 nt, Homo sapiens
  misc_RNA (1)...(19): siRNA sense strand
cuaaggaccuccaggaacu

SEQ ID NO: 2297150 - RNA, 19 nt, Homo sapiens
  misc_RNA (1)...(19): siRNA sense strand
gagcaauguaaaugaaucu

SEQ ID NO: 2297151 - RNA, 19 nt, Homo sapiens
  misc_RNA (1)...(19): siRNA sense strand
aauugucauugaugggaua

SEQ ID NO: 2297152 - RNA, 19 nt, Homo sapiens
  misc_RNA (1)...(19): siRNA sense strand
guauucaagagaagccaaa

SEQ ID NO: 2297153 - RNA, 19 nt, Homo sapiens
  misc_RNA (1)...(19): siRNA sense strand
gugaagaaggugaacaguu

SEQ ID NO: 2297154 - RNA, 19 nt, Homo sapiens
  misc_RNA (1)...(19): siRNA sense strand
ucugaaggcaauuggaaaa

SEQ ID NO: 2297155 - RNA, 19 nt, Homo sapiens
  misc_RNA (1)...(19): siRNA sense strand
uggcugauuuacuggguuu

SEQ ID NO: 2297156 - RNA, 19 nt, Homo sapiens
  misc_RNA (1)...(19): siRNA sense strand
cuuuaugaacacuggaaaa

SEQ ID NO: 2297157 - RNA, 19 nt, Homo sapiens
  misc_RNA (1)...(19): siRNA sense strand
gcugaagaauauggucaaa

SEQ ID NO: 2297158 - RNA, 19 nt, Homo sapiens
  misc_RNA (1)...(19): siRNA sense strand
cagaaugggacaaauaaca

SEQ ID NO: 2297159 - RNA, 19 nt, Homo sapiens
  misc_RNA (1)...(19): siRNA sense strand
aagaggaagaagaggagga

SEQ ID NO: 2297160 - RNA, 19 nt, Homo sapiens
  misc_RNA (1)...(19): siRNA sense strand
acauacugguggaugaaca

SEQ ID NO: 2297161 - RNA, 19 nt, Homo sapiens
  misc_RNA (1)...(19): siRNA sense strand
gcgccaauucaguacuuua

SEQ ID NO: 2297162 - RNA, 19 nt, Homo sapiens
  misc_RNA (1)...(19): siRNA sense strand
guggaggaaacaagaauga

SEQ ID NO: 2297163 - RNA, 19 nt, Homo sapiens
  misc_RNA (1)...(19): siRNA sense strand
ggaaacaagaaugaaagaa

SEQ ID NO: 2297164 - RNA, 19 nt, Homo sapiens
  misc_RNA (1)...(19): siRNA sense strand
uaagauaauccuuggacca

SEQ ID NO: 2297165 - RNA, 19 nt, Homo sapiens
  misc_RNA (1)...(19): siRNA sense strand
augaauccucagaaaguaa

SEQ ID NO: 2297166 - RNA, 19 nt, Homo sapiens
  misc_RNA (1)...(19): siRNA sense strand
aaugagagcaguaacaaau

SEQ ID NO: 2297167 - RNA, 19 nt, Homo sapiens
  misc_RNA (1)...(19): siRNA sense strand
caguggaaacaaucugaaa

SEQ ID NO: 2297168 - RNA, 19 nt, Homo sapiens
  misc_RNA (1)...(19): siRNA sense strand
ggacaaaaggugggcauau

SEQ ID NO: 2297169 - RNA, 19 nt, Homo sapiens
  misc_RNA (1)...(19): siRNA sense strand
aggaaacaagaaugaaaga

SEQ ID NO: 2297170 - RNA, 19 nt, Homo sapiens
  misc_RNA (1)...(19): siRNA sense strand
cauucaaaccaaagauguu

SEQ ID NO: 2297171 - RNA, 19 nt, Homo sapiens
  misc_RNA (1)...(19): siRNA sense strand
cagaaacagcagaaggacu

SEQ ID NO: 2297172 - RNA, 19 nt, Homo sapiens
  misc_RNA (1)...(19): siRNA sense strand
auacaugaucuguguguca

SEQ ID NO: 2297173 - RNA, 19 nt, Homo sapiens
  misc_RNA (1)...(19): siRNA sense strand
acgucaaggcuuacaucaa

SEQ ID NO: 2297174 - RNA, 19 nt, Homo sapiens
  misc_RNA (1)...(19): siRNA sense strand
cagcugaagaauaugguca

SEQ ID NO: 2297175 - RNA, 19 nt, Homo sapiens
  misc_RNA (1)...(19): siRNA sense strand
agucaggagauauguauuu

SEQ ID NO: 2297176 - RNA, 19 nt, Homo sapiens
  misc_RNA (1)...(19): siRNA sense strand
aaguaaagccuccugaaga

SEQ ID NO: 2297177 - RNA, 19 nt, Homo sapiens
  misc_RNA (1)...(19): siRNA sense strand
uaaccaugauugugggcca

SEQ ID NO: 2297178 - RNA, 19 nt, Homo sapiens
  misc_RNA (1)...(19): siRNA sense strand
ugcagacauuggaaggaaa

SEQ ID NO: 2297179 - RNA, 19 nt, Homo sapiens
  misc_RNA (1)...(19): siRNA sense strand
aggaagaagaggaggaaga

SEQ ID NO: 2297180 - RNA, 19 nt, Homo sapiens
  misc_RNA (1)...(19): siRNA sense strand
aggaagaugaggaugauaa

SEQ ID NO: 2297181 - RNA, 19 nt, Homo sapiens
  misc_RNA (1)...(19): siRNA sense strand
ugacauggccacagagaau

SEQ ID NO: 2297182 - RNA, 19 nt, Homo sapiens
  misc_RNA (1)...(19): siRNA sense strand
gggcagugguuuagcuaca

SEQ ID NO: 2297183 - RNA, 19 nt, Homo sapiens
  misc_RNA (1)...(19): siRNA sense strand
cuucagaaugguugauaua

SEQ ID NO: 2297184 - RNA, 19 nt, Homo sapiens
  misc_RNA (1)...(19): siRNA sense strand
cuauggagucagagaacua

SEQ ID NO: 2297185 - RNA, 19 nt, Homo sapiens
  misc_RNA (1)...(19): siRNA sense strand
acuaaaaugccauggaaaa

SEQ ID NO: 2297186 - RNA, 19 nt, Homo sapiens
  misc_RNA (1)...(19): siRNA sense strand
aggcaugaaaccagauuua

SEQ ID NO: 2297187 - RNA, 19 nt, Homo sapiens
  misc_RNA (1)...(19): siRNA sense strand
gugaaauagcagaaggcau

SEQ ID NO: 2297188 - RNA, 19 nt, Homo sapiens
  misc_RNA (1)...(19): siRNA sense strand
ggauauggaagcugaccaa

SEQ ID NO: 2297189 - RNA, 19 nt, Homo sapiens
  misc_RNA (1)...(19): siRNA sense strand
aggaggaagaugaggauga

SEQ ID NO: 2297190 - RNA, 19 nt, Homo sapiens
  misc_RNA (1)...(19): siRNA sense strand
cugggaagccuuagaaauu

SEQ ID NO: 2297191 - RNA, 19 nt, Homo sapiens
  misc_RNA (1)...(19): siRNA sense strand
gaaggaacuuugaaggaca

SEQ ID NO: 2297192 - RNA, 19 nt, Homo sapiens
  misc_RNA (1)...(19): siRNA sense strand
cuucaugaaugcagcaauu

SEQ ID NO: 2297193 - RNA, 19 nt, Homo sapiens
  misc_RNA (1)...(19): siRNA sense strand
guacagagcuuuugggcga

SEQ ID NO: 2297194 - RNA, 19 nt, Homo sapiens
  misc_RNA (1)...(19): siRNA sense strand
caaugagagcaguaacaaa

SEQ ID NO: 2297195 - RNA, 19 nt, Homo sapiens
  misc_RNA (1)...(19): siRNA sense strand
aaccaaagauguugagcuu

SEQ ID NO: 2297196 - RNA, 19 nt, Homo sapiens
  misc_RNA (1)...(19): siRNA sense strand
cugaagaccuccaggaucu

SEQ ID NO: 2297197 - RNA, 19 nt, Homo sapiens
  misc_RNA (1)...(19): siRNA sense strand
gcucaaaaguacaaauuca

SEQ ID NO: 2297198 - RNA, 19 nt, Homo sapiens
  misc_RNA (1)...(19): siRNA sense strand
ugaaagaugcauaugaaga

SEQ ID NO: 2297199 - RNA, 19 nt, Homo sapiens
  misc_RNA (1)...(19): siRNA sense strand
gcaaaaguguggaggaaac

SEQ ID NO: 2297200 - RNA, 19 nt, Homo sapiens
  misc_RNA (1)...(19): siRNA sense strand
ccaaguaggaugugggaag

SEQ ID NO: 2297201 - RNA, 19 nt, Homo sapiens
  misc_RNA (1)...(19): siRNA sense strand
acaucggaguacaguauaa

SEQ ID NO: 2297202 - RNA, 19 nt, Homo sapiens
  misc_RNA (1)...(19): siRNA sense strand
ccuauugaucugaaggcaa

SEQ ID NO: 2297203 - RNA, 19 nt, Homo sapiens
  misc_RNA (1)...(19): siRNA sense strand
gaaagauggaaguguccua

SEQ ID NO: 2297204 - RNA, 19 nt, Homo sapiens
  misc_RNA (1)...(19): siRNA sense strand
auuuagauccagagugcaa

SEQ ID NO: 2297205 - RNA, 19 nt, Homo sapiens
  misc_RNA (1)...(19): siRNA sense strand
gcaaccagaaguaggaaca

SEQ ID NO: 2297206 - RNA, 19 nt, Homo sapiens
  misc_RNA (1)...(19): siRNA sense strand
ugugcaugucugugaaaua

SEQ ID NO: 2297207 - RNA, 19 nt, Homo sapiens
  misc_RNA (1)...(19): siRNA sense strand
cugcaaaaguguggaggaa

SEQ ID NO: 2297208 - RNA, 19 nt, Homo sapiens
  misc_RNA (1)...(19): siRNA sense strand
gugcagugaagaaggugaa

SEQ ID NO: 2297209 - RNA, 19 nt, Homo sapiens
  misc_RNA (1)...(19): siRNA sense strand
caaaguuggcagaggcuca

SEQ ID NO: 2297210 - RNA, 19 nt, Homo sapiens
  misc_RNA (1)...(19): siRNA sense strand
aaacuacuuuagagaggaa

SEQ ID NO: 2297211 - RNA, 19 nt, Homo sapiens
  misc_RNA (1)...(19): siRNA sense strand
gggcauauguggucgcacu

SEQ ID NO: 2297212 - RNA, 19 nt, Homo sapiens
  misc_RNA (1)...(19): siRNA sense strand
uggaaguguccuaagagaa

SEQ ID NO: 2297213 - RNA, 19 nt, Homo sapiens
  misc_RNA (1)...(19): siRNA sense strand
cuguaugcacuuacgauaa

SEQ ID NO: 2297214 - RNA, 19 nt, Homo sapiens
  misc_RNA (1)...(19): siRNA sense strand
ggucaaaucucuaccugga

SEQ ID NO: 2297215 - RNA, 19 nt, Homo sapiens
  misc_RNA (1)...(19): siRNA sense strand
agaugcauaugaagaacaa

SEQ ID NO: 2297216 - RNA, 19 nt, Homo sapiens
  misc_RNA (1)...(19): siRNA sense strand
ccauagagacuggcauuaa

SEQ ID NO: 2297217 - RNA, 19 nt, Homo sapiens
  misc_RNA (1)...(19): siRNA sense strand
cuaaggaccuccaggaacu

SEQ ID NO: 2297218 - RNA, 19 nt, Homo sapiens
  misc_RNA (1)...(19): siRNA sense strand
gagcaauguaaaugaaucu

SEQ ID NO: 2297219 - RNA, 19 nt, Homo sapiens
  misc_RNA (1)...(19): siRNA sense strand
aauugucauugaugggaua

SEQ ID NO: 2297220 - RNA, 19 nt, Homo sapiens
  misc_RNA (1)...(19): siRNA sense strand
guauucaagagaagccaaa

SEQ ID NO: 2297221 - RNA, 19 nt, Homo sapiens
  misc_RNA (1)...(19): siRNA sense strand
gugaagaaggugaacaguu

SEQ ID NO: 2297222 - RNA, 19 nt, Homo sapiens
  misc_RNA (1)...(19): siRNA sense strand
ucugaaggcaauuggaaaa

SEQ ID NO: 2297223 - RNA, 19 nt, Homo sapiens
  misc_RNA (1)...(19): siRNA sense strand
uggcugauuuacuggguuu

SEQ ID NO: 2297224 - RNA, 19 nt, Homo sapiens
  misc_RNA (1)...(19): siRNA sense strand
cuuuaugaacacuggaaaa

SEQ ID NO: 2297225 - RNA, 19 nt, Homo sapiens
  misc_RNA (1)...(19): siRNA sense strand
gcugaagaauauggucaaa

SEQ ID NO: 2297226 - RNA, 19 nt, Homo sapiens
  misc_RNA (1)...(19): siRNA sense strand
cagaaugggacaaauaaca

SEQ ID NO: 2297227 - RNA, 19 nt, Homo sapiens
  misc_RNA (1)...(19): siRNA sense strand
aagaggaagaagaggagga

SEQ ID NO: 2297228 - RNA, 19 nt, Homo sapiens
  misc_RNA (1)...(19): siRNA sense strand
acauacugguggaugaaca

SEQ ID NO: 2297229 - RNA, 19 nt, Homo sapiens
  misc_RNA (1)...(19): siRNA sense strand
gcgccaauucaguacuuua

SEQ ID NO: 2297230 - RNA, 19 nt, Homo sapiens
  misc_RNA (1)...(19): siRNA sense strand
guggaggaaacaagaauga

SEQ ID NO: 2297231 - RNA, 19 nt, Homo sapiens
  misc_RNA (1)...(19): siRNA sense strand
ggaaacaagaaugaaagaa

SEQ ID NO: 2297232 - RNA, 19 nt, Homo sapiens
  misc_RNA (1)...(19): siRNA sense strand
uaagauaauccuuggacca

SEQ ID NO: 2297233 - RNA, 19 nt, Homo sapiens
  misc_RNA (1)...(19): siRNA sense strand
augaauccucagaaaguaa

SEQ ID NO: 2297234 - RNA, 19 nt, Homo sapiens
  misc_RNA (1)...(19): siRNA sense strand
aaugagagcaguaacaaau

SEQ ID NO: 2297235 - RNA, 19 nt, Homo sapiens
  misc_RNA (1)...(19): siRNA sense strand
caguggaaacaaucugaaa

SEQ ID NO: 2297236 - RNA, 19 nt, Homo sapiens
  misc_RNA (1)...(19): siRNA sense strand
ggacaaaaggugggcauau

SEQ ID NO: 2297237 - RNA, 19 nt, Homo sapiens
  misc_RNA (1)...(19): siRNA sense strand
aggaaacaagaaugaaaga

SEQ ID NO: 2297238 - RNA, 19 nt, Homo sapiens
  misc_RNA (1)...(19): siRNA sense strand
cauucaaaccaaagauguu

SEQ ID NO: 2297239 - RNA, 19 nt, Homo sapiens
  misc_RNA (1)...(19): siRNA sense strand
cagaaacagcagaaggacu

SEQ ID NO: 2297240 - RNA, 19 nt, Homo sapiens
  misc_RNA (1)...(19): siRNA sense strand
auacaugaucuguguguca

SEQ ID NO: 2297241 - RNA, 19 nt, Homo sapiens
  misc_RNA (1)...(19): siRNA sense strand
acgucaaggcuuacaucaa

SEQ ID NO: 2297242 - RNA, 19 nt, Homo sapiens
  misc_RNA (1)...(19): siRNA sense strand
cagcugaagaauaugguca

SEQ ID NO: 2297243 - RNA, 19 nt, Homo sapiens
  misc_RNA (1)...(19): siRNA sense strand
agucaggagauauguauuu

SEQ ID NO: 2297244 - RNA, 19 nt, Homo sapiens
  misc_RNA (1)...(19): siRNA sense strand
aaguaaagccuccugaaga

SEQ ID NO: 2297245 - RNA, 19 nt, Homo sapiens
  misc_RNA (1)...(19): siRNA sense strand
uaaccaugauugugggcca

SEQ ID NO: 2297246 - RNA, 19 nt, Homo sapiens
  misc_RNA (1)...(19): siRNA sense strand
ugcagacauuggaaggaaa

SEQ ID NO: 2297247 - RNA, 19 nt, Homo sapiens
  misc_RNA (1)...(19): siRNA sense strand
aggaagaagaggaggaaga

SEQ ID NO: 2297248 - RNA, 19 nt, Homo sapiens
  misc_RNA (1)...(19): siRNA sense strand
aggaagaugaggaugauaa

SEQ ID NO: 2297249 - RNA, 19 nt, Homo sapiens
  misc_RNA (1)...(19): siRNA sense strand
ugacauggccacagagaau

SEQ ID NO: 2297250 - RNA, 19 nt, Homo sapiens
  misc_RNA (1)...(19): siRNA sense strand
gggcagugguuuagcuaca

SEQ ID NO: 2297251 - RNA, 19 nt, Homo sapiens
  misc_RNA (1)...(19): siRNA sense strand
cuucagaaugguugauaua

SEQ ID NO: 2297252 - RNA, 19 nt, Homo sapiens
  misc_RNA (1)...(19): siRNA sense strand
cuauggagucagagaacua

SEQ ID NO: 2297253 - RNA, 19 nt, Homo sapiens
  misc_RNA (1)...(19): siRNA sense strand
acuaaaaugccauggaaaa

SEQ ID NO: 2297254 - RNA, 19 nt, Homo sapiens
  misc_RNA (1)...(19): siRNA sense strand
aggcaugaaaccagauuua

SEQ ID NO: 2297255 - RNA, 19 nt, Homo sapiens
  misc_RNA (1)...(19): siRNA sense strand
gugaaauagcagaaggcau

SEQ ID NO: 2297256 - RNA, 19 nt, Homo sapiens
  misc_RNA (1)...(19): siRNA sense strand
ggauauggaagcugaccaa

SEQ ID NO: 2297257 - RNA, 19 nt, Homo sapiens
  misc_RNA (1)...(19): siRNA sense strand
aggaggaagaugaggauga

SEQ ID NO: 2297258 - RNA, 19 nt, Homo sapiens
  misc_RNA (1)...(19): siRNA sense strand
cugggaagccuuagaaauu

SEQ ID NO: 2297259 - RNA, 19 nt, Homo sapiens
  misc_RNA (1)...(19): siRNA sense strand
gaaggaacuuugaaggaca

SEQ ID NO: 2297260 - RNA, 19 nt, Homo sapiens
  misc_RNA (1)...(19): siRNA sense strand
cuucaugaaugcagcaauu

SEQ ID NO: 2297261 - RNA, 19 nt, Homo sapiens
  misc_RNA (1)...(19): siRNA sense strand
guacagagcuuuugggcga

SEQ ID NO: 2297262 - RNA, 19 nt, Homo sapiens
  misc_RNA (1)...(19): siRNA sense strand
caaugagagcaguaacaaa

SEQ ID NO: 2297263 - RNA, 19 nt, Homo sapiens
  misc_RNA (1)...(19): siRNA sense strand
aaccaaagauguugagcuu

SEQ ID NO: 2297264 - RNA, 19 nt, Homo sapiens
  misc_RNA (1)...(19): siRNA sense strand
cugaagaccuccaggaucu

SEQ ID NO: 2297265 - RNA, 19 nt, Homo sapiens
  misc_RNA (1)...(19): siRNA sense strand
gcucaaaaguacaaauuca

SEQ ID NO: 2297266 - RNA, 19 nt, Homo sapiens
  misc_RNA (1)...(19): siRNA sense strand
ugaaagaugcauaugaaga

SEQ ID NO: 2297267 - RNA, 19 nt, Homo sapiens
  misc_RNA (1)...(19): siRNA sense strand
gcaaaaguguggaggaaac

SEQ ID NO: 2297268 - RNA, 19 nt, Homo sapiens
  misc_RNA (1)...(19): siRNA sense strand
ccaaguaggaugugggaag

SEQ ID NO: 2297269 - RNA, 19 nt, Homo sapiens
  misc_RNA (1)...(19): siRNA sense strand
acaucggaguacaguauaa

SEQ ID NO: 2297270 - RNA, 19 nt, Homo sapiens
  misc_RNA (1)...(19): siRNA sense strand
ccuauugaucugaaggcaa

SEQ ID NO: 2297271 - RNA, 19 nt, Homo sapiens
  misc_RNA (1)...(19): siRNA sense strand
gaaagauggaaguguccua

SEQ ID NO: 2297272 - RNA, 19 nt, Homo sapiens
  misc_RNA (1)...(19): siRNA sense strand
auuuagauccagagugcaa

SEQ ID NO: 2297273 - RNA, 19 nt, Homo sapiens
  misc_RNA (1)...(19): siRNA sense strand
gcaaccagaaguaggaaca

SEQ ID NO: 2297274 - RNA, 19 nt, Homo sapiens
  misc_RNA (1)...(19): siRNA sense strand
ugugcaugucugugaaaua

SEQ ID NO: 2297275 - RNA, 19 nt, Homo sapiens
  misc_RNA (1)...(19): siRNA sense strand
cugcaaaaguguggaggaa

SEQ ID NO: 2297276 - RNA, 19 nt, Homo sapiens
  misc_RNA (1)...(19): siRNA sense strand
gugcagugaagaaggugaa

SEQ ID NO: 2297277 - RNA, 19 nt, Homo sapiens
  misc_RNA (1)...(19): siRNA sense strand
caaaguuggcagaggcuca

SEQ ID NO: 2297278 - RNA, 19 nt, Homo sapiens
  misc_RNA (1)...(19): siRNA sense strand
aaacuacuuuagagaggaa

SEQ ID NO: 2297279 - RNA, 19 nt, Homo sapiens
  misc_RNA (1)...(19): siRNA sense strand
gggcauauguggucgcacu

SEQ ID NO: 2297280 - RNA, 19 nt, Homo sapiens
  misc_RNA (1)...(19): siRNA sense strand
uggaaguguccuaagagaa

SEQ ID NO: 2297281 - RNA, 19 nt, Homo sapiens
  misc_RNA (1)...(19): siRNA sense strand
cuguaugcacuuacgauaa

SEQ ID NO: 2297282 - RNA, 19 nt, Homo sapiens
  misc_RNA (1)...(19): siRNA sense strand
ggucaaaucucuaccugga

SEQ ID NO: 2297283 - RNA, 19 nt, Homo sapiens
  misc_RNA (1)...(19): siRNA sense strand
agaugcauaugaagaacaa

SEQ ID NO: 2297284 - RNA, 19 nt, Homo sapiens
  misc_RNA (1)...(19): siRNA sense strand
ccauagagacuggcauuaa

SEQ ID NO: 2297285 - RNA, 19 nt, Homo sapiens
  misc_RNA (1)...(19): siRNA sense strand
cuaaggaccuccaggaacu

SEQ ID NO: 2297286 - RNA, 19 nt, Homo sapiens
  misc_RNA (1)...(19): siRNA sense strand
gagcaauguaaaugaaucu

SEQ ID NO: 2297287 - RNA, 19 nt, Homo sapiens
  misc_RNA (1)...(19): siRNA sense strand
aauugucauugaugggaua

SEQ ID NO: 2297288 - RNA, 19 nt, Homo sapiens
  misc_RNA (1)...(19): siRNA sense strand
guauucaagagaagccaaa

SEQ ID NO: 2297289 - RNA, 19 nt, Homo sapiens
  misc_RNA (1)...(19): siRNA sense strand
gugaagaaggugaacaguu

SEQ ID NO: 2297290 - RNA, 19 nt, Homo sapiens
  misc_RNA (1)...(19): siRNA sense strand
ucugaaggcaauuggaaaa

SEQ ID NO: 2297291 - RNA, 19 nt, Homo sapiens
  misc_RNA (1)...(19): siRNA sense strand
uggcugauuuacuggguuu

SEQ ID NO: 2297292 - RNA, 19 nt, Homo sapiens
  misc_RNA (1)...(19): siRNA sense strand
cuuuaugaacacuggaaaa

SEQ ID NO: 2297293 - RNA, 19 nt, Homo sapiens
  misc_RNA (1)...(19): siRNA sense strand
gcugaagaauauggucaaa

SEQ ID NO: 2297294 - RNA, 19 nt, Homo sapiens
  misc_RNA (1)...(19): siRNA sense strand
cagaaugggacaaauaaca

SEQ ID NO: 2297295 - RNA, 19 nt, Homo sapiens
  misc_RNA (1)...(19): siRNA sense strand
aagaggaagaagaggagga

SEQ ID NO: 2297296 - RNA, 19 nt, Homo sapiens
  misc_RNA (1)...(19): siRNA sense strand
acauacugguggaugaaca

SEQ ID NO: 2297297 - RNA, 19 nt, Homo sapiens
  misc_RNA (1)...(19): siRNA sense strand
gcgccaauucaguacuuua

SEQ ID NO: 2297298 - RNA, 19 nt, Homo sapiens
  misc_RNA (1)...(19): siRNA sense strand
guggaggaaacaagaauga

SEQ ID NO: 2297299 - RNA, 19 nt, Homo sapiens
  misc_RNA (1)...(19): siRNA sense strand
ggaaacaagaaugaaagaa

SEQ ID NO: 2297300 - RNA, 19 nt, Homo sapiens
  misc_RNA (1)...(19): siRNA sense strand
uaagauaauccuuggacca

SEQ ID NO: 2297301 - RNA, 19 nt, Homo sapiens
  misc_RNA (1)...(19): siRNA sense strand
augaauccucagaaaguaa

SEQ ID NO: 2297302 - RNA, 19 nt, Homo sapiens
  misc_RNA (1)...(19): siRNA sense strand
aaugagagcaguaacaaau

SEQ ID NO: 2297303 - RNA, 19 nt, Homo sapiens
  misc_RNA (1)...(19): siRNA sense strand
caguggaaacaaucugaaa

SEQ ID NO: 2297304 - RNA, 19 nt, Homo sapiens
  misc_RNA (1)...(19): siRNA sense strand
ggacaaaaggugggcauau

SEQ ID NO: 2297305 - RNA, 19 nt, Homo sapiens
  misc_RNA (1)...(19): siRNA sense strand
aggaaacaagaaugaaaga

SEQ ID NO: 2297306 - RNA, 19 nt, Homo sapiens
  misc_RNA (1)...(19): siRNA sense strand
cauucaaaccaaagauguu

SEQ ID NO: 2297307 - RNA, 19 nt, Homo sapiens
  misc_RNA (1)...(19): siRNA sense strand
cagaaacagcagaaggacu

SEQ ID NO: 2297308 - RNA, 19 nt, Homo sapiens
  misc_RNA (1)...(19): siRNA sense strand
auacaugaucuguguguca

SEQ ID NO: 2297309 - RNA, 19 nt, Homo sapiens
  misc_RNA (1)...(19): siRNA sense strand
acgucaaggcuuacaucaa

SEQ ID NO: 2297310 - RNA, 19 nt, Homo sapiens
  misc_RNA (1)...(19): siRNA sense strand
cagcugaagaauaugguca

SEQ ID NO: 2297311 - RNA, 19 nt, Homo sapiens
  misc_RNA (1)...(19): siRNA sense strand
agucaggagauauguauuu

SEQ ID NO: 2297312 - RNA, 19 nt, Homo sapiens
  misc_RNA (1)...(19): siRNA sense strand
aaguaaagccuccugaaga

SEQ ID NO: 2297313 - RNA, 19 nt, Homo sapiens
  misc_RNA (1)...(19): siRNA sense strand
uaaccaugauugugggcca

SEQ ID NO: 2297314 - RNA, 19 nt, Homo sapiens
  misc_RNA (1)...(19): siRNA sense strand
ugcagacauuggaaggaaa

SEQ ID NO: 2297315 - RNA, 19 nt, Homo sapiens
  misc_RNA (1)...(19): siRNA sense strand
ggaucgagauggagcccaa

SEQ ID NO: 2297316 - RNA, 19 nt, Homo sapiens
  misc_RNA (1)...(19): siRNA sense strand
cugaaaagaagauggaauu

SEQ ID NO: 2297317 - RNA, 19 nt, Homo sapiens
  misc_RNA (1)...(19): siRNA sense strand
ggaagaaaauuaagcggau

SEQ ID NO: 2297318 - RNA, 19 nt, Homo sapiens
  misc_RNA (1)...(19): siRNA sense strand
agaagauggaauugucaaa

SEQ ID NO: 2297319 - RNA, 19 nt, Homo sapiens
  misc_RNA (1)...(19): siRNA sense strand
gcuuggaaauacuuggcaa

SEQ ID NO: 2297320 - RNA, 19 nt, Homo sapiens
  misc_RNA (1)...(19): siRNA sense strand
cuuggaaauacuuggcaaa

SEQ ID NO: 2297321 - RNA, 19 nt, Homo sapiens
  misc_RNA (1)...(19): siRNA sense strand
ggguucaagaagaguggaa

SEQ ID NO: 2297322 - RNA, 19 nt, Homo sapiens
  misc_RNA (1)...(19): siRNA sense strand
agcuuuggccugugagaaa

SEQ ID NO: 2297323 - RNA, 19 nt, Homo sapiens
  misc_RNA (1)...(19): siRNA sense strand
gagaaaucugagugaggca

SEQ ID NO: 2297324 - RNA, 19 nt, Homo sapiens
  misc_RNA (1)...(19): siRNA sense strand
cuggaagacaucugcaaau

SEQ ID NO: 2297325 - RNA, 19 nt, Homo sapiens
  misc_RNA (1)...(19): siRNA sense strand
aggcagagacauggagaca

SEQ ID NO: 2297326 - RNA, 19 nt, Homo sapiens
  misc_RNA (1)...(19): siRNA sense strand
agaugaugaagaaguggaa

SEQ ID NO: 2297327 - RNA, 19 nt, Homo sapiens
  misc_RNA (1)...(19): siRNA sense strand
gggaaauauuaaucaaccu

SEQ ID NO: 2297328 - RNA, 19 nt, Homo sapiens
  misc_RNA (1)...(19): siRNA sense strand
auggagacauggugaaaau

SEQ ID NO: 2297329 - RNA, 19 nt, Homo sapiens
  misc_RNA (1)...(19): siRNA sense strand
cuaaagagacagaaggcac

SEQ ID NO: 2297330 - RNA, 19 nt, Homo sapiens
  misc_RNA (1)...(19): siRNA sense strand
ucugaaaagaagauggaau

SEQ ID NO: 2297331 - RNA, 19 nt, Homo sapiens
  misc_RNA (1)...(19): siRNA sense strand
ucaccaaaucuuagggaag

SEQ ID NO: 2297332 - RNA, 19 nt, Homo sapiens
  misc_RNA (1)...(19): siRNA sense strand
ugguuuacuguuaggaaaa

SEQ ID NO: 2297333 - RNA, 19 nt, Homo sapiens
  misc_RNA (1)...(19): siRNA sense strand
agugauuggaaggaagaua

SEQ ID NO: 2297334 - RNA, 19 nt, Homo sapiens
  misc_RNA (1)...(19): siRNA sense strand
ggaucgagauggagcccaa

SEQ ID NO: 2297335 - RNA, 19 nt, Homo sapiens
  misc_RNA (1)...(19): siRNA sense strand
cugaaaagaagauggaauu

SEQ ID NO: 2297336 - RNA, 19 nt, Homo sapiens
  misc_RNA (1)...(19): siRNA sense strand
ggaagaaaauuaagcggau

SEQ ID NO: 2297337 - RNA, 19 nt, Homo sapiens
  misc_RNA (1)...(19): siRNA sense strand
agaagauggaauugucaaa

SEQ ID NO: 2297338 - RNA, 19 nt, Homo sapiens
  misc_RNA (1)...(19): siRNA sense strand
gcuuggaaauacuuggcaa

SEQ ID NO: 2297339 - RNA, 19 nt, Homo sapiens
  misc_RNA (1)...(19): siRNA sense strand
cuuggaaauacuuggcaaa

SEQ ID NO: 2297340 - RNA, 19 nt, Homo sapiens
  misc_RNA (1)...(19): siRNA sense strand
ggguucaagaagaguggaa

SEQ ID NO: 2297341 - RNA, 19 nt, Homo sapiens
  misc_RNA (1)...(19): siRNA sense strand
agcuuuggccugugagaaa

SEQ ID NO: 2297342 - RNA, 19 nt, Homo sapiens
  misc_RNA (1)...(19): siRNA sense strand
gagaaaucugagugaggca

SEQ ID NO: 2297343 - RNA, 19 nt, Homo sapiens
  misc_RNA (1)...(19): siRNA sense strand
cuggaagacaucugcaaau

SEQ ID NO: 2297344 - RNA, 19 nt, Homo sapiens
  misc_RNA (1)...(19): siRNA sense strand
aggcagagacauggagaca

SEQ ID NO: 2297345 - RNA, 19 nt, Homo sapiens
  misc_RNA (1)...(19): siRNA sense strand
gggaaauauuaaucaaccu

SEQ ID NO: 2297346 - RNA, 19 nt, Homo sapiens
  misc_RNA (1)...(19): siRNA sense strand
auggagacauggugaaaau

SEQ ID NO: 2297347 - RNA, 19 nt, Homo sapiens
  misc_RNA (1)...(19): siRNA sense strand
cuaaagagacagaaggcac

SEQ ID NO: 2297348 - RNA, 19 nt, Homo sapiens
  misc_RNA (1)...(19): siRNA sense strand
ucugaaaagaagauggaau

SEQ ID NO: 2297349 - RNA, 19 nt, Homo sapiens
  misc_RNA (1)...(19): siRNA sense strand
ucaccaaaucuuagggaag

SEQ ID NO: 2297350 - RNA, 19 nt, Homo sapiens
  misc_RNA (1)...(19): siRNA sense strand
ugguuuacuguuaggaaaa

SEQ ID NO: 2297351 - RNA, 19 nt, Homo sapiens
  misc_RNA (1)...(19): siRNA sense strand
agugauuggaaggaagaua

SEQ ID NO: 2297352 - RNA, 19 nt, Homo sapiens
  misc_RNA (1)...(19): siRNA sense strand
caacgaaaggagaagggaa

SEQ ID NO: 2297353 - RNA, 19 nt, Homo sapiens
  misc_RNA (1)...(19): siRNA sense strand
cuuaaagaaccuuggagua

SEQ ID NO: 2297354 - RNA, 19 nt, Homo sapiens
  misc_RNA (1)...(19): siRNA sense strand
gaguaggcccagaguuaaa

SEQ ID NO: 2297355 - RNA, 19 nt, Homo sapiens
  misc_RNA (1)...(19): siRNA sense strand
cuacgguauuagaagauaa

SEQ ID NO: 2297356 - RNA, 19 nt, Homo sapiens
  misc_RNA (1)...(19): siRNA sense strand
acaauguuacagagagaua

SEQ ID NO: 2297357 - RNA, 19 nt, Homo sapiens
  misc_RNA (1)...(19): siRNA sense strand
gcugaaaagcauaaugaaa

SEQ ID NO: 2297358 - RNA, 19 nt, Homo sapiens
  misc_RNA (1)...(19): siRNA sense strand
ugagcuuaguugagaagaa

SEQ ID NO: 2297359 - RNA, 19 nt, Homo sapiens
  misc_RNA (1)...(19): siRNA sense strand
ccugaaagagaaaggccaa

SEQ ID NO: 2297360 - RNA, 19 nt, Homo sapiens
  misc_RNA (1)...(19): siRNA sense strand
uggugaaucuacagaaaca

SEQ ID NO: 2297361 - RNA, 19 nt, Homo sapiens
  misc_RNA (1)...(19): siRNA sense strand
gggccaaguaccuguggaa

SEQ ID NO: 2297362 - RNA, 19 nt, Homo sapiens
  misc_RNA (1)...(19): siRNA sense strand
gccaaguaccuguggaaaa

SEQ ID NO: 2297363 - RNA, 19 nt, Homo sapiens
  misc_RNA (1)...(19): siRNA sense strand
gggaagaagcaagggccaa

SEQ ID NO: 2297364 - RNA, 19 nt, Homo sapiens
  misc_RNA (1)...(19): siRNA sense strand
aacgaaaggagaagggaau

SEQ ID NO: 2297365 - RNA, 19 nt, Homo sapiens
  misc_RNA (1)...(19): siRNA sense strand
cagaagagcaagcaggcau

SEQ ID NO: 2297366 - RNA, 19 nt, Homo sapiens
  misc_RNA (1)...(19): siRNA sense strand
caagaaagugagacgacau

SEQ ID NO: 2297367 - RNA, 19 nt, Homo sapiens
  misc_RNA (1)...(19): siRNA sense strand
uugaauacucacaacgaaa

SEQ ID NO: 2297368 - RNA, 19 nt, Homo sapiens
  misc_RNA (1)...(19): siRNA sense strand
ucuuacugaugaaggcaaa

SEQ ID NO: 2297369 - RNA, 19 nt, Homo sapiens
  misc_RNA (1)...(19): siRNA sense strand
agaagagcaagcaggcaua

SEQ ID NO: 2297370 - RNA, 19 nt, Homo sapiens
  misc_RNA (1)...(19): siRNA sense strand
gggaguccugaaagagaaa

SEQ ID NO: 2297371 - RNA, 19 nt, Homo sapiens
  misc_RNA (1)...(19): siRNA sense strand
acucacaacgaaaggagaa

SEQ ID NO: 2297372 - RNA, 19 nt, Homo sapiens
  misc_RNA (1)...(19): siRNA sense strand
gggauugguauguguguga

SEQ ID NO: 2297373 - RNA, 19 nt, Homo sapiens
  misc_RNA (1)...(19): siRNA sense strand
uuauaccacuggaaggaaa

SEQ ID NO: 2297374 - RNA, 19 nt, Homo sapiens
  misc_RNA (1)...(19): siRNA sense strand
cuaucauuguggugguauu

SEQ ID NO: 2297375 - RNA, 19 nt, Homo sapiens
  misc_RNA (1)...(19): siRNA sense strand
aaucaagauccaagaaagu

SEQ ID NO: 2297376 - RNA, 19 nt, Homo sapiens
  misc_RNA (1)...(19): siRNA sense strand
augaaauacuugauggaag

SEQ ID NO: 2297377 - RNA, 19 nt, Homo sapiens
  misc_RNA (1)...(19): siRNA sense strand
ugugacaaccuaugaagaa

SEQ ID NO: 2297378 - RNA, 19 nt, Homo sapiens
  misc_RNA (1)...(19): siRNA sense strand
gguaugugugugaagguuu

SEQ ID NO: 2297379 - RNA, 19 nt, Homo sapiens
  misc_RNA (1)...(19): siRNA sense strand
agacauaacugaagacugc

SEQ ID NO: 2297380 - RNA, 19 nt, Homo sapiens
  misc_RNA (1)...(19): siRNA sense strand
agggaguccugaaagagaa

SEQ ID NO: 2297381 - RNA, 19 nt, Homo sapiens
  misc_RNA (1)...(19): siRNA sense strand
gagagauaucaggaaguua

SEQ ID NO: 2297382 - RNA, 19 nt, Homo sapiens
  misc_RNA (1)...(19): siRNA sense strand
ccuuaaagaaccuuggagu

SEQ ID NO: 2297383 - RNA, 19 nt, Homo sapiens
  misc_RNA (1)...(19): siRNA sense strand
cugaugaaaugcauagcuu

SEQ ID NO: 2297384 - RNA, 19 nt, Homo sapiens
  misc_RNA (1)...(19): siRNA sense strand
uggaaugggagaaguggau

SEQ ID NO: 2297385 - RNA, 19 nt, Homo sapiens
  misc_RNA (1)...(19): siRNA sense strand
ucagaaagugguaccaaau

SEQ ID NO: 2297386 - RNA, 19 nt, Homo sapiens
  misc_RNA (1)...(19): siRNA sense strand
guggaaaagugaaaagcca

SEQ ID NO: 2297387 - RNA, 19 nt, Homo sapiens
  misc_RNA (1)...(19): siRNA sense strand
aaucuuugguauagagucu

SEQ ID NO: 2297388 - RNA, 19 nt, Homo sapiens
  misc_RNA (1)...(19): siRNA sense strand
uuccagaacagaugaaauu

SEQ ID NO: 2297389 - RNA, 19 nt, Homo sapiens
  misc_RNA (1)...(19): siRNA sense strand
ugaugaaaugcauagcuua

SEQ ID NO: 2297390 - RNA, 19 nt, Homo sapiens
  misc_RNA (1)...(19): siRNA sense strand
gugaaaagccacucuacua

SEQ ID NO: 2297391 - RNA, 19 nt, Homo sapiens
  misc_RNA (1)...(19): siRNA sense strand
gugacaaccuaugaagaau

SEQ ID NO: 2297392 - RNA, 19 nt, Homo sapiens
  misc_RNA (1)...(19): siRNA sense strand
ugaagaggacacugauaga

SEQ ID NO: 2297393 - RNA, 19 nt, Homo sapiens
  misc_RNA (1)...(19): siRNA sense strand
ccaagaaagugagacgaca

SEQ ID NO: 2297394 - RNA, 19 nt, Homo sapiens
  misc_RNA (1)...(19): siRNA sense strand
ugucuaaucuugcugaaaa

SEQ ID NO: 2297395 - RNA, 19 nt, Homo sapiens
  misc_RNA (1)...(19): siRNA sense strand
uucagaaagugguaccaaa

SEQ ID NO: 2297396 - RNA, 19 nt, Homo sapiens
  misc_RNA (1)...(19): siRNA sense strand
gaaagcuuuugaugagaaa

SEQ ID NO: 2297397 - RNA, 19 nt, Homo sapiens
  misc_RNA (1)...(19): siRNA sense strand
gaacguguuuccauggaca

SEQ ID NO: 2297398 - RNA, 19 nt, Homo sapiens
  misc_RNA (1)...(19): siRNA sense strand
cggaagaguuuaaagaacg

SEQ ID NO: 2297399 - RNA, 19 nt, Homo sapiens
  misc_RNA (1)...(19): siRNA sense strand
auuauauggacgugacaga

SEQ ID NO: 2297400 - RNA, 19 nt, Homo sapiens
  misc_RNA (1)...(19): siRNA sense strand
cugacuacgaggacaucua

SEQ ID NO: 2297401 - RNA, 19 nt, Homo sapiens
  misc_RNA (1)...(19): siRNA sense strand
cagagagauaucaggaagu

SEQ ID NO: 2297402 - RNA, 19 nt, Homo sapiens
  misc_RNA (1)...(19): siRNA sense strand
acugaagaggacacugaua

SEQ ID NO: 2297403 - RNA, 19 nt, Homo sapiens
  misc_RNA (1)...(19): siRNA sense strand
ucaagauccaagaaaguga

SEQ ID NO: 2297404 - RNA, 19 nt, Homo sapiens
  misc_RNA (1)...(19): siRNA sense strand
ggccugacuacgaggacau

SEQ ID NO: 2297405 - RNA, 19 nt, Homo sapiens
  misc_RNA (1)...(19): siRNA sense strand
acuacgaggacaucuauaa

SEQ ID NO: 2297406 - RNA, 19 nt, Homo sapiens
  misc_RNA (1)...(19): siRNA sense strand
gggcacugcaugugaccaa

SEQ ID NO: 2297407 - RNA, 19 nt, Homo sapiens
  misc_RNA (1)...(19): siRNA sense strand
ggcugaaggcccugcuaaa

SEQ ID NO: 2297408 - RNA, 19 nt, Homo sapiens
  misc_RNA (1)...(19): siRNA sense strand
cggcaaaucuacagggacc

SEQ ID NO: 2297409 - RNA, 19 nt, Homo sapiens
  misc_RNA (1)...(19): siRNA sense strand
gggaggaagaggaagggca

SEQ ID NO: 2297410 - RNA, 19 nt, Homo sapiens
  misc_RNA (1)...(19): siRNA sense strand
gcagaggcuucgugccaga

SEQ ID NO: 2297411 - RNA, 19 nt, Homo sapiens
  misc_RNA (1)...(19): siRNA sense strand
ccguguggaaguuugguaa

SEQ ID NO: 2297412 - RNA, 19 nt, Homo sapiens
  misc_RNA (1)...(19): siRNA sense strand
ccaaggaccugcuguggga

SEQ ID NO: 2297413 - RNA, 19 nt, Homo sapiens
  misc_RNA (1)...(19): siRNA sense strand
ggagugaagaugcuggaca

SEQ ID NO: 2297414 - RNA, 19 nt, Homo sapiens
  misc_RNA (1)...(19): siRNA sense strand
gagugaagaugcuggacac

SEQ ID NO: 2297415 - RNA, 19 nt, Homo sapiens
  misc_RNA (1)...(19): siRNA sense strand
cguguggaaguuugguaaa

SEQ ID NO: 2297416 - RNA, 19 nt, Homo sapiens
  misc_RNA (1)...(19): siRNA sense strand
ccaucagagcagcggcaga

SEQ ID NO: 2297417 - RNA, 19 nt, Homo sapiens
  misc_RNA (1)...(19): siRNA sense strand
cuuggaucauggagacgua

SEQ ID NO: 2297418 - RNA, 19 nt, Homo sapiens
  misc_RNA (1)...(19): siRNA sense strand
ggcugaaggcccugcuaaa

SEQ ID NO: 2297419 - RNA, 19 nt, Homo sapiens
  misc_RNA (1)...(19): siRNA sense strand
cggcaaaucuacagggacc

SEQ ID NO: 2297420 - RNA, 19 nt, Homo sapiens
  misc_RNA (1)...(19): siRNA sense strand
gggaggaagaggaagggca

SEQ ID NO: 2297421 - RNA, 19 nt, Homo sapiens
  misc_RNA (1)...(19): siRNA sense strand
gcagaggcuucgugccaga

SEQ ID NO: 2297422 - RNA, 19 nt, Homo sapiens
  misc_RNA (1)...(19): siRNA sense strand
ccguguggaaguuugguaa

SEQ ID NO: 2297423 - RNA, 19 nt, Homo sapiens
  misc_RNA (1)...(19): siRNA sense strand
ggagugaagaugcuggaca

SEQ ID NO: 2297424 - RNA, 19 nt, Homo sapiens
  misc_RNA (1)...(19): siRNA sense strand
gagugaagaugcuggacac

SEQ ID NO: 2297425 - RNA, 19 nt, Homo sapiens
  misc_RNA (1)...(19): siRNA sense strand
cguguggaaguuugguaaa

SEQ ID NO: 2297426 - RNA, 19 nt, Homo sapiens
  misc_RNA (1)...(19): siRNA sense strand
ccaucagagcagcggcaga

SEQ ID NO: 2297427 - RNA, 19 nt, Homo sapiens
  misc_RNA (1)...(19): siRNA sense strand
cuuggaucauggagacgua

SEQ ID NO: 2297428 - RNA, 19 nt, Homo sapiens
  misc_RNA (1)...(19): siRNA sense strand
ccaugaaggugguggcuga

SEQ ID NO: 2297429 - RNA, 19 nt, Homo sapiens
  misc_RNA (1)...(19): siRNA sense strand
cggcaaagggaaagagaag

SEQ ID NO: 2297430 - RNA, 19 nt, Homo sapiens
  misc_RNA (1)...(19): siRNA sense strand
gcuaaagaaugucgagcca

SEQ ID NO: 2297431 - RNA, 19 nt, Homo sapiens
  misc_RNA (1)...(19): siRNA sense strand
ccugaagggcaaaggucaa

SEQ ID NO: 2297432 - RNA, 19 nt, Homo sapiens
  misc_RNA (1)...(19): siRNA sense strand
gagaagacgcccuggacga

SEQ ID NO: 2297433 - RNA, 19 nt, Homo sapiens
  misc_RNA (1)...(19): siRNA sense strand
gugaaagcgcugauggaca

SEQ ID NO: 2297434 - RNA, 19 nt, Homo sapiens
  misc_RNA (1)...(19): siRNA sense strand
gggaagcggcagaagcuca

SEQ ID NO: 2297435 - RNA, 19 nt, Homo sapiens
  misc_RNA (1)...(19): siRNA sense strand
ccucaaagcucauuggcug

SEQ ID NO: 2297436 - RNA, 19 nt, Homo sapiens
  misc_RNA (1)...(19): siRNA sense strand
gagguugaucugagcgaca

SEQ ID NO: 2297437 - RNA, 19 nt, Homo sapiens
  misc_RNA (1)...(19): siRNA sense strand
cggcagaagcucaccacca

SEQ ID NO: 2297438 - RNA, 19 nt, Homo sapiens
  misc_RNA (1)...(19): siRNA sense strand
uaaagaaugucgagccacu

SEQ ID NO: 2297439 - RNA, 19 nt, Homo sapiens
  misc_RNA (1)...(19): siRNA sense strand
augaggagaaggagguuga

SEQ ID NO: 2297440 - RNA, 19 nt, Homo sapiens
  misc_RNA (1)...(19): siRNA sense strand
uggcugaauccaugggcau

SEQ ID NO: 2297441 - RNA, 19 nt, Homo sapiens
  misc_RNA (1)...(19): siRNA sense strand
cugaggagaagaagcugaa

SEQ ID NO: 2297442 - RNA, 19 nt, Homo sapiens
  misc_RNA (1)...(19): siRNA sense strand
gggaguguccagaaguaca

SEQ ID NO: 2297443 - RNA, 19 nt, Homo sapiens
  misc_RNA (1)...(19): siRNA sense strand
gcugaggagaagaagcuga

SEQ ID NO: 2297444 - RNA, 19 nt, Homo sapiens
  misc_RNA (1)...(19): siRNA sense strand
agccaggccaggaggaaga

SEQ ID NO: 2297445 - RNA, 19 nt, Homo sapiens
  misc_RNA (1)...(19): siRNA sense strand
ccggauuggagcagaccau

SEQ ID NO: 2297446 - RNA, 19 nt, Homo sapiens
  misc_RNA (1)...(19): siRNA sense strand
ccaugaaggugguggcuga

SEQ ID NO: 2297447 - RNA, 19 nt, Homo sapiens
  misc_RNA (1)...(19): siRNA sense strand
cggcaaagggaaagagaag

SEQ ID NO: 2297448 - RNA, 19 nt, Homo sapiens
  misc_RNA (1)...(19): siRNA sense strand
gcuaaagaaugucgagcca

SEQ ID NO: 2297449 - RNA, 19 nt, Homo sapiens
  misc_RNA (1)...(19): siRNA sense strand
ccugaagggcaaaggucaa

SEQ ID NO: 2297450 - RNA, 19 nt, Homo sapiens
  misc_RNA (1)...(19): siRNA sense strand
gagaagacgcccuggacga

SEQ ID NO: 2297451 - RNA, 19 nt, Homo sapiens
  misc_RNA (1)...(19): siRNA sense strand
gugaaagcgcugauggaca

SEQ ID NO: 2297452 - RNA, 19 nt, Homo sapiens
  misc_RNA (1)...(19): siRNA sense strand
gggaagcggcagaagcuca

SEQ ID NO: 2297453 - RNA, 19 nt, Homo sapiens
  misc_RNA (1)...(19): siRNA sense strand
ccucaaagcucauuggcug

SEQ ID NO: 2297454 - RNA, 19 nt, Homo sapiens
  misc_RNA (1)...(19): siRNA sense strand
gagguugaucugagcgaca

SEQ ID NO: 2297455 - RNA, 19 nt, Homo sapiens
  misc_RNA (1)...(19): siRNA sense strand
cggcagaagcucaccacca

SEQ ID NO: 2297456 - RNA, 19 nt, Homo sapiens
  misc_RNA (1)...(19): siRNA sense strand
uaaagaaugucgagccacu

SEQ ID NO: 2297457 - RNA, 19 nt, Homo sapiens
  misc_RNA (1)...(19): siRNA sense strand
augaggagaaggagguuga

SEQ ID NO: 2297458 - RNA, 19 nt, Homo sapiens
  misc_RNA (1)...(19): siRNA sense strand
uggcugaauccaugggcau

SEQ ID NO: 2297459 - RNA, 19 nt, Homo sapiens
  misc_RNA (1)...(19): siRNA sense strand
cugaggagaagaagcugaa

SEQ ID NO: 2297460 - RNA, 19 nt, Homo sapiens
  misc_RNA (1)...(19): siRNA sense strand
gggaguguccagaaguaca

SEQ ID NO: 2297461 - RNA, 19 nt, Homo sapiens
  misc_RNA (1)...(19): siRNA sense strand
gcugaggagaagaagcuga

SEQ ID NO: 2297462 - RNA, 19 nt, Homo sapiens
  misc_RNA (1)...(19): siRNA sense strand
agccaggccaggaggaaga

SEQ ID NO: 2297463 - RNA, 19 nt, Homo sapiens
  misc_RNA (1)...(19): siRNA sense strand
ccggauuggagcagaccau

SEQ ID NO: 2297464 - RNA, 19 nt, Homo sapiens
  misc_RNA (1)...(19): siRNA sense strand
ccaugaaggugguggcuga

SEQ ID NO: 2297465 - RNA, 19 nt, Homo sapiens
  misc_RNA (1)...(19): siRNA sense strand
cggcaaagggaaagagaag

SEQ ID NO: 2297466 - RNA, 19 nt, Homo sapiens
  misc_RNA (1)...(19): siRNA sense strand
gcuaaagaaugucgagcca

SEQ ID NO: 2297467 - RNA, 19 nt, Homo sapiens
  misc_RNA (1)...(19): siRNA sense strand
ccugaagggcaaaggucaa

SEQ ID NO: 2297468 - RNA, 19 nt, Homo sapiens
  misc_RNA (1)...(19): siRNA sense strand
gagaagacgcccuggacga

SEQ ID NO: 2297469 - RNA, 19 nt, Homo sapiens
  misc_RNA (1)...(19): siRNA sense strand
gugaaagcgcugauggaca

SEQ ID NO: 2297470 - RNA, 19 nt, Homo sapiens
  misc_RNA (1)...(19): siRNA sense strand
gggaagcggcagaagcuca

SEQ ID NO: 2297471 - RNA, 19 nt, Homo sapiens
  misc_RNA (1)...(19): siRNA sense strand
ccucaaagcucauuggcug

SEQ ID NO: 2297472 - RNA, 19 nt, Homo sapiens
  misc_RNA (1)...(19): siRNA sense strand
gagguugaucugagcgaca

SEQ ID NO: 2297473 - RNA, 19 nt, Homo sapiens
  misc_RNA (1)...(19): siRNA sense strand
cggcagaagcucaccacca

SEQ ID NO: 2297474 - RNA, 19 nt, Homo sapiens
  misc_RNA (1)...(19): siRNA sense strand
uaaagaaugucgagccacu

SEQ ID NO: 2297475 - RNA, 19 nt, Homo sapiens
  misc_RNA (1)...(19): siRNA sense strand
augaggagaaggagguuga

SEQ ID NO: 2297476 - RNA, 19 nt, Homo sapiens
  misc_RNA (1)...(19): siRNA sense strand
uggcugaauccaugggcau

SEQ ID NO: 2297477 - RNA, 19 nt, Homo sapiens
  misc_RNA (1)...(19): siRNA sense strand
cugaggagaagaagcugaa

SEQ ID NO: 2297478 - RNA, 19 nt, Homo sapiens
  misc_RNA (1)...(19): siRNA sense strand
gggaguguccagaaguaca

SEQ ID NO: 2297479 - RNA, 19 nt, Homo sapiens
  misc_RNA (1)...(19): siRNA sense strand
gcugaggagaagaagcuga

SEQ ID NO: 2297480 - RNA, 19 nt, Homo sapiens
  misc_RNA (1)...(19): siRNA sense strand
agccaggccaggaggaaga

SEQ ID NO: 2297481 - RNA, 19 nt, Homo sapiens
  misc_RNA (1)...(19): siRNA sense strand
ccggauuggagcagaccau

SEQ ID NO: 2297482 - RNA, 19 nt, Homo sapiens
  misc_RNA (1)...(19): siRNA sense strand
ccaugaaggugguggcuga

SEQ ID NO: 2297483 - RNA, 19 nt, Homo sapiens
  misc_RNA (1)...(19): siRNA sense strand
cggcaaagggaaagagaag

SEQ ID NO: 2297484 - RNA, 19 nt, Homo sapiens
  misc_RNA (1)...(19): siRNA sense strand
gcuaaagaaugucgagcca

SEQ ID NO: 2297485 - RNA, 19 nt, Homo sapiens
  misc_RNA (1)...(19): siRNA sense strand
ccugaagggcaaaggucaa

SEQ ID NO: 2297486 - RNA, 19 nt, Homo sapiens
  misc_RNA (1)...(19): siRNA sense strand
gagaagacgcccuggacga

SEQ ID NO: 2297487 - RNA, 19 nt, Homo sapiens
  misc_RNA (1)...(19): siRNA sense strand
gugaaagcgcugauggaca

SEQ ID NO: 2297488 - RNA, 19 nt, Homo sapiens
  misc_RNA (1)...(19): siRNA sense strand
gggaagcggcagaagcuca

SEQ ID NO: 2297489 - RNA, 19 nt, Homo sapiens
  misc_RNA (1)...(19): siRNA sense strand
ccucaaagcucauuggcug

SEQ ID NO: 2297490 - RNA, 19 nt, Homo sapiens
  misc_RNA (1)...(19): siRNA sense strand
gagguugaucugagcgaca

SEQ ID NO: 2297491 - RNA, 19 nt, Homo sapiens
  misc_RNA (1)...(19): siRNA sense strand
cggcagaagcucaccacca

SEQ ID NO: 2297492 - RNA, 19 nt, Homo sapiens
  misc_RNA (1)...(19): siRNA sense strand
uaaagaaugucgagccacu

SEQ ID NO: 2297493 - RNA, 19 nt, Homo sapiens
  misc_RNA (1)...(19): siRNA sense strand
augaggagaaggagguuga

SEQ ID NO: 2297494 - RNA, 19 nt, Homo sapiens
  misc_RNA (1)...(19): siRNA sense strand
uggcugaauccaugggcau

SEQ ID NO: 2297495 - RNA, 19 nt, Homo sapiens
  misc_RNA (1)...(19): siRNA sense strand
cugaggagaagaagcugaa

SEQ ID NO: 2297496 - RNA, 19 nt, Homo sapiens
  misc_RNA (1)...(19): siRNA sense strand
gggaguguccagaaguaca

SEQ ID NO: 2297497 - RNA, 19 nt, Homo sapiens
  misc_RNA (1)...(19): siRNA sense strand
gcugaggagaagaagcuga

SEQ ID NO: 2297498 - RNA, 19 nt, Homo sapiens
  misc_RNA (1)...(19): siRNA sense strand
agccaggccaggaggaaga

SEQ ID NO: 2297499 - RNA, 19 nt, Homo sapiens
  misc_RNA (1)...(19): siRNA sense strand
ccggauuggagcagaccau

SEQ ID NO: 2297500 - RNA, 19 nt, Homo sapiens
  misc_RNA (1)...(19): siRNA sense strand
cgauggaaucccagaggaa

SEQ ID NO: 2297501 - RNA, 19 nt, Homo sapiens
  misc_RNA (1)...(19): siRNA sense strand
acuuaauccugcagccaaa

SEQ ID NO: 2297502 - RNA, 19 nt, Homo sapiens
  misc_RNA (1)...(19): siRNA sense strand
cguuagaagguuaaaguca

SEQ ID NO: 2297503 - RNA, 19 nt, Homo sapiens
  misc_RNA (1)...(19): siRNA sense strand
cagaggaaacugacggaga

SEQ ID NO: 2297504 - RNA, 19 nt, Homo sapiens
  misc_RNA (1)...(19): siRNA sense strand
gguuaaagucaaaaggaca

SEQ ID NO: 2297505 - RNA, 19 nt, Homo sapiens
  misc_RNA (1)...(19): siRNA sense strand
ugugagaaguggggagaaa

SEQ ID NO: 2297506 - RNA, 19 nt, Homo sapiens
  misc_RNA (1)...(19): siRNA sense strand
aguagaugaagaugagauu

SEQ ID NO: 2297507 - RNA, 19 nt, Homo sapiens
  misc_RNA (1)...(19): siRNA sense strand
gaaagaagcugcagcggag

SEQ ID NO: 2297508 - RNA, 19 nt, Homo sapiens
  misc_RNA (1)...(19): siRNA sense strand
ggacagaucccuaacucga

SEQ ID NO: 2297509 - RNA, 19 nt, Homo sapiens
  misc_RNA (1)...(19): siRNA sense strand
cuaccgacaccgauggaau

SEQ ID NO: 2297510 - RNA, 19 nt, Homo sapiens
  misc_RNA (1)...(19): siRNA sense strand
ggaaacugacggagacgca

SEQ ID NO: 2297511 - RNA, 19 nt, Homo sapiens
  misc_RNA (1)...(19): siRNA sense strand
aguugaaagggaagacuca

SEQ ID NO: 2297512 - RNA, 19 nt, Homo sapiens
  misc_RNA (1)...(19): siRNA sense strand
agguauugaccaagaagaa

SEQ ID NO: 2297513 - RNA, 19 nt, Homo sapiens
  misc_RNA (1)...(19): siRNA sense strand
cggaaaacaaccaagaaau

SEQ ID NO: 2297514 - RNA, 19 nt, Homo sapiens
  misc_RNA (1)...(19): siRNA sense strand
ccggaaaacaaccaagaaa

SEQ ID NO: 2297515 - RNA, 19 nt, Homo sapiens
  misc_RNA (1)...(19): siRNA sense strand
auuuagagcgccaguggaa

SEQ ID NO: 2297516 - RNA, 19 nt, Homo sapiens
  misc_RNA (1)...(19): siRNA sense strand
uggaugaagauguggagga

SEQ ID NO: 2297517 - RNA, 19 nt, Homo sapiens
  misc_RNA (1)...(19): siRNA sense strand
ugaaagauguccagcugca

SEQ ID NO: 2297518 - RNA, 19 nt, Homo sapiens
  misc_RNA (1)...(19): siRNA sense strand
aagaagaaauuacaggacu

SEQ ID NO: 2297519 - RNA, 19 nt, Homo sapiens
  misc_RNA (1)...(19): siRNA sense strand
ugaagaaauuggaggaggu

SEQ ID NO: 2297520 - RNA, 19 nt, Homo sapiens
  misc_RNA (1)...(19): siRNA sense strand
gaaaugacucacaaggcaa

SEQ ID NO: 2297521 - RNA, 19 nt, Homo sapiens
  misc_RNA (1)...(19): siRNA sense strand
aggaaguuugccaggguua

SEQ ID NO: 2297522 - RNA, 19 nt, Homo sapiens
  misc_RNA (1)...(19): siRNA sense strand
agaaauuggaggaggugca

SEQ ID NO: 2297523 - RNA, 19 nt, Homo sapiens
  misc_RNA (1)...(19): siRNA sense strand
agaucuugucauagaguuu

SEQ ID NO: 2297524 - RNA, 19 nt, Homo sapiens
  misc_RNA (1)...(19): siRNA sense strand
aauugaaacgagcuagaaa

SEQ ID NO: 2297525 - RNA, 19 nt, Homo sapiens
  misc_RNA (1)...(19): siRNA sense strand
aauuggaggaggugcagaa

SEQ ID NO: 2297526 - RNA, 19 nt, Homo sapiens
  misc_RNA (1)...(19): siRNA sense strand
agaauugaaacgagcuaga

SEQ ID NO: 2297527 - RNA, 19 nt, Homo sapiens
  misc_RNA (1)...(19): siRNA sense strand
aaaugaagaaauuggagga

SEQ ID NO: 2297528 - RNA, 19 nt, Homo sapiens
  misc_RNA (1)...(19): siRNA sense strand
ccacguuugaggaagaaaa

SEQ ID NO: 2297529 - RNA, 19 nt, Homo sapiens
  misc_RNA (1)...(19): siRNA sense strand
ugaaaugacucacaaggca

SEQ ID NO: 2297530 - RNA, 19 nt, Homo sapiens
  misc_RNA (1)...(19): siRNA sense strand
gcuuacuaugaaugaagaa

SEQ ID NO: 2297531 - RNA, 19 nt, Homo sapiens
  misc_RNA (1)...(19): siRNA sense strand
gauguaugauguauggcuu

SEQ ID NO: 2297532 - RNA, 19 nt, Homo sapiens
  misc_RNA (1)...(19): siRNA sense strand
gcagaagguggacagggua

SEQ ID NO: 2297533 - RNA, 19 nt, Homo sapiens
  misc_RNA (1)...(19): siRNA sense strand
cuucuaaaguuuugggaaa

SEQ ID NO: 2297534 - RNA, 19 nt, Homo sapiens
  misc_RNA (1)...(19): siRNA sense strand
cuuccaaaguucugggauu

SEQ ID NO: 2297535 - RNA, 19 nt, Homo sapiens
  misc_RNA (1)...(19): siRNA sense strand
gggaaaugaacgugaggga

SEQ ID NO: 2297536 - RNA, 19 nt, Homo sapiens
  misc_RNA (1)...(19): siRNA sense strand
gggaaugccaagaagaauu

SEQ ID NO: 2297537 - RNA, 19 nt, Homo sapiens
  misc_RNA (1)...(19): siRNA sense strand
aguguuaaguguugaagaa

SEQ ID NO: 2297538 - RNA, 19 nt, Homo sapiens
  misc_RNA (1)...(19): siRNA sense strand
agaagaaaacagaagguua

SEQ ID NO: 2297539 - RNA, 19 nt, Homo sapiens
  misc_RNA (1)...(19): siRNA sense strand
cagcugauauucugggcua

SEQ ID NO: 2297540 - RNA, 19 nt, Homo sapiens
  misc_RNA (1)...(19): siRNA sense strand
aaaucaagggccaggcaua

SEQ ID NO: 2297541 - RNA, 19 nt, Homo sapiens
  misc_RNA (1)...(19): siRNA sense strand
ggacaugacugugcggcaa

SEQ ID NO: 2297542 - RNA, 19 nt, Homo sapiens
  misc_RNA (1)...(19): siRNA sense strand
gacauaaggcccuggguau

SEQ ID NO: 2297543 - RNA, 19 nt, Homo sapiens
  misc_RNA (1)...(19): siRNA sense strand
cuguggauguggaaggaau

SEQ ID NO: 2297544 - RNA, 19 nt, Homo sapiens
  misc_RNA (1)...(19): siRNA sense strand
cagagaauguauugcggau

SEQ ID NO: 2297545 - RNA, 19 nt, Homo sapiens
  misc_RNA (1)...(19): siRNA sense strand
cagggaaugccaagaagaa

SEQ ID NO: 2297546 - RNA, 19 nt, Homo sapiens
  misc_RNA (1)...(19): siRNA sense strand
uguaaagagcauuguucaa

SEQ ID NO: 2297547 - RNA, 19 nt, Homo sapiens
  misc_RNA (1)...(19): siRNA sense strand
ggcaaauauuguuauggaa

SEQ ID NO: 2297548 - RNA, 19 nt, Homo sapiens
  misc_RNA (1)...(19): siRNA sense strand
cuaagagagaagaccauua

SEQ ID NO: 2297549 - RNA, 19 nt, Homo sapiens
  misc_RNA (1)...(19): siRNA sense strand
acauaaggcccuggguaua

SEQ ID NO: 2297550 - RNA, 19 nt, Homo sapiens
  misc_RNA (1)...(19): siRNA sense strand
uggaaggaaugaagacuca

SEQ ID NO: 2297551 - RNA, 19 nt, Homo sapiens
  misc_RNA (1)...(19): siRNA sense strand
ggaucuuuaucaagugcua

SEQ ID NO: 2297552 - RNA, 19 nt, Homo sapiens
  misc_RNA (1)...(19): siRNA sense strand
aagaugaauuaguguccaa

SEQ ID NO: 2297553 - RNA, 19 nt, Homo sapiens
  misc_RNA (1)...(19): siRNA sense strand
ccgagaagcuguugcccga

SEQ ID NO: 2297554 - RNA, 19 nt, Homo sapiens
  misc_RNA (1)...(19): siRNA sense strand
uggagacuuuagaaggaaa

SEQ ID NO: 2297555 - RNA, 19 nt, Homo sapiens
  misc_RNA (1)...(19): siRNA sense strand
gcagaggagcagagcaguu

SEQ ID NO: 2297556 - RNA, 19 nt, Homo sapiens
  misc_RNA (1)...(19): siRNA sense strand
uggaaaauacuaagagaga

SEQ ID NO: 2297557 - RNA, 19 nt, Homo sapiens
  misc_RNA (1)...(19): siRNA sense strand
gaccauuaugugagaauuu

SEQ ID NO: 2297558 - RNA, 19 nt, Homo sapiens
  misc_RNA (1)...(19): siRNA sense strand
gguaaaaccaccucagcua

SEQ ID NO: 2297559 - RNA, 19 nt, Homo sapiens
  misc_RNA (1)...(19): siRNA sense strand
ugccaaaaguuuagaccua

SEQ ID NO: 2297560 - RNA, 19 nt, Homo sapiens
  misc_RNA (1)...(19): siRNA sense strand
ugagggaauuccagcaaau

SEQ ID NO: 2297561 - RNA, 19 nt, Homo sapiens
  misc_RNA (1)...(19): siRNA sense strand
cugucaaauuccuguguuu

SEQ ID NO: 2297562 - RNA, 19 nt, Homo sapiens
  misc_RNA (1)...(19): siRNA sense strand
gaagaugacaaguaggcau

SEQ ID NO: 2297563 - RNA, 19 nt, Homo sapiens
  misc_RNA (1)...(19): siRNA sense strand
ccaaccacagggagugaaa

SEQ ID NO: 2297564 - RNA, 19 nt, Homo sapiens
  misc_RNA (1)...(19): siRNA sense strand
cuuaugaaguuuaguacca

SEQ ID NO: 2297565 - RNA, 19 nt, Homo sapiens
  misc_RNA (1)...(19): siRNA sense strand
ucuacagcacagagugaaa

SEQ ID NO: 2297566 - RNA, 19 nt, Homo sapiens
  misc_RNA (1)...(19): siRNA sense strand
uggaauuauugacaggauu

SEQ ID NO: 2297567 - RNA, 19 nt, Homo sapiens
  misc_RNA (1)...(19): siRNA sense strand
gaaaauacuaagagagaag

SEQ ID NO: 2297568 - RNA, 19 nt, Homo sapiens
  misc_RNA (1)...(19): siRNA sense strand
ggaaaugaacgugagggaa

SEQ ID NO: 2297569 - RNA, 19 nt, Homo sapiens
  misc_RNA (1)...(19): siRNA sense strand
agaugagcuucuaaaguuu

SEQ ID NO: 2297570 - RNA, 19 nt, Homo sapiens
  misc_RNA (1)...(19): siRNA sense strand
gacugaaauuacagaaguu

SEQ ID NO: 2297571 - RNA, 19 nt, Homo sapiens
  misc_RNA (1)...(19): siRNA sense strand
ccauagaccagaagccuga

SEQ ID NO: 2297572 - RNA, 19 nt, Homo sapiens
  misc_RNA (1)...(19): siRNA sense strand
aggccuuauugaagaugaa

SEQ ID NO: 2297573 - RNA, 19 nt, Homo sapiens
  misc_RNA (1)...(19): siRNA sense strand
ccucagugucucugcagaa

SEQ ID NO: 2297574 - RNA, 19 nt, Homo sapiens
  misc_RNA (1)...(19): siRNA sense strand
agacauaaggcccugggua

SEQ ID NO: 2297575 - RNA, 19 nt, Homo sapiens
  misc_RNA (1)...(19): siRNA sense strand
ggauagugucugcuucaaa

SEQ ID NO: 2297576 - RNA, 19 nt, Homo sapiens
  misc_RNA (1)...(19): siRNA sense strand
caucauuggaguggaacaa

SEQ ID NO: 2297577 - RNA, 19 nt, Homo sapiens
  misc_RNA (1)...(19): siRNA sense strand
ccaaagaagguguuaucca

SEQ ID NO: 2297578 - RNA, 19 nt, Homo sapiens
  misc_RNA (1)...(19): siRNA sense strand
ugcuagauguggagaaagu

SEQ ID NO: 2297579 - RNA, 19 nt, Homo sapiens
  misc_RNA (1)...(19): siRNA sense strand
aaagcagagaacagagaau

SEQ ID NO: 2297580 - RNA, 19 nt, Homo sapiens
  misc_RNA (1)...(19): siRNA sense strand
ggaaaauacuaagagagaa

SEQ ID NO: 2297581 - RNA, 19 nt, Homo sapiens
  misc_RNA (1)...(19): siRNA sense strand
agucagauucagagaguag

SEQ ID NO: 2297582 - RNA, 19 nt, Homo sapiens
  misc_RNA (1)...(19): siRNA sense strand
gaagaugaauggaucacca

SEQ ID NO: 2297583 - RNA, 19 nt, Homo sapiens
  misc_RNA (1)...(19): siRNA sense strand
guguaaaguguuaaguguu

SEQ ID NO: 2297584 - RNA, 19 nt, Homo sapiens
  misc_RNA (1)...(19): siRNA sense strand
ggagacuuuagaaggaaau

SEQ ID NO: 2297585 - RNA, 19 nt, Homo sapiens
  misc_RNA (1)...(19): siRNA sense strand
cuaucuaaggcuuuggcaa

SEQ ID NO: 2297586 - RNA, 19 nt, Homo sapiens
  misc_RNA (1)...(19): siRNA sense strand
cuuuaugccugauugguuu

SEQ ID NO: 2297587 - RNA, 19 nt, Homo sapiens
  misc_RNA (1)...(19): siRNA sense strand
ccuacaugcccuugcugaa

SEQ ID NO: 2297588 - RNA, 19 nt, Homo sapiens
  misc_RNA (1)...(19): siRNA sense strand
auuuauaccugaugguguu

SEQ ID NO: 2297589 - RNA, 19 nt, Homo sapiens
  misc_RNA (1)...(19): siRNA sense strand
guuuaggcgugaucaaaga

SEQ ID NO: 2297590 - RNA, 19 nt, Homo sapiens
  misc_RNA (1)...(19): siRNA sense strand
aaaugaacgugagggaauu

SEQ ID NO: 2297591 - RNA, 19 nt, Homo sapiens
  misc_RNA (1)...(19): siRNA sense strand
cagagaacagagaauguau

SEQ ID NO: 2297592 - RNA, 19 nt, Homo sapiens
  misc_RNA (1)...(19): siRNA sense strand
acagaagguuauaccauca

SEQ ID NO: 2297593 - RNA, 19 nt, Homo sapiens
  misc_RNA (1)...(19): siRNA sense strand
uagaaggaaaucagauaca

SEQ ID NO: 2297594 - RNA, 19 nt, Homo sapiens
  misc_RNA (1)...(19): siRNA sense strand
aagucaucugcuugggaaa

SEQ ID NO: 2297595 - RNA, 19 nt, Homo sapiens
  misc_RNA (1)...(19): siRNA sense strand
acaugcagguugaaagguu

SEQ ID NO: 2297596 - RNA, 19 nt, Homo sapiens
  misc_RNA (1)...(19): siRNA sense strand
cugcgggauuucaguggua

SEQ ID NO: 2297597 - RNA, 19 nt, Homo sapiens
  misc_RNA (1)...(19): siRNA sense strand
uugaauaugcggugucaga

SEQ ID NO: 2297598 - RNA, 19 nt, Homo sapiens
  misc_RNA (1)...(19): siRNA sense strand
auucggaagaugacaagua

SEQ ID NO: 2297599 - RNA, 19 nt, Homo sapiens
  misc_RNA (1)...(19): siRNA sense strand
aagaugacaaguaggcauu

SEQ ID NO: 2297600 - RNA, 19 nt, Homo sapiens
  misc_RNA (1)...(19): siRNA sense strand
caauggaaauagauggaga

SEQ ID NO: 2297601 - RNA, 19 nt, Homo sapiens
  misc_RNA (1)...(19): siRNA sense strand
acgcgaagccaauggaaau

SEQ ID NO: 2297602 - RNA, 19 nt, Homo sapiens
  misc_RNA (1)...(19): siRNA sense strand
ggaagagaacagagcacau

SEQ ID NO: 2297603 - RNA, 19 nt, Homo sapiens
  misc_RNA (1)...(19): siRNA sense strand
gcaagaauauggacggaag

SEQ ID NO: 2297604 - RNA, 19 nt, Homo sapiens
  misc_RNA (1)...(19): siRNA sense strand
cguuugggauugagagcca

SEQ ID NO: 2297605 - RNA, 19 nt, Homo sapiens
  misc_RNA (1)...(19): siRNA sense strand
ggacauagaacgaggcguc

SEQ ID NO: 2297606 - RNA, 19 nt, Homo sapiens
  misc_RNA (1)...(19): siRNA sense strand
aaauagauggagagguuga

SEQ ID NO: 2297607 - RNA, 19 nt, Homo sapiens
  misc_RNA (1)...(19): siRNA sense strand
cuggaauaccaauggaaca

SEQ ID NO: 2297608 - RNA, 19 nt, Homo sapiens
  misc_RNA (1)...(19): siRNA sense strand
ccuugaaauggaaccgaaa

SEQ ID NO: 2297609 - RNA, 19 nt, Homo sapiens
  misc_RNA (1)...(19): siRNA sense strand
aggugaacuuucuggugua

SEQ ID NO: 2297610 - RNA, 19 nt, Homo sapiens
  misc_RNA (1)...(19): siRNA sense strand
ugaaacaggaggugugcau

SEQ ID NO: 2297611 - RNA, 19 nt, Homo sapiens
  misc_RNA (1)...(19): siRNA sense strand
gcaaggauauggaaccuga

SEQ ID NO: 2297612 - RNA, 19 nt, Homo sapiens
  misc_RNA (1)...(19): siRNA sense strand
caaacgaggucaacgccau

SEQ ID NO: 2297613 - RNA, 19 nt, Homo sapiens
  misc_RNA (1)...(19): siRNA sense strand
gagcauaaccagugacgag

SEQ ID NO: 2297614 - RNA, 19 nt, Homo sapiens
  misc_RNA (1)...(19): siRNA sense strand
cauugaagaucuggagcau

SEQ ID NO: 2297615 - RNA, 19 nt, Homo sapiens
  misc_RNA (1)...(19): siRNA sense strand
caagaauauggacggaaga

SEQ ID NO: 2297616 - RNA, 19 nt, Homo sapiens
  misc_RNA (1)...(19): siRNA sense strand
gaucaguaucaacgaggau

SEQ ID NO: 2297617 - RNA, 19 nt, Homo sapiens
  misc_RNA (1)...(19): siRNA sense strand
gagagaagcucgcucagca

SEQ ID NO: 2297618 - RNA, 19 nt, Homo sapiens
  misc_RNA (1)...(19): siRNA sense strand
uaaccagugacgaggugaa

SEQ ID NO: 2297619 - RNA, 19 nt, Homo sapiens
  misc_RNA (1)...(19): siRNA sense strand
auauggaaccugaaugaga

SEQ ID NO: 2297620 - RNA, 19 nt, Homo sapiens
  misc_RNA (1)...(19): siRNA sense strand
gcaugaaacaggaggugug

SEQ ID NO: 2297621 - RNA, 19 nt, Homo sapiens
  misc_RNA (1)...(19): siRNA sense strand
acgaaaccaaugaggucaa

SEQ ID NO: 2297622 - RNA, 19 nt, Homo sapiens
  misc_RNA (1)...(19): siRNA sense strand
acuaacagcuccaccgaga

SEQ ID NO: 2297623 - RNA, 19 nt, Homo sapiens
  misc_RNA (1)...(19): siRNA sense strand
gaacgaaaccaaugagguc

SEQ ID NO: 2297624 - RNA, 19 nt, Homo sapiens
  misc_RNA (1)...(19): siRNA sense strand
gugaaggaccugaugccau

SEQ ID NO: 2297625 - RNA, 19 nt, Homo sapiens
  misc_RNA (1)...(19): siRNA sense strand
ggguggagccucugagaaa

SEQ ID NO: 2297626 - RNA, 19 nt, Homo sapiens
  misc_RNA (1)...(19): siRNA sense strand
cgcuauaguuacaaagaua

SEQ ID NO: 2297627 - RNA, 19 nt, Homo sapiens
  misc_RNA (1)...(19): siRNA sense strand
ccuaagagggccacagaaa

SEQ ID NO: 2297628 - RNA, 19 nt, Homo sapiens
  misc_RNA (1)...(19): siRNA sense strand
acgaaaggguagaaaugaa

SEQ ID NO: 2297629 - RNA, 19 nt, Homo sapiens
  misc_RNA (1)...(19): siRNA sense strand
cccaagaaccugagaucaa

SEQ ID NO: 2297630 - RNA, 19 nt, Homo sapiens
  misc_RNA (1)...(19): siRNA sense strand
cugacauagagaagagaaa

SEQ ID NO: 2297631 - RNA, 19 nt, Homo sapiens
  misc_RNA (1)...(19): siRNA sense strand
aggaagaagaacagaccaa

SEQ ID NO: 2297632 - RNA, 19 nt, Homo sapiens
  misc_RNA (1)...(19): siRNA sense strand
agaaaagccugguggacaa

SEQ ID NO: 2297633 - RNA, 19 nt, Homo sapiens
  misc_RNA (1)...(19): siRNA sense strand
aggagauauucuaggagua

SEQ ID NO: 2297634 - RNA, 19 nt, Homo sapiens
  misc_RNA (1)...(19): siRNA sense strand
acacugaggaggaggaaga

SEQ ID NO: 2297635 - RNA, 19 nt, Homo sapiens
  misc_RNA (1)...(19): siRNA sense strand
cugaagagaaggagaacga

SEQ ID NO: 2297636 - RNA, 19 nt, Homo sapiens
  misc_RNA (1)...(19): siRNA sense strand
ggaaacaagaauggcgaua

SEQ ID NO: 2297637 - RNA, 19 nt, Homo sapiens
  misc_RNA (1)...(19): siRNA sense strand
guuacaaaucccugaacua

SEQ ID NO: 2297638 - RNA, 19 nt, Homo sapiens
  misc_RNA (1)...(19): siRNA sense strand
cugaaaugaaacagaucaa

SEQ ID NO: 2297639 - RNA, 19 nt, Homo sapiens
  misc_RNA (1)...(19): siRNA sense strand
cuaacaagggcauggaauu

SEQ ID NO: 2297640 - RNA, 19 nt, Homo sapiens
  misc_RNA (1)...(19): siRNA sense strand
caaagauaguuucggguca

SEQ ID NO: 2297641 - RNA, 19 nt, Homo sapiens
  misc_RNA (1)...(19): siRNA sense strand
cugcagauggagagccaaa

SEQ ID NO: 2297642 - RNA, 19 nt, Homo sapiens
  misc_RNA (1)...(19): siRNA sense strand
guucuaaugcacaggcuua

SEQ ID NO: 2297643 - RNA, 19 nt, Homo sapiens
  misc_RNA (1)...(19): siRNA sense strand
aggcugaagagaaggagaa

SEQ ID NO: 2297644 - RNA, 19 nt, Homo sapiens
  misc_RNA (1)...(19): siRNA sense strand
gggcaaaggaaaccaguca

SEQ ID NO: 2297645 - RNA, 19 nt, Homo sapiens
  misc_RNA (1)...(19): siRNA sense strand
ggaacgaaaggguagaaau

SEQ ID NO: 2297646 - RNA, 19 nt, Homo sapiens
  misc_RNA (1)...(19): siRNA sense strand
gcuauaguucagaagauua

SEQ ID NO: 2297647 - RNA, 19 nt, Homo sapiens
  misc_RNA (1)...(19): siRNA sense strand
caccgaagcaagaggguuu

SEQ ID NO: 2297648 - RNA, 19 nt, Homo sapiens
  misc_RNA (1)...(19): siRNA sense strand
gguuacgcuugaugauaua

SEQ ID NO: 2297649 - RNA, 19 nt, Homo sapiens
  misc_RNA (1)...(19): siRNA sense strand
augacaaagugaagacaga

SEQ ID NO: 2297650 - RNA, 19 nt, Homo sapiens
  misc_RNA (1)...(19): siRNA sense strand
uggcaguggugguggacga

SEQ ID NO: 2297651 - RNA, 19 nt, Homo sapiens
  misc_RNA (1)...(19): siRNA sense strand
gaacaaaagcauugggucu

SEQ ID NO: 2297652 - RNA, 19 nt, Homo sapiens
  misc_RNA (1)...(19): siRNA sense strand
gguuugguguccauggaaa

SEQ ID NO: 2297653 - RNA, 19 nt, Homo sapiens
  misc_RNA (1)...(19): siRNA sense strand
gggcauggaauuaaagcau

SEQ ID NO: 2297654 - RNA, 19 nt, Homo sapiens
  misc_RNA (1)...(19): siRNA sense strand
aaacugaugccaagaacaa

SEQ ID NO: 2297655 - RNA, 19 nt, Homo sapiens
  misc_RNA (1)...(19): siRNA sense strand
ccucacaaccugaagaaca

SEQ ID NO: 2297656 - RNA, 19 nt, Homo sapiens
  misc_RNA (1)...(19): siRNA sense strand
acgaaaugucaguggcuuu

SEQ ID NO: 2297657 - RNA, 19 nt, Homo sapiens
  misc_RNA (1)...(19): siRNA sense strand
aaaagaaggcgcugauaaa

SEQ ID NO: 2297658 - RNA, 19 nt, Homo sapiens
  misc_RNA (1)...(19): siRNA sense strand
ccucaaucuaugaagaauu

SEQ ID NO: 2297659 - RNA, 19 nt, Homo sapiens
  misc_RNA (1)...(19): siRNA sense strand
ccuauggguuccagaaaca

SEQ ID NO: 2297660 - RNA, 19 nt, Homo sapiens
  misc_RNA (1)...(19): siRNA sense strand
gaggagggagcaaaggaaa

SEQ ID NO: 2297661 - RNA, 19 nt, Homo sapiens
  misc_RNA (1)...(19): siRNA sense strand
gaaaggaaaucaagcagca

SEQ ID NO: 2297662 - RNA, 19 nt, Homo sapiens
  misc_RNA (1)...(19): siRNA sense strand
ucaucaaugcugaggaaga

SEQ ID NO: 2297663 - RNA, 19 nt, Homo sapiens
  misc_RNA (1)...(19): siRNA sense strand
gcgcuaaggacaugccauu

SEQ ID NO: 2297664 - RNA, 19 nt, Homo sapiens
  misc_RNA (1)...(19): siRNA sense strand
ucccagaaaguuugaaaua

SEQ ID NO: 2297665 - RNA, 19 nt, Homo sapiens
  misc_RNA (1)...(19): siRNA sense strand
caaaggagggagagaagga

SEQ ID NO: 2297666 - RNA, 19 nt, Homo sapiens
  misc_RNA (1)...(19): siRNA sense strand
auggagagccaaagccaaa

SEQ ID NO: 2297667 - RNA, 19 nt, Homo sapiens
  misc_RNA (1)...(19): siRNA sense strand
ugacagagucuucgguuau

SEQ ID NO: 2297668 - RNA, 19 nt, Homo sapiens
  misc_RNA (1)...(19): siRNA sense strand
agaacugagccuagcaaau

SEQ ID NO: 2297669 - RNA, 19 nt, Homo sapiens
  misc_RNA (1)...(19): siRNA sense strand
cugcauuauaagagacaga

SEQ ID NO: 2297670 - RNA, 19 nt, Homo sapiens
  misc_RNA (1)...(19): siRNA sense strand
cagcagaaggagcagagaa

SEQ ID NO: 2297671 - RNA, 19 nt, Homo sapiens
  misc_RNA (1)...(19): siRNA sense strand
acccauugguagugugaau

SEQ ID NO: 2297672 - RNA, 19 nt, Homo sapiens
  misc_RNA (1)...(19): siRNA sense strand
aaucaucaaugcugaggaa

SEQ ID NO: 2297673 - RNA, 19 nt, Homo sapiens
  misc_RNA (1)...(19): siRNA sense strand
cuacaaggguggagccucu

SEQ ID NO: 2297674 - RNA, 19 nt, Homo sapiens
  misc_RNA (1)...(19): siRNA sense strand
acaagaauggcgauaacaa

SEQ ID NO: 2297675 - RNA, 19 nt, Homo sapiens
  misc_RNA (1)...(19): siRNA sense strand
agucacaagauguaaagaa

SEQ ID NO: 2297676 - RNA, 19 nt, Homo sapiens
  misc_RNA (1)...(19): siRNA sense strand
acggaaaccagcaaagcua

SEQ ID NO: 2297677 - RNA, 19 nt, Homo sapiens
  misc_RNA (1)...(19): siRNA sense strand
ggagcaaaggaaacaagaa

SEQ ID NO: 2297678 - RNA, 19 nt, Homo sapiens
  misc_RNA (1)...(19): siRNA sense strand
caaaagaaggcgcugauaa

SEQ ID NO: 2297679 - RNA, 19 nt, Homo sapiens
  misc_RNA (1)...(19): siRNA sense strand
cgguuacgcuugaugauau

SEQ ID NO: 2297680 - RNA, 19 nt, Homo sapiens
  misc_RNA (1)...(19): siRNA sense strand
aagugaagacagagacaca

SEQ ID NO: 2297681 - RNA, 19 nt, Homo sapiens
  misc_RNA (1)...(19): siRNA sense strand
cagucuaaaucucaagcua

SEQ ID NO: 2297682 - RNA, 19 nt, Homo sapiens
  misc_RNA (1)...(19): siRNA sense strand
aauauuaggaggagcgcau

SEQ ID NO: 2297683 - RNA, 19 nt, Homo sapiens
  misc_RNA (1)...(19): siRNA sense strand
ggaggagggagcaaaggaa

SEQ ID NO: 2297684 - RNA, 19 nt, Homo sapiens
  misc_RNA (1)...(19): siRNA sense strand
aagcuauaguucagaagau

SEQ ID NO: 2297685 - RNA, 19 nt, Homo sapiens
  misc_RNA (1)...(19): siRNA sense strand
agagacacaugcagaaaca

SEQ ID NO: 2297686 - RNA, 19 nt, Homo sapiens
  misc_RNA (1)...(19): siRNA sense strand
ccauugguagugugaauaa

SEQ ID NO: 2297687 - RNA, 19 nt, Homo sapiens
  misc_RNA (1)...(19): siRNA sense strand
aggcaaaggagggagagaa

SEQ ID NO: 2297688 - RNA, 19 nt, Homo sapiens
  misc_RNA (1)...(19): siRNA sense strand
ucaguauccuacagggcaa

SEQ ID NO: 2297689 - RNA, 19 nt, Homo sapiens
  misc_RNA (1)...(19): siRNA sense strand
uaggaguacucaagagcau

SEQ ID NO: 2297690 - RNA, 19 nt, Homo sapiens
  misc_RNA (1)...(19): siRNA sense strand
agauaaaagaggaagacuu

SEQ ID NO: 2297691 - RNA, 19 nt, Homo sapiens
  misc_RNA (1)...(19): siRNA sense strand
ccagaggaguauaaagacu

SEQ ID NO: 2297692 - RNA, 19 nt, Homo sapiens
  misc_RNA (1)...(19): siRNA sense strand
ggguggagccucugagaaa

SEQ ID NO: 2297693 - RNA, 19 nt, Homo sapiens
  misc_RNA (1)...(19): siRNA sense strand
cgcuauaguuacaaagaua

SEQ ID NO: 2297694 - RNA, 19 nt, Homo sapiens
  misc_RNA (1)...(19): siRNA sense strand
ccuaagagggccacagaaa

SEQ ID NO: 2297695 - RNA, 19 nt, Homo sapiens
  misc_RNA (1)...(19): siRNA sense strand
acgaaaggguagaaaugaa

SEQ ID NO: 2297696 - RNA, 19 nt, Homo sapiens
  misc_RNA (1)...(19): siRNA sense strand
cccaagaaccugagaucaa

SEQ ID NO: 2297697 - RNA, 19 nt, Homo sapiens
  misc_RNA (1)...(19): siRNA sense strand
cugacauagagaagagaaa

SEQ ID NO: 2297698 - RNA, 19 nt, Homo sapiens
  misc_RNA (1)...(19): siRNA sense strand
aggaagaagaacagaccaa

SEQ ID NO: 2297699 - RNA, 19 nt, Homo sapiens
  misc_RNA (1)...(19): siRNA sense strand
agaaaagccugguggacaa

SEQ ID NO: 2297700 - RNA, 19 nt, Homo sapiens
  misc_RNA (1)...(19): siRNA sense strand
aggagauauucuaggagua

SEQ ID NO: 2297701 - RNA, 19 nt, Homo sapiens
  misc_RNA (1)...(19): siRNA sense strand
acacugaggaggaggaaga

SEQ ID NO: 2297702 - RNA, 19 nt, Homo sapiens
  misc_RNA (1)...(19): siRNA sense strand
cugaagagaaggagaacga

SEQ ID NO: 2297703 - RNA, 19 nt, Homo sapiens
  misc_RNA (1)...(19): siRNA sense strand
ggaaacaagaauggcgaua

SEQ ID NO: 2297704 - RNA, 19 nt, Homo sapiens
  misc_RNA (1)...(19): siRNA sense strand
guuacaaaucccugaacua

SEQ ID NO: 2297705 - RNA, 19 nt, Homo sapiens
  misc_RNA (1)...(19): siRNA sense strand
cugaaaugaaacagaucaa

SEQ ID NO: 2297706 - RNA, 19 nt, Homo sapiens
  misc_RNA (1)...(19): siRNA sense strand
cuaacaagggcauggaauu

SEQ ID NO: 2297707 - RNA, 19 nt, Homo sapiens
  misc_RNA (1)...(19): siRNA sense strand
caaagauaguuucggguca

SEQ ID NO: 2297708 - RNA, 19 nt, Homo sapiens
  misc_RNA (1)...(19): siRNA sense strand
cugcagauggagagccaaa

SEQ ID NO: 2297709 - RNA, 19 nt, Homo sapiens
  misc_RNA (1)...(19): siRNA sense strand
guucuaaugcacaggcuua

SEQ ID NO: 2297710 - RNA, 19 nt, Homo sapiens
  misc_RNA (1)...(19): siRNA sense strand
aggcugaagagaaggagaa

SEQ ID NO: 2297711 - RNA, 19 nt, Homo sapiens
  misc_RNA (1)...(19): siRNA sense strand
gggcaaaggaaaccaguca

SEQ ID NO: 2297712 - RNA, 19 nt, Homo sapiens
  misc_RNA (1)...(19): siRNA sense strand
ggaacgaaaggguagaaau

SEQ ID NO: 2297713 - RNA, 19 nt, Homo sapiens
  misc_RNA (1)...(19): siRNA sense strand
gcuauaguucagaagauua

SEQ ID NO: 2297714 - RNA, 19 nt, Homo sapiens
  misc_RNA (1)...(19): siRNA sense strand
caccgaagcaagaggguuu

SEQ ID NO: 2297715 - RNA, 19 nt, Homo sapiens
  misc_RNA (1)...(19): siRNA sense strand
gguuacgcuugaugauaua

SEQ ID NO: 2297716 - RNA, 19 nt, Homo sapiens
  misc_RNA (1)...(19): siRNA sense strand
augacaaagugaagacaga

SEQ ID NO: 2297717 - RNA, 19 nt, Homo sapiens
  misc_RNA (1)...(19): siRNA sense strand
uggcaguggugguggacga

SEQ ID NO: 2297718 - RNA, 19 nt, Homo sapiens
  misc_RNA (1)...(19): siRNA sense strand
gaacaaaagcauugggucu

SEQ ID NO: 2297719 - RNA, 19 nt, Homo sapiens
  misc_RNA (1)...(19): siRNA sense strand
gguuugguguccauggaaa

SEQ ID NO: 2297720 - RNA, 19 nt, Homo sapiens
  misc_RNA (1)...(19): siRNA sense strand
gggcauggaauuaaagcau

SEQ ID NO: 2297721 - RNA, 19 nt, Homo sapiens
  misc_RNA (1)...(19): siRNA sense strand
aaacugaugccaagaacaa

SEQ ID NO: 2297722 - RNA, 19 nt, Homo sapiens
  misc_RNA (1)...(19): siRNA sense strand
ccucacaaccugaagaaca

SEQ ID NO: 2297723 - RNA, 19 nt, Homo sapiens
  misc_RNA (1)...(19): siRNA sense strand
acgaaaugucaguggcuuu

SEQ ID NO: 2297724 - RNA, 19 nt, Homo sapiens
  misc_RNA (1)...(19): siRNA sense strand
aaaagaaggcgcugauaaa

SEQ ID NO: 2297725 - RNA, 19 nt, Homo sapiens
  misc_RNA (1)...(19): siRNA sense strand
ccucaaucuaugaagaauu

SEQ ID NO: 2297726 - RNA, 19 nt, Homo sapiens
  misc_RNA (1)...(19): siRNA sense strand
ccuauggguuccagaaaca

SEQ ID NO: 2297727 - RNA, 19 nt, Homo sapiens
  misc_RNA (1)...(19): siRNA sense strand
gaggagggagcaaaggaaa

SEQ ID NO: 2297728 - RNA, 19 nt, Homo sapiens
  misc_RNA (1)...(19): siRNA sense strand
gaaaggaaaucaagcagca

SEQ ID NO: 2297729 - RNA, 19 nt, Homo sapiens
  misc_RNA (1)...(19): siRNA sense strand
ucaucaaugcugaggaaga

SEQ ID NO: 2297730 - RNA, 19 nt, Homo sapiens
  misc_RNA (1)...(19): siRNA sense strand
gcgcuaaggacaugccauu

SEQ ID NO: 2297731 - RNA, 19 nt, Homo sapiens
  misc_RNA (1)...(19): siRNA sense strand
ucccagaaaguuugaaaua

SEQ ID NO: 2297732 - RNA, 19 nt, Homo sapiens
  misc_RNA (1)...(19): siRNA sense strand
caaaggagggagagaagga

SEQ ID NO: 2297733 - RNA, 19 nt, Homo sapiens
  misc_RNA (1)...(19): siRNA sense strand
auggagagccaaagccaaa

SEQ ID NO: 2297734 - RNA, 19 nt, Homo sapiens
  misc_RNA (1)...(19): siRNA sense strand
ugacagagucuucgguuau

SEQ ID NO: 2297735 - RNA, 19 nt, Homo sapiens
  misc_RNA (1)...(19): siRNA sense strand
agaacugagccuagcaaau

SEQ ID NO: 2297736 - RNA, 19 nt, Homo sapiens
  misc_RNA (1)...(19): siRNA sense strand
cugcauuauaagagacaga

SEQ ID NO: 2297737 - RNA, 19 nt, Homo sapiens
  misc_RNA (1)...(19): siRNA sense strand
cagcagaaggagcagagaa

SEQ ID NO: 2297738 - RNA, 19 nt, Homo sapiens
  misc_RNA (1)...(19): siRNA sense strand
acccauugguagugugaau

SEQ ID NO: 2297739 - RNA, 19 nt, Homo sapiens
  misc_RNA (1)...(19): siRNA sense strand
aaucaucaaugcugaggaa

SEQ ID NO: 2297740 - RNA, 19 nt, Homo sapiens
  misc_RNA (1)...(19): siRNA sense strand
cuacaaggguggagccucu

SEQ ID NO: 2297741 - RNA, 19 nt, Homo sapiens
  misc_RNA (1)...(19): siRNA sense strand
acaagaauggcgauaacaa

SEQ ID NO: 2297742 - RNA, 19 nt, Homo sapiens
  misc_RNA (1)...(19): siRNA sense strand
agucacaagauguaaagaa

SEQ ID NO: 2297743 - RNA, 19 nt, Homo sapiens
  misc_RNA (1)...(19): siRNA sense strand
acggaaaccagcaaagcua

SEQ ID NO: 2297744 - RNA, 19 nt, Homo sapiens
  misc_RNA (1)...(19): siRNA sense strand
ggagcaaaggaaacaagaa

SEQ ID NO: 2297745 - RNA, 19 nt, Homo sapiens
  misc_RNA (1)...(19): siRNA sense strand
caaaagaaggcgcugauaa

SEQ ID NO: 2297746 - RNA, 19 nt, Homo sapiens
  misc_RNA (1)...(19): siRNA sense strand
cgguuacgcuugaugauau

SEQ ID NO: 2297747 - RNA, 19 nt, Homo sapiens
  misc_RNA (1)...(19): siRNA sense strand
aagugaagacagagacaca

SEQ ID NO: 2297748 - RNA, 19 nt, Homo sapiens
  misc_RNA (1)...(19): siRNA sense strand
cagucuaaaucucaagcua

SEQ ID NO: 2297749 - RNA, 19 nt, Homo sapiens
  misc_RNA (1)...(19): siRNA sense strand
aauauuaggaggagcgcau

SEQ ID NO: 2297750 - RNA, 19 nt, Homo sapiens
  misc_RNA (1)...(19): siRNA sense strand
ggaggagggagcaaaggaa

SEQ ID NO: 2297751 - RNA, 19 nt, Homo sapiens
  misc_RNA (1)...(19): siRNA sense strand
aagcuauaguucagaagau

SEQ ID NO: 2297752 - RNA, 19 nt, Homo sapiens
  misc_RNA (1)...(19): siRNA sense strand
agagacacaugcagaaaca

SEQ ID NO: 2297753 - RNA, 19 nt, Homo sapiens
  misc_RNA (1)...(19): siRNA sense strand
ccauugguagugugaauaa

SEQ ID NO: 2297754 - RNA, 19 nt, Homo sapiens
  misc_RNA (1)...(19): siRNA sense strand
aggcaaaggagggagagaa

SEQ ID NO: 2297755 - RNA, 19 nt, Homo sapiens
  misc_RNA (1)...(19): siRNA sense strand
ucaguauccuacagggcaa

SEQ ID NO: 2297756 - RNA, 19 nt, Homo sapiens
  misc_RNA (1)...(19): siRNA sense strand
uaggaguacucaagagcau

SEQ ID NO: 2297757 - RNA, 19 nt, Homo sapiens
  misc_RNA (1)...(19): siRNA sense strand
agauaaaagaggaagacuu

SEQ ID NO: 2297758 - RNA, 19 nt, Homo sapiens
  misc_RNA (1)...(19): siRNA sense strand
ccagaggaguauaaagacu

SEQ ID NO: 2297759 - RNA, 19 nt, Homo sapiens
  misc_RNA (1)...(19): siRNA sense strand
gaagaaagcgaguggguca

SEQ ID NO: 2297760 - RNA, 19 nt, Homo sapiens
  misc_RNA (1)...(19): siRNA sense strand
ccaaaguacccaaaggcaa

SEQ ID NO: 2297761 - RNA, 19 nt, Homo sapiens
  misc_RNA (1)...(19): siRNA sense strand
agaaauauggggaaggaaa

SEQ ID NO: 2297762 - RNA, 19 nt, Homo sapiens
  misc_RNA (1)...(19): siRNA sense strand
gcagauuggucuuggagga

SEQ ID NO: 2297763 - RNA, 19 nt, Homo sapiens
  misc_RNA (1)...(19): siRNA sense strand
gcucggaacugcagcccaa

SEQ ID NO: 2297764 - RNA, 19 nt, Homo sapiens
  misc_RNA (1)...(19): siRNA sense strand
ugacagaagcaguggucga

SEQ ID NO: 2297765 - RNA, 19 nt, Homo sapiens
  misc_RNA (1)...(19): siRNA sense strand
cccaaaggcaaguggaaca

SEQ ID NO: 2297766 - RNA, 19 nt, Homo sapiens
  misc_RNA (1)...(19): siRNA sense strand
ggucaaggcuggagugcag

SEQ ID NO: 2297767 - RNA, 19 nt, Homo sapiens
  misc_RNA (1)...(19): siRNA sense strand
gcgcaugacaauaagcaga

SEQ ID NO: 2297768 - RNA, 19 nt, Homo sapiens
  misc_RNA (1)...(19): siRNA sense strand
ggauugaagaaggggaaaa

SEQ ID NO: 2297769 - RNA, 19 nt, Homo sapiens
  misc_RNA (1)...(19): siRNA sense strand
ccuuugauauggaggcuga

SEQ ID NO: 2297770 - RNA, 19 nt, Homo sapiens
  misc_RNA (1)...(19): siRNA sense strand
cagggaaggaagauaaaca

SEQ ID NO: 2297771 - RNA, 19 nt, Homo sapiens
  misc_RNA (1)...(19): siRNA sense strand
gaaggaagauaaacagcca

SEQ ID NO: 2297772 - RNA, 19 nt, Homo sapiens
  misc_RNA (1)...(19): siRNA sense strand
ccgcaaggcagcuacggaa

SEQ ID NO: 2297773 - RNA, 19 nt, Homo sapiens
  misc_RNA (1)...(19): siRNA sense strand
cuaucaaugugcuggagau

SEQ ID NO: 2297774 - RNA, 19 nt, Homo sapiens
  misc_RNA (1)...(19): siRNA sense strand
aagaacaagcgcaugacaa

SEQ ID NO: 2297775 - RNA, 19 nt, Homo sapiens
  misc_RNA (1)...(19): siRNA sense strand
ggacuguagaagaaagcga

SEQ ID NO: 2297776 - RNA, 19 nt, Homo sapiens
  misc_RNA (1)...(19): siRNA sense strand
cggaauuuacacugacaga

SEQ ID NO: 2297777 - RNA, 19 nt, Homo sapiens
  misc_RNA (1)...(19): siRNA sense strand
ccagaaaagaugaaaacga

SEQ ID NO: 2297778 - RNA, 19 nt, Homo sapiens
  misc_RNA (1)...(19): siRNA sense strand
agacuuggguggaagagga

SEQ ID NO: 2297779 - RNA, 19 nt, Homo sapiens
  misc_RNA (1)...(19): siRNA sense strand
ggagaugauuaaaacggaa

SEQ ID NO: 2297780 - RNA, 19 nt, Homo sapiens
  misc_RNA (1)...(19): siRNA sense strand
uggaugacgccgagcccua

SEQ ID NO: 2297781 - RNA, 19 nt, Homo sapiens
  misc_RNA (1)...(19): siRNA sense strand
gcggauugaagaaggggaa

SEQ ID NO: 2297782 - RNA, 19 nt, Homo sapiens
  misc_RNA (1)...(19): siRNA sense strand
gagaaaagaacuuggccca

SEQ ID NO: 2297783 - RNA, 19 nt, Homo sapiens
  misc_RNA (1)...(19): siRNA sense strand
ggcaaguggaacagcucua

SEQ ID NO: 2297784 - RNA, 19 nt, Homo sapiens
  misc_RNA (1)...(19): siRNA sense strand
ggguggaagaggaugaacu

SEQ ID NO: 2297785 - RNA, 19 nt, Homo sapiens
  misc_RNA (1)...(19): siRNA sense strand
ccagagaacccgcaaggca

SEQ ID NO: 2297786 - RNA, 19 nt, Homo sapiens
  misc_RNA (1)...(19): siRNA sense strand
uggaaugaugacucugaaa

SEQ ID NO: 2297787 - RNA, 19 nt, Homo sapiens
  misc_RNA (1)...(19): siRNA sense strand
agauaaacagccagcacca

SEQ ID NO: 2297788 - RNA, 19 nt, Homo sapiens
  misc_RNA (1)...(19): siRNA sense strand
aaacaagagacccagaaaa

SEQ ID NO: 2297789 - RNA, 19 nt, Homo sapiens
  misc_RNA (1)...(19): siRNA sense strand
aggcagcaccagaugaaga

SEQ ID NO: 2297790 - RNA, 19 nt, Homo sapiens
  misc_RNA (1)...(19): siRNA sense strand
gauuggucuuggaggagga

SEQ ID NO: 2297791 - RNA, 19 nt, Homo sapiens
  misc_RNA (1)...(19): siRNA sense strand
gguggaaacuguuggcuuc

SEQ ID NO: 2297792 - RNA, 19 nt, Homo sapiens
  misc_RNA (1)...(19): siRNA sense strand
gagcagagcaaucaggcca

SEQ ID NO: 2297793 - RNA, 19 nt, Homo sapiens
  misc_RNA (1)...(19): siRNA sense strand
aggucagcgagcagagcaa

SEQ ID NO: 2297794 - RNA, 19 nt, Homo sapiens
  misc_RNA (1)...(19): siRNA sense strand
cgguggaaacuguuggcuu

SEQ ID NO: 2297795 - RNA, 19 nt, Homo sapiens
  misc_RNA (1)...(19): siRNA sense strand
cugcagaaguccacggaga

SEQ ID NO: 2297796 - RNA, 19 nt, Homo sapiens
  misc_RNA (1)...(19): siRNA sense strand
uugggagaacuuagagaaa

SEQ ID NO: 2297797 - RNA, 19 nt, Homo sapiens
  misc_RNA (1)...(19): siRNA sense strand
cgagaggcgaagcggagaa

SEQ ID NO: 2297798 - RNA, 19 nt, Homo sapiens
  misc_RNA (1)...(19): siRNA sense strand
gggagaacuuagagaaaag

SEQ ID NO: 2297799 - RNA, 19 nt, Homo sapiens
  misc_RNA (1)...(19): siRNA sense strand
aguuaaagcggaaacccaa

SEQ ID NO: 2297800 - RNA, 19 nt, Homo sapiens
  misc_RNA (1)...(19): siRNA sense strand
cggaaacccaagagcgcca

SEQ ID NO: 2297801 - RNA, 19 nt, Homo sapiens
  misc_RNA (1)...(19): siRNA sense strand
caguuaaagcggaaaccca

SEQ ID NO: 2297802 - RNA, 19 nt, Homo sapiens
  misc_RNA (1)...(19): siRNA sense strand
cgucggcagugaagcucaa

SEQ ID NO: 2297803 - RNA, 19 nt, Homo sapiens
  misc_RNA (1)...(19): siRNA sense strand
acacggaggaccugcccaa

SEQ ID NO: 2297804 - RNA, 19 nt, Homo sapiens
  misc_RNA (1)...(19): siRNA sense strand
caguguuugagaugaacua

SEQ ID NO: 2297805 - RNA, 19 nt, Homo sapiens
  misc_RNA (1)...(19): siRNA sense strand
aaggaaacaacuagcaaaa

SEQ ID NO: 2297806 - RNA, 19 nt, Homo sapiens
  misc_RNA (1)...(19): siRNA sense strand
cauaagaaaaccaggccaa

SEQ ID NO: 2297807 - RNA, 19 nt, Homo sapiens
  misc_RNA (1)...(19): siRNA sense strand
acagucaaagaaagagaaa

SEQ ID NO: 2297808 - RNA, 19 nt, Homo sapiens
  misc_RNA (1)...(19): siRNA sense strand
auuacagacuuuaaggaga

SEQ ID NO: 2297809 - RNA, 19 nt, Homo sapiens
  misc_RNA (1)...(19): siRNA sense strand
acacagucaaagaaagaga

SEQ ID NO: 2297810 - RNA, 19 nt, Homo sapiens
  misc_RNA (1)...(19): siRNA sense strand
gaugaggguuacugggacu

SEQ ID NO: 2297811 - RNA, 19 nt, Homo sapiens
  misc_RNA (1)...(19): siRNA sense strand
cugcagaucaacacaguca

SEQ ID NO: 2297812 - RNA, 19 nt, Homo sapiens
  misc_RNA (1)...(19): siRNA sense strand
gauuaaauuuggaaggcua

SEQ ID NO: 2297813 - RNA, 19 nt, Homo sapiens
  misc_RNA (1)...(19): siRNA sense strand
agaaauaacaguaggaucu

SEQ ID NO: 2297814 - RNA, 19 nt, Homo sapiens
  misc_RNA (1)...(19): siRNA sense strand
gaauuaaagcagaaggcau

SEQ ID NO: 2297815 - RNA, 19 nt, Homo sapiens
  misc_RNA (1)...(19): siRNA sense strand
agagauggcaauauagaaa

SEQ ID NO: 2297816 - RNA, 19 nt, Homo sapiens
  misc_RNA (1)...(19): siRNA sense strand
aauuaaagcagaaggcauu

SEQ ID NO: 2297817 - RNA, 19 nt, Homo sapiens
  misc_RNA (1)...(19): siRNA sense strand
auggaaagguugugaaugu

SEQ ID NO: 2297818 - RNA, 19 nt, Homo sapiens
  misc_RNA (1)...(19): siRNA sense strand
gguggaucauagaggagua

SEQ ID NO: 2297819 - RNA, 19 nt, Homo sapiens
  misc_RNA (1)...(19): siRNA sense strand
cacacaaacucguggcaau

SEQ ID NO: 2297820 - RNA, 19 nt, Homo sapiens
  misc_RNA (1)...(19): siRNA sense strand
ccuaucugcucgauggaaa

SEQ ID NO: 2297821 - RNA, 19 nt, Homo sapiens
  misc_RNA (1)...(19): siRNA sense strand
caguuaggcaagaaauaua

SEQ ID NO: 2297822 - RNA, 19 nt, Homo sapiens
  misc_RNA (1)...(19): siRNA sense strand
ucauagaggaguacgggua

SEQ ID NO: 2297823 - RNA, 19 nt, Homo sapiens
  misc_RNA (1)...(19): siRNA sense strand
gaguacggguaguggcauu

SEQ ID NO: 2297824 - RNA, 19 nt, Homo sapiens
  misc_RNA (1)...(19): siRNA sense strand
acaaacauccggagcgcua

SEQ ID NO: 2297825 - RNA, 19 nt, Homo sapiens
  misc_RNA (1)...(19): siRNA sense strand
ccuuuagaccugaggccaa

SEQ ID NO: 2297826 - RNA, 19 nt, Homo sapiens
  misc_RNA (1)...(19): siRNA sense strand
cugcagaguaugacaaaca

SEQ ID NO: 2297827 - RNA, 19 nt, Homo sapiens
  misc_RNA (1)...(19): siRNA sense strand
guguacaacaauagagcau

SEQ ID NO: 2297828 - RNA, 19 nt, Homo sapiens
  misc_RNA (1)...(19): siRNA sense strand
gcauauuauucaugacagu

SEQ ID NO: 2297829 - RNA, 19 nt, Homo sapiens
  misc_RNA (1)...(19): siRNA sense strand
acacaaacucguggcaaua

SEQ ID NO: 2297830 - RNA, 19 nt, Homo sapiens
  misc_RNA (1)...(19): siRNA sense strand
aggagggucuauagaguuu

SEQ ID NO: 2297831 - RNA, 19 nt, Homo sapiens
  misc_RNA (1)...(19): siRNA sense strand
uggaaaagaguguggaaga

SEQ ID NO: 2297832 - RNA, 19 nt, Homo sapiens
  misc_RNA (1)...(19): siRNA sense strand
ggguaguggcauuuggaca

SEQ ID NO: 2297833 - RNA, 19 nt, Homo sapiens
  misc_RNA (1)...(19): siRNA sense strand
cgauggaaagguugugaau

SEQ ID NO: 2297834 - RNA, 19 nt, Homo sapiens
  misc_RNA (1)...(19): siRNA sense strand
guugcuugauggugaaauu

SEQ ID NO: 2297835 - RNA, 19 nt, Homo sapiens
  misc_RNA (1)...(19): siRNA sense strand
gcacuaaaagaauuggaaa

SEQ ID NO: 2297836 - RNA, 19 nt, Homo sapiens
  misc_RNA (1)...(19): siRNA sense strand
uagauaaagccaaggaagu

SEQ ID NO: 2297837 - RNA, 19 nt, Homo sapiens
  misc_RNA (1)...(19): siRNA sense strand
acacugagauauaagggau

SEQ ID NO: 2297838 - RNA, 19 nt, Homo sapiens
  misc_RNA (1)...(19): siRNA sense strand
cuacagaaugcuuuggaga

SEQ ID NO: 2297839 - RNA, 19 nt, Homo sapiens
  misc_RNA (1)...(19): siRNA sense strand
aaauugaacaguuaggcaa

SEQ ID NO: 2297840 - RNA, 19 nt, Homo sapiens
  misc_RNA (1)...(19): siRNA sense strand
gguguuaagucgucaucau

SEQ ID NO: 2297841 - RNA, 19 nt, Homo sapiens
  misc_RNA (1)...(19): siRNA sense strand
gugauuacauccaacggua

SEQ ID NO: 2297842 - RNA, 19 nt, Homo sapiens
  misc_RNA (1)...(19): siRNA sense strand
cacugagauauaagggaua

SEQ ID NO: 2297843 - RNA, 19 nt, Homo sapiens
  misc_RNA (1)...(19): siRNA sense strand
caucaaaggcaucaccaau

SEQ ID NO: 2297844 - RNA, 19 nt, Homo sapiens
  misc_RNA (1)...(19): siRNA sense strand
acagaaugcuuuggagaca

SEQ ID NO: 2297845 - RNA, 19 nt, Homo sapiens
  misc_RNA (1)...(19): siRNA sense strand
cuacaucacaccagcacua

SEQ ID NO: 2297846 - RNA, 19 nt, Homo sapiens
  misc_RNA (1)...(19): siRNA sense strand
aaauguugcuugaugguga

SEQ ID NO: 2297847 - RNA, 19 nt, Homo sapiens
  misc_RNA (1)...(19): siRNA sense strand
ucaaugggcaccaggagaa

SEQ ID NO: 2297848 - RNA, 19 nt, Homo sapiens
  misc_RNA (1)...(19): siRNA sense strand
uagcauggacauuuguaaa

SEQ ID NO: 2297849 - RNA, 19 nt, Homo sapiens
  misc_RNA (1)...(19): siRNA sense strand
gcaucaccaaucugggaua

SEQ ID NO: 2297850 - RNA, 19 nt, Homo sapiens
  misc_RNA (1)...(19): siRNA sense strand
ccaauugaagcuacagaau

SEQ ID NO: 2297851 - RNA, 19 nt, Homo sapiens
  misc_RNA (1)...(19): siRNA sense strand
ggaaaagaguguggaagau

SEQ ID NO: 2297852 - RNA, 19 nt, Homo sapiens
  misc_RNA (1)...(19): siRNA sense strand
cuggacauuuagaacauaa

SEQ ID NO: 2297853 - RNA, 19 nt, Homo sapiens
  misc_RNA (1)...(19): siRNA sense strand
caguaggaucugacaugaa

SEQ ID NO: 2297854 - RNA, 19 nt, Homo sapiens
  misc_RNA (1)...(19): siRNA sense strand
guaaacaagaagagaagcu

SEQ ID NO: 2297855 - RNA, 19 nt, Homo sapiens
  misc_RNA (1)...(19): siRNA sense strand
augauaaggacuaugucaa

SEQ ID NO: 2297856 - RNA, 19 nt, Homo sapiens
  misc_RNA (1)...(19): siRNA sense strand
gggcugguguggcaggaau

SEQ ID NO: 2297857 - RNA, 19 nt, Homo sapiens
  misc_RNA (1)...(19): siRNA sense strand
cccuauacaacuugcuuaa

SEQ ID NO: 2297858 - RNA, 19 nt, Homo sapiens
  misc_RNA (1)...(19): siRNA sense strand
ccauucaugauaaggacua

SEQ ID NO: 2297859 - RNA, 19 nt, Homo sapiens
  misc_RNA (1)...(19): siRNA sense strand
augagaaaaugguggauca

SEQ ID NO: 2297860 - RNA, 19 nt, Homo sapiens
  misc_RNA (1)...(19): siRNA sense strand
aaacuggagaccucagaaa

SEQ ID NO: 2297861 - RNA, 19 nt, Homo sapiens
  misc_RNA (1)...(19): siRNA sense strand
ugaugcuggcuaugaaaua

SEQ ID NO: 2297862 - RNA, 19 nt, Homo sapiens
  misc_RNA (1)...(19): siRNA sense strand
augacugaguguacaacaa

SEQ ID NO: 2297863 - RNA, 19 nt, Homo sapiens
  misc_RNA (1)...(19): siRNA sense strand
gaugugaacgccugggaga

SEQ ID NO: 2297864 - RNA, 19 nt, Homo sapiens
  misc_RNA (1)...(19): siRNA sense strand
auaugauugugaugagaga

SEQ ID NO: 2297865 - RNA, 19 nt, Homo sapiens
  misc_RNA (1)...(19): siRNA sense strand
acccuuauguugaagaaau

SEQ ID NO: 2297866 - RNA, 19 nt, Homo sapiens
  misc_RNA (1)...(19): siRNA sense strand
gcuuuggagacaugcuuua

SEQ ID NO: 2297867 - RNA, 19 nt, Homo sapiens
  misc_RNA (1)...(19): siRNA sense strand
ccgccaagaugcucagagu

SEQ ID NO: 2297868 - RNA, 19 nt, Homo sapiens
  misc_RNA (1)...(19): siRNA sense strand
gggcuuguuggaugagauu

SEQ ID NO: 2297869 - RNA, 19 nt, Homo sapiens
  misc_RNA (1)...(19): siRNA sense strand
aacaguuaggcaagaaaua

SEQ ID NO: 2297870 - RNA, 19 nt, Homo sapiens
  misc_RNA (1)...(19): siRNA sense strand
ucuuaagaaacuaggagga

SEQ ID NO: 2297871 - RNA, 19 nt, Homo sapiens
  misc_RNA (1)...(19): siRNA sense strand
uuaagaaacuaggaggaga

SEQ ID NO: 2297872 - RNA, 19 nt, Homo sapiens
  misc_RNA (1)...(19): siRNA sense strand
gccaagaugcucagagucu

SEQ ID NO: 2297873 - RNA, 19 nt, Homo sapiens
  misc_RNA (1)...(19): siRNA sense strand
ugggcuucuugguggcaaa

SEQ ID NO: 2297874 - RNA, 19 nt, Homo sapiens
  misc_RNA (1)...(19): siRNA sense strand
gcauucuucaggaggauau

SEQ ID NO: 2297875 - RNA, 19 nt, Homo sapiens
  misc_RNA (1)...(19): siRNA sense strand
ucaucaucuugucaggaaa

SEQ ID NO: 2297876 - RNA, 19 nt, Homo sapiens
  misc_RNA (1)...(19): siRNA sense strand
ugaacaguuaggcaagaaa

SEQ ID NO: 2297877 - RNA, 19 nt, Homo sapiens
  misc_RNA (1)...(19): siRNA sense strand
gcaucacaaacaaaguuaa

SEQ ID NO: 2297878 - RNA, 19 nt, Homo sapiens
  misc_RNA (1)...(19): siRNA sense strand
ccgugaugcuggcuaugaa

SEQ ID NO: 2297879 - RNA, 19 nt, Homo sapiens
  misc_RNA (1)...(19): siRNA sense strand
agucagagaugcagcguca

SEQ ID NO: 2297880 - RNA, 19 nt, Homo sapiens
  misc_RNA (1)...(19): siRNA sense strand
gugagaagucagagaugca

SEQ ID NO: 2297881 - RNA, 19 nt, Homo sapiens
  misc_RNA (1)...(19): siRNA sense strand
ucuccaaggaagacaagaa

SEQ ID NO: 2297882 - RNA, 19 nt, Homo sapiens
  misc_RNA (1)...(19): siRNA sense strand
gcucaguaccacagccuca

SEQ ID NO: 2297883 - RNA, 19 nt, Homo sapiens
  misc_RNA (1)...(19): siRNA sense strand
acaaacaggcugagaucgu

SEQ ID NO: 2297884 - RNA, 19 nt, Homo sapiens
  misc_RNA (1)...(19): siRNA sense strand
ucaaaaggcugaacgggau

SEQ ID NO: 2297885 - RNA, 19 nt, Homo sapiens
  misc_RNA (1)...(19): siRNA sense strand
agaacgggcacgaugguga

SEQ ID NO: 2297886 - RNA, 19 nt, Homo sapiens
  misc_RNA (1)...(19): siRNA sense strand
agucagagaugcagcguca

SEQ ID NO: 2297887 - RNA, 19 nt, Homo sapiens
  misc_RNA (1)...(19): siRNA sense strand
gugagaagucagagaugca

SEQ ID NO: 2297888 - RNA, 19 nt, Homo sapiens
  misc_RNA (1)...(19): siRNA sense strand
ucuccaaggaagacaagaa

SEQ ID NO: 2297889 - RNA, 19 nt, Homo sapiens
  misc_RNA (1)...(19): siRNA sense strand
gcucaguaccacagccuca

SEQ ID NO: 2297890 - RNA, 19 nt, Homo sapiens
  misc_RNA (1)...(19): siRNA sense strand
acaaacaggcugagaucgu

SEQ ID NO: 2297891 - RNA, 19 nt, Homo sapiens
  misc_RNA (1)...(19): siRNA sense strand
ucaaaaggcugaacgggau

SEQ ID NO: 2297892 - RNA, 19 nt, Homo sapiens
  misc_RNA (1)...(19): siRNA sense strand
agaacgggcacgaugguga

SEQ ID NO: 2297893 - RNA, 19 nt, Homo sapiens
  misc_RNA (1)...(19): siRNA sense strand
agucagagaugcagcguca

SEQ ID NO: 2297894 - RNA, 19 nt, Homo sapiens
  misc_RNA (1)...(19): siRNA sense strand
gugagaagucagagaugca

SEQ ID NO: 2297895 - RNA, 19 nt, Homo sapiens
  misc_RNA (1)...(19): siRNA sense strand
ucuccaaggaagacaagaa

SEQ ID NO: 2297896 - RNA, 19 nt, Homo sapiens
  misc_RNA (1)...(19): siRNA sense strand
gcucaguaccacagccuca

SEQ ID NO: 2297897 - RNA, 19 nt, Homo sapiens
  misc_RNA (1)...(19): siRNA sense strand
acaaacaggcugagaucgu

SEQ ID NO: 2297898 - RNA, 19 nt, Homo sapiens
  misc_RNA (1)...(19): siRNA sense strand
ucaaaaggcugaacgggau

SEQ ID NO: 2297899 - RNA, 19 nt, Homo sapiens
  misc_RNA (1)...(19): siRNA sense strand
agaacgggcacgaugguga

SEQ ID NO: 2297900 - RNA, 19 nt, Homo sapiens
  misc_RNA (1)...(19): siRNA sense strand
ccuauggacucaaaggcua

SEQ ID NO: 2297901 - RNA, 19 nt, Homo sapiens
  misc_RNA (1)...(19): siRNA sense strand
gagaaacugcguuggguga

SEQ ID NO: 2297902 - RNA, 19 nt, Homo sapiens
  misc_RNA (1)...(19): siRNA sense strand
cguagacagaucugagcua

SEQ ID NO: 2297903 - RNA, 19 nt, Homo sapiens
  misc_RNA (1)...(19): siRNA sense strand
ccgaaguuuacuggagaaa

SEQ ID NO: 2297904 - RNA, 19 nt, Homo sapiens
  misc_RNA (1)...(19): siRNA sense strand
cccgaaguuuacuggagaa

SEQ ID NO: 2297905 - RNA, 19 nt, Homo sapiens
  misc_RNA (1)...(19): siRNA sense strand
guaagaaauacucagcaga

SEQ ID NO: 2297906 - RNA, 19 nt, Homo sapiens
  misc_RNA (1)...(19): siRNA sense strand
aguccagucaauagggaua

SEQ ID NO: 2297907 - RNA, 19 nt, Homo sapiens
  misc_RNA (1)...(19): siRNA sense strand
ccagaacaggacagagaau

SEQ ID NO: 2297908 - RNA, 19 nt, Homo sapiens
  misc_RNA (1)...(19): siRNA sense strand
ggguauuacagcugaaaau

SEQ ID NO: 2297909 - RNA, 19 nt, Homo sapiens
  misc_RNA (1)...(19): siRNA sense strand
cugaaaauguagccacaaa

SEQ ID NO: 2297910 - RNA, 19 nt, Homo sapiens
  misc_RNA (1)...(19): siRNA sense strand
cauuaugggaauaggacca

SEQ ID NO: 2297911 - RNA, 19 nt, Homo sapiens
  misc_RNA (1)...(19): siRNA sense strand
gcauggaaaauaugagcaa

SEQ ID NO: 2297912 - RNA, 19 nt, Homo sapiens
  misc_RNA (1)...(19): siRNA sense strand
aguaaagauaggugagaug

SEQ ID NO: 2297913 - RNA, 19 nt, Homo sapiens
  misc_RNA (1)...(19): siRNA sense strand
aggaccaauuccagccaua

SEQ ID NO: 2297914 - RNA, 19 nt, Homo sapiens
  misc_RNA (1)...(19): siRNA sense strand
ggagcaacauagaagccau

SEQ ID NO: 2297915 - RNA, 19 nt, Homo sapiens
  misc_RNA (1)...(19): siRNA sense strand
agucaauagggauaggaga

SEQ ID NO: 2297916 - RNA, 19 nt, Homo sapiens
  misc_RNA (1)...(19): siRNA sense strand
aggaauaaaugauggugcu

SEQ ID NO: 2297917 - RNA, 19 nt, Homo sapiens
  misc_RNA (1)...(19): siRNA sense strand
aagccauguccaagcuaaa

SEQ ID NO: 2297918 - RNA, 19 nt, Homo sapiens
  misc_RNA (1)...(19): siRNA sense strand
aauaaaugauggugcugca

SEQ ID NO: 2297919 - RNA, 19 nt, Homo sapiens
  misc_RNA (1)...(19): siRNA sense strand
cagccaaugcuucaggaau

SEQ ID NO: 2297920 - RNA, 19 nt, Homo sapiens
  misc_RNA (1)...(19): siRNA sense strand
uggauuaaacccagagaag

SEQ ID NO: 2297921 - RNA, 19 nt, Homo sapiens
  misc_RNA (1)...(19): siRNA sense strand
uggcaagugaguagagaag

SEQ ID NO: 2297922 - RNA, 19 nt, Homo sapiens
  misc_RNA (1)...(19): siRNA sense strand
gaucugugggucaggccua

SEQ ID NO: 2297923 - RNA, 19 nt, Homo sapiens
  misc_RNA (1)...(19): siRNA sense strand
ccgggaagcaagaggcaaa

SEQ ID NO: 2297924 - RNA, 19 nt, Homo sapiens
  misc_RNA (1)...(19): siRNA sense strand
agcaagaggcaaagagaau

SEQ ID NO: 2297925 - RNA, 19 nt, Homo sapiens
  misc_RNA (1)...(19): siRNA sense strand
aggaggaggaggaggauga

SEQ ID NO: 2297926 - RNA, 19 nt, Homo sapiens
  misc_RNA (1)...(19): siRNA sense strand
aggaggaugaggaggauga

SEQ ID NO: 2297927 - RNA, 19 nt, Homo sapiens
  misc_RNA (1)...(19): siRNA sense strand
aagcuuaagaagaaggaca

SEQ ID NO: 2297928 - RNA, 19 nt, Homo sapiens
  misc_RNA (1)...(19): siRNA sense strand
aggaggaggaugaggagga

SEQ ID NO: 2297929 - RNA, 19 nt, Homo sapiens
  misc_RNA (1)...(19): siRNA sense strand
aggaggaggaggaggagga

SEQ ID NO: 2297930 - RNA, 19 nt, Homo sapiens
  misc_RNA (1)...(19): siRNA sense strand
aggaggaggaggaggagga

SEQ ID NO: 2297931 - RNA, 19 nt, Homo sapiens
  misc_RNA (1)...(19): siRNA sense strand
aagcaagaggcaaagagaa

SEQ ID NO: 2297932 - RNA, 19 nt, Homo sapiens
  misc_RNA (1)...(19): siRNA sense strand
auaaaugaacugaugccua

SEQ ID NO: 2297933 - RNA, 19 nt, Homo sapiens
  misc_RNA (1)...(19): siRNA sense strand
aagaagaaggacagccaga

SEQ ID NO: 2297934 - RNA, 19 nt, Homo sapiens
  misc_RNA (1)...(19): siRNA sense strand
cagccagauaugugagcuu

SEQ ID NO: 2297935 - RNA, 19 nt, Homo sapiens
  misc_RNA (1)...(19): siRNA sense strand
acuacauccggaagauaaa

SEQ ID NO: 2297936 - RNA, 19 nt, Homo sapiens
  misc_RNA (1)...(19): siRNA sense strand
uaucaaagccucuggccca

SEQ ID NO: 2297937 - RNA, 19 nt, Homo sapiens
  misc_RNA (1)...(19): siRNA sense strand
gccagauaugugagcuuaa

SEQ ID NO: 2297938 - RNA, 19 nt, Homo sapiens
  misc_RNA (1)...(19): siRNA sense strand
augaggaggaugaggagga

SEQ ID NO: 2297939 - RNA, 19 nt, Homo sapiens
  misc_RNA (1)...(19): siRNA sense strand
aggaggaugaggaggaugu

SEQ ID NO: 2297940 - RNA, 19 nt, Homo sapiens
  misc_RNA (1)...(19): siRNA sense strand
augaggaggaugugggcca

SEQ ID NO: 2297941 - RNA, 19 nt, Homo sapiens
  misc_RNA (1)...(19): siRNA sense strand
agaaauggugcuugggaaa

SEQ ID NO: 2297942 - RNA, 19 nt, Homo sapiens
  misc_RNA (1)...(19): siRNA sense strand
gagaaauggugcuugggaa

SEQ ID NO: 2297943 - RNA, 19 nt, Homo sapiens
  misc_RNA (1)...(19): siRNA sense strand
acauaaggcuugauggaca

SEQ ID NO: 2297944 - RNA, 19 nt, Homo sapiens
  misc_RNA (1)...(19): siRNA sense strand
gguuaagaaacaagucaaa

SEQ ID NO: 2297945 - RNA, 19 nt, Homo sapiens
  misc_RNA (1)...(19): siRNA sense strand
cugauaaugcagugaacaa

SEQ ID NO: 2297946 - RNA, 19 nt, Homo sapiens
  misc_RNA (1)...(19): siRNA sense strand
ugaagaagaacaugggaau

SEQ ID NO: 2297947 - RNA, 19 nt, Homo sapiens
  misc_RNA (1)...(19): siRNA sense strand
gaacaagaaacaaacgcaa

SEQ ID NO: 2297948 - RNA, 19 nt, Homo sapiens
  misc_RNA (1)...(19): siRNA sense strand
cagcagugccagagcgaga

SEQ ID NO: 2297949 - RNA, 19 nt, Homo sapiens
  misc_RNA (1)...(19): siRNA sense strand
ugaaauuuacccaggcaua

SEQ ID NO: 2297950 - RNA, 19 nt, Homo sapiens
  misc_RNA (1)...(19): siRNA sense strand
gagcaaaugaugucagcau

SEQ ID NO: 2297951 - RNA, 19 nt, Homo sapiens
  misc_RNA (1)...(19): siRNA sense strand
cgagaaggugacaagauua

SEQ ID NO: 2297952 - RNA, 19 nt, Homo sapiens
  misc_RNA (1)...(19): siRNA sense strand
acaagaauauagugcucua

SEQ ID NO: 2297953 - RNA, 19 nt, Homo sapiens
  misc_RNA (1)...(19): siRNA sense strand
agaagaaccacgugaacuu

SEQ ID NO: 2297954 - RNA, 19 nt, Homo sapiens
  misc_RNA (1)...(19): siRNA sense strand
agauagugaaagugaccaa

SEQ ID NO: 2297955 - RNA, 19 nt, Homo sapiens
  misc_RNA (1)...(19): siRNA sense strand
ucccugaaccugaggauua

SEQ ID NO: 2297956 - RNA, 19 nt, Homo sapiens
  misc_RNA (1)...(19): siRNA sense strand
uucaggagcuggaggcaaa

SEQ ID NO: 2297957 - RNA, 19 nt, Homo sapiens
  misc_RNA (1)...(19): siRNA sense strand
guucagaagagcugcuaau

SEQ ID NO: 2297958 - RNA, 19 nt, Homo sapiens
  misc_RNA (1)...(19): siRNA sense strand
gagaaggugacaagauuau

SEQ ID NO: 2297959 - RNA, 19 nt, Homo sapiens
  misc_RNA (1)...(19): siRNA sense strand
cugacaaaauucugcaaua

SEQ ID NO: 2297960 - RNA, 19 nt, Homo sapiens
  misc_RNA (1)...(19): siRNA sense strand
ggaaauuguccacugggaa

SEQ ID NO: 2297961 - RNA, 19 nt, Homo sapiens
  misc_RNA (1)...(19): siRNA sense strand
gugugaaaguccaaacaga

SEQ ID NO: 2297962 - RNA, 19 nt, Homo sapiens
  misc_RNA (1)...(19): siRNA sense strand
acuuagauggugaaacaaa

SEQ ID NO: 2297963 - RNA, 19 nt, Homo sapiens
  misc_RNA (1)...(19): siRNA sense strand
agaaauacacaguggguuc

SEQ ID NO: 2297964 - RNA, 19 nt, Homo sapiens
  misc_RNA (1)...(19): siRNA sense strand
ggcagaauugagugugaaa

SEQ ID NO: 2297965 - RNA, 19 nt, Homo sapiens
  misc_RNA (1)...(19): siRNA sense strand
uugagaugguuaagaaaca

SEQ ID NO: 2297966 - RNA, 19 nt, Homo sapiens
  misc_RNA (1)...(19): siRNA sense strand
ggacaugacaccaagcuga

SEQ ID NO: 2297967 - RNA, 19 nt, Homo sapiens
  misc_RNA (1)...(19): siRNA sense strand
ucucaaauguggaacggau

SEQ ID NO: 2297968 - RNA, 19 nt, Homo sapiens
  misc_RNA (1)...(19): siRNA sense strand
gaaaagaaugucagugauu

SEQ ID NO: 2297969 - RNA, 19 nt, Homo sapiens
  misc_RNA (1)...(19): siRNA sense strand
gggaguugcuuauggccau

SEQ ID NO: 2297970 - RNA, 19 nt, Homo sapiens
  misc_RNA (1)...(19): siRNA sense strand
uaaugaaagcagacaucaa

SEQ ID NO: 2297971 - RNA, 19 nt, Homo sapiens
  misc_RNA (1)...(19): siRNA sense strand
agucaaagucguaacgcuu

SEQ ID NO: 2297972 - RNA, 19 nt, Homo sapiens
  misc_RNA (1)...(19): siRNA sense strand
cauaaggcuugauggacau

SEQ ID NO: 2297973 - RNA, 19 nt, Homo sapiens
  misc_RNA (1)...(19): siRNA sense strand
uggugaugcucuccggaaa

SEQ ID NO: 2297974 - RNA, 19 nt, Homo sapiens
  misc_RNA (1)...(19): siRNA sense strand
gcucugaauccuugcaaca

SEQ ID NO: 2297975 - RNA, 19 nt, Homo sapiens
  misc_RNA (1)...(19): siRNA sense strand
cagaauugagugugaaagu

SEQ ID NO: 2297976 - RNA, 19 nt, Homo sapiens
  misc_RNA (1)...(19): siRNA sense strand
gcucaaugucuuggaguuu

SEQ ID NO: 2297977 - RNA, 19 nt, Homo sapiens
  misc_RNA (1)...(19): siRNA sense strand
aaucggugauggagcaaau

SEQ ID NO: 2297978 - RNA, 19 nt, Homo sapiens
  misc_RNA (1)...(19): siRNA sense strand
acuaaaagcccuucaguau

SEQ ID NO: 2297979 - RNA, 19 nt, Homo sapiens
  misc_RNA (1)...(19): siRNA sense strand
gagacaucauauuggacau

SEQ ID NO: 2297980 - RNA, 19 nt, Homo sapiens
  misc_RNA (1)...(19): siRNA sense strand
guucagccacauagcgaua

SEQ ID NO: 2297981 - RNA, 19 nt, Homo sapiens
  misc_RNA (1)...(19): siRNA sense strand
gugaaaguccaaacagaca

SEQ ID NO: 2297982 - RNA, 19 nt, Homo sapiens
  misc_RNA (1)...(19): siRNA sense strand
gauucaucauugcuggaaa

SEQ ID NO: 2297983 - RNA, 19 nt, Homo sapiens
  misc_RNA (1)...(19): siRNA sense strand
gcaccuauaauaugugaau

SEQ ID NO: 2297984 - RNA, 19 nt, Homo sapiens
  misc_RNA (1)...(19): siRNA sense strand
uugaagaagaacaugggaa

SEQ ID NO: 2297985 - RNA, 19 nt, Homo sapiens
  misc_RNA (1)...(19): siRNA sense strand
aaacauaaggcuugaugga

SEQ ID NO: 2297986 - RNA, 19 nt, Homo sapiens
  misc_RNA (1)...(19): siRNA sense strand
ucgaaggcauucuggaaaa

SEQ ID NO: 2297987 - RNA, 19 nt, Homo sapiens
  misc_RNA (1)...(19): siRNA sense strand
aagaagaacaugggaauga

SEQ ID NO: 2297988 - RNA, 19 nt, Homo sapiens
  misc_RNA (1)...(19): siRNA sense strand
uguuauaaaugaaggcucu

SEQ ID NO: 2297989 - RNA, 19 nt, Homo sapiens
  misc_RNA (1)...(19): siRNA sense strand
uuugagagaucaugcagaa

SEQ ID NO: 2297990 - RNA, 19 nt, Homo sapiens
  misc_RNA (1)...(19): siRNA sense strand
caggaggaaguaaggacua

SEQ ID NO: 2297991 - RNA, 19 nt, Homo sapiens
  misc_RNA (1)...(19): siRNA sense strand
auuaucugcuacugggaaa

SEQ ID NO: 2297992 - RNA, 19 nt, Homo sapiens
  misc_RNA (1)...(19): siRNA sense strand
ucaaauguggaacggauua

SEQ ID NO: 2297993 - RNA, 19 nt, Homo sapiens
  misc_RNA (1)...(19): siRNA sense strand
aggaaaagaaugucaguga

SEQ ID NO: 2297994 - RNA, 19 nt, Homo sapiens
  misc_RNA (1)...(19): siRNA sense strand
cugcaaaggagcugacacu

SEQ ID NO: 2297995 - RNA, 19 nt, Homo sapiens
  misc_RNA (1)...(19): siRNA sense strand
gcgccgaagguuaugagaa

SEQ ID NO: 2297996 - RNA, 19 nt, Homo sapiens
  misc_RNA (1)...(19): siRNA sense strand
ugaagugauaagagcauau

SEQ ID NO: 2297997 - RNA, 19 nt, Homo sapiens
  misc_RNA (1)...(19): siRNA sense strand
cagcaacaucagauaucaa

SEQ ID NO: 2297998 - RNA, 19 nt, Homo sapiens
  misc_RNA (1)...(19): siRNA sense strand
ggugaaacaaacuugaaaa

SEQ ID NO: 2297999 - RNA, 19 nt, Homo sapiens
  misc_RNA (1)...(19): siRNA sense strand
gugccugaaaccauagaaa

SEQ ID NO: 2298000 - RNA, 19 nt, Homo sapiens
  misc_RNA (1)...(19): siRNA sense strand
cucuauaacgugauguuua

SEQ ID NO: 2298001 - RNA, 19 nt, Homo sapiens
  misc_RNA (1)...(19): siRNA sense strand
gaaagugaccaauggggaa

SEQ ID NO: 2298002 - RNA, 19 nt, Homo sapiens
  misc_RNA (1)...(19): siRNA sense strand
cuucauaaauugggaucuu

SEQ ID NO: 2298003 - RNA, 19 nt, Homo sapiens
  misc_RNA (1)...(19): siRNA sense strand
uggccagguuaaauacaua

SEQ ID NO: 2298004 - RNA, 19 nt, Homo sapiens
  misc_RNA (1)...(19): siRNA sense strand
guuuaccagugcuaggaaa

SEQ ID NO: 2298005 - RNA, 19 nt, Homo sapiens
  misc_RNA (1)...(19): siRNA sense strand
ucugaauauccgugggaca

SEQ ID NO: 2298006 - RNA, 19 nt, Homo sapiens
  misc_RNA (1)...(19): siRNA sense strand
acauuaaacuggaagacgu

SEQ ID NO: 2298007 - RNA, 19 nt, Homo sapiens
  misc_RNA (1)...(19): siRNA sense strand
ccuuaagcucccagauaca

SEQ ID NO: 2298008 - RNA, 19 nt, Homo sapiens
  misc_RNA (1)...(19): siRNA sense strand
uuuacaagaaagacgggaa

SEQ ID NO: 2298009 - RNA, 19 nt, Homo sapiens
  misc_RNA (1)...(19): siRNA sense strand
acaagaaagacgggaacuu

SEQ ID NO: 2298010 - RNA, 19 nt, Homo sapiens
  misc_RNA (1)...(19): siRNA sense strand
caccagcagugcagcggaa

SEQ ID NO: 2298011 - RNA, 19 nt, Homo sapiens
  misc_RNA (1)...(19): siRNA sense strand
agguggaccaggagagcca

SEQ ID NO: 2298012 - RNA, 19 nt, Homo sapiens
  misc_RNA (1)...(19): siRNA sense strand
ucugaauauccgugggaca

SEQ ID NO: 2298013 - RNA, 19 nt, Homo sapiens
  misc_RNA (1)...(19): siRNA sense strand
acauuaaacuggaagacgu

SEQ ID NO: 2298014 - RNA, 19 nt, Homo sapiens
  misc_RNA (1)...(19): siRNA sense strand
ccuuaagcucccagauaca

SEQ ID NO: 2298015 - RNA, 19 nt, Homo sapiens
  misc_RNA (1)...(19): siRNA sense strand
uuuacaagaaagacgggaa

SEQ ID NO: 2298016 - RNA, 19 nt, Homo sapiens
  misc_RNA (1)...(19): siRNA sense strand
acaagaaagacgggaacuu

SEQ ID NO: 2298017 - RNA, 19 nt, Homo sapiens
  misc_RNA (1)...(19): siRNA sense strand
caccagcagugcagcggaa

SEQ ID NO: 2298018 - RNA, 19 nt, Homo sapiens
  misc_RNA (1)...(19): siRNA sense strand
agguggaccaggagagcca

SEQ ID NO: 2298019 - RNA, 19 nt, Homo sapiens
  misc_RNA (1)...(19): siRNA sense strand
ucugaauauccgugggaca

SEQ ID NO: 2298020 - RNA, 19 nt, Homo sapiens
  misc_RNA (1)...(19): siRNA sense strand
acauuaaacuggaagacgu

SEQ ID NO: 2298021 - RNA, 19 nt, Homo sapiens
  misc_RNA (1)...(19): siRNA sense strand
ccuuaagcucccagauaca

SEQ ID NO: 2298022 - RNA, 19 nt, Homo sapiens
  misc_RNA (1)...(19): siRNA sense strand
uuuacaagaaagacgggaa

SEQ ID NO: 2298023 - RNA, 19 nt, Homo sapiens
  misc_RNA (1)...(19): siRNA sense strand
acaagaaagacgggaacuu

SEQ ID NO: 2298024 - RNA, 19 nt, Homo sapiens
  misc_RNA (1)...(19): siRNA sense strand
caccagcagugcagcggaa

SEQ ID NO: 2298025 - RNA, 19 nt, Homo sapiens
  misc_RNA (1)...(19): siRNA sense strand
agguggaccaggagagcca

SEQ ID NO: 2298026 - RNA, 19 nt, Homo sapiens
  misc_RNA (1)...(19): siRNA sense strand
ucugaauauccgugggaca

SEQ ID NO: 2298027 - RNA, 19 nt, Homo sapiens
  misc_RNA (1)...(19): siRNA sense strand
acauuaaacuggaagacgu

SEQ ID NO: 2298028 - RNA, 19 nt, Homo sapiens
  misc_RNA (1)...(19): siRNA sense strand
ccuuaagcucccagauaca

SEQ ID NO: 2298029 - RNA, 19 nt, Homo sapiens
  misc_RNA (1)...(19): siRNA sense strand
uuuacaagaaagacgggaa

SEQ ID NO: 2298030 - RNA, 19 nt, Homo sapiens
  misc_RNA (1)...(19): siRNA sense strand
acaagaaagacgggaacuu

SEQ ID NO: 2298031 - RNA, 19 nt, Homo sapiens
  misc_RNA (1)...(19): siRNA sense strand
caccagcagugcagcggaa

SEQ ID NO: 2298032 - RNA, 19 nt, Homo sapiens
  misc_RNA (1)...(19): siRNA sense strand
agguggaccaggagagcca

SEQ ID NO: 2298033 - RNA, 19 nt, Homo sapiens
  misc_RNA (1)...(19): siRNA sense strand
ucugaauauccgugggaca

SEQ ID NO: 2298034 - RNA, 19 nt, Homo sapiens
  misc_RNA (1)...(19): siRNA sense strand
acauuaaacuggaagacgu

SEQ ID NO: 2298035 - RNA, 19 nt, Homo sapiens
  misc_RNA (1)...(19): siRNA sense strand
ccuuaagcucccagauaca

SEQ ID NO: 2298036 - RNA, 19 nt, Homo sapiens
  misc_RNA (1)...(19): siRNA sense strand
uuuacaagaaagacgggaa

SEQ ID NO: 2298037 - RNA, 19 nt, Homo sapiens
  misc_RNA (1)...(19): siRNA sense strand
acaagaaagacgggaacuu

SEQ ID NO: 2298038 - RNA, 19 nt, Homo sapiens
  misc_RNA (1)...(19): siRNA sense strand
caccagcagugcagcggaa

SEQ ID NO: 2298039 - RNA, 19 nt, Homo sapiens
  misc_RNA (1)...(19): siRNA sense strand
agguggaccaggagagcca

SEQ ID NO: 2298040 - RNA, 19 nt, Homo sapiens
  misc_RNA (1)...(19): siRNA sense strand
caaaagugucagugagaau

SEQ ID NO: 2298041 - RNA, 19 nt, Homo sapiens
  misc_RNA (1)...(19): siRNA sense strand
guauccagaaggagaacaa

SEQ ID NO: 2298042 - RNA, 19 nt, Homo sapiens
  misc_RNA (1)...(19): siRNA sense strand
acgaggaaguuaugaccca

SEQ ID NO: 2298043 - RNA, 19 nt, Homo sapiens
  misc_RNA (1)...(19): siRNA sense strand
guucacaacuguauccaga

SEQ ID NO: 2298044 - RNA, 19 nt, Homo sapiens
  misc_RNA (1)...(19): siRNA sense strand
ccugcugccuagaagggaa

SEQ ID NO: 2298045 - RNA, 19 nt, Homo sapiens
  misc_RNA (1)...(19): siRNA sense strand
ugaccauagcugugggaac

SEQ ID NO: 2298046 - RNA, 19 nt, Homo sapiens
  misc_RNA (1)...(19): siRNA sense strand
gugagaaugaaaccagcaa

SEQ ID NO: 2298047 - RNA, 19 nt, Homo sapiens
  misc_RNA (1)...(19): siRNA sense strand
cagaaggagaacaaggacu

SEQ ID NO: 2298048 - RNA, 19 nt, Homo sapiens
  misc_RNA (1)...(19): siRNA sense strand
gcaacaagcuggugggcau

SEQ ID NO: 2298049 - RNA, 19 nt, Homo sapiens
  misc_RNA (1)...(19): siRNA sense strand
cugcagaaggugaaggcaa

SEQ ID NO: 2298050 - RNA, 19 nt, Homo sapiens
  misc_RNA (1)...(19): siRNA sense strand
cgcaaagaguacugggaca

SEQ ID NO: 2298051 - RNA, 19 nt, Homo sapiens
  misc_RNA (1)...(19): siRNA sense strand
cuuauaucauccaggagaa

SEQ ID NO: 2298052 - RNA, 19 nt, Homo sapiens
  misc_RNA (1)...(19): siRNA sense strand
cggaaggaggaucgggaga

SEQ ID NO: 2298053 - RNA, 19 nt, Homo sapiens
  misc_RNA (1)...(19): siRNA sense strand
aagacaggcaaguggaaga

SEQ ID NO: 2298054 - RNA, 19 nt, Homo sapiens
  misc_RNA (1)...(19): siRNA sense strand
gaugacaacuccuggacca

SEQ ID NO: 2298055 - RNA, 19 nt, Homo sapiens
  misc_RNA (1)...(19): siRNA sense strand
cugaacagacagaggaaac

SEQ ID NO: 2298056 - RNA, 19 nt, Homo sapiens
  misc_RNA (1)...(19): siRNA sense strand
gggacauggcccugagugu

SEQ ID NO: 2298057 - RNA, 19 nt, Homo sapiens
  misc_RNA (1)...(19): siRNA sense strand
gcuuauaucauccaggaga

SEQ ID NO: 2298058 - RNA, 19 nt, Homo sapiens
  misc_RNA (1)...(19): siRNA sense strand
agguaucagacguagcuua

SEQ ID NO: 2298059 - RNA, 19 nt, Homo sapiens
  misc_RNA (1)...(19): siRNA sense strand
uggaaaucaaucugcagaa

SEQ ID NO: 2298060 - RNA, 19 nt, Homo sapiens
  misc_RNA (1)...(19): siRNA sense strand
cagacagaggaaacgcaaa

SEQ ID NO: 2298061 - RNA, 19 nt, Homo sapiens
  misc_RNA (1)...(19): siRNA sense strand
uggcaggaaagaugagcau

SEQ ID NO: 2298062 - RNA, 19 nt, Homo sapiens
  misc_RNA (1)...(19): siRNA sense strand
gugccaacugcuugcgcua

SEQ ID NO: 2298063 - RNA, 19 nt, Homo sapiens
  misc_RNA (1)...(19): siRNA sense strand
ucuccaacaucuaucgcua

SEQ ID NO: 2298064 - RNA, 19 nt, Homo sapiens
  misc_RNA (1)...(19): siRNA sense strand
ccuucuugcuggaccaaaa

SEQ ID NO: 2298065 - RNA, 19 nt, Homo sapiens
  misc_RNA (1)...(19): siRNA sense strand
uggaugaagcucucagaca

SEQ ID NO: 2298066 - RNA, 19 nt, Homo sapiens
  misc_RNA (1)...(19): siRNA sense strand
caaacaggcucgagcgaca

SEQ ID NO: 2298067 - RNA, 19 nt, Homo sapiens
  misc_RNA (1)...(19): siRNA sense strand
ggauaaacucacagcucaa

SEQ ID NO: 2298068 - RNA, 19 nt, Homo sapiens
  misc_RNA (1)...(19): siRNA sense strand
gagacaaggaggaggagau

SEQ ID NO: 2298069 - RNA, 19 nt, Homo sapiens
  misc_RNA (1)...(19): siRNA sense strand
gcagaauggaauagaggau

SEQ ID NO: 2298070 - RNA, 19 nt, Homo sapiens
  misc_RNA (1)...(19): siRNA sense strand
cuucaaggucccagaggaa

SEQ ID NO: 2298071 - RNA, 19 nt, Homo sapiens
  misc_RNA (1)...(19): siRNA sense strand
uguacuuagucauggauua

SEQ ID NO: 2298072 - RNA, 19 nt, Homo sapiens
  misc_RNA (1)...(19): siRNA sense strand
augacgacgugcugagaaa

SEQ ID NO: 2298073 - RNA, 19 nt, Homo sapiens
  misc_RNA (1)...(19): siRNA sense strand
gguugaaaucccaggccaa

SEQ ID NO: 2298074 - RNA, 19 nt, Homo sapiens
  misc_RNA (1)...(19): siRNA sense strand
ugaucuacuucaagagcaa

SEQ ID NO: 2298075 - RNA, 19 nt, Homo sapiens
  misc_RNA (1)...(19): siRNA sense strand
ccuuagagcaccagcaaga

SEQ ID NO: 2298076 - RNA, 19 nt, Homo sapiens
  misc_RNA (1)...(19): siRNA sense strand
cagaaaguucaaugagauu

SEQ ID NO: 2298077 - RNA, 19 nt, Homo sapiens
  misc_RNA (1)...(19): siRNA sense strand
ccauguauauucaggguga

SEQ ID NO: 2298078 - RNA, 19 nt, Homo sapiens
  misc_RNA (1)...(19): siRNA sense strand
cggccacacucaagaggaa

SEQ ID NO: 2298079 - RNA, 19 nt, Homo sapiens
  misc_RNA (1)...(19): siRNA sense strand
ucagcaaauuugaagacaa

SEQ ID NO: 2298080 - RNA, 19 nt, Homo sapiens
  misc_RNA (1)...(19): siRNA sense strand
ccgagauauuccauguaua

SEQ ID NO: 2298081 - RNA, 19 nt, Homo sapiens
  misc_RNA (1)...(19): siRNA sense strand
gaugaaaacaagaagcuaa

SEQ ID NO: 2298082 - RNA, 19 nt, Homo sapiens
  misc_RNA (1)...(19): siRNA sense strand
gugcugagaaacacggaaa

SEQ ID NO: 2298083 - RNA, 19 nt, Homo sapiens
  misc_RNA (1)...(19): siRNA sense strand
agauaaauacgaacgagaa

SEQ ID NO: 2298084 - RNA, 19 nt, Homo sapiens
  misc_RNA (1)...(19): siRNA sense strand
caucagagcagcaggagga

SEQ ID NO: 2298085 - RNA, 19 nt, Homo sapiens
  misc_RNA (1)...(19): siRNA sense strand
ugacagaaaaugagaauga

SEQ ID NO: 2298086 - RNA, 19 nt, Homo sapiens
  misc_RNA (1)...(19): siRNA sense strand
ggaaaauauacgaaaccua

SEQ ID NO: 2298087 - RNA, 19 nt, Homo sapiens
  misc_RNA (1)...(19): siRNA sense strand
agaaggaggagcugcacaa

SEQ ID NO: 2298088 - RNA, 19 nt, Homo sapiens
  misc_RNA (1)...(19): siRNA sense strand
augaagaaaucgaacgcuu

SEQ ID NO: 2298089 - RNA, 19 nt, Homo sapiens
  misc_RNA (1)...(19): siRNA sense strand
agacauuaaaccugacaau

SEQ ID NO: 2298090 - RNA, 19 nt, Homo sapiens
  misc_RNA (1)...(19): siRNA sense strand
gcaagcaaauggaaagcga

SEQ ID NO: 2298091 - RNA, 19 nt, Homo sapiens
  misc_RNA (1)...(19): siRNA sense strand
gaggaaguggguugggauu

SEQ ID NO: 2298092 - RNA, 19 nt, Homo sapiens
  misc_RNA (1)...(19): siRNA sense strand
aggaugagcugcaggaucu

SEQ ID NO: 2298093 - RNA, 19 nt, Homo sapiens
  misc_RNA (1)...(19): siRNA sense strand
ggaggaggcaguagguaca

SEQ ID NO: 2298094 - RNA, 19 nt, Homo sapiens
  misc_RNA (1)...(19): siRNA sense strand
ugaagaauacugaacgaau

SEQ ID NO: 2298095 - RNA, 19 nt, Homo sapiens
  misc_RNA (1)...(19): siRNA sense strand
uaaccaaagaugaggaugu

SEQ ID NO: 2298096 - RNA, 19 nt, Homo sapiens
  misc_RNA (1)...(19): siRNA sense strand
gcgcaagcuucgugagcac

SEQ ID NO: 2298097 - RNA, 19 nt, Homo sapiens
  misc_RNA (1)...(19): siRNA sense strand
ccaugugcuagaagugaaa

SEQ ID NO: 2298098 - RNA, 19 nt, Homo sapiens
  misc_RNA (1)...(19): siRNA sense strand
cuguggagcucgaaagcga

SEQ ID NO: 2298099 - RNA, 19 nt, Homo sapiens
  misc_RNA (1)...(19): siRNA sense strand
agucacucguggagaccua

SEQ ID NO: 2298100 - RNA, 19 nt, Homo sapiens
  misc_RNA (1)...(19): siRNA sense strand
acacagcuggugaaagaaa

SEQ ID NO: 2298101 - RNA, 19 nt, Homo sapiens
  misc_RNA (1)...(19): siRNA sense strand
aaaucgaacgcuugaagaa

SEQ ID NO: 2298102 - RNA, 19 nt, Homo sapiens
  misc_RNA (1)...(19): siRNA sense strand
aagauaaauacgaacgaga

SEQ ID NO: 2298103 - RNA, 19 nt, Homo sapiens
  misc_RNA (1)...(19): siRNA sense strand
ggaucggagccuagcguga

SEQ ID NO: 2298104 - RNA, 19 nt, Homo sapiens
  misc_RNA (1)...(19): siRNA sense strand
gcgacaaguacguggccga

SEQ ID NO: 2298105 - RNA, 19 nt, Homo sapiens
  misc_RNA (1)...(19): siRNA sense strand
gguugggauucuagaagga

SEQ ID NO: 2298106 - RNA, 19 nt, Homo sapiens
  misc_RNA (1)...(19): siRNA sense strand
acacauuaaccaaagauga

SEQ ID NO: 2298107 - RNA, 19 nt, Homo sapiens
  misc_RNA (1)...(19): siRNA sense strand
cagagcagcaggaggacau

SEQ ID NO: 2298108 - RNA, 19 nt, Homo sapiens
  misc_RNA (1)...(19): siRNA sense strand
gaaaagaggaaguggguug

SEQ ID NO: 2298109 - RNA, 19 nt, Homo sapiens
  misc_RNA (1)...(19): siRNA sense strand
auucaaaccgagauaaaga

SEQ ID NO: 2298110 - RNA, 19 nt, Homo sapiens
  misc_RNA (1)...(19): siRNA sense strand
uagaaaagucaaagcgaga

SEQ ID NO: 2298111 - RNA, 19 nt, Homo sapiens
  misc_RNA (1)...(19): siRNA sense strand
augagaugcucuauggaga

SEQ ID NO: 2298112 - RNA, 19 nt, Homo sapiens
  misc_RNA (1)...(19): siRNA sense strand
cugaagaagcgaaggaccu

SEQ ID NO: 2298113 - RNA, 19 nt, Homo sapiens
  misc_RNA (1)...(19): siRNA sense strand
ccaacuucgacguggauga

SEQ ID NO: 2298114 - RNA, 19 nt, Homo sapiens
  misc_RNA (1)...(19): siRNA sense strand
caaugaaaauccucaacaa

SEQ ID NO: 2298115 - RNA, 19 nt, Homo sapiens
  misc_RNA (1)...(19): siRNA sense strand
acaaggaggaggagaugga

SEQ ID NO: 2298116 - RNA, 19 nt, Homo sapiens
  misc_RNA (1)...(19): siRNA sense strand
ggcaguagguacaauaaaa

SEQ ID NO: 2298117 - RNA, 19 nt, Homo sapiens
  misc_RNA (1)...(19): siRNA sense strand
aagcucagauugcggaaau

SEQ ID NO: 2298118 - RNA, 19 nt, Homo sapiens
  misc_RNA (1)...(19): siRNA sense strand
gcuaaaugaagaaaucgaa

SEQ ID NO: 2298119 - RNA, 19 nt, Homo sapiens
  misc_RNA (1)...(19): siRNA sense strand
cagcaagagauuuccaaaa

SEQ ID NO: 2298120 - RNA, 19 nt, Homo sapiens
  misc_RNA (1)...(19): siRNA sense strand
gaaaucauucaguggguca

SEQ ID NO: 2298121 - RNA, 19 nt, Homo sapiens
  misc_RNA (1)...(19): siRNA sense strand
gcagcgaggcaucggaaca

SEQ ID NO: 2298122 - RNA, 19 nt, Homo sapiens
  misc_RNA (1)...(19): siRNA sense strand
ugaucugccugaaggaaaa

SEQ ID NO: 2298123 - RNA, 19 nt, Homo sapiens
  misc_RNA (1)...(19): siRNA sense strand
gggagaagaucguaauccu

SEQ ID NO: 2298124 - RNA, 19 nt, Homo sapiens
  misc_RNA (1)...(19): siRNA sense strand
gcccagaagcagaaggugu

SEQ ID NO: 2298125 - RNA, 19 nt, Homo sapiens
  misc_RNA (1)...(19): siRNA sense strand
augcaaggguauugggaau

SEQ ID NO: 2298126 - RNA, 19 nt, Homo sapiens
  misc_RNA (1)...(19): siRNA sense strand
acuaaagcggcuagaagaa

SEQ ID NO: 2298127 - RNA, 19 nt, Homo sapiens
  misc_RNA (1)...(19): siRNA sense strand
gcauaugaguacuacagga

SEQ ID NO: 2298128 - RNA, 19 nt, Homo sapiens
  misc_RNA (1)...(19): siRNA sense strand
ggcagugauuggaggacca

SEQ ID NO: 2298129 - RNA, 19 nt, Homo sapiens
  misc_RNA (1)...(19): siRNA sense strand
aaggaaaagauguggagau

SEQ ID NO: 2298130 - RNA, 19 nt, Homo sapiens
  misc_RNA (1)...(19): siRNA sense strand
caucgaucaacaaggaaaa

SEQ ID NO: 2298131 - RNA, 19 nt, Homo sapiens
  misc_RNA (1)...(19): siRNA sense strand
cuaauaagcuugugguugc

SEQ ID NO: 2298132 - RNA, 19 nt, Homo sapiens
  misc_RNA (1)...(19): siRNA sense strand
aaacagagccugcagguga

SEQ ID NO: 2298133 - RNA, 19 nt, Homo sapiens
  misc_RNA (1)...(19): siRNA sense strand
cugcaauccgagagcaaca

SEQ ID NO: 2298134 - RNA, 19 nt, Homo sapiens
  misc_RNA (1)...(19): siRNA sense strand
ucuauaacaucuacgccaa

SEQ ID NO: 2298135 - RNA, 19 nt, Homo sapiens
  misc_RNA (1)...(19): siRNA sense strand
ccauccaggcagaggagau

SEQ ID NO: 2298136 - RNA, 19 nt, Homo sapiens
  misc_RNA (1)...(19): siRNA sense strand
aggagaucaugaagcucaa

SEQ ID NO: 2298137 - RNA, 19 nt, Homo sapiens
  misc_RNA (1)...(19): siRNA sense strand
ccauggagagggaccgcua

SEQ ID NO: 2298138 - RNA, 19 nt, Homo sapiens
  misc_RNA (1)...(19): siRNA sense strand
uagacaagguucuggucca

SEQ ID NO: 2298139 - RNA, 19 nt, Homo sapiens
  misc_RNA (1)...(19): siRNA sense strand
gaggagaucaugaagcuca

SEQ ID NO: 2298140 - RNA, 19 nt, Homo sapiens
  misc_RNA (1)...(19): siRNA sense strand
cgggacaagaagaagaauu

SEQ ID NO: 2298141 - RNA, 19 nt, Homo sapiens
  misc_RNA (1)...(19): siRNA sense strand
agccauuauugcugaagaa

SEQ ID NO: 2298142 - RNA, 19 nt, Homo sapiens
  misc_RNA (1)...(19): siRNA sense strand
uggaaaucuauaagaccaa

SEQ ID NO: 2298143 - RNA, 19 nt, Homo sapiens
  misc_RNA (1)...(19): siRNA sense strand
caggagaugcagugggacu

SEQ ID NO: 2298144 - RNA, 19 nt, Homo sapiens
  misc_RNA (1)...(19): siRNA sense strand
agcaguggguggagguaga

SEQ ID NO: 2298145 - RNA, 19 nt, Homo sapiens
  misc_RNA (1)...(19): siRNA sense strand
augggaagacugcgggcaa

SEQ ID NO: 2298146 - RNA, 19 nt, Homo sapiens
  misc_RNA (1)...(19): siRNA sense strand
ccaaguguguccuggcuga

SEQ ID NO: 2298147 - RNA, 19 nt, Homo sapiens
  misc_RNA (1)...(19): siRNA sense strand
auggaaaucuauaagacca

SEQ ID NO: 2298148 - RNA, 19 nt, Homo sapiens
  misc_RNA (1)...(19): siRNA sense strand
ucaucguaggcgugggcaa

SEQ ID NO: 2298149 - RNA, 19 nt, Homo sapiens
  misc_RNA (1)...(19): siRNA sense strand
ggaccaaagugaucagcug

SEQ ID NO: 2298150 - RNA, 19 nt, Homo sapiens
  misc_RNA (1)...(19): siRNA sense strand
gacuaugacuccaguggga

SEQ ID NO: 2298151 - RNA, 19 nt, Homo sapiens
  misc_RNA (1)...(19): siRNA sense strand
augcaggaagggacggcaa

SEQ ID NO: 2298152 - RNA, 19 nt, Homo sapiens
  misc_RNA (1)...(19): siRNA sense strand
ccucagaaggggaaguuua

SEQ ID NO: 2298153 - RNA, 19 nt, Homo sapiens
  misc_RNA (1)...(19): siRNA sense strand
ccucugcacuugaagggua

SEQ ID NO: 2298154 - RNA, 19 nt, Homo sapiens
  misc_RNA (1)...(19): siRNA sense strand
acagaacgucaaagagaga

SEQ ID NO: 2298155 - RNA, 19 nt, Homo sapiens
  misc_RNA (1)...(19): siRNA sense strand
ccuuacagaacgucaaaga

SEQ ID NO: 2298156 - RNA, 19 nt, Homo sapiens
  misc_RNA (1)...(19): siRNA sense strand
caagauuaaaagagcgaau

SEQ ID NO: 2298157 - RNA, 19 nt, Homo sapiens
  misc_RNA (1)...(19): siRNA sense strand
ugguggucauaucgaguaa

SEQ ID NO: 2298158 - RNA, 19 nt, Homo sapiens
  misc_RNA (1)...(19): siRNA sense strand
uugacaaagaccugugaau

SEQ ID NO: 2298159 - RNA, 19 nt, Homo sapiens
  misc_RNA (1)...(19): siRNA sense strand
ccuccagcucagugccaaa

SEQ ID NO: 2298160 - RNA, 19 nt, Homo sapiens
  misc_RNA (1)...(19): siRNA sense strand
ggaaggaacuguaaaccuc

SEQ ID NO: 2298161 - RNA, 19 nt, Homo sapiens
  misc_RNA (1)...(19): siRNA sense strand
gcgggugugcagaaggcua

SEQ ID NO: 2298162 - RNA, 19 nt, Homo sapiens
  misc_RNA (1)...(19): siRNA sense strand
ccauggaaggaacuguaaa

SEQ ID NO: 2298163 - RNA, 19 nt, Homo sapiens
  misc_RNA (1)...(19): siRNA sense strand
aucaacagcaccauagaaa

SEQ ID NO: 2298164 - RNA, 19 nt, Homo sapiens
  misc_RNA (1)...(19): siRNA sense strand
uggcaagaauugugggcua

SEQ ID NO: 2298165 - RNA, 19 nt, Homo sapiens
  misc_RNA (1)...(19): siRNA sense strand
uggauuugguagaggugaa

SEQ ID NO: 2298166 - RNA, 19 nt, Homo sapiens
  misc_RNA (1)...(19): siRNA sense strand
ggaucuugacauaaguaaa

SEQ ID NO: 2298167 - RNA, 19 nt, Homo sapiens
  misc_RNA (1)...(19): siRNA sense strand
uguuaaagaagcugaaguu

SEQ ID NO: 2298168 - RNA, 19 nt, Homo sapiens
  misc_RNA (1)...(19): siRNA sense strand
gcgucgagguggaaaauau

SEQ ID NO: 2298169 - RNA, 19 nt, Homo sapiens
  misc_RNA (1)...(19): siRNA sense strand
ccuggaacaguuacagaaa

SEQ ID NO: 2298170 - RNA, 19 nt, Homo sapiens
  misc_RNA (1)...(19): siRNA sense strand
cuccaguauucaagaaaga

SEQ ID NO: 2298171 - RNA, 19 nt, Homo sapiens
  misc_RNA (1)...(19): siRNA sense strand
acagugugauuaugggcaa

SEQ ID NO: 2298172 - RNA, 19 nt, Homo sapiens
  misc_RNA (1)...(19): siRNA sense strand
gaucagauaucaagcugga

SEQ ID NO: 2298173 - RNA, 19 nt, Homo sapiens
  misc_RNA (1)...(19): siRNA sense strand
ugugaauggaugucaggaa

SEQ ID NO: 2298174 - RNA, 19 nt, Homo sapiens
  misc_RNA (1)...(19): siRNA sense strand
uggcaaugacugcagagaa

SEQ ID NO: 2298175 - RNA, 19 nt, Homo sapiens
  misc_RNA (1)...(19): siRNA sense strand
uggcaaagucucaccugaa

SEQ ID NO: 2298176 - RNA, 19 nt, Homo sapiens
  misc_RNA (1)...(19): siRNA sense strand
auuaauaggcucugugguu

SEQ ID NO: 2298177 - RNA, 19 nt, Homo sapiens
  misc_RNA (1)...(19): siRNA sense strand
gucuuaaggacauggauuu

SEQ ID NO: 2298178 - RNA, 19 nt, Homo sapiens
  misc_RNA (1)...(19): siRNA sense strand
gaugcuauauauuuggcaa

SEQ ID NO: 2298179 - RNA, 19 nt, Homo sapiens
  misc_RNA (1)...(19): siRNA sense strand
gagccauugcuuuggguca

SEQ ID NO: 2298180 - RNA, 19 nt, Homo sapiens
  misc_RNA (1)...(19): siRNA sense strand
ugaauggaugucaggaaau

SEQ ID NO: 2298181 - RNA, 19 nt, Homo sapiens
  misc_RNA (1)...(19): siRNA sense strand
acacaaaauaagcagagaa

SEQ ID NO: 2298182 - RNA, 19 nt, Homo sapiens
  misc_RNA (1)...(19): siRNA sense strand
aggacauggauuugguaga

SEQ ID NO: 2298183 - RNA, 19 nt, Homo sapiens
  misc_RNA (1)...(19): siRNA sense strand
gcagagaagaaugugacaa

SEQ ID NO: 2298184 - RNA, 19 nt, Homo sapiens
  misc_RNA (1)...(19): siRNA sense strand
agucuuaaggacauggauu

SEQ ID NO: 2298185 - RNA, 19 nt, Homo sapiens
  misc_RNA (1)...(19): siRNA sense strand
gaucaagaauuacugcaca

SEQ ID NO: 2298186 - RNA, 19 nt, Homo sapiens
  misc_RNA (1)...(19): siRNA sense strand
uggagguggccaagguauu

SEQ ID NO: 2298187 - RNA, 19 nt, Homo sapiens
  misc_RNA (1)...(19): siRNA sense strand
cuauauauuuggcaaggca

SEQ ID NO: 2298188 - RNA, 19 nt, Homo sapiens
  misc_RNA (1)...(19): siRNA sense strand
guggaggaaccgaaagcau

SEQ ID NO: 2298189 - RNA, 19 nt, Homo sapiens
  misc_RNA (1)...(19): siRNA sense strand
gaaccgaaagcaugagcca

SEQ ID NO: 2298190 - RNA, 19 nt, Homo sapiens
  misc_RNA (1)...(19): siRNA sense strand
gugucagaaaugugcguuu

SEQ ID NO: 2298191 - RNA, 19 nt, Homo sapiens
  misc_RNA (1)...(19): siRNA sense strand
cagauaucaagcuggaaga

SEQ ID NO: 2298192 - RNA, 19 nt, Homo sapiens
  misc_RNA (1)...(19): siRNA sense strand
aacuguuacugcagggaau

SEQ ID NO: 2298193 - RNA, 19 nt, Homo sapiens
  misc_RNA (1)...(19): siRNA sense strand
ggguguagcugauggugcu

SEQ ID NO: 2298194 - RNA, 19 nt, Homo sapiens
  misc_RNA (1)...(19): siRNA sense strand
auuaaggcgucgaggugga

SEQ ID NO: 2298195 - RNA, 19 nt, Homo sapiens
  misc_RNA (1)...(19): siRNA sense strand
caguugacagugugauuau

SEQ ID NO: 2298196 - RNA, 19 nt, Homo sapiens
  misc_RNA (1)...(19): siRNA sense strand
aaagaaaggaaaacagaca

SEQ ID NO: 2298197 - RNA, 19 nt, Homo sapiens
  misc_RNA (1)...(19): siRNA sense strand
ccacauggugucagaugaa

SEQ ID NO: 2298198 - RNA, 19 nt, Homo sapiens
  misc_RNA (1)...(19): siRNA sense strand
aggcaaaaguggaugaguu

SEQ ID NO: 2298199 - RNA, 19 nt, Homo sapiens
  misc_RNA (1)...(19): siRNA sense strand
uugaagacaugguggcuga

SEQ ID NO: 2298200 - RNA, 19 nt, Homo sapiens
  misc_RNA (1)...(19): siRNA sense strand
acauggugucagaugaaua

SEQ ID NO: 2298201 - RNA, 19 nt, Homo sapiens
  misc_RNA (1)...(19): siRNA sense strand
ucaccaaguucaaugcuga

SEQ ID NO: 2298202 - RNA, 19 nt, Homo sapiens
  misc_RNA (1)...(19): siRNA sense strand
gaauuugugccaauaagua

SEQ ID NO: 2298203 - RNA, 19 nt, Homo sapiens
  misc_RNA (1)...(19): siRNA sense strand
aagaacaagccguacccaa

SEQ ID NO: 2298204 - RNA, 19 nt, Homo sapiens
  misc_RNA (1)...(19): siRNA sense strand
uggaagaguuugaagguga

SEQ ID NO: 2298205 - RNA, 19 nt, Homo sapiens
  misc_RNA (1)...(19): siRNA sense strand
agaaggagcugcaggccaa

SEQ ID NO: 2298206 - RNA, 19 nt, Homo sapiens
  misc_RNA (1)...(19): siRNA sense strand
uggccaagguagaggacau

SEQ ID NO: 2298207 - RNA, 19 nt, Homo sapiens
  misc_RNA (1)...(19): siRNA sense strand
gagcgagacgagauggaaa

SEQ ID NO: 2298208 - RNA, 19 nt, Homo sapiens
  misc_RNA (1)...(19): siRNA sense strand
aauuuaugcuccaggcaaa

SEQ ID NO: 2298209 - RNA, 19 nt, Homo sapiens
  misc_RNA (1)...(19): siRNA sense strand
gugcggagucggagagaca

SEQ ID NO: 2298210 - RNA, 19 nt, Homo sapiens
  misc_RNA (1)...(19): siRNA sense strand
ggcuuuaggaagaagauaa

SEQ ID NO: 2298211 - RNA, 19 nt, Homo sapiens
  misc_RNA (1)...(19): siRNA sense strand
aggugaugguggaggccua

SEQ ID NO: 2298212 - RNA, 19 nt, Homo sapiens
  misc_RNA (1)...(19): siRNA sense strand
agaccaaacauaaggccua

SEQ ID NO: 2298213 - RNA, 19 nt, Homo sapiens
  misc_RNA (1)...(19): siRNA sense strand
gcaggugcucaaagagaaa

SEQ ID NO: 2298214 - RNA, 19 nt, Homo sapiens
  misc_RNA (1)...(19): siRNA sense strand
agacgaugguggaggagga

SEQ ID NO: 2298215 - RNA, 19 nt, Homo sapiens
  misc_RNA (1)...(19): siRNA sense strand
gggcaguguuagaaaagaa

SEQ ID NO: 2298216 - RNA, 19 nt, Homo sapiens
  misc_RNA (1)...(19): siRNA sense strand
agagaaguuaagagaagaa

SEQ ID NO: 2298217 - RNA, 19 nt, Homo sapiens
  misc_RNA (1)...(19): siRNA sense strand
cagaaacacaggaggagau

SEQ ID NO: 2298218 - RNA, 19 nt, Homo sapiens
  misc_RNA (1)...(19): siRNA sense strand
ggaaguggcuggaagagca

SEQ ID NO: 2298219 - RNA, 19 nt, Homo sapiens
  misc_RNA (1)...(19): siRNA sense strand
cugaaagccaccaggaaga

SEQ ID NO: 2298220 - RNA, 19 nt, Homo sapiens
  misc_RNA (1)...(19): siRNA sense strand
gggagguggaucagaaaga

SEQ ID NO: 2298221 - RNA, 19 nt, Homo sapiens
  misc_RNA (1)...(19): siRNA sense strand
cuaaggaagucucagggaa

SEQ ID NO: 2298222 - RNA, 19 nt, Homo sapiens
  misc_RNA (1)...(19): siRNA sense strand
cagcagaaacacaggagga

SEQ ID NO: 2298223 - RNA, 19 nt, Homo sapiens
  misc_RNA (1)...(19): siRNA sense strand
gagguggaucagaaagaaa

SEQ ID NO: 2298224 - RNA, 19 nt, Homo sapiens
  misc_RNA (1)...(19): siRNA sense strand
cugaagaacaacaugaaga

SEQ ID NO: 2298225 - RNA, 19 nt, Homo sapiens
  misc_RNA (1)...(19): siRNA sense strand
gggagaaggugcuggagcu

SEQ ID NO: 2298226 - RNA, 19 nt, Homo sapiens
  misc_RNA (1)...(19): siRNA sense strand
ggaaggaacuggaagggcu

SEQ ID NO: 2298227 - RNA, 19 nt, Homo sapiens
  misc_RNA (1)...(19): siRNA sense strand
cugcagaacgagaagauca

SEQ ID NO: 2298228 - RNA, 19 nt, Homo sapiens
  misc_RNA (1)...(19): siRNA sense strand
gaaggaacuggaagggcua

SEQ ID NO: 2298229 - RNA, 19 nt, Homo sapiens
  misc_RNA (1)...(19): siRNA sense strand
ugacuuuacuccagcgaga

SEQ ID NO: 2298230 - RNA, 19 nt, Homo sapiens
  misc_RNA (1)...(19): siRNA sense strand
cggaacagaagcagaagau

SEQ ID NO: 2298231 - RNA, 19 nt, Homo sapiens
  misc_RNA (1)...(19): siRNA sense strand
acgagaacgccgugggcau

SEQ ID NO: 2298232 - RNA, 19 nt, Homo sapiens
  misc_RNA (1)...(19): siRNA sense strand
cuuuagagaaguuaagaga

SEQ ID NO: 2298233 - RNA, 19 nt, Homo sapiens
  misc_RNA (1)...(19): siRNA sense strand
gcaaagaagaggaggaucg

SEQ ID NO: 2298234 - RNA, 19 nt, Homo sapiens
  misc_RNA (1)...(19): siRNA sense strand
cgucggaaacuuuagagaa

SEQ ID NO: 2298235 - RNA, 19 nt, Homo sapiens
  misc_RNA (1)...(19): siRNA sense strand
uggagauggcccaggaaga

SEQ ID NO: 2298236 - RNA, 19 nt, Homo sapiens
  misc_RNA (1)...(19): siRNA sense strand
gaaaggagccgaaaggcga

SEQ ID NO: 2298237 - RNA, 19 nt, Homo sapiens
  misc_RNA (1)...(19): siRNA sense strand
aggcugacauguuggauca

SEQ ID NO: 2298238 - RNA, 19 nt, Homo sapiens
  misc_RNA (1)...(19): siRNA sense strand
aggcaaagacgauggugga

SEQ ID NO: 2298239 - RNA, 19 nt, Homo sapiens
  misc_RNA (1)...(19): siRNA sense strand
gcaccugaaacucgagaau

SEQ ID NO: 2298240 - RNA, 19 nt, Homo sapiens
  misc_RNA (1)...(19): siRNA sense strand
gaaaccaagagauggaaaa

SEQ ID NO: 2298241 - RNA, 19 nt, Homo sapiens
  misc_RNA (1)...(19): siRNA sense strand
ggaucagaaagaaagagaa

SEQ ID NO: 2298242 - RNA, 19 nt, Homo sapiens
  misc_RNA (1)...(19): siRNA sense strand
gcgcaaagaagaggaggau

SEQ ID NO: 2298243 - RNA, 19 nt, Homo sapiens
  misc_RNA (1)...(19): siRNA sense strand
ggcacauccuagggagaaa

SEQ ID NO: 2298244 - RNA, 19 nt, Homo sapiens
  misc_RNA (1)...(19): siRNA sense strand
gcccagaaggagaugaaga

SEQ ID NO: 2298245 - RNA, 19 nt, Homo sapiens
  misc_RNA (1)...(19): siRNA sense strand
gcgcccagaaggagaugaa

SEQ ID NO: 2298246 - RNA, 19 nt, Homo sapiens
  misc_RNA (1)...(19): siRNA sense strand
uagaaacagcuuuggccaa

SEQ ID NO: 2298247 - RNA, 19 nt, Homo sapiens
  misc_RNA (1)...(19): siRNA sense strand
cucaaacaguacaggguga

SEQ ID NO: 2298248 - RNA, 19 nt, Homo sapiens
  misc_RNA (1)...(19): siRNA sense strand
caaagacgaugguggagga

SEQ ID NO: 2298249 - RNA, 19 nt, Homo sapiens
  misc_RNA (1)...(19): siRNA sense strand
cagaaggagaugaagacca

SEQ ID NO: 2298250 - RNA, 19 nt, Homo sapiens
  misc_RNA (1)...(19): siRNA sense strand
aaacauaaggccuacgaga

SEQ ID NO: 2298251 - RNA, 19 nt, Homo sapiens
  misc_RNA (1)...(19): siRNA sense strand
accugaaacucgagaaugu

SEQ ID NO: 2298252 - RNA, 19 nt, Homo sapiens
  misc_RNA (1)...(19): siRNA sense strand
uggccaagagggaggcaga

SEQ ID NO: 2298253 - RNA, 19 nt, Homo sapiens
  misc_RNA (1)...(19): siRNA sense strand
agaaagaaagagaaaucca

SEQ ID NO: 2298254 - RNA, 19 nt, Homo sapiens
  misc_RNA (1)...(19): siRNA sense strand
acccagaaggauaaauuua

SEQ ID NO: 2298255 - RNA, 19 nt, Homo sapiens
  misc_RNA (1)...(19): siRNA sense strand
agucguugcaguucgauaa

SEQ ID NO: 2298256 - RNA, 19 nt, Homo sapiens
  misc_RNA (1)...(19): siRNA sense strand
ugggaaaccaagagaugga

SEQ ID NO: 2298257 - RNA, 19 nt, Homo sapiens
  misc_RNA (1)...(19): siRNA sense strand
agacgagaaaggagccgaa

SEQ ID NO: 2298258 - RNA, 19 nt, Homo sapiens
  misc_RNA (1)...(19): siRNA sense strand
ccuauauggucaacggcca

SEQ ID NO: 2298259 - RNA, 19 nt, Homo sapiens
  misc_RNA (1)...(19): siRNA sense strand
cuucaagaauccagaggcu

SEQ ID NO: 2298260 - RNA, 19 nt, Homo sapiens
  misc_RNA (1)...(19): siRNA sense strand
uccaugacccagaaggaua

SEQ ID NO: 2298261 - RNA, 19 nt, Homo sapiens
  misc_RNA (1)...(19): siRNA sense strand
augaaugguaccaggaaua

SEQ ID NO: 2298262 - RNA, 19 nt, Homo sapiens
  misc_RNA (1)...(19): siRNA sense strand
aagagaaacuucacggcaa

SEQ ID NO: 2298263 - RNA, 19 nt, Homo sapiens
  misc_RNA (1)...(19): siRNA sense strand
caauauauuuccuggcuga

SEQ ID NO: 2298264 - RNA, 19 nt, Homo sapiens
  misc_RNA (1)...(19): siRNA sense strand
gguugcugaagaagggaua

SEQ ID NO: 2298265 - RNA, 19 nt, Homo sapiens
  misc_RNA (1)...(19): siRNA sense strand
cuuagaguauggagaacau

SEQ ID NO: 2298266 - RNA, 19 nt, Homo sapiens
  misc_RNA (1)...(19): siRNA sense strand
agguauucagagaggaaaa

SEQ ID NO: 2298267 - RNA, 19 nt, Homo sapiens
  misc_RNA (1)...(19): siRNA sense strand
acaaugagaagcaggcaga

SEQ ID NO: 2298268 - RNA, 19 nt, Homo sapiens
  misc_RNA (1)...(19): siRNA sense strand
agaugaacaaugagaagca

SEQ ID NO: 2298269 - RNA, 19 nt, Homo sapiens
  misc_RNA (1)...(19): siRNA sense strand
uggagaacauggaugcaga

SEQ ID NO: 2298270 - RNA, 19 nt, Homo sapiens
  misc_RNA (1)...(19): siRNA sense strand
agccaagggaaguuacaua

SEQ ID NO: 2298271 - RNA, 19 nt, Homo sapiens
  misc_RNA (1)...(19): siRNA sense strand
cuagcuaggaagagaaacu

SEQ ID NO: 2298272 - RNA, 19 nt, Homo sapiens
  misc_RNA (1)...(19): siRNA sense strand
cugaauggugcuuagagua

SEQ ID NO: 2298273 - RNA, 19 nt, Homo sapiens
  misc_RNA (1)...(19): siRNA sense strand
ugaaggaauggcuggaaca

SEQ ID NO: 2298274 - RNA, 19 nt, Homo sapiens
  misc_RNA (1)...(19): siRNA sense strand
ugaaauucccuucuggcaa

SEQ ID NO: 2298275 - RNA, 19 nt, Homo sapiens
  misc_RNA (1)...(19): siRNA sense strand
auguauaggugauaaucga

SEQ ID NO: 2298276 - RNA, 19 nt, Homo sapiens
  misc_RNA (1)...(19): siRNA sense strand
ucucacaacgcuugaccaa

SEQ ID NO: 2298277 - RNA, 19 nt, Homo sapiens
  misc_RNA (1)...(19): siRNA sense strand
cuauaucacaagaugaaca

SEQ ID NO: 2298278 - RNA, 19 nt, Homo sapiens
  misc_RNA (1)...(19): siRNA sense strand
acaagaugaacaaugagaa

SEQ ID NO: 2298279 - RNA, 19 nt, Homo sapiens
  misc_RNA (1)...(19): siRNA sense strand
ugaaaugcucuaugggcga

SEQ ID NO: 2298280 - RNA, 19 nt, Homo sapiens
  misc_RNA (1)...(19): siRNA sense strand
uaugaaugguaccaggaau

SEQ ID NO: 2298281 - RNA, 19 nt, Homo sapiens
  misc_RNA (1)...(19): siRNA sense strand
ugcuauaucacaagaugaa

SEQ ID NO: 2298282 - RNA, 19 nt, Homo sapiens
  misc_RNA (1)...(19): siRNA sense strand
gcugaugugaucuggcaau

SEQ ID NO: 2298283 - RNA, 19 nt, Homo sapiens
  misc_RNA (1)...(19): siRNA sense strand
augagaagcaggcagaaga

SEQ ID NO: 2298284 - RNA, 19 nt, Homo sapiens
  misc_RNA (1)...(19): siRNA sense strand
gcuuagaguauggagaaca

SEQ ID NO: 2298285 - RNA, 19 nt, Homo sapiens
  misc_RNA (1)...(19): siRNA sense strand
ccaucuaagaagaggaaga

SEQ ID NO: 2298286 - RNA, 19 nt, Homo sapiens
  misc_RNA (1)...(19): siRNA sense strand
ccuucaagcucaaccgcaa

SEQ ID NO: 2298287 - RNA, 19 nt, Homo sapiens
  misc_RNA (1)...(19): siRNA sense strand
aggaagaauagcaagaaga

SEQ ID NO: 2298288 - RNA, 19 nt, Homo sapiens
  misc_RNA (1)...(19): siRNA sense strand
uggccaagaaggugaccaa

SEQ ID NO: 2298289 - RNA, 19 nt, Homo sapiens
  misc_RNA (1)...(19): siRNA sense strand
agaucuacaccgaggccaa

SEQ ID NO: 2298290 - RNA, 19 nt, Homo sapiens
  misc_RNA (1)...(19): siRNA sense strand
aagaggaagaauagcaaga

SEQ ID NO: 2298291 - RNA, 19 nt, Homo sapiens
  misc_RNA (1)...(19): siRNA sense strand
ggaauggccaagaagguga

SEQ ID NO: 2298292 - RNA, 19 nt, Homo sapiens
  misc_RNA (1)...(19): siRNA sense strand
ugacgaccgccgagggaau

SEQ ID NO: 2298293 - RNA, 19 nt, Homo sapiens
  misc_RNA (1)...(19): siRNA sense strand
ggggcaagaaggugaagaa

SEQ ID NO: 2298294 - RNA, 19 nt, Homo sapiens
  misc_RNA (1)...(19): siRNA sense strand
acaaaggcggcaaggccaa

SEQ ID NO: 2298295 - RNA, 19 nt, Homo sapiens
  misc_RNA (1)...(19): siRNA sense strand
gcaagaaggugaagaaggc

SEQ ID NO: 2298296 - RNA, 19 nt, Homo sapiens
  misc_RNA (1)...(19): siRNA sense strand
cgaucaaggcgcuggugca

SEQ ID NO: 2298297 - RNA, 19 nt, Homo sapiens
  misc_RNA (1)...(19): siRNA sense strand
cagcccaggaggagggaua

SEQ ID NO: 2298298 - RNA, 19 nt, Homo sapiens
  misc_RNA (1)...(19): siRNA sense strand
cggacagagacuacaguaa

SEQ ID NO: 2298299 - RNA, 19 nt, Homo sapiens
  misc_RNA (1)...(19): siRNA sense strand
ggacagacacuucgggacu

SEQ ID NO: 2298300 - RNA, 19 nt, Homo sapiens
  misc_RNA (1)...(19): siRNA sense strand
gaaccagagaggacaauga

SEQ ID NO: 2298301 - RNA, 19 nt, Homo sapiens
  misc_RNA (1)...(19): siRNA sense strand
ucacuaaaccagaugggau

SEQ ID NO: 2298302 - RNA, 19 nt, Homo sapiens
  misc_RNA (1)...(19): siRNA sense strand
gagugaugcaagaagugaa

SEQ ID NO: 2298303 - RNA, 19 nt, Homo sapiens
  misc_RNA (1)...(19): siRNA sense strand
cagaugggauaguggagga

SEQ ID NO: 2298304 - RNA, 19 nt, Homo sapiens
  misc_RNA (1)...(19): siRNA sense strand
augaugaggaagaagaaga

SEQ ID NO: 2298305 - RNA, 19 nt, Homo sapiens
  misc_RNA (1)...(19): siRNA sense strand
ugaugaugaggaagaagaa

SEQ ID NO: 2298306 - RNA, 19 nt, Homo sapiens
  misc_RNA (1)...(19): siRNA sense strand
augaggaagaagaagaaga

SEQ ID NO: 2298307 - RNA, 19 nt, Homo sapiens
  misc_RNA (1)...(19): siRNA sense strand
aauccuauuucaagagcau

SEQ ID NO: 2298308 - RNA, 19 nt, Homo sapiens
  misc_RNA (1)...(19): siRNA sense strand
ggacaaugaucuugauucc

SEQ ID NO: 2298309 - RNA, 19 nt, Homo sapiens
  misc_RNA (1)...(19): siRNA sense strand
cuagaaccagagaggacaa

SEQ ID NO: 2298310 - RNA, 19 nt, Homo sapiens
  misc_RNA (1)...(19): siRNA sense strand
agagacuacgggagggaca

SEQ ID NO: 2298311 - RNA, 19 nt, Homo sapiens
  misc_RNA (1)...(19): siRNA sense strand
ccagagaggacaaugaucu

SEQ ID NO: 2298312 - RNA, 19 nt, Homo sapiens
  misc_RNA (1)...(19): siRNA sense strand
gggcaaaucaaaagggaga

SEQ ID NO: 2298313 - RNA, 19 nt, Homo sapiens
  misc_RNA (1)...(19): siRNA sense strand
ugaucgugguugugcggaa

SEQ ID NO: 2298314 - RNA, 19 nt, Homo sapiens
  misc_RNA (1)...(19): siRNA sense strand
ucauugugggcgugaagaa

SEQ ID NO: 2298315 - RNA, 19 nt, Homo sapiens
  misc_RNA (1)...(19): siRNA sense strand
gggcagaucaccauggaga

SEQ ID NO: 2298316 - RNA, 19 nt, Homo sapiens
  misc_RNA (1)...(19): siRNA sense strand
ucaacaagaccaagggcuu

SEQ ID NO: 2298317 - RNA, 19 nt, Homo sapiens
  misc_RNA (1)...(19): siRNA sense strand
ugaagaaggcggagggcag

SEQ ID NO: 2298318 - RNA, 19 nt, Homo sapiens
  misc_RNA (1)...(19): siRNA sense strand
agaggaucaucacggacaa

SEQ ID NO: 2298319 - RNA, 19 nt, Homo sapiens
  misc_RNA (1)...(19): siRNA sense strand
gggcagaucaccauggaga

SEQ ID NO: 2298320 - RNA, 19 nt, Homo sapiens
  misc_RNA (1)...(19): siRNA sense strand
ucaacaagaccaagggcuu

SEQ ID NO: 2298321 - RNA, 19 nt, Homo sapiens
  misc_RNA (1)...(19): siRNA sense strand
ugaagaaggcggagggcag

SEQ ID NO: 2298322 - RNA, 19 nt, Homo sapiens
  misc_RNA (1)...(19): siRNA sense strand
agaggaucaucacggacaa

SEQ ID NO: 2298323 - RNA, 19 nt, Homo sapiens
  misc_RNA (1)...(19): siRNA sense strand
ugguagagaugcaaggaga

SEQ ID NO: 2298324 - RNA, 19 nt, Homo sapiens
  misc_RNA (1)...(19): siRNA sense strand
ggguuagcccacagagcaa

SEQ ID NO: 2298325 - RNA, 19 nt, Homo sapiens
  misc_RNA (1)...(19): siRNA sense strand
gcuugugaguggaugggua

SEQ ID NO: 2298326 - RNA, 19 nt, Homo sapiens
  misc_RNA (1)...(19): siRNA sense strand
gcaagacaguagaagcaga

SEQ ID NO: 2298327 - RNA, 19 nt, Homo sapiens
  misc_RNA (1)...(19): siRNA sense strand
gaagaaauaugaugggcgu

SEQ ID NO: 2298328 - RNA, 19 nt, Homo sapiens
  misc_RNA (1)...(19): siRNA sense strand
gggauguauaaucaagaua

SEQ ID NO: 2298329 - RNA, 19 nt, Homo sapiens
  misc_RNA (1)...(19): siRNA sense strand
auggauaaacuuggagaaa

SEQ ID NO: 2298330 - RNA, 19 nt, Homo sapiens
  misc_RNA (1)...(19): siRNA sense strand
aguugaaacaaauguggaa

SEQ ID NO: 2298331 - RNA, 19 nt, Homo sapiens
  misc_RNA (1)...(19): siRNA sense strand
uggcaagacaguagaagca

SEQ ID NO: 2298332 - RNA, 19 nt, Homo sapiens
  misc_RNA (1)...(19): siRNA sense strand
gcauguaccagaaaggaca

SEQ ID NO: 2298333 - RNA, 19 nt, Homo sapiens
  misc_RNA (1)...(19): siRNA sense strand
agagaugcaaggagaugaa

SEQ ID NO: 2298334 - RNA, 19 nt, Homo sapiens
  misc_RNA (1)...(19): siRNA sense strand
ggggaucaauacagagcaa

SEQ ID NO: 2298335 - RNA, 19 nt, Homo sapiens
  misc_RNA (1)...(19): siRNA sense strand
ggaucaauacagagcaacu

SEQ ID NO: 2298336 - RNA, 19 nt, Homo sapiens
  misc_RNA (1)...(19): siRNA sense strand
cuugugaguggauggguaa

SEQ ID NO: 2298337 - RNA, 19 nt, Homo sapiens
  misc_RNA (1)...(19): siRNA sense strand
cuggaaaaguagagauaac

SEQ ID NO: 2298338 - RNA, 19 nt, Homo sapiens
  misc_RNA (1)...(19): siRNA sense strand
gguagagaugcaaggagau

SEQ ID NO: 2298339 - RNA, 19 nt, Homo sapiens
  misc_RNA (1)...(19): siRNA sense strand
gccuggaaaaguagagaua

SEQ ID NO: 2298340 - RNA, 19 nt, Homo sapiens
  misc_RNA (1)...(19): siRNA sense strand
agguuuacccaaugugcaa

SEQ ID NO: 2298341 - RNA, 19 nt, Homo sapiens
  misc_RNA (1)...(19): siRNA sense strand
gcuucaugaccaaggacuu

SEQ ID NO: 2298342 - RNA, 19 nt, Homo sapiens
  misc_RNA (1)...(19): siRNA sense strand
cauggauaaacuuggagaa

SEQ ID NO: 2298343 - RNA, 19 nt, Homo sapiens
  misc_RNA (1)...(19): siRNA sense strand
ucaaacuagcucaggccaa

SEQ ID NO: 2298344 - RNA, 19 nt, Homo sapiens
  misc_RNA (1)...(19): siRNA sense strand
guucugugguagagaugca

SEQ ID NO: 2298345 - RNA, 19 nt, Homo sapiens
  misc_RNA (1)...(19): siRNA sense strand
ccaacgaccaagucaccaa

SEQ ID NO: 2298346 - RNA, 19 nt, Homo sapiens
  misc_RNA (1)...(19): siRNA sense strand
ccugaugagaagaggguug

SEQ ID NO: 2298347 - RNA, 19 nt, Homo sapiens
  misc_RNA (1)...(19): siRNA sense strand
ggguaaaaccuaucaucau

SEQ ID NO: 2298348 - RNA, 19 nt, Homo sapiens
  misc_RNA (1)...(19): siRNA sense strand
guugaaacaaauguggaaa

SEQ ID NO: 2298349 - RNA, 19 nt, Homo sapiens
  misc_RNA (1)...(19): siRNA sense strand
aguacaagucccaguuuga

SEQ ID NO: 2298350 - RNA, 19 nt, Homo sapiens
  misc_RNA (1)...(19): siRNA sense strand
ugggaauugauuaaagaga

SEQ ID NO: 2298351 - RNA, 19 nt, Homo sapiens
  misc_RNA (1)...(19): siRNA sense strand
guuacuaaacaguggacaa

SEQ ID NO: 2298352 - RNA, 19 nt, Homo sapiens
  misc_RNA (1)...(19): siRNA sense strand
ugaacauaggugugaauaa

SEQ ID NO: 2298353 - RNA, 19 nt, Homo sapiens
  misc_RNA (1)...(19): siRNA sense strand
cggaagaaagcaagaaagu

SEQ ID NO: 2298354 - RNA, 19 nt, Homo sapiens
  misc_RNA (1)...(19): siRNA sense strand
gagaagaguuccuggcacu

SEQ ID NO: 2298355 - RNA, 19 nt, Homo sapiens
  misc_RNA (1)...(19): siRNA sense strand
cugugaaaugcaagguuua

SEQ ID NO: 2298356 - RNA, 19 nt, Homo sapiens
  misc_RNA (1)...(19): siRNA sense strand
uucugaaagauuugggaaa

SEQ ID NO: 2298357 - RNA, 19 nt, Homo sapiens
  misc_RNA (1)...(19): siRNA sense strand
uggaagugcuagacccaau

SEQ ID NO: 2298358 - RNA, 19 nt, Homo sapiens
  misc_RNA (1)...(19): siRNA sense strand
gcaucagcaaugaaggaau

SEQ ID NO: 2298359 - RNA, 19 nt, Homo sapiens
  misc_RNA (1)...(19): siRNA sense strand
cgaccucggaagaaagcaa

SEQ ID NO: 2298360 - RNA, 19 nt, Homo sapiens
  misc_RNA (1)...(19): siRNA sense strand
acgauuugauccugaugaa

SEQ ID NO: 2298361 - RNA, 19 nt, Homo sapiens
  misc_RNA (1)...(19): siRNA sense strand
agauacauggacagaaauu

SEQ ID NO: 2298362 - RNA, 19 nt, Homo sapiens
  misc_RNA (1)...(19): siRNA sense strand
ucugaaagauuugggaaaa

SEQ ID NO: 2298363 - RNA, 19 nt, Homo sapiens
  misc_RNA (1)...(19): siRNA sense strand
guaugcaguagguggauau

SEQ ID NO: 2298364 - RNA, 19 nt, Homo sapiens
  misc_RNA (1)...(19): siRNA sense strand
cugaaagaguacugugaag

SEQ ID NO: 2298365 - RNA, 19 nt, Homo sapiens
  misc_RNA (1)...(19): siRNA sense strand
gggcaucagcaaugaagga

SEQ ID NO: 2298366 - RNA, 19 nt, Homo sapiens
  misc_RNA (1)...(19): siRNA sense strand
ggaaugaaagaguccucaa

SEQ ID NO: 2298367 - RNA, 19 nt, Homo sapiens
  misc_RNA (1)...(19): siRNA sense strand
gaagaaaacauguggugga

SEQ ID NO: 2298368 - RNA, 19 nt, Homo sapiens
  misc_RNA (1)...(19): siRNA sense strand
gauuugauccugaugaaaa

SEQ ID NO: 2298369 - RNA, 19 nt, Homo sapiens
  misc_RNA (1)...(19): siRNA sense strand
gaaaguaccuguaugcagu

SEQ ID NO: 2298370 - RNA, 19 nt, Homo sapiens
  misc_RNA (1)...(19): siRNA sense strand
gggaaguaguugguaacau

SEQ ID NO: 2298371 - RNA, 19 nt, Homo sapiens
  misc_RNA (1)...(19): siRNA sense strand
guuccuggcacuuacgaaa

SEQ ID NO: 2298372 - RNA, 19 nt, Homo sapiens
  misc_RNA (1)...(19): siRNA sense strand
cuacgcuauuggaggugaa

SEQ ID NO: 2298373 - RNA, 19 nt, Homo sapiens
  misc_RNA (1)...(19): siRNA sense strand
gggaaccaggagagcauau

SEQ ID NO: 2298374 - RNA, 19 nt, Homo sapiens
  misc_RNA (1)...(19): siRNA sense strand
gguucauaguggagaagag

SEQ ID NO: 2298375 - RNA, 19 nt, Homo sapiens
  misc_RNA (1)...(19): siRNA sense strand
cugcagacaucuaagguuc

SEQ ID NO: 2298376 - RNA, 19 nt, Homo sapiens
  misc_RNA (1)...(19): siRNA sense strand
gaggauggaaugagaccca

SEQ ID NO: 2298377 - RNA, 19 nt, Homo sapiens
  misc_RNA (1)...(19): siRNA sense strand
aggaauugaagcaggaauc

SEQ ID NO: 2298378 - RNA, 19 nt, Homo sapiens
  misc_RNA (1)...(19): siRNA sense strand
gcauugaggaugaauacca

SEQ ID NO: 2298379 - RNA, 19 nt, Homo sapiens
  misc_RNA (1)...(19): siRNA sense strand
uaggaguguguguguguua

SEQ ID NO: 2298380 - RNA, 19 nt, Homo sapiens
  misc_RNA (1)...(19): siRNA sense strand
auggguuggagcugagaua

SEQ ID NO: 2298381 - RNA, 19 nt, Homo sapiens
  misc_RNA (1)...(19): siRNA sense strand
caucuauucuguuggagga

SEQ ID NO: 2298382 - RNA, 19 nt, Homo sapiens
  misc_RNA (1)...(19): siRNA sense strand
ggaaaaguggguugaaguu

SEQ ID NO: 2298383 - RNA, 19 nt, Homo sapiens
  misc_RNA (1)...(19): siRNA sense strand
guauguuucuggaggucga

SEQ ID NO: 2298384 - RNA, 19 nt, Homo sapiens
  misc_RNA (1)...(19): siRNA sense strand
uuacacagguauagugaac

SEQ ID NO: 2298385 - RNA, 19 nt, Homo sapiens
  misc_RNA (1)...(19): siRNA sense strand
gcauguguguuguggcagu

SEQ ID NO: 2298386 - RNA, 19 nt, Homo sapiens
  misc_RNA (1)...(19): siRNA sense strand
agugaacauaggugugaau

SEQ ID NO: 2298387 - RNA, 19 nt, Homo sapiens
  misc_RNA (1)...(19): siRNA sense strand
aggaugaauaccaggucuu

SEQ ID NO: 2298388 - RNA, 19 nt, Homo sapiens
  misc_RNA (1)...(19): siRNA sense strand
cugcaaguuggacaggaaa

SEQ ID NO: 2298389 - RNA, 19 nt, Homo sapiens
  misc_RNA (1)...(19): siRNA sense strand
augggaaccaggagagcau

SEQ ID NO: 2298390 - RNA, 19 nt, Homo sapiens
  misc_RNA (1)...(19): siRNA sense strand
aggcauguguguuguggca

SEQ ID NO: 2298391 - RNA, 19 nt, Homo sapiens
  misc_RNA (1)...(19): siRNA sense strand
guucaaagagagcgagaaa

SEQ ID NO: 2298392 - RNA, 19 nt, Homo sapiens
  misc_RNA (1)...(19): siRNA sense strand
cgacgauugccgagagaaa

SEQ ID NO: 2298393 - RNA, 19 nt, Homo sapiens
  misc_RNA (1)...(19): siRNA sense strand
aggagaaagcagaggaaau

SEQ ID NO: 2298394 - RNA, 19 nt, Homo sapiens
  misc_RNA (1)...(19): siRNA sense strand
cuacuugaacugagagaaa

SEQ ID NO: 2298395 - RNA, 19 nt, Homo sapiens
  misc_RNA (1)...(19): siRNA sense strand
ggaaggaagacgagauaca

SEQ ID NO: 2298396 - RNA, 19 nt, Homo sapiens
  misc_RNA (1)...(19): siRNA sense strand
uggagaaacugaagcggaa

SEQ ID NO: 2298397 - RNA, 19 nt, Homo sapiens
  misc_RNA (1)...(19): siRNA sense strand
aggauaaagagguguuaaa

SEQ ID NO: 2298398 - RNA, 19 nt, Homo sapiens
  misc_RNA (1)...(19): siRNA sense strand
uggcugagcuggagcgcaa

SEQ ID NO: 2298399 - RNA, 19 nt, Homo sapiens
  misc_RNA (1)...(19): siRNA sense strand
aggaaguggcagagagaca

SEQ ID NO: 2298400 - RNA, 19 nt, Homo sapiens
  misc_RNA (1)...(19): siRNA sense strand
agaagagaaaccugagaaa

SEQ ID NO: 2298401 - RNA, 19 nt, Homo sapiens
  misc_RNA (1)...(19): siRNA sense strand
uggccgaacugcagacaaa

SEQ ID NO: 2298402 - RNA, 19 nt, Homo sapiens
  misc_RNA (1)...(19): siRNA sense strand
ggagagagagagggagaaa

SEQ ID NO: 2298403 - RNA, 19 nt, Homo sapiens
  misc_RNA (1)...(19): siRNA sense strand
ggcaagaaguagaucggaa

SEQ ID NO: 2298404 - RNA, 19 nt, Homo sapiens
  misc_RNA (1)...(19): siRNA sense strand
cgagaaauucagugcggaa

SEQ ID NO: 2298405 - RNA, 19 nt, Homo sapiens
  misc_RNA (1)...(19): siRNA sense strand
cggagaagagccugacaua

SEQ ID NO: 2298406 - RNA, 19 nt, Homo sapiens
  misc_RNA (1)...(19): siRNA sense strand
agaaagaauuggcagaaca

SEQ ID NO: 2298407 - RNA, 19 nt, Homo sapiens
  misc_RNA (1)...(19): siRNA sense strand
agagagaggacuuggaaca

SEQ ID NO: 2298408 - RNA, 19 nt, Homo sapiens
  misc_RNA (1)...(19): siRNA sense strand
agguugaacugcuggcuua

SEQ ID NO: 2298409 - RNA, 19 nt, Homo sapiens
  misc_RNA (1)...(19): siRNA sense strand
gagagaagagagaggacuu

SEQ ID NO: 2298410 - RNA, 19 nt, Homo sapiens
  misc_RNA (1)...(19): siRNA sense strand
agggagaccugcaggaaaa

SEQ ID NO: 2298411 - RNA, 19 nt, Homo sapiens
  misc_RNA (1)...(19): siRNA sense strand
uagaagacuuggaguucaa

SEQ ID NO: 2298412 - RNA, 19 nt, Homo sapiens
  misc_RNA (1)...(19): siRNA sense strand
gggugaauuuggaagugaa

SEQ ID NO: 2298413 - RNA, 19 nt, Homo sapiens
  misc_RNA (1)...(19): siRNA sense strand
ccggaaggaagacgagaua

SEQ ID NO: 2298414 - RNA, 19 nt, Homo sapiens
  misc_RNA (1)...(19): siRNA sense strand
aauuagaacugcagcguca

SEQ ID NO: 2298415 - RNA, 19 nt, Homo sapiens
  misc_RNA (1)...(19): siRNA sense strand
ggaaaggagcucuggcaca

SEQ ID NO: 2298416 - RNA, 19 nt, Homo sapiens
  misc_RNA (1)...(19): siRNA sense strand
gcaaagcaucaaucagaaa

SEQ ID NO: 2298417 - RNA, 19 nt, Homo sapiens
  misc_RNA (1)...(19): siRNA sense strand
gaaaagaaguuaagggaug

SEQ ID NO: 2298418 - RNA, 19 nt, Homo sapiens
  misc_RNA (1)...(19): siRNA sense strand
ggaaaguuaugaaggagga

SEQ ID NO: 2298419 - RNA, 19 nt, Homo sapiens
  misc_RNA (1)...(19): siRNA sense strand
ggaggaaguggcagagaga

SEQ ID NO: 2298420 - RNA, 19 nt, Homo sapiens
  misc_RNA (1)...(19): siRNA sense strand
aggcugaauccgagaaaca

SEQ ID NO: 2298421 - RNA, 19 nt, Homo sapiens
  misc_RNA (1)...(19): siRNA sense strand
cuuauaaaguagagcagga

SEQ ID NO: 2298422 - RNA, 19 nt, Homo sapiens
  misc_RNA (1)...(19): siRNA sense strand
aggagaagcugcagcacuu

SEQ ID NO: 2298423 - RNA, 19 nt, Homo sapiens
  misc_RNA (1)...(19): siRNA sense strand
aaggagaagcugcgagaau

SEQ ID NO: 2298424 - RNA, 19 nt, Homo sapiens
  misc_RNA (1)...(19): siRNA sense strand
cggaagccaugaaggagaa

SEQ ID NO: 2298425 - RNA, 19 nt, Homo sapiens
  misc_RNA (1)...(19): siRNA sense strand
aggcaaacagcgugcagaa

SEQ ID NO: 2298426 - RNA, 19 nt, Homo sapiens
  misc_RNA (1)...(19): siRNA sense strand
gcaaagauugggaggggua

SEQ ID NO: 2298427 - RNA, 19 nt, Homo sapiens
  misc_RNA (1)...(19): siRNA sense strand
gagaaguuacaaucagaaa

SEQ ID NO: 2298428 - RNA, 19 nt, Homo sapiens
  misc_RNA (1)...(19): siRNA sense strand
uggacaagcauuugcgcaa

SEQ ID NO: 2298429 - RNA, 19 nt, Homo sapiens
  misc_RNA (1)...(19): siRNA sense strand
cuggagagagagagggaga

SEQ ID NO: 2298430 - RNA, 19 nt, Homo sapiens
  misc_RNA (1)...(19): siRNA sense strand
guuuagaagacuuggaguu

SEQ ID NO: 2298431 - RNA, 19 nt, Homo sapiens
  misc_RNA (1)...(19): siRNA sense strand
acgauuuggagaagguaaa

SEQ ID NO: 2298432 - RNA, 19 nt, Homo sapiens
  misc_RNA (1)...(19): siRNA sense strand
ccuuaagucacgagauaga

SEQ ID NO: 2298433 - RNA, 19 nt, Homo sapiens
  misc_RNA (1)...(19): siRNA sense strand
aggcugaggucgaagacau

SEQ ID NO: 2298434 - RNA, 19 nt, Homo sapiens
  misc_RNA (1)...(19): siRNA sense strand
auaaaguagagcaggagaa

SEQ ID NO: 2298435 - RNA, 19 nt, Homo sapiens
  misc_RNA (1)...(19): siRNA sense strand
agaaauggcaagaaguaga

SEQ ID NO: 2298436 - RNA, 19 nt, Homo sapiens
  misc_RNA (1)...(19): siRNA sense strand
ugaacaagaaugugaacuu

SEQ ID NO: 2298437 - RNA, 19 nt, Homo sapiens
  misc_RNA (1)...(19): siRNA sense strand
ggugaauuuggaagugaaa

SEQ ID NO: 2298438 - RNA, 19 nt, Homo sapiens
  misc_RNA (1)...(19): siRNA sense strand
agucugaguuagaagaaca

SEQ ID NO: 2298439 - RNA, 19 nt, Homo sapiens
  misc_RNA (1)...(19): siRNA sense strand
cugaaagccacuauugaaa

SEQ ID NO: 2298440 - RNA, 19 nt, Homo sapiens
  misc_RNA (1)...(19): siRNA sense strand
ccaugaaggagaaggaagu

SEQ ID NO: 2298441 - RNA, 19 nt, Homo sapiens
  misc_RNA (1)...(19): siRNA sense strand
guaaggagaacgagcugaa

SEQ ID NO: 2298442 - RNA, 19 nt, Homo sapiens
  misc_RNA (1)...(19): siRNA sense strand
augaagaccugaaggcaca

SEQ ID NO: 2298443 - RNA, 19 nt, Homo sapiens
  misc_RNA (1)...(19): siRNA sense strand
gggaaguugcagcaugaaa

SEQ ID NO: 2298444 - RNA, 19 nt, Homo sapiens
  misc_RNA (1)...(19): siRNA sense strand
gcacggugacccaggagaa

SEQ ID NO: 2298445 - RNA, 19 nt, Homo sapiens
  misc_RNA (1)...(19): siRNA sense strand
cugaaggaagauugggaau

SEQ ID NO: 2298446 - RNA, 19 nt, Homo sapiens
  misc_RNA (1)...(19): siRNA sense strand
uuaggaaccuggagaguca

SEQ ID NO: 2298447 - RNA, 19 nt, Homo sapiens
  misc_RNA (1)...(19): siRNA sense strand
uguuaaugcaggaagaaga

SEQ ID NO: 2298448 - RNA, 19 nt, Homo sapiens
  misc_RNA (1)...(19): siRNA sense strand
ugaaggacgauuuggagaa

SEQ ID NO: 2298449 - RNA, 19 nt, Homo sapiens
  misc_RNA (1)...(19): siRNA sense strand
ggcagauagacaaguguua

SEQ ID NO: 2298450 - RNA, 19 nt, Homo sapiens
  misc_RNA (1)...(19): siRNA sense strand
cagcagagguugagcguga

SEQ ID NO: 2298451 - RNA, 19 nt, Homo sapiens
  misc_RNA (1)...(19): siRNA sense strand
agaacaaggagaagggcaa

SEQ ID NO: 2298452 - RNA, 19 nt, Homo sapiens
  misc_RNA (1)...(19): siRNA sense strand
gcgaugaggaagaggcaga

SEQ ID NO: 2298453 - RNA, 19 nt, Homo sapiens
  misc_RNA (1)...(19): siRNA sense strand
cagcagauccagaggcaga

SEQ ID NO: 2298454 - RNA, 19 nt, Homo sapiens
  misc_RNA (1)...(19): siRNA sense strand
gggacgugcaccauggaaa

SEQ ID NO: 2298455 - RNA, 19 nt, Homo sapiens
  misc_RNA (1)...(19): siRNA sense strand
cauugagagcgaugaggaa

SEQ ID NO: 2298456 - RNA, 19 nt, Homo sapiens
  misc_RNA (1)...(19): siRNA sense strand
ccgggaggauccagagcau

SEQ ID NO: 2298457 - RNA, 19 nt, Homo sapiens
  misc_RNA (1)...(19): siRNA sense strand
ccauauggaacgaggugca

SEQ ID NO: 2298458 - RNA, 19 nt, Homo sapiens
  misc_RNA (1)...(19): siRNA sense strand
agguugagcgugagcaaga

SEQ ID NO: 2298459 - RNA, 19 nt, Homo sapiens
  misc_RNA (1)...(19): siRNA sense strand
agcaaagacccaaugcaaa

SEQ ID NO: 2298460 - RNA, 19 nt, Homo sapiens
  misc_RNA (1)...(19): siRNA sense strand
ccacaggggagcugaagaa

SEQ ID NO: 2298461 - RNA, 19 nt, Homo sapiens
  misc_RNA (1)...(19): siRNA sense strand
ccaugaagcaccagcagga

SEQ ID NO: 2298462 - RNA, 19 nt, Homo sapiens
  misc_RNA (1)...(19): siRNA sense strand
cagccaagcuucugcagca

SEQ ID NO: 2298463 - RNA, 19 nt, Homo sapiens
  misc_RNA (1)...(19): siRNA sense strand
agagguugagcgugagcaa

SEQ ID NO: 2298464 - RNA, 19 nt, Homo sapiens
  misc_RNA (1)...(19): siRNA sense strand
acgaagaagccgagacggu

SEQ ID NO: 2298465 - RNA, 19 nt, Homo sapiens
  misc_RNA (1)...(19): siRNA sense strand
gaagaagccgagacgguca

SEQ ID NO: 2298466 - RNA, 19 nt, Homo sapiens
  misc_RNA (1)...(19): siRNA sense strand
ucgcugaguuccagaggca

SEQ ID NO: 2298467 - RNA, 19 nt, Homo sapiens
  misc_RNA (1)...(19): siRNA sense strand
aggugaagcaggagcccau

SEQ ID NO: 2298468 - RNA, 19 nt, Homo sapiens
  misc_RNA (1)...(19): siRNA sense strand
agcggaagcuggagaggca

SEQ ID NO: 2298469 - RNA, 19 nt, Homo sapiens
  misc_RNA (1)...(19): siRNA sense strand
aggagcaggagcuggagaa

SEQ ID NO: 2298470 - RNA, 19 nt, Homo sapiens
  misc_RNA (1)...(19): siRNA sense strand
aaggagaagggcaaagaga

SEQ ID NO: 2298471 - RNA, 19 nt, Homo sapiens
  misc_RNA (1)...(19): siRNA sense strand
gaaauuacgguccaggcua

SEQ ID NO: 2298472 - RNA, 19 nt, Homo sapiens
  misc_RNA (1)...(19): siRNA sense strand
cugcagaugaacaagauca

SEQ ID NO: 2298473 - RNA, 19 nt, Homo sapiens
  misc_RNA (1)...(19): siRNA sense strand
ugggagacgcugaguacuu

SEQ ID NO: 2298474 - RNA, 19 nt, Homo sapiens
  misc_RNA (1)...(19): siRNA sense strand
agcucaagaacaaggagaa

SEQ ID NO: 2298475 - RNA, 19 nt, Homo sapiens
  misc_RNA (1)...(19): siRNA sense strand
cagcaacugcagaugaaca

SEQ ID NO: 2298476 - RNA, 19 nt, Homo sapiens
  misc_RNA (1)...(19): siRNA sense strand
uugagagcgaugaggaaga

SEQ ID NO: 2298477 - RNA, 19 nt, Homo sapiens
  misc_RNA (1)...(19): siRNA sense strand
gcgagaacgaagaagccga

SEQ ID NO: 2298478 - RNA, 19 nt, Homo sapiens
  misc_RNA (1)...(19): siRNA sense strand
uggagaaacacaagcagca

SEQ ID NO: 2298479 - RNA, 19 nt, Homo sapiens
  misc_RNA (1)...(19): siRNA sense strand
cgaagcagcugaugggccu

SEQ ID NO: 2298480 - RNA, 19 nt, Homo sapiens
  misc_RNA (1)...(19): siRNA sense strand
agguaaagaagaaaggcaa

SEQ ID NO: 2298481 - RNA, 19 nt, Homo sapiens
  misc_RNA (1)...(19): siRNA sense strand
gggacaacauggaggagga

SEQ ID NO: 2298482 - RNA, 19 nt, Homo sapiens
  misc_RNA (1)...(19): siRNA sense strand
acaacauggaggaggacaa

SEQ ID NO: 2298483 - RNA, 19 nt, Homo sapiens
  misc_RNA (1)...(19): siRNA sense strand
ccaaucuagcggagguaaa

SEQ ID NO: 2298484 - RNA, 19 nt, Homo sapiens
  misc_RNA (1)...(19): siRNA sense strand
cagcgaagaaguaggcaga

SEQ ID NO: 2298485 - RNA, 19 nt, Homo sapiens
  misc_RNA (1)...(19): siRNA sense strand
aguacaugaaugagggaga

SEQ ID NO: 2298486 - RNA, 19 nt, Homo sapiens
  misc_RNA (1)...(19): siRNA sense strand
gugcugaguacguggguca

SEQ ID NO: 2298487 - RNA, 19 nt, Homo sapiens
  misc_RNA (1)...(19): siRNA sense strand
gguucacagccuagaauau

SEQ ID NO: 2298488 - RNA, 19 nt, Homo sapiens
  misc_RNA (1)...(19): siRNA sense strand
gggauguccaccacgguaa

SEQ ID NO: 2298489 - RNA, 19 nt, Homo sapiens
  misc_RNA (1)...(19): siRNA sense strand
cauuaggccuccuggacau

SEQ ID NO: 2298490 - RNA, 19 nt, Homo sapiens
  misc_RNA (1)...(19): siRNA sense strand
cggccaagcaauggaagaa

SEQ ID NO: 2298491 - RNA, 19 nt, Homo sapiens
  misc_RNA (1)...(19): siRNA sense strand
agaggaggcuguaggagga

SEQ ID NO: 2298492 - RNA, 19 nt, Homo sapiens
  misc_RNA (1)...(19): siRNA sense strand
caugaagguagaagacaga

SEQ ID NO: 2298493 - RNA, 19 nt, Homo sapiens
  misc_RNA (1)...(19): siRNA sense strand
guaaagaagaaaggcaaaa

SEQ ID NO: 2298494 - RNA, 19 nt, Homo sapiens
  misc_RNA (1)...(19): siRNA sense strand
acaauguagaggagagcga

SEQ ID NO: 2298495 - RNA, 19 nt, Homo sapiens
  misc_RNA (1)...(19): siRNA sense strand
agcacauguuugaggauga

SEQ ID NO: 2298496 - RNA, 19 nt, Homo sapiens
  misc_RNA (1)...(19): siRNA sense strand
gcgaagaaguaggcagaac

SEQ ID NO: 2298497 - RNA, 19 nt, Homo sapiens
  misc_RNA (1)...(19): siRNA sense strand
gagguaaagaagaaaggca

SEQ ID NO: 2298498 - RNA, 19 nt, Homo sapiens
  misc_RNA (1)...(19): siRNA sense strand
ccacagaggcugagcugcu

SEQ ID NO: 2298499 - RNA, 19 nt, Homo sapiens
  misc_RNA (1)...(19): siRNA sense strand
gggucaugaagguagaaga

SEQ ID NO: 2298500 - RNA, 19 nt, Homo sapiens
  misc_RNA (1)...(19): siRNA sense strand
gggaaagucaccucggcau

SEQ ID NO: 2298501 - RNA, 19 nt, Homo sapiens
  misc_RNA (1)...(19): siRNA sense strand
ggacauggcugauucgaug

SEQ ID NO: 2298502 - RNA, 19 nt, Homo sapiens
  misc_RNA (1)...(19): siRNA sense strand
caauggaagaagaccuaau

SEQ ID NO: 2298503 - RNA, 19 nt, Homo sapiens
  misc_RNA (1)...(19): siRNA sense strand
cugaaaaggaagagcugau

SEQ ID NO: 2298504 - RNA, 19 nt, Homo sapiens
  misc_RNA (1)...(19): siRNA sense strand
acaaccaggcagcgaagaa

SEQ ID NO: 2298505 - RNA, 19 nt, Homo sapiens
  misc_RNA (1)...(19): siRNA sense strand
ugaagguagaagacagaga

SEQ ID NO: 2298506 - RNA, 19 nt, Homo sapiens
  misc_RNA (1)...(19): siRNA sense strand
ccagacuaacucagagaca

SEQ ID NO: 2298507 - RNA, 19 nt, Homo sapiens
  misc_RNA (1)...(19): siRNA sense strand
caccacagguuucggccaa

SEQ ID NO: 2298508 - RNA, 19 nt, Homo sapiens
  misc_RNA (1)...(19): siRNA sense strand
cacugcaacuugugggaca

SEQ ID NO: 2298509 - RNA, 19 nt, Homo sapiens
  misc_RNA (1)...(19): siRNA sense strand
ggcuauaaccugacaucca

SEQ ID NO: 2298510 - RNA, 19 nt, Homo sapiens
  misc_RNA (1)...(19): siRNA sense strand
cuggcuugguguuggauga

SEQ ID NO: 2298511 - RNA, 19 nt, Homo sapiens
  misc_RNA (1)...(19): siRNA sense strand
ggaagcaggcauggggaaa

SEQ ID NO: 2298512 - RNA, 19 nt, Homo sapiens
  misc_RNA (1)...(19): siRNA sense strand
agcaauggaagaagaccua

SEQ ID NO: 2298513 - RNA, 19 nt, Homo sapiens
  misc_RNA (1)...(19): siRNA sense strand
gggaugugcaccacgguca

SEQ ID NO: 2298514 - RNA, 19 nt, Homo sapiens
  misc_RNA (1)...(19): siRNA sense strand
cugggagguucuugugaga

SEQ ID NO: 2298515 - RNA, 19 nt, Homo sapiens
  misc_RNA (1)...(19): siRNA sense strand
uguuggaugagcaguuaaa

SEQ ID NO: 2298516 - RNA, 19 nt, Homo sapiens
  misc_RNA (1)...(19): siRNA sense strand
cugagaccguggagaggga

SEQ ID NO: 2298517 - RNA, 19 nt, Homo sapiens
  misc_RNA (1)...(19): siRNA sense strand
aggacaauguagaggagag

SEQ ID NO: 2298518 - RNA, 19 nt, Homo sapiens
  misc_RNA (1)...(19): siRNA sense strand
ccagacuaucagugggcau

SEQ ID NO: 2298519 - RNA, 19 nt, Homo sapiens
  misc_RNA (1)...(19): siRNA sense strand
ccaccacgguaauggaacu

SEQ ID NO: 2298520 - RNA, 19 nt, Homo sapiens
  misc_RNA (1)...(19): siRNA sense strand
gguaauggaacucagcaca

SEQ ID NO: 2298521 - RNA, 19 nt, Homo sapiens
  misc_RNA (1)...(19): siRNA sense strand
aagcagagguguuggccaa

SEQ ID NO: 2298522 - RNA, 19 nt, Homo sapiens
  misc_RNA (1)...(19): siRNA sense strand
aagagaauguggaaggcaa

SEQ ID NO: 2298523 - RNA, 19 nt, Homo sapiens
  misc_RNA (1)...(19): siRNA sense strand
aggcgaaggcccuggagaa

SEQ ID NO: 2298524 - RNA, 19 nt, Homo sapiens
  misc_RNA (1)...(19): siRNA sense strand
uggcagaccuggaggcagu

SEQ ID NO: 2298525 - RNA, 19 nt, Homo sapiens
  misc_RNA (1)...(19): siRNA sense strand
gcccagaagacgaggagga

SEQ ID NO: 2298526 - RNA, 19 nt, Homo sapiens
  misc_RNA (1)...(19): siRNA sense strand
ccgggauacaagagggaga

SEQ ID NO: 2298527 - RNA, 19 nt, Homo sapiens
  misc_RNA (1)...(19): siRNA sense strand
gcggagaggaugcugggaa

SEQ ID NO: 2298528 - RNA, 19 nt, Homo sapiens
  misc_RNA (1)...(19): siRNA sense strand
ggaaucugcuggagggaag

SEQ ID NO: 2298529 - RNA, 19 nt, Homo sapiens
  misc_RNA (1)...(19): siRNA sense strand
ucacaaagcugcaccagga

SEQ ID NO: 2298530 - RNA, 19 nt, Homo sapiens
  misc_RNA (1)...(19): siRNA sense strand
gcaaagagaauguggaagg

SEQ ID NO: 2298531 - RNA, 19 nt, Homo sapiens
  misc_RNA (1)...(19): siRNA sense strand
gcggaaagcguguuggcca

SEQ ID NO: 2298532 - RNA, 19 nt, Homo sapiens
  misc_RNA (1)...(19): siRNA sense strand
aggcagacuccgucaguga

SEQ ID NO: 2298533 - RNA, 19 nt, Homo sapiens
  misc_RNA (1)...(19): siRNA sense strand
ccuccagugccaagaagaa

SEQ ID NO: 2298534 - RNA, 19 nt, Homo sapiens
  misc_RNA (1)...(19): siRNA sense strand
cagaagacgaggaggagcu

SEQ ID NO: 2298535 - RNA, 19 nt, Homo sapiens
  misc_RNA (1)...(19): siRNA sense strand
acacgagaaagaagaccaa

SEQ ID NO: 2298536 - RNA, 19 nt, Homo sapiens
  misc_RNA (1)...(19): siRNA sense strand
aagaagaagggcagagaag

SEQ ID NO: 2298537 - RNA, 19 nt, Homo sapiens
  misc_RNA (1)...(19): siRNA sense strand
gcucacagcaccagggaag

SEQ ID NO: 2298538 - RNA, 19 nt, Homo sapiens
  misc_RNA (1)...(19): siRNA sense strand
ggugcugccugaagcggaa

SEQ ID NO: 2298539 - RNA, 19 nt, Homo sapiens
  misc_RNA (1)...(19): siRNA sense strand
gcacauggccacugaggcu

SEQ ID NO: 2298540 - RNA, 19 nt, Homo sapiens
  misc_RNA (1)...(19): siRNA sense strand
cuugcagacacgagaaaga

SEQ ID NO: 2298541 - RNA, 19 nt, Homo sapiens
  misc_RNA (1)...(19): siRNA sense strand
gggcagagaagcagaggug

SEQ ID NO: 2298542 - RNA, 19 nt, Homo sapiens
  misc_RNA (1)...(19): siRNA sense strand
aggcggcauugcagaggaa

SEQ ID NO: 2298543 - RNA, 19 nt, Homo sapiens
  misc_RNA (1)...(19): siRNA sense strand
gcgagauggagcagcagau

SEQ ID NO: 2298544 - RNA, 19 nt, Homo sapiens
  misc_RNA (1)...(19): siRNA sense strand
gcacaacaccaccggcaca

SEQ ID NO: 2298545 - RNA, 19 nt, Homo sapiens
  misc_RNA (1)...(19): siRNA sense strand
uagacauucugcugggaga

SEQ ID NO: 2298546 - RNA, 19 nt, Homo sapiens
  misc_RNA (1)...(19): siRNA sense strand
gcagacaggagcuggagga

SEQ ID NO: 2298547 - RNA, 19 nt, Homo sapiens
  misc_RNA (1)...(19): siRNA sense strand
cggaaagcguguuggccac

SEQ ID NO: 2298548 - RNA, 19 nt, Homo sapiens
  misc_RNA (1)...(19): siRNA sense strand
ccuacaacuucgaggagag

SEQ ID NO: 2298549 - RNA, 19 nt, Homo sapiens
  misc_RNA (1)...(19): siRNA sense strand
aacagaaccuggaggccau

SEQ ID NO: 2298550 - RNA, 19 nt, Homo sapiens
  misc_RNA (1)...(19): siRNA sense strand
uggaaauaguggagcggau

SEQ ID NO: 2298551 - RNA, 19 nt, Homo sapiens
  misc_RNA (1)...(19): siRNA sense strand
ggauggacgaugagcggua

SEQ ID NO: 2298552 - RNA, 19 nt, Homo sapiens
  misc_RNA (1)...(19): siRNA sense strand
ccgaggaggacuugggaga

SEQ ID NO: 2298553 - RNA, 19 nt, Homo sapiens
  misc_RNA (1)...(19): siRNA sense strand
guuacaagaacaugggaga

SEQ ID NO: 2298554 - RNA, 19 nt, Homo sapiens
  misc_RNA (1)...(19): siRNA sense strand
caaucacagaggugguaaa

SEQ ID NO: 2298555 - RNA, 19 nt, Homo sapiens
  misc_RNA (1)...(19): siRNA sense strand
ccgcaagaaccguuguaau

SEQ ID NO: 2298556 - RNA, 19 nt, Homo sapiens
  misc_RNA (1)...(19): siRNA sense strand
augaggaacaagaggaaca

SEQ ID NO: 2298557 - RNA, 19 nt, Homo sapiens
  misc_RNA (1)...(19): siRNA sense strand
cggcuugagcauugguauu

SEQ ID NO: 2298558 - RNA, 19 nt, Homo sapiens
  misc_RNA (1)...(19): siRNA sense strand
aaaugaggaacaagaggaa

SEQ ID NO: 2298559 - RNA, 19 nt, Homo sapiens
  misc_RNA (1)...(19): siRNA sense strand
gcuacaaugccaagaaaau

SEQ ID NO: 2298560 - RNA, 19 nt, Homo sapiens
  misc_RNA (1)...(19): siRNA sense strand
gccaagaaaaugaggaaca

SEQ ID NO: 2298561 - RNA, 19 nt, Homo sapiens
  misc_RNA (1)...(19): siRNA sense strand
cgggugaagucuggggaaa

SEQ ID NO: 2298562 - RNA, 19 nt, Homo sapiens
  misc_RNA (1)...(19): siRNA sense strand
aacaagaggaacagcaaaa

SEQ ID NO: 2298563 - RNA, 19 nt, Homo sapiens
  misc_RNA (1)...(19): siRNA sense strand
ugguaaaaugugagcauga

SEQ ID NO: 2298564 - RNA, 19 nt, Homo sapiens
  misc_RNA (1)...(19): siRNA sense strand
gaacaaucacagagguggu

SEQ ID NO: 2298565 - RNA, 19 nt, Homo sapiens
  misc_RNA (1)...(19): siRNA sense strand
cuccaaggacccagagcau

SEQ ID NO: 2298566 - RNA, 19 nt, Homo sapiens
  misc_RNA (1)...(19): siRNA sense strand
aguuucaacaugacagcua

SEQ ID NO: 2298567 - RNA, 19 nt, Homo sapiens
  misc_RNA (1)...(19): siRNA sense strand
ucaacgaugucuugggauc

SEQ ID NO: 2298568 - RNA, 19 nt, Homo sapiens
  misc_RNA (1)...(19): siRNA sense strand
ggacagacuggguggccaa

SEQ ID NO: 2298569 - RNA, 19 nt, Homo sapiens
  misc_RNA (1)...(19): siRNA sense strand
ggagugugcuuaugggcaa

SEQ ID NO: 2298570 - RNA, 19 nt, Homo sapiens
  misc_RNA (1)...(19): siRNA sense strand
uggacuugcaagagaauua

SEQ ID NO: 2298571 - RNA, 19 nt, Homo sapiens
  misc_RNA (1)...(19): siRNA sense strand
gugacuggccagaaggaua

SEQ ID NO: 2298572 - RNA, 19 nt, Homo sapiens
  misc_RNA (1)...(19): siRNA sense strand
acuuauaauccuacagcaa

SEQ ID NO: 2298573 - RNA, 19 nt, Homo sapiens
  misc_RNA (1)...(19): siRNA sense strand
aggaaaucuuggaaguuau

SEQ ID NO: 2298574 - RNA, 19 nt, Homo sapiens
  misc_RNA (1)...(19): siRNA sense strand
cuccaaagcaacagaguca

SEQ ID NO: 2298575 - RNA, 19 nt, Homo sapiens
  misc_RNA (1)...(19): siRNA sense strand
aaguuaagucucugaagaa

SEQ ID NO: 2298576 - RNA, 19 nt, Homo sapiens
  misc_RNA (1)...(19): siRNA sense strand
aagaaacgaccgacagcaa

SEQ ID NO: 2298577 - RNA, 19 nt, Homo sapiens
  misc_RNA (1)...(19): siRNA sense strand
uuguauggguccagagcuu

SEQ ID NO: 2298578 - RNA, 19 nt, Homo sapiens
  misc_RNA (1)...(19): siRNA sense strand
gggaugaaugcaugaacuu

SEQ ID NO: 2298579 - RNA, 19 nt, Homo sapiens
  misc_RNA (1)...(19): siRNA sense strand
aguuaagucucugaagaaa

SEQ ID NO: 2298580 - RNA, 19 nt, Homo sapiens
  misc_RNA (1)...(19): siRNA sense strand
ggguccagagcuugugaaa

SEQ ID NO: 2298581 - RNA, 19 nt, Homo sapiens
  misc_RNA (1)...(19): siRNA sense strand
cuugauagccaguggaaag

SEQ ID NO: 2298582 - RNA, 19 nt, Homo sapiens
  misc_RNA (1)...(19): siRNA sense strand
cuuacaaucagucaggaua

SEQ ID NO: 2298583 - RNA, 19 nt, Homo sapiens
  misc_RNA (1)...(19): siRNA sense strand
ccgaaauguugaauuggga

SEQ ID NO: 2298584 - RNA, 19 nt, Homo sapiens
  misc_RNA (1)...(19): siRNA sense strand
gguauuaggcccuucguca

SEQ ID NO: 2298585 - RNA, 19 nt, Homo sapiens
  misc_RNA (1)...(19): siRNA sense strand
ucagaauauaccuggaaca

SEQ ID NO: 2298586 - RNA, 19 nt, Homo sapiens
  misc_RNA (1)...(19): siRNA sense strand
gugcaugggaggacagacu

SEQ ID NO: 2298587 - RNA, 19 nt, Homo sapiens
  misc_RNA (1)...(19): siRNA sense strand
ccacagaaccugagcgucc

SEQ ID NO: 2298588 - RNA, 19 nt, Homo sapiens
  misc_RNA (1)...(19): siRNA sense strand
ugcuuaugggcaagaguaa

SEQ ID NO: 2298589 - RNA, 19 nt, Homo sapiens
  misc_RNA (1)...(19): siRNA sense strand
guauuaggcccuucgucaa

SEQ ID NO: 2298590 - RNA, 19 nt, Homo sapiens
  misc_RNA (1)...(19): siRNA sense strand
aguuggaggacuaugauuu

SEQ ID NO: 2298591 - RNA, 19 nt, Homo sapiens
  misc_RNA (1)...(19): siRNA sense strand
uuacaaucagucaggauau

SEQ ID NO: 2298592 - RNA, 19 nt, Homo sapiens
  misc_RNA (1)...(19): siRNA sense strand
gauacacaaccaugagaca

SEQ ID NO: 2298593 - RNA, 19 nt, Homo sapiens
  misc_RNA (1)...(19): siRNA sense strand
aggcauugaaacacccaua

SEQ ID NO: 2298594 - RNA, 19 nt, Homo sapiens
  misc_RNA (1)...(19): siRNA sense strand
ucgaucagguuguuggaca

SEQ ID NO: 2298595 - RNA, 19 nt, Homo sapiens
  misc_RNA (1)...(19): siRNA sense strand
gcaagagaauuaaggucac

SEQ ID NO: 2298596 - RNA, 19 nt, Homo sapiens
  misc_RNA (1)...(19): siRNA sense strand
guaucauggcugaacucua

SEQ ID NO: 2298597 - RNA, 19 nt, Homo sapiens
  misc_RNA (1)...(19): siRNA sense strand
ccauuagaaucaaagccau

SEQ ID NO: 2298598 - RNA, 19 nt, Homo sapiens
  misc_RNA (1)...(19): siRNA sense strand
ggacaugaaaccagaaaac

SEQ ID NO: 2298599 - RNA, 19 nt, Homo sapiens
  misc_RNA (1)...(19): siRNA sense strand
ugcaagagaauuaagguca

SEQ ID NO: 2298600 - RNA, 19 nt, Homo sapiens
  misc_RNA (1)...(19): siRNA sense strand
caagccaggcauugaaaca

SEQ ID NO: 2298601 - RNA, 19 nt, Homo sapiens
  misc_RNA (1)...(19): siRNA sense strand
ccguagaggccuuggaaaa

SEQ ID NO: 2298602 - RNA, 19 nt, Homo sapiens
  misc_RNA (1)...(19): siRNA sense strand
aguugaaaucagagaggaa

SEQ ID NO: 2298603 - RNA, 19 nt, Homo sapiens
  misc_RNA (1)...(19): siRNA sense strand
uugaaaucagagaggaaua

SEQ ID NO: 2298604 - RNA, 19 nt, Homo sapiens
  misc_RNA (1)...(19): siRNA sense strand
auguauauguggagacuga

SEQ ID NO: 2298605 - RNA, 19 nt, Homo sapiens
  misc_RNA (1)...(19): siRNA sense strand
acgcuuuguugguggacua

SEQ ID NO: 2298606 - RNA, 19 nt, Homo sapiens
  misc_RNA (1)...(19): siRNA sense strand
agaaaagggcaaagaucaa

SEQ ID NO: 2298607 - RNA, 19 nt, Homo sapiens
  misc_RNA (1)...(19): siRNA sense strand
augaaacaugcuuggaaua

SEQ ID NO: 2298608 - RNA, 19 nt, Homo sapiens
  misc_RNA (1)...(19): siRNA sense strand
gggaagccguagaggccuu

SEQ ID NO: 2298609 - RNA, 19 nt, Homo sapiens
  misc_RNA (1)...(19): siRNA sense strand
ucgaaagaaagcaguggaa

SEQ ID NO: 2298610 - RNA, 19 nt, Homo sapiens
  misc_RNA (1)...(19): siRNA sense strand
gcuacaagacaaaaugaaa

SEQ ID NO: 2298611 - RNA, 19 nt, Homo sapiens
  misc_RNA (1)...(19): siRNA sense strand
acauccuacuggagaagaa

SEQ ID NO: 2298612 - RNA, 19 nt, Homo sapiens
  misc_RNA (1)...(19): siRNA sense strand
uguaucaguuggaggacuu

SEQ ID NO: 2298613 - RNA, 19 nt, Homo sapiens
  misc_RNA (1)...(19): siRNA sense strand
cuuauaucgcagaguggaa

SEQ ID NO: 2298614 - RNA, 19 nt, Homo sapiens
  misc_RNA (1)...(19): siRNA sense strand
agaagaagaagguggccca

SEQ ID NO: 2298615 - RNA, 19 nt, Homo sapiens
  misc_RNA (1)...(19): siRNA sense strand
acaugaauuugaagaagca

SEQ ID NO: 2298616 - RNA, 19 nt, Homo sapiens
  misc_RNA (1)...(19): siRNA sense strand
ucauacucccucuggaaua

SEQ ID NO: 2298617 - RNA, 19 nt, Homo sapiens
  misc_RNA (1)...(19): siRNA sense strand
auggagacuuacauguaua

SEQ ID NO: 2298618 - RNA, 19 nt, Homo sapiens
  misc_RNA (1)...(19): siRNA sense strand
aaaccauugcagagugaau

SEQ ID NO: 2298619 - RNA, 19 nt, Homo sapiens
  misc_RNA (1)...(19): siRNA sense strand
gguuaugccuggggauuaa

SEQ ID NO: 2298620 - RNA, 19 nt, Homo sapiens
  misc_RNA (1)...(19): siRNA sense strand
ggcaaagaucaaagagaug

SEQ ID NO: 2298621 - RNA, 19 nt, Homo sapiens
  misc_RNA (1)...(19): siRNA sense strand
gguaacaucaaaggagcaa

SEQ ID NO: 2298622 - RNA, 19 nt, Homo sapiens
  misc_RNA (1)...(19): siRNA sense strand
ggccagaaguuauggagac

SEQ ID NO: 2298623 - RNA, 19 nt, Homo sapiens
  misc_RNA (1)...(19): siRNA sense strand
agggcaaagaucaaagaga

SEQ ID NO: 2298624 - RNA, 19 nt, Homo sapiens
  misc_RNA (1)...(19): siRNA sense strand
aggagcaacuauaguagau

SEQ ID NO: 2298625 - RNA, 19 nt, Homo sapiens
  misc_RNA (1)...(19): siRNA sense strand
caguggaacuugggguaaa

SEQ ID NO: 2298626 - RNA, 19 nt, Homo sapiens
  misc_RNA (1)...(19): siRNA sense strand
cugaauaugaaaaguggua

SEQ ID NO: 2298627 - RNA, 19 nt, Homo sapiens
  misc_RNA (1)...(19): siRNA sense strand
ccguacuugucaugaauca

SEQ ID NO: 2298628 - RNA, 19 nt, Homo sapiens
  misc_RNA (1)...(19): siRNA sense strand
uugcugaaggccugguuaa

SEQ ID NO: 2298629 - RNA, 19 nt, Homo sapiens
  misc_RNA (1)...(19): siRNA sense strand
ccuacuaucugucuggaga

SEQ ID NO: 2298630 - RNA, 19 nt, Homo sapiens
  misc_RNA (1)...(19): siRNA sense strand
cggagaaguucgugcugcu

SEQ ID NO: 2298631 - RNA, 19 nt, Homo sapiens
  misc_RNA (1)...(19): siRNA sense strand
aggaaaugggccugggaag

SEQ ID NO: 2298632 - RNA, 19 nt, Homo sapiens
  misc_RNA (1)...(19): siRNA sense strand
agaagaagguggcccagga

SEQ ID NO: 2298633 - RNA, 19 nt, Homo sapiens
  misc_RNA (1)...(19): siRNA sense strand
auuugauggugguguugaa

SEQ ID NO: 2298634 - RNA, 19 nt, Homo sapiens
  misc_RNA (1)...(19): siRNA sense strand
augaugugcagcagaguuu

SEQ ID NO: 2298635 - RNA, 19 nt, Homo sapiens
  misc_RNA (1)...(19): siRNA sense strand
gcugaggagaugugggaau

SEQ ID NO: 2298636 - RNA, 19 nt, Homo sapiens
  misc_RNA (1)...(19): siRNA sense strand
cugugaugaacuaggaaua

SEQ ID NO: 2298637 - RNA, 19 nt, Homo sapiens
  misc_RNA (1)...(19): siRNA sense strand
ugaaauuagcaaauggcaa

SEQ ID NO: 2298638 - RNA, 19 nt, Homo sapiens
  misc_RNA (1)...(19): siRNA sense strand
caucauauggaguggcaau

SEQ ID NO: 2298639 - RNA, 19 nt, Homo sapiens
  misc_RNA (1)...(19): siRNA sense strand
agggagauuuagugacaau

SEQ ID NO: 2298640 - RNA, 19 nt, Homo sapiens
  misc_RNA (1)...(19): siRNA sense strand
cgagauaguggaucagcaa

SEQ ID NO: 2298641 - RNA, 19 nt, Homo sapiens
  misc_RNA (1)...(19): siRNA sense strand
uguuagaauugaagccuau

SEQ ID NO: 2298642 - RNA, 19 nt, Homo sapiens
  misc_RNA (1)...(19): siRNA sense strand
gaugaaaggaggagaggcu

SEQ ID NO: 2298643 - RNA, 19 nt, Homo sapiens
  misc_RNA (1)...(19): siRNA sense strand
cuaugaacucugugaugaa

SEQ ID NO: 2298644 - RNA, 19 nt, Homo sapiens
  misc_RNA (1)...(19): siRNA sense strand
caucaaggacuaugugaca

SEQ ID NO: 2298645 - RNA, 19 nt, Homo sapiens
  misc_RNA (1)...(19): siRNA sense strand
gugaacauuagcaagaaua

SEQ ID NO: 2298646 - RNA, 19 nt, Homo sapiens
  misc_RNA (1)...(19): siRNA sense strand
gcaagaaugaguuggagca

SEQ ID NO: 2298647 - RNA, 19 nt, Homo sapiens
  misc_RNA (1)...(19): siRNA sense strand
gcagaagggugaaugccau

SEQ ID NO: 2298648 - RNA, 19 nt, Homo sapiens
  misc_RNA (1)...(19): siRNA sense strand
acugagaagacacgaacua

SEQ ID NO: 2298649 - RNA, 19 nt, Homo sapiens
  misc_RNA (1)...(19): siRNA sense strand
augaauacucuucggguuu

SEQ ID NO: 2298650 - RNA, 19 nt, Homo sapiens
  misc_RNA (1)...(19): siRNA sense strand
uggaguggcaauaaugaaa

SEQ ID NO: 2298651 - RNA, 19 nt, Homo sapiens
  misc_RNA (1)...(19): siRNA sense strand
guggaugcuaauaugaaua

SEQ ID NO: 2298652 - RNA, 19 nt, Homo sapiens
  misc_RNA (1)...(19): siRNA sense strand
gaccuauagcaaagaauuu

SEQ ID NO: 2298653 - RNA, 19 nt, Homo sapiens
  misc_RNA (1)...(19): siRNA sense strand
caggaguggaaucuggaaa

SEQ ID NO: 2298654 - RNA, 19 nt, Homo sapiens
  misc_RNA (1)...(19): siRNA sense strand
aggaguggaaucuggaaau

SEQ ID NO: 2298655 - RNA, 19 nt, Homo sapiens
  misc_RNA (1)...(19): siRNA sense strand
gggcugaaacuguugcaga

SEQ ID NO: 2298656 - RNA, 19 nt, Homo sapiens
  misc_RNA (1)...(19): siRNA sense strand
cugaggagaugugggaauu

SEQ ID NO: 2298657 - RNA, 19 nt, Homo sapiens
  misc_RNA (1)...(19): siRNA sense strand
gguuuggggaggaggaauu

SEQ ID NO: 2298658 - RNA, 19 nt, Homo sapiens
  misc_RNA (1)...(19): siRNA sense strand
ccuccuuaacagauauuua

SEQ ID NO: 2298659 - RNA, 19 nt, Homo sapiens
  misc_RNA (1)...(19): siRNA sense strand
gaugggucucuuuggauaa

SEQ ID NO: 2298660 - RNA, 19 nt, Homo sapiens
  misc_RNA (1)...(19): siRNA sense strand
augcagcacagcagagcaa

SEQ ID NO: 2298661 - RNA, 19 nt, Homo sapiens
  misc_RNA (1)...(19): siRNA sense strand
ugcaaacacaacagacaua

SEQ ID NO: 2298662 - RNA, 19 nt, Homo sapiens
  misc_RNA (1)...(19): siRNA sense strand
ucuggaaagauguuagaau

SEQ ID NO: 2298663 - RNA, 19 nt, Homo sapiens
  misc_RNA (1)...(19): siRNA sense strand
ccagaucaagagacugaaa

SEQ ID NO: 2298664 - RNA, 19 nt, Homo sapiens
  misc_RNA (1)...(19): siRNA sense strand
agucuguuguggaugcuaa

SEQ ID NO: 2298665 - RNA, 19 nt, Homo sapiens
  misc_RNA (1)...(19): siRNA sense strand
uuuaugagcaggaugaauu

SEQ ID NO: 2298666 - RNA, 19 nt, Homo sapiens
  misc_RNA (1)...(19): siRNA sense strand
aggaugaauucuaugaacu

SEQ ID NO: 2298667 - RNA, 19 nt, Homo sapiens
  misc_RNA (1)...(19): siRNA sense strand
gaauaaugguauggcagga

SEQ ID NO: 2298668 - RNA, 19 nt, Homo sapiens
  misc_RNA (1)...(19): siRNA sense strand
ccuaccagaucaagagacu

SEQ ID NO: 2298669 - RNA, 19 nt, Homo sapiens
  misc_RNA (1)...(19): siRNA sense strand
ucgauuugcaucugaauau

SEQ ID NO: 2298670 - RNA, 19 nt, Homo sapiens
  misc_RNA (1)...(19): siRNA sense strand
gcgagauaguggaucagca

SEQ ID NO: 2298671 - RNA, 19 nt, Homo sapiens
  misc_RNA (1)...(19): siRNA sense strand
aaauuugauucuugaggga

SEQ ID NO: 2298672 - RNA, 19 nt, Homo sapiens
  misc_RNA (1)...(19): siRNA sense strand
aaaggauuguugagcuauu

SEQ ID NO: 2298673 - RNA, 19 nt, Homo sapiens
  misc_RNA (1)...(19): siRNA sense strand
ggauucagugacagcagaa

SEQ ID NO: 2298674 - RNA, 19 nt, Homo sapiens
  misc_RNA (1)...(19): siRNA sense strand
caagaaugaguuggagcaa

SEQ ID NO: 2298675 - RNA, 19 nt, Homo sapiens
  misc_RNA (1)...(19): siRNA sense strand
guacggaggaaaguggaaa

SEQ ID NO: 2298676 - RNA, 19 nt, Homo sapiens
  misc_RNA (1)...(19): siRNA sense strand
gugaaugccaugucaacuu

SEQ ID NO: 2298677 - RNA, 19 nt, Homo sapiens
  misc_RNA (1)...(19): siRNA sense strand
auguuagaauugaagccua

SEQ ID NO: 2298678 - RNA, 19 nt, Homo sapiens
  misc_RNA (1)...(19): siRNA sense strand
aaagccaguugguggucaa

SEQ ID NO: 2298679 - RNA, 19 nt, Homo sapiens
  misc_RNA (1)...(19): siRNA sense strand
ugugacacucuaugugaaa

SEQ ID NO: 2298680 - RNA, 19 nt, Homo sapiens
  misc_RNA (1)...(19): siRNA sense strand
ucugaauugcugaggagau

SEQ ID NO: 2298681 - RNA, 19 nt, Homo sapiens
  misc_RNA (1)...(19): siRNA sense strand
guagaaacuugguggccuc

SEQ ID NO: 2298682 - RNA, 19 nt, Homo sapiens
  misc_RNA (1)...(19): siRNA sense strand
cuggauggaggcuuaaaua

SEQ ID NO: 2298683 - RNA, 19 nt, Homo sapiens
  misc_RNA (1)...(19): siRNA sense strand
agacaagagucguccuuuu

SEQ ID NO: 2298684 - RNA, 19 nt, Homo sapiens
  misc_RNA (1)...(19): siRNA sense strand
ggaugaggccauugagaaa

SEQ ID NO: 2298685 - RNA, 19 nt, Homo sapiens
  misc_RNA (1)...(19): siRNA sense strand
agacaaacaggaagggaaa

SEQ ID NO: 2298686 - RNA, 19 nt, Homo sapiens
  misc_RNA (1)...(19): siRNA sense strand
caaagaaagaaguggcuaa

SEQ ID NO: 2298687 - RNA, 19 nt, Homo sapiens
  misc_RNA (1)...(19): siRNA sense strand
guuuagaaguguaggcaau

SEQ ID NO: 2298688 - RNA, 19 nt, Homo sapiens
  misc_RNA (1)...(19): siRNA sense strand
agguaaagccugaagacaa

SEQ ID NO: 2298689 - RNA, 19 nt, Homo sapiens
  misc_RNA (1)...(19): siRNA sense strand
ccggaaagccaaaggagaa

SEQ ID NO: 2298690 - RNA, 19 nt, Homo sapiens
  misc_RNA (1)...(19): siRNA sense strand
ccaaagaacucgaagcuga

SEQ ID NO: 2298691 - RNA, 19 nt, Homo sapiens
  misc_RNA (1)...(19): siRNA sense strand
agaaagaaucuguggaaaa

SEQ ID NO: 2298692 - RNA, 19 nt, Homo sapiens
  misc_RNA (1)...(19): siRNA sense strand
aaucgaagacgaagagaaa

SEQ ID NO: 2298693 - RNA, 19 nt, Homo sapiens
  misc_RNA (1)...(19): siRNA sense strand
acaagaaagaggagaaaga

SEQ ID NO: 2298694 - RNA, 19 nt, Homo sapiens
  misc_RNA (1)...(19): siRNA sense strand
aagaaagaggagaaagaaa

SEQ ID NO: 2298695 - RNA, 19 nt, Homo sapiens
  misc_RNA (1)...(19): siRNA sense strand
ccaagaaguaguugaagaa

SEQ ID NO: 2298696 - RNA, 19 nt, Homo sapiens
  misc_RNA (1)...(19): siRNA sense strand
cagcaaacccugcggagaa

SEQ ID NO: 2298697 - RNA, 19 nt, Homo sapiens
  misc_RNA (1)...(19): siRNA sense strand
aaacaaagguaaagccuga

SEQ ID NO: 2298698 - RNA, 19 nt, Homo sapiens
  misc_RNA (1)...(19): siRNA sense strand
ccgaagaagacauggauga

SEQ ID NO: 2298699 - RNA, 19 nt, Homo sapiens
  misc_RNA (1)...(19): siRNA sense strand
gccuaauggucaagaagua

SEQ ID NO: 2298700 - RNA, 19 nt, Homo sapiens
  misc_RNA (1)...(19): siRNA sense strand
cuaugagaccauugggaaa

SEQ ID NO: 2298701 - RNA, 19 nt, Homo sapiens
  misc_RNA (1)...(19): siRNA sense strand
uuaagaaggaagagaagaa

SEQ ID NO: 2298702 - RNA, 19 nt, Homo sapiens
  misc_RNA (1)...(19): siRNA sense strand
agaaaagaguggaaaacaa

SEQ ID NO: 2298703 - RNA, 19 nt, Homo sapiens
  misc_RNA (1)...(19): siRNA sense strand
agaaagacaaggagaccaa

SEQ ID NO: 2298704 - RNA, 19 nt, Homo sapiens
  misc_RNA (1)...(19): siRNA sense strand
uuaugaaaccacugagaaa

SEQ ID NO: 2298705 - RNA, 19 nt, Homo sapiens
  misc_RNA (1)...(19): siRNA sense strand
cccuaaagacgcaaagaaa

SEQ ID NO: 2298706 - RNA, 19 nt, Homo sapiens
  misc_RNA (1)...(19): siRNA sense strand
agaaguaguugaagaacau

SEQ ID NO: 2298707 - RNA, 19 nt, Homo sapiens
  misc_RNA (1)...(19): siRNA sense strand
ccaggagacccaugagaaa

SEQ ID NO: 2298708 - RNA, 19 nt, Homo sapiens
  misc_RNA (1)...(19): siRNA sense strand
ccaagaaagagguuaagaa

SEQ ID NO: 2298709 - RNA, 19 nt, Homo sapiens
  misc_RNA (1)...(19): siRNA sense strand
agaaagaggagaaagaaaa

SEQ ID NO: 2298710 - RNA, 19 nt, Homo sapiens
  misc_RNA (1)...(19): siRNA sense strand
cuacagaagucauugaaaa

SEQ ID NO: 2298711 - RNA, 19 nt, Homo sapiens
  misc_RNA (1)...(19): siRNA sense strand
acgcuuuguuggaaggaaa

SEQ ID NO: 2298712 - RNA, 19 nt, Homo sapiens
  misc_RNA (1)...(19): siRNA sense strand
aagacaagaaagaggagaa

SEQ ID NO: 2298713 - RNA, 19 nt, Homo sapiens
  misc_RNA (1)...(19): siRNA sense strand
gucaagagcagcaaggaaa

SEQ ID NO: 2298714 - RNA, 19 nt, Homo sapiens
  misc_RNA (1)...(19): siRNA sense strand
aaacagugguccugaucaa

SEQ ID NO: 2298715 - RNA, 19 nt, Homo sapiens
  misc_RNA (1)...(19): siRNA sense strand
aggaagagucugucaagaa

SEQ ID NO: 2298716 - RNA, 19 nt, Homo sapiens
  misc_RNA (1)...(19): siRNA sense strand
aagaaguaguugaagaaca

SEQ ID NO: 2298717 - RNA, 19 nt, Homo sapiens
  misc_RNA (1)...(19): siRNA sense strand
cacccaaaguugaaagcaa

SEQ ID NO: 2298718 - RNA, 19 nt, Homo sapiens
  misc_RNA (1)...(19): siRNA sense strand
acccaaaguugaaagcaaa

SEQ ID NO: 2298719 - RNA, 19 nt, Homo sapiens
  misc_RNA (1)...(19): siRNA sense strand
aagaaaagguaauggugaa

SEQ ID NO: 2298720 - RNA, 19 nt, Homo sapiens
  misc_RNA (1)...(19): siRNA sense strand
cuaucaagaaggaggaaaa

SEQ ID NO: 2298721 - RNA, 19 nt, Homo sapiens
  misc_RNA (1)...(19): siRNA sense strand
gggcgaaugugaacagaca

SEQ ID NO: 2298722 - RNA, 19 nt, Homo sapiens
  misc_RNA (1)...(19): siRNA sense strand
aagaaaagccaaagaaaga

SEQ ID NO: 2298723 - RNA, 19 nt, Homo sapiens
  misc_RNA (1)...(19): siRNA sense strand
agagaagaaggaagugaaa

SEQ ID NO: 2298724 - RNA, 19 nt, Homo sapiens
  misc_RNA (1)...(19): siRNA sense strand
augccagagaggaggaaua

SEQ ID NO: 2298725 - RNA, 19 nt, Homo sapiens
  misc_RNA (1)...(19): siRNA sense strand
cgacaaggcugcagaggcu

SEQ ID NO: 2298726 - RNA, 19 nt, Homo sapiens
  misc_RNA (1)...(19): siRNA sense strand
aagaaagaucugaaagaga

SEQ ID NO: 2298727 - RNA, 19 nt, Homo sapiens
  misc_RNA (1)...(19): siRNA sense strand
agaaagaaacaccgccaaa

SEQ ID NO: 2298728 - RNA, 19 nt, Homo sapiens
  misc_RNA (1)...(19): siRNA sense strand
cgccaaaggaagucaagaa

SEQ ID NO: 2298729 - RNA, 19 nt, Homo sapiens
  misc_RNA (1)...(19): siRNA sense strand
ccuaaagacgcaaagaaau

SEQ ID NO: 2298730 - RNA, 19 nt, Homo sapiens
  misc_RNA (1)...(19): siRNA sense strand
cccaagaaguaguugaaga

SEQ ID NO: 2298731 - RNA, 19 nt, Homo sapiens
  misc_RNA (1)...(19): siRNA sense strand
ugaagaaaagaguggaaaa

SEQ ID NO: 2298732 - RNA, 19 nt, Homo sapiens
  misc_RNA (1)...(19): siRNA sense strand
acaaauagugacuggauga

SEQ ID NO: 2298733 - RNA, 19 nt, Homo sapiens
  misc_RNA (1)...(19): siRNA sense strand
ccaacaaagacaaggcuga

SEQ ID NO: 2298734 - RNA, 19 nt, Homo sapiens
  misc_RNA (1)...(19): siRNA sense strand
agacaagaaagaggagaaa

SEQ ID NO: 2298735 - RNA, 19 nt, Homo sapiens
  misc_RNA (1)...(19): siRNA sense strand
gggaagagaaagacaagga

SEQ ID NO: 2298736 - RNA, 19 nt, Homo sapiens
  misc_RNA (1)...(19): siRNA sense strand
ccacagaugucaaacccaa

SEQ ID NO: 2298737 - RNA, 19 nt, Homo sapiens
  misc_RNA (1)...(19): siRNA sense strand
gaaagaaaagccaaagaaa

SEQ ID NO: 2298738 - RNA, 19 nt, Homo sapiens
  misc_RNA (1)...(19): siRNA sense strand
ucauuaagaaggaaggcaa

SEQ ID NO: 2298739 - RNA, 19 nt, Homo sapiens
  misc_RNA (1)...(19): siRNA sense strand
aagacaaacaggaagggaa

SEQ ID NO: 2298740 - RNA, 19 nt, Homo sapiens
  misc_RNA (1)...(19): siRNA sense strand
ugaagaacccacugaagaa

SEQ ID NO: 2298741 - RNA, 19 nt, Homo sapiens
  misc_RNA (1)...(19): siRNA sense strand
ugacaauuugccuggaaua

SEQ ID NO: 2298742 - RNA, 19 nt, Homo sapiens
  misc_RNA (1)...(19): siRNA sense strand
aggcugaugaggaggacaa

SEQ ID NO: 2298743 - RNA, 19 nt, Homo sapiens
  misc_RNA (1)...(19): siRNA sense strand
ccauggaggaagacaaauu

SEQ ID NO: 2298744 - RNA, 19 nt, Homo sapiens
  misc_RNA (1)...(19): siRNA sense strand
cagcaguuccagugaguuu

SEQ ID NO: 2298745 - RNA, 19 nt, Homo sapiens
  misc_RNA (1)...(19): siRNA sense strand
ucagaagugaugagggaau

SEQ ID NO: 2298746 - RNA, 19 nt, Homo sapiens
  misc_RNA (1)...(19): siRNA sense strand
agaucaagaaagaagagaa

SEQ ID NO: 2298747 - RNA, 19 nt, Homo sapiens
  misc_RNA (1)...(19): siRNA sense strand
aagagaaacugaaggaaac

SEQ ID NO: 2298748 - RNA, 19 nt, Homo sapiens
  misc_RNA (1)...(19): siRNA sense strand
augagaagauagagagaac

SEQ ID NO: 2298749 - RNA, 19 nt, Homo sapiens
  misc_RNA (1)...(19): siRNA sense strand
ucaagaaggaaguuaagaa

SEQ ID NO: 2298750 - RNA, 19 nt, Homo sapiens
  misc_RNA (1)...(19): siRNA sense strand
aggaagagaagaaggaagu

SEQ ID NO: 2298751 - RNA, 19 nt, Homo sapiens
  misc_RNA (1)...(19): siRNA sense strand
uugaagaguuaaaggcuga

SEQ ID NO: 2298752 - RNA, 19 nt, Homo sapiens
  misc_RNA (1)...(19): siRNA sense strand
aggcggaggcugaugcaua

SEQ ID NO: 2298753 - RNA, 19 nt, Homo sapiens
  misc_RNA (1)...(19): siRNA sense strand
aaauggaagcugaagacua

SEQ ID NO: 2298754 - RNA, 19 nt, Homo sapiens
  misc_RNA (1)...(19): siRNA sense strand
augccaaagaugagaauga

SEQ ID NO: 2298755 - RNA, 19 nt, Homo sapiens
  misc_RNA (1)...(19): siRNA sense strand
gcuauuacuaugagaagau

SEQ ID NO: 2298756 - RNA, 19 nt, Homo sapiens
  misc_RNA (1)...(19): siRNA sense strand
gagaagauagagagaacca

SEQ ID NO: 2298757 - RNA, 19 nt, Homo sapiens
  misc_RNA (1)...(19): siRNA sense strand
augcaagauugaacuguaa

SEQ ID NO: 2298758 - RNA, 19 nt, Homo sapiens
  misc_RNA (1)...(19): siRNA sense strand
ccgaggagcaguauggauu

SEQ ID NO: 2298759 - RNA, 19 nt, Homo sapiens
  misc_RNA (1)...(19): siRNA sense strand
ggaugaggccauugagaaa

SEQ ID NO: 2298760 - RNA, 19 nt, Homo sapiens
  misc_RNA (1)...(19): siRNA sense strand
agacaaacaggaagggaaa

SEQ ID NO: 2298761 - RNA, 19 nt, Homo sapiens
  misc_RNA (1)...(19): siRNA sense strand
caaagaaagaaguggcuaa

SEQ ID NO: 2298762 - RNA, 19 nt, Homo sapiens
  misc_RNA (1)...(19): siRNA sense strand
guuuagaaguguaggcaau

SEQ ID NO: 2298763 - RNA, 19 nt, Homo sapiens
  misc_RNA (1)...(19): siRNA sense strand
agguaaagccugaagacaa

SEQ ID NO: 2298764 - RNA, 19 nt, Homo sapiens
  misc_RNA (1)...(19): siRNA sense strand
ccggaaagccaaaggagaa

SEQ ID NO: 2298765 - RNA, 19 nt, Homo sapiens
  misc_RNA (1)...(19): siRNA sense strand
ccaaagaacucgaagcuga

SEQ ID NO: 2298766 - RNA, 19 nt, Homo sapiens
  misc_RNA (1)...(19): siRNA sense strand
agaaagaaucuguggaaaa

SEQ ID NO: 2298767 - RNA, 19 nt, Homo sapiens
  misc_RNA (1)...(19): siRNA sense strand
aaucgaagacgaagagaaa

SEQ ID NO: 2298768 - RNA, 19 nt, Homo sapiens
  misc_RNA (1)...(19): siRNA sense strand
acaagaaagaggagaaaga

SEQ ID NO: 2298769 - RNA, 19 nt, Homo sapiens
  misc_RNA (1)...(19): siRNA sense strand
aagaaagaggagaaagaaa

SEQ ID NO: 2298770 - RNA, 19 nt, Homo sapiens
  misc_RNA (1)...(19): siRNA sense strand
ccaagaaguaguugaagaa

SEQ ID NO: 2298771 - RNA, 19 nt, Homo sapiens
  misc_RNA (1)...(19): siRNA sense strand
cagcaaacccugcggagaa

SEQ ID NO: 2298772 - RNA, 19 nt, Homo sapiens
  misc_RNA (1)...(19): siRNA sense strand
aaacaaagguaaagccuga

SEQ ID NO: 2298773 - RNA, 19 nt, Homo sapiens
  misc_RNA (1)...(19): siRNA sense strand
ccgaagaagacauggauga

SEQ ID NO: 2298774 - RNA, 19 nt, Homo sapiens
  misc_RNA (1)...(19): siRNA sense strand
gccuaauggucaagaagua

SEQ ID NO: 2298775 - RNA, 19 nt, Homo sapiens
  misc_RNA (1)...(19): siRNA sense strand
cuaugagaccauugggaaa

SEQ ID NO: 2298776 - RNA, 19 nt, Homo sapiens
  misc_RNA (1)...(19): siRNA sense strand
uuaagaaggaagagaagaa

SEQ ID NO: 2298777 - RNA, 19 nt, Homo sapiens
  misc_RNA (1)...(19): siRNA sense strand
agaaaagaguggaaaacaa

SEQ ID NO: 2298778 - RNA, 19 nt, Homo sapiens
  misc_RNA (1)...(19): siRNA sense strand
agaaagacaaggagaccaa

SEQ ID NO: 2298779 - RNA, 19 nt, Homo sapiens
  misc_RNA (1)...(19): siRNA sense strand
uuaugaaaccacugagaaa

SEQ ID NO: 2298780 - RNA, 19 nt, Homo sapiens
  misc_RNA (1)...(19): siRNA sense strand
cccuaaagacgcaaagaaa

SEQ ID NO: 2298781 - RNA, 19 nt, Homo sapiens
  misc_RNA (1)...(19): siRNA sense strand
agaaguaguugaagaacau

SEQ ID NO: 2298782 - RNA, 19 nt, Homo sapiens
  misc_RNA (1)...(19): siRNA sense strand
ccaggagacccaugagaaa

SEQ ID NO: 2298783 - RNA, 19 nt, Homo sapiens
  misc_RNA (1)...(19): siRNA sense strand
ccaagaaagagguuaagaa

SEQ ID NO: 2298784 - RNA, 19 nt, Homo sapiens
  misc_RNA (1)...(19): siRNA sense strand
agaaagaggagaaagaaaa

SEQ ID NO: 2298785 - RNA, 19 nt, Homo sapiens
  misc_RNA (1)...(19): siRNA sense strand
cuacagaagucauugaaaa

SEQ ID NO: 2298786 - RNA, 19 nt, Homo sapiens
  misc_RNA (1)...(19): siRNA sense strand
acgcuuuguuggaaggaaa

SEQ ID NO: 2298787 - RNA, 19 nt, Homo sapiens
  misc_RNA (1)...(19): siRNA sense strand
aagacaagaaagaggagaa

SEQ ID NO: 2298788 - RNA, 19 nt, Homo sapiens
  misc_RNA (1)...(19): siRNA sense strand
gucaagagcagcaaggaaa

SEQ ID NO: 2298789 - RNA, 19 nt, Homo sapiens
  misc_RNA (1)...(19): siRNA sense strand
aggaagagucugucaagaa

SEQ ID NO: 2298790 - RNA, 19 nt, Homo sapiens
  misc_RNA (1)...(19): siRNA sense strand
aagaaguaguugaagaaca

SEQ ID NO: 2298791 - RNA, 19 nt, Homo sapiens
  misc_RNA (1)...(19): siRNA sense strand
cacccaaaguugaaagcaa

SEQ ID NO: 2298792 - RNA, 19 nt, Homo sapiens
  misc_RNA (1)...(19): siRNA sense strand
acccaaaguugaaagcaaa

SEQ ID NO: 2298793 - RNA, 19 nt, Homo sapiens
  misc_RNA (1)...(19): siRNA sense strand
aagaaaagguaauggugaa

SEQ ID NO: 2298794 - RNA, 19 nt, Homo sapiens
  misc_RNA (1)...(19): siRNA sense strand
cuaucaagaaggaggaaaa

SEQ ID NO: 2298795 - RNA, 19 nt, Homo sapiens
  misc_RNA (1)...(19): siRNA sense strand
gggcgaaugugaacagaca

SEQ ID NO: 2298796 - RNA, 19 nt, Homo sapiens
  misc_RNA (1)...(19): siRNA sense strand
aagaaaagccaaagaaaga

SEQ ID NO: 2298797 - RNA, 19 nt, Homo sapiens
  misc_RNA (1)...(19): siRNA sense strand
agagaagaaggaagugaaa

SEQ ID NO: 2298798 - RNA, 19 nt, Homo sapiens
  misc_RNA (1)...(19): siRNA sense strand
augccagagaggaggaaua

SEQ ID NO: 2298799 - RNA, 19 nt, Homo sapiens
  misc_RNA (1)...(19): siRNA sense strand
cgacaaggcugcagaggcu

SEQ ID NO: 2298800 - RNA, 19 nt, Homo sapiens
  misc_RNA (1)...(19): siRNA sense strand
aagaaagaucugaaagaga

SEQ ID NO: 2298801 - RNA, 19 nt, Homo sapiens
  misc_RNA (1)...(19): siRNA sense strand
agaaagaaacaccgccaaa

SEQ ID NO: 2298802 - RNA, 19 nt, Homo sapiens
  misc_RNA (1)...(19): siRNA sense strand
cgccaaaggaagucaagaa

SEQ ID NO: 2298803 - RNA, 19 nt, Homo sapiens
  misc_RNA (1)...(19): siRNA sense strand
ccuaaagacgcaaagaaau

SEQ ID NO: 2298804 - RNA, 19 nt, Homo sapiens
  misc_RNA (1)...(19): siRNA sense strand
cccaagaaguaguugaaga

SEQ ID NO: 2298805 - RNA, 19 nt, Homo sapiens
  misc_RNA (1)...(19): siRNA sense strand
ugaagaaaagaguggaaaa

SEQ ID NO: 2298806 - RNA, 19 nt, Homo sapiens
  misc_RNA (1)...(19): siRNA sense strand
acaaauagugacuggauga

SEQ ID NO: 2298807 - RNA, 19 nt, Homo sapiens
  misc_RNA (1)...(19): siRNA sense strand
ccaacaaagacaaggcuga

SEQ ID NO: 2298808 - RNA, 19 nt, Homo sapiens
  misc_RNA (1)...(19): siRNA sense strand
agacaagaaagaggagaaa

SEQ ID NO: 2298809 - RNA, 19 nt, Homo sapiens
  misc_RNA (1)...(19): siRNA sense strand
gggaagagaaagacaagga

SEQ ID NO: 2298810 - RNA, 19 nt, Homo sapiens
  misc_RNA (1)...(19): siRNA sense strand
ccacagaugucaaacccaa

SEQ ID NO: 2298811 - RNA, 19 nt, Homo sapiens
  misc_RNA (1)...(19): siRNA sense strand
gaaagaaaagccaaagaaa

SEQ ID NO: 2298812 - RNA, 19 nt, Homo sapiens
  misc_RNA (1)...(19): siRNA sense strand
ucauuaagaaggaaggcaa

SEQ ID NO: 2298813 - RNA, 19 nt, Homo sapiens
  misc_RNA (1)...(19): siRNA sense strand
aagacaaacaggaagggaa

SEQ ID NO: 2298814 - RNA, 19 nt, Homo sapiens
  misc_RNA (1)...(19): siRNA sense strand
ugaagaacccacugaagaa

SEQ ID NO: 2298815 - RNA, 19 nt, Homo sapiens
  misc_RNA (1)...(19): siRNA sense strand
ugacaauuugccuggaaua

SEQ ID NO: 2298816 - RNA, 19 nt, Homo sapiens
  misc_RNA (1)...(19): siRNA sense strand
aggcugaugaggaggacaa

SEQ ID NO: 2298817 - RNA, 19 nt, Homo sapiens
  misc_RNA (1)...(19): siRNA sense strand
ccauggaggaagacaaauu

SEQ ID NO: 2298818 - RNA, 19 nt, Homo sapiens
  misc_RNA (1)...(19): siRNA sense strand
cagcaguuccagugaguuu

SEQ ID NO: 2298819 - RNA, 19 nt, Homo sapiens
  misc_RNA (1)...(19): siRNA sense strand
ucagaagugaugagggaau

SEQ ID NO: 2298820 - RNA, 19 nt, Homo sapiens
  misc_RNA (1)...(19): siRNA sense strand
agaucaagaaagaagagaa

SEQ ID NO: 2298821 - RNA, 19 nt, Homo sapiens
  misc_RNA (1)...(19): siRNA sense strand
aagagaaacugaaggaaac

SEQ ID NO: 2298822 - RNA, 19 nt, Homo sapiens
  misc_RNA (1)...(19): siRNA sense strand
augagaagauagagagaac

SEQ ID NO: 2298823 - RNA, 19 nt, Homo sapiens
  misc_RNA (1)...(19): siRNA sense strand
ucaagaaggaaguuaagaa

SEQ ID NO: 2298824 - RNA, 19 nt, Homo sapiens
  misc_RNA (1)...(19): siRNA sense strand
aggaagagaagaaggaagu

SEQ ID NO: 2298825 - RNA, 19 nt, Homo sapiens
  misc_RNA (1)...(19): siRNA sense strand
uugaagaguuaaaggcuga

SEQ ID NO: 2298826 - RNA, 19 nt, Homo sapiens
  misc_RNA (1)...(19): siRNA sense strand
aggcggaggcugaugcaua

SEQ ID NO: 2298827 - RNA, 19 nt, Homo sapiens
  misc_RNA (1)...(19): siRNA sense strand
aaauggaagcugaagacua

SEQ ID NO: 2298828 - RNA, 19 nt, Homo sapiens
  misc_RNA (1)...(19): siRNA sense strand
augccaaagaugagaauga

SEQ ID NO: 2298829 - RNA, 19 nt, Homo sapiens
  misc_RNA (1)...(19): siRNA sense strand
gcuauuacuaugagaagau

SEQ ID NO: 2298830 - RNA, 19 nt, Homo sapiens
  misc_RNA (1)...(19): siRNA sense strand
gagaagauagagagaacca

SEQ ID NO: 2298831 - RNA, 19 nt, Homo sapiens
  misc_RNA (1)...(19): siRNA sense strand
augcaagauugaacuguaa

SEQ ID NO: 2298832 - RNA, 19 nt, Homo sapiens
  misc_RNA (1)...(19): siRNA sense strand
ccgaggagcaguauggauu

SEQ ID NO: 2298833 - RNA, 19 nt, Homo sapiens
  misc_RNA (1)...(19): siRNA sense strand
gccaaagaugagaaugaaa

SEQ ID NO: 2298834 - RNA, 19 nt, Homo sapiens
  misc_RNA (1)...(19): siRNA sense strand
ggaaagaagaauuagcuga

SEQ ID NO: 2298835 - RNA, 19 nt, Homo sapiens
  misc_RNA (1)...(19): siRNA sense strand
gaagauauaaagaagggaa

SEQ ID NO: 2298836 - RNA, 19 nt, Homo sapiens
  misc_RNA (1)...(19): siRNA sense strand
ucguaaacggaaagaagaa

SEQ ID NO: 2298837 - RNA, 19 nt, Homo sapiens
  misc_RNA (1)...(19): siRNA sense strand
gggcaaaacaccagcucua

SEQ ID NO: 2298838 - RNA, 19 nt, Homo sapiens
  misc_RNA (1)...(19): siRNA sense strand
aaugaaagacccugagaca

SEQ ID NO: 2298839 - RNA, 19 nt, Homo sapiens
  misc_RNA (1)...(19): siRNA sense strand
cuaacaaaguugaagccau

SEQ ID NO: 2298840 - RNA, 19 nt, Homo sapiens
  misc_RNA (1)...(19): siRNA sense strand
gggcagcagcagaagauau

SEQ ID NO: 2298841 - RNA, 19 nt, Homo sapiens
  misc_RNA (1)...(19): siRNA sense strand
augaagaagcagaacagaa

SEQ ID NO: 2298842 - RNA, 19 nt, Homo sapiens
  misc_RNA (1)...(19): siRNA sense strand
uggcuaaagaagaagaaaa

SEQ ID NO: 2298843 - RNA, 19 nt, Homo sapiens
  misc_RNA (1)...(19): siRNA sense strand
cugacaagcagaugaucaa

SEQ ID NO: 2298844 - RNA, 19 nt, Homo sapiens
  misc_RNA (1)...(19): siRNA sense strand
uggcggugcuaaaggacua

SEQ ID NO: 2298845 - RNA, 19 nt, Homo sapiens
  misc_RNA (1)...(19): siRNA sense strand
ggacaaucugacauagcaa

SEQ ID NO: 2298846 - RNA, 19 nt, Homo sapiens
  misc_RNA (1)...(19): siRNA sense strand
ggcuaaagaagaagaaaau

SEQ ID NO: 2298847 - RNA, 19 nt, Homo sapiens
  misc_RNA (1)...(19): siRNA sense strand
uggacauggcggugcuaaa

SEQ ID NO: 2298848 - RNA, 19 nt, Homo sapiens
  misc_RNA (1)...(19): siRNA sense strand
aagaauuagcugaagcauu

SEQ ID NO: 2298849 - RNA, 19 nt, Homo sapiens
  misc_RNA (1)...(19): siRNA sense strand
cgacaagaugaaugaaagu

SEQ ID NO: 2298850 - RNA, 19 nt, Homo sapiens
  misc_RNA (1)...(19): siRNA sense strand
ugaaaguacaagaucggua

SEQ ID NO: 2298851 - RNA, 19 nt, Homo sapiens
  misc_RNA (1)...(19): siRNA sense strand
cagaagauauaguggcaag

SEQ ID NO: 2298852 - RNA, 19 nt, Homo sapiens
  misc_RNA (1)...(19): siRNA sense strand
ucuuagaacaucagauuca

SEQ ID NO: 2298853 - RNA, 19 nt, Homo sapiens
  misc_RNA (1)...(19): siRNA sense strand
guggcagcaugcaaagaaa

SEQ ID NO: 2298854 - RNA, 19 nt, Homo sapiens
  misc_RNA (1)...(19): siRNA sense strand
agauauguuugaagaagca

SEQ ID NO: 2298855 - RNA, 19 nt, Homo sapiens
  misc_RNA (1)...(19): siRNA sense strand
acaucagauucaaguaaga

SEQ ID NO: 2298856 - RNA, 19 nt, Homo sapiens
  misc_RNA (1)...(19): siRNA sense strand
ccugaauccagaagacauu

SEQ ID NO: 2298857 - RNA, 19 nt, Homo sapiens
  misc_RNA (1)...(19): siRNA sense strand
ccgagaugcaggaggccuu

SEQ ID NO: 2298858 - RNA, 19 nt, Homo sapiens
  misc_RNA (1)...(19): siRNA sense strand
ucggaaaacggaugcaaaa

SEQ ID NO: 2298859 - RNA, 19 nt, Homo sapiens
  misc_RNA (1)...(19): siRNA sense strand
cccucuggcuaaagaagaa

SEQ ID NO: 2298860 - RNA, 19 nt, Homo sapiens
  misc_RNA (1)...(19): siRNA sense strand
acucaaucuuagaacauca

SEQ ID NO: 2298861 - RNA, 19 nt, Homo sapiens
  misc_RNA (1)...(19): siRNA sense strand
cgagucaauccaagaguga

SEQ ID NO: 2298862 - RNA, 19 nt, Homo sapiens
  misc_RNA (1)...(19): siRNA sense strand
ggggaaugguuucugcaua

SEQ ID NO: 2298863 - RNA, 19 nt, Homo sapiens
  misc_RNA (1)...(19): siRNA sense strand
gaugaaugaaaguacaaga

SEQ ID NO: 2298864 - RNA, 19 nt, Homo sapiens
  misc_RNA (1)...(19): siRNA sense strand
ugagaaaccugaauccaga

SEQ ID NO: 2298865 - RNA, 19 nt, Homo sapiens
  misc_RNA (1)...(19): siRNA sense strand
ccuugaugaagaagcagaa

SEQ ID NO: 2298866 - RNA, 19 nt, Homo sapiens
  misc_RNA (1)...(19): siRNA sense strand
ugagcagucucuaggccaa

SEQ ID NO: 2298867 - RNA, 19 nt, Homo sapiens
  misc_RNA (1)...(19): siRNA sense strand
agucaauccaagagugagu

SEQ ID NO: 2298868 - RNA, 19 nt, Homo sapiens
  misc_RNA (1)...(19): siRNA sense strand
aggcucucaucgaggcuua

SEQ ID NO: 2298869 - RNA, 19 nt, Homo sapiens
  misc_RNA (1)...(19): siRNA sense strand
uaauguuauuggugagcca

SEQ ID NO: 2298870 - RNA, 19 nt, Homo sapiens
  misc_RNA (1)...(19): siRNA sense strand
aaaucuucuuugaccguua

SEQ ID NO: 2298871 - RNA, 19 nt, Homo sapiens
  misc_RNA (1)...(19): siRNA sense strand
gagugaauguuacaggcau

SEQ ID NO: 2298872 - RNA, 19 nt, Homo sapiens
  misc_RNA (1)...(19): siRNA sense strand
ugacucaaucuuagaacau

SEQ ID NO: 2298873 - RNA, 19 nt, Homo sapiens
  misc_RNA (1)...(19): siRNA sense strand
uuauugacccucuggcuaa

SEQ ID NO: 2298874 - RNA, 19 nt, Homo sapiens
  misc_RNA (1)...(19): siRNA sense strand
aggagcaggcagaggagga

SEQ ID NO: 2298875 - RNA, 19 nt, Homo sapiens
  misc_RNA (1)...(19): siRNA sense strand
cugggaagaccgugcgcuu

SEQ ID NO: 2298876 - RNA, 19 nt, Homo sapiens
  misc_RNA (1)...(19): siRNA sense strand
ggaaagaagaauuagcuga

SEQ ID NO: 2298877 - RNA, 19 nt, Homo sapiens
  misc_RNA (1)...(19): siRNA sense strand
gaagauauaaagaagggaa

SEQ ID NO: 2298878 - RNA, 19 nt, Homo sapiens
  misc_RNA (1)...(19): siRNA sense strand
ucguaaacggaaagaagaa

SEQ ID NO: 2298879 - RNA, 19 nt, Homo sapiens
  misc_RNA (1)...(19): siRNA sense strand
gggcaaaacaccagcucua

SEQ ID NO: 2298880 - RNA, 19 nt, Homo sapiens
  misc_RNA (1)...(19): siRNA sense strand
aaugaaagacccugagaca

SEQ ID NO: 2298881 - RNA, 19 nt, Homo sapiens
  misc_RNA (1)...(19): siRNA sense strand
cuaacaaaguugaagccau

SEQ ID NO: 2298882 - RNA, 19 nt, Homo sapiens
  misc_RNA (1)...(19): siRNA sense strand
gggcagcagcagaagauau

SEQ ID NO: 2298883 - RNA, 19 nt, Homo sapiens
  misc_RNA (1)...(19): siRNA sense strand
augaagaagcagaacagaa

SEQ ID NO: 2298884 - RNA, 19 nt, Homo sapiens
  misc_RNA (1)...(19): siRNA sense strand
uggcuaaagaagaagaaaa

SEQ ID NO: 2298885 - RNA, 19 nt, Homo sapiens
  misc_RNA (1)...(19): siRNA sense strand
cugacaagcagaugaucaa

SEQ ID NO: 2298886 - RNA, 19 nt, Homo sapiens
  misc_RNA (1)...(19): siRNA sense strand
uggcggugcuaaaggacua

SEQ ID NO: 2298887 - RNA, 19 nt, Homo sapiens
  misc_RNA (1)...(19): siRNA sense strand
ggacaaucugacauagcaa

SEQ ID NO: 2298888 - RNA, 19 nt, Homo sapiens
  misc_RNA (1)...(19): siRNA sense strand
ggcuaaagaagaagaaaau

SEQ ID NO: 2298889 - RNA, 19 nt, Homo sapiens
  misc_RNA (1)...(19): siRNA sense strand
uggacauggcggugcuaaa

SEQ ID NO: 2298890 - RNA, 19 nt, Homo sapiens
  misc_RNA (1)...(19): siRNA sense strand
aagaauuagcugaagcauu

SEQ ID NO: 2298891 - RNA, 19 nt, Homo sapiens
  misc_RNA (1)...(19): siRNA sense strand
cgacaagaugaaugaaagu

SEQ ID NO: 2298892 - RNA, 19 nt, Homo sapiens
  misc_RNA (1)...(19): siRNA sense strand
ugaaaguacaagaucggua

SEQ ID NO: 2298893 - RNA, 19 nt, Homo sapiens
  misc_RNA (1)...(19): siRNA sense strand
cagaagauauaguggcaag

SEQ ID NO: 2298894 - RNA, 19 nt, Homo sapiens
  misc_RNA (1)...(19): siRNA sense strand
ucuuagaacaucagauuca

SEQ ID NO: 2298895 - RNA, 19 nt, Homo sapiens
  misc_RNA (1)...(19): siRNA sense strand
guggcagcaugcaaagaaa

SEQ ID NO: 2298896 - RNA, 19 nt, Homo sapiens
  misc_RNA (1)...(19): siRNA sense strand
agauauguuugaagaagca

SEQ ID NO: 2298897 - RNA, 19 nt, Homo sapiens
  misc_RNA (1)...(19): siRNA sense strand
acaucagauucaaguaaga

SEQ ID NO: 2298898 - RNA, 19 nt, Homo sapiens
  misc_RNA (1)...(19): siRNA sense strand
ccugaauccagaagacauu

SEQ ID NO: 2298899 - RNA, 19 nt, Homo sapiens
  misc_RNA (1)...(19): siRNA sense strand
ccgagaugcaggaggccuu

SEQ ID NO: 2298900 - RNA, 19 nt, Homo sapiens
  misc_RNA (1)...(19): siRNA sense strand
ucggaaaacggaugcaaaa

SEQ ID NO: 2298901 - RNA, 19 nt, Homo sapiens
  misc_RNA (1)...(19): siRNA sense strand
cccucuggcuaaagaagaa

SEQ ID NO: 2298902 - RNA, 19 nt, Homo sapiens
  misc_RNA (1)...(19): siRNA sense strand
acucaaucuuagaacauca

SEQ ID NO: 2298903 - RNA, 19 nt, Homo sapiens
  misc_RNA (1)...(19): siRNA sense strand
cgagucaauccaagaguga

SEQ ID NO: 2298904 - RNA, 19 nt, Homo sapiens
  misc_RNA (1)...(19): siRNA sense strand
ggggaaugguuucugcaua

SEQ ID NO: 2298905 - RNA, 19 nt, Homo sapiens
  misc_RNA (1)...(19): siRNA sense strand
gaugaaugaaaguacaaga

SEQ ID NO: 2298906 - RNA, 19 nt, Homo sapiens
  misc_RNA (1)...(19): siRNA sense strand
ugagaaaccugaauccaga

SEQ ID NO: 2298907 - RNA, 19 nt, Homo sapiens
  misc_RNA (1)...(19): siRNA sense strand
ccuugaugaagaagcagaa

SEQ ID NO: 2298908 - RNA, 19 nt, Homo sapiens
  misc_RNA (1)...(19): siRNA sense strand
ugagcagucucuaggccaa

SEQ ID NO: 2298909 - RNA, 19 nt, Homo sapiens
  misc_RNA (1)...(19): siRNA sense strand
agucaauccaagagugagu

SEQ ID NO: 2298910 - RNA, 19 nt, Homo sapiens
  misc_RNA (1)...(19): siRNA sense strand
aggcucucaucgaggcuua

SEQ ID NO: 2298911 - RNA, 19 nt, Homo sapiens
  misc_RNA (1)...(19): siRNA sense strand
uaauguuauuggugagcca

SEQ ID NO: 2298912 - RNA, 19 nt, Homo sapiens
  misc_RNA (1)...(19): siRNA sense strand
aaaucuucuuugaccguua

SEQ ID NO: 2298913 - RNA, 19 nt, Homo sapiens
  misc_RNA (1)...(19): siRNA sense strand
gagugaauguuacaggcau

SEQ ID NO: 2298914 - RNA, 19 nt, Homo sapiens
  misc_RNA (1)...(19): siRNA sense strand
ugacucaaucuuagaacau

SEQ ID NO: 2298915 - RNA, 19 nt, Homo sapiens
  misc_RNA (1)...(19): siRNA sense strand
uuauugacccucuggcuaa

SEQ ID NO: 2298916 - RNA, 19 nt, Homo sapiens
  misc_RNA (1)...(19): siRNA sense strand
aggagcaggcagaggagga

SEQ ID NO: 2298917 - RNA, 19 nt, Homo sapiens
  misc_RNA (1)...(19): siRNA sense strand
cugggaagaccgugcgcuu

SEQ ID NO: 2298918 - RNA, 19 nt, Homo sapiens
  misc_RNA (1)...(19): siRNA sense strand
aggugaaauugcaaggaaa

SEQ ID NO: 2298919 - RNA, 19 nt, Homo sapiens
  misc_RNA (1)...(19): siRNA sense strand
agguuauuguuguggguaa

SEQ ID NO: 2298920 - RNA, 19 nt, Homo sapiens
  misc_RNA (1)...(19): siRNA sense strand
cugcaaaggaacugacaga

SEQ ID NO: 2298921 - RNA, 19 nt, Homo sapiens
  misc_RNA (1)...(19): siRNA sense strand
ggaucacaaccgagcuaaa

SEQ ID NO: 2298922 - RNA, 19 nt, Homo sapiens
  misc_RNA (1)...(19): siRNA sense strand
aagaauaagaccuggaagu

SEQ ID NO: 2298923 - RNA, 19 nt, Homo sapiens
  misc_RNA (1)...(19): siRNA sense strand
gguuauuguuguggguaau

SEQ ID NO: 2298924 - RNA, 19 nt, Homo sapiens
  misc_RNA (1)...(19): siRNA sense strand
acagcuggcucaagggaga

SEQ ID NO: 2298925 - RNA, 19 nt, Homo sapiens
  misc_RNA (1)...(19): siRNA sense strand
ucuuaaacuuggugugacu

SEQ ID NO: 2298926 - RNA, 19 nt, Homo sapiens
  misc_RNA (1)...(19): siRNA sense strand
ggaaguuuguugaaggucu

SEQ ID NO: 2298927 - RNA, 19 nt, Homo sapiens
  misc_RNA (1)...(19): siRNA sense strand
agggagaguuuguguccau

SEQ ID NO: 2298928 - RNA, 19 nt, Homo sapiens
  misc_RNA (1)...(19): siRNA sense strand
aggaaaggaaguugguguu

SEQ ID NO: 2298929 - RNA, 19 nt, Homo sapiens
  misc_RNA (1)...(19): siRNA sense strand
ccuuagauaaauacgccaa

SEQ ID NO: 2298930 - RNA, 19 nt, Homo sapiens
  misc_RNA (1)...(19): siRNA sense strand
ggugaaauugcaaggaaag

SEQ ID NO: 2298931 - RNA, 19 nt, Homo sapiens
  misc_RNA (1)...(19): siRNA sense strand
caguauuggaaauggaucu

SEQ ID NO: 2298932 - RNA, 19 nt, Homo sapiens
  misc_RNA (1)...(19): siRNA sense strand
aggaacugacagaagaaaa

SEQ ID NO: 2298933 - RNA, 19 nt, Homo sapiens
  misc_RNA (1)...(19): siRNA sense strand
guguuaucucugauggcaa

SEQ ID NO: 2298934 - RNA, 19 nt, Homo sapiens
  misc_RNA (1)...(19): siRNA sense strand
auaaagaagacguugccuu

SEQ ID NO: 2298935 - RNA, 19 nt, Homo sapiens
  misc_RNA (1)...(19): siRNA sense strand
ccuucaaagaccuggaugu

SEQ ID NO: 2298936 - RNA, 19 nt, Homo sapiens
  misc_RNA (1)...(19): siRNA sense strand
aaaggaacugacagaagaa

SEQ ID NO: 2298937 - RNA, 19 nt, Homo sapiens
  misc_RNA (1)...(19): siRNA sense strand
acgccaagaagucaguuaa

SEQ ID NO: 2298938 - RNA, 19 nt, Homo sapiens
  misc_RNA (1)...(19): siRNA sense strand
aaggaaaggaaguuggugu

SEQ ID NO: 2298939 - RNA, 19 nt, Homo sapiens
  misc_RNA (1)...(19): siRNA sense strand
gcaccucggcccagaacaa

SEQ ID NO: 2298940 - RNA, 19 nt, Homo sapiens
  misc_RNA (1)...(19): siRNA sense strand
gaucugagccacaucgaga

SEQ ID NO: 2298941 - RNA, 19 nt, Homo sapiens
  misc_RNA (1)...(19): siRNA sense strand
agaccaaagccgcugugaa

SEQ ID NO: 2298942 - RNA, 19 nt, Homo sapiens
  misc_RNA (1)...(19): siRNA sense strand
guguacaaccccaacaaaa

SEQ ID NO: 2298943 - RNA, 19 nt, Homo sapiens
  misc_RNA (1)...(19): siRNA sense strand
ggcccagaacaaugcuaaa

SEQ ID NO: 2298944 - RNA, 19 nt, Homo sapiens
  misc_RNA (1)...(19): siRNA sense strand
cggucuaauuugaaagaaa

SEQ ID NO: 2298945 - RNA, 19 nt, Homo sapiens
  misc_RNA (1)...(19): siRNA sense strand
cgagaaaugaggagaaaga

SEQ ID NO: 2298946 - RNA, 19 nt, Homo sapiens
  misc_RNA (1)...(19): siRNA sense strand
gauuaagcccugaaggaaa

SEQ ID NO: 2298947 - RNA, 19 nt, Homo sapiens
  misc_RNA (1)...(19): siRNA sense strand
gaauuaaaggaguuggaaa

SEQ ID NO: 2298948 - RNA, 19 nt, Homo sapiens
  misc_RNA (1)...(19): siRNA sense strand
gcaaagaggacaagaaaau

SEQ ID NO: 2298949 - RNA, 19 nt, Homo sapiens
  misc_RNA (1)...(19): siRNA sense strand
gagcuaugcaacaggauaa

SEQ ID NO: 2298950 - RNA, 19 nt, Homo sapiens
  misc_RNA (1)...(19): siRNA sense strand
ugagaaaggaccuggaaau

SEQ ID NO: 2298951 - RNA, 19 nt, Homo sapiens
  misc_RNA (1)...(19): siRNA sense strand
acagaagauaggagacaaa

SEQ ID NO: 2298952 - RNA, 19 nt, Homo sapiens
  misc_RNA (1)...(19): siRNA sense strand
cauaagacuaucaaggaaa

SEQ ID NO: 2298953 - RNA, 19 nt, Homo sapiens
  misc_RNA (1)...(19): siRNA sense strand
acauaaagacacuggaaaa

SEQ ID NO: 2298954 - RNA, 19 nt, Homo sapiens
  misc_RNA (1)...(19): siRNA sense strand
guggaagaauacagcuaua

SEQ ID NO: 2298955 - RNA, 19 nt, Homo sapiens
  misc_RNA (1)...(19): siRNA sense strand
gcugaggagaagaguauua

SEQ ID NO: 2298956 - RNA, 19 nt, Homo sapiens
  misc_RNA (1)...(19): siRNA sense strand
agaaaugaggagaaagaau

SEQ ID NO: 2298957 - RNA, 19 nt, Homo sapiens
  misc_RNA (1)...(19): siRNA sense strand
ccuaaugaccauaagacua

SEQ ID NO: 2298958 - RNA, 19 nt, Homo sapiens
  misc_RNA (1)...(19): siRNA sense strand
gggaggagcugaaggccau

SEQ ID NO: 2298959 - RNA, 19 nt, Homo sapiens
  misc_RNA (1)...(19): siRNA sense strand
ggagcaaagaggacaagaa

SEQ ID NO: 2298960 - RNA, 19 nt, Homo sapiens
  misc_RNA (1)...(19): siRNA sense strand
acacagaaggagaauuaaa

SEQ ID NO: 2298961 - RNA, 19 nt, Homo sapiens
  misc_RNA (1)...(19): siRNA sense strand
agucaucacucgugccaaa

SEQ ID NO: 2298962 - RNA, 19 nt, Homo sapiens
  misc_RNA (1)...(19): siRNA sense strand
agaagauaggagacaaaua

SEQ ID NO: 2298963 - RNA, 19 nt, Homo sapiens
  misc_RNA (1)...(19): siRNA sense strand
caguagaagggcagugcaa

SEQ ID NO: 2298964 - RNA, 19 nt, Homo sapiens
  misc_RNA (1)...(19): siRNA sense strand
augagaagcuggauccaaa

SEQ ID NO: 2298965 - RNA, 19 nt, Homo sapiens
  misc_RNA (1)...(19): siRNA sense strand
ugagagugguagagguaca

SEQ ID NO: 2298966 - RNA, 19 nt, Homo sapiens
  misc_RNA (1)...(19): siRNA sense strand
ggauaauggagcugcuaga

SEQ ID NO: 2298967 - RNA, 19 nt, Homo sapiens
  misc_RNA (1)...(19): siRNA sense strand
accaaacaucagaggaaua

SEQ ID NO: 2298968 - RNA, 19 nt, Homo sapiens
  misc_RNA (1)...(19): siRNA sense strand
cugcugaaaucuacaggaa

SEQ ID NO: 2298969 - RNA, 19 nt, Homo sapiens
  misc_RNA (1)...(19): siRNA sense strand
acgccuaaguccuaugaua

SEQ ID NO: 2298970 - RNA, 19 nt, Homo sapiens
  misc_RNA (1)...(19): siRNA sense strand
caguggagaauguggaaga

SEQ ID NO: 2298971 - RNA, 19 nt, Homo sapiens
  misc_RNA (1)...(19): siRNA sense strand
uagcauugguaaagaacga

SEQ ID NO: 2298972 - RNA, 19 nt, Homo sapiens
  misc_RNA (1)...(19): siRNA sense strand
gaaagaauaucauugguca

SEQ ID NO: 2298973 - RNA, 19 nt, Homo sapiens
  misc_RNA (1)...(19): siRNA sense strand
cgccuaaguccuaugauaa

SEQ ID NO: 2298974 - RNA, 19 nt, Homo sapiens
  misc_RNA (1)...(19): siRNA sense strand
uggagaagcccgacugcaa

SEQ ID NO: 2298975 - RNA, 19 nt, Homo sapiens
  misc_RNA (1)...(19): siRNA sense strand
guuagaagaagaauggaau

SEQ ID NO: 2298976 - RNA, 19 nt, Homo sapiens
  misc_RNA (1)...(19): siRNA sense strand
acuaaaugugagaguggua

SEQ ID NO: 2298977 - RNA, 19 nt, Homo sapiens
  misc_RNA (1)...(19): siRNA sense strand
gaugaaacaaauacagaga

SEQ ID NO: 2298978 - RNA, 19 nt, Homo sapiens
  misc_RNA (1)...(19): siRNA sense strand
aaggagaauuaaaggaguu

SEQ ID NO: 2298979 - RNA, 19 nt, Homo sapiens
  misc_RNA (1)...(19): siRNA sense strand
uguuagaagaagaauggaa

SEQ ID NO: 2298980 - RNA, 19 nt, Homo sapiens
  misc_RNA (1)...(19): siRNA sense strand
ugugagagugguagaggua

SEQ ID NO: 2298981 - RNA, 19 nt, Homo sapiens
  misc_RNA (1)...(19): siRNA sense strand
ggcaugaguaugagcacaa

SEQ ID NO: 2298982 - RNA, 19 nt, Homo sapiens
  misc_RNA (1)...(19): siRNA sense strand
cggaugagagugaagaaga

SEQ ID NO: 2298983 - RNA, 19 nt, Homo sapiens
  misc_RNA (1)...(19): siRNA sense strand
aagcaaugauucaggggua

SEQ ID NO: 2298984 - RNA, 19 nt, Homo sapiens
  misc_RNA (1)...(19): siRNA sense strand
ugagagugaagaagaacaa

SEQ ID NO: 2298985 - RNA, 19 nt, Homo sapiens
  misc_RNA (1)...(19): siRNA sense strand
ccacauaaagacacuggaa

SEQ ID NO: 2298986 - RNA, 19 nt, Homo sapiens
  misc_RNA (1)...(19): siRNA sense strand
guaugagggugaugacaca

SEQ ID NO: 2298987 - RNA, 19 nt, Homo sapiens
  misc_RNA (1)...(19): siRNA sense strand
uggaaauagcagcagaauu

SEQ ID NO: 2298988 - RNA, 19 nt, Homo sapiens
  misc_RNA (1)...(19): siRNA sense strand
gguuagaaaacuugcaaau

SEQ ID NO: 2298989 - RNA, 19 nt, Homo sapiens
  misc_RNA (1)...(19): siRNA sense strand
gagaaggccaguaugggaa

SEQ ID NO: 2298990 - RNA, 19 nt, Homo sapiens
  misc_RNA (1)...(19): siRNA sense strand
gauuaaucaaacugggaga

SEQ ID NO: 2298991 - RNA, 19 nt, Homo sapiens
  misc_RNA (1)...(19): siRNA sense strand
caauuaacgaccaggacuu

SEQ ID NO: 2298992 - RNA, 19 nt, Homo sapiens
  misc_RNA (1)...(19): siRNA sense strand
cgucaagccaucccagaua

SEQ ID NO: 2298993 - RNA, 19 nt, Homo sapiens
  misc_RNA (1)...(19): siRNA sense strand
caugagugucugaaguuaa

SEQ ID NO: 2298994 - RNA, 19 nt, Homo sapiens
  misc_RNA (1)...(19): siRNA sense strand
cacaagaagaaguugggaa

SEQ ID NO: 2298995 - RNA, 19 nt, Homo sapiens
  misc_RNA (1)...(19): siRNA sense strand
uugaagaggaucuacauaa

SEQ ID NO: 2298996 - RNA, 19 nt, Homo sapiens
  misc_RNA (1)...(19): siRNA sense strand
gcgagaugaaccagcauau

SEQ ID NO: 2298997 - RNA, 19 nt, Homo sapiens
  misc_RNA (1)...(19): siRNA sense strand
gugccaaaggagagggcca

SEQ ID NO: 2298998 - RNA, 19 nt, Homo sapiens
  misc_RNA (1)...(19): siRNA sense strand
aauuaaaggaguuggaaag

SEQ ID NO: 2298999 - RNA, 19 nt, Homo sapiens
  misc_RNA (1)...(19): siRNA sense strand
ugaaaauauucgaaggcau

SEQ ID NO: 2299000 - RNA, 19 nt, Homo sapiens
  misc_RNA (1)...(19): siRNA sense strand
agacagaagauaggagaca

SEQ ID NO: 2299001 - RNA, 19 nt, Homo sapiens
  misc_RNA (1)...(19): siRNA sense strand
ggagcuccauagagaagaa

SEQ ID NO: 2299002 - RNA, 19 nt, Homo sapiens
  misc_RNA (1)...(19): siRNA sense strand
gcaaaagacuuccaggaca

SEQ ID NO: 2299003 - RNA, 19 nt, Homo sapiens
  misc_RNA (1)...(19): siRNA sense strand
agaauuugaugcugagguu

SEQ ID NO: 2299004 - RNA, 19 nt, Homo sapiens
  misc_RNA (1)...(19): siRNA sense strand
ugacauuaaaggugccaau

SEQ ID NO: 2299005 - RNA, 19 nt, Homo sapiens
  misc_RNA (1)...(19): siRNA sense strand
gugaugacacagaaggaga

SEQ ID NO: 2299006 - RNA, 19 nt, Homo sapiens
  misc_RNA (1)...(19): siRNA sense strand
ccuccuggauguucugaaa

SEQ ID NO: 2299007 - RNA, 19 nt, Homo sapiens
  misc_RNA (1)...(19): siRNA sense strand
uugcugaggagaagaguau

SEQ ID NO: 2299008 - RNA, 19 nt, Homo sapiens
  misc_RNA (1)...(19): siRNA sense strand
cggucuaauuugaaagaaa

SEQ ID NO: 2299009 - RNA, 19 nt, Homo sapiens
  misc_RNA (1)...(19): siRNA sense strand
cgagaaaugaggagaaaga

SEQ ID NO: 2299010 - RNA, 19 nt, Homo sapiens
  misc_RNA (1)...(19): siRNA sense strand
gauuaagcccugaaggaaa

SEQ ID NO: 2299011 - RNA, 19 nt, Homo sapiens
  misc_RNA (1)...(19): siRNA sense strand
gaauuaaaggaguuggaaa

SEQ ID NO: 2299012 - RNA, 19 nt, Homo sapiens
  misc_RNA (1)...(19): siRNA sense strand
gcaaagaggacaagaaaau

SEQ ID NO: 2299013 - RNA, 19 nt, Homo sapiens
  misc_RNA (1)...(19): siRNA sense strand
gagcuaugcaacaggauaa

SEQ ID NO: 2299014 - RNA, 19 nt, Homo sapiens
  misc_RNA (1)...(19): siRNA sense strand
ugagaaaggaccuggaaau

SEQ ID NO: 2299015 - RNA, 19 nt, Homo sapiens
  misc_RNA (1)...(19): siRNA sense strand
acagaagauaggagacaaa

SEQ ID NO: 2299016 - RNA, 19 nt, Homo sapiens
  misc_RNA (1)...(19): siRNA sense strand
cauaagacuaucaaggaaa

SEQ ID NO: 2299017 - RNA, 19 nt, Homo sapiens
  misc_RNA (1)...(19): siRNA sense strand
acauaaagacacuggaaaa

SEQ ID NO: 2299018 - RNA, 19 nt, Homo sapiens
  misc_RNA (1)...(19): siRNA sense strand
guggaagaauacagcuaua

SEQ ID NO: 2299019 - RNA, 19 nt, Homo sapiens
  misc_RNA (1)...(19): siRNA sense strand
gcugaggagaagaguauua

SEQ ID NO: 2299020 - RNA, 19 nt, Homo sapiens
  misc_RNA (1)...(19): siRNA sense strand
agaaaugaggagaaagaau

SEQ ID NO: 2299021 - RNA, 19 nt, Homo sapiens
  misc_RNA (1)...(19): siRNA sense strand
ccuaaugaccauaagacua

SEQ ID NO: 2299022 - RNA, 19 nt, Homo sapiens
  misc_RNA (1)...(19): siRNA sense strand
gggaggagcugaaggccau

SEQ ID NO: 2299023 - RNA, 19 nt, Homo sapiens
  misc_RNA (1)...(19): siRNA sense strand
ggagcaaagaggacaagaa

SEQ ID NO: 2299024 - RNA, 19 nt, Homo sapiens
  misc_RNA (1)...(19): siRNA sense strand
acacagaaggagaauuaaa

SEQ ID NO: 2299025 - RNA, 19 nt, Homo sapiens
  misc_RNA (1)...(19): siRNA sense strand
agucaucacucgugccaaa

SEQ ID NO: 2299026 - RNA, 19 nt, Homo sapiens
  misc_RNA (1)...(19): siRNA sense strand
agaagauaggagacaaaua

SEQ ID NO: 2299027 - RNA, 19 nt, Homo sapiens
  misc_RNA (1)...(19): siRNA sense strand
caguagaagggcagugcaa

SEQ ID NO: 2299028 - RNA, 19 nt, Homo sapiens
  misc_RNA (1)...(19): siRNA sense strand
augagaagcuggauccaaa

SEQ ID NO: 2299029 - RNA, 19 nt, Homo sapiens
  misc_RNA (1)...(19): siRNA sense strand
ugagagugguagagguaca

SEQ ID NO: 2299030 - RNA, 19 nt, Homo sapiens
  misc_RNA (1)...(19): siRNA sense strand
ggauaauggagcugcuaga

SEQ ID NO: 2299031 - RNA, 19 nt, Homo sapiens
  misc_RNA (1)...(19): siRNA sense strand
accaaacaucagaggaaua

SEQ ID NO: 2299032 - RNA, 19 nt, Homo sapiens
  misc_RNA (1)...(19): siRNA sense strand
cugcugaaaucuacaggaa

SEQ ID NO: 2299033 - RNA, 19 nt, Homo sapiens
  misc_RNA (1)...(19): siRNA sense strand
acgccuaaguccuaugaua

SEQ ID NO: 2299034 - RNA, 19 nt, Homo sapiens
  misc_RNA (1)...(19): siRNA sense strand
caguggagaauguggaaga

SEQ ID NO: 2299035 - RNA, 19 nt, Homo sapiens
  misc_RNA (1)...(19): siRNA sense strand
uagcauugguaaagaacga

SEQ ID NO: 2299036 - RNA, 19 nt, Homo sapiens
  misc_RNA (1)...(19): siRNA sense strand
gaaagaauaucauugguca

SEQ ID NO: 2299037 - RNA, 19 nt, Homo sapiens
  misc_RNA (1)...(19): siRNA sense strand
cgccuaaguccuaugauaa

SEQ ID NO: 2299038 - RNA, 19 nt, Homo sapiens
  misc_RNA (1)...(19): siRNA sense strand
uggagaagcccgacugcaa

SEQ ID NO: 2299039 - RNA, 19 nt, Homo sapiens
  misc_RNA (1)...(19): siRNA sense strand
guuagaagaagaauggaau

SEQ ID NO: 2299040 - RNA, 19 nt, Homo sapiens
  misc_RNA (1)...(19): siRNA sense strand
acuaaaugugagaguggua

SEQ ID NO: 2299041 - RNA, 19 nt, Homo sapiens
  misc_RNA (1)...(19): siRNA sense strand
gaugaaacaaauacagaga

SEQ ID NO: 2299042 - RNA, 19 nt, Homo sapiens
  misc_RNA (1)...(19): siRNA sense strand
aaggagaauuaaaggaguu

SEQ ID NO: 2299043 - RNA, 19 nt, Homo sapiens
  misc_RNA (1)...(19): siRNA sense strand
uguuagaagaagaauggaa

SEQ ID NO: 2299044 - RNA, 19 nt, Homo sapiens
  misc_RNA (1)...(19): siRNA sense strand
ugugagagugguagaggua

SEQ ID NO: 2299045 - RNA, 19 nt, Homo sapiens
  misc_RNA (1)...(19): siRNA sense strand
ggcaugaguaugagcacaa

SEQ ID NO: 2299046 - RNA, 19 nt, Homo sapiens
  misc_RNA (1)...(19): siRNA sense strand
cggaugagagugaagaaga

SEQ ID NO: 2299047 - RNA, 19 nt, Homo sapiens
  misc_RNA (1)...(19): siRNA sense strand
aagcaaugauucaggggua

SEQ ID NO: 2299048 - RNA, 19 nt, Homo sapiens
  misc_RNA (1)...(19): siRNA sense strand
ugagagugaagaagaacaa

SEQ ID NO: 2299049 - RNA, 19 nt, Homo sapiens
  misc_RNA (1)...(19): siRNA sense strand
ccacauaaagacacuggaa

SEQ ID NO: 2299050 - RNA, 19 nt, Homo sapiens
  misc_RNA (1)...(19): siRNA sense strand
guaugagggugaugacaca

SEQ ID NO: 2299051 - RNA, 19 nt, Homo sapiens
  misc_RNA (1)...(19): siRNA sense strand
uggaaauagcagcagaauu

SEQ ID NO: 2299052 - RNA, 19 nt, Homo sapiens
  misc_RNA (1)...(19): siRNA sense strand
gguuagaaaacuugcaaau

SEQ ID NO: 2299053 - RNA, 19 nt, Homo sapiens
  misc_RNA (1)...(19): siRNA sense strand
gagaaggccaguaugggaa

SEQ ID NO: 2299054 - RNA, 19 nt, Homo sapiens
  misc_RNA (1)...(19): siRNA sense strand
gauuaaucaaacugggaga

SEQ ID NO: 2299055 - RNA, 19 nt, Homo sapiens
  misc_RNA (1)...(19): siRNA sense strand
caauuaacgaccaggacuu

SEQ ID NO: 2299056 - RNA, 19 nt, Homo sapiens
  misc_RNA (1)...(19): siRNA sense strand
cgucaagccaucccagaua

SEQ ID NO: 2299057 - RNA, 19 nt, Homo sapiens
  misc_RNA (1)...(19): siRNA sense strand
caugagugucugaaguuaa

SEQ ID NO: 2299058 - RNA, 19 nt, Homo sapiens
  misc_RNA (1)...(19): siRNA sense strand
cacaagaagaaguugggaa

SEQ ID NO: 2299059 - RNA, 19 nt, Homo sapiens
  misc_RNA (1)...(19): siRNA sense strand
uugaagaggaucuacauaa

SEQ ID NO: 2299060 - RNA, 19 nt, Homo sapiens
  misc_RNA (1)...(19): siRNA sense strand
gcgagaugaaccagcauau

SEQ ID NO: 2299061 - RNA, 19 nt, Homo sapiens
  misc_RNA (1)...(19): siRNA sense strand
gugccaaaggagagggcca

SEQ ID NO: 2299062 - RNA, 19 nt, Homo sapiens
  misc_RNA (1)...(19): siRNA sense strand
aauuaaaggaguuggaaag

SEQ ID NO: 2299063 - RNA, 19 nt, Homo sapiens
  misc_RNA (1)...(19): siRNA sense strand
ugaaaauauucgaaggcau

SEQ ID NO: 2299064 - RNA, 19 nt, Homo sapiens
  misc_RNA (1)...(19): siRNA sense strand
agacagaagauaggagaca

SEQ ID NO: 2299065 - RNA, 19 nt, Homo sapiens
  misc_RNA (1)...(19): siRNA sense strand
ggagcuccauagagaagaa

SEQ ID NO: 2299066 - RNA, 19 nt, Homo sapiens
  misc_RNA (1)...(19): siRNA sense strand
gcaaaagacuuccaggaca

SEQ ID NO: 2299067 - RNA, 19 nt, Homo sapiens
  misc_RNA (1)...(19): siRNA sense strand
agaauuugaugcugagguu

SEQ ID NO: 2299068 - RNA, 19 nt, Homo sapiens
  misc_RNA (1)...(19): siRNA sense strand
ugacauuaaaggugccaau

SEQ ID NO: 2299069 - RNA, 19 nt, Homo sapiens
  misc_RNA (1)...(19): siRNA sense strand
gugaugacacagaaggaga

SEQ ID NO: 2299070 - RNA, 19 nt, Homo sapiens
  misc_RNA (1)...(19): siRNA sense strand
ccuccuggauguucugaaa

SEQ ID NO: 2299071 - RNA, 19 nt, Homo sapiens
  misc_RNA (1)...(19): siRNA sense strand
uugcugaggagaagaguau

SEQ ID NO: 2299072 - RNA, 19 nt, Homo sapiens
  misc_RNA (1)...(19): siRNA sense strand
cugucaaagucgugccuca

SEQ ID NO: 2299073 - RNA, 19 nt, Homo sapiens
  misc_RNA (1)...(19): siRNA sense strand
acaaugaaguugaggaaaa

SEQ ID NO: 2299074 - RNA, 19 nt, Homo sapiens
  misc_RNA (1)...(19): siRNA sense strand
aggaaaucccagagagaga

SEQ ID NO: 2299075 - RNA, 19 nt, Homo sapiens
  misc_RNA (1)...(19): siRNA sense strand
ggugcaaagcgaaggacaa

SEQ ID NO: 2299076 - RNA, 19 nt, Homo sapiens
  misc_RNA (1)...(19): siRNA sense strand
ugaaauggccacaggaaaa

SEQ ID NO: 2299077 - RNA, 19 nt, Homo sapiens
  misc_RNA (1)...(19): siRNA sense strand
ccaauagauuacuggaaga

SEQ ID NO: 2299078 - RNA, 19 nt, Homo sapiens
  misc_RNA (1)...(19): siRNA sense strand
cugcagaggccaaggcauu

SEQ ID NO: 2299079 - RNA, 19 nt, Homo sapiens
  misc_RNA (1)...(19): siRNA sense strand
cugaagaaccgaaacuaaa

SEQ ID NO: 2299080 - RNA, 19 nt, Homo sapiens
  misc_RNA (1)...(19): siRNA sense strand
agcaaauacuggaaggauu

SEQ ID NO: 2299081 - RNA, 19 nt, Homo sapiens
  misc_RNA (1)...(19): siRNA sense strand
gugagaaaccuaauggaau

SEQ ID NO: 2299082 - RNA, 19 nt, Homo sapiens
  misc_RNA (1)...(19): siRNA sense strand
uggaagaauugguucggaa

SEQ ID NO: 2299083 - RNA, 19 nt, Homo sapiens
  misc_RNA (1)...(19): siRNA sense strand
aaguagucuucuugguaaa

SEQ ID NO: 2299084 - RNA, 19 nt, Homo sapiens
  misc_RNA (1)...(19): siRNA sense strand
ggggagaagcacagaggaa

SEQ ID NO: 2299085 - RNA, 19 nt, Homo sapiens
  misc_RNA (1)...(19): siRNA sense strand
ggaugaaaauagaaaccaa

SEQ ID NO: 2299086 - RNA, 19 nt, Homo sapiens
  misc_RNA (1)...(19): siRNA sense strand
gaggaaggagacugugaaa

SEQ ID NO: 2299087 - RNA, 19 nt, Homo sapiens
  misc_RNA (1)...(19): siRNA sense strand
gaccaagaggcuacggaaa

SEQ ID NO: 2299088 - RNA, 19 nt, Homo sapiens
  misc_RNA (1)...(19): siRNA sense strand
agaagaugaccaugaggaa

SEQ ID NO: 2299089 - RNA, 19 nt, Homo sapiens
  misc_RNA (1)...(19): siRNA sense strand
guaaagaauuggcagcuga

SEQ ID NO: 2299090 - RNA, 19 nt, Homo sapiens
  misc_RNA (1)...(19): siRNA sense strand
acucaaugacaucaggaaa

SEQ ID NO: 2299091 - RNA, 19 nt, Homo sapiens
  misc_RNA (1)...(19): siRNA sense strand
agcaaaagcucuugauauu

SEQ ID NO: 2299092 - RNA, 19 nt, Homo sapiens
  misc_RNA (1)...(19): siRNA sense strand
ccugaugacaagaaaggua

SEQ ID NO: 2299093 - RNA, 19 nt, Homo sapiens
  misc_RNA (1)...(19): siRNA sense strand
uggaguaugacuaugaaua

SEQ ID NO: 2299094 - RNA, 19 nt, Homo sapiens
  misc_RNA (1)...(19): siRNA sense strand
ucaauaaaguucuucggaa

SEQ ID NO: 2299095 - RNA, 19 nt, Homo sapiens
  misc_RNA (1)...(19): siRNA sense strand
aagaagacuuggauguaga

SEQ ID NO: 2299096 - RNA, 19 nt, Homo sapiens
  misc_RNA (1)...(19): siRNA sense strand
cgaagcgagccaagggcaa

SEQ ID NO: 2299097 - RNA, 19 nt, Homo sapiens
  misc_RNA (1)...(19): siRNA sense strand
uugaaauggccacaggaaa

SEQ ID NO: 2299098 - RNA, 19 nt, Homo sapiens
  misc_RNA (1)...(19): siRNA sense strand
agaaagagaugucaaggga

SEQ ID NO: 2299099 - RNA, 19 nt, Homo sapiens
  misc_RNA (1)...(19): siRNA sense strand
aagaugaccaugaggaaca

SEQ ID NO: 2299100 - RNA, 19 nt, Homo sapiens
  misc_RNA (1)...(19): siRNA sense strand
caguauauggcaccagaaa

SEQ ID NO: 2299101 - RNA, 19 nt, Homo sapiens
  misc_RNA (1)...(19): siRNA sense strand
cggaagaccaagacaaaau

SEQ ID NO: 2299102 - RNA, 19 nt, Homo sapiens
  misc_RNA (1)...(19): siRNA sense strand
ggaaggaugaaaauagaaa

SEQ ID NO: 2299103 - RNA, 19 nt, Homo sapiens
  misc_RNA (1)...(19): siRNA sense strand
ugguagagacuuuagaaaa

SEQ ID NO: 2299104 - RNA, 19 nt, Homo sapiens
  misc_RNA (1)...(19): siRNA sense strand
uaaggaaaucccagagaga

SEQ ID NO: 2299105 - RNA, 19 nt, Homo sapiens
  misc_RNA (1)...(19): siRNA sense strand
gcggagaaagagaugucaa

SEQ ID NO: 2299106 - RNA, 19 nt, Homo sapiens
  misc_RNA (1)...(19): siRNA sense strand
ggucgaggccacaaagaca

SEQ ID NO: 2299107 - RNA, 19 nt, Homo sapiens
  misc_RNA (1)...(19): siRNA sense strand
ccacaaagacagauguuac

SEQ ID NO: 2299108 - RNA, 19 nt, Homo sapiens
  misc_RNA (1)...(19): siRNA sense strand
ugacggaagaccaagacaa

SEQ ID NO: 2299109 - RNA, 19 nt, Homo sapiens
  misc_RNA (1)...(19): siRNA sense strand
guucggaaagagaaagaau

SEQ ID NO: 2299110 - RNA, 19 nt, Homo sapiens
  misc_RNA (1)...(19): siRNA sense strand
gguauacaugaguggaauu

SEQ ID NO: 2299111 - RNA, 19 nt, Homo sapiens
  misc_RNA (1)...(19): siRNA sense strand
aaugaauaucucaggagua

SEQ ID NO: 2299112 - RNA, 19 nt, Homo sapiens
  misc_RNA (1)...(19): siRNA sense strand
ggauguagaagaugaccau

SEQ ID NO: 2299113 - RNA, 19 nt, Homo sapiens
  misc_RNA (1)...(19): siRNA sense strand
agaaagaauuacaagcacu

SEQ ID NO: 2299114 - RNA, 19 nt, Homo sapiens
  misc_RNA (1)...(19): siRNA sense strand
augaauaucucaggaguau

SEQ ID NO: 2299115 - RNA, 19 nt, Homo sapiens
  misc_RNA (1)...(19): siRNA sense strand
gaaagagaugucaagggaa

SEQ ID NO: 2299116 - RNA, 19 nt, Homo sapiens
  misc_RNA (1)...(19): siRNA sense strand
auugcaagccucagagaau

SEQ ID NO: 2299117 - RNA, 19 nt, Homo sapiens
  misc_RNA (1)...(19): siRNA sense strand
auuaaacaccugaagcuua

SEQ ID NO: 2299118 - RNA, 19 nt, Homo sapiens
  misc_RNA (1)...(19): siRNA sense strand
uggcacaaauacugaagau

SEQ ID NO: 2299119 - RNA, 19 nt, Homo sapiens
  misc_RNA (1)...(19): siRNA sense strand
gauaaaggaccaagaggcu

SEQ ID NO: 2299120 - RNA, 19 nt, Homo sapiens
  misc_RNA (1)...(19): siRNA sense strand
gccaaguccugcggagaaa

SEQ ID NO: 2299121 - RNA, 19 nt, Homo sapiens
  misc_RNA (1)...(19): siRNA sense strand
gagagugaauggagcugau

SEQ ID NO: 2299122 - RNA, 19 nt, Homo sapiens
  misc_RNA (1)...(19): siRNA sense strand
cguaauuuauacacuggua

SEQ ID NO: 2299123 - RNA, 19 nt, Homo sapiens
  misc_RNA (1)...(19): siRNA sense strand
ugaugaaaauggugacaga

SEQ ID NO: 2299124 - RNA, 19 nt, Homo sapiens
  misc_RNA (1)...(19): siRNA sense strand
agacaaugagcaaacaauu

SEQ ID NO: 2299125 - RNA, 19 nt, Homo sapiens
  misc_RNA (1)...(19): siRNA sense strand
caaagaggcuugcuggcau

SEQ ID NO: 2299126 - RNA, 19 nt, Homo sapiens
  misc_RNA (1)...(19): siRNA sense strand
ggaccaagaggcuacggaa

SEQ ID NO: 2299127 - RNA, 19 nt, Homo sapiens
  misc_RNA (1)...(19): siRNA sense strand
cagcuggaucaaaugaaua

SEQ ID NO: 2299128 - RNA, 19 nt, Homo sapiens
  misc_RNA (1)...(19): siRNA sense strand
gauucuucaugcugaggaa

SEQ ID NO: 2299129 - RNA, 19 nt, Homo sapiens
  misc_RNA (1)...(19): siRNA sense strand
gucccaacccauagaaauu

SEQ ID NO: 2299130 - RNA, 19 nt, Homo sapiens
  misc_RNA (1)...(19): siRNA sense strand
ucuaaauucuucuggcaca

SEQ ID NO: 2299131 - RNA, 19 nt, Homo sapiens
  misc_RNA (1)...(19): siRNA sense strand
gcuacugggaaguuggauu

SEQ ID NO: 2299132 - RNA, 19 nt, Homo sapiens
  misc_RNA (1)...(19): siRNA sense strand
augaaguggaagaggguaa

SEQ ID NO: 2299133 - RNA, 19 nt, Homo sapiens
  misc_RNA (1)...(19): siRNA sense strand
gggaaaaggaacuggugaa

SEQ ID NO: 2299134 - RNA, 19 nt, Homo sapiens
  misc_RNA (1)...(19): siRNA sense strand
ucagagaacuugaagcaga

SEQ ID NO: 2299135 - RNA, 19 nt, Homo sapiens
  misc_RNA (1)...(19): siRNA sense strand
cugaaagacaggugaaagu

SEQ ID NO: 2299136 - RNA, 19 nt, Homo sapiens
  misc_RNA (1)...(19): siRNA sense strand
cuugcauaaucgcgggaua

SEQ ID NO: 2299137 - RNA, 19 nt, Homo sapiens
  misc_RNA (1)...(19): siRNA sense strand
agagcaaaucagagaacuu

SEQ ID NO: 2299138 - RNA, 19 nt, Homo sapiens
  misc_RNA (1)...(19): siRNA sense strand
aggaaagaaaggacagcau

SEQ ID NO: 2299139 - RNA, 19 nt, Homo sapiens
  misc_RNA (1)...(19): siRNA sense strand
ccaucagagcugucgggaa

SEQ ID NO: 2299140 - RNA, 19 nt, Homo sapiens
  misc_RNA (1)...(19): siRNA sense strand
aggcggaugaaguggaaga

SEQ ID NO: 2299141 - RNA, 19 nt, Homo sapiens
  misc_RNA (1)...(19): siRNA sense strand
agcaaacccaggaaagaaa

SEQ ID NO: 2299142 - RNA, 19 nt, Homo sapiens
  misc_RNA (1)...(19): siRNA sense strand
cagacucccaggaaggaaa

SEQ ID NO: 2299143 - RNA, 19 nt, Homo sapiens
  misc_RNA (1)...(19): siRNA sense strand
auuacaagucagaagucaa

SEQ ID NO: 2299144 - RNA, 19 nt, Homo sapiens
  misc_RNA (1)...(19): siRNA sense strand
agcauuuaccaaagagcaa

SEQ ID NO: 2299145 - RNA, 19 nt, Homo sapiens
  misc_RNA (1)...(19): siRNA sense strand
ggaagaggguaaagggugg

SEQ ID NO: 2299146 - RNA, 19 nt, Homo sapiens
  misc_RNA (1)...(19): siRNA sense strand
ggaugaaguggaagagggu

SEQ ID NO: 2299147 - RNA, 19 nt, Homo sapiens
  misc_RNA (1)...(19): siRNA sense strand
ggcaagaggaaaagcgaca

SEQ ID NO: 2299148 - RNA, 19 nt, Homo sapiens
  misc_RNA (1)...(19): siRNA sense strand
agacugaggcgauacgaga

SEQ ID NO: 2299149 - RNA, 19 nt, Homo sapiens
  misc_RNA (1)...(19): siRNA sense strand
acugaggcgauacgagaua

SEQ ID NO: 2299150 - RNA, 19 nt, Homo sapiens
  misc_RNA (1)...(19): siRNA sense strand
aggaacuggugaaugugaa

SEQ ID NO: 2299151 - RNA, 19 nt, Homo sapiens
  misc_RNA (1)...(19): siRNA sense strand
ccaucuaugaggcgggaaa

SEQ ID NO: 2299152 - RNA, 19 nt, Homo sapiens
  misc_RNA (1)...(19): siRNA sense strand
uggagagauacuacgacua

SEQ ID NO: 2299153 - RNA, 19 nt, Homo sapiens
  misc_RNA (1)...(19): siRNA sense strand
ccaucuaugaggcgggaaa

SEQ ID NO: 2299154 - RNA, 19 nt, Homo sapiens
  misc_RNA (1)...(19): siRNA sense strand
uggagagauacuacgacua

SEQ ID NO: 2299155 - RNA, 19 nt, Homo sapiens
  misc_RNA (1)...(19): siRNA sense strand
aggcagaaacgcagggcaa

SEQ ID NO: 2299156 - RNA, 19 nt, Homo sapiens
  misc_RNA (1)...(19): siRNA sense strand
gcgaggucucagagggcaa

SEQ ID NO: 2299157 - RNA, 19 nt, Homo sapiens
  misc_RNA (1)...(19): siRNA sense strand
gcuucagagucaacggaca

SEQ ID NO: 2299158 - RNA, 19 nt, Homo sapiens
  misc_RNA (1)...(19): siRNA sense strand
guccagagcuugugagccu

SEQ ID NO: 2299159 - RNA, 19 nt, Homo sapiens
  misc_RNA (1)...(19): siRNA sense strand
acaaauuucuggaaggaag

SEQ ID NO: 2299160 - RNA, 19 nt, Homo sapiens
  misc_RNA (1)...(19): siRNA sense strand
ggacaggagaccacaggga

SEQ ID NO: 2299161 - RNA, 19 nt, Homo sapiens
  misc_RNA (1)...(19): siRNA sense strand
cauggaacacagcgggaau

SEQ ID NO: 2299162 - RNA, 19 nt, Homo sapiens
  misc_RNA (1)...(19): siRNA sense strand
uguccugccugaugggaau

SEQ ID NO: 2299163 - RNA, 19 nt, Homo sapiens
  misc_RNA (1)...(19): siRNA sense strand
uggcuaugaacgucacaaa

SEQ ID NO: 2299164 - RNA, 19 nt, Homo sapiens
  misc_RNA (1)...(19): siRNA sense strand
cagaagauguccugggagc

SEQ ID NO: 2299165 - RNA, 19 nt, Homo sapiens
  misc_RNA (1)...(19): siRNA sense strand
gaagaaaacaucagcggca

SEQ ID NO: 2299166 - RNA, 19 nt, Homo sapiens
  misc_RNA (1)...(19): siRNA sense strand
gaagaugccaugaagacca

SEQ ID NO: 2299167 - RNA, 19 nt, Homo sapiens
  misc_RNA (1)...(19): siRNA sense strand
cgcuggugcuucagaguca

SEQ ID NO: 2299168 - RNA, 19 nt, Homo sapiens
  misc_RNA (1)...(19): siRNA sense strand
gguuucucgcugagggaca

SEQ ID NO: 2299169 - RNA, 19 nt, Homo sapiens
  misc_RNA (1)...(19): siRNA sense strand
cuugacagagaaugggcaa

SEQ ID NO: 2299170 - RNA, 19 nt, Homo sapiens
  misc_RNA (1)...(19): siRNA sense strand
gggaauggaaccuaccaga

SEQ ID NO: 2299171 - RNA, 19 nt, Homo sapiens
  misc_RNA (1)...(19): siRNA sense strand
ccauauucgcugaguucuu

SEQ ID NO: 2299172 - RNA, 19 nt, Homo sapiens
  misc_RNA (1)...(19): siRNA sense strand
cgagaggcggaauggccaa

SEQ ID NO: 2299173 - RNA, 19 nt, Homo sapiens
  misc_RNA (1)...(19): siRNA sense strand
uggcaaaguugguggggua

SEQ ID NO: 2299174 - RNA, 19 nt, Homo sapiens
  misc_RNA (1)...(19): siRNA sense strand
aggaaacacaagagaaauu

SEQ ID NO: 2299175 - RNA, 19 nt, Homo sapiens
  misc_RNA (1)...(19): siRNA sense strand
ggguauggugcuagauauu

SEQ ID NO: 2299176 - RNA, 19 nt, Homo sapiens
  misc_RNA (1)...(19): siRNA sense strand
cugaaagaacucugaaaga

SEQ ID NO: 2299177 - RNA, 19 nt, Homo sapiens
  misc_RNA (1)...(19): siRNA sense strand
gacuaaaggaagauggaga

SEQ ID NO: 2299178 - RNA, 19 nt, Homo sapiens
  misc_RNA (1)...(19): siRNA sense strand
ggagcgaagauguccgaaa

SEQ ID NO: 2299179 - RNA, 19 nt, Homo sapiens
  misc_RNA (1)...(19): siRNA sense strand
cagaugacuuggugcgaga

SEQ ID NO: 2299180 - RNA, 19 nt, Homo sapiens
  misc_RNA (1)...(19): siRNA sense strand
guacauuucuuaugggaac

SEQ ID NO: 2299181 - RNA, 19 nt, Homo sapiens
  misc_RNA (1)...(19): siRNA sense strand
aaacaaggcgaguggcuga

SEQ ID NO: 2299182 - RNA, 19 nt, Homo sapiens
  misc_RNA (1)...(19): siRNA sense strand
cugaaggauuguuggggua

SEQ ID NO: 2299183 - RNA, 19 nt, Homo sapiens
  misc_RNA (1)...(19): siRNA sense strand
acuccuggcaugauggaaa

SEQ ID NO: 2299184 - RNA, 19 nt, Homo sapiens
  misc_RNA (1)...(19): siRNA sense strand
ggagagguguggagcgaag

SEQ ID NO: 2299185 - RNA, 19 nt, Homo sapiens
  misc_RNA (1)...(19): siRNA sense strand
gcucagcagcagagaucuu

SEQ ID NO: 2299186 - RNA, 19 nt, Homo sapiens
  misc_RNA (1)...(19): siRNA sense strand
aggauuucauauugcacaa

SEQ ID NO: 2299187 - RNA, 19 nt, Homo sapiens
  misc_RNA (1)...(19): siRNA sense strand
uggugugauucgugcagaa

SEQ ID NO: 2299188 - RNA, 19 nt, Homo sapiens
  misc_RNA (1)...(19): siRNA sense strand
uagacaaacaaaagcguaa

SEQ ID NO: 2299189 - RNA, 19 nt, Homo sapiens
  misc_RNA (1)...(19): siRNA sense strand
aaaugaaacugaaugcuca

SEQ ID NO: 2299190 - RNA, 19 nt, Homo sapiens
  misc_RNA (1)...(19): siRNA sense strand
acagacauucucaaggaaa

SEQ ID NO: 2299191 - RNA, 19 nt, Homo sapiens
  misc_RNA (1)...(19): siRNA sense strand
ugauggaguacuuugcaaa

SEQ ID NO: 2299192 - RNA, 19 nt, Homo sapiens
  misc_RNA (1)...(19): siRNA sense strand
cuccaaggaacgauagcua

SEQ ID NO: 2299193 - RNA, 19 nt, Homo sapiens
  misc_RNA (1)...(19): siRNA sense strand
cagaaucaccagaugacuu

SEQ ID NO: 2299194 - RNA, 19 nt, Homo sapiens
  misc_RNA (1)...(19): siRNA sense strand
cuggacagccacugccaaa

SEQ ID NO: 2299195 - RNA, 19 nt, Homo sapiens
  misc_RNA (1)...(19): siRNA sense strand
agauauuacucuuaccuca

SEQ ID NO: 2299196 - RNA, 19 nt, Homo sapiens
  misc_RNA (1)...(19): siRNA sense strand
gccuugagaaagacagaau

SEQ ID NO: 2299197 - RNA, 19 nt, Homo sapiens
  misc_RNA (1)...(19): siRNA sense strand
agacagaauugcuugugga

SEQ ID NO: 2299198 - RNA, 19 nt, Homo sapiens
  misc_RNA (1)...(19): siRNA sense strand
aggacguacucguuaccaa

SEQ ID NO: 2299199 - RNA, 19 nt, Homo sapiens
  misc_RNA (1)...(19): siRNA sense strand
cagacauucucaaggaaac

SEQ ID NO: 2299200 - RNA, 19 nt, Homo sapiens
  misc_RNA (1)...(19): siRNA sense strand
cgugcagaaagguauaaua

SEQ ID NO: 2299201 - RNA, 19 nt, Homo sapiens
  misc_RNA (1)...(19): siRNA sense strand
gagcaugcauggaaggccu

SEQ ID NO: 2299202 - RNA, 19 nt, Homo sapiens
  misc_RNA (1)...(19): siRNA sense strand
ccacaucaggauugccauu

SEQ ID NO: 2299203 - RNA, 19 nt, Homo sapiens
  misc_RNA (1)...(19): siRNA sense strand
caggauugccauuucacua

SEQ ID NO: 2299204 - RNA, 19 nt, Homo sapiens
  misc_RNA (1)...(19): siRNA sense strand
gaucaaaucuaccauggga

SEQ ID NO: 2299205 - RNA, 19 nt, Homo sapiens
  misc_RNA (1)...(19): siRNA sense strand
cugugaaggugaaggcucu

SEQ ID NO: 2299206 - RNA, 19 nt, Homo sapiens
  misc_RNA (1)...(19): siRNA sense strand
uaugaugagaccuggacua

SEQ ID NO: 2299207 - RNA, 19 nt, Homo sapiens
  misc_RNA (1)...(19): siRNA sense strand
cccuaaagguauggagcga

SEQ ID NO: 2299208 - RNA, 19 nt, Homo sapiens
  misc_RNA (1)...(19): siRNA sense strand
cuaaagguauggagcgaug

SEQ ID NO: 2299209 - RNA, 19 nt, Homo sapiens
  misc_RNA (1)...(19): siRNA sense strand
aggcugggauagacaccaa

SEQ ID NO: 2299210 - RNA, 19 nt, Homo sapiens
  misc_RNA (1)...(19): siRNA sense strand
ggacagaaauggcagcaca

SEQ ID NO: 2299211 - RNA, 19 nt, Homo sapiens
  misc_RNA (1)...(19): siRNA sense strand
gugagaaacaacaggguga

SEQ ID NO: 2299212 - RNA, 19 nt, Homo sapiens
  misc_RNA (1)...(19): siRNA sense strand
gguuuuggcgagugagaaa

SEQ ID NO: 2299213 - RNA, 19 nt, Homo sapiens
  misc_RNA (1)...(19): siRNA sense strand
ccugagacucguaaagcua

SEQ ID NO: 2299214 - RNA, 19 nt, Homo sapiens
  misc_RNA (1)...(19): siRNA sense strand
ggaaaaguggacagaaaca

SEQ ID NO: 2299215 - RNA, 19 nt, Homo sapiens
  misc_RNA (1)...(19): siRNA sense strand
cuggaagacgguuggauuu

SEQ ID NO: 2299216 - RNA, 19 nt, Homo sapiens
  misc_RNA (1)...(19): siRNA sense strand
gccauggacacuaggaaau

SEQ ID NO: 2299217 - RNA, 19 nt, Homo sapiens
  misc_RNA (1)...(19): siRNA sense strand
ugaaaauagcgacgggaau

SEQ ID NO: 2299218 - RNA, 19 nt, Homo sapiens
  misc_RNA (1)...(19): siRNA sense strand
agccauggacacuaggaaa

SEQ ID NO: 2299219 - RNA, 19 nt, Homo sapiens
  misc_RNA (1)...(19): siRNA sense strand
cgaugcaguuuaugaaaau

SEQ ID NO: 2299220 - RNA, 19 nt, Homo sapiens
  misc_RNA (1)...(19): siRNA sense strand
gacagaaauggcagcacaa

SEQ ID NO: 2299221 - RNA, 19 nt, Homo sapiens
  misc_RNA (1)...(19): siRNA sense strand
accaggaauuggaggagau

SEQ ID NO: 2299222 - RNA, 19 nt, Homo sapiens
  misc_RNA (1)...(19): siRNA sense strand
ugcauugacaggacagaaa

SEQ ID NO: 2299223 - RNA, 19 nt, Homo sapiens
  misc_RNA (1)...(19): siRNA sense strand
cauuaacaugacaggaaaa

SEQ ID NO: 2299224 - RNA, 19 nt, Homo sapiens
  misc_RNA (1)...(19): siRNA sense strand
auggauacccaaugcaaau

SEQ ID NO: 2299225 - RNA, 19 nt, Homo sapiens
  misc_RNA (1)...(19): siRNA sense strand
acuggaagacgguuggauu

SEQ ID NO: 2299226 - RNA, 19 nt, Homo sapiens
  misc_RNA (1)...(19): siRNA sense strand
cgucgaaagcgauaugcau

SEQ ID NO: 2299227 - RNA, 19 nt, Homo sapiens
  misc_RNA (1)...(19): siRNA sense strand
gugaauuagaaaauggcaa

SEQ ID NO: 2299228 - RNA, 19 nt, Homo sapiens
  misc_RNA (1)...(19): siRNA sense strand
uccuaaucaugauggaaau

SEQ ID NO: 2299229 - RNA, 19 nt, Homo sapiens
  misc_RNA (1)...(19): siRNA sense strand
augaugauuuacagggcau

SEQ ID NO: 2299230 - RNA, 19 nt, Homo sapiens
  misc_RNA (1)...(19): siRNA sense strand
ggugauggauggauaccca

SEQ ID NO: 2299231 - RNA, 19 nt, Homo sapiens
  misc_RNA (1)...(19): siRNA sense strand
auccuaaucaugauggaaa

SEQ ID NO: 2299232 - RNA, 19 nt, Homo sapiens
  misc_RNA (1)...(19): siRNA sense strand
ccggcugacccaaggaaaa

SEQ ID NO: 2299233 - RNA, 19 nt, Homo sapiens
  misc_RNA (1)...(19): siRNA sense strand
ggacagaaauggcagcaca

SEQ ID NO: 2299234 - RNA, 19 nt, Homo sapiens
  misc_RNA (1)...(19): siRNA sense strand
gugagaaacaacaggguga

SEQ ID NO: 2299235 - RNA, 19 nt, Homo sapiens
  misc_RNA (1)...(19): siRNA sense strand
gguuuuggcgagugagaaa

SEQ ID NO: 2299236 - RNA, 19 nt, Homo sapiens
  misc_RNA (1)...(19): siRNA sense strand
ccugagacucguaaagcua

SEQ ID NO: 2299237 - RNA, 19 nt, Homo sapiens
  misc_RNA (1)...(19): siRNA sense strand
ggaaaaguggacagaaaca

SEQ ID NO: 2299238 - RNA, 19 nt, Homo sapiens
  misc_RNA (1)...(19): siRNA sense strand
cuggaagacgguuggauuu

SEQ ID NO: 2299239 - RNA, 19 nt, Homo sapiens
  misc_RNA (1)...(19): siRNA sense strand
gccauggacacuaggaaau

SEQ ID NO: 2299240 - RNA, 19 nt, Homo sapiens
  misc_RNA (1)...(19): siRNA sense strand
ugaaaauagcgacgggaau

SEQ ID NO: 2299241 - RNA, 19 nt, Homo sapiens
  misc_RNA (1)...(19): siRNA sense strand
agccauggacacuaggaaa

SEQ ID NO: 2299242 - RNA, 19 nt, Homo sapiens
  misc_RNA (1)...(19): siRNA sense strand
cgaugcaguuuaugaaaau

SEQ ID NO: 2299243 - RNA, 19 nt, Homo sapiens
  misc_RNA (1)...(19): siRNA sense strand
gacagaaauggcagcacaa

SEQ ID NO: 2299244 - RNA, 19 nt, Homo sapiens
  misc_RNA (1)...(19): siRNA sense strand
accaggaauuggaggagau

SEQ ID NO: 2299245 - RNA, 19 nt, Homo sapiens
  misc_RNA (1)...(19): siRNA sense strand
ugcauugacaggacagaaa

SEQ ID NO: 2299246 - RNA, 19 nt, Homo sapiens
  misc_RNA (1)...(19): siRNA sense strand
cauuaacaugacaggaaaa

SEQ ID NO: 2299247 - RNA, 19 nt, Homo sapiens
  misc_RNA (1)...(19): siRNA sense strand
auggauacccaaugcaaau

SEQ ID NO: 2299248 - RNA, 19 nt, Homo sapiens
  misc_RNA (1)...(19): siRNA sense strand
acuggaagacgguuggauu

SEQ ID NO: 2299249 - RNA, 19 nt, Homo sapiens
  misc_RNA (1)...(19): siRNA sense strand
cgucgaaagcgauaugcau

SEQ ID NO: 2299250 - RNA, 19 nt, Homo sapiens
  misc_RNA (1)...(19): siRNA sense strand
gugaauuagaaaauggcaa

SEQ ID NO: 2299251 - RNA, 19 nt, Homo sapiens
  misc_RNA (1)...(19): siRNA sense strand
uccuaaucaugauggaaau

SEQ ID NO: 2299252 - RNA, 19 nt, Homo sapiens
  misc_RNA (1)...(19): siRNA sense strand
augaugauuuacagggcau

SEQ ID NO: 2299253 - RNA, 19 nt, Homo sapiens
  misc_RNA (1)...(19): siRNA sense strand
ggugauggauggauaccca

SEQ ID NO: 2299254 - RNA, 19 nt, Homo sapiens
  misc_RNA (1)...(19): siRNA sense strand
auccuaaucaugauggaaa

SEQ ID NO: 2299255 - RNA, 19 nt, Homo sapiens
  misc_RNA (1)...(19): siRNA sense strand
ccggcugacccaaggaaaa

SEQ ID NO: 2299256 - RNA, 19 nt, Homo sapiens
  misc_RNA (1)...(19): siRNA sense strand
caagaaaggagaugcccua

SEQ ID NO: 2299257 - RNA, 19 nt, Homo sapiens
  misc_RNA (1)...(19): siRNA sense strand
cuggaagggcugagaacca

SEQ ID NO: 2299258 - RNA, 19 nt, Homo sapiens
  misc_RNA (1)...(19): siRNA sense strand
cugccaaguuugaguucau

SEQ ID NO: 2299259 - RNA, 19 nt, Homo sapiens
  misc_RNA (1)...(19): siRNA sense strand
gugcagacucagaugccaa

SEQ ID NO: 2299260 - RNA, 19 nt, Homo sapiens
  misc_RNA (1)...(19): siRNA sense strand
gggacaucguguuggagga

SEQ ID NO: 2299261 - RNA, 19 nt, Homo sapiens
  misc_RNA (1)...(19): siRNA sense strand
gggcaggaagccagacaca

SEQ ID NO: 2299262 - RNA, 19 nt, Homo sapiens
  misc_RNA (1)...(19): siRNA sense strand
acaaggucauggagggcau

SEQ ID NO: 2299263 - RNA, 19 nt, Homo sapiens
  misc_RNA (1)...(19): siRNA sense strand
aggucugccucuuuggaaa

SEQ ID NO: 2299264 - RNA, 19 nt, Homo sapiens
  misc_RNA (1)...(19): siRNA sense strand
cgcacagaugucagaguaa

SEQ ID NO: 2299265 - RNA, 19 nt, Homo sapiens
  misc_RNA (1)...(19): siRNA sense strand
cuuuggaaacucugaggua

SEQ ID NO: 2299266 - RNA, 19 nt, Homo sapiens
  misc_RNA (1)...(19): siRNA sense strand
agaaggugccagaggagga

SEQ ID NO: 2299267 - RNA, 19 nt, Homo sapiens
  misc_RNA (1)...(19): siRNA sense strand
ccgugaagauccaggcauc

SEQ ID NO: 2299268 - RNA, 19 nt, Homo sapiens
  misc_RNA (1)...(19): siRNA sense strand
acaucguguuggaggagau

SEQ ID NO: 2299269 - RNA, 19 nt, Homo sapiens
  misc_RNA (1)...(19): siRNA sense strand
ucguguuggaggagaucaa

SEQ ID NO: 2299270 - RNA, 19 nt, Homo sapiens
  misc_RNA (1)...(19): siRNA sense strand
acagagaagugcaaccuca

SEQ ID NO: 2299271 - RNA, 19 nt, Homo sapiens
  misc_RNA (1)...(19): siRNA sense strand
aggccaucgagcugggcua

SEQ ID NO: 2299272 - RNA, 19 nt, Homo sapiens
  misc_RNA (1)...(19): siRNA sense strand
cagccaaggccuuuaaaau

SEQ ID NO: 2299273 - RNA, 19 nt, Homo sapiens
  misc_RNA (1)...(19): siRNA sense strand
ugguagaugugggcaggaa

SEQ ID NO: 2299274 - RNA, 19 nt, Homo sapiens
  misc_RNA (1)...(19): siRNA sense strand
cuggaagggcugagaacca

SEQ ID NO: 2299275 - RNA, 19 nt, Homo sapiens
  misc_RNA (1)...(19): siRNA sense strand
cugccaaguuugaguucau

SEQ ID NO: 2299276 - RNA, 19 nt, Homo sapiens
  misc_RNA (1)...(19): siRNA sense strand
acaaggucauggagggcau

SEQ ID NO: 2299277 - RNA, 19 nt, Homo sapiens
  misc_RNA (1)...(19): siRNA sense strand
aggucugccucuuuggaaa

SEQ ID NO: 2299278 - RNA, 19 nt, Homo sapiens
  misc_RNA (1)...(19): siRNA sense strand
cgcacagaugucagaguaa

SEQ ID NO: 2299279 - RNA, 19 nt, Homo sapiens
  misc_RNA (1)...(19): siRNA sense strand
cuuuggaaacucugaggua

SEQ ID NO: 2299280 - RNA, 19 nt, Homo sapiens
  misc_RNA (1)...(19): siRNA sense strand
agaaggugccagaggagga

SEQ ID NO: 2299281 - RNA, 19 nt, Homo sapiens
  misc_RNA (1)...(19): siRNA sense strand
acagagaagugcaaccuca

SEQ ID NO: 2299282 - RNA, 19 nt, Homo sapiens
  misc_RNA (1)...(19): siRNA sense strand
aggccaucgagcugggcua

SEQ ID NO: 2299283 - RNA, 19 nt, Homo sapiens
  misc_RNA (1)...(19): siRNA sense strand
cagccaaggccuuuaaaau

SEQ ID NO: 2299284 - RNA, 19 nt, Homo sapiens
  misc_RNA (1)...(19): siRNA sense strand
caagaaaggagaugcccua

SEQ ID NO: 2299285 - RNA, 19 nt, Homo sapiens
  misc_RNA (1)...(19): siRNA sense strand
cuggaagggcugagaacca

SEQ ID NO: 2299286 - RNA, 19 nt, Homo sapiens
  misc_RNA (1)...(19): siRNA sense strand
cugccaaguuugaguucau

SEQ ID NO: 2299287 - RNA, 19 nt, Homo sapiens
  misc_RNA (1)...(19): siRNA sense strand
gugcagacucagaugccaa

SEQ ID NO: 2299288 - RNA, 19 nt, Homo sapiens
  misc_RNA (1)...(19): siRNA sense strand
gggacaucguguuggagga

SEQ ID NO: 2299289 - RNA, 19 nt, Homo sapiens
  misc_RNA (1)...(19): siRNA sense strand
gggcaggaagccagacaca

SEQ ID NO: 2299290 - RNA, 19 nt, Homo sapiens
  misc_RNA (1)...(19): siRNA sense strand
acaaggucauggagggcau

SEQ ID NO: 2299291 - RNA, 19 nt, Homo sapiens
  misc_RNA (1)...(19): siRNA sense strand
aggucugccucuuuggaaa

SEQ ID NO: 2299292 - RNA, 19 nt, Homo sapiens
  misc_RNA (1)...(19): siRNA sense strand
cgcacagaugucagaguaa

SEQ ID NO: 2299293 - RNA, 19 nt, Homo sapiens
  misc_RNA (1)...(19): siRNA sense strand
cuuuggaaacucugaggua

SEQ ID NO: 2299294 - RNA, 19 nt, Homo sapiens
  misc_RNA (1)...(19): siRNA sense strand
agaaggugccagaggagga

SEQ ID NO: 2299295 - RNA, 19 nt, Homo sapiens
  misc_RNA (1)...(19): siRNA sense strand
ccgugaagauccaggcauc

SEQ ID NO: 2299296 - RNA, 19 nt, Homo sapiens
  misc_RNA (1)...(19): siRNA sense strand
acaucguguuggaggagau

SEQ ID NO: 2299297 - RNA, 19 nt, Homo sapiens
  misc_RNA (1)...(19): siRNA sense strand
ucguguuggaggagaucaa

SEQ ID NO: 2299298 - RNA, 19 nt, Homo sapiens
  misc_RNA (1)...(19): siRNA sense strand
acagagaagugcaaccuca

SEQ ID NO: 2299299 - RNA, 19 nt, Homo sapiens
  misc_RNA (1)...(19): siRNA sense strand
aggccaucgagcugggcua

SEQ ID NO: 2299300 - RNA, 19 nt, Homo sapiens
  misc_RNA (1)...(19): siRNA sense strand
cagccaaggccuuuaaaau

SEQ ID NO: 2299301 - RNA, 19 nt, Homo sapiens
  misc_RNA (1)...(19): siRNA sense strand
ugguagaugugggcaggaa

SEQ ID NO: 2299302 - RNA, 19 nt, Homo sapiens
  misc_RNA (1)...(19): siRNA sense strand
aaagaaagcuguaagccca

SEQ ID NO: 2299303 - RNA, 19 nt, Homo sapiens
  misc_RNA (1)...(19): siRNA sense strand
cuaagaaucagguggggaa

SEQ ID NO: 2299304 - RNA, 19 nt, Homo sapiens
  misc_RNA (1)...(19): siRNA sense strand
ggaaggaggugaucugcca

SEQ ID NO: 2299305 - RNA, 19 nt, Homo sapiens
  misc_RNA (1)...(19): siRNA sense strand
augaaagagagcagcugua

SEQ ID NO: 2299306 - RNA, 19 nt, Homo sapiens
  misc_RNA (1)...(19): siRNA sense strand
cagccugccuauaaggaca

SEQ ID NO: 2299307 - RNA, 19 nt, Homo sapiens
  misc_RNA (1)...(19): siRNA sense strand
ggaauaucacccuggagga

SEQ ID NO: 2299308 - RNA, 19 nt, Homo sapiens
  misc_RNA (1)...(19): siRNA sense strand
ugaaaauaguacagugacu

SEQ ID NO: 2299309 - RNA, 19 nt, Homo sapiens
  misc_RNA (1)...(19): siRNA sense strand
cuucaauaccuuugguuuu

SEQ ID NO: 2299310 - RNA, 19 nt, Homo sapiens
  misc_RNA (1)...(19): siRNA sense strand
ccuggaggaugaagggugu

SEQ ID NO: 2299311 - RNA, 19 nt, Homo sapiens
  misc_RNA (1)...(19): siRNA sense strand
ggagaaaaguuguggguga

SEQ ID NO: 2299312 - RNA, 19 nt, Homo sapiens
  misc_RNA (1)...(19): siRNA sense strand
cauccaaauccgaagguua

SEQ ID NO: 2299313 - RNA, 19 nt, Homo sapiens
  misc_RNA (1)...(19): siRNA sense strand
cuagaagacaugagagaga

SEQ ID NO: 2299314 - RNA, 19 nt, Homo sapiens
  misc_RNA (1)...(19): siRNA sense strand
guuaaagagacuaggcauu

SEQ ID NO: 2299315 - RNA, 19 nt, Homo sapiens
  misc_RNA (1)...(19): siRNA sense strand
cagaaauccugaacgggaa

SEQ ID NO: 2299316 - RNA, 19 nt, Homo sapiens
  misc_RNA (1)...(19): siRNA sense strand
agguagaauuauaugguga

SEQ ID NO: 2299317 - RNA, 19 nt, Homo sapiens
  misc_RNA (1)...(19): siRNA sense strand
caauauuacagguuggcaa

SEQ ID NO: 2299318 - RNA, 19 nt, Homo sapiens
  misc_RNA (1)...(19): siRNA sense strand
aggcuuacauacaggagaa

SEQ ID NO: 2299319 - RNA, 19 nt, Homo sapiens
  misc_RNA (1)...(19): siRNA sense strand
ggaaauacgugguggugac

SEQ ID NO: 2299320 - RNA, 19 nt, Homo sapiens
  misc_RNA (1)...(19): siRNA sense strand
cugaagagauugggaucaa

SEQ ID NO: 2299321 - RNA, 19 nt, Homo sapiens
  misc_RNA (1)...(19): siRNA sense strand
guaggaacgaugagcacaa

SEQ ID NO: 2299322 - RNA, 19 nt, Homo sapiens
  misc_RNA (1)...(19): siRNA sense strand
gggaaaagcacaacuacaa

SEQ ID NO: 2299323 - RNA, 19 nt, Homo sapiens
  misc_RNA (1)...(19): siRNA sense strand
ccaagaacaaccacagaau

SEQ ID NO: 2299324 - RNA, 19 nt, Homo sapiens
  misc_RNA (1)...(19): siRNA sense strand
gguagaauuauauggugaa

SEQ ID NO: 2299325 - RNA, 19 nt, Homo sapiens
  misc_RNA (1)...(19): siRNA sense strand
ugagagagagacugggcaa

SEQ ID NO: 2299326 - RNA, 19 nt, Homo sapiens
  misc_RNA (1)...(19): siRNA sense strand
agaacaggugaauggauua

SEQ ID NO: 2299327 - RNA, 19 nt, Homo sapiens
  misc_RNA (1)...(19): siRNA sense strand
gguaagcuggcucgagaaa

SEQ ID NO: 2299328 - RNA, 19 nt, Homo sapiens
  misc_RNA (1)...(19): siRNA sense strand
gguuaaagagacuaggcau

SEQ ID NO: 2299329 - RNA, 19 nt, Homo sapiens
  misc_RNA (1)...(19): siRNA sense strand
ggcaaagaguguuggauac

SEQ ID NO: 2299330 - RNA, 19 nt, Homo sapiens
  misc_RNA (1)...(19): siRNA sense strand
aauaagggcgagacugaaa

SEQ ID NO: 2299331 - RNA, 19 nt, Homo sapiens
  misc_RNA (1)...(19): siRNA sense strand
ggagaagggaaaagcacaa

SEQ ID NO: 2299332 - RNA, 19 nt, Homo sapiens
  misc_RNA (1)...(19): siRNA sense strand
auccaaauccgaagguuaa

SEQ ID NO: 2299333 - RNA, 19 nt, Homo sapiens
  misc_RNA (1)...(19): siRNA sense strand
gguaaauaaaggugacauc

SEQ ID NO: 2299334 - RNA, 19 nt, Homo sapiens
  misc_RNA (1)...(19): siRNA sense strand
gcaaaauggugguggcauc

SEQ ID NO: 2299335 - RNA, 19 nt, Homo sapiens
  misc_RNA (1)...(19): siRNA sense strand
ggaugauucaguauaacaa

SEQ ID NO: 2299336 - RNA, 19 nt, Homo sapiens
  misc_RNA (1)...(19): siRNA sense strand
caguaaauggagugagaag

SEQ ID NO: 2299337 - RNA, 19 nt, Homo sapiens
  misc_RNA (1)...(19): siRNA sense strand
gcagaaauccugaacggga

SEQ ID NO: 2299338 - RNA, 19 nt, Homo sapiens
  misc_RNA (1)...(19): siRNA sense strand
ggaacucaucaaagagaca

SEQ ID NO: 2299339 - RNA, 19 nt, Homo sapiens
  misc_RNA (1)...(19): siRNA sense strand
cguccagagagcagcacaa

SEQ ID NO: 2299340 - RNA, 19 nt, Homo sapiens
  misc_RNA (1)...(19): siRNA sense strand
cugaaacagaacaggugaa

SEQ ID NO: 2299341 - RNA, 19 nt, Homo sapiens
  misc_RNA (1)...(19): siRNA sense strand
agaaauuuaagccaggaaa

SEQ ID NO: 2299342 - RNA, 19 nt, Homo sapiens
  misc_RNA (1)...(19): siRNA sense strand
caggaaaguggaugauuca

SEQ ID NO: 2299343 - RNA, 19 nt, Homo sapiens
  misc_RNA (1)...(19): siRNA sense strand
agcagaugacauugaauua

SEQ ID NO: 2299344 - RNA, 19 nt, Homo sapiens
  misc_RNA (1)...(19): siRNA sense strand
ugucugaagagguagaauu

SEQ ID NO: 2299345 - RNA, 19 nt, Homo sapiens
  misc_RNA (1)...(19): siRNA sense strand
gguggcauccaguaagaaa

SEQ ID NO: 2299346 - RNA, 19 nt, Homo sapiens
  misc_RNA (1)...(19): siRNA sense strand
cuauggagcagaugacauu

SEQ ID NO: 2299347 - RNA, 19 nt, Homo sapiens
  misc_RNA (1)...(19): siRNA sense strand
gagaaauuuaagccaggaa

SEQ ID NO: 2299348 - RNA, 19 nt, Homo sapiens
  misc_RNA (1)...(19): siRNA sense strand
agaagacaugagagagaga

SEQ ID NO: 2299349 - RNA, 19 nt, Homo sapiens
  misc_RNA (1)...(19): siRNA sense strand
gagagagagacugggcaaa

SEQ ID NO: 2299350 - RNA, 19 nt, Homo sapiens
  misc_RNA (1)...(19): siRNA sense strand
uccaagugacauugauaua

SEQ ID NO: 2299351 - RNA, 19 nt, Homo sapiens
  misc_RNA (1)...(19): siRNA sense strand
caguaguaguggccgugaa

SEQ ID NO: 2299352 - RNA, 19 nt, Homo sapiens
  misc_RNA (1)...(19): siRNA sense strand
gaggauaaaaucaggauca

SEQ ID NO: 2299353 - RNA, 19 nt, Homo sapiens
  misc_RNA (1)...(19): siRNA sense strand
ccauuaacacugaagaagu

SEQ ID NO: 2299354 - RNA, 19 nt, Homo sapiens
  misc_RNA (1)...(19): siRNA sense strand
aaagagagggcgagcuuca

SEQ ID NO: 2299355 - RNA, 19 nt, Homo sapiens
  misc_RNA (1)...(19): siRNA sense strand
uugcaagauuggacauuga

SEQ ID NO: 2299356 - RNA, 19 nt, Homo sapiens
  misc_RNA (1)...(19): siRNA sense strand
ggaagcaggauuuggagca

SEQ ID NO: 2299357 - RNA, 19 nt, Homo sapiens
  misc_RNA (1)...(19): siRNA sense strand
guuaaaggggaguggauca

SEQ ID NO: 2299358 - RNA, 19 nt, Homo sapiens
  misc_RNA (1)...(19): siRNA sense strand
guuccaagugacauugaua

SEQ ID NO: 2299359 - RNA, 19 nt, Homo sapiens
  misc_RNA (1)...(19): siRNA sense strand
cgugguggugacuggaaua

SEQ ID NO: 2299360 - RNA, 19 nt, Homo sapiens
  misc_RNA (1)...(19): siRNA sense strand
ccacacugacagaugaaga

SEQ ID NO: 2299361 - RNA, 19 nt, Homo sapiens
  misc_RNA (1)...(19): siRNA sense strand
aggauuuggagcagacauu

SEQ ID NO: 2299362 - RNA, 19 nt, Homo sapiens
  misc_RNA (1)...(19): siRNA sense strand
ugccagaauguuuggaauu

SEQ ID NO: 2299363 - RNA, 19 nt, Homo sapiens
  misc_RNA (1)...(19): siRNA sense strand
gcagagcacaguagagagu

SEQ ID NO: 2299364 - RNA, 19 nt, Homo sapiens
  misc_RNA (1)...(19): siRNA sense strand
aucaguaaauggagugaga

SEQ ID NO: 2299365 - RNA, 19 nt, Homo sapiens
  misc_RNA (1)...(19): siRNA sense strand
gcaacagagaugauuccaa

SEQ ID NO: 2299366 - RNA, 19 nt, Homo sapiens
  misc_RNA (1)...(19): siRNA sense strand
ccaacaucgcacauggcaa

SEQ ID NO: 2299367 - RNA, 19 nt, Homo sapiens
  misc_RNA (1)...(19): siRNA sense strand
ggaucauugcacagaagau

SEQ ID NO: 2299368 - RNA, 19 nt, Homo sapiens
  misc_RNA (1)...(19): siRNA sense strand
aaggaauacaggagaauua

SEQ ID NO: 2299369 - RNA, 19 nt, Homo sapiens
  misc_RNA (1)...(19): siRNA sense strand
aggaaggaauacaggagaa

SEQ ID NO: 2299370 - RNA, 19 nt, Homo sapiens
  misc_RNA (1)...(19): siRNA sense strand
gggugaaaccugaccgcaa

SEQ ID NO: 2299371 - RNA, 19 nt, Homo sapiens
  misc_RNA (1)...(19): siRNA sense strand
ggaaggaauacaggagaau

SEQ ID NO: 2299372 - RNA, 19 nt, Homo sapiens
  misc_RNA (1)...(19): siRNA sense strand
ugguggacauccugggcaa

SEQ ID NO: 2299373 - RNA, 19 nt, Homo sapiens
  misc_RNA (1)...(19): siRNA sense strand
ggaauacaggagaauuaua

SEQ ID NO: 2299374 - RNA, 19 nt, Homo sapiens
  misc_RNA (1)...(19): siRNA sense strand
caaaauuucaggaaggaau

SEQ ID NO: 2299375 - RNA, 19 nt, Homo sapiens
  misc_RNA (1)...(19): siRNA sense strand
gcucaggaacgcaggaaac

SEQ ID NO: 2299376 - RNA, 19 nt, Homo sapiens
  misc_RNA (1)...(19): siRNA sense strand
gcucuaacgacguggccga

SEQ ID NO: 2299377 - RNA, 19 nt, Homo sapiens
  misc_RNA (1)...(19): siRNA sense strand
cugaugggccugagcguca

SEQ ID NO: 2299378 - RNA, 19 nt, Homo sapiens
  misc_RNA (1)...(19): siRNA sense strand
acaucuuuguggugagcuu

SEQ ID NO: 2299379 - RNA, 19 nt, Homo sapiens
  misc_RNA (1)...(19): siRNA sense strand
caggucagacagaggguga

SEQ ID NO: 2299380 - RNA, 19 nt, Homo sapiens
  misc_RNA (1)...(19): siRNA sense strand
ggaaacaucuuugugguga

SEQ ID NO: 2299381 - RNA, 19 nt, Homo sapiens
  misc_RNA (1)...(19): siRNA sense strand
cugccaagucaguggguuc

SEQ ID NO: 2299382 - RNA, 19 nt, Homo sapiens
  misc_RNA (1)...(19): siRNA sense strand
gguaauuuguucuugguga

SEQ ID NO: 2299383 - RNA, 19 nt, Homo sapiens
  misc_RNA (1)...(19): siRNA sense strand
gugaugggccugagcguca

SEQ ID NO: 2299384 - RNA, 19 nt, Homo sapiens
  misc_RNA (1)...(19): siRNA sense strand
cggcagugguggucaucca

SEQ ID NO: 2299385 - RNA, 19 nt, Homo sapiens
  misc_RNA (1)...(19): siRNA sense strand
cgcuaauccucguggccau

SEQ ID NO: 2299386 - RNA, 19 nt, Homo sapiens
  misc_RNA (1)...(19): siRNA sense strand
gcuccggaacgcagguaau

SEQ ID NO: 2299387 - RNA, 19 nt, Homo sapiens
  misc_RNA (1)...(19): siRNA sense strand
aggaaagccaagccagaga

SEQ ID NO: 2299388 - RNA, 19 nt, Homo sapiens
  misc_RNA (1)...(19): siRNA sense strand
caacaaagccaaagcacac

SEQ ID NO: 2299389 - RNA, 19 nt, Homo sapiens
  misc_RNA (1)...(19): siRNA sense strand
auucagagcgagaggagau

SEQ ID NO: 2299390 - RNA, 19 nt, Homo sapiens
  misc_RNA (1)...(19): siRNA sense strand
gaacgaauacgaauggaca

SEQ ID NO: 2299391 - RNA, 19 nt, Homo sapiens
  misc_RNA (1)...(19): siRNA sense strand
gagaggagauugaagugga

SEQ ID NO: 2299392 - RNA, 19 nt, Homo sapiens
  misc_RNA (1)...(19): siRNA sense strand
uggaacgagaacagagauu

SEQ ID NO: 2299393 - RNA, 19 nt, Homo sapiens
  misc_RNA (1)...(19): siRNA sense strand
acuugaagaagcugaaaga

SEQ ID NO: 2299394 - RNA, 19 nt, Homo sapiens
  misc_RNA (1)...(19): siRNA sense strand
ucgagaauuuggaacgaga

SEQ ID NO: 2299395 - RNA, 19 nt, Homo sapiens
  misc_RNA (1)...(19): siRNA sense strand
ucaacaaagccaaagcaca

SEQ ID NO: 2299396 - RNA, 19 nt, Homo sapiens
  misc_RNA (1)...(19): siRNA sense strand
cccauggagaaguggacaa

SEQ ID NO: 2299397 - RNA, 19 nt, Homo sapiens
  misc_RNA (1)...(19): siRNA sense strand
cuccagugccagugucaaa

SEQ ID NO: 2299398 - RNA, 19 nt, Homo sapiens
  misc_RNA (1)...(19): siRNA sense strand
aagccaaagcacacaucaa

SEQ ID NO: 2299399 - RNA, 19 nt, Homo sapiens
  misc_RNA (1)...(19): siRNA sense strand
uugggagugacgaggguua

SEQ ID NO: 2299400 - RNA, 19 nt, Homo sapiens
  misc_RNA (1)...(19): siRNA sense strand
caacaaagccaaagcacac

SEQ ID NO: 2299401 - RNA, 19 nt, Homo sapiens
  misc_RNA (1)...(19): siRNA sense strand
auucagagcgagaggagau

SEQ ID NO: 2299402 - RNA, 19 nt, Homo sapiens
  misc_RNA (1)...(19): siRNA sense strand
gaacgaauacgaauggaca

SEQ ID NO: 2299403 - RNA, 19 nt, Homo sapiens
  misc_RNA (1)...(19): siRNA sense strand
gagaggagauugaagugga

SEQ ID NO: 2299404 - RNA, 19 nt, Homo sapiens
  misc_RNA (1)...(19): siRNA sense strand
uggaacgagaacagagauu

SEQ ID NO: 2299405 - RNA, 19 nt, Homo sapiens
  misc_RNA (1)...(19): siRNA sense strand
acuugaagaagcugaaaga

SEQ ID NO: 2299406 - RNA, 19 nt, Homo sapiens
  misc_RNA (1)...(19): siRNA sense strand
ucgagaauuuggaacgaga

SEQ ID NO: 2299407 - RNA, 19 nt, Homo sapiens
  misc_RNA (1)...(19): siRNA sense strand
ucaacaaagccaaagcaca

SEQ ID NO: 2299408 - RNA, 19 nt, Homo sapiens
  misc_RNA (1)...(19): siRNA sense strand
cccauggagaaguggacaa

SEQ ID NO: 2299409 - RNA, 19 nt, Homo sapiens
  misc_RNA (1)...(19): siRNA sense strand
cuccagugccagugucaaa

SEQ ID NO: 2299410 - RNA, 19 nt, Homo sapiens
  misc_RNA (1)...(19): siRNA sense strand
aagccaaagcacacaucaa

SEQ ID NO: 2299411 - RNA, 19 nt, Homo sapiens
  misc_RNA (1)...(19): siRNA sense strand
uugggagugacgaggguua

SEQ ID NO: 2299412 - RNA, 19 nt, Homo sapiens
  misc_RNA (1)...(19): siRNA sense strand
ggaggaaggugaaggggaa

SEQ ID NO: 2299413 - RNA, 19 nt, Homo sapiens
  misc_RNA (1)...(19): siRNA sense strand
gggaaggggaagaggaaga

SEQ ID NO: 2299414 - RNA, 19 nt, Homo sapiens
  misc_RNA (1)...(19): siRNA sense strand
cugcaagauugaaggauac

SEQ ID NO: 2299415 - RNA, 19 nt, Homo sapiens
  misc_RNA (1)...(19): siRNA sense strand
agacuguccucuauggcaa

SEQ ID NO: 2299416 - RNA, 19 nt, Homo sapiens
  misc_RNA (1)...(19): siRNA sense strand
gggcucaguggcaggaaau

SEQ ID NO: 2299417 - RNA, 19 nt, Homo sapiens
  misc_RNA (1)...(19): siRNA sense strand
cugcuagauuugacugcaa

SEQ ID NO: 2299418 - RNA, 19 nt, Homo sapiens
  misc_RNA (1)...(19): siRNA sense strand
aaacgauggaggaagguga

SEQ ID NO: 2299419 - RNA, 19 nt, Homo sapiens
  misc_RNA (1)...(19): siRNA sense strand
gggaagaggaagaagagug

SEQ ID NO: 2299420 - RNA, 19 nt, Homo sapiens
  misc_RNA (1)...(19): siRNA sense strand
aggcuguugcugaggaaaa

SEQ ID NO: 2299421 - RNA, 19 nt, Homo sapiens
  misc_RNA (1)...(19): siRNA sense strand
aggugaaggggaaggggaa

SEQ ID NO: 2299422 - RNA, 19 nt, Homo sapiens
  misc_RNA (1)...(19): siRNA sense strand
agauagacuacgaugagga

SEQ ID NO: 2299423 - RNA, 19 nt, Homo sapiens
  misc_RNA (1)...(19): siRNA sense strand
ggaggaaggugaaggggaa

SEQ ID NO: 2299424 - RNA, 19 nt, Homo sapiens
  misc_RNA (1)...(19): siRNA sense strand
gggaaggggaagaggaaga

SEQ ID NO: 2299425 - RNA, 19 nt, Homo sapiens
  misc_RNA (1)...(19): siRNA sense strand
cugcaagauugaaggauac

SEQ ID NO: 2299426 - RNA, 19 nt, Homo sapiens
  misc_RNA (1)...(19): siRNA sense strand
agacuguccucuauggcaa

SEQ ID NO: 2299427 - RNA, 19 nt, Homo sapiens
  misc_RNA (1)...(19): siRNA sense strand
gggcucaguggcaggaaau

SEQ ID NO: 2299428 - RNA, 19 nt, Homo sapiens
  misc_RNA (1)...(19): siRNA sense strand
cugcuagauuugacugcaa

SEQ ID NO: 2299429 - RNA, 19 nt, Homo sapiens
  misc_RNA (1)...(19): siRNA sense strand
aaacgauggaggaagguga

SEQ ID NO: 2299430 - RNA, 19 nt, Homo sapiens
  misc_RNA (1)...(19): siRNA sense strand
gggaagaggaagaagagug

SEQ ID NO: 2299431 - RNA, 19 nt, Homo sapiens
  misc_RNA (1)...(19): siRNA sense strand
aggcuguugcugaggaaaa

SEQ ID NO: 2299432 - RNA, 19 nt, Homo sapiens
  misc_RNA (1)...(19): siRNA sense strand
aggugaaggggaaggggaa

SEQ ID NO: 2299433 - RNA, 19 nt, Homo sapiens
  misc_RNA (1)...(19): siRNA sense strand
agauagacuacgaugagga

SEQ ID NO: 2299434 - RNA, 19 nt, Homo sapiens
  misc_RNA (1)...(19): siRNA sense strand
ggaggaaggugaaggggaa

SEQ ID NO: 2299435 - RNA, 19 nt, Homo sapiens
  misc_RNA (1)...(19): siRNA sense strand
gggaaggggaagaggaaga

SEQ ID NO: 2299436 - RNA, 19 nt, Homo sapiens
  misc_RNA (1)...(19): siRNA sense strand
cugcaagauugaaggauac

SEQ ID NO: 2299437 - RNA, 19 nt, Homo sapiens
  misc_RNA (1)...(19): siRNA sense strand
agacuguccucuauggcaa

SEQ ID NO: 2299438 - RNA, 19 nt, Homo sapiens
  misc_RNA (1)...(19): siRNA sense strand
gggcucaguggcaggaaau

SEQ ID NO: 2299439 - RNA, 19 nt, Homo sapiens
  misc_RNA (1)...(19): siRNA sense strand
cugcuagauuugacugcaa

SEQ ID NO: 2299440 - RNA, 19 nt, Homo sapiens
  misc_RNA (1)...(19): siRNA sense strand
aaacgauggaggaagguga

SEQ ID NO: 2299441 - RNA, 19 nt, Homo sapiens
  misc_RNA (1)...(19): siRNA sense strand
gggaagaggaagaagagug

SEQ ID NO: 2299442 - RNA, 19 nt, Homo sapiens
  misc_RNA (1)...(19): siRNA sense strand
aggcuguugcugaggaaaa

SEQ ID NO: 2299443 - RNA, 19 nt, Homo sapiens
  misc_RNA (1)...(19): siRNA sense strand
aggugaaggggaaggggaa

SEQ ID NO: 2299444 - RNA, 19 nt, Homo sapiens
  misc_RNA (1)...(19): siRNA sense strand
agauagacuacgaugagga

SEQ ID NO: 2299445 - RNA, 19 nt, Homo sapiens
  misc_RNA (1)...(19): siRNA sense strand
ggaggaaggugaaggggaa

SEQ ID NO: 2299446 - RNA, 19 nt, Homo sapiens
  misc_RNA (1)...(19): siRNA sense strand
gggaaggggaagaggaaga

SEQ ID NO: 2299447 - RNA, 19 nt, Homo sapiens
  misc_RNA (1)...(19): siRNA sense strand
cugcaagauugaaggauac

SEQ ID NO: 2299448 - RNA, 19 nt, Homo sapiens
  misc_RNA (1)...(19): siRNA sense strand
agacuguccucuauggcaa

SEQ ID NO: 2299449 - RNA, 19 nt, Homo sapiens
  misc_RNA (1)...(19): siRNA sense strand
gggcucaguggcaggaaau

SEQ ID NO: 2299450 - RNA, 19 nt, Homo sapiens
  misc_RNA (1)...(19): siRNA sense strand
cugcuagauuugacugcaa

SEQ ID NO: 2299451 - RNA, 19 nt, Homo sapiens
  misc_RNA (1)...(19): siRNA sense strand
aaacgauggaggaagguga

SEQ ID NO: 2299452 - RNA, 19 nt, Homo sapiens
  misc_RNA (1)...(19): siRNA sense strand
gggaagaggaagaagagug

SEQ ID NO: 2299453 - RNA, 19 nt, Homo sapiens
  misc_RNA (1)...(19): siRNA sense strand
aggcuguugcugaggaaaa

SEQ ID NO: 2299454 - RNA, 19 nt, Homo sapiens
  misc_RNA (1)...(19): siRNA sense strand
aggugaaggggaaggggaa

SEQ ID NO: 2299455 - RNA, 19 nt, Homo sapiens
  misc_RNA (1)...(19): siRNA sense strand
agauagacuacgaugagga

SEQ ID NO: 2299456 - RNA, 19 nt, Homo sapiens
  misc_RNA (1)...(19): siRNA sense strand
ggaggaaggugaaggggaa

SEQ ID NO: 2299457 - RNA, 19 nt, Homo sapiens
  misc_RNA (1)...(19): siRNA sense strand
gggaagugcugcuagauuu

SEQ ID NO: 2299458 - RNA, 19 nt, Homo sapiens
  misc_RNA (1)...(19): siRNA sense strand
gggaaggggaagaggaaga

SEQ ID NO: 2299459 - RNA, 19 nt, Homo sapiens
  misc_RNA (1)...(19): siRNA sense strand
ggagggaagugcugcuaga

SEQ ID NO: 2299460 - RNA, 19 nt, Homo sapiens
  misc_RNA (1)...(19): siRNA sense strand
cugcaagauugaaggauac

SEQ ID NO: 2299461 - RNA, 19 nt, Homo sapiens
  misc_RNA (1)...(19): siRNA sense strand
agacuguccucuauggcaa

SEQ ID NO: 2299462 - RNA, 19 nt, Homo sapiens
  misc_RNA (1)...(19): siRNA sense strand
gggcucaguggcaggaaau

SEQ ID NO: 2299463 - RNA, 19 nt, Homo sapiens
  misc_RNA (1)...(19): siRNA sense strand
cugcuagauuugacugcaa

SEQ ID NO: 2299464 - RNA, 19 nt, Homo sapiens
  misc_RNA (1)...(19): siRNA sense strand
cagcagagcucauugugga

SEQ ID NO: 2299465 - RNA, 19 nt, Homo sapiens
  misc_RNA (1)...(19): siRNA sense strand
aaacgauggaggaagguga

SEQ ID NO: 2299466 - RNA, 19 nt, Homo sapiens
  misc_RNA (1)...(19): siRNA sense strand
gggaagaggaagaagagug

SEQ ID NO: 2299467 - RNA, 19 nt, Homo sapiens
  misc_RNA (1)...(19): siRNA sense strand
uagaaguuguggagggaag

SEQ ID NO: 2299468 - RNA, 19 nt, Homo sapiens
  misc_RNA (1)...(19): siRNA sense strand
aggcuguugcugaggaaaa

SEQ ID NO: 2299469 - RNA, 19 nt, Homo sapiens
  misc_RNA (1)...(19): siRNA sense strand
aggugaaggggaaggggaa

SEQ ID NO: 2299470 - RNA, 19 nt, Homo sapiens
  misc_RNA (1)...(19): siRNA sense strand
agauagacuacgaugagga

SEQ ID NO: 2299471 - RNA, 19 nt, Homo sapiens
  misc_RNA (1)...(19): siRNA sense strand
ggaggaaggugaaggggaa

SEQ ID NO: 2299472 - RNA, 19 nt, Homo sapiens
  misc_RNA (1)...(19): siRNA sense strand
gggaagugcugcuagauuu

SEQ ID NO: 2299473 - RNA, 19 nt, Homo sapiens
  misc_RNA (1)...(19): siRNA sense strand
gggaaggggaagaggaaga

SEQ ID NO: 2299474 - RNA, 19 nt, Homo sapiens
  misc_RNA (1)...(19): siRNA sense strand
ggagggaagugcugcuaga

SEQ ID NO: 2299475 - RNA, 19 nt, Homo sapiens
  misc_RNA (1)...(19): siRNA sense strand
cugcaagauugaaggauac

SEQ ID NO: 2299476 - RNA, 19 nt, Homo sapiens
  misc_RNA (1)...(19): siRNA sense strand
agacuguccucuauggcaa

SEQ ID NO: 2299477 - RNA, 19 nt, Homo sapiens
  misc_RNA (1)...(19): siRNA sense strand
gggcucaguggcaggaaau

SEQ ID NO: 2299478 - RNA, 19 nt, Homo sapiens
  misc_RNA (1)...(19): siRNA sense strand
cugcuagauuugacugcaa

SEQ ID NO: 2299479 - RNA, 19 nt, Homo sapiens
  misc_RNA (1)...(19): siRNA sense strand
cagcagagcucauugugga

SEQ ID NO: 2299480 - RNA, 19 nt, Homo sapiens
  misc_RNA (1)...(19): siRNA sense strand
aaacgauggaggaagguga

SEQ ID NO: 2299481 - RNA, 19 nt, Homo sapiens
  misc_RNA (1)...(19): siRNA sense strand
gggaagaggaagaagagug

SEQ ID NO: 2299482 - RNA, 19 nt, Homo sapiens
  misc_RNA (1)...(19): siRNA sense strand
uagaaguuguggagggaag

SEQ ID NO: 2299483 - RNA, 19 nt, Homo sapiens
  misc_RNA (1)...(19): siRNA sense strand
aggcuguugcugaggaaaa

SEQ ID NO: 2299484 - RNA, 19 nt, Homo sapiens
  misc_RNA (1)...(19): siRNA sense strand
aggugaaggggaaggggaa

SEQ ID NO: 2299485 - RNA, 19 nt, Homo sapiens
  misc_RNA (1)...(19): siRNA sense strand
agauagacuacgaugagga

SEQ ID NO: 2299486 - RNA, 19 nt, Homo sapiens
  misc_RNA (1)...(19): siRNA sense strand
ggaggaaggugaaggggaa

SEQ ID NO: 2299487 - RNA, 19 nt, Homo sapiens
  misc_RNA (1)...(19): siRNA sense strand
gggaaggggaagaggaaga

SEQ ID NO: 2299488 - RNA, 19 nt, Homo sapiens
  misc_RNA (1)...(19): siRNA sense strand
cugcaagauugaaggauac

SEQ ID NO: 2299489 - RNA, 19 nt, Homo sapiens
  misc_RNA (1)...(19): siRNA sense strand
agacuguccucuauggcaa

SEQ ID NO: 2299490 - RNA, 19 nt, Homo sapiens
  misc_RNA (1)...(19): siRNA sense strand
gggcucaguggcaggaaau

SEQ ID NO: 2299491 - RNA, 19 nt, Homo sapiens
  misc_RNA (1)...(19): siRNA sense strand
cugcuagauuugacugcaa

SEQ ID NO: 2299492 - RNA, 19 nt, Homo sapiens
  misc_RNA (1)...(19): siRNA sense strand
aaacgauggaggaagguga

SEQ ID NO: 2299493 - RNA, 19 nt, Homo sapiens
  misc_RNA (1)...(19): siRNA sense strand
gggaagaggaagaagagug

SEQ ID NO: 2299494 - RNA, 19 nt, Homo sapiens
  misc_RNA (1)...(19): siRNA sense strand
aggcuguugcugaggaaaa

SEQ ID NO: 2299495 - RNA, 19 nt, Homo sapiens
  misc_RNA (1)...(19): siRNA sense strand
aggugaaggggaaggggaa

SEQ ID NO: 2299496 - RNA, 19 nt, Homo sapiens
  misc_RNA (1)...(19): siRNA sense strand
agauagacuacgaugagga

SEQ ID NO: 2299497 - RNA, 19 nt, Homo sapiens
  misc_RNA (1)...(19): siRNA sense strand
ggaggaaggugaaggggaa

SEQ ID NO: 2299498 - RNA, 19 nt, Homo sapiens
  misc_RNA (1)...(19): siRNA sense strand
gggaaggggaagaggaaga

SEQ ID NO: 2299499 - RNA, 19 nt, Homo sapiens
  misc_RNA (1)...(19): siRNA sense strand
cugcaagauugaaggauac

SEQ ID NO: 2299500 - RNA, 19 nt, Homo sapiens
  misc_RNA (1)...(19): siRNA sense strand
gggcucaguggcaggaaau

SEQ ID NO: 2299501 - RNA, 19 nt, Homo sapiens
  misc_RNA (1)...(19): siRNA sense strand
cugcuagauuugacugcaa

SEQ ID NO: 2299502 - RNA, 19 nt, Homo sapiens
  misc_RNA (1)...(19): siRNA sense strand
aaacgauggaggaagguga

SEQ ID NO: 2299503 - RNA, 19 nt, Homo sapiens
  misc_RNA (1)...(19): siRNA sense strand
gggaagaggaagaagagug

SEQ ID NO: 2299504 - RNA, 19 nt, Homo sapiens
  misc_RNA (1)...(19): siRNA sense strand
aggcuguugcugaggaaaa

SEQ ID NO: 2299505 - RNA, 19 nt, Homo sapiens
  misc_RNA (1)...(19): siRNA sense strand
aggugaaggggaaggggaa

SEQ ID NO: 2299506 - RNA, 19 nt, Homo sapiens
  misc_RNA (1)...(19): siRNA sense strand
agauagacuacgaugagga

SEQ ID NO: 2299507 - RNA, 19 nt, Homo sapiens
  misc_RNA (1)...(19): siRNA sense strand
ggaggaaggugaaggggaa

SEQ ID NO: 2299508 - RNA, 19 nt, Homo sapiens
  misc_RNA (1)...(19): siRNA sense strand
gggaaggggaagaggaaga

SEQ ID NO: 2299509 - RNA, 19 nt, Homo sapiens
  misc_RNA (1)...(19): siRNA sense strand
cugcaagauugaaggauac

SEQ ID NO: 2299510 - RNA, 19 nt, Homo sapiens
  misc_RNA (1)...(19): siRNA sense strand
gggcucaguggcaggaaau

SEQ ID NO: 2299511 - RNA, 19 nt, Homo sapiens
  misc_RNA (1)...(19): siRNA sense strand
cugcuagauuugacugcaa

SEQ ID NO: 2299512 - RNA, 19 nt, Homo sapiens
  misc_RNA (1)...(19): siRNA sense strand
aaacgauggaggaagguga

SEQ ID NO: 2299513 - RNA, 19 nt, Homo sapiens
  misc_RNA (1)...(19): siRNA sense strand
gggaagaggaagaagagug

SEQ ID NO: 2299514 - RNA, 19 nt, Homo sapiens
  misc_RNA (1)...(19): siRNA sense strand
aggcuguugcugaggaaaa

SEQ ID NO: 2299515 - RNA, 19 nt, Homo sapiens
  misc_RNA (1)...(19): siRNA sense strand
aggugaaggggaaggggaa

SEQ ID NO: 2299516 - RNA, 19 nt, Homo sapiens
  misc_RNA (1)...(19): siRNA sense strand
agauagacuacgaugagga

SEQ ID NO: 2299517 - RNA, 19 nt, Homo sapiens
  misc_RNA (1)...(19): siRNA sense strand
cuacuggagaagagaauaa

SEQ ID NO: 2299518 - RNA, 19 nt, Homo sapiens
  misc_RNA (1)...(19): siRNA sense strand
ggguaugguacaugaauau

SEQ ID NO: 2299519 - RNA, 19 nt, Homo sapiens
  misc_RNA (1)...(19): siRNA sense strand
agaauaaagaagaggagga

SEQ ID NO: 2299520 - RNA, 19 nt, Homo sapiens
  misc_RNA (1)...(19): siRNA sense strand
caucaagaagaaacagaaa

SEQ ID NO: 2299521 - RNA, 19 nt, Homo sapiens
  misc_RNA (1)...(19): siRNA sense strand
uggaagaggaggaggagga

SEQ ID NO: 2299522 - RNA, 19 nt, Homo sapiens
  misc_RNA (1)...(19): siRNA sense strand
aggcauuaguagaagacau

SEQ ID NO: 2299523 - RNA, 19 nt, Homo sapiens
  misc_RNA (1)...(19): siRNA sense strand
aguuaaguaccguguguua

SEQ ID NO: 2299524 - RNA, 19 nt, Homo sapiens
  misc_RNA (1)...(19): siRNA sense strand
cugcaauugaggaaguuaa

SEQ ID NO: 2299525 - RNA, 19 nt, Homo sapiens
  misc_RNA (1)...(19): siRNA sense strand
gggaacugcgauugaguau

SEQ ID NO: 2299526 - RNA, 19 nt, Homo sapiens
  misc_RNA (1)...(19): siRNA sense strand
uagauuggaaugaaggaaa

SEQ ID NO: 2299527 - RNA, 19 nt, Homo sapiens
  misc_RNA (1)...(19): siRNA sense strand
aggguaugguacaugaaua

SEQ ID NO: 2299528 - RNA, 19 nt, Homo sapiens
  misc_RNA (1)...(19): siRNA sense strand
ugaaagucuaccugugaaa

SEQ ID NO: 2299529 - RNA, 19 nt, Homo sapiens
  misc_RNA (1)...(19): siRNA sense strand
gucaagaagaggcugguaa

SEQ ID NO: 2299530 - RNA, 19 nt, Homo sapiens
  misc_RNA (1)...(19): siRNA sense strand
aggaggaggaggaggacga

SEQ ID NO: 2299531 - RNA, 19 nt, Homo sapiens
  misc_RNA (1)...(19): siRNA sense strand
ugggaagugcggugaagaa

SEQ ID NO: 2299532 - RNA, 19 nt, Homo sapiens
  misc_RNA (1)...(19): siRNA sense strand
ggguaguuagagaaguuaa

SEQ ID NO: 2299533 - RNA, 19 nt, Homo sapiens
  misc_RNA (1)...(19): siRNA sense strand
aggaggaggaggaggagga

SEQ ID NO: 2299534 - RNA, 19 nt, Homo sapiens
  misc_RNA (1)...(19): siRNA sense strand
aggaggaggaggaggagga

SEQ ID NO: 2299535 - RNA, 19 nt, Homo sapiens
  misc_RNA (1)...(19): siRNA sense strand
aggaggaggaggaggagga

SEQ ID NO: 2299536 - RNA, 19 nt, Homo sapiens
  misc_RNA (1)...(19): siRNA sense strand
augauuaugcuguggaaga

SEQ ID NO: 2299537 - RNA, 19 nt, Homo sapiens
  misc_RNA (1)...(19): siRNA sense strand
aaauggaagggauggaaau

SEQ ID NO: 2299538 - RNA, 19 nt, Homo sapiens
  misc_RNA (1)...(19): siRNA sense strand
cgcaaggagcugucagaau

SEQ ID NO: 2299539 - RNA, 19 nt, Homo sapiens
  misc_RNA (1)...(19): siRNA sense strand
ccuugaggcauuaguagaa

SEQ ID NO: 2299540 - RNA, 19 nt, Homo sapiens
  misc_RNA (1)...(19): siRNA sense strand
agauaaugguggaagggcu

SEQ ID NO: 2299541 - RNA, 19 nt, Homo sapiens
  misc_RNA (1)...(19): siRNA sense strand
cggccaauuuagaauccaa

SEQ ID NO: 2299542 - RNA, 19 nt, Homo sapiens
  misc_RNA (1)...(19): siRNA sense strand
augaauauguggaugagga

SEQ ID NO: 2299543 - RNA, 19 nt, Homo sapiens
  misc_RNA (1)...(19): siRNA sense strand
ggagaagagaauaaagaag

SEQ ID NO: 2299544 - RNA, 19 nt, Homo sapiens
  misc_RNA (1)...(19): siRNA sense strand
gguaguuagagaaguuaau

SEQ ID NO: 2299545 - RNA, 19 nt, Homo sapiens
  misc_RNA (1)...(19): siRNA sense strand
ucaagaagaggcugguaau

SEQ ID NO: 2299546 - RNA, 19 nt, Homo sapiens
  misc_RNA (1)...(19): siRNA sense strand
ccaucaagaagaaacagaa

SEQ ID NO: 2299547 - RNA, 19 nt, Homo sapiens
  misc_RNA (1)...(19): siRNA sense strand
aagaggaggaggaggagga

SEQ ID NO: 2299548 - RNA, 19 nt, Homo sapiens
  misc_RNA (1)...(19): siRNA sense strand
augguaaugaggaggguau

SEQ ID NO: 2299549 - RNA, 19 nt, Homo sapiens
  misc_RNA (1)...(19): siRNA sense strand
ggacgaugguuaugaggac

SEQ ID NO: 2299550 - RNA, 19 nt, Homo sapiens
  misc_RNA (1)...(19): siRNA sense strand
cuggagaagagaauaaaga

SEQ ID NO: 2299551 - RNA, 19 nt, Homo sapiens
  misc_RNA (1)...(19): siRNA sense strand
aauccaaauuccugaggga

SEQ ID NO: 2299552 - RNA, 19 nt, Homo sapiens
  misc_RNA (1)...(19): siRNA sense strand
acagaagaggaaugugaau

SEQ ID NO: 2299553 - RNA, 19 nt, Homo sapiens
  misc_RNA (1)...(19): siRNA sense strand
acugugaugaugaggaaau

SEQ ID NO: 2299554 - RNA, 19 nt, Homo sapiens
  misc_RNA (1)...(19): siRNA sense strand
agauacagacuuuguugaa

SEQ ID NO: 2299555 - RNA, 19 nt, Homo sapiens
  misc_RNA (1)...(19): siRNA sense strand
ggcuacuggagaagagaau

SEQ ID NO: 2299556 - RNA, 19 nt, Homo sapiens
  misc_RNA (1)...(19): siRNA sense strand
uuggaaugaaggaaagaau

SEQ ID NO: 2299557 - RNA, 19 nt, Homo sapiens
  misc_RNA (1)...(19): siRNA sense strand
aggaaaugugucaugaaga

SEQ ID NO: 2299558 - RNA, 19 nt, Homo sapiens
  misc_RNA (1)...(19): siRNA sense strand
cuguggaagaggaggagga

SEQ ID NO: 2299559 - RNA, 19 nt, Homo sapiens
  misc_RNA (1)...(19): siRNA sense strand
aggaggaggaggacgacau

SEQ ID NO: 2299560 - RNA, 19 nt, Homo sapiens
  misc_RNA (1)...(19): siRNA sense strand
uggagaagagaauaaagaa

SEQ ID NO: 2299561 - RNA, 19 nt, Homo sapiens
  misc_RNA (1)...(19): siRNA sense strand
gagaaguuaaugaugcaau

SEQ ID NO: 2299562 - RNA, 19 nt, Homo sapiens
  misc_RNA (1)...(19): siRNA sense strand
cgguuauguuuuagauaca

SEQ ID NO: 2299563 - RNA, 19 nt, Homo sapiens
  misc_RNA (1)...(19): siRNA sense strand
aggaggaggacgacauuga

SEQ ID NO: 2299564 - RNA, 19 nt, Homo sapiens
  misc_RNA (1)...(19): siRNA sense strand
ggggaaaacggugaagaua

SEQ ID NO: 2299565 - RNA, 19 nt, Homo sapiens
  misc_RNA (1)...(19): siRNA sense strand
acgaugguuaugaggacua

SEQ ID NO: 2299566 - RNA, 19 nt, Homo sapiens
  misc_RNA (1)...(19): siRNA sense strand
cauuaguagaagacauuga

SEQ ID NO: 2299567 - RNA, 19 nt, Homo sapiens
  misc_RNA (1)...(19): siRNA sense strand
caucaaugcaaucuaugaa

SEQ ID NO: 2299568 - RNA, 19 nt, Homo sapiens
  misc_RNA (1)...(19): siRNA sense strand
ugaagagauguaugguaau

SEQ ID NO: 2299569 - RNA, 19 nt, Homo sapiens
  misc_RNA (1)...(19): siRNA sense strand
gcaggauauuaaagugaaa

SEQ ID NO: 2299570 - RNA, 19 nt, Homo sapiens
  misc_RNA (1)...(19): siRNA sense strand
gcauaagggucgaggcacu

SEQ ID NO: 2299571 - RNA, 19 nt, Homo sapiens
  misc_RNA (1)...(19): siRNA sense strand
ugaaacaccugcaggauau

SEQ ID NO: 2299572 - RNA, 19 nt, Homo sapiens
  misc_RNA (1)...(19): siRNA sense strand
agggagaagacgaggauga

SEQ ID NO: 2299573 - RNA, 19 nt, Homo sapiens
  misc_RNA (1)...(19): siRNA sense strand
gagaaucacuggaugaaga

SEQ ID NO: 2299574 - RNA, 19 nt, Homo sapiens
  misc_RNA (1)...(19): siRNA sense strand
gugaaaaugaagaggaaga

SEQ ID NO: 2299575 - RNA, 19 nt, Homo sapiens
  misc_RNA (1)...(19): siRNA sense strand
ucggaauggcacagugaaa

SEQ ID NO: 2299576 - RNA, 19 nt, Homo sapiens
  misc_RNA (1)...(19): siRNA sense strand
cagugaaaaugaagaggaa

SEQ ID NO: 2299577 - RNA, 19 nt, Homo sapiens
  misc_RNA (1)...(19): siRNA sense strand
aggaggaauuagaagguga

SEQ ID NO: 2299578 - RNA, 19 nt, Homo sapiens
  misc_RNA (1)...(19): siRNA sense strand
ugucaaaaccaucaagaaa

SEQ ID NO: 2299579 - RNA, 19 nt, Homo sapiens
  misc_RNA (1)...(19): siRNA sense strand
agacgaggaugaugcggaa

SEQ ID NO: 2299580 - RNA, 19 nt, Homo sapiens
  misc_RNA (1)...(19): siRNA sense strand
cuggaagaaaggaaagaau

SEQ ID NO: 2299581 - RNA, 19 nt, Homo sapiens
  misc_RNA (1)...(19): siRNA sense strand
cugaagagccagaucccaa

SEQ ID NO: 2299582 - RNA, 19 nt, Homo sapiens
  misc_RNA (1)...(19): siRNA sense strand
gugaagaaggagaagagga

SEQ ID NO: 2299583 - RNA, 19 nt, Homo sapiens
  misc_RNA (1)...(19): siRNA sense strand
aggaauaugaugaaccaau

SEQ ID NO: 2299584 - RNA, 19 nt, Homo sapiens
  misc_RNA (1)...(19): siRNA sense strand
aagagaaauuggcuggaga

SEQ ID NO: 2299585 - RNA, 19 nt, Homo sapiens
  misc_RNA (1)...(19): siRNA sense strand
agaaggugaagaaggagaa

SEQ ID NO: 2299586 - RNA, 19 nt, Homo sapiens
  misc_RNA (1)...(19): siRNA sense strand
aagaaggagaagaggagga

SEQ ID NO: 2299587 - RNA, 19 nt, Homo sapiens
  misc_RNA (1)...(19): siRNA sense strand
uugaaacaccugcaggaua

SEQ ID NO: 2299588 - RNA, 19 nt, Homo sapiens
  misc_RNA (1)...(19): siRNA sense strand
aaugcaaguaacacagaaa

SEQ ID NO: 2299589 - RNA, 19 nt, Homo sapiens
  misc_RNA (1)...(19): siRNA sense strand
gucaaaaccaucaagaaaa

SEQ ID NO: 2299590 - RNA, 19 nt, Homo sapiens
  misc_RNA (1)...(19): siRNA sense strand
aagaaggugaagaaggaga

SEQ ID NO: 2299591 - RNA, 19 nt, Homo sapiens
  misc_RNA (1)...(19): siRNA sense strand
cugcaggauauuaaaguga

SEQ ID NO: 2299592 - RNA, 19 nt, Homo sapiens
  misc_RNA (1)...(19): siRNA sense strand
acgaggaugaugcggaaau

SEQ ID NO: 2299593 - RNA, 19 nt, Homo sapiens
  misc_RNA (1)...(19): siRNA sense strand
ggaauggcacagugaaaau

SEQ ID NO: 2299594 - RNA, 19 nt, Homo sapiens
  misc_RNA (1)...(19): siRNA sense strand
aaggugacgaggagggaga

SEQ ID NO: 2299595 - RNA, 19 nt, Homo sapiens
  misc_RNA (1)...(19): siRNA sense strand
uuugacaagagaagagaau

SEQ ID NO: 2299596 - RNA, 19 nt, Homo sapiens
  misc_RNA (1)...(19): siRNA sense strand
gccagaucccaaaggaauu

SEQ ID NO: 2299597 - RNA, 19 nt, Homo sapiens
  misc_RNA (1)...(19): siRNA sense strand
aaaaugaagaggaagagaa

SEQ ID NO: 2299598 - RNA, 19 nt, Homo sapiens
  misc_RNA (1)...(19): siRNA sense strand
agccagaucccaaaggaau

SEQ ID NO: 2299599 - RNA, 19 nt, Homo sapiens
  misc_RNA (1)...(19): siRNA sense strand
agaugaaaucagaaccaga

SEQ ID NO: 2299600 - RNA, 19 nt, Homo sapiens
  misc_RNA (1)...(19): siRNA sense strand
gggucgaggcacuguuaga

SEQ ID NO: 2299601 - RNA, 19 nt, Homo sapiens
  misc_RNA (1)...(19): siRNA sense strand
auggagaaucacuggauga

SEQ ID NO: 2299602 - RNA, 19 nt, Homo sapiens
  misc_RNA (1)...(19): siRNA sense strand
aguucuaugaagagguaca

SEQ ID NO: 2299603 - RNA, 19 nt, Homo sapiens
  misc_RNA (1)...(19): siRNA sense strand
aagcauaagggucgaggca

SEQ ID NO: 2299604 - RNA, 19 nt, Homo sapiens
  misc_RNA (1)...(19): siRNA sense strand
gccuaugucuuuuguguua

SEQ ID NO: 2299605 - RNA, 19 nt, Homo sapiens
  misc_RNA (1)...(19): siRNA sense strand
cuacaagaugaaaucagaa

SEQ ID NO: 2299606 - RNA, 19 nt, Homo sapiens
  misc_RNA (1)...(19): siRNA sense strand
gagaaauuggcuggagaca

SEQ ID NO: 2299607 - RNA, 19 nt, Homo sapiens
  misc_RNA (1)...(19): siRNA sense strand
uugacuggaagaaaggaaa

SEQ ID NO: 2299608 - RNA, 19 nt, Homo sapiens
  misc_RNA (1)...(19): siRNA sense strand
ccgcauggcagauggacaa

SEQ ID NO: 2299609 - RNA, 19 nt, Homo sapiens
  misc_RNA (1)...(19): siRNA sense strand
agacauagaaagagagauc

SEQ ID NO: 2299610 - RNA, 19 nt, Homo sapiens
  misc_RNA (1)...(19): siRNA sense strand
acuaaauuaugcagagaca

SEQ ID NO: 2299611 - RNA, 19 nt, Homo sapiens
  misc_RNA (1)...(19): siRNA sense strand
aagucaauguuuagaccaa

SEQ ID NO: 2299612 - RNA, 19 nt, Homo sapiens
  misc_RNA (1)...(19): siRNA sense strand
uguaaaugcaagaauggaa

SEQ ID NO: 2299613 - RNA, 19 nt, Homo sapiens
  misc_RNA (1)...(19): siRNA sense strand
aggaagccacugcgagaaa

SEQ ID NO: 2299614 - RNA, 19 nt, Homo sapiens
  misc_RNA (1)...(19): siRNA sense strand
cuguauugacauugaugaa

SEQ ID NO: 2299615 - RNA, 19 nt, Homo sapiens
  misc_RNA (1)...(19): siRNA sense strand
gugucuggaaggagaggua

SEQ ID NO: 2299616 - RNA, 19 nt, Homo sapiens
  misc_RNA (1)...(19): siRNA sense strand
ggacaauggcacaagguug

SEQ ID NO: 2299617 - RNA, 19 nt, Homo sapiens
  misc_RNA (1)...(19): siRNA sense strand
gcagauggacaauggcaca

SEQ ID NO: 2299618 - RNA, 19 nt, Homo sapiens
  misc_RNA (1)...(19): siRNA sense strand
ccaucuggauucacaggaa

SEQ ID NO: 2299619 - RNA, 19 nt, Homo sapiens
  misc_RNA (1)...(19): siRNA sense strand
acauagaaagagagaucca

SEQ ID NO: 2299620 - RNA, 19 nt, Homo sapiens
  misc_RNA (1)...(19): siRNA sense strand
ucuuuaugccgaauggaua

SEQ ID NO: 2299621 - RNA, 19 nt, Homo sapiens
  misc_RNA (1)...(19): siRNA sense strand
aagccuggugcaaggaaua

SEQ ID NO: 2299622 - RNA, 19 nt, Homo sapiens
  misc_RNA (1)...(19): siRNA sense strand
ucaccuaugacaucagaaa

SEQ ID NO: 2299623 - RNA, 19 nt, Homo sapiens
  misc_RNA (1)...(19): siRNA sense strand
ccaggacaguggugggcuu

SEQ ID NO: 2299624 - RNA, 19 nt, Homo sapiens
  misc_RNA (1)...(19): siRNA sense strand
gagaacuggagcacagcua

SEQ ID NO: 2299625 - RNA, 19 nt, Homo sapiens
  misc_RNA (1)...(19): siRNA sense strand
acucuuggguagaugguga

SEQ ID NO: 2299626 - RNA, 19 nt, Homo sapiens
  misc_RNA (1)...(19): siRNA sense strand
ugaagauauugaugagugu

SEQ ID NO: 2299627 - RNA, 19 nt, Homo sapiens
  misc_RNA (1)...(19): siRNA sense strand
uuccagaacaagagugaau

SEQ ID NO: 2299628 - RNA, 19 nt, Homo sapiens
  misc_RNA (1)...(19): siRNA sense strand
guggaaugccgaaggaugu

SEQ ID NO: 2299629 - RNA, 19 nt, Homo sapiens
  misc_RNA (1)...(19): siRNA sense strand
acaggaagccacugcgaga

SEQ ID NO: 2299630 - RNA, 19 nt, Homo sapiens
  misc_RNA (1)...(19): siRNA sense strand
caugugagugagaaauuaa

SEQ ID NO: 2299631 - RNA, 19 nt, Homo sapiens
  misc_RNA (1)...(19): siRNA sense strand
cuacauacacaaugggaag

SEQ ID NO: 2299632 - RNA, 19 nt, Homo sapiens
  misc_RNA (1)...(19): siRNA sense strand
aggaaucaauuuauggcuu

SEQ ID NO: 2299633 - RNA, 19 nt, Homo sapiens
  misc_RNA (1)...(19): siRNA sense strand
cuaaaucacacuugcccaa

SEQ ID NO: 2299634 - RNA, 19 nt, Homo sapiens
  misc_RNA (1)...(19): siRNA sense strand
auguaucuauggaggaaaa

SEQ ID NO: 2299635 - RNA, 19 nt, Homo sapiens
  misc_RNA (1)...(19): siRNA sense strand
uucaagacauagaaagaga

SEQ ID NO: 2299636 - RNA, 19 nt, Homo sapiens
  misc_RNA (1)...(19): siRNA sense strand
caacaaaugugucugucca

SEQ ID NO: 2299637 - RNA, 19 nt, Homo sapiens
  misc_RNA (1)...(19): siRNA sense strand
gauacauucguguggauga

SEQ ID NO: 2299638 - RNA, 19 nt, Homo sapiens
  misc_RNA (1)...(19): siRNA sense strand
agggaaucauugagugcca

SEQ ID NO: 2299639 - RNA, 19 nt, Homo sapiens
  misc_RNA (1)...(19): siRNA sense strand
cagcagaagccauccacuu

SEQ ID NO: 2299640 - RNA, 19 nt, Homo sapiens
  misc_RNA (1)...(19): siRNA sense strand
gaggaaaaguucuugcaga

SEQ ID NO: 2299641 - RNA, 19 nt, Homo sapiens
  misc_RNA (1)...(19): siRNA sense strand
augccgagguggaguuuua

SEQ ID NO: 2299642 - RNA, 19 nt, Homo sapiens
  misc_RNA (1)...(19): siRNA sense strand
gccaauacuguguguguca

SEQ ID NO: 2299643 - RNA, 19 nt, Homo sapiens
  misc_RNA (1)...(19): siRNA sense strand
caagacauagaaagagaga

SEQ ID NO: 2299644 - RNA, 19 nt, Homo sapiens
  misc_RNA (1)...(19): siRNA sense strand
ggccagugcuguaaggucu

SEQ ID NO: 2299645 - RNA, 19 nt, Homo sapiens
  misc_RNA (1)...(19): siRNA sense strand
caccagagucacaagucaa

SEQ ID NO: 2299646 - RNA, 19 nt, Homo sapiens
  misc_RNA (1)...(19): siRNA sense strand
cuuuaugccgaauggauau

SEQ ID NO: 2299647 - RNA, 19 nt, Homo sapiens
  misc_RNA (1)...(19): siRNA sense strand
ggauaucgucaccgagcuu

SEQ ID NO: 2299648 - RNA, 19 nt, Homo sapiens
  misc_RNA (1)...(19): siRNA sense strand
aaccaagagcugucgggaa

SEQ ID NO: 2299649 - RNA, 19 nt, Homo sapiens
  misc_RNA (1)...(19): siRNA sense strand
uacaagagcuuuuggccaa

SEQ ID NO: 2299650 - RNA, 19 nt, Homo sapiens
  misc_RNA (1)...(19): siRNA sense strand
ggucauaacuuuugugcag

SEQ ID NO: 2299651 - RNA, 19 nt, Homo sapiens
  misc_RNA (1)...(19): siRNA sense strand
uggcuaggacagagaaaua

SEQ ID NO: 2299652 - RNA, 19 nt, Homo sapiens
  misc_RNA (1)...(19): siRNA sense strand
aggcauaacugcauggaga

SEQ ID NO: 2299653 - RNA, 19 nt, Homo sapiens
  misc_RNA (1)...(19): siRNA sense strand
gaaccuacuuugaaggaga

SEQ ID NO: 2299654 - RNA, 19 nt, Homo sapiens
  misc_RNA (1)...(19): siRNA sense strand
uggcaaaugcuguaaggaa

SEQ ID NO: 2299655 - RNA, 19 nt, Homo sapiens
  misc_RNA (1)...(19): siRNA sense strand
augaaaggguaguagaaaa

SEQ ID NO: 2299656 - RNA, 19 nt, Homo sapiens
  misc_RNA (1)...(19): siRNA sense strand
ggucugugacugugagaau

SEQ ID NO: 2299657 - RNA, 19 nt, Homo sapiens
  misc_RNA (1)...(19): siRNA sense strand
caaagauggcuguaggaau

SEQ ID NO: 2299658 - RNA, 19 nt, Homo sapiens
  misc_RNA (1)...(19): siRNA sense strand
agauuuggguguuggaaaa

SEQ ID NO: 2299659 - RNA, 19 nt, Homo sapiens
  misc_RNA (1)...(19): siRNA sense strand
aaauaaugcgcauggauau

SEQ ID NO: 2299660 - RNA, 19 nt, Homo sapiens
  misc_RNA (1)...(19): siRNA sense strand
cagauuuggguguuggaaa

SEQ ID NO: 2299661 - RNA, 19 nt, Homo sapiens
  misc_RNA (1)...(19): siRNA sense strand
cagaacaugaugaguguau

SEQ ID NO: 2299662 - RNA, 19 nt, Homo sapiens
  misc_RNA (1)...(19): siRNA sense strand
acagagaaauaaugcgcau

SEQ ID NO: 2299663 - RNA, 19 nt, Homo sapiens
  misc_RNA (1)...(19): siRNA sense strand
auggaaaaguuaagcacaa

SEQ ID NO: 2299664 - RNA, 19 nt, Homo sapiens
  misc_RNA (1)...(19): siRNA sense strand
gcugaugacaaguggcaca

SEQ ID NO: 2299665 - RNA, 19 nt, Homo sapiens
  misc_RNA (1)...(19): siRNA sense strand
gcacaugccugaauggaac

SEQ ID NO: 2299666 - RNA, 19 nt, Homo sapiens
  misc_RNA (1)...(19): siRNA sense strand
acuggaaaguaguggccau

SEQ ID NO: 2299667 - RNA, 19 nt, Homo sapiens
  misc_RNA (1)...(19): siRNA sense strand
ugaagauauugaugagugu

SEQ ID NO: 2299668 - RNA, 19 nt, Homo sapiens
  misc_RNA (1)...(19): siRNA sense strand
ccagauguggagugugaau

SEQ ID NO: 2299669 - RNA, 19 nt, Homo sapiens
  misc_RNA (1)...(19): siRNA sense strand
uuaugaaaggguaguagaa

SEQ ID NO: 2299670 - RNA, 19 nt, Homo sapiens
  misc_RNA (1)...(19): siRNA sense strand
gcagaaaaucauggagcua

SEQ ID NO: 2299671 - RNA, 19 nt, Homo sapiens
  misc_RNA (1)...(19): siRNA sense strand
agaaaaucauggagcuaca

SEQ ID NO: 2299672 - RNA, 19 nt, Homo sapiens
  misc_RNA (1)...(19): siRNA sense strand
ugaaggagaaagaaauaca

SEQ ID NO: 2299673 - RNA, 19 nt, Homo sapiens
  misc_RNA (1)...(19): siRNA sense strand
gcaaugacuuccauggacu

SEQ ID NO: 2299674 - RNA, 19 nt, Homo sapiens
  misc_RNA (1)...(19): siRNA sense strand
ccauggacuugugcagaaa

SEQ ID NO: 2299675 - RNA, 19 nt, Homo sapiens
  misc_RNA (1)...(19): siRNA sense strand
auagauuggaucagugcua

SEQ ID NO: 2299676 - RNA, 19 nt, Homo sapiens
  misc_RNA (1)...(19): siRNA sense strand
ggcauaacugcauggagaa

SEQ ID NO: 2299677 - RNA, 19 nt, Homo sapiens
  misc_RNA (1)...(19): siRNA sense strand
ugaaacggacauugaugaa

SEQ ID NO: 2299678 - RNA, 19 nt, Homo sapiens
  misc_RNA (1)...(19): siRNA sense strand
cggauaugauugucgaugu

SEQ ID NO: 2299679 - RNA, 19 nt, Homo sapiens
  misc_RNA (1)...(19): siRNA sense strand
ggggaaacuuuguauaaca

SEQ ID NO: 2299680 - RNA, 19 nt, Homo sapiens
  misc_RNA (1)...(19): siRNA sense strand
agauacucccagaagcaua

SEQ ID NO: 2299681 - RNA, 19 nt, Homo sapiens
  misc_RNA (1)...(19): siRNA sense strand
gcuaggacagagaaauaau

SEQ ID NO: 2299682 - RNA, 19 nt, Homo sapiens
  misc_RNA (1)...(19): siRNA sense strand
ugugaaaggacuugcacca

SEQ ID NO: 2299683 - RNA, 19 nt, Homo sapiens
  misc_RNA (1)...(19): siRNA sense strand
gggaauggaacgacaugca

SEQ ID NO: 2299684 - RNA, 19 nt, Homo sapiens
  misc_RNA (1)...(19): siRNA sense strand
uggagaaucgugugaagau

SEQ ID NO: 2299685 - RNA, 19 nt, Homo sapiens
  misc_RNA (1)...(19): siRNA sense strand
aaguaguggccaucggaau

SEQ ID NO: 2299686 - RNA, 19 nt, Homo sapiens
  misc_RNA (1)...(19): siRNA sense strand
guauaaugcaagaugucca

SEQ ID NO: 2299687 - RNA, 19 nt, Homo sapiens
  misc_RNA (1)...(19): siRNA sense strand
gcauaacugcauggagaau

SEQ ID NO: 2299688 - RNA, 19 nt, Homo sapiens
  misc_RNA (1)...(19): siRNA sense strand
aaguuaagcacaaugguca

SEQ ID NO: 2299689 - RNA, 19 nt, Homo sapiens
  misc_RNA (1)...(19): siRNA sense strand
cguuaugugucgacggaug

SEQ ID NO: 2299690 - RNA, 19 nt, Homo sapiens
  misc_RNA (1)...(19): siRNA sense strand
ccauuacugucgugaaaau

SEQ ID NO: 2299691 - RNA, 19 nt, Homo sapiens
  misc_RNA (1)...(19): siRNA sense strand
ccagagucucaucagauaa

SEQ ID NO: 2299692 - RNA, 19 nt, Homo sapiens
  misc_RNA (1)...(19): siRNA sense strand
gauuauucauguacagaac

SEQ ID NO: 2299693 - RNA, 19 nt, Homo sapiens
  misc_RNA (1)...(19): siRNA sense strand
ggcuauacagggaauggaa

SEQ ID NO: 2299694 - RNA, 19 nt, Homo sapiens
  misc_RNA (1)...(19): siRNA sense strand
cauaaugggacgaaagccu

SEQ ID NO: 2299695 - RNA, 19 nt, Homo sapiens
  misc_RNA (1)...(19): siRNA sense strand
augaaugcucugaugguuu

SEQ ID NO: 2299696 - RNA, 19 nt, Homo sapiens
  misc_RNA (1)...(19): siRNA sense strand
augcaaaucgauaugccaa

SEQ ID NO: 2299697 - RNA, 19 nt, Homo sapiens
  misc_RNA (1)...(19): siRNA sense strand
ccaucaagagaaacggaaa

SEQ ID NO: 2299698 - RNA, 19 nt, Homo sapiens
  misc_RNA (1)...(19): siRNA sense strand
agacuauauuggaggaagu

SEQ ID NO: 2299699 - RNA, 19 nt, Homo sapiens
  misc_RNA (1)...(19): siRNA sense strand
gggaauugguggagcaguc

SEQ ID NO: 2299700 - RNA, 19 nt, Homo sapiens
  misc_RNA (1)...(19): siRNA sense strand
caucaagagaaacggaaaa

SEQ ID NO: 2299701 - RNA, 19 nt, Homo sapiens
  misc_RNA (1)...(19): siRNA sense strand
ggaaaacaaucaauggaga

SEQ ID NO: 2299702 - RNA, 19 nt, Homo sapiens
  misc_RNA (1)...(19): siRNA sense strand
agaaauucagagaggcuau

SEQ ID NO: 2299703 - RNA, 19 nt, Homo sapiens
  misc_RNA (1)...(19): siRNA sense strand
ugaaaggagaaaagggaau

SEQ ID NO: 2299704 - RNA, 19 nt, Homo sapiens
  misc_RNA (1)...(19): siRNA sense strand
gcaaaagaugccaaagaau

SEQ ID NO: 2299705 - RNA, 19 nt, Homo sapiens
  misc_RNA (1)...(19): siRNA sense strand
gugaagagcuuacagagga

SEQ ID NO: 2299706 - RNA, 19 nt, Homo sapiens
  misc_RNA (1)...(19): siRNA sense strand
ugccaaagaauguguucaa

SEQ ID NO: 2299707 - RNA, 19 nt, Homo sapiens
  misc_RNA (1)...(19): siRNA sense strand
gacaauggauggugacagu

SEQ ID NO: 2299708 - RNA, 19 nt, Homo sapiens
  misc_RNA (1)...(19): siRNA sense strand
auguggaaccucugaaauu

SEQ ID NO: 2299709 - RNA, 19 nt, Homo sapiens
  misc_RNA (1)...(19): siRNA sense strand
acaucugaagcaagugaaa

SEQ ID NO: 2299710 - RNA, 19 nt, Homo sapiens
  misc_RNA (1)...(19): siRNA sense strand
cuauauuggaggaagucau

SEQ ID NO: 2299711 - RNA, 19 nt, Homo sapiens
  misc_RNA (1)...(19): siRNA sense strand
aaagggaauugguggagca

SEQ ID NO: 2299712 - RNA, 19 nt, Homo sapiens
  misc_RNA (1)...(19): siRNA sense strand
cuucagaaauucagagagg

SEQ ID NO: 2299713 - RNA, 19 nt, Homo sapiens
  misc_RNA (1)...(19): siRNA sense strand
gauuucugguguucagcaa

SEQ ID NO: 2299714 - RNA, 19 nt, Homo sapiens
  misc_RNA (1)...(19): siRNA sense strand
gaggcuaugaaaggagaaa

SEQ ID NO: 2299715 - RNA, 19 nt, Homo sapiens
  misc_RNA (1)...(19): siRNA sense strand
cuuaauaaccacagacggu

SEQ ID NO: 2299716 - RNA, 19 nt, Homo sapiens
  misc_RNA (1)...(19): siRNA sense strand
ccaaaauccaggcgaguuu

SEQ ID NO: 2299717 - RNA, 19 nt, Homo sapiens
  misc_RNA (1)...(19): siRNA sense strand
ggaagaagauaaagagcgg

SEQ ID NO: 2299718 - RNA, 19 nt, Homo sapiens
  misc_RNA (1)...(19): siRNA sense strand
gauaaagagcggagagcgc

SEQ ID NO: 2299719 - RNA, 19 nt, Homo sapiens
  misc_RNA (1)...(19): siRNA sense strand
ccacaaagagucagagcca

SEQ ID NO: 2299720 - RNA, 19 nt, Homo sapiens
  misc_RNA (1)...(19): siRNA sense strand
ugccacagcuggaggaaga

SEQ ID NO: 2299721 - RNA, 19 nt, Homo sapiens
  misc_RNA (1)...(19): siRNA sense strand
gagaagaucuacagggcag

SEQ ID NO: 2299722 - RNA, 19 nt, Homo sapiens
  misc_RNA (1)...(19): siRNA sense strand
agucagagccauugccaca

SEQ ID NO: 2299723 - RNA, 19 nt, Homo sapiens
  misc_RNA (1)...(19): siRNA sense strand
cggacauauaccugggaca

SEQ ID NO: 2299724 - RNA, 19 nt, Homo sapiens
  misc_RNA (1)...(19): siRNA sense strand
ggcaagaaguacaucgcca

SEQ ID NO: 2299725 - RNA, 19 nt, Homo sapiens
  misc_RNA (1)...(19): siRNA sense strand
uggaggagaaggagggucu

SEQ ID NO: 2299726 - RNA, 19 nt, Homo sapiens
  misc_RNA (1)...(19): siRNA sense strand
ccaccuaugggaauggcaa

SEQ ID NO: 2299727 - RNA, 19 nt, Homo sapiens
  misc_RNA (1)...(19): siRNA sense strand
cagucaugaaggagcucua

SEQ ID NO: 2299728 - RNA, 19 nt, Homo sapiens
  misc_RNA (1)...(19): siRNA sense strand
ccagaaucgcuauggcuca

SEQ ID NO: 2299729 - RNA, 19 nt, Homo sapiens
  misc_RNA (1)...(19): siRNA sense strand
caguuaagccugggaggau

SEQ ID NO: 2299730 - RNA, 19 nt, Homo sapiens
  misc_RNA (1)...(19): siRNA sense strand
guuaagccugggaggauau

SEQ ID NO: 2299731 - RNA, 19 nt, Homo sapiens
  misc_RNA (1)...(19): siRNA sense strand
cugcaaugcccgcugccaa

SEQ ID NO: 2299732 - RNA, 19 nt, Homo sapiens
  misc_RNA (1)...(19): siRNA sense strand
gggaagaauacuugagaaa

SEQ ID NO: 2299733 - RNA, 19 nt, Homo sapiens
  misc_RNA (1)...(19): siRNA sense strand
gugaauggagagaggguua

SEQ ID NO: 2299734 - RNA, 19 nt, Homo sapiens
  misc_RNA (1)...(19): siRNA sense strand
augacaagcuagugagaau

SEQ ID NO: 2299735 - RNA, 19 nt, Homo sapiens
  misc_RNA (1)...(19): siRNA sense strand
aggaaauacaugagaucaa

SEQ ID NO: 2299736 - RNA, 19 nt, Homo sapiens
  misc_RNA (1)...(19): siRNA sense strand
gguuaaaugaucaggaaaa

SEQ ID NO: 2299737 - RNA, 19 nt, Homo sapiens
  misc_RNA (1)...(19): siRNA sense strand
gcguaugcauccagaagaa

SEQ ID NO: 2299738 - RNA, 19 nt, Homo sapiens
  misc_RNA (1)...(19): siRNA sense strand
cggaugaaguggaagcaau

SEQ ID NO: 2299739 - RNA, 19 nt, Homo sapiens
  misc_RNA (1)...(19): siRNA sense strand
ccagaaacaucaacgggaa

SEQ ID NO: 2299740 - RNA, 19 nt, Homo sapiens
  misc_RNA (1)...(19): siRNA sense strand
gagucaagagagaggaaau

SEQ ID NO: 2299741 - RNA, 19 nt, Homo sapiens
  misc_RNA (1)...(19): siRNA sense strand
ccaagaugcccgaggugaa

SEQ ID NO: 2299742 - RNA, 19 nt, Homo sapiens
  misc_RNA (1)...(19): siRNA sense strand
agauaacgguagugugcua

SEQ ID NO: 2299743 - RNA, 19 nt, Homo sapiens
  misc_RNA (1)...(19): siRNA sense strand
cuacaagaguaucagcaaa

SEQ ID NO: 2299744 - RNA, 19 nt, Homo sapiens
  misc_RNA (1)...(19): siRNA sense strand
cuauggaucuggaggauau

SEQ ID NO: 2299745 - RNA, 19 nt, Homo sapiens
  misc_RNA (1)...(19): siRNA sense strand
gggcugaagaccagaaaca

SEQ ID NO: 2299746 - RNA, 19 nt, Homo sapiens
  misc_RNA (1)...(19): siRNA sense strand
cuggaauacuaaugaguuu

SEQ ID NO: 2299747 - RNA, 19 nt, Homo sapiens
  misc_RNA (1)...(19): siRNA sense strand
gaguaguaaucuccggaaa

SEQ ID NO: 2299748 - RNA, 19 nt, Homo sapiens
  misc_RNA (1)...(19): siRNA sense strand
ucgaaaauugugagagaaa

SEQ ID NO: 2299749 - RNA, 19 nt, Homo sapiens
  misc_RNA (1)...(19): siRNA sense strand
cagcaucagaagagaaauu

SEQ ID NO: 2299750 - RNA, 19 nt, Homo sapiens
  misc_RNA (1)...(19): siRNA sense strand
agauauaugcccaggucua

SEQ ID NO: 2299751 - RNA, 19 nt, Homo sapiens
  misc_RNA (1)...(19): siRNA sense strand
aaucgugaguacuggaaua

SEQ ID NO: 2299752 - RNA, 19 nt, Homo sapiens
  misc_RNA (1)...(19): siRNA sense strand
aaauagaaaucgugaguac

SEQ ID NO: 2299753 - RNA, 19 nt, Homo sapiens
  misc_RNA (1)...(19): siRNA sense strand
ccugaaagcucgucuaaaa

SEQ ID NO: 2299754 - RNA, 19 nt, Homo sapiens
  misc_RNA (1)...(19): siRNA sense strand
agaaagaagaggaucaaga

SEQ ID NO: 2299755 - RNA, 19 nt, Homo sapiens
  misc_RNA (1)...(19): siRNA sense strand
gaagaaaugcagaggauac

SEQ ID NO: 2299756 - RNA, 19 nt, Homo sapiens
  misc_RNA (1)...(19): siRNA sense strand
aagaagaggaucaagagaa

SEQ ID NO: 2299757 - RNA, 19 nt, Homo sapiens
  misc_RNA (1)...(19): siRNA sense strand
cuaauaaagugccagggaa

SEQ ID NO: 2299758 - RNA, 19 nt, Homo sapiens
  misc_RNA (1)...(19): siRNA sense strand
agagcaaaaucuagugaaa

SEQ ID NO: 2299759 - RNA, 19 nt, Homo sapiens
  misc_RNA (1)...(19): siRNA sense strand
gcucuucagaaaugagaaa

SEQ ID NO: 2299760 - RNA, 19 nt, Homo sapiens
  misc_RNA (1)...(19): siRNA sense strand
gaugauaggaauugaaagu

SEQ ID NO: 2299761 - RNA, 19 nt, Homo sapiens
  misc_RNA (1)...(19): siRNA sense strand
aggaaggaauggugcuuau

SEQ ID NO: 2299762 - RNA, 19 nt, Homo sapiens
  misc_RNA (1)...(19): siRNA sense strand
aggaauugaaagugucuua

SEQ ID NO: 2299763 - RNA, 19 nt, Homo sapiens
  misc_RNA (1)...(19): siRNA sense strand
augaauggaacuacaguaa

SEQ ID NO: 2299764 - RNA, 19 nt, Homo sapiens
  misc_RNA (1)...(19): siRNA sense strand
aaguagaaucaaaguggaa

SEQ ID NO: 2299765 - RNA, 19 nt, Homo sapiens
  misc_RNA (1)...(19): siRNA sense strand
cgaucugaacaaauagaaa

SEQ ID NO: 2299766 - RNA, 19 nt, Homo sapiens
  misc_RNA (1)...(19): siRNA sense strand
agaucagguuggauggaau

SEQ ID NO: 2299767 - RNA, 19 nt, Homo sapiens
  misc_RNA (1)...(19): siRNA sense strand
cagaagaugaaaucagaau

SEQ ID NO: 2299768 - RNA, 19 nt, Homo sapiens
  misc_RNA (1)...(19): siRNA sense strand
agucaagagagaggaaaua

SEQ ID NO: 2299769 - RNA, 19 nt, Homo sapiens
  misc_RNA (1)...(19): siRNA sense strand
cugcauaugaggaaaugaa

SEQ ID NO: 2299770 - RNA, 19 nt, Homo sapiens
  misc_RNA (1)...(19): siRNA sense strand
ggccaaugucuuugugcaa

SEQ ID NO: 2299771 - RNA, 19 nt, Homo sapiens
  misc_RNA (1)...(19): siRNA sense strand
ccagaacagcagcgguuua

SEQ ID NO: 2299772 - RNA, 19 nt, Homo sapiens
  misc_RNA (1)...(19): siRNA sense strand
gcaagcaaaucaagcccua

SEQ ID NO: 2299773 - RNA, 19 nt, Homo sapiens
  misc_RNA (1)...(19): siRNA sense strand
guagaaucaaaguggaaaa

SEQ ID NO: 2299774 - RNA, 19 nt, Homo sapiens
  misc_RNA (1)...(19): siRNA sense strand
cuaccuuggugguguguuu

SEQ ID NO: 2299775 - RNA, 19 nt, Homo sapiens
  misc_RNA (1)...(19): siRNA sense strand
acuuauaagccucaaggaa

SEQ ID NO: 2299776 - RNA, 19 nt, Homo sapiens
  misc_RNA (1)...(19): siRNA sense strand
ccguguauuucuucguaua

SEQ ID NO: 2299777 - RNA, 19 nt, Homo sapiens
  misc_RNA (1)...(19): siRNA sense strand
cggaaggacucuaggacag

SEQ ID NO: 2299778 - RNA, 19 nt, Homo sapiens
  misc_RNA (1)...(19): siRNA sense strand
cuuucgaucugaacaaaua

SEQ ID NO: 2299779 - RNA, 19 nt, Homo sapiens
  misc_RNA (1)...(19): siRNA sense strand
gggcugugguuuuggaauu

SEQ ID NO: 2299780 - RNA, 19 nt, Homo sapiens
  misc_RNA (1)...(19): siRNA sense strand
cagcaugaauggaacuaca

SEQ ID NO: 2299781 - RNA, 19 nt, Homo sapiens
  misc_RNA (1)...(19): siRNA sense strand
cagaaacacuuaaaggcga

SEQ ID NO: 2299782 - RNA, 19 nt, Homo sapiens
  misc_RNA (1)...(19): siRNA sense strand
cgguggaggugucuggauu

SEQ ID NO: 2299783 - RNA, 19 nt, Homo sapiens
  misc_RNA (1)...(19): siRNA sense strand
caucaagagccuucaccaa

SEQ ID NO: 2299784 - RNA, 19 nt, Homo sapiens
  misc_RNA (1)...(19): siRNA sense strand
uaucgaaaauugugagaga

SEQ ID NO: 2299785 - RNA, 19 nt, Homo sapiens
  misc_RNA (1)...(19): siRNA sense strand
aaaagaaagaagaggauca

SEQ ID NO: 2299786 - RNA, 19 nt, Homo sapiens
  misc_RNA (1)...(19): siRNA sense strand
ggaucaacacggaccagaa

SEQ ID NO: 2299787 - RNA, 19 nt, Homo sapiens
  misc_RNA (1)...(19): siRNA sense strand
uaauccagcuaaaggaauu

SEQ ID NO: 2299788 - RNA, 19 nt, Homo sapiens
  misc_RNA (1)...(19): siRNA sense strand
aaguguaccuugucaggaa

SEQ ID NO: 2299789 - RNA, 19 nt, Homo sapiens
  misc_RNA (1)...(19): siRNA sense strand
uuacaaucccugugcaauu

SEQ ID NO: 2299790 - RNA, 19 nt, Homo sapiens
  misc_RNA (1)...(19): siRNA sense strand
agaagaggaucaagagaag

SEQ ID NO: 2299791 - RNA, 19 nt, Homo sapiens
  misc_RNA (1)...(19): siRNA sense strand
cagacacaauacuggcuaa

SEQ ID NO: 2299792 - RNA, 19 nt, Homo sapiens
  misc_RNA (1)...(19): siRNA sense strand
ccaauaacaacauagaaga

SEQ ID NO: 2299793 - RNA, 19 nt, Homo sapiens
  misc_RNA (1)...(19): siRNA sense strand
uugaagacccucagguauu

SEQ ID NO: 2299794 - RNA, 19 nt, Homo sapiens
  misc_RNA (1)...(19): siRNA sense strand
gaauaauccuggggagcaa

SEQ ID NO: 2299795 - RNA, 19 nt, Homo sapiens
  misc_RNA (1)...(19): siRNA sense strand
cagaagugauggugcuguu

SEQ ID NO: 2299796 - RNA, 19 nt, Homo sapiens
  misc_RNA (1)...(19): siRNA sense strand
uguaugggauccagaguga

SEQ ID NO: 2299797 - RNA, 19 nt, Homo sapiens
  misc_RNA (1)...(19): siRNA sense strand
ggguauggcaagcaaauca

SEQ ID NO: 2299798 - RNA, 19 nt, Homo sapiens
  misc_RNA (1)...(19): siRNA sense strand
ugauaggaauugaaagugu

SEQ ID NO: 2299799 - RNA, 19 nt, Homo sapiens
  misc_RNA (1)...(19): siRNA sense strand
ugagaaaguggcaugcuua

SEQ ID NO: 2299800 - RNA, 19 nt, Homo sapiens
  misc_RNA (1)...(19): siRNA sense strand
ugagaguaccaauggauuu

SEQ ID NO: 2299801 - RNA, 19 nt, Homo sapiens
  misc_RNA (1)...(19): siRNA sense strand
gaacaaauagaaaucguga

SEQ ID NO: 2299802 - RNA, 19 nt, Homo sapiens
  misc_RNA (1)...(19): siRNA sense strand
ugagaaacacugcagaaau

SEQ ID NO: 2299803 - RNA, 19 nt, Homo sapiens
  misc_RNA (1)...(19): siRNA sense strand
aagaauguaguaagggcua

SEQ ID NO: 2299804 - RNA, 19 nt, Homo sapiens
  misc_RNA (1)...(19): siRNA sense strand
cgccaaugaccuagaagau

SEQ ID NO: 2299805 - RNA, 19 nt, Homo sapiens
  misc_RNA (1)...(19): siRNA sense strand
cgccaaugaccuagaagau

SEQ ID NO: 2299806 - RNA, 19 nt, Homo sapiens
  misc_RNA (1)...(19): siRNA sense strand
ccuuaagcuucuacgggaa

SEQ ID NO: 2299807 - RNA, 19 nt, Homo sapiens
  misc_RNA (1)...(19): siRNA sense strand
cagcucagcccaugacaaa

SEQ ID NO: 2299808 - RNA, 19 nt, Homo sapiens
  misc_RNA (1)...(19): siRNA sense strand
ccaugacaaagaagcgaaa

SEQ ID NO: 2299809 - RNA, 19 nt, Homo sapiens
  misc_RNA (1)...(19): siRNA sense strand
agccagacccugaaggcaa

SEQ ID NO: 2299810 - RNA, 19 nt, Homo sapiens
  misc_RNA (1)...(19): siRNA sense strand
gugaugaaccccuuggaaa

SEQ ID NO: 2299811 - RNA, 19 nt, Homo sapiens
  misc_RNA (1)...(19): siRNA sense strand
cuauugaagauuuggaagu

SEQ ID NO: 2299812 - RNA, 19 nt, Homo sapiens
  misc_RNA (1)...(19): siRNA sense strand
gagugcugaugaagggaca

SEQ ID NO: 2299813 - RNA, 19 nt, Homo sapiens
  misc_RNA (1)...(19): siRNA sense strand
agcaugaguguguggacaa

SEQ ID NO: 2299814 - RNA, 19 nt, Homo sapiens
  misc_RNA (1)...(19): siRNA sense strand
agcgaaaaguagaugguuu

SEQ ID NO: 2299815 - RNA, 19 nt, Homo sapiens
  misc_RNA (1)...(19): siRNA sense strand
gcucagcccaugacaaaga

SEQ ID NO: 2299816 - RNA, 19 nt, Homo sapiens
  misc_RNA (1)...(19): siRNA sense strand
cagcaugaguguguggaca

SEQ ID NO: 2299817 - RNA, 19 nt, Homo sapiens
  misc_RNA (1)...(19): siRNA sense strand
acucauuuccagagccaga

SEQ ID NO: 2299818 - RNA, 19 nt, Homo sapiens
  misc_RNA (1)...(19): siRNA sense strand
gaagaagauuugaggcguu

SEQ ID NO: 2299819 - RNA, 19 nt, Homo sapiens
  misc_RNA (1)...(19): siRNA sense strand
ggaaagaguggauggacca

SEQ ID NO: 2299820 - RNA, 19 nt, Homo sapiens
  misc_RNA (1)...(19): siRNA sense strand
gugggauuguggugggcaa

SEQ ID NO: 2299821 - RNA, 19 nt, Homo sapiens
  misc_RNA (1)...(19): siRNA sense strand
uggaaaaggacaugcacua

SEQ ID NO: 2299822 - RNA, 19 nt, Homo sapiens
  misc_RNA (1)...(19): siRNA sense strand
uggaaaugaaccuaaggaa

SEQ ID NO: 2299823 - RNA, 19 nt, Homo sapiens
  misc_RNA (1)...(19): siRNA sense strand
agaaaacgacggagaaaga

SEQ ID NO: 2299824 - RNA, 19 nt, Homo sapiens
  misc_RNA (1)...(19): siRNA sense strand
uuauauugccagagacaca

SEQ ID NO: 2299825 - RNA, 19 nt, Homo sapiens
  misc_RNA (1)...(19): siRNA sense strand
cugaaauuaucgaagcuga

SEQ ID NO: 2299826 - RNA, 19 nt, Homo sapiens
  misc_RNA (1)...(19): siRNA sense strand
aauuauauugccagagaca

SEQ ID NO: 2299827 - RNA, 19 nt, Homo sapiens
  misc_RNA (1)...(19): siRNA sense strand
uuuuaaagagcgagaagaa

SEQ ID NO: 2299828 - RNA, 19 nt, Homo sapiens
  misc_RNA (1)...(19): siRNA sense strand
ugcccauagauuugagaaa

SEQ ID NO: 2299829 - RNA, 19 nt, Homo sapiens
  misc_RNA (1)...(19): siRNA sense strand
aggugcuguugauggguaa

SEQ ID NO: 2299830 - RNA, 19 nt, Homo sapiens
  misc_RNA (1)...(19): siRNA sense strand
aguguaaagagcagcguga

SEQ ID NO: 2299831 - RNA, 19 nt, Homo sapiens
  misc_RNA (1)...(19): siRNA sense strand
ccuaaggaauuuugcugaa

SEQ ID NO: 2299832 - RNA, 19 nt, Homo sapiens
  misc_RNA (1)...(19): siRNA sense strand
agaguauggaagucaggaa

SEQ ID NO: 2299833 - RNA, 19 nt, Homo sapiens
  misc_RNA (1)...(19): siRNA sense strand
aaaacgacggagaaagaaa

SEQ ID NO: 2299834 - RNA, 19 nt, Homo sapiens
  misc_RNA (1)...(19): siRNA sense strand
ugagaaaacgacggagaaa

SEQ ID NO: 2299835 - RNA, 19 nt, Homo sapiens
  misc_RNA (1)...(19): siRNA sense strand
ugaaauuaucgaagcugau

SEQ ID NO: 2299836 - RNA, 19 nt, Homo sapiens
  misc_RNA (1)...(19): siRNA sense strand
gaagaagauuugaggcguu

SEQ ID NO: 2299837 - RNA, 19 nt, Homo sapiens
  misc_RNA (1)...(19): siRNA sense strand
ggaaagaguggauggacca

SEQ ID NO: 2299838 - RNA, 19 nt, Homo sapiens
  misc_RNA (1)...(19): siRNA sense strand
gugggauuguggugggcaa

SEQ ID NO: 2299839 - RNA, 19 nt, Homo sapiens
  misc_RNA (1)...(19): siRNA sense strand
uggaaaaggacaugcacua

SEQ ID NO: 2299840 - RNA, 19 nt, Homo sapiens
  misc_RNA (1)...(19): siRNA sense strand
uggaaaugaaccuaaggaa

SEQ ID NO: 2299841 - RNA, 19 nt, Homo sapiens
  misc_RNA (1)...(19): siRNA sense strand
agaaaacgacggagaaaga

SEQ ID NO: 2299842 - RNA, 19 nt, Homo sapiens
  misc_RNA (1)...(19): siRNA sense strand
uuauauugccagagacaca

SEQ ID NO: 2299843 - RNA, 19 nt, Homo sapiens
  misc_RNA (1)...(19): siRNA sense strand
cugaaauuaucgaagcuga

SEQ ID NO: 2299844 - RNA, 19 nt, Homo sapiens
  misc_RNA (1)...(19): siRNA sense strand
aauuauauugccagagaca

SEQ ID NO: 2299845 - RNA, 19 nt, Homo sapiens
  misc_RNA (1)...(19): siRNA sense strand
uuuuaaagagcgagaagaa

SEQ ID NO: 2299846 - RNA, 19 nt, Homo sapiens
  misc_RNA (1)...(19): siRNA sense strand
ugcccauagauuugagaaa

SEQ ID NO: 2299847 - RNA, 19 nt, Homo sapiens
  misc_RNA (1)...(19): siRNA sense strand
aggugcuguugauggguaa

SEQ ID NO: 2299848 - RNA, 19 nt, Homo sapiens
  misc_RNA (1)...(19): siRNA sense strand
aguguaaagagcagcguga

SEQ ID NO: 2299849 - RNA, 19 nt, Homo sapiens
  misc_RNA (1)...(19): siRNA sense strand
ccuaaggaauuuugcugaa

SEQ ID NO: 2299850 - RNA, 19 nt, Homo sapiens
  misc_RNA (1)...(19): siRNA sense strand
agaguauggaagucaggaa

SEQ ID NO: 2299851 - RNA, 19 nt, Homo sapiens
  misc_RNA (1)...(19): siRNA sense strand
aaaacgacggagaaagaaa

SEQ ID NO: 2299852 - RNA, 19 nt, Homo sapiens
  misc_RNA (1)...(19): siRNA sense strand
ugagaaaacgacggagaaa

SEQ ID NO: 2299853 - RNA, 19 nt, Homo sapiens
  misc_RNA (1)...(19): siRNA sense strand
ugaaauuaucgaagcugau

SEQ ID NO: 2299854 - RNA, 19 nt, Homo sapiens
  misc_RNA (1)...(19): siRNA sense strand
gcaaaauggaccaggguaa

SEQ ID NO: 2299855 - RNA, 19 nt, Homo sapiens
  misc_RNA (1)...(19): siRNA sense strand
ggaagaagauggaagcuga

SEQ ID NO: 2299856 - RNA, 19 nt, Homo sapiens
  misc_RNA (1)...(19): siRNA sense strand
uggaagaagauuagugcaa

SEQ ID NO: 2299857 - RNA, 19 nt, Homo sapiens
  misc_RNA (1)...(19): siRNA sense strand
aagcuuaagaagaaggaua

SEQ ID NO: 2299858 - RNA, 19 nt, Homo sapiens
  misc_RNA (1)...(19): siRNA sense strand
agaaauugagagagagaga

SEQ ID NO: 2299859 - RNA, 19 nt, Homo sapiens
  misc_RNA (1)...(19): siRNA sense strand
gagagagagaagaggaaaa

SEQ ID NO: 2299860 - RNA, 19 nt, Homo sapiens
  misc_RNA (1)...(19): siRNA sense strand
agaagaaggauaaagggaa

SEQ ID NO: 2299861 - RNA, 19 nt, Homo sapiens
  misc_RNA (1)...(19): siRNA sense strand
agauaaggaggaagaggaa

SEQ ID NO: 2299862 - RNA, 19 nt, Homo sapiens
  misc_RNA (1)...(19): siRNA sense strand
ccgagagagagaagaggaa

SEQ ID NO: 2299863 - RNA, 19 nt, Homo sapiens
  misc_RNA (1)...(19): siRNA sense strand
uggaaaagccccagaaaga

SEQ ID NO: 2299864 - RNA, 19 nt, Homo sapiens
  misc_RNA (1)...(19): siRNA sense strand
gcaaagcauaugagcggaa

SEQ ID NO: 2299865 - RNA, 19 nt, Homo sapiens
  misc_RNA (1)...(19): siRNA sense strand
ggaaagagacagagaccgu

SEQ ID NO: 2299866 - RNA, 19 nt, Homo sapiens
  misc_RNA (1)...(19): siRNA sense strand
cuaccaaggaguugaucaa

SEQ ID NO: 2299867 - RNA, 19 nt, Homo sapiens
  misc_RNA (1)...(19): siRNA sense strand
gaagaaggauaaagggaag

SEQ ID NO: 2299868 - RNA, 19 nt, Homo sapiens
  misc_RNA (1)...(19): siRNA sense strand
ggaagcuggaagagaagaa

SEQ ID NO: 2299869 - RNA, 19 nt, Homo sapiens
  misc_RNA (1)...(19): siRNA sense strand
cgccaguggaagaagauua

SEQ ID NO: 2299870 - RNA, 19 nt, Homo sapiens
  misc_RNA (1)...(19): siRNA sense strand
augaagaaaccgagcuuau

SEQ ID NO: 2299871 - RNA, 19 nt, Homo sapiens
  misc_RNA (1)...(19): siRNA sense strand
agcuuaagaagaaggauaa

SEQ ID NO: 2299872 - RNA, 19 nt, Homo sapiens
  misc_RNA (1)...(19): siRNA sense strand
agacagagaccgugaccga

SEQ ID NO: 2299873 - RNA, 19 nt, Homo sapiens
  misc_RNA (1)...(19): siRNA sense strand
aaauugagagagagagaga

SEQ ID NO: 2299874 - RNA, 19 nt, Homo sapiens
  misc_RNA (1)...(19): siRNA sense strand
gaggaaaagaagagacaca

SEQ ID NO: 2299875 - RNA, 19 nt, Homo sapiens
  misc_RNA (1)...(19): siRNA sense strand
gcagagaaguaccgggauc

SEQ ID NO: 2299876 - RNA, 19 nt, Homo sapiens
  misc_RNA (1)...(19): siRNA sense strand
uggugaaaggcuuggauuu

SEQ ID NO: 2299877 - RNA, 19 nt, Homo sapiens
  misc_RNA (1)...(19): siRNA sense strand
gagagcuagcagagaagua

SEQ ID NO: 2299878 - RNA, 19 nt, Homo sapiens
  misc_RNA (1)...(19): siRNA sense strand
gcgagaacgagaucgggaa

SEQ ID NO: 2299879 - RNA, 19 nt, Homo sapiens
  misc_RNA (1)...(19): siRNA sense strand
gaguaugcugacacagaua

SEQ ID NO: 2299880 - RNA, 19 nt, Homo sapiens
  misc_RNA (1)...(19): siRNA sense strand
cgggagagauaucgggaac

SEQ ID NO: 2299881 - RNA, 19 nt, Homo sapiens
  misc_RNA (1)...(19): siRNA sense strand
gcauaugagcggaaugagu

SEQ ID NO: 2299882 - RNA, 19 nt, Homo sapiens
  misc_RNA (1)...(19): siRNA sense strand
acggagagauggagugaac

SEQ ID NO: 2299883 - RNA, 19 nt, Homo sapiens
  misc_RNA (1)...(19): siRNA sense strand
agagagaagaggaaaagaa

SEQ ID NO: 2299884 - RNA, 19 nt, Homo sapiens
  misc_RNA (1)...(19): siRNA sense strand
acaguuaugcagagugcua

SEQ ID NO: 2299885 - RNA, 19 nt, Homo sapiens
  misc_RNA (1)...(19): siRNA sense strand
aacaagaagcuuaagaaga

SEQ ID NO: 2299886 - RNA, 19 nt, Homo sapiens
  misc_RNA (1)...(19): siRNA sense strand
caggaagaauacagcgagu

SEQ ID NO: 2299887 - RNA, 19 nt, Homo sapiens
  misc_RNA (1)...(19): siRNA sense strand
aggaagaggaacugaugga

SEQ ID NO: 2299888 - RNA, 19 nt, Homo sapiens
  misc_RNA (1)...(19): siRNA sense strand
auaaagggaagcuggaaga

SEQ ID NO: 2299889 - RNA, 19 nt, Homo sapiens
  misc_RNA (1)...(19): siRNA sense strand
auugagaagaggaagaaga

SEQ ID NO: 2299890 - RNA, 19 nt, Homo sapiens
  misc_RNA (1)...(19): siRNA sense strand
ccagcaaagauaaggagga

SEQ ID NO: 2299891 - RNA, 19 nt, Homo sapiens
  misc_RNA (1)...(19): siRNA sense strand
auaaggaggaagaggaacu

SEQ ID NO: 2299892 - RNA, 19 nt, Homo sapiens
  misc_RNA (1)...(19): siRNA sense strand
gcuuaagaagaaggauaaa

SEQ ID NO: 2299893 - RNA, 19 nt, Homo sapiens
  misc_RNA (1)...(19): siRNA sense strand
cgagagagagaagaggaaa

SEQ ID NO: 2299894 - RNA, 19 nt, Homo sapiens
  misc_RNA (1)...(19): siRNA sense strand
caugagaugccaagggagu

SEQ ID NO: 2299895 - RNA, 19 nt, Homo sapiens
  misc_RNA (1)...(19): siRNA sense strand
aagauaaggaggaagagga

SEQ ID NO: 2299896 - RNA, 19 nt, Homo sapiens
  misc_RNA (1)...(19): siRNA sense strand
gagguggauuauagcaaaa

SEQ ID NO: 2299897 - RNA, 19 nt, Homo sapiens
  misc_RNA (1)...(19): siRNA sense strand
aguacaaugaggaugaaga

SEQ ID NO: 2299898 - RNA, 19 nt, Homo sapiens
  misc_RNA (1)...(19): siRNA sense strand
aagaagaaggauaaaggga

SEQ ID NO: 2299899 - RNA, 19 nt, Homo sapiens
  misc_RNA (1)...(19): siRNA sense strand
agccaaaaguagaugauga

SEQ ID NO: 2299900 - RNA, 19 nt, Homo sapiens
  misc_RNA (1)...(19): siRNA sense strand
agaugaggauccugaaaau

SEQ ID NO: 2299901 - RNA, 19 nt, Homo sapiens
  misc_RNA (1)...(19): siRNA sense strand
acagcgaguauaugaacaa

SEQ ID NO: 2299902 - RNA, 19 nt, Homo sapiens
  misc_RNA (1)...(19): siRNA sense strand
ccaagaaagaugaggaucc

SEQ ID NO: 2299903 - RNA, 19 nt, Homo sapiens
  misc_RNA (1)...(19): siRNA sense strand
agagcgggaccgagagaga

SEQ ID NO: 2299904 - RNA, 19 nt, Homo sapiens
  misc_RNA (1)...(19): siRNA sense strand
caaugaggaugaagaccca

SEQ ID NO: 2299905 - RNA, 19 nt, Homo sapiens
  misc_RNA (1)...(19): siRNA sense strand
ggaugaagacccagcugca

SEQ ID NO: 2299906 - RNA, 19 nt, Homo sapiens
  misc_RNA (1)...(19): siRNA sense strand
cagacuacacugaccacaa

SEQ ID NO: 2299907 - RNA, 19 nt, Homo sapiens
  misc_RNA (1)...(19): siRNA sense strand
cgggagcgugaucgggaaa

SEQ ID NO: 2299908 - RNA, 19 nt, Homo sapiens
  misc_RNA (1)...(19): siRNA sense strand
ugaccgagagcgagagcga

SEQ ID NO: 2299909 - RNA, 19 nt, Homo sapiens
  misc_RNA (1)...(19): siRNA sense strand
aggagguggauuauagcaa

SEQ ID NO: 2299910 - RNA, 19 nt, Homo sapiens
  misc_RNA (1)...(19): siRNA sense strand
cugcauuccaguaugguau

SEQ ID NO: 2299911 - RNA, 19 nt, Homo sapiens
  misc_RNA (1)...(19): siRNA sense strand
cgugaucgggaaagagaca

SEQ ID NO: 2299912 - RNA, 19 nt, Homo sapiens
  misc_RNA (1)...(19): siRNA sense strand
cuugaucgccaguggaaga

SEQ ID NO: 2299913 - RNA, 19 nt, Homo sapiens
  misc_RNA (1)...(19): siRNA sense strand
ggauaaagggaagcuggaa

SEQ ID NO: 2299914 - RNA, 19 nt, Homo sapiens
  misc_RNA (1)...(19): siRNA sense strand
cagcagaaccacugacaga

SEQ ID NO: 2299915 - RNA, 19 nt, Homo sapiens
  misc_RNA (1)...(19): siRNA sense strand
augagaagaugaagagcuu

SEQ ID NO: 2299916 - RNA, 19 nt, Homo sapiens
  misc_RNA (1)...(19): siRNA sense strand
ggaagaagaaagaccugaa

SEQ ID NO: 2299917 - RNA, 19 nt, Homo sapiens
  misc_RNA (1)...(19): siRNA sense strand
ugacagagcuagaggaguc

SEQ ID NO: 2299918 - RNA, 19 nt, Homo sapiens
  misc_RNA (1)...(19): siRNA sense strand
aagaaagaccugaagauca

SEQ ID NO: 2299919 - RNA, 19 nt, Homo sapiens
  misc_RNA (1)...(19): siRNA sense strand
agaagaaagaccugaagau

SEQ ID NO: 2299920 - RNA, 19 nt, Homo sapiens
  misc_RNA (1)...(19): siRNA sense strand
aggaaaucaggaagaagaa

SEQ ID NO: 2299921 - RNA, 19 nt, Homo sapiens
  misc_RNA (1)...(19): siRNA sense strand
ccaaggaaaucaggaagaa

SEQ ID NO: 2299922 - RNA, 19 nt, Homo sapiens
  misc_RNA (1)...(19): siRNA sense strand
aaugaguacuggagauuga

SEQ ID NO: 2299923 - RNA, 19 nt, Homo sapiens
  misc_RNA (1)...(19): siRNA sense strand
acucggagcucaaguucaa

SEQ ID NO: 2299924 - RNA, 19 nt, Homo sapiens
  misc_RNA (1)...(19): siRNA sense strand
aaggaaaucaggaagaaga

SEQ ID NO: 2299925 - RNA, 19 nt, Homo sapiens
  misc_RNA (1)...(19): siRNA sense strand
gggagcuggccaaggaaau

SEQ ID NO: 2299926 - RNA, 19 nt, Homo sapiens
  misc_RNA (1)...(19): siRNA sense strand
aaggauagccucagcguca

SEQ ID NO: 2299927 - RNA, 19 nt, Homo sapiens
  misc_RNA (1)...(19): siRNA sense strand
ucaaagagcugguuaccca

SEQ ID NO: 2299928 - RNA, 19 nt, Homo sapiens
  misc_RNA (1)...(19): siRNA sense strand
gccaaggaaaucaggaaga

SEQ ID NO: 2299929 - RNA, 19 nt, Homo sapiens
  misc_RNA (1)...(19): siRNA sense strand
ggaaaucaggaagaagaaa

SEQ ID NO: 2299930 - RNA, 19 nt, Homo sapiens
  misc_RNA (1)...(19): siRNA sense strand
uggccaaggaaaucaggaa

SEQ ID NO: 2299931 - RNA, 19 nt, Homo sapiens
  misc_RNA (1)...(19): siRNA sense strand
aaaucaggaagaagaaaga

SEQ ID NO: 2299932 - RNA, 19 nt, Homo sapiens
  misc_RNA (1)...(19): siRNA sense strand
gcgucaacgaguucaaaga

SEQ ID NO: 2299933 - RNA, 19 nt, Homo sapiens
  misc_RNA (1)...(19): siRNA sense strand
ugaagagcuuggaugugaa

SEQ ID NO: 2299934 - RNA, 19 nt, Homo sapiens
  misc_RNA (1)...(19): siRNA sense strand
cuugaugagaagaugaaga

SEQ ID NO: 2299935 - RNA, 19 nt, Homo sapiens
  misc_RNA (1)...(19): siRNA sense strand
ugaagaucaggaagaagua

SEQ ID NO: 2299936 - RNA, 19 nt, Homo sapiens
  misc_RNA (1)...(19): siRNA sense strand
agaugaagagcuuggaugu

SEQ ID NO: 2299937 - RNA, 19 nt, Homo sapiens
  misc_RNA (1)...(19): siRNA sense strand
agagcuuggaugugaauca

SEQ ID NO: 2299938 - RNA, 19 nt, Homo sapiens
  misc_RNA (1)...(19): siRNA sense strand
gggagaaaguggaugagga

SEQ ID NO: 2299939 - RNA, 19 nt, Homo sapiens
  misc_RNA (1)...(19): siRNA sense strand
cugaagaagcugaugggca

SEQ ID NO: 2299940 - RNA, 19 nt, Homo sapiens
  misc_RNA (1)...(19): siRNA sense strand
ugaagaagcugaugggcag

SEQ ID NO: 2299941 - RNA, 19 nt, Homo sapiens
  misc_RNA (1)...(19): siRNA sense strand
ggagaaaguggaugaggag

SEQ ID NO: 2299942 - RNA, 19 nt, Homo sapiens
  misc_RNA (1)...(19): siRNA sense strand
gugaccagcagguggacuu

SEQ ID NO: 2299943 - RNA, 19 nt, Homo sapiens
  misc_RNA (1)...(19): siRNA sense strand
ucaaggugcugauggagaa

SEQ ID NO: 2299944 - RNA, 19 nt, Homo sapiens
  misc_RNA (1)...(19): siRNA sense strand
ucaaggaccuggacgccaa

SEQ ID NO: 2299945 - RNA, 19 nt, Homo sapiens
  misc_RNA (1)...(19): siRNA sense strand
auaaauugcucaaggaccu

SEQ ID NO: 2299946 - RNA, 19 nt, Homo sapiens
  misc_RNA (1)...(19): siRNA sense strand
agaaggagcuaccaggcuu

SEQ ID NO: 2299947 - RNA, 19 nt, Homo sapiens
  misc_RNA (1)...(19): siRNA sense strand
ucgaagaagaaaucgggaa

SEQ ID NO: 2299948 - RNA, 19 nt, Homo sapiens
  misc_RNA (1)...(19): siRNA sense strand
gaauaagcacuuugggacu

SEQ ID NO: 2299949 - RNA, 19 nt, Homo sapiens
  misc_RNA (1)...(19): siRNA sense strand
cagagaucgaagaagaaau

SEQ ID NO: 2299950 - RNA, 19 nt, Homo sapiens
  misc_RNA (1)...(19): siRNA sense strand
gcggauacuggcugaccaa

SEQ ID NO: 2299951 - RNA, 19 nt, Homo sapiens
  misc_RNA (1)...(19): siRNA sense strand
cgggaauucgggaggcaga

SEQ ID NO: 2299952 - RNA, 19 nt, Homo sapiens
  misc_RNA (1)...(19): siRNA sense strand
agacauaaccagacgcucu

SEQ ID NO: 2299953 - RNA, 19 nt, Homo sapiens
  misc_RNA (1)...(19): siRNA sense strand
agaaguaaugaaagcauca

SEQ ID NO: 2299954 - RNA, 19 nt, Homo sapiens
  misc_RNA (1)...(19): siRNA sense strand
ggauacuggcugaccaaca

SEQ ID NO: 2299955 - RNA, 19 nt, Homo sapiens
  misc_RNA (1)...(19): siRNA sense strand
aaugaaagcaucaagcaca

SEQ ID NO: 2299956 - RNA, 19 nt, Homo sapiens
  misc_RNA (1)...(19): siRNA sense strand
aaaucuaccucuacggcuu

SEQ ID NO: 2299957 - RNA, 19 nt, Homo sapiens
  misc_RNA (1)...(19): siRNA sense strand
cagaacucacaaagagaaa

SEQ ID NO: 2299958 - RNA, 19 nt, Homo sapiens
  misc_RNA (1)...(19): siRNA sense strand
ccaugagggcagagaacca

SEQ ID NO: 2299959 - RNA, 19 nt, Homo sapiens
  misc_RNA (1)...(19): siRNA sense strand
cagcugaccugguuggaga

SEQ ID NO: 2299960 - RNA, 19 nt, Homo sapiens
  misc_RNA (1)...(19): siRNA sense strand
cgacccucauagagaacaa

SEQ ID NO: 2299961 - RNA, 19 nt, Homo sapiens
  misc_RNA (1)...(19): siRNA sense strand
aggacgagcuacaggugau

SEQ ID NO: 2299962 - RNA, 19 nt, Homo sapiens
  misc_RNA (1)...(19): siRNA sense strand
guuuagaggagcuggagca

SEQ ID NO: 2299963 - RNA, 19 nt, Homo sapiens
  misc_RNA (1)...(19): siRNA sense strand
ccugguuggagaauggaaa

SEQ ID NO: 2299964 - RNA, 19 nt, Homo sapiens
  misc_RNA (1)...(19): siRNA sense strand
ccaacuugucugaggccau

SEQ ID NO: 2299965 - RNA, 19 nt, Homo sapiens
  misc_RNA (1)...(19): siRNA sense strand
cagcaagcagucagcaaaa

SEQ ID NO: 2299966 - RNA, 19 nt, Homo sapiens
  misc_RNA (1)...(19): siRNA sense strand
caggugaggacgagcuaca

SEQ ID NO: 2299967 - RNA, 19 nt, Homo sapiens
  misc_RNA (1)...(19): siRNA sense strand
gugaaguuccggaaaggga

SEQ ID NO: 2299968 - RNA, 19 nt, Homo sapiens
  misc_RNA (1)...(19): siRNA sense strand
acaaagagaaacaaccuga

SEQ ID NO: 2299969 - RNA, 19 nt, Homo sapiens
  misc_RNA (1)...(19): siRNA sense strand
gcugaagagcaaagggagu

SEQ ID NO: 2299970 - RNA, 19 nt, Homo sapiens
  misc_RNA (1)...(19): siRNA sense strand
acucaaauuuagugcgacu

SEQ ID NO: 2299971 - RNA, 19 nt, Homo sapiens
  misc_RNA (1)...(19): siRNA sense strand
cggaaacggcugaagagca

SEQ ID NO: 2299972 - RNA, 19 nt, Homo sapiens
  misc_RNA (1)...(19): siRNA sense strand
gagaaagaggagcccgaca

SEQ ID NO: 2299973 - RNA, 19 nt, Homo sapiens
  misc_RNA (1)...(19): siRNA sense strand
uggagaaagaggagcccga

SEQ ID NO: 2299974 - RNA, 19 nt, Homo sapiens
  misc_RNA (1)...(19): siRNA sense strand
cagucggugcuaugauaua

SEQ ID NO: 2299975 - RNA, 19 nt, Homo sapiens
  misc_RNA (1)...(19): siRNA sense strand
cggcugaagagcaaaggga

SEQ ID NO: 2299976 - RNA, 19 nt, Homo sapiens
  misc_RNA (1)...(19): siRNA sense strand
augacugcuuucaggaauu

SEQ ID NO: 2299977 - RNA, 19 nt, Homo sapiens
  misc_RNA (1)...(19): siRNA sense strand
gcacauggaccuaucgaac

SEQ ID NO: 2299978 - RNA, 19 nt, Homo sapiens
  misc_RNA (1)...(19): siRNA sense strand
gcugaagagcaaagggagu

SEQ ID NO: 2299979 - RNA, 19 nt, Homo sapiens
  misc_RNA (1)...(19): siRNA sense strand
acucaaauuuagugcgacu

SEQ ID NO: 2299980 - RNA, 19 nt, Homo sapiens
  misc_RNA (1)...(19): siRNA sense strand
cggaaacggcugaagagca

SEQ ID NO: 2299981 - RNA, 19 nt, Homo sapiens
  misc_RNA (1)...(19): siRNA sense strand
gagaaagaggagcccgaca

SEQ ID NO: 2299982 - RNA, 19 nt, Homo sapiens
  misc_RNA (1)...(19): siRNA sense strand
uggagaaagaggagcccga

SEQ ID NO: 2299983 - RNA, 19 nt, Homo sapiens
  misc_RNA (1)...(19): siRNA sense strand
cagucggugcuaugauaua

SEQ ID NO: 2299984 - RNA, 19 nt, Homo sapiens
  misc_RNA (1)...(19): siRNA sense strand
cggcugaagagcaaaggga

SEQ ID NO: 2299985 - RNA, 19 nt, Homo sapiens
  misc_RNA (1)...(19): siRNA sense strand
augacugcuuucaggaauu

SEQ ID NO: 2299986 - RNA, 19 nt, Homo sapiens
  misc_RNA (1)...(19): siRNA sense strand
gcacauggaccuaucgaac

SEQ ID NO: 2299987 - RNA, 19 nt, Homo sapiens
  misc_RNA (1)...(19): siRNA sense strand
gcaugaugauggagaccga

SEQ ID NO: 2299988 - RNA, 19 nt, Homo sapiens
  misc_RNA (1)...(19): siRNA sense strand
agaccaagacgcugcucaa

SEQ ID NO: 2299989 - RNA, 19 nt, Homo sapiens
  misc_RNA (1)...(19): siRNA sense strand
cguucaucgacgaggccaa

SEQ ID NO: 2299990 - RNA, 19 nt, Homo sapiens
  misc_RNA (1)...(19): siRNA sense strand
ucuccaacucgcagggcua

SEQ ID NO: 2299991 - RNA, 19 nt, Homo sapiens
  misc_RNA (1)...(19): siRNA sense strand
gggccgaguggaaggucau

SEQ ID NO: 2299992 - RNA, 19 nt, Homo sapiens
  misc_RNA (1)...(19): siRNA sense strand
agaagauagcagaaggaaa

SEQ ID NO: 2299993 - RNA, 19 nt, Homo sapiens
  misc_RNA (1)...(19): siRNA sense strand
gaagaagaaaugaaggaca

SEQ ID NO: 2299994 - RNA, 19 nt, Homo sapiens
  misc_RNA (1)...(19): siRNA sense strand
ggaaaggugcggagggaag

SEQ ID NO: 2299995 - RNA, 19 nt, Homo sapiens
  misc_RNA (1)...(19): siRNA sense strand
cuuuaagccaggagaugaa

SEQ ID NO: 2299996 - RNA, 19 nt, Homo sapiens
  misc_RNA (1)...(19): siRNA sense strand
cugaagaagaaaugaagga

SEQ ID NO: 2299997 - RNA, 19 nt, Homo sapiens
  misc_RNA (1)...(19): siRNA sense strand
uguggaaagcuaugggcua

SEQ ID NO: 2299998 - RNA, 19 nt, Homo sapiens
  misc_RNA (1)...(19): siRNA sense strand
agccaggagaugaaauaua

SEQ ID NO: 2299999 - RNA, 19 nt, Homo sapiens
  misc_RNA (1)...(19): siRNA sense strand
ccuaagggagccugugcaa

SEQ ID NO: 2300000 - RNA, 19 nt, Homo sapiens
  misc_RNA (1)...(19): siRNA sense strand
cuagagaugagaauggcaa

SEQ ID NO: 2300001 - RNA, 19 nt, Homo sapiens
  misc_RNA (1)...(19): siRNA sense strand
cguauuucacccagccaaa

SEQ ID NO: 2300002 - RNA, 19 nt, Homo sapiens
  misc_RNA (1)...(19): siRNA sense strand
cuacaaaucaugucccaga

SEQ ID NO: 2300003 - RNA, 19 nt, Homo sapiens
  misc_RNA (1)...(19): siRNA sense strand
uagagaugagaauggcaaa

SEQ ID NO: 2300004 - RNA, 19 nt, Homo sapiens
  misc_RNA (1)...(19): siRNA sense strand
aacacaagccagucagcaa

SEQ ID NO: 2300005 - RNA, 19 nt, Homo sapiens
  misc_RNA (1)...(19): siRNA sense strand
gcauauagcccuuugggga

SEQ ID NO: 2300006 - RNA, 19 nt, Homo sapiens
  misc_RNA (1)...(19): siRNA sense strand
gaaccuaaaucgaccccua

SEQ ID NO: 2300007 - RNA, 19 nt, Homo sapiens
  misc_RNA (1)...(19): siRNA sense strand
gggaaauauuacugggaag

SEQ ID NO: 2300008 - RNA, 19 nt, Homo sapiens
  misc_RNA (1)...(19): siRNA sense strand
agguagacauagagaagga

SEQ ID NO: 2300009 - RNA, 19 nt, Homo sapiens
  misc_RNA (1)...(19): siRNA sense strand
ucuguaaggaggauggaaa

SEQ ID NO: 2300010 - RNA, 19 nt, Homo sapiens
  misc_RNA (1)...(19): siRNA sense strand
cagcggagguugacgggau

SEQ ID NO: 2300011 - RNA, 19 nt, Homo sapiens
  misc_RNA (1)...(19): siRNA sense strand
uggaagaucgagagacaga

SEQ ID NO: 2300012 - RNA, 19 nt, Homo sapiens
  misc_RNA (1)...(19): siRNA sense strand
cugcaaagaucaaggaguc

SEQ ID NO: 2300013 - RNA, 19 nt, Homo sapiens
  misc_RNA (1)...(19): siRNA sense strand
uggaggaaggugaggugaa

SEQ ID NO: 2300014 - RNA, 19 nt, Homo sapiens
  misc_RNA (1)...(19): siRNA sense strand
caguagagaugcugcagga

SEQ ID NO: 2300015 - RNA, 19 nt, Homo sapiens
  misc_RNA (1)...(19): siRNA sense strand
aaggaagagcucuggguuu

SEQ ID NO: 2300016 - RNA, 19 nt, Homo sapiens
  misc_RNA (1)...(19): siRNA sense strand
cuguaaggaggauggaaaa

SEQ ID NO: 2300017 - RNA, 19 nt, Homo sapiens
  misc_RNA (1)...(19): siRNA sense strand
aggcugagaagcuggaaga

SEQ ID NO: 2300018 - RNA, 19 nt, Homo sapiens
  misc_RNA (1)...(19): siRNA sense strand
agagagucaaagaggucaa

SEQ ID NO: 2300019 - RNA, 19 nt, Homo sapiens
  misc_RNA (1)...(19): siRNA sense strand
ucaaggaaugucaggaaaa

SEQ ID NO: 2300020 - RNA, 19 nt, Homo sapiens
  misc_RNA (1)...(19): siRNA sense strand
gagucaaagaggucaagau

SEQ ID NO: 2300021 - RNA, 19 nt, Homo sapiens
  misc_RNA (1)...(19): siRNA sense strand
cucaguaaagguagacaua

SEQ ID NO: 2300022 - RNA, 19 nt, Homo sapiens
  misc_RNA (1)...(19): siRNA sense strand
gugaacugucucaggaaca

SEQ ID NO: 2300023 - RNA, 19 nt, Homo sapiens
  misc_RNA (1)...(19): siRNA sense strand
ucaaggagucagugaucau

SEQ ID NO: 2300024 - RNA, 19 nt, Homo sapiens
  misc_RNA (1)...(19): siRNA sense strand
aggaggaucaagaggcuga

SEQ ID NO: 2300025 - RNA, 19 nt, Homo sapiens
  misc_RNA (1)...(19): siRNA sense strand
ggaucaagaggcugagaag

SEQ ID NO: 2300026 - RNA, 19 nt, Homo sapiens
  misc_RNA (1)...(19): siRNA sense strand
cuuaaagagcugacagaug

SEQ ID NO: 2300027 - RNA, 19 nt, Homo sapiens
  misc_RNA (1)...(19): siRNA sense strand
gaucaucucaagaggggaa

SEQ ID NO: 2300028 - RNA, 19 nt, Homo sapiens
  misc_RNA (1)...(19): siRNA sense strand
gucaugaaaaggagugaaa

SEQ ID NO: 2300029 - RNA, 19 nt, Homo sapiens
  misc_RNA (1)...(19): siRNA sense strand
acaucagacaagagagaac

SEQ ID NO: 2300030 - RNA, 19 nt, Homo sapiens
  misc_RNA (1)...(19): siRNA sense strand
aggaaggugaggugaaugu

SEQ ID NO: 2300031 - RNA, 19 nt, Homo sapiens
  misc_RNA (1)...(19): siRNA sense strand
gcuuuugauccaaguguaa

SEQ ID NO: 2300032 - RNA, 19 nt, Homo sapiens
  misc_RNA (1)...(19): siRNA sense strand
gcaucacugcaaagaucaa

SEQ ID NO: 2300033 - RNA, 19 nt, Homo sapiens
  misc_RNA (1)...(19): siRNA sense strand
ggguuauaggauuacagaa

SEQ ID NO: 2300034 - RNA, 19 nt, Homo sapiens
  misc_RNA (1)...(19): siRNA sense strand
guacaaggcccuagaggca

SEQ ID NO: 2300035 - RNA, 19 nt, Homo sapiens
  misc_RNA (1)...(19): siRNA sense strand
aaauauggcuacacggaca

SEQ ID NO: 2300036 - RNA, 19 nt, Homo sapiens
  misc_RNA (1)...(19): siRNA sense strand
cgcaauugccagagggagu

SEQ ID NO: 2300037 - RNA, 19 nt, Homo sapiens
  misc_RNA (1)...(19): siRNA sense strand
guggauggguugcagguga

SEQ ID NO: 2300038 - RNA, 19 nt, Homo sapiens
  misc_RNA (1)...(19): siRNA sense strand
aagacguuagagagggaaa

SEQ ID NO: 2300039 - RNA, 19 nt, Homo sapiens
  misc_RNA (1)...(19): siRNA sense strand
gcaagggcacugagagcca

SEQ ID NO: 2300040 - RNA, 19 nt, Homo sapiens
  misc_RNA (1)...(19): siRNA sense strand
agaacgaggaugagcucuu

SEQ ID NO: 2300041 - RNA, 19 nt, Homo sapiens
  misc_RNA (1)...(19): siRNA sense strand
ucaagacguuagagaggga

SEQ ID NO: 2300042 - RNA, 19 nt, Homo sapiens
  misc_RNA (1)...(19): siRNA sense strand
ucgcagagccagaaaucca

SEQ ID NO: 2300043 - RNA, 19 nt, Homo sapiens
  misc_RNA (1)...(19): siRNA sense strand
cuggaaagaucaagcaggu

SEQ ID NO: 2300044 - RNA, 19 nt, Homo sapiens
  misc_RNA (1)...(19): siRNA sense strand
ugaccaacuucguggccca

SEQ ID NO: 2300045 - RNA, 19 nt, Homo sapiens
  misc_RNA (1)...(19): siRNA sense strand
aggaggagcuugcugcaga

SEQ ID NO: 2300046 - RNA, 19 nt, Homo sapiens
  misc_RNA (1)...(19): siRNA sense strand
agacucaagacguuagaga

SEQ ID NO: 2300047 - RNA, 19 nt, Homo sapiens
  misc_RNA (1)...(19): siRNA sense strand
agaucaagcagguggggau

SEQ ID NO: 2300048 - RNA, 19 nt, Homo sapiens
  misc_RNA (1)...(19): siRNA sense strand
guacaaggcccuagaggca

SEQ ID NO: 2300049 - RNA, 19 nt, Homo sapiens
  misc_RNA (1)...(19): siRNA sense strand
aaauauggcuacacggaca

SEQ ID NO: 2300050 - RNA, 19 nt, Homo sapiens
  misc_RNA (1)...(19): siRNA sense strand
cgcaauugccagagggagu

SEQ ID NO: 2300051 - RNA, 19 nt, Homo sapiens
  misc_RNA (1)...(19): siRNA sense strand
guggauggguugcagguga

SEQ ID NO: 2300052 - RNA, 19 nt, Homo sapiens
  misc_RNA (1)...(19): siRNA sense strand
aagacguuagagagggaaa

SEQ ID NO: 2300053 - RNA, 19 nt, Homo sapiens
  misc_RNA (1)...(19): siRNA sense strand
gcaagggcacugagagcca

SEQ ID NO: 2300054 - RNA, 19 nt, Homo sapiens
  misc_RNA (1)...(19): siRNA sense strand
agaacgaggaugagcucuu

SEQ ID NO: 2300055 - RNA, 19 nt, Homo sapiens
  misc_RNA (1)...(19): siRNA sense strand
ucaagacguuagagaggga

SEQ ID NO: 2300056 - RNA, 19 nt, Homo sapiens
  misc_RNA (1)...(19): siRNA sense strand
ucgcagagccagaaaucca

SEQ ID NO: 2300057 - RNA, 19 nt, Homo sapiens
  misc_RNA (1)...(19): siRNA sense strand
cuggaaagaucaagcaggu

SEQ ID NO: 2300058 - RNA, 19 nt, Homo sapiens
  misc_RNA (1)...(19): siRNA sense strand
ugaccaacuucguggccca

SEQ ID NO: 2300059 - RNA, 19 nt, Homo sapiens
  misc_RNA (1)...(19): siRNA sense strand
aggaggagcuugcugcaga

SEQ ID NO: 2300060 - RNA, 19 nt, Homo sapiens
  misc_RNA (1)...(19): siRNA sense strand
agacucaagacguuagaga

SEQ ID NO: 2300061 - RNA, 19 nt, Homo sapiens
  misc_RNA (1)...(19): siRNA sense strand
agaucaagcagguggggau

SEQ ID NO: 2300062 - RNA, 19 nt, Homo sapiens
  misc_RNA (1)...(19): siRNA sense strand
gcgaaaggcuuccgggacu

SEQ ID NO: 2300063 - RNA, 19 nt, Homo sapiens
  misc_RNA (1)...(19): siRNA sense strand
cgguggacgauaagcgcua

SEQ ID NO: 2300064 - RNA, 19 nt, Homo sapiens
  misc_RNA (1)...(19): siRNA sense strand
cggugaagaagaacgcgaa

SEQ ID NO: 2300065 - RNA, 19 nt, Homo sapiens
  misc_RNA (1)...(19): siRNA sense strand
acgauaagcgcuaccggua

SEQ ID NO: 2300066 - RNA, 19 nt, Homo sapiens
  misc_RNA (1)...(19): siRNA sense strand
agaugaaggcgcuguggga

SEQ ID NO: 2300067 - RNA, 19 nt, Homo sapiens
  misc_RNA (1)...(19): siRNA sense strand
ccacgcaaagauagcgaga

SEQ ID NO: 2300068 - RNA, 19 nt, Homo sapiens
  misc_RNA (1)...(19): siRNA sense strand
gcgaaaggcuuccgggacu

SEQ ID NO: 2300069 - RNA, 19 nt, Homo sapiens
  misc_RNA (1)...(19): siRNA sense strand
cgguggacgauaagcgcua

SEQ ID NO: 2300070 - RNA, 19 nt, Homo sapiens
  misc_RNA (1)...(19): siRNA sense strand
cggugaagaagaacgcgaa

SEQ ID NO: 2300071 - RNA, 19 nt, Homo sapiens
  misc_RNA (1)...(19): siRNA sense strand
acgauaagcgcuaccggua

SEQ ID NO: 2300072 - RNA, 19 nt, Homo sapiens
  misc_RNA (1)...(19): siRNA sense strand
agaugaaggcgcuguggga

SEQ ID NO: 2300073 - RNA, 19 nt, Homo sapiens
  misc_RNA (1)...(19): siRNA sense strand
ccacgcaaagauagcgaga

SEQ ID NO: 2300074 - RNA, 19 nt, Homo sapiens
  misc_RNA (1)...(19): siRNA sense strand
gcgaaaggcuuccgggacu

SEQ ID NO: 2300075 - RNA, 19 nt, Homo sapiens
  misc_RNA (1)...(19): siRNA sense strand
cgguggacgauaagcgcua

SEQ ID NO: 2300076 - RNA, 19 nt, Homo sapiens
  misc_RNA (1)...(19): siRNA sense strand
cggugaagaagaacgcgaa

SEQ ID NO: 2300077 - RNA, 19 nt, Homo sapiens
  misc_RNA (1)...(19): siRNA sense strand
acgauaagcgcuaccggua

SEQ ID NO: 2300078 - RNA, 19 nt, Homo sapiens
  misc_RNA (1)...(19): siRNA sense strand
agaugaaggcgcuguggga

SEQ ID NO: 2300079 - RNA, 19 nt, Homo sapiens
  misc_RNA (1)...(19): siRNA sense strand
ccacgcaaagauagcgaga

SEQ ID NO: 2300080 - RNA, 19 nt, Homo sapiens
  misc_RNA (1)...(19): siRNA sense strand
ccaaugaacugcagagcau

SEQ ID NO: 2300081 - RNA, 19 nt, Homo sapiens
  misc_RNA (1)...(19): siRNA sense strand
aggacgagguggaggacga

SEQ ID NO: 2300082 - RNA, 19 nt, Homo sapiens
  misc_RNA (1)...(19): siRNA sense strand
agcugaagaucgacaacaa

SEQ ID NO: 2300083 - RNA, 19 nt, Homo sapiens
  misc_RNA (1)...(19): siRNA sense strand
aggugacgcuggaggccaa

SEQ ID NO: 2300084 - RNA, 19 nt, Homo sapiens
  misc_RNA (1)...(19): siRNA sense strand
ccacauagugcgagccaac

SEQ ID NO: 2300085 - RNA, 19 nt, Homo sapiens
  misc_RNA (1)...(19): siRNA sense strand
ccaaggagcugugggacca

SEQ ID NO: 2300086 - RNA, 19 nt, Homo sapiens
  misc_RNA (1)...(19): siRNA sense strand
ggaaacagccgggagccua

SEQ ID NO: 2300087 - RNA, 19 nt, Homo sapiens
  misc_RNA (1)...(19): siRNA sense strand
ggggagcaguggauggcua

SEQ ID NO: 2300088 - RNA, 19 nt, Homo sapiens
  misc_RNA (1)...(19): siRNA sense strand
gagaaaaggaagcagcuga

SEQ ID NO: 2300089 - RNA, 19 nt, Homo sapiens
  misc_RNA (1)...(19): siRNA sense strand
gagucagcggccuggacaa

SEQ ID NO: 2300090 - RNA, 19 nt, Homo sapiens
  misc_RNA (1)...(19): siRNA sense strand
acaacaacccguuugccaa

SEQ ID NO: 2300091 - RNA, 19 nt, Homo sapiens
  misc_RNA (1)...(19): siRNA sense strand
aagaagagguggaggacga

SEQ ID NO: 2300092 - RNA, 19 nt, Homo sapiens
  misc_RNA (1)...(19): siRNA sense strand
ccgaaaugccaaagaggau

SEQ ID NO: 2300093 - RNA, 19 nt, Homo sapiens
  misc_RNA (1)...(19): siRNA sense strand
uggaaauggccgaagagaa

SEQ ID NO: 2300094 - RNA, 19 nt, Homo sapiens
  misc_RNA (1)...(19): siRNA sense strand
ccgaagaagagguggagga

SEQ ID NO: 2300095 - RNA, 19 nt, Homo sapiens
  misc_RNA (1)...(19): siRNA sense strand
gcaaaagguuuccgggaca

SEQ ID NO: 2300096 - RNA, 19 nt, Homo sapiens
  misc_RNA (1)...(19): siRNA sense strand
ggacauuauagcugcugau

SEQ ID NO: 2300097 - RNA, 19 nt, Homo sapiens
  misc_RNA (1)...(19): siRNA sense strand
ggguguuugaugaaagaca

SEQ ID NO: 2300098 - RNA, 19 nt, Homo sapiens
  misc_RNA (1)...(19): siRNA sense strand
acugcauaccagaaugaua

SEQ ID NO: 2300099 - RNA, 19 nt, Homo sapiens
  misc_RNA (1)...(19): siRNA sense strand
cugcaguccaugagggugu

SEQ ID NO: 2300100 - RNA, 19 nt, Homo sapiens
  misc_RNA (1)...(19): siRNA sense strand
aagaagagguggaggacga

SEQ ID NO: 2300101 - RNA, 19 nt, Homo sapiens
  misc_RNA (1)...(19): siRNA sense strand
ccgaaaugccaaagaggau

SEQ ID NO: 2300102 - RNA, 19 nt, Homo sapiens
  misc_RNA (1)...(19): siRNA sense strand
uggaaauggccgaagagaa

SEQ ID NO: 2300103 - RNA, 19 nt, Homo sapiens
  misc_RNA (1)...(19): siRNA sense strand
ccgaagaagagguggagga

SEQ ID NO: 2300104 - RNA, 19 nt, Homo sapiens
  misc_RNA (1)...(19): siRNA sense strand
gcaaaagguuuccgggaca

SEQ ID NO: 2300105 - RNA, 19 nt, Homo sapiens
  misc_RNA (1)...(19): siRNA sense strand
ggacauuauagcugcugau

SEQ ID NO: 2300106 - RNA, 19 nt, Homo sapiens
  misc_RNA (1)...(19): siRNA sense strand
ggguguuugaugaaagaca

SEQ ID NO: 2300107 - RNA, 19 nt, Homo sapiens
  misc_RNA (1)...(19): siRNA sense strand
acugcauaccagaaugaua

SEQ ID NO: 2300108 - RNA, 19 nt, Homo sapiens
  misc_RNA (1)...(19): siRNA sense strand
cugcaguccaugagggugu

SEQ ID NO: 2300109 - RNA, 19 nt, Homo sapiens
  misc_RNA (1)...(19): siRNA sense strand
gcucgauggaggagggagu

SEQ ID NO: 2300110 - RNA, 19 nt, Homo sapiens
  misc_RNA (1)...(19): siRNA sense strand
gggccauggugaugcgcau

SEQ ID NO: 2300111 - RNA, 19 nt, Homo sapiens
  misc_RNA (1)...(19): siRNA sense strand
ccgugaugaccguggcuau

SEQ ID NO: 2300112 - RNA, 19 nt, Homo sapiens
  misc_RNA (1)...(19): siRNA sense strand
cugccaaccacuugagcuu

SEQ ID NO: 2300113 - RNA, 19 nt, Homo sapiens
  misc_RNA (1)...(19): siRNA sense strand
gcucgauggaggagggagu

SEQ ID NO: 2300114 - RNA, 19 nt, Homo sapiens
  misc_RNA (1)...(19): siRNA sense strand
gggccauggugaugcgcau

SEQ ID NO: 2300115 - RNA, 19 nt, Homo sapiens
  misc_RNA (1)...(19): siRNA sense strand
ccgugaugaccguggcuau

SEQ ID NO: 2300116 - RNA, 19 nt, Homo sapiens
  misc_RNA (1)...(19): siRNA sense strand
cugccaaccacuugagcuu

SEQ ID NO: 2300117 - RNA, 19 nt, Homo sapiens
  misc_RNA (1)...(19): siRNA sense strand
cauaauaguuggaaccaga

SEQ ID NO: 2300118 - RNA, 19 nt, Homo sapiens
  misc_RNA (1)...(19): siRNA sense strand
cauagaaacgacuuggaaa

SEQ ID NO: 2300119 - RNA, 19 nt, Homo sapiens
  misc_RNA (1)...(19): siRNA sense strand
auagaaacgacuuggaaau

SEQ ID NO: 2300120 - RNA, 19 nt, Homo sapiens
  misc_RNA (1)...(19): siRNA sense strand
ucucauaaucaguugcaaa

SEQ ID NO: 2300121 - RNA, 19 nt, Homo sapiens
  misc_RNA (1)...(19): siRNA sense strand
uggcaagagcauuguggaa

SEQ ID NO: 2300122 - RNA, 19 nt, Homo sapiens
  misc_RNA (1)...(19): siRNA sense strand
ggucucaugacgaaggaua

SEQ ID NO: 2300123 - RNA, 19 nt, Homo sapiens
  misc_RNA (1)...(19): siRNA sense strand
cuaucagaguugacaguuu

SEQ ID NO: 2300124 - RNA, 19 nt, Homo sapiens
  misc_RNA (1)...(19): siRNA sense strand
ugccagaagaugaggucaa

SEQ ID NO: 2300125 - RNA, 19 nt, Homo sapiens
  misc_RNA (1)...(19): siRNA sense strand
ccaacuaguuuauucgcua

SEQ ID NO: 2300126 - RNA, 19 nt, Homo sapiens
  misc_RNA (1)...(19): siRNA sense strand
gagaagaguuacaagucca

SEQ ID NO: 2300127 - RNA, 19 nt, Homo sapiens
  misc_RNA (1)...(19): siRNA sense strand
caauaaaagcaggggacaa

SEQ ID NO: 2300128 - RNA, 19 nt, Homo sapiens
  misc_RNA (1)...(19): siRNA sense strand
aagcauucgugaagaagau

SEQ ID NO: 2300129 - RNA, 19 nt, Homo sapiens
  misc_RNA (1)...(19): siRNA sense strand
guuaaauuggagacacuua

SEQ ID NO: 2300130 - RNA, 19 nt, Homo sapiens
  misc_RNA (1)...(19): siRNA sense strand
uagauaugucucagaacua

SEQ ID NO: 2300131 - RNA, 19 nt, Homo sapiens
  misc_RNA (1)...(19): siRNA sense strand
uaguuaaauuggagacacu

SEQ ID NO: 2300132 - RNA, 19 nt, Homo sapiens
  misc_RNA (1)...(19): siRNA sense strand
gugaaguguuagagggcug

SEQ ID NO: 2300133 - RNA, 19 nt, Homo sapiens
  misc_RNA (1)...(19): siRNA sense strand
uugcaguagacaagucaaa

SEQ ID NO: 2300134 - RNA, 19 nt, Homo sapiens
  misc_RNA (1)...(19): siRNA sense strand
caacugaauuucuugggau

SEQ ID NO: 2300135 - RNA, 19 nt, Homo sapiens
  misc_RNA (1)...(19): siRNA sense strand
ggugcuuacaacugacuaa

SEQ ID NO: 2300136 - RNA, 19 nt, Homo sapiens
  misc_RNA (1)...(19): siRNA sense strand
augaauuugcaguagacaa

SEQ ID NO: 2300137 - RNA, 19 nt, Homo sapiens
  misc_RNA (1)...(19): siRNA sense strand
agaccaaguaucaagugaa

SEQ ID NO: 2300138 - RNA, 19 nt, Homo sapiens
  misc_RNA (1)...(19): siRNA sense strand
acaaguaccacaagcugaa

SEQ ID NO: 2300139 - RNA, 19 nt, Homo sapiens
  misc_RNA (1)...(19): siRNA sense strand
aacugaauuucuugggauu

SEQ ID NO: 2300140 - RNA, 19 nt, Homo sapiens
  misc_RNA (1)...(19): siRNA sense strand
aauuagauuugcugccaau

SEQ ID NO: 2300141 - RNA, 19 nt, Homo sapiens
  misc_RNA (1)...(19): siRNA sense strand
ccauaacagaauccagcua

SEQ ID NO: 2300142 - RNA, 19 nt, Homo sapiens
  misc_RNA (1)...(19): siRNA sense strand
cugugagcuaagagaauuu

SEQ ID NO: 2300143 - RNA, 19 nt, Homo sapiens
  misc_RNA (1)...(19): siRNA sense strand
gaccaaagacaaagaaccu

SEQ ID NO: 2300144 - RNA, 19 nt, Homo sapiens
  misc_RNA (1)...(19): siRNA sense strand
ggaacuuugucccuggcaa

SEQ ID NO: 2300145 - RNA, 19 nt, Homo sapiens
  misc_RNA (1)...(19): siRNA sense strand
aguuaauacuuuagggugc

SEQ ID NO: 2300146 - RNA, 19 nt, Homo sapiens
  misc_RNA (1)...(19): siRNA sense strand
uggaaauacuggauguuag

SEQ ID NO: 2300147 - RNA, 19 nt, Homo sapiens
  misc_RNA (1)...(19): siRNA sense strand
acugcauugagaagaguua

SEQ ID NO: 2300148 - RNA, 19 nt, Homo sapiens
  misc_RNA (1)...(19): siRNA sense strand
ccucaugcaccaagcacau

SEQ ID NO: 2300149 - RNA, 19 nt, Homo sapiens
  misc_RNA (1)...(19): siRNA sense strand
ucuguaaggaauuuggcaa

SEQ ID NO: 2300150 - RNA, 19 nt, Homo sapiens
  misc_RNA (1)...(19): siRNA sense strand
agaagaugaggucaauaaa

SEQ ID NO: 2300151 - RNA, 19 nt, Homo sapiens
  misc_RNA (1)...(19): siRNA sense strand
gaucauaauaguuggaacc

SEQ ID NO: 2300152 - RNA, 19 nt, Homo sapiens
  misc_RNA (1)...(19): siRNA sense strand
cuugaaagucagaggguca

SEQ ID NO: 2300153 - RNA, 19 nt, Homo sapiens
  misc_RNA (1)...(19): siRNA sense strand
agccauuacuacaggacua

SEQ ID NO: 2300154 - RNA, 19 nt, Homo sapiens
  misc_RNA (1)...(19): siRNA sense strand
cgacugaagacaaugggaa

SEQ ID NO: 2300155 - RNA, 19 nt, Homo sapiens
  misc_RNA (1)...(19): siRNA sense strand
guugaaaguaaaaggacaa

SEQ ID NO: 2300156 - RNA, 19 nt, Homo sapiens
  misc_RNA (1)...(19): siRNA sense strand
auaugagagacuugugaaa

SEQ ID NO: 2300157 - RNA, 19 nt, Homo sapiens
  misc_RNA (1)...(19): siRNA sense strand
agacaaugggaaagaaaau

SEQ ID NO: 2300158 - RNA, 19 nt, Homo sapiens
  misc_RNA (1)...(19): siRNA sense strand
caacaaagaaggaucagga

SEQ ID NO: 2300159 - RNA, 19 nt, Homo sapiens
  misc_RNA (1)...(19): siRNA sense strand
aggaauauguggaagcugu

SEQ ID NO: 2300160 - RNA, 19 nt, Homo sapiens
  misc_RNA (1)...(19): siRNA sense strand
cuggagaauugaugcggau

SEQ ID NO: 2300161 - RNA, 19 nt, Homo sapiens
  misc_RNA (1)...(19): siRNA sense strand
augagagacuugugaaacu

SEQ ID NO: 2300162 - RNA, 19 nt, Homo sapiens
  misc_RNA (1)...(19): siRNA sense strand
augacaaauaugagagacu

SEQ ID NO: 2300163 - RNA, 19 nt, Homo sapiens
  misc_RNA (1)...(19): siRNA sense strand
gcaguuugguacuuggaga

SEQ ID NO: 2300164 - RNA, 19 nt, Homo sapiens
  misc_RNA (1)...(19): siRNA sense strand
ugugaaacuuagucgggau

SEQ ID NO: 2300165 - RNA, 19 nt, Homo sapiens
  misc_RNA (1)...(19): siRNA sense strand
ucgauuaccuucugggagu

SEQ ID NO: 2300166 - RNA, 19 nt, Homo sapiens
  misc_RNA (1)...(19): siRNA sense strand
cugaagacaaugggaaaga

SEQ ID NO: 2300167 - RNA, 19 nt, Homo sapiens
  misc_RNA (1)...(19): siRNA sense strand
guauuaacaguguggggaa

SEQ ID NO: 2300168 - RNA, 19 nt, Homo sapiens
  misc_RNA (1)...(19): siRNA sense strand
agaaggaucaggaggguuc

SEQ ID NO: 2300169 - RNA, 19 nt, Homo sapiens
  misc_RNA (1)...(19): siRNA sense strand
auuuacgacugaagacaau

SEQ ID NO: 2300170 - RNA, 19 nt, Homo sapiens
  misc_RNA (1)...(19): siRNA sense strand
uagaucaagaagagggcau

SEQ ID NO: 2300171 - RNA, 19 nt, Homo sapiens
  misc_RNA (1)...(19): siRNA sense strand
ggauaagcaguuugguacu

SEQ ID NO: 2300172 - RNA, 19 nt, Homo sapiens
  misc_RNA (1)...(19): siRNA sense strand
uggccaaaguggagaaugc

SEQ ID NO: 2300173 - RNA, 19 nt, Homo sapiens
  misc_RNA (1)...(19): siRNA sense strand
uguugaaaguaaaaggaca

SEQ ID NO: 2300174 - RNA, 19 nt, Homo sapiens
  misc_RNA (1)...(19): siRNA sense strand
aggcaugacaaauaugaga

SEQ ID NO: 2300175 - RNA, 19 nt, Homo sapiens
  misc_RNA (1)...(19): siRNA sense strand
gcacaggacuucagggcuu

SEQ ID NO: 2300176 - RNA, 19 nt, Homo sapiens
  misc_RNA (1)...(19): siRNA sense strand
ggaaagaggaugcugccaa

SEQ ID NO: 2300177 - RNA, 19 nt, Homo sapiens
  misc_RNA (1)...(19): siRNA sense strand
guggagauguggugcccaa

SEQ ID NO: 2300178 - RNA, 19 nt, Homo sapiens
  misc_RNA (1)...(19): siRNA sense strand
gugccuucaugguggacaa

SEQ ID NO: 2300179 - RNA, 19 nt, Homo sapiens
  misc_RNA (1)...(19): siRNA sense strand
gguaugugggugagggcau

SEQ ID NO: 2300180 - RNA, 19 nt, Homo sapiens
  misc_RNA (1)...(19): siRNA sense strand
gcagcucaucacugggaaa

SEQ ID NO: 2300181 - RNA, 19 nt, Homo sapiens
  misc_RNA (1)...(19): siRNA sense strand
auuaugaggaggugggcau

SEQ ID NO: 2300182 - RNA, 19 nt, Homo sapiens
  misc_RNA (1)...(19): siRNA sense strand
cugugaaacuggugcugga

SEQ ID NO: 2300183 - RNA, 19 nt, Homo sapiens
  misc_RNA (1)...(19): siRNA sense strand
agggcauggaggaggguga

SEQ ID NO: 2300184 - RNA, 19 nt, Homo sapiens
  misc_RNA (1)...(19): siRNA sense strand
ccuucaugguggacaacga

SEQ ID NO: 2300185 - RNA, 19 nt, Homo sapiens
  misc_RNA (1)...(19): siRNA sense strand
cugaagaaggugaagaaua

SEQ ID NO: 2300186 - RNA, 19 nt, Homo sapiens
  misc_RNA (1)...(19): siRNA sense strand
ggaaggaagaugcggccaa

SEQ ID NO: 2300187 - RNA, 19 nt, Homo sapiens
  misc_RNA (1)...(19): siRNA sense strand
ugaagaaggugaagaauac

SEQ ID NO: 2300188 - RNA, 19 nt, Homo sapiens
  misc_RNA (1)...(19): siRNA sense strand
ggcugaagaaggugaagaa

SEQ ID NO: 2300189 - RNA, 19 nt, Homo sapiens
  misc_RNA (1)...(19): siRNA sense strand
agaccaaccuagugccgua

SEQ ID NO: 2300190 - RNA, 19 nt, Homo sapiens
  misc_RNA (1)...(19): siRNA sense strand
gagcaguguuuguggaccu

SEQ ID NO: 2300191 - RNA, 19 nt, Homo sapiens
  misc_RNA (1)...(19): siRNA sense strand
cagccaaucagauggucaa

SEQ ID NO: 2300192 - RNA, 19 nt, Homo sapiens
  misc_RNA (1)...(19): siRNA sense strand
ucucaguggauuacggcaa

SEQ ID NO: 2300193 - RNA, 19 nt, Homo sapiens
  misc_RNA (1)...(19): siRNA sense strand
agcuagaauuugccauuua

SEQ ID NO: 2300194 - RNA, 19 nt, Homo sapiens
  misc_RNA (1)...(19): siRNA sense strand
gaauucagcccgaugguca

SEQ ID NO: 2300195 - RNA, 19 nt, Homo sapiens
  misc_RNA (1)...(19): siRNA sense strand
gcacaggaaccuauaggca

SEQ ID NO: 2300196 - RNA, 19 nt, Homo sapiens
  misc_RNA (1)...(19): siRNA sense strand
ccgagaaggccuaccacga

SEQ ID NO: 2300197 - RNA, 19 nt, Homo sapiens
  misc_RNA (1)...(19): siRNA sense strand
gugccuucauggucgacaa

SEQ ID NO: 2300198 - RNA, 19 nt, Homo sapiens
  misc_RNA (1)...(19): siRNA sense strand
cugaagaaggugaagaaua

SEQ ID NO: 2300199 - RNA, 19 nt, Homo sapiens
  misc_RNA (1)...(19): siRNA sense strand
ggaaggaagaugcggccaa

SEQ ID NO: 2300200 - RNA, 19 nt, Homo sapiens
  misc_RNA (1)...(19): siRNA sense strand
ugaagaaggugaagaauac

SEQ ID NO: 2300201 - RNA, 19 nt, Homo sapiens
  misc_RNA (1)...(19): siRNA sense strand
ggcugaagaaggugaagaa

SEQ ID NO: 2300202 - RNA, 19 nt, Homo sapiens
  misc_RNA (1)...(19): siRNA sense strand
agaccaaccuagugccgua

SEQ ID NO: 2300203 - RNA, 19 nt, Homo sapiens
  misc_RNA (1)...(19): siRNA sense strand
gagcaguguuuguggaccu

SEQ ID NO: 2300204 - RNA, 19 nt, Homo sapiens
  misc_RNA (1)...(19): siRNA sense strand
cagccaaucagauggucaa

SEQ ID NO: 2300205 - RNA, 19 nt, Homo sapiens
  misc_RNA (1)...(19): siRNA sense strand
ucucaguggauuacggcaa

SEQ ID NO: 2300206 - RNA, 19 nt, Homo sapiens
  misc_RNA (1)...(19): siRNA sense strand
agcuagaauuugccauuua

SEQ ID NO: 2300207 - RNA, 19 nt, Homo sapiens
  misc_RNA (1)...(19): siRNA sense strand
gaauucagcccgaugguca

SEQ ID NO: 2300208 - RNA, 19 nt, Homo sapiens
  misc_RNA (1)...(19): siRNA sense strand
gcacaggaaccuauaggca

SEQ ID NO: 2300209 - RNA, 19 nt, Homo sapiens
  misc_RNA (1)...(19): siRNA sense strand
ccgagaaggccuaccacga

SEQ ID NO: 2300210 - RNA, 19 nt, Homo sapiens
  misc_RNA (1)...(19): siRNA sense strand
gugccuucauggucgacaa

SEQ ID NO: 2300211 - RNA, 19 nt, Homo sapiens
  misc_RNA (1)...(19): siRNA sense strand
ucaagaaguucgaccgcua

SEQ ID NO: 2300212 - RNA, 19 nt, Homo sapiens
  misc_RNA (1)...(19): siRNA sense strand
ggaaccaccuggagcccua

SEQ ID NO: 2300213 - RNA, 19 nt, Homo sapiens
  misc_RNA (1)...(19): siRNA sense strand
gccuuaagcugcuggccaa

SEQ ID NO: 2300214 - RNA, 19 nt, Homo sapiens
  misc_RNA (1)...(19): siRNA sense strand
gcgccuggaaggagaccaa

SEQ ID NO: 2300215 - RNA, 19 nt, Homo sapiens
  misc_RNA (1)...(19): siRNA sense strand
cauaccaggagccgggaaa

SEQ ID NO: 2300216 - RNA, 19 nt, Homo sapiens
  misc_RNA (1)...(19): siRNA sense strand
gggaaagagcagacggcac

SEQ ID NO: 2300217 - RNA, 19 nt, Homo sapiens
  misc_RNA (1)...(19): siRNA sense strand
acgcggagcuccaugguca

SEQ ID NO: 2300218 - RNA, 19 nt, Homo sapiens
  misc_RNA (1)...(19): siRNA sense strand
gcuccauggucaagcucau

SEQ ID NO: 2300219 - RNA, 19 nt, Homo sapiens
  misc_RNA (1)...(19): siRNA sense strand
ucacuaagaaguacgccaa

SEQ ID NO: 2300220 - RNA, 19 nt, Homo sapiens
  misc_RNA (1)...(19): siRNA sense strand
ggaagagcccugaggaccu

SEQ ID NO: 2300221 - RNA, 19 nt, Homo sapiens
  misc_RNA (1)...(19): siRNA sense strand
gcaucacguccgagaacga

SEQ ID NO: 2300222 - RNA, 19 nt, Homo sapiens
  misc_RNA (1)...(19): siRNA sense strand
agaagaagcagguggccgu

SEQ ID NO: 2300223 - RNA, 19 nt, Homo sapiens
  misc_RNA (1)...(19): siRNA sense strand
ucuucgagcucaaggccau

SEQ ID NO: 2300224 - RNA, 19 nt, Homo sapiens
  misc_RNA (1)...(19): siRNA sense strand
gaaugaacauagaaggaga

SEQ ID NO: 2300225 - RNA, 19 nt, Homo sapiens
  misc_RNA (1)...(19): siRNA sense strand
gaacauagaaggagaggag

SEQ ID NO: 2300226 - RNA, 19 nt, Homo sapiens
  misc_RNA (1)...(19): siRNA sense strand
ggagaggagcugaugccaa

SEQ ID NO: 2300227 - RNA, 19 nt, Homo sapiens
  misc_RNA (1)...(19): siRNA sense strand
cagccaugaaccagagaau

SEQ ID NO: 2300228 - RNA, 19 nt, Homo sapiens
  misc_RNA (1)...(19): siRNA sense strand
ggagcaggauggugggacu

SEQ ID NO: 2300229 - RNA, 19 nt, Homo sapiens
  misc_RNA (1)...(19): siRNA sense strand
ggacuaagcaugagcagcu

SEQ ID NO: 2300230 - RNA, 19 nt, Homo sapiens
  misc_RNA (1)...(19): siRNA sense strand
cugcagauggagaaggaga

SEQ ID NO: 2300231 - RNA, 19 nt, Homo sapiens
  misc_RNA (1)...(19): siRNA sense strand
uggaaugaacauagaagga

SEQ ID NO: 2300232 - RNA, 19 nt, Homo sapiens
  misc_RNA (1)...(19): siRNA sense strand
cagcagaauaugaugaacu

SEQ ID NO: 2300233 - RNA, 19 nt, Homo sapiens
  misc_RNA (1)...(19): siRNA sense strand
cagguugggagauggcaaa

SEQ ID NO: 2300234 - RNA, 19 nt, Homo sapiens
  misc_RNA (1)...(19): siRNA sense strand
ccagagaaucagucagagu

SEQ ID NO: 2300235 - RNA, 19 nt, Homo sapiens
  misc_RNA (1)...(19): siRNA sense strand
ccgggaugucucaggaauu

SEQ ID NO: 2300236 - RNA, 19 nt, Homo sapiens
  misc_RNA (1)...(19): siRNA sense strand
cagacuaccuugaagccau

SEQ ID NO: 2300237 - RNA, 19 nt, Homo sapiens
  misc_RNA (1)...(19): siRNA sense strand
gcagguugggagauggcaa

SEQ ID NO: 2300238 - RNA, 19 nt, Homo sapiens
  misc_RNA (1)...(19): siRNA sense strand
cugcguagccaguuaccaa

SEQ ID NO: 2300239 - RNA, 19 nt, Homo sapiens
  misc_RNA (1)...(19): siRNA sense strand
cagcaacugcagauggaga

SEQ ID NO: 2300240 - RNA, 19 nt, Homo sapiens
  misc_RNA (1)...(19): siRNA sense strand
agaugagaguacagacagu

SEQ ID NO: 2300241 - RNA, 19 nt, Homo sapiens
  misc_RNA (1)...(19): siRNA sense strand
uuggaacacuggaaggaga

SEQ ID NO: 2300242 - RNA, 19 nt, Homo sapiens
  misc_RNA (1)...(19): siRNA sense strand
acauagaaggagaggagcu

SEQ ID NO: 2300243 - RNA, 19 nt, Homo sapiens
  misc_RNA (1)...(19): siRNA sense strand
aaauguggaccuuggaaca

SEQ ID NO: 2300244 - RNA, 19 nt, Homo sapiens
  misc_RNA (1)...(19): siRNA sense strand
aaggagaggcugcggcuga

SEQ ID NO: 2300245 - RNA, 19 nt, Homo sapiens
  misc_RNA (1)...(19): siRNA sense strand
ggaccuuggaacacuggaa

SEQ ID NO: 2300246 - RNA, 19 nt, Homo sapiens
  misc_RNA (1)...(19): siRNA sense strand
aggacgaguuugagcacaa

SEQ ID NO: 2300247 - RNA, 19 nt, Homo sapiens
  misc_RNA (1)...(19): siRNA sense strand
aggaggagaucgagcgcau

SEQ ID NO: 2300248 - RNA, 19 nt, Homo sapiens
  misc_RNA (1)...(19): siRNA sense strand
aguuugagcacaagaggaa

SEQ ID NO: 2300249 - RNA, 19 nt, Homo sapiens
  misc_RNA (1)...(19): siRNA sense strand
aguacaaagcggaggacga

SEQ ID NO: 2300250 - RNA, 19 nt, Homo sapiens
  misc_RNA (1)...(19): siRNA sense strand
ggaaggagcuggagcaggu

SEQ ID NO: 2300251 - RNA, 19 nt, Homo sapiens
  misc_RNA (1)...(19): siRNA sense strand
acggcaagguggagaucau

SEQ ID NO: 2300252 - RNA, 19 nt, Homo sapiens
  misc_RNA (1)...(19): siRNA sense strand
gggccaugacgaaagacaa

SEQ ID NO: 2300253 - RNA, 19 nt, Homo sapiens
  misc_RNA (1)...(19): siRNA sense strand
ucgccaacgaccagggcaa

SEQ ID NO: 2300254 - RNA, 19 nt, Homo sapiens
  misc_RNA (1)...(19): siRNA sense strand
gagacaagcccaaggugca

SEQ ID NO: 2300255 - RNA, 19 nt, Homo sapiens
  misc_RNA (1)...(19): siRNA sense strand
uggacaaggcccagauuca

SEQ ID NO: 2300256 - RNA, 19 nt, Homo sapiens
  misc_RNA (1)...(19): siRNA sense strand
gcgagagggugucagccaa

SEQ ID NO: 2300257 - RNA, 19 nt, Homo sapiens
  misc_RNA (1)...(19): siRNA sense strand
ccgagaacgugcaggaccu

SEQ ID NO: 2300258 - RNA, 19 nt, Homo sapiens
  misc_RNA (1)...(19): siRNA sense strand
agcuggagcagguguguaa

SEQ ID NO: 2300259 - RNA, 19 nt, Homo sapiens
  misc_RNA (1)...(19): siRNA sense strand
agagaaaacacaagaagga

SEQ ID NO: 2300260 - RNA, 19 nt, Homo sapiens
  misc_RNA (1)...(19): siRNA sense strand
aagaagaaggugcuggaca

SEQ ID NO: 2300261 - RNA, 19 nt, Homo sapiens
  misc_RNA (1)...(19): siRNA sense strand
ugagcaaggaggagaucga

SEQ ID NO: 2300262 - RNA, 19 nt, Homo sapiens
  misc_RNA (1)...(19): siRNA sense strand
uggagaaggcucugcgcga

SEQ ID NO: 2300263 - RNA, 19 nt, Homo sapiens
  misc_RNA (1)...(19): siRNA sense strand
ccaugacgaaagacaacaa

SEQ ID NO: 2300264 - RNA, 19 nt, Homo sapiens
  misc_RNA (1)...(19): siRNA sense strand
cggacaagagcaccggcaa

SEQ ID NO: 2300265 - RNA, 19 nt, Homo sapiens
  misc_RNA (1)...(19): siRNA sense strand
caagggagggucuggguca

SEQ ID NO: 2300266 - RNA, 19 nt, Homo sapiens
  misc_RNA (1)...(19): siRNA sense strand
agguggagaucaucgccaa

SEQ ID NO: 2300267 - RNA, 19 nt, Homo sapiens
  misc_RNA (1)...(19): siRNA sense strand
agaaaacacaagaaggaca

SEQ ID NO: 2300268 - RNA, 19 nt, Homo sapiens
  misc_RNA (1)...(19): siRNA sense strand
ggacaagagcaccggcaag

SEQ ID NO: 2300269 - RNA, 19 nt, Homo sapiens
  misc_RNA (1)...(19): siRNA sense strand
acaagaaggacaucagcca

SEQ ID NO: 2300270 - RNA, 19 nt, Homo sapiens
  misc_RNA (1)...(19): siRNA sense strand
aagaaggacaucagccaga

SEQ ID NO: 2300271 - RNA, 19 nt, Homo sapiens
  misc_RNA (1)...(19): siRNA sense strand
aggacaucagccagaacaa

SEQ ID NO: 2300272 - RNA, 19 nt, Homo sapiens
  misc_RNA (1)...(19): siRNA sense strand
cuggcagauuggcaagaua

SEQ ID NO: 2300273 - RNA, 19 nt, Homo sapiens
  misc_RNA (1)...(19): siRNA sense strand
cagaagagcugaaggcaga

SEQ ID NO: 2300274 - RNA, 19 nt, Homo sapiens
  misc_RNA (1)...(19): siRNA sense strand
ccagcuggguagugcggua

SEQ ID NO: 2300275 - RNA, 19 nt, Homo sapiens
  misc_RNA (1)...(19): siRNA sense strand
ccaaagcagaagagcugaa

SEQ ID NO: 2300276 - RNA, 19 nt, Homo sapiens
  misc_RNA (1)...(19): siRNA sense strand
uggaauucucuguggaaaa

SEQ ID NO: 2300277 - RNA, 19 nt, Homo sapiens
  misc_RNA (1)...(19): siRNA sense strand
ugucauuccugaaaagaaa

SEQ ID NO: 2300278 - RNA, 19 nt, Homo sapiens
  misc_RNA (1)...(19): siRNA sense strand
gaagguagacccuggccua

SEQ ID NO: 2300279 - RNA, 19 nt, Homo sapiens
  misc_RNA (1)...(19): siRNA sense strand
ccuucauccucuauaacaa

SEQ ID NO: 2300280 - RNA, 19 nt, Homo sapiens
  misc_RNA (1)...(19): siRNA sense strand
ucacacaacuguaaggcca

SEQ ID NO: 2300281 - RNA, 19 nt, Homo sapiens
  misc_RNA (1)...(19): siRNA sense strand
aguggagacauguggaauu

SEQ ID NO: 2300282 - RNA, 19 nt, Homo sapiens
  misc_RNA (1)...(19): siRNA sense strand
gugcgguagaggugaauga

SEQ ID NO: 2300283 - RNA, 19 nt, Homo sapiens
  misc_RNA (1)...(19): siRNA sense strand
gggucugauuacugcaaca

SEQ ID NO: 2300284 - RNA, 19 nt, Homo sapiens
  misc_RNA (1)...(19): siRNA sense strand
agcaauuggaacaggaaca

SEQ ID NO: 2300285 - RNA, 19 nt, Homo sapiens
  misc_RNA (1)...(19): siRNA sense strand
gagauuauccgaauggcau

SEQ ID NO: 2300286 - RNA, 19 nt, Homo sapiens
  misc_RNA (1)...(19): siRNA sense strand
cagagaacgaagaagaacu

SEQ ID NO: 2300287 - RNA, 19 nt, Homo sapiens
  misc_RNA (1)...(19): siRNA sense strand
ugaaaauuguacaggaguu

SEQ ID NO: 2300288 - RNA, 19 nt, Homo sapiens
  misc_RNA (1)...(19): siRNA sense strand
acuaacugaccauggacua

SEQ ID NO: 2300289 - RNA, 19 nt, Homo sapiens
  misc_RNA (1)...(19): siRNA sense strand
gaagaaaagaagaaggaag

SEQ ID NO: 2300290 - RNA, 19 nt, Homo sapiens
  misc_RNA (1)...(19): siRNA sense strand
ggaaccaggagcuagaaaa

SEQ ID NO: 2300291 - RNA, 19 nt, Homo sapiens
  misc_RNA (1)...(19): siRNA sense strand
acugaugaggaaugaauuu

SEQ ID NO: 2300292 - RNA, 19 nt, Homo sapiens
  misc_RNA (1)...(19): siRNA sense strand
ccgcucuggaguugagauu

SEQ ID NO: 2300293 - RNA, 19 nt, Homo sapiens
  misc_RNA (1)...(19): siRNA sense strand
cuaccaaaacaucgagauu

SEQ ID NO: 2300294 - RNA, 19 nt, Homo sapiens
  misc_RNA (1)...(19): siRNA sense strand
agaagaaggaagcagagga

SEQ ID NO: 2300295 - RNA, 19 nt, Homo sapiens
  misc_RNA (1)...(19): siRNA sense strand
ggguagcacaacagaagca

SEQ ID NO: 2300296 - RNA, 19 nt, Homo sapiens
  misc_RNA (1)...(19): siRNA sense strand
ucgaggagaugauccggaa

SEQ ID NO: 2300297 - RNA, 19 nt, Homo sapiens
  misc_RNA (1)...(19): siRNA sense strand
cuuuaaacuaacugaccau

SEQ ID NO: 2300298 - RNA, 19 nt, Homo sapiens
  misc_RNA (1)...(19): siRNA sense strand
cagaagagcugaaggcaga

SEQ ID NO: 2300299 - RNA, 19 nt, Homo sapiens
  misc_RNA (1)...(19): siRNA sense strand
ccagcuggguagugcggua

SEQ ID NO: 2300300 - RNA, 19 nt, Homo sapiens
  misc_RNA (1)...(19): siRNA sense strand
ccaaagcagaagagcugaa

SEQ ID NO: 2300301 - RNA, 19 nt, Homo sapiens
  misc_RNA (1)...(19): siRNA sense strand
uggaauucucuguggaaaa

SEQ ID NO: 2300302 - RNA, 19 nt, Homo sapiens
  misc_RNA (1)...(19): siRNA sense strand
ugucauuccugaaaagaaa

SEQ ID NO: 2300303 - RNA, 19 nt, Homo sapiens
  misc_RNA (1)...(19): siRNA sense strand
gaagguagacccuggccua

SEQ ID NO: 2300304 - RNA, 19 nt, Homo sapiens
  misc_RNA (1)...(19): siRNA sense strand
ccuucauccucuauaacaa

SEQ ID NO: 2300305 - RNA, 19 nt, Homo sapiens
  misc_RNA (1)...(19): siRNA sense strand
ucacacaacuguaaggcca

SEQ ID NO: 2300306 - RNA, 19 nt, Homo sapiens
  misc_RNA (1)...(19): siRNA sense strand
aguggagacauguggaauu

SEQ ID NO: 2300307 - RNA, 19 nt, Homo sapiens
  misc_RNA (1)...(19): siRNA sense strand
gugcgguagaggugaauga

SEQ ID NO: 2300308 - RNA, 19 nt, Homo sapiens
  misc_RNA (1)...(19): siRNA sense strand
gggucugauuacugcaaca

SEQ ID NO: 2300309 - RNA, 19 nt, Homo sapiens
  misc_RNA (1)...(19): siRNA sense strand
agcaauuggaacaggaaca

SEQ ID NO: 2300310 - RNA, 19 nt, Homo sapiens
  misc_RNA (1)...(19): siRNA sense strand
gagauuauccgaauggcau

SEQ ID NO: 2300311 - RNA, 19 nt, Homo sapiens
  misc_RNA (1)...(19): siRNA sense strand
cagagaacgaagaagaacu

SEQ ID NO: 2300312 - RNA, 19 nt, Homo sapiens
  misc_RNA (1)...(19): siRNA sense strand
ugaaaauuguacaggaguu

SEQ ID NO: 2300313 - RNA, 19 nt, Homo sapiens
  misc_RNA (1)...(19): siRNA sense strand
acuaacugaccauggacua

SEQ ID NO: 2300314 - RNA, 19 nt, Homo sapiens
  misc_RNA (1)...(19): siRNA sense strand
gaagaaaagaagaaggaag

SEQ ID NO: 2300315 - RNA, 19 nt, Homo sapiens
  misc_RNA (1)...(19): siRNA sense strand
ggaaccaggagcuagaaaa

SEQ ID NO: 2300316 - RNA, 19 nt, Homo sapiens
  misc_RNA (1)...(19): siRNA sense strand
acugaugaggaaugaauuu

SEQ ID NO: 2300317 - RNA, 19 nt, Homo sapiens
  misc_RNA (1)...(19): siRNA sense strand
ccgcucuggaguugagauu

SEQ ID NO: 2300318 - RNA, 19 nt, Homo sapiens
  misc_RNA (1)...(19): siRNA sense strand
cuaccaaaacaucgagauu

SEQ ID NO: 2300319 - RNA, 19 nt, Homo sapiens
  misc_RNA (1)...(19): siRNA sense strand
agaagaaggaagcagagga

SEQ ID NO: 2300320 - RNA, 19 nt, Homo sapiens
  misc_RNA (1)...(19): siRNA sense strand
ggguagcacaacagaagca

SEQ ID NO: 2300321 - RNA, 19 nt, Homo sapiens
  misc_RNA (1)...(19): siRNA sense strand
ucgaggagaugauccggaa

SEQ ID NO: 2300322 - RNA, 19 nt, Homo sapiens
  misc_RNA (1)...(19): siRNA sense strand
cuuuaaacuaacugaccau

SEQ ID NO: 2300323 - RNA, 19 nt, Homo sapiens
  misc_RNA (1)...(19): siRNA sense strand
guguauaccuagaggacuc

SEQ ID NO: 2300324 - RNA, 19 nt, Homo sapiens
  misc_RNA (1)...(19): siRNA sense strand
ucgaagacaaggaggacuu

SEQ ID NO: 2300325 - RNA, 19 nt, Homo sapiens
  misc_RNA (1)...(19): siRNA sense strand
caucagaucucaaaggacu

SEQ ID NO: 2300326 - RNA, 19 nt, Homo sapiens
  misc_RNA (1)...(19): siRNA sense strand
cagcugugaucgauggaga

SEQ ID NO: 2300327 - RNA, 19 nt, Homo sapiens
  misc_RNA (1)...(19): siRNA sense strand
uggaaaccugguagugaaa

SEQ ID NO: 2300328 - RNA, 19 nt, Homo sapiens
  misc_RNA (1)...(19): siRNA sense strand
aacugauuaucgugggaaa

SEQ ID NO: 2300329 - RNA, 19 nt, Homo sapiens
  misc_RNA (1)...(19): siRNA sense strand
ucucaaaggacuauggugu

SEQ ID NO: 2300330 - RNA, 19 nt, Homo sapiens
  misc_RNA (1)...(19): siRNA sense strand
gcaccuaagcaaagcgaag

SEQ ID NO: 2300331 - RNA, 19 nt, Homo sapiens
  misc_RNA (1)...(19): siRNA sense strand
cuucuacgcggguggacaa

SEQ ID NO: 2300332 - RNA, 19 nt, Homo sapiens
  misc_RNA (1)...(19): siRNA sense strand
gcugaaguuaacugauuau

SEQ ID NO: 2300333 - RNA, 19 nt, Homo sapiens
  misc_RNA (1)...(19): siRNA sense strand
uggcgacagacuugaagaa

SEQ ID NO: 2300334 - RNA, 19 nt, Homo sapiens
  misc_RNA (1)...(19): siRNA sense strand
agcugaaguauuucgauaa

SEQ ID NO: 2300335 - RNA, 19 nt, Homo sapiens
  misc_RNA (1)...(19): siRNA sense strand
acucaaaguccaagaggaa

SEQ ID NO: 2300336 - RNA, 19 nt, Homo sapiens
  misc_RNA (1)...(19): siRNA sense strand
uggaagaagcaaaggagaa

SEQ ID NO: 2300337 - RNA, 19 nt, Homo sapiens
  misc_RNA (1)...(19): siRNA sense strand
aggaguacaugguggacaa

SEQ ID NO: 2300338 - RNA, 19 nt, Homo sapiens
  misc_RNA (1)...(19): siRNA sense strand
gugcaaacaagcugaggaa

SEQ ID NO: 2300339 - RNA, 19 nt, Homo sapiens
  misc_RNA (1)...(19): siRNA sense strand
aagcaaaggagaaguucaa

SEQ ID NO: 2300340 - RNA, 19 nt, Homo sapiens
  misc_RNA (1)...(19): siRNA sense strand
cgagaagaagaaauggaaa

SEQ ID NO: 2300341 - RNA, 19 nt, Homo sapiens
  misc_RNA (1)...(19): siRNA sense strand
cagauaugccaguaguaaa

SEQ ID NO: 2300342 - RNA, 19 nt, Homo sapiens
  misc_RNA (1)...(19): siRNA sense strand
gggccacagcaaugaauaa

SEQ ID NO: 2300343 - RNA, 19 nt, Homo sapiens
  misc_RNA (1)...(19): siRNA sense strand
uguaugagugggaguguaa

SEQ ID NO: 2300344 - RNA, 19 nt, Homo sapiens
  misc_RNA (1)...(19): siRNA sense strand
agaagaaaugacagaaaca

SEQ ID NO: 2300345 - RNA, 19 nt, Homo sapiens
  misc_RNA (1)...(19): siRNA sense strand
gggaauugccggacaacca

SEQ ID NO: 2300346 - RNA, 19 nt, Homo sapiens
  misc_RNA (1)...(19): siRNA sense strand
cggaagaacaucagcgugu

SEQ ID NO: 2300347 - RNA, 19 nt, Homo sapiens
  misc_RNA (1)...(19): siRNA sense strand
gauaauaagaucugcacca

SEQ ID NO: 2300348 - RNA, 19 nt, Homo sapiens
  misc_RNA (1)...(19): siRNA sense strand
ucacaaaagcccagcggaa

SEQ ID NO: 2300349 - RNA, 19 nt, Homo sapiens
  misc_RNA (1)...(19): siRNA sense strand
ccucaaaccaggauagcga

SEQ ID NO: 2300350 - RNA, 19 nt, Homo sapiens
  misc_RNA (1)...(19): siRNA sense strand
aagauauggaagaagcaaa

SEQ ID NO: 2300351 - RNA, 19 nt, Homo sapiens
  misc_RNA (1)...(19): siRNA sense strand
aggcaaaguccacagagaa

SEQ ID NO: 2300352 - RNA, 19 nt, Homo sapiens
  misc_RNA (1)...(19): siRNA sense strand
augagaaagauauggaaga

SEQ ID NO: 2300353 - RNA, 19 nt, Homo sapiens
  misc_RNA (1)...(19): siRNA sense strand
ugaaaaugggacagagcaa

SEQ ID NO: 2300354 - RNA, 19 nt, Homo sapiens
  misc_RNA (1)...(19): siRNA sense strand
uggaaaugucugaugauga

SEQ ID NO: 2300355 - RNA, 19 nt, Homo sapiens
  misc_RNA (1)...(19): siRNA sense strand
acaaguuacagguggaaaa

SEQ ID NO: 2300356 - RNA, 19 nt, Homo sapiens
  misc_RNA (1)...(19): siRNA sense strand
caagaaggacacaggcaga

SEQ ID NO: 2300357 - RNA, 19 nt, Homo sapiens
  misc_RNA (1)...(19): siRNA sense strand
gcugggaauugccggacaa

SEQ ID NO: 2300358 - RNA, 19 nt, Homo sapiens
  misc_RNA (1)...(19): siRNA sense strand
caaaagaaacugaggaauc

SEQ ID NO: 2300359 - RNA, 19 nt, Homo sapiens
  misc_RNA (1)...(19): siRNA sense strand
cuggaaaagagauggaaau

SEQ ID NO: 2300360 - RNA, 19 nt, Homo sapiens
  misc_RNA (1)...(19): siRNA sense strand
uggaaugaugacuggaauu

SEQ ID NO: 2300361 - RNA, 19 nt, Homo sapiens
  misc_RNA (1)...(19): siRNA sense strand
guguaaacagcguaugcua

SEQ ID NO: 2300362 - RNA, 19 nt, Homo sapiens
  misc_RNA (1)...(19): siRNA sense strand
agaagaugacccuaacaaa

SEQ ID NO: 2300363 - RNA, 19 nt, Homo sapiens
  misc_RNA (1)...(19): siRNA sense strand
agauaugccaguaguaaaa

SEQ ID NO: 2300364 - RNA, 19 nt, Homo sapiens
  misc_RNA (1)...(19): siRNA sense strand
aaucaggcgagaagaagaa

SEQ ID NO: 2300365 - RNA, 19 nt, Homo sapiens
  misc_RNA (1)...(19): siRNA sense strand
gaaucaggcgagaagaaga

SEQ ID NO: 2300366 - RNA, 19 nt, Homo sapiens
  misc_RNA (1)...(19): siRNA sense strand
agagcaaaucauuguggaa

SEQ ID NO: 2300367 - RNA, 19 nt, Homo sapiens
  misc_RNA (1)...(19): siRNA sense strand
gaauaaucuuggaauggca

SEQ ID NO: 2300368 - RNA, 19 nt, Homo sapiens
  misc_RNA (1)...(19): siRNA sense strand
aaggcaaaguccacagaga

SEQ ID NO: 2300369 - RNA, 19 nt, Homo sapiens
  misc_RNA (1)...(19): siRNA sense strand
gaagaauggaagaagaaag

SEQ ID NO: 2300370 - RNA, 19 nt, Homo sapiens
  misc_RNA (1)...(19): siRNA sense strand
cgcaagagcaagaagaacu

SEQ ID NO: 2300371 - RNA, 19 nt, Homo sapiens
  misc_RNA (1)...(19): siRNA sense strand
gagaagaccaugaacagca

SEQ ID NO: 2300372 - RNA, 19 nt, Homo sapiens
  misc_RNA (1)...(19): siRNA sense strand
cuaucaaaucugaacguga

SEQ ID NO: 2300373 - RNA, 19 nt, Homo sapiens
  misc_RNA (1)...(19): siRNA sense strand
ccuuaguaucacaggcaga

SEQ ID NO: 2300374 - RNA, 19 nt, Homo sapiens
  misc_RNA (1)...(19): siRNA sense strand
aguccaagaggaauacaaa

SEQ ID NO: 2300375 - RNA, 19 nt, Homo sapiens
  misc_RNA (1)...(19): siRNA sense strand
cgagcaguguggagagauc

SEQ ID NO: 2300376 - RNA, 19 nt, Homo sapiens
  misc_RNA (1)...(19): siRNA sense strand
ccgccuggugaacgagaaa

SEQ ID NO: 2300377 - RNA, 19 nt, Homo sapiens
  misc_RNA (1)...(19): siRNA sense strand
gggaauaguaccuccacca

SEQ ID NO: 2300378 - RNA, 19 nt, Homo sapiens
  misc_RNA (1)...(19): siRNA sense strand
ucguagaagaauggaagaa

SEQ ID NO: 2300379 - RNA, 19 nt, Homo sapiens
  misc_RNA (1)...(19): siRNA sense strand
gcaucuacucaaaguccaa

SEQ ID NO: 2300380 - RNA, 19 nt, Homo sapiens
  misc_RNA (1)...(19): siRNA sense strand
agcaaaucauuguggaagu

SEQ ID NO: 2300381 - RNA, 19 nt, Homo sapiens
  misc_RNA (1)...(19): siRNA sense strand
gaagcaaaggagaaguuca

SEQ ID NO: 2300382 - RNA, 19 nt, Homo sapiens
  misc_RNA (1)...(19): siRNA sense strand
agauaguggcuguguacca

SEQ ID NO: 2300383 - RNA, 19 nt, Homo sapiens
  misc_RNA (1)...(19): siRNA sense strand
gaaagauauggaagaagca

SEQ ID NO: 2300384 - RNA, 19 nt, Homo sapiens
  misc_RNA (1)...(19): siRNA sense strand
gggaguguaaacagcguau

SEQ ID NO: 2300385 - RNA, 19 nt, Homo sapiens
  misc_RNA (1)...(19): siRNA sense strand
agcugaaacuccugcaaca

SEQ ID NO: 2300386 - RNA, 19 nt, Homo sapiens
  misc_RNA (1)...(19): siRNA sense strand
cuugagaagaccaugaaca

SEQ ID NO: 2300387 - RNA, 19 nt, Homo sapiens
  misc_RNA (1)...(19): siRNA sense strand
gcaggaaaugacuggaguu

SEQ ID NO: 2300388 - RNA, 19 nt, Homo sapiens
  misc_RNA (1)...(19): siRNA sense strand
ccuggaaaagagauggaaa

SEQ ID NO: 2300389 - RNA, 19 nt, Homo sapiens
  misc_RNA (1)...(19): siRNA sense strand
aguacugacaagaaggaca

SEQ ID NO: 2300390 - RNA, 19 nt, Homo sapiens
  misc_RNA (1)...(19): siRNA sense strand
ggaaugaaguagaacugcu

SEQ ID NO: 2300391 - RNA, 19 nt, Homo sapiens
  misc_RNA (1)...(19): siRNA sense strand
ccuccugcaacccgagaaa

SEQ ID NO: 2300392 - RNA, 19 nt, Homo sapiens
  misc_RNA (1)...(19): siRNA sense strand
acucaaaguccaagaggaa

SEQ ID NO: 2300393 - RNA, 19 nt, Homo sapiens
  misc_RNA (1)...(19): siRNA sense strand
uggaagaagcaaaggagaa

SEQ ID NO: 2300394 - RNA, 19 nt, Homo sapiens
  misc_RNA (1)...(19): siRNA sense strand
aggaguacaugguggacaa

SEQ ID NO: 2300395 - RNA, 19 nt, Homo sapiens
  misc_RNA (1)...(19): siRNA sense strand
gugcaaacaagcugaggaa

SEQ ID NO: 2300396 - RNA, 19 nt, Homo sapiens
  misc_RNA (1)...(19): siRNA sense strand
aagcaaaggagaaguucaa

SEQ ID NO: 2300397 - RNA, 19 nt, Homo sapiens
  misc_RNA (1)...(19): siRNA sense strand
cgagaagaagaaauggaaa

SEQ ID NO: 2300398 - RNA, 19 nt, Homo sapiens
  misc_RNA (1)...(19): siRNA sense strand
cagauaugccaguaguaaa

SEQ ID NO: 2300399 - RNA, 19 nt, Homo sapiens
  misc_RNA (1)...(19): siRNA sense strand
gggccacagcaaugaauaa

SEQ ID NO: 2300400 - RNA, 19 nt, Homo sapiens
  misc_RNA (1)...(19): siRNA sense strand
uguaugagugggaguguaa

SEQ ID NO: 2300401 - RNA, 19 nt, Homo sapiens
  misc_RNA (1)...(19): siRNA sense strand
agaagaaaugacagaaaca

SEQ ID NO: 2300402 - RNA, 19 nt, Homo sapiens
  misc_RNA (1)...(19): siRNA sense strand
gggaauugccggacaacca

SEQ ID NO: 2300403 - RNA, 19 nt, Homo sapiens
  misc_RNA (1)...(19): siRNA sense strand
cggaagaacaucagcgugu

SEQ ID NO: 2300404 - RNA, 19 nt, Homo sapiens
  misc_RNA (1)...(19): siRNA sense strand
gauaauaagaucugcacca

SEQ ID NO: 2300405 - RNA, 19 nt, Homo sapiens
  misc_RNA (1)...(19): siRNA sense strand
ucacaaaagcccagcggaa

SEQ ID NO: 2300406 - RNA, 19 nt, Homo sapiens
  misc_RNA (1)...(19): siRNA sense strand
ccucaaaccaggauagcga

SEQ ID NO: 2300407 - RNA, 19 nt, Homo sapiens
  misc_RNA (1)...(19): siRNA sense strand
aagauauggaagaagcaaa

SEQ ID NO: 2300408 - RNA, 19 nt, Homo sapiens
  misc_RNA (1)...(19): siRNA sense strand
aggcaaaguccacagagaa

SEQ ID NO: 2300409 - RNA, 19 nt, Homo sapiens
  misc_RNA (1)...(19): siRNA sense strand
augagaaagauauggaaga

SEQ ID NO: 2300410 - RNA, 19 nt, Homo sapiens
  misc_RNA (1)...(19): siRNA sense strand
ugaaaaugggacagagcaa

SEQ ID NO: 2300411 - RNA, 19 nt, Homo sapiens
  misc_RNA (1)...(19): siRNA sense strand
uggaaaugucugaugauga

SEQ ID NO: 2300412 - RNA, 19 nt, Homo sapiens
  misc_RNA (1)...(19): siRNA sense strand
acaaguuacagguggaaaa

SEQ ID NO: 2300413 - RNA, 19 nt, Homo sapiens
  misc_RNA (1)...(19): siRNA sense strand
caagaaggacacaggcaga

SEQ ID NO: 2300414 - RNA, 19 nt, Homo sapiens
  misc_RNA (1)...(19): siRNA sense strand
gcugggaauugccggacaa

SEQ ID NO: 2300415 - RNA, 19 nt, Homo sapiens
  misc_RNA (1)...(19): siRNA sense strand
caaaagaaacugaggaauc

SEQ ID NO: 2300416 - RNA, 19 nt, Homo sapiens
  misc_RNA (1)...(19): siRNA sense strand
cuggaaaagagauggaaau

SEQ ID NO: 2300417 - RNA, 19 nt, Homo sapiens
  misc_RNA (1)...(19): siRNA sense strand
uggaaugaugacuggaauu

SEQ ID NO: 2300418 - RNA, 19 nt, Homo sapiens
  misc_RNA (1)...(19): siRNA sense strand
guguaaacagcguaugcua

SEQ ID NO: 2300419 - RNA, 19 nt, Homo sapiens
  misc_RNA (1)...(19): siRNA sense strand
agaagaugacccuaacaaa

SEQ ID NO: 2300420 - RNA, 19 nt, Homo sapiens
  misc_RNA (1)...(19): siRNA sense strand
agauaugccaguaguaaaa

SEQ ID NO: 2300421 - RNA, 19 nt, Homo sapiens
  misc_RNA (1)...(19): siRNA sense strand
aaucaggcgagaagaagaa

SEQ ID NO: 2300422 - RNA, 19 nt, Homo sapiens
  misc_RNA (1)...(19): siRNA sense strand
gaaucaggcgagaagaaga

SEQ ID NO: 2300423 - RNA, 19 nt, Homo sapiens
  misc_RNA (1)...(19): siRNA sense strand
agagcaaaucauuguggaa

SEQ ID NO: 2300424 - RNA, 19 nt, Homo sapiens
  misc_RNA (1)...(19): siRNA sense strand
gaauaaucuuggaauggca

SEQ ID NO: 2300425 - RNA, 19 nt, Homo sapiens
  misc_RNA (1)...(19): siRNA sense strand
aaggcaaaguccacagaga

SEQ ID NO: 2300426 - RNA, 19 nt, Homo sapiens
  misc_RNA (1)...(19): siRNA sense strand
gaagaauggaagaagaaag

SEQ ID NO: 2300427 - RNA, 19 nt, Homo sapiens
  misc_RNA (1)...(19): siRNA sense strand
cgcaagagcaagaagaacu

SEQ ID NO: 2300428 - RNA, 19 nt, Homo sapiens
  misc_RNA (1)...(19): siRNA sense strand
gagaagaccaugaacagca

SEQ ID NO: 2300429 - RNA, 19 nt, Homo sapiens
  misc_RNA (1)...(19): siRNA sense strand
cuaucaaaucugaacguga

SEQ ID NO: 2300430 - RNA, 19 nt, Homo sapiens
  misc_RNA (1)...(19): siRNA sense strand
ccuuaguaucacaggcaga

SEQ ID NO: 2300431 - RNA, 19 nt, Homo sapiens
  misc_RNA (1)...(19): siRNA sense strand
aguccaagaggaauacaaa

SEQ ID NO: 2300432 - RNA, 19 nt, Homo sapiens
  misc_RNA (1)...(19): siRNA sense strand
cgagcaguguggagagauc

SEQ ID NO: 2300433 - RNA, 19 nt, Homo sapiens
  misc_RNA (1)...(19): siRNA sense strand
ccgccuggugaacgagaaa

SEQ ID NO: 2300434 - RNA, 19 nt, Homo sapiens
  misc_RNA (1)...(19): siRNA sense strand
gggaauaguaccuccacca

SEQ ID NO: 2300435 - RNA, 19 nt, Homo sapiens
  misc_RNA (1)...(19): siRNA sense strand
ucguagaagaauggaagaa

SEQ ID NO: 2300436 - RNA, 19 nt, Homo sapiens
  misc_RNA (1)...(19): siRNA sense strand
gcaucuacucaaaguccaa

SEQ ID NO: 2300437 - RNA, 19 nt, Homo sapiens
  misc_RNA (1)...(19): siRNA sense strand
agcaaaucauuguggaagu

SEQ ID NO: 2300438 - RNA, 19 nt, Homo sapiens
  misc_RNA (1)...(19): siRNA sense strand
gaagcaaaggagaaguuca

SEQ ID NO: 2300439 - RNA, 19 nt, Homo sapiens
  misc_RNA (1)...(19): siRNA sense strand
agauaguggcuguguacca

SEQ ID NO: 2300440 - RNA, 19 nt, Homo sapiens
  misc_RNA (1)...(19): siRNA sense strand
gaaagauauggaagaagca

SEQ ID NO: 2300441 - RNA, 19 nt, Homo sapiens
  misc_RNA (1)...(19): siRNA sense strand
gggaguguaaacagcguau

SEQ ID NO: 2300442 - RNA, 19 nt, Homo sapiens
  misc_RNA (1)...(19): siRNA sense strand
agcugaaacuccugcaaca

SEQ ID NO: 2300443 - RNA, 19 nt, Homo sapiens
  misc_RNA (1)...(19): siRNA sense strand
cuugagaagaccaugaaca

SEQ ID NO: 2300444 - RNA, 19 nt, Homo sapiens
  misc_RNA (1)...(19): siRNA sense strand
gcaggaaaugacuggaguu

SEQ ID NO: 2300445 - RNA, 19 nt, Homo sapiens
  misc_RNA (1)...(19): siRNA sense strand
ccuggaaaagagauggaaa

SEQ ID NO: 2300446 - RNA, 19 nt, Homo sapiens
  misc_RNA (1)...(19): siRNA sense strand
aguacugacaagaaggaca

SEQ ID NO: 2300447 - RNA, 19 nt, Homo sapiens
  misc_RNA (1)...(19): siRNA sense strand
ggaaugaaguagaacugcu

SEQ ID NO: 2300448 - RNA, 19 nt, Homo sapiens
  misc_RNA (1)...(19): siRNA sense strand
ccuccugcaacccgagaaa

SEQ ID NO: 2300449 - RNA, 19 nt, Homo sapiens
  misc_RNA (1)...(19): siRNA sense strand
acaggaaagugaaggcgaa

SEQ ID NO: 2300450 - RNA, 19 nt, Homo sapiens
  misc_RNA (1)...(19): siRNA sense strand
gagaguuacuuacaagaau

SEQ ID NO: 2300451 - RNA, 19 nt, Homo sapiens
  misc_RNA (1)...(19): siRNA sense strand
cuaggaagcucauuggaga

SEQ ID NO: 2300452 - RNA, 19 nt, Homo sapiens
  misc_RNA (1)...(19): siRNA sense strand
ugauggugguacuggaaaa

SEQ ID NO: 2300453 - RNA, 19 nt, Homo sapiens
  misc_RNA (1)...(19): siRNA sense strand
caggaaagugaaggcgaaa

SEQ ID NO: 2300454 - RNA, 19 nt, Homo sapiens
  misc_RNA (1)...(19): siRNA sense strand
guggcaacaaaguggauau

SEQ ID NO: 2300455 - RNA, 19 nt, Homo sapiens
  misc_RNA (1)...(19): siRNA sense strand
auuaaggacaggaaaguga

SEQ ID NO: 2300456 - RNA, 19 nt, Homo sapiens
  misc_RNA (1)...(19): siRNA sense strand
ccauugucuuccaccgaaa

SEQ ID NO: 2300457 - RNA, 19 nt, Homo sapiens
  misc_RNA (1)...(19): siRNA sense strand
gagaagaaguauguagcca

SEQ ID NO: 2300458 - RNA, 19 nt, Homo sapiens
  misc_RNA (1)...(19): siRNA sense strand
cagcacaguaugagcacga

SEQ ID NO: 2300459 - RNA, 19 nt, Homo sapiens
  misc_RNA (1)...(19): siRNA sense strand
cgagaguuacuuacaagaa

SEQ ID NO: 2300460 - RNA, 19 nt, Homo sapiens
  misc_RNA (1)...(19): siRNA sense strand
ccuuggguguugagguuca

SEQ ID NO: 2300461 - RNA, 19 nt, Homo sapiens
  misc_RNA (1)...(19): siRNA sense strand
gguuggugauggugguacu

SEQ ID NO: 2300462 - RNA, 19 nt, Homo sapiens
  misc_RNA (1)...(19): siRNA sense strand
cuuagagguugcucagaca

SEQ ID NO: 2300463 - RNA, 19 nt, Homo sapiens
  misc_RNA (1)...(19): siRNA sense strand
ucacagaggaacugaagua

SEQ ID NO: 2300464 - RNA, 19 nt, Homo sapiens
  misc_RNA (1)...(19): siRNA sense strand
cagaggaacugaaguacuu

SEQ ID NO: 2300465 - RNA, 19 nt, Homo sapiens
  misc_RNA (1)...(19): siRNA sense strand
agagcgaagaccuggagaa

SEQ ID NO: 2300466 - RNA, 19 nt, Homo sapiens
  misc_RNA (1)...(19): siRNA sense strand
gcaaggagaucaagcagcu

SEQ ID NO: 2300467 - RNA, 19 nt, Homo sapiens
  misc_RNA (1)...(19): siRNA sense strand
guucagaggagggagaaaa

SEQ ID NO: 2300468 - RNA, 19 nt, Homo sapiens
  misc_RNA (1)...(19): siRNA sense strand
agaguucagaggagggaga

SEQ ID NO: 2300469 - RNA, 19 nt, Homo sapiens
  misc_RNA (1)...(19): siRNA sense strand
caagcagcucacagaggaa

SEQ ID NO: 2300470 - RNA, 19 nt, Homo sapiens
  misc_RNA (1)...(19): siRNA sense strand
aguucagaggagggagaaa

SEQ ID NO: 2300471 - RNA, 19 nt, Homo sapiens
  misc_RNA (1)...(19): siRNA sense strand
ccucagaaguacucggaca

SEQ ID NO: 2300472 - RNA, 19 nt, Homo sapiens
  misc_RNA (1)...(19): siRNA sense strand
cagcaagggaagagcagca

SEQ ID NO: 2300473 - RNA, 19 nt, Homo sapiens
  misc_RNA (1)...(19): siRNA sense strand
ggagagagugagaagacca

SEQ ID NO: 2300474 - RNA, 19 nt, Homo sapiens
  misc_RNA (1)...(19): siRNA sense strand
gcugaaguccacaggcaga

SEQ ID NO: 2300475 - RNA, 19 nt, Homo sapiens
  misc_RNA (1)...(19): siRNA sense strand
agacugagcaaaggagcaa

SEQ ID NO: 2300476 - RNA, 19 nt, Homo sapiens
  misc_RNA (1)...(19): siRNA sense strand
ggaagaagagccagggcag

SEQ ID NO: 2300477 - RNA, 19 nt, Homo sapiens
  misc_RNA (1)...(19): siRNA sense strand
ccuaccacuccaagggcaa

SEQ ID NO: 2300478 - RNA, 19 nt, Homo sapiens
  misc_RNA (1)...(19): siRNA sense strand
ccaaagaacucggagacgu

SEQ ID NO: 2300479 - RNA, 19 nt, Homo sapiens
  misc_RNA (1)...(19): siRNA sense strand
cggaagaagagccagggca

SEQ ID NO: 2300480 - RNA, 19 nt, Homo sapiens
  misc_RNA (1)...(19): siRNA sense strand
agcagaagguggagcugga

SEQ ID NO: 2300481 - RNA, 19 nt, Homo sapiens
  misc_RNA (1)...(19): siRNA sense strand
cucagaaguacucggacaa

SEQ ID NO: 2300482 - RNA, 19 nt, Homo sapiens
  misc_RNA (1)...(19): siRNA sense strand
ccucagaaguacucggaca

SEQ ID NO: 2300483 - RNA, 19 nt, Homo sapiens
  misc_RNA (1)...(19): siRNA sense strand
cagcaagggaagagcagca

SEQ ID NO: 2300484 - RNA, 19 nt, Homo sapiens
  misc_RNA (1)...(19): siRNA sense strand
ggagagagugagaagacca

SEQ ID NO: 2300485 - RNA, 19 nt, Homo sapiens
  misc_RNA (1)...(19): siRNA sense strand
gcugaaguccacaggcaga

SEQ ID NO: 2300486 - RNA, 19 nt, Homo sapiens
  misc_RNA (1)...(19): siRNA sense strand
agacugagcaaaggagcaa

SEQ ID NO: 2300487 - RNA, 19 nt, Homo sapiens
  misc_RNA (1)...(19): siRNA sense strand
ggaagaagagccagggcag

SEQ ID NO: 2300488 - RNA, 19 nt, Homo sapiens
  misc_RNA (1)...(19): siRNA sense strand
ccuaccacuccaagggcaa

SEQ ID NO: 2300489 - RNA, 19 nt, Homo sapiens
  misc_RNA (1)...(19): siRNA sense strand
ccaaagaacucggagacgu

SEQ ID NO: 2300490 - RNA, 19 nt, Homo sapiens
  misc_RNA (1)...(19): siRNA sense strand
cggaagaagagccagggca

SEQ ID NO: 2300491 - RNA, 19 nt, Homo sapiens
  misc_RNA (1)...(19): siRNA sense strand
agcagaagguggagcugga

SEQ ID NO: 2300492 - RNA, 19 nt, Homo sapiens
  misc_RNA (1)...(19): siRNA sense strand
cucagaaguacucggacaa

SEQ ID NO: 2300493 - RNA, 19 nt, Homo sapiens
  misc_RNA (1)...(19): siRNA sense strand
ccucagaaguacucggaca

SEQ ID NO: 2300494 - RNA, 19 nt, Homo sapiens
  misc_RNA (1)...(19): siRNA sense strand
cagcaagggaagagcagca

SEQ ID NO: 2300495 - RNA, 19 nt, Homo sapiens
  misc_RNA (1)...(19): siRNA sense strand
ggagagagugagaagacca

SEQ ID NO: 2300496 - RNA, 19 nt, Homo sapiens
  misc_RNA (1)...(19): siRNA sense strand
gcugaaguccacaggcaga

SEQ ID NO: 2300497 - RNA, 19 nt, Homo sapiens
  misc_RNA (1)...(19): siRNA sense strand
agacugagcaaaggagcaa

SEQ ID NO: 2300498 - RNA, 19 nt, Homo sapiens
  misc_RNA (1)...(19): siRNA sense strand
ggaagaagagccagggcag

SEQ ID NO: 2300499 - RNA, 19 nt, Homo sapiens
  misc_RNA (1)...(19): siRNA sense strand
ccuaccacuccaagggcaa

SEQ ID NO: 2300500 - RNA, 19 nt, Homo sapiens
  misc_RNA (1)...(19): siRNA sense strand
ccaaagaacucggagacgu

SEQ ID NO: 2300501 - RNA, 19 nt, Homo sapiens
  misc_RNA (1)...(19): siRNA sense strand
cggaagaagagccagggca

SEQ ID NO: 2300502 - RNA, 19 nt, Homo sapiens
  misc_RNA (1)...(19): siRNA sense strand
agcagaagguggagcugga

SEQ ID NO: 2300503 - RNA, 19 nt, Homo sapiens
  misc_RNA (1)...(19): siRNA sense strand
cucagaaguacucggacaa

SEQ ID NO: 2300504 - RNA, 19 nt, Homo sapiens
  misc_RNA (1)...(19): siRNA sense strand
gagacauaauuguggcaga

SEQ ID NO: 2300505 - RNA, 19 nt, Homo sapiens
  misc_RNA (1)...(19): siRNA sense strand
gcggcaaacgaaaggacaa

SEQ ID NO: 2300506 - RNA, 19 nt, Homo sapiens
  misc_RNA (1)...(19): siRNA sense strand
agggcaaguucaagaccaa

SEQ ID NO: 2300507 - RNA, 19 nt, Homo sapiens
  misc_RNA (1)...(19): siRNA sense strand
gaaacaucauuguggcuga

SEQ ID NO: 2300508 - RNA, 19 nt, Homo sapiens
  misc_RNA (1)...(19): siRNA sense strand
gggaugugguggagcagca

SEQ ID NO: 2300509 - RNA, 19 nt, Homo sapiens
  misc_RNA (1)...(19): siRNA sense strand
guggaagggagaaagguga

SEQ ID NO: 2300510 - RNA, 19 nt, Homo sapiens
  misc_RNA (1)...(19): siRNA sense strand
uugcaaagccagcuggaca

SEQ ID NO: 2300511 - RNA, 19 nt, Homo sapiens
  misc_RNA (1)...(19): siRNA sense strand
cugugaacaacaagaauga

SEQ ID NO: 2300512 - RNA, 19 nt, Homo sapiens
  misc_RNA (1)...(19): siRNA sense strand
gcaucugccuggaucggua

SEQ ID NO: 2300513 - RNA, 19 nt, Homo sapiens
  misc_RNA (1)...(19): siRNA sense strand
uggaagggagaaaggugaa

SEQ ID NO: 2300514 - RNA, 19 nt, Homo sapiens
  misc_RNA (1)...(19): siRNA sense strand
ccguagaccggaauggaca

SEQ ID NO: 2300515 - RNA, 19 nt, Homo sapiens
  misc_RNA (1)...(19): siRNA sense strand
cuuccagcccaauggcaaa

SEQ ID NO: 2300516 - RNA, 19 nt, Homo sapiens
  misc_RNA (1)...(19): siRNA sense strand
cagucguggaagggagaaa

SEQ ID NO: 2300517 - RNA, 19 nt, Homo sapiens
  misc_RNA (1)...(19): siRNA sense strand
aggcaagacgauggaguuu

SEQ ID NO: 2300518 - RNA, 19 nt, Homo sapiens
  misc_RNA (1)...(19): siRNA sense strand
gagacauaauuguggcaga

SEQ ID NO: 2300519 - RNA, 19 nt, Homo sapiens
  misc_RNA (1)...(19): siRNA sense strand
gcggcaaacgaaaggacaa

SEQ ID NO: 2300520 - RNA, 19 nt, Homo sapiens
  misc_RNA (1)...(19): siRNA sense strand
agggcaaguucaagaccaa

SEQ ID NO: 2300521 - RNA, 19 nt, Homo sapiens
  misc_RNA (1)...(19): siRNA sense strand
gaaacaucauuguggcuga

SEQ ID NO: 2300522 - RNA, 19 nt, Homo sapiens
  misc_RNA (1)...(19): siRNA sense strand
gggaugugguggagcagca

SEQ ID NO: 2300523 - RNA, 19 nt, Homo sapiens
  misc_RNA (1)...(19): siRNA sense strand
guggaagggagaaagguga

SEQ ID NO: 2300524 - RNA, 19 nt, Homo sapiens
  misc_RNA (1)...(19): siRNA sense strand
uugcaaagccagcuggaca

SEQ ID NO: 2300525 - RNA, 19 nt, Homo sapiens
  misc_RNA (1)...(19): siRNA sense strand
cugugaacaacaagaauga

SEQ ID NO: 2300526 - RNA, 19 nt, Homo sapiens
  misc_RNA (1)...(19): siRNA sense strand
gcaucugccuggaucggua

SEQ ID NO: 2300527 - RNA, 19 nt, Homo sapiens
  misc_RNA (1)...(19): siRNA sense strand
uggaagggagaaaggugaa

SEQ ID NO: 2300528 - RNA, 19 nt, Homo sapiens
  misc_RNA (1)...(19): siRNA sense strand
ccguagaccggaauggaca

SEQ ID NO: 2300529 - RNA, 19 nt, Homo sapiens
  misc_RNA (1)...(19): siRNA sense strand
cuuccagcccaauggcaaa

SEQ ID NO: 2300530 - RNA, 19 nt, Homo sapiens
  misc_RNA (1)...(19): siRNA sense strand
cagucguggaagggagaaa

SEQ ID NO: 2300531 - RNA, 19 nt, Homo sapiens
  misc_RNA (1)...(19): siRNA sense strand
aggcaagacgauggaguuu

SEQ ID NO: 2300532 - RNA, 19 nt, Homo sapiens
  misc_RNA (1)...(19): siRNA sense strand
gagcaagagaugagugaaa

SEQ ID NO: 2300533 - RNA, 19 nt, Homo sapiens
  misc_RNA (1)...(19): siRNA sense strand
gggaagaagacgaagaaca

SEQ ID NO: 2300534 - RNA, 19 nt, Homo sapiens
  misc_RNA (1)...(19): siRNA sense strand
cgguauuacugaaaugaaa

SEQ ID NO: 2300535 - RNA, 19 nt, Homo sapiens
  misc_RNA (1)...(19): siRNA sense strand
gaauugagccugaggaaaa

SEQ ID NO: 2300536 - RNA, 19 nt, Homo sapiens
  misc_RNA (1)...(19): siRNA sense strand
ccgacaaggaagugaagaa

SEQ ID NO: 2300537 - RNA, 19 nt, Homo sapiens
  misc_RNA (1)...(19): siRNA sense strand
agaacaagggauagauuua

SEQ ID NO: 2300538 - RNA, 19 nt, Homo sapiens
  misc_RNA (1)...(19): siRNA sense strand
uagaagaaauggugaacau

SEQ ID NO: 2300539 - RNA, 19 nt, Homo sapiens
  misc_RNA (1)...(19): siRNA sense strand
cagugaaaucaaagacaaa

SEQ ID NO: 2300540 - RNA, 19 nt, Homo sapiens
  misc_RNA (1)...(19): siRNA sense strand
cugaugaauuuguggguuu

SEQ ID NO: 2300541 - RNA, 19 nt, Homo sapiens
  misc_RNA (1)...(19): siRNA sense strand
agaacaacagacagagaaa

SEQ ID NO: 2300542 - RNA, 19 nt, Homo sapiens
  misc_RNA (1)...(19): siRNA sense strand
uaaugaaauagcugggaaa

SEQ ID NO: 2300543 - RNA, 19 nt, Homo sapiens
  misc_RNA (1)...(19): siRNA sense strand
ggaaguuauuggagaucau

SEQ ID NO: 2300544 - RNA, 19 nt, Homo sapiens
  misc_RNA (1)...(19): siRNA sense strand
agggcuaguuggaggaaau

SEQ ID NO: 2300545 - RNA, 19 nt, Homo sapiens
  misc_RNA (1)...(19): siRNA sense strand
aaaccaugauugugaggaa

SEQ ID NO: 2300546 - RNA, 19 nt, Homo sapiens
  misc_RNA (1)...(19): siRNA sense strand
cugaaaugaaacagaagaa

SEQ ID NO: 2300547 - RNA, 19 nt, Homo sapiens
  misc_RNA (1)...(19): siRNA sense strand
agaugaaagcauaguggaa

SEQ ID NO: 2300548 - RNA, 19 nt, Homo sapiens
  misc_RNA (1)...(19): siRNA sense strand
ccugggagauaaugauaaa

SEQ ID NO: 2300549 - RNA, 19 nt, Homo sapiens
  misc_RNA (1)...(19): siRNA sense strand
cauuggaacuauagaggau

SEQ ID NO: 2300550 - RNA, 19 nt, Homo sapiens
  misc_RNA (1)...(19): siRNA sense strand
gcugaauggaugacaacaa

SEQ ID NO: 2300551 - RNA, 19 nt, Homo sapiens
  misc_RNA (1)...(19): siRNA sense strand
guggaaagcaggauucaaa

SEQ ID NO: 2300552 - RNA, 19 nt, Homo sapiens
  misc_RNA (1)...(19): siRNA sense strand
acagaacauuguagaagaa

SEQ ID NO: 2300553 - RNA, 19 nt, Homo sapiens
  misc_RNA (1)...(19): siRNA sense strand
aagcauuacaggaagcaaa

SEQ ID NO: 2300554 - RNA, 19 nt, Homo sapiens
  misc_RNA (1)...(19): siRNA sense strand
acuuagaaauggagcagau

SEQ ID NO: 2300555 - RNA, 19 nt, Homo sapiens
  misc_RNA (1)...(19): siRNA sense strand
cggaacaggucuccaacaa

SEQ ID NO: 2300556 - RNA, 19 nt, Homo sapiens
  misc_RNA (1)...(19): siRNA sense strand
uggccacacuuaugagaaa

SEQ ID NO: 2300557 - RNA, 19 nt, Homo sapiens
  misc_RNA (1)...(19): siRNA sense strand
gauaauagguuuaaagcuc

SEQ ID NO: 2300558 - RNA, 19 nt, Homo sapiens
  misc_RNA (1)...(19): siRNA sense strand
aaccaaggucuguggauaa

SEQ ID NO: 2300559 - RNA, 19 nt, Homo sapiens
  misc_RNA (1)...(19): siRNA sense strand
agaaagaagaugcagaaaa

SEQ ID NO: 2300560 - RNA, 19 nt, Homo sapiens
  misc_RNA (1)...(19): siRNA sense strand
ccuagaaaucugggauaaa

SEQ ID NO: 2300561 - RNA, 19 nt, Homo sapiens
  misc_RNA (1)...(19): siRNA sense strand
aaucaaacacccugagaca

SEQ ID NO: 2300562 - RNA, 19 nt, Homo sapiens
  misc_RNA (1)...(19): siRNA sense strand
aagcaggauucaaaggcaa

SEQ ID NO: 2300563 - RNA, 19 nt, Homo sapiens
  misc_RNA (1)...(19): siRNA sense strand
guguaaacugucaaugaaa

SEQ ID NO: 2300564 - RNA, 19 nt, Homo sapiens
  misc_RNA (1)...(19): siRNA sense strand
cagaauguagccagugaaa

SEQ ID NO: 2300565 - RNA, 19 nt, Homo sapiens
  misc_RNA (1)...(19): siRNA sense strand
acacaaguauggaagcaau

SEQ ID NO: 2300566 - RNA, 19 nt, Homo sapiens
  misc_RNA (1)...(19): siRNA sense strand
gggagaagggacuacuaua

SEQ ID NO: 2300567 - RNA, 19 nt, Homo sapiens
  misc_RNA (1)...(19): siRNA sense strand
ggaccuauuuucaggacaa

SEQ ID NO: 2300568 - RNA, 19 nt, Homo sapiens
  misc_RNA (1)...(19): siRNA sense strand
guguaauccuaaugaagau

SEQ ID NO: 2300569 - RNA, 19 nt, Homo sapiens
  misc_RNA (1)...(19): siRNA sense strand
gugaaguguuugucugaau

SEQ ID NO: 2300570 - RNA, 19 nt, Homo sapiens
  misc_RNA (1)...(19): siRNA sense strand
gaagacaggguguggguga

SEQ ID NO: 2300571 - RNA, 19 nt, Homo sapiens
  misc_RNA (1)...(19): siRNA sense strand
agaaauucaugaagggacu

SEQ ID NO: 2300572 - RNA, 19 nt, Homo sapiens
  misc_RNA (1)...(19): siRNA sense strand
aaaccaagcauuacaggaa

SEQ ID NO: 2300573 - RNA, 19 nt, Homo sapiens
  misc_RNA (1)...(19): siRNA sense strand
uggcaacauuggaacuaua

SEQ ID NO: 2300574 - RNA, 19 nt, Homo sapiens
  misc_RNA (1)...(19): siRNA sense strand
ucaaacacccugagacaau

SEQ ID NO: 2300575 - RNA, 19 nt, Homo sapiens
  misc_RNA (1)...(19): siRNA sense strand
cccaauucucuuugaguua

SEQ ID NO: 2300576 - RNA, 19 nt, Homo sapiens
  misc_RNA (1)...(19): siRNA sense strand
guaagaaagaagaugcaga

SEQ ID NO: 2300577 - RNA, 19 nt, Homo sapiens
  misc_RNA (1)...(19): siRNA sense strand
aggaauugagccugaggaa

SEQ ID NO: 2300578 - RNA, 19 nt, Homo sapiens
  misc_RNA (1)...(19): siRNA sense strand
cgaucuggauggaagaaca

SEQ ID NO: 2300579 - RNA, 19 nt, Homo sapiens
  misc_RNA (1)...(19): siRNA sense strand
gcaaauuagauguaagaac

SEQ ID NO: 2300580 - RNA, 19 nt, Homo sapiens
  misc_RNA (1)...(19): siRNA sense strand
cccuagaaaucugggauaa

SEQ ID NO: 2300581 - RNA, 19 nt, Homo sapiens
  misc_RNA (1)...(19): siRNA sense strand
uggcaaugcuccagauagu

SEQ ID NO: 2300582 - RNA, 19 nt, Homo sapiens
  misc_RNA (1)...(19): siRNA sense strand
uaguacaacaccaggcaaa

SEQ ID NO: 2300583 - RNA, 19 nt, Homo sapiens
  misc_RNA (1)...(19): siRNA sense strand
gaugguagugacagugaaa

SEQ ID NO: 2300584 - RNA, 19 nt, Homo sapiens
  misc_RNA (1)...(19): siRNA sense strand
auuuguggguuuagggcua

SEQ ID NO: 2300585 - RNA, 19 nt, Homo sapiens
  misc_RNA (1)...(19): siRNA sense strand
ggaaaagccacaagacauu

SEQ ID NO: 2300586 - RNA, 19 nt, Homo sapiens
  misc_RNA (1)...(19): siRNA sense strand
guauguuucuagaaggauu

SEQ ID NO: 2300587 - RNA, 19 nt, Homo sapiens
  misc_RNA (1)...(19): siRNA sense strand
caugggaagaauaagauua

SEQ ID NO: 2300588 - RNA, 19 nt, Homo sapiens
  misc_RNA (1)...(19): siRNA sense strand
guauagcacagaugguuaa

SEQ ID NO: 2300589 - RNA, 19 nt, Homo sapiens
  misc_RNA (1)...(19): siRNA sense strand
ccucaggcuuucaaggaau

SEQ ID NO: 2300590 - RNA, 19 nt, Homo sapiens
  misc_RNA (1)...(19): siRNA sense strand
ugaaauugccagaacaaca

SEQ ID NO: 2300591 - RNA, 19 nt, Homo sapiens
  misc_RNA (1)...(19): siRNA sense strand
agaaguacucagugaugua

SEQ ID NO: 2300592 - RNA, 19 nt, Homo sapiens
  misc_RNA (1)...(19): siRNA sense strand
ggaauugagccugaggaaa

SEQ ID NO: 2300593 - RNA, 19 nt, Homo sapiens
  misc_RNA (1)...(19): siRNA sense strand
aagaaaccaaagagaggaa

SEQ ID NO: 2300594 - RNA, 19 nt, Homo sapiens
  misc_RNA (1)...(19): siRNA sense strand
cgagguggcguuagaggaa

SEQ ID NO: 2300595 - RNA, 19 nt, Homo sapiens
  misc_RNA (1)...(19): siRNA sense strand
cugagacaauaaacagaua

SEQ ID NO: 2300596 - RNA, 19 nt, Homo sapiens
  misc_RNA (1)...(19): siRNA sense strand
acaucaagaggaaagauua

SEQ ID NO: 2300597 - RNA, 19 nt, Homo sapiens
  misc_RNA (1)...(19): siRNA sense strand
ggaaauaggggaugggaaa

SEQ ID NO: 2300598 - RNA, 19 nt, Homo sapiens
  misc_RNA (1)...(19): siRNA sense strand
cgaugaaauuaaagcagaa

SEQ ID NO: 2300599 - RNA, 19 nt, Homo sapiens
  misc_RNA (1)...(19): siRNA sense strand
acuuagagauggagcaaau

SEQ ID NO: 2300600 - RNA, 19 nt, Homo sapiens
  misc_RNA (1)...(19): siRNA sense strand
augaagagauagaaggcaa

SEQ ID NO: 2300601 - RNA, 19 nt, Homo sapiens
  misc_RNA (1)...(19): siRNA sense strand
ugacagaaccugagagagu

SEQ ID NO: 2300602 - RNA, 19 nt, Homo sapiens
  misc_RNA (1)...(19): siRNA sense strand
acauagagacggaggauca

SEQ ID NO: 2300603 - RNA, 19 nt, Homo sapiens
  misc_RNA (1)...(19): siRNA sense strand
cauuaaagaagcagcggaa

SEQ ID NO: 2300604 - RNA, 19 nt, Homo sapiens
  misc_RNA (1)...(19): siRNA sense strand
cuguaggaauggaggaaga

SEQ ID NO: 2300605 - RNA, 19 nt, Homo sapiens
  misc_RNA (1)...(19): siRNA sense strand
agagauagaaggcaagaaa

SEQ ID NO: 2300606 - RNA, 19 nt, Homo sapiens
  misc_RNA (1)...(19): siRNA sense strand
gaaagaaacaaaagagcua

SEQ ID NO: 2300607 - RNA, 19 nt, Homo sapiens
  misc_RNA (1)...(19): siRNA sense strand
acggauaaguguuguguau

SEQ ID NO: 2300608 - RNA, 19 nt, Homo sapiens
  misc_RNA (1)...(19): siRNA sense strand
gagcacagguggaugguca

SEQ ID NO: 2300609 - RNA, 19 nt, Homo sapiens
  misc_RNA (1)...(19): siRNA sense strand
gaugacagcuggaagggua

SEQ ID NO: 2300610 - RNA, 19 nt, Homo sapiens
  misc_RNA (1)...(19): siRNA sense strand
ggugaguggcggagugaau

SEQ ID NO: 2300611 - RNA, 19 nt, Homo sapiens
  misc_RNA (1)...(19): siRNA sense strand
acgaaagagcaguauauua

SEQ ID NO: 2300612 - RNA, 19 nt, Homo sapiens
  misc_RNA (1)...(19): siRNA sense strand
cagaauguagcuagugaaa

SEQ ID NO: 2300613 - RNA, 19 nt, Homo sapiens
  misc_RNA (1)...(19): siRNA sense strand
ggagacgcacccagagaaa

SEQ ID NO: 2300614 - RNA, 19 nt, Homo sapiens
  misc_RNA (1)...(19): siRNA sense strand
uuaaagaagcagcggaaaa

SEQ ID NO: 2300615 - RNA, 19 nt, Homo sapiens
  misc_RNA (1)...(19): siRNA sense strand
ucaacaaggaggugaugua

SEQ ID NO: 2300616 - RNA, 19 nt, Homo sapiens
  misc_RNA (1)...(19): siRNA sense strand
gagaagaguucaugggccu

SEQ ID NO: 2300617 - RNA, 19 nt, Homo sapiens
  misc_RNA (1)...(19): siRNA sense strand
agauggagcaaauggcuaa

SEQ ID NO: 2300618 - RNA, 19 nt, Homo sapiens
  misc_RNA (1)...(19): siRNA sense strand
cuaaugaagauguggcuau

SEQ ID NO: 2300619 - RNA, 19 nt, Homo sapiens
  misc_RNA (1)...(19): siRNA sense strand
gagaaaucugaguggauga

SEQ ID NO: 2300620 - RNA, 19 nt, Homo sapiens
  misc_RNA (1)...(19): siRNA sense strand
ggaaaaguaagcacagaaa

SEQ ID NO: 2300621 - RNA, 19 nt, Homo sapiens
  misc_RNA (1)...(19): siRNA sense strand
ucuuuaagcagcauagaua

SEQ ID NO: 2300622 - RNA, 19 nt, Homo sapiens
  misc_RNA (1)...(19): siRNA sense strand
aggaugacccugagcaauu

SEQ ID NO: 2300623 - RNA, 19 nt, Homo sapiens
  misc_RNA (1)...(19): siRNA sense strand
ugacgaaagagcaguauau

SEQ ID NO: 2300624 - RNA, 19 nt, Homo sapiens
  misc_RNA (1)...(19): siRNA sense strand
agauagaaggcaagaaaau

SEQ ID NO: 2300625 - RNA, 19 nt, Homo sapiens
  misc_RNA (1)...(19): siRNA sense strand
caggagugauucuggaaaa

SEQ ID NO: 2300626 - RNA, 19 nt, Homo sapiens
  misc_RNA (1)...(19): siRNA sense strand
ggguagaccauacgcaaau

SEQ ID NO: 2300627 - RNA, 19 nt, Homo sapiens
  misc_RNA (1)...(19): siRNA sense strand
cgacagaauuguugaaacc

SEQ ID NO: 2300628 - RNA, 19 nt, Homo sapiens
  misc_RNA (1)...(19): siRNA sense strand
caucaaugcaaucaagcaa

SEQ ID NO: 2300629 - RNA, 19 nt, Homo sapiens
  misc_RNA (1)...(19): siRNA sense strand
gaaugcagcuggaacgaga

SEQ ID NO: 2300630 - RNA, 19 nt, Homo sapiens
  misc_RNA (1)...(19): siRNA sense strand
ugagcaacugucagagaaa

SEQ ID NO: 2300631 - RNA, 19 nt, Homo sapiens
  misc_RNA (1)...(19): siRNA sense strand
uaugaaacucccugagcaa

SEQ ID NO: 2300632 - RNA, 19 nt, Homo sapiens
  misc_RNA (1)...(19): siRNA sense strand
agacggaggaucagggcau

SEQ ID NO: 2300633 - RNA, 19 nt, Homo sapiens
  misc_RNA (1)...(19): siRNA sense strand
gagcagguuuuaagggcaa

SEQ ID NO: 2300634 - RNA, 19 nt, Homo sapiens
  misc_RNA (1)...(19): siRNA sense strand
cugcagacagugagaacau

SEQ ID NO: 2300635 - RNA, 19 nt, Homo sapiens
  misc_RNA (1)...(19): siRNA sense strand
uggaauugauacagaccau

SEQ ID NO: 2300636 - RNA, 19 nt, Homo sapiens
  misc_RNA (1)...(19): siRNA sense strand
aaaucugaguggaugacaa

SEQ ID NO: 2300637 - RNA, 19 nt, Homo sapiens
  misc_RNA (1)...(19): siRNA sense strand
caggagagccagaccaaga

SEQ ID NO: 2300638 - RNA, 19 nt, Homo sapiens
  misc_RNA (1)...(19): siRNA sense strand
ccuagaagguuuccgccua

SEQ ID NO: 2300639 - RNA, 19 nt, Homo sapiens
  misc_RNA (1)...(19): siRNA sense strand
aagaaauacagcagagacu

SEQ ID NO: 2300640 - RNA, 19 nt, Homo sapiens
  misc_RNA (1)...(19): siRNA sense strand
ucauugaagcugacaagua

SEQ ID NO: 2300641 - RNA, 19 nt, Homo sapiens
  misc_RNA (1)...(19): siRNA sense strand
cagucauguuugagaucau

SEQ ID NO: 2300642 - RNA, 19 nt, Homo sapiens
  misc_RNA (1)...(19): siRNA sense strand
gugucaaacaagauaauga

SEQ ID NO: 2300643 - RNA, 19 nt, Homo sapiens
  misc_RNA (1)...(19): siRNA sense strand
cagaaaagcauuuggaugu

SEQ ID NO: 2300644 - RNA, 19 nt, Homo sapiens
  misc_RNA (1)...(19): siRNA sense strand
gcuaacgauugcaaccaaa

SEQ ID NO: 2300645 - RNA, 19 nt, Homo sapiens
  misc_RNA (1)...(19): siRNA sense strand
gggaagaaauacagcagag

SEQ ID NO: 2300646 - RNA, 19 nt, Homo sapiens
  misc_RNA (1)...(19): siRNA sense strand
ccccaggaguugaugaaaa

SEQ ID NO: 2300647 - RNA, 19 nt, Homo sapiens
  misc_RNA (1)...(19): siRNA sense strand
aguugaagacauagcccaa

SEQ ID NO: 2300648 - RNA, 19 nt, Homo sapiens
  misc_RNA (1)...(19): siRNA sense strand
cccaaaagauugaccgauu

SEQ ID NO: 2300649 - RNA, 19 nt, Homo sapiens
  misc_RNA (1)...(19): siRNA sense strand
ucuugagaagggugaauua

SEQ ID NO: 2300650 - RNA, 19 nt, Homo sapiens
  misc_RNA (1)...(19): siRNA sense strand
agacgcacccagagaaaga

SEQ ID NO: 2300651 - RNA, 19 nt, Homo sapiens
  misc_RNA (1)...(19): siRNA sense strand
ccacacauuggcaggagaa

SEQ ID NO: 2300652 - RNA, 19 nt, Homo sapiens
  misc_RNA (1)...(19): siRNA sense strand
ugcagaagauuguggagau

SEQ ID NO: 2300653 - RNA, 19 nt, Homo sapiens
  misc_RNA (1)...(19): siRNA sense strand
ucgaauauggcaugugauu

SEQ ID NO: 2300654 - RNA, 19 nt, Homo sapiens
  misc_RNA (1)...(19): siRNA sense strand
uugagaucaugaagagcua

SEQ ID NO: 2300655 - RNA, 19 nt, Homo sapiens
  misc_RNA (1)...(19): siRNA sense strand
aggagaggcucacggauca

SEQ ID NO: 2300656 - RNA, 19 nt, Homo sapiens
  misc_RNA (1)...(19): siRNA sense strand
ucucaagcaucuaugaaga

SEQ ID NO: 2300657 - RNA, 19 nt, Homo sapiens
  misc_RNA (1)...(19): siRNA sense strand
gagauggagcaaauggcua

SEQ ID NO: 2300658 - RNA, 19 nt, Homo sapiens
  misc_RNA (1)...(19): siRNA sense strand
agaagaaacuggagcagga

SEQ ID NO: 2300659 - RNA, 19 nt, Homo sapiens
  misc_RNA (1)...(19): siRNA sense strand
ccauguaccugaugcggaa

SEQ ID NO: 2300660 - RNA, 19 nt, Homo sapiens
  misc_RNA (1)...(19): siRNA sense strand
cugcugugguucugggcaa

SEQ ID NO: 2300661 - RNA, 19 nt, Homo sapiens
  misc_RNA (1)...(19): siRNA sense strand
ucuucaaccuggacagcaa

SEQ ID NO: 2300662 - RNA, 19 nt, Homo sapiens
  misc_RNA (1)...(19): siRNA sense strand
cggccaaugacgaggagga

SEQ ID NO: 2300663 - RNA, 19 nt, Homo sapiens
  misc_RNA (1)...(19): siRNA sense strand
acaagaagaaaguggugau

SEQ ID NO: 2300664 - RNA, 19 nt, Homo sapiens
  misc_RNA (1)...(19): siRNA sense strand
ucggaaugguugucugcaa

SEQ ID NO: 2300665 - RNA, 19 nt, Homo sapiens
  misc_RNA (1)...(19): siRNA sense strand
cgguggaccaugacaagaa

SEQ ID NO: 2300666 - RNA, 19 nt, Homo sapiens
  misc_RNA (1)...(19): siRNA sense strand
aggaaugccuggcggcuga

SEQ ID NO: 2300667 - RNA, 19 nt, Homo sapiens
  misc_RNA (1)...(19): siRNA sense strand
ccgugcuggacgaggcaaa

SEQ ID NO: 2300668 - RNA, 19 nt, Homo sapiens
  misc_RNA (1)...(19): siRNA sense strand
ugacugaccugacggguga

SEQ ID NO: 2300669 - RNA, 19 nt, Homo sapiens
  misc_RNA (1)...(19): siRNA sense strand
cacaagagaugcuccgcua

SEQ ID NO: 2300670 - RNA, 19 nt, Homo sapiens
  misc_RNA (1)...(19): siRNA sense strand
cugccauccccgaggaaaa

SEQ ID NO: 2300671 - RNA, 19 nt, Homo sapiens
  misc_RNA (1)...(19): siRNA sense strand
aggcaaacaaugacaucuu

SEQ ID NO: 2300672 - RNA, 19 nt, Homo sapiens
  misc_RNA (1)...(19): siRNA sense strand
gugcccaguucgagcccaa

SEQ ID NO: 2300673 - RNA, 19 nt, Homo sapiens
  misc_RNA (1)...(19): siRNA sense strand
acaaugacaucuuggccuu

SEQ ID NO: 2300674 - RNA, 19 nt, Homo sapiens
  misc_RNA (1)...(19): siRNA sense strand
agaaacuggagcaggagau

SEQ ID NO: 2300675 - RNA, 19 nt, Homo sapiens
  misc_RNA (1)...(19): siRNA sense strand
gcaacgaccucacugccaa

SEQ ID NO: 2300676 - RNA, 19 nt, Homo sapiens
  misc_RNA (1)...(19): siRNA sense strand
ucaccaucgaggaagacaa

SEQ ID NO: 2300677 - RNA, 19 nt, Homo sapiens
  misc_RNA (1)...(19): siRNA sense strand
ucaagaagaaacuggagca

SEQ ID NO: 2300678 - RNA, 19 nt, Homo sapiens
  misc_RNA (1)...(19): siRNA sense strand
agaacuacaacaaggggaa

SEQ ID NO: 2300679 - RNA, 19 nt, Homo sapiens
  misc_RNA (1)...(19): siRNA sense strand
ggaccugacuccugagcuc

SEQ ID NO: 2300680 - RNA, 19 nt, Homo sapiens
  misc_RNA (1)...(19): siRNA sense strand
uggaauucgccgaguucau

SEQ ID NO: 2300681 - RNA, 19 nt, Homo sapiens
  misc_RNA (1)...(19): siRNA sense strand
aguacaaagauguggauaa

SEQ ID NO: 2300682 - RNA, 19 nt, Homo sapiens
  misc_RNA (1)...(19): siRNA sense strand
gguaauggguaaagugcca

SEQ ID NO: 2300683 - RNA, 19 nt, Homo sapiens
  misc_RNA (1)...(19): siRNA sense strand
gugauaaccuuucgggaga

SEQ ID NO: 2300684 - RNA, 19 nt, Homo sapiens
  misc_RNA (1)...(19): siRNA sense strand
aaguucagguaauggguaa

SEQ ID NO: 2300685 - RNA, 19 nt, Homo sapiens
  misc_RNA (1)...(19): siRNA sense strand
augucaaaguucagguaau

SEQ ID NO: 2300686 - RNA, 19 nt, Homo sapiens
  misc_RNA (1)...(19): siRNA sense strand
ggggagacgugcagaaaca

SEQ ID NO: 2300687 - RNA, 19 nt, Homo sapiens
  misc_RNA (1)...(19): siRNA sense strand
uacuugaacuggagggcaa

SEQ ID NO: 2300688 - RNA, 19 nt, Homo sapiens
  misc_RNA (1)...(19): siRNA sense strand
gaguggaaaaucaggaaaa

SEQ ID NO: 2300689 - RNA, 19 nt, Homo sapiens
  misc_RNA (1)...(19): siRNA sense strand
uggcagaguacuugaagau

SEQ ID NO: 2300690 - RNA, 19 nt, Homo sapiens
  misc_RNA (1)...(19): siRNA sense strand
ucgaugacguggugggcau

SEQ ID NO: 2300691 - RNA, 19 nt, Homo sapiens
  misc_RNA (1)...(19): siRNA sense strand
caagaaguggagaguggaa

SEQ ID NO: 2300692 - RNA, 19 nt, Homo sapiens
  misc_RNA (1)...(19): siRNA sense strand
cuccauaugugcaggcauu

SEQ ID NO: 2300693 - RNA, 19 nt, Homo sapiens
  misc_RNA (1)...(19): siRNA sense strand
gcaaaaucugguagaaaga

SEQ ID NO: 2300694 - RNA, 19 nt, Homo sapiens
  misc_RNA (1)...(19): siRNA sense strand
agcugaaacagguggcuua

SEQ ID NO: 2300695 - RNA, 19 nt, Homo sapiens
  misc_RNA (1)...(19): siRNA sense strand
ggcaagaaguggagagugg

SEQ ID NO: 2300696 - RNA, 19 nt, Homo sapiens
  misc_RNA (1)...(19): siRNA sense strand
agaaguggagaguggaaaa

SEQ ID NO: 2300697 - RNA, 19 nt, Homo sapiens
  misc_RNA (1)...(19): siRNA sense strand
ggcccuuaugugaaagaaa

SEQ ID NO: 2300698 - RNA, 19 nt, Homo sapiens
  misc_RNA (1)...(19): siRNA sense strand
ugggcauuguggagauaau

SEQ ID NO: 2300699 - RNA, 19 nt, Homo sapiens
  misc_RNA (1)...(19): siRNA sense strand
caaccauauccaucaacaa

SEQ ID NO: 2300700 - RNA, 19 nt, Homo sapiens
  misc_RNA (1)...(19): siRNA sense strand
ccgccauguuuuauacaaa

SEQ ID NO: 2300701 - RNA, 19 nt, Homo sapiens
  misc_RNA (1)...(19): siRNA sense strand
guauauggacagagcugca

SEQ ID NO: 2300702 - RNA, 19 nt, Homo sapiens
  misc_RNA (1)...(19): siRNA sense strand
agcaagaauucccuggauu

SEQ ID NO: 2300703 - RNA, 19 nt, Homo sapiens
  misc_RNA (1)...(19): siRNA sense strand
cgggagaagaaccgaggca

SEQ ID NO: 2300704 - RNA, 19 nt, Homo sapiens
  misc_RNA (1)...(19): siRNA sense strand
gcauuguggagauaaucaa

SEQ ID NO: 2300705 - RNA, 19 nt, Homo sapiens
  misc_RNA (1)...(19): siRNA sense strand
gcgaaaguauccaggcccu

SEQ ID NO: 2300706 - RNA, 19 nt, Homo sapiens
  misc_RNA (1)...(19): siRNA sense strand
auacaaaccgaguccucaa

SEQ ID NO: 2300707 - RNA, 19 nt, Homo sapiens
  misc_RNA (1)...(19): siRNA sense strand
ccacaaagaaggagccagc

SEQ ID NO: 2300708 - RNA, 19 nt, Homo sapiens
  misc_RNA (1)...(19): siRNA sense strand
acacagagcugaaacaggu

SEQ ID NO: 2300709 - RNA, 19 nt, Homo sapiens
  misc_RNA (1)...(19): siRNA sense strand
gugaaauagucagugccaa

SEQ ID NO: 2300710 - RNA, 19 nt, Homo sapiens
  misc_RNA (1)...(19): siRNA sense strand
cugcagaaauuauggccua

SEQ ID NO: 2300711 - RNA, 19 nt, Homo sapiens
  misc_RNA (1)...(19): siRNA sense strand
ggaaagaaauggagagugg

SEQ ID NO: 2300712 - RNA, 19 nt, Homo sapiens
  misc_RNA (1)...(19): siRNA sense strand
ucuuaaaggacuacaaaca

SEQ ID NO: 2300713 - RNA, 19 nt, Homo sapiens
  misc_RNA (1)...(19): siRNA sense strand
cagauaaaagggaaaguaa

SEQ ID NO: 2300714 - RNA, 19 nt, Homo sapiens
  misc_RNA (1)...(19): siRNA sense strand
gcauuguggaagugaucaa

SEQ ID NO: 2300715 - RNA, 19 nt, Homo sapiens
  misc_RNA (1)...(19): siRNA sense strand
ccaaacuuucagagagaga

SEQ ID NO: 2300716 - RNA, 19 nt, Homo sapiens
  misc_RNA (1)...(19): siRNA sense strand
agggagaagcaauuacaaa

SEQ ID NO: 2300717 - RNA, 19 nt, Homo sapiens
  misc_RNA (1)...(19): siRNA sense strand
auccaaacuuucagagaga

SEQ ID NO: 2300718 - RNA, 19 nt, Homo sapiens
  misc_RNA (1)...(19): siRNA sense strand
ggaaggaaagaaauggaga

SEQ ID NO: 2300719 - RNA, 19 nt, Homo sapiens
  misc_RNA (1)...(19): siRNA sense strand
agcugaaacaaguggcuua

SEQ ID NO: 2300720 - RNA, 19 nt, Homo sapiens
  misc_RNA (1)...(19): siRNA sense strand
uugacaauguggugggcau

SEQ ID NO: 2300721 - RNA, 19 nt, Homo sapiens
  misc_RNA (1)...(19): siRNA sense strand
ccguggaagccuuugacaa

SEQ ID NO: 2300722 - RNA, 19 nt, Homo sapiens
  misc_RNA (1)...(19): siRNA sense strand
cgucauguggauuggguga

SEQ ID NO: 2300723 - RNA, 19 nt, Homo sapiens
  misc_RNA (1)...(19): siRNA sense strand
cugaaacccauaucggaaa

SEQ ID NO: 2300724 - RNA, 19 nt, Homo sapiens
  misc_RNA (1)...(19): siRNA sense strand
acauucaaauccagguaau

SEQ ID NO: 2300725 - RNA, 19 nt, Homo sapiens
  misc_RNA (1)...(19): siRNA sense strand
gcgccaagucaucugaaau

SEQ ID NO: 2300726 - RNA, 19 nt, Homo sapiens
  misc_RNA (1)...(19): siRNA sense strand
gggugaagucauauuugaa

SEQ ID NO: 2300727 - RNA, 19 nt, Homo sapiens
  misc_RNA (1)...(19): siRNA sense strand
acagaugaccagaagacau

SEQ ID NO: 2300728 - RNA, 19 nt, Homo sapiens
  misc_RNA (1)...(19): siRNA sense strand
ucggaaaagauucaggaaa

SEQ ID NO: 2300729 - RNA, 19 nt, Homo sapiens
  misc_RNA (1)...(19): siRNA sense strand
augucaaggagaugaauga

SEQ ID NO: 2300730 - RNA, 19 nt, Homo sapiens
  misc_RNA (1)...(19): siRNA sense strand
guucaagacagcaugggau

SEQ ID NO: 2300731 - RNA, 19 nt, Homo sapiens
  misc_RNA (1)...(19): siRNA sense strand
ccaacaaccccacgagaau

SEQ ID NO: 2300732 - RNA, 19 nt, Homo sapiens
  misc_RNA (1)...(19): siRNA sense strand
ccuugugauuucagagacu

SEQ ID NO: 2300733 - RNA, 19 nt, Homo sapiens
  misc_RNA (1)...(19): siRNA sense strand
cguggagacccaugcagaa

SEQ ID NO: 2300734 - RNA, 19 nt, Homo sapiens
  misc_RNA (1)...(19): siRNA sense strand
caguaugguggccgaguuu

SEQ ID NO: 2300735 - RNA, 19 nt, Homo sapiens
  misc_RNA (1)...(19): siRNA sense strand
ucugaaacccauaucggaa

SEQ ID NO: 2300736 - RNA, 19 nt, Homo sapiens
  misc_RNA (1)...(19): siRNA sense strand
ugaucaacucccaggacau

SEQ ID NO: 2300737 - RNA, 19 nt, Homo sapiens
  misc_RNA (1)...(19): siRNA sense strand
guggagacccaugcagaaa

SEQ ID NO: 2300738 - RNA, 19 nt, Homo sapiens
  misc_RNA (1)...(19): siRNA sense strand
acagggucuuaaaggacua

SEQ ID NO: 2300739 - RNA, 19 nt, Homo sapiens
  misc_RNA (1)...(19): siRNA sense strand
cccucaggauggugauuau

SEQ ID NO: 2300740 - RNA, 19 nt, Homo sapiens
  misc_RNA (1)...(19): siRNA sense strand
gaccagaagacauacaaaa

SEQ ID NO: 2300741 - RNA, 19 nt, Homo sapiens
  misc_RNA (1)...(19): siRNA sense strand
aguaccaagaggacaggaa

SEQ ID NO: 2300742 - RNA, 19 nt, Homo sapiens
  misc_RNA (1)...(19): siRNA sense strand
gauaaaagggaaaguaaac

SEQ ID NO: 2300743 - RNA, 19 nt, Homo sapiens
  misc_RNA (1)...(19): siRNA sense strand
cugaagucuuggagagaau

SEQ ID NO: 2300744 - RNA, 19 nt, Homo sapiens
  misc_RNA (1)...(19): siRNA sense strand
cuggaauggucguuggaga

SEQ ID NO: 2300745 - RNA, 19 nt, Homo sapiens
  misc_RNA (1)...(19): siRNA sense strand
agauagaaggauaugaaga

SEQ ID NO: 2300746 - RNA, 19 nt, Homo sapiens
  misc_RNA (1)...(19): siRNA sense strand
cagacagcaauuagugaaa

SEQ ID NO: 2300747 - RNA, 19 nt, Homo sapiens
  misc_RNA (1)...(19): siRNA sense strand
ugugaagauagaaggauau

SEQ ID NO: 2300748 - RNA, 19 nt, Homo sapiens
  misc_RNA (1)...(19): siRNA sense strand
ggucuuaauuacagagcac

SEQ ID NO: 2300749 - RNA, 19 nt, Homo sapiens
  misc_RNA (1)...(19): siRNA sense strand
augcauuugcccaguauaa

SEQ ID NO: 2300750 - RNA, 19 nt, Homo sapiens
  misc_RNA (1)...(19): siRNA sense strand
uggaauggucguuggagau

SEQ ID NO: 2300751 - RNA, 19 nt, Homo sapiens
  misc_RNA (1)...(19): siRNA sense strand
acuauuaugaagauggcaa

SEQ ID NO: 2300752 - RNA, 19 nt, Homo sapiens
  misc_RNA (1)...(19): siRNA sense strand
cuuuaagagccuaugugaa

SEQ ID NO: 2300753 - RNA, 19 nt, Homo sapiens
  misc_RNA (1)...(19): siRNA sense strand
agaucagaguggaaguuca

SEQ ID NO: 2300754 - RNA, 19 nt, Homo sapiens
  misc_RNA (1)...(19): siRNA sense strand
gugugucggaugaggagaa

SEQ ID NO: 2300755 - RNA, 19 nt, Homo sapiens
  misc_RNA (1)...(19): siRNA sense strand
ucauagagaaugcagaaaa

SEQ ID NO: 2300756 - RNA, 19 nt, Homo sapiens
  misc_RNA (1)...(19): siRNA sense strand
ggucugaagucuuggagag

SEQ ID NO: 2300757 - RNA, 19 nt, Homo sapiens
  misc_RNA (1)...(19): siRNA sense strand
auucaaugacguucggcua

SEQ ID NO: 2300758 - RNA, 19 nt, Homo sapiens
  misc_RNA (1)...(19): siRNA sense strand
guuggagaucagaguggaa

SEQ ID NO: 2300759 - RNA, 19 nt, Homo sapiens
  misc_RNA (1)...(19): siRNA sense strand
uagaaggauaugaagauca

SEQ ID NO: 2300760 - RNA, 19 nt, Homo sapiens
  misc_RNA (1)...(19): siRNA sense strand
gagccuaugugaaagacca

SEQ ID NO: 2300761 - RNA, 19 nt, Homo sapiens
  misc_RNA (1)...(19): siRNA sense strand
aaugaguaucagacagcaa

SEQ ID NO: 2300762 - RNA, 19 nt, Homo sapiens
  misc_RNA (1)...(19): siRNA sense strand
cagcuacaagauuggcaaa

SEQ ID NO: 2300763 - RNA, 19 nt, Homo sapiens
  misc_RNA (1)...(19): siRNA sense strand
uggcaaagaaaugcagaau

SEQ ID NO: 2300764 - RNA, 19 nt, Homo sapiens
  misc_RNA (1)...(19): siRNA sense strand
ccacuuacggaaagaagca

SEQ ID NO: 2300765 - RNA, 19 nt, Homo sapiens
  misc_RNA (1)...(19): siRNA sense strand
ugacaaucuccucagggaa

SEQ ID NO: 2300766 - RNA, 19 nt, Homo sapiens
  misc_RNA (1)...(19): siRNA sense strand
cuauuaugaagauggcaau

SEQ ID NO: 2300767 - RNA, 19 nt, Homo sapiens
  misc_RNA (1)...(19): siRNA sense strand
augaagagaaggugcguau

SEQ ID NO: 2300768 - RNA, 19 nt, Homo sapiens
  misc_RNA (1)...(19): siRNA sense strand
aggucagaauggaaguuua

SEQ ID NO: 2300769 - RNA, 19 nt, Homo sapiens
  misc_RNA (1)...(19): siRNA sense strand
gcgacuugggaaauggaaa

SEQ ID NO: 2300770 - RNA, 19 nt, Homo sapiens
  misc_RNA (1)...(19): siRNA sense strand
gaacauggcgacuugggaa

SEQ ID NO: 2300771 - RNA, 19 nt, Homo sapiens
  misc_RNA (1)...(19): siRNA sense strand
ggucguuggaggucagaau

SEQ ID NO: 2300772 - RNA, 19 nt, Homo sapiens
  misc_RNA (1)...(19): siRNA sense strand
agugagaauuaucagacaa

SEQ ID NO: 2300773 - RNA, 19 nt, Homo sapiens
  misc_RNA (1)...(19): siRNA sense strand
agaaaaugcaguugaauca

SEQ ID NO: 2300774 - RNA, 19 nt, Homo sapiens
  misc_RNA (1)...(19): siRNA sense strand
ugacaaucuucucagggaa

SEQ ID NO: 2300775 - RNA, 19 nt, Homo sapiens
  misc_RNA (1)...(19): siRNA sense strand
cugccaucagugagaauua

SEQ ID NO: 2300776 - RNA, 19 nt, Homo sapiens
  misc_RNA (1)...(19): siRNA sense strand
gugagaauuaucagacaau

SEQ ID NO: 2300777 - RNA, 19 nt, Homo sapiens
  misc_RNA (1)...(19): siRNA sense strand
uggagaauuuaaugagguu

SEQ ID NO: 2300778 - RNA, 19 nt, Homo sapiens
  misc_RNA (1)...(19): siRNA sense strand
gguauugauaacagaacau

SEQ ID NO: 2300779 - RNA, 19 nt, Homo sapiens
  misc_RNA (1)...(19): siRNA sense strand
acuaagauugauuggaaca

SEQ ID NO: 2300780 - RNA, 19 nt, Homo sapiens
  misc_RNA (1)...(19): siRNA sense strand
auguucagcuagugaguca

SEQ ID NO: 2300781 - RNA, 19 nt, Homo sapiens
  misc_RNA (1)...(19): siRNA sense strand
gugcaaacagcaaaagaau

SEQ ID NO: 2300782 - RNA, 19 nt, Homo sapiens
  misc_RNA (1)...(19): siRNA sense strand
gguuaugaagaucagguau

SEQ ID NO: 2300783 - RNA, 19 nt, Homo sapiens
  misc_RNA (1)...(19): siRNA sense strand
agguauugauaacagaaca

SEQ ID NO: 2300784 - RNA, 19 nt, Homo sapiens
  misc_RNA (1)...(19): siRNA sense strand
aguagaaaaugcaguugaa

SEQ ID NO: 2300785 - RNA, 19 nt, Homo sapiens
  misc_RNA (1)...(19): siRNA sense strand
ucagaauggaaguuuacaa

SEQ ID NO: 2300786 - RNA, 19 nt, Homo sapiens
  misc_RNA (1)...(19): siRNA sense strand
uuguagaagcugcagaaaa

SEQ ID NO: 2300787 - RNA, 19 nt, Homo sapiens
  misc_RNA (1)...(19): siRNA sense strand
aggcuauccgguugagaaa

SEQ ID NO: 2300788 - RNA, 19 nt, Homo sapiens
  misc_RNA (1)...(19): siRNA sense strand
uggaugaugaugagggaga

SEQ ID NO: 2300789 - RNA, 19 nt, Homo sapiens
  misc_RNA (1)...(19): siRNA sense strand
aguugaacgaccugaagaa

SEQ ID NO: 2300790 - RNA, 19 nt, Homo sapiens
  misc_RNA (1)...(19): siRNA sense strand
augaagaggaacauggcau

SEQ ID NO: 2300791 - RNA, 19 nt, Homo sapiens
  misc_RNA (1)...(19): siRNA sense strand
uggaauauguggaugaccu

SEQ ID NO: 2300792 - RNA, 19 nt, Homo sapiens
  misc_RNA (1)...(19): siRNA sense strand
acauuaaagaccuggaaac

SEQ ID NO: 2300793 - RNA, 19 nt, Homo sapiens
  misc_RNA (1)...(19): siRNA sense strand
guugagaaauuuguggcua

SEQ ID NO: 2300794 - RNA, 19 nt, Homo sapiens
  misc_RNA (1)...(19): siRNA sense strand
agaagaagugguugggcua

SEQ ID NO: 2300795 - RNA, 19 nt, Homo sapiens
  misc_RNA (1)...(19): siRNA sense strand
aggaagaagaagaaacaga

SEQ ID NO: 2300796 - RNA, 19 nt, Homo sapiens
  misc_RNA (1)...(19): siRNA sense strand
agcuaaucccucugagaaa

SEQ ID NO: 2300797 - RNA, 19 nt, Homo sapiens
  misc_RNA (1)...(19): siRNA sense strand
caauccaagaagaggaaga

SEQ ID NO: 2300798 - RNA, 19 nt, Homo sapiens
  misc_RNA (1)...(19): siRNA sense strand
ccaggaaguguuuggucaa

SEQ ID NO: 2300799 - RNA, 19 nt, Homo sapiens
  misc_RNA (1)...(19): siRNA sense strand
guugagaaugaauggaaaa

SEQ ID NO: 2300800 - RNA, 19 nt, Homo sapiens
  misc_RNA (1)...(19): siRNA sense strand
uccaagaagaggaagaaga

SEQ ID NO: 2300801 - RNA, 19 nt, Homo sapiens
  misc_RNA (1)...(19): siRNA sense strand
cuggcaucguugagaauga

SEQ ID NO: 2300802 - RNA, 19 nt, Homo sapiens
  misc_RNA (1)...(19): siRNA sense strand
aagaagaagugguugggcu

SEQ ID NO: 2300803 - RNA, 19 nt, Homo sapiens
  misc_RNA (1)...(19): siRNA sense strand
agaagaagugguugggcua

SEQ ID NO: 2300804 - RNA, 19 nt, Homo sapiens
  misc_RNA (1)...(19): siRNA sense strand
aggaagaagaagaaacaga

SEQ ID NO: 2300805 - RNA, 19 nt, Homo sapiens
  misc_RNA (1)...(19): siRNA sense strand
agcuaaucccucugagaaa

SEQ ID NO: 2300806 - RNA, 19 nt, Homo sapiens
  misc_RNA (1)...(19): siRNA sense strand
caauccaagaagaggaaga

SEQ ID NO: 2300807 - RNA, 19 nt, Homo sapiens
  misc_RNA (1)...(19): siRNA sense strand
ccaggaaguguuuggucaa

SEQ ID NO: 2300808 - RNA, 19 nt, Homo sapiens
  misc_RNA (1)...(19): siRNA sense strand
guugagaaugaauggaaaa

SEQ ID NO: 2300809 - RNA, 19 nt, Homo sapiens
  misc_RNA (1)...(19): siRNA sense strand
uccaagaagaggaagaaga

SEQ ID NO: 2300810 - RNA, 19 nt, Homo sapiens
  misc_RNA (1)...(19): siRNA sense strand
cuggcaucguugagaauga

SEQ ID NO: 2300811 - RNA, 19 nt, Homo sapiens
  misc_RNA (1)...(19): siRNA sense strand
aagaagaagugguugggcu

SEQ ID NO: 2300812 - RNA, 19 nt, Homo sapiens
  misc_RNA (1)...(19): siRNA sense strand
agaagaagugguugggcua

SEQ ID NO: 2300813 - RNA, 19 nt, Homo sapiens
  misc_RNA (1)...(19): siRNA sense strand
aggaagaagaagaaacaga

SEQ ID NO: 2300814 - RNA, 19 nt, Homo sapiens
  misc_RNA (1)...(19): siRNA sense strand
agcuaaucccucugagaaa

SEQ ID NO: 2300815 - RNA, 19 nt, Homo sapiens
  misc_RNA (1)...(19): siRNA sense strand
caauccaagaagaggaaga

SEQ ID NO: 2300816 - RNA, 19 nt, Homo sapiens
  misc_RNA (1)...(19): siRNA sense strand
ccaggaaguguuuggucaa

SEQ ID NO: 2300817 - RNA, 19 nt, Homo sapiens
  misc_RNA (1)...(19): siRNA sense strand
guugagaaugaauggaaaa

SEQ ID NO: 2300818 - RNA, 19 nt, Homo sapiens
  misc_RNA (1)...(19): siRNA sense strand
uccaagaagaggaagaaga

SEQ ID NO: 2300819 - RNA, 19 nt, Homo sapiens
  misc_RNA (1)...(19): siRNA sense strand
cuggcaucguugagaauga

SEQ ID NO: 2300820 - RNA, 19 nt, Homo sapiens
  misc_RNA (1)...(19): siRNA sense strand
aagaagaagugguugggcu

SEQ ID NO: 2300821 - RNA, 19 nt, Homo sapiens
  misc_RNA (1)...(19): siRNA sense strand
cgcaagggcaagaaggaga

SEQ ID NO: 2300822 - RNA, 19 nt, Homo sapiens
  misc_RNA (1)...(19): siRNA sense strand
ucuccuuccugcagggcaa

SEQ ID NO: 2300823 - RNA, 19 nt, Homo sapiens
  misc_RNA (1)...(19): siRNA sense strand
cgaaaggaauuaaaggaga

SEQ ID NO: 2300824 - RNA, 19 nt, Homo sapiens
  misc_RNA (1)...(19): siRNA sense strand
ccaaaggagaugaugguga

SEQ ID NO: 2300825 - RNA, 19 nt, Homo sapiens
  misc_RNA (1)...(19): siRNA sense strand
auccaggagaagagggaaa

SEQ ID NO: 2300826 - RNA, 19 nt, Homo sapiens
  misc_RNA (1)...(19): siRNA sense strand
auagcagggauuagggaaa

SEQ ID NO: 2300827 - RNA, 19 nt, Homo sapiens
  misc_RNA (1)...(19): siRNA sense strand
ugggaagaagggugacaaa

SEQ ID NO: 2300828 - RNA, 19 nt, Homo sapiens
  misc_RNA (1)...(19): siRNA sense strand
gcuuggaauaccuggagaa

SEQ ID NO: 2300829 - RNA, 19 nt, Homo sapiens
  misc_RNA (1)...(19): siRNA sense strand
ggaaugacacagagugcca

SEQ ID NO: 2300830 - RNA, 19 nt, Homo sapiens
  misc_RNA (1)...(19): siRNA sense strand
aggagaagagggaaagcau

SEQ ID NO: 2300831 - RNA, 19 nt, Homo sapiens
  misc_RNA (1)...(19): siRNA sense strand
acuacaucgugcaggaaga

SEQ ID NO: 2300832 - RNA, 19 nt, Homo sapiens
  misc_RNA (1)...(19): siRNA sense strand
agagggaaagcauggcaaa

SEQ ID NO: 2300833 - RNA, 19 nt, Homo sapiens
  misc_RNA (1)...(19): siRNA sense strand
uuaaaggagaacuggguga

SEQ ID NO: 2300834 - RNA, 19 nt, Homo sapiens
  misc_RNA (1)...(19): siRNA sense strand
ccauugggaagaaggguga

SEQ ID NO: 2300835 - RNA, 19 nt, Homo sapiens
  misc_RNA (1)...(19): siRNA sense strand
ucgugcaggaagagaagaa

SEQ ID NO: 2300836 - RNA, 19 nt, Homo sapiens
  misc_RNA (1)...(19): siRNA sense strand
ugcaggaagagaagaacua

SEQ ID NO: 2300837 - RNA, 19 nt, Homo sapiens
  misc_RNA (1)...(19): siRNA sense strand
agagaagaacuacagggaa

SEQ ID NO: 2300838 - RNA, 19 nt, Homo sapiens
  misc_RNA (1)...(19): siRNA sense strand
caggaagagaagaacuaca

SEQ ID NO: 2300839 - RNA, 19 nt, Homo sapiens
  misc_RNA (1)...(19): siRNA sense strand
gauagcagggauuagggaa

SEQ ID NO: 2300840 - RNA, 19 nt, Homo sapiens
  misc_RNA (1)...(19): siRNA sense strand
aguacauguucacagacaa

SEQ ID NO: 2300841 - RNA, 19 nt, Homo sapiens
  misc_RNA (1)...(19): siRNA sense strand
uagaagaagugcuggguga

SEQ ID NO: 2300842 - RNA, 19 nt, Homo sapiens
  misc_RNA (1)...(19): siRNA sense strand
guaagaacauggugaggga

SEQ ID NO: 2300843 - RNA, 19 nt, Homo sapiens
  misc_RNA (1)...(19): siRNA sense strand
gguuugugcucaagggaca

SEQ ID NO: 2300844 - RNA, 19 nt, Homo sapiens
  misc_RNA (1)...(19): siRNA sense strand
agacagcagugaagaggca

SEQ ID NO: 2300845 - RNA, 19 nt, Homo sapiens
  misc_RNA (1)...(19): siRNA sense strand
ggagagaaguuccgccagu

SEQ ID NO: 2300846 - RNA, 19 nt, Homo sapiens
  misc_RNA (1)...(19): siRNA sense strand
caugaucagaagaagaaau

SEQ ID NO: 2300847 - RNA, 19 nt, Homo sapiens
  misc_RNA (1)...(19): siRNA sense strand
acgagguuguccagaucaa

SEQ ID NO: 2300848 - RNA, 19 nt, Homo sapiens
  misc_RNA (1)...(19): siRNA sense strand
gcugagaggucuugacgac

SEQ ID NO: 2300849 - RNA, 19 nt, Homo sapiens
  misc_RNA (1)...(19): siRNA sense strand
cccaugacuuccagagcau

SEQ ID NO: 2300850 - RNA, 19 nt, Homo sapiens
  misc_RNA (1)...(19): siRNA sense strand
gagacuuguuggaggagcu

SEQ ID NO: 2300851 - RNA, 19 nt, Homo sapiens
  misc_RNA (1)...(19): siRNA sense strand
ccuguuggucggaagaaau

SEQ ID NO: 2300852 - RNA, 19 nt, Homo sapiens
  misc_RNA (1)...(19): siRNA sense strand
aagcagaggacccggacga

SEQ ID NO: 2300853 - RNA, 19 nt, Homo sapiens
  misc_RNA (1)...(19): siRNA sense strand
gcaacuuggcugagagguc

SEQ ID NO: 2300854 - RNA, 19 nt, Homo sapiens
  misc_RNA (1)...(19): siRNA sense strand
augacaaguucaaggacaa

SEQ ID NO: 2300855 - RNA, 19 nt, Homo sapiens
  misc_RNA (1)...(19): siRNA sense strand
acgagauugccaagcauaa

SEQ ID NO: 2300856 - RNA, 19 nt, Homo sapiens
  misc_RNA (1)...(19): siRNA sense strand
cggaugaagaagcugggaa

SEQ ID NO: 2300857 - RNA, 19 nt, Homo sapiens
  misc_RNA (1)...(19): siRNA sense strand
aggauaugaaucuggagaa

SEQ ID NO: 2300858 - RNA, 19 nt, Homo sapiens
  misc_RNA (1)...(19): siRNA sense strand
aguucaaggacaagagagu

SEQ ID NO: 2300859 - RNA, 19 nt, Homo sapiens
  misc_RNA (1)...(19): siRNA sense strand
augcagauacacaaagcaa

SEQ ID NO: 2300860 - RNA, 19 nt, Homo sapiens
  misc_RNA (1)...(19): siRNA sense strand
agucagccacagaggagaa

SEQ ID NO: 2300861 - RNA, 19 nt, Homo sapiens
  misc_RNA (1)...(19): siRNA sense strand
gcgaccuaccugaggauga

SEQ ID NO: 2300862 - RNA, 19 nt, Homo sapiens
  misc_RNA (1)...(19): siRNA sense strand
aauaugagaugcuuggaga

SEQ ID NO: 2300863 - RNA, 19 nt, Homo sapiens
  misc_RNA (1)...(19): siRNA sense strand
guucgaugcguuugcacaa

SEQ ID NO: 2300864 - RNA, 19 nt, Homo sapiens
  misc_RNA (1)...(19): siRNA sense strand
ggucugggagugaaggaga

SEQ ID NO: 2300865 - RNA, 19 nt, Homo sapiens
  misc_RNA (1)...(19): siRNA sense strand
ccaucaagcagcugcacga

SEQ ID NO: 2300866 - RNA, 19 nt, Homo sapiens
  misc_RNA (1)...(19): siRNA sense strand
aagcaacaaagaacagcaa

SEQ ID NO: 2300867 - RNA, 19 nt, Homo sapiens
  misc_RNA (1)...(19): siRNA sense strand
uaugacaaguucaaggaca

SEQ ID NO: 2300868 - RNA, 19 nt, Homo sapiens
  misc_RNA (1)...(19): siRNA sense strand
ggacaagagaguggggaca

SEQ ID NO: 2300869 - RNA, 19 nt, Homo sapiens
  misc_RNA (1)...(19): siRNA sense strand
aaccaagaggacaggauau

SEQ ID NO: 2300870 - RNA, 19 nt, Homo sapiens
  misc_RNA (1)...(19): siRNA sense strand
cagcauugaugaacggaug

SEQ ID NO: 2300871 - RNA, 19 nt, Homo sapiens
  misc_RNA (1)...(19): siRNA sense strand
acaagagaguggggacaaa

SEQ ID NO: 2300872 - RNA, 19 nt, Homo sapiens
  misc_RNA (1)...(19): siRNA sense strand
cuacagaguguccugggaa

SEQ ID NO: 2300873 - RNA, 19 nt, Homo sapiens
  misc_RNA (1)...(19): siRNA sense strand
uggccacaguugaggggaa

SEQ ID NO: 2300874 - RNA, 19 nt, Homo sapiens
  misc_RNA (1)...(19): siRNA sense strand
gcaaagaacuacagggauu

SEQ ID NO: 2300875 - RNA, 19 nt, Homo sapiens
  misc_RNA (1)...(19): siRNA sense strand
cugaagaaauugagggcaa

SEQ ID NO: 2300876 - RNA, 19 nt, Homo sapiens
  misc_RNA (1)...(19): siRNA sense strand
agacaaaacuaaaggagaa

SEQ ID NO: 2300877 - RNA, 19 nt, Homo sapiens
  misc_RNA (1)...(19): siRNA sense strand
ccgacaacucacagagaaa

SEQ ID NO: 2300878 - RNA, 19 nt, Homo sapiens
  misc_RNA (1)...(19): siRNA sense strand
gcuauggaggaaagagaaa

SEQ ID NO: 2300879 - RNA, 19 nt, Homo sapiens
  misc_RNA (1)...(19): siRNA sense strand
agauaguguuggaggcuuu

SEQ ID NO: 2300880 - RNA, 19 nt, Homo sapiens
  misc_RNA (1)...(19): siRNA sense strand
gaacugaggcugugcguga

SEQ ID NO: 2300881 - RNA, 19 nt, Homo sapiens
  misc_RNA (1)...(19): siRNA sense strand
uuccagagccauagaaaua

SEQ ID NO: 2300882 - RNA, 19 nt, Homo sapiens
  misc_RNA (1)...(19): siRNA sense strand
ccaagaagcuccaggccca

SEQ ID NO: 2300883 - RNA, 19 nt, Homo sapiens
  misc_RNA (1)...(19): siRNA sense strand
agaagauguugguaggauu

SEQ ID NO: 2300884 - RNA, 19 nt, Homo sapiens
  misc_RNA (1)...(19): siRNA sense strand
guagagaaccuaacggcua

SEQ ID NO: 2300885 - RNA, 19 nt, Homo sapiens
  misc_RNA (1)...(19): siRNA sense strand
cagauaaccaggagcaaga

SEQ ID NO: 2300886 - RNA, 19 nt, Homo sapiens
  misc_RNA (1)...(19): siRNA sense strand
auaccauggcagagacaaa

SEQ ID NO: 2300887 - RNA, 19 nt, Homo sapiens
  misc_RNA (1)...(19): siRNA sense strand
aggaaguccagaaggcaaa

SEQ ID NO: 2300888 - RNA, 19 nt, Homo sapiens
  misc_RNA (1)...(19): siRNA sense strand
ggcaaaagaagcagacaua

SEQ ID NO: 2300889 - RNA, 19 nt, Homo sapiens
  misc_RNA (1)...(19): siRNA sense strand
guaaauaacaagaggacag

SEQ ID NO: 2300890 - RNA, 19 nt, Homo sapiens
  misc_RNA (1)...(19): siRNA sense strand
gugcggagacagagaccaa

SEQ ID NO: 2300891 - RNA, 19 nt, Homo sapiens
  misc_RNA (1)...(19): siRNA sense strand
gagcuauggaggaaagaga

SEQ ID NO: 2300892 - RNA, 19 nt, Homo sapiens
  misc_RNA (1)...(19): siRNA sense strand
ugaagaaauugagggcaaa

SEQ ID NO: 2300893 - RNA, 19 nt, Homo sapiens
  misc_RNA (1)...(19): siRNA sense strand
ggcaaggcacagagaggaa

SEQ ID NO: 2300894 - RNA, 19 nt, Homo sapiens
  misc_RNA (1)...(19): siRNA sense strand
aaacagucgucuagcaaca

SEQ ID NO: 2300895 - RNA, 19 nt, Homo sapiens
  misc_RNA (1)...(19): siRNA sense strand
aggaaagagaaaugagguu

SEQ ID NO: 2300896 - RNA, 19 nt, Homo sapiens
  misc_RNA (1)...(19): siRNA sense strand
ggaaaagaguacaaacaca

SEQ ID NO: 2300897 - RNA, 19 nt, Homo sapiens
  misc_RNA (1)...(19): siRNA sense strand
ggcuaugaaggaugaguua

SEQ ID NO: 2300898 - RNA, 19 nt, Homo sapiens
  misc_RNA (1)...(19): siRNA sense strand
ggaagugacaagagugcuu

SEQ ID NO: 2300899 - RNA, 19 nt, Homo sapiens
  misc_RNA (1)...(19): siRNA sense strand
cagcaguggcagaugaaga

SEQ ID NO: 2300900 - RNA, 19 nt, Homo sapiens
  misc_RNA (1)...(19): siRNA sense strand
guggacaaacugagaguga

SEQ ID NO: 2300901 - RNA, 19 nt, Homo sapiens
  misc_RNA (1)...(19): siRNA sense strand
caggaaguccagaaggcaa

SEQ ID NO: 2300902 - RNA, 19 nt, Homo sapiens
  misc_RNA (1)...(19): siRNA sense strand
ggacaaacugagagugaug

SEQ ID NO: 2300903 - RNA, 19 nt, Homo sapiens
  misc_RNA (1)...(19): siRNA sense strand
ugaucaaguuccagagcca

SEQ ID NO: 2300904 - RNA, 19 nt, Homo sapiens
  misc_RNA (1)...(19): siRNA sense strand
cuacagggauugcuggaau

SEQ ID NO: 2300905 - RNA, 19 nt, Homo sapiens
  misc_RNA (1)...(19): siRNA sense strand
gggcaauuauaugguuaaa

SEQ ID NO: 2300906 - RNA, 19 nt, Homo sapiens
  misc_RNA (1)...(19): siRNA sense strand
agauaagacuacugugagu

SEQ ID NO: 2300907 - RNA, 19 nt, Homo sapiens
  misc_RNA (1)...(19): siRNA sense strand
gcagaaagggaggaggcaa

SEQ ID NO: 2300908 - RNA, 19 nt, Homo sapiens
  misc_RNA (1)...(19): siRNA sense strand
uugcagaccaggagaauca

SEQ ID NO: 2300909 - RNA, 19 nt, Homo sapiens
  misc_RNA (1)...(19): siRNA sense strand
aggagaagacugaacaaga

SEQ ID NO: 2300910 - RNA, 19 nt, Homo sapiens
  misc_RNA (1)...(19): siRNA sense strand
ugauacagcagcagaauga

SEQ ID NO: 2300911 - RNA, 19 nt, Homo sapiens
  misc_RNA (1)...(19): siRNA sense strand
ugauguuccuggagaugaa

SEQ ID NO: 2300912 - RNA, 19 nt, Homo sapiens
  misc_RNA (1)...(19): siRNA sense strand
agaugaagagccagaauca

SEQ ID NO: 2300913 - RNA, 19 nt, Homo sapiens
  misc_RNA (1)...(19): siRNA sense strand
caaaagaagcagacauaga

SEQ ID NO: 2300914 - RNA, 19 nt, Homo sapiens
  misc_RNA (1)...(19): siRNA sense strand
uauuaugacuacugagcuu

SEQ ID NO: 2300915 - RNA, 19 nt, Homo sapiens
  misc_RNA (1)...(19): siRNA sense strand
cuucagaacauuucaguca

SEQ ID NO: 2300916 - RNA, 19 nt, Homo sapiens
  misc_RNA (1)...(19): siRNA sense strand
cagaaagggaggaggcaag

SEQ ID NO: 2300917 - RNA, 19 nt, Homo sapiens
  misc_RNA (1)...(19): siRNA sense strand
ugauguggcaauugaggaa

SEQ ID NO: 2300918 - RNA, 19 nt, Homo sapiens
  misc_RNA (1)...(19): siRNA sense strand
ccuguugcauuuagaagaa

SEQ ID NO: 2300919 - RNA, 19 nt, Homo sapiens
  misc_RNA (1)...(19): siRNA sense strand
ggauuauacaacauggaca

SEQ ID NO: 2300920 - RNA, 19 nt, Homo sapiens
  misc_RNA (1)...(19): siRNA sense strand
gagugauguuccuggagau

SEQ ID NO: 2300921 - RNA, 19 nt, Homo sapiens
  misc_RNA (1)...(19): siRNA sense strand
cugacaaggaguuagaaaa

SEQ ID NO: 2300922 - RNA, 19 nt, Homo sapiens
  misc_RNA (1)...(19): siRNA sense strand
ccacaggaaaagaguacaa

SEQ ID NO: 2300923 - RNA, 19 nt, Homo sapiens
  misc_RNA (1)...(19): siRNA sense strand
ggacaguagcacacagacu

SEQ ID NO: 2300924 - RNA, 19 nt, Homo sapiens
  misc_RNA (1)...(19): siRNA sense strand
acauagagaagcugaacca

SEQ ID NO: 2300925 - RNA, 19 nt, Homo sapiens
  misc_RNA (1)...(19): siRNA sense strand
augagaagauccuagaaca

SEQ ID NO: 2300926 - RNA, 19 nt, Homo sapiens
  misc_RNA (1)...(19): siRNA sense strand
agacaagaguggcgagcuc

SEQ ID NO: 2300927 - RNA, 19 nt, Homo sapiens
  misc_RNA (1)...(19): siRNA sense strand
uggcagagacaaacagcau

SEQ ID NO: 2300928 - RNA, 19 nt, Homo sapiens
  misc_RNA (1)...(19): siRNA sense strand
gugcgggaccugaaagaga

SEQ ID NO: 2300929 - RNA, 19 nt, Homo sapiens
  misc_RNA (1)...(19): siRNA sense strand
aagcagacauagagaagcu

SEQ ID NO: 2300930 - RNA, 19 nt, Homo sapiens
  misc_RNA (1)...(19): siRNA sense strand
uccucaaaguggcuagaaa

SEQ ID NO: 2300931 - RNA, 19 nt, Homo sapiens
  misc_RNA (1)...(19): siRNA sense strand
aagaagaucuggagggaga

SEQ ID NO: 2300932 - RNA, 19 nt, Homo sapiens
  misc_RNA (1)...(19): siRNA sense strand
uguaugaacuggacgguga

SEQ ID NO: 2300933 - RNA, 19 nt, Homo sapiens
  misc_RNA (1)...(19): siRNA sense strand
uguauaagcuggugaccga

SEQ ID NO: 2300934 - RNA, 19 nt, Homo sapiens
  misc_RNA (1)...(19): siRNA sense strand
aggcagcaauugauggcaa

SEQ ID NO: 2300935 - RNA, 19 nt, Homo sapiens
  misc_RNA (1)...(19): siRNA sense strand
gcagaaaguagcucgccaa

SEQ ID NO: 2300936 - RNA, 19 nt, Homo sapiens
  misc_RNA (1)...(19): siRNA sense strand
ggagaucaccaaaggccua

SEQ ID NO: 2300937 - RNA, 19 nt, Homo sapiens
  misc_RNA (1)...(19): siRNA sense strand
ccagagagaagcagggcca

SEQ ID NO: 2300938 - RNA, 19 nt, Homo sapiens
  misc_RNA (1)...(19): siRNA sense strand
ugaaguaucuguaugccua

SEQ ID NO: 2300939 - RNA, 19 nt, Homo sapiens
  misc_RNA (1)...(19): siRNA sense strand
acauggacaacaagcuaaa

SEQ ID NO: 2300940 - RNA, 19 nt, Homo sapiens
  misc_RNA (1)...(19): siRNA sense strand
ccaaacagauccuggaccu

SEQ ID NO: 2300941 - RNA, 19 nt, Homo sapiens
  misc_RNA (1)...(19): siRNA sense strand
aggaagaggacggagguuu

SEQ ID NO: 2300942 - RNA, 19 nt, Homo sapiens
  misc_RNA (1)...(19): siRNA sense strand
agggaggccugguggagau

SEQ ID NO: 2300943 - RNA, 19 nt, Homo sapiens
  misc_RNA (1)...(19): siRNA sense strand
gcacugaaccugaccacga

SEQ ID NO: 2300944 - RNA, 19 nt, Homo sapiens
  misc_RNA (1)...(19): siRNA sense strand
caacaugaacucagagccu

SEQ ID NO: 2300945 - RNA, 19 nt, Homo sapiens
  misc_RNA (1)...(19): siRNA sense strand
cagauggaugccagagaga

SEQ ID NO: 2300946 - RNA, 19 nt, Homo sapiens
  misc_RNA (1)...(19): siRNA sense strand
acaagaagaucuggaggga

SEQ ID NO: 2300947 - RNA, 19 nt, Homo sapiens
  misc_RNA (1)...(19): siRNA sense strand
gagguggcugagaaagaaa

SEQ ID NO: 2300948 - RNA, 19 nt, Homo sapiens
  misc_RNA (1)...(19): siRNA sense strand
gauggaugccagagagaag

SEQ ID NO: 2300949 - RNA, 19 nt, Homo sapiens
  misc_RNA (1)...(19): siRNA sense strand
gggaugaugaaguugcaga

SEQ ID NO: 2300950 - RNA, 19 nt, Homo sapiens
  misc_RNA (1)...(19): siRNA sense strand
gcucccaccacauggacaa

SEQ ID NO: 2300951 - RNA, 19 nt, Homo sapiens
  misc_RNA (1)...(19): siRNA sense strand
aagaaggcaucgaggcugu

SEQ ID NO: 2300952 - RNA, 19 nt, Homo sapiens
  misc_RNA (1)...(19): siRNA sense strand
ccaagaucccagaguggca

SEQ ID NO: 2300953 - RNA, 19 nt, Homo sapiens
  misc_RNA (1)...(19): siRNA sense strand
caaucuacuuccagcacca

SEQ ID NO: 2300954 - RNA, 19 nt, Homo sapiens
  misc_RNA (1)...(19): siRNA sense strand
aguuagacuuggagcggaa

SEQ ID NO: 2300955 - RNA, 19 nt, Homo sapiens
  misc_RNA (1)...(19): siRNA sense strand
ccgagauggagaagagcaa

SEQ ID NO: 2300956 - RNA, 19 nt, Homo sapiens
  misc_RNA (1)...(19): siRNA sense strand
ccgcaaaguuaucacggaa

SEQ ID NO: 2300957 - RNA, 19 nt, Homo sapiens
  misc_RNA (1)...(19): siRNA sense strand
ggaaaggggaggagcgcaa

SEQ ID NO: 2300958 - RNA, 19 nt, Homo sapiens
  misc_RNA (1)...(19): siRNA sense strand
aggauaaacucucgggcau

SEQ ID NO: 2300959 - RNA, 19 nt, Homo sapiens
  misc_RNA (1)...(19): siRNA sense strand
gcaaaggcaucgaccggaa

SEQ ID NO: 2300960 - RNA, 19 nt, Homo sapiens
  misc_RNA (1)...(19): siRNA sense strand
ccagaagagugaaggcagu

SEQ ID NO: 2300961 - RNA, 19 nt, Homo sapiens
  misc_RNA (1)...(19): siRNA sense strand
aggaagaggaguaugacau

SEQ ID NO: 2300962 - RNA, 19 nt, Homo sapiens
  misc_RNA (1)...(19): siRNA sense strand
gaggagaaccgcaagguca

SEQ ID NO: 2300963 - RNA, 19 nt, Homo sapiens
  misc_RNA (1)...(19): siRNA sense strand
ggauuguagaucugggaga

SEQ ID NO: 2300964 - RNA, 19 nt, Homo sapiens
  misc_RNA (1)...(19): siRNA sense strand
aggucaaagcgguggcuga

SEQ ID NO: 2300965 - RNA, 19 nt, Homo sapiens
  misc_RNA (1)...(19): siRNA sense strand
cggaggaacaggacagcga

SEQ ID NO: 2300966 - RNA, 19 nt, Homo sapiens
  misc_RNA (1)...(19): siRNA sense strand
acaucaaacugcaaagcca

SEQ ID NO: 2300967 - RNA, 19 nt, Homo sapiens
  misc_RNA (1)...(19): siRNA sense strand
cagccagcccaguggaaga

SEQ ID NO: 2300968 - RNA, 19 nt, Homo sapiens
  misc_RNA (1)...(19): siRNA sense strand
ugucuaaccugcaugguga

SEQ ID NO: 2300969 - RNA, 19 nt, Homo sapiens
  misc_RNA (1)...(19): siRNA sense strand
ucuuagaggagaaggagca

SEQ ID NO: 2300970 - RNA, 19 nt, Homo sapiens
  misc_RNA (1)...(19): siRNA sense strand
aagaagaggacgugggcuc

SEQ ID NO: 2300971 - RNA, 19 nt, Homo sapiens
  misc_RNA (1)...(19): siRNA sense strand
gggaaggaguucacggccu

SEQ ID NO: 2300972 - RNA, 19 nt, Homo sapiens
  misc_RNA (1)...(19): siRNA sense strand
uguagaucugggagaggaa

SEQ ID NO: 2300973 - RNA, 19 nt, Homo sapiens
  misc_RNA (1)...(19): siRNA sense strand
aggaguacugcaaguuuaa

SEQ ID NO: 2300974 - RNA, 19 nt, Homo sapiens
  misc_RNA (1)...(19): siRNA sense strand
cugcaaauuuucagaacca

SEQ ID NO: 2300975 - RNA, 19 nt, Homo sapiens
  misc_RNA (1)...(19): siRNA sense strand
gcagggacaaggaggcuga

SEQ ID NO: 2300976 - RNA, 19 nt, Homo sapiens
  misc_RNA (1)...(19): siRNA sense strand
ugucggugucagaggucaa

SEQ ID NO: 2300977 - RNA, 19 nt, Homo sapiens
  misc_RNA (1)...(19): siRNA sense strand
caauggaacgggaaggagu

SEQ ID NO: 2300978 - RNA, 19 nt, Homo sapiens
  misc_RNA (1)...(19): siRNA sense strand
cggagaagcuuggcaggga

SEQ ID NO: 2300979 - RNA, 19 nt, Homo sapiens
  misc_RNA (1)...(19): siRNA sense strand
ggaaacaacuucuccugga

SEQ ID NO: 2300980 - RNA, 19 nt, Homo sapiens
  misc_RNA (1)...(19): siRNA sense strand
gggacaaggaggcugaacu

SEQ ID NO: 2300981 - RNA, 19 nt, Homo sapiens
  misc_RNA (1)...(19): siRNA sense strand
caguggaagaagaggacgu

SEQ ID NO: 2300982 - RNA, 19 nt, Homo sapiens
  misc_RNA (1)...(19): siRNA sense strand
ggaaaguguaucaaagcaa

SEQ ID NO: 2300983 - RNA, 19 nt, Homo sapiens
  misc_RNA (1)...(19): siRNA sense strand
gauuagccuaugagggaaa

SEQ ID NO: 2300984 - RNA, 19 nt, Homo sapiens
  misc_RNA (1)...(19): siRNA sense strand
gaaaguguaucaaagcaaa

SEQ ID NO: 2300985 - RNA, 19 nt, Homo sapiens
  misc_RNA (1)...(19): siRNA sense strand
uguaaagaaacgugugaga

SEQ ID NO: 2300986 - RNA, 19 nt, Homo sapiens
  misc_RNA (1)...(19): siRNA sense strand
gugccugccaccugagaaa

SEQ ID NO: 2300987 - RNA, 19 nt, Homo sapiens
  misc_RNA (1)...(19): siRNA sense strand
ccuaugagggaaaguguau

SEQ ID NO: 2300988 - RNA, 19 nt, Homo sapiens
  misc_RNA (1)...(19): siRNA sense strand
uggauuagccuaugaggga

SEQ ID NO: 2300989 - RNA, 19 nt, Homo sapiens
  misc_RNA (1)...(19): siRNA sense strand
gggaaaguguaucaaagca

SEQ ID NO: 2300990 - RNA, 19 nt, Homo sapiens
  misc_RNA (1)...(19): siRNA sense strand
gagcaauaucucuguggga

SEQ ID NO: 2300991 - RNA, 19 nt, Homo sapiens
  misc_RNA (1)...(19): siRNA sense strand
ggauuucaagguugggaga

SEQ ID NO: 2300992 - RNA, 19 nt, Homo sapiens
  misc_RNA (1)...(19): siRNA sense strand
ggauuagccuaugagggaa

SEQ ID NO: 2300993 - RNA, 19 nt, Homo sapiens
  misc_RNA (1)...(19): siRNA sense strand
agcaaaguccugugaagau

SEQ ID NO: 2300994 - RNA, 19 nt, Homo sapiens
  misc_RNA (1)...(19): siRNA sense strand
ccgaggaagaggaggaaga

SEQ ID NO: 2300995 - RNA, 19 nt, Homo sapiens
  misc_RNA (1)...(19): siRNA sense strand
ggaaaguguaucaaagcaa

SEQ ID NO: 2300996 - RNA, 19 nt, Homo sapiens
  misc_RNA (1)...(19): siRNA sense strand
gauuagccuaugagggaaa

SEQ ID NO: 2300997 - RNA, 19 nt, Homo sapiens
  misc_RNA (1)...(19): siRNA sense strand
gaaaguguaucaaagcaaa

SEQ ID NO: 2300998 - RNA, 19 nt, Homo sapiens
  misc_RNA (1)...(19): siRNA sense strand
uguaaagaaacgugugaga

SEQ ID NO: 2300999 - RNA, 19 nt, Homo sapiens
  misc_RNA (1)...(19): siRNA sense strand
gugccugccaccugagaaa

SEQ ID NO: 2301000 - RNA, 19 nt, Homo sapiens
  misc_RNA (1)...(19): siRNA sense strand
ccuaugagggaaaguguau

SEQ ID NO: 2301001 - RNA, 19 nt, Homo sapiens
  misc_RNA (1)...(19): siRNA sense strand
aagaggaggaagaugaaga

SEQ ID NO: 2301002 - RNA, 19 nt, Homo sapiens
  misc_RNA (1)...(19): siRNA sense strand
uggauuagccuaugaggga

SEQ ID NO: 2301003 - RNA, 19 nt, Homo sapiens
  misc_RNA (1)...(19): siRNA sense strand
acaccgaggaagaggagga

SEQ ID NO: 2301004 - RNA, 19 nt, Homo sapiens
  misc_RNA (1)...(19): siRNA sense strand
gggaaaguguaucaaagca

SEQ ID NO: 2301005 - RNA, 19 nt, Homo sapiens
  misc_RNA (1)...(19): siRNA sense strand
gagcaauaucucuguggga

SEQ ID NO: 2301006 - RNA, 19 nt, Homo sapiens
  misc_RNA (1)...(19): siRNA sense strand
ggauuucaagguugggaga

SEQ ID NO: 2301007 - RNA, 19 nt, Homo sapiens
  misc_RNA (1)...(19): siRNA sense strand
aggaggaagaugaagacca

SEQ ID NO: 2301008 - RNA, 19 nt, Homo sapiens
  misc_RNA (1)...(19): siRNA sense strand
ggauuagccuaugagggaa

SEQ ID NO: 2301009 - RNA, 19 nt, Homo sapiens
  misc_RNA (1)...(19): siRNA sense strand
ggaggaagaugaagaccag

SEQ ID NO: 2301010 - RNA, 19 nt, Homo sapiens
  misc_RNA (1)...(19): siRNA sense strand
agcaaaguccugugaagau

SEQ ID NO: 2301011 - RNA, 19 nt, Homo sapiens
  misc_RNA (1)...(19): siRNA sense strand
gcaacaagguagaugccau

SEQ ID NO: 2301012 - RNA, 19 nt, Homo sapiens
  misc_RNA (1)...(19): siRNA sense strand
gguuugaaaugcugcccaa

SEQ ID NO: 2301013 - RNA, 19 nt, Homo sapiens
  misc_RNA (1)...(19): siRNA sense strand
ggcaugaaccugcgggaga

SEQ ID NO: 2301014 - RNA, 19 nt, Homo sapiens
  misc_RNA (1)...(19): siRNA sense strand
agguaggucuccacggcaa

SEQ ID NO: 2301015 - RNA, 19 nt, Homo sapiens
  misc_RNA (1)...(19): siRNA sense strand
ggugacagcagaagaggca

SEQ ID NO: 2301016 - RNA, 19 nt, Homo sapiens
  misc_RNA (1)...(19): siRNA sense strand
agcagaagaggcagggcua

SEQ ID NO: 2301017 - RNA, 19 nt, Homo sapiens
  misc_RNA (1)...(19): siRNA sense strand
ugaacaacauggaggagcu

SEQ ID NO: 2301018 - RNA, 19 nt, Homo sapiens
  misc_RNA (1)...(19): siRNA sense strand
cccgagaucuacuggguca

SEQ ID NO: 2301019 - RNA, 19 nt, Homo sapiens
  misc_RNA (1)...(19): siRNA sense strand
gcggagggugacagcagaa

SEQ ID NO: 2301020 - RNA, 19 nt, Homo sapiens
  misc_RNA (1)...(19): siRNA sense strand
aacccgaacccgagaucua

SEQ ID NO: 2301021 - RNA, 19 nt, Homo sapiens
  misc_RNA (1)...(19): siRNA sense strand
gcaacaagguagaugccau

SEQ ID NO: 2301022 - RNA, 19 nt, Homo sapiens
  misc_RNA (1)...(19): siRNA sense strand
gguuugaaaugcugcccaa

SEQ ID NO: 2301023 - RNA, 19 nt, Homo sapiens
  misc_RNA (1)...(19): siRNA sense strand
ggcaugaaccugcgggaga

SEQ ID NO: 2301024 - RNA, 19 nt, Homo sapiens
  misc_RNA (1)...(19): siRNA sense strand
agguaggucuccacggcaa

SEQ ID NO: 2301025 - RNA, 19 nt, Homo sapiens
  misc_RNA (1)...(19): siRNA sense strand
ggugacagcagaagaggca

SEQ ID NO: 2301026 - RNA, 19 nt, Homo sapiens
  misc_RNA (1)...(19): siRNA sense strand
agcagaagaggcagggcua

SEQ ID NO: 2301027 - RNA, 19 nt, Homo sapiens
  misc_RNA (1)...(19): siRNA sense strand
ugaacaacauggaggagcu

SEQ ID NO: 2301028 - RNA, 19 nt, Homo sapiens
  misc_RNA (1)...(19): siRNA sense strand
cccgagaucuacuggguca

SEQ ID NO: 2301029 - RNA, 19 nt, Homo sapiens
  misc_RNA (1)...(19): siRNA sense strand
gcggagggugacagcagaa

SEQ ID NO: 2301030 - RNA, 19 nt, Homo sapiens
  misc_RNA (1)...(19): siRNA sense strand
aacccgaacccgagaucua

SEQ ID NO: 2301031 - RNA, 19 nt, Homo sapiens
  misc_RNA (1)...(19): siRNA sense strand
cugccaaacuccacgguga

SEQ ID NO: 2301032 - RNA, 19 nt, Homo sapiens
  misc_RNA (1)...(19): siRNA sense strand
cagagguccaagugggcaa

SEQ ID NO: 2301033 - RNA, 19 nt, Homo sapiens
  misc_RNA (1)...(19): siRNA sense strand
gagagugacuguagagccu

SEQ ID NO: 2301034 - RNA, 19 nt, Homo sapiens
  misc_RNA (1)...(19): siRNA sense strand
gcugaaggcuuuagagagc

SEQ ID NO: 2301035 - RNA, 19 nt, Homo sapiens
  misc_RNA (1)...(19): siRNA sense strand
cugcugacagagaugguaa

SEQ ID NO: 2301036 - RNA, 19 nt, Homo sapiens
  misc_RNA (1)...(19): siRNA sense strand
cggccuccuugguggaauu

SEQ ID NO: 2301037 - RNA, 19 nt, Homo sapiens
  misc_RNA (1)...(19): siRNA sense strand
ucuucuauguggugacaga

SEQ ID NO: 2301038 - RNA, 19 nt, Homo sapiens
  misc_RNA (1)...(19): siRNA sense strand
ugucuuuggcccuggguau

SEQ ID NO: 2301039 - RNA, 19 nt, Homo sapiens
  misc_RNA (1)...(19): siRNA sense strand
gcugauggcuggauuggga

SEQ ID NO: 2301040 - RNA, 19 nt, Homo sapiens
  misc_RNA (1)...(19): siRNA sense strand
acuccuaagcucaggcaca

SEQ ID NO: 2301041 - RNA, 19 nt, Homo sapiens
  misc_RNA (1)...(19): siRNA sense strand
cuguguggcucaaugucaa

SEQ ID NO: 2301042 - RNA, 19 nt, Homo sapiens
  misc_RNA (1)...(19): siRNA sense strand
agguagaagugaaggagau

SEQ ID NO: 2301043 - RNA, 19 nt, Homo sapiens
  misc_RNA (1)...(19): siRNA sense strand
acacagggaaagagggcaa

SEQ ID NO: 2301044 - RNA, 19 nt, Homo sapiens
  misc_RNA (1)...(19): siRNA sense strand
gcuugagacacuagacaaa

SEQ ID NO: 2301045 - RNA, 19 nt, Homo sapiens
  misc_RNA (1)...(19): siRNA sense strand
uggccaagguagugguaca

SEQ ID NO: 2301046 - RNA, 19 nt, Homo sapiens
  misc_RNA (1)...(19): siRNA sense strand
gcucagaaauuguugacca

SEQ ID NO: 2301047 - RNA, 19 nt, Homo sapiens
  misc_RNA (1)...(19): siRNA sense strand
ugguggaagcucagaaauu

SEQ ID NO: 2301048 - RNA, 19 nt, Homo sapiens
  misc_RNA (1)...(19): siRNA sense strand
gguagagaagcuugagaca

SEQ ID NO: 2301049 - RNA, 19 nt, Homo sapiens
  misc_RNA (1)...(19): siRNA sense strand
gcucaacuggagaggguuu

SEQ ID NO: 2301050 - RNA, 19 nt, Homo sapiens
  misc_RNA (1)...(19): siRNA sense strand
aagugaaggagauggaaaa

SEQ ID NO: 2301051 - RNA, 19 nt, Homo sapiens
  misc_RNA (1)...(19): siRNA sense strand
cgucugugguucagcucaa

SEQ ID NO: 2301052 - RNA, 19 nt, Homo sapiens
  misc_RNA (1)...(19): siRNA sense strand
acacaaacacagggaaaga

SEQ ID NO: 2301053 - RNA, 19 nt, Homo sapiens
  misc_RNA (1)...(19): siRNA sense strand
ccacacuucaggugcuaaa

SEQ ID NO: 2301054 - RNA, 19 nt, Homo sapiens
  misc_RNA (1)...(19): siRNA sense strand
cgaauugacaucauggaga

SEQ ID NO: 2301055 - RNA, 19 nt, Homo sapiens
  misc_RNA (1)...(19): siRNA sense strand
uggagguggagauaagaaa

SEQ ID NO: 2301056 - RNA, 19 nt, Homo sapiens
  misc_RNA (1)...(19): siRNA sense strand
agggaaagagggcaaacua

SEQ ID NO: 2301057 - RNA, 19 nt, Homo sapiens
  misc_RNA (1)...(19): siRNA sense strand
agguagugguacagcaguu

SEQ ID NO: 2301058 - RNA, 19 nt, Homo sapiens
  misc_RNA (1)...(19): siRNA sense strand
augggagacuguuggagua

SEQ ID NO: 2301059 - RNA, 19 nt, Homo sapiens
  misc_RNA (1)...(19): siRNA sense strand
auugaauacagaugggaga

SEQ ID NO: 2301060 - RNA, 19 nt, Homo sapiens
  misc_RNA (1)...(19): siRNA sense strand
gcggaucaccuauggccaa

SEQ ID NO: 2301061 - RNA, 19 nt, Homo sapiens
  misc_RNA (1)...(19): siRNA sense strand
cagcucaacuggagagggu

SEQ ID NO: 2301062 - RNA, 19 nt, Homo sapiens
  misc_RNA (1)...(19): siRNA sense strand
uggccaagcugcaggggau

SEQ ID NO: 2301063 - RNA, 19 nt, Homo sapiens
  misc_RNA (1)...(19): siRNA sense strand
uggacagaguggaacgcuu

SEQ ID NO: 2301064 - RNA, 19 nt, Homo sapiens
  misc_RNA (1)...(19): siRNA sense strand
cagcaguuuacaacaacaa

SEQ ID NO: 2301065 - RNA, 19 nt, Homo sapiens
  misc_RNA (1)...(19): siRNA sense strand
gcaaacuagacauuguaau

SEQ ID NO: 2301066 - RNA, 19 nt, Homo sapiens
  misc_RNA (1)...(19): siRNA sense strand
uguacaacacacuggauga

SEQ ID NO: 2301067 - RNA, 19 nt, Homo sapiens
  misc_RNA (1)...(19): siRNA sense strand
gcucugaagaccaagcuga

SEQ ID NO: 2301068 - RNA, 19 nt, Homo sapiens
  misc_RNA (1)...(19): siRNA sense strand
caguauaaaccaucugcuu

SEQ ID NO: 2301069 - RNA, 19 nt, Homo sapiens
  misc_RNA (1)...(19): siRNA sense strand
ccugaagaugucugugaaa

SEQ ID NO: 2301070 - RNA, 19 nt, Homo sapiens
  misc_RNA (1)...(19): siRNA sense strand
gaauaugguuugugcugga

SEQ ID NO: 2301071 - RNA, 19 nt, Homo sapiens
  misc_RNA (1)...(19): siRNA sense strand
guggaagagacucgugcaa

SEQ ID NO: 2301072 - RNA, 19 nt, Homo sapiens
  misc_RNA (1)...(19): siRNA sense strand
gcuuguuaagaaagaguuu

SEQ ID NO: 2301073 - RNA, 19 nt, Homo sapiens
  misc_RNA (1)...(19): siRNA sense strand
cuaucaagggagcaguuua

SEQ ID NO: 2301074 - RNA, 19 nt, Homo sapiens
  misc_RNA (1)...(19): siRNA sense strand
ucucaaagaaacaccucaa

SEQ ID NO: 2301075 - RNA, 19 nt, Homo sapiens
  misc_RNA (1)...(19): siRNA sense strand
aaauaaaugcggagacccu

SEQ ID NO: 2301076 - RNA, 19 nt, Homo sapiens
  misc_RNA (1)...(19): siRNA sense strand
ugaccugggaagagaagaa

SEQ ID NO: 2301077 - RNA, 19 nt, Homo sapiens
  misc_RNA (1)...(19): siRNA sense strand
aggaagagcugaacccuga

SEQ ID NO: 2301078 - RNA, 19 nt, Homo sapiens
  misc_RNA (1)...(19): siRNA sense strand
gagccgagauguucgccaa

SEQ ID NO: 2301079 - RNA, 19 nt, Homo sapiens
  misc_RNA (1)...(19): siRNA sense strand
cggagacguacgagcggua

SEQ ID NO: 2301080 - RNA, 19 nt, Homo sapiens
  misc_RNA (1)...(19): siRNA sense strand
ggggacagcagcagagaca

SEQ ID NO: 2301081 - RNA, 19 nt, Homo sapiens
  misc_RNA (1)...(19): siRNA sense strand
gcgaagaggaguggggaca

SEQ ID NO: 2301082 - RNA, 19 nt, Homo sapiens
  misc_RNA (1)...(19): siRNA sense strand
cguccaagaagaagcggca

SEQ ID NO: 2301083 - RNA, 19 nt, Homo sapiens
  misc_RNA (1)...(19): siRNA sense strand
gggcgagaagggccagaau

SEQ ID NO: 2301084 - RNA, 19 nt, Homo sapiens
  misc_RNA (1)...(19): siRNA sense strand
ccaaggauaucgaaggcuu

SEQ ID NO: 2301085 - RNA, 19 nt, Homo sapiens
  misc_RNA (1)...(19): siRNA sense strand
uggauggagccaaggauau

SEQ ID NO: 2301086 - RNA, 19 nt, Homo sapiens
  misc_RNA (1)...(19): siRNA sense strand
gggucaaagagaagaaggu

SEQ ID NO: 2301087 - RNA, 19 nt, Homo sapiens
  misc_RNA (1)...(19): siRNA sense strand
gcuaacaaguucaucacca

SEQ ID NO: 2301088 - RNA, 19 nt, Homo sapiens
  misc_RNA (1)...(19): siRNA sense strand
gcaagaaacgcauuccgua

SEQ ID NO: 2301089 - RNA, 19 nt, Homo sapiens
  misc_RNA (1)...(19): siRNA sense strand
aguucaucaccaaggacaa

SEQ ID NO: 2301090 - RNA, 19 nt, Homo sapiens
  misc_RNA (1)...(19): siRNA sense strand
aaggugaagaacagcgcua

SEQ ID NO: 2301091 - RNA, 19 nt, Homo sapiens
  misc_RNA (1)...(19): siRNA sense strand
augaagaagaugaggaaga

SEQ ID NO: 2301092 - RNA, 19 nt, Homo sapiens
  misc_RNA (1)...(19): siRNA sense strand
cucaauaagagcagagaau

SEQ ID NO: 2301093 - RNA, 19 nt, Homo sapiens
  misc_RNA (1)...(19): siRNA sense strand
agaccaugaccgugagcaa

SEQ ID NO: 2301094 - RNA, 19 nt, Homo sapiens
  misc_RNA (1)...(19): siRNA sense strand
aagaauggccagaugggaa

SEQ ID NO: 2301095 - RNA, 19 nt, Homo sapiens
  misc_RNA (1)...(19): siRNA sense strand
aggauaaugauguggauga

SEQ ID NO: 2301096 - RNA, 19 nt, Homo sapiens
  misc_RNA (1)...(19): siRNA sense strand
gggcagaccaugaccguga

SEQ ID NO: 2301097 - RNA, 19 nt, Homo sapiens
  misc_RNA (1)...(19): siRNA sense strand
aggaagaugagcuggauca

SEQ ID NO: 2301098 - RNA, 19 nt, Homo sapiens
  misc_RNA (1)...(19): siRNA sense strand
cucaacaagaagaggaaaa

SEQ ID NO: 2301099 - RNA, 19 nt, Homo sapiens
  misc_RNA (1)...(19): siRNA sense strand
gggaaggaguacgggcaga

SEQ ID NO: 2301100 - RNA, 19 nt, Homo sapiens
  misc_RNA (1)...(19): siRNA sense strand
ggucaaauucccagguccu

SEQ ID NO: 2301101 - RNA, 19 nt, Homo sapiens
  misc_RNA (1)...(19): siRNA sense strand
aggauaacaucguugcuca

SEQ ID NO: 2301102 - RNA, 19 nt, Homo sapiens
  misc_RNA (1)...(19): siRNA sense strand
cuacuuaugcuuuggggaa

SEQ ID NO: 2301103 - RNA, 19 nt, Homo sapiens
  misc_RNA (1)...(19): siRNA sense strand
cgucauggacagaggacug

SEQ ID NO: 2301104 - RNA, 19 nt, Homo sapiens
  misc_RNA (1)...(19): siRNA sense strand
uuaccaaugagaagcagaa

SEQ ID NO: 2301105 - RNA, 19 nt, Homo sapiens
  misc_RNA (1)...(19): siRNA sense strand
ccuuauagauagcugggua

SEQ ID NO: 2301106 - RNA, 19 nt, Homo sapiens
  misc_RNA (1)...(19): siRNA sense strand
ccaucgaaggcgaagggaa

SEQ ID NO: 2301107 - RNA, 19 nt, Homo sapiens
  misc_RNA (1)...(19): siRNA sense strand
caucgaaggcgaagggaac

SEQ ID NO: 2301108 - RNA, 19 nt, Homo sapiens
  misc_RNA (1)...(19): siRNA sense strand
gugcagagguggaugaggu

SEQ ID NO: 2301109 - RNA, 19 nt, Homo sapiens
  misc_RNA (1)...(19): siRNA sense strand
cuguuuggccagaagcaua

SEQ ID NO: 2301110 - RNA, 19 nt, Homo sapiens
  misc_RNA (1)...(19): siRNA sense strand
aagacuaucagcugggauu

SEQ ID NO: 2301111 - RNA, 19 nt, Homo sapiens
  misc_RNA (1)...(19): siRNA sense strand
gugcuuuggagaacagaau

SEQ ID NO: 2301112 - RNA, 19 nt, Homo sapiens
  misc_RNA (1)...(19): siRNA sense strand
acaucgugaucaacgcaaa

SEQ ID NO: 2301113 - RNA, 19 nt, Homo sapiens
  misc_RNA (1)...(19): siRNA sense strand
gauucaaacaccagaugca

SEQ ID NO: 2301114 - RNA, 19 nt, Homo sapiens
  misc_RNA (1)...(19): siRNA sense strand
cagagguggaugaggucuu

SEQ ID NO: 2301115 - RNA, 19 nt, Homo sapiens
  misc_RNA (1)...(19): siRNA sense strand
uggaagaaugugccgaaga

SEQ ID NO: 2301116 - RNA, 19 nt, Homo sapiens
  misc_RNA (1)...(19): siRNA sense strand
acgugcaggaagagucuaa

SEQ ID NO: 2301117 - RNA, 19 nt, Homo sapiens
  misc_RNA (1)...(19): siRNA sense strand
gcggaugagcccacgacuu

SEQ ID NO: 2301118 - RNA, 19 nt, Homo sapiens
  misc_RNA (1)...(19): siRNA sense strand
cggucaagagcgugccuga

SEQ ID NO: 2301119 - RNA, 19 nt, Homo sapiens
  misc_RNA (1)...(19): siRNA sense strand
ggaauagguuugaagagga

SEQ ID NO: 2301120 - RNA, 19 nt, Homo sapiens
  misc_RNA (1)...(19): siRNA sense strand
cccuagaacagcaggaaga

SEQ ID NO: 2301121 - RNA, 19 nt, Homo sapiens
  misc_RNA (1)...(19): siRNA sense strand
uggucauguuggcgagcua

SEQ ID NO: 2301122 - RNA, 19 nt, Homo sapiens
  misc_RNA (1)...(19): siRNA sense strand
acaaccgcguagugagcaa

SEQ ID NO: 2301123 - RNA, 19 nt, Homo sapiens
  misc_RNA (1)...(19): siRNA sense strand
ggucuuuguguuuggcauu

SEQ ID NO: 2301124 - RNA, 19 nt, Homo sapiens
  misc_RNA (1)...(19): siRNA sense strand
gagaauaaaauggaaggaa

SEQ ID NO: 2301125 - RNA, 19 nt, Homo sapiens
  misc_RNA (1)...(19): siRNA sense strand
agucagagcuggaugagga

SEQ ID NO: 2301126 - RNA, 19 nt, Homo sapiens
  misc_RNA (1)...(19): siRNA sense strand
gcgacaaggucauugagga

SEQ ID NO: 2301127 - RNA, 19 nt, Homo sapiens
  misc_RNA (1)...(19): siRNA sense strand
aggcugacuuggacgguga

SEQ ID NO: 2301128 - RNA, 19 nt, Homo sapiens
  misc_RNA (1)...(19): siRNA sense strand
uugcugacuucgaggacau

SEQ ID NO: 2301129 - RNA, 19 nt, Homo sapiens
  misc_RNA (1)...(19): siRNA sense strand
cgacaaggucauugaggag

SEQ ID NO: 2301130 - RNA, 19 nt, Homo sapiens
  misc_RNA (1)...(19): siRNA sense strand
ccgaggauggugaggggaa

SEQ ID NO: 2301131 - RNA, 19 nt, Homo sapiens
  misc_RNA (1)...(19): siRNA sense strand
gggaacaagcagaccaucu

SEQ ID NO: 2301132 - RNA, 19 nt, Homo sapiens
  misc_RNA (1)...(19): siRNA sense strand
cugacaacuucaucugcaa

SEQ ID NO: 2301133 - RNA, 19 nt, Homo sapiens
  misc_RNA (1)...(19): siRNA sense strand
gggcaaagguuucagcgua

SEQ ID NO: 2301134 - RNA, 19 nt, Homo sapiens
  misc_RNA (1)...(19): siRNA sense strand
ggaccagaucaguaauaua

SEQ ID NO: 2301135 - RNA, 19 nt, Homo sapiens
  misc_RNA (1)...(19): siRNA sense strand
ugaagaacuacaagggcua

SEQ ID NO: 2301136 - RNA, 19 nt, Homo sapiens
  misc_RNA (1)...(19): siRNA sense strand
ccaacuacguggaggccau

SEQ ID NO: 2301137 - RNA, 19 nt, Homo sapiens
  misc_RNA (1)...(19): siRNA sense strand
uugagaagaacaagggcaa

SEQ ID NO: 2301138 - RNA, 19 nt, Homo sapiens
  misc_RNA (1)...(19): siRNA sense strand
aggugaacugucuggauaa

SEQ ID NO: 2301139 - RNA, 19 nt, Homo sapiens
  misc_RNA (1)...(19): siRNA sense strand
gaccagaucaguaauauaa

SEQ ID NO: 2301140 - RNA, 19 nt, Homo sapiens
  misc_RNA (1)...(19): siRNA sense strand
ucaagaagacccaggacca

SEQ ID NO: 2301141 - RNA, 19 nt, Homo sapiens
  misc_RNA (1)...(19): siRNA sense strand
gccucaagcaacagaguga

SEQ ID NO: 2301142 - RNA, 19 nt, Homo sapiens
  misc_RNA (1)...(19): siRNA sense strand
acaagggcuacgagaagaa

SEQ ID NO: 2301143 - RNA, 19 nt, Homo sapiens
  misc_RNA (1)...(19): siRNA sense strand
aggaguuugagaagaacaa

SEQ ID NO: 2301144 - RNA, 19 nt, Homo sapiens
  misc_RNA (1)...(19): siRNA sense strand
acuacaagggcuacgagaa

SEQ ID NO: 2301145 - RNA, 19 nt, Homo sapiens
  misc_RNA (1)...(19): siRNA sense strand
gcuacgagaagaagcccua

SEQ ID NO: 2301146 - RNA, 19 nt, Homo sapiens
  misc_RNA (1)...(19): siRNA sense strand
guuucagcguaguggcaga

SEQ ID NO: 2301147 - RNA, 19 nt, Homo sapiens
  misc_RNA (1)...(19): siRNA sense strand
ggcaaagguuucagcguag

SEQ ID NO: 2301148 - RNA, 19 nt, Homo sapiens
  misc_RNA (1)...(19): siRNA sense strand
gcuucaagguuuacgccaa

SEQ ID NO: 2301149 - RNA, 19 nt, Homo sapiens
  misc_RNA (1)...(19): siRNA sense strand
ccaucaucaucaagggcua

SEQ ID NO: 2301150 - RNA, 19 nt, Homo sapiens
  misc_RNA (1)...(19): siRNA sense strand
gaggagaggaagaggagca

SEQ ID NO: 2301151 - RNA, 19 nt, Homo sapiens
  misc_RNA (1)...(19): siRNA sense strand
ggguggacacauuggaaau

SEQ ID NO: 2301152 - RNA, 19 nt, Homo sapiens
  misc_RNA (1)...(19): siRNA sense strand
agguggugguaaauggaaa

SEQ ID NO: 2301153 - RNA, 19 nt, Homo sapiens
  misc_RNA (1)...(19): siRNA sense strand
cugaauggcucguggggau

SEQ ID NO: 2301154 - RNA, 19 nt, Homo sapiens
  misc_RNA (1)...(19): siRNA sense strand
gagaagaagaucacccaca

SEQ ID NO: 2301155 - RNA, 19 nt, Homo sapiens
  misc_RNA (1)...(19): siRNA sense strand
gguggugguaaauggaaau

SEQ ID NO: 2301156 - RNA, 19 nt, Homo sapiens
  misc_RNA (1)...(19): siRNA sense strand
gggacauagcucugcacau

SEQ ID NO: 2301157 - RNA, 19 nt, Homo sapiens
  misc_RNA (1)...(19): siRNA sense strand
cgguuugacggcugggaca

SEQ ID NO: 2301158 - RNA, 19 nt, Homo sapiens
  misc_RNA (1)...(19): siRNA sense strand
ucaaauaccuguacgggau

SEQ ID NO: 2301159 - RNA, 19 nt, Homo sapiens
  misc_RNA (1)...(19): siRNA sense strand
acaugaagaucuugcgucu

SEQ ID NO: 2301160 - RNA, 19 nt, Homo sapiens
  misc_RNA (1)...(19): siRNA sense strand
ucaaauaccuguacgggau

SEQ ID NO: 2301161 - RNA, 19 nt, Homo sapiens
  misc_RNA (1)...(19): siRNA sense strand
acaugaagaucuugcgucu

SEQ ID NO: 2301162 - RNA, 19 nt, Homo sapiens
  misc_RNA (1)...(19): siRNA sense strand
gguggugcuaauagagaua

SEQ ID NO: 2301163 - RNA, 19 nt, Homo sapiens
  misc_RNA (1)...(19): siRNA sense strand
ggauuaaacaggcagcaga

SEQ ID NO: 2301164 - RNA, 19 nt, Homo sapiens
  misc_RNA (1)...(19): siRNA sense strand
guuugauauuauugggcuu

SEQ ID NO: 2301165 - RNA, 19 nt, Homo sapiens
  misc_RNA (1)...(19): siRNA sense strand
uugaucaagaagugaagaa

SEQ ID NO: 2301166 - RNA, 19 nt, Homo sapiens
  misc_RNA (1)...(19): siRNA sense strand
guucgugucaacaggaaau

SEQ ID NO: 2301167 - RNA, 19 nt, Homo sapiens
  misc_RNA (1)...(19): siRNA sense strand
gaacauaucuuguggccau

SEQ ID NO: 2301168 - RNA, 19 nt, Homo sapiens
  misc_RNA (1)...(19): siRNA sense strand
agaaggagguggaggcaga

SEQ ID NO: 2301169 - RNA, 19 nt, Homo sapiens
  misc_RNA (1)...(19): siRNA sense strand
acccagaaauauuggaaau

SEQ ID NO: 2301170 - RNA, 19 nt, Homo sapiens
  misc_RNA (1)...(19): siRNA sense strand
uauuaaaucuggaagccaa

SEQ ID NO: 2301171 - RNA, 19 nt, Homo sapiens
  misc_RNA (1)...(19): siRNA sense strand
guaagaaagaggaggauac

SEQ ID NO: 2301172 - RNA, 19 nt, Homo sapiens
  misc_RNA (1)...(19): siRNA sense strand
ucgguuaaccuuagacaaa

SEQ ID NO: 2301173 - RNA, 19 nt, Homo sapiens
  misc_RNA (1)...(19): siRNA sense strand
guauaaaguuucuuagcca

SEQ ID NO: 2301174 - RNA, 19 nt, Homo sapiens
  misc_RNA (1)...(19): siRNA sense strand
aggaaagccggguuaguaa

SEQ ID NO: 2301175 - RNA, 19 nt, Homo sapiens
  misc_RNA (1)...(19): siRNA sense strand
acaauagcuuccugggcaa

SEQ ID NO: 2301176 - RNA, 19 nt, Homo sapiens
  misc_RNA (1)...(19): siRNA sense strand
ucuggaagccaaagaggaa

SEQ ID NO: 2301177 - RNA, 19 nt, Homo sapiens
  misc_RNA (1)...(19): siRNA sense strand
ucauuaagaagcuggagaa

SEQ ID NO: 2301178 - RNA, 19 nt, Homo sapiens
  misc_RNA (1)...(19): siRNA sense strand
accagaaacaauagaagaa

SEQ ID NO: 2301179 - RNA, 19 nt, Homo sapiens
  misc_RNA (1)...(19): siRNA sense strand
cagaaauauuggaaaugca

SEQ ID NO: 2301180 - RNA, 19 nt, Homo sapiens
  misc_RNA (1)...(19): siRNA sense strand
gggucaaagcagagugaac

SEQ ID NO: 2301181 - RNA, 19 nt, Homo sapiens
  misc_RNA (1)...(19): siRNA sense strand
aagcuggagaagaguauaa

SEQ ID NO: 2301182 - RNA, 19 nt, Homo sapiens
  misc_RNA (1)...(19): siRNA sense strand
guagaaaacuugaagagga

SEQ ID NO: 2301183 - RNA, 19 nt, Homo sapiens
  misc_RNA (1)...(19): siRNA sense strand
uggagaagaaacaguagaa

SEQ ID NO: 2301184 - RNA, 19 nt, Homo sapiens
  misc_RNA (1)...(19): siRNA sense strand
gauagaggcccaaggcaca

SEQ ID NO: 2301185 - RNA, 19 nt, Homo sapiens
  misc_RNA (1)...(19): siRNA sense strand
gaaaggacaaggaagccaa

SEQ ID NO: 2301186 - RNA, 19 nt, Homo sapiens
  misc_RNA (1)...(19): siRNA sense strand
gaaacaguagaaaggacaa

SEQ ID NO: 2301187 - RNA, 19 nt, Homo sapiens
  misc_RNA (1)...(19): siRNA sense strand
agaaacaguagaaaggaca

SEQ ID NO: 2301188 - RNA, 19 nt, Homo sapiens
  misc_RNA (1)...(19): siRNA sense strand
aagaggaaccagaaacaau

SEQ ID NO: 2301189 - RNA, 19 nt, Homo sapiens
  misc_RNA (1)...(19): siRNA sense strand
acaaccaggcacaggaaau

SEQ ID NO: 2301190 - RNA, 19 nt, Homo sapiens
  misc_RNA (1)...(19): siRNA sense strand
uagaaaacuugaagaggau

SEQ ID NO: 2301191 - RNA, 19 nt, Homo sapiens
  misc_RNA (1)...(19): siRNA sense strand
aggucaagcaguuggcgua

SEQ ID NO: 2301192 - RNA, 19 nt, Homo sapiens
  misc_RNA (1)...(19): siRNA sense strand
aaucaggaaagccggguua

SEQ ID NO: 2301193 - RNA, 19 nt, Homo sapiens
  misc_RNA (1)...(19): siRNA sense strand
ugaagaggauguaugccaa

SEQ ID NO: 2301194 - RNA, 19 nt, Homo sapiens
  misc_RNA (1)...(19): siRNA sense strand
uguaagaaagaggaggaua

SEQ ID NO: 2301195 - RNA, 19 nt, Homo sapiens
  misc_RNA (1)...(19): siRNA sense strand
ccuuagacaaagugagaac

SEQ ID NO: 2301196 - RNA, 19 nt, Homo sapiens
  misc_RNA (1)...(19): siRNA sense strand
aggcacaggaaaucauuaa

SEQ ID NO: 2301197 - RNA, 19 nt, Homo sapiens
  misc_RNA (1)...(19): siRNA sense strand
gguuaguaaagcaguugaa

SEQ ID NO: 2301198 - RNA, 19 nt, Homo sapiens
  misc_RNA (1)...(19): siRNA sense strand
cgauucaguagaaggucaa

SEQ ID NO: 2301199 - RNA, 19 nt, Homo sapiens
  misc_RNA (1)...(19): siRNA sense strand
gccaaagaggaaccagaaa

SEQ ID NO: 2301200 - RNA, 19 nt, Homo sapiens
  misc_RNA (1)...(19): siRNA sense strand
cugaauuagaagaacugaa

SEQ ID NO: 2301201 - RNA, 19 nt, Homo sapiens
  misc_RNA (1)...(19): siRNA sense strand
aggcacaaguccagcucau

SEQ ID NO: 2301202 - RNA, 19 nt, Homo sapiens
  misc_RNA (1)...(19): siRNA sense strand
cccaaguauggaagagaau

SEQ ID NO: 2301203 - RNA, 19 nt, Homo sapiens
  misc_RNA (1)...(19): siRNA sense strand
ccacugugaaaucgguuaa

SEQ ID NO: 2301204 - RNA, 19 nt, Homo sapiens
  misc_RNA (1)...(19): siRNA sense strand
gugaaaucgguuaaccuua

SEQ ID NO: 2301205 - RNA, 19 nt, Homo sapiens
  misc_RNA (1)...(19): siRNA sense strand
gugacuuggcagaagaaaa

SEQ ID NO: 2301206 - RNA, 19 nt, Homo sapiens
  misc_RNA (1)...(19): siRNA sense strand
ccaucagaaaggcuaauaa

SEQ ID NO: 2301207 - RNA, 19 nt, Homo sapiens
  misc_RNA (1)...(19): siRNA sense strand
cuaaugagaaggaggugga

SEQ ID NO: 2301208 - RNA, 19 nt, Homo sapiens
  misc_RNA (1)...(19): siRNA sense strand
ccaguagggcugagauguu

SEQ ID NO: 2301209 - RNA, 19 nt, Homo sapiens
  misc_RNA (1)...(19): siRNA sense strand
gagugaagcuugaagagag

SEQ ID NO: 2301210 - RNA, 19 nt, Homo sapiens
  misc_RNA (1)...(19): siRNA sense strand
cugcagaaugaaaggucuu

SEQ ID NO: 2301211 - RNA, 19 nt, Homo sapiens
  misc_RNA (1)...(19): siRNA sense strand
gaugaugaugacugccaaa

SEQ ID NO: 2301212 - RNA, 19 nt, Homo sapiens
  misc_RNA (1)...(19): siRNA sense strand
acccaaguauggaagagaa

SEQ ID NO: 2301213 - RNA, 19 nt, Homo sapiens
  misc_RNA (1)...(19): siRNA sense strand
caguagaaaggacaaggaa

SEQ ID NO: 2301214 - RNA, 19 nt, Homo sapiens
  misc_RNA (1)...(19): siRNA sense strand
agaaagaggaggauacaag

SEQ ID NO: 2301215 - RNA, 19 nt, Homo sapiens
  misc_RNA (1)...(19): siRNA sense strand
acgcugaauuagaagaacu

SEQ ID NO: 2301216 - RNA, 19 nt, Homo sapiens
  misc_RNA (1)...(19): siRNA sense strand
uggcugggauggaaaauaa

SEQ ID NO: 2301217 - RNA, 19 nt, Homo sapiens
  misc_RNA (1)...(19): siRNA sense strand
guagaaaggacaaggaagc

SEQ ID NO: 2301218 - RNA, 19 nt, Homo sapiens
  misc_RNA (1)...(19): siRNA sense strand
ccacacagcaagaggacuc

SEQ ID NO: 2301219 - RNA, 19 nt, Homo sapiens
  misc_RNA (1)...(19): siRNA sense strand
cgauagaggcccaaggcac

SEQ ID NO: 2301220 - RNA, 19 nt, Homo sapiens
  misc_RNA (1)...(19): siRNA sense strand
gguuaaccuuagacaaagu

SEQ ID NO: 2301221 - RNA, 19 nt, Homo sapiens
  misc_RNA (1)...(19): siRNA sense strand
gggcugagauguugggagc

SEQ ID NO: 2301222 - RNA, 19 nt, Homo sapiens
  misc_RNA (1)...(19): siRNA sense strand
caggaaugguggcugggau

SEQ ID NO: 2301223 - RNA, 19 nt, Homo sapiens
  misc_RNA (1)...(19): siRNA sense strand
aggaaaucauuaagaagcu

SEQ ID NO: 2301224 - RNA, 19 nt, Homo sapiens
  misc_RNA (1)...(19): siRNA sense strand
agaagcuggagaagaguau

SEQ ID NO: 2301225 - RNA, 19 nt, Homo sapiens
  misc_RNA (1)...(19): siRNA sense strand
caacaaaucucaaguccuc

SEQ ID NO: 2301226 - RNA, 19 nt, Homo sapiens
  misc_RNA (1)...(19): siRNA sense strand
caagaggacucauggacgu

SEQ ID NO: 2301227 - RNA, 19 nt, Homo sapiens
  misc_RNA (1)...(19): siRNA sense strand
aaguccagcucaugauaau

SEQ ID NO: 2301228 - RNA, 19 nt, Homo sapiens
  misc_RNA (1)...(19): siRNA sense strand
auuaaaucuggaagccaaa

SEQ ID NO: 2301229 - RNA, 19 nt, Homo sapiens
  misc_RNA (1)...(19): siRNA sense strand
gcugagauguugggagcca

SEQ ID NO: 2301230 - RNA, 19 nt, Homo sapiens
  misc_RNA (1)...(19): siRNA sense strand
ucucuaaacuccaagccau

SEQ ID NO: 2301231 - RNA, 19 nt, Homo sapiens
  misc_RNA (1)...(19): siRNA sense strand
guuuaugacacaauagcuu

SEQ ID NO: 2301232 - RNA, 19 nt, Homo sapiens
  misc_RNA (1)...(19): siRNA sense strand
ccaaagaggaaccagaaac

SEQ ID NO: 2301233 - RNA, 19 nt, Homo sapiens
  misc_RNA (1)...(19): siRNA sense strand
uccuguaaccacugugaaa

SEQ ID NO: 2301234 - RNA, 19 nt, Homo sapiens
  misc_RNA (1)...(19): siRNA sense strand
uggagaaaguggugguggu

SEQ ID NO: 2301235 - RNA, 19 nt, Homo sapiens
  misc_RNA (1)...(19): siRNA sense strand
ugguggugauuuuggauaa

SEQ ID NO: 2301236 - RNA, 19 nt, Homo sapiens
  misc_RNA (1)...(19): siRNA sense strand
caaagaaaguaaaggcuga

SEQ ID NO: 2301237 - RNA, 19 nt, Homo sapiens
  misc_RNA (1)...(19): siRNA sense strand
ccuaauugguacuggaaca

SEQ ID NO: 2301238 - RNA, 19 nt, Homo sapiens
  misc_RNA (1)...(19): siRNA sense strand
cuguauggauggagugaau

SEQ ID NO: 2301239 - RNA, 19 nt, Homo sapiens
  misc_RNA (1)...(19): siRNA sense strand
aaguaaaggcugaagauga

SEQ ID NO: 2301240 - RNA, 19 nt, Homo sapiens
  misc_RNA (1)...(19): siRNA sense strand
augaagaaacagaggauga

SEQ ID NO: 2301241 - RNA, 19 nt, Homo sapiens
  misc_RNA (1)...(19): siRNA sense strand
ggauaagauuggaggcuuc

SEQ ID NO: 2301242 - RNA, 19 nt, Homo sapiens
  misc_RNA (1)...(19): siRNA sense strand
gauaagugccagacagaca

SEQ ID NO: 2301243 - RNA, 19 nt, Homo sapiens
  misc_RNA (1)...(19): siRNA sense strand
ggacaacaaggaagagaca

SEQ ID NO: 2301244 - RNA, 19 nt, Homo sapiens
  misc_RNA (1)...(19): siRNA sense strand
aggugugcauugugaauua

SEQ ID NO: 2301245 - RNA, 19 nt, Homo sapiens
  misc_RNA (1)...(19): siRNA sense strand
gagugaacccuguaagaau

SEQ ID NO: 2301246 - RNA, 19 nt, Homo sapiens
  misc_RNA (1)...(19): siRNA sense strand
gcacauguguugaugggau

SEQ ID NO: 2301247 - RNA, 19 nt, Homo sapiens
  misc_RNA (1)...(19): siRNA sense strand
uagcaauccuugugagcau

SEQ ID NO: 2301248 - RNA, 19 nt, Homo sapiens
  misc_RNA (1)...(19): siRNA sense strand
gagaagaaccgcugccaga

SEQ ID NO: 2301249 - RNA, 19 nt, Homo sapiens
  misc_RNA (1)...(19): siRNA sense strand
gggauaagugccagacaga

SEQ ID NO: 2301250 - RNA, 19 nt, Homo sapiens
  misc_RNA (1)...(19): siRNA sense strand
caugcaaguaugacaaaua

SEQ ID NO: 2301251 - RNA, 19 nt, Homo sapiens
  misc_RNA (1)...(19): siRNA sense strand
uggcaaaacgaaagcguaa

SEQ ID NO: 2301252 - RNA, 19 nt, Homo sapiens
  misc_RNA (1)...(19): siRNA sense strand
gcaaauguccagaaggcuu

SEQ ID NO: 2301253 - RNA, 19 nt, Homo sapiens
  misc_RNA (1)...(19): siRNA sense strand
cccaaacccuugugagaau

SEQ ID NO: 2301254 - RNA, 19 nt, Homo sapiens
  misc_RNA (1)...(19): siRNA sense strand
cagcuguggacaagugaaa

SEQ ID NO: 2301255 - RNA, 19 nt, Homo sapiens
  misc_RNA (1)...(19): siRNA sense strand
gggcaaaguguaucgauca

SEQ ID NO: 2301256 - RNA, 19 nt, Homo sapiens
  misc_RNA (1)...(19): siRNA sense strand
gagacaugcaggacaacaa

SEQ ID NO: 2301257 - RNA, 19 nt, Homo sapiens
  misc_RNA (1)...(19): siRNA sense strand
aaugaaggaauguguguua

SEQ ID NO: 2301258 - RNA, 19 nt, Homo sapiens
  misc_RNA (1)...(19): siRNA sense strand
ggauaggauuggaggcuac

SEQ ID NO: 2301259 - RNA, 19 nt, Homo sapiens
  misc_RNA (1)...(19): siRNA sense strand
ccagagcagcuguggacaa

SEQ ID NO: 2301260 - RNA, 19 nt, Homo sapiens
  misc_RNA (1)...(19): siRNA sense strand
ggugaauauugaugaaugu

SEQ ID NO: 2301261 - RNA, 19 nt, Homo sapiens
  misc_RNA (1)...(19): siRNA sense strand
cagcaagacaugcaaguau

SEQ ID NO: 2301262 - RNA, 19 nt, Homo sapiens
  misc_RNA (1)...(19): siRNA sense strand
cuaugaacccuguguaaau

SEQ ID NO: 2301263 - RNA, 19 nt, Homo sapiens
  misc_RNA (1)...(19): siRNA sense strand
gugcauugugaauuagaaa

SEQ ID NO: 2301264 - RNA, 19 nt, Homo sapiens
  misc_RNA (1)...(19): siRNA sense strand
aggcagagcaggaggugga

SEQ ID NO: 2301265 - RNA, 19 nt, Homo sapiens
  misc_RNA (1)...(19): siRNA sense strand
gcaaaggaugccaagggua

SEQ ID NO: 2301266 - RNA, 19 nt, Homo sapiens
  misc_RNA (1)...(19): siRNA sense strand
gguaguaggaggaagaagu

SEQ ID NO: 2301267 - RNA, 19 nt, Homo sapiens
  misc_RNA (1)...(19): siRNA sense strand
ccacaauggcacaggauac

SEQ ID NO: 2301268 - RNA, 19 nt, Homo sapiens
  misc_RNA (1)...(19): siRNA sense strand
uaaaugaaugucagagcaa

SEQ ID NO: 2301269 - RNA, 19 nt, Homo sapiens
  misc_RNA (1)...(19): siRNA sense strand
cuucauugguggauacaga

SEQ ID NO: 2301270 - RNA, 19 nt, Homo sapiens
  misc_RNA (1)...(19): siRNA sense strand
gugaguaugaaguggauga

SEQ ID NO: 2301271 - RNA, 19 nt, Homo sapiens
  misc_RNA (1)...(19): siRNA sense strand
ccgaugugccucaggguuu

SEQ ID NO: 2301272 - RNA, 19 nt, Homo sapiens
  misc_RNA (1)...(19): siRNA sense strand
ggcuaugaacccuguguaa

SEQ ID NO: 2301273 - RNA, 19 nt, Homo sapiens
  misc_RNA (1)...(19): siRNA sense strand
gcuauaacugccaggugaa

SEQ ID NO: 2301274 - RNA, 19 nt, Homo sapiens
  misc_RNA (1)...(19): siRNA sense strand
cuaugaagaaacagaggau

SEQ ID NO: 2301275 - RNA, 19 nt, Homo sapiens
  misc_RNA (1)...(19): siRNA sense strand
acaaucuggugaauggaua

SEQ ID NO: 2301276 - RNA, 19 nt, Homo sapiens
  misc_RNA (1)...(19): siRNA sense strand
ccaggugaauauugaugaa

SEQ ID NO: 2301277 - RNA, 19 nt, Homo sapiens
  misc_RNA (1)...(19): siRNA sense strand
aaacaaagguacuugcguu

SEQ ID NO: 2301278 - RNA, 19 nt, Homo sapiens
  misc_RNA (1)...(19): siRNA sense strand
ccuaaaugggcaauauauu

SEQ ID NO: 2301279 - RNA, 19 nt, Homo sapiens
  misc_RNA (1)...(19): siRNA sense strand
ccaguuugccagauugaua

SEQ ID NO: 2301280 - RNA, 19 nt, Homo sapiens
  misc_RNA (1)...(19): siRNA sense strand
ugaacgaaugccugagcaa

SEQ ID NO: 2301281 - RNA, 19 nt, Homo sapiens
  misc_RNA (1)...(19): siRNA sense strand
ggcuauaacugccagguga

SEQ ID NO: 2301282 - RNA, 19 nt, Homo sapiens
  misc_RNA (1)...(19): siRNA sense strand
caguggaugaccauggaaa

SEQ ID NO: 2301283 - RNA, 19 nt, Homo sapiens
  misc_RNA (1)...(19): siRNA sense strand
gcuugugcccuguggguuu

SEQ ID NO: 2301284 - RNA, 19 nt, Homo sapiens
  misc_RNA (1)...(19): siRNA sense strand
gggugucaacugugaguau

SEQ ID NO: 2301285 - RNA, 19 nt, Homo sapiens
  misc_RNA (1)...(19): siRNA sense strand
agauuugagugaugaagau

SEQ ID NO: 2301286 - RNA, 19 nt, Homo sapiens
  misc_RNA (1)...(19): siRNA sense strand
ggaugugaaugcaguggau

SEQ ID NO: 2301287 - RNA, 19 nt, Homo sapiens
  misc_RNA (1)...(19): siRNA sense strand
ugaugaagaugaagaugca

SEQ ID NO: 2301288 - RNA, 19 nt, Homo sapiens
  misc_RNA (1)...(19): siRNA sense strand
caaccgaguaacugaucua

SEQ ID NO: 2301289 - RNA, 19 nt, Homo sapiens
  misc_RNA (1)...(19): siRNA sense strand
ucaauaauguggaggcaac

SEQ ID NO: 2301290 - RNA, 19 nt, Homo sapiens
  misc_RNA (1)...(19): siRNA sense strand
ccaaugggcaagaagucua

SEQ ID NO: 2301291 - RNA, 19 nt, Homo sapiens
  misc_RNA (1)...(19): siRNA sense strand
aaggguaguaggaggaaga

SEQ ID NO: 2301292 - RNA, 19 nt, Homo sapiens
  misc_RNA (1)...(19): siRNA sense strand
agacaugcaaguaugacaa

SEQ ID NO: 2301293 - RNA, 19 nt, Homo sapiens
  misc_RNA (1)...(19): siRNA sense strand
ccugaagggaagcacauaa

SEQ ID NO: 2301294 - RNA, 19 nt, Homo sapiens
  misc_RNA (1)...(19): siRNA sense strand
gggaaagccacgugccgau

SEQ ID NO: 2301295 - RNA, 19 nt, Homo sapiens
  misc_RNA (1)...(19): siRNA sense strand
uggcaaggucagcggugua

SEQ ID NO: 2301296 - RNA, 19 nt, Homo sapiens
  misc_RNA (1)...(19): siRNA sense strand
ccuugaagcugcagacauc

SEQ ID NO: 2301297 - RNA, 19 nt, Homo sapiens
  misc_RNA (1)...(19): siRNA sense strand
augccaaugcccaggacaa

SEQ ID NO: 2301298 - RNA, 19 nt, Homo sapiens
  misc_RNA (1)...(19): siRNA sense strand
guguguugugugaggagaa

SEQ ID NO: 2301299 - RNA, 19 nt, Homo sapiens
  misc_RNA (1)...(19): siRNA sense strand
aggcaggauuugauggagu

SEQ ID NO: 2301300 - RNA, 19 nt, Homo sapiens
  misc_RNA (1)...(19): siRNA sense strand
ggccuuacucucagaagaa

SEQ ID NO: 2301301 - RNA, 19 nt, Homo sapiens
  misc_RNA (1)...(19): siRNA sense strand
ccucaggguuuacaggaga

SEQ ID NO: 2301302 - RNA, 19 nt, Homo sapiens
  misc_RNA (1)...(19): siRNA sense strand
gugccauggccaauagcaa

SEQ ID NO: 2301303 - RNA, 19 nt, Homo sapiens
  misc_RNA (1)...(19): siRNA sense strand
cuugugagcaugcaggaaa

SEQ ID NO: 2301304 - RNA, 19 nt, Homo sapiens
  misc_RNA (1)...(19): siRNA sense strand
ugaaugagugucugaguga

SEQ ID NO: 2301305 - RNA, 19 nt, Homo sapiens
  misc_RNA (1)...(19): siRNA sense strand
cugccaagcggaugugaau

SEQ ID NO: 2301306 - RNA, 19 nt, Homo sapiens
  misc_RNA (1)...(19): siRNA sense strand
agaagggcuuuaaaggcua

SEQ ID NO: 2301307 - RNA, 19 nt, Homo sapiens
  misc_RNA (1)...(19): siRNA sense strand
accgagacaugcaggacaa

SEQ ID NO: 2301308 - RNA, 19 nt, Homo sapiens
  misc_RNA (1)...(19): siRNA sense strand
agguggagguguugggcga

SEQ ID NO: 2301309 - RNA, 19 nt, Homo sapiens
  misc_RNA (1)...(19): siRNA sense strand
ggacaggaggcacugggua

SEQ ID NO: 2301310 - RNA, 19 nt, Homo sapiens
  misc_RNA (1)...(19): siRNA sense strand
ggcugauaacgcugaggaa

SEQ ID NO: 2301311 - RNA, 19 nt, Homo sapiens
  misc_RNA (1)...(19): siRNA sense strand
cgaaacugcaccagcgagu

SEQ ID NO: 2301312 - RNA, 19 nt, Homo sapiens
  misc_RNA (1)...(19): siRNA sense strand
cagcaugacagaagggcua

SEQ ID NO: 2301313 - RNA, 19 nt, Homo sapiens
  misc_RNA (1)...(19): siRNA sense strand
cugcaaaagcucagguuaa

SEQ ID NO: 2301314 - RNA, 19 nt, Homo sapiens
  misc_RNA (1)...(19): siRNA sense strand
ugaacagguuauugagaau

SEQ ID NO: 2301315 - RNA, 19 nt, Homo sapiens
  misc_RNA (1)...(19): siRNA sense strand
ucugugaaguggagggaau

SEQ ID NO: 2301316 - RNA, 19 nt, Homo sapiens
  misc_RNA (1)...(19): siRNA sense strand
ucaaagagaagcugggaga

SEQ ID NO: 2301317 - RNA, 19 nt, Homo sapiens
  misc_RNA (1)...(19): siRNA sense strand
aaucugaaguuuauggcua

SEQ ID NO: 2301318 - RNA, 19 nt, Homo sapiens
  misc_RNA (1)...(19): siRNA sense strand
guguauaagcugaugcuca

SEQ ID NO: 2301319 - RNA, 19 nt, Homo sapiens
  misc_RNA (1)...(19): siRNA sense strand
gacagaagggcuaggccaa

SEQ ID NO: 2301320 - RNA, 19 nt, Homo sapiens
  misc_RNA (1)...(19): siRNA sense strand
gaacaaggguccaacucga

SEQ ID NO: 2301321 - RNA, 19 nt, Homo sapiens
  misc_RNA (1)...(19): siRNA sense strand
acgaaaacucccagaauuu

SEQ ID NO: 2301322 - RNA, 19 nt, Homo sapiens
  misc_RNA (1)...(19): siRNA sense strand
ugucagaugaacagguuau

SEQ ID NO: 2301323 - RNA, 19 nt, Homo sapiens
  misc_RNA (1)...(19): siRNA sense strand
gcgccaugcaggaggucau

SEQ ID NO: 2301324 - RNA, 19 nt, Homo sapiens
  misc_RNA (1)...(19): siRNA sense strand
aacaggugcuggauggaaa

SEQ ID NO: 2301325 - RNA, 19 nt, Homo sapiens
  misc_RNA (1)...(19): siRNA sense strand
ggcagaaaaugcuggagaa

SEQ ID NO: 2301326 - RNA, 19 nt, Homo sapiens
  misc_RNA (1)...(19): siRNA sense strand
gggguuacuuugugggaga

SEQ ID NO: 2301327 - RNA, 19 nt, Homo sapiens
  misc_RNA (1)...(19): siRNA sense strand
cgcuggaugucuugggaga

SEQ ID NO: 2301328 - RNA, 19 nt, Homo sapiens
  misc_RNA (1)...(19): siRNA sense strand
augauggagcuguuggaua

SEQ ID NO: 2301329 - RNA, 19 nt, Homo sapiens
  misc_RNA (1)...(19): siRNA sense strand
cuggagaguucuuccgaga

SEQ ID NO: 2301330 - RNA, 19 nt, Homo sapiens
  misc_RNA (1)...(19): siRNA sense strand
gcuaaaggugugaagaucu

SEQ ID NO: 2301331 - RNA, 19 nt, Homo sapiens
  misc_RNA (1)...(19): siRNA sense strand
uuaaaguugaugacagcaa

SEQ ID NO: 2301332 - RNA, 19 nt, Homo sapiens
  misc_RNA (1)...(19): siRNA sense strand
gcuuaaaguugaugacagc

SEQ ID NO: 2301333 - RNA, 19 nt, Homo sapiens
  misc_RNA (1)...(19): siRNA sense strand
ggaaacaggugcuggaugg

SEQ ID NO: 2301334 - RNA, 19 nt, Homo sapiens
  misc_RNA (1)...(19): siRNA sense strand
cuuaaggagauaaagauca

SEQ ID NO: 2301335 - RNA, 19 nt, Homo sapiens
  misc_RNA (1)...(19): siRNA sense strand
aaucaagauagcugacuuu

SEQ ID NO: 2301336 - RNA, 19 nt, Homo sapiens
  misc_RNA (1)...(19): siRNA sense strand
ggcaaguucacuacagcaa

SEQ ID NO: 2301337 - RNA, 19 nt, Homo sapiens
  misc_RNA (1)...(19): siRNA sense strand
uggagaagagauacgaaga

SEQ ID NO: 2301338 - RNA, 19 nt, Homo sapiens
  misc_RNA (1)...(19): siRNA sense strand
ccugaugaccugaaggagu

SEQ ID NO: 2301339 - RNA, 19 nt, Homo sapiens
  misc_RNA (1)...(19): siRNA sense strand
ccuguacaguggugacuau

SEQ ID NO: 2301340 - RNA, 19 nt, Homo sapiens
  misc_RNA (1)...(19): siRNA sense strand
uugcuaaaggugugaagau

SEQ ID NO: 2301341 - RNA, 19 nt, Homo sapiens
  misc_RNA (1)...(19): siRNA sense strand
aggaguuucugcagauuga

SEQ ID NO: 2301342 - RNA, 19 nt, Homo sapiens
  misc_RNA (1)...(19): siRNA sense strand
ggaugcuggaugaugaaau

SEQ ID NO: 2301343 - RNA, 19 nt, Homo sapiens
  misc_RNA (1)...(19): siRNA sense strand
ccagaaugcucuuggugcu

SEQ ID NO: 2301344 - RNA, 19 nt, Homo sapiens
  misc_RNA (1)...(19): siRNA sense strand
gaucaauuacagucgggau

SEQ ID NO: 2301345 - RNA, 19 nt, Homo sapiens
  misc_RNA (1)...(19): siRNA sense strand
gugucuggcuagauggcuu

SEQ ID NO: 2301346 - RNA, 19 nt, Homo sapiens
  misc_RNA (1)...(19): siRNA sense strand
ggaugucuugggagaguau

SEQ ID NO: 2301347 - RNA, 19 nt, Homo sapiens
  misc_RNA (1)...(19): siRNA sense strand
ccagugagugggaaccuaa

SEQ ID NO: 2301348 - RNA, 19 nt, Homo sapiens
  misc_RNA (1)...(19): siRNA sense strand
aggucauggcaucgaguuu

SEQ ID NO: 2301349 - RNA, 19 nt, Homo sapiens
  misc_RNA (1)...(19): siRNA sense strand
aaguggagggaauggaaaa

SEQ ID NO: 2301350 - RNA, 19 nt, Homo sapiens
  misc_RNA (1)...(19): siRNA sense strand
ggcuauggucacagagaga

SEQ ID NO: 2301351 - RNA, 19 nt, Homo sapiens
  misc_RNA (1)...(19): siRNA sense strand
cagaauaugaacaucgaca

SEQ ID NO: 2301352 - RNA, 19 nt, Homo sapiens
  misc_RNA (1)...(19): siRNA sense strand
gaguggaagaacugcaaaa

SEQ ID NO: 2301353 - RNA, 19 nt, Homo sapiens
  misc_RNA (1)...(19): siRNA sense strand
acaugaucgagcagaggaa

SEQ ID NO: 2301354 - RNA, 19 nt, Homo sapiens
  misc_RNA (1)...(19): siRNA sense strand
acaacuuccaccagaacua

SEQ ID NO: 2301355 - RNA, 19 nt, Homo sapiens
  misc_RNA (1)...(19): siRNA sense strand
cuaucaaaugaguggagau

SEQ ID NO: 2301356 - RNA, 19 nt, Homo sapiens
  misc_RNA (1)...(19): siRNA sense strand
augcaaaauacguguguuu

SEQ ID NO: 2301357 - RNA, 19 nt, Homo sapiens
  misc_RNA (1)...(19): siRNA sense strand
cagagaagaucccuggcuu

SEQ ID NO: 2301358 - RNA, 19 nt, Homo sapiens
  misc_RNA (1)...(19): siRNA sense strand
cuauggucacagagagaca

SEQ ID NO: 2301359 - RNA, 19 nt, Homo sapiens
  misc_RNA (1)...(19): siRNA sense strand
ggcuauggucacagagaga

SEQ ID NO: 2301360 - RNA, 19 nt, Homo sapiens
  misc_RNA (1)...(19): siRNA sense strand
cagaauaugaacaucgaca

SEQ ID NO: 2301361 - RNA, 19 nt, Homo sapiens
  misc_RNA (1)...(19): siRNA sense strand
gaguggaagaacugcaaaa

SEQ ID NO: 2301362 - RNA, 19 nt, Homo sapiens
  misc_RNA (1)...(19): siRNA sense strand
acaugaucgagcagaggaa

SEQ ID NO: 2301363 - RNA, 19 nt, Homo sapiens
  misc_RNA (1)...(19): siRNA sense strand
acaacuuccaccagaacua

SEQ ID NO: 2301364 - RNA, 19 nt, Homo sapiens
  misc_RNA (1)...(19): siRNA sense strand
cuaucaaaugaguggagau

SEQ ID NO: 2301365 - RNA, 19 nt, Homo sapiens
  misc_RNA (1)...(19): siRNA sense strand
augcaaaauacguguguuu

SEQ ID NO: 2301366 - RNA, 19 nt, Homo sapiens
  misc_RNA (1)...(19): siRNA sense strand
cagagaagaucccuggcuu

SEQ ID NO: 2301367 - RNA, 19 nt, Homo sapiens
  misc_RNA (1)...(19): siRNA sense strand
cuauggucacagagagaca

SEQ ID NO: 2301368 - RNA, 19 nt, Homo sapiens
  misc_RNA (1)...(19): siRNA sense strand
acaugaucgagcagaggaa

SEQ ID NO: 2301369 - RNA, 19 nt, Homo sapiens
  misc_RNA (1)...(19): siRNA sense strand
acaacuuccaccagaacua

SEQ ID NO: 2301370 - RNA, 19 nt, Homo sapiens
  misc_RNA (1)...(19): siRNA sense strand
cuaucaaaugaguggagau

SEQ ID NO: 2301371 - RNA, 19 nt, Homo sapiens
  misc_RNA (1)...(19): siRNA sense strand
augcaaaauacguguguuu

SEQ ID NO: 2301372 - RNA, 19 nt, Homo sapiens
  misc_RNA (1)...(19): siRNA sense strand
cagagaagaucccuggcuu

SEQ ID NO: 2301373 - RNA, 19 nt, Homo sapiens
  misc_RNA (1)...(19): siRNA sense strand
ggcuauggucacagagaga

SEQ ID NO: 2301374 - RNA, 19 nt, Homo sapiens
  misc_RNA (1)...(19): siRNA sense strand
cagaauaugaacaucgaca

SEQ ID NO: 2301375 - RNA, 19 nt, Homo sapiens
  misc_RNA (1)...(19): siRNA sense strand
gaguggaagaacugcaaaa

SEQ ID NO: 2301376 - RNA, 19 nt, Homo sapiens
  misc_RNA (1)...(19): siRNA sense strand
acaugaucgagcagaggaa

SEQ ID NO: 2301377 - RNA, 19 nt, Homo sapiens
  misc_RNA (1)...(19): siRNA sense strand
acaacuuccaccagaacua

SEQ ID NO: 2301378 - RNA, 19 nt, Homo sapiens
  misc_RNA (1)...(19): siRNA sense strand
cuaucaaaugaguggagau

SEQ ID NO: 2301379 - RNA, 19 nt, Homo sapiens
  misc_RNA (1)...(19): siRNA sense strand
augcaaaauacguguguuu

SEQ ID NO: 2301380 - RNA, 19 nt, Homo sapiens
  misc_RNA (1)...(19): siRNA sense strand
cagagaagaucccuggcuu

SEQ ID NO: 2301381 - RNA, 19 nt, Homo sapiens
  misc_RNA (1)...(19): siRNA sense strand
cuauggucacagagagaca

SEQ ID NO: 2301382 - RNA, 19 nt, Homo sapiens
  misc_RNA (1)...(19): siRNA sense strand
ggacaagacuguuggagac

SEQ ID NO: 2301383 - RNA, 19 nt, Homo sapiens
  misc_RNA (1)...(19): siRNA sense strand
gaacaaaggaaaaggacca

SEQ ID NO: 2301384 - RNA, 19 nt, Homo sapiens
  misc_RNA (1)...(19): siRNA sense strand
acuacaacgccaaggacaa

SEQ ID NO: 2301385 - RNA, 19 nt, Homo sapiens
  misc_RNA (1)...(19): siRNA sense strand
ccaaggagcuggaccgcuu

SEQ ID NO: 2301386 - RNA, 19 nt, Homo sapiens
  misc_RNA (1)...(19): siRNA sense strand
cugaagagcuggacggaug

SEQ ID NO: 2301387 - RNA, 19 nt, Homo sapiens
  misc_RNA (1)...(19): siRNA sense strand
gugaauuucuccagcccaa

SEQ ID NO: 2301388 - RNA, 19 nt, Homo sapiens
  misc_RNA (1)...(19): siRNA sense strand
cggcucagaacaaaggaaa

SEQ ID NO: 2301389 - RNA, 19 nt, Homo sapiens
  misc_RNA (1)...(19): siRNA sense strand
ccuucaauguccuggguca

SEQ ID NO: 2301390 - RNA, 19 nt, Homo sapiens
  misc_RNA (1)...(19): siRNA sense strand
cuggaauccugguggcaga

SEQ ID NO: 2301391 - RNA, 19 nt, Homo sapiens
  misc_RNA (1)...(19): siRNA sense strand
cggucuaugcccuggaauu

SEQ ID NO: 2301392 - RNA, 19 nt, Homo sapiens
  misc_RNA (1)...(19): siRNA sense strand
ccacaugggaccuggggaa

SEQ ID NO: 2301393 - RNA, 19 nt, Homo sapiens
  misc_RNA (1)...(19): siRNA sense strand
gggcacagaccuaagggau

SEQ ID NO: 2301394 - RNA, 19 nt, Homo sapiens
  misc_RNA (1)...(19): siRNA sense strand
cuaccaagcugaagagccu

SEQ ID NO: 2301395 - RNA, 19 nt, Homo sapiens
  misc_RNA (1)...(19): siRNA sense strand
ucaacauggcugagggcuu

SEQ ID NO: 2301396 - RNA, 19 nt, Homo sapiens
  misc_RNA (1)...(19): siRNA sense strand
aggacaagacuguuggaga

SEQ ID NO: 2301397 - RNA, 19 nt, Homo sapiens
  misc_RNA (1)...(19): siRNA sense strand
ccguagaucuugaggacug

SEQ ID NO: 2301398 - RNA, 19 nt, Homo sapiens
  misc_RNA (1)...(19): siRNA sense strand
gcgucaaacccaagccaca

SEQ ID NO: 2301399 - RNA, 19 nt, Homo sapiens
  misc_RNA (1)...(19): siRNA sense strand
ucacagagcuacaacggga

SEQ ID NO: 2301400 - RNA, 19 nt, Homo sapiens
  misc_RNA (1)...(19): siRNA sense strand
ucgacugcuucaagagcua

SEQ ID NO: 2301401 - RNA, 19 nt, Homo sapiens
  misc_RNA (1)...(19): siRNA sense strand
cagccaaguugaagaaccu

SEQ ID NO: 2301402 - RNA, 19 nt, Homo sapiens
  misc_RNA (1)...(19): siRNA sense strand
cugucaagcugaagaaccu

SEQ ID NO: 2301403 - RNA, 19 nt, Homo sapiens
  misc_RNA (1)...(19): siRNA sense strand
uuggagacuuccugaaaca

SEQ ID NO: 2301404 - RNA, 19 nt, Homo sapiens
  misc_RNA (1)...(19): siRNA sense strand
caacauggcccaaggcuuc

SEQ ID NO: 2301405 - RNA, 19 nt, Homo sapiens
  misc_RNA (1)...(19): siRNA sense strand
gaaggaugcuuucagccua

SEQ ID NO: 2301406 - RNA, 19 nt, Homo sapiens
  misc_RNA (1)...(19): siRNA sense strand
gaaaacagcaagagccuca

SEQ ID NO: 2301407 - RNA, 19 nt, Homo sapiens
  misc_RNA (1)...(19): siRNA sense strand
cgggaauggccuuggaccu

SEQ ID NO: 2301408 - RNA, 19 nt, Homo sapiens
  misc_RNA (1)...(19): siRNA sense strand
uggaugaagaagagcuuaa

SEQ ID NO: 2301409 - RNA, 19 nt, Homo sapiens
  misc_RNA (1)...(19): siRNA sense strand
uaaugauggagaugggaaa

SEQ ID NO: 2301410 - RNA, 19 nt, Homo sapiens
  misc_RNA (1)...(19): siRNA sense strand
guuugagaguggugccaga

SEQ ID NO: 2301411 - RNA, 19 nt, Homo sapiens
  misc_RNA (1)...(19): siRNA sense strand
cggcggauaaugauggaga

SEQ ID NO: 2301412 - RNA, 19 nt, Homo sapiens
  misc_RNA (1)...(19): siRNA sense strand
gagcagaggaauuccagga

SEQ ID NO: 2301413 - RNA, 19 nt, Homo sapiens
  misc_RNA (1)...(19): siRNA sense strand
gccaagauccgcaagguca

SEQ ID NO: 2301414 - RNA, 19 nt, Homo sapiens
  misc_RNA (1)...(19): siRNA sense strand
gagcaaaggaugugcggga

SEQ ID NO: 2301415 - RNA, 19 nt, Homo sapiens
  misc_RNA (1)...(19): siRNA sense strand
cugacuugccagaggauaa

SEQ ID NO: 2301416 - RNA, 19 nt, Homo sapiens
  misc_RNA (1)...(19): siRNA sense strand
ggagaaaaggccacagaaa

SEQ ID NO: 2301417 - RNA, 19 nt, Homo sapiens
  misc_RNA (1)...(19): siRNA sense strand
cgcaagggucagagagcaa

SEQ ID NO: 2301418 - RNA, 19 nt, Homo sapiens
  misc_RNA (1)...(19): siRNA sense strand
cagugauguugaaggagaa

SEQ ID NO: 2301419 - RNA, 19 nt, Homo sapiens
  misc_RNA (1)...(19): siRNA sense strand
cugaggaaguguugggcau

SEQ ID NO: 2301420 - RNA, 19 nt, Homo sapiens
  misc_RNA (1)...(19): siRNA sense strand
ggcgaaugguagaggagau

SEQ ID NO: 2301421 - RNA, 19 nt, Homo sapiens
  misc_RNA (1)...(19): siRNA sense strand
guguggaauuugaggaguu

SEQ ID NO: 2301422 - RNA, 19 nt, Homo sapiens
  misc_RNA (1)...(19): siRNA sense strand
gcaaaggaugugcgggaga

SEQ ID NO: 2301423 - RNA, 19 nt, Homo sapiens
  misc_RNA (1)...(19): siRNA sense strand
ggaagaacaucaaugcaga

SEQ ID NO: 2301424 - RNA, 19 nt, Homo sapiens
  misc_RNA (1)...(19): siRNA sense strand
cguuagagaaagucaucaa

SEQ ID NO: 2301425 - RNA, 19 nt, Homo sapiens
  misc_RNA (1)...(19): siRNA sense strand
gagaagcaggaacgggaaa

SEQ ID NO: 2301426 - RNA, 19 nt, Homo sapiens
  misc_RNA (1)...(19): siRNA sense strand
auuaagaauccaaaggcua

SEQ ID NO: 2301427 - RNA, 19 nt, Homo sapiens
  misc_RNA (1)...(19): siRNA sense strand
gggacaagucugaggccca

SEQ ID NO: 2301428 - RNA, 19 nt, Homo sapiens
  misc_RNA (1)...(19): siRNA sense strand
ccgaaaugagucuggauga

SEQ ID NO: 2301429 - RNA, 19 nt, Homo sapiens
  misc_RNA (1)...(19): siRNA sense strand
ccagaaaccaagugagaag

SEQ ID NO: 2301430 - RNA, 19 nt, Homo sapiens
  misc_RNA (1)...(19): siRNA sense strand
uggccaagcugcugcguga

SEQ ID NO: 2301431 - RNA, 19 nt, Homo sapiens
  misc_RNA (1)...(19): siRNA sense strand
caccagaugccaaggagaa

SEQ ID NO: 2301432 - RNA, 19 nt, Homo sapiens
  misc_RNA (1)...(19): siRNA sense strand
agggagagaagaagcagaa

SEQ ID NO: 2301433 - RNA, 19 nt, Homo sapiens
  misc_RNA (1)...(19): siRNA sense strand
ugcugaaggccgugggcaa

SEQ ID NO: 2301434 - RNA, 19 nt, Homo sapiens
  misc_RNA (1)...(19): siRNA sense strand
auguggacuucaaggcaaa

SEQ ID NO: 2301435 - RNA, 19 nt, Homo sapiens
  misc_RNA (1)...(19): siRNA sense strand
gcaaggaggagcuggggaa

SEQ ID NO: 2301436 - RNA, 19 nt, Homo sapiens
  misc_RNA (1)...(19): siRNA sense strand
agguggagcucaaggagga

SEQ ID NO: 2301437 - RNA, 19 nt, Homo sapiens
  misc_RNA (1)...(19): siRNA sense strand
cuggagugcccauggaaau

SEQ ID NO: 2301438 - RNA, 19 nt, Homo sapiens
  misc_RNA (1)...(19): siRNA sense strand
gguagaggacagcgcagaa

SEQ ID NO: 2301439 - RNA, 19 nt, Homo sapiens
  misc_RNA (1)...(19): siRNA sense strand
acagugauguugaaggaga

SEQ ID NO: 2301440 - RNA, 19 nt, Homo sapiens
  misc_RNA (1)...(19): siRNA sense strand
uauuugagacccaggacaa

SEQ ID NO: 2301441 - RNA, 19 nt, Homo sapiens
  misc_RNA (1)...(19): siRNA sense strand
gugaggagaucucugggaa

SEQ ID NO: 2301442 - RNA, 19 nt, Homo sapiens
  misc_RNA (1)...(19): siRNA sense strand
aaggaaucucggaggaaaa

SEQ ID NO: 2301443 - RNA, 19 nt, Homo sapiens
  misc_RNA (1)...(19): siRNA sense strand
gauguggacuucaaggcaa

SEQ ID NO: 2301444 - RNA, 19 nt, Homo sapiens
  misc_RNA (1)...(19): siRNA sense strand
ccugaaagaaaaugaaaga

SEQ ID NO: 2301445 - RNA, 19 nt, Homo sapiens
  misc_RNA (1)...(19): siRNA sense strand
aagcauggcgauuaagaau

SEQ ID NO: 2301446 - RNA, 19 nt, Homo sapiens
  misc_RNA (1)...(19): siRNA sense strand
cucaauaaggccaaguuua

SEQ ID NO: 2301447 - RNA, 19 nt, Homo sapiens
  misc_RNA (1)...(19): siRNA sense strand
guuaggaggcagaggccga

SEQ ID NO: 2301448 - RNA, 19 nt, Homo sapiens
  misc_RNA (1)...(19): siRNA sense strand
cugaagaugcagagcccau

SEQ ID NO: 2301449 - RNA, 19 nt, Homo sapiens
  misc_RNA (1)...(19): siRNA sense strand
uggcagaccuguuggcacu

SEQ ID NO: 2301450 - RNA, 19 nt, Homo sapiens
  misc_RNA (1)...(19): siRNA sense strand
aaggagaaugguacugaua

SEQ ID NO: 2301451 - RNA, 19 nt, Homo sapiens
  misc_RNA (1)...(19): siRNA sense strand
ccccagagggagagaagaa

SEQ ID NO: 2301452 - RNA, 19 nt, Homo sapiens
  misc_RNA (1)...(19): siRNA sense strand
ggagaagcaggaacgggaa

SEQ ID NO: 2301453 - RNA, 19 nt, Homo sapiens
  misc_RNA (1)...(19): siRNA sense strand
acagaaagaacaaucgaca

SEQ ID NO: 2301454 - RNA, 19 nt, Homo sapiens
  misc_RNA (1)...(19): siRNA sense strand
acuacgaguccaagggcau

SEQ ID NO: 2301455 - RNA, 19 nt, Homo sapiens
  misc_RNA (1)...(19): siRNA sense strand
cggaaagauauuaacacca

SEQ ID NO: 2301456 - RNA, 19 nt, Homo sapiens
  misc_RNA (1)...(19): siRNA sense strand
uggcugugcucuuggcaga

SEQ ID NO: 2301457 - RNA, 19 nt, Homo sapiens
  misc_RNA (1)...(19): siRNA sense strand
gacaaaguuaggaggcaga

SEQ ID NO: 2301458 - RNA, 19 nt, Homo sapiens
  misc_RNA (1)...(19): siRNA sense strand
acauugaagcuaagaugau

SEQ ID NO: 2301459 - RNA, 19 nt, Homo sapiens
  misc_RNA (1)...(19): siRNA sense strand
ccucaaugccagugccagu

SEQ ID NO: 2301460 - RNA, 19 nt, Homo sapiens
  misc_RNA (1)...(19): siRNA sense strand
ggucagagagcaaaggaug

SEQ ID NO: 2301461 - RNA, 19 nt, Homo sapiens
  misc_RNA (1)...(19): siRNA sense strand
ccaagggcaucaaggcuca

SEQ ID NO: 2301462 - RNA, 19 nt, Homo sapiens
  misc_RNA (1)...(19): siRNA sense strand
ggguagaggagcgcaagaa

SEQ ID NO: 2301463 - RNA, 19 nt, Homo sapiens
  misc_RNA (1)...(19): siRNA sense strand
gguauuuggcucccagaau

SEQ ID NO: 2301464 - RNA, 19 nt, Homo sapiens
  misc_RNA (1)...(19): siRNA sense strand
ggcuggaggaugagggugu

SEQ ID NO: 2301465 - RNA, 19 nt, Homo sapiens
  misc_RNA (1)...(19): siRNA sense strand
ccuggagugcccauggaaa

SEQ ID NO: 2301466 - RNA, 19 nt, Homo sapiens
  misc_RNA (1)...(19): siRNA sense strand
aauaaggaaucucggagga

SEQ ID NO: 2301467 - RNA, 19 nt, Homo sapiens
  misc_RNA (1)...(19): siRNA sense strand
gggaguaggauuugaccgu

SEQ ID NO: 2301468 - RNA, 19 nt, Homo sapiens
  misc_RNA (1)...(19): siRNA sense strand
ugauggaugauguggacuu

SEQ ID NO: 2301469 - RNA, 19 nt, Homo sapiens
  misc_RNA (1)...(19): siRNA sense strand
cagacaaaguuaggaggca

SEQ ID NO: 2301470 - RNA, 19 nt, Homo sapiens
  misc_RNA (1)...(19): siRNA sense strand
agacuaaggaagcugggau

SEQ ID NO: 2301471 - RNA, 19 nt, Homo sapiens
  misc_RNA (1)...(19): siRNA sense strand
ggacaaacuugcaggcugu

SEQ ID NO: 2301472 - RNA, 19 nt, Homo sapiens
  misc_RNA (1)...(19): siRNA sense strand
cgguagagcgacugcugaa

SEQ ID NO: 2301473 - RNA, 19 nt, Homo sapiens
  misc_RNA (1)...(19): siRNA sense strand
ucuccuaccuggauggcaa

SEQ ID NO: 2301474 - RNA, 19 nt, Homo sapiens
  misc_RNA (1)...(19): siRNA sense strand
cuggaaggcaguagaacga

SEQ ID NO: 2301475 - RNA, 19 nt, Homo sapiens
  misc_RNA (1)...(19): siRNA sense strand
cugaggaucgagaggugaa

SEQ ID NO: 2301476 - RNA, 19 nt, Homo sapiens
  misc_RNA (1)...(19): siRNA sense strand
cggaagaugccgcagcuga

SEQ ID NO: 2301477 - RNA, 19 nt, Homo sapiens
  misc_RNA (1)...(19): siRNA sense strand
ugcagaagauccuggcaga

SEQ ID NO: 2301478 - RNA, 19 nt, Homo sapiens
  misc_RNA (1)...(19): siRNA sense strand
ggaaggcaguagaacgagu

SEQ ID NO: 2301479 - RNA, 19 nt, Homo sapiens
  misc_RNA (1)...(19): siRNA sense strand
gggcauuacaggaggacca

SEQ ID NO: 2301480 - RNA, 19 nt, Homo sapiens
  misc_RNA (1)...(19): siRNA sense strand
gcuuugugcugaagggcuu

SEQ ID NO: 2301481 - RNA, 19 nt, Homo sapiens
  misc_RNA (1)...(19): siRNA sense strand
aagagaagcucaaguggga

SEQ ID NO: 2301482 - RNA, 19 nt, Homo sapiens
  misc_RNA (1)...(19): siRNA sense strand
gagcaagauccuagggcgu

SEQ ID NO: 2301483 - RNA, 19 nt, Homo sapiens
  misc_RNA (1)...(19): siRNA sense strand
ccauaguggcucugagacu

SEQ ID NO: 2301484 - RNA, 19 nt, Homo sapiens
  misc_RNA (1)...(19): siRNA sense strand
cuaauggcugugugagcaa

SEQ ID NO: 2301485 - RNA, 19 nt, Homo sapiens
  misc_RNA (1)...(19): siRNA sense strand
agaaagaguuccagcgugg

SEQ ID NO: 2301486 - RNA, 19 nt, Homo sapiens
  misc_RNA (1)...(19): siRNA sense strand
aggacauggaggagugaau

SEQ ID NO: 2301487 - RNA, 19 nt, Homo sapiens
  misc_RNA (1)...(19): siRNA sense strand
uggacgacaugaaggccaa

SEQ ID NO: 2301488 - RNA, 19 nt, Homo sapiens
  misc_RNA (1)...(19): siRNA sense strand
agguauuaugagacaggaa

SEQ ID NO: 2301489 - RNA, 19 nt, Homo sapiens
  misc_RNA (1)...(19): siRNA sense strand
gcugaauauaaacgccaaa

SEQ ID NO: 2301490 - RNA, 19 nt, Homo sapiens
  misc_RNA (1)...(19): siRNA sense strand
ccgccagaggauaguggaa

SEQ ID NO: 2301491 - RNA, 19 nt, Homo sapiens
  misc_RNA (1)...(19): siRNA sense strand
ccucaguauuccucguaca

SEQ ID NO: 2301492 - RNA, 19 nt, Homo sapiens
  misc_RNA (1)...(19): siRNA sense strand
cggugaacggguuggagaa

SEQ ID NO: 2301493 - RNA, 19 nt, Homo sapiens
  misc_RNA (1)...(19): siRNA sense strand
gcgugugcgacaaguacaa

SEQ ID NO: 2301494 - RNA, 19 nt, Homo sapiens
  misc_RNA (1)...(19): siRNA sense strand
ucaccgacauccugggcau

SEQ ID NO: 2301495 - RNA, 19 nt, Homo sapiens
  misc_RNA (1)...(19): siRNA sense strand
gggaaugcaggcagccaga

SEQ ID NO: 2301496 - RNA, 19 nt, Homo sapiens
  misc_RNA (1)...(19): siRNA sense strand
gugaaaggcuauugggcaa

SEQ ID NO: 2301497 - RNA, 19 nt, Homo sapiens
  misc_RNA (1)...(19): siRNA sense strand
cuccagaggugaaaggcua

SEQ ID NO: 2301498 - RNA, 19 nt, Homo sapiens
  misc_RNA (1)...(19): siRNA sense strand
ggugaaaggcuauugggca

SEQ ID NO: 2301499 - RNA, 19 nt, Homo sapiens
  misc_RNA (1)...(19): siRNA sense strand
gggaauuguccggagagaa

SEQ ID NO: 2301500 - RNA, 19 nt, Homo sapiens
  misc_RNA (1)...(19): siRNA sense strand
aagaaaggggagucgguua

SEQ ID NO: 2301501 - RNA, 19 nt, Homo sapiens
  misc_RNA (1)...(19): siRNA sense strand
agaaaggggagucgguuaa

SEQ ID NO: 2301502 - RNA, 19 nt, Homo sapiens
  misc_RNA (1)...(19): siRNA sense strand
ucuuaugcacggaaaggaa

SEQ ID NO: 2301503 - RNA, 19 nt, Homo sapiens
  misc_RNA (1)...(19): siRNA sense strand
cggaaaggaaguaggaagc

SEQ ID NO: 2301504 - RNA, 19 nt, Homo sapiens
  misc_RNA (1)...(19): siRNA sense strand
acggaaaggaaguaggaag

SEQ ID NO: 2301505 - RNA, 19 nt, Homo sapiens
  misc_RNA (1)...(19): siRNA sense strand
gggcaaguuuggaugcauc

SEQ ID NO: 2301506 - RNA, 19 nt, Homo sapiens
  misc_RNA (1)...(19): siRNA sense strand
ccacaaacuuccugacacu

SEQ ID NO: 2301507 - RNA, 19 nt, Homo sapiens
  misc_RNA (1)...(19): siRNA sense strand
caccagagauugugcacga

SEQ ID NO: 2301508 - RNA, 19 nt, Homo sapiens
  misc_RNA (1)...(19): siRNA sense strand
acuaaaggagauucagcua

SEQ ID NO: 2301509 - RNA, 19 nt, Homo sapiens
  misc_RNA (1)...(19): siRNA sense strand
agauugugcacgaggacuu

SEQ ID NO: 2301510 - RNA, 19 nt, Homo sapiens
  misc_RNA (1)...(19): siRNA sense strand
ggacaaacugggcgagggu

SEQ ID NO: 2301511 - RNA, 19 nt, Homo sapiens
  misc_RNA (1)...(19): siRNA sense strand
ugaagaagaucaaacggca

SEQ ID NO: 2301512 - RNA, 19 nt, Homo sapiens
  misc_RNA (1)...(19): siRNA sense strand
uguccaacgaggaguucaa

SEQ ID NO: 2301513 - RNA, 19 nt, Homo sapiens
  misc_RNA (1)...(19): siRNA sense strand
ucuuugaguaccuggacaa

SEQ ID NO: 2301514 - RNA, 19 nt, Homo sapiens
  misc_RNA (1)...(19): siRNA sense strand
cuacauuaagcuggacaaa

SEQ ID NO: 2301515 - RNA, 19 nt, Homo sapiens
  misc_RNA (1)...(19): siRNA sense strand
cgguggaggaacagcuaca

SEQ ID NO: 2301516 - RNA, 19 nt, Homo sapiens
  misc_RNA (1)...(19): siRNA sense strand
ggucugauggggagaguga

SEQ ID NO: 2301517 - RNA, 19 nt, Homo sapiens
  misc_RNA (1)...(19): siRNA sense strand
ccuacauuaagcuggacaa

SEQ ID NO: 2301518 - RNA, 19 nt, Homo sapiens
  misc_RNA (1)...(19): siRNA sense strand
uggacaaggaccugaagca

SEQ ID NO: 2301519 - RNA, 19 nt, Homo sapiens
  misc_RNA (1)...(19): siRNA sense strand
ccacaaacuuccugacacu

SEQ ID NO: 2301520 - RNA, 19 nt, Homo sapiens
  misc_RNA (1)...(19): siRNA sense strand
caccagagauugugcacga

SEQ ID NO: 2301521 - RNA, 19 nt, Homo sapiens
  misc_RNA (1)...(19): siRNA sense strand
acuaaaggagauucagcua

SEQ ID NO: 2301522 - RNA, 19 nt, Homo sapiens
  misc_RNA (1)...(19): siRNA sense strand
agauugugcacgaggacuu

SEQ ID NO: 2301523 - RNA, 19 nt, Homo sapiens
  misc_RNA (1)...(19): siRNA sense strand
ggacaaacugggcgagggu

SEQ ID NO: 2301524 - RNA, 19 nt, Homo sapiens
  misc_RNA (1)...(19): siRNA sense strand
ugaagaagaucaaacggca

SEQ ID NO: 2301525 - RNA, 19 nt, Homo sapiens
  misc_RNA (1)...(19): siRNA sense strand
uguccaacgaggaguucaa

SEQ ID NO: 2301526 - RNA, 19 nt, Homo sapiens
  misc_RNA (1)...(19): siRNA sense strand
ucuuugaguaccuggacaa

SEQ ID NO: 2301527 - RNA, 19 nt, Homo sapiens
  misc_RNA (1)...(19): siRNA sense strand
cuacauuaagcuggacaaa

SEQ ID NO: 2301528 - RNA, 19 nt, Homo sapiens
  misc_RNA (1)...(19): siRNA sense strand
cgguggaggaacagcuaca

SEQ ID NO: 2301529 - RNA, 19 nt, Homo sapiens
  misc_RNA (1)...(19): siRNA sense strand
ggucugauggggagaguga

SEQ ID NO: 2301530 - RNA, 19 nt, Homo sapiens
  misc_RNA (1)...(19): siRNA sense strand
ccuacauuaagcuggacaa

SEQ ID NO: 2301531 - RNA, 19 nt, Homo sapiens
  misc_RNA (1)...(19): siRNA sense strand
uggacaaggaccugaagca

SEQ ID NO: 2301532 - RNA, 19 nt, Homo sapiens
  misc_RNA (1)...(19): siRNA sense strand
ccacaaacuuccugacacu

SEQ ID NO: 2301533 - RNA, 19 nt, Homo sapiens
  misc_RNA (1)...(19): siRNA sense strand
caccagagauugugcacga

SEQ ID NO: 2301534 - RNA, 19 nt, Homo sapiens
  misc_RNA (1)...(19): siRNA sense strand
acuaaaggagauucagcua

SEQ ID NO: 2301535 - RNA, 19 nt, Homo sapiens
  misc_RNA (1)...(19): siRNA sense strand
agauugugcacgaggacuu

SEQ ID NO: 2301536 - RNA, 19 nt, Homo sapiens
  misc_RNA (1)...(19): siRNA sense strand
ggacaaacugggcgagggu

SEQ ID NO: 2301537 - RNA, 19 nt, Homo sapiens
  misc_RNA (1)...(19): siRNA sense strand
ugaagaagaucaaacggca

SEQ ID NO: 2301538 - RNA, 19 nt, Homo sapiens
  misc_RNA (1)...(19): siRNA sense strand
uguccaacgaggaguucaa

SEQ ID NO: 2301539 - RNA, 19 nt, Homo sapiens
  misc_RNA (1)...(19): siRNA sense strand
ucuuugaguaccuggacaa

SEQ ID NO: 2301540 - RNA, 19 nt, Homo sapiens
  misc_RNA (1)...(19): siRNA sense strand
cuacauuaagcuggacaaa

SEQ ID NO: 2301541 - RNA, 19 nt, Homo sapiens
  misc_RNA (1)...(19): siRNA sense strand
cgguggaggaacagcuaca

SEQ ID NO: 2301542 - RNA, 19 nt, Homo sapiens
  misc_RNA (1)...(19): siRNA sense strand
ggucugauggggagaguga

SEQ ID NO: 2301543 - RNA, 19 nt, Homo sapiens
  misc_RNA (1)...(19): siRNA sense strand
ccuacauuaagcuggacaa

SEQ ID NO: 2301544 - RNA, 19 nt, Homo sapiens
  misc_RNA (1)...(19): siRNA sense strand
uggacaaggaccugaagca

SEQ ID NO: 2301545 - RNA, 19 nt, Homo sapiens
  misc_RNA (1)...(19): siRNA sense strand
uugcauaagaauagggaua

SEQ ID NO: 2301546 - RNA, 19 nt, Homo sapiens
  misc_RNA (1)...(19): siRNA sense strand
uggaaaagauucaggaaau

SEQ ID NO: 2301547 - RNA, 19 nt, Homo sapiens
  misc_RNA (1)...(19): siRNA sense strand
ggugaaagacaguggagau

SEQ ID NO: 2301548 - RNA, 19 nt, Homo sapiens
  misc_RNA (1)...(19): siRNA sense strand
ggucaaagaaaugaagaaa

SEQ ID NO: 2301549 - RNA, 19 nt, Homo sapiens
  misc_RNA (1)...(19): siRNA sense strand
cuggagaagugaaaggcaa

SEQ ID NO: 2301550 - RNA, 19 nt, Homo sapiens
  misc_RNA (1)...(19): siRNA sense strand
gaaauucgcuggaggguca

SEQ ID NO: 2301551 - RNA, 19 nt, Homo sapiens
  misc_RNA (1)...(19): siRNA sense strand
ggaagaagacaguggccau

SEQ ID NO: 2301552 - RNA, 19 nt, Homo sapiens
  misc_RNA (1)...(19): siRNA sense strand
aaugaaacuuccuggacua

SEQ ID NO: 2301553 - RNA, 19 nt, Homo sapiens
  misc_RNA (1)...(19): siRNA sense strand
uggagaagugaaaggcaaa

SEQ ID NO: 2301554 - RNA, 19 nt, Homo sapiens
  misc_RNA (1)...(19): siRNA sense strand
guguauaagucaggggaaa

SEQ ID NO: 2301555 - RNA, 19 nt, Homo sapiens
  misc_RNA (1)...(19): siRNA sense strand
ccaaaguggaggagaccau

SEQ ID NO: 2301556 - RNA, 19 nt, Homo sapiens
  misc_RNA (1)...(19): siRNA sense strand
gcuagaaaggaaagagguu

SEQ ID NO: 2301557 - RNA, 19 nt, Homo sapiens
  misc_RNA (1)...(19): siRNA sense strand
aggaggaggaccugggcaa

SEQ ID NO: 2301558 - RNA, 19 nt, Homo sapiens
  misc_RNA (1)...(19): siRNA sense strand
aggucaaagaaaugaagaa

SEQ ID NO: 2301559 - RNA, 19 nt, Homo sapiens
  misc_RNA (1)...(19): siRNA sense strand
agagagaggacgagaccau

SEQ ID NO: 2301560 - RNA, 19 nt, Homo sapiens
  misc_RNA (1)...(19): siRNA sense strand
ggacagacggugaggugca

SEQ ID NO: 2301561 - RNA, 19 nt, Homo sapiens
  misc_RNA (1)...(19): siRNA sense strand
ggcaagaggaacagacaca

SEQ ID NO: 2301562 - RNA, 19 nt, Homo sapiens
  misc_RNA (1)...(19): siRNA sense strand
ccaccuucaucaagagaga

SEQ ID NO: 2301563 - RNA, 19 nt, Homo sapiens
  misc_RNA (1)...(19): siRNA sense strand
cauuauaccuugucgcaca

SEQ ID NO: 2301564 - RNA, 19 nt, Homo sapiens
  misc_RNA (1)...(19): siRNA sense strand
ggaaggugguugaaggaac

SEQ ID NO: 2301565 - RNA, 19 nt, Homo sapiens
  misc_RNA (1)...(19): siRNA sense strand
gugaaagacaguggagauu

SEQ ID NO: 2301566 - RNA, 19 nt, Homo sapiens
  misc_RNA (1)...(19): siRNA sense strand
cagaaaccgagguaugaaa

SEQ ID NO: 2301567 - RNA, 19 nt, Homo sapiens
  misc_RNA (1)...(19): siRNA sense strand
gguugaaggaacagccuau

SEQ ID NO: 2301568 - RNA, 19 nt, Homo sapiens
  misc_RNA (1)...(19): siRNA sense strand
ccgauguggaaaucagaaa

SEQ ID NO: 2301569 - RNA, 19 nt, Homo sapiens
  misc_RNA (1)...(19): siRNA sense strand
guggaaaagauucaggaaa

SEQ ID NO: 2301570 - RNA, 19 nt, Homo sapiens
  misc_RNA (1)...(19): siRNA sense strand
ccacauuugaacauuguaa

SEQ ID NO: 2301571 - RNA, 19 nt, Homo sapiens
  misc_RNA (1)...(19): siRNA sense strand
ccgugugacuuucgccaaa

SEQ ID NO: 2301572 - RNA, 19 nt, Homo sapiens
  misc_RNA (1)...(19): siRNA sense strand
ucaugaaaguugcagugaa

SEQ ID NO: 2301573 - RNA, 19 nt, Homo sapiens
  misc_RNA (1)...(19): siRNA sense strand
ccucuaggaaugacggauu

SEQ ID NO: 2301574 - RNA, 19 nt, Homo sapiens
  misc_RNA (1)...(19): siRNA sense strand
ugaaaguugcagugaagau

SEQ ID NO: 2301575 - RNA, 19 nt, Homo sapiens
  misc_RNA (1)...(19): siRNA sense strand
gggauagcuuccugagcca

SEQ ID NO: 2301576 - RNA, 19 nt, Homo sapiens
  misc_RNA (1)...(19): siRNA sense strand
ucuacgagaucauggugaa

SEQ ID NO: 2301577 - RNA, 19 nt, Homo sapiens
  misc_RNA (1)...(19): siRNA sense strand
aggccaccgucaaaggaaa

SEQ ID NO: 2301578 - RNA, 19 nt, Homo sapiens
  misc_RNA (1)...(19): siRNA sense strand
ccugauauugaguggauga

SEQ ID NO: 2301579 - RNA, 19 nt, Homo sapiens
  misc_RNA (1)...(19): siRNA sense strand
uggucaacuauuugcauaa

SEQ ID NO: 2301580 - RNA, 19 nt, Homo sapiens
  misc_RNA (1)...(19): siRNA sense strand
ggaagaaaucaaaguccca

SEQ ID NO: 2301581 - RNA, 19 nt, Homo sapiens
  misc_RNA (1)...(19): siRNA sense strand
ugucauuuggaaacagaaa

SEQ ID NO: 2301582 - RNA, 19 nt, Homo sapiens
  misc_RNA (1)...(19): siRNA sense strand
gagugagauuguggagaau

SEQ ID NO: 2301583 - RNA, 19 nt, Homo sapiens
  misc_RNA (1)...(19): siRNA sense strand
cuggaugagcagagacuga

SEQ ID NO: 2301584 - RNA, 19 nt, Homo sapiens
  misc_RNA (1)...(19): siRNA sense strand
ccgucaaaggaaagaaguu

SEQ ID NO: 2301585 - RNA, 19 nt, Homo sapiens
  misc_RNA (1)...(19): siRNA sense strand
gaagcaaauuaaagcugau

SEQ ID NO: 2301586 - RNA, 19 nt, Homo sapiens
  misc_RNA (1)...(19): siRNA sense strand
ccucauauaagaagaaauc

SEQ ID NO: 2301587 - RNA, 19 nt, Homo sapiens
  misc_RNA (1)...(19): siRNA sense strand
gcguguggacucagacaau

SEQ ID NO: 2301588 - RNA, 19 nt, Homo sapiens
  misc_RNA (1)...(19): siRNA sense strand
gaagacaagcugaaggacu

SEQ ID NO: 2301589 - RNA, 19 nt, Homo sapiens
  misc_RNA (1)...(19): siRNA sense strand
agacagggcuuuaauggga

SEQ ID NO: 2301590 - RNA, 19 nt, Homo sapiens
  misc_RNA (1)...(19): siRNA sense strand
cugagaaccgagagcugaa

SEQ ID NO: 2301591 - RNA, 19 nt, Homo sapiens
  misc_RNA (1)...(19): siRNA sense strand
ugugaagaucugugacuuu

SEQ ID NO: 2301592 - RNA, 19 nt, Homo sapiens
  misc_RNA (1)...(19): siRNA sense strand
cucuaggaaugacggauua

SEQ ID NO: 2301593 - RNA, 19 nt, Homo sapiens
  misc_RNA (1)...(19): siRNA sense strand
gugaagucuacgagaucau

SEQ ID NO: 2301594 - RNA, 19 nt, Homo sapiens
  misc_RNA (1)...(19): siRNA sense strand
ggaacagugagccggagaa

SEQ ID NO: 2301595 - RNA, 19 nt, Homo sapiens
  misc_RNA (1)...(19): siRNA sense strand
gagcagagacugagcgcug

SEQ ID NO: 2301596 - RNA, 19 nt, Homo sapiens
  misc_RNA (1)...(19): siRNA sense strand
gggaaacgauuguggucac

SEQ ID NO: 2301597 - RNA, 19 nt, Homo sapiens
  misc_RNA (1)...(19): siRNA sense strand
acggccagauccagugaaa

SEQ ID NO: 2301598 - RNA, 19 nt, Homo sapiens
  misc_RNA (1)...(19): siRNA sense strand
auggagauuuggucaacua

SEQ ID NO: 2301599 - RNA, 19 nt, Homo sapiens
  misc_RNA (1)...(19): siRNA sense strand
acgaggaagacaagcugaa

SEQ ID NO: 2301600 - RNA, 19 nt, Homo sapiens
  misc_RNA (1)...(19): siRNA sense strand
gauucaggaaauaagguau

SEQ ID NO: 2301601 - RNA, 19 nt, Homo sapiens
  misc_RNA (1)...(19): siRNA sense strand
uggacuuggucgaugauca

SEQ ID NO: 2301602 - RNA, 19 nt, Homo sapiens
  misc_RNA (1)...(19): siRNA sense strand
cggauggacaugaauauau

SEQ ID NO: 2301603 - RNA, 19 nt, Homo sapiens
  misc_RNA (1)...(19): siRNA sense strand
agaaugagcuugaaggcag

SEQ ID NO: 2301604 - RNA, 19 nt, Homo sapiens
  misc_RNA (1)...(19): siRNA sense strand
cgaagcaaauuaaagcuga

SEQ ID NO: 2301605 - RNA, 19 nt, Homo sapiens
  misc_RNA (1)...(19): siRNA sense strand
uuacaucaucacagaguau

SEQ ID NO: 2301606 - RNA, 19 nt, Homo sapiens
  misc_RNA (1)...(19): siRNA sense strand
ccagagaagccaaagaaag

SEQ ID NO: 2301607 - RNA, 19 nt, Homo sapiens
  misc_RNA (1)...(19): siRNA sense strand
acacucagacagaagagaa

SEQ ID NO: 2301608 - RNA, 19 nt, Homo sapiens
  misc_RNA (1)...(19): siRNA sense strand
agugaaaggcaaaggcauc

SEQ ID NO: 2301609 - RNA, 19 nt, Homo sapiens
  misc_RNA (1)...(19): siRNA sense strand
cugagagcaucuuugacaa

SEQ ID NO: 2301610 - RNA, 19 nt, Homo sapiens
  misc_RNA (1)...(19): siRNA sense strand
aggaagacaagcugaagga

SEQ ID NO: 2301611 - RNA, 19 nt, Homo sapiens
  misc_RNA (1)...(19): siRNA sense strand
ucaucaagagagaggacga

SEQ ID NO: 2301612 - RNA, 19 nt, Homo sapiens
  misc_RNA (1)...(19): siRNA sense strand
ucgccaaaguggaggagac

SEQ ID NO: 2301613 - RNA, 19 nt, Homo sapiens
  misc_RNA (1)...(19): siRNA sense strand
ggguuguacacuugcuauu

SEQ ID NO: 2301614 - RNA, 19 nt, Homo sapiens
  misc_RNA (1)...(19): siRNA sense strand
gcaggaaggacgaggccaa

SEQ ID NO: 2301615 - RNA, 19 nt, Homo sapiens
  misc_RNA (1)...(19): siRNA sense strand
acaagaaggugaagcccaa

SEQ ID NO: 2301616 - RNA, 19 nt, Homo sapiens
  misc_RNA (1)...(19): siRNA sense strand
auguaaagggaguagaauu

SEQ ID NO: 2301617 - RNA, 19 nt, Homo sapiens
  misc_RNA (1)...(19): siRNA sense strand
ggaggauguuacuggccaa

SEQ ID NO: 2301618 - RNA, 19 nt, Homo sapiens
  misc_RNA (1)...(19): siRNA sense strand
aaaagaaccaggagagaau

SEQ ID NO: 2301619 - RNA, 19 nt, Homo sapiens
  misc_RNA (1)...(19): siRNA sense strand
ggggcaaacuguagagcuu

SEQ ID NO: 2301620 - RNA, 19 nt, Homo sapiens
  misc_RNA (1)...(19): siRNA sense strand
ccaggagagaauagaauca

SEQ ID NO: 2301621 - RNA, 19 nt, Homo sapiens
  misc_RNA (1)...(19): siRNA sense strand
gcuucgauguaaagggagu

SEQ ID NO: 2301622 - RNA, 19 nt, Homo sapiens
  misc_RNA (1)...(19): siRNA sense strand
cuaccaacaagaaggugaa

SEQ ID NO: 2301623 - RNA, 19 nt, Homo sapiens
  misc_RNA (1)...(19): siRNA sense strand
augaaaggccugugacgau

SEQ ID NO: 2301624 - RNA, 19 nt, Homo sapiens
  misc_RNA (1)...(19): siRNA sense strand
ccaaggagaucccagccaa

SEQ ID NO: 2301625 - RNA, 19 nt, Homo sapiens
  misc_RNA (1)...(19): siRNA sense strand
agacgauugaugcaggaua

SEQ ID NO: 2301626 - RNA, 19 nt, Homo sapiens
  misc_RNA (1)...(19): siRNA sense strand
ucaagcagaaugagcgcua

SEQ ID NO: 2301627 - RNA, 19 nt, Homo sapiens
  misc_RNA (1)...(19): siRNA sense strand
acuugaacccggacagaca

SEQ ID NO: 2301628 - RNA, 19 nt, Homo sapiens
  misc_RNA (1)...(19): siRNA sense strand
ccgauguggagguggaguu

SEQ ID NO: 2301629 - RNA, 19 nt, Homo sapiens
  misc_RNA (1)...(19): siRNA sense strand
cggacauuguuuaugacau

SEQ ID NO: 2301630 - RNA, 19 nt, Homo sapiens
  misc_RNA (1)...(19): siRNA sense strand
gcagaaggaugaaaggccu

SEQ ID NO: 2301631 - RNA, 19 nt, Homo sapiens
  misc_RNA (1)...(19): siRNA sense strand
cccaagaacaagcguccaa

SEQ ID NO: 2301632 - RNA, 19 nt, Homo sapiens
  misc_RNA (1)...(19): siRNA sense strand
ccuaccaacaagaagguga

SEQ ID NO: 2301633 - RNA, 19 nt, Homo sapiens
  misc_RNA (1)...(19): siRNA sense strand
ugaccgugcugucggccaa

SEQ ID NO: 2301634 - RNA, 19 nt, Homo sapiens
  misc_RNA (1)...(19): siRNA sense strand
gugucauuacaguggaaga

SEQ ID NO: 2301635 - RNA, 19 nt, Homo sapiens
  misc_RNA (1)...(19): siRNA sense strand
agaaauaggaacaaagcaa

SEQ ID NO: 2301636 - RNA, 19 nt, Homo sapiens
  misc_RNA (1)...(19): siRNA sense strand
uggaaaucuaucagagaaa

SEQ ID NO: 2301637 - RNA, 19 nt, Homo sapiens
  misc_RNA (1)...(19): siRNA sense strand
uggagaaacagcagagcaa

SEQ ID NO: 2301638 - RNA, 19 nt, Homo sapiens
  misc_RNA (1)...(19): siRNA sense strand
gagaaacagcagagcaauu

SEQ ID NO: 2301639 - RNA, 19 nt, Homo sapiens
  misc_RNA (1)...(19): siRNA sense strand
ggaaaauggcggaaaguuu

SEQ ID NO: 2301640 - RNA, 19 nt, Homo sapiens
  misc_RNA (1)...(19): siRNA sense strand
ugcacuaauucaagagaaa

SEQ ID NO: 2301641 - RNA, 19 nt, Homo sapiens
  misc_RNA (1)...(19): siRNA sense strand
agauuaaagagaaggaaga

SEQ ID NO: 2301642 - RNA, 19 nt, Homo sapiens
  misc_RNA (1)...(19): siRNA sense strand
caaacugacauuaaggaaa

SEQ ID NO: 2301643 - RNA, 19 nt, Homo sapiens
  misc_RNA (1)...(19): siRNA sense strand
aggaagaagcccagcaaga

SEQ ID NO: 2301644 - RNA, 19 nt, Homo sapiens
  misc_RNA (1)...(19): siRNA sense strand
ccaaagaagauguagacuu

SEQ ID NO: 2301645 - RNA, 19 nt, Homo sapiens
  misc_RNA (1)...(19): siRNA sense strand
cagcagagcaauugcaaaa

SEQ ID NO: 2301646 - RNA, 19 nt, Homo sapiens
  misc_RNA (1)...(19): siRNA sense strand
gggauuuauuucagugauu

SEQ ID NO: 2301647 - RNA, 19 nt, Homo sapiens
  misc_RNA (1)...(19): siRNA sense strand
gguaagaagaacugaagga

SEQ ID NO: 2301648 - RNA, 19 nt, Homo sapiens
  misc_RNA (1)...(19): siRNA sense strand
ccauuacagucaaggcuaa

SEQ ID NO: 2301649 - RNA, 19 nt, Homo sapiens
  misc_RNA (1)...(19): siRNA sense strand
aggacaaggcuuugaauga

SEQ ID NO: 2301650 - RNA, 19 nt, Homo sapiens
  misc_RNA (1)...(19): siRNA sense strand
gcgauuuaguagagaugau

SEQ ID NO: 2301651 - RNA, 19 nt, Homo sapiens
  misc_RNA (1)...(19): siRNA sense strand
caagcaagugaauggguaa

SEQ ID NO: 2301652 - RNA, 19 nt, Homo sapiens
  misc_RNA (1)...(19): siRNA sense strand
ccuuggagaaagugggaau

SEQ ID NO: 2301653 - RNA, 19 nt, Homo sapiens
  misc_RNA (1)...(19): siRNA sense strand
aguaaaggcagcacugaaa

SEQ ID NO: 2301654 - RNA, 19 nt, Homo sapiens
  misc_RNA (1)...(19): siRNA sense strand
gguuaaugucugugaaacu

SEQ ID NO: 2301655 - RNA, 19 nt, Homo sapiens
  misc_RNA (1)...(19): siRNA sense strand
agaaaagggaugagaauga

SEQ ID NO: 2301656 - RNA, 19 nt, Homo sapiens
  misc_RNA (1)...(19): siRNA sense strand
gaucagaaggcgagcaguu

SEQ ID NO: 2301657 - RNA, 19 nt, Homo sapiens
  misc_RNA (1)...(19): siRNA sense strand
cuuuguggcaguugagaaa

SEQ ID NO: 2301658 - RNA, 19 nt, Homo sapiens
  misc_RNA (1)...(19): siRNA sense strand
ugaacagaauacugaagaa

SEQ ID NO: 2301659 - RNA, 19 nt, Homo sapiens
  misc_RNA (1)...(19): siRNA sense strand
gcaagcaagugaaugggua

SEQ ID NO: 2301660 - RNA, 19 nt, Homo sapiens
  misc_RNA (1)...(19): siRNA sense strand
aaguaaaagaagaggauga

SEQ ID NO: 2301661 - RNA, 19 nt, Homo sapiens
  misc_RNA (1)...(19): siRNA sense strand
acauaguuggagagauuaa

SEQ ID NO: 2301662 - RNA, 19 nt, Homo sapiens
  misc_RNA (1)...(19): siRNA sense strand
cccaagaagccgucaggaa

SEQ ID NO: 2301663 - RNA, 19 nt, Homo sapiens
  misc_RNA (1)...(19): siRNA sense strand
aauauaacaccuuggagaa

SEQ ID NO: 2301664 - RNA, 19 nt, Homo sapiens
  misc_RNA (1)...(19): siRNA sense strand
ccauggagggugugacauu

SEQ ID NO: 2301665 - RNA, 19 nt, Homo sapiens
  misc_RNA (1)...(19): siRNA sense strand
gcucgagggucacggaaca

SEQ ID NO: 2301666 - RNA, 19 nt, Homo sapiens
  misc_RNA (1)...(19): siRNA sense strand
agugaauggguaagaagaa

SEQ ID NO: 2301667 - RNA, 19 nt, Homo sapiens
  misc_RNA (1)...(19): siRNA sense strand
aaauauaacaccuuggaga

SEQ ID NO: 2301668 - RNA, 19 nt, Homo sapiens
  misc_RNA (1)...(19): siRNA sense strand
acauugaagaacugaagaa

SEQ ID NO: 2301669 - RNA, 19 nt, Homo sapiens
  misc_RNA (1)...(19): siRNA sense strand
gggacuauuggcuaagaaa

SEQ ID NO: 2301670 - RNA, 19 nt, Homo sapiens
  misc_RNA (1)...(19): siRNA sense strand
caaugagagcgaagugauu

SEQ ID NO: 2301671 - RNA, 19 nt, Homo sapiens
  misc_RNA (1)...(19): siRNA sense strand
aaagaacagacgucggaaa

SEQ ID NO: 2301672 - RNA, 19 nt, Homo sapiens
  misc_RNA (1)...(19): siRNA sense strand
aggauacaguagagaagau

SEQ ID NO: 2301673 - RNA, 19 nt, Homo sapiens
  misc_RNA (1)...(19): siRNA sense strand
ccaagaggugagcgauuua

SEQ ID NO: 2301674 - RNA, 19 nt, Homo sapiens
  misc_RNA (1)...(19): siRNA sense strand
ggagaaaacagauagaaga

SEQ ID NO: 2301675 - RNA, 19 nt, Homo sapiens
  misc_RNA (1)...(19): siRNA sense strand
aggaagacacuguggaacu

SEQ ID NO: 2301676 - RNA, 19 nt, Homo sapiens
  misc_RNA (1)...(19): siRNA sense strand
aaaccuuggaagugggauu

SEQ ID NO: 2301677 - RNA, 19 nt, Homo sapiens
  misc_RNA (1)...(19): siRNA sense strand
uacccaaaguaguggaaga

SEQ ID NO: 2301678 - RNA, 19 nt, Homo sapiens
  misc_RNA (1)...(19): siRNA sense strand
cuuugaggaugaugaauuu

SEQ ID NO: 2301679 - RNA, 19 nt, Homo sapiens
  misc_RNA (1)...(19): siRNA sense strand
gauuaaagagaaggaagaa

SEQ ID NO: 2301680 - RNA, 19 nt, Homo sapiens
  misc_RNA (1)...(19): siRNA sense strand
aagcauaguuggagaaaac

SEQ ID NO: 2301681 - RNA, 19 nt, Homo sapiens
  misc_RNA (1)...(19): siRNA sense strand
gaaagucaguccaugggaa

SEQ ID NO: 2301682 - RNA, 19 nt, Homo sapiens
  misc_RNA (1)...(19): siRNA sense strand
uguaaaaggaagagaaugu

SEQ ID NO: 2301683 - RNA, 19 nt, Homo sapiens
  misc_RNA (1)...(19): siRNA sense strand
ggaagcacauaguuggaga

SEQ ID NO: 2301684 - RNA, 19 nt, Homo sapiens
  misc_RNA (1)...(19): siRNA sense strand
uuggagagauuaaagagaa

SEQ ID NO: 2301685 - RNA, 19 nt, Homo sapiens
  misc_RNA (1)...(19): siRNA sense strand
gaccaaaugaccaggcuau

SEQ ID NO: 2301686 - RNA, 19 nt, Homo sapiens
  misc_RNA (1)...(19): siRNA sense strand
ugagaaaagggaugagaau

SEQ ID NO: 2301687 - RNA, 19 nt, Homo sapiens
  misc_RNA (1)...(19): siRNA sense strand
aagaagaacugaaggacag

SEQ ID NO: 2301688 - RNA, 19 nt, Homo sapiens
  misc_RNA (1)...(19): siRNA sense strand
uagaagacaguuugcuaua

SEQ ID NO: 2301689 - RNA, 19 nt, Homo sapiens
  misc_RNA (1)...(19): siRNA sense strand
acugaagaaacaaggauuu

SEQ ID NO: 2301690 - RNA, 19 nt, Homo sapiens
  misc_RNA (1)...(19): siRNA sense strand
caguaagagcccaguggau

SEQ ID NO: 2301691 - RNA, 19 nt, Homo sapiens
  misc_RNA (1)...(19): siRNA sense strand
caucagagguuuugggucu

SEQ ID NO: 2301692 - RNA, 19 nt, Homo sapiens
  misc_RNA (1)...(19): siRNA sense strand
ggaaguaaaagaagaggau

SEQ ID NO: 2301693 - RNA, 19 nt, Homo sapiens
  misc_RNA (1)...(19): siRNA sense strand
uacaaaacaucgugggaau

SEQ ID NO: 2301694 - RNA, 19 nt, Homo sapiens
  misc_RNA (1)...(19): siRNA sense strand
gugcauggaguuucacaaa

SEQ ID NO: 2301695 - RNA, 19 nt, Homo sapiens
  misc_RNA (1)...(19): siRNA sense strand
gguaucgguucuacagcaa

SEQ ID NO: 2301696 - RNA, 19 nt, Homo sapiens
  misc_RNA (1)...(19): siRNA sense strand
cgugcuuucuggaaguaaa

SEQ ID NO: 2301697 - RNA, 19 nt, Homo sapiens
  misc_RNA (1)...(19): siRNA sense strand
uaagaagaacugaaggaca

SEQ ID NO: 2301698 - RNA, 19 nt, Homo sapiens
  misc_RNA (1)...(19): siRNA sense strand
agaauaaaacccagggauu

SEQ ID NO: 2301699 - RNA, 19 nt, Homo sapiens
  misc_RNA (1)...(19): siRNA sense strand
aggugaaaccauuaggauu

SEQ ID NO: 2301700 - RNA, 19 nt, Homo sapiens
  misc_RNA (1)...(19): siRNA sense strand
gugaaaggagaaagaacca

SEQ ID NO: 2301701 - RNA, 19 nt, Homo sapiens
  misc_RNA (1)...(19): siRNA sense strand
agaugugaccauuucgaaa

SEQ ID NO: 2301702 - RNA, 19 nt, Homo sapiens
  misc_RNA (1)...(19): siRNA sense strand
uguaggaauagcacauaaa

SEQ ID NO: 2301703 - RNA, 19 nt, Homo sapiens
  misc_RNA (1)...(19): siRNA sense strand
ggaccuaauauuauggcca

SEQ ID NO: 2301704 - RNA, 19 nt, Homo sapiens
  misc_RNA (1)...(19): siRNA sense strand
acuugugaaaggagaaaga

SEQ ID NO: 2301705 - RNA, 19 nt, Homo sapiens
  misc_RNA (1)...(19): siRNA sense strand
aguuguaggaauagcacau

SEQ ID NO: 2301706 - RNA, 19 nt, Homo sapiens
  misc_RNA (1)...(19): siRNA sense strand
cgacuugugaaaggagaaa

SEQ ID NO: 2301707 - RNA, 19 nt, Homo sapiens
  misc_RNA (1)...(19): siRNA sense strand
uaacccuggaacagagaaa

SEQ ID NO: 2301708 - RNA, 19 nt, Homo sapiens
  misc_RNA (1)...(19): siRNA sense strand
cugcagaaaggaggugaaa

SEQ ID NO: 2301709 - RNA, 19 nt, Homo sapiens
  misc_RNA (1)...(19): siRNA sense strand
agaaaggaggugaaaccau

SEQ ID NO: 2301710 - RNA, 19 nt, Homo sapiens
  misc_RNA (1)...(19): siRNA sense strand
cagggauuccggaaggcaa

SEQ ID NO: 2301711 - RNA, 19 nt, Homo sapiens
  misc_RNA (1)...(19): siRNA sense strand
augcacacaauguugauaa

SEQ ID NO: 2301712 - RNA, 19 nt, Homo sapiens
  misc_RNA (1)...(19): siRNA sense strand
cugaaaauagcgugaacuu

SEQ ID NO: 2301713 - RNA, 19 nt, Homo sapiens
  misc_RNA (1)...(19): siRNA sense strand
gguacaacugggagccaaa

SEQ ID NO: 2301714 - RNA, 19 nt, Homo sapiens
  misc_RNA (1)...(19): siRNA sense strand
cugcagaagguauggauau

SEQ ID NO: 2301715 - RNA, 19 nt, Homo sapiens
  misc_RNA (1)...(19): siRNA sense strand
guuuaugggaagagugaca

SEQ ID NO: 2301716 - RNA, 19 nt, Homo sapiens
  misc_RNA (1)...(19): siRNA sense strand
ugaacauaaccgagauauu

SEQ ID NO: 2301717 - RNA, 19 nt, Homo sapiens
  misc_RNA (1)...(19): siRNA sense strand
cuuacaaaggugaugaauu

SEQ ID NO: 2301718 - RNA, 19 nt, Homo sapiens
  misc_RNA (1)...(19): siRNA sense strand
agacauguuuucaggggaa

SEQ ID NO: 2301719 - RNA, 19 nt, Homo sapiens
  misc_RNA (1)...(19): siRNA sense strand
ugagaugcaagaagaggaa

SEQ ID NO: 2301720 - RNA, 19 nt, Homo sapiens
  misc_RNA (1)...(19): siRNA sense strand
cugacacccaggagauaaa

SEQ ID NO: 2301721 - RNA, 19 nt, Homo sapiens
  misc_RNA (1)...(19): siRNA sense strand
ccgaauuugcaguggaucu

SEQ ID NO: 2301722 - RNA, 19 nt, Homo sapiens
  misc_RNA (1)...(19): siRNA sense strand
ggagauaaaaggaagagau

SEQ ID NO: 2301723 - RNA, 19 nt, Homo sapiens
  misc_RNA (1)...(19): siRNA sense strand
aggacacacagcugauaaa

SEQ ID NO: 2301724 - RNA, 19 nt, Homo sapiens
  misc_RNA (1)...(19): siRNA sense strand
aggagauuggaaacagaaa

SEQ ID NO: 2301725 - RNA, 19 nt, Homo sapiens
  misc_RNA (1)...(19): siRNA sense strand
acugggagccaaaggaaaa

SEQ ID NO: 2301726 - RNA, 19 nt, Homo sapiens
  misc_RNA (1)...(19): siRNA sense strand
ugacaaauccugacaccca

SEQ ID NO: 2301727 - RNA, 19 nt, Homo sapiens
  misc_RNA (1)...(19): siRNA sense strand
ugcaagaagaggaaguaga

SEQ ID NO: 2301728 - RNA, 19 nt, Homo sapiens
  misc_RNA (1)...(19): siRNA sense strand
agauaaaugaagaugguag

SEQ ID NO: 2301729 - RNA, 19 nt, Homo sapiens
  misc_RNA (1)...(19): siRNA sense strand
ugaagaugguagugaagcu

SEQ ID NO: 2301730 - RNA, 19 nt, Homo sapiens
  misc_RNA (1)...(19): siRNA sense strand
gcuugugcagagaugauaa

SEQ ID NO: 2301731 - RNA, 19 nt, Homo sapiens
  misc_RNA (1)...(19): siRNA sense strand
cuguuuaugggaagaguga

SEQ ID NO: 2301732 - RNA, 19 nt, Homo sapiens
  misc_RNA (1)...(19): siRNA sense strand
cugaaucuucccugaacua

SEQ ID NO: 2301733 - RNA, 19 nt, Homo sapiens
  misc_RNA (1)...(19): siRNA sense strand
ccugcagaagguauggaua

SEQ ID NO: 2301734 - RNA, 19 nt, Homo sapiens
  misc_RNA (1)...(19): siRNA sense strand
agaugcaagaagaggaagu

SEQ ID NO: 2301735 - RNA, 19 nt, Homo sapiens
  misc_RNA (1)...(19): siRNA sense strand
acgugaaggcaaugagaaa

SEQ ID NO: 2301736 - RNA, 19 nt, Homo sapiens
  misc_RNA (1)...(19): siRNA sense strand
aggcaaugagaaagaaaua

SEQ ID NO: 2301737 - RNA, 19 nt, Homo sapiens
  misc_RNA (1)...(19): siRNA sense strand
guaucgagaaauugacaaa

SEQ ID NO: 2301738 - RNA, 19 nt, Homo sapiens
  misc_RNA (1)...(19): siRNA sense strand
gugaaggcaaugagaaaga

SEQ ID NO: 2301739 - RNA, 19 nt, Homo sapiens
  misc_RNA (1)...(19): siRNA sense strand
caguagaagaagauuggaa

SEQ ID NO: 2301740 - RNA, 19 nt, Homo sapiens
  misc_RNA (1)...(19): siRNA sense strand
aguuuaaacgugaaggcaa

SEQ ID NO: 2301741 - RNA, 19 nt, Homo sapiens
  misc_RNA (1)...(19): siRNA sense strand
agggaagaagugaaugaaa

SEQ ID NO: 2301742 - RNA, 19 nt, Homo sapiens
  misc_RNA (1)...(19): siRNA sense strand
guagaagaagauuggaaga

SEQ ID NO: 2301743 - RNA, 19 nt, Homo sapiens
  misc_RNA (1)...(19): siRNA sense strand
caaaagaaguugaacgagu

SEQ ID NO: 2301744 - RNA, 19 nt, Homo sapiens
  misc_RNA (1)...(19): siRNA sense strand
ugaacgagugguugggcaa

SEQ ID NO: 2301745 - RNA, 19 nt, Homo sapiens
  misc_RNA (1)...(19): siRNA sense strand
cccaagagcgguacagcaa

SEQ ID NO: 2301746 - RNA, 19 nt, Homo sapiens
  misc_RNA (1)...(19): siRNA sense strand
uaauaaaccacuaccggaa

SEQ ID NO: 2301747 - RNA, 19 nt, Homo sapiens
  misc_RNA (1)...(19): siRNA sense strand
caggaaauccaaaugaaaa

SEQ ID NO: 2301748 - RNA, 19 nt, Homo sapiens
  misc_RNA (1)...(19): siRNA sense strand
cagugaaauuauugacagu

SEQ ID NO: 2301749 - RNA, 19 nt, Homo sapiens
  misc_RNA (1)...(19): siRNA sense strand
auauugaagcuguagggaa

SEQ ID NO: 2301750 - RNA, 19 nt, Homo sapiens
  misc_RNA (1)...(19): siRNA sense strand
uagaagaagauuggaagaa

SEQ ID NO: 2301751 - RNA, 19 nt, Homo sapiens
  misc_RNA (1)...(19): siRNA sense strand
caaccgaaacaaagcugaa

SEQ ID NO: 2301752 - RNA, 19 nt, Homo sapiens
  misc_RNA (1)...(19): siRNA sense strand
cuguagugguggacggcga

SEQ ID NO: 2301753 - RNA, 19 nt, Homo sapiens
  misc_RNA (1)...(19): siRNA sense strand
aagcagcaaccgaaacaaa

SEQ ID NO: 2301754 - RNA, 19 nt, Homo sapiens
  misc_RNA (1)...(19): siRNA sense strand
caaaugaaaaggacagcua

SEQ ID NO: 2301755 - RNA, 19 nt, Homo sapiens
  misc_RNA (1)...(19): siRNA sense strand
gagcgguacagcaaagaau

SEQ ID NO: 2301756 - RNA, 19 nt, Homo sapiens
  misc_RNA (1)...(19): siRNA sense strand
gaagaagacuugaagaagc

SEQ ID NO: 2301757 - RNA, 19 nt, Homo sapiens
  misc_RNA (1)...(19): siRNA sense strand
cagcauuaaaccagaccuu

SEQ ID NO: 2301758 - RNA, 19 nt, Homo sapiens
  misc_RNA (1)...(19): siRNA sense strand
ggaaugaaucucuagcuca

SEQ ID NO: 2301759 - RNA, 19 nt, Homo sapiens
  misc_RNA (1)...(19): siRNA sense strand
ugguggaagaugaugaaga

SEQ ID NO: 2301760 - RNA, 19 nt, Homo sapiens
  misc_RNA (1)...(19): siRNA sense strand
ugguggacggcgaaguaaa

SEQ ID NO: 2301761 - RNA, 19 nt, Homo sapiens
  misc_RNA (1)...(19): siRNA sense strand
agcugaguaucgagaaauu

SEQ ID NO: 2301762 - RNA, 19 nt, Homo sapiens
  misc_RNA (1)...(19): siRNA sense strand
ggcaaaagaaguugaacga

SEQ ID NO: 2301763 - RNA, 19 nt, Homo sapiens
  misc_RNA (1)...(19): siRNA sense strand
gucgagaauaugauagauu

SEQ ID NO: 2301764 - RNA, 19 nt, Homo sapiens
  misc_RNA (1)...(19): siRNA sense strand
gucucgaaucagugaaauu

SEQ ID NO: 2301765 - RNA, 19 nt, Homo sapiens
  misc_RNA (1)...(19): siRNA sense strand
cuacuaaaaugcaugguga

SEQ ID NO: 2301766 - RNA, 19 nt, Homo sapiens
  misc_RNA (1)...(19): siRNA sense strand
agaaguugaacgagugguu

SEQ ID NO: 2301767 - RNA, 19 nt, Homo sapiens
  misc_RNA (1)...(19): siRNA sense strand
auucacugguggaagauga

SEQ ID NO: 2301768 - RNA, 19 nt, Homo sapiens
  misc_RNA (1)...(19): siRNA sense strand
gauuggaagaagacuugaa

SEQ ID NO: 2301769 - RNA, 19 nt, Homo sapiens
  misc_RNA (1)...(19): siRNA sense strand
acgugaaggcaaugagaaa

SEQ ID NO: 2301770 - RNA, 19 nt, Homo sapiens
  misc_RNA (1)...(19): siRNA sense strand
aggcaaugagaaagaaaua

SEQ ID NO: 2301771 - RNA, 19 nt, Homo sapiens
  misc_RNA (1)...(19): siRNA sense strand
guaucgagaaauugacaaa

SEQ ID NO: 2301772 - RNA, 19 nt, Homo sapiens
  misc_RNA (1)...(19): siRNA sense strand
gugaaggcaaugagaaaga

SEQ ID NO: 2301773 - RNA, 19 nt, Homo sapiens
  misc_RNA (1)...(19): siRNA sense strand
caguagaagaagauuggaa

SEQ ID NO: 2301774 - RNA, 19 nt, Homo sapiens
  misc_RNA (1)...(19): siRNA sense strand
aguuuaaacgugaaggcaa

SEQ ID NO: 2301775 - RNA, 19 nt, Homo sapiens
  misc_RNA (1)...(19): siRNA sense strand
agggaagaagugaaugaaa

SEQ ID NO: 2301776 - RNA, 19 nt, Homo sapiens
  misc_RNA (1)...(19): siRNA sense strand
guagaagaagauuggaaga

SEQ ID NO: 2301777 - RNA, 19 nt, Homo sapiens
  misc_RNA (1)...(19): siRNA sense strand
caaaagaaguugaacgagu

SEQ ID NO: 2301778 - RNA, 19 nt, Homo sapiens
  misc_RNA (1)...(19): siRNA sense strand
ugaacgagugguugggcaa

SEQ ID NO: 2301779 - RNA, 19 nt, Homo sapiens
  misc_RNA (1)...(19): siRNA sense strand
cccaagagcgguacagcaa

SEQ ID NO: 2301780 - RNA, 19 nt, Homo sapiens
  misc_RNA (1)...(19): siRNA sense strand
uaauaaaccacuaccggaa

SEQ ID NO: 2301781 - RNA, 19 nt, Homo sapiens
  misc_RNA (1)...(19): siRNA sense strand
caggaaauccaaaugaaaa

SEQ ID NO: 2301782 - RNA, 19 nt, Homo sapiens
  misc_RNA (1)...(19): siRNA sense strand
cagugaaauuauugacagu

SEQ ID NO: 2301783 - RNA, 19 nt, Homo sapiens
  misc_RNA (1)...(19): siRNA sense strand
auauugaagcuguagggaa

SEQ ID NO: 2301784 - RNA, 19 nt, Homo sapiens
  misc_RNA (1)...(19): siRNA sense strand
uagaagaagauuggaagaa

SEQ ID NO: 2301785 - RNA, 19 nt, Homo sapiens
  misc_RNA (1)...(19): siRNA sense strand
caaccgaaacaaagcugaa

SEQ ID NO: 2301786 - RNA, 19 nt, Homo sapiens
  misc_RNA (1)...(19): siRNA sense strand
cuguagugguggacggcga

SEQ ID NO: 2301787 - RNA, 19 nt, Homo sapiens
  misc_RNA (1)...(19): siRNA sense strand
aagcagcaaccgaaacaaa

SEQ ID NO: 2301788 - RNA, 19 nt, Homo sapiens
  misc_RNA (1)...(19): siRNA sense strand
caaaugaaaaggacagcua

SEQ ID NO: 2301789 - RNA, 19 nt, Homo sapiens
  misc_RNA (1)...(19): siRNA sense strand
gagcgguacagcaaagaau

SEQ ID NO: 2301790 - RNA, 19 nt, Homo sapiens
  misc_RNA (1)...(19): siRNA sense strand
gaagaagacuugaagaagc

SEQ ID NO: 2301791 - RNA, 19 nt, Homo sapiens
  misc_RNA (1)...(19): siRNA sense strand
cagcauuaaaccagaccuu

SEQ ID NO: 2301792 - RNA, 19 nt, Homo sapiens
  misc_RNA (1)...(19): siRNA sense strand
ggaaugaaucucuagcuca

SEQ ID NO: 2301793 - RNA, 19 nt, Homo sapiens
  misc_RNA (1)...(19): siRNA sense strand
ugguggaagaugaugaaga

SEQ ID NO: 2301794 - RNA, 19 nt, Homo sapiens
  misc_RNA (1)...(19): siRNA sense strand
ugguggacggcgaaguaaa

SEQ ID NO: 2301795 - RNA, 19 nt, Homo sapiens
  misc_RNA (1)...(19): siRNA sense strand
agcugaguaucgagaaauu

SEQ ID NO: 2301796 - RNA, 19 nt, Homo sapiens
  misc_RNA (1)...(19): siRNA sense strand
ggcaaaagaaguugaacga

SEQ ID NO: 2301797 - RNA, 19 nt, Homo sapiens
  misc_RNA (1)...(19): siRNA sense strand
gucgagaauaugauagauu

SEQ ID NO: 2301798 - RNA, 19 nt, Homo sapiens
  misc_RNA (1)...(19): siRNA sense strand
gucucgaaucagugaaauu

SEQ ID NO: 2301799 - RNA, 19 nt, Homo sapiens
  misc_RNA (1)...(19): siRNA sense strand
cuacuaaaaugcaugguga

SEQ ID NO: 2301800 - RNA, 19 nt, Homo sapiens
  misc_RNA (1)...(19): siRNA sense strand
agaaguugaacgagugguu

SEQ ID NO: 2301801 - RNA, 19 nt, Homo sapiens
  misc_RNA (1)...(19): siRNA sense strand
auucacugguggaagauga

SEQ ID NO: 2301802 - RNA, 19 nt, Homo sapiens
  misc_RNA (1)...(19): siRNA sense strand
gauuggaagaagacuugaa

SEQ ID NO: 2301803 - RNA, 19 nt, Homo sapiens
  misc_RNA (1)...(19): siRNA sense strand
acgugaaggcaaugagaaa

SEQ ID NO: 2301804 - RNA, 19 nt, Homo sapiens
  misc_RNA (1)...(19): siRNA sense strand
aggcaaugagaaagaaaua

SEQ ID NO: 2301805 - RNA, 19 nt, Homo sapiens
  misc_RNA (1)...(19): siRNA sense strand
guaucgagaaauugacaaa

SEQ ID NO: 2301806 - RNA, 19 nt, Homo sapiens
  misc_RNA (1)...(19): siRNA sense strand
gugaaggcaaugagaaaga

SEQ ID NO: 2301807 - RNA, 19 nt, Homo sapiens
  misc_RNA (1)...(19): siRNA sense strand
caguagaagaagauuggaa

SEQ ID NO: 2301808 - RNA, 19 nt, Homo sapiens
  misc_RNA (1)...(19): siRNA sense strand
aguuuaaacgugaaggcaa

SEQ ID NO: 2301809 - RNA, 19 nt, Homo sapiens
  misc_RNA (1)...(19): siRNA sense strand
agggaagaagugaaugaaa

SEQ ID NO: 2301810 - RNA, 19 nt, Homo sapiens
  misc_RNA (1)...(19): siRNA sense strand
guagaagaagauuggaaga

SEQ ID NO: 2301811 - RNA, 19 nt, Homo sapiens
  misc_RNA (1)...(19): siRNA sense strand
caaaagaaguugaacgagu

SEQ ID NO: 2301812 - RNA, 19 nt, Homo sapiens
  misc_RNA (1)...(19): siRNA sense strand
ugaacgagugguugggcaa

SEQ ID NO: 2301813 - RNA, 19 nt, Homo sapiens
  misc_RNA (1)...(19): siRNA sense strand
cccaagagcgguacagcaa

SEQ ID NO: 2301814 - RNA, 19 nt, Homo sapiens
  misc_RNA (1)...(19): siRNA sense strand
uaauaaaccacuaccggaa

SEQ ID NO: 2301815 - RNA, 19 nt, Homo sapiens
  misc_RNA (1)...(19): siRNA sense strand
caggaaauccaaaugaaaa

SEQ ID NO: 2301816 - RNA, 19 nt, Homo sapiens
  misc_RNA (1)...(19): siRNA sense strand
cagugaaauuauugacagu

SEQ ID NO: 2301817 - RNA, 19 nt, Homo sapiens
  misc_RNA (1)...(19): siRNA sense strand
auauugaagcuguagggaa

SEQ ID NO: 2301818 - RNA, 19 nt, Homo sapiens
  misc_RNA (1)...(19): siRNA sense strand
uagaagaagauuggaagaa

SEQ ID NO: 2301819 - RNA, 19 nt, Homo sapiens
  misc_RNA (1)...(19): siRNA sense strand
caaccgaaacaaagcugaa

SEQ ID NO: 2301820 - RNA, 19 nt, Homo sapiens
  misc_RNA (1)...(19): siRNA sense strand
cuguagugguggacggcga

SEQ ID NO: 2301821 - RNA, 19 nt, Homo sapiens
  misc_RNA (1)...(19): siRNA sense strand
aagcagcaaccgaaacaaa

SEQ ID NO: 2301822 - RNA, 19 nt, Homo sapiens
  misc_RNA (1)...(19): siRNA sense strand
caaaugaaaaggacagcua

SEQ ID NO: 2301823 - RNA, 19 nt, Homo sapiens
  misc_RNA (1)...(19): siRNA sense strand
gagcgguacagcaaagaau

SEQ ID NO: 2301824 - RNA, 19 nt, Homo sapiens
  misc_RNA (1)...(19): siRNA sense strand
gaagaagacuugaagaagc

SEQ ID NO: 2301825 - RNA, 19 nt, Homo sapiens
  misc_RNA (1)...(19): siRNA sense strand
cagcauuaaaccagaccuu

SEQ ID NO: 2301826 - RNA, 19 nt, Homo sapiens
  misc_RNA (1)...(19): siRNA sense strand
ggaaugaaucucuagcuca

SEQ ID NO: 2301827 - RNA, 19 nt, Homo sapiens
  misc_RNA (1)...(19): siRNA sense strand
ugguggaagaugaugaaga

SEQ ID NO: 2301828 - RNA, 19 nt, Homo sapiens
  misc_RNA (1)...(19): siRNA sense strand
ugguggacggcgaaguaaa

SEQ ID NO: 2301829 - RNA, 19 nt, Homo sapiens
  misc_RNA (1)...(19): siRNA sense strand
agcugaguaucgagaaauu

SEQ ID NO: 2301830 - RNA, 19 nt, Homo sapiens
  misc_RNA (1)...(19): siRNA sense strand
ggcaaaagaaguugaacga

SEQ ID NO: 2301831 - RNA, 19 nt, Homo sapiens
  misc_RNA (1)...(19): siRNA sense strand
gucgagaauaugauagauu

SEQ ID NO: 2301832 - RNA, 19 nt, Homo sapiens
  misc_RNA (1)...(19): siRNA sense strand
gucucgaaucagugaaauu

SEQ ID NO: 2301833 - RNA, 19 nt, Homo sapiens
  misc_RNA (1)...(19): siRNA sense strand
cuacuaaaaugcaugguga

SEQ ID NO: 2301834 - RNA, 19 nt, Homo sapiens
  misc_RNA (1)...(19): siRNA sense strand
agaaguugaacgagugguu

SEQ ID NO: 2301835 - RNA, 19 nt, Homo sapiens
  misc_RNA (1)...(19): siRNA sense strand
auucacugguggaagauga

SEQ ID NO: 2301836 - RNA, 19 nt, Homo sapiens
  misc_RNA (1)...(19): siRNA sense strand
gauuggaagaagacuugaa

SEQ ID NO: 2301837 - RNA, 19 nt, Homo sapiens
  misc_RNA (1)...(19): siRNA sense strand
gguccgaggcagugagagu

SEQ ID NO: 2301838 - RNA, 19 nt, Homo sapiens
  misc_RNA (1)...(19): siRNA sense strand
gguccgaggcagugagagu

SEQ ID NO: 2301839 - RNA, 19 nt, Homo sapiens
  misc_RNA (1)...(19): siRNA sense strand
uggacgagcuuguuggcau

SEQ ID NO: 2301840 - RNA, 19 nt, Homo sapiens
  misc_RNA (1)...(19): siRNA sense strand
gcuuguuggcauugacuau

SEQ ID NO: 2301841 - RNA, 19 nt, Homo sapiens
  misc_RNA (1)...(19): siRNA sense strand
acaacaucucugaggugaa

SEQ ID NO: 2301842 - RNA, 19 nt, Homo sapiens
  misc_RNA (1)...(19): siRNA sense strand
gaggaagagcggauggugu

SEQ ID NO: 2301843 - RNA, 19 nt, Homo sapiens
  misc_RNA (1)...(19): siRNA sense strand
ccaccuacuuugggagcau

SEQ ID NO: 2301844 - RNA, 19 nt, Homo sapiens
  misc_RNA (1)...(19): siRNA sense strand
uggacgagcuuguuggcau

SEQ ID NO: 2301845 - RNA, 19 nt, Homo sapiens
  misc_RNA (1)...(19): siRNA sense strand
gcuuguuggcauugacuau

SEQ ID NO: 2301846 - RNA, 19 nt, Homo sapiens
  misc_RNA (1)...(19): siRNA sense strand
acaacaucucugaggugaa

SEQ ID NO: 2301847 - RNA, 19 nt, Homo sapiens
  misc_RNA (1)...(19): siRNA sense strand
gaggaagagcggauggugu

SEQ ID NO: 2301848 - RNA, 19 nt, Homo sapiens
  misc_RNA (1)...(19): siRNA sense strand
ccaccuacuuugggagcau

SEQ ID NO: 2301849 - RNA, 19 nt, Homo sapiens
  misc_RNA (1)...(19): siRNA sense strand
ggaggaggaugaagggcua

SEQ ID NO: 2301850 - RNA, 19 nt, Homo sapiens
  misc_RNA (1)...(19): siRNA sense strand
ggcuagaugacuuggagaa

SEQ ID NO: 2301851 - RNA, 19 nt, Homo sapiens
  misc_RNA (1)...(19): siRNA sense strand
aagaggaaggccaggagaa

SEQ ID NO: 2301852 - RNA, 19 nt, Homo sapiens
  misc_RNA (1)...(19): siRNA sense strand
aggccaaccagaagcgaau

SEQ ID NO: 2301853 - RNA, 19 nt, Homo sapiens
  misc_RNA (1)...(19): siRNA sense strand
aggaaggccaggagaaugu

SEQ ID NO: 2301854 - RNA, 19 nt, Homo sapiens
  misc_RNA (1)...(19): siRNA sense strand
gcuagaugacuuggagaau

SEQ ID NO: 2301855 - RNA, 19 nt, Homo sapiens
  misc_RNA (1)...(19): siRNA sense strand
uugaugauguggaggagga

SEQ ID NO: 2301856 - RNA, 19 nt, Homo sapiens
  misc_RNA (1)...(19): siRNA sense strand
agaggaaggccaggagaau

SEQ ID NO: 2301857 - RNA, 19 nt, Homo sapiens
  misc_RNA (1)...(19): siRNA sense strand
augauguggaggaggauga

SEQ ID NO: 2301858 - RNA, 19 nt, Homo sapiens
  misc_RNA (1)...(19): siRNA sense strand
uguacaggauugagggaga

SEQ ID NO: 2301859 - RNA, 19 nt, Homo sapiens
  misc_RNA (1)...(19): siRNA sense strand
gcaagaaguuugaccgagu

SEQ ID NO: 2301860 - RNA, 19 nt, Homo sapiens
  misc_RNA (1)...(19): siRNA sense strand
auauugacccggagggcaa

SEQ ID NO: 2301861 - RNA, 19 nt, Homo sapiens
  misc_RNA (1)...(19): siRNA sense strand
cugcauugugagagugaau

SEQ ID NO: 2301862 - RNA, 19 nt, Homo sapiens
  misc_RNA (1)...(19): siRNA sense strand
caggauugagggagaugaa

SEQ ID NO: 2301863 - RNA, 19 nt, Homo sapiens
  misc_RNA (1)...(19): siRNA sense strand
gggcaagaaguuugaccga

SEQ ID NO: 2301864 - RNA, 19 nt, Homo sapiens
  misc_RNA (1)...(19): siRNA sense strand
ggucauagcuaguaccuug

SEQ ID NO: 2301865 - RNA, 19 nt, Homo sapiens
  misc_RNA (1)...(19): siRNA sense strand
ggauugagggagaugaaac

SEQ ID NO: 2301866 - RNA, 19 nt, Homo sapiens
  misc_RNA (1)...(19): siRNA sense strand
aagacaagcaggaaggaau

SEQ ID NO: 2301867 - RNA, 19 nt, Homo sapiens
  misc_RNA (1)...(19): siRNA sense strand
ccauuaacaaggacaccaa

SEQ ID NO: 2301868 - RNA, 19 nt, Homo sapiens
  misc_RNA (1)...(19): siRNA sense strand
ccauaaaagacaagcagga

SEQ ID NO: 2301869 - RNA, 19 nt, Homo sapiens
  misc_RNA (1)...(19): siRNA sense strand
aagaccacacacugggaaa

SEQ ID NO: 2301870 - RNA, 19 nt, Homo sapiens
  misc_RNA (1)...(19): siRNA sense strand
guuuauucaccaucaacaa

SEQ ID NO: 2301871 - RNA, 19 nt, Homo sapiens
  misc_RNA (1)...(19): siRNA sense strand
agaaagaggaaguggcaga

SEQ ID NO: 2301872 - RNA, 19 nt, Homo sapiens
  misc_RNA (1)...(19): siRNA sense strand
aggaaguggcagaggcaga

SEQ ID NO: 2301873 - RNA, 19 nt, Homo sapiens
  misc_RNA (1)...(19): siRNA sense strand
gggacaaggcaucgggcuu

SEQ ID NO: 2301874 - RNA, 19 nt, Homo sapiens
  misc_RNA (1)...(19): siRNA sense strand
ggagaaagaggaaguggca

SEQ ID NO: 2301875 - RNA, 19 nt, Homo sapiens
  misc_RNA (1)...(19): siRNA sense strand
cagaagaagaaccgcaaca

SEQ ID NO: 2301876 - RNA, 19 nt, Homo sapiens
  misc_RNA (1)...(19): siRNA sense strand
aggaggagaaagaggaagu

SEQ ID NO: 2301877 - RNA, 19 nt, Homo sapiens
  misc_RNA (1)...(19): siRNA sense strand
agacauuguggcaggcaga

SEQ ID NO: 2301878 - RNA, 19 nt, Homo sapiens
  misc_RNA (1)...(19): siRNA sense strand
uguggaagcaguuggugaa

SEQ ID NO: 2301879 - RNA, 19 nt, Homo sapiens
  misc_RNA (1)...(19): siRNA sense strand
guguggaagcaguugguga

SEQ ID NO: 2301880 - RNA, 19 nt, Homo sapiens
  misc_RNA (1)...(19): siRNA sense strand
ccgggaagaggaggagaaa

SEQ ID NO: 2301881 - RNA, 19 nt, Homo sapiens
  misc_RNA (1)...(19): siRNA sense strand
agaggaggagaaagaggaa

SEQ ID NO: 2301882 - RNA, 19 nt, Homo sapiens
  misc_RNA (1)...(19): siRNA sense strand
agaaagaggaaguggcaga

SEQ ID NO: 2301883 - RNA, 19 nt, Homo sapiens
  misc_RNA (1)...(19): siRNA sense strand
aggaaguggcagaggcaga

SEQ ID NO: 2301884 - RNA, 19 nt, Homo sapiens
  misc_RNA (1)...(19): siRNA sense strand
gggacaaggcaucgggcuu

SEQ ID NO: 2301885 - RNA, 19 nt, Homo sapiens
  misc_RNA (1)...(19): siRNA sense strand
ggagaaagaggaaguggca

SEQ ID NO: 2301886 - RNA, 19 nt, Homo sapiens
  misc_RNA (1)...(19): siRNA sense strand
cagaagaagaaccgcaaca

SEQ ID NO: 2301887 - RNA, 19 nt, Homo sapiens
  misc_RNA (1)...(19): siRNA sense strand
aggaggagaaagaggaagu

SEQ ID NO: 2301888 - RNA, 19 nt, Homo sapiens
  misc_RNA (1)...(19): siRNA sense strand
agacauuguggcaggcaga

SEQ ID NO: 2301889 - RNA, 19 nt, Homo sapiens
  misc_RNA (1)...(19): siRNA sense strand
uguggaagcaguuggugaa

SEQ ID NO: 2301890 - RNA, 19 nt, Homo sapiens
  misc_RNA (1)...(19): siRNA sense strand
guguggaagcaguugguga

SEQ ID NO: 2301891 - RNA, 19 nt, Homo sapiens
  misc_RNA (1)...(19): siRNA sense strand
ccgggaagaggaggagaaa

SEQ ID NO: 2301892 - RNA, 19 nt, Homo sapiens
  misc_RNA (1)...(19): siRNA sense strand
agaggaggagaaagaggaa

SEQ ID NO: 2301893 - RNA, 19 nt, Homo sapiens
  misc_RNA (1)...(19): siRNA sense strand
acauaauggacuugaacaa

SEQ ID NO: 2301894 - RNA, 19 nt, Homo sapiens
  misc_RNA (1)...(19): siRNA sense strand
auuaagagagagagugauu

SEQ ID NO: 2301895 - RNA, 19 nt, Homo sapiens
  misc_RNA (1)...(19): siRNA sense strand
cgguacaaucguugacaau

SEQ ID NO: 2301896 - RNA, 19 nt, Homo sapiens
  misc_RNA (1)...(19): siRNA sense strand
auauuaagagagagaguga

SEQ ID NO: 2301897 - RNA, 19 nt, Homo sapiens
  misc_RNA (1)...(19): siRNA sense strand
gguaacaaucuguggugau

SEQ ID NO: 2301898 - RNA, 19 nt, Homo sapiens
  misc_RNA (1)...(19): siRNA sense strand
agauauuaagagagagagu

SEQ ID NO: 2301899 - RNA, 19 nt, Homo sapiens
  misc_RNA (1)...(19): siRNA sense strand
cuucaagaccacagaaaau

SEQ ID NO: 2301900 - RNA, 19 nt, Homo sapiens
  misc_RNA (1)...(19): siRNA sense strand
gcacuugaacagagggaac

SEQ ID NO: 2301901 - RNA, 19 nt, Homo sapiens
  misc_RNA (1)...(19): siRNA sense strand
gcugauaccaccaacggaa

SEQ ID NO: 2301902 - RNA, 19 nt, Homo sapiens
  misc_RNA (1)...(19): siRNA sense strand
acauagaccaaaauggaaa

SEQ ID NO: 2301903 - RNA, 19 nt, Homo sapiens
  misc_RNA (1)...(19): siRNA sense strand
ggaagaauuucgugccaug

SEQ ID NO: 2301904 - RNA, 19 nt, Homo sapiens
  misc_RNA (1)...(19): siRNA sense strand
acacugacucgaagcacaa

SEQ ID NO: 2301905 - RNA, 19 nt, Homo sapiens
  misc_RNA (1)...(19): siRNA sense strand
gaguggauacuauggaaaa

SEQ ID NO: 2301906 - RNA, 19 nt, Homo sapiens
  misc_RNA (1)...(19): siRNA sense strand
uguccagcuuccagaauau

SEQ ID NO: 2301907 - RNA, 19 nt, Homo sapiens
  misc_RNA (1)...(19): siRNA sense strand
uguagaucgaggaaagaau

SEQ ID NO: 2301908 - RNA, 19 nt, Homo sapiens
  misc_RNA (1)...(19): siRNA sense strand
auggaaacguugaauacau

SEQ ID NO: 2301909 - RNA, 19 nt, Homo sapiens
  misc_RNA (1)...(19): siRNA sense strand
gaacaaggccaaaugcagu

SEQ ID NO: 2301910 - RNA, 19 nt, Homo sapiens
  misc_RNA (1)...(19): siRNA sense strand
agaguggauacuauggaaa

SEQ ID NO: 2301911 - RNA, 19 nt, Homo sapiens
  misc_RNA (1)...(19): siRNA sense strand
cacauauacauaaggaaga

SEQ ID NO: 2301912 - RNA, 19 nt, Homo sapiens
  misc_RNA (1)...(19): siRNA sense strand
uggugauuugcaugggaaa

SEQ ID NO: 2301913 - RNA, 19 nt, Homo sapiens
  misc_RNA (1)...(19): siRNA sense strand
uauacauaaggaagagcua

SEQ ID NO: 2301914 - RNA, 19 nt, Homo sapiens
  misc_RNA (1)...(19): siRNA sense strand
ccaccaacggaaacaaaca

SEQ ID NO: 2301915 - RNA, 19 nt, Homo sapiens
  misc_RNA (1)...(19): siRNA sense strand
ccuucauguuggaaaacua

SEQ ID NO: 2301916 - RNA, 19 nt, Homo sapiens
  misc_RNA (1)...(19): siRNA sense strand
acacauauacauaaggaag

SEQ ID NO: 2301917 - RNA, 19 nt, Homo sapiens
  misc_RNA (1)...(19): siRNA sense strand
acauaauggacuugaacaa

SEQ ID NO: 2301918 - RNA, 19 nt, Homo sapiens
  misc_RNA (1)...(19): siRNA sense strand
auuaagagagagagugauu

SEQ ID NO: 2301919 - RNA, 19 nt, Homo sapiens
  misc_RNA (1)...(19): siRNA sense strand
cgguacaaucguugacaau

SEQ ID NO: 2301920 - RNA, 19 nt, Homo sapiens
  misc_RNA (1)...(19): siRNA sense strand
auauuaagagagagaguga

SEQ ID NO: 2301921 - RNA, 19 nt, Homo sapiens
  misc_RNA (1)...(19): siRNA sense strand
gguaacaaucuguggugau

SEQ ID NO: 2301922 - RNA, 19 nt, Homo sapiens
  misc_RNA (1)...(19): siRNA sense strand
agauauuaagagagagagu

SEQ ID NO: 2301923 - RNA, 19 nt, Homo sapiens
  misc_RNA (1)...(19): siRNA sense strand
cuucaagaccacagaaaau

SEQ ID NO: 2301924 - RNA, 19 nt, Homo sapiens
  misc_RNA (1)...(19): siRNA sense strand
gcacuugaacagagggaac

SEQ ID NO: 2301925 - RNA, 19 nt, Homo sapiens
  misc_RNA (1)...(19): siRNA sense strand
gcugauaccaccaacggaa

SEQ ID NO: 2301926 - RNA, 19 nt, Homo sapiens
  misc_RNA (1)...(19): siRNA sense strand
acauagaccaaaauggaaa

SEQ ID NO: 2301927 - RNA, 19 nt, Homo sapiens
  misc_RNA (1)...(19): siRNA sense strand
ggaagaauuucgugccaug

SEQ ID NO: 2301928 - RNA, 19 nt, Homo sapiens
  misc_RNA (1)...(19): siRNA sense strand
acacugacucgaagcacaa

SEQ ID NO: 2301929 - RNA, 19 nt, Homo sapiens
  misc_RNA (1)...(19): siRNA sense strand
gaguggauacuauggaaaa

SEQ ID NO: 2301930 - RNA, 19 nt, Homo sapiens
  misc_RNA (1)...(19): siRNA sense strand
uguccagcuuccagaauau

SEQ ID NO: 2301931 - RNA, 19 nt, Homo sapiens
  misc_RNA (1)...(19): siRNA sense strand
uguagaucgaggaaagaau

SEQ ID NO: 2301932 - RNA, 19 nt, Homo sapiens
  misc_RNA (1)...(19): siRNA sense strand
auggaaacguugaauacau

SEQ ID NO: 2301933 - RNA, 19 nt, Homo sapiens
  misc_RNA (1)...(19): siRNA sense strand
agaguggauacuauggaaa

SEQ ID NO: 2301934 - RNA, 19 nt, Homo sapiens
  misc_RNA (1)...(19): siRNA sense strand
uggugauuugcaugggaaa

SEQ ID NO: 2301935 - RNA, 19 nt, Homo sapiens
  misc_RNA (1)...(19): siRNA sense strand
ccaccaacggaaacaaaca

SEQ ID NO: 2301936 - RNA, 19 nt, Homo sapiens
  misc_RNA (1)...(19): siRNA sense strand
acauaauggacuugaacaa

SEQ ID NO: 2301937 - RNA, 19 nt, Homo sapiens
  misc_RNA (1)...(19): siRNA sense strand
auuaagagagagagugauu

SEQ ID NO: 2301938 - RNA, 19 nt, Homo sapiens
  misc_RNA (1)...(19): siRNA sense strand
cgguacaaucguugacaau

SEQ ID NO: 2301939 - RNA, 19 nt, Homo sapiens
  misc_RNA (1)...(19): siRNA sense strand
auauuaagagagagaguga

SEQ ID NO: 2301940 - RNA, 19 nt, Homo sapiens
  misc_RNA (1)...(19): siRNA sense strand
gguaacaaucuguggugau

SEQ ID NO: 2301941 - RNA, 19 nt, Homo sapiens
  misc_RNA (1)...(19): siRNA sense strand
agauauuaagagagagagu

SEQ ID NO: 2301942 - RNA, 19 nt, Homo sapiens
  misc_RNA (1)...(19): siRNA sense strand
cuucaagaccacagaaaau

SEQ ID NO: 2301943 - RNA, 19 nt, Homo sapiens
  misc_RNA (1)...(19): siRNA sense strand
gcacuugaacagagggaac

SEQ ID NO: 2301944 - RNA, 19 nt, Homo sapiens
  misc_RNA (1)...(19): siRNA sense strand
gcugauaccaccaacggaa

SEQ ID NO: 2301945 - RNA, 19 nt, Homo sapiens
  misc_RNA (1)...(19): siRNA sense strand
acauagaccaaaauggaaa

SEQ ID NO: 2301946 - RNA, 19 nt, Homo sapiens
  misc_RNA (1)...(19): siRNA sense strand
ggaagaauuucgugccaug

SEQ ID NO: 2301947 - RNA, 19 nt, Homo sapiens
  misc_RNA (1)...(19): siRNA sense strand
acacugacucgaagcacaa

SEQ ID NO: 2301948 - RNA, 19 nt, Homo sapiens
  misc_RNA (1)...(19): siRNA sense strand
gaguggauacuauggaaaa

SEQ ID NO: 2301949 - RNA, 19 nt, Homo sapiens
  misc_RNA (1)...(19): siRNA sense strand
uguccagcuuccagaauau

SEQ ID NO: 2301950 - RNA, 19 nt, Homo sapiens
  misc_RNA (1)...(19): siRNA sense strand
uguagaucgaggaaagaau

SEQ ID NO: 2301951 - RNA, 19 nt, Homo sapiens
  misc_RNA (1)...(19): siRNA sense strand
auggaaacguugaauacau

SEQ ID NO: 2301952 - RNA, 19 nt, Homo sapiens
  misc_RNA (1)...(19): siRNA sense strand
gaacaaggccaaaugcagu

SEQ ID NO: 2301953 - RNA, 19 nt, Homo sapiens
  misc_RNA (1)...(19): siRNA sense strand
agaguggauacuauggaaa

SEQ ID NO: 2301954 - RNA, 19 nt, Homo sapiens
  misc_RNA (1)...(19): siRNA sense strand
cacauauacauaaggaaga

SEQ ID NO: 2301955 - RNA, 19 nt, Homo sapiens
  misc_RNA (1)...(19): siRNA sense strand
uggugauuugcaugggaaa

SEQ ID NO: 2301956 - RNA, 19 nt, Homo sapiens
  misc_RNA (1)...(19): siRNA sense strand
uauacauaaggaagagcua

SEQ ID NO: 2301957 - RNA, 19 nt, Homo sapiens
  misc_RNA (1)...(19): siRNA sense strand
ccaccaacggaaacaaaca

SEQ ID NO: 2301958 - RNA, 19 nt, Homo sapiens
  misc_RNA (1)...(19): siRNA sense strand
ccuucauguuggaaaacua

SEQ ID NO: 2301959 - RNA, 19 nt, Homo sapiens
  misc_RNA (1)...(19): siRNA sense strand
acacauauacauaaggaag

SEQ ID NO: 2301960 - RNA, 19 nt, Homo sapiens
  misc_RNA (1)...(19): siRNA sense strand
auuaagagagagagugauu

SEQ ID NO: 2301961 - RNA, 19 nt, Homo sapiens
  misc_RNA (1)...(19): siRNA sense strand
cgguacaaucguugacaau

SEQ ID NO: 2301962 - RNA, 19 nt, Homo sapiens
  misc_RNA (1)...(19): siRNA sense strand
auauuaagagagagaguga

SEQ ID NO: 2301963 - RNA, 19 nt, Homo sapiens
  misc_RNA (1)...(19): siRNA sense strand
gguaacaaucuguggugau

SEQ ID NO: 2301964 - RNA, 19 nt, Homo sapiens
  misc_RNA (1)...(19): siRNA sense strand
agauauuaagagagagagu

SEQ ID NO: 2301965 - RNA, 19 nt, Homo sapiens
  misc_RNA (1)...(19): siRNA sense strand
gcacuugaacagagggaac

SEQ ID NO: 2301966 - RNA, 19 nt, Homo sapiens
  misc_RNA (1)...(19): siRNA sense strand
gcugauaccaccaacggaa

SEQ ID NO: 2301967 - RNA, 19 nt, Homo sapiens
  misc_RNA (1)...(19): siRNA sense strand
acacugacucgaagcacaa

SEQ ID NO: 2301968 - RNA, 19 nt, Homo sapiens
  misc_RNA (1)...(19): siRNA sense strand
gaguggauacuauggaaaa

SEQ ID NO: 2301969 - RNA, 19 nt, Homo sapiens
  misc_RNA (1)...(19): siRNA sense strand
uguagaucgaggaaagaau

SEQ ID NO: 2301970 - RNA, 19 nt, Homo sapiens
  misc_RNA (1)...(19): siRNA sense strand
gaacaaggccaaaugcagu

SEQ ID NO: 2301971 - RNA, 19 nt, Homo sapiens
  misc_RNA (1)...(19): siRNA sense strand
agaguggauacuauggaaa

SEQ ID NO: 2301972 - RNA, 19 nt, Homo sapiens
  misc_RNA (1)...(19): siRNA sense strand
cacauauacauaaggaaga

SEQ ID NO: 2301973 - RNA, 19 nt, Homo sapiens
  misc_RNA (1)...(19): siRNA sense strand
uggugauuugcaugggaaa

SEQ ID NO: 2301974 - RNA, 19 nt, Homo sapiens
  misc_RNA (1)...(19): siRNA sense strand
uauacauaaggaagagcua

SEQ ID NO: 2301975 - RNA, 19 nt, Homo sapiens
  misc_RNA (1)...(19): siRNA sense strand
ccaccaacggaaacaaaca

SEQ ID NO: 2301976 - RNA, 19 nt, Homo sapiens
  misc_RNA (1)...(19): siRNA sense strand
ccuucauguuggaaaacua

SEQ ID NO: 2301977 - RNA, 19 nt, Homo sapiens
  misc_RNA (1)...(19): siRNA sense strand
acacauauacauaaggaag

SEQ ID NO: 2301978 - RNA, 19 nt, Homo sapiens
  misc_RNA (1)...(19): siRNA sense strand
acauaauggacuugaacaa

SEQ ID NO: 2301979 - RNA, 19 nt, Homo sapiens
  misc_RNA (1)...(19): siRNA sense strand
auuaagagagagagugauu

SEQ ID NO: 2301980 - RNA, 19 nt, Homo sapiens
  misc_RNA (1)...(19): siRNA sense strand
cgguacaaucguugacaau

SEQ ID NO: 2301981 - RNA, 19 nt, Homo sapiens
  misc_RNA (1)...(19): siRNA sense strand
auauuaagagagagaguga

SEQ ID NO: 2301982 - RNA, 19 nt, Homo sapiens
  misc_RNA (1)...(19): siRNA sense strand
gguaacaaucuguggugau

SEQ ID NO: 2301983 - RNA, 19 nt, Homo sapiens
  misc_RNA (1)...(19): siRNA sense strand
agauauuaagagagagagu

SEQ ID NO: 2301984 - RNA, 19 nt, Homo sapiens
  misc_RNA (1)...(19): siRNA sense strand
cuucaagaccacagaaaau

SEQ ID NO: 2301985 - RNA, 19 nt, Homo sapiens
  misc_RNA (1)...(19): siRNA sense strand
gcacuugaacagagggaac

SEQ ID NO: 2301986 - RNA, 19 nt, Homo sapiens
  misc_RNA (1)...(19): siRNA sense strand
gcugauaccaccaacggaa

SEQ ID NO: 2301987 - RNA, 19 nt, Homo sapiens
  misc_RNA (1)...(19): siRNA sense strand
acauagaccaaaauggaaa

SEQ ID NO: 2301988 - RNA, 19 nt, Homo sapiens
  misc_RNA (1)...(19): siRNA sense strand
ggaagaauuucgugccaug

SEQ ID NO: 2301989 - RNA, 19 nt, Homo sapiens
  misc_RNA (1)...(19): siRNA sense strand
acacugacucgaagcacaa

SEQ ID NO: 2301990 - RNA, 19 nt, Homo sapiens
  misc_RNA (1)...(19): siRNA sense strand
gaguggauacuauggaaaa

SEQ ID NO: 2301991 - RNA, 19 nt, Homo sapiens
  misc_RNA (1)...(19): siRNA sense strand
uguccagcuuccagaauau

SEQ ID NO: 2301992 - RNA, 19 nt, Homo sapiens
  misc_RNA (1)...(19): siRNA sense strand
uguagaucgaggaaagaau

SEQ ID NO: 2301993 - RNA, 19 nt, Homo sapiens
  misc_RNA (1)...(19): siRNA sense strand
auggaaacguugaauacau

SEQ ID NO: 2301994 - RNA, 19 nt, Homo sapiens
  misc_RNA (1)...(19): siRNA sense strand
gaacaaggccaaaugcagu

SEQ ID NO: 2301995 - RNA, 19 nt, Homo sapiens
  misc_RNA (1)...(19): siRNA sense strand
agaguggauacuauggaaa

SEQ ID NO: 2301996 - RNA, 19 nt, Homo sapiens
  misc_RNA (1)...(19): siRNA sense strand
cacauauacauaaggaaga

SEQ ID NO: 2301997 - RNA, 19 nt, Homo sapiens
  misc_RNA (1)...(19): siRNA sense strand
uggugauuugcaugggaaa

SEQ ID NO: 2301998 - RNA, 19 nt, Homo sapiens
  misc_RNA (1)...(19): siRNA sense strand
uauacauaaggaagagcua

SEQ ID NO: 2301999 - RNA, 19 nt, Homo sapiens
  misc_RNA (1)...(19): siRNA sense strand
ccaccaacggaaacaaaca

SEQ ID NO: 2302000 - RNA, 19 nt, Homo sapiens
  misc_RNA (1)...(19): siRNA sense strand
ccuucauguuggaaaacua

SEQ ID NO: 2302001 - RNA, 19 nt, Homo sapiens
  misc_RNA (1)...(19): siRNA sense strand
acacauauacauaaggaag

SEQ ID NO: 2302002 - RNA, 19 nt, Homo sapiens
  misc_RNA (1)...(19): siRNA sense strand
ccuggugaccggagagaaa

SEQ ID NO: 2302003 - RNA, 19 nt, Homo sapiens
  misc_RNA (1)...(19): siRNA sense strand
gaggaaaccaugaggacca

SEQ ID NO: 2302004 - RNA, 19 nt, Homo sapiens
  misc_RNA (1)...(19): siRNA sense strand
gggagaagcuguuugcuca

SEQ ID NO: 2302005 - RNA, 19 nt, Homo sapiens
  misc_RNA (1)...(19): siRNA sense strand
aauacaagguacacgggaa

SEQ ID NO: 2302006 - RNA, 19 nt, Homo sapiens
  misc_RNA (1)...(19): siRNA sense strand
gaggagaagagaagagcca

SEQ ID NO: 2302007 - RNA, 19 nt, Homo sapiens
  misc_RNA (1)...(19): siRNA sense strand
gcuacaaaugcuaaagaca

SEQ ID NO: 2302008 - RNA, 19 nt, Homo sapiens
  misc_RNA (1)...(19): siRNA sense strand
cagaagagugagaagcaga

SEQ ID NO: 2302009 - RNA, 19 nt, Homo sapiens
  misc_RNA (1)...(19): siRNA sense strand
caacacuauucgaggagga

SEQ ID NO: 2302010 - RNA, 19 nt, Homo sapiens
  misc_RNA (1)...(19): siRNA sense strand
gugagaagcagauggagga

SEQ ID NO: 2302011 - RNA, 19 nt, Homo sapiens
  misc_RNA (1)...(19): siRNA sense strand
aaugcaaaccugaaggcua

SEQ ID NO: 2302012 - RNA, 19 nt, Homo sapiens
  misc_RNA (1)...(19): siRNA sense strand
cugagagcucugagggaga

SEQ ID NO: 2302013 - RNA, 19 nt, Homo sapiens
  misc_RNA (1)...(19): siRNA sense strand
augaagaaaugcagugacu

SEQ ID NO: 2302014 - RNA, 19 nt, Homo sapiens
  misc_RNA (1)...(19): siRNA sense strand
ggcugaagaacuuggccaa

SEQ ID NO: 2302015 - RNA, 19 nt, Homo sapiens
  misc_RNA (1)...(19): siRNA sense strand
agguacacgggaaggaaau

SEQ ID NO: 2302016 - RNA, 19 nt, Homo sapiens
  misc_RNA (1)...(19): siRNA sense strand
ggagaagagaagagccaac

SEQ ID NO: 2302017 - RNA, 19 nt, Homo sapiens
  misc_RNA (1)...(19): siRNA sense strand
agagaagagccaaccagaa

SEQ ID NO: 2302018 - RNA, 19 nt, Homo sapiens
  misc_RNA (1)...(19): siRNA sense strand
aggcagaccuggaagcugu

SEQ ID NO: 2302019 - RNA, 19 nt, Homo sapiens
  misc_RNA (1)...(19): siRNA sense strand
aauagagaggagcaagaua

SEQ ID NO: 2302020 - RNA, 19 nt, Homo sapiens
  misc_RNA (1)...(19): siRNA sense strand
cagauggaggagaagagaa

SEQ ID NO: 2302021 - RNA, 19 nt, Homo sapiens
  misc_RNA (1)...(19): siRNA sense strand
caagagggcugcaaggcca

SEQ ID NO: 2302022 - RNA, 19 nt, Homo sapiens
  misc_RNA (1)...(19): siRNA sense strand
uuuccagaaugcagagaga

SEQ ID NO: 2302023 - RNA, 19 nt, Homo sapiens
  misc_RNA (1)...(19): siRNA sense strand
gugaauuuaagaagcauga

SEQ ID NO: 2302024 - RNA, 19 nt, Homo sapiens
  misc_RNA (1)...(19): siRNA sense strand
cauauguguucaacgguga

SEQ ID NO: 2302025 - RNA, 19 nt, Homo sapiens
  misc_RNA (1)...(19): siRNA sense strand
acuaugaaguuggcagcaa

SEQ ID NO: 2302026 - RNA, 19 nt, Homo sapiens
  misc_RNA (1)...(19): siRNA sense strand
accaaggaagugaugaaua

SEQ ID NO: 2302027 - RNA, 19 nt, Homo sapiens
  misc_RNA (1)...(19): siRNA sense strand
agauggaggagaagagaag

SEQ ID NO: 2302028 - RNA, 19 nt, Homo sapiens
  misc_RNA (1)...(19): siRNA sense strand
aggcaaaggauuagcagag

SEQ ID NO: 2302029 - RNA, 19 nt, Homo sapiens
  misc_RNA (1)...(19): siRNA sense strand
cgggaaggaaauacuaaga

SEQ ID NO: 2302030 - RNA, 19 nt, Homo sapiens
  misc_RNA (1)...(19): siRNA sense strand
gaacaacugagucgcgaga

SEQ ID NO: 2302031 - RNA, 19 nt, Homo sapiens
  misc_RNA (1)...(19): siRNA sense strand
cccaggacuccgagaugaa

SEQ ID NO: 2302032 - RNA, 19 nt, Homo sapiens
  misc_RNA (1)...(19): siRNA sense strand
ugguagaagcauucagacu

SEQ ID NO: 2302033 - RNA, 19 nt, Homo sapiens
  misc_RNA (1)...(19): siRNA sense strand
cacucugauagaugagaaa

SEQ ID NO: 2302034 - RNA, 19 nt, Homo sapiens
  misc_RNA (1)...(19): siRNA sense strand
agaucuucucagugaauuu

SEQ ID NO: 2302035 - RNA, 19 nt, Homo sapiens
  misc_RNA (1)...(19): siRNA sense strand
acaacugagucgcgagaac

SEQ ID NO: 2302036 - RNA, 19 nt, Homo sapiens
  misc_RNA (1)...(19): siRNA sense strand
uggccaauuggaugacuua

SEQ ID NO: 2302037 - RNA, 19 nt, Homo sapiens
  misc_RNA (1)...(19): siRNA sense strand
ccuggugaccggagagaaa

SEQ ID NO: 2302038 - RNA, 19 nt, Homo sapiens
  misc_RNA (1)...(19): siRNA sense strand
gaggaaaccaugaggacca

SEQ ID NO: 2302039 - RNA, 19 nt, Homo sapiens
  misc_RNA (1)...(19): siRNA sense strand
gggagaagcuguuugcuca

SEQ ID NO: 2302040 - RNA, 19 nt, Homo sapiens
  misc_RNA (1)...(19): siRNA sense strand
aauacaagguacacgggaa

SEQ ID NO: 2302041 - RNA, 19 nt, Homo sapiens
  misc_RNA (1)...(19): siRNA sense strand
gaggagaagagaagagcca

SEQ ID NO: 2302042 - RNA, 19 nt, Homo sapiens
  misc_RNA (1)...(19): siRNA sense strand
cagaagagugagaagcaga

SEQ ID NO: 2302043 - RNA, 19 nt, Homo sapiens
  misc_RNA (1)...(19): siRNA sense strand
caacacuauucgaggagga

SEQ ID NO: 2302044 - RNA, 19 nt, Homo sapiens
  misc_RNA (1)...(19): siRNA sense strand
gugagaagcagauggagga

SEQ ID NO: 2302045 - RNA, 19 nt, Homo sapiens
  misc_RNA (1)...(19): siRNA sense strand
aaugcaaaccugaaggcua

SEQ ID NO: 2302046 - RNA, 19 nt, Homo sapiens
  misc_RNA (1)...(19): siRNA sense strand
cugagagcucugagggaga

SEQ ID NO: 2302047 - RNA, 19 nt, Homo sapiens
  misc_RNA (1)...(19): siRNA sense strand
augaagaaaugcagugacu

SEQ ID NO: 2302048 - RNA, 19 nt, Homo sapiens
  misc_RNA (1)...(19): siRNA sense strand
agguacacgggaaggaaau

SEQ ID NO: 2302049 - RNA, 19 nt, Homo sapiens
  misc_RNA (1)...(19): siRNA sense strand
ggagaagagaagagccaac

SEQ ID NO: 2302050 - RNA, 19 nt, Homo sapiens
  misc_RNA (1)...(19): siRNA sense strand
agagaagagccaaccagaa

SEQ ID NO: 2302051 - RNA, 19 nt, Homo sapiens
  misc_RNA (1)...(19): siRNA sense strand
aauagagaggagcaagaua

SEQ ID NO: 2302052 - RNA, 19 nt, Homo sapiens
  misc_RNA (1)...(19): siRNA sense strand
cagauggaggagaagagaa

SEQ ID NO: 2302053 - RNA, 19 nt, Homo sapiens
  misc_RNA (1)...(19): siRNA sense strand
caagagggcugcaaggcca

SEQ ID NO: 2302054 - RNA, 19 nt, Homo sapiens
  misc_RNA (1)...(19): siRNA sense strand
uuuccagaaugcagagaga

SEQ ID NO: 2302055 - RNA, 19 nt, Homo sapiens
  misc_RNA (1)...(19): siRNA sense strand
gugaauuuaagaagcauga

SEQ ID NO: 2302056 - RNA, 19 nt, Homo sapiens
  misc_RNA (1)...(19): siRNA sense strand
cauauguguucaacgguga

SEQ ID NO: 2302057 - RNA, 19 nt, Homo sapiens
  misc_RNA (1)...(19): siRNA sense strand
acuaugaaguuggcagcaa

SEQ ID NO: 2302058 - RNA, 19 nt, Homo sapiens
  misc_RNA (1)...(19): siRNA sense strand
accaaggaagugaugaaua

SEQ ID NO: 2302059 - RNA, 19 nt, Homo sapiens
  misc_RNA (1)...(19): siRNA sense strand
agauggaggagaagagaag

SEQ ID NO: 2302060 - RNA, 19 nt, Homo sapiens
  misc_RNA (1)...(19): siRNA sense strand
aggcaaaggauuagcagag

SEQ ID NO: 2302061 - RNA, 19 nt, Homo sapiens
  misc_RNA (1)...(19): siRNA sense strand
cgggaaggaaauacuaaga

SEQ ID NO: 2302062 - RNA, 19 nt, Homo sapiens
  misc_RNA (1)...(19): siRNA sense strand
cccaggacuccgagaugaa

SEQ ID NO: 2302063 - RNA, 19 nt, Homo sapiens
  misc_RNA (1)...(19): siRNA sense strand
ugguagaagcauucagacu

SEQ ID NO: 2302064 - RNA, 19 nt, Homo sapiens
  misc_RNA (1)...(19): siRNA sense strand
cacucugauagaugagaaa

SEQ ID NO: 2302065 - RNA, 19 nt, Homo sapiens
  misc_RNA (1)...(19): siRNA sense strand
agaucuucucagugaauuu

SEQ ID NO: 2302066 - RNA, 19 nt, Homo sapiens
  misc_RNA (1)...(19): siRNA sense strand
uggccaauuggaugacuua

SEQ ID NO: 2302067 - RNA, 19 nt, Homo sapiens
  misc_RNA (1)...(19): siRNA sense strand
augaagaaaugcagugacu

SEQ ID NO: 2302068 - RNA, 19 nt, Homo sapiens
  misc_RNA (1)...(19): siRNA sense strand
uuuccagaaugcagagaga

SEQ ID NO: 2302069 - RNA, 19 nt, Homo sapiens
  misc_RNA (1)...(19): siRNA sense strand
cccaggacuccgagaugaa

SEQ ID NO: 2302070 - RNA, 19 nt, Homo sapiens
  misc_RNA (1)...(19): siRNA sense strand
ugguagaagcauucagacu

SEQ ID NO: 2302071 - RNA, 19 nt, Homo sapiens
  misc_RNA (1)...(19): siRNA sense strand
cggagaaaguggacggcuu

SEQ ID NO: 2302072 - RNA, 19 nt, Homo sapiens
  misc_RNA (1)...(19): siRNA sense strand
cgugaagaauuauggaaaa

SEQ ID NO: 2302073 - RNA, 19 nt, Homo sapiens
  misc_RNA (1)...(19): siRNA sense strand
acgugaagaauuauggaaa

SEQ ID NO: 2302074 - RNA, 19 nt, Homo sapiens
  misc_RNA (1)...(19): siRNA sense strand
cuugaagagcaaagaaauu

SEQ ID NO: 2302075 - RNA, 19 nt, Homo sapiens
  misc_RNA (1)...(19): siRNA sense strand
cugaaaacccuaauggaaa

SEQ ID NO: 2302076 - RNA, 19 nt, Homo sapiens
  misc_RNA (1)...(19): siRNA sense strand
agaaggaauuggaacguga

SEQ ID NO: 2302077 - RNA, 19 nt, Homo sapiens
  misc_RNA (1)...(19): siRNA sense strand
cagcaauacaagugccgaa

SEQ ID NO: 2302078 - RNA, 19 nt, Homo sapiens
  misc_RNA (1)...(19): siRNA sense strand
ugguguaauuguugaauca

SEQ ID NO: 2302079 - RNA, 19 nt, Homo sapiens
  misc_RNA (1)...(19): siRNA sense strand
ccauuguagcacugguaua

SEQ ID NO: 2302080 - RNA, 19 nt, Homo sapiens
  misc_RNA (1)...(19): siRNA sense strand
gcguauucugauauaguaa

SEQ ID NO: 2302081 - RNA, 19 nt, Homo sapiens
  misc_RNA (1)...(19): siRNA sense strand
gggaaauuucuuggauuaa

SEQ ID NO: 2302082 - RNA, 19 nt, Homo sapiens
  misc_RNA (1)...(19): siRNA sense strand
gacuugaagagcaaagaaa

SEQ ID NO: 2302083 - RNA, 19 nt, Homo sapiens
  misc_RNA (1)...(19): siRNA sense strand
cacugaaagcagaacauaa

SEQ ID NO: 2302084 - RNA, 19 nt, Homo sapiens
  misc_RNA (1)...(19): siRNA sense strand
ugaggagaacauugauaaa

SEQ ID NO: 2302085 - RNA, 19 nt, Homo sapiens
  misc_RNA (1)...(19): siRNA sense strand
uaauggaaaugaauggcaa

SEQ ID NO: 2302086 - RNA, 19 nt, Homo sapiens
  misc_RNA (1)...(19): siRNA sense strand
gcauacugcaaaaggauua

SEQ ID NO: 2302087 - RNA, 19 nt, Homo sapiens
  misc_RNA (1)...(19): siRNA sense strand
gggcauuguacuucuggaa

SEQ ID NO: 2302088 - RNA, 19 nt, Homo sapiens
  misc_RNA (1)...(19): siRNA sense strand
uuguacaguuccuggagaa

SEQ ID NO: 2302089 - RNA, 19 nt, Homo sapiens
  misc_RNA (1)...(19): siRNA sense strand
gcugaaaacccuaauggaa

SEQ ID NO: 2302090 - RNA, 19 nt, Homo sapiens
  misc_RNA (1)...(19): siRNA sense strand
ugguauacaaugugcugaa

SEQ ID NO: 2302091 - RNA, 19 nt, Homo sapiens
  misc_RNA (1)...(19): siRNA sense strand
cagauauccaaguguguau

SEQ ID NO: 2302092 - RNA, 19 nt, Homo sapiens
  misc_RNA (1)...(19): siRNA sense strand
aaaugaacaacaagagcuu

SEQ ID NO: 2302093 - RNA, 19 nt, Homo sapiens
  misc_RNA (1)...(19): siRNA sense strand
aagcugaaagacagagaga

SEQ ID NO: 2302094 - RNA, 19 nt, Homo sapiens
  misc_RNA (1)...(19): siRNA sense strand
aacuaaucgugguguaauu

SEQ ID NO: 2302095 - RNA, 19 nt, Homo sapiens
  misc_RNA (1)...(19): siRNA sense strand
acuugaagagcaaagaaau

SEQ ID NO: 2302096 - RNA, 19 nt, Homo sapiens
  misc_RNA (1)...(19): siRNA sense strand
guuugauugaggagaacau

SEQ ID NO: 2302097 - RNA, 19 nt, Homo sapiens
  misc_RNA (1)...(19): siRNA sense strand
ugucagaaguugcagcagu

SEQ ID NO: 2302098 - RNA, 19 nt, Homo sapiens
  misc_RNA (1)...(19): siRNA sense strand
ucaacuaaucgugguguaa

SEQ ID NO: 2302099 - RNA, 19 nt, Homo sapiens
  misc_RNA (1)...(19): siRNA sense strand
cugaagaggaugagcccaa

SEQ ID NO: 2302100 - RNA, 19 nt, Homo sapiens
  misc_RNA (1)...(19): siRNA sense strand
ccgacaagguggacggcuu

SEQ ID NO: 2302101 - RNA, 19 nt, Homo sapiens
  misc_RNA (1)...(19): siRNA sense strand
ccuccguggccaagagaua

SEQ ID NO: 2302102 - RNA, 19 nt, Homo sapiens
  misc_RNA (1)...(19): siRNA sense strand
ccgcaugaucucagugaau

SEQ ID NO: 2302103 - RNA, 19 nt, Homo sapiens
  misc_RNA (1)...(19): siRNA sense strand
gcaugaucucagugaauau

SEQ ID NO: 2302104 - RNA, 19 nt, Homo sapiens
  misc_RNA (1)...(19): siRNA sense strand
cccugaagacggagcacaa

SEQ ID NO: 2302105 - RNA, 19 nt, Homo sapiens
  misc_RNA (1)...(19): siRNA sense strand
gaguauauccuaagccuca

SEQ ID NO: 2302106 - RNA, 19 nt, Homo sapiens
  misc_RNA (1)...(19): siRNA sense strand
gggagauggaagagauucu

SEQ ID NO: 2302107 - RNA, 19 nt, Homo sapiens
  misc_RNA (1)...(19): siRNA sense strand
cucaagaccuucauggaga

SEQ ID NO: 2302108 - RNA, 19 nt, Homo sapiens
  misc_RNA (1)...(19): siRNA sense strand
cgucaggaguuauggcaag

SEQ ID NO: 2302109 - RNA, 19 nt, Homo sapiens
  misc_RNA (1)...(19): siRNA sense strand
uggugcaguuccuggagaa

SEQ ID NO: 2302110 - RNA, 19 nt, Homo sapiens
  misc_RNA (1)...(19): siRNA sense strand
uggaaaagcagcaggagca

SEQ ID NO: 2302111 - RNA, 19 nt, Homo sapiens
  misc_RNA (1)...(19): siRNA sense strand
ccuccuacaagcuggaaaa

SEQ ID NO: 2302112 - RNA, 19 nt, Homo sapiens
  misc_RNA (1)...(19): siRNA sense strand
gcgucaggaguuauggcaa

SEQ ID NO: 2302113 - RNA, 19 nt, Homo sapiens
  misc_RNA (1)...(19): siRNA sense strand
uggccgaccucaaggggaa

SEQ ID NO: 2302114 - RNA, 19 nt, Homo sapiens
  misc_RNA (1)...(19): siRNA sense strand
cugcucaaauacuggccaa

SEQ ID NO: 2302115 - RNA, 19 nt, Homo sapiens
  misc_RNA (1)...(19): siRNA sense strand
ggccaagagauauguggau

SEQ ID NO: 2302116 - RNA, 19 nt, Homo sapiens
  misc_RNA (1)...(19): siRNA sense strand
cccagaaggaggugauguu

SEQ ID NO: 2302117 - RNA, 19 nt, Homo sapiens
  misc_RNA (1)...(19): siRNA sense strand
cgugaagaauuguggaaaa

SEQ ID NO: 2302118 - RNA, 19 nt, Homo sapiens
  misc_RNA (1)...(19): siRNA sense strand
gaagaaaacucuaacguca

SEQ ID NO: 2302119 - RNA, 19 nt, Homo sapiens
  misc_RNA (1)...(19): siRNA sense strand
gcaaugaauuugauccaga

SEQ ID NO: 2302120 - RNA, 19 nt, Homo sapiens
  misc_RNA (1)...(19): siRNA sense strand
gaacauuggaauccggcua

SEQ ID NO: 2302121 - RNA, 19 nt, Homo sapiens
  misc_RNA (1)...(19): siRNA sense strand
agaaagaaaaggagcguga

SEQ ID NO: 2302122 - RNA, 19 nt, Homo sapiens
  misc_RNA (1)...(19): siRNA sense strand
agaaaaggagcgugaagaa

SEQ ID NO: 2302123 - RNA, 19 nt, Homo sapiens
  misc_RNA (1)...(19): siRNA sense strand
gggaacuggaagaaauauu

SEQ ID NO: 2302124 - RNA, 19 nt, Homo sapiens
  misc_RNA (1)...(19): siRNA sense strand
ucuuaaggcagaacacaaa

SEQ ID NO: 2302125 - RNA, 19 nt, Homo sapiens
  misc_RNA (1)...(19): siRNA sense strand
cagcgaagacccucgggaa

SEQ ID NO: 2302126 - RNA, 19 nt, Homo sapiens
  misc_RNA (1)...(19): siRNA sense strand
gcuggaaauauuaggaagu

SEQ ID NO: 2302127 - RNA, 19 nt, Homo sapiens
  misc_RNA (1)...(19): siRNA sense strand
acacagaauuuauggcaag

SEQ ID NO: 2302128 - RNA, 19 nt, Homo sapiens
  misc_RNA (1)...(19): siRNA sense strand
agaucgucagcgugagaaa

SEQ ID NO: 2302129 - RNA, 19 nt, Homo sapiens
  misc_RNA (1)...(19): siRNA sense strand
cuacauuacaauaagcaga

SEQ ID NO: 2302130 - RNA, 19 nt, Homo sapiens
  misc_RNA (1)...(19): siRNA sense strand
gcgugaagaauuguggaaa

SEQ ID NO: 2302131 - RNA, 19 nt, Homo sapiens
  misc_RNA (1)...(19): siRNA sense strand
cagcaaugaauuugaucca

SEQ ID NO: 2302132 - RNA, 19 nt, Homo sapiens
  misc_RNA (1)...(19): siRNA sense strand
cagaaaagccagacagaag

SEQ ID NO: 2302133 - RNA, 19 nt, Homo sapiens
  misc_RNA (1)...(19): siRNA sense strand
acccugaaguaguuagaau

SEQ ID NO: 2302134 - RNA, 19 nt, Homo sapiens
  misc_RNA (1)...(19): siRNA sense strand
cauacaagucagaucguca

SEQ ID NO: 2302135 - RNA, 19 nt, Homo sapiens
  misc_RNA (1)...(19): siRNA sense strand
agucagaucgucagcguga

SEQ ID NO: 2302136 - RNA, 19 nt, Homo sapiens
  misc_RNA (1)...(19): siRNA sense strand
caucaguggauaaaguaga

SEQ ID NO: 2302137 - RNA, 19 nt, Homo sapiens
  misc_RNA (1)...(19): siRNA sense strand
guuugacagagcagacuua

SEQ ID NO: 2302138 - RNA, 19 nt, Homo sapiens
  misc_RNA (1)...(19): siRNA sense strand
aguuuaggucucaaggcaa

SEQ ID NO: 2302139 - RNA, 19 nt, Homo sapiens
  misc_RNA (1)...(19): siRNA sense strand
gccuaaaacauguagucaa

SEQ ID NO: 2302140 - RNA, 19 nt, Homo sapiens
  misc_RNA (1)...(19): siRNA sense strand
cuauuguggcguuggugua

SEQ ID NO: 2302141 - RNA, 19 nt, Homo sapiens
  misc_RNA (1)...(19): siRNA sense strand
caugaguuugauagaagaa

SEQ ID NO: 2302142 - RNA, 19 nt, Homo sapiens
  misc_RNA (1)...(19): siRNA sense strand
caguuuaggucucaaggca

SEQ ID NO: 2302143 - RNA, 19 nt, Homo sapiens
  misc_RNA (1)...(19): siRNA sense strand
cucuuaaggcagaacacaa

SEQ ID NO: 2302144 - RNA, 19 nt, Homo sapiens
  misc_RNA (1)...(19): siRNA sense strand
gcuuauuaucggagggcua

SEQ ID NO: 2302145 - RNA, 19 nt, Homo sapiens
  misc_RNA (1)...(19): siRNA sense strand
cguucaaaggagaggauuu

SEQ ID NO: 2302146 - RNA, 19 nt, Homo sapiens
  misc_RNA (1)...(19): siRNA sense strand
gcagauucgagaaggucua

SEQ ID NO: 2302147 - RNA, 19 nt, Homo sapiens
  misc_RNA (1)...(19): siRNA sense strand
cagaaaugagaaagaaguu

SEQ ID NO: 2302148 - RNA, 19 nt, Homo sapiens
  misc_RNA (1)...(19): siRNA sense strand
guugaagcuauuaggguuu

SEQ ID NO: 2302149 - RNA, 19 nt, Homo sapiens
  misc_RNA (1)...(19): siRNA sense strand
acuuaaaagcugcgucaaa

SEQ ID NO: 2302150 - RNA, 19 nt, Homo sapiens
  misc_RNA (1)...(19): siRNA sense strand
ugaugaagcagaagaugau

SEQ ID NO: 2302151 - RNA, 19 nt, Homo sapiens
  misc_RNA (1)...(19): siRNA sense strand
uguugaagcuauuaggguu

SEQ ID NO: 2302152 - RNA, 19 nt, Homo sapiens
  misc_RNA (1)...(19): siRNA sense strand
ccugaaagaucgagcagag

SEQ ID NO: 2302153 - RNA, 19 nt, Homo sapiens
  misc_RNA (1)...(19): siRNA sense strand
cugcaguggcacccagaua

SEQ ID NO: 2302154 - RNA, 19 nt, Homo sapiens
  misc_RNA (1)...(19): siRNA sense strand
ugcugaauguggaguaaau

SEQ ID NO: 2302155 - RNA, 19 nt, Homo sapiens
  misc_RNA (1)...(19): siRNA sense strand
ggaugcagaacuacgggaa

SEQ ID NO: 2302156 - RNA, 19 nt, Homo sapiens
  misc_RNA (1)...(19): siRNA sense strand
acgggaacuucgagcugaa

SEQ ID NO: 2302157 - RNA, 19 nt, Homo sapiens
  misc_RNA (1)...(19): siRNA sense strand
ccucagugaaguucgggaa

SEQ ID NO: 2302158 - RNA, 19 nt, Homo sapiens
  misc_RNA (1)...(19): siRNA sense strand
gcacacuauaaacaaguaa

SEQ ID NO: 2302159 - RNA, 19 nt, Homo sapiens
  misc_RNA (1)...(19): siRNA sense strand
gaaauuacuugcagcugga

SEQ ID NO: 2302160 - RNA, 19 nt, Homo sapiens
  misc_RNA (1)...(19): siRNA sense strand
aggaaaacuugaugaagca

SEQ ID NO: 2302161 - RNA, 19 nt, Homo sapiens
  misc_RNA (1)...(19): siRNA sense strand
aaauaagcacacuguacua

SEQ ID NO: 2302162 - RNA, 19 nt, Homo sapiens
  misc_RNA (1)...(19): siRNA sense strand
agaggaaauguaugaugaa

SEQ ID NO: 2302163 - RNA, 19 nt, Homo sapiens
  misc_RNA (1)...(19): siRNA sense strand
cuucacugcagcaagauua

SEQ ID NO: 2302164 - RNA, 19 nt, Homo sapiens
  misc_RNA (1)...(19): siRNA sense strand
uugaugaagcagaagauga

SEQ ID NO: 2302165 - RNA, 19 nt, Homo sapiens
  misc_RNA (1)...(19): siRNA sense strand
aggucuagagaaagcacaa

SEQ ID NO: 2302166 - RNA, 19 nt, Homo sapiens
  misc_RNA (1)...(19): siRNA sense strand
acagauggaaccugacaau

SEQ ID NO: 2302167 - RNA, 19 nt, Homo sapiens
  misc_RNA (1)...(19): siRNA sense strand
cagcaagauuacagagagg

SEQ ID NO: 2302168 - RNA, 19 nt, Homo sapiens
  misc_RNA (1)...(19): siRNA sense strand
cagagauggcagauacaca

SEQ ID NO: 2302169 - RNA, 19 nt, Homo sapiens
  misc_RNA (1)...(19): siRNA sense strand
uaauaagcugauugaguca

SEQ ID NO: 2302170 - RNA, 19 nt, Homo sapiens
  misc_RNA (1)...(19): siRNA sense strand
augugaaugcccugaaaga

SEQ ID NO: 2302171 - RNA, 19 nt, Homo sapiens
  misc_RNA (1)...(19): siRNA sense strand
ugagaaagaaguuugacga

SEQ ID NO: 2302172 - RNA, 19 nt, Homo sapiens
  misc_RNA (1)...(19): siRNA sense strand
gugaaaaugaagaaaagga

SEQ ID NO: 2302173 - RNA, 19 nt, Homo sapiens
  misc_RNA (1)...(19): siRNA sense strand
cagugaaguucgggaaugu

SEQ ID NO: 2302174 - RNA, 19 nt, Homo sapiens
  misc_RNA (1)...(19): siRNA sense strand
agaaguuugacgacggaga

SEQ ID NO: 2302175 - RNA, 19 nt, Homo sapiens
  misc_RNA (1)...(19): siRNA sense strand
uggcaaagacaguaacaaa

SEQ ID NO: 2302176 - RNA, 19 nt, Homo sapiens
  misc_RNA (1)...(19): siRNA sense strand
gcucaaaagaagagguauu

SEQ ID NO: 2302177 - RNA, 19 nt, Homo sapiens
  misc_RNA (1)...(19): siRNA sense strand
ccaagaucaugaaggcaaa

SEQ ID NO: 2302178 - RNA, 19 nt, Homo sapiens
  misc_RNA (1)...(19): siRNA sense strand
ggaucaaggucgaggugca

SEQ ID NO: 2302179 - RNA, 19 nt, Homo sapiens
  misc_RNA (1)...(19): siRNA sense strand
cggaugaugaugaggaauu

SEQ ID NO: 2302180 - RNA, 19 nt, Homo sapiens
  misc_RNA (1)...(19): siRNA sense strand
aggaaugagccaugaagaa

SEQ ID NO: 2302181 - RNA, 19 nt, Homo sapiens
  misc_RNA (1)...(19): siRNA sense strand
ggaaauugagacaguacaa

SEQ ID NO: 2302182 - RNA, 19 nt, Homo sapiens
  misc_RNA (1)...(19): siRNA sense strand
caccaaggaaagaaagaaa

SEQ ID NO: 2302183 - RNA, 19 nt, Homo sapiens
  misc_RNA (1)...(19): siRNA sense strand
ccuauaagcaugacaccaa

SEQ ID NO: 2302184 - RNA, 19 nt, Homo sapiens
  misc_RNA (1)...(19): siRNA sense strand
cagacuugguggaugacaa

SEQ ID NO: 2302185 - RNA, 19 nt, Homo sapiens
  misc_RNA (1)...(19): siRNA sense strand
agaacaacgucgucaucaa

SEQ ID NO: 2302186 - RNA, 19 nt, Homo sapiens
  misc_RNA (1)...(19): siRNA sense strand
ccaaagaguucuaccacga

SEQ ID NO: 2302187 - RNA, 19 nt, Homo sapiens
  misc_RNA (1)...(19): siRNA sense strand
ugacuaagcugguggugga

SEQ ID NO: 2302188 - RNA, 19 nt, Homo sapiens
  misc_RNA (1)...(19): siRNA sense strand
cgagugaaggcgagugcaa

SEQ ID NO: 2302189 - RNA, 19 nt, Homo sapiens
  misc_RNA (1)...(19): siRNA sense strand
gaaucuaugaaguggaaga

SEQ ID NO: 2302190 - RNA, 19 nt, Homo sapiens
  misc_RNA (1)...(19): siRNA sense strand
gccaagaucaugaaggcaa

SEQ ID NO: 2302191 - RNA, 19 nt, Homo sapiens
  misc_RNA (1)...(19): siRNA sense strand
aauacaagcugaugcgaca

SEQ ID NO: 2302192 - RNA, 19 nt, Homo sapiens
  misc_RNA (1)...(19): siRNA sense strand
aagacugaguggaggguca

SEQ ID NO: 2302193 - RNA, 19 nt, Homo sapiens
  misc_RNA (1)...(19): siRNA sense strand
gcaacaaccccaagggcua

SEQ ID NO: 2302194 - RNA, 19 nt, Homo sapiens
  misc_RNA (1)...(19): siRNA sense strand
ccuucaaagaggugggcau

SEQ ID NO: 2302195 - RNA, 19 nt, Homo sapiens
  misc_RNA (1)...(19): siRNA sense strand
gcagauacauugaucgcau

SEQ ID NO: 2302196 - RNA, 19 nt, Homo sapiens
  misc_RNA (1)...(19): siRNA sense strand
ccacaaagcuggacugggu

SEQ ID NO: 2302197 - RNA, 19 nt, Homo sapiens
  misc_RNA (1)...(19): siRNA sense strand
gagacaucauccuggguau

SEQ ID NO: 2302198 - RNA, 19 nt, Homo sapiens
  misc_RNA (1)...(19): siRNA sense strand
gaccauuaaucgagccaau

SEQ ID NO: 2302199 - RNA, 19 nt, Homo sapiens
  misc_RNA (1)...(19): siRNA sense strand
cugcaggacgugugggaga

SEQ ID NO: 2302200 - RNA, 19 nt, Homo sapiens
  misc_RNA (1)...(19): siRNA sense strand
gaggagaagcugcaggaga

SEQ ID NO: 2302201 - RNA, 19 nt, Homo sapiens
  misc_RNA (1)...(19): siRNA sense strand
cauccuaaauguugagcca

SEQ ID NO: 2302202 - RNA, 19 nt, Homo sapiens
  misc_RNA (1)...(19): siRNA sense strand
aggcagaacaggagcggca

SEQ ID NO: 2302203 - RNA, 19 nt, Homo sapiens
  misc_RNA (1)...(19): siRNA sense strand
uugagaagauguaugagaa

SEQ ID NO: 2302204 - RNA, 19 nt, Homo sapiens
  misc_RNA (1)...(19): siRNA sense strand
guuugaaggucgacacuca

SEQ ID NO: 2302205 - RNA, 19 nt, Homo sapiens
  misc_RNA (1)...(19): siRNA sense strand
acuacaugucggaggagaa

SEQ ID NO: 2302206 - RNA, 19 nt, Homo sapiens
  misc_RNA (1)...(19): siRNA sense strand
ccuagaagauucaugggau

SEQ ID NO: 2302207 - RNA, 19 nt, Homo sapiens
  misc_RNA (1)...(19): siRNA sense strand
agaagauaacugaugcuua

SEQ ID NO: 2302208 - RNA, 19 nt, Homo sapiens
  misc_RNA (1)...(19): siRNA sense strand
agaagauguaugagaagau

SEQ ID NO: 2302209 - RNA, 19 nt, Homo sapiens
  misc_RNA (1)...(19): siRNA sense strand
cagcuagaccugacgggua

SEQ ID NO: 2302210 - RNA, 19 nt, Homo sapiens
  misc_RNA (1)...(19): siRNA sense strand
gugaacaacgaucgggcaa

SEQ ID NO: 2302211 - RNA, 19 nt, Homo sapiens
  misc_RNA (1)...(19): siRNA sense strand
gggcaaaagugauccugaa

SEQ ID NO: 2302212 - RNA, 19 nt, Homo sapiens
  misc_RNA (1)...(19): siRNA sense strand
augaaguggaagaagcuaa

SEQ ID NO: 2302213 - RNA, 19 nt, Homo sapiens
  misc_RNA (1)...(19): siRNA sense strand
agaagauccaugagagcau

SEQ ID NO: 2302214 - RNA, 19 nt, Homo sapiens
  misc_RNA (1)...(19): siRNA sense strand
ucgcugagaucgagaagca

SEQ ID NO: 2302215 - RNA, 19 nt, Homo sapiens
  misc_RNA (1)...(19): siRNA sense strand
agaacacagacaagggcaa

SEQ ID NO: 2302216 - RNA, 19 nt, Homo sapiens
  misc_RNA (1)...(19): siRNA sense strand
cguccaaggcacucaauau

SEQ ID NO: 2302217 - RNA, 19 nt, Homo sapiens
  misc_RNA (1)...(19): siRNA sense strand
uggaaggcauucuggaaca

SEQ ID NO: 2302218 - RNA, 19 nt, Homo sapiens
  misc_RNA (1)...(19): siRNA sense strand
aagaauggaucaaggucga

SEQ ID NO: 2302219 - RNA, 19 nt, Homo sapiens
  misc_RNA (1)...(19): siRNA sense strand
aggucgaggugcagcucaa

SEQ ID NO: 2302220 - RNA, 19 nt, Homo sapiens
  misc_RNA (1)...(19): siRNA sense strand
cgauacaaauacaagcuga

SEQ ID NO: 2302221 - RNA, 19 nt, Homo sapiens
  misc_RNA (1)...(19): siRNA sense strand
ccaccgacaacaugaguau

SEQ ID NO: 2302222 - RNA, 19 nt, Homo sapiens
  misc_RNA (1)...(19): siRNA sense strand
ggacaauccugcagcaccu

SEQ ID NO: 2302223 - RNA, 19 nt, Homo sapiens
  misc_RNA (1)...(19): siRNA sense strand
acgacuggcucaagacuau

SEQ ID NO: 2302224 - RNA, 19 nt, Homo sapiens
  misc_RNA (1)...(19): siRNA sense strand
gagaagaccauuaucauca

SEQ ID NO: 2302225 - RNA, 19 nt, Homo sapiens
  misc_RNA (1)...(19): siRNA sense strand
gaaugagccaugaagaaga

SEQ ID NO: 2302226 - RNA, 19 nt, Homo sapiens
  misc_RNA (1)...(19): siRNA sense strand
cuuuagaagaccuagaaga

SEQ ID NO: 2302227 - RNA, 19 nt, Homo sapiens
  misc_RNA (1)...(19): siRNA sense strand
ggagaagcugcaggagaaa

SEQ ID NO: 2302228 - RNA, 19 nt, Homo sapiens
  misc_RNA (1)...(19): siRNA sense strand
cuucauggguguucggcau

SEQ ID NO: 2302229 - RNA, 19 nt, Homo sapiens
  misc_RNA (1)...(19): siRNA sense strand
acaugaaauaugagcuaca

SEQ ID NO: 2302230 - RNA, 19 nt, Homo sapiens
  misc_RNA (1)...(19): siRNA sense strand
gagacaugaccaacaggaa

SEQ ID NO: 2302231 - RNA, 19 nt, Homo sapiens
  misc_RNA (1)...(19): siRNA sense strand
augaaaacaucguuggcua

SEQ ID NO: 2302232 - RNA, 19 nt, Homo sapiens
  misc_RNA (1)...(19): siRNA sense strand
acgugaaggccaaggcuga

SEQ ID NO: 2302233 - RNA, 19 nt, Homo sapiens
  misc_RNA (1)...(19): siRNA sense strand
acaugacagccaagaacaa

SEQ ID NO: 2302234 - RNA, 19 nt, Homo sapiens
  misc_RNA (1)...(19): siRNA sense strand
cccacgacauugagcgcua

SEQ ID NO: 2302235 - RNA, 19 nt, Homo sapiens
  misc_RNA (1)...(19): siRNA sense strand
acuauaaggacaugaacca

SEQ ID NO: 2302236 - RNA, 19 nt, Homo sapiens
  misc_RNA (1)...(19): siRNA sense strand
gugaauaaguggaauacag

SEQ ID NO: 2302237 - RNA, 19 nt, Homo sapiens
  misc_RNA (1)...(19): siRNA sense strand
cuagaagauucaugggauc

SEQ ID NO: 2302238 - RNA, 19 nt, Homo sapiens
  misc_RNA (1)...(19): siRNA sense strand
aggaaucuaugaaguggaa

SEQ ID NO: 2302239 - RNA, 19 nt, Homo sapiens
  misc_RNA (1)...(19): siRNA sense strand
ugagagagcuggaggagca

SEQ ID NO: 2302240 - RNA, 19 nt, Homo sapiens
  misc_RNA (1)...(19): siRNA sense strand
aggccaagcaggagaugaa

SEQ ID NO: 2302241 - RNA, 19 nt, Homo sapiens
  misc_RNA (1)...(19): siRNA sense strand
gccuggaacuagagcgcaa

SEQ ID NO: 2302242 - RNA, 19 nt, Homo sapiens
  misc_RNA (1)...(19): siRNA sense strand
gcgcgcaguacgagagcau

SEQ ID NO: 2302243 - RNA, 19 nt, Homo sapiens
  misc_RNA (1)...(19): siRNA sense strand
ucaagaagcugcacgagga

SEQ ID NO: 2302244 - RNA, 19 nt, Homo sapiens
  misc_RNA (1)...(19): siRNA sense strand
aggugaguguggagagcca

SEQ ID NO: 2302245 - RNA, 19 nt, Homo sapiens
  misc_RNA (1)...(19): siRNA sense strand
cgacugugccugaggugga

SEQ ID NO: 2302246 - RNA, 19 nt, Homo sapiens
  misc_RNA (1)...(19): siRNA sense strand
acgaggaggagcugcgaga

SEQ ID NO: 2302247 - RNA, 19 nt, Homo sapiens
  misc_RNA (1)...(19): siRNA sense strand
ucaagauggcccuggacau

SEQ ID NO: 2302248 - RNA, 19 nt, Homo sapiens
  misc_RNA (1)...(19): siRNA sense strand
uggaggaggagacgcgcaa

SEQ ID NO: 2302249 - RNA, 19 nt, Homo sapiens
  misc_RNA (1)...(19): siRNA sense strand
agucaaggagaaagagaaa

SEQ ID NO: 2302250 - RNA, 19 nt, Homo sapiens
  misc_RNA (1)...(19): siRNA sense strand
aagagaaagaggagcggaa

SEQ ID NO: 2302251 - RNA, 19 nt, Homo sapiens
  misc_RNA (1)...(19): siRNA sense strand
cggaagaaacagcaggaga

SEQ ID NO: 2302252 - RNA, 19 nt, Homo sapiens
  misc_RNA (1)...(19): siRNA sense strand
cagucaaggagaaagagaa

SEQ ID NO: 2302253 - RNA, 19 nt, Homo sapiens
  misc_RNA (1)...(19): siRNA sense strand
aggaagacaaggaugaaaa

SEQ ID NO: 2302254 - RNA, 19 nt, Homo sapiens
  misc_RNA (1)...(19): siRNA sense strand
guaccaagacagagaaccu

SEQ ID NO: 2302255 - RNA, 19 nt, Homo sapiens
  misc_RNA (1)...(19): siRNA sense strand
ggagaaagagaaagaggag

SEQ ID NO: 2302256 - RNA, 19 nt, Homo sapiens
  misc_RNA (1)...(19): siRNA sense strand
aggagaaggaagacaagga

SEQ ID NO: 2302257 - RNA, 19 nt, Homo sapiens
  misc_RNA (1)...(19): siRNA sense strand
acaucauccugaagaacuu

SEQ ID NO: 2302258 - RNA, 19 nt, Homo sapiens
  misc_RNA (1)...(19): siRNA sense strand
aagacaaggaugaaaagaa

SEQ ID NO: 2302259 - RNA, 19 nt, Homo sapiens
  misc_RNA (1)...(19): siRNA sense strand
agacaaagguccucccugu

SEQ ID NO: 2302260 - RNA, 19 nt, Homo sapiens
  misc_RNA (1)...(19): siRNA sense strand
gaggcagaguaccgggaca

SEQ ID NO: 2302261 - RNA, 19 nt, Homo sapiens
  misc_RNA (1)...(19): siRNA sense strand
ggaugaagacaaagguccu

SEQ ID NO: 2302262 - RNA, 19 nt, Homo sapiens
  misc_RNA (1)...(19): siRNA sense strand
ggcugauggucauggagau

SEQ ID NO: 2302263 - RNA, 19 nt, Homo sapiens
  misc_RNA (1)...(19): siRNA sense strand
aggagaaagagaaagagga

SEQ ID NO: 2302264 - RNA, 19 nt, Homo sapiens
  misc_RNA (1)...(19): siRNA sense strand
agaagguguuugagcugau

SEQ ID NO: 2302265 - RNA, 19 nt, Homo sapiens
  misc_RNA (1)...(19): siRNA sense strand
agcaggagaaggaagacaa

SEQ ID NO: 2302266 - RNA, 19 nt, Homo sapiens
  misc_RNA (1)...(19): siRNA sense strand
agucaaggagaaagagaaa

SEQ ID NO: 2302267 - RNA, 19 nt, Homo sapiens
  misc_RNA (1)...(19): siRNA sense strand
aagagaaagaggagcggaa

SEQ ID NO: 2302268 - RNA, 19 nt, Homo sapiens
  misc_RNA (1)...(19): siRNA sense strand
cggaagaaacagcaggaga

SEQ ID NO: 2302269 - RNA, 19 nt, Homo sapiens
  misc_RNA (1)...(19): siRNA sense strand
cagucaaggagaaagagaa

SEQ ID NO: 2302270 - RNA, 19 nt, Homo sapiens
  misc_RNA (1)...(19): siRNA sense strand
aggaagacaaggaugaaaa

SEQ ID NO: 2302271 - RNA, 19 nt, Homo sapiens
  misc_RNA (1)...(19): siRNA sense strand
guaccaagacagagaaccu

SEQ ID NO: 2302272 - RNA, 19 nt, Homo sapiens
  misc_RNA (1)...(19): siRNA sense strand
ggagaaagagaaagaggag

SEQ ID NO: 2302273 - RNA, 19 nt, Homo sapiens
  misc_RNA (1)...(19): siRNA sense strand
aggagaaggaagacaagga

SEQ ID NO: 2302274 - RNA, 19 nt, Homo sapiens
  misc_RNA (1)...(19): siRNA sense strand
aagacaaggaugaaaagaa

SEQ ID NO: 2302275 - RNA, 19 nt, Homo sapiens
  misc_RNA (1)...(19): siRNA sense strand
agacaaagguccucccugu

SEQ ID NO: 2302276 - RNA, 19 nt, Homo sapiens
  misc_RNA (1)...(19): siRNA sense strand
gaggcagaguaccgggaca

SEQ ID NO: 2302277 - RNA, 19 nt, Homo sapiens
  misc_RNA (1)...(19): siRNA sense strand
ggaugaagacaaagguccu

SEQ ID NO: 2302278 - RNA, 19 nt, Homo sapiens
  misc_RNA (1)...(19): siRNA sense strand
ggcugauggucauggagau

SEQ ID NO: 2302279 - RNA, 19 nt, Homo sapiens
  misc_RNA (1)...(19): siRNA sense strand
aggagaaagagaaagagga

SEQ ID NO: 2302280 - RNA, 19 nt, Homo sapiens
  misc_RNA (1)...(19): siRNA sense strand
agaagguguuugagcugau

SEQ ID NO: 2302281 - RNA, 19 nt, Homo sapiens
  misc_RNA (1)...(19): siRNA sense strand
agcaggagaaggaagacaa

SEQ ID NO: 2302282 - RNA, 19 nt, Homo sapiens
  misc_RNA (1)...(19): siRNA sense strand
ggaccgaauccgagagaga

SEQ ID NO: 2302283 - RNA, 19 nt, Homo sapiens
  misc_RNA (1)...(19): siRNA sense strand
acaaagaggaguuggguuu

SEQ ID NO: 2302284 - RNA, 19 nt, Homo sapiens
  misc_RNA (1)...(19): siRNA sense strand
agaaauugcccuagaaaca

SEQ ID NO: 2302285 - RNA, 19 nt, Homo sapiens
  misc_RNA (1)...(19): siRNA sense strand
uaagauaccaguugggaaa

SEQ ID NO: 2302286 - RNA, 19 nt, Homo sapiens
  misc_RNA (1)...(19): siRNA sense strand
agaaggaagaacagauaua

SEQ ID NO: 2302287 - RNA, 19 nt, Homo sapiens
  misc_RNA (1)...(19): siRNA sense strand
gagaagaagugaagccuca

SEQ ID NO: 2302288 - RNA, 19 nt, Homo sapiens
  misc_RNA (1)...(19): siRNA sense strand
aagggaagaaugaggauaa

SEQ ID NO: 2302289 - RNA, 19 nt, Homo sapiens
  misc_RNA (1)...(19): siRNA sense strand
ggaaauugauacugcgcuu

SEQ ID NO: 2302290 - RNA, 19 nt, Homo sapiens
  misc_RNA (1)...(19): siRNA sense strand
acgugaaacacuugguaaa

SEQ ID NO: 2302291 - RNA, 19 nt, Homo sapiens
  misc_RNA (1)...(19): siRNA sense strand
gagaauuauuucaaggaca

SEQ ID NO: 2302292 - RNA, 19 nt, Homo sapiens
  misc_RNA (1)...(19): siRNA sense strand
ugaaagucuccaagaauua

SEQ ID NO: 2302293 - RNA, 19 nt, Homo sapiens
  misc_RNA (1)...(19): siRNA sense strand
caaagaaaacugaggaauu

SEQ ID NO: 2302294 - RNA, 19 nt, Homo sapiens
  misc_RNA (1)...(19): siRNA sense strand
ccaaagacugacagaauau

SEQ ID NO: 2302295 - RNA, 19 nt, Homo sapiens
  misc_RNA (1)...(19): siRNA sense strand
agggauccguuaagagaaa

SEQ ID NO: 2302296 - RNA, 19 nt, Homo sapiens
  misc_RNA (1)...(19): siRNA sense strand
aagcagaagaagagcaaaa

SEQ ID NO: 2302297 - RNA, 19 nt, Homo sapiens
  misc_RNA (1)...(19): siRNA sense strand
ccaaaggcaaucagagaau

SEQ ID NO: 2302298 - RNA, 19 nt, Homo sapiens
  misc_RNA (1)...(19): siRNA sense strand
cucaagaaguagaaggaga

SEQ ID NO: 2302299 - RNA, 19 nt, Homo sapiens
  misc_RNA (1)...(19): siRNA sense strand
ucaagaaguagaaggagaa

SEQ ID NO: 2302300 - RNA, 19 nt, Homo sapiens
  misc_RNA (1)...(19): siRNA sense strand
cuguggaaacacugagaaa

SEQ ID NO: 2302301 - RNA, 19 nt, Homo sapiens
  misc_RNA (1)...(19): siRNA sense strand
gguuaaugauacagauguu

SEQ ID NO: 2302302 - RNA, 19 nt, Homo sapiens
  misc_RNA (1)...(19): siRNA sense strand
ucgcagccauugaggguaa

SEQ ID NO: 2302303 - RNA, 19 nt, Homo sapiens
  misc_RNA (1)...(19): siRNA sense strand
gcuaaaacggcaagaggaa

SEQ ID NO: 2302304 - RNA, 19 nt, Homo sapiens
  misc_RNA (1)...(19): siRNA sense strand
ccgccagagugauggagaa

SEQ ID NO: 2302305 - RNA, 19 nt, Homo sapiens
  misc_RNA (1)...(19): siRNA sense strand
ccaagaugcccaagauauu

SEQ ID NO: 2302306 - RNA, 19 nt, Homo sapiens
  misc_RNA (1)...(19): siRNA sense strand
gagcagacaauaugaaaca

SEQ ID NO: 2302307 - RNA, 19 nt, Homo sapiens
  misc_RNA (1)...(19): siRNA sense strand
cuaagaaagggaagaauga

SEQ ID NO: 2302308 - RNA, 19 nt, Homo sapiens
  misc_RNA (1)...(19): siRNA sense strand
gauaguaaccaaagcaaaa

SEQ ID NO: 2302309 - RNA, 19 nt, Homo sapiens
  misc_RNA (1)...(19): siRNA sense strand
gcagaugauuugggagcaa

SEQ ID NO: 2302310 - RNA, 19 nt, Homo sapiens
  misc_RNA (1)...(19): siRNA sense strand
ccgaaggaaaguaaacaua

SEQ ID NO: 2302311 - RNA, 19 nt, Homo sapiens
  misc_RNA (1)...(19): siRNA sense strand
ccugagaagaagucacaaa

SEQ ID NO: 2302312 - RNA, 19 nt, Homo sapiens
  misc_RNA (1)...(19): siRNA sense strand
cagcagugggaguggagaa

SEQ ID NO: 2302313 - RNA, 19 nt, Homo sapiens
  misc_RNA (1)...(19): siRNA sense strand
cagauuaguuauuggacga

SEQ ID NO: 2302314 - RNA, 19 nt, Homo sapiens
  misc_RNA (1)...(19): siRNA sense strand
gcaugagacuacaaagaca

SEQ ID NO: 2302315 - RNA, 19 nt, Homo sapiens
  misc_RNA (1)...(19): siRNA sense strand
uuuaguaccuccagugaaa

SEQ ID NO: 2302316 - RNA, 19 nt, Homo sapiens
  misc_RNA (1)...(19): siRNA sense strand
cugaaagucuccaagaauu

SEQ ID NO: 2302317 - RNA, 19 nt, Homo sapiens
  misc_RNA (1)...(19): siRNA sense strand
caaaagugauggaaggcua

SEQ ID NO: 2302318 - RNA, 19 nt, Homo sapiens
  misc_RNA (1)...(19): siRNA sense strand
aaugaauggcugugaagaa

SEQ ID NO: 2302319 - RNA, 19 nt, Homo sapiens
  misc_RNA (1)...(19): siRNA sense strand
agccaugaauguagaagaa

SEQ ID NO: 2302320 - RNA, 19 nt, Homo sapiens
  misc_RNA (1)...(19): siRNA sense strand
cauacaggauccagccaaa

SEQ ID NO: 2302321 - RNA, 19 nt, Homo sapiens
  misc_RNA (1)...(19): siRNA sense strand
ccagagugauggagaaacu

SEQ ID NO: 2302322 - RNA, 19 nt, Homo sapiens
  misc_RNA (1)...(19): siRNA sense strand
caaaguauggcuugggauu

SEQ ID NO: 2302323 - RNA, 19 nt, Homo sapiens
  misc_RNA (1)...(19): siRNA sense strand
cagcuacagaugagagcaa

SEQ ID NO: 2302324 - RNA, 19 nt, Homo sapiens
  misc_RNA (1)...(19): siRNA sense strand
gagauaucuuugagguuga

SEQ ID NO: 2302325 - RNA, 19 nt, Homo sapiens
  misc_RNA (1)...(19): siRNA sense strand
acagaaggaagaacagaua

SEQ ID NO: 2302326 - RNA, 19 nt, Homo sapiens
  misc_RNA (1)...(19): siRNA sense strand
agauaauucuggacgugaa

SEQ ID NO: 2302327 - RNA, 19 nt, Homo sapiens
  misc_RNA (1)...(19): siRNA sense strand
gaaguauagccuuggauau

SEQ ID NO: 2302328 - RNA, 19 nt, Homo sapiens
  misc_RNA (1)...(19): siRNA sense strand
agaugaaaccuuaagucaa

SEQ ID NO: 2302329 - RNA, 19 nt, Homo sapiens
  misc_RNA (1)...(19): siRNA sense strand
auccaaagccaccgagaaa

SEQ ID NO: 2302330 - RNA, 19 nt, Homo sapiens
  misc_RNA (1)...(19): siRNA sense strand
agagagaacagaagauaca

SEQ ID NO: 2302331 - RNA, 19 nt, Homo sapiens
  misc_RNA (1)...(19): siRNA sense strand
auucagaagccacaagaaa

SEQ ID NO: 2302332 - RNA, 19 nt, Homo sapiens
  misc_RNA (1)...(19): siRNA sense strand
aagaagaagaucugggcuu

SEQ ID NO: 2302333 - RNA, 19 nt, Homo sapiens
  misc_RNA (1)...(19): siRNA sense strand
cagccaugacucaaagaaa

SEQ ID NO: 2302334 - RNA, 19 nt, Homo sapiens
  misc_RNA (1)...(19): siRNA sense strand
guuaagagaaauugcccua

SEQ ID NO: 2302335 - RNA, 19 nt, Homo sapiens
  misc_RNA (1)...(19): siRNA sense strand
ugaggauaaccgaaggaaa

SEQ ID NO: 2302336 - RNA, 19 nt, Homo sapiens
  misc_RNA (1)...(19): siRNA sense strand
gauggaaagaagaaccaaa

SEQ ID NO: 2302337 - RNA, 19 nt, Homo sapiens
  misc_RNA (1)...(19): siRNA sense strand
acuuuagaauggagcacua

SEQ ID NO: 2302338 - RNA, 19 nt, Homo sapiens
  misc_RNA (1)...(19): siRNA sense strand
ugccaaagacugacagaau

SEQ ID NO: 2302339 - RNA, 19 nt, Homo sapiens
  misc_RNA (1)...(19): siRNA sense strand
ccaaagccaccgagaaaga

SEQ ID NO: 2302340 - RNA, 19 nt, Homo sapiens
  misc_RNA (1)...(19): siRNA sense strand
ucagaaugcccaaggucaa

SEQ ID NO: 2302341 - RNA, 19 nt, Homo sapiens
  misc_RNA (1)...(19): siRNA sense strand
acggaaugguucagacaga

SEQ ID NO: 2302342 - RNA, 19 nt, Homo sapiens
  misc_RNA (1)...(19): siRNA sense strand
gaggauaaccgaaggaaag

SEQ ID NO: 2302343 - RNA, 19 nt, Homo sapiens
  misc_RNA (1)...(19): siRNA sense strand
ccaaauugcauaauaccua

SEQ ID NO: 2302344 - RNA, 19 nt, Homo sapiens
  misc_RNA (1)...(19): siRNA sense strand
caugcaagacagugcuaua

SEQ ID NO: 2302345 - RNA, 19 nt, Homo sapiens
  misc_RNA (1)...(19): siRNA sense strand
ggacaaucuccaacaucua

SEQ ID NO: 2302346 - RNA, 19 nt, Homo sapiens
  misc_RNA (1)...(19): siRNA sense strand
gaaccaacuagacaagaaa

SEQ ID NO: 2302347 - RNA, 19 nt, Homo sapiens
  misc_RNA (1)...(19): siRNA sense strand
gcugaaagucuccaagaau

SEQ ID NO: 2302348 - RNA, 19 nt, Homo sapiens
  misc_RNA (1)...(19): siRNA sense strand
gggcaaugacccuugaaga

SEQ ID NO: 2302349 - RNA, 19 nt, Homo sapiens
  misc_RNA (1)...(19): siRNA sense strand
aucaagagaucaugcuaaa

SEQ ID NO: 2302350 - RNA, 19 nt, Homo sapiens
  misc_RNA (1)...(19): siRNA sense strand
cagcauaguaaggguuaaa

SEQ ID NO: 2302351 - RNA, 19 nt, Homo sapiens
  misc_RNA (1)...(19): siRNA sense strand
ggaaaugaugaguugccaa

SEQ ID NO: 2302352 - RNA, 19 nt, Homo sapiens
  misc_RNA (1)...(19): siRNA sense strand
gcccaacauccuaggcaaa

SEQ ID NO: 2302353 - RNA, 19 nt, Homo sapiens
  misc_RNA (1)...(19): siRNA sense strand
ggaccgaauccgagagaga

SEQ ID NO: 2302354 - RNA, 19 nt, Homo sapiens
  misc_RNA (1)...(19): siRNA sense strand
acaaagaggaguuggguuu

SEQ ID NO: 2302355 - RNA, 19 nt, Homo sapiens
  misc_RNA (1)...(19): siRNA sense strand
agaaauugcccuagaaaca

SEQ ID NO: 2302356 - RNA, 19 nt, Homo sapiens
  misc_RNA (1)...(19): siRNA sense strand
uaagauaccaguugggaaa

SEQ ID NO: 2302357 - RNA, 19 nt, Homo sapiens
  misc_RNA (1)...(19): siRNA sense strand
agaaggaagaacagauaua

SEQ ID NO: 2302358 - RNA, 19 nt, Homo sapiens
  misc_RNA (1)...(19): siRNA sense strand
gagaagaagugaagccuca

SEQ ID NO: 2302359 - RNA, 19 nt, Homo sapiens
  misc_RNA (1)...(19): siRNA sense strand
aagggaagaaugaggauaa

SEQ ID NO: 2302360 - RNA, 19 nt, Homo sapiens
  misc_RNA (1)...(19): siRNA sense strand
ggaaauugauacugcgcuu

SEQ ID NO: 2302361 - RNA, 19 nt, Homo sapiens
  misc_RNA (1)...(19): siRNA sense strand
acgugaaacacuugguaaa

SEQ ID NO: 2302362 - RNA, 19 nt, Homo sapiens
  misc_RNA (1)...(19): siRNA sense strand
gagaauuauuucaaggaca

SEQ ID NO: 2302363 - RNA, 19 nt, Homo sapiens
  misc_RNA (1)...(19): siRNA sense strand
ugaaagucuccaagaauua

SEQ ID NO: 2302364 - RNA, 19 nt, Homo sapiens
  misc_RNA (1)...(19): siRNA sense strand
caaagaaaacugaggaauu

SEQ ID NO: 2302365 - RNA, 19 nt, Homo sapiens
  misc_RNA (1)...(19): siRNA sense strand
ccaaagacugacagaauau

SEQ ID NO: 2302366 - RNA, 19 nt, Homo sapiens
  misc_RNA (1)...(19): siRNA sense strand
agggauccguuaagagaaa

SEQ ID NO: 2302367 - RNA, 19 nt, Homo sapiens
  misc_RNA (1)...(19): siRNA sense strand
aagcagaagaagagcaaaa

SEQ ID NO: 2302368 - RNA, 19 nt, Homo sapiens
  misc_RNA (1)...(19): siRNA sense strand
ccaaaggcaaucagagaau

SEQ ID NO: 2302369 - RNA, 19 nt, Homo sapiens
  misc_RNA (1)...(19): siRNA sense strand
cucaagaaguagaaggaga

SEQ ID NO: 2302370 - RNA, 19 nt, Homo sapiens
  misc_RNA (1)...(19): siRNA sense strand
ucaagaaguagaaggagaa

SEQ ID NO: 2302371 - RNA, 19 nt, Homo sapiens
  misc_RNA (1)...(19): siRNA sense strand
cuguggaaacacugagaaa

SEQ ID NO: 2302372 - RNA, 19 nt, Homo sapiens
  misc_RNA (1)...(19): siRNA sense strand
gguuaaugauacagauguu

SEQ ID NO: 2302373 - RNA, 19 nt, Homo sapiens
  misc_RNA (1)...(19): siRNA sense strand
ucgcagccauugaggguaa

SEQ ID NO: 2302374 - RNA, 19 nt, Homo sapiens
  misc_RNA (1)...(19): siRNA sense strand
gcuaaaacggcaagaggaa

SEQ ID NO: 2302375 - RNA, 19 nt, Homo sapiens
  misc_RNA (1)...(19): siRNA sense strand
ccgccagagugauggagaa

SEQ ID NO: 2302376 - RNA, 19 nt, Homo sapiens
  misc_RNA (1)...(19): siRNA sense strand
ccaagaugcccaagauauu

SEQ ID NO: 2302377 - RNA, 19 nt, Homo sapiens
  misc_RNA (1)...(19): siRNA sense strand
gagcagacaauaugaaaca

SEQ ID NO: 2302378 - RNA, 19 nt, Homo sapiens
  misc_RNA (1)...(19): siRNA sense strand
cuaagaaagggaagaauga

SEQ ID NO: 2302379 - RNA, 19 nt, Homo sapiens
  misc_RNA (1)...(19): siRNA sense strand
gauaguaaccaaagcaaaa

SEQ ID NO: 2302380 - RNA, 19 nt, Homo sapiens
  misc_RNA (1)...(19): siRNA sense strand
gcagaugauuugggagcaa

SEQ ID NO: 2302381 - RNA, 19 nt, Homo sapiens
  misc_RNA (1)...(19): siRNA sense strand
ccgaaggaaaguaaacaua

SEQ ID NO: 2302382 - RNA, 19 nt, Homo sapiens
  misc_RNA (1)...(19): siRNA sense strand
ccugagaagaagucacaaa

SEQ ID NO: 2302383 - RNA, 19 nt, Homo sapiens
  misc_RNA (1)...(19): siRNA sense strand
cagcagugggaguggagaa

SEQ ID NO: 2302384 - RNA, 19 nt, Homo sapiens
  misc_RNA (1)...(19): siRNA sense strand
cagauuaguuauuggacga

SEQ ID NO: 2302385 - RNA, 19 nt, Homo sapiens
  misc_RNA (1)...(19): siRNA sense strand
gcaugagacuacaaagaca

SEQ ID NO: 2302386 - RNA, 19 nt, Homo sapiens
  misc_RNA (1)...(19): siRNA sense strand
uuuaguaccuccagugaaa

SEQ ID NO: 2302387 - RNA, 19 nt, Homo sapiens
  misc_RNA (1)...(19): siRNA sense strand
cugaaagucuccaagaauu

SEQ ID NO: 2302388 - RNA, 19 nt, Homo sapiens
  misc_RNA (1)...(19): siRNA sense strand
caaaagugauggaaggcua

SEQ ID NO: 2302389 - RNA, 19 nt, Homo sapiens
  misc_RNA (1)...(19): siRNA sense strand
aaugaauggcugugaagaa

SEQ ID NO: 2302390 - RNA, 19 nt, Homo sapiens
  misc_RNA (1)...(19): siRNA sense strand
agccaugaauguagaagaa

SEQ ID NO: 2302391 - RNA, 19 nt, Homo sapiens
  misc_RNA (1)...(19): siRNA sense strand
cauacaggauccagccaaa

SEQ ID NO: 2302392 - RNA, 19 nt, Homo sapiens
  misc_RNA (1)...(19): siRNA sense strand
ccagagugauggagaaacu

SEQ ID NO: 2302393 - RNA, 19 nt, Homo sapiens
  misc_RNA (1)...(19): siRNA sense strand
caaaguauggcuugggauu

SEQ ID NO: 2302394 - RNA, 19 nt, Homo sapiens
  misc_RNA (1)...(19): siRNA sense strand
cagcuacagaugagagcaa

SEQ ID NO: 2302395 - RNA, 19 nt, Homo sapiens
  misc_RNA (1)...(19): siRNA sense strand
gagauaucuuugagguuga

SEQ ID NO: 2302396 - RNA, 19 nt, Homo sapiens
  misc_RNA (1)...(19): siRNA sense strand
acagaaggaagaacagaua

SEQ ID NO: 2302397 - RNA, 19 nt, Homo sapiens
  misc_RNA (1)...(19): siRNA sense strand
agauaauucuggacgugaa

SEQ ID NO: 2302398 - RNA, 19 nt, Homo sapiens
  misc_RNA (1)...(19): siRNA sense strand
gaaguauagccuuggauau

SEQ ID NO: 2302399 - RNA, 19 nt, Homo sapiens
  misc_RNA (1)...(19): siRNA sense strand
agaugaaaccuuaagucaa

SEQ ID NO: 2302400 - RNA, 19 nt, Homo sapiens
  misc_RNA (1)...(19): siRNA sense strand
auccaaagccaccgagaaa

SEQ ID NO: 2302401 - RNA, 19 nt, Homo sapiens
  misc_RNA (1)...(19): siRNA sense strand
agagagaacagaagauaca

SEQ ID NO: 2302402 - RNA, 19 nt, Homo sapiens
  misc_RNA (1)...(19): siRNA sense strand
auucagaagccacaagaaa

SEQ ID NO: 2302403 - RNA, 19 nt, Homo sapiens
  misc_RNA (1)...(19): siRNA sense strand
aagaagaagaucugggcuu

SEQ ID NO: 2302404 - RNA, 19 nt, Homo sapiens
  misc_RNA (1)...(19): siRNA sense strand
cagccaugacucaaagaaa

SEQ ID NO: 2302405 - RNA, 19 nt, Homo sapiens
  misc_RNA (1)...(19): siRNA sense strand
guuaagagaaauugcccua

SEQ ID NO: 2302406 - RNA, 19 nt, Homo sapiens
  misc_RNA (1)...(19): siRNA sense strand
ugaggauaaccgaaggaaa

SEQ ID NO: 2302407 - RNA, 19 nt, Homo sapiens
  misc_RNA (1)...(19): siRNA sense strand
gauggaaagaagaaccaaa

SEQ ID NO: 2302408 - RNA, 19 nt, Homo sapiens
  misc_RNA (1)...(19): siRNA sense strand
acuuuagaauggagcacua

SEQ ID NO: 2302409 - RNA, 19 nt, Homo sapiens
  misc_RNA (1)...(19): siRNA sense strand
ugccaaagacugacagaau

SEQ ID NO: 2302410 - RNA, 19 nt, Homo sapiens
  misc_RNA (1)...(19): siRNA sense strand
ccaaagccaccgagaaaga

SEQ ID NO: 2302411 - RNA, 19 nt, Homo sapiens
  misc_RNA (1)...(19): siRNA sense strand
ucagaaugcccaaggucaa

SEQ ID NO: 2302412 - RNA, 19 nt, Homo sapiens
  misc_RNA (1)...(19): siRNA sense strand
acggaaugguucagacaga

SEQ ID NO: 2302413 - RNA, 19 nt, Homo sapiens
  misc_RNA (1)...(19): siRNA sense strand
gaggauaaccgaaggaaag

SEQ ID NO: 2302414 - RNA, 19 nt, Homo sapiens
  misc_RNA (1)...(19): siRNA sense strand
ccaaauugcauaauaccua

SEQ ID NO: 2302415 - RNA, 19 nt, Homo sapiens
  misc_RNA (1)...(19): siRNA sense strand
caugcaagacagugcuaua

SEQ ID NO: 2302416 - RNA, 19 nt, Homo sapiens
  misc_RNA (1)...(19): siRNA sense strand
ggacaaucuccaacaucua

SEQ ID NO: 2302417 - RNA, 19 nt, Homo sapiens
  misc_RNA (1)...(19): siRNA sense strand
gaaccaacuagacaagaaa

SEQ ID NO: 2302418 - RNA, 19 nt, Homo sapiens
  misc_RNA (1)...(19): siRNA sense strand
gcugaaagucuccaagaau

SEQ ID NO: 2302419 - RNA, 19 nt, Homo sapiens
  misc_RNA (1)...(19): siRNA sense strand
gggcaaugacccuugaaga

SEQ ID NO: 2302420 - RNA, 19 nt, Homo sapiens
  misc_RNA (1)...(19): siRNA sense strand
aucaagagaucaugcuaaa

SEQ ID NO: 2302421 - RNA, 19 nt, Homo sapiens
  misc_RNA (1)...(19): siRNA sense strand
cagcauaguaaggguuaaa

SEQ ID NO: 2302422 - RNA, 19 nt, Homo sapiens
  misc_RNA (1)...(19): siRNA sense strand
ggaaaugaugaguugccaa

SEQ ID NO: 2302423 - RNA, 19 nt, Homo sapiens
  misc_RNA (1)...(19): siRNA sense strand
gcccaacauccuaggcaaa

SEQ ID NO: 2302424 - RNA, 19 nt, Homo sapiens
  misc_RNA (1)...(19): siRNA sense strand
ggaccgaauccgagagaga

SEQ ID NO: 2302425 - RNA, 19 nt, Homo sapiens
  misc_RNA (1)...(19): siRNA sense strand
acaaagaggaguuggguuu

SEQ ID NO: 2302426 - RNA, 19 nt, Homo sapiens
  misc_RNA (1)...(19): siRNA sense strand
agaaauugcccuagaaaca

SEQ ID NO: 2302427 - RNA, 19 nt, Homo sapiens
  misc_RNA (1)...(19): siRNA sense strand
uaagauaccaguugggaaa

SEQ ID NO: 2302428 - RNA, 19 nt, Homo sapiens
  misc_RNA (1)...(19): siRNA sense strand
agaaggaagaacagauaua

SEQ ID NO: 2302429 - RNA, 19 nt, Homo sapiens
  misc_RNA (1)...(19): siRNA sense strand
gagaagaagugaagccuca

SEQ ID NO: 2302430 - RNA, 19 nt, Homo sapiens
  misc_RNA (1)...(19): siRNA sense strand
aagggaagaaugaggauaa

SEQ ID NO: 2302431 - RNA, 19 nt, Homo sapiens
  misc_RNA (1)...(19): siRNA sense strand
ggaaauugauacugcgcuu

SEQ ID NO: 2302432 - RNA, 19 nt, Homo sapiens
  misc_RNA (1)...(19): siRNA sense strand
acgugaaacacuugguaaa

SEQ ID NO: 2302433 - RNA, 19 nt, Homo sapiens
  misc_RNA (1)...(19): siRNA sense strand
gagaauuauuucaaggaca

SEQ ID NO: 2302434 - RNA, 19 nt, Homo sapiens
  misc_RNA (1)...(19): siRNA sense strand
ugaaagucuccaagaauua

SEQ ID NO: 2302435 - RNA, 19 nt, Homo sapiens
  misc_RNA (1)...(19): siRNA sense strand
caaagaaaacugaggaauu

SEQ ID NO: 2302436 - RNA, 19 nt, Homo sapiens
  misc_RNA (1)...(19): siRNA sense strand
ccaaagacugacagaauau

SEQ ID NO: 2302437 - RNA, 19 nt, Homo sapiens
  misc_RNA (1)...(19): siRNA sense strand
agggauccguuaagagaaa

SEQ ID NO: 2302438 - RNA, 19 nt, Homo sapiens
  misc_RNA (1)...(19): siRNA sense strand
aagcagaagaagagcaaaa

SEQ ID NO: 2302439 - RNA, 19 nt, Homo sapiens
  misc_RNA (1)...(19): siRNA sense strand
ccaaaggcaaucagagaau

SEQ ID NO: 2302440 - RNA, 19 nt, Homo sapiens
  misc_RNA (1)...(19): siRNA sense strand
cucaagaaguagaaggaga

SEQ ID NO: 2302441 - RNA, 19 nt, Homo sapiens
  misc_RNA (1)...(19): siRNA sense strand
ucaagaaguagaaggagaa

SEQ ID NO: 2302442 - RNA, 19 nt, Homo sapiens
  misc_RNA (1)...(19): siRNA sense strand
cuguggaaacacugagaaa

SEQ ID NO: 2302443 - RNA, 19 nt, Homo sapiens
  misc_RNA (1)...(19): siRNA sense strand
gguuaaugauacagauguu

SEQ ID NO: 2302444 - RNA, 19 nt, Homo sapiens
  misc_RNA (1)...(19): siRNA sense strand
ucgcagccauugaggguaa

SEQ ID NO: 2302445 - RNA, 19 nt, Homo sapiens
  misc_RNA (1)...(19): siRNA sense strand
gcuaaaacggcaagaggaa

SEQ ID NO: 2302446 - RNA, 19 nt, Homo sapiens
  misc_RNA (1)...(19): siRNA sense strand
ccgccagagugauggagaa

SEQ ID NO: 2302447 - RNA, 19 nt, Homo sapiens
  misc_RNA (1)...(19): siRNA sense strand
ccaagaugcccaagauauu

SEQ ID NO: 2302448 - RNA, 19 nt, Homo sapiens
  misc_RNA (1)...(19): siRNA sense strand
gagcagacaauaugaaaca

SEQ ID NO: 2302449 - RNA, 19 nt, Homo sapiens
  misc_RNA (1)...(19): siRNA sense strand
cuaagaaagggaagaauga

SEQ ID NO: 2302450 - RNA, 19 nt, Homo sapiens
  misc_RNA (1)...(19): siRNA sense strand
gauaguaaccaaagcaaaa

SEQ ID NO: 2302451 - RNA, 19 nt, Homo sapiens
  misc_RNA (1)...(19): siRNA sense strand
gcagaugauuugggagcaa

SEQ ID NO: 2302452 - RNA, 19 nt, Homo sapiens
  misc_RNA (1)...(19): siRNA sense strand
ccgaaggaaaguaaacaua

SEQ ID NO: 2302453 - RNA, 19 nt, Homo sapiens
  misc_RNA (1)...(19): siRNA sense strand
ccugagaagaagucacaaa

SEQ ID NO: 2302454 - RNA, 19 nt, Homo sapiens
  misc_RNA (1)...(19): siRNA sense strand
cagcagugggaguggagaa

SEQ ID NO: 2302455 - RNA, 19 nt, Homo sapiens
  misc_RNA (1)...(19): siRNA sense strand
cagauuaguuauuggacga

SEQ ID NO: 2302456 - RNA, 19 nt, Homo sapiens
  misc_RNA (1)...(19): siRNA sense strand
gcaugagacuacaaagaca

SEQ ID NO: 2302457 - RNA, 19 nt, Homo sapiens
  misc_RNA (1)...(19): siRNA sense strand
uuuaguaccuccagugaaa

SEQ ID NO: 2302458 - RNA, 19 nt, Homo sapiens
  misc_RNA (1)...(19): siRNA sense strand
cugaaagucuccaagaauu

SEQ ID NO: 2302459 - RNA, 19 nt, Homo sapiens
  misc_RNA (1)...(19): siRNA sense strand
caaaagugauggaaggcua

SEQ ID NO: 2302460 - RNA, 19 nt, Homo sapiens
  misc_RNA (1)...(19): siRNA sense strand
aaugaauggcugugaagaa

SEQ ID NO: 2302461 - RNA, 19 nt, Homo sapiens
  misc_RNA (1)...(19): siRNA sense strand
agccaugaauguagaagaa

SEQ ID NO: 2302462 - RNA, 19 nt, Homo sapiens
  misc_RNA (1)...(19): siRNA sense strand
cauacaggauccagccaaa

SEQ ID NO: 2302463 - RNA, 19 nt, Homo sapiens
  misc_RNA (1)...(19): siRNA sense strand
ccagagugauggagaaacu

SEQ ID NO: 2302464 - RNA, 19 nt, Homo sapiens
  misc_RNA (1)...(19): siRNA sense strand
caaaguauggcuugggauu

SEQ ID NO: 2302465 - RNA, 19 nt, Homo sapiens
  misc_RNA (1)...(19): siRNA sense strand
cagcuacagaugagagcaa

SEQ ID NO: 2302466 - RNA, 19 nt, Homo sapiens
  misc_RNA (1)...(19): siRNA sense strand
gagauaucuuugagguuga

SEQ ID NO: 2302467 - RNA, 19 nt, Homo sapiens
  misc_RNA (1)...(19): siRNA sense strand
acagaaggaagaacagaua

SEQ ID NO: 2302468 - RNA, 19 nt, Homo sapiens
  misc_RNA (1)...(19): siRNA sense strand
agauaauucuggacgugaa

SEQ ID NO: 2302469 - RNA, 19 nt, Homo sapiens
  misc_RNA (1)...(19): siRNA sense strand
gaaguauagccuuggauau

SEQ ID NO: 2302470 - RNA, 19 nt, Homo sapiens
  misc_RNA (1)...(19): siRNA sense strand
agaugaaaccuuaagucaa

SEQ ID NO: 2302471 - RNA, 19 nt, Homo sapiens
  misc_RNA (1)...(19): siRNA sense strand
auccaaagccaccgagaaa

SEQ ID NO: 2302472 - RNA, 19 nt, Homo sapiens
  misc_RNA (1)...(19): siRNA sense strand
agagagaacagaagauaca

SEQ ID NO: 2302473 - RNA, 19 nt, Homo sapiens
  misc_RNA (1)...(19): siRNA sense strand
auucagaagccacaagaaa

SEQ ID NO: 2302474 - RNA, 19 nt, Homo sapiens
  misc_RNA (1)...(19): siRNA sense strand
aagaagaagaucugggcuu

SEQ ID NO: 2302475 - RNA, 19 nt, Homo sapiens
  misc_RNA (1)...(19): siRNA sense strand
cagccaugacucaaagaaa

SEQ ID NO: 2302476 - RNA, 19 nt, Homo sapiens
  misc_RNA (1)...(19): siRNA sense strand
guuaagagaaauugcccua

SEQ ID NO: 2302477 - RNA, 19 nt, Homo sapiens
  misc_RNA (1)...(19): siRNA sense strand
ugaggauaaccgaaggaaa

SEQ ID NO: 2302478 - RNA, 19 nt, Homo sapiens
  misc_RNA (1)...(19): siRNA sense strand
gauggaaagaagaaccaaa

SEQ ID NO: 2302479 - RNA, 19 nt, Homo sapiens
  misc_RNA (1)...(19): siRNA sense strand
acuuuagaauggagcacua

SEQ ID NO: 2302480 - RNA, 19 nt, Homo sapiens
  misc_RNA (1)...(19): siRNA sense strand
ugccaaagacugacagaau

SEQ ID NO: 2302481 - RNA, 19 nt, Homo sapiens
  misc_RNA (1)...(19): siRNA sense strand
ccaaagccaccgagaaaga

SEQ ID NO: 2302482 - RNA, 19 nt, Homo sapiens
  misc_RNA (1)...(19): siRNA sense strand
ucagaaugcccaaggucaa

SEQ ID NO: 2302483 - RNA, 19 nt, Homo sapiens
  misc_RNA (1)...(19): siRNA sense strand
acggaaugguucagacaga

SEQ ID NO: 2302484 - RNA, 19 nt, Homo sapiens
  misc_RNA (1)...(19): siRNA sense strand
gaggauaaccgaaggaaag

SEQ ID NO: 2302485 - RNA, 19 nt, Homo sapiens
  misc_RNA (1)...(19): siRNA sense strand
ccaaauugcauaauaccua

SEQ ID NO: 2302486 - RNA, 19 nt, Homo sapiens
  misc_RNA (1)...(19): siRNA sense strand
caugcaagacagugcuaua

SEQ ID NO: 2302487 - RNA, 19 nt, Homo sapiens
  misc_RNA (1)...(19): siRNA sense strand
ggacaaucuccaacaucua

SEQ ID NO: 2302488 - RNA, 19 nt, Homo sapiens
  misc_RNA (1)...(19): siRNA sense strand
gaaccaacuagacaagaaa

SEQ ID NO: 2302489 - RNA, 19 nt, Homo sapiens
  misc_RNA (1)...(19): siRNA sense strand
gcugaaagucuccaagaau

SEQ ID NO: 2302490 - RNA, 19 nt, Homo sapiens
  misc_RNA (1)...(19): siRNA sense strand
gggcaaugacccuugaaga

SEQ ID NO: 2302491 - RNA, 19 nt, Homo sapiens
  misc_RNA (1)...(19): siRNA sense strand
aucaagagaucaugcuaaa

SEQ ID NO: 2302492 - RNA, 19 nt, Homo sapiens
  misc_RNA (1)...(19): siRNA sense strand
cagcauaguaaggguuaaa

SEQ ID NO: 2302493 - RNA, 19 nt, Homo sapiens
  misc_RNA (1)...(19): siRNA sense strand
ggaaaugaugaguugccaa

SEQ ID NO: 2302494 - RNA, 19 nt, Homo sapiens
  misc_RNA (1)...(19): siRNA sense strand
gcccaacauccuaggcaaa

SEQ ID NO: 2302495 - RNA, 19 nt, Homo sapiens
  misc_RNA (1)...(19): siRNA sense strand
ggaccgaauccgagagaga

SEQ ID NO: 2302496 - RNA, 19 nt, Homo sapiens
  misc_RNA (1)...(19): siRNA sense strand
acaaagaggaguuggguuu

SEQ ID NO: 2302497 - RNA, 19 nt, Homo sapiens
  misc_RNA (1)...(19): siRNA sense strand
agaaauugcccuagaaaca

SEQ ID NO: 2302498 - RNA, 19 nt, Homo sapiens
  misc_RNA (1)...(19): siRNA sense strand
uaagauaccaguugggaaa

SEQ ID NO: 2302499 - RNA, 19 nt, Homo sapiens
  misc_RNA (1)...(19): siRNA sense strand
agaaggaagaacagauaua

SEQ ID NO: 2302500 - RNA, 19 nt, Homo sapiens
  misc_RNA (1)...(19): siRNA sense strand
gagaagaagugaagccuca

SEQ ID NO: 2302501 - RNA, 19 nt, Homo sapiens
  misc_RNA (1)...(19): siRNA sense strand
aagggaagaaugaggauaa

SEQ ID NO: 2302502 - RNA, 19 nt, Homo sapiens
  misc_RNA (1)...(19): siRNA sense strand
ggaaauugauacugcgcuu

SEQ ID NO: 2302503 - RNA, 19 nt, Homo sapiens
  misc_RNA (1)...(19): siRNA sense strand
acgugaaacacuugguaaa

SEQ ID NO: 2302504 - RNA, 19 nt, Homo sapiens
  misc_RNA (1)...(19): siRNA sense strand
gagaauuauuucaaggaca

SEQ ID NO: 2302505 - RNA, 19 nt, Homo sapiens
  misc_RNA (1)...(19): siRNA sense strand
ugaaagucuccaagaauua

SEQ ID NO: 2302506 - RNA, 19 nt, Homo sapiens
  misc_RNA (1)...(19): siRNA sense strand
caaagaaaacugaggaauu

SEQ ID NO: 2302507 - RNA, 19 nt, Homo sapiens
  misc_RNA (1)...(19): siRNA sense strand
ccaaagacugacagaauau

SEQ ID NO: 2302508 - RNA, 19 nt, Homo sapiens
  misc_RNA (1)...(19): siRNA sense strand
agggauccguuaagagaaa

SEQ ID NO: 2302509 - RNA, 19 nt, Homo sapiens
  misc_RNA (1)...(19): siRNA sense strand
aagcagaagaagagcaaaa

SEQ ID NO: 2302510 - RNA, 19 nt, Homo sapiens
  misc_RNA (1)...(19): siRNA sense strand
ccaaaggcaaucagagaau

SEQ ID NO: 2302511 - RNA, 19 nt, Homo sapiens
  misc_RNA (1)...(19): siRNA sense strand
cucaagaaguagaaggaga

SEQ ID NO: 2302512 - RNA, 19 nt, Homo sapiens
  misc_RNA (1)...(19): siRNA sense strand
ucaagaaguagaaggagaa

SEQ ID NO: 2302513 - RNA, 19 nt, Homo sapiens
  misc_RNA (1)...(19): siRNA sense strand
cuguggaaacacugagaaa

SEQ ID NO: 2302514 - RNA, 19 nt, Homo sapiens
  misc_RNA (1)...(19): siRNA sense strand
gguuaaugauacagauguu

SEQ ID NO: 2302515 - RNA, 19 nt, Homo sapiens
  misc_RNA (1)...(19): siRNA sense strand
ucgcagccauugaggguaa

SEQ ID NO: 2302516 - RNA, 19 nt, Homo sapiens
  misc_RNA (1)...(19): siRNA sense strand
gcuaaaacggcaagaggaa

SEQ ID NO: 2302517 - RNA, 19 nt, Homo sapiens
  misc_RNA (1)...(19): siRNA sense strand
ccgccagagugauggagaa

SEQ ID NO: 2302518 - RNA, 19 nt, Homo sapiens
  misc_RNA (1)...(19): siRNA sense strand
ccaagaugcccaagauauu

SEQ ID NO: 2302519 - RNA, 19 nt, Homo sapiens
  misc_RNA (1)...(19): siRNA sense strand
gagcagacaauaugaaaca

SEQ ID NO: 2302520 - RNA, 19 nt, Homo sapiens
  misc_RNA (1)...(19): siRNA sense strand
cuaagaaagggaagaauga

SEQ ID NO: 2302521 - RNA, 19 nt, Homo sapiens
  misc_RNA (1)...(19): siRNA sense strand
gauaguaaccaaagcaaaa

SEQ ID NO: 2302522 - RNA, 19 nt, Homo sapiens
  misc_RNA (1)...(19): siRNA sense strand
gcagaugauuugggagcaa

SEQ ID NO: 2302523 - RNA, 19 nt, Homo sapiens
  misc_RNA (1)...(19): siRNA sense strand
ccgaaggaaaguaaacaua

SEQ ID NO: 2302524 - RNA, 19 nt, Homo sapiens
  misc_RNA (1)...(19): siRNA sense strand
ccugagaagaagucacaaa

SEQ ID NO: 2302525 - RNA, 19 nt, Homo sapiens
  misc_RNA (1)...(19): siRNA sense strand
cagcagugggaguggagaa

SEQ ID NO: 2302526 - RNA, 19 nt, Homo sapiens
  misc_RNA (1)...(19): siRNA sense strand
cagauuaguuauuggacga

SEQ ID NO: 2302527 - RNA, 19 nt, Homo sapiens
  misc_RNA (1)...(19): siRNA sense strand
gcaugagacuacaaagaca

SEQ ID NO: 2302528 - RNA, 19 nt, Homo sapiens
  misc_RNA (1)...(19): siRNA sense strand
uuuaguaccuccagugaaa

SEQ ID NO: 2302529 - RNA, 19 nt, Homo sapiens
  misc_RNA (1)...(19): siRNA sense strand
cugaaagucuccaagaauu

SEQ ID NO: 2302530 - RNA, 19 nt, Homo sapiens
  misc_RNA (1)...(19): siRNA sense strand
caaaagugauggaaggcua

SEQ ID NO: 2302531 - RNA, 19 nt, Homo sapiens
  misc_RNA (1)...(19): siRNA sense strand
aaugaauggcugugaagaa

SEQ ID NO: 2302532 - RNA, 19 nt, Homo sapiens
  misc_RNA (1)...(19): siRNA sense strand
agccaugaauguagaagaa

SEQ ID NO: 2302533 - RNA, 19 nt, Homo sapiens
  misc_RNA (1)...(19): siRNA sense strand
cauacaggauccagccaaa

SEQ ID NO: 2302534 - RNA, 19 nt, Homo sapiens
  misc_RNA (1)...(19): siRNA sense strand
ccagagugauggagaaacu

SEQ ID NO: 2302535 - RNA, 19 nt, Homo sapiens
  misc_RNA (1)...(19): siRNA sense strand
caaaguauggcuugggauu

SEQ ID NO: 2302536 - RNA, 19 nt, Homo sapiens
  misc_RNA (1)...(19): siRNA sense strand
cagcuacagaugagagcaa

SEQ ID NO: 2302537 - RNA, 19 nt, Homo sapiens
  misc_RNA (1)...(19): siRNA sense strand
gagauaucuuugagguuga

SEQ ID NO: 2302538 - RNA, 19 nt, Homo sapiens
  misc_RNA (1)...(19): siRNA sense strand
acagaaggaagaacagaua

SEQ ID NO: 2302539 - RNA, 19 nt, Homo sapiens
  misc_RNA (1)...(19): siRNA sense strand
agauaauucuggacgugaa

SEQ ID NO: 2302540 - RNA, 19 nt, Homo sapiens
  misc_RNA (1)...(19): siRNA sense strand
gaaguauagccuuggauau

SEQ ID NO: 2302541 - RNA, 19 nt, Homo sapiens
  misc_RNA (1)...(19): siRNA sense strand
agaugaaaccuuaagucaa

SEQ ID NO: 2302542 - RNA, 19 nt, Homo sapiens
  misc_RNA (1)...(19): siRNA sense strand
auccaaagccaccgagaaa

SEQ ID NO: 2302543 - RNA, 19 nt, Homo sapiens
  misc_RNA (1)...(19): siRNA sense strand
agagagaacagaagauaca

SEQ ID NO: 2302544 - RNA, 19 nt, Homo sapiens
  misc_RNA (1)...(19): siRNA sense strand
auucagaagccacaagaaa

SEQ ID NO: 2302545 - RNA, 19 nt, Homo sapiens
  misc_RNA (1)...(19): siRNA sense strand
aagaagaagaucugggcuu

SEQ ID NO: 2302546 - RNA, 19 nt, Homo sapiens
  misc_RNA (1)...(19): siRNA sense strand
cagccaugacucaaagaaa

SEQ ID NO: 2302547 - RNA, 19 nt, Homo sapiens
  misc_RNA (1)...(19): siRNA sense strand
guuaagagaaauugcccua

SEQ ID NO: 2302548 - RNA, 19 nt, Homo sapiens
  misc_RNA (1)...(19): siRNA sense strand
ugaggauaaccgaaggaaa

SEQ ID NO: 2302549 - RNA, 19 nt, Homo sapiens
  misc_RNA (1)...(19): siRNA sense strand
gauggaaagaagaaccaaa

SEQ ID NO: 2302550 - RNA, 19 nt, Homo sapiens
  misc_RNA (1)...(19): siRNA sense strand
acuuuagaauggagcacua

SEQ ID NO: 2302551 - RNA, 19 nt, Homo sapiens
  misc_RNA (1)...(19): siRNA sense strand
ugccaaagacugacagaau

SEQ ID NO: 2302552 - RNA, 19 nt, Homo sapiens
  misc_RNA (1)...(19): siRNA sense strand
ccaaagccaccgagaaaga

SEQ ID NO: 2302553 - RNA, 19 nt, Homo sapiens
  misc_RNA (1)...(19): siRNA sense strand
ucagaaugcccaaggucaa

SEQ ID NO: 2302554 - RNA, 19 nt, Homo sapiens
  misc_RNA (1)...(19): siRNA sense strand
acggaaugguucagacaga

SEQ ID NO: 2302555 - RNA, 19 nt, Homo sapiens
  misc_RNA (1)...(19): siRNA sense strand
gaggauaaccgaaggaaag

SEQ ID NO: 2302556 - RNA, 19 nt, Homo sapiens
  misc_RNA (1)...(19): siRNA sense strand
ccaaauugcauaauaccua

SEQ ID NO: 2302557 - RNA, 19 nt, Homo sapiens
  misc_RNA (1)...(19): siRNA sense strand
gcugaaagucuccaagaau

SEQ ID NO: 2302558 - RNA, 19 nt, Homo sapiens
  misc_RNA (1)...(19): siRNA sense strand
caugcaagacagugcuaua

SEQ ID NO: 2302559 - RNA, 19 nt, Homo sapiens
  misc_RNA (1)...(19): siRNA sense strand
ggacaaucuccaacaucua

SEQ ID NO: 2302560 - RNA, 19 nt, Homo sapiens
  misc_RNA (1)...(19): siRNA sense strand
gaaccaacuagacaagaaa

SEQ ID NO: 2302561 - RNA, 19 nt, Homo sapiens
  misc_RNA (1)...(19): siRNA sense strand
gggcaaugacccuugaaga

SEQ ID NO: 2302562 - RNA, 19 nt, Homo sapiens
  misc_RNA (1)...(19): siRNA sense strand
aucaagagaucaugcuaaa

SEQ ID NO: 2302563 - RNA, 19 nt, Homo sapiens
  misc_RNA (1)...(19): siRNA sense strand
cagcauaguaaggguuaaa

SEQ ID NO: 2302564 - RNA, 19 nt, Homo sapiens
  misc_RNA (1)...(19): siRNA sense strand
ggaaaugaugaguugccaa

SEQ ID NO: 2302565 - RNA, 19 nt, Homo sapiens
  misc_RNA (1)...(19): siRNA sense strand
gcccaacauccuaggcaaa

SEQ ID NO: 2302566 - RNA, 19 nt, Homo sapiens
  misc_RNA (1)...(19): siRNA sense strand
gaggaaaggaggagaggca

SEQ ID NO: 2302567 - RNA, 19 nt, Homo sapiens
  misc_RNA (1)...(19): siRNA sense strand
aaacaaaagccaagaggaa

SEQ ID NO: 2302568 - RNA, 19 nt, Homo sapiens
  misc_RNA (1)...(19): siRNA sense strand
ggaaaggaggagaggcaga

SEQ ID NO: 2302569 - RNA, 19 nt, Homo sapiens
  misc_RNA (1)...(19): siRNA sense strand
agguagagcagauggaaau

SEQ ID NO: 2302570 - RNA, 19 nt, Homo sapiens
  misc_RNA (1)...(19): siRNA sense strand
augaagaggaagaggauga

SEQ ID NO: 2302571 - RNA, 19 nt, Homo sapiens
  misc_RNA (1)...(19): siRNA sense strand
cagcaaucugaaugagaaa

SEQ ID NO: 2302572 - RNA, 19 nt, Homo sapiens
  misc_RNA (1)...(19): siRNA sense strand
guggaauauuagaugacaa

SEQ ID NO: 2302573 - RNA, 19 nt, Homo sapiens
  misc_RNA (1)...(19): siRNA sense strand
ccaaauaccuucuugcaga

SEQ ID NO: 2302574 - RNA, 19 nt, Homo sapiens
  misc_RNA (1)...(19): siRNA sense strand
caagacaauuagagcccaa

SEQ ID NO: 2302575 - RNA, 19 nt, Homo sapiens
  misc_RNA (1)...(19): siRNA sense strand
cagguagagcagauggaaa

SEQ ID NO: 2302576 - RNA, 19 nt, Homo sapiens
  misc_RNA (1)...(19): siRNA sense strand
ggaagaaagaagauggaac

SEQ ID NO: 2302577 - RNA, 19 nt, Homo sapiens
  misc_RNA (1)...(19): siRNA sense strand
agagcagcguggagaguau

SEQ ID NO: 2302578 - RNA, 19 nt, Homo sapiens
  misc_RNA (1)...(19): siRNA sense strand
ggaugauaauuuuggagaa

SEQ ID NO: 2302579 - RNA, 19 nt, Homo sapiens
  misc_RNA (1)...(19): siRNA sense strand
agaaagaagauggaacaaa

SEQ ID NO: 2302580 - RNA, 19 nt, Homo sapiens
  misc_RNA (1)...(19): siRNA sense strand
cccauguguucgaguguaa

SEQ ID NO: 2302581 - RNA, 19 nt, Homo sapiens
  misc_RNA (1)...(19): siRNA sense strand
acgauauggaugaggauga

SEQ ID NO: 2302582 - RNA, 19 nt, Homo sapiens
  misc_RNA (1)...(19): siRNA sense strand
ucagcuaauaccagaguua

SEQ ID NO: 2302583 - RNA, 19 nt, Homo sapiens
  misc_RNA (1)...(19): siRNA sense strand
ugagagaagaaguugggaa

SEQ ID NO: 2302584 - RNA, 19 nt, Homo sapiens
  misc_RNA (1)...(19): siRNA sense strand
aagaggaagaggaagcuaa

SEQ ID NO: 2302585 - RNA, 19 nt, Homo sapiens
  misc_RNA (1)...(19): siRNA sense strand
gggauaagaagcuaaccaa

SEQ ID NO: 2302586 - RNA, 19 nt, Homo sapiens
  misc_RNA (1)...(19): siRNA sense strand
gagagaagaaguugggaac

SEQ ID NO: 2302587 - RNA, 19 nt, Homo sapiens
  misc_RNA (1)...(19): siRNA sense strand
aggaagaagcauuugcauu

SEQ ID NO: 2302588 - RNA, 19 nt, Homo sapiens
  misc_RNA (1)...(19): siRNA sense strand
agagacaggaggaguagaa

SEQ ID NO: 2302589 - RNA, 19 nt, Homo sapiens
  misc_RNA (1)...(19): siRNA sense strand
aggcagauaauuuggauga

SEQ ID NO: 2302590 - RNA, 19 nt, Homo sapiens
  misc_RNA (1)...(19): siRNA sense strand
cuagagaggaccagcaaca

SEQ ID NO: 2302591 - RNA, 19 nt, Homo sapiens
  misc_RNA (1)...(19): siRNA sense strand
aagccaagaggaagaggaa

SEQ ID NO: 2302592 - RNA, 19 nt, Homo sapiens
  misc_RNA (1)...(19): siRNA sense strand
aagaugaugaagaggaaga

SEQ ID NO: 2302593 - RNA, 19 nt, Homo sapiens
  misc_RNA (1)...(19): siRNA sense strand
acaaaagccaagaggaaga

SEQ ID NO: 2302594 - RNA, 19 nt, Homo sapiens
  misc_RNA (1)...(19): siRNA sense strand
gaacaaacauagaugaguc

SEQ ID NO: 2302595 - RNA, 19 nt, Homo sapiens
  misc_RNA (1)...(19): siRNA sense strand
cucagggaguuaagcgaaa

SEQ ID NO: 2302596 - RNA, 19 nt, Homo sapiens
  misc_RNA (1)...(19): siRNA sense strand
gcccauuauugaagagcca

SEQ ID NO: 2302597 - RNA, 19 nt, Homo sapiens
  misc_RNA (1)...(19): siRNA sense strand
gauaaugagagaaggcagu

SEQ ID NO: 2302598 - RNA, 19 nt, Homo sapiens
  misc_RNA (1)...(19): siRNA sense strand
ccaccaagaaauugaugau

SEQ ID NO: 2302599 - RNA, 19 nt, Homo sapiens
  misc_RNA (1)...(19): siRNA sense strand
agacaggaggaguagaaaa

SEQ ID NO: 2302600 - RNA, 19 nt, Homo sapiens
  misc_RNA (1)...(19): siRNA sense strand
uggaugaucgugagauaau

SEQ ID NO: 2302601 - RNA, 19 nt, Homo sapiens
  misc_RNA (1)...(19): siRNA sense strand
aagagauaaccaugagaga

SEQ ID NO: 2302602 - RNA, 19 nt, Homo sapiens
  misc_RNA (1)...(19): siRNA sense strand
uaccagaagaccuuagaaa

SEQ ID NO: 2302603 - RNA, 19 nt, Homo sapiens
  misc_RNA (1)...(19): siRNA sense strand
aagaggaagaggaugaaga

SEQ ID NO: 2302604 - RNA, 19 nt, Homo sapiens
  misc_RNA (1)...(19): siRNA sense strand
gaucaggaagaaagaagau

SEQ ID NO: 2302605 - RNA, 19 nt, Homo sapiens
  misc_RNA (1)...(19): siRNA sense strand
guggaaagagacaggagga

SEQ ID NO: 2302606 - RNA, 19 nt, Homo sapiens
  misc_RNA (1)...(19): siRNA sense strand
aggaggagaggcagauaau

SEQ ID NO: 2302607 - RNA, 19 nt, Homo sapiens
  misc_RNA (1)...(19): siRNA sense strand
ugaugaagaggaagaggau

SEQ ID NO: 2302608 - RNA, 19 nt, Homo sapiens
  misc_RNA (1)...(19): siRNA sense strand
ugucgaaauacgaacagaa

SEQ ID NO: 2302609 - RNA, 19 nt, Homo sapiens
  misc_RNA (1)...(19): siRNA sense strand
agaguagaguggaagagau

SEQ ID NO: 2302610 - RNA, 19 nt, Homo sapiens
  misc_RNA (1)...(19): siRNA sense strand
gagagaaggcagugcuuuu

SEQ ID NO: 2302611 - RNA, 19 nt, Homo sapiens
  misc_RNA (1)...(19): siRNA sense strand
agaaggaaaugauggugga

SEQ ID NO: 2302612 - RNA, 19 nt, Homo sapiens
  misc_RNA (1)...(19): siRNA sense strand
auauggaugaggaugauaa

SEQ ID NO: 2302613 - RNA, 19 nt, Homo sapiens
  misc_RNA (1)...(19): siRNA sense strand
ggaaagagacaggaggagu

SEQ ID NO: 2302614 - RNA, 19 nt, Homo sapiens
  misc_RNA (1)...(19): siRNA sense strand
uaucaguuugcuugaguua

SEQ ID NO: 2302615 - RNA, 19 nt, Homo sapiens
  misc_RNA (1)...(19): siRNA sense strand
cgaaauacgaacagaaaac

SEQ ID NO: 2302616 - RNA, 19 nt, Homo sapiens
  misc_RNA (1)...(19): siRNA sense strand
cgugagauaaugagagaag

SEQ ID NO: 2302617 - RNA, 19 nt, Homo sapiens
  misc_RNA (1)...(19): siRNA sense strand
gaugauguggaaagagaca

SEQ ID NO: 2302618 - RNA, 19 nt, Homo sapiens
  misc_RNA (1)...(19): siRNA sense strand
ugcuaaaacuggagcugaa

SEQ ID NO: 2302619 - RNA, 19 nt, Homo sapiens
  misc_RNA (1)...(19): siRNA sense strand
gauaaccaugagagaagaa

SEQ ID NO: 2302620 - RNA, 19 nt, Homo sapiens
  misc_RNA (1)...(19): siRNA sense strand
aggcagugcuuuugaggau

SEQ ID NO: 2302621 - RNA, 19 nt, Homo sapiens
  misc_RNA (1)...(19): siRNA sense strand
auuggagccuauugauaua

SEQ ID NO: 2302622 - RNA, 19 nt, Homo sapiens
  misc_RNA (1)...(19): siRNA sense strand
cccaacagcuugagggaau

SEQ ID NO: 2302623 - RNA, 19 nt, Homo sapiens
  misc_RNA (1)...(19): siRNA sense strand
gugcaaagggcguggcauu

SEQ ID NO: 2302624 - RNA, 19 nt, Homo sapiens
  misc_RNA (1)...(19): siRNA sense strand
gggcaagaauauuuggaga

SEQ ID NO: 2302625 - RNA, 19 nt, Homo sapiens
  misc_RNA (1)...(19): siRNA sense strand
aguacaaggagaagcaaua

SEQ ID NO: 2302626 - RNA, 19 nt, Homo sapiens
  misc_RNA (1)...(19): siRNA sense strand
cugacagaauggauagaaa

SEQ ID NO: 2302627 - RNA, 19 nt, Homo sapiens
  misc_RNA (1)...(19): siRNA sense strand
agaagguagugaugacaaa

SEQ ID NO: 2302628 - RNA, 19 nt, Homo sapiens
  misc_RNA (1)...(19): siRNA sense strand
augcagaacaugagaauga

SEQ ID NO: 2302629 - RNA, 19 nt, Homo sapiens
  misc_RNA (1)...(19): siRNA sense strand
gggaagaagaugaugcuga

SEQ ID NO: 2302630 - RNA, 19 nt, Homo sapiens
  misc_RNA (1)...(19): siRNA sense strand
cugugaauauagugaagaa

SEQ ID NO: 2302631 - RNA, 19 nt, Homo sapiens
  misc_RNA (1)...(19): siRNA sense strand
cugauugaugauagagaaa

SEQ ID NO: 2302632 - RNA, 19 nt, Homo sapiens
  misc_RNA (1)...(19): siRNA sense strand
ccaaaaugauugagaagca

SEQ ID NO: 2302633 - RNA, 19 nt, Homo sapiens
  misc_RNA (1)...(19): siRNA sense strand
aggagaagaugcagagugu

SEQ ID NO: 2302634 - RNA, 19 nt, Homo sapiens
  misc_RNA (1)...(19): siRNA sense strand
cgccauuguauucgagaaa

SEQ ID NO: 2302635 - RNA, 19 nt, Homo sapiens
  misc_RNA (1)...(19): siRNA sense strand
uggugaagauggagaugau

SEQ ID NO: 2302636 - RNA, 19 nt, Homo sapiens
  misc_RNA (1)...(19): siRNA sense strand
uaguaagaggaaagaggua

SEQ ID NO: 2302637 - RNA, 19 nt, Homo sapiens
  misc_RNA (1)...(19): siRNA sense strand
agaugaucgaccugaguua

SEQ ID NO: 2302638 - RNA, 19 nt, Homo sapiens
  misc_RNA (1)...(19): siRNA sense strand
caaaauuguuagaggucau

SEQ ID NO: 2302639 - RNA, 19 nt, Homo sapiens
  misc_RNA (1)...(19): siRNA sense strand
uagagaaaugccugugaaa

SEQ ID NO: 2302640 - RNA, 19 nt, Homo sapiens
  misc_RNA (1)...(19): siRNA sense strand
ccauuguauucgagaaaau

SEQ ID NO: 2302641 - RNA, 19 nt, Homo sapiens
  misc_RNA (1)...(19): siRNA sense strand
ugacacaacauuuggcaau

SEQ ID NO: 2302642 - RNA, 19 nt, Homo sapiens
  misc_RNA (1)...(19): siRNA sense strand
gcuuaaugauguugacugu

SEQ ID NO: 2302643 - RNA, 19 nt, Homo sapiens
  misc_RNA (1)...(19): siRNA sense strand
ugaagaugggcaagaauau

SEQ ID NO: 2302644 - RNA, 19 nt, Homo sapiens
  misc_RNA (1)...(19): siRNA sense strand
ggcaagaauauuuggagau

SEQ ID NO: 2302645 - RNA, 19 nt, Homo sapiens
  misc_RNA (1)...(19): siRNA sense strand
gaaaacaguuacaggacau

SEQ ID NO: 2302646 - RNA, 19 nt, Homo sapiens
  misc_RNA (1)...(19): siRNA sense strand
uggauuuaccugugagaca

SEQ ID NO: 2302647 - RNA, 19 nt, Homo sapiens
  misc_RNA (1)...(19): siRNA sense strand
gaguuaccaugguggaaau

SEQ ID NO: 2302648 - RNA, 19 nt, Homo sapiens
  misc_RNA (1)...(19): siRNA sense strand
cagugaugaugaugaugaa

SEQ ID NO: 2302649 - RNA, 19 nt, Homo sapiens
  misc_RNA (1)...(19): siRNA sense strand
augaagaugggcaagaaua

SEQ ID NO: 2302650 - RNA, 19 nt, Homo sapiens
  misc_RNA (1)...(19): siRNA sense strand
agaugaugcugaagagacu

SEQ ID NO: 2302651 - RNA, 19 nt, Homo sapiens
  misc_RNA (1)...(19): siRNA sense strand
ugacagaauggauagaaau

SEQ ID NO: 2302652 - RNA, 19 nt, Homo sapiens
  misc_RNA (1)...(19): siRNA sense strand
gaagcauggaggauacaaa

SEQ ID NO: 2302653 - RNA, 19 nt, Homo sapiens
  misc_RNA (1)...(19): siRNA sense strand
aaguauuucugaaggcauu

SEQ ID NO: 2302654 - RNA, 19 nt, Homo sapiens
  misc_RNA (1)...(19): siRNA sense strand
agagauaacccaacagcuu

SEQ ID NO: 2302655 - RNA, 19 nt, Homo sapiens
  misc_RNA (1)...(19): siRNA sense strand
gcaauguuuccaaggagua

SEQ ID NO: 2302656 - RNA, 19 nt, Homo sapiens
  misc_RNA (1)...(19): siRNA sense strand
gauugaugauagagaaaug

SEQ ID NO: 2302657 - RNA, 19 nt, Homo sapiens
  misc_RNA (1)...(19): siRNA sense strand
auuuggagauucuggcuaa

SEQ ID NO: 2302658 - RNA, 19 nt, Homo sapiens
  misc_RNA (1)...(19): siRNA sense strand
gacagaauggauagaaauu

SEQ ID NO: 2302659 - RNA, 19 nt, Homo sapiens
  misc_RNA (1)...(19): siRNA sense strand
guugaagaucauaaagaga

SEQ ID NO: 2302660 - RNA, 19 nt, Homo sapiens
  misc_RNA (1)...(19): siRNA sense strand
gugaagauggagaugauga

SEQ ID NO: 2302661 - RNA, 19 nt, Homo sapiens
  misc_RNA (1)...(19): siRNA sense strand
aauacauguugcagaauca

SEQ ID NO: 2302662 - RNA, 19 nt, Homo sapiens
  misc_RNA (1)...(19): siRNA sense strand
acaagagagguuaagacaa

SEQ ID NO: 2302663 - RNA, 19 nt, Homo sapiens
  misc_RNA (1)...(19): siRNA sense strand
ggagugaugaagaugauau

SEQ ID NO: 2302664 - RNA, 19 nt, Homo sapiens
  misc_RNA (1)...(19): siRNA sense strand
ugaagauggagaugaugaa

SEQ ID NO: 2302665 - RNA, 19 nt, Homo sapiens
  misc_RNA (1)...(19): siRNA sense strand
aggaguugcaggagaagau

SEQ ID NO: 2302666 - RNA, 19 nt, Homo sapiens
  misc_RNA (1)...(19): siRNA sense strand
guguaguugaagaucauaa

SEQ ID NO: 2302667 - RNA, 19 nt, Homo sapiens
  misc_RNA (1)...(19): siRNA sense strand
uuacaggaguugcaggaga

SEQ ID NO: 2302668 - RNA, 19 nt, Homo sapiens
  misc_RNA (1)...(19): siRNA sense strand
ugaugaugaugaagcugaa

SEQ ID NO: 2302669 - RNA, 19 nt, Homo sapiens
  misc_RNA (1)...(19): siRNA sense strand
ugucggaacagcuggauuu

SEQ ID NO: 2302670 - RNA, 19 nt, Homo sapiens
  misc_RNA (1)...(19): siRNA sense strand
caguagaaaugacacaaca

SEQ ID NO: 2302671 - RNA, 19 nt, Homo sapiens
  misc_RNA (1)...(19): siRNA sense strand
ucauaaagagauaacccaa

SEQ ID NO: 2302672 - RNA, 19 nt, Homo sapiens
  misc_RNA (1)...(19): siRNA sense strand
uuuauuacacaguggcuua

SEQ ID NO: 2302673 - RNA, 19 nt, Homo sapiens
  misc_RNA (1)...(19): siRNA sense strand
augaugaagcugaagauga

SEQ ID NO: 2302674 - RNA, 19 nt, Homo sapiens
  misc_RNA (1)...(19): siRNA sense strand
gagugaugaagaugauauu

SEQ ID NO: 2302675 - RNA, 19 nt, Homo sapiens
  misc_RNA (1)...(19): siRNA sense strand
gugaugaagaugauauuga

SEQ ID NO: 2302676 - RNA, 19 nt, Homo sapiens
  misc_RNA (1)...(19): siRNA sense strand
ucaaagaagagcagcccau

SEQ ID NO: 2302677 - RNA, 19 nt, Homo sapiens
  misc_RNA (1)...(19): siRNA sense strand
ugaagaagguagugaugac

SEQ ID NO: 2302678 - RNA, 19 nt, Homo sapiens
  misc_RNA (1)...(19): siRNA sense strand
guauuauaauccacaccua

SEQ ID NO: 2302679 - RNA, 19 nt, Homo sapiens
  misc_RNA (1)...(19): siRNA sense strand
cccuaauaauguugaacca

SEQ ID NO: 2302680 - RNA, 19 nt, Homo sapiens
  misc_RNA (1)...(19): siRNA sense strand
agcugaagaugaugaugaa

SEQ ID NO: 2302681 - RNA, 19 nt, Homo sapiens
  misc_RNA (1)...(19): siRNA sense strand
ugagaagcauggaggauac

SEQ ID NO: 2302682 - RNA, 19 nt, Homo sapiens
  misc_RNA (1)...(19): siRNA sense strand
gugaauauagugaagaagu

SEQ ID NO: 2302683 - RNA, 19 nt, Homo sapiens
  misc_RNA (1)...(19): siRNA sense strand
uaguguaguugaagaucau

SEQ ID NO: 2302684 - RNA, 19 nt, Homo sapiens
  misc_RNA (1)...(19): siRNA sense strand
ccuuuaucagcuugugaaa

SEQ ID NO: 2302685 - RNA, 19 nt, Homo sapiens
  misc_RNA (1)...(19): siRNA sense strand
caguacaaggagaagcaau

SEQ ID NO: 2302686 - RNA, 19 nt, Homo sapiens
  misc_RNA (1)...(19): siRNA sense strand
uacaggaguugcaggagaa

SEQ ID NO: 2302687 - RNA, 19 nt, Homo sapiens
  misc_RNA (1)...(19): siRNA sense strand
ggucaaaacuagugagcuu

SEQ ID NO: 2302688 - RNA, 19 nt, Homo sapiens
  misc_RNA (1)...(19): siRNA sense strand
agauacaagcuaaggaaua

SEQ ID NO: 2302689 - RNA, 19 nt, Homo sapiens
  misc_RNA (1)...(19): siRNA sense strand
augaagaaguugaagacaa

SEQ ID NO: 2302690 - RNA, 19 nt, Homo sapiens
  misc_RNA (1)...(19): siRNA sense strand
gugaugaagaggagacaaa

SEQ ID NO: 2302691 - RNA, 19 nt, Homo sapiens
  misc_RNA (1)...(19): siRNA sense strand
augaagaaguauuggaaga

SEQ ID NO: 2302692 - RNA, 19 nt, Homo sapiens
  misc_RNA (1)...(19): siRNA sense strand
ggacgguggcagaggcaaa

SEQ ID NO: 2302693 - RNA, 19 nt, Homo sapiens
  misc_RNA (1)...(19): siRNA sense strand
uggcagaggcaaagaagaa

SEQ ID NO: 2302694 - RNA, 19 nt, Homo sapiens
  misc_RNA (1)...(19): siRNA sense strand
guuauaaagaugaggauga

SEQ ID NO: 2302695 - RNA, 19 nt, Homo sapiens
  misc_RNA (1)...(19): siRNA sense strand
caguaauggcuaugggaau

SEQ ID NO: 2302696 - RNA, 19 nt, Homo sapiens
  misc_RNA (1)...(19): siRNA sense strand
cuguauuacugcagaaaca

SEQ ID NO: 2302697 - RNA, 19 nt, Homo sapiens
  misc_RNA (1)...(19): siRNA sense strand
aaauaauggaagaggugaa

SEQ ID NO: 2302698 - RNA, 19 nt, Homo sapiens
  misc_RNA (1)...(19): siRNA sense strand
aggcaaagaagaagauuga

SEQ ID NO: 2302699 - RNA, 19 nt, Homo sapiens
  misc_RNA (1)...(19): siRNA sense strand
agaaagcagaagagagaga

SEQ ID NO: 2302700 - RNA, 19 nt, Homo sapiens
  misc_RNA (1)...(19): siRNA sense strand
ccguugaauuagcgaagaa

SEQ ID NO: 2302701 - RNA, 19 nt, Homo sapiens
  misc_RNA (1)...(19): siRNA sense strand
guauaauaggacugaguau

SEQ ID NO: 2302702 - RNA, 19 nt, Homo sapiens
  misc_RNA (1)...(19): siRNA sense strand
gcuacauacuuuagaacga

SEQ ID NO: 2302703 - RNA, 19 nt, Homo sapiens
  misc_RNA (1)...(19): siRNA sense strand
uggugaagacauaugaaua

SEQ ID NO: 2302704 - RNA, 19 nt, Homo sapiens
  misc_RNA (1)...(19): siRNA sense strand
cagaagaugauaugugaau

SEQ ID NO: 2302705 - RNA, 19 nt, Homo sapiens
  misc_RNA (1)...(19): siRNA sense strand
gcgcaggaaaugucacaaa

SEQ ID NO: 2302706 - RNA, 19 nt, Homo sapiens
  misc_RNA (1)...(19): siRNA sense strand
cuuaacaguuguagaagau

SEQ ID NO: 2302707 - RNA, 19 nt, Homo sapiens
  misc_RNA (1)...(19): siRNA sense strand
aggagaagaugcagagugu

SEQ ID NO: 2302708 - RNA, 19 nt, Homo sapiens
  misc_RNA (1)...(19): siRNA sense strand
cuacuagacaacugguaaa

SEQ ID NO: 2302709 - RNA, 19 nt, Homo sapiens
  misc_RNA (1)...(19): siRNA sense strand
gugaagaugaggaggagga

SEQ ID NO: 2302710 - RNA, 19 nt, Homo sapiens
  misc_RNA (1)...(19): siRNA sense strand
ggccaggaguggucgacaa

SEQ ID NO: 2302711 - RNA, 19 nt, Homo sapiens
  misc_RNA (1)...(19): siRNA sense strand
gggauaucuucgagcuaga

SEQ ID NO: 2302712 - RNA, 19 nt, Homo sapiens
  misc_RNA (1)...(19): siRNA sense strand
auauacugcugcaaagaaa

SEQ ID NO: 2302713 - RNA, 19 nt, Homo sapiens
  misc_RNA (1)...(19): siRNA sense strand
aggaauauaugaagccaca

SEQ ID NO: 2302714 - RNA, 19 nt, Homo sapiens
  misc_RNA (1)...(19): siRNA sense strand
guagaagaucauaaagaga

SEQ ID NO: 2302715 - RNA, 19 nt, Homo sapiens
  misc_RNA (1)...(19): siRNA sense strand
gguacuauguggagaugca

SEQ ID NO: 2302716 - RNA, 19 nt, Homo sapiens
  misc_RNA (1)...(19): siRNA sense strand
aguaauggcuaugggaauu

SEQ ID NO: 2302717 - RNA, 19 nt, Homo sapiens
  misc_RNA (1)...(19): siRNA sense strand
gauuauagucucugaccau

SEQ ID NO: 2302718 - RNA, 19 nt, Homo sapiens
  misc_RNA (1)...(19): siRNA sense strand
gugacaauagauacagaua

SEQ ID NO: 2302719 - RNA, 19 nt, Homo sapiens
  misc_RNA (1)...(19): siRNA sense strand
gcaaagaagaagauugaac

SEQ ID NO: 2302720 - RNA, 19 nt, Homo sapiens
  misc_RNA (1)...(19): siRNA sense strand
auauggaagcgcaggaaau

SEQ ID NO: 2302721 - RNA, 19 nt, Homo sapiens
  misc_RNA (1)...(19): siRNA sense strand
auguggagaugcaggagaa

SEQ ID NO: 2302722 - RNA, 19 nt, Homo sapiens
  misc_RNA (1)...(19): siRNA sense strand
ugguaugguggaaguguaa

SEQ ID NO: 2302723 - RNA, 19 nt, Homo sapiens
  misc_RNA (1)...(19): siRNA sense strand
uggcugagauauuuggcaa

SEQ ID NO: 2302724 - RNA, 19 nt, Homo sapiens
  misc_RNA (1)...(19): siRNA sense strand
guggcagcuucuagguaua

SEQ ID NO: 2302725 - RNA, 19 nt, Homo sapiens
  misc_RNA (1)...(19): siRNA sense strand
ugacaauaguguggaugaa

SEQ ID NO: 2302726 - RNA, 19 nt, Homo sapiens
  misc_RNA (1)...(19): siRNA sense strand
caauaguguggaugaauau

SEQ ID NO: 2302727 - RNA, 19 nt, Homo sapiens
  misc_RNA (1)...(19): siRNA sense strand
auaaagaugaggaugaaga

SEQ ID NO: 2302728 - RNA, 19 nt, Homo sapiens
  misc_RNA (1)...(19): siRNA sense strand
gcuacuagacaacugguaa

SEQ ID NO: 2302729 - RNA, 19 nt, Homo sapiens
  misc_RNA (1)...(19): siRNA sense strand
auaacauuguggaaggaau

SEQ ID NO: 2302730 - RNA, 19 nt, Homo sapiens
  misc_RNA (1)...(19): siRNA sense strand
ggaagcagaugaagccaca

SEQ ID NO: 2302731 - RNA, 19 nt, Homo sapiens
  misc_RNA (1)...(19): siRNA sense strand
agaagauccauaugaguau

SEQ ID NO: 2302732 - RNA, 19 nt, Homo sapiens
  misc_RNA (1)...(19): siRNA sense strand
ccagauacaagcuaaggaa

SEQ ID NO: 2302733 - RNA, 19 nt, Homo sapiens
  misc_RNA (1)...(19): siRNA sense strand
ccggaagauguguauaaua

SEQ ID NO: 2302734 - RNA, 19 nt, Homo sapiens
  misc_RNA (1)...(19): siRNA sense strand
ggaaaugucacaaaagaau

SEQ ID NO: 2302735 - RNA, 19 nt, Homo sapiens
  misc_RNA (1)...(19): siRNA sense strand
ucuauaaccuggaagcaga

SEQ ID NO: 2302736 - RNA, 19 nt, Homo sapiens
  misc_RNA (1)...(19): siRNA sense strand
cccagcaguuagagaauau

SEQ ID NO: 2302737 - RNA, 19 nt, Homo sapiens
  misc_RNA (1)...(19): siRNA sense strand
cagccgagaacgagcucaa

SEQ ID NO: 2302738 - RNA, 19 nt, Homo sapiens
  misc_RNA (1)...(19): siRNA sense strand
cagcacugcaggaggugua

SEQ ID NO: 2302739 - RNA, 19 nt, Homo sapiens
  misc_RNA (1)...(19): siRNA sense strand
caggaguggucgacaagau

SEQ ID NO: 2302740 - RNA, 19 nt, Homo sapiens
  misc_RNA (1)...(19): siRNA sense strand
uggagaugcaggagaagau

SEQ ID NO: 2302741 - RNA, 19 nt, Homo sapiens
  misc_RNA (1)...(19): siRNA sense strand
cuuugaaguuccauaauga

SEQ ID NO: 2302742 - RNA, 19 nt, Homo sapiens
  misc_RNA (1)...(19): siRNA sense strand
gaggugaagaugaggagga

SEQ ID NO: 2302743 - RNA, 19 nt, Homo sapiens
  misc_RNA (1)...(19): siRNA sense strand
augacaacauggauggaga

SEQ ID NO: 2302744 - RNA, 19 nt, Homo sapiens
  misc_RNA (1)...(19): siRNA sense strand
gggacuaugaggagggaga

SEQ ID NO: 2302745 - RNA, 19 nt, Homo sapiens
  misc_RNA (1)...(19): siRNA sense strand
aggcccugcuggaucgaua

SEQ ID NO: 2302746 - RNA, 19 nt, Homo sapiens
  misc_RNA (1)...(19): siRNA sense strand
gguuccaggugugggacua

SEQ ID NO: 2302747 - RNA, 19 nt, Homo sapiens
  misc_RNA (1)...(19): siRNA sense strand
gcaaugaacucaagagcca

SEQ ID NO: 2302748 - RNA, 19 nt, Homo sapiens
  misc_RNA (1)...(19): siRNA sense strand
ccaagaagaugauggagga

SEQ ID NO: 2302749 - RNA, 19 nt, Homo sapiens
  misc_RNA (1)...(19): siRNA sense strand
agguacagauucagagaca

SEQ ID NO: 2302750 - RNA, 19 nt, Homo sapiens
  misc_RNA (1)...(19): siRNA sense strand
gcaugaagcaagagccuca

SEQ ID NO: 2302751 - RNA, 19 nt, Homo sapiens
  misc_RNA (1)...(19): siRNA sense strand
uccagaaagcugugacaaa

SEQ ID NO: 2302752 - RNA, 19 nt, Homo sapiens
  misc_RNA (1)...(19): siRNA sense strand
cgaaggaaccggaugggau

SEQ ID NO: 2302753 - RNA, 19 nt, Homo sapiens
  misc_RNA (1)...(19): siRNA sense strand
cugaguagacugagggacu

SEQ ID NO: 2302754 - RNA, 19 nt, Homo sapiens
  misc_RNA (1)...(19): siRNA sense strand
gcuggagaaagaagaacaa

SEQ ID NO: 2302755 - RNA, 19 nt, Homo sapiens
  misc_RNA (1)...(19): siRNA sense strand
ugaaguggauguuggcgaa

SEQ ID NO: 2302756 - RNA, 19 nt, Homo sapiens
  misc_RNA (1)...(19): siRNA sense strand
ggacacaucuuccaggaga

SEQ ID NO: 2302757 - RNA, 19 nt, Homo sapiens
  misc_RNA (1)...(19): siRNA sense strand
uggagaaagaagaacaaca

SEQ ID NO: 2302758 - RNA, 19 nt, Homo sapiens
  misc_RNA (1)...(19): siRNA sense strand
ccaacaagcagcugggaag

SEQ ID NO: 2302759 - RNA, 19 nt, Homo sapiens
  misc_RNA (1)...(19): siRNA sense strand
ggacacagcuacugccacu

SEQ ID NO: 2302760 - RNA, 19 nt, Homo sapiens
  misc_RNA (1)...(19): siRNA sense strand
cugcagaaugugaaugaca

SEQ ID NO: 2302761 - RNA, 19 nt, Homo sapiens
  misc_RNA (1)...(19): siRNA sense strand
ugacgaacccaguaagcau

SEQ ID NO: 2302762 - RNA, 19 nt, Homo sapiens
  misc_RNA (1)...(19): siRNA sense strand
acagauguacggagcagaa

SEQ ID NO: 2302763 - RNA, 19 nt, Homo sapiens
  misc_RNA (1)...(19): siRNA sense strand
cuaaauggaaagagaaggu

SEQ ID NO: 2302764 - RNA, 19 nt, Homo sapiens
  misc_RNA (1)...(19): siRNA sense strand
ucaucaaguuagugugacu

SEQ ID NO: 2302765 - RNA, 19 nt, Homo sapiens
  misc_RNA (1)...(19): siRNA sense strand
ccucaaagagacggaucaa

SEQ ID NO: 2302766 - RNA, 19 nt, Homo sapiens
  misc_RNA (1)...(19): siRNA sense strand
cgaauaacuaaauggaaag

SEQ ID NO: 2302767 - RNA, 19 nt, Homo sapiens
  misc_RNA (1)...(19): siRNA sense strand
gcacaaagggcacaccaca

SEQ ID NO: 2302768 - RNA, 19 nt, Homo sapiens
  misc_RNA (1)...(19): siRNA sense strand
gaaaaugugcagaggggca

SEQ ID NO: 2302769 - RNA, 19 nt, Homo sapiens
  misc_RNA (1)...(19): siRNA sense strand
aagaagaacaacagacucu

SEQ ID NO: 2302770 - RNA, 19 nt, Homo sapiens
  misc_RNA (1)...(19): siRNA sense strand
aggaaaagcuccagaaagc

SEQ ID NO: 2302771 - RNA, 19 nt, Homo sapiens
  misc_RNA (1)...(19): siRNA sense strand
aauggaaagagaagguaca

SEQ ID NO: 2302772 - RNA, 19 nt, Homo sapiens
  misc_RNA (1)...(19): siRNA sense strand
gcccagaaauugcugcaga

SEQ ID NO: 2302773 - RNA, 19 nt, Homo sapiens
  misc_RNA (1)...(19): siRNA sense strand
agaagaugauggaggaagc

SEQ ID NO: 2302774 - RNA, 19 nt, Homo sapiens
  misc_RNA (1)...(19): siRNA sense strand
ccaccagcaccaagaagau

SEQ ID NO: 2302775 - RNA, 19 nt, Homo sapiens
  misc_RNA (1)...(19): siRNA sense strand
gggauuuaggaguuuguau

SEQ ID NO: 2302776 - RNA, 19 nt, Homo sapiens
  misc_RNA (1)...(19): siRNA sense strand
aaguacaagcugagcaaga

SEQ ID NO: 2302777 - RNA, 19 nt, Homo sapiens
  misc_RNA (1)...(19): siRNA sense strand
auguggaugcuguggacaa

SEQ ID NO: 2302778 - RNA, 19 nt, Homo sapiens
  misc_RNA (1)...(19): siRNA sense strand
ugagcaagaaggagcugaa

SEQ ID NO: 2302779 - RNA, 19 nt, Homo sapiens
  misc_RNA (1)...(19): siRNA sense strand
agacggagcucucuggcuu

SEQ ID NO: 2302780 - RNA, 19 nt, Homo sapiens
  misc_RNA (1)...(19): siRNA sense strand
cuggagacggcgauggaga

SEQ ID NO: 2302781 - RNA, 19 nt, Homo sapiens
  misc_RNA (1)...(19): siRNA sense strand
cuguggacaaggugaugaa

SEQ ID NO: 2302782 - RNA, 19 nt, Homo sapiens
  misc_RNA (1)...(19): siRNA sense strand
gggagggagacaagcacaa

SEQ ID NO: 2302783 - RNA, 19 nt, Homo sapiens
  misc_RNA (1)...(19): siRNA sense strand
uggacaaagucauggaaac

SEQ ID NO: 2302784 - RNA, 19 nt, Homo sapiens
  misc_RNA (1)...(19): siRNA sense strand
ucauggaaacacuggacaa

SEQ ID NO: 2302785 - RNA, 19 nt, Homo sapiens
  misc_RNA (1)...(19): siRNA sense strand
guggacaaagucauggaaa

SEQ ID NO: 2302786 - RNA, 19 nt, Homo sapiens
  misc_RNA (1)...(19): siRNA sense strand
ggagacaagcacaagcuga

SEQ ID NO: 2302787 - RNA, 19 nt, Homo sapiens
  misc_RNA (1)...(19): siRNA sense strand
aggaaaucaaagagcagga

SEQ ID NO: 2302788 - RNA, 19 nt, Homo sapiens
  misc_RNA (1)...(19): siRNA sense strand
ggacaaugauggagacggc

SEQ ID NO: 2302789 - RNA, 19 nt, Homo sapiens
  misc_RNA (1)...(19): siRNA sense strand
ggguacaucgugaggaacu

SEQ ID NO: 2302790 - RNA, 19 nt, Homo sapiens
  misc_RNA (1)...(19): siRNA sense strand
ccaaagacaugcauggaca

SEQ ID NO: 2302791 - RNA, 19 nt, Homo sapiens
  misc_RNA (1)...(19): siRNA sense strand
gauacaugguaauggguga

SEQ ID NO: 2302792 - RNA, 19 nt, Homo sapiens
  misc_RNA (1)...(19): siRNA sense strand
cuuuaugucaaguggauua

SEQ ID NO: 2302793 - RNA, 19 nt, Homo sapiens
  misc_RNA (1)...(19): siRNA sense strand
agcaauauauagagcagaa

SEQ ID NO: 2302794 - RNA, 19 nt, Homo sapiens
  misc_RNA (1)...(19): siRNA sense strand
cuuacaaccaguacagaaa

SEQ ID NO: 2302795 - RNA, 19 nt, Homo sapiens
  misc_RNA (1)...(19): siRNA sense strand
gggcuuuggugguacgcua

SEQ ID NO: 2302796 - RNA, 19 nt, Homo sapiens
  misc_RNA (1)...(19): siRNA sense strand
gcucaaacucaaauccaaa

SEQ ID NO: 2302797 - RNA, 19 nt, Homo sapiens
  misc_RNA (1)...(19): siRNA sense strand
ugucagaaauuuggagaau

SEQ ID NO: 2302798 - RNA, 19 nt, Homo sapiens
  misc_RNA (1)...(19): siRNA sense strand
aauaaagaccucaagggaa

SEQ ID NO: 2302799 - RNA, 19 nt, Homo sapiens
  misc_RNA (1)...(19): siRNA sense strand
cuggaauggugguuggaga

SEQ ID NO: 2302800 - RNA, 19 nt, Homo sapiens
  misc_RNA (1)...(19): siRNA sense strand
gauaggaacagguggcaca

SEQ ID NO: 2302801 - RNA, 19 nt, Homo sapiens
  misc_RNA (1)...(19): siRNA sense strand
uuacaagcccugaaagaau

SEQ ID NO: 2302802 - RNA, 19 nt, Homo sapiens
  misc_RNA (1)...(19): siRNA sense strand
ccacagggaaagagaccuu

SEQ ID NO: 2302803 - RNA, 19 nt, Homo sapiens
  misc_RNA (1)...(19): siRNA sense strand
uggugguacgcuagaaaua

SEQ ID NO: 2302804 - RNA, 19 nt, Homo sapiens
  misc_RNA (1)...(19): siRNA sense strand
agucaggauaccaggauau

SEQ ID NO: 2302805 - RNA, 19 nt, Homo sapiens
  misc_RNA (1)...(19): siRNA sense strand
gugcuuagguggcuggaca

SEQ ID NO: 2302806 - RNA, 19 nt, Homo sapiens
  misc_RNA (1)...(19): siRNA sense strand
ugaaagaauccaugcagau

SEQ ID NO: 2302807 - RNA, 19 nt, Homo sapiens
  misc_RNA (1)...(19): siRNA sense strand
ccuauaagaucguggcaug

SEQ ID NO: 2302808 - RNA, 19 nt, Homo sapiens
  misc_RNA (1)...(19): siRNA sense strand
aggauaugccugaguauga

SEQ ID NO: 2302809 - RNA, 19 nt, Homo sapiens
  misc_RNA (1)...(19): siRNA sense strand
uggaugaugcacaggaaau

SEQ ID NO: 2302810 - RNA, 19 nt, Homo sapiens
  misc_RNA (1)...(19): siRNA sense strand
cugaaagaauccaugcaga

SEQ ID NO: 2302811 - RNA, 19 nt, Homo sapiens
  misc_RNA (1)...(19): siRNA sense strand
acuuauuacuuuugggaga

SEQ ID NO: 2302812 - RNA, 19 nt, Homo sapiens
  misc_RNA (1)...(19): siRNA sense strand
guggaagauauguggacuu

SEQ ID NO: 2302813 - RNA, 19 nt, Homo sapiens
  misc_RNA (1)...(19): siRNA sense strand
agcuaugucuucagaggaa

SEQ ID NO: 2302814 - RNA, 19 nt, Homo sapiens
  misc_RNA (1)...(19): siRNA sense strand
caaguggauuaucgagcaa

SEQ ID NO: 2302815 - RNA, 19 nt, Homo sapiens
  misc_RNA (1)...(19): siRNA sense strand
gguugauacuugcauggaa

SEQ ID NO: 2302816 - RNA, 19 nt, Homo sapiens
  misc_RNA (1)...(19): siRNA sense strand
gccaaacaacugcaggaaa

SEQ ID NO: 2302817 - RNA, 19 nt, Homo sapiens
  misc_RNA (1)...(19): siRNA sense strand
ggagaugaguugaagacac

SEQ ID NO: 2302818 - RNA, 19 nt, Homo sapiens
  misc_RNA (1)...(19): siRNA sense strand
auaaagauuucaggagcua

SEQ ID NO: 2302819 - RNA, 19 nt, Homo sapiens
  misc_RNA (1)...(19): siRNA sense strand
auauagagcagaaacagaa

SEQ ID NO: 2302820 - RNA, 19 nt, Homo sapiens
  misc_RNA (1)...(19): siRNA sense strand
ucaugaacuuggaugugaa

SEQ ID NO: 2302821 - RNA, 19 nt, Homo sapiens
  misc_RNA (1)...(19): siRNA sense strand
guggcaugacauugacaaa

SEQ ID NO: 2302822 - RNA, 19 nt, Homo sapiens
  misc_RNA (1)...(19): siRNA sense strand
gugucagaaauuuggagaa

SEQ ID NO: 2302823 - RNA, 19 nt, Homo sapiens
  misc_RNA (1)...(19): siRNA sense strand
cacuacaaccuuagccaua

SEQ ID NO: 2302824 - RNA, 19 nt, Homo sapiens
  misc_RNA (1)...(19): siRNA sense strand
acuuggaugugaaggcauu

SEQ ID NO: 2302825 - RNA, 19 nt, Homo sapiens
  misc_RNA (1)...(19): siRNA sense strand
acuggaggauacaugguaa

SEQ ID NO: 2302826 - RNA, 19 nt, Homo sapiens
  misc_RNA (1)...(19): siRNA sense strand
aaaugaagaacgagaugga

SEQ ID NO: 2302827 - RNA, 19 nt, Homo sapiens
  misc_RNA (1)...(19): siRNA sense strand
ccucaagggaaauaaagau

SEQ ID NO: 2302828 - RNA, 19 nt, Homo sapiens
  misc_RNA (1)...(19): siRNA sense strand
ggcacaugucaguggaaga

SEQ ID NO: 2302829 - RNA, 19 nt, Homo sapiens
  misc_RNA (1)...(19): siRNA sense strand
ccauauauuuugagguugu

SEQ ID NO: 2302830 - RNA, 19 nt, Homo sapiens
  misc_RNA (1)...(19): siRNA sense strand
ugaaaaugagauaggaaca

SEQ ID NO: 2302831 - RNA, 19 nt, Homo sapiens
  misc_RNA (1)...(19): siRNA sense strand
agaacgagauggaguccga

SEQ ID NO: 2302832 - RNA, 19 nt, Homo sapiens
  misc_RNA (1)...(19): siRNA sense strand
ggagaauaucauaaagaug

SEQ ID NO: 2302833 - RNA, 19 nt, Homo sapiens
  misc_RNA (1)...(19): siRNA sense strand
acaugucaguggaagauau

SEQ ID NO: 2302834 - RNA, 19 nt, Homo sapiens
  misc_RNA (1)...(19): siRNA sense strand
aguccgauuuaguuggaau

SEQ ID NO: 2302835 - RNA, 19 nt, Homo sapiens
  misc_RNA (1)...(19): siRNA sense strand
ggaugaugcacaggaaauu

SEQ ID NO: 2302836 - RNA, 19 nt, Homo sapiens
  misc_RNA (1)...(19): siRNA sense strand
auacauugacacugaacau

SEQ ID NO: 2302837 - RNA, 19 nt, Homo sapiens
  misc_RNA (1)...(19): siRNA sense strand
caauccaguuugugacuca

SEQ ID NO: 2302838 - RNA, 19 nt, Homo sapiens
  misc_RNA (1)...(19): siRNA sense strand
gcaauauauagagcagaaa

SEQ ID NO: 2302839 - RNA, 19 nt, Homo sapiens
  misc_RNA (1)...(19): siRNA sense strand
cauucgacugugucagaaa

SEQ ID NO: 2302840 - RNA, 19 nt, Homo sapiens
  misc_RNA (1)...(19): siRNA sense strand
auuuacaagcccugaaaga

SEQ ID NO: 2302841 - RNA, 19 nt, Homo sapiens
  misc_RNA (1)...(19): siRNA sense strand
aaauaaagaccucaaggga

SEQ ID NO: 2302842 - RNA, 19 nt, Homo sapiens
  misc_RNA (1)...(19): siRNA sense strand
ggaacugggcagaugcuca

SEQ ID NO: 2302843 - RNA, 19 nt, Homo sapiens
  misc_RNA (1)...(19): siRNA sense strand
ucaacaaaaugaagaacga

SEQ ID NO: 2302844 - RNA, 19 nt, Homo sapiens
  misc_RNA (1)...(19): siRNA sense strand
cuagaaauaaagaccucaa

SEQ ID NO: 2302845 - RNA, 19 nt, Homo sapiens
  misc_RNA (1)...(19): siRNA sense strand
aauaaagauuucaggagcu

SEQ ID NO: 2302846 - RNA, 19 nt, Homo sapiens
  misc_RNA (1)...(19): siRNA sense strand
uggaauggugguuggagau

SEQ ID NO: 2302847 - RNA, 19 nt, Homo sapiens
  misc_RNA (1)...(19): siRNA sense strand
agacaaugccaaauauguu

SEQ ID NO: 2302848 - RNA, 19 nt, Homo sapiens
  misc_RNA (1)...(19): siRNA sense strand
aagucaggauaccaggaua

SEQ ID NO: 2302849 - RNA, 19 nt, Homo sapiens
  misc_RNA (1)...(19): siRNA sense strand
cgacuggaagcuacaagaa

SEQ ID NO: 2302850 - RNA, 19 nt, Homo sapiens
  misc_RNA (1)...(19): siRNA sense strand
ggcagaugcucaaacucaa

SEQ ID NO: 2302851 - RNA, 19 nt, Homo sapiens
  misc_RNA (1)...(19): siRNA sense strand
agaaacagaagaaggucca

SEQ ID NO: 2302852 - RNA, 19 nt, Homo sapiens
  misc_RNA (1)...(19): siRNA sense strand
augaagaacgagauggagu

SEQ ID NO: 2302853 - RNA, 19 nt, Homo sapiens
  misc_RNA (1)...(19): siRNA sense strand
guggaugaugcacaggaaa

SEQ ID NO: 2302854 - RNA, 19 nt, Homo sapiens
  misc_RNA (1)...(19): siRNA sense strand
uuauggaucacuugaagaa

SEQ ID NO: 2302855 - RNA, 19 nt, Homo sapiens
  misc_RNA (1)...(19): siRNA sense strand
aaagauuucaggagcuauu

SEQ ID NO: 2302856 - RNA, 19 nt, Homo sapiens
  misc_RNA (1)...(19): siRNA sense strand
gcuacaugguaaugggaga

SEQ ID NO: 2302857 - RNA, 19 nt, Homo sapiens
  misc_RNA (1)...(19): siRNA sense strand
cguaaagaccucucgggaa

SEQ ID NO: 2302858 - RNA, 19 nt, Homo sapiens
  misc_RNA (1)...(19): siRNA sense strand
guaaagaccucucgggaac

SEQ ID NO: 2302859 - RNA, 19 nt, Homo sapiens
  misc_RNA (1)...(19): siRNA sense strand
gguugauuaucgagcaaaa

SEQ ID NO: 2302860 - RNA, 19 nt, Homo sapiens
  misc_RNA (1)...(19): siRNA sense strand
ugagaaagauaaugcacga

SEQ ID NO: 2302861 - RNA, 19 nt, Homo sapiens
  misc_RNA (1)...(19): siRNA sense strand
ggaccgugugugucagaaa

SEQ ID NO: 2302862 - RNA, 19 nt, Homo sapiens
  misc_RNA (1)...(19): siRNA sense strand
caauugaguacgugauaca

SEQ ID NO: 2302863 - RNA, 19 nt, Homo sapiens
  misc_RNA (1)...(19): siRNA sense strand
uuggcaugauauugagaaa

SEQ ID NO: 2302864 - RNA, 19 nt, Homo sapiens
  misc_RNA (1)...(19): siRNA sense strand
ccgaaauugggcagaugua

SEQ ID NO: 2302865 - RNA, 19 nt, Homo sapiens
  misc_RNA (1)...(19): siRNA sense strand
ggcacgagucaguggaaaa

SEQ ID NO: 2302866 - RNA, 19 nt, Homo sapiens
  misc_RNA (1)...(19): siRNA sense strand
gggaagagaccuuugcgau

SEQ ID NO: 2302867 - RNA, 19 nt, Homo sapiens
  misc_RNA (1)...(19): siRNA sense strand
gugaaaggaccgugugugu

SEQ ID NO: 2302868 - RNA, 19 nt, Homo sapiens
  misc_RNA (1)...(19): siRNA sense strand
guggaaaaucuguggccua

SEQ ID NO: 2302869 - RNA, 19 nt, Homo sapiens
  misc_RNA (1)...(19): siRNA sense strand
gauuuaacugcaaagcaaa

SEQ ID NO: 2302870 - RNA, 19 nt, Homo sapiens
  misc_RNA (1)...(19): siRNA sense strand
aggacaugcccgaguauga

SEQ ID NO: 2302871 - RNA, 19 nt, Homo sapiens
  misc_RNA (1)...(19): siRNA sense strand
cagguugauuaucgagcaa

SEQ ID NO: 2302872 - RNA, 19 nt, Homo sapiens
  misc_RNA (1)...(19): siRNA sense strand
gaggcauaucugaggugaa

SEQ ID NO: 2302873 - RNA, 19 nt, Homo sapiens
  misc_RNA (1)...(19): siRNA sense strand
ggaagagaccuuugcgauc

SEQ ID NO: 2302874 - RNA, 19 nt, Homo sapiens
  misc_RNA (1)...(19): siRNA sense strand
gcagaaugaagaacgggau

SEQ ID NO: 2302875 - RNA, 19 nt, Homo sapiens
  misc_RNA (1)...(19): siRNA sense strand
gcucaggcacauagaagca

SEQ ID NO: 2302876 - RNA, 19 nt, Homo sapiens
  misc_RNA (1)...(19): siRNA sense strand
gcaagcacgaccugcacaa

SEQ ID NO: 2302877 - RNA, 19 nt, Homo sapiens
  misc_RNA (1)...(19): siRNA sense strand
uggaugaugcucaagaaau

SEQ ID NO: 2302878 - RNA, 19 nt, Homo sapiens
  misc_RNA (1)...(19): siRNA sense strand
ggagauuuccgaauggcau

SEQ ID NO: 2302879 - RNA, 19 nt, Homo sapiens
  misc_RNA (1)...(19): siRNA sense strand
ggacaguauaacaaagaag

SEQ ID NO: 2302880 - RNA, 19 nt, Homo sapiens
  misc_RNA (1)...(19): siRNA sense strand
agaauuuugcugauggaua

SEQ ID NO: 2302881 - RNA, 19 nt, Homo sapiens
  misc_RNA (1)...(19): siRNA sense strand
cuggaugaugcucaagaaa

SEQ ID NO: 2302882 - RNA, 19 nt, Homo sapiens
  misc_RNA (1)...(19): siRNA sense strand
cggcuggaggcuacaagaa

SEQ ID NO: 2302883 - RNA, 19 nt, Homo sapiens
  misc_RNA (1)...(19): siRNA sense strand
cugcaaagcaaauacagga

SEQ ID NO: 2302884 - RNA, 19 nt, Homo sapiens
  misc_RNA (1)...(19): siRNA sense strand
cugcacaaccacaggagca

SEQ ID NO: 2302885 - RNA, 19 nt, Homo sapiens
  misc_RNA (1)...(19): siRNA sense strand
uaaucgaacagcugcaaau

SEQ ID NO: 2302886 - RNA, 19 nt, Homo sapiens
  misc_RNA (1)...(19): siRNA sense strand
gaucacauuuggaaggaug

SEQ ID NO: 2302887 - RNA, 19 nt, Homo sapiens
  misc_RNA (1)...(19): siRNA sense strand
gcuacaugguaaugggaga

SEQ ID NO: 2302888 - RNA, 19 nt, Homo sapiens
  misc_RNA (1)...(19): siRNA sense strand
cguaaagaccucucgggaa

SEQ ID NO: 2302889 - RNA, 19 nt, Homo sapiens
  misc_RNA (1)...(19): siRNA sense strand
guaaagaccucucgggaac

SEQ ID NO: 2302890 - RNA, 19 nt, Homo sapiens
  misc_RNA (1)...(19): siRNA sense strand
gguugauuaucgagcaaaa

SEQ ID NO: 2302891 - RNA, 19 nt, Homo sapiens
  misc_RNA (1)...(19): siRNA sense strand
ugagaaagauaaugcacga

SEQ ID NO: 2302892 - RNA, 19 nt, Homo sapiens
  misc_RNA (1)...(19): siRNA sense strand
ggaccgugugugucagaaa

SEQ ID NO: 2302893 - RNA, 19 nt, Homo sapiens
  misc_RNA (1)...(19): siRNA sense strand
caauugaguacgugauaca

SEQ ID NO: 2302894 - RNA, 19 nt, Homo sapiens
  misc_RNA (1)...(19): siRNA sense strand
uuggcaugauauugagaaa

SEQ ID NO: 2302895 - RNA, 19 nt, Homo sapiens
  misc_RNA (1)...(19): siRNA sense strand
ccgaaauugggcagaugua

SEQ ID NO: 2302896 - RNA, 19 nt, Homo sapiens
  misc_RNA (1)...(19): siRNA sense strand
ggcacgagucaguggaaaa

SEQ ID NO: 2302897 - RNA, 19 nt, Homo sapiens
  misc_RNA (1)...(19): siRNA sense strand
gggaagagaccuuugcgau

SEQ ID NO: 2302898 - RNA, 19 nt, Homo sapiens
  misc_RNA (1)...(19): siRNA sense strand
gugaaaggaccgugugugu

SEQ ID NO: 2302899 - RNA, 19 nt, Homo sapiens
  misc_RNA (1)...(19): siRNA sense strand
guggaaaaucuguggccua

SEQ ID NO: 2302900 - RNA, 19 nt, Homo sapiens
  misc_RNA (1)...(19): siRNA sense strand
gauuuaacugcaaagcaaa

SEQ ID NO: 2302901 - RNA, 19 nt, Homo sapiens
  misc_RNA (1)...(19): siRNA sense strand
aggacaugcccgaguauga

SEQ ID NO: 2302902 - RNA, 19 nt, Homo sapiens
  misc_RNA (1)...(19): siRNA sense strand
cagguugauuaucgagcaa

SEQ ID NO: 2302903 - RNA, 19 nt, Homo sapiens
  misc_RNA (1)...(19): siRNA sense strand
gaggcauaucugaggugaa

SEQ ID NO: 2302904 - RNA, 19 nt, Homo sapiens
  misc_RNA (1)...(19): siRNA sense strand
ggaagagaccuuugcgauc

SEQ ID NO: 2302905 - RNA, 19 nt, Homo sapiens
  misc_RNA (1)...(19): siRNA sense strand
gcagaaugaagaacgggau

SEQ ID NO: 2302906 - RNA, 19 nt, Homo sapiens
  misc_RNA (1)...(19): siRNA sense strand
gcucaggcacauagaagca

SEQ ID NO: 2302907 - RNA, 19 nt, Homo sapiens
  misc_RNA (1)...(19): siRNA sense strand
gcaagcacgaccugcacaa

SEQ ID NO: 2302908 - RNA, 19 nt, Homo sapiens
  misc_RNA (1)...(19): siRNA sense strand
uggaugaugcucaagaaau

SEQ ID NO: 2302909 - RNA, 19 nt, Homo sapiens
  misc_RNA (1)...(19): siRNA sense strand
ggagauuuccgaauggcau

SEQ ID NO: 2302910 - RNA, 19 nt, Homo sapiens
  misc_RNA (1)...(19): siRNA sense strand
ggacaguauaacaaagaag

SEQ ID NO: 2302911 - RNA, 19 nt, Homo sapiens
  misc_RNA (1)...(19): siRNA sense strand
agaauuuugcugauggaua

SEQ ID NO: 2302912 - RNA, 19 nt, Homo sapiens
  misc_RNA (1)...(19): siRNA sense strand
cuggaugaugcucaagaaa

SEQ ID NO: 2302913 - RNA, 19 nt, Homo sapiens
  misc_RNA (1)...(19): siRNA sense strand
cggcuggaggcuacaagaa

SEQ ID NO: 2302914 - RNA, 19 nt, Homo sapiens
  misc_RNA (1)...(19): siRNA sense strand
cugcaaagcaaauacagga

SEQ ID NO: 2302915 - RNA, 19 nt, Homo sapiens
  misc_RNA (1)...(19): siRNA sense strand
cugcacaaccacaggagca

SEQ ID NO: 2302916 - RNA, 19 nt, Homo sapiens
  misc_RNA (1)...(19): siRNA sense strand
uaaucgaacagcugcaaau

SEQ ID NO: 2302917 - RNA, 19 nt, Homo sapiens
  misc_RNA (1)...(19): siRNA sense strand
gaucacauuuggaaggaug

SEQ ID NO: 2302918 - RNA, 19 nt, Homo sapiens
  misc_RNA (1)...(19): siRNA sense strand
gcuacaugguaaugggaga

SEQ ID NO: 2302919 - RNA, 19 nt, Homo sapiens
  misc_RNA (1)...(19): siRNA sense strand
cguaaagaccucucgggaa

SEQ ID NO: 2302920 - RNA, 19 nt, Homo sapiens
  misc_RNA (1)...(19): siRNA sense strand
guaaagaccucucgggaac

SEQ ID NO: 2302921 - RNA, 19 nt, Homo sapiens
  misc_RNA (1)...(19): siRNA sense strand
gguugauuaucgagcaaaa

SEQ ID NO: 2302922 - RNA, 19 nt, Homo sapiens
  misc_RNA (1)...(19): siRNA sense strand
ugagaaagauaaugcacga

SEQ ID NO: 2302923 - RNA, 19 nt, Homo sapiens
  misc_RNA (1)...(19): siRNA sense strand
ggaccgugugugucagaaa

SEQ ID NO: 2302924 - RNA, 19 nt, Homo sapiens
  misc_RNA (1)...(19): siRNA sense strand
caauugaguacgugauaca

SEQ ID NO: 2302925 - RNA, 19 nt, Homo sapiens
  misc_RNA (1)...(19): siRNA sense strand
uuggcaugauauugagaaa

SEQ ID NO: 2302926 - RNA, 19 nt, Homo sapiens
  misc_RNA (1)...(19): siRNA sense strand
ccgaaauugggcagaugua

SEQ ID NO: 2302927 - RNA, 19 nt, Homo sapiens
  misc_RNA (1)...(19): siRNA sense strand
ggcacgagucaguggaaaa

SEQ ID NO: 2302928 - RNA, 19 nt, Homo sapiens
  misc_RNA (1)...(19): siRNA sense strand
gggaagagaccuuugcgau

SEQ ID NO: 2302929 - RNA, 19 nt, Homo sapiens
  misc_RNA (1)...(19): siRNA sense strand
gugaaaggaccgugugugu

SEQ ID NO: 2302930 - RNA, 19 nt, Homo sapiens
  misc_RNA (1)...(19): siRNA sense strand
guggaaaaucuguggccua

SEQ ID NO: 2302931 - RNA, 19 nt, Homo sapiens
  misc_RNA (1)...(19): siRNA sense strand
gauuuaacugcaaagcaaa

SEQ ID NO: 2302932 - RNA, 19 nt, Homo sapiens
  misc_RNA (1)...(19): siRNA sense strand
aggacaugcccgaguauga

SEQ ID NO: 2302933 - RNA, 19 nt, Homo sapiens
  misc_RNA (1)...(19): siRNA sense strand
cagguugauuaucgagcaa

SEQ ID NO: 2302934 - RNA, 19 nt, Homo sapiens
  misc_RNA (1)...(19): siRNA sense strand
gaggcauaucugaggugaa

SEQ ID NO: 2302935 - RNA, 19 nt, Homo sapiens
  misc_RNA (1)...(19): siRNA sense strand
ggaagagaccuuugcgauc

SEQ ID NO: 2302936 - RNA, 19 nt, Homo sapiens
  misc_RNA (1)...(19): siRNA sense strand
gcagaaugaagaacgggau

SEQ ID NO: 2302937 - RNA, 19 nt, Homo sapiens
  misc_RNA (1)...(19): siRNA sense strand
gcucaggcacauagaagca

SEQ ID NO: 2302938 - RNA, 19 nt, Homo sapiens
  misc_RNA (1)...(19): siRNA sense strand
gcaagcacgaccugcacaa

SEQ ID NO: 2302939 - RNA, 19 nt, Homo sapiens
  misc_RNA (1)...(19): siRNA sense strand
uggaugaugcucaagaaau

SEQ ID NO: 2302940 - RNA, 19 nt, Homo sapiens
  misc_RNA (1)...(19): siRNA sense strand
ggagauuuccgaauggcau

SEQ ID NO: 2302941 - RNA, 19 nt, Homo sapiens
  misc_RNA (1)...(19): siRNA sense strand
ggacaguauaacaaagaag

SEQ ID NO: 2302942 - RNA, 19 nt, Homo sapiens
  misc_RNA (1)...(19): siRNA sense strand
agaauuuugcugauggaua

SEQ ID NO: 2302943 - RNA, 19 nt, Homo sapiens
  misc_RNA (1)...(19): siRNA sense strand
cuggaugaugcucaagaaa

SEQ ID NO: 2302944 - RNA, 19 nt, Homo sapiens
  misc_RNA (1)...(19): siRNA sense strand
cggcuggaggcuacaagaa

SEQ ID NO: 2302945 - RNA, 19 nt, Homo sapiens
  misc_RNA (1)...(19): siRNA sense strand
cugcaaagcaaauacagga

SEQ ID NO: 2302946 - RNA, 19 nt, Homo sapiens
  misc_RNA (1)...(19): siRNA sense strand
cugcacaaccacaggagca

SEQ ID NO: 2302947 - RNA, 19 nt, Homo sapiens
  misc_RNA (1)...(19): siRNA sense strand
uaaucgaacagcugcaaau

SEQ ID NO: 2302948 - RNA, 19 nt, Homo sapiens
  misc_RNA (1)...(19): siRNA sense strand
gaucacauuuggaaggaug

SEQ ID NO: 2302949 - RNA, 19 nt, Homo sapiens
  misc_RNA (1)...(19): siRNA sense strand
ugaucaacguagauggaaa

SEQ ID NO: 2302950 - RNA, 19 nt, Homo sapiens
  misc_RNA (1)...(19): siRNA sense strand
gcggagaauuagaguacau

SEQ ID NO: 2302951 - RNA, 19 nt, Homo sapiens
  misc_RNA (1)...(19): siRNA sense strand
ugggaaaggcugugacaau

SEQ ID NO: 2302952 - RNA, 19 nt, Homo sapiens
  misc_RNA (1)...(19): siRNA sense strand
aggaagaggaggaggagga

SEQ ID NO: 2302953 - RNA, 19 nt, Homo sapiens
  misc_RNA (1)...(19): siRNA sense strand
ggugauacauaugggcaaa

SEQ ID NO: 2302954 - RNA, 19 nt, Homo sapiens
  misc_RNA (1)...(19): siRNA sense strand
agaugagaguccugccaaa

SEQ ID NO: 2302955 - RNA, 19 nt, Homo sapiens
  misc_RNA (1)...(19): siRNA sense strand
caccaauacaagagaaaca

SEQ ID NO: 2302956 - RNA, 19 nt, Homo sapiens
  misc_RNA (1)...(19): siRNA sense strand
cuucagagaccuaacgcaa

SEQ ID NO: 2302957 - RNA, 19 nt, Homo sapiens
  misc_RNA (1)...(19): siRNA sense strand
gaucaacguagauggaaau

SEQ ID NO: 2302958 - RNA, 19 nt, Homo sapiens
  misc_RNA (1)...(19): siRNA sense strand
ggauagacagauugacaga

SEQ ID NO: 2302959 - RNA, 19 nt, Homo sapiens
  misc_RNA (1)...(19): siRNA sense strand
uuacauuuggguugggaaa

SEQ ID NO: 2302960 - RNA, 19 nt, Homo sapiens
  misc_RNA (1)...(19): siRNA sense strand
caucaauaccacagaaaau

SEQ ID NO: 2302961 - RNA, 19 nt, Homo sapiens
  misc_RNA (1)...(19): siRNA sense strand
ucauaaacgaccagaaguu

SEQ ID NO: 2302962 - RNA, 19 nt, Homo sapiens
  misc_RNA (1)...(19): siRNA sense strand
agacaagcuuccuggagau

SEQ ID NO: 2302963 - RNA, 19 nt, Homo sapiens
  misc_RNA (1)...(19): siRNA sense strand
ggauaguuuacuugugaau

SEQ ID NO: 2302964 - RNA, 19 nt, Homo sapiens
  misc_RNA (1)...(19): siRNA sense strand
gagaauuagaguacauaca

SEQ ID NO: 2302965 - RNA, 19 nt, Homo sapiens
  misc_RNA (1)...(19): siRNA sense strand
cucucaaggaccugggaaa

SEQ ID NO: 2302966 - RNA, 19 nt, Homo sapiens
  misc_RNA (1)...(19): siRNA sense strand
gacaaauauuccacagaca

SEQ ID NO: 2302967 - RNA, 19 nt, Homo sapiens
  misc_RNA (1)...(19): siRNA sense strand
aagagaugccuuagugaau

SEQ ID NO: 2302968 - RNA, 19 nt, Homo sapiens
  misc_RNA (1)...(19): siRNA sense strand
cguagauggaaaugcaauu

SEQ ID NO: 2302969 - RNA, 19 nt, Homo sapiens
  misc_RNA (1)...(19): siRNA sense strand
cuccaaugcccaacaguua

SEQ ID NO: 2302970 - RNA, 19 nt, Homo sapiens
  misc_RNA (1)...(19): siRNA sense strand
guguauaugccauguguca

SEQ ID NO: 2302971 - RNA, 19 nt, Homo sapiens
  misc_RNA (1)...(19): siRNA sense strand
ggucauuaugcuaugucaa

SEQ ID NO: 2302972 - RNA, 19 nt, Homo sapiens
  misc_RNA (1)...(19): siRNA sense strand
cuuacucaggagaggaaua

SEQ ID NO: 2302973 - RNA, 19 nt, Homo sapiens
  misc_RNA (1)...(19): siRNA sense strand
uauacaggauagacagauu

SEQ ID NO: 2302974 - RNA, 19 nt, Homo sapiens
  misc_RNA (1)...(19): siRNA sense strand
caggauagacagauugaca

SEQ ID NO: 2302975 - RNA, 19 nt, Homo sapiens
  misc_RNA (1)...(19): siRNA sense strand
cgugcaguauggugaauau

SEQ ID NO: 2302976 - RNA, 19 nt, Homo sapiens
  misc_RNA (1)...(19): siRNA sense strand
guugauugugucugauaua

SEQ ID NO: 2302977 - RNA, 19 nt, Homo sapiens
  misc_RNA (1)...(19): siRNA sense strand
guucacuagcagauguaua

SEQ ID NO: 2302978 - RNA, 19 nt, Homo sapiens
  misc_RNA (1)...(19): siRNA sense strand
uggugauacauaugggcaa

SEQ ID NO: 2302979 - RNA, 19 nt, Homo sapiens
  misc_RNA (1)...(19): siRNA sense strand
agacuuacugaaugcauua

SEQ ID NO: 2302980 - RNA, 19 nt, Homo sapiens
  misc_RNA (1)...(19): siRNA sense strand
auaacuuggcuuagagaca

SEQ ID NO: 2302981 - RNA, 19 nt, Homo sapiens
  misc_RNA (1)...(19): siRNA sense strand
gguaaguucacuagcagau

SEQ ID NO: 2302982 - RNA, 19 nt, Homo sapiens
  misc_RNA (1)...(19): siRNA sense strand
caguauaggaggauugagu

SEQ ID NO: 2302983 - RNA, 19 nt, Homo sapiens
  misc_RNA (1)...(19): siRNA sense strand
aagcaaaggugagcggaga

SEQ ID NO: 2302984 - RNA, 19 nt, Homo sapiens
  misc_RNA (1)...(19): siRNA sense strand
agaugagggugcaguacau

SEQ ID NO: 2302985 - RNA, 19 nt, Homo sapiens
  misc_RNA (1)...(19): siRNA sense strand
gugcaguacauguuaauga

SEQ ID NO: 2302986 - RNA, 19 nt, Homo sapiens
  misc_RNA (1)...(19): siRNA sense strand
ccagaaagccugagaccug

SEQ ID NO: 2302987 - RNA, 19 nt, Homo sapiens
  misc_RNA (1)...(19): siRNA sense strand
ucucaaacagaaagcauuu

SEQ ID NO: 2302988 - RNA, 19 nt, Homo sapiens
  misc_RNA (1)...(19): siRNA sense strand
gacacaucuuccagagcua

SEQ ID NO: 2302989 - RNA, 19 nt, Homo sapiens
  misc_RNA (1)...(19): siRNA sense strand
cuucauugaucaacguaga

SEQ ID NO: 2302990 - RNA, 19 nt, Homo sapiens
  misc_RNA (1)...(19): siRNA sense strand
gguccagcccagaaucaaa

SEQ ID NO: 2302991 - RNA, 19 nt, Homo sapiens
  misc_RNA (1)...(19): siRNA sense strand
ccuggagauucacgaacaa

SEQ ID NO: 2302992 - RNA, 19 nt, Homo sapiens
  misc_RNA (1)...(19): siRNA sense strand
agaagauccuaaucagaga

SEQ ID NO: 2302993 - RNA, 19 nt, Homo sapiens
  misc_RNA (1)...(19): siRNA sense strand
acagcaaacugcaguggau

SEQ ID NO: 2302994 - RNA, 19 nt, Homo sapiens
  misc_RNA (1)...(19): siRNA sense strand
gagcggagaauuagaguac

SEQ ID NO: 2302995 - RNA, 19 nt, Homo sapiens
  misc_RNA (1)...(19): siRNA sense strand
ccucauugccauuggauac

SEQ ID NO: 2302996 - RNA, 19 nt, Homo sapiens
  misc_RNA (1)...(19): siRNA sense strand
agauaaagucucagccacu

SEQ ID NO: 2302997 - RNA, 19 nt, Homo sapiens
  misc_RNA (1)...(19): siRNA sense strand
augcaguggaagcuggaua

SEQ ID NO: 2302998 - RNA, 19 nt, Homo sapiens
  misc_RNA (1)...(19): siRNA sense strand
gcauuuagaacggguacaa

SEQ ID NO: 2302999 - RNA, 19 nt, Homo sapiens
  misc_RNA (1)...(19): siRNA sense strand
gcuauagaguaaacgaugu

SEQ ID NO: 2303000 - RNA, 19 nt, Homo sapiens
  misc_RNA (1)...(19): siRNA sense strand
caauaacuucauagaggau

SEQ ID NO: 2303001 - RNA, 19 nt, Homo sapiens
  misc_RNA (1)...(19): siRNA sense strand
caguauggugaauauguua

SEQ ID NO: 2303002 - RNA, 19 nt, Homo sapiens
  misc_RNA (1)...(19): siRNA sense strand
caaauauuccacagacaca

SEQ ID NO: 2303003 - RNA, 19 nt, Homo sapiens
  misc_RNA (1)...(19): siRNA sense strand
gaguaaacgauguuccuga

SEQ ID NO: 2303004 - RNA, 19 nt, Homo sapiens
  misc_RNA (1)...(19): siRNA sense strand
ccuuuuaaguucacaguau

SEQ ID NO: 2303005 - RNA, 19 nt, Homo sapiens
  misc_RNA (1)...(19): siRNA sense strand
uugaagcuguuaugagaau

SEQ ID NO: 2303006 - RNA, 19 nt, Homo sapiens
  misc_RNA (1)...(19): siRNA sense strand
gcaaaggugagcggagaau

SEQ ID NO: 2303007 - RNA, 19 nt, Homo sapiens
  misc_RNA (1)...(19): siRNA sense strand
augaugaggaagaggagga

SEQ ID NO: 2303008 - RNA, 19 nt, Homo sapiens
  misc_RNA (1)...(19): siRNA sense strand
ggaaggaggcaguuaccca

SEQ ID NO: 2303009 - RNA, 19 nt, Homo sapiens
  misc_RNA (1)...(19): siRNA sense strand
caagcuuccuggagauuca

SEQ ID NO: 2303010 - RNA, 19 nt, Homo sapiens
  misc_RNA (1)...(19): siRNA sense strand
cuacaauuuacaagaagga

SEQ ID NO: 2303011 - RNA, 19 nt, Homo sapiens
  misc_RNA (1)...(19): siRNA sense strand
guauaugccaugugucaga

SEQ ID NO: 2303012 - RNA, 19 nt, Homo sapiens
  misc_RNA (1)...(19): siRNA sense strand
cguaaagcccagaaagaaa

SEQ ID NO: 2303013 - RNA, 19 nt, Homo sapiens
  misc_RNA (1)...(19): siRNA sense strand
cgugacaaguugaaggaaa

SEQ ID NO: 2303014 - RNA, 19 nt, Homo sapiens
  misc_RNA (1)...(19): siRNA sense strand
gggccaaacaugugggcua

SEQ ID NO: 2303015 - RNA, 19 nt, Homo sapiens
  misc_RNA (1)...(19): siRNA sense strand
gcuuagaaugggagagaau

SEQ ID NO: 2303016 - RNA, 19 nt, Homo sapiens
  misc_RNA (1)...(19): siRNA sense strand
gugacaaguugaaggaaau

SEQ ID NO: 2303017 - RNA, 19 nt, Homo sapiens
  misc_RNA (1)...(19): siRNA sense strand
gcaucuaagcugucagaaa

SEQ ID NO: 2303018 - RNA, 19 nt, Homo sapiens
  misc_RNA (1)...(19): siRNA sense strand
gagaaaagacauagaaaga

SEQ ID NO: 2303019 - RNA, 19 nt, Homo sapiens
  misc_RNA (1)...(19): siRNA sense strand
acggaaagcugaggagaaa

SEQ ID NO: 2303020 - RNA, 19 nt, Homo sapiens
  misc_RNA (1)...(19): siRNA sense strand
agaugaggcugcaaggaaa

SEQ ID NO: 2303021 - RNA, 19 nt, Homo sapiens
  misc_RNA (1)...(19): siRNA sense strand
guaaauacaucauggcaga

SEQ ID NO: 2303022 - RNA, 19 nt, Homo sapiens
  misc_RNA (1)...(19): siRNA sense strand
aggaagagugggaacgaaa

SEQ ID NO: 2303023 - RNA, 19 nt, Homo sapiens
  misc_RNA (1)...(19): siRNA sense strand
gaacgaaaacagagagaau

SEQ ID NO: 2303024 - RNA, 19 nt, Homo sapiens
  misc_RNA (1)...(19): siRNA sense strand
aggaaguauuggagauaga

SEQ ID NO: 2303025 - RNA, 19 nt, Homo sapiens
  misc_RNA (1)...(19): siRNA sense strand
uuacauaacaggugaucaa

SEQ ID NO: 2303026 - RNA, 19 nt, Homo sapiens
  misc_RNA (1)...(19): siRNA sense strand
gagagaauuacaagaacaa

SEQ ID NO: 2303027 - RNA, 19 nt, Homo sapiens
  misc_RNA (1)...(19): siRNA sense strand
gaaaggaggaagaagaaaa

SEQ ID NO: 2303028 - RNA, 19 nt, Homo sapiens
  misc_RNA (1)...(19): siRNA sense strand
acgaaaacagagagaauua

SEQ ID NO: 2303029 - RNA, 19 nt, Homo sapiens
  misc_RNA (1)...(19): siRNA sense strand
ggguccaaguagugaaaga

SEQ ID NO: 2303030 - RNA, 19 nt, Homo sapiens
  misc_RNA (1)...(19): siRNA sense strand
cuauucaguuggagaagaa

SEQ ID NO: 2303031 - RNA, 19 nt, Homo sapiens
  misc_RNA (1)...(19): siRNA sense strand
cauagaaagacgagaggca

SEQ ID NO: 2303032 - RNA, 19 nt, Homo sapiens
  misc_RNA (1)...(19): siRNA sense strand
ggaagauggaucagcaaga

SEQ ID NO: 2303033 - RNA, 19 nt, Homo sapiens
  misc_RNA (1)...(19): siRNA sense strand
ggaacauggagcuggaaaa

SEQ ID NO: 2303034 - RNA, 19 nt, Homo sapiens
  misc_RNA (1)...(19): siRNA sense strand
gagaauuacaagaacaaga

SEQ ID NO: 2303035 - RNA, 19 nt, Homo sapiens
  misc_RNA (1)...(19): siRNA sense strand
ucaagaagaggaacggaaa

SEQ ID NO: 2303036 - RNA, 19 nt, Homo sapiens
  misc_RNA (1)...(19): siRNA sense strand
agagagaauuacaagaaca

SEQ ID NO: 2303037 - RNA, 19 nt, Homo sapiens
  misc_RNA (1)...(19): siRNA sense strand
gagaggaagaaaggagaaa

SEQ ID NO: 2303038 - RNA, 19 nt, Homo sapiens
  misc_RNA (1)...(19): siRNA sense strand
guuacaggccagaggaaaa

SEQ ID NO: 2303039 - RNA, 19 nt, Homo sapiens
  misc_RNA (1)...(19): siRNA sense strand
ggagaaacaacguaaggau

SEQ ID NO: 2303040 - RNA, 19 nt, Homo sapiens
  misc_RNA (1)...(19): siRNA sense strand
aaggaagaauuaugccaaa

SEQ ID NO: 2303041 - RNA, 19 nt, Homo sapiens
  misc_RNA (1)...(19): siRNA sense strand
uuagaaaggaggaagaaga

SEQ ID NO: 2303042 - RNA, 19 nt, Homo sapiens
  misc_RNA (1)...(19): siRNA sense strand
agcuggaaguucuggauaa

SEQ ID NO: 2303043 - RNA, 19 nt, Homo sapiens
  misc_RNA (1)...(19): siRNA sense strand
uagaaaggaggaagaagaa

SEQ ID NO: 2303044 - RNA, 19 nt, Homo sapiens
  misc_RNA (1)...(19): siRNA sense strand
uggagauagaaguggaauu

SEQ ID NO: 2303045 - RNA, 19 nt, Homo sapiens
  misc_RNA (1)...(19): siRNA sense strand
ccugagaagcaauuauuaa

SEQ ID NO: 2303046 - RNA, 19 nt, Homo sapiens
  misc_RNA (1)...(19): siRNA sense strand
ccagaaagauggagagugg

SEQ ID NO: 2303047 - RNA, 19 nt, Homo sapiens
  misc_RNA (1)...(19): siRNA sense strand
agaaaggagaaaagacaua

SEQ ID NO: 2303048 - RNA, 19 nt, Homo sapiens
  misc_RNA (1)...(19): siRNA sense strand
cgagaggaagaaaggagaa

SEQ ID NO: 2303049 - RNA, 19 nt, Homo sapiens
  misc_RNA (1)...(19): siRNA sense strand
agaacaagaauggaagaaa

SEQ ID NO: 2303050 - RNA, 19 nt, Homo sapiens
  misc_RNA (1)...(19): siRNA sense strand
agagacaacgagaggaaga

SEQ ID NO: 2303051 - RNA, 19 nt, Homo sapiens
  misc_RNA (1)...(19): siRNA sense strand
ggcuauuaccucugaagaa

SEQ ID NO: 2303052 - RNA, 19 nt, Homo sapiens
  misc_RNA (1)...(19): siRNA sense strand
gggaacauggagcuggaaa

SEQ ID NO: 2303053 - RNA, 19 nt, Homo sapiens
  misc_RNA (1)...(19): siRNA sense strand
gaagaaaggagaaaagaca

SEQ ID NO: 2303054 - RNA, 19 nt, Homo sapiens
  misc_RNA (1)...(19): siRNA sense strand
aaagggaggcagaacguaa

SEQ ID NO: 2303055 - RNA, 19 nt, Homo sapiens
  misc_RNA (1)...(19): siRNA sense strand
aagaaauauuggugaccca

SEQ ID NO: 2303056 - RNA, 19 nt, Homo sapiens
  misc_RNA (1)...(19): siRNA sense strand
cugcaaagaaagauaacca

SEQ ID NO: 2303057 - RNA, 19 nt, Homo sapiens
  misc_RNA (1)...(19): siRNA sense strand
ccaaagacuuaaagaacag

SEQ ID NO: 2303058 - RNA, 19 nt, Homo sapiens
  misc_RNA (1)...(19): siRNA sense strand
agggacaagugguagaaaa

SEQ ID NO: 2303059 - RNA, 19 nt, Homo sapiens
  misc_RNA (1)...(19): siRNA sense strand
uggaagcacugaauggcaa

SEQ ID NO: 2303060 - RNA, 19 nt, Homo sapiens
  misc_RNA (1)...(19): siRNA sense strand
guacuaagcaugacaggca

SEQ ID NO: 2303061 - RNA, 19 nt, Homo sapiens
  misc_RNA (1)...(19): siRNA sense strand
gacaggaaguauuggagau

SEQ ID NO: 2303062 - RNA, 19 nt, Homo sapiens
  misc_RNA (1)...(19): siRNA sense strand
cagccaauugagaggaaaa

SEQ ID NO: 2303063 - RNA, 19 nt, Homo sapiens
  misc_RNA (1)...(19): siRNA sense strand
ugaagaacguacuaagcau

SEQ ID NO: 2303064 - RNA, 19 nt, Homo sapiens
  misc_RNA (1)...(19): siRNA sense strand
gcuguaaauaagaaaccua

SEQ ID NO: 2303065 - RNA, 19 nt, Homo sapiens
  misc_RNA (1)...(19): siRNA sense strand
ccaaguagugaaagagcca

SEQ ID NO: 2303066 - RNA, 19 nt, Homo sapiens
  misc_RNA (1)...(19): siRNA sense strand
ugauggugauggacagcua

SEQ ID NO: 2303067 - RNA, 19 nt, Homo sapiens
  misc_RNA (1)...(19): siRNA sense strand
caacaggaacuucaggaau

SEQ ID NO: 2303068 - RNA, 19 nt, Homo sapiens
  misc_RNA (1)...(19): siRNA sense strand
cguaaagcccagaaagaaa

SEQ ID NO: 2303069 - RNA, 19 nt, Homo sapiens
  misc_RNA (1)...(19): siRNA sense strand
cgugacaaguugaaggaaa

SEQ ID NO: 2303070 - RNA, 19 nt, Homo sapiens
  misc_RNA (1)...(19): siRNA sense strand
gggccaaacaugugggcua

SEQ ID NO: 2303071 - RNA, 19 nt, Homo sapiens
  misc_RNA (1)...(19): siRNA sense strand
gcuuagaaugggagagaau

SEQ ID NO: 2303072 - RNA, 19 nt, Homo sapiens
  misc_RNA (1)...(19): siRNA sense strand
gugacaaguugaaggaaau

SEQ ID NO: 2303073 - RNA, 19 nt, Homo sapiens
  misc_RNA (1)...(19): siRNA sense strand
gcaucuaagcugucagaaa

SEQ ID NO: 2303074 - RNA, 19 nt, Homo sapiens
  misc_RNA (1)...(19): siRNA sense strand
gagaaaagacauagaaaga

SEQ ID NO: 2303075 - RNA, 19 nt, Homo sapiens
  misc_RNA (1)...(19): siRNA sense strand
acggaaagcugaggagaaa

SEQ ID NO: 2303076 - RNA, 19 nt, Homo sapiens
  misc_RNA (1)...(19): siRNA sense strand
agaugaggcugcaaggaaa

SEQ ID NO: 2303077 - RNA, 19 nt, Homo sapiens
  misc_RNA (1)...(19): siRNA sense strand
guaaauacaucauggcaga

SEQ ID NO: 2303078 - RNA, 19 nt, Homo sapiens
  misc_RNA (1)...(19): siRNA sense strand
aggaagagugggaacgaaa

SEQ ID NO: 2303079 - RNA, 19 nt, Homo sapiens
  misc_RNA (1)...(19): siRNA sense strand
gaacgaaaacagagagaau

SEQ ID NO: 2303080 - RNA, 19 nt, Homo sapiens
  misc_RNA (1)...(19): siRNA sense strand
aggaaguauuggagauaga

SEQ ID NO: 2303081 - RNA, 19 nt, Homo sapiens
  misc_RNA (1)...(19): siRNA sense strand
uuacauaacaggugaucaa

SEQ ID NO: 2303082 - RNA, 19 nt, Homo sapiens
  misc_RNA (1)...(19): siRNA sense strand
gagagaauuacaagaacaa

SEQ ID NO: 2303083 - RNA, 19 nt, Homo sapiens
  misc_RNA (1)...(19): siRNA sense strand
gaaaggaggaagaagaaaa

SEQ ID NO: 2303084 - RNA, 19 nt, Homo sapiens
  misc_RNA (1)...(19): siRNA sense strand
acgaaaacagagagaauua

SEQ ID NO: 2303085 - RNA, 19 nt, Homo sapiens
  misc_RNA (1)...(19): siRNA sense strand
ggguccaaguagugaaaga

SEQ ID NO: 2303086 - RNA, 19 nt, Homo sapiens
  misc_RNA (1)...(19): siRNA sense strand
cuauucaguuggagaagaa

SEQ ID NO: 2303087 - RNA, 19 nt, Homo sapiens
  misc_RNA (1)...(19): siRNA sense strand
cauagaaagacgagaggca

SEQ ID NO: 2303088 - RNA, 19 nt, Homo sapiens
  misc_RNA (1)...(19): siRNA sense strand
ggaagauggaucagcaaga

SEQ ID NO: 2303089 - RNA, 19 nt, Homo sapiens
  misc_RNA (1)...(19): siRNA sense strand
ggaacauggagcuggaaaa

SEQ ID NO: 2303090 - RNA, 19 nt, Homo sapiens
  misc_RNA (1)...(19): siRNA sense strand
gagaauuacaagaacaaga

SEQ ID NO: 2303091 - RNA, 19 nt, Homo sapiens
  misc_RNA (1)...(19): siRNA sense strand
ucaagaagaggaacggaaa

SEQ ID NO: 2303092 - RNA, 19 nt, Homo sapiens
  misc_RNA (1)...(19): siRNA sense strand
agagagaauuacaagaaca

SEQ ID NO: 2303093 - RNA, 19 nt, Homo sapiens
  misc_RNA (1)...(19): siRNA sense strand
gagaggaagaaaggagaaa

SEQ ID NO: 2303094 - RNA, 19 nt, Homo sapiens
  misc_RNA (1)...(19): siRNA sense strand
guuacaggccagaggaaaa

SEQ ID NO: 2303095 - RNA, 19 nt, Homo sapiens
  misc_RNA (1)...(19): siRNA sense strand
ggagaaacaacguaaggau

SEQ ID NO: 2303096 - RNA, 19 nt, Homo sapiens
  misc_RNA (1)...(19): siRNA sense strand
aaggaagaauuaugccaaa

SEQ ID NO: 2303097 - RNA, 19 nt, Homo sapiens
  misc_RNA (1)...(19): siRNA sense strand
uuagaaaggaggaagaaga

SEQ ID NO: 2303098 - RNA, 19 nt, Homo sapiens
  misc_RNA (1)...(19): siRNA sense strand
agcuggaaguucuggauaa

SEQ ID NO: 2303099 - RNA, 19 nt, Homo sapiens
  misc_RNA (1)...(19): siRNA sense strand
uagaaaggaggaagaagaa

SEQ ID NO: 2303100 - RNA, 19 nt, Homo sapiens
  misc_RNA (1)...(19): siRNA sense strand
uggagauagaaguggaauu

SEQ ID NO: 2303101 - RNA, 19 nt, Homo sapiens
  misc_RNA (1)...(19): siRNA sense strand
ccugagaagcaauuauuaa

SEQ ID NO: 2303102 - RNA, 19 nt, Homo sapiens
  misc_RNA (1)...(19): siRNA sense strand
ccagaaagauggagagugg

SEQ ID NO: 2303103 - RNA, 19 nt, Homo sapiens
  misc_RNA (1)...(19): siRNA sense strand
agaaaggagaaaagacaua

SEQ ID NO: 2303104 - RNA, 19 nt, Homo sapiens
  misc_RNA (1)...(19): siRNA sense strand
cgagaggaagaaaggagaa

SEQ ID NO: 2303105 - RNA, 19 nt, Homo sapiens
  misc_RNA (1)...(19): siRNA sense strand
agaacaagaauggaagaaa

SEQ ID NO: 2303106 - RNA, 19 nt, Homo sapiens
  misc_RNA (1)...(19): siRNA sense strand
agagacaacgagaggaaga

SEQ ID NO: 2303107 - RNA, 19 nt, Homo sapiens
  misc_RNA (1)...(19): siRNA sense strand
ggcuauuaccucugaagaa

SEQ ID NO: 2303108 - RNA, 19 nt, Homo sapiens
  misc_RNA (1)...(19): siRNA sense strand
gggaacauggagcuggaaa

SEQ ID NO: 2303109 - RNA, 19 nt, Homo sapiens
  misc_RNA (1)...(19): siRNA sense strand
gaagaaaggagaaaagaca

SEQ ID NO: 2303110 - RNA, 19 nt, Homo sapiens
  misc_RNA (1)...(19): siRNA sense strand
aaagggaggcagaacguaa

SEQ ID NO: 2303111 - RNA, 19 nt, Homo sapiens
  misc_RNA (1)...(19): siRNA sense strand
aagaaauauuggugaccca

SEQ ID NO: 2303112 - RNA, 19 nt, Homo sapiens
  misc_RNA (1)...(19): siRNA sense strand
cugcaaagaaagauaacca

SEQ ID NO: 2303113 - RNA, 19 nt, Homo sapiens
  misc_RNA (1)...(19): siRNA sense strand
ccaaagacuuaaagaacag

SEQ ID NO: 2303114 - RNA, 19 nt, Homo sapiens
  misc_RNA (1)...(19): siRNA sense strand
agggacaagugguagaaaa

SEQ ID NO: 2303115 - RNA, 19 nt, Homo sapiens
  misc_RNA (1)...(19): siRNA sense strand
uggaagcacugaauggcaa

SEQ ID NO: 2303116 - RNA, 19 nt, Homo sapiens
  misc_RNA (1)...(19): siRNA sense strand
guacuaagcaugacaggca

SEQ ID NO: 2303117 - RNA, 19 nt, Homo sapiens
  misc_RNA (1)...(19): siRNA sense strand
gacaggaaguauuggagau

SEQ ID NO: 2303118 - RNA, 19 nt, Homo sapiens
  misc_RNA (1)...(19): siRNA sense strand
cagccaauugagaggaaaa

SEQ ID NO: 2303119 - RNA, 19 nt, Homo sapiens
  misc_RNA (1)...(19): siRNA sense strand
ugaagaacguacuaagcau

SEQ ID NO: 2303120 - RNA, 19 nt, Homo sapiens
  misc_RNA (1)...(19): siRNA sense strand
gcuguaaauaagaaaccua

SEQ ID NO: 2303121 - RNA, 19 nt, Homo sapiens
  misc_RNA (1)...(19): siRNA sense strand
ccaaguagugaaagagcca

SEQ ID NO: 2303122 - RNA, 19 nt, Homo sapiens
  misc_RNA (1)...(19): siRNA sense strand
ugauggugauggacagcua

SEQ ID NO: 2303123 - RNA, 19 nt, Homo sapiens
  misc_RNA (1)...(19): siRNA sense strand
caacaggaacuucaggaau

SEQ ID NO: 2303124 - RNA, 19 nt, Homo sapiens
  misc_RNA (1)...(19): siRNA sense strand
cguaaagcccagaaagaaa

SEQ ID NO: 2303125 - RNA, 19 nt, Homo sapiens
  misc_RNA (1)...(19): siRNA sense strand
cgugacaaguugaaggaaa

SEQ ID NO: 2303126 - RNA, 19 nt, Homo sapiens
  misc_RNA (1)...(19): siRNA sense strand
gggccaaacaugugggcua

SEQ ID NO: 2303127 - RNA, 19 nt, Homo sapiens
  misc_RNA (1)...(19): siRNA sense strand
gcuuagaaugggagagaau

SEQ ID NO: 2303128 - RNA, 19 nt, Homo sapiens
  misc_RNA (1)...(19): siRNA sense strand
gugacaaguugaaggaaau

SEQ ID NO: 2303129 - RNA, 19 nt, Homo sapiens
  misc_RNA (1)...(19): siRNA sense strand
gcaucuaagcugucagaaa

SEQ ID NO: 2303130 - RNA, 19 nt, Homo sapiens
  misc_RNA (1)...(19): siRNA sense strand
gagaaaagacauagaaaga

SEQ ID NO: 2303131 - RNA, 19 nt, Homo sapiens
  misc_RNA (1)...(19): siRNA sense strand
acggaaagcugaggagaaa

SEQ ID NO: 2303132 - RNA, 19 nt, Homo sapiens
  misc_RNA (1)...(19): siRNA sense strand
agaugaggcugcaaggaaa

SEQ ID NO: 2303133 - RNA, 19 nt, Homo sapiens
  misc_RNA (1)...(19): siRNA sense strand
guaaauacaucauggcaga

SEQ ID NO: 2303134 - RNA, 19 nt, Homo sapiens
  misc_RNA (1)...(19): siRNA sense strand
aggaagagugggaacgaaa

SEQ ID NO: 2303135 - RNA, 19 nt, Homo sapiens
  misc_RNA (1)...(19): siRNA sense strand
gaacgaaaacagagagaau

SEQ ID NO: 2303136 - RNA, 19 nt, Homo sapiens
  misc_RNA (1)...(19): siRNA sense strand
aggaaguauuggagauaga

SEQ ID NO: 2303137 - RNA, 19 nt, Homo sapiens
  misc_RNA (1)...(19): siRNA sense strand
uuacauaacaggugaucaa

SEQ ID NO: 2303138 - RNA, 19 nt, Homo sapiens
  misc_RNA (1)...(19): siRNA sense strand
gagagaauuacaagaacaa

SEQ ID NO: 2303139 - RNA, 19 nt, Homo sapiens
  misc_RNA (1)...(19): siRNA sense strand
gaaaggaggaagaagaaaa

SEQ ID NO: 2303140 - RNA, 19 nt, Homo sapiens
  misc_RNA (1)...(19): siRNA sense strand
acgaaaacagagagaauua

SEQ ID NO: 2303141 - RNA, 19 nt, Homo sapiens
  misc_RNA (1)...(19): siRNA sense strand
ggguccaaguagugaaaga

SEQ ID NO: 2303142 - RNA, 19 nt, Homo sapiens
  misc_RNA (1)...(19): siRNA sense strand
cuauucaguuggagaagaa

SEQ ID NO: 2303143 - RNA, 19 nt, Homo sapiens
  misc_RNA (1)...(19): siRNA sense strand
cauagaaagacgagaggca

SEQ ID NO: 2303144 - RNA, 19 nt, Homo sapiens
  misc_RNA (1)...(19): siRNA sense strand
ggaagauggaucagcaaga

SEQ ID NO: 2303145 - RNA, 19 nt, Homo sapiens
  misc_RNA (1)...(19): siRNA sense strand
ggaacauggagcuggaaaa

SEQ ID NO: 2303146 - RNA, 19 nt, Homo sapiens
  misc_RNA (1)...(19): siRNA sense strand
gagaauuacaagaacaaga

SEQ ID NO: 2303147 - RNA, 19 nt, Homo sapiens
  misc_RNA (1)...(19): siRNA sense strand
ucaagaagaggaacggaaa

SEQ ID NO: 2303148 - RNA, 19 nt, Homo sapiens
  misc_RNA (1)...(19): siRNA sense strand
agagagaauuacaagaaca

SEQ ID NO: 2303149 - RNA, 19 nt, Homo sapiens
  misc_RNA (1)...(19): siRNA sense strand
gagaggaagaaaggagaaa

SEQ ID NO: 2303150 - RNA, 19 nt, Homo sapiens
  misc_RNA (1)...(19): siRNA sense strand
guuacaggccagaggaaaa

SEQ ID NO: 2303151 - RNA, 19 nt, Homo sapiens
  misc_RNA (1)...(19): siRNA sense strand
ggagaaacaacguaaggau

SEQ ID NO: 2303152 - RNA, 19 nt, Homo sapiens
  misc_RNA (1)...(19): siRNA sense strand
aaggaagaauuaugccaaa

SEQ ID NO: 2303153 - RNA, 19 nt, Homo sapiens
  misc_RNA (1)...(19): siRNA sense strand
uuagaaaggaggaagaaga

SEQ ID NO: 2303154 - RNA, 19 nt, Homo sapiens
  misc_RNA (1)...(19): siRNA sense strand
agcuggaaguucuggauaa

SEQ ID NO: 2303155 - RNA, 19 nt, Homo sapiens
  misc_RNA (1)...(19): siRNA sense strand
uagaaaggaggaagaagaa

SEQ ID NO: 2303156 - RNA, 19 nt, Homo sapiens
  misc_RNA (1)...(19): siRNA sense strand
uggagauagaaguggaauu

SEQ ID NO: 2303157 - RNA, 19 nt, Homo sapiens
  misc_RNA (1)...(19): siRNA sense strand
ccugagaagcaauuauuaa

SEQ ID NO: 2303158 - RNA, 19 nt, Homo sapiens
  misc_RNA (1)...(19): siRNA sense strand
ccagaaagauggagagugg

SEQ ID NO: 2303159 - RNA, 19 nt, Homo sapiens
  misc_RNA (1)...(19): siRNA sense strand
agaaaggagaaaagacaua

SEQ ID NO: 2303160 - RNA, 19 nt, Homo sapiens
  misc_RNA (1)...(19): siRNA sense strand
cgagaggaagaaaggagaa

SEQ ID NO: 2303161 - RNA, 19 nt, Homo sapiens
  misc_RNA (1)...(19): siRNA sense strand
agaacaagaauggaagaaa

SEQ ID NO: 2303162 - RNA, 19 nt, Homo sapiens
  misc_RNA (1)...(19): siRNA sense strand
agagacaacgagaggaaga

SEQ ID NO: 2303163 - RNA, 19 nt, Homo sapiens
  misc_RNA (1)...(19): siRNA sense strand
ggcuauuaccucugaagaa

SEQ ID NO: 2303164 - RNA, 19 nt, Homo sapiens
  misc_RNA (1)...(19): siRNA sense strand
gggaacauggagcuggaaa

SEQ ID NO: 2303165 - RNA, 19 nt, Homo sapiens
  misc_RNA (1)...(19): siRNA sense strand
gaagaaaggagaaaagaca

SEQ ID NO: 2303166 - RNA, 19 nt, Homo sapiens
  misc_RNA (1)...(19): siRNA sense strand
aaagggaggcagaacguaa

SEQ ID NO: 2303167 - RNA, 19 nt, Homo sapiens
  misc_RNA (1)...(19): siRNA sense strand
aagaaauauuggugaccca

SEQ ID NO: 2303168 - RNA, 19 nt, Homo sapiens
  misc_RNA (1)...(19): siRNA sense strand
cugcaaagaaagauaacca

SEQ ID NO: 2303169 - RNA, 19 nt, Homo sapiens
  misc_RNA (1)...(19): siRNA sense strand
ccaaagacuuaaagaacag

SEQ ID NO: 2303170 - RNA, 19 nt, Homo sapiens
  misc_RNA (1)...(19): siRNA sense strand
agggacaagugguagaaaa

SEQ ID NO: 2303171 - RNA, 19 nt, Homo sapiens
  misc_RNA (1)...(19): siRNA sense strand
uggaagcacugaauggcaa

SEQ ID NO: 2303172 - RNA, 19 nt, Homo sapiens
  misc_RNA (1)...(19): siRNA sense strand
guacuaagcaugacaggca

SEQ ID NO: 2303173 - RNA, 19 nt, Homo sapiens
  misc_RNA (1)...(19): siRNA sense strand
gacaggaaguauuggagau

SEQ ID NO: 2303174 - RNA, 19 nt, Homo sapiens
  misc_RNA (1)...(19): siRNA sense strand
cagccaauugagaggaaaa

SEQ ID NO: 2303175 - RNA, 19 nt, Homo sapiens
  misc_RNA (1)...(19): siRNA sense strand
ugaagaacguacuaagcau

SEQ ID NO: 2303176 - RNA, 19 nt, Homo sapiens
  misc_RNA (1)...(19): siRNA sense strand
gcuguaaauaagaaaccua

SEQ ID NO: 2303177 - RNA, 19 nt, Homo sapiens
  misc_RNA (1)...(19): siRNA sense strand
ccaaguagugaaagagcca

SEQ ID NO: 2303178 - RNA, 19 nt, Homo sapiens
  misc_RNA (1)...(19): siRNA sense strand
ugauggugauggacagcua

SEQ ID NO: 2303179 - RNA, 19 nt, Homo sapiens
  misc_RNA (1)...(19): siRNA sense strand
caacaggaacuucaggaau

SEQ ID NO: 2303180 - RNA, 19 nt, Homo sapiens
  misc_RNA (1)...(19): siRNA sense strand
cgcacaauauccagcgaga

SEQ ID NO: 2303181 - RNA, 19 nt, Homo sapiens
  misc_RNA (1)...(19): siRNA sense strand
ucuugguauuugugcgcaa

SEQ ID NO: 2303182 - RNA, 19 nt, Homo sapiens
  misc_RNA (1)...(19): siRNA sense strand
cgcacaauauccagcgaga

SEQ ID NO: 2303183 - RNA, 19 nt, Homo sapiens
  misc_RNA (1)...(19): siRNA sense strand
ucuugguauuugugcgcaa

SEQ ID NO: 2303184 - RNA, 19 nt, Homo sapiens
  misc_RNA (1)...(19): siRNA sense strand
cgcacaauauccagcgaga

SEQ ID NO: 2303185 - RNA, 19 nt, Homo sapiens
  misc_RNA (1)...(19): siRNA sense strand
ucuugguauuugugcgcaa

SEQ ID NO: 2303186 - RNA, 19 nt, Homo sapiens
  misc_RNA (1)...(19): siRNA sense strand
cgcacaauauccagcgaga

SEQ ID NO: 2303187 - RNA, 19 nt, Homo sapiens
  misc_RNA (1)...(19): siRNA sense strand
ucuugguauuugugcgcaa

SEQ ID NO: 2303188 - RNA, 19 nt, Homo sapiens
  misc_RNA (1)...(19): siRNA sense strand
cgcacaauauccagcgaga

SEQ ID NO: 2303189 - RNA, 19 nt, Homo sapiens
  misc_RNA (1)...(19): siRNA sense strand
ucuugguauuugugcgcaa

SEQ ID NO: 2303190 - RNA, 19 nt, Homo sapiens
  misc_RNA (1)...(19): siRNA sense strand
cgcacaauauccagcgaga

SEQ ID NO: 2303191 - RNA, 19 nt, Homo sapiens
  misc_RNA (1)...(19): siRNA sense strand
ucuugguauuugugcgcaa

SEQ ID NO: 2303192 - RNA, 19 nt, Homo sapiens
  misc_RNA (1)...(19): siRNA sense strand
cgcacaauauccagcgaga

SEQ ID NO: 2303193 - RNA, 19 nt, Homo sapiens
  misc_RNA (1)...(19): siRNA sense strand
ucuugguauuugugcgcaa

SEQ ID NO: 2303194 - RNA, 19 nt, Homo sapiens
  misc_RNA (1)...(19): siRNA sense strand
cgcacaauauccagcgaga

SEQ ID NO: 2303195 - RNA, 19 nt, Homo sapiens
  misc_RNA (1)...(19): siRNA sense strand
ucuugguauuugugcgcaa

SEQ ID NO: 2303196 - RNA, 19 nt, Homo sapiens
  misc_RNA (1)...(19): siRNA sense strand
cgcacaauauccagcgaga

SEQ ID NO: 2303197 - RNA, 19 nt, Homo sapiens
  misc_RNA (1)...(19): siRNA sense strand
ucuugguauuugugcgcaa

SEQ ID NO: 2303198 - RNA, 19 nt, Homo sapiens
  misc_RNA (1)...(19): siRNA sense strand
cgcacaauauccagcgaga

SEQ ID NO: 2303199 - RNA, 19 nt, Homo sapiens
  misc_RNA (1)...(19): siRNA sense strand
ucuugguauuugugcgcaa

SEQ ID NO: 2303200 - RNA, 19 nt, Homo sapiens
  misc_RNA (1)...(19): siRNA sense strand
ucuugguauuugugcgcaa

SEQ ID NO: 2303201 - RNA, 19 nt, Homo sapiens
  misc_RNA (1)...(19): siRNA sense strand
gagcgaaucugcagggucu

SEQ ID NO: 2303202 - RNA, 19 nt, Homo sapiens
  misc_RNA (1)...(19): siRNA sense strand
uuccagagcucaaggccaa

SEQ ID NO: 2303203 - RNA, 19 nt, Homo sapiens
  misc_RNA (1)...(19): siRNA sense strand
ugaacugccucacgggaga

SEQ ID NO: 2303204 - RNA, 19 nt, Homo sapiens
  misc_RNA (1)...(19): siRNA sense strand
cggcuuagugcgucugaga

SEQ ID NO: 2303205 - RNA, 19 nt, Homo sapiens
  misc_RNA (1)...(19): siRNA sense strand
gugacauguacgagaaagu

SEQ ID NO: 2303206 - RNA, 19 nt, Homo sapiens
  misc_RNA (1)...(19): siRNA sense strand
gugacauguacgagaaagu

SEQ ID NO: 2303207 - RNA, 19 nt, Homo sapiens
  misc_RNA (1)...(19): siRNA sense strand
caagaaagucccugagcau

SEQ ID NO: 2303208 - RNA, 19 nt, Homo sapiens
  misc_RNA (1)...(19): siRNA sense strand
caguuaaggaagauaggaa

SEQ ID NO: 2303209 - RNA, 19 nt, Homo sapiens
  misc_RNA (1)...(19): siRNA sense strand
augaagggauccaggagaa

SEQ ID NO: 2303210 - RNA, 19 nt, Homo sapiens
  misc_RNA (1)...(19): siRNA sense strand
acugaagauccaagugaaa

SEQ ID NO: 2303211 - RNA, 19 nt, Homo sapiens
  misc_RNA (1)...(19): siRNA sense strand
cagcagaaagaauguaaau

SEQ ID NO: 2303212 - RNA, 19 nt, Homo sapiens
  misc_RNA (1)...(19): siRNA sense strand
cauaaugaaaugagaggca

SEQ ID NO: 2303213 - RNA, 19 nt, Homo sapiens
  misc_RNA (1)...(19): siRNA sense strand
ccaaaauggaguaugcaaa

SEQ ID NO: 2303214 - RNA, 19 nt, Homo sapiens
  misc_RNA (1)...(19): siRNA sense strand
aggaaaggccugaugacuu

SEQ ID NO: 2303215 - RNA, 19 nt, Homo sapiens
  misc_RNA (1)...(19): siRNA sense strand
uccauauccuccagagaaa

SEQ ID NO: 2303216 - RNA, 19 nt, Homo sapiens
  misc_RNA (1)...(19): siRNA sense strand
ugaccaagaacaagcagaa

SEQ ID NO: 2303217 - RNA, 19 nt, Homo sapiens
  misc_RNA (1)...(19): siRNA sense strand
gugaugaagcuguguguca

SEQ ID NO: 2303218 - RNA, 19 nt, Homo sapiens
  misc_RNA (1)...(19): siRNA sense strand
ggaucaugaccuaugcuaa

SEQ ID NO: 2303219 - RNA, 19 nt, Homo sapiens
  misc_RNA (1)...(19): siRNA sense strand
ugaaugaggcgguggggaa

SEQ ID NO: 2303220 - RNA, 19 nt, Homo sapiens
  misc_RNA (1)...(19): siRNA sense strand
ugaugaacucagugaugaa

SEQ ID NO: 2303221 - RNA, 19 nt, Homo sapiens
  misc_RNA (1)...(19): siRNA sense strand
ugaagauccaagugaaaga

SEQ ID NO: 2303222 - RNA, 19 nt, Homo sapiens
  misc_RNA (1)...(19): siRNA sense strand
agacaaggcuccuggcucu

SEQ ID NO: 2303223 - RNA, 19 nt, Homo sapiens
  misc_RNA (1)...(19): siRNA sense strand
ccugaugacuuuacggcuu

SEQ ID NO: 2303224 - RNA, 19 nt, Homo sapiens
  misc_RNA (1)...(19): siRNA sense strand
gcuaugagaaggagcgcca

SEQ ID NO: 2303225 - RNA, 19 nt, Homo sapiens
  misc_RNA (1)...(19): siRNA sense strand
ucaggaaagcccaagacaa

SEQ ID NO: 2303226 - RNA, 19 nt, Homo sapiens
  misc_RNA (1)...(19): siRNA sense strand
gauccaagugaaagacaca

SEQ ID NO: 2303227 - RNA, 19 nt, Homo sapiens
  misc_RNA (1)...(19): siRNA sense strand
uguaggugaccaagaacaa

SEQ ID NO: 2303228 - RNA, 19 nt, Homo sapiens
  misc_RNA (1)...(19): siRNA sense strand
uggacuggcugauggugaa

SEQ ID NO: 2303229 - RNA, 19 nt, Homo sapiens
  misc_RNA (1)...(19): siRNA sense strand
gagaugacucacaaagaga

SEQ ID NO: 2303230 - RNA, 19 nt, Homo sapiens
  misc_RNA (1)...(19): siRNA sense strand
ggcuauaugaggaugauga

SEQ ID NO: 2303231 - RNA, 19 nt, Homo sapiens
  misc_RNA (1)...(19): siRNA sense strand
cagagaggguggaagguuc

SEQ ID NO: 2303232 - RNA, 19 nt, Homo sapiens
  misc_RNA (1)...(19): siRNA sense strand
auguaauguuugccaagaa

SEQ ID NO: 2303233 - RNA, 19 nt, Homo sapiens
  misc_RNA (1)...(19): siRNA sense strand
uaugcaaaguugaugucua

SEQ ID NO: 2303234 - RNA, 19 nt, Homo sapiens
  misc_RNA (1)...(19): siRNA sense strand
auguaaaucucuagguuuc

SEQ ID NO: 2303235 - RNA, 19 nt, Homo sapiens
  misc_RNA (1)...(19): siRNA sense strand
uaaugaaaugagaggcaca

SEQ ID NO: 2303236 - RNA, 19 nt, Homo sapiens
  misc_RNA (1)...(19): siRNA sense strand
agaaggagcgccagcugaa

SEQ ID NO: 2303237 - RNA, 19 nt, Homo sapiens
  misc_RNA (1)...(19): siRNA sense strand
cggaacagccaguuaagga

SEQ ID NO: 2303238 - RNA, 19 nt, Homo sapiens
  misc_RNA (1)...(19): siRNA sense strand
ucuauaaggaaguguuuga

SEQ ID NO: 2303239 - RNA, 19 nt, Homo sapiens
  misc_RNA (1)...(19): siRNA sense strand
ucaugaagacacugaagau

SEQ ID NO: 2303240 - RNA, 19 nt, Homo sapiens
  misc_RNA (1)...(19): siRNA sense strand
cugaaacuaaauugagaga

SEQ ID NO: 2303241 - RNA, 19 nt, Homo sapiens
  misc_RNA (1)...(19): siRNA sense strand
guuaaggaagauaggaagu

SEQ ID NO: 2303242 - RNA, 19 nt, Homo sapiens
  misc_RNA (1)...(19): siRNA sense strand
agaaagucccugagcaugu

SEQ ID NO: 2303243 - RNA, 19 nt, Homo sapiens
  misc_RNA (1)...(19): siRNA sense strand
ccagggaggaagaagggau

SEQ ID NO: 2303244 - RNA, 19 nt, Homo sapiens
  misc_RNA (1)...(19): siRNA sense strand
ccucaguaagauagcauca

SEQ ID NO: 2303245 - RNA, 19 nt, Homo sapiens
  misc_RNA (1)...(19): siRNA sense strand
ggagaagaguacagcagag

SEQ ID NO: 2303246 - RNA, 19 nt, Homo sapiens
  misc_RNA (1)...(19): siRNA sense strand
ccaagaaagucccugagca

SEQ ID NO: 2303247 - RNA, 19 nt, Homo sapiens
  misc_RNA (1)...(19): siRNA sense strand
uugaguacccugaagauau

SEQ ID NO: 2303248 - RNA, 19 nt, Homo sapiens
  misc_RNA (1)...(19): siRNA sense strand
agccaaaaggccacagaua

SEQ ID NO: 2303249 - RNA, 19 nt, Homo sapiens
  misc_RNA (1)...(19): siRNA sense strand
gaacuuacuuagugagacc

SEQ ID NO: 2303250 - RNA, 19 nt, Homo sapiens
  misc_RNA (1)...(19): siRNA sense strand
aaucagaggaggagacuug

SEQ ID NO: 2303251 - RNA, 19 nt, Homo sapiens
  misc_RNA (1)...(19): siRNA sense strand
agacauuuccuuugaguac

SEQ ID NO: 2303252 - RNA, 19 nt, Homo sapiens
  misc_RNA (1)...(19): siRNA sense strand
aagaacaagcagaaaagaa

SEQ ID NO: 2303253 - RNA, 19 nt, Homo sapiens
  misc_RNA (1)...(19): siRNA sense strand
agugaaagacacaaccauu

SEQ ID NO: 2303254 - RNA, 19 nt, Homo sapiens
  misc_RNA (1)...(19): siRNA sense strand
ccuaucaagcuauccauaa

SEQ ID NO: 2303255 - RNA, 19 nt, Homo sapiens
  misc_RNA (1)...(19): siRNA sense strand
aaucacaaccuaacggaca

SEQ ID NO: 2303256 - RNA, 19 nt, Homo sapiens
  misc_RNA (1)...(19): siRNA sense strand
cgcaaagagaucaaugaga

SEQ ID NO: 2303257 - RNA, 19 nt, Homo sapiens
  misc_RNA (1)...(19): siRNA sense strand
ccaccaaaagccucaguaa

SEQ ID NO: 2303258 - RNA, 19 nt, Homo sapiens
  misc_RNA (1)...(19): siRNA sense strand
caaaagccucaguaagaua

SEQ ID NO: 2303259 - RNA, 19 nt, Homo sapiens
  misc_RNA (1)...(19): siRNA sense strand
cggaacuuacuuagugaga

SEQ ID NO: 2303260 - RNA, 19 nt, Homo sapiens
  misc_RNA (1)...(19): siRNA sense strand
cggccuucccagauaguuu

SEQ ID NO: 2303261 - RNA, 19 nt, Homo sapiens
  misc_RNA (1)...(19): siRNA sense strand
caaagagaucaaugagaag

SEQ ID NO: 2303262 - RNA, 19 nt, Homo sapiens
  misc_RNA (1)...(19): siRNA sense strand
agucauuguacauggggaa

SEQ ID NO: 2303263 - RNA, 19 nt, Homo sapiens
  misc_RNA (1)...(19): siRNA sense strand
gugcgaaaacucuggguga

SEQ ID NO: 2303264 - RNA, 19 nt, Homo sapiens
  misc_RNA (1)...(19): siRNA sense strand
gaaaaugacugguggguga

SEQ ID NO: 2303265 - RNA, 19 nt, Homo sapiens
  misc_RNA (1)...(19): siRNA sense strand
acauuaaagaaguggauga

SEQ ID NO: 2303266 - RNA, 19 nt, Homo sapiens
  misc_RNA (1)...(19): siRNA sense strand
gaacaaauuugcuguggga

SEQ ID NO: 2303267 - RNA, 19 nt, Homo sapiens
  misc_RNA (1)...(19): siRNA sense strand
cuauuuaugagguggacaa

SEQ ID NO: 2303268 - RNA, 19 nt, Homo sapiens
  misc_RNA (1)...(19): siRNA sense strand
ggccaugacugcugcccaa

SEQ ID NO: 2303269 - RNA, 19 nt, Homo sapiens
  misc_RNA (1)...(19): siRNA sense strand
gaaagaugguguuuggaag

SEQ ID NO: 2303270 - RNA, 19 nt, Homo sapiens
  misc_RNA (1)...(19): siRNA sense strand
ccacaacugaggaccgcaa

SEQ ID NO: 2303271 - RNA, 19 nt, Homo sapiens
  misc_RNA (1)...(19): siRNA sense strand
gggugaaagcucaugaacu

SEQ ID NO: 2303272 - RNA, 19 nt, Homo sapiens
  misc_RNA (1)...(19): siRNA sense strand
acaaauuugcugugggaag

SEQ ID NO: 2303273 - RNA, 19 nt, Homo sapiens
  misc_RNA (1)...(19): siRNA sense strand
cuacauuaaagaaguggau

SEQ ID NO: 2303274 - RNA, 19 nt, Homo sapiens
  misc_RNA (1)...(19): siRNA sense strand
ucaaggagcacaacggaca

SEQ ID NO: 2303275 - RNA, 19 nt, Homo sapiens
  misc_RNA (1)...(19): siRNA sense strand
aagaagaacgggagccagu

SEQ ID NO: 2303276 - RNA, 19 nt, Homo sapiens
  misc_RNA (1)...(19): siRNA sense strand
ugugggaaguggagcacga

SEQ ID NO: 2303277 - RNA, 19 nt, Homo sapiens
  misc_RNA (1)...(19): siRNA sense strand
ccaauaaucacgaagugca

SEQ ID NO: 2303278 - RNA, 19 nt, Homo sapiens
  misc_RNA (1)...(19): siRNA sense strand
cggacacaucacagguauu

SEQ ID NO: 2303279 - RNA, 19 nt, Homo sapiens
  misc_RNA (1)...(19): siRNA sense strand
uuguggacccagaggauuu

SEQ ID NO: 2303280 - RNA, 19 nt, Homo sapiens
  misc_RNA (1)...(19): siRNA sense strand
uuguggacccagaggauuu

SEQ ID NO: 2303281 - RNA, 19 nt, Homo sapiens
  misc_RNA (1)...(19): siRNA sense strand
aggaaggcucagaggaaua

SEQ ID NO: 2303282 - RNA, 19 nt, Homo sapiens
  misc_RNA (1)...(19): siRNA sense strand
agaggaauaacgaggacau

SEQ ID NO: 2303283 - RNA, 19 nt, Homo sapiens
  misc_RNA (1)...(19): siRNA sense strand
ccgucuucauuguggagau

SEQ ID NO: 2303284 - RNA, 19 nt, Homo sapiens
  misc_RNA (1)...(19): siRNA sense strand
cagaagagaaacuggacaa

SEQ ID NO: 2303285 - RNA, 19 nt, Homo sapiens
  misc_RNA (1)...(19): siRNA sense strand
ccgcagaagcugaucuaaa

SEQ ID NO: 2303286 - RNA, 19 nt, Homo sapiens
  misc_RNA (1)...(19): siRNA sense strand
augaagaagccuugaagaa

SEQ ID NO: 2303287 - RNA, 19 nt, Homo sapiens
  misc_RNA (1)...(19): siRNA sense strand
acgaaggauuccacggaua

SEQ ID NO: 2303288 - RNA, 19 nt, Homo sapiens
  misc_RNA (1)...(19): siRNA sense strand
cagcagaagaaccaagaaa

SEQ ID NO: 2303289 - RNA, 19 nt, Homo sapiens
  misc_RNA (1)...(19): siRNA sense strand
agaccaaauccuugaguuu

SEQ ID NO: 2303290 - RNA, 19 nt, Homo sapiens
  misc_RNA (1)...(19): siRNA sense strand
caagaauuucagagaagaa

SEQ ID NO: 2303291 - RNA, 19 nt, Homo sapiens
  misc_RNA (1)...(19): siRNA sense strand
gauccuagucagugggaga

SEQ ID NO: 2303292 - RNA, 19 nt, Homo sapiens
  misc_RNA (1)...(19): siRNA sense strand
gaacaaaagcaaaggcuga

SEQ ID NO: 2303293 - RNA, 19 nt, Homo sapiens
  misc_RNA (1)...(19): siRNA sense strand
aacaagaggagcagcgaua

SEQ ID NO: 2303294 - RNA, 19 nt, Homo sapiens
  misc_RNA (1)...(19): siRNA sense strand
gaguuaaacaagaggagca

SEQ ID NO: 2303295 - RNA, 19 nt, Homo sapiens
  misc_RNA (1)...(19): siRNA sense strand
cagaggaagaccuggagua

SEQ ID NO: 2303296 - RNA, 19 nt, Homo sapiens
  misc_RNA (1)...(19): siRNA sense strand
gaggaaaauuguagcugaa

SEQ ID NO: 2303297 - RNA, 19 nt, Homo sapiens
  misc_RNA (1)...(19): siRNA sense strand
cagagaagaaccugaacau

SEQ ID NO: 2303298 - RNA, 19 nt, Homo sapiens
  misc_RNA (1)...(19): siRNA sense strand
cuggaaggguucaagaaga

SEQ ID NO: 2303299 - RNA, 19 nt, Homo sapiens
  misc_RNA (1)...(19): siRNA sense strand
gugccgaggugaaagguga

SEQ ID NO: 2303300 - RNA, 19 nt, Homo sapiens
  misc_RNA (1)...(19): siRNA sense strand
gagaaggagacgugccaga

SEQ ID NO: 2303301 - RNA, 19 nt, Homo sapiens
  misc_RNA (1)...(19): siRNA sense strand
ggccaaaagccaagaauca

SEQ ID NO: 2303302 - RNA, 19 nt, Homo sapiens
  misc_RNA (1)...(19): siRNA sense strand
cuuaacaagcagugacuuu

SEQ ID NO: 2303303 - RNA, 19 nt, Homo sapiens
  misc_RNA (1)...(19): siRNA sense strand
ugaaaagacuauugcucaa

SEQ ID NO: 2303304 - RNA, 19 nt, Homo sapiens
  misc_RNA (1)...(19): siRNA sense strand
cacaagaagcugaugaaca

SEQ ID NO: 2303305 - RNA, 19 nt, Homo sapiens
  misc_RNA (1)...(19): siRNA sense strand
aaggaagcuuggcaggaaa

SEQ ID NO: 2303306 - RNA, 19 nt, Homo sapiens
  misc_RNA (1)...(19): siRNA sense strand
aaggugagccagaggaaga

SEQ ID NO: 2303307 - RNA, 19 nt, Homo sapiens
  misc_RNA (1)...(19): siRNA sense strand
ggcaagaaguuuuggagau

SEQ ID NO: 2303308 - RNA, 19 nt, Homo sapiens
  misc_RNA (1)...(19): siRNA sense strand
ucaauagaaacgaaggauu

SEQ ID NO: 2303309 - RNA, 19 nt, Homo sapiens
  misc_RNA (1)...(19): siRNA sense strand
aauccacgcagaagagaaa

SEQ ID NO: 2303310 - RNA, 19 nt, Homo sapiens
  misc_RNA (1)...(19): siRNA sense strand
ugaacagcuuguagcagaa

SEQ ID NO: 2303311 - RNA, 19 nt, Homo sapiens
  misc_RNA (1)...(19): siRNA sense strand
gaagcaaaugaauggaaga

SEQ ID NO: 2303312 - RNA, 19 nt, Homo sapiens
  misc_RNA (1)...(19): siRNA sense strand
gucaagaauuucagagaag

SEQ ID NO: 2303313 - RNA, 19 nt, Homo sapiens
  misc_RNA (1)...(19): siRNA sense strand
acgaguggcuguaagguga

SEQ ID NO: 2303314 - RNA, 19 nt, Homo sapiens
  misc_RNA (1)...(19): siRNA sense strand
aagcaaaggcugagagugc

SEQ ID NO: 2303315 - RNA, 19 nt, Homo sapiens
  misc_RNA (1)...(19): siRNA sense strand
uggacaaagccaaugaaga

SEQ ID NO: 2303316 - RNA, 19 nt, Homo sapiens
  misc_RNA (1)...(19): siRNA sense strand
cggcaguccucggaacaaa

SEQ ID NO: 2303317 - RNA, 19 nt, Homo sapiens
  misc_RNA (1)...(19): siRNA sense strand
aagcaggcauagagaagga

SEQ ID NO: 2303318 - RNA, 19 nt, Homo sapiens
  misc_RNA (1)...(19): siRNA sense strand
ugaccauggagaaggaaca

SEQ ID NO: 2303319 - RNA, 19 nt, Homo sapiens
  misc_RNA (1)...(19): siRNA sense strand
gaaacauagaggccaggaa

SEQ ID NO: 2303320 - RNA, 19 nt, Homo sapiens
  misc_RNA (1)...(19): siRNA sense strand
ccaacuacgaccuuaacaa

SEQ ID NO: 2303321 - RNA, 19 nt, Homo sapiens
  misc_RNA (1)...(19): siRNA sense strand
augaacagcuuguagcaga

SEQ ID NO: 2303322 - RNA, 19 nt, Homo sapiens
  misc_RNA (1)...(19): siRNA sense strand
aagcaaaugaauggaagaa

SEQ ID NO: 2303323 - RNA, 19 nt, Homo sapiens
  misc_RNA (1)...(19): siRNA sense strand
gcuuguagcagaagugguu

SEQ ID NO: 2303324 - RNA, 19 nt, Homo sapiens
  misc_RNA (1)...(19): siRNA sense strand
cagucaagaauuucagaga

SEQ ID NO: 2303325 - RNA, 19 nt, Homo sapiens
  misc_RNA (1)...(19): siRNA sense strand
agacauuucuaauagggau

SEQ ID NO: 2303326 - RNA, 19 nt, Homo sapiens
  misc_RNA (1)...(19): siRNA sense strand
aggugaaaggugagccaga

SEQ ID NO: 2303327 - RNA, 19 nt, Homo sapiens
  misc_RNA (1)...(19): siRNA sense strand
aggacgaggcgaugacaga

SEQ ID NO: 2303328 - RNA, 19 nt, Homo sapiens
  misc_RNA (1)...(19): siRNA sense strand
gauuacuuagccagaguua

SEQ ID NO: 2303329 - RNA, 19 nt, Homo sapiens
  misc_RNA (1)...(19): siRNA sense strand
gggaucugccucagcgaau

SEQ ID NO: 2303330 - RNA, 19 nt, Homo sapiens
  misc_RNA (1)...(19): siRNA sense strand
accaagaaauugaagaacu

SEQ ID NO: 2303331 - RNA, 19 nt, Homo sapiens
  misc_RNA (1)...(19): siRNA sense strand
aagaggugaucgagggcua

SEQ ID NO: 2303332 - RNA, 19 nt, Homo sapiens
  misc_RNA (1)...(19): siRNA sense strand
gugaggagcuccacgggaa

SEQ ID NO: 2303333 - RNA, 19 nt, Homo sapiens
  misc_RNA (1)...(19): siRNA sense strand
ucaaggaaguggaugccaa

SEQ ID NO: 2303334 - RNA, 19 nt, Homo sapiens
  misc_RNA (1)...(19): siRNA sense strand
ggaaggagcagaugcgcau

SEQ ID NO: 2303335 - RNA, 19 nt, Homo sapiens
  misc_RNA (1)...(19): siRNA sense strand
ggaaagcagcagugaggca

SEQ ID NO: 2303336 - RNA, 19 nt, Homo sapiens
  misc_RNA (1)...(19): siRNA sense strand
agaaacagaaagaggugau

SEQ ID NO: 2303337 - RNA, 19 nt, Homo sapiens
  misc_RNA (1)...(19): siRNA sense strand
cuaaagagaacgaggagcu

SEQ ID NO: 2303338 - RNA, 19 nt, Homo sapiens
  misc_RNA (1)...(19): siRNA sense strand
aggcgacacaggaggagaa

SEQ ID NO: 2303339 - RNA, 19 nt, Homo sapiens
  misc_RNA (1)...(19): siRNA sense strand
uggagaagacaguggagca

SEQ ID NO: 2303340 - RNA, 19 nt, Homo sapiens
  misc_RNA (1)...(19): siRNA sense strand
agaaaccaguggaggcuga

SEQ ID NO: 2303341 - RNA, 19 nt, Homo sapiens
  misc_RNA (1)...(19): siRNA sense strand
ugaagaagugcguggagga

SEQ ID NO: 2303342 - RNA, 19 nt, Homo sapiens
  misc_RNA (1)...(19): siRNA sense strand
gaggagagcuucagagacc

SEQ ID NO: 2303343 - RNA, 19 nt, Homo sapiens
  misc_RNA (1)...(19): siRNA sense strand
aggaaguucagaagcagaa

SEQ ID NO: 2303344 - RNA, 19 nt, Homo sapiens
  misc_RNA (1)...(19): siRNA sense strand
acaaaauggaugacccaaa

SEQ ID NO: 2303345 - RNA, 19 nt, Homo sapiens
  misc_RNA (1)...(19): siRNA sense strand
aggagucggccuugaggaa

SEQ ID NO: 2303346 - RNA, 19 nt, Homo sapiens
  misc_RNA (1)...(19): siRNA sense strand
ccuuggagcugaaagagga

SEQ ID NO: 2303347 - RNA, 19 nt, Homo sapiens
  misc_RNA (1)...(19): siRNA sense strand
gguucgaagagguugugua

SEQ ID NO: 2303348 - RNA, 19 nt, Homo sapiens
  misc_RNA (1)...(19): siRNA sense strand
gccaaagcuaugaagguga

SEQ ID NO: 2303349 - RNA, 19 nt, Homo sapiens
  misc_RNA (1)...(19): siRNA sense strand
agcaagccguggaggaaaa

SEQ ID NO: 2303350 - RNA, 19 nt, Homo sapiens
  misc_RNA (1)...(19): siRNA sense strand
cagcagugaggcagcaaaa

SEQ ID NO: 2303351 - RNA, 19 nt, Homo sapiens
  misc_RNA (1)...(19): siRNA sense strand
aggagguggaggaggacga

SEQ ID NO: 2303352 - RNA, 19 nt, Homo sapiens
  misc_RNA (1)...(19): siRNA sense strand
ggacaaaauggaugaccca

SEQ ID NO: 2303353 - RNA, 19 nt, Homo sapiens
  misc_RNA (1)...(19): siRNA sense strand
agacuaaagagaacgagga

SEQ ID NO: 2303354 - RNA, 19 nt, Homo sapiens
  misc_RNA (1)...(19): siRNA sense strand
ccccaacagcagagagcaa

SEQ ID NO: 2303355 - RNA, 19 nt, Homo sapiens
  misc_RNA (1)...(19): siRNA sense strand
cugcaggucuuaaacgaca

SEQ ID NO: 2303356 - RNA, 19 nt, Homo sapiens
  misc_RNA (1)...(19): siRNA sense strand
cuagaagacccuugcagga

SEQ ID NO: 2303357 - RNA, 19 nt, Homo sapiens
  misc_RNA (1)...(19): siRNA sense strand
caccaaggagacugggaga

SEQ ID NO: 2303358 - RNA, 19 nt, Homo sapiens
  misc_RNA (1)...(19): siRNA sense strand
accagaaguuaccggaaga

SEQ ID NO: 2303359 - RNA, 19 nt, Homo sapiens
  misc_RNA (1)...(19): siRNA sense strand
gaggaaguucagaagcaga

SEQ ID NO: 2303360 - RNA, 19 nt, Homo sapiens
  misc_RNA (1)...(19): siRNA sense strand
acaguggagcagaagacua

SEQ ID NO: 2303361 - RNA, 19 nt, Homo sapiens
  misc_RNA (1)...(19): siRNA sense strand
gcaagagcaaggaccgcaa

SEQ ID NO: 2303362 - RNA, 19 nt, Homo sapiens
  misc_RNA (1)...(19): siRNA sense strand
cggccaacggagacgugaa

SEQ ID NO: 2303363 - RNA, 19 nt, Homo sapiens
  misc_RNA (1)...(19): siRNA sense strand
cuggaagauuacacgccua

SEQ ID NO: 2303364 - RNA, 19 nt, Homo sapiens
  misc_RNA (1)...(19): siRNA sense strand
gggcaacacacuacgggaa

SEQ ID NO: 2303365 - RNA, 19 nt, Homo sapiens
  misc_RNA (1)...(19): siRNA sense strand
aagagaagauggagugcga

SEQ ID NO: 2303366 - RNA, 19 nt, Homo sapiens
  misc_RNA (1)...(19): siRNA sense strand
gcaccgacagucagggcaa

SEQ ID NO: 2303367 - RNA, 19 nt, Homo sapiens
  misc_RNA (1)...(19): siRNA sense strand
uggaauggauccuggagca

SEQ ID NO: 2303368 - RNA, 19 nt, Homo sapiens
  misc_RNA (1)...(19): siRNA sense strand
cugucuaguccgacgggaa

SEQ ID NO: 2303369 - RNA, 19 nt, Homo sapiens
  misc_RNA (1)...(19): siRNA sense strand
gcugaagagaagauggagu

SEQ ID NO: 2303370 - RNA, 19 nt, Homo sapiens
  misc_RNA (1)...(19): siRNA sense strand
cggcugaagagaagaugga

SEQ ID NO: 2303371 - RNA, 19 nt, Homo sapiens
  misc_RNA (1)...(19): siRNA sense strand
gcuucuucucugaggucua

SEQ ID NO: 2303372 - RNA, 19 nt, Homo sapiens
  misc_RNA (1)...(19): siRNA sense strand
aagucauggugcugaagau

SEQ ID NO: 2303373 - RNA, 19 nt, Homo sapiens
  misc_RNA (1)...(19): siRNA sense strand
gcaaugagauuuaccgcaa

SEQ ID NO: 2303374 - RNA, 19 nt, Homo sapiens
  misc_RNA (1)...(19): siRNA sense strand
ggagaaagaaucaacggaa

SEQ ID NO: 2303375 - RNA, 19 nt, Homo sapiens
  misc_RNA (1)...(19): siRNA sense strand
gagaaagaaucaacggaag

SEQ ID NO: 2303376 - RNA, 19 nt, Homo sapiens
  misc_RNA (1)...(19): siRNA sense strand
gggagauaaucgagggcug

SEQ ID NO: 2303377 - RNA, 19 nt, Homo sapiens
  misc_RNA (1)...(19): siRNA sense strand
agccaggacggaagcgaaa

SEQ ID NO: 2303378 - RNA, 19 nt, Homo sapiens
  misc_RNA (1)...(19): siRNA sense strand
acgacauccuccaggcaau

SEQ ID NO: 2303379 - RNA, 19 nt, Homo sapiens
  misc_RNA (1)...(19): siRNA sense strand
gaguaugacuguaagggcu

SEQ ID NO: 2303380 - RNA, 19 nt, Homo sapiens
  misc_RNA (1)...(19): siRNA sense strand
caucaaugagauuagugaa

SEQ ID NO: 2303381 - RNA, 19 nt, Homo sapiens
  misc_RNA (1)...(19): siRNA sense strand
ucaagaaggaggaugucau

SEQ ID NO: 2303382 - RNA, 19 nt, Homo sapiens
  misc_RNA (1)...(19): siRNA sense strand
gaugaggacucccaggaca

SEQ ID NO: 2303383 - RNA, 19 nt, Homo sapiens
  misc_RNA (1)...(19): siRNA sense strand
ggacaucaguggccggaag

SEQ ID NO: 2303384 - RNA, 19 nt, Homo sapiens
  misc_RNA (1)...(19): siRNA sense strand
cagccaggacggaagcgaa

SEQ ID NO: 2303385 - RNA, 19 nt, Homo sapiens
  misc_RNA (1)...(19): siRNA sense strand
aggacagcucugauggaau

SEQ ID NO: 2303386 - RNA, 19 nt, Homo sapiens
  misc_RNA (1)...(19): siRNA sense strand
gcaaugagauuuaccgcaa

SEQ ID NO: 2303387 - RNA, 19 nt, Homo sapiens
  misc_RNA (1)...(19): siRNA sense strand
ggagaaagaaucaacggaa

SEQ ID NO: 2303388 - RNA, 19 nt, Homo sapiens
  misc_RNA (1)...(19): siRNA sense strand
gagaaagaaucaacggaag

SEQ ID NO: 2303389 - RNA, 19 nt, Homo sapiens
  misc_RNA (1)...(19): siRNA sense strand
gggagauaaucgagggcug

SEQ ID NO: 2303390 - RNA, 19 nt, Homo sapiens
  misc_RNA (1)...(19): siRNA sense strand
agccaggacggaagcgaaa

SEQ ID NO: 2303391 - RNA, 19 nt, Homo sapiens
  misc_RNA (1)...(19): siRNA sense strand
acgacauccuccaggcaau

SEQ ID NO: 2303392 - RNA, 19 nt, Homo sapiens
  misc_RNA (1)...(19): siRNA sense strand
gaguaugacuguaagggcu

SEQ ID NO: 2303393 - RNA, 19 nt, Homo sapiens
  misc_RNA (1)...(19): siRNA sense strand
caucaaugagauuagugaa

SEQ ID NO: 2303394 - RNA, 19 nt, Homo sapiens
  misc_RNA (1)...(19): siRNA sense strand
ucaagaaggaggaugucau

SEQ ID NO: 2303395 - RNA, 19 nt, Homo sapiens
  misc_RNA (1)...(19): siRNA sense strand
gaugaggacucccaggaca

SEQ ID NO: 2303396 - RNA, 19 nt, Homo sapiens
  misc_RNA (1)...(19): siRNA sense strand
ggacaucaguggccggaag

SEQ ID NO: 2303397 - RNA, 19 nt, Homo sapiens
  misc_RNA (1)...(19): siRNA sense strand
cagccaggacggaagcgaa

SEQ ID NO: 2303398 - RNA, 19 nt, Homo sapiens
  misc_RNA (1)...(19): siRNA sense strand
aggacagcucugauggaau

SEQ ID NO: 2303399 - RNA, 19 nt, Homo sapiens
  misc_RNA (1)...(19): siRNA sense strand
gcaaugagauuuaccgcaa

SEQ ID NO: 2303400 - RNA, 19 nt, Homo sapiens
  misc_RNA (1)...(19): siRNA sense strand
ggagaaagaaucaacggaa

SEQ ID NO: 2303401 - RNA, 19 nt, Homo sapiens
  misc_RNA (1)...(19): siRNA sense strand
gagaaagaaucaacggaag

SEQ ID NO: 2303402 - RNA, 19 nt, Homo sapiens
  misc_RNA (1)...(19): siRNA sense strand
gggagauaaucgagggcug

SEQ ID NO: 2303403 - RNA, 19 nt, Homo sapiens
  misc_RNA (1)...(19): siRNA sense strand
agccaggacggaagcgaaa

SEQ ID NO: 2303404 - RNA, 19 nt, Homo sapiens
  misc_RNA (1)...(19): siRNA sense strand
acgacauccuccaggcaau

SEQ ID NO: 2303405 - RNA, 19 nt, Homo sapiens
  misc_RNA (1)...(19): siRNA sense strand
gaguaugacuguaagggcu

SEQ ID NO: 2303406 - RNA, 19 nt, Homo sapiens
  misc_RNA (1)...(19): siRNA sense strand
caucaaugagauuagugaa

SEQ ID NO: 2303407 - RNA, 19 nt, Homo sapiens
  misc_RNA (1)...(19): siRNA sense strand
ucaagaaggaggaugucau

SEQ ID NO: 2303408 - RNA, 19 nt, Homo sapiens
  misc_RNA (1)...(19): siRNA sense strand
gaugaggacucccaggaca

SEQ ID NO: 2303409 - RNA, 19 nt, Homo sapiens
  misc_RNA (1)...(19): siRNA sense strand
ggacaucaguggccggaag

SEQ ID NO: 2303410 - RNA, 19 nt, Homo sapiens
  misc_RNA (1)...(19): siRNA sense strand
cagccaggacggaagcgaa

SEQ ID NO: 2303411 - RNA, 19 nt, Homo sapiens
  misc_RNA (1)...(19): siRNA sense strand
aggacagcucugauggaau

SEQ ID NO: 2303412 - RNA, 19 nt, Homo sapiens
  misc_RNA (1)...(19): siRNA sense strand
gggacgagcaagugcagaa

SEQ ID NO: 2303413 - RNA, 19 nt, Homo sapiens
  misc_RNA (1)...(19): siRNA sense strand
cagacuugguacugaggaa

SEQ ID NO: 2303414 - RNA, 19 nt, Homo sapiens
  misc_RNA (1)...(19): siRNA sense strand
caaaaggacagaagagcaa

SEQ ID NO: 2303415 - RNA, 19 nt, Homo sapiens
  misc_RNA (1)...(19): siRNA sense strand
gcucaaggaaacagacaca

SEQ ID NO: 2303416 - RNA, 19 nt, Homo sapiens
  misc_RNA (1)...(19): siRNA sense strand
gaaaaugagaugaaggaga

SEQ ID NO: 2303417 - RNA, 19 nt, Homo sapiens
  misc_RNA (1)...(19): siRNA sense strand
acaagaaauggcaggaaaa

SEQ ID NO: 2303418 - RNA, 19 nt, Homo sapiens
  misc_RNA (1)...(19): siRNA sense strand
uuugaaaguggguggaauu

SEQ ID NO: 2303419 - RNA, 19 nt, Homo sapiens
  misc_RNA (1)...(19): siRNA sense strand
aggcuuuguauuugagcaa

SEQ ID NO: 2303420 - RNA, 19 nt, Homo sapiens
  misc_RNA (1)...(19): siRNA sense strand
agagauuucaugaggccaa

SEQ ID NO: 2303421 - RNA, 19 nt, Homo sapiens
  misc_RNA (1)...(19): siRNA sense strand
aaacgaacggugacggcaa

SEQ ID NO: 2303422 - RNA, 19 nt, Homo sapiens
  misc_RNA (1)...(19): siRNA sense strand
aguacuuaauggugauaga

SEQ ID NO: 2303423 - RNA, 19 nt, Homo sapiens
  misc_RNA (1)...(19): siRNA sense strand
ggcaaaagaaucaaaacaa

SEQ ID NO: 2303424 - RNA, 19 nt, Homo sapiens
  misc_RNA (1)...(19): siRNA sense strand
acgaaugcuuucaguucaa

SEQ ID NO: 2303425 - RNA, 19 nt, Homo sapiens
  misc_RNA (1)...(19): siRNA sense strand
ggaaugaugaaugggacaa

SEQ ID NO: 2303426 - RNA, 19 nt, Homo sapiens
  misc_RNA (1)...(19): siRNA sense strand
ccgcaaaguuggaugaagc

SEQ ID NO: 2303427 - RNA, 19 nt, Homo sapiens
  misc_RNA (1)...(19): siRNA sense strand
ccacagagcuggaaacgac

SEQ ID NO: 2303428 - RNA, 19 nt, Homo sapiens
  misc_RNA (1)...(19): siRNA sense strand
uggaaugaugaaugggaca

SEQ ID NO: 2303429 - RNA, 19 nt, Homo sapiens
  misc_RNA (1)...(19): siRNA sense strand
cuuuaaauuccgcuggcaa

SEQ ID NO: 2303430 - RNA, 19 nt, Homo sapiens
  misc_RNA (1)...(19): siRNA sense strand
aaagaguacuuaaugguga

SEQ ID NO: 2303431 - RNA, 19 nt, Homo sapiens
  misc_RNA (1)...(19): siRNA sense strand
ucaagcagauguauggcua

SEQ ID NO: 2303432 - RNA, 19 nt, Homo sapiens
  misc_RNA (1)...(19): siRNA sense strand
ggggaagauuugaagacuu

SEQ ID NO: 2303433 - RNA, 19 nt, Homo sapiens
  misc_RNA (1)...(19): siRNA sense strand
aguacaacucacuggaaga

SEQ ID NO: 2303434 - RNA, 19 nt, Homo sapiens
  misc_RNA (1)...(19): siRNA sense strand
cggcaaaagaaucaaaaca

SEQ ID NO: 2303435 - RNA, 19 nt, Homo sapiens
  misc_RNA (1)...(19): siRNA sense strand
uggaaagccagaagaaacu

SEQ ID NO: 2303436 - RNA, 19 nt, Homo sapiens
  misc_RNA (1)...(19): siRNA sense strand
cccaggaaugcuacagaua

SEQ ID NO: 2303437 - RNA, 19 nt, Homo sapiens
  misc_RNA (1)...(19): siRNA sense strand
gcugugaagauacgggaga

SEQ ID NO: 2303438 - RNA, 19 nt, Homo sapiens
  misc_RNA (1)...(19): siRNA sense strand
acuggaagaaauacacaua

SEQ ID NO: 2303439 - RNA, 19 nt, Homo sapiens
  misc_RNA (1)...(19): siRNA sense strand
ugaagauacgggagagaac

SEQ ID NO: 2303440 - RNA, 19 nt, Homo sapiens
  misc_RNA (1)...(19): siRNA sense strand
augcuaagaaguuuggaau

SEQ ID NO: 2303441 - RNA, 19 nt, Homo sapiens
  misc_RNA (1)...(19): siRNA sense strand
agaugaaggagaagcucuu

SEQ ID NO: 2303442 - RNA, 19 nt, Homo sapiens
  misc_RNA (1)...(19): siRNA sense strand
acauauuuguccuuugcaa

SEQ ID NO: 2303443 - RNA, 19 nt, Homo sapiens
  misc_RNA (1)...(19): siRNA sense strand
guacaagaaauggcaggaa

SEQ ID NO: 2303444 - RNA, 19 nt, Homo sapiens
  misc_RNA (1)...(19): siRNA sense strand
aagaaaucaaucugguaga

SEQ ID NO: 2303445 - RNA, 19 nt, Homo sapiens
  misc_RNA (1)...(19): siRNA sense strand
uuuaaugggaucugcagua

SEQ ID NO: 2303446 - RNA, 19 nt, Homo sapiens
  misc_RNA (1)...(19): siRNA sense strand
caagcagauguauggcuaa

SEQ ID NO: 2303447 - RNA, 19 nt, Homo sapiens
  misc_RNA (1)...(19): siRNA sense strand
gcgaagaagaagaaggaga

SEQ ID NO: 2303448 - RNA, 19 nt, Homo sapiens
  misc_RNA (1)...(19): siRNA sense strand
ggaagaagaagaaggguca

SEQ ID NO: 2303449 - RNA, 19 nt, Homo sapiens
  misc_RNA (1)...(19): siRNA sense strand
gagaagaagaagaagucca

SEQ ID NO: 2303450 - RNA, 19 nt, Homo sapiens
  misc_RNA (1)...(19): siRNA sense strand
aagaaggagaagaagaaga

SEQ ID NO: 2303451 - RNA, 19 nt, Homo sapiens
  misc_RNA (1)...(19): siRNA sense strand
gggaagaagaagaaggguc

SEQ ID NO: 2303452 - RNA, 19 nt, Homo sapiens
  misc_RNA (1)...(19): siRNA sense strand
gagcagaauuggcagguac

SEQ ID NO: 2303453 - RNA, 19 nt, Homo sapiens
  misc_RNA (1)...(19): siRNA sense strand
acagugaggucaagcgcau

SEQ ID NO: 2303454 - RNA, 19 nt, Homo sapiens
  misc_RNA (1)...(19): siRNA sense strand
cugacgaauuacagggcca

SEQ ID NO: 2303455 - RNA, 19 nt, Homo sapiens
  misc_RNA (1)...(19): siRNA sense strand
accaaagggaagaagaaga

SEQ ID NO: 2303456 - RNA, 19 nt, Homo sapiens
  misc_RNA (1)...(19): siRNA sense strand
cuguggagacccuggaaaa

SEQ ID NO: 2303457 - RNA, 19 nt, Homo sapiens
  misc_RNA (1)...(19): siRNA sense strand
ucucagagcugcagggcug

SEQ ID NO: 2303458 - RNA, 19 nt, Homo sapiens
  misc_RNA (1)...(19): siRNA sense strand
aaggagaagaagaagaagu

SEQ ID NO: 2303459 - RNA, 19 nt, Homo sapiens
  misc_RNA (1)...(19): siRNA sense strand
uauccaacagugaggucaa

SEQ ID NO: 2303460 - RNA, 19 nt, Homo sapiens
  misc_RNA (1)...(19): siRNA sense strand
aagaagaagaaggagaaga

SEQ ID NO: 2303461 - RNA, 19 nt, Homo sapiens
  misc_RNA (1)...(19): siRNA sense strand
gcucacagauaaagcgggu

SEQ ID NO: 2303462 - RNA, 19 nt, Homo sapiens
  misc_RNA (1)...(19): siRNA sense strand
uguacgagcugcugcgcga

SEQ ID NO: 2303463 - RNA, 19 nt, Homo sapiens
  misc_RNA (1)...(19): siRNA sense strand
cuggguacauccuggccaa

SEQ ID NO: 2303464 - RNA, 19 nt, Homo sapiens
  misc_RNA (1)...(19): siRNA sense strand
ccaagaagcugaugcacca

SEQ ID NO: 2303465 - RNA, 19 nt, Homo sapiens
  misc_RNA (1)...(19): siRNA sense strand
ggccauaggucgaguccca

SEQ ID NO: 2303466 - RNA, 19 nt, Homo sapiens
  misc_RNA (1)...(19): siRNA sense strand
uggcagaagcuguucaaaa

SEQ ID NO: 2303467 - RNA, 19 nt, Homo sapiens
  misc_RNA (1)...(19): siRNA sense strand
guaaagauggugugccuga

SEQ ID NO: 2303468 - RNA, 19 nt, Homo sapiens
  misc_RNA (1)...(19): siRNA sense strand
ggaaagagauucugcuguc

SEQ ID NO: 2303469 - RNA, 19 nt, Homo sapiens
  misc_RNA (1)...(19): siRNA sense strand
auguaaagauggugugccu

SEQ ID NO: 2303470 - RNA, 19 nt, Homo sapiens
  misc_RNA (1)...(19): siRNA sense strand
ggaagauggcagaagcugu

SEQ ID NO: 2303471 - RNA, 19 nt, Homo sapiens
  misc_RNA (1)...(19): siRNA sense strand
auuauaaaccacuggaguu

SEQ ID NO: 2303472 - RNA, 19 nt, Homo sapiens
  misc_RNA (1)...(19): siRNA sense strand
ccauggucauagagcacau

SEQ ID NO: 2303473 - RNA, 19 nt, Homo sapiens
  misc_RNA (1)...(19): siRNA sense strand
gugccuuggaauauggaau

SEQ ID NO: 2303474 - RNA, 19 nt, Homo sapiens
  misc_RNA (1)...(19): siRNA sense strand
caaauguccuccaugguca

SEQ ID NO: 2303475 - RNA, 19 nt, Homo sapiens
  misc_RNA (1)...(19): siRNA sense strand
ccacaugcucugaggaggu

SEQ ID NO: 2303476 - RNA, 19 nt, Homo sapiens
  misc_RNA (1)...(19): siRNA sense strand
agguggccgugguggacua

SEQ ID NO: 2303477 - RNA, 19 nt, Homo sapiens
  misc_RNA (1)...(19): siRNA sense strand
cguugccaaaggugggaaa

SEQ ID NO: 2303478 - RNA, 19 nt, Homo sapiens
  misc_RNA (1)...(19): siRNA sense strand
gcacacgguuugcggcguu

SEQ ID NO: 2303479 - RNA, 19 nt, Homo sapiens
  misc_RNA (1)...(19): siRNA sense strand
ggccauaggucgaguccca

SEQ ID NO: 2303480 - RNA, 19 nt, Homo sapiens
  misc_RNA (1)...(19): siRNA sense strand
uggcagaagcuguucaaaa

SEQ ID NO: 2303481 - RNA, 19 nt, Homo sapiens
  misc_RNA (1)...(19): siRNA sense strand
guaaagauggugugccuga

SEQ ID NO: 2303482 - RNA, 19 nt, Homo sapiens
  misc_RNA (1)...(19): siRNA sense strand
ggaaagagauucugcuguc

SEQ ID NO: 2303483 - RNA, 19 nt, Homo sapiens
  misc_RNA (1)...(19): siRNA sense strand
auguaaagauggugugccu

SEQ ID NO: 2303484 - RNA, 19 nt, Homo sapiens
  misc_RNA (1)...(19): siRNA sense strand
ggaagauggcagaagcugu

SEQ ID NO: 2303485 - RNA, 19 nt, Homo sapiens
  misc_RNA (1)...(19): siRNA sense strand
auuauaaaccacuggaguu

SEQ ID NO: 2303486 - RNA, 19 nt, Homo sapiens
  misc_RNA (1)...(19): siRNA sense strand
ccauggucauagagcacau

SEQ ID NO: 2303487 - RNA, 19 nt, Homo sapiens
  misc_RNA (1)...(19): siRNA sense strand
gugccuuggaauauggaau

SEQ ID NO: 2303488 - RNA, 19 nt, Homo sapiens
  misc_RNA (1)...(19): siRNA sense strand
caaauguccuccaugguca

SEQ ID NO: 2303489 - RNA, 19 nt, Homo sapiens
  misc_RNA (1)...(19): siRNA sense strand
ccacaugcucugaggaggu

SEQ ID NO: 2303490 - RNA, 19 nt, Homo sapiens
  misc_RNA (1)...(19): siRNA sense strand
cguugccaaaggugggaaa

SEQ ID NO: 2303491 - RNA, 19 nt, Homo sapiens
  misc_RNA (1)...(19): siRNA sense strand
gcacacgguuugcggcguu

SEQ ID NO: 2303492 - RNA, 19 nt, Homo sapiens
  misc_RNA (1)...(19): siRNA sense strand
ccaagaagcugaugcacca

SEQ ID NO: 2303493 - RNA, 19 nt, Homo sapiens
  misc_RNA (1)...(19): siRNA sense strand
ggccauaggucgaguccca

SEQ ID NO: 2303494 - RNA, 19 nt, Homo sapiens
  misc_RNA (1)...(19): siRNA sense strand
uggcagaagcuguucaaaa

SEQ ID NO: 2303495 - RNA, 19 nt, Homo sapiens
  misc_RNA (1)...(19): siRNA sense strand
guaaagauggugugccuga

SEQ ID NO: 2303496 - RNA, 19 nt, Homo sapiens
  misc_RNA (1)...(19): siRNA sense strand
ggaaagagauucugcuguc

SEQ ID NO: 2303497 - RNA, 19 nt, Homo sapiens
  misc_RNA (1)...(19): siRNA sense strand
auguaaagauggugugccu

SEQ ID NO: 2303498 - RNA, 19 nt, Homo sapiens
  misc_RNA (1)...(19): siRNA sense strand
ggaagauggcagaagcugu

SEQ ID NO: 2303499 - RNA, 19 nt, Homo sapiens
  misc_RNA (1)...(19): siRNA sense strand
auuauaaaccacuggaguu

SEQ ID NO: 2303500 - RNA, 19 nt, Homo sapiens
  misc_RNA (1)...(19): siRNA sense strand
ccauggucauagagcacau

SEQ ID NO: 2303501 - RNA, 19 nt, Homo sapiens
  misc_RNA (1)...(19): siRNA sense strand
gugccuuggaauauggaau

SEQ ID NO: 2303502 - RNA, 19 nt, Homo sapiens
  misc_RNA (1)...(19): siRNA sense strand
caaauguccuccaugguca

SEQ ID NO: 2303503 - RNA, 19 nt, Homo sapiens
  misc_RNA (1)...(19): siRNA sense strand
ccacaugcucugaggaggu

SEQ ID NO: 2303504 - RNA, 19 nt, Homo sapiens
  misc_RNA (1)...(19): siRNA sense strand
agguggccgugguggacua

SEQ ID NO: 2303505 - RNA, 19 nt, Homo sapiens
  misc_RNA (1)...(19): siRNA sense strand
cguugccaaaggugggaaa

SEQ ID NO: 2303506 - RNA, 19 nt, Homo sapiens
  misc_RNA (1)...(19): siRNA sense strand
gcacacgguuugcggcguu

SEQ ID NO: 2303507 - RNA, 19 nt, Homo sapiens
  misc_RNA (1)...(19): siRNA sense strand
ugagaaaggcagagaggaa

SEQ ID NO: 2303508 - RNA, 19 nt, Homo sapiens
  misc_RNA (1)...(19): siRNA sense strand
ggugauaauaccaaagaaa

SEQ ID NO: 2303509 - RNA, 19 nt, Homo sapiens
  misc_RNA (1)...(19): siRNA sense strand
ccucaagaaaggagaacua

SEQ ID NO: 2303510 - RNA, 19 nt, Homo sapiens
  misc_RNA (1)...(19): siRNA sense strand
agaaagaugaagaggaaaa

SEQ ID NO: 2303511 - RNA, 19 nt, Homo sapiens
  misc_RNA (1)...(19): siRNA sense strand
caucuaaaguugaagguga

SEQ ID NO: 2303512 - RNA, 19 nt, Homo sapiens
  misc_RNA (1)...(19): siRNA sense strand
aggagaaacugcagaccua

SEQ ID NO: 2303513 - RNA, 19 nt, Homo sapiens
  misc_RNA (1)...(19): siRNA sense strand
ggauagagccagugagaag

SEQ ID NO: 2303514 - RNA, 19 nt, Homo sapiens
  misc_RNA (1)...(19): siRNA sense strand
ucguguagaucgagaaauu

SEQ ID NO: 2303515 - RNA, 19 nt, Homo sapiens
  misc_RNA (1)...(19): siRNA sense strand
augaaucaguggaaggaaa

SEQ ID NO: 2303516 - RNA, 19 nt, Homo sapiens
  misc_RNA (1)...(19): siRNA sense strand
cggaggaaagcuaaagaaa

SEQ ID NO: 2303517 - RNA, 19 nt, Homo sapiens
  misc_RNA (1)...(19): siRNA sense strand
cuucacaggcagagggaau

SEQ ID NO: 2303518 - RNA, 19 nt, Homo sapiens
  misc_RNA (1)...(19): siRNA sense strand
augacaaaguugaggauca

SEQ ID NO: 2303519 - RNA, 19 nt, Homo sapiens
  misc_RNA (1)...(19): siRNA sense strand
ccaaaacaaaagagaguaa

SEQ ID NO: 2303520 - RNA, 19 nt, Homo sapiens
  misc_RNA (1)...(19): siRNA sense strand
ccagaagggcugagggcuu

SEQ ID NO: 2303521 - RNA, 19 nt, Homo sapiens
  misc_RNA (1)...(19): siRNA sense strand
augagaacaucaagacaaa

SEQ ID NO: 2303522 - RNA, 19 nt, Homo sapiens
  misc_RNA (1)...(19): siRNA sense strand
agaaauggaaguugcuaaa

SEQ ID NO: 2303523 - RNA, 19 nt, Homo sapiens
  misc_RNA (1)...(19): siRNA sense strand
acagaaaacuucacgaaaa

SEQ ID NO: 2303524 - RNA, 19 nt, Homo sapiens
  misc_RNA (1)...(19): siRNA sense strand
agacaagaacagauagauu

SEQ ID NO: 2303525 - RNA, 19 nt, Homo sapiens
  misc_RNA (1)...(19): siRNA sense strand
ucucaaaggaagaguuaau

SEQ ID NO: 2303526 - RNA, 19 nt, Homo sapiens
  misc_RNA (1)...(19): siRNA sense strand
gauagaugguacagcagaa

SEQ ID NO: 2303527 - RNA, 19 nt, Homo sapiens
  misc_RNA (1)...(19): siRNA sense strand
aagugaagcucaauguaaa

SEQ ID NO: 2303528 - RNA, 19 nt, Homo sapiens
  misc_RNA (1)...(19): siRNA sense strand
caucaaacacaaugucaaa

SEQ ID NO: 2303529 - RNA, 19 nt, Homo sapiens
  misc_RNA (1)...(19): siRNA sense strand
ggacaagauagaugguaca

SEQ ID NO: 2303530 - RNA, 19 nt, Homo sapiens
  misc_RNA (1)...(19): siRNA sense strand
ccagagaggcagagaaugu

SEQ ID NO: 2303531 - RNA, 19 nt, Homo sapiens
  misc_RNA (1)...(19): siRNA sense strand
ggauguggauggagagcca

SEQ ID NO: 2303532 - RNA, 19 nt, Homo sapiens
  misc_RNA (1)...(19): siRNA sense strand
gaagaaaauuugagaagca

SEQ ID NO: 2303533 - RNA, 19 nt, Homo sapiens
  misc_RNA (1)...(19): siRNA sense strand
cagaagaaacugaggaaag

SEQ ID NO: 2303534 - RNA, 19 nt, Homo sapiens
  misc_RNA (1)...(19): siRNA sense strand
caaagagaacagcaagaaa

SEQ ID NO: 2303535 - RNA, 19 nt, Homo sapiens
  misc_RNA (1)...(19): siRNA sense strand
agaagaggauaaagcagaa

SEQ ID NO: 2303536 - RNA, 19 nt, Homo sapiens
  misc_RNA (1)...(19): siRNA sense strand
ggaaagagagcaagccaca

SEQ ID NO: 2303537 - RNA, 19 nt, Homo sapiens
  misc_RNA (1)...(19): siRNA sense strand
gcucaugaaaucaguuuaa

SEQ ID NO: 2303538 - RNA, 19 nt, Homo sapiens
  misc_RNA (1)...(19): siRNA sense strand
aggcaaaucaagcggaaaa

SEQ ID NO: 2303539 - RNA, 19 nt, Homo sapiens
  misc_RNA (1)...(19): siRNA sense strand
gggaaguaggccuggaaaa

SEQ ID NO: 2303540 - RNA, 19 nt, Homo sapiens
  misc_RNA (1)...(19): siRNA sense strand
cagaagaagaaauggaagu

SEQ ID NO: 2303541 - RNA, 19 nt, Homo sapiens
  misc_RNA (1)...(19): siRNA sense strand
cagagguuguuaaggcaaa

SEQ ID NO: 2303542 - RNA, 19 nt, Homo sapiens
  misc_RNA (1)...(19): siRNA sense strand
ugaagaagaggcagcuaaa

SEQ ID NO: 2303543 - RNA, 19 nt, Homo sapiens
  misc_RNA (1)...(19): siRNA sense strand
aggagaauaaugagaaaca

SEQ ID NO: 2303544 - RNA, 19 nt, Homo sapiens
  misc_RNA (1)...(19): siRNA sense strand
aggagaucuuuaaggacaa

SEQ ID NO: 2303545 - RNA, 19 nt, Homo sapiens
  misc_RNA (1)...(19): siRNA sense strand
acaucaagcaggaagaauu

SEQ ID NO: 2303546 - RNA, 19 nt, Homo sapiens
  misc_RNA (1)...(19): siRNA sense strand
acaugaagguguagucaga

SEQ ID NO: 2303547 - RNA, 19 nt, Homo sapiens
  misc_RNA (1)...(19): siRNA sense strand
gagcuaaggaccagaggga

SEQ ID NO: 2303548 - RNA, 19 nt, Homo sapiens
  misc_RNA (1)...(19): siRNA sense strand
aaagaaagagacuuggaua

SEQ ID NO: 2303549 - RNA, 19 nt, Homo sapiens
  misc_RNA (1)...(19): siRNA sense strand
ccuuaaauaucccaaacaa

SEQ ID NO: 2303550 - RNA, 19 nt, Homo sapiens
  misc_RNA (1)...(19): siRNA sense strand
gcuaaggaccagagggaag

SEQ ID NO: 2303551 - RNA, 19 nt, Homo sapiens
  misc_RNA (1)...(19): siRNA sense strand
aaucaaagaagcaggagau

SEQ ID NO: 2303552 - RNA, 19 nt, Homo sapiens
  misc_RNA (1)...(19): siRNA sense strand
aggaaaaggacaagauaga

SEQ ID NO: 2303553 - RNA, 19 nt, Homo sapiens
  misc_RNA (1)...(19): siRNA sense strand
aagaaauggaaguugcuaa

SEQ ID NO: 2303554 - RNA, 19 nt, Homo sapiens
  misc_RNA (1)...(19): siRNA sense strand
caaagaagcaggagauuuu

SEQ ID NO: 2303555 - RNA, 19 nt, Homo sapiens
  misc_RNA (1)...(19): siRNA sense strand
caugagaacaucaagacaa

SEQ ID NO: 2303556 - RNA, 19 nt, Homo sapiens
  misc_RNA (1)...(19): siRNA sense strand
aaagagaagcuaugaauca

SEQ ID NO: 2303557 - RNA, 19 nt, Homo sapiens
  misc_RNA (1)...(19): siRNA sense strand
aagucaaacagcaggaaau

SEQ ID NO: 2303558 - RNA, 19 nt, Homo sapiens
  misc_RNA (1)...(19): siRNA sense strand
caucagauaccaaggugua

SEQ ID NO: 2303559 - RNA, 19 nt, Homo sapiens
  misc_RNA (1)...(19): siRNA sense strand
ugggaaacgcagaggcaga

SEQ ID NO: 2303560 - RNA, 19 nt, Homo sapiens
  misc_RNA (1)...(19): siRNA sense strand
ggaaagcuaaagaaagcaa

SEQ ID NO: 2303561 - RNA, 19 nt, Homo sapiens
  misc_RNA (1)...(19): siRNA sense strand
cagauaugaggaagagcua

SEQ ID NO: 2303562 - RNA, 19 nt, Homo sapiens
  misc_RNA (1)...(19): siRNA sense strand
ccuuauaacccucugacua

SEQ ID NO: 2303563 - RNA, 19 nt, Homo sapiens
  misc_RNA (1)...(19): siRNA sense strand
gggcacaccaauaaaguuu

SEQ ID NO: 2303564 - RNA, 19 nt, Homo sapiens
  misc_RNA (1)...(19): siRNA sense strand
ggaaauugugccagagaac

SEQ ID NO: 2303565 - RNA, 19 nt, Homo sapiens
  misc_RNA (1)...(19): siRNA sense strand
cuaccaaucaugaaaggaa

SEQ ID NO: 2303566 - RNA, 19 nt, Homo sapiens
  misc_RNA (1)...(19): siRNA sense strand
ggacaaggaugcgagggaa

SEQ ID NO: 2303567 - RNA, 19 nt, Homo sapiens
  misc_RNA (1)...(19): siRNA sense strand
cgguugugcaugagaaaca

SEQ ID NO: 2303568 - RNA, 19 nt, Homo sapiens
  misc_RNA (1)...(19): siRNA sense strand
aaggagaacuaguuaugaa

SEQ ID NO: 2303569 - RNA, 19 nt, Homo sapiens
  misc_RNA (1)...(19): siRNA sense strand
ggucguaacugggcagcaa

SEQ ID NO: 2303570 - RNA, 19 nt, Homo sapiens
  misc_RNA (1)...(19): siRNA sense strand
gcaacaggaaucugccaaa

SEQ ID NO: 2303571 - RNA, 19 nt, Homo sapiens
  misc_RNA (1)...(19): siRNA sense strand
cagcagagcagauggaugu

SEQ ID NO: 2303572 - RNA, 19 nt, Homo sapiens
  misc_RNA (1)...(19): siRNA sense strand
ggagaacacaagacagaca

SEQ ID NO: 2303573 - RNA, 19 nt, Homo sapiens
  misc_RNA (1)...(19): siRNA sense strand
gcacugcaggcgagguuua

SEQ ID NO: 2303574 - RNA, 19 nt, Homo sapiens
  misc_RNA (1)...(19): siRNA sense strand
ugagacacgaagagaggaa

SEQ ID NO: 2303575 - RNA, 19 nt, Homo sapiens
  misc_RNA (1)...(19): siRNA sense strand
ggucagggcccaacaugaa

SEQ ID NO: 2303576 - RNA, 19 nt, Homo sapiens
  misc_RNA (1)...(19): siRNA sense strand
gaggaagagcuaaggacca

SEQ ID NO: 2303577 - RNA, 19 nt, Homo sapiens
  misc_RNA (1)...(19): siRNA sense strand
cuugaaacgaacagaagaa

SEQ ID NO: 2303578 - RNA, 19 nt, Homo sapiens
  misc_RNA (1)...(19): siRNA sense strand
aagaaguagccgagguuga

SEQ ID NO: 2303579 - RNA, 19 nt, Homo sapiens
  misc_RNA (1)...(19): siRNA sense strand
aggucaugauugugguauu

SEQ ID NO: 2303580 - RNA, 19 nt, Homo sapiens
  misc_RNA (1)...(19): siRNA sense strand
ggaaacacccacagucaga

SEQ ID NO: 2303581 - RNA, 19 nt, Homo sapiens
  misc_RNA (1)...(19): siRNA sense strand
ggcggaugaaggaggaaau

SEQ ID NO: 2303582 - RNA, 19 nt, Homo sapiens
  misc_RNA (1)...(19): siRNA sense strand
ggaaauggaucgugcccag

SEQ ID NO: 2303583 - RNA, 19 nt, Homo sapiens
  misc_RNA (1)...(19): siRNA sense strand
ugggagaagccuugagaag

SEQ ID NO: 2303584 - RNA, 19 nt, Homo sapiens
  misc_RNA (1)...(19): siRNA sense strand
ccuuauagagguaauacau

SEQ ID NO: 2303585 - RNA, 19 nt, Homo sapiens
  misc_RNA (1)...(19): siRNA sense strand
uccaauaugccuauggcua

SEQ ID NO: 2303586 - RNA, 19 nt, Homo sapiens
  misc_RNA (1)...(19): siRNA sense strand
ugauugugguauuuggaga

SEQ ID NO: 2303587 - RNA, 19 nt, Homo sapiens
  misc_RNA (1)...(19): siRNA sense strand
gcacaaucagcgaggacac

SEQ ID NO: 2303588 - RNA, 19 nt, Homo sapiens
  misc_RNA (1)...(19): siRNA sense strand
cugaagaacaagaggaaag

SEQ ID NO: 2303589 - RNA, 19 nt, Homo sapiens
  misc_RNA (1)...(19): siRNA sense strand
gccugaagaacaagaggaa

SEQ ID NO: 2303590 - RNA, 19 nt, Homo sapiens
  misc_RNA (1)...(19): siRNA sense strand
agaacaagaggaaagaaaa

SEQ ID NO: 2303591 - RNA, 19 nt, Homo sapiens
  misc_RNA (1)...(19): siRNA sense strand
acucaguauuugaccaaca

SEQ ID NO: 2303592 - RNA, 19 nt, Homo sapiens
  misc_RNA (1)...(19): siRNA sense strand
ggccuaaaggagauaacau

SEQ ID NO: 2303593 - RNA, 19 nt, Homo sapiens
  misc_RNA (1)...(19): siRNA sense strand
ccugaagaacaagaggaaa

SEQ ID NO: 2303594 - RNA, 19 nt, Homo sapiens
  misc_RNA (1)...(19): siRNA sense strand
gaacaagaggaaagaaaac

SEQ ID NO: 2303595 - RNA, 19 nt, Homo sapiens
  misc_RNA (1)...(19): siRNA sense strand
gugcugggccuaaaggaga

SEQ ID NO: 2303596 - RNA, 19 nt, Homo sapiens
  misc_RNA (1)...(19): siRNA sense strand
cugaagaacaagaggaaag

SEQ ID NO: 2303597 - RNA, 19 nt, Homo sapiens
  misc_RNA (1)...(19): siRNA sense strand
gccugaagaacaagaggaa

SEQ ID NO: 2303598 - RNA, 19 nt, Homo sapiens
  misc_RNA (1)...(19): siRNA sense strand
agaacaagaggaaagaaaa

SEQ ID NO: 2303599 - RNA, 19 nt, Homo sapiens
  misc_RNA (1)...(19): siRNA sense strand
acucaguauuugaccaaca

SEQ ID NO: 2303600 - RNA, 19 nt, Homo sapiens
  misc_RNA (1)...(19): siRNA sense strand
ggccuaaaggagauaacau

SEQ ID NO: 2303601 - RNA, 19 nt, Homo sapiens
  misc_RNA (1)...(19): siRNA sense strand
ccugaagaacaagaggaaa

SEQ ID NO: 2303602 - RNA, 19 nt, Homo sapiens
  misc_RNA (1)...(19): siRNA sense strand
gaacaagaggaaagaaaac

SEQ ID NO: 2303603 - RNA, 19 nt, Homo sapiens
  misc_RNA (1)...(19): siRNA sense strand
gugcugggccuaaaggaga

SEQ ID NO: 2303604 - RNA, 19 nt, Homo sapiens
  misc_RNA (1)...(19): siRNA sense strand
ggagaagaggacagacaaa

SEQ ID NO: 2303605 - RNA, 19 nt, Homo sapiens
  misc_RNA (1)...(19): siRNA sense strand
ucacaugguacgagaggaa

SEQ ID NO: 2303606 - RNA, 19 nt, Homo sapiens
  misc_RNA (1)...(19): siRNA sense strand
ugucaaucauagaggaaga

SEQ ID NO: 2303607 - RNA, 19 nt, Homo sapiens
  misc_RNA (1)...(19): siRNA sense strand
aggaguugaaugugggaaa

SEQ ID NO: 2303608 - RNA, 19 nt, Homo sapiens
  misc_RNA (1)...(19): siRNA sense strand
guguaugggaugaggauga

SEQ ID NO: 2303609 - RNA, 19 nt, Homo sapiens
  misc_RNA (1)...(19): siRNA sense strand
aagaagaaagccagaggaa

SEQ ID NO: 2303610 - RNA, 19 nt, Homo sapiens
  misc_RNA (1)...(19): siRNA sense strand
caaucauagaggaagauaa

SEQ ID NO: 2303611 - RNA, 19 nt, Homo sapiens
  misc_RNA (1)...(19): siRNA sense strand
uggaggagcaugagaaaga

SEQ ID NO: 2303612 - RNA, 19 nt, Homo sapiens
  misc_RNA (1)...(19): siRNA sense strand
ucauagaggaagauaagaa

SEQ ID NO: 2303613 - RNA, 19 nt, Homo sapiens
  misc_RNA (1)...(19): siRNA sense strand
gcgcagaagugauguggca

SEQ ID NO: 2303614 - RNA, 19 nt, Homo sapiens
  misc_RNA (1)...(19): siRNA sense strand
ccuacaaaugggagcaaau

SEQ ID NO: 2303615 - RNA, 19 nt, Homo sapiens
  misc_RNA (1)...(19): siRNA sense strand
gggaaaagucagcgcagaa

SEQ ID NO: 2303616 - RNA, 19 nt, Homo sapiens
  misc_RNA (1)...(19): siRNA sense strand
cauuagaggcagagacguu

SEQ ID NO: 2303617 - RNA, 19 nt, Homo sapiens
  misc_RNA (1)...(19): siRNA sense strand
gagccagccaggugguaaa

SEQ ID NO: 2303618 - RNA, 19 nt, Homo sapiens
  misc_RNA (1)...(19): siRNA sense strand
cagaggaggaagccagaua

SEQ ID NO: 2303619 - RNA, 19 nt, Homo sapiens
  misc_RNA (1)...(19): siRNA sense strand
ugaagauccgagagcgaaa

SEQ ID NO: 2303620 - RNA, 19 nt, Homo sapiens
  misc_RNA (1)...(19): siRNA sense strand
gggccaaauuccaggguuc

SEQ ID NO: 2303621 - RNA, 19 nt, Homo sapiens
  misc_RNA (1)...(19): siRNA sense strand
gggucuaaguguggaggua

SEQ ID NO: 2303622 - RNA, 19 nt, Homo sapiens
  misc_RNA (1)...(19): siRNA sense strand
agugauaagaagaggaagu

SEQ ID NO: 2303623 - RNA, 19 nt, Homo sapiens
  misc_RNA (1)...(19): siRNA sense strand
gcagaagugauguggcauu

SEQ ID NO: 2303624 - RNA, 19 nt, Homo sapiens
  misc_RNA (1)...(19): siRNA sense strand
gggaugaggaugaugacau

SEQ ID NO: 2303625 - RNA, 19 nt, Homo sapiens
  misc_RNA (1)...(19): siRNA sense strand
ggcaaugggcugaagaaaa

SEQ ID NO: 2303626 - RNA, 19 nt, Homo sapiens
  misc_RNA (1)...(19): siRNA sense strand
ccgggaagaucgcgugcua

SEQ ID NO: 2303627 - RNA, 19 nt, Homo sapiens
  misc_RNA (1)...(19): siRNA sense strand
gaagaaagccagaggaagc

SEQ ID NO: 2303628 - RNA, 19 nt, Homo sapiens
  misc_RNA (1)...(19): siRNA sense strand
ugaaauaugcauuggagga

SEQ ID NO: 2303629 - RNA, 19 nt, Homo sapiens
  misc_RNA (1)...(19): siRNA sense strand
aagaagaggaaguucacaa

SEQ ID NO: 2303630 - RNA, 19 nt, Homo sapiens
  misc_RNA (1)...(19): siRNA sense strand
cguuaaugaaagacgauga

SEQ ID NO: 2303631 - RNA, 19 nt, Homo sapiens
  misc_RNA (1)...(19): siRNA sense strand
aaaucaguguggagaucaa

SEQ ID NO: 2303632 - RNA, 19 nt, Homo sapiens
  misc_RNA (1)...(19): siRNA sense strand
uuuccaaacucaaggauca

SEQ ID NO: 2303633 - RNA, 19 nt, Homo sapiens
  misc_RNA (1)...(19): siRNA sense strand
caugaagauccgagagcga

SEQ ID NO: 2303634 - RNA, 19 nt, Homo sapiens
  misc_RNA (1)...(19): siRNA sense strand
gccuacaagccaaggacaa

SEQ ID NO: 2303635 - RNA, 19 nt, Homo sapiens
  misc_RNA (1)...(19): siRNA sense strand
cagauaugcgugaaggauu

SEQ ID NO: 2303636 - RNA, 19 nt, Homo sapiens
  misc_RNA (1)...(19): siRNA sense strand
aggcagagacguuaaugaa

SEQ ID NO: 2303637 - RNA, 19 nt, Homo sapiens
  misc_RNA (1)...(19): siRNA sense strand
agaaaauguuugaggccau

SEQ ID NO: 2303638 - RNA, 19 nt, Homo sapiens
  misc_RNA (1)...(19): siRNA sense strand
acaaaugggagcaaaucaa

SEQ ID NO: 2303639 - RNA, 19 nt, Homo sapiens
  misc_RNA (1)...(19): siRNA sense strand
ccuugaagcugcagacagu

SEQ ID NO: 2303640 - RNA, 19 nt, Homo sapiens
  misc_RNA (1)...(19): siRNA sense strand
ucagcaugguguuuggaaa

SEQ ID NO: 2303641 - RNA, 19 nt, Homo sapiens
  misc_RNA (1)...(19): siRNA sense strand
ggcccgagaauuugugaaa

SEQ ID NO: 2303642 - RNA, 19 nt, Homo sapiens
  misc_RNA (1)...(19): siRNA sense strand
acuaagaagcguaccaaga

SEQ ID NO: 2303643 - RNA, 19 nt, Homo sapiens
  misc_RNA (1)...(19): siRNA sense strand
cagaaugaagguacaagaa

SEQ ID NO: 2303644 - RNA, 19 nt, Homo sapiens
  misc_RNA (1)...(19): siRNA sense strand
gguccacauuagaggcaga

SEQ ID NO: 2303645 - RNA, 19 nt, Homo sapiens
  misc_RNA (1)...(19): siRNA sense strand
gcgaaauaagccagagauc

SEQ ID NO: 2303646 - RNA, 19 nt, Homo sapiens
  misc_RNA (1)...(19): siRNA sense strand
guguggagguauggaacaa

SEQ ID NO: 2303647 - RNA, 19 nt, Homo sapiens
  misc_RNA (1)...(19): siRNA sense strand
ccuacaagccaaggacaaa

SEQ ID NO: 2303648 - RNA, 19 nt, Homo sapiens
  misc_RNA (1)...(19): siRNA sense strand
augaauuugccaugcguua

SEQ ID NO: 2303649 - RNA, 19 nt, Homo sapiens
  misc_RNA (1)...(19): siRNA sense strand
ccagauuuacgcagaaaga

SEQ ID NO: 2303650 - RNA, 19 nt, Homo sapiens
  misc_RNA (1)...(19): siRNA sense strand
cucucuacauacaggaaua

SEQ ID NO: 2303651 - RNA, 19 nt, Homo sapiens
  misc_RNA (1)...(19): siRNA sense strand
gugaugaacacaauggaga

SEQ ID NO: 2303652 - RNA, 19 nt, Homo sapiens
  misc_RNA (1)...(19): siRNA sense strand
gaugaaagaagaugccaca

SEQ ID NO: 2303653 - RNA, 19 nt, Homo sapiens
  misc_RNA (1)...(19): siRNA sense strand
ugaacacaauggagaggau

SEQ ID NO: 2303654 - RNA, 19 nt, Homo sapiens
  misc_RNA (1)...(19): siRNA sense strand
uggacgauccugugggaga

SEQ ID NO: 2303655 - RNA, 19 nt, Homo sapiens
  misc_RNA (1)...(19): siRNA sense strand
ccaaugaccucaaguggca

SEQ ID NO: 2303656 - RNA, 19 nt, Homo sapiens
  misc_RNA (1)...(19): siRNA sense strand
uccacuuacuccugggaaa

SEQ ID NO: 2303657 - RNA, 19 nt, Homo sapiens
  misc_RNA (1)...(19): siRNA sense strand
ccggagggcucuauggcau

SEQ ID NO: 2303658 - RNA, 19 nt, Homo sapiens
  misc_RNA (1)...(19): siRNA sense strand
guacagaaugugaagagca

SEQ ID NO: 2303659 - RNA, 19 nt, Homo sapiens
  misc_RNA (1)...(19): siRNA sense strand
gcuuugagaucauccggaa

SEQ ID NO: 2303660 - RNA, 19 nt, Homo sapiens
  misc_RNA (1)...(19): siRNA sense strand
gagcgaaauaagccagaga

SEQ ID NO: 2303661 - RNA, 19 nt, Homo sapiens
  misc_RNA (1)...(19): siRNA sense strand
cagagaucuuugaaguuau

SEQ ID NO: 2303662 - RNA, 19 nt, Homo sapiens
  misc_RNA (1)...(19): siRNA sense strand
caccaaagugauaagaaga

SEQ ID NO: 2303663 - RNA, 19 nt, Homo sapiens
  misc_RNA (1)...(19): siRNA sense strand
gccuaaagcgagagucuga

SEQ ID NO: 2303664 - RNA, 19 nt, Homo sapiens
  misc_RNA (1)...(19): siRNA sense strand
gguacaacuuggagaagag

SEQ ID NO: 2303665 - RNA, 19 nt, Homo sapiens
  misc_RNA (1)...(19): siRNA sense strand
cgaugagaucuguggaacu

SEQ ID NO: 2303666 - RNA, 19 nt, Homo sapiens
  misc_RNA (1)...(19): siRNA sense strand
cgugucaaucauagaggaa

SEQ ID NO: 2303667 - RNA, 19 nt, Homo sapiens
  misc_RNA (1)...(19): siRNA sense strand
cagcgugguuugagcaguu

SEQ ID NO: 2303668 - RNA, 19 nt, Homo sapiens
  misc_RNA (1)...(19): siRNA sense strand
ccuauugcacaaaggagaa

SEQ ID NO: 2303669 - RNA, 19 nt, Homo sapiens
  misc_RNA (1)...(19): siRNA sense strand
cuuccaugcaggaggcaau

SEQ ID NO: 2303670 - RNA, 19 nt, Homo sapiens
  misc_RNA (1)...(19): siRNA sense strand
aggcaaugggcugaagaaa

SEQ ID NO: 2303671 - RNA, 19 nt, Homo sapiens
  misc_RNA (1)...(19): siRNA sense strand
cccgagaauuugugaaacu

SEQ ID NO: 2303672 - RNA, 19 nt, Homo sapiens
  misc_RNA (1)...(19): siRNA sense strand
ggacauggacuuuggcaca

SEQ ID NO: 2303673 - RNA, 19 nt, Homo sapiens
  misc_RNA (1)...(19): siRNA sense strand
agguggugguggagaagaa

SEQ ID NO: 2303674 - RNA, 19 nt, Homo sapiens
  misc_RNA (1)...(19): siRNA sense strand
ggaaggaggagaaagguga

SEQ ID NO: 2303675 - RNA, 19 nt, Homo sapiens
  misc_RNA (1)...(19): siRNA sense strand
ucgaugaauuuguggacau

SEQ ID NO: 2303676 - RNA, 19 nt, Homo sapiens
  misc_RNA (1)...(19): siRNA sense strand
aaaccagagaagagggaga

SEQ ID NO: 2303677 - RNA, 19 nt, Homo sapiens
  misc_RNA (1)...(19): siRNA sense strand
cugacauugagguggauaa

SEQ ID NO: 2303678 - RNA, 19 nt, Homo sapiens
  misc_RNA (1)...(19): siRNA sense strand
uggcaugccuggauggaca

SEQ ID NO: 2303679 - RNA, 19 nt, Homo sapiens
  misc_RNA (1)...(19): siRNA sense strand
acgggagaagcuagagaaa

SEQ ID NO: 2303680 - RNA, 19 nt, Homo sapiens
  misc_RNA (1)...(19): siRNA sense strand
ggaagguggaugaggccau

SEQ ID NO: 2303681 - RNA, 19 nt, Homo sapiens
  misc_RNA (1)...(19): siRNA sense strand
agcucaagaaagaggcaaa

SEQ ID NO: 2303682 - RNA, 19 nt, Homo sapiens
  misc_RNA (1)...(19): siRNA sense strand
cccagguggugguggagaa

SEQ ID NO: 2303683 - RNA, 19 nt, Homo sapiens
  misc_RNA (1)...(19): siRNA sense strand
agaagaagcuauggcguga

SEQ ID NO: 2303684 - RNA, 19 nt, Homo sapiens
  misc_RNA (1)...(19): siRNA sense strand
cuauaagguccaaggcuca

SEQ ID NO: 2303685 - RNA, 19 nt, Homo sapiens
  misc_RNA (1)...(19): siRNA sense strand
gcgagguggagaaggccaa

SEQ ID NO: 2303686 - RNA, 19 nt, Homo sapiens
  misc_RNA (1)...(19): siRNA sense strand
aggcaaagaaacgggagaa

SEQ ID NO: 2303687 - RNA, 19 nt, Homo sapiens
  misc_RNA (1)...(19): siRNA sense strand
gcuacaaggagaaggugga

SEQ ID NO: 2303688 - RNA, 19 nt, Homo sapiens
  misc_RNA (1)...(19): siRNA sense strand
gaggcaaagaaacgggaga

SEQ ID NO: 2303689 - RNA, 19 nt, Homo sapiens
  misc_RNA (1)...(19): siRNA sense strand
gugccuggcuacaaggaga

SEQ ID NO: 2303690 - RNA, 19 nt, Homo sapiens
  misc_RNA (1)...(19): siRNA sense strand
agaaauuccaacagaagca

SEQ ID NO: 2303691 - RNA, 19 nt, Homo sapiens
  misc_RNA (1)...(19): siRNA sense strand
ugggcaagcugcaagccaa

SEQ ID NO: 2303692 - RNA, 19 nt, Homo sapiens
  misc_RNA (1)...(19): siRNA sense strand
ucgaaguccaggaggcaga

SEQ ID NO: 2303693 - RNA, 19 nt, Homo sapiens
  misc_RNA (1)...(19): siRNA sense strand
agaaagaggcaaagaaacg

SEQ ID NO: 2303694 - RNA, 19 nt, Homo sapiens
  misc_RNA (1)...(19): siRNA sense strand
ggacugggaucgagccugu

SEQ ID NO: 2303695 - RNA, 19 nt, Homo sapiens
  misc_RNA (1)...(19): siRNA sense strand
gggacuguuccguggcauu

SEQ ID NO: 2303696 - RNA, 19 nt, Homo sapiens
  misc_RNA (1)...(19): siRNA sense strand
ccuauaagguccaaggcuc

SEQ ID NO: 2303697 - RNA, 19 nt, Homo sapiens
  misc_RNA (1)...(19): siRNA sense strand
ugagcaagucucuaggcaa

SEQ ID NO: 2303698 - RNA, 19 nt, Homo sapiens
  misc_RNA (1)...(19): siRNA sense strand
ucgagacaaugcugggaga

SEQ ID NO: 2303699 - RNA, 19 nt, Homo sapiens
  misc_RNA (1)...(19): siRNA sense strand
cgggagaagcuagagaaau

SEQ ID NO: 2303700 - RNA, 19 nt, Homo sapiens
  misc_RNA (1)...(19): siRNA sense strand
agaucgugguacagaagaa

SEQ ID NO: 2303701 - RNA, 19 nt, Homo sapiens
  misc_RNA (1)...(19): siRNA sense strand
gcaagcugcuggagaggga

SEQ ID NO: 2303702 - RNA, 19 nt, Homo sapiens
  misc_RNA (1)...(19): siRNA sense strand
cugcaggguaaaugggauu

SEQ ID NO: 2303703 - RNA, 19 nt, Homo sapiens
  misc_RNA (1)...(19): siRNA sense strand
gcaaggaguaucaggagga

SEQ ID NO: 2303704 - RNA, 19 nt, Homo sapiens
  misc_RNA (1)...(19): siRNA sense strand
cagaugaacugcaaggagu

SEQ ID NO: 2303705 - RNA, 19 nt, Homo sapiens
  misc_RNA (1)...(19): siRNA sense strand
agaugaacugcaaggagua

SEQ ID NO: 2303706 - RNA, 19 nt, Homo sapiens
  misc_RNA (1)...(19): siRNA sense strand
acagagaugcugaagguga

SEQ ID NO: 2303707 - RNA, 19 nt, Homo sapiens
  misc_RNA (1)...(19): siRNA sense strand
agauggacgagaagaccaa

SEQ ID NO: 2303708 - RNA, 19 nt, Homo sapiens
  misc_RNA (1)...(19): siRNA sense strand
ggaugaugucaaugaguuc

SEQ ID NO: 2303709 - RNA, 19 nt, Homo sapiens
  misc_RNA (1)...(19): siRNA sense strand
cugaggauuaccagcgauu

SEQ ID NO: 2303710 - RNA, 19 nt, Homo sapiens
  misc_RNA (1)...(19): siRNA sense strand
agauggacgagaagaccaa

SEQ ID NO: 2303711 - RNA, 19 nt, Homo sapiens
  misc_RNA (1)...(19): siRNA sense strand
agaucgugguacagaagaa

SEQ ID NO: 2303712 - RNA, 19 nt, Homo sapiens
  misc_RNA (1)...(19): siRNA sense strand
gcaagcugcuggagaggga

SEQ ID NO: 2303713 - RNA, 19 nt, Homo sapiens
  misc_RNA (1)...(19): siRNA sense strand
cugcaggguaaaugggauu

SEQ ID NO: 2303714 - RNA, 19 nt, Homo sapiens
  misc_RNA (1)...(19): siRNA sense strand
gcaaggaguaucaggagga

SEQ ID NO: 2303715 - RNA, 19 nt, Homo sapiens
  misc_RNA (1)...(19): siRNA sense strand
cagaugaacugcaaggagu

SEQ ID NO: 2303716 - RNA, 19 nt, Homo sapiens
  misc_RNA (1)...(19): siRNA sense strand
agaugaacugcaaggagua

SEQ ID NO: 2303717 - RNA, 19 nt, Homo sapiens
  misc_RNA (1)...(19): siRNA sense strand
acagagaugcugaagguga

SEQ ID NO: 2303718 - RNA, 19 nt, Homo sapiens
  misc_RNA (1)...(19): siRNA sense strand
ggaugaugucaaugaguuc

SEQ ID NO: 2303719 - RNA, 19 nt, Homo sapiens
  misc_RNA (1)...(19): siRNA sense strand
cugaggauuaccagcgauu

SEQ ID NO: 2303720 - RNA, 19 nt, Homo sapiens
  misc_RNA (1)...(19): siRNA sense strand
gugucuagaaucagauaau

SEQ ID NO: 2303721 - RNA, 19 nt, Homo sapiens
  misc_RNA (1)...(19): siRNA sense strand
gcacagauucacaaggacu

SEQ ID NO: 2303722 - RNA, 19 nt, Homo sapiens
  misc_RNA (1)...(19): siRNA sense strand
caguaaagaacgcggacgu

SEQ ID NO: 2303723 - RNA, 19 nt, Homo sapiens
  misc_RNA (1)...(19): siRNA sense strand
ucacgguggcagugcacaa

SEQ ID NO: 2303724 - RNA, 19 nt, Homo sapiens
  misc_RNA (1)...(19): siRNA sense strand
agaaucagauaaugggaac

SEQ ID NO: 2303725 - RNA, 19 nt, Homo sapiens
  misc_RNA (1)...(19): siRNA sense strand
agucagaaggacaggacaa

SEQ ID NO: 2303726 - RNA, 19 nt, Homo sapiens
  misc_RNA (1)...(19): siRNA sense strand
ggguacagucagaaggaca

SEQ ID NO: 2303727 - RNA, 19 nt, Homo sapiens
  misc_RNA (1)...(19): siRNA sense strand
cagauuucuuccagggcaa

SEQ ID NO: 2303728 - RNA, 19 nt, Homo sapiens
  misc_RNA (1)...(19): siRNA sense strand
cccaaagggaagaggaagu

SEQ ID NO: 2303729 - RNA, 19 nt, Homo sapiens
  misc_RNA (1)...(19): siRNA sense strand
agaaggugacagugaccaa

SEQ ID NO: 2303730 - RNA, 19 nt, Homo sapiens
  misc_RNA (1)...(19): siRNA sense strand
acacggacagugaggaaca

SEQ ID NO: 2303731 - RNA, 19 nt, Homo sapiens
  misc_RNA (1)...(19): siRNA sense strand
gaggaggcccugauggaca

SEQ ID NO: 2303732 - RNA, 19 nt, Homo sapiens
  misc_RNA (1)...(19): siRNA sense strand
ccagcagugaggaggauga

SEQ ID NO: 2303733 - RNA, 19 nt, Homo sapiens
  misc_RNA (1)...(19): siRNA sense strand
cgguggcagcggagaugaa

SEQ ID NO: 2303734 - RNA, 19 nt, Homo sapiens
  misc_RNA (1)...(19): siRNA sense strand
gggaaugauggcucagcuu

SEQ ID NO: 2303735 - RNA, 19 nt, Homo sapiens
  misc_RNA (1)...(19): siRNA sense strand
augagaacacggacaguga

SEQ ID NO: 2303736 - RNA, 19 nt, Homo sapiens
  misc_RNA (1)...(19): siRNA sense strand
cggaagaggaggaaggaga

SEQ ID NO: 2303737 - RNA, 19 nt, Homo sapiens
  misc_RNA (1)...(19): siRNA sense strand
ccaugaaccuggaggacca

SEQ ID NO: 2303738 - RNA, 19 nt, Homo sapiens
  misc_RNA (1)...(19): siRNA sense strand
gagaaggaccugacgccua

SEQ ID NO: 2303739 - RNA, 19 nt, Homo sapiens
  misc_RNA (1)...(19): siRNA sense strand
aggagguggcugugaagaa

SEQ ID NO: 2303740 - RNA, 19 nt, Homo sapiens
  misc_RNA (1)...(19): siRNA sense strand
acacaauggagaagcuuau

SEQ ID NO: 2303741 - RNA, 19 nt, Homo sapiens
  misc_RNA (1)...(19): siRNA sense strand
agaggaggaaggagaggua

SEQ ID NO: 2303742 - RNA, 19 nt, Homo sapiens
  misc_RNA (1)...(19): siRNA sense strand
aggaggaaggagagguaga

SEQ ID NO: 2303743 - RNA, 19 nt, Homo sapiens
  misc_RNA (1)...(19): siRNA sense strand
cugugaagaaggugcgaga

SEQ ID NO: 2303744 - RNA, 19 nt, Homo sapiens
  misc_RNA (1)...(19): siRNA sense strand
ucugggaacuggaagggaa

SEQ ID NO: 2303745 - RNA, 19 nt, Homo sapiens
  misc_RNA (1)...(19): siRNA sense strand
cuuccaaggagcugaguga

SEQ ID NO: 2303746 - RNA, 19 nt, Homo sapiens
  misc_RNA (1)...(19): siRNA sense strand
ccuacgacgauguggugaa

SEQ ID NO: 2303747 - RNA, 19 nt, Homo sapiens
  misc_RNA (1)...(19): siRNA sense strand
acgacgauguggugaagau

SEQ ID NO: 2303748 - RNA, 19 nt, Homo sapiens
  misc_RNA (1)...(19): siRNA sense strand
auggaaacacaauggagaa

SEQ ID NO: 2303749 - RNA, 19 nt, Homo sapiens
  misc_RNA (1)...(19): siRNA sense strand
gagcugacaucaagccaga

SEQ ID NO: 2303750 - RNA, 19 nt, Homo sapiens
  misc_RNA (1)...(19): siRNA sense strand
aggcacagcuagugaaccu

SEQ ID NO: 2303751 - RNA, 19 nt, Homo sapiens
  misc_RNA (1)...(19): siRNA sense strand
gggagcacuaugaaaggaa

SEQ ID NO: 2303752 - RNA, 19 nt, Homo sapiens
  misc_RNA (1)...(19): siRNA sense strand
uagaagaggaacuggugau

SEQ ID NO: 2303753 - RNA, 19 nt, Homo sapiens
  misc_RNA (1)...(19): siRNA sense strand
cauggaaacacaauggaga

SEQ ID NO: 2303754 - RNA, 19 nt, Homo sapiens
  misc_RNA (1)...(19): siRNA sense strand
ccacugagcacaagcagca

SEQ ID NO: 2303755 - RNA, 19 nt, Homo sapiens
  misc_RNA (1)...(19): siRNA sense strand
aaaggaagcuggagagagc

SEQ ID NO: 2303756 - RNA, 19 nt, Homo sapiens
  misc_RNA (1)...(19): siRNA sense strand
gggccagcuguaugaggua

SEQ ID NO: 2303757 - RNA, 19 nt, Homo sapiens
  misc_RNA (1)...(19): siRNA sense strand
gggaacugcugacugguga

SEQ ID NO: 2303758 - RNA, 19 nt, Homo sapiens
  misc_RNA (1)...(19): siRNA sense strand
uaugaaaggaagcuggaga

SEQ ID NO: 2303759 - RNA, 19 nt, Homo sapiens
  misc_RNA (1)...(19): siRNA sense strand
gaacuggugaugaggagga

SEQ ID NO: 2303760 - RNA, 19 nt, Homo sapiens
  misc_RNA (1)...(19): siRNA sense strand
cagauauccucaagacgga

SEQ ID NO: 2303761 - RNA, 19 nt, Homo sapiens
  misc_RNA (1)...(19): siRNA sense strand
agguagacagugaaguaga

SEQ ID NO: 2303762 - RNA, 19 nt, Homo sapiens
  misc_RNA (1)...(19): siRNA sense strand
cgucacccgaagucagaaa

SEQ ID NO: 2303763 - RNA, 19 nt, Homo sapiens
  misc_RNA (1)...(19): siRNA sense strand
gguaaauggaggagagcaa

SEQ ID NO: 2303764 - RNA, 19 nt, Homo sapiens
  misc_RNA (1)...(19): siRNA sense strand
gguuagaggaagaagguaa

SEQ ID NO: 2303765 - RNA, 19 nt, Homo sapiens
  misc_RNA (1)...(19): siRNA sense strand
ggagaaacuaagaugguaa

SEQ ID NO: 2303766 - RNA, 19 nt, Homo sapiens
  misc_RNA (1)...(19): siRNA sense strand
cgaacuuacccaagagaaa

SEQ ID NO: 2303767 - RNA, 19 nt, Homo sapiens
  misc_RNA (1)...(19): siRNA sense strand
caaccagauuugaaggaaa

SEQ ID NO: 2303768 - RNA, 19 nt, Homo sapiens
  misc_RNA (1)...(19): siRNA sense strand
guuccuaagugcagugaaa

SEQ ID NO: 2303769 - RNA, 19 nt, Homo sapiens
  misc_RNA (1)...(19): siRNA sense strand
cauuguuaguuguggguaa

SEQ ID NO: 2303770 - RNA, 19 nt, Homo sapiens
  misc_RNA (1)...(19): siRNA sense strand
ggaaaugcaaagucagaaa

SEQ ID NO: 2303771 - RNA, 19 nt, Homo sapiens
  misc_RNA (1)...(19): siRNA sense strand
cuaagaagagugagacaaa

SEQ ID NO: 2303772 - RNA, 19 nt, Homo sapiens
  misc_RNA (1)...(19): siRNA sense strand
ugaaagcaguagagaacaa

SEQ ID NO: 2303773 - RNA, 19 nt, Homo sapiens
  misc_RNA (1)...(19): siRNA sense strand
gggaagaggaagacauauu

SEQ ID NO: 2303774 - RNA, 19 nt, Homo sapiens
  misc_RNA (1)...(19): siRNA sense strand
agggauacuuugugaggaa

SEQ ID NO: 2303775 - RNA, 19 nt, Homo sapiens
  misc_RNA (1)...(19): siRNA sense strand
cuucagaacucgaggaacu

SEQ ID NO: 2303776 - RNA, 19 nt, Homo sapiens
  misc_RNA (1)...(19): siRNA sense strand
gcuuaagucaagugcaaua

SEQ ID NO: 2303777 - RNA, 19 nt, Homo sapiens
  misc_RNA (1)...(19): siRNA sense strand
aggaaaugauagugcaaga

SEQ ID NO: 2303778 - RNA, 19 nt, Homo sapiens
  misc_RNA (1)...(19): siRNA sense strand
agacauagaggaaggagua

SEQ ID NO: 2303779 - RNA, 19 nt, Homo sapiens
  misc_RNA (1)...(19): siRNA sense strand
ggguaaaagaagaaaacaa

SEQ ID NO: 2303780 - RNA, 19 nt, Homo sapiens
  misc_RNA (1)...(19): siRNA sense strand
gguagaauuacaaaggaaa

SEQ ID NO: 2303781 - RNA, 19 nt, Homo sapiens
  misc_RNA (1)...(19): siRNA sense strand
acucaauuguggaggaaga

SEQ ID NO: 2303782 - RNA, 19 nt, Homo sapiens
  misc_RNA (1)...(19): siRNA sense strand
ugauaaggcuugugcucaa

SEQ ID NO: 2303783 - RNA, 19 nt, Homo sapiens
  misc_RNA (1)...(19): siRNA sense strand
gggucagggugguggucaa

SEQ ID NO: 2303784 - RNA, 19 nt, Homo sapiens
  misc_RNA (1)...(19): siRNA sense strand
cugcuuaagucaagugcaa

SEQ ID NO: 2303785 - RNA, 19 nt, Homo sapiens
  misc_RNA (1)...(19): siRNA sense strand
agguagaauuacaaaggaa

SEQ ID NO: 2303786 - RNA, 19 nt, Homo sapiens
  misc_RNA (1)...(19): siRNA sense strand
aagcagucgaugagaauaa

SEQ ID NO: 2303787 - RNA, 19 nt, Homo sapiens
  misc_RNA (1)...(19): siRNA sense strand
gucagaaagcagaaagaua

SEQ ID NO: 2303788 - RNA, 19 nt, Homo sapiens
  misc_RNA (1)...(19): siRNA sense strand
caauaaagcaaguaugaga

SEQ ID NO: 2303789 - RNA, 19 nt, Homo sapiens
  misc_RNA (1)...(19): siRNA sense strand
cauuugacuugauggguaa

SEQ ID NO: 2303790 - RNA, 19 nt, Homo sapiens
  misc_RNA (1)...(19): siRNA sense strand
ccauacaaauucuggaaaa

SEQ ID NO: 2303791 - RNA, 19 nt, Homo sapiens
  misc_RNA (1)...(19): siRNA sense strand
gcaaauuguuccacgguca

SEQ ID NO: 2303792 - RNA, 19 nt, Homo sapiens
  misc_RNA (1)...(19): siRNA sense strand
ccaaugaaggagaaacuaa

SEQ ID NO: 2303793 - RNA, 19 nt, Homo sapiens
  misc_RNA (1)...(19): siRNA sense strand
guuaaaagggcaauagaaa

SEQ ID NO: 2303794 - RNA, 19 nt, Homo sapiens
  misc_RNA (1)...(19): siRNA sense strand
gcaagaauugacagacuaa

SEQ ID NO: 2303795 - RNA, 19 nt, Homo sapiens
  misc_RNA (1)...(19): siRNA sense strand
aaagcaaguaugagacaaa

SEQ ID NO: 2303796 - RNA, 19 nt, Homo sapiens
  misc_RNA (1)...(19): siRNA sense strand
gugcuaaaccuaaagggaa

SEQ ID NO: 2303797 - RNA, 19 nt, Homo sapiens
  misc_RNA (1)...(19): siRNA sense strand
caaggaaagaauagcaaau

SEQ ID NO: 2303798 - RNA, 19 nt, Homo sapiens
  misc_RNA (1)...(19): siRNA sense strand
ggauaaagugaaagcaagu

SEQ ID NO: 2303799 - RNA, 19 nt, Homo sapiens
  misc_RNA (1)...(19): siRNA sense strand
ugaggaagaccgaggauuu

SEQ ID NO: 2303800 - RNA, 19 nt, Homo sapiens
  misc_RNA (1)...(19): siRNA sense strand
gguaauguggauucaaaua

SEQ ID NO: 2303801 - RNA, 19 nt, Homo sapiens
  misc_RNA (1)...(19): siRNA sense strand
ccaaguaguaagagaaaau

SEQ ID NO: 2303802 - RNA, 19 nt, Homo sapiens
  misc_RNA (1)...(19): siRNA sense strand
ucgcaaagaaucugauauu

SEQ ID NO: 2303803 - RNA, 19 nt, Homo sapiens
  misc_RNA (1)...(19): siRNA sense strand
agucagaagauguuagaga

SEQ ID NO: 2303804 - RNA, 19 nt, Homo sapiens
  misc_RNA (1)...(19): siRNA sense strand
ccuaaagggaaguaugaau

SEQ ID NO: 2303805 - RNA, 19 nt, Homo sapiens
  misc_RNA (1)...(19): siRNA sense strand
ugacaaaggcaaauggcuu

SEQ ID NO: 2303806 - RNA, 19 nt, Homo sapiens
  misc_RNA (1)...(19): siRNA sense strand
caguagagaacaagaagau

SEQ ID NO: 2303807 - RNA, 19 nt, Homo sapiens
  misc_RNA (1)...(19): siRNA sense strand
guaucaagauggacagcuu

SEQ ID NO: 2303808 - RNA, 19 nt, Homo sapiens
  misc_RNA (1)...(19): siRNA sense strand
ggaaagaauagcaaaucau

SEQ ID NO: 2303809 - RNA, 19 nt, Homo sapiens
  misc_RNA (1)...(19): siRNA sense strand
caaccaaguaguaagagaa

SEQ ID NO: 2303810 - RNA, 19 nt, Homo sapiens
  misc_RNA (1)...(19): siRNA sense strand
ugacaucaagugaaagaaa

SEQ ID NO: 2303811 - RNA, 19 nt, Homo sapiens
  misc_RNA (1)...(19): siRNA sense strand
ggucaaagagauaaagugu

SEQ ID NO: 2303812 - RNA, 19 nt, Homo sapiens
  misc_RNA (1)...(19): siRNA sense strand
cccaagagaaagaauauaa

SEQ ID NO: 2303813 - RNA, 19 nt, Homo sapiens
  misc_RNA (1)...(19): siRNA sense strand
uaauaacagcagugaggua

SEQ ID NO: 2303814 - RNA, 19 nt, Homo sapiens
  misc_RNA (1)...(19): siRNA sense strand
ugaaagaacacaaggaauc

SEQ ID NO: 2303815 - RNA, 19 nt, Homo sapiens
  misc_RNA (1)...(19): siRNA sense strand
gagaaacuaagaugguaaa

SEQ ID NO: 2303816 - RNA, 19 nt, Homo sapiens
  misc_RNA (1)...(19): siRNA sense strand
aggaaggaguacugauuga

SEQ ID NO: 2303817 - RNA, 19 nt, Homo sapiens
  misc_RNA (1)...(19): siRNA sense strand
aggcaaauggcuucugaaa

SEQ ID NO: 2303818 - RNA, 19 nt, Homo sapiens
  misc_RNA (1)...(19): siRNA sense strand
cuucugagcaggaggguca

SEQ ID NO: 2303819 - RNA, 19 nt, Homo sapiens
  misc_RNA (1)...(19): siRNA sense strand
gcucaaaaggagaaccaua

SEQ ID NO: 2303820 - RNA, 19 nt, Homo sapiens
  misc_RNA (1)...(19): siRNA sense strand
aagaagagguagaggcuag

SEQ ID NO: 2303821 - RNA, 19 nt, Homo sapiens
  misc_RNA (1)...(19): siRNA sense strand
cuaugacaguugagaugaa

SEQ ID NO: 2303822 - RNA, 19 nt, Homo sapiens
  misc_RNA (1)...(19): siRNA sense strand
aacugagguucaagagaaa

SEQ ID NO: 2303823 - RNA, 19 nt, Homo sapiens
  misc_RNA (1)...(19): siRNA sense strand
agagcaagccacugaagaa

SEQ ID NO: 2303824 - RNA, 19 nt, Homo sapiens
  misc_RNA (1)...(19): siRNA sense strand
agacaucucuaguaagaau

SEQ ID NO: 2303825 - RNA, 19 nt, Homo sapiens
  misc_RNA (1)...(19): siRNA sense strand
aagcugacucuuuggauaa

SEQ ID NO: 2303826 - RNA, 19 nt, Homo sapiens
  misc_RNA (1)...(19): siRNA sense strand
aggaaagaauagcaaauca

SEQ ID NO: 2303827 - RNA, 19 nt, Homo sapiens
  misc_RNA (1)...(19): siRNA sense strand
cggaagaagcccucggaca

SEQ ID NO: 2303828 - RNA, 19 nt, Homo sapiens
  misc_RNA (1)...(19): siRNA sense strand
ccaagaaggaugaacccaa

SEQ ID NO: 2303829 - RNA, 19 nt, Homo sapiens
  misc_RNA (1)...(19): siRNA sense strand
ggaagaagcccucggacac

SEQ ID NO: 2303830 - RNA, 19 nt, Homo sapiens
  misc_RNA (1)...(19): siRNA sense strand
cugccaacaacguggugua

SEQ ID NO: 2303831 - RNA, 19 nt, Homo sapiens
  misc_RNA (1)...(19): siRNA sense strand
ugacagaaagggaggcaac

SEQ ID NO: 2303832 - RNA, 19 nt, Homo sapiens
  misc_RNA (1)...(19): siRNA sense strand
uggucaggaagcagaggua

SEQ ID NO: 2303833 - RNA, 19 nt, Homo sapiens
  misc_RNA (1)...(19): siRNA sense strand
acauuagugcccuggagaa

SEQ ID NO: 2303834 - RNA, 19 nt, Homo sapiens
  misc_RNA (1)...(19): siRNA sense strand
ugaagaacuacaagggcaa

SEQ ID NO: 2303835 - RNA, 19 nt, Homo sapiens
  misc_RNA (1)...(19): siRNA sense strand
cugaagaacuacaagggca

SEQ ID NO: 2303836 - RNA, 19 nt, Homo sapiens
  misc_RNA (1)...(19): siRNA sense strand
acgaggagauccaccgcaa

SEQ ID NO: 2303837 - RNA, 19 nt, Homo sapiens
  misc_RNA (1)...(19): siRNA sense strand
ccaccagggagcugcagaa

SEQ ID NO: 2303838 - RNA, 19 nt, Homo sapiens
  misc_RNA (1)...(19): siRNA sense strand
gaggagagcgugacagcca

SEQ ID NO: 2303839 - RNA, 19 nt, Homo sapiens
  misc_RNA (1)...(19): siRNA sense strand
ucuuggagcuggagccaca

SEQ ID NO: 2303840 - RNA, 19 nt, Homo sapiens
  misc_RNA (1)...(19): siRNA sense strand
ucaaauucuacgaguccaa

SEQ ID NO: 2303841 - RNA, 19 nt, Homo sapiens
  misc_RNA (1)...(19): siRNA sense strand
cggaagaaggcgcugcuga

SEQ ID NO: 2303842 - RNA, 19 nt, Homo sapiens
  misc_RNA (1)...(19): siRNA sense strand
uggacauguacgaggagau

SEQ ID NO: 2303843 - RNA, 19 nt, Homo sapiens
  misc_RNA (1)...(19): siRNA sense strand
agucucuguugaugggcaa

SEQ ID NO: 2303844 - RNA, 19 nt, Homo sapiens
  misc_RNA (1)...(19): siRNA sense strand
gaaccuuuaacguggacau

SEQ ID NO: 2303845 - RNA, 19 nt, Homo sapiens
  misc_RNA (1)...(19): siRNA sense strand
gcuuugaguacgaggaaca

SEQ ID NO: 2303846 - RNA, 19 nt, Homo sapiens
  misc_RNA (1)...(19): siRNA sense strand
gugcaggauaucugggaau

SEQ ID NO: 2303847 - RNA, 19 nt, Homo sapiens
  misc_RNA (1)...(19): siRNA sense strand
ucucaacaacggugggcaa

SEQ ID NO: 2303848 - RNA, 19 nt, Homo sapiens
  misc_RNA (1)...(19): siRNA sense strand
agguaaacgugcugccuga

SEQ ID NO: 2303849 - RNA, 19 nt, Homo sapiens
  misc_RNA (1)...(19): siRNA sense strand
ccauacgaguucagagcca

SEQ ID NO: 2303850 - RNA, 19 nt, Homo sapiens
  misc_RNA (1)...(19): siRNA sense strand
ggauaaucgcaaggagaca

SEQ ID NO: 2303851 - RNA, 19 nt, Homo sapiens
  misc_RNA (1)...(19): siRNA sense strand
cggaugggaaggagauuca

SEQ ID NO: 2303852 - RNA, 19 nt, Homo sapiens
  misc_RNA (1)...(19): siRNA sense strand
ggggauaaucgcaaggaga

SEQ ID NO: 2303853 - RNA, 19 nt, Homo sapiens
  misc_RNA (1)...(19): siRNA sense strand
cggaggagcaugcggucuu

SEQ ID NO: 2303854 - RNA, 19 nt, Homo sapiens
  misc_RNA (1)...(19): siRNA sense strand
cagaaggagcuaagcagca

SEQ ID NO: 2303855 - RNA, 19 nt, Homo sapiens
  misc_RNA (1)...(19): siRNA sense strand
gcaucguggaggacaucaa

SEQ ID NO: 2303856 - RNA, 19 nt, Homo sapiens
  misc_RNA (1)...(19): siRNA sense strand
ccgccaagacuggggauaa

SEQ ID NO: 2303857 - RNA, 19 nt, Homo sapiens
  misc_RNA (1)...(19): siRNA sense strand
ugguuaacccucugcgaca

SEQ ID NO: 2303858 - RNA, 19 nt, Homo sapiens
  misc_RNA (1)...(19): siRNA sense strand
ugggcaucguggaggacau

SEQ ID NO: 2303859 - RNA, 19 nt, Homo sapiens
  misc_RNA (1)...(19): siRNA sense strand
gcacuaugcuggauggcuu

SEQ ID NO: 2303860 - RNA, 19 nt, Homo sapiens
  misc_RNA (1)...(19): siRNA sense strand
ccaucuacuccuacggcaa

SEQ ID NO: 2303861 - RNA, 19 nt, Homo sapiens
  misc_RNA (1)...(19): siRNA sense strand
agaaguacgcggagcucau

SEQ ID NO: 2303862 - RNA, 19 nt, Homo sapiens
  misc_RNA (1)...(19): siRNA sense strand
gugcaggacaucugggagu

SEQ ID NO: 2303863 - RNA, 19 nt, Homo sapiens
  misc_RNA (1)...(19): siRNA sense strand
gcaaggaagaguuugagga

SEQ ID NO: 2303864 - RNA, 19 nt, Homo sapiens
  misc_RNA (1)...(19): siRNA sense strand
agaucaaggcggucaucau

SEQ ID NO: 2303865 - RNA, 19 nt, Homo sapiens
  misc_RNA (1)...(19): siRNA sense strand
ggaccuacugggagggaaa

SEQ ID NO: 2303866 - RNA, 19 nt, Homo sapiens
  misc_RNA (1)...(19): siRNA sense strand
gcuacaugugaaagggaaa

SEQ ID NO: 2303867 - RNA, 19 nt, Homo sapiens
  misc_RNA (1)...(19): siRNA sense strand
cuccaaaugaagaaagaaa

SEQ ID NO: 2303868 - RNA, 19 nt, Homo sapiens
  misc_RNA (1)...(19): siRNA sense strand
caguaaaggaccagaccau

SEQ ID NO: 2303869 - RNA, 19 nt, Homo sapiens
  misc_RNA (1)...(19): siRNA sense strand
uggcaucacaagagggcaa

SEQ ID NO: 2303870 - RNA, 19 nt, Homo sapiens
  misc_RNA (1)...(19): siRNA sense strand
cauacgagguaaaugggaa

SEQ ID NO: 2303871 - RNA, 19 nt, Homo sapiens
  misc_RNA (1)...(19): siRNA sense strand
uaggagugaucgagggaga

SEQ ID NO: 2303872 - RNA, 19 nt, Homo sapiens
  misc_RNA (1)...(19): siRNA sense strand
ccuucagggcuguggacaa

SEQ ID NO: 2303873 - RNA, 19 nt, Homo sapiens
  misc_RNA (1)...(19): siRNA sense strand
cuaaaguuuuccaggauaa

SEQ ID NO: 2303874 - RNA, 19 nt, Homo sapiens
  misc_RNA (1)...(19): siRNA sense strand
guggaaaugagcugggaca

SEQ ID NO: 2303875 - RNA, 19 nt, Homo sapiens
  misc_RNA (1)...(19): siRNA sense strand
aaaagaaacaucagggcua

SEQ ID NO: 2303876 - RNA, 19 nt, Homo sapiens
  misc_RNA (1)...(19): siRNA sense strand
acaccaaagcaguggaagu

SEQ ID NO: 2303877 - RNA, 19 nt, Homo sapiens
  misc_RNA (1)...(19): siRNA sense strand
cauuuggagugcaggaaaa

SEQ ID NO: 2303878 - RNA, 19 nt, Homo sapiens
  misc_RNA (1)...(19): siRNA sense strand
gugaaagggaaaagaaaca

SEQ ID NO: 2303879 - RNA, 19 nt, Homo sapiens
  misc_RNA (1)...(19): siRNA sense strand
cuaaugacagugagccaaa

SEQ ID NO: 2303880 - RNA, 19 nt, Homo sapiens
  misc_RNA (1)...(19): siRNA sense strand
gggcuaccgagguggaaau

SEQ ID NO: 2303881 - RNA, 19 nt, Homo sapiens
  misc_RNA (1)...(19): siRNA sense strand
uggcaaaggauauucgaga

SEQ ID NO: 2303882 - RNA, 19 nt, Homo sapiens
  misc_RNA (1)...(19): siRNA sense strand
gggcaauggcuaaggagcu

SEQ ID NO: 2303883 - RNA, 19 nt, Homo sapiens
  misc_RNA (1)...(19): siRNA sense strand
caacaaggccucuggucca

SEQ ID NO: 2303884 - RNA, 19 nt, Homo sapiens
  misc_RNA (1)...(19): siRNA sense strand
gcaccaauguggagaccgu

SEQ ID NO: 2303885 - RNA, 19 nt, Homo sapiens
  misc_RNA (1)...(19): siRNA sense strand
ggaugaagcacguggagac

SEQ ID NO: 2303886 - RNA, 19 nt, Homo sapiens
  misc_RNA (1)...(19): siRNA sense strand
uaaaagaagagcugggaga

SEQ ID NO: 2303887 - RNA, 19 nt, Homo sapiens
  misc_RNA (1)...(19): siRNA sense strand
agggaaaugccgagccuga

SEQ ID NO: 2303888 - RNA, 19 nt, Homo sapiens
  misc_RNA (1)...(19): siRNA sense strand
cuugcuggaccuugggaaa

SEQ ID NO: 2303889 - RNA, 19 nt, Homo sapiens
  misc_RNA (1)...(19): siRNA sense strand
cgaugauggcaacggaaaa

SEQ ID NO: 2303890 - RNA, 19 nt, Homo sapiens
  misc_RNA (1)...(19): siRNA sense strand
aaguugaggucuggagaau

SEQ ID NO: 2303891 - RNA, 19 nt, Homo sapiens
  misc_RNA (1)...(19): siRNA sense strand
ggagagugcccuugccaca

SEQ ID NO: 2303892 - RNA, 19 nt, Homo sapiens
  misc_RNA (1)...(19): siRNA sense strand
ggacaacgacccugggauc

SEQ ID NO: 2303893 - RNA, 19 nt, Homo sapiens
  misc_RNA (1)...(19): siRNA sense strand
gcgagaacacuguggccga

SEQ ID NO: 2303894 - RNA, 19 nt, Homo sapiens
  misc_RNA (1)...(19): siRNA sense strand
ccaaaaucuacguguggaa

SEQ ID NO: 2303895 - RNA, 19 nt, Homo sapiens
  misc_RNA (1)...(19): siRNA sense strand
ucuacacauacgagguaaa

SEQ ID NO: 2303896 - RNA, 19 nt, Homo sapiens
  misc_RNA (1)...(19): siRNA sense strand
gaauggucgaugauggcaa

SEQ ID NO: 2303897 - RNA, 19 nt, Homo sapiens
  misc_RNA (1)...(19): siRNA sense strand
ucgaugauggcaacggaaa

SEQ ID NO: 2303898 - RNA, 19 nt, Homo sapiens
  misc_RNA (1)...(19): siRNA sense strand
ggaaaugagcugggacagu

SEQ ID NO: 2303899 - RNA, 19 nt, Homo sapiens
  misc_RNA (1)...(19): siRNA sense strand
aggccaaugccacggagaa

SEQ ID NO: 2303900 - RNA, 19 nt, Homo sapiens
  misc_RNA (1)...(19): siRNA sense strand
agguaaaugggaagccaca

SEQ ID NO: 2303901 - RNA, 19 nt, Homo sapiens
  misc_RNA (1)...(19): siRNA sense strand
gguccaguaccaugaguca

SEQ ID NO: 2303902 - RNA, 19 nt, Homo sapiens
  misc_RNA (1)...(19): siRNA sense strand
gcuggcagucacagaggua

SEQ ID NO: 2303903 - RNA, 19 nt, Homo sapiens
  misc_RNA (1)...(19): siRNA sense strand
agucacagagguagcaaca

SEQ ID NO: 2303904 - RNA, 19 nt, Homo sapiens
  misc_RNA (1)...(19): siRNA sense strand
cagaagcagaaaucaacua

SEQ ID NO: 2303905 - RNA, 19 nt, Homo sapiens
  misc_RNA (1)...(19): siRNA sense strand
acauuuggagugcaggaaa

SEQ ID NO: 2303906 - RNA, 19 nt, Homo sapiens
  misc_RNA (1)...(19): siRNA sense strand
gcugacaugaagaaugcaa

SEQ ID NO: 2303907 - RNA, 19 nt, Homo sapiens
  misc_RNA (1)...(19): siRNA sense strand
ggucuggagaauugagaac

SEQ ID NO: 2303908 - RNA, 19 nt, Homo sapiens
  misc_RNA (1)...(19): siRNA sense strand
guucgagucaggaugggaa

SEQ ID NO: 2303909 - RNA, 19 nt, Homo sapiens
  misc_RNA (1)...(19): siRNA sense strand
ugcuauagcugcuggggaa

SEQ ID NO: 2303910 - RNA, 19 nt, Homo sapiens
  misc_RNA (1)...(19): siRNA sense strand
auguaaguucugaguguga

SEQ ID NO: 2303911 - RNA, 19 nt, Homo sapiens
  misc_RNA (1)...(19): siRNA sense strand
auguaaguucugaguguga

SEQ ID NO: 2303912 - RNA, 19 nt, Homo sapiens
  misc_RNA (1)...(19): siRNA sense strand
auguaaguucugaguguga

SEQ ID NO: 2303913 - RNA, 19 nt, Homo sapiens
  misc_RNA (1)...(19): siRNA sense strand
auguaaguucugaguguga

SEQ ID NO: 2303914 - RNA, 19 nt, Homo sapiens
  misc_RNA (1)...(19): siRNA sense strand
auguaaguucugaguguga

SEQ ID NO: 2303915 - RNA, 19 nt, Homo sapiens
  misc_RNA (1)...(19): siRNA sense strand
auguaaguucugaguguga

SEQ ID NO: 2303916 - RNA, 19 nt, Homo sapiens
  misc_RNA (1)...(19): siRNA sense strand
auguaaguucugaguguga

SEQ ID NO: 2303917 - RNA, 19 nt, Homo sapiens
  misc_RNA (1)...(19): siRNA sense strand
auguaaguucugaguguga

SEQ ID NO: 2303918 - RNA, 19 nt, Homo sapiens
  misc_RNA (1)...(19): siRNA sense strand
guucaaagcugaugcccaa

SEQ ID NO: 2303919 - RNA, 19 nt, Homo sapiens
  misc_RNA (1)...(19): siRNA sense strand
acucaagaaccaagagcaa

SEQ ID NO: 2303920 - RNA, 19 nt, Homo sapiens
  misc_RNA (1)...(19): siRNA sense strand
ggacagaaaauguaagcaa

SEQ ID NO: 2303921 - RNA, 19 nt, Homo sapiens
  misc_RNA (1)...(19): siRNA sense strand
ggaugaagucggaccacaa

SEQ ID NO: 2303922 - RNA, 19 nt, Homo sapiens
  misc_RNA (1)...(19): siRNA sense strand
guaagcaaguaaaggaaaa

SEQ ID NO: 2303923 - RNA, 19 nt, Homo sapiens
  misc_RNA (1)...(19): siRNA sense strand
gcgcaguauggguuggaaa

SEQ ID NO: 2303924 - RNA, 19 nt, Homo sapiens
  misc_RNA (1)...(19): siRNA sense strand
agaaagugaaugaagggaa

SEQ ID NO: 2303925 - RNA, 19 nt, Homo sapiens
  misc_RNA (1)...(19): siRNA sense strand
cugaaauggaagaagaaaa

SEQ ID NO: 2303926 - RNA, 19 nt, Homo sapiens
  misc_RNA (1)...(19): siRNA sense strand
gaugagauugacugggaaa

SEQ ID NO: 2303927 - RNA, 19 nt, Homo sapiens
  misc_RNA (1)...(19): siRNA sense strand
aggaagaaccagagccuga

SEQ ID NO: 2303928 - RNA, 19 nt, Homo sapiens
  misc_RNA (1)...(19): siRNA sense strand
aaauaaagcuguagccaac

SEQ ID NO: 2303929 - RNA, 19 nt, Homo sapiens
  misc_RNA (1)...(19): siRNA sense strand
acucagacaaagaaguuaa

SEQ ID NO: 2303930 - RNA, 19 nt, Homo sapiens
  misc_RNA (1)...(19): siRNA sense strand
cgcaugaaggagagggcua

SEQ ID NO: 2303931 - RNA, 19 nt, Homo sapiens
  misc_RNA (1)...(19): siRNA sense strand
ccaguaaugagcagcuaaa

SEQ ID NO: 2303932 - RNA, 19 nt, Homo sapiens
  misc_RNA (1)...(19): siRNA sense strand
uaaauaaagcuguagccaa

SEQ ID NO: 2303933 - RNA, 19 nt, Homo sapiens
  misc_RNA (1)...(19): siRNA sense strand
gaguucaggcuuagagaca

SEQ ID NO: 2303934 - RNA, 19 nt, Homo sapiens
  misc_RNA (1)...(19): siRNA sense strand
agaaccaagagcaaagaaa

SEQ ID NO: 2303935 - RNA, 19 nt, Homo sapiens
  misc_RNA (1)...(19): siRNA sense strand
acaaagaaguuaagugccu

SEQ ID NO: 2303936 - RNA, 19 nt, Homo sapiens
  misc_RNA (1)...(19): siRNA sense strand
uggaagaagaaaagagaca

SEQ ID NO: 2303937 - RNA, 19 nt, Homo sapiens
  misc_RNA (1)...(19): siRNA sense strand
gaggugaggaagaggcaga

SEQ ID NO: 2303938 - RNA, 19 nt, Homo sapiens
  misc_RNA (1)...(19): siRNA sense strand
auacaaacaaacaggagau

SEQ ID NO: 2303939 - RNA, 19 nt, Homo sapiens
  misc_RNA (1)...(19): siRNA sense strand
uggagcagacagugagcaa

SEQ ID NO: 2303940 - RNA, 19 nt, Homo sapiens
  misc_RNA (1)...(19): siRNA sense strand
uagccaacaugcaggguga

SEQ ID NO: 2303941 - RNA, 19 nt, Homo sapiens
  misc_RNA (1)...(19): siRNA sense strand
agggaaauaccgaaguuau

SEQ ID NO: 2303942 - RNA, 19 nt, Homo sapiens
  misc_RNA (1)...(19): siRNA sense strand
gagaugagauugacuggga

SEQ ID NO: 2303943 - RNA, 19 nt, Homo sapiens
  misc_RNA (1)...(19): siRNA sense strand
gccugaaacagaagcagua

SEQ ID NO: 2303944 - RNA, 19 nt, Homo sapiens
  misc_RNA (1)...(19): siRNA sense strand
ggagcauuaagaagaagaa

SEQ ID NO: 2303945 - RNA, 19 nt, Homo sapiens
  misc_RNA (1)...(19): siRNA sense strand
aguaaguucuagccaggaa

SEQ ID NO: 2303946 - RNA, 19 nt, Homo sapiens
  misc_RNA (1)...(19): siRNA sense strand
aagugaaugaagggaaaua

SEQ ID NO: 2303947 - RNA, 19 nt, Homo sapiens
  misc_RNA (1)...(19): siRNA sense strand
ccgaaguuaugaagaguuc

SEQ ID NO: 2303948 - RNA, 19 nt, Homo sapiens
  misc_RNA (1)...(19): siRNA sense strand
gcuacaacugugaggagga

SEQ ID NO: 2303949 - RNA, 19 nt, Homo sapiens
  misc_RNA (1)...(19): siRNA sense strand
gguuugggcuaaaaugaaa

SEQ ID NO: 2303950 - RNA, 19 nt, Homo sapiens
  misc_RNA (1)...(19): siRNA sense strand
uguaagcaaguaaaggaaa

SEQ ID NO: 2303951 - RNA, 19 nt, Homo sapiens
  misc_RNA (1)...(19): siRNA sense strand
cagaaaaucaugacuggua

SEQ ID NO: 2303952 - RNA, 19 nt, Homo sapiens
  misc_RNA (1)...(19): siRNA sense strand
agaaagaagacaaucaagu

SEQ ID NO: 2303953 - RNA, 19 nt, Homo sapiens
  misc_RNA (1)...(19): siRNA sense strand
gaaaucaagaagcuggcaa

SEQ ID NO: 2303954 - RNA, 19 nt, Homo sapiens
  misc_RNA (1)...(19): siRNA sense strand
aggcuuagagacagcagua

SEQ ID NO: 2303955 - RNA, 19 nt, Homo sapiens
  misc_RNA (1)...(19): siRNA sense strand
agaaaagagacaagcugua

SEQ ID NO: 2303956 - RNA, 19 nt, Homo sapiens
  misc_RNA (1)...(19): siRNA sense strand
ggugagauggacagaaaau

SEQ ID NO: 2303957 - RNA, 19 nt, Homo sapiens
  misc_RNA (1)...(19): siRNA sense strand
ccaccauucaagagaaagu

SEQ ID NO: 2303958 - RNA, 19 nt, Homo sapiens
  misc_RNA (1)...(19): siRNA sense strand
agccaaagucaugcagaaa

SEQ ID NO: 2303959 - RNA, 19 nt, Homo sapiens
  misc_RNA (1)...(19): siRNA sense strand
caaacgacggcguguguca

SEQ ID NO: 2303960 - RNA, 19 nt, Homo sapiens
  misc_RNA (1)...(19): siRNA sense strand
ugguauugaacaagaagga

SEQ ID NO: 2303961 - RNA, 19 nt, Homo sapiens
  misc_RNA (1)...(19): siRNA sense strand
gauauugguugccaggaga

SEQ ID NO: 2303962 - RNA, 19 nt, Homo sapiens
  misc_RNA (1)...(19): siRNA sense strand
gcaugaaggagagggcuau

SEQ ID NO: 2303963 - RNA, 19 nt, Homo sapiens
  misc_RNA (1)...(19): siRNA sense strand
aucaaaguguggagcccaa

SEQ ID NO: 2303964 - RNA, 19 nt, Homo sapiens
  misc_RNA (1)...(19): siRNA sense strand
ccaagaucuucaaugacuu

SEQ ID NO: 2303965 - RNA, 19 nt, Homo sapiens
  misc_RNA (1)...(19): siRNA sense strand
auguaagcaaguaaaggaa

SEQ ID NO: 2303966 - RNA, 19 nt, Homo sapiens
  misc_RNA (1)...(19): siRNA sense strand
aagcugacauugcgaggau

SEQ ID NO: 2303967 - RNA, 19 nt, Homo sapiens
  misc_RNA (1)...(19): siRNA sense strand
ugauaugugaccuguguuu

SEQ ID NO: 2303968 - RNA, 19 nt, Homo sapiens
  misc_RNA (1)...(19): siRNA sense strand
ucccaccauucaagagaaa

SEQ ID NO: 2303969 - RNA, 19 nt, Homo sapiens
  misc_RNA (1)...(19): siRNA sense strand
gguuugaagaacugggagu

SEQ ID NO: 2303970 - RNA, 19 nt, Homo sapiens
  misc_RNA (1)...(19): siRNA sense strand
gugaaggauccuaagaagu

SEQ ID NO: 2303971 - RNA, 19 nt, Homo sapiens
  misc_RNA (1)...(19): siRNA sense strand
agaguuaccacaauggcaa

SEQ ID NO: 2303972 - RNA, 19 nt, Homo sapiens
  misc_RNA (1)...(19): siRNA sense strand
agacauugacucagagaaa

SEQ ID NO: 2303973 - RNA, 19 nt, Homo sapiens
  misc_RNA (1)...(19): siRNA sense strand
gaggaagaacgcagggaaa

SEQ ID NO: 2303974 - RNA, 19 nt, Homo sapiens
  misc_RNA (1)...(19): siRNA sense strand
agauaaaggaggagcccaa

SEQ ID NO: 2303975 - RNA, 19 nt, Homo sapiens
  misc_RNA (1)...(19): siRNA sense strand
gggagaaggaguugcacaa

SEQ ID NO: 2303976 - RNA, 19 nt, Homo sapiens
  misc_RNA (1)...(19): siRNA sense strand
uggaaagagaggagaaaga

SEQ ID NO: 2303977 - RNA, 19 nt, Homo sapiens
  misc_RNA (1)...(19): siRNA sense strand
gagcaaaguaaaagacaaa

SEQ ID NO: 2303978 - RNA, 19 nt, Homo sapiens
  misc_RNA (1)...(19): siRNA sense strand
cccaagaacuaaaggaaaa

SEQ ID NO: 2303979 - RNA, 19 nt, Homo sapiens
  misc_RNA (1)...(19): siRNA sense strand
aagacaaaguagaaaguga

SEQ ID NO: 2303980 - RNA, 19 nt, Homo sapiens
  misc_RNA (1)...(19): siRNA sense strand
ggacaugcugcuagagaga

SEQ ID NO: 2303981 - RNA, 19 nt, Homo sapiens
  misc_RNA (1)...(19): siRNA sense strand
gaagaauauaucagagaca

SEQ ID NO: 2303982 - RNA, 19 nt, Homo sapiens
  misc_RNA (1)...(19): siRNA sense strand
aaauagaucgagagagaga

SEQ ID NO: 2303983 - RNA, 19 nt, Homo sapiens
  misc_RNA (1)...(19): siRNA sense strand
aguuaagguuauucagcaa

SEQ ID NO: 2303984 - RNA, 19 nt, Homo sapiens
  misc_RNA (1)...(19): siRNA sense strand
cuaggaagaaagagaaaga

SEQ ID NO: 2303985 - RNA, 19 nt, Homo sapiens
  misc_RNA (1)...(19): siRNA sense strand
gagugcaauuaaagaggaa

SEQ ID NO: 2303986 - RNA, 19 nt, Homo sapiens
  misc_RNA (1)...(19): siRNA sense strand
agaccagggcagaggaaga

SEQ ID NO: 2303987 - RNA, 19 nt, Homo sapiens
  misc_RNA (1)...(19): siRNA sense strand
gugcaauuaaagaggaaca

SEQ ID NO: 2303988 - RNA, 19 nt, Homo sapiens
  misc_RNA (1)...(19): siRNA sense strand
ggaccaagccagauggagu

SEQ ID NO: 2303989 - RNA, 19 nt, Homo sapiens
  misc_RNA (1)...(19): siRNA sense strand
caaauauaucacagccaaa

SEQ ID NO: 2303990 - RNA, 19 nt, Homo sapiens
  misc_RNA (1)...(19): siRNA sense strand
caauuaaagaggaacaaga

SEQ ID NO: 2303991 - RNA, 19 nt, Homo sapiens
  misc_RNA (1)...(19): siRNA sense strand
agagaagauuaaagagcca

SEQ ID NO: 2303992 - RNA, 19 nt, Homo sapiens
  misc_RNA (1)...(19): siRNA sense strand
caaaagaaauagaucgaga

SEQ ID NO: 2303993 - RNA, 19 nt, Homo sapiens
  misc_RNA (1)...(19): siRNA sense strand
gagagagagagcagcacaa

SEQ ID NO: 2303994 - RNA, 19 nt, Homo sapiens
  misc_RNA (1)...(19): siRNA sense strand
gaggaauugaagaaacuaa

SEQ ID NO: 2303995 - RNA, 19 nt, Homo sapiens
  misc_RNA (1)...(19): siRNA sense strand
ggagcaaaguaaaagacaa

SEQ ID NO: 2303996 - RNA, 19 nt, Homo sapiens
  misc_RNA (1)...(19): siRNA sense strand
gagaaagggagguucaaaa

SEQ ID NO: 2303997 - RNA, 19 nt, Homo sapiens
  misc_RNA (1)...(19): siRNA sense strand
gauccuuauuggaaagaga

SEQ ID NO: 2303998 - RNA, 19 nt, Homo sapiens
  misc_RNA (1)...(19): siRNA sense strand
gcacaaacgagaagaagcu

SEQ ID NO: 2303999 - RNA, 19 nt, Homo sapiens
  misc_RNA (1)...(19): siRNA sense strand
gaacaagaauuaauggaag

SEQ ID NO: 2304000 - RNA, 19 nt, Homo sapiens
  misc_RNA (1)...(19): siRNA sense strand
aagaagaggagaugacuga

SEQ ID NO: 2304001 - RNA, 19 nt, Homo sapiens
  misc_RNA (1)...(19): siRNA sense strand
aggcacagguucaggcuca

SEQ ID NO: 2304002 - RNA, 19 nt, Homo sapiens
  misc_RNA (1)...(19): siRNA sense strand
ggagauauggguugaaaau

SEQ ID NO: 2304003 - RNA, 19 nt, Homo sapiens
  misc_RNA (1)...(19): siRNA sense strand
acauugacucagagaaaga

SEQ ID NO: 2304004 - RNA, 19 nt, Homo sapiens
  misc_RNA (1)...(19): siRNA sense strand
aaaugauggaagaagcaaa

SEQ ID NO: 2304005 - RNA, 19 nt, Homo sapiens
  misc_RNA (1)...(19): siRNA sense strand
gcugcuaggaagaaagaga

SEQ ID NO: 2304006 - RNA, 19 nt, Homo sapiens
  misc_RNA (1)...(19): siRNA sense strand
caauggagacggaggagga

SEQ ID NO: 2304007 - RNA, 19 nt, Homo sapiens
  misc_RNA (1)...(19): siRNA sense strand
ccaaagaagaggagaugac

SEQ ID NO: 2304008 - RNA, 19 nt, Homo sapiens
  misc_RNA (1)...(19): siRNA sense strand
gagaaagaagauucgaaga

SEQ ID NO: 2304009 - RNA, 19 nt, Homo sapiens
  misc_RNA (1)...(19): siRNA sense strand
cauugaagcacuuaccaaa

SEQ ID NO: 2304010 - RNA, 19 nt, Homo sapiens
  misc_RNA (1)...(19): siRNA sense strand
agacaaaguagaaagugau

SEQ ID NO: 2304011 - RNA, 19 nt, Homo sapiens
  misc_RNA (1)...(19): siRNA sense strand
uuagaaucaaccugggaaa

SEQ ID NO: 2304012 - RNA, 19 nt, Homo sapiens
  misc_RNA (1)...(19): siRNA sense strand
cuauaaaggagauaaagga

SEQ ID NO: 2304013 - RNA, 19 nt, Homo sapiens
  misc_RNA (1)...(19): siRNA sense strand
uaaaggagauaaaggagga

SEQ ID NO: 2304014 - RNA, 19 nt, Homo sapiens
  misc_RNA (1)...(19): siRNA sense strand
aggaggagcccaaagaaga

SEQ ID NO: 2304015 - RNA, 19 nt, Homo sapiens
  misc_RNA (1)...(19): siRNA sense strand
uggaggaauugaagaaacu

SEQ ID NO: 2304016 - RNA, 19 nt, Homo sapiens
  misc_RNA (1)...(19): siRNA sense strand
agccuauaaaggagauaaa

SEQ ID NO: 2304017 - RNA, 19 nt, Homo sapiens
  misc_RNA (1)...(19): siRNA sense strand
agaaagagaaagaagauuc

SEQ ID NO: 2304018 - RNA, 19 nt, Homo sapiens
  misc_RNA (1)...(19): siRNA sense strand
caaaguagaaagugaucca

SEQ ID NO: 2304019 - RNA, 19 nt, Homo sapiens
  misc_RNA (1)...(19): siRNA sense strand
acaaauauaucacagccaa

SEQ ID NO: 2304020 - RNA, 19 nt, Homo sapiens
  misc_RNA (1)...(19): siRNA sense strand
aggagaugacugaagaaga

SEQ ID NO: 2304021 - RNA, 19 nt, Homo sapiens
  misc_RNA (1)...(19): siRNA sense strand
aaagaagauucgaagacca

SEQ ID NO: 2304022 - RNA, 19 nt, Homo sapiens
  misc_RNA (1)...(19): siRNA sense strand
gcagcacaaacgagaagaa

SEQ ID NO: 2304023 - RNA, 19 nt, Homo sapiens
  misc_RNA (1)...(19): siRNA sense strand
guguagcaaugaugcaaau

SEQ ID NO: 2304024 - RNA, 19 nt, Homo sapiens
  misc_RNA (1)...(19): siRNA sense strand
ucucgauggagcaaaguaa

SEQ ID NO: 2304025 - RNA, 19 nt, Homo sapiens
  misc_RNA (1)...(19): siRNA sense strand
agccaagaauuuagacuca

SEQ ID NO: 2304026 - RNA, 19 nt, Homo sapiens
  misc_RNA (1)...(19): siRNA sense strand
ccuaaagaagagccuauaa

SEQ ID NO: 2304027 - RNA, 19 nt, Homo sapiens
  misc_RNA (1)...(19): siRNA sense strand
ugcuaggaagaaagagaaa

SEQ ID NO: 2304028 - RNA, 19 nt, Homo sapiens
  misc_RNA (1)...(19): siRNA sense strand
gagagagcacuuuaggcaa

SEQ ID NO: 2304029 - RNA, 19 nt, Homo sapiens
  misc_RNA (1)...(19): siRNA sense strand
agaccagaggugagaagau

SEQ ID NO: 2304030 - RNA, 19 nt, Homo sapiens
  misc_RNA (1)...(19): siRNA sense strand
aggccagagcuuugagcaa

SEQ ID NO: 2304031 - RNA, 19 nt, Homo sapiens
  misc_RNA (1)...(19): siRNA sense strand
aagacgaacaccugaacaa

SEQ ID NO: 2304032 - RNA, 19 nt, Homo sapiens
  misc_RNA (1)...(19): siRNA sense strand
cagaaagauagaaggaaac

SEQ ID NO: 2304033 - RNA, 19 nt, Homo sapiens
  misc_RNA (1)...(19): siRNA sense strand
aagccuacgccaagcuaaa

SEQ ID NO: 2304034 - RNA, 19 nt, Homo sapiens
  misc_RNA (1)...(19): siRNA sense strand
guggaaacgaccaggggaa

SEQ ID NO: 2304035 - RNA, 19 nt, Homo sapiens
  misc_RNA (1)...(19): siRNA sense strand
gggaauucuggauggcauu

SEQ ID NO: 2304036 - RNA, 19 nt, Homo sapiens
  misc_RNA (1)...(19): siRNA sense strand
gagcaaaugaggcaggagu

SEQ ID NO: 2304037 - RNA, 19 nt, Homo sapiens
  misc_RNA (1)...(19): siRNA sense strand
gggcaggaggaguguaguu

SEQ ID NO: 2304038 - RNA, 19 nt, Homo sapiens
  misc_RNA (1)...(19): siRNA sense strand
gcuaaaugggagcuaugaa

SEQ ID NO: 2304039 - RNA, 19 nt, Homo sapiens
  misc_RNA (1)...(19): siRNA sense strand
aggaagacgcgauccacaa

SEQ ID NO: 2304040 - RNA, 19 nt, Homo sapiens
  misc_RNA (1)...(19): siRNA sense strand
gggacaagcugaagcagug

SEQ ID NO: 2304041 - RNA, 19 nt, Homo sapiens
  misc_RNA (1)...(19): siRNA sense strand
cagaggaggagcagcgguu

SEQ ID NO: 2304042 - RNA, 19 nt, Homo sapiens
  misc_RNA (1)...(19): siRNA sense strand
augcagaaagauagaagga

SEQ ID NO: 2304043 - RNA, 19 nt, Homo sapiens
  misc_RNA (1)...(19): siRNA sense strand
acaucaaauucaagaagcu

SEQ ID NO: 2304044 - RNA, 19 nt, Homo sapiens
  misc_RNA (1)...(19): siRNA sense strand
agcuggaguuugaugaauu

SEQ ID NO: 2304045 - RNA, 19 nt, Homo sapiens
  misc_RNA (1)...(19): siRNA sense strand
gccagagaaucgagcucau

SEQ ID NO: 2304046 - RNA, 19 nt, Homo sapiens
  misc_RNA (1)...(19): siRNA sense strand
ggggaauucuggauggcau

SEQ ID NO: 2304047 - RNA, 19 nt, Homo sapiens
  misc_RNA (1)...(19): siRNA sense strand
cugagaaagaugaggggca

SEQ ID NO: 2304048 - RNA, 19 nt, Homo sapiens
  misc_RNA (1)...(19): siRNA sense strand
acaaagacgaacaccugaa

SEQ ID NO: 2304049 - RNA, 19 nt, Homo sapiens
  misc_RNA (1)...(19): siRNA sense strand
cagauaaauugguggaaaa

SEQ ID NO: 2304050 - RNA, 19 nt, Homo sapiens
  misc_RNA (1)...(19): siRNA sense strand
gagacaagagggagagaau

SEQ ID NO: 2304051 - RNA, 19 nt, Homo sapiens
  misc_RNA (1)...(19): siRNA sense strand
cagcaauauuagcgaguau

SEQ ID NO: 2304052 - RNA, 19 nt, Homo sapiens
  misc_RNA (1)...(19): siRNA sense strand
gaacaagaugaaagaguau

SEQ ID NO: 2304053 - RNA, 19 nt, Homo sapiens
  misc_RNA (1)...(19): siRNA sense strand
ucgcaaacguggaagaaaa

SEQ ID NO: 2304054 - RNA, 19 nt, Homo sapiens
  misc_RNA (1)...(19): siRNA sense strand
ccagaaauucagucaguaa

SEQ ID NO: 2304055 - RNA, 19 nt, Homo sapiens
  misc_RNA (1)...(19): siRNA sense strand
augugaagcuaaaggaaau

SEQ ID NO: 2304056 - RNA, 19 nt, Homo sapiens
  misc_RNA (1)...(19): siRNA sense strand
ugaccagaguccaaggaaa

SEQ ID NO: 2304057 - RNA, 19 nt, Homo sapiens
  misc_RNA (1)...(19): siRNA sense strand
ggauaauuccaucgaacaa

SEQ ID NO: 2304058 - RNA, 19 nt, Homo sapiens
  misc_RNA (1)...(19): siRNA sense strand
gaguaaagguaucgggaag

SEQ ID NO: 2304059 - RNA, 19 nt, Homo sapiens
  misc_RNA (1)...(19): siRNA sense strand
aagaagaaacagucacaaa

SEQ ID NO: 2304060 - RNA, 19 nt, Homo sapiens
  misc_RNA (1)...(19): siRNA sense strand
ucgaauacggagagggaga

SEQ ID NO: 2304061 - RNA, 19 nt, Homo sapiens
  misc_RNA (1)...(19): siRNA sense strand
ggagagaaacaaaagaaaa

SEQ ID NO: 2304062 - RNA, 19 nt, Homo sapiens
  misc_RNA (1)...(19): siRNA sense strand
acaaucaaguggagaguca

SEQ ID NO: 2304063 - RNA, 19 nt, Homo sapiens
  misc_RNA (1)...(19): siRNA sense strand
cgaagaagaugcugggucu

SEQ ID NO: 2304064 - RNA, 19 nt, Homo sapiens
  misc_RNA (1)...(19): siRNA sense strand
gcagaauggaccaggccua

SEQ ID NO: 2304065 - RNA, 19 nt, Homo sapiens
  misc_RNA (1)...(19): siRNA sense strand
agaugaaaccuuuggugaa

SEQ ID NO: 2304066 - RNA, 19 nt, Homo sapiens
  misc_RNA (1)...(19): siRNA sense strand
cuucaaauaaacugggaau

SEQ ID NO: 2304067 - RNA, 19 nt, Homo sapiens
  misc_RNA (1)...(19): siRNA sense strand
ccaaaauucccaaaagaaa

SEQ ID NO: 2304068 - RNA, 19 nt, Homo sapiens
  misc_RNA (1)...(19): siRNA sense strand
acagaagauggcaggauaa

SEQ ID NO: 2304069 - RNA, 19 nt, Homo sapiens
  misc_RNA (1)...(19): siRNA sense strand
aaccaaagauggagaaaau

SEQ ID NO: 2304070 - RNA, 19 nt, Homo sapiens
  misc_RNA (1)...(19): siRNA sense strand
uuuccaagauuaaggacua

SEQ ID NO: 2304071 - RNA, 19 nt, Homo sapiens
  misc_RNA (1)...(19): siRNA sense strand
cgggaagauaucaggagua

SEQ ID NO: 2304072 - RNA, 19 nt, Homo sapiens
  misc_RNA (1)...(19): siRNA sense strand
ccaaagauggagaaaauua

SEQ ID NO: 2304073 - RNA, 19 nt, Homo sapiens
  misc_RNA (1)...(19): siRNA sense strand
cuuugaagauagagaaugu

SEQ ID NO: 2304074 - RNA, 19 nt, Homo sapiens
  misc_RNA (1)...(19): siRNA sense strand
ggaacugaccagaguccaa

SEQ ID NO: 2304075 - RNA, 19 nt, Homo sapiens
  misc_RNA (1)...(19): siRNA sense strand
ccagauaggaauccacaaa

SEQ ID NO: 2304076 - RNA, 19 nt, Homo sapiens
  misc_RNA (1)...(19): siRNA sense strand
cgcuaugucagaagaaaua

SEQ ID NO: 2304077 - RNA, 19 nt, Homo sapiens
  misc_RNA (1)...(19): siRNA sense strand
caauauugauguuguggau

SEQ ID NO: 2304078 - RNA, 19 nt, Homo sapiens
  misc_RNA (1)...(19): siRNA sense strand
uugaaguggaggagggaga

SEQ ID NO: 2304079 - RNA, 19 nt, Homo sapiens
  misc_RNA (1)...(19): siRNA sense strand
ggacuauuguacagaaaau

SEQ ID NO: 2304080 - RNA, 19 nt, Homo sapiens
  misc_RNA (1)...(19): siRNA sense strand
ggaagaagaaacagucaca

SEQ ID NO: 2304081 - RNA, 19 nt, Homo sapiens
  misc_RNA (1)...(19): siRNA sense strand
uuaccaaaggggagagaaa

SEQ ID NO: 2304082 - RNA, 19 nt, Homo sapiens
  misc_RNA (1)...(19): siRNA sense strand
ggcagaagguggaagaagu

SEQ ID NO: 2304083 - RNA, 19 nt, Homo sapiens
  misc_RNA (1)...(19): siRNA sense strand
cuuuagaggaccaagguau

SEQ ID NO: 2304084 - RNA, 19 nt, Homo sapiens
  misc_RNA (1)...(19): siRNA sense strand
ggccuagaguacagaguga

SEQ ID NO: 2304085 - RNA, 19 nt, Homo sapiens
  misc_RNA (1)...(19): siRNA sense strand
gggaaaucuugcugcuuga

SEQ ID NO: 2304086 - RNA, 19 nt, Homo sapiens
  misc_RNA (1)...(19): siRNA sense strand
agaguauacaugagccaaa

SEQ ID NO: 2304087 - RNA, 19 nt, Homo sapiens
  misc_RNA (1)...(19): siRNA sense strand
caggauaauuauugaugga

SEQ ID NO: 2304088 - RNA, 19 nt, Homo sapiens
  misc_RNA (1)...(19): siRNA sense strand
gaagaggaauagaggugga

SEQ ID NO: 2304089 - RNA, 19 nt, Homo sapiens
  misc_RNA (1)...(19): siRNA sense strand
augugaggcugaaggagaa

SEQ ID NO: 2304090 - RNA, 19 nt, Homo sapiens
  misc_RNA (1)...(19): siRNA sense strand
ggauauuagaaaugcuaca

SEQ ID NO: 2304091 - RNA, 19 nt, Homo sapiens
  misc_RNA (1)...(19): siRNA sense strand
ggacagaguacauggacgu

SEQ ID NO: 2304092 - RNA, 19 nt, Homo sapiens
  misc_RNA (1)...(19): siRNA sense strand
uggaaaguacucaguuaaa

SEQ ID NO: 2304093 - RNA, 19 nt, Homo sapiens
  misc_RNA (1)...(19): siRNA sense strand
gugaauacagugacaguga

SEQ ID NO: 2304094 - RNA, 19 nt, Homo sapiens
  misc_RNA (1)...(19): siRNA sense strand
ggagaagggaucuguugaa

SEQ ID NO: 2304095 - RNA, 19 nt, Homo sapiens
  misc_RNA (1)...(19): siRNA sense strand
aauggaaguucuacagcaa

SEQ ID NO: 2304096 - RNA, 19 nt, Homo sapiens
  misc_RNA (1)...(19): siRNA sense strand
ccuaccaggacaaaggaaa

SEQ ID NO: 2304097 - RNA, 19 nt, Homo sapiens
  misc_RNA (1)...(19): siRNA sense strand
cuaccaggacaaaggaaau

SEQ ID NO: 2304098 - RNA, 19 nt, Homo sapiens
  misc_RNA (1)...(19): siRNA sense strand
ccucucaacccaaggaaau

SEQ ID NO: 2304099 - RNA, 19 nt, Homo sapiens
  misc_RNA (1)...(19): siRNA sense strand
guggaaaguacucaguuaa

SEQ ID NO: 2304100 - RNA, 19 nt, Homo sapiens
  misc_RNA (1)...(19): siRNA sense strand
aaugugaagcuaaaggaaa

SEQ ID NO: 2304101 - RNA, 19 nt, Homo sapiens
  misc_RNA (1)...(19): siRNA sense strand
gggagagaaacaaaagaaa

SEQ ID NO: 2304102 - RNA, 19 nt, Homo sapiens
  misc_RNA (1)...(19): siRNA sense strand
ucaaguucauccacagaaa

SEQ ID NO: 2304103 - RNA, 19 nt, Homo sapiens
  misc_RNA (1)...(19): siRNA sense strand
ccucaaauguccauggaac

SEQ ID NO: 2304104 - RNA, 19 nt, Homo sapiens
  misc_RNA (1)...(19): siRNA sense strand
uggaagaacacaucccaaa

SEQ ID NO: 2304105 - RNA, 19 nt, Homo sapiens
  misc_RNA (1)...(19): siRNA sense strand
gcaacuaccaaguacaaau

SEQ ID NO: 2304106 - RNA, 19 nt, Homo sapiens
  misc_RNA (1)...(19): siRNA sense strand
gagaagggaguaaagguau

SEQ ID NO: 2304107 - RNA, 19 nt, Homo sapiens
  misc_RNA (1)...(19): siRNA sense strand
ggaguaaagguaucgggaa

SEQ ID NO: 2304108 - RNA, 19 nt, Homo sapiens
  misc_RNA (1)...(19): siRNA sense strand
cugacagcuuagucgaaua

SEQ ID NO: 2304109 - RNA, 19 nt, Homo sapiens
  misc_RNA (1)...(19): siRNA sense strand
ccaaauugcauaugcuuga

SEQ ID NO: 2304110 - RNA, 19 nt, Homo sapiens
  misc_RNA (1)...(19): siRNA sense strand
cgugaacgaaguagggaga

SEQ ID NO: 2304111 - RNA, 19 nt, Homo sapiens
  misc_RNA (1)...(19): siRNA sense strand
augucaagguccaggcuau

SEQ ID NO: 2304112 - RNA, 19 nt, Homo sapiens
  misc_RNA (1)...(19): siRNA sense strand
gcauccagacccagaaauu

SEQ ID NO: 2304113 - RNA, 19 nt, Homo sapiens
  misc_RNA (1)...(19): siRNA sense strand
gcuugaaaguacaggugaa

SEQ ID NO: 2304114 - RNA, 19 nt, Homo sapiens
  misc_RNA (1)...(19): siRNA sense strand
gaguaaaagucuacagaau

SEQ ID NO: 2304115 - RNA, 19 nt, Homo sapiens
  misc_RNA (1)...(19): siRNA sense strand
guaaauacaucaaagcgaa

SEQ ID NO: 2304116 - RNA, 19 nt, Homo sapiens
  misc_RNA (1)...(19): siRNA sense strand
ggcuacaagcuaugaaaua

SEQ ID NO: 2304117 - RNA, 19 nt, Homo sapiens
  misc_RNA (1)...(19): siRNA sense strand
auacagaggguguggaaaa

SEQ ID NO: 2304118 - RNA, 19 nt, Homo sapiens
  misc_RNA (1)...(19): siRNA sense strand
gauuuaugccaaugugaaa

SEQ ID NO: 2304119 - RNA, 19 nt, Homo sapiens
  misc_RNA (1)...(19): siRNA sense strand
gcaagauggcagaggcuga

SEQ ID NO: 2304120 - RNA, 19 nt, Homo sapiens
  misc_RNA (1)...(19): siRNA sense strand
uggauaauacugugggcaa

SEQ ID NO: 2304121 - RNA, 19 nt, Homo sapiens
  misc_RNA (1)...(19): siRNA sense strand
gcuucaagacaauggguau

SEQ ID NO: 2304122 - RNA, 19 nt, Homo sapiens
  misc_RNA (1)...(19): siRNA sense strand
gcugcaaaugguagauaua

SEQ ID NO: 2304123 - RNA, 19 nt, Homo sapiens
  misc_RNA (1)...(19): siRNA sense strand
ccucagaagugcaugggau

SEQ ID NO: 2304124 - RNA, 19 nt, Homo sapiens
  misc_RNA (1)...(19): siRNA sense strand
ccccaaaucuggaggaauu

SEQ ID NO: 2304125 - RNA, 19 nt, Homo sapiens
  misc_RNA (1)...(19): siRNA sense strand
uguaaaaguagaagaggaa

SEQ ID NO: 2304126 - RNA, 19 nt, Homo sapiens
  misc_RNA (1)...(19): siRNA sense strand
cagcauuuguucagggcuu

SEQ ID NO: 2304127 - RNA, 19 nt, Homo sapiens
  misc_RNA (1)...(19): siRNA sense strand
ugauaagcuucuuggcaau

SEQ ID NO: 2304128 - RNA, 19 nt, Homo sapiens
  misc_RNA (1)...(19): siRNA sense strand
augauaagcuucuuggcaa

SEQ ID NO: 2304129 - RNA, 19 nt, Homo sapiens
  misc_RNA (1)...(19): siRNA sense strand
ccaaugugaaacagggauu

SEQ ID NO: 2304130 - RNA, 19 nt, Homo sapiens
  misc_RNA (1)...(19): siRNA sense strand
caccaaaccuacagaacca

SEQ ID NO: 2304131 - RNA, 19 nt, Homo sapiens
  misc_RNA (1)...(19): siRNA sense strand
guaccagguuacacagcaa

SEQ ID NO: 2304132 - RNA, 19 nt, Homo sapiens
  misc_RNA (1)...(19): siRNA sense strand
caucauacuuuaagcagga

SEQ ID NO: 2304133 - RNA, 19 nt, Homo sapiens
  misc_RNA (1)...(19): siRNA sense strand
ugaaaguacaggugaaaau

SEQ ID NO: 2304134 - RNA, 19 nt, Homo sapiens
  misc_RNA (1)...(19): siRNA sense strand
cugcaagcccugaaaguga

SEQ ID NO: 2304135 - RNA, 19 nt, Homo sapiens
  misc_RNA (1)...(19): siRNA sense strand
caauacagaggguguggaa

SEQ ID NO: 2304136 - RNA, 19 nt, Homo sapiens
  misc_RNA (1)...(19): siRNA sense strand
ugguagauauagcuugaaa

SEQ ID NO: 2304137 - RNA, 19 nt, Homo sapiens
  misc_RNA (1)...(19): siRNA sense strand
guguguucgaugaguauaa

SEQ ID NO: 2304138 - RNA, 19 nt, Homo sapiens
  misc_RNA (1)...(19): siRNA sense strand
acgucuuacaggagguuua

SEQ ID NO: 2304139 - RNA, 19 nt, Homo sapiens
  misc_RNA (1)...(19): siRNA sense strand
ggacgaaaauacuacacaa

SEQ ID NO: 2304140 - RNA, 19 nt, Homo sapiens
  misc_RNA (1)...(19): siRNA sense strand
gggccaggcuacaagcuau

SEQ ID NO: 2304141 - RNA, 19 nt, Homo sapiens
  misc_RNA (1)...(19): siRNA sense strand
uggcagaggcugacagacu

SEQ ID NO: 2304142 - RNA, 19 nt, Homo sapiens
  misc_RNA (1)...(19): siRNA sense strand
agauauagcuugaaagugc

SEQ ID NO: 2304143 - RNA, 19 nt, Homo sapiens
  misc_RNA (1)...(19): siRNA sense strand
augaaugcuccaaggaaau

SEQ ID NO: 2304144 - RNA, 19 nt, Homo sapiens
  misc_RNA (1)...(19): siRNA sense strand
gagaaacacaugaaagcca

SEQ ID NO: 2304145 - RNA, 19 nt, Homo sapiens
  misc_RNA (1)...(19): siRNA sense strand
aaggaaaucaguaggcaga

SEQ ID NO: 2304146 - RNA, 19 nt, Homo sapiens
  misc_RNA (1)...(19): siRNA sense strand
cuguaaaaguagaagagga

SEQ ID NO: 2304147 - RNA, 19 nt, Homo sapiens
  misc_RNA (1)...(19): siRNA sense strand
gguguggaaaagagggaaa

SEQ ID NO: 2304148 - RNA, 19 nt, Homo sapiens
  misc_RNA (1)...(19): siRNA sense strand
caauaauguucaugcaaag

SEQ ID NO: 2304149 - RNA, 19 nt, Homo sapiens
  misc_RNA (1)...(19): siRNA sense strand
acuuacacccugaacaaua

SEQ ID NO: 2304150 - RNA, 19 nt, Homo sapiens
  misc_RNA (1)...(19): siRNA sense strand
cucuggaacuggagacauu

SEQ ID NO: 2304151 - RNA, 19 nt, Homo sapiens
  misc_RNA (1)...(19): siRNA sense strand
cagugguccuccugagauu

SEQ ID NO: 2304152 - RNA, 19 nt, Homo sapiens
  misc_RNA (1)...(19): siRNA sense strand
cuucaagacaauggguaua

SEQ ID NO: 2304153 - RNA, 19 nt, Homo sapiens
  misc_RNA (1)...(19): siRNA sense strand
aagaaagagaauggaacaa

SEQ ID NO: 2304154 - RNA, 19 nt, Homo sapiens
  misc_RNA (1)...(19): siRNA sense strand
ccuacaauacagagggugu

SEQ ID NO: 2304155 - RNA, 19 nt, Homo sapiens
  misc_RNA (1)...(19): siRNA sense strand
acagcaaugaugaucgaaa

SEQ ID NO: 2304156 - RNA, 19 nt, Homo sapiens
  misc_RNA (1)...(19): siRNA sense strand
ccuuauuauaguugugaca

SEQ ID NO: 2304157 - RNA, 19 nt, Homo sapiens
  misc_RNA (1)...(19): siRNA sense strand
agaaaggauuugagguggu

SEQ ID NO: 2304158 - RNA, 19 nt, Homo sapiens
  misc_RNA (1)...(19): siRNA sense strand
uguggaagccuuuguggaa

SEQ ID NO: 2304159 - RNA, 19 nt, Homo sapiens
  misc_RNA (1)...(19): siRNA sense strand
gacaagaaagagaauggaa

SEQ ID NO: 2304160 - RNA, 19 nt, Homo sapiens
  misc_RNA (1)...(19): siRNA sense strand
ugaaaaggcaaaugucaua

SEQ ID NO: 2304161 - RNA, 19 nt, Homo sapiens
  misc_RNA (1)...(19): siRNA sense strand
cgacagcaaaggagagauc

SEQ ID NO: 2304162 - RNA, 19 nt, Homo sapiens
  misc_RNA (1)...(19): siRNA sense strand
cuugaaaguacaggugaaa

SEQ ID NO: 2304163 - RNA, 19 nt, Homo sapiens
  misc_RNA (1)...(19): siRNA sense strand
ccaagaugacuuuaacaau

SEQ ID NO: 2304164 - RNA, 19 nt, Homo sapiens
  misc_RNA (1)...(19): siRNA sense strand
aguaaauacaucaaagcga

SEQ ID NO: 2304165 - RNA, 19 nt, Homo sapiens
  misc_RNA (1)...(19): siRNA sense strand
aguacagcuucaagacaau

SEQ ID NO: 2304166 - RNA, 19 nt, Homo sapiens
  misc_RNA (1)...(19): siRNA sense strand
cuacagaaccagaugugca

SEQ ID NO: 2304167 - RNA, 19 nt, Homo sapiens
  misc_RNA (1)...(19): siRNA sense strand
guggaagccuuuguggaaa

SEQ ID NO: 2304168 - RNA, 19 nt, Homo sapiens
  misc_RNA (1)...(19): siRNA sense strand
acaugaaagccacagaauu

SEQ ID NO: 2304169 - RNA, 19 nt, Homo sapiens
  misc_RNA (1)...(19): siRNA sense strand
agagagcagacaagaaaga

SEQ ID NO: 2304170 - RNA, 19 nt, Homo sapiens
  misc_RNA (1)...(19): siRNA sense strand
ggguguguucgaugaguau

SEQ ID NO: 2304171 - RNA, 19 nt, Homo sapiens
  misc_RNA (1)...(19): siRNA sense strand
cagcaaacgguaauauuca

SEQ ID NO: 2304172 - RNA, 19 nt, Homo sapiens
  misc_RNA (1)...(19): siRNA sense strand
ccacaaaggacauggggaa

SEQ ID NO: 2304173 - RNA, 19 nt, Homo sapiens
  misc_RNA (1)...(19): siRNA sense strand
acgaggaggaggaggaaga

SEQ ID NO: 2304174 - RNA, 19 nt, Homo sapiens
  misc_RNA (1)...(19): siRNA sense strand
aggaggaagaggagagcau

SEQ ID NO: 2304175 - RNA, 19 nt, Homo sapiens
  misc_RNA (1)...(19): siRNA sense strand
agcaggaggaggagcguaa

SEQ ID NO: 2304176 - RNA, 19 nt, Homo sapiens
  misc_RNA (1)...(19): siRNA sense strand
aaguaugggcugaagaaga

SEQ ID NO: 2304177 - RNA, 19 nt, Homo sapiens
  misc_RNA (1)...(19): siRNA sense strand
cgagauaaguaugggcuga

SEQ ID NO: 2304178 - RNA, 19 nt, Homo sapiens
  misc_RNA (1)...(19): siRNA sense strand
aggaggagcguaaggccaa

SEQ ID NO: 2304179 - RNA, 19 nt, Homo sapiens
  misc_RNA (1)...(19): siRNA sense strand
ggggagaggaggagaagga

SEQ ID NO: 2304180 - RNA, 19 nt, Homo sapiens
  misc_RNA (1)...(19): siRNA sense strand
cugaagaagaaggaggaga

SEQ ID NO: 2304181 - RNA, 19 nt, Homo sapiens
  misc_RNA (1)...(19): siRNA sense strand
aggaggagaaggaagcaga

SEQ ID NO: 2304182 - RNA, 19 nt, Homo sapiens
  misc_RNA (1)...(19): siRNA sense strand
aggaggaggaggaagagga

SEQ ID NO: 2304183 - RNA, 19 nt, Homo sapiens
  misc_RNA (1)...(19): siRNA sense strand
ucugaaagcugaagaggga

SEQ ID NO: 2304184 - RNA, 19 nt, Homo sapiens
  misc_RNA (1)...(19): siRNA sense strand
ccauggacauccuggccaa

SEQ ID NO: 2304185 - RNA, 19 nt, Homo sapiens
  misc_RNA (1)...(19): siRNA sense strand
aacuuauguuggagggaau

SEQ ID NO: 2304186 - RNA, 19 nt, Homo sapiens
  misc_RNA (1)...(19): siRNA sense strand
uggagauucuagaagccaa

SEQ ID NO: 2304187 - RNA, 19 nt, Homo sapiens
  misc_RNA (1)...(19): siRNA sense strand
cacaagcagcggagaguca

SEQ ID NO: 2304188 - RNA, 19 nt, Homo sapiens
  misc_RNA (1)...(19): siRNA sense strand
auggaaacauucaacgaga

SEQ ID NO: 2304189 - RNA, 19 nt, Homo sapiens
  misc_RNA (1)...(19): siRNA sense strand
ggaugagguugguggccgu

SEQ ID NO: 2304190 - RNA, 19 nt, Homo sapiens
  misc_RNA (1)...(19): siRNA sense strand
aagaaguuccugaugucaa

SEQ ID NO: 2304191 - RNA, 19 nt, Homo sapiens
  misc_RNA (1)...(19): siRNA sense strand
gcuugguguccgaaugcaa

SEQ ID NO: 2304192 - RNA, 19 nt, Homo sapiens
  misc_RNA (1)...(19): siRNA sense strand
cauucaacgagaaggcuga

SEQ ID NO: 2304193 - RNA, 19 nt, Homo sapiens
  misc_RNA (1)...(19): siRNA sense strand
gugaagguggucauggcaa

SEQ ID NO: 2304194 - RNA, 19 nt, Homo sapiens
  misc_RNA (1)...(19): siRNA sense strand
ggugagacagcgagaacaa

SEQ ID NO: 2304195 - RNA, 19 nt, Homo sapiens
  misc_RNA (1)...(19): siRNA sense strand
gggaaaggauuuugcacaa

SEQ ID NO: 2304196 - RNA, 19 nt, Homo sapiens
  misc_RNA (1)...(19): siRNA sense strand
ugaaaguagcaguaacaaa

SEQ ID NO: 2304197 - RNA, 19 nt, Homo sapiens
  misc_RNA (1)...(19): siRNA sense strand
ggcaaaagaugcaggaaga

SEQ ID NO: 2304198 - RNA, 19 nt, Homo sapiens
  misc_RNA (1)...(19): siRNA sense strand
aaacugaagagguuggaaa

SEQ ID NO: 2304199 - RNA, 19 nt, Homo sapiens
  misc_RNA (1)...(19): siRNA sense strand
gcgcauaaagucaggcaga

SEQ ID NO: 2304200 - RNA, 19 nt, Homo sapiens
  misc_RNA (1)...(19): siRNA sense strand
cuauagugccaguaguaaa

SEQ ID NO: 2304201 - RNA, 19 nt, Homo sapiens
  misc_RNA (1)...(19): siRNA sense strand
gaagaaagcuguauugcca

SEQ ID NO: 2304202 - RNA, 19 nt, Homo sapiens
  misc_RNA (1)...(19): siRNA sense strand
aauggaacgugaaaggaaa

SEQ ID NO: 2304203 - RNA, 19 nt, Homo sapiens
  misc_RNA (1)...(19): siRNA sense strand
agagaguccuggugagaca

SEQ ID NO: 2304204 - RNA, 19 nt, Homo sapiens
  misc_RNA (1)...(19): siRNA sense strand
accuauagcuacuggauau

SEQ ID NO: 2304205 - RNA, 19 nt, Homo sapiens
  misc_RNA (1)...(19): siRNA sense strand
cugugaacucugauagaua

SEQ ID NO: 2304206 - RNA, 19 nt, Homo sapiens
  misc_RNA (1)...(19): siRNA sense strand
aggcaaauggaacgugaaa

SEQ ID NO: 2304207 - RNA, 19 nt, Homo sapiens
  misc_RNA (1)...(19): siRNA sense strand
uggccuuaccuaugagaaa

SEQ ID NO: 2304208 - RNA, 19 nt, Homo sapiens
  misc_RNA (1)...(19): siRNA sense strand
ggccagaacuauagugcca

SEQ ID NO: 2304209 - RNA, 19 nt, Homo sapiens
  misc_RNA (1)...(19): siRNA sense strand
ucaaauagaacgaccaaaa

SEQ ID NO: 2304210 - RNA, 19 nt, Homo sapiens
  misc_RNA (1)...(19): siRNA sense strand
uggcagaagaccuccaaua

SEQ ID NO: 2304211 - RNA, 19 nt, Homo sapiens
  misc_RNA (1)...(19): siRNA sense strand
ccuuaugaaaguagcagua

SEQ ID NO: 2304212 - RNA, 19 nt, Homo sapiens
  misc_RNA (1)...(19): siRNA sense strand
ucaauaagcaaaugaggau

SEQ ID NO: 2304213 - RNA, 19 nt, Homo sapiens
  misc_RNA (1)...(19): siRNA sense strand
gcauaaagucaggcagaga

SEQ ID NO: 2304214 - RNA, 19 nt, Homo sapiens
  misc_RNA (1)...(19): siRNA sense strand
guuacuagaccuauagcua

SEQ ID NO: 2304215 - RNA, 19 nt, Homo sapiens
  misc_RNA (1)...(19): siRNA sense strand
aaguaaaugaguugguaga

SEQ ID NO: 2304216 - RNA, 19 nt, Homo sapiens
  misc_RNA (1)...(19): siRNA sense strand
agaaauuauuccaaagcca

SEQ ID NO: 2304217 - RNA, 19 nt, Homo sapiens
  misc_RNA (1)...(19): siRNA sense strand
ugaucgugaaggagauaaa

SEQ ID NO: 2304218 - RNA, 19 nt, Homo sapiens
  misc_RNA (1)...(19): siRNA sense strand
gcuauuggagaccgagaaa

SEQ ID NO: 2304219 - RNA, 19 nt, Homo sapiens
  misc_RNA (1)...(19): siRNA sense strand
ugaugaagaauuaggagau

SEQ ID NO: 2304220 - RNA, 19 nt, Homo sapiens
  misc_RNA (1)...(19): siRNA sense strand
cgacuaagugccagacuca

SEQ ID NO: 2304221 - RNA, 19 nt, Homo sapiens
  misc_RNA (1)...(19): siRNA sense strand
agccaaugaucuggaaaua

SEQ ID NO: 2304222 - RNA, 19 nt, Homo sapiens
  misc_RNA (1)...(19): siRNA sense strand
gagaauuauaugaucguga

SEQ ID NO: 2304223 - RNA, 19 nt, Homo sapiens
  misc_RNA (1)...(19): siRNA sense strand
aagauagcccagaggaaaa

SEQ ID NO: 2304224 - RNA, 19 nt, Homo sapiens
  misc_RNA (1)...(19): siRNA sense strand
aaauggaacgugaaaggaa

SEQ ID NO: 2304225 - RNA, 19 nt, Homo sapiens
  misc_RNA (1)...(19): siRNA sense strand
aaaagaugcaggaagaaaa

SEQ ID NO: 2304226 - RNA, 19 nt, Homo sapiens
  misc_RNA (1)...(19): siRNA sense strand
augcagaauauuggaguua

SEQ ID NO: 2304227 - RNA, 19 nt, Homo sapiens
  misc_RNA (1)...(19): siRNA sense strand
aaucuaugauaucgaggaa

SEQ ID NO: 2304228 - RNA, 19 nt, Homo sapiens
  misc_RNA (1)...(19): siRNA sense strand
ggaacagcgcauaaaguca

SEQ ID NO: 2304229 - RNA, 19 nt, Homo sapiens
  misc_RNA (1)...(19): siRNA sense strand
aguaaaggugaacgacuaa

SEQ ID NO: 2304230 - RNA, 19 nt, Homo sapiens
  misc_RNA (1)...(19): siRNA sense strand
uagagaaggaaguaaauga

SEQ ID NO: 2304231 - RNA, 19 nt, Homo sapiens
  misc_RNA (1)...(19): siRNA sense strand
cucaagaauaugccagaaa

SEQ ID NO: 2304232 - RNA, 19 nt, Homo sapiens
  misc_RNA (1)...(19): siRNA sense strand
ggaucgaugaggaugauuu

SEQ ID NO: 2304233 - RNA, 19 nt, Homo sapiens
  misc_RNA (1)...(19): siRNA sense strand
ccaagugucaauaagcaaa

SEQ ID NO: 2304234 - RNA, 19 nt, Homo sapiens
  misc_RNA (1)...(19): siRNA sense strand
aaauaagggaacagcgcau

SEQ ID NO: 2304235 - RNA, 19 nt, Homo sapiens
  misc_RNA (1)...(19): siRNA sense strand
aggaagugcuagcggugau

SEQ ID NO: 2304236 - RNA, 19 nt, Homo sapiens
  misc_RNA (1)...(19): siRNA sense strand
gguagaagaaagcuguauu

SEQ ID NO: 2304237 - RNA, 19 nt, Homo sapiens
  misc_RNA (1)...(19): siRNA sense strand
caauuuggccagucaguau

SEQ ID NO: 2304238 - RNA, 19 nt, Homo sapiens
  misc_RNA (1)...(19): siRNA sense strand
auaucgaggaauuggagaa

SEQ ID NO: 2304239 - RNA, 19 nt, Homo sapiens
  misc_RNA (1)...(19): siRNA sense strand
auguagagcuagccaauga

SEQ ID NO: 2304240 - RNA, 19 nt, Homo sapiens
  misc_RNA (1)...(19): siRNA sense strand
caguaguaaaggugaacga

SEQ ID NO: 2304241 - RNA, 19 nt, Homo sapiens
  misc_RNA (1)...(19): siRNA sense strand
gagcuuuaccugggacaaa

SEQ ID NO: 2304242 - RNA, 19 nt, Homo sapiens
  misc_RNA (1)...(19): siRNA sense strand
aguagcaguaacaaagaaa

SEQ ID NO: 2304243 - RNA, 19 nt, Homo sapiens
  misc_RNA (1)...(19): siRNA sense strand
cugaugaagaauuaggaga

SEQ ID NO: 2304244 - RNA, 19 nt, Homo sapiens
  misc_RNA (1)...(19): siRNA sense strand
aggaaagccauggcagaaa

SEQ ID NO: 2304245 - RNA, 19 nt, Homo sapiens
  misc_RNA (1)...(19): siRNA sense strand
ugaagaaggcauuccaaaa

SEQ ID NO: 2304246 - RNA, 19 nt, Homo sapiens
  misc_RNA (1)...(19): siRNA sense strand
aucuaagcuaggagaauua

SEQ ID NO: 2304247 - RNA, 19 nt, Homo sapiens
  misc_RNA (1)...(19): siRNA sense strand
ugccaguaguaaaggugaa

SEQ ID NO: 2304248 - RNA, 19 nt, Homo sapiens
  misc_RNA (1)...(19): siRNA sense strand
ccucaaauagaacgaccaa

SEQ ID NO: 2304249 - RNA, 19 nt, Homo sapiens
  misc_RNA (1)...(19): siRNA sense strand
caaaagaugcaggaagaaa

SEQ ID NO: 2304250 - RNA, 19 nt, Homo sapiens
  misc_RNA (1)...(19): siRNA sense strand
cccuguauuauaugggaaa

SEQ ID NO: 2304251 - RNA, 19 nt, Homo sapiens
  misc_RNA (1)...(19): siRNA sense strand
gugaacucugauagauaua

SEQ ID NO: 2304252 - RNA, 19 nt, Homo sapiens
  misc_RNA (1)...(19): siRNA sense strand
ugagaaacuaaaucggcua

SEQ ID NO: 2304253 - RNA, 19 nt, Homo sapiens
  misc_RNA (1)...(19): siRNA sense strand
ugaagaauuaggagaugau

SEQ ID NO: 2304254 - RNA, 19 nt, Homo sapiens
  misc_RNA (1)...(19): siRNA sense strand
aaugaucaccucaggcaaa

SEQ ID NO: 2304255 - RNA, 19 nt, Homo sapiens
  misc_RNA (1)...(19): siRNA sense strand
ccuacgaaacagugccgaa

SEQ ID NO: 2304256 - RNA, 19 nt, Homo sapiens
  misc_RNA (1)...(19): siRNA sense strand
ggugagacagcgagaacaa

SEQ ID NO: 2304257 - RNA, 19 nt, Homo sapiens
  misc_RNA (1)...(19): siRNA sense strand
gggaaaggauuuugcacaa

SEQ ID NO: 2304258 - RNA, 19 nt, Homo sapiens
  misc_RNA (1)...(19): siRNA sense strand
ugaaaguagcaguaacaaa

SEQ ID NO: 2304259 - RNA, 19 nt, Homo sapiens
  misc_RNA (1)...(19): siRNA sense strand
ggcaaaagaugcaggaaga

SEQ ID NO: 2304260 - RNA, 19 nt, Homo sapiens
  misc_RNA (1)...(19): siRNA sense strand
aaacugaagagguuggaaa

SEQ ID NO: 2304261 - RNA, 19 nt, Homo sapiens
  misc_RNA (1)...(19): siRNA sense strand
gcgcauaaagucaggcaga

SEQ ID NO: 2304262 - RNA, 19 nt, Homo sapiens
  misc_RNA (1)...(19): siRNA sense strand
cuauagugccaguaguaaa

SEQ ID NO: 2304263 - RNA, 19 nt, Homo sapiens
  misc_RNA (1)...(19): siRNA sense strand
gaagaaagcuguauugcca

SEQ ID NO: 2304264 - RNA, 19 nt, Homo sapiens
  misc_RNA (1)...(19): siRNA sense strand
aauggaacgugaaaggaaa

SEQ ID NO: 2304265 - RNA, 19 nt, Homo sapiens
  misc_RNA (1)...(19): siRNA sense strand
agagaguccuggugagaca

SEQ ID NO: 2304266 - RNA, 19 nt, Homo sapiens
  misc_RNA (1)...(19): siRNA sense strand
accuauagcuacuggauau

SEQ ID NO: 2304267 - RNA, 19 nt, Homo sapiens
  misc_RNA (1)...(19): siRNA sense strand
cugugaacucugauagaua

SEQ ID NO: 2304268 - RNA, 19 nt, Homo sapiens
  misc_RNA (1)...(19): siRNA sense strand
aggcaaauggaacgugaaa

SEQ ID NO: 2304269 - RNA, 19 nt, Homo sapiens
  misc_RNA (1)...(19): siRNA sense strand
uggccuuaccuaugagaaa

SEQ ID NO: 2304270 - RNA, 19 nt, Homo sapiens
  misc_RNA (1)...(19): siRNA sense strand
ggccagaacuauagugcca

SEQ ID NO: 2304271 - RNA, 19 nt, Homo sapiens
  misc_RNA (1)...(19): siRNA sense strand
ucaaauagaacgaccaaaa

SEQ ID NO: 2304272 - RNA, 19 nt, Homo sapiens
  misc_RNA (1)...(19): siRNA sense strand
uggcagaagaccuccaaua

SEQ ID NO: 2304273 - RNA, 19 nt, Homo sapiens
  misc_RNA (1)...(19): siRNA sense strand
ccuuaugaaaguagcagua

SEQ ID NO: 2304274 - RNA, 19 nt, Homo sapiens
  misc_RNA (1)...(19): siRNA sense strand
ucaauaagcaaaugaggau

SEQ ID NO: 2304275 - RNA, 19 nt, Homo sapiens
  misc_RNA (1)...(19): siRNA sense strand
gcauaaagucaggcagaga

SEQ ID NO: 2304276 - RNA, 19 nt, Homo sapiens
  misc_RNA (1)...(19): siRNA sense strand
guuacuagaccuauagcua

SEQ ID NO: 2304277 - RNA, 19 nt, Homo sapiens
  misc_RNA (1)...(19): siRNA sense strand
aaguaaaugaguugguaga

SEQ ID NO: 2304278 - RNA, 19 nt, Homo sapiens
  misc_RNA (1)...(19): siRNA sense strand
agaaauuauuccaaagcca

SEQ ID NO: 2304279 - RNA, 19 nt, Homo sapiens
  misc_RNA (1)...(19): siRNA sense strand
ugaucgugaaggagauaaa

SEQ ID NO: 2304280 - RNA, 19 nt, Homo sapiens
  misc_RNA (1)...(19): siRNA sense strand
gcuauuggagaccgagaaa

SEQ ID NO: 2304281 - RNA, 19 nt, Homo sapiens
  misc_RNA (1)...(19): siRNA sense strand
ugaugaagaauuaggagau

SEQ ID NO: 2304282 - RNA, 19 nt, Homo sapiens
  misc_RNA (1)...(19): siRNA sense strand
cgacuaagugccagacuca

SEQ ID NO: 2304283 - RNA, 19 nt, Homo sapiens
  misc_RNA (1)...(19): siRNA sense strand
agccaaugaucuggaaaua

SEQ ID NO: 2304284 - RNA, 19 nt, Homo sapiens
  misc_RNA (1)...(19): siRNA sense strand
gagaauuauaugaucguga

SEQ ID NO: 2304285 - RNA, 19 nt, Homo sapiens
  misc_RNA (1)...(19): siRNA sense strand
aagauagcccagaggaaaa

SEQ ID NO: 2304286 - RNA, 19 nt, Homo sapiens
  misc_RNA (1)...(19): siRNA sense strand
aaauggaacgugaaaggaa

SEQ ID NO: 2304287 - RNA, 19 nt, Homo sapiens
  misc_RNA (1)...(19): siRNA sense strand
agguacaaaugaugcaaaa

SEQ ID NO: 2304288 - RNA, 19 nt, Homo sapiens
  misc_RNA (1)...(19): siRNA sense strand
aaucuaugauaucgaggaa

SEQ ID NO: 2304289 - RNA, 19 nt, Homo sapiens
  misc_RNA (1)...(19): siRNA sense strand
aaaagaugcaggaagaaaa

SEQ ID NO: 2304290 - RNA, 19 nt, Homo sapiens
  misc_RNA (1)...(19): siRNA sense strand
augcagaauauuggaguua

SEQ ID NO: 2304291 - RNA, 19 nt, Homo sapiens
  misc_RNA (1)...(19): siRNA sense strand
ggaacagcgcauaaaguca

SEQ ID NO: 2304292 - RNA, 19 nt, Homo sapiens
  misc_RNA (1)...(19): siRNA sense strand
aguaaaggugaacgacuaa

SEQ ID NO: 2304293 - RNA, 19 nt, Homo sapiens
  misc_RNA (1)...(19): siRNA sense strand
uagagaaggaaguaaauga

SEQ ID NO: 2304294 - RNA, 19 nt, Homo sapiens
  misc_RNA (1)...(19): siRNA sense strand
cucaagaauaugccagaaa

SEQ ID NO: 2304295 - RNA, 19 nt, Homo sapiens
  misc_RNA (1)...(19): siRNA sense strand
ggaucgaugaggaugauuu

SEQ ID NO: 2304296 - RNA, 19 nt, Homo sapiens
  misc_RNA (1)...(19): siRNA sense strand
ccaagugucaauaagcaaa

SEQ ID NO: 2304297 - RNA, 19 nt, Homo sapiens
  misc_RNA (1)...(19): siRNA sense strand
aaauaagggaacagcgcau

SEQ ID NO: 2304298 - RNA, 19 nt, Homo sapiens
  misc_RNA (1)...(19): siRNA sense strand
aggaagugcuagcggugau

SEQ ID NO: 2304299 - RNA, 19 nt, Homo sapiens
  misc_RNA (1)...(19): siRNA sense strand
gguagaagaaagcuguauu

SEQ ID NO: 2304300 - RNA, 19 nt, Homo sapiens
  misc_RNA (1)...(19): siRNA sense strand
caauuuggccagucaguau

SEQ ID NO: 2304301 - RNA, 19 nt, Homo sapiens
  misc_RNA (1)...(19): siRNA sense strand
auguagagcuagccaauga

SEQ ID NO: 2304302 - RNA, 19 nt, Homo sapiens
  misc_RNA (1)...(19): siRNA sense strand
auaucgaggaauuggagaa

SEQ ID NO: 2304303 - RNA, 19 nt, Homo sapiens
  misc_RNA (1)...(19): siRNA sense strand
caguaguaaaggugaacga

SEQ ID NO: 2304304 - RNA, 19 nt, Homo sapiens
  misc_RNA (1)...(19): siRNA sense strand
gagcuuuaccugggacaaa

SEQ ID NO: 2304305 - RNA, 19 nt, Homo sapiens
  misc_RNA (1)...(19): siRNA sense strand
aguagcaguaacaaagaaa

SEQ ID NO: 2304306 - RNA, 19 nt, Homo sapiens
  misc_RNA (1)...(19): siRNA sense strand
cugaugaagaauuaggaga

SEQ ID NO: 2304307 - RNA, 19 nt, Homo sapiens
  misc_RNA (1)...(19): siRNA sense strand
aggaaagccauggcagaaa

SEQ ID NO: 2304308 - RNA, 19 nt, Homo sapiens
  misc_RNA (1)...(19): siRNA sense strand
ugaagaaggcauuccaaaa

SEQ ID NO: 2304309 - RNA, 19 nt, Homo sapiens
  misc_RNA (1)...(19): siRNA sense strand
aucuaagcuaggagaauua

SEQ ID NO: 2304310 - RNA, 19 nt, Homo sapiens
  misc_RNA (1)...(19): siRNA sense strand
ugccaguaguaaaggugaa

SEQ ID NO: 2304311 - RNA, 19 nt, Homo sapiens
  misc_RNA (1)...(19): siRNA sense strand
ccucaaauagaacgaccaa

SEQ ID NO: 2304312 - RNA, 19 nt, Homo sapiens
  misc_RNA (1)...(19): siRNA sense strand
caaaagaugcaggaagaaa

SEQ ID NO: 2304313 - RNA, 19 nt, Homo sapiens
  misc_RNA (1)...(19): siRNA sense strand
cccuguauuauaugggaaa

SEQ ID NO: 2304314 - RNA, 19 nt, Homo sapiens
  misc_RNA (1)...(19): siRNA sense strand
gugaacucugauagauaua

SEQ ID NO: 2304315 - RNA, 19 nt, Homo sapiens
  misc_RNA (1)...(19): siRNA sense strand
ugagaaacuaaaucggcua

SEQ ID NO: 2304316 - RNA, 19 nt, Homo sapiens
  misc_RNA (1)...(19): siRNA sense strand
ugaagaauuaggagaugau

SEQ ID NO: 2304317 - RNA, 19 nt, Homo sapiens
  misc_RNA (1)...(19): siRNA sense strand
aaugaucaccucaggcaaa

SEQ ID NO: 2304318 - RNA, 19 nt, Homo sapiens
  misc_RNA (1)...(19): siRNA sense strand
ccacaaaagccaagagcaa

SEQ ID NO: 2304319 - RNA, 19 nt, Homo sapiens
  misc_RNA (1)...(19): siRNA sense strand
acgaagaccugcuuggaga

SEQ ID NO: 2304320 - RNA, 19 nt, Homo sapiens
  misc_RNA (1)...(19): siRNA sense strand
aagaguaugccaagggaga

SEQ ID NO: 2304321 - RNA, 19 nt, Homo sapiens
  misc_RNA (1)...(19): siRNA sense strand
gccgauacauccuggguga

SEQ ID NO: 2304322 - RNA, 19 nt, Homo sapiens
  misc_RNA (1)...(19): siRNA sense strand
acaaaagccaagagcaaga

SEQ ID NO: 2304323 - RNA, 19 nt, Homo sapiens
  misc_RNA (1)...(19): siRNA sense strand
accuaagacuggacaacuu

SEQ ID NO: 2304324 - RNA, 19 nt, Homo sapiens
  misc_RNA (1)...(19): siRNA sense strand
gaguaugccaagggagaca

SEQ ID NO: 2304325 - RNA, 19 nt, Homo sapiens
  misc_RNA (1)...(19): siRNA sense strand
ccaaagagcuccaggcagu

SEQ ID NO: 2304326 - RNA, 19 nt, Homo sapiens
  misc_RNA (1)...(19): siRNA sense strand
ugguggagcugcugggcaa

SEQ ID NO: 2304327 - RNA, 19 nt, Homo sapiens
  misc_RNA (1)...(19): siRNA sense strand
ugguauaaaggauggagaa

SEQ ID NO: 2304328 - RNA, 19 nt, Homo sapiens
  misc_RNA (1)...(19): siRNA sense strand
cgcauaaacaagagacaca

SEQ ID NO: 2304329 - RNA, 19 nt, Homo sapiens
  misc_RNA (1)...(19): siRNA sense strand
ggugugaggacgagcgcuu

SEQ ID NO: 2304330 - RNA, 19 nt, Homo sapiens
  misc_RNA (1)...(19): siRNA sense strand
aggagagggugaaggagca

SEQ ID NO: 2304331 - RNA, 19 nt, Homo sapiens
  misc_RNA (1)...(19): siRNA sense strand
uggaacaacaacuggucaa

SEQ ID NO: 2304332 - RNA, 19 nt, Homo sapiens
  misc_RNA (1)...(19): siRNA sense strand
ccaaagacgcacaagacca

SEQ ID NO: 2304333 - RNA, 19 nt, Homo sapiens
  misc_RNA (1)...(19): siRNA sense strand
ccgaacaauuggaggagac

SEQ ID NO: 2304334 - RNA, 19 nt, Homo sapiens
  misc_RNA (1)...(19): siRNA sense strand
cugaucaaggagaggguga

SEQ ID NO: 2304335 - RNA, 19 nt, Homo sapiens
  misc_RNA (1)...(19): siRNA sense strand
ggagaaagccugcagcucu

SEQ ID NO: 2304336 - RNA, 19 nt, Homo sapiens
  misc_RNA (1)...(19): siRNA sense strand
uggaaaagguugaucucau

SEQ ID NO: 2304337 - RNA, 19 nt, Homo sapiens
  misc_RNA (1)...(19): siRNA sense strand
gcauaugucuaccugguga

SEQ ID NO: 2304338 - RNA, 19 nt, Homo sapiens
  misc_RNA (1)...(19): siRNA sense strand
ccuaggauuagaaaggcua

SEQ ID NO: 2304339 - RNA, 19 nt, Homo sapiens
  misc_RNA (1)...(19): siRNA sense strand
ggcuuuuggccuaggauua

SEQ ID NO: 2304340 - RNA, 19 nt, Homo sapiens
  misc_RNA (1)...(19): siRNA sense strand
ccuuccuggugguggguga

SEQ ID NO: 2304341 - RNA, 19 nt, Homo sapiens
  misc_RNA (1)...(19): siRNA sense strand
gcuggagauaagaugggua

SEQ ID NO: 2304342 - RNA, 19 nt, Homo sapiens
  misc_RNA (1)...(19): siRNA sense strand
gggacaacuauuaccugaa

SEQ ID NO: 2304343 - RNA, 19 nt, Homo sapiens
  misc_RNA (1)...(19): siRNA sense strand
agaucgacucccagcacua

SEQ ID NO: 2304344 - RNA, 19 nt, Homo sapiens
  misc_RNA (1)...(19): siRNA sense strand
ccauggaggccgugaagcu

SEQ ID NO: 2304345 - RNA, 19 nt, Homo sapiens
  misc_RNA (1)...(19): siRNA sense strand
cggcugggcuuuuggccua

SEQ ID NO: 2304346 - RNA, 19 nt, Homo sapiens
  misc_RNA (1)...(19): siRNA sense strand
cagagagaggucaggcaca

SEQ ID NO: 2304347 - RNA, 19 nt, Homo sapiens
  misc_RNA (1)...(19): siRNA sense strand
aggcaaggccagaggaacu

SEQ ID NO: 2304348 - RNA, 19 nt, Homo sapiens
  misc_RNA (1)...(19): siRNA sense strand
agaaauaccgccaggaccu

SEQ ID NO: 2304349 - RNA, 19 nt, Homo sapiens
  misc_RNA (1)...(19): siRNA sense strand
accuaggccugaugggcua

SEQ ID NO: 2304350 - RNA, 19 nt, Homo sapiens
  misc_RNA (1)...(19): siRNA sense strand
acaaggacauaguagcuga

SEQ ID NO: 2304351 - RNA, 19 nt, Homo sapiens
  misc_RNA (1)...(19): siRNA sense strand
ccuuugggcgacugaacua

SEQ ID NO: 2304352 - RNA, 19 nt, Homo sapiens
  misc_RNA (1)...(19): siRNA sense strand
acauaguagcugagggguu

SEQ ID NO: 2304353 - RNA, 19 nt, Homo sapiens
  misc_RNA (1)...(19): siRNA sense strand
ucgaggaacuggaguccca

SEQ ID NO: 2304354 - RNA, 19 nt, Homo sapiens
  misc_RNA (1)...(19): siRNA sense strand
aggcaaggccagaggaacu

SEQ ID NO: 2304355 - RNA, 19 nt, Homo sapiens
  misc_RNA (1)...(19): siRNA sense strand
agaaauaccgccaggaccu

SEQ ID NO: 2304356 - RNA, 19 nt, Homo sapiens
  misc_RNA (1)...(19): siRNA sense strand
accuaggccugaugggcua

SEQ ID NO: 2304357 - RNA, 19 nt, Homo sapiens
  misc_RNA (1)...(19): siRNA sense strand
acaaggacauaguagcuga

SEQ ID NO: 2304358 - RNA, 19 nt, Homo sapiens
  misc_RNA (1)...(19): siRNA sense strand
ccuuugggcgacugaacua

SEQ ID NO: 2304359 - RNA, 19 nt, Homo sapiens
  misc_RNA (1)...(19): siRNA sense strand
acauaguagcugagggguu

SEQ ID NO: 2304360 - RNA, 19 nt, Homo sapiens
  misc_RNA (1)...(19): siRNA sense strand
ucgaggaacuggaguccca

SEQ ID NO: 2304361 - RNA, 19 nt, Homo sapiens
  misc_RNA (1)...(19): siRNA sense strand
acauagugcgcgugggcga

SEQ ID NO: 2304362 - RNA, 19 nt, Homo sapiens
  misc_RNA (1)...(19): siRNA sense strand
gcgagaacgacaucgacau

SEQ ID NO: 2304363 - RNA, 19 nt, Homo sapiens
  misc_RNA (1)...(19): siRNA sense strand
uugcagagcuugaagugaa

SEQ ID NO: 2304364 - RNA, 19 nt, Homo sapiens
  misc_RNA (1)...(19): siRNA sense strand
cgguaauguugcucgguau

SEQ ID NO: 2304365 - RNA, 19 nt, Homo sapiens
  misc_RNA (1)...(19): siRNA sense strand
acaugaaagcuauggcaau

SEQ ID NO: 2304366 - RNA, 19 nt, Homo sapiens
  misc_RNA (1)...(19): siRNA sense strand
uggaaagaaaagagaagaa

SEQ ID NO: 2304367 - RNA, 19 nt, Homo sapiens
  misc_RNA (1)...(19): siRNA sense strand
cagaauuugcagagcuuga

SEQ ID NO: 2304368 - RNA, 19 nt, Homo sapiens
  misc_RNA (1)...(19): siRNA sense strand
agaagaugaccaagcaaaa

SEQ ID NO: 2304369 - RNA, 19 nt, Homo sapiens
  misc_RNA (1)...(19): siRNA sense strand
uuucaagacccaacagcaa

SEQ ID NO: 2304370 - RNA, 19 nt, Homo sapiens
  misc_RNA (1)...(19): siRNA sense strand
gcgggagaguaaagggugu

SEQ ID NO: 2304371 - RNA, 19 nt, Homo sapiens
  misc_RNA (1)...(19): siRNA sense strand
acuugaagaagaugaccaa

SEQ ID NO: 2304372 - RNA, 19 nt, Homo sapiens
  misc_RNA (1)...(19): siRNA sense strand
ugucagcauaugugaagaa

SEQ ID NO: 2304373 - RNA, 19 nt, Homo sapiens
  misc_RNA (1)...(19): siRNA sense strand
ugaaauuacugaaacagga

SEQ ID NO: 2304374 - RNA, 19 nt, Homo sapiens
  misc_RNA (1)...(19): siRNA sense strand
cuuugagauugcagagcuu

SEQ ID NO: 2304375 - RNA, 19 nt, Homo sapiens
  misc_RNA (1)...(19): siRNA sense strand
ggggugaauucgaaauaau

SEQ ID NO: 2304376 - RNA, 19 nt, Homo sapiens
  misc_RNA (1)...(19): siRNA sense strand
ugcagagcuugaagugaaa

SEQ ID NO: 2304377 - RNA, 19 nt, Homo sapiens
  misc_RNA (1)...(19): siRNA sense strand
aaagagaagaagaugggca

SEQ ID NO: 2304378 - RNA, 19 nt, Homo sapiens
  misc_RNA (1)...(19): siRNA sense strand
uugagauugcagagcuuaa

SEQ ID NO: 2304379 - RNA, 19 nt, Homo sapiens
  misc_RNA (1)...(19): siRNA sense strand
caaucagacaccaaugcaa

SEQ ID NO: 2304380 - RNA, 19 nt, Homo sapiens
  misc_RNA (1)...(19): siRNA sense strand
agaaagacucagaggaaau

SEQ ID NO: 2304381 - RNA, 19 nt, Homo sapiens
  misc_RNA (1)...(19): siRNA sense strand
cugaagauacugagggcaa

SEQ ID NO: 2304382 - RNA, 19 nt, Homo sapiens
  misc_RNA (1)...(19): siRNA sense strand
aggagaaaguuguggcuga

SEQ ID NO: 2304383 - RNA, 19 nt, Homo sapiens
  misc_RNA (1)...(19): siRNA sense strand
ugcaauauacagaaggaaa

SEQ ID NO: 2304384 - RNA, 19 nt, Homo sapiens
  misc_RNA (1)...(19): siRNA sense strand
gguaccuacugaaggaaau

SEQ ID NO: 2304385 - RNA, 19 nt, Homo sapiens
  misc_RNA (1)...(19): siRNA sense strand
caaaauugaagaagggauu

SEQ ID NO: 2304386 - RNA, 19 nt, Homo sapiens
  misc_RNA (1)...(19): siRNA sense strand
auguagggcugauggaaga

SEQ ID NO: 2304387 - RNA, 19 nt, Homo sapiens
  misc_RNA (1)...(19): siRNA sense strand
aguuggaggagcagaagaa

SEQ ID NO: 2304388 - RNA, 19 nt, Homo sapiens
  misc_RNA (1)...(19): siRNA sense strand
ugaagaagggauugauaca

SEQ ID NO: 2304389 - RNA, 19 nt, Homo sapiens
  misc_RNA (1)...(19): siRNA sense strand
aagcugggucggagaacaa

SEQ ID NO: 2304390 - RNA, 19 nt, Homo sapiens
  misc_RNA (1)...(19): siRNA sense strand
gugucaaguucaaugauca

SEQ ID NO: 2304391 - RNA, 19 nt, Homo sapiens
  misc_RNA (1)...(19): siRNA sense strand
aggaggguguaaagaaaga

SEQ ID NO: 2304392 - RNA, 19 nt, Homo sapiens
  misc_RNA (1)...(19): siRNA sense strand
agaaggaaauagaggagcu

SEQ ID NO: 2304393 - RNA, 19 nt, Homo sapiens
  misc_RNA (1)...(19): siRNA sense strand
uagaagcaaaugaggauau

SEQ ID NO: 2304394 - RNA, 19 nt, Homo sapiens
  misc_RNA (1)...(19): siRNA sense strand
gggaucaugcucaggaaaa

SEQ ID NO: 2304395 - RNA, 19 nt, Homo sapiens
  misc_RNA (1)...(19): siRNA sense strand
guguaaagaaagacucaga

SEQ ID NO: 2304396 - RNA, 19 nt, Homo sapiens
  misc_RNA (1)...(19): siRNA sense strand
uuguggucuuagaggauua

SEQ ID NO: 2304397 - RNA, 19 nt, Homo sapiens
  misc_RNA (1)...(19): siRNA sense strand
uauagaagcaaaugaggau

SEQ ID NO: 2304398 - RNA, 19 nt, Homo sapiens
  misc_RNA (1)...(19): siRNA sense strand
ugacagacuuggaacgcca

SEQ ID NO: 2304399 - RNA, 19 nt, Homo sapiens
  misc_RNA (1)...(19): siRNA sense strand
ugguuagcccuguggaauu

SEQ ID NO: 2304400 - RNA, 19 nt, Homo sapiens
  misc_RNA (1)...(19): siRNA sense strand
cagucaucuuggagacaga

SEQ ID NO: 2304401 - RNA, 19 nt, Homo sapiens
  misc_RNA (1)...(19): siRNA sense strand
ggguguaaagaaagacuca

SEQ ID NO: 2304402 - RNA, 19 nt, Homo sapiens
  misc_RNA (1)...(19): siRNA sense strand
cuggaaaggaauagcugau

SEQ ID NO: 2304403 - RNA, 19 nt, Homo sapiens
  misc_RNA (1)...(19): siRNA sense strand
aggaaauagaggagcuacu

SEQ ID NO: 2304404 - RNA, 19 nt, Homo sapiens
  misc_RNA (1)...(19): siRNA sense strand
aguagagcagggagaagaa

SEQ ID NO: 2304405 - RNA, 19 nt, Homo sapiens
  misc_RNA (1)...(19): siRNA sense strand
aaggacuggaagagagcua

SEQ ID NO: 2304406 - RNA, 19 nt, Homo sapiens
  misc_RNA (1)...(19): siRNA sense strand
cuguggaauugguggccau

SEQ ID NO: 2304407 - RNA, 19 nt, Homo sapiens
  misc_RNA (1)...(19): siRNA sense strand
gauuguggucuuagaggau

SEQ ID NO: 2304408 - RNA, 19 nt, Homo sapiens
  misc_RNA (1)...(19): siRNA sense strand
cuauagaagcaaaugagga

SEQ ID NO: 2304409 - RNA, 19 nt, Homo sapiens
  misc_RNA (1)...(19): siRNA sense strand
caacaauguagcacacaca

SEQ ID NO: 2304410 - RNA, 19 nt, Homo sapiens
  misc_RNA (1)...(19): siRNA sense strand
ugcaagagcuccagugcca

SEQ ID NO: 2304411 - RNA, 19 nt, Homo sapiens
  misc_RNA (1)...(19): siRNA sense strand
gccaguuggaggagcagaa

SEQ ID NO: 2304412 - RNA, 19 nt, Homo sapiens
  misc_RNA (1)...(19): siRNA sense strand
cggcaguuguagcaguaga

SEQ ID NO: 2304413 - RNA, 19 nt, Homo sapiens
  misc_RNA (1)...(19): siRNA sense strand
acucugaaggacuggaaga

SEQ ID NO: 2304414 - RNA, 19 nt, Homo sapiens
  misc_RNA (1)...(19): siRNA sense strand
ccacggaggaggguguaaa

SEQ ID NO: 2304415 - RNA, 19 nt, Homo sapiens
  misc_RNA (1)...(19): siRNA sense strand
accaaguagagcagggaga

SEQ ID NO: 2304416 - RNA, 19 nt, Homo sapiens
  misc_RNA (1)...(19): siRNA sense strand
uggaggagcagaagaagca

SEQ ID NO: 2304417 - RNA, 19 nt, Homo sapiens
  misc_RNA (1)...(19): siRNA sense strand
aggauauggaaauugcuua

SEQ ID NO: 2304418 - RNA, 19 nt, Homo sapiens
  misc_RNA (1)...(19): siRNA sense strand
cuucugaucagcagugcaa

SEQ ID NO: 2304419 - RNA, 19 nt, Homo sapiens
  misc_RNA (1)...(19): siRNA sense strand
agcugaggacugaggagaa

SEQ ID NO: 2304420 - RNA, 19 nt, Homo sapiens
  misc_RNA (1)...(19): siRNA sense strand
auguggagauuguggucuu

SEQ ID NO: 2304421 - RNA, 19 nt, Homo sapiens
  misc_RNA (1)...(19): siRNA sense strand
cagcagugcaagagcucca

SEQ ID NO: 2304422 - RNA, 19 nt, Homo sapiens
  misc_RNA (1)...(19): siRNA sense strand
uugauguucuggaaaggaa

SEQ ID NO: 2304423 - RNA, 19 nt, Homo sapiens
  misc_RNA (1)...(19): siRNA sense strand
agaagcaaggccaggauca

SEQ ID NO: 2304424 - RNA, 19 nt, Homo sapiens
  misc_RNA (1)...(19): siRNA sense strand
agaaagacucagaggaaau

SEQ ID NO: 2304425 - RNA, 19 nt, Homo sapiens
  misc_RNA (1)...(19): siRNA sense strand
cugaagauacugagggcaa

SEQ ID NO: 2304426 - RNA, 19 nt, Homo sapiens
  misc_RNA (1)...(19): siRNA sense strand
aggagaaaguuguggcuga

SEQ ID NO: 2304427 - RNA, 19 nt, Homo sapiens
  misc_RNA (1)...(19): siRNA sense strand
ugcaauauacagaaggaaa

SEQ ID NO: 2304428 - RNA, 19 nt, Homo sapiens
  misc_RNA (1)...(19): siRNA sense strand
gguaccuacugaaggaaau

SEQ ID NO: 2304429 - RNA, 19 nt, Homo sapiens
  misc_RNA (1)...(19): siRNA sense strand
caaaauugaagaagggauu

SEQ ID NO: 2304430 - RNA, 19 nt, Homo sapiens
  misc_RNA (1)...(19): siRNA sense strand
auguagggcugauggaaga

SEQ ID NO: 2304431 - RNA, 19 nt, Homo sapiens
  misc_RNA (1)...(19): siRNA sense strand
aguuggaggagcagaagaa

SEQ ID NO: 2304432 - RNA, 19 nt, Homo sapiens
  misc_RNA (1)...(19): siRNA sense strand
ugaagaagggauugauaca

SEQ ID NO: 2304433 - RNA, 19 nt, Homo sapiens
  misc_RNA (1)...(19): siRNA sense strand
aagcugggucggagaacaa

SEQ ID NO: 2304434 - RNA, 19 nt, Homo sapiens
  misc_RNA (1)...(19): siRNA sense strand
gugucaaguucaaugauca

SEQ ID NO: 2304435 - RNA, 19 nt, Homo sapiens
  misc_RNA (1)...(19): siRNA sense strand
aggaggguguaaagaaaga

SEQ ID NO: 2304436 - RNA, 19 nt, Homo sapiens
  misc_RNA (1)...(19): siRNA sense strand
agaaggaaauagaggagcu

SEQ ID NO: 2304437 - RNA, 19 nt, Homo sapiens
  misc_RNA (1)...(19): siRNA sense strand
uagaagcaaaugaggauau

SEQ ID NO: 2304438 - RNA, 19 nt, Homo sapiens
  misc_RNA (1)...(19): siRNA sense strand
gggaucaugcucaggaaaa

SEQ ID NO: 2304439 - RNA, 19 nt, Homo sapiens
  misc_RNA (1)...(19): siRNA sense strand
guguaaagaaagacucaga

SEQ ID NO: 2304440 - RNA, 19 nt, Homo sapiens
  misc_RNA (1)...(19): siRNA sense strand
uuguggucuuagaggauua

SEQ ID NO: 2304441 - RNA, 19 nt, Homo sapiens
  misc_RNA (1)...(19): siRNA sense strand
uauagaagcaaaugaggau

SEQ ID NO: 2304442 - RNA, 19 nt, Homo sapiens
  misc_RNA (1)...(19): siRNA sense strand
ugacagacuuggaacgcca

SEQ ID NO: 2304443 - RNA, 19 nt, Homo sapiens
  misc_RNA (1)...(19): siRNA sense strand
ugguuagcccuguggaauu

SEQ ID NO: 2304444 - RNA, 19 nt, Homo sapiens
  misc_RNA (1)...(19): siRNA sense strand
cagucaucuuggagacaga

SEQ ID NO: 2304445 - RNA, 19 nt, Homo sapiens
  misc_RNA (1)...(19): siRNA sense strand
ggguguaaagaaagacuca

SEQ ID NO: 2304446 - RNA, 19 nt, Homo sapiens
  misc_RNA (1)...(19): siRNA sense strand
cuggaaaggaauagcugau

SEQ ID NO: 2304447 - RNA, 19 nt, Homo sapiens
  misc_RNA (1)...(19): siRNA sense strand
aggaaauagaggagcuacu

SEQ ID NO: 2304448 - RNA, 19 nt, Homo sapiens
  misc_RNA (1)...(19): siRNA sense strand
aguagagcagggagaagaa

SEQ ID NO: 2304449 - RNA, 19 nt, Homo sapiens
  misc_RNA (1)...(19): siRNA sense strand
aaggacuggaagagagcua

SEQ ID NO: 2304450 - RNA, 19 nt, Homo sapiens
  misc_RNA (1)...(19): siRNA sense strand
cuguggaauugguggccau

SEQ ID NO: 2304451 - RNA, 19 nt, Homo sapiens
  misc_RNA (1)...(19): siRNA sense strand
gauuguggucuuagaggau

SEQ ID NO: 2304452 - RNA, 19 nt, Homo sapiens
  misc_RNA (1)...(19): siRNA sense strand
cuauagaagcaaaugagga

SEQ ID NO: 2304453 - RNA, 19 nt, Homo sapiens
  misc_RNA (1)...(19): siRNA sense strand
caacaauguagcacacaca

SEQ ID NO: 2304454 - RNA, 19 nt, Homo sapiens
  misc_RNA (1)...(19): siRNA sense strand
ugcaagagcuccagugcca

SEQ ID NO: 2304455 - RNA, 19 nt, Homo sapiens
  misc_RNA (1)...(19): siRNA sense strand
gccaguuggaggagcagaa

SEQ ID NO: 2304456 - RNA, 19 nt, Homo sapiens
  misc_RNA (1)...(19): siRNA sense strand
cggcaguuguagcaguaga

SEQ ID NO: 2304457 - RNA, 19 nt, Homo sapiens
  misc_RNA (1)...(19): siRNA sense strand
acucugaaggacuggaaga

SEQ ID NO: 2304458 - RNA, 19 nt, Homo sapiens
  misc_RNA (1)...(19): siRNA sense strand
ccacggaggaggguguaaa

SEQ ID NO: 2304459 - RNA, 19 nt, Homo sapiens
  misc_RNA (1)...(19): siRNA sense strand
accaaguagagcagggaga

SEQ ID NO: 2304460 - RNA, 19 nt, Homo sapiens
  misc_RNA (1)...(19): siRNA sense strand
uggaggagcagaagaagca

SEQ ID NO: 2304461 - RNA, 19 nt, Homo sapiens
  misc_RNA (1)...(19): siRNA sense strand
aggauauggaaauugcuua

SEQ ID NO: 2304462 - RNA, 19 nt, Homo sapiens
  misc_RNA (1)...(19): siRNA sense strand
cuucugaucagcagugcaa

SEQ ID NO: 2304463 - RNA, 19 nt, Homo sapiens
  misc_RNA (1)...(19): siRNA sense strand
agcugaggacugaggagaa

SEQ ID NO: 2304464 - RNA, 19 nt, Homo sapiens
  misc_RNA (1)...(19): siRNA sense strand
auguggagauuguggucuu

SEQ ID NO: 2304465 - RNA, 19 nt, Homo sapiens
  misc_RNA (1)...(19): siRNA sense strand
cagcagugcaagagcucca

SEQ ID NO: 2304466 - RNA, 19 nt, Homo sapiens
  misc_RNA (1)...(19): siRNA sense strand
uugauguucuggaaaggaa

SEQ ID NO: 2304467 - RNA, 19 nt, Homo sapiens
  misc_RNA (1)...(19): siRNA sense strand
agaagcaaggccaggauca

SEQ ID NO: 2304468 - RNA, 19 nt, Homo sapiens
  misc_RNA (1)...(19): siRNA sense strand
acuucaaggugcugcguga

SEQ ID NO: 2304469 - RNA, 19 nt, Homo sapiens
  misc_RNA (1)...(19): siRNA sense strand
cuguacagcuuucaggcua

SEQ ID NO: 2304470 - RNA, 19 nt, Homo sapiens
  misc_RNA (1)...(19): siRNA sense strand
acauggaggaugaccagaa

SEQ ID NO: 2304471 - RNA, 19 nt, Homo sapiens
  misc_RNA (1)...(19): siRNA sense strand
ucucugugucugugaacua

SEQ ID NO: 2304472 - RNA, 19 nt, Homo sapiens
  misc_RNA (1)...(19): siRNA sense strand
cacucaagauccugaacau

SEQ ID NO: 2304473 - RNA, 19 nt, Homo sapiens
  misc_RNA (1)...(19): siRNA sense strand
cuucaacaagggagacaca

SEQ ID NO: 2304474 - RNA, 19 nt, Homo sapiens
  misc_RNA (1)...(19): siRNA sense strand
ugacuuuggaagagagaga

SEQ ID NO: 2304475 - RNA, 19 nt, Homo sapiens
  misc_RNA (1)...(19): siRNA sense strand
caguugaagaagaugaaau

SEQ ID NO: 2304476 - RNA, 19 nt, Homo sapiens
  misc_RNA (1)...(19): siRNA sense strand
gaagaugaaaugaggacca

SEQ ID NO: 2304477 - RNA, 19 nt, Homo sapiens
  misc_RNA (1)...(19): siRNA sense strand
acuuuggaagagagagaaa

SEQ ID NO: 2304478 - RNA, 19 nt, Homo sapiens
  misc_RNA (1)...(19): siRNA sense strand
ggaagaacacaauugccua

SEQ ID NO: 2304479 - RNA, 19 nt, Homo sapiens
  misc_RNA (1)...(19): siRNA sense strand
agacagaagcagaucaacu

SEQ ID NO: 2304480 - RNA, 19 nt, Homo sapiens
  misc_RNA (1)...(19): siRNA sense strand
guuaacaaagaaauggcaa

SEQ ID NO: 2304481 - RNA, 19 nt, Homo sapiens
  misc_RNA (1)...(19): siRNA sense strand
gugcaguugaagaagauga

SEQ ID NO: 2304482 - RNA, 19 nt, Homo sapiens
  misc_RNA (1)...(19): siRNA sense strand
agaaaaucaucaucaggaa

SEQ ID NO: 2304483 - RNA, 19 nt, Homo sapiens
  misc_RNA (1)...(19): siRNA sense strand
cccaagacaccuucgacaa

SEQ ID NO: 2304484 - RNA, 19 nt, Homo sapiens
  misc_RNA (1)...(19): siRNA sense strand
acugaacccuugagagacu

SEQ ID NO: 2304485 - RNA, 19 nt, Homo sapiens
  misc_RNA (1)...(19): siRNA sense strand
acauagaagaccugaggau

SEQ ID NO: 2304486 - RNA, 19 nt, Homo sapiens
  misc_RNA (1)...(19): siRNA sense strand
cuuaaguccaagucgagaa

SEQ ID NO: 2304487 - RNA, 19 nt, Homo sapiens
  misc_RNA (1)...(19): siRNA sense strand
agguacacagagagcagaa

SEQ ID NO: 2304488 - RNA, 19 nt, Homo sapiens
  misc_RNA (1)...(19): siRNA sense strand
ucuaaagauuuggggcaua

SEQ ID NO: 2304489 - RNA, 19 nt, Homo sapiens
  misc_RNA (1)...(19): siRNA sense strand
aguaucaucacgugggcaa

SEQ ID NO: 2304490 - RNA, 19 nt, Homo sapiens
  misc_RNA (1)...(19): siRNA sense strand
aggaagaaccaaaagauga

SEQ ID NO: 2304491 - RNA, 19 nt, Homo sapiens
  misc_RNA (1)...(19): siRNA sense strand
gaugagagugcccggaaaa

SEQ ID NO: 2304492 - RNA, 19 nt, Homo sapiens
  misc_RNA (1)...(19): siRNA sense strand
ccacauuuugccuggauaa

SEQ ID NO: 2304493 - RNA, 19 nt, Homo sapiens
  misc_RNA (1)...(19): siRNA sense strand
ggcaaaaugcauagagaua

SEQ ID NO: 2304494 - RNA, 19 nt, Homo sapiens
  misc_RNA (1)...(19): siRNA sense strand
acacaguuggagagagaua

SEQ ID NO: 2304495 - RNA, 19 nt, Homo sapiens
  misc_RNA (1)...(19): siRNA sense strand
ugucauuaucagaaggaaa

SEQ ID NO: 2304496 - RNA, 19 nt, Homo sapiens
  misc_RNA (1)...(19): siRNA sense strand
cuccaaaacuaaaggacaa

SEQ ID NO: 2304497 - RNA, 19 nt, Homo sapiens
  misc_RNA (1)...(19): siRNA sense strand
ucuucaugguuuacagaaa

SEQ ID NO: 2304498 - RNA, 19 nt, Homo sapiens
  misc_RNA (1)...(19): siRNA sense strand
ggacaaaacaaaaugguca

SEQ ID NO: 2304499 - RNA, 19 nt, Homo sapiens
  misc_RNA (1)...(19): siRNA sense strand
uugcagcaguagagaagaa

SEQ ID NO: 2304500 - RNA, 19 nt, Homo sapiens
  misc_RNA (1)...(19): siRNA sense strand
caggaaugccagagcugaa

SEQ ID NO: 2304501 - RNA, 19 nt, Homo sapiens
  misc_RNA (1)...(19): siRNA sense strand
ccgaauacuaccaagaaaa

SEQ ID NO: 2304502 - RNA, 19 nt, Homo sapiens
  misc_RNA (1)...(19): siRNA sense strand
aauugaacuuggagaacuu

SEQ ID NO: 2304503 - RNA, 19 nt, Homo sapiens
  misc_RNA (1)...(19): siRNA sense strand
uuucaaaacugaugaguga

SEQ ID NO: 2304504 - RNA, 19 nt, Homo sapiens
  misc_RNA (1)...(19): siRNA sense strand
cggaucacuucaagauauu

SEQ ID NO: 2304505 - RNA, 19 nt, Homo sapiens
  misc_RNA (1)...(19): siRNA sense strand
aggaauaacagcaauugaa

SEQ ID NO: 2304506 - RNA, 19 nt, Homo sapiens
  misc_RNA (1)...(19): siRNA sense strand
gagaaaagaaacagaagca

SEQ ID NO: 2304507 - RNA, 19 nt, Homo sapiens
  misc_RNA (1)...(19): siRNA sense strand
aacagaagcacgagaugaa

SEQ ID NO: 2304508 - RNA, 19 nt, Homo sapiens
  misc_RNA (1)...(19): siRNA sense strand
gaguuaucuuagucgggaa

SEQ ID NO: 2304509 - RNA, 19 nt, Homo sapiens
  misc_RNA (1)...(19): siRNA sense strand
cuauggauuuguauggaau

SEQ ID NO: 2304510 - RNA, 19 nt, Homo sapiens
  misc_RNA (1)...(19): siRNA sense strand
aaacaugggaugcagggua

SEQ ID NO: 2304511 - RNA, 19 nt, Homo sapiens
  misc_RNA (1)...(19): siRNA sense strand
cagaauugcaaauagccua

SEQ ID NO: 2304512 - RNA, 19 nt, Homo sapiens
  misc_RNA (1)...(19): siRNA sense strand
ugccagagcugaacggaca

SEQ ID NO: 2304513 - RNA, 19 nt, Homo sapiens
  misc_RNA (1)...(19): siRNA sense strand
ugaaaauacagaaggauca

SEQ ID NO: 2304514 - RNA, 19 nt, Homo sapiens
  misc_RNA (1)...(19): siRNA sense strand
ggguaaaagcuucaaguca

SEQ ID NO: 2304515 - RNA, 19 nt, Homo sapiens
  misc_RNA (1)...(19): siRNA sense strand
aguaggaauaacagcaauu

SEQ ID NO: 2304516 - RNA, 19 nt, Homo sapiens
  misc_RNA (1)...(19): siRNA sense strand
uggugcaaauacuggcaaa

SEQ ID NO: 2304517 - RNA, 19 nt, Homo sapiens
  misc_RNA (1)...(19): siRNA sense strand
gagaaaccuuacagggucu

SEQ ID NO: 2304518 - RNA, 19 nt, Homo sapiens
  misc_RNA (1)...(19): siRNA sense strand
agcaauugaacuuggagaa

SEQ ID NO: 2304519 - RNA, 19 nt, Homo sapiens
  misc_RNA (1)...(19): siRNA sense strand
agcacaagcaccacaguua

SEQ ID NO: 2304520 - RNA, 19 nt, Homo sapiens
  misc_RNA (1)...(19): siRNA sense strand
uaguucaguuugagacaau

SEQ ID NO: 2304521 - RNA, 19 nt, Homo sapiens
  misc_RNA (1)...(19): siRNA sense strand
ucaaaacugaugagugaaa

SEQ ID NO: 2304522 - RNA, 19 nt, Homo sapiens
  misc_RNA (1)...(19): siRNA sense strand
gagccaaugcagaaauuca

SEQ ID NO: 2304523 - RNA, 19 nt, Homo sapiens
  misc_RNA (1)...(19): siRNA sense strand
cagaagcacgagaugaaau

SEQ ID NO: 2304524 - RNA, 19 nt, Homo sapiens
  misc_RNA (1)...(19): siRNA sense strand
caacgauggaacaguuauu

SEQ ID NO: 2304525 - RNA, 19 nt, Homo sapiens
  misc_RNA (1)...(19): siRNA sense strand
cacaaauguugcauaguca

SEQ ID NO: 2304526 - RNA, 19 nt, Homo sapiens
  misc_RNA (1)...(19): siRNA sense strand
gagugaaaauacagaagga

SEQ ID NO: 2304527 - RNA, 19 nt, Homo sapiens
  misc_RNA (1)...(19): siRNA sense strand
cuuacagggucuugccuau

SEQ ID NO: 2304528 - RNA, 19 nt, Homo sapiens
  misc_RNA (1)...(19): siRNA sense strand
agagaagaaugguggcuac

SEQ ID NO: 2304529 - RNA, 19 nt, Homo sapiens
  misc_RNA (1)...(19): siRNA sense strand
aacaaagauuccugauaca

SEQ ID NO: 2304530 - RNA, 19 nt, Homo sapiens
  misc_RNA (1)...(19): siRNA sense strand
accgaauacuaccaagaaa

SEQ ID NO: 2304531 - RNA, 19 nt, Homo sapiens
  misc_RNA (1)...(19): siRNA sense strand
gguaguucaguuugagaca

SEQ ID NO: 2304532 - RNA, 19 nt, Homo sapiens
  misc_RNA (1)...(19): siRNA sense strand
aagcagaugacgaugacuu

SEQ ID NO: 2304533 - RNA, 19 nt, Homo sapiens
  misc_RNA (1)...(19): siRNA sense strand
ugaagaugguauuuacaca

SEQ ID NO: 2304534 - RNA, 19 nt, Homo sapiens
  misc_RNA (1)...(19): siRNA sense strand
uguacuuggcuguauguua

SEQ ID NO: 2304535 - RNA, 19 nt, Homo sapiens
  misc_RNA (1)...(19): siRNA sense strand
aauguugcauagucagaaa

SEQ ID NO: 2304536 - RNA, 19 nt, Homo sapiens
  misc_RNA (1)...(19): siRNA sense strand
agauaucaaaggugcuaau

SEQ ID NO: 2304537 - RNA, 19 nt, Homo sapiens
  misc_RNA (1)...(19): siRNA sense strand
aagacaacuuuccggauga

SEQ ID NO: 2304538 - RNA, 19 nt, Homo sapiens
  misc_RNA (1)...(19): siRNA sense strand
aguuaucuuagucgggaaa

SEQ ID NO: 2304539 - RNA, 19 nt, Homo sapiens
  misc_RNA (1)...(19): siRNA sense strand
ggaauacugugguggcgga

SEQ ID NO: 2304540 - RNA, 19 nt, Homo sapiens
  misc_RNA (1)...(19): siRNA sense strand
agaccauggcgauguaaaa

SEQ ID NO: 2304541 - RNA, 19 nt, Homo sapiens
  misc_RNA (1)...(19): siRNA sense strand
cagcaauugaacuuggaga

SEQ ID NO: 2304542 - RNA, 19 nt, Homo sapiens
  misc_RNA (1)...(19): siRNA sense strand
acaaaauggucaucaacau

SEQ ID NO: 2304543 - RNA, 19 nt, Homo sapiens
  misc_RNA (1)...(19): siRNA sense strand
acacugaagcagaugacga

SEQ ID NO: 2304544 - RNA, 19 nt, Homo sapiens
  misc_RNA (1)...(19): siRNA sense strand
cuucaagucagaugagguu

SEQ ID NO: 2304545 - RNA, 19 nt, Homo sapiens
  misc_RNA (1)...(19): siRNA sense strand
auacugugguggcggauca

SEQ ID NO: 2304546 - RNA, 19 nt, Homo sapiens
  misc_RNA (1)...(19): siRNA sense strand
uugccuacuuugggaguua

SEQ ID NO: 2304547 - RNA, 19 nt, Homo sapiens
  misc_RNA (1)...(19): siRNA sense strand
ggcaaaaugcauagagaua

SEQ ID NO: 2304548 - RNA, 19 nt, Homo sapiens
  misc_RNA (1)...(19): siRNA sense strand
acacaguuggagagagaua

SEQ ID NO: 2304549 - RNA, 19 nt, Homo sapiens
  misc_RNA (1)...(19): siRNA sense strand
ugucauuaucagaaggaaa

SEQ ID NO: 2304550 - RNA, 19 nt, Homo sapiens
  misc_RNA (1)...(19): siRNA sense strand
cuccaaaacuaaaggacaa

SEQ ID NO: 2304551 - RNA, 19 nt, Homo sapiens
  misc_RNA (1)...(19): siRNA sense strand
ucuucaugguuuacagaaa

SEQ ID NO: 2304552 - RNA, 19 nt, Homo sapiens
  misc_RNA (1)...(19): siRNA sense strand
ggacaaaacaaaaugguca

SEQ ID NO: 2304553 - RNA, 19 nt, Homo sapiens
  misc_RNA (1)...(19): siRNA sense strand
uugcagcaguagagaagaa

SEQ ID NO: 2304554 - RNA, 19 nt, Homo sapiens
  misc_RNA (1)...(19): siRNA sense strand
caggaaugccagagcugaa

SEQ ID NO: 2304555 - RNA, 19 nt, Homo sapiens
  misc_RNA (1)...(19): siRNA sense strand
ccgaauacuaccaagaaaa

SEQ ID NO: 2304556 - RNA, 19 nt, Homo sapiens
  misc_RNA (1)...(19): siRNA sense strand
aauugaacuuggagaacuu

SEQ ID NO: 2304557 - RNA, 19 nt, Homo sapiens
  misc_RNA (1)...(19): siRNA sense strand
uuucaaaacugaugaguga

SEQ ID NO: 2304558 - RNA, 19 nt, Homo sapiens
  misc_RNA (1)...(19): siRNA sense strand
cggaucacuucaagauauu

SEQ ID NO: 2304559 - RNA, 19 nt, Homo sapiens
  misc_RNA (1)...(19): siRNA sense strand
aggaauaacagcaauugaa

SEQ ID NO: 2304560 - RNA, 19 nt, Homo sapiens
  misc_RNA (1)...(19): siRNA sense strand
gagaaaagaaacagaagca

SEQ ID NO: 2304561 - RNA, 19 nt, Homo sapiens
  misc_RNA (1)...(19): siRNA sense strand
aacagaagcacgagaugaa

SEQ ID NO: 2304562 - RNA, 19 nt, Homo sapiens
  misc_RNA (1)...(19): siRNA sense strand
gaguuaucuuagucgggaa

SEQ ID NO: 2304563 - RNA, 19 nt, Homo sapiens
  misc_RNA (1)...(19): siRNA sense strand
cuauggauuuguauggaau

SEQ ID NO: 2304564 - RNA, 19 nt, Homo sapiens
  misc_RNA (1)...(19): siRNA sense strand
aaacaugggaugcagggua

SEQ ID NO: 2304565 - RNA, 19 nt, Homo sapiens
  misc_RNA (1)...(19): siRNA sense strand
cagaauugcaaauagccua

SEQ ID NO: 2304566 - RNA, 19 nt, Homo sapiens
  misc_RNA (1)...(19): siRNA sense strand
ugccagagcugaacggaca

SEQ ID NO: 2304567 - RNA, 19 nt, Homo sapiens
  misc_RNA (1)...(19): siRNA sense strand
ugaaaauacagaaggauca

SEQ ID NO: 2304568 - RNA, 19 nt, Homo sapiens
  misc_RNA (1)...(19): siRNA sense strand
ggguaaaagcuucaaguca

SEQ ID NO: 2304569 - RNA, 19 nt, Homo sapiens
  misc_RNA (1)...(19): siRNA sense strand
aguaggaauaacagcaauu

SEQ ID NO: 2304570 - RNA, 19 nt, Homo sapiens
  misc_RNA (1)...(19): siRNA sense strand
uggugcaaauacuggcaaa

SEQ ID NO: 2304571 - RNA, 19 nt, Homo sapiens
  misc_RNA (1)...(19): siRNA sense strand
gagaaaccuuacagggucu

SEQ ID NO: 2304572 - RNA, 19 nt, Homo sapiens
  misc_RNA (1)...(19): siRNA sense strand
agcaauugaacuuggagaa

SEQ ID NO: 2304573 - RNA, 19 nt, Homo sapiens
  misc_RNA (1)...(19): siRNA sense strand
agcacaagcaccacaguua

SEQ ID NO: 2304574 - RNA, 19 nt, Homo sapiens
  misc_RNA (1)...(19): siRNA sense strand
uaguucaguuugagacaau

SEQ ID NO: 2304575 - RNA, 19 nt, Homo sapiens
  misc_RNA (1)...(19): siRNA sense strand
ucaaaacugaugagugaaa

SEQ ID NO: 2304576 - RNA, 19 nt, Homo sapiens
  misc_RNA (1)...(19): siRNA sense strand
gagccaaugcagaaauuca

SEQ ID NO: 2304577 - RNA, 19 nt, Homo sapiens
  misc_RNA (1)...(19): siRNA sense strand
cagaagcacgagaugaaau

SEQ ID NO: 2304578 - RNA, 19 nt, Homo sapiens
  misc_RNA (1)...(19): siRNA sense strand
caacgauggaacaguuauu

SEQ ID NO: 2304579 - RNA, 19 nt, Homo sapiens
  misc_RNA (1)...(19): siRNA sense strand
cacaaauguugcauaguca

SEQ ID NO: 2304580 - RNA, 19 nt, Homo sapiens
  misc_RNA (1)...(19): siRNA sense strand
gagugaaaauacagaagga

SEQ ID NO: 2304581 - RNA, 19 nt, Homo sapiens
  misc_RNA (1)...(19): siRNA sense strand
cuuacagggucuugccuau

SEQ ID NO: 2304582 - RNA, 19 nt, Homo sapiens
  misc_RNA (1)...(19): siRNA sense strand
agagaagaaugguggcuac

SEQ ID NO: 2304583 - RNA, 19 nt, Homo sapiens
  misc_RNA (1)...(19): siRNA sense strand
aacaaagauuccugauaca

SEQ ID NO: 2304584 - RNA, 19 nt, Homo sapiens
  misc_RNA (1)...(19): siRNA sense strand
accgaauacuaccaagaaa

SEQ ID NO: 2304585 - RNA, 19 nt, Homo sapiens
  misc_RNA (1)...(19): siRNA sense strand
gguaguucaguuugagaca

SEQ ID NO: 2304586 - RNA, 19 nt, Homo sapiens
  misc_RNA (1)...(19): siRNA sense strand
aagcagaugacgaugacuu

SEQ ID NO: 2304587 - RNA, 19 nt, Homo sapiens
  misc_RNA (1)...(19): siRNA sense strand
ugaagaugguauuuacaca

SEQ ID NO: 2304588 - RNA, 19 nt, Homo sapiens
  misc_RNA (1)...(19): siRNA sense strand
uguacuuggcuguauguua

SEQ ID NO: 2304589 - RNA, 19 nt, Homo sapiens
  misc_RNA (1)...(19): siRNA sense strand
aauguugcauagucagaaa

SEQ ID NO: 2304590 - RNA, 19 nt, Homo sapiens
  misc_RNA (1)...(19): siRNA sense strand
agauaucaaaggugcuaau

SEQ ID NO: 2304591 - RNA, 19 nt, Homo sapiens
  misc_RNA (1)...(19): siRNA sense strand
aagacaacuuuccggauga

SEQ ID NO: 2304592 - RNA, 19 nt, Homo sapiens
  misc_RNA (1)...(19): siRNA sense strand
aguuaucuuagucgggaaa

SEQ ID NO: 2304593 - RNA, 19 nt, Homo sapiens
  misc_RNA (1)...(19): siRNA sense strand
ggaauacugugguggcgga

SEQ ID NO: 2304594 - RNA, 19 nt, Homo sapiens
  misc_RNA (1)...(19): siRNA sense strand
agaccauggcgauguaaaa

SEQ ID NO: 2304595 - RNA, 19 nt, Homo sapiens
  misc_RNA (1)...(19): siRNA sense strand
cagcaauugaacuuggaga

SEQ ID NO: 2304596 - RNA, 19 nt, Homo sapiens
  misc_RNA (1)...(19): siRNA sense strand
acaaaauggucaucaacau

SEQ ID NO: 2304597 - RNA, 19 nt, Homo sapiens
  misc_RNA (1)...(19): siRNA sense strand
acacugaagcagaugacga

SEQ ID NO: 2304598 - RNA, 19 nt, Homo sapiens
  misc_RNA (1)...(19): siRNA sense strand
cuucaagucagaugagguu

SEQ ID NO: 2304599 - RNA, 19 nt, Homo sapiens
  misc_RNA (1)...(19): siRNA sense strand
auacugugguggcggauca

SEQ ID NO: 2304600 - RNA, 19 nt, Homo sapiens
  misc_RNA (1)...(19): siRNA sense strand
uugccuacuuugggaguua

SEQ ID NO: 2304601 - RNA, 19 nt, Homo sapiens
  misc_RNA (1)...(19): siRNA sense strand
gggaacuggaggagaugaa

SEQ ID NO: 2304602 - RNA, 19 nt, Homo sapiens
  misc_RNA (1)...(19): siRNA sense strand
cuuccaaggaggacggcaa

SEQ ID NO: 2304603 - RNA, 19 nt, Homo sapiens
  misc_RNA (1)...(19): siRNA sense strand
aggaagacgaagagaucga

SEQ ID NO: 2304604 - RNA, 19 nt, Homo sapiens
  misc_RNA (1)...(19): siRNA sense strand
cguucagcaucgaggacau

SEQ ID NO: 2304605 - RNA, 19 nt, Homo sapiens
  misc_RNA (1)...(19): siRNA sense strand
acgaagagaucgacgugga

SEQ ID NO: 2304606 - RNA, 19 nt, Homo sapiens
  misc_RNA (1)...(19): siRNA sense strand
gagcagaacucggaggcca

SEQ ID NO: 2304607 - RNA, 19 nt, Homo sapiens
  misc_RNA (1)...(19): siRNA sense strand
aggacgaggaagacgaaga

SEQ ID NO: 2304608 - RNA, 19 nt, Homo sapiens
  misc_RNA (1)...(19): siRNA sense strand
uggaggagaugaaggccga

SEQ ID NO: 2304609 - RNA, 19 nt, Homo sapiens
  misc_RNA (1)...(19): siRNA sense strand
acgaggaagacgaagagau

SEQ ID NO: 2304610 - RNA, 19 nt, Homo sapiens
  misc_RNA (1)...(19): siRNA sense strand
cggaggacgaggaagacga

SEQ ID NO: 2304611 - RNA, 19 nt, Homo sapiens
  misc_RNA (1)...(19): siRNA sense strand
agcgggaacuggaggagau

SEQ ID NO: 2304612 - RNA, 19 nt, Homo sapiens
  misc_RNA (1)...(19): siRNA sense strand
agaugaaggccgacgugga

SEQ ID NO: 2304613 - RNA, 19 nt, Homo sapiens
  misc_RNA (1)...(19): siRNA sense strand
gcuucuuauuagcuggaaa

SEQ ID NO: 2304614 - RNA, 19 nt, Homo sapiens
  misc_RNA (1)...(19): siRNA sense strand
agagaaaugugaucgcuga

SEQ ID NO: 2304615 - RNA, 19 nt, Homo sapiens
  misc_RNA (1)...(19): siRNA sense strand
cuggaaaaccuguguucaa

SEQ ID NO: 2304616 - RNA, 19 nt, Homo sapiens
  misc_RNA (1)...(19): siRNA sense strand
ugaagaaaugcguggauac

SEQ ID NO: 2304617 - RNA, 19 nt, Homo sapiens
  misc_RNA (1)...(19): siRNA sense strand
gcguggauacgauggccua

SEQ ID NO: 2304618 - RNA, 19 nt, Homo sapiens
  misc_RNA (1)...(19): siRNA sense strand
auacgauggccuaugagaa

SEQ ID NO: 2304619 - RNA, 19 nt, Homo sapiens
  misc_RNA (1)...(19): siRNA sense strand
gugaagagaugcacggauc

SEQ ID NO: 2304620 - RNA, 19 nt, Homo sapiens
  misc_RNA (1)...(19): siRNA sense strand
aguuaggagugaagagaug

SEQ ID NO: 2304621 - RNA, 19 nt, Homo sapiens
  misc_RNA (1)...(19): siRNA sense strand
gggcaggagagcacagaca

SEQ ID NO: 2304622 - RNA, 19 nt, Homo sapiens
  misc_RNA (1)...(19): siRNA sense strand
ccgacuacuccaacgagaa

SEQ ID NO: 2304623 - RNA, 19 nt, Homo sapiens
  misc_RNA (1)...(19): siRNA sense strand
gggcaggagagcacagaca

SEQ ID NO: 2304624 - RNA, 19 nt, Homo sapiens
  misc_RNA (1)...(19): siRNA sense strand
ccgacuacuccaacgagaa

SEQ ID NO: 2304625 - RNA, 19 nt, Homo sapiens
  misc_RNA (1)...(19): siRNA sense strand
gagaagugcuaccggguca

SEQ ID NO: 2304626 - RNA, 19 nt, Homo sapiens
  misc_RNA (1)...(19): siRNA sense strand
guggagaaguucaugccaa

SEQ ID NO: 2304627 - RNA, 19 nt, Homo sapiens
  misc_RNA (1)...(19): siRNA sense strand
gaaagaagguguaccgaag

SEQ ID NO: 2304628 - RNA, 19 nt, Homo sapiens
  misc_RNA (1)...(19): siRNA sense strand
ccuccugacagcagagcaa

SEQ ID NO: 2304629 - RNA, 19 nt, Homo sapiens
  misc_RNA (1)...(19): siRNA sense strand
agaaagaagguguaccgaa

SEQ ID NO: 2304630 - RNA, 19 nt, Homo sapiens
  misc_RNA (1)...(19): siRNA sense strand
ccuagagaaagaaggugua

SEQ ID NO: 2304631 - RNA, 19 nt, Homo sapiens
  misc_RNA (1)...(19): siRNA sense strand
uggaggagguggugaggcu

SEQ ID NO: 2304632 - RNA, 19 nt, Homo sapiens
  misc_RNA (1)...(19): siRNA sense strand
aggccgugguggugacuga

SEQ ID NO: 2304633 - RNA, 19 nt, Homo sapiens
  misc_RNA (1)...(19): siRNA sense strand
gcgugcacgggaaggcaua

SEQ ID NO: 2304634 - RNA, 19 nt, Homo sapiens
  misc_RNA (1)...(19): siRNA sense strand
uuguaagaucccuggucua

SEQ ID NO: 2304635 - RNA, 19 nt, Homo sapiens
  misc_RNA (1)...(19): siRNA sense strand
cuccgaaucaugagauauu

SEQ ID NO: 2304636 - RNA, 19 nt, Homo sapiens
  misc_RNA (1)...(19): siRNA sense strand
gcaccaacaaugaggagcu

SEQ ID NO: 2304637 - RNA, 19 nt, Homo sapiens
  misc_RNA (1)...(19): siRNA sense strand
uggaagauggcaagaccuu

SEQ ID NO: 2304638 - RNA, 19 nt, Homo sapiens
  misc_RNA (1)...(19): siRNA sense strand
ugggcaucccugugggcaa

SEQ ID NO: 2304639 - RNA, 19 nt, Homo sapiens
  misc_RNA (1)...(19): siRNA sense strand
acgggaaggcauacgauga

SEQ ID NO: 2304640 - RNA, 19 nt, Homo sapiens
  misc_RNA (1)...(19): siRNA sense strand
gggaagugacauagacaau

SEQ ID NO: 2304641 - RNA, 19 nt, Homo sapiens
  misc_RNA (1)...(19): siRNA sense strand
cacuagaagauuuggauaa

SEQ ID NO: 2304642 - RNA, 19 nt, Homo sapiens
  misc_RNA (1)...(19): siRNA sense strand
gggcaaacugcuuggccaa

SEQ ID NO: 2304643 - RNA, 19 nt, Homo sapiens
  misc_RNA (1)...(19): siRNA sense strand
cgaauaagaagaaggggaa

SEQ ID NO: 2304644 - RNA, 19 nt, Homo sapiens
  misc_RNA (1)...(19): siRNA sense strand
uggagaaggcuauggaaga

SEQ ID NO: 2304645 - RNA, 19 nt, Homo sapiens
  misc_RNA (1)...(19): siRNA sense strand
auuugaacauagaggagaa

SEQ ID NO: 2304646 - RNA, 19 nt, Homo sapiens
  misc_RNA (1)...(19): siRNA sense strand
ccagauaaucaucaggaau

SEQ ID NO: 2304647 - RNA, 19 nt, Homo sapiens
  misc_RNA (1)...(19): siRNA sense strand
guugauacaggaagagaau

SEQ ID NO: 2304648 - RNA, 19 nt, Homo sapiens
  misc_RNA (1)...(19): siRNA sense strand
cgucaaacuaggagauuuu

SEQ ID NO: 2304649 - RNA, 19 nt, Homo sapiens
  misc_RNA (1)...(19): siRNA sense strand
ggguuacauuccagaugaa

SEQ ID NO: 2304650 - RNA, 19 nt, Homo sapiens
  misc_RNA (1)...(19): siRNA sense strand
ugauguugauacaggaaga

SEQ ID NO: 2304651 - RNA, 19 nt, Homo sapiens
  misc_RNA (1)...(19): siRNA sense strand
caucaguggagaaggcuau

SEQ ID NO: 2304652 - RNA, 19 nt, Homo sapiens
  misc_RNA (1)...(19): siRNA sense strand
ugagaaugugacuaggaaa

SEQ ID NO: 2304653 - RNA, 19 nt, Homo sapiens
  misc_RNA (1)...(19): siRNA sense strand
uggaaaaggaggaacauau

SEQ ID NO: 2304654 - RNA, 19 nt, Homo sapiens
  misc_RNA (1)...(19): siRNA sense strand
aagaaggggaagugacaua

SEQ ID NO: 2304655 - RNA, 19 nt, Homo sapiens
  misc_RNA (1)...(19): siRNA sense strand
cuuuggauggagagagcua

SEQ ID NO: 2304656 - RNA, 19 nt, Homo sapiens
  misc_RNA (1)...(19): siRNA sense strand
ggccagucgaccagcauua

SEQ ID NO: 2304657 - RNA, 19 nt, Homo sapiens
  misc_RNA (1)...(19): siRNA sense strand
uauuuggagcagagaggaa

SEQ ID NO: 2304658 - RNA, 19 nt, Homo sapiens
  misc_RNA (1)...(19): siRNA sense strand
gguagaaaugcuaacugaa

SEQ ID NO: 2304659 - RNA, 19 nt, Homo sapiens
  misc_RNA (1)...(19): siRNA sense strand
cuguuaugauguugauaca

SEQ ID NO: 2304660 - RNA, 19 nt, Homo sapiens
  misc_RNA (1)...(19): siRNA sense strand
agaccagcaaggaaguaaa

SEQ ID NO: 2304661 - RNA, 19 nt, Homo sapiens
  misc_RNA (1)...(19): siRNA sense strand
auaucaucaucaagaggua

SEQ ID NO: 2304662 - RNA, 19 nt, Homo sapiens
  misc_RNA (1)...(19): siRNA sense strand
gagaaggcuauggaagaaa

SEQ ID NO: 2304663 - RNA, 19 nt, Homo sapiens
  misc_RNA (1)...(19): siRNA sense strand
guaucaacagugaaggaga

SEQ ID NO: 2304664 - RNA, 19 nt, Homo sapiens
  misc_RNA (1)...(19): siRNA sense strand
gcaaggaaguaaaugcacu

SEQ ID NO: 2304665 - RNA, 19 nt, Homo sapiens
  misc_RNA (1)...(19): siRNA sense strand
gaguaugaugauagucgaa

SEQ ID NO: 2304666 - RNA, 19 nt, Homo sapiens
  misc_RNA (1)...(19): siRNA sense strand
cugaugaacucuuaaggca

SEQ ID NO: 2304667 - RNA, 19 nt, Homo sapiens
  misc_RNA (1)...(19): siRNA sense strand
cuguuaagcaaguucaauu

SEQ ID NO: 2304668 - RNA, 19 nt, Homo sapiens
  misc_RNA (1)...(19): siRNA sense strand
ggaaaccagaaaagcaaaa

SEQ ID NO: 2304669 - RNA, 19 nt, Homo sapiens
  misc_RNA (1)...(19): siRNA sense strand
ucacuagaagauuuggaua

SEQ ID NO: 2304670 - RNA, 19 nt, Homo sapiens
  misc_RNA (1)...(19): siRNA sense strand
caggaaaccagaaaagcaa

SEQ ID NO: 2304671 - RNA, 19 nt, Homo sapiens
  misc_RNA (1)...(19): siRNA sense strand
acccuaucuuugagaaauu

SEQ ID NO: 2304672 - RNA, 19 nt, Homo sapiens
  misc_RNA (1)...(19): siRNA sense strand
gaugaacucuuaaggcaca

SEQ ID NO: 2304673 - RNA, 19 nt, Homo sapiens
  misc_RNA (1)...(19): siRNA sense strand
cuagaaggacccaggggaa

SEQ ID NO: 2304674 - RNA, 19 nt, Homo sapiens
  misc_RNA (1)...(19): siRNA sense strand
uguugauacaggaagagaa

SEQ ID NO: 2304675 - RNA, 19 nt, Homo sapiens
  misc_RNA (1)...(19): siRNA sense strand
ugaagucaucaguggagaa

SEQ ID NO: 2304676 - RNA, 19 nt, Homo sapiens
  misc_RNA (1)...(19): siRNA sense strand
uggacaaagcucuggaacu

SEQ ID NO: 2304677 - RNA, 19 nt, Homo sapiens
  misc_RNA (1)...(19): siRNA sense strand
acuaguagagauagaaguu

SEQ ID NO: 2304678 - RNA, 19 nt, Homo sapiens
  misc_RNA (1)...(19): siRNA sense strand
gcaaaaucuucaucaccaa

SEQ ID NO: 2304679 - RNA, 19 nt, Homo sapiens
  misc_RNA (1)...(19): siRNA sense strand
uaacccuaucuuugagaaa

SEQ ID NO: 2304680 - RNA, 19 nt, Homo sapiens
  misc_RNA (1)...(19): siRNA sense strand
caguaauaugauuguccua

SEQ ID NO: 2304681 - RNA, 19 nt, Homo sapiens
  misc_RNA (1)...(19): siRNA sense strand
ugauagucgaauaagaaga

SEQ ID NO: 2304682 - RNA, 19 nt, Homo sapiens
  misc_RNA (1)...(19): siRNA sense strand
ugauacaggaagagaauug

SEQ ID NO: 2304683 - RNA, 19 nt, Homo sapiens
  misc_RNA (1)...(19): siRNA sense strand
cagaaugauguccgaguca

SEQ ID NO: 2304684 - RNA, 19 nt, Homo sapiens
  misc_RNA (1)...(19): siRNA sense strand
agucuauggaucuacauua

SEQ ID NO: 2304685 - RNA, 19 nt, Homo sapiens
  misc_RNA (1)...(19): siRNA sense strand
cgagauaucaaaggcgcaa

SEQ ID NO: 2304686 - RNA, 19 nt, Homo sapiens
  misc_RNA (1)...(19): siRNA sense strand
ggaacauauccaagaaggu

SEQ ID NO: 2304687 - RNA, 19 nt, Homo sapiens
  misc_RNA (1)...(19): siRNA sense strand
augauuguccuacgagaua

SEQ ID NO: 2304688 - RNA, 19 nt, Homo sapiens
  misc_RNA (1)...(19): siRNA sense strand
ugagggauccccaggaaaa

SEQ ID NO: 2304689 - RNA, 19 nt, Homo sapiens
  misc_RNA (1)...(19): siRNA sense strand
ggaccaauuaaaagcauau

SEQ ID NO: 2304690 - RNA, 19 nt, Homo sapiens
  misc_RNA (1)...(19): siRNA sense strand
agauaucaaaggcgcaaau

SEQ ID NO: 2304691 - RNA, 19 nt, Homo sapiens
  misc_RNA (1)...(19): siRNA sense strand
gggaaauaaucaagcgaac

SEQ ID NO: 2304692 - RNA, 19 nt, Homo sapiens
  misc_RNA (1)...(19): siRNA sense strand
uguaauuaauguaggacga

SEQ ID NO: 2304693 - RNA, 19 nt, Homo sapiens
  misc_RNA (1)...(19): siRNA sense strand
gguuguggcuggaagguca

SEQ ID NO: 2304694 - RNA, 19 nt, Homo sapiens
  misc_RNA (1)...(19): siRNA sense strand
gaucaaggaaggagcagca

SEQ ID NO: 2304695 - RNA, 19 nt, Homo sapiens
  misc_RNA (1)...(19): siRNA sense strand
cagugagacaauuaugaaa

SEQ ID NO: 2304696 - RNA, 19 nt, Homo sapiens
  misc_RNA (1)...(19): siRNA sense strand
agagcauauugaugagaga

SEQ ID NO: 2304697 - RNA, 19 nt, Homo sapiens
  misc_RNA (1)...(19): siRNA sense strand
ggacgaauguguuuggauc

SEQ ID NO: 2304698 - RNA, 19 nt, Homo sapiens
  misc_RNA (1)...(19): siRNA sense strand
acaaggauguugauggcuu

SEQ ID NO: 2304699 - RNA, 19 nt, Homo sapiens
  misc_RNA (1)...(19): siRNA sense strand
cagucauugaugugggaau

SEQ ID NO: 2304700 - RNA, 19 nt, Homo sapiens
  misc_RNA (1)...(19): siRNA sense strand
ugacaguggcaaugcuaau

SEQ ID NO: 2304701 - RNA, 19 nt, Homo sapiens
  misc_RNA (1)...(19): siRNA sense strand
cccaaagagcaguugaaga

SEQ ID NO: 2304702 - RNA, 19 nt, Homo sapiens
  misc_RNA (1)...(19): siRNA sense strand
gcugaggcuugaagagcga

SEQ ID NO: 2304703 - RNA, 19 nt, Homo sapiens
  misc_RNA (1)...(19): siRNA sense strand
ccauggggugugugggaaa

SEQ ID NO: 2304704 - RNA, 19 nt, Homo sapiens
  misc_RNA (1)...(19): siRNA sense strand
ugguuggagauguggauuu

SEQ ID NO: 2304705 - RNA, 19 nt, Homo sapiens
  misc_RNA (1)...(19): siRNA sense strand
aaucaagcgaacuggcauu

SEQ ID NO: 2304706 - RNA, 19 nt, Homo sapiens
  misc_RNA (1)...(19): siRNA sense strand
gcagauaugaucaaggaag

SEQ ID NO: 2304707 - RNA, 19 nt, Homo sapiens
  misc_RNA (1)...(19): siRNA sense strand
cggcacacacggagaguca

SEQ ID NO: 2304708 - RNA, 19 nt, Homo sapiens
  misc_RNA (1)...(19): siRNA sense strand
agaaaggacacuacgccaa

SEQ ID NO: 2304709 - RNA, 19 nt, Homo sapiens
  misc_RNA (1)...(19): siRNA sense strand
gagugcagcaacaaggaau

SEQ ID NO: 2304710 - RNA, 19 nt, Homo sapiens
  misc_RNA (1)...(19): siRNA sense strand
cugaagaacgccuggaaca

SEQ ID NO: 2304711 - RNA, 19 nt, Homo sapiens
  misc_RNA (1)...(19): siRNA sense strand
ggaacaucauccaggcuga

SEQ ID NO: 2304712 - RNA, 19 nt, Homo sapiens
  misc_RNA (1)...(19): siRNA sense strand
gguaagaaguacgacgcau

SEQ ID NO: 2304713 - RNA, 19 nt, Homo sapiens
  misc_RNA (1)...(19): siRNA sense strand
uguaccacaccgagaacaa

SEQ ID NO: 2304714 - RNA, 19 nt, Homo sapiens
  misc_RNA (1)...(19): siRNA sense strand
ucuacauggacaaggugaa

SEQ ID NO: 2304715 - RNA, 19 nt, Homo sapiens
  misc_RNA (1)...(19): siRNA sense strand
gcuaugaaaaggugaagau

SEQ ID NO: 2304716 - RNA, 19 nt, Homo sapiens
  misc_RNA (1)...(19): siRNA sense strand
gugaagaugugguucgaug

SEQ ID NO: 2304717 - RNA, 19 nt, Homo sapiens
  misc_RNA (1)...(19): siRNA sense strand
guaaaugugaagaaggaaa

SEQ ID NO: 2304718 - RNA, 19 nt, Homo sapiens
  misc_RNA (1)...(19): siRNA sense strand
ggauauugaaauugaggaa

SEQ ID NO: 2304719 - RNA, 19 nt, Homo sapiens
  misc_RNA (1)...(19): siRNA sense strand
caguaaagcuggaaggcca

SEQ ID NO: 2304720 - RNA, 19 nt, Homo sapiens
  misc_RNA (1)...(19): siRNA sense strand
agugaaaggagaagaagaa

SEQ ID NO: 2304721 - RNA, 19 nt, Homo sapiens
  misc_RNA (1)...(19): siRNA sense strand
ucucaaacauagcaggaaa

SEQ ID NO: 2304722 - RNA, 19 nt, Homo sapiens
  misc_RNA (1)...(19): siRNA sense strand
cccaaugaaucaagagcaa

SEQ ID NO: 2304723 - RNA, 19 nt, Homo sapiens
  misc_RNA (1)...(19): siRNA sense strand
acgacgagauugugaagaa

SEQ ID NO: 2304724 - RNA, 19 nt, Homo sapiens
  misc_RNA (1)...(19): siRNA sense strand
ccgcaauggugauggagau

SEQ ID NO: 2304725 - RNA, 19 nt, Homo sapiens
  misc_RNA (1)...(19): siRNA sense strand
ggucaaacgacgagauugu

SEQ ID NO: 2304726 - RNA, 19 nt, Homo sapiens
  misc_RNA (1)...(19): siRNA sense strand
ggaguaaagaagagcccua

SEQ ID NO: 2304727 - RNA, 19 nt, Homo sapiens
  misc_RNA (1)...(19): siRNA sense strand
cugaggacuugcuggauaa

SEQ ID NO: 2304728 - RNA, 19 nt, Homo sapiens
  misc_RNA (1)...(19): siRNA sense strand
ccucaaagccaacaaggaa

SEQ ID NO: 2304729 - RNA, 19 nt, Homo sapiens
  misc_RNA (1)...(19): siRNA sense strand
ccaaugaggauaugcaaau

SEQ ID NO: 2304730 - RNA, 19 nt, Homo sapiens
  misc_RNA (1)...(19): siRNA sense strand
gguaaguaacagaggggua

SEQ ID NO: 2304731 - RNA, 19 nt, Homo sapiens
  misc_RNA (1)...(19): siRNA sense strand
caacacagcaggaggcaca

SEQ ID NO: 2304732 - RNA, 19 nt, Homo sapiens
  misc_RNA (1)...(19): siRNA sense strand
ggaaauaucuaguccagca

SEQ ID NO: 2304733 - RNA, 19 nt, Homo sapiens
  misc_RNA (1)...(19): siRNA sense strand
cuguuaaaagugagggaaa

SEQ ID NO: 2304734 - RNA, 19 nt, Homo sapiens
  misc_RNA (1)...(19): siRNA sense strand
gagugaaaccacauggauu

SEQ ID NO: 2304735 - RNA, 19 nt, Homo sapiens
  misc_RNA (1)...(19): siRNA sense strand
ucucaagagcagcaaguaa

SEQ ID NO: 2304736 - RNA, 19 nt, Homo sapiens
  misc_RNA (1)...(19): siRNA sense strand
ugcaaguguuugugggcaa

SEQ ID NO: 2304737 - RNA, 19 nt, Homo sapiens
  misc_RNA (1)...(19): siRNA sense strand
ccagauucagucagaguua

SEQ ID NO: 2304738 - RNA, 19 nt, Homo sapiens
  misc_RNA (1)...(19): siRNA sense strand
gaaagauagaacacagcaa

SEQ ID NO: 2304739 - RNA, 19 nt, Homo sapiens
  misc_RNA (1)...(19): siRNA sense strand
agugaaaccacauggauuu

SEQ ID NO: 2304740 - RNA, 19 nt, Homo sapiens
  misc_RNA (1)...(19): siRNA sense strand
guuaauaucaugaggaaag

SEQ ID NO: 2304741 - RNA, 19 nt, Homo sapiens
  misc_RNA (1)...(19): siRNA sense strand
gaugaaaacucuuggaagu

SEQ ID NO: 2304742 - RNA, 19 nt, Homo sapiens
  misc_RNA (1)...(19): siRNA sense strand
caaugaaucaagagcaaca

SEQ ID NO: 2304743 - RNA, 19 nt, Homo sapiens
  misc_RNA (1)...(19): siRNA sense strand
gggaaaggagcugaagaua

SEQ ID NO: 2304744 - RNA, 19 nt, Homo sapiens
  misc_RNA (1)...(19): siRNA sense strand
auguaaaugugaagaagga

SEQ ID NO: 2304745 - RNA, 19 nt, Homo sapiens
  misc_RNA (1)...(19): siRNA sense strand
aggagaagaagaaguguuu

SEQ ID NO: 2304746 - RNA, 19 nt, Homo sapiens
  misc_RNA (1)...(19): siRNA sense strand
gcagcuuagugcagauauu

SEQ ID NO: 2304747 - RNA, 19 nt, Homo sapiens
  misc_RNA (1)...(19): siRNA sense strand
uggacaauauccuguuaaa

SEQ ID NO: 2304748 - RNA, 19 nt, Homo sapiens
  misc_RNA (1)...(19): siRNA sense strand
agggaaaggagcugaagau

SEQ ID NO: 2304749 - RNA, 19 nt, Homo sapiens
  misc_RNA (1)...(19): siRNA sense strand
gcugaagauaguuguacaa

SEQ ID NO: 2304750 - RNA, 19 nt, Homo sapiens
  misc_RNA (1)...(19): siRNA sense strand
cagugaaaggagaagaaga

SEQ ID NO: 2304751 - RNA, 19 nt, Homo sapiens
  misc_RNA (1)...(19): siRNA sense strand
agauucagcccaaggcaua

SEQ ID NO: 2304752 - RNA, 19 nt, Homo sapiens
  misc_RNA (1)...(19): siRNA sense strand
gugaagaaggaaauaucua

SEQ ID NO: 2304753 - RNA, 19 nt, Homo sapiens
  misc_RNA (1)...(19): siRNA sense strand
gguccuacccagucggaau

SEQ ID NO: 2304754 - RNA, 19 nt, Homo sapiens
  misc_RNA (1)...(19): siRNA sense strand
caaugauaacacugaggua

SEQ ID NO: 2304755 - RNA, 19 nt, Homo sapiens
  misc_RNA (1)...(19): siRNA sense strand
gguggacugcguagggaua

SEQ ID NO: 2304756 - RNA, 19 nt, Homo sapiens
  misc_RNA (1)...(19): siRNA sense strand
uggagaugcaacagaguau

SEQ ID NO: 2304757 - RNA, 19 nt, Homo sapiens
  misc_RNA (1)...(19): siRNA sense strand
ccaugcaauuucagaguca

SEQ ID NO: 2304758 - RNA, 19 nt, Homo sapiens
  misc_RNA (1)...(19): siRNA sense strand
aacucagucuagagagaua

SEQ ID NO: 2304759 - RNA, 19 nt, Homo sapiens
  misc_RNA (1)...(19): siRNA sense strand
ucaacaagucagucaaauu

SEQ ID NO: 2304760 - RNA, 19 nt, Homo sapiens
  misc_RNA (1)...(19): siRNA sense strand
gcagaauucuccuggcuca

SEQ ID NO: 2304761 - RNA, 19 nt, Homo sapiens
  misc_RNA (1)...(19): siRNA sense strand
caacaaaggcaacucaaaa

SEQ ID NO: 2304762 - RNA, 19 nt, Homo sapiens
  misc_RNA (1)...(19): siRNA sense strand
cagcaggagugccagaaau

SEQ ID NO: 2304763 - RNA, 19 nt, Homo sapiens
  misc_RNA (1)...(19): siRNA sense strand
cccaaaggaguuacaguua

SEQ ID NO: 2304764 - RNA, 19 nt, Homo sapiens
  misc_RNA (1)...(19): siRNA sense strand
ccaacaaguuuuagaggca

SEQ ID NO: 2304765 - RNA, 19 nt, Homo sapiens
  misc_RNA (1)...(19): siRNA sense strand
uggagaagaaacuggaaca

SEQ ID NO: 2304766 - RNA, 19 nt, Homo sapiens
  misc_RNA (1)...(19): siRNA sense strand
ccucagucaccgacagcaa

SEQ ID NO: 2304767 - RNA, 19 nt, Homo sapiens
  misc_RNA (1)...(19): siRNA sense strand
ccaccuaccuucugaaaau

SEQ ID NO: 2304768 - RNA, 19 nt, Homo sapiens
  misc_RNA (1)...(19): siRNA sense strand
ccaggaaacucaagguucu

SEQ ID NO: 2304769 - RNA, 19 nt, Homo sapiens
  misc_RNA (1)...(19): siRNA sense strand
aaucagaauaccauggcua

SEQ ID NO: 2304770 - RNA, 19 nt, Homo sapiens
  misc_RNA (1)...(19): siRNA sense strand
ccaccaaacaugauauuca

SEQ ID NO: 2304771 - RNA, 19 nt, Homo sapiens
  misc_RNA (1)...(19): siRNA sense strand
cuacaaagucuguuggauc

SEQ ID NO: 2304772 - RNA, 19 nt, Homo sapiens
  misc_RNA (1)...(19): siRNA sense strand
ccucaagaccagcagucaa

SEQ ID NO: 2304773 - RNA, 19 nt, Homo sapiens
  misc_RNA (1)...(19): siRNA sense strand
cugcguagggauauugaaa

SEQ ID NO: 2304774 - RNA, 19 nt, Homo sapiens
  misc_RNA (1)...(19): siRNA sense strand
gcuaguggcagcaguggaa

SEQ ID NO: 2304775 - RNA, 19 nt, Homo sapiens
  misc_RNA (1)...(19): siRNA sense strand
caucaaacagugaacaaca

SEQ ID NO: 2304776 - RNA, 19 nt, Homo sapiens
  misc_RNA (1)...(19): siRNA sense strand
caaugaaccaacugcagaa

SEQ ID NO: 2304777 - RNA, 19 nt, Homo sapiens
  misc_RNA (1)...(19): siRNA sense strand
cuauaaacaccaaccagaa

SEQ ID NO: 2304778 - RNA, 19 nt, Homo sapiens
  misc_RNA (1)...(19): siRNA sense strand
agugacaaaugcuggaaga

SEQ ID NO: 2304779 - RNA, 19 nt, Homo sapiens
  misc_RNA (1)...(19): siRNA sense strand
ggccaugaaagcaaugaaa

SEQ ID NO: 2304780 - RNA, 19 nt, Homo sapiens
  misc_RNA (1)...(19): siRNA sense strand
ccacggacaacaaaggcaa

SEQ ID NO: 2304781 - RNA, 19 nt, Homo sapiens
  misc_RNA (1)...(19): siRNA sense strand
gagagauauuacagucaga

SEQ ID NO: 2304782 - RNA, 19 nt, Homo sapiens
  misc_RNA (1)...(19): siRNA sense strand
cagaugguacagugguuaa

SEQ ID NO: 2304783 - RNA, 19 nt, Homo sapiens
  misc_RNA (1)...(19): siRNA sense strand
aagaacaagcacagacuuu

SEQ ID NO: 2304784 - RNA, 19 nt, Homo sapiens
  misc_RNA (1)...(19): siRNA sense strand
uucaggagauggagaagaa

SEQ ID NO: 2304785 - RNA, 19 nt, Homo sapiens
  misc_RNA (1)...(19): siRNA sense strand
guaaaugugaagaaggaaa

SEQ ID NO: 2304786 - RNA, 19 nt, Homo sapiens
  misc_RNA (1)...(19): siRNA sense strand
ggauauugaaauugaggaa

SEQ ID NO: 2304787 - RNA, 19 nt, Homo sapiens
  misc_RNA (1)...(19): siRNA sense strand
caguaaagcuggaaggcca

SEQ ID NO: 2304788 - RNA, 19 nt, Homo sapiens
  misc_RNA (1)...(19): siRNA sense strand
agugaaaggagaagaagaa

SEQ ID NO: 2304789 - RNA, 19 nt, Homo sapiens
  misc_RNA (1)...(19): siRNA sense strand
ucucaaacauagcaggaaa

SEQ ID NO: 2304790 - RNA, 19 nt, Homo sapiens
  misc_RNA (1)...(19): siRNA sense strand
cccaaugaaucaagagcaa

SEQ ID NO: 2304791 - RNA, 19 nt, Homo sapiens
  misc_RNA (1)...(19): siRNA sense strand
acgacgagauugugaagaa

SEQ ID NO: 2304792 - RNA, 19 nt, Homo sapiens
  misc_RNA (1)...(19): siRNA sense strand
ccgcaauggugauggagau

SEQ ID NO: 2304793 - RNA, 19 nt, Homo sapiens
  misc_RNA (1)...(19): siRNA sense strand
ggucaaacgacgagauugu

SEQ ID NO: 2304794 - RNA, 19 nt, Homo sapiens
  misc_RNA (1)...(19): siRNA sense strand
ggaguaaagaagagcccua

SEQ ID NO: 2304795 - RNA, 19 nt, Homo sapiens
  misc_RNA (1)...(19): siRNA sense strand
cugaggacuugcuggauaa

SEQ ID NO: 2304796 - RNA, 19 nt, Homo sapiens
  misc_RNA (1)...(19): siRNA sense strand
ccucaaagccaacaaggaa

SEQ ID NO: 2304797 - RNA, 19 nt, Homo sapiens
  misc_RNA (1)...(19): siRNA sense strand
ccaaugaggauaugcaaau

SEQ ID NO: 2304798 - RNA, 19 nt, Homo sapiens
  misc_RNA (1)...(19): siRNA sense strand
gguaaguaacagaggggua

SEQ ID NO: 2304799 - RNA, 19 nt, Homo sapiens
  misc_RNA (1)...(19): siRNA sense strand
caacacagcaggaggcaca

SEQ ID NO: 2304800 - RNA, 19 nt, Homo sapiens
  misc_RNA (1)...(19): siRNA sense strand
ggaaauaucuaguccagca

SEQ ID NO: 2304801 - RNA, 19 nt, Homo sapiens
  misc_RNA (1)...(19): siRNA sense strand
cuguuaaaagugagggaaa

SEQ ID NO: 2304802 - RNA, 19 nt, Homo sapiens
  misc_RNA (1)...(19): siRNA sense strand
gagugaaaccacauggauu

SEQ ID NO: 2304803 - RNA, 19 nt, Homo sapiens
  misc_RNA (1)...(19): siRNA sense strand
ucucaagagcagcaaguaa

SEQ ID NO: 2304804 - RNA, 19 nt, Homo sapiens
  misc_RNA (1)...(19): siRNA sense strand
ugcaaguguuugugggcaa

SEQ ID NO: 2304805 - RNA, 19 nt, Homo sapiens
  misc_RNA (1)...(19): siRNA sense strand
ccagauucagucagaguua

SEQ ID NO: 2304806 - RNA, 19 nt, Homo sapiens
  misc_RNA (1)...(19): siRNA sense strand
gaaagauagaacacagcaa

SEQ ID NO: 2304807 - RNA, 19 nt, Homo sapiens
  misc_RNA (1)...(19): siRNA sense strand
agugaaaccacauggauuu

SEQ ID NO: 2304808 - RNA, 19 nt, Homo sapiens
  misc_RNA (1)...(19): siRNA sense strand
guuaauaucaugaggaaag

SEQ ID NO: 2304809 - RNA, 19 nt, Homo sapiens
  misc_RNA (1)...(19): siRNA sense strand
gaugaaaacucuuggaagu

SEQ ID NO: 2304810 - RNA, 19 nt, Homo sapiens
  misc_RNA (1)...(19): siRNA sense strand
caaugaaucaagagcaaca

SEQ ID NO: 2304811 - RNA, 19 nt, Homo sapiens
  misc_RNA (1)...(19): siRNA sense strand
gggaaaggagcugaagaua

SEQ ID NO: 2304812 - RNA, 19 nt, Homo sapiens
  misc_RNA (1)...(19): siRNA sense strand
auguaaaugugaagaagga

SEQ ID NO: 2304813 - RNA, 19 nt, Homo sapiens
  misc_RNA (1)...(19): siRNA sense strand
aggagaagaagaaguguuu

SEQ ID NO: 2304814 - RNA, 19 nt, Homo sapiens
  misc_RNA (1)...(19): siRNA sense strand
gcagcuuagugcagauauu

SEQ ID NO: 2304815 - RNA, 19 nt, Homo sapiens
  misc_RNA (1)...(19): siRNA sense strand
uggacaauauccuguuaaa

SEQ ID NO: 2304816 - RNA, 19 nt, Homo sapiens
  misc_RNA (1)...(19): siRNA sense strand
agggaaaggagcugaagau

SEQ ID NO: 2304817 - RNA, 19 nt, Homo sapiens
  misc_RNA (1)...(19): siRNA sense strand
gcugaagauaguuguacaa

SEQ ID NO: 2304818 - RNA, 19 nt, Homo sapiens
  misc_RNA (1)...(19): siRNA sense strand
cagugaaaggagaagaaga

SEQ ID NO: 2304819 - RNA, 19 nt, Homo sapiens
  misc_RNA (1)...(19): siRNA sense strand
agauucagcccaaggcaua

SEQ ID NO: 2304820 - RNA, 19 nt, Homo sapiens
  misc_RNA (1)...(19): siRNA sense strand
gugaagaaggaaauaucua

SEQ ID NO: 2304821 - RNA, 19 nt, Homo sapiens
  misc_RNA (1)...(19): siRNA sense strand
gguccuacccagucggaau

SEQ ID NO: 2304822 - RNA, 19 nt, Homo sapiens
  misc_RNA (1)...(19): siRNA sense strand
caaugauaacacugaggua

SEQ ID NO: 2304823 - RNA, 19 nt, Homo sapiens
  misc_RNA (1)...(19): siRNA sense strand
gguggacugcguagggaua

SEQ ID NO: 2304824 - RNA, 19 nt, Homo sapiens
  misc_RNA (1)...(19): siRNA sense strand
uggagaugcaacagaguau

SEQ ID NO: 2304825 - RNA, 19 nt, Homo sapiens
  misc_RNA (1)...(19): siRNA sense strand
ccaugcaauuucagaguca

SEQ ID NO: 2304826 - RNA, 19 nt, Homo sapiens
  misc_RNA (1)...(19): siRNA sense strand
aacucagucuagagagaua

SEQ ID NO: 2304827 - RNA, 19 nt, Homo sapiens
  misc_RNA (1)...(19): siRNA sense strand
ucaacaagucagucaaauu

SEQ ID NO: 2304828 - RNA, 19 nt, Homo sapiens
  misc_RNA (1)...(19): siRNA sense strand
gcagaauucuccuggcuca

SEQ ID NO: 2304829 - RNA, 19 nt, Homo sapiens
  misc_RNA (1)...(19): siRNA sense strand
caacaaaggcaacucaaaa

SEQ ID NO: 2304830 - RNA, 19 nt, Homo sapiens
  misc_RNA (1)...(19): siRNA sense strand
cagcaggagugccagaaau

SEQ ID NO: 2304831 - RNA, 19 nt, Homo sapiens
  misc_RNA (1)...(19): siRNA sense strand
ccaacaaguuuuagaggca

SEQ ID NO: 2304832 - RNA, 19 nt, Homo sapiens
  misc_RNA (1)...(19): siRNA sense strand
uggagaagaaacuggaaca

SEQ ID NO: 2304833 - RNA, 19 nt, Homo sapiens
  misc_RNA (1)...(19): siRNA sense strand
ccucagucaccgacagcaa

SEQ ID NO: 2304834 - RNA, 19 nt, Homo sapiens
  misc_RNA (1)...(19): siRNA sense strand
ccaccuaccuucugaaaau

SEQ ID NO: 2304835 - RNA, 19 nt, Homo sapiens
  misc_RNA (1)...(19): siRNA sense strand
ccaggaaacucaagguucu

SEQ ID NO: 2304836 - RNA, 19 nt, Homo sapiens
  misc_RNA (1)...(19): siRNA sense strand
aaucagaauaccauggcua

SEQ ID NO: 2304837 - RNA, 19 nt, Homo sapiens
  misc_RNA (1)...(19): siRNA sense strand
ccaccaaacaugauauuca

SEQ ID NO: 2304838 - RNA, 19 nt, Homo sapiens
  misc_RNA (1)...(19): siRNA sense strand
cuacaaagucuguuggauc

SEQ ID NO: 2304839 - RNA, 19 nt, Homo sapiens
  misc_RNA (1)...(19): siRNA sense strand
ccucaagaccagcagucaa

SEQ ID NO: 2304840 - RNA, 19 nt, Homo sapiens
  misc_RNA (1)...(19): siRNA sense strand
cugcguagggauauugaaa

SEQ ID NO: 2304841 - RNA, 19 nt, Homo sapiens
  misc_RNA (1)...(19): siRNA sense strand
gcuaguggcagcaguggaa

SEQ ID NO: 2304842 - RNA, 19 nt, Homo sapiens
  misc_RNA (1)...(19): siRNA sense strand
caucaaacagugaacaaca

SEQ ID NO: 2304843 - RNA, 19 nt, Homo sapiens
  misc_RNA (1)...(19): siRNA sense strand
caaugaaccaacugcagaa

SEQ ID NO: 2304844 - RNA, 19 nt, Homo sapiens
  misc_RNA (1)...(19): siRNA sense strand
cuauaaacaccaaccagaa

SEQ ID NO: 2304845 - RNA, 19 nt, Homo sapiens
  misc_RNA (1)...(19): siRNA sense strand
agugacaaaugcuggaaga

SEQ ID NO: 2304846 - RNA, 19 nt, Homo sapiens
  misc_RNA (1)...(19): siRNA sense strand
ggccaugaaagcaaugaaa

SEQ ID NO: 2304847 - RNA, 19 nt, Homo sapiens
  misc_RNA (1)...(19): siRNA sense strand
ccacggacaacaaaggcaa

SEQ ID NO: 2304848 - RNA, 19 nt, Homo sapiens
  misc_RNA (1)...(19): siRNA sense strand
gagagauauuacagucaga

SEQ ID NO: 2304849 - RNA, 19 nt, Homo sapiens
  misc_RNA (1)...(19): siRNA sense strand
cagaugguacagugguuaa

SEQ ID NO: 2304850 - RNA, 19 nt, Homo sapiens
  misc_RNA (1)...(19): siRNA sense strand
aagaacaagcacagacuuu

SEQ ID NO: 2304851 - RNA, 19 nt, Homo sapiens
  misc_RNA (1)...(19): siRNA sense strand
uucaggagauggagaagaa

SEQ ID NO: 2304852 - RNA, 19 nt, Homo sapiens
  misc_RNA (1)...(19): siRNA sense strand
uggcuaaucaggagcaaca

SEQ ID NO: 2304853 - RNA, 19 nt, Homo sapiens
  misc_RNA (1)...(19): siRNA sense strand
ccgaagaggcacacagucu

SEQ ID NO: 2304854 - RNA, 19 nt, Homo sapiens
  misc_RNA (1)...(19): siRNA sense strand
guaaaugugaagaaggaaa

SEQ ID NO: 2304855 - RNA, 19 nt, Homo sapiens
  misc_RNA (1)...(19): siRNA sense strand
ggauauugaaauugaggaa

SEQ ID NO: 2304856 - RNA, 19 nt, Homo sapiens
  misc_RNA (1)...(19): siRNA sense strand
caguaaagcuggaaggcca

SEQ ID NO: 2304857 - RNA, 19 nt, Homo sapiens
  misc_RNA (1)...(19): siRNA sense strand
agugaaaggagaagaagaa

SEQ ID NO: 2304858 - RNA, 19 nt, Homo sapiens
  misc_RNA (1)...(19): siRNA sense strand
ucucaaacauagcaggaaa

SEQ ID NO: 2304859 - RNA, 19 nt, Homo sapiens
  misc_RNA (1)...(19): siRNA sense strand
cccaaugaaucaagagcaa

SEQ ID NO: 2304860 - RNA, 19 nt, Homo sapiens
  misc_RNA (1)...(19): siRNA sense strand
acgacgagauugugaagaa

SEQ ID NO: 2304861 - RNA, 19 nt, Homo sapiens
  misc_RNA (1)...(19): siRNA sense strand
ccgcaauggugauggagau

SEQ ID NO: 2304862 - RNA, 19 nt, Homo sapiens
  misc_RNA (1)...(19): siRNA sense strand
ggucaaacgacgagauugu

SEQ ID NO: 2304863 - RNA, 19 nt, Homo sapiens
  misc_RNA (1)...(19): siRNA sense strand
ggaguaaagaagagcccua

SEQ ID NO: 2304864 - RNA, 19 nt, Homo sapiens
  misc_RNA (1)...(19): siRNA sense strand
cugaggacuugcuggauaa

SEQ ID NO: 2304865 - RNA, 19 nt, Homo sapiens
  misc_RNA (1)...(19): siRNA sense strand
ccucaaagccaacaaggaa

SEQ ID NO: 2304866 - RNA, 19 nt, Homo sapiens
  misc_RNA (1)...(19): siRNA sense strand
ccaaugaggauaugcaaau

SEQ ID NO: 2304867 - RNA, 19 nt, Homo sapiens
  misc_RNA (1)...(19): siRNA sense strand
gguaaguaacagaggggua

SEQ ID NO: 2304868 - RNA, 19 nt, Homo sapiens
  misc_RNA (1)...(19): siRNA sense strand
caacacagcaggaggcaca

SEQ ID NO: 2304869 - RNA, 19 nt, Homo sapiens
  misc_RNA (1)...(19): siRNA sense strand
ggaaauaucuaguccagca

SEQ ID NO: 2304870 - RNA, 19 nt, Homo sapiens
  misc_RNA (1)...(19): siRNA sense strand
cuguuaaaagugagggaaa

SEQ ID NO: 2304871 - RNA, 19 nt, Homo sapiens
  misc_RNA (1)...(19): siRNA sense strand
gagugaaaccacauggauu

SEQ ID NO: 2304872 - RNA, 19 nt, Homo sapiens
  misc_RNA (1)...(19): siRNA sense strand
ucucaagagcagcaaguaa

SEQ ID NO: 2304873 - RNA, 19 nt, Homo sapiens
  misc_RNA (1)...(19): siRNA sense strand
ugcaaguguuugugggcaa

SEQ ID NO: 2304874 - RNA, 19 nt, Homo sapiens
  misc_RNA (1)...(19): siRNA sense strand
ccagauucagucagaguua

SEQ ID NO: 2304875 - RNA, 19 nt, Homo sapiens
  misc_RNA (1)...(19): siRNA sense strand
gaaagauagaacacagcaa

SEQ ID NO: 2304876 - RNA, 19 nt, Homo sapiens
  misc_RNA (1)...(19): siRNA sense strand
agugaaaccacauggauuu

SEQ ID NO: 2304877 - RNA, 19 nt, Homo sapiens
  misc_RNA (1)...(19): siRNA sense strand
guuaauaucaugaggaaag

SEQ ID NO: 2304878 - RNA, 19 nt, Homo sapiens
  misc_RNA (1)...(19): siRNA sense strand
gaugaaaacucuuggaagu

SEQ ID NO: 2304879 - RNA, 19 nt, Homo sapiens
  misc_RNA (1)...(19): siRNA sense strand
caaugaaucaagagcaaca

SEQ ID NO: 2304880 - RNA, 19 nt, Homo sapiens
  misc_RNA (1)...(19): siRNA sense strand
gggaaaggagcugaagaua

SEQ ID NO: 2304881 - RNA, 19 nt, Homo sapiens
  misc_RNA (1)...(19): siRNA sense strand
auguaaaugugaagaagga

SEQ ID NO: 2304882 - RNA, 19 nt, Homo sapiens
  misc_RNA (1)...(19): siRNA sense strand
aggagaagaagaaguguuu

SEQ ID NO: 2304883 - RNA, 19 nt, Homo sapiens
  misc_RNA (1)...(19): siRNA sense strand
gcagcuuagugcagauauu

SEQ ID NO: 2304884 - RNA, 19 nt, Homo sapiens
  misc_RNA (1)...(19): siRNA sense strand
uggacaauauccuguuaaa

SEQ ID NO: 2304885 - RNA, 19 nt, Homo sapiens
  misc_RNA (1)...(19): siRNA sense strand
agggaaaggagcugaagau

SEQ ID NO: 2304886 - RNA, 19 nt, Homo sapiens
  misc_RNA (1)...(19): siRNA sense strand
gcugaagauaguuguacaa

SEQ ID NO: 2304887 - RNA, 19 nt, Homo sapiens
  misc_RNA (1)...(19): siRNA sense strand
cagugaaaggagaagaaga

SEQ ID NO: 2304888 - RNA, 19 nt, Homo sapiens
  misc_RNA (1)...(19): siRNA sense strand
agauucagcccaaggcaua

SEQ ID NO: 2304889 - RNA, 19 nt, Homo sapiens
  misc_RNA (1)...(19): siRNA sense strand
gugaagaaggaaauaucua

SEQ ID NO: 2304890 - RNA, 19 nt, Homo sapiens
  misc_RNA (1)...(19): siRNA sense strand
gguccuacccagucggaau

SEQ ID NO: 2304891 - RNA, 19 nt, Homo sapiens
  misc_RNA (1)...(19): siRNA sense strand
caaugauaacacugaggua

SEQ ID NO: 2304892 - RNA, 19 nt, Homo sapiens
  misc_RNA (1)...(19): siRNA sense strand
gguggacugcguagggaua

SEQ ID NO: 2304893 - RNA, 19 nt, Homo sapiens
  misc_RNA (1)...(19): siRNA sense strand
uggagaugcaacagaguau

SEQ ID NO: 2304894 - RNA, 19 nt, Homo sapiens
  misc_RNA (1)...(19): siRNA sense strand
ccaugcaauuucagaguca

SEQ ID NO: 2304895 - RNA, 19 nt, Homo sapiens
  misc_RNA (1)...(19): siRNA sense strand
aacucagucuagagagaua

SEQ ID NO: 2304896 - RNA, 19 nt, Homo sapiens
  misc_RNA (1)...(19): siRNA sense strand
ucaacaagucagucaaauu

SEQ ID NO: 2304897 - RNA, 19 nt, Homo sapiens
  misc_RNA (1)...(19): siRNA sense strand
gcagaauucuccuggcuca

SEQ ID NO: 2304898 - RNA, 19 nt, Homo sapiens
  misc_RNA (1)...(19): siRNA sense strand
caacaaaggcaacucaaaa

SEQ ID NO: 2304899 - RNA, 19 nt, Homo sapiens
  misc_RNA (1)...(19): siRNA sense strand
cagcaggagugccagaaau

SEQ ID NO: 2304900 - RNA, 19 nt, Homo sapiens
  misc_RNA (1)...(19): siRNA sense strand
ccaacaaguuuuagaggca

SEQ ID NO: 2304901 - RNA, 19 nt, Homo sapiens
  misc_RNA (1)...(19): siRNA sense strand
uggagaagaaacuggaaca

SEQ ID NO: 2304902 - RNA, 19 nt, Homo sapiens
  misc_RNA (1)...(19): siRNA sense strand
ccucagucaccgacagcaa

SEQ ID NO: 2304903 - RNA, 19 nt, Homo sapiens
  misc_RNA (1)...(19): siRNA sense strand
ccaccuaccuucugaaaau

SEQ ID NO: 2304904 - RNA, 19 nt, Homo sapiens
  misc_RNA (1)...(19): siRNA sense strand
ccaggaaacucaagguucu

SEQ ID NO: 2304905 - RNA, 19 nt, Homo sapiens
  misc_RNA (1)...(19): siRNA sense strand
aaucagaauaccauggcua

SEQ ID NO: 2304906 - RNA, 19 nt, Homo sapiens
  misc_RNA (1)...(19): siRNA sense strand
ccaccaaacaugauauuca

SEQ ID NO: 2304907 - RNA, 19 nt, Homo sapiens
  misc_RNA (1)...(19): siRNA sense strand
cuacaaagucuguuggauc

SEQ ID NO: 2304908 - RNA, 19 nt, Homo sapiens
  misc_RNA (1)...(19): siRNA sense strand
ccucaagaccagcagucaa

SEQ ID NO: 2304909 - RNA, 19 nt, Homo sapiens
  misc_RNA (1)...(19): siRNA sense strand
cugcguagggauauugaaa

SEQ ID NO: 2304910 - RNA, 19 nt, Homo sapiens
  misc_RNA (1)...(19): siRNA sense strand
gcuaguggcagcaguggaa

SEQ ID NO: 2304911 - RNA, 19 nt, Homo sapiens
  misc_RNA (1)...(19): siRNA sense strand
caucaaacagugaacaaca

SEQ ID NO: 2304912 - RNA, 19 nt, Homo sapiens
  misc_RNA (1)...(19): siRNA sense strand
caaugaaccaacugcagaa

SEQ ID NO: 2304913 - RNA, 19 nt, Homo sapiens
  misc_RNA (1)...(19): siRNA sense strand
cuauaaacaccaaccagaa

SEQ ID NO: 2304914 - RNA, 19 nt, Homo sapiens
  misc_RNA (1)...(19): siRNA sense strand
agugacaaaugcuggaaga

SEQ ID NO: 2304915 - RNA, 19 nt, Homo sapiens
  misc_RNA (1)...(19): siRNA sense strand
ggccaugaaagcaaugaaa

SEQ ID NO: 2304916 - RNA, 19 nt, Homo sapiens
  misc_RNA (1)...(19): siRNA sense strand
ccacggacaacaaaggcaa

SEQ ID NO: 2304917 - RNA, 19 nt, Homo sapiens
  misc_RNA (1)...(19): siRNA sense strand
gagagauauuacagucaga

SEQ ID NO: 2304918 - RNA, 19 nt, Homo sapiens
  misc_RNA (1)...(19): siRNA sense strand
cagaugguacagugguuaa

SEQ ID NO: 2304919 - RNA, 19 nt, Homo sapiens
  misc_RNA (1)...(19): siRNA sense strand
aagaacaagcacagacuuu

SEQ ID NO: 2304920 - RNA, 19 nt, Homo sapiens
  misc_RNA (1)...(19): siRNA sense strand
uucaggagauggagaagaa

SEQ ID NO: 2304921 - RNA, 19 nt, Homo sapiens
  misc_RNA (1)...(19): siRNA sense strand
uggcuaaucaggagcaaca

SEQ ID NO: 2304922 - RNA, 19 nt, Homo sapiens
  misc_RNA (1)...(19): siRNA sense strand
ccgaagaggcacacagucu

SEQ ID NO: 2304923 - RNA, 19 nt, Homo sapiens
  misc_RNA (1)...(19): siRNA sense strand
guaaaugugaagaaggaaa

SEQ ID NO: 2304924 - RNA, 19 nt, Homo sapiens
  misc_RNA (1)...(19): siRNA sense strand
ggauauugaaauugaggaa

SEQ ID NO: 2304925 - RNA, 19 nt, Homo sapiens
  misc_RNA (1)...(19): siRNA sense strand
caguaaagcuggaaggcca

SEQ ID NO: 2304926 - RNA, 19 nt, Homo sapiens
  misc_RNA (1)...(19): siRNA sense strand
agugaaaggagaagaagaa

SEQ ID NO: 2304927 - RNA, 19 nt, Homo sapiens
  misc_RNA (1)...(19): siRNA sense strand
ucucaaacauagcaggaaa

SEQ ID NO: 2304928 - RNA, 19 nt, Homo sapiens
  misc_RNA (1)...(19): siRNA sense strand
cccaaugaaucaagagcaa

SEQ ID NO: 2304929 - RNA, 19 nt, Homo sapiens
  misc_RNA (1)...(19): siRNA sense strand
acgacgagauugugaagaa

SEQ ID NO: 2304930 - RNA, 19 nt, Homo sapiens
  misc_RNA (1)...(19): siRNA sense strand
ccgcaauggugauggagau

SEQ ID NO: 2304931 - RNA, 19 nt, Homo sapiens
  misc_RNA (1)...(19): siRNA sense strand
ggucaaacgacgagauugu

SEQ ID NO: 2304932 - RNA, 19 nt, Homo sapiens
  misc_RNA (1)...(19): siRNA sense strand
ggaguaaagaagagcccua

SEQ ID NO: 2304933 - RNA, 19 nt, Homo sapiens
  misc_RNA (1)...(19): siRNA sense strand
cugaggacuugcuggauaa

SEQ ID NO: 2304934 - RNA, 19 nt, Homo sapiens
  misc_RNA (1)...(19): siRNA sense strand
ccucaaagccaacaaggaa

SEQ ID NO: 2304935 - RNA, 19 nt, Homo sapiens
  misc_RNA (1)...(19): siRNA sense strand
ccaaugaggauaugcaaau

SEQ ID NO: 2304936 - RNA, 19 nt, Homo sapiens
  misc_RNA (1)...(19): siRNA sense strand
gguaaguaacagaggggua

SEQ ID NO: 2304937 - RNA, 19 nt, Homo sapiens
  misc_RNA (1)...(19): siRNA sense strand
caacacagcaggaggcaca

SEQ ID NO: 2304938 - RNA, 19 nt, Homo sapiens
  misc_RNA (1)...(19): siRNA sense strand
ggaaauaucuaguccagca

SEQ ID NO: 2304939 - RNA, 19 nt, Homo sapiens
  misc_RNA (1)...(19): siRNA sense strand
cuguuaaaagugagggaaa

SEQ ID NO: 2304940 - RNA, 19 nt, Homo sapiens
  misc_RNA (1)...(19): siRNA sense strand
gagugaaaccacauggauu

SEQ ID NO: 2304941 - RNA, 19 nt, Homo sapiens
  misc_RNA (1)...(19): siRNA sense strand
ucucaagagcagcaaguaa

SEQ ID NO: 2304942 - RNA, 19 nt, Homo sapiens
  misc_RNA (1)...(19): siRNA sense strand
ugcaaguguuugugggcaa

SEQ ID NO: 2304943 - RNA, 19 nt, Homo sapiens
  misc_RNA (1)...(19): siRNA sense strand
ccagauucagucagaguua

SEQ ID NO: 2304944 - RNA, 19 nt, Homo sapiens
  misc_RNA (1)...(19): siRNA sense strand
gaaagauagaacacagcaa

SEQ ID NO: 2304945 - RNA, 19 nt, Homo sapiens
  misc_RNA (1)...(19): siRNA sense strand
agugaaaccacauggauuu

SEQ ID NO: 2304946 - RNA, 19 nt, Homo sapiens
  misc_RNA (1)...(19): siRNA sense strand
guuaauaucaugaggaaag

SEQ ID NO: 2304947 - RNA, 19 nt, Homo sapiens
  misc_RNA (1)...(19): siRNA sense strand
gaugaaaacucuuggaagu

SEQ ID NO: 2304948 - RNA, 19 nt, Homo sapiens
  misc_RNA (1)...(19): siRNA sense strand
caaugaaucaagagcaaca

SEQ ID NO: 2304949 - RNA, 19 nt, Homo sapiens
  misc_RNA (1)...(19): siRNA sense strand
gggaaaggagcugaagaua

SEQ ID NO: 2304950 - RNA, 19 nt, Homo sapiens
  misc_RNA (1)...(19): siRNA sense strand
auguaaaugugaagaagga

SEQ ID NO: 2304951 - RNA, 19 nt, Homo sapiens
  misc_RNA (1)...(19): siRNA sense strand
aggagaagaagaaguguuu

SEQ ID NO: 2304952 - RNA, 19 nt, Homo sapiens
  misc_RNA (1)...(19): siRNA sense strand
gcagcuuagugcagauauu

SEQ ID NO: 2304953 - RNA, 19 nt, Homo sapiens
  misc_RNA (1)...(19): siRNA sense strand
uggacaauauccuguuaaa

SEQ ID NO: 2304954 - RNA, 19 nt, Homo sapiens
  misc_RNA (1)...(19): siRNA sense strand
agggaaaggagcugaagau

SEQ ID NO: 2304955 - RNA, 19 nt, Homo sapiens
  misc_RNA (1)...(19): siRNA sense strand
gcugaagauaguuguacaa

SEQ ID NO: 2304956 - RNA, 19 nt, Homo sapiens
  misc_RNA (1)...(19): siRNA sense strand
cagugaaaggagaagaaga

SEQ ID NO: 2304957 - RNA, 19 nt, Homo sapiens
  misc_RNA (1)...(19): siRNA sense strand
agauucagcccaaggcaua

SEQ ID NO: 2304958 - RNA, 19 nt, Homo sapiens
  misc_RNA (1)...(19): siRNA sense strand
gugaagaaggaaauaucua

SEQ ID NO: 2304959 - RNA, 19 nt, Homo sapiens
  misc_RNA (1)...(19): siRNA sense strand
gguccuacccagucggaau

SEQ ID NO: 2304960 - RNA, 19 nt, Homo sapiens
  misc_RNA (1)...(19): siRNA sense strand
caaugauaacacugaggua

SEQ ID NO: 2304961 - RNA, 19 nt, Homo sapiens
  misc_RNA (1)...(19): siRNA sense strand
gguggacugcguagggaua

SEQ ID NO: 2304962 - RNA, 19 nt, Homo sapiens
  misc_RNA (1)...(19): siRNA sense strand
uggagaugcaacagaguau

SEQ ID NO: 2304963 - RNA, 19 nt, Homo sapiens
  misc_RNA (1)...(19): siRNA sense strand
ccaugcaauuucagaguca

SEQ ID NO: 2304964 - RNA, 19 nt, Homo sapiens
  misc_RNA (1)...(19): siRNA sense strand
aacucagucuagagagaua

SEQ ID NO: 2304965 - RNA, 19 nt, Homo sapiens
  misc_RNA (1)...(19): siRNA sense strand
ucaacaagucagucaaauu

SEQ ID NO: 2304966 - RNA, 19 nt, Homo sapiens
  misc_RNA (1)...(19): siRNA sense strand
gcagaauucuccuggcuca

SEQ ID NO: 2304967 - RNA, 19 nt, Homo sapiens
  misc_RNA (1)...(19): siRNA sense strand
caacaaaggcaacucaaaa

SEQ ID NO: 2304968 - RNA, 19 nt, Homo sapiens
  misc_RNA (1)...(19): siRNA sense strand
cagcaggagugccagaaau

SEQ ID NO: 2304969 - RNA, 19 nt, Homo sapiens
  misc_RNA (1)...(19): siRNA sense strand
ccaacaaguuuuagaggca

SEQ ID NO: 2304970 - RNA, 19 nt, Homo sapiens
  misc_RNA (1)...(19): siRNA sense strand
uggagaagaaacuggaaca

SEQ ID NO: 2304971 - RNA, 19 nt, Homo sapiens
  misc_RNA (1)...(19): siRNA sense strand
ccucagucaccgacagcaa

SEQ ID NO: 2304972 - RNA, 19 nt, Homo sapiens
  misc_RNA (1)...(19): siRNA sense strand
ccaccuaccuucugaaaau

SEQ ID NO: 2304973 - RNA, 19 nt, Homo sapiens
  misc_RNA (1)...(19): siRNA sense strand
ccaggaaacucaagguucu

SEQ ID NO: 2304974 - RNA, 19 nt, Homo sapiens
  misc_RNA (1)...(19): siRNA sense strand
aaucagaauaccauggcua

SEQ ID NO: 2304975 - RNA, 19 nt, Homo sapiens
  misc_RNA (1)...(19): siRNA sense strand
ccaccaaacaugauauuca

SEQ ID NO: 2304976 - RNA, 19 nt, Homo sapiens
  misc_RNA (1)...(19): siRNA sense strand
cuacaaagucuguuggauc

SEQ ID NO: 2304977 - RNA, 19 nt, Homo sapiens
  misc_RNA (1)...(19): siRNA sense strand
ccucaagaccagcagucaa

SEQ ID NO: 2304978 - RNA, 19 nt, Homo sapiens
  misc_RNA (1)...(19): siRNA sense strand
cugcguagggauauugaaa

SEQ ID NO: 2304979 - RNA, 19 nt, Homo sapiens
  misc_RNA (1)...(19): siRNA sense strand
gcuaguggcagcaguggaa

SEQ ID NO: 2304980 - RNA, 19 nt, Homo sapiens
  misc_RNA (1)...(19): siRNA sense strand
caucaaacagugaacaaca

SEQ ID NO: 2304981 - RNA, 19 nt, Homo sapiens
  misc_RNA (1)...(19): siRNA sense strand
caaugaaccaacugcagaa

SEQ ID NO: 2304982 - RNA, 19 nt, Homo sapiens
  misc_RNA (1)...(19): siRNA sense strand
cuauaaacaccaaccagaa

SEQ ID NO: 2304983 - RNA, 19 nt, Homo sapiens
  misc_RNA (1)...(19): siRNA sense strand
agugacaaaugcuggaaga

SEQ ID NO: 2304984 - RNA, 19 nt, Homo sapiens
  misc_RNA (1)...(19): siRNA sense strand
ggccaugaaagcaaugaaa

SEQ ID NO: 2304985 - RNA, 19 nt, Homo sapiens
  misc_RNA (1)...(19): siRNA sense strand
ccacggacaacaaaggcaa

SEQ ID NO: 2304986 - RNA, 19 nt, Homo sapiens
  misc_RNA (1)...(19): siRNA sense strand
gagagauauuacagucaga

SEQ ID NO: 2304987 - RNA, 19 nt, Homo sapiens
  misc_RNA (1)...(19): siRNA sense strand
cagaugguacagugguuaa

SEQ ID NO: 2304988 - RNA, 19 nt, Homo sapiens
  misc_RNA (1)...(19): siRNA sense strand
aagaacaagcacagacuuu

SEQ ID NO: 2304989 - RNA, 19 nt, Homo sapiens
  misc_RNA (1)...(19): siRNA sense strand
uucaggagauggagaagaa

SEQ ID NO: 2304990 - RNA, 19 nt, Homo sapiens
  misc_RNA (1)...(19): siRNA sense strand
uggcuaaucaggagcaaca

SEQ ID NO: 2304991 - RNA, 19 nt, Homo sapiens
  misc_RNA (1)...(19): siRNA sense strand
ccgaagaggcacacagucu

SEQ ID NO: 2304992 - RNA, 19 nt, Homo sapiens
  misc_RNA (1)...(19): siRNA sense strand
guaaaugugaagaaggaaa

SEQ ID NO: 2304993 - RNA, 19 nt, Homo sapiens
  misc_RNA (1)...(19): siRNA sense strand
ggauauugaaauugaggaa

SEQ ID NO: 2304994 - RNA, 19 nt, Homo sapiens
  misc_RNA (1)...(19): siRNA sense strand
caguaaagcuggaaggcca

SEQ ID NO: 2304995 - RNA, 19 nt, Homo sapiens
  misc_RNA (1)...(19): siRNA sense strand
agugaaaggagaagaagaa

SEQ ID NO: 2304996 - RNA, 19 nt, Homo sapiens
  misc_RNA (1)...(19): siRNA sense strand
ucucaaacauagcaggaaa

SEQ ID NO: 2304997 - RNA, 19 nt, Homo sapiens
  misc_RNA (1)...(19): siRNA sense strand
cccaaugaaucaagagcaa

SEQ ID NO: 2304998 - RNA, 19 nt, Homo sapiens
  misc_RNA (1)...(19): siRNA sense strand
acgacgagauugugaagaa

SEQ ID NO: 2304999 - RNA, 19 nt, Homo sapiens
  misc_RNA (1)...(19): siRNA sense strand
ccgcaauggugauggagau

SEQ ID NO: 2305000 - RNA, 19 nt, Homo sapiens
  misc_RNA (1)...(19): siRNA sense strand
ggucaaacgacgagauugu

SEQ ID NO: 2305001 - RNA, 19 nt, Homo sapiens
  misc_RNA (1)...(19): siRNA sense strand
ggaguaaagaagagcccua

SEQ ID NO: 2305002 - RNA, 19 nt, Homo sapiens
  misc_RNA (1)...(19): siRNA sense strand
cugaggacuugcuggauaa

SEQ ID NO: 2305003 - RNA, 19 nt, Homo sapiens
  misc_RNA (1)...(19): siRNA sense strand
ccucaaagccaacaaggaa

SEQ ID NO: 2305004 - RNA, 19 nt, Homo sapiens
  misc_RNA (1)...(19): siRNA sense strand
ccaaugaggauaugcaaau

SEQ ID NO: 2305005 - RNA, 19 nt, Homo sapiens
  misc_RNA (1)...(19): siRNA sense strand
gguaaguaacagaggggua

SEQ ID NO: 2305006 - RNA, 19 nt, Homo sapiens
  misc_RNA (1)...(19): siRNA sense strand
caacacagcaggaggcaca

SEQ ID NO: 2305007 - RNA, 19 nt, Homo sapiens
  misc_RNA (1)...(19): siRNA sense strand
ggaaauaucuaguccagca

SEQ ID NO: 2305008 - RNA, 19 nt, Homo sapiens
  misc_RNA (1)...(19): siRNA sense strand
cuguuaaaagugagggaaa

SEQ ID NO: 2305009 - RNA, 19 nt, Homo sapiens
  misc_RNA (1)...(19): siRNA sense strand
gagugaaaccacauggauu

SEQ ID NO: 2305010 - RNA, 19 nt, Homo sapiens
  misc_RNA (1)...(19): siRNA sense strand
ucucaagagcagcaaguaa

SEQ ID NO: 2305011 - RNA, 19 nt, Homo sapiens
  misc_RNA (1)...(19): siRNA sense strand
ugcaaguguuugugggcaa

SEQ ID NO: 2305012 - RNA, 19 nt, Homo sapiens
  misc_RNA (1)...(19): siRNA sense strand
ccagauucagucagaguua

SEQ ID NO: 2305013 - RNA, 19 nt, Homo sapiens
  misc_RNA (1)...(19): siRNA sense strand
gaaagauagaacacagcaa

SEQ ID NO: 2305014 - RNA, 19 nt, Homo sapiens
  misc_RNA (1)...(19): siRNA sense strand
agugaaaccacauggauuu

SEQ ID NO: 2305015 - RNA, 19 nt, Homo sapiens
  misc_RNA (1)...(19): siRNA sense strand
guuaauaucaugaggaaag

SEQ ID NO: 2305016 - RNA, 19 nt, Homo sapiens
  misc_RNA (1)...(19): siRNA sense strand
gaugaaaacucuuggaagu

SEQ ID NO: 2305017 - RNA, 19 nt, Homo sapiens
  misc_RNA (1)...(19): siRNA sense strand
caaugaaucaagagcaaca

SEQ ID NO: 2305018 - RNA, 19 nt, Homo sapiens
  misc_RNA (1)...(19): siRNA sense strand
gggaaaggagcugaagaua

SEQ ID NO: 2305019 - RNA, 19 nt, Homo sapiens
  misc_RNA (1)...(19): siRNA sense strand
auguaaaugugaagaagga

SEQ ID NO: 2305020 - RNA, 19 nt, Homo sapiens
  misc_RNA (1)...(19): siRNA sense strand
aggagaagaagaaguguuu

SEQ ID NO: 2305021 - RNA, 19 nt, Homo sapiens
  misc_RNA (1)...(19): siRNA sense strand
gcagcuuagugcagauauu

SEQ ID NO: 2305022 - RNA, 19 nt, Homo sapiens
  misc_RNA (1)...(19): siRNA sense strand
uggacaauauccuguuaaa

SEQ ID NO: 2305023 - RNA, 19 nt, Homo sapiens
  misc_RNA (1)...(19): siRNA sense strand
agggaaaggagcugaagau

SEQ ID NO: 2305024 - RNA, 19 nt, Homo sapiens
  misc_RNA (1)...(19): siRNA sense strand
gcugaagauaguuguacaa

SEQ ID NO: 2305025 - RNA, 19 nt, Homo sapiens
  misc_RNA (1)...(19): siRNA sense strand
cagugaaaggagaagaaga

SEQ ID NO: 2305026 - RNA, 19 nt, Homo sapiens
  misc_RNA (1)...(19): siRNA sense strand
agauucagcccaaggcaua

SEQ ID NO: 2305027 - RNA, 19 nt, Homo sapiens
  misc_RNA (1)...(19): siRNA sense strand
gugaagaaggaaauaucua

SEQ ID NO: 2305028 - RNA, 19 nt, Homo sapiens
  misc_RNA (1)...(19): siRNA sense strand
gguccuacccagucggaau

SEQ ID NO: 2305029 - RNA, 19 nt, Homo sapiens
  misc_RNA (1)...(19): siRNA sense strand
caaugauaacacugaggua

SEQ ID NO: 2305030 - RNA, 19 nt, Homo sapiens
  misc_RNA (1)...(19): siRNA sense strand
gguggacugcguagggaua

SEQ ID NO: 2305031 - RNA, 19 nt, Homo sapiens
  misc_RNA (1)...(19): siRNA sense strand
uggagaugcaacagaguau

SEQ ID NO: 2305032 - RNA, 19 nt, Homo sapiens
  misc_RNA (1)...(19): siRNA sense strand
ccaugcaauuucagaguca

SEQ ID NO: 2305033 - RNA, 19 nt, Homo sapiens
  misc_RNA (1)...(19): siRNA sense strand
aacucagucuagagagaua

SEQ ID NO: 2305034 - RNA, 19 nt, Homo sapiens
  misc_RNA (1)...(19): siRNA sense strand
ucaacaagucagucaaauu

SEQ ID NO: 2305035 - RNA, 19 nt, Homo sapiens
  misc_RNA (1)...(19): siRNA sense strand
gcagaauucuccuggcuca

SEQ ID NO: 2305036 - RNA, 19 nt, Homo sapiens
  misc_RNA (1)...(19): siRNA sense strand
caacaaaggcaacucaaaa

SEQ ID NO: 2305037 - RNA, 19 nt, Homo sapiens
  misc_RNA (1)...(19): siRNA sense strand
cagcaggagugccagaaau

SEQ ID NO: 2305038 - RNA, 19 nt, Homo sapiens
  misc_RNA (1)...(19): siRNA sense strand
ccaacaaguuuuagaggca

SEQ ID NO: 2305039 - RNA, 19 nt, Homo sapiens
  misc_RNA (1)...(19): siRNA sense strand
uggagaagaaacuggaaca

SEQ ID NO: 2305040 - RNA, 19 nt, Homo sapiens
  misc_RNA (1)...(19): siRNA sense strand
ccucagucaccgacagcaa

SEQ ID NO: 2305041 - RNA, 19 nt, Homo sapiens
  misc_RNA (1)...(19): siRNA sense strand
ccaccuaccuucugaaaau

SEQ ID NO: 2305042 - RNA, 19 nt, Homo sapiens
  misc_RNA (1)...(19): siRNA sense strand
ccaggaaacucaagguucu

SEQ ID NO: 2305043 - RNA, 19 nt, Homo sapiens
  misc_RNA (1)...(19): siRNA sense strand
aaucagaauaccauggcua

SEQ ID NO: 2305044 - RNA, 19 nt, Homo sapiens
  misc_RNA (1)...(19): siRNA sense strand
ccaccaaacaugauauuca

SEQ ID NO: 2305045 - RNA, 19 nt, Homo sapiens
  misc_RNA (1)...(19): siRNA sense strand
cuacaaagucuguuggauc

SEQ ID NO: 2305046 - RNA, 19 nt, Homo sapiens
  misc_RNA (1)...(19): siRNA sense strand
ccucaagaccagcagucaa

SEQ ID NO: 2305047 - RNA, 19 nt, Homo sapiens
  misc_RNA (1)...(19): siRNA sense strand
cugcguagggauauugaaa

SEQ ID NO: 2305048 - RNA, 19 nt, Homo sapiens
  misc_RNA (1)...(19): siRNA sense strand
gcuaguggcagcaguggaa

SEQ ID NO: 2305049 - RNA, 19 nt, Homo sapiens
  misc_RNA (1)...(19): siRNA sense strand
caucaaacagugaacaaca

SEQ ID NO: 2305050 - RNA, 19 nt, Homo sapiens
  misc_RNA (1)...(19): siRNA sense strand
caaugaaccaacugcagaa

SEQ ID NO: 2305051 - RNA, 19 nt, Homo sapiens
  misc_RNA (1)...(19): siRNA sense strand
cuauaaacaccaaccagaa

SEQ ID NO: 2305052 - RNA, 19 nt, Homo sapiens
  misc_RNA (1)...(19): siRNA sense strand
agugacaaaugcuggaaga

SEQ ID NO: 2305053 - RNA, 19 nt, Homo sapiens
  misc_RNA (1)...(19): siRNA sense strand
ggccaugaaagcaaugaaa

SEQ ID NO: 2305054 - RNA, 19 nt, Homo sapiens
  misc_RNA (1)...(19): siRNA sense strand
ccacggacaacaaaggcaa

SEQ ID NO: 2305055 - RNA, 19 nt, Homo sapiens
  misc_RNA (1)...(19): siRNA sense strand
gagagauauuacagucaga

SEQ ID NO: 2305056 - RNA, 19 nt, Homo sapiens
  misc_RNA (1)...(19): siRNA sense strand
cagaugguacagugguuaa

SEQ ID NO: 2305057 - RNA, 19 nt, Homo sapiens
  misc_RNA (1)...(19): siRNA sense strand
aagaacaagcacagacuuu

SEQ ID NO: 2305058 - RNA, 19 nt, Homo sapiens
  misc_RNA (1)...(19): siRNA sense strand
uucaggagauggagaagaa

SEQ ID NO: 2305059 - RNA, 19 nt, Homo sapiens
  misc_RNA (1)...(19): siRNA sense strand
uggcuaaucaggagcaaca

SEQ ID NO: 2305060 - RNA, 19 nt, Homo sapiens
  misc_RNA (1)...(19): siRNA sense strand
ccgaagaggcacacagucu

SEQ ID NO: 2305061 - RNA, 19 nt, Homo sapiens
  misc_RNA (1)...(19): siRNA sense strand
auguuggaccugagagaaa

SEQ ID NO: 2305062 - RNA, 19 nt, Homo sapiens
  misc_RNA (1)...(19): siRNA sense strand
ggugguaacucgagcguug

SEQ ID NO: 2305063 - RNA, 19 nt, Homo sapiens
  misc_RNA (1)...(19): siRNA sense strand
agauauucuagcuggguuu

SEQ ID NO: 2305064 - RNA, 19 nt, Homo sapiens
  misc_RNA (1)...(19): siRNA sense strand
agauguuggaccugagaga

SEQ ID NO: 2305065 - RNA, 19 nt, Homo sapiens
  misc_RNA (1)...(19): siRNA sense strand
ugcagcagggcgugagaaa

SEQ ID NO: 2305066 - RNA, 19 nt, Homo sapiens
  misc_RNA (1)...(19): siRNA sense strand
cuacuuugguuuugcacaa

SEQ ID NO: 2305067 - RNA, 19 nt, Homo sapiens
  misc_RNA (1)...(19): siRNA sense strand
uggucuugacugcgugaaa

SEQ ID NO: 2305068 - RNA, 19 nt, Homo sapiens
  misc_RNA (1)...(19): siRNA sense strand
gaggagaacugcagcguca

SEQ ID NO: 2305069 - RNA, 19 nt, Homo sapiens
  misc_RNA (1)...(19): siRNA sense strand
gagagagaucuuugggaau

SEQ ID NO: 2305070 - RNA, 19 nt, Homo sapiens
  misc_RNA (1)...(19): siRNA sense strand
agagagagaucuuugggaa

SEQ ID NO: 2305071 - RNA, 19 nt, Homo sapiens
  misc_RNA (1)...(19): siRNA sense strand
ggaaaguggugcuuggcau

SEQ ID NO: 2305072 - RNA, 19 nt, Homo sapiens
  misc_RNA (1)...(19): siRNA sense strand
cgaugacagugaugaggaa

SEQ ID NO: 2305073 - RNA, 19 nt, Homo sapiens
  misc_RNA (1)...(19): siRNA sense strand
gcagauggcuggcaggaga

SEQ ID NO: 2305074 - RNA, 19 nt, Homo sapiens
  misc_RNA (1)...(19): siRNA sense strand
gaaacauggaaauggaaaa

SEQ ID NO: 2305075 - RNA, 19 nt, Homo sapiens
  misc_RNA (1)...(19): siRNA sense strand
ugauacaggaacaggagaa

SEQ ID NO: 2305076 - RNA, 19 nt, Homo sapiens
  misc_RNA (1)...(19): siRNA sense strand
gagugaacccaguggacau

SEQ ID NO: 2305077 - RNA, 19 nt, Homo sapiens
  misc_RNA (1)...(19): siRNA sense strand
cugaugaauauguggaaga

SEQ ID NO: 2305078 - RNA, 19 nt, Homo sapiens
  misc_RNA (1)...(19): siRNA sense strand
agaaacauggaaauggaaa

SEQ ID NO: 2305079 - RNA, 19 nt, Homo sapiens
  misc_RNA (1)...(19): siRNA sense strand
gaacauuacaaaaggucua

SEQ ID NO: 2305080 - RNA, 19 nt, Homo sapiens
  misc_RNA (1)...(19): siRNA sense strand
ggaaugcagaaauggacaa

SEQ ID NO: 2305081 - RNA, 19 nt, Homo sapiens
  misc_RNA (1)...(19): siRNA sense strand
cagcaaugucagcagaauu

SEQ ID NO: 2305082 - RNA, 19 nt, Homo sapiens
  misc_RNA (1)...(19): siRNA sense strand
gcaggaaaacggaaagcaa

SEQ ID NO: 2305083 - RNA, 19 nt, Homo sapiens
  misc_RNA (1)...(19): siRNA sense strand
aaaagaaggcugugaauca

SEQ ID NO: 2305084 - RNA, 19 nt, Homo sapiens
  misc_RNA (1)...(19): siRNA sense strand
gccugaugccugaugaaua

SEQ ID NO: 2305085 - RNA, 19 nt, Homo sapiens
  misc_RNA (1)...(19): siRNA sense strand
cguuuauaguaauguguca

SEQ ID NO: 2305086 - RNA, 19 nt, Homo sapiens
  misc_RNA (1)...(19): siRNA sense strand
ccugacacguacugcuaua

SEQ ID NO: 2305087 - RNA, 19 nt, Homo sapiens
  misc_RNA (1)...(19): siRNA sense strand
guggacauuauuuggauua

SEQ ID NO: 2305088 - RNA, 19 nt, Homo sapiens
  misc_RNA (1)...(19): siRNA sense strand
augucaagaaggagaccaa

SEQ ID NO: 2305089 - RNA, 19 nt, Homo sapiens
  misc_RNA (1)...(19): siRNA sense strand
gguuguaaagagagagauc

SEQ ID NO: 2305090 - RNA, 19 nt, Homo sapiens
  misc_RNA (1)...(19): siRNA sense strand
ccgcauuauuucucuggaa

SEQ ID NO: 2305091 - RNA, 19 nt, Homo sapiens
  misc_RNA (1)...(19): siRNA sense strand
augcagaaauggacaaugu

SEQ ID NO: 2305092 - RNA, 19 nt, Homo sapiens
  misc_RNA (1)...(19): siRNA sense strand
gauacaggaacaggagaaa

SEQ ID NO: 2305093 - RNA, 19 nt, Homo sapiens
  misc_RNA (1)...(19): siRNA sense strand
ugugagagcagaaguaaaa

SEQ ID NO: 2305094 - RNA, 19 nt, Homo sapiens
  misc_RNA (1)...(19): siRNA sense strand
ccuugugugugauggauau

SEQ ID NO: 2305095 - RNA, 19 nt, Homo sapiens
  misc_RNA (1)...(19): siRNA sense strand
agugaagacaucagugaga

SEQ ID NO: 2305096 - RNA, 19 nt, Homo sapiens
  misc_RNA (1)...(19): siRNA sense strand
gcaaaagaaggcugugaau

SEQ ID NO: 2305097 - RNA, 19 nt, Homo sapiens
  misc_RNA (1)...(19): siRNA sense strand
uaaagaacgcugugagucu

SEQ ID NO: 2305098 - RNA, 19 nt, Homo sapiens
  misc_RNA (1)...(19): siRNA sense strand
aggaaaacggaaagcaauu

SEQ ID NO: 2305099 - RNA, 19 nt, Homo sapiens
  misc_RNA (1)...(19): siRNA sense strand
agaggaaaauucagacaau

SEQ ID NO: 2305100 - RNA, 19 nt, Homo sapiens
  misc_RNA (1)...(19): siRNA sense strand
agauuuacauccagaccuu

SEQ ID NO: 2305101 - RNA, 19 nt, Homo sapiens
  misc_RNA (1)...(19): siRNA sense strand
ccauggaguggguguguga

SEQ ID NO: 2305102 - RNA, 19 nt, Homo sapiens
  misc_RNA (1)...(19): siRNA sense strand
augacaauaacaugggcaa

SEQ ID NO: 2305103 - RNA, 19 nt, Homo sapiens
  misc_RNA (1)...(19): siRNA sense strand
gaccaaauugauacaggaa

SEQ ID NO: 2305104 - RNA, 19 nt, Homo sapiens
  misc_RNA (1)...(19): siRNA sense strand
uugugagagcagaaguaaa

SEQ ID NO: 2305105 - RNA, 19 nt, Homo sapiens
  misc_RNA (1)...(19): siRNA sense strand
aguccuacuuugacaugaa

SEQ ID NO: 2305106 - RNA, 19 nt, Homo sapiens
  misc_RNA (1)...(19): siRNA sense strand
cugugguuguaaagagaga

SEQ ID NO: 2305107 - RNA, 19 nt, Homo sapiens
  misc_RNA (1)...(19): siRNA sense strand
gcauuauuucucuggaaca

SEQ ID NO: 2305108 - RNA, 19 nt, Homo sapiens
  misc_RNA (1)...(19): siRNA sense strand
uacaggaacaggagaaaga

SEQ ID NO: 2305109 - RNA, 19 nt, Homo sapiens
  misc_RNA (1)...(19): siRNA sense strand
gaaugcugcaguuuggaaa

SEQ ID NO: 2305110 - RNA, 19 nt, Homo sapiens
  misc_RNA (1)...(19): siRNA sense strand
cgggaaacugcaauguaau

SEQ ID NO: 2305111 - RNA, 19 nt, Homo sapiens
  misc_RNA (1)...(19): siRNA sense strand
cauucagacuucaugucaa

SEQ ID NO: 2305112 - RNA, 19 nt, Homo sapiens
  misc_RNA (1)...(19): siRNA sense strand
gugcaaaccaugcgugugu

SEQ ID NO: 2305113 - RNA, 19 nt, Homo sapiens
  misc_RNA (1)...(19): siRNA sense strand
gugacgaggcucauugcaa

SEQ ID NO: 2305114 - RNA, 19 nt, Homo sapiens
  misc_RNA (1)...(19): siRNA sense strand
ugggaauguccauccaaua

SEQ ID NO: 2305115 - RNA, 19 nt, Homo sapiens
  misc_RNA (1)...(19): siRNA sense strand
gagaaccaucugugaccaa

SEQ ID NO: 2305116 - RNA, 19 nt, Homo sapiens
  misc_RNA (1)...(19): siRNA sense strand
gucgagcagugguggacua

SEQ ID NO: 2305117 - RNA, 19 nt, Homo sapiens
  misc_RNA (1)...(19): siRNA sense strand
agucaaugugaaccaauua

SEQ ID NO: 2305118 - RNA, 19 nt, Homo sapiens
  misc_RNA (1)...(19): siRNA sense strand
ugaauacaggcgagcauau

SEQ ID NO: 2305119 - RNA, 19 nt, Homo sapiens
  misc_RNA (1)...(19): siRNA sense strand
ucuugagagcugaugacaa

SEQ ID NO: 2305120 - RNA, 19 nt, Homo sapiens
  misc_RNA (1)...(19): siRNA sense strand
gaugaaugggacuguguga

SEQ ID NO: 2305121 - RNA, 19 nt, Homo sapiens
  misc_RNA (1)...(19): siRNA sense strand
gggagugaaccuuugguca

SEQ ID NO: 2305122 - RNA, 19 nt, Homo sapiens
  misc_RNA (1)...(19): siRNA sense strand
ccuacaacaguacaaguua

SEQ ID NO: 2305123 - RNA, 19 nt, Homo sapiens
  misc_RNA (1)...(19): siRNA sense strand
ugugaauacaggcgagcau

SEQ ID NO: 2305124 - RNA, 19 nt, Homo sapiens
  misc_RNA (1)...(19): siRNA sense strand
acugaaagcagcaauguca

SEQ ID NO: 2305125 - RNA, 19 nt, Homo sapiens
  misc_RNA (1)...(19): siRNA sense strand
aggaaaauucagacaauca

SEQ ID NO: 2305126 - RNA, 19 nt, Homo sapiens
  misc_RNA (1)...(19): siRNA sense strand
agacagauuuacauccaga

SEQ ID NO: 2305127 - RNA, 19 nt, Homo sapiens
  misc_RNA (1)...(19): siRNA sense strand
ggaugauaugugcuggcua

SEQ ID NO: 2305128 - RNA, 19 nt, Homo sapiens
  misc_RNA (1)...(19): siRNA sense strand
ucgaauggauuaaaagaca

SEQ ID NO: 2305129 - RNA, 19 nt, Homo sapiens
  misc_RNA (1)...(19): siRNA sense strand
gggaagaccauguuggcaa

SEQ ID NO: 2305130 - RNA, 19 nt, Homo sapiens
  misc_RNA (1)...(19): siRNA sense strand
uggcaaaggcgguggcaca

SEQ ID NO: 2305131 - RNA, 19 nt, Homo sapiens
  misc_RNA (1)...(19): siRNA sense strand
agguugacuuggaagacua

SEQ ID NO: 2305132 - RNA, 19 nt, Homo sapiens
  misc_RNA (1)...(19): siRNA sense strand
aggacgagcaggagcauga

SEQ ID NO: 2305133 - RNA, 19 nt, Homo sapiens
  misc_RNA (1)...(19): siRNA sense strand
agguaaucauggccacaaa

SEQ ID NO: 2305134 - RNA, 19 nt, Homo sapiens
  misc_RNA (1)...(19): siRNA sense strand
gcuacauuguccuggccaa

SEQ ID NO: 2305135 - RNA, 19 nt, Homo sapiens
  misc_RNA (1)...(19): siRNA sense strand
ucaagaaggacgagcagga

SEQ ID NO: 2305136 - RNA, 19 nt, Homo sapiens
  misc_RNA (1)...(19): siRNA sense strand
augucaaugucaagguaau

SEQ ID NO: 2305137 - RNA, 19 nt, Homo sapiens
  misc_RNA (1)...(19): siRNA sense strand
ccaagagauucgaugcuca

SEQ ID NO: 2305138 - RNA, 19 nt, Homo sapiens
  misc_RNA (1)...(19): siRNA sense strand
ccucagaccagaagccaga

SEQ ID NO: 2305139 - RNA, 19 nt, Homo sapiens
  misc_RNA (1)...(19): siRNA sense strand
agauaagauuucaggagcu

SEQ ID NO: 2305140 - RNA, 19 nt, Homo sapiens
  misc_RNA (1)...(19): siRNA sense strand
uggccaaggacuucgagaa

SEQ ID NO: 2305141 - RNA, 19 nt, Homo sapiens
  misc_RNA (1)...(19): siRNA sense strand
ccaacuauuaugugcgcau

SEQ ID NO: 2305142 - RNA, 19 nt, Homo sapiens
  misc_RNA (1)...(19): siRNA sense strand
cugaggaccuggaggaccu

SEQ ID NO: 2305143 - RNA, 19 nt, Homo sapiens
  misc_RNA (1)...(19): siRNA sense strand
gacaauuucuggaggcugu

SEQ ID NO: 2305144 - RNA, 19 nt, Homo sapiens
  misc_RNA (1)...(19): siRNA sense strand
gggaagaccauguuggcaa

SEQ ID NO: 2305145 - RNA, 19 nt, Homo sapiens
  misc_RNA (1)...(19): siRNA sense strand
uggcaaaggcgguggcaca

SEQ ID NO: 2305146 - RNA, 19 nt, Homo sapiens
  misc_RNA (1)...(19): siRNA sense strand
agguugacuuggaagacua

SEQ ID NO: 2305147 - RNA, 19 nt, Homo sapiens
  misc_RNA (1)...(19): siRNA sense strand
aggacgagcaggagcauga

SEQ ID NO: 2305148 - RNA, 19 nt, Homo sapiens
  misc_RNA (1)...(19): siRNA sense strand
agguaaucauggccacaaa

SEQ ID NO: 2305149 - RNA, 19 nt, Homo sapiens
  misc_RNA (1)...(19): siRNA sense strand
gcuacauuguccuggccaa

SEQ ID NO: 2305150 - RNA, 19 nt, Homo sapiens
  misc_RNA (1)...(19): siRNA sense strand
ucaagaaggacgagcagga

SEQ ID NO: 2305151 - RNA, 19 nt, Homo sapiens
  misc_RNA (1)...(19): siRNA sense strand
augucaaugucaagguaau

SEQ ID NO: 2305152 - RNA, 19 nt, Homo sapiens
  misc_RNA (1)...(19): siRNA sense strand
ccaagagauucgaugcuca

SEQ ID NO: 2305153 - RNA, 19 nt, Homo sapiens
  misc_RNA (1)...(19): siRNA sense strand
ccucagaccagaagccaga

SEQ ID NO: 2305154 - RNA, 19 nt, Homo sapiens
  misc_RNA (1)...(19): siRNA sense strand
agauaagauuucaggagcu

SEQ ID NO: 2305155 - RNA, 19 nt, Homo sapiens
  misc_RNA (1)...(19): siRNA sense strand
uggccaaggacuucgagaa

SEQ ID NO: 2305156 - RNA, 19 nt, Homo sapiens
  misc_RNA (1)...(19): siRNA sense strand
ccaacuauuaugugcgcau

SEQ ID NO: 2305157 - RNA, 19 nt, Homo sapiens
  misc_RNA (1)...(19): siRNA sense strand
cugaggaccuggaggaccu

SEQ ID NO: 2305158 - RNA, 19 nt, Homo sapiens
  misc_RNA (1)...(19): siRNA sense strand
gacaauuucuggaggcugu

SEQ ID NO: 2305159 - RNA, 19 nt, Homo sapiens
  misc_RNA (1)...(19): siRNA sense strand
aagaaaggaaagaggaaaa

SEQ ID NO: 2305160 - RNA, 19 nt, Homo sapiens
  misc_RNA (1)...(19): siRNA sense strand
aggagagagagcaggauaa

SEQ ID NO: 2305161 - RNA, 19 nt, Homo sapiens
  misc_RNA (1)...(19): siRNA sense strand
aguuacucauggagaaaua

SEQ ID NO: 2305162 - RNA, 19 nt, Homo sapiens
  misc_RNA (1)...(19): siRNA sense strand
cggaggugcaggagagaga

SEQ ID NO: 2305163 - RNA, 19 nt, Homo sapiens
  misc_RNA (1)...(19): siRNA sense strand
gaguaaaagccgagggacu

SEQ ID NO: 2305164 - RNA, 19 nt, Homo sapiens
  misc_RNA (1)...(19): siRNA sense strand
gagaauggucugggagcaa

SEQ ID NO: 2305165 - RNA, 19 nt, Homo sapiens
  misc_RNA (1)...(19): siRNA sense strand
ggaucaugaaggagaacau

SEQ ID NO: 2305166 - RNA, 19 nt, Homo sapiens
  misc_RNA (1)...(19): siRNA sense strand
gguucaggaagcagaggaa

SEQ ID NO: 2305167 - RNA, 19 nt, Homo sapiens
  misc_RNA (1)...(19): siRNA sense strand
caucaguauacgagacuuu

SEQ ID NO: 2305168 - RNA, 19 nt, Homo sapiens
  misc_RNA (1)...(19): siRNA sense strand
augaagaaggccaggguca

SEQ ID NO: 2305169 - RNA, 19 nt, Homo sapiens
  misc_RNA (1)...(19): siRNA sense strand
agaagaugcccaacggaau

SEQ ID NO: 2305170 - RNA, 19 nt, Homo sapiens
  misc_RNA (1)...(19): siRNA sense strand
caaacuugaaagaaaggaa

SEQ ID NO: 2305171 - RNA, 19 nt, Homo sapiens
  misc_RNA (1)...(19): siRNA sense strand
aaagaaaggaaagaggaaa

SEQ ID NO: 2305172 - RNA, 19 nt, Homo sapiens
  misc_RNA (1)...(19): siRNA sense strand
gcgacaagaagaugcccaa

SEQ ID NO: 2305173 - RNA, 19 nt, Homo sapiens
  misc_RNA (1)...(19): siRNA sense strand
ggaaagaggaaaagugcca

SEQ ID NO: 2305174 - RNA, 19 nt, Homo sapiens
  misc_RNA (1)...(19): siRNA sense strand
gagccaacuggauggaauu

SEQ ID NO: 2305175 - RNA, 19 nt, Homo sapiens
  misc_RNA (1)...(19): siRNA sense strand
caguaugaauucugcuaca

SEQ ID NO: 2305176 - RNA, 19 nt, Homo sapiens
  misc_RNA (1)...(19): siRNA sense strand
aguucaggaaauugacaaa

SEQ ID NO: 2305177 - RNA, 19 nt, Homo sapiens
  misc_RNA (1)...(19): siRNA sense strand
gcugcuggaccuauggaaa

SEQ ID NO: 2305178 - RNA, 19 nt, Homo sapiens
  misc_RNA (1)...(19): siRNA sense strand
gcaaacaugaagaaggcca

SEQ ID NO: 2305179 - RNA, 19 nt, Homo sapiens
  misc_RNA (1)...(19): siRNA sense strand
aagaagaugcccaacggaa

SEQ ID NO: 2305180 - RNA, 19 nt, Homo sapiens
  misc_RNA (1)...(19): siRNA sense strand
agaucgggcuggaggagga

SEQ ID NO: 2305181 - RNA, 19 nt, Homo sapiens
  misc_RNA (1)...(19): siRNA sense strand
uggaggaugaucugggaau

SEQ ID NO: 2305182 - RNA, 19 nt, Homo sapiens
  misc_RNA (1)...(19): siRNA sense strand
ggagaauggucugggagca

SEQ ID NO: 2305183 - RNA, 19 nt, Homo sapiens
  misc_RNA (1)...(19): siRNA sense strand
caagagcagcaaaggguga

SEQ ID NO: 2305184 - RNA, 19 nt, Homo sapiens
  misc_RNA (1)...(19): siRNA sense strand
uggaggaggaguucaggaa

SEQ ID NO: 2305185 - RNA, 19 nt, Homo sapiens
  misc_RNA (1)...(19): siRNA sense strand
uuucagaagccaucaguau

SEQ ID NO: 2305186 - RNA, 19 nt, Homo sapiens
  misc_RNA (1)...(19): siRNA sense strand
ugugaagaguuuacgacuu

SEQ ID NO: 2305187 - RNA, 19 nt, Homo sapiens
  misc_RNA (1)...(19): siRNA sense strand
gcaccagcgacaagaagau

SEQ ID NO: 2305188 - RNA, 19 nt, Homo sapiens
  misc_RNA (1)...(19): siRNA sense strand
gaguuuacgacuucagaga

SEQ ID NO: 2305189 - RNA, 19 nt, Homo sapiens
  misc_RNA (1)...(19): siRNA sense strand
ccaucgucauguuaacaaa

SEQ ID NO: 2305190 - RNA, 19 nt, Homo sapiens
  misc_RNA (1)...(19): siRNA sense strand
acggaaucuuggaggagca

SEQ ID NO: 2305191 - RNA, 19 nt, Homo sapiens
  misc_RNA (1)...(19): siRNA sense strand
agguggauguguuugaauu

SEQ ID NO: 2305192 - RNA, 19 nt, Homo sapiens
  misc_RNA (1)...(19): siRNA sense strand
gguggauguguuugaauuu

SEQ ID NO: 2305193 - RNA, 19 nt, Homo sapiens
  misc_RNA (1)...(19): siRNA sense strand
cauccuucauagacggcua

SEQ ID NO: 2305194 - RNA, 19 nt, Homo sapiens
  misc_RNA (1)...(19): siRNA sense strand
gauaaagaaugauacccuu

SEQ ID NO: 2305195 - RNA, 19 nt, Homo sapiens
  misc_RNA (1)...(19): siRNA sense strand
guugaggacuucuggagga

SEQ ID NO: 2305196 - RNA, 19 nt, Homo sapiens
  misc_RNA (1)...(19): siRNA sense strand
cucaguuacucauggagaa

SEQ ID NO: 2305197 - RNA, 19 nt, Homo sapiens
  misc_RNA (1)...(19): siRNA sense strand
acuggcaaauaaagaagaa

SEQ ID NO: 2305198 - RNA, 19 nt, Homo sapiens
  misc_RNA (1)...(19): siRNA sense strand
cagaugguucaaacggaua

SEQ ID NO: 2305199 - RNA, 19 nt, Homo sapiens
  misc_RNA (1)...(19): siRNA sense strand
augguuacaaagagaagaa

SEQ ID NO: 2305200 - RNA, 19 nt, Homo sapiens
  misc_RNA (1)...(19): siRNA sense strand
ugaaagaaaggaaagagga

SEQ ID NO: 2305201 - RNA, 19 nt, Homo sapiens
  misc_RNA (1)...(19): siRNA sense strand
gcuaccgacagaaggacua

SEQ ID NO: 2305202 - RNA, 19 nt, Homo sapiens
  misc_RNA (1)...(19): siRNA sense strand
aggauaaaugcuaccagua

SEQ ID NO: 2305203 - RNA, 19 nt, Homo sapiens
  misc_RNA (1)...(19): siRNA sense strand
caugaaaaggggucaagaa

SEQ ID NO: 2305204 - RNA, 19 nt, Homo sapiens
  misc_RNA (1)...(19): siRNA sense strand
ucaagaaaguaaagacgcu

SEQ ID NO: 2305205 - RNA, 19 nt, Homo sapiens
  misc_RNA (1)...(19): siRNA sense strand
cccaaacaggaaacgguua

SEQ ID NO: 2305206 - RNA, 19 nt, Homo sapiens
  misc_RNA (1)...(19): siRNA sense strand
agaacaugaggacgggcaa

SEQ ID NO: 2305207 - RNA, 19 nt, Homo sapiens
  misc_RNA (1)...(19): siRNA sense strand
aagaauacacagacuacau

SEQ ID NO: 2305208 - RNA, 19 nt, Homo sapiens
  misc_RNA (1)...(19): siRNA sense strand
gcucaguuacucauggaga

SEQ ID NO: 2305209 - RNA, 19 nt, Homo sapiens
  misc_RNA (1)...(19): siRNA sense strand
agaaaguaaagacgcucaa

SEQ ID NO: 2305210 - RNA, 19 nt, Homo sapiens
  misc_RNA (1)...(19): siRNA sense strand
ccgaguagugcgccaguuu

SEQ ID NO: 2305211 - RNA, 19 nt, Homo sapiens
  misc_RNA (1)...(19): siRNA sense strand
aagaaaggaaagaggaaaa

SEQ ID NO: 2305212 - RNA, 19 nt, Homo sapiens
  misc_RNA (1)...(19): siRNA sense strand
aggagagagagcaggauaa

SEQ ID NO: 2305213 - RNA, 19 nt, Homo sapiens
  misc_RNA (1)...(19): siRNA sense strand
aguuacucauggagaaaua

SEQ ID NO: 2305214 - RNA, 19 nt, Homo sapiens
  misc_RNA (1)...(19): siRNA sense strand
cggaggugcaggagagaga

SEQ ID NO: 2305215 - RNA, 19 nt, Homo sapiens
  misc_RNA (1)...(19): siRNA sense strand
gaguaaaagccgagggacu

SEQ ID NO: 2305216 - RNA, 19 nt, Homo sapiens
  misc_RNA (1)...(19): siRNA sense strand
gagaauggucugggagcaa

SEQ ID NO: 2305217 - RNA, 19 nt, Homo sapiens
  misc_RNA (1)...(19): siRNA sense strand
ggaucaugaaggagaacau

SEQ ID NO: 2305218 - RNA, 19 nt, Homo sapiens
  misc_RNA (1)...(19): siRNA sense strand
gguucaggaagcagaggaa

SEQ ID NO: 2305219 - RNA, 19 nt, Homo sapiens
  misc_RNA (1)...(19): siRNA sense strand
caucaguauacgagacuuu

SEQ ID NO: 2305220 - RNA, 19 nt, Homo sapiens
  misc_RNA (1)...(19): siRNA sense strand
augaagaaggccaggguca

SEQ ID NO: 2305221 - RNA, 19 nt, Homo sapiens
  misc_RNA (1)...(19): siRNA sense strand
agaagaugcccaacggaau

SEQ ID NO: 2305222 - RNA, 19 nt, Homo sapiens
  misc_RNA (1)...(19): siRNA sense strand
caaacuugaaagaaaggaa

SEQ ID NO: 2305223 - RNA, 19 nt, Homo sapiens
  misc_RNA (1)...(19): siRNA sense strand
aaagaaaggaaagaggaaa

SEQ ID NO: 2305224 - RNA, 19 nt, Homo sapiens
  misc_RNA (1)...(19): siRNA sense strand
gcgacaagaagaugcccaa

SEQ ID NO: 2305225 - RNA, 19 nt, Homo sapiens
  misc_RNA (1)...(19): siRNA sense strand
ggaaagaggaaaagugcca

SEQ ID NO: 2305226 - RNA, 19 nt, Homo sapiens
  misc_RNA (1)...(19): siRNA sense strand
gagccaacuggauggaauu

SEQ ID NO: 2305227 - RNA, 19 nt, Homo sapiens
  misc_RNA (1)...(19): siRNA sense strand
caguaugaauucugcuaca

SEQ ID NO: 2305228 - RNA, 19 nt, Homo sapiens
  misc_RNA (1)...(19): siRNA sense strand
aguucaggaaauugacaaa

SEQ ID NO: 2305229 - RNA, 19 nt, Homo sapiens
  misc_RNA (1)...(19): siRNA sense strand
gcugcuggaccuauggaaa

SEQ ID NO: 2305230 - RNA, 19 nt, Homo sapiens
  misc_RNA (1)...(19): siRNA sense strand
gcaaacaugaagaaggcca

SEQ ID NO: 2305231 - RNA, 19 nt, Homo sapiens
  misc_RNA (1)...(19): siRNA sense strand
aagaagaugcccaacggaa

SEQ ID NO: 2305232 - RNA, 19 nt, Homo sapiens
  misc_RNA (1)...(19): siRNA sense strand
agaucgggcuggaggagga

SEQ ID NO: 2305233 - RNA, 19 nt, Homo sapiens
  misc_RNA (1)...(19): siRNA sense strand
uggaggaugaucugggaau

SEQ ID NO: 2305234 - RNA, 19 nt, Homo sapiens
  misc_RNA (1)...(19): siRNA sense strand
ggagaauggucugggagca

SEQ ID NO: 2305235 - RNA, 19 nt, Homo sapiens
  misc_RNA (1)...(19): siRNA sense strand
caagagcagcaaaggguga

SEQ ID NO: 2305236 - RNA, 19 nt, Homo sapiens
  misc_RNA (1)...(19): siRNA sense strand
uggaggaggaguucaggaa

SEQ ID NO: 2305237 - RNA, 19 nt, Homo sapiens
  misc_RNA (1)...(19): siRNA sense strand
uuucagaagccaucaguau

SEQ ID NO: 2305238 - RNA, 19 nt, Homo sapiens
  misc_RNA (1)...(19): siRNA sense strand
ugugaagaguuuacgacuu

SEQ ID NO: 2305239 - RNA, 19 nt, Homo sapiens
  misc_RNA (1)...(19): siRNA sense strand
gcaccagcgacaagaagau

SEQ ID NO: 2305240 - RNA, 19 nt, Homo sapiens
  misc_RNA (1)...(19): siRNA sense strand
gaguuuacgacuucagaga

SEQ ID NO: 2305241 - RNA, 19 nt, Homo sapiens
  misc_RNA (1)...(19): siRNA sense strand
ccaucgucauguuaacaaa

SEQ ID NO: 2305242 - RNA, 19 nt, Homo sapiens
  misc_RNA (1)...(19): siRNA sense strand
acggaaucuuggaggagca

SEQ ID NO: 2305243 - RNA, 19 nt, Homo sapiens
  misc_RNA (1)...(19): siRNA sense strand
agguggauguguuugaauu

SEQ ID NO: 2305244 - RNA, 19 nt, Homo sapiens
  misc_RNA (1)...(19): siRNA sense strand
gguggauguguuugaauuu

SEQ ID NO: 2305245 - RNA, 19 nt, Homo sapiens
  misc_RNA (1)...(19): siRNA sense strand
cauccuucauagacggcua

SEQ ID NO: 2305246 - RNA, 19 nt, Homo sapiens
  misc_RNA (1)...(19): siRNA sense strand
gauaaagaaugauacccuu

SEQ ID NO: 2305247 - RNA, 19 nt, Homo sapiens
  misc_RNA (1)...(19): siRNA sense strand
guugaggacuucuggagga

SEQ ID NO: 2305248 - RNA, 19 nt, Homo sapiens
  misc_RNA (1)...(19): siRNA sense strand
cucaguuacucauggagaa

SEQ ID NO: 2305249 - RNA, 19 nt, Homo sapiens
  misc_RNA (1)...(19): siRNA sense strand
acuggcaaauaaagaagaa

SEQ ID NO: 2305250 - RNA, 19 nt, Homo sapiens
  misc_RNA (1)...(19): siRNA sense strand
cagaugguucaaacggaua

SEQ ID NO: 2305251 - RNA, 19 nt, Homo sapiens
  misc_RNA (1)...(19): siRNA sense strand
augguuacaaagagaagaa

SEQ ID NO: 2305252 - RNA, 19 nt, Homo sapiens
  misc_RNA (1)...(19): siRNA sense strand
ugaaagaaaggaaagagga

SEQ ID NO: 2305253 - RNA, 19 nt, Homo sapiens
  misc_RNA (1)...(19): siRNA sense strand
gcuaccgacagaaggacua

SEQ ID NO: 2305254 - RNA, 19 nt, Homo sapiens
  misc_RNA (1)...(19): siRNA sense strand
aggauaaaugcuaccagua

SEQ ID NO: 2305255 - RNA, 19 nt, Homo sapiens
  misc_RNA (1)...(19): siRNA sense strand
caugaaaaggggucaagaa

SEQ ID NO: 2305256 - RNA, 19 nt, Homo sapiens
  misc_RNA (1)...(19): siRNA sense strand
ucaagaaaguaaagacgcu

SEQ ID NO: 2305257 - RNA, 19 nt, Homo sapiens
  misc_RNA (1)...(19): siRNA sense strand
cccaaacaggaaacgguua

SEQ ID NO: 2305258 - RNA, 19 nt, Homo sapiens
  misc_RNA (1)...(19): siRNA sense strand
agaacaugaggacgggcaa

SEQ ID NO: 2305259 - RNA, 19 nt, Homo sapiens
  misc_RNA (1)...(19): siRNA sense strand
aagaauacacagacuacau

SEQ ID NO: 2305260 - RNA, 19 nt, Homo sapiens
  misc_RNA (1)...(19): siRNA sense strand
gcucaguuacucauggaga

SEQ ID NO: 2305261 - RNA, 19 nt, Homo sapiens
  misc_RNA (1)...(19): siRNA sense strand
agaaaguaaagacgcucaa

SEQ ID NO: 2305262 - RNA, 19 nt, Homo sapiens
  misc_RNA (1)...(19): siRNA sense strand
ccgaguagugcgccaguuu

SEQ ID NO: 2305263 - RNA, 19 nt, Homo sapiens
  misc_RNA (1)...(19): siRNA sense strand
ccaagaagcuccucgacaa

SEQ ID NO: 2305264 - RNA, 19 nt, Homo sapiens
  misc_RNA (1)...(19): siRNA sense strand
gcauauucaucgaagagaa

SEQ ID NO: 2305265 - RNA, 19 nt, Homo sapiens
  misc_RNA (1)...(19): siRNA sense strand
uggaagaaggccugguaaa

SEQ ID NO: 2305266 - RNA, 19 nt, Homo sapiens
  misc_RNA (1)...(19): siRNA sense strand
agacaagggcacagaaaca

SEQ ID NO: 2305267 - RNA, 19 nt, Homo sapiens
  misc_RNA (1)...(19): siRNA sense strand
acucaugaacaguaagaaa

SEQ ID NO: 2305268 - RNA, 19 nt, Homo sapiens
  misc_RNA (1)...(19): siRNA sense strand
gcaaacucaugaacaguaa

SEQ ID NO: 2305269 - RNA, 19 nt, Homo sapiens
  misc_RNA (1)...(19): siRNA sense strand
cgacaaagaccgugggcuc

SEQ ID NO: 2305270 - RNA, 19 nt, Homo sapiens
  misc_RNA (1)...(19): siRNA sense strand
ucaagaaguucgcauguaa

SEQ ID NO: 2305271 - RNA, 19 nt, Homo sapiens
  misc_RNA (1)...(19): siRNA sense strand
ggacaacucugguggagga

SEQ ID NO: 2305272 - RNA, 19 nt, Homo sapiens
  misc_RNA (1)...(19): siRNA sense strand
gcaagaagccaaagaugga

SEQ ID NO: 2305273 - RNA, 19 nt, Homo sapiens
  misc_RNA (1)...(19): siRNA sense strand
agccaaaacucaaggagaa

SEQ ID NO: 2305274 - RNA, 19 nt, Homo sapiens
  misc_RNA (1)...(19): siRNA sense strand
agucaaagguccagagcug

SEQ ID NO: 2305275 - RNA, 19 nt, Homo sapiens
  misc_RNA (1)...(19): siRNA sense strand
ggaagaaggccugguaaau

SEQ ID NO: 2305276 - RNA, 19 nt, Homo sapiens
  misc_RNA (1)...(19): siRNA sense strand
ccaaggaggagguggagga

SEQ ID NO: 2305277 - RNA, 19 nt, Homo sapiens
  misc_RNA (1)...(19): siRNA sense strand
cagaaggagggcaggguga

SEQ ID NO: 2305278 - RNA, 19 nt, Homo sapiens
  misc_RNA (1)...(19): siRNA sense strand
ccagacaagggcacagaaa

SEQ ID NO: 2305279 - RNA, 19 nt, Homo sapiens
  misc_RNA (1)...(19): siRNA sense strand
caacagaacuaccagcaga

SEQ ID NO: 2305280 - RNA, 19 nt, Homo sapiens
  misc_RNA (1)...(19): siRNA sense strand
ccaaguucguggcggguga

SEQ ID NO: 2305281 - RNA, 19 nt, Homo sapiens
  misc_RNA (1)...(19): siRNA sense strand
cugccagggucaacagcaa

SEQ ID NO: 2305282 - RNA, 19 nt, Homo sapiens
  misc_RNA (1)...(19): siRNA sense strand
ggacaagcucccugagaac

SEQ ID NO: 2305283 - RNA, 19 nt, Homo sapiens
  misc_RNA (1)...(19): siRNA sense strand
ccuaagaagaggagccgga

SEQ ID NO: 2305284 - RNA, 19 nt, Homo sapiens
  misc_RNA (1)...(19): siRNA sense strand
aggaggagguggaggaggu

SEQ ID NO: 2305285 - RNA, 19 nt, Homo sapiens
  misc_RNA (1)...(19): siRNA sense strand
ggaggaggcaagaagccaa

SEQ ID NO: 2305286 - RNA, 19 nt, Homo sapiens
  misc_RNA (1)...(19): siRNA sense strand
uggccaaguaugaugagaa

SEQ ID NO: 2305287 - RNA, 19 nt, Homo sapiens
  misc_RNA (1)...(19): siRNA sense strand
aggacaagcucccugagaa

SEQ ID NO: 2305288 - RNA, 19 nt, Homo sapiens
  misc_RNA (1)...(19): siRNA sense strand
acacaugaagccaggugaa

SEQ ID NO: 2305289 - RNA, 19 nt, Homo sapiens
  misc_RNA (1)...(19): siRNA sense strand
agccaaagauggaggagcu

SEQ ID NO: 2305290 - RNA, 19 nt, Homo sapiens
  misc_RNA (1)...(19): siRNA sense strand
caagaaguucgcauguaaa

SEQ ID NO: 2305291 - RNA, 19 nt, Homo sapiens
  misc_RNA (1)...(19): siRNA sense strand
gggcagaagcucccaacuu

SEQ ID NO: 2305292 - RNA, 19 nt, Homo sapiens
  misc_RNA (1)...(19): siRNA sense strand
gcaggaaacaucacgccua

SEQ ID NO: 2305293 - RNA, 19 nt, Homo sapiens
  misc_RNA (1)...(19): siRNA sense strand
uaagaagaggagccggaaa

SEQ ID NO: 2305294 - RNA, 19 nt, Homo sapiens
  misc_RNA (1)...(19): siRNA sense strand
auggcaaacaacagaacua

SEQ ID NO: 2305295 - RNA, 19 nt, Homo sapiens
  misc_RNA (1)...(19): siRNA sense strand
ucgccaaguaucagcacua

SEQ ID NO: 2305296 - RNA, 19 nt, Homo sapiens
  misc_RNA (1)...(19): siRNA sense strand
aggaggaccuggaagcuga

SEQ ID NO: 2305297 - RNA, 19 nt, Homo sapiens
  misc_RNA (1)...(19): siRNA sense strand
uggaagcugaggaggagua

SEQ ID NO: 2305298 - RNA, 19 nt, Homo sapiens
  misc_RNA (1)...(19): siRNA sense strand
ugaagguggccguggacau

SEQ ID NO: 2305299 - RNA, 19 nt, Homo sapiens
  misc_RNA (1)...(19): siRNA sense strand
uggaagccaucgugcagaa

SEQ ID NO: 2305300 - RNA, 19 nt, Homo sapiens
  misc_RNA (1)...(19): siRNA sense strand
gaggaggcaagaagccaaa

SEQ ID NO: 2305301 - RNA, 19 nt, Homo sapiens
  misc_RNA (1)...(19): siRNA sense strand
ccauaugcacuguugucaa

SEQ ID NO: 2305302 - RNA, 19 nt, Homo sapiens
  misc_RNA (1)...(19): siRNA sense strand
augaugagaacuugaugaa

SEQ ID NO: 2305303 - RNA, 19 nt, Homo sapiens
  misc_RNA (1)...(19): siRNA sense strand
gccugaagcuggaagccau

SEQ ID NO: 2305304 - RNA, 19 nt, Homo sapiens
  misc_RNA (1)...(19): siRNA sense strand
gcugauccguuaugcagaa

SEQ ID NO: 2305305 - RNA, 19 nt, Homo sapiens
  misc_RNA (1)...(19): siRNA sense strand
gcaccaaaacccaggagau

SEQ ID NO: 2305306 - RNA, 19 nt, Homo sapiens
  misc_RNA (1)...(19): siRNA sense strand
aggagaggccugaggguuc

SEQ ID NO: 2305307 - RNA, 19 nt, Homo sapiens
  misc_RNA (1)...(19): siRNA sense strand
gcaccgagucaaaggucca

SEQ ID NO: 2305308 - RNA, 19 nt, Homo sapiens
  misc_RNA (1)...(19): siRNA sense strand
ucgcaaagaaagagccugu

SEQ ID NO: 2305309 - RNA, 19 nt, Homo sapiens
  misc_RNA (1)...(19): siRNA sense strand
cggccaacuucaaggaccu

SEQ ID NO: 2305310 - RNA, 19 nt, Homo sapiens
  misc_RNA (1)...(19): siRNA sense strand
ccuucgugcggguggagaa

SEQ ID NO: 2305311 - RNA, 19 nt, Homo sapiens
  misc_RNA (1)...(19): siRNA sense strand
cggugagaaggccgacaaa

SEQ ID NO: 2305312 - RNA, 19 nt, Homo sapiens
  misc_RNA (1)...(19): siRNA sense strand
cagugggcaccgagucaaa

SEQ ID NO: 2305313 - RNA, 19 nt, Homo sapiens
  misc_RNA (1)...(19): siRNA sense strand
ccgcuaugcuggugaggag

SEQ ID NO: 2305314 - RNA, 19 nt, Homo sapiens
  misc_RNA (1)...(19): siRNA sense strand
uugccuggccagaggaaaa

SEQ ID NO: 2305315 - RNA, 19 nt, Homo sapiens
  misc_RNA (1)...(19): siRNA sense strand
cgaugggcuccaagaccaa

SEQ ID NO: 2305316 - RNA, 19 nt, Homo sapiens
  misc_RNA (1)...(19): siRNA sense strand
ggagaugggaaggaggaga

SEQ ID NO: 2305317 - RNA, 19 nt, Homo sapiens
  misc_RNA (1)...(19): siRNA sense strand
ccaccaagggcaauggcga

SEQ ID NO: 2305318 - RNA, 19 nt, Homo sapiens
  misc_RNA (1)...(19): siRNA sense strand
acuccuugcagcuggacaa

SEQ ID NO: 2305319 - RNA, 19 nt, Homo sapiens
  misc_RNA (1)...(19): siRNA sense strand
ccaugaagguggccgugga

SEQ ID NO: 2305320 - RNA, 19 nt, Homo sapiens
  misc_RNA (1)...(19): siRNA sense strand
gcuaauaacagacuggaga

SEQ ID NO: 2305321 - RNA, 19 nt, Homo sapiens
  misc_RNA (1)...(19): siRNA sense strand
ccaggaagaugcagcccua

SEQ ID NO: 2305322 - RNA, 19 nt, Homo sapiens
  misc_RNA (1)...(19): siRNA sense strand
acauugagauggugggcga

SEQ ID NO: 2305323 - RNA, 19 nt, Homo sapiens
  misc_RNA (1)...(19): siRNA sense strand
gcggcgaagucaaggcuga

SEQ ID NO: 2305324 - RNA, 19 nt, Homo sapiens
  misc_RNA (1)...(19): siRNA sense strand
acuccgugcuucagggcua

SEQ ID NO: 2305325 - RNA, 19 nt, Homo sapiens
  misc_RNA (1)...(19): siRNA sense strand
ggggaagaguccaugggaa

SEQ ID NO: 2305326 - RNA, 19 nt, Homo sapiens
  misc_RNA (1)...(19): siRNA sense strand
gcucaauccgaauggcaau

SEQ ID NO: 2305327 - RNA, 19 nt, Homo sapiens
  misc_RNA (1)...(19): siRNA sense strand
aagucaaggcugaaaauaa

SEQ ID NO: 2305328 - RNA, 19 nt, Homo sapiens
  misc_RNA (1)...(19): siRNA sense strand
aagugaacucccaggaaau

SEQ ID NO: 2305329 - RNA, 19 nt, Homo sapiens
  misc_RNA (1)...(19): siRNA sense strand
caucaacagccaaggggaa

SEQ ID NO: 2305330 - RNA, 19 nt, Homo sapiens
  misc_RNA (1)...(19): siRNA sense strand
guaaagaaggcccugguga

SEQ ID NO: 2305331 - RNA, 19 nt, Homo sapiens
  misc_RNA (1)...(19): siRNA sense strand
gggagagcccaguggugau

SEQ ID NO: 2305332 - RNA, 19 nt, Homo sapiens
  misc_RNA (1)...(19): siRNA sense strand
acaugcagguggagggaag

SEQ ID NO: 2305333 - RNA, 19 nt, Homo sapiens
  misc_RNA (1)...(19): siRNA sense strand
aagaugaacugaagcccuu

SEQ ID NO: 2305334 - RNA, 19 nt, Homo sapiens
  misc_RNA (1)...(19): siRNA sense strand
gcuaugacaucaacagcca

SEQ ID NO: 2305335 - RNA, 19 nt, Homo sapiens
  misc_RNA (1)...(19): siRNA sense strand
caccagagcucaauccgaa

SEQ ID NO: 2305336 - RNA, 19 nt, Homo sapiens
  misc_RNA (1)...(19): siRNA sense strand
auuaagaugggaagugaga

SEQ ID NO: 2305337 - RNA, 19 nt, Homo sapiens
  misc_RNA (1)...(19): siRNA sense strand
agaacgaggcccuggaucu

SEQ ID NO: 2305338 - RNA, 19 nt, Homo sapiens
  misc_RNA (1)...(19): siRNA sense strand
uaagaugggaagugagaac

SEQ ID NO: 2305339 - RNA, 19 nt, Homo sapiens
  misc_RNA (1)...(19): siRNA sense strand
gaacaugaauucaggcaac

SEQ ID NO: 2305340 - RNA, 19 nt, Homo sapiens
  misc_RNA (1)...(19): siRNA sense strand
agaccuggguugaugcaga

SEQ ID NO: 2305341 - RNA, 19 nt, Homo sapiens
  misc_RNA (1)...(19): siRNA sense strand
ggguugaugcagaucucua

SEQ ID NO: 2305342 - RNA, 19 nt, Homo sapiens
  misc_RNA (1)...(19): siRNA sense strand
gggagaagauuguuuggga

SEQ ID NO: 2305343 - RNA, 19 nt, Homo sapiens
  misc_RNA (1)...(19): siRNA sense strand
gagcugaacucuugagccu

SEQ ID NO: 2305344 - RNA, 19 nt, Homo sapiens
  misc_RNA (1)...(19): siRNA sense strand
gagaagauuguuugggagu

SEQ ID NO: 2305345 - RNA, 19 nt, Homo sapiens
  misc_RNA (1)...(19): siRNA sense strand
agauggagagggagaagau

SEQ ID NO: 2305346 - RNA, 19 nt, Homo sapiens
  misc_RNA (1)...(19): siRNA sense strand
gagaugggcgugugcgaga

SEQ ID NO: 2305347 - RNA, 19 nt, Homo sapiens
  misc_RNA (1)...(19): siRNA sense strand
ugagcagggcugaaagaau

SEQ ID NO: 2305348 - RNA, 19 nt, Homo sapiens
  misc_RNA (1)...(19): siRNA sense strand
ugucuauucuugacggaga

SEQ ID NO: 2305349 - RNA, 19 nt, Homo sapiens
  misc_RNA (1)...(19): siRNA sense strand
aagaauuaagagaggcuca

SEQ ID NO: 2305350 - RNA, 19 nt, Homo sapiens
  misc_RNA (1)...(19): siRNA sense strand
acccagauggagagggaga

SEQ ID NO: 2305351 - RNA, 19 nt, Homo sapiens
  misc_RNA (1)...(19): siRNA sense strand
ccaagaauuaagagaggcu

SEQ ID NO: 2305352 - RNA, 19 nt, Homo sapiens
  misc_RNA (1)...(19): siRNA sense strand
gagugggauagauggguuu

SEQ ID NO: 2305353 - RNA, 19 nt, Homo sapiens
  misc_RNA (1)...(19): siRNA sense strand
uaacccagauggagaggga

SEQ ID NO: 2305354 - RNA, 19 nt, Homo sapiens
  misc_RNA (1)...(19): siRNA sense strand
aggagcaaauccagaacca

SEQ ID NO: 2305355 - RNA, 19 nt, Homo sapiens
  misc_RNA (1)...(19): siRNA sense strand
ccuucuacaacgugacaga

SEQ ID NO: 2305356 - RNA, 19 nt, Homo sapiens
  misc_RNA (1)...(19): siRNA sense strand
gggagaagauuguuuggga

SEQ ID NO: 2305357 - RNA, 19 nt, Homo sapiens
  misc_RNA (1)...(19): siRNA sense strand
gagcugaacucuugagccu

SEQ ID NO: 2305358 - RNA, 19 nt, Homo sapiens
  misc_RNA (1)...(19): siRNA sense strand
gagaagauuguuugggagu

SEQ ID NO: 2305359 - RNA, 19 nt, Homo sapiens
  misc_RNA (1)...(19): siRNA sense strand
agauggagagggagaagau

SEQ ID NO: 2305360 - RNA, 19 nt, Homo sapiens
  misc_RNA (1)...(19): siRNA sense strand
gagaugggcgugugcgaga

SEQ ID NO: 2305361 - RNA, 19 nt, Homo sapiens
  misc_RNA (1)...(19): siRNA sense strand
ugagcagggcugaaagaau

SEQ ID NO: 2305362 - RNA, 19 nt, Homo sapiens
  misc_RNA (1)...(19): siRNA sense strand
ugucuauucuugacggaga

SEQ ID NO: 2305363 - RNA, 19 nt, Homo sapiens
  misc_RNA (1)...(19): siRNA sense strand
aagaauuaagagaggcuca

SEQ ID NO: 2305364 - RNA, 19 nt, Homo sapiens
  misc_RNA (1)...(19): siRNA sense strand
acccagauggagagggaga

SEQ ID NO: 2305365 - RNA, 19 nt, Homo sapiens
  misc_RNA (1)...(19): siRNA sense strand
ccaagaauuaagagaggcu

SEQ ID NO: 2305366 - RNA, 19 nt, Homo sapiens
  misc_RNA (1)...(19): siRNA sense strand
uaacccagauggagaggga

SEQ ID NO: 2305367 - RNA, 19 nt, Homo sapiens
  misc_RNA (1)...(19): siRNA sense strand
aggagcaaauccagaacca

SEQ ID NO: 2305368 - RNA, 19 nt, Homo sapiens
  misc_RNA (1)...(19): siRNA sense strand
gaugaaaaggagaggaaaa

SEQ ID NO: 2305369 - RNA, 19 nt, Homo sapiens
  misc_RNA (1)...(19): siRNA sense strand
gagaugaaaaggagaggaa

SEQ ID NO: 2305370 - RNA, 19 nt, Homo sapiens
  misc_RNA (1)...(19): siRNA sense strand
gcuaggagucaaagaaaau

SEQ ID NO: 2305371 - RNA, 19 nt, Homo sapiens
  misc_RNA (1)...(19): siRNA sense strand
gaugagaaguccaaggauc

SEQ ID NO: 2305372 - RNA, 19 nt, Homo sapiens
  misc_RNA (1)...(19): siRNA sense strand
gagcuugcuaggagucaaa

SEQ ID NO: 2305373 - RNA, 19 nt, Homo sapiens
  misc_RNA (1)...(19): siRNA sense strand
caaagugcacauugggaga

SEQ ID NO: 2305374 - RNA, 19 nt, Homo sapiens
  misc_RNA (1)...(19): siRNA sense strand
aggaaaaggcggagcccau

SEQ ID NO: 2305375 - RNA, 19 nt, Homo sapiens
  misc_RNA (1)...(19): siRNA sense strand
gagaaggcgcugaagcaca

SEQ ID NO: 2305376 - RNA, 19 nt, Homo sapiens
  misc_RNA (1)...(19): siRNA sense strand
gaggacaaauugauggcca

SEQ ID NO: 2305377 - RNA, 19 nt, Homo sapiens
  misc_RNA (1)...(19): siRNA sense strand
ggaucacaucauggagaua

SEQ ID NO: 2305378 - RNA, 19 nt, Homo sapiens
  misc_RNA (1)...(19): siRNA sense strand
acguagaguuugagaaucc

SEQ ID NO: 2305379 - RNA, 19 nt, Homo sapiens
  misc_RNA (1)...(19): siRNA sense strand
ggacaaaacccgaaagagg

SEQ ID NO: 2305380 - RNA, 19 nt, Homo sapiens
  misc_RNA (1)...(19): siRNA sense strand
uugcuaggagucaaagaaa

SEQ ID NO: 2305381 - RNA, 19 nt, Homo sapiens
  misc_RNA (1)...(19): siRNA sense strand
gaugaaaaggagaggaaaa

SEQ ID NO: 2305382 - RNA, 19 nt, Homo sapiens
  misc_RNA (1)...(19): siRNA sense strand
gagaugaaaaggagaggaa

SEQ ID NO: 2305383 - RNA, 19 nt, Homo sapiens
  misc_RNA (1)...(19): siRNA sense strand
gcuaggagucaaagaaaau

SEQ ID NO: 2305384 - RNA, 19 nt, Homo sapiens
  misc_RNA (1)...(19): siRNA sense strand
gaugagaaguccaaggauc

SEQ ID NO: 2305385 - RNA, 19 nt, Homo sapiens
  misc_RNA (1)...(19): siRNA sense strand
gagcuugcuaggagucaaa

SEQ ID NO: 2305386 - RNA, 19 nt, Homo sapiens
  misc_RNA (1)...(19): siRNA sense strand
caaagugcacauugggaga

SEQ ID NO: 2305387 - RNA, 19 nt, Homo sapiens
  misc_RNA (1)...(19): siRNA sense strand
aggaaaaggcggagcccau

SEQ ID NO: 2305388 - RNA, 19 nt, Homo sapiens
  misc_RNA (1)...(19): siRNA sense strand
gagaaggcgcugaagcaca

SEQ ID NO: 2305389 - RNA, 19 nt, Homo sapiens
  misc_RNA (1)...(19): siRNA sense strand
gaggacaaauugauggcca

SEQ ID NO: 2305390 - RNA, 19 nt, Homo sapiens
  misc_RNA (1)...(19): siRNA sense strand
ggaucacaucauggagaua

SEQ ID NO: 2305391 - RNA, 19 nt, Homo sapiens
  misc_RNA (1)...(19): siRNA sense strand
acguagaguuugagaaucc

SEQ ID NO: 2305392 - RNA, 19 nt, Homo sapiens
  misc_RNA (1)...(19): siRNA sense strand
ggacaaaacccgaaagagg

SEQ ID NO: 2305393 - RNA, 19 nt, Homo sapiens
  misc_RNA (1)...(19): siRNA sense strand
uugcuaggagucaaagaaa

SEQ ID NO: 2305394 - RNA, 19 nt, Homo sapiens
  misc_RNA (1)...(19): siRNA sense strand
aggaagaagauguggagau

SEQ ID NO: 2305395 - RNA, 19 nt, Homo sapiens
  misc_RNA (1)...(19): siRNA sense strand
guacagaagugcaggugga

SEQ ID NO: 2305396 - RNA, 19 nt, Homo sapiens
  misc_RNA (1)...(19): siRNA sense strand
gagaaagacacgaagcaga

SEQ ID NO: 2305397 - RNA, 19 nt, Homo sapiens
  misc_RNA (1)...(19): siRNA sense strand
gcaucaaggaggagacgga

SEQ ID NO: 2305398 - RNA, 19 nt, Homo sapiens
  misc_RNA (1)...(19): siRNA sense strand
ucgacaaggcgacgggcaa

SEQ ID NO: 2305399 - RNA, 19 nt, Homo sapiens
  misc_RNA (1)...(19): siRNA sense strand
cgcaaggcaugguggguca

SEQ ID NO: 2305400 - RNA, 19 nt, Homo sapiens
  misc_RNA (1)...(19): siRNA sense strand
aggaggagacggagaucau

SEQ ID NO: 2305401 - RNA, 19 nt, Homo sapiens
  misc_RNA (1)...(19): siRNA sense strand
gcaaggagguggugcacac

SEQ ID NO: 2305402 - RNA, 19 nt, Homo sapiens
  misc_RNA (1)...(19): siRNA sense strand
agggcaaggcggagaucau

SEQ ID NO: 2305403 - RNA, 19 nt, Homo sapiens
  misc_RNA (1)...(19): siRNA sense strand
ugauugagucccugaccaa

SEQ ID NO: 2305404 - RNA, 19 nt, Homo sapiens
  misc_RNA (1)...(19): siRNA sense strand
ucaacgaacucaaaggcga

SEQ ID NO: 2305405 - RNA, 19 nt, Homo sapiens
  misc_RNA (1)...(19): siRNA sense strand
ccgugauguaacaaggauu

SEQ ID NO: 2305406 - RNA, 19 nt, Homo sapiens
  misc_RNA (1)...(19): siRNA sense strand
cagaaguccgugagcagau

SEQ ID NO: 2305407 - RNA, 19 nt, Homo sapiens
  misc_RNA (1)...(19): siRNA sense strand
uguaacaaggauugagcga

SEQ ID NO: 2305408 - RNA, 19 nt, Homo sapiens
  misc_RNA (1)...(19): siRNA sense strand
acgcaguacaugaaggagu

SEQ ID NO: 2305409 - RNA, 19 nt, Homo sapiens
  misc_RNA (1)...(19): siRNA sense strand
agaugauccgggaagggaa

SEQ ID NO: 2305410 - RNA, 19 nt, Homo sapiens
  misc_RNA (1)...(19): siRNA sense strand
cagcuuggugugccggaaa

SEQ ID NO: 2305411 - RNA, 19 nt, Homo sapiens
  misc_RNA (1)...(19): siRNA sense strand
ccagauugaucgaccagca

SEQ ID NO: 2305412 - RNA, 19 nt, Homo sapiens
  misc_RNA (1)...(19): siRNA sense strand
aagauguggagaugaguga

SEQ ID NO: 2305413 - RNA, 19 nt, Homo sapiens
  misc_RNA (1)...(19): siRNA sense strand
acuagaaagcagagggaaa

SEQ ID NO: 2305414 - RNA, 19 nt, Homo sapiens
  misc_RNA (1)...(19): siRNA sense strand
cugcaaacuuaaauggcaa

SEQ ID NO: 2305415 - RNA, 19 nt, Homo sapiens
  misc_RNA (1)...(19): siRNA sense strand
ggaucgaggagguguucaa

SEQ ID NO: 2305416 - RNA, 19 nt, Homo sapiens
  misc_RNA (1)...(19): siRNA sense strand
augccaaagaggagaucaa

SEQ ID NO: 2305417 - RNA, 19 nt, Homo sapiens
  misc_RNA (1)...(19): siRNA sense strand
aguuagagaauuagagagu

SEQ ID NO: 2305418 - RNA, 19 nt, Homo sapiens
  misc_RNA (1)...(19): siRNA sense strand
agauaaagacaaugaucga

SEQ ID NO: 2305419 - RNA, 19 nt, Homo sapiens
  misc_RNA (1)...(19): siRNA sense strand
guccaaaaccucaaggaaa

SEQ ID NO: 2305420 - RNA, 19 nt, Homo sapiens
  misc_RNA (1)...(19): siRNA sense strand
caacggagacccaggcaga

SEQ ID NO: 2305421 - RNA, 19 nt, Homo sapiens
  misc_RNA (1)...(19): siRNA sense strand
cugaccaagaguaaggaaa

SEQ ID NO: 2305422 - RNA, 19 nt, Homo sapiens
  misc_RNA (1)...(19): siRNA sense strand
ucaauaguuuggauggcaa

SEQ ID NO: 2305423 - RNA, 19 nt, Homo sapiens
  misc_RNA (1)...(19): siRNA sense strand
ccucaaggaaaucguaaau

SEQ ID NO: 2305424 - RNA, 19 nt, Homo sapiens
  misc_RNA (1)...(19): siRNA sense strand
uccaaaaccucaaggaaau

SEQ ID NO: 2305425 - RNA, 19 nt, Homo sapiens
  misc_RNA (1)...(19): siRNA sense strand
gcuaacugguacuggcuga

SEQ ID NO: 2305426 - RNA, 19 nt, Homo sapiens
  misc_RNA (1)...(19): siRNA sense strand
agggaaaugcgaagaggca

SEQ ID NO: 2305427 - RNA, 19 nt, Homo sapiens
  misc_RNA (1)...(19): siRNA sense strand
augaaagagcaaaggaugu

SEQ ID NO: 2305428 - RNA, 19 nt, Homo sapiens
  misc_RNA (1)...(19): siRNA sense strand
agaugaaagagcaaaggau

SEQ ID NO: 2305429 - RNA, 19 nt, Homo sapiens
  misc_RNA (1)...(19): siRNA sense strand
ggcaaaagaagcagugaga

SEQ ID NO: 2305430 - RNA, 19 nt, Homo sapiens
  misc_RNA (1)...(19): siRNA sense strand
uggaaaccucagaagggaa

SEQ ID NO: 2305431 - RNA, 19 nt, Homo sapiens
  misc_RNA (1)...(19): siRNA sense strand
aggaaaucguaaauagucu

SEQ ID NO: 2305432 - RNA, 19 nt, Homo sapiens
  misc_RNA (1)...(19): siRNA sense strand
aagcagagggaaaugcgaa

SEQ ID NO: 2305433 - RNA, 19 nt, Homo sapiens
  misc_RNA (1)...(19): siRNA sense strand
acuacuacgcaauaggcaa

SEQ ID NO: 2305434 - RNA, 19 nt, Homo sapiens
  misc_RNA (1)...(19): siRNA sense strand
agacuagaaagcagaggga

SEQ ID NO: 2305435 - RNA, 19 nt, Homo sapiens
  misc_RNA (1)...(19): siRNA sense strand
agacaaugaucgauauccu

SEQ ID NO: 2305436 - RNA, 19 nt, Homo sapiens
  misc_RNA (1)...(19): siRNA sense strand
ccgaagcaauucagcagga

SEQ ID NO: 2305437 - RNA, 19 nt, Homo sapiens
  misc_RNA (1)...(19): siRNA sense strand
augcauuacguuucaacaa

SEQ ID NO: 2305438 - RNA, 19 nt, Homo sapiens
  misc_RNA (1)...(19): siRNA sense strand
ucaacaaacauuacaacca

SEQ ID NO: 2305439 - RNA, 19 nt, Homo sapiens
  misc_RNA (1)...(19): siRNA sense strand
aggaccaguucgugagcaa

SEQ ID NO: 2305440 - RNA, 19 nt, Homo sapiens
  misc_RNA (1)...(19): siRNA sense strand
ggauuuacgagcaggccaa

SEQ ID NO: 2305441 - RNA, 19 nt, Homo sapiens
  misc_RNA (1)...(19): siRNA sense strand
gcggcaaagcggacaccaa

SEQ ID NO: 2305442 - RNA, 19 nt, Homo sapiens
  misc_RNA (1)...(19): siRNA sense strand
ccggcaaagcacaggugua

SEQ ID NO: 2305443 - RNA, 19 nt, Homo sapiens
  misc_RNA (1)...(19): siRNA sense strand
gagguuucaaggaggcaaa

SEQ ID NO: 2305444 - RNA, 19 nt, Homo sapiens
  misc_RNA (1)...(19): siRNA sense strand
caccaaugugcaaggaaau

SEQ ID NO: 2305445 - RNA, 19 nt, Homo sapiens
  misc_RNA (1)...(19): siRNA sense strand
acuccucgccgcagggaua

SEQ ID NO: 2305446 - RNA, 19 nt, Homo sapiens
  misc_RNA (1)...(19): siRNA sense strand
ucaaauaacaaugggcaga

SEQ ID NO: 2305447 - RNA, 19 nt, Homo sapiens
  misc_RNA (1)...(19): siRNA sense strand
gcuucuacucgcacagcua

SEQ ID NO: 2305448 - RNA, 19 nt, Homo sapiens
  misc_RNA (1)...(19): siRNA sense strand
caccaaacggagaugauca

SEQ ID NO: 2305449 - RNA, 19 nt, Homo sapiens
  misc_RNA (1)...(19): siRNA sense strand
uuacaucaguggaaggcaa

SEQ ID NO: 2305450 - RNA, 19 nt, Homo sapiens
  misc_RNA (1)...(19): siRNA sense strand
cauccaugaagaagguaaa

SEQ ID NO: 2305451 - RNA, 19 nt, Homo sapiens
  misc_RNA (1)...(19): siRNA sense strand
acaaauuggaucagcaaaa

SEQ ID NO: 2305452 - RNA, 19 nt, Homo sapiens
  misc_RNA (1)...(19): siRNA sense strand
aguucaggaucuagcacaa

SEQ ID NO: 2305453 - RNA, 19 nt, Homo sapiens
  misc_RNA (1)...(19): siRNA sense strand
gcaaagacuaccaagcaga

SEQ ID NO: 2305454 - RNA, 19 nt, Homo sapiens
  misc_RNA (1)...(19): siRNA sense strand
aagccaaagaauuagcaua

SEQ ID NO: 2305455 - RNA, 19 nt, Homo sapiens
  misc_RNA (1)...(19): siRNA sense strand
cggcagagcauccuggaca

SEQ ID NO: 2305456 - RNA, 19 nt, Homo sapiens
  misc_RNA (1)...(19): siRNA sense strand
caguggaaggcaaagacua

SEQ ID NO: 2305457 - RNA, 19 nt, Homo sapiens
  misc_RNA (1)...(19): siRNA sense strand
cagacagcccagaggagau

SEQ ID NO: 2305458 - RNA, 19 nt, Homo sapiens
  misc_RNA (1)...(19): siRNA sense strand
cuaccaagcagaagcacga

SEQ ID NO: 2305459 - RNA, 19 nt, Homo sapiens
  misc_RNA (1)...(19): siRNA sense strand
acgugauccuucugccaaa

SEQ ID NO: 2305460 - RNA, 19 nt, Homo sapiens
  misc_RNA (1)...(19): siRNA sense strand
aggaucaaguccagcacau

SEQ ID NO: 2305461 - RNA, 19 nt, Homo sapiens
  misc_RNA (1)...(19): siRNA sense strand
ccaacauaguggcggugca

SEQ ID NO: 2305462 - RNA, 19 nt, Homo sapiens
  misc_RNA (1)...(19): siRNA sense strand
gugaagaaauugguggguu

SEQ ID NO: 2305463 - RNA, 19 nt, Homo sapiens
  misc_RNA (1)...(19): siRNA sense strand
gcaugaacacugcucgcua

SEQ ID NO: 2305464 - RNA, 19 nt, Homo sapiens
  misc_RNA (1)...(19): siRNA sense strand
uuacaucaguggaaggcaa

SEQ ID NO: 2305465 - RNA, 19 nt, Homo sapiens
  misc_RNA (1)...(19): siRNA sense strand
aguucaggaucuagcacaa

SEQ ID NO: 2305466 - RNA, 19 nt, Homo sapiens
  misc_RNA (1)...(19): siRNA sense strand
gcaaagacuaccaagcaga

SEQ ID NO: 2305467 - RNA, 19 nt, Homo sapiens
  misc_RNA (1)...(19): siRNA sense strand
cggcagagcauccuggaca

SEQ ID NO: 2305468 - RNA, 19 nt, Homo sapiens
  misc_RNA (1)...(19): siRNA sense strand
caguggaaggcaaagacua

SEQ ID NO: 2305469 - RNA, 19 nt, Homo sapiens
  misc_RNA (1)...(19): siRNA sense strand
cuaccaagcagaagcacga

SEQ ID NO: 2305470 - RNA, 19 nt, Homo sapiens
  misc_RNA (1)...(19): siRNA sense strand
aggaucaaguccagcacau

SEQ ID NO: 2305471 - RNA, 19 nt, Homo sapiens
  misc_RNA (1)...(19): siRNA sense strand
agacaaaaggaaagagaaa

SEQ ID NO: 2305472 - RNA, 19 nt, Homo sapiens
  misc_RNA (1)...(19): siRNA sense strand
auuuacaaccagagugaua

SEQ ID NO: 2305473 - RNA, 19 nt, Homo sapiens
  misc_RNA (1)...(19): siRNA sense strand
cugaagacauauuugguga

SEQ ID NO: 2305474 - RNA, 19 nt, Homo sapiens
  misc_RNA (1)...(19): siRNA sense strand
acacagaagacaaaaggaa

SEQ ID NO: 2305475 - RNA, 19 nt, Homo sapiens
  misc_RNA (1)...(19): siRNA sense strand
ccuuuagugaagaggaaca

SEQ ID NO: 2305476 - RNA, 19 nt, Homo sapiens
  misc_RNA (1)...(19): siRNA sense strand
gaguggaauaugauggcau

SEQ ID NO: 2305477 - RNA, 19 nt, Homo sapiens
  misc_RNA (1)...(19): siRNA sense strand
gcaagagccugcacagcca

SEQ ID NO: 2305478 - RNA, 19 nt, Homo sapiens
  misc_RNA (1)...(19): siRNA sense strand
caggauaucaacaugaaaa

SEQ ID NO: 2305479 - RNA, 19 nt, Homo sapiens
  misc_RNA (1)...(19): siRNA sense strand
gcacaaacugccuucguca

SEQ ID NO: 2305480 - RNA, 19 nt, Homo sapiens
  misc_RNA (1)...(19): siRNA sense strand
aguuguuuaaugaggcuaa

SEQ ID NO: 2305481 - RNA, 19 nt, Homo sapiens
  misc_RNA (1)...(19): siRNA sense strand
aggucucacuacaggauau

SEQ ID NO: 2305482 - RNA, 19 nt, Homo sapiens
  misc_RNA (1)...(19): siRNA sense strand
caaccagagugauaagcca

SEQ ID NO: 2305483 - RNA, 19 nt, Homo sapiens
  misc_RNA (1)...(19): siRNA sense strand
ggcauaugacaaagagcuu

SEQ ID NO: 2305484 - RNA, 19 nt, Homo sapiens
  misc_RNA (1)...(19): siRNA sense strand
caccauacagagaugacaa

SEQ ID NO: 2305485 - RNA, 19 nt, Homo sapiens
  misc_RNA (1)...(19): siRNA sense strand
cacagaagacaaaaggaaa

SEQ ID NO: 2305486 - RNA, 19 nt, Homo sapiens
  misc_RNA (1)...(19): siRNA sense strand
gcugauauuuacaaccaga

SEQ ID NO: 2305487 - RNA, 19 nt, Homo sapiens
  misc_RNA (1)...(19): siRNA sense strand
auauuuacaaccagaguga

SEQ ID NO: 2305488 - RNA, 19 nt, Homo sapiens
  misc_RNA (1)...(19): siRNA sense strand
agggauuaccagcgaacuu

SEQ ID NO: 2305489 - RNA, 19 nt, Homo sapiens
  misc_RNA (1)...(19): siRNA sense strand
acuugaauguguaaccaau

SEQ ID NO: 2305490 - RNA, 19 nt, Homo sapiens
  misc_RNA (1)...(19): siRNA sense strand
cuugaauguguaaccaaua

SEQ ID NO: 2305491 - RNA, 19 nt, Homo sapiens
  misc_RNA (1)...(19): siRNA sense strand
cuucuacaucagagcaaau

SEQ ID NO: 2305492 - RNA, 19 nt, Homo sapiens
  misc_RNA (1)...(19): siRNA sense strand
guuagaaaagccagaaaca

SEQ ID NO: 2305493 - RNA, 19 nt, Homo sapiens
  misc_RNA (1)...(19): siRNA sense strand
caugaagaugggagauaau

SEQ ID NO: 2305494 - RNA, 19 nt, Homo sapiens
  misc_RNA (1)...(19): siRNA sense strand
aagugaaaucagaggagau

SEQ ID NO: 2305495 - RNA, 19 nt, Homo sapiens
  misc_RNA (1)...(19): siRNA sense strand
uuguauguguagaaaguga

SEQ ID NO: 2305496 - RNA, 19 nt, Homo sapiens
  misc_RNA (1)...(19): siRNA sense strand
agggaaccuaauagaagaa

SEQ ID NO: 2305497 - RNA, 19 nt, Homo sapiens
  misc_RNA (1)...(19): siRNA sense strand
ucauaaaugcuuacccaga

SEQ ID NO: 2305498 - RNA, 19 nt, Homo sapiens
  misc_RNA (1)...(19): siRNA sense strand
augauaaguuugaaggcaa

SEQ ID NO: 2305499 - RNA, 19 nt, Homo sapiens
  misc_RNA (1)...(19): siRNA sense strand
ccaugauaucacugggaaa

SEQ ID NO: 2305500 - RNA, 19 nt, Homo sapiens
  misc_RNA (1)...(19): siRNA sense strand
acucacaauuggagaagga

SEQ ID NO: 2305501 - RNA, 19 nt, Homo sapiens
  misc_RNA (1)...(19): siRNA sense strand
ccaaaguagacaaggaucu

SEQ ID NO: 2305502 - RNA, 19 nt, Homo sapiens
  misc_RNA (1)...(19): siRNA sense strand
uggaaaacccggugguauu

SEQ ID NO: 2305503 - RNA, 19 nt, Homo sapiens
  misc_RNA (1)...(19): siRNA sense strand
auucgauauuugcaggaaa

SEQ ID NO: 2305504 - RNA, 19 nt, Homo sapiens
  misc_RNA (1)...(19): siRNA sense strand
auaaagaaggauuuggaca

SEQ ID NO: 2305505 - RNA, 19 nt, Homo sapiens
  misc_RNA (1)...(19): siRNA sense strand
gaagagacuugauggcagu

SEQ ID NO: 2305506 - RNA, 19 nt, Homo sapiens
  misc_RNA (1)...(19): siRNA sense strand
ugccaauaagggagcuaaa

SEQ ID NO: 2305507 - RNA, 19 nt, Homo sapiens
  misc_RNA (1)...(19): siRNA sense strand
ugggaaaugagaagauuca

SEQ ID NO: 2305508 - RNA, 19 nt, Homo sapiens
  misc_RNA (1)...(19): siRNA sense strand
ucacaauuggagaaggaca

SEQ ID NO: 2305509 - RNA, 19 nt, Homo sapiens
  misc_RNA (1)...(19): siRNA sense strand
aauuggagaaggacagcaa

SEQ ID NO: 2305510 - RNA, 19 nt, Homo sapiens
  misc_RNA (1)...(19): siRNA sense strand
cauuaagaguggaacugga

SEQ ID NO: 2305511 - RNA, 19 nt, Homo sapiens
  misc_RNA (1)...(19): siRNA sense strand
cagaauuuuggcugggaaa

SEQ ID NO: 2305512 - RNA, 19 nt, Homo sapiens
  misc_RNA (1)...(19): siRNA sense strand
ugguauuccaugaagaaaa

SEQ ID NO: 2305513 - RNA, 19 nt, Homo sapiens
  misc_RNA (1)...(19): siRNA sense strand
ccuacuggcacaacagaau

SEQ ID NO: 2305514 - RNA, 19 nt, Homo sapiens
  misc_RNA (1)...(19): siRNA sense strand
guaccugggacaaugacaa

SEQ ID NO: 2305515 - RNA, 19 nt, Homo sapiens
  misc_RNA (1)...(19): siRNA sense strand
auuguuaaccugaaagaga

SEQ ID NO: 2305516 - RNA, 19 nt, Homo sapiens
  misc_RNA (1)...(19): siRNA sense strand
cggugcaaauccaugauau

SEQ ID NO: 2305517 - RNA, 19 nt, Homo sapiens
  misc_RNA (1)...(19): siRNA sense strand
uaagaguggaacuggaaga

SEQ ID NO: 2305518 - RNA, 19 nt, Homo sapiens
  misc_RNA (1)...(19): siRNA sense strand
cuucaacauguguagcaua

SEQ ID NO: 2305519 - RNA, 19 nt, Homo sapiens
  misc_RNA (1)...(19): siRNA sense strand
cagacuaugccauguucaa

SEQ ID NO: 2305520 - RNA, 19 nt, Homo sapiens
  misc_RNA (1)...(19): siRNA sense strand
cagacucacaauuggagaa

SEQ ID NO: 2305521 - RNA, 19 nt, Homo sapiens
  misc_RNA (1)...(19): siRNA sense strand
ugaaagagaagguagccca

SEQ ID NO: 2305522 - RNA, 19 nt, Homo sapiens
  misc_RNA (1)...(19): siRNA sense strand
aaucgaugggucuggaaau

SEQ ID NO: 2305523 - RNA, 19 nt, Homo sapiens
  misc_RNA (1)...(19): siRNA sense strand
cggugguauuccaugaaga

SEQ ID NO: 2305524 - RNA, 19 nt, Homo sapiens
  misc_RNA (1)...(19): siRNA sense strand
auuaaaccucugaaagcua

SEQ ID NO: 2305525 - RNA, 19 nt, Homo sapiens
  misc_RNA (1)...(19): siRNA sense strand
aaacaucagaagucaaaca

SEQ ID NO: 2305526 - RNA, 19 nt, Homo sapiens
  misc_RNA (1)...(19): siRNA sense strand
cuggaagacuggaauggca

SEQ ID NO: 2305527 - RNA, 19 nt, Homo sapiens
  misc_RNA (1)...(19): siRNA sense strand
ggcgaugauccuagugaca

SEQ ID NO: 2305528 - RNA, 19 nt, Homo sapiens
  misc_RNA (1)...(19): siRNA sense strand
cgaugauccuagugacaag

SEQ ID NO: 2305529 - RNA, 19 nt, Homo sapiens
  misc_RNA (1)...(19): siRNA sense strand
acuccuaaugguuaugaua

SEQ ID NO: 2305530 - RNA, 19 nt, Homo sapiens
  misc_RNA (1)...(19): siRNA sense strand
augauaaguuugaaggcaa

SEQ ID NO: 2305531 - RNA, 19 nt, Homo sapiens
  misc_RNA (1)...(19): siRNA sense strand
ccaugauaucacugggaaa

SEQ ID NO: 2305532 - RNA, 19 nt, Homo sapiens
  misc_RNA (1)...(19): siRNA sense strand
acucacaauuggagaagga

SEQ ID NO: 2305533 - RNA, 19 nt, Homo sapiens
  misc_RNA (1)...(19): siRNA sense strand
ccaaaguagacaaggaucu

SEQ ID NO: 2305534 - RNA, 19 nt, Homo sapiens
  misc_RNA (1)...(19): siRNA sense strand
uggaaaacccggugguauu

SEQ ID NO: 2305535 - RNA, 19 nt, Homo sapiens
  misc_RNA (1)...(19): siRNA sense strand
auucgauauuugcaggaaa

SEQ ID NO: 2305536 - RNA, 19 nt, Homo sapiens
  misc_RNA (1)...(19): siRNA sense strand
auaaagaaggauuuggaca

SEQ ID NO: 2305537 - RNA, 19 nt, Homo sapiens
  misc_RNA (1)...(19): siRNA sense strand
gaagagacuugauggcagu

SEQ ID NO: 2305538 - RNA, 19 nt, Homo sapiens
  misc_RNA (1)...(19): siRNA sense strand
ugccaauaagggagcuaaa

SEQ ID NO: 2305539 - RNA, 19 nt, Homo sapiens
  misc_RNA (1)...(19): siRNA sense strand
ugggaaaugagaagauuca

SEQ ID NO: 2305540 - RNA, 19 nt, Homo sapiens
  misc_RNA (1)...(19): siRNA sense strand
ucacaauuggagaaggaca

SEQ ID NO: 2305541 - RNA, 19 nt, Homo sapiens
  misc_RNA (1)...(19): siRNA sense strand
aauuggagaaggacagcaa

SEQ ID NO: 2305542 - RNA, 19 nt, Homo sapiens
  misc_RNA (1)...(19): siRNA sense strand
cauuaagaguggaacugga

SEQ ID NO: 2305543 - RNA, 19 nt, Homo sapiens
  misc_RNA (1)...(19): siRNA sense strand
cagaauuuuggcugggaaa

SEQ ID NO: 2305544 - RNA, 19 nt, Homo sapiens
  misc_RNA (1)...(19): siRNA sense strand
ugguauuccaugaagaaaa

SEQ ID NO: 2305545 - RNA, 19 nt, Homo sapiens
  misc_RNA (1)...(19): siRNA sense strand
ccuacuggcacaacagaau

SEQ ID NO: 2305546 - RNA, 19 nt, Homo sapiens
  misc_RNA (1)...(19): siRNA sense strand
guaccugggacaaugacaa

SEQ ID NO: 2305547 - RNA, 19 nt, Homo sapiens
  misc_RNA (1)...(19): siRNA sense strand
auuguuaaccugaaagaga

SEQ ID NO: 2305548 - RNA, 19 nt, Homo sapiens
  misc_RNA (1)...(19): siRNA sense strand
cggugcaaauccaugauau

SEQ ID NO: 2305549 - RNA, 19 nt, Homo sapiens
  misc_RNA (1)...(19): siRNA sense strand
uaagaguggaacuggaaga

SEQ ID NO: 2305550 - RNA, 19 nt, Homo sapiens
  misc_RNA (1)...(19): siRNA sense strand
cuucaacauguguagcaua

SEQ ID NO: 2305551 - RNA, 19 nt, Homo sapiens
  misc_RNA (1)...(19): siRNA sense strand
cagacuaugccauguucaa

SEQ ID NO: 2305552 - RNA, 19 nt, Homo sapiens
  misc_RNA (1)...(19): siRNA sense strand
cagacucacaauuggagaa

SEQ ID NO: 2305553 - RNA, 19 nt, Homo sapiens
  misc_RNA (1)...(19): siRNA sense strand
ugaaagagaagguagccca

SEQ ID NO: 2305554 - RNA, 19 nt, Homo sapiens
  misc_RNA (1)...(19): siRNA sense strand
aaucgaugggucuggaaau

SEQ ID NO: 2305555 - RNA, 19 nt, Homo sapiens
  misc_RNA (1)...(19): siRNA sense strand
cggugguauuccaugaaga

SEQ ID NO: 2305556 - RNA, 19 nt, Homo sapiens
  misc_RNA (1)...(19): siRNA sense strand
auuaaaccucugaaagcua

SEQ ID NO: 2305557 - RNA, 19 nt, Homo sapiens
  misc_RNA (1)...(19): siRNA sense strand
aaacaucagaagucaaaca

SEQ ID NO: 2305558 - RNA, 19 nt, Homo sapiens
  misc_RNA (1)...(19): siRNA sense strand
cuggaagacuggaauggca

SEQ ID NO: 2305559 - RNA, 19 nt, Homo sapiens
  misc_RNA (1)...(19): siRNA sense strand
ggcgaugauccuagugaca

SEQ ID NO: 2305560 - RNA, 19 nt, Homo sapiens
  misc_RNA (1)...(19): siRNA sense strand
cgaugauccuagugacaag

SEQ ID NO: 2305561 - RNA, 19 nt, Homo sapiens
  misc_RNA (1)...(19): siRNA sense strand
acuccuaaugguuaugaua

SEQ ID NO: 2305562 - RNA, 19 nt, Homo sapiens
  misc_RNA (1)...(19): siRNA sense strand
ccagaagaaaucaagaaaa

SEQ ID NO: 2305563 - RNA, 19 nt, Homo sapiens
  misc_RNA (1)...(19): siRNA sense strand
ucauuguagaagaaggcaa

SEQ ID NO: 2305564 - RNA, 19 nt, Homo sapiens
  misc_RNA (1)...(19): siRNA sense strand
ugaugcaagcuuugaaaca

SEQ ID NO: 2305565 - RNA, 19 nt, Homo sapiens
  misc_RNA (1)...(19): siRNA sense strand
agcaaauggaccagaagau

SEQ ID NO: 2305566 - RNA, 19 nt, Homo sapiens
  misc_RNA (1)...(19): siRNA sense strand
accagaagaaaucaagaaa

SEQ ID NO: 2305567 - RNA, 19 nt, Homo sapiens
  misc_RNA (1)...(19): siRNA sense strand
ugaugaaguaugucgcauu

SEQ ID NO: 2305568 - RNA, 19 nt, Homo sapiens
  misc_RNA (1)...(19): siRNA sense strand
uggcaaaaugaucgggcaa

SEQ ID NO: 2305569 - RNA, 19 nt, Homo sapiens
  misc_RNA (1)...(19): siRNA sense strand
cuaaagaaguuaugggaga

SEQ ID NO: 2305570 - RNA, 19 nt, Homo sapiens
  misc_RNA (1)...(19): siRNA sense strand
gggcauagaaggagaaaau

SEQ ID NO: 2305571 - RNA, 19 nt, Homo sapiens
  misc_RNA (1)...(19): siRNA sense strand
gggacaugguauuggagaa

SEQ ID NO: 2305572 - RNA, 19 nt, Homo sapiens
  misc_RNA (1)...(19): siRNA sense strand
uggcaaaggacuagguuau

SEQ ID NO: 2305573 - RNA, 19 nt, Homo sapiens
  misc_RNA (1)...(19): siRNA sense strand
agaaguuaugggagagaaa

SEQ ID NO: 2305574 - RNA, 19 nt, Homo sapiens
  misc_RNA (1)...(19): siRNA sense strand
gggaaggaagagaggaaga

SEQ ID NO: 2305575 - RNA, 19 nt, Homo sapiens
  misc_RNA (1)...(19): siRNA sense strand
gugggaaggaagagaggaa

SEQ ID NO: 2305576 - RNA, 19 nt, Homo sapiens
  misc_RNA (1)...(19): siRNA sense strand
aggccaagcuagagaucau

SEQ ID NO: 2305577 - RNA, 19 nt, Homo sapiens
  misc_RNA (1)...(19): siRNA sense strand
uggaacaaggagcgggaaa

SEQ ID NO: 2305578 - RNA, 19 nt, Homo sapiens
  misc_RNA (1)...(19): siRNA sense strand
aagagauccgggagagaaa

SEQ ID NO: 2305579 - RNA, 19 nt, Homo sapiens
  misc_RNA (1)...(19): siRNA sense strand
ggauaaauuggcaagaaaa

SEQ ID NO: 2305580 - RNA, 19 nt, Homo sapiens
  misc_RNA (1)...(19): siRNA sense strand
gcucaagagauccgggaga

SEQ ID NO: 2305581 - RNA, 19 nt, Homo sapiens
  misc_RNA (1)...(19): siRNA sense strand
cguuaguggaucugaguuu

SEQ ID NO: 2305582 - RNA, 19 nt, Homo sapiens
  misc_RNA (1)...(19): siRNA sense strand
aaggaguaguagacagauu

SEQ ID NO: 2305583 - RNA, 19 nt, Homo sapiens
  misc_RNA (1)...(19): siRNA sense strand
gggcagagugagcaggaga

SEQ ID NO: 2305584 - RNA, 19 nt, Homo sapiens
  misc_RNA (1)...(19): siRNA sense strand
aauuacaacuggugcucaa

SEQ ID NO: 2305585 - RNA, 19 nt, Homo sapiens
  misc_RNA (1)...(19): siRNA sense strand
caguuuggcaugaaugaaa

SEQ ID NO: 2305586 - RNA, 19 nt, Homo sapiens
  misc_RNA (1)...(19): siRNA sense strand
cuaugaagaauuuguggaa

SEQ ID NO: 2305587 - RNA, 19 nt, Homo sapiens
  misc_RNA (1)...(19): siRNA sense strand
gaagagaggaagaggcaac

SEQ ID NO: 2305588 - RNA, 19 nt, Homo sapiens
  misc_RNA (1)...(19): siRNA sense strand
agaugaugaaguacgaaua

SEQ ID NO: 2305589 - RNA, 19 nt, Homo sapiens
  misc_RNA (1)...(19): siRNA sense strand
ggcaauugagcgagugauu

SEQ ID NO: 2305590 - RNA, 19 nt, Homo sapiens
  misc_RNA (1)...(19): siRNA sense strand
gagaaggauaaauuggcaa

SEQ ID NO: 2305591 - RNA, 19 nt, Homo sapiens
  misc_RNA (1)...(19): siRNA sense strand
gaaugaaaagguugggcaa

SEQ ID NO: 2305592 - RNA, 19 nt, Homo sapiens
  misc_RNA (1)...(19): siRNA sense strand
guaucaagaccuaggagca

SEQ ID NO: 2305593 - RNA, 19 nt, Homo sapiens
  misc_RNA (1)...(19): siRNA sense strand
aggaagagaggaagaggca

SEQ ID NO: 2305594 - RNA, 19 nt, Homo sapiens
  misc_RNA (1)...(19): siRNA sense strand
agaaagcugacguggagaa

SEQ ID NO: 2305595 - RNA, 19 nt, Homo sapiens
  misc_RNA (1)...(19): siRNA sense strand
ggaacaaggagcgggaaaa

SEQ ID NO: 2305596 - RNA, 19 nt, Homo sapiens
  misc_RNA (1)...(19): siRNA sense strand
gggaaaaggagaaagagga

SEQ ID NO: 2305597 - RNA, 19 nt, Homo sapiens
  misc_RNA (1)...(19): siRNA sense strand
caagcaagggccagcagaa

SEQ ID NO: 2305598 - RNA, 19 nt, Homo sapiens
  misc_RNA (1)...(19): siRNA sense strand
gugaggaggccaagcuaga

SEQ ID NO: 2305599 - RNA, 19 nt, Homo sapiens
  misc_RNA (1)...(19): siRNA sense strand
guacccuggagaaggauaa

SEQ ID NO: 2305600 - RNA, 19 nt, Homo sapiens
  misc_RNA (1)...(19): siRNA sense strand
uggucgagccucugaagaa

SEQ ID NO: 2305601 - RNA, 19 nt, Homo sapiens
  misc_RNA (1)...(19): siRNA sense strand
ccagaaggccuuaaggacu

SEQ ID NO: 2305602 - RNA, 19 nt, Homo sapiens
  misc_RNA (1)...(19): siRNA sense strand
aguaguagacagauuggaa

SEQ ID NO: 2305603 - RNA, 19 nt, Homo sapiens
  misc_RNA (1)...(19): siRNA sense strand
cgacaaggauuucaggaug

SEQ ID NO: 2305604 - RNA, 19 nt, Homo sapiens
  misc_RNA (1)...(19): siRNA sense strand
guggcaaaggacuagguua

SEQ ID NO: 2305605 - RNA, 19 nt, Homo sapiens
  misc_RNA (1)...(19): siRNA sense strand
aucuuuaacuccaggguuu

SEQ ID NO: 2305606 - RNA, 19 nt, Homo sapiens
  misc_RNA (1)...(19): siRNA sense strand
aggugguggcgguggaaaa

SEQ ID NO: 2305607 - RNA, 19 nt, Homo sapiens
  misc_RNA (1)...(19): siRNA sense strand
uuggauaggauguguauga

SEQ ID NO: 2305608 - RNA, 19 nt, Homo sapiens
  misc_RNA (1)...(19): siRNA sense strand
augaaaagguugggcaaau

SEQ ID NO: 2305609 - RNA, 19 nt, Homo sapiens
  misc_RNA (1)...(19): siRNA sense strand
aagcaagggccagcagaaa

SEQ ID NO: 2305610 - RNA, 19 nt, Homo sapiens
  misc_RNA (1)...(19): siRNA sense strand
uauuggaccaccagacaua

SEQ ID NO: 2305611 - RNA, 19 nt, Homo sapiens
  misc_RNA (1)...(19): siRNA sense strand
ggagaaggauaaauuggca

SEQ ID NO: 2305612 - RNA, 19 nt, Homo sapiens
  misc_RNA (1)...(19): siRNA sense strand
guguaugacuuuagguggu

SEQ ID NO: 2305613 - RNA, 19 nt, Homo sapiens
  misc_RNA (1)...(19): siRNA sense strand
gaaugauaugguugaacuu

SEQ ID NO: 2305614 - RNA, 19 nt, Homo sapiens
  misc_RNA (1)...(19): siRNA sense strand
caugggacgacaaggauuu

SEQ ID NO: 2305615 - RNA, 19 nt, Homo sapiens
  misc_RNA (1)...(19): siRNA sense strand
uaucaagaccuaggagcaa

SEQ ID NO: 2305616 - RNA, 19 nt, Homo sapiens
  misc_RNA (1)...(19): siRNA sense strand
ugaacaggcaauugagcga

SEQ ID NO: 2305617 - RNA, 19 nt, Homo sapiens
  misc_RNA (1)...(19): siRNA sense strand
caaaagaacaauaccucua

SEQ ID NO: 2305618 - RNA, 19 nt, Homo sapiens
  misc_RNA (1)...(19): siRNA sense strand
ggccuuaaggacuggaaca

SEQ ID NO: 2305619 - RNA, 19 nt, Homo sapiens
  misc_RNA (1)...(19): siRNA sense strand
gaaaucacuuggaaggacu

SEQ ID NO: 2305620 - RNA, 19 nt, Homo sapiens
  misc_RNA (1)...(19): siRNA sense strand
ugguauuggagaaaccuua

SEQ ID NO: 2305621 - RNA, 19 nt, Homo sapiens
  misc_RNA (1)...(19): siRNA sense strand
aggacuuugucaauaacua

SEQ ID NO: 2305622 - RNA, 19 nt, Homo sapiens
  misc_RNA (1)...(19): siRNA sense strand
acagauuggaagucgucaa

SEQ ID NO: 2305623 - RNA, 19 nt, Homo sapiens
  misc_RNA (1)...(19): siRNA sense strand
ggcagagugagcaggagaa

SEQ ID NO: 2305624 - RNA, 19 nt, Homo sapiens
  misc_RNA (1)...(19): siRNA sense strand
acccaaagcaguaucaaga

SEQ ID NO: 2305625 - RNA, 19 nt, Homo sapiens
  misc_RNA (1)...(19): siRNA sense strand
accaagaaauauagaggaa

SEQ ID NO: 2305626 - RNA, 19 nt, Homo sapiens
  misc_RNA (1)...(19): siRNA sense strand
cuguaaagcaaccaagaaa

SEQ ID NO: 2305627 - RNA, 19 nt, Homo sapiens
  misc_RNA (1)...(19): siRNA sense strand
acuucaaacuccagugcaa

SEQ ID NO: 2305628 - RNA, 19 nt, Homo sapiens
  misc_RNA (1)...(19): siRNA sense strand
aagaagguauagaggaaca

SEQ ID NO: 2305629 - RNA, 19 nt, Homo sapiens
  misc_RNA (1)...(19): siRNA sense strand
caaugaagaaauaggaagu

SEQ ID NO: 2305630 - RNA, 19 nt, Homo sapiens
  misc_RNA (1)...(19): siRNA sense strand
augaagacccucaaguaaa

SEQ ID NO: 2305631 - RNA, 19 nt, Homo sapiens
  misc_RNA (1)...(19): siRNA sense strand
acuuguaucuccuggaaau

SEQ ID NO: 2305632 - RNA, 19 nt, Homo sapiens
  misc_RNA (1)...(19): siRNA sense strand
agauggaagcggugauaca

SEQ ID NO: 2305633 - RNA, 19 nt, Homo sapiens
  misc_RNA (1)...(19): siRNA sense strand
ugaugaugauauuggugaa

SEQ ID NO: 2305634 - RNA, 19 nt, Homo sapiens
  misc_RNA (1)...(19): siRNA sense strand
aagagaugcagaugagaau

SEQ ID NO: 2305635 - RNA, 19 nt, Homo sapiens
  misc_RNA (1)...(19): siRNA sense strand
uugaagcagcucugggaaa

SEQ ID NO: 2305636 - RNA, 19 nt, Homo sapiens
  misc_RNA (1)...(19): siRNA sense strand
ggauuuaagcauucggguu

SEQ ID NO: 2305637 - RNA, 19 nt, Homo sapiens
  misc_RNA (1)...(19): siRNA sense strand
ugaagaaauaggaaguaca

SEQ ID NO: 2305638 - RNA, 19 nt, Homo sapiens
  misc_RNA (1)...(19): siRNA sense strand
aguuauuccugcugguaga

SEQ ID NO: 2305639 - RNA, 19 nt, Homo sapiens
  misc_RNA (1)...(19): siRNA sense strand
gugaacaggaugugccaga

SEQ ID NO: 2305640 - RNA, 19 nt, Homo sapiens
  misc_RNA (1)...(19): siRNA sense strand
caagaaauauagaggaacc

SEQ ID NO: 2305641 - RNA, 19 nt, Homo sapiens
  misc_RNA (1)...(19): siRNA sense strand
aauugaaggaguucggaau

SEQ ID NO: 2305642 - RNA, 19 nt, Homo sapiens
  misc_RNA (1)...(19): siRNA sense strand
ugaagguaccugaagaaga

SEQ ID NO: 2305643 - RNA, 19 nt, Homo sapiens
  misc_RNA (1)...(19): siRNA sense strand
cagaaauagcauccaauca

SEQ ID NO: 2305644 - RNA, 19 nt, Homo sapiens
  misc_RNA (1)...(19): siRNA sense strand
uguaaagcaaccaagaaau

SEQ ID NO: 2305645 - RNA, 19 nt, Homo sapiens
  misc_RNA (1)...(19): siRNA sense strand
aggaaguacaagagaugca

SEQ ID NO: 2305646 - RNA, 19 nt, Homo sapiens
  misc_RNA (1)...(19): siRNA sense strand
uguuauugucugucaguau

SEQ ID NO: 2305647 - RNA, 19 nt, Homo sapiens
  misc_RNA (1)...(19): siRNA sense strand
ucugaagguaccugaagaa

SEQ ID NO: 2305648 - RNA, 19 nt, Homo sapiens
  misc_RNA (1)...(19): siRNA sense strand
acaaacuaguguuccacaa

SEQ ID NO: 2305649 - RNA, 19 nt, Homo sapiens
  misc_RNA (1)...(19): siRNA sense strand
aauaggaaguacaagagau

SEQ ID NO: 2305650 - RNA, 19 nt, Homo sapiens
  misc_RNA (1)...(19): siRNA sense strand
aauacaaacuaguguucca

SEQ ID NO: 2305651 - RNA, 19 nt, Homo sapiens
  misc_RNA (1)...(19): siRNA sense strand
uggagaugauguuagugaa

SEQ ID NO: 2305652 - RNA, 19 nt, Homo sapiens
  misc_RNA (1)...(19): siRNA sense strand
gccucaacccggugccuaa

SEQ ID NO: 2305653 - RNA, 19 nt, Homo sapiens
  misc_RNA (1)...(19): siRNA sense strand
augugauucuguaaagcaa

SEQ ID NO: 2305654 - RNA, 19 nt, Homo sapiens
  misc_RNA (1)...(19): siRNA sense strand
auauagaggaacccagcaa

SEQ ID NO: 2305655 - RNA, 19 nt, Homo sapiens
  misc_RNA (1)...(19): siRNA sense strand
gaugaugauauuggugaaa

SEQ ID NO: 2305656 - RNA, 19 nt, Homo sapiens
  misc_RNA (1)...(19): siRNA sense strand
augcagaugagaaugaauu

SEQ ID NO: 2305657 - RNA, 19 nt, Homo sapiens
  misc_RNA (1)...(19): siRNA sense strand
agucuaaagcaacagaaga

SEQ ID NO: 2305658 - RNA, 19 nt, Homo sapiens
  misc_RNA (1)...(19): siRNA sense strand
uugcaaucgucaacagcau

SEQ ID NO: 2305659 - RNA, 19 nt, Homo sapiens
  misc_RNA (1)...(19): siRNA sense strand
agguauagaggaacaaguu

SEQ ID NO: 2305660 - RNA, 19 nt, Homo sapiens
  misc_RNA (1)...(19): siRNA sense strand
cccuuuaaauucuggagau

SEQ ID NO: 2305661 - RNA, 19 nt, Homo sapiens
  misc_RNA (1)...(19): siRNA sense strand
accaagaaauauagaggaa

SEQ ID NO: 2305662 - RNA, 19 nt, Homo sapiens
  misc_RNA (1)...(19): siRNA sense strand
cuguaaagcaaccaagaaa

SEQ ID NO: 2305663 - RNA, 19 nt, Homo sapiens
  misc_RNA (1)...(19): siRNA sense strand
acuucaaacuccagugcaa

SEQ ID NO: 2305664 - RNA, 19 nt, Homo sapiens
  misc_RNA (1)...(19): siRNA sense strand
aagaagguauagaggaaca

SEQ ID NO: 2305665 - RNA, 19 nt, Homo sapiens
  misc_RNA (1)...(19): siRNA sense strand
caaugaagaaauaggaagu

SEQ ID NO: 2305666 - RNA, 19 nt, Homo sapiens
  misc_RNA (1)...(19): siRNA sense strand
augaagacccucaaguaaa

SEQ ID NO: 2305667 - RNA, 19 nt, Homo sapiens
  misc_RNA (1)...(19): siRNA sense strand
acuuguaucuccuggaaau

SEQ ID NO: 2305668 - RNA, 19 nt, Homo sapiens
  misc_RNA (1)...(19): siRNA sense strand
agauggaagcggugauaca

SEQ ID NO: 2305669 - RNA, 19 nt, Homo sapiens
  misc_RNA (1)...(19): siRNA sense strand
ugaugaugauauuggugaa

SEQ ID NO: 2305670 - RNA, 19 nt, Homo sapiens
  misc_RNA (1)...(19): siRNA sense strand
aagagaugcagaugagaau

SEQ ID NO: 2305671 - RNA, 19 nt, Homo sapiens
  misc_RNA (1)...(19): siRNA sense strand
uugaagcagcucugggaaa

SEQ ID NO: 2305672 - RNA, 19 nt, Homo sapiens
  misc_RNA (1)...(19): siRNA sense strand
ggauuuaagcauucggguu

SEQ ID NO: 2305673 - RNA, 19 nt, Homo sapiens
  misc_RNA (1)...(19): siRNA sense strand
ugaagaaauaggaaguaca

SEQ ID NO: 2305674 - RNA, 19 nt, Homo sapiens
  misc_RNA (1)...(19): siRNA sense strand
aguuauuccugcugguaga

SEQ ID NO: 2305675 - RNA, 19 nt, Homo sapiens
  misc_RNA (1)...(19): siRNA sense strand
gugaacaggaugugccaga

SEQ ID NO: 2305676 - RNA, 19 nt, Homo sapiens
  misc_RNA (1)...(19): siRNA sense strand
caagaaauauagaggaacc

SEQ ID NO: 2305677 - RNA, 19 nt, Homo sapiens
  misc_RNA (1)...(19): siRNA sense strand
aauugaaggaguucggaau

SEQ ID NO: 2305678 - RNA, 19 nt, Homo sapiens
  misc_RNA (1)...(19): siRNA sense strand
ugaagguaccugaagaaga

SEQ ID NO: 2305679 - RNA, 19 nt, Homo sapiens
  misc_RNA (1)...(19): siRNA sense strand
cagaaauagcauccaauca

SEQ ID NO: 2305680 - RNA, 19 nt, Homo sapiens
  misc_RNA (1)...(19): siRNA sense strand
uguaaagcaaccaagaaau

SEQ ID NO: 2305681 - RNA, 19 nt, Homo sapiens
  misc_RNA (1)...(19): siRNA sense strand
aggaaguacaagagaugca

SEQ ID NO: 2305682 - RNA, 19 nt, Homo sapiens
  misc_RNA (1)...(19): siRNA sense strand
uguuauugucugucaguau

SEQ ID NO: 2305683 - RNA, 19 nt, Homo sapiens
  misc_RNA (1)...(19): siRNA sense strand
ucugaagguaccugaagaa

SEQ ID NO: 2305684 - RNA, 19 nt, Homo sapiens
  misc_RNA (1)...(19): siRNA sense strand
acaaacuaguguuccacaa

SEQ ID NO: 2305685 - RNA, 19 nt, Homo sapiens
  misc_RNA (1)...(19): siRNA sense strand
aauaggaaguacaagagau

SEQ ID NO: 2305686 - RNA, 19 nt, Homo sapiens
  misc_RNA (1)...(19): siRNA sense strand
aauacaaacuaguguucca

SEQ ID NO: 2305687 - RNA, 19 nt, Homo sapiens
  misc_RNA (1)...(19): siRNA sense strand
uggagaugauguuagugaa

SEQ ID NO: 2305688 - RNA, 19 nt, Homo sapiens
  misc_RNA (1)...(19): siRNA sense strand
gccucaacccggugccuaa

SEQ ID NO: 2305689 - RNA, 19 nt, Homo sapiens
  misc_RNA (1)...(19): siRNA sense strand
augugauucuguaaagcaa

SEQ ID NO: 2305690 - RNA, 19 nt, Homo sapiens
  misc_RNA (1)...(19): siRNA sense strand
auauagaggaacccagcaa

SEQ ID NO: 2305691 - RNA, 19 nt, Homo sapiens
  misc_RNA (1)...(19): siRNA sense strand
gaugaugauauuggugaaa

SEQ ID NO: 2305692 - RNA, 19 nt, Homo sapiens
  misc_RNA (1)...(19): siRNA sense strand
augcagaugagaaugaauu

SEQ ID NO: 2305693 - RNA, 19 nt, Homo sapiens
  misc_RNA (1)...(19): siRNA sense strand
agucuaaagcaacagaaga

SEQ ID NO: 2305694 - RNA, 19 nt, Homo sapiens
  misc_RNA (1)...(19): siRNA sense strand
uugcaaucgucaacagcau

SEQ ID NO: 2305695 - RNA, 19 nt, Homo sapiens
  misc_RNA (1)...(19): siRNA sense strand
agguauagaggaacaaguu

SEQ ID NO: 2305696 - RNA, 19 nt, Homo sapiens
  misc_RNA (1)...(19): siRNA sense strand
cccuuuaaauucuggagau

SEQ ID NO: 2305697 - RNA, 19 nt, Homo sapiens
  misc_RNA (1)...(19): siRNA sense strand
guucaaagaccuaagccuu

SEQ ID NO: 2305698 - RNA, 19 nt, Homo sapiens
  misc_RNA (1)...(19): siRNA sense strand
gaguacuuucagaagguaa

SEQ ID NO: 2305699 - RNA, 19 nt, Homo sapiens
  misc_RNA (1)...(19): siRNA sense strand
gggccgaagcguggaagaa

SEQ ID NO: 2305700 - RNA, 19 nt, Homo sapiens
  misc_RNA (1)...(19): siRNA sense strand
aguacuuucagaagguaaa

SEQ ID NO: 2305701 - RNA, 19 nt, Homo sapiens
  misc_RNA (1)...(19): siRNA sense strand
gauaaauacaccaaggaag

SEQ ID NO: 2305702 - RNA, 19 nt, Homo sapiens
  misc_RNA (1)...(19): siRNA sense strand
guucaaagaccuaagccuu

SEQ ID NO: 2305703 - RNA, 19 nt, Homo sapiens
  misc_RNA (1)...(19): siRNA sense strand
gaguacuuucagaagguaa

SEQ ID NO: 2305704 - RNA, 19 nt, Homo sapiens
  misc_RNA (1)...(19): siRNA sense strand
gggccgaagcguggaagaa

SEQ ID NO: 2305705 - RNA, 19 nt, Homo sapiens
  misc_RNA (1)...(19): siRNA sense strand
aguacuuucagaagguaaa

SEQ ID NO: 2305706 - RNA, 19 nt, Homo sapiens
  misc_RNA (1)...(19): siRNA sense strand
gauaaauacaccaaggaag

SEQ ID NO: 2305707 - RNA, 19 nt, Homo sapiens
  misc_RNA (1)...(19): siRNA sense strand
ggcagaaagccauggacca

SEQ ID NO: 2305708 - RNA, 19 nt, Homo sapiens
  misc_RNA (1)...(19): siRNA sense strand
ccauggaccagcuggccaa

SEQ ID NO: 2305709 - RNA, 19 nt, Homo sapiens
  misc_RNA (1)...(19): siRNA sense strand
aaacaggaguugaaggcca

SEQ ID NO: 2305710 - RNA, 19 nt, Homo sapiens
  misc_RNA (1)...(19): siRNA sense strand
cccaaaaggaggcugaaaa

SEQ ID NO: 2305711 - RNA, 19 nt, Homo sapiens
  misc_RNA (1)...(19): siRNA sense strand
acgaagguuucuugguuca

SEQ ID NO: 2305712 - RNA, 19 nt, Homo sapiens
  misc_RNA (1)...(19): siRNA sense strand
gggaaaugcuggaucagag

SEQ ID NO: 2305713 - RNA, 19 nt, Homo sapiens
  misc_RNA (1)...(19): siRNA sense strand
aacaggaguugaaggccaa

SEQ ID NO: 2305714 - RNA, 19 nt, Homo sapiens
  misc_RNA (1)...(19): siRNA sense strand
aggaaauccaggagggaca

SEQ ID NO: 2305715 - RNA, 19 nt, Homo sapiens
  misc_RNA (1)...(19): siRNA sense strand
acaauugagaagugugaua

SEQ ID NO: 2305716 - RNA, 19 nt, Homo sapiens
  misc_RNA (1)...(19): siRNA sense strand
cuacaguggaagaaaggaa

SEQ ID NO: 2305717 - RNA, 19 nt, Homo sapiens
  misc_RNA (1)...(19): siRNA sense strand
ugucugaugaggagauaaa

SEQ ID NO: 2305718 - RNA, 19 nt, Homo sapiens
  misc_RNA (1)...(19): siRNA sense strand
gggaaaugucugaugagga

SEQ ID NO: 2305719 - RNA, 19 nt, Homo sapiens
  misc_RNA (1)...(19): siRNA sense strand
caaguaaaacagauggaaa

SEQ ID NO: 2305720 - RNA, 19 nt, Homo sapiens
  misc_RNA (1)...(19): siRNA sense strand
cuaacaagccagcuggaau

SEQ ID NO: 2305721 - RNA, 19 nt, Homo sapiens
  misc_RNA (1)...(19): siRNA sense strand
aggacacagcagaggaaau

SEQ ID NO: 2305722 - RNA, 19 nt, Homo sapiens
  misc_RNA (1)...(19): siRNA sense strand
uuauaagcacuuugaggaa

SEQ ID NO: 2305723 - RNA, 19 nt, Homo sapiens
  misc_RNA (1)...(19): siRNA sense strand
aggagagaaaguagcgauu

SEQ ID NO: 2305724 - RNA, 19 nt, Homo sapiens
  misc_RNA (1)...(19): siRNA sense strand
gagaaaugacagaugugau

SEQ ID NO: 2305725 - RNA, 19 nt, Homo sapiens
  misc_RNA (1)...(19): siRNA sense strand
uguucuaccuggagacaca

SEQ ID NO: 2305726 - RNA, 19 nt, Homo sapiens
  misc_RNA (1)...(19): siRNA sense strand
ggaaaugucugaugaggag

SEQ ID NO: 2305727 - RNA, 19 nt, Homo sapiens
  misc_RNA (1)...(19): siRNA sense strand
aggagcaggaaaugaacaa

SEQ ID NO: 2305728 - RNA, 19 nt, Homo sapiens
  misc_RNA (1)...(19): siRNA sense strand
gggacuaugcuggagauaa

SEQ ID NO: 2305729 - RNA, 19 nt, Homo sapiens
  misc_RNA (1)...(19): siRNA sense strand
cggugugucuggagcgcau

SEQ ID NO: 2305730 - RNA, 19 nt, Homo sapiens
  misc_RNA (1)...(19): siRNA sense strand
aggagagggugcugaagga

SEQ ID NO: 2305731 - RNA, 19 nt, Homo sapiens
  misc_RNA (1)...(19): siRNA sense strand
cacaguaaggaaugcauaa

SEQ ID NO: 2305732 - RNA, 19 nt, Homo sapiens
  misc_RNA (1)...(19): siRNA sense strand
ucgacugguugcaaguaaa

SEQ ID NO: 2305733 - RNA, 19 nt, Homo sapiens
  misc_RNA (1)...(19): siRNA sense strand
aggcugaugcggauaguuu

SEQ ID NO: 2305734 - RNA, 19 nt, Homo sapiens
  misc_RNA (1)...(19): siRNA sense strand
agagaaaauagaugccuua

SEQ ID NO: 2305735 - RNA, 19 nt, Homo sapiens
  misc_RNA (1)...(19): siRNA sense strand
aagaaagugcacucagcua

SEQ ID NO: 2305736 - RNA, 19 nt, Homo sapiens
  misc_RNA (1)...(19): siRNA sense strand
gagagggugcugaaggaga

SEQ ID NO: 2305737 - RNA, 19 nt, Homo sapiens
  misc_RNA (1)...(19): siRNA sense strand
ccuuacaguuagaguauuc

SEQ ID NO: 2305738 - RNA, 19 nt, Homo sapiens
  misc_RNA (1)...(19): siRNA sense strand
aaucuagagcacaaacuaa

SEQ ID NO: 2305739 - RNA, 19 nt, Homo sapiens
  misc_RNA (1)...(19): siRNA sense strand
ucaccgagauccaggagca

SEQ ID NO: 2305740 - RNA, 19 nt, Homo sapiens
  misc_RNA (1)...(19): siRNA sense strand
ccaaacagcuuccagacca

SEQ ID NO: 2305741 - RNA, 19 nt, Homo sapiens
  misc_RNA (1)...(19): siRNA sense strand
acgacguaauugaacaaau

SEQ ID NO: 2305742 - RNA, 19 nt, Homo sapiens
  misc_RNA (1)...(19): siRNA sense strand
gcccgagccaguagaagaa

SEQ ID NO: 2305743 - RNA, 19 nt, Homo sapiens
  misc_RNA (1)...(19): siRNA sense strand
aaagaucacaguaaggaau

SEQ ID NO: 2305744 - RNA, 19 nt, Homo sapiens
  misc_RNA (1)...(19): siRNA sense strand
guucaacucaauagaagau

SEQ ID NO: 2305745 - RNA, 19 nt, Homo sapiens
  misc_RNA (1)...(19): siRNA sense strand
ggacagaucaacaucgcca

SEQ ID NO: 2305746 - RNA, 19 nt, Homo sapiens
  misc_RNA (1)...(19): siRNA sense strand
ucacaguaaggaaugcaua

SEQ ID NO: 2305747 - RNA, 19 nt, Homo sapiens
  misc_RNA (1)...(19): siRNA sense strand
gagugugguguucaggaaa

SEQ ID NO: 2305748 - RNA, 19 nt, Homo sapiens
  misc_RNA (1)...(19): siRNA sense strand
aggaggagagggugcugaa

SEQ ID NO: 2305749 - RNA, 19 nt, Homo sapiens
  misc_RNA (1)...(19): siRNA sense strand
gagacacagcagaagauca

SEQ ID NO: 2305750 - RNA, 19 nt, Homo sapiens
  misc_RNA (1)...(19): siRNA sense strand
agaaaugacagaugugauc

SEQ ID NO: 2305751 - RNA, 19 nt, Homo sapiens
  misc_RNA (1)...(19): siRNA sense strand
cauuuaacgacguaauuga

SEQ ID NO: 2305752 - RNA, 19 nt, Homo sapiens
  misc_RNA (1)...(19): siRNA sense strand
agcagucuguggaaagaaa

SEQ ID NO: 2305753 - RNA, 19 nt, Homo sapiens
  misc_RNA (1)...(19): siRNA sense strand
acacaaaaguggccaaacu

SEQ ID NO: 2305754 - RNA, 19 nt, Homo sapiens
  misc_RNA (1)...(19): siRNA sense strand
uaaagaucacaguaaggaa

SEQ ID NO: 2305755 - RNA, 19 nt, Homo sapiens
  misc_RNA (1)...(19): siRNA sense strand
uaacgacguaauugaacaa

SEQ ID NO: 2305756 - RNA, 19 nt, Homo sapiens
  misc_RNA (1)...(19): siRNA sense strand
cagcuaguguauguggaaa

SEQ ID NO: 2305757 - RNA, 19 nt, Homo sapiens
  misc_RNA (1)...(19): siRNA sense strand
gcacaaacuaaaugaucuc

SEQ ID NO: 2305758 - RNA, 19 nt, Homo sapiens
  misc_RNA (1)...(19): siRNA sense strand
gagcagaggcuuaaggucu

SEQ ID NO: 2305759 - RNA, 19 nt, Homo sapiens
  misc_RNA (1)...(19): siRNA sense strand
gugagcgagcagaggcuua

SEQ ID NO: 2305760 - RNA, 19 nt, Homo sapiens
  misc_RNA (1)...(19): siRNA sense strand
gcauaaaauacaugaccaa

SEQ ID NO: 2305761 - RNA, 19 nt, Homo sapiens
  misc_RNA (1)...(19): siRNA sense strand
agagagagcuacugaggca

SEQ ID NO: 2305762 - RNA, 19 nt, Homo sapiens
  misc_RNA (1)...(19): siRNA sense strand
cuggagaaacauuggaaaa

SEQ ID NO: 2305763 - RNA, 19 nt, Homo sapiens
  misc_RNA (1)...(19): siRNA sense strand
ggaagaccauugagggagu

SEQ ID NO: 2305764 - RNA, 19 nt, Homo sapiens
  misc_RNA (1)...(19): siRNA sense strand
ugucuugggauguaggaaa

SEQ ID NO: 2305765 - RNA, 19 nt, Homo sapiens
  misc_RNA (1)...(19): siRNA sense strand
cuuccaaaccagaugaaaa

SEQ ID NO: 2305766 - RNA, 19 nt, Homo sapiens
  misc_RNA (1)...(19): siRNA sense strand
gggugaaauauaccaacaa

SEQ ID NO: 2305767 - RNA, 19 nt, Homo sapiens
  misc_RNA (1)...(19): siRNA sense strand
auaccaacaaugaggccua

SEQ ID NO: 2305768 - RNA, 19 nt, Homo sapiens
  misc_RNA (1)...(19): siRNA sense strand
agccagugaucaaagacaa

SEQ ID NO: 2305769 - RNA, 19 nt, Homo sapiens
  misc_RNA (1)...(19): siRNA sense strand
gcugggaaucugagcgcau

SEQ ID NO: 2305770 - RNA, 19 nt, Homo sapiens
  misc_RNA (1)...(19): siRNA sense strand
cauucgacccagucacaaa

SEQ ID NO: 2305771 - RNA, 19 nt, Homo sapiens
  misc_RNA (1)...(19): siRNA sense strand
aggugaaucgucuggauau

SEQ ID NO: 2305772 - RNA, 19 nt, Homo sapiens
  misc_RNA (1)...(19): siRNA sense strand
ccuggagaaacauuggaaa

SEQ ID NO: 2305773 - RNA, 19 nt, Homo sapiens
  misc_RNA (1)...(19): siRNA sense strand
gguugcaaucccaguguau

SEQ ID NO: 2305774 - RNA, 19 nt, Homo sapiens
  misc_RNA (1)...(19): siRNA sense strand
caucacaggaagcacgaau

SEQ ID NO: 2305775 - RNA, 19 nt, Homo sapiens
  misc_RNA (1)...(19): siRNA sense strand
ggggaagaccauugaggga

SEQ ID NO: 2305776 - RNA, 19 nt, Homo sapiens
  misc_RNA (1)...(19): siRNA sense strand
cuggagaggaggaggagaa

SEQ ID NO: 2305777 - RNA, 19 nt, Homo sapiens
  misc_RNA (1)...(19): siRNA sense strand
cagcagagcaccaggccau

SEQ ID NO: 2305778 - RNA, 19 nt, Homo sapiens
  misc_RNA (1)...(19): siRNA sense strand
ccaagaagcaggaagccuu

SEQ ID NO: 2305779 - RNA, 19 nt, Homo sapiens
  misc_RNA (1)...(19): siRNA sense strand
uggacgaggaagaguauau

SEQ ID NO: 2305780 - RNA, 19 nt, Homo sapiens
  misc_RNA (1)...(19): siRNA sense strand
gcuacacgagugaggacaa

SEQ ID NO: 2305781 - RNA, 19 nt, Homo sapiens
  misc_RNA (1)...(19): siRNA sense strand
gaguuugagaagaggcaga

SEQ ID NO: 2305782 - RNA, 19 nt, Homo sapiens
  misc_RNA (1)...(19): siRNA sense strand
ccuggaaguacaaggccaa

SEQ ID NO: 2305783 - RNA, 19 nt, Homo sapiens
  misc_RNA (1)...(19): siRNA sense strand
agaucauggagguggccaa

SEQ ID NO: 2305784 - RNA, 19 nt, Homo sapiens
  misc_RNA (1)...(19): siRNA sense strand
accuggaagccgaggagaa

SEQ ID NO: 2305785 - RNA, 19 nt, Homo sapiens
  misc_RNA (1)...(19): siRNA sense strand
ucuaccaggcugaggaaga

SEQ ID NO: 2305786 - RNA, 19 nt, Homo sapiens
  misc_RNA (1)...(19): siRNA sense strand
aggcugaggaagaguuuga

SEQ ID NO: 2305787 - RNA, 19 nt, Homo sapiens
  misc_RNA (1)...(19): siRNA sense strand
cugaggaagaguuugagaa

SEQ ID NO: 2305788 - RNA, 19 nt, Homo sapiens
  misc_RNA (1)...(19): siRNA sense strand
agaguugaagggucggaaa

SEQ ID NO: 2305789 - RNA, 19 nt, Homo sapiens
  misc_RNA (1)...(19): siRNA sense strand
aggaguaccuggaagccga

SEQ ID NO: 2305790 - RNA, 19 nt, Homo sapiens
  misc_RNA (1)...(19): siRNA sense strand
ccuggaagccgaggagaau

SEQ ID NO: 2305791 - RNA, 19 nt, Homo sapiens
  misc_RNA (1)...(19): siRNA sense strand
aagaguauaucgagggccu

SEQ ID NO: 2305792 - RNA, 19 nt, Homo sapiens
  misc_RNA (1)...(19): siRNA sense strand
uguacuauccagagggugu

SEQ ID NO: 2305793 - RNA, 19 nt, Homo sapiens
  misc_RNA (1)...(19): siRNA sense strand
gcggagagugacggagaau

SEQ ID NO: 2305794 - RNA, 19 nt, Homo sapiens
  misc_RNA (1)...(19): siRNA sense strand
gcgagauccgcgagcucaa

SEQ ID NO: 2305795 - RNA, 19 nt, Homo sapiens
  misc_RNA (1)...(19): siRNA sense strand
uggaggagcugacggacga

SEQ ID NO: 2305796 - RNA, 19 nt, Homo sapiens
  misc_RNA (1)...(19): siRNA sense strand
gagaaauacaagcuggaca

SEQ ID NO: 2305797 - RNA, 19 nt, Homo sapiens
  misc_RNA (1)...(19): siRNA sense strand
cauggagcugagugagaaa

SEQ ID NO: 2305798 - RNA, 19 nt, Homo sapiens
  misc_RNA (1)...(19): siRNA sense strand
ggggaagaucuuagaccaa

SEQ ID NO: 2305799 - RNA, 19 nt, Homo sapiens
  misc_RNA (1)...(19): siRNA sense strand
ugaacauggagcugaguga

SEQ ID NO: 2305800 - RNA, 19 nt, Homo sapiens
  misc_RNA (1)...(19): siRNA sense strand
acaagaugagugacggcaa

SEQ ID NO: 2305801 - RNA, 19 nt, Homo sapiens
  misc_RNA (1)...(19): siRNA sense strand
uggagcugagugagaaaua

SEQ ID NO: 2305802 - RNA, 19 nt, Homo sapiens
  misc_RNA (1)...(19): siRNA sense strand
aggaugaguucaagcgucu

SEQ ID NO: 2305803 - RNA, 19 nt, Homo sapiens
  misc_RNA (1)...(19): siRNA sense strand
ggacaaagagagcuaccca

SEQ ID NO: 2305804 - RNA, 19 nt, Homo sapiens
  misc_RNA (1)...(19): siRNA sense strand
aguuaagguuggagccauc

SEQ ID NO: 2305805 - RNA, 19 nt, Homo sapiens
  misc_RNA (1)...(19): siRNA sense strand
ggcugauugagaagaacaa

SEQ ID NO: 2305806 - RNA, 19 nt, Homo sapiens
  misc_RNA (1)...(19): siRNA sense strand
gagaagaacaagaugagug

SEQ ID NO: 2305807 - RNA, 19 nt, Homo sapiens
  misc_RNA (1)...(19): siRNA sense strand
cggaagagugcaaaggaau

SEQ ID NO: 2305808 - RNA, 19 nt, Homo sapiens
  misc_RNA (1)...(19): siRNA sense strand
ucgaauacauugaagccaa

SEQ ID NO: 2305809 - RNA, 19 nt, Homo sapiens
  misc_RNA (1)...(19): siRNA sense strand
agauguugaccuaggaauu

SEQ ID NO: 2305810 - RNA, 19 nt, Homo sapiens
  misc_RNA (1)...(19): siRNA sense strand
agggaaaagaugauguaaa

SEQ ID NO: 2305811 - RNA, 19 nt, Homo sapiens
  misc_RNA (1)...(19): siRNA sense strand
cauuaaacaaauugggagu

SEQ ID NO: 2305812 - RNA, 19 nt, Homo sapiens
  misc_RNA (1)...(19): siRNA sense strand
ccuaaagauugagaguaaa

SEQ ID NO: 2305813 - RNA, 19 nt, Homo sapiens
  misc_RNA (1)...(19): siRNA sense strand
caguaucaccuauggaaga

SEQ ID NO: 2305814 - RNA, 19 nt, Homo sapiens
  misc_RNA (1)...(19): siRNA sense strand
ucaaauaccuguuuccgaa

SEQ ID NO: 2305815 - RNA, 19 nt, Homo sapiens
  misc_RNA (1)...(19): siRNA sense strand
cugagugggaugagguuau

SEQ ID NO: 2305816 - RNA, 19 nt, Homo sapiens
  misc_RNA (1)...(19): siRNA sense strand
ggaagguagaagacagcuu

SEQ ID NO: 2305817 - RNA, 19 nt, Homo sapiens
  misc_RNA (1)...(19): siRNA sense strand
ccuguaaagacgugggacu

SEQ ID NO: 2305818 - RNA, 19 nt, Homo sapiens
  misc_RNA (1)...(19): siRNA sense strand
ccaaaauguaccaguguuu

SEQ ID NO: 2305819 - RNA, 19 nt, Homo sapiens
  misc_RNA (1)...(19): siRNA sense strand
guuuauugaguguagguau

SEQ ID NO: 2305820 - RNA, 19 nt, Homo sapiens
  misc_RNA (1)...(19): siRNA sense strand
agaacacauugacaggaaa

SEQ ID NO: 2305821 - RNA, 19 nt, Homo sapiens
  misc_RNA (1)...(19): siRNA sense strand
gaguagaaucaauaagaac

SEQ ID NO: 2305822 - RNA, 19 nt, Homo sapiens
  misc_RNA (1)...(19): siRNA sense strand
acuugagacuuaaagaaca

SEQ ID NO: 2305823 - RNA, 19 nt, Homo sapiens
  misc_RNA (1)...(19): siRNA sense strand
aaacaaauugggaguacca

SEQ ID NO: 2305824 - RNA, 19 nt, Homo sapiens
  misc_RNA (1)...(19): siRNA sense strand
acaaauuugggaagguaga

SEQ ID NO: 2305825 - RNA, 19 nt, Homo sapiens
  misc_RNA (1)...(19): siRNA sense strand
guauaaagaagcucgagca

SEQ ID NO: 2305826 - RNA, 19 nt, Homo sapiens
  misc_RNA (1)...(19): siRNA sense strand
ccuauggaagaaugaggaa

SEQ ID NO: 2305827 - RNA, 19 nt, Homo sapiens
  misc_RNA (1)...(19): siRNA sense strand
gagcaguggaacuugucua

SEQ ID NO: 2305828 - RNA, 19 nt, Homo sapiens
  misc_RNA (1)...(19): siRNA sense strand
cuaggaugguaucgacaau

SEQ ID NO: 2305829 - RNA, 19 nt, Homo sapiens
  misc_RNA (1)...(19): siRNA sense strand
cagcgaaaacauuaaacaa

SEQ ID NO: 2305830 - RNA, 19 nt, Homo sapiens
  misc_RNA (1)...(19): siRNA sense strand
ucaauaagaacgugguuuu

SEQ ID NO: 2305831 - RNA, 19 nt, Homo sapiens
  misc_RNA (1)...(19): siRNA sense strand
aggaagccgaauuggauuu

SEQ ID NO: 2305832 - RNA, 19 nt, Homo sapiens
  misc_RNA (1)...(19): siRNA sense strand
augaagaaacugaucacau

SEQ ID NO: 2305833 - RNA, 19 nt, Homo sapiens
  misc_RNA (1)...(19): siRNA sense strand
guccauguacccugugaaa

SEQ ID NO: 2305834 - RNA, 19 nt, Homo sapiens
  misc_RNA (1)...(19): siRNA sense strand
cugaguuuguagacaugaa

SEQ ID NO: 2305835 - RNA, 19 nt, Homo sapiens
  misc_RNA (1)...(19): siRNA sense strand
acaaauugggaguaccauu

SEQ ID NO: 2305836 - RNA, 19 nt, Homo sapiens
  misc_RNA (1)...(19): siRNA sense strand
cggcuaaggaagauggcuu

SEQ ID NO: 2305837 - RNA, 19 nt, Homo sapiens
  misc_RNA (1)...(19): siRNA sense strand
aagcagagcuggagucgga

SEQ ID NO: 2305838 - RNA, 19 nt, Homo sapiens
  misc_RNA (1)...(19): siRNA sense strand
agacagaucaguuggagga

SEQ ID NO: 2305839 - RNA, 19 nt, Homo sapiens
  misc_RNA (1)...(19): siRNA sense strand
ccccagaggaagaggagaa

SEQ ID NO: 2305840 - RNA, 19 nt, Homo sapiens
  misc_RNA (1)...(19): siRNA sense strand
gaggaagaggagaagcgaa

SEQ ID NO: 2305841 - RNA, 19 nt, Homo sapiens
  misc_RNA (1)...(19): siRNA sense strand
aggaagaggagaagcgaag

SEQ ID NO: 2305842 - RNA, 19 nt, Homo sapiens
  misc_RNA (1)...(19): siRNA sense strand
acgaaauaaacuagcagca

SEQ ID NO: 2305843 - RNA, 19 nt, Homo sapiens
  misc_RNA (1)...(19): siRNA sense strand
ccgggaacgaaauaaacua

SEQ ID NO: 2305844 - RNA, 19 nt, Homo sapiens
  misc_RNA (1)...(19): siRNA sense strand
gaucaguuggaggaagaaa

SEQ ID NO: 2305845 - RNA, 19 nt, Homo sapiens
  misc_RNA (1)...(19): siRNA sense strand
uggaaaaggccgagauuau

SEQ ID NO: 2305846 - RNA, 19 nt, Homo sapiens
  misc_RNA (1)...(19): siRNA sense strand
ccgacaagcaguccggcaa

SEQ ID NO: 2305847 - RNA, 19 nt, Homo sapiens
  misc_RNA (1)...(19): siRNA sense strand
cggcaagaagcguggauuc

SEQ ID NO: 2305848 - RNA, 19 nt, Homo sapiens
  misc_RNA (1)...(19): siRNA sense strand
uuaaaggagacguggcuga

SEQ ID NO: 2305849 - RNA, 19 nt, Homo sapiens
  misc_RNA (1)...(19): siRNA sense strand
gugcccacgccaagguuaa

SEQ ID NO: 2305850 - RNA, 19 nt, Homo sapiens
  misc_RNA (1)...(19): siRNA sense strand
acgccaagguuaagaagcu

SEQ ID NO: 2305851 - RNA, 19 nt, Homo sapiens
  misc_RNA (1)...(19): siRNA sense strand
gcucuuugucggaggccuu

SEQ ID NO: 2305852 - RNA, 19 nt, Homo sapiens
  misc_RNA (1)...(19): siRNA sense strand
gugggagcgacuacgguaa

SEQ ID NO: 2305853 - RNA, 19 nt, Homo sapiens
  misc_RNA (1)...(19): siRNA sense strand
ccaauguggaggaggcgga

SEQ ID NO: 2305854 - RNA, 19 nt, Homo sapiens
  misc_RNA (1)...(19): siRNA sense strand
ccgcaaggcugauggggua

SEQ ID NO: 2305855 - RNA, 19 nt, Homo sapiens
  misc_RNA (1)...(19): siRNA sense strand
gcaaccugcaagagggcaa

SEQ ID NO: 2305856 - RNA, 19 nt, Homo sapiens
  misc_RNA (1)...(19): siRNA sense strand
acgcaagccucgagaccga

SEQ ID NO: 2305857 - RNA, 19 nt, Homo sapiens
  misc_RNA (1)...(19): siRNA sense strand
cuguggagcccgaggagau

SEQ ID NO: 2305858 - RNA, 19 nt, Homo sapiens
  misc_RNA (1)...(19): siRNA sense strand
acgaggaggucgaaggaug

SEQ ID NO: 2305859 - RNA, 19 nt, Homo sapiens
  misc_RNA (1)...(19): siRNA sense strand
gggaggaagcaguguuucu

SEQ ID NO: 2305860 - RNA, 19 nt, Homo sapiens
  misc_RNA (1)...(19): siRNA sense strand
aggaugacgaggaggucga

SEQ ID NO: 2305861 - RNA, 19 nt, Homo sapiens
  misc_RNA (1)...(19): siRNA sense strand
gcuucuacuuugagggcuu

SEQ ID NO: 2305862 - RNA, 19 nt, Homo sapiens
  misc_RNA (1)...(19): siRNA sense strand
aggcaaccuacgauggaaa

SEQ ID NO: 2305863 - RNA, 19 nt, Homo sapiens
  misc_RNA (1)...(19): siRNA sense strand
cugcugaagaucuggaaga

SEQ ID NO: 2305864 - RNA, 19 nt, Homo sapiens
  misc_RNA (1)...(19): siRNA sense strand
uaccugaaauuuaaggcaa

SEQ ID NO: 2305865 - RNA, 19 nt, Homo sapiens
  misc_RNA (1)...(19): siRNA sense strand
cagcaagacuggagaggcu

SEQ ID NO: 2305866 - RNA, 19 nt, Homo sapiens
  misc_RNA (1)...(19): siRNA sense strand
cuggagaggcugagaccau

SEQ ID NO: 2305867 - RNA, 19 nt, Homo sapiens
  misc_RNA (1)...(19): siRNA sense strand
uguacaugauauaugggaa

SEQ ID NO: 2305868 - RNA, 19 nt, Homo sapiens
  misc_RNA (1)...(19): siRNA sense strand
gggaagagccagauccugu

SEQ ID NO: 2305869 - RNA, 19 nt, Homo sapiens
  misc_RNA (1)...(19): siRNA sense strand
gggcacucuaccuggcuaa

SEQ ID NO: 2305870 - RNA, 19 nt, Homo sapiens
  misc_RNA (1)...(19): siRNA sense strand
caguaaugaaggugguuuu

SEQ ID NO: 2305871 - RNA, 19 nt, Homo sapiens
  misc_RNA (1)...(19): siRNA sense strand
gcaagggcaucucugggaa

SEQ ID NO: 2305872 - RNA, 19 nt, Homo sapiens
  misc_RNA (1)...(19): siRNA sense strand
cagcaagacuggagaggcu

SEQ ID NO: 2305873 - RNA, 19 nt, Homo sapiens
  misc_RNA (1)...(19): siRNA sense strand
cuggagaggcugagaccau

SEQ ID NO: 2305874 - RNA, 19 nt, Homo sapiens
  misc_RNA (1)...(19): siRNA sense strand
uguacaugauauaugggaa

SEQ ID NO: 2305875 - RNA, 19 nt, Homo sapiens
  misc_RNA (1)...(19): siRNA sense strand
gggaagagccagauccugu

SEQ ID NO: 2305876 - RNA, 19 nt, Homo sapiens
  misc_RNA (1)...(19): siRNA sense strand
gggcacucuaccuggcuaa

SEQ ID NO: 2305877 - RNA, 19 nt, Homo sapiens
  misc_RNA (1)...(19): siRNA sense strand
caguaaugaaggugguuuu

SEQ ID NO: 2305878 - RNA, 19 nt, Homo sapiens
  misc_RNA (1)...(19): siRNA sense strand
gcaagggcaucucugggaa

SEQ ID NO: 2305879 - RNA, 19 nt, Homo sapiens
  misc_RNA (1)...(19): siRNA sense strand
gagcugagaugcacgguga

SEQ ID NO: 2305880 - RNA, 19 nt, Homo sapiens
  misc_RNA (1)...(19): siRNA sense strand
gugaagacccggcuggaga

SEQ ID NO: 2305881 - RNA, 19 nt, Homo sapiens
  misc_RNA (1)...(19): siRNA sense strand
cagaagauccugugcagca

SEQ ID NO: 2305882 - RNA, 19 nt, Homo sapiens
  misc_RNA (1)...(19): siRNA sense strand
uggaaagcgaggacugcaa

SEQ ID NO: 2305883 - RNA, 19 nt, Homo sapiens
  misc_RNA (1)...(19): siRNA sense strand
aaguaaagauucugaggag

SEQ ID NO: 2305884 - RNA, 19 nt, Homo sapiens
  misc_RNA (1)...(19): siRNA sense strand
ucagcaacguggaggagca

SEQ ID NO: 2305885 - RNA, 19 nt, Homo sapiens
  misc_RNA (1)...(19): siRNA sense strand
guaaagauucugaggaguc

SEQ ID NO: 2305886 - RNA, 19 nt, Homo sapiens
  misc_RNA (1)...(19): siRNA sense strand
uggccaacuaccuggagaa

SEQ ID NO: 2305887 - RNA, 19 nt, Homo sapiens
  misc_RNA (1)...(19): siRNA sense strand
accacgagcaggaaguaaa

SEQ ID NO: 2305888 - RNA, 19 nt, Homo sapiens
  misc_RNA (1)...(19): siRNA sense strand
ccugaauggccaugagaag

SEQ ID NO: 2305889 - RNA, 19 nt, Homo sapiens
  misc_RNA (1)...(19): siRNA sense strand
gccaugagaaggagaccau

SEQ ID NO: 2305890 - RNA, 19 nt, Homo sapiens
  misc_RNA (1)...(19): siRNA sense strand
gcccagaugcagagccuca

SEQ ID NO: 2305891 - RNA, 19 nt, Homo sapiens
  misc_RNA (1)...(19): siRNA sense strand
ggaaaggccauguggagga

SEQ ID NO: 2305892 - RNA, 19 nt, Homo sapiens
  misc_RNA (1)...(19): siRNA sense strand
ccgaagaugggcaggugaa

SEQ ID NO: 2305893 - RNA, 19 nt, Homo sapiens
  misc_RNA (1)...(19): siRNA sense strand
aggcauaccuggagggagc

SEQ ID NO: 2305894 - RNA, 19 nt, Homo sapiens
  misc_RNA (1)...(19): siRNA sense strand
ucuacuacggcgaggucaa

SEQ ID NO: 2305895 - RNA, 19 nt, Homo sapiens
  misc_RNA (1)...(19): siRNA sense strand
gugagaaggaggagugcgu

SEQ ID NO: 2305896 - RNA, 19 nt, Homo sapiens
  misc_RNA (1)...(19): siRNA sense strand
uggaguucgugcuggguga

SEQ ID NO: 2305897 - RNA, 19 nt, Homo sapiens
  misc_RNA (1)...(19): siRNA sense strand
ugaaggaguucgagcgccu

SEQ ID NO: 2305898 - RNA, 19 nt, Homo sapiens
  misc_RNA (1)...(19): siRNA sense strand
ugaacgugacggugcagaa

SEQ ID NO: 2305899 - RNA, 19 nt, Homo sapiens
  misc_RNA (1)...(19): siRNA sense strand
aagaugggcaggugaacau

SEQ ID NO: 2305900 - RNA, 19 nt, Homo sapiens
  misc_RNA (1)...(19): siRNA sense strand
acaaacuggcacugagcuu

SEQ ID NO: 2305901 - RNA, 19 nt, Homo sapiens
  misc_RNA (1)...(19): siRNA sense strand
ccgacaacacgcugcccaa

SEQ ID NO: 2305902 - RNA, 19 nt, Homo sapiens
  misc_RNA (1)...(19): siRNA sense strand
cgacaagaucaaauaccca

SEQ ID NO: 2305903 - RNA, 19 nt, Homo sapiens
  misc_RNA (1)...(19): siRNA sense strand
cuuuaaacacccugagaua

SEQ ID NO: 2305904 - RNA, 19 nt, Homo sapiens
  misc_RNA (1)...(19): siRNA sense strand
aagaauuggccaagaaaga

SEQ ID NO: 2305905 - RNA, 19 nt, Homo sapiens
  misc_RNA (1)...(19): siRNA sense strand
aggagaaggcuauggaaga

SEQ ID NO: 2305906 - RNA, 19 nt, Homo sapiens
  misc_RNA (1)...(19): siRNA sense strand
cacaaagggcaaagagauu

SEQ ID NO: 2305907 - RNA, 19 nt, Homo sapiens
  misc_RNA (1)...(19): siRNA sense strand
auuaaagaauuucgggcua

SEQ ID NO: 2305908 - RNA, 19 nt, Homo sapiens
  misc_RNA (1)...(19): siRNA sense strand
ggggagaacucuaggacuu

SEQ ID NO: 2305909 - RNA, 19 nt, Homo sapiens
  misc_RNA (1)...(19): siRNA sense strand
agaacaagcgagaagagaa

SEQ ID NO: 2305910 - RNA, 19 nt, Homo sapiens
  misc_RNA (1)...(19): siRNA sense strand
cugaaauaccauugaggau

SEQ ID NO: 2305911 - RNA, 19 nt, Homo sapiens
  misc_RNA (1)...(19): siRNA sense strand
gagcaggcuagcagacaaa

SEQ ID NO: 2305912 - RNA, 19 nt, Homo sapiens
  misc_RNA (1)...(19): siRNA sense strand
gggcaaagagauugauuuu

SEQ ID NO: 2305913 - RNA, 19 nt, Homo sapiens
  misc_RNA (1)...(19): siRNA sense strand
cagcaaggccacugguaca

SEQ ID NO: 2305914 - RNA, 19 nt, Homo sapiens
  misc_RNA (1)...(19): siRNA sense strand
ucuucgagcuaaagggaga

SEQ ID NO: 2305915 - RNA, 19 nt, Homo sapiens
  misc_RNA (1)...(19): siRNA sense strand
gcgaggagauggaagagca

SEQ ID NO: 2305916 - RNA, 19 nt, Homo sapiens
  misc_RNA (1)...(19): siRNA sense strand
gagaagagaagaaggccca

SEQ ID NO: 2305917 - RNA, 19 nt, Homo sapiens
  misc_RNA (1)...(19): siRNA sense strand
gggaaagcccagaaugcau

SEQ ID NO: 2305918 - RNA, 19 nt, Homo sapiens
  misc_RNA (1)...(19): siRNA sense strand
ugguagaucuggcagggaa

SEQ ID NO: 2305919 - RNA, 19 nt, Homo sapiens
  misc_RNA (1)...(19): siRNA sense strand
ugacacaggugcugaggga

SEQ ID NO: 2305920 - RNA, 19 nt, Homo sapiens
  misc_RNA (1)...(19): siRNA sense strand
aaaugaagaacaagcgaga

SEQ ID NO: 2305921 - RNA, 19 nt, Homo sapiens
  misc_RNA (1)...(19): siRNA sense strand
cgaggagauggaagagcaa

SEQ ID NO: 2305922 - RNA, 19 nt, Homo sapiens
  misc_RNA (1)...(19): siRNA sense strand
gcaucacggcucaggagaa

SEQ ID NO: 2305923 - RNA, 19 nt, Homo sapiens
  misc_RNA (1)...(19): siRNA sense strand
uugugaaggaaguggaaaa

SEQ ID NO: 2305924 - RNA, 19 nt, Homo sapiens
  misc_RNA (1)...(19): siRNA sense strand
ccacugaauaagcaagaau

SEQ ID NO: 2305925 - RNA, 19 nt, Homo sapiens
  misc_RNA (1)...(19): siRNA sense strand
ccaaagggaucuaugccau

SEQ ID NO: 2305926 - RNA, 19 nt, Homo sapiens
  misc_RNA (1)...(19): siRNA sense strand
agaauaugugucuguguua

SEQ ID NO: 2305927 - RNA, 19 nt, Homo sapiens
  misc_RNA (1)...(19): siRNA sense strand
gguagaucuggcagggaau

SEQ ID NO: 2305928 - RNA, 19 nt, Homo sapiens
  misc_RNA (1)...(19): siRNA sense strand
gaucauacagcaaggacca

SEQ ID NO: 2305929 - RNA, 19 nt, Homo sapiens
  misc_RNA (1)...(19): siRNA sense strand
auguaacaauccagaaaca

SEQ ID NO: 2305930 - RNA, 19 nt, Homo sapiens
  misc_RNA (1)...(19): siRNA sense strand
agaaugacauggaggugga

SEQ ID NO: 2305931 - RNA, 19 nt, Homo sapiens
  misc_RNA (1)...(19): siRNA sense strand
aggcuauggaagagcucaa

SEQ ID NO: 2305932 - RNA, 19 nt, Homo sapiens
  misc_RNA (1)...(19): siRNA sense strand
auguaaggacugugaacuu

SEQ ID NO: 2305933 - RNA, 19 nt, Homo sapiens
  misc_RNA (1)...(19): siRNA sense strand
cugugaacuuggagaaauc

SEQ ID NO: 2305934 - RNA, 19 nt, Homo sapiens
  misc_RNA (1)...(19): siRNA sense strand
gcauggagggcgcagaaau

SEQ ID NO: 2305935 - RNA, 19 nt, Homo sapiens
  misc_RNA (1)...(19): siRNA sense strand
gagcuggaggagaaggcua

SEQ ID NO: 2305936 - RNA, 19 nt, Homo sapiens
  misc_RNA (1)...(19): siRNA sense strand
cagaaggaggugccacaaa

SEQ ID NO: 2305937 - RNA, 19 nt, Homo sapiens
  misc_RNA (1)...(19): siRNA sense strand
agcaagaauuggccaagaa

SEQ ID NO: 2305938 - RNA, 19 nt, Homo sapiens
  misc_RNA (1)...(19): siRNA sense strand
cugcaggagcaucugguua

SEQ ID NO: 2305939 - RNA, 19 nt, Homo sapiens
  misc_RNA (1)...(19): siRNA sense strand
ggccacugguacagacaau

SEQ ID NO: 2305940 - RNA, 19 nt, Homo sapiens
  misc_RNA (1)...(19): siRNA sense strand
cagaaaucaacaagagucu

SEQ ID NO: 2305941 - RNA, 19 nt, Homo sapiens
  misc_RNA (1)...(19): siRNA sense strand
acacaggugcugagggacu

SEQ ID NO: 2305942 - RNA, 19 nt, Homo sapiens
  misc_RNA (1)...(19): siRNA sense strand
acaagcgagaagagaagaa

SEQ ID NO: 2305943 - RNA, 19 nt, Homo sapiens
  misc_RNA (1)...(19): siRNA sense strand
gcccgaaugauuaaagaau

SEQ ID NO: 2305944 - RNA, 19 nt, Homo sapiens
  misc_RNA (1)...(19): siRNA sense strand
gcaggcuagcagacaaaua

SEQ ID NO: 2305945 - RNA, 19 nt, Homo sapiens
  misc_RNA (1)...(19): siRNA sense strand
gucuacagguucacagcaa

SEQ ID NO: 2305946 - RNA, 19 nt, Homo sapiens
  misc_RNA (1)...(19): siRNA sense strand
cugcaaacccugugaacuc

SEQ ID NO: 2305947 - RNA, 19 nt, Homo sapiens
  misc_RNA (1)...(19): siRNA sense strand
cuaucgaagagcacagaau

SEQ ID NO: 2305948 - RNA, 19 nt, Homo sapiens
  misc_RNA (1)...(19): siRNA sense strand
uuaacaaaguaucuggaga

SEQ ID NO: 2305949 - RNA, 19 nt, Homo sapiens
  misc_RNA (1)...(19): siRNA sense strand
cagaaugcauccaaaggga

SEQ ID NO: 2305950 - RNA, 19 nt, Homo sapiens
  misc_RNA (1)...(19): siRNA sense strand
gcaaguucucuuugguaga

SEQ ID NO: 2305951 - RNA, 19 nt, Homo sapiens
  misc_RNA (1)...(19): siRNA sense strand
caaggagaucauacagcaa

SEQ ID NO: 2305952 - RNA, 19 nt, Homo sapiens
  misc_RNA (1)...(19): siRNA sense strand
ugaugauguggcugcaaua

SEQ ID NO: 2305953 - RNA, 19 nt, Homo sapiens
  misc_RNA (1)...(19): siRNA sense strand
agaagaaggcccagaacuc

SEQ ID NO: 2305954 - RNA, 19 nt, Homo sapiens
  misc_RNA (1)...(19): siRNA sense strand
agagcaggcuagcagacaa

SEQ ID NO: 2305955 - RNA, 19 nt, Homo sapiens
  misc_RNA (1)...(19): siRNA sense strand
ggaaguugggccuggaagu

SEQ ID NO: 2305956 - RNA, 19 nt, Homo sapiens
  misc_RNA (1)...(19): siRNA sense strand
aggcauaagcuccugugaa

SEQ ID NO: 2305957 - RNA, 19 nt, Homo sapiens
  misc_RNA (1)...(19): siRNA sense strand
ccuggaagucuaugugaca

SEQ ID NO: 2305958 - RNA, 19 nt, Homo sapiens
  misc_RNA (1)...(19): siRNA sense strand
ccaagaaagaaauugaugu

SEQ ID NO: 2305959 - RNA, 19 nt, Homo sapiens
  misc_RNA (1)...(19): siRNA sense strand
aaucuuugaagguggaaaa

SEQ ID NO: 2305960 - RNA, 19 nt, Homo sapiens
  misc_RNA (1)...(19): siRNA sense strand
gaggaaacgguuagugaaa

SEQ ID NO: 2305961 - RNA, 19 nt, Homo sapiens
  misc_RNA (1)...(19): siRNA sense strand
agaagcagcuggaggauga

SEQ ID NO: 2305962 - RNA, 19 nt, Homo sapiens
  misc_RNA (1)...(19): siRNA sense strand
ccaacaugaacgugcauua

SEQ ID NO: 2305963 - RNA, 19 nt, Homo sapiens
  misc_RNA (1)...(19): siRNA sense strand
ggaaacgguuagugaaacu

SEQ ID NO: 2305964 - RNA, 19 nt, Homo sapiens
  misc_RNA (1)...(19): siRNA sense strand
gcauuauaucccagcagaa

SEQ ID NO: 2305965 - RNA, 19 nt, Homo sapiens
  misc_RNA (1)...(19): siRNA sense strand
cuacauuaacaggaggaaa

SEQ ID NO: 2305966 - RNA, 19 nt, Homo sapiens
  misc_RNA (1)...(19): siRNA sense strand
ggaggaaacgguuagugaa

SEQ ID NO: 2305967 - RNA, 19 nt, Homo sapiens
  misc_RNA (1)...(19): siRNA sense strand
ugaagaagcagcuggagga

SEQ ID NO: 2305968 - RNA, 19 nt, Homo sapiens
  misc_RNA (1)...(19): siRNA sense strand
agaaaagaauguugaccuu

SEQ ID NO: 2305969 - RNA, 19 nt, Homo sapiens
  misc_RNA (1)...(19): siRNA sense strand
ccaauuaaggaaagugcca

SEQ ID NO: 2305970 - RNA, 19 nt, Homo sapiens
  misc_RNA (1)...(19): siRNA sense strand
aggaggaaacgguuaguga

SEQ ID NO: 2305971 - RNA, 19 nt, Homo sapiens
  misc_RNA (1)...(19): siRNA sense strand
acaugaacgugcauuauau

SEQ ID NO: 2305972 - RNA, 19 nt, Homo sapiens
  misc_RNA (1)...(19): siRNA sense strand
acucuauccauaugaacaa

SEQ ID NO: 2305973 - RNA, 19 nt, Homo sapiens
  misc_RNA (1)...(19): siRNA sense strand
gaggaaacgguuagugaaa

SEQ ID NO: 2305974 - RNA, 19 nt, Homo sapiens
  misc_RNA (1)...(19): siRNA sense strand
gaaagaagaaccagagcuu

SEQ ID NO: 2305975 - RNA, 19 nt, Homo sapiens
  misc_RNA (1)...(19): siRNA sense strand
agaagcagcuggaggauga

SEQ ID NO: 2305976 - RNA, 19 nt, Homo sapiens
  misc_RNA (1)...(19): siRNA sense strand
ccaacaugaacgugcauua

SEQ ID NO: 2305977 - RNA, 19 nt, Homo sapiens
  misc_RNA (1)...(19): siRNA sense strand
ggaugaagaaauaagugaa

SEQ ID NO: 2305978 - RNA, 19 nt, Homo sapiens
  misc_RNA (1)...(19): siRNA sense strand
gggaaauggaagaaagaac

SEQ ID NO: 2305979 - RNA, 19 nt, Homo sapiens
  misc_RNA (1)...(19): siRNA sense strand
ggaaacgguuagugaaacu

SEQ ID NO: 2305980 - RNA, 19 nt, Homo sapiens
  misc_RNA (1)...(19): siRNA sense strand
gcauuauaucccagcagaa

SEQ ID NO: 2305981 - RNA, 19 nt, Homo sapiens
  misc_RNA (1)...(19): siRNA sense strand
gcguaaauuggcaagaaaa

SEQ ID NO: 2305982 - RNA, 19 nt, Homo sapiens
  misc_RNA (1)...(19): siRNA sense strand
gugaagaaagugauauuga

SEQ ID NO: 2305983 - RNA, 19 nt, Homo sapiens
  misc_RNA (1)...(19): siRNA sense strand
cuacauuaacaggaggaaa

SEQ ID NO: 2305984 - RNA, 19 nt, Homo sapiens
  misc_RNA (1)...(19): siRNA sense strand
aagaaaagacugaagugaa

SEQ ID NO: 2305985 - RNA, 19 nt, Homo sapiens
  misc_RNA (1)...(19): siRNA sense strand
ggaggaaacgguuagugaa

SEQ ID NO: 2305986 - RNA, 19 nt, Homo sapiens
  misc_RNA (1)...(19): siRNA sense strand
gaaccagagcuucaaacaa

SEQ ID NO: 2305987 - RNA, 19 nt, Homo sapiens
  misc_RNA (1)...(19): siRNA sense strand
ugaagaagcagcuggagga

SEQ ID NO: 2305988 - RNA, 19 nt, Homo sapiens
  misc_RNA (1)...(19): siRNA sense strand
gacugaagugaaagaagaa

SEQ ID NO: 2305989 - RNA, 19 nt, Homo sapiens
  misc_RNA (1)...(19): siRNA sense strand
gugaaaacaaggaugaaga

SEQ ID NO: 2305990 - RNA, 19 nt, Homo sapiens
  misc_RNA (1)...(19): siRNA sense strand
agaaaagaauguugaccuu

SEQ ID NO: 2305991 - RNA, 19 nt, Homo sapiens
  misc_RNA (1)...(19): siRNA sense strand
ccaauuaaggaaagugcca

SEQ ID NO: 2305992 - RNA, 19 nt, Homo sapiens
  misc_RNA (1)...(19): siRNA sense strand
aggaugaagaaauaaguga

SEQ ID NO: 2305993 - RNA, 19 nt, Homo sapiens
  misc_RNA (1)...(19): siRNA sense strand
aggaggaaacgguuaguga

SEQ ID NO: 2305994 - RNA, 19 nt, Homo sapiens
  misc_RNA (1)...(19): siRNA sense strand
uccucugacuguagugaaa

SEQ ID NO: 2305995 - RNA, 19 nt, Homo sapiens
  misc_RNA (1)...(19): siRNA sense strand
acaugaacgugcauuauau

SEQ ID NO: 2305996 - RNA, 19 nt, Homo sapiens
  misc_RNA (1)...(19): siRNA sense strand
aagggaaauggaagaaaga

SEQ ID NO: 2305997 - RNA, 19 nt, Homo sapiens
  misc_RNA (1)...(19): siRNA sense strand
acucuauccauaugaacaa

SEQ ID NO: 2305998 - RNA, 19 nt, Homo sapiens
  misc_RNA (1)...(19): siRNA sense strand
ggaagaaagaagaagcgcu

SEQ ID NO: 2305999 - RNA, 19 nt, Homo sapiens
  misc_RNA (1)...(19): siRNA sense strand
agaaagaagaagcgcugca

SEQ ID NO: 2306000 - RNA, 19 nt, Homo sapiens
  misc_RNA (1)...(19): siRNA sense strand
gaagaaagaagaagcgcug

SEQ ID NO: 2306001 - RNA, 19 nt, Homo sapiens
  misc_RNA (1)...(19): siRNA sense strand
gaggaaacgguuagugaaa

SEQ ID NO: 2306002 - RNA, 19 nt, Homo sapiens
  misc_RNA (1)...(19): siRNA sense strand
gaaagaagaaccagagcuu

SEQ ID NO: 2306003 - RNA, 19 nt, Homo sapiens
  misc_RNA (1)...(19): siRNA sense strand
agaagcagcuggaggauga

SEQ ID NO: 2306004 - RNA, 19 nt, Homo sapiens
  misc_RNA (1)...(19): siRNA sense strand
ccaacaugaacgugcauua

SEQ ID NO: 2306005 - RNA, 19 nt, Homo sapiens
  misc_RNA (1)...(19): siRNA sense strand
ggaugaagaaauaagugaa

SEQ ID NO: 2306006 - RNA, 19 nt, Homo sapiens
  misc_RNA (1)...(19): siRNA sense strand
gggaaauggaagaaagaac

SEQ ID NO: 2306007 - RNA, 19 nt, Homo sapiens
  misc_RNA (1)...(19): siRNA sense strand
ggaaacgguuagugaaacu

SEQ ID NO: 2306008 - RNA, 19 nt, Homo sapiens
  misc_RNA (1)...(19): siRNA sense strand
gcauuauaucccagcagaa

SEQ ID NO: 2306009 - RNA, 19 nt, Homo sapiens
  misc_RNA (1)...(19): siRNA sense strand
gcguaaauuggcaagaaaa

SEQ ID NO: 2306010 - RNA, 19 nt, Homo sapiens
  misc_RNA (1)...(19): siRNA sense strand
gugaagaaagugauauuga

SEQ ID NO: 2306011 - RNA, 19 nt, Homo sapiens
  misc_RNA (1)...(19): siRNA sense strand
cuacauuaacaggaggaaa

SEQ ID NO: 2306012 - RNA, 19 nt, Homo sapiens
  misc_RNA (1)...(19): siRNA sense strand
aagaaaagacugaagugaa

SEQ ID NO: 2306013 - RNA, 19 nt, Homo sapiens
  misc_RNA (1)...(19): siRNA sense strand
ggaggaaacgguuagugaa

SEQ ID NO: 2306014 - RNA, 19 nt, Homo sapiens
  misc_RNA (1)...(19): siRNA sense strand
gaaccagagcuucaaacaa

SEQ ID NO: 2306015 - RNA, 19 nt, Homo sapiens
  misc_RNA (1)...(19): siRNA sense strand
ugaagaagcagcuggagga

SEQ ID NO: 2306016 - RNA, 19 nt, Homo sapiens
  misc_RNA (1)...(19): siRNA sense strand
gacugaagugaaagaagaa

SEQ ID NO: 2306017 - RNA, 19 nt, Homo sapiens
  misc_RNA (1)...(19): siRNA sense strand
gugaaaacaaggaugaaga

SEQ ID NO: 2306018 - RNA, 19 nt, Homo sapiens
  misc_RNA (1)...(19): siRNA sense strand
agaaaagaauguugaccuu

SEQ ID NO: 2306019 - RNA, 19 nt, Homo sapiens
  misc_RNA (1)...(19): siRNA sense strand
ccaauuaaggaaagugcca

SEQ ID NO: 2306020 - RNA, 19 nt, Homo sapiens
  misc_RNA (1)...(19): siRNA sense strand
aggaugaagaaauaaguga

SEQ ID NO: 2306021 - RNA, 19 nt, Homo sapiens
  misc_RNA (1)...(19): siRNA sense strand
aggaggaaacgguuaguga

SEQ ID NO: 2306022 - RNA, 19 nt, Homo sapiens
  misc_RNA (1)...(19): siRNA sense strand
uccucugacuguagugaaa

SEQ ID NO: 2306023 - RNA, 19 nt, Homo sapiens
  misc_RNA (1)...(19): siRNA sense strand
acaugaacgugcauuauau

SEQ ID NO: 2306024 - RNA, 19 nt, Homo sapiens
  misc_RNA (1)...(19): siRNA sense strand
aagggaaauggaagaaaga

SEQ ID NO: 2306025 - RNA, 19 nt, Homo sapiens
  misc_RNA (1)...(19): siRNA sense strand
acucuauccauaugaacaa

SEQ ID NO: 2306026 - RNA, 19 nt, Homo sapiens
  misc_RNA (1)...(19): siRNA sense strand
ggaagaaagaagaagcgcu

SEQ ID NO: 2306027 - RNA, 19 nt, Homo sapiens
  misc_RNA (1)...(19): siRNA sense strand
agaaagaagaagcgcugca

SEQ ID NO: 2306028 - RNA, 19 nt, Homo sapiens
  misc_RNA (1)...(19): siRNA sense strand
gaagaaagaagaagcgcug

SEQ ID NO: 2306029 - RNA, 19 nt, Homo sapiens
  misc_RNA (1)...(19): siRNA sense strand
gaggaaacgguuagugaaa

SEQ ID NO: 2306030 - RNA, 19 nt, Homo sapiens
  misc_RNA (1)...(19): siRNA sense strand
gaaagaagaaccagagcuu

SEQ ID NO: 2306031 - RNA, 19 nt, Homo sapiens
  misc_RNA (1)...(19): siRNA sense strand
agaagcagcuggaggauga

SEQ ID NO: 2306032 - RNA, 19 nt, Homo sapiens
  misc_RNA (1)...(19): siRNA sense strand
ccaacaugaacgugcauua

SEQ ID NO: 2306033 - RNA, 19 nt, Homo sapiens
  misc_RNA (1)...(19): siRNA sense strand
ggaugaagaaauaagugaa

SEQ ID NO: 2306034 - RNA, 19 nt, Homo sapiens
  misc_RNA (1)...(19): siRNA sense strand
gggaaauggaagaaagaac

SEQ ID NO: 2306035 - RNA, 19 nt, Homo sapiens
  misc_RNA (1)...(19): siRNA sense strand
ggaaacgguuagugaaacu

SEQ ID NO: 2306036 - RNA, 19 nt, Homo sapiens
  misc_RNA (1)...(19): siRNA sense strand
gcauuauaucccagcagaa

SEQ ID NO: 2306037 - RNA, 19 nt, Homo sapiens
  misc_RNA (1)...(19): siRNA sense strand
gcguaaauuggcaagaaaa

SEQ ID NO: 2306038 - RNA, 19 nt, Homo sapiens
  misc_RNA (1)...(19): siRNA sense strand
gugaagaaagugauauuga

SEQ ID NO: 2306039 - RNA, 19 nt, Homo sapiens
  misc_RNA (1)...(19): siRNA sense strand
cuacauuaacaggaggaaa

SEQ ID NO: 2306040 - RNA, 19 nt, Homo sapiens
  misc_RNA (1)...(19): siRNA sense strand
aagaaaagacugaagugaa

SEQ ID NO: 2306041 - RNA, 19 nt, Homo sapiens
  misc_RNA (1)...(19): siRNA sense strand
ggaggaaacgguuagugaa

SEQ ID NO: 2306042 - RNA, 19 nt, Homo sapiens
  misc_RNA (1)...(19): siRNA sense strand
gaaccagagcuucaaacaa

SEQ ID NO: 2306043 - RNA, 19 nt, Homo sapiens
  misc_RNA (1)...(19): siRNA sense strand
ugaagaagcagcuggagga

SEQ ID NO: 2306044 - RNA, 19 nt, Homo sapiens
  misc_RNA (1)...(19): siRNA sense strand
gacugaagugaaagaagaa

SEQ ID NO: 2306045 - RNA, 19 nt, Homo sapiens
  misc_RNA (1)...(19): siRNA sense strand
gugaaaacaaggaugaaga

SEQ ID NO: 2306046 - RNA, 19 nt, Homo sapiens
  misc_RNA (1)...(19): siRNA sense strand
agaaaagaauguugaccuu

SEQ ID NO: 2306047 - RNA, 19 nt, Homo sapiens
  misc_RNA (1)...(19): siRNA sense strand
ccaauuaaggaaagugcca

SEQ ID NO: 2306048 - RNA, 19 nt, Homo sapiens
  misc_RNA (1)...(19): siRNA sense strand
aggaugaagaaauaaguga

SEQ ID NO: 2306049 - RNA, 19 nt, Homo sapiens
  misc_RNA (1)...(19): siRNA sense strand
aggaggaaacgguuaguga

SEQ ID NO: 2306050 - RNA, 19 nt, Homo sapiens
  misc_RNA (1)...(19): siRNA sense strand
uccucugacuguagugaaa

SEQ ID NO: 2306051 - RNA, 19 nt, Homo sapiens
  misc_RNA (1)...(19): siRNA sense strand
acaugaacgugcauuauau

SEQ ID NO: 2306052 - RNA, 19 nt, Homo sapiens
  misc_RNA (1)...(19): siRNA sense strand
aagggaaauggaagaaaga

SEQ ID NO: 2306053 - RNA, 19 nt, Homo sapiens
  misc_RNA (1)...(19): siRNA sense strand
acucuauccauaugaacaa

SEQ ID NO: 2306054 - RNA, 19 nt, Homo sapiens
  misc_RNA (1)...(19): siRNA sense strand
ggaagaaagaagaagcgcu

SEQ ID NO: 2306055 - RNA, 19 nt, Homo sapiens
  misc_RNA (1)...(19): siRNA sense strand
agaaagaagaagcgcugca

SEQ ID NO: 2306056 - RNA, 19 nt, Homo sapiens
  misc_RNA (1)...(19): siRNA sense strand
gaagaaagaagaagcgcug

SEQ ID NO: 2306057 - RNA, 19 nt, Homo sapiens
  misc_RNA (1)...(19): siRNA sense strand
auccaugagcagugggaaa

SEQ ID NO: 2306058 - RNA, 19 nt, Homo sapiens
  misc_RNA (1)...(19): siRNA sense strand
cgguaugaguauaaggaug

SEQ ID NO: 2306059 - RNA, 19 nt, Homo sapiens
  misc_RNA (1)...(19): siRNA sense strand
gggagaagacuuagacccu

SEQ ID NO: 2306060 - RNA, 19 nt, Homo sapiens
  misc_RNA (1)...(19): siRNA sense strand
ugggaaaaggcuaauguaa

SEQ ID NO: 2306061 - RNA, 19 nt, Homo sapiens
  misc_RNA (1)...(19): siRNA sense strand
auugggaaguggugacaca

SEQ ID NO: 2306062 - RNA, 19 nt, Homo sapiens
  misc_RNA (1)...(19): siRNA sense strand
auccaugagcagugggaaa

SEQ ID NO: 2306063 - RNA, 19 nt, Homo sapiens
  misc_RNA (1)...(19): siRNA sense strand
cgguaugaguauaaggaug

SEQ ID NO: 2306064 - RNA, 19 nt, Homo sapiens
  misc_RNA (1)...(19): siRNA sense strand
gggagaagacuuagacccu

SEQ ID NO: 2306065 - RNA, 19 nt, Homo sapiens
  misc_RNA (1)...(19): siRNA sense strand
ugggaaaaggcuaauguaa

SEQ ID NO: 2306066 - RNA, 19 nt, Homo sapiens
  misc_RNA (1)...(19): siRNA sense strand
auugggaaguggugacaca

SEQ ID NO: 2306067 - RNA, 19 nt, Homo sapiens
  misc_RNA (1)...(19): siRNA sense strand
cgguaugaguauaaggaug

SEQ ID NO: 2306068 - RNA, 19 nt, Homo sapiens
  misc_RNA (1)...(19): siRNA sense strand
auugggaaguggugacaca

SEQ ID NO: 2306069 - RNA, 19 nt, Homo sapiens
  misc_RNA (1)...(19): siRNA sense strand
agguagaagaaaugcaaua

SEQ ID NO: 2306070 - RNA, 19 nt, Homo sapiens
  misc_RNA (1)...(19): siRNA sense strand
cagcaaaaucugaaagcua

SEQ ID NO: 2306071 - RNA, 19 nt, Homo sapiens
  misc_RNA (1)...(19): siRNA sense strand
ucaacaagacagaagguga

SEQ ID NO: 2306072 - RNA, 19 nt, Homo sapiens
  misc_RNA (1)...(19): siRNA sense strand
aggugaagaagaugcacaa

SEQ ID NO: 2306073 - RNA, 19 nt, Homo sapiens
  misc_RNA (1)...(19): siRNA sense strand
cugcaaguggcaacagcaa

SEQ ID NO: 2306074 - RNA, 19 nt, Homo sapiens
  misc_RNA (1)...(19): siRNA sense strand
ccagggagaagcagcaaaa

SEQ ID NO: 2306075 - RNA, 19 nt, Homo sapiens
  misc_RNA (1)...(19): siRNA sense strand
agguagaagaaaugcaaua

SEQ ID NO: 2306076 - RNA, 19 nt, Homo sapiens
  misc_RNA (1)...(19): siRNA sense strand
cagcaaaaucugaaagcua

SEQ ID NO: 2306077 - RNA, 19 nt, Homo sapiens
  misc_RNA (1)...(19): siRNA sense strand
ucaacaagacagaagguga

SEQ ID NO: 2306078 - RNA, 19 nt, Homo sapiens
  misc_RNA (1)...(19): siRNA sense strand
aggugaagaagaugcacaa

SEQ ID NO: 2306079 - RNA, 19 nt, Homo sapiens
  misc_RNA (1)...(19): siRNA sense strand
cugcaaguggcaacagcaa

SEQ ID NO: 2306080 - RNA, 19 nt, Homo sapiens
  misc_RNA (1)...(19): siRNA sense strand
ccagggagaagcagcaaaa

SEQ ID NO: 2306081 - RNA, 19 nt, Homo sapiens
  misc_RNA (1)...(19): siRNA sense strand
cuggauaaauugugggaga

SEQ ID NO: 2306082 - RNA, 19 nt, Homo sapiens
  misc_RNA (1)...(19): siRNA sense strand
ccgugaaagagauggaaaa

SEQ ID NO: 2306083 - RNA, 19 nt, Homo sapiens
  misc_RNA (1)...(19): siRNA sense strand
ccaaaugcauccuggcaga

SEQ ID NO: 2306084 - RNA, 19 nt, Homo sapiens
  misc_RNA (1)...(19): siRNA sense strand
uugaaacauccgugaaaga

SEQ ID NO: 2306085 - RNA, 19 nt, Homo sapiens
  misc_RNA (1)...(19): siRNA sense strand
ggauaaauugugggagagu

SEQ ID NO: 2306086 - RNA, 19 nt, Homo sapiens
  misc_RNA (1)...(19): siRNA sense strand
cagaaaagcuacacccuga

SEQ ID NO: 2306087 - RNA, 19 nt, Homo sapiens
  misc_RNA (1)...(19): siRNA sense strand
cgggagacaguguggaacu

SEQ ID NO: 2306088 - RNA, 19 nt, Homo sapiens
  misc_RNA (1)...(19): siRNA sense strand
gcuuccgagucaaggagaa

SEQ ID NO: 2306089 - RNA, 19 nt, Homo sapiens
  misc_RNA (1)...(19): siRNA sense strand
cgcagaagauuguaaggca

SEQ ID NO: 2306090 - RNA, 19 nt, Homo sapiens
  misc_RNA (1)...(19): siRNA sense strand
auggcagaucagaaagaaa

SEQ ID NO: 2306091 - RNA, 19 nt, Homo sapiens
  misc_RNA (1)...(19): siRNA sense strand
agaaaggaaaugaugacca

SEQ ID NO: 2306092 - RNA, 19 nt, Homo sapiens
  misc_RNA (1)...(19): siRNA sense strand
cgauggcagaucagaaaga

SEQ ID NO: 2306093 - RNA, 19 nt, Homo sapiens
  misc_RNA (1)...(19): siRNA sense strand
gcagaagauuguaaggcag

SEQ ID NO: 2306094 - RNA, 19 nt, Homo sapiens
  misc_RNA (1)...(19): siRNA sense strand
ccugguacgccauggccaa

SEQ ID NO: 2306095 - RNA, 19 nt, Homo sapiens
  misc_RNA (1)...(19): siRNA sense strand
gccucuuucugcaggacaa

SEQ ID NO: 2306096 - RNA, 19 nt, Homo sapiens
  misc_RNA (1)...(19): siRNA sense strand
acaacaucgucgcggaguu

SEQ ID NO: 2306097 - RNA, 19 nt, Homo sapiens
  misc_RNA (1)...(19): siRNA sense strand
aagccagagacaugggaaa

SEQ ID NO: 2306098 - RNA, 19 nt, Homo sapiens
  misc_RNA (1)...(19): siRNA sense strand
aggaagaaguuugagaaaa

SEQ ID NO: 2306099 - RNA, 19 nt, Homo sapiens
  misc_RNA (1)...(19): siRNA sense strand
ccuauaaugaaaagaggaa

SEQ ID NO: 2306100 - RNA, 19 nt, Homo sapiens
  misc_RNA (1)...(19): siRNA sense strand
aagaaugccaagaugguau

SEQ ID NO: 2306101 - RNA, 19 nt, Homo sapiens
  misc_RNA (1)...(19): siRNA sense strand
acauuuacauggugggauc

SEQ ID NO: 2306102 - RNA, 19 nt, Homo sapiens
  misc_RNA (1)...(19): siRNA sense strand
ccuuaugauugggaaagaa

SEQ ID NO: 2306103 - RNA, 19 nt, Homo sapiens
  misc_RNA (1)...(19): siRNA sense strand
cuuaugauugggaaagaau

SEQ ID NO: 2306104 - RNA, 19 nt, Homo sapiens
  misc_RNA (1)...(19): siRNA sense strand
uuggaauggaagcugaaua

SEQ ID NO: 2306105 - RNA, 19 nt, Homo sapiens
  misc_RNA (1)...(19): siRNA sense strand
ccaagauccugguggggaa

SEQ ID NO: 2306106 - RNA, 19 nt, Homo sapiens
  misc_RNA (1)...(19): siRNA sense strand
gaucgauggauuaaggaga

SEQ ID NO: 2306107 - RNA, 19 nt, Homo sapiens
  misc_RNA (1)...(19): siRNA sense strand
ccuacgacuuucugcucaa

SEQ ID NO: 2306108 - RNA, 19 nt, Homo sapiens
  misc_RNA (1)...(19): siRNA sense strand
cagaacagcaccaaggaca

SEQ ID NO: 2306109 - RNA, 19 nt, Homo sapiens
  misc_RNA (1)...(19): siRNA sense strand
ucaccaagcuuuaguggca

SEQ ID NO: 2306110 - RNA, 19 nt, Homo sapiens
  misc_RNA (1)...(19): siRNA sense strand
ccauauaucaagaagccau

SEQ ID NO: 2306111 - RNA, 19 nt, Homo sapiens
  misc_RNA (1)...(19): siRNA sense strand
gcaaggaggugcugcugga

SEQ ID NO: 2306112 - RNA, 19 nt, Homo sapiens
  misc_RNA (1)...(19): siRNA sense strand
gacuguaugccguggacaa

SEQ ID NO: 2306113 - RNA, 19 nt, Homo sapiens
  misc_RNA (1)...(19): siRNA sense strand
ucuucaggguggagacaca

SEQ ID NO: 2306114 - RNA, 19 nt, Homo sapiens
  misc_RNA (1)...(19): siRNA sense strand
gcagcauauuguaccgcua

SEQ ID NO: 2306115 - RNA, 19 nt, Homo sapiens
  misc_RNA (1)...(19): siRNA sense strand
agaugguggaagacagcaa

SEQ ID NO: 2306116 - RNA, 19 nt, Homo sapiens
  misc_RNA (1)...(19): siRNA sense strand
aggugcugcuggaggucaa

SEQ ID NO: 2306117 - RNA, 19 nt, Homo sapiens
  misc_RNA (1)...(19): siRNA sense strand
ccgagaaguaacaccauau

SEQ ID NO: 2306118 - RNA, 19 nt, Homo sapiens
  misc_RNA (1)...(19): siRNA sense strand
aggucaaguucauccgaga

SEQ ID NO: 2306119 - RNA, 19 nt, Homo sapiens
  misc_RNA (1)...(19): siRNA sense strand
uggaagacagcaauggaga

SEQ ID NO: 2306120 - RNA, 19 nt, Homo sapiens
  misc_RNA (1)...(19): siRNA sense strand
guuaaauggccaagaggug

SEQ ID NO: 2306121 - RNA, 19 nt, Homo sapiens
  misc_RNA (1)...(19): siRNA sense strand
cagaacagcaccaaggaca

SEQ ID NO: 2306122 - RNA, 19 nt, Homo sapiens
  misc_RNA (1)...(19): siRNA sense strand
ucaccaagcuuuaguggca

SEQ ID NO: 2306123 - RNA, 19 nt, Homo sapiens
  misc_RNA (1)...(19): siRNA sense strand
ccauauaucaagaagccau

SEQ ID NO: 2306124 - RNA, 19 nt, Homo sapiens
  misc_RNA (1)...(19): siRNA sense strand
gcaaggaggugcugcugga

SEQ ID NO: 2306125 - RNA, 19 nt, Homo sapiens
  misc_RNA (1)...(19): siRNA sense strand
aggugcugcuggaggucaa

SEQ ID NO: 2306126 - RNA, 19 nt, Homo sapiens
  misc_RNA (1)...(19): siRNA sense strand
ccgagaaguaacaccauau

SEQ ID NO: 2306127 - RNA, 19 nt, Homo sapiens
  misc_RNA (1)...(19): siRNA sense strand
aggucaaguucauccgaga

SEQ ID NO: 2306128 - RNA, 19 nt, Homo sapiens
  misc_RNA (1)...(19): siRNA sense strand
cggguauccaagaggaaau

SEQ ID NO: 2306129 - RNA, 19 nt, Homo sapiens
  misc_RNA (1)...(19): siRNA sense strand
agaucucgcuacagggaau

SEQ ID NO: 2306130 - RNA, 19 nt, Homo sapiens
  misc_RNA (1)...(19): siRNA sense strand
aagucaaggucgcgaucca

SEQ ID NO: 2306131 - RNA, 19 nt, Homo sapiens
  misc_RNA (1)...(19): siRNA sense strand
ccgccaagauugaggacga

SEQ ID NO: 2306132 - RNA, 19 nt, Homo sapiens
  misc_RNA (1)...(19): siRNA sense strand
ucuacgagcuggaggagga

SEQ ID NO: 2306133 - RNA, 19 nt, Homo sapiens
  misc_RNA (1)...(19): siRNA sense strand
gaacaggacaauuacgaga

SEQ ID NO: 2306134 - RNA, 19 nt, Homo sapiens
  misc_RNA (1)...(19): siRNA sense strand
agcuggaggaggaguauua

SEQ ID NO: 2306135 - RNA, 19 nt, Homo sapiens
  misc_RNA (1)...(19): siRNA sense strand
ugaugaagcugguguccga

SEQ ID NO: 2306136 - RNA, 19 nt, Homo sapiens
  misc_RNA (1)...(19): siRNA sense strand
agauugaggacgagacgca

SEQ ID NO: 2306137 - RNA, 19 nt, Homo sapiens
  misc_RNA (1)...(19): siRNA sense strand
ccgccaagauugaggacga

SEQ ID NO: 2306138 - RNA, 19 nt, Homo sapiens
  misc_RNA (1)...(19): siRNA sense strand
ucuacgagcuggaggagga

SEQ ID NO: 2306139 - RNA, 19 nt, Homo sapiens
  misc_RNA (1)...(19): siRNA sense strand
gaacaggacaauuacgaga

SEQ ID NO: 2306140 - RNA, 19 nt, Homo sapiens
  misc_RNA (1)...(19): siRNA sense strand
agcuggaggaggaguauua

SEQ ID NO: 2306141 - RNA, 19 nt, Homo sapiens
  misc_RNA (1)...(19): siRNA sense strand
ugaugaagcugguguccga

SEQ ID NO: 2306142 - RNA, 19 nt, Homo sapiens
  misc_RNA (1)...(19): siRNA sense strand
agauugaggacgagacgca

SEQ ID NO: 2306143 - RNA, 19 nt, Homo sapiens
  misc_RNA (1)...(19): siRNA sense strand
ccgccaagauugaggacga

SEQ ID NO: 2306144 - RNA, 19 nt, Homo sapiens
  misc_RNA (1)...(19): siRNA sense strand
ucuacgagcuggaggagga

SEQ ID NO: 2306145 - RNA, 19 nt, Homo sapiens
  misc_RNA (1)...(19): siRNA sense strand
gaacaggacaauuacgaga

SEQ ID NO: 2306146 - RNA, 19 nt, Homo sapiens
  misc_RNA (1)...(19): siRNA sense strand
agcuggaggaggaguauua

SEQ ID NO: 2306147 - RNA, 19 nt, Homo sapiens
  misc_RNA (1)...(19): siRNA sense strand
ugaugaagcugguguccga

SEQ ID NO: 2306148 - RNA, 19 nt, Homo sapiens
  misc_RNA (1)...(19): siRNA sense strand
agauugaggacgagacgca

SEQ ID NO: 2306149 - RNA, 19 nt, Homo sapiens
  misc_RNA (1)...(19): siRNA sense strand
cagugaagcuggagcggau

SEQ ID NO: 2306150 - RNA, 19 nt, Homo sapiens
  misc_RNA (1)...(19): siRNA sense strand
ccacagaaguagacgcaag

SEQ ID NO: 2306151 - RNA, 19 nt, Homo sapiens
  misc_RNA (1)...(19): siRNA sense strand
ccgugaagcgucagaggau

SEQ ID NO: 2306152 - RNA, 19 nt, Homo sapiens
  misc_RNA (1)...(19): siRNA sense strand
uugauuggcauguggcaaa

SEQ ID NO: 2306153 - RNA, 19 nt, Homo sapiens
  misc_RNA (1)...(19): siRNA sense strand
acuacaagaaguuuagcua

SEQ ID NO: 2306154 - RNA, 19 nt, Homo sapiens
  misc_RNA (1)...(19): siRNA sense strand
cuacaaggaagcugggauc

SEQ ID NO: 2306155 - RNA, 19 nt, Homo sapiens
  misc_RNA (1)...(19): siRNA sense strand
accagauggcuguggagaa

SEQ ID NO: 2306156 - RNA, 19 nt, Homo sapiens
  misc_RNA (1)...(19): siRNA sense strand
ccuaugagccccuggaaga

SEQ ID NO: 2306157 - RNA, 19 nt, Homo sapiens
  misc_RNA (1)...(19): siRNA sense strand
caucaaccugggaaggaau

SEQ ID NO: 2306158 - RNA, 19 nt, Homo sapiens
  misc_RNA (1)...(19): siRNA sense strand
aaggaauucaggcuggaaa

SEQ ID NO: 2306159 - RNA, 19 nt, Homo sapiens
  misc_RNA (1)...(19): siRNA sense strand
acgccaucgacgaguacaa

SEQ ID NO: 2306160 - RNA, 19 nt, Homo sapiens
  misc_RNA (1)...(19): siRNA sense strand
ggaucagcaaggaccgaau

SEQ ID NO: 2306161 - RNA, 19 nt, Homo sapiens
  misc_RNA (1)...(19): siRNA sense strand
acgccaagcuggugccugu

SEQ ID NO: 2306162 - RNA, 19 nt, Homo sapiens
  misc_RNA (1)...(19): siRNA sense strand
cgcaagaagcauagaucaa

SEQ ID NO: 2306163 - RNA, 19 nt, Homo sapiens
  misc_RNA (1)...(19): siRNA sense strand
ccgagaaagacaaagucaa

SEQ ID NO: 2306164 - RNA, 19 nt, Homo sapiens
  misc_RNA (1)...(19): siRNA sense strand
gugaggaagaugcggaaaa

SEQ ID NO: 2306165 - RNA, 19 nt, Homo sapiens
  misc_RNA (1)...(19): siRNA sense strand
cugugauugacuugaauaa

SEQ ID NO: 2306166 - RNA, 19 nt, Homo sapiens
  misc_RNA (1)...(19): siRNA sense strand
caguaugagaugggagaau

SEQ ID NO: 2306167 - RNA, 19 nt, Homo sapiens
  misc_RNA (1)...(19): siRNA sense strand
auguggagaugcaggaaca

SEQ ID NO: 2306168 - RNA, 19 nt, Homo sapiens
  misc_RNA (1)...(19): siRNA sense strand
cggucgagagaucgugaaa

SEQ ID NO: 2306169 - RNA, 19 nt, Homo sapiens
  misc_RNA (1)...(19): siRNA sense strand
gugaaagaucugggcgauu

SEQ ID NO: 2306170 - RNA, 19 nt, Homo sapiens
  misc_RNA (1)...(19): siRNA sense strand
uggagaugcaggaacacua

SEQ ID NO: 2306171 - RNA, 19 nt, Homo sapiens
  misc_RNA (1)...(19): siRNA sense strand
cgugaaagaucugggcgau

SEQ ID NO: 2306172 - RNA, 19 nt, Homo sapiens
  misc_RNA (1)...(19): siRNA sense strand
ccgugaggaagaugcggaa

SEQ ID NO: 2306173 - RNA, 19 nt, Homo sapiens
  misc_RNA (1)...(19): siRNA sense strand
cggcaccgagaaagacaaa

SEQ ID NO: 2306174 - RNA, 19 nt, Homo sapiens
  misc_RNA (1)...(19): siRNA sense strand
ucgugaaagaucugggcga

SEQ ID NO: 2306175 - RNA, 19 nt, Homo sapiens
  misc_RNA (1)...(19): siRNA sense strand
auacaagaaacgugagacu

SEQ ID NO: 2306176 - RNA, 19 nt, Homo sapiens
  misc_RNA (1)...(19): siRNA sense strand
ccauacaagaaacgugaga

SEQ ID NO: 2306177 - RNA, 19 nt, Homo sapiens
  misc_RNA (1)...(19): siRNA sense strand
cggaggagcuagaaagagc

SEQ ID NO: 2306178 - RNA, 19 nt, Homo sapiens
  misc_RNA (1)...(19): siRNA sense strand
auacaagaaacgugagacu

SEQ ID NO: 2306179 - RNA, 19 nt, Homo sapiens
  misc_RNA (1)...(19): siRNA sense strand
ccauacaagaaacgugaga

SEQ ID NO: 2306180 - RNA, 19 nt, Homo sapiens
  misc_RNA (1)...(19): siRNA sense strand
cggaggagcuagaaagagc

SEQ ID NO: 2306181 - RNA, 19 nt, Homo sapiens
  misc_RNA (1)...(19): siRNA sense strand
cuuuauaggagaaggcaaa

SEQ ID NO: 2306182 - RNA, 19 nt, Homo sapiens
  misc_RNA (1)...(19): siRNA sense strand
aggagaaggcaaagaguau

SEQ ID NO: 2306183 - RNA, 19 nt, Homo sapiens
  misc_RNA (1)...(19): siRNA sense strand
ggaaauugcucaagugcca

SEQ ID NO: 2306184 - RNA, 19 nt, Homo sapiens
  misc_RNA (1)...(19): siRNA sense strand
ccaagaagucauucggcaa

SEQ ID NO: 2306185 - RNA, 19 nt, Homo sapiens
  misc_RNA (1)...(19): siRNA sense strand
acaaacuagugguggugaa

SEQ ID NO: 2306186 - RNA, 19 nt, Homo sapiens
  misc_RNA (1)...(19): siRNA sense strand
uggaaaacgcugugaauuu

SEQ ID NO: 2306187 - RNA, 19 nt, Homo sapiens
  misc_RNA (1)...(19): siRNA sense strand
ucauuaaagggaacgguua

SEQ ID NO: 2306188 - RNA, 19 nt, Homo sapiens
  misc_RNA (1)...(19): siRNA sense strand
ucucugacaaugagugaaa

SEQ ID NO: 2306189 - RNA, 19 nt, Homo sapiens
  misc_RNA (1)...(19): siRNA sense strand
agucauucggcaagagcua

SEQ ID NO: 2306190 - RNA, 19 nt, Homo sapiens
  misc_RNA (1)...(19): siRNA sense strand
cauuaaagggaacgguuau

SEQ ID NO: 2306191 - RNA, 19 nt, Homo sapiens
  misc_RNA (1)...(19): siRNA sense strand
agcagguacccgaggauua

SEQ ID NO: 2306192 - RNA, 19 nt, Homo sapiens
  misc_RNA (1)...(19): siRNA sense strand
cacucaauaugaaggcaaa

SEQ ID NO: 2306193 - RNA, 19 nt, Homo sapiens
  misc_RNA (1)...(19): siRNA sense strand
gguuaucaucauugcaaau

SEQ ID NO: 2306194 - RNA, 19 nt, Homo sapiens
  misc_RNA (1)...(19): siRNA sense strand
ugaagaaggaacuagaaaa

SEQ ID NO: 2306195 - RNA, 19 nt, Homo sapiens
  misc_RNA (1)...(19): siRNA sense strand
cauggaaaucauugugaau

SEQ ID NO: 2306196 - RNA, 19 nt, Homo sapiens
  misc_RNA (1)...(19): siRNA sense strand
ccgaggauuaauaaagaau

SEQ ID NO: 2306197 - RNA, 19 nt, Homo sapiens
  misc_RNA (1)...(19): siRNA sense strand
aacugagacugguggaaau

SEQ ID NO: 2306198 - RNA, 19 nt, Homo sapiens
  misc_RNA (1)...(19): siRNA sense strand
cgguuaucaucauugcaaa

SEQ ID NO: 2306199 - RNA, 19 nt, Homo sapiens
  misc_RNA (1)...(19): siRNA sense strand
ugaacaaacuagugguggu

SEQ ID NO: 2306200 - RNA, 19 nt, Homo sapiens
  misc_RNA (1)...(19): siRNA sense strand
aguucaagucuguaucaaa

SEQ ID NO: 2306201 - RNA, 19 nt, Homo sapiens
  misc_RNA (1)...(19): siRNA sense strand
aaauaaaacacgugcagau

SEQ ID NO: 2306202 - RNA, 19 nt, Homo sapiens
  misc_RNA (1)...(19): siRNA sense strand
ugcaaaucauggugacaga

SEQ ID NO: 2306203 - RNA, 19 nt, Homo sapiens
  misc_RNA (1)...(19): siRNA sense strand
cuuuacggccuguagcaaa

SEQ ID NO: 2306204 - RNA, 19 nt, Homo sapiens
  misc_RNA (1)...(19): siRNA sense strand
ucacucaauaugaaggcaa

SEQ ID NO: 2306205 - RNA, 19 nt, Homo sapiens
  misc_RNA (1)...(19): siRNA sense strand
aaacacgugcagauguaaa

SEQ ID NO: 2306206 - RNA, 19 nt, Homo sapiens
  misc_RNA (1)...(19): siRNA sense strand
ccuacagugcccuugguua

SEQ ID NO: 2306207 - RNA, 19 nt, Homo sapiens
  misc_RNA (1)...(19): siRNA sense strand
caguauuagagaacaagau

SEQ ID NO: 2306208 - RNA, 19 nt, Homo sapiens
  misc_RNA (1)...(19): siRNA sense strand
acucaauggugguuuggga

SEQ ID NO: 2306209 - RNA, 19 nt, Homo sapiens
  misc_RNA (1)...(19): siRNA sense strand
uggugugaggaaugagaau

SEQ ID NO: 2306210 - RNA, 19 nt, Homo sapiens
  misc_RNA (1)...(19): siRNA sense strand
cuggauugcuugauaccuu

SEQ ID NO: 2306211 - RNA, 19 nt, Homo sapiens
  misc_RNA (1)...(19): siRNA sense strand
cuggagcaguauuagagaa

SEQ ID NO: 2306212 - RNA, 19 nt, Homo sapiens
  misc_RNA (1)...(19): siRNA sense strand
aaagagaagcagagagaaa

SEQ ID NO: 2306213 - RNA, 19 nt, Homo sapiens
  misc_RNA (1)...(19): siRNA sense strand
gagcaagagcaaaggcuaa

SEQ ID NO: 2306214 - RNA, 19 nt, Homo sapiens
  misc_RNA (1)...(19): siRNA sense strand
aagaggaagaucagagaaa

SEQ ID NO: 2306215 - RNA, 19 nt, Homo sapiens
  misc_RNA (1)...(19): siRNA sense strand
caacaagaagaaagagcaa

SEQ ID NO: 2306216 - RNA, 19 nt, Homo sapiens
  misc_RNA (1)...(19): siRNA sense strand
uugaagaagaagagaagaa

SEQ ID NO: 2306217 - RNA, 19 nt, Homo sapiens
  misc_RNA (1)...(19): siRNA sense strand
agaaaggagcaaugacaaa

SEQ ID NO: 2306218 - RNA, 19 nt, Homo sapiens
  misc_RNA (1)...(19): siRNA sense strand
guuuagaagccaaaugaaa

SEQ ID NO: 2306219 - RNA, 19 nt, Homo sapiens
  misc_RNA (1)...(19): siRNA sense strand
agaaugaagaucaggaaau

SEQ ID NO: 2306220 - RNA, 19 nt, Homo sapiens
  misc_RNA (1)...(19): siRNA sense strand
uguacuauguguaaggaaa

SEQ ID NO: 2306221 - RNA, 19 nt, Homo sapiens
  misc_RNA (1)...(19): siRNA sense strand
agaggaaagaagaggaaga

SEQ ID NO: 2306222 - RNA, 19 nt, Homo sapiens
  misc_RNA (1)...(19): siRNA sense strand
cagaagagggccaggcauu

SEQ ID NO: 2306223 - RNA, 19 nt, Homo sapiens
  misc_RNA (1)...(19): siRNA sense strand
gagcaaugacaaagaggau

SEQ ID NO: 2306224 - RNA, 19 nt, Homo sapiens
  misc_RNA (1)...(19): siRNA sense strand
ugggaaaagcugaagaaaa

SEQ ID NO: 2306225 - RNA, 19 nt, Homo sapiens
  misc_RNA (1)...(19): siRNA sense strand
aucgaaagcuugugaggaa

SEQ ID NO: 2306226 - RNA, 19 nt, Homo sapiens
  misc_RNA (1)...(19): siRNA sense strand
gggaagacgcauggcaaua

SEQ ID NO: 2306227 - RNA, 19 nt, Homo sapiens
  misc_RNA (1)...(19): siRNA sense strand
acaagaagaaagagcaaga

SEQ ID NO: 2306228 - RNA, 19 nt, Homo sapiens
  misc_RNA (1)...(19): siRNA sense strand
gcuagaaacaaaagagaau

SEQ ID NO: 2306229 - RNA, 19 nt, Homo sapiens
  misc_RNA (1)...(19): siRNA sense strand
aagcaaaauuggaaagaga

SEQ ID NO: 2306230 - RNA, 19 nt, Homo sapiens
  misc_RNA (1)...(19): siRNA sense strand
aagcagaagaagaagaaaa

SEQ ID NO: 2306231 - RNA, 19 nt, Homo sapiens
  misc_RNA (1)...(19): siRNA sense strand
gagcaaaggcuaaaagaga

SEQ ID NO: 2306232 - RNA, 19 nt, Homo sapiens
  misc_RNA (1)...(19): siRNA sense strand
gaggaaagaaagaggaaag

SEQ ID NO: 2306233 - RNA, 19 nt, Homo sapiens
  misc_RNA (1)...(19): siRNA sense strand
acgugaugcugauggcaaa

SEQ ID NO: 2306234 - RNA, 19 nt, Homo sapiens
  misc_RNA (1)...(19): siRNA sense strand
ggaugagugcagugaauuu

SEQ ID NO: 2306235 - RNA, 19 nt, Homo sapiens
  misc_RNA (1)...(19): siRNA sense strand
uguuagagauggaagacuu

SEQ ID NO: 2306236 - RNA, 19 nt, Homo sapiens
  misc_RNA (1)...(19): siRNA sense strand
cagaagaagaagaaaagaa

SEQ ID NO: 2306237 - RNA, 19 nt, Homo sapiens
  misc_RNA (1)...(19): siRNA sense strand
gaggaguuguguagugaau

SEQ ID NO: 2306238 - RNA, 19 nt, Homo sapiens
  misc_RNA (1)...(19): siRNA sense strand
gagaaaggagcaaugacaa

SEQ ID NO: 2306239 - RNA, 19 nt, Homo sapiens
  misc_RNA (1)...(19): siRNA sense strand
aggcgaaucaagaaacaaa

SEQ ID NO: 2306240 - RNA, 19 nt, Homo sapiens
  misc_RNA (1)...(19): siRNA sense strand
agaaagagcugaacccaga

SEQ ID NO: 2306241 - RNA, 19 nt, Homo sapiens
  misc_RNA (1)...(19): siRNA sense strand
agaaagaugaagagaaauc

SEQ ID NO: 2306242 - RNA, 19 nt, Homo sapiens
  misc_RNA (1)...(19): siRNA sense strand
agaaagagcaagagcaaag

SEQ ID NO: 2306243 - RNA, 19 nt, Homo sapiens
  misc_RNA (1)...(19): siRNA sense strand
ccagaaagaaaaugaggaa

SEQ ID NO: 2306244 - RNA, 19 nt, Homo sapiens
  misc_RNA (1)...(19): siRNA sense strand
agugagaaauggaaggcuu

SEQ ID NO: 2306245 - RNA, 19 nt, Homo sapiens
  misc_RNA (1)...(19): siRNA sense strand
aagggaaaguugaggcuga

SEQ ID NO: 2306246 - RNA, 19 nt, Homo sapiens
  misc_RNA (1)...(19): siRNA sense strand
uggcaagacacaugguaau

SEQ ID NO: 2306247 - RNA, 19 nt, Homo sapiens
  misc_RNA (1)...(19): siRNA sense strand
aaggaugagugcagugaau

SEQ ID NO: 2306248 - RNA, 19 nt, Homo sapiens
  misc_RNA (1)...(19): siRNA sense strand
agcacgagcuagaaacaaa

SEQ ID NO: 2306249 - RNA, 19 nt, Homo sapiens
  misc_RNA (1)...(19): siRNA sense strand
gaagaagaagagaagaaaa

SEQ ID NO: 2306250 - RNA, 19 nt, Homo sapiens
  misc_RNA (1)...(19): siRNA sense strand
gaaaaugaggaaagaaaga

SEQ ID NO: 2306251 - RNA, 19 nt, Homo sapiens
  misc_RNA (1)...(19): siRNA sense strand
acaggagaaaggagcaaua

SEQ ID NO: 2306252 - RNA, 19 nt, Homo sapiens
  misc_RNA (1)...(19): siRNA sense strand
gagaagcugcaaaggaaau

SEQ ID NO: 2306253 - RNA, 19 nt, Homo sapiens
  misc_RNA (1)...(19): siRNA sense strand
cgaaacuauauaaggaaca

SEQ ID NO: 2306254 - RNA, 19 nt, Homo sapiens
  misc_RNA (1)...(19): siRNA sense strand
gaggaaacacucaggacga

SEQ ID NO: 2306255 - RNA, 19 nt, Homo sapiens
  misc_RNA (1)...(19): siRNA sense strand
cagagaaauggaaagcuua

SEQ ID NO: 2306256 - RNA, 19 nt, Homo sapiens
  misc_RNA (1)...(19): siRNA sense strand
ccaguaagaaugaagauca

SEQ ID NO: 2306257 - RNA, 19 nt, Homo sapiens
  misc_RNA (1)...(19): siRNA sense strand
ccguggaccagauggcaaa

SEQ ID NO: 2306258 - RNA, 19 nt, Homo sapiens
  misc_RNA (1)...(19): siRNA sense strand
cagugaauuucgaaacuau

SEQ ID NO: 2306259 - RNA, 19 nt, Homo sapiens
  misc_RNA (1)...(19): siRNA sense strand
caucugcccuagagagaau

SEQ ID NO: 2306260 - RNA, 19 nt, Homo sapiens
  misc_RNA (1)...(19): siRNA sense strand
gggugaaacuagaauucga

SEQ ID NO: 2306261 - RNA, 19 nt, Homo sapiens
  misc_RNA (1)...(19): siRNA sense strand
agagaagcugcaaaggaaa

SEQ ID NO: 2306262 - RNA, 19 nt, Homo sapiens
  misc_RNA (1)...(19): siRNA sense strand
cagcaagaagcaaaagaaa

SEQ ID NO: 2306263 - RNA, 19 nt, Homo sapiens
  misc_RNA (1)...(19): siRNA sense strand
aaagaggaaagaagaggaa

SEQ ID NO: 2306264 - RNA, 19 nt, Homo sapiens
  misc_RNA (1)...(19): siRNA sense strand
ucagaaucagggaaggaua

SEQ ID NO: 2306265 - RNA, 19 nt, Homo sapiens
  misc_RNA (1)...(19): siRNA sense strand
uggaagacuuggaugcaca

SEQ ID NO: 2306266 - RNA, 19 nt, Homo sapiens
  misc_RNA (1)...(19): siRNA sense strand
augccaagcgagaggguga

SEQ ID NO: 2306267 - RNA, 19 nt, Homo sapiens
  misc_RNA (1)...(19): siRNA sense strand
aggaaggcgaaucaagaaa

SEQ ID NO: 2306268 - RNA, 19 nt, Homo sapiens
  misc_RNA (1)...(19): siRNA sense strand
caggagcaauacaggagaa

SEQ ID NO: 2306269 - RNA, 19 nt, Homo sapiens
  misc_RNA (1)...(19): siRNA sense strand
gaucgagaagcuaaugaaa

SEQ ID NO: 2306270 - RNA, 19 nt, Homo sapiens
  misc_RNA (1)...(19): siRNA sense strand
gugagaaauggaaggcuuu

SEQ ID NO: 2306271 - RNA, 19 nt, Homo sapiens
  misc_RNA (1)...(19): siRNA sense strand
gaugaauuucggagacuuu

SEQ ID NO: 2306272 - RNA, 19 nt, Homo sapiens
  misc_RNA (1)...(19): siRNA sense strand
gcaaugacaaagaggaucu

SEQ ID NO: 2306273 - RNA, 19 nt, Homo sapiens
  misc_RNA (1)...(19): siRNA sense strand
gcaagagcucccaaggcua

SEQ ID NO: 2306274 - RNA, 19 nt, Homo sapiens
  misc_RNA (1)...(19): siRNA sense strand
gaggaagaucagagaaaug

SEQ ID NO: 2306275 - RNA, 19 nt, Homo sapiens
  misc_RNA (1)...(19): siRNA sense strand
guacuauguguaaggaaaa

SEQ ID NO: 2306276 - RNA, 19 nt, Homo sapiens
  misc_RNA (1)...(19): siRNA sense strand
ugcaaagacuaccgaguau

SEQ ID NO: 2306277 - RNA, 19 nt, Homo sapiens
  misc_RNA (1)...(19): siRNA sense strand
aagaaugaagaucaggaaa

SEQ ID NO: 2306278 - RNA, 19 nt, Homo sapiens
  misc_RNA (1)...(19): siRNA sense strand
ccauauggcaagaugcaca

SEQ ID NO: 2306279 - RNA, 19 nt, Homo sapiens
  misc_RNA (1)...(19): siRNA sense strand
aagaagaggaagaggaaaa

SEQ ID NO: 2306280 - RNA, 19 nt, Homo sapiens
  misc_RNA (1)...(19): siRNA sense strand
uggaagagaagaagaggaa

SEQ ID NO: 2306281 - RNA, 19 nt, Homo sapiens
  misc_RNA (1)...(19): siRNA sense strand
guuacuagugggaaagaua

SEQ ID NO: 2306282 - RNA, 19 nt, Homo sapiens
  misc_RNA (1)...(19): siRNA sense strand
cagaauaugaggagagugu

SEQ ID NO: 2306283 - RNA, 19 nt, Homo sapiens
  misc_RNA (1)...(19): siRNA sense strand
aggaagagacagaguugua

SEQ ID NO: 2306284 - RNA, 19 nt, Homo sapiens
  misc_RNA (1)...(19): siRNA sense strand
uggaaagagaagcagaaua

SEQ ID NO: 2306285 - RNA, 19 nt, Homo sapiens
  misc_RNA (1)...(19): siRNA sense strand
gacacuucguggugagaaa

SEQ ID NO: 2306286 - RNA, 19 nt, Homo sapiens
  misc_RNA (1)...(19): siRNA sense strand
aagaagaugaagaaagcua

SEQ ID NO: 2306287 - RNA, 19 nt, Homo sapiens
  misc_RNA (1)...(19): siRNA sense strand
gagaagaagaggaagagga

SEQ ID NO: 2306288 - RNA, 19 nt, Homo sapiens
  misc_RNA (1)...(19): siRNA sense strand
gcgggaaggaagagacaga

SEQ ID NO: 2306289 - RNA, 19 nt, Homo sapiens
  misc_RNA (1)...(19): siRNA sense strand
uggauaagaagaugaagaa

SEQ ID NO: 2306290 - RNA, 19 nt, Homo sapiens
  misc_RNA (1)...(19): siRNA sense strand
agucauaggaacaaagaca

SEQ ID NO: 2306291 - RNA, 19 nt, Homo sapiens
  misc_RNA (1)...(19): siRNA sense strand
agaugaagaaagcuagaaa

SEQ ID NO: 2306292 - RNA, 19 nt, Homo sapiens
  misc_RNA (1)...(19): siRNA sense strand
augaagaaagcuagaaaga

SEQ ID NO: 2306293 - RNA, 19 nt, Homo sapiens
  misc_RNA (1)...(19): siRNA sense strand
agacuuugggagagaacaa

SEQ ID NO: 2306294 - RNA, 19 nt, Homo sapiens
  misc_RNA (1)...(19): siRNA sense strand
gaacugaggguaugggaca

SEQ ID NO: 2306295 - RNA, 19 nt, Homo sapiens
  misc_RNA (1)...(19): siRNA sense strand
gaugaaauccagcggguga

SEQ ID NO: 2306296 - RNA, 19 nt, Homo sapiens
  misc_RNA (1)...(19): siRNA sense strand
gggaaagauaccaugguga

SEQ ID NO: 2306297 - RNA, 19 nt, Homo sapiens
  misc_RNA (1)...(19): siRNA sense strand
gauuaucucaagagggaau

SEQ ID NO: 2306298 - RNA, 19 nt, Homo sapiens
  misc_RNA (1)...(19): siRNA sense strand
ggagauggaaagagaagca

SEQ ID NO: 2306299 - RNA, 19 nt, Homo sapiens
  misc_RNA (1)...(19): siRNA sense strand
agagggaaugcgaggcaaa

SEQ ID NO: 2306300 - RNA, 19 nt, Homo sapiens
  misc_RNA (1)...(19): siRNA sense strand
caucugggacuuaaggaaa

SEQ ID NO: 2306301 - RNA, 19 nt, Homo sapiens
  misc_RNA (1)...(19): siRNA sense strand
ggauaagaagaugaagaaa

SEQ ID NO: 2306302 - RNA, 19 nt, Homo sapiens
  misc_RNA (1)...(19): siRNA sense strand
cagacaaauuugaacacau

SEQ ID NO: 2306303 - RNA, 19 nt, Homo sapiens
  misc_RNA (1)...(19): siRNA sense strand
gauggaaagagaagcagaa

SEQ ID NO: 2306304 - RNA, 19 nt, Homo sapiens
  misc_RNA (1)...(19): siRNA sense strand
cuuuguaccuggugauaga

SEQ ID NO: 2306305 - RNA, 19 nt, Homo sapiens
  misc_RNA (1)...(19): siRNA sense strand
ccuaauggcuuauggcagu

SEQ ID NO: 2306306 - RNA, 19 nt, Homo sapiens
  misc_RNA (1)...(19): siRNA sense strand
cauaaugcgggaaggaaga

SEQ ID NO: 2306307 - RNA, 19 nt, Homo sapiens
  misc_RNA (1)...(19): siRNA sense strand
ugaaagcagcugagaggau

SEQ ID NO: 2306308 - RNA, 19 nt, Homo sapiens
  misc_RNA (1)...(19): siRNA sense strand
ccgagaagaaacugcaaaa

SEQ ID NO: 2306309 - RNA, 19 nt, Homo sapiens
  misc_RNA (1)...(19): siRNA sense strand
agacucaaggugacaguua

SEQ ID NO: 2306310 - RNA, 19 nt, Homo sapiens
  misc_RNA (1)...(19): siRNA sense strand
uagcaaaggagaggaggaa

SEQ ID NO: 2306311 - RNA, 19 nt, Homo sapiens
  misc_RNA (1)...(19): siRNA sense strand
acagguagucauaggaaca

SEQ ID NO: 2306312 - RNA, 19 nt, Homo sapiens
  misc_RNA (1)...(19): siRNA sense strand
aggaagaaagggagaugga

SEQ ID NO: 2306313 - RNA, 19 nt, Homo sapiens
  misc_RNA (1)...(19): siRNA sense strand
gguuaauguugaaaugagu

SEQ ID NO: 2306314 - RNA, 19 nt, Homo sapiens
  misc_RNA (1)...(19): siRNA sense strand
uuguaugggaugugaucaa

SEQ ID NO: 2306315 - RNA, 19 nt, Homo sapiens
  misc_RNA (1)...(19): siRNA sense strand
caggagagacucaagguga

SEQ ID NO: 2306316 - RNA, 19 nt, Homo sapiens
  misc_RNA (1)...(19): siRNA sense strand
gccacuuggaagagaagaa

SEQ ID NO: 2306317 - RNA, 19 nt, Homo sapiens
  misc_RNA (1)...(19): siRNA sense strand
ggaugaagccccugaggau

SEQ ID NO: 2306318 - RNA, 19 nt, Homo sapiens
  misc_RNA (1)...(19): siRNA sense strand
auggauaagaagaugaaga

SEQ ID NO: 2306319 - RNA, 19 nt, Homo sapiens
  misc_RNA (1)...(19): siRNA sense strand
aaagcuagaaagaaagcaa

SEQ ID NO: 2306320 - RNA, 19 nt, Homo sapiens
  misc_RNA (1)...(19): siRNA sense strand
agacaauauugcuguucuu

SEQ ID NO: 2306321 - RNA, 19 nt, Homo sapiens
  misc_RNA (1)...(19): siRNA sense strand
ggauuuugaguuagugaaa

SEQ ID NO: 2306322 - RNA, 19 nt, Homo sapiens
  misc_RNA (1)...(19): siRNA sense strand
gaaaggacguuauguggca

SEQ ID NO: 2306323 - RNA, 19 nt, Homo sapiens
  misc_RNA (1)...(19): siRNA sense strand
cuauugaguuguaccgaga

SEQ ID NO: 2306324 - RNA, 19 nt, Homo sapiens
  misc_RNA (1)...(19): siRNA sense strand
cuacuagccacuuggaaga

SEQ ID NO: 2306325 - RNA, 19 nt, Homo sapiens
  misc_RNA (1)...(19): siRNA sense strand
uaaggaaaggagagaagau

SEQ ID NO: 2306326 - RNA, 19 nt, Homo sapiens
  misc_RNA (1)...(19): siRNA sense strand
gggaaggaagagacagagu

SEQ ID NO: 2306327 - RNA, 19 nt, Homo sapiens
  misc_RNA (1)...(19): siRNA sense strand
aggacaagcagaaucacua

SEQ ID NO: 2306328 - RNA, 19 nt, Homo sapiens
  misc_RNA (1)...(19): siRNA sense strand
gaagaagaggaagaggaaa

SEQ ID NO: 2306329 - RNA, 19 nt, Homo sapiens
  misc_RNA (1)...(19): siRNA sense strand
ccauaaugcgggaaggaag

SEQ ID NO: 2306330 - RNA, 19 nt, Homo sapiens
  misc_RNA (1)...(19): siRNA sense strand
cuuaaggaaaggagagaag

SEQ ID NO: 2306331 - RNA, 19 nt, Homo sapiens
  misc_RNA (1)...(19): siRNA sense strand
agauugaagacccggaaga

SEQ ID NO: 2306332 - RNA, 19 nt, Homo sapiens
  misc_RNA (1)...(19): siRNA sense strand
ugcacaugauggagcuuua

SEQ ID NO: 2306333 - RNA, 19 nt, Homo sapiens
  misc_RNA (1)...(19): siRNA sense strand
agaggauuauggaggcuau

SEQ ID NO: 2306334 - RNA, 19 nt, Homo sapiens
  misc_RNA (1)...(19): siRNA sense strand
gcuggacuguacugugaaa

SEQ ID NO: 2306335 - RNA, 19 nt, Homo sapiens
  misc_RNA (1)...(19): siRNA sense strand
aagcauuguuucuacgaga

SEQ ID NO: 2306336 - RNA, 19 nt, Homo sapiens
  misc_RNA (1)...(19): siRNA sense strand
ggaugugaucaaugaaagu

SEQ ID NO: 2306337 - RNA, 19 nt, Homo sapiens
  misc_RNA (1)...(19): siRNA sense strand
gggagaaaguggaguccga

SEQ ID NO: 2306338 - RNA, 19 nt, Homo sapiens
  misc_RNA (1)...(19): siRNA sense strand
gcaugaaggcagugaccga

SEQ ID NO: 2306339 - RNA, 19 nt, Homo sapiens
  misc_RNA (1)...(19): siRNA sense strand
uguccaacgaggagcgcaa

SEQ ID NO: 2306340 - RNA, 19 nt, Homo sapiens
  misc_RNA (1)...(19): siRNA sense strand
auuaaggacuaucgggaga

SEQ ID NO: 2306341 - RNA, 19 nt, Homo sapiens
  misc_RNA (1)...(19): siRNA sense strand
cggcagaaggggcugaaaa

SEQ ID NO: 2306342 - RNA, 19 nt, Homo sapiens
  misc_RNA (1)...(19): siRNA sense strand
caaccuaacacuuuggaca

SEQ ID NO: 2306343 - RNA, 19 nt, Homo sapiens
  misc_RNA (1)...(19): siRNA sense strand
ucuuaauaacccagagcuu

SEQ ID NO: 2306344 - RNA, 19 nt, Homo sapiens
  misc_RNA (1)...(19): siRNA sense strand
agaagaaugugaugcggca

SEQ ID NO: 2306345 - RNA, 19 nt, Homo sapiens
  misc_RNA (1)...(19): siRNA sense strand
aggcauuugauauaagcaa

SEQ ID NO: 2306346 - RNA, 19 nt, Homo sapiens
  misc_RNA (1)...(19): siRNA sense strand
augcaguugcuuagagaca

SEQ ID NO: 2306347 - RNA, 19 nt, Homo sapiens
  misc_RNA (1)...(19): siRNA sense strand
gcaucgagcagaagaccga

SEQ ID NO: 2306348 - RNA, 19 nt, Homo sapiens
  misc_RNA (1)...(19): siRNA sense strand
ggugaugaucgaaaacaaa

SEQ ID NO: 2306349 - RNA, 19 nt, Homo sapiens
  misc_RNA (1)...(19): siRNA sense strand
gagcugauccagaaggcca

SEQ ID NO: 2306350 - RNA, 19 nt, Homo sapiens
  misc_RNA (1)...(19): siRNA sense strand
aggacuaucgggagaaagu

SEQ ID NO: 2306351 - RNA, 19 nt, Homo sapiens
  misc_RNA (1)...(19): siRNA sense strand
uuuaauagccaaugcaacu

SEQ ID NO: 2306352 - RNA, 19 nt, Homo sapiens
  misc_RNA (1)...(19): siRNA sense strand
caucagacagugcaggaga

SEQ ID NO: 2306353 - RNA, 19 nt, Homo sapiens
  misc_RNA (1)...(19): siRNA sense strand
uggugaugaucgaaaacaa

SEQ ID NO: 2306354 - RNA, 19 nt, Homo sapiens
  misc_RNA (1)...(19): siRNA sense strand
ugaugaggccauugcugaa

SEQ ID NO: 2306355 - RNA, 19 nt, Homo sapiens
  misc_RNA (1)...(19): siRNA sense strand
ccacagaagauaagcgcuu

SEQ ID NO: 2306356 - RNA, 19 nt, Homo sapiens
  misc_RNA (1)...(19): siRNA sense strand
ccgaagaacucccaggaca

SEQ ID NO: 2306357 - RNA, 19 nt, Homo sapiens
  misc_RNA (1)...(19): siRNA sense strand
gagaugaccaugaggagca

SEQ ID NO: 2306358 - RNA, 19 nt, Homo sapiens
  misc_RNA (1)...(19): siRNA sense strand
agggcaaauguguggacaa

SEQ ID NO: 2306359 - RNA, 19 nt, Homo sapiens
  misc_RNA (1)...(19): siRNA sense strand
ucuuggaccuggagcgaga

SEQ ID NO: 2306360 - RNA, 19 nt, Homo sapiens
  misc_RNA (1)...(19): siRNA sense strand
gcgacaaggacaagagccu

SEQ ID NO: 2306361 - RNA, 19 nt, Homo sapiens
  misc_RNA (1)...(19): siRNA sense strand
cggaguauguggaggagac

SEQ ID NO: 2306362 - RNA, 19 nt, Homo sapiens
  misc_RNA (1)...(19): siRNA sense strand
augaacagugugaggccaa

SEQ ID NO: 2306363 - RNA, 19 nt, Homo sapiens
  misc_RNA (1)...(19): siRNA sense strand
gguuggagccacagggaug

SEQ ID NO: 2306364 - RNA, 19 nt, Homo sapiens
  misc_RNA (1)...(19): siRNA sense strand
aagcugaccugcagagcca

SEQ ID NO: 2306365 - RNA, 19 nt, Homo sapiens
  misc_RNA (1)...(19): siRNA sense strand
ccucgcagcucuuggacca

SEQ ID NO: 2306366 - RNA, 19 nt, Homo sapiens
  misc_RNA (1)...(19): siRNA sense strand
gucaugaacuauagcgguu

SEQ ID NO: 2306367 - RNA, 19 nt, Homo sapiens
  misc_RNA (1)...(19): siRNA sense strand
ccagaacggugcagugcca

SEQ ID NO: 2306368 - RNA, 19 nt, Homo sapiens
  misc_RNA (1)...(19): siRNA sense strand
gcaucuaagcccuggucca

SEQ ID NO: 2306369 - RNA, 19 nt, Homo sapiens
  misc_RNA (1)...(19): siRNA sense strand
gugcggaguauguggagga

SEQ ID NO: 2306370 - RNA, 19 nt, Homo sapiens
  misc_RNA (1)...(19): siRNA sense strand
gcuuguugaagaaauguua

SEQ ID NO: 2306371 - RNA, 19 nt, Homo sapiens
  misc_RNA (1)...(19): siRNA sense strand
uggaugauggccaugguaa

SEQ ID NO: 2306372 - RNA, 19 nt, Homo sapiens
  misc_RNA (1)...(19): siRNA sense strand
guucaaagccaaagaccag

SEQ ID NO: 2306373 - RNA, 19 nt, Homo sapiens
  misc_RNA (1)...(19): siRNA sense strand
ggaggauuuaugugggcau

SEQ ID NO: 2306374 - RNA, 19 nt, Homo sapiens
  misc_RNA (1)...(19): siRNA sense strand
ggaaaguacaugaucucca

SEQ ID NO: 2306375 - RNA, 19 nt, Homo sapiens
  misc_RNA (1)...(19): siRNA sense strand
caugugacacccugggaau

SEQ ID NO: 2306376 - RNA, 19 nt, Homo sapiens
  misc_RNA (1)...(19): siRNA sense strand
gagaugguucggugggcau

SEQ ID NO: 2306377 - RNA, 19 nt, Homo sapiens
  misc_RNA (1)...(19): siRNA sense strand
gugcugugauugaagacga

SEQ ID NO: 2306378 - RNA, 19 nt, Homo sapiens
  misc_RNA (1)...(19): siRNA sense strand
gugaagagaccuuugguuc

SEQ ID NO: 2306379 - RNA, 19 nt, Homo sapiens
  misc_RNA (1)...(19): siRNA sense strand
caaugcuuguugaagaaau

SEQ ID NO: 2306380 - RNA, 19 nt, Homo sapiens
  misc_RNA (1)...(19): siRNA sense strand
ggaugauggccaugguaac

SEQ ID NO: 2306381 - RNA, 19 nt, Homo sapiens
  misc_RNA (1)...(19): siRNA sense strand
gggaagugugugagaacug

SEQ ID NO: 2306382 - RNA, 19 nt, Homo sapiens
  misc_RNA (1)...(19): siRNA sense strand
ucaaaguguucgaggccaa

SEQ ID NO: 2306383 - RNA, 19 nt, Homo sapiens
  misc_RNA (1)...(19): siRNA sense strand
gccaagaagaggaggcaga

SEQ ID NO: 2306384 - RNA, 19 nt, Homo sapiens
  misc_RNA (1)...(19): siRNA sense strand
cagcagugugagaaguaua

SEQ ID NO: 2306385 - RNA, 19 nt, Homo sapiens
  misc_RNA (1)...(19): siRNA sense strand
acacugacauggacgggaa

SEQ ID NO: 2306386 - RNA, 19 nt, Homo sapiens
  misc_RNA (1)...(19): siRNA sense strand
gggaaaagcuucagggagc

SEQ ID NO: 2306387 - RNA, 19 nt, Homo sapiens
  misc_RNA (1)...(19): siRNA sense strand
gaggagaccaccaggagga

SEQ ID NO: 2306388 - RNA, 19 nt, Homo sapiens
  misc_RNA (1)...(19): siRNA sense strand
gugagaaguauaaugccua

SEQ ID NO: 2306389 - RNA, 19 nt, Homo sapiens
  misc_RNA (1)...(19): siRNA sense strand
gagcaggacaucuugguga

SEQ ID NO: 2306390 - RNA, 19 nt, Homo sapiens
  misc_RNA (1)...(19): siRNA sense strand
gaugccaagcccugcgaaa

SEQ ID NO: 2306391 - RNA, 19 nt, Homo sapiens
  misc_RNA (1)...(19): siRNA sense strand
acagcgaggaggagagcca

SEQ ID NO: 2306392 - RNA, 19 nt, Homo sapiens
  misc_RNA (1)...(19): siRNA sense strand
aguucaagaucgagcgccu

SEQ ID NO: 2306393 - RNA, 19 nt, Homo sapiens
  misc_RNA (1)...(19): siRNA sense strand
cagaauggaggaagauacu

SEQ ID NO: 2306394 - RNA, 19 nt, Homo sapiens
  misc_RNA (1)...(19): siRNA sense strand
gugcaaaagcagugagaga

SEQ ID NO: 2306395 - RNA, 19 nt, Homo sapiens
  misc_RNA (1)...(19): siRNA sense strand
gugaaaguaaagaaggaau

SEQ ID NO: 2306396 - RNA, 19 nt, Homo sapiens
  misc_RNA (1)...(19): siRNA sense strand
uugugaaaguaaagaagga

SEQ ID NO: 2306397 - RNA, 19 nt, Homo sapiens
  misc_RNA (1)...(19): siRNA sense strand
ggagaugcauaaagggcaa

SEQ ID NO: 2306398 - RNA, 19 nt, Homo sapiens
  misc_RNA (1)...(19): siRNA sense strand
cugacaacccagagagauu

SEQ ID NO: 2306399 - RNA, 19 nt, Homo sapiens
  misc_RNA (1)...(19): siRNA sense strand
acgggaaacaagagaaauu

SEQ ID NO: 2306400 - RNA, 19 nt, Homo sapiens
  misc_RNA (1)...(19): siRNA sense strand
gggagguggagguggaaaa

SEQ ID NO: 2306401 - RNA, 19 nt, Homo sapiens
  misc_RNA (1)...(19): siRNA sense strand
ucuaaaggaacuggagaaa

SEQ ID NO: 2306402 - RNA, 19 nt, Homo sapiens
  misc_RNA (1)...(19): siRNA sense strand
cucuaaaggaacuggagaa

SEQ ID NO: 2306403 - RNA, 19 nt, Homo sapiens
  misc_RNA (1)...(19): siRNA sense strand
ggaccggagaagugugaga

SEQ ID NO: 2306404 - RNA, 19 nt, Homo sapiens
  misc_RNA (1)...(19): siRNA sense strand
gagagagaacagaggagca

SEQ ID NO: 2306405 - RNA, 19 nt, Homo sapiens
  misc_RNA (1)...(19): siRNA sense strand
gguccuacgaugaggccau

SEQ ID NO: 2306406 - RNA, 19 nt, Homo sapiens
  misc_RNA (1)...(19): siRNA sense strand
gaugauacccauugccgua

SEQ ID NO: 2306407 - RNA, 19 nt, Homo sapiens
  misc_RNA (1)...(19): siRNA sense strand
gugcauaucuagagggugg

SEQ ID NO: 2306408 - RNA, 19 nt, Homo sapiens
  misc_RNA (1)...(19): siRNA sense strand
agaagaauugcgauggaga

SEQ ID NO: 2306409 - RNA, 19 nt, Homo sapiens
  misc_RNA (1)...(19): siRNA sense strand
ccaucugucacccgagaaa

SEQ ID NO: 2306410 - RNA, 19 nt, Homo sapiens
  misc_RNA (1)...(19): siRNA sense strand
cggagaagugugagaaggu

SEQ ID NO: 2306411 - RNA, 19 nt, Homo sapiens
  misc_RNA (1)...(19): siRNA sense strand
guauaaagguggcagagag

SEQ ID NO: 2306412 - RNA, 19 nt, Homo sapiens
  misc_RNA (1)...(19): siRNA sense strand
cagaggagcagauggagga

SEQ ID NO: 2306413 - RNA, 19 nt, Homo sapiens
  misc_RNA (1)...(19): siRNA sense strand
auggaggaguaccgaggaa

SEQ ID NO: 2306414 - RNA, 19 nt, Homo sapiens
  misc_RNA (1)...(19): siRNA sense strand
acaaacuccaaaaggaaaa

SEQ ID NO: 2306415 - RNA, 19 nt, Homo sapiens
  misc_RNA (1)...(19): siRNA sense strand
agagaacagaggagcagau

SEQ ID NO: 2306416 - RNA, 19 nt, Homo sapiens
  misc_RNA (1)...(19): siRNA sense strand
gacaagucugugaggaaca

SEQ ID NO: 2306417 - RNA, 19 nt, Homo sapiens
  misc_RNA (1)...(19): siRNA sense strand
gcucuaaaggaacuggaga

SEQ ID NO: 2306418 - RNA, 19 nt, Homo sapiens
  misc_RNA (1)...(19): siRNA sense strand
acugggagguggaggugga

SEQ ID NO: 2306419 - RNA, 19 nt, Homo sapiens
  misc_RNA (1)...(19): siRNA sense strand
acgggaaacaagagaaauu

SEQ ID NO: 2306420 - RNA, 19 nt, Homo sapiens
  misc_RNA (1)...(19): siRNA sense strand
ucuaaaggaacuggagaaa

SEQ ID NO: 2306421 - RNA, 19 nt, Homo sapiens
  misc_RNA (1)...(19): siRNA sense strand
cucuaaaggaacuggagaa

SEQ ID NO: 2306422 - RNA, 19 nt, Homo sapiens
  misc_RNA (1)...(19): siRNA sense strand
gagagagaacagaggagca

SEQ ID NO: 2306423 - RNA, 19 nt, Homo sapiens
  misc_RNA (1)...(19): siRNA sense strand
gguccuacgaugaggccau

SEQ ID NO: 2306424 - RNA, 19 nt, Homo sapiens
  misc_RNA (1)...(19): siRNA sense strand
gaugauacccauugccgua

SEQ ID NO: 2306425 - RNA, 19 nt, Homo sapiens
  misc_RNA (1)...(19): siRNA sense strand
gugcauaucuagagggugg

SEQ ID NO: 2306426 - RNA, 19 nt, Homo sapiens
  misc_RNA (1)...(19): siRNA sense strand
agaagaauugcgauggaga

SEQ ID NO: 2306427 - RNA, 19 nt, Homo sapiens
  misc_RNA (1)...(19): siRNA sense strand
ccaucugucacccgagaaa

SEQ ID NO: 2306428 - RNA, 19 nt, Homo sapiens
  misc_RNA (1)...(19): siRNA sense strand
guauaaagguggcagagag

SEQ ID NO: 2306429 - RNA, 19 nt, Homo sapiens
  misc_RNA (1)...(19): siRNA sense strand
cagaggagcagauggagga

SEQ ID NO: 2306430 - RNA, 19 nt, Homo sapiens
  misc_RNA (1)...(19): siRNA sense strand
auggaggaguaccgaggaa

SEQ ID NO: 2306431 - RNA, 19 nt, Homo sapiens
  misc_RNA (1)...(19): siRNA sense strand
acaaacuccaaaaggaaaa

SEQ ID NO: 2306432 - RNA, 19 nt, Homo sapiens
  misc_RNA (1)...(19): siRNA sense strand
agagaacagaggagcagau

SEQ ID NO: 2306433 - RNA, 19 nt, Homo sapiens
  misc_RNA (1)...(19): siRNA sense strand
gacaagucugugaggaaca

SEQ ID NO: 2306434 - RNA, 19 nt, Homo sapiens
  misc_RNA (1)...(19): siRNA sense strand
gcucuaaaggaacuggaga

SEQ ID NO: 2306435 - RNA, 19 nt, Homo sapiens
  misc_RNA (1)...(19): siRNA sense strand
cgguaaagauugaaaagga

SEQ ID NO: 2306436 - RNA, 19 nt, Homo sapiens
  misc_RNA (1)...(19): siRNA sense strand
uggucaagagaaagauuaa

SEQ ID NO: 2306437 - RNA, 19 nt, Homo sapiens
  misc_RNA (1)...(19): siRNA sense strand
ccauguuggaaaugaggaa

SEQ ID NO: 2306438 - RNA, 19 nt, Homo sapiens
  misc_RNA (1)...(19): siRNA sense strand
guauucucuugaagggaaa

SEQ ID NO: 2306439 - RNA, 19 nt, Homo sapiens
  misc_RNA (1)...(19): siRNA sense strand
uuaugcuggucaagagaaa

SEQ ID NO: 2306440 - RNA, 19 nt, Homo sapiens
  misc_RNA (1)...(19): siRNA sense strand
aagaaggagcagaagauga

SEQ ID NO: 2306441 - RNA, 19 nt, Homo sapiens
  misc_RNA (1)...(19): siRNA sense strand
ugaaaacuggagagagaua

SEQ ID NO: 2306442 - RNA, 19 nt, Homo sapiens
  misc_RNA (1)...(19): siRNA sense strand
gggccaaacuuaugcugca

SEQ ID NO: 2306443 - RNA, 19 nt, Homo sapiens
  misc_RNA (1)...(19): siRNA sense strand
ucuccugaauuuagaucaa

SEQ ID NO: 2306444 - RNA, 19 nt, Homo sapiens
  misc_RNA (1)...(19): siRNA sense strand
uggaaaugaggaacaguau

SEQ ID NO: 2306445 - RNA, 19 nt, Homo sapiens
  misc_RNA (1)...(19): siRNA sense strand
ccaaauacauugaaagucc

SEQ ID NO: 2306446 - RNA, 19 nt, Homo sapiens
  misc_RNA (1)...(19): siRNA sense strand
ccuccagauuuguucagaa

SEQ ID NO: 2306447 - RNA, 19 nt, Homo sapiens
  misc_RNA (1)...(19): siRNA sense strand
aguauucucuugaagggaa

SEQ ID NO: 2306448 - RNA, 19 nt, Homo sapiens
  misc_RNA (1)...(19): siRNA sense strand
aguccagcccauugagaga

SEQ ID NO: 2306449 - RNA, 19 nt, Homo sapiens
  misc_RNA (1)...(19): siRNA sense strand
auacaagaagagaccggua

SEQ ID NO: 2306450 - RNA, 19 nt, Homo sapiens
  misc_RNA (1)...(19): siRNA sense strand
cgauagaagaaggagcaga

SEQ ID NO: 2306451 - RNA, 19 nt, Homo sapiens
  misc_RNA (1)...(19): siRNA sense strand
ucagaagacuaacuggaca

SEQ ID NO: 2306452 - RNA, 19 nt, Homo sapiens
  misc_RNA (1)...(19): siRNA sense strand
caccauuauugcagaugau

SEQ ID NO: 2306453 - RNA, 19 nt, Homo sapiens
  misc_RNA (1)...(19): siRNA sense strand
cgguaaagauugaaaagga

SEQ ID NO: 2306454 - RNA, 19 nt, Homo sapiens
  misc_RNA (1)...(19): siRNA sense strand
uggucaagagaaagauuaa

SEQ ID NO: 2306455 - RNA, 19 nt, Homo sapiens
  misc_RNA (1)...(19): siRNA sense strand
ccauguuggaaaugaggaa

SEQ ID NO: 2306456 - RNA, 19 nt, Homo sapiens
  misc_RNA (1)...(19): siRNA sense strand
guauucucuugaagggaaa

SEQ ID NO: 2306457 - RNA, 19 nt, Homo sapiens
  misc_RNA (1)...(19): siRNA sense strand
uuaugcuggucaagagaaa

SEQ ID NO: 2306458 - RNA, 19 nt, Homo sapiens
  misc_RNA (1)...(19): siRNA sense strand
aagaaggagcagaagauga

SEQ ID NO: 2306459 - RNA, 19 nt, Homo sapiens
  misc_RNA (1)...(19): siRNA sense strand
ugaaaacuggagagagaua

SEQ ID NO: 2306460 - RNA, 19 nt, Homo sapiens
  misc_RNA (1)...(19): siRNA sense strand
gggccaaacuuaugcugca

SEQ ID NO: 2306461 - RNA, 19 nt, Homo sapiens
  misc_RNA (1)...(19): siRNA sense strand
ucuccugaauuuagaucaa

SEQ ID NO: 2306462 - RNA, 19 nt, Homo sapiens
  misc_RNA (1)...(19): siRNA sense strand
uggaaaugaggaacaguau

SEQ ID NO: 2306463 - RNA, 19 nt, Homo sapiens
  misc_RNA (1)...(19): siRNA sense strand
ccaaauacauugaaagucc

SEQ ID NO: 2306464 - RNA, 19 nt, Homo sapiens
  misc_RNA (1)...(19): siRNA sense strand
ccuccagauuuguucagaa

SEQ ID NO: 2306465 - RNA, 19 nt, Homo sapiens
  misc_RNA (1)...(19): siRNA sense strand
aguauucucuugaagggaa

SEQ ID NO: 2306466 - RNA, 19 nt, Homo sapiens
  misc_RNA (1)...(19): siRNA sense strand
aguccagcccauugagaga

SEQ ID NO: 2306467 - RNA, 19 nt, Homo sapiens
  misc_RNA (1)...(19): siRNA sense strand
auacaagaagagaccggua

SEQ ID NO: 2306468 - RNA, 19 nt, Homo sapiens
  misc_RNA (1)...(19): siRNA sense strand
cgauagaagaaggagcaga

SEQ ID NO: 2306469 - RNA, 19 nt, Homo sapiens
  misc_RNA (1)...(19): siRNA sense strand
ucagaagacuaacuggaca

SEQ ID NO: 2306470 - RNA, 19 nt, Homo sapiens
  misc_RNA (1)...(19): siRNA sense strand
caccauuauugcagaugau

SEQ ID NO: 2306471 - RNA, 19 nt, Homo sapiens
  misc_RNA (1)...(19): siRNA sense strand
gggaauuggaugaagucaa

SEQ ID NO: 2306472 - RNA, 19 nt, Homo sapiens
  misc_RNA (1)...(19): siRNA sense strand
aggaugacgcagagggcaa

SEQ ID NO: 2306473 - RNA, 19 nt, Homo sapiens
  misc_RNA (1)...(19): siRNA sense strand
gcuucaagaccaagggcuu

SEQ ID NO: 2306474 - RNA, 19 nt, Homo sapiens
  misc_RNA (1)...(19): siRNA sense strand
aguucaagauccuguggaa

SEQ ID NO: 2306475 - RNA, 19 nt, Homo sapiens
  misc_RNA (1)...(19): siRNA sense strand
cucaagaaauggauggaca

SEQ ID NO: 2306476 - RNA, 19 nt, Homo sapiens
  misc_RNA (1)...(19): siRNA sense strand
cagaagaacuggcggcaug

SEQ ID NO: 2306477 - RNA, 19 nt, Homo sapiens
  misc_RNA (1)...(19): siRNA sense strand
ggaaaaggucucugaggau

SEQ ID NO: 2306478 - RNA, 19 nt, Homo sapiens
  misc_RNA (1)...(19): siRNA sense strand
aggacagagcuucaagaaa

SEQ ID NO: 2306479 - RNA, 19 nt, Homo sapiens
  misc_RNA (1)...(19): siRNA sense strand
caggagagggcaaggagau

SEQ ID NO: 2306480 - RNA, 19 nt, Homo sapiens
  misc_RNA (1)...(19): siRNA sense strand
uggagaaggcguaugccaa

SEQ ID NO: 2306481 - RNA, 19 nt, Homo sapiens
  misc_RNA (1)...(19): siRNA sense strand
cgagaagcacagcgaguca

SEQ ID NO: 2306482 - RNA, 19 nt, Homo sapiens
  misc_RNA (1)...(19): siRNA sense strand
ugagcaacuccaagaggaa

SEQ ID NO: 2306483 - RNA, 19 nt, Homo sapiens
  misc_RNA (1)...(19): siRNA sense strand
caguuuggacaguggguga

SEQ ID NO: 2306484 - RNA, 19 nt, Homo sapiens
  misc_RNA (1)...(19): siRNA sense strand
aggagagggcaaggagaua

SEQ ID NO: 2306485 - RNA, 19 nt, Homo sapiens
  misc_RNA (1)...(19): siRNA sense strand
ucaaaagcuucaagaccaa

SEQ ID NO: 2306486 - RNA, 19 nt, Homo sapiens
  misc_RNA (1)...(19): siRNA sense strand
guucaagauccuguggaaa

SEQ ID NO: 2306487 - RNA, 19 nt, Homo sapiens
  misc_RNA (1)...(19): siRNA sense strand
acgacaacgcccagaacuu

SEQ ID NO: 2306488 - RNA, 19 nt, Homo sapiens
  misc_RNA (1)...(19): siRNA sense strand
ccuuugagccacacagaga

SEQ ID NO: 2306489 - RNA, 19 nt, Homo sapiens
  misc_RNA (1)...(19): siRNA sense strand
uacaagagcuacuggcaca

SEQ ID NO: 2306490 - RNA, 19 nt, Homo sapiens
  misc_RNA (1)...(19): siRNA sense strand
ucaagaaauggauggacau

SEQ ID NO: 2306491 - RNA, 19 nt, Homo sapiens
  misc_RNA (1)...(19): siRNA sense strand
ucacgaaguaucaggacca

SEQ ID NO: 2306492 - RNA, 19 nt, Homo sapiens
  misc_RNA (1)...(19): siRNA sense strand
aggauguccacuugaagaa

SEQ ID NO: 2306493 - RNA, 19 nt, Homo sapiens
  misc_RNA (1)...(19): siRNA sense strand
cuacagaggcaaaauggaa

SEQ ID NO: 2306494 - RNA, 19 nt, Homo sapiens
  misc_RNA (1)...(19): siRNA sense strand
uuaagauaguggcaggaga

SEQ ID NO: 2306495 - RNA, 19 nt, Homo sapiens
  misc_RNA (1)...(19): siRNA sense strand
ccaucaaauucaaaagcuu

SEQ ID NO: 2306496 - RNA, 19 nt, Homo sapiens
  misc_RNA (1)...(19): siRNA sense strand
uguaugagcuccagaggcu

SEQ ID NO: 2306497 - RNA, 19 nt, Homo sapiens
  misc_RNA (1)...(19): siRNA sense strand
gcacagcgagucaugggaa

SEQ ID NO: 2306498 - RNA, 19 nt, Homo sapiens
  misc_RNA (1)...(19): siRNA sense strand
uucaagauccuguggaaaa

SEQ ID NO: 2306499 - RNA, 19 nt, Homo sapiens
  misc_RNA (1)...(19): siRNA sense strand
ucacuaaaguagaaggaca

SEQ ID NO: 2306500 - RNA, 19 nt, Homo sapiens
  misc_RNA (1)...(19): siRNA sense strand
gcaaaugcgugcaggccuu

SEQ ID NO: 2306501 - RNA, 19 nt, Homo sapiens
  misc_RNA (1)...(19): siRNA sense strand
gaaugaaagccaaggagca

SEQ ID NO: 2306502 - RNA, 19 nt, Homo sapiens
  misc_RNA (1)...(19): siRNA sense strand
ggaugcaagagaagggaga

SEQ ID NO: 2306503 - RNA, 19 nt, Homo sapiens
  misc_RNA (1)...(19): siRNA sense strand
gccaauauuucaugggcca

SEQ ID NO: 2306504 - RNA, 19 nt, Homo sapiens
  misc_RNA (1)...(19): siRNA sense strand
ggaugaacuuggggauaaa

SEQ ID NO: 2306505 - RNA, 19 nt, Homo sapiens
  misc_RNA (1)...(19): siRNA sense strand
gcaaagcgucugcaggcaa

SEQ ID NO: 2306506 - RNA, 19 nt, Homo sapiens
  misc_RNA (1)...(19): siRNA sense strand
ccgugaaagggaugcaaga

SEQ ID NO: 2306507 - RNA, 19 nt, Homo sapiens
  misc_RNA (1)...(19): siRNA sense strand
aagggaacguuauggccaa

SEQ ID NO: 2306508 - RNA, 19 nt, Homo sapiens
  misc_RNA (1)...(19): siRNA sense strand
cggacagauuccaguuaca

SEQ ID NO: 2306509 - RNA, 19 nt, Homo sapiens
  misc_RNA (1)...(19): siRNA sense strand
uggacaugcauuugaaaca

SEQ ID NO: 2306510 - RNA, 19 nt, Homo sapiens
  misc_RNA (1)...(19): siRNA sense strand
cgcaguucuucgaaugaaa

SEQ ID NO: 2306511 - RNA, 19 nt, Homo sapiens
  misc_RNA (1)...(19): siRNA sense strand
uuauggagacgcuggacaa

SEQ ID NO: 2306512 - RNA, 19 nt, Homo sapiens
  misc_RNA (1)...(19): siRNA sense strand
ucgaagggccaaauggaga

SEQ ID NO: 2306513 - RNA, 19 nt, Homo sapiens
  misc_RNA (1)...(19): siRNA sense strand
uuucaaaccaccagaacca

SEQ ID NO: 2306514 - RNA, 19 nt, Homo sapiens
  misc_RNA (1)...(19): siRNA sense strand
aggacagcagcgugaacua

SEQ ID NO: 2306515 - RNA, 19 nt, Homo sapiens
  misc_RNA (1)...(19): siRNA sense strand
cggauguguaugucagaga

SEQ ID NO: 2306516 - RNA, 19 nt, Homo sapiens
  misc_RNA (1)...(19): siRNA sense strand
gccaaauacaacaagcgaa

SEQ ID NO: 2306517 - RNA, 19 nt, Homo sapiens
  misc_RNA (1)...(19): siRNA sense strand
gaguuugaaaggaggucuu

SEQ ID NO: 2306518 - RNA, 19 nt, Homo sapiens
  misc_RNA (1)...(19): siRNA sense strand
cugucuaauucuauggaaa

SEQ ID NO: 2306519 - RNA, 19 nt, Homo sapiens
  misc_RNA (1)...(19): siRNA sense strand
uggaaauggaagaagaaga

SEQ ID NO: 2306520 - RNA, 19 nt, Homo sapiens
  misc_RNA (1)...(19): siRNA sense strand
ccugauguuacgagcaaua

SEQ ID NO: 2306521 - RNA, 19 nt, Homo sapiens
  misc_RNA (1)...(19): siRNA sense strand
uggagagggaagagaguga

SEQ ID NO: 2306522 - RNA, 19 nt, Homo sapiens
  misc_RNA (1)...(19): siRNA sense strand
agaucaaggacaagggcuu

SEQ ID NO: 2306523 - RNA, 19 nt, Homo sapiens
  misc_RNA (1)...(19): siRNA sense strand
ccaacacaauggagaggga

SEQ ID NO: 2306524 - RNA, 19 nt, Homo sapiens
  misc_RNA (1)...(19): siRNA sense strand
acuuaggcaaagagaaauu

SEQ ID NO: 2306525 - RNA, 19 nt, Homo sapiens
  misc_RNA (1)...(19): siRNA sense strand
ccaaagccugagugagcua

SEQ ID NO: 2306526 - RNA, 19 nt, Homo sapiens
  misc_RNA (1)...(19): siRNA sense strand
cagaccaagaaaagagaaa

SEQ ID NO: 2306527 - RNA, 19 nt, Homo sapiens
  misc_RNA (1)...(19): siRNA sense strand
ggaaccaacacaauggaga

SEQ ID NO: 2306528 - RNA, 19 nt, Homo sapiens
  misc_RNA (1)...(19): siRNA sense strand
cuauagagcuugaggaccc

SEQ ID NO: 2306529 - RNA, 19 nt, Homo sapiens
  misc_RNA (1)...(19): siRNA sense strand
uauggaaauggaagaagaa

SEQ ID NO: 2306530 - RNA, 19 nt, Homo sapiens
  misc_RNA (1)...(19): siRNA sense strand
acacaauggagagggaaga

SEQ ID NO: 2306531 - RNA, 19 nt, Homo sapiens
  misc_RNA (1)...(19): siRNA sense strand
aggaaaacuugguucugaa

SEQ ID NO: 2306532 - RNA, 19 nt, Homo sapiens
  misc_RNA (1)...(19): siRNA sense strand
cugucuaauucuauggaaa

SEQ ID NO: 2306533 - RNA, 19 nt, Homo sapiens
  misc_RNA (1)...(19): siRNA sense strand
uggaaauggaagaagaaga

SEQ ID NO: 2306534 - RNA, 19 nt, Homo sapiens
  misc_RNA (1)...(19): siRNA sense strand
ccugauguuacgagcaaua

SEQ ID NO: 2306535 - RNA, 19 nt, Homo sapiens
  misc_RNA (1)...(19): siRNA sense strand
uggagagggaagagaguga

SEQ ID NO: 2306536 - RNA, 19 nt, Homo sapiens
  misc_RNA (1)...(19): siRNA sense strand
agaucaaggacaagggcuu

SEQ ID NO: 2306537 - RNA, 19 nt, Homo sapiens
  misc_RNA (1)...(19): siRNA sense strand
ccaacacaauggagaggga

SEQ ID NO: 2306538 - RNA, 19 nt, Homo sapiens
  misc_RNA (1)...(19): siRNA sense strand
acuuaggcaaagagaaauu

SEQ ID NO: 2306539 - RNA, 19 nt, Homo sapiens
  misc_RNA (1)...(19): siRNA sense strand
ccaaagccugagugagcua

SEQ ID NO: 2306540 - RNA, 19 nt, Homo sapiens
  misc_RNA (1)...(19): siRNA sense strand
cagaccaagaaaagagaaa

SEQ ID NO: 2306541 - RNA, 19 nt, Homo sapiens
  misc_RNA (1)...(19): siRNA sense strand
ggaaccaacacaauggaga

SEQ ID NO: 2306542 - RNA, 19 nt, Homo sapiens
  misc_RNA (1)...(19): siRNA sense strand
cuauagagcuugaggaccc

SEQ ID NO: 2306543 - RNA, 19 nt, Homo sapiens
  misc_RNA (1)...(19): siRNA sense strand
uauggaaauggaagaagaa

SEQ ID NO: 2306544 - RNA, 19 nt, Homo sapiens
  misc_RNA (1)...(19): siRNA sense strand
acacaauggagagggaaga

SEQ ID NO: 2306545 - RNA, 19 nt, Homo sapiens
  misc_RNA (1)...(19): siRNA sense strand
aggaaaacuugguucugaa

SEQ ID NO: 2306546 - RNA, 19 nt, Homo sapiens
  misc_RNA (1)...(19): siRNA sense strand
augaauagaaauagggcaa

SEQ ID NO: 2306547 - RNA, 19 nt, Homo sapiens
  misc_RNA (1)...(19): siRNA sense strand
ggacagauuuccugggcca

SEQ ID NO: 2306548 - RNA, 19 nt, Homo sapiens
  misc_RNA (1)...(19): siRNA sense strand
ggguaaaggagcagcacca

SEQ ID NO: 2306549 - RNA, 19 nt, Homo sapiens
  misc_RNA (1)...(19): siRNA sense strand
agagagaagcagagaacga

SEQ ID NO: 2306550 - RNA, 19 nt, Homo sapiens
  misc_RNA (1)...(19): siRNA sense strand
gcagagaacgagagaggca

SEQ ID NO: 2306551 - RNA, 19 nt, Homo sapiens
  misc_RNA (1)...(19): siRNA sense strand
cgauuauuacagagagaga

SEQ ID NO: 2306552 - RNA, 19 nt, Homo sapiens
  misc_RNA (1)...(19): siRNA sense strand
ugggagugcuauugagaca

SEQ ID NO: 2306553 - RNA, 19 nt, Homo sapiens
  misc_RNA (1)...(19): siRNA sense strand
ggugauuaugggagugcua

SEQ ID NO: 2306554 - RNA, 19 nt, Homo sapiens
  misc_RNA (1)...(19): siRNA sense strand
aaagagaacuucaugguca

SEQ ID NO: 2306555 - RNA, 19 nt, Homo sapiens
  misc_RNA (1)...(19): siRNA sense strand
ccuggaagggaaauggaua

SEQ ID NO: 2306556 - RNA, 19 nt, Homo sapiens
  misc_RNA (1)...(19): siRNA sense strand
gcgaagaguucaaccagga

SEQ ID NO: 2306557 - RNA, 19 nt, Homo sapiens
  misc_RNA (1)...(19): siRNA sense strand
ccauaguagaucacgagaa

SEQ ID NO: 2306558 - RNA, 19 nt, Homo sapiens
  misc_RNA (1)...(19): siRNA sense strand
gacgauuauuacagagaga

SEQ ID NO: 2306559 - RNA, 19 nt, Homo sapiens
  misc_RNA (1)...(19): siRNA sense strand
ggaccauaguagaucacga

SEQ ID NO: 2306560 - RNA, 19 nt, Homo sapiens
  misc_RNA (1)...(19): siRNA sense strand
agauagauuuguaugacga

SEQ ID NO: 2306561 - RNA, 19 nt, Homo sapiens
  misc_RNA (1)...(19): siRNA sense strand
acauauacuggaaagagaa

SEQ ID NO: 2306562 - RNA, 19 nt, Homo sapiens
  misc_RNA (1)...(19): siRNA sense strand
agguaaagcugguccucca

SEQ ID NO: 2306563 - RNA, 19 nt, Homo sapiens
  misc_RNA (1)...(19): siRNA sense strand
agaacuucauggucagaau

SEQ ID NO: 2306564 - RNA, 19 nt, Homo sapiens
  misc_RNA (1)...(19): siRNA sense strand
agagagagaagcagagaac

SEQ ID NO: 2306565 - RNA, 19 nt, Homo sapiens
  misc_RNA (1)...(19): siRNA sense strand
agaaaagagucgacgucau

SEQ ID NO: 2306566 - RNA, 19 nt, Homo sapiens
  misc_RNA (1)...(19): siRNA sense strand
uuggugaugauguggguaa

SEQ ID NO: 2306567 - RNA, 19 nt, Homo sapiens
  misc_RNA (1)...(19): siRNA sense strand
agaugaagacuuaacugaa

SEQ ID NO: 2306568 - RNA, 19 nt, Homo sapiens
  misc_RNA (1)...(19): siRNA sense strand
cagagagagaagcagagaa

SEQ ID NO: 2306569 - RNA, 19 nt, Homo sapiens
  misc_RNA (1)...(19): siRNA sense strand
ugauguggguaaaggagca

SEQ ID NO: 2306570 - RNA, 19 nt, Homo sapiens
  misc_RNA (1)...(19): siRNA sense strand
aaagagucgacgucauaaa

SEQ ID NO: 2306571 - RNA, 19 nt, Homo sapiens
  misc_RNA (1)...(19): siRNA sense strand
uggugaugauguggguaaa

SEQ ID NO: 2306572 - RNA, 19 nt, Homo sapiens
  misc_RNA (1)...(19): siRNA sense strand
ccuuguugguguuggaucu

SEQ ID NO: 2306573 - RNA, 19 nt, Homo sapiens
  misc_RNA (1)...(19): siRNA sense strand
agggaaauggauacugcaa

SEQ ID NO: 2306574 - RNA, 19 nt, Homo sapiens
  misc_RNA (1)...(19): siRNA sense strand
uuacagagagagaagcaga

SEQ ID NO: 2306575 - RNA, 19 nt, Homo sapiens
  misc_RNA (1)...(19): siRNA sense strand
agcugaauauggugggcau

SEQ ID NO: 2306576 - RNA, 19 nt, Homo sapiens
  misc_RNA (1)...(19): siRNA sense strand
acgcuuaaugacagagaua

SEQ ID NO: 2306577 - RNA, 19 nt, Homo sapiens
  misc_RNA (1)...(19): siRNA sense strand
gcacauauuacaaagccua

SEQ ID NO: 2306578 - RNA, 19 nt, Homo sapiens
  misc_RNA (1)...(19): siRNA sense strand
gcuuaaugacagagauacu

SEQ ID NO: 2306579 - RNA, 19 nt, Homo sapiens
  misc_RNA (1)...(19): siRNA sense strand
aagaugaaguugaaggacu

SEQ ID NO: 2306580 - RNA, 19 nt, Homo sapiens
  misc_RNA (1)...(19): siRNA sense strand
ugaacuuaacccaggagaa

SEQ ID NO: 2306581 - RNA, 19 nt, Homo sapiens
  misc_RNA (1)...(19): siRNA sense strand
cagccagauuucagcgcau

SEQ ID NO: 2306582 - RNA, 19 nt, Homo sapiens
  misc_RNA (1)...(19): siRNA sense strand
ccuaaggaacauaagaagu

SEQ ID NO: 2306583 - RNA, 19 nt, Homo sapiens
  misc_RNA (1)...(19): siRNA sense strand
agaagaugaaguugaagga

SEQ ID NO: 2306584 - RNA, 19 nt, Homo sapiens
  misc_RNA (1)...(19): siRNA sense strand
guaccuucguggagggcua

SEQ ID NO: 2306585 - RNA, 19 nt, Homo sapiens
  misc_RNA (1)...(19): siRNA sense strand
caagagacgucgaaaccga

SEQ ID NO: 2306586 - RNA, 19 nt, Homo sapiens
  misc_RNA (1)...(19): siRNA sense strand
cguuaugggacgaggcacu

SEQ ID NO: 2306587 - RNA, 19 nt, Homo sapiens
  misc_RNA (1)...(19): siRNA sense strand
cugaaagggaggagagguc

SEQ ID NO: 2306588 - RNA, 19 nt, Homo sapiens
  misc_RNA (1)...(19): siRNA sense strand
agacaagagacgucgaaac

SEQ ID NO: 2306589 - RNA, 19 nt, Homo sapiens
  misc_RNA (1)...(19): siRNA sense strand
cagacauacagcucggaau

SEQ ID NO: 2306590 - RNA, 19 nt, Homo sapiens
  misc_RNA (1)...(19): siRNA sense strand
guaccuucguggagggcua

SEQ ID NO: 2306591 - RNA, 19 nt, Homo sapiens
  misc_RNA (1)...(19): siRNA sense strand
caagagacgucgaaaccga

SEQ ID NO: 2306592 - RNA, 19 nt, Homo sapiens
  misc_RNA (1)...(19): siRNA sense strand
cguuaugggacgaggcacu

SEQ ID NO: 2306593 - RNA, 19 nt, Homo sapiens
  misc_RNA (1)...(19): siRNA sense strand
cugaaagggaggagagguc

SEQ ID NO: 2306594 - RNA, 19 nt, Homo sapiens
  misc_RNA (1)...(19): siRNA sense strand
agacaagagacgucgaaac

SEQ ID NO: 2306595 - RNA, 19 nt, Homo sapiens
  misc_RNA (1)...(19): siRNA sense strand
cagacauacagcucggaau

SEQ ID NO: 2306596 - RNA, 19 nt, Homo sapiens
  misc_RNA (1)...(19): siRNA sense strand
guaccuucguggagggcua

SEQ ID NO: 2306597 - RNA, 19 nt, Homo sapiens
  misc_RNA (1)...(19): siRNA sense strand
caagagacgucgaaaccga

SEQ ID NO: 2306598 - RNA, 19 nt, Homo sapiens
  misc_RNA (1)...(19): siRNA sense strand
cguuaugggacgaggcacu

SEQ ID NO: 2306599 - RNA, 19 nt, Homo sapiens
  misc_RNA (1)...(19): siRNA sense strand
cugaaagggaggagagguc

SEQ ID NO: 2306600 - RNA, 19 nt, Homo sapiens
  misc_RNA (1)...(19): siRNA sense strand
agacaagagacgucgaaac

SEQ ID NO: 2306601 - RNA, 19 nt, Homo sapiens
  misc_RNA (1)...(19): siRNA sense strand
cagacauacagcucggaau

SEQ ID NO: 2306602 - RNA, 19 nt, Homo sapiens
  misc_RNA (1)...(19): siRNA sense strand
guaccuucguggagggcua

SEQ ID NO: 2306603 - RNA, 19 nt, Homo sapiens
  misc_RNA (1)...(19): siRNA sense strand
caagagacgucgaaaccga

SEQ ID NO: 2306604 - RNA, 19 nt, Homo sapiens
  misc_RNA (1)...(19): siRNA sense strand
cguuaugggacgaggcacu

SEQ ID NO: 2306605 - RNA, 19 nt, Homo sapiens
  misc_RNA (1)...(19): siRNA sense strand
cugaaagggaggagagguc

SEQ ID NO: 2306606 - RNA, 19 nt, Homo sapiens
  misc_RNA (1)...(19): siRNA sense strand
agacaagagacgucgaaac

SEQ ID NO: 2306607 - RNA, 19 nt, Homo sapiens
  misc_RNA (1)...(19): siRNA sense strand
cagacauacagcucggaau

SEQ ID NO: 2306608 - RNA, 19 nt, Homo sapiens
  misc_RNA (1)...(19): siRNA sense strand
ccacauagacagauggaca

SEQ ID NO: 2306609 - RNA, 19 nt, Homo sapiens
  misc_RNA (1)...(19): siRNA sense strand
gggagaccacggaggagau

SEQ ID NO: 2306610 - RNA, 19 nt, Homo sapiens
  misc_RNA (1)...(19): siRNA sense strand
ccacacugcccauggcuga

SEQ ID NO: 2306611 - RNA, 19 nt, Homo sapiens
  misc_RNA (1)...(19): siRNA sense strand
gaacacacaggguggcaca

SEQ ID NO: 2306612 - RNA, 19 nt, Homo sapiens
  misc_RNA (1)...(19): siRNA sense strand
gaacacacaggguggcaca

SEQ ID NO: 2306613 - RNA, 19 nt, Homo sapiens
  misc_RNA (1)...(19): siRNA sense strand
gaacacacaggguggcaca

SEQ ID NO: 2306614 - RNA, 19 nt, Homo sapiens
  misc_RNA (1)...(19): siRNA sense strand
agaaguugugaaagagaau

SEQ ID NO: 2306615 - RNA, 19 nt, Homo sapiens
  misc_RNA (1)...(19): siRNA sense strand
auggcaauauugugagaga

SEQ ID NO: 2306616 - RNA, 19 nt, Homo sapiens
  misc_RNA (1)...(19): siRNA sense strand
ggcaauauugugagagaag

SEQ ID NO: 2306617 - RNA, 19 nt, Homo sapiens
  misc_RNA (1)...(19): siRNA sense strand
agagaaugcugccgggucu

SEQ ID NO: 2306618 - RNA, 19 nt, Homo sapiens
  misc_RNA (1)...(19): siRNA sense strand
gugacagcagugagugcaa

SEQ ID NO: 2306619 - RNA, 19 nt, Homo sapiens
  misc_RNA (1)...(19): siRNA sense strand
gcaagaggacagugcucga

SEQ ID NO: 2306620 - RNA, 19 nt, Homo sapiens
  misc_RNA (1)...(19): siRNA sense strand
uggcaauauugugagagaa

SEQ ID NO: 2306621 - RNA, 19 nt, Homo sapiens
  misc_RNA (1)...(19): siRNA sense strand
gcaauaauuaugcggugga

SEQ ID NO: 2306622 - RNA, 19 nt, Homo sapiens
  misc_RNA (1)...(19): siRNA sense strand
aggaauuauuguuggguuu

SEQ ID NO: 2306623 - RNA, 19 nt, Homo sapiens
  misc_RNA (1)...(19): siRNA sense strand
ccauugagacacugaggaa

SEQ ID NO: 2306624 - RNA, 19 nt, Homo sapiens
  misc_RNA (1)...(19): siRNA sense strand
aagaaaacucacuggaaaa

SEQ ID NO: 2306625 - RNA, 19 nt, Homo sapiens
  misc_RNA (1)...(19): siRNA sense strand
acaaacagugauucagaaa

SEQ ID NO: 2306626 - RNA, 19 nt, Homo sapiens
  misc_RNA (1)...(19): siRNA sense strand
ccuuaauagaguucacuaa

SEQ ID NO: 2306627 - RNA, 19 nt, Homo sapiens
  misc_RNA (1)...(19): siRNA sense strand
gucugaagaagguggaaau

SEQ ID NO: 2306628 - RNA, 19 nt, Homo sapiens
  misc_RNA (1)...(19): siRNA sense strand
aggucaucaucaagaauau

SEQ ID NO: 2306629 - RNA, 19 nt, Homo sapiens
  misc_RNA (1)...(19): siRNA sense strand
agaccagcuauuagaaauu

SEQ ID NO: 2306630 - RNA, 19 nt, Homo sapiens
  misc_RNA (1)...(19): siRNA sense strand
aggcauauucaauuggauu

SEQ ID NO: 2306631 - RNA, 19 nt, Homo sapiens
  misc_RNA (1)...(19): siRNA sense strand
auugagacacugaggaaaa

SEQ ID NO: 2306632 - RNA, 19 nt, Homo sapiens
  misc_RNA (1)...(19): siRNA sense strand
cauuacaaacagugauuca

SEQ ID NO: 2306633 - RNA, 19 nt, Homo sapiens
  misc_RNA (1)...(19): siRNA sense strand
ucaaauccuagaagagcaa

SEQ ID NO: 2306634 - RNA, 19 nt, Homo sapiens
  misc_RNA (1)...(19): siRNA sense strand
uaguauuuguacagggcau

SEQ ID NO: 2306635 - RNA, 19 nt, Homo sapiens
  misc_RNA (1)...(19): siRNA sense strand
gaacaaauacaaauggaug

SEQ ID NO: 2306636 - RNA, 19 nt, Homo sapiens
  misc_RNA (1)...(19): siRNA sense strand
agaagaggauuuuggccua

SEQ ID NO: 2306637 - RNA, 19 nt, Homo sapiens
  misc_RNA (1)...(19): siRNA sense strand
agacuuuaaagaagaggau

SEQ ID NO: 2306638 - RNA, 19 nt, Homo sapiens
  misc_RNA (1)...(19): siRNA sense strand
guuggauucacaaggcaaa

SEQ ID NO: 2306639 - RNA, 19 nt, Homo sapiens
  misc_RNA (1)...(19): siRNA sense strand
accucagggcuuagugaaa

SEQ ID NO: 2306640 - RNA, 19 nt, Homo sapiens
  misc_RNA (1)...(19): siRNA sense strand
caagaauaugggcuggaau

SEQ ID NO: 2306641 - RNA, 19 nt, Homo sapiens
  misc_RNA (1)...(19): siRNA sense strand
agucugaagaagguggaaa

SEQ ID NO: 2306642 - RNA, 19 nt, Homo sapiens
  misc_RNA (1)...(19): siRNA sense strand
ggauuggagcugcuggaga

SEQ ID NO: 2306643 - RNA, 19 nt, Homo sapiens
  misc_RNA (1)...(19): siRNA sense strand
ggcaaagaugcauagaaga

SEQ ID NO: 2306644 - RNA, 19 nt, Homo sapiens
  misc_RNA (1)...(19): siRNA sense strand
uaugcaauccaaaggaauu

SEQ ID NO: 2306645 - RNA, 19 nt, Homo sapiens
  misc_RNA (1)...(19): siRNA sense strand
cuuugaacagucugaagaa

SEQ ID NO: 2306646 - RNA, 19 nt, Homo sapiens
  misc_RNA (1)...(19): siRNA sense strand
cuuuaccaguacuuagaaa

SEQ ID NO: 2306647 - RNA, 19 nt, Homo sapiens
  misc_RNA (1)...(19): siRNA sense strand
accuugaauuugaagaaga

SEQ ID NO: 2306648 - RNA, 19 nt, Homo sapiens
  misc_RNA (1)...(19): siRNA sense strand
aggaauuauuguuggguuu

SEQ ID NO: 2306649 - RNA, 19 nt, Homo sapiens
  misc_RNA (1)...(19): siRNA sense strand
uguucuagcucgaguggaa

SEQ ID NO: 2306650 - RNA, 19 nt, Homo sapiens
  misc_RNA (1)...(19): siRNA sense strand
ccauugagacacugaggaa

SEQ ID NO: 2306651 - RNA, 19 nt, Homo sapiens
  misc_RNA (1)...(19): siRNA sense strand
aagaaaacucacuggaaaa

SEQ ID NO: 2306652 - RNA, 19 nt, Homo sapiens
  misc_RNA (1)...(19): siRNA sense strand
acaaacagugauucagaaa

SEQ ID NO: 2306653 - RNA, 19 nt, Homo sapiens
  misc_RNA (1)...(19): siRNA sense strand
ccuuaauagaguucacuaa

SEQ ID NO: 2306654 - RNA, 19 nt, Homo sapiens
  misc_RNA (1)...(19): siRNA sense strand
gggugcagaaacagauuua

SEQ ID NO: 2306655 - RNA, 19 nt, Homo sapiens
  misc_RNA (1)...(19): siRNA sense strand
guggaagaacucauugaaa

SEQ ID NO: 2306656 - RNA, 19 nt, Homo sapiens
  misc_RNA (1)...(19): siRNA sense strand
cccagagggugcagaaaca

SEQ ID NO: 2306657 - RNA, 19 nt, Homo sapiens
  misc_RNA (1)...(19): siRNA sense strand
gucugaagaagguggaaau

SEQ ID NO: 2306658 - RNA, 19 nt, Homo sapiens
  misc_RNA (1)...(19): siRNA sense strand
aggucaucaucaagaauau

SEQ ID NO: 2306659 - RNA, 19 nt, Homo sapiens
  misc_RNA (1)...(19): siRNA sense strand
agaccagcuauuagaaauu

SEQ ID NO: 2306660 - RNA, 19 nt, Homo sapiens
  misc_RNA (1)...(19): siRNA sense strand
aggcauauucaauuggauu

SEQ ID NO: 2306661 - RNA, 19 nt, Homo sapiens
  misc_RNA (1)...(19): siRNA sense strand
auugagacacugaggaaaa

SEQ ID NO: 2306662 - RNA, 19 nt, Homo sapiens
  misc_RNA (1)...(19): siRNA sense strand
cauuacaaacagugauuca

SEQ ID NO: 2306663 - RNA, 19 nt, Homo sapiens
  misc_RNA (1)...(19): siRNA sense strand
uaguauuuguacagggcau

SEQ ID NO: 2306664 - RNA, 19 nt, Homo sapiens
  misc_RNA (1)...(19): siRNA sense strand
ucaaauccuagaagagcaa

SEQ ID NO: 2306665 - RNA, 19 nt, Homo sapiens
  misc_RNA (1)...(19): siRNA sense strand
ugaaaguguucuagcucga

SEQ ID NO: 2306666 - RNA, 19 nt, Homo sapiens
  misc_RNA (1)...(19): siRNA sense strand
gaacaaauacaaauggaug

SEQ ID NO: 2306667 - RNA, 19 nt, Homo sapiens
  misc_RNA (1)...(19): siRNA sense strand
ucagauaggauuauggcuu

SEQ ID NO: 2306668 - RNA, 19 nt, Homo sapiens
  misc_RNA (1)...(19): siRNA sense strand
ucuuaaagccacuucauau

SEQ ID NO: 2306669 - RNA, 19 nt, Homo sapiens
  misc_RNA (1)...(19): siRNA sense strand
gcacauuaugaagcagaaa

SEQ ID NO: 2306670 - RNA, 19 nt, Homo sapiens
  misc_RNA (1)...(19): siRNA sense strand
cuccugaaaugcagcuuaa

SEQ ID NO: 2306671 - RNA, 19 nt, Homo sapiens
  misc_RNA (1)...(19): siRNA sense strand
agaagaggauuuuggccua

SEQ ID NO: 2306672 - RNA, 19 nt, Homo sapiens
  misc_RNA (1)...(19): siRNA sense strand
guggagaagagaucccuaa

SEQ ID NO: 2306673 - RNA, 19 nt, Homo sapiens
  misc_RNA (1)...(19): siRNA sense strand
guuggauucacaaggcaaa

SEQ ID NO: 2306674 - RNA, 19 nt, Homo sapiens
  misc_RNA (1)...(19): siRNA sense strand
agacuuuaaagaagaggau

SEQ ID NO: 2306675 - RNA, 19 nt, Homo sapiens
  misc_RNA (1)...(19): siRNA sense strand
aggauuauggcuucauuaa

SEQ ID NO: 2306676 - RNA, 19 nt, Homo sapiens
  misc_RNA (1)...(19): siRNA sense strand
uauaacuguaaguggagaa

SEQ ID NO: 2306677 - RNA, 19 nt, Homo sapiens
  misc_RNA (1)...(19): siRNA sense strand
uguaaguggagaagagauc

SEQ ID NO: 2306678 - RNA, 19 nt, Homo sapiens
  misc_RNA (1)...(19): siRNA sense strand
accucagggcuuagugaaa

SEQ ID NO: 2306679 - RNA, 19 nt, Homo sapiens
  misc_RNA (1)...(19): siRNA sense strand
uggacagaacuuggaaaua

SEQ ID NO: 2306680 - RNA, 19 nt, Homo sapiens
  misc_RNA (1)...(19): siRNA sense strand
caagaauaugggcuggaau

SEQ ID NO: 2306681 - RNA, 19 nt, Homo sapiens
  misc_RNA (1)...(19): siRNA sense strand
agucugaagaagguggaaa

SEQ ID NO: 2306682 - RNA, 19 nt, Homo sapiens
  misc_RNA (1)...(19): siRNA sense strand
ggauuggagcugcuggaga

SEQ ID NO: 2306683 - RNA, 19 nt, Homo sapiens
  misc_RNA (1)...(19): siRNA sense strand
auggacagaacuuggaaau

SEQ ID NO: 2306684 - RNA, 19 nt, Homo sapiens
  misc_RNA (1)...(19): siRNA sense strand
aagucuaccucugaagaaa

SEQ ID NO: 2306685 - RNA, 19 nt, Homo sapiens
  misc_RNA (1)...(19): siRNA sense strand
uaugcaauccaaaggaauu

SEQ ID NO: 2306686 - RNA, 19 nt, Homo sapiens
  misc_RNA (1)...(19): siRNA sense strand
cuuugaacagucugaagaa

SEQ ID NO: 2306687 - RNA, 19 nt, Homo sapiens
  misc_RNA (1)...(19): siRNA sense strand
ggcaaagaugcauagaaga

SEQ ID NO: 2306688 - RNA, 19 nt, Homo sapiens
  misc_RNA (1)...(19): siRNA sense strand
cuuuaccaguacuuagaaa

SEQ ID NO: 2306689 - RNA, 19 nt, Homo sapiens
  misc_RNA (1)...(19): siRNA sense strand
accuugaauuugaagaaga

SEQ ID NO: 2306690 - RNA, 19 nt, Homo sapiens
  misc_RNA (1)...(19): siRNA sense strand
caacaagggcgauguggaa

SEQ ID NO: 2306691 - RNA, 19 nt, Homo sapiens
  misc_RNA (1)...(19): siRNA sense strand
acgccaagcccgagcagaa

SEQ ID NO: 2306692 - RNA, 19 nt, Homo sapiens
  misc_RNA (1)...(19): siRNA sense strand
aggacgaagaggaggacau

SEQ ID NO: 2306693 - RNA, 19 nt, Homo sapiens
  misc_RNA (1)...(19): siRNA sense strand
ccacgaacucucugcgcua

SEQ ID NO: 2306694 - RNA, 19 nt, Homo sapiens
  misc_RNA (1)...(19): siRNA sense strand
aggacaagaaggacgaaga

SEQ ID NO: 2306695 - RNA, 19 nt, Homo sapiens
  misc_RNA (1)...(19): siRNA sense strand
acaagaaggacgaagagga

SEQ ID NO: 2306696 - RNA, 19 nt, Homo sapiens
  misc_RNA (1)...(19): siRNA sense strand
uggaagacgacuugaucau

SEQ ID NO: 2306697 - RNA, 19 nt, Homo sapiens
  misc_RNA (1)...(19): siRNA sense strand
agaaggacgaagaggagga

SEQ ID NO: 2306698 - RNA, 19 nt, Homo sapiens
  misc_RNA (1)...(19): siRNA sense strand
gggcgauguggaagcguuu

SEQ ID NO: 2306699 - RNA, 19 nt, Homo sapiens
  misc_RNA (1)...(19): siRNA sense strand
cgaaggacaagaaggacga

SEQ ID NO: 2306700 - RNA, 19 nt, Homo sapiens
  misc_RNA (1)...(19): siRNA sense strand
ccgggaacguggaagacga

SEQ ID NO: 2306701 - RNA, 19 nt, Homo sapiens
  misc_RNA (1)...(19): siRNA sense strand
cguccgggaacguggaaga

SEQ ID NO: 2306702 - RNA, 19 nt, Homo sapiens
  misc_RNA (1)...(19): siRNA sense strand
agacagaccaggaugagga

SEQ ID NO: 2306703 - RNA, 19 nt, Homo sapiens
  misc_RNA (1)...(19): siRNA sense strand
ggaacguggaagacgacuu

SEQ ID NO: 2306704 - RNA, 19 nt, Homo sapiens
  misc_RNA (1)...(19): siRNA sense strand
uugccaaagccaugcagaa

SEQ ID NO: 2306705 - RNA, 19 nt, Homo sapiens
  misc_RNA (1)...(19): siRNA sense strand
ccgagcagaaagagggcga

SEQ ID NO: 2306706 - RNA, 19 nt, Homo sapiens
  misc_RNA (1)...(19): siRNA sense strand
gagcagaaagagggcgaca

SEQ ID NO: 2306707 - RNA, 19 nt, Homo sapiens
  misc_RNA (1)...(19): siRNA sense strand
cugggaaacaugagccaca

SEQ ID NO: 2306708 - RNA, 19 nt, Homo sapiens
  misc_RNA (1)...(19): siRNA sense strand
agggcgacacgaaggacaa

SEQ ID NO: 2306709 - RNA, 19 nt, Homo sapiens
  misc_RNA (1)...(19): siRNA sense strand
caacaagggcgauguggaa

SEQ ID NO: 2306710 - RNA, 19 nt, Homo sapiens
  misc_RNA (1)...(19): siRNA sense strand
acgccaagcccgagcagaa

SEQ ID NO: 2306711 - RNA, 19 nt, Homo sapiens
  misc_RNA (1)...(19): siRNA sense strand
aggacgaagaggaggacau

SEQ ID NO: 2306712 - RNA, 19 nt, Homo sapiens
  misc_RNA (1)...(19): siRNA sense strand
ccacgaacucucugcgcua

SEQ ID NO: 2306713 - RNA, 19 nt, Homo sapiens
  misc_RNA (1)...(19): siRNA sense strand
aggacaagaaggacgaaga

SEQ ID NO: 2306714 - RNA, 19 nt, Homo sapiens
  misc_RNA (1)...(19): siRNA sense strand
acaagaaggacgaagagga

SEQ ID NO: 2306715 - RNA, 19 nt, Homo sapiens
  misc_RNA (1)...(19): siRNA sense strand
uggaagacgacuugaucau

SEQ ID NO: 2306716 - RNA, 19 nt, Homo sapiens
  misc_RNA (1)...(19): siRNA sense strand
agaaggacgaagaggagga

SEQ ID NO: 2306717 - RNA, 19 nt, Homo sapiens
  misc_RNA (1)...(19): siRNA sense strand
gggcgauguggaagcguuu

SEQ ID NO: 2306718 - RNA, 19 nt, Homo sapiens
  misc_RNA (1)...(19): siRNA sense strand
cgaaggacaagaaggacga

SEQ ID NO: 2306719 - RNA, 19 nt, Homo sapiens
  misc_RNA (1)...(19): siRNA sense strand
ccgggaacguggaagacga

SEQ ID NO: 2306720 - RNA, 19 nt, Homo sapiens
  misc_RNA (1)...(19): siRNA sense strand
cguccgggaacguggaaga

SEQ ID NO: 2306721 - RNA, 19 nt, Homo sapiens
  misc_RNA (1)...(19): siRNA sense strand
agacagaccaggaugagga

SEQ ID NO: 2306722 - RNA, 19 nt, Homo sapiens
  misc_RNA (1)...(19): siRNA sense strand
ggaacguggaagacgacuu

SEQ ID NO: 2306723 - RNA, 19 nt, Homo sapiens
  misc_RNA (1)...(19): siRNA sense strand
uugccaaagccaugcagaa

SEQ ID NO: 2306724 - RNA, 19 nt, Homo sapiens
  misc_RNA (1)...(19): siRNA sense strand
ccgagcagaaagagggcga

SEQ ID NO: 2306725 - RNA, 19 nt, Homo sapiens
  misc_RNA (1)...(19): siRNA sense strand
gagcagaaagagggcgaca

SEQ ID NO: 2306726 - RNA, 19 nt, Homo sapiens
  misc_RNA (1)...(19): siRNA sense strand
cugggaaacaugagccaca

SEQ ID NO: 2306727 - RNA, 19 nt, Homo sapiens
  misc_RNA (1)...(19): siRNA sense strand
agggcgacacgaaggacaa

SEQ ID NO: 2306728 - RNA, 19 nt, Homo sapiens
  misc_RNA (1)...(19): siRNA sense strand
cgaaggaugaagaugaaaa

SEQ ID NO: 2306729 - RNA, 19 nt, Homo sapiens
  misc_RNA (1)...(19): siRNA sense strand
gcagcaagcacaaagagga

SEQ ID NO: 2306730 - RNA, 19 nt, Homo sapiens
  misc_RNA (1)...(19): siRNA sense strand
cagaugagcuggaugguga

SEQ ID NO: 2306731 - RNA, 19 nt, Homo sapiens
  misc_RNA (1)...(19): siRNA sense strand
ggaacuggaucgaggcucu

SEQ ID NO: 2306732 - RNA, 19 nt, Homo sapiens
  misc_RNA (1)...(19): siRNA sense strand
ugacugaggaccagcaaaa

SEQ ID NO: 2306733 - RNA, 19 nt, Homo sapiens
  misc_RNA (1)...(19): siRNA sense strand
agaaggagguucaggcucu

SEQ ID NO: 2306734 - RNA, 19 nt, Homo sapiens
  misc_RNA (1)...(19): siRNA sense strand
gagaaagaccguacgucca

SEQ ID NO: 2306735 - RNA, 19 nt, Homo sapiens
  misc_RNA (1)...(19): siRNA sense strand
gccacgaggcacuggagaa

SEQ ID NO: 2306736 - RNA, 19 nt, Homo sapiens
  misc_RNA (1)...(19): siRNA sense strand
ggaugucgaucuuggacga

SEQ ID NO: 2306737 - RNA, 19 nt, Homo sapiens
  misc_RNA (1)...(19): siRNA sense strand
cucaaauauuacagagacu

SEQ ID NO: 2306738 - RNA, 19 nt, Homo sapiens
  misc_RNA (1)...(19): siRNA sense strand
ucgcaguggaagaaacauu

SEQ ID NO: 2306739 - RNA, 19 nt, Homo sapiens
  misc_RNA (1)...(19): siRNA sense strand
gagaagaaguggcaggagc

SEQ ID NO: 2306740 - RNA, 19 nt, Homo sapiens
  misc_RNA (1)...(19): siRNA sense strand
aagaagggauggaugucga

SEQ ID NO: 2306741 - RNA, 19 nt, Homo sapiens
  misc_RNA (1)...(19): siRNA sense strand
cagaugagcuggaugguga

SEQ ID NO: 2306742 - RNA, 19 nt, Homo sapiens
  misc_RNA (1)...(19): siRNA sense strand
ggaacuggaucgaggcucu

SEQ ID NO: 2306743 - RNA, 19 nt, Homo sapiens
  misc_RNA (1)...(19): siRNA sense strand
ugacugaggaccagcaaaa

SEQ ID NO: 2306744 - RNA, 19 nt, Homo sapiens
  misc_RNA (1)...(19): siRNA sense strand
agaaggagguucaggcucu

SEQ ID NO: 2306745 - RNA, 19 nt, Homo sapiens
  misc_RNA (1)...(19): siRNA sense strand
gagaaagaccguacgucca

SEQ ID NO: 2306746 - RNA, 19 nt, Homo sapiens
  misc_RNA (1)...(19): siRNA sense strand
gccacgaggcacuggagaa

SEQ ID NO: 2306747 - RNA, 19 nt, Homo sapiens
  misc_RNA (1)...(19): siRNA sense strand
ggaugucgaucuuggacga

SEQ ID NO: 2306748 - RNA, 19 nt, Homo sapiens
  misc_RNA (1)...(19): siRNA sense strand
cucaaauauuacagagacu

SEQ ID NO: 2306749 - RNA, 19 nt, Homo sapiens
  misc_RNA (1)...(19): siRNA sense strand
ucgcaguggaagaaacauu

SEQ ID NO: 2306750 - RNA, 19 nt, Homo sapiens
  misc_RNA (1)...(19): siRNA sense strand
gagaagaaguggcaggagc

SEQ ID NO: 2306751 - RNA, 19 nt, Homo sapiens
  misc_RNA (1)...(19): siRNA sense strand
aagaagggauggaugucga

SEQ ID NO: 2306752 - RNA, 19 nt, Homo sapiens
  misc_RNA (1)...(19): siRNA sense strand
uggaaaggaaagagcaaga

SEQ ID NO: 2306753 - RNA, 19 nt, Homo sapiens
  misc_RNA (1)...(19): siRNA sense strand
ccuggaaaggaaagagcaa

SEQ ID NO: 2306754 - RNA, 19 nt, Homo sapiens
  misc_RNA (1)...(19): siRNA sense strand
acaacauaagagagaagaa

SEQ ID NO: 2306755 - RNA, 19 nt, Homo sapiens
  misc_RNA (1)...(19): siRNA sense strand
cgacaacauaagagagaag

SEQ ID NO: 2306756 - RNA, 19 nt, Homo sapiens
  misc_RNA (1)...(19): siRNA sense strand
acauaagagagaagaagga

SEQ ID NO: 2306757 - RNA, 19 nt, Homo sapiens
  misc_RNA (1)...(19): siRNA sense strand
uugaaauacaucagcgaga

SEQ ID NO: 2306758 - RNA, 19 nt, Homo sapiens
  misc_RNA (1)...(19): siRNA sense strand
uguuaaagucagaaagaag

SEQ ID NO: 2306759 - RNA, 19 nt, Homo sapiens
  misc_RNA (1)...(19): siRNA sense strand
aggaagucgucaaggccau

SEQ ID NO: 2306760 - RNA, 19 nt, Homo sapiens
  misc_RNA (1)...(19): siRNA sense strand
cauuuugggaggagauaaa

SEQ ID NO: 2306761 - RNA, 19 nt, Homo sapiens
  misc_RNA (1)...(19): siRNA sense strand
aagaauuagagcagcugaa

SEQ ID NO: 2306762 - RNA, 19 nt, Homo sapiens
  misc_RNA (1)...(19): siRNA sense strand
auaagagagaagaaggaga

SEQ ID NO: 2306763 - RNA, 19 nt, Homo sapiens
  misc_RNA (1)...(19): siRNA sense strand
aauuagagcagcugaaaau

SEQ ID NO: 2306764 - RNA, 19 nt, Homo sapiens
  misc_RNA (1)...(19): siRNA sense strand
gaaaauggauugugagcac

SEQ ID NO: 2306765 - RNA, 19 nt, Homo sapiens
  misc_RNA (1)...(19): siRNA sense strand
gaauuagagcagcugaaaa

SEQ ID NO: 2306766 - RNA, 19 nt, Homo sapiens
  misc_RNA (1)...(19): siRNA sense strand
uaccaaacucaaagugcua

SEQ ID NO: 2306767 - RNA, 19 nt, Homo sapiens
  misc_RNA (1)...(19): siRNA sense strand
acaacugaagugaugcaaa

SEQ ID NO: 2306768 - RNA, 19 nt, Homo sapiens
  misc_RNA (1)...(19): siRNA sense strand
uauugcagcuucugggaga

SEQ ID NO: 2306769 - RNA, 19 nt, Homo sapiens
  misc_RNA (1)...(19): siRNA sense strand
ugggaacuaaagaggaauu

SEQ ID NO: 2306770 - RNA, 19 nt, Homo sapiens
  misc_RNA (1)...(19): siRNA sense strand
ugaaugaagcgaagcagca

SEQ ID NO: 2306771 - RNA, 19 nt, Homo sapiens
  misc_RNA (1)...(19): siRNA sense strand
aggaaauggaucuggaaaa

SEQ ID NO: 2306772 - RNA, 19 nt, Homo sapiens
  misc_RNA (1)...(19): siRNA sense strand
acaagagagagaaggaaca

SEQ ID NO: 2306773 - RNA, 19 nt, Homo sapiens
  misc_RNA (1)...(19): siRNA sense strand
agacuaaagaagcaggaga

SEQ ID NO: 2306774 - RNA, 19 nt, Homo sapiens
  misc_RNA (1)...(19): siRNA sense strand
acguaaaguagaaggugau

SEQ ID NO: 2306775 - RNA, 19 nt, Homo sapiens
  misc_RNA (1)...(19): siRNA sense strand
gaggaagaggagaugguca

SEQ ID NO: 2306776 - RNA, 19 nt, Homo sapiens
  misc_RNA (1)...(19): siRNA sense strand
aucaagauccagaggaaga

SEQ ID NO: 2306777 - RNA, 19 nt, Homo sapiens
  misc_RNA (1)...(19): siRNA sense strand
uggacaagagagagaagga

SEQ ID NO: 2306778 - RNA, 19 nt, Homo sapiens
  misc_RNA (1)...(19): siRNA sense strand
auccagaggaagaggagau

SEQ ID NO: 2306779 - RNA, 19 nt, Homo sapiens
  misc_RNA (1)...(19): siRNA sense strand
aacguaaaguagaagguga

SEQ ID NO: 2306780 - RNA, 19 nt, Homo sapiens
  misc_RNA (1)...(19): siRNA sense strand
ccggugaaucucagcaaga

SEQ ID NO: 2306781 - RNA, 19 nt, Homo sapiens
  misc_RNA (1)...(19): siRNA sense strand
ccuaagcaugcuaagacua

SEQ ID NO: 2306782 - RNA, 19 nt, Homo sapiens
  misc_RNA (1)...(19): siRNA sense strand
ucacaaugacagagggaaa

SEQ ID NO: 2306783 - RNA, 19 nt, Homo sapiens
  misc_RNA (1)...(19): siRNA sense strand
cauugaaagauacgagaaa

SEQ ID NO: 2306784 - RNA, 19 nt, Homo sapiens
  misc_RNA (1)...(19): siRNA sense strand
gggauauagaugaggcuuu

SEQ ID NO: 2306785 - RNA, 19 nt, Homo sapiens
  misc_RNA (1)...(19): siRNA sense strand
aagacgacgccuugagaaa

SEQ ID NO: 2306786 - RNA, 19 nt, Homo sapiens
  misc_RNA (1)...(19): siRNA sense strand
ccaaagaagaaaugcacau

SEQ ID NO: 2306787 - RNA, 19 nt, Homo sapiens
  misc_RNA (1)...(19): siRNA sense strand
ccgaauucuuuaagggcau

SEQ ID NO: 2306788 - RNA, 19 nt, Homo sapiens
  misc_RNA (1)...(19): siRNA sense strand
gaagcaagcagaaggguga

SEQ ID NO: 2306789 - RNA, 19 nt, Homo sapiens
  misc_RNA (1)...(19): siRNA sense strand
agguuugacuccagaggaa

SEQ ID NO: 2306790 - RNA, 19 nt, Homo sapiens
  misc_RNA (1)...(19): siRNA sense strand
cauuaggagaccauggaaa

SEQ ID NO: 2306791 - RNA, 19 nt, Homo sapiens
  misc_RNA (1)...(19): siRNA sense strand
gaauaugcauugcugggaa

SEQ ID NO: 2306792 - RNA, 19 nt, Homo sapiens
  misc_RNA (1)...(19): siRNA sense strand
aguaacagaaccagagaca

SEQ ID NO: 2306793 - RNA, 19 nt, Homo sapiens
  misc_RNA (1)...(19): siRNA sense strand
ugaaaacacuagagagcuu

SEQ ID NO: 2306794 - RNA, 19 nt, Homo sapiens
  misc_RNA (1)...(19): siRNA sense strand
auaaaggaagagaggaaaa

SEQ ID NO: 2306795 - RNA, 19 nt, Homo sapiens
  misc_RNA (1)...(19): siRNA sense strand
gugaaaagaaagaacagaa

SEQ ID NO: 2306796 - RNA, 19 nt, Homo sapiens
  misc_RNA (1)...(19): siRNA sense strand
ccuugcaaguauagcagaa

SEQ ID NO: 2306797 - RNA, 19 nt, Homo sapiens
  misc_RNA (1)...(19): siRNA sense strand
agguuuggcaggaaauaaa

SEQ ID NO: 2306798 - RNA, 19 nt, Homo sapiens
  misc_RNA (1)...(19): siRNA sense strand
gaagaaaugcacaugccua

SEQ ID NO: 2306799 - RNA, 19 nt, Homo sapiens
  misc_RNA (1)...(19): siRNA sense strand
cagaaauggcaacagguuu

SEQ ID NO: 2306800 - RNA, 19 nt, Homo sapiens
  misc_RNA (1)...(19): siRNA sense strand
aauaugcauugcugggaaa

SEQ ID NO: 2306801 - RNA, 19 nt, Homo sapiens
  misc_RNA (1)...(19): siRNA sense strand
cuuuaagggcauuaggaga

SEQ ID NO: 2306802 - RNA, 19 nt, Homo sapiens
  misc_RNA (1)...(19): siRNA sense strand
ggaugguguuggagguacu

SEQ ID NO: 2306803 - RNA, 19 nt, Homo sapiens
  misc_RNA (1)...(19): siRNA sense strand
cccuaaaucacaugguaau

SEQ ID NO: 2306804 - RNA, 19 nt, Homo sapiens
  misc_RNA (1)...(19): siRNA sense strand
uuccaaauacagaggagaa

SEQ ID NO: 2306805 - RNA, 19 nt, Homo sapiens
  misc_RNA (1)...(19): siRNA sense strand
gcuuuaaacuggacagcac

SEQ ID NO: 2306806 - RNA, 19 nt, Homo sapiens
  misc_RNA (1)...(19): siRNA sense strand
gcagaagggugaaagcgga

SEQ ID NO: 2306807 - RNA, 19 nt, Homo sapiens
  misc_RNA (1)...(19): siRNA sense strand
gaggagaaucugagaagcu

SEQ ID NO: 2306808 - RNA, 19 nt, Homo sapiens
  misc_RNA (1)...(19): siRNA sense strand
agaugaggcuuuaagacga

SEQ ID NO: 2306809 - RNA, 19 nt, Homo sapiens
  misc_RNA (1)...(19): siRNA sense strand
gaacaaaucaccugcugca

SEQ ID NO: 2306810 - RNA, 19 nt, Homo sapiens
  misc_RNA (1)...(19): siRNA sense strand
acagaaugcaagacaacau

SEQ ID NO: 2306811 - RNA, 19 nt, Homo sapiens
  misc_RNA (1)...(19): siRNA sense strand
agauacgagaaauggauau

SEQ ID NO: 2306812 - RNA, 19 nt, Homo sapiens
  misc_RNA (1)...(19): siRNA sense strand
cuccagaggaaauccgaaa

SEQ ID NO: 2306813 - RNA, 19 nt, Homo sapiens
  misc_RNA (1)...(19): siRNA sense strand
ccaaaaugguuaugguucu

SEQ ID NO: 2306814 - RNA, 19 nt, Homo sapiens
  misc_RNA (1)...(19): siRNA sense strand
cuucuuaugauuagugaga

SEQ ID NO: 2306815 - RNA, 19 nt, Homo sapiens
  misc_RNA (1)...(19): siRNA sense strand
ugguaaucguccaaguaca

SEQ ID NO: 2306816 - RNA, 19 nt, Homo sapiens
  misc_RNA (1)...(19): siRNA sense strand
acucagucaaagauacaua

SEQ ID NO: 2306817 - RNA, 19 nt, Homo sapiens
  misc_RNA (1)...(19): siRNA sense strand
acccuaaaucacaugguaa

SEQ ID NO: 2306818 - RNA, 19 nt, Homo sapiens
  misc_RNA (1)...(19): siRNA sense strand
aauaaaggaagagaggaaa

SEQ ID NO: 2306819 - RNA, 19 nt, Homo sapiens
  misc_RNA (1)...(19): siRNA sense strand
aagacuuaguagaagcuuu

SEQ ID NO: 2306820 - RNA, 19 nt, Homo sapiens
  misc_RNA (1)...(19): siRNA sense strand
guuugacuccagaggaaau

SEQ ID NO: 2306821 - RNA, 19 nt, Homo sapiens
  misc_RNA (1)...(19): siRNA sense strand
agggaguucuugaccaaau

SEQ ID NO: 2306822 - RNA, 19 nt, Homo sapiens
  misc_RNA (1)...(19): siRNA sense strand
ccggauaugauaaagacuu

SEQ ID NO: 2306823 - RNA, 19 nt, Homo sapiens
  misc_RNA (1)...(19): siRNA sense strand
cugagaagcuuguucgucu

SEQ ID NO: 2306824 - RNA, 19 nt, Homo sapiens
  misc_RNA (1)...(19): siRNA sense strand
guacucagucaaagauaca

SEQ ID NO: 2306825 - RNA, 19 nt, Homo sapiens
  misc_RNA (1)...(19): siRNA sense strand
uggaauuggcugaugaugu

SEQ ID NO: 2306826 - RNA, 19 nt, Homo sapiens
  misc_RNA (1)...(19): siRNA sense strand
gaugcguccuugauggcaa

SEQ ID NO: 2306827 - RNA, 19 nt, Homo sapiens
  misc_RNA (1)...(19): siRNA sense strand
uugaaagauacgagaaaug

SEQ ID NO: 2306828 - RNA, 19 nt, Homo sapiens
  misc_RNA (1)...(19): siRNA sense strand
cuugaaagcggcacagcau

SEQ ID NO: 2306829 - RNA, 19 nt, Homo sapiens
  misc_RNA (1)...(19): siRNA sense strand
augcauugcugggaaacua

SEQ ID NO: 2306830 - RNA, 19 nt, Homo sapiens
  misc_RNA (1)...(19): siRNA sense strand
cuacagaaugcaagacaac

SEQ ID NO: 2306831 - RNA, 19 nt, Homo sapiens
  misc_RNA (1)...(19): siRNA sense strand
cugaagaacaugaagcaag

SEQ ID NO: 2306832 - RNA, 19 nt, Homo sapiens
  misc_RNA (1)...(19): siRNA sense strand
agaggaaauccgaaaucuu

SEQ ID NO: 2306833 - RNA, 19 nt, Homo sapiens
  misc_RNA (1)...(19): siRNA sense strand
acauugaaagauacgagaa

SEQ ID NO: 2306834 - RNA, 19 nt, Homo sapiens
  misc_RNA (1)...(19): siRNA sense strand
agacaagauuaaagaggca

SEQ ID NO: 2306835 - RNA, 19 nt, Homo sapiens
  misc_RNA (1)...(19): siRNA sense strand
cgcaauaacugcuggagga

SEQ ID NO: 2306836 - RNA, 19 nt, Homo sapiens
  misc_RNA (1)...(19): siRNA sense strand
ggaauugaaaguauggcaa

SEQ ID NO: 2306837 - RNA, 19 nt, Homo sapiens
  misc_RNA (1)...(19): siRNA sense strand
ggaucaaguuguggcggaa

SEQ ID NO: 2306838 - RNA, 19 nt, Homo sapiens
  misc_RNA (1)...(19): siRNA sense strand
ccagaucgccuuagggaca

SEQ ID NO: 2306839 - RNA, 19 nt, Homo sapiens
  misc_RNA (1)...(19): siRNA sense strand
aagccaaaguagacaagau

SEQ ID NO: 2306840 - RNA, 19 nt, Homo sapiens
  misc_RNA (1)...(19): siRNA sense strand
gcgaaagggaagaggagag

SEQ ID NO: 2306841 - RNA, 19 nt, Homo sapiens
  misc_RNA (1)...(19): siRNA sense strand
gaauuaacguggcugacau

SEQ ID NO: 2306842 - RNA, 19 nt, Homo sapiens
  misc_RNA (1)...(19): siRNA sense strand
guuacagaaacauggaauu

SEQ ID NO: 2306843 - RNA, 19 nt, Homo sapiens
  misc_RNA (1)...(19): siRNA sense strand
gauuaaagaggcagcgaac

SEQ ID NO: 2306844 - RNA, 19 nt, Homo sapiens
  misc_RNA (1)...(19): siRNA sense strand
gacaacaagaagagcucua

SEQ ID NO: 2306845 - RNA, 19 nt, Homo sapiens
  misc_RNA (1)...(19): siRNA sense strand
cuacccaggaggaaagauu

SEQ ID NO: 2306846 - RNA, 19 nt, Homo sapiens
  misc_RNA (1)...(19): siRNA sense strand
ugcauauacuagugaacau

SEQ ID NO: 2306847 - RNA, 19 nt, Homo sapiens
  misc_RNA (1)...(19): siRNA sense strand
agauuaaagaggcagcgaa

SEQ ID NO: 2306848 - RNA, 19 nt, Homo sapiens
  misc_RNA (1)...(19): siRNA sense strand
ccaccgggagccaggaauu

SEQ ID NO: 2306849 - RNA, 19 nt, Homo sapiens
  misc_RNA (1)...(19): siRNA sense strand
acagaugacaacaagaaga

SEQ ID NO: 2306850 - RNA, 19 nt, Homo sapiens
  misc_RNA (1)...(19): siRNA sense strand
uggcugacauuaagaaacu

SEQ ID NO: 2306851 - RNA, 19 nt, Homo sapiens
  misc_RNA (1)...(19): siRNA sense strand
agcaaaguuccaugaagaa

SEQ ID NO: 2306852 - RNA, 19 nt, Homo sapiens
  misc_RNA (1)...(19): siRNA sense strand
caggauuccaagaugaaga

SEQ ID NO: 2306853 - RNA, 19 nt, Homo sapiens
  misc_RNA (1)...(19): siRNA sense strand
agccaaaguagacaagauu

SEQ ID NO: 2306854 - RNA, 19 nt, Homo sapiens
  misc_RNA (1)...(19): siRNA sense strand
caaacuaauugaaccagga

SEQ ID NO: 2306855 - RNA, 19 nt, Homo sapiens
  misc_RNA (1)...(19): siRNA sense strand
aaguauggcaauuacagaa

SEQ ID NO: 2306856 - RNA, 19 nt, Homo sapiens
  misc_RNA (1)...(19): siRNA sense strand
ccuccacaagaaagggaaa

SEQ ID NO: 2306857 - RNA, 19 nt, Homo sapiens
  misc_RNA (1)...(19): siRNA sense strand
aagaaaggcguguggcuca

SEQ ID NO: 2306858 - RNA, 19 nt, Homo sapiens
  misc_RNA (1)...(19): siRNA sense strand
ggaagaaaggcguguggcu

SEQ ID NO: 2306859 - RNA, 19 nt, Homo sapiens
  misc_RNA (1)...(19): siRNA sense strand
ugaaauaugagaaggccga

SEQ ID NO: 2306860 - RNA, 19 nt, Homo sapiens
  misc_RNA (1)...(19): siRNA sense strand
ccgcacacugagaaagcaa

SEQ ID NO: 2306861 - RNA, 19 nt, Homo sapiens
  misc_RNA (1)...(19): siRNA sense strand
cugccuacauacagcuauu

SEQ ID NO: 2306862 - RNA, 19 nt, Homo sapiens
  misc_RNA (1)...(19): siRNA sense strand
ugaaauaugagaaggccga

SEQ ID NO: 2306863 - RNA, 19 nt, Homo sapiens
  misc_RNA (1)...(19): siRNA sense strand
ccgcacacugagaaagcaa

SEQ ID NO: 2306864 - RNA, 19 nt, Homo sapiens
  misc_RNA (1)...(19): siRNA sense strand
cugccuacauacagcuauu

SEQ ID NO: 2306865 - RNA, 19 nt, Homo sapiens
  misc_RNA (1)...(19): siRNA sense strand
ugaaauaugagaaggccga

SEQ ID NO: 2306866 - RNA, 19 nt, Homo sapiens
  misc_RNA (1)...(19): siRNA sense strand
ccgcacacugagaaagcaa

SEQ ID NO: 2306867 - RNA, 19 nt, Homo sapiens
  misc_RNA (1)...(19): siRNA sense strand
cugccuacauacagcuauu

SEQ ID NO: 2306868 - RNA, 19 nt, Homo sapiens
  misc_RNA (1)...(19): siRNA sense strand
ccgcagauuuugucagaaa

SEQ ID NO: 2306869 - RNA, 19 nt, Homo sapiens
  misc_RNA (1)...(19): siRNA sense strand
caauuugaacagugaggaa

SEQ ID NO: 2306870 - RNA, 19 nt, Homo sapiens
  misc_RNA (1)...(19): siRNA sense strand
aagauauccacgagcaaua

SEQ ID NO: 2306871 - RNA, 19 nt, Homo sapiens
  misc_RNA (1)...(19): siRNA sense strand
cugaagaagagguacagaa

SEQ ID NO: 2306872 - RNA, 19 nt, Homo sapiens
  misc_RNA (1)...(19): siRNA sense strand
cggugggaucuguggagaa

SEQ ID NO: 2306873 - RNA, 19 nt, Homo sapiens
  misc_RNA (1)...(19): siRNA sense strand
gcaaagaagugaucgcuag

SEQ ID NO: 2306874 - RNA, 19 nt, Homo sapiens
  misc_RNA (1)...(19): siRNA sense strand
cguaaaugccuuugucgau

SEQ ID NO: 2306875 - RNA, 19 nt, Homo sapiens
  misc_RNA (1)...(19): siRNA sense strand
cuucuaucuuggaguaaaa

SEQ ID NO: 2306876 - RNA, 19 nt, Homo sapiens
  misc_RNA (1)...(19): siRNA sense strand
ucaagauauccacgagcaa

SEQ ID NO: 2306877 - RNA, 19 nt, Homo sapiens
  misc_RNA (1)...(19): siRNA sense strand
guggagaaagauugugaca

SEQ ID NO: 2306878 - RNA, 19 nt, Homo sapiens
  misc_RNA (1)...(19): siRNA sense strand
guagauauugacauggcaa

SEQ ID NO: 2306879 - RNA, 19 nt, Homo sapiens
  misc_RNA (1)...(19): siRNA sense strand
cugaauaaacagaugguug

SEQ ID NO: 2306880 - RNA, 19 nt, Homo sapiens
  misc_RNA (1)...(19): siRNA sense strand
cauuauggcaccaggaaac

SEQ ID NO: 2306881 - RNA, 19 nt, Homo sapiens
  misc_RNA (1)...(19): siRNA sense strand
cagaagaagcuacgcaaac

SEQ ID NO: 2306882 - RNA, 19 nt, Homo sapiens
  misc_RNA (1)...(19): siRNA sense strand
uuccaaaggagcuagcaaa

SEQ ID NO: 2306883 - RNA, 19 nt, Homo sapiens
  misc_RNA (1)...(19): siRNA sense strand
aagaagugaucgcuagcau

SEQ ID NO: 2306884 - RNA, 19 nt, Homo sapiens
  misc_RNA (1)...(19): siRNA sense strand
gugaaagcuaacauugaau

SEQ ID NO: 2306885 - RNA, 19 nt, Homo sapiens
  misc_RNA (1)...(19): siRNA sense strand
cuaugggaguagauauuga

SEQ ID NO: 2306886 - RNA, 19 nt, Homo sapiens
  misc_RNA (1)...(19): siRNA sense strand
agguagaggaagaggauga

SEQ ID NO: 2306887 - RNA, 19 nt, Homo sapiens
  misc_RNA (1)...(19): siRNA sense strand
aggaggagagcgaggaaga

SEQ ID NO: 2306888 - RNA, 19 nt, Homo sapiens
  misc_RNA (1)...(19): siRNA sense strand
agagcgaggaagaggaaga

SEQ ID NO: 2306889 - RNA, 19 nt, Homo sapiens
  misc_RNA (1)...(19): siRNA sense strand
aggaagaggaagaggacag

SEQ ID NO: 2306890 - RNA, 19 nt, Homo sapiens
  misc_RNA (1)...(19): siRNA sense strand
gcgaggaagaggaagagga

SEQ ID NO: 2306891 - RNA, 19 nt, Homo sapiens
  misc_RNA (1)...(19): siRNA sense strand
aggacagugaugaggaaga

SEQ ID NO: 2306892 - RNA, 19 nt, Homo sapiens
  misc_RNA (1)...(19): siRNA sense strand
ucgcagucccuguggccaa

SEQ ID NO: 2306893 - RNA, 19 nt, Homo sapiens
  misc_RNA (1)...(19): siRNA sense strand
aggaagaaguugagcugug

SEQ ID NO: 2306894 - RNA, 19 nt, Homo sapiens
  misc_RNA (1)...(19): siRNA sense strand
aggaagaggaugaugcgga

SEQ ID NO: 2306895 - RNA, 19 nt, Homo sapiens
  misc_RNA (1)...(19): siRNA sense strand
uuucugaggaggagagcga

SEQ ID NO: 2306896 - RNA, 19 nt, Homo sapiens
  misc_RNA (1)...(19): siRNA sense strand
cgguacugcagcugccuua

SEQ ID NO: 2306897 - RNA, 19 nt, Homo sapiens
  misc_RNA (1)...(19): siRNA sense strand
agauuguuacgaugagcaa

SEQ ID NO: 2306898 - RNA, 19 nt, Homo sapiens
  misc_RNA (1)...(19): siRNA sense strand
guguaauggaggagcuaua

SEQ ID NO: 2306899 - RNA, 19 nt, Homo sapiens
  misc_RNA (1)...(19): siRNA sense strand
aaguaaugaagaagagcaa

SEQ ID NO: 2306900 - RNA, 19 nt, Homo sapiens
  misc_RNA (1)...(19): siRNA sense strand
auaagguaccagauggaaa

SEQ ID NO: 2306901 - RNA, 19 nt, Homo sapiens
  misc_RNA (1)...(19): siRNA sense strand
gaagaaguguaauggagga

SEQ ID NO: 2306902 - RNA, 19 nt, Homo sapiens
  misc_RNA (1)...(19): siRNA sense strand
guaaugaagaagagcaagu

SEQ ID NO: 2306903 - RNA, 19 nt, Homo sapiens
  misc_RNA (1)...(19): siRNA sense strand
aagaagagcaaguguggca

SEQ ID NO: 2306904 - RNA, 19 nt, Homo sapiens
  misc_RNA (1)...(19): siRNA sense strand
agaaaguaaugaagaagag

SEQ ID NO: 2306905 - RNA, 19 nt, Homo sapiens
  misc_RNA (1)...(19): siRNA sense strand
gauuauauaagguaccaga

SEQ ID NO: 2306906 - RNA, 19 nt, Homo sapiens
  misc_RNA (1)...(19): siRNA sense strand
guguaauggaggagcuaua

SEQ ID NO: 2306907 - RNA, 19 nt, Homo sapiens
  misc_RNA (1)...(19): siRNA sense strand
aaguaaugaagaagagcaa

SEQ ID NO: 2306908 - RNA, 19 nt, Homo sapiens
  misc_RNA (1)...(19): siRNA sense strand
auaagguaccagauggaaa

SEQ ID NO: 2306909 - RNA, 19 nt, Homo sapiens
  misc_RNA (1)...(19): siRNA sense strand
gaagaaguguaauggagga

SEQ ID NO: 2306910 - RNA, 19 nt, Homo sapiens
  misc_RNA (1)...(19): siRNA sense strand
guaaugaagaagagcaagu

SEQ ID NO: 2306911 - RNA, 19 nt, Homo sapiens
  misc_RNA (1)...(19): siRNA sense strand
aagaagagcaaguguggca

SEQ ID NO: 2306912 - RNA, 19 nt, Homo sapiens
  misc_RNA (1)...(19): siRNA sense strand
agaaaguaaugaagaagag

SEQ ID NO: 2306913 - RNA, 19 nt, Homo sapiens
  misc_RNA (1)...(19): siRNA sense strand
gauuauauaagguaccaga

SEQ ID NO: 2306914 - RNA, 19 nt, Homo sapiens
  misc_RNA (1)...(19): siRNA sense strand
guguaauggaggagcuaua

SEQ ID NO: 2306915 - RNA, 19 nt, Homo sapiens
  misc_RNA (1)...(19): siRNA sense strand
aaguaaugaagaagagcaa

SEQ ID NO: 2306916 - RNA, 19 nt, Homo sapiens
  misc_RNA (1)...(19): siRNA sense strand
auaagguaccagauggaaa

SEQ ID NO: 2306917 - RNA, 19 nt, Homo sapiens
  misc_RNA (1)...(19): siRNA sense strand
gaagaaguguaauggagga

SEQ ID NO: 2306918 - RNA, 19 nt, Homo sapiens
  misc_RNA (1)...(19): siRNA sense strand
guaaugaagaagagcaagu

SEQ ID NO: 2306919 - RNA, 19 nt, Homo sapiens
  misc_RNA (1)...(19): siRNA sense strand
aagaagagcaaguguggca

SEQ ID NO: 2306920 - RNA, 19 nt, Homo sapiens
  misc_RNA (1)...(19): siRNA sense strand
agaaaguaaugaagaagag

SEQ ID NO: 2306921 - RNA, 19 nt, Homo sapiens
  misc_RNA (1)...(19): siRNA sense strand
gauuauauaagguaccaga

SEQ ID NO: 2306922 - RNA, 19 nt, Homo sapiens
  misc_RNA (1)...(19): siRNA sense strand
guguaauggaggagcuaua

SEQ ID NO: 2306923 - RNA, 19 nt, Homo sapiens
  misc_RNA (1)...(19): siRNA sense strand
aaguaaugaagaagagcaa

SEQ ID NO: 2306924 - RNA, 19 nt, Homo sapiens
  misc_RNA (1)...(19): siRNA sense strand
auaagguaccagauggaaa

SEQ ID NO: 2306925 - RNA, 19 nt, Homo sapiens
  misc_RNA (1)...(19): siRNA sense strand
gaagaaguguaauggagga

SEQ ID NO: 2306926 - RNA, 19 nt, Homo sapiens
  misc_RNA (1)...(19): siRNA sense strand
guaaugaagaagagcaagu

SEQ ID NO: 2306927 - RNA, 19 nt, Homo sapiens
  misc_RNA (1)...(19): siRNA sense strand
aagaagagcaaguguggca

SEQ ID NO: 2306928 - RNA, 19 nt, Homo sapiens
  misc_RNA (1)...(19): siRNA sense strand
agaaaguaaugaagaagag

SEQ ID NO: 2306929 - RNA, 19 nt, Homo sapiens
  misc_RNA (1)...(19): siRNA sense strand
gauuauauaagguaccaga

SEQ ID NO: 2306930 - RNA, 19 nt, Homo sapiens
  misc_RNA (1)...(19): siRNA sense strand
gagaagaggaugauggaca

SEQ ID NO: 2306931 - RNA, 19 nt, Homo sapiens
  misc_RNA (1)...(19): siRNA sense strand
cugaaaaugcagaaagaaa

SEQ ID NO: 2306932 - RNA, 19 nt, Homo sapiens
  misc_RNA (1)...(19): siRNA sense strand
gcuauggagaagagagcua

SEQ ID NO: 2306933 - RNA, 19 nt, Homo sapiens
  misc_RNA (1)...(19): siRNA sense strand
caaauaaagaggagaccau

SEQ ID NO: 2306934 - RNA, 19 nt, Homo sapiens
  misc_RNA (1)...(19): siRNA sense strand
acacaagaauggaaggcau

SEQ ID NO: 2306935 - RNA, 19 nt, Homo sapiens
  misc_RNA (1)...(19): siRNA sense strand
ugcaggagguagagagaau

SEQ ID NO: 2306936 - RNA, 19 nt, Homo sapiens
  misc_RNA (1)...(19): siRNA sense strand
uagccaaggaagugacaua

SEQ ID NO: 2306937 - RNA, 19 nt, Homo sapiens
  misc_RNA (1)...(19): siRNA sense strand
ccuuacuacaucagaaaua

SEQ ID NO: 2306938 - RNA, 19 nt, Homo sapiens
  misc_RNA (1)...(19): siRNA sense strand
ugguaugggaacagggaau

SEQ ID NO: 2306939 - RNA, 19 nt, Homo sapiens
  misc_RNA (1)...(19): siRNA sense strand
uugaagaagcagcuggaua

SEQ ID NO: 2306940 - RNA, 19 nt, Homo sapiens
  misc_RNA (1)...(19): siRNA sense strand
agaacaagcaauucagcua

SEQ ID NO: 2306941 - RNA, 19 nt, Homo sapiens
  misc_RNA (1)...(19): siRNA sense strand
cugaaaagcuccaggcuca

SEQ ID NO: 2306942 - RNA, 19 nt, Homo sapiens
  misc_RNA (1)...(19): siRNA sense strand
cugcaacugaagaaagaua

SEQ ID NO: 2306943 - RNA, 19 nt, Homo sapiens
  misc_RNA (1)...(19): siRNA sense strand
aggaggaggacgaggacuu

SEQ ID NO: 2306944 - RNA, 19 nt, Homo sapiens
  misc_RNA (1)...(19): siRNA sense strand
cgacuugguuccaggcaca

SEQ ID NO: 2306945 - RNA, 19 nt, Homo sapiens
  misc_RNA (1)...(19): siRNA sense strand
ugaagguaucuuugugaaa

SEQ ID NO: 2306946 - RNA, 19 nt, Homo sapiens
  misc_RNA (1)...(19): siRNA sense strand
acuaugagacugugaugaa

SEQ ID NO: 2306947 - RNA, 19 nt, Homo sapiens
  misc_RNA (1)...(19): siRNA sense strand
aggcggagggcuugaggua

SEQ ID NO: 2306948 - RNA, 19 nt, Homo sapiens
  misc_RNA (1)...(19): siRNA sense strand
uagagagaauggauggcua

SEQ ID NO: 2306949 - RNA, 19 nt, Homo sapiens
  misc_RNA (1)...(19): siRNA sense strand
guggaagggagaagagcuu

SEQ ID NO: 2306950 - RNA, 19 nt, Homo sapiens
  misc_RNA (1)...(19): siRNA sense strand
cgccauacaaauagcacaa

SEQ ID NO: 2306951 - RNA, 19 nt, Homo sapiens
  misc_RNA (1)...(19): siRNA sense strand
agacauggaaacagcaaaa

SEQ ID NO: 2306952 - RNA, 19 nt, Homo sapiens
  misc_RNA (1)...(19): siRNA sense strand
guguaaaauucuggaacaa

SEQ ID NO: 2306953 - RNA, 19 nt, Homo sapiens
  misc_RNA (1)...(19): siRNA sense strand
auaacgaguuuguggaguu

SEQ ID NO: 2306954 - RNA, 19 nt, Homo sapiens
  misc_RNA (1)...(19): siRNA sense strand
gugaaacacaagaauggaa

SEQ ID NO: 2306955 - RNA, 19 nt, Homo sapiens
  misc_RNA (1)...(19): siRNA sense strand
gguacuacaacaagcaaaa

SEQ ID NO: 2306956 - RNA, 19 nt, Homo sapiens
  misc_RNA (1)...(19): siRNA sense strand
gguguaaaauucuggaaca

SEQ ID NO: 2306957 - RNA, 19 nt, Homo sapiens
  misc_RNA (1)...(19): siRNA sense strand
ccaacaugucccacaacaa

SEQ ID NO: 2306958 - RNA, 19 nt, Homo sapiens
  misc_RNA (1)...(19): siRNA sense strand
caaacugaagacauggaaa

SEQ ID NO: 2306959 - RNA, 19 nt, Homo sapiens
  misc_RNA (1)...(19): siRNA sense strand
ucucagacaagcuuggaua

SEQ ID NO: 2306960 - RNA, 19 nt, Homo sapiens
  misc_RNA (1)...(19): siRNA sense strand
gaggaggguggaagggaga

SEQ ID NO: 2306961 - RNA, 19 nt, Homo sapiens
  misc_RNA (1)...(19): siRNA sense strand
ccgagaggacacagcgaga

SEQ ID NO: 2306962 - RNA, 19 nt, Homo sapiens
  misc_RNA (1)...(19): siRNA sense strand
acgaggacuucgaggagga

SEQ ID NO: 2306963 - RNA, 19 nt, Homo sapiens
  misc_RNA (1)...(19): siRNA sense strand
agacucgaguagaugcaaa

SEQ ID NO: 2306964 - RNA, 19 nt, Homo sapiens
  misc_RNA (1)...(19): siRNA sense strand
ccagaagaccucaagggau

SEQ ID NO: 2306965 - RNA, 19 nt, Homo sapiens
  misc_RNA (1)...(19): siRNA sense strand
aguaugaaucccaggacuu

SEQ ID NO: 2306966 - RNA, 19 nt, Homo sapiens
  misc_RNA (1)...(19): siRNA sense strand
ccaaucaggaggaggucuu

SEQ ID NO: 2306967 - RNA, 19 nt, Homo sapiens
  misc_RNA (1)...(19): siRNA sense strand
acgaaugaugaaaggugua

SEQ ID NO: 2306968 - RNA, 19 nt, Homo sapiens
  misc_RNA (1)...(19): siRNA sense strand
uguacaugcaggagguaga

SEQ ID NO: 2306969 - RNA, 19 nt, Homo sapiens
  misc_RNA (1)...(19): siRNA sense strand
cugaaaugcuguacaugca

SEQ ID NO: 2306970 - RNA, 19 nt, Homo sapiens
  misc_RNA (1)...(19): siRNA sense strand
cugcaaacucagacuguca

SEQ ID NO: 2306971 - RNA, 19 nt, Homo sapiens
  misc_RNA (1)...(19): siRNA sense strand
gggcaagagaggaccgucu

SEQ ID NO: 2306972 - RNA, 19 nt, Homo sapiens
  misc_RNA (1)...(19): siRNA sense strand
agagagaauggauggcuau

SEQ ID NO: 2306973 - RNA, 19 nt, Homo sapiens
  misc_RNA (1)...(19): siRNA sense strand
aggaggaggucuucuucaa

SEQ ID NO: 2306974 - RNA, 19 nt, Homo sapiens
  misc_RNA (1)...(19): siRNA sense strand
ggagaagagcuuuagguac

SEQ ID NO: 2306975 - RNA, 19 nt, Homo sapiens
  misc_RNA (1)...(19): siRNA sense strand
ggccuuacuacaucagaaa

SEQ ID NO: 2306976 - RNA, 19 nt, Homo sapiens
  misc_RNA (1)...(19): siRNA sense strand
uggauagagcccagauuga

SEQ ID NO: 2306977 - RNA, 19 nt, Homo sapiens
  misc_RNA (1)...(19): siRNA sense strand
uaaauaauccucagcccua

SEQ ID NO: 2306978 - RNA, 19 nt, Homo sapiens
  misc_RNA (1)...(19): siRNA sense strand
gguggguagauuuggaaaa

SEQ ID NO: 2306979 - RNA, 19 nt, Homo sapiens
  misc_RNA (1)...(19): siRNA sense strand
gggaacagggaauugcaau

SEQ ID NO: 2306980 - RNA, 19 nt, Homo sapiens
  misc_RNA (1)...(19): siRNA sense strand
ccuuagaacaagcaauuca

SEQ ID NO: 2306981 - RNA, 19 nt, Homo sapiens
  misc_RNA (1)...(19): siRNA sense strand
gggaugguuacaagaugaa

SEQ ID NO: 2306982 - RNA, 19 nt, Homo sapiens
  misc_RNA (1)...(19): siRNA sense strand
cgaaugaugaaagguguaa

SEQ ID NO: 2306983 - RNA, 19 nt, Homo sapiens
  misc_RNA (1)...(19): siRNA sense strand
gcaauuauagcaaugguga

SEQ ID NO: 2306984 - RNA, 19 nt, Homo sapiens
  misc_RNA (1)...(19): siRNA sense strand
cagcagaagaggagggugg

SEQ ID NO: 2306985 - RNA, 19 nt, Homo sapiens
  misc_RNA (1)...(19): siRNA sense strand
ugggaugguuacaagauga

SEQ ID NO: 2306986 - RNA, 19 nt, Homo sapiens
  misc_RNA (1)...(19): siRNA sense strand
gaaguggcuaccagagcaa

SEQ ID NO: 2306987 - RNA, 19 nt, Homo sapiens
  misc_RNA (1)...(19): siRNA sense strand
gaauggauggcuauggaga

SEQ ID NO: 2306988 - RNA, 19 nt, Homo sapiens
  misc_RNA (1)...(19): siRNA sense strand
aagguaucuuugugaaaca

SEQ ID NO: 2306989 - RNA, 19 nt, Homo sapiens
  misc_RNA (1)...(19): siRNA sense strand
uagaacaaggaaugguauu

SEQ ID NO: 2306990 - RNA, 19 nt, Homo sapiens
  misc_RNA (1)...(19): siRNA sense strand
agagaaugaugcuggugca

SEQ ID NO: 2306991 - RNA, 19 nt, Homo sapiens
  misc_RNA (1)...(19): siRNA sense strand
cggagaagaggaugaugga

SEQ ID NO: 2306992 - RNA, 19 nt, Homo sapiens
  misc_RNA (1)...(19): siRNA sense strand
cugaugaaggaaaggaagu

SEQ ID NO: 2306993 - RNA, 19 nt, Homo sapiens
  misc_RNA (1)...(19): siRNA sense strand
gcagaagaggaggguggaa

SEQ ID NO: 2306994 - RNA, 19 nt, Homo sapiens
  misc_RNA (1)...(19): siRNA sense strand
gggugaaaugugugcgaua

SEQ ID NO: 2306995 - RNA, 19 nt, Homo sapiens
  misc_RNA (1)...(19): siRNA sense strand
gccaagaagcagaaggaga

SEQ ID NO: 2306996 - RNA, 19 nt, Homo sapiens
  misc_RNA (1)...(19): siRNA sense strand
gugcauugcuggugggaag

SEQ ID NO: 2306997 - RNA, 19 nt, Homo sapiens
  misc_RNA (1)...(19): siRNA sense strand
acacggaggucuacggaga

SEQ ID NO: 2306998 - RNA, 19 nt, Homo sapiens
  misc_RNA (1)...(19): siRNA sense strand
cagccaaaucaaagaugaa

SEQ ID NO: 2306999 - RNA, 19 nt, Homo sapiens
  misc_RNA (1)...(19): siRNA sense strand
caucaaaaggagaagaaau

SEQ ID NO: 2307000 - RNA, 19 nt, Homo sapiens
  misc_RNA (1)...(19): siRNA sense strand
ggaucaagccaaaugccaa

SEQ ID NO: 2307001 - RNA, 19 nt, Homo sapiens
  misc_RNA (1)...(19): siRNA sense strand
cagaugacacggaggucua

SEQ ID NO: 2307002 - RNA, 19 nt, Homo sapiens
  misc_RNA (1)...(19): siRNA sense strand
cagacagcuucgugggaca

SEQ ID NO: 2307003 - RNA, 19 nt, Homo sapiens
  misc_RNA (1)...(19): siRNA sense strand
ccuuugaggagaagaucua

SEQ ID NO: 2307004 - RNA, 19 nt, Homo sapiens
  misc_RNA (1)...(19): siRNA sense strand
cagccaaggaggaugaaaa

SEQ ID NO: 2307005 - RNA, 19 nt, Homo sapiens
  misc_RNA (1)...(19): siRNA sense strand
acgagguggcacuggaaua

SEQ ID NO: 2307006 - RNA, 19 nt, Homo sapiens
  misc_RNA (1)...(19): siRNA sense strand
cagauuaacacaacggaga

SEQ ID NO: 2307007 - RNA, 19 nt, Homo sapiens
  misc_RNA (1)...(19): siRNA sense strand
ugaagagaggccagggcua

SEQ ID NO: 2307008 - RNA, 19 nt, Homo sapiens
  misc_RNA (1)...(19): siRNA sense strand
ggugaacagcucugggaga

SEQ ID NO: 2307009 - RNA, 19 nt, Homo sapiens
  misc_RNA (1)...(19): siRNA sense strand
ccgcagacaucgacgagga

SEQ ID NO: 2307010 - RNA, 19 nt, Homo sapiens
  misc_RNA (1)...(19): siRNA sense strand
cggagcugaucgugaaaga

SEQ ID NO: 2307011 - RNA, 19 nt, Homo sapiens
  misc_RNA (1)...(19): siRNA sense strand
gauuaacacaacggagaaa

SEQ ID NO: 2307012 - RNA, 19 nt, Homo sapiens
  misc_RNA (1)...(19): siRNA sense strand
agaaugaucuggcaggaga

SEQ ID NO: 2307013 - RNA, 19 nt, Homo sapiens
  misc_RNA (1)...(19): siRNA sense strand
cugccaacccugaaggaga

SEQ ID NO: 2307014 - RNA, 19 nt, Homo sapiens
  misc_RNA (1)...(19): siRNA sense strand
ccacauuucuaucagguga

SEQ ID NO: 2307015 - RNA, 19 nt, Homo sapiens
  misc_RNA (1)...(19): siRNA sense strand
caauggaauggcagggaca

SEQ ID NO: 2307016 - RNA, 19 nt, Homo sapiens
  misc_RNA (1)...(19): siRNA sense strand
ucaccugggagcagauuaa

SEQ ID NO: 2307017 - RNA, 19 nt, Homo sapiens
  misc_RNA (1)...(19): siRNA sense strand
cugaaaagcuacagcaucu

SEQ ID NO: 2307018 - RNA, 19 nt, Homo sapiens
  misc_RNA (1)...(19): siRNA sense strand
agauuaacacaacggagaa

SEQ ID NO: 2307019 - RNA, 19 nt, Homo sapiens
  misc_RNA (1)...(19): siRNA sense strand
cagcaaagccaauggagag

SEQ ID NO: 2307020 - RNA, 19 nt, Homo sapiens
  misc_RNA (1)...(19): siRNA sense strand
uugacauggccgagaauga

SEQ ID NO: 2307021 - RNA, 19 nt, Homo sapiens
  misc_RNA (1)...(19): siRNA sense strand
cagacaucgacgaggacau

SEQ ID NO: 2307022 - RNA, 19 nt, Homo sapiens
  misc_RNA (1)...(19): siRNA sense strand
aagccaauggagagaccaa

SEQ ID NO: 2307023 - RNA, 19 nt, Homo sapiens
  misc_RNA (1)...(19): siRNA sense strand
acggguucaaggaggaaua

SEQ ID NO: 2307024 - RNA, 19 nt, Homo sapiens
  misc_RNA (1)...(19): siRNA sense strand
cuguggagccagagaagca

SEQ ID NO: 2307025 - RNA, 19 nt, Homo sapiens
  misc_RNA (1)...(19): siRNA sense strand
uggacaacaccgugaagau

SEQ ID NO: 2307026 - RNA, 19 nt, Homo sapiens
  misc_RNA (1)...(19): siRNA sense strand
uugaugagcacuacagcaa

SEQ ID NO: 2307027 - RNA, 19 nt, Homo sapiens
  misc_RNA (1)...(19): siRNA sense strand
aggagaagaucuacaucca

SEQ ID NO: 2307028 - RNA, 19 nt, Homo sapiens
  misc_RNA (1)...(19): siRNA sense strand
ccaagaagcagaaggagac

SEQ ID NO: 2307029 - RNA, 19 nt, Homo sapiens
  misc_RNA (1)...(19): siRNA sense strand
gcuacggguucaaggagga

SEQ ID NO: 2307030 - RNA, 19 nt, Homo sapiens
  misc_RNA (1)...(19): siRNA sense strand
ccgcaauaagaaucgauau

SEQ ID NO: 2307031 - RNA, 19 nt, Homo sapiens
  misc_RNA (1)...(19): siRNA sense strand
gaaugaucuggcaggagaa

SEQ ID NO: 2307032 - RNA, 19 nt, Homo sapiens
  misc_RNA (1)...(19): siRNA sense strand
agaagaaaggcuaccauga

SEQ ID NO: 2307033 - RNA, 19 nt, Homo sapiens
  misc_RNA (1)...(19): siRNA sense strand
ccacuggccuucugggcuu

SEQ ID NO: 2307034 - RNA, 19 nt, Homo sapiens
  misc_RNA (1)...(19): siRNA sense strand
gccaaaucaaagaugaauu

SEQ ID NO: 2307035 - RNA, 19 nt, Homo sapiens
  misc_RNA (1)...(19): siRNA sense strand
ccaacuacgcggagcugau

SEQ ID NO: 2307036 - RNA, 19 nt, Homo sapiens
  misc_RNA (1)...(19): siRNA sense strand
acguggaaaucguagacau

SEQ ID NO: 2307037 - RNA, 19 nt, Homo sapiens
  misc_RNA (1)...(19): siRNA sense strand
aggaggaauacgaggccuu

SEQ ID NO: 2307038 - RNA, 19 nt, Homo sapiens
  misc_RNA (1)...(19): siRNA sense strand
ccaacaugguggagacccu

SEQ ID NO: 2307039 - RNA, 19 nt, Homo sapiens
  misc_RNA (1)...(19): siRNA sense strand
gguucaaggaggaauacga

SEQ ID NO: 2307040 - RNA, 19 nt, Homo sapiens
  misc_RNA (1)...(19): siRNA sense strand
ccucuguggugaugcugaa

SEQ ID NO: 2307041 - RNA, 19 nt, Homo sapiens
  misc_RNA (1)...(19): siRNA sense strand
gcuacaucgccguggacga

SEQ ID NO: 2307042 - RNA, 19 nt, Homo sapiens
  misc_RNA (1)...(19): siRNA sense strand
uggugcagacugaggaaga

SEQ ID NO: 2307043 - RNA, 19 nt, Homo sapiens
  misc_RNA (1)...(19): siRNA sense strand
cccaaaggaagcuggccaa

SEQ ID NO: 2307044 - RNA, 19 nt, Homo sapiens
  misc_RNA (1)...(19): siRNA sense strand
gguacagacagaggagcaa

SEQ ID NO: 2307045 - RNA, 19 nt, Homo sapiens
  misc_RNA (1)...(19): siRNA sense strand
aggacaucauccacagaau

SEQ ID NO: 2307046 - RNA, 19 nt, Homo sapiens
  misc_RNA (1)...(19): siRNA sense strand
cggagaaaccaaugcugga

SEQ ID NO: 2307047 - RNA, 19 nt, Homo sapiens
  misc_RNA (1)...(19): siRNA sense strand
aguggagcccagagggaga

SEQ ID NO: 2307048 - RNA, 19 nt, Homo sapiens
  misc_RNA (1)...(19): siRNA sense strand
cauuaaagucacccugauu

SEQ ID NO: 2307049 - RNA, 19 nt, Homo sapiens
  misc_RNA (1)...(19): siRNA sense strand
ccggaaccaugauaagaau

SEQ ID NO: 2307050 - RNA, 19 nt, Homo sapiens
  misc_RNA (1)...(19): siRNA sense strand
gugcugaccucucgagcca

SEQ ID NO: 2307051 - RNA, 19 nt, Homo sapiens
  misc_RNA (1)...(19): siRNA sense strand
uuucggugcccgugagcua

SEQ ID NO: 2307052 - RNA, 19 nt, Homo sapiens
  misc_RNA (1)...(19): siRNA sense strand
ugggugacaauaagacaua

SEQ ID NO: 2307053 - RNA, 19 nt, Homo sapiens
  misc_RNA (1)...(19): siRNA sense strand
gcaucuacuuccaggcacu

SEQ ID NO: 2307054 - RNA, 19 nt, Homo sapiens
  misc_RNA (1)...(19): siRNA sense strand
augaaggggugguggacau

SEQ ID NO: 2307055 - RNA, 19 nt, Homo sapiens
  misc_RNA (1)...(19): siRNA sense strand
ugguggagacccuggaaca

SEQ ID NO: 2307056 - RNA, 19 nt, Homo sapiens
  misc_RNA (1)...(19): siRNA sense strand
aaggagaagaaaugcuuau

SEQ ID NO: 2307057 - RNA, 19 nt, Homo sapiens
  misc_RNA (1)...(19): siRNA sense strand
guggaagugggcaggguga

SEQ ID NO: 2307058 - RNA, 19 nt, Homo sapiens
  misc_RNA (1)...(19): siRNA sense strand
aaacagagccccuggcaga

SEQ ID NO: 2307059 - RNA, 19 nt, Homo sapiens
  misc_RNA (1)...(19): siRNA sense strand
ugguacagacagaggagca

SEQ ID NO: 2307060 - RNA, 19 nt, Homo sapiens
  misc_RNA (1)...(19): siRNA sense strand
acacagccaaggaggauga

SEQ ID NO: 2307061 - RNA, 19 nt, Homo sapiens
  misc_RNA (1)...(19): siRNA sense strand
auaagaaucgauaugggaa

SEQ ID NO: 2307062 - RNA, 19 nt, Homo sapiens
  misc_RNA (1)...(19): siRNA sense strand
ucagcaaagccaauggaga

SEQ ID NO: 2307063 - RNA, 19 nt, Homo sapiens
  misc_RNA (1)...(19): siRNA sense strand
cugacuacaucaaugccaa

SEQ ID NO: 2307064 - RNA, 19 nt, Homo sapiens
  misc_RNA (1)...(19): siRNA sense strand
cuacauugacggauaccau

SEQ ID NO: 2307065 - RNA, 19 nt, Homo sapiens
  misc_RNA (1)...(19): siRNA sense strand
cuguggugaugcugaauga

SEQ ID NO: 2307066 - RNA, 19 nt, Homo sapiens
  misc_RNA (1)...(19): siRNA sense strand
gugagaugauccagcagca

SEQ ID NO: 2307067 - RNA, 19 nt, Homo sapiens
  misc_RNA (1)...(19): siRNA sense strand
gggugaaaugugugcgaua

SEQ ID NO: 2307068 - RNA, 19 nt, Homo sapiens
  misc_RNA (1)...(19): siRNA sense strand
gccaagaagcagaaggaga

SEQ ID NO: 2307069 - RNA, 19 nt, Homo sapiens
  misc_RNA (1)...(19): siRNA sense strand
gugcauugcuggugggaag

SEQ ID NO: 2307070 - RNA, 19 nt, Homo sapiens
  misc_RNA (1)...(19): siRNA sense strand
acacggaggucuacggaga

SEQ ID NO: 2307071 - RNA, 19 nt, Homo sapiens
  misc_RNA (1)...(19): siRNA sense strand
cagccaaaucaaagaugaa

SEQ ID NO: 2307072 - RNA, 19 nt, Homo sapiens
  misc_RNA (1)...(19): siRNA sense strand
caucaaaaggagaagaaau

SEQ ID NO: 2307073 - RNA, 19 nt, Homo sapiens
  misc_RNA (1)...(19): siRNA sense strand
ggaucaagccaaaugccaa

SEQ ID NO: 2307074 - RNA, 19 nt, Homo sapiens
  misc_RNA (1)...(19): siRNA sense strand
cagaugacacggaggucua

SEQ ID NO: 2307075 - RNA, 19 nt, Homo sapiens
  misc_RNA (1)...(19): siRNA sense strand
cagacagcuucgugggaca

SEQ ID NO: 2307076 - RNA, 19 nt, Homo sapiens
  misc_RNA (1)...(19): siRNA sense strand
ccuuugaggagaagaucua

SEQ ID NO: 2307077 - RNA, 19 nt, Homo sapiens
  misc_RNA (1)...(19): siRNA sense strand
cagccaaggaggaugaaaa

SEQ ID NO: 2307078 - RNA, 19 nt, Homo sapiens
  misc_RNA (1)...(19): siRNA sense strand
acgagguggcacuggaaua

SEQ ID NO: 2307079 - RNA, 19 nt, Homo sapiens
  misc_RNA (1)...(19): siRNA sense strand
cagauuaacacaacggaga

SEQ ID NO: 2307080 - RNA, 19 nt, Homo sapiens
  misc_RNA (1)...(19): siRNA sense strand
ugaagagaggccagggcua

SEQ ID NO: 2307081 - RNA, 19 nt, Homo sapiens
  misc_RNA (1)...(19): siRNA sense strand
ggugaacagcucugggaga

SEQ ID NO: 2307082 - RNA, 19 nt, Homo sapiens
  misc_RNA (1)...(19): siRNA sense strand
ccgcagacaucgacgagga

SEQ ID NO: 2307083 - RNA, 19 nt, Homo sapiens
  misc_RNA (1)...(19): siRNA sense strand
cggagcugaucgugaaaga

SEQ ID NO: 2307084 - RNA, 19 nt, Homo sapiens
  misc_RNA (1)...(19): siRNA sense strand
gauuaacacaacggagaaa

SEQ ID NO: 2307085 - RNA, 19 nt, Homo sapiens
  misc_RNA (1)...(19): siRNA sense strand
agaaugaucuggcaggaga

SEQ ID NO: 2307086 - RNA, 19 nt, Homo sapiens
  misc_RNA (1)...(19): siRNA sense strand
cugccaacccugaaggaga

SEQ ID NO: 2307087 - RNA, 19 nt, Homo sapiens
  misc_RNA (1)...(19): siRNA sense strand
ccacauuucuaucagguga

SEQ ID NO: 2307088 - RNA, 19 nt, Homo sapiens
  misc_RNA (1)...(19): siRNA sense strand
caauggaauggcagggaca

SEQ ID NO: 2307089 - RNA, 19 nt, Homo sapiens
  misc_RNA (1)...(19): siRNA sense strand
ucaccugggagcagauuaa

SEQ ID NO: 2307090 - RNA, 19 nt, Homo sapiens
  misc_RNA (1)...(19): siRNA sense strand
cugaaaagcuacagcaucu

SEQ ID NO: 2307091 - RNA, 19 nt, Homo sapiens
  misc_RNA (1)...(19): siRNA sense strand
agauuaacacaacggagaa

SEQ ID NO: 2307092 - RNA, 19 nt, Homo sapiens
  misc_RNA (1)...(19): siRNA sense strand
cagcaaagccaauggagag

SEQ ID NO: 2307093 - RNA, 19 nt, Homo sapiens
  misc_RNA (1)...(19): siRNA sense strand
uugacauggccgagaauga

SEQ ID NO: 2307094 - RNA, 19 nt, Homo sapiens
  misc_RNA (1)...(19): siRNA sense strand
cagacaucgacgaggacau

SEQ ID NO: 2307095 - RNA, 19 nt, Homo sapiens
  misc_RNA (1)...(19): siRNA sense strand
aagccaauggagagaccaa

SEQ ID NO: 2307096 - RNA, 19 nt, Homo sapiens
  misc_RNA (1)...(19): siRNA sense strand
acggguucaaggaggaaua

SEQ ID NO: 2307097 - RNA, 19 nt, Homo sapiens
  misc_RNA (1)...(19): siRNA sense strand
cuguggagccagagaagca

SEQ ID NO: 2307098 - RNA, 19 nt, Homo sapiens
  misc_RNA (1)...(19): siRNA sense strand
uggacaacaccgugaagau

SEQ ID NO: 2307099 - RNA, 19 nt, Homo sapiens
  misc_RNA (1)...(19): siRNA sense strand
uugaugagcacuacagcaa

SEQ ID NO: 2307100 - RNA, 19 nt, Homo sapiens
  misc_RNA (1)...(19): siRNA sense strand
aggagaagaucuacaucca

SEQ ID NO: 2307101 - RNA, 19 nt, Homo sapiens
  misc_RNA (1)...(19): siRNA sense strand
ccaagaagcagaaggagac

SEQ ID NO: 2307102 - RNA, 19 nt, Homo sapiens
  misc_RNA (1)...(19): siRNA sense strand
gcuacggguucaaggagga

SEQ ID NO: 2307103 - RNA, 19 nt, Homo sapiens
  misc_RNA (1)...(19): siRNA sense strand
ccgcaauaagaaucgauau

SEQ ID NO: 2307104 - RNA, 19 nt, Homo sapiens
  misc_RNA (1)...(19): siRNA sense strand
gaaugaucuggcaggagaa

SEQ ID NO: 2307105 - RNA, 19 nt, Homo sapiens
  misc_RNA (1)...(19): siRNA sense strand
agaagaaaggcuaccauga

SEQ ID NO: 2307106 - RNA, 19 nt, Homo sapiens
  misc_RNA (1)...(19): siRNA sense strand
ccacuggccuucugggcuu

SEQ ID NO: 2307107 - RNA, 19 nt, Homo sapiens
  misc_RNA (1)...(19): siRNA sense strand
gccaaaucaaagaugaauu

SEQ ID NO: 2307108 - RNA, 19 nt, Homo sapiens
  misc_RNA (1)...(19): siRNA sense strand
ccaacuacgcggagcugau

SEQ ID NO: 2307109 - RNA, 19 nt, Homo sapiens
  misc_RNA (1)...(19): siRNA sense strand
acguggaaaucguagacau

SEQ ID NO: 2307110 - RNA, 19 nt, Homo sapiens
  misc_RNA (1)...(19): siRNA sense strand
aggaggaauacgaggccuu

SEQ ID NO: 2307111 - RNA, 19 nt, Homo sapiens
  misc_RNA (1)...(19): siRNA sense strand
ccaacaugguggagacccu

SEQ ID NO: 2307112 - RNA, 19 nt, Homo sapiens
  misc_RNA (1)...(19): siRNA sense strand
gguucaaggaggaauacga

SEQ ID NO: 2307113 - RNA, 19 nt, Homo sapiens
  misc_RNA (1)...(19): siRNA sense strand
ccucuguggugaugcugaa

SEQ ID NO: 2307114 - RNA, 19 nt, Homo sapiens
  misc_RNA (1)...(19): siRNA sense strand
gcuacaucgccguggacga

SEQ ID NO: 2307115 - RNA, 19 nt, Homo sapiens
  misc_RNA (1)...(19): siRNA sense strand
uggugcagacugaggaaga

SEQ ID NO: 2307116 - RNA, 19 nt, Homo sapiens
  misc_RNA (1)...(19): siRNA sense strand
cccaaaggaagcuggccaa

SEQ ID NO: 2307117 - RNA, 19 nt, Homo sapiens
  misc_RNA (1)...(19): siRNA sense strand
gguacagacagaggagcaa

SEQ ID NO: 2307118 - RNA, 19 nt, Homo sapiens
  misc_RNA (1)...(19): siRNA sense strand
aggacaucauccacagaau

SEQ ID NO: 2307119 - RNA, 19 nt, Homo sapiens
  misc_RNA (1)...(19): siRNA sense strand
cggagaaaccaaugcugga

SEQ ID NO: 2307120 - RNA, 19 nt, Homo sapiens
  misc_RNA (1)...(19): siRNA sense strand
aguggagcccagagggaga

SEQ ID NO: 2307121 - RNA, 19 nt, Homo sapiens
  misc_RNA (1)...(19): siRNA sense strand
cauuaaagucacccugauu

SEQ ID NO: 2307122 - RNA, 19 nt, Homo sapiens
  misc_RNA (1)...(19): siRNA sense strand
ccggaaccaugauaagaau

SEQ ID NO: 2307123 - RNA, 19 nt, Homo sapiens
  misc_RNA (1)...(19): siRNA sense strand
gugcugaccucucgagcca

SEQ ID NO: 2307124 - RNA, 19 nt, Homo sapiens
  misc_RNA (1)...(19): siRNA sense strand
uuucggugcccgugagcua

SEQ ID NO: 2307125 - RNA, 19 nt, Homo sapiens
  misc_RNA (1)...(19): siRNA sense strand
ugggugacaauaagacaua

SEQ ID NO: 2307126 - RNA, 19 nt, Homo sapiens
  misc_RNA (1)...(19): siRNA sense strand
gcaucuacuuccaggcacu

SEQ ID NO: 2307127 - RNA, 19 nt, Homo sapiens
  misc_RNA (1)...(19): siRNA sense strand
augaaggggugguggacau

SEQ ID NO: 2307128 - RNA, 19 nt, Homo sapiens
  misc_RNA (1)...(19): siRNA sense strand
ugguggagacccuggaaca

SEQ ID NO: 2307129 - RNA, 19 nt, Homo sapiens
  misc_RNA (1)...(19): siRNA sense strand
aaggagaagaaaugcuuau

SEQ ID NO: 2307130 - RNA, 19 nt, Homo sapiens
  misc_RNA (1)...(19): siRNA sense strand
guggaagugggcaggguga

SEQ ID NO: 2307131 - RNA, 19 nt, Homo sapiens
  misc_RNA (1)...(19): siRNA sense strand
aaacagagccccuggcaga

SEQ ID NO: 2307132 - RNA, 19 nt, Homo sapiens
  misc_RNA (1)...(19): siRNA sense strand
ugguacagacagaggagca

SEQ ID NO: 2307133 - RNA, 19 nt, Homo sapiens
  misc_RNA (1)...(19): siRNA sense strand
acacagccaaggaggauga

SEQ ID NO: 2307134 - RNA, 19 nt, Homo sapiens
  misc_RNA (1)...(19): siRNA sense strand
auaagaaucgauaugggaa

SEQ ID NO: 2307135 - RNA, 19 nt, Homo sapiens
  misc_RNA (1)...(19): siRNA sense strand
ucagcaaagccaauggaga

SEQ ID NO: 2307136 - RNA, 19 nt, Homo sapiens
  misc_RNA (1)...(19): siRNA sense strand
cugacuacaucaaugccaa

SEQ ID NO: 2307137 - RNA, 19 nt, Homo sapiens
  misc_RNA (1)...(19): siRNA sense strand
cuacauugacggauaccau

SEQ ID NO: 2307138 - RNA, 19 nt, Homo sapiens
  misc_RNA (1)...(19): siRNA sense strand
cuguggugaugcugaauga

SEQ ID NO: 2307139 - RNA, 19 nt, Homo sapiens
  misc_RNA (1)...(19): siRNA sense strand
gugagaugauccagcagca

SEQ ID NO: 2307140 - RNA, 19 nt, Homo sapiens
  misc_RNA (1)...(19): siRNA sense strand
gcacggagguggaagagga

SEQ ID NO: 2307141 - RNA, 19 nt, Homo sapiens
  misc_RNA (1)...(19): siRNA sense strand
gcccacaagauaauggcua

SEQ ID NO: 2307142 - RNA, 19 nt, Homo sapiens
  misc_RNA (1)...(19): siRNA sense strand
gcacggagguggaagagga

SEQ ID NO: 2307143 - RNA, 19 nt, Homo sapiens
  misc_RNA (1)...(19): siRNA sense strand
gcccacaagauaauggcua

SEQ ID NO: 2307144 - RNA, 19 nt, Homo sapiens
  misc_RNA (1)...(19): siRNA sense strand
gagacagcgcagugggcaa

SEQ ID NO: 2307145 - RNA, 19 nt, Homo sapiens
  misc_RNA (1)...(19): siRNA sense strand
aguaugaugcugaugacaa

SEQ ID NO: 2307146 - RNA, 19 nt, Homo sapiens
  misc_RNA (1)...(19): siRNA sense strand
aaacagaacucccaggacu

SEQ ID NO: 2307147 - RNA, 19 nt, Homo sapiens
  misc_RNA (1)...(19): siRNA sense strand
caugcaucgugguggccaa

SEQ ID NO: 2307148 - RNA, 19 nt, Homo sapiens
  misc_RNA (1)...(19): siRNA sense strand
gcuuggagcaggaagagga

SEQ ID NO: 2307149 - RNA, 19 nt, Homo sapiens
  misc_RNA (1)...(19): siRNA sense strand
cugaugacaacgugaagau

SEQ ID NO: 2307150 - RNA, 19 nt, Homo sapiens
  misc_RNA (1)...(19): siRNA sense strand
aagaggaggacgugccaga

SEQ ID NO: 2307151 - RNA, 19 nt, Homo sapiens
  misc_RNA (1)...(19): siRNA sense strand
guucaaagaugcagggcua

SEQ ID NO: 2307152 - RNA, 19 nt, Homo sapiens
  misc_RNA (1)...(19): siRNA sense strand
gcgagaagguugauccaaa

SEQ ID NO: 2307153 - RNA, 19 nt, Homo sapiens
  misc_RNA (1)...(19): siRNA sense strand
ggucagagacagaagagca

SEQ ID NO: 2307154 - RNA, 19 nt, Homo sapiens
  misc_RNA (1)...(19): siRNA sense strand
gcugauauacagaugggaa

SEQ ID NO: 2307155 - RNA, 19 nt, Homo sapiens
  misc_RNA (1)...(19): siRNA sense strand
cugauauacagaugggaau

SEQ ID NO: 2307156 - RNA, 19 nt, Homo sapiens
  misc_RNA (1)...(19): siRNA sense strand
ccaacaauuucgugugcga

SEQ ID NO: 2307157 - RNA, 19 nt, Homo sapiens
  misc_RNA (1)...(19): siRNA sense strand
augcugugguucaggacua

SEQ ID NO: 2307158 - RNA, 19 nt, Homo sapiens
  misc_RNA (1)...(19): siRNA sense strand
acagaagagcagcgaugaa

SEQ ID NO: 2307159 - RNA, 19 nt, Homo sapiens
  misc_RNA (1)...(19): siRNA sense strand
cgagaagguugauccaaaa

SEQ ID NO: 2307160 - RNA, 19 nt, Homo sapiens
  misc_RNA (1)...(19): siRNA sense strand
ugaugagaugguugguaaa

SEQ ID NO: 2307161 - RNA, 19 nt, Homo sapiens
  misc_RNA (1)...(19): siRNA sense strand
cuggagauguagacagcuu

SEQ ID NO: 2307162 - RNA, 19 nt, Homo sapiens
  misc_RNA (1)...(19): siRNA sense strand
cauucaagacugugagaac

SEQ ID NO: 2307163 - RNA, 19 nt, Homo sapiens
  misc_RNA (1)...(19): siRNA sense strand
agacagaagagcagcgaug

SEQ ID NO: 2307164 - RNA, 19 nt, Homo sapiens
  misc_RNA (1)...(19): siRNA sense strand
ccaagagacggaaggcuga

SEQ ID NO: 2307165 - RNA, 19 nt, Homo sapiens
  misc_RNA (1)...(19): siRNA sense strand
gggcuaaguaucuucgaca

SEQ ID NO: 2307166 - RNA, 19 nt, Homo sapiens
  misc_RNA (1)...(19): siRNA sense strand
ccaugaaagcugaggaugc

SEQ ID NO: 2307167 - RNA, 19 nt, Homo sapiens
  misc_RNA (1)...(19): siRNA sense strand
ugguauuauuugcugguga

SEQ ID NO: 2307168 - RNA, 19 nt, Homo sapiens
  misc_RNA (1)...(19): siRNA sense strand
ucgacaauacauggaguaa

SEQ ID NO: 2307169 - RNA, 19 nt, Homo sapiens
  misc_RNA (1)...(19): siRNA sense strand
uguuuguaucugaaagcaa

SEQ ID NO: 2307170 - RNA, 19 nt, Homo sapiens
  misc_RNA (1)...(19): siRNA sense strand
uuccggaauugcagagauu

SEQ ID NO: 2307171 - RNA, 19 nt, Homo sapiens
  misc_RNA (1)...(19): siRNA sense strand
gaaagcaaggagacggcau

SEQ ID NO: 2307172 - RNA, 19 nt, Homo sapiens
  misc_RNA (1)...(19): siRNA sense strand
aggagaugacagagggaaa

SEQ ID NO: 2307173 - RNA, 19 nt, Homo sapiens
  misc_RNA (1)...(19): siRNA sense strand
aggaaauggcuguaagaau

SEQ ID NO: 2307174 - RNA, 19 nt, Homo sapiens
  misc_RNA (1)...(19): siRNA sense strand
agauaagagguuacagcaa

SEQ ID NO: 2307175 - RNA, 19 nt, Homo sapiens
  misc_RNA (1)...(19): siRNA sense strand
ggauaggauuggcggcuca

SEQ ID NO: 2307176 - RNA, 19 nt, Homo sapiens
  misc_RNA (1)...(19): siRNA sense strand
auauaagcgccuacauaaa

SEQ ID NO: 2307177 - RNA, 19 nt, Homo sapiens
  misc_RNA (1)...(19): siRNA sense strand
cuuuauuucuucugugcaa

SEQ ID NO: 2307178 - RNA, 19 nt, Homo sapiens
  misc_RNA (1)...(19): siRNA sense strand
gcaaauuacaugaugaccu

SEQ ID NO: 2307179 - RNA, 19 nt, Homo sapiens
  misc_RNA (1)...(19): siRNA sense strand
gaguuuacaaagacugaau

SEQ ID NO: 2307180 - RNA, 19 nt, Homo sapiens
  misc_RNA (1)...(19): siRNA sense strand
gcacuguucuugcuggaga

SEQ ID NO: 2307181 - RNA, 19 nt, Homo sapiens
  misc_RNA (1)...(19): siRNA sense strand
cccaaaucuuacagccauu

SEQ ID NO: 2307182 - RNA, 19 nt, Homo sapiens
  misc_RNA (1)...(19): siRNA sense strand
cuucauccuuugaggggaa

SEQ ID NO: 2307183 - RNA, 19 nt, Homo sapiens
  misc_RNA (1)...(19): siRNA sense strand
augugaaggagaugacaga

SEQ ID NO: 2307184 - RNA, 19 nt, Homo sapiens
  misc_RNA (1)...(19): siRNA sense strand
aguggaaggaggagcagaa

SEQ ID NO: 2307185 - RNA, 19 nt, Homo sapiens
  misc_RNA (1)...(19): siRNA sense strand
caucagugacagagggcca

SEQ ID NO: 2307186 - RNA, 19 nt, Homo sapiens
  misc_RNA (1)...(19): siRNA sense strand
cauuaucuggagagaggaa

SEQ ID NO: 2307187 - RNA, 19 nt, Homo sapiens
  misc_RNA (1)...(19): siRNA sense strand
gcaccugggagaagagcca

SEQ ID NO: 2307188 - RNA, 19 nt, Homo sapiens
  misc_RNA (1)...(19): siRNA sense strand
aggaggagcagaagcuaga

SEQ ID NO: 2307189 - RNA, 19 nt, Homo sapiens
  misc_RNA (1)...(19): siRNA sense strand
guugaugggcagugggugu

SEQ ID NO: 2307190 - RNA, 19 nt, Homo sapiens
  misc_RNA (1)...(19): siRNA sense strand
uguggaaggaggaggagga

SEQ ID NO: 2307191 - RNA, 19 nt, Homo sapiens
  misc_RNA (1)...(19): siRNA sense strand
gguggagacaauaagguga

SEQ ID NO: 2307192 - RNA, 19 nt, Homo sapiens
  misc_RNA (1)...(19): siRNA sense strand
aggaggacggccaguggaa

SEQ ID NO: 2307193 - RNA, 19 nt, Homo sapiens
  misc_RNA (1)...(19): siRNA sense strand
aguggaaggaggagcagaa

SEQ ID NO: 2307194 - RNA, 19 nt, Homo sapiens
  misc_RNA (1)...(19): siRNA sense strand
caucagugacagagggcca

SEQ ID NO: 2307195 - RNA, 19 nt, Homo sapiens
  misc_RNA (1)...(19): siRNA sense strand
cauuaucuggagagaggaa

SEQ ID NO: 2307196 - RNA, 19 nt, Homo sapiens
  misc_RNA (1)...(19): siRNA sense strand
gcaccugggagaagagcca

SEQ ID NO: 2307197 - RNA, 19 nt, Homo sapiens
  misc_RNA (1)...(19): siRNA sense strand
aggaggagcagaagcuaga

SEQ ID NO: 2307198 - RNA, 19 nt, Homo sapiens
  misc_RNA (1)...(19): siRNA sense strand
guugaugggcagugggugu

SEQ ID NO: 2307199 - RNA, 19 nt, Homo sapiens
  misc_RNA (1)...(19): siRNA sense strand
uguggaaggaggaggagga

SEQ ID NO: 2307200 - RNA, 19 nt, Homo sapiens
  misc_RNA (1)...(19): siRNA sense strand
gguggagacaauaagguga

SEQ ID NO: 2307201 - RNA, 19 nt, Homo sapiens
  misc_RNA (1)...(19): siRNA sense strand
aggaggacggccaguggaa

SEQ ID NO: 2307202 - RNA, 19 nt, Homo sapiens
  misc_RNA (1)...(19): siRNA sense strand
cgacagguggacagagcau

SEQ ID NO: 2307203 - RNA, 19 nt, Homo sapiens
  misc_RNA (1)...(19): siRNA sense strand
cgucuggacccgagagaac

SEQ ID NO: 2307204 - RNA, 19 nt, Homo sapiens
  misc_RNA (1)...(19): siRNA sense strand
cuucgaguggauaaagaaa

SEQ ID NO: 2307205 - RNA, 19 nt, Homo sapiens
  misc_RNA (1)...(19): siRNA sense strand
aggugaacguguacggguu

SEQ ID NO: 2307206 - RNA, 19 nt, Homo sapiens
  misc_RNA (1)...(19): siRNA sense strand
ccgacugguuugacagcca

SEQ ID NO: 2307207 - RNA, 19 nt, Homo sapiens
  misc_RNA (1)...(19): siRNA sense strand
ucaucgacaugcuggccaa

SEQ ID NO: 2307208 - RNA, 19 nt, Homo sapiens
  misc_RNA (1)...(19): siRNA sense strand
aggaagaggaagaggaaga

SEQ ID NO: 2307209 - RNA, 19 nt, Homo sapiens
  misc_RNA (1)...(19): siRNA sense strand
aggcagaggaagaggaaga

SEQ ID NO: 2307210 - RNA, 19 nt, Homo sapiens
  misc_RNA (1)...(19): siRNA sense strand
aggaagaggaagaggacgu

SEQ ID NO: 2307211 - RNA, 19 nt, Homo sapiens
  misc_RNA (1)...(19): siRNA sense strand
aggaaauaacauucgguau

SEQ ID NO: 2307212 - RNA, 19 nt, Homo sapiens
  misc_RNA (1)...(19): siRNA sense strand
gaacacagguccauggaac

SEQ ID NO: 2307213 - RNA, 19 nt, Homo sapiens
  misc_RNA (1)...(19): siRNA sense strand
ugaaaaugacccugaagaa

SEQ ID NO: 2307214 - RNA, 19 nt, Homo sapiens
  misc_RNA (1)...(19): siRNA sense strand
uggccguggcagaggaaga

SEQ ID NO: 2307215 - RNA, 19 nt, Homo sapiens
  misc_RNA (1)...(19): siRNA sense strand
acgcugaguauucgaggaa

SEQ ID NO: 2307216 - RNA, 19 nt, Homo sapiens
  misc_RNA (1)...(19): siRNA sense strand
cagaggaagaggaagagga

SEQ ID NO: 2307217 - RNA, 19 nt, Homo sapiens
  misc_RNA (1)...(19): siRNA sense strand
acaucuuaaagcugugaaa

SEQ ID NO: 2307218 - RNA, 19 nt, Homo sapiens
  misc_RNA (1)...(19): siRNA sense strand
aggaagaggacguggccgu

SEQ ID NO: 2307219 - RNA, 19 nt, Homo sapiens
  misc_RNA (1)...(19): siRNA sense strand
gaggaaauaacauucggua

SEQ ID NO: 2307220 - RNA, 19 nt, Homo sapiens
  misc_RNA (1)...(19): siRNA sense strand
ggauacacuacuuguggau

SEQ ID NO: 2307221 - RNA, 19 nt, Homo sapiens
  misc_RNA (1)...(19): siRNA sense strand
ccugaagaacagagaaccu

SEQ ID NO: 2307222 - RNA, 19 nt, Homo sapiens
  misc_RNA (1)...(19): siRNA sense strand
aagggaagcuguugcagga

SEQ ID NO: 2307223 - RNA, 19 nt, Homo sapiens
  misc_RNA (1)...(19): siRNA sense strand
gagcagaggcuuuggguac

SEQ ID NO: 2307224 - RNA, 19 nt, Homo sapiens
  misc_RNA (1)...(19): siRNA sense strand
aguggaagcugcuggacga

SEQ ID NO: 2307225 - RNA, 19 nt, Homo sapiens
  misc_RNA (1)...(19): siRNA sense strand
ccuucguggaggaggccaa

SEQ ID NO: 2307226 - RNA, 19 nt, Homo sapiens
  misc_RNA (1)...(19): siRNA sense strand
ggaagcugcuggacgagga

SEQ ID NO: 2307227 - RNA, 19 nt, Homo sapiens
  misc_RNA (1)...(19): siRNA sense strand
cggaggaacccgagagacu

SEQ ID NO: 2307228 - RNA, 19 nt, Homo sapiens
  misc_RNA (1)...(19): siRNA sense strand
gcauuuaugguuugggcaa

SEQ ID NO: 2307229 - RNA, 19 nt, Homo sapiens
  misc_RNA (1)...(19): siRNA sense strand
cuacguacucugugguaau

SEQ ID NO: 2307230 - RNA, 19 nt, Homo sapiens
  misc_RNA (1)...(19): siRNA sense strand
ccgaccagcacuagccaaa

SEQ ID NO: 2307231 - RNA, 19 nt, Homo sapiens
  misc_RNA (1)...(19): siRNA sense strand
ggguuagaguggaacaaac

SEQ ID NO: 2307232 - RNA, 19 nt, Homo sapiens
  misc_RNA (1)...(19): siRNA sense strand
cgagaaggugugaucaaaa

SEQ ID NO: 2307233 - RNA, 19 nt, Homo sapiens
  misc_RNA (1)...(19): siRNA sense strand
ccuauuacgaugaagcaca

SEQ ID NO: 2307234 - RNA, 19 nt, Homo sapiens
  misc_RNA (1)...(19): siRNA sense strand
gguuagaguggaacaaacu

SEQ ID NO: 2307235 - RNA, 19 nt, Homo sapiens
  misc_RNA (1)...(19): siRNA sense strand
cagccaacaaugcagaaau

SEQ ID NO: 2307236 - RNA, 19 nt, Homo sapiens
  misc_RNA (1)...(19): siRNA sense strand
cggaggaacccgagagacu

SEQ ID NO: 2307237 - RNA, 19 nt, Homo sapiens
  misc_RNA (1)...(19): siRNA sense strand
gcauuuaugguuugggcaa

SEQ ID NO: 2307238 - RNA, 19 nt, Homo sapiens
  misc_RNA (1)...(19): siRNA sense strand
cuacguacucugugguaau

SEQ ID NO: 2307239 - RNA, 19 nt, Homo sapiens
  misc_RNA (1)...(19): siRNA sense strand
ccgaccagcacuagccaaa

SEQ ID NO: 2307240 - RNA, 19 nt, Homo sapiens
  misc_RNA (1)...(19): siRNA sense strand
acagugaugaggaggaaga

SEQ ID NO: 2307241 - RNA, 19 nt, Homo sapiens
  misc_RNA (1)...(19): siRNA sense strand
acuuaaacccugugccuca

SEQ ID NO: 2307242 - RNA, 19 nt, Homo sapiens
  misc_RNA (1)...(19): siRNA sense strand
augaggaggaagaagaaaa

SEQ ID NO: 2307243 - RNA, 19 nt, Homo sapiens
  misc_RNA (1)...(19): siRNA sense strand
ggguuagaguggaacaaac

SEQ ID NO: 2307244 - RNA, 19 nt, Homo sapiens
  misc_RNA (1)...(19): siRNA sense strand
acauuggaaccuuggagaa

SEQ ID NO: 2307245 - RNA, 19 nt, Homo sapiens
  misc_RNA (1)...(19): siRNA sense strand
cgagaaggugugaucaaaa

SEQ ID NO: 2307246 - RNA, 19 nt, Homo sapiens
  misc_RNA (1)...(19): siRNA sense strand
ccuauuacgaugaagcaca

SEQ ID NO: 2307247 - RNA, 19 nt, Homo sapiens
  misc_RNA (1)...(19): siRNA sense strand
cauuggaaccuuggagaau

SEQ ID NO: 2307248 - RNA, 19 nt, Homo sapiens
  misc_RNA (1)...(19): siRNA sense strand
gguuagaguggaacaaacu

SEQ ID NO: 2307249 - RNA, 19 nt, Homo sapiens
  misc_RNA (1)...(19): siRNA sense strand
cagccaacaaugcagaaau

SEQ ID NO: 2307250 - RNA, 19 nt, Homo sapiens
  misc_RNA (1)...(19): siRNA sense strand
gugagaacaugaauggaac

SEQ ID NO: 2307251 - RNA, 19 nt, Homo sapiens
  misc_RNA (1)...(19): siRNA sense strand
cuaagaaucaggagggcaa

SEQ ID NO: 2307252 - RNA, 19 nt, Homo sapiens
  misc_RNA (1)...(19): siRNA sense strand
ggagaaaccugcaggccuu

SEQ ID NO: 2307253 - RNA, 19 nt, Homo sapiens
  misc_RNA (1)...(19): siRNA sense strand
agaaggagcuggaggccau

SEQ ID NO: 2307254 - RNA, 19 nt, Homo sapiens
  misc_RNA (1)...(19): siRNA sense strand
gggacaaccagcaggaaaa

SEQ ID NO: 2307255 - RNA, 19 nt, Homo sapiens
  misc_RNA (1)...(19): siRNA sense strand
gggugaagaaggaggagca

SEQ ID NO: 2307256 - RNA, 19 nt, Homo sapiens
  misc_RNA (1)...(19): siRNA sense strand
gacaagaguaguugggaca

SEQ ID NO: 2307257 - RNA, 19 nt, Homo sapiens
  misc_RNA (1)...(19): siRNA sense strand
aggaguuggauuacagaaa

SEQ ID NO: 2307258 - RNA, 19 nt, Homo sapiens
  misc_RNA (1)...(19): siRNA sense strand
cagaaguggacgugcauga

SEQ ID NO: 2307259 - RNA, 19 nt, Homo sapiens
  misc_RNA (1)...(19): siRNA sense strand
gaagaaagcaggcgggaag

SEQ ID NO: 2307260 - RNA, 19 nt, Homo sapiens
  misc_RNA (1)...(19): siRNA sense strand
acgcuggagcagaagaaua

SEQ ID NO: 2307261 - RNA, 19 nt, Homo sapiens
  misc_RNA (1)...(19): siRNA sense strand
aggaugugguucugagaca

SEQ ID NO: 2307262 - RNA, 19 nt, Homo sapiens
  misc_RNA (1)...(19): siRNA sense strand
caguggaccuagaggcuga

SEQ ID NO: 2307263 - RNA, 19 nt, Homo sapiens
  misc_RNA (1)...(19): siRNA sense strand
acagaaacuccuaugaaau

SEQ ID NO: 2307264 - RNA, 19 nt, Homo sapiens
  misc_RNA (1)...(19): siRNA sense strand
gucucagaauggaaagaua

SEQ ID NO: 2307265 - RNA, 19 nt, Homo sapiens
  misc_RNA (1)...(19): siRNA sense strand
agaaugaagagguguugaa

SEQ ID NO: 2307266 - RNA, 19 nt, Homo sapiens
  misc_RNA (1)...(19): siRNA sense strand
gugauggaaaugaggaaaa

SEQ ID NO: 2307267 - RNA, 19 nt, Homo sapiens
  misc_RNA (1)...(19): siRNA sense strand
ggacaagaguaguugggac

SEQ ID NO: 2307268 - RNA, 19 nt, Homo sapiens
  misc_RNA (1)...(19): siRNA sense strand
ggacgaacagagagagaag

SEQ ID NO: 2307269 - RNA, 19 nt, Homo sapiens
  misc_RNA (1)...(19): siRNA sense strand
ccugcaagccagugacuuu

SEQ ID NO: 2307270 - RNA, 19 nt, Homo sapiens
  misc_RNA (1)...(19): siRNA sense strand
gaggacgaacagagagaga

SEQ ID NO: 2307271 - RNA, 19 nt, Homo sapiens
  misc_RNA (1)...(19): siRNA sense strand
gccaaagggcucuccguaa

SEQ ID NO: 2307272 - RNA, 19 nt, Homo sapiens
  misc_RNA (1)...(19): siRNA sense strand
ucagaagauaugagaagau

SEQ ID NO: 2307273 - RNA, 19 nt, Homo sapiens
  misc_RNA (1)...(19): siRNA sense strand
ccaaaauggggaaaagcua

SEQ ID NO: 2307274 - RNA, 19 nt, Homo sapiens
  misc_RNA (1)...(19): siRNA sense strand
cccuaaagacugacacauu

SEQ ID NO: 2307275 - RNA, 19 nt, Homo sapiens
  misc_RNA (1)...(19): siRNA sense strand
ggaaggagcagcugcgagu

SEQ ID NO: 2307276 - RNA, 19 nt, Homo sapiens
  misc_RNA (1)...(19): siRNA sense strand
ggacgcuggagcagaagaa

SEQ ID NO: 2307277 - RNA, 19 nt, Homo sapiens
  misc_RNA (1)...(19): siRNA sense strand
uugacuauucugaggacaa

SEQ ID NO: 2307278 - RNA, 19 nt, Homo sapiens
  misc_RNA (1)...(19): siRNA sense strand
ugggacaaccagcaggaaa

SEQ ID NO: 2307279 - RNA, 19 nt, Homo sapiens
  misc_RNA (1)...(19): siRNA sense strand
ucauaaccaaggagagaga

SEQ ID NO: 2307280 - RNA, 19 nt, Homo sapiens
  misc_RNA (1)...(19): siRNA sense strand
aggcugacaaacaggacua

SEQ ID NO: 2307281 - RNA, 19 nt, Homo sapiens
  misc_RNA (1)...(19): siRNA sense strand
gugacgaacugauugccaa

SEQ ID NO: 2307282 - RNA, 19 nt, Homo sapiens
  misc_RNA (1)...(19): siRNA sense strand
gugaacacacggaggaagu

SEQ ID NO: 2307283 - RNA, 19 nt, Homo sapiens
  misc_RNA (1)...(19): siRNA sense strand
acugacacauuuaggguga

SEQ ID NO: 2307284 - RNA, 19 nt, Homo sapiens
  misc_RNA (1)...(19): siRNA sense strand
aagugauggaaaugaggaa

SEQ ID NO: 2307285 - RNA, 19 nt, Homo sapiens
  misc_RNA (1)...(19): siRNA sense strand
ccgcaagaaugaagaggug

SEQ ID NO: 2307286 - RNA, 19 nt, Homo sapiens
  misc_RNA (1)...(19): siRNA sense strand
aaauagaagaacucaccaa

SEQ ID NO: 2307287 - RNA, 19 nt, Homo sapiens
  misc_RNA (1)...(19): siRNA sense strand
ugacgaacugauugccaaa

SEQ ID NO: 2307288 - RNA, 19 nt, Homo sapiens
  misc_RNA (1)...(19): siRNA sense strand
cugaggaggccaaagauga

SEQ ID NO: 2307289 - RNA, 19 nt, Homo sapiens
  misc_RNA (1)...(19): siRNA sense strand
ccuuuguaaacgagaccaa

SEQ ID NO: 2307290 - RNA, 19 nt, Homo sapiens
  misc_RNA (1)...(19): siRNA sense strand
aggcgggaagugauggaaa

SEQ ID NO: 2307291 - RNA, 19 nt, Homo sapiens
  misc_RNA (1)...(19): siRNA sense strand
cuugcaggugccagagaaa

SEQ ID NO: 2307292 - RNA, 19 nt, Homo sapiens
  misc_RNA (1)...(19): siRNA sense strand
ccgcugagguggagaaacc

SEQ ID NO: 2307293 - RNA, 19 nt, Homo sapiens
  misc_RNA (1)...(19): siRNA sense strand
gaagacaagccgauagcca

SEQ ID NO: 2307294 - RNA, 19 nt, Homo sapiens
  misc_RNA (1)...(19): siRNA sense strand
cucagaauggaaagauaaa

SEQ ID NO: 2307295 - RNA, 19 nt, Homo sapiens
  misc_RNA (1)...(19): siRNA sense strand
uagaggacgaacagagaga

SEQ ID NO: 2307296 - RNA, 19 nt, Homo sapiens
  misc_RNA (1)...(19): siRNA sense strand
agaugauagaggacgaaca

SEQ ID NO: 2307297 - RNA, 19 nt, Homo sapiens
  misc_RNA (1)...(19): siRNA sense strand
caaaauggggaaaagcuaa

SEQ ID NO: 2307298 - RNA, 19 nt, Homo sapiens
  misc_RNA (1)...(19): siRNA sense strand
aggugcacgcggaggagaa

SEQ ID NO: 2307299 - RNA, 19 nt, Homo sapiens
  misc_RNA (1)...(19): siRNA sense strand
ugaggaggccaaagaugaa

SEQ ID NO: 2307300 - RNA, 19 nt, Homo sapiens
  misc_RNA (1)...(19): siRNA sense strand
accuagaggcugacaaaca

SEQ ID NO: 2307301 - RNA, 19 nt, Homo sapiens
  misc_RNA (1)...(19): siRNA sense strand
ugaagagacugaagcccuu

SEQ ID NO: 2307302 - RNA, 19 nt, Homo sapiens
  misc_RNA (1)...(19): siRNA sense strand
ccagagaaauccucccaga

SEQ ID NO: 2307303 - RNA, 19 nt, Homo sapiens
  misc_RNA (1)...(19): siRNA sense strand
agaagauaugagaagauga

SEQ ID NO: 2307304 - RNA, 19 nt, Homo sapiens
  misc_RNA (1)...(19): siRNA sense strand
uggaaaggacgcuggagca

SEQ ID NO: 2307305 - RNA, 19 nt, Homo sapiens
  misc_RNA (1)...(19): siRNA sense strand
cagugaaggagacgcaaca

SEQ ID NO: 2307306 - RNA, 19 nt, Homo sapiens
  misc_RNA (1)...(19): siRNA sense strand
ccgaguaugagaagaccau

SEQ ID NO: 2307307 - RNA, 19 nt, Homo sapiens
  misc_RNA (1)...(19): siRNA sense strand
ugacaacacuccugccuca

SEQ ID NO: 2307308 - RNA, 19 nt, Homo sapiens
  misc_RNA (1)...(19): siRNA sense strand
gauauugacaagugggaug

SEQ ID NO: 2307309 - RNA, 19 nt, Homo sapiens
  misc_RNA (1)...(19): siRNA sense strand
cauacaacuuugacccaga

SEQ ID NO: 2307310 - RNA, 19 nt, Homo sapiens
  misc_RNA (1)...(19): siRNA sense strand
cuaagaaucaggagggcaa

SEQ ID NO: 2307311 - RNA, 19 nt, Homo sapiens
  misc_RNA (1)...(19): siRNA sense strand
ggagaaaccugcaggccuu

SEQ ID NO: 2307312 - RNA, 19 nt, Homo sapiens
  misc_RNA (1)...(19): siRNA sense strand
agaaggagcuggaggccau

SEQ ID NO: 2307313 - RNA, 19 nt, Homo sapiens
  misc_RNA (1)...(19): siRNA sense strand
gggacaaccagcaggaaaa

SEQ ID NO: 2307314 - RNA, 19 nt, Homo sapiens
  misc_RNA (1)...(19): siRNA sense strand
gggugaagaaggaggagca

SEQ ID NO: 2307315 - RNA, 19 nt, Homo sapiens
  misc_RNA (1)...(19): siRNA sense strand
gacaagaguaguugggaca

SEQ ID NO: 2307316 - RNA, 19 nt, Homo sapiens
  misc_RNA (1)...(19): siRNA sense strand
aggaguuggauuacagaaa

SEQ ID NO: 2307317 - RNA, 19 nt, Homo sapiens
  misc_RNA (1)...(19): siRNA sense strand
cagaaguggacgugcauga

SEQ ID NO: 2307318 - RNA, 19 nt, Homo sapiens
  misc_RNA (1)...(19): siRNA sense strand
gaagaaagcaggcgggaag

SEQ ID NO: 2307319 - RNA, 19 nt, Homo sapiens
  misc_RNA (1)...(19): siRNA sense strand
acgcuggagcagaagaaua

SEQ ID NO: 2307320 - RNA, 19 nt, Homo sapiens
  misc_RNA (1)...(19): siRNA sense strand
aggaugugguucugagaca

SEQ ID NO: 2307321 - RNA, 19 nt, Homo sapiens
  misc_RNA (1)...(19): siRNA sense strand
caguggaccuagaggcuga

SEQ ID NO: 2307322 - RNA, 19 nt, Homo sapiens
  misc_RNA (1)...(19): siRNA sense strand
acagaaacuccuaugaaau

SEQ ID NO: 2307323 - RNA, 19 nt, Homo sapiens
  misc_RNA (1)...(19): siRNA sense strand
gucucagaauggaaagaua

SEQ ID NO: 2307324 - RNA, 19 nt, Homo sapiens
  misc_RNA (1)...(19): siRNA sense strand
agaaugaagagguguugaa

SEQ ID NO: 2307325 - RNA, 19 nt, Homo sapiens
  misc_RNA (1)...(19): siRNA sense strand
gugauggaaaugaggaaaa

SEQ ID NO: 2307326 - RNA, 19 nt, Homo sapiens
  misc_RNA (1)...(19): siRNA sense strand
ggacaagaguaguugggac

SEQ ID NO: 2307327 - RNA, 19 nt, Homo sapiens
  misc_RNA (1)...(19): siRNA sense strand
ggacgaacagagagagaag

SEQ ID NO: 2307328 - RNA, 19 nt, Homo sapiens
  misc_RNA (1)...(19): siRNA sense strand
ccugcaagccagugacuuu

SEQ ID NO: 2307329 - RNA, 19 nt, Homo sapiens
  misc_RNA (1)...(19): siRNA sense strand
gaggacgaacagagagaga

SEQ ID NO: 2307330 - RNA, 19 nt, Homo sapiens
  misc_RNA (1)...(19): siRNA sense strand
gccaaagggcucuccguaa

SEQ ID NO: 2307331 - RNA, 19 nt, Homo sapiens
  misc_RNA (1)...(19): siRNA sense strand
ucagaagauaugagaagau

SEQ ID NO: 2307332 - RNA, 19 nt, Homo sapiens
  misc_RNA (1)...(19): siRNA sense strand
ccaaaauggggaaaagcua

SEQ ID NO: 2307333 - RNA, 19 nt, Homo sapiens
  misc_RNA (1)...(19): siRNA sense strand
cccuaaagacugacacauu

SEQ ID NO: 2307334 - RNA, 19 nt, Homo sapiens
  misc_RNA (1)...(19): siRNA sense strand
ggaaggagcagcugcgagu

SEQ ID NO: 2307335 - RNA, 19 nt, Homo sapiens
  misc_RNA (1)...(19): siRNA sense strand
ggacgcuggagcagaagaa

SEQ ID NO: 2307336 - RNA, 19 nt, Homo sapiens
  misc_RNA (1)...(19): siRNA sense strand
uugacuauucugaggacaa

SEQ ID NO: 2307337 - RNA, 19 nt, Homo sapiens
  misc_RNA (1)...(19): siRNA sense strand
ugggacaaccagcaggaaa

SEQ ID NO: 2307338 - RNA, 19 nt, Homo sapiens
  misc_RNA (1)...(19): siRNA sense strand
ucauaaccaaggagagaga

SEQ ID NO: 2307339 - RNA, 19 nt, Homo sapiens
  misc_RNA (1)...(19): siRNA sense strand
aggcugacaaacaggacua

SEQ ID NO: 2307340 - RNA, 19 nt, Homo sapiens
  misc_RNA (1)...(19): siRNA sense strand
gugacgaacugauugccaa

SEQ ID NO: 2307341 - RNA, 19 nt, Homo sapiens
  misc_RNA (1)...(19): siRNA sense strand
gugaacacacggaggaagu

SEQ ID NO: 2307342 - RNA, 19 nt, Homo sapiens
  misc_RNA (1)...(19): siRNA sense strand
acugacacauuuaggguga

SEQ ID NO: 2307343 - RNA, 19 nt, Homo sapiens
  misc_RNA (1)...(19): siRNA sense strand
aagugauggaaaugaggaa

SEQ ID NO: 2307344 - RNA, 19 nt, Homo sapiens
  misc_RNA (1)...(19): siRNA sense strand
ccgcaagaaugaagaggug

SEQ ID NO: 2307345 - RNA, 19 nt, Homo sapiens
  misc_RNA (1)...(19): siRNA sense strand
aaauagaagaacucaccaa

SEQ ID NO: 2307346 - RNA, 19 nt, Homo sapiens
  misc_RNA (1)...(19): siRNA sense strand
ugacgaacugauugccaaa

SEQ ID NO: 2307347 - RNA, 19 nt, Homo sapiens
  misc_RNA (1)...(19): siRNA sense strand
cugaggaggccaaagauga

SEQ ID NO: 2307348 - RNA, 19 nt, Homo sapiens
  misc_RNA (1)...(19): siRNA sense strand
ccuuuguaaacgagaccaa

SEQ ID NO: 2307349 - RNA, 19 nt, Homo sapiens
  misc_RNA (1)...(19): siRNA sense strand
aggcgggaagugauggaaa

SEQ ID NO: 2307350 - RNA, 19 nt, Homo sapiens
  misc_RNA (1)...(19): siRNA sense strand
cuugcaggugccagagaaa

SEQ ID NO: 2307351 - RNA, 19 nt, Homo sapiens
  misc_RNA (1)...(19): siRNA sense strand
ccgcugagguggagaaacc

SEQ ID NO: 2307352 - RNA, 19 nt, Homo sapiens
  misc_RNA (1)...(19): siRNA sense strand
gaagacaagccgauagcca

SEQ ID NO: 2307353 - RNA, 19 nt, Homo sapiens
  misc_RNA (1)...(19): siRNA sense strand
cucagaauggaaagauaaa

SEQ ID NO: 2307354 - RNA, 19 nt, Homo sapiens
  misc_RNA (1)...(19): siRNA sense strand
uagaggacgaacagagaga

SEQ ID NO: 2307355 - RNA, 19 nt, Homo sapiens
  misc_RNA (1)...(19): siRNA sense strand
agaugauagaggacgaaca

SEQ ID NO: 2307356 - RNA, 19 nt, Homo sapiens
  misc_RNA (1)...(19): siRNA sense strand
caaaauggggaaaagcuaa

SEQ ID NO: 2307357 - RNA, 19 nt, Homo sapiens
  misc_RNA (1)...(19): siRNA sense strand
aggugcacgcggaggagaa

SEQ ID NO: 2307358 - RNA, 19 nt, Homo sapiens
  misc_RNA (1)...(19): siRNA sense strand
ugaggaggccaaagaugaa

SEQ ID NO: 2307359 - RNA, 19 nt, Homo sapiens
  misc_RNA (1)...(19): siRNA sense strand
accuagaggcugacaaaca

SEQ ID NO: 2307360 - RNA, 19 nt, Homo sapiens
  misc_RNA (1)...(19): siRNA sense strand
ugaagagacugaagcccuu

SEQ ID NO: 2307361 - RNA, 19 nt, Homo sapiens
  misc_RNA (1)...(19): siRNA sense strand
ccagagaaauccucccaga

SEQ ID NO: 2307362 - RNA, 19 nt, Homo sapiens
  misc_RNA (1)...(19): siRNA sense strand
agaagauaugagaagauga

SEQ ID NO: 2307363 - RNA, 19 nt, Homo sapiens
  misc_RNA (1)...(19): siRNA sense strand
uggaaaggacgcuggagca

SEQ ID NO: 2307364 - RNA, 19 nt, Homo sapiens
  misc_RNA (1)...(19): siRNA sense strand
cagugaaggagacgcaaca

SEQ ID NO: 2307365 - RNA, 19 nt, Homo sapiens
  misc_RNA (1)...(19): siRNA sense strand
ccgaguaugagaagaccau

SEQ ID NO: 2307366 - RNA, 19 nt, Homo sapiens
  misc_RNA (1)...(19): siRNA sense strand
ugacaacacuccugccuca

SEQ ID NO: 2307367 - RNA, 19 nt, Homo sapiens
  misc_RNA (1)...(19): siRNA sense strand
gauauugacaagugggaug

SEQ ID NO: 2307368 - RNA, 19 nt, Homo sapiens
  misc_RNA (1)...(19): siRNA sense strand
cauacaacuuugacccaga

SEQ ID NO: 2307369 - RNA, 19 nt, Homo sapiens
  misc_RNA (1)...(19): siRNA sense strand
cuaagaaucaggagggcaa

SEQ ID NO: 2307370 - RNA, 19 nt, Homo sapiens
  misc_RNA (1)...(19): siRNA sense strand
ggagaaaccugcaggccuu

SEQ ID NO: 2307371 - RNA, 19 nt, Homo sapiens
  misc_RNA (1)...(19): siRNA sense strand
agaaggagcuggaggccau

SEQ ID NO: 2307372 - RNA, 19 nt, Homo sapiens
  misc_RNA (1)...(19): siRNA sense strand
gggacaaccagcaggaaaa

SEQ ID NO: 2307373 - RNA, 19 nt, Homo sapiens
  misc_RNA (1)...(19): siRNA sense strand
gggugaagaaggaggagca

SEQ ID NO: 2307374 - RNA, 19 nt, Homo sapiens
  misc_RNA (1)...(19): siRNA sense strand
gacaagaguaguugggaca

SEQ ID NO: 2307375 - RNA, 19 nt, Homo sapiens
  misc_RNA (1)...(19): siRNA sense strand
aggaguuggauuacagaaa

SEQ ID NO: 2307376 - RNA, 19 nt, Homo sapiens
  misc_RNA (1)...(19): siRNA sense strand
cagaaguggacgugcauga

SEQ ID NO: 2307377 - RNA, 19 nt, Homo sapiens
  misc_RNA (1)...(19): siRNA sense strand
gaagaaagcaggcgggaag

SEQ ID NO: 2307378 - RNA, 19 nt, Homo sapiens
  misc_RNA (1)...(19): siRNA sense strand
acgcuggagcagaagaaua

SEQ ID NO: 2307379 - RNA, 19 nt, Homo sapiens
  misc_RNA (1)...(19): siRNA sense strand
aggaugugguucugagaca

SEQ ID NO: 2307380 - RNA, 19 nt, Homo sapiens
  misc_RNA (1)...(19): siRNA sense strand
caguggaccuagaggcuga

SEQ ID NO: 2307381 - RNA, 19 nt, Homo sapiens
  misc_RNA (1)...(19): siRNA sense strand
acagaaacuccuaugaaau

SEQ ID NO: 2307382 - RNA, 19 nt, Homo sapiens
  misc_RNA (1)...(19): siRNA sense strand
gucucagaauggaaagaua

SEQ ID NO: 2307383 - RNA, 19 nt, Homo sapiens
  misc_RNA (1)...(19): siRNA sense strand
agaaugaagagguguugaa

SEQ ID NO: 2307384 - RNA, 19 nt, Homo sapiens
  misc_RNA (1)...(19): siRNA sense strand
gugauggaaaugaggaaaa

SEQ ID NO: 2307385 - RNA, 19 nt, Homo sapiens
  misc_RNA (1)...(19): siRNA sense strand
ggacaagaguaguugggac

SEQ ID NO: 2307386 - RNA, 19 nt, Homo sapiens
  misc_RNA (1)...(19): siRNA sense strand
ggacgaacagagagagaag

SEQ ID NO: 2307387 - RNA, 19 nt, Homo sapiens
  misc_RNA (1)...(19): siRNA sense strand
ccugcaagccagugacuuu

SEQ ID NO: 2307388 - RNA, 19 nt, Homo sapiens
  misc_RNA (1)...(19): siRNA sense strand
gaggacgaacagagagaga

SEQ ID NO: 2307389 - RNA, 19 nt, Homo sapiens
  misc_RNA (1)...(19): siRNA sense strand
gccaaagggcucuccguaa

SEQ ID NO: 2307390 - RNA, 19 nt, Homo sapiens
  misc_RNA (1)...(19): siRNA sense strand
ucagaagauaugagaagau

SEQ ID NO: 2307391 - RNA, 19 nt, Homo sapiens
  misc_RNA (1)...(19): siRNA sense strand
ccaaaauggggaaaagcua

SEQ ID NO: 2307392 - RNA, 19 nt, Homo sapiens
  misc_RNA (1)...(19): siRNA sense strand
cccuaaagacugacacauu

SEQ ID NO: 2307393 - RNA, 19 nt, Homo sapiens
  misc_RNA (1)...(19): siRNA sense strand
ggaaggagcagcugcgagu

SEQ ID NO: 2307394 - RNA, 19 nt, Homo sapiens
  misc_RNA (1)...(19): siRNA sense strand
ggacgcuggagcagaagaa

SEQ ID NO: 2307395 - RNA, 19 nt, Homo sapiens
  misc_RNA (1)...(19): siRNA sense strand
uugacuauucugaggacaa

SEQ ID NO: 2307396 - RNA, 19 nt, Homo sapiens
  misc_RNA (1)...(19): siRNA sense strand
ugggacaaccagcaggaaa

SEQ ID NO: 2307397 - RNA, 19 nt, Homo sapiens
  misc_RNA (1)...(19): siRNA sense strand
ucauaaccaaggagagaga

SEQ ID NO: 2307398 - RNA, 19 nt, Homo sapiens
  misc_RNA (1)...(19): siRNA sense strand
aggcugacaaacaggacua

SEQ ID NO: 2307399 - RNA, 19 nt, Homo sapiens
  misc_RNA (1)...(19): siRNA sense strand
gugacgaacugauugccaa

SEQ ID NO: 2307400 - RNA, 19 nt, Homo sapiens
  misc_RNA (1)...(19): siRNA sense strand
gugaacacacggaggaagu

SEQ ID NO: 2307401 - RNA, 19 nt, Homo sapiens
  misc_RNA (1)...(19): siRNA sense strand
acugacacauuuaggguga

SEQ ID NO: 2307402 - RNA, 19 nt, Homo sapiens
  misc_RNA (1)...(19): siRNA sense strand
aagugauggaaaugaggaa

SEQ ID NO: 2307403 - RNA, 19 nt, Homo sapiens
  misc_RNA (1)...(19): siRNA sense strand
ccgcaagaaugaagaggug

SEQ ID NO: 2307404 - RNA, 19 nt, Homo sapiens
  misc_RNA (1)...(19): siRNA sense strand
aaauagaagaacucaccaa

SEQ ID NO: 2307405 - RNA, 19 nt, Homo sapiens
  misc_RNA (1)...(19): siRNA sense strand
ugacgaacugauugccaaa

SEQ ID NO: 2307406 - RNA, 19 nt, Homo sapiens
  misc_RNA (1)...(19): siRNA sense strand
cugaggaggccaaagauga

SEQ ID NO: 2307407 - RNA, 19 nt, Homo sapiens
  misc_RNA (1)...(19): siRNA sense strand
ccuuuguaaacgagaccaa

SEQ ID NO: 2307408 - RNA, 19 nt, Homo sapiens
  misc_RNA (1)...(19): siRNA sense strand
aggcgggaagugauggaaa

SEQ ID NO: 2307409 - RNA, 19 nt, Homo sapiens
  misc_RNA (1)...(19): siRNA sense strand
cuugcaggugccagagaaa

SEQ ID NO: 2307410 - RNA, 19 nt, Homo sapiens
  misc_RNA (1)...(19): siRNA sense strand
ccgcugagguggagaaacc

SEQ ID NO: 2307411 - RNA, 19 nt, Homo sapiens
  misc_RNA (1)...(19): siRNA sense strand
gaagacaagccgauagcca

SEQ ID NO: 2307412 - RNA, 19 nt, Homo sapiens
  misc_RNA (1)...(19): siRNA sense strand
cucagaauggaaagauaaa

SEQ ID NO: 2307413 - RNA, 19 nt, Homo sapiens
  misc_RNA (1)...(19): siRNA sense strand
uagaggacgaacagagaga

SEQ ID NO: 2307414 - RNA, 19 nt, Homo sapiens
  misc_RNA (1)...(19): siRNA sense strand
agaugauagaggacgaaca

SEQ ID NO: 2307415 - RNA, 19 nt, Homo sapiens
  misc_RNA (1)...(19): siRNA sense strand
caaaauggggaaaagcuaa

SEQ ID NO: 2307416 - RNA, 19 nt, Homo sapiens
  misc_RNA (1)...(19): siRNA sense strand
aggugcacgcggaggagaa

SEQ ID NO: 2307417 - RNA, 19 nt, Homo sapiens
  misc_RNA (1)...(19): siRNA sense strand
ugaggaggccaaagaugaa

SEQ ID NO: 2307418 - RNA, 19 nt, Homo sapiens
  misc_RNA (1)...(19): siRNA sense strand
accuagaggcugacaaaca

SEQ ID NO: 2307419 - RNA, 19 nt, Homo sapiens
  misc_RNA (1)...(19): siRNA sense strand
ugaagagacugaagcccuu

SEQ ID NO: 2307420 - RNA, 19 nt, Homo sapiens
  misc_RNA (1)...(19): siRNA sense strand
ccagagaaauccucccaga

SEQ ID NO: 2307421 - RNA, 19 nt, Homo sapiens
  misc_RNA (1)...(19): siRNA sense strand
agaagauaugagaagauga

SEQ ID NO: 2307422 - RNA, 19 nt, Homo sapiens
  misc_RNA (1)...(19): siRNA sense strand
uggaaaggacgcuggagca

SEQ ID NO: 2307423 - RNA, 19 nt, Homo sapiens
  misc_RNA (1)...(19): siRNA sense strand
cagugaaggagacgcaaca

SEQ ID NO: 2307424 - RNA, 19 nt, Homo sapiens
  misc_RNA (1)...(19): siRNA sense strand
ccgaguaugagaagaccau

SEQ ID NO: 2307425 - RNA, 19 nt, Homo sapiens
  misc_RNA (1)...(19): siRNA sense strand
ugacaacacuccugccuca

SEQ ID NO: 2307426 - RNA, 19 nt, Homo sapiens
  misc_RNA (1)...(19): siRNA sense strand
gauauugacaagugggaug

SEQ ID NO: 2307427 - RNA, 19 nt, Homo sapiens
  misc_RNA (1)...(19): siRNA sense strand
cauacaacuuugacccaga

SEQ ID NO: 2307428 - RNA, 19 nt, Homo sapiens
  misc_RNA (1)...(19): siRNA sense strand
cuaagaaucaggagggcaa

SEQ ID NO: 2307429 - RNA, 19 nt, Homo sapiens
  misc_RNA (1)...(19): siRNA sense strand
ggagaaaccugcaggccuu

SEQ ID NO: 2307430 - RNA, 19 nt, Homo sapiens
  misc_RNA (1)...(19): siRNA sense strand
agaaggagcuggaggccau

SEQ ID NO: 2307431 - RNA, 19 nt, Homo sapiens
  misc_RNA (1)...(19): siRNA sense strand
gggacaaccagcaggaaaa

SEQ ID NO: 2307432 - RNA, 19 nt, Homo sapiens
  misc_RNA (1)...(19): siRNA sense strand
gggugaagaaggaggagca

SEQ ID NO: 2307433 - RNA, 19 nt, Homo sapiens
  misc_RNA (1)...(19): siRNA sense strand
gacaagaguaguugggaca

SEQ ID NO: 2307434 - RNA, 19 nt, Homo sapiens
  misc_RNA (1)...(19): siRNA sense strand
aggaguuggauuacagaaa

SEQ ID NO: 2307435 - RNA, 19 nt, Homo sapiens
  misc_RNA (1)...(19): siRNA sense strand
cagaaguggacgugcauga

SEQ ID NO: 2307436 - RNA, 19 nt, Homo sapiens
  misc_RNA (1)...(19): siRNA sense strand
gaagaaagcaggcgggaag

SEQ ID NO: 2307437 - RNA, 19 nt, Homo sapiens
  misc_RNA (1)...(19): siRNA sense strand
acgcuggagcagaagaaua

SEQ ID NO: 2307438 - RNA, 19 nt, Homo sapiens
  misc_RNA (1)...(19): siRNA sense strand
aggaugugguucugagaca

SEQ ID NO: 2307439 - RNA, 19 nt, Homo sapiens
  misc_RNA (1)...(19): siRNA sense strand
caguggaccuagaggcuga

SEQ ID NO: 2307440 - RNA, 19 nt, Homo sapiens
  misc_RNA (1)...(19): siRNA sense strand
acagaaacuccuaugaaau

SEQ ID NO: 2307441 - RNA, 19 nt, Homo sapiens
  misc_RNA (1)...(19): siRNA sense strand
gucucagaauggaaagaua

SEQ ID NO: 2307442 - RNA, 19 nt, Homo sapiens
  misc_RNA (1)...(19): siRNA sense strand
agaaugaagagguguugaa

SEQ ID NO: 2307443 - RNA, 19 nt, Homo sapiens
  misc_RNA (1)...(19): siRNA sense strand
gugauggaaaugaggaaaa

SEQ ID NO: 2307444 - RNA, 19 nt, Homo sapiens
  misc_RNA (1)...(19): siRNA sense strand
ggacaagaguaguugggac

SEQ ID NO: 2307445 - RNA, 19 nt, Homo sapiens
  misc_RNA (1)...(19): siRNA sense strand
ggacgaacagagagagaag

SEQ ID NO: 2307446 - RNA, 19 nt, Homo sapiens
  misc_RNA (1)...(19): siRNA sense strand
ccugcaagccagugacuuu

SEQ ID NO: 2307447 - RNA, 19 nt, Homo sapiens
  misc_RNA (1)...(19): siRNA sense strand
gaggacgaacagagagaga

SEQ ID NO: 2307448 - RNA, 19 nt, Homo sapiens
  misc_RNA (1)...(19): siRNA sense strand
gccaaagggcucuccguaa

SEQ ID NO: 2307449 - RNA, 19 nt, Homo sapiens
  misc_RNA (1)...(19): siRNA sense strand
ucagaagauaugagaagau

SEQ ID NO: 2307450 - RNA, 19 nt, Homo sapiens
  misc_RNA (1)...(19): siRNA sense strand
ccaaaauggggaaaagcua

SEQ ID NO: 2307451 - RNA, 19 nt, Homo sapiens
  misc_RNA (1)...(19): siRNA sense strand
cccuaaagacugacacauu

SEQ ID NO: 2307452 - RNA, 19 nt, Homo sapiens
  misc_RNA (1)...(19): siRNA sense strand
ggaaggagcagcugcgagu

SEQ ID NO: 2307453 - RNA, 19 nt, Homo sapiens
  misc_RNA (1)...(19): siRNA sense strand
ggacgcuggagcagaagaa

SEQ ID NO: 2307454 - RNA, 19 nt, Homo sapiens
  misc_RNA (1)...(19): siRNA sense strand
uugacuauucugaggacaa

SEQ ID NO: 2307455 - RNA, 19 nt, Homo sapiens
  misc_RNA (1)...(19): siRNA sense strand
ugggacaaccagcaggaaa

SEQ ID NO: 2307456 - RNA, 19 nt, Homo sapiens
  misc_RNA (1)...(19): siRNA sense strand
ucauaaccaaggagagaga

SEQ ID NO: 2307457 - RNA, 19 nt, Homo sapiens
  misc_RNA (1)...(19): siRNA sense strand
aggcugacaaacaggacua

SEQ ID NO: 2307458 - RNA, 19 nt, Homo sapiens
  misc_RNA (1)...(19): siRNA sense strand
gugacgaacugauugccaa

SEQ ID NO: 2307459 - RNA, 19 nt, Homo sapiens
  misc_RNA (1)...(19): siRNA sense strand
gugaacacacggaggaagu

SEQ ID NO: 2307460 - RNA, 19 nt, Homo sapiens
  misc_RNA (1)...(19): siRNA sense strand
acugacacauuuaggguga

SEQ ID NO: 2307461 - RNA, 19 nt, Homo sapiens
  misc_RNA (1)...(19): siRNA sense strand
aagugauggaaaugaggaa

SEQ ID NO: 2307462 - RNA, 19 nt, Homo sapiens
  misc_RNA (1)...(19): siRNA sense strand
ccgcaagaaugaagaggug

SEQ ID NO: 2307463 - RNA, 19 nt, Homo sapiens
  misc_RNA (1)...(19): siRNA sense strand
aaauagaagaacucaccaa

SEQ ID NO: 2307464 - RNA, 19 nt, Homo sapiens
  misc_RNA (1)...(19): siRNA sense strand
ugacgaacugauugccaaa

SEQ ID NO: 2307465 - RNA, 19 nt, Homo sapiens
  misc_RNA (1)...(19): siRNA sense strand
cugaggaggccaaagauga

SEQ ID NO: 2307466 - RNA, 19 nt, Homo sapiens
  misc_RNA (1)...(19): siRNA sense strand
ccuuuguaaacgagaccaa

SEQ ID NO: 2307467 - RNA, 19 nt, Homo sapiens
  misc_RNA (1)...(19): siRNA sense strand
aggcgggaagugauggaaa

SEQ ID NO: 2307468 - RNA, 19 nt, Homo sapiens
  misc_RNA (1)...(19): siRNA sense strand
cuugcaggugccagagaaa

SEQ ID NO: 2307469 - RNA, 19 nt, Homo sapiens
  misc_RNA (1)...(19): siRNA sense strand
ccgcugagguggagaaacc

SEQ ID NO: 2307470 - RNA, 19 nt, Homo sapiens
  misc_RNA (1)...(19): siRNA sense strand
gaagacaagccgauagcca

SEQ ID NO: 2307471 - RNA, 19 nt, Homo sapiens
  misc_RNA (1)...(19): siRNA sense strand
cucagaauggaaagauaaa

SEQ ID NO: 2307472 - RNA, 19 nt, Homo sapiens
  misc_RNA (1)...(19): siRNA sense strand
uagaggacgaacagagaga

SEQ ID NO: 2307473 - RNA, 19 nt, Homo sapiens
  misc_RNA (1)...(19): siRNA sense strand
agaugauagaggacgaaca

SEQ ID NO: 2307474 - RNA, 19 nt, Homo sapiens
  misc_RNA (1)...(19): siRNA sense strand
caaaauggggaaaagcuaa

SEQ ID NO: 2307475 - RNA, 19 nt, Homo sapiens
  misc_RNA (1)...(19): siRNA sense strand
aggugcacgcggaggagaa

SEQ ID NO: 2307476 - RNA, 19 nt, Homo sapiens
  misc_RNA (1)...(19): siRNA sense strand
ugaggaggccaaagaugaa

SEQ ID NO: 2307477 - RNA, 19 nt, Homo sapiens
  misc_RNA (1)...(19): siRNA sense strand
accuagaggcugacaaaca

SEQ ID NO: 2307478 - RNA, 19 nt, Homo sapiens
  misc_RNA (1)...(19): siRNA sense strand
ugaagagacugaagcccuu

SEQ ID NO: 2307479 - RNA, 19 nt, Homo sapiens
  misc_RNA (1)...(19): siRNA sense strand
ccagagaaauccucccaga

SEQ ID NO: 2307480 - RNA, 19 nt, Homo sapiens
  misc_RNA (1)...(19): siRNA sense strand
agaagauaugagaagauga

SEQ ID NO: 2307481 - RNA, 19 nt, Homo sapiens
  misc_RNA (1)...(19): siRNA sense strand
uggaaaggacgcuggagca

SEQ ID NO: 2307482 - RNA, 19 nt, Homo sapiens
  misc_RNA (1)...(19): siRNA sense strand
cagugaaggagacgcaaca

SEQ ID NO: 2307483 - RNA, 19 nt, Homo sapiens
  misc_RNA (1)...(19): siRNA sense strand
ccgaguaugagaagaccau

SEQ ID NO: 2307484 - RNA, 19 nt, Homo sapiens
  misc_RNA (1)...(19): siRNA sense strand
ugacaacacuccugccuca

SEQ ID NO: 2307485 - RNA, 19 nt, Homo sapiens
  misc_RNA (1)...(19): siRNA sense strand
gauauugacaagugggaug

SEQ ID NO: 2307486 - RNA, 19 nt, Homo sapiens
  misc_RNA (1)...(19): siRNA sense strand
cauacaacuuugacccaga

SEQ ID NO: 2307487 - RNA, 19 nt, Homo sapiens
  misc_RNA (1)...(19): siRNA sense strand
gagaaaaugaagaaggaaa

SEQ ID NO: 2307488 - RNA, 19 nt, Homo sapiens
  misc_RNA (1)...(19): siRNA sense strand
aggcuaaacgagaggcaaa

SEQ ID NO: 2307489 - RNA, 19 nt, Homo sapiens
  misc_RNA (1)...(19): siRNA sense strand
cggucaagcuagagccuga

SEQ ID NO: 2307490 - RNA, 19 nt, Homo sapiens
  misc_RNA (1)...(19): siRNA sense strand
ggaugaagagggagaaaau

SEQ ID NO: 2307491 - RNA, 19 nt, Homo sapiens
  misc_RNA (1)...(19): siRNA sense strand
cuacaaucaacaugagaau

SEQ ID NO: 2307492 - RNA, 19 nt, Homo sapiens
  misc_RNA (1)...(19): siRNA sense strand
gcguaguaagcaacagaua

SEQ ID NO: 2307493 - RNA, 19 nt, Homo sapiens
  misc_RNA (1)...(19): siRNA sense strand
cugaaugguaacuguguaa

SEQ ID NO: 2307494 - RNA, 19 nt, Homo sapiens
  misc_RNA (1)...(19): siRNA sense strand
ggacaugguuugaugguug

SEQ ID NO: 2307495 - RNA, 19 nt, Homo sapiens
  misc_RNA (1)...(19): siRNA sense strand
uggaaguguugcuguggaa

SEQ ID NO: 2307496 - RNA, 19 nt, Homo sapiens
  misc_RNA (1)...(19): siRNA sense strand
cuuccugaguugaaagauu

SEQ ID NO: 2307497 - RNA, 19 nt, Homo sapiens
  misc_RNA (1)...(19): siRNA sense strand
aggaacacaugaaagggaa

SEQ ID NO: 2307498 - RNA, 19 nt, Homo sapiens
  misc_RNA (1)...(19): siRNA sense strand
acgaggaugaagagggaga

SEQ ID NO: 2307499 - RNA, 19 nt, Homo sapiens
  misc_RNA (1)...(19): siRNA sense strand
gauucagauaaguuggaua

SEQ ID NO: 2307500 - RNA, 19 nt, Homo sapiens
  misc_RNA (1)...(19): siRNA sense strand
ggaacauauaugaccaaau

SEQ ID NO: 2307501 - RNA, 19 nt, Homo sapiens
  misc_RNA (1)...(19): siRNA sense strand
ggaacacaugaaagggaau

SEQ ID NO: 2307502 - RNA, 19 nt, Homo sapiens
  misc_RNA (1)...(19): siRNA sense strand
gaggaugaagagggagaaa

SEQ ID NO: 2307503 - RNA, 19 nt, Homo sapiens
  misc_RNA (1)...(19): siRNA sense strand
ugaaagggaaugagaccau

SEQ ID NO: 2307504 - RNA, 19 nt, Homo sapiens
  misc_RNA (1)...(19): siRNA sense strand
caggagaggcuaaacgaga

SEQ ID NO: 2307505 - RNA, 19 nt, Homo sapiens
  misc_RNA (1)...(19): siRNA sense strand
cagcaagugaguugaagau

SEQ ID NO: 2307506 - RNA, 19 nt, Homo sapiens
  misc_RNA (1)...(19): siRNA sense strand
ugacgaggaugaagaggga

SEQ ID NO: 2307507 - RNA, 19 nt, Homo sapiens
  misc_RNA (1)...(19): siRNA sense strand
aggagaaacagaacaauca

SEQ ID NO: 2307508 - RNA, 19 nt, Homo sapiens
  misc_RNA (1)...(19): siRNA sense strand
guuuaguagagauggugaa

SEQ ID NO: 2307509 - RNA, 19 nt, Homo sapiens
  misc_RNA (1)...(19): siRNA sense strand
uugagaaguuccauggaga

SEQ ID NO: 2307510 - RNA, 19 nt, Homo sapiens
  misc_RNA (1)...(19): siRNA sense strand
ccuacaaccaacaaggaga

SEQ ID NO: 2307511 - RNA, 19 nt, Homo sapiens
  misc_RNA (1)...(19): siRNA sense strand
agaaccagaaauugaggua

SEQ ID NO: 2307512 - RNA, 19 nt, Homo sapiens
  misc_RNA (1)...(19): siRNA sense strand
uugaagauuuagagaccga

SEQ ID NO: 2307513 - RNA, 19 nt, Homo sapiens
  misc_RNA (1)...(19): siRNA sense strand
gaagaauacuauaguggac

SEQ ID NO: 2307514 - RNA, 19 nt, Homo sapiens
  misc_RNA (1)...(19): siRNA sense strand
acuuggagcuagucuacaa

SEQ ID NO: 2307515 - RNA, 19 nt, Homo sapiens
  misc_RNA (1)...(19): siRNA sense strand
cuuuggaugacgaggauga

SEQ ID NO: 2307516 - RNA, 19 nt, Homo sapiens
  misc_RNA (1)...(19): siRNA sense strand
gauuaugggaugcuaucaa

SEQ ID NO: 2307517 - RNA, 19 nt, Homo sapiens
  misc_RNA (1)...(19): siRNA sense strand
caggaguuauuguugggaa

SEQ ID NO: 2307518 - RNA, 19 nt, Homo sapiens
  misc_RNA (1)...(19): siRNA sense strand
caacaugagaaugaagcaa

SEQ ID NO: 2307519 - RNA, 19 nt, Homo sapiens
  misc_RNA (1)...(19): siRNA sense strand
aaugagaccauguuggauu

SEQ ID NO: 2307520 - RNA, 19 nt, Homo sapiens
  misc_RNA (1)...(19): siRNA sense strand
gcuucguagugucaaacaa

SEQ ID NO: 2307521 - RNA, 19 nt, Homo sapiens
  misc_RNA (1)...(19): siRNA sense strand
ucagaugaugucuuagaaa

SEQ ID NO: 2307522 - RNA, 19 nt, Homo sapiens
  misc_RNA (1)...(19): siRNA sense strand
ggauauuggacaugguuug

SEQ ID NO: 2307523 - RNA, 19 nt, Homo sapiens
  misc_RNA (1)...(19): siRNA sense strand
uggaugacgaggaugaaga

SEQ ID NO: 2307524 - RNA, 19 nt, Homo sapiens
  misc_RNA (1)...(19): siRNA sense strand
aaagcuucguagugucaaa

SEQ ID NO: 2307525 - RNA, 19 nt, Homo sapiens
  misc_RNA (1)...(19): siRNA sense strand
auuuagagaccgaugacuu

SEQ ID NO: 2307526 - RNA, 19 nt, Homo sapiens
  misc_RNA (1)...(19): siRNA sense strand
aggaguuauuguugggaac

SEQ ID NO: 2307527 - RNA, 19 nt, Homo sapiens
  misc_RNA (1)...(19): siRNA sense strand
aacaugagaaugaagcaaa

SEQ ID NO: 2307528 - RNA, 19 nt, Homo sapiens
  misc_RNA (1)...(19): siRNA sense strand
ugagaaugaagcaaaguca

SEQ ID NO: 2307529 - RNA, 19 nt, Homo sapiens
  misc_RNA (1)...(19): siRNA sense strand
ccaggaugaccuacgagua

SEQ ID NO: 2307530 - RNA, 19 nt, Homo sapiens
  misc_RNA (1)...(19): siRNA sense strand
gaggcaucuucaggagaaa

SEQ ID NO: 2307531 - RNA, 19 nt, Homo sapiens
  misc_RNA (1)...(19): siRNA sense strand
acuaucagccuuuaagaau

SEQ ID NO: 2307532 - RNA, 19 nt, Homo sapiens
  misc_RNA (1)...(19): siRNA sense strand
cugagaauucacaggaguu

SEQ ID NO: 2307533 - RNA, 19 nt, Homo sapiens
  misc_RNA (1)...(19): siRNA sense strand
cuaaacgagaggcaaacaa

SEQ ID NO: 2307534 - RNA, 19 nt, Homo sapiens
  misc_RNA (1)...(19): siRNA sense strand
ucugauugcuggagguuuu

SEQ ID NO: 2307535 - RNA, 19 nt, Homo sapiens
  misc_RNA (1)...(19): siRNA sense strand
agaacaaucagauauggaa

SEQ ID NO: 2307536 - RNA, 19 nt, Homo sapiens
  misc_RNA (1)...(19): siRNA sense strand
gagaaaaugaagaaggaaa

SEQ ID NO: 2307537 - RNA, 19 nt, Homo sapiens
  misc_RNA (1)...(19): siRNA sense strand
aggcuaaacgagaggcaaa

SEQ ID NO: 2307538 - RNA, 19 nt, Homo sapiens
  misc_RNA (1)...(19): siRNA sense strand
cggucaagcuagagccuga

SEQ ID NO: 2307539 - RNA, 19 nt, Homo sapiens
  misc_RNA (1)...(19): siRNA sense strand
ggaugaagagggagaaaau

SEQ ID NO: 2307540 - RNA, 19 nt, Homo sapiens
  misc_RNA (1)...(19): siRNA sense strand
cuacaaucaacaugagaau

SEQ ID NO: 2307541 - RNA, 19 nt, Homo sapiens
  misc_RNA (1)...(19): siRNA sense strand
gcguaguaagcaacagaua

SEQ ID NO: 2307542 - RNA, 19 nt, Homo sapiens
  misc_RNA (1)...(19): siRNA sense strand
cugaaugguaacuguguaa

SEQ ID NO: 2307543 - RNA, 19 nt, Homo sapiens
  misc_RNA (1)...(19): siRNA sense strand
ggacaugguuugaugguug

SEQ ID NO: 2307544 - RNA, 19 nt, Homo sapiens
  misc_RNA (1)...(19): siRNA sense strand
uggaaguguugcuguggaa

SEQ ID NO: 2307545 - RNA, 19 nt, Homo sapiens
  misc_RNA (1)...(19): siRNA sense strand
cuuccugaguugaaagauu

SEQ ID NO: 2307546 - RNA, 19 nt, Homo sapiens
  misc_RNA (1)...(19): siRNA sense strand
aggaacacaugaaagggaa

SEQ ID NO: 2307547 - RNA, 19 nt, Homo sapiens
  misc_RNA (1)...(19): siRNA sense strand
acgaggaugaagagggaga

SEQ ID NO: 2307548 - RNA, 19 nt, Homo sapiens
  misc_RNA (1)...(19): siRNA sense strand
gauucagauaaguuggaua

SEQ ID NO: 2307549 - RNA, 19 nt, Homo sapiens
  misc_RNA (1)...(19): siRNA sense strand
ggaacauauaugaccaaau

SEQ ID NO: 2307550 - RNA, 19 nt, Homo sapiens
  misc_RNA (1)...(19): siRNA sense strand
ggaacacaugaaagggaau

SEQ ID NO: 2307551 - RNA, 19 nt, Homo sapiens
  misc_RNA (1)...(19): siRNA sense strand
gaggaugaagagggagaaa

SEQ ID NO: 2307552 - RNA, 19 nt, Homo sapiens
  misc_RNA (1)...(19): siRNA sense strand
ugaaagggaaugagaccau

SEQ ID NO: 2307553 - RNA, 19 nt, Homo sapiens
  misc_RNA (1)...(19): siRNA sense strand
caggagaggcuaaacgaga

SEQ ID NO: 2307554 - RNA, 19 nt, Homo sapiens
  misc_RNA (1)...(19): siRNA sense strand
cagcaagugaguugaagau

SEQ ID NO: 2307555 - RNA, 19 nt, Homo sapiens
  misc_RNA (1)...(19): siRNA sense strand
ugacgaggaugaagaggga

SEQ ID NO: 2307556 - RNA, 19 nt, Homo sapiens
  misc_RNA (1)...(19): siRNA sense strand
aggagaaacagaacaauca

SEQ ID NO: 2307557 - RNA, 19 nt, Homo sapiens
  misc_RNA (1)...(19): siRNA sense strand
guuuaguagagauggugaa

SEQ ID NO: 2307558 - RNA, 19 nt, Homo sapiens
  misc_RNA (1)...(19): siRNA sense strand
uugagaaguuccauggaga

SEQ ID NO: 2307559 - RNA, 19 nt, Homo sapiens
  misc_RNA (1)...(19): siRNA sense strand
ccuacaaccaacaaggaga

SEQ ID NO: 2307560 - RNA, 19 nt, Homo sapiens
  misc_RNA (1)...(19): siRNA sense strand
agaaccagaaauugaggua

SEQ ID NO: 2307561 - RNA, 19 nt, Homo sapiens
  misc_RNA (1)...(19): siRNA sense strand
uugaagauuuagagaccga

SEQ ID NO: 2307562 - RNA, 19 nt, Homo sapiens
  misc_RNA (1)...(19): siRNA sense strand
gaagaauacuauaguggac

SEQ ID NO: 2307563 - RNA, 19 nt, Homo sapiens
  misc_RNA (1)...(19): siRNA sense strand
acuuggagcuagucuacaa

SEQ ID NO: 2307564 - RNA, 19 nt, Homo sapiens
  misc_RNA (1)...(19): siRNA sense strand
cuuuggaugacgaggauga

SEQ ID NO: 2307565 - RNA, 19 nt, Homo sapiens
  misc_RNA (1)...(19): siRNA sense strand
gauuaugggaugcuaucaa

SEQ ID NO: 2307566 - RNA, 19 nt, Homo sapiens
  misc_RNA (1)...(19): siRNA sense strand
caggaguuauuguugggaa

SEQ ID NO: 2307567 - RNA, 19 nt, Homo sapiens
  misc_RNA (1)...(19): siRNA sense strand
caacaugagaaugaagcaa

SEQ ID NO: 2307568 - RNA, 19 nt, Homo sapiens
  misc_RNA (1)...(19): siRNA sense strand
aaugagaccauguuggauu

SEQ ID NO: 2307569 - RNA, 19 nt, Homo sapiens
  misc_RNA (1)...(19): siRNA sense strand
gcuucguagugucaaacaa

SEQ ID NO: 2307570 - RNA, 19 nt, Homo sapiens
  misc_RNA (1)...(19): siRNA sense strand
ucagaugaugucuuagaaa

SEQ ID NO: 2307571 - RNA, 19 nt, Homo sapiens
  misc_RNA (1)...(19): siRNA sense strand
ggauauuggacaugguuug

SEQ ID NO: 2307572 - RNA, 19 nt, Homo sapiens
  misc_RNA (1)...(19): siRNA sense strand
uggaugacgaggaugaaga

SEQ ID NO: 2307573 - RNA, 19 nt, Homo sapiens
  misc_RNA (1)...(19): siRNA sense strand
aaagcuucguagugucaaa

SEQ ID NO: 2307574 - RNA, 19 nt, Homo sapiens
  misc_RNA (1)...(19): siRNA sense strand
auuuagagaccgaugacuu

SEQ ID NO: 2307575 - RNA, 19 nt, Homo sapiens
  misc_RNA (1)...(19): siRNA sense strand
aggaguuauuguugggaac

SEQ ID NO: 2307576 - RNA, 19 nt, Homo sapiens
  misc_RNA (1)...(19): siRNA sense strand
aacaugagaaugaagcaaa

SEQ ID NO: 2307577 - RNA, 19 nt, Homo sapiens
  misc_RNA (1)...(19): siRNA sense strand
ugagaaugaagcaaaguca

SEQ ID NO: 2307578 - RNA, 19 nt, Homo sapiens
  misc_RNA (1)...(19): siRNA sense strand
ccaggaugaccuacgagua

SEQ ID NO: 2307579 - RNA, 19 nt, Homo sapiens
  misc_RNA (1)...(19): siRNA sense strand
gaggcaucuucaggagaaa

SEQ ID NO: 2307580 - RNA, 19 nt, Homo sapiens
  misc_RNA (1)...(19): siRNA sense strand
acuaucagccuuuaagaau

SEQ ID NO: 2307581 - RNA, 19 nt, Homo sapiens
  misc_RNA (1)...(19): siRNA sense strand
cugagaauucacaggaguu

SEQ ID NO: 2307582 - RNA, 19 nt, Homo sapiens
  misc_RNA (1)...(19): siRNA sense strand
cuaaacgagaggcaaacaa

SEQ ID NO: 2307583 - RNA, 19 nt, Homo sapiens
  misc_RNA (1)...(19): siRNA sense strand
ucugauugcuggagguuuu

SEQ ID NO: 2307584 - RNA, 19 nt, Homo sapiens
  misc_RNA (1)...(19): siRNA sense strand
agaacaaucagauauggaa

SEQ ID NO: 2307585 - RNA, 19 nt, Homo sapiens
  misc_RNA (1)...(19): siRNA sense strand
aggagaaguugguagcaaa

SEQ ID NO: 2307586 - RNA, 19 nt, Homo sapiens
  misc_RNA (1)...(19): siRNA sense strand
uggcagaaagcuagauaaa

SEQ ID NO: 2307587 - RNA, 19 nt, Homo sapiens
  misc_RNA (1)...(19): siRNA sense strand
gagcagaacuguugcggau

SEQ ID NO: 2307588 - RNA, 19 nt, Homo sapiens
  misc_RNA (1)...(19): siRNA sense strand
gggaaagagagcagacgaa

SEQ ID NO: 2307589 - RNA, 19 nt, Homo sapiens
  misc_RNA (1)...(19): siRNA sense strand
aaaagaaaaugcugggaaa

SEQ ID NO: 2307590 - RNA, 19 nt, Homo sapiens
  misc_RNA (1)...(19): siRNA sense strand
aaauggaaguggaaagaau

SEQ ID NO: 2307591 - RNA, 19 nt, Homo sapiens
  misc_RNA (1)...(19): siRNA sense strand
gcaagggaggagagagcaa

SEQ ID NO: 2307592 - RNA, 19 nt, Homo sapiens
  misc_RNA (1)...(19): siRNA sense strand
aguuaagcauggaggucaa

SEQ ID NO: 2307593 - RNA, 19 nt, Homo sapiens
  misc_RNA (1)...(19): siRNA sense strand
gggagaagucacaagagaa

SEQ ID NO: 2307594 - RNA, 19 nt, Homo sapiens
  misc_RNA (1)...(19): siRNA sense strand
gcugcaaagaaguggaauu

SEQ ID NO: 2307595 - RNA, 19 nt, Homo sapiens
  misc_RNA (1)...(19): siRNA sense strand
ggaacuugggacuggauua

SEQ ID NO: 2307596 - RNA, 19 nt, Homo sapiens
  misc_RNA (1)...(19): siRNA sense strand
uguaaaagaaagaggagua

SEQ ID NO: 2307597 - RNA, 19 nt, Homo sapiens
  misc_RNA (1)...(19): siRNA sense strand
caggaaagaaguucagcaa

SEQ ID NO: 2307598 - RNA, 19 nt, Homo sapiens
  misc_RNA (1)...(19): siRNA sense strand
auuagaugguugucggaua

SEQ ID NO: 2307599 - RNA, 19 nt, Homo sapiens
  misc_RNA (1)...(19): siRNA sense strand
ggauaucagcgcagugcaa

SEQ ID NO: 2307600 - RNA, 19 nt, Homo sapiens
  misc_RNA (1)...(19): siRNA sense strand
gcuccgcacccuagagaaa

SEQ ID NO: 2307601 - RNA, 19 nt, Homo sapiens
  misc_RNA (1)...(19): siRNA sense strand
aagaauacuuuguucgcaa

SEQ ID NO: 2307602 - RNA, 19 nt, Homo sapiens
  misc_RNA (1)...(19): siRNA sense strand
cuaaaggaguucugacaca

SEQ ID NO: 2307603 - RNA, 19 nt, Homo sapiens
  misc_RNA (1)...(19): siRNA sense strand
ccuuauugcaggagaaguu

SEQ ID NO: 2307604 - RNA, 19 nt, Homo sapiens
  misc_RNA (1)...(19): siRNA sense strand
gaaagaacgugguggcucu

SEQ ID NO: 2307605 - RNA, 19 nt, Homo sapiens
  misc_RNA (1)...(19): siRNA sense strand
aagcaaagacuaugcccaa

SEQ ID NO: 2307606 - RNA, 19 nt, Homo sapiens
  misc_RNA (1)...(19): siRNA sense strand
gcagauuacagguggaguu

SEQ ID NO: 2307607 - RNA, 19 nt, Homo sapiens
  misc_RNA (1)...(19): siRNA sense strand
gaccagaagcaaagacuau

SEQ ID NO: 2307608 - RNA, 19 nt, Homo sapiens
  misc_RNA (1)...(19): siRNA sense strand
gggagauuaugaugaugaa

SEQ ID NO: 2307609 - RNA, 19 nt, Homo sapiens
  misc_RNA (1)...(19): siRNA sense strand
cuaaauaugaagcugcaaa

SEQ ID NO: 2307610 - RNA, 19 nt, Homo sapiens
  misc_RNA (1)...(19): siRNA sense strand
ggagauaaugucugcaaca

SEQ ID NO: 2307611 - RNA, 19 nt, Homo sapiens
  misc_RNA (1)...(19): siRNA sense strand
cagcaaugagauggagaaa

SEQ ID NO: 2307612 - RNA, 19 nt, Homo sapiens
  misc_RNA (1)...(19): siRNA sense strand
aguaagaagcagagugaac

SEQ ID NO: 2307613 - RNA, 19 nt, Homo sapiens
  misc_RNA (1)...(19): siRNA sense strand
gcaacgaagacuagcacuu

SEQ ID NO: 2307614 - RNA, 19 nt, Homo sapiens
  misc_RNA (1)...(19): siRNA sense strand
ggaucagucucgagaagca

SEQ ID NO: 2307615 - RNA, 19 nt, Homo sapiens
  misc_RNA (1)...(19): siRNA sense strand
ucucagaaguuauugucaa

SEQ ID NO: 2307616 - RNA, 19 nt, Homo sapiens
  misc_RNA (1)...(19): siRNA sense strand
uggaaucaauguacagcaa

SEQ ID NO: 2307617 - RNA, 19 nt, Homo sapiens
  misc_RNA (1)...(19): siRNA sense strand
gaguauacagagaccuuaa

SEQ ID NO: 2307618 - RNA, 19 nt, Homo sapiens
  misc_RNA (1)...(19): siRNA sense strand
gaacagaucauuugggaug

SEQ ID NO: 2307619 - RNA, 19 nt, Homo sapiens
  misc_RNA (1)...(19): siRNA sense strand
cugugauccuggaaacaua

SEQ ID NO: 2307620 - RNA, 19 nt, Homo sapiens
  misc_RNA (1)...(19): siRNA sense strand
gcagcaaugagauggagaa

SEQ ID NO: 2307621 - RNA, 19 nt, Homo sapiens
  misc_RNA (1)...(19): siRNA sense strand
ggucaauacaugggacaau

SEQ ID NO: 2307622 - RNA, 19 nt, Homo sapiens
  misc_RNA (1)...(19): siRNA sense strand
auacaugggacaauugaaa

SEQ ID NO: 2307623 - RNA, 19 nt, Homo sapiens
  misc_RNA (1)...(19): siRNA sense strand
cucagaaguuauugucaaa

SEQ ID NO: 2307624 - RNA, 19 nt, Homo sapiens
  misc_RNA (1)...(19): siRNA sense strand
ugaauaaacugaaaccaga

SEQ ID NO: 2307625 - RNA, 19 nt, Homo sapiens
  misc_RNA (1)...(19): siRNA sense strand
caucaaaauuccuguccaa

SEQ ID NO: 2307626 - RNA, 19 nt, Homo sapiens
  misc_RNA (1)...(19): siRNA sense strand
aaguagaguccuagaggca

SEQ ID NO: 2307627 - RNA, 19 nt, Homo sapiens
  misc_RNA (1)...(19): siRNA sense strand
caggagaaguugguagcaa

SEQ ID NO: 2307628 - RNA, 19 nt, Homo sapiens
  misc_RNA (1)...(19): siRNA sense strand
ccuuuagaggauuguguua

SEQ ID NO: 2307629 - RNA, 19 nt, Homo sapiens
  misc_RNA (1)...(19): siRNA sense strand
cugcaaagaaguggaauuu

SEQ ID NO: 2307630 - RNA, 19 nt, Homo sapiens
  misc_RNA (1)...(19): siRNA sense strand
guguaaacaucuuccugaa

SEQ ID NO: 2307631 - RNA, 19 nt, Homo sapiens
  misc_RNA (1)...(19): siRNA sense strand
guggauuggugauagaaaa

SEQ ID NO: 2307632 - RNA, 19 nt, Homo sapiens
  misc_RNA (1)...(19): siRNA sense strand
aaucaaacgaccuagagua

SEQ ID NO: 2307633 - RNA, 19 nt, Homo sapiens
  misc_RNA (1)...(19): siRNA sense strand
agauaaacugagaagacuu

SEQ ID NO: 2307634 - RNA, 19 nt, Homo sapiens
  misc_RNA (1)...(19): siRNA sense strand
ggcaaauagcucucgaaau

SEQ ID NO: 2307635 - RNA, 19 nt, Homo sapiens
  misc_RNA (1)...(19): siRNA sense strand
agugguauguguuaguaaa

SEQ ID NO: 2307636 - RNA, 19 nt, Homo sapiens
  misc_RNA (1)...(19): siRNA sense strand
gguggauuggugauagaaa

SEQ ID NO: 2307637 - RNA, 19 nt, Homo sapiens
  misc_RNA (1)...(19): siRNA sense strand
ugggagaagucacaagaga

SEQ ID NO: 2307638 - RNA, 19 nt, Homo sapiens
  misc_RNA (1)...(19): siRNA sense strand
cgagaaguauuuagccuca

SEQ ID NO: 2307639 - RNA, 19 nt, Homo sapiens
  misc_RNA (1)...(19): siRNA sense strand
ggagaaguugguagcaaaa

SEQ ID NO: 2307640 - RNA, 19 nt, Homo sapiens
  misc_RNA (1)...(19): siRNA sense strand
cuuuaacauuccuagcaaa

SEQ ID NO: 2307641 - RNA, 19 nt, Homo sapiens
  misc_RNA (1)...(19): siRNA sense strand
ucaguaagaagcagaguga

SEQ ID NO: 2307642 - RNA, 19 nt, Homo sapiens
  misc_RNA (1)...(19): siRNA sense strand
uggaaagaaugacucuaaa

SEQ ID NO: 2307643 - RNA, 19 nt, Homo sapiens
  misc_RNA (1)...(19): siRNA sense strand
ugggaugacccuacagcaa

SEQ ID NO: 2307644 - RNA, 19 nt, Homo sapiens
  misc_RNA (1)...(19): siRNA sense strand
gaacagaauacauugcuga

SEQ ID NO: 2307645 - RNA, 19 nt, Homo sapiens
  misc_RNA (1)...(19): siRNA sense strand
uaacaguggagguggaguu

SEQ ID NO: 2307646 - RNA, 19 nt, Homo sapiens
  misc_RNA (1)...(19): siRNA sense strand
uguuauugugggagauuau

SEQ ID NO: 2307647 - RNA, 19 nt, Homo sapiens
  misc_RNA (1)...(19): siRNA sense strand
gggagggagaagaaggaaa

SEQ ID NO: 2307648 - RNA, 19 nt, Homo sapiens
  misc_RNA (1)...(19): siRNA sense strand
gagaagaaggaaagaggca

SEQ ID NO: 2307649 - RNA, 19 nt, Homo sapiens
  misc_RNA (1)...(19): siRNA sense strand
cgagaaagacacugggacu

SEQ ID NO: 2307650 - RNA, 19 nt, Homo sapiens
  misc_RNA (1)...(19): siRNA sense strand
augagauauuuguggacua

SEQ ID NO: 2307651 - RNA, 19 nt, Homo sapiens
  misc_RNA (1)...(19): siRNA sense strand
aggacaaauuaaaggaagu

SEQ ID NO: 2307652 - RNA, 19 nt, Homo sapiens
  misc_RNA (1)...(19): siRNA sense strand
acaaugacugggagagaga

SEQ ID NO: 2307653 - RNA, 19 nt, Homo sapiens
  misc_RNA (1)...(19): siRNA sense strand
acaaaggugucauaggaga

SEQ ID NO: 2307654 - RNA, 19 nt, Homo sapiens
  misc_RNA (1)...(19): siRNA sense strand
cacugggacucgaggacaa

SEQ ID NO: 2307655 - RNA, 19 nt, Homo sapiens
  misc_RNA (1)...(19): siRNA sense strand
agacuaaacuugcagacca

SEQ ID NO: 2307656 - RNA, 19 nt, Homo sapiens
  misc_RNA (1)...(19): siRNA sense strand
caaaggugucauaggagau

SEQ ID NO: 2307657 - RNA, 19 nt, Homo sapiens
  misc_RNA (1)...(19): siRNA sense strand
ugaucaaagcuuaccgaga

SEQ ID NO: 2307658 - RNA, 19 nt, Homo sapiens
  misc_RNA (1)...(19): siRNA sense strand
gaagaaggaaagaggcaag

SEQ ID NO: 2307659 - RNA, 19 nt, Homo sapiens
  misc_RNA (1)...(19): siRNA sense strand
agucugggcaacugagauu

SEQ ID NO: 2307660 - RNA, 19 nt, Homo sapiens
  misc_RNA (1)...(19): siRNA sense strand
ugggagagagagagggacu

SEQ ID NO: 2307661 - RNA, 19 nt, Homo sapiens
  misc_RNA (1)...(19): siRNA sense strand
agaagaaggaaagaggcaa

SEQ ID NO: 2307662 - RNA, 19 nt, Homo sapiens
  misc_RNA (1)...(19): siRNA sense strand
gggagggagaagaaggaaa

SEQ ID NO: 2307663 - RNA, 19 nt, Homo sapiens
  misc_RNA (1)...(19): siRNA sense strand
gagaagaaggaaagaggca

SEQ ID NO: 2307664 - RNA, 19 nt, Homo sapiens
  misc_RNA (1)...(19): siRNA sense strand
cgagaaagacacugggacu

SEQ ID NO: 2307665 - RNA, 19 nt, Homo sapiens
  misc_RNA (1)...(19): siRNA sense strand
augagauauuuguggacua

SEQ ID NO: 2307666 - RNA, 19 nt, Homo sapiens
  misc_RNA (1)...(19): siRNA sense strand
aggacaaauuaaaggaagu

SEQ ID NO: 2307667 - RNA, 19 nt, Homo sapiens
  misc_RNA (1)...(19): siRNA sense strand
acaaugacugggagagaga

SEQ ID NO: 2307668 - RNA, 19 nt, Homo sapiens
  misc_RNA (1)...(19): siRNA sense strand
acaaaggugucauaggaga

SEQ ID NO: 2307669 - RNA, 19 nt, Homo sapiens
  misc_RNA (1)...(19): siRNA sense strand
cacugggacucgaggacaa

SEQ ID NO: 2307670 - RNA, 19 nt, Homo sapiens
  misc_RNA (1)...(19): siRNA sense strand
agacuaaacuugcagacca

SEQ ID NO: 2307671 - RNA, 19 nt, Homo sapiens
  misc_RNA (1)...(19): siRNA sense strand
caaaggugucauaggagau

SEQ ID NO: 2307672 - RNA, 19 nt, Homo sapiens
  misc_RNA (1)...(19): siRNA sense strand
ugaucaaagcuuaccgaga

SEQ ID NO: 2307673 - RNA, 19 nt, Homo sapiens
  misc_RNA (1)...(19): siRNA sense strand
gaagaaggaaagaggcaag

SEQ ID NO: 2307674 - RNA, 19 nt, Homo sapiens
  misc_RNA (1)...(19): siRNA sense strand
agucugggcaacugagauu

SEQ ID NO: 2307675 - RNA, 19 nt, Homo sapiens
  misc_RNA (1)...(19): siRNA sense strand
ugggagagagagagggacu

SEQ ID NO: 2307676 - RNA, 19 nt, Homo sapiens
  misc_RNA (1)...(19): siRNA sense strand
agaagaaggaaagaggcaa

SEQ ID NO: 2307677 - RNA, 19 nt, Homo sapiens
  misc_RNA (1)...(19): siRNA sense strand
gggagggagaagaaggaaa

SEQ ID NO: 2307678 - RNA, 19 nt, Homo sapiens
  misc_RNA (1)...(19): siRNA sense strand
gagaagaaggaaagaggca

SEQ ID NO: 2307679 - RNA, 19 nt, Homo sapiens
  misc_RNA (1)...(19): siRNA sense strand
cgagaaagacacugggacu

SEQ ID NO: 2307680 - RNA, 19 nt, Homo sapiens
  misc_RNA (1)...(19): siRNA sense strand
augagauauuuguggacua

SEQ ID NO: 2307681 - RNA, 19 nt, Homo sapiens
  misc_RNA (1)...(19): siRNA sense strand
aggacaaauuaaaggaagu

SEQ ID NO: 2307682 - RNA, 19 nt, Homo sapiens
  misc_RNA (1)...(19): siRNA sense strand
acaaugacugggagagaga

SEQ ID NO: 2307683 - RNA, 19 nt, Homo sapiens
  misc_RNA (1)...(19): siRNA sense strand
acaaaggugucauaggaga

SEQ ID NO: 2307684 - RNA, 19 nt, Homo sapiens
  misc_RNA (1)...(19): siRNA sense strand
cacugggacucgaggacaa

SEQ ID NO: 2307685 - RNA, 19 nt, Homo sapiens
  misc_RNA (1)...(19): siRNA sense strand
agacuaaacuugcagacca

SEQ ID NO: 2307686 - RNA, 19 nt, Homo sapiens
  misc_RNA (1)...(19): siRNA sense strand
caaaggugucauaggagau

SEQ ID NO: 2307687 - RNA, 19 nt, Homo sapiens
  misc_RNA (1)...(19): siRNA sense strand
ugaucaaagcuuaccgaga

SEQ ID NO: 2307688 - RNA, 19 nt, Homo sapiens
  misc_RNA (1)...(19): siRNA sense strand
gaagaaggaaagaggcaag

SEQ ID NO: 2307689 - RNA, 19 nt, Homo sapiens
  misc_RNA (1)...(19): siRNA sense strand
agucugggcaacugagauu

SEQ ID NO: 2307690 - RNA, 19 nt, Homo sapiens
  misc_RNA (1)...(19): siRNA sense strand
ugggagagagagagggacu

SEQ ID NO: 2307691 - RNA, 19 nt, Homo sapiens
  misc_RNA (1)...(19): siRNA sense strand
agaagaaggaaagaggcaa

SEQ ID NO: 2307692 - RNA, 19 nt, Homo sapiens
  misc_RNA (1)...(19): siRNA sense strand
gggagggagaagaaggaaa

SEQ ID NO: 2307693 - RNA, 19 nt, Homo sapiens
  misc_RNA (1)...(19): siRNA sense strand
gagaagaaggaaagaggca

SEQ ID NO: 2307694 - RNA, 19 nt, Homo sapiens
  misc_RNA (1)...(19): siRNA sense strand
cgagaaagacacugggacu

SEQ ID NO: 2307695 - RNA, 19 nt, Homo sapiens
  misc_RNA (1)...(19): siRNA sense strand
augagauauuuguggacua

SEQ ID NO: 2307696 - RNA, 19 nt, Homo sapiens
  misc_RNA (1)...(19): siRNA sense strand
aggacaaauuaaaggaagu

SEQ ID NO: 2307697 - RNA, 19 nt, Homo sapiens
  misc_RNA (1)...(19): siRNA sense strand
acaaugacugggagagaga

SEQ ID NO: 2307698 - RNA, 19 nt, Homo sapiens
  misc_RNA (1)...(19): siRNA sense strand
acaaaggugucauaggaga

SEQ ID NO: 2307699 - RNA, 19 nt, Homo sapiens
  misc_RNA (1)...(19): siRNA sense strand
cacugggacucgaggacaa

SEQ ID NO: 2307700 - RNA, 19 nt, Homo sapiens
  misc_RNA (1)...(19): siRNA sense strand
agacuaaacuugcagacca

SEQ ID NO: 2307701 - RNA, 19 nt, Homo sapiens
  misc_RNA (1)...(19): siRNA sense strand
caaaggugucauaggagau

SEQ ID NO: 2307702 - RNA, 19 nt, Homo sapiens
  misc_RNA (1)...(19): siRNA sense strand
ugaucaaagcuuaccgaga

SEQ ID NO: 2307703 - RNA, 19 nt, Homo sapiens
  misc_RNA (1)...(19): siRNA sense strand
gaagaaggaaagaggcaag

SEQ ID NO: 2307704 - RNA, 19 nt, Homo sapiens
  misc_RNA (1)...(19): siRNA sense strand
agucugggcaacugagauu

SEQ ID NO: 2307705 - RNA, 19 nt, Homo sapiens
  misc_RNA (1)...(19): siRNA sense strand
ugggagagagagagggacu

SEQ ID NO: 2307706 - RNA, 19 nt, Homo sapiens
  misc_RNA (1)...(19): siRNA sense strand
agaagaaggaaagaggcaa

SEQ ID NO: 2307707 - RNA, 19 nt, Homo sapiens
  misc_RNA (1)...(19): siRNA sense strand
gcugagaccauauggguga

SEQ ID NO: 2307708 - RNA, 19 nt, Homo sapiens
  misc_RNA (1)...(19): siRNA sense strand
gccugcuaguugugggcaa

SEQ ID NO: 2307709 - RNA, 19 nt, Homo sapiens
  misc_RNA (1)...(19): siRNA sense strand
ugaugggagucucaggcaa

SEQ ID NO: 2307710 - RNA, 19 nt, Homo sapiens
  misc_RNA (1)...(19): siRNA sense strand
ccauggacugggugaacuu

SEQ ID NO: 2307711 - RNA, 19 nt, Homo sapiens
  misc_RNA (1)...(19): siRNA sense strand
acggagaagcggaaggaaa

SEQ ID NO: 2307712 - RNA, 19 nt, Homo sapiens
  misc_RNA (1)...(19): siRNA sense strand
cggagaagcggaaggaaaa

SEQ ID NO: 2307713 - RNA, 19 nt, Homo sapiens
  misc_RNA (1)...(19): siRNA sense strand
cggccaugaacaagcacaa

SEQ ID NO: 2307714 - RNA, 19 nt, Homo sapiens
  misc_RNA (1)...(19): siRNA sense strand
agaugguaguagagaagca

SEQ ID NO: 2307715 - RNA, 19 nt, Homo sapiens
  misc_RNA (1)...(19): siRNA sense strand
guguuaguguccagggagu

SEQ ID NO: 2307716 - RNA, 19 nt, Homo sapiens
  misc_RNA (1)...(19): siRNA sense strand
cgaggacggagaagcggaa

SEQ ID NO: 2307717 - RNA, 19 nt, Homo sapiens
  misc_RNA (1)...(19): siRNA sense strand
ggaaagagcugaaggccac

SEQ ID NO: 2307718 - RNA, 19 nt, Homo sapiens
  misc_RNA (1)...(19): siRNA sense strand
uggaggaagcccagaggaa

SEQ ID NO: 2307719 - RNA, 19 nt, Homo sapiens
  misc_RNA (1)...(19): siRNA sense strand
aggcagaacaggagcggga

SEQ ID NO: 2307720 - RNA, 19 nt, Homo sapiens
  misc_RNA (1)...(19): siRNA sense strand
aggcugaggcugaggcaga

SEQ ID NO: 2307721 - RNA, 19 nt, Homo sapiens
  misc_RNA (1)...(19): siRNA sense strand
cagaggugagggagcguaa

SEQ ID NO: 2307722 - RNA, 19 nt, Homo sapiens
  misc_RNA (1)...(19): siRNA sense strand
ccaagaaacaaauggccau

SEQ ID NO: 2307723 - RNA, 19 nt, Homo sapiens
  misc_RNA (1)...(19): siRNA sense strand
uggaaagagcugaaggcca

SEQ ID NO: 2307724 - RNA, 19 nt, Homo sapiens
  misc_RNA (1)...(19): siRNA sense strand
gggagcacguagaggccau

SEQ ID NO: 2307725 - RNA, 19 nt, Homo sapiens
  misc_RNA (1)...(19): siRNA sense strand
aaacaaauggccauggaga

SEQ ID NO: 2307726 - RNA, 19 nt, Homo sapiens
  misc_RNA (1)...(19): siRNA sense strand
cccuagagguccuggcuga

SEQ ID NO: 2307727 - RNA, 19 nt, Homo sapiens
  misc_RNA (1)...(19): siRNA sense strand
aacaaauggccauggagaa

SEQ ID NO: 2307728 - RNA, 19 nt, Homo sapiens
  misc_RNA (1)...(19): siRNA sense strand
aggcugaggcagagaaucu

SEQ ID NO: 2307729 - RNA, 19 nt, Homo sapiens
  misc_RNA (1)...(19): siRNA sense strand
agcuaaggaacaauggaaa

SEQ ID NO: 2307730 - RNA, 19 nt, Homo sapiens
  misc_RNA (1)...(19): siRNA sense strand
ggagaaacgcagagcaguc

SEQ ID NO: 2307731 - RNA, 19 nt, Homo sapiens
  misc_RNA (1)...(19): siRNA sense strand
gcagaacaggagcgggaca

SEQ ID NO: 2307732 - RNA, 19 nt, Homo sapiens
  misc_RNA (1)...(19): siRNA sense strand
ugguggacucucagaagaa

SEQ ID NO: 2307733 - RNA, 19 nt, Homo sapiens
  misc_RNA (1)...(19): siRNA sense strand
uggcugagguggcaggcau

SEQ ID NO: 2307734 - RNA, 19 nt, Homo sapiens
  misc_RNA (1)...(19): siRNA sense strand
cuguaggccugcaggagga

SEQ ID NO: 2307735 - RNA, 19 nt, Homo sapiens
  misc_RNA (1)...(19): siRNA sense strand
cagaacaggagcgggacaa

SEQ ID NO: 2307736 - RNA, 19 nt, Homo sapiens
  misc_RNA (1)...(19): siRNA sense strand
ugguugaguuuguggugga

SEQ ID NO: 2307737 - RNA, 19 nt, Homo sapiens
  misc_RNA (1)...(19): siRNA sense strand
ggaaagagcugaaggccac

SEQ ID NO: 2307738 - RNA, 19 nt, Homo sapiens
  misc_RNA (1)...(19): siRNA sense strand
uggaggaagcccagaggaa

SEQ ID NO: 2307739 - RNA, 19 nt, Homo sapiens
  misc_RNA (1)...(19): siRNA sense strand
aggcagaacaggagcggga

SEQ ID NO: 2307740 - RNA, 19 nt, Homo sapiens
  misc_RNA (1)...(19): siRNA sense strand
aggcugaggcugaggcaga

SEQ ID NO: 2307741 - RNA, 19 nt, Homo sapiens
  misc_RNA (1)...(19): siRNA sense strand
cagaggugagggagcguaa

SEQ ID NO: 2307742 - RNA, 19 nt, Homo sapiens
  misc_RNA (1)...(19): siRNA sense strand
ccaagaaacaaauggccau

SEQ ID NO: 2307743 - RNA, 19 nt, Homo sapiens
  misc_RNA (1)...(19): siRNA sense strand
uggaaagagcugaaggcca

SEQ ID NO: 2307744 - RNA, 19 nt, Homo sapiens
  misc_RNA (1)...(19): siRNA sense strand
gggagcacguagaggccau

SEQ ID NO: 2307745 - RNA, 19 nt, Homo sapiens
  misc_RNA (1)...(19): siRNA sense strand
aaacaaauggccauggaga

SEQ ID NO: 2307746 - RNA, 19 nt, Homo sapiens
  misc_RNA (1)...(19): siRNA sense strand
cccuagagguccuggcuga

SEQ ID NO: 2307747 - RNA, 19 nt, Homo sapiens
  misc_RNA (1)...(19): siRNA sense strand
aacaaauggccauggagaa

SEQ ID NO: 2307748 - RNA, 19 nt, Homo sapiens
  misc_RNA (1)...(19): siRNA sense strand
aggcugaggcagagaaucu

SEQ ID NO: 2307749 - RNA, 19 nt, Homo sapiens
  misc_RNA (1)...(19): siRNA sense strand
agcuaaggaacaauggaaa

SEQ ID NO: 2307750 - RNA, 19 nt, Homo sapiens
  misc_RNA (1)...(19): siRNA sense strand
ggagaaacgcagagcaguc

SEQ ID NO: 2307751 - RNA, 19 nt, Homo sapiens
  misc_RNA (1)...(19): siRNA sense strand
gcagaacaggagcgggaca

SEQ ID NO: 2307752 - RNA, 19 nt, Homo sapiens
  misc_RNA (1)...(19): siRNA sense strand
ugguggacucucagaagaa

SEQ ID NO: 2307753 - RNA, 19 nt, Homo sapiens
  misc_RNA (1)...(19): siRNA sense strand
uggcugagguggcaggcau

SEQ ID NO: 2307754 - RNA, 19 nt, Homo sapiens
  misc_RNA (1)...(19): siRNA sense strand
cuguaggccugcaggagga

SEQ ID NO: 2307755 - RNA, 19 nt, Homo sapiens
  misc_RNA (1)...(19): siRNA sense strand
cagaacaggagcgggacaa

SEQ ID NO: 2307756 - RNA, 19 nt, Homo sapiens
  misc_RNA (1)...(19): siRNA sense strand
ugguugaguuuguggugga

SEQ ID NO: 2307757 - RNA, 19 nt, Homo sapiens
  misc_RNA (1)...(19): siRNA sense strand
guguaaugaaugugggaaa

SEQ ID NO: 2307758 - RNA, 19 nt, Homo sapiens
  misc_RNA (1)...(19): siRNA sense strand
guguaaagaauguggaaaa

SEQ ID NO: 2307759 - RNA, 19 nt, Homo sapiens
  misc_RNA (1)...(19): siRNA sense strand
auguaaugaaugugggaaa

SEQ ID NO: 2307760 - RNA, 19 nt, Homo sapiens
  misc_RNA (1)...(19): siRNA sense strand
auguaaugaaugugggaaa

SEQ ID NO: 2307761 - RNA, 19 nt, Homo sapiens
  misc_RNA (1)...(19): siRNA sense strand
gggaaaugaaacagaugaa

SEQ ID NO: 2307762 - RNA, 19 nt, Homo sapiens
  misc_RNA (1)...(19): siRNA sense strand
agaauucacacgagggaaa

SEQ ID NO: 2307763 - RNA, 19 nt, Homo sapiens
  misc_RNA (1)...(19): siRNA sense strand
ggccaaaaguggaaggaau

SEQ ID NO: 2307764 - RNA, 19 nt, Homo sapiens
  misc_RNA (1)...(19): siRNA sense strand
aggaagagaacccaagaaa

SEQ ID NO: 2307765 - RNA, 19 nt, Homo sapiens
  misc_RNA (1)...(19): siRNA sense strand
acuccauacacaagagaaa

SEQ ID NO: 2307766 - RNA, 19 nt, Homo sapiens
  misc_RNA (1)...(19): siRNA sense strand
ugugacaaguguaggaaau

SEQ ID NO: 2307767 - RNA, 19 nt, Homo sapiens
  misc_RNA (1)...(19): siRNA sense strand
aguccaagauugagauuca

SEQ ID NO: 2307768 - RNA, 19 nt, Homo sapiens
  misc_RNA (1)...(19): siRNA sense strand
gaugcacagcagagagaaa

SEQ ID NO: 2307769 - RNA, 19 nt, Homo sapiens
  misc_RNA (1)...(19): siRNA sense strand
ucauugagcauaagagaau

SEQ ID NO: 2307770 - RNA, 19 nt, Homo sapiens
  misc_RNA (1)...(19): siRNA sense strand
ccuugauggaccagcaaua

SEQ ID NO: 2307771 - RNA, 19 nt, Homo sapiens
  misc_RNA (1)...(19): siRNA sense strand
gaacgagacaagaagaaaa

SEQ ID NO: 2307772 - RNA, 19 nt, Homo sapiens
  misc_RNA (1)...(19): siRNA sense strand
cuuauaaaccaucggagaa

SEQ ID NO: 2307773 - RNA, 19 nt, Homo sapiens
  misc_RNA (1)...(19): siRNA sense strand
uaauagguacugaaggaaa

SEQ ID NO: 2307774 - RNA, 19 nt, Homo sapiens
  misc_RNA (1)...(19): siRNA sense strand
agaccaugaccgagaauga

SEQ ID NO: 2307775 - RNA, 19 nt, Homo sapiens
  misc_RNA (1)...(19): siRNA sense strand
aagaauucacaguggagaa

SEQ ID NO: 2307776 - RNA, 19 nt, Homo sapiens
  misc_RNA (1)...(19): siRNA sense strand
caagauugagauucagaaa

SEQ ID NO: 2307777 - RNA, 19 nt, Homo sapiens
  misc_RNA (1)...(19): siRNA sense strand
ccauaugaaugucgagagu

SEQ ID NO: 2307778 - RNA, 19 nt, Homo sapiens
  misc_RNA (1)...(19): siRNA sense strand
gugaacgagacaagaagaa

SEQ ID NO: 2307779 - RNA, 19 nt, Homo sapiens
  misc_RNA (1)...(19): siRNA sense strand
ugguagaggagcugcagaa

SEQ ID NO: 2307780 - RNA, 19 nt, Homo sapiens
  misc_RNA (1)...(19): siRNA sense strand
augcacugaaugugggaaa

SEQ ID NO: 2307781 - RNA, 19 nt, Homo sapiens
  misc_RNA (1)...(19): siRNA sense strand
augucgagagugugggaaa

SEQ ID NO: 2307782 - RNA, 19 nt, Homo sapiens
  misc_RNA (1)...(19): siRNA sense strand
ccuucaucuucaacagaaa

SEQ ID NO: 2307783 - RNA, 19 nt, Homo sapiens
  misc_RNA (1)...(19): siRNA sense strand
agaagagugugaauggcaa

SEQ ID NO: 2307784 - RNA, 19 nt, Homo sapiens
  misc_RNA (1)...(19): siRNA sense strand
auguaaggaauguggaaaa

SEQ ID NO: 2307785 - RNA, 19 nt, Homo sapiens
  misc_RNA (1)...(19): siRNA sense strand
cagagaguccacacagaaa

SEQ ID NO: 2307786 - RNA, 19 nt, Homo sapiens
  misc_RNA (1)...(19): siRNA sense strand
auaugaaugucgagagugu

SEQ ID NO: 2307787 - RNA, 19 nt, Homo sapiens
  misc_RNA (1)...(19): siRNA sense strand
gcguguagugaguguggaa

SEQ ID NO: 2307788 - RNA, 19 nt, Homo sapiens
  misc_RNA (1)...(19): siRNA sense strand
gggaaggcuuucaguuaca

SEQ ID NO: 2307789 - RNA, 19 nt, Homo sapiens
  misc_RNA (1)...(19): siRNA sense strand
gugugaugaguguggcaaa

SEQ ID NO: 2307790 - RNA, 19 nt, Homo sapiens
  misc_RNA (1)...(19): siRNA sense strand
gggaagauuuucaguucua

SEQ ID NO: 2307791 - RNA, 19 nt, Homo sapiens
  misc_RNA (1)...(19): siRNA sense strand
auguaaagauugugguaag

SEQ ID NO: 2307792 - RNA, 19 nt, Homo sapiens
  misc_RNA (1)...(19): siRNA sense strand
gauccauacuggugagaag

SEQ ID NO: 2307793 - RNA, 19 nt, Homo sapiens
  misc_RNA (1)...(19): siRNA sense strand
gcucaaaccuuauagccca

SEQ ID NO: 2307794 - RNA, 19 nt, Homo sapiens
  misc_RNA (1)...(19): siRNA sense strand
guguagugaguguggaaaa

SEQ ID NO: 2307795 - RNA, 19 nt, Homo sapiens
  misc_RNA (1)...(19): siRNA sense strand
agaugaaagggcagauaca

SEQ ID NO: 2307796 - RNA, 19 nt, Homo sapiens
  misc_RNA (1)...(19): siRNA sense strand
aggccuaauuauacaucua

SEQ ID NO: 2307797 - RNA, 19 nt, Homo sapiens
  misc_RNA (1)...(19): siRNA sense strand
ggguguaaugauuguagua

SEQ ID NO: 2307798 - RNA, 19 nt, Homo sapiens
  misc_RNA (1)...(19): siRNA sense strand
gagaaaauguagcccacaa

SEQ ID NO: 2307799 - RNA, 19 nt, Homo sapiens
  misc_RNA (1)...(19): siRNA sense strand
gccaaaaguggaaggaauu

SEQ ID NO: 2307800 - RNA, 19 nt, Homo sapiens
  misc_RNA (1)...(19): siRNA sense strand
guacugaaggaaagaaguu

SEQ ID NO: 2307801 - RNA, 19 nt, Homo sapiens
  misc_RNA (1)...(19): siRNA sense strand
ccaccuacacuuuagacaa

SEQ ID NO: 2307802 - RNA, 19 nt, Homo sapiens
  misc_RNA (1)...(19): siRNA sense strand
ccucauuggacaucagaga

SEQ ID NO: 2307803 - RNA, 19 nt, Homo sapiens
  misc_RNA (1)...(19): siRNA sense strand
aauccauaccauugaggaa

SEQ ID NO: 2307804 - RNA, 19 nt, Homo sapiens
  misc_RNA (1)...(19): siRNA sense strand
gagcauaagagaauccaca

SEQ ID NO: 2307805 - RNA, 19 nt, Homo sapiens
  misc_RNA (1)...(19): siRNA sense strand
gguccuugauuuugaagaa

SEQ ID NO: 2307806 - RNA, 19 nt, Homo sapiens
  misc_RNA (1)...(19): siRNA sense strand
auguaaugaguguggaaaa

SEQ ID NO: 2307807 - RNA, 19 nt, Homo sapiens
  misc_RNA (1)...(19): siRNA sense strand
ccuuacaaaugcacugaau

SEQ ID NO: 2307808 - RNA, 19 nt, Homo sapiens
  misc_RNA (1)...(19): siRNA sense strand
gauacagugaagaaaguuu

SEQ ID NO: 2307809 - RNA, 19 nt, Homo sapiens
  misc_RNA (1)...(19): siRNA sense strand
ucauuggacaucagagaau

SEQ ID NO: 2307810 - RNA, 19 nt, Homo sapiens
  misc_RNA (1)...(19): siRNA sense strand
cccuauggguguaaugauu

SEQ ID NO: 2307811 - RNA, 19 nt, Homo sapiens
  misc_RNA (1)...(19): siRNA sense strand
ucuuauaaaccaucggaga

SEQ ID NO: 2307812 - RNA, 19 nt, Homo sapiens
  misc_RNA (1)...(19): siRNA sense strand
gaacagaaaccguugccaa

SEQ ID NO: 2307813 - RNA, 19 nt, Homo sapiens
  misc_RNA (1)...(19): siRNA sense strand
ugcccaagucugaggguua

SEQ ID NO: 2307814 - RNA, 19 nt, Homo sapiens
  misc_RNA (1)...(19): siRNA sense strand
gcagaagugucuugcccua

SEQ ID NO: 2307815 - RNA, 19 nt, Homo sapiens
  misc_RNA (1)...(19): siRNA sense strand
augaugagaccuuggcaaa

SEQ ID NO: 2307816 - RNA, 19 nt, Homo sapiens
  misc_RNA (1)...(19): siRNA sense strand
cuggaaucaaacagauaaa

SEQ ID NO: 2307817 - RNA, 19 nt, Homo sapiens
  misc_RNA (1)...(19): siRNA sense strand
uccaagaagcaaagggaca

SEQ ID NO: 2307818 - RNA, 19 nt, Homo sapiens
  misc_RNA (1)...(19): siRNA sense strand
gugaaggcugcaagggauu

SEQ ID NO: 2307819 - RNA, 19 nt, Homo sapiens
  misc_RNA (1)...(19): siRNA sense strand
cuguucuguuugaaggaaa

SEQ ID NO: 2307820 - RNA, 19 nt, Homo sapiens
  misc_RNA (1)...(19): siRNA sense strand
gaggaaugcaaauguucaa

SEQ ID NO: 2307821 - RNA, 19 nt, Homo sapiens
  misc_RNA (1)...(19): siRNA sense strand
ccuucaacccauuaaacaa

SEQ ID NO: 2307822 - RNA, 19 nt, Homo sapiens
  misc_RNA (1)...(19): siRNA sense strand
cguuauacaaggagcucuu

SEQ ID NO: 2307823 - RNA, 19 nt, Homo sapiens
  misc_RNA (1)...(19): siRNA sense strand
gaguuugcaaagcggauaa

SEQ ID NO: 2307824 - RNA, 19 nt, Homo sapiens
  misc_RNA (1)...(19): siRNA sense strand
aggaaaauauggaggaaug

SEQ ID NO: 2307825 - RNA, 19 nt, Homo sapiens
  misc_RNA (1)...(19): siRNA sense strand
caaagcaaguccagggaag

SEQ ID NO: 2307826 - RNA, 19 nt, Homo sapiens
  misc_RNA (1)...(19): siRNA sense strand
gacuggaaucaaacagaua

SEQ ID NO: 2307827 - RNA, 19 nt, Homo sapiens
  misc_RNA (1)...(19): siRNA sense strand
gaugaugagaccuuggcaa

SEQ ID NO: 2307828 - RNA, 19 nt, Homo sapiens
  misc_RNA (1)...(19): siRNA sense strand
cgauaaguccucugggauc

SEQ ID NO: 2307829 - RNA, 19 nt, Homo sapiens
  misc_RNA (1)...(19): siRNA sense strand
ugugaaggcugcaagggau

SEQ ID NO: 2307830 - RNA, 19 nt, Homo sapiens
  misc_RNA (1)...(19): siRNA sense strand
uugacagaacgaacagaaa

SEQ ID NO: 2307831 - RNA, 19 nt, Homo sapiens
  misc_RNA (1)...(19): siRNA sense strand
ggggagaagcugcagguau

SEQ ID NO: 2307832 - RNA, 19 nt, Homo sapiens
  misc_RNA (1)...(19): siRNA sense strand
cgaccgaauugcacagaac

SEQ ID NO: 2307833 - RNA, 19 nt, Homo sapiens
  misc_RNA (1)...(19): siRNA sense strand
gcgauaaguccucugggau

SEQ ID NO: 2307834 - RNA, 19 nt, Homo sapiens
  misc_RNA (1)...(19): siRNA sense strand
aggaggagccagcagaaca

SEQ ID NO: 2307835 - RNA, 19 nt, Homo sapiens
  misc_RNA (1)...(19): siRNA sense strand
ugaagugauaccaugcaaa

SEQ ID NO: 2307836 - RNA, 19 nt, Homo sapiens
  misc_RNA (1)...(19): siRNA sense strand
gcuucuuauuccugcccaa

SEQ ID NO: 2307837 - RNA, 19 nt, Homo sapiens
  misc_RNA (1)...(19): siRNA sense strand
ccuauagcucuuucaacaa

SEQ ID NO: 2307838 - RNA, 19 nt, Homo sapiens
  misc_RNA (1)...(19): siRNA sense strand
agaccuuggcaaaguuaau

SEQ ID NO: 2307839 - RNA, 19 nt, Homo sapiens
  misc_RNA (1)...(19): siRNA sense strand
caaaauacuucaaagggaa

SEQ ID NO: 2307840 - RNA, 19 nt, Homo sapiens
  misc_RNA (1)...(19): siRNA sense strand
ccaaauaugacgugcgugu

SEQ ID NO: 2307841 - RNA, 19 nt, Homo sapiens
  misc_RNA (1)...(19): siRNA sense strand
gggcagaacuacaaggccu

SEQ ID NO: 2307842 - RNA, 19 nt, Homo sapiens
  misc_RNA (1)...(19): siRNA sense strand
gcaaaauacuucaaaggga

SEQ ID NO: 2307843 - RNA, 19 nt, Homo sapiens
  misc_RNA (1)...(19): siRNA sense strand
cagcaugacuuccaggaca

SEQ ID NO: 2307844 - RNA, 19 nt, Homo sapiens
  misc_RNA (1)...(19): siRNA sense strand
guggauucucuguggauau

SEQ ID NO: 2307845 - RNA, 19 nt, Homo sapiens
  misc_RNA (1)...(19): siRNA sense strand
uggaagcgcuacauggcaa

SEQ ID NO: 2307846 - RNA, 19 nt, Homo sapiens
  misc_RNA (1)...(19): siRNA sense strand
uggcaaggacggaagggau

SEQ ID NO: 2307847 - RNA, 19 nt, Homo sapiens
  misc_RNA (1)...(19): siRNA sense strand
gguucgacugcauaagaaa

SEQ ID NO: 2307848 - RNA, 19 nt, Homo sapiens
  misc_RNA (1)...(19): siRNA sense strand
ucauugaggugguggguuc

SEQ ID NO: 2307849 - RNA, 19 nt, Homo sapiens
  misc_RNA (1)...(19): siRNA sense strand
agaagauugggcagaacua

SEQ ID NO: 2307850 - RNA, 19 nt, Homo sapiens
  misc_RNA (1)...(19): siRNA sense strand
aaguagaacaggccgaauu

SEQ ID NO: 2307851 - RNA, 19 nt, Homo sapiens
  misc_RNA (1)...(19): siRNA sense strand
ggacgucagugucagggaa

SEQ ID NO: 2307852 - RNA, 19 nt, Homo sapiens
  misc_RNA (1)...(19): siRNA sense strand
acagcaacuuuauggccaa

SEQ ID NO: 2307853 - RNA, 19 nt, Homo sapiens
  misc_RNA (1)...(19): siRNA sense strand
ggcagaacuacaaggccua

SEQ ID NO: 2307854 - RNA, 19 nt, Homo sapiens
  misc_RNA (1)...(19): siRNA sense strand
gugucagggaacuggaaga

SEQ ID NO: 2307855 - RNA, 19 nt, Homo sapiens
  misc_RNA (1)...(19): siRNA sense strand
ccgaauucucugaucucaa

SEQ ID NO: 2307856 - RNA, 19 nt, Homo sapiens
  misc_RNA (1)...(19): siRNA sense strand
ucagggaacuggaagacca

SEQ ID NO: 2307857 - RNA, 19 nt, Homo sapiens
  misc_RNA (1)...(19): siRNA sense strand
caaaauacuucaaagggaa

SEQ ID NO: 2307858 - RNA, 19 nt, Homo sapiens
  misc_RNA (1)...(19): siRNA sense strand
ccaaauaugacgugcgugu

SEQ ID NO: 2307859 - RNA, 19 nt, Homo sapiens
  misc_RNA (1)...(19): siRNA sense strand
gggcagaacuacaaggccu

SEQ ID NO: 2307860 - RNA, 19 nt, Homo sapiens
  misc_RNA (1)...(19): siRNA sense strand
gcaaaauacuucaaaggga

SEQ ID NO: 2307861 - RNA, 19 nt, Homo sapiens
  misc_RNA (1)...(19): siRNA sense strand
cagcaugacuuccaggaca

SEQ ID NO: 2307862 - RNA, 19 nt, Homo sapiens
  misc_RNA (1)...(19): siRNA sense strand
guggauucucuguggauau

SEQ ID NO: 2307863 - RNA, 19 nt, Homo sapiens
  misc_RNA (1)...(19): siRNA sense strand
uggaagcgcuacauggcaa

SEQ ID NO: 2307864 - RNA, 19 nt, Homo sapiens
  misc_RNA (1)...(19): siRNA sense strand
uggcaaggacggaagggau

SEQ ID NO: 2307865 - RNA, 19 nt, Homo sapiens
  misc_RNA (1)...(19): siRNA sense strand
gguucgacugcauaagaaa

SEQ ID NO: 2307866 - RNA, 19 nt, Homo sapiens
  misc_RNA (1)...(19): siRNA sense strand
ucauugaggugguggguuc

SEQ ID NO: 2307867 - RNA, 19 nt, Homo sapiens
  misc_RNA (1)...(19): siRNA sense strand
agaagauugggcagaacua

SEQ ID NO: 2307868 - RNA, 19 nt, Homo sapiens
  misc_RNA (1)...(19): siRNA sense strand
aaguagaacaggccgaauu

SEQ ID NO: 2307869 - RNA, 19 nt, Homo sapiens
  misc_RNA (1)...(19): siRNA sense strand
ggacgucagugucagggaa

SEQ ID NO: 2307870 - RNA, 19 nt, Homo sapiens
  misc_RNA (1)...(19): siRNA sense strand
acagcaacuuuauggccaa

SEQ ID NO: 2307871 - RNA, 19 nt, Homo sapiens
  misc_RNA (1)...(19): siRNA sense strand
ggcagaacuacaaggccua

SEQ ID NO: 2307872 - RNA, 19 nt, Homo sapiens
  misc_RNA (1)...(19): siRNA sense strand
gugucagggaacuggaaga

SEQ ID NO: 2307873 - RNA, 19 nt, Homo sapiens
  misc_RNA (1)...(19): siRNA sense strand
ccgaauucucugaucucaa

SEQ ID NO: 2307874 - RNA, 19 nt, Homo sapiens
  misc_RNA (1)...(19): siRNA sense strand
ucagggaacuggaagacca

SEQ ID NO: 2307875 - RNA, 19 nt, Homo sapiens
  misc_RNA (1)...(19): siRNA sense strand
cagcaaagaaggagcacaa

SEQ ID NO: 2307876 - RNA, 19 nt, Homo sapiens
  misc_RNA (1)...(19): siRNA sense strand
cagaagaaccagaaggaga

SEQ ID NO: 2307877 - RNA, 19 nt, Homo sapiens
  misc_RNA (1)...(19): siRNA sense strand
aaauagaagccuugaaaga

SEQ ID NO: 2307878 - RNA, 19 nt, Homo sapiens
  misc_RNA (1)...(19): siRNA sense strand
acacaauggagcugguaaa

SEQ ID NO: 2307879 - RNA, 19 nt, Homo sapiens
  misc_RNA (1)...(19): siRNA sense strand
gggagaaguacaagcggaa

SEQ ID NO: 2307880 - RNA, 19 nt, Homo sapiens
  misc_RNA (1)...(19): siRNA sense strand
ccucauagucaucaaguaa

SEQ ID NO: 2307881 - RNA, 19 nt, Homo sapiens
  misc_RNA (1)...(19): siRNA sense strand
aggugaaguuuuaggauua

SEQ ID NO: 2307882 - RNA, 19 nt, Homo sapiens
  misc_RNA (1)...(19): siRNA sense strand
cuuaacaagaugagaaaga

SEQ ID NO: 2307883 - RNA, 19 nt, Homo sapiens
  misc_RNA (1)...(19): siRNA sense strand
ccucagacucuuugcuaaa

SEQ ID NO: 2307884 - RNA, 19 nt, Homo sapiens
  misc_RNA (1)...(19): siRNA sense strand
ugaccuaggaauugagaau

SEQ ID NO: 2307885 - RNA, 19 nt, Homo sapiens
  misc_RNA (1)...(19): siRNA sense strand
gaagauguucagauggaaa

SEQ ID NO: 2307886 - RNA, 19 nt, Homo sapiens
  misc_RNA (1)...(19): siRNA sense strand
cuuuagaaguggaugcauu

SEQ ID NO: 2307887 - RNA, 19 nt, Homo sapiens
  misc_RNA (1)...(19): siRNA sense strand
agccaaaagcgaaggaaaa

SEQ ID NO: 2307888 - RNA, 19 nt, Homo sapiens
  misc_RNA (1)...(19): siRNA sense strand
gcaaauuauccugaagaaa

SEQ ID NO: 2307889 - RNA, 19 nt, Homo sapiens
  misc_RNA (1)...(19): siRNA sense strand
cugaagaaauaguaagagu

SEQ ID NO: 2307890 - RNA, 19 nt, Homo sapiens
  misc_RNA (1)...(19): siRNA sense strand
auggaaguuuggaaagaaa

SEQ ID NO: 2307891 - RNA, 19 nt, Homo sapiens
  misc_RNA (1)...(19): siRNA sense strand
gagaaguacaagcggaaaa

SEQ ID NO: 2307892 - RNA, 19 nt, Homo sapiens
  misc_RNA (1)...(19): siRNA sense strand
uggaauggaaguuuggaaa

SEQ ID NO: 2307893 - RNA, 19 nt, Homo sapiens
  misc_RNA (1)...(19): siRNA sense strand
gugaaagggcugaggaaag

SEQ ID NO: 2307894 - RNA, 19 nt, Homo sapiens
  misc_RNA (1)...(19): siRNA sense strand
aggccaaaucacugcaaua

SEQ ID NO: 2307895 - RNA, 19 nt, Homo sapiens
  misc_RNA (1)...(19): siRNA sense strand
guuaaugucacaagagaga

SEQ ID NO: 2307896 - RNA, 19 nt, Homo sapiens
  misc_RNA (1)...(19): siRNA sense strand
ccgugaaagggcugaggaa

SEQ ID NO: 2307897 - RNA, 19 nt, Homo sapiens
  misc_RNA (1)...(19): siRNA sense strand
agaccuugucagagggaau

SEQ ID NO: 2307898 - RNA, 19 nt, Homo sapiens
  misc_RNA (1)...(19): siRNA sense strand
cugaaaggcuuguugagau

SEQ ID NO: 2307899 - RNA, 19 nt, Homo sapiens
  misc_RNA (1)...(19): siRNA sense strand
auaagauagccacgagaaa

SEQ ID NO: 2307900 - RNA, 19 nt, Homo sapiens
  misc_RNA (1)...(19): siRNA sense strand
aggaaagccugauaaaaua

SEQ ID NO: 2307901 - RNA, 19 nt, Homo sapiens
  misc_RNA (1)...(19): siRNA sense strand
cagaaggagaggaugaaga

SEQ ID NO: 2307902 - RNA, 19 nt, Homo sapiens
  misc_RNA (1)...(19): siRNA sense strand
uaaugagcaucuugguaaa

SEQ ID NO: 2307903 - RNA, 19 nt, Homo sapiens
  misc_RNA (1)...(19): siRNA sense strand
guucagauggaaagaguga

SEQ ID NO: 2307904 - RNA, 19 nt, Homo sapiens
  misc_RNA (1)...(19): siRNA sense strand
ccuugaaagaucugguauu

SEQ ID NO: 2307905 - RNA, 19 nt, Homo sapiens
  misc_RNA (1)...(19): siRNA sense strand
cgugaaagggcugaggaaa

SEQ ID NO: 2307906 - RNA, 19 nt, Homo sapiens
  misc_RNA (1)...(19): siRNA sense strand
ucacuuaacaagaugagaa

SEQ ID NO: 2307907 - RNA, 19 nt, Homo sapiens
  misc_RNA (1)...(19): siRNA sense strand
gcaaggaguaugcagggaa

SEQ ID NO: 2307908 - RNA, 19 nt, Homo sapiens
  misc_RNA (1)...(19): siRNA sense strand
augaaggccuugaugacaa

SEQ ID NO: 2307909 - RNA, 19 nt, Homo sapiens
  misc_RNA (1)...(19): siRNA sense strand
uuucaaacuucgaagacau

SEQ ID NO: 2307910 - RNA, 19 nt, Homo sapiens
  misc_RNA (1)...(19): siRNA sense strand
gugucaaaauccagaagaa

SEQ ID NO: 2307911 - RNA, 19 nt, Homo sapiens
  misc_RNA (1)...(19): siRNA sense strand
uggagaugaaggugaagaa

SEQ ID NO: 2307912 - RNA, 19 nt, Homo sapiens
  misc_RNA (1)...(19): siRNA sense strand
gagaaagaucagugugugu

SEQ ID NO: 2307913 - RNA, 19 nt, Homo sapiens
  misc_RNA (1)...(19): siRNA sense strand
cacuuaacaagaugagaaa

SEQ ID NO: 2307914 - RNA, 19 nt, Homo sapiens
  misc_RNA (1)...(19): siRNA sense strand
uggucaaucaggaguuaua

SEQ ID NO: 2307915 - RNA, 19 nt, Homo sapiens
  misc_RNA (1)...(19): siRNA sense strand
cagaaauggcugaccuaga

SEQ ID NO: 2307916 - RNA, 19 nt, Homo sapiens
  misc_RNA (1)...(19): siRNA sense strand
cagccaaaagcgaaggaaa

SEQ ID NO: 2307917 - RNA, 19 nt, Homo sapiens
  misc_RNA (1)...(19): siRNA sense strand
uggagaauggacaggacaa

SEQ ID NO: 2307918 - RNA, 19 nt, Homo sapiens
  misc_RNA (1)...(19): siRNA sense strand
ggaaagagugagaacagca

SEQ ID NO: 2307919 - RNA, 19 nt, Homo sapiens
  misc_RNA (1)...(19): siRNA sense strand
gggacugccagaugaggaa

SEQ ID NO: 2307920 - RNA, 19 nt, Homo sapiens
  misc_RNA (1)...(19): siRNA sense strand
gggaaagaagccaucagaa

SEQ ID NO: 2307921 - RNA, 19 nt, Homo sapiens
  misc_RNA (1)...(19): siRNA sense strand
uaacaagaugagaaagaca

SEQ ID NO: 2307922 - RNA, 19 nt, Homo sapiens
  misc_RNA (1)...(19): siRNA sense strand
agacaugcuacuuacaaua

SEQ ID NO: 2307923 - RNA, 19 nt, Homo sapiens
  misc_RNA (1)...(19): siRNA sense strand
aggcugaggccguguguga

SEQ ID NO: 2307924 - RNA, 19 nt, Homo sapiens
  misc_RNA (1)...(19): siRNA sense strand
agaaggagcacaaggacca

SEQ ID NO: 2307925 - RNA, 19 nt, Homo sapiens
  misc_RNA (1)...(19): siRNA sense strand
gaucagugugugucaacaa

SEQ ID NO: 2307926 - RNA, 19 nt, Homo sapiens
  misc_RNA (1)...(19): siRNA sense strand
gaaagagugagaacagcaa

SEQ ID NO: 2307927 - RNA, 19 nt, Homo sapiens
  misc_RNA (1)...(19): siRNA sense strand
aggaagaauaagauagcca

SEQ ID NO: 2307928 - RNA, 19 nt, Homo sapiens
  misc_RNA (1)...(19): siRNA sense strand
agcaaauuauccugaagaa

SEQ ID NO: 2307929 - RNA, 19 nt, Homo sapiens
  misc_RNA (1)...(19): siRNA sense strand
agagaguccuuaauggaau

SEQ ID NO: 2307930 - RNA, 19 nt, Homo sapiens
  misc_RNA (1)...(19): siRNA sense strand
caucagaaucagaaauguu

SEQ ID NO: 2307931 - RNA, 19 nt, Homo sapiens
  misc_RNA (1)...(19): siRNA sense strand
uggacaagugcuacugaaa

SEQ ID NO: 2307932 - RNA, 19 nt, Homo sapiens
  misc_RNA (1)...(19): siRNA sense strand
gguuaguggaugcgcucaa

SEQ ID NO: 2307933 - RNA, 19 nt, Homo sapiens
  misc_RNA (1)...(19): siRNA sense strand
auaaguugccaguggaaga

SEQ ID NO: 2307934 - RNA, 19 nt, Homo sapiens
  misc_RNA (1)...(19): siRNA sense strand
gauuauaagaacagagcuc

SEQ ID NO: 2307935 - RNA, 19 nt, Homo sapiens
  misc_RNA (1)...(19): siRNA sense strand
aaggaaagccugauaaaau

SEQ ID NO: 2307936 - RNA, 19 nt, Homo sapiens
  misc_RNA (1)...(19): siRNA sense strand
cgacagcaaaucugcgcaa

SEQ ID NO: 2307937 - RNA, 19 nt, Homo sapiens
  misc_RNA (1)...(19): siRNA sense strand
aaccagaaggagaggauga

SEQ ID NO: 2307938 - RNA, 19 nt, Homo sapiens
  misc_RNA (1)...(19): siRNA sense strand
cagagaagaaugaggccaa

SEQ ID NO: 2307939 - RNA, 19 nt, Homo sapiens
  misc_RNA (1)...(19): siRNA sense strand
cagaaaaggacaugaagaa

SEQ ID NO: 2307940 - RNA, 19 nt, Homo sapiens
  misc_RNA (1)...(19): siRNA sense strand
agaaggaagaaaugaggaa

SEQ ID NO: 2307941 - RNA, 19 nt, Homo sapiens
  misc_RNA (1)...(19): siRNA sense strand
cagagagggucgugagcga

SEQ ID NO: 2307942 - RNA, 19 nt, Homo sapiens
  misc_RNA (1)...(19): siRNA sense strand
agaucaaggagaaggaaga

SEQ ID NO: 2307943 - RNA, 19 nt, Homo sapiens
  misc_RNA (1)...(19): siRNA sense strand
gguuggaagaagaacuaaa

SEQ ID NO: 2307944 - RNA, 19 nt, Homo sapiens
  misc_RNA (1)...(19): siRNA sense strand
gaagaaagcugcugcucga

SEQ ID NO: 2307945 - RNA, 19 nt, Homo sapiens
  misc_RNA (1)...(19): siRNA sense strand
aaggaagaaaugaggaaga

SEQ ID NO: 2307946 - RNA, 19 nt, Homo sapiens
  misc_RNA (1)...(19): siRNA sense strand
aguacaugaugaagugcua

SEQ ID NO: 2307947 - RNA, 19 nt, Homo sapiens
  misc_RNA (1)...(19): siRNA sense strand
aaguagauuugcugaccaa

SEQ ID NO: 2307948 - RNA, 19 nt, Homo sapiens
  misc_RNA (1)...(19): siRNA sense strand
agaaagaggcagagcggcu

SEQ ID NO: 2307949 - RNA, 19 nt, Homo sapiens
  misc_RNA (1)...(19): siRNA sense strand
gcacaggaaauuugggucu

SEQ ID NO: 2307950 - RNA, 19 nt, Homo sapiens
  misc_RNA (1)...(19): siRNA sense strand
gaggaagaucauugggcga

SEQ ID NO: 2307951 - RNA, 19 nt, Homo sapiens
  misc_RNA (1)...(19): siRNA sense strand
ccaagaagaaggcagccaa

SEQ ID NO: 2307952 - RNA, 19 nt, Homo sapiens
  misc_RNA (1)...(19): siRNA sense strand
uggaauugaccuugacaca

SEQ ID NO: 2307953 - RNA, 19 nt, Homo sapiens
  misc_RNA (1)...(19): siRNA sense strand
uggaggagaaccagaugaa

SEQ ID NO: 2307954 - RNA, 19 nt, Homo sapiens
  misc_RNA (1)...(19): siRNA sense strand
ugugagaagcagacaauca

SEQ ID NO: 2307955 - RNA, 19 nt, Homo sapiens
  misc_RNA (1)...(19): siRNA sense strand
agugcuacccagagaucaa

SEQ ID NO: 2307956 - RNA, 19 nt, Homo sapiens
  misc_RNA (1)...(19): siRNA sense strand
aaacaacaggugagcccaa

SEQ ID NO: 2307957 - RNA, 19 nt, Homo sapiens
  misc_RNA (1)...(19): siRNA sense strand
cacagguggcagagaagaa

SEQ ID NO: 2307958 - RNA, 19 nt, Homo sapiens
  misc_RNA (1)...(19): siRNA sense strand
ggucgugagcgauaagaca

SEQ ID NO: 2307959 - RNA, 19 nt, Homo sapiens
  misc_RNA (1)...(19): siRNA sense strand
augucaagauagggcguua

SEQ ID NO: 2307960 - RNA, 19 nt, Homo sapiens
  misc_RNA (1)...(19): siRNA sense strand
gguuuaaauggaauuggaa

SEQ ID NO: 2307961 - RNA, 19 nt, Homo sapiens
  misc_RNA (1)...(19): siRNA sense strand
gugguuggaagaagaacua

SEQ ID NO: 2307962 - RNA, 19 nt, Homo sapiens
  misc_RNA (1)...(19): siRNA sense strand
aggagaagacgcuacagaa

SEQ ID NO: 2307963 - RNA, 19 nt, Homo sapiens
  misc_RNA (1)...(19): siRNA sense strand
ggaauuaaacucaggccgu

SEQ ID NO: 2307964 - RNA, 19 nt, Homo sapiens
  misc_RNA (1)...(19): siRNA sense strand
gaggaugcggagugugaga

SEQ ID NO: 2307965 - RNA, 19 nt, Homo sapiens
  misc_RNA (1)...(19): siRNA sense strand
ccgaccuggccaagaagaa

SEQ ID NO: 2307966 - RNA, 19 nt, Homo sapiens
  misc_RNA (1)...(19): siRNA sense strand
augaagaacuacauugcga

SEQ ID NO: 2307967 - RNA, 19 nt, Homo sapiens
  misc_RNA (1)...(19): siRNA sense strand
gugcaaaaugugagcuuca

SEQ ID NO: 2307968 - RNA, 19 nt, Homo sapiens
  misc_RNA (1)...(19): siRNA sense strand
auacggucucacugggaaa

SEQ ID NO: 2307969 - RNA, 19 nt, Homo sapiens
  misc_RNA (1)...(19): siRNA sense strand
gcacacaugaagaacuaca

SEQ ID NO: 2307970 - RNA, 19 nt, Homo sapiens
  misc_RNA (1)...(19): siRNA sense strand
cuuuggaguacaugaugaa

SEQ ID NO: 2307971 - RNA, 19 nt, Homo sapiens
  misc_RNA (1)...(19): siRNA sense strand
agaaaaggacaugaagaaa

SEQ ID NO: 2307972 - RNA, 19 nt, Homo sapiens
  misc_RNA (1)...(19): siRNA sense strand
ccagaaaaggacaugaaga

SEQ ID NO: 2307973 - RNA, 19 nt, Homo sapiens
  misc_RNA (1)...(19): siRNA sense strand
cuacagaaaaugauggcau

SEQ ID NO: 2307974 - RNA, 19 nt, Homo sapiens
  misc_RNA (1)...(19): siRNA sense strand
cagagaucaaggagaagga

SEQ ID NO: 2307975 - RNA, 19 nt, Homo sapiens
  misc_RNA (1)...(19): siRNA sense strand
cagagaagaaugaggccaa

SEQ ID NO: 2307976 - RNA, 19 nt, Homo sapiens
  misc_RNA (1)...(19): siRNA sense strand
cagaaaaggacaugaagaa

SEQ ID NO: 2307977 - RNA, 19 nt, Homo sapiens
  misc_RNA (1)...(19): siRNA sense strand
agaaggaagaaaugaggaa

SEQ ID NO: 2307978 - RNA, 19 nt, Homo sapiens
  misc_RNA (1)...(19): siRNA sense strand
cagagagggucgugagcga

SEQ ID NO: 2307979 - RNA, 19 nt, Homo sapiens
  misc_RNA (1)...(19): siRNA sense strand
agaucaaggagaaggaaga

SEQ ID NO: 2307980 - RNA, 19 nt, Homo sapiens
  misc_RNA (1)...(19): siRNA sense strand
gguuggaagaagaacuaaa

SEQ ID NO: 2307981 - RNA, 19 nt, Homo sapiens
  misc_RNA (1)...(19): siRNA sense strand
gaagaaagcugcugcucga

SEQ ID NO: 2307982 - RNA, 19 nt, Homo sapiens
  misc_RNA (1)...(19): siRNA sense strand
aaggaagaaaugaggaaga

SEQ ID NO: 2307983 - RNA, 19 nt, Homo sapiens
  misc_RNA (1)...(19): siRNA sense strand
aguacaugaugaagugcua

SEQ ID NO: 2307984 - RNA, 19 nt, Homo sapiens
  misc_RNA (1)...(19): siRNA sense strand
aaguagauuugcugaccaa

SEQ ID NO: 2307985 - RNA, 19 nt, Homo sapiens
  misc_RNA (1)...(19): siRNA sense strand
agaaagaggcagagcggcu

SEQ ID NO: 2307986 - RNA, 19 nt, Homo sapiens
  misc_RNA (1)...(19): siRNA sense strand
gcacaggaaauuugggucu

SEQ ID NO: 2307987 - RNA, 19 nt, Homo sapiens
  misc_RNA (1)...(19): siRNA sense strand
gaggaagaucauugggcga

SEQ ID NO: 2307988 - RNA, 19 nt, Homo sapiens
  misc_RNA (1)...(19): siRNA sense strand
ccaagaagaaggcagccaa

SEQ ID NO: 2307989 - RNA, 19 nt, Homo sapiens
  misc_RNA (1)...(19): siRNA sense strand
uggaauugaccuugacaca

SEQ ID NO: 2307990 - RNA, 19 nt, Homo sapiens
  misc_RNA (1)...(19): siRNA sense strand
uggaggagaaccagaugaa

SEQ ID NO: 2307991 - RNA, 19 nt, Homo sapiens
  misc_RNA (1)...(19): siRNA sense strand
ugugagaagcagacaauca

SEQ ID NO: 2307992 - RNA, 19 nt, Homo sapiens
  misc_RNA (1)...(19): siRNA sense strand
agugcuacccagagaucaa

SEQ ID NO: 2307993 - RNA, 19 nt, Homo sapiens
  misc_RNA (1)...(19): siRNA sense strand
aaacaacaggugagcccaa

SEQ ID NO: 2307994 - RNA, 19 nt, Homo sapiens
  misc_RNA (1)...(19): siRNA sense strand
cacagguggcagagaagaa

SEQ ID NO: 2307995 - RNA, 19 nt, Homo sapiens
  misc_RNA (1)...(19): siRNA sense strand
ggucgugagcgauaagaca

SEQ ID NO: 2307996 - RNA, 19 nt, Homo sapiens
  misc_RNA (1)...(19): siRNA sense strand
augucaagauagggcguua

SEQ ID NO: 2307997 - RNA, 19 nt, Homo sapiens
  misc_RNA (1)...(19): siRNA sense strand
gguuuaaauggaauuggaa

SEQ ID NO: 2307998 - RNA, 19 nt, Homo sapiens
  misc_RNA (1)...(19): siRNA sense strand
gugguuggaagaagaacua

SEQ ID NO: 2307999 - RNA, 19 nt, Homo sapiens
  misc_RNA (1)...(19): siRNA sense strand
aggagaagacgcuacagaa

SEQ ID NO: 2308000 - RNA, 19 nt, Homo sapiens
  misc_RNA (1)...(19): siRNA sense strand
ggaauuaaacucaggccgu

SEQ ID NO: 2308001 - RNA, 19 nt, Homo sapiens
  misc_RNA (1)...(19): siRNA sense strand
gaggaugcggagugugaga

SEQ ID NO: 2308002 - RNA, 19 nt, Homo sapiens
  misc_RNA (1)...(19): siRNA sense strand
ccgaccuggccaagaagaa

SEQ ID NO: 2308003 - RNA, 19 nt, Homo sapiens
  misc_RNA (1)...(19): siRNA sense strand
augaagaacuacauugcga

SEQ ID NO: 2308004 - RNA, 19 nt, Homo sapiens
  misc_RNA (1)...(19): siRNA sense strand
gugcaaaaugugagcuuca

SEQ ID NO: 2308005 - RNA, 19 nt, Homo sapiens
  misc_RNA (1)...(19): siRNA sense strand
auacggucucacugggaaa

SEQ ID NO: 2308006 - RNA, 19 nt, Homo sapiens
  misc_RNA (1)...(19): siRNA sense strand
gcacacaugaagaacuaca

SEQ ID NO: 2308007 - RNA, 19 nt, Homo sapiens
  misc_RNA (1)...(19): siRNA sense strand
cuuuggaguacaugaugaa

SEQ ID NO: 2308008 - RNA, 19 nt, Homo sapiens
  misc_RNA (1)...(19): siRNA sense strand
agaaaaggacaugaagaaa

SEQ ID NO: 2308009 - RNA, 19 nt, Homo sapiens
  misc_RNA (1)...(19): siRNA sense strand
ccagaaaaggacaugaaga

SEQ ID NO: 2308010 - RNA, 19 nt, Homo sapiens
  misc_RNA (1)...(19): siRNA sense strand
cuacagaaaaugauggcau

SEQ ID NO: 2308011 - RNA, 19 nt, Homo sapiens
  misc_RNA (1)...(19): siRNA sense strand
cagagaucaaggagaagga

SEQ ID NO: 2308012 - RNA, 19 nt, Homo sapiens
  misc_RNA (1)...(19): siRNA sense strand
ugaugauugcagaggcaua

SEQ ID NO: 2308013 - RNA, 19 nt, Homo sapiens
  misc_RNA (1)...(19): siRNA sense strand
gaugaugauugcagaggca

SEQ ID NO: 2308014 - RNA, 19 nt, Homo sapiens
  misc_RNA (1)...(19): siRNA sense strand
ccugcugaccauaaggaaa

SEQ ID NO: 2308015 - RNA, 19 nt, Homo sapiens
  misc_RNA (1)...(19): siRNA sense strand
caaagagcgauauggaaaa

SEQ ID NO: 2308016 - RNA, 19 nt, Homo sapiens
  misc_RNA (1)...(19): siRNA sense strand
cuggugaugcugaggacua

SEQ ID NO: 2308017 - RNA, 19 nt, Homo sapiens
  misc_RNA (1)...(19): siRNA sense strand
aacgauacaaagagcgaua

SEQ ID NO: 2308018 - RNA, 19 nt, Homo sapiens
  misc_RNA (1)...(19): siRNA sense strand
cuucaagaacaaauggaga

SEQ ID NO: 2308019 - RNA, 19 nt, Homo sapiens
  misc_RNA (1)...(19): siRNA sense strand
ucucauugccagaagugaa

SEQ ID NO: 2308020 - RNA, 19 nt, Homo sapiens
  misc_RNA (1)...(19): siRNA sense strand
gaaacgauacaaagagcga

SEQ ID NO: 2308021 - RNA, 19 nt, Homo sapiens
  misc_RNA (1)...(19): siRNA sense strand
uucaagaacaaauggagaa

SEQ ID NO: 2308022 - RNA, 19 nt, Homo sapiens
  misc_RNA (1)...(19): siRNA sense strand
ggacauuuauucagagacc

SEQ ID NO: 2308023 - RNA, 19 nt, Homo sapiens
  misc_RNA (1)...(19): siRNA sense strand
gagacuaugugcaaggaac

SEQ ID NO: 2308024 - RNA, 19 nt, Homo sapiens
  misc_RNA (1)...(19): siRNA sense strand
ugaccauaaggaaacgaua

SEQ ID NO: 2308025 - RNA, 19 nt, Homo sapiens
  misc_RNA (1)...(19): siRNA sense strand
ccaggggaccagagaggaa

SEQ ID NO: 2308026 - RNA, 19 nt, Homo sapiens
  misc_RNA (1)...(19): siRNA sense strand
cagagaacaucaaggccuu

SEQ ID NO: 2308027 - RNA, 19 nt, Homo sapiens
  misc_RNA (1)...(19): siRNA sense strand
acauggacuuggagacaca

SEQ ID NO: 2308028 - RNA, 19 nt, Homo sapiens
  misc_RNA (1)...(19): siRNA sense strand
cugccaggguccaguucaa

SEQ ID NO: 2308029 - RNA, 19 nt, Homo sapiens
  misc_RNA (1)...(19): siRNA sense strand
agaaggcagcagagaacau

SEQ ID NO: 2308030 - RNA, 19 nt, Homo sapiens
  misc_RNA (1)...(19): siRNA sense strand
gcaucaagaaggcagcaga

SEQ ID NO: 2308031 - RNA, 19 nt, Homo sapiens
  misc_RNA (1)...(19): siRNA sense strand
ccgcagagcaggcgagaaa

SEQ ID NO: 2308032 - RNA, 19 nt, Homo sapiens
  misc_RNA (1)...(19): siRNA sense strand
ggcaagaggugaaggaaaa

SEQ ID NO: 2308033 - RNA, 19 nt, Homo sapiens
  misc_RNA (1)...(19): siRNA sense strand
gagauugaguggagggaga

SEQ ID NO: 2308034 - RNA, 19 nt, Homo sapiens
  misc_RNA (1)...(19): siRNA sense strand
ggguaaauguggagcuuca

SEQ ID NO: 2308035 - RNA, 19 nt, Homo sapiens
  misc_RNA (1)...(19): siRNA sense strand
caggagaagcugagagaga

SEQ ID NO: 2308036 - RNA, 19 nt, Homo sapiens
  misc_RNA (1)...(19): siRNA sense strand
aggcaagaggugaaggaaa

SEQ ID NO: 2308037 - RNA, 19 nt, Homo sapiens
  misc_RNA (1)...(19): siRNA sense strand
acacagaauuaauggaaca

SEQ ID NO: 2308038 - RNA, 19 nt, Homo sapiens
  misc_RNA (1)...(19): siRNA sense strand
ggcccuaguacgagagaaa

SEQ ID NO: 2308039 - RNA, 19 nt, Homo sapiens
  misc_RNA (1)...(19): siRNA sense strand
ggacaggaggagaggguga

SEQ ID NO: 2308040 - RNA, 19 nt, Homo sapiens
  misc_RNA (1)...(19): siRNA sense strand
caucaagaccuguggaaga

SEQ ID NO: 2308041 - RNA, 19 nt, Homo sapiens
  misc_RNA (1)...(19): siRNA sense strand
aggcaaagcgacaggaaga

SEQ ID NO: 2308042 - RNA, 19 nt, Homo sapiens
  misc_RNA (1)...(19): siRNA sense strand
ggaggaagcugaagaggga

SEQ ID NO: 2308043 - RNA, 19 nt, Homo sapiens
  misc_RNA (1)...(19): siRNA sense strand
uggagauccuggagacaaa

SEQ ID NO: 2308044 - RNA, 19 nt, Homo sapiens
  misc_RNA (1)...(19): siRNA sense strand
gggagaaggcccaggacuu

SEQ ID NO: 2308045 - RNA, 19 nt, Homo sapiens
  misc_RNA (1)...(19): siRNA sense strand
aagcagucauggagacaaa

SEQ ID NO: 2308046 - RNA, 19 nt, Homo sapiens
  misc_RNA (1)...(19): siRNA sense strand
acagagaaggagagaguau

SEQ ID NO: 2308047 - RNA, 19 nt, Homo sapiens
  misc_RNA (1)...(19): siRNA sense strand
ccagaaucaggaagagaaa

SEQ ID NO: 2308048 - RNA, 19 nt, Homo sapiens
  misc_RNA (1)...(19): siRNA sense strand
augaggaaguagagaguga

SEQ ID NO: 2308049 - RNA, 19 nt, Homo sapiens
  misc_RNA (1)...(19): siRNA sense strand
aagaagagaaggaagaaau

SEQ ID NO: 2308050 - RNA, 19 nt, Homo sapiens
  misc_RNA (1)...(19): siRNA sense strand
cuggagaagcaacgggaaa

SEQ ID NO: 2308051 - RNA, 19 nt, Homo sapiens
  misc_RNA (1)...(19): siRNA sense strand
gggaugaagagcugagaca

SEQ ID NO: 2308052 - RNA, 19 nt, Homo sapiens
  misc_RNA (1)...(19): siRNA sense strand
aggagagggugaaggaaaa

SEQ ID NO: 2308053 - RNA, 19 nt, Homo sapiens
  misc_RNA (1)...(19): siRNA sense strand
aaacagagaaggagagagu

SEQ ID NO: 2308054 - RNA, 19 nt, Homo sapiens
  misc_RNA (1)...(19): siRNA sense strand
gaauggaagcccaggguga

SEQ ID NO: 2308055 - RNA, 19 nt, Homo sapiens
  misc_RNA (1)...(19): siRNA sense strand
gcagagaagaggagggaag

SEQ ID NO: 2308056 - RNA, 19 nt, Homo sapiens
  misc_RNA (1)...(19): siRNA sense strand
ucaaggagcuggagggcca

SEQ ID NO: 2308057 - RNA, 19 nt, Homo sapiens
  misc_RNA (1)...(19): siRNA sense strand
ccagaggguccaagagaau

SEQ ID NO: 2308058 - RNA, 19 nt, Homo sapiens
  misc_RNA (1)...(19): siRNA sense strand
agagagaagaggaggagau

SEQ ID NO: 2308059 - RNA, 19 nt, Homo sapiens
  misc_RNA (1)...(19): siRNA sense strand
ggaaguaauccaaggggaa

SEQ ID NO: 2308060 - RNA, 19 nt, Homo sapiens
  misc_RNA (1)...(19): siRNA sense strand
uggaggaggugcugggaga

SEQ ID NO: 2308061 - RNA, 19 nt, Homo sapiens
  misc_RNA (1)...(19): siRNA sense strand
ugaggaagcugcaggccaa

SEQ ID NO: 2308062 - RNA, 19 nt, Homo sapiens
  misc_RNA (1)...(19): siRNA sense strand
gggagaaaugggagaagga

SEQ ID NO: 2308063 - RNA, 19 nt, Homo sapiens
  misc_RNA (1)...(19): siRNA sense strand
aguuagaggaggagaacca

SEQ ID NO: 2308064 - RNA, 19 nt, Homo sapiens
  misc_RNA (1)...(19): siRNA sense strand
agguagaucugcagcaaga

SEQ ID NO: 2308065 - RNA, 19 nt, Homo sapiens
  misc_RNA (1)...(19): siRNA sense strand
ggaacaaccuggaagccuu

SEQ ID NO: 2308066 - RNA, 19 nt, Homo sapiens
  misc_RNA (1)...(19): siRNA sense strand
aggccaaggugcugcagua

SEQ ID NO: 2308067 - RNA, 19 nt, Homo sapiens
  misc_RNA (1)...(19): siRNA sense strand
gagcuggaaaugaggcuaa

SEQ ID NO: 2308068 - RNA, 19 nt, Homo sapiens
  misc_RNA (1)...(19): siRNA sense strand
agaagcagguggaggacuu

SEQ ID NO: 2308069 - RNA, 19 nt, Homo sapiens
  misc_RNA (1)...(19): siRNA sense strand
gagcuaaugaggaaggaga

SEQ ID NO: 2308070 - RNA, 19 nt, Homo sapiens
  misc_RNA (1)...(19): siRNA sense strand
gagacaaaucacacagaau

SEQ ID NO: 2308071 - RNA, 19 nt, Homo sapiens
  misc_RNA (1)...(19): siRNA sense strand
agcaaaggcugcaggauga

SEQ ID NO: 2308072 - RNA, 19 nt, Homo sapiens
  misc_RNA (1)...(19): siRNA sense strand
agugggaggaagagggcaa

SEQ ID NO: 2308073 - RNA, 19 nt, Homo sapiens
  misc_RNA (1)...(19): siRNA sense strand
cccuggaacuggaggaaaa

SEQ ID NO: 2308074 - RNA, 19 nt, Homo sapiens
  misc_RNA (1)...(19): siRNA sense strand
aaagaaacuaagugaguca

SEQ ID NO: 2308075 - RNA, 19 nt, Homo sapiens
  misc_RNA (1)...(19): siRNA sense strand
cagcaggugaucaaggaua

SEQ ID NO: 2308076 - RNA, 19 nt, Homo sapiens
  misc_RNA (1)...(19): siRNA sense strand
gcaggaacgggcagaggaa

SEQ ID NO: 2308077 - RNA, 19 nt, Homo sapiens
  misc_RNA (1)...(19): siRNA sense strand
gauuggaggaggagcaaca

SEQ ID NO: 2308078 - RNA, 19 nt, Homo sapiens
  misc_RNA (1)...(19): siRNA sense strand
gucaagaggcugugaacuu

SEQ ID NO: 2308079 - RNA, 19 nt, Homo sapiens
  misc_RNA (1)...(19): siRNA sense strand
guuugaagcccaacaacaa

SEQ ID NO: 2308080 - RNA, 19 nt, Homo sapiens
  misc_RNA (1)...(19): siRNA sense strand
aggcugagcaagaagggaa

SEQ ID NO: 2308081 - RNA, 19 nt, Homo sapiens
  misc_RNA (1)...(19): siRNA sense strand
ccagggugagcgagaguua

SEQ ID NO: 2308082 - RNA, 19 nt, Homo sapiens
  misc_RNA (1)...(19): siRNA sense strand
agggaagggcccaaguaaa

SEQ ID NO: 2308083 - RNA, 19 nt, Homo sapiens
  misc_RNA (1)...(19): siRNA sense strand
gcaggaagccagggaacaa

SEQ ID NO: 2308084 - RNA, 19 nt, Homo sapiens
  misc_RNA (1)...(19): siRNA sense strand
agcaggagguucaggagaa

SEQ ID NO: 2308085 - RNA, 19 nt, Homo sapiens
  misc_RNA (1)...(19): siRNA sense strand
gggaucagguccagaaacu

SEQ ID NO: 2308086 - RNA, 19 nt, Homo sapiens
  misc_RNA (1)...(19): siRNA sense strand
gcuagaagccacuggagga

SEQ ID NO: 2308087 - RNA, 19 nt, Homo sapiens
  misc_RNA (1)...(19): siRNA sense strand
aggaguucuucaagggcua

SEQ ID NO: 2308088 - RNA, 19 nt, Homo sapiens
  misc_RNA (1)...(19): siRNA sense strand
gagaacagaucgaggagcu

SEQ ID NO: 2308089 - RNA, 19 nt, Homo sapiens
  misc_RNA (1)...(19): siRNA sense strand
ugaaaggagccaggaguua

SEQ ID NO: 2308090 - RNA, 19 nt, Homo sapiens
  misc_RNA (1)...(19): siRNA sense strand
ugagagagacaguggagau

SEQ ID NO: 2308091 - RNA, 19 nt, Homo sapiens
  misc_RNA (1)...(19): siRNA sense strand
caagaagagaaggaagaaa

SEQ ID NO: 2308092 - RNA, 19 nt, Homo sapiens
  misc_RNA (1)...(19): siRNA sense strand
agaagagaaggaagaaauu

SEQ ID NO: 2308093 - RNA, 19 nt, Homo sapiens
  misc_RNA (1)...(19): siRNA sense strand
gggcaguccaggagaagga

SEQ ID NO: 2308094 - RNA, 19 nt, Homo sapiens
  misc_RNA (1)...(19): siRNA sense strand
gcaucagcuucuagaacuu

SEQ ID NO: 2308095 - RNA, 19 nt, Homo sapiens
  misc_RNA (1)...(19): siRNA sense strand
uggagcagguggagcgaga

SEQ ID NO: 2308096 - RNA, 19 nt, Homo sapiens
  misc_RNA (1)...(19): siRNA sense strand
cuuuacagcaggugaucaa

SEQ ID NO: 2308097 - RNA, 19 nt, Homo sapiens
  misc_RNA (1)...(19): siRNA sense strand
cuaaagagauugaauggga

SEQ ID NO: 2308098 - RNA, 19 nt, Homo sapiens
  misc_RNA (1)...(19): siRNA sense strand
acauaagagcagaagcuga

SEQ ID NO: 2308099 - RNA, 19 nt, Homo sapiens
  misc_RNA (1)...(19): siRNA sense strand
ucgcgauggcagagaugaa

SEQ ID NO: 2308100 - RNA, 19 nt, Homo sapiens
  misc_RNA (1)...(19): siRNA sense strand
aagccaaggccaaguccaa

SEQ ID NO: 2308101 - RNA, 19 nt, Homo sapiens
  misc_RNA (1)...(19): siRNA sense strand
aggacauagucuucuacaa

SEQ ID NO: 2308102 - RNA, 19 nt, Homo sapiens
  misc_RNA (1)...(19): siRNA sense strand
ccuuguagugaaacggaau

SEQ ID NO: 2308103 - RNA, 19 nt, Homo sapiens
  misc_RNA (1)...(19): siRNA sense strand
uggcagagaugaagguggu

SEQ ID NO: 2308104 - RNA, 19 nt, Homo sapiens
  misc_RNA (1)...(19): siRNA sense strand
ccauuacagacaaggacau

SEQ ID NO: 2308105 - RNA, 19 nt, Homo sapiens
  misc_RNA (1)...(19): siRNA sense strand
ucaacauccugaagcccua

SEQ ID NO: 2308106 - RNA, 19 nt, Homo sapiens
  misc_RNA (1)...(19): siRNA sense strand
caaacaucaugcaugccaa

SEQ ID NO: 2308107 - RNA, 19 nt, Homo sapiens
  misc_RNA (1)...(19): siRNA sense strand
agcaagagggagaggguga

SEQ ID NO: 2308108 - RNA, 19 nt, Homo sapiens
  misc_RNA (1)...(19): siRNA sense strand
uggaagagcuggagcgcug

SEQ ID NO: 2308109 - RNA, 19 nt, Homo sapiens
  misc_RNA (1)...(19): siRNA sense strand
gggaugagcuacuuugcca

SEQ ID NO: 2308110 - RNA, 19 nt, Homo sapiens
  misc_RNA (1)...(19): siRNA sense strand
aggaccaguguguggaaau

SEQ ID NO: 2308111 - RNA, 19 nt, Homo sapiens
  misc_RNA (1)...(19): siRNA sense strand
gugaagauucucuacaaaa

SEQ ID NO: 2308112 - RNA, 19 nt, Homo sapiens
  misc_RNA (1)...(19): siRNA sense strand
cugaguacaucgaccgcau

SEQ ID NO: 2308113 - RNA, 19 nt, Homo sapiens
  misc_RNA (1)...(19): siRNA sense strand
agcaagagggagaggguga

SEQ ID NO: 2308114 - RNA, 19 nt, Homo sapiens
  misc_RNA (1)...(19): siRNA sense strand
uggaagagcuggagcgcug

SEQ ID NO: 2308115 - RNA, 19 nt, Homo sapiens
  misc_RNA (1)...(19): siRNA sense strand
aggaccaguguguggaaau

SEQ ID NO: 2308116 - RNA, 19 nt, Homo sapiens
  misc_RNA (1)...(19): siRNA sense strand
gugaagauucucuacaaaa

SEQ ID NO: 2308117 - RNA, 19 nt, Homo sapiens
  misc_RNA (1)...(19): siRNA sense strand
cugaguacaucgaccgcau

SEQ ID NO: 2308118 - RNA, 19 nt, Homo sapiens
  misc_RNA (1)...(19): siRNA sense strand
aggaaagagucauggaaau

SEQ ID NO: 2308119 - RNA, 19 nt, Homo sapiens
  misc_RNA (1)...(19): siRNA sense strand
aagaagaggaggaggagaa

SEQ ID NO: 2308120 - RNA, 19 nt, Homo sapiens
  misc_RNA (1)...(19): siRNA sense strand
agaaugaagaugaggaaga

SEQ ID NO: 2308121 - RNA, 19 nt, Homo sapiens
  misc_RNA (1)...(19): siRNA sense strand
ugaagaagaaagugaagaa

SEQ ID NO: 2308122 - RNA, 19 nt, Homo sapiens
  misc_RNA (1)...(19): siRNA sense strand
cgaggaagaagaagaacaa

SEQ ID NO: 2308123 - RNA, 19 nt, Homo sapiens
  misc_RNA (1)...(19): siRNA sense strand
agaaagaacuagcggcuca

SEQ ID NO: 2308124 - RNA, 19 nt, Homo sapiens
  misc_RNA (1)...(19): siRNA sense strand
cacagaagugggagagaua

SEQ ID NO: 2308125 - RNA, 19 nt, Homo sapiens
  misc_RNA (1)...(19): siRNA sense strand
agccagaacugcugaacaa

SEQ ID NO: 2308126 - RNA, 19 nt, Homo sapiens
  misc_RNA (1)...(19): siRNA sense strand
aggaagaagaggaggagga

SEQ ID NO: 2308127 - RNA, 19 nt, Homo sapiens
  misc_RNA (1)...(19): siRNA sense strand
aggaagaggaggacaguga

SEQ ID NO: 2308128 - RNA, 19 nt, Homo sapiens
  misc_RNA (1)...(19): siRNA sense strand
aggagaaagaugaggcaga

SEQ ID NO: 2308129 - RNA, 19 nt, Homo sapiens
  misc_RNA (1)...(19): siRNA sense strand
ugacauuggaugagguaga

SEQ ID NO: 2308130 - RNA, 19 nt, Homo sapiens
  misc_RNA (1)...(19): siRNA sense strand
aguugaugcagaugagaaa

SEQ ID NO: 2308131 - RNA, 19 nt, Homo sapiens
  misc_RNA (1)...(19): siRNA sense strand
agauaugugacguguauaa

SEQ ID NO: 2308132 - RNA, 19 nt, Homo sapiens
  misc_RNA (1)...(19): siRNA sense strand
aagaggaggaggagaaaga

SEQ ID NO: 2308133 - RNA, 19 nt, Homo sapiens
  misc_RNA (1)...(19): siRNA sense strand
gggaagagguucucgggca

SEQ ID NO: 2308134 - RNA, 19 nt, Homo sapiens
  misc_RNA (1)...(19): siRNA sense strand
cugaagagaaagagaagga

SEQ ID NO: 2308135 - RNA, 19 nt, Homo sapiens
  misc_RNA (1)...(19): siRNA sense strand
gaggagacaaaguggauau

SEQ ID NO: 2308136 - RNA, 19 nt, Homo sapiens
  misc_RNA (1)...(19): siRNA sense strand
uggaaauaguugaugcaga

SEQ ID NO: 2308137 - RNA, 19 nt, Homo sapiens
  misc_RNA (1)...(19): siRNA sense strand
augaagaucuacaucgaua

SEQ ID NO: 2308138 - RNA, 19 nt, Homo sapiens
  misc_RNA (1)...(19): siRNA sense strand
cuuuauggccagcaagaaa

SEQ ID NO: 2308139 - RNA, 19 nt, Homo sapiens
  misc_RNA (1)...(19): siRNA sense strand
aaggaaagagucauggaaa

SEQ ID NO: 2308140 - RNA, 19 nt, Homo sapiens
  misc_RNA (1)...(19): siRNA sense strand
agaaagugaccaugaucaa

SEQ ID NO: 2308141 - RNA, 19 nt, Homo sapiens
  misc_RNA (1)...(19): siRNA sense strand
cuaaggaggaacuggaauu

SEQ ID NO: 2308142 - RNA, 19 nt, Homo sapiens
  misc_RNA (1)...(19): siRNA sense strand
agaagagaguggaaaggau

SEQ ID NO: 2308143 - RNA, 19 nt, Homo sapiens
  misc_RNA (1)...(19): siRNA sense strand
cagaagaugacuaugaaga

SEQ ID NO: 2308144 - RNA, 19 nt, Homo sapiens
  misc_RNA (1)...(19): siRNA sense strand
augaagaggaagaggagga

SEQ ID NO: 2308145 - RNA, 19 nt, Homo sapiens
  misc_RNA (1)...(19): siRNA sense strand
gagaagaugaguaugccaa

SEQ ID NO: 2308146 - RNA, 19 nt, Homo sapiens
  misc_RNA (1)...(19): siRNA sense strand
aaguggaguucuugaaaca

SEQ ID NO: 2308147 - RNA, 19 nt, Homo sapiens
  misc_RNA (1)...(19): siRNA sense strand
cgauaagaaauaugagacu

SEQ ID NO: 2308148 - RNA, 19 nt, Homo sapiens
  misc_RNA (1)...(19): siRNA sense strand
gcuuauuaucggcgaguga

SEQ ID NO: 2308149 - RNA, 19 nt, Homo sapiens
  misc_RNA (1)...(19): siRNA sense strand
ccuaguaaucaauagcaaa

SEQ ID NO: 2308150 - RNA, 19 nt, Homo sapiens
  misc_RNA (1)...(19): siRNA sense strand
aaagaaugaagaugaggaa

SEQ ID NO: 2308151 - RNA, 19 nt, Homo sapiens
  misc_RNA (1)...(19): siRNA sense strand
agaucuacaucgauaagaa

SEQ ID NO: 2308152 - RNA, 19 nt, Homo sapiens
  misc_RNA (1)...(19): siRNA sense strand
gagaagcugaagagaaaga

SEQ ID NO: 2308153 - RNA, 19 nt, Homo sapiens
  misc_RNA (1)...(19): siRNA sense strand
gaacgagaaaugaggcaca

SEQ ID NO: 2308154 - RNA, 19 nt, Homo sapiens
  misc_RNA (1)...(19): siRNA sense strand
cacuaagggcaaugagaau

SEQ ID NO: 2308155 - RNA, 19 nt, Homo sapiens
  misc_RNA (1)...(19): siRNA sense strand
agacauggugugaagauau

SEQ ID NO: 2308156 - RNA, 19 nt, Homo sapiens
  misc_RNA (1)...(19): siRNA sense strand
agaaagagaaggaggggau

SEQ ID NO: 2308157 - RNA, 19 nt, Homo sapiens
  misc_RNA (1)...(19): siRNA sense strand
gucauuggguagugaagaa

SEQ ID NO: 2308158 - RNA, 19 nt, Homo sapiens
  misc_RNA (1)...(19): siRNA sense strand
gcuaauacgagaaaagaau

SEQ ID NO: 2308159 - RNA, 19 nt, Homo sapiens
  misc_RNA (1)...(19): siRNA sense strand
cucaagaaguucaagaaaa

SEQ ID NO: 2308160 - RNA, 19 nt, Homo sapiens
  misc_RNA (1)...(19): siRNA sense strand
gggcaaugagaaugcuaau

SEQ ID NO: 2308161 - RNA, 19 nt, Homo sapiens
  misc_RNA (1)...(19): siRNA sense strand
uggcugagucuguggaaaa

SEQ ID NO: 2308162 - RNA, 19 nt, Homo sapiens
  misc_RNA (1)...(19): siRNA sense strand
cugucauggacgugguuaa

SEQ ID NO: 2308163 - RNA, 19 nt, Homo sapiens
  misc_RNA (1)...(19): siRNA sense strand
gugaagaagagaguggaaa

SEQ ID NO: 2308164 - RNA, 19 nt, Homo sapiens
  misc_RNA (1)...(19): siRNA sense strand
aagaaguacagaaacguua

SEQ ID NO: 2308165 - RNA, 19 nt, Homo sapiens
  misc_RNA (1)...(19): siRNA sense strand
ucuacaaggacuacagcaa

SEQ ID NO: 2308166 - RNA, 19 nt, Homo sapiens
  misc_RNA (1)...(19): siRNA sense strand
ugaaauacacagaaggagu

SEQ ID NO: 2308167 - RNA, 19 nt, Homo sapiens
  misc_RNA (1)...(19): siRNA sense strand
ggguagugaagaagagagu

SEQ ID NO: 2308168 - RNA, 19 nt, Homo sapiens
  misc_RNA (1)...(19): siRNA sense strand
cgaaaagcggaccgagaaa

SEQ ID NO: 2308169 - RNA, 19 nt, Homo sapiens
  misc_RNA (1)...(19): siRNA sense strand
gaguaauccgaaacugaaa

SEQ ID NO: 2308170 - RNA, 19 nt, Homo sapiens
  misc_RNA (1)...(19): siRNA sense strand
guuacgaggaagaagaaga

SEQ ID NO: 2308171 - RNA, 19 nt, Homo sapiens
  misc_RNA (1)...(19): siRNA sense strand
uggaaggagauuauacuua

SEQ ID NO: 2308172 - RNA, 19 nt, Homo sapiens
  misc_RNA (1)...(19): siRNA sense strand
uggaaaggauugggaugaa

SEQ ID NO: 2308173 - RNA, 19 nt, Homo sapiens
  misc_RNA (1)...(19): siRNA sense strand
gggcaggaaugaaggcaac

SEQ ID NO: 2308174 - RNA, 19 nt, Homo sapiens
  misc_RNA (1)...(19): siRNA sense strand
agauuggaguguucagcaa

SEQ ID NO: 2308175 - RNA, 19 nt, Homo sapiens
  misc_RNA (1)...(19): siRNA sense strand
augaagaugaggaagaaga

SEQ ID NO: 2308176 - RNA, 19 nt, Homo sapiens
  misc_RNA (1)...(19): siRNA sense strand
gauuauacuuacuugcgaa

SEQ ID NO: 2308177 - RNA, 19 nt, Homo sapiens
  misc_RNA (1)...(19): siRNA sense strand
uggaugagguagagcugau

SEQ ID NO: 2308178 - RNA, 19 nt, Homo sapiens
  misc_RNA (1)...(19): siRNA sense strand
aggacagugaugaagauua

SEQ ID NO: 2308179 - RNA, 19 nt, Homo sapiens
  misc_RNA (1)...(19): siRNA sense strand
ucuaaggagucauugggua

SEQ ID NO: 2308180 - RNA, 19 nt, Homo sapiens
  misc_RNA (1)...(19): siRNA sense strand
acacuaagggcaaugagaa

SEQ ID NO: 2308181 - RNA, 19 nt, Homo sapiens
  misc_RNA (1)...(19): siRNA sense strand
augaagagcuggaaugacu

SEQ ID NO: 2308182 - RNA, 19 nt, Homo sapiens
  misc_RNA (1)...(19): siRNA sense strand
cugaagaaaggaaugguuu

SEQ ID NO: 2308183 - RNA, 19 nt, Homo sapiens
  misc_RNA (1)...(19): siRNA sense strand
gcagcauuacuuacagaaa

SEQ ID NO: 2308184 - RNA, 19 nt, Homo sapiens
  misc_RNA (1)...(19): siRNA sense strand
gcgucuacuccgugggcua

SEQ ID NO: 2308185 - RNA, 19 nt, Homo sapiens
  misc_RNA (1)...(19): siRNA sense strand
cgauuauggagcaguucaa

SEQ ID NO: 2308186 - RNA, 19 nt, Homo sapiens
  misc_RNA (1)...(19): siRNA sense strand
guggagaucuucaugguga

SEQ ID NO: 2308187 - RNA, 19 nt, Homo sapiens
  misc_RNA (1)...(19): siRNA sense strand
cagcaggugugcagccgua

SEQ ID NO: 2308188 - RNA, 19 nt, Homo sapiens
  misc_RNA (1)...(19): siRNA sense strand
aagaagagccggagaaaac

SEQ ID NO: 2308189 - RNA, 19 nt, Homo sapiens
  misc_RNA (1)...(19): siRNA sense strand
uuaaagaagaagagccgga

SEQ ID NO: 2308190 - RNA, 19 nt, Homo sapiens
  misc_RNA (1)...(19): siRNA sense strand
gcggcgagaacacggacaa

SEQ ID NO: 2308191 - RNA, 19 nt, Homo sapiens
  misc_RNA (1)...(19): siRNA sense strand
gcuaagacaucaagcacac

SEQ ID NO: 2308192 - RNA, 19 nt, Homo sapiens
  misc_RNA (1)...(19): siRNA sense strand
aggaaaaggaagaaggcua

SEQ ID NO: 2308193 - RNA, 19 nt, Homo sapiens
  misc_RNA (1)...(19): siRNA sense strand
aagcauuucagaagagcaa

SEQ ID NO: 2308194 - RNA, 19 nt, Homo sapiens
  misc_RNA (1)...(19): siRNA sense strand
uggaugugggugagaacaa

SEQ ID NO: 2308195 - RNA, 19 nt, Homo sapiens
  misc_RNA (1)...(19): siRNA sense strand
aggucuggauggacagcua

SEQ ID NO: 2308196 - RNA, 19 nt, Homo sapiens
  misc_RNA (1)...(19): siRNA sense strand
cagcugaacugaagcccuu

SEQ ID NO: 2308197 - RNA, 19 nt, Homo sapiens
  misc_RNA (1)...(19): siRNA sense strand
caugagaagcagaggcgca

SEQ ID NO: 2308198 - RNA, 19 nt, Homo sapiens
  misc_RNA (1)...(19): siRNA sense strand
aguccuacuuugagcacau

SEQ ID NO: 2308199 - RNA, 19 nt, Homo sapiens
  misc_RNA (1)...(19): siRNA sense strand
cucgaaucgcugaggacaa

SEQ ID NO: 2308200 - RNA, 19 nt, Homo sapiens
  misc_RNA (1)...(19): siRNA sense strand
gggcagaguccauagccga

SEQ ID NO: 2308201 - RNA, 19 nt, Homo sapiens
  misc_RNA (1)...(19): siRNA sense strand
aagagaaauccuucgguga

SEQ ID NO: 2308202 - RNA, 19 nt, Homo sapiens
  misc_RNA (1)...(19): siRNA sense strand
ccuuaauacuuuugaguuc

SEQ ID NO: 2308203 - RNA, 19 nt, Homo sapiens
  misc_RNA (1)...(19): siRNA sense strand
gaggggagaacguggaaau

SEQ ID NO: 2308204 - RNA, 19 nt, Homo sapiens
  misc_RNA (1)...(19): siRNA sense strand
gaagaaggcuauaagaagc

SEQ ID NO: 2308205 - RNA, 19 nt, Homo sapiens
  misc_RNA (1)...(19): siRNA sense strand
gggacaggaaaguggccaa

SEQ ID NO: 2308206 - RNA, 19 nt, Homo sapiens
  misc_RNA (1)...(19): siRNA sense strand
gcaugaagaugguguccca

SEQ ID NO: 2308207 - RNA, 19 nt, Homo sapiens
  misc_RNA (1)...(19): siRNA sense strand
cuggagaagcgcaugaaga

SEQ ID NO: 2308208 - RNA, 19 nt, Homo sapiens
  misc_RNA (1)...(19): siRNA sense strand
ccuucaacaucgugcucau

SEQ ID NO: 2308209 - RNA, 19 nt, Homo sapiens
  misc_RNA (1)...(19): siRNA sense strand
gggacagaccagcaagaca

SEQ ID NO: 2308210 - RNA, 19 nt, Homo sapiens
  misc_RNA (1)...(19): siRNA sense strand
ugguaaaggucguggccaa

SEQ ID NO: 2308211 - RNA, 19 nt, Homo sapiens
  misc_RNA (1)...(19): siRNA sense strand
gaacauaucgccagggcaa

SEQ ID NO: 2308212 - RNA, 19 nt, Homo sapiens
  misc_RNA (1)...(19): siRNA sense strand
gugcaaagguccauggcca

SEQ ID NO: 2308213 - RNA, 19 nt, Homo sapiens
  misc_RNA (1)...(19): siRNA sense strand
gggcaaugggcguagcaga

SEQ ID NO: 2308214 - RNA, 19 nt, Homo sapiens
  misc_RNA (1)...(19): siRNA sense strand
ggcuauacgccgagcucau

SEQ ID NO: 2308215 - RNA, 19 nt, Homo sapiens
  misc_RNA (1)...(19): siRNA sense strand
acaacacggucgucgguga

SEQ ID NO: 2308216 - RNA, 19 nt, Homo sapiens
  misc_RNA (1)...(19): siRNA sense strand
ugcaaagguccauggccaa

SEQ ID NO: 2308217 - RNA, 19 nt, Homo sapiens
  misc_RNA (1)...(19): siRNA sense strand
ccaggagccaccagcacaa

SEQ ID NO: 2308218 - RNA, 19 nt, Homo sapiens
  misc_RNA (1)...(19): siRNA sense strand
ccuaaacaacggugugaca

SEQ ID NO: 2308219 - RNA, 19 nt, Homo sapiens
  misc_RNA (1)...(19): siRNA sense strand
caccaaagcugaugggcgu

SEQ ID NO: 2308220 - RNA, 19 nt, Homo sapiens
  misc_RNA (1)...(19): siRNA sense strand
ugucaaaggcaaacgacca

SEQ ID NO: 2308221 - RNA, 19 nt, Homo sapiens
  misc_RNA (1)...(19): siRNA sense strand
aguucgaggaagaccuaaa

SEQ ID NO: 2308222 - RNA, 19 nt, Homo sapiens
  misc_RNA (1)...(19): siRNA sense strand
ucgaggaagaccuaaacaa

SEQ ID NO: 2308223 - RNA, 19 nt, Homo sapiens
  misc_RNA (1)...(19): siRNA sense strand
caugaaaaccucugugaca

SEQ ID NO: 2308224 - RNA, 19 nt, Homo sapiens
  misc_RNA (1)...(19): siRNA sense strand
ccuaaacaacggugugaca

SEQ ID NO: 2308225 - RNA, 19 nt, Homo sapiens
  misc_RNA (1)...(19): siRNA sense strand
caccaaagcugaugggcgu

SEQ ID NO: 2308226 - RNA, 19 nt, Homo sapiens
  misc_RNA (1)...(19): siRNA sense strand
ugucaaaggcaaacgacca

SEQ ID NO: 2308227 - RNA, 19 nt, Homo sapiens
  misc_RNA (1)...(19): siRNA sense strand
aguucgaggaagaccuaaa

SEQ ID NO: 2308228 - RNA, 19 nt, Homo sapiens
  misc_RNA (1)...(19): siRNA sense strand
ucgaggaagaccuaaacaa

SEQ ID NO: 2308229 - RNA, 19 nt, Homo sapiens
  misc_RNA (1)...(19): siRNA sense strand
ccuaaacaacggugugaca

SEQ ID NO: 2308230 - RNA, 19 nt, Homo sapiens
  misc_RNA (1)...(19): siRNA sense strand
caccaaagcugaugggcgu

SEQ ID NO: 2308231 - RNA, 19 nt, Homo sapiens
  misc_RNA (1)...(19): siRNA sense strand
ugucaaaggcaaacgacca

SEQ ID NO: 2308232 - RNA, 19 nt, Homo sapiens
  misc_RNA (1)...(19): siRNA sense strand
aguucgaggaagaccuaaa

SEQ ID NO: 2308233 - RNA, 19 nt, Homo sapiens
  misc_RNA (1)...(19): siRNA sense strand
ucgaggaagaccuaaacaa

SEQ ID NO: 2308234 - RNA, 19 nt, Homo sapiens
  misc_RNA (1)...(19): siRNA sense strand
agaaauaccuggugccuuc

SEQ ID NO: 2308235 - RNA, 19 nt, Homo sapiens
  misc_RNA (1)...(19): siRNA sense strand
acgaaagugucuacggucu

SEQ ID NO: 2308236 - RNA, 19 nt, Homo sapiens
  misc_RNA (1)...(19): siRNA sense strand
gugcaaaggcagcggcaga

SEQ ID NO: 2308237 - RNA, 19 nt, Homo sapiens
  misc_RNA (1)...(19): siRNA sense strand
caguaaagcuugugucgga

SEQ ID NO: 2308238 - RNA, 19 nt, Homo sapiens
  misc_RNA (1)...(19): siRNA sense strand
agagaaaggcauagguacu

SEQ ID NO: 2308239 - RNA, 19 nt, Homo sapiens
  misc_RNA (1)...(19): siRNA sense strand
gcaagaaaguugauagcuc

SEQ ID NO: 2308240 - RNA, 19 nt, Homo sapiens
  misc_RNA (1)...(19): siRNA sense strand
ccgagaaggaacugacaga

SEQ ID NO: 2308241 - RNA, 19 nt, Homo sapiens
  misc_RNA (1)...(19): siRNA sense strand
acgcgaacagggaagaaua

SEQ ID NO: 2308242 - RNA, 19 nt, Homo sapiens
  misc_RNA (1)...(19): siRNA sense strand
uggagaugaagaagagaau

SEQ ID NO: 2308243 - RNA, 19 nt, Homo sapiens
  misc_RNA (1)...(19): siRNA sense strand
caccaauugacgagaagaa

SEQ ID NO: 2308244 - RNA, 19 nt, Homo sapiens
  misc_RNA (1)...(19): siRNA sense strand
guggagaugaagaagagaa

SEQ ID NO: 2308245 - RNA, 19 nt, Homo sapiens
  misc_RNA (1)...(19): siRNA sense strand
cuccauggccagugaggaa

SEQ ID NO: 2308246 - RNA, 19 nt, Homo sapiens
  misc_RNA (1)...(19): siRNA sense strand
cgggaacaguggcaggaau

SEQ ID NO: 2308247 - RNA, 19 nt, Homo sapiens
  misc_RNA (1)...(19): siRNA sense strand
agaagagaaugaugagcca

SEQ ID NO: 2308248 - RNA, 19 nt, Homo sapiens
  misc_RNA (1)...(19): siRNA sense strand
aggcauagguacucugcau

SEQ ID NO: 2308249 - RNA, 19 nt, Homo sapiens
  misc_RNA (1)...(19): siRNA sense strand
ccaaaguaguaguuaccga

SEQ ID NO: 2308250 - RNA, 19 nt, Homo sapiens
  misc_RNA (1)...(19): siRNA sense strand
gagccauaaagaaagcaaa

SEQ ID NO: 2308251 - RNA, 19 nt, Homo sapiens
  misc_RNA (1)...(19): siRNA sense strand
agauaggaauugggaucaa

SEQ ID NO: 2308252 - RNA, 19 nt, Homo sapiens
  misc_RNA (1)...(19): siRNA sense strand
acagauaggaauugggauc

SEQ ID NO: 2308253 - RNA, 19 nt, Homo sapiens
  misc_RNA (1)...(19): siRNA sense strand
ggauagugaagcacgugaa

SEQ ID NO: 2308254 - RNA, 19 nt, Homo sapiens
  misc_RNA (1)...(19): siRNA sense strand
cuaacaaaguggcagcuga

SEQ ID NO: 2308255 - RNA, 19 nt, Homo sapiens
  misc_RNA (1)...(19): siRNA sense strand
agaaggugacaguggugaa

SEQ ID NO: 2308256 - RNA, 19 nt, Homo sapiens
  misc_RNA (1)...(19): siRNA sense strand
augaagaagagaaugauga

SEQ ID NO: 2308257 - RNA, 19 nt, Homo sapiens
  misc_RNA (1)...(19): siRNA sense strand
cgcgaacagggaagaauaa

SEQ ID NO: 2308258 - RNA, 19 nt, Homo sapiens
  misc_RNA (1)...(19): siRNA sense strand
ggugguaccuucuggagga

SEQ ID NO: 2308259 - RNA, 19 nt, Homo sapiens
  misc_RNA (1)...(19): siRNA sense strand
uagcaaacauugaacagca

SEQ ID NO: 2308260 - RNA, 19 nt, Homo sapiens
  misc_RNA (1)...(19): siRNA sense strand
aguuuaaagagaaaggcau

SEQ ID NO: 2308261 - RNA, 19 nt, Homo sapiens
  misc_RNA (1)...(19): siRNA sense strand
ccauguugauucggguaaa

SEQ ID NO: 2308262 - RNA, 19 nt, Homo sapiens
  misc_RNA (1)...(19): siRNA sense strand
aggaacugacagauaggaa

SEQ ID NO: 2308263 - RNA, 19 nt, Homo sapiens
  misc_RNA (1)...(19): siRNA sense strand
caagaaaguugauagcucu

SEQ ID NO: 2308264 - RNA, 19 nt, Homo sapiens
  misc_RNA (1)...(19): siRNA sense strand
ccucauuuaauuucggcaa

SEQ ID NO: 2308265 - RNA, 19 nt, Homo sapiens
  misc_RNA (1)...(19): siRNA sense strand
ucggaaaugccuaucacaa

SEQ ID NO: 2308266 - RNA, 19 nt, Homo sapiens
  misc_RNA (1)...(19): siRNA sense strand
agcaaacauugaacagcaa

SEQ ID NO: 2308267 - RNA, 19 nt, Homo sapiens
  misc_RNA (1)...(19): siRNA sense strand
cauuuaaaaccuacagcaa

SEQ ID NO: 2308268 - RNA, 19 nt, Homo sapiens
  misc_RNA (1)...(19): siRNA sense strand
aagaaagcaaagcgcagaa

SEQ ID NO: 2308269 - RNA, 19 nt, Homo sapiens
  misc_RNA (1)...(19): siRNA sense strand
ggaacauucuccauggcca

SEQ ID NO: 2308270 - RNA, 19 nt, Homo sapiens
  misc_RNA (1)...(19): siRNA sense strand
cuaaaccauuggagggcca

SEQ ID NO: 2308271 - RNA, 19 nt, Homo sapiens
  misc_RNA (1)...(19): siRNA sense strand
caaaguaguaguuaccgaa

SEQ ID NO: 2308272 - RNA, 19 nt, Homo sapiens
  misc_RNA (1)...(19): siRNA sense strand
ccgaaguaaaagaagaaga

SEQ ID NO: 2308273 - RNA, 19 nt, Homo sapiens
  misc_RNA (1)...(19): siRNA sense strand
aagaagaugaagcugaaga

SEQ ID NO: 2308274 - RNA, 19 nt, Homo sapiens
  misc_RNA (1)...(19): siRNA sense strand
uagugaagcacgugaauac

SEQ ID NO: 2308275 - RNA, 19 nt, Homo sapiens
  misc_RNA (1)...(19): siRNA sense strand
cugaaagugaaucuaacaa

SEQ ID NO: 2308276 - RNA, 19 nt, Homo sapiens
  misc_RNA (1)...(19): siRNA sense strand
ggaucaagaagaugaagcu

SEQ ID NO: 2308277 - RNA, 19 nt, Homo sapiens
  misc_RNA (1)...(19): siRNA sense strand
gaguuuaaagagaaaggca

SEQ ID NO: 2308278 - RNA, 19 nt, Homo sapiens
  misc_RNA (1)...(19): siRNA sense strand
cagacgaguugcacaaaau

SEQ ID NO: 2308279 - RNA, 19 nt, Homo sapiens
  misc_RNA (1)...(19): siRNA sense strand
gugcaaaggcagcggcaga

SEQ ID NO: 2308280 - RNA, 19 nt, Homo sapiens
  misc_RNA (1)...(19): siRNA sense strand
caguaaagcuugugucgga

SEQ ID NO: 2308281 - RNA, 19 nt, Homo sapiens
  misc_RNA (1)...(19): siRNA sense strand
agagaaaggcauagguacu

SEQ ID NO: 2308282 - RNA, 19 nt, Homo sapiens
  misc_RNA (1)...(19): siRNA sense strand
gcaagaaaguugauagcuc

SEQ ID NO: 2308283 - RNA, 19 nt, Homo sapiens
  misc_RNA (1)...(19): siRNA sense strand
acgcgaacagggaagaaua

SEQ ID NO: 2308284 - RNA, 19 nt, Homo sapiens
  misc_RNA (1)...(19): siRNA sense strand
uggagaugaagaagagaau

SEQ ID NO: 2308285 - RNA, 19 nt, Homo sapiens
  misc_RNA (1)...(19): siRNA sense strand
caccaauugacgagaagaa

SEQ ID NO: 2308286 - RNA, 19 nt, Homo sapiens
  misc_RNA (1)...(19): siRNA sense strand
guggagaugaagaagagaa

SEQ ID NO: 2308287 - RNA, 19 nt, Homo sapiens
  misc_RNA (1)...(19): siRNA sense strand
cgggaacaguggcaggaau

SEQ ID NO: 2308288 - RNA, 19 nt, Homo sapiens
  misc_RNA (1)...(19): siRNA sense strand
agaagagaaugaugagcca

SEQ ID NO: 2308289 - RNA, 19 nt, Homo sapiens
  misc_RNA (1)...(19): siRNA sense strand
aggcauagguacucugcau

SEQ ID NO: 2308290 - RNA, 19 nt, Homo sapiens
  misc_RNA (1)...(19): siRNA sense strand
ccaaaguaguaguuaccga

SEQ ID NO: 2308291 - RNA, 19 nt, Homo sapiens
  misc_RNA (1)...(19): siRNA sense strand
gagccauaaagaaagcaaa

SEQ ID NO: 2308292 - RNA, 19 nt, Homo sapiens
  misc_RNA (1)...(19): siRNA sense strand
ggauagugaagcacgugaa

SEQ ID NO: 2308293 - RNA, 19 nt, Homo sapiens
  misc_RNA (1)...(19): siRNA sense strand
cuaacaaaguggcagcuga

SEQ ID NO: 2308294 - RNA, 19 nt, Homo sapiens
  misc_RNA (1)...(19): siRNA sense strand
agaaggugacaguggugaa

SEQ ID NO: 2308295 - RNA, 19 nt, Homo sapiens
  misc_RNA (1)...(19): siRNA sense strand
augaagaagagaaugauga

SEQ ID NO: 2308296 - RNA, 19 nt, Homo sapiens
  misc_RNA (1)...(19): siRNA sense strand
cgcgaacagggaagaauaa

SEQ ID NO: 2308297 - RNA, 19 nt, Homo sapiens
  misc_RNA (1)...(19): siRNA sense strand
ggugguaccuucuggagga

SEQ ID NO: 2308298 - RNA, 19 nt, Homo sapiens
  misc_RNA (1)...(19): siRNA sense strand
uagcaaacauugaacagca

SEQ ID NO: 2308299 - RNA, 19 nt, Homo sapiens
  misc_RNA (1)...(19): siRNA sense strand
aguuuaaagagaaaggcau

SEQ ID NO: 2308300 - RNA, 19 nt, Homo sapiens
  misc_RNA (1)...(19): siRNA sense strand
ccauguugauucggguaaa

SEQ ID NO: 2308301 - RNA, 19 nt, Homo sapiens
  misc_RNA (1)...(19): siRNA sense strand
caagaaaguugauagcucu

SEQ ID NO: 2308302 - RNA, 19 nt, Homo sapiens
  misc_RNA (1)...(19): siRNA sense strand
ccucauuuaauuucggcaa

SEQ ID NO: 2308303 - RNA, 19 nt, Homo sapiens
  misc_RNA (1)...(19): siRNA sense strand
ucggaaaugccuaucacaa

SEQ ID NO: 2308304 - RNA, 19 nt, Homo sapiens
  misc_RNA (1)...(19): siRNA sense strand
agcaaacauugaacagcaa

SEQ ID NO: 2308305 - RNA, 19 nt, Homo sapiens
  misc_RNA (1)...(19): siRNA sense strand
cauuuaaaaccuacagcaa

SEQ ID NO: 2308306 - RNA, 19 nt, Homo sapiens
  misc_RNA (1)...(19): siRNA sense strand
cuaaaccauuggagggcca

SEQ ID NO: 2308307 - RNA, 19 nt, Homo sapiens
  misc_RNA (1)...(19): siRNA sense strand
aagaaagcaaagcgcagaa

SEQ ID NO: 2308308 - RNA, 19 nt, Homo sapiens
  misc_RNA (1)...(19): siRNA sense strand
caaaguaguaguuaccgaa

SEQ ID NO: 2308309 - RNA, 19 nt, Homo sapiens
  misc_RNA (1)...(19): siRNA sense strand
ccgaaguaaaagaagaaga

SEQ ID NO: 2308310 - RNA, 19 nt, Homo sapiens
  misc_RNA (1)...(19): siRNA sense strand
uagugaagcacgugaauac

SEQ ID NO: 2308311 - RNA, 19 nt, Homo sapiens
  misc_RNA (1)...(19): siRNA sense strand
cugaaagugaaucuaacaa

SEQ ID NO: 2308312 - RNA, 19 nt, Homo sapiens
  misc_RNA (1)...(19): siRNA sense strand
gaguuuaaagagaaaggca

SEQ ID NO: 2308313 - RNA, 19 nt, Homo sapiens
  misc_RNA (1)...(19): siRNA sense strand
cagacgaguugcacaaaau

SEQ ID NO: 2308314 - RNA, 19 nt, Homo sapiens
  misc_RNA (1)...(19): siRNA sense strand
gugcaaaggcagcggcaga

SEQ ID NO: 2308315 - RNA, 19 nt, Homo sapiens
  misc_RNA (1)...(19): siRNA sense strand
caguaaagcuugugucgga

SEQ ID NO: 2308316 - RNA, 19 nt, Homo sapiens
  misc_RNA (1)...(19): siRNA sense strand
agagaaaggcauagguacu

SEQ ID NO: 2308317 - RNA, 19 nt, Homo sapiens
  misc_RNA (1)...(19): siRNA sense strand
gcaagaaaguugauagcuc

SEQ ID NO: 2308318 - RNA, 19 nt, Homo sapiens
  misc_RNA (1)...(19): siRNA sense strand
acgcgaacagggaagaaua

SEQ ID NO: 2308319 - RNA, 19 nt, Homo sapiens
  misc_RNA (1)...(19): siRNA sense strand
uggagaugaagaagagaau

SEQ ID NO: 2308320 - RNA, 19 nt, Homo sapiens
  misc_RNA (1)...(19): siRNA sense strand
caccaauugacgagaagaa

SEQ ID NO: 2308321 - RNA, 19 nt, Homo sapiens
  misc_RNA (1)...(19): siRNA sense strand
guggagaugaagaagagaa

SEQ ID NO: 2308322 - RNA, 19 nt, Homo sapiens
  misc_RNA (1)...(19): siRNA sense strand
cgggaacaguggcaggaau

SEQ ID NO: 2308323 - RNA, 19 nt, Homo sapiens
  misc_RNA (1)...(19): siRNA sense strand
agaagagaaugaugagcca

SEQ ID NO: 2308324 - RNA, 19 nt, Homo sapiens
  misc_RNA (1)...(19): siRNA sense strand
aggcauagguacucugcau

SEQ ID NO: 2308325 - RNA, 19 nt, Homo sapiens
  misc_RNA (1)...(19): siRNA sense strand
ccaaaguaguaguuaccga

SEQ ID NO: 2308326 - RNA, 19 nt, Homo sapiens
  misc_RNA (1)...(19): siRNA sense strand
gagccauaaagaaagcaaa

SEQ ID NO: 2308327 - RNA, 19 nt, Homo sapiens
  misc_RNA (1)...(19): siRNA sense strand
ggauagugaagcacgugaa

SEQ ID NO: 2308328 - RNA, 19 nt, Homo sapiens
  misc_RNA (1)...(19): siRNA sense strand
cuaacaaaguggcagcuga

SEQ ID NO: 2308329 - RNA, 19 nt, Homo sapiens
  misc_RNA (1)...(19): siRNA sense strand
agaaggugacaguggugaa

SEQ ID NO: 2308330 - RNA, 19 nt, Homo sapiens
  misc_RNA (1)...(19): siRNA sense strand
augaagaagagaaugauga

SEQ ID NO: 2308331 - RNA, 19 nt, Homo sapiens
  misc_RNA (1)...(19): siRNA sense strand
cgcgaacagggaagaauaa

SEQ ID NO: 2308332 - RNA, 19 nt, Homo sapiens
  misc_RNA (1)...(19): siRNA sense strand
ggugguaccuucuggagga

SEQ ID NO: 2308333 - RNA, 19 nt, Homo sapiens
  misc_RNA (1)...(19): siRNA sense strand
uagcaaacauugaacagca

SEQ ID NO: 2308334 - RNA, 19 nt, Homo sapiens
  misc_RNA (1)...(19): siRNA sense strand
aguuuaaagagaaaggcau

SEQ ID NO: 2308335 - RNA, 19 nt, Homo sapiens
  misc_RNA (1)...(19): siRNA sense strand
ccauguugauucggguaaa

SEQ ID NO: 2308336 - RNA, 19 nt, Homo sapiens
  misc_RNA (1)...(19): siRNA sense strand
caagaaaguugauagcucu

SEQ ID NO: 2308337 - RNA, 19 nt, Homo sapiens
  misc_RNA (1)...(19): siRNA sense strand
ccucauuuaauuucggcaa

SEQ ID NO: 2308338 - RNA, 19 nt, Homo sapiens
  misc_RNA (1)...(19): siRNA sense strand
ucggaaaugccuaucacaa

SEQ ID NO: 2308339 - RNA, 19 nt, Homo sapiens
  misc_RNA (1)...(19): siRNA sense strand
agcaaacauugaacagcaa

SEQ ID NO: 2308340 - RNA, 19 nt, Homo sapiens
  misc_RNA (1)...(19): siRNA sense strand
cauuuaaaaccuacagcaa

SEQ ID NO: 2308341 - RNA, 19 nt, Homo sapiens
  misc_RNA (1)...(19): siRNA sense strand
cuaaaccauuggagggcca

SEQ ID NO: 2308342 - RNA, 19 nt, Homo sapiens
  misc_RNA (1)...(19): siRNA sense strand
aagaaagcaaagcgcagaa

SEQ ID NO: 2308343 - RNA, 19 nt, Homo sapiens
  misc_RNA (1)...(19): siRNA sense strand
caaaguaguaguuaccgaa

SEQ ID NO: 2308344 - RNA, 19 nt, Homo sapiens
  misc_RNA (1)...(19): siRNA sense strand
ccgaaguaaaagaagaaga

SEQ ID NO: 2308345 - RNA, 19 nt, Homo sapiens
  misc_RNA (1)...(19): siRNA sense strand
uagugaagcacgugaauac

SEQ ID NO: 2308346 - RNA, 19 nt, Homo sapiens
  misc_RNA (1)...(19): siRNA sense strand
cugaaagugaaucuaacaa

SEQ ID NO: 2308347 - RNA, 19 nt, Homo sapiens
  misc_RNA (1)...(19): siRNA sense strand
gaguuuaaagagaaaggca

SEQ ID NO: 2308348 - RNA, 19 nt, Homo sapiens
  misc_RNA (1)...(19): siRNA sense strand
cagacgaguugcacaaaau

SEQ ID NO: 2308349 - RNA, 19 nt, Homo sapiens
  misc_RNA (1)...(19): siRNA sense strand
aaguaggaauggagauaaa

SEQ ID NO: 2308350 - RNA, 19 nt, Homo sapiens
  misc_RNA (1)...(19): siRNA sense strand
guugaugaccugaaggaaa

SEQ ID NO: 2308351 - RNA, 19 nt, Homo sapiens
  misc_RNA (1)...(19): siRNA sense strand
gguuguaaagcguggaauu

SEQ ID NO: 2308352 - RNA, 19 nt, Homo sapiens
  misc_RNA (1)...(19): siRNA sense strand
aagaagaauuggagaaggu

SEQ ID NO: 2308353 - RNA, 19 nt, Homo sapiens
  misc_RNA (1)...(19): siRNA sense strand
agaucaaagaagaagaaga

SEQ ID NO: 2308354 - RNA, 19 nt, Homo sapiens
  misc_RNA (1)...(19): siRNA sense strand
uuuccaaggaugaggacua

SEQ ID NO: 2308355 - RNA, 19 nt, Homo sapiens
  misc_RNA (1)...(19): siRNA sense strand
gcagaugccugaagagcca

SEQ ID NO: 2308356 - RNA, 19 nt, Homo sapiens
  misc_RNA (1)...(19): siRNA sense strand
ugauaggauagaugagaau

SEQ ID NO: 2308357 - RNA, 19 nt, Homo sapiens
  misc_RNA (1)...(19): siRNA sense strand
gcccagaagacuaaagaca

SEQ ID NO: 2308358 - RNA, 19 nt, Homo sapiens
  misc_RNA (1)...(19): siRNA sense strand
ugcaagaagaauuggagaa

SEQ ID NO: 2308359 - RNA, 19 nt, Homo sapiens
  misc_RNA (1)...(19): siRNA sense strand
caaucagaucaaagaagaa

SEQ ID NO: 2308360 - RNA, 19 nt, Homo sapiens
  misc_RNA (1)...(19): siRNA sense strand
acugcaaggagguagaaua

SEQ ID NO: 2308361 - RNA, 19 nt, Homo sapiens
  misc_RNA (1)...(19): siRNA sense strand
cacuuaugcuauugggaau

SEQ ID NO: 2308362 - RNA, 19 nt, Homo sapiens
  misc_RNA (1)...(19): siRNA sense strand
cccagaaagaagauagcua

SEQ ID NO: 2308363 - RNA, 19 nt, Homo sapiens
  misc_RNA (1)...(19): siRNA sense strand
cagaauccaaugagccaaa

SEQ ID NO: 2308364 - RNA, 19 nt, Homo sapiens
  misc_RNA (1)...(19): siRNA sense strand
ugggaauauuggacaguca

SEQ ID NO: 2308365 - RNA, 19 nt, Homo sapiens
  misc_RNA (1)...(19): siRNA sense strand
agaaaagguuguugaaagu

SEQ ID NO: 2308366 - RNA, 19 nt, Homo sapiens
  misc_RNA (1)...(19): siRNA sense strand
augcacaauccaaagguua

SEQ ID NO: 2308367 - RNA, 19 nt, Homo sapiens
  misc_RNA (1)...(19): siRNA sense strand
cuaauggaguugugaagca

SEQ ID NO: 2308368 - RNA, 19 nt, Homo sapiens
  misc_RNA (1)...(19): siRNA sense strand
agaacauaaagcagccaaa

SEQ ID NO: 2308369 - RNA, 19 nt, Homo sapiens
  misc_RNA (1)...(19): siRNA sense strand
cuucugugugugugaauua

SEQ ID NO: 2308370 - RNA, 19 nt, Homo sapiens
  misc_RNA (1)...(19): siRNA sense strand
uacaaaaggacaagagcaa

SEQ ID NO: 2308371 - RNA, 19 nt, Homo sapiens
  misc_RNA (1)...(19): siRNA sense strand
cagaaaagguuguugaaag

SEQ ID NO: 2308372 - RNA, 19 nt, Homo sapiens
  misc_RNA (1)...(19): siRNA sense strand
uagcuaacuuuguagaaca

SEQ ID NO: 2308373 - RNA, 19 nt, Homo sapiens
  misc_RNA (1)...(19): siRNA sense strand
uugauaggauagaugagaa

SEQ ID NO: 2308374 - RNA, 19 nt, Homo sapiens
  misc_RNA (1)...(19): siRNA sense strand
agaagaagaagaaaagcaa

SEQ ID NO: 2308375 - RNA, 19 nt, Homo sapiens
  misc_RNA (1)...(19): siRNA sense strand
agauuuugaaccagagaua

SEQ ID NO: 2308376 - RNA, 19 nt, Homo sapiens
  misc_RNA (1)...(19): siRNA sense strand
cgcuugauccaguggcaua

SEQ ID NO: 2308377 - RNA, 19 nt, Homo sapiens
  misc_RNA (1)...(19): siRNA sense strand
uagaauugaaagagagucu

SEQ ID NO: 2308378 - RNA, 19 nt, Homo sapiens
  misc_RNA (1)...(19): siRNA sense strand
ggaagaggagccagccgaa

SEQ ID NO: 2308379 - RNA, 19 nt, Homo sapiens
  misc_RNA (1)...(19): siRNA sense strand
cagacaaggcccaggguug

SEQ ID NO: 2308380 - RNA, 19 nt, Homo sapiens
  misc_RNA (1)...(19): siRNA sense strand
cugauuugaagcaggguuu

SEQ ID NO: 2308381 - RNA, 19 nt, Homo sapiens
  misc_RNA (1)...(19): siRNA sense strand
ugaugauaaccuugaugaa

SEQ ID NO: 2308382 - RNA, 19 nt, Homo sapiens
  misc_RNA (1)...(19): siRNA sense strand
aggaaaagauugauaugga

SEQ ID NO: 2308383 - RNA, 19 nt, Homo sapiens
  misc_RNA (1)...(19): siRNA sense strand
uguugaaaguccagauuuu

SEQ ID NO: 2308384 - RNA, 19 nt, Homo sapiens
  misc_RNA (1)...(19): siRNA sense strand
augaggacuacuuaggaaa

SEQ ID NO: 2308385 - RNA, 19 nt, Homo sapiens
  misc_RNA (1)...(19): siRNA sense strand
cagugauccuuuugggaau

SEQ ID NO: 2308386 - RNA, 19 nt, Homo sapiens
  misc_RNA (1)...(19): siRNA sense strand
guucauuggcauaguucuu

SEQ ID NO: 2308387 - RNA, 19 nt, Homo sapiens
  misc_RNA (1)...(19): siRNA sense strand
agcaaguaguugaagcaga

SEQ ID NO: 2308388 - RNA, 19 nt, Homo sapiens
  misc_RNA (1)...(19): siRNA sense strand
gcguggaauugaugauaac

SEQ ID NO: 2308389 - RNA, 19 nt, Homo sapiens
  misc_RNA (1)...(19): siRNA sense strand
gaaaguaagcagaguggag

SEQ ID NO: 2308390 - RNA, 19 nt, Homo sapiens
  misc_RNA (1)...(19): siRNA sense strand
cuucaaaggaggugucucu

SEQ ID NO: 2308391 - RNA, 19 nt, Homo sapiens
  misc_RNA (1)...(19): siRNA sense strand
ucucacuauucgaggaguu

SEQ ID NO: 2308392 - RNA, 19 nt, Homo sapiens
  misc_RNA (1)...(19): siRNA sense strand
acuuaggaaagguuggaau

SEQ ID NO: 2308393 - RNA, 19 nt, Homo sapiens
  misc_RNA (1)...(19): siRNA sense strand
gcaccacgcaagauggaca

SEQ ID NO: 2308394 - RNA, 19 nt, Homo sapiens
  misc_RNA (1)...(19): siRNA sense strand
gcuuauguguacaguugau

SEQ ID NO: 2308395 - RNA, 19 nt, Homo sapiens
  misc_RNA (1)...(19): siRNA sense strand
aagaaaagcaaguaguuga

SEQ ID NO: 2308396 - RNA, 19 nt, Homo sapiens
  misc_RNA (1)...(19): siRNA sense strand
caaggagguagaauacaaa

SEQ ID NO: 2308397 - RNA, 19 nt, Homo sapiens
  misc_RNA (1)...(19): siRNA sense strand
aaaaguaggaauggagaua

SEQ ID NO: 2308398 - RNA, 19 nt, Homo sapiens
  misc_RNA (1)...(19): siRNA sense strand
ucagaucaaagaagaagaa

SEQ ID NO: 2308399 - RNA, 19 nt, Homo sapiens
  misc_RNA (1)...(19): siRNA sense strand
ccuucaacauccuggacaa

SEQ ID NO: 2308400 - RNA, 19 nt, Homo sapiens
  misc_RNA (1)...(19): siRNA sense strand
gcugagaucuaccggcaga

SEQ ID NO: 2308401 - RNA, 19 nt, Homo sapiens
  misc_RNA (1)...(19): siRNA sense strand
cucaaggaggcgagaguga

SEQ ID NO: 2308402 - RNA, 19 nt, Homo sapiens
  misc_RNA (1)...(19): siRNA sense strand
ccuucaacauccuggacaa

SEQ ID NO: 2308403 - RNA, 19 nt, Homo sapiens
  misc_RNA (1)...(19): siRNA sense strand
gcugagaucuaccggcaga

SEQ ID NO: 2308404 - RNA, 19 nt, Homo sapiens
  misc_RNA (1)...(19): siRNA sense strand
cucaaggaggcgagaguga

SEQ ID NO: 2308405 - RNA, 19 nt, Homo sapiens
  misc_RNA (1)...(19): siRNA sense strand
ccuucaacauccuggacaa

SEQ ID NO: 2308406 - RNA, 19 nt, Homo sapiens
  misc_RNA (1)...(19): siRNA sense strand
gcugagaucuaccggcaga

SEQ ID NO: 2308407 - RNA, 19 nt, Homo sapiens
  misc_RNA (1)...(19): siRNA sense strand
cucaaggaggcgagaguga

SEQ ID NO: 2308408 - RNA, 19 nt, Homo sapiens
  misc_RNA (1)...(19): siRNA sense strand
gcugaaaagaacagauaaa

SEQ ID NO: 2308409 - RNA, 19 nt, Homo sapiens
  misc_RNA (1)...(19): siRNA sense strand
aggcauuaagagaugaaua

SEQ ID NO: 2308410 - RNA, 19 nt, Homo sapiens
  misc_RNA (1)...(19): siRNA sense strand
gcuuguagggaaaggaaaa

SEQ ID NO: 2308411 - RNA, 19 nt, Homo sapiens
  misc_RNA (1)...(19): siRNA sense strand
ccgaacauacagcaagaaa

SEQ ID NO: 2308412 - RNA, 19 nt, Homo sapiens
  misc_RNA (1)...(19): siRNA sense strand
cauaaagaucaucagcaaa

SEQ ID NO: 2308413 - RNA, 19 nt, Homo sapiens
  misc_RNA (1)...(19): siRNA sense strand
gucacuaagcagaaauaaa

SEQ ID NO: 2308414 - RNA, 19 nt, Homo sapiens
  misc_RNA (1)...(19): siRNA sense strand
auguaagaaaguagccaua

SEQ ID NO: 2308415 - RNA, 19 nt, Homo sapiens
  misc_RNA (1)...(19): siRNA sense strand
acaaagugguggggaauaa

SEQ ID NO: 2308416 - RNA, 19 nt, Homo sapiens
  misc_RNA (1)...(19): siRNA sense strand
uugacaaagugguggggaa

SEQ ID NO: 2308417 - RNA, 19 nt, Homo sapiens
  misc_RNA (1)...(19): siRNA sense strand
ccucacagucccagggcau

SEQ ID NO: 2308418 - RNA, 19 nt, Homo sapiens
  misc_RNA (1)...(19): siRNA sense strand
accaagaaccugaggacca

SEQ ID NO: 2308419 - RNA, 19 nt, Homo sapiens
  misc_RNA (1)...(19): siRNA sense strand
gugccuguggagagguaaa

SEQ ID NO: 2308420 - RNA, 19 nt, Homo sapiens
  misc_RNA (1)...(19): siRNA sense strand
cugcuggaguuuaggaguu

SEQ ID NO: 2308421 - RNA, 19 nt, Homo sapiens
  misc_RNA (1)...(19): siRNA sense strand
caaucuugaaugugugaau

SEQ ID NO: 2308422 - RNA, 19 nt, Homo sapiens
  misc_RNA (1)...(19): siRNA sense strand
agaagaucacaguggcaau

SEQ ID NO: 2308423 - RNA, 19 nt, Homo sapiens
  misc_RNA (1)...(19): siRNA sense strand
uguugggacugcuggguau

SEQ ID NO: 2308424 - RNA, 19 nt, Homo sapiens
  misc_RNA (1)...(19): siRNA sense strand
agaaaguagccauaaagau

SEQ ID NO: 2308425 - RNA, 19 nt, Homo sapiens
  misc_RNA (1)...(19): siRNA sense strand
ucagaucaccaguggaaaa

SEQ ID NO: 2308426 - RNA, 19 nt, Homo sapiens
  misc_RNA (1)...(19): siRNA sense strand
gguaguggauccaaaggca

SEQ ID NO: 2308427 - RNA, 19 nt, Homo sapiens
  misc_RNA (1)...(19): siRNA sense strand
aaaugaauccacagcucua

SEQ ID NO: 2308428 - RNA, 19 nt, Homo sapiens
  misc_RNA (1)...(19): siRNA sense strand
ggaccaagaaccugaggac

SEQ ID NO: 2308429 - RNA, 19 nt, Homo sapiens
  misc_RNA (1)...(19): siRNA sense strand
cagggaaguggguccuaaa

SEQ ID NO: 2308430 - RNA, 19 nt, Homo sapiens
  misc_RNA (1)...(19): siRNA sense strand
gucaagaaguuguugguag

SEQ ID NO: 2308431 - RNA, 19 nt, Homo sapiens
  misc_RNA (1)...(19): siRNA sense strand
gcugaaaagaacagauaaa

SEQ ID NO: 2308432 - RNA, 19 nt, Homo sapiens
  misc_RNA (1)...(19): siRNA sense strand
aggcauuaagagaugaaua

SEQ ID NO: 2308433 - RNA, 19 nt, Homo sapiens
  misc_RNA (1)...(19): siRNA sense strand
gcuuguagggaaaggaaaa

SEQ ID NO: 2308434 - RNA, 19 nt, Homo sapiens
  misc_RNA (1)...(19): siRNA sense strand
ccgaacauacagcaagaaa

SEQ ID NO: 2308435 - RNA, 19 nt, Homo sapiens
  misc_RNA (1)...(19): siRNA sense strand
cauaaagaucaucagcaaa

SEQ ID NO: 2308436 - RNA, 19 nt, Homo sapiens
  misc_RNA (1)...(19): siRNA sense strand
gucacuaagcagaaauaaa

SEQ ID NO: 2308437 - RNA, 19 nt, Homo sapiens
  misc_RNA (1)...(19): siRNA sense strand
auguaagaaaguagccaua

SEQ ID NO: 2308438 - RNA, 19 nt, Homo sapiens
  misc_RNA (1)...(19): siRNA sense strand
acaaagugguggggaauaa

SEQ ID NO: 2308439 - RNA, 19 nt, Homo sapiens
  misc_RNA (1)...(19): siRNA sense strand
uugacaaagugguggggaa

SEQ ID NO: 2308440 - RNA, 19 nt, Homo sapiens
  misc_RNA (1)...(19): siRNA sense strand
ccucacagucccagggcau

SEQ ID NO: 2308441 - RNA, 19 nt, Homo sapiens
  misc_RNA (1)...(19): siRNA sense strand
accaagaaccugaggacca

SEQ ID NO: 2308442 - RNA, 19 nt, Homo sapiens
  misc_RNA (1)...(19): siRNA sense strand
gugccuguggagagguaaa

SEQ ID NO: 2308443 - RNA, 19 nt, Homo sapiens
  misc_RNA (1)...(19): siRNA sense strand
cugcuggaguuuaggaguu

SEQ ID NO: 2308444 - RNA, 19 nt, Homo sapiens
  misc_RNA (1)...(19): siRNA sense strand
caaucuugaaugugugaau

SEQ ID NO: 2308445 - RNA, 19 nt, Homo sapiens
  misc_RNA (1)...(19): siRNA sense strand
agaagaucacaguggcaau

SEQ ID NO: 2308446 - RNA, 19 nt, Homo sapiens
  misc_RNA (1)...(19): siRNA sense strand
uguugggacugcuggguau

SEQ ID NO: 2308447 - RNA, 19 nt, Homo sapiens
  misc_RNA (1)...(19): siRNA sense strand
agaaaguagccauaaagau

SEQ ID NO: 2308448 - RNA, 19 nt, Homo sapiens
  misc_RNA (1)...(19): siRNA sense strand
ucagaucaccaguggaaaa

SEQ ID NO: 2308449 - RNA, 19 nt, Homo sapiens
  misc_RNA (1)...(19): siRNA sense strand
gguaguggauccaaaggca

SEQ ID NO: 2308450 - RNA, 19 nt, Homo sapiens
  misc_RNA (1)...(19): siRNA sense strand
aaaugaauccacagcucua

SEQ ID NO: 2308451 - RNA, 19 nt, Homo sapiens
  misc_RNA (1)...(19): siRNA sense strand
ggaccaagaaccugaggac

SEQ ID NO: 2308452 - RNA, 19 nt, Homo sapiens
  misc_RNA (1)...(19): siRNA sense strand
cagggaaguggguccuaaa

SEQ ID NO: 2308453 - RNA, 19 nt, Homo sapiens
  misc_RNA (1)...(19): siRNA sense strand
gucaagaaguuguugguag

SEQ ID NO: 2308454 - RNA, 19 nt, Homo sapiens
  misc_RNA (1)...(19): siRNA sense strand
ggaaauucuacaagggcaa

SEQ ID NO: 2308455 - RNA, 19 nt, Homo sapiens
  misc_RNA (1)...(19): siRNA sense strand
ccaagaagcagcagcggaa

SEQ ID NO: 2308456 - RNA, 19 nt, Homo sapiens
  misc_RNA (1)...(19): siRNA sense strand
ggaagaagaaggaggagcu

SEQ ID NO: 2308457 - RNA, 19 nt, Homo sapiens
  misc_RNA (1)...(19): siRNA sense strand
aaccagacucagaaagaaa

SEQ ID NO: 2308458 - RNA, 19 nt, Homo sapiens
  misc_RNA (1)...(19): siRNA sense strand
ucuacaagggcaagaagua

SEQ ID NO: 2308459 - RNA, 19 nt, Homo sapiens
  misc_RNA (1)...(19): siRNA sense strand
gaggagaaccugaagacca

SEQ ID NO: 2308460 - RNA, 19 nt, Homo sapiens
  misc_RNA (1)...(19): siRNA sense strand
gcgggaagaagaaggagga

SEQ ID NO: 2308461 - RNA, 19 nt, Homo sapiens
  misc_RNA (1)...(19): siRNA sense strand
aggaaauucuacaagggca

SEQ ID NO: 2308462 - RNA, 19 nt, Homo sapiens
  misc_RNA (1)...(19): siRNA sense strand
ccuccaagcucucuaagau

SEQ ID NO: 2308463 - RNA, 19 nt, Homo sapiens
  misc_RNA (1)...(19): siRNA sense strand
agaaagaaaaccucaggaa

SEQ ID NO: 2308464 - RNA, 19 nt, Homo sapiens
  misc_RNA (1)...(19): siRNA sense strand
aagaaaaccucaggaaauu

SEQ ID NO: 2308465 - RNA, 19 nt, Homo sapiens
  misc_RNA (1)...(19): siRNA sense strand
ccuaagaagacacgugcca

SEQ ID NO: 2308466 - RNA, 19 nt, Homo sapiens
  misc_RNA (1)...(19): siRNA sense strand
ugaaacagcuggacgaccu

SEQ ID NO: 2308467 - RNA, 19 nt, Homo sapiens
  misc_RNA (1)...(19): siRNA sense strand
ugaugaagauaaagcccaa

SEQ ID NO: 2308468 - RNA, 19 nt, Homo sapiens
  misc_RNA (1)...(19): siRNA sense strand
cgucaaaggaaaacuguaa

SEQ ID NO: 2308469 - RNA, 19 nt, Homo sapiens
  misc_RNA (1)...(19): siRNA sense strand
cuucauggaaagaguggua

SEQ ID NO: 2308470 - RNA, 19 nt, Homo sapiens
  misc_RNA (1)...(19): siRNA sense strand
agaauaaacacaaagcaca

SEQ ID NO: 2308471 - RNA, 19 nt, Homo sapiens
  misc_RNA (1)...(19): siRNA sense strand
aggaaaacuguaauggaaa

SEQ ID NO: 2308472 - RNA, 19 nt, Homo sapiens
  misc_RNA (1)...(19): siRNA sense strand
gcuuaguaaaggucaaaga

SEQ ID NO: 2308473 - RNA, 19 nt, Homo sapiens
  misc_RNA (1)...(19): siRNA sense strand
gccuauacauccuugggaa

SEQ ID NO: 2308474 - RNA, 19 nt, Homo sapiens
  misc_RNA (1)...(19): siRNA sense strand
aggaacugccagaagauuu

SEQ ID NO: 2308475 - RNA, 19 nt, Homo sapiens
  misc_RNA (1)...(19): siRNA sense strand
gagaauaaacacaaagcac

SEQ ID NO: 2308476 - RNA, 19 nt, Homo sapiens
  misc_RNA (1)...(19): siRNA sense strand
aaagaugaaccauggccua

SEQ ID NO: 2308477 - RNA, 19 nt, Homo sapiens
  misc_RNA (1)...(19): siRNA sense strand
ggaaacauauacaggacag

SEQ ID NO: 2308478 - RNA, 19 nt, Homo sapiens
  misc_RNA (1)...(19): siRNA sense strand
acugaaaguguggagaaua

SEQ ID NO: 2308479 - RNA, 19 nt, Homo sapiens
  misc_RNA (1)...(19): siRNA sense strand
aguaaaggucaaagauucu

SEQ ID NO: 2308480 - RNA, 19 nt, Homo sapiens
  misc_RNA (1)...(19): siRNA sense strand
acgcauggucaaacgaaaa

SEQ ID NO: 2308481 - RNA, 19 nt, Homo sapiens
  misc_RNA (1)...(19): siRNA sense strand
augaagaggaacugccaga

SEQ ID NO: 2308482 - RNA, 19 nt, Homo sapiens
  misc_RNA (1)...(19): siRNA sense strand
aacuaaaaugccuggaaaa

SEQ ID NO: 2308483 - RNA, 19 nt, Homo sapiens
  misc_RNA (1)...(19): siRNA sense strand
gggaaacauauacaggaca

SEQ ID NO: 2308484 - RNA, 19 nt, Homo sapiens
  misc_RNA (1)...(19): siRNA sense strand
ggugauauuggcagagucu

SEQ ID NO: 2308485 - RNA, 19 nt, Homo sapiens
  misc_RNA (1)...(19): siRNA sense strand
aacacaaagcacaacauaa

SEQ ID NO: 2308486 - RNA, 19 nt, Homo sapiens
  misc_RNA (1)...(19): siRNA sense strand
augucaauguccaggauca

SEQ ID NO: 2308487 - RNA, 19 nt, Homo sapiens
  misc_RNA (1)...(19): siRNA sense strand
ugggaagggaugugagaug

SEQ ID NO: 2308488 - RNA, 19 nt, Homo sapiens
  misc_RNA (1)...(19): siRNA sense strand
aggaagaagaggaggaaga

SEQ ID NO: 2308489 - RNA, 19 nt, Homo sapiens
  misc_RNA (1)...(19): siRNA sense strand
agucaaagcaacagaaaca

SEQ ID NO: 2308490 - RNA, 19 nt, Homo sapiens
  misc_RNA (1)...(19): siRNA sense strand
ccacaguagcagaaauuaa

SEQ ID NO: 2308491 - RNA, 19 nt, Homo sapiens
  misc_RNA (1)...(19): siRNA sense strand
caguaaaggaagaugaaga

SEQ ID NO: 2308492 - RNA, 19 nt, Homo sapiens
  misc_RNA (1)...(19): siRNA sense strand
guguguacgcugaaagaua

SEQ ID NO: 2308493 - RNA, 19 nt, Homo sapiens
  misc_RNA (1)...(19): siRNA sense strand
aagaagaagaugaugacua

SEQ ID NO: 2308494 - RNA, 19 nt, Homo sapiens
  misc_RNA (1)...(19): siRNA sense strand
cugaagaagaagaaaccaa

SEQ ID NO: 2308495 - RNA, 19 nt, Homo sapiens
  misc_RNA (1)...(19): siRNA sense strand
ggacaaucuuagacggguu

SEQ ID NO: 2308496 - RNA, 19 nt, Homo sapiens
  misc_RNA (1)...(19): siRNA sense strand
aguaaaggaagaugaagaa

SEQ ID NO: 2308497 - RNA, 19 nt, Homo sapiens
  misc_RNA (1)...(19): siRNA sense strand
aggaaggagcagacauuaa

SEQ ID NO: 2308498 - RNA, 19 nt, Homo sapiens
  misc_RNA (1)...(19): siRNA sense strand
aggaagaagaagaugauga

SEQ ID NO: 2308499 - RNA, 19 nt, Homo sapiens
  misc_RNA (1)...(19): siRNA sense strand
ugaagauagcuuugaggaa

SEQ ID NO: 2308500 - RNA, 19 nt, Homo sapiens
  misc_RNA (1)...(19): siRNA sense strand
guuaaguugacaaggcaaa

SEQ ID NO: 2308501 - RNA, 19 nt, Homo sapiens
  misc_RNA (1)...(19): siRNA sense strand
caaauggagucguugggaa

SEQ ID NO: 2308502 - RNA, 19 nt, Homo sapiens
  misc_RNA (1)...(19): siRNA sense strand
uggaaguucaugaggcuaa

SEQ ID NO: 2308503 - RNA, 19 nt, Homo sapiens
  misc_RNA (1)...(19): siRNA sense strand
gaugaagagucccggaaaa

SEQ ID NO: 2308504 - RNA, 19 nt, Homo sapiens
  misc_RNA (1)...(19): siRNA sense strand
acuaacaagaacaggacaa

SEQ ID NO: 2308505 - RNA, 19 nt, Homo sapiens
  misc_RNA (1)...(19): siRNA sense strand
agaugaugguagugacaga

SEQ ID NO: 2308506 - RNA, 19 nt, Homo sapiens
  misc_RNA (1)...(19): siRNA sense strand
cagaagaugggcaggguga

SEQ ID NO: 2308507 - RNA, 19 nt, Homo sapiens
  misc_RNA (1)...(19): siRNA sense strand
ugauagagagcaagaugaa

SEQ ID NO: 2308508 - RNA, 19 nt, Homo sapiens
  misc_RNA (1)...(19): siRNA sense strand
cauuaauauccaugccaua

SEQ ID NO: 2308509 - RNA, 19 nt, Homo sapiens
  misc_RNA (1)...(19): siRNA sense strand
acagcuaaucagagaaauu

SEQ ID NO: 2308510 - RNA, 19 nt, Homo sapiens
  misc_RNA (1)...(19): siRNA sense strand
aagauagcuuugaggaaga

SEQ ID NO: 2308511 - RNA, 19 nt, Homo sapiens
  misc_RNA (1)...(19): siRNA sense strand
aacaaagcauacagcgaaa

SEQ ID NO: 2308512 - RNA, 19 nt, Homo sapiens
  misc_RNA (1)...(19): siRNA sense strand
aaauggagucguugggaau

SEQ ID NO: 2308513 - RNA, 19 nt, Homo sapiens
  misc_RNA (1)...(19): siRNA sense strand
aagaagaaaccaauagaga

SEQ ID NO: 2308514 - RNA, 19 nt, Homo sapiens
  misc_RNA (1)...(19): siRNA sense strand
uugaagaagaucagcaauu

SEQ ID NO: 2308515 - RNA, 19 nt, Homo sapiens
  misc_RNA (1)...(19): siRNA sense strand
caacaaagcauacagcgaa

SEQ ID NO: 2308516 - RNA, 19 nt, Homo sapiens
  misc_RNA (1)...(19): siRNA sense strand
gggaugaagaccaggagga

SEQ ID NO: 2308517 - RNA, 19 nt, Homo sapiens
  misc_RNA (1)...(19): siRNA sense strand
gacaaaaggaggauggcaa

SEQ ID NO: 2308518 - RNA, 19 nt, Homo sapiens
  misc_RNA (1)...(19): siRNA sense strand
aguaaaggacccaagaaaa

SEQ ID NO: 2308519 - RNA, 19 nt, Homo sapiens
  misc_RNA (1)...(19): siRNA sense strand
ggugaaacuaacaagaaca

SEQ ID NO: 2308520 - RNA, 19 nt, Homo sapiens
  misc_RNA (1)...(19): siRNA sense strand
ucagauaagggcagugauu

SEQ ID NO: 2308521 - RNA, 19 nt, Homo sapiens
  misc_RNA (1)...(19): siRNA sense strand
acaaagaugaugaagcaga

SEQ ID NO: 2308522 - RNA, 19 nt, Homo sapiens
  misc_RNA (1)...(19): siRNA sense strand
ccuggaaauuaucaguaua

SEQ ID NO: 2308523 - RNA, 19 nt, Homo sapiens
  misc_RNA (1)...(19): siRNA sense strand
guucaugaggauagcaaaa

SEQ ID NO: 2308524 - RNA, 19 nt, Homo sapiens
  misc_RNA (1)...(19): siRNA sense strand
gcugaaagauacagaggag

SEQ ID NO: 2308525 - RNA, 19 nt, Homo sapiens
  misc_RNA (1)...(19): siRNA sense strand
aggaggaagaagaagauga

SEQ ID NO: 2308526 - RNA, 19 nt, Homo sapiens
  misc_RNA (1)...(19): siRNA sense strand
uauuaaaaccccagccaaa

SEQ ID NO: 2308527 - RNA, 19 nt, Homo sapiens
  misc_RNA (1)...(19): siRNA sense strand
agaucagaaugccgagcaa

SEQ ID NO: 2308528 - RNA, 19 nt, Homo sapiens
  misc_RNA (1)...(19): siRNA sense strand
aagaggaggaagaagaaga

SEQ ID NO: 2308529 - RNA, 19 nt, Homo sapiens
  misc_RNA (1)...(19): siRNA sense strand
caagcagaccaacggauaa

SEQ ID NO: 2308530 - RNA, 19 nt, Homo sapiens
  misc_RNA (1)...(19): siRNA sense strand
ccuugaagaagaucagcaa

SEQ ID NO: 2308531 - RNA, 19 nt, Homo sapiens
  misc_RNA (1)...(19): siRNA sense strand
uaguuacaguguugguuaa

SEQ ID NO: 2308532 - RNA, 19 nt, Homo sapiens
  misc_RNA (1)...(19): siRNA sense strand
uggcugaaguauuugaaaa

SEQ ID NO: 2308533 - RNA, 19 nt, Homo sapiens
  misc_RNA (1)...(19): siRNA sense strand
agaaacaaaagcaggcaaa

SEQ ID NO: 2308534 - RNA, 19 nt, Homo sapiens
  misc_RNA (1)...(19): siRNA sense strand
agauaagggcagugauucu

SEQ ID NO: 2308535 - RNA, 19 nt, Homo sapiens
  misc_RNA (1)...(19): siRNA sense strand
auagagagcaagaugaaaa

SEQ ID NO: 2308536 - RNA, 19 nt, Homo sapiens
  misc_RNA (1)...(19): siRNA sense strand
gguuaaguugacaaggcaa

SEQ ID NO: 2308537 - RNA, 19 nt, Homo sapiens
  misc_RNA (1)...(19): siRNA sense strand
ggaacagccagcagaagau

SEQ ID NO: 2308538 - RNA, 19 nt, Homo sapiens
  misc_RNA (1)...(19): siRNA sense strand
agaagaaaccaauagagau

SEQ ID NO: 2308539 - RNA, 19 nt, Homo sapiens
  misc_RNA (1)...(19): siRNA sense strand
aagcagaguggcaagaauu

SEQ ID NO: 2308540 - RNA, 19 nt, Homo sapiens
  misc_RNA (1)...(19): siRNA sense strand
augaagagguuauggcugu

SEQ ID NO: 2308541 - RNA, 19 nt, Homo sapiens
  misc_RNA (1)...(19): siRNA sense strand
gcucugugcuguugggcaa

SEQ ID NO: 2308542 - RNA, 19 nt, Homo sapiens
  misc_RNA (1)...(19): siRNA sense strand
guuuaaagaugguggucga

SEQ ID NO: 2308543 - RNA, 19 nt, Homo sapiens
  misc_RNA (1)...(19): siRNA sense strand
ccacuuacgaagaggccaa

SEQ ID NO: 2308544 - RNA, 19 nt, Homo sapiens
  misc_RNA (1)...(19): siRNA sense strand
cugcauacacgauggaaaa

SEQ ID NO: 2308545 - RNA, 19 nt, Homo sapiens
  misc_RNA (1)...(19): siRNA sense strand
agcagaagugggagcgaaa

SEQ ID NO: 2308546 - RNA, 19 nt, Homo sapiens
  misc_RNA (1)...(19): siRNA sense strand
aggguuggaucaagggcaa

SEQ ID NO: 2308547 - RNA, 19 nt, Homo sapiens
  misc_RNA (1)...(19): siRNA sense strand
aggaaagucucgaaggaag

SEQ ID NO: 2308548 - RNA, 19 nt, Homo sapiens
  misc_RNA (1)...(19): siRNA sense strand
gcaauuugguguaucgcuu

SEQ ID NO: 2308549 - RNA, 19 nt, Homo sapiens
  misc_RNA (1)...(19): siRNA sense strand
acucagggucuucaggaaa

SEQ ID NO: 2308550 - RNA, 19 nt, Homo sapiens
  misc_RNA (1)...(19): siRNA sense strand
cagcagaagugggagcgaa

SEQ ID NO: 2308551 - RNA, 19 nt, Homo sapiens
  misc_RNA (1)...(19): siRNA sense strand
acugcauacacgauggaaa

SEQ ID NO: 2308552 - RNA, 19 nt, Homo sapiens
  misc_RNA (1)...(19): siRNA sense strand
augaaacgcucuaugccaa

SEQ ID NO: 2308553 - RNA, 19 nt, Homo sapiens
  misc_RNA (1)...(19): siRNA sense strand
cagccaugcccgagcagau

SEQ ID NO: 2308554 - RNA, 19 nt, Homo sapiens
  misc_RNA (1)...(19): siRNA sense strand
cagagacgcaggugggcau

SEQ ID NO: 2308555 - RNA, 19 nt, Homo sapiens
  misc_RNA (1)...(19): siRNA sense strand
uggaagagacagcagcaga

SEQ ID NO: 2308556 - RNA, 19 nt, Homo sapiens
  misc_RNA (1)...(19): siRNA sense strand
ggcuaugacagcagguuca

SEQ ID NO: 2308557 - RNA, 19 nt, Homo sapiens
  misc_RNA (1)...(19): siRNA sense strand
agaccuaugacuugcucua

SEQ ID NO: 2308558 - RNA, 19 nt, Homo sapiens
  misc_RNA (1)...(19): siRNA sense strand
ucucgaaggaagcggcaga

SEQ ID NO: 2308559 - RNA, 19 nt, Homo sapiens
  misc_RNA (1)...(19): siRNA sense strand
ucaacguggcugucagaau

SEQ ID NO: 2308560 - RNA, 19 nt, Homo sapiens
  misc_RNA (1)...(19): siRNA sense strand
ggcccaacaccgagacuca

SEQ ID NO: 2308561 - RNA, 19 nt, Homo sapiens
  misc_RNA (1)...(19): siRNA sense strand
aggagaaagaugaaagaau

SEQ ID NO: 2308562 - RNA, 19 nt, Homo sapiens
  misc_RNA (1)...(19): siRNA sense strand
gcacauauuugguagccuu

SEQ ID NO: 2308563 - RNA, 19 nt, Homo sapiens
  misc_RNA (1)...(19): siRNA sense strand
ggaggaugcuguuuccaaa

SEQ ID NO: 2308564 - RNA, 19 nt, Homo sapiens
  misc_RNA (1)...(19): siRNA sense strand
auagaaagaugucucggaa

SEQ ID NO: 2308565 - RNA, 19 nt, Homo sapiens
  misc_RNA (1)...(19): siRNA sense strand
cggaaggagaaagaugaaa

SEQ ID NO: 2308566 - RNA, 19 nt, Homo sapiens
  misc_RNA (1)...(19): siRNA sense strand
ucggaaggagaaagaugaa

SEQ ID NO: 2308567 - RNA, 19 nt, Homo sapiens
  misc_RNA (1)...(19): siRNA sense strand
cgggagagguggaggaaaa

SEQ ID NO: 2308568 - RNA, 19 nt, Homo sapiens
  misc_RNA (1)...(19): siRNA sense strand
acaacaaacacaagugaaa

SEQ ID NO: 2308569 - RNA, 19 nt, Homo sapiens
  misc_RNA (1)...(19): siRNA sense strand
guugaaguguacaggguaa

SEQ ID NO: 2308570 - RNA, 19 nt, Homo sapiens
  misc_RNA (1)...(19): siRNA sense strand
ccacaaagcccuaggccca

SEQ ID NO: 2308571 - RNA, 19 nt, Homo sapiens
  misc_RNA (1)...(19): siRNA sense strand
ccuuggugauaaagaaaua

SEQ ID NO: 2308572 - RNA, 19 nt, Homo sapiens
  misc_RNA (1)...(19): siRNA sense strand
cugcaaaucagguaguaaa

SEQ ID NO: 2308573 - RNA, 19 nt, Homo sapiens
  misc_RNA (1)...(19): siRNA sense strand
uggagauccuggugauaaa

SEQ ID NO: 2308574 - RNA, 19 nt, Homo sapiens
  misc_RNA (1)...(19): siRNA sense strand
uaguaaagccagaagaaga

SEQ ID NO: 2308575 - RNA, 19 nt, Homo sapiens
  misc_RNA (1)...(19): siRNA sense strand
gguaguaaagccagaagaa

SEQ ID NO: 2308576 - RNA, 19 nt, Homo sapiens
  misc_RNA (1)...(19): siRNA sense strand
acaaagaccugacgggaga

SEQ ID NO: 2308577 - RNA, 19 nt, Homo sapiens
  misc_RNA (1)...(19): siRNA sense strand
cugcagauauagaggacuu

SEQ ID NO: 2308578 - RNA, 19 nt, Homo sapiens
  misc_RNA (1)...(19): siRNA sense strand
agagaagaguagagaugau

SEQ ID NO: 2308579 - RNA, 19 nt, Homo sapiens
  misc_RNA (1)...(19): siRNA sense strand
aaugaaauccagugaagaa

SEQ ID NO: 2308580 - RNA, 19 nt, Homo sapiens
  misc_RNA (1)...(19): siRNA sense strand
aggagaaagcuuugcagaa

SEQ ID NO: 2308581 - RNA, 19 nt, Homo sapiens
  misc_RNA (1)...(19): siRNA sense strand
gcugaaggacaucgauaaa

SEQ ID NO: 2308582 - RNA, 19 nt, Homo sapiens
  misc_RNA (1)...(19): siRNA sense strand
gaacuauacaacagaaaca

SEQ ID NO: 2308583 - RNA, 19 nt, Homo sapiens
  misc_RNA (1)...(19): siRNA sense strand
ggaauaaccuaaucggcuu

SEQ ID NO: 2308584 - RNA, 19 nt, Homo sapiens
  misc_RNA (1)...(19): siRNA sense strand
uggaggaaaaugagagaua

SEQ ID NO: 2308585 - RNA, 19 nt, Homo sapiens
  misc_RNA (1)...(19): siRNA sense strand
agauaugggccuuagcuaa

SEQ ID NO: 2308586 - RNA, 19 nt, Homo sapiens
  misc_RNA (1)...(19): siRNA sense strand
ugaacagacagcagagaau

SEQ ID NO: 2308587 - RNA, 19 nt, Homo sapiens
  misc_RNA (1)...(19): siRNA sense strand
cagcauuggcagcaacaaa

SEQ ID NO: 2308588 - RNA, 19 nt, Homo sapiens
  misc_RNA (1)...(19): siRNA sense strand
guuaauugcagcagcgaga

SEQ ID NO: 2308589 - RNA, 19 nt, Homo sapiens
  misc_RNA (1)...(19): siRNA sense strand
gagcaaaaggaauaugaaa

SEQ ID NO: 2308590 - RNA, 19 nt, Homo sapiens
  misc_RNA (1)...(19): siRNA sense strand
ccagaugccuauaagaaaa

SEQ ID NO: 2308591 - RNA, 19 nt, Homo sapiens
  misc_RNA (1)...(19): siRNA sense strand
cagagaacuugaacagaca

SEQ ID NO: 2308592 - RNA, 19 nt, Homo sapiens
  misc_RNA (1)...(19): siRNA sense strand
gcaaaagccggaugacaaa

SEQ ID NO: 2308593 - RNA, 19 nt, Homo sapiens
  misc_RNA (1)...(19): siRNA sense strand
ccagugagcaaaaggaaua

SEQ ID NO: 2308594 - RNA, 19 nt, Homo sapiens
  misc_RNA (1)...(19): siRNA sense strand
cagcucaaggcauggaaua

SEQ ID NO: 2308595 - RNA, 19 nt, Homo sapiens
  misc_RNA (1)...(19): siRNA sense strand
uugaagagcagaagcaaaa

SEQ ID NO: 2308596 - RNA, 19 nt, Homo sapiens
  misc_RNA (1)...(19): siRNA sense strand
aggaaauuuagauggguuu

SEQ ID NO: 2308597 - RNA, 19 nt, Homo sapiens
  misc_RNA (1)...(19): siRNA sense strand
guguugaagaccugaaaga

SEQ ID NO: 2308598 - RNA, 19 nt, Homo sapiens
  misc_RNA (1)...(19): siRNA sense strand
aagaaguaucccaguuuaa

SEQ ID NO: 2308599 - RNA, 19 nt, Homo sapiens
  misc_RNA (1)...(19): siRNA sense strand
cagauauagaggacuuaaa

SEQ ID NO: 2308600 - RNA, 19 nt, Homo sapiens
  misc_RNA (1)...(19): siRNA sense strand
ccagugaagaaaugaucaa

SEQ ID NO: 2308601 - RNA, 19 nt, Homo sapiens
  misc_RNA (1)...(19): siRNA sense strand
aguaaagccagaagaagau

SEQ ID NO: 2308602 - RNA, 19 nt, Homo sapiens
  misc_RNA (1)...(19): siRNA sense strand
aggaacuauacaacagaaa

SEQ ID NO: 2308603 - RNA, 19 nt, Homo sapiens
  misc_RNA (1)...(19): siRNA sense strand
ccauaaacucggacaaauc

SEQ ID NO: 2308604 - RNA, 19 nt, Homo sapiens
  misc_RNA (1)...(19): siRNA sense strand
gggcaggaacaaauuaaau

SEQ ID NO: 2308605 - RNA, 19 nt, Homo sapiens
  misc_RNA (1)...(19): siRNA sense strand
ugacaaauaugaugcccuu

SEQ ID NO: 2308606 - RNA, 19 nt, Homo sapiens
  misc_RNA (1)...(19): siRNA sense strand
gaaauuggcugauguggga

SEQ ID NO: 2308607 - RNA, 19 nt, Homo sapiens
  misc_RNA (1)...(19): siRNA sense strand
uggcaaacuuacaaaagaa

SEQ ID NO: 2308608 - RNA, 19 nt, Homo sapiens
  misc_RNA (1)...(19): siRNA sense strand
ugaagagagugguguggga

SEQ ID NO: 2308609 - RNA, 19 nt, Homo sapiens
  misc_RNA (1)...(19): siRNA sense strand
gagucagccaacugugaua

SEQ ID NO: 2308610 - RNA, 19 nt, Homo sapiens
  misc_RNA (1)...(19): siRNA sense strand
aaggaaauuuagauggguu

SEQ ID NO: 2308611 - RNA, 19 nt, Homo sapiens
  misc_RNA (1)...(19): siRNA sense strand
auucagaucugcaggaacu

SEQ ID NO: 2308612 - RNA, 19 nt, Homo sapiens
  misc_RNA (1)...(19): siRNA sense strand
acagaaacaacaaacacaa

SEQ ID NO: 2308613 - RNA, 19 nt, Homo sapiens
  misc_RNA (1)...(19): siRNA sense strand
aacagacagcagagaauaa

SEQ ID NO: 2308614 - RNA, 19 nt, Homo sapiens
  misc_RNA (1)...(19): siRNA sense strand
agcaaaagccggaugacaa

SEQ ID NO: 2308615 - RNA, 19 nt, Homo sapiens
  misc_RNA (1)...(19): siRNA sense strand
ggaucacacaagaggaguu

SEQ ID NO: 2308616 - RNA, 19 nt, Homo sapiens
  misc_RNA (1)...(19): siRNA sense strand
auauagugcuuucagagaa

SEQ ID NO: 2308617 - RNA, 19 nt, Homo sapiens
  misc_RNA (1)...(19): siRNA sense strand
agacagggaugaugcaacu

SEQ ID NO: 2308618 - RNA, 19 nt, Homo sapiens
  misc_RNA (1)...(19): siRNA sense strand
uuggagaguuucaaaguga

SEQ ID NO: 2308619 - RNA, 19 nt, Homo sapiens
  misc_RNA (1)...(19): siRNA sense strand
agagaguggugugggagua

SEQ ID NO: 2308620 - RNA, 19 nt, Homo sapiens
  misc_RNA (1)...(19): siRNA sense strand
cgaugcagcaacaaggauu

SEQ ID NO: 2308621 - RNA, 19 nt, Homo sapiens
  misc_RNA (1)...(19): siRNA sense strand
ucgaacuacaccuggcaaa

SEQ ID NO: 2308622 - RNA, 19 nt, Homo sapiens
  misc_RNA (1)...(19): siRNA sense strand
gauaaagaaauaagccguu

SEQ ID NO: 2308623 - RNA, 19 nt, Homo sapiens
  misc_RNA (1)...(19): siRNA sense strand
ucaacugugucgaaccaaa

SEQ ID NO: 2308624 - RNA, 19 nt, Homo sapiens
  misc_RNA (1)...(19): siRNA sense strand
gcagaaacgauuugaacag

SEQ ID NO: 2308625 - RNA, 19 nt, Homo sapiens
  misc_RNA (1)...(19): siRNA sense strand
ugcaaggcauuaugggaau

SEQ ID NO: 2308626 - RNA, 19 nt, Homo sapiens
  misc_RNA (1)...(19): siRNA sense strand
ucacacaagaggaguuuga

SEQ ID NO: 2308627 - RNA, 19 nt, Homo sapiens
  misc_RNA (1)...(19): siRNA sense strand
ccacaguacacuccagaca

SEQ ID NO: 2308628 - RNA, 19 nt, Homo sapiens
  misc_RNA (1)...(19): siRNA sense strand
agacaggagagaagaguag

SEQ ID NO: 2308629 - RNA, 19 nt, Homo sapiens
  misc_RNA (1)...(19): siRNA sense strand
gcuguagauggauguguaa

SEQ ID NO: 2308630 - RNA, 19 nt, Homo sapiens
  misc_RNA (1)...(19): siRNA sense strand
gauccuggugauaaauaua

SEQ ID NO: 2308631 - RNA, 19 nt, Homo sapiens
  misc_RNA (1)...(19): siRNA sense strand
cgggagagguggaggaaaa

SEQ ID NO: 2308632 - RNA, 19 nt, Homo sapiens
  misc_RNA (1)...(19): siRNA sense strand
acaacaaacacaagugaaa

SEQ ID NO: 2308633 - RNA, 19 nt, Homo sapiens
  misc_RNA (1)...(19): siRNA sense strand
guugaaguguacaggguaa

SEQ ID NO: 2308634 - RNA, 19 nt, Homo sapiens
  misc_RNA (1)...(19): siRNA sense strand
ccacaaagcccuaggccca

SEQ ID NO: 2308635 - RNA, 19 nt, Homo sapiens
  misc_RNA (1)...(19): siRNA sense strand
ccuuggugauaaagaaaua

SEQ ID NO: 2308636 - RNA, 19 nt, Homo sapiens
  misc_RNA (1)...(19): siRNA sense strand
cugcaaaucagguaguaaa

SEQ ID NO: 2308637 - RNA, 19 nt, Homo sapiens
  misc_RNA (1)...(19): siRNA sense strand
uggagauccuggugauaaa

SEQ ID NO: 2308638 - RNA, 19 nt, Homo sapiens
  misc_RNA (1)...(19): siRNA sense strand
uaguaaagccagaagaaga

SEQ ID NO: 2308639 - RNA, 19 nt, Homo sapiens
  misc_RNA (1)...(19): siRNA sense strand
gguaguaaagccagaagaa

SEQ ID NO: 2308640 - RNA, 19 nt, Homo sapiens
  misc_RNA (1)...(19): siRNA sense strand
acaaagaccugacgggaga

SEQ ID NO: 2308641 - RNA, 19 nt, Homo sapiens
  misc_RNA (1)...(19): siRNA sense strand
cugcagauauagaggacuu

SEQ ID NO: 2308642 - RNA, 19 nt, Homo sapiens
  misc_RNA (1)...(19): siRNA sense strand
agagaagaguagagaugau

SEQ ID NO: 2308643 - RNA, 19 nt, Homo sapiens
  misc_RNA (1)...(19): siRNA sense strand
aaugaaauccagugaagaa

SEQ ID NO: 2308644 - RNA, 19 nt, Homo sapiens
  misc_RNA (1)...(19): siRNA sense strand
aggagaaagcuuugcagaa

SEQ ID NO: 2308645 - RNA, 19 nt, Homo sapiens
  misc_RNA (1)...(19): siRNA sense strand
gcugaaggacaucgauaaa

SEQ ID NO: 2308646 - RNA, 19 nt, Homo sapiens
  misc_RNA (1)...(19): siRNA sense strand
gaacuauacaacagaaaca

SEQ ID NO: 2308647 - RNA, 19 nt, Homo sapiens
  misc_RNA (1)...(19): siRNA sense strand
ggaauaaccuaaucggcuu

SEQ ID NO: 2308648 - RNA, 19 nt, Homo sapiens
  misc_RNA (1)...(19): siRNA sense strand
uggaggaaaaugagagaua

SEQ ID NO: 2308649 - RNA, 19 nt, Homo sapiens
  misc_RNA (1)...(19): siRNA sense strand
agauaugggccuuagcuaa

SEQ ID NO: 2308650 - RNA, 19 nt, Homo sapiens
  misc_RNA (1)...(19): siRNA sense strand
ugaacagacagcagagaau

SEQ ID NO: 2308651 - RNA, 19 nt, Homo sapiens
  misc_RNA (1)...(19): siRNA sense strand
cagcauuggcagcaacaaa

SEQ ID NO: 2308652 - RNA, 19 nt, Homo sapiens
  misc_RNA (1)...(19): siRNA sense strand
guuaauugcagcagcgaga

SEQ ID NO: 2308653 - RNA, 19 nt, Homo sapiens
  misc_RNA (1)...(19): siRNA sense strand
gagcaaaaggaauaugaaa

SEQ ID NO: 2308654 - RNA, 19 nt, Homo sapiens
  misc_RNA (1)...(19): siRNA sense strand
ccagaugccuauaagaaaa

SEQ ID NO: 2308655 - RNA, 19 nt, Homo sapiens
  misc_RNA (1)...(19): siRNA sense strand
cagagaacuugaacagaca

SEQ ID NO: 2308656 - RNA, 19 nt, Homo sapiens
  misc_RNA (1)...(19): siRNA sense strand
gcaaaagccggaugacaaa

SEQ ID NO: 2308657 - RNA, 19 nt, Homo sapiens
  misc_RNA (1)...(19): siRNA sense strand
ccagugagcaaaaggaaua

SEQ ID NO: 2308658 - RNA, 19 nt, Homo sapiens
  misc_RNA (1)...(19): siRNA sense strand
cagcucaaggcauggaaua

SEQ ID NO: 2308659 - RNA, 19 nt, Homo sapiens
  misc_RNA (1)...(19): siRNA sense strand
uugaagagcagaagcaaaa

SEQ ID NO: 2308660 - RNA, 19 nt, Homo sapiens
  misc_RNA (1)...(19): siRNA sense strand
aggaaauuuagauggguuu

SEQ ID NO: 2308661 - RNA, 19 nt, Homo sapiens
  misc_RNA (1)...(19): siRNA sense strand
guguugaagaccugaaaga

SEQ ID NO: 2308662 - RNA, 19 nt, Homo sapiens
  misc_RNA (1)...(19): siRNA sense strand
aagaaguaucccaguuuaa

SEQ ID NO: 2308663 - RNA, 19 nt, Homo sapiens
  misc_RNA (1)...(19): siRNA sense strand
cagauauagaggacuuaaa

SEQ ID NO: 2308664 - RNA, 19 nt, Homo sapiens
  misc_RNA (1)...(19): siRNA sense strand
ccagugaagaaaugaucaa

SEQ ID NO: 2308665 - RNA, 19 nt, Homo sapiens
  misc_RNA (1)...(19): siRNA sense strand
aguaaagccagaagaagau

SEQ ID NO: 2308666 - RNA, 19 nt, Homo sapiens
  misc_RNA (1)...(19): siRNA sense strand
aggaacuauacaacagaaa

SEQ ID NO: 2308667 - RNA, 19 nt, Homo sapiens
  misc_RNA (1)...(19): siRNA sense strand
ccauaaacucggacaaauc

SEQ ID NO: 2308668 - RNA, 19 nt, Homo sapiens
  misc_RNA (1)...(19): siRNA sense strand
gggcaggaacaaauuaaau

SEQ ID NO: 2308669 - RNA, 19 nt, Homo sapiens
  misc_RNA (1)...(19): siRNA sense strand
ugacaaauaugaugcccuu

SEQ ID NO: 2308670 - RNA, 19 nt, Homo sapiens
  misc_RNA (1)...(19): siRNA sense strand
gaaauuggcugauguggga

SEQ ID NO: 2308671 - RNA, 19 nt, Homo sapiens
  misc_RNA (1)...(19): siRNA sense strand
uggcaaacuuacaaaagaa

SEQ ID NO: 2308672 - RNA, 19 nt, Homo sapiens
  misc_RNA (1)...(19): siRNA sense strand
ugaagagagugguguggga

SEQ ID NO: 2308673 - RNA, 19 nt, Homo sapiens
  misc_RNA (1)...(19): siRNA sense strand
gagucagccaacugugaua

SEQ ID NO: 2308674 - RNA, 19 nt, Homo sapiens
  misc_RNA (1)...(19): siRNA sense strand
aaggaaauuuagauggguu

SEQ ID NO: 2308675 - RNA, 19 nt, Homo sapiens
  misc_RNA (1)...(19): siRNA sense strand
auucagaucugcaggaacu

SEQ ID NO: 2308676 - RNA, 19 nt, Homo sapiens
  misc_RNA (1)...(19): siRNA sense strand
acagaaacaacaaacacaa

SEQ ID NO: 2308677 - RNA, 19 nt, Homo sapiens
  misc_RNA (1)...(19): siRNA sense strand
aacagacagcagagaauaa

SEQ ID NO: 2308678 - RNA, 19 nt, Homo sapiens
  misc_RNA (1)...(19): siRNA sense strand
agcaaaagccggaugacaa

SEQ ID NO: 2308679 - RNA, 19 nt, Homo sapiens
  misc_RNA (1)...(19): siRNA sense strand
ggaucacacaagaggaguu

SEQ ID NO: 2308680 - RNA, 19 nt, Homo sapiens
  misc_RNA (1)...(19): siRNA sense strand
auauagugcuuucagagaa

SEQ ID NO: 2308681 - RNA, 19 nt, Homo sapiens
  misc_RNA (1)...(19): siRNA sense strand
agacagggaugaugcaacu

SEQ ID NO: 2308682 - RNA, 19 nt, Homo sapiens
  misc_RNA (1)...(19): siRNA sense strand
uuggagaguuucaaaguga

SEQ ID NO: 2308683 - RNA, 19 nt, Homo sapiens
  misc_RNA (1)...(19): siRNA sense strand
agagaguggugugggagua

SEQ ID NO: 2308684 - RNA, 19 nt, Homo sapiens
  misc_RNA (1)...(19): siRNA sense strand
cgaugcagcaacaaggauu

SEQ ID NO: 2308685 - RNA, 19 nt, Homo sapiens
  misc_RNA (1)...(19): siRNA sense strand
ucgaacuacaccuggcaaa

SEQ ID NO: 2308686 - RNA, 19 nt, Homo sapiens
  misc_RNA (1)...(19): siRNA sense strand
gauaaagaaauaagccguu

SEQ ID NO: 2308687 - RNA, 19 nt, Homo sapiens
  misc_RNA (1)...(19): siRNA sense strand
ucaacugugucgaaccaaa

SEQ ID NO: 2308688 - RNA, 19 nt, Homo sapiens
  misc_RNA (1)...(19): siRNA sense strand
gcagaaacgauuugaacag

SEQ ID NO: 2308689 - RNA, 19 nt, Homo sapiens
  misc_RNA (1)...(19): siRNA sense strand
ugcaaggcauuaugggaau

SEQ ID NO: 2308690 - RNA, 19 nt, Homo sapiens
  misc_RNA (1)...(19): siRNA sense strand
ucacacaagaggaguuuga

SEQ ID NO: 2308691 - RNA, 19 nt, Homo sapiens
  misc_RNA (1)...(19): siRNA sense strand
ccacaguacacuccagaca

SEQ ID NO: 2308692 - RNA, 19 nt, Homo sapiens
  misc_RNA (1)...(19): siRNA sense strand
agacaggagagaagaguag

SEQ ID NO: 2308693 - RNA, 19 nt, Homo sapiens
  misc_RNA (1)...(19): siRNA sense strand
gcuguagauggauguguaa

SEQ ID NO: 2308694 - RNA, 19 nt, Homo sapiens
  misc_RNA (1)...(19): siRNA sense strand
gauccuggugauaaauaua

SEQ ID NO: 2308695 - RNA, 19 nt, Homo sapiens
  misc_RNA (1)...(19): siRNA sense strand
uguucgaacugaagcgcau

SEQ ID NO: 2308696 - RNA, 19 nt, Homo sapiens
  misc_RNA (1)...(19): siRNA sense strand
ccuuugaggcccugugcau

SEQ ID NO: 2308697 - RNA, 19 nt, Homo sapiens
  misc_RNA (1)...(19): siRNA sense strand
ucagagaagagcagagaaa

SEQ ID NO: 2308698 - RNA, 19 nt, Homo sapiens
  misc_RNA (1)...(19): siRNA sense strand
cuaccuaagcagacagaaa

SEQ ID NO: 2308699 - RNA, 19 nt, Homo sapiens
  misc_RNA (1)...(19): siRNA sense strand
ccugaauacuuuugggaaa

SEQ ID NO: 2308700 - RNA, 19 nt, Homo sapiens
  misc_RNA (1)...(19): siRNA sense strand
ccaucuaccugcagggaau

SEQ ID NO: 2308701 - RNA, 19 nt, Homo sapiens
  misc_RNA (1)...(19): siRNA sense strand
ugggagacgugcagggcaa

SEQ ID NO: 2308702 - RNA, 19 nt, Homo sapiens
  misc_RNA (1)...(19): siRNA sense strand
ggagaaaccacauggacau

SEQ ID NO: 2308703 - RNA, 19 nt, Homo sapiens
  misc_RNA (1)...(19): siRNA sense strand
ggacaaauuugcccaguuu

SEQ ID NO: 2308704 - RNA, 19 nt, Homo sapiens
  misc_RNA (1)...(19): siRNA sense strand
ugauacagugucagagaaa

SEQ ID NO: 2308705 - RNA, 19 nt, Homo sapiens
  misc_RNA (1)...(19): siRNA sense strand
ccugagaacagcagcuaaa

SEQ ID NO: 2308706 - RNA, 19 nt, Homo sapiens
  misc_RNA (1)...(19): siRNA sense strand
cagcauggauagugagcca

SEQ ID NO: 2308707 - RNA, 19 nt, Homo sapiens
  misc_RNA (1)...(19): siRNA sense strand
cagaaguaaacaugaacaa

SEQ ID NO: 2308708 - RNA, 19 nt, Homo sapiens
  misc_RNA (1)...(19): siRNA sense strand
ccaucaagcuccaggcuca

SEQ ID NO: 2308709 - RNA, 19 nt, Homo sapiens
  misc_RNA (1)...(19): siRNA sense strand
aggcuguacugaugcgaua

SEQ ID NO: 2308710 - RNA, 19 nt, Homo sapiens
  misc_RNA (1)...(19): siRNA sense strand
ccgacaggcccuagagaca

SEQ ID NO: 2308711 - RNA, 19 nt, Homo sapiens
  misc_RNA (1)...(19): siRNA sense strand
ggugaguggugcagaagau

SEQ ID NO: 2308712 - RNA, 19 nt, Homo sapiens
  misc_RNA (1)...(19): siRNA sense strand
cugagggagauaagaauaa

SEQ ID NO: 2308713 - RNA, 19 nt, Homo sapiens
  misc_RNA (1)...(19): siRNA sense strand
aggaggagguggaggaucu

SEQ ID NO: 2308714 - RNA, 19 nt, Homo sapiens
  misc_RNA (1)...(19): siRNA sense strand
cagcaaagcuccagccugu

SEQ ID NO: 2308715 - RNA, 19 nt, Homo sapiens
  misc_RNA (1)...(19): siRNA sense strand
cugcaggauguauggaaua

SEQ ID NO: 2308716 - RNA, 19 nt, Homo sapiens
  misc_RNA (1)...(19): siRNA sense strand
ggcugaacuuugauauaaa

SEQ ID NO: 2308717 - RNA, 19 nt, Homo sapiens
  misc_RNA (1)...(19): siRNA sense strand
agagaagagcagagaaagu

SEQ ID NO: 2308718 - RNA, 19 nt, Homo sapiens
  misc_RNA (1)...(19): siRNA sense strand
ccugaagaccauggagaaa

SEQ ID NO: 2308719 - RNA, 19 nt, Homo sapiens
  misc_RNA (1)...(19): siRNA sense strand
ucucagaaguaaacaugaa

SEQ ID NO: 2308720 - RNA, 19 nt, Homo sapiens
  misc_RNA (1)...(19): siRNA sense strand
cugaugaggcggauacuaa

SEQ ID NO: 2308721 - RNA, 19 nt, Homo sapiens
  misc_RNA (1)...(19): siRNA sense strand
gauguuaagcuaugggaga

SEQ ID NO: 2308722 - RNA, 19 nt, Homo sapiens
  misc_RNA (1)...(19): siRNA sense strand
ggugguaaccgucgggcua

SEQ ID NO: 2308723 - RNA, 19 nt, Homo sapiens
  misc_RNA (1)...(19): siRNA sense strand
gggaagaggaugaagcugu

SEQ ID NO: 2308724 - RNA, 19 nt, Homo sapiens
  misc_RNA (1)...(19): siRNA sense strand
gaaugauaaauguggccaa

SEQ ID NO: 2308725 - RNA, 19 nt, Homo sapiens
  misc_RNA (1)...(19): siRNA sense strand
gcugagggagauaagaaua

SEQ ID NO: 2308726 - RNA, 19 nt, Homo sapiens
  misc_RNA (1)...(19): siRNA sense strand
cuuucuuucuugaggcaaa

SEQ ID NO: 2308727 - RNA, 19 nt, Homo sapiens
  misc_RNA (1)...(19): siRNA sense strand
ugagaaggccggugauaca

SEQ ID NO: 2308728 - RNA, 19 nt, Homo sapiens
  misc_RNA (1)...(19): siRNA sense strand
acuuacagcccuuggagaa

SEQ ID NO: 2308729 - RNA, 19 nt, Homo sapiens
  misc_RNA (1)...(19): siRNA sense strand
gguaacauguggcagaaaa

SEQ ID NO: 2308730 - RNA, 19 nt, Homo sapiens
  misc_RNA (1)...(19): siRNA sense strand
agggagaagcugagaguac

SEQ ID NO: 2308731 - RNA, 19 nt, Homo sapiens
  misc_RNA (1)...(19): siRNA sense strand
ugggaagaggccagggcua

SEQ ID NO: 2308732 - RNA, 19 nt, Homo sapiens
  misc_RNA (1)...(19): siRNA sense strand
cgaaggacagagauguuaa

SEQ ID NO: 2308733 - RNA, 19 nt, Homo sapiens
  misc_RNA (1)...(19): siRNA sense strand
aucgauaacucaagccaaa

SEQ ID NO: 2308734 - RNA, 19 nt, Homo sapiens
  misc_RNA (1)...(19): siRNA sense strand
gguuugauucagaagagaa

SEQ ID NO: 2308735 - RNA, 19 nt, Homo sapiens
  misc_RNA (1)...(19): siRNA sense strand
gagaggaggaggaggugga

SEQ ID NO: 2308736 - RNA, 19 nt, Homo sapiens
  misc_RNA (1)...(19): siRNA sense strand
gaccugaagaccauggaaa

SEQ ID NO: 2308737 - RNA, 19 nt, Homo sapiens
  misc_RNA (1)...(19): siRNA sense strand
ggagaaacuacaucagcau

SEQ ID NO: 2308738 - RNA, 19 nt, Homo sapiens
  misc_RNA (1)...(19): siRNA sense strand
cggcuggagaggauggcaa

SEQ ID NO: 2308739 - RNA, 19 nt, Homo sapiens
  misc_RNA (1)...(19): siRNA sense strand
gaggcugaacuuugauaua

SEQ ID NO: 2308740 - RNA, 19 nt, Homo sapiens
  misc_RNA (1)...(19): siRNA sense strand
aacccaaacuccagggaca

SEQ ID NO: 2308741 - RNA, 19 nt, Homo sapiens
  misc_RNA (1)...(19): siRNA sense strand
acgaguaccagcuggcuaa

SEQ ID NO: 2308742 - RNA, 19 nt, Homo sapiens
  misc_RNA (1)...(19): siRNA sense strand
cugauagguuaguggacca

SEQ ID NO: 2308743 - RNA, 19 nt, Homo sapiens
  misc_RNA (1)...(19): siRNA sense strand
cagcgaguggcaagugaaa

SEQ ID NO: 2308744 - RNA, 19 nt, Homo sapiens
  misc_RNA (1)...(19): siRNA sense strand
ggugauacagugucagaga

SEQ ID NO: 2308745 - RNA, 19 nt, Homo sapiens
  misc_RNA (1)...(19): siRNA sense strand
gcggauacuaacuagaaau

SEQ ID NO: 2308746 - RNA, 19 nt, Homo sapiens
  misc_RNA (1)...(19): siRNA sense strand
uggaugauggaaugauaaa

SEQ ID NO: 2308747 - RNA, 19 nt, Homo sapiens
  misc_RNA (1)...(19): siRNA sense strand
cagaaugggcagcugauuu

SEQ ID NO: 2308748 - RNA, 19 nt, Homo sapiens
  misc_RNA (1)...(19): siRNA sense strand
ggacuaagagcugggaaga

SEQ ID NO: 2308749 - RNA, 19 nt, Homo sapiens
  misc_RNA (1)...(19): siRNA sense strand
ugccuaaagcugugggaca

SEQ ID NO: 2308750 - RNA, 19 nt, Homo sapiens
  misc_RNA (1)...(19): siRNA sense strand
uggagaaaccacauggaca

SEQ ID NO: 2308751 - RNA, 19 nt, Homo sapiens
  misc_RNA (1)...(19): siRNA sense strand
gcagagaaaguuugagaag

SEQ ID NO: 2308752 - RNA, 19 nt, Homo sapiens
  misc_RNA (1)...(19): siRNA sense strand
ggaacagacaacuggaagu

SEQ ID NO: 2308753 - RNA, 19 nt, Homo sapiens
  misc_RNA (1)...(19): siRNA sense strand
gcauuaggaucuacaaaau

SEQ ID NO: 2308754 - RNA, 19 nt, Homo sapiens
  misc_RNA (1)...(19): siRNA sense strand
gugccuggaccaaagauaa

SEQ ID NO: 2308755 - RNA, 19 nt, Homo sapiens
  misc_RNA (1)...(19): siRNA sense strand
gugacagcuucgaaggaca

SEQ ID NO: 2308756 - RNA, 19 nt, Homo sapiens
  misc_RNA (1)...(19): siRNA sense strand
cgugugaacaacagcaauu

SEQ ID NO: 2308757 - RNA, 19 nt, Homo sapiens
  misc_RNA (1)...(19): siRNA sense strand
ccuaauaucgauaacucaa

SEQ ID NO: 2308758 - RNA, 19 nt, Homo sapiens
  misc_RNA (1)...(19): siRNA sense strand
aaagcaaacacuccagaaa

SEQ ID NO: 2308759 - RNA, 19 nt, Homo sapiens
  misc_RNA (1)...(19): siRNA sense strand
agauggaggugaugcaguu

SEQ ID NO: 2308760 - RNA, 19 nt, Homo sapiens
  misc_RNA (1)...(19): siRNA sense strand
gcggauggcauuaggaucu

SEQ ID NO: 2308761 - RNA, 19 nt, Homo sapiens
  misc_RNA (1)...(19): siRNA sense strand
gcgaguggcaagugaaacu

SEQ ID NO: 2308762 - RNA, 19 nt, Homo sapiens
  misc_RNA (1)...(19): siRNA sense strand
aggaggaggagguggagga

SEQ ID NO: 2308763 - RNA, 19 nt, Homo sapiens
  misc_RNA (1)...(19): siRNA sense strand
cuuccugggccuugggauu

SEQ ID NO: 2308764 - RNA, 19 nt, Homo sapiens
  misc_RNA (1)...(19): siRNA sense strand
ggaggaacucauugaaaau

SEQ ID NO: 2308765 - RNA, 19 nt, Homo sapiens
  misc_RNA (1)...(19): siRNA sense strand
ccaaacagcuuuacuggca

SEQ ID NO: 2308766 - RNA, 19 nt, Homo sapiens
  misc_RNA (1)...(19): siRNA sense strand
cagcaaggauggcgcagca

SEQ ID NO: 2308767 - RNA, 19 nt, Homo sapiens
  misc_RNA (1)...(19): siRNA sense strand
guaucagccuucacggaau

SEQ ID NO: 2308768 - RNA, 19 nt, Homo sapiens
  misc_RNA (1)...(19): siRNA sense strand
gggacuaagagcugggaag

SEQ ID NO: 2308769 - RNA, 19 nt, Homo sapiens
  misc_RNA (1)...(19): siRNA sense strand
cgauggggcugauagguua

SEQ ID NO: 2308770 - RNA, 19 nt, Homo sapiens
  misc_RNA (1)...(19): siRNA sense strand
aggaggugguggaggagaa

SEQ ID NO: 2308771 - RNA, 19 nt, Homo sapiens
  misc_RNA (1)...(19): siRNA sense strand
aagaagagcaggagaggga

SEQ ID NO: 2308772 - RNA, 19 nt, Homo sapiens
  misc_RNA (1)...(19): siRNA sense strand
ccuuggacugugaggguaa

SEQ ID NO: 2308773 - RNA, 19 nt, Homo sapiens
  misc_RNA (1)...(19): siRNA sense strand
ugaaggaggugguggagga

SEQ ID NO: 2308774 - RNA, 19 nt, Homo sapiens
  misc_RNA (1)...(19): siRNA sense strand
gagaaggaaaugugagcca

SEQ ID NO: 2308775 - RNA, 19 nt, Homo sapiens
  misc_RNA (1)...(19): siRNA sense strand
gggaaagcaggauggguga

SEQ ID NO: 2308776 - RNA, 19 nt, Homo sapiens
  misc_RNA (1)...(19): siRNA sense strand
ugguggaggagaaggaaau

SEQ ID NO: 2308777 - RNA, 19 nt, Homo sapiens
  misc_RNA (1)...(19): siRNA sense strand
ucucaaguacagaguuaaa

SEQ ID NO: 2308778 - RNA, 19 nt, Homo sapiens
  misc_RNA (1)...(19): siRNA sense strand
gcucuuaagaugaacacau

SEQ ID NO: 2308779 - RNA, 19 nt, Homo sapiens
  misc_RNA (1)...(19): siRNA sense strand
ggaucggagcaaacggaau

SEQ ID NO: 2308780 - RNA, 19 nt, Homo sapiens
  misc_RNA (1)...(19): siRNA sense strand
gugguggaggagaaggaaa

SEQ ID NO: 2308781 - RNA, 19 nt, Homo sapiens
  misc_RNA (1)...(19): siRNA sense strand
agauggagguagaagaaag

SEQ ID NO: 2308782 - RNA, 19 nt, Homo sapiens
  misc_RNA (1)...(19): siRNA sense strand
aggagauggagguagaaga

SEQ ID NO: 2308783 - RNA, 19 nt, Homo sapiens
  misc_RNA (1)...(19): siRNA sense strand
gcuguaacauggaucccaa

SEQ ID NO: 2308784 - RNA, 19 nt, Homo sapiens
  misc_RNA (1)...(19): siRNA sense strand
guuugaaggagguggugga

SEQ ID NO: 2308785 - RNA, 19 nt, Homo sapiens
  misc_RNA (1)...(19): siRNA sense strand
cgacuaagcucacuggaug

SEQ ID NO: 2308786 - RNA, 19 nt, Homo sapiens
  misc_RNA (1)...(19): siRNA sense strand
cuaaguagucucaaguaca

SEQ ID NO: 2308787 - RNA, 19 nt, Homo sapiens
  misc_RNA (1)...(19): siRNA sense strand
aguacagaguuaaagagau

SEQ ID NO: 2308788 - RNA, 19 nt, Homo sapiens
  misc_RNA (1)...(19): siRNA sense strand
agaaaggccagcaggcuca

SEQ ID NO: 2308789 - RNA, 19 nt, Homo sapiens
  misc_RNA (1)...(19): siRNA sense strand
agaauuucgggcuggacua

SEQ ID NO: 2308790 - RNA, 19 nt, Homo sapiens
  misc_RNA (1)...(19): siRNA sense strand
ccaggggacucuuggagaa

SEQ ID NO: 2308791 - RNA, 19 nt, Homo sapiens
  misc_RNA (1)...(19): siRNA sense strand
ggagguagaagaaaggcca

SEQ ID NO: 2308792 - RNA, 19 nt, Homo sapiens
  misc_RNA (1)...(19): siRNA sense strand
caguaaaguuagggagaaa

SEQ ID NO: 2308793 - RNA, 19 nt, Homo sapiens
  misc_RNA (1)...(19): siRNA sense strand
gggugaaauuacagaacua

SEQ ID NO: 2308794 - RNA, 19 nt, Homo sapiens
  misc_RNA (1)...(19): siRNA sense strand
gguagaaguagaagcuaaa

SEQ ID NO: 2308795 - RNA, 19 nt, Homo sapiens
  misc_RNA (1)...(19): siRNA sense strand
cuuaaaggguucaaggaau

SEQ ID NO: 2308796 - RNA, 19 nt, Homo sapiens
  misc_RNA (1)...(19): siRNA sense strand
gggaaugacuggaagacga

SEQ ID NO: 2308797 - RNA, 19 nt, Homo sapiens
  misc_RNA (1)...(19): siRNA sense strand
caaauaacuaggaggaaaa

SEQ ID NO: 2308798 - RNA, 19 nt, Homo sapiens
  misc_RNA (1)...(19): siRNA sense strand
aggaaagaccucagaaaca

SEQ ID NO: 2308799 - RNA, 19 nt, Homo sapiens
  misc_RNA (1)...(19): siRNA sense strand
caguuguccuuguggauaa

SEQ ID NO: 2308800 - RNA, 19 nt, Homo sapiens
  misc_RNA (1)...(19): siRNA sense strand
cuuauauacuaucgagcaa

SEQ ID NO: 2308801 - RNA, 19 nt, Homo sapiens
  misc_RNA (1)...(19): siRNA sense strand
cugcaaaugaagaacacaa

SEQ ID NO: 2308802 - RNA, 19 nt, Homo sapiens
  misc_RNA (1)...(19): siRNA sense strand
agaucuugcuagugccaua

SEQ ID NO: 2308803 - RNA, 19 nt, Homo sapiens
  misc_RNA (1)...(19): siRNA sense strand
agguauagcgaaggagaua

SEQ ID NO: 2308804 - RNA, 19 nt, Homo sapiens
  misc_RNA (1)...(19): siRNA sense strand
aagagaagauauagugcuu

SEQ ID NO: 2308805 - RNA, 19 nt, Homo sapiens
  misc_RNA (1)...(19): siRNA sense strand
agaagauguucgaugucaa

SEQ ID NO: 2308806 - RNA, 19 nt, Homo sapiens
  misc_RNA (1)...(19): siRNA sense strand
guggaagauacuaaugaaa

SEQ ID NO: 2308807 - RNA, 19 nt, Homo sapiens
  misc_RNA (1)...(19): siRNA sense strand
uggaacgguuuaaggaauu

SEQ ID NO: 2308808 - RNA, 19 nt, Homo sapiens
  misc_RNA (1)...(19): siRNA sense strand
cuaaagugcaaaccagaaa

SEQ ID NO: 2308809 - RNA, 19 nt, Homo sapiens
  misc_RNA (1)...(19): siRNA sense strand
aguacaaagaagaagucua

SEQ ID NO: 2308810 - RNA, 19 nt, Homo sapiens
  misc_RNA (1)...(19): siRNA sense strand
agcugaagauuccgaaaua

SEQ ID NO: 2308811 - RNA, 19 nt, Homo sapiens
  misc_RNA (1)...(19): siRNA sense strand
acaaagaagaagucuaaga

SEQ ID NO: 2308812 - RNA, 19 nt, Homo sapiens
  misc_RNA (1)...(19): siRNA sense strand
gcuuggaguaagucugaaa

SEQ ID NO: 2308813 - RNA, 19 nt, Homo sapiens
  misc_RNA (1)...(19): siRNA sense strand
ccaacaguacaaagaagaa

SEQ ID NO: 2308814 - RNA, 19 nt, Homo sapiens
  misc_RNA (1)...(19): siRNA sense strand
uaaggaaagaccucagaaa

SEQ ID NO: 2308815 - RNA, 19 nt, Homo sapiens
  misc_RNA (1)...(19): siRNA sense strand
gaaggagaggacauagaaa

SEQ ID NO: 2308816 - RNA, 19 nt, Homo sapiens
  misc_RNA (1)...(19): siRNA sense strand
gugaaugaacagucucaaa

SEQ ID NO: 2308817 - RNA, 19 nt, Homo sapiens
  misc_RNA (1)...(19): siRNA sense strand
caccaaagcauuuuagaaa

SEQ ID NO: 2308818 - RNA, 19 nt, Homo sapiens
  misc_RNA (1)...(19): siRNA sense strand
cagacaaauuucagguacu

SEQ ID NO: 2308819 - RNA, 19 nt, Homo sapiens
  misc_RNA (1)...(19): siRNA sense strand
aguccaaucaccaggaauu

SEQ ID NO: 2308820 - RNA, 19 nt, Homo sapiens
  misc_RNA (1)...(19): siRNA sense strand
aguccaaucaccaggaauu

SEQ ID NO: 2308821 - RNA, 19 nt, Homo sapiens
  misc_RNA (1)...(19): siRNA sense strand
uggaagaaggugugaaauc

SEQ ID NO: 2308822 - RNA, 19 nt, Homo sapiens
  misc_RNA (1)...(19): siRNA sense strand
cgaggaagcagguguuaca

SEQ ID NO: 2308823 - RNA, 19 nt, Homo sapiens
  misc_RNA (1)...(19): siRNA sense strand
cuaucaauuguucgggaaa

SEQ ID NO: 2308824 - RNA, 19 nt, Homo sapiens
  misc_RNA (1)...(19): siRNA sense strand
auuccaaacuccaagaaaa

SEQ ID NO: 2308825 - RNA, 19 nt, Homo sapiens
  misc_RNA (1)...(19): siRNA sense strand
ccugaaaguugccuaucaa

SEQ ID NO: 2308826 - RNA, 19 nt, Homo sapiens
  misc_RNA (1)...(19): siRNA sense strand
ggaaggagaaucaagcaga

SEQ ID NO: 2308827 - RNA, 19 nt, Homo sapiens
  misc_RNA (1)...(19): siRNA sense strand
auucuaaccaagaggauga

SEQ ID NO: 2308828 - RNA, 19 nt, Homo sapiens
  misc_RNA (1)...(19): siRNA sense strand
gugaaggagaggacauaga

SEQ ID NO: 2308829 - RNA, 19 nt, Homo sapiens
  misc_RNA (1)...(19): siRNA sense strand
ccaagaaaauccugaaagu

SEQ ID NO: 2308830 - RNA, 19 nt, Homo sapiens
  misc_RNA (1)...(19): siRNA sense strand
gcuaaagugcaaaccagaa

SEQ ID NO: 2308831 - RNA, 19 nt, Homo sapiens
  misc_RNA (1)...(19): siRNA sense strand
gcaaagaagauguucgaug

SEQ ID NO: 2308832 - RNA, 19 nt, Homo sapiens
  misc_RNA (1)...(19): siRNA sense strand
aauuacaaaggcagguaua

SEQ ID NO: 2308833 - RNA, 19 nt, Homo sapiens
  misc_RNA (1)...(19): siRNA sense strand
ucuuaaaggguucaaggaa

SEQ ID NO: 2308834 - RNA, 19 nt, Homo sapiens
  misc_RNA (1)...(19): siRNA sense strand
ucaaagaaaucguggugcu

SEQ ID NO: 2308835 - RNA, 19 nt, Homo sapiens
  misc_RNA (1)...(19): siRNA sense strand
ggaaacuaaucaaggcugu

SEQ ID NO: 2308836 - RNA, 19 nt, Homo sapiens
  misc_RNA (1)...(19): siRNA sense strand
aaguaaguggacagaaauu

SEQ ID NO: 2308837 - RNA, 19 nt, Homo sapiens
  misc_RNA (1)...(19): siRNA sense strand
aacagaaguuaccaagaaa

SEQ ID NO: 2308838 - RNA, 19 nt, Homo sapiens
  misc_RNA (1)...(19): siRNA sense strand
ucucaaauaacuaggagga

SEQ ID NO: 2308839 - RNA, 19 nt, Homo sapiens
  misc_RNA (1)...(19): siRNA sense strand
acaguaaaguuagggagaa

SEQ ID NO: 2308840 - RNA, 19 nt, Homo sapiens
  misc_RNA (1)...(19): siRNA sense strand
gcauugagagugcagacaa

SEQ ID NO: 2308841 - RNA, 19 nt, Homo sapiens
  misc_RNA (1)...(19): siRNA sense strand
uaaucaaggcugucgaaga

SEQ ID NO: 2308842 - RNA, 19 nt, Homo sapiens
  misc_RNA (1)...(19): siRNA sense strand
agaaauuggaugcagugua

SEQ ID NO: 2308843 - RNA, 19 nt, Homo sapiens
  misc_RNA (1)...(19): siRNA sense strand
gggcagugagguugggacu

SEQ ID NO: 2308844 - RNA, 19 nt, Homo sapiens
  misc_RNA (1)...(19): siRNA sense strand
ccuaucaauuguucgggaa

SEQ ID NO: 2308845 - RNA, 19 nt, Homo sapiens
  misc_RNA (1)...(19): siRNA sense strand
cugaaggaaaaguuagaaa

SEQ ID NO: 2308846 - RNA, 19 nt, Homo sapiens
  misc_RNA (1)...(19): siRNA sense strand
cgucucaauaggagugaaa

SEQ ID NO: 2308847 - RNA, 19 nt, Homo sapiens
  misc_RNA (1)...(19): siRNA sense strand
ucucaauaggagugaaaga

SEQ ID NO: 2308848 - RNA, 19 nt, Homo sapiens
  misc_RNA (1)...(19): siRNA sense strand
agcuagaggcagccagaaa

SEQ ID NO: 2308849 - RNA, 19 nt, Homo sapiens
  misc_RNA (1)...(19): siRNA sense strand
caacuguggauuuggaaaa

SEQ ID NO: 2308850 - RNA, 19 nt, Homo sapiens
  misc_RNA (1)...(19): siRNA sense strand
gugaaagaugggaugccua

SEQ ID NO: 2308851 - RNA, 19 nt, Homo sapiens
  misc_RNA (1)...(19): siRNA sense strand
gcugcuggauggauggcua

SEQ ID NO: 2308852 - RNA, 19 nt, Homo sapiens
  misc_RNA (1)...(19): siRNA sense strand
aagugaugcuucagugaca

SEQ ID NO: 2308853 - RNA, 19 nt, Homo sapiens
  misc_RNA (1)...(19): siRNA sense strand
cgaugauguccauggcuuu

SEQ ID NO: 2308854 - RNA, 19 nt, Homo sapiens
  misc_RNA (1)...(19): siRNA sense strand
ccacagagaagcacggucu

SEQ ID NO: 2308855 - RNA, 19 nt, Homo sapiens
  misc_RNA (1)...(19): siRNA sense strand
gggaagacacucaaggaug

SEQ ID NO: 2308856 - RNA, 19 nt, Homo sapiens
  misc_RNA (1)...(19): siRNA sense strand
gcuggaagauuuagccacu

SEQ ID NO: 2308857 - RNA, 19 nt, Homo sapiens
  misc_RNA (1)...(19): siRNA sense strand
agaagcacggucuggcaaa

SEQ ID NO: 2308858 - RNA, 19 nt, Homo sapiens
  misc_RNA (1)...(19): siRNA sense strand
agaauaaacaagagcggga

SEQ ID NO: 2308859 - RNA, 19 nt, Homo sapiens
  misc_RNA (1)...(19): siRNA sense strand
cugaggagcugcuggacga

SEQ ID NO: 2308860 - RNA, 19 nt, Homo sapiens
  misc_RNA (1)...(19): siRNA sense strand
acgaggaguaugaggagau

SEQ ID NO: 2308861 - RNA, 19 nt, Homo sapiens
  misc_RNA (1)...(19): siRNA sense strand
aggagaucguggaggaugu

SEQ ID NO: 2308862 - RNA, 19 nt, Homo sapiens
  misc_RNA (1)...(19): siRNA sense strand
auaagaagcugcuggucca

SEQ ID NO: 2308863 - RNA, 19 nt, Homo sapiens
  misc_RNA (1)...(19): siRNA sense strand
augaggagaucguggagga

SEQ ID NO: 2308864 - RNA, 19 nt, Homo sapiens
  misc_RNA (1)...(19): siRNA sense strand
gcucaguggacgagacuac

SEQ ID NO: 2308865 - RNA, 19 nt, Homo sapiens
  misc_RNA (1)...(19): siRNA sense strand
gcaucaucuuccagggcca

SEQ ID NO: 2308866 - RNA, 19 nt, Homo sapiens
  misc_RNA (1)...(19): siRNA sense strand
cgacugagguccugugccu

SEQ ID NO: 2308867 - RNA, 19 nt, Homo sapiens
  misc_RNA (1)...(19): siRNA sense strand
ccaugcaagcugcggguca

SEQ ID NO: 2308868 - RNA, 19 nt, Homo sapiens
  misc_RNA (1)...(19): siRNA sense strand
gagaagaagaagaaggucc

SEQ ID NO: 2308869 - RNA, 19 nt, Homo sapiens
  misc_RNA (1)...(19): siRNA sense strand
ggacaaggagaaccggcau

SEQ ID NO: 2308870 - RNA, 19 nt, Homo sapiens
  misc_RNA (1)...(19): siRNA sense strand
caucggaagcgcagccaca

SEQ ID NO: 2308871 - RNA, 19 nt, Homo sapiens
  misc_RNA (1)...(19): siRNA sense strand
uggacgacgaggaguauga

SEQ ID NO: 2308872 - RNA, 19 nt, Homo sapiens
  misc_RNA (1)...(19): siRNA sense strand
acauaaacuugcagaagaa

SEQ ID NO: 2308873 - RNA, 19 nt, Homo sapiens
  misc_RNA (1)...(19): siRNA sense strand
aaacaaaggcucuggagaa

SEQ ID NO: 2308874 - RNA, 19 nt, Homo sapiens
  misc_RNA (1)...(19): siRNA sense strand
gaagagaugaagagggcaa

SEQ ID NO: 2308875 - RNA, 19 nt, Homo sapiens
  misc_RNA (1)...(19): siRNA sense strand
augaagagcuuaagaaaca

SEQ ID NO: 2308876 - RNA, 19 nt, Homo sapiens
  misc_RNA (1)...(19): siRNA sense strand
acaaaggaggaguggguaa

SEQ ID NO: 2308877 - RNA, 19 nt, Homo sapiens
  misc_RNA (1)...(19): siRNA sense strand
gguuaaacacuuuggaaga

SEQ ID NO: 2308878 - RNA, 19 nt, Homo sapiens
  misc_RNA (1)...(19): siRNA sense strand
cuagaggaguugagaagaa

SEQ ID NO: 2308879 - RNA, 19 nt, Homo sapiens
  misc_RNA (1)...(19): siRNA sense strand
guggagaacuggagaggau

SEQ ID NO: 2308880 - RNA, 19 nt, Homo sapiens
  misc_RNA (1)...(19): siRNA sense strand
ggauauugaagcuaagaaa

SEQ ID NO: 2308881 - RNA, 19 nt, Homo sapiens
  misc_RNA (1)...(19): siRNA sense strand
ugguaaaagcuuugggaaa

SEQ ID NO: 2308882 - RNA, 19 nt, Homo sapiens
  misc_RNA (1)...(19): siRNA sense strand
ucaacaacaucuagagaau

SEQ ID NO: 2308883 - RNA, 19 nt, Homo sapiens
  misc_RNA (1)...(19): siRNA sense strand
caucagaaccagcuagaaa

SEQ ID NO: 2308884 - RNA, 19 nt, Homo sapiens
  misc_RNA (1)...(19): siRNA sense strand
guaacuagcaauuggcaaa

SEQ ID NO: 2308885 - RNA, 19 nt, Homo sapiens
  misc_RNA (1)...(19): siRNA sense strand
ggacaaacuuggagagcag

SEQ ID NO: 2308886 - RNA, 19 nt, Homo sapiens
  misc_RNA (1)...(19): siRNA sense strand
ugaaagaugaagagcuuaa

SEQ ID NO: 2308887 - RNA, 19 nt, Homo sapiens
  misc_RNA (1)...(19): siRNA sense strand
gcaaaaugggacagaauua

SEQ ID NO: 2308888 - RNA, 19 nt, Homo sapiens
  misc_RNA (1)...(19): siRNA sense strand
cugaacaggugaaaguaaa

SEQ ID NO: 2308889 - RNA, 19 nt, Homo sapiens
  misc_RNA (1)...(19): siRNA sense strand
gcacagagguccugccuga

SEQ ID NO: 2308890 - RNA, 19 nt, Homo sapiens
  misc_RNA (1)...(19): siRNA sense strand
ugauggaacugcagaagaa

SEQ ID NO: 2308891 - RNA, 19 nt, Homo sapiens
  misc_RNA (1)...(19): siRNA sense strand
ggaaaguggaacaagcuaa

SEQ ID NO: 2308892 - RNA, 19 nt, Homo sapiens
  misc_RNA (1)...(19): siRNA sense strand
acagaaauuuccugggcua

SEQ ID NO: 2308893 - RNA, 19 nt, Homo sapiens
  misc_RNA (1)...(19): siRNA sense strand
cagcacaaguugaaccaaa

SEQ ID NO: 2308894 - RNA, 19 nt, Homo sapiens
  misc_RNA (1)...(19): siRNA sense strand
caacagugacucagaggaa

SEQ ID NO: 2308895 - RNA, 19 nt, Homo sapiens
  misc_RNA (1)...(19): siRNA sense strand
cagccuggacuuagagaaa

SEQ ID NO: 2308896 - RNA, 19 nt, Homo sapiens
  misc_RNA (1)...(19): siRNA sense strand
ggaaaggacuaaugggucu

SEQ ID NO: 2308897 - RNA, 19 nt, Homo sapiens
  misc_RNA (1)...(19): siRNA sense strand
ccuuaauaugcgauggaaa

SEQ ID NO: 2308898 - RNA, 19 nt, Homo sapiens
  misc_RNA (1)...(19): siRNA sense strand
acaaugacguacagaagaa

SEQ ID NO: 2308899 - RNA, 19 nt, Homo sapiens
  misc_RNA (1)...(19): siRNA sense strand
ccucaaagauggaaggaag

SEQ ID NO: 2308900 - RNA, 19 nt, Homo sapiens
  misc_RNA (1)...(19): siRNA sense strand
gggauaaaguugucaaaau

SEQ ID NO: 2308901 - RNA, 19 nt, Homo sapiens
  misc_RNA (1)...(19): siRNA sense strand
gguaaaagcuuugggaaau

SEQ ID NO: 2308902 - RNA, 19 nt, Homo sapiens
  misc_RNA (1)...(19): siRNA sense strand
gaguuaaaggagaaagaau

SEQ ID NO: 2308903 - RNA, 19 nt, Homo sapiens
  misc_RNA (1)...(19): siRNA sense strand
cagaaauaagugugaaaga

SEQ ID NO: 2308904 - RNA, 19 nt, Homo sapiens
  misc_RNA (1)...(19): siRNA sense strand
ugaugaaauccuugagaau

SEQ ID NO: 2308905 - RNA, 19 nt, Homo sapiens
  misc_RNA (1)...(19): siRNA sense strand
augaaauccuugagaauca

SEQ ID NO: 2308906 - RNA, 19 nt, Homo sapiens
  misc_RNA (1)...(19): siRNA sense strand
ucuacaaagaggagaagaa

SEQ ID NO: 2308907 - RNA, 19 nt, Homo sapiens
  misc_RNA (1)...(19): siRNA sense strand
acaaggaaugugaaagaaa

SEQ ID NO: 2308908 - RNA, 19 nt, Homo sapiens
  misc_RNA (1)...(19): siRNA sense strand
gugaagaagaggcaauuaa

SEQ ID NO: 2308909 - RNA, 19 nt, Homo sapiens
  misc_RNA (1)...(19): siRNA sense strand
aggaauuauuggaagaaca

SEQ ID NO: 2308910 - RNA, 19 nt, Homo sapiens
  misc_RNA (1)...(19): siRNA sense strand
cauucagaccacagagaua

SEQ ID NO: 2308911 - RNA, 19 nt, Homo sapiens
  misc_RNA (1)...(19): siRNA sense strand
cugcgaaccugaagaaaga

SEQ ID NO: 2308912 - RNA, 19 nt, Homo sapiens
  misc_RNA (1)...(19): siRNA sense strand
guggauggauggcgugaaa

SEQ ID NO: 2308913 - RNA, 19 nt, Homo sapiens
  misc_RNA (1)...(19): siRNA sense strand
cagaaggaggugagaguga

SEQ ID NO: 2308914 - RNA, 19 nt, Homo sapiens
  misc_RNA (1)...(19): siRNA sense strand
auguugugcuggagaauua

SEQ ID NO: 2308915 - RNA, 19 nt, Homo sapiens
  misc_RNA (1)...(19): siRNA sense strand
uggaaagggucaagaacca

SEQ ID NO: 2308916 - RNA, 19 nt, Homo sapiens
  misc_RNA (1)...(19): siRNA sense strand
ggcaaaagcaaguggacaa

SEQ ID NO: 2308917 - RNA, 19 nt, Homo sapiens
  misc_RNA (1)...(19): siRNA sense strand
gugcaaggaaaguggaaca

SEQ ID NO: 2308918 - RNA, 19 nt, Homo sapiens
  misc_RNA (1)...(19): siRNA sense strand
gggaugggauugugcagaa

SEQ ID NO: 2308919 - RNA, 19 nt, Homo sapiens
  misc_RNA (1)...(19): siRNA sense strand
agaugaagagcuuaagaaa

SEQ ID NO: 2308920 - RNA, 19 nt, Homo sapiens
  misc_RNA (1)...(19): siRNA sense strand
gggaguuaaaggagaaaga

SEQ ID NO: 2308921 - RNA, 19 nt, Homo sapiens
  misc_RNA (1)...(19): siRNA sense strand
uguaauagaauucgaggaa

SEQ ID NO: 2308922 - RNA, 19 nt, Homo sapiens
  misc_RNA (1)...(19): siRNA sense strand
gaggaguugagaagaaaua

SEQ ID NO: 2308923 - RNA, 19 nt, Homo sapiens
  misc_RNA (1)...(19): siRNA sense strand
caaguaaacaggaagaaau

SEQ ID NO: 2308924 - RNA, 19 nt, Homo sapiens
  misc_RNA (1)...(19): siRNA sense strand
cugaauaggaacuuugaaa

SEQ ID NO: 2308925 - RNA, 19 nt, Homo sapiens
  misc_RNA (1)...(19): siRNA sense strand
gggauguagaagagaucaa

SEQ ID NO: 2308926 - RNA, 19 nt, Homo sapiens
  misc_RNA (1)...(19): siRNA sense strand
ccuuagaagaacugaucaa

SEQ ID NO: 2308927 - RNA, 19 nt, Homo sapiens
  misc_RNA (1)...(19): siRNA sense strand
gagggaagaacguggagaa

SEQ ID NO: 2308928 - RNA, 19 nt, Homo sapiens
  misc_RNA (1)...(19): siRNA sense strand
ggaagaacaaagaaaucua

SEQ ID NO: 2308929 - RNA, 19 nt, Homo sapiens
  misc_RNA (1)...(19): siRNA sense strand
agaaugaacugaagggcca

SEQ ID NO: 2308930 - RNA, 19 nt, Homo sapiens
  misc_RNA (1)...(19): siRNA sense strand
ugaagauucucaaggacaa

SEQ ID NO: 2308931 - RNA, 19 nt, Homo sapiens
  misc_RNA (1)...(19): siRNA sense strand
gcuuguagaaccaaaguua

SEQ ID NO: 2308932 - RNA, 19 nt, Homo sapiens
  misc_RNA (1)...(19): siRNA sense strand
gaagaauaucaaagaccaa

SEQ ID NO: 2308933 - RNA, 19 nt, Homo sapiens
  misc_RNA (1)...(19): siRNA sense strand
gggacagaauuaauagaau

SEQ ID NO: 2308934 - RNA, 19 nt, Homo sapiens
  misc_RNA (1)...(19): siRNA sense strand
gcuuaaggacuguaaauau

SEQ ID NO: 2308935 - RNA, 19 nt, Homo sapiens
  misc_RNA (1)...(19): siRNA sense strand
uaugaaagaugaagagcuu

SEQ ID NO: 2308936 - RNA, 19 nt, Homo sapiens
  misc_RNA (1)...(19): siRNA sense strand
uggacaaggcauuggagaa

SEQ ID NO: 2308937 - RNA, 19 nt, Homo sapiens
  misc_RNA (1)...(19): siRNA sense strand
acaagaggcuguagaggau

SEQ ID NO: 2308938 - RNA, 19 nt, Homo sapiens
  misc_RNA (1)...(19): siRNA sense strand
ucaaagaccaacuggacaa

SEQ ID NO: 2308939 - RNA, 19 nt, Homo sapiens
  misc_RNA (1)...(19): siRNA sense strand
cugaagaauuacugguuga

SEQ ID NO: 2308940 - RNA, 19 nt, Homo sapiens
  misc_RNA (1)...(19): siRNA sense strand
ggacaugauuauugacagu

SEQ ID NO: 2308941 - RNA, 19 nt, Homo sapiens
  misc_RNA (1)...(19): siRNA sense strand
ggguacaugccuuaaauaa

SEQ ID NO: 2308942 - RNA, 19 nt, Homo sapiens
  misc_RNA (1)...(19): siRNA sense strand
uggaggaagaacaaagaaa

SEQ ID NO: 2308943 - RNA, 19 nt, Homo sapiens
  misc_RNA (1)...(19): siRNA sense strand
cugacauuguggauggaaa

SEQ ID NO: 2308944 - RNA, 19 nt, Homo sapiens
  misc_RNA (1)...(19): siRNA sense strand
ggugagagcgcuacagcua

SEQ ID NO: 2308945 - RNA, 19 nt, Homo sapiens
  misc_RNA (1)...(19): siRNA sense strand
uguaagagaacaagcaauu

SEQ ID NO: 2308946 - RNA, 19 nt, Homo sapiens
  misc_RNA (1)...(19): siRNA sense strand
uaauagaauucgaggaaag

SEQ ID NO: 2308947 - RNA, 19 nt, Homo sapiens
  misc_RNA (1)...(19): siRNA sense strand
ugacagaaauggauggcau

SEQ ID NO: 2308948 - RNA, 19 nt, Homo sapiens
  misc_RNA (1)...(19): siRNA sense strand
gggccuugagccagaguaa

SEQ ID NO: 2308949 - RNA, 19 nt, Homo sapiens
  misc_RNA (1)...(19): siRNA sense strand
uugaggaggcugagaagaa

SEQ ID NO: 2308950 - RNA, 19 nt, Homo sapiens
  misc_RNA (1)...(19): siRNA sense strand
cuaucaaacgagaggauga

SEQ ID NO: 2308951 - RNA, 19 nt, Homo sapiens
  misc_RNA (1)...(19): siRNA sense strand
ccugagaucaugagcaaau

SEQ ID NO: 2308952 - RNA, 19 nt, Homo sapiens
  misc_RNA (1)...(19): siRNA sense strand
cuggugagucugagagcaa

SEQ ID NO: 2308953 - RNA, 19 nt, Homo sapiens
  misc_RNA (1)...(19): siRNA sense strand
cuugaaugaaguaggguau

SEQ ID NO: 2308954 - RNA, 19 nt, Homo sapiens
  misc_RNA (1)...(19): siRNA sense strand
ccaucagcacugcgggaaa

SEQ ID NO: 2308955 - RNA, 19 nt, Homo sapiens
  misc_RNA (1)...(19): siRNA sense strand
acuuggaguuccuggcuaa

SEQ ID NO: 2308956 - RNA, 19 nt, Homo sapiens
  misc_RNA (1)...(19): siRNA sense strand
ccauggagguagaagagga

SEQ ID NO: 2308957 - RNA, 19 nt, Homo sapiens
  misc_RNA (1)...(19): siRNA sense strand
aggaaagaagagacgagaa

SEQ ID NO: 2308958 - RNA, 19 nt, Homo sapiens
  misc_RNA (1)...(19): siRNA sense strand
ggaugucaaacgugagcua

SEQ ID NO: 2308959 - RNA, 19 nt, Homo sapiens
  misc_RNA (1)...(19): siRNA sense strand
aguucaaagugguggaaac

SEQ ID NO: 2308960 - RNA, 19 nt, Homo sapiens
  misc_RNA (1)...(19): siRNA sense strand
ugaauagaguuguucggaa

SEQ ID NO: 2308961 - RNA, 19 nt, Homo sapiens
  misc_RNA (1)...(19): siRNA sense strand
cagcauugacccagcucua

SEQ ID NO: 2308962 - RNA, 19 nt, Homo sapiens
  misc_RNA (1)...(19): siRNA sense strand
gggaaaacuuuguuggcca

SEQ ID NO: 2308963 - RNA, 19 nt, Homo sapiens
  misc_RNA (1)...(19): siRNA sense strand
ccuugaaugaaguagggua

SEQ ID NO: 2308964 - RNA, 19 nt, Homo sapiens
  misc_RNA (1)...(19): siRNA sense strand
ucgguuaauuguugaugaa

SEQ ID NO: 2308965 - RNA, 19 nt, Homo sapiens
  misc_RNA (1)...(19): siRNA sense strand
ucucauugaccuagaggau

SEQ ID NO: 2308966 - RNA, 19 nt, Homo sapiens
  misc_RNA (1)...(19): siRNA sense strand
aacgagaggaugaggaaga

SEQ ID NO: 2308967 - RNA, 19 nt, Homo sapiens
  misc_RNA (1)...(19): siRNA sense strand
ccauugaugccgaggucau

SEQ ID NO: 2308968 - RNA, 19 nt, Homo sapiens
  misc_RNA (1)...(19): siRNA sense strand
ggaaaacuuuguuggccaa

SEQ ID NO: 2308969 - RNA, 19 nt, Homo sapiens
  misc_RNA (1)...(19): siRNA sense strand
augaugaccuguauggcua

SEQ ID NO: 2308970 - RNA, 19 nt, Homo sapiens
  misc_RNA (1)...(19): siRNA sense strand
agcccaagauggaugaauu

SEQ ID NO: 2308971 - RNA, 19 nt, Homo sapiens
  misc_RNA (1)...(19): siRNA sense strand
cuaaugaaugccaggccaa

SEQ ID NO: 2308972 - RNA, 19 nt, Homo sapiens
  misc_RNA (1)...(19): siRNA sense strand
ggccaaugucagagaaauc

SEQ ID NO: 2308973 - RNA, 19 nt, Homo sapiens
  misc_RNA (1)...(19): siRNA sense strand
cauuguugcuccagacaca

SEQ ID NO: 2308974 - RNA, 19 nt, Homo sapiens
  misc_RNA (1)...(19): siRNA sense strand
gaggccaaugucagagaaa

SEQ ID NO: 2308975 - RNA, 19 nt, Homo sapiens
  misc_RNA (1)...(19): siRNA sense strand
uggagguagaagaggauga

SEQ ID NO: 2308976 - RNA, 19 nt, Homo sapiens
  misc_RNA (1)...(19): siRNA sense strand
guucaaagugguggaaaca

SEQ ID NO: 2308977 - RNA, 19 nt, Homo sapiens
  misc_RNA (1)...(19): siRNA sense strand
gggagguagauauuggaau

SEQ ID NO: 2308978 - RNA, 19 nt, Homo sapiens
  misc_RNA (1)...(19): siRNA sense strand
ugagauuaggcgagaacga

SEQ ID NO: 2308979 - RNA, 19 nt, Homo sapiens
  misc_RNA (1)...(19): siRNA sense strand
cgagaacgagagaggcaga

SEQ ID NO: 2308980 - RNA, 19 nt, Homo sapiens
  misc_RNA (1)...(19): siRNA sense strand
aagccaucaaugaggacaa

SEQ ID NO: 2308981 - RNA, 19 nt, Homo sapiens
  misc_RNA (1)...(19): siRNA sense strand
caucaaggguccugagcug

SEQ ID NO: 2308982 - RNA, 19 nt, Homo sapiens
  misc_RNA (1)...(19): siRNA sense strand
uugccauccucaaggcuaa

SEQ ID NO: 2308983 - RNA, 19 nt, Homo sapiens
  misc_RNA (1)...(19): siRNA sense strand
guaucgacccauccggaaa

SEQ ID NO: 2308984 - RNA, 19 nt, Homo sapiens
  misc_RNA (1)...(19): siRNA sense strand
uggaauuccugaugcuaca

SEQ ID NO: 2308985 - RNA, 19 nt, Homo sapiens
  misc_RNA (1)...(19): siRNA sense strand
ugacacaguggaaggcauu

SEQ ID NO: 2308986 - RNA, 19 nt, Homo sapiens
  misc_RNA (1)...(19): siRNA sense strand
ugguaaucucuucgaggua

SEQ ID NO: 2308987 - RNA, 19 nt, Homo sapiens
  misc_RNA (1)...(19): siRNA sense strand
gcuuugacagggagguaga

SEQ ID NO: 2308988 - RNA, 19 nt, Homo sapiens
  misc_RNA (1)...(19): siRNA sense strand
ggcgagaacgagagaggca

SEQ ID NO: 2308989 - RNA, 19 nt, Homo sapiens
  misc_RNA (1)...(19): siRNA sense strand
ccaacagacccaacagcau

SEQ ID NO: 2308990 - RNA, 19 nt, Homo sapiens
  misc_RNA (1)...(19): siRNA sense strand
gguagaggugccacaggua

SEQ ID NO: 2308991 - RNA, 19 nt, Homo sapiens
  misc_RNA (1)...(19): siRNA sense strand
uugccaaggauguggacuu

SEQ ID NO: 2308992 - RNA, 19 nt, Homo sapiens
  misc_RNA (1)...(19): siRNA sense strand
cagccauggagguagaaga

SEQ ID NO: 2308993 - RNA, 19 nt, Homo sapiens
  misc_RNA (1)...(19): siRNA sense strand
cauugaugacacaguggaa

SEQ ID NO: 2308994 - RNA, 19 nt, Homo sapiens
  misc_RNA (1)...(19): siRNA sense strand
ccuucuucuucuugaucaa

SEQ ID NO: 2308995 - RNA, 19 nt, Homo sapiens
  misc_RNA (1)...(19): siRNA sense strand
gcugaaaggaaagaagaga

SEQ ID NO: 2308996 - RNA, 19 nt, Homo sapiens
  misc_RNA (1)...(19): siRNA sense strand
gcuaaugaaugccaggcca

SEQ ID NO: 2308997 - RNA, 19 nt, Homo sapiens
  misc_RNA (1)...(19): siRNA sense strand
ucgagaucacuuugaagaa

SEQ ID NO: 2308998 - RNA, 19 nt, Homo sapiens
  misc_RNA (1)...(19): siRNA sense strand
cauccggaaaggagacauu

SEQ ID NO: 2308999 - RNA, 19 nt, Homo sapiens
  misc_RNA (1)...(19): siRNA sense strand
gaagaaugcuccugccauc

SEQ ID NO: 2309000 - RNA, 19 nt, Homo sapiens
  misc_RNA (1)...(19): siRNA sense strand
cuucagauccauaccaaga

SEQ ID NO: 2309001 - RNA, 19 nt, Homo sapiens
  misc_RNA (1)...(19): siRNA sense strand
ggccuaaagcagagggcac

SEQ ID NO: 2309002 - RNA, 19 nt, Homo sapiens
  misc_RNA (1)...(19): siRNA sense strand
accuagaggaugagaccau

SEQ ID NO: 2309003 - RNA, 19 nt, Homo sapiens
  misc_RNA (1)...(19): siRNA sense strand
cagagaaaucuuugacaag

SEQ ID NO: 2309004 - RNA, 19 nt, Homo sapiens
  misc_RNA (1)...(19): siRNA sense strand
aacgagagaggcagacaaa

SEQ ID NO: 2309005 - RNA, 19 nt, Homo sapiens
  misc_RNA (1)...(19): siRNA sense strand
cagacaaacccaucagcca

SEQ ID NO: 2309006 - RNA, 19 nt, Homo sapiens
  misc_RNA (1)...(19): siRNA sense strand
ccaaaguggaacaggugaa

SEQ ID NO: 2309007 - RNA, 19 nt, Homo sapiens
  misc_RNA (1)...(19): siRNA sense strand
ccaaaguggacguguucaa

SEQ ID NO: 2309008 - RNA, 19 nt, Homo sapiens
  misc_RNA (1)...(19): siRNA sense strand
aggaauaccucaagaccca

SEQ ID NO: 2309009 - RNA, 19 nt, Homo sapiens
  misc_RNA (1)...(19): siRNA sense strand
ggaaagggaagaaagccaa

SEQ ID NO: 2309010 - RNA, 19 nt, Homo sapiens
  misc_RNA (1)...(19): siRNA sense strand
cgugguggacggagagaau

SEQ ID NO: 2309011 - RNA, 19 nt, Homo sapiens
  misc_RNA (1)...(19): siRNA sense strand
ggaagaaagccaaugagca

SEQ ID NO: 2309012 - RNA, 19 nt, Homo sapiens
  misc_RNA (1)...(19): siRNA sense strand
gaacaagccuguagaggag

SEQ ID NO: 2309013 - RNA, 19 nt, Homo sapiens
  misc_RNA (1)...(19): siRNA sense strand
ucaucaaagccaagcagua

SEQ ID NO: 2309014 - RNA, 19 nt, Homo sapiens
  misc_RNA (1)...(19): siRNA sense strand
ggaaucugguggugaggga

SEQ ID NO: 2309015 - RNA, 19 nt, Homo sapiens
  misc_RNA (1)...(19): siRNA sense strand
augccaacgaggaggagaa

SEQ ID NO: 2309016 - RNA, 19 nt, Homo sapiens
  misc_RNA (1)...(19): siRNA sense strand
cgaacuaacaacuuggaga

SEQ ID NO: 2309017 - RNA, 19 nt, Homo sapiens
  misc_RNA (1)...(19): siRNA sense strand
ggaacgugguagcuggaga

SEQ ID NO: 2309018 - RNA, 19 nt, Homo sapiens
  misc_RNA (1)...(19): siRNA sense strand
gaagaaagccaaugagcag

SEQ ID NO: 2309019 - RNA, 19 nt, Homo sapiens
  misc_RNA (1)...(19): siRNA sense strand
uggaaagggaagaaagcca

SEQ ID NO: 2309020 - RNA, 19 nt, Homo sapiens
  misc_RNA (1)...(19): siRNA sense strand
augucaagggcaagaggaa

SEQ ID NO: 2309021 - RNA, 19 nt, Homo sapiens
  misc_RNA (1)...(19): siRNA sense strand
gaugguagaugaugggagu

SEQ ID NO: 2309022 - RNA, 19 nt, Homo sapiens
  misc_RNA (1)...(19): siRNA sense strand
gcaacgagagcgaggccuu

SEQ ID NO: 2309023 - RNA, 19 nt, Homo sapiens
  misc_RNA (1)...(19): siRNA sense strand
ccagcaggaaggaggaaca

SEQ ID NO: 2309024 - RNA, 19 nt, Homo sapiens
  misc_RNA (1)...(19): siRNA sense strand
ugaaccacgugcugggcaa

SEQ ID NO: 2309025 - RNA, 19 nt, Homo sapiens
  misc_RNA (1)...(19): siRNA sense strand
aagccaaugagcaggagaa

SEQ ID NO: 2309026 - RNA, 19 nt, Homo sapiens
  misc_RNA (1)...(19): siRNA sense strand
gcagaagaugguagaugau

SEQ ID NO: 2309027 - RNA, 19 nt, Homo sapiens
  misc_RNA (1)...(19): siRNA sense strand
caccaagagacuacaggaa

SEQ ID NO: 2309028 - RNA, 19 nt, Homo sapiens
  misc_RNA (1)...(19): siRNA sense strand
ccagaaguacaauggugaa

SEQ ID NO: 2309029 - RNA, 19 nt, Homo sapiens
  misc_RNA (1)...(19): siRNA sense strand
uggaagaggaugauguguu

SEQ ID NO: 2309030 - RNA, 19 nt, Homo sapiens
  misc_RNA (1)...(19): siRNA sense strand
ccaacaacaccaaggccuu

SEQ ID NO: 2309031 - RNA, 19 nt, Homo sapiens
  misc_RNA (1)...(19): siRNA sense strand
ugaacaagccuguagagga

SEQ ID NO: 2309032 - RNA, 19 nt, Homo sapiens
  misc_RNA (1)...(19): siRNA sense strand
ccucgauggaagcaacaaa

SEQ ID NO: 2309033 - RNA, 19 nt, Homo sapiens
  misc_RNA (1)...(19): siRNA sense strand
ccaucauuguggugaagca

SEQ ID NO: 2309034 - RNA, 19 nt, Homo sapiens
  misc_RNA (1)...(19): siRNA sense strand
ggagagaaugaauuggcau

SEQ ID NO: 2309035 - RNA, 19 nt, Homo sapiens
  misc_RNA (1)...(19): siRNA sense strand
caaccggaccucaggccua

SEQ ID NO: 2309036 - RNA, 19 nt, Homo sapiens
  misc_RNA (1)...(19): siRNA sense strand
cgaagcugauggaggugau
